United States Patent Application Publication US 2005/0255487 A1 - sequence listing, part 79

SEQ ID NO: 2170685 - RNA, 19 nt, Homo sapiens
  misc_RNA (1)...(19): siRNA sense strand
aaauuggguugacaaguga

SEQ ID NO: 2170686 - RNA, 19 nt, Homo sapiens
  misc_RNA (1)...(19): siRNA sense strand
ccacgaagaggugaaauug

SEQ ID NO: 2170687 - RNA, 19 nt, Homo sapiens
  misc_RNA (1)...(19): siRNA sense strand
ggcagauacuauggauuua

SEQ ID NO: 2170688 - RNA, 19 nt, Homo sapiens
  misc_RNA (1)...(19): siRNA sense strand
gaguuaaagccaagaagaa

SEQ ID NO: 2170689 - RNA, 19 nt, Homo sapiens
  misc_RNA (1)...(19): siRNA sense strand
cagaagaggacuugucaga

SEQ ID NO: 2170690 - RNA, 19 nt, Homo sapiens
  misc_RNA (1)...(19): siRNA sense strand
caagaagagagacgaaaga

SEQ ID NO: 2170691 - RNA, 19 nt, Homo sapiens
  misc_RNA (1)...(19): siRNA sense strand
gcuagauucugacgaacau

SEQ ID NO: 2170692 - RNA, 19 nt, Homo sapiens
  misc_RNA (1)...(19): siRNA sense strand
gaucuacagugcugaugag

SEQ ID NO: 2170693 - RNA, 19 nt, Homo sapiens
  misc_RNA (1)...(19): siRNA sense strand
uagcaggcaucgcagaaug

SEQ ID NO: 2170694 - RNA, 19 nt, Homo sapiens
  misc_RNA (1)...(19): siRNA sense strand
cagaagcaccuauaauaca

SEQ ID NO: 2170695 - RNA, 19 nt, Homo sapiens
  misc_RNA (1)...(19): siRNA sense strand
agaagcaccuauaauacau

SEQ ID NO: 2170696 - RNA, 19 nt, Homo sapiens
  misc_RNA (1)...(19): siRNA sense strand
gagagacgaaagagagaaa

SEQ ID NO: 2170697 - RNA, 19 nt, Homo sapiens
  misc_RNA (1)...(19): siRNA sense strand
ugaaguauggccaugcuuu

SEQ ID NO: 2170698 - RNA, 19 nt, Homo sapiens
  misc_RNA (1)...(19): siRNA sense strand
caaauguggcagauacuau

SEQ ID NO: 2170699 - RNA, 19 nt, Homo sapiens
  misc_RNA (1)...(19): siRNA sense strand
aagagaaagaugacaagua

SEQ ID NO: 2170700 - RNA, 19 nt, Homo sapiens
  misc_RNA (1)...(19): siRNA sense strand
ggacgugggcgcucuuuac

SEQ ID NO: 2170701 - RNA, 19 nt, Homo sapiens
  misc_RNA (1)...(19): siRNA sense strand
acauaccucucaagaugaa

SEQ ID NO: 2170702 - RNA, 19 nt, Homo sapiens
  misc_RNA (1)...(19): siRNA sense strand
gguuaugucaugaguggua

SEQ ID NO: 2170703 - RNA, 19 nt, Homo sapiens
  misc_RNA (1)...(19): siRNA sense strand
ggaagacuacgagaaggaa

SEQ ID NO: 2170704 - RNA, 19 nt, Homo sapiens
  misc_RNA (1)...(19): siRNA sense strand
gaauaagucgucuaaaaga

SEQ ID NO: 2170705 - RNA, 19 nt, Homo sapiens
  misc_RNA (1)...(19): siRNA sense strand
agagguaacgcaucagaaa

SEQ ID NO: 2170706 - RNA, 19 nt, Homo sapiens
  misc_RNA (1)...(19): siRNA sense strand
aaaguucccucagcuagau

SEQ ID NO: 2170707 - RNA, 19 nt, Homo sapiens
  misc_RNA (1)...(19): siRNA sense strand
caaaguucccucagcuaga

SEQ ID NO: 2170708 - RNA, 19 nt, Homo sapiens
  misc_RNA (1)...(19): siRNA sense strand
guugacaagugaagagauc

SEQ ID NO: 2170709 - RNA, 19 nt, Homo sapiens
  misc_RNA (1)...(19): siRNA sense strand
uaauacauaccucucaaga

SEQ ID NO: 2170710 - RNA, 19 nt, Homo sapiens
  misc_RNA (1)...(19): siRNA sense strand
gacucaagcuguaaagacu

SEQ ID NO: 2170711 - RNA, 19 nt, Homo sapiens
  misc_RNA (1)...(19): siRNA sense strand
gaccucguauaguggauau

SEQ ID NO: 2170712 - RNA, 19 nt, Homo sapiens
  misc_RNA (1)...(19): siRNA sense strand
gagagcucuugcauccuuu

SEQ ID NO: 2170713 - RNA, 19 nt, Homo sapiens
  misc_RNA (1)...(19): siRNA sense strand
uccagugacucaagcugua

SEQ ID NO: 2170714 - RNA, 19 nt, Homo sapiens
  misc_RNA (1)...(19): siRNA sense strand
ccagaagcaccuauaauac

SEQ ID NO: 2170715 - RNA, 19 nt, Homo sapiens
  misc_RNA (1)...(19): siRNA sense strand
ccaaauguggcagauacua

SEQ ID NO: 2170716 - RNA, 19 nt, Homo sapiens
  misc_RNA (1)...(19): siRNA sense strand
guauggccaugcuuugcuu

SEQ ID NO: 2170717 - RNA, 19 nt, Homo sapiens
  misc_RNA (1)...(19): siRNA sense strand
agacgaaagagagaaagua

SEQ ID NO: 2170718 - RNA, 19 nt, Homo sapiens
  misc_RNA (1)...(19): siRNA sense strand
gggccagaagcaccuauaa

SEQ ID NO: 2170719 - RNA, 19 nt, Homo sapiens
  misc_RNA (1)...(19): siRNA sense strand
gagagaggauuggggaauu

SEQ ID NO: 2170720 - RNA, 19 nt, Homo sapiens
  misc_RNA (1)...(19): siRNA sense strand
gaaagagagaaaguaagau

SEQ ID NO: 2170721 - RNA, 19 nt, Homo sapiens
  misc_RNA (1)...(19): siRNA sense strand
cacaaauucugacucugau

SEQ ID NO: 2170722 - RNA, 19 nt, Homo sapiens
  misc_RNA (1)...(19): siRNA sense strand
gcuguaaagacucagaaga

SEQ ID NO: 2170723 - RNA, 19 nt, Homo sapiens
  misc_RNA (1)...(19): siRNA sense strand
uccgagagauggugcacaa

SEQ ID NO: 2170724 - RNA, 19 nt, Homo sapiens
  misc_RNA (1)...(19): siRNA sense strand
aagaagaccagucguucaa

SEQ ID NO: 2170725 - RNA, 19 nt, Homo sapiens
  misc_RNA (1)...(19): siRNA sense strand
gaccagucguucaagaaac

SEQ ID NO: 2170726 - RNA, 19 nt, Homo sapiens
  misc_RNA (1)...(19): siRNA sense strand
gaggacuugucagaagcua

SEQ ID NO: 2170727 - RNA, 19 nt, Homo sapiens
  misc_RNA (1)...(19): siRNA sense strand
gaaggagagagagaggauu

SEQ ID NO: 2170728 - RNA, 19 nt, Homo sapiens
  misc_RNA (1)...(19): siRNA sense strand
aaagaagaccagucguuca

SEQ ID NO: 2170729 - RNA, 19 nt, Homo sapiens
  misc_RNA (1)...(19): siRNA sense strand
ccaagaagagagacgaaag

SEQ ID NO: 2170730 - RNA, 19 nt, Homo sapiens
  misc_RNA (1)...(19): siRNA sense strand
gguagcaggcaucgcagaa

SEQ ID NO: 2170731 - RNA, 19 nt, Homo sapiens
  misc_RNA (1)...(19): siRNA sense strand
agagaucgguucuuuugaa

SEQ ID NO: 2170732 - RNA, 19 nt, Homo sapiens
  misc_RNA (1)...(19): siRNA sense strand
agaccagucguucaagaaa

SEQ ID NO: 2170733 - RNA, 19 nt, Homo sapiens
  misc_RNA (1)...(19): siRNA sense strand
gcucuugcauccuuuaacc

SEQ ID NO: 2170734 - RNA, 19 nt, Homo sapiens
  misc_RNA (1)...(19): siRNA sense strand
cagaauggaggcuguacga

SEQ ID NO: 2170735 - RNA, 19 nt, Homo sapiens
  misc_RNA (1)...(19): siRNA sense strand
ggccagaagcaccuauaau

SEQ ID NO: 2170736 - RNA, 19 nt, Homo sapiens
  misc_RNA (1)...(19): siRNA sense strand
gaauugggagcgccugaag

SEQ ID NO: 2170737 - RNA, 19 nt, Homo sapiens
  misc_RNA (1)...(19): siRNA sense strand
guaucccgguccagcuauu

SEQ ID NO: 2170738 - RNA, 19 nt, Homo sapiens
  misc_RNA (1)...(19): siRNA sense strand
cggugaaggugcagcuaug

SEQ ID NO: 2170739 - RNA, 19 nt, Homo sapiens
  misc_RNA (1)...(19): siRNA sense strand
caaaagagaaagaugacaa

SEQ ID NO: 2170740 - RNA, 19 nt, Homo sapiens
  misc_RNA (1)...(19): siRNA sense strand
ggaauugggagcgccugaa

SEQ ID NO: 2170741 - RNA, 19 nt, Homo sapiens
  misc_RNA (1)...(19): siRNA sense strand
uugcauccuuuaaccaaga

SEQ ID NO: 2170742 - RNA, 19 nt, Homo sapiens
  misc_RNA (1)...(19): siRNA sense strand
gagcucuugcauccuuuaa

SEQ ID NO: 2170743 - RNA, 19 nt, Homo sapiens
  misc_RNA (1)...(19): siRNA sense strand
cagcggaagacuacgagaa

SEQ ID NO: 2170744 - RNA, 19 nt, Homo sapiens
  misc_RNA (1)...(19): siRNA sense strand
augcucagguuaugucaug

SEQ ID NO: 2170745 - RNA, 19 nt, Homo sapiens
  misc_RNA (1)...(19): siRNA sense strand
aaaagcagcaguucagauu

SEQ ID NO: 2170746 - RNA, 19 nt, Homo sapiens
  misc_RNA (1)...(19): siRNA sense strand
gaggugaaauuggguugac

SEQ ID NO: 2170747 - RNA, 19 nt, Homo sapiens
  misc_RNA (1)...(19): siRNA sense strand
agaguuaaagccaagaaga

SEQ ID NO: 2170748 - RNA, 19 nt, Homo sapiens
  misc_RNA (1)...(19): siRNA sense strand
gcauaggaaauauucugau

SEQ ID NO: 2170749 - RNA, 19 nt, Homo sapiens
  misc_RNA (1)...(19): siRNA sense strand
ugaggaugaagaagaggua

SEQ ID NO: 2170750 - RNA, 19 nt, Homo sapiens
  misc_RNA (1)...(19): siRNA sense strand
ggagaaccagaucuacagu

SEQ ID NO: 2170751 - RNA, 19 nt, Homo sapiens
  misc_RNA (1)...(19): siRNA sense strand
ggugaaauuggguugacaa

SEQ ID NO: 2170752 - RNA, 19 nt, Homo sapiens
  misc_RNA (1)...(19): siRNA sense strand
gcuauggcugaguauguaa

SEQ ID NO: 2170753 - RNA, 19 nt, Homo sapiens
  misc_RNA (1)...(19): siRNA sense strand
agcuauggcugaguaugua

SEQ ID NO: 2170754 - RNA, 19 nt, Homo sapiens
  misc_RNA (1)...(19): siRNA sense strand
aaauguggcagauacuaug

SEQ ID NO: 2170755 - RNA, 19 nt, Homo sapiens
  misc_RNA (1)...(19): siRNA sense strand
gcaccuauaauacauaccu

SEQ ID NO: 2170756 - RNA, 19 nt, Homo sapiens
  misc_RNA (1)...(19): siRNA sense strand
gagacgaaagagagaaagu

SEQ ID NO: 2170757 - RNA, 19 nt, Homo sapiens
  misc_RNA (1)...(19): siRNA sense strand
gaucgguucuuuugaaugc

SEQ ID NO: 2170758 - RNA, 19 nt, Homo sapiens
  misc_RNA (1)...(19): siRNA sense strand
caguugaggaugaagaaga

SEQ ID NO: 2170759 - RNA, 19 nt, Homo sapiens
  misc_RNA (1)...(19): siRNA sense strand
gagaucgguucuuuugaau

SEQ ID NO: 2170760 - RNA, 19 nt, Homo sapiens
  misc_RNA (1)...(19): siRNA sense strand
gagaagagguggugacuuu

SEQ ID NO: 2170761 - RNA, 19 nt, Homo sapiens
  misc_RNA (1)...(19): siRNA sense strand
gaacacaguaguaguaaua

SEQ ID NO: 2170762 - RNA, 19 nt, Homo sapiens
  misc_RNA (1)...(19): siRNA sense strand
gcacagguguuaauaguug

SEQ ID NO: 2170763 - RNA, 19 nt, Homo sapiens
  misc_RNA (1)...(19): siRNA sense strand
gaaaugagaagcuaauuga

SEQ ID NO: 2170764 - RNA, 19 nt, Homo sapiens
  misc_RNA (1)...(19): siRNA sense strand
gaggaaacaugaugagauu

SEQ ID NO: 2170765 - RNA, 19 nt, Homo sapiens
  misc_RNA (1)...(19): siRNA sense strand
gcacccagcuucagucuau

SEQ ID NO: 2170766 - RNA, 19 nt, Homo sapiens
  misc_RNA (1)...(19): siRNA sense strand
caaauaacuuguagccuuu

SEQ ID NO: 2170767 - RNA, 19 nt, Homo sapiens
  misc_RNA (1)...(19): siRNA sense strand
gcaggaaguuucuauggaa

SEQ ID NO: 2170768 - RNA, 19 nt, Homo sapiens
  misc_RNA (1)...(19): siRNA sense strand
caagaucucuguacaaagu

SEQ ID NO: 2170769 - RNA, 19 nt, Homo sapiens
  misc_RNA (1)...(19): siRNA sense strand
ugacuuugcuggaagauuu

SEQ ID NO: 2170770 - RNA, 19 nt, Homo sapiens
  misc_RNA (1)...(19): siRNA sense strand
gugagaaacuugagaaaga

SEQ ID NO: 2170771 - RNA, 19 nt, Homo sapiens
  misc_RNA (1)...(19): siRNA sense strand
guagugauauugaagagaa

SEQ ID NO: 2170772 - RNA, 19 nt, Homo sapiens
  misc_RNA (1)...(19): siRNA sense strand
ggagugcccucucaacaug

SEQ ID NO: 2170773 - RNA, 19 nt, Homo sapiens
  misc_RNA (1)...(19): siRNA sense strand
caauagaaguuauccugaa

SEQ ID NO: 2170774 - RNA, 19 nt, Homo sapiens
  misc_RNA (1)...(19): siRNA sense strand
ucagugaacucaguaauau

SEQ ID NO: 2170775 - RNA, 19 nt, Homo sapiens
  misc_RNA (1)...(19): siRNA sense strand
gcaacagacuccaugugaa

SEQ ID NO: 2170776 - RNA, 19 nt, Homo sapiens
  misc_RNA (1)...(19): siRNA sense strand
gaacagacaguagugauau

SEQ ID NO: 2170777 - RNA, 19 nt, Homo sapiens
  misc_RNA (1)...(19): siRNA sense strand
gaaaccagcacaaugaaga

SEQ ID NO: 2170778 - RNA, 19 nt, Homo sapiens
  misc_RNA (1)...(19): siRNA sense strand
cguaggaauuugucuuaua

SEQ ID NO: 2170779 - RNA, 19 nt, Homo sapiens
  misc_RNA (1)...(19): siRNA sense strand
ggaacagacaguagugaua

SEQ ID NO: 2170780 - RNA, 19 nt, Homo sapiens
  misc_RNA (1)...(19): siRNA sense strand
caacagacuccaugugaaa

SEQ ID NO: 2170781 - RNA, 19 nt, Homo sapiens
  misc_RNA (1)...(19): siRNA sense strand
ccaaguagaucuuauagac

SEQ ID NO: 2170782 - RNA, 19 nt, Homo sapiens
  misc_RNA (1)...(19): siRNA sense strand
ggacuuauuugacauucug

SEQ ID NO: 2170783 - RNA, 19 nt, Homo sapiens
  misc_RNA (1)...(19): siRNA sense strand
cacaggaucuuucuacaga

SEQ ID NO: 2170784 - RNA, 19 nt, Homo sapiens
  misc_RNA (1)...(19): siRNA sense strand
ggaaaugagaagcuaauug

SEQ ID NO: 2170785 - RNA, 19 nt, Homo sapiens
  misc_RNA (1)...(19): siRNA sense strand
caagccagguugucaguga

SEQ ID NO: 2170786 - RNA, 19 nt, Homo sapiens
  misc_RNA (1)...(19): siRNA sense strand
uaaggaaguuaguucaaga

SEQ ID NO: 2170787 - RNA, 19 nt, Homo sapiens
  misc_RNA (1)...(19): siRNA sense strand
caaaguaggagacuggaaa

SEQ ID NO: 2170788 - RNA, 19 nt, Homo sapiens
  misc_RNA (1)...(19): siRNA sense strand
gaugcaaacuaacaacuca

SEQ ID NO: 2170789 - RNA, 19 nt, Homo sapiens
  misc_RNA (1)...(19): siRNA sense strand
guaggaauuugucuuauac

SEQ ID NO: 2170790 - RNA, 19 nt, Homo sapiens
  misc_RNA (1)...(19): siRNA sense strand
aaagaaguuugccuguuaa

SEQ ID NO: 2170791 - RNA, 19 nt, Homo sapiens
  misc_RNA (1)...(19): siRNA sense strand
gguauuacuuacacaguga

SEQ ID NO: 2170792 - RNA, 19 nt, Homo sapiens
  misc_RNA (1)...(19): siRNA sense strand
cugaggagcuccagucuug

SEQ ID NO: 2170793 - RNA, 19 nt, Homo sapiens
  misc_RNA (1)...(19): siRNA sense strand
guacucgcauggagaaaga

SEQ ID NO: 2170794 - RNA, 19 nt, Homo sapiens
  misc_RNA (1)...(19): siRNA sense strand
uaauacacaucucagcauu

SEQ ID NO: 2170795 - RNA, 19 nt, Homo sapiens
  misc_RNA (1)...(19): siRNA sense strand
gaagauagaauggaaugug

SEQ ID NO: 2170796 - RNA, 19 nt, Homo sapiens
  misc_RNA (1)...(19): siRNA sense strand
ggaaacaugaugagauuca

SEQ ID NO: 2170797 - RNA, 19 nt, Homo sapiens
  misc_RNA (1)...(19): siRNA sense strand
gaagcuaauugaggcugua

SEQ ID NO: 2170798 - RNA, 19 nt, Homo sapiens
  misc_RNA (1)...(19): siRNA sense strand
gaaacaugaugagauucaa

SEQ ID NO: 2170799 - RNA, 19 nt, Homo sapiens
  misc_RNA (1)...(19): siRNA sense strand
ugagaaagaaccaaaguga

SEQ ID NO: 2170800 - RNA, 19 nt, Homo sapiens
  misc_RNA (1)...(19): siRNA sense strand
gagcagauccuggaauugu

SEQ ID NO: 2170801 - RNA, 19 nt, Homo sapiens
  misc_RNA (1)...(19): siRNA sense strand
gggcuguggucggcaaaua

SEQ ID NO: 2170802 - RNA, 19 nt, Homo sapiens
  misc_RNA (1)...(19): siRNA sense strand
uugaagaaguugcuaguga

SEQ ID NO: 2170803 - RNA, 19 nt, Homo sapiens
  misc_RNA (1)...(19): siRNA sense strand
ugagaaacuugagaaagaa

SEQ ID NO: 2170804 - RNA, 19 nt, Homo sapiens
  misc_RNA (1)...(19): siRNA sense strand
caaugaagaggaaacauga

SEQ ID NO: 2170805 - RNA, 19 nt, Homo sapiens
  misc_RNA (1)...(19): siRNA sense strand
uaugaaaccagcacaauga

SEQ ID NO: 2170806 - RNA, 19 nt, Homo sapiens
  misc_RNA (1)...(19): siRNA sense strand
gauuugauguuauccuugu

SEQ ID NO: 2170807 - RNA, 19 nt, Homo sapiens
  misc_RNA (1)...(19): siRNA sense strand
gauaaaggaagugaaagaa

SEQ ID NO: 2170808 - RNA, 19 nt, Homo sapiens
  misc_RNA (1)...(19): siRNA sense strand
ccacacccacuucaagaua

SEQ ID NO: 2170809 - RNA, 19 nt, Homo sapiens
  misc_RNA (1)...(19): siRNA sense strand
uagaaguuauccugaagaa

SEQ ID NO: 2170810 - RNA, 19 nt, Homo sapiens
  misc_RNA (1)...(19): siRNA sense strand
ggagagggagcuugaugaa

SEQ ID NO: 2170811 - RNA, 19 nt, Homo sapiens
  misc_RNA (1)...(19): siRNA sense strand
gggagauuaucaaaguaaa

SEQ ID NO: 2170812 - RNA, 19 nt, Homo sapiens
  misc_RNA (1)...(19): siRNA sense strand
guuauaaugcuguaucuga

SEQ ID NO: 2170813 - RNA, 19 nt, Homo sapiens
  misc_RNA (1)...(19): siRNA sense strand
aagauagaauggaauguga

SEQ ID NO: 2170814 - RNA, 19 nt, Homo sapiens
  misc_RNA (1)...(19): siRNA sense strand
uauggaagauagaauggaa

SEQ ID NO: 2170815 - RNA, 19 nt, Homo sapiens
  misc_RNA (1)...(19): siRNA sense strand
gcacauaugggcaggaagu

SEQ ID NO: 2170816 - RNA, 19 nt, Homo sapiens
  misc_RNA (1)...(19): siRNA sense strand
gaaugcacagguguuaaua

SEQ ID NO: 2170817 - RNA, 19 nt, Homo sapiens
  misc_RNA (1)...(19): siRNA sense strand
aaacugaggauauccgaaa

SEQ ID NO: 2170818 - RNA, 19 nt, Homo sapiens
  misc_RNA (1)...(19): siRNA sense strand
gaaagaguuacaagcgaaa

SEQ ID NO: 2170819 - RNA, 19 nt, Homo sapiens
  misc_RNA (1)...(19): siRNA sense strand
acaaggaaaugagaagcua

SEQ ID NO: 2170820 - RNA, 19 nt, Homo sapiens
  misc_RNA (1)...(19): siRNA sense strand
ggaagugaaagaagcuaaa

SEQ ID NO: 2170821 - RNA, 19 nt, Homo sapiens
  misc_RNA (1)...(19): siRNA sense strand
gguuggauuugaagaaguu

SEQ ID NO: 2170822 - RNA, 19 nt, Homo sapiens
  misc_RNA (1)...(19): siRNA sense strand
gaugagauucaaagaaguu

SEQ ID NO: 2170823 - RNA, 19 nt, Homo sapiens
  misc_RNA (1)...(19): siRNA sense strand
agacaguagugauauugaa

SEQ ID NO: 2170824 - RNA, 19 nt, Homo sapiens
  misc_RNA (1)...(19): siRNA sense strand
gaaguuauaaugcuguauc

SEQ ID NO: 2170825 - RNA, 19 nt, Homo sapiens
  misc_RNA (1)...(19): siRNA sense strand
gcagaaauugaaccagaaa

SEQ ID NO: 2170826 - RNA, 19 nt, Homo sapiens
  misc_RNA (1)...(19): siRNA sense strand
ggcaggaaguuucuaugga

SEQ ID NO: 2170827 - RNA, 19 nt, Homo sapiens
  misc_RNA (1)...(19): siRNA sense strand
aaagaccacuucuccuuca

SEQ ID NO: 2170828 - RNA, 19 nt, Homo sapiens
  misc_RNA (1)...(19): siRNA sense strand
aaagaaugcacagguguua

SEQ ID NO: 2170829 - RNA, 19 nt, Homo sapiens
  misc_RNA (1)...(19): siRNA sense strand
ucuccuggaugcaaacuaa

SEQ ID NO: 2170830 - RNA, 19 nt, Homo sapiens
  misc_RNA (1)...(19): siRNA sense strand
uuauagacaugcaguugaa

SEQ ID NO: 2170831 - RNA, 19 nt, Homo sapiens
  misc_RNA (1)...(19): siRNA sense strand
uuagcaagguuacuggaaa

SEQ ID NO: 2170832 - RNA, 19 nt, Homo sapiens
  misc_RNA (1)...(19): siRNA sense strand
ugaaagaccacuucuccuu

SEQ ID NO: 2170833 - RNA, 19 nt, Homo sapiens
  misc_RNA (1)...(19): siRNA sense strand
aaucagcccuaucacagaa

SEQ ID NO: 2170834 - RNA, 19 nt, Homo sapiens
  misc_RNA (1)...(19): siRNA sense strand
acacagugaggacuuauuu

SEQ ID NO: 2170835 - RNA, 19 nt, Homo sapiens
  misc_RNA (1)...(19): siRNA sense strand
gugauaaccucaguagcuu

SEQ ID NO: 2170836 - RNA, 19 nt, Homo sapiens
  misc_RNA (1)...(19): siRNA sense strand
ccaguguccuacaaucuga

SEQ ID NO: 2170837 - RNA, 19 nt, Homo sapiens
  misc_RNA (1)...(19): siRNA sense strand
gaacaucacaaaagaaguu

SEQ ID NO: 2170838 - RNA, 19 nt, Homo sapiens
  misc_RNA (1)...(19): siRNA sense strand
ggagcuugaugaaccuaga

SEQ ID NO: 2170839 - RNA, 19 nt, Homo sapiens
  misc_RNA (1)...(19): siRNA sense strand
cuucauauauugaguuugg

SEQ ID NO: 2170840 - RNA, 19 nt, Homo sapiens
  misc_RNA (1)...(19): siRNA sense strand
aaagaguucaugcuaguuu

SEQ ID NO: 2170841 - RNA, 19 nt, Homo sapiens
  misc_RNA (1)...(19): siRNA sense strand
uaagagcccaguaugaaga

SEQ ID NO: 2170842 - RNA, 19 nt, Homo sapiens
  misc_RNA (1)...(19): siRNA sense strand
cagaacaaacugaggauau

SEQ ID NO: 2170843 - RNA, 19 nt, Homo sapiens
  misc_RNA (1)...(19): siRNA sense strand
gcacaugcucuuuuagaua

SEQ ID NO: 2170844 - RNA, 19 nt, Homo sapiens
  misc_RNA (1)...(19): siRNA sense strand
gaaguugcacaugcucuuu

SEQ ID NO: 2170845 - RNA, 19 nt, Homo sapiens
  misc_RNA (1)...(19): siRNA sense strand
caagcgaaauacaagaaca

SEQ ID NO: 2170846 - RNA, 19 nt, Homo sapiens
  misc_RNA (1)...(19): siRNA sense strand
cacacccacuucaagauaa

SEQ ID NO: 2170847 - RNA, 19 nt, Homo sapiens
  misc_RNA (1)...(19): siRNA sense strand
gaaauacaagaacaucaca

SEQ ID NO: 2170848 - RNA, 19 nt, Homo sapiens
  misc_RNA (1)...(19): siRNA sense strand
gcagaacaaacugaggaua

SEQ ID NO: 2170849 - RNA, 19 nt, Homo sapiens
  misc_RNA (1)...(19): siRNA sense strand
uguaaaccaugccaacaga

SEQ ID NO: 2170850 - RNA, 19 nt, Homo sapiens
  misc_RNA (1)...(19): siRNA sense strand
gggcacauaugggcaggaa

SEQ ID NO: 2170851 - RNA, 19 nt, Homo sapiens
  misc_RNA (1)...(19): siRNA sense strand
uggccaggcuccagaagaa

SEQ ID NO: 2170852 - RNA, 19 nt, Homo sapiens
  misc_RNA (1)...(19): siRNA sense strand
gucagugaacucaguaaua

SEQ ID NO: 2170853 - RNA, 19 nt, Homo sapiens
  misc_RNA (1)...(19): siRNA sense strand
gcagauccuggaauuguug

SEQ ID NO: 2170854 - RNA, 19 nt, Homo sapiens
  misc_RNA (1)...(19): siRNA sense strand
uaauugaggcuguaaaugg

SEQ ID NO: 2170855 - RNA, 19 nt, Homo sapiens
  misc_RNA (1)...(19): siRNA sense strand
cuaaugaagcagaaauuga

SEQ ID NO: 2170856 - RNA, 19 nt, Homo sapiens
  misc_RNA (1)...(19): siRNA sense strand
guugauaaaggaagugaaa

SEQ ID NO: 2170857 - RNA, 19 nt, Homo sapiens
  misc_RNA (1)...(19): siRNA sense strand
gaugccaccuggaugaaag

SEQ ID NO: 2170858 - RNA, 19 nt, Homo sapiens
  misc_RNA (1)...(19): siRNA sense strand
caaaagaguucaugcuagu

SEQ ID NO: 2170859 - RNA, 19 nt, Homo sapiens
  misc_RNA (1)...(19): siRNA sense strand
uaaaccaugccaacagaaa

SEQ ID NO: 2170860 - RNA, 19 nt, Homo sapiens
  misc_RNA (1)...(19): siRNA sense strand
agacauagcuauagaauuc

SEQ ID NO: 2170861 - RNA, 19 nt, Homo sapiens
  misc_RNA (1)...(19): siRNA sense strand
cuacaaaugugaagaaugu

SEQ ID NO: 2170862 - RNA, 19 nt, Homo sapiens
  misc_RNA (1)...(19): siRNA sense strand
cuacaaaugugaagaaugu

SEQ ID NO: 2170863 - RNA, 19 nt, Homo sapiens
  misc_RNA (1)...(19): siRNA sense strand
cuacaaaugugaagaaugu

SEQ ID NO: 2170864 - RNA, 19 nt, Homo sapiens
  misc_RNA (1)...(19): siRNA sense strand
caucaaagauucacuccaa

SEQ ID NO: 2170865 - RNA, 19 nt, Homo sapiens
  misc_RNA (1)...(19): siRNA sense strand
caagggagguuauagugaa

SEQ ID NO: 2170866 - RNA, 19 nt, Homo sapiens
  misc_RNA (1)...(19): siRNA sense strand
gagagaaacccuacaaaug

SEQ ID NO: 2170867 - RNA, 19 nt, Homo sapiens
  misc_RNA (1)...(19): siRNA sense strand
gagagaaacccuacaaaug

SEQ ID NO: 2170868 - RNA, 19 nt, Homo sapiens
  misc_RNA (1)...(19): siRNA sense strand
caacaucagguaauucaua

SEQ ID NO: 2170869 - RNA, 19 nt, Homo sapiens
  misc_RNA (1)...(19): siRNA sense strand
agacauaggagaauucaua

SEQ ID NO: 2170870 - RNA, 19 nt, Homo sapiens
  misc_RNA (1)...(19): siRNA sense strand
aauaaagagucccagaaua

SEQ ID NO: 2170871 - RNA, 19 nt, Homo sapiens
  misc_RNA (1)...(19): siRNA sense strand
ggagagagacccuacaaau

SEQ ID NO: 2170872 - RNA, 19 nt, Homo sapiens
  misc_RNA (1)...(19): siRNA sense strand
ggagagagacccuacaaau

SEQ ID NO: 2170873 - RNA, 19 nt, Homo sapiens
  misc_RNA (1)...(19): siRNA sense strand
ggagagagacccuacaaau

SEQ ID NO: 2170874 - RNA, 19 nt, Homo sapiens
  misc_RNA (1)...(19): siRNA sense strand
gagcagggcaucaaagauu

SEQ ID NO: 2170875 - RNA, 19 nt, Homo sapiens
  misc_RNA (1)...(19): siRNA sense strand
aaagagaaaugagauggua

SEQ ID NO: 2170876 - RNA, 19 nt, Homo sapiens
  misc_RNA (1)...(19): siRNA sense strand
gaauguggcaaauccuuua

SEQ ID NO: 2170877 - RNA, 19 nt, Homo sapiens
  misc_RNA (1)...(19): siRNA sense strand
gagaaacccuacaaaugug

SEQ ID NO: 2170878 - RNA, 19 nt, Homo sapiens
  misc_RNA (1)...(19): siRNA sense strand
gagaaacccuacaaaugug

SEQ ID NO: 2170879 - RNA, 19 nt, Homo sapiens
  misc_RNA (1)...(19): siRNA sense strand
cuacaaaugugaagagugu

SEQ ID NO: 2170880 - RNA, 19 nt, Homo sapiens
  misc_RNA (1)...(19): siRNA sense strand
gagaugugauguuagagaa

SEQ ID NO: 2170881 - RNA, 19 nt, Homo sapiens
  misc_RNA (1)...(19): siRNA sense strand
ggagagaaaccauauagau

SEQ ID NO: 2170882 - RNA, 19 nt, Homo sapiens
  misc_RNA (1)...(19): siRNA sense strand
gagagaaacccuacacaug

SEQ ID NO: 2170883 - RNA, 19 nt, Homo sapiens
  misc_RNA (1)...(19): siRNA sense strand
gagaaacccuacacaugug

SEQ ID NO: 2170884 - RNA, 19 nt, Homo sapiens
  misc_RNA (1)...(19): siRNA sense strand
ggagagaaacccuacaaau

SEQ ID NO: 2170885 - RNA, 19 nt, Homo sapiens
  misc_RNA (1)...(19): siRNA sense strand
ggagagaaacccuacaaau

SEQ ID NO: 2170886 - RNA, 19 nt, Homo sapiens
  misc_RNA (1)...(19): siRNA sense strand
uaaagagucccagaauaua

SEQ ID NO: 2170887 - RNA, 19 nt, Homo sapiens
  misc_RNA (1)...(19): siRNA sense strand
gagagaaaccauauagaug

SEQ ID NO: 2170888 - RNA, 19 nt, Homo sapiens
  misc_RNA (1)...(19): siRNA sense strand
gagagagacccuacaaaug

SEQ ID NO: 2170889 - RNA, 19 nt, Homo sapiens
  misc_RNA (1)...(19): siRNA sense strand
gagagagacccuacaaaug

SEQ ID NO: 2170890 - RNA, 19 nt, Homo sapiens
  misc_RNA (1)...(19): siRNA sense strand
gagagagacccuacaaaug

SEQ ID NO: 2170891 - RNA, 19 nt, Homo sapiens
  misc_RNA (1)...(19): siRNA sense strand
caaagaauguggcaaaucc

SEQ ID NO: 2170892 - RNA, 19 nt, Homo sapiens
  misc_RNA (1)...(19): siRNA sense strand
gaauguggccaagacuuua

SEQ ID NO: 2170893 - RNA, 19 nt, Homo sapiens
  misc_RNA (1)...(19): siRNA sense strand
gagaaaccauauagaugug

SEQ ID NO: 2170894 - RNA, 19 nt, Homo sapiens
  misc_RNA (1)...(19): siRNA sense strand
caaaccauacuacacauaa

SEQ ID NO: 2170895 - RNA, 19 nt, Homo sapiens
  misc_RNA (1)...(19): siRNA sense strand
gaauguggccaagccuuua

SEQ ID NO: 2170896 - RNA, 19 nt, Homo sapiens
  misc_RNA (1)...(19): siRNA sense strand
ucagagacauagcuauaga

SEQ ID NO: 2170897 - RNA, 19 nt, Homo sapiens
  misc_RNA (1)...(19): siRNA sense strand
gagagacccuacaaaugug

SEQ ID NO: 2170898 - RNA, 19 nt, Homo sapiens
  misc_RNA (1)...(19): siRNA sense strand
gagagacccuacaaaugug

SEQ ID NO: 2170899 - RNA, 19 nt, Homo sapiens
  misc_RNA (1)...(19): siRNA sense strand
gaaaugggacuguugacau

SEQ ID NO: 2170900 - RNA, 19 nt, Homo sapiens
  misc_RNA (1)...(19): siRNA sense strand
gaauguggccaagccuuua

SEQ ID NO: 2170901 - RNA, 19 nt, Homo sapiens
  misc_RNA (1)...(19): siRNA sense strand
gagagacccuacaaaugug

SEQ ID NO: 2170902 - RNA, 19 nt, Homo sapiens
  misc_RNA (1)...(19): siRNA sense strand
gaccacaagagaauucaua

SEQ ID NO: 2170903 - RNA, 19 nt, Homo sapiens
  misc_RNA (1)...(19): siRNA sense strand
agagaaacccuacaaaugu

SEQ ID NO: 2170904 - RNA, 19 nt, Homo sapiens
  misc_RNA (1)...(19): siRNA sense strand
gugcucagcggaauuuaua

SEQ ID NO: 2170905 - RNA, 19 nt, Homo sapiens
  misc_RNA (1)...(19): siRNA sense strand
agagaaacccuacaaaugu

SEQ ID NO: 2170906 - RNA, 19 nt, Homo sapiens
  misc_RNA (1)...(19): siRNA sense strand
gcucagcggaauuuauaua

SEQ ID NO: 2170907 - RNA, 19 nt, Homo sapiens
  misc_RNA (1)...(19): siRNA sense strand
gaccacaagagaauucaua

SEQ ID NO: 2170908 - RNA, 19 nt, Homo sapiens
  misc_RNA (1)...(19): siRNA sense strand
gaccacaagagaauucaua

SEQ ID NO: 2170909 - RNA, 19 nt, Homo sapiens
  misc_RNA (1)...(19): siRNA sense strand
ggagaaguccuacaaaugc

SEQ ID NO: 2170910 - RNA, 19 nt, Homo sapiens
  misc_RNA (1)...(19): siRNA sense strand
gaaacccuaugccugugaa

SEQ ID NO: 2170911 - RNA, 19 nt, Homo sapiens
  misc_RNA (1)...(19): siRNA sense strand
gagguuauagugaaguuaa

SEQ ID NO: 2170912 - RNA, 19 nt, Homo sapiens
  misc_RNA (1)...(19): siRNA sense strand
gagagacccuacacaugug

SEQ ID NO: 2170913 - RNA, 19 nt, Homo sapiens
  misc_RNA (1)...(19): siRNA sense strand
auagagaugugauguuaga

SEQ ID NO: 2170914 - RNA, 19 nt, Homo sapiens
  misc_RNA (1)...(19): siRNA sense strand
ggagagagacccuacacau

SEQ ID NO: 2170915 - RNA, 19 nt, Homo sapiens
  misc_RNA (1)...(19): siRNA sense strand
agagagacccuacaaaugu

SEQ ID NO: 2170916 - RNA, 19 nt, Homo sapiens
  misc_RNA (1)...(19): siRNA sense strand
agagagacccuacaaaugu

SEQ ID NO: 2170917 - RNA, 19 nt, Homo sapiens
  misc_RNA (1)...(19): siRNA sense strand
ccucgaaccuuaugagaca

SEQ ID NO: 2170918 - RNA, 19 nt, Homo sapiens
  misc_RNA (1)...(19): siRNA sense strand
agagagacccuacaaaugu

SEQ ID NO: 2170919 - RNA, 19 nt, Homo sapiens
  misc_RNA (1)...(19): siRNA sense strand
aaagagucccagaauauaa

SEQ ID NO: 2170920 - RNA, 19 nt, Homo sapiens
  misc_RNA (1)...(19): siRNA sense strand
gagagagacccuacacaug

SEQ ID NO: 2170921 - RNA, 19 nt, Homo sapiens
  misc_RNA (1)...(19): siRNA sense strand
gggagaaguccuacaaaug

SEQ ID NO: 2170922 - RNA, 19 nt, Homo sapiens
  misc_RNA (1)...(19): siRNA sense strand
auaaagagucccagaauau

SEQ ID NO: 2170923 - RNA, 19 nt, Homo sapiens
  misc_RNA (1)...(19): siRNA sense strand
ccucaacccuuaugcaaca

SEQ ID NO: 2170924 - RNA, 19 nt, Homo sapiens
  misc_RNA (1)...(19): siRNA sense strand
cuacacgugugaagaaugu

SEQ ID NO: 2170925 - RNA, 19 nt, Homo sapiens
  misc_RNA (1)...(19): siRNA sense strand
gcacaagggagguuauagu

SEQ ID NO: 2170926 - RNA, 19 nt, Homo sapiens
  misc_RNA (1)...(19): siRNA sense strand
gcacuuacuauccacaaga

SEQ ID NO: 2170927 - RNA, 19 nt, Homo sapiens
  misc_RNA (1)...(19): siRNA sense strand
ccauauagaugugaggaau

SEQ ID NO: 2170928 - RNA, 19 nt, Homo sapiens
  misc_RNA (1)...(19): siRNA sense strand
cauaagagaauucauacug

SEQ ID NO: 2170929 - RNA, 19 nt, Homo sapiens
  misc_RNA (1)...(19): siRNA sense strand
ggacaugagaaauuacaau

SEQ ID NO: 2170930 - RNA, 19 nt, Homo sapiens
  misc_RNA (1)...(19): siRNA sense strand
gccuuuagcuggucugcaa

SEQ ID NO: 2170931 - RNA, 19 nt, Homo sapiens
  misc_RNA (1)...(19): siRNA sense strand
cuacaaaugcaaagaaugu

SEQ ID NO: 2170932 - RNA, 19 nt, Homo sapiens
  misc_RNA (1)...(19): siRNA sense strand
gagaaguccuacaaaugca

SEQ ID NO: 2170933 - RNA, 19 nt, Homo sapiens
  misc_RNA (1)...(19): siRNA sense strand
caucagguaauucauacua

SEQ ID NO: 2170934 - RNA, 19 nt, Homo sapiens
  misc_RNA (1)...(19): siRNA sense strand
gccuuuagcuuauccucaa

SEQ ID NO: 2170935 - RNA, 19 nt, Homo sapiens
  misc_RNA (1)...(19): siRNA sense strand
agagaaacccuacacaugu

SEQ ID NO: 2170936 - RNA, 19 nt, Homo sapiens
  misc_RNA (1)...(19): siRNA sense strand
ggagagaaacccuacacau

SEQ ID NO: 2170937 - RNA, 19 nt, Homo sapiens
  misc_RNA (1)...(19): siRNA sense strand
cccagaauauaaagagaaa

SEQ ID NO: 2170938 - RNA, 19 nt, Homo sapiens
  misc_RNA (1)...(19): siRNA sense strand
agaauucucucuggaggaa

SEQ ID NO: 2170939 - RNA, 19 nt, Homo sapiens
  misc_RNA (1)...(19): siRNA sense strand
cagcggaauuuauauagag

SEQ ID NO: 2170940 - RNA, 19 nt, Homo sapiens
  misc_RNA (1)...(19): siRNA sense strand
agagaaaccauauagaugu

SEQ ID NO: 2170941 - RNA, 19 nt, Homo sapiens
  misc_RNA (1)...(19): siRNA sense strand
gauguuagagaacuacaga

SEQ ID NO: 2170942 - RNA, 19 nt, Homo sapiens
  misc_RNA (1)...(19): siRNA sense strand
agagagacccuacacaugu

SEQ ID NO: 2170943 - RNA, 19 nt, Homo sapiens
  misc_RNA (1)...(19): siRNA sense strand
ugaagaguguggcaaaguc

SEQ ID NO: 2170944 - RNA, 19 nt, Homo sapiens
  misc_RNA (1)...(19): siRNA sense strand
ugaagaauguggccaagac

SEQ ID NO: 2170945 - RNA, 19 nt, Homo sapiens
  misc_RNA (1)...(19): siRNA sense strand
ccucagcacuuacuaacca

SEQ ID NO: 2170946 - RNA, 19 nt, Homo sapiens
  misc_RNA (1)...(19): siRNA sense strand
cuaaaucaacaucagguaa

SEQ ID NO: 2170947 - RNA, 19 nt, Homo sapiens
  misc_RNA (1)...(19): siRNA sense strand
uaaguggcauucaagucuu

SEQ ID NO: 2170948 - RNA, 19 nt, Homo sapiens
  misc_RNA (1)...(19): siRNA sense strand
ucacugaccacaagagaau

SEQ ID NO: 2170949 - RNA, 19 nt, Homo sapiens
  misc_RNA (1)...(19): siRNA sense strand
ucacugaccacaagagaau

SEQ ID NO: 2170950 - RNA, 19 nt, Homo sapiens
  misc_RNA (1)...(19): siRNA sense strand
ucacugaccacaagagaau

SEQ ID NO: 2170951 - RNA, 19 nt, Homo sapiens
  misc_RNA (1)...(19): siRNA sense strand
gcaaagaauguggcaaauc

SEQ ID NO: 2170952 - RNA, 19 nt, Homo sapiens
  misc_RNA (1)...(19): siRNA sense strand
guaauaccaagaacauaug

SEQ ID NO: 2170953 - RNA, 19 nt, Homo sapiens
  misc_RNA (1)...(19): siRNA sense strand
cgagaaaugggacuguuga

SEQ ID NO: 2170954 - RNA, 19 nt, Homo sapiens
  misc_RNA (1)...(19): siRNA sense strand
ucagcggaauuuauauaga

SEQ ID NO: 2170955 - RNA, 19 nt, Homo sapiens
  misc_RNA (1)...(19): siRNA sense strand
gggagguuauagugaaguu

SEQ ID NO: 2170956 - RNA, 19 nt, Homo sapiens
  misc_RNA (1)...(19): siRNA sense strand
gaaguccuacaaaugcaaa

SEQ ID NO: 2170957 - RNA, 19 nt, Homo sapiens
  misc_RNA (1)...(19): siRNA sense strand
gccuuuagcugguccucaa

SEQ ID NO: 2170958 - RNA, 19 nt, Homo sapiens
  misc_RNA (1)...(19): siRNA sense strand
gcacuuacuaaccacaaga

SEQ ID NO: 2170959 - RNA, 19 nt, Homo sapiens
  misc_RNA (1)...(19): siRNA sense strand
gaauucauacuagagagaa

SEQ ID NO: 2170960 - RNA, 19 nt, Homo sapiens
  misc_RNA (1)...(19): siRNA sense strand
agacauagcuauagaauuc

SEQ ID NO: 2170961 - RNA, 19 nt, Homo sapiens
  misc_RNA (1)...(19): siRNA sense strand
cuacaaaugugaagaaugu

SEQ ID NO: 2170962 - RNA, 19 nt, Homo sapiens
  misc_RNA (1)...(19): siRNA sense strand
cuacaaaugugaagaaugu

SEQ ID NO: 2170963 - RNA, 19 nt, Homo sapiens
  misc_RNA (1)...(19): siRNA sense strand
cuacaaaugugaagaaugu

SEQ ID NO: 2170964 - RNA, 19 nt, Homo sapiens
  misc_RNA (1)...(19): siRNA sense strand
caucaaagauucacuccaa

SEQ ID NO: 2170965 - RNA, 19 nt, Homo sapiens
  misc_RNA (1)...(19): siRNA sense strand
caagggagguuauagugaa

SEQ ID NO: 2170966 - RNA, 19 nt, Homo sapiens
  misc_RNA (1)...(19): siRNA sense strand
gagagaaacccuacaaaug

SEQ ID NO: 2170967 - RNA, 19 nt, Homo sapiens
  misc_RNA (1)...(19): siRNA sense strand
gagagaaacccuacaaaug

SEQ ID NO: 2170968 - RNA, 19 nt, Homo sapiens
  misc_RNA (1)...(19): siRNA sense strand
caacaucagguaauucaua

SEQ ID NO: 2170969 - RNA, 19 nt, Homo sapiens
  misc_RNA (1)...(19): siRNA sense strand
agacauaggagaauucaua

SEQ ID NO: 2170970 - RNA, 19 nt, Homo sapiens
  misc_RNA (1)...(19): siRNA sense strand
aauaaagagucccagaaua

SEQ ID NO: 2170971 - RNA, 19 nt, Homo sapiens
  misc_RNA (1)...(19): siRNA sense strand
ggagagagacccuacaaau

SEQ ID NO: 2170972 - RNA, 19 nt, Homo sapiens
  misc_RNA (1)...(19): siRNA sense strand
ggagagagacccuacaaau

SEQ ID NO: 2170973 - RNA, 19 nt, Homo sapiens
  misc_RNA (1)...(19): siRNA sense strand
ggagagagacccuacaaau

SEQ ID NO: 2170974 - RNA, 19 nt, Homo sapiens
  misc_RNA (1)...(19): siRNA sense strand
gagcagggcaucaaagauu

SEQ ID NO: 2170975 - RNA, 19 nt, Homo sapiens
  misc_RNA (1)...(19): siRNA sense strand
aaagagaaaugagauggua

SEQ ID NO: 2170976 - RNA, 19 nt, Homo sapiens
  misc_RNA (1)...(19): siRNA sense strand
gaauguggcaaauccuuua

SEQ ID NO: 2170977 - RNA, 19 nt, Homo sapiens
  misc_RNA (1)...(19): siRNA sense strand
gagaaacccuacaaaugug

SEQ ID NO: 2170978 - RNA, 19 nt, Homo sapiens
  misc_RNA (1)...(19): siRNA sense strand
gagaaacccuacaaaugug

SEQ ID NO: 2170979 - RNA, 19 nt, Homo sapiens
  misc_RNA (1)...(19): siRNA sense strand
cuacaaaugugaagagugu

SEQ ID NO: 2170980 - RNA, 19 nt, Homo sapiens
  misc_RNA (1)...(19): siRNA sense strand
gagaugugauguuagagaa

SEQ ID NO: 2170981 - RNA, 19 nt, Homo sapiens
  misc_RNA (1)...(19): siRNA sense strand
ggagagaaaccauauagau

SEQ ID NO: 2170982 - RNA, 19 nt, Homo sapiens
  misc_RNA (1)...(19): siRNA sense strand
gagagaaacccuacacaug

SEQ ID NO: 2170983 - RNA, 19 nt, Homo sapiens
  misc_RNA (1)...(19): siRNA sense strand
gagaaacccuacacaugug

SEQ ID NO: 2170984 - RNA, 19 nt, Homo sapiens
  misc_RNA (1)...(19): siRNA sense strand
ggagagaaacccuacaaau

SEQ ID NO: 2170985 - RNA, 19 nt, Homo sapiens
  misc_RNA (1)...(19): siRNA sense strand
ggagagaaacccuacaaau

SEQ ID NO: 2170986 - RNA, 19 nt, Homo sapiens
  misc_RNA (1)...(19): siRNA sense strand
uaaagagucccagaauaua

SEQ ID NO: 2170987 - RNA, 19 nt, Homo sapiens
  misc_RNA (1)...(19): siRNA sense strand
gagagaaaccauauagaug

SEQ ID NO: 2170988 - RNA, 19 nt, Homo sapiens
  misc_RNA (1)...(19): siRNA sense strand
gagagagacccuacaaaug

SEQ ID NO: 2170989 - RNA, 19 nt, Homo sapiens
  misc_RNA (1)...(19): siRNA sense strand
gagagagacccuacaaaug

SEQ ID NO: 2170990 - RNA, 19 nt, Homo sapiens
  misc_RNA (1)...(19): siRNA sense strand
gagagagacccuacaaaug

SEQ ID NO: 2170991 - RNA, 19 nt, Homo sapiens
  misc_RNA (1)...(19): siRNA sense strand
caaagaauguggcaaaucc

SEQ ID NO: 2170992 - RNA, 19 nt, Homo sapiens
  misc_RNA (1)...(19): siRNA sense strand
gaauguggccaagacuuua

SEQ ID NO: 2170993 - RNA, 19 nt, Homo sapiens
  misc_RNA (1)...(19): siRNA sense strand
gagaaaccauauagaugug

SEQ ID NO: 2170994 - RNA, 19 nt, Homo sapiens
  misc_RNA (1)...(19): siRNA sense strand
caaaccauacuacacauaa

SEQ ID NO: 2170995 - RNA, 19 nt, Homo sapiens
  misc_RNA (1)...(19): siRNA sense strand
gaauguggccaagccuuua

SEQ ID NO: 2170996 - RNA, 19 nt, Homo sapiens
  misc_RNA (1)...(19): siRNA sense strand
ucagagacauagcuauaga

SEQ ID NO: 2170997 - RNA, 19 nt, Homo sapiens
  misc_RNA (1)...(19): siRNA sense strand
gagagacccuacaaaugug

SEQ ID NO: 2170998 - RNA, 19 nt, Homo sapiens
  misc_RNA (1)...(19): siRNA sense strand
gagagacccuacaaaugug

SEQ ID NO: 2170999 - RNA, 19 nt, Homo sapiens
  misc_RNA (1)...(19): siRNA sense strand
gaaaugggacuguugacau

SEQ ID NO: 2171000 - RNA, 19 nt, Homo sapiens
  misc_RNA (1)...(19): siRNA sense strand
gaauguggccaagccuuua

SEQ ID NO: 2171001 - RNA, 19 nt, Homo sapiens
  misc_RNA (1)...(19): siRNA sense strand
gagagacccuacaaaugug

SEQ ID NO: 2171002 - RNA, 19 nt, Homo sapiens
  misc_RNA (1)...(19): siRNA sense strand
gaccacaagagaauucaua

SEQ ID NO: 2171003 - RNA, 19 nt, Homo sapiens
  misc_RNA (1)...(19): siRNA sense strand
agagaaacccuacaaaugu

SEQ ID NO: 2171004 - RNA, 19 nt, Homo sapiens
  misc_RNA (1)...(19): siRNA sense strand
gugcucagcggaauuuaua

SEQ ID NO: 2171005 - RNA, 19 nt, Homo sapiens
  misc_RNA (1)...(19): siRNA sense strand
agagaaacccuacaaaugu

SEQ ID NO: 2171006 - RNA, 19 nt, Homo sapiens
  misc_RNA (1)...(19): siRNA sense strand
gcucagcggaauuuauaua

SEQ ID NO: 2171007 - RNA, 19 nt, Homo sapiens
  misc_RNA (1)...(19): siRNA sense strand
gaccacaagagaauucaua

SEQ ID NO: 2171008 - RNA, 19 nt, Homo sapiens
  misc_RNA (1)...(19): siRNA sense strand
gaccacaagagaauucaua

SEQ ID NO: 2171009 - RNA, 19 nt, Homo sapiens
  misc_RNA (1)...(19): siRNA sense strand
ggagaaguccuacaaaugc

SEQ ID NO: 2171010 - RNA, 19 nt, Homo sapiens
  misc_RNA (1)...(19): siRNA sense strand
gaaacccuaugccugugaa

SEQ ID NO: 2171011 - RNA, 19 nt, Homo sapiens
  misc_RNA (1)...(19): siRNA sense strand
gagguuauagugaaguuaa

SEQ ID NO: 2171012 - RNA, 19 nt, Homo sapiens
  misc_RNA (1)...(19): siRNA sense strand
gagagacccuacacaugug

SEQ ID NO: 2171013 - RNA, 19 nt, Homo sapiens
  misc_RNA (1)...(19): siRNA sense strand
auagagaugugauguuaga

SEQ ID NO: 2171014 - RNA, 19 nt, Homo sapiens
  misc_RNA (1)...(19): siRNA sense strand
ggagagagacccuacacau

SEQ ID NO: 2171015 - RNA, 19 nt, Homo sapiens
  misc_RNA (1)...(19): siRNA sense strand
agagagacccuacaaaugu

SEQ ID NO: 2171016 - RNA, 19 nt, Homo sapiens
  misc_RNA (1)...(19): siRNA sense strand
agagagacccuacaaaugu

SEQ ID NO: 2171017 - RNA, 19 nt, Homo sapiens
  misc_RNA (1)...(19): siRNA sense strand
ccucgaaccuuaugagaca

SEQ ID NO: 2171018 - RNA, 19 nt, Homo sapiens
  misc_RNA (1)...(19): siRNA sense strand
agagagacccuacaaaugu

SEQ ID NO: 2171019 - RNA, 19 nt, Homo sapiens
  misc_RNA (1)...(19): siRNA sense strand
aaagagucccagaauauaa

SEQ ID NO: 2171020 - RNA, 19 nt, Homo sapiens
  misc_RNA (1)...(19): siRNA sense strand
gagagagacccuacacaug

SEQ ID NO: 2171021 - RNA, 19 nt, Homo sapiens
  misc_RNA (1)...(19): siRNA sense strand
gggagaaguccuacaaaug

SEQ ID NO: 2171022 - RNA, 19 nt, Homo sapiens
  misc_RNA (1)...(19): siRNA sense strand
auaaagagucccagaauau

SEQ ID NO: 2171023 - RNA, 19 nt, Homo sapiens
  misc_RNA (1)...(19): siRNA sense strand
ccucaacccuuaugcaaca

SEQ ID NO: 2171024 - RNA, 19 nt, Homo sapiens
  misc_RNA (1)...(19): siRNA sense strand
cuacacgugugaagaaugu

SEQ ID NO: 2171025 - RNA, 19 nt, Homo sapiens
  misc_RNA (1)...(19): siRNA sense strand
gcacaagggagguuauagu

SEQ ID NO: 2171026 - RNA, 19 nt, Homo sapiens
  misc_RNA (1)...(19): siRNA sense strand
gcacuuacuauccacaaga

SEQ ID NO: 2171027 - RNA, 19 nt, Homo sapiens
  misc_RNA (1)...(19): siRNA sense strand
ccauauagaugugaggaau

SEQ ID NO: 2171028 - RNA, 19 nt, Homo sapiens
  misc_RNA (1)...(19): siRNA sense strand
cauaagagaauucauacug

SEQ ID NO: 2171029 - RNA, 19 nt, Homo sapiens
  misc_RNA (1)...(19): siRNA sense strand
ggacaugagaaauuacaau

SEQ ID NO: 2171030 - RNA, 19 nt, Homo sapiens
  misc_RNA (1)...(19): siRNA sense strand
gccuuuagcuggucugcaa

SEQ ID NO: 2171031 - RNA, 19 nt, Homo sapiens
  misc_RNA (1)...(19): siRNA sense strand
cuacaaaugcaaagaaugu

SEQ ID NO: 2171032 - RNA, 19 nt, Homo sapiens
  misc_RNA (1)...(19): siRNA sense strand
gagaaguccuacaaaugca

SEQ ID NO: 2171033 - RNA, 19 nt, Homo sapiens
  misc_RNA (1)...(19): siRNA sense strand
caucagguaauucauacua

SEQ ID NO: 2171034 - RNA, 19 nt, Homo sapiens
  misc_RNA (1)...(19): siRNA sense strand
gccuuuagcuuauccucaa

SEQ ID NO: 2171035 - RNA, 19 nt, Homo sapiens
  misc_RNA (1)...(19): siRNA sense strand
agagaaacccuacacaugu

SEQ ID NO: 2171036 - RNA, 19 nt, Homo sapiens
  misc_RNA (1)...(19): siRNA sense strand
ggagagaaacccuacacau

SEQ ID NO: 2171037 - RNA, 19 nt, Homo sapiens
  misc_RNA (1)...(19): siRNA sense strand
cccagaauauaaagagaaa

SEQ ID NO: 2171038 - RNA, 19 nt, Homo sapiens
  misc_RNA (1)...(19): siRNA sense strand
agaauucucucuggaggaa

SEQ ID NO: 2171039 - RNA, 19 nt, Homo sapiens
  misc_RNA (1)...(19): siRNA sense strand
cagcggaauuuauauagag

SEQ ID NO: 2171040 - RNA, 19 nt, Homo sapiens
  misc_RNA (1)...(19): siRNA sense strand
agagaaaccauauagaugu

SEQ ID NO: 2171041 - RNA, 19 nt, Homo sapiens
  misc_RNA (1)...(19): siRNA sense strand
gauguuagagaacuacaga

SEQ ID NO: 2171042 - RNA, 19 nt, Homo sapiens
  misc_RNA (1)...(19): siRNA sense strand
agagagacccuacacaugu

SEQ ID NO: 2171043 - RNA, 19 nt, Homo sapiens
  misc_RNA (1)...(19): siRNA sense strand
ugaagaguguggcaaaguc

SEQ ID NO: 2171044 - RNA, 19 nt, Homo sapiens
  misc_RNA (1)...(19): siRNA sense strand
ugaagaauguggccaagac

SEQ ID NO: 2171045 - RNA, 19 nt, Homo sapiens
  misc_RNA (1)...(19): siRNA sense strand
ccucagcacuuacuaacca

SEQ ID NO: 2171046 - RNA, 19 nt, Homo sapiens
  misc_RNA (1)...(19): siRNA sense strand
cuaaaucaacaucagguaa

SEQ ID NO: 2171047 - RNA, 19 nt, Homo sapiens
  misc_RNA (1)...(19): siRNA sense strand
uaaguggcauucaagucuu

SEQ ID NO: 2171048 - RNA, 19 nt, Homo sapiens
  misc_RNA (1)...(19): siRNA sense strand
ucacugaccacaagagaau

SEQ ID NO: 2171049 - RNA, 19 nt, Homo sapiens
  misc_RNA (1)...(19): siRNA sense strand
ucacugaccacaagagaau

SEQ ID NO: 2171050 - RNA, 19 nt, Homo sapiens
  misc_RNA (1)...(19): siRNA sense strand
ucacugaccacaagagaau

SEQ ID NO: 2171051 - RNA, 19 nt, Homo sapiens
  misc_RNA (1)...(19): siRNA sense strand
gcaaagaauguggcaaauc

SEQ ID NO: 2171052 - RNA, 19 nt, Homo sapiens
  misc_RNA (1)...(19): siRNA sense strand
guaauaccaagaacauaug

SEQ ID NO: 2171053 - RNA, 19 nt, Homo sapiens
  misc_RNA (1)...(19): siRNA sense strand
cgagaaaugggacuguuga

SEQ ID NO: 2171054 - RNA, 19 nt, Homo sapiens
  misc_RNA (1)...(19): siRNA sense strand
ucagcggaauuuauauaga

SEQ ID NO: 2171055 - RNA, 19 nt, Homo sapiens
  misc_RNA (1)...(19): siRNA sense strand
gggagguuauagugaaguu

SEQ ID NO: 2171056 - RNA, 19 nt, Homo sapiens
  misc_RNA (1)...(19): siRNA sense strand
gaaguccuacaaaugcaaa

SEQ ID NO: 2171057 - RNA, 19 nt, Homo sapiens
  misc_RNA (1)...(19): siRNA sense strand
gccuuuagcugguccucaa

SEQ ID NO: 2171058 - RNA, 19 nt, Homo sapiens
  misc_RNA (1)...(19): siRNA sense strand
gcacuuacuaaccacaaga

SEQ ID NO: 2171059 - RNA, 19 nt, Homo sapiens
  misc_RNA (1)...(19): siRNA sense strand
gaauucauacuagagagaa

SEQ ID NO: 2171060 - RNA, 19 nt, Homo sapiens
  misc_RNA (1)...(19): siRNA sense strand
gagcuguacuccagacaca

SEQ ID NO: 2171061 - RNA, 19 nt, Homo sapiens
  misc_RNA (1)...(19): siRNA sense strand
gacguccuguucaauguga

SEQ ID NO: 2171062 - RNA, 19 nt, Homo sapiens
  misc_RNA (1)...(19): siRNA sense strand
uggcucaaguuccacauug

SEQ ID NO: 2171063 - RNA, 19 nt, Homo sapiens
  misc_RNA (1)...(19): siRNA sense strand
gcaugcgggugcugaaggu

SEQ ID NO: 2171064 - RNA, 19 nt, Homo sapiens
  misc_RNA (1)...(19): siRNA sense strand
gugcugaaggugcagaauu

SEQ ID NO: 2171065 - RNA, 19 nt, Homo sapiens
  misc_RNA (1)...(19): siRNA sense strand
uaucccaacuggcucaagu

SEQ ID NO: 2171066 - RNA, 19 nt, Homo sapiens
  misc_RNA (1)...(19): siRNA sense strand
ugcugaaggugcagaauuc

SEQ ID NO: 2171067 - RNA, 19 nt, Homo sapiens
  misc_RNA (1)...(19): siRNA sense strand
ggacguccuguucaaugug

SEQ ID NO: 2171068 - RNA, 19 nt, Homo sapiens
  misc_RNA (1)...(19): siRNA sense strand
ucaaguuccacauugguau

SEQ ID NO: 2171069 - RNA, 19 nt, Homo sapiens
  misc_RNA (1)...(19): siRNA sense strand
gagcuguacuccagacaca

SEQ ID NO: 2171070 - RNA, 19 nt, Homo sapiens
  misc_RNA (1)...(19): siRNA sense strand
gacguccuguucaauguga

SEQ ID NO: 2171071 - RNA, 19 nt, Homo sapiens
  misc_RNA (1)...(19): siRNA sense strand
uggcucaaguuccacauug

SEQ ID NO: 2171072 - RNA, 19 nt, Homo sapiens
  misc_RNA (1)...(19): siRNA sense strand
gcaugcgggugcugaaggu

SEQ ID NO: 2171073 - RNA, 19 nt, Homo sapiens
  misc_RNA (1)...(19): siRNA sense strand
gugcugaaggugcagaauu

SEQ ID NO: 2171074 - RNA, 19 nt, Homo sapiens
  misc_RNA (1)...(19): siRNA sense strand
uaucccaacuggcucaagu

SEQ ID NO: 2171075 - RNA, 19 nt, Homo sapiens
  misc_RNA (1)...(19): siRNA sense strand
ugcugaaggugcagaauuc

SEQ ID NO: 2171076 - RNA, 19 nt, Homo sapiens
  misc_RNA (1)...(19): siRNA sense strand
ggacguccuguucaaugug

SEQ ID NO: 2171077 - RNA, 19 nt, Homo sapiens
  misc_RNA (1)...(19): siRNA sense strand
ucaaguuccacauugguau

SEQ ID NO: 2171078 - RNA, 19 nt, Homo sapiens
  misc_RNA (1)...(19): siRNA sense strand
gauaauaccagaccgauuu

SEQ ID NO: 2171079 - RNA, 19 nt, Homo sapiens
  misc_RNA (1)...(19): siRNA sense strand
gaugcuacaugguuauaua

SEQ ID NO: 2171080 - RNA, 19 nt, Homo sapiens
  misc_RNA (1)...(19): siRNA sense strand
caguauggcuuccuuaauu

SEQ ID NO: 2171081 - RNA, 19 nt, Homo sapiens
  misc_RNA (1)...(19): siRNA sense strand
ggagauacacccuauauuc

SEQ ID NO: 2171082 - RNA, 19 nt, Homo sapiens
  misc_RNA (1)...(19): siRNA sense strand
aaacggagauuuaaauugg

SEQ ID NO: 2171083 - RNA, 19 nt, Homo sapiens
  misc_RNA (1)...(19): siRNA sense strand
gcaaugguuuacagauauu

SEQ ID NO: 2171084 - RNA, 19 nt, Homo sapiens
  misc_RNA (1)...(19): siRNA sense strand
uaaagaaggcaaugcagua

SEQ ID NO: 2171085 - RNA, 19 nt, Homo sapiens
  misc_RNA (1)...(19): siRNA sense strand
gaccaaagagugcaucaaa

SEQ ID NO: 2171086 - RNA, 19 nt, Homo sapiens
  misc_RNA (1)...(19): siRNA sense strand
gcuacaucaugaagcauua

SEQ ID NO: 2171087 - RNA, 19 nt, Homo sapiens
  misc_RNA (1)...(19): siRNA sense strand
agaagcagcauauagaaua

SEQ ID NO: 2171088 - RNA, 19 nt, Homo sapiens
  misc_RNA (1)...(19): siRNA sense strand
ggcaaugguuuacagauau

SEQ ID NO: 2171089 - RNA, 19 nt, Homo sapiens
  misc_RNA (1)...(19): siRNA sense strand
gugcugaccuuuacacugu

SEQ ID NO: 2171090 - RNA, 19 nt, Homo sapiens
  misc_RNA (1)...(19): siRNA sense strand
cagauauuguugcaagaua

SEQ ID NO: 2171091 - RNA, 19 nt, Homo sapiens
  misc_RNA (1)...(19): siRNA sense strand
uggcaaugguuuacagaua

SEQ ID NO: 2171092 - RNA, 19 nt, Homo sapiens
  misc_RNA (1)...(19): siRNA sense strand
cgaaaucaauggagugaca

SEQ ID NO: 2171093 - RNA, 19 nt, Homo sapiens
  misc_RNA (1)...(19): siRNA sense strand
cuacaugguuauauacuug

SEQ ID NO: 2171094 - RNA, 19 nt, Homo sapiens
  misc_RNA (1)...(19): siRNA sense strand
aaacuucucucugguguug

SEQ ID NO: 2171095 - RNA, 19 nt, Homo sapiens
  misc_RNA (1)...(19): siRNA sense strand
uuacacuucuugacuguuu

SEQ ID NO: 2171096 - RNA, 19 nt, Homo sapiens
  misc_RNA (1)...(19): siRNA sense strand
ccaaagagugcaucaaaug

SEQ ID NO: 2171097 - RNA, 19 nt, Homo sapiens
  misc_RNA (1)...(19): siRNA sense strand
cagcauagauaaugaacuc

SEQ ID NO: 2171098 - RNA, 19 nt, Homo sapiens
  misc_RNA (1)...(19): siRNA sense strand
uauggaagcugcaauuucu

SEQ ID NO: 2171099 - RNA, 19 nt, Homo sapiens
  misc_RNA (1)...(19): siRNA sense strand
guacauuauuucagcauag

SEQ ID NO: 2171100 - RNA, 19 nt, Homo sapiens
  misc_RNA (1)...(19): siRNA sense strand
gacacaaggugauagaagu

SEQ ID NO: 2171101 - RNA, 19 nt, Homo sapiens
  misc_RNA (1)...(19): siRNA sense strand
guuggaugcuacaugguua

SEQ ID NO: 2171102 - RNA, 19 nt, Homo sapiens
  misc_RNA (1)...(19): siRNA sense strand
guugucaucugguggauug

SEQ ID NO: 2171103 - RNA, 19 nt, Homo sapiens
  misc_RNA (1)...(19): siRNA sense strand
gauacacccuauauuccuu

SEQ ID NO: 2171104 - RNA, 19 nt, Homo sapiens
  misc_RNA (1)...(19): siRNA sense strand
aaagagugcaucaaaugua

SEQ ID NO: 2171105 - RNA, 19 nt, Homo sapiens
  misc_RNA (1)...(19): siRNA sense strand
gucaaaagauuucuggaua

SEQ ID NO: 2171106 - RNA, 19 nt, Homo sapiens
  misc_RNA (1)...(19): siRNA sense strand
gcuacaugguuauauacuu

SEQ ID NO: 2171107 - RNA, 19 nt, Homo sapiens
  misc_RNA (1)...(19): siRNA sense strand
guugaugacauuuccauaa

SEQ ID NO: 2171108 - RNA, 19 nt, Homo sapiens
  misc_RNA (1)...(19): siRNA sense strand
aagcugcaauuucuacauu

SEQ ID NO: 2171109 - RNA, 19 nt, Homo sapiens
  misc_RNA (1)...(19): siRNA sense strand
uuucagagaugcugccuau

SEQ ID NO: 2171110 - RNA, 19 nt, Homo sapiens
  misc_RNA (1)...(19): siRNA sense strand
ggagugacacaaggugaua

SEQ ID NO: 2171111 - RNA, 19 nt, Homo sapiens
  misc_RNA (1)...(19): siRNA sense strand
gaaucaagaccagcaagaa

SEQ ID NO: 2171112 - RNA, 19 nt, Homo sapiens
  misc_RNA (1)...(19): siRNA sense strand
agcaagaacccaaaccuua

SEQ ID NO: 2171113 - RNA, 19 nt, Homo sapiens
  misc_RNA (1)...(19): siRNA sense strand
gauuguuugugacuacauu

SEQ ID NO: 2171114 - RNA, 19 nt, Homo sapiens
  misc_RNA (1)...(19): siRNA sense strand
gcaagaacccaaaccuuac

SEQ ID NO: 2171115 - RNA, 19 nt, Homo sapiens
  misc_RNA (1)...(19): siRNA sense strand
cagagaugcugccuaugga

SEQ ID NO: 2171116 - RNA, 19 nt, Homo sapiens
  misc_RNA (1)...(19): siRNA sense strand
cagagcagccuucuccaaa

SEQ ID NO: 2171117 - RNA, 19 nt, Homo sapiens
  misc_RNA (1)...(19): siRNA sense strand
aguauggcuuccuuaauuu

SEQ ID NO: 2171118 - RNA, 19 nt, Homo sapiens
  misc_RNA (1)...(19): siRNA sense strand
cauagauaaugaacucgaa

SEQ ID NO: 2171119 - RNA, 19 nt, Homo sapiens
  misc_RNA (1)...(19): siRNA sense strand
gauaaugaacucgaauaug

SEQ ID NO: 2171120 - RNA, 19 nt, Homo sapiens
  misc_RNA (1)...(19): siRNA sense strand
uaaauggggucgagaauca

SEQ ID NO: 2171121 - RNA, 19 nt, Homo sapiens
  misc_RNA (1)...(19): siRNA sense strand
gagcagccuucuccaaacu

SEQ ID NO: 2171122 - RNA, 19 nt, Homo sapiens
  misc_RNA (1)...(19): siRNA sense strand
caaagagugcaucaaaugu

SEQ ID NO: 2171123 - RNA, 19 nt, Homo sapiens
  misc_RNA (1)...(19): siRNA sense strand
caacucauuuaaccuugau

SEQ ID NO: 2171124 - RNA, 19 nt, Homo sapiens
  misc_RNA (1)...(19): siRNA sense strand
ucugguggauuguuuguga

SEQ ID NO: 2171125 - RNA, 19 nt, Homo sapiens
  misc_RNA (1)...(19): siRNA sense strand
ggagaauggacaacacaga

SEQ ID NO: 2171126 - RNA, 19 nt, Homo sapiens
  misc_RNA (1)...(19): siRNA sense strand
agaaggcaaugcaguaugg

SEQ ID NO: 2171127 - RNA, 19 nt, Homo sapiens
  misc_RNA (1)...(19): siRNA sense strand
gcagaaaacggagauuuaa

SEQ ID NO: 2171128 - RNA, 19 nt, Homo sapiens
  misc_RNA (1)...(19): siRNA sense strand
ccagaagcagcauauagaa

SEQ ID NO: 2171129 - RNA, 19 nt, Homo sapiens
  misc_RNA (1)...(19): siRNA sense strand
gcagccuucuccaaacuuc

SEQ ID NO: 2171130 - RNA, 19 nt, Homo sapiens
  misc_RNA (1)...(19): siRNA sense strand
gcaguauggcuuccuuaau

SEQ ID NO: 2171131 - RNA, 19 nt, Homo sapiens
  misc_RNA (1)...(19): siRNA sense strand
uauauuccuuucagagaug

SEQ ID NO: 2171132 - RNA, 19 nt, Homo sapiens
  misc_RNA (1)...(19): siRNA sense strand
ucaccgaucgccuucguuu

SEQ ID NO: 2171133 - RNA, 19 nt, Homo sapiens
  misc_RNA (1)...(19): siRNA sense strand
gcaggagaauggacaacac

SEQ ID NO: 2171134 - RNA, 19 nt, Homo sapiens
  misc_RNA (1)...(19): siRNA sense strand
caaaugcugccuuccuugu

SEQ ID NO: 2171135 - RNA, 19 nt, Homo sapiens
  misc_RNA (1)...(19): siRNA sense strand
gucaucugguggauuguuu

SEQ ID NO: 2171136 - RNA, 19 nt, Homo sapiens
  misc_RNA (1)...(19): siRNA sense strand
uaugaugccaaacgcuuua

SEQ ID NO: 2171137 - RNA, 19 nt, Homo sapiens
  misc_RNA (1)...(19): siRNA sense strand
ucagagaugcugccuaugg

SEQ ID NO: 2171138 - RNA, 19 nt, Homo sapiens
  misc_RNA (1)...(19): siRNA sense strand
ggauaauaccagaccgauu

SEQ ID NO: 2171139 - RNA, 19 nt, Homo sapiens
  misc_RNA (1)...(19): siRNA sense strand
aaugcugccuuccuuguug

SEQ ID NO: 2171140 - RNA, 19 nt, Homo sapiens
  misc_RNA (1)...(19): siRNA sense strand
ucgcacaggcacucugaua

SEQ ID NO: 2171141 - RNA, 19 nt, Homo sapiens
  misc_RNA (1)...(19): siRNA sense strand
auaccagaccgauuuauug

SEQ ID NO: 2171142 - RNA, 19 nt, Homo sapiens
  misc_RNA (1)...(19): siRNA sense strand
cuauauuccuuucagagau

SEQ ID NO: 2171143 - RNA, 19 nt, Homo sapiens
  misc_RNA (1)...(19): siRNA sense strand
gacagcagccgagaccauu

SEQ ID NO: 2171144 - RNA, 19 nt, Homo sapiens
  misc_RNA (1)...(19): siRNA sense strand
gaacucgaauaugagaacu

SEQ ID NO: 2171145 - RNA, 19 nt, Homo sapiens
  misc_RNA (1)...(19): siRNA sense strand
gcugcaauuucuacauuac

SEQ ID NO: 2171146 - RNA, 19 nt, Homo sapiens
  misc_RNA (1)...(19): siRNA sense strand
guuugugacuacauucuuc

SEQ ID NO: 2171147 - RNA, 19 nt, Homo sapiens
  misc_RNA (1)...(19): siRNA sense strand
gacgaaaucaauggaguga

SEQ ID NO: 2171148 - RNA, 19 nt, Homo sapiens
  misc_RNA (1)...(19): siRNA sense strand
ucccgagacuuauauucaa

SEQ ID NO: 2171149 - RNA, 19 nt, Homo sapiens
  misc_RNA (1)...(19): siRNA sense strand
cuguggaccucauucaaga

SEQ ID NO: 2171150 - RNA, 19 nt, Homo sapiens
  misc_RNA (1)...(19): siRNA sense strand
cccagaagcagcauauaga

SEQ ID NO: 2171151 - RNA, 19 nt, Homo sapiens
  misc_RNA (1)...(19): siRNA sense strand
ucaaucuggcaaugguuua

SEQ ID NO: 2171152 - RNA, 19 nt, Homo sapiens
  misc_RNA (1)...(19): siRNA sense strand
gcacaggcacucugauagc

SEQ ID NO: 2171153 - RNA, 19 nt, Homo sapiens
  misc_RNA (1)...(19): siRNA sense strand
caaaagauuucuggauauc

SEQ ID NO: 2171154 - RNA, 19 nt, Homo sapiens
  misc_RNA (1)...(19): siRNA sense strand
cauuacacuucuugacugu

SEQ ID NO: 2171155 - RNA, 19 nt, Homo sapiens
  misc_RNA (1)...(19): siRNA sense strand
gagauacacccuauauucc

SEQ ID NO: 2171156 - RNA, 19 nt, Homo sapiens
  misc_RNA (1)...(19): siRNA sense strand
aagagugcaucaaauguac

SEQ ID NO: 2171157 - RNA, 19 nt, Homo sapiens
  misc_RNA (1)...(19): siRNA sense strand
ucaugaagcauuacaggau

SEQ ID NO: 2171158 - RNA, 19 nt, Homo sapiens
  misc_RNA (1)...(19): siRNA sense strand
gaagcugcaauuucuacau

SEQ ID NO: 2171159 - RNA, 19 nt, Homo sapiens
  misc_RNA (1)...(19): siRNA sense strand
gaugacgacgaaaucaaug

SEQ ID NO: 2171160 - RNA, 19 nt, Homo sapiens
  misc_RNA (1)...(19): siRNA sense strand
cagcaagaacccaaaccuu

SEQ ID NO: 2171161 - RNA, 19 nt, Homo sapiens
  misc_RNA (1)...(19): siRNA sense strand
ugagggugccauugcagua

SEQ ID NO: 2171162 - RNA, 19 nt, Homo sapiens
  misc_RNA (1)...(19): siRNA sense strand
ucaccaugaucuuuucuuu

SEQ ID NO: 2171163 - RNA, 19 nt, Homo sapiens
  misc_RNA (1)...(19): siRNA sense strand
aaagaaggcaaugcaguau

SEQ ID NO: 2171164 - RNA, 19 nt, Homo sapiens
  misc_RNA (1)...(19): siRNA sense strand
cagaagcagcauauagaau

SEQ ID NO: 2171165 - RNA, 19 nt, Homo sapiens
  misc_RNA (1)...(19): siRNA sense strand
acucgaauaugagaacuuc

SEQ ID NO: 2171166 - RNA, 19 nt, Homo sapiens
  misc_RNA (1)...(19): siRNA sense strand
auaauaccagaccgauuua

SEQ ID NO: 2171167 - RNA, 19 nt, Homo sapiens
  misc_RNA (1)...(19): siRNA sense strand
cuacugaugccauugucaa

SEQ ID NO: 2171168 - RNA, 19 nt, Homo sapiens
  misc_RNA (1)...(19): siRNA sense strand
gguggauuguuugugacua

SEQ ID NO: 2171169 - RNA, 19 nt, Homo sapiens
  misc_RNA (1)...(19): siRNA sense strand
accaaagagugcaucaaau

SEQ ID NO: 2171170 - RNA, 19 nt, Homo sapiens
  misc_RNA (1)...(19): siRNA sense strand
uggcugugcugaccuuuac

SEQ ID NO: 2171171 - RNA, 19 nt, Homo sapiens
  misc_RNA (1)...(19): siRNA sense strand
guuuacagauauuguugca

SEQ ID NO: 2171172 - RNA, 19 nt, Homo sapiens
  misc_RNA (1)...(19): siRNA sense strand
ggucgcacaggcacucuga

SEQ ID NO: 2171173 - RNA, 19 nt, Homo sapiens
  misc_RNA (1)...(19): siRNA sense strand
ccuauauuccuuucagaga

SEQ ID NO: 2171174 - RNA, 19 nt, Homo sapiens
  misc_RNA (1)...(19): siRNA sense strand
caucaccgaucgccuucgu

SEQ ID NO: 2171175 - RNA, 19 nt, Homo sapiens
  misc_RNA (1)...(19): siRNA sense strand
guggauuguuugugacuac

SEQ ID NO: 2171176 - RNA, 19 nt, Homo sapiens
  misc_RNA (1)...(19): siRNA sense strand
ugacacaaggugauagaag

SEQ ID NO: 2171177 - RNA, 19 nt, Homo sapiens
  misc_RNA (1)...(19): siRNA sense strand
uuguaaagcuggccuuggu

SEQ ID NO: 2171178 - RNA, 19 nt, Homo sapiens
  misc_RNA (1)...(19): siRNA sense strand
gauaauaccagaccgauuu

SEQ ID NO: 2171179 - RNA, 19 nt, Homo sapiens
  misc_RNA (1)...(19): siRNA sense strand
gaugcuacaugguuauaua

SEQ ID NO: 2171180 - RNA, 19 nt, Homo sapiens
  misc_RNA (1)...(19): siRNA sense strand
caguauggcuuccuuaauu

SEQ ID NO: 2171181 - RNA, 19 nt, Homo sapiens
  misc_RNA (1)...(19): siRNA sense strand
ggagauacacccuauauuc

SEQ ID NO: 2171182 - RNA, 19 nt, Homo sapiens
  misc_RNA (1)...(19): siRNA sense strand
aaacggagauuuaaauugg

SEQ ID NO: 2171183 - RNA, 19 nt, Homo sapiens
  misc_RNA (1)...(19): siRNA sense strand
gcaaugguuuacagauauu

SEQ ID NO: 2171184 - RNA, 19 nt, Homo sapiens
  misc_RNA (1)...(19): siRNA sense strand
uaaagaaggcaaugcagua

SEQ ID NO: 2171185 - RNA, 19 nt, Homo sapiens
  misc_RNA (1)...(19): siRNA sense strand
gaccaaagagugcaucaaa

SEQ ID NO: 2171186 - RNA, 19 nt, Homo sapiens
  misc_RNA (1)...(19): siRNA sense strand
gcuacaucaugaagcauua

SEQ ID NO: 2171187 - RNA, 19 nt, Homo sapiens
  misc_RNA (1)...(19): siRNA sense strand
agaagcagcauauagaaua

SEQ ID NO: 2171188 - RNA, 19 nt, Homo sapiens
  misc_RNA (1)...(19): siRNA sense strand
ggcaaugguuuacagauau

SEQ ID NO: 2171189 - RNA, 19 nt, Homo sapiens
  misc_RNA (1)...(19): siRNA sense strand
gugcugaccuuuacacugu

SEQ ID NO: 2171190 - RNA, 19 nt, Homo sapiens
  misc_RNA (1)...(19): siRNA sense strand
cagauauuguugcaagaua

SEQ ID NO: 2171191 - RNA, 19 nt, Homo sapiens
  misc_RNA (1)...(19): siRNA sense strand
uggcaaugguuuacagaua

SEQ ID NO: 2171192 - RNA, 19 nt, Homo sapiens
  misc_RNA (1)...(19): siRNA sense strand
cgaaaucaauggagugaca

SEQ ID NO: 2171193 - RNA, 19 nt, Homo sapiens
  misc_RNA (1)...(19): siRNA sense strand
cuacaugguuauauacuug

SEQ ID NO: 2171194 - RNA, 19 nt, Homo sapiens
  misc_RNA (1)...(19): siRNA sense strand
aaacuucucucugguguug

SEQ ID NO: 2171195 - RNA, 19 nt, Homo sapiens
  misc_RNA (1)...(19): siRNA sense strand
uuacacuucuugacuguuu

SEQ ID NO: 2171196 - RNA, 19 nt, Homo sapiens
  misc_RNA (1)...(19): siRNA sense strand
ccaaagagugcaucaaaug

SEQ ID NO: 2171197 - RNA, 19 nt, Homo sapiens
  misc_RNA (1)...(19): siRNA sense strand
cagcauagauaaugaacuc

SEQ ID NO: 2171198 - RNA, 19 nt, Homo sapiens
  misc_RNA (1)...(19): siRNA sense strand
uauggaagcugcaauuucu

SEQ ID NO: 2171199 - RNA, 19 nt, Homo sapiens
  misc_RNA (1)...(19): siRNA sense strand
guacauuauuucagcauag

SEQ ID NO: 2171200 - RNA, 19 nt, Homo sapiens
  misc_RNA (1)...(19): siRNA sense strand
gacacaaggugauagaagu

SEQ ID NO: 2171201 - RNA, 19 nt, Homo sapiens
  misc_RNA (1)...(19): siRNA sense strand
guuggaugcuacaugguua

SEQ ID NO: 2171202 - RNA, 19 nt, Homo sapiens
  misc_RNA (1)...(19): siRNA sense strand
guugucaucugguggauug

SEQ ID NO: 2171203 - RNA, 19 nt, Homo sapiens
  misc_RNA (1)...(19): siRNA sense strand
gauacacccuauauuccuu

SEQ ID NO: 2171204 - RNA, 19 nt, Homo sapiens
  misc_RNA (1)...(19): siRNA sense strand
aaagagugcaucaaaugua

SEQ ID NO: 2171205 - RNA, 19 nt, Homo sapiens
  misc_RNA (1)...(19): siRNA sense strand
gucaaaagauuucuggaua

SEQ ID NO: 2171206 - RNA, 19 nt, Homo sapiens
  misc_RNA (1)...(19): siRNA sense strand
gcuacaugguuauauacuu

SEQ ID NO: 2171207 - RNA, 19 nt, Homo sapiens
  misc_RNA (1)...(19): siRNA sense strand
guugaugacauuuccauaa

SEQ ID NO: 2171208 - RNA, 19 nt, Homo sapiens
  misc_RNA (1)...(19): siRNA sense strand
aagcugcaauuucuacauu

SEQ ID NO: 2171209 - RNA, 19 nt, Homo sapiens
  misc_RNA (1)...(19): siRNA sense strand
uuucagagaugcugccuau

SEQ ID NO: 2171210 - RNA, 19 nt, Homo sapiens
  misc_RNA (1)...(19): siRNA sense strand
ggagugacacaaggugaua

SEQ ID NO: 2171211 - RNA, 19 nt, Homo sapiens
  misc_RNA (1)...(19): siRNA sense strand
gaaucaagaccagcaagaa

SEQ ID NO: 2171212 - RNA, 19 nt, Homo sapiens
  misc_RNA (1)...(19): siRNA sense strand
agcaagaacccaaaccuua

SEQ ID NO: 2171213 - RNA, 19 nt, Homo sapiens
  misc_RNA (1)...(19): siRNA sense strand
gauuguuugugacuacauu

SEQ ID NO: 2171214 - RNA, 19 nt, Homo sapiens
  misc_RNA (1)...(19): siRNA sense strand
gcaagaacccaaaccuuac

SEQ ID NO: 2171215 - RNA, 19 nt, Homo sapiens
  misc_RNA (1)...(19): siRNA sense strand
cagagaugcugccuaugga

SEQ ID NO: 2171216 - RNA, 19 nt, Homo sapiens
  misc_RNA (1)...(19): siRNA sense strand
cagagcagccuucuccaaa

SEQ ID NO: 2171217 - RNA, 19 nt, Homo sapiens
  misc_RNA (1)...(19): siRNA sense strand
aguauggcuuccuuaauuu

SEQ ID NO: 2171218 - RNA, 19 nt, Homo sapiens
  misc_RNA (1)...(19): siRNA sense strand
cauagauaaugaacucgaa

SEQ ID NO: 2171219 - RNA, 19 nt, Homo sapiens
  misc_RNA (1)...(19): siRNA sense strand
uaaauggggucgagaauca

SEQ ID NO: 2171220 - RNA, 19 nt, Homo sapiens
  misc_RNA (1)...(19): siRNA sense strand
caaagagugcaucaaaugu

SEQ ID NO: 2171221 - RNA, 19 nt, Homo sapiens
  misc_RNA (1)...(19): siRNA sense strand
gagcagccuucuccaaacu

SEQ ID NO: 2171222 - RNA, 19 nt, Homo sapiens
  misc_RNA (1)...(19): siRNA sense strand
gauaaugaacucgaauaug

SEQ ID NO: 2171223 - RNA, 19 nt, Homo sapiens
  misc_RNA (1)...(19): siRNA sense strand
caacucauuuaaccuugau

SEQ ID NO: 2171224 - RNA, 19 nt, Homo sapiens
  misc_RNA (1)...(19): siRNA sense strand
ucugguggauuguuuguga

SEQ ID NO: 2171225 - RNA, 19 nt, Homo sapiens
  misc_RNA (1)...(19): siRNA sense strand
ggagaauggacaacacaga

SEQ ID NO: 2171226 - RNA, 19 nt, Homo sapiens
  misc_RNA (1)...(19): siRNA sense strand
agaaggcaaugcaguaugg

SEQ ID NO: 2171227 - RNA, 19 nt, Homo sapiens
  misc_RNA (1)...(19): siRNA sense strand
gcagaaaacggagauuuaa

SEQ ID NO: 2171228 - RNA, 19 nt, Homo sapiens
  misc_RNA (1)...(19): siRNA sense strand
ccagaagcagcauauagaa

SEQ ID NO: 2171229 - RNA, 19 nt, Homo sapiens
  misc_RNA (1)...(19): siRNA sense strand
gcagccuucuccaaacuuc

SEQ ID NO: 2171230 - RNA, 19 nt, Homo sapiens
  misc_RNA (1)...(19): siRNA sense strand
gcaguauggcuuccuuaau

SEQ ID NO: 2171231 - RNA, 19 nt, Homo sapiens
  misc_RNA (1)...(19): siRNA sense strand
uauauuccuuucagagaug

SEQ ID NO: 2171232 - RNA, 19 nt, Homo sapiens
  misc_RNA (1)...(19): siRNA sense strand
ucaccgaucgccuucguuu

SEQ ID NO: 2171233 - RNA, 19 nt, Homo sapiens
  misc_RNA (1)...(19): siRNA sense strand
gcaggagaauggacaacac

SEQ ID NO: 2171234 - RNA, 19 nt, Homo sapiens
  misc_RNA (1)...(19): siRNA sense strand
caaaugcugccuuccuugu

SEQ ID NO: 2171235 - RNA, 19 nt, Homo sapiens
  misc_RNA (1)...(19): siRNA sense strand
gucaucugguggauuguuu

SEQ ID NO: 2171236 - RNA, 19 nt, Homo sapiens
  misc_RNA (1)...(19): siRNA sense strand
uaugaugccaaacgcuuua

SEQ ID NO: 2171237 - RNA, 19 nt, Homo sapiens
  misc_RNA (1)...(19): siRNA sense strand
ucagagaugcugccuaugg

SEQ ID NO: 2171238 - RNA, 19 nt, Homo sapiens
  misc_RNA (1)...(19): siRNA sense strand
ggauaauaccagaccgauu

SEQ ID NO: 2171239 - RNA, 19 nt, Homo sapiens
  misc_RNA (1)...(19): siRNA sense strand
aaugcugccuuccuuguug

SEQ ID NO: 2171240 - RNA, 19 nt, Homo sapiens
  misc_RNA (1)...(19): siRNA sense strand
ucgcacaggcacucugaua

SEQ ID NO: 2171241 - RNA, 19 nt, Homo sapiens
  misc_RNA (1)...(19): siRNA sense strand
auaccagaccgauuuauug

SEQ ID NO: 2171242 - RNA, 19 nt, Homo sapiens
  misc_RNA (1)...(19): siRNA sense strand
cuauauuccuuucagagau

SEQ ID NO: 2171243 - RNA, 19 nt, Homo sapiens
  misc_RNA (1)...(19): siRNA sense strand
gacagcagccgagaccauu

SEQ ID NO: 2171244 - RNA, 19 nt, Homo sapiens
  misc_RNA (1)...(19): siRNA sense strand
gaacucgaauaugagaacu

SEQ ID NO: 2171245 - RNA, 19 nt, Homo sapiens
  misc_RNA (1)...(19): siRNA sense strand
gcugcaauuucuacauuac

SEQ ID NO: 2171246 - RNA, 19 nt, Homo sapiens
  misc_RNA (1)...(19): siRNA sense strand
guuugugacuacauucuuc

SEQ ID NO: 2171247 - RNA, 19 nt, Homo sapiens
  misc_RNA (1)...(19): siRNA sense strand
gacgaaaucaauggaguga

SEQ ID NO: 2171248 - RNA, 19 nt, Homo sapiens
  misc_RNA (1)...(19): siRNA sense strand
ucccgagacuuauauucaa

SEQ ID NO: 2171249 - RNA, 19 nt, Homo sapiens
  misc_RNA (1)...(19): siRNA sense strand
cuguggaccucauucaaga

SEQ ID NO: 2171250 - RNA, 19 nt, Homo sapiens
  misc_RNA (1)...(19): siRNA sense strand
cccagaagcagcauauaga

SEQ ID NO: 2171251 - RNA, 19 nt, Homo sapiens
  misc_RNA (1)...(19): siRNA sense strand
gcacaggcacucugauagc

SEQ ID NO: 2171252 - RNA, 19 nt, Homo sapiens
  misc_RNA (1)...(19): siRNA sense strand
caaaagauuucuggauauc

SEQ ID NO: 2171253 - RNA, 19 nt, Homo sapiens
  misc_RNA (1)...(19): siRNA sense strand
ucaaucuggcaaugguuua

SEQ ID NO: 2171254 - RNA, 19 nt, Homo sapiens
  misc_RNA (1)...(19): siRNA sense strand
cauuacacuucuugacugu

SEQ ID NO: 2171255 - RNA, 19 nt, Homo sapiens
  misc_RNA (1)...(19): siRNA sense strand
gagauacacccuauauucc

SEQ ID NO: 2171256 - RNA, 19 nt, Homo sapiens
  misc_RNA (1)...(19): siRNA sense strand
aagagugcaucaaauguac

SEQ ID NO: 2171257 - RNA, 19 nt, Homo sapiens
  misc_RNA (1)...(19): siRNA sense strand
ucaugaagcauuacaggau

SEQ ID NO: 2171258 - RNA, 19 nt, Homo sapiens
  misc_RNA (1)...(19): siRNA sense strand
gaagcugcaauuucuacau

SEQ ID NO: 2171259 - RNA, 19 nt, Homo sapiens
  misc_RNA (1)...(19): siRNA sense strand
gaugacgacgaaaucaaug

SEQ ID NO: 2171260 - RNA, 19 nt, Homo sapiens
  misc_RNA (1)...(19): siRNA sense strand
cagcaagaacccaaaccuu

SEQ ID NO: 2171261 - RNA, 19 nt, Homo sapiens
  misc_RNA (1)...(19): siRNA sense strand
ugagggugccauugcagua

SEQ ID NO: 2171262 - RNA, 19 nt, Homo sapiens
  misc_RNA (1)...(19): siRNA sense strand
ucaccaugaucuuuucuuu

SEQ ID NO: 2171263 - RNA, 19 nt, Homo sapiens
  misc_RNA (1)...(19): siRNA sense strand
aaagaaggcaaugcaguau

SEQ ID NO: 2171264 - RNA, 19 nt, Homo sapiens
  misc_RNA (1)...(19): siRNA sense strand
cagaagcagcauauagaau

SEQ ID NO: 2171265 - RNA, 19 nt, Homo sapiens
  misc_RNA (1)...(19): siRNA sense strand
auaauaccagaccgauuua

SEQ ID NO: 2171266 - RNA, 19 nt, Homo sapiens
  misc_RNA (1)...(19): siRNA sense strand
acucgaauaugagaacuuc

SEQ ID NO: 2171267 - RNA, 19 nt, Homo sapiens
  misc_RNA (1)...(19): siRNA sense strand
cuacugaugccauugucaa

SEQ ID NO: 2171268 - RNA, 19 nt, Homo sapiens
  misc_RNA (1)...(19): siRNA sense strand
gguggauuguuugugacua

SEQ ID NO: 2171269 - RNA, 19 nt, Homo sapiens
  misc_RNA (1)...(19): siRNA sense strand
ccuauauuccuuucagaga

SEQ ID NO: 2171270 - RNA, 19 nt, Homo sapiens
  misc_RNA (1)...(19): siRNA sense strand
uggcugugcugaccuuuac

SEQ ID NO: 2171271 - RNA, 19 nt, Homo sapiens
  misc_RNA (1)...(19): siRNA sense strand
guuuacagauauuguugca

SEQ ID NO: 2171272 - RNA, 19 nt, Homo sapiens
  misc_RNA (1)...(19): siRNA sense strand
ggucgcacaggcacucuga

SEQ ID NO: 2171273 - RNA, 19 nt, Homo sapiens
  misc_RNA (1)...(19): siRNA sense strand
accaaagagugcaucaaau

SEQ ID NO: 2171274 - RNA, 19 nt, Homo sapiens
  misc_RNA (1)...(19): siRNA sense strand
uuguaaagcuggccuuggu

SEQ ID NO: 2171275 - RNA, 19 nt, Homo sapiens
  misc_RNA (1)...(19): siRNA sense strand
guggauuguuugugacuac

SEQ ID NO: 2171276 - RNA, 19 nt, Homo sapiens
  misc_RNA (1)...(19): siRNA sense strand
ugacacaaggugauagaag

SEQ ID NO: 2171277 - RNA, 19 nt, Homo sapiens
  misc_RNA (1)...(19): siRNA sense strand
caucaccgaucgccuucgu

SEQ ID NO: 2171278 - RNA, 19 nt, Homo sapiens
  misc_RNA (1)...(19): siRNA sense strand
ggaacgagcucaaguccaa

SEQ ID NO: 2171279 - RNA, 19 nt, Homo sapiens
  misc_RNA (1)...(19): siRNA sense strand
ggaaagcccugaucgaaca

SEQ ID NO: 2171280 - RNA, 19 nt, Homo sapiens
  misc_RNA (1)...(19): siRNA sense strand
aggaggagcuggcuuacua

SEQ ID NO: 2171281 - RNA, 19 nt, Homo sapiens
  misc_RNA (1)...(19): siRNA sense strand
ugaaggaggugguggacaa

SEQ ID NO: 2171282 - RNA, 19 nt, Homo sapiens
  misc_RNA (1)...(19): siRNA sense strand
agacacggcugaugaagau

SEQ ID NO: 2171283 - RNA, 19 nt, Homo sapiens
  misc_RNA (1)...(19): siRNA sense strand
gaagaucaaccaugaccuu

SEQ ID NO: 2171284 - RNA, 19 nt, Homo sapiens
  misc_RNA (1)...(19): siRNA sense strand
gagcagagcuggggaaguu

SEQ ID NO: 2171285 - RNA, 19 nt, Homo sapiens
  misc_RNA (1)...(19): siRNA sense strand
cagagaagguggccaugga

SEQ ID NO: 2171286 - RNA, 19 nt, Homo sapiens
  misc_RNA (1)...(19): siRNA sense strand
cuauaagagugaagaaaug

SEQ ID NO: 2171287 - RNA, 19 nt, Homo sapiens
  misc_RNA (1)...(19): siRNA sense strand
gaagaaauggaagaggaaa

SEQ ID NO: 2171288 - RNA, 19 nt, Homo sapiens
  misc_RNA (1)...(19): siRNA sense strand
ugaggacguugaggcuuua

SEQ ID NO: 2171289 - RNA, 19 nt, Homo sapiens
  misc_RNA (1)...(19): siRNA sense strand
gaggagcuggcuuacuaua

SEQ ID NO: 2171290 - RNA, 19 nt, Homo sapiens
  misc_RNA (1)...(19): siRNA sense strand
uaagagugaagaaauggaa

SEQ ID NO: 2171291 - RNA, 19 nt, Homo sapiens
  misc_RNA (1)...(19): siRNA sense strand
caaacaacgcgacgagauc

SEQ ID NO: 2171292 - RNA, 19 nt, Homo sapiens
  misc_RNA (1)...(19): siRNA sense strand
gaaggaggugguggacaaa

SEQ ID NO: 2171293 - RNA, 19 nt, Homo sapiens
  misc_RNA (1)...(19): siRNA sense strand
ggaggugguggacaaacaa

SEQ ID NO: 2171294 - RNA, 19 nt, Homo sapiens
  misc_RNA (1)...(19): siRNA sense strand
gagcgacaggugaugaaga

SEQ ID NO: 2171295 - RNA, 19 nt, Homo sapiens
  misc_RNA (1)...(19): siRNA sense strand
ggaagaggaaaaccgaaua

SEQ ID NO: 2171296 - RNA, 19 nt, Homo sapiens
  misc_RNA (1)...(19): siRNA sense strand
gagaggaacgagcucaagu

SEQ ID NO: 2171297 - RNA, 19 nt, Homo sapiens
  misc_RNA (1)...(19): siRNA sense strand
augaggacguugaggcuuu

SEQ ID NO: 2171298 - RNA, 19 nt, Homo sapiens
  misc_RNA (1)...(19): siRNA sense strand
agcgacaggugaugaagaa

SEQ ID NO: 2171299 - RNA, 19 nt, Homo sapiens
  misc_RNA (1)...(19): siRNA sense strand
ugaagaaauggaagaggaa

SEQ ID NO: 2171300 - RNA, 19 nt, Homo sapiens
  misc_RNA (1)...(19): siRNA sense strand
gacaggugaugaagaagcu

SEQ ID NO: 2171301 - RNA, 19 nt, Homo sapiens
  misc_RNA (1)...(19): siRNA sense strand
ggaggagcuggcuuacuau

SEQ ID NO: 2171302 - RNA, 19 nt, Homo sapiens
  misc_RNA (1)...(19): siRNA sense strand
gcucaaguccaagguguuc

SEQ ID NO: 2171303 - RNA, 19 nt, Homo sapiens
  misc_RNA (1)...(19): siRNA sense strand
ugaugaagaagcugaagga

SEQ ID NO: 2171304 - RNA, 19 nt, Homo sapiens
  misc_RNA (1)...(19): siRNA sense strand
acaaacaacgcgacgagau

SEQ ID NO: 2171305 - RNA, 19 nt, Homo sapiens
  misc_RNA (1)...(19): siRNA sense strand
cagacacggcugaugaaga

SEQ ID NO: 2171306 - RNA, 19 nt, Homo sapiens
  misc_RNA (1)...(19): siRNA sense strand
ugcaggaggagcuggcuua

SEQ ID NO: 2171307 - RNA, 19 nt, Homo sapiens
  misc_RNA (1)...(19): siRNA sense strand
gaccaaggagcaggagaug

SEQ ID NO: 2171308 - RNA, 19 nt, Homo sapiens
  misc_RNA (1)...(19): siRNA sense strand
ggacguugaggcuuuacag

SEQ ID NO: 2171309 - RNA, 19 nt, Homo sapiens
  misc_RNA (1)...(19): siRNA sense strand
gaagguggccauggaucuc

SEQ ID NO: 2171310 - RNA, 19 nt, Homo sapiens
  misc_RNA (1)...(19): siRNA sense strand
gggagcgacaggugaugaa

SEQ ID NO: 2171311 - RNA, 19 nt, Homo sapiens
  misc_RNA (1)...(19): siRNA sense strand
ggaacgagcucaaguccaa

SEQ ID NO: 2171312 - RNA, 19 nt, Homo sapiens
  misc_RNA (1)...(19): siRNA sense strand
ggaaagcccugaucgaaca

SEQ ID NO: 2171313 - RNA, 19 nt, Homo sapiens
  misc_RNA (1)...(19): siRNA sense strand
aggaggagcuggcuuacua

SEQ ID NO: 2171314 - RNA, 19 nt, Homo sapiens
  misc_RNA (1)...(19): siRNA sense strand
ugaaggaggugguggacaa

SEQ ID NO: 2171315 - RNA, 19 nt, Homo sapiens
  misc_RNA (1)...(19): siRNA sense strand
agacacggcugaugaagau

SEQ ID NO: 2171316 - RNA, 19 nt, Homo sapiens
  misc_RNA (1)...(19): siRNA sense strand
gaagaucaaccaugaccuu

SEQ ID NO: 2171317 - RNA, 19 nt, Homo sapiens
  misc_RNA (1)...(19): siRNA sense strand
gagcagagcuggggaaguu

SEQ ID NO: 2171318 - RNA, 19 nt, Homo sapiens
  misc_RNA (1)...(19): siRNA sense strand
cagagaagguggccaugga

SEQ ID NO: 2171319 - RNA, 19 nt, Homo sapiens
  misc_RNA (1)...(19): siRNA sense strand
cuauaagagugaagaaaug

SEQ ID NO: 2171320 - RNA, 19 nt, Homo sapiens
  misc_RNA (1)...(19): siRNA sense strand
gaagaaauggaagaggaaa

SEQ ID NO: 2171321 - RNA, 19 nt, Homo sapiens
  misc_RNA (1)...(19): siRNA sense strand
ugaggacguugaggcuuua

SEQ ID NO: 2171322 - RNA, 19 nt, Homo sapiens
  misc_RNA (1)...(19): siRNA sense strand
gaggagcuggcuuacuaua

SEQ ID NO: 2171323 - RNA, 19 nt, Homo sapiens
  misc_RNA (1)...(19): siRNA sense strand
uaagagugaagaaauggaa

SEQ ID NO: 2171324 - RNA, 19 nt, Homo sapiens
  misc_RNA (1)...(19): siRNA sense strand
caaacaacgcgacgagauc

SEQ ID NO: 2171325 - RNA, 19 nt, Homo sapiens
  misc_RNA (1)...(19): siRNA sense strand
gaaggaggugguggacaaa

SEQ ID NO: 2171326 - RNA, 19 nt, Homo sapiens
  misc_RNA (1)...(19): siRNA sense strand
ggaggugguggacaaacaa

SEQ ID NO: 2171327 - RNA, 19 nt, Homo sapiens
  misc_RNA (1)...(19): siRNA sense strand
gagcgacaggugaugaaga

SEQ ID NO: 2171328 - RNA, 19 nt, Homo sapiens
  misc_RNA (1)...(19): siRNA sense strand
ggaagaggaaaaccgaaua

SEQ ID NO: 2171329 - RNA, 19 nt, Homo sapiens
  misc_RNA (1)...(19): siRNA sense strand
gagaggaacgagcucaagu

SEQ ID NO: 2171330 - RNA, 19 nt, Homo sapiens
  misc_RNA (1)...(19): siRNA sense strand
augaggacguugaggcuuu

SEQ ID NO: 2171331 - RNA, 19 nt, Homo sapiens
  misc_RNA (1)...(19): siRNA sense strand
agcgacaggugaugaagaa

SEQ ID NO: 2171332 - RNA, 19 nt, Homo sapiens
  misc_RNA (1)...(19): siRNA sense strand
ugaagaaauggaagaggaa

SEQ ID NO: 2171333 - RNA, 19 nt, Homo sapiens
  misc_RNA (1)...(19): siRNA sense strand
gacaggugaugaagaagcu

SEQ ID NO: 2171334 - RNA, 19 nt, Homo sapiens
  misc_RNA (1)...(19): siRNA sense strand
ggaggagcuggcuuacuau

SEQ ID NO: 2171335 - RNA, 19 nt, Homo sapiens
  misc_RNA (1)...(19): siRNA sense strand
gcucaaguccaagguguuc

SEQ ID NO: 2171336 - RNA, 19 nt, Homo sapiens
  misc_RNA (1)...(19): siRNA sense strand
ugaugaagaagcugaagga

SEQ ID NO: 2171337 - RNA, 19 nt, Homo sapiens
  misc_RNA (1)...(19): siRNA sense strand
acaaacaacgcgacgagau

SEQ ID NO: 2171338 - RNA, 19 nt, Homo sapiens
  misc_RNA (1)...(19): siRNA sense strand
cagacacggcugaugaaga

SEQ ID NO: 2171339 - RNA, 19 nt, Homo sapiens
  misc_RNA (1)...(19): siRNA sense strand
ugcaggaggagcuggcuua

SEQ ID NO: 2171340 - RNA, 19 nt, Homo sapiens
  misc_RNA (1)...(19): siRNA sense strand
gaccaaggagcaggagaug

SEQ ID NO: 2171341 - RNA, 19 nt, Homo sapiens
  misc_RNA (1)...(19): siRNA sense strand
ggacguugaggcuuuacag

SEQ ID NO: 2171342 - RNA, 19 nt, Homo sapiens
  misc_RNA (1)...(19): siRNA sense strand
gaagguggccauggaucuc

SEQ ID NO: 2171343 - RNA, 19 nt, Homo sapiens
  misc_RNA (1)...(19): siRNA sense strand
gggagcgacaggugaugaa

SEQ ID NO: 2171344 - RNA, 19 nt, Homo sapiens
  misc_RNA (1)...(19): siRNA sense strand
caaagacacucacaaugga

SEQ ID NO: 2171345 - RNA, 19 nt, Homo sapiens
  misc_RNA (1)...(19): siRNA sense strand
ucacaaacaucgagguuau

SEQ ID NO: 2171346 - RNA, 19 nt, Homo sapiens
  misc_RNA (1)...(19): siRNA sense strand
gcaaagacacucacaaugg

SEQ ID NO: 2171347 - RNA, 19 nt, Homo sapiens
  misc_RNA (1)...(19): siRNA sense strand
caacagcaccauagaaaga

SEQ ID NO: 2171348 - RNA, 19 nt, Homo sapiens
  misc_RNA (1)...(19): siRNA sense strand
caagagagaccaggaguuu

SEQ ID NO: 2171349 - RNA, 19 nt, Homo sapiens
  misc_RNA (1)...(19): siRNA sense strand
gcucacaccuccacagaag

SEQ ID NO: 2171350 - RNA, 19 nt, Homo sapiens
  misc_RNA (1)...(19): siRNA sense strand
acaucgagguuauuaauug

SEQ ID NO: 2171351 - RNA, 19 nt, Homo sapiens
  misc_RNA (1)...(19): siRNA sense strand
acacagaagugcccgcuau

SEQ ID NO: 2171352 - RNA, 19 nt, Homo sapiens
  misc_RNA (1)...(19): siRNA sense strand
ccacggacaucgcaaccaa

SEQ ID NO: 2171353 - RNA, 19 nt, Homo sapiens
  misc_RNA (1)...(19): siRNA sense strand
ccucagcccucucuguuga

SEQ ID NO: 2171354 - RNA, 19 nt, Homo sapiens
  misc_RNA (1)...(19): siRNA sense strand
ggaaugaccacaguucaga

SEQ ID NO: 2171355 - RNA, 19 nt, Homo sapiens
  misc_RNA (1)...(19): siRNA sense strand
gacaccaaguuacgucaaa

SEQ ID NO: 2171356 - RNA, 19 nt, Homo sapiens
  misc_RNA (1)...(19): siRNA sense strand
guuauuaauugcagcauca

SEQ ID NO: 2171357 - RNA, 19 nt, Homo sapiens
  misc_RNA (1)...(19): siRNA sense strand
cuaagggccuguccucaga

SEQ ID NO: 2171358 - RNA, 19 nt, Homo sapiens
  misc_RNA (1)...(19): siRNA sense strand
acaaacaucgagguuauua

SEQ ID NO: 2171359 - RNA, 19 nt, Homo sapiens
  misc_RNA (1)...(19): siRNA sense strand
cagcaucacagaaauagaa

SEQ ID NO: 2171360 - RNA, 19 nt, Homo sapiens
  misc_RNA (1)...(19): siRNA sense strand
ucacagaaauagaaacaac

SEQ ID NO: 2171361 - RNA, 19 nt, Homo sapiens
  misc_RNA (1)...(19): siRNA sense strand
gagcuggaaugaccacagu

SEQ ID NO: 2171362 - RNA, 19 nt, Homo sapiens
  misc_RNA (1)...(19): siRNA sense strand
gcgcugagaccucuucuag

SEQ ID NO: 2171363 - RNA, 19 nt, Homo sapiens
  misc_RNA (1)...(19): siRNA sense strand
gcaagagagaccaggaguu

SEQ ID NO: 2171364 - RNA, 19 nt, Homo sapiens
  misc_RNA (1)...(19): siRNA sense strand
acacaucacugaggucaca

SEQ ID NO: 2171365 - RNA, 19 nt, Homo sapiens
  misc_RNA (1)...(19): siRNA sense strand
gaagaggcaaagacacuca

SEQ ID NO: 2171366 - RNA, 19 nt, Homo sapiens
  misc_RNA (1)...(19): siRNA sense strand
gaccaggaguuucacaaaa

SEQ ID NO: 2171367 - RNA, 19 nt, Homo sapiens
  misc_RNA (1)...(19): siRNA sense strand
cagcuccggucuccauaga

SEQ ID NO: 2171368 - RNA, 19 nt, Homo sapiens
  misc_RNA (1)...(19): siRNA sense strand
aaacaucucccaacuucau

SEQ ID NO: 2171369 - RNA, 19 nt, Homo sapiens
  misc_RNA (1)...(19): siRNA sense strand
gacaacggacgacacagaa

SEQ ID NO: 2171370 - RNA, 19 nt, Homo sapiens
  misc_RNA (1)...(19): siRNA sense strand
cugaagcccuggugacugu

SEQ ID NO: 2171371 - RNA, 19 nt, Homo sapiens
  misc_RNA (1)...(19): siRNA sense strand
caaacaucgagguuauuaa

SEQ ID NO: 2171372 - RNA, 19 nt, Homo sapiens
  misc_RNA (1)...(19): siRNA sense strand
agagagaccaggaguuuca

SEQ ID NO: 2171373 - RNA, 19 nt, Homo sapiens
  misc_RNA (1)...(19): siRNA sense strand
ggcaaagacacucacaaug

SEQ ID NO: 2171374 - RNA, 19 nt, Homo sapiens
  misc_RNA (1)...(19): siRNA sense strand
caacggacgacacagaagu

SEQ ID NO: 2171375 - RNA, 19 nt, Homo sapiens
  misc_RNA (1)...(19): siRNA sense strand
caucacagaaauagaaaca

SEQ ID NO: 2171376 - RNA, 19 nt, Homo sapiens
  misc_RNA (1)...(19): siRNA sense strand
ccacgccgcucuggaaacu

SEQ ID NO: 2171377 - RNA, 19 nt, Homo sapiens
  misc_RNA (1)...(19): siRNA sense strand
caccauagaaagagaagug

SEQ ID NO: 2171378 - RNA, 19 nt, Homo sapiens
  misc_RNA (1)...(19): siRNA sense strand
gagaccaggaguuucacaa

SEQ ID NO: 2171379 - RNA, 19 nt, Homo sapiens
  misc_RNA (1)...(19): siRNA sense strand
cuguugagacaccaaguua

SEQ ID NO: 2171380 - RNA, 19 nt, Homo sapiens
  misc_RNA (1)...(19): siRNA sense strand
cauagaaagagaagugaca

SEQ ID NO: 2171381 - RNA, 19 nt, Homo sapiens
  misc_RNA (1)...(19): siRNA sense strand
ccaccaacagcaccauaga

SEQ ID NO: 2171382 - RNA, 19 nt, Homo sapiens
  misc_RNA (1)...(19): siRNA sense strand
gcaccugaugccacgauug

SEQ ID NO: 2171383 - RNA, 19 nt, Homo sapiens
  misc_RNA (1)...(19): siRNA sense strand
caaaaccacacaucacuga

SEQ ID NO: 2171384 - RNA, 19 nt, Homo sapiens
  misc_RNA (1)...(19): siRNA sense strand
agaccaggaguuucacaaa

SEQ ID NO: 2171385 - RNA, 19 nt, Homo sapiens
  misc_RNA (1)...(19): siRNA sense strand
accaacagcaccauagaaa

SEQ ID NO: 2171386 - RNA, 19 nt, Homo sapiens
  misc_RNA (1)...(19): siRNA sense strand
caucgagguuauuaauugc

SEQ ID NO: 2171387 - RNA, 19 nt, Homo sapiens
  misc_RNA (1)...(19): siRNA sense strand
gaauuuccccugcaagaga

SEQ ID NO: 2171388 - RNA, 19 nt, Homo sapiens
  misc_RNA (1)...(19): siRNA sense strand
gggcaaaacaacuuccuuu

SEQ ID NO: 2171389 - RNA, 19 nt, Homo sapiens
  misc_RNA (1)...(19): siRNA sense strand
gcuggaaugaccacaguuc

SEQ ID NO: 2171390 - RNA, 19 nt, Homo sapiens
  misc_RNA (1)...(19): siRNA sense strand
cugccugacuccacuaaca

SEQ ID NO: 2171391 - RNA, 19 nt, Homo sapiens
  misc_RNA (1)...(19): siRNA sense strand
ugacuccacuaacacaaaa

SEQ ID NO: 2171392 - RNA, 19 nt, Homo sapiens
  misc_RNA (1)...(19): siRNA sense strand
ugaccacaguucagaccau

SEQ ID NO: 2171393 - RNA, 19 nt, Homo sapiens
  misc_RNA (1)...(19): siRNA sense strand
ggaauccccuggaagaaac

SEQ ID NO: 2171394 - RNA, 19 nt, Homo sapiens
  misc_RNA (1)...(19): siRNA sense strand
caccaacagcaccauagaa

SEQ ID NO: 2171395 - RNA, 19 nt, Homo sapiens
  misc_RNA (1)...(19): siRNA sense strand
gucacaaacaucgagguua

SEQ ID NO: 2171396 - RNA, 19 nt, Homo sapiens
  misc_RNA (1)...(19): siRNA sense strand
aggcaaagacacucacaau

SEQ ID NO: 2171397 - RNA, 19 nt, Homo sapiens
  misc_RNA (1)...(19): siRNA sense strand
acagaagugcccgcuauga

SEQ ID NO: 2171398 - RNA, 19 nt, Homo sapiens
  misc_RNA (1)...(19): siRNA sense strand
gacacucacaauggacaua

SEQ ID NO: 2171399 - RNA, 19 nt, Homo sapiens
  misc_RNA (1)...(19): siRNA sense strand
gagaauuuccccugcaaga

SEQ ID NO: 2171400 - RNA, 19 nt, Homo sapiens
  misc_RNA (1)...(19): siRNA sense strand
aauugcagcaucacagaaa

SEQ ID NO: 2171401 - RNA, 19 nt, Homo sapiens
  misc_RNA (1)...(19): siRNA sense strand
ggaaacagcaucaaacaua

SEQ ID NO: 2171402 - RNA, 19 nt, Homo sapiens
  misc_RNA (1)...(19): siRNA sense strand
gaaacagcaucaaacauaa

SEQ ID NO: 2171403 - RNA, 19 nt, Homo sapiens
  misc_RNA (1)...(19): siRNA sense strand
gagaaacccuauaaaugua

SEQ ID NO: 2171404 - RNA, 19 nt, Homo sapiens
  misc_RNA (1)...(19): siRNA sense strand
ggacacaucugaaucaaca

SEQ ID NO: 2171405 - RNA, 19 nt, Homo sapiens
  misc_RNA (1)...(19): siRNA sense strand
gagaauuccuuccauuaaa

SEQ ID NO: 2171406 - RNA, 19 nt, Homo sapiens
  misc_RNA (1)...(19): siRNA sense strand
aaucugaacucaaaccuua

SEQ ID NO: 2171407 - RNA, 19 nt, Homo sapiens
  misc_RNA (1)...(19): siRNA sense strand
caagagauauuuaggacaa

SEQ ID NO: 2171408 - RNA, 19 nt, Homo sapiens
  misc_RNA (1)...(19): siRNA sense strand
gaaaagcccuauaaaugua

SEQ ID NO: 2171409 - RNA, 19 nt, Homo sapiens
  misc_RNA (1)...(19): siRNA sense strand
gaacaucauagacuucaua

SEQ ID NO: 2171410 - RNA, 19 nt, Homo sapiens
  misc_RNA (1)...(19): siRNA sense strand
gcagagaauuccuuccauu

SEQ ID NO: 2171411 - RNA, 19 nt, Homo sapiens
  misc_RNA (1)...(19): siRNA sense strand
gagagaaacccuauaaaug

SEQ ID NO: 2171412 - RNA, 19 nt, Homo sapiens
  misc_RNA (1)...(19): siRNA sense strand
aaacagacccgaaaucaaa

SEQ ID NO: 2171413 - RNA, 19 nt, Homo sapiens
  misc_RNA (1)...(19): siRNA sense strand
uaagagagacucccuauga

SEQ ID NO: 2171414 - RNA, 19 nt, Homo sapiens
  misc_RNA (1)...(19): siRNA sense strand
gagagacucccuaugaaua

SEQ ID NO: 2171415 - RNA, 19 nt, Homo sapiens
  misc_RNA (1)...(19): siRNA sense strand
agagaaaccuuacgaaugu

SEQ ID NO: 2171416 - RNA, 19 nt, Homo sapiens
  misc_RNA (1)...(19): siRNA sense strand
gagagaagcccuauaagug

SEQ ID NO: 2171417 - RNA, 19 nt, Homo sapiens
  misc_RNA (1)...(19): siRNA sense strand
agagaagccuugaguguaa

SEQ ID NO: 2171418 - RNA, 19 nt, Homo sapiens
  misc_RNA (1)...(19): siRNA sense strand
gaggauacaucucauucaa

SEQ ID NO: 2171419 - RNA, 19 nt, Homo sapiens
  misc_RNA (1)...(19): siRNA sense strand
ggagagaaacccuauaaau

SEQ ID NO: 2171420 - RNA, 19 nt, Homo sapiens
  misc_RNA (1)...(19): siRNA sense strand
ggauacaucucauucaaca

SEQ ID NO: 2171421 - RNA, 19 nt, Homo sapiens
  misc_RNA (1)...(19): siRNA sense strand
caacaucugaggauucaua

SEQ ID NO: 2171422 - RNA, 19 nt, Homo sapiens
  misc_RNA (1)...(19): siRNA sense strand
gagagaaaccuuacgaaug

SEQ ID NO: 2171423 - RNA, 19 nt, Homo sapiens
  misc_RNA (1)...(19): siRNA sense strand
ucacaucccuuacugaaca

SEQ ID NO: 2171424 - RNA, 19 nt, Homo sapiens
  misc_RNA (1)...(19): siRNA sense strand
gaagaaugggugauagaaa

SEQ ID NO: 2171425 - RNA, 19 nt, Homo sapiens
  misc_RNA (1)...(19): siRNA sense strand
gagaaaagcccuauaaaug

SEQ ID NO: 2171426 - RNA, 19 nt, Homo sapiens
  misc_RNA (1)...(19): siRNA sense strand
gagagaagccuugagugua

SEQ ID NO: 2171427 - RNA, 19 nt, Homo sapiens
  misc_RNA (1)...(19): siRNA sense strand
ggagacagcuucugguacu

SEQ ID NO: 2171428 - RNA, 19 nt, Homo sapiens
  misc_RNA (1)...(19): siRNA sense strand
gagacucccuaugaauaua

SEQ ID NO: 2171429 - RNA, 19 nt, Homo sapiens
  misc_RNA (1)...(19): siRNA sense strand
ggcaaagccuucagucaga

SEQ ID NO: 2171430 - RNA, 19 nt, Homo sapiens
  misc_RNA (1)...(19): siRNA sense strand
cagagaauuccuuccauua

SEQ ID NO: 2171431 - RNA, 19 nt, Homo sapiens
  misc_RNA (1)...(19): siRNA sense strand
ggagagaagcccuauaagu

SEQ ID NO: 2171432 - RNA, 19 nt, Homo sapiens
  misc_RNA (1)...(19): siRNA sense strand
agccacaccucaucucuua

SEQ ID NO: 2171433 - RNA, 19 nt, Homo sapiens
  misc_RNA (1)...(19): siRNA sense strand
caaacauaauucagacuug

SEQ ID NO: 2171434 - RNA, 19 nt, Homo sapiens
  misc_RNA (1)...(19): siRNA sense strand
caggagagaagcccuauaa

SEQ ID NO: 2171435 - RNA, 19 nt, Homo sapiens
  misc_RNA (1)...(19): siRNA sense strand
agagaaacccuauaaaugu

SEQ ID NO: 2171436 - RNA, 19 nt, Homo sapiens
  misc_RNA (1)...(19): siRNA sense strand
cgucagcauucauccuuua

SEQ ID NO: 2171437 - RNA, 19 nt, Homo sapiens
  misc_RNA (1)...(19): siRNA sense strand
ucaaacccaugagaugaua

SEQ ID NO: 2171438 - RNA, 19 nt, Homo sapiens
  misc_RNA (1)...(19): siRNA sense strand
gggagaaauuaugugaaua

SEQ ID NO: 2171439 - RNA, 19 nt, Homo sapiens
  misc_RNA (1)...(19): siRNA sense strand
gugcacaccuuaaucaaca

SEQ ID NO: 2171440 - RNA, 19 nt, Homo sapiens
  misc_RNA (1)...(19): siRNA sense strand
caacauauucuucuuacug

SEQ ID NO: 2171441 - RNA, 19 nt, Homo sapiens
  misc_RNA (1)...(19): siRNA sense strand
ggagagaagccuugagugu

SEQ ID NO: 2171442 - RNA, 19 nt, Homo sapiens
  misc_RNA (1)...(19): siRNA sense strand
ggagagaaaccuuacgaau

SEQ ID NO: 2171443 - RNA, 19 nt, Homo sapiens
  misc_RNA (1)...(19): siRNA sense strand
acuguaaucugaacucaaa

SEQ ID NO: 2171444 - RNA, 19 nt, Homo sapiens
  misc_RNA (1)...(19): siRNA sense strand
uuacgaaugugguuucugu

SEQ ID NO: 2171445 - RNA, 19 nt, Homo sapiens
  misc_RNA (1)...(19): siRNA sense strand
gaaucaacaugaaagaacu

SEQ ID NO: 2171446 - RNA, 19 nt, Homo sapiens
  misc_RNA (1)...(19): siRNA sense strand
ggaagaaugggugauagaa

SEQ ID NO: 2171447 - RNA, 19 nt, Homo sapiens
  misc_RNA (1)...(19): siRNA sense strand
cgggagaaauuaugugaau

SEQ ID NO: 2171448 - RNA, 19 nt, Homo sapiens
  misc_RNA (1)...(19): siRNA sense strand
caggagagaaacccuauaa

SEQ ID NO: 2171449 - RNA, 19 nt, Homo sapiens
  misc_RNA (1)...(19): siRNA sense strand
ugauuaccauccagaguuu

SEQ ID NO: 2171450 - RNA, 19 nt, Homo sapiens
  misc_RNA (1)...(19): siRNA sense strand
ccacaagccagaauauuuc

SEQ ID NO: 2171451 - RNA, 19 nt, Homo sapiens
  misc_RNA (1)...(19): siRNA sense strand
gcagagaaacccagugagu

SEQ ID NO: 2171452 - RNA, 19 nt, Homo sapiens
  misc_RNA (1)...(19): siRNA sense strand
gaauauagugaguguggaa

SEQ ID NO: 2171453 - RNA, 19 nt, Homo sapiens
  misc_RNA (1)...(19): siRNA sense strand
uaggaggacucugggauuu

SEQ ID NO: 2171454 - RNA, 19 nt, Homo sapiens
  misc_RNA (1)...(19): siRNA sense strand
aagagagacucccuaugaa

SEQ ID NO: 2171455 - RNA, 19 nt, Homo sapiens
  misc_RNA (1)...(19): siRNA sense strand
cuauaagugugaugaaugu

SEQ ID NO: 2171456 - RNA, 19 nt, Homo sapiens
  misc_RNA (1)...(19): siRNA sense strand
aagaaugggugauagaaag

SEQ ID NO: 2171457 - RNA, 19 nt, Homo sapiens
  misc_RNA (1)...(19): siRNA sense strand
gagacgugaugcuggagaa

SEQ ID NO: 2171458 - RNA, 19 nt, Homo sapiens
  misc_RNA (1)...(19): siRNA sense strand
gcaucaaacauaauucaga

SEQ ID NO: 2171459 - RNA, 19 nt, Homo sapiens
  misc_RNA (1)...(19): siRNA sense strand
agagaauuccuuccauuaa

SEQ ID NO: 2171460 - RNA, 19 nt, Homo sapiens
  misc_RNA (1)...(19): siRNA sense strand
aggaaucacugacguuuca

SEQ ID NO: 2171461 - RNA, 19 nt, Homo sapiens
  misc_RNA (1)...(19): siRNA sense strand
gaggaagaaugggugauag

SEQ ID NO: 2171462 - RNA, 19 nt, Homo sapiens
  misc_RNA (1)...(19): siRNA sense strand
gcacugggguaucagcuuu

SEQ ID NO: 2171463 - RNA, 19 nt, Homo sapiens
  misc_RNA (1)...(19): siRNA sense strand
gcaguuggagcuagaggaa

SEQ ID NO: 2171464 - RNA, 19 nt, Homo sapiens
  misc_RNA (1)...(19): siRNA sense strand
gaggacacaucugaaucaa

SEQ ID NO: 2171465 - RNA, 19 nt, Homo sapiens
  misc_RNA (1)...(19): siRNA sense strand
caucacaucccuuacugaa

SEQ ID NO: 2171466 - RNA, 19 nt, Homo sapiens
  misc_RNA (1)...(19): siRNA sense strand
gaggauucauacuggagaa

SEQ ID NO: 2171467 - RNA, 19 nt, Homo sapiens
  misc_RNA (1)...(19): siRNA sense strand
ggaggaggaagaaaugaau

SEQ ID NO: 2171468 - RNA, 19 nt, Homo sapiens
  misc_RNA (1)...(19): siRNA sense strand
ccacaagagauauuuagga

SEQ ID NO: 2171469 - RNA, 19 nt, Homo sapiens
  misc_RNA (1)...(19): siRNA sense strand
caacaucagagaauucaca

SEQ ID NO: 2171470 - RNA, 19 nt, Homo sapiens
  misc_RNA (1)...(19): siRNA sense strand
gaaaacagacccgaaauca

SEQ ID NO: 2171471 - RNA, 19 nt, Homo sapiens
  misc_RNA (1)...(19): siRNA sense strand
cuacaggaaucuaguugca

SEQ ID NO: 2171472 - RNA, 19 nt, Homo sapiens
  misc_RNA (1)...(19): siRNA sense strand
ggagaaaagcccuauaaau

SEQ ID NO: 2171473 - RNA, 19 nt, Homo sapiens
  misc_RNA (1)...(19): siRNA sense strand
cgccacaguccuucauuua

SEQ ID NO: 2171474 - RNA, 19 nt, Homo sapiens
  misc_RNA (1)...(19): siRNA sense strand
gaacucauacaggagagaa

SEQ ID NO: 2171475 - RNA, 19 nt, Homo sapiens
  misc_RNA (1)...(19): siRNA sense strand
caaccacaagccagaauau

SEQ ID NO: 2171476 - RNA, 19 nt, Homo sapiens
  misc_RNA (1)...(19): siRNA sense strand
ccacaguccuucauuuagc

SEQ ID NO: 2171477 - RNA, 19 nt, Homo sapiens
  misc_RNA (1)...(19): siRNA sense strand
ggagcuagaggaagaaugg

SEQ ID NO: 2171478 - RNA, 19 nt, Homo sapiens
  misc_RNA (1)...(19): siRNA sense strand
gaaugauggcucacagaug

SEQ ID NO: 2171479 - RNA, 19 nt, Homo sapiens
  misc_RNA (1)...(19): siRNA sense strand
ccucagauguugcuuacag

SEQ ID NO: 2171480 - RNA, 19 nt, Homo sapiens
  misc_RNA (1)...(19): siRNA sense strand
gaggaagaaaugaaugaug

SEQ ID NO: 2171481 - RNA, 19 nt, Homo sapiens
  misc_RNA (1)...(19): siRNA sense strand
gagauauuuaggacaagua

SEQ ID NO: 2171482 - RNA, 19 nt, Homo sapiens
  misc_RNA (1)...(19): siRNA sense strand
gcauucauccuuuacucaa

SEQ ID NO: 2171483 - RNA, 19 nt, Homo sapiens
  misc_RNA (1)...(19): siRNA sense strand
gagaagccuugaguguaau

SEQ ID NO: 2171484 - RNA, 19 nt, Homo sapiens
  misc_RNA (1)...(19): siRNA sense strand
caggagacagcuucuggua

SEQ ID NO: 2171485 - RNA, 19 nt, Homo sapiens
  misc_RNA (1)...(19): siRNA sense strand
gaaaaucaaacccaugaga

SEQ ID NO: 2171486 - RNA, 19 nt, Homo sapiens
  misc_RNA (1)...(19): siRNA sense strand
ggagaaaacagacccgaaa

SEQ ID NO: 2171487 - RNA, 19 nt, Homo sapiens
  misc_RNA (1)...(19): siRNA sense strand
agagaagcccuauaagugu

SEQ ID NO: 2171488 - RNA, 19 nt, Homo sapiens
  misc_RNA (1)...(19): siRNA sense strand
gaaaaccacaagagauauu

SEQ ID NO: 2171489 - RNA, 19 nt, Homo sapiens
  misc_RNA (1)...(19): siRNA sense strand
ucgccacaguccuucauuu

SEQ ID NO: 2171490 - RNA, 19 nt, Homo sapiens
  misc_RNA (1)...(19): siRNA sense strand
ggagaacuacaggaaucua

SEQ ID NO: 2171491 - RNA, 19 nt, Homo sapiens
  misc_RNA (1)...(19): siRNA sense strand
caucugaaucaacaugaaa

SEQ ID NO: 2171492 - RNA, 19 nt, Homo sapiens
  misc_RNA (1)...(19): siRNA sense strand
aaucaaacccaugagauga

SEQ ID NO: 2171493 - RNA, 19 nt, Homo sapiens
  misc_RNA (1)...(19): siRNA sense strand
caucugaggauucauacug

SEQ ID NO: 2171494 - RNA, 19 nt, Homo sapiens
  misc_RNA (1)...(19): siRNA sense strand
cagcaucaaacauaauuca

SEQ ID NO: 2171495 - RNA, 19 nt, Homo sapiens
  misc_RNA (1)...(19): siRNA sense strand
aaacuguaaucugaacuca

SEQ ID NO: 2171496 - RNA, 19 nt, Homo sapiens
  misc_RNA (1)...(19): siRNA sense strand
ggaggacucugggauuuug

SEQ ID NO: 2171497 - RNA, 19 nt, Homo sapiens
  misc_RNA (1)...(19): siRNA sense strand
agagaaacccagugagugu

SEQ ID NO: 2171498 - RNA, 19 nt, Homo sapiens
  misc_RNA (1)...(19): siRNA sense strand
gagaaaccuuacgaaugug

SEQ ID NO: 2171499 - RNA, 19 nt, Homo sapiens
  misc_RNA (1)...(19): siRNA sense strand
agaggaagaaugggugaua

SEQ ID NO: 2171500 - RNA, 19 nt, Homo sapiens
  misc_RNA (1)...(19): siRNA sense strand
gagaauucacacaggagaa

SEQ ID NO: 2171501 - RNA, 19 nt, Homo sapiens
  misc_RNA (1)...(19): siRNA sense strand
ggaaacagcaucaaacaua

SEQ ID NO: 2171502 - RNA, 19 nt, Homo sapiens
  misc_RNA (1)...(19): siRNA sense strand
gaaacagcaucaaacauaa

SEQ ID NO: 2171503 - RNA, 19 nt, Homo sapiens
  misc_RNA (1)...(19): siRNA sense strand
gagaaacccuauaaaugua

SEQ ID NO: 2171504 - RNA, 19 nt, Homo sapiens
  misc_RNA (1)...(19): siRNA sense strand
ggacacaucugaaucaaca

SEQ ID NO: 2171505 - RNA, 19 nt, Homo sapiens
  misc_RNA (1)...(19): siRNA sense strand
gagaauuccuuccauuaaa

SEQ ID NO: 2171506 - RNA, 19 nt, Homo sapiens
  misc_RNA (1)...(19): siRNA sense strand
aaucugaacucaaaccuua

SEQ ID NO: 2171507 - RNA, 19 nt, Homo sapiens
  misc_RNA (1)...(19): siRNA sense strand
caagagauauuuaggacaa

SEQ ID NO: 2171508 - RNA, 19 nt, Homo sapiens
  misc_RNA (1)...(19): siRNA sense strand
gaaaagcccuauaaaugua

SEQ ID NO: 2171509 - RNA, 19 nt, Homo sapiens
  misc_RNA (1)...(19): siRNA sense strand
gaacaucauagacuucaua

SEQ ID NO: 2171510 - RNA, 19 nt, Homo sapiens
  misc_RNA (1)...(19): siRNA sense strand
gcagagaauuccuuccauu

SEQ ID NO: 2171511 - RNA, 19 nt, Homo sapiens
  misc_RNA (1)...(19): siRNA sense strand
gagagaaacccuauaaaug

SEQ ID NO: 2171512 - RNA, 19 nt, Homo sapiens
  misc_RNA (1)...(19): siRNA sense strand
aaacagacccgaaaucaaa

SEQ ID NO: 2171513 - RNA, 19 nt, Homo sapiens
  misc_RNA (1)...(19): siRNA sense strand
uaagagagacucccuauga

SEQ ID NO: 2171514 - RNA, 19 nt, Homo sapiens
  misc_RNA (1)...(19): siRNA sense strand
gagagacucccuaugaaua

SEQ ID NO: 2171515 - RNA, 19 nt, Homo sapiens
  misc_RNA (1)...(19): siRNA sense strand
agagaaaccuuacgaaugu

SEQ ID NO: 2171516 - RNA, 19 nt, Homo sapiens
  misc_RNA (1)...(19): siRNA sense strand
gagagaagcccuauaagug

SEQ ID NO: 2171517 - RNA, 19 nt, Homo sapiens
  misc_RNA (1)...(19): siRNA sense strand
agagaagccuugaguguaa

SEQ ID NO: 2171518 - RNA, 19 nt, Homo sapiens
  misc_RNA (1)...(19): siRNA sense strand
gaggauacaucucauucaa

SEQ ID NO: 2171519 - RNA, 19 nt, Homo sapiens
  misc_RNA (1)...(19): siRNA sense strand
ggagagaaacccuauaaau

SEQ ID NO: 2171520 - RNA, 19 nt, Homo sapiens
  misc_RNA (1)...(19): siRNA sense strand
ggauacaucucauucaaca

SEQ ID NO: 2171521 - RNA, 19 nt, Homo sapiens
  misc_RNA (1)...(19): siRNA sense strand
caacaucugaggauucaua

SEQ ID NO: 2171522 - RNA, 19 nt, Homo sapiens
  misc_RNA (1)...(19): siRNA sense strand
gagagaaaccuuacgaaug

SEQ ID NO: 2171523 - RNA, 19 nt, Homo sapiens
  misc_RNA (1)...(19): siRNA sense strand
ucacaucccuuacugaaca

SEQ ID NO: 2171524 - RNA, 19 nt, Homo sapiens
  misc_RNA (1)...(19): siRNA sense strand
gaagaaugggugauagaaa

SEQ ID NO: 2171525 - RNA, 19 nt, Homo sapiens
  misc_RNA (1)...(19): siRNA sense strand
gagaaaagcccuauaaaug

SEQ ID NO: 2171526 - RNA, 19 nt, Homo sapiens
  misc_RNA (1)...(19): siRNA sense strand
gagagaagccuugagugua

SEQ ID NO: 2171527 - RNA, 19 nt, Homo sapiens
  misc_RNA (1)...(19): siRNA sense strand
ggagacagcuucugguacu

SEQ ID NO: 2171528 - RNA, 19 nt, Homo sapiens
  misc_RNA (1)...(19): siRNA sense strand
gagacucccuaugaauaua

SEQ ID NO: 2171529 - RNA, 19 nt, Homo sapiens
  misc_RNA (1)...(19): siRNA sense strand
ggcaaagccuucagucaga

SEQ ID NO: 2171530 - RNA, 19 nt, Homo sapiens
  misc_RNA (1)...(19): siRNA sense strand
cagagaauuccuuccauua

SEQ ID NO: 2171531 - RNA, 19 nt, Homo sapiens
  misc_RNA (1)...(19): siRNA sense strand
ggagagaagcccuauaagu

SEQ ID NO: 2171532 - RNA, 19 nt, Homo sapiens
  misc_RNA (1)...(19): siRNA sense strand
agccacaccucaucucuua

SEQ ID NO: 2171533 - RNA, 19 nt, Homo sapiens
  misc_RNA (1)...(19): siRNA sense strand
caaacauaauucagacuug

SEQ ID NO: 2171534 - RNA, 19 nt, Homo sapiens
  misc_RNA (1)...(19): siRNA sense strand
caggagagaagcccuauaa

SEQ ID NO: 2171535 - RNA, 19 nt, Homo sapiens
  misc_RNA (1)...(19): siRNA sense strand
agagaaacccuauaaaugu

SEQ ID NO: 2171536 - RNA, 19 nt, Homo sapiens
  misc_RNA (1)...(19): siRNA sense strand
cgucagcauucauccuuua

SEQ ID NO: 2171537 - RNA, 19 nt, Homo sapiens
  misc_RNA (1)...(19): siRNA sense strand
ucaaacccaugagaugaua

SEQ ID NO: 2171538 - RNA, 19 nt, Homo sapiens
  misc_RNA (1)...(19): siRNA sense strand
gggagaaauuaugugaaua

SEQ ID NO: 2171539 - RNA, 19 nt, Homo sapiens
  misc_RNA (1)...(19): siRNA sense strand
gugcacaccuuaaucaaca

SEQ ID NO: 2171540 - RNA, 19 nt, Homo sapiens
  misc_RNA (1)...(19): siRNA sense strand
caacauauucuucuuacug

SEQ ID NO: 2171541 - RNA, 19 nt, Homo sapiens
  misc_RNA (1)...(19): siRNA sense strand
ggagagaagccuugagugu

SEQ ID NO: 2171542 - RNA, 19 nt, Homo sapiens
  misc_RNA (1)...(19): siRNA sense strand
ggagagaaaccuuacgaau

SEQ ID NO: 2171543 - RNA, 19 nt, Homo sapiens
  misc_RNA (1)...(19): siRNA sense strand
acuguaaucugaacucaaa

SEQ ID NO: 2171544 - RNA, 19 nt, Homo sapiens
  misc_RNA (1)...(19): siRNA sense strand
uuacgaaugugguuucugu

SEQ ID NO: 2171545 - RNA, 19 nt, Homo sapiens
  misc_RNA (1)...(19): siRNA sense strand
gaaucaacaugaaagaacu

SEQ ID NO: 2171546 - RNA, 19 nt, Homo sapiens
  misc_RNA (1)...(19): siRNA sense strand
ggaagaaugggugauagaa

SEQ ID NO: 2171547 - RNA, 19 nt, Homo sapiens
  misc_RNA (1)...(19): siRNA sense strand
cgggagaaauuaugugaau

SEQ ID NO: 2171548 - RNA, 19 nt, Homo sapiens
  misc_RNA (1)...(19): siRNA sense strand
caggagagaaacccuauaa

SEQ ID NO: 2171549 - RNA, 19 nt, Homo sapiens
  misc_RNA (1)...(19): siRNA sense strand
ugauuaccauccagaguuu

SEQ ID NO: 2171550 - RNA, 19 nt, Homo sapiens
  misc_RNA (1)...(19): siRNA sense strand
ccacaagccagaauauuuc

SEQ ID NO: 2171551 - RNA, 19 nt, Homo sapiens
  misc_RNA (1)...(19): siRNA sense strand
gcagagaaacccagugagu

SEQ ID NO: 2171552 - RNA, 19 nt, Homo sapiens
  misc_RNA (1)...(19): siRNA sense strand
gaauauagugaguguggaa

SEQ ID NO: 2171553 - RNA, 19 nt, Homo sapiens
  misc_RNA (1)...(19): siRNA sense strand
uaggaggacucugggauuu

SEQ ID NO: 2171554 - RNA, 19 nt, Homo sapiens
  misc_RNA (1)...(19): siRNA sense strand
aagagagacucccuaugaa

SEQ ID NO: 2171555 - RNA, 19 nt, Homo sapiens
  misc_RNA (1)...(19): siRNA sense strand
cuauaagugugaugaaugu

SEQ ID NO: 2171556 - RNA, 19 nt, Homo sapiens
  misc_RNA (1)...(19): siRNA sense strand
aagaaugggugauagaaag

SEQ ID NO: 2171557 - RNA, 19 nt, Homo sapiens
  misc_RNA (1)...(19): siRNA sense strand
gagacgugaugcuggagaa

SEQ ID NO: 2171558 - RNA, 19 nt, Homo sapiens
  misc_RNA (1)...(19): siRNA sense strand
gcaucaaacauaauucaga

SEQ ID NO: 2171559 - RNA, 19 nt, Homo sapiens
  misc_RNA (1)...(19): siRNA sense strand
agagaauuccuuccauuaa

SEQ ID NO: 2171560 - RNA, 19 nt, Homo sapiens
  misc_RNA (1)...(19): siRNA sense strand
aggaaucacugacguuuca

SEQ ID NO: 2171561 - RNA, 19 nt, Homo sapiens
  misc_RNA (1)...(19): siRNA sense strand
gaggaagaaugggugauag

SEQ ID NO: 2171562 - RNA, 19 nt, Homo sapiens
  misc_RNA (1)...(19): siRNA sense strand
gcacugggguaucagcuuu

SEQ ID NO: 2171563 - RNA, 19 nt, Homo sapiens
  misc_RNA (1)...(19): siRNA sense strand
gcaguuggagcuagaggaa

SEQ ID NO: 2171564 - RNA, 19 nt, Homo sapiens
  misc_RNA (1)...(19): siRNA sense strand
gaggacacaucugaaucaa

SEQ ID NO: 2171565 - RNA, 19 nt, Homo sapiens
  misc_RNA (1)...(19): siRNA sense strand
caucacaucccuuacugaa

SEQ ID NO: 2171566 - RNA, 19 nt, Homo sapiens
  misc_RNA (1)...(19): siRNA sense strand
gaggauucauacuggagaa

SEQ ID NO: 2171567 - RNA, 19 nt, Homo sapiens
  misc_RNA (1)...(19): siRNA sense strand
ggaggaggaagaaaugaau

SEQ ID NO: 2171568 - RNA, 19 nt, Homo sapiens
  misc_RNA (1)...(19): siRNA sense strand
ccacaagagauauuuagga

SEQ ID NO: 2171569 - RNA, 19 nt, Homo sapiens
  misc_RNA (1)...(19): siRNA sense strand
caacaucagagaauucaca

SEQ ID NO: 2171570 - RNA, 19 nt, Homo sapiens
  misc_RNA (1)...(19): siRNA sense strand
gaaaacagacccgaaauca

SEQ ID NO: 2171571 - RNA, 19 nt, Homo sapiens
  misc_RNA (1)...(19): siRNA sense strand
cuacaggaaucuaguugca

SEQ ID NO: 2171572 - RNA, 19 nt, Homo sapiens
  misc_RNA (1)...(19): siRNA sense strand
ggagaaaagcccuauaaau

SEQ ID NO: 2171573 - RNA, 19 nt, Homo sapiens
  misc_RNA (1)...(19): siRNA sense strand
cgccacaguccuucauuua

SEQ ID NO: 2171574 - RNA, 19 nt, Homo sapiens
  misc_RNA (1)...(19): siRNA sense strand
gaacucauacaggagagaa

SEQ ID NO: 2171575 - RNA, 19 nt, Homo sapiens
  misc_RNA (1)...(19): siRNA sense strand
caaccacaagccagaauau

SEQ ID NO: 2171576 - RNA, 19 nt, Homo sapiens
  misc_RNA (1)...(19): siRNA sense strand
ccacaguccuucauuuagc

SEQ ID NO: 2171577 - RNA, 19 nt, Homo sapiens
  misc_RNA (1)...(19): siRNA sense strand
ggagcuagaggaagaaugg

SEQ ID NO: 2171578 - RNA, 19 nt, Homo sapiens
  misc_RNA (1)...(19): siRNA sense strand
gaaugauggcucacagaug

SEQ ID NO: 2171579 - RNA, 19 nt, Homo sapiens
  misc_RNA (1)...(19): siRNA sense strand
ccucagauguugcuuacag

SEQ ID NO: 2171580 - RNA, 19 nt, Homo sapiens
  misc_RNA (1)...(19): siRNA sense strand
gaggaagaaaugaaugaug

SEQ ID NO: 2171581 - RNA, 19 nt, Homo sapiens
  misc_RNA (1)...(19): siRNA sense strand
gagauauuuaggacaagua

SEQ ID NO: 2171582 - RNA, 19 nt, Homo sapiens
  misc_RNA (1)...(19): siRNA sense strand
gcauucauccuuuacucaa

SEQ ID NO: 2171583 - RNA, 19 nt, Homo sapiens
  misc_RNA (1)...(19): siRNA sense strand
gagaagccuugaguguaau

SEQ ID NO: 2171584 - RNA, 19 nt, Homo sapiens
  misc_RNA (1)...(19): siRNA sense strand
caggagacagcuucuggua

SEQ ID NO: 2171585 - RNA, 19 nt, Homo sapiens
  misc_RNA (1)...(19): siRNA sense strand
gaaaaucaaacccaugaga

SEQ ID NO: 2171586 - RNA, 19 nt, Homo sapiens
  misc_RNA (1)...(19): siRNA sense strand
ggagaaaacagacccgaaa

SEQ ID NO: 2171587 - RNA, 19 nt, Homo sapiens
  misc_RNA (1)...(19): siRNA sense strand
agagaagcccuauaagugu

SEQ ID NO: 2171588 - RNA, 19 nt, Homo sapiens
  misc_RNA (1)...(19): siRNA sense strand
gaaaaccacaagagauauu

SEQ ID NO: 2171589 - RNA, 19 nt, Homo sapiens
  misc_RNA (1)...(19): siRNA sense strand
ucgccacaguccuucauuu

SEQ ID NO: 2171590 - RNA, 19 nt, Homo sapiens
  misc_RNA (1)...(19): siRNA sense strand
ggagaacuacaggaaucua

SEQ ID NO: 2171591 - RNA, 19 nt, Homo sapiens
  misc_RNA (1)...(19): siRNA sense strand
caucugaaucaacaugaaa

SEQ ID NO: 2171592 - RNA, 19 nt, Homo sapiens
  misc_RNA (1)...(19): siRNA sense strand
aaucaaacccaugagauga

SEQ ID NO: 2171593 - RNA, 19 nt, Homo sapiens
  misc_RNA (1)...(19): siRNA sense strand
caucugaggauucauacug

SEQ ID NO: 2171594 - RNA, 19 nt, Homo sapiens
  misc_RNA (1)...(19): siRNA sense strand
cagcaucaaacauaauuca

SEQ ID NO: 2171595 - RNA, 19 nt, Homo sapiens
  misc_RNA (1)...(19): siRNA sense strand
aaacuguaaucugaacuca

SEQ ID NO: 2171596 - RNA, 19 nt, Homo sapiens
  misc_RNA (1)...(19): siRNA sense strand
ggaggacucugggauuuug

SEQ ID NO: 2171597 - RNA, 19 nt, Homo sapiens
  misc_RNA (1)...(19): siRNA sense strand
agagaaacccagugagugu

SEQ ID NO: 2171598 - RNA, 19 nt, Homo sapiens
  misc_RNA (1)...(19): siRNA sense strand
gagaaaccuuacgaaugug

SEQ ID NO: 2171599 - RNA, 19 nt, Homo sapiens
  misc_RNA (1)...(19): siRNA sense strand
agaggaagaaugggugaua

SEQ ID NO: 2171600 - RNA, 19 nt, Homo sapiens
  misc_RNA (1)...(19): siRNA sense strand
gagaauucacacaggagaa

SEQ ID NO: 2171601 - RNA, 19 nt, Homo sapiens
  misc_RNA (1)...(19): siRNA sense strand
ggacaaagauggacaagga

SEQ ID NO: 2171602 - RNA, 19 nt, Homo sapiens
  misc_RNA (1)...(19): siRNA sense strand
ggaagaaagagaugaauua

SEQ ID NO: 2171603 - RNA, 19 nt, Homo sapiens
  misc_RNA (1)...(19): siRNA sense strand
gaacuacauuucugacuuu

SEQ ID NO: 2171604 - RNA, 19 nt, Homo sapiens
  misc_RNA (1)...(19): siRNA sense strand
ugaaagaacuagauacuga

SEQ ID NO: 2171605 - RNA, 19 nt, Homo sapiens
  misc_RNA (1)...(19): siRNA sense strand
aaacaaggaucuagaagga

SEQ ID NO: 2171606 - RNA, 19 nt, Homo sapiens
  misc_RNA (1)...(19): siRNA sense strand
ggacacagcagcucaguga

SEQ ID NO: 2171607 - RNA, 19 nt, Homo sapiens
  misc_RNA (1)...(19): siRNA sense strand
gcugauaaauugaagaaga

SEQ ID NO: 2171608 - RNA, 19 nt, Homo sapiens
  misc_RNA (1)...(19): siRNA sense strand
ggaacuacauuucugacuu

SEQ ID NO: 2171609 - RNA, 19 nt, Homo sapiens
  misc_RNA (1)...(19): siRNA sense strand
gcuggaaaguagagaauuu

SEQ ID NO: 2171610 - RNA, 19 nt, Homo sapiens
  misc_RNA (1)...(19): siRNA sense strand
gauaaaagcuuguaugaca

SEQ ID NO: 2171611 - RNA, 19 nt, Homo sapiens
  misc_RNA (1)...(19): siRNA sense strand
agaaagagaugaauuagag

SEQ ID NO: 2171612 - RNA, 19 nt, Homo sapiens
  misc_RNA (1)...(19): siRNA sense strand
acaaggagcucauugacuu

SEQ ID NO: 2171613 - RNA, 19 nt, Homo sapiens
  misc_RNA (1)...(19): siRNA sense strand
ggacagaacgcaggcauuu

SEQ ID NO: 2171614 - RNA, 19 nt, Homo sapiens
  misc_RNA (1)...(19): siRNA sense strand
gacaagaccuggaacuaca

SEQ ID NO: 2171615 - RNA, 19 nt, Homo sapiens
  misc_RNA (1)...(19): siRNA sense strand
gcacgaagacgccuaaagu

SEQ ID NO: 2171616 - RNA, 19 nt, Homo sapiens
  misc_RNA (1)...(19): siRNA sense strand
gaaaacagcugaggacaga

SEQ ID NO: 2171617 - RNA, 19 nt, Homo sapiens
  misc_RNA (1)...(19): siRNA sense strand
ggauggcucuuugcuguuu

SEQ ID NO: 2171618 - RNA, 19 nt, Homo sapiens
  misc_RNA (1)...(19): siRNA sense strand
acaaggaucuagaaggaaa

SEQ ID NO: 2171619 - RNA, 19 nt, Homo sapiens
  misc_RNA (1)...(19): siRNA sense strand
ggccuucgauguuaaguga

SEQ ID NO: 2171620 - RNA, 19 nt, Homo sapiens
  misc_RNA (1)...(19): siRNA sense strand
uggagaagcuggacaagga

SEQ ID NO: 2171621 - RNA, 19 nt, Homo sapiens
  misc_RNA (1)...(19): siRNA sense strand
gauaaacaaggaucuagaa

SEQ ID NO: 2171622 - RNA, 19 nt, Homo sapiens
  misc_RNA (1)...(19): siRNA sense strand
ggacugaggccgugcugaa

SEQ ID NO: 2171623 - RNA, 19 nt, Homo sapiens
  misc_RNA (1)...(19): siRNA sense strand
ucaagccgaugauaaacaa

SEQ ID NO: 2171624 - RNA, 19 nt, Homo sapiens
  misc_RNA (1)...(19): siRNA sense strand
uaagcagucuccugaccua

SEQ ID NO: 2171625 - RNA, 19 nt, Homo sapiens
  misc_RNA (1)...(19): siRNA sense strand
caucaaaugucuucuacag

SEQ ID NO: 2171626 - RNA, 19 nt, Homo sapiens
  misc_RNA (1)...(19): siRNA sense strand
gaagaaagagaugaauuag

SEQ ID NO: 2171627 - RNA, 19 nt, Homo sapiens
  misc_RNA (1)...(19): siRNA sense strand
ucucugggcuuuggaauga

SEQ ID NO: 2171628 - RNA, 19 nt, Homo sapiens
  misc_RNA (1)...(19): siRNA sense strand
caaaugucuucuacaggaa

SEQ ID NO: 2171629 - RNA, 19 nt, Homo sapiens
  misc_RNA (1)...(19): siRNA sense strand
uugcagagcuggagaacga

SEQ ID NO: 2171630 - RNA, 19 nt, Homo sapiens
  misc_RNA (1)...(19): siRNA sense strand
gcucagaggaggaaacguu

SEQ ID NO: 2171631 - RNA, 19 nt, Homo sapiens
  misc_RNA (1)...(19): siRNA sense strand
uagaggauccggaguuuga

SEQ ID NO: 2171632 - RNA, 19 nt, Homo sapiens
  misc_RNA (1)...(19): siRNA sense strand
ucagccaccucuauaucua

SEQ ID NO: 2171633 - RNA, 19 nt, Homo sapiens
  misc_RNA (1)...(19): siRNA sense strand
gcaggaagaaagagaugaa

SEQ ID NO: 2171634 - RNA, 19 nt, Homo sapiens
  misc_RNA (1)...(19): siRNA sense strand
ucccaggccuucgauguua

SEQ ID NO: 2171635 - RNA, 19 nt, Homo sapiens
  misc_RNA (1)...(19): siRNA sense strand
ccaccuacacgaucaacua

SEQ ID NO: 2171636 - RNA, 19 nt, Homo sapiens
  misc_RNA (1)...(19): siRNA sense strand
cagccgagaucgccacaga

SEQ ID NO: 2171637 - RNA, 19 nt, Homo sapiens
  misc_RNA (1)...(19): siRNA sense strand
ggaaccgacugcugaggau

SEQ ID NO: 2171638 - RNA, 19 nt, Homo sapiens
  misc_RNA (1)...(19): siRNA sense strand
gcucuuugcuguuucuucu

SEQ ID NO: 2171639 - RNA, 19 nt, Homo sapiens
  misc_RNA (1)...(19): siRNA sense strand
gaaagaacuagauacugau

SEQ ID NO: 2171640 - RNA, 19 nt, Homo sapiens
  misc_RNA (1)...(19): siRNA sense strand
ggacaagaccuggaacuac

SEQ ID NO: 2171641 - RNA, 19 nt, Homo sapiens
  misc_RNA (1)...(19): siRNA sense strand
gagaucaucagucggauuc

SEQ ID NO: 2171642 - RNA, 19 nt, Homo sapiens
  misc_RNA (1)...(19): siRNA sense strand
ccagucugcccugaaauua

SEQ ID NO: 2171643 - RNA, 19 nt, Homo sapiens
  misc_RNA (1)...(19): siRNA sense strand
cgagaucgccacagaggaa

SEQ ID NO: 2171644 - RNA, 19 nt, Homo sapiens
  misc_RNA (1)...(19): siRNA sense strand
gaagaauccgagagcaaga

SEQ ID NO: 2171645 - RNA, 19 nt, Homo sapiens
  misc_RNA (1)...(19): siRNA sense strand
uacugaugcugauaaauug

SEQ ID NO: 2171646 - RNA, 19 nt, Homo sapiens
  misc_RNA (1)...(19): siRNA sense strand
gaucaucagucggauucug

SEQ ID NO: 2171647 - RNA, 19 nt, Homo sapiens
  misc_RNA (1)...(19): siRNA sense strand
ggcgggaccugaucgacaa

SEQ ID NO: 2171648 - RNA, 19 nt, Homo sapiens
  misc_RNA (1)...(19): siRNA sense strand
ucagugaaagaacuagaua

SEQ ID NO: 2171649 - RNA, 19 nt, Homo sapiens
  misc_RNA (1)...(19): siRNA sense strand
gcagucuccugaccuacga

SEQ ID NO: 2171650 - RNA, 19 nt, Homo sapiens
  misc_RNA (1)...(19): siRNA sense strand
gaugauaaacaaggaucua

SEQ ID NO: 2171651 - RNA, 19 nt, Homo sapiens
  misc_RNA (1)...(19): siRNA sense strand
cauaccaggugcccaagga

SEQ ID NO: 2171652 - RNA, 19 nt, Homo sapiens
  misc_RNA (1)...(19): siRNA sense strand
gggacacacugcggaaguu

SEQ ID NO: 2171653 - RNA, 19 nt, Homo sapiens
  misc_RNA (1)...(19): siRNA sense strand
uaagaugcaugaggagcaa

SEQ ID NO: 2171654 - RNA, 19 nt, Homo sapiens
  misc_RNA (1)...(19): siRNA sense strand
acacagcagcucagugaaa

SEQ ID NO: 2171655 - RNA, 19 nt, Homo sapiens
  misc_RNA (1)...(19): siRNA sense strand
cagccggaauguccuguga

SEQ ID NO: 2171656 - RNA, 19 nt, Homo sapiens
  misc_RNA (1)...(19): siRNA sense strand
cgagaucucugggcuuugg

SEQ ID NO: 2171657 - RNA, 19 nt, Homo sapiens
  misc_RNA (1)...(19): siRNA sense strand
gaucuagaaggaaauaucu

SEQ ID NO: 2171658 - RNA, 19 nt, Homo sapiens
  misc_RNA (1)...(19): siRNA sense strand
gauccggaguuugacauca

SEQ ID NO: 2171659 - RNA, 19 nt, Homo sapiens
  misc_RNA (1)...(19): siRNA sense strand
cccgagaucucugggcuuu

SEQ ID NO: 2171660 - RNA, 19 nt, Homo sapiens
  misc_RNA (1)...(19): siRNA sense strand
gggacaagaccuggaacua

SEQ ID NO: 2171661 - RNA, 19 nt, Homo sapiens
  misc_RNA (1)...(19): siRNA sense strand
agaggaggcugaggaggaa

SEQ ID NO: 2171662 - RNA, 19 nt, Homo sapiens
  misc_RNA (1)...(19): siRNA sense strand
gaaagcaggagaucaucag

SEQ ID NO: 2171663 - RNA, 19 nt, Homo sapiens
  misc_RNA (1)...(19): siRNA sense strand
ucagaaagcaggagaucau

SEQ ID NO: 2171664 - RNA, 19 nt, Homo sapiens
  misc_RNA (1)...(19): siRNA sense strand
agauacugaugcugauaaa

SEQ ID NO: 2171665 - RNA, 19 nt, Homo sapiens
  misc_RNA (1)...(19): siRNA sense strand
cggaauguccugugaagug

SEQ ID NO: 2171666 - RNA, 19 nt, Homo sapiens
  misc_RNA (1)...(19): siRNA sense strand
uggcaaaguguacaagaaa

SEQ ID NO: 2171667 - RNA, 19 nt, Homo sapiens
  misc_RNA (1)...(19): siRNA sense strand
ugagcgcccuggauaagau

SEQ ID NO: 2171668 - RNA, 19 nt, Homo sapiens
  misc_RNA (1)...(19): siRNA sense strand
gcagcucagugaaagaacu

SEQ ID NO: 2171669 - RNA, 19 nt, Homo sapiens
  misc_RNA (1)...(19): siRNA sense strand
uuccaggacuuugauauug

SEQ ID NO: 2171670 - RNA, 19 nt, Homo sapiens
  misc_RNA (1)...(19): siRNA sense strand
gagagcaagagaagaagga

SEQ ID NO: 2171671 - RNA, 19 nt, Homo sapiens
  misc_RNA (1)...(19): siRNA sense strand
gggaagaauccgagagcaa

SEQ ID NO: 2171672 - RNA, 19 nt, Homo sapiens
  misc_RNA (1)...(19): siRNA sense strand
agcaagagcuuuucacuga

SEQ ID NO: 2171673 - RNA, 19 nt, Homo sapiens
  misc_RNA (1)...(19): siRNA sense strand
uagauacugaugcugauaa

SEQ ID NO: 2171674 - RNA, 19 nt, Homo sapiens
  misc_RNA (1)...(19): siRNA sense strand
acagaacgcaggcauuuca

SEQ ID NO: 2171675 - RNA, 19 nt, Homo sapiens
  misc_RNA (1)...(19): siRNA sense strand
gaagauaaaagcuuguaug

SEQ ID NO: 2171676 - RNA, 19 nt, Homo sapiens
  misc_RNA (1)...(19): siRNA sense strand
ggagaucaucagucggauu

SEQ ID NO: 2171677 - RNA, 19 nt, Homo sapiens
  misc_RNA (1)...(19): siRNA sense strand
gguccaggcugagaagaag

SEQ ID NO: 2171678 - RNA, 19 nt, Homo sapiens
  misc_RNA (1)...(19): siRNA sense strand
ccaccucuauaucuacauc

SEQ ID NO: 2171679 - RNA, 19 nt, Homo sapiens
  misc_RNA (1)...(19): siRNA sense strand
ggaucuagaaggaaauauc

SEQ ID NO: 2171680 - RNA, 19 nt, Homo sapiens
  misc_RNA (1)...(19): siRNA sense strand
cuucauccacguugacuuu

SEQ ID NO: 2171681 - RNA, 19 nt, Homo sapiens
  misc_RNA (1)...(19): siRNA sense strand
gaaccugagcgcccuggau

SEQ ID NO: 2171682 - RNA, 19 nt, Homo sapiens
  misc_RNA (1)...(19): siRNA sense strand
ggggagggcuggaaaguag

SEQ ID NO: 2171683 - RNA, 19 nt, Homo sapiens
  misc_RNA (1)...(19): siRNA sense strand
cuccugaccuacgaagaua

SEQ ID NO: 2171684 - RNA, 19 nt, Homo sapiens
  misc_RNA (1)...(19): siRNA sense strand
ggucagccaccucuauauc

SEQ ID NO: 2171685 - RNA, 19 nt, Homo sapiens
  misc_RNA (1)...(19): siRNA sense strand
gcgauacaagcacgacuga

SEQ ID NO: 2171686 - RNA, 19 nt, Homo sapiens
  misc_RNA (1)...(19): siRNA sense strand
ucauccacguugacuuuga

SEQ ID NO: 2171687 - RNA, 19 nt, Homo sapiens
  misc_RNA (1)...(19): siRNA sense strand
aaccugagcgcccuggaua

SEQ ID NO: 2171688 - RNA, 19 nt, Homo sapiens
  misc_RNA (1)...(19): siRNA sense strand
cagcagcucagugaaagaa

SEQ ID NO: 2171689 - RNA, 19 nt, Homo sapiens
  misc_RNA (1)...(19): siRNA sense strand
ccuucaagccgaugauaaa

SEQ ID NO: 2171690 - RNA, 19 nt, Homo sapiens
  misc_RNA (1)...(19): siRNA sense strand
ccuacacgaucaacuacug

SEQ ID NO: 2171691 - RNA, 19 nt, Homo sapiens
  misc_RNA (1)...(19): siRNA sense strand
aggaggacguggaccgaaa

SEQ ID NO: 2171692 - RNA, 19 nt, Homo sapiens
  misc_RNA (1)...(19): siRNA sense strand
cacagcagcucagugaaag

SEQ ID NO: 2171693 - RNA, 19 nt, Homo sapiens
  misc_RNA (1)...(19): siRNA sense strand
gugcugccaucucuacuac

SEQ ID NO: 2171694 - RNA, 19 nt, Homo sapiens
  misc_RNA (1)...(19): siRNA sense strand
gccggaauguccugugaag

SEQ ID NO: 2171695 - RNA, 19 nt, Homo sapiens
  misc_RNA (1)...(19): siRNA sense strand
gggacuucauccacguuga

SEQ ID NO: 2171696 - RNA, 19 nt, Homo sapiens
  misc_RNA (1)...(19): siRNA sense strand
caagagcuuuucacugaga

SEQ ID NO: 2171697 - RNA, 19 nt, Homo sapiens
  misc_RNA (1)...(19): siRNA sense strand
agaagaaggaggagaugga

SEQ ID NO: 2171698 - RNA, 19 nt, Homo sapiens
  misc_RNA (1)...(19): siRNA sense strand
agucugcccugaaauuaag

SEQ ID NO: 2171699 - RNA, 19 nt, Homo sapiens
  misc_RNA (1)...(19): siRNA sense strand
gcuuuggaaugaagacuac

SEQ ID NO: 2171700 - RNA, 19 nt, Homo sapiens
  misc_RNA (1)...(19): siRNA sense strand
acacguacacacuggacua

SEQ ID NO: 2171701 - RNA, 19 nt, Homo sapiens
  misc_RNA (1)...(19): siRNA sense strand
gcacaaggguuucuccauu

SEQ ID NO: 2171702 - RNA, 19 nt, Homo sapiens
  misc_RNA (1)...(19): siRNA sense strand
caaagaagaccguugaguu

SEQ ID NO: 2171703 - RNA, 19 nt, Homo sapiens
  misc_RNA (1)...(19): siRNA sense strand
acacaagacuucacuguca

SEQ ID NO: 2171704 - RNA, 19 nt, Homo sapiens
  misc_RNA (1)...(19): siRNA sense strand
cacaaggguuucuccauug

SEQ ID NO: 2171705 - RNA, 19 nt, Homo sapiens
  misc_RNA (1)...(19): siRNA sense strand
gaaggcagcguccucaaca

SEQ ID NO: 2171706 - RNA, 19 nt, Homo sapiens
  misc_RNA (1)...(19): siRNA sense strand
aaagaagaccguugaguuc

SEQ ID NO: 2171707 - RNA, 19 nt, Homo sapiens
  misc_RNA (1)...(19): siRNA sense strand
ccacgaaagccucuacuuc

SEQ ID NO: 2171708 - RNA, 19 nt, Homo sapiens
  misc_RNA (1)...(19): siRNA sense strand
acaaggguuucuccauuga

SEQ ID NO: 2171709 - RNA, 19 nt, Homo sapiens
  misc_RNA (1)...(19): siRNA sense strand
gaucacgugcuccauugaa

SEQ ID NO: 2171710 - RNA, 19 nt, Homo sapiens
  misc_RNA (1)...(19): siRNA sense strand
ucgcaucccugcagcacaa

SEQ ID NO: 2171711 - RNA, 19 nt, Homo sapiens
  misc_RNA (1)...(19): siRNA sense strand
ccagccaucuccaaagaag

SEQ ID NO: 2171712 - RNA, 19 nt, Homo sapiens
  misc_RNA (1)...(19): siRNA sense strand
cagcgaucccuguauuuga

SEQ ID NO: 2171713 - RNA, 19 nt, Homo sapiens
  misc_RNA (1)...(19): siRNA sense strand
ccacccagccaucuccaaa

SEQ ID NO: 2171714 - RNA, 19 nt, Homo sapiens
  misc_RNA (1)...(19): siRNA sense strand
gaccguugaguucagcaua

SEQ ID NO: 2171715 - RNA, 19 nt, Homo sapiens
  misc_RNA (1)...(19): siRNA sense strand
caugaucacgugcuccauu

SEQ ID NO: 2171716 - RNA, 19 nt, Homo sapiens
  misc_RNA (1)...(19): siRNA sense strand
cacgaaagccucuacuucu

SEQ ID NO: 2171717 - RNA, 19 nt, Homo sapiens
  misc_RNA (1)...(19): siRNA sense strand
gguguugacuggccccuaa

SEQ ID NO: 2171718 - RNA, 19 nt, Homo sapiens
  misc_RNA (1)...(19): siRNA sense strand
acccagccaucuccaaaga

SEQ ID NO: 2171719 - RNA, 19 nt, Homo sapiens
  misc_RNA (1)...(19): siRNA sense strand
cagguggugcucuuugaaa

SEQ ID NO: 2171720 - RNA, 19 nt, Homo sapiens
  misc_RNA (1)...(19): siRNA sense strand
gauccagaccacccacuca

SEQ ID NO: 2171721 - RNA, 19 nt, Homo sapiens
  misc_RNA (1)...(19): siRNA sense strand
agacgaagaccaucagcau

SEQ ID NO: 2171722 - RNA, 19 nt, Homo sapiens
  misc_RNA (1)...(19): siRNA sense strand
ggcccucucucuccagaag

SEQ ID NO: 2171723 - RNA, 19 nt, Homo sapiens
  misc_RNA (1)...(19): siRNA sense strand
ggcguggcguccaugauca

SEQ ID NO: 2171724 - RNA, 19 nt, Homo sapiens
  misc_RNA (1)...(19): siRNA sense strand
ccaucaaguucuccaugca

SEQ ID NO: 2171725 - RNA, 19 nt, Homo sapiens
  misc_RNA (1)...(19): siRNA sense strand
gggaugugaaggagaccua

SEQ ID NO: 2171726 - RNA, 19 nt, Homo sapiens
  misc_RNA (1)...(19): siRNA sense strand
acgaaagccucuacuucuc

SEQ ID NO: 2171727 - RNA, 19 nt, Homo sapiens
  misc_RNA (1)...(19): siRNA sense strand
agacacaagacuucacugu

SEQ ID NO: 2171728 - RNA, 19 nt, Homo sapiens
  misc_RNA (1)...(19): siRNA sense strand
uccagguggugcucuuuga

SEQ ID NO: 2171729 - RNA, 19 nt, Homo sapiens
  misc_RNA (1)...(19): siRNA sense strand
ccaaagaagaccguugagu

SEQ ID NO: 2171730 - RNA, 19 nt, Homo sapiens
  misc_RNA (1)...(19): siRNA sense strand
augaucacgugcuccauug

SEQ ID NO: 2171731 - RNA, 19 nt, Homo sapiens
  misc_RNA (1)...(19): siRNA sense strand
cuacauccaguuugacaca

SEQ ID NO: 2171732 - RNA, 19 nt, Homo sapiens
  misc_RNA (1)...(19): siRNA sense strand
ugaagggugccgccuguca

SEQ ID NO: 2171733 - RNA, 19 nt, Homo sapiens
  misc_RNA (1)...(19): siRNA sense strand
gaacugaucuuguuaaugc

SEQ ID NO: 2171734 - RNA, 19 nt, Homo sapiens
  misc_RNA (1)...(19): siRNA sense strand
gcacaauaaugacaaguga

SEQ ID NO: 2171735 - RNA, 19 nt, Homo sapiens
  misc_RNA (1)...(19): siRNA sense strand
gauggagcauguucucuua

SEQ ID NO: 2171736 - RNA, 19 nt, Homo sapiens
  misc_RNA (1)...(19): siRNA sense strand
gaagaccucaguuuaauuu

SEQ ID NO: 2171737 - RNA, 19 nt, Homo sapiens
  misc_RNA (1)...(19): siRNA sense strand
gcagaaaggacaugaauga

SEQ ID NO: 2171738 - RNA, 19 nt, Homo sapiens
  misc_RNA (1)...(19): siRNA sense strand
ggacaaauuucgggacuug

SEQ ID NO: 2171739 - RNA, 19 nt, Homo sapiens
  misc_RNA (1)...(19): siRNA sense strand
uagaaaggcugaagaaaca

SEQ ID NO: 2171740 - RNA, 19 nt, Homo sapiens
  misc_RNA (1)...(19): siRNA sense strand
guaaggaacugaggaagga

SEQ ID NO: 2171741 - RNA, 19 nt, Homo sapiens
  misc_RNA (1)...(19): siRNA sense strand
cgaagugucugcaaggaaa

SEQ ID NO: 2171742 - RNA, 19 nt, Homo sapiens
  misc_RNA (1)...(19): siRNA sense strand
ucaaugcgcugguucaugu

SEQ ID NO: 2171743 - RNA, 19 nt, Homo sapiens
  misc_RNA (1)...(19): siRNA sense strand
gcgacggucuugacuauau

SEQ ID NO: 2171744 - RNA, 19 nt, Homo sapiens
  misc_RNA (1)...(19): siRNA sense strand
ucagaugacuuuccaguuc

SEQ ID NO: 2171745 - RNA, 19 nt, Homo sapiens
  misc_RNA (1)...(19): siRNA sense strand
cagcauaugggacaaauuu

SEQ ID NO: 2171746 - RNA, 19 nt, Homo sapiens
  misc_RNA (1)...(19): siRNA sense strand
cgaggucggugcccacuuu

SEQ ID NO: 2171747 - RNA, 19 nt, Homo sapiens
  misc_RNA (1)...(19): siRNA sense strand
ggagauuucagaugacuuu

SEQ ID NO: 2171748 - RNA, 19 nt, Homo sapiens
  misc_RNA (1)...(19): siRNA sense strand
gaagaaacauguaaaaggu

SEQ ID NO: 2171749 - RNA, 19 nt, Homo sapiens
  misc_RNA (1)...(19): siRNA sense strand
agagaaagcugaccuugca

SEQ ID NO: 2171750 - RNA, 19 nt, Homo sapiens
  misc_RNA (1)...(19): siRNA sense strand
caaaaucgcuuucccuuuc

SEQ ID NO: 2171751 - RNA, 19 nt, Homo sapiens
  misc_RNA (1)...(19): siRNA sense strand
uuaaggaauugaucacuga

SEQ ID NO: 2171752 - RNA, 19 nt, Homo sapiens
  misc_RNA (1)...(19): siRNA sense strand
gaacuagaaaggcugaaga

SEQ ID NO: 2171753 - RNA, 19 nt, Homo sapiens
  misc_RNA (1)...(19): siRNA sense strand
aagcugaccuugcaacgaa

SEQ ID NO: 2171754 - RNA, 19 nt, Homo sapiens
  misc_RNA (1)...(19): siRNA sense strand
acacagacauccggagaaa

SEQ ID NO: 2171755 - RNA, 19 nt, Homo sapiens
  misc_RNA (1)...(19): siRNA sense strand
guugaagaccucaguuuaa

SEQ ID NO: 2171756 - RNA, 19 nt, Homo sapiens
  misc_RNA (1)...(19): siRNA sense strand
ucacgcaggucuccucaug

SEQ ID NO: 2171757 - RNA, 19 nt, Homo sapiens
  misc_RNA (1)...(19): siRNA sense strand
aaagguaguugaauucagu

SEQ ID NO: 2171758 - RNA, 19 nt, Homo sapiens
  misc_RNA (1)...(19): siRNA sense strand
gacaguggacuucaagaaa

SEQ ID NO: 2171759 - RNA, 19 nt, Homo sapiens
  misc_RNA (1)...(19): siRNA sense strand
caccgucauugcccauuua

SEQ ID NO: 2171760 - RNA, 19 nt, Homo sapiens
  misc_RNA (1)...(19): siRNA sense strand
ggaggaggagggagacgua

SEQ ID NO: 2171761 - RNA, 19 nt, Homo sapiens
  misc_RNA (1)...(19): siRNA sense strand
ccacagaagcgccgacgaa

SEQ ID NO: 2171762 - RNA, 19 nt, Homo sapiens
  misc_RNA (1)...(19): siRNA sense strand
ucacaagaguaucugacaa

SEQ ID NO: 2171763 - RNA, 19 nt, Homo sapiens
  misc_RNA (1)...(19): siRNA sense strand
cagcuacgaauuucucuaa

SEQ ID NO: 2171764 - RNA, 19 nt, Homo sapiens
  misc_RNA (1)...(19): siRNA sense strand
uacaaucccuucuaugcuu

SEQ ID NO: 2171765 - RNA, 19 nt, Homo sapiens
  misc_RNA (1)...(19): siRNA sense strand
ugacauaacggauaagagu

SEQ ID NO: 2171766 - RNA, 19 nt, Homo sapiens
  misc_RNA (1)...(19): siRNA sense strand
ggaggacggugacauaacg

SEQ ID NO: 2171767 - RNA, 19 nt, Homo sapiens
  misc_RNA (1)...(19): siRNA sense strand
ggaagaugccggacagaca

SEQ ID NO: 2171768 - RNA, 19 nt, Homo sapiens
  misc_RNA (1)...(19): siRNA sense strand
ggaaacagaaguugaagac

SEQ ID NO: 2171769 - RNA, 19 nt, Homo sapiens
  misc_RNA (1)...(19): siRNA sense strand
ggaggagggagacguagaa

SEQ ID NO: 2171770 - RNA, 19 nt, Homo sapiens
  misc_RNA (1)...(19): siRNA sense strand
cgugaggguuugaagcuuu

SEQ ID NO: 2171771 - RNA, 19 nt, Homo sapiens
  misc_RNA (1)...(19): siRNA sense strand
aaacuuacaaucccuucua

SEQ ID NO: 2171772 - RNA, 19 nt, Homo sapiens
  misc_RNA (1)...(19): siRNA sense strand
gaacaaugacaugcgcaaa

SEQ ID NO: 2171773 - RNA, 19 nt, Homo sapiens
  misc_RNA (1)...(19): siRNA sense strand
gaggcaagcugaggagaca

SEQ ID NO: 2171774 - RNA, 19 nt, Homo sapiens
  misc_RNA (1)...(19): siRNA sense strand
gaaaggcugaagaaacaug

SEQ ID NO: 2171775 - RNA, 19 nt, Homo sapiens
  misc_RNA (1)...(19): siRNA sense strand
gaacgcacaggcccacaga

SEQ ID NO: 2171776 - RNA, 19 nt, Homo sapiens
  misc_RNA (1)...(19): siRNA sense strand
gcaggagagagaaaucauu

SEQ ID NO: 2171777 - RNA, 19 nt, Homo sapiens
  misc_RNA (1)...(19): siRNA sense strand
gguacagucucuccucauc

SEQ ID NO: 2171778 - RNA, 19 nt, Homo sapiens
  misc_RNA (1)...(19): siRNA sense strand
cgacggucuugacuauauu

SEQ ID NO: 2171779 - RNA, 19 nt, Homo sapiens
  misc_RNA (1)...(19): siRNA sense strand
aagcuucccugagaaugua

SEQ ID NO: 2171780 - RNA, 19 nt, Homo sapiens
  misc_RNA (1)...(19): siRNA sense strand
gcuuucccuuuccaucuua

SEQ ID NO: 2171781 - RNA, 19 nt, Homo sapiens
  misc_RNA (1)...(19): siRNA sense strand
gaccucagcaucaucaaug

SEQ ID NO: 2171782 - RNA, 19 nt, Homo sapiens
  misc_RNA (1)...(19): siRNA sense strand
gagcauguucucuuaguca

SEQ ID NO: 2171783 - RNA, 19 nt, Homo sapiens
  misc_RNA (1)...(19): siRNA sense strand
cgacgaggauacagaagag

SEQ ID NO: 2171784 - RNA, 19 nt, Homo sapiens
  misc_RNA (1)...(19): siRNA sense strand
cagaugacuuuccaguuca

SEQ ID NO: 2171785 - RNA, 19 nt, Homo sapiens
  misc_RNA (1)...(19): siRNA sense strand
ggaaacugcagagagcuuu

SEQ ID NO: 2171786 - RNA, 19 nt, Homo sapiens
  misc_RNA (1)...(19): siRNA sense strand
gauauugaacugaucuugu

SEQ ID NO: 2171787 - RNA, 19 nt, Homo sapiens
  misc_RNA (1)...(19): siRNA sense strand
ccagcagacugaugaugga

SEQ ID NO: 2171788 - RNA, 19 nt, Homo sapiens
  misc_RNA (1)...(19): siRNA sense strand
ggauucgguuuaugcuaga

SEQ ID NO: 2171789 - RNA, 19 nt, Homo sapiens
  misc_RNA (1)...(19): siRNA sense strand
caucaucaaugcgcugguu

SEQ ID NO: 2171790 - RNA, 19 nt, Homo sapiens
  misc_RNA (1)...(19): siRNA sense strand
ucaccgucauugcccauuu

SEQ ID NO: 2171791 - RNA, 19 nt, Homo sapiens
  misc_RNA (1)...(19): siRNA sense strand
gaaacauauucugcacaau

SEQ ID NO: 2171792 - RNA, 19 nt, Homo sapiens
  misc_RNA (1)...(19): siRNA sense strand
caucagccacuucuugcua

SEQ ID NO: 2171793 - RNA, 19 nt, Homo sapiens
  misc_RNA (1)...(19): siRNA sense strand
uugaagaccucaguuuaau

SEQ ID NO: 2171794 - RNA, 19 nt, Homo sapiens
  misc_RNA (1)...(19): siRNA sense strand
gagagaaaucauucacguu

SEQ ID NO: 2171795 - RNA, 19 nt, Homo sapiens
  misc_RNA (1)...(19): siRNA sense strand
gaucagcaggagagagaaa

SEQ ID NO: 2171796 - RNA, 19 nt, Homo sapiens
  misc_RNA (1)...(19): siRNA sense strand
caucuuaaagguaguugaa

SEQ ID NO: 2171797 - RNA, 19 nt, Homo sapiens
  misc_RNA (1)...(19): siRNA sense strand
ccaacgugcugagagagaa

SEQ ID NO: 2171798 - RNA, 19 nt, Homo sapiens
  misc_RNA (1)...(19): siRNA sense strand
gguguuacgugaggguuug

SEQ ID NO: 2171799 - RNA, 19 nt, Homo sapiens
  misc_RNA (1)...(19): siRNA sense strand
ggaggaggaccgagagauc

SEQ ID NO: 2171800 - RNA, 19 nt, Homo sapiens
  misc_RNA (1)...(19): siRNA sense strand
gaaguugaagaccucaguu

SEQ ID NO: 2171801 - RNA, 19 nt, Homo sapiens
  misc_RNA (1)...(19): siRNA sense strand
acaaucccuucuaugcuuu

SEQ ID NO: 2171802 - RNA, 19 nt, Homo sapiens
  misc_RNA (1)...(19): siRNA sense strand
gcgaagggaaagaguguga

SEQ ID NO: 2171803 - RNA, 19 nt, Homo sapiens
  misc_RNA (1)...(19): siRNA sense strand
gacggugacauaacggaua

SEQ ID NO: 2171804 - RNA, 19 nt, Homo sapiens
  misc_RNA (1)...(19): siRNA sense strand
gagcguugccucgguuuga

SEQ ID NO: 2171805 - RNA, 19 nt, Homo sapiens
  misc_RNA (1)...(19): siRNA sense strand
cgacgacgaggauacagaa

SEQ ID NO: 2171806 - RNA, 19 nt, Homo sapiens
  misc_RNA (1)...(19): siRNA sense strand
gauuucagaugacuuucca

SEQ ID NO: 2171807 - RNA, 19 nt, Homo sapiens
  misc_RNA (1)...(19): siRNA sense strand
gacggucaguucaaagauc

SEQ ID NO: 2171808 - RNA, 19 nt, Homo sapiens
  misc_RNA (1)...(19): siRNA sense strand
gcugguucauguuugcauu

SEQ ID NO: 2171809 - RNA, 19 nt, Homo sapiens
  misc_RNA (1)...(19): siRNA sense strand
ggaaagagugugacaaccu

SEQ ID NO: 2171810 - RNA, 19 nt, Homo sapiens
  misc_RNA (1)...(19): siRNA sense strand
gaagggaaagagugugaca

SEQ ID NO: 2171811 - RNA, 19 nt, Homo sapiens
  misc_RNA (1)...(19): siRNA sense strand
cagcagaaaggacaugaau

SEQ ID NO: 2171812 - RNA, 19 nt, Homo sapiens
  misc_RNA (1)...(19): siRNA sense strand
aaagggagcgcaggagaaa

SEQ ID NO: 2171813 - RNA, 19 nt, Homo sapiens
  misc_RNA (1)...(19): siRNA sense strand
ggacagacacuccccgaaa

SEQ ID NO: 2171814 - RNA, 19 nt, Homo sapiens
  misc_RNA (1)...(19): siRNA sense strand
cgacaacagucaccauacg

SEQ ID NO: 2171815 - RNA, 19 nt, Homo sapiens
  misc_RNA (1)...(19): siRNA sense strand
acgggucgcugguggauug

SEQ ID NO: 2171816 - RNA, 19 nt, Homo sapiens
  misc_RNA (1)...(19): siRNA sense strand
gaccaggauucgguuuaug

SEQ ID NO: 2171817 - RNA, 19 nt, Homo sapiens
  misc_RNA (1)...(19): siRNA sense strand
uacagucucuccucaucuu

SEQ ID NO: 2171818 - RNA, 19 nt, Homo sapiens
  misc_RNA (1)...(19): siRNA sense strand
acgcgacggucuugacuau

SEQ ID NO: 2171819 - RNA, 19 nt, Homo sapiens
  misc_RNA (1)...(19): siRNA sense strand
agacauccggagaaacaua

SEQ ID NO: 2171820 - RNA, 19 nt, Homo sapiens
  misc_RNA (1)...(19): siRNA sense strand
uggagaagcugaggaaacu

SEQ ID NO: 2171821 - RNA, 19 nt, Homo sapiens
  misc_RNA (1)...(19): siRNA sense strand
cagaccaggauucgguuua

SEQ ID NO: 2171822 - RNA, 19 nt, Homo sapiens
  misc_RNA (1)...(19): siRNA sense strand
cgucauugcccauuuauac

SEQ ID NO: 2171823 - RNA, 19 nt, Homo sapiens
  misc_RNA (1)...(19): siRNA sense strand
cagcauccuucaccacaca

SEQ ID NO: 2171824 - RNA, 19 nt, Homo sapiens
  misc_RNA (1)...(19): siRNA sense strand
ggagcauguucucuuaguc

SEQ ID NO: 2171825 - RNA, 19 nt, Homo sapiens
  misc_RNA (1)...(19): siRNA sense strand
acggugacauaacggauaa

SEQ ID NO: 2171826 - RNA, 19 nt, Homo sapiens
  misc_RNA (1)...(19): siRNA sense strand
agaccaggauucgguuuau

SEQ ID NO: 2171827 - RNA, 19 nt, Homo sapiens
  misc_RNA (1)...(19): siRNA sense strand
acagacauccggagaaaca

SEQ ID NO: 2171828 - RNA, 19 nt, Homo sapiens
  misc_RNA (1)...(19): siRNA sense strand
gaaacugcagagagcuuug

SEQ ID NO: 2171829 - RNA, 19 nt, Homo sapiens
  misc_RNA (1)...(19): siRNA sense strand
caaaccgaccucagcauca

SEQ ID NO: 2171830 - RNA, 19 nt, Homo sapiens
  misc_RNA (1)...(19): siRNA sense strand
ugaagaccucaguuuaauu

SEQ ID NO: 2171831 - RNA, 19 nt, Homo sapiens
  misc_RNA (1)...(19): siRNA sense strand
gaaaucauucacguucuca

SEQ ID NO: 2171832 - RNA, 19 nt, Homo sapiens
  misc_RNA (1)...(19): siRNA sense strand
auacgcaccugcagaagca

SEQ ID NO: 2171833 - RNA, 19 nt, Homo sapiens
  misc_RNA (1)...(19): siRNA sense strand
gaucaaugguguuaaggua

SEQ ID NO: 2171834 - RNA, 19 nt, Homo sapiens
  misc_RNA (1)...(19): siRNA sense strand
ggaaagacacuuaccuuaa

SEQ ID NO: 2171835 - RNA, 19 nt, Homo sapiens
  misc_RNA (1)...(19): siRNA sense strand
ggacaggacugacgaaucu

SEQ ID NO: 2171836 - RNA, 19 nt, Homo sapiens
  misc_RNA (1)...(19): siRNA sense strand
ggacaagaauuagagauug

SEQ ID NO: 2171837 - RNA, 19 nt, Homo sapiens
  misc_RNA (1)...(19): siRNA sense strand
gagcaagauucgauacaaa

SEQ ID NO: 2171838 - RNA, 19 nt, Homo sapiens
  misc_RNA (1)...(19): siRNA sense strand
acacucagcucaagucaaa

SEQ ID NO: 2171839 - RNA, 19 nt, Homo sapiens
  misc_RNA (1)...(19): siRNA sense strand
caucaaaucucauaugucu

SEQ ID NO: 2171840 - RNA, 19 nt, Homo sapiens
  misc_RNA (1)...(19): siRNA sense strand
gguaugaccucacggaaga

SEQ ID NO: 2171841 - RNA, 19 nt, Homo sapiens
  misc_RNA (1)...(19): siRNA sense strand
ugacgaaucuucuggaugu

SEQ ID NO: 2171842 - RNA, 19 nt, Homo sapiens
  misc_RNA (1)...(19): siRNA sense strand
caucaaagcugacaaagac

SEQ ID NO: 2171843 - RNA, 19 nt, Homo sapiens
  misc_RNA (1)...(19): siRNA sense strand
gagcagaauggcuaaauaa

SEQ ID NO: 2171844 - RNA, 19 nt, Homo sapiens
  misc_RNA (1)...(19): siRNA sense strand
agauugagcucuuugauga

SEQ ID NO: 2171845 - RNA, 19 nt, Homo sapiens
  misc_RNA (1)...(19): siRNA sense strand
ggagauaugcccuuaguug

SEQ ID NO: 2171846 - RNA, 19 nt, Homo sapiens
  misc_RNA (1)...(19): siRNA sense strand
ucaaugguguuaagguaua

SEQ ID NO: 2171847 - RNA, 19 nt, Homo sapiens
  misc_RNA (1)...(19): siRNA sense strand
aaacauccaucaaaucuca

SEQ ID NO: 2171848 - RNA, 19 nt, Homo sapiens
  misc_RNA (1)...(19): siRNA sense strand
gacaagaauuagagauuga

SEQ ID NO: 2171849 - RNA, 19 nt, Homo sapiens
  misc_RNA (1)...(19): siRNA sense strand
uaggaagucuuaugauuga

SEQ ID NO: 2171850 - RNA, 19 nt, Homo sapiens
  misc_RNA (1)...(19): siRNA sense strand
gggaaagacacuuaccuua

SEQ ID NO: 2171851 - RNA, 19 nt, Homo sapiens
  misc_RNA (1)...(19): siRNA sense strand
gcagaauggcuaaauaaga

SEQ ID NO: 2171852 - RNA, 19 nt, Homo sapiens
  misc_RNA (1)...(19): siRNA sense strand
gccaggaccuugaaguuga

SEQ ID NO: 2171853 - RNA, 19 nt, Homo sapiens
  misc_RNA (1)...(19): siRNA sense strand
ggagcaaacacccaccuua

SEQ ID NO: 2171854 - RNA, 19 nt, Homo sapiens
  misc_RNA (1)...(19): siRNA sense strand
aaacacauguggccuuuca

SEQ ID NO: 2171855 - RNA, 19 nt, Homo sapiens
  misc_RNA (1)...(19): siRNA sense strand
gcagagucaucaaggagaa

SEQ ID NO: 2171856 - RNA, 19 nt, Homo sapiens
  misc_RNA (1)...(19): siRNA sense strand
ggaugucccuggauugaau

SEQ ID NO: 2171857 - RNA, 19 nt, Homo sapiens
  misc_RNA (1)...(19): siRNA sense strand
gauuggagauaugcccuua

SEQ ID NO: 2171858 - RNA, 19 nt, Homo sapiens
  misc_RNA (1)...(19): siRNA sense strand
ugaagucuaugaggcuuua

SEQ ID NO: 2171859 - RNA, 19 nt, Homo sapiens
  misc_RNA (1)...(19): siRNA sense strand
ugauuucaguguuucguua

SEQ ID NO: 2171860 - RNA, 19 nt, Homo sapiens
  misc_RNA (1)...(19): siRNA sense strand
cggcacagcucgcagagaa

SEQ ID NO: 2171861 - RNA, 19 nt, Homo sapiens
  misc_RNA (1)...(19): siRNA sense strand
caaaggguguucuaaggau

SEQ ID NO: 2171862 - RNA, 19 nt, Homo sapiens
  misc_RNA (1)...(19): siRNA sense strand
ccaaacagcaccaucaaga

SEQ ID NO: 2171863 - RNA, 19 nt, Homo sapiens
  misc_RNA (1)...(19): siRNA sense strand
guuaagguauacacugaaa

SEQ ID NO: 2171864 - RNA, 19 nt, Homo sapiens
  misc_RNA (1)...(19): siRNA sense strand
cugcauugcugaucuugua

SEQ ID NO: 2171865 - RNA, 19 nt, Homo sapiens
  misc_RNA (1)...(19): siRNA sense strand
cuaugaggcuuuaguguau

SEQ ID NO: 2171866 - RNA, 19 nt, Homo sapiens
  misc_RNA (1)...(19): siRNA sense strand
uguaggaaauugugagauu

SEQ ID NO: 2171867 - RNA, 19 nt, Homo sapiens
  misc_RNA (1)...(19): siRNA sense strand
ggaaaccacuuuuagaaau

SEQ ID NO: 2171868 - RNA, 19 nt, Homo sapiens
  misc_RNA (1)...(19): siRNA sense strand
uaaauccaguguuugauca

SEQ ID NO: 2171869 - RNA, 19 nt, Homo sapiens
  misc_RNA (1)...(19): siRNA sense strand
aaaguggaaugaagucuau

SEQ ID NO: 2171870 - RNA, 19 nt, Homo sapiens
  misc_RNA (1)...(19): siRNA sense strand
gcaaccaaaucuuccaaag

SEQ ID NO: 2171871 - RNA, 19 nt, Homo sapiens
  misc_RNA (1)...(19): siRNA sense strand
gacaagaggcggucaggaa

SEQ ID NO: 2171872 - RNA, 19 nt, Homo sapiens
  misc_RNA (1)...(19): siRNA sense strand
agagcagaauggcuaaaua

SEQ ID NO: 2171873 - RNA, 19 nt, Homo sapiens
  misc_RNA (1)...(19): siRNA sense strand
ugauaagccugguauggaa

SEQ ID NO: 2171874 - RNA, 19 nt, Homo sapiens
  misc_RNA (1)...(19): siRNA sense strand
cagaauggcuaaauaagac

SEQ ID NO: 2171875 - RNA, 19 nt, Homo sapiens
  misc_RNA (1)...(19): siRNA sense strand
gaaccugugugggaggaaa

SEQ ID NO: 2171876 - RNA, 19 nt, Homo sapiens
  misc_RNA (1)...(19): siRNA sense strand
gaaagagcagaauggcuaa

SEQ ID NO: 2171877 - RNA, 19 nt, Homo sapiens
  misc_RNA (1)...(19): siRNA sense strand
guaggaaauugugagauug

SEQ ID NO: 2171878 - RNA, 19 nt, Homo sapiens
  misc_RNA (1)...(19): siRNA sense strand
gcaaacacccaccuuagca

SEQ ID NO: 2171879 - RNA, 19 nt, Homo sapiens
  misc_RNA (1)...(19): siRNA sense strand
gaacauccuggacaagaau

SEQ ID NO: 2171880 - RNA, 19 nt, Homo sapiens
  misc_RNA (1)...(19): siRNA sense strand
aaccaaaucuuccaaagca

SEQ ID NO: 2171881 - RNA, 19 nt, Homo sapiens
  misc_RNA (1)...(19): siRNA sense strand
gcccuuaguuggagcuuug

SEQ ID NO: 2171882 - RNA, 19 nt, Homo sapiens
  misc_RNA (1)...(19): siRNA sense strand
uuguagagcuggugugaaa

SEQ ID NO: 2171883 - RNA, 19 nt, Homo sapiens
  misc_RNA (1)...(19): siRNA sense strand
guaugaacauccuggacaa

SEQ ID NO: 2171884 - RNA, 19 nt, Homo sapiens
  misc_RNA (1)...(19): siRNA sense strand
aaaggguguucuaaggaua

SEQ ID NO: 2171885 - RNA, 19 nt, Homo sapiens
  misc_RNA (1)...(19): siRNA sense strand
ugauugaccucauugaagu

SEQ ID NO: 2171886 - RNA, 19 nt, Homo sapiens
  misc_RNA (1)...(19): siRNA sense strand
ugaacauccuggacaagaa

SEQ ID NO: 2171887 - RNA, 19 nt, Homo sapiens
  misc_RNA (1)...(19): siRNA sense strand
caaaguggaaugaagucua

SEQ ID NO: 2171888 - RNA, 19 nt, Homo sapiens
  misc_RNA (1)...(19): siRNA sense strand
gagcaaacacccaccuuag

SEQ ID NO: 2171889 - RNA, 19 nt, Homo sapiens
  misc_RNA (1)...(19): siRNA sense strand
caaauccuguuguccagau

SEQ ID NO: 2171890 - RNA, 19 nt, Homo sapiens
  misc_RNA (1)...(19): siRNA sense strand
gcggucagccuuuggguuu

SEQ ID NO: 2171891 - RNA, 19 nt, Homo sapiens
  misc_RNA (1)...(19): siRNA sense strand
caccuuagcaccuuuaguu

SEQ ID NO: 2171892 - RNA, 19 nt, Homo sapiens
  misc_RNA (1)...(19): siRNA sense strand
uggaguggcucacguuaau

SEQ ID NO: 2171893 - RNA, 19 nt, Homo sapiens
  misc_RNA (1)...(19): siRNA sense strand
cugaagaacuugccaaagg

SEQ ID NO: 2171894 - RNA, 19 nt, Homo sapiens
  misc_RNA (1)...(19): siRNA sense strand
ggaaauugugagauugauu

SEQ ID NO: 2171895 - RNA, 19 nt, Homo sapiens
  misc_RNA (1)...(19): siRNA sense strand
gagauugagcucuuugaug

SEQ ID NO: 2171896 - RNA, 19 nt, Homo sapiens
  misc_RNA (1)...(19): siRNA sense strand
uggauugaaugguuuauca

SEQ ID NO: 2171897 - RNA, 19 nt, Homo sapiens
  misc_RNA (1)...(19): siRNA sense strand
cgaaucaccguuccacuug

SEQ ID NO: 2171898 - RNA, 19 nt, Homo sapiens
  misc_RNA (1)...(19): siRNA sense strand
cauuaaauccaguguuuga

SEQ ID NO: 2171899 - RNA, 19 nt, Homo sapiens
  misc_RNA (1)...(19): siRNA sense strand
gccaauuuauagagaaguu

SEQ ID NO: 2171900 - RNA, 19 nt, Homo sapiens
  misc_RNA (1)...(19): siRNA sense strand
ccuuucauuugccaauuua

SEQ ID NO: 2171901 - RNA, 19 nt, Homo sapiens
  misc_RNA (1)...(19): siRNA sense strand
cuuagcaccuuuaguuuca

SEQ ID NO: 2171902 - RNA, 19 nt, Homo sapiens
  misc_RNA (1)...(19): siRNA sense strand
gcagugauaagccugguau

SEQ ID NO: 2171903 - RNA, 19 nt, Homo sapiens
  misc_RNA (1)...(19): siRNA sense strand
gaaaacauccaucaaaucu

SEQ ID NO: 2171904 - RNA, 19 nt, Homo sapiens
  misc_RNA (1)...(19): siRNA sense strand
ggucagccuuuggguuuga

SEQ ID NO: 2171905 - RNA, 19 nt, Homo sapiens
  misc_RNA (1)...(19): siRNA sense strand
guagacaaaaggcaaauua

SEQ ID NO: 2171906 - RNA, 19 nt, Homo sapiens
  misc_RNA (1)...(19): siRNA sense strand
ucgcagagaaacaagcuua

SEQ ID NO: 2171907 - RNA, 19 nt, Homo sapiens
  misc_RNA (1)...(19): siRNA sense strand
ucgacaaggugcuaacaga

SEQ ID NO: 2171908 - RNA, 19 nt, Homo sapiens
  misc_RNA (1)...(19): siRNA sense strand
ucuaugaggcuuuagugua

SEQ ID NO: 2171909 - RNA, 19 nt, Homo sapiens
  misc_RNA (1)...(19): siRNA sense strand
gaaucaccguuccacuugu

SEQ ID NO: 2171910 - RNA, 19 nt, Homo sapiens
  misc_RNA (1)...(19): siRNA sense strand
gccuuucauuugccaauuu

SEQ ID NO: 2171911 - RNA, 19 nt, Homo sapiens
  misc_RNA (1)...(19): siRNA sense strand
uugucuaucuucuuccuua

SEQ ID NO: 2171912 - RNA, 19 nt, Homo sapiens
  misc_RNA (1)...(19): siRNA sense strand
uauggaaucauuagaguug

SEQ ID NO: 2171913 - RNA, 19 nt, Homo sapiens
  misc_RNA (1)...(19): siRNA sense strand
caggaucaaugguguuaag

SEQ ID NO: 2171914 - RNA, 19 nt, Homo sapiens
  misc_RNA (1)...(19): siRNA sense strand
ggugcuaacagacaucaaa

SEQ ID NO: 2171915 - RNA, 19 nt, Homo sapiens
  misc_RNA (1)...(19): siRNA sense strand
gagaaccucaguccaaagu

SEQ ID NO: 2171916 - RNA, 19 nt, Homo sapiens
  misc_RNA (1)...(19): siRNA sense strand
ccaaaggguguucuaagga

SEQ ID NO: 2171917 - RNA, 19 nt, Homo sapiens
  misc_RNA (1)...(19): siRNA sense strand
gagcuggugugaaaaguau

SEQ ID NO: 2171918 - RNA, 19 nt, Homo sapiens
  misc_RNA (1)...(19): siRNA sense strand
ccgcauguauuuauuacca

SEQ ID NO: 2171919 - RNA, 19 nt, Homo sapiens
  misc_RNA (1)...(19): siRNA sense strand
gaggaaaacauccaucaaa

SEQ ID NO: 2171920 - RNA, 19 nt, Homo sapiens
  misc_RNA (1)...(19): siRNA sense strand
uuaggaagucuuaugauug

SEQ ID NO: 2171921 - RNA, 19 nt, Homo sapiens
  misc_RNA (1)...(19): siRNA sense strand
aaagcagagucaucaagga

SEQ ID NO: 2171922 - RNA, 19 nt, Homo sapiens
  misc_RNA (1)...(19): siRNA sense strand
gauugaaugguuuaucaga

SEQ ID NO: 2171923 - RNA, 19 nt, Homo sapiens
  misc_RNA (1)...(19): siRNA sense strand
ucuggcaucugaagaacuu

SEQ ID NO: 2171924 - RNA, 19 nt, Homo sapiens
  misc_RNA (1)...(19): siRNA sense strand
agagcaagauucgauacaa

SEQ ID NO: 2171925 - RNA, 19 nt, Homo sapiens
  misc_RNA (1)...(19): siRNA sense strand
agacaucaaagcugacaaa

SEQ ID NO: 2171926 - RNA, 19 nt, Homo sapiens
  misc_RNA (1)...(19): siRNA sense strand
ugaccucauugaaguugaa

SEQ ID NO: 2171927 - RNA, 19 nt, Homo sapiens
  misc_RNA (1)...(19): siRNA sense strand
guaccaaaggguguucuaa

SEQ ID NO: 2171928 - RNA, 19 nt, Homo sapiens
  misc_RNA (1)...(19): siRNA sense strand
gaaccguugauuggagaua

SEQ ID NO: 2171929 - RNA, 19 nt, Homo sapiens
  misc_RNA (1)...(19): siRNA sense strand
gcggcuuccuguccaaaga

SEQ ID NO: 2171930 - RNA, 19 nt, Homo sapiens
  misc_RNA (1)...(19): siRNA sense strand
acauguggccuuucauuug

SEQ ID NO: 2171931 - RNA, 19 nt, Homo sapiens
  misc_RNA (1)...(19): siRNA sense strand
uauugaagcucaggaucuu

SEQ ID NO: 2171932 - RNA, 19 nt, Homo sapiens
  misc_RNA (1)...(19): siRNA sense strand
gcucgacguugccgugaag

SEQ ID NO: 2171933 - RNA, 19 nt, Homo sapiens
  misc_RNA (1)...(19): siRNA sense strand
aaacaguccucacaccuua

SEQ ID NO: 2171934 - RNA, 19 nt, Homo sapiens
  misc_RNA (1)...(19): siRNA sense strand
ggacuuaaccaauguuuga

SEQ ID NO: 2171935 - RNA, 19 nt, Homo sapiens
  misc_RNA (1)...(19): siRNA sense strand
cuacaaaugugaaguaugu

SEQ ID NO: 2171936 - RNA, 19 nt, Homo sapiens
  misc_RNA (1)...(19): siRNA sense strand
cuacaaaugugaacaaugu

SEQ ID NO: 2171937 - RNA, 19 nt, Homo sapiens
  misc_RNA (1)...(19): siRNA sense strand
gaagagaaacccuacaaau

SEQ ID NO: 2171938 - RNA, 19 nt, Homo sapiens
  misc_RNA (1)...(19): siRNA sense strand
cuacaaaugugaagagugu

SEQ ID NO: 2171939 - RNA, 19 nt, Homo sapiens
  misc_RNA (1)...(19): siRNA sense strand
gagaaacccuacaaaugug

SEQ ID NO: 2171940 - RNA, 19 nt, Homo sapiens
  misc_RNA (1)...(19): siRNA sense strand
caccaauccucaauccuua

SEQ ID NO: 2171941 - RNA, 19 nt, Homo sapiens
  misc_RNA (1)...(19): siRNA sense strand
ccacaaaccuuucuaaacc

SEQ ID NO: 2171942 - RNA, 19 nt, Homo sapiens
  misc_RNA (1)...(19): siRNA sense strand
gagaggaaccauacaaaug

SEQ ID NO: 2171943 - RNA, 19 nt, Homo sapiens
  misc_RNA (1)...(19): siRNA sense strand
gauaauucguacuggagaa

SEQ ID NO: 2171944 - RNA, 19 nt, Homo sapiens
  misc_RNA (1)...(19): siRNA sense strand
agagaaacccuacaaaugu

SEQ ID NO: 2171945 - RNA, 19 nt, Homo sapiens
  misc_RNA (1)...(19): siRNA sense strand
ggagaggaaccauacaaau

SEQ ID NO: 2171946 - RNA, 19 nt, Homo sapiens
  misc_RNA (1)...(19): siRNA sense strand
ggacauaagaauuuacagu

SEQ ID NO: 2171947 - RNA, 19 nt, Homo sapiens
  misc_RNA (1)...(19): siRNA sense strand
guaaagaaugugacaaauc

SEQ ID NO: 2171948 - RNA, 19 nt, Homo sapiens
  misc_RNA (1)...(19): siRNA sense strand
acacugagcagauauggaa

SEQ ID NO: 2171949 - RNA, 19 nt, Homo sapiens
  misc_RNA (1)...(19): siRNA sense strand
uggcaaagcuuuuaaccua

SEQ ID NO: 2171950 - RNA, 19 nt, Homo sapiens
  misc_RNA (1)...(19): siRNA sense strand
ccucacaccuuacuagaca

SEQ ID NO: 2171951 - RNA, 19 nt, Homo sapiens
  misc_RNA (1)...(19): siRNA sense strand
ccucaauccuuacuaaaca

SEQ ID NO: 2171952 - RNA, 19 nt, Homo sapiens
  misc_RNA (1)...(19): siRNA sense strand
caagauaagacauacugaa

SEQ ID NO: 2171953 - RNA, 19 nt, Homo sapiens
  misc_RNA (1)...(19): siRNA sense strand
agacacaagauaagacaua

SEQ ID NO: 2171954 - RNA, 19 nt, Homo sapiens
  misc_RNA (1)...(19): siRNA sense strand
acgccuaacucaacauaaa

SEQ ID NO: 2171955 - RNA, 19 nt, Homo sapiens
  misc_RNA (1)...(19): siRNA sense strand
auacaaaugugaggaaugu

SEQ ID NO: 2171956 - RNA, 19 nt, Homo sapiens
  misc_RNA (1)...(19): siRNA sense strand
cuauaaaugugcacacugu

SEQ ID NO: 2171957 - RNA, 19 nt, Homo sapiens
  misc_RNA (1)...(19): siRNA sense strand
agaaaaggcuguaaaagug

SEQ ID NO: 2171958 - RNA, 19 nt, Homo sapiens
  misc_RNA (1)...(19): siRNA sense strand
gaggaaccauacaaaugug

SEQ ID NO: 2171959 - RNA, 19 nt, Homo sapiens
  misc_RNA (1)...(19): siRNA sense strand
aagagaaacccuacaaaug

SEQ ID NO: 2171960 - RNA, 19 nt, Homo sapiens
  misc_RNA (1)...(19): siRNA sense strand
gagcagaacauaaaagauu

SEQ ID NO: 2171961 - RNA, 19 nt, Homo sapiens
  misc_RNA (1)...(19): siRNA sense strand
aauccucaauccuuacuaa

SEQ ID NO: 2171962 - RNA, 19 nt, Homo sapiens
  misc_RNA (1)...(19): siRNA sense strand
caaauagacacaagauaag

SEQ ID NO: 2171963 - RNA, 19 nt, Homo sapiens
  misc_RNA (1)...(19): siRNA sense strand
gaaaauucauacuggagaa

SEQ ID NO: 2171964 - RNA, 19 nt, Homo sapiens
  misc_RNA (1)...(19): siRNA sense strand
acaaaccuuucuaaaccua

SEQ ID NO: 2171965 - RNA, 19 nt, Homo sapiens
  misc_RNA (1)...(19): siRNA sense strand
ggcuagagcagaacauaaa

SEQ ID NO: 2171966 - RNA, 19 nt, Homo sapiens
  misc_RNA (1)...(19): siRNA sense strand
uaauggacuuaaccaaugu

SEQ ID NO: 2171967 - RNA, 19 nt, Homo sapiens
  misc_RNA (1)...(19): siRNA sense strand
cauaagauaauucguacug

SEQ ID NO: 2171968 - RNA, 19 nt, Homo sapiens
  misc_RNA (1)...(19): siRNA sense strand
gaaaauuaccacaagcaaa

SEQ ID NO: 2171969 - RNA, 19 nt, Homo sapiens
  misc_RNA (1)...(19): siRNA sense strand
agaggaaccauacaaaugu

SEQ ID NO: 2171970 - RNA, 19 nt, Homo sapiens
  misc_RNA (1)...(19): siRNA sense strand
ucaccaauccucaauccuu

SEQ ID NO: 2171971 - RNA, 19 nt, Homo sapiens
  misc_RNA (1)...(19): siRNA sense strand
uaacugguccacaaaccuu

SEQ ID NO: 2171972 - RNA, 19 nt, Homo sapiens
  misc_RNA (1)...(19): siRNA sense strand
guggcaaggucuuuaagca

SEQ ID NO: 2171973 - RNA, 19 nt, Homo sapiens
  misc_RNA (1)...(19): siRNA sense strand
uaaacaguccucacaccuu

SEQ ID NO: 2171974 - RNA, 19 nt, Homo sapiens
  misc_RNA (1)...(19): siRNA sense strand
ugaagagaaacccuacaaa

SEQ ID NO: 2171975 - RNA, 19 nt, Homo sapiens
  misc_RNA (1)...(19): siRNA sense strand
caauguggcaaggucuuua

SEQ ID NO: 2171976 - RNA, 19 nt, Homo sapiens
  misc_RNA (1)...(19): siRNA sense strand
ucacaccuuacuagacaua

SEQ ID NO: 2171977 - RNA, 19 nt, Homo sapiens
  misc_RNA (1)...(19): siRNA sense strand
gacacaagauaagacauac

SEQ ID NO: 2171978 - RNA, 19 nt, Homo sapiens
  misc_RNA (1)...(19): siRNA sense strand
gcaaagcuuuuaaccuauc

SEQ ID NO: 2171979 - RNA, 19 nt, Homo sapiens
  misc_RNA (1)...(19): siRNA sense strand
ugaggaauguggcaaagcu

SEQ ID NO: 2171980 - RNA, 19 nt, Homo sapiens
  misc_RNA (1)...(19): siRNA sense strand
aaaguguggaugaguguaa

SEQ ID NO: 2171981 - RNA, 19 nt, Homo sapiens
  misc_RNA (1)...(19): siRNA sense strand
gguccacaaaccuuucuaa

SEQ ID NO: 2171982 - RNA, 19 nt, Homo sapiens
  misc_RNA (1)...(19): siRNA sense strand
ucacgccuaacucaacaua

SEQ ID NO: 2171983 - RNA, 19 nt, Homo sapiens
  misc_RNA (1)...(19): siRNA sense strand
aaaucacuuugcaugcuuu

SEQ ID NO: 2171984 - RNA, 19 nt, Homo sapiens
  misc_RNA (1)...(19): siRNA sense strand
gaaacccuacaaaugugaa

SEQ ID NO: 2171985 - RNA, 19 nt, Homo sapiens
  misc_RNA (1)...(19): siRNA sense strand
ucagauguaaagaauguga

SEQ ID NO: 2171986 - RNA, 19 nt, Homo sapiens
  misc_RNA (1)...(19): siRNA sense strand
gaauguggcaaagcuuuua

SEQ ID NO: 2171987 - RNA, 19 nt, Homo sapiens
  misc_RNA (1)...(19): siRNA sense strand
ccauacaaaugugaggaau

SEQ ID NO: 2171988 - RNA, 19 nt, Homo sapiens
  misc_RNA (1)...(19): siRNA sense strand
guccacaaaccuuucuaaa

SEQ ID NO: 2171989 - RNA, 19 nt, Homo sapiens
  misc_RNA (1)...(19): siRNA sense strand
cacaagauaagacauacug

SEQ ID NO: 2171990 - RNA, 19 nt, Homo sapiens
  misc_RNA (1)...(19): siRNA sense strand
gaaaaggcuguaaaagugu

SEQ ID NO: 2171991 - RNA, 19 nt, Homo sapiens
  misc_RNA (1)...(19): siRNA sense strand
aauuuauacuggagaggaa

SEQ ID NO: 2171992 - RNA, 19 nt, Homo sapiens
  misc_RNA (1)...(19): siRNA sense strand
aaaccuuucuaaaccuaag

SEQ ID NO: 2171993 - RNA, 19 nt, Homo sapiens
  misc_RNA (1)...(19): siRNA sense strand
uggagaggaaccauacaaa

SEQ ID NO: 2171994 - RNA, 19 nt, Homo sapiens
  misc_RNA (1)...(19): siRNA sense strand
caaaccuuucuaaaccuaa

SEQ ID NO: 2171995 - RNA, 19 nt, Homo sapiens
  misc_RNA (1)...(19): siRNA sense strand
aaugugaaguauguggaaa

SEQ ID NO: 2171996 - RNA, 19 nt, Homo sapiens
  misc_RNA (1)...(19): siRNA sense strand
ugcaugcuuucacgccuaa

SEQ ID NO: 2171997 - RNA, 19 nt, Homo sapiens
  misc_RNA (1)...(19): siRNA sense strand
gcacauaagaucauucaua

SEQ ID NO: 2171998 - RNA, 19 nt, Homo sapiens
  misc_RNA (1)...(19): siRNA sense strand
ccacaaauaugaagaaugu

SEQ ID NO: 2171999 - RNA, 19 nt, Homo sapiens
  misc_RNA (1)...(19): siRNA sense strand
aaacaguccucacaccuua

SEQ ID NO: 2172000 - RNA, 19 nt, Homo sapiens
  misc_RNA (1)...(19): siRNA sense strand
ggacuuaaccaauguuuga

SEQ ID NO: 2172001 - RNA, 19 nt, Homo sapiens
  misc_RNA (1)...(19): siRNA sense strand
agagaaaccuuacaaaugu

SEQ ID NO: 2172002 - RNA, 19 nt, Homo sapiens
  misc_RNA (1)...(19): siRNA sense strand
cuacaaaugugaaguaugu

SEQ ID NO: 2172003 - RNA, 19 nt, Homo sapiens
  misc_RNA (1)...(19): siRNA sense strand
cuacaaaugugaagaaugu

SEQ ID NO: 2172004 - RNA, 19 nt, Homo sapiens
  misc_RNA (1)...(19): siRNA sense strand
gaaugaaacccuacaaaug

SEQ ID NO: 2172005 - RNA, 19 nt, Homo sapiens
  misc_RNA (1)...(19): siRNA sense strand
gagagaaaccuuacaaaug

SEQ ID NO: 2172006 - RNA, 19 nt, Homo sapiens
  misc_RNA (1)...(19): siRNA sense strand
cuacaaaugugaagaaugu

SEQ ID NO: 2172007 - RNA, 19 nt, Homo sapiens
  misc_RNA (1)...(19): siRNA sense strand
cuacaaaugugaacaaugu

SEQ ID NO: 2172008 - RNA, 19 nt, Homo sapiens
  misc_RNA (1)...(19): siRNA sense strand
gaagagaaacccuacaaau

SEQ ID NO: 2172009 - RNA, 19 nt, Homo sapiens
  misc_RNA (1)...(19): siRNA sense strand
gagaaacucuacaaaugug

SEQ ID NO: 2172010 - RNA, 19 nt, Homo sapiens
  misc_RNA (1)...(19): siRNA sense strand
gcaaagcucacugaacaua

SEQ ID NO: 2172011 - RNA, 19 nt, Homo sapiens
  misc_RNA (1)...(19): siRNA sense strand
acaagaagauucauacuag

SEQ ID NO: 2172012 - RNA, 19 nt, Homo sapiens
  misc_RNA (1)...(19): siRNA sense strand
ucucaaaccuuacuaaaca

SEQ ID NO: 2172013 - RNA, 19 nt, Homo sapiens
  misc_RNA (1)...(19): siRNA sense strand
cuacaaaugugaagagugu

SEQ ID NO: 2172014 - RNA, 19 nt, Homo sapiens
  misc_RNA (1)...(19): siRNA sense strand
cuacaaaugugaacgaugu

SEQ ID NO: 2172015 - RNA, 19 nt, Homo sapiens
  misc_RNA (1)...(19): siRNA sense strand
gagaaagccuacaaaugug

SEQ ID NO: 2172016 - RNA, 19 nt, Homo sapiens
  misc_RNA (1)...(19): siRNA sense strand
gagaaacccuacaaaugug

SEQ ID NO: 2172017 - RNA, 19 nt, Homo sapiens
  misc_RNA (1)...(19): siRNA sense strand
ccgcaaagcucacugaaca

SEQ ID NO: 2172018 - RNA, 19 nt, Homo sapiens
  misc_RNA (1)...(19): siRNA sense strand
caccaauccucaauccuua

SEQ ID NO: 2172019 - RNA, 19 nt, Homo sapiens
  misc_RNA (1)...(19): siRNA sense strand
ggagagaaaccuuacaaau

SEQ ID NO: 2172020 - RNA, 19 nt, Homo sapiens
  misc_RNA (1)...(19): siRNA sense strand
agagaaagccuacaaaugu

SEQ ID NO: 2172021 - RNA, 19 nt, Homo sapiens
  misc_RNA (1)...(19): siRNA sense strand
ccacaaaccuuucuaaacc

SEQ ID NO: 2172022 - RNA, 19 nt, Homo sapiens
  misc_RNA (1)...(19): siRNA sense strand
gagaggaaccauacaaaug

SEQ ID NO: 2172023 - RNA, 19 nt, Homo sapiens
  misc_RNA (1)...(19): siRNA sense strand
gagagaaagccuacaaaug

SEQ ID NO: 2172024 - RNA, 19 nt, Homo sapiens
  misc_RNA (1)...(19): siRNA sense strand
ugaagaauguggcauaucu

SEQ ID NO: 2172025 - RNA, 19 nt, Homo sapiens
  misc_RNA (1)...(19): siRNA sense strand
gagagaaaccccacaaaua

SEQ ID NO: 2172026 - RNA, 19 nt, Homo sapiens
  misc_RNA (1)...(19): siRNA sense strand
caagaagauucauacuaga

SEQ ID NO: 2172027 - RNA, 19 nt, Homo sapiens
  misc_RNA (1)...(19): siRNA sense strand
uaagaugauucacacuuga

SEQ ID NO: 2172028 - RNA, 19 nt, Homo sapiens
  misc_RNA (1)...(19): siRNA sense strand
caccgauacucaauccuua

SEQ ID NO: 2172029 - RNA, 19 nt, Homo sapiens
  misc_RNA (1)...(19): siRNA sense strand
ccucaacucuuauuacaca

SEQ ID NO: 2172030 - RNA, 19 nt, Homo sapiens
  misc_RNA (1)...(19): siRNA sense strand
gaauguggcauaucuuuua

SEQ ID NO: 2172031 - RNA, 19 nt, Homo sapiens
  misc_RNA (1)...(19): siRNA sense strand
gcacagcggaauguauaua

SEQ ID NO: 2172032 - RNA, 19 nt, Homo sapiens
  misc_RNA (1)...(19): siRNA sense strand
agccaacucucaaaccuua

SEQ ID NO: 2172033 - RNA, 19 nt, Homo sapiens
  misc_RNA (1)...(19): siRNA sense strand
gauaauucguacuggagaa

SEQ ID NO: 2172034 - RNA, 19 nt, Homo sapiens
  misc_RNA (1)...(19): siRNA sense strand
uuacaaaugugaggaaugu

SEQ ID NO: 2172035 - RNA, 19 nt, Homo sapiens
  misc_RNA (1)...(19): siRNA sense strand
cacauaagaucauucauac

SEQ ID NO: 2172036 - RNA, 19 nt, Homo sapiens
  misc_RNA (1)...(19): siRNA sense strand
agagaaacccuacaaaugu

SEQ ID NO: 2172037 - RNA, 19 nt, Homo sapiens
  misc_RNA (1)...(19): siRNA sense strand
gaacuuuacuaugcauaag

SEQ ID NO: 2172038 - RNA, 19 nt, Homo sapiens
  misc_RNA (1)...(19): siRNA sense strand
ggagaggaaccauacaaau

SEQ ID NO: 2172039 - RNA, 19 nt, Homo sapiens
  misc_RNA (1)...(19): siRNA sense strand
ggacauaagaauuuacagu

SEQ ID NO: 2172040 - RNA, 19 nt, Homo sapiens
  misc_RNA (1)...(19): siRNA sense strand
ucucaacacuuacuauaca

SEQ ID NO: 2172041 - RNA, 19 nt, Homo sapiens
  misc_RNA (1)...(19): siRNA sense strand
gcucacugaacauaaguua

SEQ ID NO: 2172042 - RNA, 19 nt, Homo sapiens
  misc_RNA (1)...(19): siRNA sense strand
guaaagaaugugacaaauc

SEQ ID NO: 2172043 - RNA, 19 nt, Homo sapiens
  misc_RNA (1)...(19): siRNA sense strand
acacugagcagauauggaa

SEQ ID NO: 2172044 - RNA, 19 nt, Homo sapiens
  misc_RNA (1)...(19): siRNA sense strand
gagaaaccuuacaaaugug

SEQ ID NO: 2172045 - RNA, 19 nt, Homo sapiens
  misc_RNA (1)...(19): siRNA sense strand
cauaagaucauucauacug

SEQ ID NO: 2172046 - RNA, 19 nt, Homo sapiens
  misc_RNA (1)...(19): siRNA sense strand
uggcaaagcuuuuaaccua

SEQ ID NO: 2172047 - RNA, 19 nt, Homo sapiens
  misc_RNA (1)...(19): siRNA sense strand
ccucacaccuuacuagaca

SEQ ID NO: 2172048 - RNA, 19 nt, Homo sapiens
  misc_RNA (1)...(19): siRNA sense strand
ccucaauccuuacuaaaca

SEQ ID NO: 2172049 - RNA, 19 nt, Homo sapiens
  misc_RNA (1)...(19): siRNA sense strand
caagauaagacauacugaa

SEQ ID NO: 2172050 - RNA, 19 nt, Homo sapiens
  misc_RNA (1)...(19): siRNA sense strand
agacacaagauaagacaua

SEQ ID NO: 2172051 - RNA, 19 nt, Homo sapiens
  misc_RNA (1)...(19): siRNA sense strand
acgccuaacucaacauaaa

SEQ ID NO: 2172052 - RNA, 19 nt, Homo sapiens
  misc_RNA (1)...(19): siRNA sense strand
aaccaguccucacaccuua

SEQ ID NO: 2172053 - RNA, 19 nt, Homo sapiens
  misc_RNA (1)...(19): siRNA sense strand
auacaaaugugaggaaugu

SEQ ID NO: 2172054 - RNA, 19 nt, Homo sapiens
  misc_RNA (1)...(19): siRNA sense strand
cuauaaaugugcacacugu

SEQ ID NO: 2172055 - RNA, 19 nt, Homo sapiens
  misc_RNA (1)...(19): siRNA sense strand
agaaaaggcuguaaaagug

SEQ ID NO: 2172056 - RNA, 19 nt, Homo sapiens
  misc_RNA (1)...(19): siRNA sense strand
aaugaaacccuacaaaugu

SEQ ID NO: 2172057 - RNA, 19 nt, Homo sapiens
  misc_RNA (1)...(19): siRNA sense strand
ucacaacuugcuauacaua

SEQ ID NO: 2172058 - RNA, 19 nt, Homo sapiens
  misc_RNA (1)...(19): siRNA sense strand
ucucacaacuugcuauaca

SEQ ID NO: 2172059 - RNA, 19 nt, Homo sapiens
  misc_RNA (1)...(19): siRNA sense strand
cuuaacaacuuacugaaca

SEQ ID NO: 2172060 - RNA, 19 nt, Homo sapiens
  misc_RNA (1)...(19): siRNA sense strand
gagcagaacauaaaagauu

SEQ ID NO: 2172061 - RNA, 19 nt, Homo sapiens
  misc_RNA (1)...(19): siRNA sense strand
gaggaaccauacaaaugug

SEQ ID NO: 2172062 - RNA, 19 nt, Homo sapiens
  misc_RNA (1)...(19): siRNA sense strand
aagagaaacccuacaaaug

SEQ ID NO: 2172063 - RNA, 19 nt, Homo sapiens
  misc_RNA (1)...(19): siRNA sense strand
gaauguauauaggcaugug

SEQ ID NO: 2172064 - RNA, 19 nt, Homo sapiens
  misc_RNA (1)...(19): siRNA sense strand
ggagaaaccccacaaaugu

SEQ ID NO: 2172065 - RNA, 19 nt, Homo sapiens
  misc_RNA (1)...(19): siRNA sense strand
aauccucaauccuuacuaa

SEQ ID NO: 2172066 - RNA, 19 nt, Homo sapiens
  misc_RNA (1)...(19): siRNA sense strand
caaauagacacaagauaag

SEQ ID NO: 2172067 - RNA, 19 nt, Homo sapiens
  misc_RNA (1)...(19): siRNA sense strand
gagcaaaaccuuggaaauu

SEQ ID NO: 2172068 - RNA, 19 nt, Homo sapiens
  misc_RNA (1)...(19): siRNA sense strand
ugaaugaaacccuacaaau

SEQ ID NO: 2172069 - RNA, 19 nt, Homo sapiens
  misc_RNA (1)...(19): siRNA sense strand
auaagaugauucacacuug

SEQ ID NO: 2172070 - RNA, 19 nt, Homo sapiens
  misc_RNA (1)...(19): siRNA sense strand
cacaagaagauucauacua

SEQ ID NO: 2172071 - RNA, 19 nt, Homo sapiens
  misc_RNA (1)...(19): siRNA sense strand
gaaaauucauacuggagaa

SEQ ID NO: 2172072 - RNA, 19 nt, Homo sapiens
  misc_RNA (1)...(19): siRNA sense strand
acaaaccuuucuaaaccua

SEQ ID NO: 2172073 - RNA, 19 nt, Homo sapiens
  misc_RNA (1)...(19): siRNA sense strand
ggcuagagcagaacauaaa

SEQ ID NO: 2172074 - RNA, 19 nt, Homo sapiens
  misc_RNA (1)...(19): siRNA sense strand
gcaaaaccuuggaaauuca

SEQ ID NO: 2172075 - RNA, 19 nt, Homo sapiens
  misc_RNA (1)...(19): siRNA sense strand
ggcaugugauguuagagaa

SEQ ID NO: 2172076 - RNA, 19 nt, Homo sapiens
  misc_RNA (1)...(19): siRNA sense strand
caaagcucacugaacauaa

SEQ ID NO: 2172077 - RNA, 19 nt, Homo sapiens
  misc_RNA (1)...(19): siRNA sense strand
ugaagaauguggcaaagcu

SEQ ID NO: 2172078 - RNA, 19 nt, Homo sapiens
  misc_RNA (1)...(19): siRNA sense strand
gaaacucuacaaaugugaa

SEQ ID NO: 2172079 - RNA, 19 nt, Homo sapiens
  misc_RNA (1)...(19): siRNA sense strand
caacuugcuauacauaaga

SEQ ID NO: 2172080 - RNA, 19 nt, Homo sapiens
  misc_RNA (1)...(19): siRNA sense strand
caacucuuacugcacauaa

SEQ ID NO: 2172081 - RNA, 19 nt, Homo sapiens
  misc_RNA (1)...(19): siRNA sense strand
ugaagaauguggcaaagcu

SEQ ID NO: 2172082 - RNA, 19 nt, Homo sapiens
  misc_RNA (1)...(19): siRNA sense strand
uaauggacuuaaccaaugu

SEQ ID NO: 2172083 - RNA, 19 nt, Homo sapiens
  misc_RNA (1)...(19): siRNA sense strand
aauucaaacuggagagaaa

SEQ ID NO: 2172084 - RNA, 19 nt, Homo sapiens
  misc_RNA (1)...(19): siRNA sense strand
gauguuagagaacuacaga

SEQ ID NO: 2172085 - RNA, 19 nt, Homo sapiens
  misc_RNA (1)...(19): siRNA sense strand
auauaggcaugugauguua

SEQ ID NO: 2172086 - RNA, 19 nt, Homo sapiens
  misc_RNA (1)...(19): siRNA sense strand
ggauguggccauagaguuc

SEQ ID NO: 2172087 - RNA, 19 nt, Homo sapiens
  misc_RNA (1)...(19): siRNA sense strand
ugaggaauguggcaaaggu

SEQ ID NO: 2172088 - RNA, 19 nt, Homo sapiens
  misc_RNA (1)...(19): siRNA sense strand
gaaagccuacaaaugugaa

SEQ ID NO: 2172089 - RNA, 19 nt, Homo sapiens
  misc_RNA (1)...(19): siRNA sense strand
uaugaagaaugugguaaug

SEQ ID NO: 2172090 - RNA, 19 nt, Homo sapiens
  misc_RNA (1)...(19): siRNA sense strand
caaagaaugugguaaaacu

SEQ ID NO: 2172091 - RNA, 19 nt, Homo sapiens
  misc_RNA (1)...(19): siRNA sense strand
guccucaacucuuauuaca

SEQ ID NO: 2172092 - RNA, 19 nt, Homo sapiens
  misc_RNA (1)...(19): siRNA sense strand
uuucaacccuuauuacaca

SEQ ID NO: 2172093 - RNA, 19 nt, Homo sapiens
  misc_RNA (1)...(19): siRNA sense strand
gaacgauguggcaguuguu

SEQ ID NO: 2172094 - RNA, 19 nt, Homo sapiens
  misc_RNA (1)...(19): siRNA sense strand
gaagaaugugguaaugcuu

SEQ ID NO: 2172095 - RNA, 19 nt, Homo sapiens
  misc_RNA (1)...(19): siRNA sense strand
ugaagaaugugguaaugcu

SEQ ID NO: 2172096 - RNA, 19 nt, Homo sapiens
  misc_RNA (1)...(19): siRNA sense strand
uggcaaagcuuuuaaccaa

SEQ ID NO: 2172097 - RNA, 19 nt, Homo sapiens
  misc_RNA (1)...(19): siRNA sense strand
aagcagggcccuagcagua

SEQ ID NO: 2172098 - RNA, 19 nt, Homo sapiens
  misc_RNA (1)...(19): siRNA sense strand
gcugcaggcugagcuagaa

SEQ ID NO: 2172099 - RNA, 19 nt, Homo sapiens
  misc_RNA (1)...(19): siRNA sense strand
gcagggcccuagcaguaag

SEQ ID NO: 2172100 - RNA, 19 nt, Homo sapiens
  misc_RNA (1)...(19): siRNA sense strand
ggcccuagcaguaagaaga

SEQ ID NO: 2172101 - RNA, 19 nt, Homo sapiens
  misc_RNA (1)...(19): siRNA sense strand
acuacgcgcuggccaagga

SEQ ID NO: 2172102 - RNA, 19 nt, Homo sapiens
  misc_RNA (1)...(19): siRNA sense strand
caucaaauaccaggagcuu

SEQ ID NO: 2172103 - RNA, 19 nt, Homo sapiens
  misc_RNA (1)...(19): siRNA sense strand
ggacgcaggcagagaagcu

SEQ ID NO: 2172104 - RNA, 19 nt, Homo sapiens
  misc_RNA (1)...(19): siRNA sense strand
ggaggcagaggagcagaug

SEQ ID NO: 2172105 - RNA, 19 nt, Homo sapiens
  misc_RNA (1)...(19): siRNA sense strand
aagcagggcccuagcagua

SEQ ID NO: 2172106 - RNA, 19 nt, Homo sapiens
  misc_RNA (1)...(19): siRNA sense strand
gcugcaggcugagcuagaa

SEQ ID NO: 2172107 - RNA, 19 nt, Homo sapiens
  misc_RNA (1)...(19): siRNA sense strand
gcagggcccuagcaguaag

SEQ ID NO: 2172108 - RNA, 19 nt, Homo sapiens
  misc_RNA (1)...(19): siRNA sense strand
ggcccuagcaguaagaaga

SEQ ID NO: 2172109 - RNA, 19 nt, Homo sapiens
  misc_RNA (1)...(19): siRNA sense strand
acuacgcgcuggccaagga

SEQ ID NO: 2172110 - RNA, 19 nt, Homo sapiens
  misc_RNA (1)...(19): siRNA sense strand
caucaaauaccaggagcuu

SEQ ID NO: 2172111 - RNA, 19 nt, Homo sapiens
  misc_RNA (1)...(19): siRNA sense strand
ggacgcaggcagagaagcu

SEQ ID NO: 2172112 - RNA, 19 nt, Homo sapiens
  misc_RNA (1)...(19): siRNA sense strand
ggaggcagaggagcagaug

SEQ ID NO: 2172113 - RNA, 19 nt, Homo sapiens
  misc_RNA (1)...(19): siRNA sense strand
ggaaauggauaaagugaug

SEQ ID NO: 2172114 - RNA, 19 nt, Homo sapiens
  misc_RNA (1)...(19): siRNA sense strand
ccaagaagaugagcaguuu

SEQ ID NO: 2172115 - RNA, 19 nt, Homo sapiens
  misc_RNA (1)...(19): siRNA sense strand
gacaaaagcuuccggcuaa

SEQ ID NO: 2172116 - RNA, 19 nt, Homo sapiens
  misc_RNA (1)...(19): siRNA sense strand
aaagugaugccucugauua

SEQ ID NO: 2172117 - RNA, 19 nt, Homo sapiens
  misc_RNA (1)...(19): siRNA sense strand
caccaagcauggauuauug

SEQ ID NO: 2172118 - RNA, 19 nt, Homo sapiens
  misc_RNA (1)...(19): siRNA sense strand
gaagggcacaggcuacaaa

SEQ ID NO: 2172119 - RNA, 19 nt, Homo sapiens
  misc_RNA (1)...(19): siRNA sense strand
gugcaucaguggcuggaua

SEQ ID NO: 2172120 - RNA, 19 nt, Homo sapiens
  misc_RNA (1)...(19): siRNA sense strand
cagauuacauuuacccaau

SEQ ID NO: 2172121 - RNA, 19 nt, Homo sapiens
  misc_RNA (1)...(19): siRNA sense strand
gauuacauuuacccaauug

SEQ ID NO: 2172122 - RNA, 19 nt, Homo sapiens
  misc_RNA (1)...(19): siRNA sense strand
ucagugaccucuacgcaau

SEQ ID NO: 2172123 - RNA, 19 nt, Homo sapiens
  misc_RNA (1)...(19): siRNA sense strand
gaauuuaucaugccagaca

SEQ ID NO: 2172124 - RNA, 19 nt, Homo sapiens
  misc_RNA (1)...(19): siRNA sense strand
gauaaagugaugccucuga

SEQ ID NO: 2172125 - RNA, 19 nt, Homo sapiens
  misc_RNA (1)...(19): siRNA sense strand
gauagcaugugccaauguc

SEQ ID NO: 2172126 - RNA, 19 nt, Homo sapiens
  misc_RNA (1)...(19): siRNA sense strand
guggugcuauugcgacuuu

SEQ ID NO: 2172127 - RNA, 19 nt, Homo sapiens
  misc_RNA (1)...(19): siRNA sense strand
acagggaaauggauaaagu

SEQ ID NO: 2172128 - RNA, 19 nt, Homo sapiens
  misc_RNA (1)...(19): siRNA sense strand
gugccaauguccucaguga

SEQ ID NO: 2172129 - RNA, 19 nt, Homo sapiens
  misc_RNA (1)...(19): siRNA sense strand
agacgacucuuacgugaca

SEQ ID NO: 2172130 - RNA, 19 nt, Homo sapiens
  misc_RNA (1)...(19): siRNA sense strand
gaccaccaagcauggauua

SEQ ID NO: 2172131 - RNA, 19 nt, Homo sapiens
  misc_RNA (1)...(19): siRNA sense strand
gggcacaggcuacaaagug

SEQ ID NO: 2172132 - RNA, 19 nt, Homo sapiens
  misc_RNA (1)...(19): siRNA sense strand
ggcuggauauuccuaagaa

SEQ ID NO: 2172133 - RNA, 19 nt, Homo sapiens
  misc_RNA (1)...(19): siRNA sense strand
gaagagucacuaccacugu

SEQ ID NO: 2172134 - RNA, 19 nt, Homo sapiens
  misc_RNA (1)...(19): siRNA sense strand
gggcuuuccuugguucaaa

SEQ ID NO: 2172135 - RNA, 19 nt, Homo sapiens
  misc_RNA (1)...(19): siRNA sense strand
gauacuugcauuccuuuga

SEQ ID NO: 2172136 - RNA, 19 nt, Homo sapiens
  misc_RNA (1)...(19): siRNA sense strand
gcgggcuucugaucuguuu

SEQ ID NO: 2172137 - RNA, 19 nt, Homo sapiens
  misc_RNA (1)...(19): siRNA sense strand
acgaggaggugaugaugaa

SEQ ID NO: 2172138 - RNA, 19 nt, Homo sapiens
  misc_RNA (1)...(19): siRNA sense strand
ccaccaagcauggauuauu

SEQ ID NO: 2172139 - RNA, 19 nt, Homo sapiens
  misc_RNA (1)...(19): siRNA sense strand
caacagggaaauggauaaa

SEQ ID NO: 2172140 - RNA, 19 nt, Homo sapiens
  misc_RNA (1)...(19): siRNA sense strand
guuuggguguuacgaauug

SEQ ID NO: 2172141 - RNA, 19 nt, Homo sapiens
  misc_RNA (1)...(19): siRNA sense strand
guacuaaaccccuggauug

SEQ ID NO: 2172142 - RNA, 19 nt, Homo sapiens
  misc_RNA (1)...(19): siRNA sense strand
uuauugggauuguagagaa

SEQ ID NO: 2172143 - RNA, 19 nt, Homo sapiens
  misc_RNA (1)...(19): siRNA sense strand
ggauauuccuaagaaaugg

SEQ ID NO: 2172144 - RNA, 19 nt, Homo sapiens
  misc_RNA (1)...(19): siRNA sense strand
caggauagcaugugccaau

SEQ ID NO: 2172145 - RNA, 19 nt, Homo sapiens
  misc_RNA (1)...(19): siRNA sense strand
gcuggauauuccuaagaaa

SEQ ID NO: 2172146 - RNA, 19 nt, Homo sapiens
  misc_RNA (1)...(19): siRNA sense strand
cuucugaucuguuuaccau

SEQ ID NO: 2172147 - RNA, 19 nt, Homo sapiens
  misc_RNA (1)...(19): siRNA sense strand
caauuguagacgacucuua

SEQ ID NO: 2172148 - RNA, 19 nt, Homo sapiens
  misc_RNA (1)...(19): siRNA sense strand
cuuuaacgaugaugaugaa

SEQ ID NO: 2172149 - RNA, 19 nt, Homo sapiens
  misc_RNA (1)...(19): siRNA sense strand
acagaaccacuuccaagaa

SEQ ID NO: 2172150 - RNA, 19 nt, Homo sapiens
  misc_RNA (1)...(19): siRNA sense strand
ucugaucuguuuaccaugu

SEQ ID NO: 2172151 - RNA, 19 nt, Homo sapiens
  misc_RNA (1)...(19): siRNA sense strand
ugucagcccagugaauuua

SEQ ID NO: 2172152 - RNA, 19 nt, Homo sapiens
  misc_RNA (1)...(19): siRNA sense strand
ccaacagggaaauggauaa

SEQ ID NO: 2172153 - RNA, 19 nt, Homo sapiens
  misc_RNA (1)...(19): siRNA sense strand
uaaagugaugccucugauu

SEQ ID NO: 2172154 - RNA, 19 nt, Homo sapiens
  misc_RNA (1)...(19): siRNA sense strand
cgagauugcaccacaagug

SEQ ID NO: 2172155 - RNA, 19 nt, Homo sapiens
  misc_RNA (1)...(19): siRNA sense strand
cagccagaaucauagacaa

SEQ ID NO: 2172156 - RNA, 19 nt, Homo sapiens
  misc_RNA (1)...(19): siRNA sense strand
gaacauggcgaggcucaac

SEQ ID NO: 2172157 - RNA, 19 nt, Homo sapiens
  misc_RNA (1)...(19): siRNA sense strand
uuacgugacaggcaggaua

SEQ ID NO: 2172158 - RNA, 19 nt, Homo sapiens
  misc_RNA (1)...(19): siRNA sense strand
guaauaaaaugaccaacag

SEQ ID NO: 2172159 - RNA, 19 nt, Homo sapiens
  misc_RNA (1)...(19): siRNA sense strand
gguucaaacuacagauuac

SEQ ID NO: 2172160 - RNA, 19 nt, Homo sapiens
  misc_RNA (1)...(19): siRNA sense strand
caucgagauugcaccacaa

SEQ ID NO: 2172161 - RNA, 19 nt, Homo sapiens
  misc_RNA (1)...(19): siRNA sense strand
gcacuuguuuggguguuac

SEQ ID NO: 2172162 - RNA, 19 nt, Homo sapiens
  misc_RNA (1)...(19): siRNA sense strand
gggaugugcugguguugac

SEQ ID NO: 2172163 - RNA, 19 nt, Homo sapiens
  misc_RNA (1)...(19): siRNA sense strand
uaacgaugaugaugaaaag

SEQ ID NO: 2172164 - RNA, 19 nt, Homo sapiens
  misc_RNA (1)...(19): siRNA sense strand
gggcaguggcugugcauca

SEQ ID NO: 2172165 - RNA, 19 nt, Homo sapiens
  misc_RNA (1)...(19): siRNA sense strand
ucacuaccacugucuguca

SEQ ID NO: 2172166 - RNA, 19 nt, Homo sapiens
  misc_RNA (1)...(19): siRNA sense strand
ggauagcaugugccaaugu

SEQ ID NO: 2172167 - RNA, 19 nt, Homo sapiens
  misc_RNA (1)...(19): siRNA sense strand
gaagaccaccaagcaugga

SEQ ID NO: 2172168 - RNA, 19 nt, Homo sapiens
  misc_RNA (1)...(19): siRNA sense strand
gcuuccggcuaaccagauu

SEQ ID NO: 2172169 - RNA, 19 nt, Homo sapiens
  misc_RNA (1)...(19): siRNA sense strand
ugguucaaacuacagauua

SEQ ID NO: 2172170 - RNA, 19 nt, Homo sapiens
  misc_RNA (1)...(19): siRNA sense strand
uacagaaccacuuccaaga

SEQ ID NO: 2172171 - RNA, 19 nt, Homo sapiens
  misc_RNA (1)...(19): siRNA sense strand
uggauauuccuaagaaaug

SEQ ID NO: 2172172 - RNA, 19 nt, Homo sapiens
  misc_RNA (1)...(19): siRNA sense strand
auaaagugaugccucugau

SEQ ID NO: 2172173 - RNA, 19 nt, Homo sapiens
  misc_RNA (1)...(19): siRNA sense strand
ggugcuauugcgacuuuaa

SEQ ID NO: 2172174 - RNA, 19 nt, Homo sapiens
  misc_RNA (1)...(19): siRNA sense strand
gaggaggugaugaugaaca

SEQ ID NO: 2172175 - RNA, 19 nt, Homo sapiens
  misc_RNA (1)...(19): siRNA sense strand
gccagacaaugcaguacca

SEQ ID NO: 2172176 - RNA, 19 nt, Homo sapiens
  misc_RNA (1)...(19): siRNA sense strand
ggauuguccugggaagagu

SEQ ID NO: 2172177 - RNA, 19 nt, Homo sapiens
  misc_RNA (1)...(19): siRNA sense strand
caucaguggcuggauauuc

SEQ ID NO: 2172178 - RNA, 19 nt, Homo sapiens
  misc_RNA (1)...(19): siRNA sense strand
cccaagauguccugcaaaa

SEQ ID NO: 2172179 - RNA, 19 nt, Homo sapiens
  misc_RNA (1)...(19): siRNA sense strand
gcccagugaauuuaucaug

SEQ ID NO: 2172180 - RNA, 19 nt, Homo sapiens
  misc_RNA (1)...(19): siRNA sense strand
gaccaacagggaaauggau

SEQ ID NO: 2172181 - RNA, 19 nt, Homo sapiens
  misc_RNA (1)...(19): siRNA sense strand
gcauggauuauugggauug

SEQ ID NO: 2172182 - RNA, 19 nt, Homo sapiens
  misc_RNA (1)...(19): siRNA sense strand
gcuauugcgacuuuaacga

SEQ ID NO: 2172183 - RNA, 19 nt, Homo sapiens
  misc_RNA (1)...(19): siRNA sense strand
auacuugcauuccuuugag

SEQ ID NO: 2172184 - RNA, 19 nt, Homo sapiens
  misc_RNA (1)...(19): siRNA sense strand
gcuacaaagugccccaaga

SEQ ID NO: 2172185 - RNA, 19 nt, Homo sapiens
  misc_RNA (1)...(19): siRNA sense strand
acauuuacccaauuguaga

SEQ ID NO: 2172186 - RNA, 19 nt, Homo sapiens
  misc_RNA (1)...(19): siRNA sense strand
gaugugcugguguugacaa

SEQ ID NO: 2172187 - RNA, 19 nt, Homo sapiens
  misc_RNA (1)...(19): siRNA sense strand
cgacuuuaacgaugaugau

SEQ ID NO: 2172188 - RNA, 19 nt, Homo sapiens
  misc_RNA (1)...(19): siRNA sense strand
cgacacagcuuuccaaaua

SEQ ID NO: 2172189 - RNA, 19 nt, Homo sapiens
  misc_RNA (1)...(19): siRNA sense strand
gaacacagcggguggauga

SEQ ID NO: 2172190 - RNA, 19 nt, Homo sapiens
  misc_RNA (1)...(19): siRNA sense strand
gcaaggcgguucucuggaa

SEQ ID NO: 2172191 - RNA, 19 nt, Homo sapiens
  misc_RNA (1)...(19): siRNA sense strand
gaaauaaagcugccauuca

SEQ ID NO: 2172192 - RNA, 19 nt, Homo sapiens
  misc_RNA (1)...(19): siRNA sense strand
cugaauguguuucuucuua

SEQ ID NO: 2172193 - RNA, 19 nt, Homo sapiens
  misc_RNA (1)...(19): siRNA sense strand
gguaacugcugggcauuua

SEQ ID NO: 2172194 - RNA, 19 nt, Homo sapiens
  misc_RNA (1)...(19): siRNA sense strand
gcacaaacaaaucagcuuu

SEQ ID NO: 2172195 - RNA, 19 nt, Homo sapiens
  misc_RNA (1)...(19): siRNA sense strand
gagggagacugacuuuaug

SEQ ID NO: 2172196 - RNA, 19 nt, Homo sapiens
  misc_RNA (1)...(19): siRNA sense strand
gaucuuaaagguggaaaua

SEQ ID NO: 2172197 - RNA, 19 nt, Homo sapiens
  misc_RNA (1)...(19): siRNA sense strand
gguaccaguuuguuacuuu

SEQ ID NO: 2172198 - RNA, 19 nt, Homo sapiens
  misc_RNA (1)...(19): siRNA sense strand
gaacacgggcuacacguau

SEQ ID NO: 2172199 - RNA, 19 nt, Homo sapiens
  misc_RNA (1)...(19): siRNA sense strand
uccgagagcugaccacuuu

SEQ ID NO: 2172200 - RNA, 19 nt, Homo sapiens
  misc_RNA (1)...(19): siRNA sense strand
gaagcuguauucccaagau

SEQ ID NO: 2172201 - RNA, 19 nt, Homo sapiens
  misc_RNA (1)...(19): siRNA sense strand
ggacuucgccgucuaugga

SEQ ID NO: 2172202 - RNA, 19 nt, Homo sapiens
  misc_RNA (1)...(19): siRNA sense strand
ggacuuugcucuggaaucu

SEQ ID NO: 2172203 - RNA, 19 nt, Homo sapiens
  misc_RNA (1)...(19): siRNA sense strand
gugaggcucuccaugauga

SEQ ID NO: 2172204 - RNA, 19 nt, Homo sapiens
  misc_RNA (1)...(19): siRNA sense strand
gcacaaauuggacccugua

SEQ ID NO: 2172205 - RNA, 19 nt, Homo sapiens
  misc_RNA (1)...(19): siRNA sense strand
uggcgaaccugucaaguga

SEQ ID NO: 2172206 - RNA, 19 nt, Homo sapiens
  misc_RNA (1)...(19): siRNA sense strand
gacaguggaugccguacaa

SEQ ID NO: 2172207 - RNA, 19 nt, Homo sapiens
  misc_RNA (1)...(19): siRNA sense strand
uggaagauauucugggaaa

SEQ ID NO: 2172208 - RNA, 19 nt, Homo sapiens
  misc_RNA (1)...(19): siRNA sense strand
aaacggcgcugaugagucu

SEQ ID NO: 2172209 - RNA, 19 nt, Homo sapiens
  misc_RNA (1)...(19): siRNA sense strand
gaaccgagcggccagaaca

SEQ ID NO: 2172210 - RNA, 19 nt, Homo sapiens
  misc_RNA (1)...(19): siRNA sense strand
aaauaaagcugccauucag

SEQ ID NO: 2172211 - RNA, 19 nt, Homo sapiens
  misc_RNA (1)...(19): siRNA sense strand
acuagcaggucucuccuua

SEQ ID NO: 2172212 - RNA, 19 nt, Homo sapiens
  misc_RNA (1)...(19): siRNA sense strand
gagguucucaucacaguuu

SEQ ID NO: 2172213 - RNA, 19 nt, Homo sapiens
  misc_RNA (1)...(19): siRNA sense strand
ucagagaaauggugaaacu

SEQ ID NO: 2172214 - RNA, 19 nt, Homo sapiens
  misc_RNA (1)...(19): siRNA sense strand
ggaaauaaagcugccauuc

SEQ ID NO: 2172215 - RNA, 19 nt, Homo sapiens
  misc_RNA (1)...(19): siRNA sense strand
ggaugguaccaguuuguua

SEQ ID NO: 2172216 - RNA, 19 nt, Homo sapiens
  misc_RNA (1)...(19): siRNA sense strand
cgagggagacugacuuuau

SEQ ID NO: 2172217 - RNA, 19 nt, Homo sapiens
  misc_RNA (1)...(19): siRNA sense strand
gcgcucaguuccagcuauu

SEQ ID NO: 2172218 - RNA, 19 nt, Homo sapiens
  misc_RNA (1)...(19): siRNA sense strand
caaaucagcuuuuaguauc

SEQ ID NO: 2172219 - RNA, 19 nt, Homo sapiens
  misc_RNA (1)...(19): siRNA sense strand
gcgcagaagcacaaacaaa

SEQ ID NO: 2172220 - RNA, 19 nt, Homo sapiens
  misc_RNA (1)...(19): siRNA sense strand
ucauccagccugacauuua

SEQ ID NO: 2172221 - RNA, 19 nt, Homo sapiens
  misc_RNA (1)...(19): siRNA sense strand
gaaaagacccgacgacaca

SEQ ID NO: 2172222 - RNA, 19 nt, Homo sapiens
  misc_RNA (1)...(19): siRNA sense strand
ccaaggacuucgccgucua

SEQ ID NO: 2172223 - RNA, 19 nt, Homo sapiens
  misc_RNA (1)...(19): siRNA sense strand
guaccaguuuguuacuuug

SEQ ID NO: 2172224 - RNA, 19 nt, Homo sapiens
  misc_RNA (1)...(19): siRNA sense strand
aaacagcgcagaagcacaa

SEQ ID NO: 2172225 - RNA, 19 nt, Homo sapiens
  misc_RNA (1)...(19): siRNA sense strand
ugggacaguucacguauga

SEQ ID NO: 2172226 - RNA, 19 nt, Homo sapiens
  misc_RNA (1)...(19): siRNA sense strand
aguacucgcuguucugaaa

SEQ ID NO: 2172227 - RNA, 19 nt, Homo sapiens
  misc_RNA (1)...(19): siRNA sense strand
gguggcagcaucuugagua

SEQ ID NO: 2172228 - RNA, 19 nt, Homo sapiens
  misc_RNA (1)...(19): siRNA sense strand
gaagaccggcugugagaca

SEQ ID NO: 2172229 - RNA, 19 nt, Homo sapiens
  misc_RNA (1)...(19): siRNA sense strand
uggaucagcuaaagucaga

SEQ ID NO: 2172230 - RNA, 19 nt, Homo sapiens
  misc_RNA (1)...(19): siRNA sense strand
gcagaagcacaaacaaauc

SEQ ID NO: 2172231 - RNA, 19 nt, Homo sapiens
  misc_RNA (1)...(19): siRNA sense strand
ugaugauggugaucuuaaa

SEQ ID NO: 2172232 - RNA, 19 nt, Homo sapiens
  misc_RNA (1)...(19): siRNA sense strand
ggacaguucacguaugauc

SEQ ID NO: 2172233 - RNA, 19 nt, Homo sapiens
  misc_RNA (1)...(19): siRNA sense strand
uuucucggcuucacaugua

SEQ ID NO: 2172234 - RNA, 19 nt, Homo sapiens
  misc_RNA (1)...(19): siRNA sense strand
gcagguggccucucugucu

SEQ ID NO: 2172235 - RNA, 19 nt, Homo sapiens
  misc_RNA (1)...(19): siRNA sense strand
gauuggaugguaccaguuu

SEQ ID NO: 2172236 - RNA, 19 nt, Homo sapiens
  misc_RNA (1)...(19): siRNA sense strand
uaacugcugggcauuuaaa

SEQ ID NO: 2172237 - RNA, 19 nt, Homo sapiens
  misc_RNA (1)...(19): siRNA sense strand
gaugaugauggugaucuua

SEQ ID NO: 2172238 - RNA, 19 nt, Homo sapiens
  misc_RNA (1)...(19): siRNA sense strand
ggacgugcaagucagagaa

SEQ ID NO: 2172239 - RNA, 19 nt, Homo sapiens
  misc_RNA (1)...(19): siRNA sense strand
gggcaagcaugcauagaac

SEQ ID NO: 2172240 - RNA, 19 nt, Homo sapiens
  misc_RNA (1)...(19): siRNA sense strand
gaacugggcaagcaugcau

SEQ ID NO: 2172241 - RNA, 19 nt, Homo sapiens
  misc_RNA (1)...(19): siRNA sense strand
ccaguuuguuacuuugauu

SEQ ID NO: 2172242 - RNA, 19 nt, Homo sapiens
  misc_RNA (1)...(19): siRNA sense strand
agacggagcacaaauugga

SEQ ID NO: 2172243 - RNA, 19 nt, Homo sapiens
  misc_RNA (1)...(19): siRNA sense strand
gugaagaccggcugugaga

SEQ ID NO: 2172244 - RNA, 19 nt, Homo sapiens
  misc_RNA (1)...(19): siRNA sense strand
ugucacacuuggaagauau

SEQ ID NO: 2172245 - RNA, 19 nt, Homo sapiens
  misc_RNA (1)...(19): siRNA sense strand
uuucuuggcugaauguguu

SEQ ID NO: 2172246 - RNA, 19 nt, Homo sapiens
  misc_RNA (1)...(19): siRNA sense strand
ucgacggccuccuguauug

SEQ ID NO: 2172247 - RNA, 19 nt, Homo sapiens
  misc_RNA (1)...(19): siRNA sense strand
gcagcgcugucucccugaa

SEQ ID NO: 2172248 - RNA, 19 nt, Homo sapiens
  misc_RNA (1)...(19): siRNA sense strand
gacacagcuuuccaaauag

SEQ ID NO: 2172249 - RNA, 19 nt, Homo sapiens
  misc_RNA (1)...(19): siRNA sense strand
cagaagcacaaacaaauca

SEQ ID NO: 2172250 - RNA, 19 nt, Homo sapiens
  misc_RNA (1)...(19): siRNA sense strand
gguuugaaguggugaacau

SEQ ID NO: 2172251 - RNA, 19 nt, Homo sapiens
  misc_RNA (1)...(19): siRNA sense strand
acacagcuuuccaaauagu

SEQ ID NO: 2172252 - RNA, 19 nt, Homo sapiens
  misc_RNA (1)...(19): siRNA sense strand
ggcagcaucuugaguacuc

SEQ ID NO: 2172253 - RNA, 19 nt, Homo sapiens
  misc_RNA (1)...(19): siRNA sense strand
gaaguggugaacauggauu

SEQ ID NO: 2172254 - RNA, 19 nt, Homo sapiens
  misc_RNA (1)...(19): siRNA sense strand
guggugaggcucuccauga

SEQ ID NO: 2172255 - RNA, 19 nt, Homo sapiens
  misc_RNA (1)...(19): siRNA sense strand
cauccagccugacauuuac

SEQ ID NO: 2172256 - RNA, 19 nt, Homo sapiens
  misc_RNA (1)...(19): siRNA sense strand
ggcagccucuggaguguuc

SEQ ID NO: 2172257 - RNA, 19 nt, Homo sapiens
  misc_RNA (1)...(19): siRNA sense strand
aaaugaguaucaggaagaa

SEQ ID NO: 2172258 - RNA, 19 nt, Homo sapiens
  misc_RNA (1)...(19): siRNA sense strand
ggugugugcauuaugguuu

SEQ ID NO: 2172259 - RNA, 19 nt, Homo sapiens
  misc_RNA (1)...(19): siRNA sense strand
aagcuguauucccaagaua

SEQ ID NO: 2172260 - RNA, 19 nt, Homo sapiens
  misc_RNA (1)...(19): siRNA sense strand
cagagguucucaucacagu

SEQ ID NO: 2172261 - RNA, 19 nt, Homo sapiens
  misc_RNA (1)...(19): siRNA sense strand
ccacuuugcuacagaagcu

SEQ ID NO: 2172262 - RNA, 19 nt, Homo sapiens
  misc_RNA (1)...(19): siRNA sense strand
aagcugccauucagggaaa

SEQ ID NO: 2172263 - RNA, 19 nt, Homo sapiens
  misc_RNA (1)...(19): siRNA sense strand
gguggacuuugcucuggaa

SEQ ID NO: 2172264 - RNA, 19 nt, Homo sapiens
  misc_RNA (1)...(19): siRNA sense strand
ugagacggagcacaaauug

SEQ ID NO: 2172265 - RNA, 19 nt, Homo sapiens
  misc_RNA (1)...(19): siRNA sense strand
ugaccacuuugcuacagaa

SEQ ID NO: 2172266 - RNA, 19 nt, Homo sapiens
  misc_RNA (1)...(19): siRNA sense strand
gcucaucccacucuuccuu

SEQ ID NO: 2172267 - RNA, 19 nt, Homo sapiens
  misc_RNA (1)...(19): siRNA sense strand
ugucgagaguuuauucuag

SEQ ID NO: 2172268 - RNA, 19 nt, Homo sapiens
  misc_RNA (1)...(19): siRNA sense strand
gggccagggcaauuucuuu

SEQ ID NO: 2172269 - RNA, 19 nt, Homo sapiens
  misc_RNA (1)...(19): siRNA sense strand
guucacguaugaucaggau

SEQ ID NO: 2172270 - RNA, 19 nt, Homo sapiens
  misc_RNA (1)...(19): siRNA sense strand
guggaugccguacaagaaa

SEQ ID NO: 2172271 - RNA, 19 nt, Homo sapiens
  misc_RNA (1)...(19): siRNA sense strand
ucaccaagaacaugaagug

SEQ ID NO: 2172272 - RNA, 19 nt, Homo sapiens
  misc_RNA (1)...(19): siRNA sense strand
gccgucagcuucggucaga

SEQ ID NO: 2172273 - RNA, 19 nt, Homo sapiens
  misc_RNA (1)...(19): siRNA sense strand
gaugguaccaguuuguuac

SEQ ID NO: 2172274 - RNA, 19 nt, Homo sapiens
  misc_RNA (1)...(19): siRNA sense strand
cagggugugugcauuaugg

SEQ ID NO: 2172275 - RNA, 19 nt, Homo sapiens
  misc_RNA (1)...(19): siRNA sense strand
ggaucccgcugugguacuu

SEQ ID NO: 2172276 - RNA, 19 nt, Homo sapiens
  misc_RNA (1)...(19): siRNA sense strand
gcgcugaugagucuguuug

SEQ ID NO: 2172277 - RNA, 19 nt, Homo sapiens
  misc_RNA (1)...(19): siRNA sense strand
ggugguggcagcaucuuga

SEQ ID NO: 2172278 - RNA, 19 nt, Homo sapiens
  misc_RNA (1)...(19): siRNA sense strand
ccaggugccuucgaaacau

SEQ ID NO: 2172279 - RNA, 19 nt, Homo sapiens
  misc_RNA (1)...(19): siRNA sense strand
acacguaugcgcucaguuc

SEQ ID NO: 2172280 - RNA, 19 nt, Homo sapiens
  misc_RNA (1)...(19): siRNA sense strand
agucagggugugugcauua

SEQ ID NO: 2172281 - RNA, 19 nt, Homo sapiens
  misc_RNA (1)...(19): siRNA sense strand
cgacgacacagcuuuccaa

SEQ ID NO: 2172282 - RNA, 19 nt, Homo sapiens
  misc_RNA (1)...(19): siRNA sense strand
guaacugcugggcauuuaa

SEQ ID NO: 2172283 - RNA, 19 nt, Homo sapiens
  misc_RNA (1)...(19): siRNA sense strand
aauuggacccuguauuuga

SEQ ID NO: 2172284 - RNA, 19 nt, Homo sapiens
  misc_RNA (1)...(19): siRNA sense strand
ugaauguguuucuucuuac

SEQ ID NO: 2172285 - RNA, 19 nt, Homo sapiens
  misc_RNA (1)...(19): siRNA sense strand
agaccgggaugguggacuu

SEQ ID NO: 2172286 - RNA, 19 nt, Homo sapiens
  misc_RNA (1)...(19): siRNA sense strand
guaugucacacuuggaaga

SEQ ID NO: 2172287 - RNA, 19 nt, Homo sapiens
  misc_RNA (1)...(19): siRNA sense strand
uagcaggucucuccuuacg

SEQ ID NO: 2172288 - RNA, 19 nt, Homo sapiens
  misc_RNA (1)...(19): siRNA sense strand
cgacacagcuuuccaaaua

SEQ ID NO: 2172289 - RNA, 19 nt, Homo sapiens
  misc_RNA (1)...(19): siRNA sense strand
gaacacagcggguggauga

SEQ ID NO: 2172290 - RNA, 19 nt, Homo sapiens
  misc_RNA (1)...(19): siRNA sense strand
gcaaggcgguucucuggaa

SEQ ID NO: 2172291 - RNA, 19 nt, Homo sapiens
  misc_RNA (1)...(19): siRNA sense strand
gaaauaaagcugccauuca

SEQ ID NO: 2172292 - RNA, 19 nt, Homo sapiens
  misc_RNA (1)...(19): siRNA sense strand
cugaauguguuucuucuua

SEQ ID NO: 2172293 - RNA, 19 nt, Homo sapiens
  misc_RNA (1)...(19): siRNA sense strand
gguaacugcugggcauuua

SEQ ID NO: 2172294 - RNA, 19 nt, Homo sapiens
  misc_RNA (1)...(19): siRNA sense strand
gcacaaacaaaucagcuuu

SEQ ID NO: 2172295 - RNA, 19 nt, Homo sapiens
  misc_RNA (1)...(19): siRNA sense strand
gagggagacugacuuuaug

SEQ ID NO: 2172296 - RNA, 19 nt, Homo sapiens
  misc_RNA (1)...(19): siRNA sense strand
gaucuuaaagguggaaaua

SEQ ID NO: 2172297 - RNA, 19 nt, Homo sapiens
  misc_RNA (1)...(19): siRNA sense strand
gguaccaguuuguuacuuu

SEQ ID NO: 2172298 - RNA, 19 nt, Homo sapiens
  misc_RNA (1)...(19): siRNA sense strand
gaacacgggcuacacguau

SEQ ID NO: 2172299 - RNA, 19 nt, Homo sapiens
  misc_RNA (1)...(19): siRNA sense strand
uccgagagcugaccacuuu

SEQ ID NO: 2172300 - RNA, 19 nt, Homo sapiens
  misc_RNA (1)...(19): siRNA sense strand
gaagcuguauucccaagau

SEQ ID NO: 2172301 - RNA, 19 nt, Homo sapiens
  misc_RNA (1)...(19): siRNA sense strand
ggacuucgccgucuaugga

SEQ ID NO: 2172302 - RNA, 19 nt, Homo sapiens
  misc_RNA (1)...(19): siRNA sense strand
ggacuuugcucuggaaucu

SEQ ID NO: 2172303 - RNA, 19 nt, Homo sapiens
  misc_RNA (1)...(19): siRNA sense strand
gugaggcucuccaugauga

SEQ ID NO: 2172304 - RNA, 19 nt, Homo sapiens
  misc_RNA (1)...(19): siRNA sense strand
gcacaaauuggacccugua

SEQ ID NO: 2172305 - RNA, 19 nt, Homo sapiens
  misc_RNA (1)...(19): siRNA sense strand
uggcgaaccugucaaguga

SEQ ID NO: 2172306 - RNA, 19 nt, Homo sapiens
  misc_RNA (1)...(19): siRNA sense strand
gacaguggaugccguacaa

SEQ ID NO: 2172307 - RNA, 19 nt, Homo sapiens
  misc_RNA (1)...(19): siRNA sense strand
uggaagauauucugggaaa

SEQ ID NO: 2172308 - RNA, 19 nt, Homo sapiens
  misc_RNA (1)...(19): siRNA sense strand
aaacggcgcugaugagucu

SEQ ID NO: 2172309 - RNA, 19 nt, Homo sapiens
  misc_RNA (1)...(19): siRNA sense strand
gaaccgagcggccagaaca

SEQ ID NO: 2172310 - RNA, 19 nt, Homo sapiens
  misc_RNA (1)...(19): siRNA sense strand
aaauaaagcugccauucag

SEQ ID NO: 2172311 - RNA, 19 nt, Homo sapiens
  misc_RNA (1)...(19): siRNA sense strand
acuagcaggucucuccuua

SEQ ID NO: 2172312 - RNA, 19 nt, Homo sapiens
  misc_RNA (1)...(19): siRNA sense strand
gagguucucaucacaguuu

SEQ ID NO: 2172313 - RNA, 19 nt, Homo sapiens
  misc_RNA (1)...(19): siRNA sense strand
ucagagaaauggugaaacu

SEQ ID NO: 2172314 - RNA, 19 nt, Homo sapiens
  misc_RNA (1)...(19): siRNA sense strand
ggaaauaaagcugccauuc

SEQ ID NO: 2172315 - RNA, 19 nt, Homo sapiens
  misc_RNA (1)...(19): siRNA sense strand
ggaugguaccaguuuguua

SEQ ID NO: 2172316 - RNA, 19 nt, Homo sapiens
  misc_RNA (1)...(19): siRNA sense strand
cgagggagacugacuuuau

SEQ ID NO: 2172317 - RNA, 19 nt, Homo sapiens
  misc_RNA (1)...(19): siRNA sense strand
gcgcucaguuccagcuauu

SEQ ID NO: 2172318 - RNA, 19 nt, Homo sapiens
  misc_RNA (1)...(19): siRNA sense strand
caaaucagcuuuuaguauc

SEQ ID NO: 2172319 - RNA, 19 nt, Homo sapiens
  misc_RNA (1)...(19): siRNA sense strand
gcgcagaagcacaaacaaa

SEQ ID NO: 2172320 - RNA, 19 nt, Homo sapiens
  misc_RNA (1)...(19): siRNA sense strand
ucauccagccugacauuua

SEQ ID NO: 2172321 - RNA, 19 nt, Homo sapiens
  misc_RNA (1)...(19): siRNA sense strand
gaaaagacccgacgacaca

SEQ ID NO: 2172322 - RNA, 19 nt, Homo sapiens
  misc_RNA (1)...(19): siRNA sense strand
ccaaggacuucgccgucua

SEQ ID NO: 2172323 - RNA, 19 nt, Homo sapiens
  misc_RNA (1)...(19): siRNA sense strand
guaccaguuuguuacuuug

SEQ ID NO: 2172324 - RNA, 19 nt, Homo sapiens
  misc_RNA (1)...(19): siRNA sense strand
aaacagcgcagaagcacaa

SEQ ID NO: 2172325 - RNA, 19 nt, Homo sapiens
  misc_RNA (1)...(19): siRNA sense strand
ugggacaguucacguauga

SEQ ID NO: 2172326 - RNA, 19 nt, Homo sapiens
  misc_RNA (1)...(19): siRNA sense strand
aguacucgcuguucugaaa

SEQ ID NO: 2172327 - RNA, 19 nt, Homo sapiens
  misc_RNA (1)...(19): siRNA sense strand
gguggcagcaucuugagua

SEQ ID NO: 2172328 - RNA, 19 nt, Homo sapiens
  misc_RNA (1)...(19): siRNA sense strand
gaagaccggcugugagaca

SEQ ID NO: 2172329 - RNA, 19 nt, Homo sapiens
  misc_RNA (1)...(19): siRNA sense strand
uggaucagcuaaagucaga

SEQ ID NO: 2172330 - RNA, 19 nt, Homo sapiens
  misc_RNA (1)...(19): siRNA sense strand
gcagaagcacaaacaaauc

SEQ ID NO: 2172331 - RNA, 19 nt, Homo sapiens
  misc_RNA (1)...(19): siRNA sense strand
ugaugauggugaucuuaaa

SEQ ID NO: 2172332 - RNA, 19 nt, Homo sapiens
  misc_RNA (1)...(19): siRNA sense strand
ggacaguucacguaugauc

SEQ ID NO: 2172333 - RNA, 19 nt, Homo sapiens
  misc_RNA (1)...(19): siRNA sense strand
uuucucggcuucacaugua

SEQ ID NO: 2172334 - RNA, 19 nt, Homo sapiens
  misc_RNA (1)...(19): siRNA sense strand
gcagguggccucucugucu

SEQ ID NO: 2172335 - RNA, 19 nt, Homo sapiens
  misc_RNA (1)...(19): siRNA sense strand
gauuggaugguaccaguuu

SEQ ID NO: 2172336 - RNA, 19 nt, Homo sapiens
  misc_RNA (1)...(19): siRNA sense strand
uaacugcugggcauuuaaa

SEQ ID NO: 2172337 - RNA, 19 nt, Homo sapiens
  misc_RNA (1)...(19): siRNA sense strand
gaugaugauggugaucuua

SEQ ID NO: 2172338 - RNA, 19 nt, Homo sapiens
  misc_RNA (1)...(19): siRNA sense strand
ggacgugcaagucagagaa

SEQ ID NO: 2172339 - RNA, 19 nt, Homo sapiens
  misc_RNA (1)...(19): siRNA sense strand
gggcaagcaugcauagaac

SEQ ID NO: 2172340 - RNA, 19 nt, Homo sapiens
  misc_RNA (1)...(19): siRNA sense strand
gaacugggcaagcaugcau

SEQ ID NO: 2172341 - RNA, 19 nt, Homo sapiens
  misc_RNA (1)...(19): siRNA sense strand
ccaguuuguuacuuugauu

SEQ ID NO: 2172342 - RNA, 19 nt, Homo sapiens
  misc_RNA (1)...(19): siRNA sense strand
agacggagcacaaauugga

SEQ ID NO: 2172343 - RNA, 19 nt, Homo sapiens
  misc_RNA (1)...(19): siRNA sense strand
gugaagaccggcugugaga

SEQ ID NO: 2172344 - RNA, 19 nt, Homo sapiens
  misc_RNA (1)...(19): siRNA sense strand
ugucacacuuggaagauau

SEQ ID NO: 2172345 - RNA, 19 nt, Homo sapiens
  misc_RNA (1)...(19): siRNA sense strand
uuucuuggcugaauguguu

SEQ ID NO: 2172346 - RNA, 19 nt, Homo sapiens
  misc_RNA (1)...(19): siRNA sense strand
ucgacggccuccuguauug

SEQ ID NO: 2172347 - RNA, 19 nt, Homo sapiens
  misc_RNA (1)...(19): siRNA sense strand
gcagcgcugucucccugaa

SEQ ID NO: 2172348 - RNA, 19 nt, Homo sapiens
  misc_RNA (1)...(19): siRNA sense strand
gacacagcuuuccaaauag

SEQ ID NO: 2172349 - RNA, 19 nt, Homo sapiens
  misc_RNA (1)...(19): siRNA sense strand
cagaagcacaaacaaauca

SEQ ID NO: 2172350 - RNA, 19 nt, Homo sapiens
  misc_RNA (1)...(19): siRNA sense strand
gguuugaaguggugaacau

SEQ ID NO: 2172351 - RNA, 19 nt, Homo sapiens
  misc_RNA (1)...(19): siRNA sense strand
acacagcuuuccaaauagu

SEQ ID NO: 2172352 - RNA, 19 nt, Homo sapiens
  misc_RNA (1)...(19): siRNA sense strand
ggcagcaucuugaguacuc

SEQ ID NO: 2172353 - RNA, 19 nt, Homo sapiens
  misc_RNA (1)...(19): siRNA sense strand
gaaguggugaacauggauu

SEQ ID NO: 2172354 - RNA, 19 nt, Homo sapiens
  misc_RNA (1)...(19): siRNA sense strand
guggugaggcucuccauga

SEQ ID NO: 2172355 - RNA, 19 nt, Homo sapiens
  misc_RNA (1)...(19): siRNA sense strand
cauccagccugacauuuac

SEQ ID NO: 2172356 - RNA, 19 nt, Homo sapiens
  misc_RNA (1)...(19): siRNA sense strand
ggcagccucuggaguguuc

SEQ ID NO: 2172357 - RNA, 19 nt, Homo sapiens
  misc_RNA (1)...(19): siRNA sense strand
aaaugaguaucaggaagaa

SEQ ID NO: 2172358 - RNA, 19 nt, Homo sapiens
  misc_RNA (1)...(19): siRNA sense strand
ggugugugcauuaugguuu

SEQ ID NO: 2172359 - RNA, 19 nt, Homo sapiens
  misc_RNA (1)...(19): siRNA sense strand
aagcuguauucccaagaua

SEQ ID NO: 2172360 - RNA, 19 nt, Homo sapiens
  misc_RNA (1)...(19): siRNA sense strand
cagagguucucaucacagu

SEQ ID NO: 2172361 - RNA, 19 nt, Homo sapiens
  misc_RNA (1)...(19): siRNA sense strand
ccacuuugcuacagaagcu

SEQ ID NO: 2172362 - RNA, 19 nt, Homo sapiens
  misc_RNA (1)...(19): siRNA sense strand
aagcugccauucagggaaa

SEQ ID NO: 2172363 - RNA, 19 nt, Homo sapiens
  misc_RNA (1)...(19): siRNA sense strand
gguggacuuugcucuggaa

SEQ ID NO: 2172364 - RNA, 19 nt, Homo sapiens
  misc_RNA (1)...(19): siRNA sense strand
ugagacggagcacaaauug

SEQ ID NO: 2172365 - RNA, 19 nt, Homo sapiens
  misc_RNA (1)...(19): siRNA sense strand
ugaccacuuugcuacagaa

SEQ ID NO: 2172366 - RNA, 19 nt, Homo sapiens
  misc_RNA (1)...(19): siRNA sense strand
gcucaucccacucuuccuu

SEQ ID NO: 2172367 - RNA, 19 nt, Homo sapiens
  misc_RNA (1)...(19): siRNA sense strand
ugucgagaguuuauucuag

SEQ ID NO: 2172368 - RNA, 19 nt, Homo sapiens
  misc_RNA (1)...(19): siRNA sense strand
gggccagggcaauuucuuu

SEQ ID NO: 2172369 - RNA, 19 nt, Homo sapiens
  misc_RNA (1)...(19): siRNA sense strand
guucacguaugaucaggau

SEQ ID NO: 2172370 - RNA, 19 nt, Homo sapiens
  misc_RNA (1)...(19): siRNA sense strand
guggaugccguacaagaaa

SEQ ID NO: 2172371 - RNA, 19 nt, Homo sapiens
  misc_RNA (1)...(19): siRNA sense strand
ucaccaagaacaugaagug

SEQ ID NO: 2172372 - RNA, 19 nt, Homo sapiens
  misc_RNA (1)...(19): siRNA sense strand
gccgucagcuucggucaga

SEQ ID NO: 2172373 - RNA, 19 nt, Homo sapiens
  misc_RNA (1)...(19): siRNA sense strand
gaugguaccaguuuguuac

SEQ ID NO: 2172374 - RNA, 19 nt, Homo sapiens
  misc_RNA (1)...(19): siRNA sense strand
cagggugugugcauuaugg

SEQ ID NO: 2172375 - RNA, 19 nt, Homo sapiens
  misc_RNA (1)...(19): siRNA sense strand
ggaucccgcugugguacuu

SEQ ID NO: 2172376 - RNA, 19 nt, Homo sapiens
  misc_RNA (1)...(19): siRNA sense strand
gcgcugaugagucuguuug

SEQ ID NO: 2172377 - RNA, 19 nt, Homo sapiens
  misc_RNA (1)...(19): siRNA sense strand
ggugguggcagcaucuuga

SEQ ID NO: 2172378 - RNA, 19 nt, Homo sapiens
  misc_RNA (1)...(19): siRNA sense strand
ccaggugccuucgaaacau

SEQ ID NO: 2172379 - RNA, 19 nt, Homo sapiens
  misc_RNA (1)...(19): siRNA sense strand
acacguaugcgcucaguuc

SEQ ID NO: 2172380 - RNA, 19 nt, Homo sapiens
  misc_RNA (1)...(19): siRNA sense strand
agucagggugugugcauua

SEQ ID NO: 2172381 - RNA, 19 nt, Homo sapiens
  misc_RNA (1)...(19): siRNA sense strand
cgacgacacagcuuuccaa

SEQ ID NO: 2172382 - RNA, 19 nt, Homo sapiens
  misc_RNA (1)...(19): siRNA sense strand
guaacugcugggcauuuaa

SEQ ID NO: 2172383 - RNA, 19 nt, Homo sapiens
  misc_RNA (1)...(19): siRNA sense strand
aauuggacccuguauuuga

SEQ ID NO: 2172384 - RNA, 19 nt, Homo sapiens
  misc_RNA (1)...(19): siRNA sense strand
ugaauguguuucuucuuac

SEQ ID NO: 2172385 - RNA, 19 nt, Homo sapiens
  misc_RNA (1)...(19): siRNA sense strand
agaccgggaugguggacuu

SEQ ID NO: 2172386 - RNA, 19 nt, Homo sapiens
  misc_RNA (1)...(19): siRNA sense strand
guaugucacacuuggaaga

SEQ ID NO: 2172387 - RNA, 19 nt, Homo sapiens
  misc_RNA (1)...(19): siRNA sense strand
uagcaggucucuccuuacg

SEQ ID NO: 2172388 - RNA, 19 nt, Homo sapiens
  misc_RNA (1)...(19): siRNA sense strand
gaacuggcccgagaucuuu

SEQ ID NO: 2172389 - RNA, 19 nt, Homo sapiens
  misc_RNA (1)...(19): siRNA sense strand
ccacggugcugcuggauga

SEQ ID NO: 2172390 - RNA, 19 nt, Homo sapiens
  misc_RNA (1)...(19): siRNA sense strand
gcgccuaccugaucuacuu

SEQ ID NO: 2172391 - RNA, 19 nt, Homo sapiens
  misc_RNA (1)...(19): siRNA sense strand
caaagggucaggccaauga

SEQ ID NO: 2172392 - RNA, 19 nt, Homo sapiens
  misc_RNA (1)...(19): siRNA sense strand
cgaccuggcuggcauguuc

SEQ ID NO: 2172393 - RNA, 19 nt, Homo sapiens
  misc_RNA (1)...(19): siRNA sense strand
gaucgacgccguucugaau

SEQ ID NO: 2172394 - RNA, 19 nt, Homo sapiens
  misc_RNA (1)...(19): siRNA sense strand
gaucaagcccaacaucuuc

SEQ ID NO: 2172395 - RNA, 19 nt, Homo sapiens
  misc_RNA (1)...(19): siRNA sense strand
ccaagcagaccaucacuga

SEQ ID NO: 2172396 - RNA, 19 nt, Homo sapiens
  misc_RNA (1)...(19): siRNA sense strand
caucuguggugccaauuga

SEQ ID NO: 2172397 - RNA, 19 nt, Homo sapiens
  misc_RNA (1)...(19): siRNA sense strand
ugaagaugcucauggagau

SEQ ID NO: 2172398 - RNA, 19 nt, Homo sapiens
  misc_RNA (1)...(19): siRNA sense strand
ugucugugcuggccuguaa

SEQ ID NO: 2172399 - RNA, 19 nt, Homo sapiens
  misc_RNA (1)...(19): siRNA sense strand
ccacugagggcgucauuga

SEQ ID NO: 2172400 - RNA, 19 nt, Homo sapiens
  misc_RNA (1)...(19): siRNA sense strand
gcacgaugcuguggacgau

SEQ ID NO: 2172401 - RNA, 19 nt, Homo sapiens
  misc_RNA (1)...(19): siRNA sense strand
ucucacaccugaucaagau

SEQ ID NO: 2172402 - RNA, 19 nt, Homo sapiens
  misc_RNA (1)...(19): siRNA sense strand
ucauguaccuggccaagau

SEQ ID NO: 2172403 - RNA, 19 nt, Homo sapiens
  misc_RNA (1)...(19): siRNA sense strand
caacaugcagguccucuau

SEQ ID NO: 2172404 - RNA, 19 nt, Homo sapiens
  misc_RNA (1)...(19): siRNA sense strand
gcaaggagccgcaguaccu

SEQ ID NO: 2172405 - RNA, 19 nt, Homo sapiens
  misc_RNA (1)...(19): siRNA sense strand
gacccgagauccugagcuu

SEQ ID NO: 2172406 - RNA, 19 nt, Homo sapiens
  misc_RNA (1)...(19): siRNA sense strand
cgugugaggugcuggacua

SEQ ID NO: 2172407 - RNA, 19 nt, Homo sapiens
  misc_RNA (1)...(19): siRNA sense strand
ccauuucuccgucgauuaa

SEQ ID NO: 2172408 - RNA, 19 nt, Homo sapiens
  misc_RNA (1)...(19): siRNA sense strand
cuaguggacuggcuggaaa

SEQ ID NO: 2172409 - RNA, 19 nt, Homo sapiens
  misc_RNA (1)...(19): siRNA sense strand
gugaggugcuggacuacuu

SEQ ID NO: 2172410 - RNA, 19 nt, Homo sapiens
  misc_RNA (1)...(19): siRNA sense strand
gcacgguuccgaagacaug

SEQ ID NO: 2172411 - RNA, 19 nt, Homo sapiens
  misc_RNA (1)...(19): siRNA sense strand
ucaaguuggugaucuucaa

SEQ ID NO: 2172412 - RNA, 19 nt, Homo sapiens
  misc_RNA (1)...(19): siRNA sense strand
gaacaucauggacaagagu

SEQ ID NO: 2172413 - RNA, 19 nt, Homo sapiens
  misc_RNA (1)...(19): siRNA sense strand
gcacccaccucaacuucca

SEQ ID NO: 2172414 - RNA, 19 nt, Homo sapiens
  misc_RNA (1)...(19): siRNA sense strand
ugaaggugcuccugcagau

SEQ ID NO: 2172415 - RNA, 19 nt, Homo sapiens
  misc_RNA (1)...(19): siRNA sense strand
ucucuacccucuacuggaa

SEQ ID NO: 2172416 - RNA, 19 nt, Homo sapiens
  misc_RNA (1)...(19): siRNA sense strand
gcugcugacugcauucuuc

SEQ ID NO: 2172417 - RNA, 19 nt, Homo sapiens
  misc_RNA (1)...(19): siRNA sense strand
caucaugucccaccucuuc

SEQ ID NO: 2172418 - RNA, 19 nt, Homo sapiens
  misc_RNA (1)...(19): siRNA sense strand
cagagcagccggagaccua

SEQ ID NO: 2172419 - RNA, 19 nt, Homo sapiens
  misc_RNA (1)...(19): siRNA sense strand
gccaaacgguggaggaucu

SEQ ID NO: 2172420 - RNA, 19 nt, Homo sapiens
  misc_RNA (1)...(19): siRNA sense strand
ugcagaagcuggagaugug

SEQ ID NO: 2172421 - RNA, 19 nt, Homo sapiens
  misc_RNA (1)...(19): siRNA sense strand
guucauccauaaguacauu

SEQ ID NO: 2172422 - RNA, 19 nt, Homo sapiens
  misc_RNA (1)...(19): siRNA sense strand
ccucaccggucucaccaaa

SEQ ID NO: 2172423 - RNA, 19 nt, Homo sapiens
  misc_RNA (1)...(19): siRNA sense strand
ggcaagagccgggaacaga

SEQ ID NO: 2172424 - RNA, 19 nt, Homo sapiens
  misc_RNA (1)...(19): siRNA sense strand
agacauggacgucaucuca

SEQ ID NO: 2172425 - RNA, 19 nt, Homo sapiens
  misc_RNA (1)...(19): siRNA sense strand
cggagagcguggaggagua

SEQ ID NO: 2172426 - RNA, 19 nt, Homo sapiens
  misc_RNA (1)...(19): siRNA sense strand
ggacucauccaccgcuuca

SEQ ID NO: 2172427 - RNA, 19 nt, Homo sapiens
  misc_RNA (1)...(19): siRNA sense strand
gcccugaggauccugcaua

SEQ ID NO: 2172428 - RNA, 19 nt, Homo sapiens
  misc_RNA (1)...(19): siRNA sense strand
uccggaaccugccugagua

SEQ ID NO: 2172429 - RNA, 19 nt, Homo sapiens
  misc_RNA (1)...(19): siRNA sense strand
gcuccgaggugcccauuuu

SEQ ID NO: 2172430 - RNA, 19 nt, Homo sapiens
  misc_RNA (1)...(19): siRNA sense strand
ggacgccuccaucaacuuc

SEQ ID NO: 2172431 - RNA, 19 nt, Homo sapiens
  misc_RNA (1)...(19): siRNA sense strand
gcugaaaucccuccuugca

SEQ ID NO: 2172432 - RNA, 19 nt, Homo sapiens
  misc_RNA (1)...(19): siRNA sense strand
gcauguuccuccagauuuu

SEQ ID NO: 2172433 - RNA, 19 nt, Homo sapiens
  misc_RNA (1)...(19): siRNA sense strand
cagccgaaacccugacuuu

SEQ ID NO: 2172434 - RNA, 19 nt, Homo sapiens
  misc_RNA (1)...(19): siRNA sense strand
ggaagugcuccgcucauuc

SEQ ID NO: 2172435 - RNA, 19 nt, Homo sapiens
  misc_RNA (1)...(19): siRNA sense strand
cgcaguaccuggagaugga

SEQ ID NO: 2172436 - RNA, 19 nt, Homo sapiens
  misc_RNA (1)...(19): siRNA sense strand
ggcccgagaucuuugucaa

SEQ ID NO: 2172437 - RNA, 19 nt, Homo sapiens
  misc_RNA (1)...(19): siRNA sense strand
ggcauguuccuccagauuu

SEQ ID NO: 2172438 - RNA, 19 nt, Homo sapiens
  misc_RNA (1)...(19): siRNA sense strand
cagaggcacccaaaccaaa

SEQ ID NO: 2172439 - RNA, 19 nt, Homo sapiens
  misc_RNA (1)...(19): siRNA sense strand
cggcccagcucaugagugu

SEQ ID NO: 2172440 - RNA, 19 nt, Homo sapiens
  misc_RNA (1)...(19): siRNA sense strand
ccggagaccuacuacaagu

SEQ ID NO: 2172441 - RNA, 19 nt, Homo sapiens
  misc_RNA (1)...(19): siRNA sense strand
uggaagugcuccgcucauu

SEQ ID NO: 2172442 - RNA, 19 nt, Homo sapiens
  misc_RNA (1)...(19): siRNA sense strand
aagcagaccaucacugaga

SEQ ID NO: 2172443 - RNA, 19 nt, Homo sapiens
  misc_RNA (1)...(19): siRNA sense strand
ucaggccaaugaaucgaaa

SEQ ID NO: 2172444 - RNA, 19 nt, Homo sapiens
  misc_RNA (1)...(19): siRNA sense strand
ccaucuggcugccuucauc

SEQ ID NO: 2172445 - RNA, 19 nt, Homo sapiens
  misc_RNA (1)...(19): siRNA sense strand
ucauugcucugggcucaaa

SEQ ID NO: 2172446 - RNA, 19 nt, Homo sapiens
  misc_RNA (1)...(19): siRNA sense strand
ccaagguccuccucaacca

SEQ ID NO: 2172447 - RNA, 19 nt, Homo sapiens
  misc_RNA (1)...(19): siRNA sense strand
ugaggauccugcauaugga

SEQ ID NO: 2172448 - RNA, 19 nt, Homo sapiens
  misc_RNA (1)...(19): siRNA sense strand
ugagugacauagacgagau

SEQ ID NO: 2172449 - RNA, 19 nt, Homo sapiens
  misc_RNA (1)...(19): siRNA sense strand
gcacagaggcacccaaacc

SEQ ID NO: 2172450 - RNA, 19 nt, Homo sapiens
  misc_RNA (1)...(19): siRNA sense strand
guuugucgcuggugcuuuc

SEQ ID NO: 2172451 - RNA, 19 nt, Homo sapiens
  misc_RNA (1)...(19): siRNA sense strand
gggcaccaccaucaaguug

SEQ ID NO: 2172452 - RNA, 19 nt, Homo sapiens
  misc_RNA (1)...(19): siRNA sense strand
ucagcaagcucgccccuaa

SEQ ID NO: 2172453 - RNA, 19 nt, Homo sapiens
  misc_RNA (1)...(19): siRNA sense strand
gggcauguacggccagaug

SEQ ID NO: 2172454 - RNA, 19 nt, Homo sapiens
  misc_RNA (1)...(19): siRNA sense strand
ggucagcgucucccuguuc

SEQ ID NO: 2172455 - RNA, 19 nt, Homo sapiens
  misc_RNA (1)...(19): siRNA sense strand
caacagugaccuggugaug

SEQ ID NO: 2172456 - RNA, 19 nt, Homo sapiens
  misc_RNA (1)...(19): siRNA sense strand
ccaaguuccuggccauggu

SEQ ID NO: 2172457 - RNA, 19 nt, Homo sapiens
  misc_RNA (1)...(19): siRNA sense strand
ugcaguucauccauaagua

SEQ ID NO: 2172458 - RNA, 19 nt, Homo sapiens
  misc_RNA (1)...(19): siRNA sense strand
gggcacagcucaggaugcu

SEQ ID NO: 2172459 - RNA, 19 nt, Homo sapiens
  misc_RNA (1)...(19): siRNA sense strand
ucuccucgcucuuccugaa

SEQ ID NO: 2172460 - RNA, 19 nt, Homo sapiens
  misc_RNA (1)...(19): siRNA sense strand
cggcaucgccugggacaaa

SEQ ID NO: 2172461 - RNA, 19 nt, Homo sapiens
  misc_RNA (1)...(19): siRNA sense strand
cagcacagaggcacccaaa

SEQ ID NO: 2172462 - RNA, 19 nt, Homo sapiens
  misc_RNA (1)...(19): siRNA sense strand
gagagugaccgcaacuucu

SEQ ID NO: 2172463 - RNA, 19 nt, Homo sapiens
  misc_RNA (1)...(19): siRNA sense strand
gaagugcuccgcucauucc

SEQ ID NO: 2172464 - RNA, 19 nt, Homo sapiens
  misc_RNA (1)...(19): siRNA sense strand
caagaucaagcccaacauc

SEQ ID NO: 2172465 - RNA, 19 nt, Homo sapiens
  misc_RNA (1)...(19): siRNA sense strand
gaaguccucccgccaucug

SEQ ID NO: 2172466 - RNA, 19 nt, Homo sapiens
  misc_RNA (1)...(19): siRNA sense strand
ugucccaccucuucucgaa

SEQ ID NO: 2172467 - RNA, 19 nt, Homo sapiens
  misc_RNA (1)...(19): siRNA sense strand
cgugcacccugacggauga

SEQ ID NO: 2172468 - RNA, 19 nt, Homo sapiens
  misc_RNA (1)...(19): siRNA sense strand
acaugcagguccucuauac

SEQ ID NO: 2172469 - RNA, 19 nt, Homo sapiens
  misc_RNA (1)...(19): siRNA sense strand
ccaacaucuucgccacuga

SEQ ID NO: 2172470 - RNA, 19 nt, Homo sapiens
  misc_RNA (1)...(19): siRNA sense strand
ucgacaacgucuccaggaa

SEQ ID NO: 2172471 - RNA, 19 nt, Homo sapiens
  misc_RNA (1)...(19): siRNA sense strand
uuugugcaguucauccaua

SEQ ID NO: 2172472 - RNA, 19 nt, Homo sapiens
  misc_RNA (1)...(19): siRNA sense strand
gugcugagcgcucuguugu

SEQ ID NO: 2172473 - RNA, 19 nt, Homo sapiens
  misc_RNA (1)...(19): siRNA sense strand
gcagcaggcaauccacaug

SEQ ID NO: 2172474 - RNA, 19 nt, Homo sapiens
  misc_RNA (1)...(19): siRNA sense strand
ggugcuggacuacuucuug

SEQ ID NO: 2172475 - RNA, 19 nt, Homo sapiens
  misc_RNA (1)...(19): siRNA sense strand
ccgaagacauggacgucau

SEQ ID NO: 2172476 - RNA, 19 nt, Homo sapiens
  misc_RNA (1)...(19): siRNA sense strand
ucauugaggcucuguguag

SEQ ID NO: 2172477 - RNA, 19 nt, Homo sapiens
  misc_RNA (1)...(19): siRNA sense strand
gcaguucauccauaaguac

SEQ ID NO: 2172478 - RNA, 19 nt, Homo sapiens
  misc_RNA (1)...(19): siRNA sense strand
uccgccugcugcugaauua

SEQ ID NO: 2172479 - RNA, 19 nt, Homo sapiens
  misc_RNA (1)...(19): siRNA sense strand
ugcuacgguuugcagauua

SEQ ID NO: 2172480 - RNA, 19 nt, Homo sapiens
  misc_RNA (1)...(19): siRNA sense strand
ugaccaacaacuacuccua

SEQ ID NO: 2172481 - RNA, 19 nt, Homo sapiens
  misc_RNA (1)...(19): siRNA sense strand
ggucgucgccgcauucaac

SEQ ID NO: 2172482 - RNA, 19 nt, Homo sapiens
  misc_RNA (1)...(19): siRNA sense strand
cgagagugaccgcaacuuc

SEQ ID NO: 2172483 - RNA, 19 nt, Homo sapiens
  misc_RNA (1)...(19): siRNA sense strand
caacuggccacccgagagu

SEQ ID NO: 2172484 - RNA, 19 nt, Homo sapiens
  misc_RNA (1)...(19): siRNA sense strand
agaccaagcacgagaucaa

SEQ ID NO: 2172485 - RNA, 19 nt, Homo sapiens
  misc_RNA (1)...(19): siRNA sense strand
gcccggaacccgaacaaca

SEQ ID NO: 2172486 - RNA, 19 nt, Homo sapiens
  misc_RNA (1)...(19): siRNA sense strand
acagugaccuggugaugcu

SEQ ID NO: 2172487 - RNA, 19 nt, Homo sapiens
  misc_RNA (1)...(19): siRNA sense strand
ugcuggagguucugaguga

SEQ ID NO: 2172488 - RNA, 19 nt, Homo sapiens
  misc_RNA (1)...(19): siRNA sense strand
gaacuggcccgagaucuuu

SEQ ID NO: 2172489 - RNA, 19 nt, Homo sapiens
  misc_RNA (1)...(19): siRNA sense strand
ccacggugcugcuggauga

SEQ ID NO: 2172490 - RNA, 19 nt, Homo sapiens
  misc_RNA (1)...(19): siRNA sense strand
gcgccuaccugaucuacuu

SEQ ID NO: 2172491 - RNA, 19 nt, Homo sapiens
  misc_RNA (1)...(19): siRNA sense strand
caaagggucaggccaauga

SEQ ID NO: 2172492 - RNA, 19 nt, Homo sapiens
  misc_RNA (1)...(19): siRNA sense strand
cgaccuggcuggcauguuc

SEQ ID NO: 2172493 - RNA, 19 nt, Homo sapiens
  misc_RNA (1)...(19): siRNA sense strand
gaucgacgccguucugaau

SEQ ID NO: 2172494 - RNA, 19 nt, Homo sapiens
  misc_RNA (1)...(19): siRNA sense strand
gaucaagcccaacaucuuc

SEQ ID NO: 2172495 - RNA, 19 nt, Homo sapiens
  misc_RNA (1)...(19): siRNA sense strand
ccaagcagaccaucacuga

SEQ ID NO: 2172496 - RNA, 19 nt, Homo sapiens
  misc_RNA (1)...(19): siRNA sense strand
caucuguggugccaauuga

SEQ ID NO: 2172497 - RNA, 19 nt, Homo sapiens
  misc_RNA (1)...(19): siRNA sense strand
ugaagaugcucauggagau

SEQ ID NO: 2172498 - RNA, 19 nt, Homo sapiens
  misc_RNA (1)...(19): siRNA sense strand
ugucugugcuggccuguaa

SEQ ID NO: 2172499 - RNA, 19 nt, Homo sapiens
  misc_RNA (1)...(19): siRNA sense strand
ccacugagggcgucauuga

SEQ ID NO: 2172500 - RNA, 19 nt, Homo sapiens
  misc_RNA (1)...(19): siRNA sense strand
gcacgaugcuguggacgau

SEQ ID NO: 2172501 - RNA, 19 nt, Homo sapiens
  misc_RNA (1)...(19): siRNA sense strand
ucucacaccugaucaagau

SEQ ID NO: 2172502 - RNA, 19 nt, Homo sapiens
  misc_RNA (1)...(19): siRNA sense strand
ucauguaccuggccaagau

SEQ ID NO: 2172503 - RNA, 19 nt, Homo sapiens
  misc_RNA (1)...(19): siRNA sense strand
caacaugcagguccucuau

SEQ ID NO: 2172504 - RNA, 19 nt, Homo sapiens
  misc_RNA (1)...(19): siRNA sense strand
gcaaggagccgcaguaccu

SEQ ID NO: 2172505 - RNA, 19 nt, Homo sapiens
  misc_RNA (1)...(19): siRNA sense strand
gacccgagauccugagcuu

SEQ ID NO: 2172506 - RNA, 19 nt, Homo sapiens
  misc_RNA (1)...(19): siRNA sense strand
cgugugaggugcuggacua

SEQ ID NO: 2172507 - RNA, 19 nt, Homo sapiens
  misc_RNA (1)...(19): siRNA sense strand
ccauuucuccgucgauuaa

SEQ ID NO: 2172508 - RNA, 19 nt, Homo sapiens
  misc_RNA (1)...(19): siRNA sense strand
cuaguggacuggcuggaaa

SEQ ID NO: 2172509 - RNA, 19 nt, Homo sapiens
  misc_RNA (1)...(19): siRNA sense strand
gugaggugcuggacuacuu

SEQ ID NO: 2172510 - RNA, 19 nt, Homo sapiens
  misc_RNA (1)...(19): siRNA sense strand
gcacgguuccgaagacaug

SEQ ID NO: 2172511 - RNA, 19 nt, Homo sapiens
  misc_RNA (1)...(19): siRNA sense strand
ucaaguuggugaucuucaa

SEQ ID NO: 2172512 - RNA, 19 nt, Homo sapiens
  misc_RNA (1)...(19): siRNA sense strand
gaacaucauggacaagagu

SEQ ID NO: 2172513 - RNA, 19 nt, Homo sapiens
  misc_RNA (1)...(19): siRNA sense strand
gcacccaccucaacuucca

SEQ ID NO: 2172514 - RNA, 19 nt, Homo sapiens
  misc_RNA (1)...(19): siRNA sense strand
ugaaggugcuccugcagau

SEQ ID NO: 2172515 - RNA, 19 nt, Homo sapiens
  misc_RNA (1)...(19): siRNA sense strand
ucucuacccucuacuggaa

SEQ ID NO: 2172516 - RNA, 19 nt, Homo sapiens
  misc_RNA (1)...(19): siRNA sense strand
gcugcugacugcauucuuc

SEQ ID NO: 2172517 - RNA, 19 nt, Homo sapiens
  misc_RNA (1)...(19): siRNA sense strand
caucaugucccaccucuuc

SEQ ID NO: 2172518 - RNA, 19 nt, Homo sapiens
  misc_RNA (1)...(19): siRNA sense strand
cagagcagccggagaccua

SEQ ID NO: 2172519 - RNA, 19 nt, Homo sapiens
  misc_RNA (1)...(19): siRNA sense strand
gccaaacgguggaggaucu

SEQ ID NO: 2172520 - RNA, 19 nt, Homo sapiens
  misc_RNA (1)...(19): siRNA sense strand
ugcagaagcuggagaugug

SEQ ID NO: 2172521 - RNA, 19 nt, Homo sapiens
  misc_RNA (1)...(19): siRNA sense strand
guucauccauaaguacauu

SEQ ID NO: 2172522 - RNA, 19 nt, Homo sapiens
  misc_RNA (1)...(19): siRNA sense strand
ccucaccggucucaccaaa

SEQ ID NO: 2172523 - RNA, 19 nt, Homo sapiens
  misc_RNA (1)...(19): siRNA sense strand
ggcaagagccgggaacaga

SEQ ID NO: 2172524 - RNA, 19 nt, Homo sapiens
  misc_RNA (1)...(19): siRNA sense strand
agacauggacgucaucuca

SEQ ID NO: 2172525 - RNA, 19 nt, Homo sapiens
  misc_RNA (1)...(19): siRNA sense strand
cggagagcguggaggagua

SEQ ID NO: 2172526 - RNA, 19 nt, Homo sapiens
  misc_RNA (1)...(19): siRNA sense strand
ggacucauccaccgcuuca

SEQ ID NO: 2172527 - RNA, 19 nt, Homo sapiens
  misc_RNA (1)...(19): siRNA sense strand
gcccugaggauccugcaua

SEQ ID NO: 2172528 - RNA, 19 nt, Homo sapiens
  misc_RNA (1)...(19): siRNA sense strand
uccggaaccugccugagua

SEQ ID NO: 2172529 - RNA, 19 nt, Homo sapiens
  misc_RNA (1)...(19): siRNA sense strand
gcuccgaggugcccauuuu

SEQ ID NO: 2172530 - RNA, 19 nt, Homo sapiens
  misc_RNA (1)...(19): siRNA sense strand
ggacgccuccaucaacuuc

SEQ ID NO: 2172531 - RNA, 19 nt, Homo sapiens
  misc_RNA (1)...(19): siRNA sense strand
gcugaaaucccuccuugca

SEQ ID NO: 2172532 - RNA, 19 nt, Homo sapiens
  misc_RNA (1)...(19): siRNA sense strand
gcauguuccuccagauuuu

SEQ ID NO: 2172533 - RNA, 19 nt, Homo sapiens
  misc_RNA (1)...(19): siRNA sense strand
cagccgaaacccugacuuu

SEQ ID NO: 2172534 - RNA, 19 nt, Homo sapiens
  misc_RNA (1)...(19): siRNA sense strand
ggaagugcuccgcucauuc

SEQ ID NO: 2172535 - RNA, 19 nt, Homo sapiens
  misc_RNA (1)...(19): siRNA sense strand
cgcaguaccuggagaugga

SEQ ID NO: 2172536 - RNA, 19 nt, Homo sapiens
  misc_RNA (1)...(19): siRNA sense strand
ggcccgagaucuuugucaa

SEQ ID NO: 2172537 - RNA, 19 nt, Homo sapiens
  misc_RNA (1)...(19): siRNA sense strand
ggcauguuccuccagauuu

SEQ ID NO: 2172538 - RNA, 19 nt, Homo sapiens
  misc_RNA (1)...(19): siRNA sense strand
cagaggcacccaaaccaaa

SEQ ID NO: 2172539 - RNA, 19 nt, Homo sapiens
  misc_RNA (1)...(19): siRNA sense strand
cggcccagcucaugagugu

SEQ ID NO: 2172540 - RNA, 19 nt, Homo sapiens
  misc_RNA (1)...(19): siRNA sense strand
ccggagaccuacuacaagu

SEQ ID NO: 2172541 - RNA, 19 nt, Homo sapiens
  misc_RNA (1)...(19): siRNA sense strand
uggaagugcuccgcucauu

SEQ ID NO: 2172542 - RNA, 19 nt, Homo sapiens
  misc_RNA (1)...(19): siRNA sense strand
aagcagaccaucacugaga

SEQ ID NO: 2172543 - RNA, 19 nt, Homo sapiens
  misc_RNA (1)...(19): siRNA sense strand
ucaggccaaugaaucgaaa

SEQ ID NO: 2172544 - RNA, 19 nt, Homo sapiens
  misc_RNA (1)...(19): siRNA sense strand
ccaucuggcugccuucauc

SEQ ID NO: 2172545 - RNA, 19 nt, Homo sapiens
  misc_RNA (1)...(19): siRNA sense strand
ucauugcucugggcucaaa

SEQ ID NO: 2172546 - RNA, 19 nt, Homo sapiens
  misc_RNA (1)...(19): siRNA sense strand
ccaagguccuccucaacca

SEQ ID NO: 2172547 - RNA, 19 nt, Homo sapiens
  misc_RNA (1)...(19): siRNA sense strand
ugaggauccugcauaugga

SEQ ID NO: 2172548 - RNA, 19 nt, Homo sapiens
  misc_RNA (1)...(19): siRNA sense strand
ugagugacauagacgagau

SEQ ID NO: 2172549 - RNA, 19 nt, Homo sapiens
  misc_RNA (1)...(19): siRNA sense strand
gcacagaggcacccaaacc

SEQ ID NO: 2172550 - RNA, 19 nt, Homo sapiens
  misc_RNA (1)...(19): siRNA sense strand
guuugucgcuggugcuuuc

SEQ ID NO: 2172551 - RNA, 19 nt, Homo sapiens
  misc_RNA (1)...(19): siRNA sense strand
gggcaccaccaucaaguug

SEQ ID NO: 2172552 - RNA, 19 nt, Homo sapiens
  misc_RNA (1)...(19): siRNA sense strand
ucagcaagcucgccccuaa

SEQ ID NO: 2172553 - RNA, 19 nt, Homo sapiens
  misc_RNA (1)...(19): siRNA sense strand
gggcauguacggccagaug

SEQ ID NO: 2172554 - RNA, 19 nt, Homo sapiens
  misc_RNA (1)...(19): siRNA sense strand
ggucagcgucucccuguuc

SEQ ID NO: 2172555 - RNA, 19 nt, Homo sapiens
  misc_RNA (1)...(19): siRNA sense strand
caacagugaccuggugaug

SEQ ID NO: 2172556 - RNA, 19 nt, Homo sapiens
  misc_RNA (1)...(19): siRNA sense strand
ccaaguuccuggccauggu

SEQ ID NO: 2172557 - RNA, 19 nt, Homo sapiens
  misc_RNA (1)...(19): siRNA sense strand
ugcaguucauccauaagua

SEQ ID NO: 2172558 - RNA, 19 nt, Homo sapiens
  misc_RNA (1)...(19): siRNA sense strand
gggcacagcucaggaugcu

SEQ ID NO: 2172559 - RNA, 19 nt, Homo sapiens
  misc_RNA (1)...(19): siRNA sense strand
ucuccucgcucuuccugaa

SEQ ID NO: 2172560 - RNA, 19 nt, Homo sapiens
  misc_RNA (1)...(19): siRNA sense strand
cggcaucgccugggacaaa

SEQ ID NO: 2172561 - RNA, 19 nt, Homo sapiens
  misc_RNA (1)...(19): siRNA sense strand
cagcacagaggcacccaaa

SEQ ID NO: 2172562 - RNA, 19 nt, Homo sapiens
  misc_RNA (1)...(19): siRNA sense strand
gagagugaccgcaacuucu

SEQ ID NO: 2172563 - RNA, 19 nt, Homo sapiens
  misc_RNA (1)...(19): siRNA sense strand
gaagugcuccgcucauucc

SEQ ID NO: 2172564 - RNA, 19 nt, Homo sapiens
  misc_RNA (1)...(19): siRNA sense strand
caagaucaagcccaacauc

SEQ ID NO: 2172565 - RNA, 19 nt, Homo sapiens
  misc_RNA (1)...(19): siRNA sense strand
gaaguccucccgccaucug

SEQ ID NO: 2172566 - RNA, 19 nt, Homo sapiens
  misc_RNA (1)...(19): siRNA sense strand
ugucccaccucuucucgaa

SEQ ID NO: 2172567 - RNA, 19 nt, Homo sapiens
  misc_RNA (1)...(19): siRNA sense strand
cgugcacccugacggauga

SEQ ID NO: 2172568 - RNA, 19 nt, Homo sapiens
  misc_RNA (1)...(19): siRNA sense strand
acaugcagguccucuauac

SEQ ID NO: 2172569 - RNA, 19 nt, Homo sapiens
  misc_RNA (1)...(19): siRNA sense strand
ccaacaucuucgccacuga

SEQ ID NO: 2172570 - RNA, 19 nt, Homo sapiens
  misc_RNA (1)...(19): siRNA sense strand
ucgacaacgucuccaggaa

SEQ ID NO: 2172571 - RNA, 19 nt, Homo sapiens
  misc_RNA (1)...(19): siRNA sense strand
uuugugcaguucauccaua

SEQ ID NO: 2172572 - RNA, 19 nt, Homo sapiens
  misc_RNA (1)...(19): siRNA sense strand
gugcugagcgcucuguugu

SEQ ID NO: 2172573 - RNA, 19 nt, Homo sapiens
  misc_RNA (1)...(19): siRNA sense strand
gcagcaggcaauccacaug

SEQ ID NO: 2172574 - RNA, 19 nt, Homo sapiens
  misc_RNA (1)...(19): siRNA sense strand
ggugcuggacuacuucuug

SEQ ID NO: 2172575 - RNA, 19 nt, Homo sapiens
  misc_RNA (1)...(19): siRNA sense strand
ccgaagacauggacgucau

SEQ ID NO: 2172576 - RNA, 19 nt, Homo sapiens
  misc_RNA (1)...(19): siRNA sense strand
ucauugaggcucuguguag

SEQ ID NO: 2172577 - RNA, 19 nt, Homo sapiens
  misc_RNA (1)...(19): siRNA sense strand
gcaguucauccauaaguac

SEQ ID NO: 2172578 - RNA, 19 nt, Homo sapiens
  misc_RNA (1)...(19): siRNA sense strand
uccgccugcugcugaauua

SEQ ID NO: 2172579 - RNA, 19 nt, Homo sapiens
  misc_RNA (1)...(19): siRNA sense strand
ugcuacgguuugcagauua

SEQ ID NO: 2172580 - RNA, 19 nt, Homo sapiens
  misc_RNA (1)...(19): siRNA sense strand
ugaccaacaacuacuccua

SEQ ID NO: 2172581 - RNA, 19 nt, Homo sapiens
  misc_RNA (1)...(19): siRNA sense strand
ggucgucgccgcauucaac

SEQ ID NO: 2172582 - RNA, 19 nt, Homo sapiens
  misc_RNA (1)...(19): siRNA sense strand
cgagagugaccgcaacuuc

SEQ ID NO: 2172583 - RNA, 19 nt, Homo sapiens
  misc_RNA (1)...(19): siRNA sense strand
caacuggccacccgagagu

SEQ ID NO: 2172584 - RNA, 19 nt, Homo sapiens
  misc_RNA (1)...(19): siRNA sense strand
agaccaagcacgagaucaa

SEQ ID NO: 2172585 - RNA, 19 nt, Homo sapiens
  misc_RNA (1)...(19): siRNA sense strand
gcccggaacccgaacaaca

SEQ ID NO: 2172586 - RNA, 19 nt, Homo sapiens
  misc_RNA (1)...(19): siRNA sense strand
acagugaccuggugaugcu

SEQ ID NO: 2172587 - RNA, 19 nt, Homo sapiens
  misc_RNA (1)...(19): siRNA sense strand
ugcuggagguucugaguga

SEQ ID NO: 2172588 - RNA, 19 nt, Homo sapiens
  misc_RNA (1)...(19): siRNA sense strand
gcaacguggucaucacaaa

SEQ ID NO: 2172589 - RNA, 19 nt, Homo sapiens
  misc_RNA (1)...(19): siRNA sense strand
gcaagauggccguggagua

SEQ ID NO: 2172590 - RNA, 19 nt, Homo sapiens
  misc_RNA (1)...(19): siRNA sense strand
ggauccggcugccugauga

SEQ ID NO: 2172591 - RNA, 19 nt, Homo sapiens
  misc_RNA (1)...(19): siRNA sense strand
caagauggccguggaguau

SEQ ID NO: 2172592 - RNA, 19 nt, Homo sapiens
  misc_RNA (1)...(19): siRNA sense strand
gagcuacgguauguuugaa

SEQ ID NO: 2172593 - RNA, 19 nt, Homo sapiens
  misc_RNA (1)...(19): siRNA sense strand
ugacguucaucuucacuga

SEQ ID NO: 2172594 - RNA, 19 nt, Homo sapiens
  misc_RNA (1)...(19): siRNA sense strand
gcugagcuacgguauguuu

SEQ ID NO: 2172595 - RNA, 19 nt, Homo sapiens
  misc_RNA (1)...(19): siRNA sense strand
ggaacgccguccacgugaa

SEQ ID NO: 2172596 - RNA, 19 nt, Homo sapiens
  misc_RNA (1)...(19): siRNA sense strand
agauggccguggaguauga

SEQ ID NO: 2172597 - RNA, 19 nt, Homo sapiens
  misc_RNA (1)...(19): siRNA sense strand
ggcgcuggcuucugcauca

SEQ ID NO: 2172598 - RNA, 19 nt, Homo sapiens
  misc_RNA (1)...(19): siRNA sense strand
acgcugagcuacgguaugu

SEQ ID NO: 2172599 - RNA, 19 nt, Homo sapiens
  misc_RNA (1)...(19): siRNA sense strand
gaacgccguccacgugaag

SEQ ID NO: 2172600 - RNA, 19 nt, Homo sapiens
  misc_RNA (1)...(19): siRNA sense strand
ggaucucgcgccacaagga

SEQ ID NO: 2172601 - RNA, 19 nt, Homo sapiens
  misc_RNA (1)...(19): siRNA sense strand
ccuguccacuucugguuug

SEQ ID NO: 2172602 - RNA, 19 nt, Homo sapiens
  misc_RNA (1)...(19): siRNA sense strand
gggcuggcucugaagauga

SEQ ID NO: 2172603 - RNA, 19 nt, Homo sapiens
  misc_RNA (1)...(19): siRNA sense strand
cguggacgaugacaacuac

SEQ ID NO: 2172604 - RNA, 19 nt, Homo sapiens
  misc_RNA (1)...(19): siRNA sense strand
gcuacgguauguuugaaaa

SEQ ID NO: 2172605 - RNA, 19 nt, Homo sapiens
  misc_RNA (1)...(19): siRNA sense strand
ggugcguccuguccacuuc

SEQ ID NO: 2172606 - RNA, 19 nt, Homo sapiens
  misc_RNA (1)...(19): siRNA sense strand
ugagcuacgguauguuuga

SEQ ID NO: 2172607 - RNA, 19 nt, Homo sapiens
  misc_RNA (1)...(19): siRNA sense strand
ccacguggacgaugacaac

SEQ ID NO: 2172608 - RNA, 19 nt, Homo sapiens
  misc_RNA (1)...(19): siRNA sense strand
gccacaaggagaugacguu

SEQ ID NO: 2172609 - RNA, 19 nt, Homo sapiens
  misc_RNA (1)...(19): siRNA sense strand
gggcaacguggucaucaca

SEQ ID NO: 2172610 - RNA, 19 nt, Homo sapiens
  misc_RNA (1)...(19): siRNA sense strand
ccacagagcuggccaaguc

SEQ ID NO: 2172611 - RNA, 19 nt, Homo sapiens
  misc_RNA (1)...(19): siRNA sense strand
ggagggagcuggacaaagg

SEQ ID NO: 2172612 - RNA, 19 nt, Homo sapiens
  misc_RNA (1)...(19): siRNA sense strand
ugaagcagcugcccgguuu

SEQ ID NO: 2172613 - RNA, 19 nt, Homo sapiens
  misc_RNA (1)...(19): siRNA sense strand
cacaggagguccaggaaua

SEQ ID NO: 2172614 - RNA, 19 nt, Homo sapiens
  misc_RNA (1)...(19): siRNA sense strand
ggacaaaggcuguguggau

SEQ ID NO: 2172615 - RNA, 19 nt, Homo sapiens
  misc_RNA (1)...(19): siRNA sense strand
acacacacauccugcagua

SEQ ID NO: 2172616 - RNA, 19 nt, Homo sapiens
  misc_RNA (1)...(19): siRNA sense strand
cuaaggaggugcugaaugg

SEQ ID NO: 2172617 - RNA, 19 nt, Homo sapiens
  misc_RNA (1)...(19): siRNA sense strand
gaucagacaguucccauuc

SEQ ID NO: 2172618 - RNA, 19 nt, Homo sapiens
  misc_RNA (1)...(19): siRNA sense strand
caguacaccuccagcauga

SEQ ID NO: 2172619 - RNA, 19 nt, Homo sapiens
  misc_RNA (1)...(19): siRNA sense strand
ccagcaggcuucacaguuc

SEQ ID NO: 2172620 - RNA, 19 nt, Homo sapiens
  misc_RNA (1)...(19): siRNA sense strand
ccgcacaccuggcagcaaa

SEQ ID NO: 2172621 - RNA, 19 nt, Homo sapiens
  misc_RNA (1)...(19): siRNA sense strand
ucagacaguucccauucuu

SEQ ID NO: 2172622 - RNA, 19 nt, Homo sapiens
  misc_RNA (1)...(19): siRNA sense strand
gaacgcuaauuuccagaac

SEQ ID NO: 2172623 - RNA, 19 nt, Homo sapiens
  misc_RNA (1)...(19): siRNA sense strand
ccaaaaugguggaggagua

SEQ ID NO: 2172624 - RNA, 19 nt, Homo sapiens
  misc_RNA (1)...(19): siRNA sense strand
acaguucacuuacgaugau

SEQ ID NO: 2172625 - RNA, 19 nt, Homo sapiens
  misc_RNA (1)...(19): siRNA sense strand
ucacagcccucauguucag

SEQ ID NO: 2172626 - RNA, 19 nt, Homo sapiens
  misc_RNA (1)...(19): siRNA sense strand
cgucacagcccucauguuc

SEQ ID NO: 2172627 - RNA, 19 nt, Homo sapiens
  misc_RNA (1)...(19): siRNA sense strand
acaaggcacugguggagau

SEQ ID NO: 2172628 - RNA, 19 nt, Homo sapiens
  misc_RNA (1)...(19): siRNA sense strand
cggagcagguggaucucua

SEQ ID NO: 2172629 - RNA, 19 nt, Homo sapiens
  misc_RNA (1)...(19): siRNA sense strand
guacaccuccagcaugaga

SEQ ID NO: 2172630 - RNA, 19 nt, Homo sapiens
  misc_RNA (1)...(19): siRNA sense strand
ccacuaaggaggugcugaa

SEQ ID NO: 2172631 - RNA, 19 nt, Homo sapiens
  misc_RNA (1)...(19): siRNA sense strand
aggcuucacaguucacuua

SEQ ID NO: 2172632 - RNA, 19 nt, Homo sapiens
  misc_RNA (1)...(19): siRNA sense strand
gagaacaccccacucauug

SEQ ID NO: 2172633 - RNA, 19 nt, Homo sapiens
  misc_RNA (1)...(19): siRNA sense strand
cacacauccugcaguacua

SEQ ID NO: 2172634 - RNA, 19 nt, Homo sapiens
  misc_RNA (1)...(19): siRNA sense strand
cagcaggcuucacaguuca

SEQ ID NO: 2172635 - RNA, 19 nt, Homo sapiens
  misc_RNA (1)...(19): siRNA sense strand
ugagccagaacgcuaauuu

SEQ ID NO: 2172636 - RNA, 19 nt, Homo sapiens
  misc_RNA (1)...(19): siRNA sense strand
gaaccgucccugccugcaa

SEQ ID NO: 2172637 - RNA, 19 nt, Homo sapiens
  misc_RNA (1)...(19): siRNA sense strand
gcucugacgugggaugaag

SEQ ID NO: 2172638 - RNA, 19 nt, Homo sapiens
  misc_RNA (1)...(19): siRNA sense strand
caaaggcuguguggauguc

SEQ ID NO: 2172639 - RNA, 19 nt, Homo sapiens
  misc_RNA (1)...(19): siRNA sense strand
gaugcugagugccuguguu

SEQ ID NO: 2172640 - RNA, 19 nt, Homo sapiens
  misc_RNA (1)...(19): siRNA sense strand
cuucacaguucacuuacga

SEQ ID NO: 2172641 - RNA, 19 nt, Homo sapiens
  misc_RNA (1)...(19): siRNA sense strand
caaaagagaggcccugaug

SEQ ID NO: 2172642 - RNA, 19 nt, Homo sapiens
  misc_RNA (1)...(19): siRNA sense strand
gagccagaacgcuaauuuc

SEQ ID NO: 2172643 - RNA, 19 nt, Homo sapiens
  misc_RNA (1)...(19): siRNA sense strand
aaagagaggcccugaugag

SEQ ID NO: 2172644 - RNA, 19 nt, Homo sapiens
  misc_RNA (1)...(19): siRNA sense strand
ggccuggugugucaucauc

SEQ ID NO: 2172645 - RNA, 19 nt, Homo sapiens
  misc_RNA (1)...(19): siRNA sense strand
gcaucgcagugggauucua

SEQ ID NO: 2172646 - RNA, 19 nt, Homo sapiens
  misc_RNA (1)...(19): siRNA sense strand
aaccgucccugccugcaaa

SEQ ID NO: 2172647 - RNA, 19 nt, Homo sapiens
  misc_RNA (1)...(19): siRNA sense strand
agacaguucccauucuuuc

SEQ ID NO: 2172648 - RNA, 19 nt, Homo sapiens
  misc_RNA (1)...(19): siRNA sense strand
ccacaugcccagccuguac

SEQ ID NO: 2172649 - RNA, 19 nt, Homo sapiens
  misc_RNA (1)...(19): siRNA sense strand
ugaccggcuucugcuauga

SEQ ID NO: 2172650 - RNA, 19 nt, Homo sapiens
  misc_RNA (1)...(19): siRNA sense strand
ugguggagaugcaggaugu

SEQ ID NO: 2172651 - RNA, 19 nt, Homo sapiens
  misc_RNA (1)...(19): siRNA sense strand
gugcgucucucaccaucca

SEQ ID NO: 2172652 - RNA, 19 nt, Homo sapiens
  misc_RNA (1)...(19): siRNA sense strand
ucaucuaccuggcccucuu

SEQ ID NO: 2172653 - RNA, 19 nt, Homo sapiens
  misc_RNA (1)...(19): siRNA sense strand
cuacgacugguacagguuu

SEQ ID NO: 2172654 - RNA, 19 nt, Homo sapiens
  misc_RNA (1)...(19): siRNA sense strand
cagacaguucccauucuuu

SEQ ID NO: 2172655 - RNA, 19 nt, Homo sapiens
  misc_RNA (1)...(19): siRNA sense strand
gcucugugccucugagucu

SEQ ID NO: 2172656 - RNA, 19 nt, Homo sapiens
  misc_RNA (1)...(19): siRNA sense strand
gagucagggcagucaauga

SEQ ID NO: 2172657 - RNA, 19 nt, Homo sapiens
  misc_RNA (1)...(19): siRNA sense strand
cugaguacaugagccagaa

SEQ ID NO: 2172658 - RNA, 19 nt, Homo sapiens
  misc_RNA (1)...(19): siRNA sense strand
gcugaccggcuucugcuau

SEQ ID NO: 2172659 - RNA, 19 nt, Homo sapiens
  misc_RNA (1)...(19): siRNA sense strand
gcaucuggacuacgugcaa

SEQ ID NO: 2172660 - RNA, 19 nt, Homo sapiens
  misc_RNA (1)...(19): siRNA sense strand
acaggagguccaggaauaa

SEQ ID NO: 2172661 - RNA, 19 nt, Homo sapiens
  misc_RNA (1)...(19): siRNA sense strand
cagcaugagagccaaauac

SEQ ID NO: 2172662 - RNA, 19 nt, Homo sapiens
  misc_RNA (1)...(19): siRNA sense strand
gcagugcgucucucaccau

SEQ ID NO: 2172663 - RNA, 19 nt, Homo sapiens
  misc_RNA (1)...(19): siRNA sense strand
ccagcaugagagccaaaua

SEQ ID NO: 2172664 - RNA, 19 nt, Homo sapiens
  misc_RNA (1)...(19): siRNA sense strand
ugaauggcacggaggugaa

SEQ ID NO: 2172665 - RNA, 19 nt, Homo sapiens
  misc_RNA (1)...(19): siRNA sense strand
ugaggaagcugcagcaugu

SEQ ID NO: 2172666 - RNA, 19 nt, Homo sapiens
  misc_RNA (1)...(19): siRNA sense strand
ggaagcacaucuaccuaca

SEQ ID NO: 2172667 - RNA, 19 nt, Homo sapiens
  misc_RNA (1)...(19): siRNA sense strand
caugaggccuggagcuuca

SEQ ID NO: 2172668 - RNA, 19 nt, Homo sapiens
  misc_RNA (1)...(19): siRNA sense strand
gccuggagcuucaccuuca

SEQ ID NO: 2172669 - RNA, 19 nt, Homo sapiens
  misc_RNA (1)...(19): siRNA sense strand
gcacagaggccuucuuccu

SEQ ID NO: 2172670 - RNA, 19 nt, Homo sapiens
  misc_RNA (1)...(19): siRNA sense strand
gaagcugagugcccgaaaa

SEQ ID NO: 2172671 - RNA, 19 nt, Homo sapiens
  misc_RNA (1)...(19): siRNA sense strand
ggcauccuguccuucuuga

SEQ ID NO: 2172672 - RNA, 19 nt, Homo sapiens
  misc_RNA (1)...(19): siRNA sense strand
gugcugggccucacacugu

SEQ ID NO: 2172673 - RNA, 19 nt, Homo sapiens
  misc_RNA (1)...(19): siRNA sense strand
ggcuccagcuccacacaga

SEQ ID NO: 2172674 - RNA, 19 nt, Homo sapiens
  misc_RNA (1)...(19): siRNA sense strand
cagaggaagggcugagcua

SEQ ID NO: 2172675 - RNA, 19 nt, Homo sapiens
  misc_RNA (1)...(19): siRNA sense strand
ucaggcucaucgagaggua

SEQ ID NO: 2172676 - RNA, 19 nt, Homo sapiens
  misc_RNA (1)...(19): siRNA sense strand
cagcauguccuggguuuca

SEQ ID NO: 2172677 - RNA, 19 nt, Homo sapiens
  misc_RNA (1)...(19): siRNA sense strand
gggcaugugcugugagagu

SEQ ID NO: 2172678 - RNA, 19 nt, Homo sapiens
  misc_RNA (1)...(19): siRNA sense strand
ggaagcugagugcccgaaa

SEQ ID NO: 2172679 - RNA, 19 nt, Homo sapiens
  misc_RNA (1)...(19): siRNA sense strand
ccgaggacuuccagaccuu

SEQ ID NO: 2172680 - RNA, 19 nt, Homo sapiens
  misc_RNA (1)...(19): siRNA sense strand
ugcagcauguccuggguuu

SEQ ID NO: 2172681 - RNA, 19 nt, Homo sapiens
  misc_RNA (1)...(19): siRNA sense strand
cacacugucugaccuguac

SEQ ID NO: 2172682 - RNA, 19 nt, Homo sapiens
  misc_RNA (1)...(19): siRNA sense strand
cagacggcauccuguccuu

SEQ ID NO: 2172683 - RNA, 19 nt, Homo sapiens
  misc_RNA (1)...(19): siRNA sense strand
gcaugugcugugagaguga

SEQ ID NO: 2172684 - RNA, 19 nt, Homo sapiens
  misc_RNA (1)...(19): siRNA sense strand
ucacacugucugaccugua

SEQ ID NO: 2172685 - RNA, 19 nt, Homo sapiens
  misc_RNA (1)...(19): siRNA sense strand
ugaggaagcugcagcaugu

SEQ ID NO: 2172686 - RNA, 19 nt, Homo sapiens
  misc_RNA (1)...(19): siRNA sense strand
ggaagcacaucuaccuaca

SEQ ID NO: 2172687 - RNA, 19 nt, Homo sapiens
  misc_RNA (1)...(19): siRNA sense strand
caugaggccuggagcuuca

SEQ ID NO: 2172688 - RNA, 19 nt, Homo sapiens
  misc_RNA (1)...(19): siRNA sense strand
gccuggagcuucaccuuca

SEQ ID NO: 2172689 - RNA, 19 nt, Homo sapiens
  misc_RNA (1)...(19): siRNA sense strand
gcacagaggccuucuuccu

SEQ ID NO: 2172690 - RNA, 19 nt, Homo sapiens
  misc_RNA (1)...(19): siRNA sense strand
gaagcugagugcccgaaaa

SEQ ID NO: 2172691 - RNA, 19 nt, Homo sapiens
  misc_RNA (1)...(19): siRNA sense strand
ggcauccuguccuucuuga

SEQ ID NO: 2172692 - RNA, 19 nt, Homo sapiens
  misc_RNA (1)...(19): siRNA sense strand
gugcugggccucacacugu

SEQ ID NO: 2172693 - RNA, 19 nt, Homo sapiens
  misc_RNA (1)...(19): siRNA sense strand
ggcuccagcuccacacaga

SEQ ID NO: 2172694 - RNA, 19 nt, Homo sapiens
  misc_RNA (1)...(19): siRNA sense strand
cagaggaagggcugagcua

SEQ ID NO: 2172695 - RNA, 19 nt, Homo sapiens
  misc_RNA (1)...(19): siRNA sense strand
ucaggcucaucgagaggua

SEQ ID NO: 2172696 - RNA, 19 nt, Homo sapiens
  misc_RNA (1)...(19): siRNA sense strand
cagcauguccuggguuuca

SEQ ID NO: 2172697 - RNA, 19 nt, Homo sapiens
  misc_RNA (1)...(19): siRNA sense strand
gggcaugugcugugagagu

SEQ ID NO: 2172698 - RNA, 19 nt, Homo sapiens
  misc_RNA (1)...(19): siRNA sense strand
ggaagcugagugcccgaaa

SEQ ID NO: 2172699 - RNA, 19 nt, Homo sapiens
  misc_RNA (1)...(19): siRNA sense strand
ccgaggacuuccagaccuu

SEQ ID NO: 2172700 - RNA, 19 nt, Homo sapiens
  misc_RNA (1)...(19): siRNA sense strand
ugcagcauguccuggguuu

SEQ ID NO: 2172701 - RNA, 19 nt, Homo sapiens
  misc_RNA (1)...(19): siRNA sense strand
cacacugucugaccuguac

SEQ ID NO: 2172702 - RNA, 19 nt, Homo sapiens
  misc_RNA (1)...(19): siRNA sense strand
cagacggcauccuguccuu

SEQ ID NO: 2172703 - RNA, 19 nt, Homo sapiens
  misc_RNA (1)...(19): siRNA sense strand
gcaugugcugugagaguga

SEQ ID NO: 2172704 - RNA, 19 nt, Homo sapiens
  misc_RNA (1)...(19): siRNA sense strand
ucacacugucugaccugua

SEQ ID NO: 2172705 - RNA, 19 nt, Homo sapiens
  misc_RNA (1)...(19): siRNA sense strand
gagcauggguccacaguua

SEQ ID NO: 2172706 - RNA, 19 nt, Homo sapiens
  misc_RNA (1)...(19): siRNA sense strand
gacaaaggcuggcagaauu

SEQ ID NO: 2172707 - RNA, 19 nt, Homo sapiens
  misc_RNA (1)...(19): siRNA sense strand
caagagaccugcuggaguu

SEQ ID NO: 2172708 - RNA, 19 nt, Homo sapiens
  misc_RNA (1)...(19): siRNA sense strand
gaauagacccugccucuga

SEQ ID NO: 2172709 - RNA, 19 nt, Homo sapiens
  misc_RNA (1)...(19): siRNA sense strand
gaacaggcauuccggaaac

SEQ ID NO: 2172710 - RNA, 19 nt, Homo sapiens
  misc_RNA (1)...(19): siRNA sense strand
cgaauugagucguuucuau

SEQ ID NO: 2172711 - RNA, 19 nt, Homo sapiens
  misc_RNA (1)...(19): siRNA sense strand
ucacgucgcucuaucacaa

SEQ ID NO: 2172712 - RNA, 19 nt, Homo sapiens
  misc_RNA (1)...(19): siRNA sense strand
acgaggagcugaagaaguu

SEQ ID NO: 2172713 - RNA, 19 nt, Homo sapiens
  misc_RNA (1)...(19): siRNA sense strand
gaggagaaacccaccauug

SEQ ID NO: 2172714 - RNA, 19 nt, Homo sapiens
  misc_RNA (1)...(19): siRNA sense strand
gcacagcccuggagaugcu

SEQ ID NO: 2172715 - RNA, 19 nt, Homo sapiens
  misc_RNA (1)...(19): siRNA sense strand
gaggagccaugugaacaaa

SEQ ID NO: 2172716 - RNA, 19 nt, Homo sapiens
  misc_RNA (1)...(19): siRNA sense strand
gaaccguuacuuuaucaaa

SEQ ID NO: 2172717 - RNA, 19 nt, Homo sapiens
  misc_RNA (1)...(19): siRNA sense strand
ggcacaaccucucuuugaa

SEQ ID NO: 2172718 - RNA, 19 nt, Homo sapiens
  misc_RNA (1)...(19): siRNA sense strand
ggagccaugugaacaaaca

SEQ ID NO: 2172719 - RNA, 19 nt, Homo sapiens
  misc_RNA (1)...(19): siRNA sense strand
gggacaaccuccaccuguu

SEQ ID NO: 2172720 - RNA, 19 nt, Homo sapiens
  misc_RNA (1)...(19): siRNA sense strand
gaauugagucguuucuaug

SEQ ID NO: 2172721 - RNA, 19 nt, Homo sapiens
  misc_RNA (1)...(19): siRNA sense strand
uggagcagaucaacaaguu

SEQ ID NO: 2172722 - RNA, 19 nt, Homo sapiens
  misc_RNA (1)...(19): siRNA sense strand
gaucaacaaguucuucgaa

SEQ ID NO: 2172723 - RNA, 19 nt, Homo sapiens
  misc_RNA (1)...(19): siRNA sense strand
gccgacaaguuaccaguga

SEQ ID NO: 2172724 - RNA, 19 nt, Homo sapiens
  misc_RNA (1)...(19): siRNA sense strand
gugcaggccuucucuaugc

SEQ ID NO: 2172725 - RNA, 19 nt, Homo sapiens
  misc_RNA (1)...(19): siRNA sense strand
ggacaaccuccaccuguuc

SEQ ID NO: 2172726 - RNA, 19 nt, Homo sapiens
  misc_RNA (1)...(19): siRNA sense strand
ggagguggccuucgaguac

SEQ ID NO: 2172727 - RNA, 19 nt, Homo sapiens
  misc_RNA (1)...(19): siRNA sense strand
ggaggagccaugugaacaa

SEQ ID NO: 2172728 - RNA, 19 nt, Homo sapiens
  misc_RNA (1)...(19): siRNA sense strand
caugggaaauaagcucuuu

SEQ ID NO: 2172729 - RNA, 19 nt, Homo sapiens
  misc_RNA (1)...(19): siRNA sense strand
gcacggccaucaagaucca

SEQ ID NO: 2172730 - RNA, 19 nt, Homo sapiens
  misc_RNA (1)...(19): siRNA sense strand
cgacaaaggcuggcagaau

SEQ ID NO: 2172731 - RNA, 19 nt, Homo sapiens
  misc_RNA (1)...(19): siRNA sense strand
ccagugaccuacaaguuac

SEQ ID NO: 2172732 - RNA, 19 nt, Homo sapiens
  misc_RNA (1)...(19): siRNA sense strand
gcugacgggucccugauca

SEQ ID NO: 2172733 - RNA, 19 nt, Homo sapiens
  misc_RNA (1)...(19): siRNA sense strand
aagccaagcucguggaaca

SEQ ID NO: 2172734 - RNA, 19 nt, Homo sapiens
  misc_RNA (1)...(19): siRNA sense strand
cggcacaaccucucuuuga

SEQ ID NO: 2172735 - RNA, 19 nt, Homo sapiens
  misc_RNA (1)...(19): siRNA sense strand
ucuuugaaccguuacuuua

SEQ ID NO: 2172736 - RNA, 19 nt, Homo sapiens
  misc_RNA (1)...(19): siRNA sense strand
ccaacucggccaacggaua

SEQ ID NO: 2172737 - RNA, 19 nt, Homo sapiens
  misc_RNA (1)...(19): siRNA sense strand
gaguaccgguauucccaaa

SEQ ID NO: 2172738 - RNA, 19 nt, Homo sapiens
  misc_RNA (1)...(19): siRNA sense strand
cugcuuugccgacaaguua

SEQ ID NO: 2172739 - RNA, 19 nt, Homo sapiens
  misc_RNA (1)...(19): siRNA sense strand
gguccaaguuagcuucugu

SEQ ID NO: 2172740 - RNA, 19 nt, Homo sapiens
  misc_RNA (1)...(19): siRNA sense strand
gcaccuccacagccucuuu

SEQ ID NO: 2172741 - RNA, 19 nt, Homo sapiens
  misc_RNA (1)...(19): siRNA sense strand
ccucagcacccucagauug

SEQ ID NO: 2172742 - RNA, 19 nt, Homo sapiens
  misc_RNA (1)...(19): siRNA sense strand
aauagacccugccucugaa

SEQ ID NO: 2172743 - RNA, 19 nt, Homo sapiens
  misc_RNA (1)...(19): siRNA sense strand
ugguggagcuggcaagaga

SEQ ID NO: 2172744 - RNA, 19 nt, Homo sapiens
  misc_RNA (1)...(19): siRNA sense strand
ggacuccgaccugcagaaa

SEQ ID NO: 2172745 - RNA, 19 nt, Homo sapiens
  misc_RNA (1)...(19): siRNA sense strand
cacacuggcuucucuugga

SEQ ID NO: 2172746 - RNA, 19 nt, Homo sapiens
  misc_RNA (1)...(19): siRNA sense strand
uuauugcugucaaagauga

SEQ ID NO: 2172747 - RNA, 19 nt, Homo sapiens
  misc_RNA (1)...(19): siRNA sense strand
gcauucuucucagcaguga

SEQ ID NO: 2172748 - RNA, 19 nt, Homo sapiens
  misc_RNA (1)...(19): siRNA sense strand
ccuggaggcucugcuauuc

SEQ ID NO: 2172749 - RNA, 19 nt, Homo sapiens
  misc_RNA (1)...(19): siRNA sense strand
gagcagaucaacaaguucu

SEQ ID NO: 2172750 - RNA, 19 nt, Homo sapiens
  misc_RNA (1)...(19): siRNA sense strand
caugcuggccuuugaauuc

SEQ ID NO: 2172751 - RNA, 19 nt, Homo sapiens
  misc_RNA (1)...(19): siRNA sense strand
acacuggcuucucuuggaa

SEQ ID NO: 2172752 - RNA, 19 nt, Homo sapiens
  misc_RNA (1)...(19): siRNA sense strand
accagugaccuacaaguua

SEQ ID NO: 2172753 - RNA, 19 nt, Homo sapiens
  misc_RNA (1)...(19): siRNA sense strand
ugaccacgcugacgaagcu

SEQ ID NO: 2172754 - RNA, 19 nt, Homo sapiens
  misc_RNA (1)...(19): siRNA sense strand
gaacgugcaggccuucucu

SEQ ID NO: 2172755 - RNA, 19 nt, Homo sapiens
  misc_RNA (1)...(19): siRNA sense strand
ggagaagacaugcguagac

SEQ ID NO: 2172756 - RNA, 19 nt, Homo sapiens
  misc_RNA (1)...(19): siRNA sense strand
gcacaaccucucuuugaac

SEQ ID NO: 2172757 - RNA, 19 nt, Homo sapiens
  misc_RNA (1)...(19): siRNA sense strand
gggagguggccuucgagua

SEQ ID NO: 2172758 - RNA, 19 nt, Homo sapiens
  misc_RNA (1)...(19): siRNA sense strand
ggaucccgguggagcaguu

SEQ ID NO: 2172759 - RNA, 19 nt, Homo sapiens
  misc_RNA (1)...(19): siRNA sense strand
guacugccagcgccucauu

SEQ ID NO: 2172760 - RNA, 19 nt, Homo sapiens
  misc_RNA (1)...(19): siRNA sense strand
ggaggagaaacccaccauu

SEQ ID NO: 2172761 - RNA, 19 nt, Homo sapiens
  misc_RNA (1)...(19): siRNA sense strand
gcauggguccacaguuaga

SEQ ID NO: 2172762 - RNA, 19 nt, Homo sapiens
  misc_RNA (1)...(19): siRNA sense strand
gcccacaucaccaagcauu

SEQ ID NO: 2172763 - RNA, 19 nt, Homo sapiens
  misc_RNA (1)...(19): siRNA sense strand
gcagaucaacaaguucuuc

SEQ ID NO: 2172764 - RNA, 19 nt, Homo sapiens
  misc_RNA (1)...(19): siRNA sense strand
gcuccacucugucggugau

SEQ ID NO: 2172765 - RNA, 19 nt, Homo sapiens
  misc_RNA (1)...(19): siRNA sense strand
cggcaggagcggagaguuu

SEQ ID NO: 2172766 - RNA, 19 nt, Homo sapiens
  misc_RNA (1)...(19): siRNA sense strand
guaccgguauucccaaagc

SEQ ID NO: 2172767 - RNA, 19 nt, Homo sapiens
  misc_RNA (1)...(19): siRNA sense strand
ccucuuuauugcugucaaa

SEQ ID NO: 2172768 - RNA, 19 nt, Homo sapiens
  misc_RNA (1)...(19): siRNA sense strand
caacucggccaacggauac

SEQ ID NO: 2172769 - RNA, 19 nt, Homo sapiens
  misc_RNA (1)...(19): siRNA sense strand
gaacuacacacuggcuucu

SEQ ID NO: 2172770 - RNA, 19 nt, Homo sapiens
  misc_RNA (1)...(19): siRNA sense strand
gcggaggacaguugaaugg

SEQ ID NO: 2172771 - RNA, 19 nt, Homo sapiens
  misc_RNA (1)...(19): siRNA sense strand
ccuuugaauucauccaguu

SEQ ID NO: 2172772 - RNA, 19 nt, Homo sapiens
  misc_RNA (1)...(19): siRNA sense strand
ggcgguagccacagacuuc

SEQ ID NO: 2172773 - RNA, 19 nt, Homo sapiens
  misc_RNA (1)...(19): siRNA sense strand
gguggaacggguaggugua

SEQ ID NO: 2172774 - RNA, 19 nt, Homo sapiens
  misc_RNA (1)...(19): siRNA sense strand
uggaggcucugcuauucga

SEQ ID NO: 2172775 - RNA, 19 nt, Homo sapiens
  misc_RNA (1)...(19): siRNA sense strand
ccaagcccguggccuacau

SEQ ID NO: 2172776 - RNA, 19 nt, Homo sapiens
  misc_RNA (1)...(19): siRNA sense strand
ccacacgacccugaguuug

SEQ ID NO: 2172777 - RNA, 19 nt, Homo sapiens
  misc_RNA (1)...(19): siRNA sense strand
agaauucuauccggcacaa

SEQ ID NO: 2172778 - RNA, 19 nt, Homo sapiens
  misc_RNA (1)...(19): siRNA sense strand
gguggccuccguucucuug

SEQ ID NO: 2172779 - RNA, 19 nt, Homo sapiens
  misc_RNA (1)...(19): siRNA sense strand
gucgcucuaucacaaagaa

SEQ ID NO: 2172780 - RNA, 19 nt, Homo sapiens
  misc_RNA (1)...(19): siRNA sense strand
cugcugacccugcugaaga

SEQ ID NO: 2172781 - RNA, 19 nt, Homo sapiens
  misc_RNA (1)...(19): siRNA sense strand
gcaccucagcacccucaga

SEQ ID NO: 2172782 - RNA, 19 nt, Homo sapiens
  misc_RNA (1)...(19): siRNA sense strand
cagcuccucuacccugcuu

SEQ ID NO: 2172783 - RNA, 19 nt, Homo sapiens
  misc_RNA (1)...(19): siRNA sense strand
guggaaguccguaccuguu

SEQ ID NO: 2172784 - RNA, 19 nt, Homo sapiens
  misc_RNA (1)...(19): siRNA sense strand
uaccagugaccuacaaguu

SEQ ID NO: 2172785 - RNA, 19 nt, Homo sapiens
  misc_RNA (1)...(19): siRNA sense strand
cacagccucuuuccaggau

SEQ ID NO: 2172786 - RNA, 19 nt, Homo sapiens
  misc_RNA (1)...(19): siRNA sense strand
aaauaagcucuuuguggaa

SEQ ID NO: 2172787 - RNA, 19 nt, Homo sapiens
  misc_RNA (1)...(19): siRNA sense strand
gcugcaggcauucuucuca

SEQ ID NO: 2172788 - RNA, 19 nt, Homo sapiens
  misc_RNA (1)...(19): siRNA sense strand
gagcuuccccaaccucuuu

SEQ ID NO: 2172789 - RNA, 19 nt, Homo sapiens
  misc_RNA (1)...(19): siRNA sense strand
ggacucggaagccgucuac

SEQ ID NO: 2172790 - RNA, 19 nt, Homo sapiens
  misc_RNA (1)...(19): siRNA sense strand
gguagccacagacuucuuc

SEQ ID NO: 2172791 - RNA, 19 nt, Homo sapiens
  misc_RNA (1)...(19): siRNA sense strand
ggacgaggagcugaagaag

SEQ ID NO: 2172792 - RNA, 19 nt, Homo sapiens
  misc_RNA (1)...(19): siRNA sense strand
ggcaggagcggagaguuug

SEQ ID NO: 2172793 - RNA, 19 nt, Homo sapiens
  misc_RNA (1)...(19): siRNA sense strand
uugaaccguuacuuuauca

SEQ ID NO: 2172794 - RNA, 19 nt, Homo sapiens
  misc_RNA (1)...(19): siRNA sense strand
uccagggucuuuuccaaua

SEQ ID NO: 2172795 - RNA, 19 nt, Homo sapiens
  misc_RNA (1)...(19): siRNA sense strand
cagcacggccaucaagauc

SEQ ID NO: 2172796 - RNA, 19 nt, Homo sapiens
  misc_RNA (1)...(19): siRNA sense strand
gcacccuggacacagauga

SEQ ID NO: 2172797 - RNA, 19 nt, Homo sapiens
  misc_RNA (1)...(19): siRNA sense strand
cuguugcccuggccacgua

SEQ ID NO: 2172798 - RNA, 19 nt, Homo sapiens
  misc_RNA (1)...(19): siRNA sense strand
ccacaucaccaagcauuac

SEQ ID NO: 2172799 - RNA, 19 nt, Homo sapiens
  misc_RNA (1)...(19): siRNA sense strand
ucuguucccggaucuguaa

SEQ ID NO: 2172800 - RNA, 19 nt, Homo sapiens
  misc_RNA (1)...(19): siRNA sense strand
uuugaaccguuacuuuauc

SEQ ID NO: 2172801 - RNA, 19 nt, Homo sapiens
  misc_RNA (1)...(19): siRNA sense strand
acaaaggcuggcagaauuc

SEQ ID NO: 2172802 - RNA, 19 nt, Homo sapiens
  misc_RNA (1)...(19): siRNA sense strand
gacaaccuccaccuguuca

SEQ ID NO: 2172803 - RNA, 19 nt, Homo sapiens
  misc_RNA (1)...(19): siRNA sense strand
uggcuucucuuggaacaca

SEQ ID NO: 2172804 - RNA, 19 nt, Homo sapiens
  misc_RNA (1)...(19): siRNA sense strand
guggucaccgugcugauga

SEQ ID NO: 2172805 - RNA, 19 nt, Homo sapiens
  misc_RNA (1)...(19): siRNA sense strand
gcagguacuugacuccuua

SEQ ID NO: 2172806 - RNA, 19 nt, Homo sapiens
  misc_RNA (1)...(19): siRNA sense strand
gaagaaagacuuggaguug

SEQ ID NO: 2172807 - RNA, 19 nt, Homo sapiens
  misc_RNA (1)...(19): siRNA sense strand
ucagucagcuaaagauuaa

SEQ ID NO: 2172808 - RNA, 19 nt, Homo sapiens
  misc_RNA (1)...(19): siRNA sense strand
gcaagucucugcugacauc

SEQ ID NO: 2172809 - RNA, 19 nt, Homo sapiens
  misc_RNA (1)...(19): siRNA sense strand
cagagaagguaaacacaaa

SEQ ID NO: 2172810 - RNA, 19 nt, Homo sapiens
  misc_RNA (1)...(19): siRNA sense strand
gggcggagauggaagagaa

SEQ ID NO: 2172811 - RNA, 19 nt, Homo sapiens
  misc_RNA (1)...(19): siRNA sense strand
gggaagagcggccacagua

SEQ ID NO: 2172812 - RNA, 19 nt, Homo sapiens
  misc_RNA (1)...(19): siRNA sense strand
gaaccagacuugggaugaa

SEQ ID NO: 2172813 - RNA, 19 nt, Homo sapiens
  misc_RNA (1)...(19): siRNA sense strand
gcacagaguucgaguacac

SEQ ID NO: 2172814 - RNA, 19 nt, Homo sapiens
  misc_RNA (1)...(19): siRNA sense strand
gaagugagcagcuacucuu

SEQ ID NO: 2172815 - RNA, 19 nt, Homo sapiens
  misc_RNA (1)...(19): siRNA sense strand
ggcaagcucugaccaguuc

SEQ ID NO: 2172816 - RNA, 19 nt, Homo sapiens
  misc_RNA (1)...(19): siRNA sense strand
ugcagagccuuauaaagua

SEQ ID NO: 2172817 - RNA, 19 nt, Homo sapiens
  misc_RNA (1)...(19): siRNA sense strand
gccaagagccgacccaaga

SEQ ID NO: 2172818 - RNA, 19 nt, Homo sapiens
  misc_RNA (1)...(19): siRNA sense strand
aggagaagcugcucagaga

SEQ ID NO: 2172819 - RNA, 19 nt, Homo sapiens
  misc_RNA (1)...(19): siRNA sense strand
gagcggauguaugccauga

SEQ ID NO: 2172820 - RNA, 19 nt, Homo sapiens
  misc_RNA (1)...(19): siRNA sense strand
ggacucagaggaagacgaa

SEQ ID NO: 2172821 - RNA, 19 nt, Homo sapiens
  misc_RNA (1)...(19): siRNA sense strand
ggaaucguuugaccaagau

SEQ ID NO: 2172822 - RNA, 19 nt, Homo sapiens
  misc_RNA (1)...(19): siRNA sense strand
ggaggaaucguuugaccaa

SEQ ID NO: 2172823 - RNA, 19 nt, Homo sapiens
  misc_RNA (1)...(19): siRNA sense strand
agaauguggucgagaagaa

SEQ ID NO: 2172824 - RNA, 19 nt, Homo sapiens
  misc_RNA (1)...(19): siRNA sense strand
gagcugaagcccaacaaga

SEQ ID NO: 2172825 - RNA, 19 nt, Homo sapiens
  misc_RNA (1)...(19): siRNA sense strand
agaaagacuuggaguugga

SEQ ID NO: 2172826 - RNA, 19 nt, Homo sapiens
  misc_RNA (1)...(19): siRNA sense strand
gaagaagaagaaagggaaa

SEQ ID NO: 2172827 - RNA, 19 nt, Homo sapiens
  misc_RNA (1)...(19): siRNA sense strand
gagcagcuacucuuacaau

SEQ ID NO: 2172828 - RNA, 19 nt, Homo sapiens
  misc_RNA (1)...(19): siRNA sense strand
ggucugaggaggaacauga

SEQ ID NO: 2172829 - RNA, 19 nt, Homo sapiens
  misc_RNA (1)...(19): siRNA sense strand
gagaagcugcucagagaga

SEQ ID NO: 2172830 - RNA, 19 nt, Homo sapiens
  misc_RNA (1)...(19): siRNA sense strand
cauccuaccuccaccugaa

SEQ ID NO: 2172831 - RNA, 19 nt, Homo sapiens
  misc_RNA (1)...(19): siRNA sense strand
gagaggaggagccaagaga

SEQ ID NO: 2172832 - RNA, 19 nt, Homo sapiens
  misc_RNA (1)...(19): siRNA sense strand
ucaccaagcaggacaaguu

SEQ ID NO: 2172833 - RNA, 19 nt, Homo sapiens
  misc_RNA (1)...(19): siRNA sense strand
gcccugagcauaaauggaa

SEQ ID NO: 2172834 - RNA, 19 nt, Homo sapiens
  misc_RNA (1)...(19): siRNA sense strand
guagcaugguggcaaagaa

SEQ ID NO: 2172835 - RNA, 19 nt, Homo sapiens
  misc_RNA (1)...(19): siRNA sense strand
ccgagaauguggucgagaa

SEQ ID NO: 2172836 - RNA, 19 nt, Homo sapiens
  misc_RNA (1)...(19): siRNA sense strand
gcagagccuuauaaaguac

SEQ ID NO: 2172837 - RNA, 19 nt, Homo sapiens
  misc_RNA (1)...(19): siRNA sense strand
gagcagaugaggacugugu

SEQ ID NO: 2172838 - RNA, 19 nt, Homo sapiens
  misc_RNA (1)...(19): siRNA sense strand
gagcagggauaagaaagag

SEQ ID NO: 2172839 - RNA, 19 nt, Homo sapiens
  misc_RNA (1)...(19): siRNA sense strand
agaggaagacgaagaauuc

SEQ ID NO: 2172840 - RNA, 19 nt, Homo sapiens
  misc_RNA (1)...(19): siRNA sense strand
gugagcagcuacucuuaca

SEQ ID NO: 2172841 - RNA, 19 nt, Homo sapiens
  misc_RNA (1)...(19): siRNA sense strand
ggaaccagacuugggauga

SEQ ID NO: 2172842 - RNA, 19 nt, Homo sapiens
  misc_RNA (1)...(19): siRNA sense strand
ggagcagggauaagaaaga

SEQ ID NO: 2172843 - RNA, 19 nt, Homo sapiens
  misc_RNA (1)...(19): siRNA sense strand
gaaauccuccagagaaggu

SEQ ID NO: 2172844 - RNA, 19 nt, Homo sapiens
  misc_RNA (1)...(19): siRNA sense strand
gcggauguaugccaugaag

SEQ ID NO: 2172845 - RNA, 19 nt, Homo sapiens
  misc_RNA (1)...(19): siRNA sense strand
ccacagacgaggacucuuc

SEQ ID NO: 2172846 - RNA, 19 nt, Homo sapiens
  misc_RNA (1)...(19): siRNA sense strand
gaaggaggagcggauguau

SEQ ID NO: 2172847 - RNA, 19 nt, Homo sapiens
  misc_RNA (1)...(19): siRNA sense strand
gaauguggucgagaagaaa

SEQ ID NO: 2172848 - RNA, 19 nt, Homo sapiens
  misc_RNA (1)...(19): siRNA sense strand
cagcgacucuucggaggaa

SEQ ID NO: 2172849 - RNA, 19 nt, Homo sapiens
  misc_RNA (1)...(19): siRNA sense strand
cagcuaaagauuaagaaga

SEQ ID NO: 2172850 - RNA, 19 nt, Homo sapiens
  misc_RNA (1)...(19): siRNA sense strand
gauaagaaagagacacaag

SEQ ID NO: 2172851 - RNA, 19 nt, Homo sapiens
  misc_RNA (1)...(19): siRNA sense strand
ggaccgggaucaggagaag

SEQ ID NO: 2172852 - RNA, 19 nt, Homo sapiens
  misc_RNA (1)...(19): siRNA sense strand
aggaaucguuugaccaaga

SEQ ID NO: 2172853 - RNA, 19 nt, Homo sapiens
  misc_RNA (1)...(19): siRNA sense strand
cagaggaagacgaagaauu

SEQ ID NO: 2172854 - RNA, 19 nt, Homo sapiens
  misc_RNA (1)...(19): siRNA sense strand
ccaagcaggacaaguugaa

SEQ ID NO: 2172855 - RNA, 19 nt, Homo sapiens
  misc_RNA (1)...(19): siRNA sense strand
gagcugggagcagggauaa

SEQ ID NO: 2172856 - RNA, 19 nt, Homo sapiens
  misc_RNA (1)...(19): siRNA sense strand
ggauguaugccaugaaguc

SEQ ID NO: 2172857 - RNA, 19 nt, Homo sapiens
  misc_RNA (1)...(19): siRNA sense strand
ccgagagccuugucuugga

SEQ ID NO: 2172858 - RNA, 19 nt, Homo sapiens
  misc_RNA (1)...(19): siRNA sense strand
gaggaggagccaagagaug

SEQ ID NO: 2172859 - RNA, 19 nt, Homo sapiens
  misc_RNA (1)...(19): siRNA sense strand
ccagagaagguaaacacaa

SEQ ID NO: 2172860 - RNA, 19 nt, Homo sapiens
  misc_RNA (1)...(19): siRNA sense strand
gccaugcagagccuuauaa

SEQ ID NO: 2172861 - RNA, 19 nt, Homo sapiens
  misc_RNA (1)...(19): siRNA sense strand
gcaggaagcagccguuuug

SEQ ID NO: 2172862 - RNA, 19 nt, Homo sapiens
  misc_RNA (1)...(19): siRNA sense strand
caauacggacucagaggaa

SEQ ID NO: 2172863 - RNA, 19 nt, Homo sapiens
  misc_RNA (1)...(19): siRNA sense strand
agacuugggaugaacauga

SEQ ID NO: 2172864 - RNA, 19 nt, Homo sapiens
  misc_RNA (1)...(19): siRNA sense strand
augcagagccuuauaaagu

SEQ ID NO: 2172865 - RNA, 19 nt, Homo sapiens
  misc_RNA (1)...(19): siRNA sense strand
cgagagcgccaaagcuuuc

SEQ ID NO: 2172866 - RNA, 19 nt, Homo sapiens
  misc_RNA (1)...(19): siRNA sense strand
cagcuacucuuacaauacg

SEQ ID NO: 2172867 - RNA, 19 nt, Homo sapiens
  misc_RNA (1)...(19): siRNA sense strand
gcagcuacucuuacaauac

SEQ ID NO: 2172868 - RNA, 19 nt, Homo sapiens
  misc_RNA (1)...(19): siRNA sense strand
gcugggagcagggauaaga

SEQ ID NO: 2172869 - RNA, 19 nt, Homo sapiens
  misc_RNA (1)...(19): siRNA sense strand
gagcccaggccuuggagaa

SEQ ID NO: 2172870 - RNA, 19 nt, Homo sapiens
  misc_RNA (1)...(19): siRNA sense strand
ccuaccagcugugcuccua

SEQ ID NO: 2172871 - RNA, 19 nt, Homo sapiens
  misc_RNA (1)...(19): siRNA sense strand
ccucggaagugagcagcua

SEQ ID NO: 2172872 - RNA, 19 nt, Homo sapiens
  misc_RNA (1)...(19): siRNA sense strand
ggcagguacuugacuccuu

SEQ ID NO: 2172873 - RNA, 19 nt, Homo sapiens
  misc_RNA (1)...(19): siRNA sense strand
ggaagagcggccacaguag

SEQ ID NO: 2172874 - RNA, 19 nt, Homo sapiens
  misc_RNA (1)...(19): siRNA sense strand
aggccaaggucauccagaa

SEQ ID NO: 2172875 - RNA, 19 nt, Homo sapiens
  misc_RNA (1)...(19): siRNA sense strand
gaucaccuuccucacuuug

SEQ ID NO: 2172876 - RNA, 19 nt, Homo sapiens
  misc_RNA (1)...(19): siRNA sense strand
ccaagagccgacccaagaa

SEQ ID NO: 2172877 - RNA, 19 nt, Homo sapiens
  misc_RNA (1)...(19): siRNA sense strand
ugaagcccaacaagaagua

SEQ ID NO: 2172878 - RNA, 19 nt, Homo sapiens
  misc_RNA (1)...(19): siRNA sense strand
agaagaaagacuuggaguu

SEQ ID NO: 2172879 - RNA, 19 nt, Homo sapiens
  misc_RNA (1)...(19): siRNA sense strand
ggaaggaccccaggaagaa

SEQ ID NO: 2172880 - RNA, 19 nt, Homo sapiens
  misc_RNA (1)...(19): siRNA sense strand
gaagaagaaagggaaagag

SEQ ID NO: 2172881 - RNA, 19 nt, Homo sapiens
  misc_RNA (1)...(19): siRNA sense strand
gagaauguggucgagaaga

SEQ ID NO: 2172882 - RNA, 19 nt, Homo sapiens
  misc_RNA (1)...(19): siRNA sense strand
ccaccaaggccaccaagca

SEQ ID NO: 2172883 - RNA, 19 nt, Homo sapiens
  misc_RNA (1)...(19): siRNA sense strand
ccaugcagagccuuauaaa

SEQ ID NO: 2172884 - RNA, 19 nt, Homo sapiens
  misc_RNA (1)...(19): siRNA sense strand
ccaggaagaagaagaaagg

SEQ ID NO: 2172885 - RNA, 19 nt, Homo sapiens
  misc_RNA (1)...(19): siRNA sense strand
gggauaagaaagagacaca

SEQ ID NO: 2172886 - RNA, 19 nt, Homo sapiens
  misc_RNA (1)...(19): siRNA sense strand
ggcaucacccugcuaagug

SEQ ID NO: 2172887 - RNA, 19 nt, Homo sapiens
  misc_RNA (1)...(19): siRNA sense strand
aggcagagguggaggacau

SEQ ID NO: 2172888 - RNA, 19 nt, Homo sapiens
  misc_RNA (1)...(19): siRNA sense strand
ccugguggcuguggcaaga

SEQ ID NO: 2172889 - RNA, 19 nt, Homo sapiens
  misc_RNA (1)...(19): siRNA sense strand
ugaucaccuuccucacuuu

SEQ ID NO: 2172890 - RNA, 19 nt, Homo sapiens
  misc_RNA (1)...(19): siRNA sense strand
cccgucagccuaccaguuu

SEQ ID NO: 2172891 - RNA, 19 nt, Homo sapiens
  misc_RNA (1)...(19): siRNA sense strand
gaccaggagcgcucucugu

SEQ ID NO: 2172892 - RNA, 19 nt, Homo sapiens
  misc_RNA (1)...(19): siRNA sense strand
ggccaugcagagccuuaua

SEQ ID NO: 2172893 - RNA, 19 nt, Homo sapiens
  misc_RNA (1)...(19): siRNA sense strand
gggcacagaguucgaguac

SEQ ID NO: 2172894 - RNA, 19 nt, Homo sapiens
  misc_RNA (1)...(19): siRNA sense strand
ggaagcagccguuuugucu

SEQ ID NO: 2172895 - RNA, 19 nt, Homo sapiens
  misc_RNA (1)...(19): siRNA sense strand
cgccuucccuccuguguag

SEQ ID NO: 2172896 - RNA, 19 nt, Homo sapiens
  misc_RNA (1)...(19): siRNA sense strand
agacgaagaauuccugaag

SEQ ID NO: 2172897 - RNA, 19 nt, Homo sapiens
  misc_RNA (1)...(19): siRNA sense strand
agcagcuacucuuacaaua

SEQ ID NO: 2172898 - RNA, 19 nt, Homo sapiens
  misc_RNA (1)...(19): siRNA sense strand
ggaagugagcagcuacucu

SEQ ID NO: 2172899 - RNA, 19 nt, Homo sapiens
  misc_RNA (1)...(19): siRNA sense strand
gcuaaagauuaagaagaag

SEQ ID NO: 2172900 - RNA, 19 nt, Homo sapiens
  misc_RNA (1)...(19): siRNA sense strand
caucagucagcuaaagauu

SEQ ID NO: 2172901 - RNA, 19 nt, Homo sapiens
  misc_RNA (1)...(19): siRNA sense strand
agaaggaggagcggaugua

SEQ ID NO: 2172902 - RNA, 19 nt, Homo sapiens
  misc_RNA (1)...(19): siRNA sense strand
ggagguuugggcaccauga

SEQ ID NO: 2172903 - RNA, 19 nt, Homo sapiens
  misc_RNA (1)...(19): siRNA sense strand
cauggcaucacccugcuaa

SEQ ID NO: 2172904 - RNA, 19 nt, Homo sapiens
  misc_RNA (1)...(19): siRNA sense strand
gugcaaaggacaggaagga

SEQ ID NO: 2172905 - RNA, 19 nt, Homo sapiens
  misc_RNA (1)...(19): siRNA sense strand
gcagguacuugacuccuua

SEQ ID NO: 2172906 - RNA, 19 nt, Homo sapiens
  misc_RNA (1)...(19): siRNA sense strand
gaagaaagacuuggaguug

SEQ ID NO: 2172907 - RNA, 19 nt, Homo sapiens
  misc_RNA (1)...(19): siRNA sense strand
ucagucagcuaaagauuaa

SEQ ID NO: 2172908 - RNA, 19 nt, Homo sapiens
  misc_RNA (1)...(19): siRNA sense strand
gcaagucucugcugacauc

SEQ ID NO: 2172909 - RNA, 19 nt, Homo sapiens
  misc_RNA (1)...(19): siRNA sense strand
cagagaagguaaacacaaa

SEQ ID NO: 2172910 - RNA, 19 nt, Homo sapiens
  misc_RNA (1)...(19): siRNA sense strand
gggcggagauggaagagaa

SEQ ID NO: 2172911 - RNA, 19 nt, Homo sapiens
  misc_RNA (1)...(19): siRNA sense strand
gggaagagcggccacagua

SEQ ID NO: 2172912 - RNA, 19 nt, Homo sapiens
  misc_RNA (1)...(19): siRNA sense strand
gaaccagacuugggaugaa

SEQ ID NO: 2172913 - RNA, 19 nt, Homo sapiens
  misc_RNA (1)...(19): siRNA sense strand
gcacagaguucgaguacac

SEQ ID NO: 2172914 - RNA, 19 nt, Homo sapiens
  misc_RNA (1)...(19): siRNA sense strand
gaagugagcagcuacucuu

SEQ ID NO: 2172915 - RNA, 19 nt, Homo sapiens
  misc_RNA (1)...(19): siRNA sense strand
ggcaagcucugaccaguuc

SEQ ID NO: 2172916 - RNA, 19 nt, Homo sapiens
  misc_RNA (1)...(19): siRNA sense strand
ugcagagccuuauaaagua

SEQ ID NO: 2172917 - RNA, 19 nt, Homo sapiens
  misc_RNA (1)...(19): siRNA sense strand
gccaagagccgacccaaga

SEQ ID NO: 2172918 - RNA, 19 nt, Homo sapiens
  misc_RNA (1)...(19): siRNA sense strand
aggagaagcugcucagaga

SEQ ID NO: 2172919 - RNA, 19 nt, Homo sapiens
  misc_RNA (1)...(19): siRNA sense strand
gagcggauguaugccauga

SEQ ID NO: 2172920 - RNA, 19 nt, Homo sapiens
  misc_RNA (1)...(19): siRNA sense strand
ggacucagaggaagacgaa

SEQ ID NO: 2172921 - RNA, 19 nt, Homo sapiens
  misc_RNA (1)...(19): siRNA sense strand
ggaaucguuugaccaagau

SEQ ID NO: 2172922 - RNA, 19 nt, Homo sapiens
  misc_RNA (1)...(19): siRNA sense strand
ggaggaaucguuugaccaa

SEQ ID NO: 2172923 - RNA, 19 nt, Homo sapiens
  misc_RNA (1)...(19): siRNA sense strand
agaauguggucgagaagaa

SEQ ID NO: 2172924 - RNA, 19 nt, Homo sapiens
  misc_RNA (1)...(19): siRNA sense strand
gagcugaagcccaacaaga

SEQ ID NO: 2172925 - RNA, 19 nt, Homo sapiens
  misc_RNA (1)...(19): siRNA sense strand
agaaagacuuggaguugga

SEQ ID NO: 2172926 - RNA, 19 nt, Homo sapiens
  misc_RNA (1)...(19): siRNA sense strand
gaagaagaagaaagggaaa

SEQ ID NO: 2172927 - RNA, 19 nt, Homo sapiens
  misc_RNA (1)...(19): siRNA sense strand
gagcagcuacucuuacaau

SEQ ID NO: 2172928 - RNA, 19 nt, Homo sapiens
  misc_RNA (1)...(19): siRNA sense strand
ggucugaggaggaacauga

SEQ ID NO: 2172929 - RNA, 19 nt, Homo sapiens
  misc_RNA (1)...(19): siRNA sense strand
gagaagcugcucagagaga

SEQ ID NO: 2172930 - RNA, 19 nt, Homo sapiens
  misc_RNA (1)...(19): siRNA sense strand
cauccuaccuccaccugaa

SEQ ID NO: 2172931 - RNA, 19 nt, Homo sapiens
  misc_RNA (1)...(19): siRNA sense strand
gagaggaggagccaagaga

SEQ ID NO: 2172932 - RNA, 19 nt, Homo sapiens
  misc_RNA (1)...(19): siRNA sense strand
ucaccaagcaggacaaguu

SEQ ID NO: 2172933 - RNA, 19 nt, Homo sapiens
  misc_RNA (1)...(19): siRNA sense strand
gcccugagcauaaauggaa

SEQ ID NO: 2172934 - RNA, 19 nt, Homo sapiens
  misc_RNA (1)...(19): siRNA sense strand
guagcaugguggcaaagaa

SEQ ID NO: 2172935 - RNA, 19 nt, Homo sapiens
  misc_RNA (1)...(19): siRNA sense strand
ccgagaauguggucgagaa

SEQ ID NO: 2172936 - RNA, 19 nt, Homo sapiens
  misc_RNA (1)...(19): siRNA sense strand
gcagagccuuauaaaguac

SEQ ID NO: 2172937 - RNA, 19 nt, Homo sapiens
  misc_RNA (1)...(19): siRNA sense strand
gagcagaugaggacugugu

SEQ ID NO: 2172938 - RNA, 19 nt, Homo sapiens
  misc_RNA (1)...(19): siRNA sense strand
gagcagggauaagaaagag

SEQ ID NO: 2172939 - RNA, 19 nt, Homo sapiens
  misc_RNA (1)...(19): siRNA sense strand
agaggaagacgaagaauuc

SEQ ID NO: 2172940 - RNA, 19 nt, Homo sapiens
  misc_RNA (1)...(19): siRNA sense strand
gugagcagcuacucuuaca

SEQ ID NO: 2172941 - RNA, 19 nt, Homo sapiens
  misc_RNA (1)...(19): siRNA sense strand
ggaaccagacuugggauga

SEQ ID NO: 2172942 - RNA, 19 nt, Homo sapiens
  misc_RNA (1)...(19): siRNA sense strand
ggagcagggauaagaaaga

SEQ ID NO: 2172943 - RNA, 19 nt, Homo sapiens
  misc_RNA (1)...(19): siRNA sense strand
gaaauccuccagagaaggu

SEQ ID NO: 2172944 - RNA, 19 nt, Homo sapiens
  misc_RNA (1)...(19): siRNA sense strand
gcggauguaugccaugaag

SEQ ID NO: 2172945 - RNA, 19 nt, Homo sapiens
  misc_RNA (1)...(19): siRNA sense strand
ccacagacgaggacucuuc

SEQ ID NO: 2172946 - RNA, 19 nt, Homo sapiens
  misc_RNA (1)...(19): siRNA sense strand
gaaggaggagcggauguau

SEQ ID NO: 2172947 - RNA, 19 nt, Homo sapiens
  misc_RNA (1)...(19): siRNA sense strand
gaauguggucgagaagaaa

SEQ ID NO: 2172948 - RNA, 19 nt, Homo sapiens
  misc_RNA (1)...(19): siRNA sense strand
cagcgacucuucggaggaa

SEQ ID NO: 2172949 - RNA, 19 nt, Homo sapiens
  misc_RNA (1)...(19): siRNA sense strand
cagcuaaagauuaagaaga

SEQ ID NO: 2172950 - RNA, 19 nt, Homo sapiens
  misc_RNA (1)...(19): siRNA sense strand
gauaagaaagagacacaag

SEQ ID NO: 2172951 - RNA, 19 nt, Homo sapiens
  misc_RNA (1)...(19): siRNA sense strand
ggaccgggaucaggagaag

SEQ ID NO: 2172952 - RNA, 19 nt, Homo sapiens
  misc_RNA (1)...(19): siRNA sense strand
aggaaucguuugaccaaga

SEQ ID NO: 2172953 - RNA, 19 nt, Homo sapiens
  misc_RNA (1)...(19): siRNA sense strand
cagaggaagacgaagaauu

SEQ ID NO: 2172954 - RNA, 19 nt, Homo sapiens
  misc_RNA (1)...(19): siRNA sense strand
ccaagcaggacaaguugaa

SEQ ID NO: 2172955 - RNA, 19 nt, Homo sapiens
  misc_RNA (1)...(19): siRNA sense strand
gagcugggagcagggauaa

SEQ ID NO: 2172956 - RNA, 19 nt, Homo sapiens
  misc_RNA (1)...(19): siRNA sense strand
ggauguaugccaugaaguc

SEQ ID NO: 2172957 - RNA, 19 nt, Homo sapiens
  misc_RNA (1)...(19): siRNA sense strand
ccgagagccuugucuugga

SEQ ID NO: 2172958 - RNA, 19 nt, Homo sapiens
  misc_RNA (1)...(19): siRNA sense strand
gaggaggagccaagagaug

SEQ ID NO: 2172959 - RNA, 19 nt, Homo sapiens
  misc_RNA (1)...(19): siRNA sense strand
ccagagaagguaaacacaa

SEQ ID NO: 2172960 - RNA, 19 nt, Homo sapiens
  misc_RNA (1)...(19): siRNA sense strand
gccaugcagagccuuauaa

SEQ ID NO: 2172961 - RNA, 19 nt, Homo sapiens
  misc_RNA (1)...(19): siRNA sense strand
gcaggaagcagccguuuug

SEQ ID NO: 2172962 - RNA, 19 nt, Homo sapiens
  misc_RNA (1)...(19): siRNA sense strand
caauacggacucagaggaa

SEQ ID NO: 2172963 - RNA, 19 nt, Homo sapiens
  misc_RNA (1)...(19): siRNA sense strand
agacuugggaugaacauga

SEQ ID NO: 2172964 - RNA, 19 nt, Homo sapiens
  misc_RNA (1)...(19): siRNA sense strand
augcagagccuuauaaagu

SEQ ID NO: 2172965 - RNA, 19 nt, Homo sapiens
  misc_RNA (1)...(19): siRNA sense strand
cgagagcgccaaagcuuuc

SEQ ID NO: 2172966 - RNA, 19 nt, Homo sapiens
  misc_RNA (1)...(19): siRNA sense strand
cagcuacucuuacaauacg

SEQ ID NO: 2172967 - RNA, 19 nt, Homo sapiens
  misc_RNA (1)...(19): siRNA sense strand
gcagcuacucuuacaauac

SEQ ID NO: 2172968 - RNA, 19 nt, Homo sapiens
  misc_RNA (1)...(19): siRNA sense strand
gcugggagcagggauaaga

SEQ ID NO: 2172969 - RNA, 19 nt, Homo sapiens
  misc_RNA (1)...(19): siRNA sense strand
gagcccaggccuuggagaa

SEQ ID NO: 2172970 - RNA, 19 nt, Homo sapiens
  misc_RNA (1)...(19): siRNA sense strand
ccuaccagcugugcuccua

SEQ ID NO: 2172971 - RNA, 19 nt, Homo sapiens
  misc_RNA (1)...(19): siRNA sense strand
ccucggaagugagcagcua

SEQ ID NO: 2172972 - RNA, 19 nt, Homo sapiens
  misc_RNA (1)...(19): siRNA sense strand
ggcagguacuugacuccuu

SEQ ID NO: 2172973 - RNA, 19 nt, Homo sapiens
  misc_RNA (1)...(19): siRNA sense strand
ggaagagcggccacaguag

SEQ ID NO: 2172974 - RNA, 19 nt, Homo sapiens
  misc_RNA (1)...(19): siRNA sense strand
aggccaaggucauccagaa

SEQ ID NO: 2172975 - RNA, 19 nt, Homo sapiens
  misc_RNA (1)...(19): siRNA sense strand
gaucaccuuccucacuuug

SEQ ID NO: 2172976 - RNA, 19 nt, Homo sapiens
  misc_RNA (1)...(19): siRNA sense strand
ccaagagccgacccaagaa

SEQ ID NO: 2172977 - RNA, 19 nt, Homo sapiens
  misc_RNA (1)...(19): siRNA sense strand
ugaagcccaacaagaagua

SEQ ID NO: 2172978 - RNA, 19 nt, Homo sapiens
  misc_RNA (1)...(19): siRNA sense strand
agaagaaagacuuggaguu

SEQ ID NO: 2172979 - RNA, 19 nt, Homo sapiens
  misc_RNA (1)...(19): siRNA sense strand
ggaaggaccccaggaagaa

SEQ ID NO: 2172980 - RNA, 19 nt, Homo sapiens
  misc_RNA (1)...(19): siRNA sense strand
gaagaagaaagggaaagag

SEQ ID NO: 2172981 - RNA, 19 nt, Homo sapiens
  misc_RNA (1)...(19): siRNA sense strand
gagaauguggucgagaaga

SEQ ID NO: 2172982 - RNA, 19 nt, Homo sapiens
  misc_RNA (1)...(19): siRNA sense strand
ccaccaaggccaccaagca

SEQ ID NO: 2172983 - RNA, 19 nt, Homo sapiens
  misc_RNA (1)...(19): siRNA sense strand
ccaugcagagccuuauaaa

SEQ ID NO: 2172984 - RNA, 19 nt, Homo sapiens
  misc_RNA (1)...(19): siRNA sense strand
ccaggaagaagaagaaagg

SEQ ID NO: 2172985 - RNA, 19 nt, Homo sapiens
  misc_RNA (1)...(19): siRNA sense strand
gggauaagaaagagacaca

SEQ ID NO: 2172986 - RNA, 19 nt, Homo sapiens
  misc_RNA (1)...(19): siRNA sense strand
ggcaucacccugcuaagug

SEQ ID NO: 2172987 - RNA, 19 nt, Homo sapiens
  misc_RNA (1)...(19): siRNA sense strand
aggcagagguggaggacau

SEQ ID NO: 2172988 - RNA, 19 nt, Homo sapiens
  misc_RNA (1)...(19): siRNA sense strand
ccugguggcuguggcaaga

SEQ ID NO: 2172989 - RNA, 19 nt, Homo sapiens
  misc_RNA (1)...(19): siRNA sense strand
ugaucaccuuccucacuuu

SEQ ID NO: 2172990 - RNA, 19 nt, Homo sapiens
  misc_RNA (1)...(19): siRNA sense strand
cccgucagccuaccaguuu

SEQ ID NO: 2172991 - RNA, 19 nt, Homo sapiens
  misc_RNA (1)...(19): siRNA sense strand
gaccaggagcgcucucugu

SEQ ID NO: 2172992 - RNA, 19 nt, Homo sapiens
  misc_RNA (1)...(19): siRNA sense strand
ggccaugcagagccuuaua

SEQ ID NO: 2172993 - RNA, 19 nt, Homo sapiens
  misc_RNA (1)...(19): siRNA sense strand
gggcacagaguucgaguac

SEQ ID NO: 2172994 - RNA, 19 nt, Homo sapiens
  misc_RNA (1)...(19): siRNA sense strand
ggaagcagccguuuugucu

SEQ ID NO: 2172995 - RNA, 19 nt, Homo sapiens
  misc_RNA (1)...(19): siRNA sense strand
cgccuucccuccuguguag

SEQ ID NO: 2172996 - RNA, 19 nt, Homo sapiens
  misc_RNA (1)...(19): siRNA sense strand
agacgaagaauuccugaag

SEQ ID NO: 2172997 - RNA, 19 nt, Homo sapiens
  misc_RNA (1)...(19): siRNA sense strand
agcagcuacucuuacaaua

SEQ ID NO: 2172998 - RNA, 19 nt, Homo sapiens
  misc_RNA (1)...(19): siRNA sense strand
ggaagugagcagcuacucu

SEQ ID NO: 2172999 - RNA, 19 nt, Homo sapiens
  misc_RNA (1)...(19): siRNA sense strand
gcuaaagauuaagaagaag

SEQ ID NO: 2173000 - RNA, 19 nt, Homo sapiens
  misc_RNA (1)...(19): siRNA sense strand
caucagucagcuaaagauu

SEQ ID NO: 2173001 - RNA, 19 nt, Homo sapiens
  misc_RNA (1)...(19): siRNA sense strand
agaaggaggagcggaugua

SEQ ID NO: 2173002 - RNA, 19 nt, Homo sapiens
  misc_RNA (1)...(19): siRNA sense strand
ggagguuugggcaccauga

SEQ ID NO: 2173003 - RNA, 19 nt, Homo sapiens
  misc_RNA (1)...(19): siRNA sense strand
cauggcaucacccugcuaa

SEQ ID NO: 2173004 - RNA, 19 nt, Homo sapiens
  misc_RNA (1)...(19): siRNA sense strand
gugcaaaggacaggaagga

SEQ ID NO: 2173005 - RNA, 19 nt, Homo sapiens
  misc_RNA (1)...(19): siRNA sense strand
ggaaacagcccucaaccaa

SEQ ID NO: 2173006 - RNA, 19 nt, Homo sapiens
  misc_RNA (1)...(19): siRNA sense strand
gaaacagcccucaaccaaa

SEQ ID NO: 2173007 - RNA, 19 nt, Homo sapiens
  misc_RNA (1)...(19): siRNA sense strand
aaacagcccucaaccaaaa

SEQ ID NO: 2173008 - RNA, 19 nt, Homo sapiens
  misc_RNA (1)...(19): siRNA sense strand
ggacaucgccagggaaaca

SEQ ID NO: 2173009 - RNA, 19 nt, Homo sapiens
  misc_RNA (1)...(19): siRNA sense strand
gaagcugcaugggugaaga

SEQ ID NO: 2173010 - RNA, 19 nt, Homo sapiens
  misc_RNA (1)...(19): siRNA sense strand
gaagagaccgugggaucgu

SEQ ID NO: 2173011 - RNA, 19 nt, Homo sapiens
  misc_RNA (1)...(19): siRNA sense strand
ccagaagucacaccucauc

SEQ ID NO: 2173012 - RNA, 19 nt, Homo sapiens
  misc_RNA (1)...(19): siRNA sense strand
caccucauccugcgucaga

SEQ ID NO: 2173013 - RNA, 19 nt, Homo sapiens
  misc_RNA (1)...(19): siRNA sense strand
gggaaacagcccucaacca

SEQ ID NO: 2173014 - RNA, 19 nt, Homo sapiens
  misc_RNA (1)...(19): siRNA sense strand
accgugggaucgucacaaa

SEQ ID NO: 2173015 - RNA, 19 nt, Homo sapiens
  misc_RNA (1)...(19): siRNA sense strand
ggaaacagcccucaaccaa

SEQ ID NO: 2173016 - RNA, 19 nt, Homo sapiens
  misc_RNA (1)...(19): siRNA sense strand
gaaacagcccucaaccaaa

SEQ ID NO: 2173017 - RNA, 19 nt, Homo sapiens
  misc_RNA (1)...(19): siRNA sense strand
aaacagcccucaaccaaaa

SEQ ID NO: 2173018 - RNA, 19 nt, Homo sapiens
  misc_RNA (1)...(19): siRNA sense strand
ggacaucgccagggaaaca

SEQ ID NO: 2173019 - RNA, 19 nt, Homo sapiens
  misc_RNA (1)...(19): siRNA sense strand
gaagcugcaugggugaaga

SEQ ID NO: 2173020 - RNA, 19 nt, Homo sapiens
  misc_RNA (1)...(19): siRNA sense strand
gaagagaccgugggaucgu

SEQ ID NO: 2173021 - RNA, 19 nt, Homo sapiens
  misc_RNA (1)...(19): siRNA sense strand
ccagaagucacaccucauc

SEQ ID NO: 2173022 - RNA, 19 nt, Homo sapiens
  misc_RNA (1)...(19): siRNA sense strand
caccucauccugcgucaga

SEQ ID NO: 2173023 - RNA, 19 nt, Homo sapiens
  misc_RNA (1)...(19): siRNA sense strand
gggaaacagcccucaacca

SEQ ID NO: 2173024 - RNA, 19 nt, Homo sapiens
  misc_RNA (1)...(19): siRNA sense strand
accgugggaucgucacaaa

SEQ ID NO: 2173025 - RNA, 19 nt, Homo sapiens
  misc_RNA (1)...(19): siRNA sense strand
cgacagaacugcacuugua

SEQ ID NO: 2173026 - RNA, 19 nt, Homo sapiens
  misc_RNA (1)...(19): siRNA sense strand
ugacaaagcuucugaaucu

SEQ ID NO: 2173027 - RNA, 19 nt, Homo sapiens
  misc_RNA (1)...(19): siRNA sense strand
gaucuagagucaaauguuu

SEQ ID NO: 2173028 - RNA, 19 nt, Homo sapiens
  misc_RNA (1)...(19): siRNA sense strand
guuaauagguccucaguga

SEQ ID NO: 2173029 - RNA, 19 nt, Homo sapiens
  misc_RNA (1)...(19): siRNA sense strand
uuagagaccuucaggcuua

SEQ ID NO: 2173030 - RNA, 19 nt, Homo sapiens
  misc_RNA (1)...(19): siRNA sense strand
gauaaaggcugcucagagu

SEQ ID NO: 2173031 - RNA, 19 nt, Homo sapiens
  misc_RNA (1)...(19): siRNA sense strand
caaccuaaccuucauagua

SEQ ID NO: 2173032 - RNA, 19 nt, Homo sapiens
  misc_RNA (1)...(19): siRNA sense strand
caccaccucuugccaauua

SEQ ID NO: 2173033 - RNA, 19 nt, Homo sapiens
  misc_RNA (1)...(19): siRNA sense strand
gaagagacauucaagaaaa

SEQ ID NO: 2173034 - RNA, 19 nt, Homo sapiens
  misc_RNA (1)...(19): siRNA sense strand
ccaagaagaugcccaugaa

SEQ ID NO: 2173035 - RNA, 19 nt, Homo sapiens
  misc_RNA (1)...(19): siRNA sense strand
gaccacagcuucccucuca

SEQ ID NO: 2173036 - RNA, 19 nt, Homo sapiens
  misc_RNA (1)...(19): siRNA sense strand
gaauggcagcaauaaauua

SEQ ID NO: 2173037 - RNA, 19 nt, Homo sapiens
  misc_RNA (1)...(19): siRNA sense strand
gauauuagaucgguacuca

SEQ ID NO: 2173038 - RNA, 19 nt, Homo sapiens
  misc_RNA (1)...(19): siRNA sense strand
ccuaagaucuagagucaaa

SEQ ID NO: 2173039 - RNA, 19 nt, Homo sapiens
  misc_RNA (1)...(19): siRNA sense strand
gaauccaccucacuuaaau

SEQ ID NO: 2173040 - RNA, 19 nt, Homo sapiens
  misc_RNA (1)...(19): siRNA sense strand
gcaauggccucugguauca

SEQ ID NO: 2173041 - RNA, 19 nt, Homo sapiens
  misc_RNA (1)...(19): siRNA sense strand
aaccuaaccuucauaguaa

SEQ ID NO: 2173042 - RNA, 19 nt, Homo sapiens
  misc_RNA (1)...(19): siRNA sense strand
uagaagagccuaaagcaaa

SEQ ID NO: 2173043 - RNA, 19 nt, Homo sapiens
  misc_RNA (1)...(19): siRNA sense strand
ccaauuacaugcuaucaca

SEQ ID NO: 2173044 - RNA, 19 nt, Homo sapiens
  misc_RNA (1)...(19): siRNA sense strand
gcaauaaauuagacagaca

SEQ ID NO: 2173045 - RNA, 19 nt, Homo sapiens
  misc_RNA (1)...(19): siRNA sense strand
cagcuucccucucacauga

SEQ ID NO: 2173046 - RNA, 19 nt, Homo sapiens
  misc_RNA (1)...(19): siRNA sense strand
acagaaggauccucuagaa

SEQ ID NO: 2173047 - RNA, 19 nt, Homo sapiens
  misc_RNA (1)...(19): siRNA sense strand
gaugucaguuucuaguaaa

SEQ ID NO: 2173048 - RNA, 19 nt, Homo sapiens
  misc_RNA (1)...(19): siRNA sense strand
guucaucuguaccugauaa

SEQ ID NO: 2173049 - RNA, 19 nt, Homo sapiens
  misc_RNA (1)...(19): siRNA sense strand
ggacuggaccauugaaaga

SEQ ID NO: 2173050 - RNA, 19 nt, Homo sapiens
  misc_RNA (1)...(19): siRNA sense strand
ucaaagagguucacuaucc

SEQ ID NO: 2173051 - RNA, 19 nt, Homo sapiens
  misc_RNA (1)...(19): siRNA sense strand
gaggauaccuaagaucuag

SEQ ID NO: 2173052 - RNA, 19 nt, Homo sapiens
  misc_RNA (1)...(19): siRNA sense strand
cgaugucaguuucuaguaa

SEQ ID NO: 2173053 - RNA, 19 nt, Homo sapiens
  misc_RNA (1)...(19): siRNA sense strand
gcaagggcguuucagauac

SEQ ID NO: 2173054 - RNA, 19 nt, Homo sapiens
  misc_RNA (1)...(19): siRNA sense strand
caaaucacacacuuucuuu

SEQ ID NO: 2173055 - RNA, 19 nt, Homo sapiens
  misc_RNA (1)...(19): siRNA sense strand
ggugucgucucuuugagua

SEQ ID NO: 2173056 - RNA, 19 nt, Homo sapiens
  misc_RNA (1)...(19): siRNA sense strand
gaacagaaggauccucuag

SEQ ID NO: 2173057 - RNA, 19 nt, Homo sapiens
  misc_RNA (1)...(19): siRNA sense strand
ccaccacucuuguuuguca

SEQ ID NO: 2173058 - RNA, 19 nt, Homo sapiens
  misc_RNA (1)...(19): siRNA sense strand
gaacauccuaagaaacaaa

SEQ ID NO: 2173059 - RNA, 19 nt, Homo sapiens
  misc_RNA (1)...(19): siRNA sense strand
ucacacacuuucuuuagga

SEQ ID NO: 2173060 - RNA, 19 nt, Homo sapiens
  misc_RNA (1)...(19): siRNA sense strand
caagaacccaugacccuaa

SEQ ID NO: 2173061 - RNA, 19 nt, Homo sapiens
  misc_RNA (1)...(19): siRNA sense strand
gaaugggauugguacgauu

SEQ ID NO: 2173062 - RNA, 19 nt, Homo sapiens
  misc_RNA (1)...(19): siRNA sense strand
ggagaaaacucguacaagu

SEQ ID NO: 2173063 - RNA, 19 nt, Homo sapiens
  misc_RNA (1)...(19): siRNA sense strand
ugucuuaaguggcaacaaa

SEQ ID NO: 2173064 - RNA, 19 nt, Homo sapiens
  misc_RNA (1)...(19): siRNA sense strand
uaccuaagaucuagaguca

SEQ ID NO: 2173065 - RNA, 19 nt, Homo sapiens
  misc_RNA (1)...(19): siRNA sense strand
gaccauaguugacaaagcu

SEQ ID NO: 2173066 - RNA, 19 nt, Homo sapiens
  misc_RNA (1)...(19): siRNA sense strand
ggaacagcuugauggagaa

SEQ ID NO: 2173067 - RNA, 19 nt, Homo sapiens
  misc_RNA (1)...(19): siRNA sense strand
aaagaauccaccucacuua

SEQ ID NO: 2173068 - RNA, 19 nt, Homo sapiens
  misc_RNA (1)...(19): siRNA sense strand
ccucucacaugauaaagaa

SEQ ID NO: 2173069 - RNA, 19 nt, Homo sapiens
  misc_RNA (1)...(19): siRNA sense strand
cagaacauccuaagaaaca

SEQ ID NO: 2173070 - RNA, 19 nt, Homo sapiens
  misc_RNA (1)...(19): siRNA sense strand
guugaugccugcuccuuug

SEQ ID NO: 2173071 - RNA, 19 nt, Homo sapiens
  misc_RNA (1)...(19): siRNA sense strand
gacagugacccgaaagaaa

SEQ ID NO: 2173072 - RNA, 19 nt, Homo sapiens
  misc_RNA (1)...(19): siRNA sense strand
ggaggauaccuaagaucua

SEQ ID NO: 2173073 - RNA, 19 nt, Homo sapiens
  misc_RNA (1)...(19): siRNA sense strand
gcccuuagcguuuauugaa

SEQ ID NO: 2173074 - RNA, 19 nt, Homo sapiens
  misc_RNA (1)...(19): siRNA sense strand
agaaggauccucuagaaga

SEQ ID NO: 2173075 - RNA, 19 nt, Homo sapiens
  misc_RNA (1)...(19): siRNA sense strand
cauuacuucugcuacauaa

SEQ ID NO: 2173076 - RNA, 19 nt, Homo sapiens
  misc_RNA (1)...(19): siRNA sense strand
aaucagaggacuuuguuaa

SEQ ID NO: 2173077 - RNA, 19 nt, Homo sapiens
  misc_RNA (1)...(19): siRNA sense strand
cccagaacauccuaagaaa

SEQ ID NO: 2173078 - RNA, 19 nt, Homo sapiens
  misc_RNA (1)...(19): siRNA sense strand
uaaagaauccaccucacuu

SEQ ID NO: 2173079 - RNA, 19 nt, Homo sapiens
  misc_RNA (1)...(19): siRNA sense strand
guucuuacacuuucucuga

SEQ ID NO: 2173080 - RNA, 19 nt, Homo sapiens
  misc_RNA (1)...(19): siRNA sense strand
aagaagagacauucaagaa

SEQ ID NO: 2173081 - RNA, 19 nt, Homo sapiens
  misc_RNA (1)...(19): siRNA sense strand
ccuaaacggugcuaauagu

SEQ ID NO: 2173082 - RNA, 19 nt, Homo sapiens
  misc_RNA (1)...(19): siRNA sense strand
gccaagaugccgaagauga

SEQ ID NO: 2173083 - RNA, 19 nt, Homo sapiens
  misc_RNA (1)...(19): siRNA sense strand
gucaguuucuaguaaagua

SEQ ID NO: 2173084 - RNA, 19 nt, Homo sapiens
  misc_RNA (1)...(19): siRNA sense strand
ucagauauuuggaggauac

SEQ ID NO: 2173085 - RNA, 19 nt, Homo sapiens
  misc_RNA (1)...(19): siRNA sense strand
gaugugaaauacccugagu

SEQ ID NO: 2173086 - RNA, 19 nt, Homo sapiens
  misc_RNA (1)...(19): siRNA sense strand
cuaauguucuuacacuuuc

SEQ ID NO: 2173087 - RNA, 19 nt, Homo sapiens
  misc_RNA (1)...(19): siRNA sense strand
aaagaugguuccagcuuca

SEQ ID NO: 2173088 - RNA, 19 nt, Homo sapiens
  misc_RNA (1)...(19): siRNA sense strand
ggccaccacucuuguuugu

SEQ ID NO: 2173089 - RNA, 19 nt, Homo sapiens
  misc_RNA (1)...(19): siRNA sense strand
caaucaguauucacaacaa

SEQ ID NO: 2173090 - RNA, 19 nt, Homo sapiens
  misc_RNA (1)...(19): siRNA sense strand
caaagagguucacuaucca

SEQ ID NO: 2173091 - RNA, 19 nt, Homo sapiens
  misc_RNA (1)...(19): siRNA sense strand
aagaagaugcccaugaauu

SEQ ID NO: 2173092 - RNA, 19 nt, Homo sapiens
  misc_RNA (1)...(19): siRNA sense strand
ugaauggcagcaauaaauu

SEQ ID NO: 2173093 - RNA, 19 nt, Homo sapiens
  misc_RNA (1)...(19): siRNA sense strand
agagagagcaggagcaaga

SEQ ID NO: 2173094 - RNA, 19 nt, Homo sapiens
  misc_RNA (1)...(19): siRNA sense strand
cauuaccaauucugcagua

SEQ ID NO: 2173095 - RNA, 19 nt, Homo sapiens
  misc_RNA (1)...(19): siRNA sense strand
gcuucccucucacaugaua

SEQ ID NO: 2173096 - RNA, 19 nt, Homo sapiens
  misc_RNA (1)...(19): siRNA sense strand
uugcuaaggaugugaaaua

SEQ ID NO: 2173097 - RNA, 19 nt, Homo sapiens
  misc_RNA (1)...(19): siRNA sense strand
ggugcugugucuucauuga

SEQ ID NO: 2173098 - RNA, 19 nt, Homo sapiens
  misc_RNA (1)...(19): siRNA sense strand
uguuaaagauucagaacug

SEQ ID NO: 2173099 - RNA, 19 nt, Homo sapiens
  misc_RNA (1)...(19): siRNA sense strand
agaagagacauucaagaaa

SEQ ID NO: 2173100 - RNA, 19 nt, Homo sapiens
  misc_RNA (1)...(19): siRNA sense strand
agaagaugcccaugaauuc

SEQ ID NO: 2173101 - RNA, 19 nt, Homo sapiens
  misc_RNA (1)...(19): siRNA sense strand
cagcgacagugacccgaaa

SEQ ID NO: 2173102 - RNA, 19 nt, Homo sapiens
  misc_RNA (1)...(19): siRNA sense strand
agacauggaugcagguucu

SEQ ID NO: 2173103 - RNA, 19 nt, Homo sapiens
  misc_RNA (1)...(19): siRNA sense strand
ucaaaucacacacuuucuu

SEQ ID NO: 2173104 - RNA, 19 nt, Homo sapiens
  misc_RNA (1)...(19): siRNA sense strand
gaguucaucuguaccugau

SEQ ID NO: 2173105 - RNA, 19 nt, Homo sapiens
  misc_RNA (1)...(19): siRNA sense strand
caggguggcuuuccucucu

SEQ ID NO: 2173106 - RNA, 19 nt, Homo sapiens
  misc_RNA (1)...(19): siRNA sense strand
ucaaaaccaucaccacaaa

SEQ ID NO: 2173107 - RNA, 19 nt, Homo sapiens
  misc_RNA (1)...(19): siRNA sense strand
cagaaaaucccuuugcuaa

SEQ ID NO: 2173108 - RNA, 19 nt, Homo sapiens
  misc_RNA (1)...(19): siRNA sense strand
ccucugguaucaaaugaau

SEQ ID NO: 2173109 - RNA, 19 nt, Homo sapiens
  misc_RNA (1)...(19): siRNA sense strand
gauauuuggaggauaccua

SEQ ID NO: 2173110 - RNA, 19 nt, Homo sapiens
  misc_RNA (1)...(19): siRNA sense strand
ugcaagggcguuucagaua

SEQ ID NO: 2173111 - RNA, 19 nt, Homo sapiens
  misc_RNA (1)...(19): siRNA sense strand
gcaggacucagaccucuca

SEQ ID NO: 2173112 - RNA, 19 nt, Homo sapiens
  misc_RNA (1)...(19): siRNA sense strand
caucgcuccuccacagaaa

SEQ ID NO: 2173113 - RNA, 19 nt, Homo sapiens
  misc_RNA (1)...(19): siRNA sense strand
caacggagagccaauuguc

SEQ ID NO: 2173114 - RNA, 19 nt, Homo sapiens
  misc_RNA (1)...(19): siRNA sense strand
uagcuaggcacuuccguuu

SEQ ID NO: 2173115 - RNA, 19 nt, Homo sapiens
  misc_RNA (1)...(19): siRNA sense strand
aaauggaggugaacuuacu

SEQ ID NO: 2173116 - RNA, 19 nt, Homo sapiens
  misc_RNA (1)...(19): siRNA sense strand
gcuaggcacuuccguuuug

SEQ ID NO: 2173117 - RNA, 19 nt, Homo sapiens
  misc_RNA (1)...(19): siRNA sense strand
agaagagccuaaagcaaag

SEQ ID NO: 2173118 - RNA, 19 nt, Homo sapiens
  misc_RNA (1)...(19): siRNA sense strand
gcaaauccaagcugaacuc

SEQ ID NO: 2173119 - RNA, 19 nt, Homo sapiens
  misc_RNA (1)...(19): siRNA sense strand
agaauccaccucacuuaaa

SEQ ID NO: 2173120 - RNA, 19 nt, Homo sapiens
  misc_RNA (1)...(19): siRNA sense strand
ggaggugaacuuacucauc

SEQ ID NO: 2173121 - RNA, 19 nt, Homo sapiens
  misc_RNA (1)...(19): siRNA sense strand
gaacagcuugauggagaaa

SEQ ID NO: 2173122 - RNA, 19 nt, Homo sapiens
  misc_RNA (1)...(19): siRNA sense strand
aauggccucugguaucaaa

SEQ ID NO: 2173123 - RNA, 19 nt, Homo sapiens
  misc_RNA (1)...(19): siRNA sense strand
ugagaaaacgaaacacuua

SEQ ID NO: 2173124 - RNA, 19 nt, Homo sapiens
  misc_RNA (1)...(19): siRNA sense strand
gaaaggcucgacggaugaa

SEQ ID NO: 2173125 - RNA, 19 nt, Homo sapiens
  misc_RNA (1)...(19): siRNA sense strand
cgacagaacugcacuugua

SEQ ID NO: 2173126 - RNA, 19 nt, Homo sapiens
  misc_RNA (1)...(19): siRNA sense strand
ugacaaagcuucugaaucu

SEQ ID NO: 2173127 - RNA, 19 nt, Homo sapiens
  misc_RNA (1)...(19): siRNA sense strand
gaucuagagucaaauguuu

SEQ ID NO: 2173128 - RNA, 19 nt, Homo sapiens
  misc_RNA (1)...(19): siRNA sense strand
guuaauagguccucaguga

SEQ ID NO: 2173129 - RNA, 19 nt, Homo sapiens
  misc_RNA (1)...(19): siRNA sense strand
uuagagaccuucaggcuua

SEQ ID NO: 2173130 - RNA, 19 nt, Homo sapiens
  misc_RNA (1)...(19): siRNA sense strand
gauaaaggcugcucagagu

SEQ ID NO: 2173131 - RNA, 19 nt, Homo sapiens
  misc_RNA (1)...(19): siRNA sense strand
caaccuaaccuucauagua

SEQ ID NO: 2173132 - RNA, 19 nt, Homo sapiens
  misc_RNA (1)...(19): siRNA sense strand
caccaccucuugccaauua

SEQ ID NO: 2173133 - RNA, 19 nt, Homo sapiens
  misc_RNA (1)...(19): siRNA sense strand
gaagagacauucaagaaaa

SEQ ID NO: 2173134 - RNA, 19 nt, Homo sapiens
  misc_RNA (1)...(19): siRNA sense strand
ccaagaagaugcccaugaa

SEQ ID NO: 2173135 - RNA, 19 nt, Homo sapiens
  misc_RNA (1)...(19): siRNA sense strand
gaccacagcuucccucuca

SEQ ID NO: 2173136 - RNA, 19 nt, Homo sapiens
  misc_RNA (1)...(19): siRNA sense strand
gaauggcagcaauaaauua

SEQ ID NO: 2173137 - RNA, 19 nt, Homo sapiens
  misc_RNA (1)...(19): siRNA sense strand
gauauuagaucgguacuca

SEQ ID NO: 2173138 - RNA, 19 nt, Homo sapiens
  misc_RNA (1)...(19): siRNA sense strand
ccuaagaucuagagucaaa

SEQ ID NO: 2173139 - RNA, 19 nt, Homo sapiens
  misc_RNA (1)...(19): siRNA sense strand
gaauccaccucacuuaaau

SEQ ID NO: 2173140 - RNA, 19 nt, Homo sapiens
  misc_RNA (1)...(19): siRNA sense strand
gcaauggccucugguauca

SEQ ID NO: 2173141 - RNA, 19 nt, Homo sapiens
  misc_RNA (1)...(19): siRNA sense strand
aaccuaaccuucauaguaa

SEQ ID NO: 2173142 - RNA, 19 nt, Homo sapiens
  misc_RNA (1)...(19): siRNA sense strand
uagaagagccuaaagcaaa

SEQ ID NO: 2173143 - RNA, 19 nt, Homo sapiens
  misc_RNA (1)...(19): siRNA sense strand
ccaauuacaugcuaucaca

SEQ ID NO: 2173144 - RNA, 19 nt, Homo sapiens
  misc_RNA (1)...(19): siRNA sense strand
gcaauaaauuagacagaca

SEQ ID NO: 2173145 - RNA, 19 nt, Homo sapiens
  misc_RNA (1)...(19): siRNA sense strand
cagcuucccucucacauga

SEQ ID NO: 2173146 - RNA, 19 nt, Homo sapiens
  misc_RNA (1)...(19): siRNA sense strand
acagaaggauccucuagaa

SEQ ID NO: 2173147 - RNA, 19 nt, Homo sapiens
  misc_RNA (1)...(19): siRNA sense strand
gaugucaguuucuaguaaa

SEQ ID NO: 2173148 - RNA, 19 nt, Homo sapiens
  misc_RNA (1)...(19): siRNA sense strand
guucaucuguaccugauaa

SEQ ID NO: 2173149 - RNA, 19 nt, Homo sapiens
  misc_RNA (1)...(19): siRNA sense strand
ggacuggaccauugaaaga

SEQ ID NO: 2173150 - RNA, 19 nt, Homo sapiens
  misc_RNA (1)...(19): siRNA sense strand
ucaaagagguucacuaucc

SEQ ID NO: 2173151 - RNA, 19 nt, Homo sapiens
  misc_RNA (1)...(19): siRNA sense strand
gaggauaccuaagaucuag

SEQ ID NO: 2173152 - RNA, 19 nt, Homo sapiens
  misc_RNA (1)...(19): siRNA sense strand
cgaugucaguuucuaguaa

SEQ ID NO: 2173153 - RNA, 19 nt, Homo sapiens
  misc_RNA (1)...(19): siRNA sense strand
gcaagggcguuucagauac

SEQ ID NO: 2173154 - RNA, 19 nt, Homo sapiens
  misc_RNA (1)...(19): siRNA sense strand
caaaucacacacuuucuuu

SEQ ID NO: 2173155 - RNA, 19 nt, Homo sapiens
  misc_RNA (1)...(19): siRNA sense strand
ggugucgucucuuugagua

SEQ ID NO: 2173156 - RNA, 19 nt, Homo sapiens
  misc_RNA (1)...(19): siRNA sense strand
gaacagaaggauccucuag

SEQ ID NO: 2173157 - RNA, 19 nt, Homo sapiens
  misc_RNA (1)...(19): siRNA sense strand
ccaccacucuuguuuguca

SEQ ID NO: 2173158 - RNA, 19 nt, Homo sapiens
  misc_RNA (1)...(19): siRNA sense strand
gaacauccuaagaaacaaa

SEQ ID NO: 2173159 - RNA, 19 nt, Homo sapiens
  misc_RNA (1)...(19): siRNA sense strand
ucacacacuuucuuuagga

SEQ ID NO: 2173160 - RNA, 19 nt, Homo sapiens
  misc_RNA (1)...(19): siRNA sense strand
caagaacccaugacccuaa

SEQ ID NO: 2173161 - RNA, 19 nt, Homo sapiens
  misc_RNA (1)...(19): siRNA sense strand
gaaugggauugguacgauu

SEQ ID NO: 2173162 - RNA, 19 nt, Homo sapiens
  misc_RNA (1)...(19): siRNA sense strand
ggagaaaacucguacaagu

SEQ ID NO: 2173163 - RNA, 19 nt, Homo sapiens
  misc_RNA (1)...(19): siRNA sense strand
ugucuuaaguggcaacaaa

SEQ ID NO: 2173164 - RNA, 19 nt, Homo sapiens
  misc_RNA (1)...(19): siRNA sense strand
uaccuaagaucuagaguca

SEQ ID NO: 2173165 - RNA, 19 nt, Homo sapiens
  misc_RNA (1)...(19): siRNA sense strand
gaccauaguugacaaagcu

SEQ ID NO: 2173166 - RNA, 19 nt, Homo sapiens
  misc_RNA (1)...(19): siRNA sense strand
ggaacagcuugauggagaa

SEQ ID NO: 2173167 - RNA, 19 nt, Homo sapiens
  misc_RNA (1)...(19): siRNA sense strand
aaagaauccaccucacuua

SEQ ID NO: 2173168 - RNA, 19 nt, Homo sapiens
  misc_RNA (1)...(19): siRNA sense strand
ccucucacaugauaaagaa

SEQ ID NO: 2173169 - RNA, 19 nt, Homo sapiens
  misc_RNA (1)...(19): siRNA sense strand
cagaacauccuaagaaaca

SEQ ID NO: 2173170 - RNA, 19 nt, Homo sapiens
  misc_RNA (1)...(19): siRNA sense strand
guugaugccugcuccuuug

SEQ ID NO: 2173171 - RNA, 19 nt, Homo sapiens
  misc_RNA (1)...(19): siRNA sense strand
gacagugacccgaaagaaa

SEQ ID NO: 2173172 - RNA, 19 nt, Homo sapiens
  misc_RNA (1)...(19): siRNA sense strand
ggaggauaccuaagaucua

SEQ ID NO: 2173173 - RNA, 19 nt, Homo sapiens
  misc_RNA (1)...(19): siRNA sense strand
gcccuuagcguuuauugaa

SEQ ID NO: 2173174 - RNA, 19 nt, Homo sapiens
  misc_RNA (1)...(19): siRNA sense strand
agaaggauccucuagaaga

SEQ ID NO: 2173175 - RNA, 19 nt, Homo sapiens
  misc_RNA (1)...(19): siRNA sense strand
cauuacuucugcuacauaa

SEQ ID NO: 2173176 - RNA, 19 nt, Homo sapiens
  misc_RNA (1)...(19): siRNA sense strand
aaucagaggacuuuguuaa

SEQ ID NO: 2173177 - RNA, 19 nt, Homo sapiens
  misc_RNA (1)...(19): siRNA sense strand
cccagaacauccuaagaaa

SEQ ID NO: 2173178 - RNA, 19 nt, Homo sapiens
  misc_RNA (1)...(19): siRNA sense strand
uaaagaauccaccucacuu

SEQ ID NO: 2173179 - RNA, 19 nt, Homo sapiens
  misc_RNA (1)...(19): siRNA sense strand
guucuuacacuuucucuga

SEQ ID NO: 2173180 - RNA, 19 nt, Homo sapiens
  misc_RNA (1)...(19): siRNA sense strand
aagaagagacauucaagaa

SEQ ID NO: 2173181 - RNA, 19 nt, Homo sapiens
  misc_RNA (1)...(19): siRNA sense strand
ccuaaacggugcuaauagu

SEQ ID NO: 2173182 - RNA, 19 nt, Homo sapiens
  misc_RNA (1)...(19): siRNA sense strand
gccaagaugccgaagauga

SEQ ID NO: 2173183 - RNA, 19 nt, Homo sapiens
  misc_RNA (1)...(19): siRNA sense strand
gucaguuucuaguaaagua

SEQ ID NO: 2173184 - RNA, 19 nt, Homo sapiens
  misc_RNA (1)...(19): siRNA sense strand
ucagauauuuggaggauac

SEQ ID NO: 2173185 - RNA, 19 nt, Homo sapiens
  misc_RNA (1)...(19): siRNA sense strand
gaugugaaauacccugagu

SEQ ID NO: 2173186 - RNA, 19 nt, Homo sapiens
  misc_RNA (1)...(19): siRNA sense strand
cuaauguucuuacacuuuc

SEQ ID NO: 2173187 - RNA, 19 nt, Homo sapiens
  misc_RNA (1)...(19): siRNA sense strand
aaagaugguuccagcuuca

SEQ ID NO: 2173188 - RNA, 19 nt, Homo sapiens
  misc_RNA (1)...(19): siRNA sense strand
ggccaccacucuuguuugu

SEQ ID NO: 2173189 - RNA, 19 nt, Homo sapiens
  misc_RNA (1)...(19): siRNA sense strand
caaucaguauucacaacaa

SEQ ID NO: 2173190 - RNA, 19 nt, Homo sapiens
  misc_RNA (1)...(19): siRNA sense strand
caaagagguucacuaucca

SEQ ID NO: 2173191 - RNA, 19 nt, Homo sapiens
  misc_RNA (1)...(19): siRNA sense strand
aagaagaugcccaugaauu

SEQ ID NO: 2173192 - RNA, 19 nt, Homo sapiens
  misc_RNA (1)...(19): siRNA sense strand
ugaauggcagcaauaaauu

SEQ ID NO: 2173193 - RNA, 19 nt, Homo sapiens
  misc_RNA (1)...(19): siRNA sense strand
agagagagcaggagcaaga

SEQ ID NO: 2173194 - RNA, 19 nt, Homo sapiens
  misc_RNA (1)...(19): siRNA sense strand
cauuaccaauucugcagua

SEQ ID NO: 2173195 - RNA, 19 nt, Homo sapiens
  misc_RNA (1)...(19): siRNA sense strand
gcuucccucucacaugaua

SEQ ID NO: 2173196 - RNA, 19 nt, Homo sapiens
  misc_RNA (1)...(19): siRNA sense strand
uugcuaaggaugugaaaua

SEQ ID NO: 2173197 - RNA, 19 nt, Homo sapiens
  misc_RNA (1)...(19): siRNA sense strand
ggugcugugucuucauuga

SEQ ID NO: 2173198 - RNA, 19 nt, Homo sapiens
  misc_RNA (1)...(19): siRNA sense strand
uguuaaagauucagaacug

SEQ ID NO: 2173199 - RNA, 19 nt, Homo sapiens
  misc_RNA (1)...(19): siRNA sense strand
agaagagacauucaagaaa

SEQ ID NO: 2173200 - RNA, 19 nt, Homo sapiens
  misc_RNA (1)...(19): siRNA sense strand
agaagaugcccaugaauuc

SEQ ID NO: 2173201 - RNA, 19 nt, Homo sapiens
  misc_RNA (1)...(19): siRNA sense strand
cagcgacagugacccgaaa

SEQ ID NO: 2173202 - RNA, 19 nt, Homo sapiens
  misc_RNA (1)...(19): siRNA sense strand
agacauggaugcagguucu

SEQ ID NO: 2173203 - RNA, 19 nt, Homo sapiens
  misc_RNA (1)...(19): siRNA sense strand
ucaaaucacacacuuucuu

SEQ ID NO: 2173204 - RNA, 19 nt, Homo sapiens
  misc_RNA (1)...(19): siRNA sense strand
gaguucaucuguaccugau

SEQ ID NO: 2173205 - RNA, 19 nt, Homo sapiens
  misc_RNA (1)...(19): siRNA sense strand
caggguggcuuuccucucu

SEQ ID NO: 2173206 - RNA, 19 nt, Homo sapiens
  misc_RNA (1)...(19): siRNA sense strand
ucaaaaccaucaccacaaa

SEQ ID NO: 2173207 - RNA, 19 nt, Homo sapiens
  misc_RNA (1)...(19): siRNA sense strand
cagaaaaucccuuugcuaa

SEQ ID NO: 2173208 - RNA, 19 nt, Homo sapiens
  misc_RNA (1)...(19): siRNA sense strand
ccucugguaucaaaugaau

SEQ ID NO: 2173209 - RNA, 19 nt, Homo sapiens
  misc_RNA (1)...(19): siRNA sense strand
gauauuuggaggauaccua

SEQ ID NO: 2173210 - RNA, 19 nt, Homo sapiens
  misc_RNA (1)...(19): siRNA sense strand
ugcaagggcguuucagaua

SEQ ID NO: 2173211 - RNA, 19 nt, Homo sapiens
  misc_RNA (1)...(19): siRNA sense strand
gcaggacucagaccucuca

SEQ ID NO: 2173212 - RNA, 19 nt, Homo sapiens
  misc_RNA (1)...(19): siRNA sense strand
caucgcuccuccacagaaa

SEQ ID NO: 2173213 - RNA, 19 nt, Homo sapiens
  misc_RNA (1)...(19): siRNA sense strand
caacggagagccaauuguc

SEQ ID NO: 2173214 - RNA, 19 nt, Homo sapiens
  misc_RNA (1)...(19): siRNA sense strand
uagcuaggcacuuccguuu

SEQ ID NO: 2173215 - RNA, 19 nt, Homo sapiens
  misc_RNA (1)...(19): siRNA sense strand
aaauggaggugaacuuacu

SEQ ID NO: 2173216 - RNA, 19 nt, Homo sapiens
  misc_RNA (1)...(19): siRNA sense strand
gcuaggcacuuccguuuug

SEQ ID NO: 2173217 - RNA, 19 nt, Homo sapiens
  misc_RNA (1)...(19): siRNA sense strand
agaagagccuaaagcaaag

SEQ ID NO: 2173218 - RNA, 19 nt, Homo sapiens
  misc_RNA (1)...(19): siRNA sense strand
gcaaauccaagcugaacuc

SEQ ID NO: 2173219 - RNA, 19 nt, Homo sapiens
  misc_RNA (1)...(19): siRNA sense strand
agaauccaccucacuuaaa

SEQ ID NO: 2173220 - RNA, 19 nt, Homo sapiens
  misc_RNA (1)...(19): siRNA sense strand
ggaggugaacuuacucauc

SEQ ID NO: 2173221 - RNA, 19 nt, Homo sapiens
  misc_RNA (1)...(19): siRNA sense strand
gaacagcuugauggagaaa

SEQ ID NO: 2173222 - RNA, 19 nt, Homo sapiens
  misc_RNA (1)...(19): siRNA sense strand
aauggccucugguaucaaa

SEQ ID NO: 2173223 - RNA, 19 nt, Homo sapiens
  misc_RNA (1)...(19): siRNA sense strand
ugagaaaacgaaacacuua

SEQ ID NO: 2173224 - RNA, 19 nt, Homo sapiens
  misc_RNA (1)...(19): siRNA sense strand
gaaaggcucgacggaugaa

SEQ ID NO: 2173225 - RNA, 19 nt, Homo sapiens
  misc_RNA (1)...(19): siRNA sense strand
ggagaaagaucgccaguca

SEQ ID NO: 2173226 - RNA, 19 nt, Homo sapiens
  misc_RNA (1)...(19): siRNA sense strand
cagaagauuugcucuauga

SEQ ID NO: 2173227 - RNA, 19 nt, Homo sapiens
  misc_RNA (1)...(19): siRNA sense strand
gaauaaguccugaauuaga

SEQ ID NO: 2173228 - RNA, 19 nt, Homo sapiens
  misc_RNA (1)...(19): siRNA sense strand
gagcagaucgccaaacuga

SEQ ID NO: 2173229 - RNA, 19 nt, Homo sapiens
  misc_RNA (1)...(19): siRNA sense strand
agacaaagcuacucagaca

SEQ ID NO: 2173230 - RNA, 19 nt, Homo sapiens
  misc_RNA (1)...(19): siRNA sense strand
guucggaccucuaguacaa

SEQ ID NO: 2173231 - RNA, 19 nt, Homo sapiens
  misc_RNA (1)...(19): siRNA sense strand
uuacgucucuuucugauga

SEQ ID NO: 2173232 - RNA, 19 nt, Homo sapiens
  misc_RNA (1)...(19): siRNA sense strand
gcucuaugaucgugauaaa

SEQ ID NO: 2173233 - RNA, 19 nt, Homo sapiens
  misc_RNA (1)...(19): siRNA sense strand
gggaguagcucaccguuac

SEQ ID NO: 2173234 - RNA, 19 nt, Homo sapiens
  misc_RNA (1)...(19): siRNA sense strand
gcucagaacuaugugauca

SEQ ID NO: 2173235 - RNA, 19 nt, Homo sapiens
  misc_RNA (1)...(19): siRNA sense strand
caacagaagauuugcucua

SEQ ID NO: 2173236 - RNA, 19 nt, Homo sapiens
  misc_RNA (1)...(19): siRNA sense strand
gaaggucuuugaggaaaug

SEQ ID NO: 2173237 - RNA, 19 nt, Homo sapiens
  misc_RNA (1)...(19): siRNA sense strand
gcucaccguuacccaagua

SEQ ID NO: 2173238 - RNA, 19 nt, Homo sapiens
  misc_RNA (1)...(19): siRNA sense strand
agaacuaugugaucaucua

SEQ ID NO: 2173239 - RNA, 19 nt, Homo sapiens
  misc_RNA (1)...(19): siRNA sense strand
caaguucggaccucuagua

SEQ ID NO: 2173240 - RNA, 19 nt, Homo sapiens
  misc_RNA (1)...(19): siRNA sense strand
gaacuaugugaucaucuaa

SEQ ID NO: 2173241 - RNA, 19 nt, Homo sapiens
  misc_RNA (1)...(19): siRNA sense strand
ggaucaaggucaguuccua

SEQ ID NO: 2173242 - RNA, 19 nt, Homo sapiens
  misc_RNA (1)...(19): siRNA sense strand
gauaaagacagugggagua

SEQ ID NO: 2173243 - RNA, 19 nt, Homo sapiens
  misc_RNA (1)...(19): siRNA sense strand
gugaaggucuuugaggaaa

SEQ ID NO: 2173244 - RNA, 19 nt, Homo sapiens
  misc_RNA (1)...(19): siRNA sense strand
ggaauaaguccugaauuag

SEQ ID NO: 2173245 - RNA, 19 nt, Homo sapiens
  misc_RNA (1)...(19): siRNA sense strand
cuacaacgcaguaaacaga

SEQ ID NO: 2173246 - RNA, 19 nt, Homo sapiens
  misc_RNA (1)...(19): siRNA sense strand
cagaguagucgucacagua

SEQ ID NO: 2173247 - RNA, 19 nt, Homo sapiens
  misc_RNA (1)...(19): siRNA sense strand
gaugguagcccuugcucaa

SEQ ID NO: 2173248 - RNA, 19 nt, Homo sapiens
  misc_RNA (1)...(19): siRNA sense strand
gcagagcggacaaggcaaa

SEQ ID NO: 2173249 - RNA, 19 nt, Homo sapiens
  misc_RNA (1)...(19): siRNA sense strand
ucagcuuucuguccuguaa

SEQ ID NO: 2173250 - RNA, 19 nt, Homo sapiens
  misc_RNA (1)...(19): siRNA sense strand
ccaaacaacagcuacaugu

SEQ ID NO: 2173251 - RNA, 19 nt, Homo sapiens
  misc_RNA (1)...(19): siRNA sense strand
gaagauuugcucuaugauc

SEQ ID NO: 2173252 - RNA, 19 nt, Homo sapiens
  misc_RNA (1)...(19): siRNA sense strand
cgaaccuccucuuuggaua

SEQ ID NO: 2173253 - RNA, 19 nt, Homo sapiens
  misc_RNA (1)...(19): siRNA sense strand
gcaacuacaacgcaguaaa

SEQ ID NO: 2173254 - RNA, 19 nt, Homo sapiens
  misc_RNA (1)...(19): siRNA sense strand
gaucgccagucaccucuuc

SEQ ID NO: 2173255 - RNA, 19 nt, Homo sapiens
  misc_RNA (1)...(19): siRNA sense strand
ccuaugccacugucaaaua

SEQ ID NO: 2173256 - RNA, 19 nt, Homo sapiens
  misc_RNA (1)...(19): siRNA sense strand
cuaugccacugucaaauau

SEQ ID NO: 2173257 - RNA, 19 nt, Homo sapiens
  misc_RNA (1)...(19): siRNA sense strand
ucggaccucuaguacaaua

SEQ ID NO: 2173258 - RNA, 19 nt, Homo sapiens
  misc_RNA (1)...(19): siRNA sense strand
caauguagaaggaauaagu

SEQ ID NO: 2173259 - RNA, 19 nt, Homo sapiens
  misc_RNA (1)...(19): siRNA sense strand
gcccugcaauguagaagga

SEQ ID NO: 2173260 - RNA, 19 nt, Homo sapiens
  misc_RNA (1)...(19): siRNA sense strand
ucuaugaucgugauaaaga

SEQ ID NO: 2173261 - RNA, 19 nt, Homo sapiens
  misc_RNA (1)...(19): siRNA sense strand
caacgcaguaaacagagua

SEQ ID NO: 2173262 - RNA, 19 nt, Homo sapiens
  misc_RNA (1)...(19): siRNA sense strand
aacagaagauuugcucuau

SEQ ID NO: 2173263 - RNA, 19 nt, Homo sapiens
  misc_RNA (1)...(19): siRNA sense strand
ggaaggaagaaguauccaa

SEQ ID NO: 2173264 - RNA, 19 nt, Homo sapiens
  misc_RNA (1)...(19): siRNA sense strand
gaucaaggucaguuccuau

SEQ ID NO: 2173265 - RNA, 19 nt, Homo sapiens
  misc_RNA (1)...(19): siRNA sense strand
ggggagugcugaucaacua

SEQ ID NO: 2173266 - RNA, 19 nt, Homo sapiens
  misc_RNA (1)...(19): siRNA sense strand
cuucugaccuuaugcucaa

SEQ ID NO: 2173267 - RNA, 19 nt, Homo sapiens
  misc_RNA (1)...(19): siRNA sense strand
ggagugcugaucaacuaaa

SEQ ID NO: 2173268 - RNA, 19 nt, Homo sapiens
  misc_RNA (1)...(19): siRNA sense strand
caacuacaacgcaguaaac

SEQ ID NO: 2173269 - RNA, 19 nt, Homo sapiens
  misc_RNA (1)...(19): siRNA sense strand
gcucagcuuuggcaacucu

SEQ ID NO: 2173270 - RNA, 19 nt, Homo sapiens
  misc_RNA (1)...(19): siRNA sense strand
ggcaaaaucucagcaaguu

SEQ ID NO: 2173271 - RNA, 19 nt, Homo sapiens
  misc_RNA (1)...(19): siRNA sense strand
aacaggaccuuaccucaca

SEQ ID NO: 2173272 - RNA, 19 nt, Homo sapiens
  misc_RNA (1)...(19): siRNA sense strand
agaguagucgucacaguaa

SEQ ID NO: 2173273 - RNA, 19 nt, Homo sapiens
  misc_RNA (1)...(19): siRNA sense strand
aaacagaguagucgucaca

SEQ ID NO: 2173274 - RNA, 19 nt, Homo sapiens
  misc_RNA (1)...(19): siRNA sense strand
cagcaacuacaacgcagua

SEQ ID NO: 2173275 - RNA, 19 nt, Homo sapiens
  misc_RNA (1)...(19): siRNA sense strand
gccacgggauccucauguu

SEQ ID NO: 2173276 - RNA, 19 nt, Homo sapiens
  misc_RNA (1)...(19): siRNA sense strand
uaaugggaaggaagaagua

SEQ ID NO: 2173277 - RNA, 19 nt, Homo sapiens
  misc_RNA (1)...(19): siRNA sense strand
ugaaagacaaagcuacuca

SEQ ID NO: 2173278 - RNA, 19 nt, Homo sapiens
  misc_RNA (1)...(19): siRNA sense strand
ucagaacuaugugaucauc

SEQ ID NO: 2173279 - RNA, 19 nt, Homo sapiens
  misc_RNA (1)...(19): siRNA sense strand
gcagaagagggugcagaaa

SEQ ID NO: 2173280 - RNA, 19 nt, Homo sapiens
  misc_RNA (1)...(19): siRNA sense strand
gcaaccauauaacaaucag

SEQ ID NO: 2173281 - RNA, 19 nt, Homo sapiens
  misc_RNA (1)...(19): siRNA sense strand
gaugugagcgagugaaggu

SEQ ID NO: 2173282 - RNA, 19 nt, Homo sapiens
  misc_RNA (1)...(19): siRNA sense strand
ccaaaccaaacaacagcua

SEQ ID NO: 2173283 - RNA, 19 nt, Homo sapiens
  misc_RNA (1)...(19): siRNA sense strand
acagaagauuugcucuaug

SEQ ID NO: 2173284 - RNA, 19 nt, Homo sapiens
  misc_RNA (1)...(19): siRNA sense strand
uaaggcgaaccuccucuuu

SEQ ID NO: 2173285 - RNA, 19 nt, Homo sapiens
  misc_RNA (1)...(19): siRNA sense strand
cgugugcccugcaauguag

SEQ ID NO: 2173286 - RNA, 19 nt, Homo sapiens
  misc_RNA (1)...(19): siRNA sense strand
aaagacaaagcuacucaga

SEQ ID NO: 2173287 - RNA, 19 nt, Homo sapiens
  misc_RNA (1)...(19): siRNA sense strand
cuucaucucccaaaccaaa

SEQ ID NO: 2173288 - RNA, 19 nt, Homo sapiens
  misc_RNA (1)...(19): siRNA sense strand
gcgugugcccugcaaugua

SEQ ID NO: 2173289 - RNA, 19 nt, Homo sapiens
  misc_RNA (1)...(19): siRNA sense strand
gugccaaaaucaucuguuu

SEQ ID NO: 2173290 - RNA, 19 nt, Homo sapiens
  misc_RNA (1)...(19): siRNA sense strand
uaacaaucagucacacuca

SEQ ID NO: 2173291 - RNA, 19 nt, Homo sapiens
  misc_RNA (1)...(19): siRNA sense strand
aaacugaggcagcaacuac

SEQ ID NO: 2173292 - RNA, 19 nt, Homo sapiens
  misc_RNA (1)...(19): siRNA sense strand
gaaccuccucuuuggauac

SEQ ID NO: 2173293 - RNA, 19 nt, Homo sapiens
  misc_RNA (1)...(19): siRNA sense strand
gggauccucauguucacua

SEQ ID NO: 2173294 - RNA, 19 nt, Homo sapiens
  misc_RNA (1)...(19): siRNA sense strand
gcgaaccuccucuuuggau

SEQ ID NO: 2173295 - RNA, 19 nt, Homo sapiens
  misc_RNA (1)...(19): siRNA sense strand
ugaaggucuuugaggaaau

SEQ ID NO: 2173296 - RNA, 19 nt, Homo sapiens
  misc_RNA (1)...(19): siRNA sense strand
aggcgaaccuccucuuugg

SEQ ID NO: 2173297 - RNA, 19 nt, Homo sapiens
  misc_RNA (1)...(19): siRNA sense strand
ggcagaagagggugcagaa

SEQ ID NO: 2173298 - RNA, 19 nt, Homo sapiens
  misc_RNA (1)...(19): siRNA sense strand
aagagcagaucgccaaacu

SEQ ID NO: 2173299 - RNA, 19 nt, Homo sapiens
  misc_RNA (1)...(19): siRNA sense strand
guaguacucgcagcauuga

SEQ ID NO: 2173300 - RNA, 19 nt, Homo sapiens
  misc_RNA (1)...(19): siRNA sense strand
cauauaacaaucagucaca

SEQ ID NO: 2173301 - RNA, 19 nt, Homo sapiens
  misc_RNA (1)...(19): siRNA sense strand
uggcaaccauauaacaauc

SEQ ID NO: 2173302 - RNA, 19 nt, Homo sapiens
  misc_RNA (1)...(19): siRNA sense strand
ggaccucuaguacaauaag

SEQ ID NO: 2173303 - RNA, 19 nt, Homo sapiens
  misc_RNA (1)...(19): siRNA sense strand
gaccuuaugcucaagaacu

SEQ ID NO: 2173304 - RNA, 19 nt, Homo sapiens
  misc_RNA (1)...(19): siRNA sense strand
uuaccugcuucugaccuua

SEQ ID NO: 2173305 - RNA, 19 nt, Homo sapiens
  misc_RNA (1)...(19): siRNA sense strand
cagcucucaucccggguuu

SEQ ID NO: 2173306 - RNA, 19 nt, Homo sapiens
  misc_RNA (1)...(19): siRNA sense strand
cauguucacuacccuucau

SEQ ID NO: 2173307 - RNA, 19 nt, Homo sapiens
  misc_RNA (1)...(19): siRNA sense strand
cauuaccggagcaguagua

SEQ ID NO: 2173308 - RNA, 19 nt, Homo sapiens
  misc_RNA (1)...(19): siRNA sense strand
caaauauaucagugccaaa

SEQ ID NO: 2173309 - RNA, 19 nt, Homo sapiens
  misc_RNA (1)...(19): siRNA sense strand
cagaagagggugcagaaaa

SEQ ID NO: 2173310 - RNA, 19 nt, Homo sapiens
  misc_RNA (1)...(19): siRNA sense strand
guccaggagcgcagcagua

SEQ ID NO: 2173311 - RNA, 19 nt, Homo sapiens
  misc_RNA (1)...(19): siRNA sense strand
caaacugaggcagcaacua

SEQ ID NO: 2173312 - RNA, 19 nt, Homo sapiens
  misc_RNA (1)...(19): siRNA sense strand
gaguagucgucacaguaag

SEQ ID NO: 2173313 - RNA, 19 nt, Homo sapiens
  misc_RNA (1)...(19): siRNA sense strand
ccacgggauccucauguuc

SEQ ID NO: 2173314 - RNA, 19 nt, Homo sapiens
  misc_RNA (1)...(19): siRNA sense strand
augccacugucaaauauau

SEQ ID NO: 2173315 - RNA, 19 nt, Homo sapiens
  misc_RNA (1)...(19): siRNA sense strand
gggagugcugaucaacuaa

SEQ ID NO: 2173316 - RNA, 19 nt, Homo sapiens
  misc_RNA (1)...(19): siRNA sense strand
caucccggguuuccuuuac

SEQ ID NO: 2173317 - RNA, 19 nt, Homo sapiens
  misc_RNA (1)...(19): siRNA sense strand
ugguagcccuugcucaaca

SEQ ID NO: 2173318 - RNA, 19 nt, Homo sapiens
  misc_RNA (1)...(19): siRNA sense strand
acagaguagucgucacagu

SEQ ID NO: 2173319 - RNA, 19 nt, Homo sapiens
  misc_RNA (1)...(19): siRNA sense strand
cagcaaguucggaccucua

SEQ ID NO: 2173320 - RNA, 19 nt, Homo sapiens
  misc_RNA (1)...(19): siRNA sense strand
ggagaaagaucgccaguca

SEQ ID NO: 2173321 - RNA, 19 nt, Homo sapiens
  misc_RNA (1)...(19): siRNA sense strand
cagaagauuugcucuauga

SEQ ID NO: 2173322 - RNA, 19 nt, Homo sapiens
  misc_RNA (1)...(19): siRNA sense strand
gaauaaguccugaauuaga

SEQ ID NO: 2173323 - RNA, 19 nt, Homo sapiens
  misc_RNA (1)...(19): siRNA sense strand
gagcagaucgccaaacuga

SEQ ID NO: 2173324 - RNA, 19 nt, Homo sapiens
  misc_RNA (1)...(19): siRNA sense strand
agacaaagcuacucagaca

SEQ ID NO: 2173325 - RNA, 19 nt, Homo sapiens
  misc_RNA (1)...(19): siRNA sense strand
guucggaccucuaguacaa

SEQ ID NO: 2173326 - RNA, 19 nt, Homo sapiens
  misc_RNA (1)...(19): siRNA sense strand
uuacgucucuuucugauga

SEQ ID NO: 2173327 - RNA, 19 nt, Homo sapiens
  misc_RNA (1)...(19): siRNA sense strand
gcucuaugaucgugauaaa

SEQ ID NO: 2173328 - RNA, 19 nt, Homo sapiens
  misc_RNA (1)...(19): siRNA sense strand
gggaguagcucaccguuac

SEQ ID NO: 2173329 - RNA, 19 nt, Homo sapiens
  misc_RNA (1)...(19): siRNA sense strand
gcucagaacuaugugauca

SEQ ID NO: 2173330 - RNA, 19 nt, Homo sapiens
  misc_RNA (1)...(19): siRNA sense strand
caacagaagauuugcucua

SEQ ID NO: 2173331 - RNA, 19 nt, Homo sapiens
  misc_RNA (1)...(19): siRNA sense strand
gaaggucuuugaggaaaug

SEQ ID NO: 2173332 - RNA, 19 nt, Homo sapiens
  misc_RNA (1)...(19): siRNA sense strand
gcucaccguuacccaagua

SEQ ID NO: 2173333 - RNA, 19 nt, Homo sapiens
  misc_RNA (1)...(19): siRNA sense strand
agaacuaugugaucaucua

SEQ ID NO: 2173334 - RNA, 19 nt, Homo sapiens
  misc_RNA (1)...(19): siRNA sense strand
caaguucggaccucuagua

SEQ ID NO: 2173335 - RNA, 19 nt, Homo sapiens
  misc_RNA (1)...(19): siRNA sense strand
gaacuaugugaucaucuaa

SEQ ID NO: 2173336 - RNA, 19 nt, Homo sapiens
  misc_RNA (1)...(19): siRNA sense strand
ggaucaaggucaguuccua

SEQ ID NO: 2173337 - RNA, 19 nt, Homo sapiens
  misc_RNA (1)...(19): siRNA sense strand
gauaaagacagugggagua

SEQ ID NO: 2173338 - RNA, 19 nt, Homo sapiens
  misc_RNA (1)...(19): siRNA sense strand
gugaaggucuuugaggaaa

SEQ ID NO: 2173339 - RNA, 19 nt, Homo sapiens
  misc_RNA (1)...(19): siRNA sense strand
ggaauaaguccugaauuag

SEQ ID NO: 2173340 - RNA, 19 nt, Homo sapiens
  misc_RNA (1)...(19): siRNA sense strand
cuacaacgcaguaaacaga

SEQ ID NO: 2173341 - RNA, 19 nt, Homo sapiens
  misc_RNA (1)...(19): siRNA sense strand
cagaguagucgucacagua

SEQ ID NO: 2173342 - RNA, 19 nt, Homo sapiens
  misc_RNA (1)...(19): siRNA sense strand
gaugguagcccuugcucaa

SEQ ID NO: 2173343 - RNA, 19 nt, Homo sapiens
  misc_RNA (1)...(19): siRNA sense strand
gcagagcggacaaggcaaa

SEQ ID NO: 2173344 - RNA, 19 nt, Homo sapiens
  misc_RNA (1)...(19): siRNA sense strand
ucagcuuucuguccuguaa

SEQ ID NO: 2173345 - RNA, 19 nt, Homo sapiens
  misc_RNA (1)...(19): siRNA sense strand
ccaaacaacagcuacaugu

SEQ ID NO: 2173346 - RNA, 19 nt, Homo sapiens
  misc_RNA (1)...(19): siRNA sense strand
gaagauuugcucuaugauc

SEQ ID NO: 2173347 - RNA, 19 nt, Homo sapiens
  misc_RNA (1)...(19): siRNA sense strand
cgaaccuccucuuuggaua

SEQ ID NO: 2173348 - RNA, 19 nt, Homo sapiens
  misc_RNA (1)...(19): siRNA sense strand
gcaacuacaacgcaguaaa

SEQ ID NO: 2173349 - RNA, 19 nt, Homo sapiens
  misc_RNA (1)...(19): siRNA sense strand
gaucgccagucaccucuuc

SEQ ID NO: 2173350 - RNA, 19 nt, Homo sapiens
  misc_RNA (1)...(19): siRNA sense strand
ccuaugccacugucaaaua

SEQ ID NO: 2173351 - RNA, 19 nt, Homo sapiens
  misc_RNA (1)...(19): siRNA sense strand
cuaugccacugucaaauau

SEQ ID NO: 2173352 - RNA, 19 nt, Homo sapiens
  misc_RNA (1)...(19): siRNA sense strand
ucggaccucuaguacaaua

SEQ ID NO: 2173353 - RNA, 19 nt, Homo sapiens
  misc_RNA (1)...(19): siRNA sense strand
caauguagaaggaauaagu

SEQ ID NO: 2173354 - RNA, 19 nt, Homo sapiens
  misc_RNA (1)...(19): siRNA sense strand
gcccugcaauguagaagga

SEQ ID NO: 2173355 - RNA, 19 nt, Homo sapiens
  misc_RNA (1)...(19): siRNA sense strand
ucuaugaucgugauaaaga

SEQ ID NO: 2173356 - RNA, 19 nt, Homo sapiens
  misc_RNA (1)...(19): siRNA sense strand
caacgcaguaaacagagua

SEQ ID NO: 2173357 - RNA, 19 nt, Homo sapiens
  misc_RNA (1)...(19): siRNA sense strand
aacagaagauuugcucuau

SEQ ID NO: 2173358 - RNA, 19 nt, Homo sapiens
  misc_RNA (1)...(19): siRNA sense strand
ggaaggaagaaguauccaa

SEQ ID NO: 2173359 - RNA, 19 nt, Homo sapiens
  misc_RNA (1)...(19): siRNA sense strand
gaucaaggucaguuccuau

SEQ ID NO: 2173360 - RNA, 19 nt, Homo sapiens
  misc_RNA (1)...(19): siRNA sense strand
ggggagugcugaucaacua

SEQ ID NO: 2173361 - RNA, 19 nt, Homo sapiens
  misc_RNA (1)...(19): siRNA sense strand
cuucugaccuuaugcucaa

SEQ ID NO: 2173362 - RNA, 19 nt, Homo sapiens
  misc_RNA (1)...(19): siRNA sense strand
ggagugcugaucaacuaaa

SEQ ID NO: 2173363 - RNA, 19 nt, Homo sapiens
  misc_RNA (1)...(19): siRNA sense strand
caacuacaacgcaguaaac

SEQ ID NO: 2173364 - RNA, 19 nt, Homo sapiens
  misc_RNA (1)...(19): siRNA sense strand
gcucagcuuuggcaacucu

SEQ ID NO: 2173365 - RNA, 19 nt, Homo sapiens
  misc_RNA (1)...(19): siRNA sense strand
ggcaaaaucucagcaaguu

SEQ ID NO: 2173366 - RNA, 19 nt, Homo sapiens
  misc_RNA (1)...(19): siRNA sense strand
aacaggaccuuaccucaca

SEQ ID NO: 2173367 - RNA, 19 nt, Homo sapiens
  misc_RNA (1)...(19): siRNA sense strand
agaguagucgucacaguaa

SEQ ID NO: 2173368 - RNA, 19 nt, Homo sapiens
  misc_RNA (1)...(19): siRNA sense strand
aaacagaguagucgucaca

SEQ ID NO: 2173369 - RNA, 19 nt, Homo sapiens
  misc_RNA (1)...(19): siRNA sense strand
cagcaacuacaacgcagua

SEQ ID NO: 2173370 - RNA, 19 nt, Homo sapiens
  misc_RNA (1)...(19): siRNA sense strand
gccacgggauccucauguu

SEQ ID NO: 2173371 - RNA, 19 nt, Homo sapiens
  misc_RNA (1)...(19): siRNA sense strand
uaaugggaaggaagaagua

SEQ ID NO: 2173372 - RNA, 19 nt, Homo sapiens
  misc_RNA (1)...(19): siRNA sense strand
ugaaagacaaagcuacuca

SEQ ID NO: 2173373 - RNA, 19 nt, Homo sapiens
  misc_RNA (1)...(19): siRNA sense strand
ucagaacuaugugaucauc

SEQ ID NO: 2173374 - RNA, 19 nt, Homo sapiens
  misc_RNA (1)...(19): siRNA sense strand
gcagaagagggugcagaaa

SEQ ID NO: 2173375 - RNA, 19 nt, Homo sapiens
  misc_RNA (1)...(19): siRNA sense strand
gcaaccauauaacaaucag

SEQ ID NO: 2173376 - RNA, 19 nt, Homo sapiens
  misc_RNA (1)...(19): siRNA sense strand
gaugugagcgagugaaggu

SEQ ID NO: 2173377 - RNA, 19 nt, Homo sapiens
  misc_RNA (1)...(19): siRNA sense strand
ccaaaccaaacaacagcua

SEQ ID NO: 2173378 - RNA, 19 nt, Homo sapiens
  misc_RNA (1)...(19): siRNA sense strand
acagaagauuugcucuaug

SEQ ID NO: 2173379 - RNA, 19 nt, Homo sapiens
  misc_RNA (1)...(19): siRNA sense strand
uaaggcgaaccuccucuuu

SEQ ID NO: 2173380 - RNA, 19 nt, Homo sapiens
  misc_RNA (1)...(19): siRNA sense strand
cgugugcccugcaauguag

SEQ ID NO: 2173381 - RNA, 19 nt, Homo sapiens
  misc_RNA (1)...(19): siRNA sense strand
aaagacaaagcuacucaga

SEQ ID NO: 2173382 - RNA, 19 nt, Homo sapiens
  misc_RNA (1)...(19): siRNA sense strand
cuucaucucccaaaccaaa

SEQ ID NO: 2173383 - RNA, 19 nt, Homo sapiens
  misc_RNA (1)...(19): siRNA sense strand
gcgugugcccugcaaugua

SEQ ID NO: 2173384 - RNA, 19 nt, Homo sapiens
  misc_RNA (1)...(19): siRNA sense strand
gugccaaaaucaucuguuu

SEQ ID NO: 2173385 - RNA, 19 nt, Homo sapiens
  misc_RNA (1)...(19): siRNA sense strand
uaacaaucagucacacuca

SEQ ID NO: 2173386 - RNA, 19 nt, Homo sapiens
  misc_RNA (1)...(19): siRNA sense strand
aaacugaggcagcaacuac

SEQ ID NO: 2173387 - RNA, 19 nt, Homo sapiens
  misc_RNA (1)...(19): siRNA sense strand
gaaccuccucuuuggauac

SEQ ID NO: 2173388 - RNA, 19 nt, Homo sapiens
  misc_RNA (1)...(19): siRNA sense strand
gggauccucauguucacua

SEQ ID NO: 2173389 - RNA, 19 nt, Homo sapiens
  misc_RNA (1)...(19): siRNA sense strand
gcgaaccuccucuuuggau

SEQ ID NO: 2173390 - RNA, 19 nt, Homo sapiens
  misc_RNA (1)...(19): siRNA sense strand
ugaaggucuuugaggaaau

SEQ ID NO: 2173391 - RNA, 19 nt, Homo sapiens
  misc_RNA (1)...(19): siRNA sense strand
aggcgaaccuccucuuugg

SEQ ID NO: 2173392 - RNA, 19 nt, Homo sapiens
  misc_RNA (1)...(19): siRNA sense strand
ggcagaagagggugcagaa

SEQ ID NO: 2173393 - RNA, 19 nt, Homo sapiens
  misc_RNA (1)...(19): siRNA sense strand
aagagcagaucgccaaacu

SEQ ID NO: 2173394 - RNA, 19 nt, Homo sapiens
  misc_RNA (1)...(19): siRNA sense strand
guaguacucgcagcauuga

SEQ ID NO: 2173395 - RNA, 19 nt, Homo sapiens
  misc_RNA (1)...(19): siRNA sense strand
cauauaacaaucagucaca

SEQ ID NO: 2173396 - RNA, 19 nt, Homo sapiens
  misc_RNA (1)...(19): siRNA sense strand
uggcaaccauauaacaauc

SEQ ID NO: 2173397 - RNA, 19 nt, Homo sapiens
  misc_RNA (1)...(19): siRNA sense strand
ggaccucuaguacaauaag

SEQ ID NO: 2173398 - RNA, 19 nt, Homo sapiens
  misc_RNA (1)...(19): siRNA sense strand
gaccuuaugcucaagaacu

SEQ ID NO: 2173399 - RNA, 19 nt, Homo sapiens
  misc_RNA (1)...(19): siRNA sense strand
uuaccugcuucugaccuua

SEQ ID NO: 2173400 - RNA, 19 nt, Homo sapiens
  misc_RNA (1)...(19): siRNA sense strand
cagcucucaucccggguuu

SEQ ID NO: 2173401 - RNA, 19 nt, Homo sapiens
  misc_RNA (1)...(19): siRNA sense strand
cauguucacuacccuucau

SEQ ID NO: 2173402 - RNA, 19 nt, Homo sapiens
  misc_RNA (1)...(19): siRNA sense strand
cauuaccggagcaguagua

SEQ ID NO: 2173403 - RNA, 19 nt, Homo sapiens
  misc_RNA (1)...(19): siRNA sense strand
caaauauaucagugccaaa

SEQ ID NO: 2173404 - RNA, 19 nt, Homo sapiens
  misc_RNA (1)...(19): siRNA sense strand
cagaagagggugcagaaaa

SEQ ID NO: 2173405 - RNA, 19 nt, Homo sapiens
  misc_RNA (1)...(19): siRNA sense strand
guccaggagcgcagcagua

SEQ ID NO: 2173406 - RNA, 19 nt, Homo sapiens
  misc_RNA (1)...(19): siRNA sense strand
caaacugaggcagcaacua

SEQ ID NO: 2173407 - RNA, 19 nt, Homo sapiens
  misc_RNA (1)...(19): siRNA sense strand
gaguagucgucacaguaag

SEQ ID NO: 2173408 - RNA, 19 nt, Homo sapiens
  misc_RNA (1)...(19): siRNA sense strand
ccacgggauccucauguuc

SEQ ID NO: 2173409 - RNA, 19 nt, Homo sapiens
  misc_RNA (1)...(19): siRNA sense strand
augccacugucaaauauau

SEQ ID NO: 2173410 - RNA, 19 nt, Homo sapiens
  misc_RNA (1)...(19): siRNA sense strand
gggagugcugaucaacuaa

SEQ ID NO: 2173411 - RNA, 19 nt, Homo sapiens
  misc_RNA (1)...(19): siRNA sense strand
caucccggguuuccuuuac

SEQ ID NO: 2173412 - RNA, 19 nt, Homo sapiens
  misc_RNA (1)...(19): siRNA sense strand
ugguagcccuugcucaaca

SEQ ID NO: 2173413 - RNA, 19 nt, Homo sapiens
  misc_RNA (1)...(19): siRNA sense strand
acagaguagucgucacagu

SEQ ID NO: 2173414 - RNA, 19 nt, Homo sapiens
  misc_RNA (1)...(19): siRNA sense strand
cagcaaguucggaccucua

SEQ ID NO: 2173415 - RNA, 19 nt, Homo sapiens
  misc_RNA (1)...(19): siRNA sense strand
ggaauucgcuguccaaaua

SEQ ID NO: 2173416 - RNA, 19 nt, Homo sapiens
  misc_RNA (1)...(19): siRNA sense strand
gaacauuucuuguguagua

SEQ ID NO: 2173417 - RNA, 19 nt, Homo sapiens
  misc_RNA (1)...(19): siRNA sense strand
ggacuacacugcauacuaa

SEQ ID NO: 2173418 - RNA, 19 nt, Homo sapiens
  misc_RNA (1)...(19): siRNA sense strand
gagaagaacuggcagauga

SEQ ID NO: 2173419 - RNA, 19 nt, Homo sapiens
  misc_RNA (1)...(19): siRNA sense strand
ggacagugcuaugaauaua

SEQ ID NO: 2173420 - RNA, 19 nt, Homo sapiens
  misc_RNA (1)...(19): siRNA sense strand
gaacaaauauugggacauc

SEQ ID NO: 2173421 - RNA, 19 nt, Homo sapiens
  misc_RNA (1)...(19): siRNA sense strand
gugaagagccugccuguua

SEQ ID NO: 2173422 - RNA, 19 nt, Homo sapiens
  misc_RNA (1)...(19): siRNA sense strand
ggaauucugugcugacauu

SEQ ID NO: 2173423 - RNA, 19 nt, Homo sapiens
  misc_RNA (1)...(19): siRNA sense strand
caacagugauggagaagaa

SEQ ID NO: 2173424 - RNA, 19 nt, Homo sapiens
  misc_RNA (1)...(19): siRNA sense strand
ggaaggaccugguuucuac

SEQ ID NO: 2173425 - RNA, 19 nt, Homo sapiens
  misc_RNA (1)...(19): siRNA sense strand
ggggaaagcugcugauuua

SEQ ID NO: 2173426 - RNA, 19 nt, Homo sapiens
  misc_RNA (1)...(19): siRNA sense strand
ggaccuaucccuaauacua

SEQ ID NO: 2173427 - RNA, 19 nt, Homo sapiens
  misc_RNA (1)...(19): siRNA sense strand
gcagaauuguuucaaaguu

SEQ ID NO: 2173428 - RNA, 19 nt, Homo sapiens
  misc_RNA (1)...(19): siRNA sense strand
gagaagaaguugacagaca

SEQ ID NO: 2173429 - RNA, 19 nt, Homo sapiens
  misc_RNA (1)...(19): siRNA sense strand
acugaaaccuuuaaccuua

SEQ ID NO: 2173430 - RNA, 19 nt, Homo sapiens
  misc_RNA (1)...(19): siRNA sense strand
gacaagagaacaaauauug

SEQ ID NO: 2173431 - RNA, 19 nt, Homo sapiens
  misc_RNA (1)...(19): siRNA sense strand
caagagaagcuuccaauga

SEQ ID NO: 2173432 - RNA, 19 nt, Homo sapiens
  misc_RNA (1)...(19): siRNA sense strand
gaacaaagaagccucaaag

SEQ ID NO: 2173433 - RNA, 19 nt, Homo sapiens
  misc_RNA (1)...(19): siRNA sense strand
gaaggcaguuuguggaaau

SEQ ID NO: 2173434 - RNA, 19 nt, Homo sapiens
  misc_RNA (1)...(19): siRNA sense strand
ccaggugacuguuauuuga

SEQ ID NO: 2173435 - RNA, 19 nt, Homo sapiens
  misc_RNA (1)...(19): siRNA sense strand
gaacagacaagagaacaaa

SEQ ID NO: 2173436 - RNA, 19 nt, Homo sapiens
  misc_RNA (1)...(19): siRNA sense strand
gaagaaggguacacugaag

SEQ ID NO: 2173437 - RNA, 19 nt, Homo sapiens
  misc_RNA (1)...(19): siRNA sense strand
gaucuaggcuuugguggaa

SEQ ID NO: 2173438 - RNA, 19 nt, Homo sapiens
  misc_RNA (1)...(19): siRNA sense strand
caguugaccugaaauauug

SEQ ID NO: 2173439 - RNA, 19 nt, Homo sapiens
  misc_RNA (1)...(19): siRNA sense strand
gcacuggaccuaucccuaa

SEQ ID NO: 2173440 - RNA, 19 nt, Homo sapiens
  misc_RNA (1)...(19): siRNA sense strand
aaaggaguguccagaauuu

SEQ ID NO: 2173441 - RNA, 19 nt, Homo sapiens
  misc_RNA (1)...(19): siRNA sense strand
caaagccaauggacuuaaa

SEQ ID NO: 2173442 - RNA, 19 nt, Homo sapiens
  misc_RNA (1)...(19): siRNA sense strand
aagaaggacuguauuguga

SEQ ID NO: 2173443 - RNA, 19 nt, Homo sapiens
  misc_RNA (1)...(19): siRNA sense strand
caaagcaguuuccggcaaa

SEQ ID NO: 2173444 - RNA, 19 nt, Homo sapiens
  misc_RNA (1)...(19): siRNA sense strand
gaacuggucagacuguauu

SEQ ID NO: 2173445 - RNA, 19 nt, Homo sapiens
  misc_RNA (1)...(19): siRNA sense strand
gaaagcugcugauuuaagc

SEQ ID NO: 2173446 - RNA, 19 nt, Homo sapiens
  misc_RNA (1)...(19): siRNA sense strand
gcacagauccccucuauga

SEQ ID NO: 2173447 - RNA, 19 nt, Homo sapiens
  misc_RNA (1)...(19): siRNA sense strand
uacaagaacuagagaauca

SEQ ID NO: 2173448 - RNA, 19 nt, Homo sapiens
  misc_RNA (1)...(19): siRNA sense strand
gaagggaccagaacaagga

SEQ ID NO: 2173449 - RNA, 19 nt, Homo sapiens
  misc_RNA (1)...(19): siRNA sense strand
ggaaugcccugugaacugu

SEQ ID NO: 2173450 - RNA, 19 nt, Homo sapiens
  misc_RNA (1)...(19): siRNA sense strand
gaaguacgaagcuguaaug

SEQ ID NO: 2173451 - RNA, 19 nt, Homo sapiens
  misc_RNA (1)...(19): siRNA sense strand
gaagguucguucuaaaugg

SEQ ID NO: 2173452 - RNA, 19 nt, Homo sapiens
  misc_RNA (1)...(19): siRNA sense strand
guacaugucagcugaguga

SEQ ID NO: 2173453 - RNA, 19 nt, Homo sapiens
  misc_RNA (1)...(19): siRNA sense strand
ccagaaagacaaagacauu

SEQ ID NO: 2173454 - RNA, 19 nt, Homo sapiens
  misc_RNA (1)...(19): siRNA sense strand
ugucaaaggucagauggua

SEQ ID NO: 2173455 - RNA, 19 nt, Homo sapiens
  misc_RNA (1)...(19): siRNA sense strand
ccugugaacugucagcuuu

SEQ ID NO: 2173456 - RNA, 19 nt, Homo sapiens
  misc_RNA (1)...(19): siRNA sense strand
cuaaugcuguugagaaaga

SEQ ID NO: 2173457 - RNA, 19 nt, Homo sapiens
  misc_RNA (1)...(19): siRNA sense strand
ccagagagguuaugugcau

SEQ ID NO: 2173458 - RNA, 19 nt, Homo sapiens
  misc_RNA (1)...(19): siRNA sense strand
guccaaaccugacggaguu

SEQ ID NO: 2173459 - RNA, 19 nt, Homo sapiens
  misc_RNA (1)...(19): siRNA sense strand
gaaaguacaaggagacauc

SEQ ID NO: 2173460 - RNA, 19 nt, Homo sapiens
  misc_RNA (1)...(19): siRNA sense strand
caacccaacccuccaguaa

SEQ ID NO: 2173461 - RNA, 19 nt, Homo sapiens
  misc_RNA (1)...(19): siRNA sense strand
cggaggauaucaucuguga

SEQ ID NO: 2173462 - RNA, 19 nt, Homo sapiens
  misc_RNA (1)...(19): siRNA sense strand
ucaaaggucagaugguaua

SEQ ID NO: 2173463 - RNA, 19 nt, Homo sapiens
  misc_RNA (1)...(19): siRNA sense strand
ggaagaucuugcccuaaug

SEQ ID NO: 2173464 - RNA, 19 nt, Homo sapiens
  misc_RNA (1)...(19): siRNA sense strand
ugaagagccugccuguuau

SEQ ID NO: 2173465 - RNA, 19 nt, Homo sapiens
  misc_RNA (1)...(19): siRNA sense strand
gaaaaggaguguccagaau

SEQ ID NO: 2173466 - RNA, 19 nt, Homo sapiens
  misc_RNA (1)...(19): siRNA sense strand
uaucaucugugaguacuuu

SEQ ID NO: 2173467 - RNA, 19 nt, Homo sapiens
  misc_RNA (1)...(19): siRNA sense strand
cugaacauguagaggauua

SEQ ID NO: 2173468 - RNA, 19 nt, Homo sapiens
  misc_RNA (1)...(19): siRNA sense strand
ggaaugcggacaaggauau

SEQ ID NO: 2173469 - RNA, 19 nt, Homo sapiens
  misc_RNA (1)...(19): siRNA sense strand
aaacugcccucacuuacug

SEQ ID NO: 2173470 - RNA, 19 nt, Homo sapiens
  misc_RNA (1)...(19): siRNA sense strand
gagagguuaugugcauuaa

SEQ ID NO: 2173471 - RNA, 19 nt, Homo sapiens
  misc_RNA (1)...(19): siRNA sense strand
cuugagcaaugcacacuua

SEQ ID NO: 2173472 - RNA, 19 nt, Homo sapiens
  misc_RNA (1)...(19): siRNA sense strand
gcgcuuggcuuggagaaga

SEQ ID NO: 2173473 - RNA, 19 nt, Homo sapiens
  misc_RNA (1)...(19): siRNA sense strand
acaaccagcugaugaagga

SEQ ID NO: 2173474 - RNA, 19 nt, Homo sapiens
  misc_RNA (1)...(19): siRNA sense strand
gcucuagagugugcaaauu

SEQ ID NO: 2173475 - RNA, 19 nt, Homo sapiens
  misc_RNA (1)...(19): siRNA sense strand
gaaggggacuccaguauca

SEQ ID NO: 2173476 - RNA, 19 nt, Homo sapiens
  misc_RNA (1)...(19): siRNA sense strand
gagcauccuugcacagugu

SEQ ID NO: 2173477 - RNA, 19 nt, Homo sapiens
  misc_RNA (1)...(19): siRNA sense strand
ucaaggagauggaguuguc

SEQ ID NO: 2173478 - RNA, 19 nt, Homo sapiens
  misc_RNA (1)...(19): siRNA sense strand
gaaacaggcagaacagaca

SEQ ID NO: 2173479 - RNA, 19 nt, Homo sapiens
  misc_RNA (1)...(19): siRNA sense strand
ggucagaugguauaaaugu

SEQ ID NO: 2173480 - RNA, 19 nt, Homo sapiens
  misc_RNA (1)...(19): siRNA sense strand
cgaacaguguggugucaaa

SEQ ID NO: 2173481 - RNA, 19 nt, Homo sapiens
  misc_RNA (1)...(19): siRNA sense strand
guaacagacuggaguacau

SEQ ID NO: 2173482 - RNA, 19 nt, Homo sapiens
  misc_RNA (1)...(19): siRNA sense strand
acaaggauaucguuaccaa

SEQ ID NO: 2173483 - RNA, 19 nt, Homo sapiens
  misc_RNA (1)...(19): siRNA sense strand
gauacgagcacgauccauu

SEQ ID NO: 2173484 - RNA, 19 nt, Homo sapiens
  misc_RNA (1)...(19): siRNA sense strand
gacagaagggaaacagaua

SEQ ID NO: 2173485 - RNA, 19 nt, Homo sapiens
  misc_RNA (1)...(19): siRNA sense strand
ggaaagcugcugauuuaag

SEQ ID NO: 2173486 - RNA, 19 nt, Homo sapiens
  misc_RNA (1)...(19): siRNA sense strand
gaccuggguuuacggugua

SEQ ID NO: 2173487 - RNA, 19 nt, Homo sapiens
  misc_RNA (1)...(19): siRNA sense strand
gauggacagugcuaugaau

SEQ ID NO: 2173488 - RNA, 19 nt, Homo sapiens
  misc_RNA (1)...(19): siRNA sense strand
gaccggugauuauacaaga

SEQ ID NO: 2173489 - RNA, 19 nt, Homo sapiens
  misc_RNA (1)...(19): siRNA sense strand
gauguuggauuguguucga

SEQ ID NO: 2173490 - RNA, 19 nt, Homo sapiens
  misc_RNA (1)...(19): siRNA sense strand
caagaaguacgaagcugua

SEQ ID NO: 2173491 - RNA, 19 nt, Homo sapiens
  misc_RNA (1)...(19): siRNA sense strand
ggagacgcgggaagaauaa

SEQ ID NO: 2173492 - RNA, 19 nt, Homo sapiens
  misc_RNA (1)...(19): siRNA sense strand
uaacagcacccuugagcaa

SEQ ID NO: 2173493 - RNA, 19 nt, Homo sapiens
  misc_RNA (1)...(19): siRNA sense strand
ccagcagaauuguuucaaa

SEQ ID NO: 2173494 - RNA, 19 nt, Homo sapiens
  misc_RNA (1)...(19): siRNA sense strand
cagcagaauuguuucaaag

SEQ ID NO: 2173495 - RNA, 19 nt, Homo sapiens
  misc_RNA (1)...(19): siRNA sense strand
gguggaagacucacaaaug

SEQ ID NO: 2173496 - RNA, 19 nt, Homo sapiens
  misc_RNA (1)...(19): siRNA sense strand
guaaggacacgaaccauca

SEQ ID NO: 2173497 - RNA, 19 nt, Homo sapiens
  misc_RNA (1)...(19): siRNA sense strand
gcccagagcagauguuaga

SEQ ID NO: 2173498 - RNA, 19 nt, Homo sapiens
  misc_RNA (1)...(19): siRNA sense strand
cagcugaccugugugaaug

SEQ ID NO: 2173499 - RNA, 19 nt, Homo sapiens
  misc_RNA (1)...(19): siRNA sense strand
agaaagcgcacucuuguug

SEQ ID NO: 2173500 - RNA, 19 nt, Homo sapiens
  misc_RNA (1)...(19): siRNA sense strand
guggaagacucacaaaugg

SEQ ID NO: 2173501 - RNA, 19 nt, Homo sapiens
  misc_RNA (1)...(19): siRNA sense strand
gccaauggacuuaaaauua

SEQ ID NO: 2173502 - RNA, 19 nt, Homo sapiens
  misc_RNA (1)...(19): siRNA sense strand
gcaaggagacgcgggaaga

SEQ ID NO: 2173503 - RNA, 19 nt, Homo sapiens
  misc_RNA (1)...(19): siRNA sense strand
ucagcaaagugguggauga

SEQ ID NO: 2173504 - RNA, 19 nt, Homo sapiens
  misc_RNA (1)...(19): siRNA sense strand
ggagaagggaccagaacaa

SEQ ID NO: 2173505 - RNA, 19 nt, Homo sapiens
  misc_RNA (1)...(19): siRNA sense strand
aaaccuccucucacaauua

SEQ ID NO: 2173506 - RNA, 19 nt, Homo sapiens
  misc_RNA (1)...(19): siRNA sense strand
cggaaacugcccucacuua

SEQ ID NO: 2173507 - RNA, 19 nt, Homo sapiens
  misc_RNA (1)...(19): siRNA sense strand
gaacucauuauagauggua

SEQ ID NO: 2173508 - RNA, 19 nt, Homo sapiens
  misc_RNA (1)...(19): siRNA sense strand
ugagaugcaugcagaauac

SEQ ID NO: 2173509 - RNA, 19 nt, Homo sapiens
  misc_RNA (1)...(19): siRNA sense strand
ggauaucguuaccaagcaa

SEQ ID NO: 2173510 - RNA, 19 nt, Homo sapiens
  misc_RNA (1)...(19): siRNA sense strand
gaaagccuucgaccugaaa

SEQ ID NO: 2173511 - RNA, 19 nt, Homo sapiens
  misc_RNA (1)...(19): siRNA sense strand
agacagcugugcagagaug

SEQ ID NO: 2173512 - RNA, 19 nt, Homo sapiens
  misc_RNA (1)...(19): siRNA sense strand
gaccugaaauauugugaag

SEQ ID NO: 2173513 - RNA, 19 nt, Homo sapiens
  misc_RNA (1)...(19): siRNA sense strand
ugauggagaugccgacaug

SEQ ID NO: 2173514 - RNA, 19 nt, Homo sapiens
  misc_RNA (1)...(19): siRNA sense strand
gcauuuguguuacucaucu

SEQ ID NO: 2173515 - RNA, 19 nt, Homo sapiens
  misc_RNA (1)...(19): siRNA sense strand
ggaauucgcuguccaaaua

SEQ ID NO: 2173516 - RNA, 19 nt, Homo sapiens
  misc_RNA (1)...(19): siRNA sense strand
gaacauuucuuguguagua

SEQ ID NO: 2173517 - RNA, 19 nt, Homo sapiens
  misc_RNA (1)...(19): siRNA sense strand
ggacuacacugcauacuaa

SEQ ID NO: 2173518 - RNA, 19 nt, Homo sapiens
  misc_RNA (1)...(19): siRNA sense strand
gagaagaacuggcagauga

SEQ ID NO: 2173519 - RNA, 19 nt, Homo sapiens
  misc_RNA (1)...(19): siRNA sense strand
ggacagugcuaugaauaua

SEQ ID NO: 2173520 - RNA, 19 nt, Homo sapiens
  misc_RNA (1)...(19): siRNA sense strand
gaacaaauauugggacauc

SEQ ID NO: 2173521 - RNA, 19 nt, Homo sapiens
  misc_RNA (1)...(19): siRNA sense strand
gugaagagccugccuguua

SEQ ID NO: 2173522 - RNA, 19 nt, Homo sapiens
  misc_RNA (1)...(19): siRNA sense strand
ggaauucugugcugacauu

SEQ ID NO: 2173523 - RNA, 19 nt, Homo sapiens
  misc_RNA (1)...(19): siRNA sense strand
caacagugauggagaagaa

SEQ ID NO: 2173524 - RNA, 19 nt, Homo sapiens
  misc_RNA (1)...(19): siRNA sense strand
ggaaggaccugguuucuac

SEQ ID NO: 2173525 - RNA, 19 nt, Homo sapiens
  misc_RNA (1)...(19): siRNA sense strand
ggggaaagcugcugauuua

SEQ ID NO: 2173526 - RNA, 19 nt, Homo sapiens
  misc_RNA (1)...(19): siRNA sense strand
ggaccuaucccuaauacua

SEQ ID NO: 2173527 - RNA, 19 nt, Homo sapiens
  misc_RNA (1)...(19): siRNA sense strand
gcagaauuguuucaaaguu

SEQ ID NO: 2173528 - RNA, 19 nt, Homo sapiens
  misc_RNA (1)...(19): siRNA sense strand
gagaagaaguugacagaca

SEQ ID NO: 2173529 - RNA, 19 nt, Homo sapiens
  misc_RNA (1)...(19): siRNA sense strand
acugaaaccuuuaaccuua

SEQ ID NO: 2173530 - RNA, 19 nt, Homo sapiens
  misc_RNA (1)...(19): siRNA sense strand
gacaagagaacaaauauug

SEQ ID NO: 2173531 - RNA, 19 nt, Homo sapiens
  misc_RNA (1)...(19): siRNA sense strand
caagagaagcuuccaauga

SEQ ID NO: 2173532 - RNA, 19 nt, Homo sapiens
  misc_RNA (1)...(19): siRNA sense strand
gaacaaagaagccucaaag

SEQ ID NO: 2173533 - RNA, 19 nt, Homo sapiens
  misc_RNA (1)...(19): siRNA sense strand
gaaggcaguuuguggaaau

SEQ ID NO: 2173534 - RNA, 19 nt, Homo sapiens
  misc_RNA (1)...(19): siRNA sense strand
ccaggugacuguuauuuga

SEQ ID NO: 2173535 - RNA, 19 nt, Homo sapiens
  misc_RNA (1)...(19): siRNA sense strand
gaacagacaagagaacaaa

SEQ ID NO: 2173536 - RNA, 19 nt, Homo sapiens
  misc_RNA (1)...(19): siRNA sense strand
gaagaaggguacacugaag

SEQ ID NO: 2173537 - RNA, 19 nt, Homo sapiens
  misc_RNA (1)...(19): siRNA sense strand
gaucuaggcuuugguggaa

SEQ ID NO: 2173538 - RNA, 19 nt, Homo sapiens
  misc_RNA (1)...(19): siRNA sense strand
caguugaccugaaauauug

SEQ ID NO: 2173539 - RNA, 19 nt, Homo sapiens
  misc_RNA (1)...(19): siRNA sense strand
gcacuggaccuaucccuaa

SEQ ID NO: 2173540 - RNA, 19 nt, Homo sapiens
  misc_RNA (1)...(19): siRNA sense strand
aaaggaguguccagaauuu

SEQ ID NO: 2173541 - RNA, 19 nt, Homo sapiens
  misc_RNA (1)...(19): siRNA sense strand
caaagccaauggacuuaaa

SEQ ID NO: 2173542 - RNA, 19 nt, Homo sapiens
  misc_RNA (1)...(19): siRNA sense strand
aagaaggacuguauuguga

SEQ ID NO: 2173543 - RNA, 19 nt, Homo sapiens
  misc_RNA (1)...(19): siRNA sense strand
caaagcaguuuccggcaaa

SEQ ID NO: 2173544 - RNA, 19 nt, Homo sapiens
  misc_RNA (1)...(19): siRNA sense strand
gaacuggucagacuguauu

SEQ ID NO: 2173545 - RNA, 19 nt, Homo sapiens
  misc_RNA (1)...(19): siRNA sense strand
gaaagcugcugauuuaagc

SEQ ID NO: 2173546 - RNA, 19 nt, Homo sapiens
  misc_RNA (1)...(19): siRNA sense strand
gcacagauccccucuauga

SEQ ID NO: 2173547 - RNA, 19 nt, Homo sapiens
  misc_RNA (1)...(19): siRNA sense strand
uacaagaacuagagaauca

SEQ ID NO: 2173548 - RNA, 19 nt, Homo sapiens
  misc_RNA (1)...(19): siRNA sense strand
gaagggaccagaacaagga

SEQ ID NO: 2173549 - RNA, 19 nt, Homo sapiens
  misc_RNA (1)...(19): siRNA sense strand
ggaaugcccugugaacugu

SEQ ID NO: 2173550 - RNA, 19 nt, Homo sapiens
  misc_RNA (1)...(19): siRNA sense strand
gaaguacgaagcuguaaug

SEQ ID NO: 2173551 - RNA, 19 nt, Homo sapiens
  misc_RNA (1)...(19): siRNA sense strand
gaagguucguucuaaaugg

SEQ ID NO: 2173552 - RNA, 19 nt, Homo sapiens
  misc_RNA (1)...(19): siRNA sense strand
guacaugucagcugaguga

SEQ ID NO: 2173553 - RNA, 19 nt, Homo sapiens
  misc_RNA (1)...(19): siRNA sense strand
ccagaaagacaaagacauu

SEQ ID NO: 2173554 - RNA, 19 nt, Homo sapiens
  misc_RNA (1)...(19): siRNA sense strand
ugucaaaggucagauggua

SEQ ID NO: 2173555 - RNA, 19 nt, Homo sapiens
  misc_RNA (1)...(19): siRNA sense strand
ccugugaacugucagcuuu

SEQ ID NO: 2173556 - RNA, 19 nt, Homo sapiens
  misc_RNA (1)...(19): siRNA sense strand
cuaaugcuguugagaaaga

SEQ ID NO: 2173557 - RNA, 19 nt, Homo sapiens
  misc_RNA (1)...(19): siRNA sense strand
ccagagagguuaugugcau

SEQ ID NO: 2173558 - RNA, 19 nt, Homo sapiens
  misc_RNA (1)...(19): siRNA sense strand
guccaaaccugacggaguu

SEQ ID NO: 2173559 - RNA, 19 nt, Homo sapiens
  misc_RNA (1)...(19): siRNA sense strand
gaaaguacaaggagacauc

SEQ ID NO: 2173560 - RNA, 19 nt, Homo sapiens
  misc_RNA (1)...(19): siRNA sense strand
caacccaacccuccaguaa

SEQ ID NO: 2173561 - RNA, 19 nt, Homo sapiens
  misc_RNA (1)...(19): siRNA sense strand
cggaggauaucaucuguga

SEQ ID NO: 2173562 - RNA, 19 nt, Homo sapiens
  misc_RNA (1)...(19): siRNA sense strand
ucaaaggucagaugguaua

SEQ ID NO: 2173563 - RNA, 19 nt, Homo sapiens
  misc_RNA (1)...(19): siRNA sense strand
ggaagaucuugcccuaaug

SEQ ID NO: 2173564 - RNA, 19 nt, Homo sapiens
  misc_RNA (1)...(19): siRNA sense strand
ugaagagccugccuguuau

SEQ ID NO: 2173565 - RNA, 19 nt, Homo sapiens
  misc_RNA (1)...(19): siRNA sense strand
gaaaaggaguguccagaau

SEQ ID NO: 2173566 - RNA, 19 nt, Homo sapiens
  misc_RNA (1)...(19): siRNA sense strand
uaucaucugugaguacuuu

SEQ ID NO: 2173567 - RNA, 19 nt, Homo sapiens
  misc_RNA (1)...(19): siRNA sense strand
cugaacauguagaggauua

SEQ ID NO: 2173568 - RNA, 19 nt, Homo sapiens
  misc_RNA (1)...(19): siRNA sense strand
ggaaugcggacaaggauau

SEQ ID NO: 2173569 - RNA, 19 nt, Homo sapiens
  misc_RNA (1)...(19): siRNA sense strand
aaacugcccucacuuacug

SEQ ID NO: 2173570 - RNA, 19 nt, Homo sapiens
  misc_RNA (1)...(19): siRNA sense strand
gagagguuaugugcauuaa

SEQ ID NO: 2173571 - RNA, 19 nt, Homo sapiens
  misc_RNA (1)...(19): siRNA sense strand
cuugagcaaugcacacuua

SEQ ID NO: 2173572 - RNA, 19 nt, Homo sapiens
  misc_RNA (1)...(19): siRNA sense strand
gcgcuuggcuuggagaaga

SEQ ID NO: 2173573 - RNA, 19 nt, Homo sapiens
  misc_RNA (1)...(19): siRNA sense strand
acaaccagcugaugaagga

SEQ ID NO: 2173574 - RNA, 19 nt, Homo sapiens
  misc_RNA (1)...(19): siRNA sense strand
gcucuagagugugcaaauu

SEQ ID NO: 2173575 - RNA, 19 nt, Homo sapiens
  misc_RNA (1)...(19): siRNA sense strand
gaaggggacuccaguauca

SEQ ID NO: 2173576 - RNA, 19 nt, Homo sapiens
  misc_RNA (1)...(19): siRNA sense strand
gagcauccuugcacagugu

SEQ ID NO: 2173577 - RNA, 19 nt, Homo sapiens
  misc_RNA (1)...(19): siRNA sense strand
ucaaggagauggaguuguc

SEQ ID NO: 2173578 - RNA, 19 nt, Homo sapiens
  misc_RNA (1)...(19): siRNA sense strand
gaaacaggcagaacagaca

SEQ ID NO: 2173579 - RNA, 19 nt, Homo sapiens
  misc_RNA (1)...(19): siRNA sense strand
ggucagaugguauaaaugu

SEQ ID NO: 2173580 - RNA, 19 nt, Homo sapiens
  misc_RNA (1)...(19): siRNA sense strand
cgaacaguguggugucaaa

SEQ ID NO: 2173581 - RNA, 19 nt, Homo sapiens
  misc_RNA (1)...(19): siRNA sense strand
guaacagacuggaguacau

SEQ ID NO: 2173582 - RNA, 19 nt, Homo sapiens
  misc_RNA (1)...(19): siRNA sense strand
acaaggauaucguuaccaa

SEQ ID NO: 2173583 - RNA, 19 nt, Homo sapiens
  misc_RNA (1)...(19): siRNA sense strand
gauacgagcacgauccauu

SEQ ID NO: 2173584 - RNA, 19 nt, Homo sapiens
  misc_RNA (1)...(19): siRNA sense strand
gacagaagggaaacagaua

SEQ ID NO: 2173585 - RNA, 19 nt, Homo sapiens
  misc_RNA (1)...(19): siRNA sense strand
ggaaagcugcugauuuaag

SEQ ID NO: 2173586 - RNA, 19 nt, Homo sapiens
  misc_RNA (1)...(19): siRNA sense strand
gaccuggguuuacggugua

SEQ ID NO: 2173587 - RNA, 19 nt, Homo sapiens
  misc_RNA (1)...(19): siRNA sense strand
gauggacagugcuaugaau

SEQ ID NO: 2173588 - RNA, 19 nt, Homo sapiens
  misc_RNA (1)...(19): siRNA sense strand
gaccggugauuauacaaga

SEQ ID NO: 2173589 - RNA, 19 nt, Homo sapiens
  misc_RNA (1)...(19): siRNA sense strand
gauguuggauuguguucga

SEQ ID NO: 2173590 - RNA, 19 nt, Homo sapiens
  misc_RNA (1)...(19): siRNA sense strand
caagaaguacgaagcugua

SEQ ID NO: 2173591 - RNA, 19 nt, Homo sapiens
  misc_RNA (1)...(19): siRNA sense strand
ggagacgcgggaagaauaa

SEQ ID NO: 2173592 - RNA, 19 nt, Homo sapiens
  misc_RNA (1)...(19): siRNA sense strand
uaacagcacccuugagcaa

SEQ ID NO: 2173593 - RNA, 19 nt, Homo sapiens
  misc_RNA (1)...(19): siRNA sense strand
ccagcagaauuguuucaaa

SEQ ID NO: 2173594 - RNA, 19 nt, Homo sapiens
  misc_RNA (1)...(19): siRNA sense strand
cagcagaauuguuucaaag

SEQ ID NO: 2173595 - RNA, 19 nt, Homo sapiens
  misc_RNA (1)...(19): siRNA sense strand
gguggaagacucacaaaug

SEQ ID NO: 2173596 - RNA, 19 nt, Homo sapiens
  misc_RNA (1)...(19): siRNA sense strand
guaaggacacgaaccauca

SEQ ID NO: 2173597 - RNA, 19 nt, Homo sapiens
  misc_RNA (1)...(19): siRNA sense strand
gcccagagcagauguuaga

SEQ ID NO: 2173598 - RNA, 19 nt, Homo sapiens
  misc_RNA (1)...(19): siRNA sense strand
cagcugaccugugugaaug

SEQ ID NO: 2173599 - RNA, 19 nt, Homo sapiens
  misc_RNA (1)...(19): siRNA sense strand
agaaagcgcacucuuguug

SEQ ID NO: 2173600 - RNA, 19 nt, Homo sapiens
  misc_RNA (1)...(19): siRNA sense strand
guggaagacucacaaaugg

SEQ ID NO: 2173601 - RNA, 19 nt, Homo sapiens
  misc_RNA (1)...(19): siRNA sense strand
gccaauggacuuaaaauua

SEQ ID NO: 2173602 - RNA, 19 nt, Homo sapiens
  misc_RNA (1)...(19): siRNA sense strand
gcaaggagacgcgggaaga

SEQ ID NO: 2173603 - RNA, 19 nt, Homo sapiens
  misc_RNA (1)...(19): siRNA sense strand
ucagcaaagugguggauga

SEQ ID NO: 2173604 - RNA, 19 nt, Homo sapiens
  misc_RNA (1)...(19): siRNA sense strand
ggagaagggaccagaacaa

SEQ ID NO: 2173605 - RNA, 19 nt, Homo sapiens
  misc_RNA (1)...(19): siRNA sense strand
aaaccuccucucacaauua

SEQ ID NO: 2173606 - RNA, 19 nt, Homo sapiens
  misc_RNA (1)...(19): siRNA sense strand
cggaaacugcccucacuua

SEQ ID NO: 2173607 - RNA, 19 nt, Homo sapiens
  misc_RNA (1)...(19): siRNA sense strand
gaacucauuauagauggua

SEQ ID NO: 2173608 - RNA, 19 nt, Homo sapiens
  misc_RNA (1)...(19): siRNA sense strand
ugagaugcaugcagaauac

SEQ ID NO: 2173609 - RNA, 19 nt, Homo sapiens
  misc_RNA (1)...(19): siRNA sense strand
ggauaucguuaccaagcaa

SEQ ID NO: 2173610 - RNA, 19 nt, Homo sapiens
  misc_RNA (1)...(19): siRNA sense strand
gaaagccuucgaccugaaa

SEQ ID NO: 2173611 - RNA, 19 nt, Homo sapiens
  misc_RNA (1)...(19): siRNA sense strand
agacagcugugcagagaug

SEQ ID NO: 2173612 - RNA, 19 nt, Homo sapiens
  misc_RNA (1)...(19): siRNA sense strand
gaccugaaauauugugaag

SEQ ID NO: 2173613 - RNA, 19 nt, Homo sapiens
  misc_RNA (1)...(19): siRNA sense strand
ugauggagaugccgacaug

SEQ ID NO: 2173614 - RNA, 19 nt, Homo sapiens
  misc_RNA (1)...(19): siRNA sense strand
gcauuuguguuacucaucu

SEQ ID NO: 2173615 - RNA, 19 nt, Homo sapiens
  misc_RNA (1)...(19): siRNA sense strand
aaacaugggugaugaacua

SEQ ID NO: 2173616 - RNA, 19 nt, Homo sapiens
  misc_RNA (1)...(19): siRNA sense strand
guacauggguguuucaaug

SEQ ID NO: 2173617 - RNA, 19 nt, Homo sapiens
  misc_RNA (1)...(19): siRNA sense strand
gaagaaagacccagagaca

SEQ ID NO: 2173618 - RNA, 19 nt, Homo sapiens
  misc_RNA (1)...(19): siRNA sense strand
ggcagaagcuuauggguau

SEQ ID NO: 2173619 - RNA, 19 nt, Homo sapiens
  misc_RNA (1)...(19): siRNA sense strand
caaggacacauucaucuua

SEQ ID NO: 2173620 - RNA, 19 nt, Homo sapiens
  misc_RNA (1)...(19): siRNA sense strand
gugaugaacuagaauuuga

SEQ ID NO: 2173621 - RNA, 19 nt, Homo sapiens
  misc_RNA (1)...(19): siRNA sense strand
gccuagaguugccgacuua

SEQ ID NO: 2173622 - RNA, 19 nt, Homo sapiens
  misc_RNA (1)...(19): siRNA sense strand
gaaccagggcagaagcuua

SEQ ID NO: 2173623 - RNA, 19 nt, Homo sapiens
  misc_RNA (1)...(19): siRNA sense strand
agaaagacccagagacaua

SEQ ID NO: 2173624 - RNA, 19 nt, Homo sapiens
  misc_RNA (1)...(19): siRNA sense strand
ccacauuggcuguuuagua

SEQ ID NO: 2173625 - RNA, 19 nt, Homo sapiens
  misc_RNA (1)...(19): siRNA sense strand
ggcaaaccauggagauaaa

SEQ ID NO: 2173626 - RNA, 19 nt, Homo sapiens
  misc_RNA (1)...(19): siRNA sense strand
gcacugaggaagcugcuaa

SEQ ID NO: 2173627 - RNA, 19 nt, Homo sapiens
  misc_RNA (1)...(19): siRNA sense strand
gaaagacccagagacauau

SEQ ID NO: 2173628 - RNA, 19 nt, Homo sapiens
  misc_RNA (1)...(19): siRNA sense strand
ggguauaguuaauaaagug

SEQ ID NO: 2173629 - RNA, 19 nt, Homo sapiens
  misc_RNA (1)...(19): siRNA sense strand
gcagaagcuuauggguaua

SEQ ID NO: 2173630 - RNA, 19 nt, Homo sapiens
  misc_RNA (1)...(19): siRNA sense strand
ugggagagcuuggagauau

SEQ ID NO: 2173631 - RNA, 19 nt, Homo sapiens
  misc_RNA (1)...(19): siRNA sense strand
ggagauauuuaugaugauc

SEQ ID NO: 2173632 - RNA, 19 nt, Homo sapiens
  misc_RNA (1)...(19): siRNA sense strand
ggugaacagucgcuacuca

SEQ ID NO: 2173633 - RNA, 19 nt, Homo sapiens
  misc_RNA (1)...(19): siRNA sense strand
cacauuggcuguuuaguac

SEQ ID NO: 2173634 - RNA, 19 nt, Homo sapiens
  misc_RNA (1)...(19): siRNA sense strand
aagcuuauggguauaguua

SEQ ID NO: 2173635 - RNA, 19 nt, Homo sapiens
  misc_RNA (1)...(19): siRNA sense strand
aaggacacauucaucuuaa

SEQ ID NO: 2173636 - RNA, 19 nt, Homo sapiens
  misc_RNA (1)...(19): siRNA sense strand
gggagagcuuggagauauu

SEQ ID NO: 2173637 - RNA, 19 nt, Homo sapiens
  misc_RNA (1)...(19): siRNA sense strand
gcuuauggguauaguuaau

SEQ ID NO: 2173638 - RNA, 19 nt, Homo sapiens
  misc_RNA (1)...(19): siRNA sense strand
gaucaaggacacauucauc

SEQ ID NO: 2173639 - RNA, 19 nt, Homo sapiens
  misc_RNA (1)...(19): siRNA sense strand
caugggugaugaacuagaa

SEQ ID NO: 2173640 - RNA, 19 nt, Homo sapiens
  misc_RNA (1)...(19): siRNA sense strand
ggacacauucaucuuaaca

SEQ ID NO: 2173641 - RNA, 19 nt, Homo sapiens
  misc_RNA (1)...(19): siRNA sense strand
ggagagcuuggagauauuu

SEQ ID NO: 2173642 - RNA, 19 nt, Homo sapiens
  misc_RNA (1)...(19): siRNA sense strand
agauaaacaugggugauga

SEQ ID NO: 2173643 - RNA, 19 nt, Homo sapiens
  misc_RNA (1)...(19): siRNA sense strand
gagauaaacaugggugaug

SEQ ID NO: 2173644 - RNA, 19 nt, Homo sapiens
  misc_RNA (1)...(19): siRNA sense strand
gaaacgcaccggcauucga

SEQ ID NO: 2173645 - RNA, 19 nt, Homo sapiens
  misc_RNA (1)...(19): siRNA sense strand
gcuuggagauauuuaugau

SEQ ID NO: 2173646 - RNA, 19 nt, Homo sapiens
  misc_RNA (1)...(19): siRNA sense strand
gauaaacaugggugaugaa

SEQ ID NO: 2173647 - RNA, 19 nt, Homo sapiens
  misc_RNA (1)...(19): siRNA sense strand
gcggagcuccuucgcuauu

SEQ ID NO: 2173648 - RNA, 19 nt, Homo sapiens
  misc_RNA (1)...(19): siRNA sense strand
gagcuuggagauauuuaug

SEQ ID NO: 2173649 - RNA, 19 nt, Homo sapiens
  misc_RNA (1)...(19): siRNA sense strand
gaugaucaaggacacauuc

SEQ ID NO: 2173650 - RNA, 19 nt, Homo sapiens
  misc_RNA (1)...(19): siRNA sense strand
uggcaaaccauggagauaa

SEQ ID NO: 2173651 - RNA, 19 nt, Homo sapiens
  misc_RNA (1)...(19): siRNA sense strand
gcaccggcauucgagaaca

SEQ ID NO: 2173652 - RNA, 19 nt, Homo sapiens
  misc_RNA (1)...(19): siRNA sense strand
ugaagccgauuuuguuauu

SEQ ID NO: 2173653 - RNA, 19 nt, Homo sapiens
  misc_RNA (1)...(19): siRNA sense strand
ggugaugaacuagaauuug

SEQ ID NO: 2173654 - RNA, 19 nt, Homo sapiens
  misc_RNA (1)...(19): siRNA sense strand
gcugagcaguggcaaacca

SEQ ID NO: 2173655 - RNA, 19 nt, Homo sapiens
  misc_RNA (1)...(19): siRNA sense strand
gagagcuuggagauauuua

SEQ ID NO: 2173656 - RNA, 19 nt, Homo sapiens
  misc_RNA (1)...(19): siRNA sense strand
cugaagaaguuacagaaaa

SEQ ID NO: 2173657 - RNA, 19 nt, Homo sapiens
  misc_RNA (1)...(19): siRNA sense strand
cccgcuaccuuaacaggaa

SEQ ID NO: 2173658 - RNA, 19 nt, Homo sapiens
  misc_RNA (1)...(19): siRNA sense strand
gggugaugaacuagaauuu

SEQ ID NO: 2173659 - RNA, 19 nt, Homo sapiens
  misc_RNA (1)...(19): siRNA sense strand
ggagcuccuucgcuauucu

SEQ ID NO: 2173660 - RNA, 19 nt, Homo sapiens
  misc_RNA (1)...(19): siRNA sense strand
ucaaggacacauucaucuu

SEQ ID NO: 2173661 - RNA, 19 nt, Homo sapiens
  misc_RNA (1)...(19): siRNA sense strand
cuccuucgcuauucugaga

SEQ ID NO: 2173662 - RNA, 19 nt, Homo sapiens
  misc_RNA (1)...(19): siRNA sense strand
gaagccgauuuuguuauuu

SEQ ID NO: 2173663 - RNA, 19 nt, Homo sapiens
  misc_RNA (1)...(19): siRNA sense strand
uaacauugaagccgauuuu

SEQ ID NO: 2173664 - RNA, 19 nt, Homo sapiens
  misc_RNA (1)...(19): siRNA sense strand
uccuaaaccugagcaguug

SEQ ID NO: 2173665 - RNA, 19 nt, Homo sapiens
  misc_RNA (1)...(19): siRNA sense strand
gaagcuuauggguauaguu

SEQ ID NO: 2173666 - RNA, 19 nt, Homo sapiens
  misc_RNA (1)...(19): siRNA sense strand
cacauucaucuuaacauug

SEQ ID NO: 2173667 - RNA, 19 nt, Homo sapiens
  misc_RNA (1)...(19): siRNA sense strand
ggagauaaacaugggugau

SEQ ID NO: 2173668 - RNA, 19 nt, Homo sapiens
  misc_RNA (1)...(19): siRNA sense strand
ugaacagucgcuacucaug

SEQ ID NO: 2173669 - RNA, 19 nt, Homo sapiens
  misc_RNA (1)...(19): siRNA sense strand
cauuggcuguuuaguacau

SEQ ID NO: 2173670 - RNA, 19 nt, Homo sapiens
  misc_RNA (1)...(19): siRNA sense strand
gaaguggacagugguacca

SEQ ID NO: 2173671 - RNA, 19 nt, Homo sapiens
  misc_RNA (1)...(19): siRNA sense strand
gugucccuauugcauauga

SEQ ID NO: 2173672 - RNA, 19 nt, Homo sapiens
  misc_RNA (1)...(19): siRNA sense strand
caggaaacgcaccggcauu

SEQ ID NO: 2173673 - RNA, 19 nt, Homo sapiens
  misc_RNA (1)...(19): siRNA sense strand
caaaccauggagauaaaca

SEQ ID NO: 2173674 - RNA, 19 nt, Homo sapiens
  misc_RNA (1)...(19): siRNA sense strand
ccuauugcauaugauaaca

SEQ ID NO: 2173675 - RNA, 19 nt, Homo sapiens
  misc_RNA (1)...(19): siRNA sense strand
ccgcuaccuuaacaggaaa

SEQ ID NO: 2173676 - RNA, 19 nt, Homo sapiens
  misc_RNA (1)...(19): siRNA sense strand
cguccugccuugccuagag

SEQ ID NO: 2173677 - RNA, 19 nt, Homo sapiens
  misc_RNA (1)...(19): siRNA sense strand
ugacauaacucaacuaaga

SEQ ID NO: 2173678 - RNA, 19 nt, Homo sapiens
  misc_RNA (1)...(19): siRNA sense strand
caccauagcuugcaaagua

SEQ ID NO: 2173679 - RNA, 19 nt, Homo sapiens
  misc_RNA (1)...(19): siRNA sense strand
ugacagaaaugguguguuu

SEQ ID NO: 2173680 - RNA, 19 nt, Homo sapiens
  misc_RNA (1)...(19): siRNA sense strand
caaggaaguuucuguauga

SEQ ID NO: 2173681 - RNA, 19 nt, Homo sapiens
  misc_RNA (1)...(19): siRNA sense strand
ggaagcaggugaaguaguu

SEQ ID NO: 2173682 - RNA, 19 nt, Homo sapiens
  misc_RNA (1)...(19): siRNA sense strand
gcacaguucucuaucacua

SEQ ID NO: 2173683 - RNA, 19 nt, Homo sapiens
  misc_RNA (1)...(19): siRNA sense strand
gagaugcacuuguuugauu

SEQ ID NO: 2173684 - RNA, 19 nt, Homo sapiens
  misc_RNA (1)...(19): siRNA sense strand
aaacauaucuccaguugug

SEQ ID NO: 2173685 - RNA, 19 nt, Homo sapiens
  misc_RNA (1)...(19): siRNA sense strand
gaaauaacaggaagagaaa

SEQ ID NO: 2173686 - RNA, 19 nt, Homo sapiens
  misc_RNA (1)...(19): siRNA sense strand
ggagaaaggaaagaaauua

SEQ ID NO: 2173687 - RNA, 19 nt, Homo sapiens
  misc_RNA (1)...(19): siRNA sense strand
aaucaagucugcuccuuua

SEQ ID NO: 2173688 - RNA, 19 nt, Homo sapiens
  misc_RNA (1)...(19): siRNA sense strand
gcacaugcccaucagagua

SEQ ID NO: 2173689 - RNA, 19 nt, Homo sapiens
  misc_RNA (1)...(19): siRNA sense strand
gaaagaaugguauguagga

SEQ ID NO: 2173690 - RNA, 19 nt, Homo sapiens
  misc_RNA (1)...(19): siRNA sense strand
ugacaagccacaagauuua

SEQ ID NO: 2173691 - RNA, 19 nt, Homo sapiens
  misc_RNA (1)...(19): siRNA sense strand
ggaagaauugcacaaagua

SEQ ID NO: 2173692 - RNA, 19 nt, Homo sapiens
  misc_RNA (1)...(19): siRNA sense strand
caggacagcuuacaauuuc

SEQ ID NO: 2173693 - RNA, 19 nt, Homo sapiens
  misc_RNA (1)...(19): siRNA sense strand
gguaauguaucuagugguu

SEQ ID NO: 2173694 - RNA, 19 nt, Homo sapiens
  misc_RNA (1)...(19): siRNA sense strand
uagcugauguccuggguua

SEQ ID NO: 2173695 - RNA, 19 nt, Homo sapiens
  misc_RNA (1)...(19): siRNA sense strand
ggaaaccugccuaugauuu

SEQ ID NO: 2173696 - RNA, 19 nt, Homo sapiens
  misc_RNA (1)...(19): siRNA sense strand
caaauuugauugacaugga

SEQ ID NO: 2173697 - RNA, 19 nt, Homo sapiens
  misc_RNA (1)...(19): siRNA sense strand
gacaaagcaagauugauua

SEQ ID NO: 2173698 - RNA, 19 nt, Homo sapiens
  misc_RNA (1)...(19): siRNA sense strand
acagagagaugcacuuguu

SEQ ID NO: 2173699 - RNA, 19 nt, Homo sapiens
  misc_RNA (1)...(19): siRNA sense strand
gaagcaaauuugauugaca

SEQ ID NO: 2173700 - RNA, 19 nt, Homo sapiens
  misc_RNA (1)...(19): siRNA sense strand
gauagugucuuuacaacca

SEQ ID NO: 2173701 - RNA, 19 nt, Homo sapiens
  misc_RNA (1)...(19): siRNA sense strand
caagauugauuacuuccuu

SEQ ID NO: 2173702 - RNA, 19 nt, Homo sapiens
  misc_RNA (1)...(19): siRNA sense strand
caaaguaaaccaucaagga

SEQ ID NO: 2173703 - RNA, 19 nt, Homo sapiens
  misc_RNA (1)...(19): siRNA sense strand
caagucugcuccuuuauca

SEQ ID NO: 2173704 - RNA, 19 nt, Homo sapiens
  misc_RNA (1)...(19): siRNA sense strand
gaaaucaagucugcuccuu

SEQ ID NO: 2173705 - RNA, 19 nt, Homo sapiens
  misc_RNA (1)...(19): siRNA sense strand
caaaggagcaaguaauguu

SEQ ID NO: 2173706 - RNA, 19 nt, Homo sapiens
  misc_RNA (1)...(19): siRNA sense strand
caaaguaugucugaagcaa

SEQ ID NO: 2173707 - RNA, 19 nt, Homo sapiens
  misc_RNA (1)...(19): siRNA sense strand
gccacaagauuuaaguauu

SEQ ID NO: 2173708 - RNA, 19 nt, Homo sapiens
  misc_RNA (1)...(19): siRNA sense strand
cagacuugcuucacaauug

SEQ ID NO: 2173709 - RNA, 19 nt, Homo sapiens
  misc_RNA (1)...(19): siRNA sense strand
gaagauugccacacagaga

SEQ ID NO: 2173710 - RNA, 19 nt, Homo sapiens
  misc_RNA (1)...(19): siRNA sense strand
gaaaauggauugccaagag

SEQ ID NO: 2173711 - RNA, 19 nt, Homo sapiens
  misc_RNA (1)...(19): siRNA sense strand
gcuaaucacugaaagaaaa

SEQ ID NO: 2173712 - RNA, 19 nt, Homo sapiens
  misc_RNA (1)...(19): siRNA sense strand
caaagaaucagagaaaguu

SEQ ID NO: 2173713 - RNA, 19 nt, Homo sapiens
  misc_RNA (1)...(19): siRNA sense strand
agacaaagaaucagagaaa

SEQ ID NO: 2173714 - RNA, 19 nt, Homo sapiens
  misc_RNA (1)...(19): siRNA sense strand
ugacuuauaucuacucagu

SEQ ID NO: 2173715 - RNA, 19 nt, Homo sapiens
  misc_RNA (1)...(19): siRNA sense strand
agacaaagcaagauugauu

SEQ ID NO: 2173716 - RNA, 19 nt, Homo sapiens
  misc_RNA (1)...(19): siRNA sense strand
gaucuuucgugcacuguga

SEQ ID NO: 2173717 - RNA, 19 nt, Homo sapiens
  misc_RNA (1)...(19): siRNA sense strand
aaaggaagauugccacaca

SEQ ID NO: 2173718 - RNA, 19 nt, Homo sapiens
  misc_RNA (1)...(19): siRNA sense strand
guaauaaugcuuccaaagu

SEQ ID NO: 2173719 - RNA, 19 nt, Homo sapiens
  misc_RNA (1)...(19): siRNA sense strand
gaaggagaaaggaaagaaa

SEQ ID NO: 2173720 - RNA, 19 nt, Homo sapiens
  misc_RNA (1)...(19): siRNA sense strand
gaugacauaacucaacuaa

SEQ ID NO: 2173721 - RNA, 19 nt, Homo sapiens
  misc_RNA (1)...(19): siRNA sense strand
agaaauaacaggaagagaa

SEQ ID NO: 2173722 - RNA, 19 nt, Homo sapiens
  misc_RNA (1)...(19): siRNA sense strand
uauuguggcucuucugaaa

SEQ ID NO: 2173723 - RNA, 19 nt, Homo sapiens
  misc_RNA (1)...(19): siRNA sense strand
cagauuguccugccuuuaa

SEQ ID NO: 2173724 - RNA, 19 nt, Homo sapiens
  misc_RNA (1)...(19): siRNA sense strand
gcacaaaguaugucugaag

SEQ ID NO: 2173725 - RNA, 19 nt, Homo sapiens
  misc_RNA (1)...(19): siRNA sense strand
gaagaaggaggaaaucaag

SEQ ID NO: 2173726 - RNA, 19 nt, Homo sapiens
  misc_RNA (1)...(19): siRNA sense strand
cagcuuacaauuucugaua

SEQ ID NO: 2173727 - RNA, 19 nt, Homo sapiens
  misc_RNA (1)...(19): siRNA sense strand
gcuccugccuugauuugaa

SEQ ID NO: 2173728 - RNA, 19 nt, Homo sapiens
  misc_RNA (1)...(19): siRNA sense strand
cagacuuccucaagaaauu

SEQ ID NO: 2173729 - RNA, 19 nt, Homo sapiens
  misc_RNA (1)...(19): siRNA sense strand
gcaaguaauguuuauguca

SEQ ID NO: 2173730 - RNA, 19 nt, Homo sapiens
  misc_RNA (1)...(19): siRNA sense strand
gagcaaguaauguuuaugu

SEQ ID NO: 2173731 - RNA, 19 nt, Homo sapiens
  misc_RNA (1)...(19): siRNA sense strand
ucaaggugauuucaaagga

SEQ ID NO: 2173732 - RNA, 19 nt, Homo sapiens
  misc_RNA (1)...(19): siRNA sense strand
gugaaagaaugguauguag

SEQ ID NO: 2173733 - RNA, 19 nt, Homo sapiens
  misc_RNA (1)...(19): siRNA sense strand
guuggaagcaggugaagua

SEQ ID NO: 2173734 - RNA, 19 nt, Homo sapiens
  misc_RNA (1)...(19): siRNA sense strand
gcaacugcuacauuuauaa

SEQ ID NO: 2173735 - RNA, 19 nt, Homo sapiens
  misc_RNA (1)...(19): siRNA sense strand
uaugucagauagugucuuu

SEQ ID NO: 2173736 - RNA, 19 nt, Homo sapiens
  misc_RNA (1)...(19): siRNA sense strand
guggaaaccugccuaugau

SEQ ID NO: 2173737 - RNA, 19 nt, Homo sapiens
  misc_RNA (1)...(19): siRNA sense strand
acaaggaaguuucuguaug

SEQ ID NO: 2173738 - RNA, 19 nt, Homo sapiens
  misc_RNA (1)...(19): siRNA sense strand
gaaauucuggaagaucuaa

SEQ ID NO: 2173739 - RNA, 19 nt, Homo sapiens
  misc_RNA (1)...(19): siRNA sense strand
uaacugcauucuccacuuc

SEQ ID NO: 2173740 - RNA, 19 nt, Homo sapiens
  misc_RNA (1)...(19): siRNA sense strand
ggagggaacuagcugaaaa

SEQ ID NO: 2173741 - RNA, 19 nt, Homo sapiens
  misc_RNA (1)...(19): siRNA sense strand
gagguaagauuggacuugu

SEQ ID NO: 2173742 - RNA, 19 nt, Homo sapiens
  misc_RNA (1)...(19): siRNA sense strand
gagagaugcacuuguuuga

SEQ ID NO: 2173743 - RNA, 19 nt, Homo sapiens
  misc_RNA (1)...(19): siRNA sense strand
gcacagagagaugcacuug

SEQ ID NO: 2173744 - RNA, 19 nt, Homo sapiens
  misc_RNA (1)...(19): siRNA sense strand
ccaggacagcuuacaauuu

SEQ ID NO: 2173745 - RNA, 19 nt, Homo sapiens
  misc_RNA (1)...(19): siRNA sense strand
caaccucaauacaauggaa

SEQ ID NO: 2173746 - RNA, 19 nt, Homo sapiens
  misc_RNA (1)...(19): siRNA sense strand
gauccuacuacacgacuua

SEQ ID NO: 2173747 - RNA, 19 nt, Homo sapiens
  misc_RNA (1)...(19): siRNA sense strand
acaauuggccggaugcuuu

SEQ ID NO: 2173748 - RNA, 19 nt, Homo sapiens
  misc_RNA (1)...(19): siRNA sense strand
gaagaauugcacaaaguau

SEQ ID NO: 2173749 - RNA, 19 nt, Homo sapiens
  misc_RNA (1)...(19): siRNA sense strand
caaauggaggcauaugaaa

SEQ ID NO: 2173750 - RNA, 19 nt, Homo sapiens
  misc_RNA (1)...(19): siRNA sense strand
aaucagacaucacuguuca

SEQ ID NO: 2173751 - RNA, 19 nt, Homo sapiens
  misc_RNA (1)...(19): siRNA sense strand
guaaauucuuuggagguuu

SEQ ID NO: 2173752 - RNA, 19 nt, Homo sapiens
  misc_RNA (1)...(19): siRNA sense strand
uaaacacuggagagaauua

SEQ ID NO: 2173753 - RNA, 19 nt, Homo sapiens
  misc_RNA (1)...(19): siRNA sense strand
ucacaaagcaacaaaugga

SEQ ID NO: 2173754 - RNA, 19 nt, Homo sapiens
  misc_RNA (1)...(19): siRNA sense strand
aauaaugcuuccaaaguug

SEQ ID NO: 2173755 - RNA, 19 nt, Homo sapiens
  misc_RNA (1)...(19): siRNA sense strand
ucagucagcuuuggacaga

SEQ ID NO: 2173756 - RNA, 19 nt, Homo sapiens
  misc_RNA (1)...(19): siRNA sense strand
caaggagggucaguacaau

SEQ ID NO: 2173757 - RNA, 19 nt, Homo sapiens
  misc_RNA (1)...(19): siRNA sense strand
gaaaauuggggcugaagua

SEQ ID NO: 2173758 - RNA, 19 nt, Homo sapiens
  misc_RNA (1)...(19): siRNA sense strand
uaaaauggcuugguuaagu

SEQ ID NO: 2173759 - RNA, 19 nt, Homo sapiens
  misc_RNA (1)...(19): siRNA sense strand
guaacugcauucuccacuu

SEQ ID NO: 2173760 - RNA, 19 nt, Homo sapiens
  misc_RNA (1)...(19): siRNA sense strand
acuaaacacuggagagaau

SEQ ID NO: 2173761 - RNA, 19 nt, Homo sapiens
  misc_RNA (1)...(19): siRNA sense strand
uaagacaaagcaagauuga

SEQ ID NO: 2173762 - RNA, 19 nt, Homo sapiens
  misc_RNA (1)...(19): siRNA sense strand
gacagaaggagaaaggaaa

SEQ ID NO: 2173763 - RNA, 19 nt, Homo sapiens
  misc_RNA (1)...(19): siRNA sense strand
gcuaagacaaagcaagauu

SEQ ID NO: 2173764 - RNA, 19 nt, Homo sapiens
  misc_RNA (1)...(19): siRNA sense strand
uaggcaaccucaauacaau

SEQ ID NO: 2173765 - RNA, 19 nt, Homo sapiens
  misc_RNA (1)...(19): siRNA sense strand
gcccaucagaguauacaua

SEQ ID NO: 2173766 - RNA, 19 nt, Homo sapiens
  misc_RNA (1)...(19): siRNA sense strand
gaaguuaaaggaagauugc

SEQ ID NO: 2173767 - RNA, 19 nt, Homo sapiens
  misc_RNA (1)...(19): siRNA sense strand
guugcaauauuacagaaug

SEQ ID NO: 2173768 - RNA, 19 nt, Homo sapiens
  misc_RNA (1)...(19): siRNA sense strand
cgacuuagaguggcuuaaa

SEQ ID NO: 2173769 - RNA, 19 nt, Homo sapiens
  misc_RNA (1)...(19): siRNA sense strand
aaauauauccaucccaguu

SEQ ID NO: 2173770 - RNA, 19 nt, Homo sapiens
  misc_RNA (1)...(19): siRNA sense strand
gaacuuauuguggcucuuc

SEQ ID NO: 2173771 - RNA, 19 nt, Homo sapiens
  misc_RNA (1)...(19): siRNA sense strand
acuuauaucuacucaguug

SEQ ID NO: 2173772 - RNA, 19 nt, Homo sapiens
  misc_RNA (1)...(19): siRNA sense strand
caaagugaaagaaugguau

SEQ ID NO: 2173773 - RNA, 19 nt, Homo sapiens
  misc_RNA (1)...(19): siRNA sense strand
gacccagacuugcuucaca

SEQ ID NO: 2173774 - RNA, 19 nt, Homo sapiens
  misc_RNA (1)...(19): siRNA sense strand
gcacgucucauccaagaag

SEQ ID NO: 2173775 - RNA, 19 nt, Homo sapiens
  misc_RNA (1)...(19): siRNA sense strand
gacaaagaaucagagaaag

SEQ ID NO: 2173776 - RNA, 19 nt, Homo sapiens
  misc_RNA (1)...(19): siRNA sense strand
ucagauagugucuuuacaa

SEQ ID NO: 2173777 - RNA, 19 nt, Homo sapiens
  misc_RNA (1)...(19): siRNA sense strand
ugacauaacucaacuaaga

SEQ ID NO: 2173778 - RNA, 19 nt, Homo sapiens
  misc_RNA (1)...(19): siRNA sense strand
caccauagcuugcaaagua

SEQ ID NO: 2173779 - RNA, 19 nt, Homo sapiens
  misc_RNA (1)...(19): siRNA sense strand
ugacagaaaugguguguuu

SEQ ID NO: 2173780 - RNA, 19 nt, Homo sapiens
  misc_RNA (1)...(19): siRNA sense strand
caaggaaguuucuguauga

SEQ ID NO: 2173781 - RNA, 19 nt, Homo sapiens
  misc_RNA (1)...(19): siRNA sense strand
ggaagcaggugaaguaguu

SEQ ID NO: 2173782 - RNA, 19 nt, Homo sapiens
  misc_RNA (1)...(19): siRNA sense strand
gcacaguucucuaucacua

SEQ ID NO: 2173783 - RNA, 19 nt, Homo sapiens
  misc_RNA (1)...(19): siRNA sense strand
gagaugcacuuguuugauu

SEQ ID NO: 2173784 - RNA, 19 nt, Homo sapiens
  misc_RNA (1)...(19): siRNA sense strand
aaacauaucuccaguugug

SEQ ID NO: 2173785 - RNA, 19 nt, Homo sapiens
  misc_RNA (1)...(19): siRNA sense strand
gaaauaacaggaagagaaa

SEQ ID NO: 2173786 - RNA, 19 nt, Homo sapiens
  misc_RNA (1)...(19): siRNA sense strand
ggagaaaggaaagaaauua

SEQ ID NO: 2173787 - RNA, 19 nt, Homo sapiens
  misc_RNA (1)...(19): siRNA sense strand
aaucaagucugcuccuuua

SEQ ID NO: 2173788 - RNA, 19 nt, Homo sapiens
  misc_RNA (1)...(19): siRNA sense strand
gcacaugcccaucagagua

SEQ ID NO: 2173789 - RNA, 19 nt, Homo sapiens
  misc_RNA (1)...(19): siRNA sense strand
gaaagaaugguauguagga

SEQ ID NO: 2173790 - RNA, 19 nt, Homo sapiens
  misc_RNA (1)...(19): siRNA sense strand
ugacaagccacaagauuua

SEQ ID NO: 2173791 - RNA, 19 nt, Homo sapiens
  misc_RNA (1)...(19): siRNA sense strand
ggaagaauugcacaaagua

SEQ ID NO: 2173792 - RNA, 19 nt, Homo sapiens
  misc_RNA (1)...(19): siRNA sense strand
caggacagcuuacaauuuc

SEQ ID NO: 2173793 - RNA, 19 nt, Homo sapiens
  misc_RNA (1)...(19): siRNA sense strand
gguaauguaucuagugguu

SEQ ID NO: 2173794 - RNA, 19 nt, Homo sapiens
  misc_RNA (1)...(19): siRNA sense strand
uagcugauguccuggguua

SEQ ID NO: 2173795 - RNA, 19 nt, Homo sapiens
  misc_RNA (1)...(19): siRNA sense strand
ggaaaccugccuaugauuu

SEQ ID NO: 2173796 - RNA, 19 nt, Homo sapiens
  misc_RNA (1)...(19): siRNA sense strand
caaauuugauugacaugga

SEQ ID NO: 2173797 - RNA, 19 nt, Homo sapiens
  misc_RNA (1)...(19): siRNA sense strand
gacaaagcaagauugauua

SEQ ID NO: 2173798 - RNA, 19 nt, Homo sapiens
  misc_RNA (1)...(19): siRNA sense strand
acagagagaugcacuuguu

SEQ ID NO: 2173799 - RNA, 19 nt, Homo sapiens
  misc_RNA (1)...(19): siRNA sense strand
gaagcaaauuugauugaca

SEQ ID NO: 2173800 - RNA, 19 nt, Homo sapiens
  misc_RNA (1)...(19): siRNA sense strand
gauagugucuuuacaacca

SEQ ID NO: 2173801 - RNA, 19 nt, Homo sapiens
  misc_RNA (1)...(19): siRNA sense strand
caagauugauuacuuccuu

SEQ ID NO: 2173802 - RNA, 19 nt, Homo sapiens
  misc_RNA (1)...(19): siRNA sense strand
caaaguaaaccaucaagga

SEQ ID NO: 2173803 - RNA, 19 nt, Homo sapiens
  misc_RNA (1)...(19): siRNA sense strand
caagucugcuccuuuauca

SEQ ID NO: 2173804 - RNA, 19 nt, Homo sapiens
  misc_RNA (1)...(19): siRNA sense strand
gaaaucaagucugcuccuu

SEQ ID NO: 2173805 - RNA, 19 nt, Homo sapiens
  misc_RNA (1)...(19): siRNA sense strand
caaaggagcaaguaauguu

SEQ ID NO: 2173806 - RNA, 19 nt, Homo sapiens
  misc_RNA (1)...(19): siRNA sense strand
caaaguaugucugaagcaa

SEQ ID NO: 2173807 - RNA, 19 nt, Homo sapiens
  misc_RNA (1)...(19): siRNA sense strand
gccacaagauuuaaguauu

SEQ ID NO: 2173808 - RNA, 19 nt, Homo sapiens
  misc_RNA (1)...(19): siRNA sense strand
cagacuugcuucacaauug

SEQ ID NO: 2173809 - RNA, 19 nt, Homo sapiens
  misc_RNA (1)...(19): siRNA sense strand
gaagauugccacacagaga

SEQ ID NO: 2173810 - RNA, 19 nt, Homo sapiens
  misc_RNA (1)...(19): siRNA sense strand
gaaaauggauugccaagag

SEQ ID NO: 2173811 - RNA, 19 nt, Homo sapiens
  misc_RNA (1)...(19): siRNA sense strand
gcuaaucacugaaagaaaa

SEQ ID NO: 2173812 - RNA, 19 nt, Homo sapiens
  misc_RNA (1)...(19): siRNA sense strand
caaagaaucagagaaaguu

SEQ ID NO: 2173813 - RNA, 19 nt, Homo sapiens
  misc_RNA (1)...(19): siRNA sense strand
agacaaagaaucagagaaa

SEQ ID NO: 2173814 - RNA, 19 nt, Homo sapiens
  misc_RNA (1)...(19): siRNA sense strand
ugacuuauaucuacucagu

SEQ ID NO: 2173815 - RNA, 19 nt, Homo sapiens
  misc_RNA (1)...(19): siRNA sense strand
agacaaagcaagauugauu

SEQ ID NO: 2173816 - RNA, 19 nt, Homo sapiens
  misc_RNA (1)...(19): siRNA sense strand
gaucuuucgugcacuguga

SEQ ID NO: 2173817 - RNA, 19 nt, Homo sapiens
  misc_RNA (1)...(19): siRNA sense strand
aaaggaagauugccacaca

SEQ ID NO: 2173818 - RNA, 19 nt, Homo sapiens
  misc_RNA (1)...(19): siRNA sense strand
guaauaaugcuuccaaagu

SEQ ID NO: 2173819 - RNA, 19 nt, Homo sapiens
  misc_RNA (1)...(19): siRNA sense strand
gaaggagaaaggaaagaaa

SEQ ID NO: 2173820 - RNA, 19 nt, Homo sapiens
  misc_RNA (1)...(19): siRNA sense strand
gaugacauaacucaacuaa

SEQ ID NO: 2173821 - RNA, 19 nt, Homo sapiens
  misc_RNA (1)...(19): siRNA sense strand
agaaauaacaggaagagaa

SEQ ID NO: 2173822 - RNA, 19 nt, Homo sapiens
  misc_RNA (1)...(19): siRNA sense strand
uauuguggcucuucugaaa

SEQ ID NO: 2173823 - RNA, 19 nt, Homo sapiens
  misc_RNA (1)...(19): siRNA sense strand
cagauuguccugccuuuaa

SEQ ID NO: 2173824 - RNA, 19 nt, Homo sapiens
  misc_RNA (1)...(19): siRNA sense strand
gcacaaaguaugucugaag

SEQ ID NO: 2173825 - RNA, 19 nt, Homo sapiens
  misc_RNA (1)...(19): siRNA sense strand
gaagaaggaggaaaucaag

SEQ ID NO: 2173826 - RNA, 19 nt, Homo sapiens
  misc_RNA (1)...(19): siRNA sense strand
cagcuuacaauuucugaua

SEQ ID NO: 2173827 - RNA, 19 nt, Homo sapiens
  misc_RNA (1)...(19): siRNA sense strand
gcuccugccuugauuugaa

SEQ ID NO: 2173828 - RNA, 19 nt, Homo sapiens
  misc_RNA (1)...(19): siRNA sense strand
cagacuuccucaagaaauu

SEQ ID NO: 2173829 - RNA, 19 nt, Homo sapiens
  misc_RNA (1)...(19): siRNA sense strand
gcaaguaauguuuauguca

SEQ ID NO: 2173830 - RNA, 19 nt, Homo sapiens
  misc_RNA (1)...(19): siRNA sense strand
gagcaaguaauguuuaugu

SEQ ID NO: 2173831 - RNA, 19 nt, Homo sapiens
  misc_RNA (1)...(19): siRNA sense strand
ucaaggugauuucaaagga

SEQ ID NO: 2173832 - RNA, 19 nt, Homo sapiens
  misc_RNA (1)...(19): siRNA sense strand
gugaaagaaugguauguag

SEQ ID NO: 2173833 - RNA, 19 nt, Homo sapiens
  misc_RNA (1)...(19): siRNA sense strand
guuggaagcaggugaagua

SEQ ID NO: 2173834 - RNA, 19 nt, Homo sapiens
  misc_RNA (1)...(19): siRNA sense strand
gcaacugcuacauuuauaa

SEQ ID NO: 2173835 - RNA, 19 nt, Homo sapiens
  misc_RNA (1)...(19): siRNA sense strand
uaugucagauagugucuuu

SEQ ID NO: 2173836 - RNA, 19 nt, Homo sapiens
  misc_RNA (1)...(19): siRNA sense strand
guggaaaccugccuaugau

SEQ ID NO: 2173837 - RNA, 19 nt, Homo sapiens
  misc_RNA (1)...(19): siRNA sense strand
acaaggaaguuucuguaug

SEQ ID NO: 2173838 - RNA, 19 nt, Homo sapiens
  misc_RNA (1)...(19): siRNA sense strand
gaaauucuggaagaucuaa

SEQ ID NO: 2173839 - RNA, 19 nt, Homo sapiens
  misc_RNA (1)...(19): siRNA sense strand
uaacugcauucuccacuuc

SEQ ID NO: 2173840 - RNA, 19 nt, Homo sapiens
  misc_RNA (1)...(19): siRNA sense strand
ggagggaacuagcugaaaa

SEQ ID NO: 2173841 - RNA, 19 nt, Homo sapiens
  misc_RNA (1)...(19): siRNA sense strand
gagguaagauuggacuugu

SEQ ID NO: 2173842 - RNA, 19 nt, Homo sapiens
  misc_RNA (1)...(19): siRNA sense strand
gagagaugcacuuguuuga

SEQ ID NO: 2173843 - RNA, 19 nt, Homo sapiens
  misc_RNA (1)...(19): siRNA sense strand
gcacagagagaugcacuug

SEQ ID NO: 2173844 - RNA, 19 nt, Homo sapiens
  misc_RNA (1)...(19): siRNA sense strand
ccaggacagcuuacaauuu

SEQ ID NO: 2173845 - RNA, 19 nt, Homo sapiens
  misc_RNA (1)...(19): siRNA sense strand
caaccucaauacaauggaa

SEQ ID NO: 2173846 - RNA, 19 nt, Homo sapiens
  misc_RNA (1)...(19): siRNA sense strand
gauccuacuacacgacuua

SEQ ID NO: 2173847 - RNA, 19 nt, Homo sapiens
  misc_RNA (1)...(19): siRNA sense strand
acaauuggccggaugcuuu

SEQ ID NO: 2173848 - RNA, 19 nt, Homo sapiens
  misc_RNA (1)...(19): siRNA sense strand
gaagaauugcacaaaguau

SEQ ID NO: 2173849 - RNA, 19 nt, Homo sapiens
  misc_RNA (1)...(19): siRNA sense strand
caaauggaggcauaugaaa

SEQ ID NO: 2173850 - RNA, 19 nt, Homo sapiens
  misc_RNA (1)...(19): siRNA sense strand
aaucagacaucacuguuca

SEQ ID NO: 2173851 - RNA, 19 nt, Homo sapiens
  misc_RNA (1)...(19): siRNA sense strand
guaaauucuuuggagguuu

SEQ ID NO: 2173852 - RNA, 19 nt, Homo sapiens
  misc_RNA (1)...(19): siRNA sense strand
uaaacacuggagagaauua

SEQ ID NO: 2173853 - RNA, 19 nt, Homo sapiens
  misc_RNA (1)...(19): siRNA sense strand
ucacaaagcaacaaaugga

SEQ ID NO: 2173854 - RNA, 19 nt, Homo sapiens
  misc_RNA (1)...(19): siRNA sense strand
aauaaugcuuccaaaguug

SEQ ID NO: 2173855 - RNA, 19 nt, Homo sapiens
  misc_RNA (1)...(19): siRNA sense strand
ucagucagcuuuggacaga

SEQ ID NO: 2173856 - RNA, 19 nt, Homo sapiens
  misc_RNA (1)...(19): siRNA sense strand
caaggagggucaguacaau

SEQ ID NO: 2173857 - RNA, 19 nt, Homo sapiens
  misc_RNA (1)...(19): siRNA sense strand
gaaaauuggggcugaagua

SEQ ID NO: 2173858 - RNA, 19 nt, Homo sapiens
  misc_RNA (1)...(19): siRNA sense strand
uaaaauggcuugguuaagu

SEQ ID NO: 2173859 - RNA, 19 nt, Homo sapiens
  misc_RNA (1)...(19): siRNA sense strand
guaacugcauucuccacuu

SEQ ID NO: 2173860 - RNA, 19 nt, Homo sapiens
  misc_RNA (1)...(19): siRNA sense strand
acuaaacacuggagagaau

SEQ ID NO: 2173861 - RNA, 19 nt, Homo sapiens
  misc_RNA (1)...(19): siRNA sense strand
uaagacaaagcaagauuga

SEQ ID NO: 2173862 - RNA, 19 nt, Homo sapiens
  misc_RNA (1)...(19): siRNA sense strand
gacagaaggagaaaggaaa

SEQ ID NO: 2173863 - RNA, 19 nt, Homo sapiens
  misc_RNA (1)...(19): siRNA sense strand
gcuaagacaaagcaagauu

SEQ ID NO: 2173864 - RNA, 19 nt, Homo sapiens
  misc_RNA (1)...(19): siRNA sense strand
uaggcaaccucaauacaau

SEQ ID NO: 2173865 - RNA, 19 nt, Homo sapiens
  misc_RNA (1)...(19): siRNA sense strand
gcccaucagaguauacaua

SEQ ID NO: 2173866 - RNA, 19 nt, Homo sapiens
  misc_RNA (1)...(19): siRNA sense strand
gaaguuaaaggaagauugc

SEQ ID NO: 2173867 - RNA, 19 nt, Homo sapiens
  misc_RNA (1)...(19): siRNA sense strand
guugcaauauuacagaaug

SEQ ID NO: 2173868 - RNA, 19 nt, Homo sapiens
  misc_RNA (1)...(19): siRNA sense strand
cgacuuagaguggcuuaaa

SEQ ID NO: 2173869 - RNA, 19 nt, Homo sapiens
  misc_RNA (1)...(19): siRNA sense strand
aaauauauccaucccaguu

SEQ ID NO: 2173870 - RNA, 19 nt, Homo sapiens
  misc_RNA (1)...(19): siRNA sense strand
gaacuuauuguggcucuuc

SEQ ID NO: 2173871 - RNA, 19 nt, Homo sapiens
  misc_RNA (1)...(19): siRNA sense strand
acuuauaucuacucaguug

SEQ ID NO: 2173872 - RNA, 19 nt, Homo sapiens
  misc_RNA (1)...(19): siRNA sense strand
caaagugaaagaaugguau

SEQ ID NO: 2173873 - RNA, 19 nt, Homo sapiens
  misc_RNA (1)...(19): siRNA sense strand
gacccagacuugcuucaca

SEQ ID NO: 2173874 - RNA, 19 nt, Homo sapiens
  misc_RNA (1)...(19): siRNA sense strand
gcacgucucauccaagaag

SEQ ID NO: 2173875 - RNA, 19 nt, Homo sapiens
  misc_RNA (1)...(19): siRNA sense strand
gacaaagaaucagagaaag

SEQ ID NO: 2173876 - RNA, 19 nt, Homo sapiens
  misc_RNA (1)...(19): siRNA sense strand
ucagauagugucuuuacaa

SEQ ID NO: 2173877 - RNA, 19 nt, Homo sapiens
  misc_RNA (1)...(19): siRNA sense strand
ugacauaacucaacuaaga

SEQ ID NO: 2173878 - RNA, 19 nt, Homo sapiens
  misc_RNA (1)...(19): siRNA sense strand
caccauagcuugcaaagua

SEQ ID NO: 2173879 - RNA, 19 nt, Homo sapiens
  misc_RNA (1)...(19): siRNA sense strand
ugacagaaaugguguguuu

SEQ ID NO: 2173880 - RNA, 19 nt, Homo sapiens
  misc_RNA (1)...(19): siRNA sense strand
caaggaaguuucuguauga

SEQ ID NO: 2173881 - RNA, 19 nt, Homo sapiens
  misc_RNA (1)...(19): siRNA sense strand
ggaagcaggugaaguaguu

SEQ ID NO: 2173882 - RNA, 19 nt, Homo sapiens
  misc_RNA (1)...(19): siRNA sense strand
gcacaguucucuaucacua

SEQ ID NO: 2173883 - RNA, 19 nt, Homo sapiens
  misc_RNA (1)...(19): siRNA sense strand
gagaugcacuuguuugauu

SEQ ID NO: 2173884 - RNA, 19 nt, Homo sapiens
  misc_RNA (1)...(19): siRNA sense strand
aaacauaucuccaguugug

SEQ ID NO: 2173885 - RNA, 19 nt, Homo sapiens
  misc_RNA (1)...(19): siRNA sense strand
gaaauaacaggaagagaaa

SEQ ID NO: 2173886 - RNA, 19 nt, Homo sapiens
  misc_RNA (1)...(19): siRNA sense strand
ggagaaaggaaagaaauua

SEQ ID NO: 2173887 - RNA, 19 nt, Homo sapiens
  misc_RNA (1)...(19): siRNA sense strand
aaucaagucugcuccuuua

SEQ ID NO: 2173888 - RNA, 19 nt, Homo sapiens
  misc_RNA (1)...(19): siRNA sense strand
gcacaugcccaucagagua

SEQ ID NO: 2173889 - RNA, 19 nt, Homo sapiens
  misc_RNA (1)...(19): siRNA sense strand
gaaagaaugguauguagga

SEQ ID NO: 2173890 - RNA, 19 nt, Homo sapiens
  misc_RNA (1)...(19): siRNA sense strand
ugacaagccacaagauuua

SEQ ID NO: 2173891 - RNA, 19 nt, Homo sapiens
  misc_RNA (1)...(19): siRNA sense strand
ggaagaauugcacaaagua

SEQ ID NO: 2173892 - RNA, 19 nt, Homo sapiens
  misc_RNA (1)...(19): siRNA sense strand
caggacagcuuacaauuuc

SEQ ID NO: 2173893 - RNA, 19 nt, Homo sapiens
  misc_RNA (1)...(19): siRNA sense strand
gguaauguaucuagugguu

SEQ ID NO: 2173894 - RNA, 19 nt, Homo sapiens
  misc_RNA (1)...(19): siRNA sense strand
uagcugauguccuggguua

SEQ ID NO: 2173895 - RNA, 19 nt, Homo sapiens
  misc_RNA (1)...(19): siRNA sense strand
ggaaaccugccuaugauuu

SEQ ID NO: 2173896 - RNA, 19 nt, Homo sapiens
  misc_RNA (1)...(19): siRNA sense strand
caaauuugauugacaugga

SEQ ID NO: 2173897 - RNA, 19 nt, Homo sapiens
  misc_RNA (1)...(19): siRNA sense strand
gacaaagcaagauugauua

SEQ ID NO: 2173898 - RNA, 19 nt, Homo sapiens
  misc_RNA (1)...(19): siRNA sense strand
acagagagaugcacuuguu

SEQ ID NO: 2173899 - RNA, 19 nt, Homo sapiens
  misc_RNA (1)...(19): siRNA sense strand
gaagcaaauuugauugaca

SEQ ID NO: 2173900 - RNA, 19 nt, Homo sapiens
  misc_RNA (1)...(19): siRNA sense strand
gauagugucuuuacaacca

SEQ ID NO: 2173901 - RNA, 19 nt, Homo sapiens
  misc_RNA (1)...(19): siRNA sense strand
caagauugauuacuuccuu

SEQ ID NO: 2173902 - RNA, 19 nt, Homo sapiens
  misc_RNA (1)...(19): siRNA sense strand
caaaguaaaccaucaagga

SEQ ID NO: 2173903 - RNA, 19 nt, Homo sapiens
  misc_RNA (1)...(19): siRNA sense strand
caagucugcuccuuuauca

SEQ ID NO: 2173904 - RNA, 19 nt, Homo sapiens
  misc_RNA (1)...(19): siRNA sense strand
gaaaucaagucugcuccuu

SEQ ID NO: 2173905 - RNA, 19 nt, Homo sapiens
  misc_RNA (1)...(19): siRNA sense strand
caaaggagcaaguaauguu

SEQ ID NO: 2173906 - RNA, 19 nt, Homo sapiens
  misc_RNA (1)...(19): siRNA sense strand
caaaguaugucugaagcaa

SEQ ID NO: 2173907 - RNA, 19 nt, Homo sapiens
  misc_RNA (1)...(19): siRNA sense strand
gccacaagauuuaaguauu

SEQ ID NO: 2173908 - RNA, 19 nt, Homo sapiens
  misc_RNA (1)...(19): siRNA sense strand
cagacuugcuucacaauug

SEQ ID NO: 2173909 - RNA, 19 nt, Homo sapiens
  misc_RNA (1)...(19): siRNA sense strand
gaagauugccacacagaga

SEQ ID NO: 2173910 - RNA, 19 nt, Homo sapiens
  misc_RNA (1)...(19): siRNA sense strand
gaaaauggauugccaagag

SEQ ID NO: 2173911 - RNA, 19 nt, Homo sapiens
  misc_RNA (1)...(19): siRNA sense strand
gcuaaucacugaaagaaaa

SEQ ID NO: 2173912 - RNA, 19 nt, Homo sapiens
  misc_RNA (1)...(19): siRNA sense strand
caaagaaucagagaaaguu

SEQ ID NO: 2173913 - RNA, 19 nt, Homo sapiens
  misc_RNA (1)...(19): siRNA sense strand
agacaaagaaucagagaaa

SEQ ID NO: 2173914 - RNA, 19 nt, Homo sapiens
  misc_RNA (1)...(19): siRNA sense strand
ugacuuauaucuacucagu

SEQ ID NO: 2173915 - RNA, 19 nt, Homo sapiens
  misc_RNA (1)...(19): siRNA sense strand
agacaaagcaagauugauu

SEQ ID NO: 2173916 - RNA, 19 nt, Homo sapiens
  misc_RNA (1)...(19): siRNA sense strand
gaucuuucgugcacuguga

SEQ ID NO: 2173917 - RNA, 19 nt, Homo sapiens
  misc_RNA (1)...(19): siRNA sense strand
aaaggaagauugccacaca

SEQ ID NO: 2173918 - RNA, 19 nt, Homo sapiens
  misc_RNA (1)...(19): siRNA sense strand
guaauaaugcuuccaaagu

SEQ ID NO: 2173919 - RNA, 19 nt, Homo sapiens
  misc_RNA (1)...(19): siRNA sense strand
gaaggagaaaggaaagaaa

SEQ ID NO: 2173920 - RNA, 19 nt, Homo sapiens
  misc_RNA (1)...(19): siRNA sense strand
gaugacauaacucaacuaa

SEQ ID NO: 2173921 - RNA, 19 nt, Homo sapiens
  misc_RNA (1)...(19): siRNA sense strand
agaaauaacaggaagagaa

SEQ ID NO: 2173922 - RNA, 19 nt, Homo sapiens
  misc_RNA (1)...(19): siRNA sense strand
uauuguggcucuucugaaa

SEQ ID NO: 2173923 - RNA, 19 nt, Homo sapiens
  misc_RNA (1)...(19): siRNA sense strand
cagauuguccugccuuuaa

SEQ ID NO: 2173924 - RNA, 19 nt, Homo sapiens
  misc_RNA (1)...(19): siRNA sense strand
gcacaaaguaugucugaag

SEQ ID NO: 2173925 - RNA, 19 nt, Homo sapiens
  misc_RNA (1)...(19): siRNA sense strand
gaagaaggaggaaaucaag

SEQ ID NO: 2173926 - RNA, 19 nt, Homo sapiens
  misc_RNA (1)...(19): siRNA sense strand
cagcuuacaauuucugaua

SEQ ID NO: 2173927 - RNA, 19 nt, Homo sapiens
  misc_RNA (1)...(19): siRNA sense strand
gcuccugccuugauuugaa

SEQ ID NO: 2173928 - RNA, 19 nt, Homo sapiens
  misc_RNA (1)...(19): siRNA sense strand
cagacuuccucaagaaauu

SEQ ID NO: 2173929 - RNA, 19 nt, Homo sapiens
  misc_RNA (1)...(19): siRNA sense strand
gcaaguaauguuuauguca

SEQ ID NO: 2173930 - RNA, 19 nt, Homo sapiens
  misc_RNA (1)...(19): siRNA sense strand
gagcaaguaauguuuaugu

SEQ ID NO: 2173931 - RNA, 19 nt, Homo sapiens
  misc_RNA (1)...(19): siRNA sense strand
ucaaggugauuucaaagga

SEQ ID NO: 2173932 - RNA, 19 nt, Homo sapiens
  misc_RNA (1)...(19): siRNA sense strand
gugaaagaaugguauguag

SEQ ID NO: 2173933 - RNA, 19 nt, Homo sapiens
  misc_RNA (1)...(19): siRNA sense strand
guuggaagcaggugaagua

SEQ ID NO: 2173934 - RNA, 19 nt, Homo sapiens
  misc_RNA (1)...(19): siRNA sense strand
gcaacugcuacauuuauaa

SEQ ID NO: 2173935 - RNA, 19 nt, Homo sapiens
  misc_RNA (1)...(19): siRNA sense strand
uaugucagauagugucuuu

SEQ ID NO: 2173936 - RNA, 19 nt, Homo sapiens
  misc_RNA (1)...(19): siRNA sense strand
guggaaaccugccuaugau

SEQ ID NO: 2173937 - RNA, 19 nt, Homo sapiens
  misc_RNA (1)...(19): siRNA sense strand
acaaggaaguuucuguaug

SEQ ID NO: 2173938 - RNA, 19 nt, Homo sapiens
  misc_RNA (1)...(19): siRNA sense strand
gaaauucuggaagaucuaa

SEQ ID NO: 2173939 - RNA, 19 nt, Homo sapiens
  misc_RNA (1)...(19): siRNA sense strand
uaacugcauucuccacuuc

SEQ ID NO: 2173940 - RNA, 19 nt, Homo sapiens
  misc_RNA (1)...(19): siRNA sense strand
ggagggaacuagcugaaaa

SEQ ID NO: 2173941 - RNA, 19 nt, Homo sapiens
  misc_RNA (1)...(19): siRNA sense strand
gagguaagauuggacuugu

SEQ ID NO: 2173942 - RNA, 19 nt, Homo sapiens
  misc_RNA (1)...(19): siRNA sense strand
gagagaugcacuuguuuga

SEQ ID NO: 2173943 - RNA, 19 nt, Homo sapiens
  misc_RNA (1)...(19): siRNA sense strand
gcacagagagaugcacuug

SEQ ID NO: 2173944 - RNA, 19 nt, Homo sapiens
  misc_RNA (1)...(19): siRNA sense strand
ccaggacagcuuacaauuu

SEQ ID NO: 2173945 - RNA, 19 nt, Homo sapiens
  misc_RNA (1)...(19): siRNA sense strand
caaccucaauacaauggaa

SEQ ID NO: 2173946 - RNA, 19 nt, Homo sapiens
  misc_RNA (1)...(19): siRNA sense strand
gauccuacuacacgacuua

SEQ ID NO: 2173947 - RNA, 19 nt, Homo sapiens
  misc_RNA (1)...(19): siRNA sense strand
acaauuggccggaugcuuu

SEQ ID NO: 2173948 - RNA, 19 nt, Homo sapiens
  misc_RNA (1)...(19): siRNA sense strand
gaagaauugcacaaaguau

SEQ ID NO: 2173949 - RNA, 19 nt, Homo sapiens
  misc_RNA (1)...(19): siRNA sense strand
caaauggaggcauaugaaa

SEQ ID NO: 2173950 - RNA, 19 nt, Homo sapiens
  misc_RNA (1)...(19): siRNA sense strand
aaucagacaucacuguuca

SEQ ID NO: 2173951 - RNA, 19 nt, Homo sapiens
  misc_RNA (1)...(19): siRNA sense strand
guaaauucuuuggagguuu

SEQ ID NO: 2173952 - RNA, 19 nt, Homo sapiens
  misc_RNA (1)...(19): siRNA sense strand
uaaacacuggagagaauua

SEQ ID NO: 2173953 - RNA, 19 nt, Homo sapiens
  misc_RNA (1)...(19): siRNA sense strand
ucacaaagcaacaaaugga

SEQ ID NO: 2173954 - RNA, 19 nt, Homo sapiens
  misc_RNA (1)...(19): siRNA sense strand
aauaaugcuuccaaaguug

SEQ ID NO: 2173955 - RNA, 19 nt, Homo sapiens
  misc_RNA (1)...(19): siRNA sense strand
ucagucagcuuuggacaga

SEQ ID NO: 2173956 - RNA, 19 nt, Homo sapiens
  misc_RNA (1)...(19): siRNA sense strand
caaggagggucaguacaau

SEQ ID NO: 2173957 - RNA, 19 nt, Homo sapiens
  misc_RNA (1)...(19): siRNA sense strand
gaaaauuggggcugaagua

SEQ ID NO: 2173958 - RNA, 19 nt, Homo sapiens
  misc_RNA (1)...(19): siRNA sense strand
uaaaauggcuugguuaagu

SEQ ID NO: 2173959 - RNA, 19 nt, Homo sapiens
  misc_RNA (1)...(19): siRNA sense strand
guaacugcauucuccacuu

SEQ ID NO: 2173960 - RNA, 19 nt, Homo sapiens
  misc_RNA (1)...(19): siRNA sense strand
acuaaacacuggagagaau

SEQ ID NO: 2173961 - RNA, 19 nt, Homo sapiens
  misc_RNA (1)...(19): siRNA sense strand
uaagacaaagcaagauuga

SEQ ID NO: 2173962 - RNA, 19 nt, Homo sapiens
  misc_RNA (1)...(19): siRNA sense strand
gacagaaggagaaaggaaa

SEQ ID NO: 2173963 - RNA, 19 nt, Homo sapiens
  misc_RNA (1)...(19): siRNA sense strand
gcuaagacaaagcaagauu

SEQ ID NO: 2173964 - RNA, 19 nt, Homo sapiens
  misc_RNA (1)...(19): siRNA sense strand
uaggcaaccucaauacaau

SEQ ID NO: 2173965 - RNA, 19 nt, Homo sapiens
  misc_RNA (1)...(19): siRNA sense strand
gcccaucagaguauacaua

SEQ ID NO: 2173966 - RNA, 19 nt, Homo sapiens
  misc_RNA (1)...(19): siRNA sense strand
gaaguuaaaggaagauugc

SEQ ID NO: 2173967 - RNA, 19 nt, Homo sapiens
  misc_RNA (1)...(19): siRNA sense strand
guugcaauauuacagaaug

SEQ ID NO: 2173968 - RNA, 19 nt, Homo sapiens
  misc_RNA (1)...(19): siRNA sense strand
cgacuuagaguggcuuaaa

SEQ ID NO: 2173969 - RNA, 19 nt, Homo sapiens
  misc_RNA (1)...(19): siRNA sense strand
aaauauauccaucccaguu

SEQ ID NO: 2173970 - RNA, 19 nt, Homo sapiens
  misc_RNA (1)...(19): siRNA sense strand
gaacuuauuguggcucuuc

SEQ ID NO: 2173971 - RNA, 19 nt, Homo sapiens
  misc_RNA (1)...(19): siRNA sense strand
acuuauaucuacucaguug

SEQ ID NO: 2173972 - RNA, 19 nt, Homo sapiens
  misc_RNA (1)...(19): siRNA sense strand
caaagugaaagaaugguau

SEQ ID NO: 2173973 - RNA, 19 nt, Homo sapiens
  misc_RNA (1)...(19): siRNA sense strand
gacccagacuugcuucaca

SEQ ID NO: 2173974 - RNA, 19 nt, Homo sapiens
  misc_RNA (1)...(19): siRNA sense strand
gcacgucucauccaagaag

SEQ ID NO: 2173975 - RNA, 19 nt, Homo sapiens
  misc_RNA (1)...(19): siRNA sense strand
gacaaagaaucagagaaag

SEQ ID NO: 2173976 - RNA, 19 nt, Homo sapiens
  misc_RNA (1)...(19): siRNA sense strand
ucagauagugucuuuacaa

SEQ ID NO: 2173977 - RNA, 19 nt, Homo sapiens
  misc_RNA (1)...(19): siRNA sense strand
gccaacgacuacucuguuu

SEQ ID NO: 2173978 - RNA, 19 nt, Homo sapiens
  misc_RNA (1)...(19): siRNA sense strand
gccgcuaccuguaauaaga

SEQ ID NO: 2173979 - RNA, 19 nt, Homo sapiens
  misc_RNA (1)...(19): siRNA sense strand
gaggcuacaacucggauua

SEQ ID NO: 2173980 - RNA, 19 nt, Homo sapiens
  misc_RNA (1)...(19): siRNA sense strand
gcgcuucgccuguccaguu

SEQ ID NO: 2173981 - RNA, 19 nt, Homo sapiens
  misc_RNA (1)...(19): siRNA sense strand
guaguggguuccagucucu

SEQ ID NO: 2173982 - RNA, 19 nt, Homo sapiens
  misc_RNA (1)...(19): siRNA sense strand
guuccagucucucaagcuu

SEQ ID NO: 2173983 - RNA, 19 nt, Homo sapiens
  misc_RNA (1)...(19): siRNA sense strand
ccgcaacggccuagaguga

SEQ ID NO: 2173984 - RNA, 19 nt, Homo sapiens
  misc_RNA (1)...(19): siRNA sense strand
gcagcgaccaccucagcaa

SEQ ID NO: 2173985 - RNA, 19 nt, Homo sapiens
  misc_RNA (1)...(19): siRNA sense strand
gcaagacuucgcaccucaa

SEQ ID NO: 2173986 - RNA, 19 nt, Homo sapiens
  misc_RNA (1)...(19): siRNA sense strand
aaacgcuccucguccucuu

SEQ ID NO: 2173987 - RNA, 19 nt, Homo sapiens
  misc_RNA (1)...(19): siRNA sense strand
gcgaccaccucagcaagca

SEQ ID NO: 2173988 - RNA, 19 nt, Homo sapiens
  misc_RNA (1)...(19): siRNA sense strand
cgacuccucuggccaugcu

SEQ ID NO: 2173989 - RNA, 19 nt, Homo sapiens
  misc_RNA (1)...(19): siRNA sense strand
ggcaagguguacggcaaga

SEQ ID NO: 2173990 - RNA, 19 nt, Homo sapiens
  misc_RNA (1)...(19): siRNA sense strand
gcuugccgcuaccuguaau

SEQ ID NO: 2173991 - RNA, 19 nt, Homo sapiens
  misc_RNA (1)...(19): siRNA sense strand
cgcuaccuguaauaagaua

SEQ ID NO: 2173992 - RNA, 19 nt, Homo sapiens
  misc_RNA (1)...(19): siRNA sense strand
ccucauggacggcuucaag

SEQ ID NO: 2173993 - RNA, 19 nt, Homo sapiens
  misc_RNA (1)...(19): siRNA sense strand
gccaacgacuacucuguuu

SEQ ID NO: 2173994 - RNA, 19 nt, Homo sapiens
  misc_RNA (1)...(19): siRNA sense strand
gccgcuaccuguaauaaga

SEQ ID NO: 2173995 - RNA, 19 nt, Homo sapiens
  misc_RNA (1)...(19): siRNA sense strand
gaggcuacaacucggauua

SEQ ID NO: 2173996 - RNA, 19 nt, Homo sapiens
  misc_RNA (1)...(19): siRNA sense strand
gcgcuucgccuguccaguu

SEQ ID NO: 2173997 - RNA, 19 nt, Homo sapiens
  misc_RNA (1)...(19): siRNA sense strand
guaguggguuccagucucu

SEQ ID NO: 2173998 - RNA, 19 nt, Homo sapiens
  misc_RNA (1)...(19): siRNA sense strand
guuccagucucucaagcuu

SEQ ID NO: 2173999 - RNA, 19 nt, Homo sapiens
  misc_RNA (1)...(19): siRNA sense strand
ccgcaacggccuagaguga

SEQ ID NO: 2174000 - RNA, 19 nt, Homo sapiens
  misc_RNA (1)...(19): siRNA sense strand
gcagcgaccaccucagcaa

SEQ ID NO: 2174001 - RNA, 19 nt, Homo sapiens
  misc_RNA (1)...(19): siRNA sense strand
gcaagacuucgcaccucaa

SEQ ID NO: 2174002 - RNA, 19 nt, Homo sapiens
  misc_RNA (1)...(19): siRNA sense strand
aaacgcuccucguccucuu

SEQ ID NO: 2174003 - RNA, 19 nt, Homo sapiens
  misc_RNA (1)...(19): siRNA sense strand
gcgaccaccucagcaagca

SEQ ID NO: 2174004 - RNA, 19 nt, Homo sapiens
  misc_RNA (1)...(19): siRNA sense strand
ggcaagguguacggcaaga

SEQ ID NO: 2174005 - RNA, 19 nt, Homo sapiens
  misc_RNA (1)...(19): siRNA sense strand
gcuugccgcuaccuguaau

SEQ ID NO: 2174006 - RNA, 19 nt, Homo sapiens
  misc_RNA (1)...(19): siRNA sense strand
cgcuaccuguaauaagaua

SEQ ID NO: 2174007 - RNA, 19 nt, Homo sapiens
  misc_RNA (1)...(19): siRNA sense strand
ccucauggacggcuucaag

SEQ ID NO: 2174008 - RNA, 19 nt, Homo sapiens
  misc_RNA (1)...(19): siRNA sense strand
gccaacgacuacucuguuu

SEQ ID NO: 2174009 - RNA, 19 nt, Homo sapiens
  misc_RNA (1)...(19): siRNA sense strand
gccgcuaccuguaauaaga

SEQ ID NO: 2174010 - RNA, 19 nt, Homo sapiens
  misc_RNA (1)...(19): siRNA sense strand
gaggcuacaacucggauua

SEQ ID NO: 2174011 - RNA, 19 nt, Homo sapiens
  misc_RNA (1)...(19): siRNA sense strand
gcgcuucgccuguccaguu

SEQ ID NO: 2174012 - RNA, 19 nt, Homo sapiens
  misc_RNA (1)...(19): siRNA sense strand
guaguggguuccagucucu

SEQ ID NO: 2174013 - RNA, 19 nt, Homo sapiens
  misc_RNA (1)...(19): siRNA sense strand
guuccagucucucaagcuu

SEQ ID NO: 2174014 - RNA, 19 nt, Homo sapiens
  misc_RNA (1)...(19): siRNA sense strand
ccgcaacggccuagaguga

SEQ ID NO: 2174015 - RNA, 19 nt, Homo sapiens
  misc_RNA (1)...(19): siRNA sense strand
gcagcgaccaccucagcaa

SEQ ID NO: 2174016 - RNA, 19 nt, Homo sapiens
  misc_RNA (1)...(19): siRNA sense strand
gcaagacuucgcaccucaa

SEQ ID NO: 2174017 - RNA, 19 nt, Homo sapiens
  misc_RNA (1)...(19): siRNA sense strand
aaacgcuccucguccucuu

SEQ ID NO: 2174018 - RNA, 19 nt, Homo sapiens
  misc_RNA (1)...(19): siRNA sense strand
gcgaccaccucagcaagca

SEQ ID NO: 2174019 - RNA, 19 nt, Homo sapiens
  misc_RNA (1)...(19): siRNA sense strand
cgacuccucuggccaugcu

SEQ ID NO: 2174020 - RNA, 19 nt, Homo sapiens
  misc_RNA (1)...(19): siRNA sense strand
ggcaagguguacggcaaga

SEQ ID NO: 2174021 - RNA, 19 nt, Homo sapiens
  misc_RNA (1)...(19): siRNA sense strand
gcuugccgcuaccuguaau

SEQ ID NO: 2174022 - RNA, 19 nt, Homo sapiens
  misc_RNA (1)...(19): siRNA sense strand
cgcuaccuguaauaagaua

SEQ ID NO: 2174023 - RNA, 19 nt, Homo sapiens
  misc_RNA (1)...(19): siRNA sense strand
ccucauggacggcuucaag

SEQ ID NO: 2174024 - RNA, 19 nt, Homo sapiens
  misc_RNA (1)...(19): siRNA sense strand
gccaacgacuacucuguuu

SEQ ID NO: 2174025 - RNA, 19 nt, Homo sapiens
  misc_RNA (1)...(19): siRNA sense strand
gccgcuaccuguaauaaga

SEQ ID NO: 2174026 - RNA, 19 nt, Homo sapiens
  misc_RNA (1)...(19): siRNA sense strand
gaggcuacaacucggauua

SEQ ID NO: 2174027 - RNA, 19 nt, Homo sapiens
  misc_RNA (1)...(19): siRNA sense strand
gcgcuucgccuguccaguu

SEQ ID NO: 2174028 - RNA, 19 nt, Homo sapiens
  misc_RNA (1)...(19): siRNA sense strand
guaguggguuccagucucu

SEQ ID NO: 2174029 - RNA, 19 nt, Homo sapiens
  misc_RNA (1)...(19): siRNA sense strand
guuccagucucucaagcuu

SEQ ID NO: 2174030 - RNA, 19 nt, Homo sapiens
  misc_RNA (1)...(19): siRNA sense strand
ccgcaacggccuagaguga

SEQ ID NO: 2174031 - RNA, 19 nt, Homo sapiens
  misc_RNA (1)...(19): siRNA sense strand
gcagcgaccaccucagcaa

SEQ ID NO: 2174032 - RNA, 19 nt, Homo sapiens
  misc_RNA (1)...(19): siRNA sense strand
gcaagacuucgcaccucaa

SEQ ID NO: 2174033 - RNA, 19 nt, Homo sapiens
  misc_RNA (1)...(19): siRNA sense strand
aaacgcuccucguccucuu

SEQ ID NO: 2174034 - RNA, 19 nt, Homo sapiens
  misc_RNA (1)...(19): siRNA sense strand
gcgaccaccucagcaagca

SEQ ID NO: 2174035 - RNA, 19 nt, Homo sapiens
  misc_RNA (1)...(19): siRNA sense strand
cgacuccucuggccaugcu

SEQ ID NO: 2174036 - RNA, 19 nt, Homo sapiens
  misc_RNA (1)...(19): siRNA sense strand
ggcaagguguacggcaaga

SEQ ID NO: 2174037 - RNA, 19 nt, Homo sapiens
  misc_RNA (1)...(19): siRNA sense strand
gcuugccgcuaccuguaau

SEQ ID NO: 2174038 - RNA, 19 nt, Homo sapiens
  misc_RNA (1)...(19): siRNA sense strand
cgcuaccuguaauaagaua

SEQ ID NO: 2174039 - RNA, 19 nt, Homo sapiens
  misc_RNA (1)...(19): siRNA sense strand
ccucauggacggcuucaag

SEQ ID NO: 2174040 - RNA, 19 nt, Homo sapiens
  misc_RNA (1)...(19): siRNA sense strand
caacagggauggauuguaa

SEQ ID NO: 2174041 - RNA, 19 nt, Homo sapiens
  misc_RNA (1)...(19): siRNA sense strand
gaaagacgauaccaggaaa

SEQ ID NO: 2174042 - RNA, 19 nt, Homo sapiens
  misc_RNA (1)...(19): siRNA sense strand
gaucugcccugccaaguga

SEQ ID NO: 2174043 - RNA, 19 nt, Homo sapiens
  misc_RNA (1)...(19): siRNA sense strand
gugcagggcuuaccuuuau

SEQ ID NO: 2174044 - RNA, 19 nt, Homo sapiens
  misc_RNA (1)...(19): siRNA sense strand
guagacagcccauuccuaa

SEQ ID NO: 2174045 - RNA, 19 nt, Homo sapiens
  misc_RNA (1)...(19): siRNA sense strand
ccagaaacguuaacagaug

SEQ ID NO: 2174046 - RNA, 19 nt, Homo sapiens
  misc_RNA (1)...(19): siRNA sense strand
ugauauggcuuucuuugaa

SEQ ID NO: 2174047 - RNA, 19 nt, Homo sapiens
  misc_RNA (1)...(19): siRNA sense strand
guagucaaguuucuucauu

SEQ ID NO: 2174048 - RNA, 19 nt, Homo sapiens
  misc_RNA (1)...(19): siRNA sense strand
gaugauggagggaaacuuu

SEQ ID NO: 2174049 - RNA, 19 nt, Homo sapiens
  misc_RNA (1)...(19): siRNA sense strand
caauacauguuccaagugu

SEQ ID NO: 2174050 - RNA, 19 nt, Homo sapiens
  misc_RNA (1)...(19): siRNA sense strand
gggauggauuguaaacuug

SEQ ID NO: 2174051 - RNA, 19 nt, Homo sapiens
  misc_RNA (1)...(19): siRNA sense strand
acacauagguauaaacaac

SEQ ID NO: 2174052 - RNA, 19 nt, Homo sapiens
  misc_RNA (1)...(19): siRNA sense strand
gagaauuguuggugaggau

SEQ ID NO: 2174053 - RNA, 19 nt, Homo sapiens
  misc_RNA (1)...(19): siRNA sense strand
gaugauauggcuuucuuug

SEQ ID NO: 2174054 - RNA, 19 nt, Homo sapiens
  misc_RNA (1)...(19): siRNA sense strand
guacacauagguauaaaca

SEQ ID NO: 2174055 - RNA, 19 nt, Homo sapiens
  misc_RNA (1)...(19): siRNA sense strand
cagaaacguuaacagaugu

SEQ ID NO: 2174056 - RNA, 19 nt, Homo sapiens
  misc_RNA (1)...(19): siRNA sense strand
ucaaguuucuucauuaagg

SEQ ID NO: 2174057 - RNA, 19 nt, Homo sapiens
  misc_RNA (1)...(19): siRNA sense strand
gcugcuaaguggaaaggaa

SEQ ID NO: 2174058 - RNA, 19 nt, Homo sapiens
  misc_RNA (1)...(19): siRNA sense strand
caaguuucuucauuaagga

SEQ ID NO: 2174059 - RNA, 19 nt, Homo sapiens
  misc_RNA (1)...(19): siRNA sense strand
uuccauagcugcuucacuu

SEQ ID NO: 2174060 - RNA, 19 nt, Homo sapiens
  misc_RNA (1)...(19): siRNA sense strand
aaggagaccugaagaggau

SEQ ID NO: 2174061 - RNA, 19 nt, Homo sapiens
  misc_RNA (1)...(19): siRNA sense strand
gguacaaguagucaaguuu

SEQ ID NO: 2174062 - RNA, 19 nt, Homo sapiens
  misc_RNA (1)...(19): siRNA sense strand
gaaagauuggcucaggaaa

SEQ ID NO: 2174063 - RNA, 19 nt, Homo sapiens
  misc_RNA (1)...(19): siRNA sense strand
ggaaacuaagcaagaaaga

SEQ ID NO: 2174064 - RNA, 19 nt, Homo sapiens
  misc_RNA (1)...(19): siRNA sense strand
ugaaagacgauaccaggaa

SEQ ID NO: 2174065 - RNA, 19 nt, Homo sapiens
  misc_RNA (1)...(19): siRNA sense strand
uuucaagcaucaucuaguu

SEQ ID NO: 2174066 - RNA, 19 nt, Homo sapiens
  misc_RNA (1)...(19): siRNA sense strand
ggaaggcuacaugcgguua

SEQ ID NO: 2174067 - RNA, 19 nt, Homo sapiens
  misc_RNA (1)...(19): siRNA sense strand
gcgccuggcuuuacaugca

SEQ ID NO: 2174068 - RNA, 19 nt, Homo sapiens
  misc_RNA (1)...(19): siRNA sense strand
gaaacuaagcaagaaagau

SEQ ID NO: 2174069 - RNA, 19 nt, Homo sapiens
  misc_RNA (1)...(19): siRNA sense strand
gaaaggaaaagcuccauug

SEQ ID NO: 2174070 - RNA, 19 nt, Homo sapiens
  misc_RNA (1)...(19): siRNA sense strand
guacaaguagucaaguuuc

SEQ ID NO: 2174071 - RNA, 19 nt, Homo sapiens
  misc_RNA (1)...(19): siRNA sense strand
agggauggauuguaaacuu

SEQ ID NO: 2174072 - RNA, 19 nt, Homo sapiens
  misc_RNA (1)...(19): siRNA sense strand
gaccugaagaggaugauau

SEQ ID NO: 2174073 - RNA, 19 nt, Homo sapiens
  misc_RNA (1)...(19): siRNA sense strand
ugaggaugauggagggaaa

SEQ ID NO: 2174074 - RNA, 19 nt, Homo sapiens
  misc_RNA (1)...(19): siRNA sense strand
gcaauacauguuccaagug

SEQ ID NO: 2174075 - RNA, 19 nt, Homo sapiens
  misc_RNA (1)...(19): siRNA sense strand
cauagcugcuucacuugug

SEQ ID NO: 2174076 - RNA, 19 nt, Homo sapiens
  misc_RNA (1)...(19): siRNA sense strand
ugcaauacauguuccaagu

SEQ ID NO: 2174077 - RNA, 19 nt, Homo sapiens
  misc_RNA (1)...(19): siRNA sense strand
caaguagucaaguuucuuc

SEQ ID NO: 2174078 - RNA, 19 nt, Homo sapiens
  misc_RNA (1)...(19): siRNA sense strand
gcauuucaagcaucaucua

SEQ ID NO: 2174079 - RNA, 19 nt, Homo sapiens
  misc_RNA (1)...(19): siRNA sense strand
acauaaaacugacuuggaa

SEQ ID NO: 2174080 - RNA, 19 nt, Homo sapiens
  misc_RNA (1)...(19): siRNA sense strand
gacgauaccaggaaaggau

SEQ ID NO: 2174081 - RNA, 19 nt, Homo sapiens
  misc_RNA (1)...(19): siRNA sense strand
gaauuguuggugaggauga

SEQ ID NO: 2174082 - RNA, 19 nt, Homo sapiens
  misc_RNA (1)...(19): siRNA sense strand
aggaugauauggcuuucuu

SEQ ID NO: 2174083 - RNA, 19 nt, Homo sapiens
  misc_RNA (1)...(19): siRNA sense strand
ggauugguguaccuucagu

SEQ ID NO: 2174084 - RNA, 19 nt, Homo sapiens
  misc_RNA (1)...(19): siRNA sense strand
gcuacaugcgguuagauga

SEQ ID NO: 2174085 - RNA, 19 nt, Homo sapiens
  misc_RNA (1)...(19): siRNA sense strand
caagcaucaucuaguucuu

SEQ ID NO: 2174086 - RNA, 19 nt, Homo sapiens
  misc_RNA (1)...(19): siRNA sense strand
gaaaggaugaaaauggaaa

SEQ ID NO: 2174087 - RNA, 19 nt, Homo sapiens
  misc_RNA (1)...(19): siRNA sense strand
gauggauuguaaacuugug

SEQ ID NO: 2174088 - RNA, 19 nt, Homo sapiens
  misc_RNA (1)...(19): siRNA sense strand
ggcuuuacaugcaauacau

SEQ ID NO: 2174089 - RNA, 19 nt, Homo sapiens
  misc_RNA (1)...(19): siRNA sense strand
gcagggcuuaccuuuaugu

SEQ ID NO: 2174090 - RNA, 19 nt, Homo sapiens
  misc_RNA (1)...(19): siRNA sense strand
gaguaccggagaauuguug

SEQ ID NO: 2174091 - RNA, 19 nt, Homo sapiens
  misc_RNA (1)...(19): siRNA sense strand
agaaagauuggcucaggaa

SEQ ID NO: 2174092 - RNA, 19 nt, Homo sapiens
  misc_RNA (1)...(19): siRNA sense strand
cugcuucacuugugcuugu

SEQ ID NO: 2174093 - RNA, 19 nt, Homo sapiens
  misc_RNA (1)...(19): siRNA sense strand
aagaggaugauauggcuuu

SEQ ID NO: 2174094 - RNA, 19 nt, Homo sapiens
  misc_RNA (1)...(19): siRNA sense strand
ggagaccugaagaggauga

SEQ ID NO: 2174095 - RNA, 19 nt, Homo sapiens
  misc_RNA (1)...(19): siRNA sense strand
aguggaaacuaagcaagaa

SEQ ID NO: 2174096 - RNA, 19 nt, Homo sapiens
  misc_RNA (1)...(19): siRNA sense strand
guagguacaaguagucaag

SEQ ID NO: 2174097 - RNA, 19 nt, Homo sapiens
  misc_RNA (1)...(19): siRNA sense strand
ggcaguagacagcccauuc

SEQ ID NO: 2174098 - RNA, 19 nt, Homo sapiens
  misc_RNA (1)...(19): siRNA sense strand
ccucugcgcuuacaaaaca

SEQ ID NO: 2174099 - RNA, 19 nt, Homo sapiens
  misc_RNA (1)...(19): siRNA sense strand
gcgcuuacaaaacagauua

SEQ ID NO: 2174100 - RNA, 19 nt, Homo sapiens
  misc_RNA (1)...(19): siRNA sense strand
ggaguaccggagaauuguu

SEQ ID NO: 2174101 - RNA, 19 nt, Homo sapiens
  misc_RNA (1)...(19): siRNA sense strand
ggaugauauggcuuucuuu

SEQ ID NO: 2174102 - RNA, 19 nt, Homo sapiens
  misc_RNA (1)...(19): siRNA sense strand
ccauugccaucagcuacaa

SEQ ID NO: 2174103 - RNA, 19 nt, Homo sapiens
  misc_RNA (1)...(19): siRNA sense strand
ccaacagggauggauugua

SEQ ID NO: 2174104 - RNA, 19 nt, Homo sapiens
  misc_RNA (1)...(19): siRNA sense strand
ggauggauuguaaacuugu

SEQ ID NO: 2174105 - RNA, 19 nt, Homo sapiens
  misc_RNA (1)...(19): siRNA sense strand
ccaugacacaguaguggaa

SEQ ID NO: 2174106 - RNA, 19 nt, Homo sapiens
  misc_RNA (1)...(19): siRNA sense strand
ucaccaacagggauggauu

SEQ ID NO: 2174107 - RNA, 19 nt, Homo sapiens
  misc_RNA (1)...(19): siRNA sense strand
aaacuugugggcccagaga

SEQ ID NO: 2174108 - RNA, 19 nt, Homo sapiens
  misc_RNA (1)...(19): siRNA sense strand
ugggaggauuaacugguuu

SEQ ID NO: 2174109 - RNA, 19 nt, Homo sapiens
  misc_RNA (1)...(19): siRNA sense strand
gcagccaugggaggauuaa

SEQ ID NO: 2174110 - RNA, 19 nt, Homo sapiens
  misc_RNA (1)...(19): siRNA sense strand
uuccaaguguucaggauuc

SEQ ID NO: 2174111 - RNA, 19 nt, Homo sapiens
  misc_RNA (1)...(19): siRNA sense strand
aaaggcugcuaaguggaaa

SEQ ID NO: 2174112 - RNA, 19 nt, Homo sapiens
  misc_RNA (1)...(19): siRNA sense strand
uacaaguagucaaguuucu

SEQ ID NO: 2174113 - RNA, 19 nt, Homo sapiens
  misc_RNA (1)...(19): siRNA sense strand
uuuagaaucucccauuacg

SEQ ID NO: 2174114 - RNA, 19 nt, Homo sapiens
  misc_RNA (1)...(19): siRNA sense strand
ugacagugggauuggugua

SEQ ID NO: 2174115 - RNA, 19 nt, Homo sapiens
  misc_RNA (1)...(19): siRNA sense strand
caccaacagggauggauug

SEQ ID NO: 2174116 - RNA, 19 nt, Homo sapiens
  misc_RNA (1)...(19): siRNA sense strand
ugggauugguguaccuuca

SEQ ID NO: 2174117 - RNA, 19 nt, Homo sapiens
  misc_RNA (1)...(19): siRNA sense strand
cuccagaaacguuaacaga

SEQ ID NO: 2174118 - RNA, 19 nt, Homo sapiens
  misc_RNA (1)...(19): siRNA sense strand
aaaagcauuucaagcauca

SEQ ID NO: 2174119 - RNA, 19 nt, Homo sapiens
  misc_RNA (1)...(19): siRNA sense strand
agacagcccauuccuaaaa

SEQ ID NO: 2174120 - RNA, 19 nt, Homo sapiens
  misc_RNA (1)...(19): siRNA sense strand
caacagggauggauuguaa

SEQ ID NO: 2174121 - RNA, 19 nt, Homo sapiens
  misc_RNA (1)...(19): siRNA sense strand
gaaagacgauaccaggaaa

SEQ ID NO: 2174122 - RNA, 19 nt, Homo sapiens
  misc_RNA (1)...(19): siRNA sense strand
gaucugcccugccaaguga

SEQ ID NO: 2174123 - RNA, 19 nt, Homo sapiens
  misc_RNA (1)...(19): siRNA sense strand
gugcagggcuuaccuuuau

SEQ ID NO: 2174124 - RNA, 19 nt, Homo sapiens
  misc_RNA (1)...(19): siRNA sense strand
guagacagcccauuccuaa

SEQ ID NO: 2174125 - RNA, 19 nt, Homo sapiens
  misc_RNA (1)...(19): siRNA sense strand
ccagaaacguuaacagaug

SEQ ID NO: 2174126 - RNA, 19 nt, Homo sapiens
  misc_RNA (1)...(19): siRNA sense strand
ugauauggcuuucuuugaa

SEQ ID NO: 2174127 - RNA, 19 nt, Homo sapiens
  misc_RNA (1)...(19): siRNA sense strand
guagucaaguuucuucauu

SEQ ID NO: 2174128 - RNA, 19 nt, Homo sapiens
  misc_RNA (1)...(19): siRNA sense strand
gaugauggagggaaacuuu

SEQ ID NO: 2174129 - RNA, 19 nt, Homo sapiens
  misc_RNA (1)...(19): siRNA sense strand
caauacauguuccaagugu

SEQ ID NO: 2174130 - RNA, 19 nt, Homo sapiens
  misc_RNA (1)...(19): siRNA sense strand
gggauggauuguaaacuug

SEQ ID NO: 2174131 - RNA, 19 nt, Homo sapiens
  misc_RNA (1)...(19): siRNA sense strand
acacauagguauaaacaac

SEQ ID NO: 2174132 - RNA, 19 nt, Homo sapiens
  misc_RNA (1)...(19): siRNA sense strand
gagaauuguuggugaggau

SEQ ID NO: 2174133 - RNA, 19 nt, Homo sapiens
  misc_RNA (1)...(19): siRNA sense strand
gaugauauggcuuucuuug

SEQ ID NO: 2174134 - RNA, 19 nt, Homo sapiens
  misc_RNA (1)...(19): siRNA sense strand
guacacauagguauaaaca

SEQ ID NO: 2174135 - RNA, 19 nt, Homo sapiens
  misc_RNA (1)...(19): siRNA sense strand
cagaaacguuaacagaugu

SEQ ID NO: 2174136 - RNA, 19 nt, Homo sapiens
  misc_RNA (1)...(19): siRNA sense strand
ucaaguuucuucauuaagg

SEQ ID NO: 2174137 - RNA, 19 nt, Homo sapiens
  misc_RNA (1)...(19): siRNA sense strand
gcugcuaaguggaaaggaa

SEQ ID NO: 2174138 - RNA, 19 nt, Homo sapiens
  misc_RNA (1)...(19): siRNA sense strand
caaguuucuucauuaagga

SEQ ID NO: 2174139 - RNA, 19 nt, Homo sapiens
  misc_RNA (1)...(19): siRNA sense strand
uuccauagcugcuucacuu

SEQ ID NO: 2174140 - RNA, 19 nt, Homo sapiens
  misc_RNA (1)...(19): siRNA sense strand
aaggagaccugaagaggau

SEQ ID NO: 2174141 - RNA, 19 nt, Homo sapiens
  misc_RNA (1)...(19): siRNA sense strand
gguacaaguagucaaguuu

SEQ ID NO: 2174142 - RNA, 19 nt, Homo sapiens
  misc_RNA (1)...(19): siRNA sense strand
gaaagauuggcucaggaaa

SEQ ID NO: 2174143 - RNA, 19 nt, Homo sapiens
  misc_RNA (1)...(19): siRNA sense strand
ggaaacuaagcaagaaaga

SEQ ID NO: 2174144 - RNA, 19 nt, Homo sapiens
  misc_RNA (1)...(19): siRNA sense strand
ugaaagacgauaccaggaa

SEQ ID NO: 2174145 - RNA, 19 nt, Homo sapiens
  misc_RNA (1)...(19): siRNA sense strand
uuucaagcaucaucuaguu

SEQ ID NO: 2174146 - RNA, 19 nt, Homo sapiens
  misc_RNA (1)...(19): siRNA sense strand
ggaaggcuacaugcgguua

SEQ ID NO: 2174147 - RNA, 19 nt, Homo sapiens
  misc_RNA (1)...(19): siRNA sense strand
gcgccuggcuuuacaugca

SEQ ID NO: 2174148 - RNA, 19 nt, Homo sapiens
  misc_RNA (1)...(19): siRNA sense strand
gaaacuaagcaagaaagau

SEQ ID NO: 2174149 - RNA, 19 nt, Homo sapiens
  misc_RNA (1)...(19): siRNA sense strand
gaaaggaaaagcuccauug

SEQ ID NO: 2174150 - RNA, 19 nt, Homo sapiens
  misc_RNA (1)...(19): siRNA sense strand
guacaaguagucaaguuuc

SEQ ID NO: 2174151 - RNA, 19 nt, Homo sapiens
  misc_RNA (1)...(19): siRNA sense strand
agggauggauuguaaacuu

SEQ ID NO: 2174152 - RNA, 19 nt, Homo sapiens
  misc_RNA (1)...(19): siRNA sense strand
gaccugaagaggaugauau

SEQ ID NO: 2174153 - RNA, 19 nt, Homo sapiens
  misc_RNA (1)...(19): siRNA sense strand
ugaggaugauggagggaaa

SEQ ID NO: 2174154 - RNA, 19 nt, Homo sapiens
  misc_RNA (1)...(19): siRNA sense strand
gcaauacauguuccaagug

SEQ ID NO: 2174155 - RNA, 19 nt, Homo sapiens
  misc_RNA (1)...(19): siRNA sense strand
cauagcugcuucacuugug

SEQ ID NO: 2174156 - RNA, 19 nt, Homo sapiens
  misc_RNA (1)...(19): siRNA sense strand
ugcaauacauguuccaagu

SEQ ID NO: 2174157 - RNA, 19 nt, Homo sapiens
  misc_RNA (1)...(19): siRNA sense strand
caaguagucaaguuucuuc

SEQ ID NO: 2174158 - RNA, 19 nt, Homo sapiens
  misc_RNA (1)...(19): siRNA sense strand
gcauuucaagcaucaucua

SEQ ID NO: 2174159 - RNA, 19 nt, Homo sapiens
  misc_RNA (1)...(19): siRNA sense strand
acauaaaacugacuuggaa

SEQ ID NO: 2174160 - RNA, 19 nt, Homo sapiens
  misc_RNA (1)...(19): siRNA sense strand
gacgauaccaggaaaggau

SEQ ID NO: 2174161 - RNA, 19 nt, Homo sapiens
  misc_RNA (1)...(19): siRNA sense strand
gaauuguuggugaggauga

SEQ ID NO: 2174162 - RNA, 19 nt, Homo sapiens
  misc_RNA (1)...(19): siRNA sense strand
aggaugauauggcuuucuu

SEQ ID NO: 2174163 - RNA, 19 nt, Homo sapiens
  misc_RNA (1)...(19): siRNA sense strand
ggauugguguaccuucagu

SEQ ID NO: 2174164 - RNA, 19 nt, Homo sapiens
  misc_RNA (1)...(19): siRNA sense strand
gcuacaugcgguuagauga

SEQ ID NO: 2174165 - RNA, 19 nt, Homo sapiens
  misc_RNA (1)...(19): siRNA sense strand
caagcaucaucuaguucuu

SEQ ID NO: 2174166 - RNA, 19 nt, Homo sapiens
  misc_RNA (1)...(19): siRNA sense strand
gaaaggaugaaaauggaaa

SEQ ID NO: 2174167 - RNA, 19 nt, Homo sapiens
  misc_RNA (1)...(19): siRNA sense strand
gauggauuguaaacuugug

SEQ ID NO: 2174168 - RNA, 19 nt, Homo sapiens
  misc_RNA (1)...(19): siRNA sense strand
ggcuuuacaugcaauacau

SEQ ID NO: 2174169 - RNA, 19 nt, Homo sapiens
  misc_RNA (1)...(19): siRNA sense strand
gcagggcuuaccuuuaugu

SEQ ID NO: 2174170 - RNA, 19 nt, Homo sapiens
  misc_RNA (1)...(19): siRNA sense strand
gaguaccggagaauuguug

SEQ ID NO: 2174171 - RNA, 19 nt, Homo sapiens
  misc_RNA (1)...(19): siRNA sense strand
agaaagauuggcucaggaa

SEQ ID NO: 2174172 - RNA, 19 nt, Homo sapiens
  misc_RNA (1)...(19): siRNA sense strand
cugcuucacuugugcuugu

SEQ ID NO: 2174173 - RNA, 19 nt, Homo sapiens
  misc_RNA (1)...(19): siRNA sense strand
aagaggaugauauggcuuu

SEQ ID NO: 2174174 - RNA, 19 nt, Homo sapiens
  misc_RNA (1)...(19): siRNA sense strand
ggagaccugaagaggauga

SEQ ID NO: 2174175 - RNA, 19 nt, Homo sapiens
  misc_RNA (1)...(19): siRNA sense strand
aguggaaacuaagcaagaa

SEQ ID NO: 2174176 - RNA, 19 nt, Homo sapiens
  misc_RNA (1)...(19): siRNA sense strand
guagguacaaguagucaag

SEQ ID NO: 2174177 - RNA, 19 nt, Homo sapiens
  misc_RNA (1)...(19): siRNA sense strand
ggcaguagacagcccauuc

SEQ ID NO: 2174178 - RNA, 19 nt, Homo sapiens
  misc_RNA (1)...(19): siRNA sense strand
ccucugcgcuuacaaaaca

SEQ ID NO: 2174179 - RNA, 19 nt, Homo sapiens
  misc_RNA (1)...(19): siRNA sense strand
gcgcuuacaaaacagauua

SEQ ID NO: 2174180 - RNA, 19 nt, Homo sapiens
  misc_RNA (1)...(19): siRNA sense strand
ggaguaccggagaauuguu

SEQ ID NO: 2174181 - RNA, 19 nt, Homo sapiens
  misc_RNA (1)...(19): siRNA sense strand
ggaugauauggcuuucuuu

SEQ ID NO: 2174182 - RNA, 19 nt, Homo sapiens
  misc_RNA (1)...(19): siRNA sense strand
ccauugccaucagcuacaa

SEQ ID NO: 2174183 - RNA, 19 nt, Homo sapiens
  misc_RNA (1)...(19): siRNA sense strand
ccaacagggauggauugua

SEQ ID NO: 2174184 - RNA, 19 nt, Homo sapiens
  misc_RNA (1)...(19): siRNA sense strand
ggauggauuguaaacuugu

SEQ ID NO: 2174185 - RNA, 19 nt, Homo sapiens
  misc_RNA (1)...(19): siRNA sense strand
ccaugacacaguaguggaa

SEQ ID NO: 2174186 - RNA, 19 nt, Homo sapiens
  misc_RNA (1)...(19): siRNA sense strand
ucaccaacagggauggauu

SEQ ID NO: 2174187 - RNA, 19 nt, Homo sapiens
  misc_RNA (1)...(19): siRNA sense strand
aaacuugugggcccagaga

SEQ ID NO: 2174188 - RNA, 19 nt, Homo sapiens
  misc_RNA (1)...(19): siRNA sense strand
ugggaggauuaacugguuu

SEQ ID NO: 2174189 - RNA, 19 nt, Homo sapiens
  misc_RNA (1)...(19): siRNA sense strand
gcagccaugggaggauuaa

SEQ ID NO: 2174190 - RNA, 19 nt, Homo sapiens
  misc_RNA (1)...(19): siRNA sense strand
uuccaaguguucaggauuc

SEQ ID NO: 2174191 - RNA, 19 nt, Homo sapiens
  misc_RNA (1)...(19): siRNA sense strand
aaaggcugcuaaguggaaa

SEQ ID NO: 2174192 - RNA, 19 nt, Homo sapiens
  misc_RNA (1)...(19): siRNA sense strand
uacaaguagucaaguuucu

SEQ ID NO: 2174193 - RNA, 19 nt, Homo sapiens
  misc_RNA (1)...(19): siRNA sense strand
uuuagaaucucccauuacg

SEQ ID NO: 2174194 - RNA, 19 nt, Homo sapiens
  misc_RNA (1)...(19): siRNA sense strand
ugacagugggauuggugua

SEQ ID NO: 2174195 - RNA, 19 nt, Homo sapiens
  misc_RNA (1)...(19): siRNA sense strand
caccaacagggauggauug

SEQ ID NO: 2174196 - RNA, 19 nt, Homo sapiens
  misc_RNA (1)...(19): siRNA sense strand
ugggauugguguaccuuca

SEQ ID NO: 2174197 - RNA, 19 nt, Homo sapiens
  misc_RNA (1)...(19): siRNA sense strand
cuccagaaacguuaacaga

SEQ ID NO: 2174198 - RNA, 19 nt, Homo sapiens
  misc_RNA (1)...(19): siRNA sense strand
aaaagcauuucaagcauca

SEQ ID NO: 2174199 - RNA, 19 nt, Homo sapiens
  misc_RNA (1)...(19): siRNA sense strand
agacagcccauuccuaaaa

SEQ ID NO: 2174200 - RNA, 19 nt, Homo sapiens
  misc_RNA (1)...(19): siRNA sense strand
caaagcagauggagucuua

SEQ ID NO: 2174201 - RNA, 19 nt, Homo sapiens
  misc_RNA (1)...(19): siRNA sense strand
gaaaugaucuucgaaaggu

SEQ ID NO: 2174202 - RNA, 19 nt, Homo sapiens
  misc_RNA (1)...(19): siRNA sense strand
agaaagggcuuaaagaaga

SEQ ID NO: 2174203 - RNA, 19 nt, Homo sapiens
  misc_RNA (1)...(19): siRNA sense strand
gaaggucccugagcucuuu

SEQ ID NO: 2174204 - RNA, 19 nt, Homo sapiens
  misc_RNA (1)...(19): siRNA sense strand
uauaugaccuuucagauga

SEQ ID NO: 2174205 - RNA, 19 nt, Homo sapiens
  misc_RNA (1)...(19): siRNA sense strand
caacagaaaugaucuucga

SEQ ID NO: 2174206 - RNA, 19 nt, Homo sapiens
  misc_RNA (1)...(19): siRNA sense strand
ggaaauacggcuaacaauu

SEQ ID NO: 2174207 - RNA, 19 nt, Homo sapiens
  misc_RNA (1)...(19): siRNA sense strand
gagauguacuugguaauuu

SEQ ID NO: 2174208 - RNA, 19 nt, Homo sapiens
  misc_RNA (1)...(19): siRNA sense strand
gcagaaagggcuuaaagaa

SEQ ID NO: 2174209 - RNA, 19 nt, Homo sapiens
  misc_RNA (1)...(19): siRNA sense strand
agacuacacugguaaauau

SEQ ID NO: 2174210 - RNA, 19 nt, Homo sapiens
  misc_RNA (1)...(19): siRNA sense strand
caacaaagcauucaucagu

SEQ ID NO: 2174211 - RNA, 19 nt, Homo sapiens
  misc_RNA (1)...(19): siRNA sense strand
gccaaagucuggucugauu

SEQ ID NO: 2174212 - RNA, 19 nt, Homo sapiens
  misc_RNA (1)...(19): siRNA sense strand
gaacaucauugucagaaac

SEQ ID NO: 2174213 - RNA, 19 nt, Homo sapiens
  misc_RNA (1)...(19): siRNA sense strand
gaaauaaagacccuucugu

SEQ ID NO: 2174214 - RNA, 19 nt, Homo sapiens
  misc_RNA (1)...(19): siRNA sense strand
acaaagcauucaucaguuu

SEQ ID NO: 2174215 - RNA, 19 nt, Homo sapiens
  misc_RNA (1)...(19): siRNA sense strand
gcagauggagucuuagaaa

SEQ ID NO: 2174216 - RNA, 19 nt, Homo sapiens
  misc_RNA (1)...(19): siRNA sense strand
gcacauggcuacuguacac

SEQ ID NO: 2174217 - RNA, 19 nt, Homo sapiens
  misc_RNA (1)...(19): siRNA sense strand
uaaagacccuucuguuugg

SEQ ID NO: 2174218 - RNA, 19 nt, Homo sapiens
  misc_RNA (1)...(19): siRNA sense strand
gggugaaacuccuguguug

SEQ ID NO: 2174219 - RNA, 19 nt, Homo sapiens
  misc_RNA (1)...(19): siRNA sense strand
uaacacagccucauuaaaa

SEQ ID NO: 2174220 - RNA, 19 nt, Homo sapiens
  misc_RNA (1)...(19): siRNA sense strand
gagacuacacugguaaaua

SEQ ID NO: 2174221 - RNA, 19 nt, Homo sapiens
  misc_RNA (1)...(19): siRNA sense strand
ggagauguacuugguaauu

SEQ ID NO: 2174222 - RNA, 19 nt, Homo sapiens
  misc_RNA (1)...(19): siRNA sense strand
uagaaacacuuacgcuuca

SEQ ID NO: 2174223 - RNA, 19 nt, Homo sapiens
  misc_RNA (1)...(19): siRNA sense strand
uaacaaagugccaucaaga

SEQ ID NO: 2174224 - RNA, 19 nt, Homo sapiens
  misc_RNA (1)...(19): siRNA sense strand
aauaaagacccuucuguuu

SEQ ID NO: 2174225 - RNA, 19 nt, Homo sapiens
  misc_RNA (1)...(19): siRNA sense strand
ggugguaauuccaggauga

SEQ ID NO: 2174226 - RNA, 19 nt, Homo sapiens
  misc_RNA (1)...(19): siRNA sense strand
cacaggaacuugucaaucu

SEQ ID NO: 2174227 - RNA, 19 nt, Homo sapiens
  misc_RNA (1)...(19): siRNA sense strand
cacuuacgcuucacaguuu

SEQ ID NO: 2174228 - RNA, 19 nt, Homo sapiens
  misc_RNA (1)...(19): siRNA sense strand
cuggaucacuuuggaaaua

SEQ ID NO: 2174229 - RNA, 19 nt, Homo sapiens
  misc_RNA (1)...(19): siRNA sense strand
gaagaugcaggauggagaa

SEQ ID NO: 2174230 - RNA, 19 nt, Homo sapiens
  misc_RNA (1)...(19): siRNA sense strand
gcauaaacaacagaaauga

SEQ ID NO: 2174231 - RNA, 19 nt, Homo sapiens
  misc_RNA (1)...(19): siRNA sense strand
gaaauacaaagcagaugga

SEQ ID NO: 2174232 - RNA, 19 nt, Homo sapiens
  misc_RNA (1)...(19): siRNA sense strand
ucaagaugcucagagacua

SEQ ID NO: 2174233 - RNA, 19 nt, Homo sapiens
  misc_RNA (1)...(19): siRNA sense strand
gauacuuucuggaucacuu

SEQ ID NO: 2174234 - RNA, 19 nt, Homo sapiens
  misc_RNA (1)...(19): siRNA sense strand
gcuaacaauuucacucaag

SEQ ID NO: 2174235 - RNA, 19 nt, Homo sapiens
  misc_RNA (1)...(19): siRNA sense strand
augaggaccuggugacuuu

SEQ ID NO: 2174236 - RNA, 19 nt, Homo sapiens
  misc_RNA (1)...(19): siRNA sense strand
auaaagacccuucuguuug

SEQ ID NO: 2174237 - RNA, 19 nt, Homo sapiens
  misc_RNA (1)...(19): siRNA sense strand
uuagugaacugaccguaga

SEQ ID NO: 2174238 - RNA, 19 nt, Homo sapiens
  misc_RNA (1)...(19): siRNA sense strand
cagaaaugaucuucgaaag

SEQ ID NO: 2174239 - RNA, 19 nt, Homo sapiens
  misc_RNA (1)...(19): siRNA sense strand
caucagugcucaaguugca

SEQ ID NO: 2174240 - RNA, 19 nt, Homo sapiens
  misc_RNA (1)...(19): siRNA sense strand
gagaacaaggcaaaggaaa

SEQ ID NO: 2174241 - RNA, 19 nt, Homo sapiens
  misc_RNA (1)...(19): siRNA sense strand
gaaagggcuuaaagaagac

SEQ ID NO: 2174242 - RNA, 19 nt, Homo sapiens
  misc_RNA (1)...(19): siRNA sense strand
ucgaggauguggaggauga

SEQ ID NO: 2174243 - RNA, 19 nt, Homo sapiens
  misc_RNA (1)...(19): siRNA sense strand
cuaacaauuucacucaaga

SEQ ID NO: 2174244 - RNA, 19 nt, Homo sapiens
  misc_RNA (1)...(19): siRNA sense strand
ggagaacaaggcaaaggaa

SEQ ID NO: 2174245 - RNA, 19 nt, Homo sapiens
  misc_RNA (1)...(19): siRNA sense strand
acacagcaguucaguccaa

SEQ ID NO: 2174246 - RNA, 19 nt, Homo sapiens
  misc_RNA (1)...(19): siRNA sense strand
ccaauugaccucucaguag

SEQ ID NO: 2174247 - RNA, 19 nt, Homo sapiens
  misc_RNA (1)...(19): siRNA sense strand
cuacuugccuggugguaau

SEQ ID NO: 2174248 - RNA, 19 nt, Homo sapiens
  misc_RNA (1)...(19): siRNA sense strand
ugaagaggaugggagagaa

SEQ ID NO: 2174249 - RNA, 19 nt, Homo sapiens
  misc_RNA (1)...(19): siRNA sense strand
gagaacaucauugucagaa

SEQ ID NO: 2174250 - RNA, 19 nt, Homo sapiens
  misc_RNA (1)...(19): siRNA sense strand
uuaaagaagacauguguga

SEQ ID NO: 2174251 - RNA, 19 nt, Homo sapiens
  misc_RNA (1)...(19): siRNA sense strand
gaacucaucaccagauacu

SEQ ID NO: 2174252 - RNA, 19 nt, Homo sapiens
  misc_RNA (1)...(19): siRNA sense strand
aaacuccuguguugacuuc

SEQ ID NO: 2174253 - RNA, 19 nt, Homo sapiens
  misc_RNA (1)...(19): siRNA sense strand
gggagaagauagacaagcu

SEQ ID NO: 2174254 - RNA, 19 nt, Homo sapiens
  misc_RNA (1)...(19): siRNA sense strand
guaacacagccucauuaaa

SEQ ID NO: 2174255 - RNA, 19 nt, Homo sapiens
  misc_RNA (1)...(19): siRNA sense strand
aaauaaagacccuucuguu

SEQ ID NO: 2174256 - RNA, 19 nt, Homo sapiens
  misc_RNA (1)...(19): siRNA sense strand
gggaguuccucagcagaaa

SEQ ID NO: 2174257 - RNA, 19 nt, Homo sapiens
  misc_RNA (1)...(19): siRNA sense strand
uaguaacacagccucauua

SEQ ID NO: 2174258 - RNA, 19 nt, Homo sapiens
  misc_RNA (1)...(19): siRNA sense strand
gaugcaggauggagaacau

SEQ ID NO: 2174259 - RNA, 19 nt, Homo sapiens
  misc_RNA (1)...(19): siRNA sense strand
ggaaauaaagacccuucug

SEQ ID NO: 2174260 - RNA, 19 nt, Homo sapiens
  misc_RNA (1)...(19): siRNA sense strand
gagccuuccuuggauguga

SEQ ID NO: 2174261 - RNA, 19 nt, Homo sapiens
  misc_RNA (1)...(19): siRNA sense strand
cccaaucccugcacucuca

SEQ ID NO: 2174262 - RNA, 19 nt, Homo sapiens
  misc_RNA (1)...(19): siRNA sense strand
aacaaagcauucaucaguu

SEQ ID NO: 2174263 - RNA, 19 nt, Homo sapiens
  misc_RNA (1)...(19): siRNA sense strand
cagcauaaacaacagaaau

SEQ ID NO: 2174264 - RNA, 19 nt, Homo sapiens
  misc_RNA (1)...(19): siRNA sense strand
gaagaggaugggagagaau

SEQ ID NO: 2174265 - RNA, 19 nt, Homo sapiens
  misc_RNA (1)...(19): siRNA sense strand
ggauguggaggaugaguug

SEQ ID NO: 2174266 - RNA, 19 nt, Homo sapiens
  misc_RNA (1)...(19): siRNA sense strand
acucucaguuccaaagaaa

SEQ ID NO: 2174267 - RNA, 19 nt, Homo sapiens
  misc_RNA (1)...(19): siRNA sense strand
gaccucagcauaaacaaca

SEQ ID NO: 2174268 - RNA, 19 nt, Homo sapiens
  misc_RNA (1)...(19): siRNA sense strand
uguggaggaugaguugaua

SEQ ID NO: 2174269 - RNA, 19 nt, Homo sapiens
  misc_RNA (1)...(19): siRNA sense strand
ggagaacaucauugucaga

SEQ ID NO: 2174270 - RNA, 19 nt, Homo sapiens
  misc_RNA (1)...(19): siRNA sense strand
acacuuacgcuucacaguu

SEQ ID NO: 2174271 - RNA, 19 nt, Homo sapiens
  misc_RNA (1)...(19): siRNA sense strand
gcuuaaagaagacaugugu

SEQ ID NO: 2174272 - RNA, 19 nt, Homo sapiens
  misc_RNA (1)...(19): siRNA sense strand
cagaaagggcuuaaagaag

SEQ ID NO: 2174273 - RNA, 19 nt, Homo sapiens
  misc_RNA (1)...(19): siRNA sense strand
agaacaucauugucagaaa

SEQ ID NO: 2174274 - RNA, 19 nt, Homo sapiens
  misc_RNA (1)...(19): siRNA sense strand
gcaaagccagacaugacaa

SEQ ID NO: 2174275 - RNA, 19 nt, Homo sapiens
  misc_RNA (1)...(19): siRNA sense strand
agagagagccguuguugca

SEQ ID NO: 2174276 - RNA, 19 nt, Homo sapiens
  misc_RNA (1)...(19): siRNA sense strand
caaagucuggucugauugu

SEQ ID NO: 2174277 - RNA, 19 nt, Homo sapiens
  misc_RNA (1)...(19): siRNA sense strand
gagaauuccaggccaaagu

SEQ ID NO: 2174278 - RNA, 19 nt, Homo sapiens
  misc_RNA (1)...(19): siRNA sense strand
ugauggagauguacuuggu

SEQ ID NO: 2174279 - RNA, 19 nt, Homo sapiens
  misc_RNA (1)...(19): siRNA sense strand
cgaaagguuuugcaucuug

SEQ ID NO: 2174280 - RNA, 19 nt, Homo sapiens
  misc_RNA (1)...(19): siRNA sense strand
gcucauccgccaggacuuu

SEQ ID NO: 2174281 - RNA, 19 nt, Homo sapiens
  misc_RNA (1)...(19): siRNA sense strand
gaaagguuuugcaucuuga

SEQ ID NO: 2174282 - RNA, 19 nt, Homo sapiens
  misc_RNA (1)...(19): siRNA sense strand
cgagagagagccguuguug

SEQ ID NO: 2174283 - RNA, 19 nt, Homo sapiens
  misc_RNA (1)...(19): siRNA sense strand
ucccaucagugcucaaguu

SEQ ID NO: 2174284 - RNA, 19 nt, Homo sapiens
  misc_RNA (1)...(19): siRNA sense strand
acagaaaugaucuucgaaa

SEQ ID NO: 2174285 - RNA, 19 nt, Homo sapiens
  misc_RNA (1)...(19): siRNA sense strand
acucaucaccagauacuuu

SEQ ID NO: 2174286 - RNA, 19 nt, Homo sapiens
  misc_RNA (1)...(19): siRNA sense strand
ggagucuuagaaacacuua

SEQ ID NO: 2174287 - RNA, 19 nt, Homo sapiens
  misc_RNA (1)...(19): siRNA sense strand
gaacaaggcaaaggaaaau

SEQ ID NO: 2174288 - RNA, 19 nt, Homo sapiens
  misc_RNA (1)...(19): siRNA sense strand
cagcagaaagggcuuaaag

SEQ ID NO: 2174289 - RNA, 19 nt, Homo sapiens
  misc_RNA (1)...(19): siRNA sense strand
gguuuugcaucuugaauuu

SEQ ID NO: 2174290 - RNA, 19 nt, Homo sapiens
  misc_RNA (1)...(19): siRNA sense strand
ucagagacuacacugguaa

SEQ ID NO: 2174291 - RNA, 19 nt, Homo sapiens
  misc_RNA (1)...(19): siRNA sense strand
ccagacaugacaaucuuga

SEQ ID NO: 2174292 - RNA, 19 nt, Homo sapiens
  misc_RNA (1)...(19): siRNA sense strand
cagauggagucuuagaaac

SEQ ID NO: 2174293 - RNA, 19 nt, Homo sapiens
  misc_RNA (1)...(19): siRNA sense strand
gcacuggcuucgagaacac

SEQ ID NO: 2174294 - RNA, 19 nt, Homo sapiens
  misc_RNA (1)...(19): siRNA sense strand
gcucgaggauguggaggau

SEQ ID NO: 2174295 - RNA, 19 nt, Homo sapiens
  misc_RNA (1)...(19): siRNA sense strand
caagcaaagccagacauga

SEQ ID NO: 2174296 - RNA, 19 nt, Homo sapiens
  misc_RNA (1)...(19): siRNA sense strand
caaugaagaauggaaacuu

SEQ ID NO: 2174297 - RNA, 19 nt, Homo sapiens
  misc_RNA (1)...(19): siRNA sense strand
guagcaaaggaaauaaaga

SEQ ID NO: 2174298 - RNA, 19 nt, Homo sapiens
  misc_RNA (1)...(19): siRNA sense strand
ggaaggucccugagcucuu

SEQ ID NO: 2174299 - RNA, 19 nt, Homo sapiens
  misc_RNA (1)...(19): siRNA sense strand
gauggagauguacuuggua

SEQ ID NO: 2174300 - RNA, 19 nt, Homo sapiens
  misc_RNA (1)...(19): siRNA sense strand
caaagcagauggagucuua

SEQ ID NO: 2174301 - RNA, 19 nt, Homo sapiens
  misc_RNA (1)...(19): siRNA sense strand
gaaaugaucuucgaaaggu

SEQ ID NO: 2174302 - RNA, 19 nt, Homo sapiens
  misc_RNA (1)...(19): siRNA sense strand
agaaagggcuuaaagaaga

SEQ ID NO: 2174303 - RNA, 19 nt, Homo sapiens
  misc_RNA (1)...(19): siRNA sense strand
gaaggucccugagcucuuu

SEQ ID NO: 2174304 - RNA, 19 nt, Homo sapiens
  misc_RNA (1)...(19): siRNA sense strand
uauaugaccuuucagauga

SEQ ID NO: 2174305 - RNA, 19 nt, Homo sapiens
  misc_RNA (1)...(19): siRNA sense strand
caacagaaaugaucuucga

SEQ ID NO: 2174306 - RNA, 19 nt, Homo sapiens
  misc_RNA (1)...(19): siRNA sense strand
ggaaauacggcuaacaauu

SEQ ID NO: 2174307 - RNA, 19 nt, Homo sapiens
  misc_RNA (1)...(19): siRNA sense strand
gagauguacuugguaauuu

SEQ ID NO: 2174308 - RNA, 19 nt, Homo sapiens
  misc_RNA (1)...(19): siRNA sense strand
gcagaaagggcuuaaagaa

SEQ ID NO: 2174309 - RNA, 19 nt, Homo sapiens
  misc_RNA (1)...(19): siRNA sense strand
agacuacacugguaaauau

SEQ ID NO: 2174310 - RNA, 19 nt, Homo sapiens
  misc_RNA (1)...(19): siRNA sense strand
caacaaagcauucaucagu

SEQ ID NO: 2174311 - RNA, 19 nt, Homo sapiens
  misc_RNA (1)...(19): siRNA sense strand
gccaaagucuggucugauu

SEQ ID NO: 2174312 - RNA, 19 nt, Homo sapiens
  misc_RNA (1)...(19): siRNA sense strand
gaacaucauugucagaaac

SEQ ID NO: 2174313 - RNA, 19 nt, Homo sapiens
  misc_RNA (1)...(19): siRNA sense strand
gaaauaaagacccuucugu

SEQ ID NO: 2174314 - RNA, 19 nt, Homo sapiens
  misc_RNA (1)...(19): siRNA sense strand
acaaagcauucaucaguuu

SEQ ID NO: 2174315 - RNA, 19 nt, Homo sapiens
  misc_RNA (1)...(19): siRNA sense strand
gcagauggagucuuagaaa

SEQ ID NO: 2174316 - RNA, 19 nt, Homo sapiens
  misc_RNA (1)...(19): siRNA sense strand
gcacauggcuacuguacac

SEQ ID NO: 2174317 - RNA, 19 nt, Homo sapiens
  misc_RNA (1)...(19): siRNA sense strand
uaaagacccuucuguuugg

SEQ ID NO: 2174318 - RNA, 19 nt, Homo sapiens
  misc_RNA (1)...(19): siRNA sense strand
gggugaaacuccuguguug

SEQ ID NO: 2174319 - RNA, 19 nt, Homo sapiens
  misc_RNA (1)...(19): siRNA sense strand
uaacacagccucauuaaaa

SEQ ID NO: 2174320 - RNA, 19 nt, Homo sapiens
  misc_RNA (1)...(19): siRNA sense strand
gagacuacacugguaaaua

SEQ ID NO: 2174321 - RNA, 19 nt, Homo sapiens
  misc_RNA (1)...(19): siRNA sense strand
ggagauguacuugguaauu

SEQ ID NO: 2174322 - RNA, 19 nt, Homo sapiens
  misc_RNA (1)...(19): siRNA sense strand
uagaaacacuuacgcuuca

SEQ ID NO: 2174323 - RNA, 19 nt, Homo sapiens
  misc_RNA (1)...(19): siRNA sense strand
uaacaaagugccaucaaga

SEQ ID NO: 2174324 - RNA, 19 nt, Homo sapiens
  misc_RNA (1)...(19): siRNA sense strand
aauaaagacccuucuguuu

SEQ ID NO: 2174325 - RNA, 19 nt, Homo sapiens
  misc_RNA (1)...(19): siRNA sense strand
ggugguaauuccaggauga

SEQ ID NO: 2174326 - RNA, 19 nt, Homo sapiens
  misc_RNA (1)...(19): siRNA sense strand
gcagugauauuggcuucuu

SEQ ID NO: 2174327 - RNA, 19 nt, Homo sapiens
  misc_RNA (1)...(19): siRNA sense strand
cacaggaacuugucaaucu

SEQ ID NO: 2174328 - RNA, 19 nt, Homo sapiens
  misc_RNA (1)...(19): siRNA sense strand
cacuuacgcuucacaguuu

SEQ ID NO: 2174329 - RNA, 19 nt, Homo sapiens
  misc_RNA (1)...(19): siRNA sense strand
cuggaucacuuuggaaaua

SEQ ID NO: 2174330 - RNA, 19 nt, Homo sapiens
  misc_RNA (1)...(19): siRNA sense strand
gaagaugcaggauggagaa

SEQ ID NO: 2174331 - RNA, 19 nt, Homo sapiens
  misc_RNA (1)...(19): siRNA sense strand
gcauaaacaacagaaauga

SEQ ID NO: 2174332 - RNA, 19 nt, Homo sapiens
  misc_RNA (1)...(19): siRNA sense strand
gaaauacaaagcagaugga

SEQ ID NO: 2174333 - RNA, 19 nt, Homo sapiens
  misc_RNA (1)...(19): siRNA sense strand
ucaagaugcucagagacua

SEQ ID NO: 2174334 - RNA, 19 nt, Homo sapiens
  misc_RNA (1)...(19): siRNA sense strand
gauacuuucuggaucacuu

SEQ ID NO: 2174335 - RNA, 19 nt, Homo sapiens
  misc_RNA (1)...(19): siRNA sense strand
ggacacagacaacgaccuu

SEQ ID NO: 2174336 - RNA, 19 nt, Homo sapiens
  misc_RNA (1)...(19): siRNA sense strand
gcuaacaauuucacucaag

SEQ ID NO: 2174337 - RNA, 19 nt, Homo sapiens
  misc_RNA (1)...(19): siRNA sense strand
augaggaccuggugacuuu

SEQ ID NO: 2174338 - RNA, 19 nt, Homo sapiens
  misc_RNA (1)...(19): siRNA sense strand
auaaagacccuucuguuug

SEQ ID NO: 2174339 - RNA, 19 nt, Homo sapiens
  misc_RNA (1)...(19): siRNA sense strand
uuagugaacugaccguaga

SEQ ID NO: 2174340 - RNA, 19 nt, Homo sapiens
  misc_RNA (1)...(19): siRNA sense strand
cagaaaugaucuucgaaag

SEQ ID NO: 2174341 - RNA, 19 nt, Homo sapiens
  misc_RNA (1)...(19): siRNA sense strand
caucagugcucaaguugca

SEQ ID NO: 2174342 - RNA, 19 nt, Homo sapiens
  misc_RNA (1)...(19): siRNA sense strand
gagaacaaggcaaaggaaa

SEQ ID NO: 2174343 - RNA, 19 nt, Homo sapiens
  misc_RNA (1)...(19): siRNA sense strand
gaaagggcuuaaagaagac

SEQ ID NO: 2174344 - RNA, 19 nt, Homo sapiens
  misc_RNA (1)...(19): siRNA sense strand
ucgaggauguggaggauga

SEQ ID NO: 2174345 - RNA, 19 nt, Homo sapiens
  misc_RNA (1)...(19): siRNA sense strand
cuaacaauuucacucaaga

SEQ ID NO: 2174346 - RNA, 19 nt, Homo sapiens
  misc_RNA (1)...(19): siRNA sense strand
ggagaacaaggcaaaggaa

SEQ ID NO: 2174347 - RNA, 19 nt, Homo sapiens
  misc_RNA (1)...(19): siRNA sense strand
acacagcaguucaguccaa

SEQ ID NO: 2174348 - RNA, 19 nt, Homo sapiens
  misc_RNA (1)...(19): siRNA sense strand
ccaauugaccucucaguag

SEQ ID NO: 2174349 - RNA, 19 nt, Homo sapiens
  misc_RNA (1)...(19): siRNA sense strand
cuacuugccuggugguaau

SEQ ID NO: 2174350 - RNA, 19 nt, Homo sapiens
  misc_RNA (1)...(19): siRNA sense strand
ugaagaggaugggagagaa

SEQ ID NO: 2174351 - RNA, 19 nt, Homo sapiens
  misc_RNA (1)...(19): siRNA sense strand
gagaacaucauugucagaa

SEQ ID NO: 2174352 - RNA, 19 nt, Homo sapiens
  misc_RNA (1)...(19): siRNA sense strand
uuaaagaagacauguguga

SEQ ID NO: 2174353 - RNA, 19 nt, Homo sapiens
  misc_RNA (1)...(19): siRNA sense strand
gaacucaucaccagauacu

SEQ ID NO: 2174354 - RNA, 19 nt, Homo sapiens
  misc_RNA (1)...(19): siRNA sense strand
aaacuccuguguugacuuc

SEQ ID NO: 2174355 - RNA, 19 nt, Homo sapiens
  misc_RNA (1)...(19): siRNA sense strand
gggagaagauagacaagcu

SEQ ID NO: 2174356 - RNA, 19 nt, Homo sapiens
  misc_RNA (1)...(19): siRNA sense strand
guaacacagccucauuaaa

SEQ ID NO: 2174357 - RNA, 19 nt, Homo sapiens
  misc_RNA (1)...(19): siRNA sense strand
aaauaaagacccuucuguu

SEQ ID NO: 2174358 - RNA, 19 nt, Homo sapiens
  misc_RNA (1)...(19): siRNA sense strand
gggaguuccucagcagaaa

SEQ ID NO: 2174359 - RNA, 19 nt, Homo sapiens
  misc_RNA (1)...(19): siRNA sense strand
uaguaacacagccucauua

SEQ ID NO: 2174360 - RNA, 19 nt, Homo sapiens
  misc_RNA (1)...(19): siRNA sense strand
gaugcaggauggagaacau

SEQ ID NO: 2174361 - RNA, 19 nt, Homo sapiens
  misc_RNA (1)...(19): siRNA sense strand
ggaaauaaagacccuucug

SEQ ID NO: 2174362 - RNA, 19 nt, Homo sapiens
  misc_RNA (1)...(19): siRNA sense strand
gagccuuccuuggauguga

SEQ ID NO: 2174363 - RNA, 19 nt, Homo sapiens
  misc_RNA (1)...(19): siRNA sense strand
cccaaucccugcacucuca

SEQ ID NO: 2174364 - RNA, 19 nt, Homo sapiens
  misc_RNA (1)...(19): siRNA sense strand
cagcauaaacaacagaaau

SEQ ID NO: 2174365 - RNA, 19 nt, Homo sapiens
  misc_RNA (1)...(19): siRNA sense strand
ccacuucagcauccucuuu

SEQ ID NO: 2174366 - RNA, 19 nt, Homo sapiens
  misc_RNA (1)...(19): siRNA sense strand
aacaaagcauucaucaguu

SEQ ID NO: 2174367 - RNA, 19 nt, Homo sapiens
  misc_RNA (1)...(19): siRNA sense strand
gaagaggaugggagagaau

SEQ ID NO: 2174368 - RNA, 19 nt, Homo sapiens
  misc_RNA (1)...(19): siRNA sense strand
ggauguggaggaugaguug

SEQ ID NO: 2174369 - RNA, 19 nt, Homo sapiens
  misc_RNA (1)...(19): siRNA sense strand
acucucaguuccaaagaaa

SEQ ID NO: 2174370 - RNA, 19 nt, Homo sapiens
  misc_RNA (1)...(19): siRNA sense strand
uguggaggaugaguugaua

SEQ ID NO: 2174371 - RNA, 19 nt, Homo sapiens
  misc_RNA (1)...(19): siRNA sense strand
gaccucagcauaaacaaca

SEQ ID NO: 2174372 - RNA, 19 nt, Homo sapiens
  misc_RNA (1)...(19): siRNA sense strand
ggagaacaucauugucaga

SEQ ID NO: 2174373 - RNA, 19 nt, Homo sapiens
  misc_RNA (1)...(19): siRNA sense strand
acacuuacgcuucacaguu

SEQ ID NO: 2174374 - RNA, 19 nt, Homo sapiens
  misc_RNA (1)...(19): siRNA sense strand
cagaaagggcuuaaagaag

SEQ ID NO: 2174375 - RNA, 19 nt, Homo sapiens
  misc_RNA (1)...(19): siRNA sense strand
gcuuaaagaagacaugugu

SEQ ID NO: 2174376 - RNA, 19 nt, Homo sapiens
  misc_RNA (1)...(19): siRNA sense strand
agaacaucauugucagaaa

SEQ ID NO: 2174377 - RNA, 19 nt, Homo sapiens
  misc_RNA (1)...(19): siRNA sense strand
gcaaagccagacaugacaa

SEQ ID NO: 2174378 - RNA, 19 nt, Homo sapiens
  misc_RNA (1)...(19): siRNA sense strand
agagagagccguuguugca

SEQ ID NO: 2174379 - RNA, 19 nt, Homo sapiens
  misc_RNA (1)...(19): siRNA sense strand
caaagucuggucugauugu

SEQ ID NO: 2174380 - RNA, 19 nt, Homo sapiens
  misc_RNA (1)...(19): siRNA sense strand
gagaauuccaggccaaagu

SEQ ID NO: 2174381 - RNA, 19 nt, Homo sapiens
  misc_RNA (1)...(19): siRNA sense strand
ugauggagauguacuuggu

SEQ ID NO: 2174382 - RNA, 19 nt, Homo sapiens
  misc_RNA (1)...(19): siRNA sense strand
gaaagguuuugcaucuuga

SEQ ID NO: 2174383 - RNA, 19 nt, Homo sapiens
  misc_RNA (1)...(19): siRNA sense strand
gcucauccgccaggacuuu

SEQ ID NO: 2174384 - RNA, 19 nt, Homo sapiens
  misc_RNA (1)...(19): siRNA sense strand
cgagagagagccguuguug

SEQ ID NO: 2174385 - RNA, 19 nt, Homo sapiens
  misc_RNA (1)...(19): siRNA sense strand
acagaaaugaucuucgaaa

SEQ ID NO: 2174386 - RNA, 19 nt, Homo sapiens
  misc_RNA (1)...(19): siRNA sense strand
ucccaucagugcucaaguu

SEQ ID NO: 2174387 - RNA, 19 nt, Homo sapiens
  misc_RNA (1)...(19): siRNA sense strand
cgaaagguuuugcaucuug

SEQ ID NO: 2174388 - RNA, 19 nt, Homo sapiens
  misc_RNA (1)...(19): siRNA sense strand
acucaucaccagauacuuu

SEQ ID NO: 2174389 - RNA, 19 nt, Homo sapiens
  misc_RNA (1)...(19): siRNA sense strand
ggagucuuagaaacacuua

SEQ ID NO: 2174390 - RNA, 19 nt, Homo sapiens
  misc_RNA (1)...(19): siRNA sense strand
ucagagacuacacugguaa

SEQ ID NO: 2174391 - RNA, 19 nt, Homo sapiens
  misc_RNA (1)...(19): siRNA sense strand
gaacaaggcaaaggaaaau

SEQ ID NO: 2174392 - RNA, 19 nt, Homo sapiens
  misc_RNA (1)...(19): siRNA sense strand
gguuuugcaucuugaauuu

SEQ ID NO: 2174393 - RNA, 19 nt, Homo sapiens
  misc_RNA (1)...(19): siRNA sense strand
cagcagaaagggcuuaaag

SEQ ID NO: 2174394 - RNA, 19 nt, Homo sapiens
  misc_RNA (1)...(19): siRNA sense strand
ccagacaugacaaucuuga

SEQ ID NO: 2174395 - RNA, 19 nt, Homo sapiens
  misc_RNA (1)...(19): siRNA sense strand
ccacccaaaccaucucuga

SEQ ID NO: 2174396 - RNA, 19 nt, Homo sapiens
  misc_RNA (1)...(19): siRNA sense strand
cagauggagucuuagaaac

SEQ ID NO: 2174397 - RNA, 19 nt, Homo sapiens
  misc_RNA (1)...(19): siRNA sense strand
gcacuggcuucgagaacac

SEQ ID NO: 2174398 - RNA, 19 nt, Homo sapiens
  misc_RNA (1)...(19): siRNA sense strand
gcucgaggauguggaggau

SEQ ID NO: 2174399 - RNA, 19 nt, Homo sapiens
  misc_RNA (1)...(19): siRNA sense strand
caaugaagaauggaaacuu

SEQ ID NO: 2174400 - RNA, 19 nt, Homo sapiens
  misc_RNA (1)...(19): siRNA sense strand
caaagcagauggagucuua

SEQ ID NO: 2174401 - RNA, 19 nt, Homo sapiens
  misc_RNA (1)...(19): siRNA sense strand
gaaaugaucuucgaaaggu

SEQ ID NO: 2174402 - RNA, 19 nt, Homo sapiens
  misc_RNA (1)...(19): siRNA sense strand
agaaagggcuuaaagaaga

SEQ ID NO: 2174403 - RNA, 19 nt, Homo sapiens
  misc_RNA (1)...(19): siRNA sense strand
gaaggucccugagcucuuu

SEQ ID NO: 2174404 - RNA, 19 nt, Homo sapiens
  misc_RNA (1)...(19): siRNA sense strand
uauaugaccuuucagauga

SEQ ID NO: 2174405 - RNA, 19 nt, Homo sapiens
  misc_RNA (1)...(19): siRNA sense strand
caacagaaaugaucuucga

SEQ ID NO: 2174406 - RNA, 19 nt, Homo sapiens
  misc_RNA (1)...(19): siRNA sense strand
ggaaauacggcuaacaauu

SEQ ID NO: 2174407 - RNA, 19 nt, Homo sapiens
  misc_RNA (1)...(19): siRNA sense strand
gagauguacuugguaauuu

SEQ ID NO: 2174408 - RNA, 19 nt, Homo sapiens
  misc_RNA (1)...(19): siRNA sense strand
gcagaaagggcuuaaagaa

SEQ ID NO: 2174409 - RNA, 19 nt, Homo sapiens
  misc_RNA (1)...(19): siRNA sense strand
agacuacacugguaaauau

SEQ ID NO: 2174410 - RNA, 19 nt, Homo sapiens
  misc_RNA (1)...(19): siRNA sense strand
caacaaagcauucaucagu

SEQ ID NO: 2174411 - RNA, 19 nt, Homo sapiens
  misc_RNA (1)...(19): siRNA sense strand
gccaaagucuggucugauu

SEQ ID NO: 2174412 - RNA, 19 nt, Homo sapiens
  misc_RNA (1)...(19): siRNA sense strand
gaacaucauugucagaaac

SEQ ID NO: 2174413 - RNA, 19 nt, Homo sapiens
  misc_RNA (1)...(19): siRNA sense strand
gaaauaaagacccuucugu

SEQ ID NO: 2174414 - RNA, 19 nt, Homo sapiens
  misc_RNA (1)...(19): siRNA sense strand
acaaagcauucaucaguuu

SEQ ID NO: 2174415 - RNA, 19 nt, Homo sapiens
  misc_RNA (1)...(19): siRNA sense strand
gcagauggagucuuagaaa

SEQ ID NO: 2174416 - RNA, 19 nt, Homo sapiens
  misc_RNA (1)...(19): siRNA sense strand
gcacauggcuacuguacac

SEQ ID NO: 2174417 - RNA, 19 nt, Homo sapiens
  misc_RNA (1)...(19): siRNA sense strand
uaaagacccuucuguuugg

SEQ ID NO: 2174418 - RNA, 19 nt, Homo sapiens
  misc_RNA (1)...(19): siRNA sense strand
gggugaaacuccuguguug

SEQ ID NO: 2174419 - RNA, 19 nt, Homo sapiens
  misc_RNA (1)...(19): siRNA sense strand
uaacacagccucauuaaaa

SEQ ID NO: 2174420 - RNA, 19 nt, Homo sapiens
  misc_RNA (1)...(19): siRNA sense strand
gagacuacacugguaaaua

SEQ ID NO: 2174421 - RNA, 19 nt, Homo sapiens
  misc_RNA (1)...(19): siRNA sense strand
ggagauguacuugguaauu

SEQ ID NO: 2174422 - RNA, 19 nt, Homo sapiens
  misc_RNA (1)...(19): siRNA sense strand
uagaaacacuuacgcuuca

SEQ ID NO: 2174423 - RNA, 19 nt, Homo sapiens
  misc_RNA (1)...(19): siRNA sense strand
uaacaaagugccaucaaga

SEQ ID NO: 2174424 - RNA, 19 nt, Homo sapiens
  misc_RNA (1)...(19): siRNA sense strand
aauaaagacccuucuguuu

SEQ ID NO: 2174425 - RNA, 19 nt, Homo sapiens
  misc_RNA (1)...(19): siRNA sense strand
ggugguaauuccaggauga

SEQ ID NO: 2174426 - RNA, 19 nt, Homo sapiens
  misc_RNA (1)...(19): siRNA sense strand
gcagugauauuggcuucuu

SEQ ID NO: 2174427 - RNA, 19 nt, Homo sapiens
  misc_RNA (1)...(19): siRNA sense strand
cacaggaacuugucaaucu

SEQ ID NO: 2174428 - RNA, 19 nt, Homo sapiens
  misc_RNA (1)...(19): siRNA sense strand
cacuuacgcuucacaguuu

SEQ ID NO: 2174429 - RNA, 19 nt, Homo sapiens
  misc_RNA (1)...(19): siRNA sense strand
cuggaucacuuuggaaaua

SEQ ID NO: 2174430 - RNA, 19 nt, Homo sapiens
  misc_RNA (1)...(19): siRNA sense strand
gaagaugcaggauggagaa

SEQ ID NO: 2174431 - RNA, 19 nt, Homo sapiens
  misc_RNA (1)...(19): siRNA sense strand
gcauaaacaacagaaauga

SEQ ID NO: 2174432 - RNA, 19 nt, Homo sapiens
  misc_RNA (1)...(19): siRNA sense strand
gaaauacaaagcagaugga

SEQ ID NO: 2174433 - RNA, 19 nt, Homo sapiens
  misc_RNA (1)...(19): siRNA sense strand
ucaagaugcucagagacua

SEQ ID NO: 2174434 - RNA, 19 nt, Homo sapiens
  misc_RNA (1)...(19): siRNA sense strand
gauacuuucuggaucacuu

SEQ ID NO: 2174435 - RNA, 19 nt, Homo sapiens
  misc_RNA (1)...(19): siRNA sense strand
ggacacagacaacgaccuu

SEQ ID NO: 2174436 - RNA, 19 nt, Homo sapiens
  misc_RNA (1)...(19): siRNA sense strand
gcuaacaauuucacucaag

SEQ ID NO: 2174437 - RNA, 19 nt, Homo sapiens
  misc_RNA (1)...(19): siRNA sense strand
augaggaccuggugacuuu

SEQ ID NO: 2174438 - RNA, 19 nt, Homo sapiens
  misc_RNA (1)...(19): siRNA sense strand
auaaagacccuucuguuug

SEQ ID NO: 2174439 - RNA, 19 nt, Homo sapiens
  misc_RNA (1)...(19): siRNA sense strand
uuagugaacugaccguaga

SEQ ID NO: 2174440 - RNA, 19 nt, Homo sapiens
  misc_RNA (1)...(19): siRNA sense strand
cagaaaugaucuucgaaag

SEQ ID NO: 2174441 - RNA, 19 nt, Homo sapiens
  misc_RNA (1)...(19): siRNA sense strand
caucagugcucaaguugca

SEQ ID NO: 2174442 - RNA, 19 nt, Homo sapiens
  misc_RNA (1)...(19): siRNA sense strand
gagaacaaggcaaaggaaa

SEQ ID NO: 2174443 - RNA, 19 nt, Homo sapiens
  misc_RNA (1)...(19): siRNA sense strand
gaaagggcuuaaagaagac

SEQ ID NO: 2174444 - RNA, 19 nt, Homo sapiens
  misc_RNA (1)...(19): siRNA sense strand
ucgaggauguggaggauga

SEQ ID NO: 2174445 - RNA, 19 nt, Homo sapiens
  misc_RNA (1)...(19): siRNA sense strand
cuaacaauuucacucaaga

SEQ ID NO: 2174446 - RNA, 19 nt, Homo sapiens
  misc_RNA (1)...(19): siRNA sense strand
ggagaacaaggcaaaggaa

SEQ ID NO: 2174447 - RNA, 19 nt, Homo sapiens
  misc_RNA (1)...(19): siRNA sense strand
acacagcaguucaguccaa

SEQ ID NO: 2174448 - RNA, 19 nt, Homo sapiens
  misc_RNA (1)...(19): siRNA sense strand
ccaauugaccucucaguag

SEQ ID NO: 2174449 - RNA, 19 nt, Homo sapiens
  misc_RNA (1)...(19): siRNA sense strand
cuacuugccuggugguaau

SEQ ID NO: 2174450 - RNA, 19 nt, Homo sapiens
  misc_RNA (1)...(19): siRNA sense strand
ugaagaggaugggagagaa

SEQ ID NO: 2174451 - RNA, 19 nt, Homo sapiens
  misc_RNA (1)...(19): siRNA sense strand
gagaacaucauugucagaa

SEQ ID NO: 2174452 - RNA, 19 nt, Homo sapiens
  misc_RNA (1)...(19): siRNA sense strand
uuaaagaagacauguguga

SEQ ID NO: 2174453 - RNA, 19 nt, Homo sapiens
  misc_RNA (1)...(19): siRNA sense strand
gaacucaucaccagauacu

SEQ ID NO: 2174454 - RNA, 19 nt, Homo sapiens
  misc_RNA (1)...(19): siRNA sense strand
aaacuccuguguugacuuc

SEQ ID NO: 2174455 - RNA, 19 nt, Homo sapiens
  misc_RNA (1)...(19): siRNA sense strand
gggagaagauagacaagcu

SEQ ID NO: 2174456 - RNA, 19 nt, Homo sapiens
  misc_RNA (1)...(19): siRNA sense strand
guaacacagccucauuaaa

SEQ ID NO: 2174457 - RNA, 19 nt, Homo sapiens
  misc_RNA (1)...(19): siRNA sense strand
aaauaaagacccuucuguu

SEQ ID NO: 2174458 - RNA, 19 nt, Homo sapiens
  misc_RNA (1)...(19): siRNA sense strand
gggaguuccucagcagaaa

SEQ ID NO: 2174459 - RNA, 19 nt, Homo sapiens
  misc_RNA (1)...(19): siRNA sense strand
uaguaacacagccucauua

SEQ ID NO: 2174460 - RNA, 19 nt, Homo sapiens
  misc_RNA (1)...(19): siRNA sense strand
gaugcaggauggagaacau

SEQ ID NO: 2174461 - RNA, 19 nt, Homo sapiens
  misc_RNA (1)...(19): siRNA sense strand
ggaaauaaagacccuucug

SEQ ID NO: 2174462 - RNA, 19 nt, Homo sapiens
  misc_RNA (1)...(19): siRNA sense strand
gagccuuccuuggauguga

SEQ ID NO: 2174463 - RNA, 19 nt, Homo sapiens
  misc_RNA (1)...(19): siRNA sense strand
cccaaucccugcacucuca

SEQ ID NO: 2174464 - RNA, 19 nt, Homo sapiens
  misc_RNA (1)...(19): siRNA sense strand
cagcauaaacaacagaaau

SEQ ID NO: 2174465 - RNA, 19 nt, Homo sapiens
  misc_RNA (1)...(19): siRNA sense strand
ccacuucagcauccucuuu

SEQ ID NO: 2174466 - RNA, 19 nt, Homo sapiens
  misc_RNA (1)...(19): siRNA sense strand
aacaaagcauucaucaguu

SEQ ID NO: 2174467 - RNA, 19 nt, Homo sapiens
  misc_RNA (1)...(19): siRNA sense strand
gaagaggaugggagagaau

SEQ ID NO: 2174468 - RNA, 19 nt, Homo sapiens
  misc_RNA (1)...(19): siRNA sense strand
ggauguggaggaugaguug

SEQ ID NO: 2174469 - RNA, 19 nt, Homo sapiens
  misc_RNA (1)...(19): siRNA sense strand
acucucaguuccaaagaaa

SEQ ID NO: 2174470 - RNA, 19 nt, Homo sapiens
  misc_RNA (1)...(19): siRNA sense strand
uguggaggaugaguugaua

SEQ ID NO: 2174471 - RNA, 19 nt, Homo sapiens
  misc_RNA (1)...(19): siRNA sense strand
gaccucagcauaaacaaca

SEQ ID NO: 2174472 - RNA, 19 nt, Homo sapiens
  misc_RNA (1)...(19): siRNA sense strand
ggagaacaucauugucaga

SEQ ID NO: 2174473 - RNA, 19 nt, Homo sapiens
  misc_RNA (1)...(19): siRNA sense strand
acacuuacgcuucacaguu

SEQ ID NO: 2174474 - RNA, 19 nt, Homo sapiens
  misc_RNA (1)...(19): siRNA sense strand
cagaaagggcuuaaagaag

SEQ ID NO: 2174475 - RNA, 19 nt, Homo sapiens
  misc_RNA (1)...(19): siRNA sense strand
gcuuaaagaagacaugugu

SEQ ID NO: 2174476 - RNA, 19 nt, Homo sapiens
  misc_RNA (1)...(19): siRNA sense strand
agaacaucauugucagaaa

SEQ ID NO: 2174477 - RNA, 19 nt, Homo sapiens
  misc_RNA (1)...(19): siRNA sense strand
gcaaagccagacaugacaa

SEQ ID NO: 2174478 - RNA, 19 nt, Homo sapiens
  misc_RNA (1)...(19): siRNA sense strand
agagagagccguuguugca

SEQ ID NO: 2174479 - RNA, 19 nt, Homo sapiens
  misc_RNA (1)...(19): siRNA sense strand
caaagucuggucugauugu

SEQ ID NO: 2174480 - RNA, 19 nt, Homo sapiens
  misc_RNA (1)...(19): siRNA sense strand
gagaauuccaggccaaagu

SEQ ID NO: 2174481 - RNA, 19 nt, Homo sapiens
  misc_RNA (1)...(19): siRNA sense strand
ugauggagauguacuuggu

SEQ ID NO: 2174482 - RNA, 19 nt, Homo sapiens
  misc_RNA (1)...(19): siRNA sense strand
gaaagguuuugcaucuuga

SEQ ID NO: 2174483 - RNA, 19 nt, Homo sapiens
  misc_RNA (1)...(19): siRNA sense strand
gcucauccgccaggacuuu

SEQ ID NO: 2174484 - RNA, 19 nt, Homo sapiens
  misc_RNA (1)...(19): siRNA sense strand
cgagagagagccguuguug

SEQ ID NO: 2174485 - RNA, 19 nt, Homo sapiens
  misc_RNA (1)...(19): siRNA sense strand
acagaaaugaucuucgaaa

SEQ ID NO: 2174486 - RNA, 19 nt, Homo sapiens
  misc_RNA (1)...(19): siRNA sense strand
ucccaucagugcucaaguu

SEQ ID NO: 2174487 - RNA, 19 nt, Homo sapiens
  misc_RNA (1)...(19): siRNA sense strand
cgaaagguuuugcaucuug

SEQ ID NO: 2174488 - RNA, 19 nt, Homo sapiens
  misc_RNA (1)...(19): siRNA sense strand
acucaucaccagauacuuu

SEQ ID NO: 2174489 - RNA, 19 nt, Homo sapiens
  misc_RNA (1)...(19): siRNA sense strand
ggagucuuagaaacacuua

SEQ ID NO: 2174490 - RNA, 19 nt, Homo sapiens
  misc_RNA (1)...(19): siRNA sense strand
ucagagacuacacugguaa

SEQ ID NO: 2174491 - RNA, 19 nt, Homo sapiens
  misc_RNA (1)...(19): siRNA sense strand
gaacaaggcaaaggaaaau

SEQ ID NO: 2174492 - RNA, 19 nt, Homo sapiens
  misc_RNA (1)...(19): siRNA sense strand
gguuuugcaucuugaauuu

SEQ ID NO: 2174493 - RNA, 19 nt, Homo sapiens
  misc_RNA (1)...(19): siRNA sense strand
cagcagaaagggcuuaaag

SEQ ID NO: 2174494 - RNA, 19 nt, Homo sapiens
  misc_RNA (1)...(19): siRNA sense strand
ccagacaugacaaucuuga

SEQ ID NO: 2174495 - RNA, 19 nt, Homo sapiens
  misc_RNA (1)...(19): siRNA sense strand
ccacccaaaccaucucuga

SEQ ID NO: 2174496 - RNA, 19 nt, Homo sapiens
  misc_RNA (1)...(19): siRNA sense strand
cagauggagucuuagaaac

SEQ ID NO: 2174497 - RNA, 19 nt, Homo sapiens
  misc_RNA (1)...(19): siRNA sense strand
gcacuggcuucgagaacac

SEQ ID NO: 2174498 - RNA, 19 nt, Homo sapiens
  misc_RNA (1)...(19): siRNA sense strand
gcucgaggauguggaggau

SEQ ID NO: 2174499 - RNA, 19 nt, Homo sapiens
  misc_RNA (1)...(19): siRNA sense strand
caaugaagaauggaaacuu

SEQ ID NO: 2174500 - RNA, 19 nt, Homo sapiens
  misc_RNA (1)...(19): siRNA sense strand
aaacagagcugaagagaaa

SEQ ID NO: 2174501 - RNA, 19 nt, Homo sapiens
  misc_RNA (1)...(19): siRNA sense strand
gaacaaagggccucaguau

SEQ ID NO: 2174502 - RNA, 19 nt, Homo sapiens
  misc_RNA (1)...(19): siRNA sense strand
gaaaugaucauacucaaga

SEQ ID NO: 2174503 - RNA, 19 nt, Homo sapiens
  misc_RNA (1)...(19): siRNA sense strand
gcaagacaguuaaaugaug

SEQ ID NO: 2174504 - RNA, 19 nt, Homo sapiens
  misc_RNA (1)...(19): siRNA sense strand
ccagaaagcucaucacagu

SEQ ID NO: 2174505 - RNA, 19 nt, Homo sapiens
  misc_RNA (1)...(19): siRNA sense strand
gcaaagcccuggcccugaa

SEQ ID NO: 2174506 - RNA, 19 nt, Homo sapiens
  misc_RNA (1)...(19): siRNA sense strand
gaaauugaacagcaccuua

SEQ ID NO: 2174507 - RNA, 19 nt, Homo sapiens
  misc_RNA (1)...(19): siRNA sense strand
caauauaacuggauagaag

SEQ ID NO: 2174508 - RNA, 19 nt, Homo sapiens
  misc_RNA (1)...(19): siRNA sense strand
gcuggacucuggauucuuu

SEQ ID NO: 2174509 - RNA, 19 nt, Homo sapiens
  misc_RNA (1)...(19): siRNA sense strand
ccacagccacuuccaaaua

SEQ ID NO: 2174510 - RNA, 19 nt, Homo sapiens
  misc_RNA (1)...(19): siRNA sense strand
gacagaagcugagauggaa

SEQ ID NO: 2174511 - RNA, 19 nt, Homo sapiens
  misc_RNA (1)...(19): siRNA sense strand
caacugaccuugcucaaac

SEQ ID NO: 2174512 - RNA, 19 nt, Homo sapiens
  misc_RNA (1)...(19): siRNA sense strand
caagacaaguuccuucaug

SEQ ID NO: 2174513 - RNA, 19 nt, Homo sapiens
  misc_RNA (1)...(19): siRNA sense strand
ugagggagcuggcaaagug

SEQ ID NO: 2174514 - RNA, 19 nt, Homo sapiens
  misc_RNA (1)...(19): siRNA sense strand
gggcagacuucauguucua

SEQ ID NO: 2174515 - RNA, 19 nt, Homo sapiens
  misc_RNA (1)...(19): siRNA sense strand
gaaagcucaucacagugua

SEQ ID NO: 2174516 - RNA, 19 nt, Homo sapiens
  misc_RNA (1)...(19): siRNA sense strand
gcaucaauauaacuggaua

SEQ ID NO: 2174517 - RNA, 19 nt, Homo sapiens
  misc_RNA (1)...(19): siRNA sense strand
ggagagagugugcaaagaa

SEQ ID NO: 2174518 - RNA, 19 nt, Homo sapiens
  misc_RNA (1)...(19): siRNA sense strand
ggacagaagcugagaugga

SEQ ID NO: 2174519 - RNA, 19 nt, Homo sapiens
  misc_RNA (1)...(19): siRNA sense strand
gaaaucacaccuuaugcaa

SEQ ID NO: 2174520 - RNA, 19 nt, Homo sapiens
  misc_RNA (1)...(19): siRNA sense strand
gcaaugggcagacuucaug

SEQ ID NO: 2174521 - RNA, 19 nt, Homo sapiens
  misc_RNA (1)...(19): siRNA sense strand
gacucaggcuucucuagua

SEQ ID NO: 2174522 - RNA, 19 nt, Homo sapiens
  misc_RNA (1)...(19): siRNA sense strand
gauacuaccugggacagaa

SEQ ID NO: 2174523 - RNA, 19 nt, Homo sapiens
  misc_RNA (1)...(19): siRNA sense strand
ccaaauccgucucucuaga

SEQ ID NO: 2174524 - RNA, 19 nt, Homo sapiens
  misc_RNA (1)...(19): siRNA sense strand
gaucagagccacagcuuag

SEQ ID NO: 2174525 - RNA, 19 nt, Homo sapiens
  misc_RNA (1)...(19): siRNA sense strand
caagggaugguucaaauga

SEQ ID NO: 2174526 - RNA, 19 nt, Homo sapiens
  misc_RNA (1)...(19): siRNA sense strand
gagaacagcaccaggaugu

SEQ ID NO: 2174527 - RNA, 19 nt, Homo sapiens
  misc_RNA (1)...(19): siRNA sense strand
gaagauuccaagcaagaaa

SEQ ID NO: 2174528 - RNA, 19 nt, Homo sapiens
  misc_RNA (1)...(19): siRNA sense strand
ugacaugacuucaggaacu

SEQ ID NO: 2174529 - RNA, 19 nt, Homo sapiens
  misc_RNA (1)...(19): siRNA sense strand
cagaggaacaucuuuagaa

SEQ ID NO: 2174530 - RNA, 19 nt, Homo sapiens
  misc_RNA (1)...(19): siRNA sense strand
ggaacaaagggccucagua

SEQ ID NO: 2174531 - RNA, 19 nt, Homo sapiens
  misc_RNA (1)...(19): siRNA sense strand
gcacuguuucuuuguauga

SEQ ID NO: 2174532 - RNA, 19 nt, Homo sapiens
  misc_RNA (1)...(19): siRNA sense strand
gacaaaagcaagacaguua

SEQ ID NO: 2174533 - RNA, 19 nt, Homo sapiens
  misc_RNA (1)...(19): siRNA sense strand
gaaaaccuuccucuaaaua

SEQ ID NO: 2174534 - RNA, 19 nt, Homo sapiens
  misc_RNA (1)...(19): siRNA sense strand
gucaaggucugguacuuug

SEQ ID NO: 2174535 - RNA, 19 nt, Homo sapiens
  misc_RNA (1)...(19): siRNA sense strand
cagaaaugcaggacaguuu

SEQ ID NO: 2174536 - RNA, 19 nt, Homo sapiens
  misc_RNA (1)...(19): siRNA sense strand
uggcagaguuggaauuuca

SEQ ID NO: 2174537 - RNA, 19 nt, Homo sapiens
  misc_RNA (1)...(19): siRNA sense strand
agaggaacaucuuuagaau

SEQ ID NO: 2174538 - RNA, 19 nt, Homo sapiens
  misc_RNA (1)...(19): siRNA sense strand
guagaaagccaagagauca

SEQ ID NO: 2174539 - RNA, 19 nt, Homo sapiens
  misc_RNA (1)...(19): siRNA sense strand
agaguuggaauuucaguua

SEQ ID NO: 2174540 - RNA, 19 nt, Homo sapiens
  misc_RNA (1)...(19): siRNA sense strand
ucuaguaucugcccaaugg

SEQ ID NO: 2174541 - RNA, 19 nt, Homo sapiens
  misc_RNA (1)...(19): siRNA sense strand
acaaguuccuucauguuga

SEQ ID NO: 2174542 - RNA, 19 nt, Homo sapiens
  misc_RNA (1)...(19): siRNA sense strand
gacaaguuccuucauguug

SEQ ID NO: 2174543 - RNA, 19 nt, Homo sapiens
  misc_RNA (1)...(19): siRNA sense strand
cacagccacuuccaaauau

SEQ ID NO: 2174544 - RNA, 19 nt, Homo sapiens
  misc_RNA (1)...(19): siRNA sense strand
ccagaguccugcugagaau

SEQ ID NO: 2174545 - RNA, 19 nt, Homo sapiens
  misc_RNA (1)...(19): siRNA sense strand
gugcaaagccaccacaaug

SEQ ID NO: 2174546 - RNA, 19 nt, Homo sapiens
  misc_RNA (1)...(19): siRNA sense strand
ggaggaagaguuucugcuu

SEQ ID NO: 2174547 - RNA, 19 nt, Homo sapiens
  misc_RNA (1)...(19): siRNA sense strand
gugaaagacuacaugagau

SEQ ID NO: 2174548 - RNA, 19 nt, Homo sapiens
  misc_RNA (1)...(19): siRNA sense strand
aagcaagacaguuaaauga

SEQ ID NO: 2174549 - RNA, 19 nt, Homo sapiens
  misc_RNA (1)...(19): siRNA sense strand
ggagaaugcccaaggaaag

SEQ ID NO: 2174550 - RNA, 19 nt, Homo sapiens
  misc_RNA (1)...(19): siRNA sense strand
aggaagaguuucugcuuga

SEQ ID NO: 2174551 - RNA, 19 nt, Homo sapiens
  misc_RNA (1)...(19): siRNA sense strand
ugagaucuuugcaucaguu

SEQ ID NO: 2174552 - RNA, 19 nt, Homo sapiens
  misc_RNA (1)...(19): siRNA sense strand
ccgagcaacugcaaacguu

SEQ ID NO: 2174553 - RNA, 19 nt, Homo sapiens
  misc_RNA (1)...(19): siRNA sense strand
ggacaugucagaggaggaa

SEQ ID NO: 2174554 - RNA, 19 nt, Homo sapiens
  misc_RNA (1)...(19): siRNA sense strand
caaccacagcuuacucgua

SEQ ID NO: 2174555 - RNA, 19 nt, Homo sapiens
  misc_RNA (1)...(19): siRNA sense strand
ucacaccaaccacagcuua

SEQ ID NO: 2174556 - RNA, 19 nt, Homo sapiens
  misc_RNA (1)...(19): siRNA sense strand
aaaugacugugaaagacua

SEQ ID NO: 2174557 - RNA, 19 nt, Homo sapiens
  misc_RNA (1)...(19): siRNA sense strand
uaacccacgucacagaaau

SEQ ID NO: 2174558 - RNA, 19 nt, Homo sapiens
  misc_RNA (1)...(19): siRNA sense strand
acaaagggccucaguaucu

SEQ ID NO: 2174559 - RNA, 19 nt, Homo sapiens
  misc_RNA (1)...(19): siRNA sense strand
aagacgauaugccaaaguu

SEQ ID NO: 2174560 - RNA, 19 nt, Homo sapiens
  misc_RNA (1)...(19): siRNA sense strand
gcaaguguaccacaaagca

SEQ ID NO: 2174561 - RNA, 19 nt, Homo sapiens
  misc_RNA (1)...(19): siRNA sense strand
gagaaugcccaaggaaaga

SEQ ID NO: 2174562 - RNA, 19 nt, Homo sapiens
  misc_RNA (1)...(19): siRNA sense strand
caaagggccucaguaucug

SEQ ID NO: 2174563 - RNA, 19 nt, Homo sapiens
  misc_RNA (1)...(19): siRNA sense strand
guagggcgagcaugucuuu

SEQ ID NO: 2174564 - RNA, 19 nt, Homo sapiens
  misc_RNA (1)...(19): siRNA sense strand
gagagagugugcaaagaac

SEQ ID NO: 2174565 - RNA, 19 nt, Homo sapiens
  misc_RNA (1)...(19): siRNA sense strand
ccagccagauuccuugguu

SEQ ID NO: 2174566 - RNA, 19 nt, Homo sapiens
  misc_RNA (1)...(19): siRNA sense strand
caccaaauccgucucucua

SEQ ID NO: 2174567 - RNA, 19 nt, Homo sapiens
  misc_RNA (1)...(19): siRNA sense strand
ccaguuggcugccuucacu

SEQ ID NO: 2174568 - RNA, 19 nt, Homo sapiens
  misc_RNA (1)...(19): siRNA sense strand
ggcagcagguggcagaguu

SEQ ID NO: 2174569 - RNA, 19 nt, Homo sapiens
  misc_RNA (1)...(19): siRNA sense strand
ucaaaugacugugaaagac

SEQ ID NO: 2174570 - RNA, 19 nt, Homo sapiens
  misc_RNA (1)...(19): siRNA sense strand
gggagaaugcccaaggaaa

SEQ ID NO: 2174571 - RNA, 19 nt, Homo sapiens
  misc_RNA (1)...(19): siRNA sense strand
aacaagggaugguucaaau

SEQ ID NO: 2174572 - RNA, 19 nt, Homo sapiens
  misc_RNA (1)...(19): siRNA sense strand
cagcagagccaccugaaca

SEQ ID NO: 2174573 - RNA, 19 nt, Homo sapiens
  misc_RNA (1)...(19): siRNA sense strand
gaaauccuggaccauguga

SEQ ID NO: 2174574 - RNA, 19 nt, Homo sapiens
  misc_RNA (1)...(19): siRNA sense strand
gaacagcaccaggaugucu

SEQ ID NO: 2174575 - RNA, 19 nt, Homo sapiens
  misc_RNA (1)...(19): siRNA sense strand
ccgggaguauuuagaagaa

SEQ ID NO: 2174576 - RNA, 19 nt, Homo sapiens
  misc_RNA (1)...(19): siRNA sense strand
aaaguuuccgggaguauuu

SEQ ID NO: 2174577 - RNA, 19 nt, Homo sapiens
  misc_RNA (1)...(19): siRNA sense strand
aggaacaucuuuagaaugc

SEQ ID NO: 2174578 - RNA, 19 nt, Homo sapiens
  misc_RNA (1)...(19): siRNA sense strand
gcaaagccaccacaaugag

SEQ ID NO: 2174579 - RNA, 19 nt, Homo sapiens
  misc_RNA (1)...(19): siRNA sense strand
uaucugugauggaggaaga

SEQ ID NO: 2174580 - RNA, 19 nt, Homo sapiens
  misc_RNA (1)...(19): siRNA sense strand
guaauccucuugacaugac

SEQ ID NO: 2174581 - RNA, 19 nt, Homo sapiens
  misc_RNA (1)...(19): siRNA sense strand
gaggagagagugugcaaag

SEQ ID NO: 2174582 - RNA, 19 nt, Homo sapiens
  misc_RNA (1)...(19): siRNA sense strand
caaacagagcugaagagaa

SEQ ID NO: 2174583 - RNA, 19 nt, Homo sapiens
  misc_RNA (1)...(19): siRNA sense strand
aaauuguccuguuggagaa

SEQ ID NO: 2174584 - RNA, 19 nt, Homo sapiens
  misc_RNA (1)...(19): siRNA sense strand
agagccaccugaacacuau

SEQ ID NO: 2174585 - RNA, 19 nt, Homo sapiens
  misc_RNA (1)...(19): siRNA sense strand
gaguuggaauuucaguuag

SEQ ID NO: 2174586 - RNA, 19 nt, Homo sapiens
  misc_RNA (1)...(19): siRNA sense strand
ccaggaagcccaguucaug

SEQ ID NO: 2174587 - RNA, 19 nt, Homo sapiens
  misc_RNA (1)...(19): siRNA sense strand
uagaaugcacuguguguga

SEQ ID NO: 2174588 - RNA, 19 nt, Homo sapiens
  misc_RNA (1)...(19): siRNA sense strand
gaggaacaucuuuagaaug

SEQ ID NO: 2174589 - RNA, 19 nt, Homo sapiens
  misc_RNA (1)...(19): siRNA sense strand
aaucacaccuuaugcaacu

SEQ ID NO: 2174590 - RNA, 19 nt, Homo sapiens
  misc_RNA (1)...(19): siRNA sense strand
gaagaagagacugguaauc

SEQ ID NO: 2174591 - RNA, 19 nt, Homo sapiens
  misc_RNA (1)...(19): siRNA sense strand
caacuuguacggucguuuc

SEQ ID NO: 2174592 - RNA, 19 nt, Homo sapiens
  misc_RNA (1)...(19): siRNA sense strand
gcagacuucauguucuaaa

SEQ ID NO: 2174593 - RNA, 19 nt, Homo sapiens
  misc_RNA (1)...(19): siRNA sense strand
uucagaaacucccauccua

SEQ ID NO: 2174594 - RNA, 19 nt, Homo sapiens
  misc_RNA (1)...(19): siRNA sense strand
gacgauaugccaaaguuuc

SEQ ID NO: 2174595 - RNA, 19 nt, Homo sapiens
  misc_RNA (1)...(19): siRNA sense strand
aaagcaagacaguuaaaug

SEQ ID NO: 2174596 - RNA, 19 nt, Homo sapiens
  misc_RNA (1)...(19): siRNA sense strand
ugaccuugcucaaacaucu

SEQ ID NO: 2174597 - RNA, 19 nt, Homo sapiens
  misc_RNA (1)...(19): siRNA sense strand
ugugaaagacuacaugaga

SEQ ID NO: 2174598 - RNA, 19 nt, Homo sapiens
  misc_RNA (1)...(19): siRNA sense strand
gagccacagcuuaguauca

SEQ ID NO: 2174599 - RNA, 19 nt, Homo sapiens
  misc_RNA (1)...(19): siRNA sense strand
ggaaaugaucauacucaag

SEQ ID NO: 2174600 - RNA, 19 nt, Homo sapiens
  misc_RNA (1)...(19): siRNA sense strand
aaacagagcugaagagaaa

SEQ ID NO: 2174601 - RNA, 19 nt, Homo sapiens
  misc_RNA (1)...(19): siRNA sense strand
gaacaaagggccucaguau

SEQ ID NO: 2174602 - RNA, 19 nt, Homo sapiens
  misc_RNA (1)...(19): siRNA sense strand
gaaaugaucauacucaaga

SEQ ID NO: 2174603 - RNA, 19 nt, Homo sapiens
  misc_RNA (1)...(19): siRNA sense strand
gcaagacaguuaaaugaug

SEQ ID NO: 2174604 - RNA, 19 nt, Homo sapiens
  misc_RNA (1)...(19): siRNA sense strand
ccagaaagcucaucacagu

SEQ ID NO: 2174605 - RNA, 19 nt, Homo sapiens
  misc_RNA (1)...(19): siRNA sense strand
gcaaagcccuggcccugaa

SEQ ID NO: 2174606 - RNA, 19 nt, Homo sapiens
  misc_RNA (1)...(19): siRNA sense strand
gaaauugaacagcaccuua

SEQ ID NO: 2174607 - RNA, 19 nt, Homo sapiens
  misc_RNA (1)...(19): siRNA sense strand
caauauaacuggauagaag

SEQ ID NO: 2174608 - RNA, 19 nt, Homo sapiens
  misc_RNA (1)...(19): siRNA sense strand
ccacagccacuuccaaaua

SEQ ID NO: 2174609 - RNA, 19 nt, Homo sapiens
  misc_RNA (1)...(19): siRNA sense strand
gacagaagcugagauggaa

SEQ ID NO: 2174610 - RNA, 19 nt, Homo sapiens
  misc_RNA (1)...(19): siRNA sense strand
caacugaccuugcucaaac

SEQ ID NO: 2174611 - RNA, 19 nt, Homo sapiens
  misc_RNA (1)...(19): siRNA sense strand
caagacaaguuccuucaug

SEQ ID NO: 2174612 - RNA, 19 nt, Homo sapiens
  misc_RNA (1)...(19): siRNA sense strand
ugagggagcuggcaaagug

SEQ ID NO: 2174613 - RNA, 19 nt, Homo sapiens
  misc_RNA (1)...(19): siRNA sense strand
gggcagacuucauguucua

SEQ ID NO: 2174614 - RNA, 19 nt, Homo sapiens
  misc_RNA (1)...(19): siRNA sense strand
gaaagcucaucacagugua

SEQ ID NO: 2174615 - RNA, 19 nt, Homo sapiens
  misc_RNA (1)...(19): siRNA sense strand
gcaucaauauaacuggaua

SEQ ID NO: 2174616 - RNA, 19 nt, Homo sapiens
  misc_RNA (1)...(19): siRNA sense strand
ggagagagugugcaaagaa

SEQ ID NO: 2174617 - RNA, 19 nt, Homo sapiens
  misc_RNA (1)...(19): siRNA sense strand
ggacagaagcugagaugga

SEQ ID NO: 2174618 - RNA, 19 nt, Homo sapiens
  misc_RNA (1)...(19): siRNA sense strand
gaaaucacaccuuaugcaa

SEQ ID NO: 2174619 - RNA, 19 nt, Homo sapiens
  misc_RNA (1)...(19): siRNA sense strand
gcaaugggcagacuucaug

SEQ ID NO: 2174620 - RNA, 19 nt, Homo sapiens
  misc_RNA (1)...(19): siRNA sense strand
gacucaggcuucucuagua

SEQ ID NO: 2174621 - RNA, 19 nt, Homo sapiens
  misc_RNA (1)...(19): siRNA sense strand
gauacuaccugggacagaa

SEQ ID NO: 2174622 - RNA, 19 nt, Homo sapiens
  misc_RNA (1)...(19): siRNA sense strand
ccaaauccgucucucuaga

SEQ ID NO: 2174623 - RNA, 19 nt, Homo sapiens
  misc_RNA (1)...(19): siRNA sense strand
gaucagagccacagcuuag

SEQ ID NO: 2174624 - RNA, 19 nt, Homo sapiens
  misc_RNA (1)...(19): siRNA sense strand
gagaacagcaccaggaugu

SEQ ID NO: 2174625 - RNA, 19 nt, Homo sapiens
  misc_RNA (1)...(19): siRNA sense strand
ugacaugacuucaggaacu

SEQ ID NO: 2174626 - RNA, 19 nt, Homo sapiens
  misc_RNA (1)...(19): siRNA sense strand
cagaggaacaucuuuagaa

SEQ ID NO: 2174627 - RNA, 19 nt, Homo sapiens
  misc_RNA (1)...(19): siRNA sense strand
ggaacaaagggccucagua

SEQ ID NO: 2174628 - RNA, 19 nt, Homo sapiens
  misc_RNA (1)...(19): siRNA sense strand
gucaaggucugguacuuug

SEQ ID NO: 2174629 - RNA, 19 nt, Homo sapiens
  misc_RNA (1)...(19): siRNA sense strand
gacaaaagcaagacaguua

SEQ ID NO: 2174630 - RNA, 19 nt, Homo sapiens
  misc_RNA (1)...(19): siRNA sense strand
gaaaaccuuccucuaaaua

SEQ ID NO: 2174631 - RNA, 19 nt, Homo sapiens
  misc_RNA (1)...(19): siRNA sense strand
cagaaaugcaggacaguuu

SEQ ID NO: 2174632 - RNA, 19 nt, Homo sapiens
  misc_RNA (1)...(19): siRNA sense strand
uggcagaguuggaauuuca

SEQ ID NO: 2174633 - RNA, 19 nt, Homo sapiens
  misc_RNA (1)...(19): siRNA sense strand
agaggaacaucuuuagaau

SEQ ID NO: 2174634 - RNA, 19 nt, Homo sapiens
  misc_RNA (1)...(19): siRNA sense strand
guagaaagccaagagauca

SEQ ID NO: 2174635 - RNA, 19 nt, Homo sapiens
  misc_RNA (1)...(19): siRNA sense strand
agaguuggaauuucaguua

SEQ ID NO: 2174636 - RNA, 19 nt, Homo sapiens
  misc_RNA (1)...(19): siRNA sense strand
ucuaguaucugcccaaugg

SEQ ID NO: 2174637 - RNA, 19 nt, Homo sapiens
  misc_RNA (1)...(19): siRNA sense strand
acaaguuccuucauguuga

SEQ ID NO: 2174638 - RNA, 19 nt, Homo sapiens
  misc_RNA (1)...(19): siRNA sense strand
gacaaguuccuucauguug

SEQ ID NO: 2174639 - RNA, 19 nt, Homo sapiens
  misc_RNA (1)...(19): siRNA sense strand
cacagccacuuccaaauau

SEQ ID NO: 2174640 - RNA, 19 nt, Homo sapiens
  misc_RNA (1)...(19): siRNA sense strand
ccagaguccugcugagaau

SEQ ID NO: 2174641 - RNA, 19 nt, Homo sapiens
  misc_RNA (1)...(19): siRNA sense strand
gugcaaagccaccacaaug

SEQ ID NO: 2174642 - RNA, 19 nt, Homo sapiens
  misc_RNA (1)...(19): siRNA sense strand
ggaggaagaguuucugcuu

SEQ ID NO: 2174643 - RNA, 19 nt, Homo sapiens
  misc_RNA (1)...(19): siRNA sense strand
aggaagaguuucugcuuga

SEQ ID NO: 2174644 - RNA, 19 nt, Homo sapiens
  misc_RNA (1)...(19): siRNA sense strand
aagcaagacaguuaaauga

SEQ ID NO: 2174645 - RNA, 19 nt, Homo sapiens
  misc_RNA (1)...(19): siRNA sense strand
gugaaagacuacaugagau

SEQ ID NO: 2174646 - RNA, 19 nt, Homo sapiens
  misc_RNA (1)...(19): siRNA sense strand
ggagaaugcccaaggaaag

SEQ ID NO: 2174647 - RNA, 19 nt, Homo sapiens
  misc_RNA (1)...(19): siRNA sense strand
aaaugacugugaaagacua

SEQ ID NO: 2174648 - RNA, 19 nt, Homo sapiens
  misc_RNA (1)...(19): siRNA sense strand
ccgagcaacugcaaacguu

SEQ ID NO: 2174649 - RNA, 19 nt, Homo sapiens
  misc_RNA (1)...(19): siRNA sense strand
ggacaugucagaggaggaa

SEQ ID NO: 2174650 - RNA, 19 nt, Homo sapiens
  misc_RNA (1)...(19): siRNA sense strand
ugagaucuuugcaucaguu

SEQ ID NO: 2174651 - RNA, 19 nt, Homo sapiens
  misc_RNA (1)...(19): siRNA sense strand
caaccacagcuuacucgua

SEQ ID NO: 2174652 - RNA, 19 nt, Homo sapiens
  misc_RNA (1)...(19): siRNA sense strand
ucacaccaaccacagcuua

SEQ ID NO: 2174653 - RNA, 19 nt, Homo sapiens
  misc_RNA (1)...(19): siRNA sense strand
uaacccacgucacagaaau

SEQ ID NO: 2174654 - RNA, 19 nt, Homo sapiens
  misc_RNA (1)...(19): siRNA sense strand
acaaagggccucaguaucu

SEQ ID NO: 2174655 - RNA, 19 nt, Homo sapiens
  misc_RNA (1)...(19): siRNA sense strand
aagacgauaugccaaaguu

SEQ ID NO: 2174656 - RNA, 19 nt, Homo sapiens
  misc_RNA (1)...(19): siRNA sense strand
ccagccagauuccuugguu

SEQ ID NO: 2174657 - RNA, 19 nt, Homo sapiens
  misc_RNA (1)...(19): siRNA sense strand
gagaaugcccaaggaaaga

SEQ ID NO: 2174658 - RNA, 19 nt, Homo sapiens
  misc_RNA (1)...(19): siRNA sense strand
caaagggccucaguaucug

SEQ ID NO: 2174659 - RNA, 19 nt, Homo sapiens
  misc_RNA (1)...(19): siRNA sense strand
gcaaguguaccacaaagca

SEQ ID NO: 2174660 - RNA, 19 nt, Homo sapiens
  misc_RNA (1)...(19): siRNA sense strand
guagggcgagcaugucuuu

SEQ ID NO: 2174661 - RNA, 19 nt, Homo sapiens
  misc_RNA (1)...(19): siRNA sense strand
gagagagugugcaaagaac

SEQ ID NO: 2174662 - RNA, 19 nt, Homo sapiens
  misc_RNA (1)...(19): siRNA sense strand
ucaaaugacugugaaagac

SEQ ID NO: 2174663 - RNA, 19 nt, Homo sapiens
  misc_RNA (1)...(19): siRNA sense strand
ccaguuggcugccuucacu

SEQ ID NO: 2174664 - RNA, 19 nt, Homo sapiens
  misc_RNA (1)...(19): siRNA sense strand
ggcagcagguggcagaguu

SEQ ID NO: 2174665 - RNA, 19 nt, Homo sapiens
  misc_RNA (1)...(19): siRNA sense strand
caccaaauccgucucucua

SEQ ID NO: 2174666 - RNA, 19 nt, Homo sapiens
  misc_RNA (1)...(19): siRNA sense strand
gggagaaugcccaaggaaa

SEQ ID NO: 2174667 - RNA, 19 nt, Homo sapiens
  misc_RNA (1)...(19): siRNA sense strand
cagcagagccaccugaaca

SEQ ID NO: 2174668 - RNA, 19 nt, Homo sapiens
  misc_RNA (1)...(19): siRNA sense strand
gaaauccuggaccauguga

SEQ ID NO: 2174669 - RNA, 19 nt, Homo sapiens
  misc_RNA (1)...(19): siRNA sense strand
gaacagcaccaggaugucu

SEQ ID NO: 2174670 - RNA, 19 nt, Homo sapiens
  misc_RNA (1)...(19): siRNA sense strand
ccgggaguauuuagaagaa

SEQ ID NO: 2174671 - RNA, 19 nt, Homo sapiens
  misc_RNA (1)...(19): siRNA sense strand
aaaguuuccgggaguauuu

SEQ ID NO: 2174672 - RNA, 19 nt, Homo sapiens
  misc_RNA (1)...(19): siRNA sense strand
aggaacaucuuuagaaugc

SEQ ID NO: 2174673 - RNA, 19 nt, Homo sapiens
  misc_RNA (1)...(19): siRNA sense strand
gcaaagccaccacaaugag

SEQ ID NO: 2174674 - RNA, 19 nt, Homo sapiens
  misc_RNA (1)...(19): siRNA sense strand
uaucugugauggaggaaga

SEQ ID NO: 2174675 - RNA, 19 nt, Homo sapiens
  misc_RNA (1)...(19): siRNA sense strand
guaauccucuugacaugac

SEQ ID NO: 2174676 - RNA, 19 nt, Homo sapiens
  misc_RNA (1)...(19): siRNA sense strand
gaggagagagugugcaaag

SEQ ID NO: 2174677 - RNA, 19 nt, Homo sapiens
  misc_RNA (1)...(19): siRNA sense strand
caaacagagcugaagagaa

SEQ ID NO: 2174678 - RNA, 19 nt, Homo sapiens
  misc_RNA (1)...(19): siRNA sense strand
aaauuguccuguuggagaa

SEQ ID NO: 2174679 - RNA, 19 nt, Homo sapiens
  misc_RNA (1)...(19): siRNA sense strand
agagccaccugaacacuau

SEQ ID NO: 2174680 - RNA, 19 nt, Homo sapiens
  misc_RNA (1)...(19): siRNA sense strand
gaguuggaauuucaguuag

SEQ ID NO: 2174681 - RNA, 19 nt, Homo sapiens
  misc_RNA (1)...(19): siRNA sense strand
ccaggaagcccaguucaug

SEQ ID NO: 2174682 - RNA, 19 nt, Homo sapiens
  misc_RNA (1)...(19): siRNA sense strand
uagaaugcacuguguguga

SEQ ID NO: 2174683 - RNA, 19 nt, Homo sapiens
  misc_RNA (1)...(19): siRNA sense strand
gaggaacaucuuuagaaug

SEQ ID NO: 2174684 - RNA, 19 nt, Homo sapiens
  misc_RNA (1)...(19): siRNA sense strand
aaucacaccuuaugcaacu

SEQ ID NO: 2174685 - RNA, 19 nt, Homo sapiens
  misc_RNA (1)...(19): siRNA sense strand
gaagaagagacugguaauc

SEQ ID NO: 2174686 - RNA, 19 nt, Homo sapiens
  misc_RNA (1)...(19): siRNA sense strand
caacuuguacggucguuuc

SEQ ID NO: 2174687 - RNA, 19 nt, Homo sapiens
  misc_RNA (1)...(19): siRNA sense strand
gcagacuucauguucuaaa

SEQ ID NO: 2174688 - RNA, 19 nt, Homo sapiens
  misc_RNA (1)...(19): siRNA sense strand
gacgauaugccaaaguuuc

SEQ ID NO: 2174689 - RNA, 19 nt, Homo sapiens
  misc_RNA (1)...(19): siRNA sense strand
aaagcaagacaguuaaaug

SEQ ID NO: 2174690 - RNA, 19 nt, Homo sapiens
  misc_RNA (1)...(19): siRNA sense strand
uucagaaacucccauccua

SEQ ID NO: 2174691 - RNA, 19 nt, Homo sapiens
  misc_RNA (1)...(19): siRNA sense strand
ugaccuugcucaaacaucu

SEQ ID NO: 2174692 - RNA, 19 nt, Homo sapiens
  misc_RNA (1)...(19): siRNA sense strand
ugugaaagacuacaugaga

SEQ ID NO: 2174693 - RNA, 19 nt, Homo sapiens
  misc_RNA (1)...(19): siRNA sense strand
gguagaaagccaagagauc

SEQ ID NO: 2174694 - RNA, 19 nt, Homo sapiens
  misc_RNA (1)...(19): siRNA sense strand
ggaaaugaucauacucaag

SEQ ID NO: 2174695 - RNA, 19 nt, Homo sapiens
  misc_RNA (1)...(19): siRNA sense strand
gagccacagcuuaguauca

SEQ ID NO: 2174696 - RNA, 19 nt, Homo sapiens
  misc_RNA (1)...(19): siRNA sense strand
ucagagccacagcuuagua

SEQ ID NO: 2174697 - RNA, 19 nt, Homo sapiens
  misc_RNA (1)...(19): siRNA sense strand
gccaaaguuuccgggagua

SEQ ID NO: 2174698 - RNA, 19 nt, Homo sapiens
  misc_RNA (1)...(19): siRNA sense strand
gaaagcaaugggcagacuu

SEQ ID NO: 2174699 - RNA, 19 nt, Homo sapiens
  misc_RNA (1)...(19): siRNA sense strand
gcagguggcagaguuggaa

SEQ ID NO: 2174700 - RNA, 19 nt, Homo sapiens
  misc_RNA (1)...(19): siRNA sense strand
aaacagagcugaagagaaa

SEQ ID NO: 2174701 - RNA, 19 nt, Homo sapiens
  misc_RNA (1)...(19): siRNA sense strand
gaacaaagggccucaguau

SEQ ID NO: 2174702 - RNA, 19 nt, Homo sapiens
  misc_RNA (1)...(19): siRNA sense strand
gaaaugaucauacucaaga

SEQ ID NO: 2174703 - RNA, 19 nt, Homo sapiens
  misc_RNA (1)...(19): siRNA sense strand
gcaagacaguuaaaugaug

SEQ ID NO: 2174704 - RNA, 19 nt, Homo sapiens
  misc_RNA (1)...(19): siRNA sense strand
ccagaaagcucaucacagu

SEQ ID NO: 2174705 - RNA, 19 nt, Homo sapiens
  misc_RNA (1)...(19): siRNA sense strand
gcaaagcccuggcccugaa

SEQ ID NO: 2174706 - RNA, 19 nt, Homo sapiens
  misc_RNA (1)...(19): siRNA sense strand
gaaauugaacagcaccuua

SEQ ID NO: 2174707 - RNA, 19 nt, Homo sapiens
  misc_RNA (1)...(19): siRNA sense strand
caauauaacuggauagaag

SEQ ID NO: 2174708 - RNA, 19 nt, Homo sapiens
  misc_RNA (1)...(19): siRNA sense strand
ccacagccacuuccaaaua

SEQ ID NO: 2174709 - RNA, 19 nt, Homo sapiens
  misc_RNA (1)...(19): siRNA sense strand
gacagaagcugagauggaa

SEQ ID NO: 2174710 - RNA, 19 nt, Homo sapiens
  misc_RNA (1)...(19): siRNA sense strand
caacugaccuugcucaaac

SEQ ID NO: 2174711 - RNA, 19 nt, Homo sapiens
  misc_RNA (1)...(19): siRNA sense strand
caagacaaguuccuucaug

SEQ ID NO: 2174712 - RNA, 19 nt, Homo sapiens
  misc_RNA (1)...(19): siRNA sense strand
ugagggagcuggcaaagug

SEQ ID NO: 2174713 - RNA, 19 nt, Homo sapiens
  misc_RNA (1)...(19): siRNA sense strand
gggcagacuucauguucua

SEQ ID NO: 2174714 - RNA, 19 nt, Homo sapiens
  misc_RNA (1)...(19): siRNA sense strand
gaaagcucaucacagugua

SEQ ID NO: 2174715 - RNA, 19 nt, Homo sapiens
  misc_RNA (1)...(19): siRNA sense strand
gcaucaauauaacuggaua

SEQ ID NO: 2174716 - RNA, 19 nt, Homo sapiens
  misc_RNA (1)...(19): siRNA sense strand
ggagagagugugcaaagaa

SEQ ID NO: 2174717 - RNA, 19 nt, Homo sapiens
  misc_RNA (1)...(19): siRNA sense strand
ggacagaagcugagaugga

SEQ ID NO: 2174718 - RNA, 19 nt, Homo sapiens
  misc_RNA (1)...(19): siRNA sense strand
gaaaucacaccuuaugcaa

SEQ ID NO: 2174719 - RNA, 19 nt, Homo sapiens
  misc_RNA (1)...(19): siRNA sense strand
gcaaugggcagacuucaug

SEQ ID NO: 2174720 - RNA, 19 nt, Homo sapiens
  misc_RNA (1)...(19): siRNA sense strand
gacucaggcuucucuagua

SEQ ID NO: 2174721 - RNA, 19 nt, Homo sapiens
  misc_RNA (1)...(19): siRNA sense strand
gauacuaccugggacagaa

SEQ ID NO: 2174722 - RNA, 19 nt, Homo sapiens
  misc_RNA (1)...(19): siRNA sense strand
ccaaauccgucucucuaga

SEQ ID NO: 2174723 - RNA, 19 nt, Homo sapiens
  misc_RNA (1)...(19): siRNA sense strand
gaucagagccacagcuuag

SEQ ID NO: 2174724 - RNA, 19 nt, Homo sapiens
  misc_RNA (1)...(19): siRNA sense strand
gagaacagcaccaggaugu

SEQ ID NO: 2174725 - RNA, 19 nt, Homo sapiens
  misc_RNA (1)...(19): siRNA sense strand
ugacaugacuucaggaacu

SEQ ID NO: 2174726 - RNA, 19 nt, Homo sapiens
  misc_RNA (1)...(19): siRNA sense strand
cagaggaacaucuuuagaa

SEQ ID NO: 2174727 - RNA, 19 nt, Homo sapiens
  misc_RNA (1)...(19): siRNA sense strand
ggaacaaagggccucagua

SEQ ID NO: 2174728 - RNA, 19 nt, Homo sapiens
  misc_RNA (1)...(19): siRNA sense strand
gucaaggucugguacuuug

SEQ ID NO: 2174729 - RNA, 19 nt, Homo sapiens
  misc_RNA (1)...(19): siRNA sense strand
gacaaaagcaagacaguua

SEQ ID NO: 2174730 - RNA, 19 nt, Homo sapiens
  misc_RNA (1)...(19): siRNA sense strand
gaaaaccuuccucuaaaua

SEQ ID NO: 2174731 - RNA, 19 nt, Homo sapiens
  misc_RNA (1)...(19): siRNA sense strand
cagaaaugcaggacaguuu

SEQ ID NO: 2174732 - RNA, 19 nt, Homo sapiens
  misc_RNA (1)...(19): siRNA sense strand
uggcagaguuggaauuuca

SEQ ID NO: 2174733 - RNA, 19 nt, Homo sapiens
  misc_RNA (1)...(19): siRNA sense strand
agaggaacaucuuuagaau

SEQ ID NO: 2174734 - RNA, 19 nt, Homo sapiens
  misc_RNA (1)...(19): siRNA sense strand
guagaaagccaagagauca

SEQ ID NO: 2174735 - RNA, 19 nt, Homo sapiens
  misc_RNA (1)...(19): siRNA sense strand
agaguuggaauuucaguua

SEQ ID NO: 2174736 - RNA, 19 nt, Homo sapiens
  misc_RNA (1)...(19): siRNA sense strand
ucuaguaucugcccaaugg

SEQ ID NO: 2174737 - RNA, 19 nt, Homo sapiens
  misc_RNA (1)...(19): siRNA sense strand
acaaguuccuucauguuga

SEQ ID NO: 2174738 - RNA, 19 nt, Homo sapiens
  misc_RNA (1)...(19): siRNA sense strand
gacaaguuccuucauguug

SEQ ID NO: 2174739 - RNA, 19 nt, Homo sapiens
  misc_RNA (1)...(19): siRNA sense strand
cacagccacuuccaaauau

SEQ ID NO: 2174740 - RNA, 19 nt, Homo sapiens
  misc_RNA (1)...(19): siRNA sense strand
ccagaguccugcugagaau

SEQ ID NO: 2174741 - RNA, 19 nt, Homo sapiens
  misc_RNA (1)...(19): siRNA sense strand
gugcaaagccaccacaaug

SEQ ID NO: 2174742 - RNA, 19 nt, Homo sapiens
  misc_RNA (1)...(19): siRNA sense strand
ggaggaagaguuucugcuu

SEQ ID NO: 2174743 - RNA, 19 nt, Homo sapiens
  misc_RNA (1)...(19): siRNA sense strand
aggaagaguuucugcuuga

SEQ ID NO: 2174744 - RNA, 19 nt, Homo sapiens
  misc_RNA (1)...(19): siRNA sense strand
aagcaagacaguuaaauga

SEQ ID NO: 2174745 - RNA, 19 nt, Homo sapiens
  misc_RNA (1)...(19): siRNA sense strand
gugaaagacuacaugagau

SEQ ID NO: 2174746 - RNA, 19 nt, Homo sapiens
  misc_RNA (1)...(19): siRNA sense strand
ggagaaugcccaaggaaag

SEQ ID NO: 2174747 - RNA, 19 nt, Homo sapiens
  misc_RNA (1)...(19): siRNA sense strand
aaaugacugugaaagacua

SEQ ID NO: 2174748 - RNA, 19 nt, Homo sapiens
  misc_RNA (1)...(19): siRNA sense strand
ccgagcaacugcaaacguu

SEQ ID NO: 2174749 - RNA, 19 nt, Homo sapiens
  misc_RNA (1)...(19): siRNA sense strand
ggacaugucagaggaggaa

SEQ ID NO: 2174750 - RNA, 19 nt, Homo sapiens
  misc_RNA (1)...(19): siRNA sense strand
ugagaucuuugcaucaguu

SEQ ID NO: 2174751 - RNA, 19 nt, Homo sapiens
  misc_RNA (1)...(19): siRNA sense strand
caaccacagcuuacucgua

SEQ ID NO: 2174752 - RNA, 19 nt, Homo sapiens
  misc_RNA (1)...(19): siRNA sense strand
ucacaccaaccacagcuua

SEQ ID NO: 2174753 - RNA, 19 nt, Homo sapiens
  misc_RNA (1)...(19): siRNA sense strand
uaacccacgucacagaaau

SEQ ID NO: 2174754 - RNA, 19 nt, Homo sapiens
  misc_RNA (1)...(19): siRNA sense strand
acaaagggccucaguaucu

SEQ ID NO: 2174755 - RNA, 19 nt, Homo sapiens
  misc_RNA (1)...(19): siRNA sense strand
aagacgauaugccaaaguu

SEQ ID NO: 2174756 - RNA, 19 nt, Homo sapiens
  misc_RNA (1)...(19): siRNA sense strand
ccagccagauuccuugguu

SEQ ID NO: 2174757 - RNA, 19 nt, Homo sapiens
  misc_RNA (1)...(19): siRNA sense strand
gagaaugcccaaggaaaga

SEQ ID NO: 2174758 - RNA, 19 nt, Homo sapiens
  misc_RNA (1)...(19): siRNA sense strand
caaagggccucaguaucug

SEQ ID NO: 2174759 - RNA, 19 nt, Homo sapiens
  misc_RNA (1)...(19): siRNA sense strand
gcaaguguaccacaaagca

SEQ ID NO: 2174760 - RNA, 19 nt, Homo sapiens
  misc_RNA (1)...(19): siRNA sense strand
guagggcgagcaugucuuu

SEQ ID NO: 2174761 - RNA, 19 nt, Homo sapiens
  misc_RNA (1)...(19): siRNA sense strand
gagagagugugcaaagaac

SEQ ID NO: 2174762 - RNA, 19 nt, Homo sapiens
  misc_RNA (1)...(19): siRNA sense strand
ucaaaugacugugaaagac

SEQ ID NO: 2174763 - RNA, 19 nt, Homo sapiens
  misc_RNA (1)...(19): siRNA sense strand
ccaguuggcugccuucacu

SEQ ID NO: 2174764 - RNA, 19 nt, Homo sapiens
  misc_RNA (1)...(19): siRNA sense strand
ggcagcagguggcagaguu

SEQ ID NO: 2174765 - RNA, 19 nt, Homo sapiens
  misc_RNA (1)...(19): siRNA sense strand
caccaaauccgucucucua

SEQ ID NO: 2174766 - RNA, 19 nt, Homo sapiens
  misc_RNA (1)...(19): siRNA sense strand
gggagaaugcccaaggaaa

SEQ ID NO: 2174767 - RNA, 19 nt, Homo sapiens
  misc_RNA (1)...(19): siRNA sense strand
cagcagagccaccugaaca

SEQ ID NO: 2174768 - RNA, 19 nt, Homo sapiens
  misc_RNA (1)...(19): siRNA sense strand
gaaauccuggaccauguga

SEQ ID NO: 2174769 - RNA, 19 nt, Homo sapiens
  misc_RNA (1)...(19): siRNA sense strand
gaacagcaccaggaugucu

SEQ ID NO: 2174770 - RNA, 19 nt, Homo sapiens
  misc_RNA (1)...(19): siRNA sense strand
ccgggaguauuuagaagaa

SEQ ID NO: 2174771 - RNA, 19 nt, Homo sapiens
  misc_RNA (1)...(19): siRNA sense strand
aaaguuuccgggaguauuu

SEQ ID NO: 2174772 - RNA, 19 nt, Homo sapiens
  misc_RNA (1)...(19): siRNA sense strand
aggaacaucuuuagaaugc

SEQ ID NO: 2174773 - RNA, 19 nt, Homo sapiens
  misc_RNA (1)...(19): siRNA sense strand
gcaaagccaccacaaugag

SEQ ID NO: 2174774 - RNA, 19 nt, Homo sapiens
  misc_RNA (1)...(19): siRNA sense strand
uaucugugauggaggaaga

SEQ ID NO: 2174775 - RNA, 19 nt, Homo sapiens
  misc_RNA (1)...(19): siRNA sense strand
guaauccucuugacaugac

SEQ ID NO: 2174776 - RNA, 19 nt, Homo sapiens
  misc_RNA (1)...(19): siRNA sense strand
gaggagagagugugcaaag

SEQ ID NO: 2174777 - RNA, 19 nt, Homo sapiens
  misc_RNA (1)...(19): siRNA sense strand
caaacagagcugaagagaa

SEQ ID NO: 2174778 - RNA, 19 nt, Homo sapiens
  misc_RNA (1)...(19): siRNA sense strand
aaauuguccuguuggagaa

SEQ ID NO: 2174779 - RNA, 19 nt, Homo sapiens
  misc_RNA (1)...(19): siRNA sense strand
agagccaccugaacacuau

SEQ ID NO: 2174780 - RNA, 19 nt, Homo sapiens
  misc_RNA (1)...(19): siRNA sense strand
gaguuggaauuucaguuag

SEQ ID NO: 2174781 - RNA, 19 nt, Homo sapiens
  misc_RNA (1)...(19): siRNA sense strand
ccaggaagcccaguucaug

SEQ ID NO: 2174782 - RNA, 19 nt, Homo sapiens
  misc_RNA (1)...(19): siRNA sense strand
uagaaugcacuguguguga

SEQ ID NO: 2174783 - RNA, 19 nt, Homo sapiens
  misc_RNA (1)...(19): siRNA sense strand
gaggaacaucuuuagaaug

SEQ ID NO: 2174784 - RNA, 19 nt, Homo sapiens
  misc_RNA (1)...(19): siRNA sense strand
aaucacaccuuaugcaacu

SEQ ID NO: 2174785 - RNA, 19 nt, Homo sapiens
  misc_RNA (1)...(19): siRNA sense strand
gaagaagagacugguaauc

SEQ ID NO: 2174786 - RNA, 19 nt, Homo sapiens
  misc_RNA (1)...(19): siRNA sense strand
caacuuguacggucguuuc

SEQ ID NO: 2174787 - RNA, 19 nt, Homo sapiens
  misc_RNA (1)...(19): siRNA sense strand
gcagacuucauguucuaaa

SEQ ID NO: 2174788 - RNA, 19 nt, Homo sapiens
  misc_RNA (1)...(19): siRNA sense strand
gacgauaugccaaaguuuc

SEQ ID NO: 2174789 - RNA, 19 nt, Homo sapiens
  misc_RNA (1)...(19): siRNA sense strand
aaagcaagacaguuaaaug

SEQ ID NO: 2174790 - RNA, 19 nt, Homo sapiens
  misc_RNA (1)...(19): siRNA sense strand
uucagaaacucccauccua

SEQ ID NO: 2174791 - RNA, 19 nt, Homo sapiens
  misc_RNA (1)...(19): siRNA sense strand
ugaccuugcucaaacaucu

SEQ ID NO: 2174792 - RNA, 19 nt, Homo sapiens
  misc_RNA (1)...(19): siRNA sense strand
ugugaaagacuacaugaga

SEQ ID NO: 2174793 - RNA, 19 nt, Homo sapiens
  misc_RNA (1)...(19): siRNA sense strand
gguagaaagccaagagauc

SEQ ID NO: 2174794 - RNA, 19 nt, Homo sapiens
  misc_RNA (1)...(19): siRNA sense strand
ggaaaugaucauacucaag

SEQ ID NO: 2174795 - RNA, 19 nt, Homo sapiens
  misc_RNA (1)...(19): siRNA sense strand
gagccacagcuuaguauca

SEQ ID NO: 2174796 - RNA, 19 nt, Homo sapiens
  misc_RNA (1)...(19): siRNA sense strand
ucagagccacagcuuagua

SEQ ID NO: 2174797 - RNA, 19 nt, Homo sapiens
  misc_RNA (1)...(19): siRNA sense strand
gccaaaguuuccgggagua

SEQ ID NO: 2174798 - RNA, 19 nt, Homo sapiens
  misc_RNA (1)...(19): siRNA sense strand
gaaagcaaugggcagacuu

SEQ ID NO: 2174799 - RNA, 19 nt, Homo sapiens
  misc_RNA (1)...(19): siRNA sense strand
gcagguggcagaguuggaa

SEQ ID NO: 2174800 - RNA, 19 nt, Homo sapiens
  misc_RNA (1)...(19): siRNA sense strand
gaucagaccagacaaauuu

SEQ ID NO: 2174801 - RNA, 19 nt, Homo sapiens
  misc_RNA (1)...(19): siRNA sense strand
ggaagaauacucacaacua

SEQ ID NO: 2174802 - RNA, 19 nt, Homo sapiens
  misc_RNA (1)...(19): siRNA sense strand
ucagagagucuuccaauua

SEQ ID NO: 2174803 - RNA, 19 nt, Homo sapiens
  misc_RNA (1)...(19): siRNA sense strand
gaagaauacucacaacuac

SEQ ID NO: 2174804 - RNA, 19 nt, Homo sapiens
  misc_RNA (1)...(19): siRNA sense strand
ccaggaagauacuguguuu

SEQ ID NO: 2174805 - RNA, 19 nt, Homo sapiens
  misc_RNA (1)...(19): siRNA sense strand
uaagcaagcugccucugua

SEQ ID NO: 2174806 - RNA, 19 nt, Homo sapiens
  misc_RNA (1)...(19): siRNA sense strand
cuucauggcuuuccacuuu

SEQ ID NO: 2174807 - RNA, 19 nt, Homo sapiens
  misc_RNA (1)...(19): siRNA sense strand
ggagggaggugacgaaugg

SEQ ID NO: 2174808 - RNA, 19 nt, Homo sapiens
  misc_RNA (1)...(19): siRNA sense strand
gggaggugcuucauuagaa

SEQ ID NO: 2174809 - RNA, 19 nt, Homo sapiens
  misc_RNA (1)...(19): siRNA sense strand
ggaaagucauggcaggaaa

SEQ ID NO: 2174810 - RNA, 19 nt, Homo sapiens
  misc_RNA (1)...(19): siRNA sense strand
cagagagacuguucagaaa

SEQ ID NO: 2174811 - RNA, 19 nt, Homo sapiens
  misc_RNA (1)...(19): siRNA sense strand
gcagauaucaccagagaga

SEQ ID NO: 2174812 - RNA, 19 nt, Homo sapiens
  misc_RNA (1)...(19): siRNA sense strand
caacaagcauccagcacuu

SEQ ID NO: 2174813 - RNA, 19 nt, Homo sapiens
  misc_RNA (1)...(19): siRNA sense strand
ggaaauggagccacaguau

SEQ ID NO: 2174814 - RNA, 19 nt, Homo sapiens
  misc_RNA (1)...(19): siRNA sense strand
gaaauggagccacaguauu

SEQ ID NO: 2174815 - RNA, 19 nt, Homo sapiens
  misc_RNA (1)...(19): siRNA sense strand
gaugacgucuuccuagaug

SEQ ID NO: 2174816 - RNA, 19 nt, Homo sapiens
  misc_RNA (1)...(19): siRNA sense strand
gggaacagcugggaucaga

SEQ ID NO: 2174817 - RNA, 19 nt, Homo sapiens
  misc_RNA (1)...(19): siRNA sense strand
cuugggaggugcuucauua

SEQ ID NO: 2174818 - RNA, 19 nt, Homo sapiens
  misc_RNA (1)...(19): siRNA sense strand
agaaggaucccaaguauau

SEQ ID NO: 2174819 - RNA, 19 nt, Homo sapiens
  misc_RNA (1)...(19): siRNA sense strand
gagaagaugcugccaugaa

SEQ ID NO: 2174820 - RNA, 19 nt, Homo sapiens
  misc_RNA (1)...(19): siRNA sense strand
gagaucuuguccuucauuu

SEQ ID NO: 2174821 - RNA, 19 nt, Homo sapiens
  misc_RNA (1)...(19): siRNA sense strand
cacaaggucuuaauccuau

SEQ ID NO: 2174822 - RNA, 19 nt, Homo sapiens
  misc_RNA (1)...(19): siRNA sense strand
ccagagagacuguucagaa

SEQ ID NO: 2174823 - RNA, 19 nt, Homo sapiens
  misc_RNA (1)...(19): siRNA sense strand
gaaucgggaugacgucuuc

SEQ ID NO: 2174824 - RNA, 19 nt, Homo sapiens
  misc_RNA (1)...(19): siRNA sense strand
uuagaaggaucccaaguau

SEQ ID NO: 2174825 - RNA, 19 nt, Homo sapiens
  misc_RNA (1)...(19): siRNA sense strand
gggcaggaacccaaugaua

SEQ ID NO: 2174826 - RNA, 19 nt, Homo sapiens
  misc_RNA (1)...(19): siRNA sense strand
ggaacuaucaggaaaguca

SEQ ID NO: 2174827 - RNA, 19 nt, Homo sapiens
  misc_RNA (1)...(19): siRNA sense strand
ggaaaaguaugucugaaga

SEQ ID NO: 2174828 - RNA, 19 nt, Homo sapiens
  misc_RNA (1)...(19): siRNA sense strand
gaaaguaaggcaagcagau

SEQ ID NO: 2174829 - RNA, 19 nt, Homo sapiens
  misc_RNA (1)...(19): siRNA sense strand
ucacugagccaccagauga

SEQ ID NO: 2174830 - RNA, 19 nt, Homo sapiens
  misc_RNA (1)...(19): siRNA sense strand
uaucagacaugaaguuaag

SEQ ID NO: 2174831 - RNA, 19 nt, Homo sapiens
  misc_RNA (1)...(19): siRNA sense strand
guuacagcauggaagaaua

SEQ ID NO: 2174832 - RNA, 19 nt, Homo sapiens
  misc_RNA (1)...(19): siRNA sense strand
aagcagauaucaccagaga

SEQ ID NO: 2174833 - RNA, 19 nt, Homo sapiens
  misc_RNA (1)...(19): siRNA sense strand
gggaugacgucuuccuaga

SEQ ID NO: 2174834 - RNA, 19 nt, Homo sapiens
  misc_RNA (1)...(19): siRNA sense strand
ggacaugacagccacacuu

SEQ ID NO: 2174835 - RNA, 19 nt, Homo sapiens
  misc_RNA (1)...(19): siRNA sense strand
ccaaggcacugaaaguaag

SEQ ID NO: 2174836 - RNA, 19 nt, Homo sapiens
  misc_RNA (1)...(19): siRNA sense strand
gaacauggucucagugacu

SEQ ID NO: 2174837 - RNA, 19 nt, Homo sapiens
  misc_RNA (1)...(19): siRNA sense strand
ggucacaacuagccggaau

SEQ ID NO: 2174838 - RNA, 19 nt, Homo sapiens
  misc_RNA (1)...(19): siRNA sense strand
aaguuaagguucucacauu

SEQ ID NO: 2174839 - RNA, 19 nt, Homo sapiens
  misc_RNA (1)...(19): siRNA sense strand
acaaagggauaucuguguu

SEQ ID NO: 2174840 - RNA, 19 nt, Homo sapiens
  misc_RNA (1)...(19): siRNA sense strand
cagagagucuuccaauuac

SEQ ID NO: 2174841 - RNA, 19 nt, Homo sapiens
  misc_RNA (1)...(19): siRNA sense strand
caagaagggcugccagguu

SEQ ID NO: 2174842 - RNA, 19 nt, Homo sapiens
  misc_RNA (1)...(19): siRNA sense strand
gacaugaaguuaagguucu

SEQ ID NO: 2174843 - RNA, 19 nt, Homo sapiens
  misc_RNA (1)...(19): siRNA sense strand
gacaugacagccacacuuu

SEQ ID NO: 2174844 - RNA, 19 nt, Homo sapiens
  misc_RNA (1)...(19): siRNA sense strand
gccaaggcacugaaaguaa

SEQ ID NO: 2174845 - RNA, 19 nt, Homo sapiens
  misc_RNA (1)...(19): siRNA sense strand
cagaaacaccucagugaug

SEQ ID NO: 2174846 - RNA, 19 nt, Homo sapiens
  misc_RNA (1)...(19): siRNA sense strand
caaagggauaucuguguuu

SEQ ID NO: 2174847 - RNA, 19 nt, Homo sapiens
  misc_RNA (1)...(19): siRNA sense strand
gauugaacauggucucagu

SEQ ID NO: 2174848 - RNA, 19 nt, Homo sapiens
  misc_RNA (1)...(19): siRNA sense strand
guacaaccucaagcuaaua

SEQ ID NO: 2174849 - RNA, 19 nt, Homo sapiens
  misc_RNA (1)...(19): siRNA sense strand
aaagggauaucuguguuug

SEQ ID NO: 2174850 - RNA, 19 nt, Homo sapiens
  misc_RNA (1)...(19): siRNA sense strand
gcaaaacuucaacucauua

SEQ ID NO: 2174851 - RNA, 19 nt, Homo sapiens
  misc_RNA (1)...(19): siRNA sense strand
ggaacccaaugauaccaau

SEQ ID NO: 2174852 - RNA, 19 nt, Homo sapiens
  misc_RNA (1)...(19): siRNA sense strand
gaagaugcugccaugaaga

SEQ ID NO: 2174853 - RNA, 19 nt, Homo sapiens
  misc_RNA (1)...(19): siRNA sense strand
ccugaagaauggaaguauu

SEQ ID NO: 2174854 - RNA, 19 nt, Homo sapiens
  misc_RNA (1)...(19): siRNA sense strand
gaaguuaagguucucacau

SEQ ID NO: 2174855 - RNA, 19 nt, Homo sapiens
  misc_RNA (1)...(19): siRNA sense strand
aaaguaaggcaagcagaua

SEQ ID NO: 2174856 - RNA, 19 nt, Homo sapiens
  misc_RNA (1)...(19): siRNA sense strand
gcuaugucuucauggcuuu

SEQ ID NO: 2174857 - RNA, 19 nt, Homo sapiens
  misc_RNA (1)...(19): siRNA sense strand
gaauagugaacguggcaaa

SEQ ID NO: 2174858 - RNA, 19 nt, Homo sapiens
  misc_RNA (1)...(19): siRNA sense strand
acacaaggucuuaauccua

SEQ ID NO: 2174859 - RNA, 19 nt, Homo sapiens
  misc_RNA (1)...(19): siRNA sense strand
gagccacaguauuugguau

SEQ ID NO: 2174860 - RNA, 19 nt, Homo sapiens
  misc_RNA (1)...(19): siRNA sense strand
ggucggauuucaccacaag

SEQ ID NO: 2174861 - RNA, 19 nt, Homo sapiens
  misc_RNA (1)...(19): siRNA sense strand
agaagaugcugccaugaag

SEQ ID NO: 2174862 - RNA, 19 nt, Homo sapiens
  misc_RNA (1)...(19): siRNA sense strand
gauggugggcuucaggaaa

SEQ ID NO: 2174863 - RNA, 19 nt, Homo sapiens
  misc_RNA (1)...(19): siRNA sense strand
gcaagcugccucuguaugg

SEQ ID NO: 2174864 - RNA, 19 nt, Homo sapiens
  misc_RNA (1)...(19): siRNA sense strand
aaaagugucuguguucuaa

SEQ ID NO: 2174865 - RNA, 19 nt, Homo sapiens
  misc_RNA (1)...(19): siRNA sense strand
cagccacacuuuaccugaa

SEQ ID NO: 2174866 - RNA, 19 nt, Homo sapiens
  misc_RNA (1)...(19): siRNA sense strand
ggaucagaccagacaaauu

SEQ ID NO: 2174867 - RNA, 19 nt, Homo sapiens
  misc_RNA (1)...(19): siRNA sense strand
gaaacgucauggucacaac

SEQ ID NO: 2174868 - RNA, 19 nt, Homo sapiens
  misc_RNA (1)...(19): siRNA sense strand
ugaggcacgugacugagaa

SEQ ID NO: 2174869 - RNA, 19 nt, Homo sapiens
  misc_RNA (1)...(19): siRNA sense strand
cacuuuaccugaagaaugg

SEQ ID NO: 2174870 - RNA, 19 nt, Homo sapiens
  misc_RNA (1)...(19): siRNA sense strand
gcacuugcagaaauaaauc

SEQ ID NO: 2174871 - RNA, 19 nt, Homo sapiens
  misc_RNA (1)...(19): siRNA sense strand
gcacugaugacuguguuau

SEQ ID NO: 2174872 - RNA, 19 nt, Homo sapiens
  misc_RNA (1)...(19): siRNA sense strand
uccagcacuugcagaaaua

SEQ ID NO: 2174873 - RNA, 19 nt, Homo sapiens
  misc_RNA (1)...(19): siRNA sense strand
ggagccacaguauuuggua

SEQ ID NO: 2174874 - RNA, 19 nt, Homo sapiens
  misc_RNA (1)...(19): siRNA sense strand
gcuguuggccagucaguug

SEQ ID NO: 2174875 - RNA, 19 nt, Homo sapiens
  misc_RNA (1)...(19): siRNA sense strand
cagcauggaagaauacuca

SEQ ID NO: 2174876 - RNA, 19 nt, Homo sapiens
  misc_RNA (1)...(19): siRNA sense strand
cugaagaauggaaguauuu

SEQ ID NO: 2174877 - RNA, 19 nt, Homo sapiens
  misc_RNA (1)...(19): siRNA sense strand
uguacaaccucaagcuaau

SEQ ID NO: 2174878 - RNA, 19 nt, Homo sapiens
  misc_RNA (1)...(19): siRNA sense strand
caaggucuuaauccuauuu

SEQ ID NO: 2174879 - RNA, 19 nt, Homo sapiens
  misc_RNA (1)...(19): siRNA sense strand
gauaucuguguuugccuua

SEQ ID NO: 2174880 - RNA, 19 nt, Homo sapiens
  misc_RNA (1)...(19): siRNA sense strand
gcaauuagacaaugaaaag

SEQ ID NO: 2174881 - RNA, 19 nt, Homo sapiens
  misc_RNA (1)...(19): siRNA sense strand
gaaaagugucuguguucua

SEQ ID NO: 2174882 - RNA, 19 nt, Homo sapiens
  misc_RNA (1)...(19): siRNA sense strand
acacugcaauuagacaaug

SEQ ID NO: 2174883 - RNA, 19 nt, Homo sapiens
  misc_RNA (1)...(19): siRNA sense strand
ccaguuugcggucuacauu

SEQ ID NO: 2174884 - RNA, 19 nt, Homo sapiens
  misc_RNA (1)...(19): siRNA sense strand
cccaaccacugcagaccua

SEQ ID NO: 2174885 - RNA, 19 nt, Homo sapiens
  misc_RNA (1)...(19): siRNA sense strand
uagaaggaucccaaguaua

SEQ ID NO: 2174886 - RNA, 19 nt, Homo sapiens
  misc_RNA (1)...(19): siRNA sense strand
uauuugguaucucuugcua

SEQ ID NO: 2174887 - RNA, 19 nt, Homo sapiens
  misc_RNA (1)...(19): siRNA sense strand
ugacugagaaucgggauga

SEQ ID NO: 2174888 - RNA, 19 nt, Homo sapiens
  misc_RNA (1)...(19): siRNA sense strand
gcucauuucggguuuggaa

SEQ ID NO: 2174889 - RNA, 19 nt, Homo sapiens
  misc_RNA (1)...(19): siRNA sense strand
cuugggaacuaucaggaaa

SEQ ID NO: 2174890 - RNA, 19 nt, Homo sapiens
  misc_RNA (1)...(19): siRNA sense strand
agacugaggagccuuuguu

SEQ ID NO: 2174891 - RNA, 19 nt, Homo sapiens
  misc_RNA (1)...(19): siRNA sense strand
gcauccagcacuugcagaa

SEQ ID NO: 2174892 - RNA, 19 nt, Homo sapiens
  misc_RNA (1)...(19): siRNA sense strand
ccucagugaugccauugug

SEQ ID NO: 2174893 - RNA, 19 nt, Homo sapiens
  misc_RNA (1)...(19): siRNA sense strand
acaccucagugaugccauu

SEQ ID NO: 2174894 - RNA, 19 nt, Homo sapiens
  misc_RNA (1)...(19): siRNA sense strand
ugaggagccuuuguuccaa

SEQ ID NO: 2174895 - RNA, 19 nt, Homo sapiens
  misc_RNA (1)...(19): siRNA sense strand
uagccggaauguuguacaa

SEQ ID NO: 2174896 - RNA, 19 nt, Homo sapiens
  misc_RNA (1)...(19): siRNA sense strand
ggaaacgucauggucacaa

SEQ ID NO: 2174897 - RNA, 19 nt, Homo sapiens
  misc_RNA (1)...(19): siRNA sense strand
gugaugccauuguggaagu

SEQ ID NO: 2174898 - RNA, 19 nt, Homo sapiens
  misc_RNA (1)...(19): siRNA sense strand
gaccccaacuugaaagaaa

SEQ ID NO: 2174899 - RNA, 19 nt, Homo sapiens
  misc_RNA (1)...(19): siRNA sense strand
ggcaggaacccaaugauac

SEQ ID NO: 2174900 - RNA, 19 nt, Homo sapiens
  misc_RNA (1)...(19): siRNA sense strand
gaucagaccagacaaauuu

SEQ ID NO: 2174901 - RNA, 19 nt, Homo sapiens
  misc_RNA (1)...(19): siRNA sense strand
ggaagaauacucacaacua

SEQ ID NO: 2174902 - RNA, 19 nt, Homo sapiens
  misc_RNA (1)...(19): siRNA sense strand
ucagagagucuuccaauua

SEQ ID NO: 2174903 - RNA, 19 nt, Homo sapiens
  misc_RNA (1)...(19): siRNA sense strand
gaagaauacucacaacuac

SEQ ID NO: 2174904 - RNA, 19 nt, Homo sapiens
  misc_RNA (1)...(19): siRNA sense strand
ccaggaagauacuguguuu

SEQ ID NO: 2174905 - RNA, 19 nt, Homo sapiens
  misc_RNA (1)...(19): siRNA sense strand
uaagcaagcugccucugua

SEQ ID NO: 2174906 - RNA, 19 nt, Homo sapiens
  misc_RNA (1)...(19): siRNA sense strand
cuucauggcuuuccacuuu

SEQ ID NO: 2174907 - RNA, 19 nt, Homo sapiens
  misc_RNA (1)...(19): siRNA sense strand
ggagggaggugacgaaugg

SEQ ID NO: 2174908 - RNA, 19 nt, Homo sapiens
  misc_RNA (1)...(19): siRNA sense strand
gggaggugcuucauuagaa

SEQ ID NO: 2174909 - RNA, 19 nt, Homo sapiens
  misc_RNA (1)...(19): siRNA sense strand
ggaaagucauggcaggaaa

SEQ ID NO: 2174910 - RNA, 19 nt, Homo sapiens
  misc_RNA (1)...(19): siRNA sense strand
cagagagacuguucagaaa

SEQ ID NO: 2174911 - RNA, 19 nt, Homo sapiens
  misc_RNA (1)...(19): siRNA sense strand
gcagauaucaccagagaga

SEQ ID NO: 2174912 - RNA, 19 nt, Homo sapiens
  misc_RNA (1)...(19): siRNA sense strand
caacaagcauccagcacuu

SEQ ID NO: 2174913 - RNA, 19 nt, Homo sapiens
  misc_RNA (1)...(19): siRNA sense strand
ggaaauggagccacaguau

SEQ ID NO: 2174914 - RNA, 19 nt, Homo sapiens
  misc_RNA (1)...(19): siRNA sense strand
gaaauggagccacaguauu

SEQ ID NO: 2174915 - RNA, 19 nt, Homo sapiens
  misc_RNA (1)...(19): siRNA sense strand
gaugacgucuuccuagaug

SEQ ID NO: 2174916 - RNA, 19 nt, Homo sapiens
  misc_RNA (1)...(19): siRNA sense strand
gggaacagcugggaucaga

SEQ ID NO: 2174917 - RNA, 19 nt, Homo sapiens
  misc_RNA (1)...(19): siRNA sense strand
cuugggaggugcuucauua

SEQ ID NO: 2174918 - RNA, 19 nt, Homo sapiens
  misc_RNA (1)...(19): siRNA sense strand
agaaggaucccaaguauau

SEQ ID NO: 2174919 - RNA, 19 nt, Homo sapiens
  misc_RNA (1)...(19): siRNA sense strand
gagaagaugcugccaugaa

SEQ ID NO: 2174920 - RNA, 19 nt, Homo sapiens
  misc_RNA (1)...(19): siRNA sense strand
gagaucuuguccuucauuu

SEQ ID NO: 2174921 - RNA, 19 nt, Homo sapiens
  misc_RNA (1)...(19): siRNA sense strand
cacaaggucuuaauccuau

SEQ ID NO: 2174922 - RNA, 19 nt, Homo sapiens
  misc_RNA (1)...(19): siRNA sense strand
ccagagagacuguucagaa

SEQ ID NO: 2174923 - RNA, 19 nt, Homo sapiens
  misc_RNA (1)...(19): siRNA sense strand
gaaucgggaugacgucuuc

SEQ ID NO: 2174924 - RNA, 19 nt, Homo sapiens
  misc_RNA (1)...(19): siRNA sense strand
uuagaaggaucccaaguau

SEQ ID NO: 2174925 - RNA, 19 nt, Homo sapiens
  misc_RNA (1)...(19): siRNA sense strand
gggcaggaacccaaugaua

SEQ ID NO: 2174926 - RNA, 19 nt, Homo sapiens
  misc_RNA (1)...(19): siRNA sense strand
ggaacuaucaggaaaguca

SEQ ID NO: 2174927 - RNA, 19 nt, Homo sapiens
  misc_RNA (1)...(19): siRNA sense strand
ggaaaaguaugucugaaga

SEQ ID NO: 2174928 - RNA, 19 nt, Homo sapiens
  misc_RNA (1)...(19): siRNA sense strand
gaaaguaaggcaagcagau

SEQ ID NO: 2174929 - RNA, 19 nt, Homo sapiens
  misc_RNA (1)...(19): siRNA sense strand
ucacugagccaccagauga

SEQ ID NO: 2174930 - RNA, 19 nt, Homo sapiens
  misc_RNA (1)...(19): siRNA sense strand
uaucagacaugaaguuaag

SEQ ID NO: 2174931 - RNA, 19 nt, Homo sapiens
  misc_RNA (1)...(19): siRNA sense strand
guuacagcauggaagaaua

SEQ ID NO: 2174932 - RNA, 19 nt, Homo sapiens
  misc_RNA (1)...(19): siRNA sense strand
aagcagauaucaccagaga

SEQ ID NO: 2174933 - RNA, 19 nt, Homo sapiens
  misc_RNA (1)...(19): siRNA sense strand
gggaugacgucuuccuaga

SEQ ID NO: 2174934 - RNA, 19 nt, Homo sapiens
  misc_RNA (1)...(19): siRNA sense strand
ggacaugacagccacacuu

SEQ ID NO: 2174935 - RNA, 19 nt, Homo sapiens
  misc_RNA (1)...(19): siRNA sense strand
ccaaggcacugaaaguaag

SEQ ID NO: 2174936 - RNA, 19 nt, Homo sapiens
  misc_RNA (1)...(19): siRNA sense strand
gaacauggucucagugacu

SEQ ID NO: 2174937 - RNA, 19 nt, Homo sapiens
  misc_RNA (1)...(19): siRNA sense strand
ggucacaacuagccggaau

SEQ ID NO: 2174938 - RNA, 19 nt, Homo sapiens
  misc_RNA (1)...(19): siRNA sense strand
aaguuaagguucucacauu

SEQ ID NO: 2174939 - RNA, 19 nt, Homo sapiens
  misc_RNA (1)...(19): siRNA sense strand
acaaagggauaucuguguu

SEQ ID NO: 2174940 - RNA, 19 nt, Homo sapiens
  misc_RNA (1)...(19): siRNA sense strand
cagagagucuuccaauuac

SEQ ID NO: 2174941 - RNA, 19 nt, Homo sapiens
  misc_RNA (1)...(19): siRNA sense strand
caagaagggcugccagguu

SEQ ID NO: 2174942 - RNA, 19 nt, Homo sapiens
  misc_RNA (1)...(19): siRNA sense strand
gacaugaaguuaagguucu

SEQ ID NO: 2174943 - RNA, 19 nt, Homo sapiens
  misc_RNA (1)...(19): siRNA sense strand
gacaugacagccacacuuu

SEQ ID NO: 2174944 - RNA, 19 nt, Homo sapiens
  misc_RNA (1)...(19): siRNA sense strand
gccaaggcacugaaaguaa

SEQ ID NO: 2174945 - RNA, 19 nt, Homo sapiens
  misc_RNA (1)...(19): siRNA sense strand
cagaaacaccucagugaug

SEQ ID NO: 2174946 - RNA, 19 nt, Homo sapiens
  misc_RNA (1)...(19): siRNA sense strand
caaagggauaucuguguuu

SEQ ID NO: 2174947 - RNA, 19 nt, Homo sapiens
  misc_RNA (1)...(19): siRNA sense strand
gauugaacauggucucagu

SEQ ID NO: 2174948 - RNA, 19 nt, Homo sapiens
  misc_RNA (1)...(19): siRNA sense strand
guacaaccucaagcuaaua

SEQ ID NO: 2174949 - RNA, 19 nt, Homo sapiens
  misc_RNA (1)...(19): siRNA sense strand
aaagggauaucuguguuug

SEQ ID NO: 2174950 - RNA, 19 nt, Homo sapiens
  misc_RNA (1)...(19): siRNA sense strand
gcaaaacuucaacucauua

SEQ ID NO: 2174951 - RNA, 19 nt, Homo sapiens
  misc_RNA (1)...(19): siRNA sense strand
ggaacccaaugauaccaau

SEQ ID NO: 2174952 - RNA, 19 nt, Homo sapiens
  misc_RNA (1)...(19): siRNA sense strand
gaagaugcugccaugaaga

SEQ ID NO: 2174953 - RNA, 19 nt, Homo sapiens
  misc_RNA (1)...(19): siRNA sense strand
ccugaagaauggaaguauu

SEQ ID NO: 2174954 - RNA, 19 nt, Homo sapiens
  misc_RNA (1)...(19): siRNA sense strand
gaaguuaagguucucacau

SEQ ID NO: 2174955 - RNA, 19 nt, Homo sapiens
  misc_RNA (1)...(19): siRNA sense strand
aaaguaaggcaagcagaua

SEQ ID NO: 2174956 - RNA, 19 nt, Homo sapiens
  misc_RNA (1)...(19): siRNA sense strand
gcuaugucuucauggcuuu

SEQ ID NO: 2174957 - RNA, 19 nt, Homo sapiens
  misc_RNA (1)...(19): siRNA sense strand
gaauagugaacguggcaaa

SEQ ID NO: 2174958 - RNA, 19 nt, Homo sapiens
  misc_RNA (1)...(19): siRNA sense strand
acacaaggucuuaauccua

SEQ ID NO: 2174959 - RNA, 19 nt, Homo sapiens
  misc_RNA (1)...(19): siRNA sense strand
gagccacaguauuugguau

SEQ ID NO: 2174960 - RNA, 19 nt, Homo sapiens
  misc_RNA (1)...(19): siRNA sense strand
ggucggauuucaccacaag

SEQ ID NO: 2174961 - RNA, 19 nt, Homo sapiens
  misc_RNA (1)...(19): siRNA sense strand
agaagaugcugccaugaag

SEQ ID NO: 2174962 - RNA, 19 nt, Homo sapiens
  misc_RNA (1)...(19): siRNA sense strand
gauggugggcuucaggaaa

SEQ ID NO: 2174963 - RNA, 19 nt, Homo sapiens
  misc_RNA (1)...(19): siRNA sense strand
gcaagcugccucuguaugg

SEQ ID NO: 2174964 - RNA, 19 nt, Homo sapiens
  misc_RNA (1)...(19): siRNA sense strand
aaaagugucuguguucuaa

SEQ ID NO: 2174965 - RNA, 19 nt, Homo sapiens
  misc_RNA (1)...(19): siRNA sense strand
cagccacacuuuaccugaa

SEQ ID NO: 2174966 - RNA, 19 nt, Homo sapiens
  misc_RNA (1)...(19): siRNA sense strand
ggaucagaccagacaaauu

SEQ ID NO: 2174967 - RNA, 19 nt, Homo sapiens
  misc_RNA (1)...(19): siRNA sense strand
gaaacgucauggucacaac

SEQ ID NO: 2174968 - RNA, 19 nt, Homo sapiens
  misc_RNA (1)...(19): siRNA sense strand
ugaggcacgugacugagaa

SEQ ID NO: 2174969 - RNA, 19 nt, Homo sapiens
  misc_RNA (1)...(19): siRNA sense strand
cacuuuaccugaagaaugg

SEQ ID NO: 2174970 - RNA, 19 nt, Homo sapiens
  misc_RNA (1)...(19): siRNA sense strand
gcacuugcagaaauaaauc

SEQ ID NO: 2174971 - RNA, 19 nt, Homo sapiens
  misc_RNA (1)...(19): siRNA sense strand
gcacugaugacuguguuau

SEQ ID NO: 2174972 - RNA, 19 nt, Homo sapiens
  misc_RNA (1)...(19): siRNA sense strand
uccagcacuugcagaaaua

SEQ ID NO: 2174973 - RNA, 19 nt, Homo sapiens
  misc_RNA (1)...(19): siRNA sense strand
ggagccacaguauuuggua

SEQ ID NO: 2174974 - RNA, 19 nt, Homo sapiens
  misc_RNA (1)...(19): siRNA sense strand
gcuguuggccagucaguug

SEQ ID NO: 2174975 - RNA, 19 nt, Homo sapiens
  misc_RNA (1)...(19): siRNA sense strand
cagcauggaagaauacuca

SEQ ID NO: 2174976 - RNA, 19 nt, Homo sapiens
  misc_RNA (1)...(19): siRNA sense strand
cugaagaauggaaguauuu

SEQ ID NO: 2174977 - RNA, 19 nt, Homo sapiens
  misc_RNA (1)...(19): siRNA sense strand
uguacaaccucaagcuaau

SEQ ID NO: 2174978 - RNA, 19 nt, Homo sapiens
  misc_RNA (1)...(19): siRNA sense strand
caaggucuuaauccuauuu

SEQ ID NO: 2174979 - RNA, 19 nt, Homo sapiens
  misc_RNA (1)...(19): siRNA sense strand
gauaucuguguuugccuua

SEQ ID NO: 2174980 - RNA, 19 nt, Homo sapiens
  misc_RNA (1)...(19): siRNA sense strand
gcaauuagacaaugaaaag

SEQ ID NO: 2174981 - RNA, 19 nt, Homo sapiens
  misc_RNA (1)...(19): siRNA sense strand
gaaaagugucuguguucua

SEQ ID NO: 2174982 - RNA, 19 nt, Homo sapiens
  misc_RNA (1)...(19): siRNA sense strand
acacugcaauuagacaaug

SEQ ID NO: 2174983 - RNA, 19 nt, Homo sapiens
  misc_RNA (1)...(19): siRNA sense strand
ccaguuugcggucuacauu

SEQ ID NO: 2174984 - RNA, 19 nt, Homo sapiens
  misc_RNA (1)...(19): siRNA sense strand
cccaaccacugcagaccua

SEQ ID NO: 2174985 - RNA, 19 nt, Homo sapiens
  misc_RNA (1)...(19): siRNA sense strand
uagaaggaucccaaguaua

SEQ ID NO: 2174986 - RNA, 19 nt, Homo sapiens
  misc_RNA (1)...(19): siRNA sense strand
uauuugguaucucuugcua

SEQ ID NO: 2174987 - RNA, 19 nt, Homo sapiens
  misc_RNA (1)...(19): siRNA sense strand
ugacugagaaucgggauga

SEQ ID NO: 2174988 - RNA, 19 nt, Homo sapiens
  misc_RNA (1)...(19): siRNA sense strand
gcucauuucggguuuggaa

SEQ ID NO: 2174989 - RNA, 19 nt, Homo sapiens
  misc_RNA (1)...(19): siRNA sense strand
cuugggaacuaucaggaaa

SEQ ID NO: 2174990 - RNA, 19 nt, Homo sapiens
  misc_RNA (1)...(19): siRNA sense strand
agacugaggagccuuuguu

SEQ ID NO: 2174991 - RNA, 19 nt, Homo sapiens
  misc_RNA (1)...(19): siRNA sense strand
gcauccagcacuugcagaa

SEQ ID NO: 2174992 - RNA, 19 nt, Homo sapiens
  misc_RNA (1)...(19): siRNA sense strand
ccucagugaugccauugug

SEQ ID NO: 2174993 - RNA, 19 nt, Homo sapiens
  misc_RNA (1)...(19): siRNA sense strand
acaccucagugaugccauu

SEQ ID NO: 2174994 - RNA, 19 nt, Homo sapiens
  misc_RNA (1)...(19): siRNA sense strand
ugaggagccuuuguuccaa

SEQ ID NO: 2174995 - RNA, 19 nt, Homo sapiens
  misc_RNA (1)...(19): siRNA sense strand
uagccggaauguuguacaa

SEQ ID NO: 2174996 - RNA, 19 nt, Homo sapiens
  misc_RNA (1)...(19): siRNA sense strand
ggaaacgucauggucacaa

SEQ ID NO: 2174997 - RNA, 19 nt, Homo sapiens
  misc_RNA (1)...(19): siRNA sense strand
gugaugccauuguggaagu

SEQ ID NO: 2174998 - RNA, 19 nt, Homo sapiens
  misc_RNA (1)...(19): siRNA sense strand
gaccccaacuugaaagaaa

SEQ ID NO: 2174999 - RNA, 19 nt, Homo sapiens
  misc_RNA (1)...(19): siRNA sense strand
ggcaggaacccaaugauac

SEQ ID NO: 2175000 - RNA, 19 nt, Homo sapiens
  misc_RNA (1)...(19): siRNA sense strand
uaaagggacuguauuauuc

SEQ ID NO: 2175001 - RNA, 19 nt, Homo sapiens
  misc_RNA (1)...(19): siRNA sense strand
gcagaugacgguuauauaa

SEQ ID NO: 2175002 - RNA, 19 nt, Homo sapiens
  misc_RNA (1)...(19): siRNA sense strand
gcaguuugcucaguuugua

SEQ ID NO: 2175003 - RNA, 19 nt, Homo sapiens
  misc_RNA (1)...(19): siRNA sense strand
gaucagacuuaauuuggaa

SEQ ID NO: 2175004 - RNA, 19 nt, Homo sapiens
  misc_RNA (1)...(19): siRNA sense strand
gaguauggaugauuaugaa

SEQ ID NO: 2175005 - RNA, 19 nt, Homo sapiens
  misc_RNA (1)...(19): siRNA sense strand
ugaaagcugugaaggauug

SEQ ID NO: 2175006 - RNA, 19 nt, Homo sapiens
  misc_RNA (1)...(19): siRNA sense strand
guaggacccugucugcuuu

SEQ ID NO: 2175007 - RNA, 19 nt, Homo sapiens
  misc_RNA (1)...(19): siRNA sense strand
gaugagugcuguuuauucu

SEQ ID NO: 2175008 - RNA, 19 nt, Homo sapiens
  misc_RNA (1)...(19): siRNA sense strand
guacuggauuuauaccaaa

SEQ ID NO: 2175009 - RNA, 19 nt, Homo sapiens
  misc_RNA (1)...(19): siRNA sense strand
ccagaugagugcuguuuau

SEQ ID NO: 2175010 - RNA, 19 nt, Homo sapiens
  misc_RNA (1)...(19): siRNA sense strand
ggacuucauugcaauucaa

SEQ ID NO: 2175011 - RNA, 19 nt, Homo sapiens
  misc_RNA (1)...(19): siRNA sense strand
gagaauguuucgcgagaau

SEQ ID NO: 2175012 - RNA, 19 nt, Homo sapiens
  misc_RNA (1)...(19): siRNA sense strand
aauggaguauggaugauua

SEQ ID NO: 2175013 - RNA, 19 nt, Homo sapiens
  misc_RNA (1)...(19): siRNA sense strand
gaaagcuucucauauccau

SEQ ID NO: 2175014 - RNA, 19 nt, Homo sapiens
  misc_RNA (1)...(19): siRNA sense strand
gaguguaccuguguaaugu

SEQ ID NO: 2175015 - RNA, 19 nt, Homo sapiens
  misc_RNA (1)...(19): siRNA sense strand
cuucagauguugcuuguga

SEQ ID NO: 2175016 - RNA, 19 nt, Homo sapiens
  misc_RNA (1)...(19): siRNA sense strand
gcaauucaaaccaagauau

SEQ ID NO: 2175017 - RNA, 19 nt, Homo sapiens
  misc_RNA (1)...(19): siRNA sense strand
ggaacugucauacuuaaau

SEQ ID NO: 2175018 - RNA, 19 nt, Homo sapiens
  misc_RNA (1)...(19): siRNA sense strand
ggaucagacuuaauuugga

SEQ ID NO: 2175019 - RNA, 19 nt, Homo sapiens
  misc_RNA (1)...(19): siRNA sense strand
ggaguauggaugauuauga

SEQ ID NO: 2175020 - RNA, 19 nt, Homo sapiens
  misc_RNA (1)...(19): siRNA sense strand
cgcgaaagcuucucauauc

SEQ ID NO: 2175021 - RNA, 19 nt, Homo sapiens
  misc_RNA (1)...(19): siRNA sense strand
gcacucugcauuuccaauu

SEQ ID NO: 2175022 - RNA, 19 nt, Homo sapiens
  misc_RNA (1)...(19): siRNA sense strand
gcgagaaucccaaggguau

SEQ ID NO: 2175023 - RNA, 19 nt, Homo sapiens
  misc_RNA (1)...(19): siRNA sense strand
gagaagggcagcacuacga

SEQ ID NO: 2175024 - RNA, 19 nt, Homo sapiens
  misc_RNA (1)...(19): siRNA sense strand
ggacuguauuauuccuauu

SEQ ID NO: 2175025 - RNA, 19 nt, Homo sapiens
  misc_RNA (1)...(19): siRNA sense strand
acucugcauuuccaauuua

SEQ ID NO: 2175026 - RNA, 19 nt, Homo sapiens
  misc_RNA (1)...(19): siRNA sense strand
ucauauccauuucuuguuc

SEQ ID NO: 2175027 - RNA, 19 nt, Homo sapiens
  misc_RNA (1)...(19): siRNA sense strand
gaucuugcuugcuucuaug

SEQ ID NO: 2175028 - RNA, 19 nt, Homo sapiens
  misc_RNA (1)...(19): siRNA sense strand
gggacuguauuauuccuau

SEQ ID NO: 2175029 - RNA, 19 nt, Homo sapiens
  misc_RNA (1)...(19): siRNA sense strand
ugggagaucuugcuugcuu

SEQ ID NO: 2175030 - RNA, 19 nt, Homo sapiens
  misc_RNA (1)...(19): siRNA sense strand
ggagaguguaccuguguaa

SEQ ID NO: 2175031 - RNA, 19 nt, Homo sapiens
  misc_RNA (1)...(19): siRNA sense strand
gaggagacgcggagaggaa

SEQ ID NO: 2175032 - RNA, 19 nt, Homo sapiens
  misc_RNA (1)...(19): siRNA sense strand
gcucaguuuguacuucuua

SEQ ID NO: 2175033 - RNA, 19 nt, Homo sapiens
  misc_RNA (1)...(19): siRNA sense strand
gauggcauuauucuucaua

SEQ ID NO: 2175034 - RNA, 19 nt, Homo sapiens
  misc_RNA (1)...(19): siRNA sense strand
gguaggacccugucugcuu

SEQ ID NO: 2175035 - RNA, 19 nt, Homo sapiens
  misc_RNA (1)...(19): siRNA sense strand
gaauggaguauggaugauu

SEQ ID NO: 2175036 - RNA, 19 nt, Homo sapiens
  misc_RNA (1)...(19): siRNA sense strand
gaucaacguugugggucuu

SEQ ID NO: 2175037 - RNA, 19 nt, Homo sapiens
  misc_RNA (1)...(19): siRNA sense strand
uuucaagacuauuguggaa

SEQ ID NO: 2175038 - RNA, 19 nt, Homo sapiens
  misc_RNA (1)...(19): siRNA sense strand
ucaagacuauuguggaaac

SEQ ID NO: 2175039 - RNA, 19 nt, Homo sapiens
  misc_RNA (1)...(19): siRNA sense strand
aagcuucucauauccauuu

SEQ ID NO: 2175040 - RNA, 19 nt, Homo sapiens
  misc_RNA (1)...(19): siRNA sense strand
ugaaugauaaacugacuga

SEQ ID NO: 2175041 - RNA, 19 nt, Homo sapiens
  misc_RNA (1)...(19): siRNA sense strand
uaggaggccugguuacagu

SEQ ID NO: 2175042 - RNA, 19 nt, Homo sapiens
  misc_RNA (1)...(19): siRNA sense strand
gacuggcggcugaagaaua

SEQ ID NO: 2175043 - RNA, 19 nt, Homo sapiens
  misc_RNA (1)...(19): siRNA sense strand
cuucuauguugcuguaauu

SEQ ID NO: 2175044 - RNA, 19 nt, Homo sapiens
  misc_RNA (1)...(19): siRNA sense strand
acuggcggcugaagaauau

SEQ ID NO: 2175045 - RNA, 19 nt, Homo sapiens
  misc_RNA (1)...(19): siRNA sense strand
gacaguacuuucuggaacu

SEQ ID NO: 2175046 - RNA, 19 nt, Homo sapiens
  misc_RNA (1)...(19): siRNA sense strand
uuggaacugucauacuuaa

SEQ ID NO: 2175047 - RNA, 19 nt, Homo sapiens
  misc_RNA (1)...(19): siRNA sense strand
uauagaggaaguuugauug

SEQ ID NO: 2175048 - RNA, 19 nt, Homo sapiens
  misc_RNA (1)...(19): siRNA sense strand
caauucaaaccaagauaug

SEQ ID NO: 2175049 - RNA, 19 nt, Homo sapiens
  misc_RNA (1)...(19): siRNA sense strand
guauugcagaugacgguua

SEQ ID NO: 2175050 - RNA, 19 nt, Homo sapiens
  misc_RNA (1)...(19): siRNA sense strand
agauguugcuugugacuca

SEQ ID NO: 2175051 - RNA, 19 nt, Homo sapiens
  misc_RNA (1)...(19): siRNA sense strand
cgauuaggaggccugguua

SEQ ID NO: 2175052 - RNA, 19 nt, Homo sapiens
  misc_RNA (1)...(19): siRNA sense strand
ucauugcaauucaaaccaa

SEQ ID NO: 2175053 - RNA, 19 nt, Homo sapiens
  misc_RNA (1)...(19): siRNA sense strand
gcgacuggcggcugaagaa

SEQ ID NO: 2175054 - RNA, 19 nt, Homo sapiens
  misc_RNA (1)...(19): siRNA sense strand
acugaaagcugugaaggau

SEQ ID NO: 2175055 - RNA, 19 nt, Homo sapiens
  misc_RNA (1)...(19): siRNA sense strand
guauggaugauuaugaaug

SEQ ID NO: 2175056 - RNA, 19 nt, Homo sapiens
  misc_RNA (1)...(19): siRNA sense strand
cagaugacgguuauauaau

SEQ ID NO: 2175057 - RNA, 19 nt, Homo sapiens
  misc_RNA (1)...(19): siRNA sense strand
cacucugcauuuccaauuu

SEQ ID NO: 2175058 - RNA, 19 nt, Homo sapiens
  misc_RNA (1)...(19): siRNA sense strand
gcgaaagcuucucauaucc

SEQ ID NO: 2175059 - RNA, 19 nt, Homo sapiens
  misc_RNA (1)...(19): siRNA sense strand
agaucuugcuugcuucuau

SEQ ID NO: 2175060 - RNA, 19 nt, Homo sapiens
  misc_RNA (1)...(19): siRNA sense strand
gggcagcacuacgagaaag

SEQ ID NO: 2175061 - RNA, 19 nt, Homo sapiens
  misc_RNA (1)...(19): siRNA sense strand
uucuggaacugcuagauuu

SEQ ID NO: 2175062 - RNA, 19 nt, Homo sapiens
  misc_RNA (1)...(19): siRNA sense strand
uguggaaacacccucauuu

SEQ ID NO: 2175063 - RNA, 19 nt, Homo sapiens
  misc_RNA (1)...(19): siRNA sense strand
uauugcagaugacgguuau

SEQ ID NO: 2175064 - RNA, 19 nt, Homo sapiens
  misc_RNA (1)...(19): siRNA sense strand
ccgcgaaagcuucucauau

SEQ ID NO: 2175065 - RNA, 19 nt, Homo sapiens
  misc_RNA (1)...(19): siRNA sense strand
uuuccuccauuaucucuuu

SEQ ID NO: 2175066 - RNA, 19 nt, Homo sapiens
  misc_RNA (1)...(19): siRNA sense strand
cgagaauguuucgcgagaa

SEQ ID NO: 2175067 - RNA, 19 nt, Homo sapiens
  misc_RNA (1)...(19): siRNA sense strand
uugcuucuauguugcugua

SEQ ID NO: 2175068 - RNA, 19 nt, Homo sapiens
  misc_RNA (1)...(19): siRNA sense strand
gcccuucacgagaauguuu

SEQ ID NO: 2175069 - RNA, 19 nt, Homo sapiens
  misc_RNA (1)...(19): siRNA sense strand
ucucauauccauuucuugu

SEQ ID NO: 2175070 - RNA, 19 nt, Homo sapiens
  misc_RNA (1)...(19): siRNA sense strand
gcuucuauguugcuguaau

SEQ ID NO: 2175071 - RNA, 19 nt, Homo sapiens
  misc_RNA (1)...(19): siRNA sense strand
acugcuagauuuccagaug

SEQ ID NO: 2175072 - RNA, 19 nt, Homo sapiens
  misc_RNA (1)...(19): siRNA sense strand
ugucugcuuuccucgguuu

SEQ ID NO: 2175073 - RNA, 19 nt, Homo sapiens
  misc_RNA (1)...(19): siRNA sense strand
cugcuagauuuccagauga

SEQ ID NO: 2175074 - RNA, 19 nt, Homo sapiens
  misc_RNA (1)...(19): siRNA sense strand
cuucucauauccauuucuu

SEQ ID NO: 2175075 - RNA, 19 nt, Homo sapiens
  misc_RNA (1)...(19): siRNA sense strand
gcuugugacucauauucuc

SEQ ID NO: 2175076 - RNA, 19 nt, Homo sapiens
  misc_RNA (1)...(19): siRNA sense strand
cuugcuugcuucuauguug

SEQ ID NO: 2175077 - RNA, 19 nt, Homo sapiens
  misc_RNA (1)...(19): siRNA sense strand
gcagcacuacgagaaagaa

SEQ ID NO: 2175078 - RNA, 19 nt, Homo sapiens
  misc_RNA (1)...(19): siRNA sense strand
caggagaagggcagcacua

SEQ ID NO: 2175079 - RNA, 19 nt, Homo sapiens
  misc_RNA (1)...(19): siRNA sense strand
guuauuuggaacugucaua

SEQ ID NO: 2175080 - RNA, 19 nt, Homo sapiens
  misc_RNA (1)...(19): siRNA sense strand
uuaaguggcagccgauuag

SEQ ID NO: 2175081 - RNA, 19 nt, Homo sapiens
  misc_RNA (1)...(19): siRNA sense strand
cagaugagugcuguuuauu

SEQ ID NO: 2175082 - RNA, 19 nt, Homo sapiens
  misc_RNA (1)...(19): siRNA sense strand
caugcuuccuuggcaguuu

SEQ ID NO: 2175083 - RNA, 19 nt, Homo sapiens
  misc_RNA (1)...(19): siRNA sense strand
uagaggaaguuugauugca

SEQ ID NO: 2175084 - RNA, 19 nt, Homo sapiens
  misc_RNA (1)...(19): siRNA sense strand
gaaggauugggagaucuug

SEQ ID NO: 2175085 - RNA, 19 nt, Homo sapiens
  misc_RNA (1)...(19): siRNA sense strand
uuaugcagaucaacguugu

SEQ ID NO: 2175086 - RNA, 19 nt, Homo sapiens
  misc_RNA (1)...(19): siRNA sense strand
auuuggaacugucauacuu

SEQ ID NO: 2175087 - RNA, 19 nt, Homo sapiens
  misc_RNA (1)...(19): siRNA sense strand
cuuuauagaggaaguuuga

SEQ ID NO: 2175088 - RNA, 19 nt, Homo sapiens
  misc_RNA (1)...(19): siRNA sense strand
uggagaguguaccugugua

SEQ ID NO: 2175089 - RNA, 19 nt, Homo sapiens
  misc_RNA (1)...(19): siRNA sense strand
cagaggagaaggacucagu

SEQ ID NO: 2175090 - RNA, 19 nt, Homo sapiens
  misc_RNA (1)...(19): siRNA sense strand
uugaauggaguauggauga

SEQ ID NO: 2175091 - RNA, 19 nt, Homo sapiens
  misc_RNA (1)...(19): siRNA sense strand
agaguguaccuguguaaug

SEQ ID NO: 2175092 - RNA, 19 nt, Homo sapiens
  misc_RNA (1)...(19): siRNA sense strand
aagauaugucggacgguua

SEQ ID NO: 2175093 - RNA, 19 nt, Homo sapiens
  misc_RNA (1)...(19): siRNA sense strand
ccuggucucacucgacuuu

SEQ ID NO: 2175094 - RNA, 19 nt, Homo sapiens
  misc_RNA (1)...(19): siRNA sense strand
gcggcugaagaauauauuu

SEQ ID NO: 2175095 - RNA, 19 nt, Homo sapiens
  misc_RNA (1)...(19): siRNA sense strand
ccgauuaggaggccugguu

SEQ ID NO: 2175096 - RNA, 19 nt, Homo sapiens
  misc_RNA (1)...(19): siRNA sense strand
caagacuauuguggaaaca

SEQ ID NO: 2175097 - RNA, 19 nt, Homo sapiens
  misc_RNA (1)...(19): siRNA sense strand
uuuaaguggcagccgauua

SEQ ID NO: 2175098 - RNA, 19 nt, Homo sapiens
  misc_RNA (1)...(19): siRNA sense strand
ugcagaugacgguuauaua

SEQ ID NO: 2175099 - RNA, 19 nt, Homo sapiens
  misc_RNA (1)...(19): siRNA sense strand
guuccuuccucucuguugu

SEQ ID NO: 2175100 - RNA, 19 nt, Homo sapiens
  misc_RNA (1)...(19): siRNA sense strand
uaaagggacuguauuauuc

SEQ ID NO: 2175101 - RNA, 19 nt, Homo sapiens
  misc_RNA (1)...(19): siRNA sense strand
gcagaugacgguuauauaa

SEQ ID NO: 2175102 - RNA, 19 nt, Homo sapiens
  misc_RNA (1)...(19): siRNA sense strand
gcaguuugcucaguuugua

SEQ ID NO: 2175103 - RNA, 19 nt, Homo sapiens
  misc_RNA (1)...(19): siRNA sense strand
gaucagacuuaauuuggaa

SEQ ID NO: 2175104 - RNA, 19 nt, Homo sapiens
  misc_RNA (1)...(19): siRNA sense strand
gaguauggaugauuaugaa

SEQ ID NO: 2175105 - RNA, 19 nt, Homo sapiens
  misc_RNA (1)...(19): siRNA sense strand
ugaaagcugugaaggauug

SEQ ID NO: 2175106 - RNA, 19 nt, Homo sapiens
  misc_RNA (1)...(19): siRNA sense strand
guaggacccugucugcuuu

SEQ ID NO: 2175107 - RNA, 19 nt, Homo sapiens
  misc_RNA (1)...(19): siRNA sense strand
gaugagugcuguuuauucu

SEQ ID NO: 2175108 - RNA, 19 nt, Homo sapiens
  misc_RNA (1)...(19): siRNA sense strand
guacuggauuuauaccaaa

SEQ ID NO: 2175109 - RNA, 19 nt, Homo sapiens
  misc_RNA (1)...(19): siRNA sense strand
ccagaugagugcuguuuau

SEQ ID NO: 2175110 - RNA, 19 nt, Homo sapiens
  misc_RNA (1)...(19): siRNA sense strand
ggacuucauugcaauucaa

SEQ ID NO: 2175111 - RNA, 19 nt, Homo sapiens
  misc_RNA (1)...(19): siRNA sense strand
gagaauguuucgcgagaau

SEQ ID NO: 2175112 - RNA, 19 nt, Homo sapiens
  misc_RNA (1)...(19): siRNA sense strand
aauggaguauggaugauua

SEQ ID NO: 2175113 - RNA, 19 nt, Homo sapiens
  misc_RNA (1)...(19): siRNA sense strand
gaaagcuucucauauccau

SEQ ID NO: 2175114 - RNA, 19 nt, Homo sapiens
  misc_RNA (1)...(19): siRNA sense strand
gaguguaccuguguaaugu

SEQ ID NO: 2175115 - RNA, 19 nt, Homo sapiens
  misc_RNA (1)...(19): siRNA sense strand
cuucagauguugcuuguga

SEQ ID NO: 2175116 - RNA, 19 nt, Homo sapiens
  misc_RNA (1)...(19): siRNA sense strand
gcaauucaaaccaagauau

SEQ ID NO: 2175117 - RNA, 19 nt, Homo sapiens
  misc_RNA (1)...(19): siRNA sense strand
ggaacugucauacuuaaau

SEQ ID NO: 2175118 - RNA, 19 nt, Homo sapiens
  misc_RNA (1)...(19): siRNA sense strand
ggaucagacuuaauuugga

SEQ ID NO: 2175119 - RNA, 19 nt, Homo sapiens
  misc_RNA (1)...(19): siRNA sense strand
ggaguauggaugauuauga

SEQ ID NO: 2175120 - RNA, 19 nt, Homo sapiens
  misc_RNA (1)...(19): siRNA sense strand
cgcgaaagcuucucauauc

SEQ ID NO: 2175121 - RNA, 19 nt, Homo sapiens
  misc_RNA (1)...(19): siRNA sense strand
gcacucugcauuuccaauu

SEQ ID NO: 2175122 - RNA, 19 nt, Homo sapiens
  misc_RNA (1)...(19): siRNA sense strand
gcgagaaucccaaggguau

SEQ ID NO: 2175123 - RNA, 19 nt, Homo sapiens
  misc_RNA (1)...(19): siRNA sense strand
gagaagggcagcacuacga

SEQ ID NO: 2175124 - RNA, 19 nt, Homo sapiens
  misc_RNA (1)...(19): siRNA sense strand
ggacuguauuauuccuauu

SEQ ID NO: 2175125 - RNA, 19 nt, Homo sapiens
  misc_RNA (1)...(19): siRNA sense strand
acucugcauuuccaauuua

SEQ ID NO: 2175126 - RNA, 19 nt, Homo sapiens
  misc_RNA (1)...(19): siRNA sense strand
ucauauccauuucuuguuc

SEQ ID NO: 2175127 - RNA, 19 nt, Homo sapiens
  misc_RNA (1)...(19): siRNA sense strand
gaucuugcuugcuucuaug

SEQ ID NO: 2175128 - RNA, 19 nt, Homo sapiens
  misc_RNA (1)...(19): siRNA sense strand
gggacuguauuauuccuau

SEQ ID NO: 2175129 - RNA, 19 nt, Homo sapiens
  misc_RNA (1)...(19): siRNA sense strand
ugggagaucuugcuugcuu

SEQ ID NO: 2175130 - RNA, 19 nt, Homo sapiens
  misc_RNA (1)...(19): siRNA sense strand
ggagaguguaccuguguaa

SEQ ID NO: 2175131 - RNA, 19 nt, Homo sapiens
  misc_RNA (1)...(19): siRNA sense strand
gaggagacgcggagaggaa

SEQ ID NO: 2175132 - RNA, 19 nt, Homo sapiens
  misc_RNA (1)...(19): siRNA sense strand
gcucaguuuguacuucuua

SEQ ID NO: 2175133 - RNA, 19 nt, Homo sapiens
  misc_RNA (1)...(19): siRNA sense strand
gauggcauuauucuucaua

SEQ ID NO: 2175134 - RNA, 19 nt, Homo sapiens
  misc_RNA (1)...(19): siRNA sense strand
gguaggacccugucugcuu

SEQ ID NO: 2175135 - RNA, 19 nt, Homo sapiens
  misc_RNA (1)...(19): siRNA sense strand
gaauggaguauggaugauu

SEQ ID NO: 2175136 - RNA, 19 nt, Homo sapiens
  misc_RNA (1)...(19): siRNA sense strand
gaucaacguugugggucuu

SEQ ID NO: 2175137 - RNA, 19 nt, Homo sapiens
  misc_RNA (1)...(19): siRNA sense strand
uuucaagacuauuguggaa

SEQ ID NO: 2175138 - RNA, 19 nt, Homo sapiens
  misc_RNA (1)...(19): siRNA sense strand
ucaagacuauuguggaaac

SEQ ID NO: 2175139 - RNA, 19 nt, Homo sapiens
  misc_RNA (1)...(19): siRNA sense strand
aagcuucucauauccauuu

SEQ ID NO: 2175140 - RNA, 19 nt, Homo sapiens
  misc_RNA (1)...(19): siRNA sense strand
ugaaugauaaacugacuga

SEQ ID NO: 2175141 - RNA, 19 nt, Homo sapiens
  misc_RNA (1)...(19): siRNA sense strand
uaggaggccugguuacagu

SEQ ID NO: 2175142 - RNA, 19 nt, Homo sapiens
  misc_RNA (1)...(19): siRNA sense strand
gacuggcggcugaagaaua

SEQ ID NO: 2175143 - RNA, 19 nt, Homo sapiens
  misc_RNA (1)...(19): siRNA sense strand
cuucuauguugcuguaauu

SEQ ID NO: 2175144 - RNA, 19 nt, Homo sapiens
  misc_RNA (1)...(19): siRNA sense strand
acuggcggcugaagaauau

SEQ ID NO: 2175145 - RNA, 19 nt, Homo sapiens
  misc_RNA (1)...(19): siRNA sense strand
gacaguacuuucuggaacu

SEQ ID NO: 2175146 - RNA, 19 nt, Homo sapiens
  misc_RNA (1)...(19): siRNA sense strand
uuggaacugucauacuuaa

SEQ ID NO: 2175147 - RNA, 19 nt, Homo sapiens
  misc_RNA (1)...(19): siRNA sense strand
uauagaggaaguuugauug

SEQ ID NO: 2175148 - RNA, 19 nt, Homo sapiens
  misc_RNA (1)...(19): siRNA sense strand
caauucaaaccaagauaug

SEQ ID NO: 2175149 - RNA, 19 nt, Homo sapiens
  misc_RNA (1)...(19): siRNA sense strand
guauugcagaugacgguua

SEQ ID NO: 2175150 - RNA, 19 nt, Homo sapiens
  misc_RNA (1)...(19): siRNA sense strand
agauguugcuugugacuca

SEQ ID NO: 2175151 - RNA, 19 nt, Homo sapiens
  misc_RNA (1)...(19): siRNA sense strand
cgauuaggaggccugguua

SEQ ID NO: 2175152 - RNA, 19 nt, Homo sapiens
  misc_RNA (1)...(19): siRNA sense strand
ucauugcaauucaaaccaa

SEQ ID NO: 2175153 - RNA, 19 nt, Homo sapiens
  misc_RNA (1)...(19): siRNA sense strand
gcgacuggcggcugaagaa

SEQ ID NO: 2175154 - RNA, 19 nt, Homo sapiens
  misc_RNA (1)...(19): siRNA sense strand
acugaaagcugugaaggau

SEQ ID NO: 2175155 - RNA, 19 nt, Homo sapiens
  misc_RNA (1)...(19): siRNA sense strand
guauggaugauuaugaaug

SEQ ID NO: 2175156 - RNA, 19 nt, Homo sapiens
  misc_RNA (1)...(19): siRNA sense strand
cagaugacgguuauauaau

SEQ ID NO: 2175157 - RNA, 19 nt, Homo sapiens
  misc_RNA (1)...(19): siRNA sense strand
cacucugcauuuccaauuu

SEQ ID NO: 2175158 - RNA, 19 nt, Homo sapiens
  misc_RNA (1)...(19): siRNA sense strand
gcgaaagcuucucauaucc

SEQ ID NO: 2175159 - RNA, 19 nt, Homo sapiens
  misc_RNA (1)...(19): siRNA sense strand
agaucuugcuugcuucuau

SEQ ID NO: 2175160 - RNA, 19 nt, Homo sapiens
  misc_RNA (1)...(19): siRNA sense strand
gggcagcacuacgagaaag

SEQ ID NO: 2175161 - RNA, 19 nt, Homo sapiens
  misc_RNA (1)...(19): siRNA sense strand
uucuggaacugcuagauuu

SEQ ID NO: 2175162 - RNA, 19 nt, Homo sapiens
  misc_RNA (1)...(19): siRNA sense strand
uguggaaacacccucauuu

SEQ ID NO: 2175163 - RNA, 19 nt, Homo sapiens
  misc_RNA (1)...(19): siRNA sense strand
uauugcagaugacgguuau

SEQ ID NO: 2175164 - RNA, 19 nt, Homo sapiens
  misc_RNA (1)...(19): siRNA sense strand
ccgcgaaagcuucucauau

SEQ ID NO: 2175165 - RNA, 19 nt, Homo sapiens
  misc_RNA (1)...(19): siRNA sense strand
uuuccuccauuaucucuuu

SEQ ID NO: 2175166 - RNA, 19 nt, Homo sapiens
  misc_RNA (1)...(19): siRNA sense strand
cgagaauguuucgcgagaa

SEQ ID NO: 2175167 - RNA, 19 nt, Homo sapiens
  misc_RNA (1)...(19): siRNA sense strand
uugcuucuauguugcugua

SEQ ID NO: 2175168 - RNA, 19 nt, Homo sapiens
  misc_RNA (1)...(19): siRNA sense strand
gcccuucacgagaauguuu

SEQ ID NO: 2175169 - RNA, 19 nt, Homo sapiens
  misc_RNA (1)...(19): siRNA sense strand
ucucauauccauuucuugu

SEQ ID NO: 2175170 - RNA, 19 nt, Homo sapiens
  misc_RNA (1)...(19): siRNA sense strand
gcuucuauguugcuguaau

SEQ ID NO: 2175171 - RNA, 19 nt, Homo sapiens
  misc_RNA (1)...(19): siRNA sense strand
acugcuagauuuccagaug

SEQ ID NO: 2175172 - RNA, 19 nt, Homo sapiens
  misc_RNA (1)...(19): siRNA sense strand
ugucugcuuuccucgguuu

SEQ ID NO: 2175173 - RNA, 19 nt, Homo sapiens
  misc_RNA (1)...(19): siRNA sense strand
cugcuagauuuccagauga

SEQ ID NO: 2175174 - RNA, 19 nt, Homo sapiens
  misc_RNA (1)...(19): siRNA sense strand
cuucucauauccauuucuu

SEQ ID NO: 2175175 - RNA, 19 nt, Homo sapiens
  misc_RNA (1)...(19): siRNA sense strand
gcuugugacucauauucuc

SEQ ID NO: 2175176 - RNA, 19 nt, Homo sapiens
  misc_RNA (1)...(19): siRNA sense strand
cuugcuugcuucuauguug

SEQ ID NO: 2175177 - RNA, 19 nt, Homo sapiens
  misc_RNA (1)...(19): siRNA sense strand
gcagcacuacgagaaagaa

SEQ ID NO: 2175178 - RNA, 19 nt, Homo sapiens
  misc_RNA (1)...(19): siRNA sense strand
caggagaagggcagcacua

SEQ ID NO: 2175179 - RNA, 19 nt, Homo sapiens
  misc_RNA (1)...(19): siRNA sense strand
guuauuuggaacugucaua

SEQ ID NO: 2175180 - RNA, 19 nt, Homo sapiens
  misc_RNA (1)...(19): siRNA sense strand
uuaaguggcagccgauuag

SEQ ID NO: 2175181 - RNA, 19 nt, Homo sapiens
  misc_RNA (1)...(19): siRNA sense strand
cagaugagugcuguuuauu

SEQ ID NO: 2175182 - RNA, 19 nt, Homo sapiens
  misc_RNA (1)...(19): siRNA sense strand
caugcuuccuuggcaguuu

SEQ ID NO: 2175183 - RNA, 19 nt, Homo sapiens
  misc_RNA (1)...(19): siRNA sense strand
uagaggaaguuugauugca

SEQ ID NO: 2175184 - RNA, 19 nt, Homo sapiens
  misc_RNA (1)...(19): siRNA sense strand
gaaggauugggagaucuug

SEQ ID NO: 2175185 - RNA, 19 nt, Homo sapiens
  misc_RNA (1)...(19): siRNA sense strand
uuaugcagaucaacguugu

SEQ ID NO: 2175186 - RNA, 19 nt, Homo sapiens
  misc_RNA (1)...(19): siRNA sense strand
auuuggaacugucauacuu

SEQ ID NO: 2175187 - RNA, 19 nt, Homo sapiens
  misc_RNA (1)...(19): siRNA sense strand
cuuuauagaggaaguuuga

SEQ ID NO: 2175188 - RNA, 19 nt, Homo sapiens
  misc_RNA (1)...(19): siRNA sense strand
uggagaguguaccugugua

SEQ ID NO: 2175189 - RNA, 19 nt, Homo sapiens
  misc_RNA (1)...(19): siRNA sense strand
cagaggagaaggacucagu

SEQ ID NO: 2175190 - RNA, 19 nt, Homo sapiens
  misc_RNA (1)...(19): siRNA sense strand
uugaauggaguauggauga

SEQ ID NO: 2175191 - RNA, 19 nt, Homo sapiens
  misc_RNA (1)...(19): siRNA sense strand
agaguguaccuguguaaug

SEQ ID NO: 2175192 - RNA, 19 nt, Homo sapiens
  misc_RNA (1)...(19): siRNA sense strand
aagauaugucggacgguua

SEQ ID NO: 2175193 - RNA, 19 nt, Homo sapiens
  misc_RNA (1)...(19): siRNA sense strand
ccuggucucacucgacuuu

SEQ ID NO: 2175194 - RNA, 19 nt, Homo sapiens
  misc_RNA (1)...(19): siRNA sense strand
gcggcugaagaauauauuu

SEQ ID NO: 2175195 - RNA, 19 nt, Homo sapiens
  misc_RNA (1)...(19): siRNA sense strand
ccgauuaggaggccugguu

SEQ ID NO: 2175196 - RNA, 19 nt, Homo sapiens
  misc_RNA (1)...(19): siRNA sense strand
caagacuauuguggaaaca

SEQ ID NO: 2175197 - RNA, 19 nt, Homo sapiens
  misc_RNA (1)...(19): siRNA sense strand
uuuaaguggcagccgauua

SEQ ID NO: 2175198 - RNA, 19 nt, Homo sapiens
  misc_RNA (1)...(19): siRNA sense strand
ugcagaugacgguuauaua

SEQ ID NO: 2175199 - RNA, 19 nt, Homo sapiens
  misc_RNA (1)...(19): siRNA sense strand
guuccuuccucucuguugu

SEQ ID NO: 2175200 - RNA, 19 nt, Homo sapiens
  misc_RNA (1)...(19): siRNA sense strand
gcauauaucugaacgugua

SEQ ID NO: 2175201 - RNA, 19 nt, Homo sapiens
  misc_RNA (1)...(19): siRNA sense strand
guagaugggucuucaguaa

SEQ ID NO: 2175202 - RNA, 19 nt, Homo sapiens
  misc_RNA (1)...(19): siRNA sense strand
gaagauguguuacaacguu

SEQ ID NO: 2175203 - RNA, 19 nt, Homo sapiens
  misc_RNA (1)...(19): siRNA sense strand
ugaaacagcuugcuuccua

SEQ ID NO: 2175204 - RNA, 19 nt, Homo sapiens
  misc_RNA (1)...(19): siRNA sense strand
uaaaugagcgagcuaaaua

SEQ ID NO: 2175205 - RNA, 19 nt, Homo sapiens
  misc_RNA (1)...(19): siRNA sense strand
gcagaucaauacugaauau

SEQ ID NO: 2175206 - RNA, 19 nt, Homo sapiens
  misc_RNA (1)...(19): siRNA sense strand
ggaagaaaccguucgagaa

SEQ ID NO: 2175207 - RNA, 19 nt, Homo sapiens
  misc_RNA (1)...(19): siRNA sense strand
caacauguagcucuuauuu

SEQ ID NO: 2175208 - RNA, 19 nt, Homo sapiens
  misc_RNA (1)...(19): siRNA sense strand
gaucucaaauucucuaugu

SEQ ID NO: 2175209 - RNA, 19 nt, Homo sapiens
  misc_RNA (1)...(19): siRNA sense strand
caaguucacugcuguguau

SEQ ID NO: 2175210 - RNA, 19 nt, Homo sapiens
  misc_RNA (1)...(19): siRNA sense strand
gagaaacccacuuaaauga

SEQ ID NO: 2175211 - RNA, 19 nt, Homo sapiens
  misc_RNA (1)...(19): siRNA sense strand
gcacugaauucccuuguca

SEQ ID NO: 2175212 - RNA, 19 nt, Homo sapiens
  misc_RNA (1)...(19): siRNA sense strand
gaaaauccuuguagucuuu

SEQ ID NO: 2175213 - RNA, 19 nt, Homo sapiens
  misc_RNA (1)...(19): siRNA sense strand
ggaggaccguagaaagaua

SEQ ID NO: 2175214 - RNA, 19 nt, Homo sapiens
  misc_RNA (1)...(19): siRNA sense strand
gcaauggagugcagcaguu

SEQ ID NO: 2175215 - RNA, 19 nt, Homo sapiens
  misc_RNA (1)...(19): siRNA sense strand
gacauaguguuaauuguug

SEQ ID NO: 2175216 - RNA, 19 nt, Homo sapiens
  misc_RNA (1)...(19): siRNA sense strand
guucaugacugcauuuaug

SEQ ID NO: 2175217 - RNA, 19 nt, Homo sapiens
  misc_RNA (1)...(19): siRNA sense strand
gguagaagauguguuacaa

SEQ ID NO: 2175218 - RNA, 19 nt, Homo sapiens
  misc_RNA (1)...(19): siRNA sense strand
ugaagagucuccauggaaa

SEQ ID NO: 2175219 - RNA, 19 nt, Homo sapiens
  misc_RNA (1)...(19): siRNA sense strand
gaagaaaccguucgagaag

SEQ ID NO: 2175220 - RNA, 19 nt, Homo sapiens
  misc_RNA (1)...(19): siRNA sense strand
gaaauggccaugagacaga

SEQ ID NO: 2175221 - RNA, 19 nt, Homo sapiens
  misc_RNA (1)...(19): siRNA sense strand
caaaauaccugguuuccaa

SEQ ID NO: 2175222 - RNA, 19 nt, Homo sapiens
  misc_RNA (1)...(19): siRNA sense strand
acauguagcucuuauuuca

SEQ ID NO: 2175223 - RNA, 19 nt, Homo sapiens
  misc_RNA (1)...(19): siRNA sense strand
gaaucacgaucccaguauu

SEQ ID NO: 2175224 - RNA, 19 nt, Homo sapiens
  misc_RNA (1)...(19): siRNA sense strand
aauaugaccuggaacuuga

SEQ ID NO: 2175225 - RNA, 19 nt, Homo sapiens
  misc_RNA (1)...(19): siRNA sense strand
gcugccaccuuacagauaa

SEQ ID NO: 2175226 - RNA, 19 nt, Homo sapiens
  misc_RNA (1)...(19): siRNA sense strand
gcgagaaacccacuuaaau

SEQ ID NO: 2175227 - RNA, 19 nt, Homo sapiens
  misc_RNA (1)...(19): siRNA sense strand
uagaacagcuuuaugaaac

SEQ ID NO: 2175228 - RNA, 19 nt, Homo sapiens
  misc_RNA (1)...(19): siRNA sense strand
gagcuguugugaucucaaa

SEQ ID NO: 2175229 - RNA, 19 nt, Homo sapiens
  misc_RNA (1)...(19): siRNA sense strand
ucucaguagugacaauuua

SEQ ID NO: 2175230 - RNA, 19 nt, Homo sapiens
  misc_RNA (1)...(19): siRNA sense strand
gacgagaggcagaucaaua

SEQ ID NO: 2175231 - RNA, 19 nt, Homo sapiens
  misc_RNA (1)...(19): siRNA sense strand
guagaacagcuuuaugaaa

SEQ ID NO: 2175232 - RNA, 19 nt, Homo sapiens
  misc_RNA (1)...(19): siRNA sense strand
ugaacuggauggagaaaug

SEQ ID NO: 2175233 - RNA, 19 nt, Homo sapiens
  misc_RNA (1)...(19): siRNA sense strand
cauggaaaccaccaacuua

SEQ ID NO: 2175234 - RNA, 19 nt, Homo sapiens
  misc_RNA (1)...(19): siRNA sense strand
cgagaaacccacuuaaaug

SEQ ID NO: 2175235 - RNA, 19 nt, Homo sapiens
  misc_RNA (1)...(19): siRNA sense strand
uagcguagguggagaacuu

SEQ ID NO: 2175236 - RNA, 19 nt, Homo sapiens
  misc_RNA (1)...(19): siRNA sense strand
acagguagaagauguguua

SEQ ID NO: 2175237 - RNA, 19 nt, Homo sapiens
  misc_RNA (1)...(19): siRNA sense strand
ugaauaugcugugucauug

SEQ ID NO: 2175238 - RNA, 19 nt, Homo sapiens
  misc_RNA (1)...(19): siRNA sense strand
ugaauucccuugucauaag

SEQ ID NO: 2175239 - RNA, 19 nt, Homo sapiens
  misc_RNA (1)...(19): siRNA sense strand
acagagagcuugguuucaa

SEQ ID NO: 2175240 - RNA, 19 nt, Homo sapiens
  misc_RNA (1)...(19): siRNA sense strand
cagaauugaugcacuuuca

SEQ ID NO: 2175241 - RNA, 19 nt, Homo sapiens
  misc_RNA (1)...(19): siRNA sense strand
ugauagauauucucaguag

SEQ ID NO: 2175242 - RNA, 19 nt, Homo sapiens
  misc_RNA (1)...(19): siRNA sense strand
agaggcagaucaauacuga

SEQ ID NO: 2175243 - RNA, 19 nt, Homo sapiens
  misc_RNA (1)...(19): siRNA sense strand
gaauucccuugucauaaga

SEQ ID NO: 2175244 - RNA, 19 nt, Homo sapiens
  misc_RNA (1)...(19): siRNA sense strand
ugucgaugcugccaccuua

SEQ ID NO: 2175245 - RNA, 19 nt, Homo sapiens
  misc_RNA (1)...(19): siRNA sense strand
guauuugucuucuguucuu

SEQ ID NO: 2175246 - RNA, 19 nt, Homo sapiens
  misc_RNA (1)...(19): siRNA sense strand
caaauucucuauguguguu

SEQ ID NO: 2175247 - RNA, 19 nt, Homo sapiens
  misc_RNA (1)...(19): siRNA sense strand
gacuugggaugacuaaaga

SEQ ID NO: 2175248 - RNA, 19 nt, Homo sapiens
  misc_RNA (1)...(19): siRNA sense strand
gauacgacacugagaaaga

SEQ ID NO: 2175249 - RNA, 19 nt, Homo sapiens
  misc_RNA (1)...(19): siRNA sense strand
gcagagaauuguguacgau

SEQ ID NO: 2175250 - RNA, 19 nt, Homo sapiens
  misc_RNA (1)...(19): siRNA sense strand
cagccaacaucccugcuaa

SEQ ID NO: 2175251 - RNA, 19 nt, Homo sapiens
  misc_RNA (1)...(19): siRNA sense strand
gaucaauacugaauaugcu

SEQ ID NO: 2175252 - RNA, 19 nt, Homo sapiens
  misc_RNA (1)...(19): siRNA sense strand
ucacugcuguguaucauca

SEQ ID NO: 2175253 - RNA, 19 nt, Homo sapiens
  misc_RNA (1)...(19): siRNA sense strand
cacaugaccuacugauaga

SEQ ID NO: 2175254 - RNA, 19 nt, Homo sapiens
  misc_RNA (1)...(19): siRNA sense strand
gccaugagacagacuagua

SEQ ID NO: 2175255 - RNA, 19 nt, Homo sapiens
  misc_RNA (1)...(19): siRNA sense strand
gcauuuaugugaugacacu

SEQ ID NO: 2175256 - RNA, 19 nt, Homo sapiens
  misc_RNA (1)...(19): siRNA sense strand
cagcaguugugguucauga

SEQ ID NO: 2175257 - RNA, 19 nt, Homo sapiens
  misc_RNA (1)...(19): siRNA sense strand
gcuagaguauaacacagaa

SEQ ID NO: 2175258 - RNA, 19 nt, Homo sapiens
  misc_RNA (1)...(19): siRNA sense strand
ucacaugaccuacugauag

SEQ ID NO: 2175259 - RNA, 19 nt, Homo sapiens
  misc_RNA (1)...(19): siRNA sense strand
ggaugggacagaagaguuu

SEQ ID NO: 2175260 - RNA, 19 nt, Homo sapiens
  misc_RNA (1)...(19): siRNA sense strand
cuaccaauaugaccuggaa

SEQ ID NO: 2175261 - RNA, 19 nt, Homo sapiens
  misc_RNA (1)...(19): siRNA sense strand
ggcuauaucuaugcaauug

SEQ ID NO: 2175262 - RNA, 19 nt, Homo sapiens
  misc_RNA (1)...(19): siRNA sense strand
gaauugaugcacuuucaga

SEQ ID NO: 2175263 - RNA, 19 nt, Homo sapiens
  misc_RNA (1)...(19): siRNA sense strand
gcaaacaaacccauguaca

SEQ ID NO: 2175264 - RNA, 19 nt, Homo sapiens
  misc_RNA (1)...(19): siRNA sense strand
ggaaaccaccaacuuaucu

SEQ ID NO: 2175265 - RNA, 19 nt, Homo sapiens
  misc_RNA (1)...(19): siRNA sense strand
ggacgaugguaagcccuuu

SEQ ID NO: 2175266 - RNA, 19 nt, Homo sapiens
  misc_RNA (1)...(19): siRNA sense strand
ucagaacugugaauugcuu

SEQ ID NO: 2175267 - RNA, 19 nt, Homo sapiens
  misc_RNA (1)...(19): siRNA sense strand
ggucugccacccaaugaua

SEQ ID NO: 2175268 - RNA, 19 nt, Homo sapiens
  misc_RNA (1)...(19): siRNA sense strand
gaaguaacacagagagcuu

SEQ ID NO: 2175269 - RNA, 19 nt, Homo sapiens
  misc_RNA (1)...(19): siRNA sense strand
ugaaccucauguacuguua

SEQ ID NO: 2175270 - RNA, 19 nt, Homo sapiens
  misc_RNA (1)...(19): siRNA sense strand
uguuagagcuguugugauc

SEQ ID NO: 2175271 - RNA, 19 nt, Homo sapiens
  misc_RNA (1)...(19): siRNA sense strand
ugacugcauuuaugugaug

SEQ ID NO: 2175272 - RNA, 19 nt, Homo sapiens
  misc_RNA (1)...(19): siRNA sense strand
cuucaguugugaggaauua

SEQ ID NO: 2175273 - RNA, 19 nt, Homo sapiens
  misc_RNA (1)...(19): siRNA sense strand
caacggaugggacagaaga

SEQ ID NO: 2175274 - RNA, 19 nt, Homo sapiens
  misc_RNA (1)...(19): siRNA sense strand
gaaagauacgacacugaga

SEQ ID NO: 2175275 - RNA, 19 nt, Homo sapiens
  misc_RNA (1)...(19): siRNA sense strand
aaagaaugguggagcacaa

SEQ ID NO: 2175276 - RNA, 19 nt, Homo sapiens
  misc_RNA (1)...(19): siRNA sense strand
agagaauuguguacgauug

SEQ ID NO: 2175277 - RNA, 19 nt, Homo sapiens
  misc_RNA (1)...(19): siRNA sense strand
gaacagcuuuaugaaacag

SEQ ID NO: 2175278 - RNA, 19 nt, Homo sapiens
  misc_RNA (1)...(19): siRNA sense strand
gauauucucaguagugaca

SEQ ID NO: 2175279 - RNA, 19 nt, Homo sapiens
  misc_RNA (1)...(19): siRNA sense strand
caauaugaccuggaacuug

SEQ ID NO: 2175280 - RNA, 19 nt, Homo sapiens
  misc_RNA (1)...(19): siRNA sense strand
gggucaaguuccucugaaa

SEQ ID NO: 2175281 - RNA, 19 nt, Homo sapiens
  misc_RNA (1)...(19): siRNA sense strand
cguuguaacuccugauaau

SEQ ID NO: 2175282 - RNA, 19 nt, Homo sapiens
  misc_RNA (1)...(19): siRNA sense strand
aauaugcugugucauuguu

SEQ ID NO: 2175283 - RNA, 19 nt, Homo sapiens
  misc_RNA (1)...(19): siRNA sense strand
auaaguccaugcccaaguu

SEQ ID NO: 2175284 - RNA, 19 nt, Homo sapiens
  misc_RNA (1)...(19): siRNA sense strand
uagauauucucaguaguga

SEQ ID NO: 2175285 - RNA, 19 nt, Homo sapiens
  misc_RNA (1)...(19): siRNA sense strand
caugaccuacugauagaua

SEQ ID NO: 2175286 - RNA, 19 nt, Homo sapiens
  misc_RNA (1)...(19): siRNA sense strand
gaaaccaccaacuuaucuu

SEQ ID NO: 2175287 - RNA, 19 nt, Homo sapiens
  misc_RNA (1)...(19): siRNA sense strand
guugugaucucaaauucuc

SEQ ID NO: 2175288 - RNA, 19 nt, Homo sapiens
  misc_RNA (1)...(19): siRNA sense strand
acuaguagguccuuugcuu

SEQ ID NO: 2175289 - RNA, 19 nt, Homo sapiens
  misc_RNA (1)...(19): siRNA sense strand
aaagauacgacacugagaa

SEQ ID NO: 2175290 - RNA, 19 nt, Homo sapiens
  misc_RNA (1)...(19): siRNA sense strand
ugugaaggcuauaucuaug

SEQ ID NO: 2175291 - RNA, 19 nt, Homo sapiens
  misc_RNA (1)...(19): siRNA sense strand
caucuuugguuugcuguga

SEQ ID NO: 2175292 - RNA, 19 nt, Homo sapiens
  misc_RNA (1)...(19): siRNA sense strand
cagcugauuugcauaaggu

SEQ ID NO: 2175293 - RNA, 19 nt, Homo sapiens
  misc_RNA (1)...(19): siRNA sense strand
uaacacagagagcuugguu

SEQ ID NO: 2175294 - RNA, 19 nt, Homo sapiens
  misc_RNA (1)...(19): siRNA sense strand
gcuaugcuguggcuagagu

SEQ ID NO: 2175295 - RNA, 19 nt, Homo sapiens
  misc_RNA (1)...(19): siRNA sense strand
cagaaucacgaucccagua

SEQ ID NO: 2175296 - RNA, 19 nt, Homo sapiens
  misc_RNA (1)...(19): siRNA sense strand
gugcagcaguugugguuca

SEQ ID NO: 2175297 - RNA, 19 nt, Homo sapiens
  misc_RNA (1)...(19): siRNA sense strand
guuguuuacugacauagug

SEQ ID NO: 2175298 - RNA, 19 nt, Homo sapiens
  misc_RNA (1)...(19): siRNA sense strand
gacuaaagaggaaaugaug

SEQ ID NO: 2175299 - RNA, 19 nt, Homo sapiens
  misc_RNA (1)...(19): siRNA sense strand
uauauuggaggguugcaua

SEQ ID NO: 2175300 - RNA, 19 nt, Homo sapiens
  misc_RNA (1)...(19): siRNA sense strand
gcauauaucugaacgugua

SEQ ID NO: 2175301 - RNA, 19 nt, Homo sapiens
  misc_RNA (1)...(19): siRNA sense strand
guagaugggucuucaguaa

SEQ ID NO: 2175302 - RNA, 19 nt, Homo sapiens
  misc_RNA (1)...(19): siRNA sense strand
gaagauguguuacaacguu

SEQ ID NO: 2175303 - RNA, 19 nt, Homo sapiens
  misc_RNA (1)...(19): siRNA sense strand
ugaaacagcuugcuuccua

SEQ ID NO: 2175304 - RNA, 19 nt, Homo sapiens
  misc_RNA (1)...(19): siRNA sense strand
uaaaugagcgagcuaaaua

SEQ ID NO: 2175305 - RNA, 19 nt, Homo sapiens
  misc_RNA (1)...(19): siRNA sense strand
gcagaucaauacugaauau

SEQ ID NO: 2175306 - RNA, 19 nt, Homo sapiens
  misc_RNA (1)...(19): siRNA sense strand
ggaagaaaccguucgagaa

SEQ ID NO: 2175307 - RNA, 19 nt, Homo sapiens
  misc_RNA (1)...(19): siRNA sense strand
caacauguagcucuuauuu

SEQ ID NO: 2175308 - RNA, 19 nt, Homo sapiens
  misc_RNA (1)...(19): siRNA sense strand
gaucucaaauucucuaugu

SEQ ID NO: 2175309 - RNA, 19 nt, Homo sapiens
  misc_RNA (1)...(19): siRNA sense strand
caaguucacugcuguguau

SEQ ID NO: 2175310 - RNA, 19 nt, Homo sapiens
  misc_RNA (1)...(19): siRNA sense strand
gagaaacccacuuaaauga

SEQ ID NO: 2175311 - RNA, 19 nt, Homo sapiens
  misc_RNA (1)...(19): siRNA sense strand
gcacugaauucccuuguca

SEQ ID NO: 2175312 - RNA, 19 nt, Homo sapiens
  misc_RNA (1)...(19): siRNA sense strand
gaaaauccuuguagucuuu

SEQ ID NO: 2175313 - RNA, 19 nt, Homo sapiens
  misc_RNA (1)...(19): siRNA sense strand
ggaggaccguagaaagaua

SEQ ID NO: 2175314 - RNA, 19 nt, Homo sapiens
  misc_RNA (1)...(19): siRNA sense strand
gcaauggagugcagcaguu

SEQ ID NO: 2175315 - RNA, 19 nt, Homo sapiens
  misc_RNA (1)...(19): siRNA sense strand
gacauaguguuaauuguug

SEQ ID NO: 2175316 - RNA, 19 nt, Homo sapiens
  misc_RNA (1)...(19): siRNA sense strand
guucaugacugcauuuaug

SEQ ID NO: 2175317 - RNA, 19 nt, Homo sapiens
  misc_RNA (1)...(19): siRNA sense strand
gguagaagauguguuacaa

SEQ ID NO: 2175318 - RNA, 19 nt, Homo sapiens
  misc_RNA (1)...(19): siRNA sense strand
ugaagagucuccauggaaa

SEQ ID NO: 2175319 - RNA, 19 nt, Homo sapiens
  misc_RNA (1)...(19): siRNA sense strand
gaagaaaccguucgagaag

SEQ ID NO: 2175320 - RNA, 19 nt, Homo sapiens
  misc_RNA (1)...(19): siRNA sense strand
gaaauggccaugagacaga

SEQ ID NO: 2175321 - RNA, 19 nt, Homo sapiens
  misc_RNA (1)...(19): siRNA sense strand
caaaauaccugguuuccaa

SEQ ID NO: 2175322 - RNA, 19 nt, Homo sapiens
  misc_RNA (1)...(19): siRNA sense strand
acauguagcucuuauuuca

SEQ ID NO: 2175323 - RNA, 19 nt, Homo sapiens
  misc_RNA (1)...(19): siRNA sense strand
gaaucacgaucccaguauu

SEQ ID NO: 2175324 - RNA, 19 nt, Homo sapiens
  misc_RNA (1)...(19): siRNA sense strand
aauaugaccuggaacuuga

SEQ ID NO: 2175325 - RNA, 19 nt, Homo sapiens
  misc_RNA (1)...(19): siRNA sense strand
gcugccaccuuacagauaa

SEQ ID NO: 2175326 - RNA, 19 nt, Homo sapiens
  misc_RNA (1)...(19): siRNA sense strand
gcgagaaacccacuuaaau

SEQ ID NO: 2175327 - RNA, 19 nt, Homo sapiens
  misc_RNA (1)...(19): siRNA sense strand
uagaacagcuuuaugaaac

SEQ ID NO: 2175328 - RNA, 19 nt, Homo sapiens
  misc_RNA (1)...(19): siRNA sense strand
gagcuguugugaucucaaa

SEQ ID NO: 2175329 - RNA, 19 nt, Homo sapiens
  misc_RNA (1)...(19): siRNA sense strand
ucucaguagugacaauuua

SEQ ID NO: 2175330 - RNA, 19 nt, Homo sapiens
  misc_RNA (1)...(19): siRNA sense strand
gacgagaggcagaucaaua

SEQ ID NO: 2175331 - RNA, 19 nt, Homo sapiens
  misc_RNA (1)...(19): siRNA sense strand
guagaacagcuuuaugaaa

SEQ ID NO: 2175332 - RNA, 19 nt, Homo sapiens
  misc_RNA (1)...(19): siRNA sense strand
ugaacuggauggagaaaug

SEQ ID NO: 2175333 - RNA, 19 nt, Homo sapiens
  misc_RNA (1)...(19): siRNA sense strand
cauggaaaccaccaacuua

SEQ ID NO: 2175334 - RNA, 19 nt, Homo sapiens
  misc_RNA (1)...(19): siRNA sense strand
cgagaaacccacuuaaaug

SEQ ID NO: 2175335 - RNA, 19 nt, Homo sapiens
  misc_RNA (1)...(19): siRNA sense strand
uagcguagguggagaacuu

SEQ ID NO: 2175336 - RNA, 19 nt, Homo sapiens
  misc_RNA (1)...(19): siRNA sense strand
acagguagaagauguguua

SEQ ID NO: 2175337 - RNA, 19 nt, Homo sapiens
  misc_RNA (1)...(19): siRNA sense strand
ugaauaugcugugucauug

SEQ ID NO: 2175338 - RNA, 19 nt, Homo sapiens
  misc_RNA (1)...(19): siRNA sense strand
ugaauucccuugucauaag

SEQ ID NO: 2175339 - RNA, 19 nt, Homo sapiens
  misc_RNA (1)...(19): siRNA sense strand
acagagagcuugguuucaa

SEQ ID NO: 2175340 - RNA, 19 nt, Homo sapiens
  misc_RNA (1)...(19): siRNA sense strand
cagaauugaugcacuuuca

SEQ ID NO: 2175341 - RNA, 19 nt, Homo sapiens
  misc_RNA (1)...(19): siRNA sense strand
ugauagauauucucaguag

SEQ ID NO: 2175342 - RNA, 19 nt, Homo sapiens
  misc_RNA (1)...(19): siRNA sense strand
agaggcagaucaauacuga

SEQ ID NO: 2175343 - RNA, 19 nt, Homo sapiens
  misc_RNA (1)...(19): siRNA sense strand
gaauucccuugucauaaga

SEQ ID NO: 2175344 - RNA, 19 nt, Homo sapiens
  misc_RNA (1)...(19): siRNA sense strand
ugucgaugcugccaccuua

SEQ ID NO: 2175345 - RNA, 19 nt, Homo sapiens
  misc_RNA (1)...(19): siRNA sense strand
guauuugucuucuguucuu

SEQ ID NO: 2175346 - RNA, 19 nt, Homo sapiens
  misc_RNA (1)...(19): siRNA sense strand
caaauucucuauguguguu

SEQ ID NO: 2175347 - RNA, 19 nt, Homo sapiens
  misc_RNA (1)...(19): siRNA sense strand
gacuugggaugacuaaaga

SEQ ID NO: 2175348 - RNA, 19 nt, Homo sapiens
  misc_RNA (1)...(19): siRNA sense strand
gauacgacacugagaaaga

SEQ ID NO: 2175349 - RNA, 19 nt, Homo sapiens
  misc_RNA (1)...(19): siRNA sense strand
gcagagaauuguguacgau

SEQ ID NO: 2175350 - RNA, 19 nt, Homo sapiens
  misc_RNA (1)...(19): siRNA sense strand
cagccaacaucccugcuaa

SEQ ID NO: 2175351 - RNA, 19 nt, Homo sapiens
  misc_RNA (1)...(19): siRNA sense strand
gaucaauacugaauaugcu

SEQ ID NO: 2175352 - RNA, 19 nt, Homo sapiens
  misc_RNA (1)...(19): siRNA sense strand
ucacugcuguguaucauca

SEQ ID NO: 2175353 - RNA, 19 nt, Homo sapiens
  misc_RNA (1)...(19): siRNA sense strand
cacaugaccuacugauaga

SEQ ID NO: 2175354 - RNA, 19 nt, Homo sapiens
  misc_RNA (1)...(19): siRNA sense strand
gccaugagacagacuagua

SEQ ID NO: 2175355 - RNA, 19 nt, Homo sapiens
  misc_RNA (1)...(19): siRNA sense strand
gcauuuaugugaugacacu

SEQ ID NO: 2175356 - RNA, 19 nt, Homo sapiens
  misc_RNA (1)...(19): siRNA sense strand
cagcaguugugguucauga

SEQ ID NO: 2175357 - RNA, 19 nt, Homo sapiens
  misc_RNA (1)...(19): siRNA sense strand
gcuagaguauaacacagaa

SEQ ID NO: 2175358 - RNA, 19 nt, Homo sapiens
  misc_RNA (1)...(19): siRNA sense strand
ucacaugaccuacugauag

SEQ ID NO: 2175359 - RNA, 19 nt, Homo sapiens
  misc_RNA (1)...(19): siRNA sense strand
ggaugggacagaagaguuu

SEQ ID NO: 2175360 - RNA, 19 nt, Homo sapiens
  misc_RNA (1)...(19): siRNA sense strand
cuaccaauaugaccuggaa

SEQ ID NO: 2175361 - RNA, 19 nt, Homo sapiens
  misc_RNA (1)...(19): siRNA sense strand
ggcuauaucuaugcaauug

SEQ ID NO: 2175362 - RNA, 19 nt, Homo sapiens
  misc_RNA (1)...(19): siRNA sense strand
gaauugaugcacuuucaga

SEQ ID NO: 2175363 - RNA, 19 nt, Homo sapiens
  misc_RNA (1)...(19): siRNA sense strand
gcaaacaaacccauguaca

SEQ ID NO: 2175364 - RNA, 19 nt, Homo sapiens
  misc_RNA (1)...(19): siRNA sense strand
ggaaaccaccaacuuaucu

SEQ ID NO: 2175365 - RNA, 19 nt, Homo sapiens
  misc_RNA (1)...(19): siRNA sense strand
ggacgaugguaagcccuuu

SEQ ID NO: 2175366 - RNA, 19 nt, Homo sapiens
  misc_RNA (1)...(19): siRNA sense strand
ucagaacugugaauugcuu

SEQ ID NO: 2175367 - RNA, 19 nt, Homo sapiens
  misc_RNA (1)...(19): siRNA sense strand
ggucugccacccaaugaua

SEQ ID NO: 2175368 - RNA, 19 nt, Homo sapiens
  misc_RNA (1)...(19): siRNA sense strand
gaaguaacacagagagcuu

SEQ ID NO: 2175369 - RNA, 19 nt, Homo sapiens
  misc_RNA (1)...(19): siRNA sense strand
ugaaccucauguacuguua

SEQ ID NO: 2175370 - RNA, 19 nt, Homo sapiens
  misc_RNA (1)...(19): siRNA sense strand
uguuagagcuguugugauc

SEQ ID NO: 2175371 - RNA, 19 nt, Homo sapiens
  misc_RNA (1)...(19): siRNA sense strand
ugacugcauuuaugugaug

SEQ ID NO: 2175372 - RNA, 19 nt, Homo sapiens
  misc_RNA (1)...(19): siRNA sense strand
cuucaguugugaggaauua

SEQ ID NO: 2175373 - RNA, 19 nt, Homo sapiens
  misc_RNA (1)...(19): siRNA sense strand
caacggaugggacagaaga

SEQ ID NO: 2175374 - RNA, 19 nt, Homo sapiens
  misc_RNA (1)...(19): siRNA sense strand
gaaagauacgacacugaga

SEQ ID NO: 2175375 - RNA, 19 nt, Homo sapiens
  misc_RNA (1)...(19): siRNA sense strand
aaagaaugguggagcacaa

SEQ ID NO: 2175376 - RNA, 19 nt, Homo sapiens
  misc_RNA (1)...(19): siRNA sense strand
agagaauuguguacgauug

SEQ ID NO: 2175377 - RNA, 19 nt, Homo sapiens
  misc_RNA (1)...(19): siRNA sense strand
gaacagcuuuaugaaacag

SEQ ID NO: 2175378 - RNA, 19 nt, Homo sapiens
  misc_RNA (1)...(19): siRNA sense strand
gauauucucaguagugaca

SEQ ID NO: 2175379 - RNA, 19 nt, Homo sapiens
  misc_RNA (1)...(19): siRNA sense strand
caauaugaccuggaacuug

SEQ ID NO: 2175380 - RNA, 19 nt, Homo sapiens
  misc_RNA (1)...(19): siRNA sense strand
gggucaaguuccucugaaa

SEQ ID NO: 2175381 - RNA, 19 nt, Homo sapiens
  misc_RNA (1)...(19): siRNA sense strand
cguuguaacuccugauaau

SEQ ID NO: 2175382 - RNA, 19 nt, Homo sapiens
  misc_RNA (1)...(19): siRNA sense strand
aauaugcugugucauuguu

SEQ ID NO: 2175383 - RNA, 19 nt, Homo sapiens
  misc_RNA (1)...(19): siRNA sense strand
auaaguccaugcccaaguu

SEQ ID NO: 2175384 - RNA, 19 nt, Homo sapiens
  misc_RNA (1)...(19): siRNA sense strand
uagauauucucaguaguga

SEQ ID NO: 2175385 - RNA, 19 nt, Homo sapiens
  misc_RNA (1)...(19): siRNA sense strand
caugaccuacugauagaua

SEQ ID NO: 2175386 - RNA, 19 nt, Homo sapiens
  misc_RNA (1)...(19): siRNA sense strand
gaaaccaccaacuuaucuu

SEQ ID NO: 2175387 - RNA, 19 nt, Homo sapiens
  misc_RNA (1)...(19): siRNA sense strand
guugugaucucaaauucuc

SEQ ID NO: 2175388 - RNA, 19 nt, Homo sapiens
  misc_RNA (1)...(19): siRNA sense strand
acuaguagguccuuugcuu

SEQ ID NO: 2175389 - RNA, 19 nt, Homo sapiens
  misc_RNA (1)...(19): siRNA sense strand
aaagauacgacacugagaa

SEQ ID NO: 2175390 - RNA, 19 nt, Homo sapiens
  misc_RNA (1)...(19): siRNA sense strand
ugugaaggcuauaucuaug

SEQ ID NO: 2175391 - RNA, 19 nt, Homo sapiens
  misc_RNA (1)...(19): siRNA sense strand
caucuuugguuugcuguga

SEQ ID NO: 2175392 - RNA, 19 nt, Homo sapiens
  misc_RNA (1)...(19): siRNA sense strand
cagcugauuugcauaaggu

SEQ ID NO: 2175393 - RNA, 19 nt, Homo sapiens
  misc_RNA (1)...(19): siRNA sense strand
uaacacagagagcuugguu

SEQ ID NO: 2175394 - RNA, 19 nt, Homo sapiens
  misc_RNA (1)...(19): siRNA sense strand
gcuaugcuguggcuagagu

SEQ ID NO: 2175395 - RNA, 19 nt, Homo sapiens
  misc_RNA (1)...(19): siRNA sense strand
cagaaucacgaucccagua

SEQ ID NO: 2175396 - RNA, 19 nt, Homo sapiens
  misc_RNA (1)...(19): siRNA sense strand
gugcagcaguugugguuca

SEQ ID NO: 2175397 - RNA, 19 nt, Homo sapiens
  misc_RNA (1)...(19): siRNA sense strand
guuguuuacugacauagug

SEQ ID NO: 2175398 - RNA, 19 nt, Homo sapiens
  misc_RNA (1)...(19): siRNA sense strand
gacuaaagaggaaaugaug

SEQ ID NO: 2175399 - RNA, 19 nt, Homo sapiens
  misc_RNA (1)...(19): siRNA sense strand
uauauuggaggguugcaua

SEQ ID NO: 2175400 - RNA, 19 nt, Homo sapiens
  misc_RNA (1)...(19): siRNA sense strand
caacagacauaccaucuua

SEQ ID NO: 2175401 - RNA, 19 nt, Homo sapiens
  misc_RNA (1)...(19): siRNA sense strand
gcacaaaucuuccaaguca

SEQ ID NO: 2175402 - RNA, 19 nt, Homo sapiens
  misc_RNA (1)...(19): siRNA sense strand
ggaaagaagucaaaguuau

SEQ ID NO: 2175403 - RNA, 19 nt, Homo sapiens
  misc_RNA (1)...(19): siRNA sense strand
gaaagaagucaaaguuaug

SEQ ID NO: 2175404 - RNA, 19 nt, Homo sapiens
  misc_RNA (1)...(19): siRNA sense strand
gacaauaaacgacaugaaa

SEQ ID NO: 2175405 - RNA, 19 nt, Homo sapiens
  misc_RNA (1)...(19): siRNA sense strand
guaaagagaaacacaagaa

SEQ ID NO: 2175406 - RNA, 19 nt, Homo sapiens
  misc_RNA (1)...(19): siRNA sense strand
gggaaagaagucaaaguua

SEQ ID NO: 2175407 - RNA, 19 nt, Homo sapiens
  misc_RNA (1)...(19): siRNA sense strand
gaagauugcauaccagaug

SEQ ID NO: 2175408 - RNA, 19 nt, Homo sapiens
  misc_RNA (1)...(19): siRNA sense strand
ucaaaguuaugcaguguug

SEQ ID NO: 2175409 - RNA, 19 nt, Homo sapiens
  misc_RNA (1)...(19): siRNA sense strand
gaagaucccauguaugaca

SEQ ID NO: 2175410 - RNA, 19 nt, Homo sapiens
  misc_RNA (1)...(19): siRNA sense strand
guaaggauacagcaguuaa

SEQ ID NO: 2175411 - RNA, 19 nt, Homo sapiens
  misc_RNA (1)...(19): siRNA sense strand
gaaugcccuuucuuuauca

SEQ ID NO: 2175412 - RNA, 19 nt, Homo sapiens
  misc_RNA (1)...(19): siRNA sense strand
ucauguacccgaaguuuaa

SEQ ID NO: 2175413 - RNA, 19 nt, Homo sapiens
  misc_RNA (1)...(19): siRNA sense strand
gaacgggugacaaagaaug

SEQ ID NO: 2175414 - RNA, 19 nt, Homo sapiens
  misc_RNA (1)...(19): siRNA sense strand
caucauacgagacaauaaa

SEQ ID NO: 2175415 - RNA, 19 nt, Homo sapiens
  misc_RNA (1)...(19): siRNA sense strand
ucaagcaccuggaguccuu

SEQ ID NO: 2175416 - RNA, 19 nt, Homo sapiens
  misc_RNA (1)...(19): siRNA sense strand
ccgaacgggugacaaagaa

SEQ ID NO: 2175417 - RNA, 19 nt, Homo sapiens
  misc_RNA (1)...(19): siRNA sense strand
gccagaagauugcauacca

SEQ ID NO: 2175418 - RNA, 19 nt, Homo sapiens
  misc_RNA (1)...(19): siRNA sense strand
caaaggcaaccaaaaguua

SEQ ID NO: 2175419 - RNA, 19 nt, Homo sapiens
  misc_RNA (1)...(19): siRNA sense strand
augaagaucccauguauga

SEQ ID NO: 2175420 - RNA, 19 nt, Homo sapiens
  misc_RNA (1)...(19): siRNA sense strand
ggaaaggguauucauguac

SEQ ID NO: 2175421 - RNA, 19 nt, Homo sapiens
  misc_RNA (1)...(19): siRNA sense strand
gaacacgccagggaauuuc

SEQ ID NO: 2175422 - RNA, 19 nt, Homo sapiens
  misc_RNA (1)...(19): siRNA sense strand
gaagguaaagagaaacaca

SEQ ID NO: 2175423 - RNA, 19 nt, Homo sapiens
  misc_RNA (1)...(19): siRNA sense strand
gacaucauacgagacaaua

SEQ ID NO: 2175424 - RNA, 19 nt, Homo sapiens
  misc_RNA (1)...(19): siRNA sense strand
acaaaucuuccaagucaaa

SEQ ID NO: 2175425 - RNA, 19 nt, Homo sapiens
  misc_RNA (1)...(19): siRNA sense strand
gcucaugcaccaacuaaag

SEQ ID NO: 2175426 - RNA, 19 nt, Homo sapiens
  misc_RNA (1)...(19): siRNA sense strand
uaagccagaagauugcaua

SEQ ID NO: 2175427 - RNA, 19 nt, Homo sapiens
  misc_RNA (1)...(19): siRNA sense strand
aagcacaaaucuuccaagu

SEQ ID NO: 2175428 - RNA, 19 nt, Homo sapiens
  misc_RNA (1)...(19): siRNA sense strand
ugaacacgccagggaauuu

SEQ ID NO: 2175429 - RNA, 19 nt, Homo sapiens
  misc_RNA (1)...(19): siRNA sense strand
uaaggauacagcaguuaaa

SEQ ID NO: 2175430 - RNA, 19 nt, Homo sapiens
  misc_RNA (1)...(19): siRNA sense strand
cagaguggcacaugaagau

SEQ ID NO: 2175431 - RNA, 19 nt, Homo sapiens
  misc_RNA (1)...(19): siRNA sense strand
gaaaaggacguaaggauac

SEQ ID NO: 2175432 - RNA, 19 nt, Homo sapiens
  misc_RNA (1)...(19): siRNA sense strand
ugaaaaggacguaaggaua

SEQ ID NO: 2175433 - RNA, 19 nt, Homo sapiens
  misc_RNA (1)...(19): siRNA sense strand
gauucuaccucagaugaag

SEQ ID NO: 2175434 - RNA, 19 nt, Homo sapiens
  misc_RNA (1)...(19): siRNA sense strand
caguuccucugaagguaaa

SEQ ID NO: 2175435 - RNA, 19 nt, Homo sapiens
  misc_RNA (1)...(19): siRNA sense strand
gguaaagagaaacacaaga

SEQ ID NO: 2175436 - RNA, 19 nt, Homo sapiens
  misc_RNA (1)...(19): siRNA sense strand
aaacggaagcacaaaucuu

SEQ ID NO: 2175437 - RNA, 19 nt, Homo sapiens
  misc_RNA (1)...(19): siRNA sense strand
aaaguuagagcaguucaga

SEQ ID NO: 2175438 - RNA, 19 nt, Homo sapiens
  misc_RNA (1)...(19): siRNA sense strand
aaucuuccaagucaaauga

SEQ ID NO: 2175439 - RNA, 19 nt, Homo sapiens
  misc_RNA (1)...(19): siRNA sense strand
ccaguuccucugaagguaa

SEQ ID NO: 2175440 - RNA, 19 nt, Homo sapiens
  misc_RNA (1)...(19): siRNA sense strand
gcagcuccaguuccucuga

SEQ ID NO: 2175441 - RNA, 19 nt, Homo sapiens
  misc_RNA (1)...(19): siRNA sense strand
uacccgaaguuuaacaaca

SEQ ID NO: 2175442 - RNA, 19 nt, Homo sapiens
  misc_RNA (1)...(19): siRNA sense strand
cagcuccaguuccucugaa

SEQ ID NO: 2175443 - RNA, 19 nt, Homo sapiens
  misc_RNA (1)...(19): siRNA sense strand
ggauacagcaguuaaaaca

SEQ ID NO: 2175444 - RNA, 19 nt, Homo sapiens
  misc_RNA (1)...(19): siRNA sense strand
aagauugcauaccagaugu

SEQ ID NO: 2175445 - RNA, 19 nt, Homo sapiens
  misc_RNA (1)...(19): siRNA sense strand
caagucaaaugaggguucu

SEQ ID NO: 2175446 - RNA, 19 nt, Homo sapiens
  misc_RNA (1)...(19): siRNA sense strand
ggauucuaccucagaugaa

SEQ ID NO: 2175447 - RNA, 19 nt, Homo sapiens
  misc_RNA (1)...(19): siRNA sense strand
cauacgagacaauaaacga

SEQ ID NO: 2175448 - RNA, 19 nt, Homo sapiens
  misc_RNA (1)...(19): siRNA sense strand
guauucauguacccgaagu

SEQ ID NO: 2175449 - RNA, 19 nt, Homo sapiens
  misc_RNA (1)...(19): siRNA sense strand
gaaaaggaagaaagaaaag

SEQ ID NO: 2175450 - RNA, 19 nt, Homo sapiens
  misc_RNA (1)...(19): siRNA sense strand
uaccucagaugaagauagg

SEQ ID NO: 2175451 - RNA, 19 nt, Homo sapiens
  misc_RNA (1)...(19): siRNA sense strand
ggggaaagaagucaaaguu

SEQ ID NO: 2175452 - RNA, 19 nt, Homo sapiens
  misc_RNA (1)...(19): siRNA sense strand
gagacaauaaacgacauga

SEQ ID NO: 2175453 - RNA, 19 nt, Homo sapiens
  misc_RNA (1)...(19): siRNA sense strand
gggcuuaucaaggaagaug

SEQ ID NO: 2175454 - RNA, 19 nt, Homo sapiens
  misc_RNA (1)...(19): siRNA sense strand
cguaaggauacagcaguua

SEQ ID NO: 2175455 - RNA, 19 nt, Homo sapiens
  misc_RNA (1)...(19): siRNA sense strand
ugacaucauacgagacaau

SEQ ID NO: 2175456 - RNA, 19 nt, Homo sapiens
  misc_RNA (1)...(19): siRNA sense strand
gaaguuuaacaacagacau

SEQ ID NO: 2175457 - RNA, 19 nt, Homo sapiens
  misc_RNA (1)...(19): siRNA sense strand
gcaguguuggcguugcaaa

SEQ ID NO: 2175458 - RNA, 19 nt, Homo sapiens
  misc_RNA (1)...(19): siRNA sense strand
agucaaaguuaugcagugu

SEQ ID NO: 2175459 - RNA, 19 nt, Homo sapiens
  misc_RNA (1)...(19): siRNA sense strand
agauguaccaggcaaugaa

SEQ ID NO: 2175460 - RNA, 19 nt, Homo sapiens
  misc_RNA (1)...(19): siRNA sense strand
ccagauguaccaggcaaug

SEQ ID NO: 2175461 - RNA, 19 nt, Homo sapiens
  misc_RNA (1)...(19): siRNA sense strand
gaaaagcauaagaaaagga

SEQ ID NO: 2175462 - RNA, 19 nt, Homo sapiens
  misc_RNA (1)...(19): siRNA sense strand
agacaauaaacgacaugaa

SEQ ID NO: 2175463 - RNA, 19 nt, Homo sapiens
  misc_RNA (1)...(19): siRNA sense strand
gaagugauguuuaugacaa

SEQ ID NO: 2175464 - RNA, 19 nt, Homo sapiens
  misc_RNA (1)...(19): siRNA sense strand
ggaaauaucuugggaugga

SEQ ID NO: 2175465 - RNA, 19 nt, Homo sapiens
  misc_RNA (1)...(19): siRNA sense strand
caacuacaauggacauaaa

SEQ ID NO: 2175466 - RNA, 19 nt, Homo sapiens
  misc_RNA (1)...(19): siRNA sense strand
acauaaacgugaugacuua

SEQ ID NO: 2175467 - RNA, 19 nt, Homo sapiens
  misc_RNA (1)...(19): siRNA sense strand
acaaggaagugacauguaa

SEQ ID NO: 2175468 - RNA, 19 nt, Homo sapiens
  misc_RNA (1)...(19): siRNA sense strand
uauaacagcuccuucaaau

SEQ ID NO: 2175469 - RNA, 19 nt, Homo sapiens
  misc_RNA (1)...(19): siRNA sense strand
agacaacccuugcauaaug

SEQ ID NO: 2175470 - RNA, 19 nt, Homo sapiens
  misc_RNA (1)...(19): siRNA sense strand
caacagaccucagagaaag

SEQ ID NO: 2175471 - RNA, 19 nt, Homo sapiens
  misc_RNA (1)...(19): siRNA sense strand
ccucauuucuguacgauaa

SEQ ID NO: 2175472 - RNA, 19 nt, Homo sapiens
  misc_RNA (1)...(19): siRNA sense strand
ggaagcaaauguaccaagu

SEQ ID NO: 2175473 - RNA, 19 nt, Homo sapiens
  misc_RNA (1)...(19): siRNA sense strand
caucugugcuugugugaaa

SEQ ID NO: 2175474 - RNA, 19 nt, Homo sapiens
  misc_RNA (1)...(19): siRNA sense strand
gcaaauguaccaaguguuc

SEQ ID NO: 2175475 - RNA, 19 nt, Homo sapiens
  misc_RNA (1)...(19): siRNA sense strand
gagaugugguccucuauca

SEQ ID NO: 2175476 - RNA, 19 nt, Homo sapiens
  misc_RNA (1)...(19): siRNA sense strand
cagaagacaucaaaguaug

SEQ ID NO: 2175477 - RNA, 19 nt, Homo sapiens
  misc_RNA (1)...(19): siRNA sense strand
gcucaaauccugggaguuu

SEQ ID NO: 2175478 - RNA, 19 nt, Homo sapiens
  misc_RNA (1)...(19): siRNA sense strand
gcaacagaccucagagaaa

SEQ ID NO: 2175479 - RNA, 19 nt, Homo sapiens
  misc_RNA (1)...(19): siRNA sense strand
ggucggacauuuaacuuuc

SEQ ID NO: 2175480 - RNA, 19 nt, Homo sapiens
  misc_RNA (1)...(19): siRNA sense strand
ggaagugacauguaagaga

SEQ ID NO: 2175481 - RNA, 19 nt, Homo sapiens
  misc_RNA (1)...(19): siRNA sense strand
ggcaagcucuguggucuuu

SEQ ID NO: 2175482 - RNA, 19 nt, Homo sapiens
  misc_RNA (1)...(19): siRNA sense strand
uaacagcuccuucaaaugg

SEQ ID NO: 2175483 - RNA, 19 nt, Homo sapiens
  misc_RNA (1)...(19): siRNA sense strand
ggacggagugucgcaauaa

SEQ ID NO: 2175484 - RNA, 19 nt, Homo sapiens
  misc_RNA (1)...(19): siRNA sense strand
ugacagacaugugugaaug

SEQ ID NO: 2175485 - RNA, 19 nt, Homo sapiens
  misc_RNA (1)...(19): siRNA sense strand
ugugacaacuggaaugaaa

SEQ ID NO: 2175486 - RNA, 19 nt, Homo sapiens
  misc_RNA (1)...(19): siRNA sense strand
gaaauugguccaugcaaca

SEQ ID NO: 2175487 - RNA, 19 nt, Homo sapiens
  misc_RNA (1)...(19): siRNA sense strand
gaacaaggaagugacaugu

SEQ ID NO: 2175488 - RNA, 19 nt, Homo sapiens
  misc_RNA (1)...(19): siRNA sense strand
agagaagucugucccauuc

SEQ ID NO: 2175489 - RNA, 19 nt, Homo sapiens
  misc_RNA (1)...(19): siRNA sense strand
gcuguguuguucauuguaa

SEQ ID NO: 2175490 - RNA, 19 nt, Homo sapiens
  misc_RNA (1)...(19): siRNA sense strand
caacuggaaugaaauuggu

SEQ ID NO: 2175491 - RNA, 19 nt, Homo sapiens
  misc_RNA (1)...(19): siRNA sense strand
gaaagugaccaccaaagca

SEQ ID NO: 2175492 - RNA, 19 nt, Homo sapiens
  misc_RNA (1)...(19): siRNA sense strand
acagacaacccuugcauaa

SEQ ID NO: 2175493 - RNA, 19 nt, Homo sapiens
  misc_RNA (1)...(19): siRNA sense strand
ccagagagagggcaucaaa

SEQ ID NO: 2175494 - RNA, 19 nt, Homo sapiens
  misc_RNA (1)...(19): siRNA sense strand
gagagaagucugucccauu

SEQ ID NO: 2175495 - RNA, 19 nt, Homo sapiens
  misc_RNA (1)...(19): siRNA sense strand
gaaggaaauaccuauaaca

SEQ ID NO: 2175496 - RNA, 19 nt, Homo sapiens
  misc_RNA (1)...(19): siRNA sense strand
gaaggaagcaaauguacca

SEQ ID NO: 2175497 - RNA, 19 nt, Homo sapiens
  misc_RNA (1)...(19): siRNA sense strand
ggaggaauuucagccagaa

SEQ ID NO: 2175498 - RNA, 19 nt, Homo sapiens
  misc_RNA (1)...(19): siRNA sense strand
ccagaaggaagcaaaugua

SEQ ID NO: 2175499 - RNA, 19 nt, Homo sapiens
  misc_RNA (1)...(19): siRNA sense strand
gguccgggauguaucaaga

SEQ ID NO: 2175500 - RNA, 19 nt, Homo sapiens
  misc_RNA (1)...(19): siRNA sense strand
caggagggcuguugugaag

SEQ ID NO: 2175501 - RNA, 19 nt, Homo sapiens
  misc_RNA (1)...(19): siRNA sense strand
gcaacuacaauggacauaa

SEQ ID NO: 2175502 - RNA, 19 nt, Homo sapiens
  misc_RNA (1)...(19): siRNA sense strand
gugaauguccaguccauaa

SEQ ID NO: 2175503 - RNA, 19 nt, Homo sapiens
  misc_RNA (1)...(19): siRNA sense strand
ggacuacgccacuuucuac

SEQ ID NO: 2175504 - RNA, 19 nt, Homo sapiens
  misc_RNA (1)...(19): siRNA sense strand
ccagaagacaucaaaguau

SEQ ID NO: 2175505 - RNA, 19 nt, Homo sapiens
  misc_RNA (1)...(19): siRNA sense strand
caaacuugguccuucacaa

SEQ ID NO: 2175506 - RNA, 19 nt, Homo sapiens
  misc_RNA (1)...(19): siRNA sense strand
ggacagugcugccccaaau

SEQ ID NO: 2175507 - RNA, 19 nt, Homo sapiens
  misc_RNA (1)...(19): siRNA sense strand
cagcaaacuugguccuuca

SEQ ID NO: 2175508 - RNA, 19 nt, Homo sapiens
  misc_RNA (1)...(19): siRNA sense strand
caagggacagucaagguaa

SEQ ID NO: 2175509 - RNA, 19 nt, Homo sapiens
  misc_RNA (1)...(19): siRNA sense strand
gaaagccagugccugaacu

SEQ ID NO: 2175510 - RNA, 19 nt, Homo sapiens
  misc_RNA (1)...(19): siRNA sense strand
caaauuuggcaacaagauu

SEQ ID NO: 2175511 - RNA, 19 nt, Homo sapiens
  misc_RNA (1)...(19): siRNA sense strand
ggagggcuguugugaagag

SEQ ID NO: 2175512 - RNA, 19 nt, Homo sapiens
  misc_RNA (1)...(19): siRNA sense strand
gacaacccuugcauaaugu

SEQ ID NO: 2175513 - RNA, 19 nt, Homo sapiens
  misc_RNA (1)...(19): siRNA sense strand
ugacuuaauugguggagau

SEQ ID NO: 2175514 - RNA, 19 nt, Homo sapiens
  misc_RNA (1)...(19): siRNA sense strand
uacgauaacugcacagcuu

SEQ ID NO: 2175515 - RNA, 19 nt, Homo sapiens
  misc_RNA (1)...(19): siRNA sense strand
aagcaaauguaccaagugu

SEQ ID NO: 2175516 - RNA, 19 nt, Homo sapiens
  misc_RNA (1)...(19): siRNA sense strand
aaacuguuauugcgaguca

SEQ ID NO: 2175517 - RNA, 19 nt, Homo sapiens
  misc_RNA (1)...(19): siRNA sense strand
gacauaaacgugaugacuu

SEQ ID NO: 2175518 - RNA, 19 nt, Homo sapiens
  misc_RNA (1)...(19): siRNA sense strand
gaugugguccucuaucaau

SEQ ID NO: 2175519 - RNA, 19 nt, Homo sapiens
  misc_RNA (1)...(19): siRNA sense strand
ucaagggacagucaaggua

SEQ ID NO: 2175520 - RNA, 19 nt, Homo sapiens
  misc_RNA (1)...(19): siRNA sense strand
gcaaauuuggcaacaagau

SEQ ID NO: 2175521 - RNA, 19 nt, Homo sapiens
  misc_RNA (1)...(19): siRNA sense strand
ggugaaguccuccagauuc

SEQ ID NO: 2175522 - RNA, 19 nt, Homo sapiens
  misc_RNA (1)...(19): siRNA sense strand
caagcucuguggucuuugu

SEQ ID NO: 2175523 - RNA, 19 nt, Homo sapiens
  misc_RNA (1)...(19): siRNA sense strand
ggcuaccucuugaaaguga

SEQ ID NO: 2175524 - RNA, 19 nt, Homo sapiens
  misc_RNA (1)...(19): siRNA sense strand
gcagugcauucccaucagu

SEQ ID NO: 2175525 - RNA, 19 nt, Homo sapiens
  misc_RNA (1)...(19): siRNA sense strand
gcaucaagccaguccuuug

SEQ ID NO: 2175526 - RNA, 19 nt, Homo sapiens
  misc_RNA (1)...(19): siRNA sense strand
ugacaacuggaaugaaauu

SEQ ID NO: 2175527 - RNA, 19 nt, Homo sapiens
  misc_RNA (1)...(19): siRNA sense strand
ggaugacuuugcugaaucu

SEQ ID NO: 2175528 - RNA, 19 nt, Homo sapiens
  misc_RNA (1)...(19): siRNA sense strand
ggauggcuaccucuugaaa

SEQ ID NO: 2175529 - RNA, 19 nt, Homo sapiens
  misc_RNA (1)...(19): siRNA sense strand
ugaaggaaauaccuauaac

SEQ ID NO: 2175530 - RNA, 19 nt, Homo sapiens
  misc_RNA (1)...(19): siRNA sense strand
ggacauaaacgugaugacu

SEQ ID NO: 2175531 - RNA, 19 nt, Homo sapiens
  misc_RNA (1)...(19): siRNA sense strand
gauccucauuucuguacga

SEQ ID NO: 2175532 - RNA, 19 nt, Homo sapiens
  misc_RNA (1)...(19): siRNA sense strand
gugcagccacccaguguaa

SEQ ID NO: 2175533 - RNA, 19 nt, Homo sapiens
  misc_RNA (1)...(19): siRNA sense strand
gaagcaaauguaccaagug

SEQ ID NO: 2175534 - RNA, 19 nt, Homo sapiens
  misc_RNA (1)...(19): siRNA sense strand
guggaugacuuugcugaau

SEQ ID NO: 2175535 - RNA, 19 nt, Homo sapiens
  misc_RNA (1)...(19): siRNA sense strand
cccagaagacaucaaagua

SEQ ID NO: 2175536 - RNA, 19 nt, Homo sapiens
  misc_RNA (1)...(19): siRNA sense strand
gauaacugcacagcuugua

SEQ ID NO: 2175537 - RNA, 19 nt, Homo sapiens
  misc_RNA (1)...(19): siRNA sense strand
gcgcuguguuguucauugu

SEQ ID NO: 2175538 - RNA, 19 nt, Homo sapiens
  misc_RNA (1)...(19): siRNA sense strand
aaagcagguuuggaaauau

SEQ ID NO: 2175539 - RNA, 19 nt, Homo sapiens
  misc_RNA (1)...(19): siRNA sense strand
ccagcaccuuagucacaua

SEQ ID NO: 2175540 - RNA, 19 nt, Homo sapiens
  misc_RNA (1)...(19): siRNA sense strand
gggcaaaauucucaacaga

SEQ ID NO: 2175541 - RNA, 19 nt, Homo sapiens
  misc_RNA (1)...(19): siRNA sense strand
gguccucuaucaauuguac

SEQ ID NO: 2175542 - RNA, 19 nt, Homo sapiens
  misc_RNA (1)...(19): siRNA sense strand
cagggacucuacugugguu

SEQ ID NO: 2175543 - RNA, 19 nt, Homo sapiens
  misc_RNA (1)...(19): siRNA sense strand
uguccuauuugcacugaaa

SEQ ID NO: 2175544 - RNA, 19 nt, Homo sapiens
  misc_RNA (1)...(19): siRNA sense strand
ccaaugaguucugcaacag

SEQ ID NO: 2175545 - RNA, 19 nt, Homo sapiens
  misc_RNA (1)...(19): siRNA sense strand
caauggacauaaacgugau

SEQ ID NO: 2175546 - RNA, 19 nt, Homo sapiens
  misc_RNA (1)...(19): siRNA sense strand
cuggauggcuaccucuuga

SEQ ID NO: 2175547 - RNA, 19 nt, Homo sapiens
  misc_RNA (1)...(19): siRNA sense strand
ugugaacagugcaaagguu

SEQ ID NO: 2175548 - RNA, 19 nt, Homo sapiens
  misc_RNA (1)...(19): siRNA sense strand
gcauggugcuguguacgau

SEQ ID NO: 2175549 - RNA, 19 nt, Homo sapiens
  misc_RNA (1)...(19): siRNA sense strand
ggaauuucagccagaagga

SEQ ID NO: 2175550 - RNA, 19 nt, Homo sapiens
  misc_RNA (1)...(19): siRNA sense strand
caucaagccaguccuuugu

SEQ ID NO: 2175551 - RNA, 19 nt, Homo sapiens
  misc_RNA (1)...(19): siRNA sense strand
gggagccucagcagaauug

SEQ ID NO: 2175552 - RNA, 19 nt, Homo sapiens
  misc_RNA (1)...(19): siRNA sense strand
gcaauaagcagugcauucc

SEQ ID NO: 2175553 - RNA, 19 nt, Homo sapiens
  misc_RNA (1)...(19): siRNA sense strand
agacaucaaaguaugcaaa

SEQ ID NO: 2175554 - RNA, 19 nt, Homo sapiens
  misc_RNA (1)...(19): siRNA sense strand
gaauuucagccagaaggaa

SEQ ID NO: 2175555 - RNA, 19 nt, Homo sapiens
  misc_RNA (1)...(19): siRNA sense strand
ugaauguccaguccauaaa

SEQ ID NO: 2175556 - RNA, 19 nt, Homo sapiens
  misc_RNA (1)...(19): siRNA sense strand
ugguggagauggaaacuuc

SEQ ID NO: 2175557 - RNA, 19 nt, Homo sapiens
  misc_RNA (1)...(19): siRNA sense strand
uuugggagcugccucuuuc

SEQ ID NO: 2175558 - RNA, 19 nt, Homo sapiens
  misc_RNA (1)...(19): siRNA sense strand
uaucaauuguaccaucugu

SEQ ID NO: 2175559 - RNA, 19 nt, Homo sapiens
  misc_RNA (1)...(19): siRNA sense strand
ccacuguccagcaaacuug

SEQ ID NO: 2175560 - RNA, 19 nt, Homo sapiens
  misc_RNA (1)...(19): siRNA sense strand
gagagagggcaucaaaguc

SEQ ID NO: 2175561 - RNA, 19 nt, Homo sapiens
  misc_RNA (1)...(19): siRNA sense strand
agagagagggcaucaaagu

SEQ ID NO: 2175562 - RNA, 19 nt, Homo sapiens
  misc_RNA (1)...(19): siRNA sense strand
uaaugugugucugcuugaa

SEQ ID NO: 2175563 - RNA, 19 nt, Homo sapiens
  misc_RNA (1)...(19): siRNA sense strand
gaagugauguuuaugacaa

SEQ ID NO: 2175564 - RNA, 19 nt, Homo sapiens
  misc_RNA (1)...(19): siRNA sense strand
ggaaauaucuugggaugga

SEQ ID NO: 2175565 - RNA, 19 nt, Homo sapiens
  misc_RNA (1)...(19): siRNA sense strand
caacuacaauggacauaaa

SEQ ID NO: 2175566 - RNA, 19 nt, Homo sapiens
  misc_RNA (1)...(19): siRNA sense strand
acauaaacgugaugacuua

SEQ ID NO: 2175567 - RNA, 19 nt, Homo sapiens
  misc_RNA (1)...(19): siRNA sense strand
acaaggaagugacauguaa

SEQ ID NO: 2175568 - RNA, 19 nt, Homo sapiens
  misc_RNA (1)...(19): siRNA sense strand
uauaacagcuccuucaaau

SEQ ID NO: 2175569 - RNA, 19 nt, Homo sapiens
  misc_RNA (1)...(19): siRNA sense strand
agacaacccuugcauaaug

SEQ ID NO: 2175570 - RNA, 19 nt, Homo sapiens
  misc_RNA (1)...(19): siRNA sense strand
caacagaccucagagaaag

SEQ ID NO: 2175571 - RNA, 19 nt, Homo sapiens
  misc_RNA (1)...(19): siRNA sense strand
ccucauuucuguacgauaa

SEQ ID NO: 2175572 - RNA, 19 nt, Homo sapiens
  misc_RNA (1)...(19): siRNA sense strand
ggaagcaaauguaccaagu

SEQ ID NO: 2175573 - RNA, 19 nt, Homo sapiens
  misc_RNA (1)...(19): siRNA sense strand
caucugugcuugugugaaa

SEQ ID NO: 2175574 - RNA, 19 nt, Homo sapiens
  misc_RNA (1)...(19): siRNA sense strand
gcaaauguaccaaguguuc

SEQ ID NO: 2175575 - RNA, 19 nt, Homo sapiens
  misc_RNA (1)...(19): siRNA sense strand
gagaugugguccucuauca

SEQ ID NO: 2175576 - RNA, 19 nt, Homo sapiens
  misc_RNA (1)...(19): siRNA sense strand
cagaagacaucaaaguaug

SEQ ID NO: 2175577 - RNA, 19 nt, Homo sapiens
  misc_RNA (1)...(19): siRNA sense strand
gcucaaauccugggaguuu

SEQ ID NO: 2175578 - RNA, 19 nt, Homo sapiens
  misc_RNA (1)...(19): siRNA sense strand
gcaacagaccucagagaaa

SEQ ID NO: 2175579 - RNA, 19 nt, Homo sapiens
  misc_RNA (1)...(19): siRNA sense strand
ggucggacauuuaacuuuc

SEQ ID NO: 2175580 - RNA, 19 nt, Homo sapiens
  misc_RNA (1)...(19): siRNA sense strand
ggaagugacauguaagaga

SEQ ID NO: 2175581 - RNA, 19 nt, Homo sapiens
  misc_RNA (1)...(19): siRNA sense strand
ggcaagcucuguggucuuu

SEQ ID NO: 2175582 - RNA, 19 nt, Homo sapiens
  misc_RNA (1)...(19): siRNA sense strand
uaacagcuccuucaaaugg

SEQ ID NO: 2175583 - RNA, 19 nt, Homo sapiens
  misc_RNA (1)...(19): siRNA sense strand
ggacggagugucgcaauaa

SEQ ID NO: 2175584 - RNA, 19 nt, Homo sapiens
  misc_RNA (1)...(19): siRNA sense strand
ugacagacaugugugaaug

SEQ ID NO: 2175585 - RNA, 19 nt, Homo sapiens
  misc_RNA (1)...(19): siRNA sense strand
ugugacaacuggaaugaaa

SEQ ID NO: 2175586 - RNA, 19 nt, Homo sapiens
  misc_RNA (1)...(19): siRNA sense strand
gaaauugguccaugcaaca

SEQ ID NO: 2175587 - RNA, 19 nt, Homo sapiens
  misc_RNA (1)...(19): siRNA sense strand
gaacaaggaagugacaugu

SEQ ID NO: 2175588 - RNA, 19 nt, Homo sapiens
  misc_RNA (1)...(19): siRNA sense strand
agagaagucugucccauuc

SEQ ID NO: 2175589 - RNA, 19 nt, Homo sapiens
  misc_RNA (1)...(19): siRNA sense strand
gcuguguuguucauuguaa

SEQ ID NO: 2175590 - RNA, 19 nt, Homo sapiens
  misc_RNA (1)...(19): siRNA sense strand
caacuggaaugaaauuggu

SEQ ID NO: 2175591 - RNA, 19 nt, Homo sapiens
  misc_RNA (1)...(19): siRNA sense strand
gaaagugaccaccaaagca

SEQ ID NO: 2175592 - RNA, 19 nt, Homo sapiens
  misc_RNA (1)...(19): siRNA sense strand
acagacaacccuugcauaa

SEQ ID NO: 2175593 - RNA, 19 nt, Homo sapiens
  misc_RNA (1)...(19): siRNA sense strand
ccagagagagggcaucaaa

SEQ ID NO: 2175594 - RNA, 19 nt, Homo sapiens
  misc_RNA (1)...(19): siRNA sense strand
gagagaagucugucccauu

SEQ ID NO: 2175595 - RNA, 19 nt, Homo sapiens
  misc_RNA (1)...(19): siRNA sense strand
gaaggaaauaccuauaaca

SEQ ID NO: 2175596 - RNA, 19 nt, Homo sapiens
  misc_RNA (1)...(19): siRNA sense strand
gaaggaagcaaauguacca

SEQ ID NO: 2175597 - RNA, 19 nt, Homo sapiens
  misc_RNA (1)...(19): siRNA sense strand
ggaggaauuucagccagaa

SEQ ID NO: 2175598 - RNA, 19 nt, Homo sapiens
  misc_RNA (1)...(19): siRNA sense strand
ccagaaggaagcaaaugua

SEQ ID NO: 2175599 - RNA, 19 nt, Homo sapiens
  misc_RNA (1)...(19): siRNA sense strand
gguccgggauguaucaaga

SEQ ID NO: 2175600 - RNA, 19 nt, Homo sapiens
  misc_RNA (1)...(19): siRNA sense strand
caggagggcuguugugaag

SEQ ID NO: 2175601 - RNA, 19 nt, Homo sapiens
  misc_RNA (1)...(19): siRNA sense strand
gcaacuacaauggacauaa

SEQ ID NO: 2175602 - RNA, 19 nt, Homo sapiens
  misc_RNA (1)...(19): siRNA sense strand
gugaauguccaguccauaa

SEQ ID NO: 2175603 - RNA, 19 nt, Homo sapiens
  misc_RNA (1)...(19): siRNA sense strand
ggacuacgccacuuucuac

SEQ ID NO: 2175604 - RNA, 19 nt, Homo sapiens
  misc_RNA (1)...(19): siRNA sense strand
ccagaagacaucaaaguau

SEQ ID NO: 2175605 - RNA, 19 nt, Homo sapiens
  misc_RNA (1)...(19): siRNA sense strand
caaacuugguccuucacaa

SEQ ID NO: 2175606 - RNA, 19 nt, Homo sapiens
  misc_RNA (1)...(19): siRNA sense strand
ggacagugcugccccaaau

SEQ ID NO: 2175607 - RNA, 19 nt, Homo sapiens
  misc_RNA (1)...(19): siRNA sense strand
cagcaaacuugguccuuca

SEQ ID NO: 2175608 - RNA, 19 nt, Homo sapiens
  misc_RNA (1)...(19): siRNA sense strand
caagggacagucaagguaa

SEQ ID NO: 2175609 - RNA, 19 nt, Homo sapiens
  misc_RNA (1)...(19): siRNA sense strand
gaaagccagugccugaacu

SEQ ID NO: 2175610 - RNA, 19 nt, Homo sapiens
  misc_RNA (1)...(19): siRNA sense strand
caaauuuggcaacaagauu

SEQ ID NO: 2175611 - RNA, 19 nt, Homo sapiens
  misc_RNA (1)...(19): siRNA sense strand
ggagggcuguugugaagag

SEQ ID NO: 2175612 - RNA, 19 nt, Homo sapiens
  misc_RNA (1)...(19): siRNA sense strand
gacaacccuugcauaaugu

SEQ ID NO: 2175613 - RNA, 19 nt, Homo sapiens
  misc_RNA (1)...(19): siRNA sense strand
ugacuuaauugguggagau

SEQ ID NO: 2175614 - RNA, 19 nt, Homo sapiens
  misc_RNA (1)...(19): siRNA sense strand
uacgauaacugcacagcuu

SEQ ID NO: 2175615 - RNA, 19 nt, Homo sapiens
  misc_RNA (1)...(19): siRNA sense strand
aagcaaauguaccaagugu

SEQ ID NO: 2175616 - RNA, 19 nt, Homo sapiens
  misc_RNA (1)...(19): siRNA sense strand
aaacuguuauugcgaguca

SEQ ID NO: 2175617 - RNA, 19 nt, Homo sapiens
  misc_RNA (1)...(19): siRNA sense strand
gacauaaacgugaugacuu

SEQ ID NO: 2175618 - RNA, 19 nt, Homo sapiens
  misc_RNA (1)...(19): siRNA sense strand
gaugugguccucuaucaau

SEQ ID NO: 2175619 - RNA, 19 nt, Homo sapiens
  misc_RNA (1)...(19): siRNA sense strand
ucaagggacagucaaggua

SEQ ID NO: 2175620 - RNA, 19 nt, Homo sapiens
  misc_RNA (1)...(19): siRNA sense strand
gcaaauuuggcaacaagau

SEQ ID NO: 2175621 - RNA, 19 nt, Homo sapiens
  misc_RNA (1)...(19): siRNA sense strand
ggugaaguccuccagauuc

SEQ ID NO: 2175622 - RNA, 19 nt, Homo sapiens
  misc_RNA (1)...(19): siRNA sense strand
caagcucuguggucuuugu

SEQ ID NO: 2175623 - RNA, 19 nt, Homo sapiens
  misc_RNA (1)...(19): siRNA sense strand
ggcuaccucuugaaaguga

SEQ ID NO: 2175624 - RNA, 19 nt, Homo sapiens
  misc_RNA (1)...(19): siRNA sense strand
gcagugcauucccaucagu

SEQ ID NO: 2175625 - RNA, 19 nt, Homo sapiens
  misc_RNA (1)...(19): siRNA sense strand
gcaucaagccaguccuuug

SEQ ID NO: 2175626 - RNA, 19 nt, Homo sapiens
  misc_RNA (1)...(19): siRNA sense strand
ugacaacuggaaugaaauu

SEQ ID NO: 2175627 - RNA, 19 nt, Homo sapiens
  misc_RNA (1)...(19): siRNA sense strand
ggaugacuuugcugaaucu

SEQ ID NO: 2175628 - RNA, 19 nt, Homo sapiens
  misc_RNA (1)...(19): siRNA sense strand
ggauggcuaccucuugaaa

SEQ ID NO: 2175629 - RNA, 19 nt, Homo sapiens
  misc_RNA (1)...(19): siRNA sense strand
ugaaggaaauaccuauaac

SEQ ID NO: 2175630 - RNA, 19 nt, Homo sapiens
  misc_RNA (1)...(19): siRNA sense strand
ggacauaaacgugaugacu

SEQ ID NO: 2175631 - RNA, 19 nt, Homo sapiens
  misc_RNA (1)...(19): siRNA sense strand
gauccucauuucuguacga

SEQ ID NO: 2175632 - RNA, 19 nt, Homo sapiens
  misc_RNA (1)...(19): siRNA sense strand
gugcagccacccaguguaa

SEQ ID NO: 2175633 - RNA, 19 nt, Homo sapiens
  misc_RNA (1)...(19): siRNA sense strand
gaagcaaauguaccaagug

SEQ ID NO: 2175634 - RNA, 19 nt, Homo sapiens
  misc_RNA (1)...(19): siRNA sense strand
guggaugacuuugcugaau

SEQ ID NO: 2175635 - RNA, 19 nt, Homo sapiens
  misc_RNA (1)...(19): siRNA sense strand
cccagaagacaucaaagua

SEQ ID NO: 2175636 - RNA, 19 nt, Homo sapiens
  misc_RNA (1)...(19): siRNA sense strand
gauaacugcacagcuugua

SEQ ID NO: 2175637 - RNA, 19 nt, Homo sapiens
  misc_RNA (1)...(19): siRNA sense strand
gcgcuguguuguucauugu

SEQ ID NO: 2175638 - RNA, 19 nt, Homo sapiens
  misc_RNA (1)...(19): siRNA sense strand
aaagcagguuuggaaauau

SEQ ID NO: 2175639 - RNA, 19 nt, Homo sapiens
  misc_RNA (1)...(19): siRNA sense strand
ccagcaccuuagucacaua

SEQ ID NO: 2175640 - RNA, 19 nt, Homo sapiens
  misc_RNA (1)...(19): siRNA sense strand
gggcaaaauucucaacaga

SEQ ID NO: 2175641 - RNA, 19 nt, Homo sapiens
  misc_RNA (1)...(19): siRNA sense strand
gguccucuaucaauuguac

SEQ ID NO: 2175642 - RNA, 19 nt, Homo sapiens
  misc_RNA (1)...(19): siRNA sense strand
cagggacucuacugugguu

SEQ ID NO: 2175643 - RNA, 19 nt, Homo sapiens
  misc_RNA (1)...(19): siRNA sense strand
uguccuauuugcacugaaa

SEQ ID NO: 2175644 - RNA, 19 nt, Homo sapiens
  misc_RNA (1)...(19): siRNA sense strand
ccaaugaguucugcaacag

SEQ ID NO: 2175645 - RNA, 19 nt, Homo sapiens
  misc_RNA (1)...(19): siRNA sense strand
caauggacauaaacgugau

SEQ ID NO: 2175646 - RNA, 19 nt, Homo sapiens
  misc_RNA (1)...(19): siRNA sense strand
cuggauggcuaccucuuga

SEQ ID NO: 2175647 - RNA, 19 nt, Homo sapiens
  misc_RNA (1)...(19): siRNA sense strand
ugugaacagugcaaagguu

SEQ ID NO: 2175648 - RNA, 19 nt, Homo sapiens
  misc_RNA (1)...(19): siRNA sense strand
gcauggugcuguguacgau

SEQ ID NO: 2175649 - RNA, 19 nt, Homo sapiens
  misc_RNA (1)...(19): siRNA sense strand
ggaauuucagccagaagga

SEQ ID NO: 2175650 - RNA, 19 nt, Homo sapiens
  misc_RNA (1)...(19): siRNA sense strand
caucaagccaguccuuugu

SEQ ID NO: 2175651 - RNA, 19 nt, Homo sapiens
  misc_RNA (1)...(19): siRNA sense strand
gggagccucagcagaauug

SEQ ID NO: 2175652 - RNA, 19 nt, Homo sapiens
  misc_RNA (1)...(19): siRNA sense strand
gcaauaagcagugcauucc

SEQ ID NO: 2175653 - RNA, 19 nt, Homo sapiens
  misc_RNA (1)...(19): siRNA sense strand
agacaucaaaguaugcaaa

SEQ ID NO: 2175654 - RNA, 19 nt, Homo sapiens
  misc_RNA (1)...(19): siRNA sense strand
gaauuucagccagaaggaa

SEQ ID NO: 2175655 - RNA, 19 nt, Homo sapiens
  misc_RNA (1)...(19): siRNA sense strand
ugaauguccaguccauaaa

SEQ ID NO: 2175656 - RNA, 19 nt, Homo sapiens
  misc_RNA (1)...(19): siRNA sense strand
ugguggagauggaaacuuc

SEQ ID NO: 2175657 - RNA, 19 nt, Homo sapiens
  misc_RNA (1)...(19): siRNA sense strand
uuugggagcugccucuuuc

SEQ ID NO: 2175658 - RNA, 19 nt, Homo sapiens
  misc_RNA (1)...(19): siRNA sense strand
uaucaauuguaccaucugu

SEQ ID NO: 2175659 - RNA, 19 nt, Homo sapiens
  misc_RNA (1)...(19): siRNA sense strand
ccacuguccagcaaacuug

SEQ ID NO: 2175660 - RNA, 19 nt, Homo sapiens
  misc_RNA (1)...(19): siRNA sense strand
gagagagggcaucaaaguc

SEQ ID NO: 2175661 - RNA, 19 nt, Homo sapiens
  misc_RNA (1)...(19): siRNA sense strand
agagagagggcaucaaagu

SEQ ID NO: 2175662 - RNA, 19 nt, Homo sapiens
  misc_RNA (1)...(19): siRNA sense strand
uaaugugugucugcuugaa

SEQ ID NO: 2175663 - RNA, 19 nt, Homo sapiens
  misc_RNA (1)...(19): siRNA sense strand
gaagugauguuuaugacaa

SEQ ID NO: 2175664 - RNA, 19 nt, Homo sapiens
  misc_RNA (1)...(19): siRNA sense strand
ggaaauaucuugggaugga

SEQ ID NO: 2175665 - RNA, 19 nt, Homo sapiens
  misc_RNA (1)...(19): siRNA sense strand
caacuacaauggacauaaa

SEQ ID NO: 2175666 - RNA, 19 nt, Homo sapiens
  misc_RNA (1)...(19): siRNA sense strand
acauaaacgugaugacuua

SEQ ID NO: 2175667 - RNA, 19 nt, Homo sapiens
  misc_RNA (1)...(19): siRNA sense strand
acaaggaagugacauguaa

SEQ ID NO: 2175668 - RNA, 19 nt, Homo sapiens
  misc_RNA (1)...(19): siRNA sense strand
uauaacagcuccuucaaau

SEQ ID NO: 2175669 - RNA, 19 nt, Homo sapiens
  misc_RNA (1)...(19): siRNA sense strand
agacaacccuugcauaaug

SEQ ID NO: 2175670 - RNA, 19 nt, Homo sapiens
  misc_RNA (1)...(19): siRNA sense strand
caacagaccucagagaaag

SEQ ID NO: 2175671 - RNA, 19 nt, Homo sapiens
  misc_RNA (1)...(19): siRNA sense strand
ccucauuucuguacgauaa

SEQ ID NO: 2175672 - RNA, 19 nt, Homo sapiens
  misc_RNA (1)...(19): siRNA sense strand
ggaagcaaauguaccaagu

SEQ ID NO: 2175673 - RNA, 19 nt, Homo sapiens
  misc_RNA (1)...(19): siRNA sense strand
caucugugcuugugugaaa

SEQ ID NO: 2175674 - RNA, 19 nt, Homo sapiens
  misc_RNA (1)...(19): siRNA sense strand
gcaaauguaccaaguguuc

SEQ ID NO: 2175675 - RNA, 19 nt, Homo sapiens
  misc_RNA (1)...(19): siRNA sense strand
gagaugugguccucuauca

SEQ ID NO: 2175676 - RNA, 19 nt, Homo sapiens
  misc_RNA (1)...(19): siRNA sense strand
cagaagacaucaaaguaug

SEQ ID NO: 2175677 - RNA, 19 nt, Homo sapiens
  misc_RNA (1)...(19): siRNA sense strand
gcucaaauccugggaguuu

SEQ ID NO: 2175678 - RNA, 19 nt, Homo sapiens
  misc_RNA (1)...(19): siRNA sense strand
gcaacagaccucagagaaa

SEQ ID NO: 2175679 - RNA, 19 nt, Homo sapiens
  misc_RNA (1)...(19): siRNA sense strand
ggucggacauuuaacuuuc

SEQ ID NO: 2175680 - RNA, 19 nt, Homo sapiens
  misc_RNA (1)...(19): siRNA sense strand
ggaagugacauguaagaga

SEQ ID NO: 2175681 - RNA, 19 nt, Homo sapiens
  misc_RNA (1)...(19): siRNA sense strand
ggcaagcucuguggucuuu

SEQ ID NO: 2175682 - RNA, 19 nt, Homo sapiens
  misc_RNA (1)...(19): siRNA sense strand
uaacagcuccuucaaaugg

SEQ ID NO: 2175683 - RNA, 19 nt, Homo sapiens
  misc_RNA (1)...(19): siRNA sense strand
ggacggagugucgcaauaa

SEQ ID NO: 2175684 - RNA, 19 nt, Homo sapiens
  misc_RNA (1)...(19): siRNA sense strand
ugacagacaugugugaaug

SEQ ID NO: 2175685 - RNA, 19 nt, Homo sapiens
  misc_RNA (1)...(19): siRNA sense strand
ugugacaacuggaaugaaa

SEQ ID NO: 2175686 - RNA, 19 nt, Homo sapiens
  misc_RNA (1)...(19): siRNA sense strand
gaaauugguccaugcaaca

SEQ ID NO: 2175687 - RNA, 19 nt, Homo sapiens
  misc_RNA (1)...(19): siRNA sense strand
gaacaaggaagugacaugu

SEQ ID NO: 2175688 - RNA, 19 nt, Homo sapiens
  misc_RNA (1)...(19): siRNA sense strand
agagaagucugucccauuc

SEQ ID NO: 2175689 - RNA, 19 nt, Homo sapiens
  misc_RNA (1)...(19): siRNA sense strand
gcuguguuguucauuguaa

SEQ ID NO: 2175690 - RNA, 19 nt, Homo sapiens
  misc_RNA (1)...(19): siRNA sense strand
caacuggaaugaaauuggu

SEQ ID NO: 2175691 - RNA, 19 nt, Homo sapiens
  misc_RNA (1)...(19): siRNA sense strand
gaaagugaccaccaaagca

SEQ ID NO: 2175692 - RNA, 19 nt, Homo sapiens
  misc_RNA (1)...(19): siRNA sense strand
acagacaacccuugcauaa

SEQ ID NO: 2175693 - RNA, 19 nt, Homo sapiens
  misc_RNA (1)...(19): siRNA sense strand
ccagagagagggcaucaaa

SEQ ID NO: 2175694 - RNA, 19 nt, Homo sapiens
  misc_RNA (1)...(19): siRNA sense strand
gagagaagucugucccauu

SEQ ID NO: 2175695 - RNA, 19 nt, Homo sapiens
  misc_RNA (1)...(19): siRNA sense strand
gaaggaaauaccuauaaca

SEQ ID NO: 2175696 - RNA, 19 nt, Homo sapiens
  misc_RNA (1)...(19): siRNA sense strand
gaaggaagcaaauguacca

SEQ ID NO: 2175697 - RNA, 19 nt, Homo sapiens
  misc_RNA (1)...(19): siRNA sense strand
ggaggaauuucagccagaa

SEQ ID NO: 2175698 - RNA, 19 nt, Homo sapiens
  misc_RNA (1)...(19): siRNA sense strand
ccagaaggaagcaaaugua

SEQ ID NO: 2175699 - RNA, 19 nt, Homo sapiens
  misc_RNA (1)...(19): siRNA sense strand
gguccgggauguaucaaga

SEQ ID NO: 2175700 - RNA, 19 nt, Homo sapiens
  misc_RNA (1)...(19): siRNA sense strand
caggagggcuguugugaag

SEQ ID NO: 2175701 - RNA, 19 nt, Homo sapiens
  misc_RNA (1)...(19): siRNA sense strand
gcaacuacaauggacauaa

SEQ ID NO: 2175702 - RNA, 19 nt, Homo sapiens
  misc_RNA (1)...(19): siRNA sense strand
gugaauguccaguccauaa

SEQ ID NO: 2175703 - RNA, 19 nt, Homo sapiens
  misc_RNA (1)...(19): siRNA sense strand
ggacuacgccacuuucuac

SEQ ID NO: 2175704 - RNA, 19 nt, Homo sapiens
  misc_RNA (1)...(19): siRNA sense strand
ccagaagacaucaaaguau

SEQ ID NO: 2175705 - RNA, 19 nt, Homo sapiens
  misc_RNA (1)...(19): siRNA sense strand
caaacuugguccuucacaa

SEQ ID NO: 2175706 - RNA, 19 nt, Homo sapiens
  misc_RNA (1)...(19): siRNA sense strand
ggacagugcugccccaaau

SEQ ID NO: 2175707 - RNA, 19 nt, Homo sapiens
  misc_RNA (1)...(19): siRNA sense strand
cagcaaacuugguccuuca

SEQ ID NO: 2175708 - RNA, 19 nt, Homo sapiens
  misc_RNA (1)...(19): siRNA sense strand
caagggacagucaagguaa

SEQ ID NO: 2175709 - RNA, 19 nt, Homo sapiens
  misc_RNA (1)...(19): siRNA sense strand
gaaagccagugccugaacu

SEQ ID NO: 2175710 - RNA, 19 nt, Homo sapiens
  misc_RNA (1)...(19): siRNA sense strand
caaauuuggcaacaagauu

SEQ ID NO: 2175711 - RNA, 19 nt, Homo sapiens
  misc_RNA (1)...(19): siRNA sense strand
ggagggcuguugugaagag

SEQ ID NO: 2175712 - RNA, 19 nt, Homo sapiens
  misc_RNA (1)...(19): siRNA sense strand
gacaacccuugcauaaugu

SEQ ID NO: 2175713 - RNA, 19 nt, Homo sapiens
  misc_RNA (1)...(19): siRNA sense strand
ugacuuaauugguggagau

SEQ ID NO: 2175714 - RNA, 19 nt, Homo sapiens
  misc_RNA (1)...(19): siRNA sense strand
uacgauaacugcacagcuu

SEQ ID NO: 2175715 - RNA, 19 nt, Homo sapiens
  misc_RNA (1)...(19): siRNA sense strand
aagcaaauguaccaagugu

SEQ ID NO: 2175716 - RNA, 19 nt, Homo sapiens
  misc_RNA (1)...(19): siRNA sense strand
aaacuguuauugcgaguca

SEQ ID NO: 2175717 - RNA, 19 nt, Homo sapiens
  misc_RNA (1)...(19): siRNA sense strand
gacauaaacgugaugacuu

SEQ ID NO: 2175718 - RNA, 19 nt, Homo sapiens
  misc_RNA (1)...(19): siRNA sense strand
gaugugguccucuaucaau

SEQ ID NO: 2175719 - RNA, 19 nt, Homo sapiens
  misc_RNA (1)...(19): siRNA sense strand
ucaagggacagucaaggua

SEQ ID NO: 2175720 - RNA, 19 nt, Homo sapiens
  misc_RNA (1)...(19): siRNA sense strand
gcaaauuuggcaacaagau

SEQ ID NO: 2175721 - RNA, 19 nt, Homo sapiens
  misc_RNA (1)...(19): siRNA sense strand
ggugaaguccuccagauuc

SEQ ID NO: 2175722 - RNA, 19 nt, Homo sapiens
  misc_RNA (1)...(19): siRNA sense strand
caagcucuguggucuuugu

SEQ ID NO: 2175723 - RNA, 19 nt, Homo sapiens
  misc_RNA (1)...(19): siRNA sense strand
ggcuaccucuugaaaguga

SEQ ID NO: 2175724 - RNA, 19 nt, Homo sapiens
  misc_RNA (1)...(19): siRNA sense strand
gcagugcauucccaucagu

SEQ ID NO: 2175725 - RNA, 19 nt, Homo sapiens
  misc_RNA (1)...(19): siRNA sense strand
gcaucaagccaguccuuug

SEQ ID NO: 2175726 - RNA, 19 nt, Homo sapiens
  misc_RNA (1)...(19): siRNA sense strand
ugacaacuggaaugaaauu

SEQ ID NO: 2175727 - RNA, 19 nt, Homo sapiens
  misc_RNA (1)...(19): siRNA sense strand
ggaugacuuugcugaaucu

SEQ ID NO: 2175728 - RNA, 19 nt, Homo sapiens
  misc_RNA (1)...(19): siRNA sense strand
ggauggcuaccucuugaaa

SEQ ID NO: 2175729 - RNA, 19 nt, Homo sapiens
  misc_RNA (1)...(19): siRNA sense strand
ugaaggaaauaccuauaac

SEQ ID NO: 2175730 - RNA, 19 nt, Homo sapiens
  misc_RNA (1)...(19): siRNA sense strand
ggacauaaacgugaugacu

SEQ ID NO: 2175731 - RNA, 19 nt, Homo sapiens
  misc_RNA (1)...(19): siRNA sense strand
gauccucauuucuguacga

SEQ ID NO: 2175732 - RNA, 19 nt, Homo sapiens
  misc_RNA (1)...(19): siRNA sense strand
gugcagccacccaguguaa

SEQ ID NO: 2175733 - RNA, 19 nt, Homo sapiens
  misc_RNA (1)...(19): siRNA sense strand
gaagcaaauguaccaagug

SEQ ID NO: 2175734 - RNA, 19 nt, Homo sapiens
  misc_RNA (1)...(19): siRNA sense strand
guggaugacuuugcugaau

SEQ ID NO: 2175735 - RNA, 19 nt, Homo sapiens
  misc_RNA (1)...(19): siRNA sense strand
cccagaagacaucaaagua

SEQ ID NO: 2175736 - RNA, 19 nt, Homo sapiens
  misc_RNA (1)...(19): siRNA sense strand
gauaacugcacagcuugua

SEQ ID NO: 2175737 - RNA, 19 nt, Homo sapiens
  misc_RNA (1)...(19): siRNA sense strand
gcgcuguguuguucauugu

SEQ ID NO: 2175738 - RNA, 19 nt, Homo sapiens
  misc_RNA (1)...(19): siRNA sense strand
aaagcagguuuggaaauau

SEQ ID NO: 2175739 - RNA, 19 nt, Homo sapiens
  misc_RNA (1)...(19): siRNA sense strand
ccagcaccuuagucacaua

SEQ ID NO: 2175740 - RNA, 19 nt, Homo sapiens
  misc_RNA (1)...(19): siRNA sense strand
gggcaaaauucucaacaga

SEQ ID NO: 2175741 - RNA, 19 nt, Homo sapiens
  misc_RNA (1)...(19): siRNA sense strand
gguccucuaucaauuguac

SEQ ID NO: 2175742 - RNA, 19 nt, Homo sapiens
  misc_RNA (1)...(19): siRNA sense strand
cagggacucuacugugguu

SEQ ID NO: 2175743 - RNA, 19 nt, Homo sapiens
  misc_RNA (1)...(19): siRNA sense strand
uguccuauuugcacugaaa

SEQ ID NO: 2175744 - RNA, 19 nt, Homo sapiens
  misc_RNA (1)...(19): siRNA sense strand
ccaaugaguucugcaacag

SEQ ID NO: 2175745 - RNA, 19 nt, Homo sapiens
  misc_RNA (1)...(19): siRNA sense strand
caauggacauaaacgugau

SEQ ID NO: 2175746 - RNA, 19 nt, Homo sapiens
  misc_RNA (1)...(19): siRNA sense strand
cuggauggcuaccucuuga

SEQ ID NO: 2175747 - RNA, 19 nt, Homo sapiens
  misc_RNA (1)...(19): siRNA sense strand
ugugaacagugcaaagguu

SEQ ID NO: 2175748 - RNA, 19 nt, Homo sapiens
  misc_RNA (1)...(19): siRNA sense strand
gcauggugcuguguacgau

SEQ ID NO: 2175749 - RNA, 19 nt, Homo sapiens
  misc_RNA (1)...(19): siRNA sense strand
ggaauuucagccagaagga

SEQ ID NO: 2175750 - RNA, 19 nt, Homo sapiens
  misc_RNA (1)...(19): siRNA sense strand
caucaagccaguccuuugu

SEQ ID NO: 2175751 - RNA, 19 nt, Homo sapiens
  misc_RNA (1)...(19): siRNA sense strand
gggagccucagcagaauug

SEQ ID NO: 2175752 - RNA, 19 nt, Homo sapiens
  misc_RNA (1)...(19): siRNA sense strand
gcaauaagcagugcauucc

SEQ ID NO: 2175753 - RNA, 19 nt, Homo sapiens
  misc_RNA (1)...(19): siRNA sense strand
agacaucaaaguaugcaaa

SEQ ID NO: 2175754 - RNA, 19 nt, Homo sapiens
  misc_RNA (1)...(19): siRNA sense strand
gaauuucagccagaaggaa

SEQ ID NO: 2175755 - RNA, 19 nt, Homo sapiens
  misc_RNA (1)...(19): siRNA sense strand
ugaauguccaguccauaaa

SEQ ID NO: 2175756 - RNA, 19 nt, Homo sapiens
  misc_RNA (1)...(19): siRNA sense strand
ugguggagauggaaacuuc

SEQ ID NO: 2175757 - RNA, 19 nt, Homo sapiens
  misc_RNA (1)...(19): siRNA sense strand
uuugggagcugccucuuuc

SEQ ID NO: 2175758 - RNA, 19 nt, Homo sapiens
  misc_RNA (1)...(19): siRNA sense strand
uaucaauuguaccaucugu

SEQ ID NO: 2175759 - RNA, 19 nt, Homo sapiens
  misc_RNA (1)...(19): siRNA sense strand
ccacuguccagcaaacuug

SEQ ID NO: 2175760 - RNA, 19 nt, Homo sapiens
  misc_RNA (1)...(19): siRNA sense strand
gagagagggcaucaaaguc

SEQ ID NO: 2175761 - RNA, 19 nt, Homo sapiens
  misc_RNA (1)...(19): siRNA sense strand
agagagagggcaucaaagu

SEQ ID NO: 2175762 - RNA, 19 nt, Homo sapiens
  misc_RNA (1)...(19): siRNA sense strand
uaaugugugucugcuugaa

SEQ ID NO: 2175763 - RNA, 19 nt, Homo sapiens
  misc_RNA (1)...(19): siRNA sense strand
gaagagucaugguguguaa

SEQ ID NO: 2175764 - RNA, 19 nt, Homo sapiens
  misc_RNA (1)...(19): siRNA sense strand
gaaagcagccgaagaagug

SEQ ID NO: 2175765 - RNA, 19 nt, Homo sapiens
  misc_RNA (1)...(19): siRNA sense strand
ccacugagauacacaaaga

SEQ ID NO: 2175766 - RNA, 19 nt, Homo sapiens
  misc_RNA (1)...(19): siRNA sense strand
gcaguuugcucaguuugua

SEQ ID NO: 2175767 - RNA, 19 nt, Homo sapiens
  misc_RNA (1)...(19): siRNA sense strand
gaguauggaugauuaugaa

SEQ ID NO: 2175768 - RNA, 19 nt, Homo sapiens
  misc_RNA (1)...(19): siRNA sense strand
ugaaagcugugaaggauug

SEQ ID NO: 2175769 - RNA, 19 nt, Homo sapiens
  misc_RNA (1)...(19): siRNA sense strand
gcaacuuacuaacaucaaa

SEQ ID NO: 2175770 - RNA, 19 nt, Homo sapiens
  misc_RNA (1)...(19): siRNA sense strand
gaguuugacuuuauggaaa

SEQ ID NO: 2175771 - RNA, 19 nt, Homo sapiens
  misc_RNA (1)...(19): siRNA sense strand
auaauggacuugauuggua

SEQ ID NO: 2175772 - RNA, 19 nt, Homo sapiens
  misc_RNA (1)...(19): siRNA sense strand
gcacuucggcccauuguga

SEQ ID NO: 2175773 - RNA, 19 nt, Homo sapiens
  misc_RNA (1)...(19): siRNA sense strand
ccaagaagaacuuauagaa

SEQ ID NO: 2175774 - RNA, 19 nt, Homo sapiens
  misc_RNA (1)...(19): siRNA sense strand
cgugaaagcuucucauauc

SEQ ID NO: 2175775 - RNA, 19 nt, Homo sapiens
  misc_RNA (1)...(19): siRNA sense strand
uuacucagauugcaucauu

SEQ ID NO: 2175776 - RNA, 19 nt, Homo sapiens
  misc_RNA (1)...(19): siRNA sense strand
cagauugcaucauuauuug

SEQ ID NO: 2175777 - RNA, 19 nt, Homo sapiens
  misc_RNA (1)...(19): siRNA sense strand
ggaaaacucccuuauguaa

SEQ ID NO: 2175778 - RNA, 19 nt, Homo sapiens
  misc_RNA (1)...(19): siRNA sense strand
gcaguaugccugaaauuug

SEQ ID NO: 2175779 - RNA, 19 nt, Homo sapiens
  misc_RNA (1)...(19): siRNA sense strand
cagcggaguuugacuuuau

SEQ ID NO: 2175780 - RNA, 19 nt, Homo sapiens
  misc_RNA (1)...(19): siRNA sense strand
gaccagggacuauauuauu

SEQ ID NO: 2175781 - RNA, 19 nt, Homo sapiens
  misc_RNA (1)...(19): siRNA sense strand
gaacuuauagaauggauca

SEQ ID NO: 2175782 - RNA, 19 nt, Homo sapiens
  misc_RNA (1)...(19): siRNA sense strand
caaacccaguggaauauug

SEQ ID NO: 2175783 - RNA, 19 nt, Homo sapiens
  misc_RNA (1)...(19): siRNA sense strand
gggacuauauuauuccuau

SEQ ID NO: 2175784 - RNA, 19 nt, Homo sapiens
  misc_RNA (1)...(19): siRNA sense strand
ggagcuggcugccuguaga

SEQ ID NO: 2175785 - RNA, 19 nt, Homo sapiens
  misc_RNA (1)...(19): siRNA sense strand
aauggaguauggaugauua

SEQ ID NO: 2175786 - RNA, 19 nt, Homo sapiens
  misc_RNA (1)...(19): siRNA sense strand
gaaagcuucucauauccau

SEQ ID NO: 2175787 - RNA, 19 nt, Homo sapiens
  misc_RNA (1)...(19): siRNA sense strand
gggagauccugcuugcuuu

SEQ ID NO: 2175788 - RNA, 19 nt, Homo sapiens
  misc_RNA (1)...(19): siRNA sense strand
gaagugaagcgagaacuga

SEQ ID NO: 2175789 - RNA, 19 nt, Homo sapiens
  misc_RNA (1)...(19): siRNA sense strand
gcagcaaugucaauacaag

SEQ ID NO: 2175790 - RNA, 19 nt, Homo sapiens
  misc_RNA (1)...(19): siRNA sense strand
gcagcggaguuugacuuua

SEQ ID NO: 2175791 - RNA, 19 nt, Homo sapiens
  misc_RNA (1)...(19): siRNA sense strand
cuucagauguugcuaguga

SEQ ID NO: 2175792 - RNA, 19 nt, Homo sapiens
  misc_RNA (1)...(19): siRNA sense strand
ggaacugucauacuuaaau

SEQ ID NO: 2175793 - RNA, 19 nt, Homo sapiens
  misc_RNA (1)...(19): siRNA sense strand
gcauauacagcccuuggua

SEQ ID NO: 2175794 - RNA, 19 nt, Homo sapiens
  misc_RNA (1)...(19): siRNA sense strand
aaacaacagacacauguaa

SEQ ID NO: 2175795 - RNA, 19 nt, Homo sapiens
  misc_RNA (1)...(19): siRNA sense strand
gagauacacaaagacauua

SEQ ID NO: 2175796 - RNA, 19 nt, Homo sapiens
  misc_RNA (1)...(19): siRNA sense strand
ucacugaucugcucaagac

SEQ ID NO: 2175797 - RNA, 19 nt, Homo sapiens
  misc_RNA (1)...(19): siRNA sense strand
ggaguauggaugauuauga

SEQ ID NO: 2175798 - RNA, 19 nt, Homo sapiens
  misc_RNA (1)...(19): siRNA sense strand
uuacaaaguccuagaaguu

SEQ ID NO: 2175799 - RNA, 19 nt, Homo sapiens
  misc_RNA (1)...(19): siRNA sense strand
uauguaaccucuuggugaa

SEQ ID NO: 2175800 - RNA, 19 nt, Homo sapiens
  misc_RNA (1)...(19): siRNA sense strand
caacagacacauguaagaa

SEQ ID NO: 2175801 - RNA, 19 nt, Homo sapiens
  misc_RNA (1)...(19): siRNA sense strand
cauauuggcaacuuacuaa

SEQ ID NO: 2175802 - RNA, 19 nt, Homo sapiens
  misc_RNA (1)...(19): siRNA sense strand
uauauuagcagcaauguca

SEQ ID NO: 2175803 - RNA, 19 nt, Homo sapiens
  misc_RNA (1)...(19): siRNA sense strand
guaccggauuuauaccaaa

SEQ ID NO: 2175804 - RNA, 19 nt, Homo sapiens
  misc_RNA (1)...(19): siRNA sense strand
gaacuccccuccccacuug

SEQ ID NO: 2175805 - RNA, 19 nt, Homo sapiens
  misc_RNA (1)...(19): siRNA sense strand
gaucauggagagcugguuu

SEQ ID NO: 2175806 - RNA, 19 nt, Homo sapiens
  misc_RNA (1)...(19): siRNA sense strand
ggaguuugacuuuauggaa

SEQ ID NO: 2175807 - RNA, 19 nt, Homo sapiens
  misc_RNA (1)...(19): siRNA sense strand
ugauuucucuugcacuuug

SEQ ID NO: 2175808 - RNA, 19 nt, Homo sapiens
  misc_RNA (1)...(19): siRNA sense strand
ucauauccauuucuuguuc

SEQ ID NO: 2175809 - RNA, 19 nt, Homo sapiens
  misc_RNA (1)...(19): siRNA sense strand
aauacaagguucagcaaau

SEQ ID NO: 2175810 - RNA, 19 nt, Homo sapiens
  misc_RNA (1)...(19): siRNA sense strand
ggaaagcagccgaagaagu

SEQ ID NO: 2175811 - RNA, 19 nt, Homo sapiens
  misc_RNA (1)...(19): siRNA sense strand
guuaagcucucugcacuuc

SEQ ID NO: 2175812 - RNA, 19 nt, Homo sapiens
  misc_RNA (1)...(19): siRNA sense strand
uaauggacuugauugguau

SEQ ID NO: 2175813 - RNA, 19 nt, Homo sapiens
  misc_RNA (1)...(19): siRNA sense strand
gcuagugacucauauucuc

SEQ ID NO: 2175814 - RNA, 19 nt, Homo sapiens
  misc_RNA (1)...(19): siRNA sense strand
aagauauguuggacgguua

SEQ ID NO: 2175815 - RNA, 19 nt, Homo sapiens
  misc_RNA (1)...(19): siRNA sense strand
ugagauacacaaagacauu

SEQ ID NO: 2175816 - RNA, 19 nt, Homo sapiens
  misc_RNA (1)...(19): siRNA sense strand
cggaagaucauuuauauac

SEQ ID NO: 2175817 - RNA, 19 nt, Homo sapiens
  misc_RNA (1)...(19): siRNA sense strand
cugcaaacccaguggaaua

SEQ ID NO: 2175818 - RNA, 19 nt, Homo sapiens
  misc_RNA (1)...(19): siRNA sense strand
uagcagcaaugucaauaca

SEQ ID NO: 2175819 - RNA, 19 nt, Homo sapiens
  misc_RNA (1)...(19): siRNA sense strand
caugauuucucuugcacuu

SEQ ID NO: 2175820 - RNA, 19 nt, Homo sapiens
  misc_RNA (1)...(19): siRNA sense strand
gcucaguuuguacuucuua

SEQ ID NO: 2175821 - RNA, 19 nt, Homo sapiens
  misc_RNA (1)...(19): siRNA sense strand
caaaguccuagaaguugua

SEQ ID NO: 2175822 - RNA, 19 nt, Homo sapiens
  misc_RNA (1)...(19): siRNA sense strand
uguagaagauccugccaau

SEQ ID NO: 2175823 - RNA, 19 nt, Homo sapiens
  misc_RNA (1)...(19): siRNA sense strand
guugucggguacauugaua

SEQ ID NO: 2175824 - RNA, 19 nt, Homo sapiens
  misc_RNA (1)...(19): siRNA sense strand
gauggcauuauucuucaua

SEQ ID NO: 2175825 - RNA, 19 nt, Homo sapiens
  misc_RNA (1)...(19): siRNA sense strand
gcauugcaauuguuagcau

SEQ ID NO: 2175826 - RNA, 19 nt, Homo sapiens
  misc_RNA (1)...(19): siRNA sense strand
ggagaguguacccguguaa

SEQ ID NO: 2175827 - RNA, 19 nt, Homo sapiens
  misc_RNA (1)...(19): siRNA sense strand
gaauggaguauggaugauu

SEQ ID NO: 2175828 - RNA, 19 nt, Homo sapiens
  misc_RNA (1)...(19): siRNA sense strand
gccaguugguaccggauuu

SEQ ID NO: 2175829 - RNA, 19 nt, Homo sapiens
  misc_RNA (1)...(19): siRNA sense strand
ucacuucaccacuguauuc

SEQ ID NO: 2175830 - RNA, 19 nt, Homo sapiens
  misc_RNA (1)...(19): siRNA sense strand
caguaugccugaaauuugg

SEQ ID NO: 2175831 - RNA, 19 nt, Homo sapiens
  misc_RNA (1)...(19): siRNA sense strand
agaagaacuuauagaaugg

SEQ ID NO: 2175832 - RNA, 19 nt, Homo sapiens
  misc_RNA (1)...(19): siRNA sense strand
ugucuuagcuaaacaacag

SEQ ID NO: 2175833 - RNA, 19 nt, Homo sapiens
  misc_RNA (1)...(19): siRNA sense strand
cauuauugcuuccaguugu

SEQ ID NO: 2175834 - RNA, 19 nt, Homo sapiens
  misc_RNA (1)...(19): siRNA sense strand
gacaccaccucuccgugaa

SEQ ID NO: 2175835 - RNA, 19 nt, Homo sapiens
  misc_RNA (1)...(19): siRNA sense strand
uuucaagacuauuguggaa

SEQ ID NO: 2175836 - RNA, 19 nt, Homo sapiens
  misc_RNA (1)...(19): siRNA sense strand
uagaagauccugccaaugc

SEQ ID NO: 2175837 - RNA, 19 nt, Homo sapiens
  misc_RNA (1)...(19): siRNA sense strand
gugaagcgagaacugauaa

SEQ ID NO: 2175838 - RNA, 19 nt, Homo sapiens
  misc_RNA (1)...(19): siRNA sense strand
ugaagacgcaggcuugaga

SEQ ID NO: 2175839 - RNA, 19 nt, Homo sapiens
  misc_RNA (1)...(19): siRNA sense strand
cauugcaauuguuagcaua

SEQ ID NO: 2175840 - RNA, 19 nt, Homo sapiens
  misc_RNA (1)...(19): siRNA sense strand
uaaacaacagacacaugua

SEQ ID NO: 2175841 - RNA, 19 nt, Homo sapiens
  misc_RNA (1)...(19): siRNA sense strand
cuaaacaacagacacaugu

SEQ ID NO: 2175842 - RNA, 19 nt, Homo sapiens
  misc_RNA (1)...(19): siRNA sense strand
aagcuucucauauccauuu

SEQ ID NO: 2175843 - RNA, 19 nt, Homo sapiens
  misc_RNA (1)...(19): siRNA sense strand
ugaaugauaaacugacuga

SEQ ID NO: 2175844 - RNA, 19 nt, Homo sapiens
  misc_RNA (1)...(19): siRNA sense strand
gaucugcucaagacagcua

SEQ ID NO: 2175845 - RNA, 19 nt, Homo sapiens
  misc_RNA (1)...(19): siRNA sense strand
gcuuccaguuguucuugua

SEQ ID NO: 2175846 - RNA, 19 nt, Homo sapiens
  misc_RNA (1)...(19): siRNA sense strand
uuugggaacucaauguuau

SEQ ID NO: 2175847 - RNA, 19 nt, Homo sapiens
  misc_RNA (1)...(19): siRNA sense strand
ucggguacauugauauaug

SEQ ID NO: 2175848 - RNA, 19 nt, Homo sapiens
  misc_RNA (1)...(19): siRNA sense strand
uguggaagcacccucauuu

SEQ ID NO: 2175849 - RNA, 19 nt, Homo sapiens
  misc_RNA (1)...(19): siRNA sense strand
gguauucaaaccaagauau

SEQ ID NO: 2175850 - RNA, 19 nt, Homo sapiens
  misc_RNA (1)...(19): siRNA sense strand
gaagcgagaacugauaaag

SEQ ID NO: 2175851 - RNA, 19 nt, Homo sapiens
  misc_RNA (1)...(19): siRNA sense strand
gcaaugucaauacaagguu

SEQ ID NO: 2175852 - RNA, 19 nt, Homo sapiens
  misc_RNA (1)...(19): siRNA sense strand
uaggaggccugguuacagu

SEQ ID NO: 2175853 - RNA, 19 nt, Homo sapiens
  misc_RNA (1)...(19): siRNA sense strand
uagaccagggacuauauua

SEQ ID NO: 2175854 - RNA, 19 nt, Homo sapiens
  misc_RNA (1)...(19): siRNA sense strand
guacuucuuacucagauug

SEQ ID NO: 2175855 - RNA, 19 nt, Homo sapiens
  misc_RNA (1)...(19): siRNA sense strand
ggugaaggauuccaaaccu

SEQ ID NO: 2175856 - RNA, 19 nt, Homo sapiens
  misc_RNA (1)...(19): siRNA sense strand
gucaugguguguaagaaga

SEQ ID NO: 2175857 - RNA, 19 nt, Homo sapiens
  misc_RNA (1)...(19): siRNA sense strand
gcaaacccaguggaauauu

SEQ ID NO: 2175858 - RNA, 19 nt, Homo sapiens
  misc_RNA (1)...(19): siRNA sense strand
aaaagagacuccacugaga

SEQ ID NO: 2175859 - RNA, 19 nt, Homo sapiens
  misc_RNA (1)...(19): siRNA sense strand
uuggaacugucauacuuaa

SEQ ID NO: 2175860 - RNA, 19 nt, Homo sapiens
  misc_RNA (1)...(19): siRNA sense strand
guuugggaacucaauguua

SEQ ID NO: 2175861 - RNA, 19 nt, Homo sapiens
  misc_RNA (1)...(19): siRNA sense strand
gcuaaacaacagacacaug

SEQ ID NO: 2175862 - RNA, 19 nt, Homo sapiens
  misc_RNA (1)...(19): siRNA sense strand
aagagacuccacugagaua

SEQ ID NO: 2175863 - RNA, 19 nt, Homo sapiens
  misc_RNA (1)...(19): siRNA sense strand
gaagagucaugguguguaa

SEQ ID NO: 2175864 - RNA, 19 nt, Homo sapiens
  misc_RNA (1)...(19): siRNA sense strand
gaaagcagccgaagaagug

SEQ ID NO: 2175865 - RNA, 19 nt, Homo sapiens
  misc_RNA (1)...(19): siRNA sense strand
ccacugagauacacaaaga

SEQ ID NO: 2175866 - RNA, 19 nt, Homo sapiens
  misc_RNA (1)...(19): siRNA sense strand
gcaguuugcucaguuugua

SEQ ID NO: 2175867 - RNA, 19 nt, Homo sapiens
  misc_RNA (1)...(19): siRNA sense strand
gaguauggaugauuaugaa

SEQ ID NO: 2175868 - RNA, 19 nt, Homo sapiens
  misc_RNA (1)...(19): siRNA sense strand
ugaaagcugugaaggauug

SEQ ID NO: 2175869 - RNA, 19 nt, Homo sapiens
  misc_RNA (1)...(19): siRNA sense strand
gcaacuuacuaacaucaaa

SEQ ID NO: 2175870 - RNA, 19 nt, Homo sapiens
  misc_RNA (1)...(19): siRNA sense strand
gaguuugacuuuauggaaa

SEQ ID NO: 2175871 - RNA, 19 nt, Homo sapiens
  misc_RNA (1)...(19): siRNA sense strand
auaauggacuugauuggua

SEQ ID NO: 2175872 - RNA, 19 nt, Homo sapiens
  misc_RNA (1)...(19): siRNA sense strand
gcacuucggcccauuguga

SEQ ID NO: 2175873 - RNA, 19 nt, Homo sapiens
  misc_RNA (1)...(19): siRNA sense strand
ccaagaagaacuuauagaa

SEQ ID NO: 2175874 - RNA, 19 nt, Homo sapiens
  misc_RNA (1)...(19): siRNA sense strand
cgugaaagcuucucauauc

SEQ ID NO: 2175875 - RNA, 19 nt, Homo sapiens
  misc_RNA (1)...(19): siRNA sense strand
uuacucagauugcaucauu

SEQ ID NO: 2175876 - RNA, 19 nt, Homo sapiens
  misc_RNA (1)...(19): siRNA sense strand
cagauugcaucauuauuug

SEQ ID NO: 2175877 - RNA, 19 nt, Homo sapiens
  misc_RNA (1)...(19): siRNA sense strand
ggaaaacucccuuauguaa

SEQ ID NO: 2175878 - RNA, 19 nt, Homo sapiens
  misc_RNA (1)...(19): siRNA sense strand
gcaguaugccugaaauuug

SEQ ID NO: 2175879 - RNA, 19 nt, Homo sapiens
  misc_RNA (1)...(19): siRNA sense strand
cagcggaguuugacuuuau

SEQ ID NO: 2175880 - RNA, 19 nt, Homo sapiens
  misc_RNA (1)...(19): siRNA sense strand
gaccagggacuauauuauu

SEQ ID NO: 2175881 - RNA, 19 nt, Homo sapiens
  misc_RNA (1)...(19): siRNA sense strand
gaacuuauagaauggauca

SEQ ID NO: 2175882 - RNA, 19 nt, Homo sapiens
  misc_RNA (1)...(19): siRNA sense strand
caaacccaguggaauauug

SEQ ID NO: 2175883 - RNA, 19 nt, Homo sapiens
  misc_RNA (1)...(19): siRNA sense strand
gggacuauauuauuccuau

SEQ ID NO: 2175884 - RNA, 19 nt, Homo sapiens
  misc_RNA (1)...(19): siRNA sense strand
ggagcuggcugccuguaga

SEQ ID NO: 2175885 - RNA, 19 nt, Homo sapiens
  misc_RNA (1)...(19): siRNA sense strand
aauggaguauggaugauua

SEQ ID NO: 2175886 - RNA, 19 nt, Homo sapiens
  misc_RNA (1)...(19): siRNA sense strand
gaaagcuucucauauccau

SEQ ID NO: 2175887 - RNA, 19 nt, Homo sapiens
  misc_RNA (1)...(19): siRNA sense strand
gggagauccugcuugcuuu

SEQ ID NO: 2175888 - RNA, 19 nt, Homo sapiens
  misc_RNA (1)...(19): siRNA sense strand
gaagugaagcgagaacuga

SEQ ID NO: 2175889 - RNA, 19 nt, Homo sapiens
  misc_RNA (1)...(19): siRNA sense strand
gcagcaaugucaauacaag

SEQ ID NO: 2175890 - RNA, 19 nt, Homo sapiens
  misc_RNA (1)...(19): siRNA sense strand
gcagcggaguuugacuuua

SEQ ID NO: 2175891 - RNA, 19 nt, Homo sapiens
  misc_RNA (1)...(19): siRNA sense strand
cuucagauguugcuaguga

SEQ ID NO: 2175892 - RNA, 19 nt, Homo sapiens
  misc_RNA (1)...(19): siRNA sense strand
ggaacugucauacuuaaau

SEQ ID NO: 2175893 - RNA, 19 nt, Homo sapiens
  misc_RNA (1)...(19): siRNA sense strand
gcauauacagcccuuggua

SEQ ID NO: 2175894 - RNA, 19 nt, Homo sapiens
  misc_RNA (1)...(19): siRNA sense strand
aaacaacagacacauguaa

SEQ ID NO: 2175895 - RNA, 19 nt, Homo sapiens
  misc_RNA (1)...(19): siRNA sense strand
gagauacacaaagacauua

SEQ ID NO: 2175896 - RNA, 19 nt, Homo sapiens
  misc_RNA (1)...(19): siRNA sense strand
ucacugaucugcucaagac

SEQ ID NO: 2175897 - RNA, 19 nt, Homo sapiens
  misc_RNA (1)...(19): siRNA sense strand
ggaguauggaugauuauga

SEQ ID NO: 2175898 - RNA, 19 nt, Homo sapiens
  misc_RNA (1)...(19): siRNA sense strand
uuacaaaguccuagaaguu

SEQ ID NO: 2175899 - RNA, 19 nt, Homo sapiens
  misc_RNA (1)...(19): siRNA sense strand
uauguaaccucuuggugaa

SEQ ID NO: 2175900 - RNA, 19 nt, Homo sapiens
  misc_RNA (1)...(19): siRNA sense strand
caacagacacauguaagaa

SEQ ID NO: 2175901 - RNA, 19 nt, Homo sapiens
  misc_RNA (1)...(19): siRNA sense strand
cauauuggcaacuuacuaa

SEQ ID NO: 2175902 - RNA, 19 nt, Homo sapiens
  misc_RNA (1)...(19): siRNA sense strand
uauauuagcagcaauguca

SEQ ID NO: 2175903 - RNA, 19 nt, Homo sapiens
  misc_RNA (1)...(19): siRNA sense strand
guaccggauuuauaccaaa

SEQ ID NO: 2175904 - RNA, 19 nt, Homo sapiens
  misc_RNA (1)...(19): siRNA sense strand
gaacuccccuccccacuug

SEQ ID NO: 2175905 - RNA, 19 nt, Homo sapiens
  misc_RNA (1)...(19): siRNA sense strand
gaucauggagagcugguuu

SEQ ID NO: 2175906 - RNA, 19 nt, Homo sapiens
  misc_RNA (1)...(19): siRNA sense strand
ggaguuugacuuuauggaa

SEQ ID NO: 2175907 - RNA, 19 nt, Homo sapiens
  misc_RNA (1)...(19): siRNA sense strand
ugauuucucuugcacuuug

SEQ ID NO: 2175908 - RNA, 19 nt, Homo sapiens
  misc_RNA (1)...(19): siRNA sense strand
ucauauccauuucuuguuc

SEQ ID NO: 2175909 - RNA, 19 nt, Homo sapiens
  misc_RNA (1)...(19): siRNA sense strand
aauacaagguucagcaaau

SEQ ID NO: 2175910 - RNA, 19 nt, Homo sapiens
  misc_RNA (1)...(19): siRNA sense strand
ggaaagcagccgaagaagu

SEQ ID NO: 2175911 - RNA, 19 nt, Homo sapiens
  misc_RNA (1)...(19): siRNA sense strand
guuaagcucucugcacuuc

SEQ ID NO: 2175912 - RNA, 19 nt, Homo sapiens
  misc_RNA (1)...(19): siRNA sense strand
uaauggacuugauugguau

SEQ ID NO: 2175913 - RNA, 19 nt, Homo sapiens
  misc_RNA (1)...(19): siRNA sense strand
gcuagugacucauauucuc

SEQ ID NO: 2175914 - RNA, 19 nt, Homo sapiens
  misc_RNA (1)...(19): siRNA sense strand
aagauauguuggacgguua

SEQ ID NO: 2175915 - RNA, 19 nt, Homo sapiens
  misc_RNA (1)...(19): siRNA sense strand
ugagauacacaaagacauu

SEQ ID NO: 2175916 - RNA, 19 nt, Homo sapiens
  misc_RNA (1)...(19): siRNA sense strand
cggaagaucauuuauauac

SEQ ID NO: 2175917 - RNA, 19 nt, Homo sapiens
  misc_RNA (1)...(19): siRNA sense strand
cugcaaacccaguggaaua

SEQ ID NO: 2175918 - RNA, 19 nt, Homo sapiens
  misc_RNA (1)...(19): siRNA sense strand
uagcagcaaugucaauaca

SEQ ID NO: 2175919 - RNA, 19 nt, Homo sapiens
  misc_RNA (1)...(19): siRNA sense strand
caugauuucucuugcacuu

SEQ ID NO: 2175920 - RNA, 19 nt, Homo sapiens
  misc_RNA (1)...(19): siRNA sense strand
gcucaguuuguacuucuua

SEQ ID NO: 2175921 - RNA, 19 nt, Homo sapiens
  misc_RNA (1)...(19): siRNA sense strand
caaaguccuagaaguugua

SEQ ID NO: 2175922 - RNA, 19 nt, Homo sapiens
  misc_RNA (1)...(19): siRNA sense strand
uguagaagauccugccaau

SEQ ID NO: 2175923 - RNA, 19 nt, Homo sapiens
  misc_RNA (1)...(19): siRNA sense strand
guugucggguacauugaua

SEQ ID NO: 2175924 - RNA, 19 nt, Homo sapiens
  misc_RNA (1)...(19): siRNA sense strand
gauggcauuauucuucaua

SEQ ID NO: 2175925 - RNA, 19 nt, Homo sapiens
  misc_RNA (1)...(19): siRNA sense strand
gcauugcaauuguuagcau

SEQ ID NO: 2175926 - RNA, 19 nt, Homo sapiens
  misc_RNA (1)...(19): siRNA sense strand
ggagaguguacccguguaa

SEQ ID NO: 2175927 - RNA, 19 nt, Homo sapiens
  misc_RNA (1)...(19): siRNA sense strand
gaauggaguauggaugauu

SEQ ID NO: 2175928 - RNA, 19 nt, Homo sapiens
  misc_RNA (1)...(19): siRNA sense strand
gccaguugguaccggauuu

SEQ ID NO: 2175929 - RNA, 19 nt, Homo sapiens
  misc_RNA (1)...(19): siRNA sense strand
ucacuucaccacuguauuc

SEQ ID NO: 2175930 - RNA, 19 nt, Homo sapiens
  misc_RNA (1)...(19): siRNA sense strand
caguaugccugaaauuugg

SEQ ID NO: 2175931 - RNA, 19 nt, Homo sapiens
  misc_RNA (1)...(19): siRNA sense strand
agaagaacuuauagaaugg

SEQ ID NO: 2175932 - RNA, 19 nt, Homo sapiens
  misc_RNA (1)...(19): siRNA sense strand
ugucuuagcuaaacaacag

SEQ ID NO: 2175933 - RNA, 19 nt, Homo sapiens
  misc_RNA (1)...(19): siRNA sense strand
cauuauugcuuccaguugu

SEQ ID NO: 2175934 - RNA, 19 nt, Homo sapiens
  misc_RNA (1)...(19): siRNA sense strand
gacaccaccucuccgugaa

SEQ ID NO: 2175935 - RNA, 19 nt, Homo sapiens
  misc_RNA (1)...(19): siRNA sense strand
uuucaagacuauuguggaa

SEQ ID NO: 2175936 - RNA, 19 nt, Homo sapiens
  misc_RNA (1)...(19): siRNA sense strand
uagaagauccugccaaugc

SEQ ID NO: 2175937 - RNA, 19 nt, Homo sapiens
  misc_RNA (1)...(19): siRNA sense strand
gugaagcgagaacugauaa

SEQ ID NO: 2175938 - RNA, 19 nt, Homo sapiens
  misc_RNA (1)...(19): siRNA sense strand
ugaagacgcaggcuugaga

SEQ ID NO: 2175939 - RNA, 19 nt, Homo sapiens
  misc_RNA (1)...(19): siRNA sense strand
cauugcaauuguuagcaua

SEQ ID NO: 2175940 - RNA, 19 nt, Homo sapiens
  misc_RNA (1)...(19): siRNA sense strand
uaaacaacagacacaugua

SEQ ID NO: 2175941 - RNA, 19 nt, Homo sapiens
  misc_RNA (1)...(19): siRNA sense strand
cuaaacaacagacacaugu

SEQ ID NO: 2175942 - RNA, 19 nt, Homo sapiens
  misc_RNA (1)...(19): siRNA sense strand
aagcuucucauauccauuu

SEQ ID NO: 2175943 - RNA, 19 nt, Homo sapiens
  misc_RNA (1)...(19): siRNA sense strand
ugaaugauaaacugacuga

SEQ ID NO: 2175944 - RNA, 19 nt, Homo sapiens
  misc_RNA (1)...(19): siRNA sense strand
gaucugcucaagacagcua

SEQ ID NO: 2175945 - RNA, 19 nt, Homo sapiens
  misc_RNA (1)...(19): siRNA sense strand
gcuuccaguuguucuugua

SEQ ID NO: 2175946 - RNA, 19 nt, Homo sapiens
  misc_RNA (1)...(19): siRNA sense strand
uuugggaacucaauguuau

SEQ ID NO: 2175947 - RNA, 19 nt, Homo sapiens
  misc_RNA (1)...(19): siRNA sense strand
ucggguacauugauauaug

SEQ ID NO: 2175948 - RNA, 19 nt, Homo sapiens
  misc_RNA (1)...(19): siRNA sense strand
uguggaagcacccucauuu

SEQ ID NO: 2175949 - RNA, 19 nt, Homo sapiens
  misc_RNA (1)...(19): siRNA sense strand
gguauucaaaccaagauau

SEQ ID NO: 2175950 - RNA, 19 nt, Homo sapiens
  misc_RNA (1)...(19): siRNA sense strand
gaagcgagaacugauaaag

SEQ ID NO: 2175951 - RNA, 19 nt, Homo sapiens
  misc_RNA (1)...(19): siRNA sense strand
gcaaugucaauacaagguu

SEQ ID NO: 2175952 - RNA, 19 nt, Homo sapiens
  misc_RNA (1)...(19): siRNA sense strand
uaggaggccugguuacagu

SEQ ID NO: 2175953 - RNA, 19 nt, Homo sapiens
  misc_RNA (1)...(19): siRNA sense strand
uagaccagggacuauauua

SEQ ID NO: 2175954 - RNA, 19 nt, Homo sapiens
  misc_RNA (1)...(19): siRNA sense strand
guacuucuuacucagauug

SEQ ID NO: 2175955 - RNA, 19 nt, Homo sapiens
  misc_RNA (1)...(19): siRNA sense strand
ggugaaggauuccaaaccu

SEQ ID NO: 2175956 - RNA, 19 nt, Homo sapiens
  misc_RNA (1)...(19): siRNA sense strand
gucaugguguguaagaaga

SEQ ID NO: 2175957 - RNA, 19 nt, Homo sapiens
  misc_RNA (1)...(19): siRNA sense strand
gcaaacccaguggaauauu

SEQ ID NO: 2175958 - RNA, 19 nt, Homo sapiens
  misc_RNA (1)...(19): siRNA sense strand
aaaagagacuccacugaga

SEQ ID NO: 2175959 - RNA, 19 nt, Homo sapiens
  misc_RNA (1)...(19): siRNA sense strand
uuggaacugucauacuuaa

SEQ ID NO: 2175960 - RNA, 19 nt, Homo sapiens
  misc_RNA (1)...(19): siRNA sense strand
guuugggaacucaauguua

SEQ ID NO: 2175961 - RNA, 19 nt, Homo sapiens
  misc_RNA (1)...(19): siRNA sense strand
gcuaaacaacagacacaug

SEQ ID NO: 2175962 - RNA, 19 nt, Homo sapiens
  misc_RNA (1)...(19): siRNA sense strand
aagagacuccacugagaua

SEQ ID NO: 2175963 - RNA, 19 nt, Homo sapiens
  misc_RNA (1)...(19): siRNA sense strand
gaagauucauugaucauug

SEQ ID NO: 2175964 - RNA, 19 nt, Homo sapiens
  misc_RNA (1)...(19): siRNA sense strand
ccacgcaucugaccgauuu

SEQ ID NO: 2175965 - RNA, 19 nt, Homo sapiens
  misc_RNA (1)...(19): siRNA sense strand
gcaaaucuccuaacacuuc

SEQ ID NO: 2175966 - RNA, 19 nt, Homo sapiens
  misc_RNA (1)...(19): siRNA sense strand
gcauaguacugccaccuaa

SEQ ID NO: 2175967 - RNA, 19 nt, Homo sapiens
  misc_RNA (1)...(19): siRNA sense strand
gcagaagauucauugauca

SEQ ID NO: 2175968 - RNA, 19 nt, Homo sapiens
  misc_RNA (1)...(19): siRNA sense strand
guaaagaccagguauacuu

SEQ ID NO: 2175969 - RNA, 19 nt, Homo sapiens
  misc_RNA (1)...(19): siRNA sense strand
gcaucugaccgauuucuua

SEQ ID NO: 2175970 - RNA, 19 nt, Homo sapiens
  misc_RNA (1)...(19): siRNA sense strand
uaacacuucucguagcaaa

SEQ ID NO: 2175971 - RNA, 19 nt, Homo sapiens
  misc_RNA (1)...(19): siRNA sense strand
gcaggaccauggccgauau

SEQ ID NO: 2175972 - RNA, 19 nt, Homo sapiens
  misc_RNA (1)...(19): siRNA sense strand
cagcaaaucuccuaacacu

SEQ ID NO: 2175973 - RNA, 19 nt, Homo sapiens
  misc_RNA (1)...(19): siRNA sense strand
gagaagaucauggaaguga

SEQ ID NO: 2175974 - RNA, 19 nt, Homo sapiens
  misc_RNA (1)...(19): siRNA sense strand
ucgggaagguuucuuauga

SEQ ID NO: 2175975 - RNA, 19 nt, Homo sapiens
  misc_RNA (1)...(19): siRNA sense strand
ggauggaauucuucaaauc

SEQ ID NO: 2175976 - RNA, 19 nt, Homo sapiens
  misc_RNA (1)...(19): siRNA sense strand
gucaaguccuguaaaguuu

SEQ ID NO: 2175977 - RNA, 19 nt, Homo sapiens
  misc_RNA (1)...(19): siRNA sense strand
ggaacugaaagaucuuaua

SEQ ID NO: 2175978 - RNA, 19 nt, Homo sapiens
  misc_RNA (1)...(19): siRNA sense strand
cuacuacacuguuuaucaa

SEQ ID NO: 2175979 - RNA, 19 nt, Homo sapiens
  misc_RNA (1)...(19): siRNA sense strand
gagcuaaagccaaauaauc

SEQ ID NO: 2175980 - RNA, 19 nt, Homo sapiens
  misc_RNA (1)...(19): siRNA sense strand
gauauuggcagguuuguca

SEQ ID NO: 2175981 - RNA, 19 nt, Homo sapiens
  misc_RNA (1)...(19): siRNA sense strand
ggaagugaaugaacugacu

SEQ ID NO: 2175982 - RNA, 19 nt, Homo sapiens
  misc_RNA (1)...(19): siRNA sense strand
aagaugggauuauugugua

SEQ ID NO: 2175983 - RNA, 19 nt, Homo sapiens
  misc_RNA (1)...(19): siRNA sense strand
uagagaagaucauggaagu

SEQ ID NO: 2175984 - RNA, 19 nt, Homo sapiens
  misc_RNA (1)...(19): siRNA sense strand
caaccaggguguuuuagua

SEQ ID NO: 2175985 - RNA, 19 nt, Homo sapiens
  misc_RNA (1)...(19): siRNA sense strand
uaaagauauuggcagguuu

SEQ ID NO: 2175986 - RNA, 19 nt, Homo sapiens
  misc_RNA (1)...(19): siRNA sense strand
gaagauguggaucgcuuaa

SEQ ID NO: 2175987 - RNA, 19 nt, Homo sapiens
  misc_RNA (1)...(19): siRNA sense strand
gaaccaguaguuacaaugu

SEQ ID NO: 2175988 - RNA, 19 nt, Homo sapiens
  misc_RNA (1)...(19): siRNA sense strand
uuaaagauauuggcagguu

SEQ ID NO: 2175989 - RNA, 19 nt, Homo sapiens
  misc_RNA (1)...(19): siRNA sense strand
cagcagccauggaacaguu

SEQ ID NO: 2175990 - RNA, 19 nt, Homo sapiens
  misc_RNA (1)...(19): siRNA sense strand
ucacuggccugagcaagaa

SEQ ID NO: 2175991 - RNA, 19 nt, Homo sapiens
  misc_RNA (1)...(19): siRNA sense strand
aacaugagcuaaagccaaa

SEQ ID NO: 2175992 - RNA, 19 nt, Homo sapiens
  misc_RNA (1)...(19): siRNA sense strand
uacagggaauggcauagua

SEQ ID NO: 2175993 - RNA, 19 nt, Homo sapiens
  misc_RNA (1)...(19): siRNA sense strand
gccgauauauggaacacuu

SEQ ID NO: 2175994 - RNA, 19 nt, Homo sapiens
  misc_RNA (1)...(19): siRNA sense strand
uaccuacaauccucaguuu

SEQ ID NO: 2175995 - RNA, 19 nt, Homo sapiens
  misc_RNA (1)...(19): siRNA sense strand
caagaugggauuauugugu

SEQ ID NO: 2175996 - RNA, 19 nt, Homo sapiens
  misc_RNA (1)...(19): siRNA sense strand
uuaagcagauuguaguuca

SEQ ID NO: 2175997 - RNA, 19 nt, Homo sapiens
  misc_RNA (1)...(19): siRNA sense strand
aagaagcauuucacauuug

SEQ ID NO: 2175998 - RNA, 19 nt, Homo sapiens
  misc_RNA (1)...(19): siRNA sense strand
acagggaacugaaagaucu

SEQ ID NO: 2175999 - RNA, 19 nt, Homo sapiens
  misc_RNA (1)...(19): siRNA sense strand
uagcaagcauucacagugu

SEQ ID NO: 2176000 - RNA, 19 nt, Homo sapiens
  misc_RNA (1)...(19): siRNA sense strand
ccaccaacuuagagaaaga

SEQ ID NO: 2176001 - RNA, 19 nt, Homo sapiens
  misc_RNA (1)...(19): siRNA sense strand
acacaugauaucucuguua

SEQ ID NO: 2176002 - RNA, 19 nt, Homo sapiens
  misc_RNA (1)...(19): siRNA sense strand
gggaagguuucuuaugaag

SEQ ID NO: 2176003 - RNA, 19 nt, Homo sapiens
  misc_RNA (1)...(19): siRNA sense strand
gaagaucauggaagugaau

SEQ ID NO: 2176004 - RNA, 19 nt, Homo sapiens
  misc_RNA (1)...(19): siRNA sense strand
caugaaauagguacacauu

SEQ ID NO: 2176005 - RNA, 19 nt, Homo sapiens
  misc_RNA (1)...(19): siRNA sense strand
uuaaaaggauuggcaguua

SEQ ID NO: 2176006 - RNA, 19 nt, Homo sapiens
  misc_RNA (1)...(19): siRNA sense strand
gaaggacuagcaagcauuc

SEQ ID NO: 2176007 - RNA, 19 nt, Homo sapiens
  misc_RNA (1)...(19): siRNA sense strand
ggaaggacuagcaagcauu

SEQ ID NO: 2176008 - RNA, 19 nt, Homo sapiens
  misc_RNA (1)...(19): siRNA sense strand
uggaagcgcugcucacagu

SEQ ID NO: 2176009 - RNA, 19 nt, Homo sapiens
  misc_RNA (1)...(19): siRNA sense strand
uaaagaccagguauacuug

SEQ ID NO: 2176010 - RNA, 19 nt, Homo sapiens
  misc_RNA (1)...(19): siRNA sense strand
gcugaggcaugaaauaggu

SEQ ID NO: 2176011 - RNA, 19 nt, Homo sapiens
  misc_RNA (1)...(19): siRNA sense strand
caucugaccgauuucuuaa

SEQ ID NO: 2176012 - RNA, 19 nt, Homo sapiens
  misc_RNA (1)...(19): siRNA sense strand
ugucaaguccuguaaaguu

SEQ ID NO: 2176013 - RNA, 19 nt, Homo sapiens
  misc_RNA (1)...(19): siRNA sense strand
uauaaaacccaccaacuua

SEQ ID NO: 2176014 - RNA, 19 nt, Homo sapiens
  misc_RNA (1)...(19): siRNA sense strand
auacuuggauggaauucuu

SEQ ID NO: 2176015 - RNA, 19 nt, Homo sapiens
  misc_RNA (1)...(19): siRNA sense strand
ucaaaucugacuauaccua

SEQ ID NO: 2176016 - RNA, 19 nt, Homo sapiens
  misc_RNA (1)...(19): siRNA sense strand
ccacugcacgugagcauug

SEQ ID NO: 2176017 - RNA, 19 nt, Homo sapiens
  misc_RNA (1)...(19): siRNA sense strand
cgggaagguuucuuaugaa

SEQ ID NO: 2176018 - RNA, 19 nt, Homo sapiens
  misc_RNA (1)...(19): siRNA sense strand
ccuacaauccucaguuuga

SEQ ID NO: 2176019 - RNA, 19 nt, Homo sapiens
  misc_RNA (1)...(19): siRNA sense strand
gauuguaguucaucucacu

SEQ ID NO: 2176020 - RNA, 19 nt, Homo sapiens
  misc_RNA (1)...(19): siRNA sense strand
agaagcauuucacauuugu

SEQ ID NO: 2176021 - RNA, 19 nt, Homo sapiens
  misc_RNA (1)...(19): siRNA sense strand
ugcagaagauucauugauc

SEQ ID NO: 2176022 - RNA, 19 nt, Homo sapiens
  misc_RNA (1)...(19): siRNA sense strand
caaugacaguaguaaaugg

SEQ ID NO: 2176023 - RNA, 19 nt, Homo sapiens
  misc_RNA (1)...(19): siRNA sense strand
auacagagauaccauagac

SEQ ID NO: 2176024 - RNA, 19 nt, Homo sapiens
  misc_RNA (1)...(19): siRNA sense strand
caugagcuaaagccaaaua

SEQ ID NO: 2176025 - RNA, 19 nt, Homo sapiens
  misc_RNA (1)...(19): siRNA sense strand
ggaaccaguaguuacaaug

SEQ ID NO: 2176026 - RNA, 19 nt, Homo sapiens
  misc_RNA (1)...(19): siRNA sense strand
uggauggaauucuucaaau

SEQ ID NO: 2176027 - RNA, 19 nt, Homo sapiens
  misc_RNA (1)...(19): siRNA sense strand
uaucaagccagccaaaugu

SEQ ID NO: 2176028 - RNA, 19 nt, Homo sapiens
  misc_RNA (1)...(19): siRNA sense strand
guccgacucugacuaucaa

SEQ ID NO: 2176029 - RNA, 19 nt, Homo sapiens
  misc_RNA (1)...(19): siRNA sense strand
gauguccgacucugacuau

SEQ ID NO: 2176030 - RNA, 19 nt, Homo sapiens
  misc_RNA (1)...(19): siRNA sense strand
uacaauguccuacuacaga

SEQ ID NO: 2176031 - RNA, 19 nt, Homo sapiens
  misc_RNA (1)...(19): siRNA sense strand
cacaugauaucucuguuac

SEQ ID NO: 2176032 - RNA, 19 nt, Homo sapiens
  misc_RNA (1)...(19): siRNA sense strand
ggaccauggccgauauaug

SEQ ID NO: 2176033 - RNA, 19 nt, Homo sapiens
  misc_RNA (1)...(19): siRNA sense strand
gaagcgcugcucacaguca

SEQ ID NO: 2176034 - RNA, 19 nt, Homo sapiens
  misc_RNA (1)...(19): siRNA sense strand
ccaauacaagaugggauua

SEQ ID NO: 2176035 - RNA, 19 nt, Homo sapiens
  misc_RNA (1)...(19): siRNA sense strand
ggacuagcaagcauucaca

SEQ ID NO: 2176036 - RNA, 19 nt, Homo sapiens
  misc_RNA (1)...(19): siRNA sense strand
gaagucuauucuaaaugca

SEQ ID NO: 2176037 - RNA, 19 nt, Homo sapiens
  misc_RNA (1)...(19): siRNA sense strand
guuacaauguccuacuaca

SEQ ID NO: 2176038 - RNA, 19 nt, Homo sapiens
  misc_RNA (1)...(19): siRNA sense strand
gaacacuuagagaagauca

SEQ ID NO: 2176039 - RNA, 19 nt, Homo sapiens
  misc_RNA (1)...(19): siRNA sense strand
acagagauaccauagacuu

SEQ ID NO: 2176040 - RNA, 19 nt, Homo sapiens
  misc_RNA (1)...(19): siRNA sense strand
ucaaauccuccgauacaga

SEQ ID NO: 2176041 - RNA, 19 nt, Homo sapiens
  misc_RNA (1)...(19): siRNA sense strand
gcaagcauucacaguguuc

SEQ ID NO: 2176042 - RNA, 19 nt, Homo sapiens
  misc_RNA (1)...(19): siRNA sense strand
ucaaugacaguaguaaaug

SEQ ID NO: 2176043 - RNA, 19 nt, Homo sapiens
  misc_RNA (1)...(19): siRNA sense strand
cuacagagcaaggaggaaa

SEQ ID NO: 2176044 - RNA, 19 nt, Homo sapiens
  misc_RNA (1)...(19): siRNA sense strand
gagauaccauagacuucca

SEQ ID NO: 2176045 - RNA, 19 nt, Homo sapiens
  misc_RNA (1)...(19): siRNA sense strand
caaagccucagcugucuag

SEQ ID NO: 2176046 - RNA, 19 nt, Homo sapiens
  misc_RNA (1)...(19): siRNA sense strand
agaagaucauggaagugaa

SEQ ID NO: 2176047 - RNA, 19 nt, Homo sapiens
  misc_RNA (1)...(19): siRNA sense strand
ugaagauguggaucgcuua

SEQ ID NO: 2176048 - RNA, 19 nt, Homo sapiens
  misc_RNA (1)...(19): siRNA sense strand
cuucaaauccuccgauaca

SEQ ID NO: 2176049 - RNA, 19 nt, Homo sapiens
  misc_RNA (1)...(19): siRNA sense strand
uuaguaaagaccagguaua

SEQ ID NO: 2176050 - RNA, 19 nt, Homo sapiens
  misc_RNA (1)...(19): siRNA sense strand
aaagauauuggcagguuug

SEQ ID NO: 2176051 - RNA, 19 nt, Homo sapiens
  misc_RNA (1)...(19): siRNA sense strand
aaacccagcaaaucuccua

SEQ ID NO: 2176052 - RNA, 19 nt, Homo sapiens
  misc_RNA (1)...(19): siRNA sense strand
ugacugcucucgggaaggu

SEQ ID NO: 2176053 - RNA, 19 nt, Homo sapiens
  misc_RNA (1)...(19): siRNA sense strand
cgacucugacuaucaaugu

SEQ ID NO: 2176054 - RNA, 19 nt, Homo sapiens
  misc_RNA (1)...(19): siRNA sense strand
ucacugaggaccugcuuuc

SEQ ID NO: 2176055 - RNA, 19 nt, Homo sapiens
  misc_RNA (1)...(19): siRNA sense strand
ugccaagcguauuagcuaa

SEQ ID NO: 2176056 - RNA, 19 nt, Homo sapiens
  misc_RNA (1)...(19): siRNA sense strand
gccaaagccucagcugucu

SEQ ID NO: 2176057 - RNA, 19 nt, Homo sapiens
  misc_RNA (1)...(19): siRNA sense strand
ggucaaguggugccauuuc

SEQ ID NO: 2176058 - RNA, 19 nt, Homo sapiens
  misc_RNA (1)...(19): siRNA sense strand
caaaucuccuaacacuucu

SEQ ID NO: 2176059 - RNA, 19 nt, Homo sapiens
  misc_RNA (1)...(19): siRNA sense strand
aagaggggauggacugaua

SEQ ID NO: 2176060 - RNA, 19 nt, Homo sapiens
  misc_RNA (1)...(19): siRNA sense strand
gauauauggaacacuuaga

SEQ ID NO: 2176061 - RNA, 19 nt, Homo sapiens
  misc_RNA (1)...(19): siRNA sense strand
gauacagagauaccauaga

SEQ ID NO: 2176062 - RNA, 19 nt, Homo sapiens
  misc_RNA (1)...(19): siRNA sense strand
gguauacuuggauggaauu

SEQ ID NO: 2176063 - RNA, 19 nt, Homo sapiens
  misc_RNA (1)...(19): siRNA sense strand
gaagauucauugaucauug

SEQ ID NO: 2176064 - RNA, 19 nt, Homo sapiens
  misc_RNA (1)...(19): siRNA sense strand
ccacgcaucugaccgauuu

SEQ ID NO: 2176065 - RNA, 19 nt, Homo sapiens
  misc_RNA (1)...(19): siRNA sense strand
gcaaaucuccuaacacuuc

SEQ ID NO: 2176066 - RNA, 19 nt, Homo sapiens
  misc_RNA (1)...(19): siRNA sense strand
gcauaguacugccaccuaa

SEQ ID NO: 2176067 - RNA, 19 nt, Homo sapiens
  misc_RNA (1)...(19): siRNA sense strand
gcagaagauucauugauca

SEQ ID NO: 2176068 - RNA, 19 nt, Homo sapiens
  misc_RNA (1)...(19): siRNA sense strand
guaaagaccagguauacuu

SEQ ID NO: 2176069 - RNA, 19 nt, Homo sapiens
  misc_RNA (1)...(19): siRNA sense strand
gcaucugaccgauuucuua

SEQ ID NO: 2176070 - RNA, 19 nt, Homo sapiens
  misc_RNA (1)...(19): siRNA sense strand
uaacacuucucguagcaaa

SEQ ID NO: 2176071 - RNA, 19 nt, Homo sapiens
  misc_RNA (1)...(19): siRNA sense strand
gcaggaccauggccgauau

SEQ ID NO: 2176072 - RNA, 19 nt, Homo sapiens
  misc_RNA (1)...(19): siRNA sense strand
cagcaaaucuccuaacacu

SEQ ID NO: 2176073 - RNA, 19 nt, Homo sapiens
  misc_RNA (1)...(19): siRNA sense strand
gagaagaucauggaaguga

SEQ ID NO: 2176074 - RNA, 19 nt, Homo sapiens
  misc_RNA (1)...(19): siRNA sense strand
ucgggaagguuucuuauga

SEQ ID NO: 2176075 - RNA, 19 nt, Homo sapiens
  misc_RNA (1)...(19): siRNA sense strand
ggauggaauucuucaaauc

SEQ ID NO: 2176076 - RNA, 19 nt, Homo sapiens
  misc_RNA (1)...(19): siRNA sense strand
gucaaguccuguaaaguuu

SEQ ID NO: 2176077 - RNA, 19 nt, Homo sapiens
  misc_RNA (1)...(19): siRNA sense strand
ggaacugaaagaucuuaua

SEQ ID NO: 2176078 - RNA, 19 nt, Homo sapiens
  misc_RNA (1)...(19): siRNA sense strand
cuacuacacuguuuaucaa

SEQ ID NO: 2176079 - RNA, 19 nt, Homo sapiens
  misc_RNA (1)...(19): siRNA sense strand
gagcuaaagccaaauaauc

SEQ ID NO: 2176080 - RNA, 19 nt, Homo sapiens
  misc_RNA (1)...(19): siRNA sense strand
gauauuggcagguuuguca

SEQ ID NO: 2176081 - RNA, 19 nt, Homo sapiens
  misc_RNA (1)...(19): siRNA sense strand
ggaagugaaugaacugacu

SEQ ID NO: 2176082 - RNA, 19 nt, Homo sapiens
  misc_RNA (1)...(19): siRNA sense strand
aagaugggauuauugugua

SEQ ID NO: 2176083 - RNA, 19 nt, Homo sapiens
  misc_RNA (1)...(19): siRNA sense strand
uagagaagaucauggaagu

SEQ ID NO: 2176084 - RNA, 19 nt, Homo sapiens
  misc_RNA (1)...(19): siRNA sense strand
caaccaggguguuuuagua

SEQ ID NO: 2176085 - RNA, 19 nt, Homo sapiens
  misc_RNA (1)...(19): siRNA sense strand
uaaagauauuggcagguuu

SEQ ID NO: 2176086 - RNA, 19 nt, Homo sapiens
  misc_RNA (1)...(19): siRNA sense strand
gaagauguggaucgcuuaa

SEQ ID NO: 2176087 - RNA, 19 nt, Homo sapiens
  misc_RNA (1)...(19): siRNA sense strand
gaaccaguaguuacaaugu

SEQ ID NO: 2176088 - RNA, 19 nt, Homo sapiens
  misc_RNA (1)...(19): siRNA sense strand
uuaaagauauuggcagguu

SEQ ID NO: 2176089 - RNA, 19 nt, Homo sapiens
  misc_RNA (1)...(19): siRNA sense strand
cagcagccauggaacaguu

SEQ ID NO: 2176090 - RNA, 19 nt, Homo sapiens
  misc_RNA (1)...(19): siRNA sense strand
ucacuggccugagcaagaa

SEQ ID NO: 2176091 - RNA, 19 nt, Homo sapiens
  misc_RNA (1)...(19): siRNA sense strand
aacaugagcuaaagccaaa

SEQ ID NO: 2176092 - RNA, 19 nt, Homo sapiens
  misc_RNA (1)...(19): siRNA sense strand
uacagggaauggcauagua

SEQ ID NO: 2176093 - RNA, 19 nt, Homo sapiens
  misc_RNA (1)...(19): siRNA sense strand
gccgauauauggaacacuu

SEQ ID NO: 2176094 - RNA, 19 nt, Homo sapiens
  misc_RNA (1)...(19): siRNA sense strand
uaccuacaauccucaguuu

SEQ ID NO: 2176095 - RNA, 19 nt, Homo sapiens
  misc_RNA (1)...(19): siRNA sense strand
caagaugggauuauugugu

SEQ ID NO: 2176096 - RNA, 19 nt, Homo sapiens
  misc_RNA (1)...(19): siRNA sense strand
uuaagcagauuguaguuca

SEQ ID NO: 2176097 - RNA, 19 nt, Homo sapiens
  misc_RNA (1)...(19): siRNA sense strand
aagaagcauuucacauuug

SEQ ID NO: 2176098 - RNA, 19 nt, Homo sapiens
  misc_RNA (1)...(19): siRNA sense strand
acagggaacugaaagaucu

SEQ ID NO: 2176099 - RNA, 19 nt, Homo sapiens
  misc_RNA (1)...(19): siRNA sense strand
uagcaagcauucacagugu

SEQ ID NO: 2176100 - RNA, 19 nt, Homo sapiens
  misc_RNA (1)...(19): siRNA sense strand
ccaccaacuuagagaaaga

SEQ ID NO: 2176101 - RNA, 19 nt, Homo sapiens
  misc_RNA (1)...(19): siRNA sense strand
acacaugauaucucuguua

SEQ ID NO: 2176102 - RNA, 19 nt, Homo sapiens
  misc_RNA (1)...(19): siRNA sense strand
gggaagguuucuuaugaag

SEQ ID NO: 2176103 - RNA, 19 nt, Homo sapiens
  misc_RNA (1)...(19): siRNA sense strand
gaagaucauggaagugaau

SEQ ID NO: 2176104 - RNA, 19 nt, Homo sapiens
  misc_RNA (1)...(19): siRNA sense strand
caugaaauagguacacauu

SEQ ID NO: 2176105 - RNA, 19 nt, Homo sapiens
  misc_RNA (1)...(19): siRNA sense strand
uuaaaaggauuggcaguua

SEQ ID NO: 2176106 - RNA, 19 nt, Homo sapiens
  misc_RNA (1)...(19): siRNA sense strand
gaaggacuagcaagcauuc

SEQ ID NO: 2176107 - RNA, 19 nt, Homo sapiens
  misc_RNA (1)...(19): siRNA sense strand
ggaaggacuagcaagcauu

SEQ ID NO: 2176108 - RNA, 19 nt, Homo sapiens
  misc_RNA (1)...(19): siRNA sense strand
uggaagcgcugcucacagu

SEQ ID NO: 2176109 - RNA, 19 nt, Homo sapiens
  misc_RNA (1)...(19): siRNA sense strand
uaaagaccagguauacuug

SEQ ID NO: 2176110 - RNA, 19 nt, Homo sapiens
  misc_RNA (1)...(19): siRNA sense strand
gcugaggcaugaaauaggu

SEQ ID NO: 2176111 - RNA, 19 nt, Homo sapiens
  misc_RNA (1)...(19): siRNA sense strand
caucugaccgauuucuuaa

SEQ ID NO: 2176112 - RNA, 19 nt, Homo sapiens
  misc_RNA (1)...(19): siRNA sense strand
ugucaaguccuguaaaguu

SEQ ID NO: 2176113 - RNA, 19 nt, Homo sapiens
  misc_RNA (1)...(19): siRNA sense strand
uauaaaacccaccaacuua

SEQ ID NO: 2176114 - RNA, 19 nt, Homo sapiens
  misc_RNA (1)...(19): siRNA sense strand
auacuuggauggaauucuu

SEQ ID NO: 2176115 - RNA, 19 nt, Homo sapiens
  misc_RNA (1)...(19): siRNA sense strand
ucaaaucugacuauaccua

SEQ ID NO: 2176116 - RNA, 19 nt, Homo sapiens
  misc_RNA (1)...(19): siRNA sense strand
ccacugcacgugagcauug

SEQ ID NO: 2176117 - RNA, 19 nt, Homo sapiens
  misc_RNA (1)...(19): siRNA sense strand
cgggaagguuucuuaugaa

SEQ ID NO: 2176118 - RNA, 19 nt, Homo sapiens
  misc_RNA (1)...(19): siRNA sense strand
ccuacaauccucaguuuga

SEQ ID NO: 2176119 - RNA, 19 nt, Homo sapiens
  misc_RNA (1)...(19): siRNA sense strand
gauuguaguucaucucacu

SEQ ID NO: 2176120 - RNA, 19 nt, Homo sapiens
  misc_RNA (1)...(19): siRNA sense strand
agaagcauuucacauuugu

SEQ ID NO: 2176121 - RNA, 19 nt, Homo sapiens
  misc_RNA (1)...(19): siRNA sense strand
ugcagaagauucauugauc

SEQ ID NO: 2176122 - RNA, 19 nt, Homo sapiens
  misc_RNA (1)...(19): siRNA sense strand
caaugacaguaguaaaugg

SEQ ID NO: 2176123 - RNA, 19 nt, Homo sapiens
  misc_RNA (1)...(19): siRNA sense strand
auacagagauaccauagac

SEQ ID NO: 2176124 - RNA, 19 nt, Homo sapiens
  misc_RNA (1)...(19): siRNA sense strand
caugagcuaaagccaaaua

SEQ ID NO: 2176125 - RNA, 19 nt, Homo sapiens
  misc_RNA (1)...(19): siRNA sense strand
ggaaccaguaguuacaaug

SEQ ID NO: 2176126 - RNA, 19 nt, Homo sapiens
  misc_RNA (1)...(19): siRNA sense strand
uggauggaauucuucaaau

SEQ ID NO: 2176127 - RNA, 19 nt, Homo sapiens
  misc_RNA (1)...(19): siRNA sense strand
uaucaagccagccaaaugu

SEQ ID NO: 2176128 - RNA, 19 nt, Homo sapiens
  misc_RNA (1)...(19): siRNA sense strand
guccgacucugacuaucaa

SEQ ID NO: 2176129 - RNA, 19 nt, Homo sapiens
  misc_RNA (1)...(19): siRNA sense strand
gauguccgacucugacuau

SEQ ID NO: 2176130 - RNA, 19 nt, Homo sapiens
  misc_RNA (1)...(19): siRNA sense strand
uacaauguccuacuacaga

SEQ ID NO: 2176131 - RNA, 19 nt, Homo sapiens
  misc_RNA (1)...(19): siRNA sense strand
cacaugauaucucuguuac

SEQ ID NO: 2176132 - RNA, 19 nt, Homo sapiens
  misc_RNA (1)...(19): siRNA sense strand
ggaccauggccgauauaug

SEQ ID NO: 2176133 - RNA, 19 nt, Homo sapiens
  misc_RNA (1)...(19): siRNA sense strand
gaagcgcugcucacaguca

SEQ ID NO: 2176134 - RNA, 19 nt, Homo sapiens
  misc_RNA (1)...(19): siRNA sense strand
ccaauacaagaugggauua

SEQ ID NO: 2176135 - RNA, 19 nt, Homo sapiens
  misc_RNA (1)...(19): siRNA sense strand
ggacuagcaagcauucaca

SEQ ID NO: 2176136 - RNA, 19 nt, Homo sapiens
  misc_RNA (1)...(19): siRNA sense strand
gaagucuauucuaaaugca

SEQ ID NO: 2176137 - RNA, 19 nt, Homo sapiens
  misc_RNA (1)...(19): siRNA sense strand
guuacaauguccuacuaca

SEQ ID NO: 2176138 - RNA, 19 nt, Homo sapiens
  misc_RNA (1)...(19): siRNA sense strand
gaacacuuagagaagauca

SEQ ID NO: 2176139 - RNA, 19 nt, Homo sapiens
  misc_RNA (1)...(19): siRNA sense strand
acagagauaccauagacuu

SEQ ID NO: 2176140 - RNA, 19 nt, Homo sapiens
  misc_RNA (1)...(19): siRNA sense strand
ucaaauccuccgauacaga

SEQ ID NO: 2176141 - RNA, 19 nt, Homo sapiens
  misc_RNA (1)...(19): siRNA sense strand
gcaagcauucacaguguuc

SEQ ID NO: 2176142 - RNA, 19 nt, Homo sapiens
  misc_RNA (1)...(19): siRNA sense strand
ucaaugacaguaguaaaug

SEQ ID NO: 2176143 - RNA, 19 nt, Homo sapiens
  misc_RNA (1)...(19): siRNA sense strand
cuacagagcaaggaggaaa

SEQ ID NO: 2176144 - RNA, 19 nt, Homo sapiens
  misc_RNA (1)...(19): siRNA sense strand
gagauaccauagacuucca

SEQ ID NO: 2176145 - RNA, 19 nt, Homo sapiens
  misc_RNA (1)...(19): siRNA sense strand
caaagccucagcugucuag

SEQ ID NO: 2176146 - RNA, 19 nt, Homo sapiens
  misc_RNA (1)...(19): siRNA sense strand
agaagaucauggaagugaa

SEQ ID NO: 2176147 - RNA, 19 nt, Homo sapiens
  misc_RNA (1)...(19): siRNA sense strand
ugaagauguggaucgcuua

SEQ ID NO: 2176148 - RNA, 19 nt, Homo sapiens
  misc_RNA (1)...(19): siRNA sense strand
cuucaaauccuccgauaca

SEQ ID NO: 2176149 - RNA, 19 nt, Homo sapiens
  misc_RNA (1)...(19): siRNA sense strand
uuaguaaagaccagguaua

SEQ ID NO: 2176150 - RNA, 19 nt, Homo sapiens
  misc_RNA (1)...(19): siRNA sense strand
aaagauauuggcagguuug

SEQ ID NO: 2176151 - RNA, 19 nt, Homo sapiens
  misc_RNA (1)...(19): siRNA sense strand
aaacccagcaaaucuccua

SEQ ID NO: 2176152 - RNA, 19 nt, Homo sapiens
  misc_RNA (1)...(19): siRNA sense strand
ugacugcucucgggaaggu

SEQ ID NO: 2176153 - RNA, 19 nt, Homo sapiens
  misc_RNA (1)...(19): siRNA sense strand
cgacucugacuaucaaugu

SEQ ID NO: 2176154 - RNA, 19 nt, Homo sapiens
  misc_RNA (1)...(19): siRNA sense strand
ucacugaggaccugcuuuc

SEQ ID NO: 2176155 - RNA, 19 nt, Homo sapiens
  misc_RNA (1)...(19): siRNA sense strand
ugccaagcguauuagcuaa

SEQ ID NO: 2176156 - RNA, 19 nt, Homo sapiens
  misc_RNA (1)...(19): siRNA sense strand
gccaaagccucagcugucu

SEQ ID NO: 2176157 - RNA, 19 nt, Homo sapiens
  misc_RNA (1)...(19): siRNA sense strand
ggucaaguggugccauuuc

SEQ ID NO: 2176158 - RNA, 19 nt, Homo sapiens
  misc_RNA (1)...(19): siRNA sense strand
caaaucuccuaacacuucu

SEQ ID NO: 2176159 - RNA, 19 nt, Homo sapiens
  misc_RNA (1)...(19): siRNA sense strand
aagaggggauggacugaua

SEQ ID NO: 2176160 - RNA, 19 nt, Homo sapiens
  misc_RNA (1)...(19): siRNA sense strand
gauauauggaacacuuaga

SEQ ID NO: 2176161 - RNA, 19 nt, Homo sapiens
  misc_RNA (1)...(19): siRNA sense strand
gauacagagauaccauaga

SEQ ID NO: 2176162 - RNA, 19 nt, Homo sapiens
  misc_RNA (1)...(19): siRNA sense strand
gguauacuuggauggaauu

SEQ ID NO: 2176163 - RNA, 19 nt, Homo sapiens
  misc_RNA (1)...(19): siRNA sense strand
gagcuuggcugcagaaacu

SEQ ID NO: 2176164 - RNA, 19 nt, Homo sapiens
  misc_RNA (1)...(19): siRNA sense strand
cccagaaccuccucaaguu

SEQ ID NO: 2176165 - RNA, 19 nt, Homo sapiens
  misc_RNA (1)...(19): siRNA sense strand
ggcgagagcugagccgaaa

SEQ ID NO: 2176166 - RNA, 19 nt, Homo sapiens
  misc_RNA (1)...(19): siRNA sense strand
gaagagcuuggcugcagaa

SEQ ID NO: 2176167 - RNA, 19 nt, Homo sapiens
  misc_RNA (1)...(19): siRNA sense strand
ggaaaugggccuggaagag

SEQ ID NO: 2176168 - RNA, 19 nt, Homo sapiens
  misc_RNA (1)...(19): siRNA sense strand
gcccagaaccuccucaagu

SEQ ID NO: 2176169 - RNA, 19 nt, Homo sapiens
  misc_RNA (1)...(19): siRNA sense strand
gguggccucuccaggauca

SEQ ID NO: 2176170 - RNA, 19 nt, Homo sapiens
  misc_RNA (1)...(19): siRNA sense strand
caaccucuuuggacucagu

SEQ ID NO: 2176171 - RNA, 19 nt, Homo sapiens
  misc_RNA (1)...(19): siRNA sense strand
ggcugggccuccucaaguu

SEQ ID NO: 2176172 - RNA, 19 nt, Homo sapiens
  misc_RNA (1)...(19): siRNA sense strand
ccagaaccuccucaaguug

SEQ ID NO: 2176173 - RNA, 19 nt, Homo sapiens
  misc_RNA (1)...(19): siRNA sense strand
gcccaaaucguccugaagu

SEQ ID NO: 2176174 - RNA, 19 nt, Homo sapiens
  misc_RNA (1)...(19): siRNA sense strand
aacaaggucuuuggacuca

SEQ ID NO: 2176175 - RNA, 19 nt, Homo sapiens
  misc_RNA (1)...(19): siRNA sense strand
cgagagcugagccgaaaga

SEQ ID NO: 2176176 - RNA, 19 nt, Homo sapiens
  misc_RNA (1)...(19): siRNA sense strand
ucaagucggccuggaaaug

SEQ ID NO: 2176177 - RNA, 19 nt, Homo sapiens
  misc_RNA (1)...(19): siRNA sense strand
caacuccggccucccaaca

SEQ ID NO: 2176178 - RNA, 19 nt, Homo sapiens
  misc_RNA (1)...(19): siRNA sense strand
gcagaaacuuuggggucua

SEQ ID NO: 2176179 - RNA, 19 nt, Homo sapiens
  misc_RNA (1)...(19): siRNA sense strand
ccucaagucggccuggaaa

SEQ ID NO: 2176180 - RNA, 19 nt, Homo sapiens
  misc_RNA (1)...(19): siRNA sense strand
ccuaagucguccucaaguc

SEQ ID NO: 2176181 - RNA, 19 nt, Homo sapiens
  misc_RNA (1)...(19): siRNA sense strand
cugccucaguggccucuuu

SEQ ID NO: 2176182 - RNA, 19 nt, Homo sapiens
  misc_RNA (1)...(19): siRNA sense strand
caagucggccuggaaaugg

SEQ ID NO: 2176183 - RNA, 19 nt, Homo sapiens
  misc_RNA (1)...(19): siRNA sense strand
gagaugcagccaggaggaa

SEQ ID NO: 2176184 - RNA, 19 nt, Homo sapiens
  misc_RNA (1)...(19): siRNA sense strand
ccugguaggcccacaacuu

SEQ ID NO: 2176185 - RNA, 19 nt, Homo sapiens
  misc_RNA (1)...(19): siRNA sense strand
aacaaccucuuuggacuca

SEQ ID NO: 2176186 - RNA, 19 nt, Homo sapiens
  misc_RNA (1)...(19): siRNA sense strand
gcaaaacuuccucgaguca

SEQ ID NO: 2176187 - RNA, 19 nt, Homo sapiens
  misc_RNA (1)...(19): siRNA sense strand
gagcuuggcugcagaaacu

SEQ ID NO: 2176188 - RNA, 19 nt, Homo sapiens
  misc_RNA (1)...(19): siRNA sense strand
ggcgagagcugagccgaaa

SEQ ID NO: 2176189 - RNA, 19 nt, Homo sapiens
  misc_RNA (1)...(19): siRNA sense strand
gaagagcuuggcugcagaa

SEQ ID NO: 2176190 - RNA, 19 nt, Homo sapiens
  misc_RNA (1)...(19): siRNA sense strand
ggcugggccuccucaaguu

SEQ ID NO: 2176191 - RNA, 19 nt, Homo sapiens
  misc_RNA (1)...(19): siRNA sense strand
gcccaaaucguccugaagu

SEQ ID NO: 2176192 - RNA, 19 nt, Homo sapiens
  misc_RNA (1)...(19): siRNA sense strand
gcagaaacuuuggggucua

SEQ ID NO: 2176193 - RNA, 19 nt, Homo sapiens
  misc_RNA (1)...(19): siRNA sense strand
ccuaagucguccucaaguc

SEQ ID NO: 2176194 - RNA, 19 nt, Homo sapiens
  misc_RNA (1)...(19): siRNA sense strand
cugccucaguggccucuuu

SEQ ID NO: 2176195 - RNA, 19 nt, Homo sapiens
  misc_RNA (1)...(19): siRNA sense strand
gagaugcagccaggaggaa

SEQ ID NO: 2176196 - RNA, 19 nt, Homo sapiens
  misc_RNA (1)...(19): siRNA sense strand
ccugguaggcccacaacuu

SEQ ID NO: 2176197 - RNA, 19 nt, Homo sapiens
  misc_RNA (1)...(19): siRNA sense strand
gcaaaacuuccucgaguca

SEQ ID NO: 2176198 - RNA, 19 nt, Homo sapiens
  misc_RNA (1)...(19): siRNA sense strand
ccacgggacugcauuauaa

SEQ ID NO: 2176199 - RNA, 19 nt, Homo sapiens
  misc_RNA (1)...(19): siRNA sense strand
gaccaacccugaugagcua

SEQ ID NO: 2176200 - RNA, 19 nt, Homo sapiens
  misc_RNA (1)...(19): siRNA sense strand
gcuuugaccuggagucgua

SEQ ID NO: 2176201 - RNA, 19 nt, Homo sapiens
  misc_RNA (1)...(19): siRNA sense strand
gccaggagcugagccagua

SEQ ID NO: 2176202 - RNA, 19 nt, Homo sapiens
  misc_RNA (1)...(19): siRNA sense strand
uacaagacccugauaauga

SEQ ID NO: 2176203 - RNA, 19 nt, Homo sapiens
  misc_RNA (1)...(19): siRNA sense strand
gaacugaccaacccugaug

SEQ ID NO: 2176204 - RNA, 19 nt, Homo sapiens
  misc_RNA (1)...(19): siRNA sense strand
caugaacccuacuggcaua

SEQ ID NO: 2176205 - RNA, 19 nt, Homo sapiens
  misc_RNA (1)...(19): siRNA sense strand
gcaagacccuccacugacu

SEQ ID NO: 2176206 - RNA, 19 nt, Homo sapiens
  misc_RNA (1)...(19): siRNA sense strand
ggaaugacacccuuguaug

SEQ ID NO: 2176207 - RNA, 19 nt, Homo sapiens
  misc_RNA (1)...(19): siRNA sense strand
cagcgucccuuacauguca

SEQ ID NO: 2176208 - RNA, 19 nt, Homo sapiens
  misc_RNA (1)...(19): siRNA sense strand
gaacuuucccugaguccuu

SEQ ID NO: 2176209 - RNA, 19 nt, Homo sapiens
  misc_RNA (1)...(19): siRNA sense strand
cugaugagcuacuguccua

SEQ ID NO: 2176210 - RNA, 19 nt, Homo sapiens
  misc_RNA (1)...(19): siRNA sense strand
gcacugcaucaccaagaua

SEQ ID NO: 2176211 - RNA, 19 nt, Homo sapiens
  misc_RNA (1)...(19): siRNA sense strand
cgaccugcuuucucuguuu

SEQ ID NO: 2176212 - RNA, 19 nt, Homo sapiens
  misc_RNA (1)...(19): siRNA sense strand
ucaugacugucgccacaua

SEQ ID NO: 2176213 - RNA, 19 nt, Homo sapiens
  misc_RNA (1)...(19): siRNA sense strand
ggaagccagugcccgugaa

SEQ ID NO: 2176214 - RNA, 19 nt, Homo sapiens
  misc_RNA (1)...(19): siRNA sense strand
gaaugacacccuuguaugc

SEQ ID NO: 2176215 - RNA, 19 nt, Homo sapiens
  misc_RNA (1)...(19): siRNA sense strand
caacaaugacgaccugcuu

SEQ ID NO: 2176216 - RNA, 19 nt, Homo sapiens
  misc_RNA (1)...(19): siRNA sense strand
ggagguguccugugugcaa

SEQ ID NO: 2176217 - RNA, 19 nt, Homo sapiens
  misc_RNA (1)...(19): siRNA sense strand
gaccugcuuucucuguuug

SEQ ID NO: 2176218 - RNA, 19 nt, Homo sapiens
  misc_RNA (1)...(19): siRNA sense strand
cuacaagacccugauaaug

SEQ ID NO: 2176219 - RNA, 19 nt, Homo sapiens
  misc_RNA (1)...(19): siRNA sense strand
ccagcagccuccugacuuc

SEQ ID NO: 2176220 - RNA, 19 nt, Homo sapiens
  misc_RNA (1)...(19): siRNA sense strand
acaagacccugauaaugag

SEQ ID NO: 2176221 - RNA, 19 nt, Homo sapiens
  misc_RNA (1)...(19): siRNA sense strand
acacggugaugguucauuc

SEQ ID NO: 2176222 - RNA, 19 nt, Homo sapiens
  misc_RNA (1)...(19): siRNA sense strand
gagcguggcgacaacaaga

SEQ ID NO: 2176223 - RNA, 19 nt, Homo sapiens
  misc_RNA (1)...(19): siRNA sense strand
cacccgaccucccuacgaa

SEQ ID NO: 2176224 - RNA, 19 nt, Homo sapiens
  misc_RNA (1)...(19): siRNA sense strand
acaagccacucuaccugaa

SEQ ID NO: 2176225 - RNA, 19 nt, Homo sapiens
  misc_RNA (1)...(19): siRNA sense strand
caacaagaccucgcacaag

SEQ ID NO: 2176226 - RNA, 19 nt, Homo sapiens
  misc_RNA (1)...(19): siRNA sense strand
gagcacugcaucaccaaga

SEQ ID NO: 2176227 - RNA, 19 nt, Homo sapiens
  misc_RNA (1)...(19): siRNA sense strand
gcaaggaggccaguaugca

SEQ ID NO: 2176228 - RNA, 19 nt, Homo sapiens
  misc_RNA (1)...(19): siRNA sense strand
ugauuuacauucagaacuc

SEQ ID NO: 2176229 - RNA, 19 nt, Homo sapiens
  misc_RNA (1)...(19): siRNA sense strand
caagauaaagcggaacuuc

SEQ ID NO: 2176230 - RNA, 19 nt, Homo sapiens
  misc_RNA (1)...(19): siRNA sense strand
gcagcagcgucccuuacau

SEQ ID NO: 2176231 - RNA, 19 nt, Homo sapiens
  misc_RNA (1)...(19): siRNA sense strand
ucccuuacaugucaccaaa

SEQ ID NO: 2176232 - RNA, 19 nt, Homo sapiens
  misc_RNA (1)...(19): siRNA sense strand
gcauccugauuuacauuca

SEQ ID NO: 2176233 - RNA, 19 nt, Homo sapiens
  misc_RNA (1)...(19): siRNA sense strand
gcucaugcccagcgugaug

SEQ ID NO: 2176234 - RNA, 19 nt, Homo sapiens
  misc_RNA (1)...(19): siRNA sense strand
ggagguggaccaguacaug

SEQ ID NO: 2176235 - RNA, 19 nt, Homo sapiens
  misc_RNA (1)...(19): siRNA sense strand
gcaggaaugacacccuugu

SEQ ID NO: 2176236 - RNA, 19 nt, Homo sapiens
  misc_RNA (1)...(19): siRNA sense strand
caagcagcagcgucccuua

SEQ ID NO: 2176237 - RNA, 19 nt, Homo sapiens
  misc_RNA (1)...(19): siRNA sense strand
gaggucaagucucccuucu

SEQ ID NO: 2176238 - RNA, 19 nt, Homo sapiens
  misc_RNA (1)...(19): siRNA sense strand
cuaucaaggugucccugaa

SEQ ID NO: 2176239 - RNA, 19 nt, Homo sapiens
  misc_RNA (1)...(19): siRNA sense strand
agucguaccugcagcucaa

SEQ ID NO: 2176240 - RNA, 19 nt, Homo sapiens
  misc_RNA (1)...(19): siRNA sense strand
cugcaagacccuccacuga

SEQ ID NO: 2176241 - RNA, 19 nt, Homo sapiens
  misc_RNA (1)...(19): siRNA sense strand
uuacaugucaccaaaccaa

SEQ ID NO: 2176242 - RNA, 19 nt, Homo sapiens
  misc_RNA (1)...(19): siRNA sense strand
gaugguucauucgcauaug

SEQ ID NO: 2176243 - RNA, 19 nt, Homo sapiens
  misc_RNA (1)...(19): siRNA sense strand
cagcagcgucccuuacaug

SEQ ID NO: 2176244 - RNA, 19 nt, Homo sapiens
  misc_RNA (1)...(19): siRNA sense strand
ggguggagcagacagcuau

SEQ ID NO: 2176245 - RNA, 19 nt, Homo sapiens
  misc_RNA (1)...(19): siRNA sense strand
gaccugcucccggaacuga

SEQ ID NO: 2176246 - RNA, 19 nt, Homo sapiens
  misc_RNA (1)...(19): siRNA sense strand
gccacacggugaugguuca

SEQ ID NO: 2176247 - RNA, 19 nt, Homo sapiens
  misc_RNA (1)...(19): siRNA sense strand
gaccuggagcugcaauuca

SEQ ID NO: 2176248 - RNA, 19 nt, Homo sapiens
  misc_RNA (1)...(19): siRNA sense strand
gcaacaccauccagaucac

SEQ ID NO: 2176249 - RNA, 19 nt, Homo sapiens
  misc_RNA (1)...(19): siRNA sense strand
acaacaagaccucgcacaa

SEQ ID NO: 2176250 - RNA, 19 nt, Homo sapiens
  misc_RNA (1)...(19): siRNA sense strand
cacgaggaccggcagauga

SEQ ID NO: 2176251 - RNA, 19 nt, Homo sapiens
  misc_RNA (1)...(19): siRNA sense strand
cacucuaccugaagcaugu

SEQ ID NO: 2176252 - RNA, 19 nt, Homo sapiens
  misc_RNA (1)...(19): siRNA sense strand
ugcugggcauccugauuua

SEQ ID NO: 2176253 - RNA, 19 nt, Homo sapiens
  misc_RNA (1)...(19): siRNA sense strand
ugucuguggucacuacugu

SEQ ID NO: 2176254 - RNA, 19 nt, Homo sapiens
  misc_RNA (1)...(19): siRNA sense strand
gcuguaagcaaccaugucu

SEQ ID NO: 2176255 - RNA, 19 nt, Homo sapiens
  misc_RNA (1)...(19): siRNA sense strand
caggaaugacacccuugua

SEQ ID NO: 2176256 - RNA, 19 nt, Homo sapiens
  misc_RNA (1)...(19): siRNA sense strand
gggcauccugauuuacauu

SEQ ID NO: 2176257 - RNA, 19 nt, Homo sapiens
  misc_RNA (1)...(19): siRNA sense strand
aaaccaagaggucaagucu

SEQ ID NO: 2176258 - RNA, 19 nt, Homo sapiens
  misc_RNA (1)...(19): siRNA sense strand
ucaacuccuugcacucauc

SEQ ID NO: 2176259 - RNA, 19 nt, Homo sapiens
  misc_RNA (1)...(19): siRNA sense strand
ggaacugaccaacccugau

SEQ ID NO: 2176260 - RNA, 19 nt, Homo sapiens
  misc_RNA (1)...(19): siRNA sense strand
ccacauacagugcuuugac

SEQ ID NO: 2176261 - RNA, 19 nt, Homo sapiens
  misc_RNA (1)...(19): siRNA sense strand
ggagcagacagcuaucaag

SEQ ID NO: 2176262 - RNA, 19 nt, Homo sapiens
  misc_RNA (1)...(19): siRNA sense strand
gcugcagggccuccucaaa

SEQ ID NO: 2176263 - RNA, 19 nt, Homo sapiens
  misc_RNA (1)...(19): siRNA sense strand
uguaagcaaccaugucuuc

SEQ ID NO: 2176264 - RNA, 19 nt, Homo sapiens
  misc_RNA (1)...(19): siRNA sense strand
aggaaugacacccuuguau

SEQ ID NO: 2176265 - RNA, 19 nt, Homo sapiens
  misc_RNA (1)...(19): siRNA sense strand
uguccugugugcaacaaga

SEQ ID NO: 2176266 - RNA, 19 nt, Homo sapiens
  misc_RNA (1)...(19): siRNA sense strand
accugcagcucaacuguga

SEQ ID NO: 2176267 - RNA, 19 nt, Homo sapiens
  misc_RNA (1)...(19): siRNA sense strand
aagauaaagcggaacuuca

SEQ ID NO: 2176268 - RNA, 19 nt, Homo sapiens
  misc_RNA (1)...(19): siRNA sense strand
ucuacaagacccugauaau

SEQ ID NO: 2176269 - RNA, 19 nt, Homo sapiens
  misc_RNA (1)...(19): siRNA sense strand
cccacgggacugcauuaua

SEQ ID NO: 2176270 - RNA, 19 nt, Homo sapiens
  misc_RNA (1)...(19): siRNA sense strand
ccagcgugauggagaugau

SEQ ID NO: 2176271 - RNA, 19 nt, Homo sapiens
  misc_RNA (1)...(19): siRNA sense strand
ugcccgaggucaugacugu

SEQ ID NO: 2176272 - RNA, 19 nt, Homo sapiens
  misc_RNA (1)...(19): siRNA sense strand
ccucaacuccuugcacuca

SEQ ID NO: 2176273 - RNA, 19 nt, Homo sapiens
  misc_RNA (1)...(19): siRNA sense strand
augaggagaucaccaucga

SEQ ID NO: 2176274 - RNA, 19 nt, Homo sapiens
  misc_RNA (1)...(19): siRNA sense strand
acuuggagguguccugugu

SEQ ID NO: 2176275 - RNA, 19 nt, Homo sapiens
  misc_RNA (1)...(19): siRNA sense strand
caucgagcguggcgacaac

SEQ ID NO: 2176276 - RNA, 19 nt, Homo sapiens
  misc_RNA (1)...(19): siRNA sense strand
accuggagcugcaauucaa

SEQ ID NO: 2176277 - RNA, 19 nt, Homo sapiens
  misc_RNA (1)...(19): siRNA sense strand
gcacaaccuggcuguaagc

SEQ ID NO: 2176278 - RNA, 19 nt, Homo sapiens
  misc_RNA (1)...(19): siRNA sense strand
ccacgggacugcauuauaa

SEQ ID NO: 2176279 - RNA, 19 nt, Homo sapiens
  misc_RNA (1)...(19): siRNA sense strand
gaccaacccugaugagcua

SEQ ID NO: 2176280 - RNA, 19 nt, Homo sapiens
  misc_RNA (1)...(19): siRNA sense strand
gcuuugaccuggagucgua

SEQ ID NO: 2176281 - RNA, 19 nt, Homo sapiens
  misc_RNA (1)...(19): siRNA sense strand
gccaggagcugagccagua

SEQ ID NO: 2176282 - RNA, 19 nt, Homo sapiens
  misc_RNA (1)...(19): siRNA sense strand
uacaagacccugauaauga

SEQ ID NO: 2176283 - RNA, 19 nt, Homo sapiens
  misc_RNA (1)...(19): siRNA sense strand
gaacugaccaacccugaug

SEQ ID NO: 2176284 - RNA, 19 nt, Homo sapiens
  misc_RNA (1)...(19): siRNA sense strand
caugaacccuacuggcaua

SEQ ID NO: 2176285 - RNA, 19 nt, Homo sapiens
  misc_RNA (1)...(19): siRNA sense strand
gcaagacccuccacugacu

SEQ ID NO: 2176286 - RNA, 19 nt, Homo sapiens
  misc_RNA (1)...(19): siRNA sense strand
ggaaugacacccuuguaug

SEQ ID NO: 2176287 - RNA, 19 nt, Homo sapiens
  misc_RNA (1)...(19): siRNA sense strand
cagcgucccuuacauguca

SEQ ID NO: 2176288 - RNA, 19 nt, Homo sapiens
  misc_RNA (1)...(19): siRNA sense strand
gaacuuucccugaguccuu

SEQ ID NO: 2176289 - RNA, 19 nt, Homo sapiens
  misc_RNA (1)...(19): siRNA sense strand
cugaugagcuacuguccua

SEQ ID NO: 2176290 - RNA, 19 nt, Homo sapiens
  misc_RNA (1)...(19): siRNA sense strand
gcacugcaucaccaagaua

SEQ ID NO: 2176291 - RNA, 19 nt, Homo sapiens
  misc_RNA (1)...(19): siRNA sense strand
cgaccugcuuucucuguuu

SEQ ID NO: 2176292 - RNA, 19 nt, Homo sapiens
  misc_RNA (1)...(19): siRNA sense strand
ucaugacugucgccacaua

SEQ ID NO: 2176293 - RNA, 19 nt, Homo sapiens
  misc_RNA (1)...(19): siRNA sense strand
ggaagccagugcccgugaa

SEQ ID NO: 2176294 - RNA, 19 nt, Homo sapiens
  misc_RNA (1)...(19): siRNA sense strand
gaaugacacccuuguaugc

SEQ ID NO: 2176295 - RNA, 19 nt, Homo sapiens
  misc_RNA (1)...(19): siRNA sense strand
caacaaugacgaccugcuu

SEQ ID NO: 2176296 - RNA, 19 nt, Homo sapiens
  misc_RNA (1)...(19): siRNA sense strand
ggagguguccugugugcaa

SEQ ID NO: 2176297 - RNA, 19 nt, Homo sapiens
  misc_RNA (1)...(19): siRNA sense strand
gaccugcuuucucuguuug

SEQ ID NO: 2176298 - RNA, 19 nt, Homo sapiens
  misc_RNA (1)...(19): siRNA sense strand
cuacaagacccugauaaug

SEQ ID NO: 2176299 - RNA, 19 nt, Homo sapiens
  misc_RNA (1)...(19): siRNA sense strand
ccagcagccuccugacuuc

SEQ ID NO: 2176300 - RNA, 19 nt, Homo sapiens
  misc_RNA (1)...(19): siRNA sense strand
acaagacccugauaaugag

SEQ ID NO: 2176301 - RNA, 19 nt, Homo sapiens
  misc_RNA (1)...(19): siRNA sense strand
acacggugaugguucauuc

SEQ ID NO: 2176302 - RNA, 19 nt, Homo sapiens
  misc_RNA (1)...(19): siRNA sense strand
gagcguggcgacaacaaga

SEQ ID NO: 2176303 - RNA, 19 nt, Homo sapiens
  misc_RNA (1)...(19): siRNA sense strand
cacccgaccucccuacgaa

SEQ ID NO: 2176304 - RNA, 19 nt, Homo sapiens
  misc_RNA (1)...(19): siRNA sense strand
acaagccacucuaccugaa

SEQ ID NO: 2176305 - RNA, 19 nt, Homo sapiens
  misc_RNA (1)...(19): siRNA sense strand
caacaagaccucgcacaag

SEQ ID NO: 2176306 - RNA, 19 nt, Homo sapiens
  misc_RNA (1)...(19): siRNA sense strand
gagcacugcaucaccaaga

SEQ ID NO: 2176307 - RNA, 19 nt, Homo sapiens
  misc_RNA (1)...(19): siRNA sense strand
gcaaggaggccaguaugca

SEQ ID NO: 2176308 - RNA, 19 nt, Homo sapiens
  misc_RNA (1)...(19): siRNA sense strand
ugauuuacauucagaacuc

SEQ ID NO: 2176309 - RNA, 19 nt, Homo sapiens
  misc_RNA (1)...(19): siRNA sense strand
caagauaaagcggaacuuc

SEQ ID NO: 2176310 - RNA, 19 nt, Homo sapiens
  misc_RNA (1)...(19): siRNA sense strand
gcagcagcgucccuuacau

SEQ ID NO: 2176311 - RNA, 19 nt, Homo sapiens
  misc_RNA (1)...(19): siRNA sense strand
ucccuuacaugucaccaaa

SEQ ID NO: 2176312 - RNA, 19 nt, Homo sapiens
  misc_RNA (1)...(19): siRNA sense strand
gcauccugauuuacauuca

SEQ ID NO: 2176313 - RNA, 19 nt, Homo sapiens
  misc_RNA (1)...(19): siRNA sense strand
gcucaugcccagcgugaug

SEQ ID NO: 2176314 - RNA, 19 nt, Homo sapiens
  misc_RNA (1)...(19): siRNA sense strand
ggagguggaccaguacaug

SEQ ID NO: 2176315 - RNA, 19 nt, Homo sapiens
  misc_RNA (1)...(19): siRNA sense strand
gcaggaaugacacccuugu

SEQ ID NO: 2176316 - RNA, 19 nt, Homo sapiens
  misc_RNA (1)...(19): siRNA sense strand
caagcagcagcgucccuua

SEQ ID NO: 2176317 - RNA, 19 nt, Homo sapiens
  misc_RNA (1)...(19): siRNA sense strand
gaggucaagucucccuucu

SEQ ID NO: 2176318 - RNA, 19 nt, Homo sapiens
  misc_RNA (1)...(19): siRNA sense strand
cuaucaaggugucccugaa

SEQ ID NO: 2176319 - RNA, 19 nt, Homo sapiens
  misc_RNA (1)...(19): siRNA sense strand
agucguaccugcagcucaa

SEQ ID NO: 2176320 - RNA, 19 nt, Homo sapiens
  misc_RNA (1)...(19): siRNA sense strand
cugcaagacccuccacuga

SEQ ID NO: 2176321 - RNA, 19 nt, Homo sapiens
  misc_RNA (1)...(19): siRNA sense strand
uuacaugucaccaaaccaa

SEQ ID NO: 2176322 - RNA, 19 nt, Homo sapiens
  misc_RNA (1)...(19): siRNA sense strand
gaugguucauucgcauaug

SEQ ID NO: 2176323 - RNA, 19 nt, Homo sapiens
  misc_RNA (1)...(19): siRNA sense strand
cagcagcgucccuuacaug

SEQ ID NO: 2176324 - RNA, 19 nt, Homo sapiens
  misc_RNA (1)...(19): siRNA sense strand
ggguggagcagacagcuau

SEQ ID NO: 2176325 - RNA, 19 nt, Homo sapiens
  misc_RNA (1)...(19): siRNA sense strand
gaccugcucccggaacuga

SEQ ID NO: 2176326 - RNA, 19 nt, Homo sapiens
  misc_RNA (1)...(19): siRNA sense strand
gccacacggugaugguuca

SEQ ID NO: 2176327 - RNA, 19 nt, Homo sapiens
  misc_RNA (1)...(19): siRNA sense strand
gaccuggagcugcaauuca

SEQ ID NO: 2176328 - RNA, 19 nt, Homo sapiens
  misc_RNA (1)...(19): siRNA sense strand
gcaacaccauccagaucac

SEQ ID NO: 2176329 - RNA, 19 nt, Homo sapiens
  misc_RNA (1)...(19): siRNA sense strand
acaacaagaccucgcacaa

SEQ ID NO: 2176330 - RNA, 19 nt, Homo sapiens
  misc_RNA (1)...(19): siRNA sense strand
cacgaggaccggcagauga

SEQ ID NO: 2176331 - RNA, 19 nt, Homo sapiens
  misc_RNA (1)...(19): siRNA sense strand
cacucuaccugaagcaugu

SEQ ID NO: 2176332 - RNA, 19 nt, Homo sapiens
  misc_RNA (1)...(19): siRNA sense strand
ugcugggcauccugauuua

SEQ ID NO: 2176333 - RNA, 19 nt, Homo sapiens
  misc_RNA (1)...(19): siRNA sense strand
ugucuguggucacuacugu

SEQ ID NO: 2176334 - RNA, 19 nt, Homo sapiens
  misc_RNA (1)...(19): siRNA sense strand
gcuguaagcaaccaugucu

SEQ ID NO: 2176335 - RNA, 19 nt, Homo sapiens
  misc_RNA (1)...(19): siRNA sense strand
caggaaugacacccuugua

SEQ ID NO: 2176336 - RNA, 19 nt, Homo sapiens
  misc_RNA (1)...(19): siRNA sense strand
gggcauccugauuuacauu

SEQ ID NO: 2176337 - RNA, 19 nt, Homo sapiens
  misc_RNA (1)...(19): siRNA sense strand
aaaccaagaggucaagucu

SEQ ID NO: 2176338 - RNA, 19 nt, Homo sapiens
  misc_RNA (1)...(19): siRNA sense strand
ucaacuccuugcacucauc

SEQ ID NO: 2176339 - RNA, 19 nt, Homo sapiens
  misc_RNA (1)...(19): siRNA sense strand
ggaacugaccaacccugau

SEQ ID NO: 2176340 - RNA, 19 nt, Homo sapiens
  misc_RNA (1)...(19): siRNA sense strand
ccacauacagugcuuugac

SEQ ID NO: 2176341 - RNA, 19 nt, Homo sapiens
  misc_RNA (1)...(19): siRNA sense strand
ggagcagacagcuaucaag

SEQ ID NO: 2176342 - RNA, 19 nt, Homo sapiens
  misc_RNA (1)...(19): siRNA sense strand
gcugcagggccuccucaaa

SEQ ID NO: 2176343 - RNA, 19 nt, Homo sapiens
  misc_RNA (1)...(19): siRNA sense strand
uguaagcaaccaugucuuc

SEQ ID NO: 2176344 - RNA, 19 nt, Homo sapiens
  misc_RNA (1)...(19): siRNA sense strand
aggaaugacacccuuguau

SEQ ID NO: 2176345 - RNA, 19 nt, Homo sapiens
  misc_RNA (1)...(19): siRNA sense strand
uguccugugugcaacaaga

SEQ ID NO: 2176346 - RNA, 19 nt, Homo sapiens
  misc_RNA (1)...(19): siRNA sense strand
accugcagcucaacuguga

SEQ ID NO: 2176347 - RNA, 19 nt, Homo sapiens
  misc_RNA (1)...(19): siRNA sense strand
aagauaaagcggaacuuca

SEQ ID NO: 2176348 - RNA, 19 nt, Homo sapiens
  misc_RNA (1)...(19): siRNA sense strand
ucuacaagacccugauaau

SEQ ID NO: 2176349 - RNA, 19 nt, Homo sapiens
  misc_RNA (1)...(19): siRNA sense strand
cccacgggacugcauuaua

SEQ ID NO: 2176350 - RNA, 19 nt, Homo sapiens
  misc_RNA (1)...(19): siRNA sense strand
ccagcgugauggagaugau

SEQ ID NO: 2176351 - RNA, 19 nt, Homo sapiens
  misc_RNA (1)...(19): siRNA sense strand
ugcccgaggucaugacugu

SEQ ID NO: 2176352 - RNA, 19 nt, Homo sapiens
  misc_RNA (1)...(19): siRNA sense strand
ccucaacuccuugcacuca

SEQ ID NO: 2176353 - RNA, 19 nt, Homo sapiens
  misc_RNA (1)...(19): siRNA sense strand
augaggagaucaccaucga

SEQ ID NO: 2176354 - RNA, 19 nt, Homo sapiens
  misc_RNA (1)...(19): siRNA sense strand
acuuggagguguccugugu

SEQ ID NO: 2176355 - RNA, 19 nt, Homo sapiens
  misc_RNA (1)...(19): siRNA sense strand
caucgagcguggcgacaac

SEQ ID NO: 2176356 - RNA, 19 nt, Homo sapiens
  misc_RNA (1)...(19): siRNA sense strand
accuggagcugcaauucaa

SEQ ID NO: 2176357 - RNA, 19 nt, Homo sapiens
  misc_RNA (1)...(19): siRNA sense strand
gcacaaccuggcuguaagc

SEQ ID NO: 2176358 - RNA, 19 nt, Homo sapiens
  misc_RNA (1)...(19): siRNA sense strand
gcagggaacucauagagaa

SEQ ID NO: 2176359 - RNA, 19 nt, Homo sapiens
  misc_RNA (1)...(19): siRNA sense strand
gcaaguacauggacaucaa

SEQ ID NO: 2176360 - RNA, 19 nt, Homo sapiens
  misc_RNA (1)...(19): siRNA sense strand
gaacugcacuuggagagaa

SEQ ID NO: 2176361 - RNA, 19 nt, Homo sapiens
  misc_RNA (1)...(19): siRNA sense strand
gagaaacccugcuguauac

SEQ ID NO: 2176362 - RNA, 19 nt, Homo sapiens
  misc_RNA (1)...(19): siRNA sense strand
guaagcacaucaugcagua

SEQ ID NO: 2176363 - RNA, 19 nt, Homo sapiens
  misc_RNA (1)...(19): siRNA sense strand
gaucaacagugucauggaa

SEQ ID NO: 2176364 - RNA, 19 nt, Homo sapiens
  misc_RNA (1)...(19): siRNA sense strand
gguacaagaugaccuguga

SEQ ID NO: 2176365 - RNA, 19 nt, Homo sapiens
  misc_RNA (1)...(19): siRNA sense strand
uaaagacacuucaggacaa

SEQ ID NO: 2176366 - RNA, 19 nt, Homo sapiens
  misc_RNA (1)...(19): siRNA sense strand
guacauggacaucaacuuu

SEQ ID NO: 2176367 - RNA, 19 nt, Homo sapiens
  misc_RNA (1)...(19): siRNA sense strand
ggagagaaacccugcugua

SEQ ID NO: 2176368 - RNA, 19 nt, Homo sapiens
  misc_RNA (1)...(19): siRNA sense strand
gaggacacauccacagcua

SEQ ID NO: 2176369 - RNA, 19 nt, Homo sapiens
  misc_RNA (1)...(19): siRNA sense strand
ggcagagcguugaguauuu

SEQ ID NO: 2176370 - RNA, 19 nt, Homo sapiens
  misc_RNA (1)...(19): siRNA sense strand
gcacgugggugaaagaaac

SEQ ID NO: 2176371 - RNA, 19 nt, Homo sapiens
  misc_RNA (1)...(19): siRNA sense strand
agagaaacccugcuguaua

SEQ ID NO: 2176372 - RNA, 19 nt, Homo sapiens
  misc_RNA (1)...(19): siRNA sense strand
gugaaccgcuuccacaaga

SEQ ID NO: 2176373 - RNA, 19 nt, Homo sapiens
  misc_RNA (1)...(19): siRNA sense strand
gcagagcguugaguauuuc

SEQ ID NO: 2176374 - RNA, 19 nt, Homo sapiens
  misc_RNA (1)...(19): siRNA sense strand
ucaagcggcugcuguacaa

SEQ ID NO: 2176375 - RNA, 19 nt, Homo sapiens
  misc_RNA (1)...(19): siRNA sense strand
caagaugaccugugaauac

SEQ ID NO: 2176376 - RNA, 19 nt, Homo sapiens
  misc_RNA (1)...(19): siRNA sense strand
gagcaggacucaacaugac

SEQ ID NO: 2176377 - RNA, 19 nt, Homo sapiens
  misc_RNA (1)...(19): siRNA sense strand
gagagaaacccugcuguau

SEQ ID NO: 2176378 - RNA, 19 nt, Homo sapiens
  misc_RNA (1)...(19): siRNA sense strand
aaaccugacuuugugcuuu

SEQ ID NO: 2176379 - RNA, 19 nt, Homo sapiens
  misc_RNA (1)...(19): siRNA sense strand
ggagcaggacucaacauga

SEQ ID NO: 2176380 - RNA, 19 nt, Homo sapiens
  misc_RNA (1)...(19): siRNA sense strand
ugaacaggaucaacagugu

SEQ ID NO: 2176381 - RNA, 19 nt, Homo sapiens
  misc_RNA (1)...(19): siRNA sense strand
cugaagagguggagucugu

SEQ ID NO: 2176382 - RNA, 19 nt, Homo sapiens
  misc_RNA (1)...(19): siRNA sense strand
ggaagacagaagccaguaa

SEQ ID NO: 2176383 - RNA, 19 nt, Homo sapiens
  misc_RNA (1)...(19): siRNA sense strand
cugggaagcuggaugagaa

SEQ ID NO: 2176384 - RNA, 19 nt, Homo sapiens
  misc_RNA (1)...(19): siRNA sense strand
gcaccaaccgcaaucacaa

SEQ ID NO: 2176385 - RNA, 19 nt, Homo sapiens
  misc_RNA (1)...(19): siRNA sense strand
cgaggaaggcccugaguau

SEQ ID NO: 2176386 - RNA, 19 nt, Homo sapiens
  misc_RNA (1)...(19): siRNA sense strand
caaggcagccgccacucua

SEQ ID NO: 2176387 - RNA, 19 nt, Homo sapiens
  misc_RNA (1)...(19): siRNA sense strand
caccaucacugaccgaauc

SEQ ID NO: 2176388 - RNA, 19 nt, Homo sapiens
  misc_RNA (1)...(19): siRNA sense strand
acaagcagcugcaugaacu

SEQ ID NO: 2176389 - RNA, 19 nt, Homo sapiens
  misc_RNA (1)...(19): siRNA sense strand
ucacagaccagcaccucua

SEQ ID NO: 2176390 - RNA, 19 nt, Homo sapiens
  misc_RNA (1)...(19): siRNA sense strand
ggccgagacuuccggauca

SEQ ID NO: 2176391 - RNA, 19 nt, Homo sapiens
  misc_RNA (1)...(19): siRNA sense strand
gaagacagaagccaguaag

SEQ ID NO: 2176392 - RNA, 19 nt, Homo sapiens
  misc_RNA (1)...(19): siRNA sense strand
gaaacccugcuguauacaa

SEQ ID NO: 2176393 - RNA, 19 nt, Homo sapiens
  misc_RNA (1)...(19): siRNA sense strand
gaaacuuccacgccuucua

SEQ ID NO: 2176394 - RNA, 19 nt, Homo sapiens
  misc_RNA (1)...(19): siRNA sense strand
ucacaacuccagccgcuuu

SEQ ID NO: 2176395 - RNA, 19 nt, Homo sapiens
  misc_RNA (1)...(19): siRNA sense strand
ucaaggacgugcugcucaa

SEQ ID NO: 2176396 - RNA, 19 nt, Homo sapiens
  misc_RNA (1)...(19): siRNA sense strand
aaacccugcuguauacaau

SEQ ID NO: 2176397 - RNA, 19 nt, Homo sapiens
  misc_RNA (1)...(19): siRNA sense strand
aaagacacuucaggacaaa

SEQ ID NO: 2176398 - RNA, 19 nt, Homo sapiens
  misc_RNA (1)...(19): siRNA sense strand
gcaaggacacagucauugg

SEQ ID NO: 2176399 - RNA, 19 nt, Homo sapiens
  misc_RNA (1)...(19): siRNA sense strand
gacaagaccauggaguuug

SEQ ID NO: 2176400 - RNA, 19 nt, Homo sapiens
  misc_RNA (1)...(19): siRNA sense strand
cccggcagcuggugaagaa

SEQ ID NO: 2176401 - RNA, 19 nt, Homo sapiens
  misc_RNA (1)...(19): siRNA sense strand
acagcuaccuacuggagaa

SEQ ID NO: 2176402 - RNA, 19 nt, Homo sapiens
  misc_RNA (1)...(19): siRNA sense strand
aagaugaccugugaauaca

SEQ ID NO: 2176403 - RNA, 19 nt, Homo sapiens
  misc_RNA (1)...(19): siRNA sense strand
cgacaagaacagagauuuc

SEQ ID NO: 2176404 - RNA, 19 nt, Homo sapiens
  misc_RNA (1)...(19): siRNA sense strand
ccacagacaagaccaugga

SEQ ID NO: 2176405 - RNA, 19 nt, Homo sapiens
  misc_RNA (1)...(19): siRNA sense strand
gcaccaccgccaucaccua

SEQ ID NO: 2176406 - RNA, 19 nt, Homo sapiens
  misc_RNA (1)...(19): siRNA sense strand
gggaggcagggaacucaua

SEQ ID NO: 2176407 - RNA, 19 nt, Homo sapiens
  misc_RNA (1)...(19): siRNA sense strand
cagacaagaccauggaguu

SEQ ID NO: 2176408 - RNA, 19 nt, Homo sapiens
  misc_RNA (1)...(19): siRNA sense strand
ccaguaagcacaucaugca

SEQ ID NO: 2176409 - RNA, 19 nt, Homo sapiens
  misc_RNA (1)...(19): siRNA sense strand
ggaguuuggccgagacuuc

SEQ ID NO: 2176410 - RNA, 19 nt, Homo sapiens
  misc_RNA (1)...(19): siRNA sense strand
agacaagaccauggaguuu

SEQ ID NO: 2176411 - RNA, 19 nt, Homo sapiens
  misc_RNA (1)...(19): siRNA sense strand
ucauccagcucauccugaa

SEQ ID NO: 2176412 - RNA, 19 nt, Homo sapiens
  misc_RNA (1)...(19): siRNA sense strand
gaggaaggcccugaguaug

SEQ ID NO: 2176413 - RNA, 19 nt, Homo sapiens
  misc_RNA (1)...(19): siRNA sense strand
ggacaagcagcugcaugaa

SEQ ID NO: 2176414 - RNA, 19 nt, Homo sapiens
  misc_RNA (1)...(19): siRNA sense strand
cugcucagguacaagauga

SEQ ID NO: 2176415 - RNA, 19 nt, Homo sapiens
  misc_RNA (1)...(19): siRNA sense strand
uggaggacuucaugaggaa

SEQ ID NO: 2176416 - RNA, 19 nt, Homo sapiens
  misc_RNA (1)...(19): siRNA sense strand
acaagaccauggaguuugg

SEQ ID NO: 2176417 - RNA, 19 nt, Homo sapiens
  misc_RNA (1)...(19): siRNA sense strand
gcaggaacaggaagaguac

SEQ ID NO: 2176418 - RNA, 19 nt, Homo sapiens
  misc_RNA (1)...(19): siRNA sense strand
ucaacaguuucgagcaguu

SEQ ID NO: 2176419 - RNA, 19 nt, Homo sapiens
  misc_RNA (1)...(19): siRNA sense strand
gcagugaccgaggccauga

SEQ ID NO: 2176420 - RNA, 19 nt, Homo sapiens
  misc_RNA (1)...(19): siRNA sense strand
caucgcugcugucaccaau

SEQ ID NO: 2176421 - RNA, 19 nt, Homo sapiens
  misc_RNA (1)...(19): siRNA sense strand
gaaccgcuuccacaagauc

SEQ ID NO: 2176422 - RNA, 19 nt, Homo sapiens
  misc_RNA (1)...(19): siRNA sense strand
ccugcuggcucgcacaguu

SEQ ID NO: 2176423 - RNA, 19 nt, Homo sapiens
  misc_RNA (1)...(19): siRNA sense strand
acagugccuuggacaguga

SEQ ID NO: 2176424 - RNA, 19 nt, Homo sapiens
  misc_RNA (1)...(19): siRNA sense strand
gagaggcagugaggacaag

SEQ ID NO: 2176425 - RNA, 19 nt, Homo sapiens
  misc_RNA (1)...(19): siRNA sense strand
gcuggaggccuuuggcaau

SEQ ID NO: 2176426 - RNA, 19 nt, Homo sapiens
  misc_RNA (1)...(19): siRNA sense strand
acaagaugaccugugaaua

SEQ ID NO: 2176427 - RNA, 19 nt, Homo sapiens
  misc_RNA (1)...(19): siRNA sense strand
acccugcuguauacaauuu

SEQ ID NO: 2176428 - RNA, 19 nt, Homo sapiens
  misc_RNA (1)...(19): siRNA sense strand
guauggcaaaccugacuuu

SEQ ID NO: 2176429 - RNA, 19 nt, Homo sapiens
  misc_RNA (1)...(19): siRNA sense strand
cugaggccaucgccaggua

SEQ ID NO: 2176430 - RNA, 19 nt, Homo sapiens
  misc_RNA (1)...(19): siRNA sense strand
cuacgggcgugaccuugug

SEQ ID NO: 2176431 - RNA, 19 nt, Homo sapiens
  misc_RNA (1)...(19): siRNA sense strand
gcccaaugaggacaaggua

SEQ ID NO: 2176432 - RNA, 19 nt, Homo sapiens
  misc_RNA (1)...(19): siRNA sense strand
agggugggcugcagaagga

SEQ ID NO: 2176433 - RNA, 19 nt, Homo sapiens
  misc_RNA (1)...(19): siRNA sense strand
ccagggccgugagcucuau

SEQ ID NO: 2176434 - RNA, 19 nt, Homo sapiens
  misc_RNA (1)...(19): siRNA sense strand
gggaagacagaagccagua

SEQ ID NO: 2176435 - RNA, 19 nt, Homo sapiens
  misc_RNA (1)...(19): siRNA sense strand
gggagcaggacucaacaug

SEQ ID NO: 2176436 - RNA, 19 nt, Homo sapiens
  misc_RNA (1)...(19): siRNA sense strand
ccacgccuucuaccaauug

SEQ ID NO: 2176437 - RNA, 19 nt, Homo sapiens
  misc_RNA (1)...(19): siRNA sense strand
gcagcacgugggugaaaga

SEQ ID NO: 2176438 - RNA, 19 nt, Homo sapiens
  misc_RNA (1)...(19): siRNA sense strand
ucauugugcugcuauugca

SEQ ID NO: 2176439 - RNA, 19 nt, Homo sapiens
  misc_RNA (1)...(19): siRNA sense strand
uggcagagcguugaguauu

SEQ ID NO: 2176440 - RNA, 19 nt, Homo sapiens
  misc_RNA (1)...(19): siRNA sense strand
ggacaccugcaucgucauc

SEQ ID NO: 2176441 - RNA, 19 nt, Homo sapiens
  misc_RNA (1)...(19): siRNA sense strand
ccauauugcaccugggaaa

SEQ ID NO: 2176442 - RNA, 19 nt, Homo sapiens
  misc_RNA (1)...(19): siRNA sense strand
acacauccacagcuaccua

SEQ ID NO: 2176443 - RNA, 19 nt, Homo sapiens
  misc_RNA (1)...(19): siRNA sense strand
ugacaaucccacagcauca

SEQ ID NO: 2176444 - RNA, 19 nt, Homo sapiens
  misc_RNA (1)...(19): siRNA sense strand
ggaggcagggaacucauag

SEQ ID NO: 2176445 - RNA, 19 nt, Homo sapiens
  misc_RNA (1)...(19): siRNA sense strand
uggcaaggacacagucauu

SEQ ID NO: 2176446 - RNA, 19 nt, Homo sapiens
  misc_RNA (1)...(19): siRNA sense strand
gcagccagagcccgauuuc

SEQ ID NO: 2176447 - RNA, 19 nt, Homo sapiens
  misc_RNA (1)...(19): siRNA sense strand
cagaccagcaccucuacaa

SEQ ID NO: 2176448 - RNA, 19 nt, Homo sapiens
  misc_RNA (1)...(19): siRNA sense strand
ccuguuugcucagcgacua

SEQ ID NO: 2176449 - RNA, 19 nt, Homo sapiens
  misc_RNA (1)...(19): siRNA sense strand
caacuacugcaacgagaag

SEQ ID NO: 2176450 - RNA, 19 nt, Homo sapiens
  misc_RNA (1)...(19): siRNA sense strand
ccagggagcaggacucaac

SEQ ID NO: 2176451 - RNA, 19 nt, Homo sapiens
  misc_RNA (1)...(19): siRNA sense strand
ugagggcuaucuacaccau

SEQ ID NO: 2176452 - RNA, 19 nt, Homo sapiens
  misc_RNA (1)...(19): siRNA sense strand
ggcaaggacacagucauug

SEQ ID NO: 2176453 - RNA, 19 nt, Homo sapiens
  misc_RNA (1)...(19): siRNA sense strand
ggccgcaucuacaccuaca

SEQ ID NO: 2176454 - RNA, 19 nt, Homo sapiens
  misc_RNA (1)...(19): siRNA sense strand
gagcagccagagcccgauu

SEQ ID NO: 2176455 - RNA, 19 nt, Homo sapiens
  misc_RNA (1)...(19): siRNA sense strand
caucacugaccgaaucuuc

SEQ ID NO: 2176456 - RNA, 19 nt, Homo sapiens
  misc_RNA (1)...(19): siRNA sense strand
agacacuucaggacaaaga

SEQ ID NO: 2176457 - RNA, 19 nt, Homo sapiens
  misc_RNA (1)...(19): siRNA sense strand
gcacaucaugcaguacauc

SEQ ID NO: 2176458 - RNA, 19 nt, Homo sapiens
  misc_RNA (1)...(19): siRNA sense strand
gaauugaucucagaaguaa

SEQ ID NO: 2176459 - RNA, 19 nt, Homo sapiens
  misc_RNA (1)...(19): siRNA sense strand
ggaaguaggugaggccuua

SEQ ID NO: 2176460 - RNA, 19 nt, Homo sapiens
  misc_RNA (1)...(19): siRNA sense strand
ggaauugaucucagaagua

SEQ ID NO: 2176461 - RNA, 19 nt, Homo sapiens
  misc_RNA (1)...(19): siRNA sense strand
ccaaagaccuggccuugca

SEQ ID NO: 2176462 - RNA, 19 nt, Homo sapiens
  misc_RNA (1)...(19): siRNA sense strand
gaaaggcaaugucaaagcu

SEQ ID NO: 2176463 - RNA, 19 nt, Homo sapiens
  misc_RNA (1)...(19): siRNA sense strand
agacacagaucucucauca

SEQ ID NO: 2176464 - RNA, 19 nt, Homo sapiens
  misc_RNA (1)...(19): siRNA sense strand
gaagagggccuugcuuuag

SEQ ID NO: 2176465 - RNA, 19 nt, Homo sapiens
  misc_RNA (1)...(19): siRNA sense strand
gacaggaauugaucucaga

SEQ ID NO: 2176466 - RNA, 19 nt, Homo sapiens
  misc_RNA (1)...(19): siRNA sense strand
gaacuugaaggaagaagga

SEQ ID NO: 2176467 - RNA, 19 nt, Homo sapiens
  misc_RNA (1)...(19): siRNA sense strand
gaacauccucuuugucauc

SEQ ID NO: 2176468 - RNA, 19 nt, Homo sapiens
  misc_RNA (1)...(19): siRNA sense strand
cagaagagggccuugcuuu

SEQ ID NO: 2176469 - RNA, 19 nt, Homo sapiens
  misc_RNA (1)...(19): siRNA sense strand
agaagagggccuugcuuua

SEQ ID NO: 2176470 - RNA, 19 nt, Homo sapiens
  misc_RNA (1)...(19): siRNA sense strand
gaucucagaaguaacagaa

SEQ ID NO: 2176471 - RNA, 19 nt, Homo sapiens
  misc_RNA (1)...(19): siRNA sense strand
gggcaucagcgagaucuua

SEQ ID NO: 2176472 - RNA, 19 nt, Homo sapiens
  misc_RNA (1)...(19): siRNA sense strand
ggaagacucuguggaagac

SEQ ID NO: 2176473 - RNA, 19 nt, Homo sapiens
  misc_RNA (1)...(19): siRNA sense strand
gaagaaacaagccucacau

SEQ ID NO: 2176474 - RNA, 19 nt, Homo sapiens
  misc_RNA (1)...(19): siRNA sense strand
ucucagaaguaacagaaga

SEQ ID NO: 2176475 - RNA, 19 nt, Homo sapiens
  misc_RNA (1)...(19): siRNA sense strand
acacuuauguggucuuugg

SEQ ID NO: 2176476 - RNA, 19 nt, Homo sapiens
  misc_RNA (1)...(19): siRNA sense strand
ccaggaagacucuguggaa

SEQ ID NO: 2176477 - RNA, 19 nt, Homo sapiens
  misc_RNA (1)...(19): siRNA sense strand
ggaagaaacaagccucaca

SEQ ID NO: 2176478 - RNA, 19 nt, Homo sapiens
  misc_RNA (1)...(19): siRNA sense strand
caccauggcucagcaggaa

SEQ ID NO: 2176479 - RNA, 19 nt, Homo sapiens
  misc_RNA (1)...(19): siRNA sense strand
ggacgagcaggacaucuug

SEQ ID NO: 2176480 - RNA, 19 nt, Homo sapiens
  misc_RNA (1)...(19): siRNA sense strand
gaccuggccuugcagaucu

SEQ ID NO: 2176481 - RNA, 19 nt, Homo sapiens
  misc_RNA (1)...(19): siRNA sense strand
agaaacaagccucacauug

SEQ ID NO: 2176482 - RNA, 19 nt, Homo sapiens
  misc_RNA (1)...(19): siRNA sense strand
gaaugcagcccucccuaca

SEQ ID NO: 2176483 - RNA, 19 nt, Homo sapiens
  misc_RNA (1)...(19): siRNA sense strand
ggaacugcgugacauugag

SEQ ID NO: 2176484 - RNA, 19 nt, Homo sapiens
  misc_RNA (1)...(19): siRNA sense strand
cgccaagccugaugucuuc

SEQ ID NO: 2176485 - RNA, 19 nt, Homo sapiens
  misc_RNA (1)...(19): siRNA sense strand
caagguggccuccauggau

SEQ ID NO: 2176486 - RNA, 19 nt, Homo sapiens
  misc_RNA (1)...(19): siRNA sense strand
aggcugagcugcgggauga

SEQ ID NO: 2176487 - RNA, 19 nt, Homo sapiens
  misc_RNA (1)...(19): siRNA sense strand
gggugaggcuggagugcaa

SEQ ID NO: 2176488 - RNA, 19 nt, Homo sapiens
  misc_RNA (1)...(19): siRNA sense strand
ugagagacaaccacaguga

SEQ ID NO: 2176489 - RNA, 19 nt, Homo sapiens
  misc_RNA (1)...(19): siRNA sense strand
cccucgggcuccuacauua

SEQ ID NO: 2176490 - RNA, 19 nt, Homo sapiens
  misc_RNA (1)...(19): siRNA sense strand
cgaaguacccaguguccuu

SEQ ID NO: 2176491 - RNA, 19 nt, Homo sapiens
  misc_RNA (1)...(19): siRNA sense strand
gaaauagcagaagcccuuu

SEQ ID NO: 2176492 - RNA, 19 nt, Homo sapiens
  misc_RNA (1)...(19): siRNA sense strand
ccagggcagccucaucuuu

SEQ ID NO: 2176493 - RNA, 19 nt, Homo sapiens
  misc_RNA (1)...(19): siRNA sense strand
gagaagaaggcccgaaagg

SEQ ID NO: 2176494 - RNA, 19 nt, Homo sapiens
  misc_RNA (1)...(19): siRNA sense strand
gaccaccuaugcccugcuu

SEQ ID NO: 2176495 - RNA, 19 nt, Homo sapiens
  misc_RNA (1)...(19): siRNA sense strand
ucacguuccugcccagcaa

SEQ ID NO: 2176496 - RNA, 19 nt, Homo sapiens
  misc_RNA (1)...(19): siRNA sense strand
ggccagcaccugaggagaa

SEQ ID NO: 2176497 - RNA, 19 nt, Homo sapiens
  misc_RNA (1)...(19): siRNA sense strand
ggacagcugggccucuuca

SEQ ID NO: 2176498 - RNA, 19 nt, Homo sapiens
  misc_RNA (1)...(19): siRNA sense strand
gaagaugcggauuccacuu

SEQ ID NO: 2176499 - RNA, 19 nt, Homo sapiens
  misc_RNA (1)...(19): siRNA sense strand
ggagugcaaggaagaggaa

SEQ ID NO: 2176500 - RNA, 19 nt, Homo sapiens
  misc_RNA (1)...(19): siRNA sense strand
ggaagaggaggaggaggaa

SEQ ID NO: 2176501 - RNA, 19 nt, Homo sapiens
  misc_RNA (1)...(19): siRNA sense strand
ccagagacaggaauugauc

SEQ ID NO: 2176502 - RNA, 19 nt, Homo sapiens
  misc_RNA (1)...(19): siRNA sense strand
aggagacccuggagguuga

SEQ ID NO: 2176503 - RNA, 19 nt, Homo sapiens
  misc_RNA (1)...(19): siRNA sense strand
ccgcagcugagaaguuuaa

SEQ ID NO: 2176504 - RNA, 19 nt, Homo sapiens
  misc_RNA (1)...(19): siRNA sense strand
agccgcagcugagaaguuu

SEQ ID NO: 2176505 - RNA, 19 nt, Homo sapiens
  misc_RNA (1)...(19): siRNA sense strand
uggacuuccuggccaauga

SEQ ID NO: 2176506 - RNA, 19 nt, Homo sapiens
  misc_RNA (1)...(19): siRNA sense strand
gcccagccucagacacuua

SEQ ID NO: 2176507 - RNA, 19 nt, Homo sapiens
  misc_RNA (1)...(19): siRNA sense strand
gugagaagaaggcccgaaa

SEQ ID NO: 2176508 - RNA, 19 nt, Homo sapiens
  misc_RNA (1)...(19): siRNA sense strand
uguccagacucuccucaga

SEQ ID NO: 2176509 - RNA, 19 nt, Homo sapiens
  misc_RNA (1)...(19): siRNA sense strand
cagcugagaaguuuaaggu

SEQ ID NO: 2176510 - RNA, 19 nt, Homo sapiens
  misc_RNA (1)...(19): siRNA sense strand
caaagccgcagcugagaag

SEQ ID NO: 2176511 - RNA, 19 nt, Homo sapiens
  misc_RNA (1)...(19): siRNA sense strand
aagcagagucgcagugaga

SEQ ID NO: 2176512 - RNA, 19 nt, Homo sapiens
  misc_RNA (1)...(19): siRNA sense strand
ccaccaagaccaccuaugc

SEQ ID NO: 2176513 - RNA, 19 nt, Homo sapiens
  misc_RNA (1)...(19): siRNA sense strand
aagaugcggauuccacuuu

SEQ ID NO: 2176514 - RNA, 19 nt, Homo sapiens
  misc_RNA (1)...(19): siRNA sense strand
ccaggacuccguuaugaca

SEQ ID NO: 2176515 - RNA, 19 nt, Homo sapiens
  misc_RNA (1)...(19): siRNA sense strand
ccaggagggccacuucuuc

SEQ ID NO: 2176516 - RNA, 19 nt, Homo sapiens
  misc_RNA (1)...(19): siRNA sense strand
ggaggaaagaggccugagu

SEQ ID NO: 2176517 - RNA, 19 nt, Homo sapiens
  misc_RNA (1)...(19): siRNA sense strand
acgcagaggcagaugauga

SEQ ID NO: 2176518 - RNA, 19 nt, Homo sapiens
  misc_RNA (1)...(19): siRNA sense strand
acaagacacagaucucuca

SEQ ID NO: 2176519 - RNA, 19 nt, Homo sapiens
  misc_RNA (1)...(19): siRNA sense strand
ucugcagccuccucugauu

SEQ ID NO: 2176520 - RNA, 19 nt, Homo sapiens
  misc_RNA (1)...(19): siRNA sense strand
aguuuaaggugcccucaga

SEQ ID NO: 2176521 - RNA, 19 nt, Homo sapiens
  misc_RNA (1)...(19): siRNA sense strand
cagacucuccucagaacuu

SEQ ID NO: 2176522 - RNA, 19 nt, Homo sapiens
  misc_RNA (1)...(19): siRNA sense strand
aggaauugaucucagaagu

SEQ ID NO: 2176523 - RNA, 19 nt, Homo sapiens
  misc_RNA (1)...(19): siRNA sense strand
ucaagagcccagccucaga

SEQ ID NO: 2176524 - RNA, 19 nt, Homo sapiens
  misc_RNA (1)...(19): siRNA sense strand
ccaagcagagucgcaguga

SEQ ID NO: 2176525 - RNA, 19 nt, Homo sapiens
  misc_RNA (1)...(19): siRNA sense strand
ccaggacuccgcuaugaca

SEQ ID NO: 2176526 - RNA, 19 nt, Homo sapiens
  misc_RNA (1)...(19): siRNA sense strand
ccaggacuccgcuaugaca

SEQ ID NO: 2176527 - RNA, 19 nt, Homo sapiens
  misc_RNA (1)...(19): siRNA sense strand
ccaggacuccgcuaugaca

SEQ ID NO: 2176528 - RNA, 19 nt, Homo sapiens
  misc_RNA (1)...(19): siRNA sense strand
ccaggacuccgcuaugaca

SEQ ID NO: 2176529 - RNA, 19 nt, Homo sapiens
  misc_RNA (1)...(19): siRNA sense strand
ccaggacuccgcuaugaca

SEQ ID NO: 2176530 - RNA, 19 nt, Homo sapiens
  misc_RNA (1)...(19): siRNA sense strand
ccaggacuccgcuaugaca

SEQ ID NO: 2176531 - RNA, 19 nt, Homo sapiens
  misc_RNA (1)...(19): siRNA sense strand
ccaggacuccgcuaugaca

SEQ ID NO: 2176532 - RNA, 19 nt, Homo sapiens
  misc_RNA (1)...(19): siRNA sense strand
cagggcagccucaucuuuc

SEQ ID NO: 2176533 - RNA, 19 nt, Homo sapiens
  misc_RNA (1)...(19): siRNA sense strand
ccaggacuccgcuaugaca

SEQ ID NO: 2176534 - RNA, 19 nt, Homo sapiens
  misc_RNA (1)...(19): siRNA sense strand
aagaaacaagccucacauu

SEQ ID NO: 2176535 - RNA, 19 nt, Homo sapiens
  misc_RNA (1)...(19): siRNA sense strand
agacucuccucagaacuug

SEQ ID NO: 2176536 - RNA, 19 nt, Homo sapiens
  misc_RNA (1)...(19): siRNA sense strand
cccgaaaggcaaugucaaa

SEQ ID NO: 2176537 - RNA, 19 nt, Homo sapiens
  misc_RNA (1)...(19): siRNA sense strand
gcacaggaagaugcggauu

SEQ ID NO: 2176538 - RNA, 19 nt, Homo sapiens
  misc_RNA (1)...(19): siRNA sense strand
aagagggccuugcuuuagg

SEQ ID NO: 2176539 - RNA, 19 nt, Homo sapiens
  misc_RNA (1)...(19): siRNA sense strand
gacccugauuccuucuuca

SEQ ID NO: 2176540 - RNA, 19 nt, Homo sapiens
  misc_RNA (1)...(19): siRNA sense strand
gagcccagccucagacacu

SEQ ID NO: 2176541 - RNA, 19 nt, Homo sapiens
  misc_RNA (1)...(19): siRNA sense strand
gaggagaccaucgccaaag

SEQ ID NO: 2176542 - RNA, 19 nt, Homo sapiens
  misc_RNA (1)...(19): siRNA sense strand
agaugcggauuccacuuug

SEQ ID NO: 2176543 - RNA, 19 nt, Homo sapiens
  misc_RNA (1)...(19): siRNA sense strand
ccucuucacccuccuguuc

SEQ ID NO: 2176544 - RNA, 19 nt, Homo sapiens
  misc_RNA (1)...(19): siRNA sense strand
caagccugaugucuucaag

SEQ ID NO: 2176545 - RNA, 19 nt, Homo sapiens
  misc_RNA (1)...(19): siRNA sense strand
cucagaacuugaaggaaga

SEQ ID NO: 2176546 - RNA, 19 nt, Homo sapiens
  misc_RNA (1)...(19): siRNA sense strand
gcuggaacugcgugacauu

SEQ ID NO: 2176547 - RNA, 19 nt, Homo sapiens
  misc_RNA (1)...(19): siRNA sense strand
aagaggaggaggaggaaga

SEQ ID NO: 2176548 - RNA, 19 nt, Homo sapiens
  misc_RNA (1)...(19): siRNA sense strand
cagagucgcagugagaaga

SEQ ID NO: 2176549 - RNA, 19 nt, Homo sapiens
  misc_RNA (1)...(19): siRNA sense strand
ccgagcagcaagaggauga

SEQ ID NO: 2176550 - RNA, 19 nt, Homo sapiens
  misc_RNA (1)...(19): siRNA sense strand
gcagaagcugggacaccuu

SEQ ID NO: 2176551 - RNA, 19 nt, Homo sapiens
  misc_RNA (1)...(19): siRNA sense strand
gccagcaccugaggagaag

SEQ ID NO: 2176552 - RNA, 19 nt, Homo sapiens
  misc_RNA (1)...(19): siRNA sense strand
ugaggagaccaucgccaaa

SEQ ID NO: 2176553 - RNA, 19 nt, Homo sapiens
  misc_RNA (1)...(19): siRNA sense strand
aggacagccuggaggaaga

SEQ ID NO: 2176554 - RNA, 19 nt, Homo sapiens
  misc_RNA (1)...(19): siRNA sense strand
gaugcggauuccacuuugg

SEQ ID NO: 2176555 - RNA, 19 nt, Homo sapiens
  misc_RNA (1)...(19): siRNA sense strand
gcaccugaggagaagaaug

SEQ ID NO: 2176556 - RNA, 19 nt, Homo sapiens
  misc_RNA (1)...(19): siRNA sense strand
acaaagccgcagcugagaa

SEQ ID NO: 2176557 - RNA, 19 nt, Homo sapiens
  misc_RNA (1)...(19): siRNA sense strand
gaggcuggagugcaaggaa

SEQ ID NO: 2176558 - RNA, 19 nt, Homo sapiens
  misc_RNA (1)...(19): siRNA sense strand
gcaaagagaggcugaggaa

SEQ ID NO: 2176559 - RNA, 19 nt, Homo sapiens
  misc_RNA (1)...(19): siRNA sense strand
gggcaucaguguuaucuca

SEQ ID NO: 2176560 - RNA, 19 nt, Homo sapiens
  misc_RNA (1)...(19): siRNA sense strand
caaaguaucugagcaaagc

SEQ ID NO: 2176561 - RNA, 19 nt, Homo sapiens
  misc_RNA (1)...(19): siRNA sense strand
acaguucaccuaccaauuu

SEQ ID NO: 2176562 - RNA, 19 nt, Homo sapiens
  misc_RNA (1)...(19): siRNA sense strand
acucggagauacuggauaa

SEQ ID NO: 2176563 - RNA, 19 nt, Homo sapiens
  misc_RNA (1)...(19): siRNA sense strand
gcaaugguuauaaggauga

SEQ ID NO: 2176564 - RNA, 19 nt, Homo sapiens
  misc_RNA (1)...(19): siRNA sense strand
gaucccaggucucagcaau

SEQ ID NO: 2176565 - RNA, 19 nt, Homo sapiens
  misc_RNA (1)...(19): siRNA sense strand
gaacacaagcaaggaacuu

SEQ ID NO: 2176566 - RNA, 19 nt, Homo sapiens
  misc_RNA (1)...(19): siRNA sense strand
ucccaggucucagcaauuu

SEQ ID NO: 2176567 - RNA, 19 nt, Homo sapiens
  misc_RNA (1)...(19): siRNA sense strand
uagcaaugguuauaaggau

SEQ ID NO: 2176568 - RNA, 19 nt, Homo sapiens
  misc_RNA (1)...(19): siRNA sense strand
caagguggcaggcccgauu

SEQ ID NO: 2176569 - RNA, 19 nt, Homo sapiens
  misc_RNA (1)...(19): siRNA sense strand
caccagcagagcucaaaua

SEQ ID NO: 2176570 - RNA, 19 nt, Homo sapiens
  misc_RNA (1)...(19): siRNA sense strand
guuauaaggaugagugguu

SEQ ID NO: 2176571 - RNA, 19 nt, Homo sapiens
  misc_RNA (1)...(19): siRNA sense strand
ucaagccaaugguagcuau

SEQ ID NO: 2176572 - RNA, 19 nt, Homo sapiens
  misc_RNA (1)...(19): siRNA sense strand
aagagaggcugaggaacuu

SEQ ID NO: 2176573 - RNA, 19 nt, Homo sapiens
  misc_RNA (1)...(19): siRNA sense strand
cuccagggcaucaguguua

SEQ ID NO: 2176574 - RNA, 19 nt, Homo sapiens
  misc_RNA (1)...(19): siRNA sense strand
ucaaagcccagaagaaucu

SEQ ID NO: 2176575 - RNA, 19 nt, Homo sapiens
  misc_RNA (1)...(19): siRNA sense strand
gcaucaguguuaucucagu

SEQ ID NO: 2176576 - RNA, 19 nt, Homo sapiens
  misc_RNA (1)...(19): siRNA sense strand
gaaucuguaucugcaucaa

SEQ ID NO: 2176577 - RNA, 19 nt, Homo sapiens
  misc_RNA (1)...(19): siRNA sense strand
gaggaacacaagcaaggaa

SEQ ID NO: 2176578 - RNA, 19 nt, Homo sapiens
  misc_RNA (1)...(19): siRNA sense strand
ucucaaagcccagaagaau

SEQ ID NO: 2176579 - RNA, 19 nt, Homo sapiens
  misc_RNA (1)...(19): siRNA sense strand
uuuccaaacucauuagcaa

SEQ ID NO: 2176580 - RNA, 19 nt, Homo sapiens
  misc_RNA (1)...(19): siRNA sense strand
ccagugaagcgcucugaga

SEQ ID NO: 2176581 - RNA, 19 nt, Homo sapiens
  misc_RNA (1)...(19): siRNA sense strand
uggcaggcccgauuuguug

SEQ ID NO: 2176582 - RNA, 19 nt, Homo sapiens
  misc_RNA (1)...(19): siRNA sense strand
aaagagaggcugaggaacu

SEQ ID NO: 2176583 - RNA, 19 nt, Homo sapiens
  misc_RNA (1)...(19): siRNA sense strand
gagaggcugaggaacuuga

SEQ ID NO: 2176584 - RNA, 19 nt, Homo sapiens
  misc_RNA (1)...(19): siRNA sense strand
gaagaccuccagggcauca

SEQ ID NO: 2176585 - RNA, 19 nt, Homo sapiens
  misc_RNA (1)...(19): siRNA sense strand
cgacagccagccagcaaga

SEQ ID NO: 2176586 - RNA, 19 nt, Homo sapiens
  misc_RNA (1)...(19): siRNA sense strand
cagugaagcgcucugagaa

SEQ ID NO: 2176587 - RNA, 19 nt, Homo sapiens
  misc_RNA (1)...(19): siRNA sense strand
ggagauacuggauaaaaga

SEQ ID NO: 2176588 - RNA, 19 nt, Homo sapiens
  misc_RNA (1)...(19): siRNA sense strand
aaacaguucaccuaccaau

SEQ ID NO: 2176589 - RNA, 19 nt, Homo sapiens
  misc_RNA (1)...(19): siRNA sense strand
gcaauuugggagacucaca

SEQ ID NO: 2176590 - RNA, 19 nt, Homo sapiens
  misc_RNA (1)...(19): siRNA sense strand
uagcuaugcauccagaaga

SEQ ID NO: 2176591 - RNA, 19 nt, Homo sapiens
  misc_RNA (1)...(19): siRNA sense strand
ggcccgauuuguugaagca

SEQ ID NO: 2176592 - RNA, 19 nt, Homo sapiens
  misc_RNA (1)...(19): siRNA sense strand
gcaggcccgauuuguugaa

SEQ ID NO: 2176593 - RNA, 19 nt, Homo sapiens
  misc_RNA (1)...(19): siRNA sense strand
cugaggaacuugaaaagga

SEQ ID NO: 2176594 - RNA, 19 nt, Homo sapiens
  misc_RNA (1)...(19): siRNA sense strand
ccgauuuguugaagcacuu

SEQ ID NO: 2176595 - RNA, 19 nt, Homo sapiens
  misc_RNA (1)...(19): siRNA sense strand
ggacucggagauacuggau

SEQ ID NO: 2176596 - RNA, 19 nt, Homo sapiens
  misc_RNA (1)...(19): siRNA sense strand
accagcagagcucaaauaa

SEQ ID NO: 2176597 - RNA, 19 nt, Homo sapiens
  misc_RNA (1)...(19): siRNA sense strand
gaagaaucuguaucugcau

SEQ ID NO: 2176598 - RNA, 19 nt, Homo sapiens
  misc_RNA (1)...(19): siRNA sense strand
gcucuccaguggccuacuc

SEQ ID NO: 2176599 - RNA, 19 nt, Homo sapiens
  misc_RNA (1)...(19): siRNA sense strand
gcaaagagaggcugaggaa

SEQ ID NO: 2176600 - RNA, 19 nt, Homo sapiens
  misc_RNA (1)...(19): siRNA sense strand
gggcaucaguguuaucuca

SEQ ID NO: 2176601 - RNA, 19 nt, Homo sapiens
  misc_RNA (1)...(19): siRNA sense strand
caaaguaucugagcaaagc

SEQ ID NO: 2176602 - RNA, 19 nt, Homo sapiens
  misc_RNA (1)...(19): siRNA sense strand
acaguucaccuaccaauuu

SEQ ID NO: 2176603 - RNA, 19 nt, Homo sapiens
  misc_RNA (1)...(19): siRNA sense strand
acucggagauacuggauaa

SEQ ID NO: 2176604 - RNA, 19 nt, Homo sapiens
  misc_RNA (1)...(19): siRNA sense strand
gcaaugguuauaaggauga

SEQ ID NO: 2176605 - RNA, 19 nt, Homo sapiens
  misc_RNA (1)...(19): siRNA sense strand
gaucccaggucucagcaau

SEQ ID NO: 2176606 - RNA, 19 nt, Homo sapiens
  misc_RNA (1)...(19): siRNA sense strand
gaacacaagcaaggaacuu

SEQ ID NO: 2176607 - RNA, 19 nt, Homo sapiens
  misc_RNA (1)...(19): siRNA sense strand
ucccaggucucagcaauuu

SEQ ID NO: 2176608 - RNA, 19 nt, Homo sapiens
  misc_RNA (1)...(19): siRNA sense strand
uagcaaugguuauaaggau

SEQ ID NO: 2176609 - RNA, 19 nt, Homo sapiens
  misc_RNA (1)...(19): siRNA sense strand
caagguggcaggcccgauu

SEQ ID NO: 2176610 - RNA, 19 nt, Homo sapiens
  misc_RNA (1)...(19): siRNA sense strand
caccagcagagcucaaaua

SEQ ID NO: 2176611 - RNA, 19 nt, Homo sapiens
  misc_RNA (1)...(19): siRNA sense strand
guuauaaggaugagugguu

SEQ ID NO: 2176612 - RNA, 19 nt, Homo sapiens
  misc_RNA (1)...(19): siRNA sense strand
ucaagccaaugguagcuau

SEQ ID NO: 2176613 - RNA, 19 nt, Homo sapiens
  misc_RNA (1)...(19): siRNA sense strand
aagagaggcugaggaacuu

SEQ ID NO: 2176614 - RNA, 19 nt, Homo sapiens
  misc_RNA (1)...(19): siRNA sense strand
cuccagggcaucaguguua

SEQ ID NO: 2176615 - RNA, 19 nt, Homo sapiens
  misc_RNA (1)...(19): siRNA sense strand
ucaaagcccagaagaaucu

SEQ ID NO: 2176616 - RNA, 19 nt, Homo sapiens
  misc_RNA (1)...(19): siRNA sense strand
gcaucaguguuaucucagu

SEQ ID NO: 2176617 - RNA, 19 nt, Homo sapiens
  misc_RNA (1)...(19): siRNA sense strand
gaaucuguaucugcaucaa

SEQ ID NO: 2176618 - RNA, 19 nt, Homo sapiens
  misc_RNA (1)...(19): siRNA sense strand
gaggaacacaagcaaggaa

SEQ ID NO: 2176619 - RNA, 19 nt, Homo sapiens
  misc_RNA (1)...(19): siRNA sense strand
ucucaaagcccagaagaau

SEQ ID NO: 2176620 - RNA, 19 nt, Homo sapiens
  misc_RNA (1)...(19): siRNA sense strand
uuuccaaacucauuagcaa

SEQ ID NO: 2176621 - RNA, 19 nt, Homo sapiens
  misc_RNA (1)...(19): siRNA sense strand
ccagugaagcgcucugaga

SEQ ID NO: 2176622 - RNA, 19 nt, Homo sapiens
  misc_RNA (1)...(19): siRNA sense strand
uggcaggcccgauuuguug

SEQ ID NO: 2176623 - RNA, 19 nt, Homo sapiens
  misc_RNA (1)...(19): siRNA sense strand
aaagagaggcugaggaacu

SEQ ID NO: 2176624 - RNA, 19 nt, Homo sapiens
  misc_RNA (1)...(19): siRNA sense strand
gagaggcugaggaacuuga

SEQ ID NO: 2176625 - RNA, 19 nt, Homo sapiens
  misc_RNA (1)...(19): siRNA sense strand
gaagaccuccagggcauca

SEQ ID NO: 2176626 - RNA, 19 nt, Homo sapiens
  misc_RNA (1)...(19): siRNA sense strand
cgacagccagccagcaaga

SEQ ID NO: 2176627 - RNA, 19 nt, Homo sapiens
  misc_RNA (1)...(19): siRNA sense strand
cagugaagcgcucugagaa

SEQ ID NO: 2176628 - RNA, 19 nt, Homo sapiens
  misc_RNA (1)...(19): siRNA sense strand
ggagauacuggauaaaaga

SEQ ID NO: 2176629 - RNA, 19 nt, Homo sapiens
  misc_RNA (1)...(19): siRNA sense strand
aaacaguucaccuaccaau

SEQ ID NO: 2176630 - RNA, 19 nt, Homo sapiens
  misc_RNA (1)...(19): siRNA sense strand
gcaauuugggagacucaca

SEQ ID NO: 2176631 - RNA, 19 nt, Homo sapiens
  misc_RNA (1)...(19): siRNA sense strand
uagcuaugcauccagaaga

SEQ ID NO: 2176632 - RNA, 19 nt, Homo sapiens
  misc_RNA (1)...(19): siRNA sense strand
ggcccgauuuguugaagca

SEQ ID NO: 2176633 - RNA, 19 nt, Homo sapiens
  misc_RNA (1)...(19): siRNA sense strand
gcaggcccgauuuguugaa

SEQ ID NO: 2176634 - RNA, 19 nt, Homo sapiens
  misc_RNA (1)...(19): siRNA sense strand
cugaggaacuugaaaagga

SEQ ID NO: 2176635 - RNA, 19 nt, Homo sapiens
  misc_RNA (1)...(19): siRNA sense strand
ccgauuuguugaagcacuu

SEQ ID NO: 2176636 - RNA, 19 nt, Homo sapiens
  misc_RNA (1)...(19): siRNA sense strand
ggacucggagauacuggau

SEQ ID NO: 2176637 - RNA, 19 nt, Homo sapiens
  misc_RNA (1)...(19): siRNA sense strand
accagcagagcucaaauaa

SEQ ID NO: 2176638 - RNA, 19 nt, Homo sapiens
  misc_RNA (1)...(19): siRNA sense strand
gaagaaucuguaucugcau

SEQ ID NO: 2176639 - RNA, 19 nt, Homo sapiens
  misc_RNA (1)...(19): siRNA sense strand
gcucuccaguggccuacuc

SEQ ID NO: 2176640 - RNA, 19 nt, Homo sapiens
  misc_RNA (1)...(19): siRNA sense strand
ggucaucuauuucuucaua

SEQ ID NO: 2176641 - RNA, 19 nt, Homo sapiens
  misc_RNA (1)...(19): siRNA sense strand
ggaacacugucuacacaug

SEQ ID NO: 2176642 - RNA, 19 nt, Homo sapiens
  misc_RNA (1)...(19): siRNA sense strand
caucuggcaucucuuugua

SEQ ID NO: 2176643 - RNA, 19 nt, Homo sapiens
  misc_RNA (1)...(19): siRNA sense strand
agaccaagguguccaaaug

SEQ ID NO: 2176644 - RNA, 19 nt, Homo sapiens
  misc_RNA (1)...(19): siRNA sense strand
gcaucucuuuguagcauuu

SEQ ID NO: 2176645 - RNA, 19 nt, Homo sapiens
  misc_RNA (1)...(19): siRNA sense strand
gguaccagcccacagagua

SEQ ID NO: 2176646 - RNA, 19 nt, Homo sapiens
  misc_RNA (1)...(19): siRNA sense strand
gaaauacgcgagguucaug

SEQ ID NO: 2176647 - RNA, 19 nt, Homo sapiens
  misc_RNA (1)...(19): siRNA sense strand
caccaucuaugucuucuuc

SEQ ID NO: 2176648 - RNA, 19 nt, Homo sapiens
  misc_RNA (1)...(19): siRNA sense strand
gaacacugucuacacaugu

SEQ ID NO: 2176649 - RNA, 19 nt, Homo sapiens
  misc_RNA (1)...(19): siRNA sense strand
gaccaagguguccaaauga

SEQ ID NO: 2176650 - RNA, 19 nt, Homo sapiens
  misc_RNA (1)...(19): siRNA sense strand
guggaacacugucuacaca

SEQ ID NO: 2176651 - RNA, 19 nt, Homo sapiens
  misc_RNA (1)...(19): siRNA sense strand
uggcuggucuggauuaugg

SEQ ID NO: 2176652 - RNA, 19 nt, Homo sapiens
  misc_RNA (1)...(19): siRNA sense strand
uuguggagcuucucugcua

SEQ ID NO: 2176653 - RNA, 19 nt, Homo sapiens
  misc_RNA (1)...(19): siRNA sense strand
ccaucuaugucuucuucuu

SEQ ID NO: 2176654 - RNA, 19 nt, Homo sapiens
  misc_RNA (1)...(19): siRNA sense strand
cacaccaucuccuggaaga

SEQ ID NO: 2176655 - RNA, 19 nt, Homo sapiens
  misc_RNA (1)...(19): siRNA sense strand
ccagcacccugcagaccaa

SEQ ID NO: 2176656 - RNA, 19 nt, Homo sapiens
  misc_RNA (1)...(19): siRNA sense strand
guaccagcccacagaguau

SEQ ID NO: 2176657 - RNA, 19 nt, Homo sapiens
  misc_RNA (1)...(19): siRNA sense strand
gaugguggaacacugucua

SEQ ID NO: 2176658 - RNA, 19 nt, Homo sapiens
  misc_RNA (1)...(19): siRNA sense strand
gugcugguacccacuacua

SEQ ID NO: 2176659 - RNA, 19 nt, Homo sapiens
  misc_RNA (1)...(19): siRNA sense strand
gggcauggucuucuucaag

SEQ ID NO: 2176660 - RNA, 19 nt, Homo sapiens
  misc_RNA (1)...(19): siRNA sense strand
gcuccaaccucuacuuccu

SEQ ID NO: 2176661 - RNA, 19 nt, Homo sapiens
  misc_RNA (1)...(19): siRNA sense strand
gcugguacccacuacuaug

SEQ ID NO: 2176662 - RNA, 19 nt, Homo sapiens
  misc_RNA (1)...(19): siRNA sense strand
gggcagcuccaaccucuac

SEQ ID NO: 2176663 - RNA, 19 nt, Homo sapiens
  misc_RNA (1)...(19): siRNA sense strand
agagguaccagcccacaga

SEQ ID NO: 2176664 - RNA, 19 nt, Homo sapiens
  misc_RNA (1)...(19): siRNA sense strand
cgaaauacgcgagguucau

SEQ ID NO: 2176665 - RNA, 19 nt, Homo sapiens
  misc_RNA (1)...(19): siRNA sense strand
gcccacagaguaugaacau

SEQ ID NO: 2176666 - RNA, 19 nt, Homo sapiens
  misc_RNA (1)...(19): siRNA sense strand
acuaugccaucuggaggua

SEQ ID NO: 2176667 - RNA, 19 nt, Homo sapiens
  misc_RNA (1)...(19): siRNA sense strand
uggcaucucuuuguagcau

SEQ ID NO: 2176668 - RNA, 19 nt, Homo sapiens
  misc_RNA (1)...(19): siRNA sense strand
gcagcuccaaccucuacuu

SEQ ID NO: 2176669 - RNA, 19 nt, Homo sapiens
  misc_RNA (1)...(19): siRNA sense strand
caucuaugucuucuucuuc

SEQ ID NO: 2176670 - RNA, 19 nt, Homo sapiens
  misc_RNA (1)...(19): siRNA sense strand
gggcaccaucuaugucuuc

SEQ ID NO: 2176671 - RNA, 19 nt, Homo sapiens
  misc_RNA (1)...(19): siRNA sense strand
ggucaucuauuucuucaua

SEQ ID NO: 2176672 - RNA, 19 nt, Homo sapiens
  misc_RNA (1)...(19): siRNA sense strand
ggaacacugucuacacaug

SEQ ID NO: 2176673 - RNA, 19 nt, Homo sapiens
  misc_RNA (1)...(19): siRNA sense strand
caucuggcaucucuuugua

SEQ ID NO: 2176674 - RNA, 19 nt, Homo sapiens
  misc_RNA (1)...(19): siRNA sense strand
agaccaagguguccaaaug

SEQ ID NO: 2176675 - RNA, 19 nt, Homo sapiens
  misc_RNA (1)...(19): siRNA sense strand
gcaucucuuuguagcauuu

SEQ ID NO: 2176676 - RNA, 19 nt, Homo sapiens
  misc_RNA (1)...(19): siRNA sense strand
gguaccagcccacagagua

SEQ ID NO: 2176677 - RNA, 19 nt, Homo sapiens
  misc_RNA (1)...(19): siRNA sense strand
gaaauacgcgagguucaug

SEQ ID NO: 2176678 - RNA, 19 nt, Homo sapiens
  misc_RNA (1)...(19): siRNA sense strand
caccaucuaugucuucuuc

SEQ ID NO: 2176679 - RNA, 19 nt, Homo sapiens
  misc_RNA (1)...(19): siRNA sense strand
gaacacugucuacacaugu

SEQ ID NO: 2176680 - RNA, 19 nt, Homo sapiens
  misc_RNA (1)...(19): siRNA sense strand
gaccaagguguccaaauga

SEQ ID NO: 2176681 - RNA, 19 nt, Homo sapiens
  misc_RNA (1)...(19): siRNA sense strand
guggaacacugucuacaca

SEQ ID NO: 2176682 - RNA, 19 nt, Homo sapiens
  misc_RNA (1)...(19): siRNA sense strand
uggcuggucuggauuaugg

SEQ ID NO: 2176683 - RNA, 19 nt, Homo sapiens
  misc_RNA (1)...(19): siRNA sense strand
uuguggagcuucucugcua

SEQ ID NO: 2176684 - RNA, 19 nt, Homo sapiens
  misc_RNA (1)...(19): siRNA sense strand
ccaucuaugucuucuucuu

SEQ ID NO: 2176685 - RNA, 19 nt, Homo sapiens
  misc_RNA (1)...(19): siRNA sense strand
cacaccaucuccuggaaga

SEQ ID NO: 2176686 - RNA, 19 nt, Homo sapiens
  misc_RNA (1)...(19): siRNA sense strand
ccagcacccugcagaccaa

SEQ ID NO: 2176687 - RNA, 19 nt, Homo sapiens
  misc_RNA (1)...(19): siRNA sense strand
guaccagcccacagaguau

SEQ ID NO: 2176688 - RNA, 19 nt, Homo sapiens
  misc_RNA (1)...(19): siRNA sense strand
gaugguggaacacugucua

SEQ ID NO: 2176689 - RNA, 19 nt, Homo sapiens
  misc_RNA (1)...(19): siRNA sense strand
gugcugguacccacuacua

SEQ ID NO: 2176690 - RNA, 19 nt, Homo sapiens
  misc_RNA (1)...(19): siRNA sense strand
gggcauggucuucuucaag

SEQ ID NO: 2176691 - RNA, 19 nt, Homo sapiens
  misc_RNA (1)...(19): siRNA sense strand
gcuccaaccucuacuuccu

SEQ ID NO: 2176692 - RNA, 19 nt, Homo sapiens
  misc_RNA (1)...(19): siRNA sense strand
gcugguacccacuacuaug

SEQ ID NO: 2176693 - RNA, 19 nt, Homo sapiens
  misc_RNA (1)...(19): siRNA sense strand
gggcagcuccaaccucuac

SEQ ID NO: 2176694 - RNA, 19 nt, Homo sapiens
  misc_RNA (1)...(19): siRNA sense strand
agagguaccagcccacaga

SEQ ID NO: 2176695 - RNA, 19 nt, Homo sapiens
  misc_RNA (1)...(19): siRNA sense strand
cgaaauacgcgagguucau

SEQ ID NO: 2176696 - RNA, 19 nt, Homo sapiens
  misc_RNA (1)...(19): siRNA sense strand
uggcaucucuuuguagcau

SEQ ID NO: 2176697 - RNA, 19 nt, Homo sapiens
  misc_RNA (1)...(19): siRNA sense strand
acuaugccaucuggaggua

SEQ ID NO: 2176698 - RNA, 19 nt, Homo sapiens
  misc_RNA (1)...(19): siRNA sense strand
gcccacagaguaugaacau

SEQ ID NO: 2176699 - RNA, 19 nt, Homo sapiens
  misc_RNA (1)...(19): siRNA sense strand
gcagcuccaaccucuacuu

SEQ ID NO: 2176700 - RNA, 19 nt, Homo sapiens
  misc_RNA (1)...(19): siRNA sense strand
caucuaugucuucuucuuc

SEQ ID NO: 2176701 - RNA, 19 nt, Homo sapiens
  misc_RNA (1)...(19): siRNA sense strand
gggcaccaucuaugucuuc

SEQ ID NO: 2176702 - RNA, 19 nt, Homo sapiens
  misc_RNA (1)...(19): siRNA sense strand
ggucaucuauuucuucaua

SEQ ID NO: 2176703 - RNA, 19 nt, Homo sapiens
  misc_RNA (1)...(19): siRNA sense strand
ggaacacugucuacacaug

SEQ ID NO: 2176704 - RNA, 19 nt, Homo sapiens
  misc_RNA (1)...(19): siRNA sense strand
caucuggcaucucuuugua

SEQ ID NO: 2176705 - RNA, 19 nt, Homo sapiens
  misc_RNA (1)...(19): siRNA sense strand
agaccaagguguccaaaug

SEQ ID NO: 2176706 - RNA, 19 nt, Homo sapiens
  misc_RNA (1)...(19): siRNA sense strand
gcaucucuuuguagcauuu

SEQ ID NO: 2176707 - RNA, 19 nt, Homo sapiens
  misc_RNA (1)...(19): siRNA sense strand
gguaccagcccacagagua

SEQ ID NO: 2176708 - RNA, 19 nt, Homo sapiens
  misc_RNA (1)...(19): siRNA sense strand
gaaauacgcgagguucaug

SEQ ID NO: 2176709 - RNA, 19 nt, Homo sapiens
  misc_RNA (1)...(19): siRNA sense strand
caccaucuaugucuucuuc

SEQ ID NO: 2176710 - RNA, 19 nt, Homo sapiens
  misc_RNA (1)...(19): siRNA sense strand
gaacacugucuacacaugu

SEQ ID NO: 2176711 - RNA, 19 nt, Homo sapiens
  misc_RNA (1)...(19): siRNA sense strand
gaccaagguguccaaauga

SEQ ID NO: 2176712 - RNA, 19 nt, Homo sapiens
  misc_RNA (1)...(19): siRNA sense strand
guggaacacugucuacaca

SEQ ID NO: 2176713 - RNA, 19 nt, Homo sapiens
  misc_RNA (1)...(19): siRNA sense strand
uggcuggucuggauuaugg

SEQ ID NO: 2176714 - RNA, 19 nt, Homo sapiens
  misc_RNA (1)...(19): siRNA sense strand
uuguggagcuucucugcua

SEQ ID NO: 2176715 - RNA, 19 nt, Homo sapiens
  misc_RNA (1)...(19): siRNA sense strand
ccaucuaugucuucuucuu

SEQ ID NO: 2176716 - RNA, 19 nt, Homo sapiens
  misc_RNA (1)...(19): siRNA sense strand
cacaccaucuccuggaaga

SEQ ID NO: 2176717 - RNA, 19 nt, Homo sapiens
  misc_RNA (1)...(19): siRNA sense strand
ccagcacccugcagaccaa

SEQ ID NO: 2176718 - RNA, 19 nt, Homo sapiens
  misc_RNA (1)...(19): siRNA sense strand
guaccagcccacagaguau

SEQ ID NO: 2176719 - RNA, 19 nt, Homo sapiens
  misc_RNA (1)...(19): siRNA sense strand
gaugguggaacacugucua

SEQ ID NO: 2176720 - RNA, 19 nt, Homo sapiens
  misc_RNA (1)...(19): siRNA sense strand
gugcugguacccacuacua

SEQ ID NO: 2176721 - RNA, 19 nt, Homo sapiens
  misc_RNA (1)...(19): siRNA sense strand
gggcauggucuucuucaag

SEQ ID NO: 2176722 - RNA, 19 nt, Homo sapiens
  misc_RNA (1)...(19): siRNA sense strand
gcuccaaccucuacuuccu

SEQ ID NO: 2176723 - RNA, 19 nt, Homo sapiens
  misc_RNA (1)...(19): siRNA sense strand
gcugguacccacuacuaug

SEQ ID NO: 2176724 - RNA, 19 nt, Homo sapiens
  misc_RNA (1)...(19): siRNA sense strand
gggcagcuccaaccucuac

SEQ ID NO: 2176725 - RNA, 19 nt, Homo sapiens
  misc_RNA (1)...(19): siRNA sense strand
agagguaccagcccacaga

SEQ ID NO: 2176726 - RNA, 19 nt, Homo sapiens
  misc_RNA (1)...(19): siRNA sense strand
cgaaauacgcgagguucau

SEQ ID NO: 2176727 - RNA, 19 nt, Homo sapiens
  misc_RNA (1)...(19): siRNA sense strand
uggcaucucuuuguagcau

SEQ ID NO: 2176728 - RNA, 19 nt, Homo sapiens
  misc_RNA (1)...(19): siRNA sense strand
acuaugccaucuggaggua

SEQ ID NO: 2176729 - RNA, 19 nt, Homo sapiens
  misc_RNA (1)...(19): siRNA sense strand
gcccacagaguaugaacau

SEQ ID NO: 2176730 - RNA, 19 nt, Homo sapiens
  misc_RNA (1)...(19): siRNA sense strand
gcagcuccaaccucuacuu

SEQ ID NO: 2176731 - RNA, 19 nt, Homo sapiens
  misc_RNA (1)...(19): siRNA sense strand
caucuaugucuucuucuuc

SEQ ID NO: 2176732 - RNA, 19 nt, Homo sapiens
  misc_RNA (1)...(19): siRNA sense strand
gggcaccaucuaugucuuc

SEQ ID NO: 2176733 - RNA, 19 nt, Homo sapiens
  misc_RNA (1)...(19): siRNA sense strand
ggacauaccuuauuuguuc

SEQ ID NO: 2176734 - RNA, 19 nt, Homo sapiens
  misc_RNA (1)...(19): siRNA sense strand
gaaaguauaugcagaauuc

SEQ ID NO: 2176735 - RNA, 19 nt, Homo sapiens
  misc_RNA (1)...(19): siRNA sense strand
gaacaugccuuugaaauuc

SEQ ID NO: 2176736 - RNA, 19 nt, Homo sapiens
  misc_RNA (1)...(19): siRNA sense strand
gagauaagguggauaaaug

SEQ ID NO: 2176737 - RNA, 19 nt, Homo sapiens
  misc_RNA (1)...(19): siRNA sense strand
caagacagcuauacagauu

SEQ ID NO: 2176738 - RNA, 19 nt, Homo sapiens
  misc_RNA (1)...(19): siRNA sense strand
ggaacuagaacuuucauua

SEQ ID NO: 2176739 - RNA, 19 nt, Homo sapiens
  misc_RNA (1)...(19): siRNA sense strand
gcagggacauaccuuauuu

SEQ ID NO: 2176740 - RNA, 19 nt, Homo sapiens
  misc_RNA (1)...(19): siRNA sense strand
gaagguucaucagaaauua

SEQ ID NO: 2176741 - RNA, 19 nt, Homo sapiens
  misc_RNA (1)...(19): siRNA sense strand
gaacagaaauggccaugca

SEQ ID NO: 2176742 - RNA, 19 nt, Homo sapiens
  misc_RNA (1)...(19): siRNA sense strand
gcacagacaugacuacaca

SEQ ID NO: 2176743 - RNA, 19 nt, Homo sapiens
  misc_RNA (1)...(19): siRNA sense strand
gcucuaaacugaauggaaa

SEQ ID NO: 2176744 - RNA, 19 nt, Homo sapiens
  misc_RNA (1)...(19): siRNA sense strand
gcaugcagcucagguguua

SEQ ID NO: 2176745 - RNA, 19 nt, Homo sapiens
  misc_RNA (1)...(19): siRNA sense strand
aaagauaucuggagaaaca

SEQ ID NO: 2176746 - RNA, 19 nt, Homo sapiens
  misc_RNA (1)...(19): siRNA sense strand
ggaggaaucuaaugugaug

SEQ ID NO: 2176747 - RNA, 19 nt, Homo sapiens
  misc_RNA (1)...(19): siRNA sense strand
ggagaaacauggauuugau

SEQ ID NO: 2176748 - RNA, 19 nt, Homo sapiens
  misc_RNA (1)...(19): siRNA sense strand
ggaagauccuuaaguugaa

SEQ ID NO: 2176749 - RNA, 19 nt, Homo sapiens
  misc_RNA (1)...(19): siRNA sense strand
gcugacaaauggaagaaua

SEQ ID NO: 2176750 - RNA, 19 nt, Homo sapiens
  misc_RNA (1)...(19): siRNA sense strand
gaaauuccagacaauguua

SEQ ID NO: 2176751 - RNA, 19 nt, Homo sapiens
  misc_RNA (1)...(19): siRNA sense strand
gaauggagagcgaaagaua

SEQ ID NO: 2176752 - RNA, 19 nt, Homo sapiens
  misc_RNA (1)...(19): siRNA sense strand
gaagagaguucaggaguag

SEQ ID NO: 2176753 - RNA, 19 nt, Homo sapiens
  misc_RNA (1)...(19): siRNA sense strand
ugaaagaacugagagaaga

SEQ ID NO: 2176754 - RNA, 19 nt, Homo sapiens
  misc_RNA (1)...(19): siRNA sense strand
gaacuuguaucugaacaug

SEQ ID NO: 2176755 - RNA, 19 nt, Homo sapiens
  misc_RNA (1)...(19): siRNA sense strand
caacaaacaucuccaacca

SEQ ID NO: 2176756 - RNA, 19 nt, Homo sapiens
  misc_RNA (1)...(19): siRNA sense strand
gaauuacgcucucgagucu

SEQ ID NO: 2176757 - RNA, 19 nt, Homo sapiens
  misc_RNA (1)...(19): siRNA sense strand
gaaauggccaugcacguuu

SEQ ID NO: 2176758 - RNA, 19 nt, Homo sapiens
  misc_RNA (1)...(19): siRNA sense strand
aaaggaagguucaucagaa

SEQ ID NO: 2176759 - RNA, 19 nt, Homo sapiens
  misc_RNA (1)...(19): siRNA sense strand
gaggacaucuugagcucua

SEQ ID NO: 2176760 - RNA, 19 nt, Homo sapiens
  misc_RNA (1)...(19): siRNA sense strand
gauaaaugcuacaaaugug

SEQ ID NO: 2176761 - RNA, 19 nt, Homo sapiens
  misc_RNA (1)...(19): siRNA sense strand
gggaagauccuuaaguuga

SEQ ID NO: 2176762 - RNA, 19 nt, Homo sapiens
  misc_RNA (1)...(19): siRNA sense strand
gaacaugaagaaucucaaa

SEQ ID NO: 2176763 - RNA, 19 nt, Homo sapiens
  misc_RNA (1)...(19): siRNA sense strand
gcucaagccuucagaaugg

SEQ ID NO: 2176764 - RNA, 19 nt, Homo sapiens
  misc_RNA (1)...(19): siRNA sense strand
gaaaggaagguucaucaga

SEQ ID NO: 2176765 - RNA, 19 nt, Homo sapiens
  misc_RNA (1)...(19): siRNA sense strand
agacaugacuacacagaaa

SEQ ID NO: 2176766 - RNA, 19 nt, Homo sapiens
  misc_RNA (1)...(19): siRNA sense strand
uaauaaagccaacagauga

SEQ ID NO: 2176767 - RNA, 19 nt, Homo sapiens
  misc_RNA (1)...(19): siRNA sense strand
gauuugaugucccuauuau

SEQ ID NO: 2176768 - RNA, 19 nt, Homo sapiens
  misc_RNA (1)...(19): siRNA sense strand
gaagccauauguugguuug

SEQ ID NO: 2176769 - RNA, 19 nt, Homo sapiens
  misc_RNA (1)...(19): siRNA sense strand
ggauaaaugcuacaaaugu

SEQ ID NO: 2176770 - RNA, 19 nt, Homo sapiens
  misc_RNA (1)...(19): siRNA sense strand
acaaagauaucuggagaaa

SEQ ID NO: 2176771 - RNA, 19 nt, Homo sapiens
  misc_RNA (1)...(19): siRNA sense strand
ugauggauguggaacguua

SEQ ID NO: 2176772 - RNA, 19 nt, Homo sapiens
  misc_RNA (1)...(19): siRNA sense strand
gauaccaugucaagacuga

SEQ ID NO: 2176773 - RNA, 19 nt, Homo sapiens
  misc_RNA (1)...(19): siRNA sense strand
gaauguggauaccauguca

SEQ ID NO: 2176774 - RNA, 19 nt, Homo sapiens
  misc_RNA (1)...(19): siRNA sense strand
ggaagguucaucagaaauu

SEQ ID NO: 2176775 - RNA, 19 nt, Homo sapiens
  misc_RNA (1)...(19): siRNA sense strand
gauaaguaauggcagucua

SEQ ID NO: 2176776 - RNA, 19 nt, Homo sapiens
  misc_RNA (1)...(19): siRNA sense strand
cuauacagauuuccacauu

SEQ ID NO: 2176777 - RNA, 19 nt, Homo sapiens
  misc_RNA (1)...(19): siRNA sense strand
gacugaagauccagacuug

SEQ ID NO: 2176778 - RNA, 19 nt, Homo sapiens
  misc_RNA (1)...(19): siRNA sense strand
gaagccaucuagaagugaa

SEQ ID NO: 2176779 - RNA, 19 nt, Homo sapiens
  misc_RNA (1)...(19): siRNA sense strand
ggagagcgaaagauaauga

SEQ ID NO: 2176780 - RNA, 19 nt, Homo sapiens
  misc_RNA (1)...(19): siRNA sense strand
gagguguucuuuggagaua

SEQ ID NO: 2176781 - RNA, 19 nt, Homo sapiens
  misc_RNA (1)...(19): siRNA sense strand
guacaaaguaggaauuaug

SEQ ID NO: 2176782 - RNA, 19 nt, Homo sapiens
  misc_RNA (1)...(19): siRNA sense strand
gcacugcacugaaaaguau

SEQ ID NO: 2176783 - RNA, 19 nt, Homo sapiens
  misc_RNA (1)...(19): siRNA sense strand
auacagauuuccacauuga

SEQ ID NO: 2176784 - RNA, 19 nt, Homo sapiens
  misc_RNA (1)...(19): siRNA sense strand
gcacagaggaagaagcuau

SEQ ID NO: 2176785 - RNA, 19 nt, Homo sapiens
  misc_RNA (1)...(19): siRNA sense strand
agaagagaguucaggagua

SEQ ID NO: 2176786 - RNA, 19 nt, Homo sapiens
  misc_RNA (1)...(19): siRNA sense strand
guggauaaaugcuacaaau

SEQ ID NO: 2176787 - RNA, 19 nt, Homo sapiens
  misc_RNA (1)...(19): siRNA sense strand
gccagaugauucagucuuu

SEQ ID NO: 2176788 - RNA, 19 nt, Homo sapiens
  misc_RNA (1)...(19): siRNA sense strand
gccucaaacuuaccuagua

SEQ ID NO: 2176789 - RNA, 19 nt, Homo sapiens
  misc_RNA (1)...(19): siRNA sense strand
caccagaucuuuucaaauu

SEQ ID NO: 2176790 - RNA, 19 nt, Homo sapiens
  misc_RNA (1)...(19): siRNA sense strand
ugauagaugucauugaugu

SEQ ID NO: 2176791 - RNA, 19 nt, Homo sapiens
  misc_RNA (1)...(19): siRNA sense strand
gauccagacuugaggacuu

SEQ ID NO: 2176792 - RNA, 19 nt, Homo sapiens
  misc_RNA (1)...(19): siRNA sense strand
gcaguuguaucgcuaugau

SEQ ID NO: 2176793 - RNA, 19 nt, Homo sapiens
  misc_RNA (1)...(19): siRNA sense strand
gaagauagaagagaguuca

SEQ ID NO: 2176794 - RNA, 19 nt, Homo sapiens
  misc_RNA (1)...(19): siRNA sense strand
caagagaccggcaucaaau

SEQ ID NO: 2176795 - RNA, 19 nt, Homo sapiens
  misc_RNA (1)...(19): siRNA sense strand
cagaagccaucuagaagug

SEQ ID NO: 2176796 - RNA, 19 nt, Homo sapiens
  misc_RNA (1)...(19): siRNA sense strand
ggauuugaugucccuauua

SEQ ID NO: 2176797 - RNA, 19 nt, Homo sapiens
  misc_RNA (1)...(19): siRNA sense strand
aaucuaaugugaugaggaa

SEQ ID NO: 2176798 - RNA, 19 nt, Homo sapiens
  misc_RNA (1)...(19): siRNA sense strand
gaguagaucaucaggauau

SEQ ID NO: 2176799 - RNA, 19 nt, Homo sapiens
  misc_RNA (1)...(19): siRNA sense strand
uuauguagguggugacaaa

SEQ ID NO: 2176800 - RNA, 19 nt, Homo sapiens
  misc_RNA (1)...(19): siRNA sense strand
ccaagagaccggcaucaaa

SEQ ID NO: 2176801 - RNA, 19 nt, Homo sapiens
  misc_RNA (1)...(19): siRNA sense strand
cggcagcuguguuggagua

SEQ ID NO: 2176802 - RNA, 19 nt, Homo sapiens
  misc_RNA (1)...(19): siRNA sense strand
cuggacaccuuauuaaaga

SEQ ID NO: 2176803 - RNA, 19 nt, Homo sapiens
  misc_RNA (1)...(19): siRNA sense strand
cuacaaaugugugguaaag

SEQ ID NO: 2176804 - RNA, 19 nt, Homo sapiens
  misc_RNA (1)...(19): siRNA sense strand
ccaaaaguguuaaauguga

SEQ ID NO: 2176805 - RNA, 19 nt, Homo sapiens
  misc_RNA (1)...(19): siRNA sense strand
gaccaaaaguguuaaaugu

SEQ ID NO: 2176806 - RNA, 19 nt, Homo sapiens
  misc_RNA (1)...(19): siRNA sense strand
caagccauuuguucagaaa

SEQ ID NO: 2176807 - RNA, 19 nt, Homo sapiens
  misc_RNA (1)...(19): siRNA sense strand
uuacaugguuccuccuuga

SEQ ID NO: 2176808 - RNA, 19 nt, Homo sapiens
  misc_RNA (1)...(19): siRNA sense strand
agacugcaguggugaaaga

SEQ ID NO: 2176809 - RNA, 19 nt, Homo sapiens
  misc_RNA (1)...(19): siRNA sense strand
gaccuggacaccuuauuaa

SEQ ID NO: 2176810 - RNA, 19 nt, Homo sapiens
  misc_RNA (1)...(19): siRNA sense strand
gaacugagagaagaugguu

SEQ ID NO: 2176811 - RNA, 19 nt, Homo sapiens
  misc_RNA (1)...(19): siRNA sense strand
gaacuucagucugguacca

SEQ ID NO: 2176812 - RNA, 19 nt, Homo sapiens
  misc_RNA (1)...(19): siRNA sense strand
ugacuucgguggaacuuca

SEQ ID NO: 2176813 - RNA, 19 nt, Homo sapiens
  misc_RNA (1)...(19): siRNA sense strand
acaaaugugugguaaagca

SEQ ID NO: 2176814 - RNA, 19 nt, Homo sapiens
  misc_RNA (1)...(19): siRNA sense strand
gauuacugcugacaaaugg

SEQ ID NO: 2176815 - RNA, 19 nt, Homo sapiens
  misc_RNA (1)...(19): siRNA sense strand
ugaacaugccuuugaaauu

SEQ ID NO: 2176816 - RNA, 19 nt, Homo sapiens
  misc_RNA (1)...(19): siRNA sense strand
cccaagugccgaugaaaua

SEQ ID NO: 2176817 - RNA, 19 nt, Homo sapiens
  misc_RNA (1)...(19): siRNA sense strand
gaaaugcaucagaaaggaa

SEQ ID NO: 2176818 - RNA, 19 nt, Homo sapiens
  misc_RNA (1)...(19): siRNA sense strand
ggagauaagguggauaaau

SEQ ID NO: 2176819 - RNA, 19 nt, Homo sapiens
  misc_RNA (1)...(19): siRNA sense strand
ggauguggaacguuaugua

SEQ ID NO: 2176820 - RNA, 19 nt, Homo sapiens
  misc_RNA (1)...(19): siRNA sense strand
gggcgugccagauaaguaa

SEQ ID NO: 2176821 - RNA, 19 nt, Homo sapiens
  misc_RNA (1)...(19): siRNA sense strand
gcacuauuccacguguuua

SEQ ID NO: 2176822 - RNA, 19 nt, Homo sapiens
  misc_RNA (1)...(19): siRNA sense strand
aaggaggaaucuaauguga

SEQ ID NO: 2176823 - RNA, 19 nt, Homo sapiens
  misc_RNA (1)...(19): siRNA sense strand
uaacauccaacuuuaagga

SEQ ID NO: 2176824 - RNA, 19 nt, Homo sapiens
  misc_RNA (1)...(19): siRNA sense strand
uagagggaguggaacauga

SEQ ID NO: 2176825 - RNA, 19 nt, Homo sapiens
  misc_RNA (1)...(19): siRNA sense strand
uaaaugugaucagccuuga

SEQ ID NO: 2176826 - RNA, 19 nt, Homo sapiens
  misc_RNA (1)...(19): siRNA sense strand
cuagaacuuucauuaagga

SEQ ID NO: 2176827 - RNA, 19 nt, Homo sapiens
  misc_RNA (1)...(19): siRNA sense strand
ucaaauccaccaccuauca

SEQ ID NO: 2176828 - RNA, 19 nt, Homo sapiens
  misc_RNA (1)...(19): siRNA sense strand
caucaaauccaccaccuau

SEQ ID NO: 2176829 - RNA, 19 nt, Homo sapiens
  misc_RNA (1)...(19): siRNA sense strand
aaggaagguucaucagaaa

SEQ ID NO: 2176830 - RNA, 19 nt, Homo sapiens
  misc_RNA (1)...(19): siRNA sense strand
ccaaccauccuccacagua

SEQ ID NO: 2176831 - RNA, 19 nt, Homo sapiens
  misc_RNA (1)...(19): siRNA sense strand
agaccuggacaccuuauua

SEQ ID NO: 2176832 - RNA, 19 nt, Homo sapiens
  misc_RNA (1)...(19): siRNA sense strand
agacagcuauacagauuuc

SEQ ID NO: 2176833 - RNA, 19 nt, Homo sapiens
  misc_RNA (1)...(19): siRNA sense strand
ggaacgagcuggcuuguga

SEQ ID NO: 2176834 - RNA, 19 nt, Homo sapiens
  misc_RNA (1)...(19): siRNA sense strand
gcacaagucccucaacaua

SEQ ID NO: 2176835 - RNA, 19 nt, Homo sapiens
  misc_RNA (1)...(19): siRNA sense strand
gaaguuuacugcauuguga

SEQ ID NO: 2176836 - RNA, 19 nt, Homo sapiens
  misc_RNA (1)...(19): siRNA sense strand
caacauaaaggacaagaua

SEQ ID NO: 2176837 - RNA, 19 nt, Homo sapiens
  misc_RNA (1)...(19): siRNA sense strand
gaacagagagcacagagaa

SEQ ID NO: 2176838 - RNA, 19 nt, Homo sapiens
  misc_RNA (1)...(19): siRNA sense strand
gaacugaggugaucgaacu

SEQ ID NO: 2176839 - RNA, 19 nt, Homo sapiens
  misc_RNA (1)...(19): siRNA sense strand
gcacagcggugucaauaag

SEQ ID NO: 2176840 - RNA, 19 nt, Homo sapiens
  misc_RNA (1)...(19): siRNA sense strand
agaagugugucuugaauuu

SEQ ID NO: 2176841 - RNA, 19 nt, Homo sapiens
  misc_RNA (1)...(19): siRNA sense strand
gaauggauauguucagcuu

SEQ ID NO: 2176842 - RNA, 19 nt, Homo sapiens
  misc_RNA (1)...(19): siRNA sense strand
gcaaagcugucuccuccaa

SEQ ID NO: 2176843 - RNA, 19 nt, Homo sapiens
  misc_RNA (1)...(19): siRNA sense strand
ccuaugaguuugaagauuu

SEQ ID NO: 2176844 - RNA, 19 nt, Homo sapiens
  misc_RNA (1)...(19): siRNA sense strand
gcacagagaaggagaggaa

SEQ ID NO: 2176845 - RNA, 19 nt, Homo sapiens
  misc_RNA (1)...(19): siRNA sense strand
gagagaagcugaggaccaa

SEQ ID NO: 2176846 - RNA, 19 nt, Homo sapiens
  misc_RNA (1)...(19): siRNA sense strand
cagcagcccugaugacauu

SEQ ID NO: 2176847 - RNA, 19 nt, Homo sapiens
  misc_RNA (1)...(19): siRNA sense strand
ccacaaagcccuucaucaa

SEQ ID NO: 2176848 - RNA, 19 nt, Homo sapiens
  misc_RNA (1)...(19): siRNA sense strand
acaagucccucaacauaaa

SEQ ID NO: 2176849 - RNA, 19 nt, Homo sapiens
  misc_RNA (1)...(19): siRNA sense strand
ucagacagauggacgauga

SEQ ID NO: 2176850 - RNA, 19 nt, Homo sapiens
  misc_RNA (1)...(19): siRNA sense strand
cagaaaguccuaugaguuu

SEQ ID NO: 2176851 - RNA, 19 nt, Homo sapiens
  misc_RNA (1)...(19): siRNA sense strand
gcagcaggguggacuggua

SEQ ID NO: 2176852 - RNA, 19 nt, Homo sapiens
  misc_RNA (1)...(19): siRNA sense strand
gaaagaaacgggugaagag

SEQ ID NO: 2176853 - RNA, 19 nt, Homo sapiens
  misc_RNA (1)...(19): siRNA sense strand
ugaacgagguggugucuga

SEQ ID NO: 2176854 - RNA, 19 nt, Homo sapiens
  misc_RNA (1)...(19): siRNA sense strand
gaaucaacgccauuuauga

SEQ ID NO: 2176855 - RNA, 19 nt, Homo sapiens
  misc_RNA (1)...(19): siRNA sense strand
gagcacagcggugucaaua

SEQ ID NO: 2176856 - RNA, 19 nt, Homo sapiens
  misc_RNA (1)...(19): siRNA sense strand
guucaaacaugccggagaa

SEQ ID NO: 2176857 - RNA, 19 nt, Homo sapiens
  misc_RNA (1)...(19): siRNA sense strand
gguggugucugaagccuuu

SEQ ID NO: 2176858 - RNA, 19 nt, Homo sapiens
  misc_RNA (1)...(19): siRNA sense strand
ugaagggacuaggcaauaa

SEQ ID NO: 2176859 - RNA, 19 nt, Homo sapiens
  misc_RNA (1)...(19): siRNA sense strand
ggaaagaaacgggugaaga

SEQ ID NO: 2176860 - RNA, 19 nt, Homo sapiens
  misc_RNA (1)...(19): siRNA sense strand
gaucuuggaugagguggaa

SEQ ID NO: 2176861 - RNA, 19 nt, Homo sapiens
  misc_RNA (1)...(19): siRNA sense strand
gaaaguccuaugaguuuga

SEQ ID NO: 2176862 - RNA, 19 nt, Homo sapiens
  misc_RNA (1)...(19): siRNA sense strand
ucacagaggcuaagaaugg

SEQ ID NO: 2176863 - RNA, 19 nt, Homo sapiens
  misc_RNA (1)...(19): siRNA sense strand
ccacagaacggcaggaaga

SEQ ID NO: 2176864 - RNA, 19 nt, Homo sapiens
  misc_RNA (1)...(19): siRNA sense strand
gaagggacuaggcaauaaa

SEQ ID NO: 2176865 - RNA, 19 nt, Homo sapiens
  misc_RNA (1)...(19): siRNA sense strand
gggaguggcucagaaguca

SEQ ID NO: 2176866 - RNA, 19 nt, Homo sapiens
  misc_RNA (1)...(19): siRNA sense strand
cauggagacucagauguuu

SEQ ID NO: 2176867 - RNA, 19 nt, Homo sapiens
  misc_RNA (1)...(19): siRNA sense strand
gguccgagcccaagaguau

SEQ ID NO: 2176868 - RNA, 19 nt, Homo sapiens
  misc_RNA (1)...(19): siRNA sense strand
ugacagaugagaacaguga

SEQ ID NO: 2176869 - RNA, 19 nt, Homo sapiens
  misc_RNA (1)...(19): siRNA sense strand
gauauguucagcuuggaua

SEQ ID NO: 2176870 - RNA, 19 nt, Homo sapiens
  misc_RNA (1)...(19): siRNA sense strand
ggaagagguccuugugguu

SEQ ID NO: 2176871 - RNA, 19 nt, Homo sapiens
  misc_RNA (1)...(19): siRNA sense strand
gguccacccuuccugagaa

SEQ ID NO: 2176872 - RNA, 19 nt, Homo sapiens
  misc_RNA (1)...(19): siRNA sense strand
gagaggaggaguagugaug

SEQ ID NO: 2176873 - RNA, 19 nt, Homo sapiens
  misc_RNA (1)...(19): siRNA sense strand
uaaaggacaagauaucaga

SEQ ID NO: 2176874 - RNA, 19 nt, Homo sapiens
  misc_RNA (1)...(19): siRNA sense strand
ugaagcaggucaagaaacu

SEQ ID NO: 2176875 - RNA, 19 nt, Homo sapiens
  misc_RNA (1)...(19): siRNA sense strand
cggagaacguucaaacaug

SEQ ID NO: 2176876 - RNA, 19 nt, Homo sapiens
  misc_RNA (1)...(19): siRNA sense strand
gcgaaucaacgccauuuau

SEQ ID NO: 2176877 - RNA, 19 nt, Homo sapiens
  misc_RNA (1)...(19): siRNA sense strand
gcagaagguucgguuacug

SEQ ID NO: 2176878 - RNA, 19 nt, Homo sapiens
  misc_RNA (1)...(19): siRNA sense strand
gaagaugggagcagaaggu

SEQ ID NO: 2176879 - RNA, 19 nt, Homo sapiens
  misc_RNA (1)...(19): siRNA sense strand
gaacagugagucugacagu

SEQ ID NO: 2176880 - RNA, 19 nt, Homo sapiens
  misc_RNA (1)...(19): siRNA sense strand
cagagaaggagaggaauaa

SEQ ID NO: 2176881 - RNA, 19 nt, Homo sapiens
  misc_RNA (1)...(19): siRNA sense strand
gaauaaaggagcagugaac

SEQ ID NO: 2176882 - RNA, 19 nt, Homo sapiens
  misc_RNA (1)...(19): siRNA sense strand
ucagaacccuugcccaucu

SEQ ID NO: 2176883 - RNA, 19 nt, Homo sapiens
  misc_RNA (1)...(19): siRNA sense strand
aaagcugucuccuccaaga

SEQ ID NO: 2176884 - RNA, 19 nt, Homo sapiens
  misc_RNA (1)...(19): siRNA sense strand
gaggagaacgucuaugaag

SEQ ID NO: 2176885 - RNA, 19 nt, Homo sapiens
  misc_RNA (1)...(19): siRNA sense strand
gaucaggagucaggcuuca

SEQ ID NO: 2176886 - RNA, 19 nt, Homo sapiens
  misc_RNA (1)...(19): siRNA sense strand
ggacaucgaguuacauggu

SEQ ID NO: 2176887 - RNA, 19 nt, Homo sapiens
  misc_RNA (1)...(19): siRNA sense strand
ggaggagaacgucuaugaa

SEQ ID NO: 2176888 - RNA, 19 nt, Homo sapiens
  misc_RNA (1)...(19): siRNA sense strand
gggcugacacgcacuuuau

SEQ ID NO: 2176889 - RNA, 19 nt, Homo sapiens
  misc_RNA (1)...(19): siRNA sense strand
ggacuaggcaauaaaauga

SEQ ID NO: 2176890 - RNA, 19 nt, Homo sapiens
  misc_RNA (1)...(19): siRNA sense strand
ccaagaguaucuggaaaca

SEQ ID NO: 2176891 - RNA, 19 nt, Homo sapiens
  misc_RNA (1)...(19): siRNA sense strand
ggacaagauaucagaaugg

SEQ ID NO: 2176892 - RNA, 19 nt, Homo sapiens
  misc_RNA (1)...(19): siRNA sense strand
gcccaagaguaucuggaaa

SEQ ID NO: 2176893 - RNA, 19 nt, Homo sapiens
  misc_RNA (1)...(19): siRNA sense strand
gagaggagggucaucuuca

SEQ ID NO: 2176894 - RNA, 19 nt, Homo sapiens
  misc_RNA (1)...(19): siRNA sense strand
caacaguucccucugaagu

SEQ ID NO: 2176895 - RNA, 19 nt, Homo sapiens
  misc_RNA (1)...(19): siRNA sense strand
cgaaucaacgccauuuaug

SEQ ID NO: 2176896 - RNA, 19 nt, Homo sapiens
  misc_RNA (1)...(19): siRNA sense strand
cacaagucccucaacauaa

SEQ ID NO: 2176897 - RNA, 19 nt, Homo sapiens
  misc_RNA (1)...(19): siRNA sense strand
aagaguaucuggaaacacu

SEQ ID NO: 2176898 - RNA, 19 nt, Homo sapiens
  misc_RNA (1)...(19): siRNA sense strand
ggagcagaagguucgguua

SEQ ID NO: 2176899 - RNA, 19 nt, Homo sapiens
  misc_RNA (1)...(19): siRNA sense strand
ucaagcugcuggacacuag

SEQ ID NO: 2176900 - RNA, 19 nt, Homo sapiens
  misc_RNA (1)...(19): siRNA sense strand
ggaauaaaggagcagugaa

SEQ ID NO: 2176901 - RNA, 19 nt, Homo sapiens
  misc_RNA (1)...(19): siRNA sense strand
agucaagaauggauauguu

SEQ ID NO: 2176902 - RNA, 19 nt, Homo sapiens
  misc_RNA (1)...(19): siRNA sense strand
cagacggacaggaggauua

SEQ ID NO: 2176903 - RNA, 19 nt, Homo sapiens
  misc_RNA (1)...(19): siRNA sense strand
caacagccgguuccucaga

SEQ ID NO: 2176904 - RNA, 19 nt, Homo sapiens
  misc_RNA (1)...(19): siRNA sense strand
cggaggagaacgucuauga

SEQ ID NO: 2176905 - RNA, 19 nt, Homo sapiens
  misc_RNA (1)...(19): siRNA sense strand
acagaaaguccuaugaguu

SEQ ID NO: 2176906 - RNA, 19 nt, Homo sapiens
  misc_RNA (1)...(19): siRNA sense strand
gagaaggagaggaauaaag

SEQ ID NO: 2176907 - RNA, 19 nt, Homo sapiens
  misc_RNA (1)...(19): siRNA sense strand
ggucacagaggcuaagaau

SEQ ID NO: 2176908 - RNA, 19 nt, Homo sapiens
  misc_RNA (1)...(19): siRNA sense strand
gcaaaaccauccuugucaa

SEQ ID NO: 2176909 - RNA, 19 nt, Homo sapiens
  misc_RNA (1)...(19): siRNA sense strand
acaguucccucugaaguug

SEQ ID NO: 2176910 - RNA, 19 nt, Homo sapiens
  misc_RNA (1)...(19): siRNA sense strand
ugccagaacucacccaaca

SEQ ID NO: 2176911 - RNA, 19 nt, Homo sapiens
  misc_RNA (1)...(19): siRNA sense strand
gcaggaagaagagaaagau

SEQ ID NO: 2176912 - RNA, 19 nt, Homo sapiens
  misc_RNA (1)...(19): siRNA sense strand
aggagaacgucuaugaaga

SEQ ID NO: 2176913 - RNA, 19 nt, Homo sapiens
  misc_RNA (1)...(19): siRNA sense strand
cacagaaaguccuaugagu

SEQ ID NO: 2176914 - RNA, 19 nt, Homo sapiens
  misc_RNA (1)...(19): siRNA sense strand
gaacgggaaguggauccua

SEQ ID NO: 2176915 - RNA, 19 nt, Homo sapiens
  misc_RNA (1)...(19): siRNA sense strand
gaaggagaggaauaaagga

SEQ ID NO: 2176916 - RNA, 19 nt, Homo sapiens
  misc_RNA (1)...(19): siRNA sense strand
gaggagggucaucuucauu

SEQ ID NO: 2176917 - RNA, 19 nt, Homo sapiens
  misc_RNA (1)...(19): siRNA sense strand
ggagaggagggucaucuuc

SEQ ID NO: 2176918 - RNA, 19 nt, Homo sapiens
  misc_RNA (1)...(19): siRNA sense strand
aagcugguguugcgaauca

SEQ ID NO: 2176919 - RNA, 19 nt, Homo sapiens
  misc_RNA (1)...(19): siRNA sense strand
acacugcccuccugacaag

SEQ ID NO: 2176920 - RNA, 19 nt, Homo sapiens
  misc_RNA (1)...(19): siRNA sense strand
aggaaagguucaugcagaa

SEQ ID NO: 2176921 - RNA, 19 nt, Homo sapiens
  misc_RNA (1)...(19): siRNA sense strand
ccaagagccuccgccacuu

SEQ ID NO: 2176922 - RNA, 19 nt, Homo sapiens
  misc_RNA (1)...(19): siRNA sense strand
ccaccuggucuguguguuu

SEQ ID NO: 2176923 - RNA, 19 nt, Homo sapiens
  misc_RNA (1)...(19): siRNA sense strand
caggaaaagugacagauga

SEQ ID NO: 2176924 - RNA, 19 nt, Homo sapiens
  misc_RNA (1)...(19): siRNA sense strand
ggcaucggcuucaggaaag

SEQ ID NO: 2176925 - RNA, 19 nt, Homo sapiens
  misc_RNA (1)...(19): siRNA sense strand
gaaugaggccaggaacaga

SEQ ID NO: 2176926 - RNA, 19 nt, Homo sapiens
  misc_RNA (1)...(19): siRNA sense strand
acacagaggagaagcugaa

SEQ ID NO: 2176927 - RNA, 19 nt, Homo sapiens
  misc_RNA (1)...(19): siRNA sense strand
gaagaggcugucccaguca

SEQ ID NO: 2176928 - RNA, 19 nt, Homo sapiens
  misc_RNA (1)...(19): siRNA sense strand
agagaaagauacccaagcu

SEQ ID NO: 2176929 - RNA, 19 nt, Homo sapiens
  misc_RNA (1)...(19): siRNA sense strand
acagagaaggagaggaaua

SEQ ID NO: 2176930 - RNA, 19 nt, Homo sapiens
  misc_RNA (1)...(19): siRNA sense strand
gaggacaucgaguuacaug

SEQ ID NO: 2176931 - RNA, 19 nt, Homo sapiens
  misc_RNA (1)...(19): siRNA sense strand
ucgagcacguggacuuuga

SEQ ID NO: 2176932 - RNA, 19 nt, Homo sapiens
  misc_RNA (1)...(19): siRNA sense strand
gaagcugagucgggaugga

SEQ ID NO: 2176933 - RNA, 19 nt, Homo sapiens
  misc_RNA (1)...(19): siRNA sense strand
ggaacgagcuggcuuguga

SEQ ID NO: 2176934 - RNA, 19 nt, Homo sapiens
  misc_RNA (1)...(19): siRNA sense strand
gcacaagucccucaacaua

SEQ ID NO: 2176935 - RNA, 19 nt, Homo sapiens
  misc_RNA (1)...(19): siRNA sense strand
gaaguuuacugcauuguga

SEQ ID NO: 2176936 - RNA, 19 nt, Homo sapiens
  misc_RNA (1)...(19): siRNA sense strand
caacauaaaggacaagaua

SEQ ID NO: 2176937 - RNA, 19 nt, Homo sapiens
  misc_RNA (1)...(19): siRNA sense strand
gaacagagagcacagagaa

SEQ ID NO: 2176938 - RNA, 19 nt, Homo sapiens
  misc_RNA (1)...(19): siRNA sense strand
gaacugaggugaucgaacu

SEQ ID NO: 2176939 - RNA, 19 nt, Homo sapiens
  misc_RNA (1)...(19): siRNA sense strand
gcacagcggugucaauaag

SEQ ID NO: 2176940 - RNA, 19 nt, Homo sapiens
  misc_RNA (1)...(19): siRNA sense strand
agaagugugucuugaauuu

SEQ ID NO: 2176941 - RNA, 19 nt, Homo sapiens
  misc_RNA (1)...(19): siRNA sense strand
gaauggauauguucagcuu

SEQ ID NO: 2176942 - RNA, 19 nt, Homo sapiens
  misc_RNA (1)...(19): siRNA sense strand
gcaaagcugucuccuccaa

SEQ ID NO: 2176943 - RNA, 19 nt, Homo sapiens
  misc_RNA (1)...(19): siRNA sense strand
ccuaugaguuugaagauuu

SEQ ID NO: 2176944 - RNA, 19 nt, Homo sapiens
  misc_RNA (1)...(19): siRNA sense strand
gcacagagaaggagaggaa

SEQ ID NO: 2176945 - RNA, 19 nt, Homo sapiens
  misc_RNA (1)...(19): siRNA sense strand
gagagaagcugaggaccaa

SEQ ID NO: 2176946 - RNA, 19 nt, Homo sapiens
  misc_RNA (1)...(19): siRNA sense strand
cagcagcccugaugacauu

SEQ ID NO: 2176947 - RNA, 19 nt, Homo sapiens
  misc_RNA (1)...(19): siRNA sense strand
ccacaaagcccuucaucaa

SEQ ID NO: 2176948 - RNA, 19 nt, Homo sapiens
  misc_RNA (1)...(19): siRNA sense strand
acaagucccucaacauaaa

SEQ ID NO: 2176949 - RNA, 19 nt, Homo sapiens
  misc_RNA (1)...(19): siRNA sense strand
ucagacagauggacgauga

SEQ ID NO: 2176950 - RNA, 19 nt, Homo sapiens
  misc_RNA (1)...(19): siRNA sense strand
cagaaaguccuaugaguuu

SEQ ID NO: 2176951 - RNA, 19 nt, Homo sapiens
  misc_RNA (1)...(19): siRNA sense strand
gcagcaggguggacuggua

SEQ ID NO: 2176952 - RNA, 19 nt, Homo sapiens
  misc_RNA (1)...(19): siRNA sense strand
gaaagaaacgggugaagag

SEQ ID NO: 2176953 - RNA, 19 nt, Homo sapiens
  misc_RNA (1)...(19): siRNA sense strand
ugaacgagguggugucuga

SEQ ID NO: 2176954 - RNA, 19 nt, Homo sapiens
  misc_RNA (1)...(19): siRNA sense strand
gaaucaacgccauuuauga

SEQ ID NO: 2176955 - RNA, 19 nt, Homo sapiens
  misc_RNA (1)...(19): siRNA sense strand
gagcacagcggugucaaua

SEQ ID NO: 2176956 - RNA, 19 nt, Homo sapiens
  misc_RNA (1)...(19): siRNA sense strand
guucaaacaugccggagaa

SEQ ID NO: 2176957 - RNA, 19 nt, Homo sapiens
  misc_RNA (1)...(19): siRNA sense strand
gguggugucugaagccuuu

SEQ ID NO: 2176958 - RNA, 19 nt, Homo sapiens
  misc_RNA (1)...(19): siRNA sense strand
ugaagggacuaggcaauaa

SEQ ID NO: 2176959 - RNA, 19 nt, Homo sapiens
  misc_RNA (1)...(19): siRNA sense strand
ggaaagaaacgggugaaga

SEQ ID NO: 2176960 - RNA, 19 nt, Homo sapiens
  misc_RNA (1)...(19): siRNA sense strand
gaucuuggaugagguggaa

SEQ ID NO: 2176961 - RNA, 19 nt, Homo sapiens
  misc_RNA (1)...(19): siRNA sense strand
gaaaguccuaugaguuuga

SEQ ID NO: 2176962 - RNA, 19 nt, Homo sapiens
  misc_RNA (1)...(19): siRNA sense strand
ucacagaggcuaagaaugg

SEQ ID NO: 2176963 - RNA, 19 nt, Homo sapiens
  misc_RNA (1)...(19): siRNA sense strand
ccacagaacggcaggaaga

SEQ ID NO: 2176964 - RNA, 19 nt, Homo sapiens
  misc_RNA (1)...(19): siRNA sense strand
gaagggacuaggcaauaaa

SEQ ID NO: 2176965 - RNA, 19 nt, Homo sapiens
  misc_RNA (1)...(19): siRNA sense strand
gggaguggcucagaaguca

SEQ ID NO: 2176966 - RNA, 19 nt, Homo sapiens
  misc_RNA (1)...(19): siRNA sense strand
cauggagacucagauguuu

SEQ ID NO: 2176967 - RNA, 19 nt, Homo sapiens
  misc_RNA (1)...(19): siRNA sense strand
gguccgagcccaagaguau

SEQ ID NO: 2176968 - RNA, 19 nt, Homo sapiens
  misc_RNA (1)...(19): siRNA sense strand
ugacagaugagaacaguga

SEQ ID NO: 2176969 - RNA, 19 nt, Homo sapiens
  misc_RNA (1)...(19): siRNA sense strand
gauauguucagcuuggaua

SEQ ID NO: 2176970 - RNA, 19 nt, Homo sapiens
  misc_RNA (1)...(19): siRNA sense strand
ggaagagguccuugugguu

SEQ ID NO: 2176971 - RNA, 19 nt, Homo sapiens
  misc_RNA (1)...(19): siRNA sense strand
gguccacccuuccugagaa

SEQ ID NO: 2176972 - RNA, 19 nt, Homo sapiens
  misc_RNA (1)...(19): siRNA sense strand
gagaggaggaguagugaug

SEQ ID NO: 2176973 - RNA, 19 nt, Homo sapiens
  misc_RNA (1)...(19): siRNA sense strand
uaaaggacaagauaucaga

SEQ ID NO: 2176974 - RNA, 19 nt, Homo sapiens
  misc_RNA (1)...(19): siRNA sense strand
ugaagcaggucaagaaacu

SEQ ID NO: 2176975 - RNA, 19 nt, Homo sapiens
  misc_RNA (1)...(19): siRNA sense strand
cggagaacguucaaacaug

SEQ ID NO: 2176976 - RNA, 19 nt, Homo sapiens
  misc_RNA (1)...(19): siRNA sense strand
gcgaaucaacgccauuuau

SEQ ID NO: 2176977 - RNA, 19 nt, Homo sapiens
  misc_RNA (1)...(19): siRNA sense strand
gcagaagguucgguuacug

SEQ ID NO: 2176978 - RNA, 19 nt, Homo sapiens
  misc_RNA (1)...(19): siRNA sense strand
gaagaugggagcagaaggu

SEQ ID NO: 2176979 - RNA, 19 nt, Homo sapiens
  misc_RNA (1)...(19): siRNA sense strand
gaacagugagucugacagu

SEQ ID NO: 2176980 - RNA, 19 nt, Homo sapiens
  misc_RNA (1)...(19): siRNA sense strand
cagagaaggagaggaauaa

SEQ ID NO: 2176981 - RNA, 19 nt, Homo sapiens
  misc_RNA (1)...(19): siRNA sense strand
gaauaaaggagcagugaac

SEQ ID NO: 2176982 - RNA, 19 nt, Homo sapiens
  misc_RNA (1)...(19): siRNA sense strand
ucagaacccuugcccaucu

SEQ ID NO: 2176983 - RNA, 19 nt, Homo sapiens
  misc_RNA (1)...(19): siRNA sense strand
aaagcugucuccuccaaga

SEQ ID NO: 2176984 - RNA, 19 nt, Homo sapiens
  misc_RNA (1)...(19): siRNA sense strand
gaggagaacgucuaugaag

SEQ ID NO: 2176985 - RNA, 19 nt, Homo sapiens
  misc_RNA (1)...(19): siRNA sense strand
gaucaggagucaggcuuca

SEQ ID NO: 2176986 - RNA, 19 nt, Homo sapiens
  misc_RNA (1)...(19): siRNA sense strand
ggacaucgaguuacauggu

SEQ ID NO: 2176987 - RNA, 19 nt, Homo sapiens
  misc_RNA (1)...(19): siRNA sense strand
ggaggagaacgucuaugaa

SEQ ID NO: 2176988 - RNA, 19 nt, Homo sapiens
  misc_RNA (1)...(19): siRNA sense strand
gggcugacacgcacuuuau

SEQ ID NO: 2176989 - RNA, 19 nt, Homo sapiens
  misc_RNA (1)...(19): siRNA sense strand
ggacuaggcaauaaaauga

SEQ ID NO: 2176990 - RNA, 19 nt, Homo sapiens
  misc_RNA (1)...(19): siRNA sense strand
ccaagaguaucuggaaaca

SEQ ID NO: 2176991 - RNA, 19 nt, Homo sapiens
  misc_RNA (1)...(19): siRNA sense strand
ggacaagauaucagaaugg

SEQ ID NO: 2176992 - RNA, 19 nt, Homo sapiens
  misc_RNA (1)...(19): siRNA sense strand
gcccaagaguaucuggaaa

SEQ ID NO: 2176993 - RNA, 19 nt, Homo sapiens
  misc_RNA (1)...(19): siRNA sense strand
gagaggagggucaucuuca

SEQ ID NO: 2176994 - RNA, 19 nt, Homo sapiens
  misc_RNA (1)...(19): siRNA sense strand
caacaguucccucugaagu

SEQ ID NO: 2176995 - RNA, 19 nt, Homo sapiens
  misc_RNA (1)...(19): siRNA sense strand
cgaaucaacgccauuuaug

SEQ ID NO: 2176996 - RNA, 19 nt, Homo sapiens
  misc_RNA (1)...(19): siRNA sense strand
cacaagucccucaacauaa

SEQ ID NO: 2176997 - RNA, 19 nt, Homo sapiens
  misc_RNA (1)...(19): siRNA sense strand
aagaguaucuggaaacacu

SEQ ID NO: 2176998 - RNA, 19 nt, Homo sapiens
  misc_RNA (1)...(19): siRNA sense strand
ggagcagaagguucgguua

SEQ ID NO: 2176999 - RNA, 19 nt, Homo sapiens
  misc_RNA (1)...(19): siRNA sense strand
ucaagcugcuggacacuag

SEQ ID NO: 2177000 - RNA, 19 nt, Homo sapiens
  misc_RNA (1)...(19): siRNA sense strand
ggaauaaaggagcagugaa

SEQ ID NO: 2177001 - RNA, 19 nt, Homo sapiens
  misc_RNA (1)...(19): siRNA sense strand
agucaagaauggauauguu

SEQ ID NO: 2177002 - RNA, 19 nt, Homo sapiens
  misc_RNA (1)...(19): siRNA sense strand
cagacggacaggaggauua

SEQ ID NO: 2177003 - RNA, 19 nt, Homo sapiens
  misc_RNA (1)...(19): siRNA sense strand
caacagccgguuccucaga

SEQ ID NO: 2177004 - RNA, 19 nt, Homo sapiens
  misc_RNA (1)...(19): siRNA sense strand
cggaggagaacgucuauga

SEQ ID NO: 2177005 - RNA, 19 nt, Homo sapiens
  misc_RNA (1)...(19): siRNA sense strand
acagaaaguccuaugaguu

SEQ ID NO: 2177006 - RNA, 19 nt, Homo sapiens
  misc_RNA (1)...(19): siRNA sense strand
gagaaggagaggaauaaag

SEQ ID NO: 2177007 - RNA, 19 nt, Homo sapiens
  misc_RNA (1)...(19): siRNA sense strand
ggucacagaggcuaagaau

SEQ ID NO: 2177008 - RNA, 19 nt, Homo sapiens
  misc_RNA (1)...(19): siRNA sense strand
gcaaaaccauccuugucaa

SEQ ID NO: 2177009 - RNA, 19 nt, Homo sapiens
  misc_RNA (1)...(19): siRNA sense strand
acaguucccucugaaguug

SEQ ID NO: 2177010 - RNA, 19 nt, Homo sapiens
  misc_RNA (1)...(19): siRNA sense strand
ugccagaacucacccaaca

SEQ ID NO: 2177011 - RNA, 19 nt, Homo sapiens
  misc_RNA (1)...(19): siRNA sense strand
gcaggaagaagagaaagau

SEQ ID NO: 2177012 - RNA, 19 nt, Homo sapiens
  misc_RNA (1)...(19): siRNA sense strand
aggagaacgucuaugaaga

SEQ ID NO: 2177013 - RNA, 19 nt, Homo sapiens
  misc_RNA (1)...(19): siRNA sense strand
cacagaaaguccuaugagu

SEQ ID NO: 2177014 - RNA, 19 nt, Homo sapiens
  misc_RNA (1)...(19): siRNA sense strand
gaacgggaaguggauccua

SEQ ID NO: 2177015 - RNA, 19 nt, Homo sapiens
  misc_RNA (1)...(19): siRNA sense strand
gaaggagaggaauaaagga

SEQ ID NO: 2177016 - RNA, 19 nt, Homo sapiens
  misc_RNA (1)...(19): siRNA sense strand
gaggagggucaucuucauu

SEQ ID NO: 2177017 - RNA, 19 nt, Homo sapiens
  misc_RNA (1)...(19): siRNA sense strand
ggagaggagggucaucuuc

SEQ ID NO: 2177018 - RNA, 19 nt, Homo sapiens
  misc_RNA (1)...(19): siRNA sense strand
aagcugguguugcgaauca

SEQ ID NO: 2177019 - RNA, 19 nt, Homo sapiens
  misc_RNA (1)...(19): siRNA sense strand
acacugcccuccugacaag

SEQ ID NO: 2177020 - RNA, 19 nt, Homo sapiens
  misc_RNA (1)...(19): siRNA sense strand
aggaaagguucaugcagaa

SEQ ID NO: 2177021 - RNA, 19 nt, Homo sapiens
  misc_RNA (1)...(19): siRNA sense strand
ccaagagccuccgccacuu

SEQ ID NO: 2177022 - RNA, 19 nt, Homo sapiens
  misc_RNA (1)...(19): siRNA sense strand
ccaccuggucuguguguuu

SEQ ID NO: 2177023 - RNA, 19 nt, Homo sapiens
  misc_RNA (1)...(19): siRNA sense strand
caggaaaagugacagauga

SEQ ID NO: 2177024 - RNA, 19 nt, Homo sapiens
  misc_RNA (1)...(19): siRNA sense strand
ggcaucggcuucaggaaag

SEQ ID NO: 2177025 - RNA, 19 nt, Homo sapiens
  misc_RNA (1)...(19): siRNA sense strand
gaaugaggccaggaacaga

SEQ ID NO: 2177026 - RNA, 19 nt, Homo sapiens
  misc_RNA (1)...(19): siRNA sense strand
acacagaggagaagcugaa

SEQ ID NO: 2177027 - RNA, 19 nt, Homo sapiens
  misc_RNA (1)...(19): siRNA sense strand
gaagaggcugucccaguca

SEQ ID NO: 2177028 - RNA, 19 nt, Homo sapiens
  misc_RNA (1)...(19): siRNA sense strand
agagaaagauacccaagcu

SEQ ID NO: 2177029 - RNA, 19 nt, Homo sapiens
  misc_RNA (1)...(19): siRNA sense strand
acagagaaggagaggaaua

SEQ ID NO: 2177030 - RNA, 19 nt, Homo sapiens
  misc_RNA (1)...(19): siRNA sense strand
gaggacaucgaguuacaug

SEQ ID NO: 2177031 - RNA, 19 nt, Homo sapiens
  misc_RNA (1)...(19): siRNA sense strand
ucgagcacguggacuuuga

SEQ ID NO: 2177032 - RNA, 19 nt, Homo sapiens
  misc_RNA (1)...(19): siRNA sense strand
gaagcugagucgggaugga

SEQ ID NO: 2177033 - RNA, 19 nt, Homo sapiens
  misc_RNA (1)...(19): siRNA sense strand
gaacagggaugcuuagaua

SEQ ID NO: 2177034 - RNA, 19 nt, Homo sapiens
  misc_RNA (1)...(19): siRNA sense strand
gaagaauacuggaaaguug

SEQ ID NO: 2177035 - RNA, 19 nt, Homo sapiens
  misc_RNA (1)...(19): siRNA sense strand
gaagaggauugccguuuaa

SEQ ID NO: 2177036 - RNA, 19 nt, Homo sapiens
  misc_RNA (1)...(19): siRNA sense strand
ggacuugugugcugccuua

SEQ ID NO: 2177037 - RNA, 19 nt, Homo sapiens
  misc_RNA (1)...(19): siRNA sense strand
gacaagagcuacugcauca

SEQ ID NO: 2177038 - RNA, 19 nt, Homo sapiens
  misc_RNA (1)...(19): siRNA sense strand
gaugaacaguugaacauga

SEQ ID NO: 2177039 - RNA, 19 nt, Homo sapiens
  misc_RNA (1)...(19): siRNA sense strand
agaagaggauugccguuua

SEQ ID NO: 2177040 - RNA, 19 nt, Homo sapiens
  misc_RNA (1)...(19): siRNA sense strand
agaaagaccugcggcauaa

SEQ ID NO: 2177041 - RNA, 19 nt, Homo sapiens
  misc_RNA (1)...(19): siRNA sense strand
gcaggaaauucaucuacaa

SEQ ID NO: 2177042 - RNA, 19 nt, Homo sapiens
  misc_RNA (1)...(19): siRNA sense strand
gaacaagggagaaugcuau

SEQ ID NO: 2177043 - RNA, 19 nt, Homo sapiens
  misc_RNA (1)...(19): siRNA sense strand
gcaaaggcuuccuccagaa

SEQ ID NO: 2177044 - RNA, 19 nt, Homo sapiens
  misc_RNA (1)...(19): siRNA sense strand
caagggagaaugcuauuaa

SEQ ID NO: 2177045 - RNA, 19 nt, Homo sapiens
  misc_RNA (1)...(19): siRNA sense strand
gcagauacccaaaguacaa

SEQ ID NO: 2177046 - RNA, 19 nt, Homo sapiens
  misc_RNA (1)...(19): siRNA sense strand
gcuugaagguccacuugua

SEQ ID NO: 2177047 - RNA, 19 nt, Homo sapiens
  misc_RNA (1)...(19): siRNA sense strand
gacaagaccuuccgguaca

SEQ ID NO: 2177048 - RNA, 19 nt, Homo sapiens
  misc_RNA (1)...(19): siRNA sense strand
ggcagaagcaaauguauaa

SEQ ID NO: 2177049 - RNA, 19 nt, Homo sapiens
  misc_RNA (1)...(19): siRNA sense strand
caacuagcccuccuacuga

SEQ ID NO: 2177050 - RNA, 19 nt, Homo sapiens
  misc_RNA (1)...(19): siRNA sense strand
gaggauugccguuuaaaug

SEQ ID NO: 2177051 - RNA, 19 nt, Homo sapiens
  misc_RNA (1)...(19): siRNA sense strand
ccagggcgcuuagaaauuc

SEQ ID NO: 2177052 - RNA, 19 nt, Homo sapiens
  misc_RNA (1)...(19): siRNA sense strand
cuggaaaguugcuauguuu

SEQ ID NO: 2177053 - RNA, 19 nt, Homo sapiens
  misc_RNA (1)...(19): siRNA sense strand
gggagaaugcuauuaauca

SEQ ID NO: 2177054 - RNA, 19 nt, Homo sapiens
  misc_RNA (1)...(19): siRNA sense strand
gccauucucuugugugaug

SEQ ID NO: 2177055 - RNA, 19 nt, Homo sapiens
  misc_RNA (1)...(19): siRNA sense strand
guaaggagggauuugcuaa

SEQ ID NO: 2177056 - RNA, 19 nt, Homo sapiens
  misc_RNA (1)...(19): siRNA sense strand
uugaugauguggccuuaua

SEQ ID NO: 2177057 - RNA, 19 nt, Homo sapiens
  misc_RNA (1)...(19): siRNA sense strand
ggaaagagagaaagauuuu

SEQ ID NO: 2177058 - RNA, 19 nt, Homo sapiens
  misc_RNA (1)...(19): siRNA sense strand
gggaaagagagaaagauuu

SEQ ID NO: 2177059 - RNA, 19 nt, Homo sapiens
  misc_RNA (1)...(19): siRNA sense strand
gcaaauguauaagcaagag

SEQ ID NO: 2177060 - RNA, 19 nt, Homo sapiens
  misc_RNA (1)...(19): siRNA sense strand
cauaugauccagacaagaa

SEQ ID NO: 2177061 - RNA, 19 nt, Homo sapiens
  misc_RNA (1)...(19): siRNA sense strand
ggagaaugcuauuaaucag

SEQ ID NO: 2177062 - RNA, 19 nt, Homo sapiens
  misc_RNA (1)...(19): siRNA sense strand
gggccaaccugaagaagca

SEQ ID NO: 2177063 - RNA, 19 nt, Homo sapiens
  misc_RNA (1)...(19): siRNA sense strand
gaaaguugcuauguuuuga

SEQ ID NO: 2177064 - RNA, 19 nt, Homo sapiens
  misc_RNA (1)...(19): siRNA sense strand
caagagaugaagaccaauu

SEQ ID NO: 2177065 - RNA, 19 nt, Homo sapiens
  misc_RNA (1)...(19): siRNA sense strand
ggaacaagggagaaugcua

SEQ ID NO: 2177066 - RNA, 19 nt, Homo sapiens
  misc_RNA (1)...(19): siRNA sense strand
caguugaacaugaagaaua

SEQ ID NO: 2177067 - RNA, 19 nt, Homo sapiens
  misc_RNA (1)...(19): siRNA sense strand
gggagauccuggagaagug

SEQ ID NO: 2177068 - RNA, 19 nt, Homo sapiens
  misc_RNA (1)...(19): siRNA sense strand
ugaagguccacuuguauaa

SEQ ID NO: 2177069 - RNA, 19 nt, Homo sapiens
  misc_RNA (1)...(19): siRNA sense strand
ggaaggccuccaugaaguu

SEQ ID NO: 2177070 - RNA, 19 nt, Homo sapiens
  misc_RNA (1)...(19): siRNA sense strand
ccucgucacucaucagguu

SEQ ID NO: 2177071 - RNA, 19 nt, Homo sapiens
  misc_RNA (1)...(19): siRNA sense strand
gaugauguggccuuauauu

SEQ ID NO: 2177072 - RNA, 19 nt, Homo sapiens
  misc_RNA (1)...(19): siRNA sense strand
agaagcaaauguauaagca

SEQ ID NO: 2177073 - RNA, 19 nt, Homo sapiens
  misc_RNA (1)...(19): siRNA sense strand
gaaagucuuccaaguaagg

SEQ ID NO: 2177074 - RNA, 19 nt, Homo sapiens
  misc_RNA (1)...(19): siRNA sense strand
aagaaagaccugcggcaua

SEQ ID NO: 2177075 - RNA, 19 nt, Homo sapiens
  misc_RNA (1)...(19): siRNA sense strand
gaaggaacucccaggacaa

SEQ ID NO: 2177076 - RNA, 19 nt, Homo sapiens
  misc_RNA (1)...(19): siRNA sense strand
gaacaguugaacaugaaga

SEQ ID NO: 2177077 - RNA, 19 nt, Homo sapiens
  misc_RNA (1)...(19): siRNA sense strand
cagcgaacagggaugcuua

SEQ ID NO: 2177078 - RNA, 19 nt, Homo sapiens
  misc_RNA (1)...(19): siRNA sense strand
gaagaagcaccugugucua

SEQ ID NO: 2177079 - RNA, 19 nt, Homo sapiens
  misc_RNA (1)...(19): siRNA sense strand
uaacugugacauuugauga

SEQ ID NO: 2177080 - RNA, 19 nt, Homo sapiens
  misc_RNA (1)...(19): siRNA sense strand
aagagaugaagaccaauua

SEQ ID NO: 2177081 - RNA, 19 nt, Homo sapiens
  misc_RNA (1)...(19): siRNA sense strand
ggcaggaaauucaucuaca

SEQ ID NO: 2177082 - RNA, 19 nt, Homo sapiens
  misc_RNA (1)...(19): siRNA sense strand
ugaagaauacuggaaaguu

SEQ ID NO: 2177083 - RNA, 19 nt, Homo sapiens
  misc_RNA (1)...(19): siRNA sense strand
ccaauuacgagacccuuga

SEQ ID NO: 2177084 - RNA, 19 nt, Homo sapiens
  misc_RNA (1)...(19): siRNA sense strand
ggacgagcacaucagaguu

SEQ ID NO: 2177085 - RNA, 19 nt, Homo sapiens
  misc_RNA (1)...(19): siRNA sense strand
ugaagaagcaccugugucu

SEQ ID NO: 2177086 - RNA, 19 nt, Homo sapiens
  misc_RNA (1)...(19): siRNA sense strand
ccacagggccaagaugcua

SEQ ID NO: 2177087 - RNA, 19 nt, Homo sapiens
  misc_RNA (1)...(19): siRNA sense strand
ggauugccguuuaaauggu

SEQ ID NO: 2177088 - RNA, 19 nt, Homo sapiens
  misc_RNA (1)...(19): siRNA sense strand
cagauuugaucacauggau

SEQ ID NO: 2177089 - RNA, 19 nt, Homo sapiens
  misc_RNA (1)...(19): siRNA sense strand
agcaagagaugaagaccaa

SEQ ID NO: 2177090 - RNA, 19 nt, Homo sapiens
  misc_RNA (1)...(19): siRNA sense strand
gagaaguggcagaagcaaa

SEQ ID NO: 2177091 - RNA, 19 nt, Homo sapiens
  misc_RNA (1)...(19): siRNA sense strand
cgguaacugugacauuuga

SEQ ID NO: 2177092 - RNA, 19 nt, Homo sapiens
  misc_RNA (1)...(19): siRNA sense strand
gcaaaaguuucacucaaca

SEQ ID NO: 2177093 - RNA, 19 nt, Homo sapiens
  misc_RNA (1)...(19): siRNA sense strand
caaaagccauucucuugug

SEQ ID NO: 2177094 - RNA, 19 nt, Homo sapiens
  misc_RNA (1)...(19): siRNA sense strand
cgcagaggcuccuguguca

SEQ ID NO: 2177095 - RNA, 19 nt, Homo sapiens
  misc_RNA (1)...(19): siRNA sense strand
acagggaugcuuagauaaa

SEQ ID NO: 2177096 - RNA, 19 nt, Homo sapiens
  misc_RNA (1)...(19): siRNA sense strand
gaagcaaauguauaagcaa

SEQ ID NO: 2177097 - RNA, 19 nt, Homo sapiens
  misc_RNA (1)...(19): siRNA sense strand
caagccagauuugaucaca

SEQ ID NO: 2177098 - RNA, 19 nt, Homo sapiens
  misc_RNA (1)...(19): siRNA sense strand
uaaggagggauuugcuaaa

SEQ ID NO: 2177099 - RNA, 19 nt, Homo sapiens
  misc_RNA (1)...(19): siRNA sense strand
uggcagaagcaaauguaua

SEQ ID NO: 2177100 - RNA, 19 nt, Homo sapiens
  misc_RNA (1)...(19): siRNA sense strand
aagaugcuauuccugcuau

SEQ ID NO: 2177101 - RNA, 19 nt, Homo sapiens
  misc_RNA (1)...(19): siRNA sense strand
aaacaagaaggacaacuag

SEQ ID NO: 2177102 - RNA, 19 nt, Homo sapiens
  misc_RNA (1)...(19): siRNA sense strand
gcucaagacccacauugca

SEQ ID NO: 2177103 - RNA, 19 nt, Homo sapiens
  misc_RNA (1)...(19): siRNA sense strand
acaagagcuucuccuggaa

SEQ ID NO: 2177104 - RNA, 19 nt, Homo sapiens
  misc_RNA (1)...(19): siRNA sense strand
acaacuagcccuccuacug

SEQ ID NO: 2177105 - RNA, 19 nt, Homo sapiens
  misc_RNA (1)...(19): siRNA sense strand
agaaguggcagaagcaaau

SEQ ID NO: 2177106 - RNA, 19 nt, Homo sapiens
  misc_RNA (1)...(19): siRNA sense strand
caagaugcuauuccugcua

SEQ ID NO: 2177107 - RNA, 19 nt, Homo sapiens
  misc_RNA (1)...(19): siRNA sense strand
agugggagauccuggagaa

SEQ ID NO: 2177108 - RNA, 19 nt, Homo sapiens
  misc_RNA (1)...(19): siRNA sense strand
cagcauaugauccagacaa

SEQ ID NO: 2177109 - RNA, 19 nt, Homo sapiens
  misc_RNA (1)...(19): siRNA sense strand
aagccauucucuuguguga

SEQ ID NO: 2177110 - RNA, 19 nt, Homo sapiens
  misc_RNA (1)...(19): siRNA sense strand
gcagugagugugagaagag

SEQ ID NO: 2177111 - RNA, 19 nt, Homo sapiens
  misc_RNA (1)...(19): siRNA sense strand
cagaggcuccugugucaga

SEQ ID NO: 2177112 - RNA, 19 nt, Homo sapiens
  misc_RNA (1)...(19): siRNA sense strand
caugaagaauacuggaaag

SEQ ID NO: 2177113 - RNA, 19 nt, Homo sapiens
  misc_RNA (1)...(19): siRNA sense strand
aaaguuucacucaacagua

SEQ ID NO: 2177114 - RNA, 19 nt, Homo sapiens
  misc_RNA (1)...(19): siRNA sense strand
uguauaagcaagagaugaa

SEQ ID NO: 2177115 - RNA, 19 nt, Homo sapiens
  misc_RNA (1)...(19): siRNA sense strand
acuggaaaguugcuauguu

SEQ ID NO: 2177116 - RNA, 19 nt, Homo sapiens
  misc_RNA (1)...(19): siRNA sense strand
augaacaguugaacaugaa

SEQ ID NO: 2177117 - RNA, 19 nt, Homo sapiens
  misc_RNA (1)...(19): siRNA sense strand
gacgagcacaucagaguuc

SEQ ID NO: 2177118 - RNA, 19 nt, Homo sapiens
  misc_RNA (1)...(19): siRNA sense strand
ggcaugaagguccaucuga

SEQ ID NO: 2177119 - RNA, 19 nt, Homo sapiens
  misc_RNA (1)...(19): siRNA sense strand
ggacaaaagaagaggauug

SEQ ID NO: 2177120 - RNA, 19 nt, Homo sapiens
  misc_RNA (1)...(19): siRNA sense strand
ggaaaguugcuauguuuug

SEQ ID NO: 2177121 - RNA, 19 nt, Homo sapiens
  misc_RNA (1)...(19): siRNA sense strand
gaagguccacuuguauaag

SEQ ID NO: 2177122 - RNA, 19 nt, Homo sapiens
  misc_RNA (1)...(19): siRNA sense strand
gagcacaucagaguucaca

SEQ ID NO: 2177123 - RNA, 19 nt, Homo sapiens
  misc_RNA (1)...(19): siRNA sense strand
aagggagaaugcuauuaau

SEQ ID NO: 2177124 - RNA, 19 nt, Homo sapiens
  misc_RNA (1)...(19): siRNA sense strand
gcucacagaacacauucga

SEQ ID NO: 2177125 - RNA, 19 nt, Homo sapiens
  misc_RNA (1)...(19): siRNA sense strand
gccaaaagccauucucuug

SEQ ID NO: 2177126 - RNA, 19 nt, Homo sapiens
  misc_RNA (1)...(19): siRNA sense strand
agagaagcccuaccagugu

SEQ ID NO: 2177127 - RNA, 19 nt, Homo sapiens
  misc_RNA (1)...(19): siRNA sense strand
ggaacaagagugggagauc

SEQ ID NO: 2177128 - RNA, 19 nt, Homo sapiens
  misc_RNA (1)...(19): siRNA sense strand
aagaagaggauugccguuu

SEQ ID NO: 2177129 - RNA, 19 nt, Homo sapiens
  misc_RNA (1)...(19): siRNA sense strand
cgaggagcccuuccagugu

SEQ ID NO: 2177130 - RNA, 19 nt, Homo sapiens
  misc_RNA (1)...(19): siRNA sense strand
guaacugugacauuugaug

SEQ ID NO: 2177131 - RNA, 19 nt, Homo sapiens
  misc_RNA (1)...(19): siRNA sense strand
cgagggaaagagagaaaga

SEQ ID NO: 2177132 - RNA, 19 nt, Homo sapiens
  misc_RNA (1)...(19): siRNA sense strand
uucgguaacugugacauuu

SEQ ID NO: 2177133 - RNA, 19 nt, Homo sapiens
  misc_RNA (1)...(19): siRNA sense strand
gaacagggaugcuuagaua

SEQ ID NO: 2177134 - RNA, 19 nt, Homo sapiens
  misc_RNA (1)...(19): siRNA sense strand
gaagaauacuggaaaguug

SEQ ID NO: 2177135 - RNA, 19 nt, Homo sapiens
  misc_RNA (1)...(19): siRNA sense strand
gaagaggauugccguuuaa

SEQ ID NO: 2177136 - RNA, 19 nt, Homo sapiens
  misc_RNA (1)...(19): siRNA sense strand
ggacuugugugcugccuua

SEQ ID NO: 2177137 - RNA, 19 nt, Homo sapiens
  misc_RNA (1)...(19): siRNA sense strand
gacaagagcuacugcauca

SEQ ID NO: 2177138 - RNA, 19 nt, Homo sapiens
  misc_RNA (1)...(19): siRNA sense strand
gaugaacaguugaacauga

SEQ ID NO: 2177139 - RNA, 19 nt, Homo sapiens
  misc_RNA (1)...(19): siRNA sense strand
agaagaggauugccguuua

SEQ ID NO: 2177140 - RNA, 19 nt, Homo sapiens
  misc_RNA (1)...(19): siRNA sense strand
agaaagaccugcggcauaa

SEQ ID NO: 2177141 - RNA, 19 nt, Homo sapiens
  misc_RNA (1)...(19): siRNA sense strand
gcaggaaauucaucuacaa

SEQ ID NO: 2177142 - RNA, 19 nt, Homo sapiens
  misc_RNA (1)...(19): siRNA sense strand
gaacaagggagaaugcuau

SEQ ID NO: 2177143 - RNA, 19 nt, Homo sapiens
  misc_RNA (1)...(19): siRNA sense strand
gcaaaggcuuccuccagaa

SEQ ID NO: 2177144 - RNA, 19 nt, Homo sapiens
  misc_RNA (1)...(19): siRNA sense strand
caagggagaaugcuauuaa

SEQ ID NO: 2177145 - RNA, 19 nt, Homo sapiens
  misc_RNA (1)...(19): siRNA sense strand
gcagauacccaaaguacaa

SEQ ID NO: 2177146 - RNA, 19 nt, Homo sapiens
  misc_RNA (1)...(19): siRNA sense strand
gcuugaagguccacuugua

SEQ ID NO: 2177147 - RNA, 19 nt, Homo sapiens
  misc_RNA (1)...(19): siRNA sense strand
gacaagaccuuccgguaca

SEQ ID NO: 2177148 - RNA, 19 nt, Homo sapiens
  misc_RNA (1)...(19): siRNA sense strand
ggcagaagcaaauguauaa

SEQ ID NO: 2177149 - RNA, 19 nt, Homo sapiens
  misc_RNA (1)...(19): siRNA sense strand
caacuagcccuccuacuga

SEQ ID NO: 2177150 - RNA, 19 nt, Homo sapiens
  misc_RNA (1)...(19): siRNA sense strand
gaggauugccguuuaaaug

SEQ ID NO: 2177151 - RNA, 19 nt, Homo sapiens
  misc_RNA (1)...(19): siRNA sense strand
ccagggcgcuuagaaauuc

SEQ ID NO: 2177152 - RNA, 19 nt, Homo sapiens
  misc_RNA (1)...(19): siRNA sense strand
cuggaaaguugcuauguuu

SEQ ID NO: 2177153 - RNA, 19 nt, Homo sapiens
  misc_RNA (1)...(19): siRNA sense strand
gggagaaugcuauuaauca

SEQ ID NO: 2177154 - RNA, 19 nt, Homo sapiens
  misc_RNA (1)...(19): siRNA sense strand
gccauucucuugugugaug

SEQ ID NO: 2177155 - RNA, 19 nt, Homo sapiens
  misc_RNA (1)...(19): siRNA sense strand
guaaggagggauuugcuaa

SEQ ID NO: 2177156 - RNA, 19 nt, Homo sapiens
  misc_RNA (1)...(19): siRNA sense strand
uugaugauguggccuuaua

SEQ ID NO: 2177157 - RNA, 19 nt, Homo sapiens
  misc_RNA (1)...(19): siRNA sense strand
ggaaagagagaaagauuuu

SEQ ID NO: 2177158 - RNA, 19 nt, Homo sapiens
  misc_RNA (1)...(19): siRNA sense strand
gggaaagagagaaagauuu

SEQ ID NO: 2177159 - RNA, 19 nt, Homo sapiens
  misc_RNA (1)...(19): siRNA sense strand
gcaaauguauaagcaagag

SEQ ID NO: 2177160 - RNA, 19 nt, Homo sapiens
  misc_RNA (1)...(19): siRNA sense strand
cauaugauccagacaagaa

SEQ ID NO: 2177161 - RNA, 19 nt, Homo sapiens
  misc_RNA (1)...(19): siRNA sense strand
ggagaaugcuauuaaucag

SEQ ID NO: 2177162 - RNA, 19 nt, Homo sapiens
  misc_RNA (1)...(19): siRNA sense strand
gggccaaccugaagaagca

SEQ ID NO: 2177163 - RNA, 19 nt, Homo sapiens
  misc_RNA (1)...(19): siRNA sense strand
gaaaguugcuauguuuuga

SEQ ID NO: 2177164 - RNA, 19 nt, Homo sapiens
  misc_RNA (1)...(19): siRNA sense strand
caagagaugaagaccaauu

SEQ ID NO: 2177165 - RNA, 19 nt, Homo sapiens
  misc_RNA (1)...(19): siRNA sense strand
ggaacaagggagaaugcua

SEQ ID NO: 2177166 - RNA, 19 nt, Homo sapiens
  misc_RNA (1)...(19): siRNA sense strand
caguugaacaugaagaaua

SEQ ID NO: 2177167 - RNA, 19 nt, Homo sapiens
  misc_RNA (1)...(19): siRNA sense strand
gggagauccuggagaagug

SEQ ID NO: 2177168 - RNA, 19 nt, Homo sapiens
  misc_RNA (1)...(19): siRNA sense strand
ugaagguccacuuguauaa

SEQ ID NO: 2177169 - RNA, 19 nt, Homo sapiens
  misc_RNA (1)...(19): siRNA sense strand
ggaaggccuccaugaaguu

SEQ ID NO: 2177170 - RNA, 19 nt, Homo sapiens
  misc_RNA (1)...(19): siRNA sense strand
ccucgucacucaucagguu

SEQ ID NO: 2177171 - RNA, 19 nt, Homo sapiens
  misc_RNA (1)...(19): siRNA sense strand
gaugauguggccuuauauu

SEQ ID NO: 2177172 - RNA, 19 nt, Homo sapiens
  misc_RNA (1)...(19): siRNA sense strand
agaagcaaauguauaagca

SEQ ID NO: 2177173 - RNA, 19 nt, Homo sapiens
  misc_RNA (1)...(19): siRNA sense strand
gaaagucuuccaaguaagg

SEQ ID NO: 2177174 - RNA, 19 nt, Homo sapiens
  misc_RNA (1)...(19): siRNA sense strand
aagaaagaccugcggcaua

SEQ ID NO: 2177175 - RNA, 19 nt, Homo sapiens
  misc_RNA (1)...(19): siRNA sense strand
gaaggaacucccaggacaa

SEQ ID NO: 2177176 - RNA, 19 nt, Homo sapiens
  misc_RNA (1)...(19): siRNA sense strand
gaacaguugaacaugaaga

SEQ ID NO: 2177177 - RNA, 19 nt, Homo sapiens
  misc_RNA (1)...(19): siRNA sense strand
cagcgaacagggaugcuua

SEQ ID NO: 2177178 - RNA, 19 nt, Homo sapiens
  misc_RNA (1)...(19): siRNA sense strand
gaagaagcaccugugucua

SEQ ID NO: 2177179 - RNA, 19 nt, Homo sapiens
  misc_RNA (1)...(19): siRNA sense strand
uaacugugacauuugauga

SEQ ID NO: 2177180 - RNA, 19 nt, Homo sapiens
  misc_RNA (1)...(19): siRNA sense strand
aagagaugaagaccaauua

SEQ ID NO: 2177181 - RNA, 19 nt, Homo sapiens
  misc_RNA (1)...(19): siRNA sense strand
ggcaggaaauucaucuaca

SEQ ID NO: 2177182 - RNA, 19 nt, Homo sapiens
  misc_RNA (1)...(19): siRNA sense strand
ugaagaauacuggaaaguu

SEQ ID NO: 2177183 - RNA, 19 nt, Homo sapiens
  misc_RNA (1)...(19): siRNA sense strand
ccaauuacgagacccuuga

SEQ ID NO: 2177184 - RNA, 19 nt, Homo sapiens
  misc_RNA (1)...(19): siRNA sense strand
ggacgagcacaucagaguu

SEQ ID NO: 2177185 - RNA, 19 nt, Homo sapiens
  misc_RNA (1)...(19): siRNA sense strand
ugaagaagcaccugugucu

SEQ ID NO: 2177186 - RNA, 19 nt, Homo sapiens
  misc_RNA (1)...(19): siRNA sense strand
ccacagggccaagaugcua

SEQ ID NO: 2177187 - RNA, 19 nt, Homo sapiens
  misc_RNA (1)...(19): siRNA sense strand
ggauugccguuuaaauggu

SEQ ID NO: 2177188 - RNA, 19 nt, Homo sapiens
  misc_RNA (1)...(19): siRNA sense strand
cagauuugaucacauggau

SEQ ID NO: 2177189 - RNA, 19 nt, Homo sapiens
  misc_RNA (1)...(19): siRNA sense strand
agcaagagaugaagaccaa

SEQ ID NO: 2177190 - RNA, 19 nt, Homo sapiens
  misc_RNA (1)...(19): siRNA sense strand
gagaaguggcagaagcaaa

SEQ ID NO: 2177191 - RNA, 19 nt, Homo sapiens
  misc_RNA (1)...(19): siRNA sense strand
cgguaacugugacauuuga

SEQ ID NO: 2177192 - RNA, 19 nt, Homo sapiens
  misc_RNA (1)...(19): siRNA sense strand
gcaaaaguuucacucaaca

SEQ ID NO: 2177193 - RNA, 19 nt, Homo sapiens
  misc_RNA (1)...(19): siRNA sense strand
caaaagccauucucuugug

SEQ ID NO: 2177194 - RNA, 19 nt, Homo sapiens
  misc_RNA (1)...(19): siRNA sense strand
cgcagaggcuccuguguca

SEQ ID NO: 2177195 - RNA, 19 nt, Homo sapiens
  misc_RNA (1)...(19): siRNA sense strand
acagggaugcuuagauaaa

SEQ ID NO: 2177196 - RNA, 19 nt, Homo sapiens
  misc_RNA (1)...(19): siRNA sense strand
gaagcaaauguauaagcaa

SEQ ID NO: 2177197 - RNA, 19 nt, Homo sapiens
  misc_RNA (1)...(19): siRNA sense strand
caagccagauuugaucaca

SEQ ID NO: 2177198 - RNA, 19 nt, Homo sapiens
  misc_RNA (1)...(19): siRNA sense strand
uaaggagggauuugcuaaa

SEQ ID NO: 2177199 - RNA, 19 nt, Homo sapiens
  misc_RNA (1)...(19): siRNA sense strand
uggcagaagcaaauguaua

SEQ ID NO: 2177200 - RNA, 19 nt, Homo sapiens
  misc_RNA (1)...(19): siRNA sense strand
aagaugcuauuccugcuau

SEQ ID NO: 2177201 - RNA, 19 nt, Homo sapiens
  misc_RNA (1)...(19): siRNA sense strand
aaacaagaaggacaacuag

SEQ ID NO: 2177202 - RNA, 19 nt, Homo sapiens
  misc_RNA (1)...(19): siRNA sense strand
gcucaagacccacauugca

SEQ ID NO: 2177203 - RNA, 19 nt, Homo sapiens
  misc_RNA (1)...(19): siRNA sense strand
acaagagcuucuccuggaa

SEQ ID NO: 2177204 - RNA, 19 nt, Homo sapiens
  misc_RNA (1)...(19): siRNA sense strand
acaacuagcccuccuacug

SEQ ID NO: 2177205 - RNA, 19 nt, Homo sapiens
  misc_RNA (1)...(19): siRNA sense strand
agaaguggcagaagcaaau

SEQ ID NO: 2177206 - RNA, 19 nt, Homo sapiens
  misc_RNA (1)...(19): siRNA sense strand
caagaugcuauuccugcua

SEQ ID NO: 2177207 - RNA, 19 nt, Homo sapiens
  misc_RNA (1)...(19): siRNA sense strand
agugggagauccuggagaa

SEQ ID NO: 2177208 - RNA, 19 nt, Homo sapiens
  misc_RNA (1)...(19): siRNA sense strand
cagcauaugauccagacaa

SEQ ID NO: 2177209 - RNA, 19 nt, Homo sapiens
  misc_RNA (1)...(19): siRNA sense strand
aagccauucucuuguguga

SEQ ID NO: 2177210 - RNA, 19 nt, Homo sapiens
  misc_RNA (1)...(19): siRNA sense strand
gcagugagugugagaagag

SEQ ID NO: 2177211 - RNA, 19 nt, Homo sapiens
  misc_RNA (1)...(19): siRNA sense strand
cagaggcuccugugucaga

SEQ ID NO: 2177212 - RNA, 19 nt, Homo sapiens
  misc_RNA (1)...(19): siRNA sense strand
caugaagaauacuggaaag

SEQ ID NO: 2177213 - RNA, 19 nt, Homo sapiens
  misc_RNA (1)...(19): siRNA sense strand
aaaguuucacucaacagua

SEQ ID NO: 2177214 - RNA, 19 nt, Homo sapiens
  misc_RNA (1)...(19): siRNA sense strand
uguauaagcaagagaugaa

SEQ ID NO: 2177215 - RNA, 19 nt, Homo sapiens
  misc_RNA (1)...(19): siRNA sense strand
acuggaaaguugcuauguu

SEQ ID NO: 2177216 - RNA, 19 nt, Homo sapiens
  misc_RNA (1)...(19): siRNA sense strand
augaacaguugaacaugaa

SEQ ID NO: 2177217 - RNA, 19 nt, Homo sapiens
  misc_RNA (1)...(19): siRNA sense strand
gacgagcacaucagaguuc

SEQ ID NO: 2177218 - RNA, 19 nt, Homo sapiens
  misc_RNA (1)...(19): siRNA sense strand
ggcaugaagguccaucuga

SEQ ID NO: 2177219 - RNA, 19 nt, Homo sapiens
  misc_RNA (1)...(19): siRNA sense strand
ggacaaaagaagaggauug

SEQ ID NO: 2177220 - RNA, 19 nt, Homo sapiens
  misc_RNA (1)...(19): siRNA sense strand
ggaaaguugcuauguuuug

SEQ ID NO: 2177221 - RNA, 19 nt, Homo sapiens
  misc_RNA (1)...(19): siRNA sense strand
gaagguccacuuguauaag

SEQ ID NO: 2177222 - RNA, 19 nt, Homo sapiens
  misc_RNA (1)...(19): siRNA sense strand
gagcacaucagaguucaca

SEQ ID NO: 2177223 - RNA, 19 nt, Homo sapiens
  misc_RNA (1)...(19): siRNA sense strand
aagggagaaugcuauuaau

SEQ ID NO: 2177224 - RNA, 19 nt, Homo sapiens
  misc_RNA (1)...(19): siRNA sense strand
gcucacagaacacauucga

SEQ ID NO: 2177225 - RNA, 19 nt, Homo sapiens
  misc_RNA (1)...(19): siRNA sense strand
gccaaaagccauucucuug

SEQ ID NO: 2177226 - RNA, 19 nt, Homo sapiens
  misc_RNA (1)...(19): siRNA sense strand
agagaagcccuaccagugu

SEQ ID NO: 2177227 - RNA, 19 nt, Homo sapiens
  misc_RNA (1)...(19): siRNA sense strand
ggaacaagagugggagauc

SEQ ID NO: 2177228 - RNA, 19 nt, Homo sapiens
  misc_RNA (1)...(19): siRNA sense strand
aagaagaggauugccguuu

SEQ ID NO: 2177229 - RNA, 19 nt, Homo sapiens
  misc_RNA (1)...(19): siRNA sense strand
cgaggagcccuuccagugu

SEQ ID NO: 2177230 - RNA, 19 nt, Homo sapiens
  misc_RNA (1)...(19): siRNA sense strand
guaacugugacauuugaug

SEQ ID NO: 2177231 - RNA, 19 nt, Homo sapiens
  misc_RNA (1)...(19): siRNA sense strand
cgagggaaagagagaaaga

SEQ ID NO: 2177232 - RNA, 19 nt, Homo sapiens
  misc_RNA (1)...(19): siRNA sense strand
uucgguaacugugacauuu

SEQ ID NO: 2177233 - RNA, 19 nt, Homo sapiens
  misc_RNA (1)...(19): siRNA sense strand
agaagggccucguguauga

SEQ ID NO: 2177234 - RNA, 19 nt, Homo sapiens
  misc_RNA (1)...(19): siRNA sense strand
caucuugccugguuuguga

SEQ ID NO: 2177235 - RNA, 19 nt, Homo sapiens
  misc_RNA (1)...(19): siRNA sense strand
gcgugaagauggagaaugu

SEQ ID NO: 2177236 - RNA, 19 nt, Homo sapiens
  misc_RNA (1)...(19): siRNA sense strand
caauguggcugcugcuuca

SEQ ID NO: 2177237 - RNA, 19 nt, Homo sapiens
  misc_RNA (1)...(19): siRNA sense strand
gagaagcacuauccuugca

SEQ ID NO: 2177238 - RNA, 19 nt, Homo sapiens
  misc_RNA (1)...(19): siRNA sense strand
gcaggagauucaugcagaa

SEQ ID NO: 2177239 - RNA, 19 nt, Homo sapiens
  misc_RNA (1)...(19): siRNA sense strand
gggcaguggugaucaggaa

SEQ ID NO: 2177240 - RNA, 19 nt, Homo sapiens
  misc_RNA (1)...(19): siRNA sense strand
cagaguggcugugucagaa

SEQ ID NO: 2177241 - RNA, 19 nt, Homo sapiens
  misc_RNA (1)...(19): siRNA sense strand
gcagaacacccucccuuuc

SEQ ID NO: 2177242 - RNA, 19 nt, Homo sapiens
  misc_RNA (1)...(19): siRNA sense strand
gcacugggcccugguuaau

SEQ ID NO: 2177243 - RNA, 19 nt, Homo sapiens
  misc_RNA (1)...(19): siRNA sense strand
caacacacgccuugaagag

SEQ ID NO: 2177244 - RNA, 19 nt, Homo sapiens
  misc_RNA (1)...(19): siRNA sense strand
ucagaagggccucguguau

SEQ ID NO: 2177245 - RNA, 19 nt, Homo sapiens
  misc_RNA (1)...(19): siRNA sense strand
acacacacaucagcgagaa

SEQ ID NO: 2177246 - RNA, 19 nt, Homo sapiens
  misc_RNA (1)...(19): siRNA sense strand
gggcuggugucuucagagu

SEQ ID NO: 2177247 - RNA, 19 nt, Homo sapiens
  misc_RNA (1)...(19): siRNA sense strand
agagaggagucuggaggua

SEQ ID NO: 2177248 - RNA, 19 nt, Homo sapiens
  misc_RNA (1)...(19): siRNA sense strand
cgagugcgccaagcucuuu

SEQ ID NO: 2177249 - RNA, 19 nt, Homo sapiens
  misc_RNA (1)...(19): siRNA sense strand
uguccuggaucaagcaaga

SEQ ID NO: 2177250 - RNA, 19 nt, Homo sapiens
  misc_RNA (1)...(19): siRNA sense strand
guacagcaggagauucaug

SEQ ID NO: 2177251 - RNA, 19 nt, Homo sapiens
  misc_RNA (1)...(19): siRNA sense strand
gcgcgcacaucagggagaa

SEQ ID NO: 2177252 - RNA, 19 nt, Homo sapiens
  misc_RNA (1)...(19): siRNA sense strand
ggugcucagugucccaaga

SEQ ID NO: 2177253 - RNA, 19 nt, Homo sapiens
  misc_RNA (1)...(19): siRNA sense strand
cagaagggccucguguaug

SEQ ID NO: 2177254 - RNA, 19 nt, Homo sapiens
  misc_RNA (1)...(19): siRNA sense strand
ggcguucuguccuggauca

SEQ ID NO: 2177255 - RNA, 19 nt, Homo sapiens
  misc_RNA (1)...(19): siRNA sense strand
caguacagcaggagauuca

SEQ ID NO: 2177256 - RNA, 19 nt, Homo sapiens
  misc_RNA (1)...(19): siRNA sense strand
ucagaguggcugugucaga

SEQ ID NO: 2177257 - RNA, 19 nt, Homo sapiens
  misc_RNA (1)...(19): siRNA sense strand
caccaggacagccaugcua

SEQ ID NO: 2177258 - RNA, 19 nt, Homo sapiens
  misc_RNA (1)...(19): siRNA sense strand
gucagaagggccucgugua

SEQ ID NO: 2177259 - RNA, 19 nt, Homo sapiens
  misc_RNA (1)...(19): siRNA sense strand
gagcaccggcacacacaca

SEQ ID NO: 2177260 - RNA, 19 nt, Homo sapiens
  misc_RNA (1)...(19): siRNA sense strand
aaacgcaggccagcuggaa

SEQ ID NO: 2177261 - RNA, 19 nt, Homo sapiens
  misc_RNA (1)...(19): siRNA sense strand
ccucguguaugacagaaac

SEQ ID NO: 2177262 - RNA, 19 nt, Homo sapiens
  misc_RNA (1)...(19): siRNA sense strand
ggcacugggcccugguuaa

SEQ ID NO: 2177263 - RNA, 19 nt, Homo sapiens
  misc_RNA (1)...(19): siRNA sense strand
ggagacaggcaggcaacug

SEQ ID NO: 2177264 - RNA, 19 nt, Homo sapiens
  misc_RNA (1)...(19): siRNA sense strand
agccaggccucuccaucuu

SEQ ID NO: 2177265 - RNA, 19 nt, Homo sapiens
  misc_RNA (1)...(19): siRNA sense strand
gaacagagcccagguacug

SEQ ID NO: 2177266 - RNA, 19 nt, Homo sapiens
  misc_RNA (1)...(19): siRNA sense strand
ugaaggagaucccagaguu

SEQ ID NO: 2177267 - RNA, 19 nt, Homo sapiens
  misc_RNA (1)...(19): siRNA sense strand
ccaaaugggucgucaccuu

SEQ ID NO: 2177268 - RNA, 19 nt, Homo sapiens
  misc_RNA (1)...(19): siRNA sense strand
gacaaaccguggccuacaa

SEQ ID NO: 2177269 - RNA, 19 nt, Homo sapiens
  misc_RNA (1)...(19): siRNA sense strand
caucaaaacugccgacaaa

SEQ ID NO: 2177270 - RNA, 19 nt, Homo sapiens
  misc_RNA (1)...(19): siRNA sense strand
ccacgaggccuaaaccaaa

SEQ ID NO: 2177271 - RNA, 19 nt, Homo sapiens
  misc_RNA (1)...(19): siRNA sense strand
gagaaaaggcccaggguua

SEQ ID NO: 2177272 - RNA, 19 nt, Homo sapiens
  misc_RNA (1)...(19): siRNA sense strand
ucaacugucugaaggaaau

SEQ ID NO: 2177273 - RNA, 19 nt, Homo sapiens
  misc_RNA (1)...(19): siRNA sense strand
cagcggcucugaaggagaa

SEQ ID NO: 2177274 - RNA, 19 nt, Homo sapiens
  misc_RNA (1)...(19): siRNA sense strand
aaaggaagcccaccaggaa

SEQ ID NO: 2177275 - RNA, 19 nt, Homo sapiens
  misc_RNA (1)...(19): siRNA sense strand
gagcagagcccaggaacug

SEQ ID NO: 2177276 - RNA, 19 nt, Homo sapiens
  misc_RNA (1)...(19): siRNA sense strand
gaucccagaguucuuguuu

SEQ ID NO: 2177277 - RNA, 19 nt, Homo sapiens
  misc_RNA (1)...(19): siRNA sense strand
uuuagugccugcugccuua

SEQ ID NO: 2177278 - RNA, 19 nt, Homo sapiens
  misc_RNA (1)...(19): siRNA sense strand
gaacuggacagcagacaag

SEQ ID NO: 2177279 - RNA, 19 nt, Homo sapiens
  misc_RNA (1)...(19): siRNA sense strand
ggucugcucucugugaaga

SEQ ID NO: 2177280 - RNA, 19 nt, Homo sapiens
  misc_RNA (1)...(19): siRNA sense strand
ggagaacagagcccaggua

SEQ ID NO: 2177281 - RNA, 19 nt, Homo sapiens
  misc_RNA (1)...(19): siRNA sense strand
gugcugcccuugcggagaa

SEQ ID NO: 2177282 - RNA, 19 nt, Homo sapiens
  misc_RNA (1)...(19): siRNA sense strand
ggagaucccagaguucuug

SEQ ID NO: 2177283 - RNA, 19 nt, Homo sapiens
  misc_RNA (1)...(19): siRNA sense strand
gcagagcugugugagagau

SEQ ID NO: 2177284 - RNA, 19 nt, Homo sapiens
  misc_RNA (1)...(19): siRNA sense strand
caucaacugucugaaggaa

SEQ ID NO: 2177285 - RNA, 19 nt, Homo sapiens
  misc_RNA (1)...(19): siRNA sense strand
ugcagggucuggagaauug

SEQ ID NO: 2177286 - RNA, 19 nt, Homo sapiens
  misc_RNA (1)...(19): siRNA sense strand
cauggaagacccagaguug

SEQ ID NO: 2177287 - RNA, 19 nt, Homo sapiens
  misc_RNA (1)...(19): siRNA sense strand
gaaggagaucccagaguuc

SEQ ID NO: 2177288 - RNA, 19 nt, Homo sapiens
  misc_RNA (1)...(19): siRNA sense strand
cagccuggauggagagaga

SEQ ID NO: 2177289 - RNA, 19 nt, Homo sapiens
  misc_RNA (1)...(19): siRNA sense strand
gugaagaagcgaccagaga

SEQ ID NO: 2177290 - RNA, 19 nt, Homo sapiens
  misc_RNA (1)...(19): siRNA sense strand
ucauggcccuggucacaga

SEQ ID NO: 2177291 - RNA, 19 nt, Homo sapiens
  misc_RNA (1)...(19): siRNA sense strand
ccacagaggacaggagaga

SEQ ID NO: 2177292 - RNA, 19 nt, Homo sapiens
  misc_RNA (1)...(19): siRNA sense strand
ggagagcagagcccaggaa

SEQ ID NO: 2177293 - RNA, 19 nt, Homo sapiens
  misc_RNA (1)...(19): siRNA sense strand
gagggagccacgcugauga

SEQ ID NO: 2177294 - RNA, 19 nt, Homo sapiens
  misc_RNA (1)...(19): siRNA sense strand
ggccaagcuuccuggaugu

SEQ ID NO: 2177295 - RNA, 19 nt, Homo sapiens
  misc_RNA (1)...(19): siRNA sense strand
gaaguccucuccccaucaa

SEQ ID NO: 2177296 - RNA, 19 nt, Homo sapiens
  misc_RNA (1)...(19): siRNA sense strand
ccucucugcuuuccuguca

SEQ ID NO: 2177297 - RNA, 19 nt, Homo sapiens
  misc_RNA (1)...(19): siRNA sense strand
ggaacuggacagcagacaa

SEQ ID NO: 2177298 - RNA, 19 nt, Homo sapiens
  misc_RNA (1)...(19): siRNA sense strand
gcggucugcucucugugaa

SEQ ID NO: 2177299 - RNA, 19 nt, Homo sapiens
  misc_RNA (1)...(19): siRNA sense strand
gggcuccacugcagcucuu

SEQ ID NO: 2177300 - RNA, 19 nt, Homo sapiens
  misc_RNA (1)...(19): siRNA sense strand
gcucauggcccuggucaca

SEQ ID NO: 2177301 - RNA, 19 nt, Homo sapiens
  misc_RNA (1)...(19): siRNA sense strand
ugcaaggccucaucaacug

SEQ ID NO: 2177302 - RNA, 19 nt, Homo sapiens
  misc_RNA (1)...(19): siRNA sense strand
gaagcugcgccuccugugu

SEQ ID NO: 2177303 - RNA, 19 nt, Homo sapiens
  misc_RNA (1)...(19): siRNA sense strand
ggucugcuacacugucuga

SEQ ID NO: 2177304 - RNA, 19 nt, Homo sapiens
  misc_RNA (1)...(19): siRNA sense strand
ucccagaguucuuguuugg

SEQ ID NO: 2177305 - RNA, 19 nt, Homo sapiens
  misc_RNA (1)...(19): siRNA sense strand
uggugcagcuggugaagga

SEQ ID NO: 2177306 - RNA, 19 nt, Homo sapiens
  misc_RNA (1)...(19): siRNA sense strand
gcaaggccucaucaacugu

SEQ ID NO: 2177307 - RNA, 19 nt, Homo sapiens
  misc_RNA (1)...(19): siRNA sense strand
gcccaggguuagugaagca

SEQ ID NO: 2177308 - RNA, 19 nt, Homo sapiens
  misc_RNA (1)...(19): siRNA sense strand
ggucugcagagcuguguga

SEQ ID NO: 2177309 - RNA, 19 nt, Homo sapiens
  misc_RNA (1)...(19): siRNA sense strand
gcacagccugcaccucaca

SEQ ID NO: 2177310 - RNA, 19 nt, Homo sapiens
  misc_RNA (1)...(19): siRNA sense strand
ccuggaagccugucugaag

SEQ ID NO: 2177311 - RNA, 19 nt, Homo sapiens
  misc_RNA (1)...(19): siRNA sense strand
ccaccagcuucuccucauc

SEQ ID NO: 2177312 - RNA, 19 nt, Homo sapiens
  misc_RNA (1)...(19): siRNA sense strand
cacgaggccuaaaccaaag

SEQ ID NO: 2177313 - RNA, 19 nt, Homo sapiens
  misc_RNA (1)...(19): siRNA sense strand
cgacaaaccguggccuaca

SEQ ID NO: 2177314 - RNA, 19 nt, Homo sapiens
  misc_RNA (1)...(19): siRNA sense strand
aaccguggccuacaaggaa

SEQ ID NO: 2177315 - RNA, 19 nt, Homo sapiens
  misc_RNA (1)...(19): siRNA sense strand
gagcacagggacccgagau

SEQ ID NO: 2177316 - RNA, 19 nt, Homo sapiens
  misc_RNA (1)...(19): siRNA sense strand
gaauuucuccugggaacag

SEQ ID NO: 2177317 - RNA, 19 nt, Homo sapiens
  misc_RNA (1)...(19): siRNA sense strand
gaagucaagggcgcuaugg

SEQ ID NO: 2177318 - RNA, 19 nt, Homo sapiens
  misc_RNA (1)...(19): siRNA sense strand
caggaaguggccaccauga

SEQ ID NO: 2177319 - RNA, 19 nt, Homo sapiens
  misc_RNA (1)...(19): siRNA sense strand
aagcugcgccuccuguguu

SEQ ID NO: 2177320 - RNA, 19 nt, Homo sapiens
  misc_RNA (1)...(19): siRNA sense strand
ggccucaucaacugucuga

SEQ ID NO: 2177321 - RNA, 19 nt, Homo sapiens
  misc_RNA (1)...(19): siRNA sense strand
guucuggagggccuggaua

SEQ ID NO: 2177322 - RNA, 19 nt, Homo sapiens
  misc_RNA (1)...(19): siRNA sense strand
gcagccaagacccaugaga

SEQ ID NO: 2177323 - RNA, 19 nt, Homo sapiens
  misc_RNA (1)...(19): siRNA sense strand
ggagcuuggacauggaaga

SEQ ID NO: 2177324 - RNA, 19 nt, Homo sapiens
  misc_RNA (1)...(19): siRNA sense strand
ccaccgacagcucguguuc

SEQ ID NO: 2177325 - RNA, 19 nt, Homo sapiens
  misc_RNA (1)...(19): siRNA sense strand
gagaagcgcuuucgcaaga

SEQ ID NO: 2177326 - RNA, 19 nt, Homo sapiens
  misc_RNA (1)...(19): siRNA sense strand
gagcagauguccucuucua

SEQ ID NO: 2177327 - RNA, 19 nt, Homo sapiens
  misc_RNA (1)...(19): siRNA sense strand
gacaagcgcuucagcaaga

SEQ ID NO: 2177328 - RNA, 19 nt, Homo sapiens
  misc_RNA (1)...(19): siRNA sense strand
ggagaggaguggaugauuc

SEQ ID NO: 2177329 - RNA, 19 nt, Homo sapiens
  misc_RNA (1)...(19): siRNA sense strand
ggaggaaggugcccacaca

SEQ ID NO: 2177330 - RNA, 19 nt, Homo sapiens
  misc_RNA (1)...(19): siRNA sense strand
cagcaucuaucguuacuuc

SEQ ID NO: 2177331 - RNA, 19 nt, Homo sapiens
  misc_RNA (1)...(19): siRNA sense strand
ggaaggugcccacacagaa

SEQ ID NO: 2177332 - RNA, 19 nt, Homo sapiens
  misc_RNA (1)...(19): siRNA sense strand
caccugggcucgcaccaaa

SEQ ID NO: 2177333 - RNA, 19 nt, Homo sapiens
  misc_RNA (1)...(19): siRNA sense strand
gaagguggaggacgaagau

SEQ ID NO: 2177334 - RNA, 19 nt, Homo sapiens
  misc_RNA (1)...(19): siRNA sense strand
cagaagaggaggucgaaug

SEQ ID NO: 2177335 - RNA, 19 nt, Homo sapiens
  misc_RNA (1)...(19): siRNA sense strand
gaagcgcuuucgcaagaag

SEQ ID NO: 2177336 - RNA, 19 nt, Homo sapiens
  misc_RNA (1)...(19): siRNA sense strand
gcgacaagcgcuucagcaa

SEQ ID NO: 2177337 - RNA, 19 nt, Homo sapiens
  misc_RNA (1)...(19): siRNA sense strand
gcaagcgcuucagccagaa

SEQ ID NO: 2177338 - RNA, 19 nt, Homo sapiens
  misc_RNA (1)...(19): siRNA sense strand
ggaaugcgagaagcgcuuu

SEQ ID NO: 2177339 - RNA, 19 nt, Homo sapiens
  misc_RNA (1)...(19): siRNA sense strand
gaaggugcccacacagaac

SEQ ID NO: 2177340 - RNA, 19 nt, Homo sapiens
  misc_RNA (1)...(19): siRNA sense strand
aagaagacgcacuugauuc

SEQ ID NO: 2177341 - RNA, 19 nt, Homo sapiens
  misc_RNA (1)...(19): siRNA sense strand
ggcgagcgguccuucuucu

SEQ ID NO: 2177342 - RNA, 19 nt, Homo sapiens
  misc_RNA (1)...(19): siRNA sense strand
gagaggaguggaugauucg

SEQ ID NO: 2177343 - RNA, 19 nt, Homo sapiens
  misc_RNA (1)...(19): siRNA sense strand
gagaagcgcuuucgcaaga

SEQ ID NO: 2177344 - RNA, 19 nt, Homo sapiens
  misc_RNA (1)...(19): siRNA sense strand
gagcagauguccucuucua

SEQ ID NO: 2177345 - RNA, 19 nt, Homo sapiens
  misc_RNA (1)...(19): siRNA sense strand
gacaagcgcuucagcaaga

SEQ ID NO: 2177346 - RNA, 19 nt, Homo sapiens
  misc_RNA (1)...(19): siRNA sense strand
ggagaggaguggaugauuc

SEQ ID NO: 2177347 - RNA, 19 nt, Homo sapiens
  misc_RNA (1)...(19): siRNA sense strand
ggaggaaggugcccacaca

SEQ ID NO: 2177348 - RNA, 19 nt, Homo sapiens
  misc_RNA (1)...(19): siRNA sense strand
cagcaucuaucguuacuuc

SEQ ID NO: 2177349 - RNA, 19 nt, Homo sapiens
  misc_RNA (1)...(19): siRNA sense strand
ggaaggugcccacacagaa

SEQ ID NO: 2177350 - RNA, 19 nt, Homo sapiens
  misc_RNA (1)...(19): siRNA sense strand
caccugggcucgcaccaaa

SEQ ID NO: 2177351 - RNA, 19 nt, Homo sapiens
  misc_RNA (1)...(19): siRNA sense strand
gaagguggaggacgaagau

SEQ ID NO: 2177352 - RNA, 19 nt, Homo sapiens
  misc_RNA (1)...(19): siRNA sense strand
cagaagaggaggucgaaug

SEQ ID NO: 2177353 - RNA, 19 nt, Homo sapiens
  misc_RNA (1)...(19): siRNA sense strand
gaagcgcuuucgcaagaag

SEQ ID NO: 2177354 - RNA, 19 nt, Homo sapiens
  misc_RNA (1)...(19): siRNA sense strand
gcgacaagcgcuucagcaa

SEQ ID NO: 2177355 - RNA, 19 nt, Homo sapiens
  misc_RNA (1)...(19): siRNA sense strand
gcaagcgcuucagccagaa

SEQ ID NO: 2177356 - RNA, 19 nt, Homo sapiens
  misc_RNA (1)...(19): siRNA sense strand
ggaaugcgagaagcgcuuu

SEQ ID NO: 2177357 - RNA, 19 nt, Homo sapiens
  misc_RNA (1)...(19): siRNA sense strand
gaaggugcccacacagaac

SEQ ID NO: 2177358 - RNA, 19 nt, Homo sapiens
  misc_RNA (1)...(19): siRNA sense strand
aagaagacgcacuugauuc

SEQ ID NO: 2177359 - RNA, 19 nt, Homo sapiens
  misc_RNA (1)...(19): siRNA sense strand
ggcgagcgguccuucuucu

SEQ ID NO: 2177360 - RNA, 19 nt, Homo sapiens
  misc_RNA (1)...(19): siRNA sense strand
gagaggaguggaugauucg

SEQ ID NO: 2177361 - RNA, 19 nt, Homo sapiens
  misc_RNA (1)...(19): siRNA sense strand
gggauguccugcuccaaua

SEQ ID NO: 2177362 - RNA, 19 nt, Homo sapiens
  misc_RNA (1)...(19): siRNA sense strand
gcacugcucuggaguuugc

SEQ ID NO: 2177363 - RNA, 19 nt, Homo sapiens
  misc_RNA (1)...(19): siRNA sense strand
ccaccgccgucugcuguua

SEQ ID NO: 2177364 - RNA, 19 nt, Homo sapiens
  misc_RNA (1)...(19): siRNA sense strand
gugcccagcucucggaaug

SEQ ID NO: 2177365 - RNA, 19 nt, Homo sapiens
  misc_RNA (1)...(19): siRNA sense strand
gguggggucuuucccuuua

SEQ ID NO: 2177366 - RNA, 19 nt, Homo sapiens
  misc_RNA (1)...(19): siRNA sense strand
ccgcacugcucuggaguuu

SEQ ID NO: 2177367 - RNA, 19 nt, Homo sapiens
  misc_RNA (1)...(19): siRNA sense strand
ucuggaguuugcccucuuu

SEQ ID NO: 2177368 - RNA, 19 nt, Homo sapiens
  misc_RNA (1)...(19): siRNA sense strand
gggauguccugcuccaaua

SEQ ID NO: 2177369 - RNA, 19 nt, Homo sapiens
  misc_RNA (1)...(19): siRNA sense strand
gcacugcucuggaguuugc

SEQ ID NO: 2177370 - RNA, 19 nt, Homo sapiens
  misc_RNA (1)...(19): siRNA sense strand
gggccucuauuggguuaua

SEQ ID NO: 2177371 - RNA, 19 nt, Homo sapiens
  misc_RNA (1)...(19): siRNA sense strand
gugcccagcucucggaaug

SEQ ID NO: 2177372 - RNA, 19 nt, Homo sapiens
  misc_RNA (1)...(19): siRNA sense strand
gguggggucuuucccuuua

SEQ ID NO: 2177373 - RNA, 19 nt, Homo sapiens
  misc_RNA (1)...(19): siRNA sense strand
ccgcacugcucuggaguuu

SEQ ID NO: 2177374 - RNA, 19 nt, Homo sapiens
  misc_RNA (1)...(19): siRNA sense strand
ucuggaguuugcccucuuu

SEQ ID NO: 2177375 - RNA, 19 nt, Homo sapiens
  misc_RNA (1)...(19): siRNA sense strand
gagcuacacuguccacuuu

SEQ ID NO: 2177376 - RNA, 19 nt, Homo sapiens
  misc_RNA (1)...(19): siRNA sense strand
gacacucucuucuuccuua

SEQ ID NO: 2177377 - RNA, 19 nt, Homo sapiens
  misc_RNA (1)...(19): siRNA sense strand
caaccaagaccuguacuua

SEQ ID NO: 2177378 - RNA, 19 nt, Homo sapiens
  misc_RNA (1)...(19): siRNA sense strand
gcagcaguaucgcucauuu

SEQ ID NO: 2177379 - RNA, 19 nt, Homo sapiens
  misc_RNA (1)...(19): siRNA sense strand
ccaacaagcccuacaagaa

SEQ ID NO: 2177380 - RNA, 19 nt, Homo sapiens
  misc_RNA (1)...(19): siRNA sense strand
ggagcgggcuuacagugaa

SEQ ID NO: 2177381 - RNA, 19 nt, Homo sapiens
  misc_RNA (1)...(19): siRNA sense strand
ggaugcagguggugucuca

SEQ ID NO: 2177382 - RNA, 19 nt, Homo sapiens
  misc_RNA (1)...(19): siRNA sense strand
gagcucggcuuuccugagu

SEQ ID NO: 2177383 - RNA, 19 nt, Homo sapiens
  misc_RNA (1)...(19): siRNA sense strand
caacaagcccuacaagaag

SEQ ID NO: 2177384 - RNA, 19 nt, Homo sapiens
  misc_RNA (1)...(19): siRNA sense strand
gaagggagcucggcuuucc

SEQ ID NO: 2177385 - RNA, 19 nt, Homo sapiens
  misc_RNA (1)...(19): siRNA sense strand
ucacagagcagcacaccuu

SEQ ID NO: 2177386 - RNA, 19 nt, Homo sapiens
  misc_RNA (1)...(19): siRNA sense strand
gcggagggcugcuucuaca

SEQ ID NO: 2177387 - RNA, 19 nt, Homo sapiens
  misc_RNA (1)...(19): siRNA sense strand
guccugaccucccgagcua

SEQ ID NO: 2177388 - RNA, 19 nt, Homo sapiens
  misc_RNA (1)...(19): siRNA sense strand
caaccgcugucgcaugaau

SEQ ID NO: 2177389 - RNA, 19 nt, Homo sapiens
  misc_RNA (1)...(19): siRNA sense strand
gagcgggcuuacagugaaa

SEQ ID NO: 2177390 - RNA, 19 nt, Homo sapiens
  misc_RNA (1)...(19): siRNA sense strand
gagcucggcuagaccaaag

SEQ ID NO: 2177391 - RNA, 19 nt, Homo sapiens
  misc_RNA (1)...(19): siRNA sense strand
guucaauccugcccuguca

SEQ ID NO: 2177392 - RNA, 19 nt, Homo sapiens
  misc_RNA (1)...(19): siRNA sense strand
gcucaggacucgguacauc

SEQ ID NO: 2177393 - RNA, 19 nt, Homo sapiens
  misc_RNA (1)...(19): siRNA sense strand
caugcaggaugacacauau

SEQ ID NO: 2177394 - RNA, 19 nt, Homo sapiens
  misc_RNA (1)...(19): siRNA sense strand
caguaucgcucauuugaac

SEQ ID NO: 2177395 - RNA, 19 nt, Homo sapiens
  misc_RNA (1)...(19): siRNA sense strand
ggguggaaauccuaccuau

SEQ ID NO: 2177396 - RNA, 19 nt, Homo sapiens
  misc_RNA (1)...(19): siRNA sense strand
gaacaacugcaggcucaga

SEQ ID NO: 2177397 - RNA, 19 nt, Homo sapiens
  misc_RNA (1)...(19): siRNA sense strand
cuucagcgcucuggaguug

SEQ ID NO: 2177398 - RNA, 19 nt, Homo sapiens
  misc_RNA (1)...(19): siRNA sense strand
acaccacacucucgcuuug

SEQ ID NO: 2177399 - RNA, 19 nt, Homo sapiens
  misc_RNA (1)...(19): siRNA sense strand
ccgccuggcucaugucaga

SEQ ID NO: 2177400 - RNA, 19 nt, Homo sapiens
  misc_RNA (1)...(19): siRNA sense strand
cuuggacgcugccucauug

SEQ ID NO: 2177401 - RNA, 19 nt, Homo sapiens
  misc_RNA (1)...(19): siRNA sense strand
gggcuuacagugaaauaga

SEQ ID NO: 2177402 - RNA, 19 nt, Homo sapiens
  misc_RNA (1)...(19): siRNA sense strand
gcccacggcucagugaaga

SEQ ID NO: 2177403 - RNA, 19 nt, Homo sapiens
  misc_RNA (1)...(19): siRNA sense strand
ucucagggcuccaccucuu

SEQ ID NO: 2177404 - RNA, 19 nt, Homo sapiens
  misc_RNA (1)...(19): siRNA sense strand
ucauggacguggucucgaa

SEQ ID NO: 2177405 - RNA, 19 nt, Homo sapiens
  misc_RNA (1)...(19): siRNA sense strand
gcuccagacccauuucuug

SEQ ID NO: 2177406 - RNA, 19 nt, Homo sapiens
  misc_RNA (1)...(19): siRNA sense strand
ggcuuacagugaaauagaa

SEQ ID NO: 2177407 - RNA, 19 nt, Homo sapiens
  misc_RNA (1)...(19): siRNA sense strand
cucaaccgcugucgcauga

SEQ ID NO: 2177408 - RNA, 19 nt, Homo sapiens
  misc_RNA (1)...(19): siRNA sense strand
gagcaggagcaggccaaua

SEQ ID NO: 2177409 - RNA, 19 nt, Homo sapiens
  misc_RNA (1)...(19): siRNA sense strand
gggcagaggaguucauugg

SEQ ID NO: 2177410 - RNA, 19 nt, Homo sapiens
  misc_RNA (1)...(19): siRNA sense strand
gcaguaucgcucauuugaa

SEQ ID NO: 2177411 - RNA, 19 nt, Homo sapiens
  misc_RNA (1)...(19): siRNA sense strand
ggcuggaggugauggaugu

SEQ ID NO: 2177412 - RNA, 19 nt, Homo sapiens
  misc_RNA (1)...(19): siRNA sense strand
gacuacgacugguucuuca

SEQ ID NO: 2177413 - RNA, 19 nt, Homo sapiens
  misc_RNA (1)...(19): siRNA sense strand
uguggacacucucuucuuc

SEQ ID NO: 2177414 - RNA, 19 nt, Homo sapiens
  misc_RNA (1)...(19): siRNA sense strand
guggaaauccuaccuaugc

SEQ ID NO: 2177415 - RNA, 19 nt, Homo sapiens
  misc_RNA (1)...(19): siRNA sense strand
ccgaagguacccucaugua

SEQ ID NO: 2177416 - RNA, 19 nt, Homo sapiens
  misc_RNA (1)...(19): siRNA sense strand
gaagcacccuguggacacu

SEQ ID NO: 2177417 - RNA, 19 nt, Homo sapiens
  misc_RNA (1)...(19): siRNA sense strand
ggcuauggcucucuuugag

SEQ ID NO: 2177418 - RNA, 19 nt, Homo sapiens
  misc_RNA (1)...(19): siRNA sense strand
gggcuuuggcuaccuguug

SEQ ID NO: 2177419 - RNA, 19 nt, Homo sapiens
  misc_RNA (1)...(19): siRNA sense strand
gagcaggccaauagcacuu

SEQ ID NO: 2177420 - RNA, 19 nt, Homo sapiens
  misc_RNA (1)...(19): siRNA sense strand
gcgaggagggccacagaau

SEQ ID NO: 2177421 - RNA, 19 nt, Homo sapiens
  misc_RNA (1)...(19): siRNA sense strand
gcuacacuguccacuuugg

SEQ ID NO: 2177422 - RNA, 19 nt, Homo sapiens
  misc_RNA (1)...(19): siRNA sense strand
gcaggccaauagcacuuag

SEQ ID NO: 2177423 - RNA, 19 nt, Homo sapiens
  misc_RNA (1)...(19): siRNA sense strand
gcagcucaaucggcgcuau

SEQ ID NO: 2177424 - RNA, 19 nt, Homo sapiens
  misc_RNA (1)...(19): siRNA sense strand
ucagcgcucuggaguugga

SEQ ID NO: 2177425 - RNA, 19 nt, Homo sapiens
  misc_RNA (1)...(19): siRNA sense strand
gcaucaaccaagaccugua

SEQ ID NO: 2177426 - RNA, 19 nt, Homo sapiens
  misc_RNA (1)...(19): siRNA sense strand
ucacuucccucgguuacuc

SEQ ID NO: 2177427 - RNA, 19 nt, Homo sapiens
  misc_RNA (1)...(19): siRNA sense strand
agaccaaagugaugaagac

SEQ ID NO: 2177428 - RNA, 19 nt, Homo sapiens
  misc_RNA (1)...(19): siRNA sense strand
gggcugggacuacuucaca

SEQ ID NO: 2177429 - RNA, 19 nt, Homo sapiens
  misc_RNA (1)...(19): siRNA sense strand
cgacuacgacugguucuuc

SEQ ID NO: 2177430 - RNA, 19 nt, Homo sapiens
  misc_RNA (1)...(19): siRNA sense strand
cgacugguucuucaucaug

SEQ ID NO: 2177431 - RNA, 19 nt, Homo sapiens
  misc_RNA (1)...(19): siRNA sense strand
gccacgagaacaugcauug

SEQ ID NO: 2177432 - RNA, 19 nt, Homo sapiens
  misc_RNA (1)...(19): siRNA sense strand
cacccugucuccgaaggua

SEQ ID NO: 2177433 - RNA, 19 nt, Homo sapiens
  misc_RNA (1)...(19): siRNA sense strand
accaagaccuguacuuagg

SEQ ID NO: 2177434 - RNA, 19 nt, Homo sapiens
  misc_RNA (1)...(19): siRNA sense strand
ggucuacgggccacgagaa

SEQ ID NO: 2177435 - RNA, 19 nt, Homo sapiens
  misc_RNA (1)...(19): siRNA sense strand
gaccugcuguuggaaugug

SEQ ID NO: 2177436 - RNA, 19 nt, Homo sapiens
  misc_RNA (1)...(19): siRNA sense strand
gcucccugcuccuuucaca

SEQ ID NO: 2177437 - RNA, 19 nt, Homo sapiens
  misc_RNA (1)...(19): siRNA sense strand
gcuuggacgcugccucauu

SEQ ID NO: 2177438 - RNA, 19 nt, Homo sapiens
  misc_RNA (1)...(19): siRNA sense strand
guacgguggcccaucacuu

SEQ ID NO: 2177439 - RNA, 19 nt, Homo sapiens
  misc_RNA (1)...(19): siRNA sense strand
cagggcuggugcagaaguu

SEQ ID NO: 2177440 - RNA, 19 nt, Homo sapiens
  misc_RNA (1)...(19): siRNA sense strand
cuaccuaugcccuauguca

SEQ ID NO: 2177441 - RNA, 19 nt, Homo sapiens
  misc_RNA (1)...(19): siRNA sense strand
acagugaaauagaacaacu

SEQ ID NO: 2177442 - RNA, 19 nt, Homo sapiens
  misc_RNA (1)...(19): siRNA sense strand
ggacgcugccucauugacu

SEQ ID NO: 2177443 - RNA, 19 nt, Homo sapiens
  misc_RNA (1)...(19): siRNA sense strand
gaggagggccacagaaucc

SEQ ID NO: 2177444 - RNA, 19 nt, Homo sapiens
  misc_RNA (1)...(19): siRNA sense strand
augcauugcucacccuguu

SEQ ID NO: 2177445 - RNA, 19 nt, Homo sapiens
  misc_RNA (1)...(19): siRNA sense strand
ggcuuuggcuaccuguugu

SEQ ID NO: 2177446 - RNA, 19 nt, Homo sapiens
  misc_RNA (1)...(19): siRNA sense strand
cgaggagggccacagaauc

SEQ ID NO: 2177447 - RNA, 19 nt, Homo sapiens
  misc_RNA (1)...(19): siRNA sense strand
ggacacucucuucuuccuu

SEQ ID NO: 2177448 - RNA, 19 nt, Homo sapiens
  misc_RNA (1)...(19): siRNA sense strand
ggacguggucucgaagaag

SEQ ID NO: 2177449 - RNA, 19 nt, Homo sapiens
  misc_RNA (1)...(19): siRNA sense strand
uggacguggucucgaagaa

SEQ ID NO: 2177450 - RNA, 19 nt, Homo sapiens
  misc_RNA (1)...(19): siRNA sense strand
gagccggguggaaauccua

SEQ ID NO: 2177451 - RNA, 19 nt, Homo sapiens
  misc_RNA (1)...(19): siRNA sense strand
ggaagggagcucggcuuuc

SEQ ID NO: 2177452 - RNA, 19 nt, Homo sapiens
  misc_RNA (1)...(19): siRNA sense strand
gggcagcaguaucgcucau

SEQ ID NO: 2177453 - RNA, 19 nt, Homo sapiens
  misc_RNA (1)...(19): siRNA sense strand
ggagggcugcuucuacaac

SEQ ID NO: 2177454 - RNA, 19 nt, Homo sapiens
  misc_RNA (1)...(19): siRNA sense strand
cagcaguaucgcucauuug

SEQ ID NO: 2177455 - RNA, 19 nt, Homo sapiens
  misc_RNA (1)...(19): siRNA sense strand
gcucagugaagaacucuac

SEQ ID NO: 2177456 - RNA, 19 nt, Homo sapiens
  misc_RNA (1)...(19): siRNA sense strand
aauccuaccuaugcccuau

SEQ ID NO: 2177457 - RNA, 19 nt, Homo sapiens
  misc_RNA (1)...(19): siRNA sense strand
gguggaaauccuaccuaug

SEQ ID NO: 2177458 - RNA, 19 nt, Homo sapiens
  misc_RNA (1)...(19): siRNA sense strand
cuccgaagguacccucaug

SEQ ID NO: 2177459 - RNA, 19 nt, Homo sapiens
  misc_RNA (1)...(19): siRNA sense strand
gagcuacacuguccacuuu

SEQ ID NO: 2177460 - RNA, 19 nt, Homo sapiens
  misc_RNA (1)...(19): siRNA sense strand
gacacucucuucuuccuua

SEQ ID NO: 2177461 - RNA, 19 nt, Homo sapiens
  misc_RNA (1)...(19): siRNA sense strand
caaccaagaccuguacuua

SEQ ID NO: 2177462 - RNA, 19 nt, Homo sapiens
  misc_RNA (1)...(19): siRNA sense strand
gcagcaguaucgcucauuu

SEQ ID NO: 2177463 - RNA, 19 nt, Homo sapiens
  misc_RNA (1)...(19): siRNA sense strand
ccaacaagcccuacaagaa

SEQ ID NO: 2177464 - RNA, 19 nt, Homo sapiens
  misc_RNA (1)...(19): siRNA sense strand
ggagcgggcuuacagugaa

SEQ ID NO: 2177465 - RNA, 19 nt, Homo sapiens
  misc_RNA (1)...(19): siRNA sense strand
ggaugcagguggugucuca

SEQ ID NO: 2177466 - RNA, 19 nt, Homo sapiens
  misc_RNA (1)...(19): siRNA sense strand
gagcucggcuuuccugagu

SEQ ID NO: 2177467 - RNA, 19 nt, Homo sapiens
  misc_RNA (1)...(19): siRNA sense strand
caacaagcccuacaagaag

SEQ ID NO: 2177468 - RNA, 19 nt, Homo sapiens
  misc_RNA (1)...(19): siRNA sense strand
gaagggagcucggcuuucc

SEQ ID NO: 2177469 - RNA, 19 nt, Homo sapiens
  misc_RNA (1)...(19): siRNA sense strand
ucacagagcagcacaccuu

SEQ ID NO: 2177470 - RNA, 19 nt, Homo sapiens
  misc_RNA (1)...(19): siRNA sense strand
gcggagggcugcuucuaca

SEQ ID NO: 2177471 - RNA, 19 nt, Homo sapiens
  misc_RNA (1)...(19): siRNA sense strand
guccugaccucccgagcua

SEQ ID NO: 2177472 - RNA, 19 nt, Homo sapiens
  misc_RNA (1)...(19): siRNA sense strand
caaccgcugucgcaugaau

SEQ ID NO: 2177473 - RNA, 19 nt, Homo sapiens
  misc_RNA (1)...(19): siRNA sense strand
gagcgggcuuacagugaaa

SEQ ID NO: 2177474 - RNA, 19 nt, Homo sapiens
  misc_RNA (1)...(19): siRNA sense strand
gagcucggcuagaccaaag

SEQ ID NO: 2177475 - RNA, 19 nt, Homo sapiens
  misc_RNA (1)...(19): siRNA sense strand
guucaauccugcccuguca

SEQ ID NO: 2177476 - RNA, 19 nt, Homo sapiens
  misc_RNA (1)...(19): siRNA sense strand
gcucaggacucgguacauc

SEQ ID NO: 2177477 - RNA, 19 nt, Homo sapiens
  misc_RNA (1)...(19): siRNA sense strand
caugcaggaugacacauau

SEQ ID NO: 2177478 - RNA, 19 nt, Homo sapiens
  misc_RNA (1)...(19): siRNA sense strand
caguaucgcucauuugaac

SEQ ID NO: 2177479 - RNA, 19 nt, Homo sapiens
  misc_RNA (1)...(19): siRNA sense strand
ggguggaaauccuaccuau

SEQ ID NO: 2177480 - RNA, 19 nt, Homo sapiens
  misc_RNA (1)...(19): siRNA sense strand
gaacaacugcaggcucaga

SEQ ID NO: 2177481 - RNA, 19 nt, Homo sapiens
  misc_RNA (1)...(19): siRNA sense strand
cuucagcgcucuggaguug

SEQ ID NO: 2177482 - RNA, 19 nt, Homo sapiens
  misc_RNA (1)...(19): siRNA sense strand
acaccacacucucgcuuug

SEQ ID NO: 2177483 - RNA, 19 nt, Homo sapiens
  misc_RNA (1)...(19): siRNA sense strand
ccgccuggcucaugucaga

SEQ ID NO: 2177484 - RNA, 19 nt, Homo sapiens
  misc_RNA (1)...(19): siRNA sense strand
cuuggacgcugccucauug

SEQ ID NO: 2177485 - RNA, 19 nt, Homo sapiens
  misc_RNA (1)...(19): siRNA sense strand
gggcuuacagugaaauaga

SEQ ID NO: 2177486 - RNA, 19 nt, Homo sapiens
  misc_RNA (1)...(19): siRNA sense strand
gcccacggcucagugaaga

SEQ ID NO: 2177487 - RNA, 19 nt, Homo sapiens
  misc_RNA (1)...(19): siRNA sense strand
ucucagggcuccaccucuu

SEQ ID NO: 2177488 - RNA, 19 nt, Homo sapiens
  misc_RNA (1)...(19): siRNA sense strand
ucauggacguggucucgaa

SEQ ID NO: 2177489 - RNA, 19 nt, Homo sapiens
  misc_RNA (1)...(19): siRNA sense strand
gcuccagacccauuucuug

SEQ ID NO: 2177490 - RNA, 19 nt, Homo sapiens
  misc_RNA (1)...(19): siRNA sense strand
ggcuuacagugaaauagaa

SEQ ID NO: 2177491 - RNA, 19 nt, Homo sapiens
  misc_RNA (1)...(19): siRNA sense strand
cucaaccgcugucgcauga

SEQ ID NO: 2177492 - RNA, 19 nt, Homo sapiens
  misc_RNA (1)...(19): siRNA sense strand
gagcaggagcaggccaaua

SEQ ID NO: 2177493 - RNA, 19 nt, Homo sapiens
  misc_RNA (1)...(19): siRNA sense strand
gggcagaggaguucauugg

SEQ ID NO: 2177494 - RNA, 19 nt, Homo sapiens
  misc_RNA (1)...(19): siRNA sense strand
gcaguaucgcucauuugaa

SEQ ID NO: 2177495 - RNA, 19 nt, Homo sapiens
  misc_RNA (1)...(19): siRNA sense strand
ggcuggaggugauggaugu

SEQ ID NO: 2177496 - RNA, 19 nt, Homo sapiens
  misc_RNA (1)...(19): siRNA sense strand
gacuacgacugguucuuca

SEQ ID NO: 2177497 - RNA, 19 nt, Homo sapiens
  misc_RNA (1)...(19): siRNA sense strand
uguggacacucucuucuuc

SEQ ID NO: 2177498 - RNA, 19 nt, Homo sapiens
  misc_RNA (1)...(19): siRNA sense strand
guggaaauccuaccuaugc

SEQ ID NO: 2177499 - RNA, 19 nt, Homo sapiens
  misc_RNA (1)...(19): siRNA sense strand
ccgaagguacccucaugua

SEQ ID NO: 2177500 - RNA, 19 nt, Homo sapiens
  misc_RNA (1)...(19): siRNA sense strand
gaagcacccuguggacacu

SEQ ID NO: 2177501 - RNA, 19 nt, Homo sapiens
  misc_RNA (1)...(19): siRNA sense strand
ggcuauggcucucuuugag

SEQ ID NO: 2177502 - RNA, 19 nt, Homo sapiens
  misc_RNA (1)...(19): siRNA sense strand
gggcuuuggcuaccuguug

SEQ ID NO: 2177503 - RNA, 19 nt, Homo sapiens
  misc_RNA (1)...(19): siRNA sense strand
gagcaggccaauagcacuu

SEQ ID NO: 2177504 - RNA, 19 nt, Homo sapiens
  misc_RNA (1)...(19): siRNA sense strand
gcgaggagggccacagaau

SEQ ID NO: 2177505 - RNA, 19 nt, Homo sapiens
  misc_RNA (1)...(19): siRNA sense strand
gcuacacuguccacuuugg

SEQ ID NO: 2177506 - RNA, 19 nt, Homo sapiens
  misc_RNA (1)...(19): siRNA sense strand
gcaggccaauagcacuuag

SEQ ID NO: 2177507 - RNA, 19 nt, Homo sapiens
  misc_RNA (1)...(19): siRNA sense strand
gcagcucaaucggcgcuau

SEQ ID NO: 2177508 - RNA, 19 nt, Homo sapiens
  misc_RNA (1)...(19): siRNA sense strand
ucagcgcucuggaguugga

SEQ ID NO: 2177509 - RNA, 19 nt, Homo sapiens
  misc_RNA (1)...(19): siRNA sense strand
gcaucaaccaagaccugua

SEQ ID NO: 2177510 - RNA, 19 nt, Homo sapiens
  misc_RNA (1)...(19): siRNA sense strand
ucacuucccucgguuacuc

SEQ ID NO: 2177511 - RNA, 19 nt, Homo sapiens
  misc_RNA (1)...(19): siRNA sense strand
agaccaaagugaugaagac

SEQ ID NO: 2177512 - RNA, 19 nt, Homo sapiens
  misc_RNA (1)...(19): siRNA sense strand
gggcugggacuacuucaca

SEQ ID NO: 2177513 - RNA, 19 nt, Homo sapiens
  misc_RNA (1)...(19): siRNA sense strand
cgacuacgacugguucuuc

SEQ ID NO: 2177514 - RNA, 19 nt, Homo sapiens
  misc_RNA (1)...(19): siRNA sense strand
cgacugguucuucaucaug

SEQ ID NO: 2177515 - RNA, 19 nt, Homo sapiens
  misc_RNA (1)...(19): siRNA sense strand
gccacgagaacaugcauug

SEQ ID NO: 2177516 - RNA, 19 nt, Homo sapiens
  misc_RNA (1)...(19): siRNA sense strand
cacccugucuccgaaggua

SEQ ID NO: 2177517 - RNA, 19 nt, Homo sapiens
  misc_RNA (1)...(19): siRNA sense strand
accaagaccuguacuuagg

SEQ ID NO: 2177518 - RNA, 19 nt, Homo sapiens
  misc_RNA (1)...(19): siRNA sense strand
ggucuacgggccacgagaa

SEQ ID NO: 2177519 - RNA, 19 nt, Homo sapiens
  misc_RNA (1)...(19): siRNA sense strand
gaccugcuguuggaaugug

SEQ ID NO: 2177520 - RNA, 19 nt, Homo sapiens
  misc_RNA (1)...(19): siRNA sense strand
gcucccugcuccuuucaca

SEQ ID NO: 2177521 - RNA, 19 nt, Homo sapiens
  misc_RNA (1)...(19): siRNA sense strand
gcuuggacgcugccucauu

SEQ ID NO: 2177522 - RNA, 19 nt, Homo sapiens
  misc_RNA (1)...(19): siRNA sense strand
guacgguggcccaucacuu

SEQ ID NO: 2177523 - RNA, 19 nt, Homo sapiens
  misc_RNA (1)...(19): siRNA sense strand
cagggcuggugcagaaguu

SEQ ID NO: 2177524 - RNA, 19 nt, Homo sapiens
  misc_RNA (1)...(19): siRNA sense strand
cuaccuaugcccuauguca

SEQ ID NO: 2177525 - RNA, 19 nt, Homo sapiens
  misc_RNA (1)...(19): siRNA sense strand
acagugaaauagaacaacu

SEQ ID NO: 2177526 - RNA, 19 nt, Homo sapiens
  misc_RNA (1)...(19): siRNA sense strand
ggacgcugccucauugacu

SEQ ID NO: 2177527 - RNA, 19 nt, Homo sapiens
  misc_RNA (1)...(19): siRNA sense strand
gaggagggccacagaaucc

SEQ ID NO: 2177528 - RNA, 19 nt, Homo sapiens
  misc_RNA (1)...(19): siRNA sense strand
augcauugcucacccuguu

SEQ ID NO: 2177529 - RNA, 19 nt, Homo sapiens
  misc_RNA (1)...(19): siRNA sense strand
ggcuuuggcuaccuguugu

SEQ ID NO: 2177530 - RNA, 19 nt, Homo sapiens
  misc_RNA (1)...(19): siRNA sense strand
cgaggagggccacagaauc

SEQ ID NO: 2177531 - RNA, 19 nt, Homo sapiens
  misc_RNA (1)...(19): siRNA sense strand
ggacacucucuucuuccuu

SEQ ID NO: 2177532 - RNA, 19 nt, Homo sapiens
  misc_RNA (1)...(19): siRNA sense strand
ggacguggucucgaagaag

SEQ ID NO: 2177533 - RNA, 19 nt, Homo sapiens
  misc_RNA (1)...(19): siRNA sense strand
uggacguggucucgaagaa

SEQ ID NO: 2177534 - RNA, 19 nt, Homo sapiens
  misc_RNA (1)...(19): siRNA sense strand
gagccggguggaaauccua

SEQ ID NO: 2177535 - RNA, 19 nt, Homo sapiens
  misc_RNA (1)...(19): siRNA sense strand
ggaagggagcucggcuuuc

SEQ ID NO: 2177536 - RNA, 19 nt, Homo sapiens
  misc_RNA (1)...(19): siRNA sense strand
gggcagcaguaucgcucau

SEQ ID NO: 2177537 - RNA, 19 nt, Homo sapiens
  misc_RNA (1)...(19): siRNA sense strand
ggagggcugcuucuacaac

SEQ ID NO: 2177538 - RNA, 19 nt, Homo sapiens
  misc_RNA (1)...(19): siRNA sense strand
cagcaguaucgcucauuug

SEQ ID NO: 2177539 - RNA, 19 nt, Homo sapiens
  misc_RNA (1)...(19): siRNA sense strand
gcucagugaagaacucuac

SEQ ID NO: 2177540 - RNA, 19 nt, Homo sapiens
  misc_RNA (1)...(19): siRNA sense strand
aauccuaccuaugcccuau

SEQ ID NO: 2177541 - RNA, 19 nt, Homo sapiens
  misc_RNA (1)...(19): siRNA sense strand
gguggaaauccuaccuaug

SEQ ID NO: 2177542 - RNA, 19 nt, Homo sapiens
  misc_RNA (1)...(19): siRNA sense strand
cuccgaagguacccucaug

SEQ ID NO: 2177543 - RNA, 19 nt, Homo sapiens
  misc_RNA (1)...(19): siRNA sense strand
ggccacacauucaucauca

SEQ ID NO: 2177544 - RNA, 19 nt, Homo sapiens
  misc_RNA (1)...(19): siRNA sense strand
acacauucaucaucaacug

SEQ ID NO: 2177545 - RNA, 19 nt, Homo sapiens
  misc_RNA (1)...(19): siRNA sense strand
ucucgcggcucuucagcaa

SEQ ID NO: 2177546 - RNA, 19 nt, Homo sapiens
  misc_RNA (1)...(19): siRNA sense strand
ucgcggcucuucagcaaca

SEQ ID NO: 2177547 - RNA, 19 nt, Homo sapiens
  misc_RNA (1)...(19): siRNA sense strand
cgucgcaggcgucugguuu

SEQ ID NO: 2177548 - RNA, 19 nt, Homo sapiens
  misc_RNA (1)...(19): siRNA sense strand
gugcagugcugugccuagu

SEQ ID NO: 2177549 - RNA, 19 nt, Homo sapiens
  misc_RNA (1)...(19): siRNA sense strand
gccacacauucaucaucaa

SEQ ID NO: 2177550 - RNA, 19 nt, Homo sapiens
  misc_RNA (1)...(19): siRNA sense strand
ggccacacauucaucauca

SEQ ID NO: 2177551 - RNA, 19 nt, Homo sapiens
  misc_RNA (1)...(19): siRNA sense strand
gcagaugucccgggaguuc

SEQ ID NO: 2177552 - RNA, 19 nt, Homo sapiens
  misc_RNA (1)...(19): siRNA sense strand
acacauucaucaucaacug

SEQ ID NO: 2177553 - RNA, 19 nt, Homo sapiens
  misc_RNA (1)...(19): siRNA sense strand
ucugccagcuggaggauga

SEQ ID NO: 2177554 - RNA, 19 nt, Homo sapiens
  misc_RNA (1)...(19): siRNA sense strand
aaagcuaugugaccuucug

SEQ ID NO: 2177555 - RNA, 19 nt, Homo sapiens
  misc_RNA (1)...(19): siRNA sense strand
ucucgcggcucuucagcaa

SEQ ID NO: 2177556 - RNA, 19 nt, Homo sapiens
  misc_RNA (1)...(19): siRNA sense strand
ucgcggcucuucagcaaca

SEQ ID NO: 2177557 - RNA, 19 nt, Homo sapiens
  misc_RNA (1)...(19): siRNA sense strand
ggucuggaguguggacaag

SEQ ID NO: 2177558 - RNA, 19 nt, Homo sapiens
  misc_RNA (1)...(19): siRNA sense strand
gccaacaaccagcucuuca

SEQ ID NO: 2177559 - RNA, 19 nt, Homo sapiens
  misc_RNA (1)...(19): siRNA sense strand
gugcagugcugugccuagu

SEQ ID NO: 2177560 - RNA, 19 nt, Homo sapiens
  misc_RNA (1)...(19): siRNA sense strand
gccacacauucaucaucaa

SEQ ID NO: 2177561 - RNA, 19 nt, Homo sapiens
  misc_RNA (1)...(19): siRNA sense strand
ggccacacauucaucauca

SEQ ID NO: 2177562 - RNA, 19 nt, Homo sapiens
  misc_RNA (1)...(19): siRNA sense strand
gcagaugucccgggaguuc

SEQ ID NO: 2177563 - RNA, 19 nt, Homo sapiens
  misc_RNA (1)...(19): siRNA sense strand
acacauucaucaucaacug

SEQ ID NO: 2177564 - RNA, 19 nt, Homo sapiens
  misc_RNA (1)...(19): siRNA sense strand
ucugccagcuggaggauga

SEQ ID NO: 2177565 - RNA, 19 nt, Homo sapiens
  misc_RNA (1)...(19): siRNA sense strand
aaagcuaugugaccuucug

SEQ ID NO: 2177566 - RNA, 19 nt, Homo sapiens
  misc_RNA (1)...(19): siRNA sense strand
ucucgcggcucuucagcaa

SEQ ID NO: 2177567 - RNA, 19 nt, Homo sapiens
  misc_RNA (1)...(19): siRNA sense strand
ucgcggcucuucagcaaca

SEQ ID NO: 2177568 - RNA, 19 nt, Homo sapiens
  misc_RNA (1)...(19): siRNA sense strand
ggucuggaguguggacaag

SEQ ID NO: 2177569 - RNA, 19 nt, Homo sapiens
  misc_RNA (1)...(19): siRNA sense strand
gccaacaaccagcucuuca

SEQ ID NO: 2177570 - RNA, 19 nt, Homo sapiens
  misc_RNA (1)...(19): siRNA sense strand
gugcagugcugugccuagu

SEQ ID NO: 2177571 - RNA, 19 nt, Homo sapiens
  misc_RNA (1)...(19): siRNA sense strand
gccacacauucaucaucaa

SEQ ID NO: 2177572 - RNA, 19 nt, Homo sapiens
  misc_RNA (1)...(19): siRNA sense strand
uaaaggaagugaccaauua

SEQ ID NO: 2177573 - RNA, 19 nt, Homo sapiens
  misc_RNA (1)...(19): siRNA sense strand
gcaaauggccgcaguguua

SEQ ID NO: 2177574 - RNA, 19 nt, Homo sapiens
  misc_RNA (1)...(19): siRNA sense strand
gcaacggccugucuuucua

SEQ ID NO: 2177575 - RNA, 19 nt, Homo sapiens
  misc_RNA (1)...(19): siRNA sense strand
gacuguagaugaaaucgua

SEQ ID NO: 2177576 - RNA, 19 nt, Homo sapiens
  misc_RNA (1)...(19): siRNA sense strand
gcucgugacuguagaugaa

SEQ ID NO: 2177577 - RNA, 19 nt, Homo sapiens
  misc_RNA (1)...(19): siRNA sense strand
ugugggagcugaagggaua

SEQ ID NO: 2177578 - RNA, 19 nt, Homo sapiens
  misc_RNA (1)...(19): siRNA sense strand
agucaaagcccaaggauuu

SEQ ID NO: 2177579 - RNA, 19 nt, Homo sapiens
  misc_RNA (1)...(19): siRNA sense strand
ggcagagaaugcaggcuua

SEQ ID NO: 2177580 - RNA, 19 nt, Homo sapiens
  misc_RNA (1)...(19): siRNA sense strand
gagcugaagggauaauaaa

SEQ ID NO: 2177581 - RNA, 19 nt, Homo sapiens
  misc_RNA (1)...(19): siRNA sense strand
gcugaucuagcucaauuua

SEQ ID NO: 2177582 - RNA, 19 nt, Homo sapiens
  misc_RNA (1)...(19): siRNA sense strand
ggagaucauuuaccugagu

SEQ ID NO: 2177583 - RNA, 19 nt, Homo sapiens
  misc_RNA (1)...(19): siRNA sense strand
gaagugaccaauuacuaga

SEQ ID NO: 2177584 - RNA, 19 nt, Homo sapiens
  misc_RNA (1)...(19): siRNA sense strand
gcaagugccagaggguuua

SEQ ID NO: 2177585 - RNA, 19 nt, Homo sapiens
  misc_RNA (1)...(19): siRNA sense strand
gggaagcucugugggcaaa

SEQ ID NO: 2177586 - RNA, 19 nt, Homo sapiens
  misc_RNA (1)...(19): siRNA sense strand
ggaagugaccaauuacuag

SEQ ID NO: 2177587 - RNA, 19 nt, Homo sapiens
  misc_RNA (1)...(19): siRNA sense strand
guaaaggaagugaccaauu

SEQ ID NO: 2177588 - RNA, 19 nt, Homo sapiens
  misc_RNA (1)...(19): siRNA sense strand
gaagcucugugggcaaaug

SEQ ID NO: 2177589 - RNA, 19 nt, Homo sapiens
  misc_RNA (1)...(19): siRNA sense strand
ugaucuagcucaauuuagu

SEQ ID NO: 2177590 - RNA, 19 nt, Homo sapiens
  misc_RNA (1)...(19): siRNA sense strand
gaucuggaauccugacucu

SEQ ID NO: 2177591 - RNA, 19 nt, Homo sapiens
  misc_RNA (1)...(19): siRNA sense strand
ggagcugaagggauaauaa

SEQ ID NO: 2177592 - RNA, 19 nt, Homo sapiens
  misc_RNA (1)...(19): siRNA sense strand
agacgugguugcagaaaug

SEQ ID NO: 2177593 - RNA, 19 nt, Homo sapiens
  misc_RNA (1)...(19): siRNA sense strand
ggauggagaucauuuaccu

SEQ ID NO: 2177594 - RNA, 19 nt, Homo sapiens
  misc_RNA (1)...(19): siRNA sense strand
gaucuagcucaauuuagua

SEQ ID NO: 2177595 - RNA, 19 nt, Homo sapiens
  misc_RNA (1)...(19): siRNA sense strand
cugcugaucuagcucaauu

SEQ ID NO: 2177596 - RNA, 19 nt, Homo sapiens
  misc_RNA (1)...(19): siRNA sense strand
guauuugaaugggaaugua

SEQ ID NO: 2177597 - RNA, 19 nt, Homo sapiens
  misc_RNA (1)...(19): siRNA sense strand
gcugaagggauaauaaaug

SEQ ID NO: 2177598 - RNA, 19 nt, Homo sapiens
  misc_RNA (1)...(19): siRNA sense strand
cugaagggauaauaaaugu

SEQ ID NO: 2177599 - RNA, 19 nt, Homo sapiens
  misc_RNA (1)...(19): siRNA sense strand
gcacagccuucgugguucu

SEQ ID NO: 2177600 - RNA, 19 nt, Homo sapiens
  misc_RNA (1)...(19): siRNA sense strand
uaaaggaagcagauuggaa

SEQ ID NO: 2177601 - RNA, 19 nt, Homo sapiens
  misc_RNA (1)...(19): siRNA sense strand
gauaaaggaagcagauugg

SEQ ID NO: 2177602 - RNA, 19 nt, Homo sapiens
  misc_RNA (1)...(19): siRNA sense strand
ggaauccugacucuaagaa

SEQ ID NO: 2177603 - RNA, 19 nt, Homo sapiens
  misc_RNA (1)...(19): siRNA sense strand
ucuggaauccugacucuaa

SEQ ID NO: 2177604 - RNA, 19 nt, Homo sapiens
  misc_RNA (1)...(19): siRNA sense strand
caaauggccgcaguguuaa

SEQ ID NO: 2177605 - RNA, 19 nt, Homo sapiens
  misc_RNA (1)...(19): siRNA sense strand
aauccugacucuaagaaga

SEQ ID NO: 2177606 - RNA, 19 nt, Homo sapiens
  misc_RNA (1)...(19): siRNA sense strand
ugguuuggcugugguauuu

SEQ ID NO: 2177607 - RNA, 19 nt, Homo sapiens
  misc_RNA (1)...(19): siRNA sense strand
gugcagagcaggccgucua

SEQ ID NO: 2177608 - RNA, 19 nt, Homo sapiens
  misc_RNA (1)...(19): siRNA sense strand
ucacacuggcggacaagua

SEQ ID NO: 2177609 - RNA, 19 nt, Homo sapiens
  misc_RNA (1)...(19): siRNA sense strand
ggugggaaccuccuaaugg

SEQ ID NO: 2177610 - RNA, 19 nt, Homo sapiens
  misc_RNA (1)...(19): siRNA sense strand
gacggaagccuugcuggaa

SEQ ID NO: 2177611 - RNA, 19 nt, Homo sapiens
  misc_RNA (1)...(19): siRNA sense strand
guuuggcugugguauuuga

SEQ ID NO: 2177612 - RNA, 19 nt, Homo sapiens
  misc_RNA (1)...(19): siRNA sense strand
uggcacagccuucgugguu

SEQ ID NO: 2177613 - RNA, 19 nt, Homo sapiens
  misc_RNA (1)...(19): siRNA sense strand
aaugcucucugauaaagga

SEQ ID NO: 2177614 - RNA, 19 nt, Homo sapiens
  misc_RNA (1)...(19): siRNA sense strand
ugauaaaggaagcagauug

SEQ ID NO: 2177615 - RNA, 19 nt, Homo sapiens
  misc_RNA (1)...(19): siRNA sense strand
gaccaugaaaggagaaaca

SEQ ID NO: 2177616 - RNA, 19 nt, Homo sapiens
  misc_RNA (1)...(19): siRNA sense strand
acucuaagaagacaaagaa

SEQ ID NO: 2177617 - RNA, 19 nt, Homo sapiens
  misc_RNA (1)...(19): siRNA sense strand
ggacacccuaauagucaaa

SEQ ID NO: 2177618 - RNA, 19 nt, Homo sapiens
  misc_RNA (1)...(19): siRNA sense strand
agugaccaauuacuagaaa

SEQ ID NO: 2177619 - RNA, 19 nt, Homo sapiens
  misc_RNA (1)...(19): siRNA sense strand
gggacacccuaauagucaa

SEQ ID NO: 2177620 - RNA, 19 nt, Homo sapiens
  misc_RNA (1)...(19): siRNA sense strand
ggccugcauuccuagcauu

SEQ ID NO: 2177621 - RNA, 19 nt, Homo sapiens
  misc_RNA (1)...(19): siRNA sense strand
caagaaaagucccacacau

SEQ ID NO: 2177622 - RNA, 19 nt, Homo sapiens
  misc_RNA (1)...(19): siRNA sense strand
ccacacaucagcagaucug

SEQ ID NO: 2177623 - RNA, 19 nt, Homo sapiens
  misc_RNA (1)...(19): siRNA sense strand
ccugggcccuccauucugu

SEQ ID NO: 2177624 - RNA, 19 nt, Homo sapiens
  misc_RNA (1)...(19): siRNA sense strand
cacaucagcagaucuggaa

SEQ ID NO: 2177625 - RNA, 19 nt, Homo sapiens
  misc_RNA (1)...(19): siRNA sense strand
gaaaucguaguggccaaga

SEQ ID NO: 2177626 - RNA, 19 nt, Homo sapiens
  misc_RNA (1)...(19): siRNA sense strand
uggcugagguggugcuaca

SEQ ID NO: 2177627 - RNA, 19 nt, Homo sapiens
  misc_RNA (1)...(19): siRNA sense strand
cagacgugguugcagaaau

SEQ ID NO: 2177628 - RNA, 19 nt, Homo sapiens
  misc_RNA (1)...(19): siRNA sense strand
ccagcaacggccugucuuu

SEQ ID NO: 2177629 - RNA, 19 nt, Homo sapiens
  misc_RNA (1)...(19): siRNA sense strand
ggagcugggagaugguuug

SEQ ID NO: 2177630 - RNA, 19 nt, Homo sapiens
  misc_RNA (1)...(19): siRNA sense strand
ggcccuccauucugugaug

SEQ ID NO: 2177631 - RNA, 19 nt, Homo sapiens
  misc_RNA (1)...(19): siRNA sense strand
aggaagugaccaauuacua

SEQ ID NO: 2177632 - RNA, 19 nt, Homo sapiens
  misc_RNA (1)...(19): siRNA sense strand
caggguggcucucuuugcu

SEQ ID NO: 2177633 - RNA, 19 nt, Homo sapiens
  misc_RNA (1)...(19): siRNA sense strand
aaucguaguggccaagaaa

SEQ ID NO: 2177634 - RNA, 19 nt, Homo sapiens
  misc_RNA (1)...(19): siRNA sense strand
ccaugaaccacuugaccaa

SEQ ID NO: 2177635 - RNA, 19 nt, Homo sapiens
  misc_RNA (1)...(19): siRNA sense strand
gcccaaggaguccggaaga

SEQ ID NO: 2177636 - RNA, 19 nt, Homo sapiens
  misc_RNA (1)...(19): siRNA sense strand
gguccugcccauccaaaug

SEQ ID NO: 2177637 - RNA, 19 nt, Homo sapiens
  misc_RNA (1)...(19): siRNA sense strand
gcccaaacccaagcagaga

SEQ ID NO: 2177638 - RNA, 19 nt, Homo sapiens
  misc_RNA (1)...(19): siRNA sense strand
ccuaaaaccuuggcagaga

SEQ ID NO: 2177639 - RNA, 19 nt, Homo sapiens
  misc_RNA (1)...(19): siRNA sense strand
uaauguggcagugguguug

SEQ ID NO: 2177640 - RNA, 19 nt, Homo sapiens
  misc_RNA (1)...(19): siRNA sense strand
aaaaugcucucugauaaag

SEQ ID NO: 2177641 - RNA, 19 nt, Homo sapiens
  misc_RNA (1)...(19): siRNA sense strand
cggaagccuugcuggaaca

SEQ ID NO: 2177642 - RNA, 19 nt, Homo sapiens
  misc_RNA (1)...(19): siRNA sense strand
caaacccaagcagagaaua

SEQ ID NO: 2177643 - RNA, 19 nt, Homo sapiens
  misc_RNA (1)...(19): siRNA sense strand
caacggccugucuuucuag

SEQ ID NO: 2177644 - RNA, 19 nt, Homo sapiens
  misc_RNA (1)...(19): siRNA sense strand
uccuuggaaugaauaacua

SEQ ID NO: 2177645 - RNA, 19 nt, Homo sapiens
  misc_RNA (1)...(19): siRNA sense strand
cuaagaagacaaagaaacg

SEQ ID NO: 2177646 - RNA, 19 nt, Homo sapiens
  misc_RNA (1)...(19): siRNA sense strand
ugggacacccuaauaguca

SEQ ID NO: 2177647 - RNA, 19 nt, Homo sapiens
  misc_RNA (1)...(19): siRNA sense strand
ccaaacccaagcagagaau

SEQ ID NO: 2177648 - RNA, 19 nt, Homo sapiens
  misc_RNA (1)...(19): siRNA sense strand
cuucaagccugagcguguu

SEQ ID NO: 2177649 - RNA, 19 nt, Homo sapiens
  misc_RNA (1)...(19): siRNA sense strand
uggcugugguauuugaaug

SEQ ID NO: 2177650 - RNA, 19 nt, Homo sapiens
  misc_RNA (1)...(19): siRNA sense strand
aaaucguaguggccaagaa

SEQ ID NO: 2177651 - RNA, 19 nt, Homo sapiens
  misc_RNA (1)...(19): siRNA sense strand
gggagcugaagggauaaua

SEQ ID NO: 2177652 - RNA, 19 nt, Homo sapiens
  misc_RNA (1)...(19): siRNA sense strand
ccaagggagagcccaagga

SEQ ID NO: 2177653 - RNA, 19 nt, Homo sapiens
  misc_RNA (1)...(19): siRNA sense strand
gggccugcauuccuagcau

SEQ ID NO: 2177654 - RNA, 19 nt, Homo sapiens
  misc_RNA (1)...(19): siRNA sense strand
ggacguagcucuuuccaaa

SEQ ID NO: 2177655 - RNA, 19 nt, Homo sapiens
  misc_RNA (1)...(19): siRNA sense strand
ucaacaagcuuaucgacuu

SEQ ID NO: 2177656 - RNA, 19 nt, Homo sapiens
  misc_RNA (1)...(19): siRNA sense strand
gcacuucacccaagccauu

SEQ ID NO: 2177657 - RNA, 19 nt, Homo sapiens
  misc_RNA (1)...(19): siRNA sense strand
caagauacuuuggaacaga

SEQ ID NO: 2177658 - RNA, 19 nt, Homo sapiens
  misc_RNA (1)...(19): siRNA sense strand
uccaaaagcugcaauauaa

SEQ ID NO: 2177659 - RNA, 19 nt, Homo sapiens
  misc_RNA (1)...(19): siRNA sense strand
caacaagcuuaucgacuuc

SEQ ID NO: 2177660 - RNA, 19 nt, Homo sapiens
  misc_RNA (1)...(19): siRNA sense strand
gcaauggaucaacuucaua

SEQ ID NO: 2177661 - RNA, 19 nt, Homo sapiens
  misc_RNA (1)...(19): siRNA sense strand
ggaacuaugugcaggaaac

SEQ ID NO: 2177662 - RNA, 19 nt, Homo sapiens
  misc_RNA (1)...(19): siRNA sense strand
gcugcaagauacuuuggaa

SEQ ID NO: 2177663 - RNA, 19 nt, Homo sapiens
  misc_RNA (1)...(19): siRNA sense strand
auucaaagcugcaagauac

SEQ ID NO: 2177664 - RNA, 19 nt, Homo sapiens
  misc_RNA (1)...(19): siRNA sense strand
uggaacagauugaggaaca

SEQ ID NO: 2177665 - RNA, 19 nt, Homo sapiens
  misc_RNA (1)...(19): siRNA sense strand
gcaagauacuuuggaacag

SEQ ID NO: 2177666 - RNA, 19 nt, Homo sapiens
  misc_RNA (1)...(19): siRNA sense strand
caauggaucaacuucauau

SEQ ID NO: 2177667 - RNA, 19 nt, Homo sapiens
  misc_RNA (1)...(19): siRNA sense strand
caauauaaggaucucugua

SEQ ID NO: 2177668 - RNA, 19 nt, Homo sapiens
  misc_RNA (1)...(19): siRNA sense strand
ccaagguucaacaagcuua

SEQ ID NO: 2177669 - RNA, 19 nt, Homo sapiens
  misc_RNA (1)...(19): siRNA sense strand
gacauuaaccauuauacca

SEQ ID NO: 2177670 - RNA, 19 nt, Homo sapiens
  misc_RNA (1)...(19): siRNA sense strand
caggaaacacagacacaaa

SEQ ID NO: 2177671 - RNA, 19 nt, Homo sapiens
  misc_RNA (1)...(19): siRNA sense strand
gcuuaucgacuucuuggaa

SEQ ID NO: 2177672 - RNA, 19 nt, Homo sapiens
  misc_RNA (1)...(19): siRNA sense strand
aaacacagacagcaaugga

SEQ ID NO: 2177673 - RNA, 19 nt, Homo sapiens
  misc_RNA (1)...(19): siRNA sense strand
gcaggaaacacagacacaa

SEQ ID NO: 2177674 - RNA, 19 nt, Homo sapiens
  misc_RNA (1)...(19): siRNA sense strand
uccaaaaucugcaagaauu

SEQ ID NO: 2177675 - RNA, 19 nt, Homo sapiens
  misc_RNA (1)...(19): siRNA sense strand
gcaauauaaggaucucugu

SEQ ID NO: 2177676 - RNA, 19 nt, Homo sapiens
  misc_RNA (1)...(19): siRNA sense strand
agacagcaauggaucaacu

SEQ ID NO: 2177677 - RNA, 19 nt, Homo sapiens
  misc_RNA (1)...(19): siRNA sense strand
cuuaucgacuucuuggaaa

SEQ ID NO: 2177678 - RNA, 19 nt, Homo sapiens
  misc_RNA (1)...(19): siRNA sense strand
uggaucaacuucauaugca

SEQ ID NO: 2177679 - RNA, 19 nt, Homo sapiens
  misc_RNA (1)...(19): siRNA sense strand
gaaacacagacacaaaauu

SEQ ID NO: 2177680 - RNA, 19 nt, Homo sapiens
  misc_RNA (1)...(19): siRNA sense strand
caccguguuucaaguuguu

SEQ ID NO: 2177681 - RNA, 19 nt, Homo sapiens
  misc_RNA (1)...(19): siRNA sense strand
guggaacuaugugcaggaa

SEQ ID NO: 2177682 - RNA, 19 nt, Homo sapiens
  misc_RNA (1)...(19): siRNA sense strand
ugaauucaaagcugcaaga

SEQ ID NO: 2177683 - RNA, 19 nt, Homo sapiens
  misc_RNA (1)...(19): siRNA sense strand
gaacuaugugcaggaaaca

SEQ ID NO: 2177684 - RNA, 19 nt, Homo sapiens
  misc_RNA (1)...(19): siRNA sense strand
caacuucauaugcacuuca

SEQ ID NO: 2177685 - RNA, 19 nt, Homo sapiens
  misc_RNA (1)...(19): siRNA sense strand
auauaaggaucucuguaca

SEQ ID NO: 2177686 - RNA, 19 nt, Homo sapiens
  misc_RNA (1)...(19): siRNA sense strand
aaacacagacacaaaauuc

SEQ ID NO: 2177687 - RNA, 19 nt, Homo sapiens
  misc_RNA (1)...(19): siRNA sense strand
aagauacuuuggaacagau

SEQ ID NO: 2177688 - RNA, 19 nt, Homo sapiens
  misc_RNA (1)...(19): siRNA sense strand
aauauaaggaucucuguac

SEQ ID NO: 2177689 - RNA, 19 nt, Homo sapiens
  misc_RNA (1)...(19): siRNA sense strand
gaauucaaagcugcaagau

SEQ ID NO: 2177690 - RNA, 19 nt, Homo sapiens
  misc_RNA (1)...(19): siRNA sense strand
aauucaaagcugcaagaua

SEQ ID NO: 2177691 - RNA, 19 nt, Homo sapiens
  misc_RNA (1)...(19): siRNA sense strand
uaccaagguucaacaagcu

SEQ ID NO: 2177692 - RNA, 19 nt, Homo sapiens
  misc_RNA (1)...(19): siRNA sense strand
ggaacagauugaggaacag

SEQ ID NO: 2177693 - RNA, 19 nt, Homo sapiens
  misc_RNA (1)...(19): siRNA sense strand
uugguuauguggaacuaug

SEQ ID NO: 2177694 - RNA, 19 nt, Homo sapiens
  misc_RNA (1)...(19): siRNA sense strand
agcaauggaucaacuucau

SEQ ID NO: 2177695 - RNA, 19 nt, Homo sapiens
  misc_RNA (1)...(19): siRNA sense strand
cugcaagaauuuugacauu

SEQ ID NO: 2177696 - RNA, 19 nt, Homo sapiens
  misc_RNA (1)...(19): siRNA sense strand
ggaaacacagacacaaaau

SEQ ID NO: 2177697 - RNA, 19 nt, Homo sapiens
  misc_RNA (1)...(19): siRNA sense strand
gcacuucacccaagccauu

SEQ ID NO: 2177698 - RNA, 19 nt, Homo sapiens
  misc_RNA (1)...(19): siRNA sense strand
uccaaaagcugcaauauaa

SEQ ID NO: 2177699 - RNA, 19 nt, Homo sapiens
  misc_RNA (1)...(19): siRNA sense strand
ggaacuaugugcaggaaac

SEQ ID NO: 2177700 - RNA, 19 nt, Homo sapiens
  misc_RNA (1)...(19): siRNA sense strand
caauauaaggaucucugua

SEQ ID NO: 2177701 - RNA, 19 nt, Homo sapiens
  misc_RNA (1)...(19): siRNA sense strand
caggaaacacagacacaaa

SEQ ID NO: 2177702 - RNA, 19 nt, Homo sapiens
  misc_RNA (1)...(19): siRNA sense strand
gcaggaaacacagacacaa

SEQ ID NO: 2177703 - RNA, 19 nt, Homo sapiens
  misc_RNA (1)...(19): siRNA sense strand
gcaauauaaggaucucugu

SEQ ID NO: 2177704 - RNA, 19 nt, Homo sapiens
  misc_RNA (1)...(19): siRNA sense strand
gaaacacagacacaaaauu

SEQ ID NO: 2177705 - RNA, 19 nt, Homo sapiens
  misc_RNA (1)...(19): siRNA sense strand
caccguguuucaaguuguu

SEQ ID NO: 2177706 - RNA, 19 nt, Homo sapiens
  misc_RNA (1)...(19): siRNA sense strand
guggaacuaugugcaggaa

SEQ ID NO: 2177707 - RNA, 19 nt, Homo sapiens
  misc_RNA (1)...(19): siRNA sense strand
gaacuaugugcaggaaaca

SEQ ID NO: 2177708 - RNA, 19 nt, Homo sapiens
  misc_RNA (1)...(19): siRNA sense strand
caacuucauaugcacuuca

SEQ ID NO: 2177709 - RNA, 19 nt, Homo sapiens
  misc_RNA (1)...(19): siRNA sense strand
auauaaggaucucuguaca

SEQ ID NO: 2177710 - RNA, 19 nt, Homo sapiens
  misc_RNA (1)...(19): siRNA sense strand
aaacacagacacaaaauuc

SEQ ID NO: 2177711 - RNA, 19 nt, Homo sapiens
  misc_RNA (1)...(19): siRNA sense strand
aauauaaggaucucuguac

SEQ ID NO: 2177712 - RNA, 19 nt, Homo sapiens
  misc_RNA (1)...(19): siRNA sense strand
uugguuauguggaacuaug

SEQ ID NO: 2177713 - RNA, 19 nt, Homo sapiens
  misc_RNA (1)...(19): siRNA sense strand
ggaaacacagacacaaaau

SEQ ID NO: 2177714 - RNA, 19 nt, Homo sapiens
  misc_RNA (1)...(19): siRNA sense strand
gcacuucacccaagccauu

SEQ ID NO: 2177715 - RNA, 19 nt, Homo sapiens
  misc_RNA (1)...(19): siRNA sense strand
uccaaaagcugcaauauaa

SEQ ID NO: 2177716 - RNA, 19 nt, Homo sapiens
  misc_RNA (1)...(19): siRNA sense strand
ggaacuaugugcaggaaac

SEQ ID NO: 2177717 - RNA, 19 nt, Homo sapiens
  misc_RNA (1)...(19): siRNA sense strand
caauauaaggaucucugua

SEQ ID NO: 2177718 - RNA, 19 nt, Homo sapiens
  misc_RNA (1)...(19): siRNA sense strand
caggaaacacagacacaaa

SEQ ID NO: 2177719 - RNA, 19 nt, Homo sapiens
  misc_RNA (1)...(19): siRNA sense strand
gcaggaaacacagacacaa

SEQ ID NO: 2177720 - RNA, 19 nt, Homo sapiens
  misc_RNA (1)...(19): siRNA sense strand
gcaauauaaggaucucugu

SEQ ID NO: 2177721 - RNA, 19 nt, Homo sapiens
  misc_RNA (1)...(19): siRNA sense strand
gaaacacagacacaaaauu

SEQ ID NO: 2177722 - RNA, 19 nt, Homo sapiens
  misc_RNA (1)...(19): siRNA sense strand
caccguguuucaaguuguu

SEQ ID NO: 2177723 - RNA, 19 nt, Homo sapiens
  misc_RNA (1)...(19): siRNA sense strand
guggaacuaugugcaggaa

SEQ ID NO: 2177724 - RNA, 19 nt, Homo sapiens
  misc_RNA (1)...(19): siRNA sense strand
gaacuaugugcaggaaaca

SEQ ID NO: 2177725 - RNA, 19 nt, Homo sapiens
  misc_RNA (1)...(19): siRNA sense strand
caacuucauaugcacuuca

SEQ ID NO: 2177726 - RNA, 19 nt, Homo sapiens
  misc_RNA (1)...(19): siRNA sense strand
auauaaggaucucuguaca

SEQ ID NO: 2177727 - RNA, 19 nt, Homo sapiens
  misc_RNA (1)...(19): siRNA sense strand
aaacacagacacaaaauuc

SEQ ID NO: 2177728 - RNA, 19 nt, Homo sapiens
  misc_RNA (1)...(19): siRNA sense strand
aauauaaggaucucuguac

SEQ ID NO: 2177729 - RNA, 19 nt, Homo sapiens
  misc_RNA (1)...(19): siRNA sense strand
uugguuauguggaacuaug

SEQ ID NO: 2177730 - RNA, 19 nt, Homo sapiens
  misc_RNA (1)...(19): siRNA sense strand
ggaaacacagacacaaaau

SEQ ID NO: 2177731 - RNA, 19 nt, Homo sapiens
  misc_RNA (1)...(19): siRNA sense strand
ggaaagaaguggaaagaaa

SEQ ID NO: 2177732 - RNA, 19 nt, Homo sapiens
  misc_RNA (1)...(19): siRNA sense strand
gagaacagcuccugcaguu

SEQ ID NO: 2177733 - RNA, 19 nt, Homo sapiens
  misc_RNA (1)...(19): siRNA sense strand
gcaguuggauggaaauaaa

SEQ ID NO: 2177734 - RNA, 19 nt, Homo sapiens
  misc_RNA (1)...(19): siRNA sense strand
gcagguuucucacugguua

SEQ ID NO: 2177735 - RNA, 19 nt, Homo sapiens
  misc_RNA (1)...(19): siRNA sense strand
gggagacacuucacuguuu

SEQ ID NO: 2177736 - RNA, 19 nt, Homo sapiens
  misc_RNA (1)...(19): siRNA sense strand
ccaaauuacuuccaccuaa

SEQ ID NO: 2177737 - RNA, 19 nt, Homo sapiens
  misc_RNA (1)...(19): siRNA sense strand
gcucagaccuccacucguu

SEQ ID NO: 2177738 - RNA, 19 nt, Homo sapiens
  misc_RNA (1)...(19): siRNA sense strand
cagaugagauccuugauga

SEQ ID NO: 2177739 - RNA, 19 nt, Homo sapiens
  misc_RNA (1)...(19): siRNA sense strand
gaaaggagcaagagcaaau

SEQ ID NO: 2177740 - RNA, 19 nt, Homo sapiens
  misc_RNA (1)...(19): siRNA sense strand
gccuaaaucuggagcagua

SEQ ID NO: 2177741 - RNA, 19 nt, Homo sapiens
  misc_RNA (1)...(19): siRNA sense strand
gaaaugaagaugucucuag

SEQ ID NO: 2177742 - RNA, 19 nt, Homo sapiens
  misc_RNA (1)...(19): siRNA sense strand
gagaaaagcuaaggagaaa

SEQ ID NO: 2177743 - RNA, 19 nt, Homo sapiens
  misc_RNA (1)...(19): siRNA sense strand
ugccaaagaucccaaauca

SEQ ID NO: 2177744 - RNA, 19 nt, Homo sapiens
  misc_RNA (1)...(19): siRNA sense strand
aaacaucacuggagaacag

SEQ ID NO: 2177745 - RNA, 19 nt, Homo sapiens
  misc_RNA (1)...(19): siRNA sense strand
aaaugaagaugucucuaga

SEQ ID NO: 2177746 - RNA, 19 nt, Homo sapiens
  misc_RNA (1)...(19): siRNA sense strand
gaaaagaugacgucaacua

SEQ ID NO: 2177747 - RNA, 19 nt, Homo sapiens
  misc_RNA (1)...(19): siRNA sense strand
gcagguagcaggaucuuca

SEQ ID NO: 2177748 - RNA, 19 nt, Homo sapiens
  misc_RNA (1)...(19): siRNA sense strand
caaauuacuuccaccuaag

SEQ ID NO: 2177749 - RNA, 19 nt, Homo sapiens
  misc_RNA (1)...(19): siRNA sense strand
gaugagauccuugaugaug

SEQ ID NO: 2177750 - RNA, 19 nt, Homo sapiens
  misc_RNA (1)...(19): siRNA sense strand
gggccucucuccucuaugu

SEQ ID NO: 2177751 - RNA, 19 nt, Homo sapiens
  misc_RNA (1)...(19): siRNA sense strand
ucaaggaaaugaagauguc

SEQ ID NO: 2177752 - RNA, 19 nt, Homo sapiens
  misc_RNA (1)...(19): siRNA sense strand
ggauggaaauaaacuuaag

SEQ ID NO: 2177753 - RNA, 19 nt, Homo sapiens
  misc_RNA (1)...(19): siRNA sense strand
ccaaagaucccaaaucacu

SEQ ID NO: 2177754 - RNA, 19 nt, Homo sapiens
  misc_RNA (1)...(19): siRNA sense strand
ggagcaguauguaucugaa

SEQ ID NO: 2177755 - RNA, 19 nt, Homo sapiens
  misc_RNA (1)...(19): siRNA sense strand
gagacucuaauuucagaua

SEQ ID NO: 2177756 - RNA, 19 nt, Homo sapiens
  misc_RNA (1)...(19): siRNA sense strand
gaaagaaguggaaagaaaa

SEQ ID NO: 2177757 - RNA, 19 nt, Homo sapiens
  misc_RNA (1)...(19): siRNA sense strand
aaagaucccaaaucacuaa

SEQ ID NO: 2177758 - RNA, 19 nt, Homo sapiens
  misc_RNA (1)...(19): siRNA sense strand
ccaaaccaccaacaagaaa

SEQ ID NO: 2177759 - RNA, 19 nt, Homo sapiens
  misc_RNA (1)...(19): siRNA sense strand
cuucucgucugaccacaua

SEQ ID NO: 2177760 - RNA, 19 nt, Homo sapiens
  misc_RNA (1)...(19): siRNA sense strand
gagaaaggagcaagagcaa

SEQ ID NO: 2177761 - RNA, 19 nt, Homo sapiens
  misc_RNA (1)...(19): siRNA sense strand
guuucucacugguuaauga

SEQ ID NO: 2177762 - RNA, 19 nt, Homo sapiens
  misc_RNA (1)...(19): siRNA sense strand
caaagaucccaaaucacua

SEQ ID NO: 2177763 - RNA, 19 nt, Homo sapiens
  misc_RNA (1)...(19): siRNA sense strand
gcaagggaaagaaguggaa

SEQ ID NO: 2177764 - RNA, 19 nt, Homo sapiens
  misc_RNA (1)...(19): siRNA sense strand
gaaccugccugcgccuaca

SEQ ID NO: 2177765 - RNA, 19 nt, Homo sapiens
  misc_RNA (1)...(19): siRNA sense strand
ggagacacuucacuguuuu

SEQ ID NO: 2177766 - RNA, 19 nt, Homo sapiens
  misc_RNA (1)...(19): siRNA sense strand
aaacuuaaggcucuuggaa

SEQ ID NO: 2177767 - RNA, 19 nt, Homo sapiens
  misc_RNA (1)...(19): siRNA sense strand
aaauuaagcggaaguuugu

SEQ ID NO: 2177768 - RNA, 19 nt, Homo sapiens
  misc_RNA (1)...(19): siRNA sense strand
ucacuaagggcauccaguu

SEQ ID NO: 2177769 - RNA, 19 nt, Homo sapiens
  misc_RNA (1)...(19): siRNA sense strand
cuucaaagucugaucauga

SEQ ID NO: 2177770 - RNA, 19 nt, Homo sapiens
  misc_RNA (1)...(19): siRNA sense strand
gagcaaaugcagaggaagu

SEQ ID NO: 2177771 - RNA, 19 nt, Homo sapiens
  misc_RNA (1)...(19): siRNA sense strand
ccuuagcacugucaucaga

SEQ ID NO: 2177772 - RNA, 19 nt, Homo sapiens
  misc_RNA (1)...(19): siRNA sense strand
caaagucugaucaugaugu

SEQ ID NO: 2177773 - RNA, 19 nt, Homo sapiens
  misc_RNA (1)...(19): siRNA sense strand
caccaaaccaccaacaaga

SEQ ID NO: 2177774 - RNA, 19 nt, Homo sapiens
  misc_RNA (1)...(19): siRNA sense strand
gaaacucaaggaaaugaag

SEQ ID NO: 2177775 - RNA, 19 nt, Homo sapiens
  misc_RNA (1)...(19): siRNA sense strand
acuuaaggcucuuggaaug

SEQ ID NO: 2177776 - RNA, 19 nt, Homo sapiens
  misc_RNA (1)...(19): siRNA sense strand
ugagauccuugaugaugga

SEQ ID NO: 2177777 - RNA, 19 nt, Homo sapiens
  misc_RNA (1)...(19): siRNA sense strand
aagagcaaaugcagaggaa

SEQ ID NO: 2177778 - RNA, 19 nt, Homo sapiens
  misc_RNA (1)...(19): siRNA sense strand
ucggaaggcccaagagaaa

SEQ ID NO: 2177779 - RNA, 19 nt, Homo sapiens
  misc_RNA (1)...(19): siRNA sense strand
aaaagaagccaguagguuu

SEQ ID NO: 2177780 - RNA, 19 nt, Homo sapiens
  misc_RNA (1)...(19): siRNA sense strand
gcaguauguaucugaauuc

SEQ ID NO: 2177781 - RNA, 19 nt, Homo sapiens
  misc_RNA (1)...(19): siRNA sense strand
uaccuucaaugaugacuuc

SEQ ID NO: 2177782 - RNA, 19 nt, Homo sapiens
  misc_RNA (1)...(19): siRNA sense strand
ggacacccaagccauguuc

SEQ ID NO: 2177783 - RNA, 19 nt, Homo sapiens
  misc_RNA (1)...(19): siRNA sense strand
gauggacagucucccaaac

SEQ ID NO: 2177784 - RNA, 19 nt, Homo sapiens
  misc_RNA (1)...(19): siRNA sense strand
ggaaaugaagaugucucua

SEQ ID NO: 2177785 - RNA, 19 nt, Homo sapiens
  misc_RNA (1)...(19): siRNA sense strand
gggaaagaaguggaaagaa

SEQ ID NO: 2177786 - RNA, 19 nt, Homo sapiens
  misc_RNA (1)...(19): siRNA sense strand
agcaguauguaucugaauu

SEQ ID NO: 2177787 - RNA, 19 nt, Homo sapiens
  misc_RNA (1)...(19): siRNA sense strand
ccaccuaaggguuugagaa

SEQ ID NO: 2177788 - RNA, 19 nt, Homo sapiens
  misc_RNA (1)...(19): siRNA sense strand
ggagugugcagcagguuuc

SEQ ID NO: 2177789 - RNA, 19 nt, Homo sapiens
  misc_RNA (1)...(19): siRNA sense strand
ccaagaauuuuaccuucaa

SEQ ID NO: 2177790 - RNA, 19 nt, Homo sapiens
  misc_RNA (1)...(19): siRNA sense strand
aagaugacgucaacuacag

SEQ ID NO: 2177791 - RNA, 19 nt, Homo sapiens
  misc_RNA (1)...(19): siRNA sense strand
cagaaaagaugacgucaac

SEQ ID NO: 2177792 - RNA, 19 nt, Homo sapiens
  misc_RNA (1)...(19): siRNA sense strand
ccuaaggguuugagaacgu

SEQ ID NO: 2177793 - RNA, 19 nt, Homo sapiens
  misc_RNA (1)...(19): siRNA sense strand
caguauguaucugaauuca

SEQ ID NO: 2177794 - RNA, 19 nt, Homo sapiens
  misc_RNA (1)...(19): siRNA sense strand
cacagucagugucagaauc

SEQ ID NO: 2177795 - RNA, 19 nt, Homo sapiens
  misc_RNA (1)...(19): siRNA sense strand
aaagucugaucaugaugug

SEQ ID NO: 2177796 - RNA, 19 nt, Homo sapiens
  misc_RNA (1)...(19): siRNA sense strand
cuucaaugaugacuucagu

SEQ ID NO: 2177797 - RNA, 19 nt, Homo sapiens
  misc_RNA (1)...(19): siRNA sense strand
gcucggaaggcccaagaga

SEQ ID NO: 2177798 - RNA, 19 nt, Homo sapiens
  misc_RNA (1)...(19): siRNA sense strand
ggacagucucccaaacaca

SEQ ID NO: 2177799 - RNA, 19 nt, Homo sapiens
  misc_RNA (1)...(19): siRNA sense strand
cuaagggcauccaguucau

SEQ ID NO: 2177800 - RNA, 19 nt, Homo sapiens
  misc_RNA (1)...(19): siRNA sense strand
uucaaagucugaucaugau

SEQ ID NO: 2177801 - RNA, 19 nt, Homo sapiens
  misc_RNA (1)...(19): siRNA sense strand
ugaccacauagcugaauuu

SEQ ID NO: 2177802 - RNA, 19 nt, Homo sapiens
  misc_RNA (1)...(19): siRNA sense strand
aaaagggguccaagaauuu

SEQ ID NO: 2177803 - RNA, 19 nt, Homo sapiens
  misc_RNA (1)...(19): siRNA sense strand
augccuuucucaugguuua

SEQ ID NO: 2177804 - RNA, 19 nt, Homo sapiens
  misc_RNA (1)...(19): siRNA sense strand
aaagaugacgucaacuaca

SEQ ID NO: 2177805 - RNA, 19 nt, Homo sapiens
  misc_RNA (1)...(19): siRNA sense strand
uaaaucuggagcaguaugu

SEQ ID NO: 2177806 - RNA, 19 nt, Homo sapiens
  misc_RNA (1)...(19): siRNA sense strand
uaaggagaaaggagcaaga

SEQ ID NO: 2177807 - RNA, 19 nt, Homo sapiens
  misc_RNA (1)...(19): siRNA sense strand
aaugacagccggaaaggau

SEQ ID NO: 2177808 - RNA, 19 nt, Homo sapiens
  misc_RNA (1)...(19): siRNA sense strand
aaacucaaggaaaugaaga

SEQ ID NO: 2177809 - RNA, 19 nt, Homo sapiens
  misc_RNA (1)...(19): siRNA sense strand
aaagaaacucaaggaaaug

SEQ ID NO: 2177810 - RNA, 19 nt, Homo sapiens
  misc_RNA (1)...(19): siRNA sense strand
ucagaugagauccuugaug

SEQ ID NO: 2177811 - RNA, 19 nt, Homo sapiens
  misc_RNA (1)...(19): siRNA sense strand
aaaagaugaugccaaagau

SEQ ID NO: 2177812 - RNA, 19 nt, Homo sapiens
  misc_RNA (1)...(19): siRNA sense strand
aagaaacucaaggaaauga

SEQ ID NO: 2177813 - RNA, 19 nt, Homo sapiens
  misc_RNA (1)...(19): siRNA sense strand
gagcaguauguaucugaau

SEQ ID NO: 2177814 - RNA, 19 nt, Homo sapiens
  misc_RNA (1)...(19): siRNA sense strand
guuaaugagccuaaaucug

SEQ ID NO: 2177815 - RNA, 19 nt, Homo sapiens
  misc_RNA (1)...(19): siRNA sense strand
cuucagaggcagacuggaa

SEQ ID NO: 2177816 - RNA, 19 nt, Homo sapiens
  misc_RNA (1)...(19): siRNA sense strand
gaaaagcuaaggagaaagg

SEQ ID NO: 2177817 - RNA, 19 nt, Homo sapiens
  misc_RNA (1)...(19): siRNA sense strand
aagaaucuccuugccauca

SEQ ID NO: 2177818 - RNA, 19 nt, Homo sapiens
  misc_RNA (1)...(19): siRNA sense strand
ucaccaaaccaccaacaag

SEQ ID NO: 2177819 - RNA, 19 nt, Homo sapiens
  misc_RNA (1)...(19): siRNA sense strand
gaucaugauguggaagaau

SEQ ID NO: 2177820 - RNA, 19 nt, Homo sapiens
  misc_RNA (1)...(19): siRNA sense strand
aaaauuaagcggaaguuug

SEQ ID NO: 2177821 - RNA, 19 nt, Homo sapiens
  misc_RNA (1)...(19): siRNA sense strand
acacuucacuguuuucuac

SEQ ID NO: 2177822 - RNA, 19 nt, Homo sapiens
  misc_RNA (1)...(19): siRNA sense strand
gaccacauagcugaauuuc

SEQ ID NO: 2177823 - RNA, 19 nt, Homo sapiens
  misc_RNA (1)...(19): siRNA sense strand
ggaaagaaguggaaagaaa

SEQ ID NO: 2177824 - RNA, 19 nt, Homo sapiens
  misc_RNA (1)...(19): siRNA sense strand
gagaacagcuccugcaguu

SEQ ID NO: 2177825 - RNA, 19 nt, Homo sapiens
  misc_RNA (1)...(19): siRNA sense strand
gcaguuggauggaaauaaa

SEQ ID NO: 2177826 - RNA, 19 nt, Homo sapiens
  misc_RNA (1)...(19): siRNA sense strand
gcagguuucucacugguua

SEQ ID NO: 2177827 - RNA, 19 nt, Homo sapiens
  misc_RNA (1)...(19): siRNA sense strand
gggagacacuucacuguuu

SEQ ID NO: 2177828 - RNA, 19 nt, Homo sapiens
  misc_RNA (1)...(19): siRNA sense strand
ccaaauuacuuccaccuaa

SEQ ID NO: 2177829 - RNA, 19 nt, Homo sapiens
  misc_RNA (1)...(19): siRNA sense strand
gcucagaccuccacucguu

SEQ ID NO: 2177830 - RNA, 19 nt, Homo sapiens
  misc_RNA (1)...(19): siRNA sense strand
cagaugagauccuugauga

SEQ ID NO: 2177831 - RNA, 19 nt, Homo sapiens
  misc_RNA (1)...(19): siRNA sense strand
gaaaggagcaagagcaaau

SEQ ID NO: 2177832 - RNA, 19 nt, Homo sapiens
  misc_RNA (1)...(19): siRNA sense strand
gccuaaaucuggagcagua

SEQ ID NO: 2177833 - RNA, 19 nt, Homo sapiens
  misc_RNA (1)...(19): siRNA sense strand
gaaaugaagaugucucuag

SEQ ID NO: 2177834 - RNA, 19 nt, Homo sapiens
  misc_RNA (1)...(19): siRNA sense strand
gagaaaagcuaaggagaaa

SEQ ID NO: 2177835 - RNA, 19 nt, Homo sapiens
  misc_RNA (1)...(19): siRNA sense strand
ugccaaagaucccaaauca

SEQ ID NO: 2177836 - RNA, 19 nt, Homo sapiens
  misc_RNA (1)...(19): siRNA sense strand
aaacaucacuggagaacag

SEQ ID NO: 2177837 - RNA, 19 nt, Homo sapiens
  misc_RNA (1)...(19): siRNA sense strand
aaaugaagaugucucuaga

SEQ ID NO: 2177838 - RNA, 19 nt, Homo sapiens
  misc_RNA (1)...(19): siRNA sense strand
gaaaagaugacgucaacua

SEQ ID NO: 2177839 - RNA, 19 nt, Homo sapiens
  misc_RNA (1)...(19): siRNA sense strand
gcagguagcaggaucuuca

SEQ ID NO: 2177840 - RNA, 19 nt, Homo sapiens
  misc_RNA (1)...(19): siRNA sense strand
caaauuacuuccaccuaag

SEQ ID NO: 2177841 - RNA, 19 nt, Homo sapiens
  misc_RNA (1)...(19): siRNA sense strand
gaugagauccuugaugaug

SEQ ID NO: 2177842 - RNA, 19 nt, Homo sapiens
  misc_RNA (1)...(19): siRNA sense strand
gggccucucuccucuaugu

SEQ ID NO: 2177843 - RNA, 19 nt, Homo sapiens
  misc_RNA (1)...(19): siRNA sense strand
ucaaggaaaugaagauguc

SEQ ID NO: 2177844 - RNA, 19 nt, Homo sapiens
  misc_RNA (1)...(19): siRNA sense strand
ggauggaaauaaacuuaag

SEQ ID NO: 2177845 - RNA, 19 nt, Homo sapiens
  misc_RNA (1)...(19): siRNA sense strand
ccaaagaucccaaaucacu

SEQ ID NO: 2177846 - RNA, 19 nt, Homo sapiens
  misc_RNA (1)...(19): siRNA sense strand
ggagcaguauguaucugaa

SEQ ID NO: 2177847 - RNA, 19 nt, Homo sapiens
  misc_RNA (1)...(19): siRNA sense strand
gagacucuaauuucagaua

SEQ ID NO: 2177848 - RNA, 19 nt, Homo sapiens
  misc_RNA (1)...(19): siRNA sense strand
gaaagaaguggaaagaaaa

SEQ ID NO: 2177849 - RNA, 19 nt, Homo sapiens
  misc_RNA (1)...(19): siRNA sense strand
aaagaucccaaaucacuaa

SEQ ID NO: 2177850 - RNA, 19 nt, Homo sapiens
  misc_RNA (1)...(19): siRNA sense strand
ccaaaccaccaacaagaaa

SEQ ID NO: 2177851 - RNA, 19 nt, Homo sapiens
  misc_RNA (1)...(19): siRNA sense strand
cuucucgucugaccacaua

SEQ ID NO: 2177852 - RNA, 19 nt, Homo sapiens
  misc_RNA (1)...(19): siRNA sense strand
gagaaaggagcaagagcaa

SEQ ID NO: 2177853 - RNA, 19 nt, Homo sapiens
  misc_RNA (1)...(19): siRNA sense strand
guuucucacugguuaauga

SEQ ID NO: 2177854 - RNA, 19 nt, Homo sapiens
  misc_RNA (1)...(19): siRNA sense strand
caaagaucccaaaucacua

SEQ ID NO: 2177855 - RNA, 19 nt, Homo sapiens
  misc_RNA (1)...(19): siRNA sense strand
gcaagggaaagaaguggaa

SEQ ID NO: 2177856 - RNA, 19 nt, Homo sapiens
  misc_RNA (1)...(19): siRNA sense strand
gaaccugccugcgccuaca

SEQ ID NO: 2177857 - RNA, 19 nt, Homo sapiens
  misc_RNA (1)...(19): siRNA sense strand
ggagacacuucacuguuuu

SEQ ID NO: 2177858 - RNA, 19 nt, Homo sapiens
  misc_RNA (1)...(19): siRNA sense strand
aaacuuaaggcucuuggaa

SEQ ID NO: 2177859 - RNA, 19 nt, Homo sapiens
  misc_RNA (1)...(19): siRNA sense strand
aaauuaagcggaaguuugu

SEQ ID NO: 2177860 - RNA, 19 nt, Homo sapiens
  misc_RNA (1)...(19): siRNA sense strand
ucacuaagggcauccaguu

SEQ ID NO: 2177861 - RNA, 19 nt, Homo sapiens
  misc_RNA (1)...(19): siRNA sense strand
cuucaaagucugaucauga

SEQ ID NO: 2177862 - RNA, 19 nt, Homo sapiens
  misc_RNA (1)...(19): siRNA sense strand
gagcaaaugcagaggaagu

SEQ ID NO: 2177863 - RNA, 19 nt, Homo sapiens
  misc_RNA (1)...(19): siRNA sense strand
ccuuagcacugucaucaga

SEQ ID NO: 2177864 - RNA, 19 nt, Homo sapiens
  misc_RNA (1)...(19): siRNA sense strand
caaagucugaucaugaugu

SEQ ID NO: 2177865 - RNA, 19 nt, Homo sapiens
  misc_RNA (1)...(19): siRNA sense strand
caccaaaccaccaacaaga

SEQ ID NO: 2177866 - RNA, 19 nt, Homo sapiens
  misc_RNA (1)...(19): siRNA sense strand
gaaacucaaggaaaugaag

SEQ ID NO: 2177867 - RNA, 19 nt, Homo sapiens
  misc_RNA (1)...(19): siRNA sense strand
acuuaaggcucuuggaaug

SEQ ID NO: 2177868 - RNA, 19 nt, Homo sapiens
  misc_RNA (1)...(19): siRNA sense strand
ugagauccuugaugaugga

SEQ ID NO: 2177869 - RNA, 19 nt, Homo sapiens
  misc_RNA (1)...(19): siRNA sense strand
aagagcaaaugcagaggaa

SEQ ID NO: 2177870 - RNA, 19 nt, Homo sapiens
  misc_RNA (1)...(19): siRNA sense strand
ucggaaggcccaagagaaa

SEQ ID NO: 2177871 - RNA, 19 nt, Homo sapiens
  misc_RNA (1)...(19): siRNA sense strand
aaaagaagccaguagguuu

SEQ ID NO: 2177872 - RNA, 19 nt, Homo sapiens
  misc_RNA (1)...(19): siRNA sense strand
gcaguauguaucugaauuc

SEQ ID NO: 2177873 - RNA, 19 nt, Homo sapiens
  misc_RNA (1)...(19): siRNA sense strand
uaccuucaaugaugacuuc

SEQ ID NO: 2177874 - RNA, 19 nt, Homo sapiens
  misc_RNA (1)...(19): siRNA sense strand
ggacacccaagccauguuc

SEQ ID NO: 2177875 - RNA, 19 nt, Homo sapiens
  misc_RNA (1)...(19): siRNA sense strand
gauggacagucucccaaac

SEQ ID NO: 2177876 - RNA, 19 nt, Homo sapiens
  misc_RNA (1)...(19): siRNA sense strand
ggaaaugaagaugucucua

SEQ ID NO: 2177877 - RNA, 19 nt, Homo sapiens
  misc_RNA (1)...(19): siRNA sense strand
gggaaagaaguggaaagaa

SEQ ID NO: 2177878 - RNA, 19 nt, Homo sapiens
  misc_RNA (1)...(19): siRNA sense strand
agcaguauguaucugaauu

SEQ ID NO: 2177879 - RNA, 19 nt, Homo sapiens
  misc_RNA (1)...(19): siRNA sense strand
ccaccuaaggguuugagaa

SEQ ID NO: 2177880 - RNA, 19 nt, Homo sapiens
  misc_RNA (1)...(19): siRNA sense strand
ggagugugcagcagguuuc

SEQ ID NO: 2177881 - RNA, 19 nt, Homo sapiens
  misc_RNA (1)...(19): siRNA sense strand
ccaagaauuuuaccuucaa

SEQ ID NO: 2177882 - RNA, 19 nt, Homo sapiens
  misc_RNA (1)...(19): siRNA sense strand
aagaugacgucaacuacag

SEQ ID NO: 2177883 - RNA, 19 nt, Homo sapiens
  misc_RNA (1)...(19): siRNA sense strand
cagaaaagaugacgucaac

SEQ ID NO: 2177884 - RNA, 19 nt, Homo sapiens
  misc_RNA (1)...(19): siRNA sense strand
ccuaaggguuugagaacgu

SEQ ID NO: 2177885 - RNA, 19 nt, Homo sapiens
  misc_RNA (1)...(19): siRNA sense strand
caguauguaucugaauuca

SEQ ID NO: 2177886 - RNA, 19 nt, Homo sapiens
  misc_RNA (1)...(19): siRNA sense strand
cacagucagugucagaauc

SEQ ID NO: 2177887 - RNA, 19 nt, Homo sapiens
  misc_RNA (1)...(19): siRNA sense strand
aaagucugaucaugaugug

SEQ ID NO: 2177888 - RNA, 19 nt, Homo sapiens
  misc_RNA (1)...(19): siRNA sense strand
cuucaaugaugacuucagu

SEQ ID NO: 2177889 - RNA, 19 nt, Homo sapiens
  misc_RNA (1)...(19): siRNA sense strand
gcucggaaggcccaagaga

SEQ ID NO: 2177890 - RNA, 19 nt, Homo sapiens
  misc_RNA (1)...(19): siRNA sense strand
ggacagucucccaaacaca

SEQ ID NO: 2177891 - RNA, 19 nt, Homo sapiens
  misc_RNA (1)...(19): siRNA sense strand
cuaagggcauccaguucau

SEQ ID NO: 2177892 - RNA, 19 nt, Homo sapiens
  misc_RNA (1)...(19): siRNA sense strand
uucaaagucugaucaugau

SEQ ID NO: 2177893 - RNA, 19 nt, Homo sapiens
  misc_RNA (1)...(19): siRNA sense strand
ugaccacauagcugaauuu

SEQ ID NO: 2177894 - RNA, 19 nt, Homo sapiens
  misc_RNA (1)...(19): siRNA sense strand
aaaagggguccaagaauuu

SEQ ID NO: 2177895 - RNA, 19 nt, Homo sapiens
  misc_RNA (1)...(19): siRNA sense strand
augccuuucucaugguuua

SEQ ID NO: 2177896 - RNA, 19 nt, Homo sapiens
  misc_RNA (1)...(19): siRNA sense strand
aaagaugacgucaacuaca

SEQ ID NO: 2177897 - RNA, 19 nt, Homo sapiens
  misc_RNA (1)...(19): siRNA sense strand
uaaaucuggagcaguaugu

SEQ ID NO: 2177898 - RNA, 19 nt, Homo sapiens
  misc_RNA (1)...(19): siRNA sense strand
uaaggagaaaggagcaaga

SEQ ID NO: 2177899 - RNA, 19 nt, Homo sapiens
  misc_RNA (1)...(19): siRNA sense strand
aaugacagccggaaaggau

SEQ ID NO: 2177900 - RNA, 19 nt, Homo sapiens
  misc_RNA (1)...(19): siRNA sense strand
aaacucaaggaaaugaaga

SEQ ID NO: 2177901 - RNA, 19 nt, Homo sapiens
  misc_RNA (1)...(19): siRNA sense strand
aaagaaacucaaggaaaug

SEQ ID NO: 2177902 - RNA, 19 nt, Homo sapiens
  misc_RNA (1)...(19): siRNA sense strand
ucagaugagauccuugaug

SEQ ID NO: 2177903 - RNA, 19 nt, Homo sapiens
  misc_RNA (1)...(19): siRNA sense strand
aaaagaugaugccaaagau

SEQ ID NO: 2177904 - RNA, 19 nt, Homo sapiens
  misc_RNA (1)...(19): siRNA sense strand
aagaaacucaaggaaauga

SEQ ID NO: 2177905 - RNA, 19 nt, Homo sapiens
  misc_RNA (1)...(19): siRNA sense strand
gagcaguauguaucugaau

SEQ ID NO: 2177906 - RNA, 19 nt, Homo sapiens
  misc_RNA (1)...(19): siRNA sense strand
guuaaugagccuaaaucug

SEQ ID NO: 2177907 - RNA, 19 nt, Homo sapiens
  misc_RNA (1)...(19): siRNA sense strand
cuucagaggcagacuggaa

SEQ ID NO: 2177908 - RNA, 19 nt, Homo sapiens
  misc_RNA (1)...(19): siRNA sense strand
gaaaagcuaaggagaaagg

SEQ ID NO: 2177909 - RNA, 19 nt, Homo sapiens
  misc_RNA (1)...(19): siRNA sense strand
aagaaucuccuugccauca

SEQ ID NO: 2177910 - RNA, 19 nt, Homo sapiens
  misc_RNA (1)...(19): siRNA sense strand
ucaccaaaccaccaacaag

SEQ ID NO: 2177911 - RNA, 19 nt, Homo sapiens
  misc_RNA (1)...(19): siRNA sense strand
gaucaugauguggaagaau

SEQ ID NO: 2177912 - RNA, 19 nt, Homo sapiens
  misc_RNA (1)...(19): siRNA sense strand
aaaauuaagcggaaguuug

SEQ ID NO: 2177913 - RNA, 19 nt, Homo sapiens
  misc_RNA (1)...(19): siRNA sense strand
acacuucacuguuuucuac

SEQ ID NO: 2177914 - RNA, 19 nt, Homo sapiens
  misc_RNA (1)...(19): siRNA sense strand
gaccacauagcugaauuuc

SEQ ID NO: 2177915 - RNA, 19 nt, Homo sapiens
  misc_RNA (1)...(19): siRNA sense strand
gaaagaagaugcugagaaa

SEQ ID NO: 2177916 - RNA, 19 nt, Homo sapiens
  misc_RNA (1)...(19): siRNA sense strand
gaagaagacugcccaaauc

SEQ ID NO: 2177917 - RNA, 19 nt, Homo sapiens
  misc_RNA (1)...(19): siRNA sense strand
gcgagaagcugaaaggaaa

SEQ ID NO: 2177918 - RNA, 19 nt, Homo sapiens
  misc_RNA (1)...(19): siRNA sense strand
gcucaaauguguucgagaa

SEQ ID NO: 2177919 - RNA, 19 nt, Homo sapiens
  misc_RNA (1)...(19): siRNA sense strand
gcaagaucauucauacuga

SEQ ID NO: 2177920 - RNA, 19 nt, Homo sapiens
  misc_RNA (1)...(19): siRNA sense strand
ugaagaugcugcacaguuu

SEQ ID NO: 2177921 - RNA, 19 nt, Homo sapiens
  misc_RNA (1)...(19): siRNA sense strand
gaagaggcaggcugaguua

SEQ ID NO: 2177922 - RNA, 19 nt, Homo sapiens
  misc_RNA (1)...(19): siRNA sense strand
gaucauucauacugacaua

SEQ ID NO: 2177923 - RNA, 19 nt, Homo sapiens
  misc_RNA (1)...(19): siRNA sense strand
gcccagaggugaaacuaaa

SEQ ID NO: 2177924 - RNA, 19 nt, Homo sapiens
  misc_RNA (1)...(19): siRNA sense strand
gaaaagauuuguugcaaug

SEQ ID NO: 2177925 - RNA, 19 nt, Homo sapiens
  misc_RNA (1)...(19): siRNA sense strand
guuguucucuggauccuua

SEQ ID NO: 2177926 - RNA, 19 nt, Homo sapiens
  misc_RNA (1)...(19): siRNA sense strand
gcagaaaccuauaggaaaa

SEQ ID NO: 2177927 - RNA, 19 nt, Homo sapiens
  misc_RNA (1)...(19): siRNA sense strand
ucugagggaucaccacuua

SEQ ID NO: 2177928 - RNA, 19 nt, Homo sapiens
  misc_RNA (1)...(19): siRNA sense strand
ucaaguggaucaucaaauc

SEQ ID NO: 2177929 - RNA, 19 nt, Homo sapiens
  misc_RNA (1)...(19): siRNA sense strand
gaagaugcugcacaguuua

SEQ ID NO: 2177930 - RNA, 19 nt, Homo sapiens
  misc_RNA (1)...(19): siRNA sense strand
cgaugaagaugaugaugaa

SEQ ID NO: 2177931 - RNA, 19 nt, Homo sapiens
  misc_RNA (1)...(19): siRNA sense strand
ugaagaugaugaugaagaa

SEQ ID NO: 2177932 - RNA, 19 nt, Homo sapiens
  misc_RNA (1)...(19): siRNA sense strand
gacagaagcagaacgguuu

SEQ ID NO: 2177933 - RNA, 19 nt, Homo sapiens
  misc_RNA (1)...(19): siRNA sense strand
gaggcaggcugaguuauug

SEQ ID NO: 2177934 - RNA, 19 nt, Homo sapiens
  misc_RNA (1)...(19): siRNA sense strand
aacgggagauuauuuguuu

SEQ ID NO: 2177935 - RNA, 19 nt, Homo sapiens
  misc_RNA (1)...(19): siRNA sense strand
ggagacagccuuggaugaa

SEQ ID NO: 2177936 - RNA, 19 nt, Homo sapiens
  misc_RNA (1)...(19): siRNA sense strand
gagacagccuuggaugaaa

SEQ ID NO: 2177937 - RNA, 19 nt, Homo sapiens
  misc_RNA (1)...(19): siRNA sense strand
caaauguguucgagaaagu

SEQ ID NO: 2177938 - RNA, 19 nt, Homo sapiens
  misc_RNA (1)...(19): siRNA sense strand
cugcacaguuuacagauuu

SEQ ID NO: 2177939 - RNA, 19 nt, Homo sapiens
  misc_RNA (1)...(19): siRNA sense strand
gaucaucaaauccaacuau

SEQ ID NO: 2177940 - RNA, 19 nt, Homo sapiens
  misc_RNA (1)...(19): siRNA sense strand
cagaaagugauuacacaua

SEQ ID NO: 2177941 - RNA, 19 nt, Homo sapiens
  misc_RNA (1)...(19): siRNA sense strand
ggaauauaaucuugaugag

SEQ ID NO: 2177942 - RNA, 19 nt, Homo sapiens
  misc_RNA (1)...(19): siRNA sense strand
agaagaugcugagaaagaa

SEQ ID NO: 2177943 - RNA, 19 nt, Homo sapiens
  misc_RNA (1)...(19): siRNA sense strand
gagaaagugaucccaguga

SEQ ID NO: 2177944 - RNA, 19 nt, Homo sapiens
  misc_RNA (1)...(19): siRNA sense strand
agaugaagaugauguagau

SEQ ID NO: 2177945 - RNA, 19 nt, Homo sapiens
  misc_RNA (1)...(19): siRNA sense strand
cagcugcaccuuccaauga

SEQ ID NO: 2177946 - RNA, 19 nt, Homo sapiens
  misc_RNA (1)...(19): siRNA sense strand
cagcagaaaccuauaggaa

SEQ ID NO: 2177947 - RNA, 19 nt, Homo sapiens
  misc_RNA (1)...(19): siRNA sense strand
caucaaauccaacuaucaa

SEQ ID NO: 2177948 - RNA, 19 nt, Homo sapiens
  misc_RNA (1)...(19): siRNA sense strand
ggagaacugcgacacauca

SEQ ID NO: 2177949 - RNA, 19 nt, Homo sapiens
  misc_RNA (1)...(19): siRNA sense strand
gaggagaacugcgacacau

SEQ ID NO: 2177950 - RNA, 19 nt, Homo sapiens
  misc_RNA (1)...(19): siRNA sense strand
ccgggcagcugacuuguug

SEQ ID NO: 2177951 - RNA, 19 nt, Homo sapiens
  misc_RNA (1)...(19): siRNA sense strand
ugaagaagacugcccaaau

SEQ ID NO: 2177952 - RNA, 19 nt, Homo sapiens
  misc_RNA (1)...(19): siRNA sense strand
ucaggaacuugcgaacaua

SEQ ID NO: 2177953 - RNA, 19 nt, Homo sapiens
  misc_RNA (1)...(19): siRNA sense strand
cacaguaagugcaagauca

SEQ ID NO: 2177954 - RNA, 19 nt, Homo sapiens
  misc_RNA (1)...(19): siRNA sense strand
ccagugacccaaacaaaga

SEQ ID NO: 2177955 - RNA, 19 nt, Homo sapiens
  misc_RNA (1)...(19): siRNA sense strand
gcaacuggacgaugaagau

SEQ ID NO: 2177956 - RNA, 19 nt, Homo sapiens
  misc_RNA (1)...(19): siRNA sense strand
gacccuacguggauagaau

SEQ ID NO: 2177957 - RNA, 19 nt, Homo sapiens
  misc_RNA (1)...(19): siRNA sense strand
gccggagccucaacagaaa

SEQ ID NO: 2177958 - RNA, 19 nt, Homo sapiens
  misc_RNA (1)...(19): siRNA sense strand
gaagaugcugagaaagaaa

SEQ ID NO: 2177959 - RNA, 19 nt, Homo sapiens
  misc_RNA (1)...(19): siRNA sense strand
ucaaggguuagauuacuua

SEQ ID NO: 2177960 - RNA, 19 nt, Homo sapiens
  misc_RNA (1)...(19): siRNA sense strand
cagcuccuaugaacaauuc

SEQ ID NO: 2177961 - RNA, 19 nt, Homo sapiens
  misc_RNA (1)...(19): siRNA sense strand
caaaugcagaaagugauua

SEQ ID NO: 2177962 - RNA, 19 nt, Homo sapiens
  misc_RNA (1)...(19): siRNA sense strand
aagaagaugcugagaaaga

SEQ ID NO: 2177963 - RNA, 19 nt, Homo sapiens
  misc_RNA (1)...(19): siRNA sense strand
gaugaugcauaugugagaa

SEQ ID NO: 2177964 - RNA, 19 nt, Homo sapiens
  misc_RNA (1)...(19): siRNA sense strand
gcugcacaguuuacagauu

SEQ ID NO: 2177965 - RNA, 19 nt, Homo sapiens
  misc_RNA (1)...(19): siRNA sense strand
gagccucuuugauguacuu

SEQ ID NO: 2177966 - RNA, 19 nt, Homo sapiens
  misc_RNA (1)...(19): siRNA sense strand
cauagacccuacguggaua

SEQ ID NO: 2177967 - RNA, 19 nt, Homo sapiens
  misc_RNA (1)...(19): siRNA sense strand
ccaaauggacgacauaaaa

SEQ ID NO: 2177968 - RNA, 19 nt, Homo sapiens
  misc_RNA (1)...(19): siRNA sense strand
cggcauccuugguugaauu

SEQ ID NO: 2177969 - RNA, 19 nt, Homo sapiens
  misc_RNA (1)...(19): siRNA sense strand
ugcaggagauagaagaauu

SEQ ID NO: 2177970 - RNA, 19 nt, Homo sapiens
  misc_RNA (1)...(19): siRNA sense strand
ggagauuauuuguuugaac

SEQ ID NO: 2177971 - RNA, 19 nt, Homo sapiens
  misc_RNA (1)...(19): siRNA sense strand
cggcguguauggcauuuga

SEQ ID NO: 2177972 - RNA, 19 nt, Homo sapiens
  misc_RNA (1)...(19): siRNA sense strand
uagcagcuccuaugaacaa

SEQ ID NO: 2177973 - RNA, 19 nt, Homo sapiens
  misc_RNA (1)...(19): siRNA sense strand
gcaggagauagaagaauug

SEQ ID NO: 2177974 - RNA, 19 nt, Homo sapiens
  misc_RNA (1)...(19): siRNA sense strand
agacagccuuggaugaaau

SEQ ID NO: 2177975 - RNA, 19 nt, Homo sapiens
  misc_RNA (1)...(19): siRNA sense strand
caacgggagauuauuuguu

SEQ ID NO: 2177976 - RNA, 19 nt, Homo sapiens
  misc_RNA (1)...(19): siRNA sense strand
cagcugacuuguuggugaa

SEQ ID NO: 2177977 - RNA, 19 nt, Homo sapiens
  misc_RNA (1)...(19): siRNA sense strand
ccugaggaauauaaucuug

SEQ ID NO: 2177978 - RNA, 19 nt, Homo sapiens
  misc_RNA (1)...(19): siRNA sense strand
ugaccaggauggcgaauac

SEQ ID NO: 2177979 - RNA, 19 nt, Homo sapiens
  misc_RNA (1)...(19): siRNA sense strand
aauggccgguaucauguua

SEQ ID NO: 2177980 - RNA, 19 nt, Homo sapiens
  misc_RNA (1)...(19): siRNA sense strand
agaaagaagaugcugagaa

SEQ ID NO: 2177981 - RNA, 19 nt, Homo sapiens
  misc_RNA (1)...(19): siRNA sense strand
guuuacagauuuccugauc

SEQ ID NO: 2177982 - RNA, 19 nt, Homo sapiens
  misc_RNA (1)...(19): siRNA sense strand
ucaaauguguucgagaaag

SEQ ID NO: 2177983 - RNA, 19 nt, Homo sapiens
  misc_RNA (1)...(19): siRNA sense strand
cugcaaagguggauaucau

SEQ ID NO: 2177984 - RNA, 19 nt, Homo sapiens
  misc_RNA (1)...(19): siRNA sense strand
ccaaaugcagaaagugauu

SEQ ID NO: 2177985 - RNA, 19 nt, Homo sapiens
  misc_RNA (1)...(19): siRNA sense strand
uaaaaccaauggccauauu

SEQ ID NO: 2177986 - RNA, 19 nt, Homo sapiens
  misc_RNA (1)...(19): siRNA sense strand
guggauagaaucaccuaaa

SEQ ID NO: 2177987 - RNA, 19 nt, Homo sapiens
  misc_RNA (1)...(19): siRNA sense strand
ggaaaagauuuguugcaau

SEQ ID NO: 2177988 - RNA, 19 nt, Homo sapiens
  misc_RNA (1)...(19): siRNA sense strand
guguguggaugaugcauau

SEQ ID NO: 2177989 - RNA, 19 nt, Homo sapiens
  misc_RNA (1)...(19): siRNA sense strand
gccaccaucuccucaagug

SEQ ID NO: 2177990 - RNA, 19 nt, Homo sapiens
  misc_RNA (1)...(19): siRNA sense strand
uuggagaccucuucaaugg

SEQ ID NO: 2177991 - RNA, 19 nt, Homo sapiens
  misc_RNA (1)...(19): siRNA sense strand
cgaaguacuuggccaccau

SEQ ID NO: 2177992 - RNA, 19 nt, Homo sapiens
  misc_RNA (1)...(19): siRNA sense strand
auccuugguugaauucuua

SEQ ID NO: 2177993 - RNA, 19 nt, Homo sapiens
  misc_RNA (1)...(19): siRNA sense strand
uuagaaaugguuccagaaa

SEQ ID NO: 2177994 - RNA, 19 nt, Homo sapiens
  misc_RNA (1)...(19): siRNA sense strand
gcggcucugugcuuucuga

SEQ ID NO: 2177995 - RNA, 19 nt, Homo sapiens
  misc_RNA (1)...(19): siRNA sense strand
aauggugaauugccaaaug

SEQ ID NO: 2177996 - RNA, 19 nt, Homo sapiens
  misc_RNA (1)...(19): siRNA sense strand
guacggcuccacagcagaa

SEQ ID NO: 2177997 - RNA, 19 nt, Homo sapiens
  misc_RNA (1)...(19): siRNA sense strand
ggaugaugcauaugugaga

SEQ ID NO: 2177998 - RNA, 19 nt, Homo sapiens
  misc_RNA (1)...(19): siRNA sense strand
guaagugcaagaucauuca

SEQ ID NO: 2177999 - RNA, 19 nt, Homo sapiens
  misc_RNA (1)...(19): siRNA sense strand
gggagauuauuuguuugaa

SEQ ID NO: 2178000 - RNA, 19 nt, Homo sapiens
  misc_RNA (1)...(19): siRNA sense strand
gggaaaagauuuguugcaa

SEQ ID NO: 2178001 - RNA, 19 nt, Homo sapiens
  misc_RNA (1)...(19): siRNA sense strand
uaucaaggccucccaguac

SEQ ID NO: 2178002 - RNA, 19 nt, Homo sapiens
  misc_RNA (1)...(19): siRNA sense strand
ccuggagccucuuugaugu

SEQ ID NO: 2178003 - RNA, 19 nt, Homo sapiens
  misc_RNA (1)...(19): siRNA sense strand
ggaccaggaagagaaagaa

SEQ ID NO: 2178004 - RNA, 19 nt, Homo sapiens
  misc_RNA (1)...(19): siRNA sense strand
gggcacuucucuacugucu

SEQ ID NO: 2178005 - RNA, 19 nt, Homo sapiens
  misc_RNA (1)...(19): siRNA sense strand
guacguugugugaagagua

SEQ ID NO: 2178006 - RNA, 19 nt, Homo sapiens
  misc_RNA (1)...(19): siRNA sense strand
ccaguacguugugugaaga

SEQ ID NO: 2178007 - RNA, 19 nt, Homo sapiens
  misc_RNA (1)...(19): siRNA sense strand
cugcauggucuucgaagua

SEQ ID NO: 2178008 - RNA, 19 nt, Homo sapiens
  misc_RNA (1)...(19): siRNA sense strand
uggcaacgggagauuauuu

SEQ ID NO: 2178009 - RNA, 19 nt, Homo sapiens
  misc_RNA (1)...(19): siRNA sense strand
agucacaguucccagaguu

SEQ ID NO: 2178010 - RNA, 19 nt, Homo sapiens
  misc_RNA (1)...(19): siRNA sense strand
gcagaaagugauuacacau

SEQ ID NO: 2178011 - RNA, 19 nt, Homo sapiens
  misc_RNA (1)...(19): siRNA sense strand
aagaggacccugcggacua

SEQ ID NO: 2178012 - RNA, 19 nt, Homo sapiens
  misc_RNA (1)...(19): siRNA sense strand
gcauaugugagaagaaugg

SEQ ID NO: 2178013 - RNA, 19 nt, Homo sapiens
  misc_RNA (1)...(19): siRNA sense strand
ccucuucaauggccgguau

SEQ ID NO: 2178014 - RNA, 19 nt, Homo sapiens
  misc_RNA (1)...(19): siRNA sense strand
gcaacgggagauuauuugu

SEQ ID NO: 2178015 - RNA, 19 nt, Homo sapiens
  misc_RNA (1)...(19): siRNA sense strand
gaaagaagaugcugagaaa

SEQ ID NO: 2178016 - RNA, 19 nt, Homo sapiens
  misc_RNA (1)...(19): siRNA sense strand
gaagaagacugcccaaauc

SEQ ID NO: 2178017 - RNA, 19 nt, Homo sapiens
  misc_RNA (1)...(19): siRNA sense strand
gcgagaagcugaaaggaaa

SEQ ID NO: 2178018 - RNA, 19 nt, Homo sapiens
  misc_RNA (1)...(19): siRNA sense strand
gcucaaauguguucgagaa

SEQ ID NO: 2178019 - RNA, 19 nt, Homo sapiens
  misc_RNA (1)...(19): siRNA sense strand
gcaagaucauucauacuga

SEQ ID NO: 2178020 - RNA, 19 nt, Homo sapiens
  misc_RNA (1)...(19): siRNA sense strand
ugaagaugcugcacaguuu

SEQ ID NO: 2178021 - RNA, 19 nt, Homo sapiens
  misc_RNA (1)...(19): siRNA sense strand
gaagaggcaggcugaguua

SEQ ID NO: 2178022 - RNA, 19 nt, Homo sapiens
  misc_RNA (1)...(19): siRNA sense strand
gaucauucauacugacaua

SEQ ID NO: 2178023 - RNA, 19 nt, Homo sapiens
  misc_RNA (1)...(19): siRNA sense strand
gcccagaggugaaacuaaa

SEQ ID NO: 2178024 - RNA, 19 nt, Homo sapiens
  misc_RNA (1)...(19): siRNA sense strand
gaaaagauuuguugcaaug

SEQ ID NO: 2178025 - RNA, 19 nt, Homo sapiens
  misc_RNA (1)...(19): siRNA sense strand
guuguucucuggauccuua

SEQ ID NO: 2178026 - RNA, 19 nt, Homo sapiens
  misc_RNA (1)...(19): siRNA sense strand
gcagaaaccuauaggaaaa

SEQ ID NO: 2178027 - RNA, 19 nt, Homo sapiens
  misc_RNA (1)...(19): siRNA sense strand
ucugagggaucaccacuua

SEQ ID NO: 2178028 - RNA, 19 nt, Homo sapiens
  misc_RNA (1)...(19): siRNA sense strand
ucaaguggaucaucaaauc

SEQ ID NO: 2178029 - RNA, 19 nt, Homo sapiens
  misc_RNA (1)...(19): siRNA sense strand
gaagaugcugcacaguuua

SEQ ID NO: 2178030 - RNA, 19 nt, Homo sapiens
  misc_RNA (1)...(19): siRNA sense strand
cgaugaagaugaugaugaa

SEQ ID NO: 2178031 - RNA, 19 nt, Homo sapiens
  misc_RNA (1)...(19): siRNA sense strand
ugaagaugaugaugaagaa

SEQ ID NO: 2178032 - RNA, 19 nt, Homo sapiens
  misc_RNA (1)...(19): siRNA sense strand
gacagaagcagaacgguuu

SEQ ID NO: 2178033 - RNA, 19 nt, Homo sapiens
  misc_RNA (1)...(19): siRNA sense strand
gaggcaggcugaguuauug

SEQ ID NO: 2178034 - RNA, 19 nt, Homo sapiens
  misc_RNA (1)...(19): siRNA sense strand
aacgggagauuauuuguuu

SEQ ID NO: 2178035 - RNA, 19 nt, Homo sapiens
  misc_RNA (1)...(19): siRNA sense strand
ggagacagccuuggaugaa

SEQ ID NO: 2178036 - RNA, 19 nt, Homo sapiens
  misc_RNA (1)...(19): siRNA sense strand
gagacagccuuggaugaaa

SEQ ID NO: 2178037 - RNA, 19 nt, Homo sapiens
  misc_RNA (1)...(19): siRNA sense strand
caaauguguucgagaaagu

SEQ ID NO: 2178038 - RNA, 19 nt, Homo sapiens
  misc_RNA (1)...(19): siRNA sense strand
cugcacaguuuacagauuu

SEQ ID NO: 2178039 - RNA, 19 nt, Homo sapiens
  misc_RNA (1)...(19): siRNA sense strand
gaucaucaaauccaacuau

SEQ ID NO: 2178040 - RNA, 19 nt, Homo sapiens
  misc_RNA (1)...(19): siRNA sense strand
cagaaagugauuacacaua

SEQ ID NO: 2178041 - RNA, 19 nt, Homo sapiens
  misc_RNA (1)...(19): siRNA sense strand
ggaauauaaucuugaugag

SEQ ID NO: 2178042 - RNA, 19 nt, Homo sapiens
  misc_RNA (1)...(19): siRNA sense strand
agaagaugcugagaaagaa

SEQ ID NO: 2178043 - RNA, 19 nt, Homo sapiens
  misc_RNA (1)...(19): siRNA sense strand
gagaaagugaucccaguga

SEQ ID NO: 2178044 - RNA, 19 nt, Homo sapiens
  misc_RNA (1)...(19): siRNA sense strand
agaugaagaugauguagau

SEQ ID NO: 2178045 - RNA, 19 nt, Homo sapiens
  misc_RNA (1)...(19): siRNA sense strand
cagcugcaccuuccaauga

SEQ ID NO: 2178046 - RNA, 19 nt, Homo sapiens
  misc_RNA (1)...(19): siRNA sense strand
cagcagaaaccuauaggaa

SEQ ID NO: 2178047 - RNA, 19 nt, Homo sapiens
  misc_RNA (1)...(19): siRNA sense strand
caucaaauccaacuaucaa

SEQ ID NO: 2178048 - RNA, 19 nt, Homo sapiens
  misc_RNA (1)...(19): siRNA sense strand
ggagaacugcgacacauca

SEQ ID NO: 2178049 - RNA, 19 nt, Homo sapiens
  misc_RNA (1)...(19): siRNA sense strand
gaggagaacugcgacacau

SEQ ID NO: 2178050 - RNA, 19 nt, Homo sapiens
  misc_RNA (1)...(19): siRNA sense strand
ccgggcagcugacuuguug

SEQ ID NO: 2178051 - RNA, 19 nt, Homo sapiens
  misc_RNA (1)...(19): siRNA sense strand
ugaagaagacugcccaaau

SEQ ID NO: 2178052 - RNA, 19 nt, Homo sapiens
  misc_RNA (1)...(19): siRNA sense strand
ucaggaacuugcgaacaua

SEQ ID NO: 2178053 - RNA, 19 nt, Homo sapiens
  misc_RNA (1)...(19): siRNA sense strand
cacaguaagugcaagauca

SEQ ID NO: 2178054 - RNA, 19 nt, Homo sapiens
  misc_RNA (1)...(19): siRNA sense strand
ccagugacccaaacaaaga

SEQ ID NO: 2178055 - RNA, 19 nt, Homo sapiens
  misc_RNA (1)...(19): siRNA sense strand
gcaacuggacgaugaagau

SEQ ID NO: 2178056 - RNA, 19 nt, Homo sapiens
  misc_RNA (1)...(19): siRNA sense strand
gacccuacguggauagaau

SEQ ID NO: 2178057 - RNA, 19 nt, Homo sapiens
  misc_RNA (1)...(19): siRNA sense strand
gccggagccucaacagaaa

SEQ ID NO: 2178058 - RNA, 19 nt, Homo sapiens
  misc_RNA (1)...(19): siRNA sense strand
gaagaugcugagaaagaaa

SEQ ID NO: 2178059 - RNA, 19 nt, Homo sapiens
  misc_RNA (1)...(19): siRNA sense strand
ucaaggguuagauuacuua

SEQ ID NO: 2178060 - RNA, 19 nt, Homo sapiens
  misc_RNA (1)...(19): siRNA sense strand
cagcuccuaugaacaauuc

SEQ ID NO: 2178061 - RNA, 19 nt, Homo sapiens
  misc_RNA (1)...(19): siRNA sense strand
caaaugcagaaagugauua

SEQ ID NO: 2178062 - RNA, 19 nt, Homo sapiens
  misc_RNA (1)...(19): siRNA sense strand
aagaagaugcugagaaaga

SEQ ID NO: 2178063 - RNA, 19 nt, Homo sapiens
  misc_RNA (1)...(19): siRNA sense strand
gaugaugcauaugugagaa

SEQ ID NO: 2178064 - RNA, 19 nt, Homo sapiens
  misc_RNA (1)...(19): siRNA sense strand
gcugcacaguuuacagauu

SEQ ID NO: 2178065 - RNA, 19 nt, Homo sapiens
  misc_RNA (1)...(19): siRNA sense strand
gagccucuuugauguacuu

SEQ ID NO: 2178066 - RNA, 19 nt, Homo sapiens
  misc_RNA (1)...(19): siRNA sense strand
cauagacccuacguggaua

SEQ ID NO: 2178067 - RNA, 19 nt, Homo sapiens
  misc_RNA (1)...(19): siRNA sense strand
ccaaauggacgacauaaaa

SEQ ID NO: 2178068 - RNA, 19 nt, Homo sapiens
  misc_RNA (1)...(19): siRNA sense strand
cggcauccuugguugaauu

SEQ ID NO: 2178069 - RNA, 19 nt, Homo sapiens
  misc_RNA (1)...(19): siRNA sense strand
ugcaggagauagaagaauu

SEQ ID NO: 2178070 - RNA, 19 nt, Homo sapiens
  misc_RNA (1)...(19): siRNA sense strand
ggagauuauuuguuugaac

SEQ ID NO: 2178071 - RNA, 19 nt, Homo sapiens
  misc_RNA (1)...(19): siRNA sense strand
cggcguguauggcauuuga

SEQ ID NO: 2178072 - RNA, 19 nt, Homo sapiens
  misc_RNA (1)...(19): siRNA sense strand
uagcagcuccuaugaacaa

SEQ ID NO: 2178073 - RNA, 19 nt, Homo sapiens
  misc_RNA (1)...(19): siRNA sense strand
gcaggagauagaagaauug

SEQ ID NO: 2178074 - RNA, 19 nt, Homo sapiens
  misc_RNA (1)...(19): siRNA sense strand
agacagccuuggaugaaau

SEQ ID NO: 2178075 - RNA, 19 nt, Homo sapiens
  misc_RNA (1)...(19): siRNA sense strand
caacgggagauuauuuguu

SEQ ID NO: 2178076 - RNA, 19 nt, Homo sapiens
  misc_RNA (1)...(19): siRNA sense strand
cagcugacuuguuggugaa

SEQ ID NO: 2178077 - RNA, 19 nt, Homo sapiens
  misc_RNA (1)...(19): siRNA sense strand
ccugaggaauauaaucuug

SEQ ID NO: 2178078 - RNA, 19 nt, Homo sapiens
  misc_RNA (1)...(19): siRNA sense strand
ugaccaggauggcgaauac

SEQ ID NO: 2178079 - RNA, 19 nt, Homo sapiens
  misc_RNA (1)...(19): siRNA sense strand
aauggccgguaucauguua

SEQ ID NO: 2178080 - RNA, 19 nt, Homo sapiens
  misc_RNA (1)...(19): siRNA sense strand
agaaagaagaugcugagaa

SEQ ID NO: 2178081 - RNA, 19 nt, Homo sapiens
  misc_RNA (1)...(19): siRNA sense strand
guuuacagauuuccugauc

SEQ ID NO: 2178082 - RNA, 19 nt, Homo sapiens
  misc_RNA (1)...(19): siRNA sense strand
ucaaauguguucgagaaag

SEQ ID NO: 2178083 - RNA, 19 nt, Homo sapiens
  misc_RNA (1)...(19): siRNA sense strand
cugcaaagguggauaucau

SEQ ID NO: 2178084 - RNA, 19 nt, Homo sapiens
  misc_RNA (1)...(19): siRNA sense strand
ccaaaugcagaaagugauu

SEQ ID NO: 2178085 - RNA, 19 nt, Homo sapiens
  misc_RNA (1)...(19): siRNA sense strand
uaaaaccaauggccauauu

SEQ ID NO: 2178086 - RNA, 19 nt, Homo sapiens
  misc_RNA (1)...(19): siRNA sense strand
guggauagaaucaccuaaa

SEQ ID NO: 2178087 - RNA, 19 nt, Homo sapiens
  misc_RNA (1)...(19): siRNA sense strand
ggaaaagauuuguugcaau

SEQ ID NO: 2178088 - RNA, 19 nt, Homo sapiens
  misc_RNA (1)...(19): siRNA sense strand
guguguggaugaugcauau

SEQ ID NO: 2178089 - RNA, 19 nt, Homo sapiens
  misc_RNA (1)...(19): siRNA sense strand
gccaccaucuccucaagug

SEQ ID NO: 2178090 - RNA, 19 nt, Homo sapiens
  misc_RNA (1)...(19): siRNA sense strand
uuggagaccucuucaaugg

SEQ ID NO: 2178091 - RNA, 19 nt, Homo sapiens
  misc_RNA (1)...(19): siRNA sense strand
cgaaguacuuggccaccau

SEQ ID NO: 2178092 - RNA, 19 nt, Homo sapiens
  misc_RNA (1)...(19): siRNA sense strand
auccuugguugaauucuua

SEQ ID NO: 2178093 - RNA, 19 nt, Homo sapiens
  misc_RNA (1)...(19): siRNA sense strand
uuagaaaugguuccagaaa

SEQ ID NO: 2178094 - RNA, 19 nt, Homo sapiens
  misc_RNA (1)...(19): siRNA sense strand
gcggcucugugcuuucuga

SEQ ID NO: 2178095 - RNA, 19 nt, Homo sapiens
  misc_RNA (1)...(19): siRNA sense strand
aauggugaauugccaaaug

SEQ ID NO: 2178096 - RNA, 19 nt, Homo sapiens
  misc_RNA (1)...(19): siRNA sense strand
guacggcuccacagcagaa

SEQ ID NO: 2178097 - RNA, 19 nt, Homo sapiens
  misc_RNA (1)...(19): siRNA sense strand
ggaugaugcauaugugaga

SEQ ID NO: 2178098 - RNA, 19 nt, Homo sapiens
  misc_RNA (1)...(19): siRNA sense strand
guaagugcaagaucauuca

SEQ ID NO: 2178099 - RNA, 19 nt, Homo sapiens
  misc_RNA (1)...(19): siRNA sense strand
gggagauuauuuguuugaa

SEQ ID NO: 2178100 - RNA, 19 nt, Homo sapiens
  misc_RNA (1)...(19): siRNA sense strand
gggaaaagauuuguugcaa

SEQ ID NO: 2178101 - RNA, 19 nt, Homo sapiens
  misc_RNA (1)...(19): siRNA sense strand
uaucaaggccucccaguac

SEQ ID NO: 2178102 - RNA, 19 nt, Homo sapiens
  misc_RNA (1)...(19): siRNA sense strand
ccuggagccucuuugaugu

SEQ ID NO: 2178103 - RNA, 19 nt, Homo sapiens
  misc_RNA (1)...(19): siRNA sense strand
ggaccaggaagagaaagaa

SEQ ID NO: 2178104 - RNA, 19 nt, Homo sapiens
  misc_RNA (1)...(19): siRNA sense strand
gggcacuucucuacugucu

SEQ ID NO: 2178105 - RNA, 19 nt, Homo sapiens
  misc_RNA (1)...(19): siRNA sense strand
guacguugugugaagagua

SEQ ID NO: 2178106 - RNA, 19 nt, Homo sapiens
  misc_RNA (1)...(19): siRNA sense strand
ccaguacguugugugaaga

SEQ ID NO: 2178107 - RNA, 19 nt, Homo sapiens
  misc_RNA (1)...(19): siRNA sense strand
cugcauggucuucgaagua

SEQ ID NO: 2178108 - RNA, 19 nt, Homo sapiens
  misc_RNA (1)...(19): siRNA sense strand
uggcaacgggagauuauuu

SEQ ID NO: 2178109 - RNA, 19 nt, Homo sapiens
  misc_RNA (1)...(19): siRNA sense strand
agucacaguucccagaguu

SEQ ID NO: 2178110 - RNA, 19 nt, Homo sapiens
  misc_RNA (1)...(19): siRNA sense strand
gcagaaagugauuacacau

SEQ ID NO: 2178111 - RNA, 19 nt, Homo sapiens
  misc_RNA (1)...(19): siRNA sense strand
aagaggacccugcggacua

SEQ ID NO: 2178112 - RNA, 19 nt, Homo sapiens
  misc_RNA (1)...(19): siRNA sense strand
gcauaugugagaagaaugg

SEQ ID NO: 2178113 - RNA, 19 nt, Homo sapiens
  misc_RNA (1)...(19): siRNA sense strand
ccucuucaauggccgguau

SEQ ID NO: 2178114 - RNA, 19 nt, Homo sapiens
  misc_RNA (1)...(19): siRNA sense strand
gcaacgggagauuauuugu

SEQ ID NO: 2178115 - RNA, 19 nt, Homo sapiens
  misc_RNA (1)...(19): siRNA sense strand
gaaagaagaugcugagaaa

SEQ ID NO: 2178116 - RNA, 19 nt, Homo sapiens
  misc_RNA (1)...(19): siRNA sense strand
gaagaagacugcccaaauc

SEQ ID NO: 2178117 - RNA, 19 nt, Homo sapiens
  misc_RNA (1)...(19): siRNA sense strand
gcgagaagcugaaaggaaa

SEQ ID NO: 2178118 - RNA, 19 nt, Homo sapiens
  misc_RNA (1)...(19): siRNA sense strand
gcucaaauguguucgagaa

SEQ ID NO: 2178119 - RNA, 19 nt, Homo sapiens
  misc_RNA (1)...(19): siRNA sense strand
gcaagaucauucauacuga

SEQ ID NO: 2178120 - RNA, 19 nt, Homo sapiens
  misc_RNA (1)...(19): siRNA sense strand
ugaagaugcugcacaguuu

SEQ ID NO: 2178121 - RNA, 19 nt, Homo sapiens
  misc_RNA (1)...(19): siRNA sense strand
gaagaggcaggcugaguua

SEQ ID NO: 2178122 - RNA, 19 nt, Homo sapiens
  misc_RNA (1)...(19): siRNA sense strand
gaucauucauacugacaua

SEQ ID NO: 2178123 - RNA, 19 nt, Homo sapiens
  misc_RNA (1)...(19): siRNA sense strand
gcccagaggugaaacuaaa

SEQ ID NO: 2178124 - RNA, 19 nt, Homo sapiens
  misc_RNA (1)...(19): siRNA sense strand
gaaaagauuuguugcaaug

SEQ ID NO: 2178125 - RNA, 19 nt, Homo sapiens
  misc_RNA (1)...(19): siRNA sense strand
guuguucucuggauccuua

SEQ ID NO: 2178126 - RNA, 19 nt, Homo sapiens
  misc_RNA (1)...(19): siRNA sense strand
gcagaaaccuauaggaaaa

SEQ ID NO: 2178127 - RNA, 19 nt, Homo sapiens
  misc_RNA (1)...(19): siRNA sense strand
ucugagggaucaccacuua

SEQ ID NO: 2178128 - RNA, 19 nt, Homo sapiens
  misc_RNA (1)...(19): siRNA sense strand
ucaaguggaucaucaaauc

SEQ ID NO: 2178129 - RNA, 19 nt, Homo sapiens
  misc_RNA (1)...(19): siRNA sense strand
gaagaugcugcacaguuua

SEQ ID NO: 2178130 - RNA, 19 nt, Homo sapiens
  misc_RNA (1)...(19): siRNA sense strand
cgaugaagaugaugaugaa

SEQ ID NO: 2178131 - RNA, 19 nt, Homo sapiens
  misc_RNA (1)...(19): siRNA sense strand
ugaagaugaugaugaagaa

SEQ ID NO: 2178132 - RNA, 19 nt, Homo sapiens
  misc_RNA (1)...(19): siRNA sense strand
gacagaagcagaacgguuu

SEQ ID NO: 2178133 - RNA, 19 nt, Homo sapiens
  misc_RNA (1)...(19): siRNA sense strand
gaggcaggcugaguuauug

SEQ ID NO: 2178134 - RNA, 19 nt, Homo sapiens
  misc_RNA (1)...(19): siRNA sense strand
aacgggagauuauuuguuu

SEQ ID NO: 2178135 - RNA, 19 nt, Homo sapiens
  misc_RNA (1)...(19): siRNA sense strand
ggagacagccuuggaugaa

SEQ ID NO: 2178136 - RNA, 19 nt, Homo sapiens
  misc_RNA (1)...(19): siRNA sense strand
gagacagccuuggaugaaa

SEQ ID NO: 2178137 - RNA, 19 nt, Homo sapiens
  misc_RNA (1)...(19): siRNA sense strand
caaauguguucgagaaagu

SEQ ID NO: 2178138 - RNA, 19 nt, Homo sapiens
  misc_RNA (1)...(19): siRNA sense strand
cugcacaguuuacagauuu

SEQ ID NO: 2178139 - RNA, 19 nt, Homo sapiens
  misc_RNA (1)...(19): siRNA sense strand
gaucaucaaauccaacuau

SEQ ID NO: 2178140 - RNA, 19 nt, Homo sapiens
  misc_RNA (1)...(19): siRNA sense strand
cagaaagugauuacacaua

SEQ ID NO: 2178141 - RNA, 19 nt, Homo sapiens
  misc_RNA (1)...(19): siRNA sense strand
ggaauauaaucuugaugag

SEQ ID NO: 2178142 - RNA, 19 nt, Homo sapiens
  misc_RNA (1)...(19): siRNA sense strand
agaagaugcugagaaagaa

SEQ ID NO: 2178143 - RNA, 19 nt, Homo sapiens
  misc_RNA (1)...(19): siRNA sense strand
gagaaagugaucccaguga

SEQ ID NO: 2178144 - RNA, 19 nt, Homo sapiens
  misc_RNA (1)...(19): siRNA sense strand
agaugaagaugauguagau

SEQ ID NO: 2178145 - RNA, 19 nt, Homo sapiens
  misc_RNA (1)...(19): siRNA sense strand
cagcugcaccuuccaauga

SEQ ID NO: 2178146 - RNA, 19 nt, Homo sapiens
  misc_RNA (1)...(19): siRNA sense strand
cagcagaaaccuauaggaa

SEQ ID NO: 2178147 - RNA, 19 nt, Homo sapiens
  misc_RNA (1)...(19): siRNA sense strand
caucaaauccaacuaucaa

SEQ ID NO: 2178148 - RNA, 19 nt, Homo sapiens
  misc_RNA (1)...(19): siRNA sense strand
ggagaacugcgacacauca

SEQ ID NO: 2178149 - RNA, 19 nt, Homo sapiens
  misc_RNA (1)...(19): siRNA sense strand
gaggagaacugcgacacau

SEQ ID NO: 2178150 - RNA, 19 nt, Homo sapiens
  misc_RNA (1)...(19): siRNA sense strand
ccgggcagcugacuuguug

SEQ ID NO: 2178151 - RNA, 19 nt, Homo sapiens
  misc_RNA (1)...(19): siRNA sense strand
ugaagaagacugcccaaau

SEQ ID NO: 2178152 - RNA, 19 nt, Homo sapiens
  misc_RNA (1)...(19): siRNA sense strand
ucaggaacuugcgaacaua

SEQ ID NO: 2178153 - RNA, 19 nt, Homo sapiens
  misc_RNA (1)...(19): siRNA sense strand
cacaguaagugcaagauca

SEQ ID NO: 2178154 - RNA, 19 nt, Homo sapiens
  misc_RNA (1)...(19): siRNA sense strand
ccagugacccaaacaaaga

SEQ ID NO: 2178155 - RNA, 19 nt, Homo sapiens
  misc_RNA (1)...(19): siRNA sense strand
gcaacuggacgaugaagau

SEQ ID NO: 2178156 - RNA, 19 nt, Homo sapiens
  misc_RNA (1)...(19): siRNA sense strand
gacccuacguggauagaau

SEQ ID NO: 2178157 - RNA, 19 nt, Homo sapiens
  misc_RNA (1)...(19): siRNA sense strand
gccggagccucaacagaaa

SEQ ID NO: 2178158 - RNA, 19 nt, Homo sapiens
  misc_RNA (1)...(19): siRNA sense strand
gaagaugcugagaaagaaa

SEQ ID NO: 2178159 - RNA, 19 nt, Homo sapiens
  misc_RNA (1)...(19): siRNA sense strand
ucaaggguuagauuacuua

SEQ ID NO: 2178160 - RNA, 19 nt, Homo sapiens
  misc_RNA (1)...(19): siRNA sense strand
cagcuccuaugaacaauuc

SEQ ID NO: 2178161 - RNA, 19 nt, Homo sapiens
  misc_RNA (1)...(19): siRNA sense strand
caaaugcagaaagugauua

SEQ ID NO: 2178162 - RNA, 19 nt, Homo sapiens
  misc_RNA (1)...(19): siRNA sense strand
aagaagaugcugagaaaga

SEQ ID NO: 2178163 - RNA, 19 nt, Homo sapiens
  misc_RNA (1)...(19): siRNA sense strand
gaugaugcauaugugagaa

SEQ ID NO: 2178164 - RNA, 19 nt, Homo sapiens
  misc_RNA (1)...(19): siRNA sense strand
gcugcacaguuuacagauu

SEQ ID NO: 2178165 - RNA, 19 nt, Homo sapiens
  misc_RNA (1)...(19): siRNA sense strand
gagccucuuugauguacuu

SEQ ID NO: 2178166 - RNA, 19 nt, Homo sapiens
  misc_RNA (1)...(19): siRNA sense strand
cauagacccuacguggaua

SEQ ID NO: 2178167 - RNA, 19 nt, Homo sapiens
  misc_RNA (1)...(19): siRNA sense strand
ccaaauggacgacauaaaa

SEQ ID NO: 2178168 - RNA, 19 nt, Homo sapiens
  misc_RNA (1)...(19): siRNA sense strand
cggcauccuugguugaauu

SEQ ID NO: 2178169 - RNA, 19 nt, Homo sapiens
  misc_RNA (1)...(19): siRNA sense strand
ugcaggagauagaagaauu

SEQ ID NO: 2178170 - RNA, 19 nt, Homo sapiens
  misc_RNA (1)...(19): siRNA sense strand
ggagauuauuuguuugaac

SEQ ID NO: 2178171 - RNA, 19 nt, Homo sapiens
  misc_RNA (1)...(19): siRNA sense strand
cggcguguauggcauuuga

SEQ ID NO: 2178172 - RNA, 19 nt, Homo sapiens
  misc_RNA (1)...(19): siRNA sense strand
uagcagcuccuaugaacaa

SEQ ID NO: 2178173 - RNA, 19 nt, Homo sapiens
  misc_RNA (1)...(19): siRNA sense strand
gcaggagauagaagaauug

SEQ ID NO: 2178174 - RNA, 19 nt, Homo sapiens
  misc_RNA (1)...(19): siRNA sense strand
agacagccuuggaugaaau

SEQ ID NO: 2178175 - RNA, 19 nt, Homo sapiens
  misc_RNA (1)...(19): siRNA sense strand
caacgggagauuauuuguu

SEQ ID NO: 2178176 - RNA, 19 nt, Homo sapiens
  misc_RNA (1)...(19): siRNA sense strand
cagcugacuuguuggugaa

SEQ ID NO: 2178177 - RNA, 19 nt, Homo sapiens
  misc_RNA (1)...(19): siRNA sense strand
ccugaggaauauaaucuug

SEQ ID NO: 2178178 - RNA, 19 nt, Homo sapiens
  misc_RNA (1)...(19): siRNA sense strand
ugaccaggauggcgaauac

SEQ ID NO: 2178179 - RNA, 19 nt, Homo sapiens
  misc_RNA (1)...(19): siRNA sense strand
aauggccgguaucauguua

SEQ ID NO: 2178180 - RNA, 19 nt, Homo sapiens
  misc_RNA (1)...(19): siRNA sense strand
agaaagaagaugcugagaa

SEQ ID NO: 2178181 - RNA, 19 nt, Homo sapiens
  misc_RNA (1)...(19): siRNA sense strand
guuuacagauuuccugauc

SEQ ID NO: 2178182 - RNA, 19 nt, Homo sapiens
  misc_RNA (1)...(19): siRNA sense strand
ucaaauguguucgagaaag

SEQ ID NO: 2178183 - RNA, 19 nt, Homo sapiens
  misc_RNA (1)...(19): siRNA sense strand
cugcaaagguggauaucau

SEQ ID NO: 2178184 - RNA, 19 nt, Homo sapiens
  misc_RNA (1)...(19): siRNA sense strand
ccaaaugcagaaagugauu

SEQ ID NO: 2178185 - RNA, 19 nt, Homo sapiens
  misc_RNA (1)...(19): siRNA sense strand
uaaaaccaauggccauauu

SEQ ID NO: 2178186 - RNA, 19 nt, Homo sapiens
  misc_RNA (1)...(19): siRNA sense strand
guggauagaaucaccuaaa

SEQ ID NO: 2178187 - RNA, 19 nt, Homo sapiens
  misc_RNA (1)...(19): siRNA sense strand
ggaaaagauuuguugcaau

SEQ ID NO: 2178188 - RNA, 19 nt, Homo sapiens
  misc_RNA (1)...(19): siRNA sense strand
guguguggaugaugcauau

SEQ ID NO: 2178189 - RNA, 19 nt, Homo sapiens
  misc_RNA (1)...(19): siRNA sense strand
gccaccaucuccucaagug

SEQ ID NO: 2178190 - RNA, 19 nt, Homo sapiens
  misc_RNA (1)...(19): siRNA sense strand
uuggagaccucuucaaugg

SEQ ID NO: 2178191 - RNA, 19 nt, Homo sapiens
  misc_RNA (1)...(19): siRNA sense strand
cgaaguacuuggccaccau

SEQ ID NO: 2178192 - RNA, 19 nt, Homo sapiens
  misc_RNA (1)...(19): siRNA sense strand
auccuugguugaauucuua

SEQ ID NO: 2178193 - RNA, 19 nt, Homo sapiens
  misc_RNA (1)...(19): siRNA sense strand
uuagaaaugguuccagaaa

SEQ ID NO: 2178194 - RNA, 19 nt, Homo sapiens
  misc_RNA (1)...(19): siRNA sense strand
gcggcucugugcuuucuga

SEQ ID NO: 2178195 - RNA, 19 nt, Homo sapiens
  misc_RNA (1)...(19): siRNA sense strand
aauggugaauugccaaaug

SEQ ID NO: 2178196 - RNA, 19 nt, Homo sapiens
  misc_RNA (1)...(19): siRNA sense strand
guacggcuccacagcagaa

SEQ ID NO: 2178197 - RNA, 19 nt, Homo sapiens
  misc_RNA (1)...(19): siRNA sense strand
ggaugaugcauaugugaga

SEQ ID NO: 2178198 - RNA, 19 nt, Homo sapiens
  misc_RNA (1)...(19): siRNA sense strand
guaagugcaagaucauuca

SEQ ID NO: 2178199 - RNA, 19 nt, Homo sapiens
  misc_RNA (1)...(19): siRNA sense strand
gggagauuauuuguuugaa

SEQ ID NO: 2178200 - RNA, 19 nt, Homo sapiens
  misc_RNA (1)...(19): siRNA sense strand
gggaaaagauuuguugcaa

SEQ ID NO: 2178201 - RNA, 19 nt, Homo sapiens
  misc_RNA (1)...(19): siRNA sense strand
uaucaaggccucccaguac

SEQ ID NO: 2178202 - RNA, 19 nt, Homo sapiens
  misc_RNA (1)...(19): siRNA sense strand
ccuggagccucuuugaugu

SEQ ID NO: 2178203 - RNA, 19 nt, Homo sapiens
  misc_RNA (1)...(19): siRNA sense strand
ggaccaggaagagaaagaa

SEQ ID NO: 2178204 - RNA, 19 nt, Homo sapiens
  misc_RNA (1)...(19): siRNA sense strand
gggcacuucucuacugucu

SEQ ID NO: 2178205 - RNA, 19 nt, Homo sapiens
  misc_RNA (1)...(19): siRNA sense strand
guacguugugugaagagua

SEQ ID NO: 2178206 - RNA, 19 nt, Homo sapiens
  misc_RNA (1)...(19): siRNA sense strand
ccaguacguugugugaaga

SEQ ID NO: 2178207 - RNA, 19 nt, Homo sapiens
  misc_RNA (1)...(19): siRNA sense strand
cugcauggucuucgaagua

SEQ ID NO: 2178208 - RNA, 19 nt, Homo sapiens
  misc_RNA (1)...(19): siRNA sense strand
uggcaacgggagauuauuu

SEQ ID NO: 2178209 - RNA, 19 nt, Homo sapiens
  misc_RNA (1)...(19): siRNA sense strand
agucacaguucccagaguu

SEQ ID NO: 2178210 - RNA, 19 nt, Homo sapiens
  misc_RNA (1)...(19): siRNA sense strand
gcagaaagugauuacacau

SEQ ID NO: 2178211 - RNA, 19 nt, Homo sapiens
  misc_RNA (1)...(19): siRNA sense strand
aagaggacccugcggacua

SEQ ID NO: 2178212 - RNA, 19 nt, Homo sapiens
  misc_RNA (1)...(19): siRNA sense strand
gcauaugugagaagaaugg

SEQ ID NO: 2178213 - RNA, 19 nt, Homo sapiens
  misc_RNA (1)...(19): siRNA sense strand
ccucuucaauggccgguau

SEQ ID NO: 2178214 - RNA, 19 nt, Homo sapiens
  misc_RNA (1)...(19): siRNA sense strand
gcaacgggagauuauuugu

SEQ ID NO: 2178215 - RNA, 19 nt, Homo sapiens
  misc_RNA (1)...(19): siRNA sense strand
gaaagaagaugcugagaaa

SEQ ID NO: 2178216 - RNA, 19 nt, Homo sapiens
  misc_RNA (1)...(19): siRNA sense strand
gaagaagacugcccaaauc

SEQ ID NO: 2178217 - RNA, 19 nt, Homo sapiens
  misc_RNA (1)...(19): siRNA sense strand
gcgagaagcugaaaggaaa

SEQ ID NO: 2178218 - RNA, 19 nt, Homo sapiens
  misc_RNA (1)...(19): siRNA sense strand
gcucaaauguguucgagaa

SEQ ID NO: 2178219 - RNA, 19 nt, Homo sapiens
  misc_RNA (1)...(19): siRNA sense strand
gcaagaucauucauacuga

SEQ ID NO: 2178220 - RNA, 19 nt, Homo sapiens
  misc_RNA (1)...(19): siRNA sense strand
ugaagaugcugcacaguuu

SEQ ID NO: 2178221 - RNA, 19 nt, Homo sapiens
  misc_RNA (1)...(19): siRNA sense strand
gaagaggcaggcugaguua

SEQ ID NO: 2178222 - RNA, 19 nt, Homo sapiens
  misc_RNA (1)...(19): siRNA sense strand
gaucauucauacugacaua

SEQ ID NO: 2178223 - RNA, 19 nt, Homo sapiens
  misc_RNA (1)...(19): siRNA sense strand
gcccagaggugaaacuaaa

SEQ ID NO: 2178224 - RNA, 19 nt, Homo sapiens
  misc_RNA (1)...(19): siRNA sense strand
gaaaagauuuguugcaaug

SEQ ID NO: 2178225 - RNA, 19 nt, Homo sapiens
  misc_RNA (1)...(19): siRNA sense strand
guuguucucuggauccuua

SEQ ID NO: 2178226 - RNA, 19 nt, Homo sapiens
  misc_RNA (1)...(19): siRNA sense strand
gcagaaaccuauaggaaaa

SEQ ID NO: 2178227 - RNA, 19 nt, Homo sapiens
  misc_RNA (1)...(19): siRNA sense strand
ucugagggaucaccacuua

SEQ ID NO: 2178228 - RNA, 19 nt, Homo sapiens
  misc_RNA (1)...(19): siRNA sense strand
ucaaguggaucaucaaauc

SEQ ID NO: 2178229 - RNA, 19 nt, Homo sapiens
  misc_RNA (1)...(19): siRNA sense strand
gaagaugcugcacaguuua

SEQ ID NO: 2178230 - RNA, 19 nt, Homo sapiens
  misc_RNA (1)...(19): siRNA sense strand
cgaugaagaugaugaugaa

SEQ ID NO: 2178231 - RNA, 19 nt, Homo sapiens
  misc_RNA (1)...(19): siRNA sense strand
ugaagaugaugaugaagaa

SEQ ID NO: 2178232 - RNA, 19 nt, Homo sapiens
  misc_RNA (1)...(19): siRNA sense strand
gacagaagcagaacgguuu

SEQ ID NO: 2178233 - RNA, 19 nt, Homo sapiens
  misc_RNA (1)...(19): siRNA sense strand
gaggcaggcugaguuauug

SEQ ID NO: 2178234 - RNA, 19 nt, Homo sapiens
  misc_RNA (1)...(19): siRNA sense strand
aacgggagauuauuuguuu

SEQ ID NO: 2178235 - RNA, 19 nt, Homo sapiens
  misc_RNA (1)...(19): siRNA sense strand
gagacagccuuggaugaaa

SEQ ID NO: 2178236 - RNA, 19 nt, Homo sapiens
  misc_RNA (1)...(19): siRNA sense strand
ggagacagccuuggaugaa

SEQ ID NO: 2178237 - RNA, 19 nt, Homo sapiens
  misc_RNA (1)...(19): siRNA sense strand
caaauguguucgagaaagu

SEQ ID NO: 2178238 - RNA, 19 nt, Homo sapiens
  misc_RNA (1)...(19): siRNA sense strand
cugcacaguuuacagauuu

SEQ ID NO: 2178239 - RNA, 19 nt, Homo sapiens
  misc_RNA (1)...(19): siRNA sense strand
gaucaucaaauccaacuau

SEQ ID NO: 2178240 - RNA, 19 nt, Homo sapiens
  misc_RNA (1)...(19): siRNA sense strand
cagaaagugauuacacaua

SEQ ID NO: 2178241 - RNA, 19 nt, Homo sapiens
  misc_RNA (1)...(19): siRNA sense strand
ggaauauaaucuugaugag

SEQ ID NO: 2178242 - RNA, 19 nt, Homo sapiens
  misc_RNA (1)...(19): siRNA sense strand
agaagaugcugagaaagaa

SEQ ID NO: 2178243 - RNA, 19 nt, Homo sapiens
  misc_RNA (1)...(19): siRNA sense strand
gagaaagugaucccaguga

SEQ ID NO: 2178244 - RNA, 19 nt, Homo sapiens
  misc_RNA (1)...(19): siRNA sense strand
agaugaagaugauguagau

SEQ ID NO: 2178245 - RNA, 19 nt, Homo sapiens
  misc_RNA (1)...(19): siRNA sense strand
cagcugcaccuuccaauga

SEQ ID NO: 2178246 - RNA, 19 nt, Homo sapiens
  misc_RNA (1)...(19): siRNA sense strand
cagcagaaaccuauaggaa

SEQ ID NO: 2178247 - RNA, 19 nt, Homo sapiens
  misc_RNA (1)...(19): siRNA sense strand
caucaaauccaacuaucaa

SEQ ID NO: 2178248 - RNA, 19 nt, Homo sapiens
  misc_RNA (1)...(19): siRNA sense strand
ggagaacugcgacacauca

SEQ ID NO: 2178249 - RNA, 19 nt, Homo sapiens
  misc_RNA (1)...(19): siRNA sense strand
gaggagaacugcgacacau

SEQ ID NO: 2178250 - RNA, 19 nt, Homo sapiens
  misc_RNA (1)...(19): siRNA sense strand
ccgggcagcugacuuguug

SEQ ID NO: 2178251 - RNA, 19 nt, Homo sapiens
  misc_RNA (1)...(19): siRNA sense strand
ugaagaagacugcccaaau

SEQ ID NO: 2178252 - RNA, 19 nt, Homo sapiens
  misc_RNA (1)...(19): siRNA sense strand
ucaggaacuugcgaacaua

SEQ ID NO: 2178253 - RNA, 19 nt, Homo sapiens
  misc_RNA (1)...(19): siRNA sense strand
cacaguaagugcaagauca

SEQ ID NO: 2178254 - RNA, 19 nt, Homo sapiens
  misc_RNA (1)...(19): siRNA sense strand
ccagugacccaaacaaaga

SEQ ID NO: 2178255 - RNA, 19 nt, Homo sapiens
  misc_RNA (1)...(19): siRNA sense strand
gcaacuggacgaugaagau

SEQ ID NO: 2178256 - RNA, 19 nt, Homo sapiens
  misc_RNA (1)...(19): siRNA sense strand
gacccuacguggauagaau

SEQ ID NO: 2178257 - RNA, 19 nt, Homo sapiens
  misc_RNA (1)...(19): siRNA sense strand
gaagaugcugagaaagaaa

SEQ ID NO: 2178258 - RNA, 19 nt, Homo sapiens
  misc_RNA (1)...(19): siRNA sense strand
ucaaggguuagauuacuua

SEQ ID NO: 2178259 - RNA, 19 nt, Homo sapiens
  misc_RNA (1)...(19): siRNA sense strand
cagcuccuaugaacaauuc

SEQ ID NO: 2178260 - RNA, 19 nt, Homo sapiens
  misc_RNA (1)...(19): siRNA sense strand
caaaugcagaaagugauua

SEQ ID NO: 2178261 - RNA, 19 nt, Homo sapiens
  misc_RNA (1)...(19): siRNA sense strand
aagaagaugcugagaaaga

SEQ ID NO: 2178262 - RNA, 19 nt, Homo sapiens
  misc_RNA (1)...(19): siRNA sense strand
gaugaugcauaugugagaa

SEQ ID NO: 2178263 - RNA, 19 nt, Homo sapiens
  misc_RNA (1)...(19): siRNA sense strand
gcugcacaguuuacagauu

SEQ ID NO: 2178264 - RNA, 19 nt, Homo sapiens
  misc_RNA (1)...(19): siRNA sense strand
gagccucuuugauguacuu

SEQ ID NO: 2178265 - RNA, 19 nt, Homo sapiens
  misc_RNA (1)...(19): siRNA sense strand
cauagacccuacguggaua

SEQ ID NO: 2178266 - RNA, 19 nt, Homo sapiens
  misc_RNA (1)...(19): siRNA sense strand
ccaaauggacgacauaaaa

SEQ ID NO: 2178267 - RNA, 19 nt, Homo sapiens
  misc_RNA (1)...(19): siRNA sense strand
cggcauccuugguugaauu

SEQ ID NO: 2178268 - RNA, 19 nt, Homo sapiens
  misc_RNA (1)...(19): siRNA sense strand
ugcaggagauagaagaauu

SEQ ID NO: 2178269 - RNA, 19 nt, Homo sapiens
  misc_RNA (1)...(19): siRNA sense strand
ggagauuauuuguuugaac

SEQ ID NO: 2178270 - RNA, 19 nt, Homo sapiens
  misc_RNA (1)...(19): siRNA sense strand
cggcguguauggcauuuga

SEQ ID NO: 2178271 - RNA, 19 nt, Homo sapiens
  misc_RNA (1)...(19): siRNA sense strand
uagcagcuccuaugaacaa

SEQ ID NO: 2178272 - RNA, 19 nt, Homo sapiens
  misc_RNA (1)...(19): siRNA sense strand
gcaggagauagaagaauug

SEQ ID NO: 2178273 - RNA, 19 nt, Homo sapiens
  misc_RNA (1)...(19): siRNA sense strand
ugaccaggauggcgaauac

SEQ ID NO: 2178274 - RNA, 19 nt, Homo sapiens
  misc_RNA (1)...(19): siRNA sense strand
agacagccuuggaugaaau

SEQ ID NO: 2178275 - RNA, 19 nt, Homo sapiens
  misc_RNA (1)...(19): siRNA sense strand
caacgggagauuauuuguu

SEQ ID NO: 2178276 - RNA, 19 nt, Homo sapiens
  misc_RNA (1)...(19): siRNA sense strand
cagcugacuuguuggugaa

SEQ ID NO: 2178277 - RNA, 19 nt, Homo sapiens
  misc_RNA (1)...(19): siRNA sense strand
ccugaggaauauaaucuug

SEQ ID NO: 2178278 - RNA, 19 nt, Homo sapiens
  misc_RNA (1)...(19): siRNA sense strand
agaaagaagaugcugagaa

SEQ ID NO: 2178279 - RNA, 19 nt, Homo sapiens
  misc_RNA (1)...(19): siRNA sense strand
guuuacagauuuccugauc

SEQ ID NO: 2178280 - RNA, 19 nt, Homo sapiens
  misc_RNA (1)...(19): siRNA sense strand
ucaaauguguucgagaaag

SEQ ID NO: 2178281 - RNA, 19 nt, Homo sapiens
  misc_RNA (1)...(19): siRNA sense strand
ggaaaagauuuguugcaau

SEQ ID NO: 2178282 - RNA, 19 nt, Homo sapiens
  misc_RNA (1)...(19): siRNA sense strand
ccaaaugcagaaagugauu

SEQ ID NO: 2178283 - RNA, 19 nt, Homo sapiens
  misc_RNA (1)...(19): siRNA sense strand
uaaaaccaauggccauauu

SEQ ID NO: 2178284 - RNA, 19 nt, Homo sapiens
  misc_RNA (1)...(19): siRNA sense strand
guggauagaaucaccuaaa

SEQ ID NO: 2178285 - RNA, 19 nt, Homo sapiens
  misc_RNA (1)...(19): siRNA sense strand
guguguggaugaugcauau

SEQ ID NO: 2178286 - RNA, 19 nt, Homo sapiens
  misc_RNA (1)...(19): siRNA sense strand
gccaccaucuccucaagug

SEQ ID NO: 2178287 - RNA, 19 nt, Homo sapiens
  misc_RNA (1)...(19): siRNA sense strand
ggaugaugcauaugugaga

SEQ ID NO: 2178288 - RNA, 19 nt, Homo sapiens
  misc_RNA (1)...(19): siRNA sense strand
auccuugguugaauucuua

SEQ ID NO: 2178289 - RNA, 19 nt, Homo sapiens
  misc_RNA (1)...(19): siRNA sense strand
uuagaaaugguuccagaaa

SEQ ID NO: 2178290 - RNA, 19 nt, Homo sapiens
  misc_RNA (1)...(19): siRNA sense strand
gcggcucugugcuuucuga

SEQ ID NO: 2178291 - RNA, 19 nt, Homo sapiens
  misc_RNA (1)...(19): siRNA sense strand
cgaaguacuuggccaccau

SEQ ID NO: 2178292 - RNA, 19 nt, Homo sapiens
  misc_RNA (1)...(19): siRNA sense strand
aauggugaauugccaaaug

SEQ ID NO: 2178293 - RNA, 19 nt, Homo sapiens
  misc_RNA (1)...(19): siRNA sense strand
guacggcuccacagcagaa

SEQ ID NO: 2178294 - RNA, 19 nt, Homo sapiens
  misc_RNA (1)...(19): siRNA sense strand
guaagugcaagaucauuca

SEQ ID NO: 2178295 - RNA, 19 nt, Homo sapiens
  misc_RNA (1)...(19): siRNA sense strand
gggagauuauuuguuugaa

SEQ ID NO: 2178296 - RNA, 19 nt, Homo sapiens
  misc_RNA (1)...(19): siRNA sense strand
gggaaaagauuuguugcaa

SEQ ID NO: 2178297 - RNA, 19 nt, Homo sapiens
  misc_RNA (1)...(19): siRNA sense strand
uaucaaggccucccaguac

SEQ ID NO: 2178298 - RNA, 19 nt, Homo sapiens
  misc_RNA (1)...(19): siRNA sense strand
ccuggagccucuuugaugu

SEQ ID NO: 2178299 - RNA, 19 nt, Homo sapiens
  misc_RNA (1)...(19): siRNA sense strand
ggaccaggaagagaaagaa

SEQ ID NO: 2178300 - RNA, 19 nt, Homo sapiens
  misc_RNA (1)...(19): siRNA sense strand
guacguugugugaagagua

SEQ ID NO: 2178301 - RNA, 19 nt, Homo sapiens
  misc_RNA (1)...(19): siRNA sense strand
ccaguacguugugugaaga

SEQ ID NO: 2178302 - RNA, 19 nt, Homo sapiens
  misc_RNA (1)...(19): siRNA sense strand
cugcauggucuucgaagua

SEQ ID NO: 2178303 - RNA, 19 nt, Homo sapiens
  misc_RNA (1)...(19): siRNA sense strand
uggcaacgggagauuauuu

SEQ ID NO: 2178304 - RNA, 19 nt, Homo sapiens
  misc_RNA (1)...(19): siRNA sense strand
agucacaguucccagaguu

SEQ ID NO: 2178305 - RNA, 19 nt, Homo sapiens
  misc_RNA (1)...(19): siRNA sense strand
gcagaaagugauuacacau

SEQ ID NO: 2178306 - RNA, 19 nt, Homo sapiens
  misc_RNA (1)...(19): siRNA sense strand
gcauaugugagaagaaugg

SEQ ID NO: 2178307 - RNA, 19 nt, Homo sapiens
  misc_RNA (1)...(19): siRNA sense strand
acauaaagccggaaaauau

SEQ ID NO: 2178308 - RNA, 19 nt, Homo sapiens
  misc_RNA (1)...(19): siRNA sense strand
gcaacgggagauuauuugu

SEQ ID NO: 2178309 - RNA, 19 nt, Homo sapiens
  misc_RNA (1)...(19): siRNA sense strand
ggacgaugaagaugaugau

SEQ ID NO: 2178310 - RNA, 19 nt, Homo sapiens
  misc_RNA (1)...(19): siRNA sense strand
gaagcugaaaggaaaauaa

SEQ ID NO: 2178311 - RNA, 19 nt, Homo sapiens
  misc_RNA (1)...(19): siRNA sense strand
agaagaggcaggcugaguu

SEQ ID NO: 2178312 - RNA, 19 nt, Homo sapiens
  misc_RNA (1)...(19): siRNA sense strand
ccucuuugauguacuugug

SEQ ID NO: 2178313 - RNA, 19 nt, Homo sapiens
  misc_RNA (1)...(19): siRNA sense strand
cauccuugguugaauucuu

SEQ ID NO: 2178314 - RNA, 19 nt, Homo sapiens
  misc_RNA (1)...(19): siRNA sense strand
gacagccuuggaugaaaua

SEQ ID NO: 2178315 - RNA, 19 nt, Homo sapiens
  misc_RNA (1)...(19): siRNA sense strand
gaaauagaguggugauuaa

SEQ ID NO: 2178316 - RNA, 19 nt, Homo sapiens
  misc_RNA (1)...(19): siRNA sense strand
gaugagagcuauaacuuaa

SEQ ID NO: 2178317 - RNA, 19 nt, Homo sapiens
  misc_RNA (1)...(19): siRNA sense strand
ggaaauagaguggugauua

SEQ ID NO: 2178318 - RNA, 19 nt, Homo sapiens
  misc_RNA (1)...(19): siRNA sense strand
gaauaacucuugugacaga

SEQ ID NO: 2178319 - RNA, 19 nt, Homo sapiens
  misc_RNA (1)...(19): siRNA sense strand
uaugagagcuuacauguau

SEQ ID NO: 2178320 - RNA, 19 nt, Homo sapiens
  misc_RNA (1)...(19): siRNA sense strand
ccaagaagauggaaauaga

SEQ ID NO: 2178321 - RNA, 19 nt, Homo sapiens
  misc_RNA (1)...(19): siRNA sense strand
uaagggaaaugucgucuuu

SEQ ID NO: 2178322 - RNA, 19 nt, Homo sapiens
  misc_RNA (1)...(19): siRNA sense strand
gacauugcauugccucuua

SEQ ID NO: 2178323 - RNA, 19 nt, Homo sapiens
  misc_RNA (1)...(19): siRNA sense strand
gaaaucaaggaguaucuua

SEQ ID NO: 2178324 - RNA, 19 nt, Homo sapiens
  misc_RNA (1)...(19): siRNA sense strand
gaaguacccuuggacauau

SEQ ID NO: 2178325 - RNA, 19 nt, Homo sapiens
  misc_RNA (1)...(19): siRNA sense strand
gaaaugucgucuuuggauu

SEQ ID NO: 2178326 - RNA, 19 nt, Homo sapiens
  misc_RNA (1)...(19): siRNA sense strand
uuauguggcuguuuacuua

SEQ ID NO: 2178327 - RNA, 19 nt, Homo sapiens
  misc_RNA (1)...(19): siRNA sense strand
cagaauagcugaggauuuc

SEQ ID NO: 2178328 - RNA, 19 nt, Homo sapiens
  misc_RNA (1)...(19): siRNA sense strand
gacaaacuauugccacauu

SEQ ID NO: 2178329 - RNA, 19 nt, Homo sapiens
  misc_RNA (1)...(19): siRNA sense strand
uuaagcaacucaggauuua

SEQ ID NO: 2178330 - RNA, 19 nt, Homo sapiens
  misc_RNA (1)...(19): siRNA sense strand
uaacauggacaaacuauug

SEQ ID NO: 2178331 - RNA, 19 nt, Homo sapiens
  misc_RNA (1)...(19): siRNA sense strand
gacaggaaauaaugaaaug

SEQ ID NO: 2178332 - RNA, 19 nt, Homo sapiens
  misc_RNA (1)...(19): siRNA sense strand
gaaguuuguguguauguua

SEQ ID NO: 2178333 - RNA, 19 nt, Homo sapiens
  misc_RNA (1)...(19): siRNA sense strand
gaacuccaaccuagaauau

SEQ ID NO: 2178334 - RNA, 19 nt, Homo sapiens
  misc_RNA (1)...(19): siRNA sense strand
gcagaacacuugcuuagac

SEQ ID NO: 2178335 - RNA, 19 nt, Homo sapiens
  misc_RNA (1)...(19): siRNA sense strand
uaaaggcuguggauagcua

SEQ ID NO: 2178336 - RNA, 19 nt, Homo sapiens
  misc_RNA (1)...(19): siRNA sense strand
uuacuuaccuggucauuuc

SEQ ID NO: 2178337 - RNA, 19 nt, Homo sapiens
  misc_RNA (1)...(19): siRNA sense strand
cugaagaaaucaaggagua

SEQ ID NO: 2178338 - RNA, 19 nt, Homo sapiens
  misc_RNA (1)...(19): siRNA sense strand
gaccugaucugccacaauc

SEQ ID NO: 2178339 - RNA, 19 nt, Homo sapiens
  misc_RNA (1)...(19): siRNA sense strand
guugaaauccacccuguua

SEQ ID NO: 2178340 - RNA, 19 nt, Homo sapiens
  misc_RNA (1)...(19): siRNA sense strand
acuauuauguggcuguuua

SEQ ID NO: 2178341 - RNA, 19 nt, Homo sapiens
  misc_RNA (1)...(19): siRNA sense strand
caaaucacauauucagugu

SEQ ID NO: 2178342 - RNA, 19 nt, Homo sapiens
  misc_RNA (1)...(19): siRNA sense strand
gcaagaccuucaccacuuc

SEQ ID NO: 2178343 - RNA, 19 nt, Homo sapiens
  misc_RNA (1)...(19): siRNA sense strand
ggcacaaccugaucucuga

SEQ ID NO: 2178344 - RNA, 19 nt, Homo sapiens
  misc_RNA (1)...(19): siRNA sense strand
ugaaggugcucagcuuuaa

SEQ ID NO: 2178345 - RNA, 19 nt, Homo sapiens
  misc_RNA (1)...(19): siRNA sense strand
caaguaacauggacaaacu

SEQ ID NO: 2178346 - RNA, 19 nt, Homo sapiens
  misc_RNA (1)...(19): siRNA sense strand
uggaauaacucuugugaca

SEQ ID NO: 2178347 - RNA, 19 nt, Homo sapiens
  misc_RNA (1)...(19): siRNA sense strand
gagcuucuauauaccuuug

SEQ ID NO: 2178348 - RNA, 19 nt, Homo sapiens
  misc_RNA (1)...(19): siRNA sense strand
ugaaguacccuuggacaua

SEQ ID NO: 2178349 - RNA, 19 nt, Homo sapiens
  misc_RNA (1)...(19): siRNA sense strand
ggaaaugucgucuuuggau

SEQ ID NO: 2178350 - RNA, 19 nt, Homo sapiens
  misc_RNA (1)...(19): siRNA sense strand
ugagagcuauaacuuaaug

SEQ ID NO: 2178351 - RNA, 19 nt, Homo sapiens
  misc_RNA (1)...(19): siRNA sense strand
ggacaaaucacauauucag

SEQ ID NO: 2178352 - RNA, 19 nt, Homo sapiens
  misc_RNA (1)...(19): siRNA sense strand
acaggaaguuuguguguau

SEQ ID NO: 2178353 - RNA, 19 nt, Homo sapiens
  misc_RNA (1)...(19): siRNA sense strand
aaccaucuguuacugauuu

SEQ ID NO: 2178354 - RNA, 19 nt, Homo sapiens
  misc_RNA (1)...(19): siRNA sense strand
cagccagucgucuuuauua

SEQ ID NO: 2178355 - RNA, 19 nt, Homo sapiens
  misc_RNA (1)...(19): siRNA sense strand
caacucaggauuuaaacuu

SEQ ID NO: 2178356 - RNA, 19 nt, Homo sapiens
  misc_RNA (1)...(19): siRNA sense strand
aaacgauuaugagagcuua

SEQ ID NO: 2178357 - RNA, 19 nt, Homo sapiens
  misc_RNA (1)...(19): siRNA sense strand
acauugaccugaagaaauc

SEQ ID NO: 2178358 - RNA, 19 nt, Homo sapiens
  misc_RNA (1)...(19): siRNA sense strand
gacagaagacauugcauug

SEQ ID NO: 2178359 - RNA, 19 nt, Homo sapiens
  misc_RNA (1)...(19): siRNA sense strand
ugagagcuuacauguauua

SEQ ID NO: 2178360 - RNA, 19 nt, Homo sapiens
  misc_RNA (1)...(19): siRNA sense strand
gaguguauauucagagaca

SEQ ID NO: 2178361 - RNA, 19 nt, Homo sapiens
  misc_RNA (1)...(19): siRNA sense strand
ggaaguuuguguguauguu

SEQ ID NO: 2178362 - RNA, 19 nt, Homo sapiens
  misc_RNA (1)...(19): siRNA sense strand
ggacacagcaagaccuuca

SEQ ID NO: 2178363 - RNA, 19 nt, Homo sapiens
  misc_RNA (1)...(19): siRNA sense strand
caguuucucuacccacaua

SEQ ID NO: 2178364 - RNA, 19 nt, Homo sapiens
  misc_RNA (1)...(19): siRNA sense strand
gguauuggauuguuguucu

SEQ ID NO: 2178365 - RNA, 19 nt, Homo sapiens
  misc_RNA (1)...(19): siRNA sense strand
gaaauccacccuguuaaca

SEQ ID NO: 2178366 - RNA, 19 nt, Homo sapiens
  misc_RNA (1)...(19): siRNA sense strand
gaucugccacaaucucuuu

SEQ ID NO: 2178367 - RNA, 19 nt, Homo sapiens
  misc_RNA (1)...(19): siRNA sense strand
ggauaugucagaacagaga

SEQ ID NO: 2178368 - RNA, 19 nt, Homo sapiens
  misc_RNA (1)...(19): siRNA sense strand
aaaugucgucuuuggauua

SEQ ID NO: 2178369 - RNA, 19 nt, Homo sapiens
  misc_RNA (1)...(19): siRNA sense strand
aagccacacuuccacuaua

SEQ ID NO: 2178370 - RNA, 19 nt, Homo sapiens
  misc_RNA (1)...(19): siRNA sense strand
ccuagaauauguuaaguac

SEQ ID NO: 2178371 - RNA, 19 nt, Homo sapiens
  misc_RNA (1)...(19): siRNA sense strand
gaacacuugcuuagacugu

SEQ ID NO: 2178372 - RNA, 19 nt, Homo sapiens
  misc_RNA (1)...(19): siRNA sense strand
ugaugagagcuauaacuua

SEQ ID NO: 2178373 - RNA, 19 nt, Homo sapiens
  misc_RNA (1)...(19): siRNA sense strand
ugacagaagacauugcauu

SEQ ID NO: 2178374 - RNA, 19 nt, Homo sapiens
  misc_RNA (1)...(19): siRNA sense strand
caacuuuggaugugauuau

SEQ ID NO: 2178375 - RNA, 19 nt, Homo sapiens
  misc_RNA (1)...(19): siRNA sense strand
ucauugcccuuuacaguca

SEQ ID NO: 2178376 - RNA, 19 nt, Homo sapiens
  misc_RNA (1)...(19): siRNA sense strand
ugucagaacagagauuaua

SEQ ID NO: 2178377 - RNA, 19 nt, Homo sapiens
  misc_RNA (1)...(19): siRNA sense strand
caaccuagaauauguuaag

SEQ ID NO: 2178378 - RNA, 19 nt, Homo sapiens
  misc_RNA (1)...(19): siRNA sense strand
gaacuucaaccaggaucaa

SEQ ID NO: 2178379 - RNA, 19 nt, Homo sapiens
  misc_RNA (1)...(19): siRNA sense strand
uuuaagggcuacugggaaa

SEQ ID NO: 2178380 - RNA, 19 nt, Homo sapiens
  misc_RNA (1)...(19): siRNA sense strand
gagaaccaucuguuacuga

SEQ ID NO: 2178381 - RNA, 19 nt, Homo sapiens
  misc_RNA (1)...(19): siRNA sense strand
ugacuuuguugguugaaau

SEQ ID NO: 2178382 - RNA, 19 nt, Homo sapiens
  misc_RNA (1)...(19): siRNA sense strand
gugcuugacuuuguugguu

SEQ ID NO: 2178383 - RNA, 19 nt, Homo sapiens
  misc_RNA (1)...(19): siRNA sense strand
caaggaguaucuuaaaaug

SEQ ID NO: 2178384 - RNA, 19 nt, Homo sapiens
  misc_RNA (1)...(19): siRNA sense strand
ccauucauuugaccucauu

SEQ ID NO: 2178385 - RNA, 19 nt, Homo sapiens
  misc_RNA (1)...(19): siRNA sense strand
gaagaaaucaaggaguauc

SEQ ID NO: 2178386 - RNA, 19 nt, Homo sapiens
  misc_RNA (1)...(19): siRNA sense strand
cagauuauucaguggauuu

SEQ ID NO: 2178387 - RNA, 19 nt, Homo sapiens
  misc_RNA (1)...(19): siRNA sense strand
caaguuuaguucagucuac

SEQ ID NO: 2178388 - RNA, 19 nt, Homo sapiens
  misc_RNA (1)...(19): siRNA sense strand
ugucgucuuuggauuauau

SEQ ID NO: 2178389 - RNA, 19 nt, Homo sapiens
  misc_RNA (1)...(19): siRNA sense strand
aagcaacucaggauuuaaa

SEQ ID NO: 2178390 - RNA, 19 nt, Homo sapiens
  misc_RNA (1)...(19): siRNA sense strand
cauaaaggacacagcaaga

SEQ ID NO: 2178391 - RNA, 19 nt, Homo sapiens
  misc_RNA (1)...(19): siRNA sense strand
gcuaccucauugcccuuua

SEQ ID NO: 2178392 - RNA, 19 nt, Homo sapiens
  misc_RNA (1)...(19): siRNA sense strand
agcaagaccuucaccacuu

SEQ ID NO: 2178393 - RNA, 19 nt, Homo sapiens
  misc_RNA (1)...(19): siRNA sense strand
agccacacuuccacuauaa

SEQ ID NO: 2178394 - RNA, 19 nt, Homo sapiens
  misc_RNA (1)...(19): siRNA sense strand
aauccacccuguuaacaau

SEQ ID NO: 2178395 - RNA, 19 nt, Homo sapiens
  misc_RNA (1)...(19): siRNA sense strand
ccaccuacuuaauguucaa

SEQ ID NO: 2178396 - RNA, 19 nt, Homo sapiens
  misc_RNA (1)...(19): siRNA sense strand
gcaaguuuaguucagucua

SEQ ID NO: 2178397 - RNA, 19 nt, Homo sapiens
  misc_RNA (1)...(19): siRNA sense strand
acuccaaccuagaauaugu

SEQ ID NO: 2178398 - RNA, 19 nt, Homo sapiens
  misc_RNA (1)...(19): siRNA sense strand
uuaugaaggugcucagcuu

SEQ ID NO: 2178399 - RNA, 19 nt, Homo sapiens
  misc_RNA (1)...(19): siRNA sense strand
ucacuuggaauacagaaau

SEQ ID NO: 2178400 - RNA, 19 nt, Homo sapiens
  misc_RNA (1)...(19): siRNA sense strand
acacuugcuuagacuguga

SEQ ID NO: 2178401 - RNA, 19 nt, Homo sapiens
  misc_RNA (1)...(19): siRNA sense strand
ccagucgucuuuauuacag

SEQ ID NO: 2178402 - RNA, 19 nt, Homo sapiens
  misc_RNA (1)...(19): siRNA sense strand
ggauuguuguucuggaaag

SEQ ID NO: 2178403 - RNA, 19 nt, Homo sapiens
  misc_RNA (1)...(19): siRNA sense strand
ugaacuccaaccuagaaua

SEQ ID NO: 2178404 - RNA, 19 nt, Homo sapiens
  misc_RNA (1)...(19): siRNA sense strand
gcucagccagucgucuuua

SEQ ID NO: 2178405 - RNA, 19 nt, Homo sapiens
  misc_RNA (1)...(19): siRNA sense strand
gcuguggauagcuauauuu

SEQ ID NO: 2178406 - RNA, 19 nt, Homo sapiens
  misc_RNA (1)...(19): siRNA sense strand
gagaguggcacaaccugau

SEQ ID NO: 2178407 - RNA, 19 nt, Homo sapiens
  misc_RNA (1)...(19): siRNA sense strand
uagcugaggauuucguuug

SEQ ID NO: 2178408 - RNA, 19 nt, Homo sapiens
  misc_RNA (1)...(19): siRNA sense strand
gaaccaucuguuacugauu

SEQ ID NO: 2178409 - RNA, 19 nt, Homo sapiens
  misc_RNA (1)...(19): siRNA sense strand
agaaccaucuguuacugau

SEQ ID NO: 2178410 - RNA, 19 nt, Homo sapiens
  misc_RNA (1)...(19): siRNA sense strand
ggcuguggauagcuauauu

SEQ ID NO: 2178411 - RNA, 19 nt, Homo sapiens
  misc_RNA (1)...(19): siRNA sense strand
ggggacaaaucacauauuc

SEQ ID NO: 2178412 - RNA, 19 nt, Homo sapiens
  misc_RNA (1)...(19): siRNA sense strand
ccaugucgcccaagaagau

SEQ ID NO: 2178413 - RNA, 19 nt, Homo sapiens
  misc_RNA (1)...(19): siRNA sense strand
ugaacaauuucguauccau

SEQ ID NO: 2178414 - RNA, 19 nt, Homo sapiens
  misc_RNA (1)...(19): siRNA sense strand
uugauaugcuaccucauug

SEQ ID NO: 2178415 - RNA, 19 nt, Homo sapiens
  misc_RNA (1)...(19): siRNA sense strand
ggaaagaggcccuauuaaa

SEQ ID NO: 2178416 - RNA, 19 nt, Homo sapiens
  misc_RNA (1)...(19): siRNA sense strand
ggaauucccuugacuucua

SEQ ID NO: 2178417 - RNA, 19 nt, Homo sapiens
  misc_RNA (1)...(19): siRNA sense strand
ggaggauccuuacgaguua

SEQ ID NO: 2178418 - RNA, 19 nt, Homo sapiens
  misc_RNA (1)...(19): siRNA sense strand
gaggaaagaggcccuauua

SEQ ID NO: 2178419 - RNA, 19 nt, Homo sapiens
  misc_RNA (1)...(19): siRNA sense strand
gauacuagcuacagacauu

SEQ ID NO: 2178420 - RNA, 19 nt, Homo sapiens
  misc_RNA (1)...(19): siRNA sense strand
gaaauuggagccuauauug

SEQ ID NO: 2178421 - RNA, 19 nt, Homo sapiens
  misc_RNA (1)...(19): siRNA sense strand
gaaagaggcccuauuaaag

SEQ ID NO: 2178422 - RNA, 19 nt, Homo sapiens
  misc_RNA (1)...(19): siRNA sense strand
caagauaaccucaaacuau

SEQ ID NO: 2178423 - RNA, 19 nt, Homo sapiens
  misc_RNA (1)...(19): siRNA sense strand
gagaauagguuuggaggaa

SEQ ID NO: 2178424 - RNA, 19 nt, Homo sapiens
  misc_RNA (1)...(19): siRNA sense strand
gcauuuagccuucaugaaa

SEQ ID NO: 2178425 - RNA, 19 nt, Homo sapiens
  misc_RNA (1)...(19): siRNA sense strand
gcacaggacugggcacauu

SEQ ID NO: 2178426 - RNA, 19 nt, Homo sapiens
  misc_RNA (1)...(19): siRNA sense strand
gcacaucucaccucgauaa

SEQ ID NO: 2178427 - RNA, 19 nt, Homo sapiens
  misc_RNA (1)...(19): siRNA sense strand
gaaguucagaguaucauua

SEQ ID NO: 2178428 - RNA, 19 nt, Homo sapiens
  misc_RNA (1)...(19): siRNA sense strand
ggagauugaugcuaagcua

SEQ ID NO: 2178429 - RNA, 19 nt, Homo sapiens
  misc_RNA (1)...(19): siRNA sense strand
gcucagcucugcaggauga

SEQ ID NO: 2178430 - RNA, 19 nt, Homo sapiens
  misc_RNA (1)...(19): siRNA sense strand
caacaucaagagcaaauua

SEQ ID NO: 2178431 - RNA, 19 nt, Homo sapiens
  misc_RNA (1)...(19): siRNA sense strand
guacaauaguuuagacuug

SEQ ID NO: 2178432 - RNA, 19 nt, Homo sapiens
  misc_RNA (1)...(19): siRNA sense strand
ggacagagagcuuagauca

SEQ ID NO: 2178433 - RNA, 19 nt, Homo sapiens
  misc_RNA (1)...(19): siRNA sense strand
uggaacagcucaagaagaa

SEQ ID NO: 2178434 - RNA, 19 nt, Homo sapiens
  misc_RNA (1)...(19): siRNA sense strand
gguaguaaguacaauaguu

SEQ ID NO: 2178435 - RNA, 19 nt, Homo sapiens
  misc_RNA (1)...(19): siRNA sense strand
caaaggaacagcggcauua

SEQ ID NO: 2178436 - RNA, 19 nt, Homo sapiens
  misc_RNA (1)...(19): siRNA sense strand
gcauuaagcaccgcauuua

SEQ ID NO: 2178437 - RNA, 19 nt, Homo sapiens
  misc_RNA (1)...(19): siRNA sense strand
acagagagcuugaucuugu

SEQ ID NO: 2178438 - RNA, 19 nt, Homo sapiens
  misc_RNA (1)...(19): siRNA sense strand
ucaguuaccuucacagaug

SEQ ID NO: 2178439 - RNA, 19 nt, Homo sapiens
  misc_RNA (1)...(19): siRNA sense strand
ugacauagcauucaucaug

SEQ ID NO: 2178440 - RNA, 19 nt, Homo sapiens
  misc_RNA (1)...(19): siRNA sense strand
ggagagaucaccaaaggaa

SEQ ID NO: 2178441 - RNA, 19 nt, Homo sapiens
  misc_RNA (1)...(19): siRNA sense strand
ggacauaguggagaaauug

SEQ ID NO: 2178442 - RNA, 19 nt, Homo sapiens
  misc_RNA (1)...(19): siRNA sense strand
gacuaaacauguccagaaa

SEQ ID NO: 2178443 - RNA, 19 nt, Homo sapiens
  misc_RNA (1)...(19): siRNA sense strand
gcaccuguuucuacggaua

SEQ ID NO: 2178444 - RNA, 19 nt, Homo sapiens
  misc_RNA (1)...(19): siRNA sense strand
ggacauagacagagagcuu

SEQ ID NO: 2178445 - RNA, 19 nt, Homo sapiens
  misc_RNA (1)...(19): siRNA sense strand
cagcagaacuccagaaggu

SEQ ID NO: 2178446 - RNA, 19 nt, Homo sapiens
  misc_RNA (1)...(19): siRNA sense strand
gaauucccuugacuucuaa

SEQ ID NO: 2178447 - RNA, 19 nt, Homo sapiens
  misc_RNA (1)...(19): siRNA sense strand
gauaagccauacaguagug

SEQ ID NO: 2178448 - RNA, 19 nt, Homo sapiens
  misc_RNA (1)...(19): siRNA sense strand
ggaacucaauccacauuca

SEQ ID NO: 2178449 - RNA, 19 nt, Homo sapiens
  misc_RNA (1)...(19): siRNA sense strand
ccaaacagaaucucaacua

SEQ ID NO: 2178450 - RNA, 19 nt, Homo sapiens
  misc_RNA (1)...(19): siRNA sense strand
gaacagacugaaagcauug

SEQ ID NO: 2178451 - RNA, 19 nt, Homo sapiens
  misc_RNA (1)...(19): siRNA sense strand
ggacugggcacauuaggaa

SEQ ID NO: 2178452 - RNA, 19 nt, Homo sapiens
  misc_RNA (1)...(19): siRNA sense strand
uugcuggucuuucucauua

SEQ ID NO: 2178453 - RNA, 19 nt, Homo sapiens
  misc_RNA (1)...(19): siRNA sense strand
caacagaagccacggcaaa

SEQ ID NO: 2178454 - RNA, 19 nt, Homo sapiens
  misc_RNA (1)...(19): siRNA sense strand
gagccuauauugccaagau

SEQ ID NO: 2178455 - RNA, 19 nt, Homo sapiens
  misc_RNA (1)...(19): siRNA sense strand
aaagccaucuguuaucaaa

SEQ ID NO: 2178456 - RNA, 19 nt, Homo sapiens
  misc_RNA (1)...(19): siRNA sense strand
gaucauggcaagucucauu

SEQ ID NO: 2178457 - RNA, 19 nt, Homo sapiens
  misc_RNA (1)...(19): siRNA sense strand
gcagaacuccagaagguuu

SEQ ID NO: 2178458 - RNA, 19 nt, Homo sapiens
  misc_RNA (1)...(19): siRNA sense strand
aacagaaucucaacuaguu

SEQ ID NO: 2178459 - RNA, 19 nt, Homo sapiens
  misc_RNA (1)...(19): siRNA sense strand
ggagguauugauugauuua

SEQ ID NO: 2178460 - RNA, 19 nt, Homo sapiens
  misc_RNA (1)...(19): siRNA sense strand
gagaaggacuaaacauguc

SEQ ID NO: 2178461 - RNA, 19 nt, Homo sapiens
  misc_RNA (1)...(19): siRNA sense strand
aaagaaaucccgggacaua

SEQ ID NO: 2178462 - RNA, 19 nt, Homo sapiens
  misc_RNA (1)...(19): siRNA sense strand
gagcaaauuauacagauga

SEQ ID NO: 2178463 - RNA, 19 nt, Homo sapiens
  misc_RNA (1)...(19): siRNA sense strand
caagcuauaugacuucuag

SEQ ID NO: 2178464 - RNA, 19 nt, Homo sapiens
  misc_RNA (1)...(19): siRNA sense strand
caaaagcagucaaagcaua

SEQ ID NO: 2178465 - RNA, 19 nt, Homo sapiens
  misc_RNA (1)...(19): siRNA sense strand
ccucuagauugcauaguua

SEQ ID NO: 2178466 - RNA, 19 nt, Homo sapiens
  misc_RNA (1)...(19): siRNA sense strand
gauguuuccuuuagucaug

SEQ ID NO: 2178467 - RNA, 19 nt, Homo sapiens
  misc_RNA (1)...(19): siRNA sense strand
ccaaagccaucuguuauca

SEQ ID NO: 2178468 - RNA, 19 nt, Homo sapiens
  misc_RNA (1)...(19): siRNA sense strand
ugaguggaaucaaacagua

SEQ ID NO: 2178469 - RNA, 19 nt, Homo sapiens
  misc_RNA (1)...(19): siRNA sense strand
caaaguagaggaagaauac

SEQ ID NO: 2178470 - RNA, 19 nt, Homo sapiens
  misc_RNA (1)...(19): siRNA sense strand
ccgaccaguuugccaauua

SEQ ID NO: 2178471 - RNA, 19 nt, Homo sapiens
  misc_RNA (1)...(19): siRNA sense strand
aaaaggagauugaugcuaa

SEQ ID NO: 2178472 - RNA, 19 nt, Homo sapiens
  misc_RNA (1)...(19): siRNA sense strand
caaacagaaucucaacuag

SEQ ID NO: 2178473 - RNA, 19 nt, Homo sapiens
  misc_RNA (1)...(19): siRNA sense strand
ggaauuaacaggaggaaag

SEQ ID NO: 2178474 - RNA, 19 nt, Homo sapiens
  misc_RNA (1)...(19): siRNA sense strand
aagauaaccucaaacuaug

SEQ ID NO: 2178475 - RNA, 19 nt, Homo sapiens
  misc_RNA (1)...(19): siRNA sense strand
ggagaaauucagcuucaaa

SEQ ID NO: 2178476 - RNA, 19 nt, Homo sapiens
  misc_RNA (1)...(19): siRNA sense strand
ucaauaugcuaucagauuc

SEQ ID NO: 2178477 - RNA, 19 nt, Homo sapiens
  misc_RNA (1)...(19): siRNA sense strand
gcagaaauauguguaagac

SEQ ID NO: 2178478 - RNA, 19 nt, Homo sapiens
  misc_RNA (1)...(19): siRNA sense strand
gaagcagaaauauguguaa

SEQ ID NO: 2178479 - RNA, 19 nt, Homo sapiens
  misc_RNA (1)...(19): siRNA sense strand
gaucacacaguuucaggua

SEQ ID NO: 2178480 - RNA, 19 nt, Homo sapiens
  misc_RNA (1)...(19): siRNA sense strand
ucaguagacucacacuuga

SEQ ID NO: 2178481 - RNA, 19 nt, Homo sapiens
  misc_RNA (1)...(19): siRNA sense strand
ggcaagcaguccaauauca

SEQ ID NO: 2178482 - RNA, 19 nt, Homo sapiens
  misc_RNA (1)...(19): siRNA sense strand
ccacaaacccaaacagaau

SEQ ID NO: 2178483 - RNA, 19 nt, Homo sapiens
  misc_RNA (1)...(19): siRNA sense strand
gaucuuggaaaucucauaa

SEQ ID NO: 2178484 - RNA, 19 nt, Homo sapiens
  misc_RNA (1)...(19): siRNA sense strand
gguugucucucauccaauu

SEQ ID NO: 2178485 - RNA, 19 nt, Homo sapiens
  misc_RNA (1)...(19): siRNA sense strand
gaacagacggggaagcuua

SEQ ID NO: 2178486 - RNA, 19 nt, Homo sapiens
  misc_RNA (1)...(19): siRNA sense strand
gcggauaagccauacagua

SEQ ID NO: 2178487 - RNA, 19 nt, Homo sapiens
  misc_RNA (1)...(19): siRNA sense strand
aaacaggaauuucguagag

SEQ ID NO: 2178488 - RNA, 19 nt, Homo sapiens
  misc_RNA (1)...(19): siRNA sense strand
gacaaguccuuacacacaa

SEQ ID NO: 2178489 - RNA, 19 nt, Homo sapiens
  misc_RNA (1)...(19): siRNA sense strand
gaauucagccaguuuauac

SEQ ID NO: 2178490 - RNA, 19 nt, Homo sapiens
  misc_RNA (1)...(19): siRNA sense strand
ggugguauccucucaaaga

SEQ ID NO: 2178491 - RNA, 19 nt, Homo sapiens
  misc_RNA (1)...(19): siRNA sense strand
ggcugaagcucuagauguu

SEQ ID NO: 2178492 - RNA, 19 nt, Homo sapiens
  misc_RNA (1)...(19): siRNA sense strand
gagcuuagaucaccuugcu

SEQ ID NO: 2178493 - RNA, 19 nt, Homo sapiens
  misc_RNA (1)...(19): siRNA sense strand
uaaagcuucugaaacauca

SEQ ID NO: 2178494 - RNA, 19 nt, Homo sapiens
  misc_RNA (1)...(19): siRNA sense strand
cucaagaagugacagauuu

SEQ ID NO: 2178495 - RNA, 19 nt, Homo sapiens
  misc_RNA (1)...(19): siRNA sense strand
gaauagguuuggaggaaag

SEQ ID NO: 2178496 - RNA, 19 nt, Homo sapiens
  misc_RNA (1)...(19): siRNA sense strand
gcaagucucauuccaguca

SEQ ID NO: 2178497 - RNA, 19 nt, Homo sapiens
  misc_RNA (1)...(19): siRNA sense strand
caaaggaucacacaguuuc

SEQ ID NO: 2178498 - RNA, 19 nt, Homo sapiens
  misc_RNA (1)...(19): siRNA sense strand
gaaguucagcaacacauga

SEQ ID NO: 2178499 - RNA, 19 nt, Homo sapiens
  misc_RNA (1)...(19): siRNA sense strand
gaggaagaauaccaauugu

SEQ ID NO: 2178500 - RNA, 19 nt, Homo sapiens
  misc_RNA (1)...(19): siRNA sense strand
gcagauauugaucaccaua

SEQ ID NO: 2178501 - RNA, 19 nt, Homo sapiens
  misc_RNA (1)...(19): siRNA sense strand
ggaagcagaaauaugugua

SEQ ID NO: 2178502 - RNA, 19 nt, Homo sapiens
  misc_RNA (1)...(19): siRNA sense strand
gaagaaguucagaguauca

SEQ ID NO: 2178503 - RNA, 19 nt, Homo sapiens
  misc_RNA (1)...(19): siRNA sense strand
ucacacaguuucagguaau

SEQ ID NO: 2178504 - RNA, 19 nt, Homo sapiens
  misc_RNA (1)...(19): siRNA sense strand
cagcagccauacuuuauca

SEQ ID NO: 2178505 - RNA, 19 nt, Homo sapiens
  misc_RNA (1)...(19): siRNA sense strand
aguuaaagcuucugaaaca

SEQ ID NO: 2178506 - RNA, 19 nt, Homo sapiens
  misc_RNA (1)...(19): siRNA sense strand
caggagaaauucagcuuca

SEQ ID NO: 2178507 - RNA, 19 nt, Homo sapiens
  misc_RNA (1)...(19): siRNA sense strand
gggagguauugauugauuu

SEQ ID NO: 2178508 - RNA, 19 nt, Homo sapiens
  misc_RNA (1)...(19): siRNA sense strand
gaaugcaagugcugaguac

SEQ ID NO: 2178509 - RNA, 19 nt, Homo sapiens
  misc_RNA (1)...(19): siRNA sense strand
gaagaagaaagcccacuca

SEQ ID NO: 2178510 - RNA, 19 nt, Homo sapiens
  misc_RNA (1)...(19): siRNA sense strand
auugagaaaucccauagua

SEQ ID NO: 2178511 - RNA, 19 nt, Homo sapiens
  misc_RNA (1)...(19): siRNA sense strand
agaacagacugaaagcauu

SEQ ID NO: 2178512 - RNA, 19 nt, Homo sapiens
  misc_RNA (1)...(19): siRNA sense strand
uggaagggaugcaaguauu

SEQ ID NO: 2178513 - RNA, 19 nt, Homo sapiens
  misc_RNA (1)...(19): siRNA sense strand
gguauccucucaaagaaca

SEQ ID NO: 2178514 - RNA, 19 nt, Homo sapiens
  misc_RNA (1)...(19): siRNA sense strand
uaucuucccugacccauca

SEQ ID NO: 2178515 - RNA, 19 nt, Homo sapiens
  misc_RNA (1)...(19): siRNA sense strand
gcacuuggcuuugaauaua

SEQ ID NO: 2178516 - RNA, 19 nt, Homo sapiens
  misc_RNA (1)...(19): siRNA sense strand
gaagauauguucccaguuc

SEQ ID NO: 2178517 - RNA, 19 nt, Homo sapiens
  misc_RNA (1)...(19): siRNA sense strand
gaauauaaaugguggaaug

SEQ ID NO: 2178518 - RNA, 19 nt, Homo sapiens
  misc_RNA (1)...(19): siRNA sense strand
gaaaggagccaaagaaugu

SEQ ID NO: 2178519 - RNA, 19 nt, Homo sapiens
  misc_RNA (1)...(19): siRNA sense strand
gaaaucaggcacaaacaua

SEQ ID NO: 2178520 - RNA, 19 nt, Homo sapiens
  misc_RNA (1)...(19): siRNA sense strand
gaaagacacagauaaugua

SEQ ID NO: 2178521 - RNA, 19 nt, Homo sapiens
  misc_RNA (1)...(19): siRNA sense strand
guacaaaugugguagaauc

SEQ ID NO: 2178522 - RNA, 19 nt, Homo sapiens
  misc_RNA (1)...(19): siRNA sense strand
caacaauuauuccuucuga

SEQ ID NO: 2178523 - RNA, 19 nt, Homo sapiens
  misc_RNA (1)...(19): siRNA sense strand
gcacaaacauacucuacug

SEQ ID NO: 2178524 - RNA, 19 nt, Homo sapiens
  misc_RNA (1)...(19): siRNA sense strand
uaaagacgacucucaauuu

SEQ ID NO: 2178525 - RNA, 19 nt, Homo sapiens
  misc_RNA (1)...(19): siRNA sense strand
gauaauagacgguucauca

SEQ ID NO: 2178526 - RNA, 19 nt, Homo sapiens
  misc_RNA (1)...(19): siRNA sense strand
gaaggaaagacacagauaa

SEQ ID NO: 2178527 - RNA, 19 nt, Homo sapiens
  misc_RNA (1)...(19): siRNA sense strand
ggaaagacacagauaaugu

SEQ ID NO: 2178528 - RNA, 19 nt, Homo sapiens
  misc_RNA (1)...(19): siRNA sense strand
guaugccagucaacaauua

SEQ ID NO: 2178529 - RNA, 19 nt, Homo sapiens
  misc_RNA (1)...(19): siRNA sense strand
ggaaggagaagauaaugaa

SEQ ID NO: 2178530 - RNA, 19 nt, Homo sapiens
  misc_RNA (1)...(19): siRNA sense strand
caaagaauguagaccaugu

SEQ ID NO: 2178531 - RNA, 19 nt, Homo sapiens
  misc_RNA (1)...(19): siRNA sense strand
caggaaaccuuguaugugu

SEQ ID NO: 2178532 - RNA, 19 nt, Homo sapiens
  misc_RNA (1)...(19): siRNA sense strand
caaagaggcuuguauucca

SEQ ID NO: 2178533 - RNA, 19 nt, Homo sapiens
  misc_RNA (1)...(19): siRNA sense strand
ggucaagccugugcuggua

SEQ ID NO: 2178534 - RNA, 19 nt, Homo sapiens
  misc_RNA (1)...(19): siRNA sense strand
ucacagaugcuauuagauu

SEQ ID NO: 2178535 - RNA, 19 nt, Homo sapiens
  misc_RNA (1)...(19): siRNA sense strand
guaaagacgacucucaauu

SEQ ID NO: 2178536 - RNA, 19 nt, Homo sapiens
  misc_RNA (1)...(19): siRNA sense strand
gcagacaguugugcuauca

SEQ ID NO: 2178537 - RNA, 19 nt, Homo sapiens
  misc_RNA (1)...(19): siRNA sense strand
gaacuaaucagggucaaga

SEQ ID NO: 2178538 - RNA, 19 nt, Homo sapiens
  misc_RNA (1)...(19): siRNA sense strand
ucaaugacauggugaagau

SEQ ID NO: 2178539 - RNA, 19 nt, Homo sapiens
  misc_RNA (1)...(19): siRNA sense strand
agacacagauaauguacaa

SEQ ID NO: 2178540 - RNA, 19 nt, Homo sapiens
  misc_RNA (1)...(19): siRNA sense strand
caagagaggauuucaggaa

SEQ ID NO: 2178541 - RNA, 19 nt, Homo sapiens
  misc_RNA (1)...(19): siRNA sense strand
gagcaggagugauuucagu

SEQ ID NO: 2178542 - RNA, 19 nt, Homo sapiens
  misc_RNA (1)...(19): siRNA sense strand
ggagguggcuggagaucau

SEQ ID NO: 2178543 - RNA, 19 nt, Homo sapiens
  misc_RNA (1)...(19): siRNA sense strand
gaacuaggaagaauaacau

SEQ ID NO: 2178544 - RNA, 19 nt, Homo sapiens
  misc_RNA (1)...(19): siRNA sense strand
aagaggaaguuguauauuc

SEQ ID NO: 2178545 - RNA, 19 nt, Homo sapiens
  misc_RNA (1)...(19): siRNA sense strand
gaggaaggauccagugagu

SEQ ID NO: 2178546 - RNA, 19 nt, Homo sapiens
  misc_RNA (1)...(19): siRNA sense strand
aaacaagcuuacacccaua

SEQ ID NO: 2178547 - RNA, 19 nt, Homo sapiens
  misc_RNA (1)...(19): siRNA sense strand
ggaaggauccagugagugu

SEQ ID NO: 2178548 - RNA, 19 nt, Homo sapiens
  misc_RNA (1)...(19): siRNA sense strand
ggucagaugauuacacaaa

SEQ ID NO: 2178549 - RNA, 19 nt, Homo sapiens
  misc_RNA (1)...(19): siRNA sense strand
caauaaacagucacuacua

SEQ ID NO: 2178550 - RNA, 19 nt, Homo sapiens
  misc_RNA (1)...(19): siRNA sense strand
ccgaucaacugcugugaaa

SEQ ID NO: 2178551 - RNA, 19 nt, Homo sapiens
  misc_RNA (1)...(19): siRNA sense strand
gagguucugacaaugauua

SEQ ID NO: 2178552 - RNA, 19 nt, Homo sapiens
  misc_RNA (1)...(19): siRNA sense strand
gaagaaggaaagacacaga

SEQ ID NO: 2178553 - RNA, 19 nt, Homo sapiens
  misc_RNA (1)...(19): siRNA sense strand
ggaauuucuuugccugaga

SEQ ID NO: 2178554 - RNA, 19 nt, Homo sapiens
  misc_RNA (1)...(19): siRNA sense strand
aaagugcgauggaaugaau

SEQ ID NO: 2178555 - RNA, 19 nt, Homo sapiens
  misc_RNA (1)...(19): siRNA sense strand
ucucacagaugcuauuaga

SEQ ID NO: 2178556 - RNA, 19 nt, Homo sapiens
  misc_RNA (1)...(19): siRNA sense strand
ugacaaugauuaccugauc

SEQ ID NO: 2178557 - RNA, 19 nt, Homo sapiens
  misc_RNA (1)...(19): siRNA sense strand
aaaaugagguguaauccua

SEQ ID NO: 2178558 - RNA, 19 nt, Homo sapiens
  misc_RNA (1)...(19): siRNA sense strand
gccacuacauugagaaaga

SEQ ID NO: 2178559 - RNA, 19 nt, Homo sapiens
  misc_RNA (1)...(19): siRNA sense strand
gguguaauccuacuaaauc

SEQ ID NO: 2178560 - RNA, 19 nt, Homo sapiens
  misc_RNA (1)...(19): siRNA sense strand
gaagaggaaguuguauauu

SEQ ID NO: 2178561 - RNA, 19 nt, Homo sapiens
  misc_RNA (1)...(19): siRNA sense strand
gcucugaccugcuacuucu

SEQ ID NO: 2178562 - RNA, 19 nt, Homo sapiens
  misc_RNA (1)...(19): siRNA sense strand
gaagcuugcccucugugua

SEQ ID NO: 2178563 - RNA, 19 nt, Homo sapiens
  misc_RNA (1)...(19): siRNA sense strand
gaacuacaggcauccuuau

SEQ ID NO: 2178564 - RNA, 19 nt, Homo sapiens
  misc_RNA (1)...(19): siRNA sense strand
ugagaaaggagccaaagaa

SEQ ID NO: 2178565 - RNA, 19 nt, Homo sapiens
  misc_RNA (1)...(19): siRNA sense strand
uaaugaagaggaaguugua

SEQ ID NO: 2178566 - RNA, 19 nt, Homo sapiens
  misc_RNA (1)...(19): siRNA sense strand
aaucagaguuugcacuaug

SEQ ID NO: 2178567 - RNA, 19 nt, Homo sapiens
  misc_RNA (1)...(19): siRNA sense strand
ggaagaauaacauuugucu

SEQ ID NO: 2178568 - RNA, 19 nt, Homo sapiens
  misc_RNA (1)...(19): siRNA sense strand
gagaaaggagccaaagaau

SEQ ID NO: 2178569 - RNA, 19 nt, Homo sapiens
  misc_RNA (1)...(19): siRNA sense strand
gaauguauaagguguaaag

SEQ ID NO: 2178570 - RNA, 19 nt, Homo sapiens
  misc_RNA (1)...(19): siRNA sense strand
ugaagaggaaguuguauau

SEQ ID NO: 2178571 - RNA, 19 nt, Homo sapiens
  misc_RNA (1)...(19): siRNA sense strand
ccaacaauauaacagacuu

SEQ ID NO: 2178572 - RNA, 19 nt, Homo sapiens
  misc_RNA (1)...(19): siRNA sense strand
aauagacgguucaucaaug

SEQ ID NO: 2178573 - RNA, 19 nt, Homo sapiens
  misc_RNA (1)...(19): siRNA sense strand
gccaaagaauguauaaggu

SEQ ID NO: 2178574 - RNA, 19 nt, Homo sapiens
  misc_RNA (1)...(19): siRNA sense strand
aauaaacagucacuacuag

SEQ ID NO: 2178575 - RNA, 19 nt, Homo sapiens
  misc_RNA (1)...(19): siRNA sense strand
ugagggagccugcaagaga

SEQ ID NO: 2178576 - RNA, 19 nt, Homo sapiens
  misc_RNA (1)...(19): siRNA sense strand
gagguguaauccuacuaaa

SEQ ID NO: 2178577 - RNA, 19 nt, Homo sapiens
  misc_RNA (1)...(19): siRNA sense strand
cuaaucagggucaagauaa

SEQ ID NO: 2178578 - RNA, 19 nt, Homo sapiens
  misc_RNA (1)...(19): siRNA sense strand
cacagaugcuauuagauug

SEQ ID NO: 2178579 - RNA, 19 nt, Homo sapiens
  misc_RNA (1)...(19): siRNA sense strand
gauaauguacaaguggaua

SEQ ID NO: 2178580 - RNA, 19 nt, Homo sapiens
  misc_RNA (1)...(19): siRNA sense strand
ccacuacauugagaaagaa

SEQ ID NO: 2178581 - RNA, 19 nt, Homo sapiens
  misc_RNA (1)...(19): siRNA sense strand
caugguggauauuaauaga

SEQ ID NO: 2178582 - RNA, 19 nt, Homo sapiens
  misc_RNA (1)...(19): siRNA sense strand
acaccuaccuguccauaca

SEQ ID NO: 2178583 - RNA, 19 nt, Homo sapiens
  misc_RNA (1)...(19): siRNA sense strand
uaaugacgacuaacucaaa

SEQ ID NO: 2178584 - RNA, 19 nt, Homo sapiens
  misc_RNA (1)...(19): siRNA sense strand
uaccagaugugcauuucuu

SEQ ID NO: 2178585 - RNA, 19 nt, Homo sapiens
  misc_RNA (1)...(19): siRNA sense strand
aaagacgacucucaauuuu

SEQ ID NO: 2178586 - RNA, 19 nt, Homo sapiens
  misc_RNA (1)...(19): siRNA sense strand
ccaaauaccagaugugcau

SEQ ID NO: 2178587 - RNA, 19 nt, Homo sapiens
  misc_RNA (1)...(19): siRNA sense strand
ucauaggagucacaguuga

SEQ ID NO: 2178588 - RNA, 19 nt, Homo sapiens
  misc_RNA (1)...(19): siRNA sense strand
gaguuugcacuaugacuuu

SEQ ID NO: 2178589 - RNA, 19 nt, Homo sapiens
  misc_RNA (1)...(19): siRNA sense strand
cuaggaagaauaacauuug

SEQ ID NO: 2178590 - RNA, 19 nt, Homo sapiens
  misc_RNA (1)...(19): siRNA sense strand
ccagauccauacuccaugu

SEQ ID NO: 2178591 - RNA, 19 nt, Homo sapiens
  misc_RNA (1)...(19): siRNA sense strand
ggagccaaagaauguauaa

SEQ ID NO: 2178592 - RNA, 19 nt, Homo sapiens
  misc_RNA (1)...(19): siRNA sense strand
agacaguugugcuaucaug

SEQ ID NO: 2178593 - RNA, 19 nt, Homo sapiens
  misc_RNA (1)...(19): siRNA sense strand
caacaucuuguauuaaugg

SEQ ID NO: 2178594 - RNA, 19 nt, Homo sapiens
  misc_RNA (1)...(19): siRNA sense strand
gagcagccuuaucaucaca

SEQ ID NO: 2178595 - RNA, 19 nt, Homo sapiens
  misc_RNA (1)...(19): siRNA sense strand
guaccaacaauauaacaga

SEQ ID NO: 2178596 - RNA, 19 nt, Homo sapiens
  misc_RNA (1)...(19): siRNA sense strand
guccauacaucaggucuau

SEQ ID NO: 2178597 - RNA, 19 nt, Homo sapiens
  misc_RNA (1)...(19): siRNA sense strand
uaaucagggucaagauaau

SEQ ID NO: 2178598 - RNA, 19 nt, Homo sapiens
  misc_RNA (1)...(19): siRNA sense strand
aacaauggaucaucuucuu

SEQ ID NO: 2178599 - RNA, 19 nt, Homo sapiens
  misc_RNA (1)...(19): siRNA sense strand
agaagauaaugaagaggaa

SEQ ID NO: 2178600 - RNA, 19 nt, Homo sapiens
  misc_RNA (1)...(19): siRNA sense strand
gaagaagauggcucucugu

SEQ ID NO: 2178601 - RNA, 19 nt, Homo sapiens
  misc_RNA (1)...(19): siRNA sense strand
agaaggaaagacacagaua

SEQ ID NO: 2178602 - RNA, 19 nt, Homo sapiens
  misc_RNA (1)...(19): siRNA sense strand
gcaaagaggcuuguauucc

SEQ ID NO: 2178603 - RNA, 19 nt, Homo sapiens
  misc_RNA (1)...(19): siRNA sense strand
ggugaagauuuauucuauc

SEQ ID NO: 2178604 - RNA, 19 nt, Homo sapiens
  misc_RNA (1)...(19): siRNA sense strand
ucaagccugugcugguaaa

SEQ ID NO: 2178605 - RNA, 19 nt, Homo sapiens
  misc_RNA (1)...(19): siRNA sense strand
ggauuuaaaccaccaacau

SEQ ID NO: 2178606 - RNA, 19 nt, Homo sapiens
  misc_RNA (1)...(19): siRNA sense strand
gaucuuaaacuugcauauc

SEQ ID NO: 2178607 - RNA, 19 nt, Homo sapiens
  misc_RNA (1)...(19): siRNA sense strand
gauggaaccaaagaaugua

SEQ ID NO: 2178608 - RNA, 19 nt, Homo sapiens
  misc_RNA (1)...(19): siRNA sense strand
gugaaacgguugacuuuug

SEQ ID NO: 2178609 - RNA, 19 nt, Homo sapiens
  misc_RNA (1)...(19): siRNA sense strand
cacuuggcuuugaauauaa

SEQ ID NO: 2178610 - RNA, 19 nt, Homo sapiens
  misc_RNA (1)...(19): siRNA sense strand
ccaggccacuacauugaga

SEQ ID NO: 2178611 - RNA, 19 nt, Homo sapiens
  misc_RNA (1)...(19): siRNA sense strand
uaaacagucacuacuagga

SEQ ID NO: 2178612 - RNA, 19 nt, Homo sapiens
  misc_RNA (1)...(19): siRNA sense strand
agaacuacaggcauccuua

SEQ ID NO: 2178613 - RNA, 19 nt, Homo sapiens
  misc_RNA (1)...(19): siRNA sense strand
auacucuacuggagaacua

SEQ ID NO: 2178614 - RNA, 19 nt, Homo sapiens
  misc_RNA (1)...(19): siRNA sense strand
guacggagcaugacuucca

SEQ ID NO: 2178615 - RNA, 19 nt, Homo sapiens
  misc_RNA (1)...(19): siRNA sense strand
gcacuuggcuuugaauaua

SEQ ID NO: 2178616 - RNA, 19 nt, Homo sapiens
  misc_RNA (1)...(19): siRNA sense strand
gaagauauguucccaguuc

SEQ ID NO: 2178617 - RNA, 19 nt, Homo sapiens
  misc_RNA (1)...(19): siRNA sense strand
gaauauaaaugguggaaug

SEQ ID NO: 2178618 - RNA, 19 nt, Homo sapiens
  misc_RNA (1)...(19): siRNA sense strand
gaaaggagccaaagaaugu

SEQ ID NO: 2178619 - RNA, 19 nt, Homo sapiens
  misc_RNA (1)...(19): siRNA sense strand
gaaaucaggcacaaacaua

SEQ ID NO: 2178620 - RNA, 19 nt, Homo sapiens
  misc_RNA (1)...(19): siRNA sense strand
gaaagacacagauaaugua

SEQ ID NO: 2178621 - RNA, 19 nt, Homo sapiens
  misc_RNA (1)...(19): siRNA sense strand
guacaaaugugguagaauc

SEQ ID NO: 2178622 - RNA, 19 nt, Homo sapiens
  misc_RNA (1)...(19): siRNA sense strand
caacaauuauuccuucuga

SEQ ID NO: 2178623 - RNA, 19 nt, Homo sapiens
  misc_RNA (1)...(19): siRNA sense strand
gcacaaacauacucuacug

SEQ ID NO: 2178624 - RNA, 19 nt, Homo sapiens
  misc_RNA (1)...(19): siRNA sense strand
uaaagacgacucucaauuu

SEQ ID NO: 2178625 - RNA, 19 nt, Homo sapiens
  misc_RNA (1)...(19): siRNA sense strand
gauaauagacgguucauca

SEQ ID NO: 2178626 - RNA, 19 nt, Homo sapiens
  misc_RNA (1)...(19): siRNA sense strand
gaaggaaagacacagauaa

SEQ ID NO: 2178627 - RNA, 19 nt, Homo sapiens
  misc_RNA (1)...(19): siRNA sense strand
ggaaagacacagauaaugu

SEQ ID NO: 2178628 - RNA, 19 nt, Homo sapiens
  misc_RNA (1)...(19): siRNA sense strand
guaugccagucaacaauua

SEQ ID NO: 2178629 - RNA, 19 nt, Homo sapiens
  misc_RNA (1)...(19): siRNA sense strand
ggaaggagaagauaaugaa

SEQ ID NO: 2178630 - RNA, 19 nt, Homo sapiens
  misc_RNA (1)...(19): siRNA sense strand
caaagaauguagaccaugu

SEQ ID NO: 2178631 - RNA, 19 nt, Homo sapiens
  misc_RNA (1)...(19): siRNA sense strand
caggaaaccuuguaugugu

SEQ ID NO: 2178632 - RNA, 19 nt, Homo sapiens
  misc_RNA (1)...(19): siRNA sense strand
caaagaggcuuguauucca

SEQ ID NO: 2178633 - RNA, 19 nt, Homo sapiens
  misc_RNA (1)...(19): siRNA sense strand
ggucaagccugugcuggua

SEQ ID NO: 2178634 - RNA, 19 nt, Homo sapiens
  misc_RNA (1)...(19): siRNA sense strand
ucacagaugcuauuagauu

SEQ ID NO: 2178635 - RNA, 19 nt, Homo sapiens
  misc_RNA (1)...(19): siRNA sense strand
guaaagacgacucucaauu

SEQ ID NO: 2178636 - RNA, 19 nt, Homo sapiens
  misc_RNA (1)...(19): siRNA sense strand
gcagacaguugugcuauca

SEQ ID NO: 2178637 - RNA, 19 nt, Homo sapiens
  misc_RNA (1)...(19): siRNA sense strand
gaacuaaucagggucaaga

SEQ ID NO: 2178638 - RNA, 19 nt, Homo sapiens
  misc_RNA (1)...(19): siRNA sense strand
ucaaugacauggugaagau

SEQ ID NO: 2178639 - RNA, 19 nt, Homo sapiens
  misc_RNA (1)...(19): siRNA sense strand
agacacagauaauguacaa

SEQ ID NO: 2178640 - RNA, 19 nt, Homo sapiens
  misc_RNA (1)...(19): siRNA sense strand
caagagaggauuucaggaa

SEQ ID NO: 2178641 - RNA, 19 nt, Homo sapiens
  misc_RNA (1)...(19): siRNA sense strand
gagcaggagugauuucagu

SEQ ID NO: 2178642 - RNA, 19 nt, Homo sapiens
  misc_RNA (1)...(19): siRNA sense strand
ggagguggcuggagaucau

SEQ ID NO: 2178643 - RNA, 19 nt, Homo sapiens
  misc_RNA (1)...(19): siRNA sense strand
gaacuaggaagaauaacau

SEQ ID NO: 2178644 - RNA, 19 nt, Homo sapiens
  misc_RNA (1)...(19): siRNA sense strand
aagaggaaguuguauauuc

SEQ ID NO: 2178645 - RNA, 19 nt, Homo sapiens
  misc_RNA (1)...(19): siRNA sense strand
gaggaaggauccagugagu

SEQ ID NO: 2178646 - RNA, 19 nt, Homo sapiens
  misc_RNA (1)...(19): siRNA sense strand
aaacaagcuuacacccaua

SEQ ID NO: 2178647 - RNA, 19 nt, Homo sapiens
  misc_RNA (1)...(19): siRNA sense strand
ggaaggauccagugagugu

SEQ ID NO: 2178648 - RNA, 19 nt, Homo sapiens
  misc_RNA (1)...(19): siRNA sense strand
ggucagaugauuacacaaa

SEQ ID NO: 2178649 - RNA, 19 nt, Homo sapiens
  misc_RNA (1)...(19): siRNA sense strand
caauaaacagucacuacua

SEQ ID NO: 2178650 - RNA, 19 nt, Homo sapiens
  misc_RNA (1)...(19): siRNA sense strand
ccgaucaacugcugugaaa

SEQ ID NO: 2178651 - RNA, 19 nt, Homo sapiens
  misc_RNA (1)...(19): siRNA sense strand
gagguucugacaaugauua

SEQ ID NO: 2178652 - RNA, 19 nt, Homo sapiens
  misc_RNA (1)...(19): siRNA sense strand
gaagaaggaaagacacaga

SEQ ID NO: 2178653 - RNA, 19 nt, Homo sapiens
  misc_RNA (1)...(19): siRNA sense strand
ggaauuucuuugccugaga

SEQ ID NO: 2178654 - RNA, 19 nt, Homo sapiens
  misc_RNA (1)...(19): siRNA sense strand
aaagugcgauggaaugaau

SEQ ID NO: 2178655 - RNA, 19 nt, Homo sapiens
  misc_RNA (1)...(19): siRNA sense strand
ucucacagaugcuauuaga

SEQ ID NO: 2178656 - RNA, 19 nt, Homo sapiens
  misc_RNA (1)...(19): siRNA sense strand
ugacaaugauuaccugauc

SEQ ID NO: 2178657 - RNA, 19 nt, Homo sapiens
  misc_RNA (1)...(19): siRNA sense strand
aaaaugagguguaauccua

SEQ ID NO: 2178658 - RNA, 19 nt, Homo sapiens
  misc_RNA (1)...(19): siRNA sense strand
gccacuacauugagaaaga

SEQ ID NO: 2178659 - RNA, 19 nt, Homo sapiens
  misc_RNA (1)...(19): siRNA sense strand
gguguaauccuacuaaauc

SEQ ID NO: 2178660 - RNA, 19 nt, Homo sapiens
  misc_RNA (1)...(19): siRNA sense strand
gaagaggaaguuguauauu

SEQ ID NO: 2178661 - RNA, 19 nt, Homo sapiens
  misc_RNA (1)...(19): siRNA sense strand
gcucugaccugcuacuucu

SEQ ID NO: 2178662 - RNA, 19 nt, Homo sapiens
  misc_RNA (1)...(19): siRNA sense strand
gaacuacaggcauccuuau

SEQ ID NO: 2178663 - RNA, 19 nt, Homo sapiens
  misc_RNA (1)...(19): siRNA sense strand
gaagcuugcccucugugua

SEQ ID NO: 2178664 - RNA, 19 nt, Homo sapiens
  misc_RNA (1)...(19): siRNA sense strand
ugagaaaggagccaaagaa

SEQ ID NO: 2178665 - RNA, 19 nt, Homo sapiens
  misc_RNA (1)...(19): siRNA sense strand
uaaugaagaggaaguugua

SEQ ID NO: 2178666 - RNA, 19 nt, Homo sapiens
  misc_RNA (1)...(19): siRNA sense strand
aaucagaguuugcacuaug

SEQ ID NO: 2178667 - RNA, 19 nt, Homo sapiens
  misc_RNA (1)...(19): siRNA sense strand
ggaagaauaacauuugucu

SEQ ID NO: 2178668 - RNA, 19 nt, Homo sapiens
  misc_RNA (1)...(19): siRNA sense strand
gagaaaggagccaaagaau

SEQ ID NO: 2178669 - RNA, 19 nt, Homo sapiens
  misc_RNA (1)...(19): siRNA sense strand
gaauguauaagguguaaag

SEQ ID NO: 2178670 - RNA, 19 nt, Homo sapiens
  misc_RNA (1)...(19): siRNA sense strand
ugaagaggaaguuguauau

SEQ ID NO: 2178671 - RNA, 19 nt, Homo sapiens
  misc_RNA (1)...(19): siRNA sense strand
ccaacaauauaacagacuu

SEQ ID NO: 2178672 - RNA, 19 nt, Homo sapiens
  misc_RNA (1)...(19): siRNA sense strand
aauagacgguucaucaaug

SEQ ID NO: 2178673 - RNA, 19 nt, Homo sapiens
  misc_RNA (1)...(19): siRNA sense strand
gccaaagaauguauaaggu

SEQ ID NO: 2178674 - RNA, 19 nt, Homo sapiens
  misc_RNA (1)...(19): siRNA sense strand
aauaaacagucacuacuag

SEQ ID NO: 2178675 - RNA, 19 nt, Homo sapiens
  misc_RNA (1)...(19): siRNA sense strand
ugagggagccugcaagaga

SEQ ID NO: 2178676 - RNA, 19 nt, Homo sapiens
  misc_RNA (1)...(19): siRNA sense strand
gagguguaauccuacuaaa

SEQ ID NO: 2178677 - RNA, 19 nt, Homo sapiens
  misc_RNA (1)...(19): siRNA sense strand
cuaaucagggucaagauaa

SEQ ID NO: 2178678 - RNA, 19 nt, Homo sapiens
  misc_RNA (1)...(19): siRNA sense strand
cacagaugcuauuagauug

SEQ ID NO: 2178679 - RNA, 19 nt, Homo sapiens
  misc_RNA (1)...(19): siRNA sense strand
gauaauguacaaguggaua

SEQ ID NO: 2178680 - RNA, 19 nt, Homo sapiens
  misc_RNA (1)...(19): siRNA sense strand
ccacuacauugagaaagaa

SEQ ID NO: 2178681 - RNA, 19 nt, Homo sapiens
  misc_RNA (1)...(19): siRNA sense strand
caugguggauauuaauaga

SEQ ID NO: 2178682 - RNA, 19 nt, Homo sapiens
  misc_RNA (1)...(19): siRNA sense strand
acaccuaccuguccauaca

SEQ ID NO: 2178683 - RNA, 19 nt, Homo sapiens
  misc_RNA (1)...(19): siRNA sense strand
uaaugacgacuaacucaaa

SEQ ID NO: 2178684 - RNA, 19 nt, Homo sapiens
  misc_RNA (1)...(19): siRNA sense strand
uaccagaugugcauuucuu

SEQ ID NO: 2178685 - RNA, 19 nt, Homo sapiens
  misc_RNA (1)...(19): siRNA sense strand
aaagacgacucucaauuuu

SEQ ID NO: 2178686 - RNA, 19 nt, Homo sapiens
  misc_RNA (1)...(19): siRNA sense strand
ccaaauaccagaugugcau

SEQ ID NO: 2178687 - RNA, 19 nt, Homo sapiens
  misc_RNA (1)...(19): siRNA sense strand
ucauaggagucacaguuga

SEQ ID NO: 2178688 - RNA, 19 nt, Homo sapiens
  misc_RNA (1)...(19): siRNA sense strand
gaguuugcacuaugacuuu

SEQ ID NO: 2178689 - RNA, 19 nt, Homo sapiens
  misc_RNA (1)...(19): siRNA sense strand
cuaggaagaauaacauuug

SEQ ID NO: 2178690 - RNA, 19 nt, Homo sapiens
  misc_RNA (1)...(19): siRNA sense strand
ccagauccauacuccaugu

SEQ ID NO: 2178691 - RNA, 19 nt, Homo sapiens
  misc_RNA (1)...(19): siRNA sense strand
ggagccaaagaauguauaa

SEQ ID NO: 2178692 - RNA, 19 nt, Homo sapiens
  misc_RNA (1)...(19): siRNA sense strand
agacaguugugcuaucaug

SEQ ID NO: 2178693 - RNA, 19 nt, Homo sapiens
  misc_RNA (1)...(19): siRNA sense strand
caacaucuuguauuaaugg

SEQ ID NO: 2178694 - RNA, 19 nt, Homo sapiens
  misc_RNA (1)...(19): siRNA sense strand
gagcagccuuaucaucaca

SEQ ID NO: 2178695 - RNA, 19 nt, Homo sapiens
  misc_RNA (1)...(19): siRNA sense strand
guaccaacaauauaacaga

SEQ ID NO: 2178696 - RNA, 19 nt, Homo sapiens
  misc_RNA (1)...(19): siRNA sense strand
guccauacaucaggucuau

SEQ ID NO: 2178697 - RNA, 19 nt, Homo sapiens
  misc_RNA (1)...(19): siRNA sense strand
uaaucagggucaagauaau

SEQ ID NO: 2178698 - RNA, 19 nt, Homo sapiens
  misc_RNA (1)...(19): siRNA sense strand
aacaauggaucaucuucuu

SEQ ID NO: 2178699 - RNA, 19 nt, Homo sapiens
  misc_RNA (1)...(19): siRNA sense strand
agaagauaaugaagaggaa

SEQ ID NO: 2178700 - RNA, 19 nt, Homo sapiens
  misc_RNA (1)...(19): siRNA sense strand
gaagaagauggcucucugu

SEQ ID NO: 2178701 - RNA, 19 nt, Homo sapiens
  misc_RNA (1)...(19): siRNA sense strand
ucaagccugugcugguaaa

SEQ ID NO: 2178702 - RNA, 19 nt, Homo sapiens
  misc_RNA (1)...(19): siRNA sense strand
gcaaagaggcuuguauucc

SEQ ID NO: 2178703 - RNA, 19 nt, Homo sapiens
  misc_RNA (1)...(19): siRNA sense strand
ggugaagauuuauucuauc

SEQ ID NO: 2178704 - RNA, 19 nt, Homo sapiens
  misc_RNA (1)...(19): siRNA sense strand
ggauuuaaaccaccaacau

SEQ ID NO: 2178705 - RNA, 19 nt, Homo sapiens
  misc_RNA (1)...(19): siRNA sense strand
gaucuuaaacuugcauauc

SEQ ID NO: 2178706 - RNA, 19 nt, Homo sapiens
  misc_RNA (1)...(19): siRNA sense strand
agaaggaaagacacagaua

SEQ ID NO: 2178707 - RNA, 19 nt, Homo sapiens
  misc_RNA (1)...(19): siRNA sense strand
gauggaaccaaagaaugua

SEQ ID NO: 2178708 - RNA, 19 nt, Homo sapiens
  misc_RNA (1)...(19): siRNA sense strand
gugaaacgguugacuuuug

SEQ ID NO: 2178709 - RNA, 19 nt, Homo sapiens
  misc_RNA (1)...(19): siRNA sense strand
cacuuggcuuugaauauaa

SEQ ID NO: 2178710 - RNA, 19 nt, Homo sapiens
  misc_RNA (1)...(19): siRNA sense strand
ccaggcacauucagcaaca

SEQ ID NO: 2178711 - RNA, 19 nt, Homo sapiens
  misc_RNA (1)...(19): siRNA sense strand
uaaacagucacuacuagga

SEQ ID NO: 2178712 - RNA, 19 nt, Homo sapiens
  misc_RNA (1)...(19): siRNA sense strand
guacggagcaugacuucca

SEQ ID NO: 2178713 - RNA, 19 nt, Homo sapiens
  misc_RNA (1)...(19): siRNA sense strand
ccaggccacuacauugaga

SEQ ID NO: 2178714 - RNA, 19 nt, Homo sapiens
  misc_RNA (1)...(19): siRNA sense strand
auacucuacuggagaacua

SEQ ID NO: 2178715 - RNA, 19 nt, Homo sapiens
  misc_RNA (1)...(19): siRNA sense strand
gcacuuggcuuugaauaua

SEQ ID NO: 2178716 - RNA, 19 nt, Homo sapiens
  misc_RNA (1)...(19): siRNA sense strand
gaagauauguucccaguuc

SEQ ID NO: 2178717 - RNA, 19 nt, Homo sapiens
  misc_RNA (1)...(19): siRNA sense strand
gaauauaaaugguggaaug

SEQ ID NO: 2178718 - RNA, 19 nt, Homo sapiens
  misc_RNA (1)...(19): siRNA sense strand
gaaaggagccaaagaaugu

SEQ ID NO: 2178719 - RNA, 19 nt, Homo sapiens
  misc_RNA (1)...(19): siRNA sense strand
gaaaucaggcacaaacaua

SEQ ID NO: 2178720 - RNA, 19 nt, Homo sapiens
  misc_RNA (1)...(19): siRNA sense strand
gaaagacacagauaaugua

SEQ ID NO: 2178721 - RNA, 19 nt, Homo sapiens
  misc_RNA (1)...(19): siRNA sense strand
guacaaaugugguagaauc

SEQ ID NO: 2178722 - RNA, 19 nt, Homo sapiens
  misc_RNA (1)...(19): siRNA sense strand
caacaauuauuccuucuga

SEQ ID NO: 2178723 - RNA, 19 nt, Homo sapiens
  misc_RNA (1)...(19): siRNA sense strand
gcacaaacauacucuacug

SEQ ID NO: 2178724 - RNA, 19 nt, Homo sapiens
  misc_RNA (1)...(19): siRNA sense strand
uaaagacgacucucaauuu

SEQ ID NO: 2178725 - RNA, 19 nt, Homo sapiens
  misc_RNA (1)...(19): siRNA sense strand
gauaauagacgguucauca

SEQ ID NO: 2178726 - RNA, 19 nt, Homo sapiens
  misc_RNA (1)...(19): siRNA sense strand
gaaggaaagacacagauaa

SEQ ID NO: 2178727 - RNA, 19 nt, Homo sapiens
  misc_RNA (1)...(19): siRNA sense strand
ggaaagacacagauaaugu

SEQ ID NO: 2178728 - RNA, 19 nt, Homo sapiens
  misc_RNA (1)...(19): siRNA sense strand
guaugccagucaacaauua

SEQ ID NO: 2178729 - RNA, 19 nt, Homo sapiens
  misc_RNA (1)...(19): siRNA sense strand
ggaaggagaagauaaugaa

SEQ ID NO: 2178730 - RNA, 19 nt, Homo sapiens
  misc_RNA (1)...(19): siRNA sense strand
caaagaauguagaccaugu

SEQ ID NO: 2178731 - RNA, 19 nt, Homo sapiens
  misc_RNA (1)...(19): siRNA sense strand
caggaaaccuuguaugugu

SEQ ID NO: 2178732 - RNA, 19 nt, Homo sapiens
  misc_RNA (1)...(19): siRNA sense strand
caaagaggcuuguauucca

SEQ ID NO: 2178733 - RNA, 19 nt, Homo sapiens
  misc_RNA (1)...(19): siRNA sense strand
ggucaagccugugcuggua

SEQ ID NO: 2178734 - RNA, 19 nt, Homo sapiens
  misc_RNA (1)...(19): siRNA sense strand
ucacagaugcuauuagauu

SEQ ID NO: 2178735 - RNA, 19 nt, Homo sapiens
  misc_RNA (1)...(19): siRNA sense strand
guaaagacgacucucaauu

SEQ ID NO: 2178736 - RNA, 19 nt, Homo sapiens
  misc_RNA (1)...(19): siRNA sense strand
gcagacaguugugcuauca

SEQ ID NO: 2178737 - RNA, 19 nt, Homo sapiens
  misc_RNA (1)...(19): siRNA sense strand
gaacuaaucagggucaaga

SEQ ID NO: 2178738 - RNA, 19 nt, Homo sapiens
  misc_RNA (1)...(19): siRNA sense strand
ucaaugacauggugaagau

SEQ ID NO: 2178739 - RNA, 19 nt, Homo sapiens
  misc_RNA (1)...(19): siRNA sense strand
agacacagauaauguacaa

SEQ ID NO: 2178740 - RNA, 19 nt, Homo sapiens
  misc_RNA (1)...(19): siRNA sense strand
caagagaggauuucaggaa

SEQ ID NO: 2178741 - RNA, 19 nt, Homo sapiens
  misc_RNA (1)...(19): siRNA sense strand
gagcaggagugauuucagu

SEQ ID NO: 2178742 - RNA, 19 nt, Homo sapiens
  misc_RNA (1)...(19): siRNA sense strand
ggagguggcuggagaucau

SEQ ID NO: 2178743 - RNA, 19 nt, Homo sapiens
  misc_RNA (1)...(19): siRNA sense strand
gaacuaggaagaauaacau

SEQ ID NO: 2178744 - RNA, 19 nt, Homo sapiens
  misc_RNA (1)...(19): siRNA sense strand
aagaggaaguuguauauuc

SEQ ID NO: 2178745 - RNA, 19 nt, Homo sapiens
  misc_RNA (1)...(19): siRNA sense strand
gaggaaggauccagugagu

SEQ ID NO: 2178746 - RNA, 19 nt, Homo sapiens
  misc_RNA (1)...(19): siRNA sense strand
aaacaagcuuacacccaua

SEQ ID NO: 2178747 - RNA, 19 nt, Homo sapiens
  misc_RNA (1)...(19): siRNA sense strand
ggaaggauccagugagugu

SEQ ID NO: 2178748 - RNA, 19 nt, Homo sapiens
  misc_RNA (1)...(19): siRNA sense strand
ggucagaugauuacacaaa

SEQ ID NO: 2178749 - RNA, 19 nt, Homo sapiens
  misc_RNA (1)...(19): siRNA sense strand
caauaaacagucacuacua

SEQ ID NO: 2178750 - RNA, 19 nt, Homo sapiens
  misc_RNA (1)...(19): siRNA sense strand
ccgaucaacugcugugaaa

SEQ ID NO: 2178751 - RNA, 19 nt, Homo sapiens
  misc_RNA (1)...(19): siRNA sense strand
gagguucugacaaugauua

SEQ ID NO: 2178752 - RNA, 19 nt, Homo sapiens
  misc_RNA (1)...(19): siRNA sense strand
gaagaaggaaagacacaga

SEQ ID NO: 2178753 - RNA, 19 nt, Homo sapiens
  misc_RNA (1)...(19): siRNA sense strand
ggaauuucuuugccugaga

SEQ ID NO: 2178754 - RNA, 19 nt, Homo sapiens
  misc_RNA (1)...(19): siRNA sense strand
aaagugcgauggaaugaau

SEQ ID NO: 2178755 - RNA, 19 nt, Homo sapiens
  misc_RNA (1)...(19): siRNA sense strand
ucucacagaugcuauuaga

SEQ ID NO: 2178756 - RNA, 19 nt, Homo sapiens
  misc_RNA (1)...(19): siRNA sense strand
ugacaaugauuaccugauc

SEQ ID NO: 2178757 - RNA, 19 nt, Homo sapiens
  misc_RNA (1)...(19): siRNA sense strand
aaaaugagguguaauccua

SEQ ID NO: 2178758 - RNA, 19 nt, Homo sapiens
  misc_RNA (1)...(19): siRNA sense strand
gccacuacauugagaaaga

SEQ ID NO: 2178759 - RNA, 19 nt, Homo sapiens
  misc_RNA (1)...(19): siRNA sense strand
gguguaauccuacuaaauc

SEQ ID NO: 2178760 - RNA, 19 nt, Homo sapiens
  misc_RNA (1)...(19): siRNA sense strand
gaagaggaaguuguauauu

SEQ ID NO: 2178761 - RNA, 19 nt, Homo sapiens
  misc_RNA (1)...(19): siRNA sense strand
gcucugaccugcuacuucu

SEQ ID NO: 2178762 - RNA, 19 nt, Homo sapiens
  misc_RNA (1)...(19): siRNA sense strand
gaacuacaggcauccuuau

SEQ ID NO: 2178763 - RNA, 19 nt, Homo sapiens
  misc_RNA (1)...(19): siRNA sense strand
gaagcuugcccucugugua

SEQ ID NO: 2178764 - RNA, 19 nt, Homo sapiens
  misc_RNA (1)...(19): siRNA sense strand
ugagaaaggagccaaagaa

SEQ ID NO: 2178765 - RNA, 19 nt, Homo sapiens
  misc_RNA (1)...(19): siRNA sense strand
uaaugaagaggaaguugua

SEQ ID NO: 2178766 - RNA, 19 nt, Homo sapiens
  misc_RNA (1)...(19): siRNA sense strand
aaucagaguuugcacuaug

SEQ ID NO: 2178767 - RNA, 19 nt, Homo sapiens
  misc_RNA (1)...(19): siRNA sense strand
ggaagaauaacauuugucu

SEQ ID NO: 2178768 - RNA, 19 nt, Homo sapiens
  misc_RNA (1)...(19): siRNA sense strand
gagaaaggagccaaagaau

SEQ ID NO: 2178769 - RNA, 19 nt, Homo sapiens
  misc_RNA (1)...(19): siRNA sense strand
gaauguauaagguguaaag

SEQ ID NO: 2178770 - RNA, 19 nt, Homo sapiens
  misc_RNA (1)...(19): siRNA sense strand
ugaagaggaaguuguauau

SEQ ID NO: 2178771 - RNA, 19 nt, Homo sapiens
  misc_RNA (1)...(19): siRNA sense strand
ccaacaauauaacagacuu

SEQ ID NO: 2178772 - RNA, 19 nt, Homo sapiens
  misc_RNA (1)...(19): siRNA sense strand
aauagacgguucaucaaug

SEQ ID NO: 2178773 - RNA, 19 nt, Homo sapiens
  misc_RNA (1)...(19): siRNA sense strand
gccaaagaauguauaaggu

SEQ ID NO: 2178774 - RNA, 19 nt, Homo sapiens
  misc_RNA (1)...(19): siRNA sense strand
aauaaacagucacuacuag

SEQ ID NO: 2178775 - RNA, 19 nt, Homo sapiens
  misc_RNA (1)...(19): siRNA sense strand
ugagggagccugcaagaga

SEQ ID NO: 2178776 - RNA, 19 nt, Homo sapiens
  misc_RNA (1)...(19): siRNA sense strand
gagguguaauccuacuaaa

SEQ ID NO: 2178777 - RNA, 19 nt, Homo sapiens
  misc_RNA (1)...(19): siRNA sense strand
cuaaucagggucaagauaa

SEQ ID NO: 2178778 - RNA, 19 nt, Homo sapiens
  misc_RNA (1)...(19): siRNA sense strand
cacagaugcuauuagauug

SEQ ID NO: 2178779 - RNA, 19 nt, Homo sapiens
  misc_RNA (1)...(19): siRNA sense strand
gauaauguacaaguggaua

SEQ ID NO: 2178780 - RNA, 19 nt, Homo sapiens
  misc_RNA (1)...(19): siRNA sense strand
ccacuacauugagaaagaa

SEQ ID NO: 2178781 - RNA, 19 nt, Homo sapiens
  misc_RNA (1)...(19): siRNA sense strand
caugguggauauuaauaga

SEQ ID NO: 2178782 - RNA, 19 nt, Homo sapiens
  misc_RNA (1)...(19): siRNA sense strand
acaccuaccuguccauaca

SEQ ID NO: 2178783 - RNA, 19 nt, Homo sapiens
  misc_RNA (1)...(19): siRNA sense strand
uaaugacgacuaacucaaa

SEQ ID NO: 2178784 - RNA, 19 nt, Homo sapiens
  misc_RNA (1)...(19): siRNA sense strand
uaccagaugugcauuucuu

SEQ ID NO: 2178785 - RNA, 19 nt, Homo sapiens
  misc_RNA (1)...(19): siRNA sense strand
aaagacgacucucaauuuu

SEQ ID NO: 2178786 - RNA, 19 nt, Homo sapiens
  misc_RNA (1)...(19): siRNA sense strand
ccaaauaccagaugugcau

SEQ ID NO: 2178787 - RNA, 19 nt, Homo sapiens
  misc_RNA (1)...(19): siRNA sense strand
ucauaggagucacaguuga

SEQ ID NO: 2178788 - RNA, 19 nt, Homo sapiens
  misc_RNA (1)...(19): siRNA sense strand
gaguuugcacuaugacuuu

SEQ ID NO: 2178789 - RNA, 19 nt, Homo sapiens
  misc_RNA (1)...(19): siRNA sense strand
cuaggaagaauaacauuug

SEQ ID NO: 2178790 - RNA, 19 nt, Homo sapiens
  misc_RNA (1)...(19): siRNA sense strand
ccagauccauacuccaugu

SEQ ID NO: 2178791 - RNA, 19 nt, Homo sapiens
  misc_RNA (1)...(19): siRNA sense strand
ggagccaaagaauguauaa

SEQ ID NO: 2178792 - RNA, 19 nt, Homo sapiens
  misc_RNA (1)...(19): siRNA sense strand
agacaguugugcuaucaug

SEQ ID NO: 2178793 - RNA, 19 nt, Homo sapiens
  misc_RNA (1)...(19): siRNA sense strand
caacaucuuguauuaaugg

SEQ ID NO: 2178794 - RNA, 19 nt, Homo sapiens
  misc_RNA (1)...(19): siRNA sense strand
gagcagccuuaucaucaca

SEQ ID NO: 2178795 - RNA, 19 nt, Homo sapiens
  misc_RNA (1)...(19): siRNA sense strand
guaccaacaauauaacaga

SEQ ID NO: 2178796 - RNA, 19 nt, Homo sapiens
  misc_RNA (1)...(19): siRNA sense strand
guccauacaucaggucuau

SEQ ID NO: 2178797 - RNA, 19 nt, Homo sapiens
  misc_RNA (1)...(19): siRNA sense strand
uaaucagggucaagauaau

SEQ ID NO: 2178798 - RNA, 19 nt, Homo sapiens
  misc_RNA (1)...(19): siRNA sense strand
aacaauggaucaucuucuu

SEQ ID NO: 2178799 - RNA, 19 nt, Homo sapiens
  misc_RNA (1)...(19): siRNA sense strand
agaagauaaugaagaggaa

SEQ ID NO: 2178800 - RNA, 19 nt, Homo sapiens
  misc_RNA (1)...(19): siRNA sense strand
gaagaagauggcucucugu

SEQ ID NO: 2178801 - RNA, 19 nt, Homo sapiens
  misc_RNA (1)...(19): siRNA sense strand
ucaagccugugcugguaaa

SEQ ID NO: 2178802 - RNA, 19 nt, Homo sapiens
  misc_RNA (1)...(19): siRNA sense strand
gcaaagaggcuuguauucc

SEQ ID NO: 2178803 - RNA, 19 nt, Homo sapiens
  misc_RNA (1)...(19): siRNA sense strand
ggugaagauuuauucuauc

SEQ ID NO: 2178804 - RNA, 19 nt, Homo sapiens
  misc_RNA (1)...(19): siRNA sense strand
ggauuuaaaccaccaacau

SEQ ID NO: 2178805 - RNA, 19 nt, Homo sapiens
  misc_RNA (1)...(19): siRNA sense strand
gaucuuaaacuugcauauc

SEQ ID NO: 2178806 - RNA, 19 nt, Homo sapiens
  misc_RNA (1)...(19): siRNA sense strand
agaaggaaagacacagaua

SEQ ID NO: 2178807 - RNA, 19 nt, Homo sapiens
  misc_RNA (1)...(19): siRNA sense strand
gauggaaccaaagaaugua

SEQ ID NO: 2178808 - RNA, 19 nt, Homo sapiens
  misc_RNA (1)...(19): siRNA sense strand
gugaaacgguugacuuuug

SEQ ID NO: 2178809 - RNA, 19 nt, Homo sapiens
  misc_RNA (1)...(19): siRNA sense strand
cacuuggcuuugaauauaa

SEQ ID NO: 2178810 - RNA, 19 nt, Homo sapiens
  misc_RNA (1)...(19): siRNA sense strand
ccaggcacauucagcaaca

SEQ ID NO: 2178811 - RNA, 19 nt, Homo sapiens
  misc_RNA (1)...(19): siRNA sense strand
uaaacagucacuacuagga

SEQ ID NO: 2178812 - RNA, 19 nt, Homo sapiens
  misc_RNA (1)...(19): siRNA sense strand
guacggagcaugacuucca

SEQ ID NO: 2178813 - RNA, 19 nt, Homo sapiens
  misc_RNA (1)...(19): siRNA sense strand
ccaggccacuacauugaga

SEQ ID NO: 2178814 - RNA, 19 nt, Homo sapiens
  misc_RNA (1)...(19): siRNA sense strand
auacucuacuggagaacua

SEQ ID NO: 2178815 - RNA, 19 nt, Homo sapiens
  misc_RNA (1)...(19): siRNA sense strand
caggaaagcucaaacauuu

SEQ ID NO: 2178816 - RNA, 19 nt, Homo sapiens
  misc_RNA (1)...(19): siRNA sense strand
caacacaaguucaccauga

SEQ ID NO: 2178817 - RNA, 19 nt, Homo sapiens
  misc_RNA (1)...(19): siRNA sense strand
uaucaacccuacaaaguua

SEQ ID NO: 2178818 - RNA, 19 nt, Homo sapiens
  misc_RNA (1)...(19): siRNA sense strand
ggacugacaauacuacaua

SEQ ID NO: 2178819 - RNA, 19 nt, Homo sapiens
  misc_RNA (1)...(19): siRNA sense strand
gcaagaccauccagaguga

SEQ ID NO: 2178820 - RNA, 19 nt, Homo sapiens
  misc_RNA (1)...(19): siRNA sense strand
gcaauuacaucgugaaggu

SEQ ID NO: 2178821 - RNA, 19 nt, Homo sapiens
  misc_RNA (1)...(19): siRNA sense strand
ggaaagugauaucauuaug

SEQ ID NO: 2178822 - RNA, 19 nt, Homo sapiens
  misc_RNA (1)...(19): siRNA sense strand
ggagaagcuugcacagaaa

SEQ ID NO: 2178823 - RNA, 19 nt, Homo sapiens
  misc_RNA (1)...(19): siRNA sense strand
gagaggccauccuauuuga

SEQ ID NO: 2178824 - RNA, 19 nt, Homo sapiens
  misc_RNA (1)...(19): siRNA sense strand
gaaaguagcccagaagaca

SEQ ID NO: 2178825 - RNA, 19 nt, Homo sapiens
  misc_RNA (1)...(19): siRNA sense strand
aggaagacauugggaauua

SEQ ID NO: 2178826 - RNA, 19 nt, Homo sapiens
  misc_RNA (1)...(19): siRNA sense strand
gcaugggccucgcuuagaa

SEQ ID NO: 2178827 - RNA, 19 nt, Homo sapiens
  misc_RNA (1)...(19): siRNA sense strand
ucagugaaauggaaaguga

SEQ ID NO: 2178828 - RNA, 19 nt, Homo sapiens
  misc_RNA (1)...(19): siRNA sense strand
uuacugggcucugugaaua

SEQ ID NO: 2178829 - RNA, 19 nt, Homo sapiens
  misc_RNA (1)...(19): siRNA sense strand
gaaaaucauugucaccuuu

SEQ ID NO: 2178830 - RNA, 19 nt, Homo sapiens
  misc_RNA (1)...(19): siRNA sense strand
gcuuagaaguugcaucuga

SEQ ID NO: 2178831 - RNA, 19 nt, Homo sapiens
  misc_RNA (1)...(19): siRNA sense strand
gaggaacccugucagugaa

SEQ ID NO: 2178832 - RNA, 19 nt, Homo sapiens
  misc_RNA (1)...(19): siRNA sense strand
uaucaucacuuccguagga

SEQ ID NO: 2178833 - RNA, 19 nt, Homo sapiens
  misc_RNA (1)...(19): siRNA sense strand
uggagaagcuugcacagaa

SEQ ID NO: 2178834 - RNA, 19 nt, Homo sapiens
  misc_RNA (1)...(19): siRNA sense strand
cagaucauauggcuauuug

SEQ ID NO: 2178835 - RNA, 19 nt, Homo sapiens
  misc_RNA (1)...(19): siRNA sense strand
ggagaggccauccuauuug

SEQ ID NO: 2178836 - RNA, 19 nt, Homo sapiens
  misc_RNA (1)...(19): siRNA sense strand
gcaaguauaacuggaauau

SEQ ID NO: 2178837 - RNA, 19 nt, Homo sapiens
  misc_RNA (1)...(19): siRNA sense strand
cacaaugcccaaauacuua

SEQ ID NO: 2178838 - RNA, 19 nt, Homo sapiens
  misc_RNA (1)...(19): siRNA sense strand
gaaacagaauacaggaaag

SEQ ID NO: 2178839 - RNA, 19 nt, Homo sapiens
  misc_RNA (1)...(19): siRNA sense strand
cccaaugcaucucugcuua

SEQ ID NO: 2178840 - RNA, 19 nt, Homo sapiens
  misc_RNA (1)...(19): siRNA sense strand
gggaaguguuuacuguuga

SEQ ID NO: 2178841 - RNA, 19 nt, Homo sapiens
  misc_RNA (1)...(19): siRNA sense strand
agaagacaauggacuaugu

SEQ ID NO: 2178842 - RNA, 19 nt, Homo sapiens
  misc_RNA (1)...(19): siRNA sense strand
ucagggaaauggaacucua

SEQ ID NO: 2178843 - RNA, 19 nt, Homo sapiens
  misc_RNA (1)...(19): siRNA sense strand
ucacaguuaucaucacuuc

SEQ ID NO: 2178844 - RNA, 19 nt, Homo sapiens
  misc_RNA (1)...(19): siRNA sense strand
gaaauggaaagugauauca

SEQ ID NO: 2178845 - RNA, 19 nt, Homo sapiens
  misc_RNA (1)...(19): siRNA sense strand
ccacugcaguucccugaug

SEQ ID NO: 2178846 - RNA, 19 nt, Homo sapiens
  misc_RNA (1)...(19): siRNA sense strand
gaaguugcaucugagaaag

SEQ ID NO: 2178847 - RNA, 19 nt, Homo sapiens
  misc_RNA (1)...(19): siRNA sense strand
gggccucgcuuagaaguug

SEQ ID NO: 2178848 - RNA, 19 nt, Homo sapiens
  misc_RNA (1)...(19): siRNA sense strand
gcacucggcuagcuuacca

SEQ ID NO: 2178849 - RNA, 19 nt, Homo sapiens
  misc_RNA (1)...(19): siRNA sense strand
ggaaauggaacucuaucug

SEQ ID NO: 2178850 - RNA, 19 nt, Homo sapiens
  misc_RNA (1)...(19): siRNA sense strand
caucagacauccagaucau

SEQ ID NO: 2178851 - RNA, 19 nt, Homo sapiens
  misc_RNA (1)...(19): siRNA sense strand
ugaggaacccugucaguga

SEQ ID NO: 2178852 - RNA, 19 nt, Homo sapiens
  misc_RNA (1)...(19): siRNA sense strand
caagugaauucugauaaag

SEQ ID NO: 2178853 - RNA, 19 nt, Homo sapiens
  misc_RNA (1)...(19): siRNA sense strand
ccaugaagaugcucuggau

SEQ ID NO: 2178854 - RNA, 19 nt, Homo sapiens
  misc_RNA (1)...(19): siRNA sense strand
ggaauaccaacacaaguuc

SEQ ID NO: 2178855 - RNA, 19 nt, Homo sapiens
  misc_RNA (1)...(19): siRNA sense strand
acacaaugcccaaauacuu

SEQ ID NO: 2178856 - RNA, 19 nt, Homo sapiens
  misc_RNA (1)...(19): siRNA sense strand
gaggccauccuauuugauu

SEQ ID NO: 2178857 - RNA, 19 nt, Homo sapiens
  misc_RNA (1)...(19): siRNA sense strand
caacaccuacuccuggauu

SEQ ID NO: 2178858 - RNA, 19 nt, Homo sapiens
  misc_RNA (1)...(19): siRNA sense strand
gagaaaguagcccagaaga

SEQ ID NO: 2178859 - RNA, 19 nt, Homo sapiens
  misc_RNA (1)...(19): siRNA sense strand
agaaacagaauacaggaaa

SEQ ID NO: 2178860 - RNA, 19 nt, Homo sapiens
  misc_RNA (1)...(19): siRNA sense strand
gaucauauggcuauuugag

SEQ ID NO: 2178861 - RNA, 19 nt, Homo sapiens
  misc_RNA (1)...(19): siRNA sense strand
cuagaaggcaggccagaaa

SEQ ID NO: 2178862 - RNA, 19 nt, Homo sapiens
  misc_RNA (1)...(19): siRNA sense strand
cccacacaaugcccaaaua

SEQ ID NO: 2178863 - RNA, 19 nt, Homo sapiens
  misc_RNA (1)...(19): siRNA sense strand
uggagaggccauccuauuu

SEQ ID NO: 2178864 - RNA, 19 nt, Homo sapiens
  misc_RNA (1)...(19): siRNA sense strand
gaaagugauaucauuaugc

SEQ ID NO: 2178865 - RNA, 19 nt, Homo sapiens
  misc_RNA (1)...(19): siRNA sense strand
caaagccaguggugcagau

SEQ ID NO: 2178866 - RNA, 19 nt, Homo sapiens
  misc_RNA (1)...(19): siRNA sense strand
ggaagacauugggaauuac

SEQ ID NO: 2178867 - RNA, 19 nt, Homo sapiens
  misc_RNA (1)...(19): siRNA sense strand
ggaugacuucggaauauau

SEQ ID NO: 2178868 - RNA, 19 nt, Homo sapiens
  misc_RNA (1)...(19): siRNA sense strand
uggaugacuucggaauaua

SEQ ID NO: 2178869 - RNA, 19 nt, Homo sapiens
  misc_RNA (1)...(19): siRNA sense strand
aagaugcucuggaugacuu

SEQ ID NO: 2178870 - RNA, 19 nt, Homo sapiens
  misc_RNA (1)...(19): siRNA sense strand
ucagacauccagaucauau

SEQ ID NO: 2178871 - RNA, 19 nt, Homo sapiens
  misc_RNA (1)...(19): siRNA sense strand
uuauggaccuuauggacuu

SEQ ID NO: 2178872 - RNA, 19 nt, Homo sapiens
  misc_RNA (1)...(19): siRNA sense strand
gaagacauugggaauuaca

SEQ ID NO: 2178873 - RNA, 19 nt, Homo sapiens
  misc_RNA (1)...(19): siRNA sense strand
caaggaagacauugggaau

SEQ ID NO: 2178874 - RNA, 19 nt, Homo sapiens
  misc_RNA (1)...(19): siRNA sense strand
gaauacaggaaagcucaaa

SEQ ID NO: 2178875 - RNA, 19 nt, Homo sapiens
  misc_RNA (1)...(19): siRNA sense strand
ugucuucucuuccuaugga

SEQ ID NO: 2178876 - RNA, 19 nt, Homo sapiens
  misc_RNA (1)...(19): siRNA sense strand
gaaaggaaaaucauuguca

SEQ ID NO: 2178877 - RNA, 19 nt, Homo sapiens
  misc_RNA (1)...(19): siRNA sense strand
gaagacaauggacuaugug

SEQ ID NO: 2178878 - RNA, 19 nt, Homo sapiens
  misc_RNA (1)...(19): siRNA sense strand
caaugcaucucugcuuauc

SEQ ID NO: 2178879 - RNA, 19 nt, Homo sapiens
  misc_RNA (1)...(19): siRNA sense strand
acaggaaagcucaaacauu

SEQ ID NO: 2178880 - RNA, 19 nt, Homo sapiens
  misc_RNA (1)...(19): siRNA sense strand
ggucaacauucagggaaau

SEQ ID NO: 2178881 - RNA, 19 nt, Homo sapiens
  misc_RNA (1)...(19): siRNA sense strand
cuaccuacccguccacuau

SEQ ID NO: 2178882 - RNA, 19 nt, Homo sapiens
  misc_RNA (1)...(19): siRNA sense strand
ucggcuagcuuaccaaugg

SEQ ID NO: 2178883 - RNA, 19 nt, Homo sapiens
  misc_RNA (1)...(19): siRNA sense strand
agauacaagucacgguuga

SEQ ID NO: 2178884 - RNA, 19 nt, Homo sapiens
  misc_RNA (1)...(19): siRNA sense strand
gaaggugacagugccauca

SEQ ID NO: 2178885 - RNA, 19 nt, Homo sapiens
  misc_RNA (1)...(19): siRNA sense strand
cuggaugacuucggaauau

SEQ ID NO: 2178886 - RNA, 19 nt, Homo sapiens
  misc_RNA (1)...(19): siRNA sense strand
uagcaaguauaacuggaau

SEQ ID NO: 2178887 - RNA, 19 nt, Homo sapiens
  misc_RNA (1)...(19): siRNA sense strand
ggaaaaucauugucaccuu

SEQ ID NO: 2178888 - RNA, 19 nt, Homo sapiens
  misc_RNA (1)...(19): siRNA sense strand
agaaguugcaucugagaaa

SEQ ID NO: 2178889 - RNA, 19 nt, Homo sapiens
  misc_RNA (1)...(19): siRNA sense strand
gaauaagucugugguuccu

SEQ ID NO: 2178890 - RNA, 19 nt, Homo sapiens
  misc_RNA (1)...(19): siRNA sense strand
uugaugauccugucacaaa

SEQ ID NO: 2178891 - RNA, 19 nt, Homo sapiens
  misc_RNA (1)...(19): siRNA sense strand
gacugacaauacuacauau

SEQ ID NO: 2178892 - RNA, 19 nt, Homo sapiens
  misc_RNA (1)...(19): siRNA sense strand
uggaauaccaacacaaguu

SEQ ID NO: 2178893 - RNA, 19 nt, Homo sapiens
  misc_RNA (1)...(19): siRNA sense strand
gcaggcaagaugaaacuca

SEQ ID NO: 2178894 - RNA, 19 nt, Homo sapiens
  misc_RNA (1)...(19): siRNA sense strand
gacuaugugugcugugcuu

SEQ ID NO: 2178895 - RNA, 19 nt, Homo sapiens
  misc_RNA (1)...(19): siRNA sense strand
ggaacccugucagugaaau

SEQ ID NO: 2178896 - RNA, 19 nt, Homo sapiens
  misc_RNA (1)...(19): siRNA sense strand
gugcugugcuuacaacaac

SEQ ID NO: 2178897 - RNA, 19 nt, Homo sapiens
  misc_RNA (1)...(19): siRNA sense strand
uaggaggacugacaauacu

SEQ ID NO: 2178898 - RNA, 19 nt, Homo sapiens
  misc_RNA (1)...(19): siRNA sense strand
augcaucucugcuuaucaa

SEQ ID NO: 2178899 - RNA, 19 nt, Homo sapiens
  misc_RNA (1)...(19): siRNA sense strand
gcaggccagaaacagaaua

SEQ ID NO: 2178900 - RNA, 19 nt, Homo sapiens
  misc_RNA (1)...(19): siRNA sense strand
aaaaguaggggaaguguuu

SEQ ID NO: 2178901 - RNA, 19 nt, Homo sapiens
  misc_RNA (1)...(19): siRNA sense strand
gauaaagggcuaaaaguag

SEQ ID NO: 2178902 - RNA, 19 nt, Homo sapiens
  misc_RNA (1)...(19): siRNA sense strand
cagcuccaccuacuccuuu

SEQ ID NO: 2178903 - RNA, 19 nt, Homo sapiens
  misc_RNA (1)...(19): siRNA sense strand
caaaacaauacccuucaua

SEQ ID NO: 2178904 - RNA, 19 nt, Homo sapiens
  misc_RNA (1)...(19): siRNA sense strand
ggaaguguuuacuguugac

SEQ ID NO: 2178905 - RNA, 19 nt, Homo sapiens
  misc_RNA (1)...(19): siRNA sense strand
acagcugccuggugaggaa

SEQ ID NO: 2178906 - RNA, 19 nt, Homo sapiens
  misc_RNA (1)...(19): siRNA sense strand
ccagaucauauggcuauuu

SEQ ID NO: 2178907 - RNA, 19 nt, Homo sapiens
  misc_RNA (1)...(19): siRNA sense strand
aauaucaacccuacaaagu

SEQ ID NO: 2178908 - RNA, 19 nt, Homo sapiens
  misc_RNA (1)...(19): siRNA sense strand
ggggaaguguuuacuguug

SEQ ID NO: 2178909 - RNA, 19 nt, Homo sapiens
  misc_RNA (1)...(19): siRNA sense strand
ugaaauggaaagugauauc

SEQ ID NO: 2178910 - RNA, 19 nt, Homo sapiens
  misc_RNA (1)...(19): siRNA sense strand
ugacuucggaauauaugaa

SEQ ID NO: 2178911 - RNA, 19 nt, Homo sapiens
  misc_RNA (1)...(19): siRNA sense strand
ucaccuuuagcaaguauaa

SEQ ID NO: 2178912 - RNA, 19 nt, Homo sapiens
  misc_RNA (1)...(19): siRNA sense strand
ggauuaggaggacugacaa

SEQ ID NO: 2178913 - RNA, 19 nt, Homo sapiens
  misc_RNA (1)...(19): siRNA sense strand
aacaccuacuccuggauua

SEQ ID NO: 2178914 - RNA, 19 nt, Homo sapiens
  misc_RNA (1)...(19): siRNA sense strand
gauaucauuaugcccauca

SEQ ID NO: 2178915 - RNA, 19 nt, Homo sapiens
  misc_RNA (1)...(19): siRNA sense strand
caggaaagcucaaacauuu

SEQ ID NO: 2178916 - RNA, 19 nt, Homo sapiens
  misc_RNA (1)...(19): siRNA sense strand
caacacaaguucaccauga

SEQ ID NO: 2178917 - RNA, 19 nt, Homo sapiens
  misc_RNA (1)...(19): siRNA sense strand
uaucaacccuacaaaguua

SEQ ID NO: 2178918 - RNA, 19 nt, Homo sapiens
  misc_RNA (1)...(19): siRNA sense strand
ggacugacaauacuacaua

SEQ ID NO: 2178919 - RNA, 19 nt, Homo sapiens
  misc_RNA (1)...(19): siRNA sense strand
gcaagaccauccagaguga

SEQ ID NO: 2178920 - RNA, 19 nt, Homo sapiens
  misc_RNA (1)...(19): siRNA sense strand
gcaauuacaucgugaaggu

SEQ ID NO: 2178921 - RNA, 19 nt, Homo sapiens
  misc_RNA (1)...(19): siRNA sense strand
ggaaagugauaucauuaug

SEQ ID NO: 2178922 - RNA, 19 nt, Homo sapiens
  misc_RNA (1)...(19): siRNA sense strand
ggagaagcuugcacagaaa

SEQ ID NO: 2178923 - RNA, 19 nt, Homo sapiens
  misc_RNA (1)...(19): siRNA sense strand
gagaggccauccuauuuga

SEQ ID NO: 2178924 - RNA, 19 nt, Homo sapiens
  misc_RNA (1)...(19): siRNA sense strand
gaaaguagcccagaagaca

SEQ ID NO: 2178925 - RNA, 19 nt, Homo sapiens
  misc_RNA (1)...(19): siRNA sense strand
aggaagacauugggaauua

SEQ ID NO: 2178926 - RNA, 19 nt, Homo sapiens
  misc_RNA (1)...(19): siRNA sense strand
gcaugggccucgcuuagaa

SEQ ID NO: 2178927 - RNA, 19 nt, Homo sapiens
  misc_RNA (1)...(19): siRNA sense strand
ucagugaaauggaaaguga

SEQ ID NO: 2178928 - RNA, 19 nt, Homo sapiens
  misc_RNA (1)...(19): siRNA sense strand
uuacugggcucugugaaua

SEQ ID NO: 2178929 - RNA, 19 nt, Homo sapiens
  misc_RNA (1)...(19): siRNA sense strand
gaaaaucauugucaccuuu

SEQ ID NO: 2178930 - RNA, 19 nt, Homo sapiens
  misc_RNA (1)...(19): siRNA sense strand
gcuuagaaguugcaucuga

SEQ ID NO: 2178931 - RNA, 19 nt, Homo sapiens
  misc_RNA (1)...(19): siRNA sense strand
gaggaacccugucagugaa

SEQ ID NO: 2178932 - RNA, 19 nt, Homo sapiens
  misc_RNA (1)...(19): siRNA sense strand
uaucaucacuuccguagga

SEQ ID NO: 2178933 - RNA, 19 nt, Homo sapiens
  misc_RNA (1)...(19): siRNA sense strand
uggagaagcuugcacagaa

SEQ ID NO: 2178934 - RNA, 19 nt, Homo sapiens
  misc_RNA (1)...(19): siRNA sense strand
cagaucauauggcuauuug

SEQ ID NO: 2178935 - RNA, 19 nt, Homo sapiens
  misc_RNA (1)...(19): siRNA sense strand
ggagaggccauccuauuug

SEQ ID NO: 2178936 - RNA, 19 nt, Homo sapiens
  misc_RNA (1)...(19): siRNA sense strand
gcaaguauaacuggaauau

SEQ ID NO: 2178937 - RNA, 19 nt, Homo sapiens
  misc_RNA (1)...(19): siRNA sense strand
cacaaugcccaaauacuua

SEQ ID NO: 2178938 - RNA, 19 nt, Homo sapiens
  misc_RNA (1)...(19): siRNA sense strand
gaaacagaauacaggaaag

SEQ ID NO: 2178939 - RNA, 19 nt, Homo sapiens
  misc_RNA (1)...(19): siRNA sense strand
cccaaugcaucucugcuua

SEQ ID NO: 2178940 - RNA, 19 nt, Homo sapiens
  misc_RNA (1)...(19): siRNA sense strand
gggaaguguuuacuguuga

SEQ ID NO: 2178941 - RNA, 19 nt, Homo sapiens
  misc_RNA (1)...(19): siRNA sense strand
agaagacaauggacuaugu

SEQ ID NO: 2178942 - RNA, 19 nt, Homo sapiens
  misc_RNA (1)...(19): siRNA sense strand
ucagggaaauggaacucua

SEQ ID NO: 2178943 - RNA, 19 nt, Homo sapiens
  misc_RNA (1)...(19): siRNA sense strand
ucacaguuaucaucacuuc

SEQ ID NO: 2178944 - RNA, 19 nt, Homo sapiens
  misc_RNA (1)...(19): siRNA sense strand
gaaauggaaagugauauca

SEQ ID NO: 2178945 - RNA, 19 nt, Homo sapiens
  misc_RNA (1)...(19): siRNA sense strand
ccacugcaguucccugaug

SEQ ID NO: 2178946 - RNA, 19 nt, Homo sapiens
  misc_RNA (1)...(19): siRNA sense strand
gaaguugcaucugagaaag

SEQ ID NO: 2178947 - RNA, 19 nt, Homo sapiens
  misc_RNA (1)...(19): siRNA sense strand
gggccucgcuuagaaguug

SEQ ID NO: 2178948 - RNA, 19 nt, Homo sapiens
  misc_RNA (1)...(19): siRNA sense strand
gcacucggcuagcuuacca

SEQ ID NO: 2178949 - RNA, 19 nt, Homo sapiens
  misc_RNA (1)...(19): siRNA sense strand
ggaaauggaacucuaucug

SEQ ID NO: 2178950 - RNA, 19 nt, Homo sapiens
  misc_RNA (1)...(19): siRNA sense strand
caucagacauccagaucau

SEQ ID NO: 2178951 - RNA, 19 nt, Homo sapiens
  misc_RNA (1)...(19): siRNA sense strand
ugaggaacccugucaguga

SEQ ID NO: 2178952 - RNA, 19 nt, Homo sapiens
  misc_RNA (1)...(19): siRNA sense strand
caagugaauucugauaaag

SEQ ID NO: 2178953 - RNA, 19 nt, Homo sapiens
  misc_RNA (1)...(19): siRNA sense strand
ccaugaagaugcucuggau

SEQ ID NO: 2178954 - RNA, 19 nt, Homo sapiens
  misc_RNA (1)...(19): siRNA sense strand
ggaauaccaacacaaguuc

SEQ ID NO: 2178955 - RNA, 19 nt, Homo sapiens
  misc_RNA (1)...(19): siRNA sense strand
acacaaugcccaaauacuu

SEQ ID NO: 2178956 - RNA, 19 nt, Homo sapiens
  misc_RNA (1)...(19): siRNA sense strand
gaggccauccuauuugauu

SEQ ID NO: 2178957 - RNA, 19 nt, Homo sapiens
  misc_RNA (1)...(19): siRNA sense strand
caacaccuacuccuggauu

SEQ ID NO: 2178958 - RNA, 19 nt, Homo sapiens
  misc_RNA (1)...(19): siRNA sense strand
gagaaaguagcccagaaga

SEQ ID NO: 2178959 - RNA, 19 nt, Homo sapiens
  misc_RNA (1)...(19): siRNA sense strand
agaaacagaauacaggaaa

SEQ ID NO: 2178960 - RNA, 19 nt, Homo sapiens
  misc_RNA (1)...(19): siRNA sense strand
gaucauauggcuauuugag

SEQ ID NO: 2178961 - RNA, 19 nt, Homo sapiens
  misc_RNA (1)...(19): siRNA sense strand
cuagaaggcaggccagaaa

SEQ ID NO: 2178962 - RNA, 19 nt, Homo sapiens
  misc_RNA (1)...(19): siRNA sense strand
cccacacaaugcccaaaua

SEQ ID NO: 2178963 - RNA, 19 nt, Homo sapiens
  misc_RNA (1)...(19): siRNA sense strand
uggagaggccauccuauuu

SEQ ID NO: 2178964 - RNA, 19 nt, Homo sapiens
  misc_RNA (1)...(19): siRNA sense strand
gaaagugauaucauuaugc

SEQ ID NO: 2178965 - RNA, 19 nt, Homo sapiens
  misc_RNA (1)...(19): siRNA sense strand
caaagccaguggugcagau

SEQ ID NO: 2178966 - RNA, 19 nt, Homo sapiens
  misc_RNA (1)...(19): siRNA sense strand
ggaagacauugggaauuac

SEQ ID NO: 2178967 - RNA, 19 nt, Homo sapiens
  misc_RNA (1)...(19): siRNA sense strand
ggaugacuucggaauauau

SEQ ID NO: 2178968 - RNA, 19 nt, Homo sapiens
  misc_RNA (1)...(19): siRNA sense strand
uggaugacuucggaauaua

SEQ ID NO: 2178969 - RNA, 19 nt, Homo sapiens
  misc_RNA (1)...(19): siRNA sense strand
aagaugcucuggaugacuu

SEQ ID NO: 2178970 - RNA, 19 nt, Homo sapiens
  misc_RNA (1)...(19): siRNA sense strand
ucagacauccagaucauau

SEQ ID NO: 2178971 - RNA, 19 nt, Homo sapiens
  misc_RNA (1)...(19): siRNA sense strand
uuauggaccuuauggacuu

SEQ ID NO: 2178972 - RNA, 19 nt, Homo sapiens
  misc_RNA (1)...(19): siRNA sense strand
gaagacauugggaauuaca

SEQ ID NO: 2178973 - RNA, 19 nt, Homo sapiens
  misc_RNA (1)...(19): siRNA sense strand
caaggaagacauugggaau

SEQ ID NO: 2178974 - RNA, 19 nt, Homo sapiens
  misc_RNA (1)...(19): siRNA sense strand
gaauacaggaaagcucaaa

SEQ ID NO: 2178975 - RNA, 19 nt, Homo sapiens
  misc_RNA (1)...(19): siRNA sense strand
ugucuucucuuccuaugga

SEQ ID NO: 2178976 - RNA, 19 nt, Homo sapiens
  misc_RNA (1)...(19): siRNA sense strand
gaaaggaaaaucauuguca

SEQ ID NO: 2178977 - RNA, 19 nt, Homo sapiens
  misc_RNA (1)...(19): siRNA sense strand
gaagacaauggacuaugug

SEQ ID NO: 2178978 - RNA, 19 nt, Homo sapiens
  misc_RNA (1)...(19): siRNA sense strand
caaugcaucucugcuuauc

SEQ ID NO: 2178979 - RNA, 19 nt, Homo sapiens
  misc_RNA (1)...(19): siRNA sense strand
acaggaaagcucaaacauu

SEQ ID NO: 2178980 - RNA, 19 nt, Homo sapiens
  misc_RNA (1)...(19): siRNA sense strand
ggucaacauucagggaaau

SEQ ID NO: 2178981 - RNA, 19 nt, Homo sapiens
  misc_RNA (1)...(19): siRNA sense strand
cuaccuacccguccacuau

SEQ ID NO: 2178982 - RNA, 19 nt, Homo sapiens
  misc_RNA (1)...(19): siRNA sense strand
ucggcuagcuuaccaaugg

SEQ ID NO: 2178983 - RNA, 19 nt, Homo sapiens
  misc_RNA (1)...(19): siRNA sense strand
agauacaagucacgguuga

SEQ ID NO: 2178984 - RNA, 19 nt, Homo sapiens
  misc_RNA (1)...(19): siRNA sense strand
gaaggugacagugccauca

SEQ ID NO: 2178985 - RNA, 19 nt, Homo sapiens
  misc_RNA (1)...(19): siRNA sense strand
cuggaugacuucggaauau

SEQ ID NO: 2178986 - RNA, 19 nt, Homo sapiens
  misc_RNA (1)...(19): siRNA sense strand
uagcaaguauaacuggaau

SEQ ID NO: 2178987 - RNA, 19 nt, Homo sapiens
  misc_RNA (1)...(19): siRNA sense strand
ggaaaaucauugucaccuu

SEQ ID NO: 2178988 - RNA, 19 nt, Homo sapiens
  misc_RNA (1)...(19): siRNA sense strand
agaaguugcaucugagaaa

SEQ ID NO: 2178989 - RNA, 19 nt, Homo sapiens
  misc_RNA (1)...(19): siRNA sense strand
gaauaagucugugguuccu

SEQ ID NO: 2178990 - RNA, 19 nt, Homo sapiens
  misc_RNA (1)...(19): siRNA sense strand
uugaugauccugucacaaa

SEQ ID NO: 2178991 - RNA, 19 nt, Homo sapiens
  misc_RNA (1)...(19): siRNA sense strand
gacugacaauacuacauau

SEQ ID NO: 2178992 - RNA, 19 nt, Homo sapiens
  misc_RNA (1)...(19): siRNA sense strand
uggaauaccaacacaaguu

SEQ ID NO: 2178993 - RNA, 19 nt, Homo sapiens
  misc_RNA (1)...(19): siRNA sense strand
gcaggcaagaugaaacuca

SEQ ID NO: 2178994 - RNA, 19 nt, Homo sapiens
  misc_RNA (1)...(19): siRNA sense strand
gacuaugugugcugugcuu

SEQ ID NO: 2178995 - RNA, 19 nt, Homo sapiens
  misc_RNA (1)...(19): siRNA sense strand
ggaacccugucagugaaau

SEQ ID NO: 2178996 - RNA, 19 nt, Homo sapiens
  misc_RNA (1)...(19): siRNA sense strand
gugcugugcuuacaacaac

SEQ ID NO: 2178997 - RNA, 19 nt, Homo sapiens
  misc_RNA (1)...(19): siRNA sense strand
uaggaggacugacaauacu

SEQ ID NO: 2178998 - RNA, 19 nt, Homo sapiens
  misc_RNA (1)...(19): siRNA sense strand
augcaucucugcuuaucaa

SEQ ID NO: 2178999 - RNA, 19 nt, Homo sapiens
  misc_RNA (1)...(19): siRNA sense strand
gcaggccagaaacagaaua

SEQ ID NO: 2179000 - RNA, 19 nt, Homo sapiens
  misc_RNA (1)...(19): siRNA sense strand
aaaaguaggggaaguguuu

SEQ ID NO: 2179001 - RNA, 19 nt, Homo sapiens
  misc_RNA (1)...(19): siRNA sense strand
gauaaagggcuaaaaguag

SEQ ID NO: 2179002 - RNA, 19 nt, Homo sapiens
  misc_RNA (1)...(19): siRNA sense strand
cagcuccaccuacuccuuu

SEQ ID NO: 2179003 - RNA, 19 nt, Homo sapiens
  misc_RNA (1)...(19): siRNA sense strand
caaaacaauacccuucaua

SEQ ID NO: 2179004 - RNA, 19 nt, Homo sapiens
  misc_RNA (1)...(19): siRNA sense strand
ggaaguguuuacuguugac

SEQ ID NO: 2179005 - RNA, 19 nt, Homo sapiens
  misc_RNA (1)...(19): siRNA sense strand
acagcugccuggugaggaa

SEQ ID NO: 2179006 - RNA, 19 nt, Homo sapiens
  misc_RNA (1)...(19): siRNA sense strand
ccagaucauauggcuauuu

SEQ ID NO: 2179007 - RNA, 19 nt, Homo sapiens
  misc_RNA (1)...(19): siRNA sense strand
aauaucaacccuacaaagu

SEQ ID NO: 2179008 - RNA, 19 nt, Homo sapiens
  misc_RNA (1)...(19): siRNA sense strand
ggggaaguguuuacuguug

SEQ ID NO: 2179009 - RNA, 19 nt, Homo sapiens
  misc_RNA (1)...(19): siRNA sense strand
ugaaauggaaagugauauc

SEQ ID NO: 2179010 - RNA, 19 nt, Homo sapiens
  misc_RNA (1)...(19): siRNA sense strand
ugacuucggaauauaugaa

SEQ ID NO: 2179011 - RNA, 19 nt, Homo sapiens
  misc_RNA (1)...(19): siRNA sense strand
ucaccuuuagcaaguauaa

SEQ ID NO: 2179012 - RNA, 19 nt, Homo sapiens
  misc_RNA (1)...(19): siRNA sense strand
ggauuaggaggacugacaa

SEQ ID NO: 2179013 - RNA, 19 nt, Homo sapiens
  misc_RNA (1)...(19): siRNA sense strand
aacaccuacuccuggauua

SEQ ID NO: 2179014 - RNA, 19 nt, Homo sapiens
  misc_RNA (1)...(19): siRNA sense strand
gauaucauuaugcccauca

SEQ ID NO: 2179015 - RNA, 19 nt, Homo sapiens
  misc_RNA (1)...(19): siRNA sense strand
caggaaagcucaaacauuu

SEQ ID NO: 2179016 - RNA, 19 nt, Homo sapiens
  misc_RNA (1)...(19): siRNA sense strand
caacacaaguucaccauga

SEQ ID NO: 2179017 - RNA, 19 nt, Homo sapiens
  misc_RNA (1)...(19): siRNA sense strand
uaucaacccuacaaaguua

SEQ ID NO: 2179018 - RNA, 19 nt, Homo sapiens
  misc_RNA (1)...(19): siRNA sense strand
ggacugacaauacuacaua

SEQ ID NO: 2179019 - RNA, 19 nt, Homo sapiens
  misc_RNA (1)...(19): siRNA sense strand
gcaagaccauccagaguga

SEQ ID NO: 2179020 - RNA, 19 nt, Homo sapiens
  misc_RNA (1)...(19): siRNA sense strand
gcaauuacaucgugaaggu

SEQ ID NO: 2179021 - RNA, 19 nt, Homo sapiens
  misc_RNA (1)...(19): siRNA sense strand
ggaaagugauaucauuaug

SEQ ID NO: 2179022 - RNA, 19 nt, Homo sapiens
  misc_RNA (1)...(19): siRNA sense strand
ggagaagcuugcacagaaa

SEQ ID NO: 2179023 - RNA, 19 nt, Homo sapiens
  misc_RNA (1)...(19): siRNA sense strand
gagaggccauccuauuuga

SEQ ID NO: 2179024 - RNA, 19 nt, Homo sapiens
  misc_RNA (1)...(19): siRNA sense strand
gaaaguagcccagaagaca

SEQ ID NO: 2179025 - RNA, 19 nt, Homo sapiens
  misc_RNA (1)...(19): siRNA sense strand
aggaagacauugggaauua

SEQ ID NO: 2179026 - RNA, 19 nt, Homo sapiens
  misc_RNA (1)...(19): siRNA sense strand
gcaugggccucgcuuagaa

SEQ ID NO: 2179027 - RNA, 19 nt, Homo sapiens
  misc_RNA (1)...(19): siRNA sense strand
ucagugaaauggaaaguga

SEQ ID NO: 2179028 - RNA, 19 nt, Homo sapiens
  misc_RNA (1)...(19): siRNA sense strand
uuacugggcucugugaaua

SEQ ID NO: 2179029 - RNA, 19 nt, Homo sapiens
  misc_RNA (1)...(19): siRNA sense strand
gaaaaucauugucaccuuu

SEQ ID NO: 2179030 - RNA, 19 nt, Homo sapiens
  misc_RNA (1)...(19): siRNA sense strand
gcuuagaaguugcaucuga

SEQ ID NO: 2179031 - RNA, 19 nt, Homo sapiens
  misc_RNA (1)...(19): siRNA sense strand
gaggaacccugucagugaa

SEQ ID NO: 2179032 - RNA, 19 nt, Homo sapiens
  misc_RNA (1)...(19): siRNA sense strand
uaucaucacuuccguagga

SEQ ID NO: 2179033 - RNA, 19 nt, Homo sapiens
  misc_RNA (1)...(19): siRNA sense strand
uggagaagcuugcacagaa

SEQ ID NO: 2179034 - RNA, 19 nt, Homo sapiens
  misc_RNA (1)...(19): siRNA sense strand
cagaucauauggcuauuug

SEQ ID NO: 2179035 - RNA, 19 nt, Homo sapiens
  misc_RNA (1)...(19): siRNA sense strand
ggagaggccauccuauuug

SEQ ID NO: 2179036 - RNA, 19 nt, Homo sapiens
  misc_RNA (1)...(19): siRNA sense strand
gcaaguauaacuggaauau

SEQ ID NO: 2179037 - RNA, 19 nt, Homo sapiens
  misc_RNA (1)...(19): siRNA sense strand
cacaaugcccaaauacuua

SEQ ID NO: 2179038 - RNA, 19 nt, Homo sapiens
  misc_RNA (1)...(19): siRNA sense strand
gaaacagaauacaggaaag

SEQ ID NO: 2179039 - RNA, 19 nt, Homo sapiens
  misc_RNA (1)...(19): siRNA sense strand
cccaaugcaucucugcuua

SEQ ID NO: 2179040 - RNA, 19 nt, Homo sapiens
  misc_RNA (1)...(19): siRNA sense strand
gggaaguguuuacuguuga

SEQ ID NO: 2179041 - RNA, 19 nt, Homo sapiens
  misc_RNA (1)...(19): siRNA sense strand
agaagacaauggacuaugu

SEQ ID NO: 2179042 - RNA, 19 nt, Homo sapiens
  misc_RNA (1)...(19): siRNA sense strand
ucagggaaauggaacucua

SEQ ID NO: 2179043 - RNA, 19 nt, Homo sapiens
  misc_RNA (1)...(19): siRNA sense strand
ucacaguuaucaucacuuc

SEQ ID NO: 2179044 - RNA, 19 nt, Homo sapiens
  misc_RNA (1)...(19): siRNA sense strand
gaaauggaaagugauauca

SEQ ID NO: 2179045 - RNA, 19 nt, Homo sapiens
  misc_RNA (1)...(19): siRNA sense strand
ccacugcaguucccugaug

SEQ ID NO: 2179046 - RNA, 19 nt, Homo sapiens
  misc_RNA (1)...(19): siRNA sense strand
gaaguugcaucugagaaag

SEQ ID NO: 2179047 - RNA, 19 nt, Homo sapiens
  misc_RNA (1)...(19): siRNA sense strand
gggccucgcuuagaaguug

SEQ ID NO: 2179048 - RNA, 19 nt, Homo sapiens
  misc_RNA (1)...(19): siRNA sense strand
gcacucggcuagcuuacca

SEQ ID NO: 2179049 - RNA, 19 nt, Homo sapiens
  misc_RNA (1)...(19): siRNA sense strand
ggaaauggaacucuaucug

SEQ ID NO: 2179050 - RNA, 19 nt, Homo sapiens
  misc_RNA (1)...(19): siRNA sense strand
caucagacauccagaucau

SEQ ID NO: 2179051 - RNA, 19 nt, Homo sapiens
  misc_RNA (1)...(19): siRNA sense strand
ugaggaacccugucaguga

SEQ ID NO: 2179052 - RNA, 19 nt, Homo sapiens
  misc_RNA (1)...(19): siRNA sense strand
caagugaauucugauaaag

SEQ ID NO: 2179053 - RNA, 19 nt, Homo sapiens
  misc_RNA (1)...(19): siRNA sense strand
ccaugaagaugcucuggau

SEQ ID NO: 2179054 - RNA, 19 nt, Homo sapiens
  misc_RNA (1)...(19): siRNA sense strand
ggaauaccaacacaaguuc

SEQ ID NO: 2179055 - RNA, 19 nt, Homo sapiens
  misc_RNA (1)...(19): siRNA sense strand
acacaaugcccaaauacuu

SEQ ID NO: 2179056 - RNA, 19 nt, Homo sapiens
  misc_RNA (1)...(19): siRNA sense strand
gaggccauccuauuugauu

SEQ ID NO: 2179057 - RNA, 19 nt, Homo sapiens
  misc_RNA (1)...(19): siRNA sense strand
caacaccuacuccuggauu

SEQ ID NO: 2179058 - RNA, 19 nt, Homo sapiens
  misc_RNA (1)...(19): siRNA sense strand
gagaaaguagcccagaaga

SEQ ID NO: 2179059 - RNA, 19 nt, Homo sapiens
  misc_RNA (1)...(19): siRNA sense strand
agaaacagaauacaggaaa

SEQ ID NO: 2179060 - RNA, 19 nt, Homo sapiens
  misc_RNA (1)...(19): siRNA sense strand
gaucauauggcuauuugag

SEQ ID NO: 2179061 - RNA, 19 nt, Homo sapiens
  misc_RNA (1)...(19): siRNA sense strand
cuagaaggcaggccagaaa

SEQ ID NO: 2179062 - RNA, 19 nt, Homo sapiens
  misc_RNA (1)...(19): siRNA sense strand
cccacacaaugcccaaaua

SEQ ID NO: 2179063 - RNA, 19 nt, Homo sapiens
  misc_RNA (1)...(19): siRNA sense strand
uggagaggccauccuauuu

SEQ ID NO: 2179064 - RNA, 19 nt, Homo sapiens
  misc_RNA (1)...(19): siRNA sense strand
gaaagugauaucauuaugc

SEQ ID NO: 2179065 - RNA, 19 nt, Homo sapiens
  misc_RNA (1)...(19): siRNA sense strand
caaagccaguggugcagau

SEQ ID NO: 2179066 - RNA, 19 nt, Homo sapiens
  misc_RNA (1)...(19): siRNA sense strand
ggaagacauugggaauuac

SEQ ID NO: 2179067 - RNA, 19 nt, Homo sapiens
  misc_RNA (1)...(19): siRNA sense strand
ggaugacuucggaauauau

SEQ ID NO: 2179068 - RNA, 19 nt, Homo sapiens
  misc_RNA (1)...(19): siRNA sense strand
uggaugacuucggaauaua

SEQ ID NO: 2179069 - RNA, 19 nt, Homo sapiens
  misc_RNA (1)...(19): siRNA sense strand
aagaugcucuggaugacuu

SEQ ID NO: 2179070 - RNA, 19 nt, Homo sapiens
  misc_RNA (1)...(19): siRNA sense strand
ucagacauccagaucauau

SEQ ID NO: 2179071 - RNA, 19 nt, Homo sapiens
  misc_RNA (1)...(19): siRNA sense strand
uuauggaccuuauggacuu

SEQ ID NO: 2179072 - RNA, 19 nt, Homo sapiens
  misc_RNA (1)...(19): siRNA sense strand
gaagacauugggaauuaca

SEQ ID NO: 2179073 - RNA, 19 nt, Homo sapiens
  misc_RNA (1)...(19): siRNA sense strand
caaggaagacauugggaau

SEQ ID NO: 2179074 - RNA, 19 nt, Homo sapiens
  misc_RNA (1)...(19): siRNA sense strand
gaauacaggaaagcucaaa

SEQ ID NO: 2179075 - RNA, 19 nt, Homo sapiens
  misc_RNA (1)...(19): siRNA sense strand
ugucuucucuuccuaugga

SEQ ID NO: 2179076 - RNA, 19 nt, Homo sapiens
  misc_RNA (1)...(19): siRNA sense strand
gaaaggaaaaucauuguca

SEQ ID NO: 2179077 - RNA, 19 nt, Homo sapiens
  misc_RNA (1)...(19): siRNA sense strand
gaagacaauggacuaugug

SEQ ID NO: 2179078 - RNA, 19 nt, Homo sapiens
  misc_RNA (1)...(19): siRNA sense strand
caaugcaucucugcuuauc

SEQ ID NO: 2179079 - RNA, 19 nt, Homo sapiens
  misc_RNA (1)...(19): siRNA sense strand
acaggaaagcucaaacauu

SEQ ID NO: 2179080 - RNA, 19 nt, Homo sapiens
  misc_RNA (1)...(19): siRNA sense strand
ggucaacauucagggaaau

SEQ ID NO: 2179081 - RNA, 19 nt, Homo sapiens
  misc_RNA (1)...(19): siRNA sense strand
cuaccuacccguccacuau

SEQ ID NO: 2179082 - RNA, 19 nt, Homo sapiens
  misc_RNA (1)...(19): siRNA sense strand
ucggcuagcuuaccaaugg

SEQ ID NO: 2179083 - RNA, 19 nt, Homo sapiens
  misc_RNA (1)...(19): siRNA sense strand
agauacaagucacgguuga

SEQ ID NO: 2179084 - RNA, 19 nt, Homo sapiens
  misc_RNA (1)...(19): siRNA sense strand
gaaggugacagugccauca

SEQ ID NO: 2179085 - RNA, 19 nt, Homo sapiens
  misc_RNA (1)...(19): siRNA sense strand
cuggaugacuucggaauau

SEQ ID NO: 2179086 - RNA, 19 nt, Homo sapiens
  misc_RNA (1)...(19): siRNA sense strand
uagcaaguauaacuggaau

SEQ ID NO: 2179087 - RNA, 19 nt, Homo sapiens
  misc_RNA (1)...(19): siRNA sense strand
ggaaaaucauugucaccuu

SEQ ID NO: 2179088 - RNA, 19 nt, Homo sapiens
  misc_RNA (1)...(19): siRNA sense strand
agaaguugcaucugagaaa

SEQ ID NO: 2179089 - RNA, 19 nt, Homo sapiens
  misc_RNA (1)...(19): siRNA sense strand
gaauaagucugugguuccu

SEQ ID NO: 2179090 - RNA, 19 nt, Homo sapiens
  misc_RNA (1)...(19): siRNA sense strand
uugaugauccugucacaaa

SEQ ID NO: 2179091 - RNA, 19 nt, Homo sapiens
  misc_RNA (1)...(19): siRNA sense strand
gacugacaauacuacauau

SEQ ID NO: 2179092 - RNA, 19 nt, Homo sapiens
  misc_RNA (1)...(19): siRNA sense strand
uggaauaccaacacaaguu

SEQ ID NO: 2179093 - RNA, 19 nt, Homo sapiens
  misc_RNA (1)...(19): siRNA sense strand
gcaggcaagaugaaacuca

SEQ ID NO: 2179094 - RNA, 19 nt, Homo sapiens
  misc_RNA (1)...(19): siRNA sense strand
gacuaugugugcugugcuu

SEQ ID NO: 2179095 - RNA, 19 nt, Homo sapiens
  misc_RNA (1)...(19): siRNA sense strand
ggaacccugucagugaaau

SEQ ID NO: 2179096 - RNA, 19 nt, Homo sapiens
  misc_RNA (1)...(19): siRNA sense strand
gugcugugcuuacaacaac

SEQ ID NO: 2179097 - RNA, 19 nt, Homo sapiens
  misc_RNA (1)...(19): siRNA sense strand
uaggaggacugacaauacu

SEQ ID NO: 2179098 - RNA, 19 nt, Homo sapiens
  misc_RNA (1)...(19): siRNA sense strand
augcaucucugcuuaucaa

SEQ ID NO: 2179099 - RNA, 19 nt, Homo sapiens
  misc_RNA (1)...(19): siRNA sense strand
gcaggccagaaacagaaua

SEQ ID NO: 2179100 - RNA, 19 nt, Homo sapiens
  misc_RNA (1)...(19): siRNA sense strand
aaaaguaggggaaguguuu

SEQ ID NO: 2179101 - RNA, 19 nt, Homo sapiens
  misc_RNA (1)...(19): siRNA sense strand
gauaaagggcuaaaaguag

SEQ ID NO: 2179102 - RNA, 19 nt, Homo sapiens
  misc_RNA (1)...(19): siRNA sense strand
cagcuccaccuacuccuuu

SEQ ID NO: 2179103 - RNA, 19 nt, Homo sapiens
  misc_RNA (1)...(19): siRNA sense strand
caaaacaauacccuucaua

SEQ ID NO: 2179104 - RNA, 19 nt, Homo sapiens
  misc_RNA (1)...(19): siRNA sense strand
ggaaguguuuacuguugac

SEQ ID NO: 2179105 - RNA, 19 nt, Homo sapiens
  misc_RNA (1)...(19): siRNA sense strand
acagcugccuggugaggaa

SEQ ID NO: 2179106 - RNA, 19 nt, Homo sapiens
  misc_RNA (1)...(19): siRNA sense strand
ccagaucauauggcuauuu

SEQ ID NO: 2179107 - RNA, 19 nt, Homo sapiens
  misc_RNA (1)...(19): siRNA sense strand
aauaucaacccuacaaagu

SEQ ID NO: 2179108 - RNA, 19 nt, Homo sapiens
  misc_RNA (1)...(19): siRNA sense strand
ggggaaguguuuacuguug

SEQ ID NO: 2179109 - RNA, 19 nt, Homo sapiens
  misc_RNA (1)...(19): siRNA sense strand
ugaaauggaaagugauauc

SEQ ID NO: 2179110 - RNA, 19 nt, Homo sapiens
  misc_RNA (1)...(19): siRNA sense strand
ugacuucggaauauaugaa

SEQ ID NO: 2179111 - RNA, 19 nt, Homo sapiens
  misc_RNA (1)...(19): siRNA sense strand
ucaccuuuagcaaguauaa

SEQ ID NO: 2179112 - RNA, 19 nt, Homo sapiens
  misc_RNA (1)...(19): siRNA sense strand
ggauuaggaggacugacaa

SEQ ID NO: 2179113 - RNA, 19 nt, Homo sapiens
  misc_RNA (1)...(19): siRNA sense strand
aacaccuacuccuggauua

SEQ ID NO: 2179114 - RNA, 19 nt, Homo sapiens
  misc_RNA (1)...(19): siRNA sense strand
gauaucauuaugcccauca

SEQ ID NO: 2179115 - RNA, 19 nt, Homo sapiens
  misc_RNA (1)...(19): siRNA sense strand
ggaaucagcugagaaacuu

SEQ ID NO: 2179116 - RNA, 19 nt, Homo sapiens
  misc_RNA (1)...(19): siRNA sense strand
ggcaaacccuucaaucaaa

SEQ ID NO: 2179117 - RNA, 19 nt, Homo sapiens
  misc_RNA (1)...(19): siRNA sense strand
agacagcggucagcucuua

SEQ ID NO: 2179118 - RNA, 19 nt, Homo sapiens
  misc_RNA (1)...(19): siRNA sense strand
gaacauaagaggauucaca

SEQ ID NO: 2179119 - RNA, 19 nt, Homo sapiens
  misc_RNA (1)...(19): siRNA sense strand
gagcaaagucuuaugaaug

SEQ ID NO: 2179120 - RNA, 19 nt, Homo sapiens
  misc_RNA (1)...(19): siRNA sense strand
gcaggaaucagcugagaaa

SEQ ID NO: 2179121 - RNA, 19 nt, Homo sapiens
  misc_RNA (1)...(19): siRNA sense strand
gagaugugauguuggagaa

SEQ ID NO: 2179122 - RNA, 19 nt, Homo sapiens
  misc_RNA (1)...(19): siRNA sense strand
gggcagauaugaugaggau

SEQ ID NO: 2179123 - RNA, 19 nt, Homo sapiens
  misc_RNA (1)...(19): siRNA sense strand
gaggaauucuuucaaugug

SEQ ID NO: 2179124 - RNA, 19 nt, Homo sapiens
  misc_RNA (1)...(19): siRNA sense strand
agucagaauucaacccuua

SEQ ID NO: 2179125 - RNA, 19 nt, Homo sapiens
  misc_RNA (1)...(19): siRNA sense strand
guggacaguugcaggcuua

SEQ ID NO: 2179126 - RNA, 19 nt, Homo sapiens
  misc_RNA (1)...(19): siRNA sense strand
guaaaccgaacacccauaa

SEQ ID NO: 2179127 - RNA, 19 nt, Homo sapiens
  misc_RNA (1)...(19): siRNA sense strand
uaagaggauucacaccaaa

SEQ ID NO: 2179128 - RNA, 19 nt, Homo sapiens
  misc_RNA (1)...(19): siRNA sense strand
gcacacaagcuuuauuaag

SEQ ID NO: 2179129 - RNA, 19 nt, Homo sapiens
  misc_RNA (1)...(19): siRNA sense strand
caucaaagaauccauacaa

SEQ ID NO: 2179130 - RNA, 19 nt, Homo sapiens
  misc_RNA (1)...(19): siRNA sense strand
ccagggcacucacaaagga

SEQ ID NO: 2179131 - RNA, 19 nt, Homo sapiens
  misc_RNA (1)...(19): siRNA sense strand
cuaccaaugugucauaugu

SEQ ID NO: 2179132 - RNA, 19 nt, Homo sapiens
  misc_RNA (1)...(19): siRNA sense strand
ggaggaauucuuucaaugu

SEQ ID NO: 2179133 - RNA, 19 nt, Homo sapiens
  misc_RNA (1)...(19): siRNA sense strand
gcaaacccuucaaucaaag

SEQ ID NO: 2179134 - RNA, 19 nt, Homo sapiens
  misc_RNA (1)...(19): siRNA sense strand
cugaagauuuagagucaua

SEQ ID NO: 2179135 - RNA, 19 nt, Homo sapiens
  misc_RNA (1)...(19): siRNA sense strand
caaagaauccauacaaagg

SEQ ID NO: 2179136 - RNA, 19 nt, Homo sapiens
  misc_RNA (1)...(19): siRNA sense strand
uaagauaucagugguaaug

SEQ ID NO: 2179137 - RNA, 19 nt, Homo sapiens
  misc_RNA (1)...(19): siRNA sense strand
gcauucaacccuucuaugu

SEQ ID NO: 2179138 - RNA, 19 nt, Homo sapiens
  misc_RNA (1)...(19): siRNA sense strand
ggaagcagggcagauauga

SEQ ID NO: 2179139 - RNA, 19 nt, Homo sapiens
  misc_RNA (1)...(19): siRNA sense strand
gaagccaacccuaccaaug

SEQ ID NO: 2179140 - RNA, 19 nt, Homo sapiens
  misc_RNA (1)...(19): siRNA sense strand
gaagccagacacaagauga

SEQ ID NO: 2179141 - RNA, 19 nt, Homo sapiens
  misc_RNA (1)...(19): siRNA sense strand
cuaccgagaugugauguug

SEQ ID NO: 2179142 - RNA, 19 nt, Homo sapiens
  misc_RNA (1)...(19): siRNA sense strand
uggcacacaagcuuuauua

SEQ ID NO: 2179143 - RNA, 19 nt, Homo sapiens
  misc_RNA (1)...(19): siRNA sense strand
gaucagaaugcgcaaacaa

SEQ ID NO: 2179144 - RNA, 19 nt, Homo sapiens
  misc_RNA (1)...(19): siRNA sense strand
gaucaacaucaaagaauuc

SEQ ID NO: 2179145 - RNA, 19 nt, Homo sapiens
  misc_RNA (1)...(19): siRNA sense strand
gaaaagucauuaggcguaa

SEQ ID NO: 2179146 - RNA, 19 nt, Homo sapiens
  misc_RNA (1)...(19): siRNA sense strand
aaacaagccauacagaugu

SEQ ID NO: 2179147 - RNA, 19 nt, Homo sapiens
  misc_RNA (1)...(19): siRNA sense strand
gguggaagcagggcagaua

SEQ ID NO: 2179148 - RNA, 19 nt, Homo sapiens
  misc_RNA (1)...(19): siRNA sense strand
aucaacagauucacaguaa

SEQ ID NO: 2179149 - RNA, 19 nt, Homo sapiens
  misc_RNA (1)...(19): siRNA sense strand
uaaacagugucaccugcaa

SEQ ID NO: 2179150 - RNA, 19 nt, Homo sapiens
  misc_RNA (1)...(19): siRNA sense strand
uaaagaauuuguggacagu

SEQ ID NO: 2179151 - RNA, 19 nt, Homo sapiens
  misc_RNA (1)...(19): siRNA sense strand
cagcaucaaagaauccaua

SEQ ID NO: 2179152 - RNA, 19 nt, Homo sapiens
  misc_RNA (1)...(19): siRNA sense strand
caucaacagauucacagua

SEQ ID NO: 2179153 - RNA, 19 nt, Homo sapiens
  misc_RNA (1)...(19): siRNA sense strand
gcucgcguaucuuguugaa

SEQ ID NO: 2179154 - RNA, 19 nt, Homo sapiens
  misc_RNA (1)...(19): siRNA sense strand
aagaauuuguggacaguug

SEQ ID NO: 2179155 - RNA, 19 nt, Homo sapiens
  misc_RNA (1)...(19): siRNA sense strand
gcaccagggcacucacaaa

SEQ ID NO: 2179156 - RNA, 19 nt, Homo sapiens
  misc_RNA (1)...(19): siRNA sense strand
aaaccgaacacccauaaau

SEQ ID NO: 2179157 - RNA, 19 nt, Homo sapiens
  misc_RNA (1)...(19): siRNA sense strand
gcagcucgcguaucuuguu

SEQ ID NO: 2179158 - RNA, 19 nt, Homo sapiens
  misc_RNA (1)...(19): siRNA sense strand
cuacuaguggugaugaaua

SEQ ID NO: 2179159 - RNA, 19 nt, Homo sapiens
  misc_RNA (1)...(19): siRNA sense strand
guaggaauguggaucucau

SEQ ID NO: 2179160 - RNA, 19 nt, Homo sapiens
  misc_RNA (1)...(19): siRNA sense strand
auaagaggauucacaccaa

SEQ ID NO: 2179161 - RNA, 19 nt, Homo sapiens
  misc_RNA (1)...(19): siRNA sense strand
agagcaaagucuuaugaau

SEQ ID NO: 2179162 - RNA, 19 nt, Homo sapiens
  misc_RNA (1)...(19): siRNA sense strand
cgauguacuucaccagaga

SEQ ID NO: 2179163 - RNA, 19 nt, Homo sapiens
  misc_RNA (1)...(19): siRNA sense strand
uugaggauguggcgaugua

SEQ ID NO: 2179164 - RNA, 19 nt, Homo sapiens
  misc_RNA (1)...(19): siRNA sense strand
aggcuuacuuucccuacua

SEQ ID NO: 2179165 - RNA, 19 nt, Homo sapiens
  misc_RNA (1)...(19): siRNA sense strand
caacagauucacaguaaac

SEQ ID NO: 2179166 - RNA, 19 nt, Homo sapiens
  misc_RNA (1)...(19): siRNA sense strand
ucaacagauucacaguaaa

SEQ ID NO: 2179167 - RNA, 19 nt, Homo sapiens
  misc_RNA (1)...(19): siRNA sense strand
ccauacagaugucaugacu

SEQ ID NO: 2179168 - RNA, 19 nt, Homo sapiens
  misc_RNA (1)...(19): siRNA sense strand
cguaaggcaugguuugauc

SEQ ID NO: 2179169 - RNA, 19 nt, Homo sapiens
  misc_RNA (1)...(19): siRNA sense strand
gguagugcuugcccagguu

SEQ ID NO: 2179170 - RNA, 19 nt, Homo sapiens
  misc_RNA (1)...(19): siRNA sense strand
aaggaggaauucuuucaau

SEQ ID NO: 2179171 - RNA, 19 nt, Homo sapiens
  misc_RNA (1)...(19): siRNA sense strand
ucaaagaauccauacaaag

SEQ ID NO: 2179172 - RNA, 19 nt, Homo sapiens
  misc_RNA (1)...(19): siRNA sense strand
auucaacccuucuauguca

SEQ ID NO: 2179173 - RNA, 19 nt, Homo sapiens
  misc_RNA (1)...(19): siRNA sense strand
uggcaaacccuucaaucaa

SEQ ID NO: 2179174 - RNA, 19 nt, Homo sapiens
  misc_RNA (1)...(19): siRNA sense strand
ccauaaaugccuugagugu

SEQ ID NO: 2179175 - RNA, 19 nt, Homo sapiens
  misc_RNA (1)...(19): siRNA sense strand
cgaauucucacaagagcaa

SEQ ID NO: 2179176 - RNA, 19 nt, Homo sapiens
  misc_RNA (1)...(19): siRNA sense strand
caaugugucauauguggaa

SEQ ID NO: 2179177 - RNA, 19 nt, Homo sapiens
  misc_RNA (1)...(19): siRNA sense strand
gaucucauucagcaucaaa

SEQ ID NO: 2179178 - RNA, 19 nt, Homo sapiens
  misc_RNA (1)...(19): siRNA sense strand
ccauaaaugcagugaaugu

SEQ ID NO: 2179179 - RNA, 19 nt, Homo sapiens
  misc_RNA (1)...(19): siRNA sense strand
cgccauaaaugccuugagu

SEQ ID NO: 2179180 - RNA, 19 nt, Homo sapiens
  misc_RNA (1)...(19): siRNA sense strand
ugucaugacuguggaaagu

SEQ ID NO: 2179181 - RNA, 19 nt, Homo sapiens
  misc_RNA (1)...(19): siRNA sense strand
aaggacagauauccacaug

SEQ ID NO: 2179182 - RNA, 19 nt, Homo sapiens
  misc_RNA (1)...(19): siRNA sense strand
acccauaaaugcagugaau

SEQ ID NO: 2179183 - RNA, 19 nt, Homo sapiens
  misc_RNA (1)...(19): siRNA sense strand
cuucaaaaccuuaaccuua

SEQ ID NO: 2179184 - RNA, 19 nt, Homo sapiens
  misc_RNA (1)...(19): siRNA sense strand
caaguggcacacaagcuuu

SEQ ID NO: 2179185 - RNA, 19 nt, Homo sapiens
  misc_RNA (1)...(19): siRNA sense strand
ucaaguggcacacaagcuu

SEQ ID NO: 2179186 - RNA, 19 nt, Homo sapiens
  misc_RNA (1)...(19): siRNA sense strand
ucuaugucaucaacagauu

SEQ ID NO: 2179187 - RNA, 19 nt, Homo sapiens
  misc_RNA (1)...(19): siRNA sense strand
caacaucaaagaauucacu

SEQ ID NO: 2179188 - RNA, 19 nt, Homo sapiens
  misc_RNA (1)...(19): siRNA sense strand
cagaaaaguuacauaagug

SEQ ID NO: 2179189 - RNA, 19 nt, Homo sapiens
  misc_RNA (1)...(19): siRNA sense strand
ucugucagcuggagaacug

SEQ ID NO: 2179190 - RNA, 19 nt, Homo sapiens
  misc_RNA (1)...(19): siRNA sense strand
gagcgaauucucacaagag

SEQ ID NO: 2179191 - RNA, 19 nt, Homo sapiens
  misc_RNA (1)...(19): siRNA sense strand
aagcagggcagauaugaug

SEQ ID NO: 2179192 - RNA, 19 nt, Homo sapiens
  misc_RNA (1)...(19): siRNA sense strand
gaugugauguuggagaacu

SEQ ID NO: 2179193 - RNA, 19 nt, Homo sapiens
  misc_RNA (1)...(19): siRNA sense strand
gaggauggcaaacccuuca

SEQ ID NO: 2179194 - RNA, 19 nt, Homo sapiens
  misc_RNA (1)...(19): siRNA sense strand
aggaggaauucuuucaaug

SEQ ID NO: 2179195 - RNA, 19 nt, Homo sapiens
  misc_RNA (1)...(19): siRNA sense strand
auacaaaggaggaauucuu

SEQ ID NO: 2179196 - RNA, 19 nt, Homo sapiens
  misc_RNA (1)...(19): siRNA sense strand
aaagaauccauacaaagga

SEQ ID NO: 2179197 - RNA, 19 nt, Homo sapiens
  misc_RNA (1)...(19): siRNA sense strand
ucaugacuguggaaagugu

SEQ ID NO: 2179198 - RNA, 19 nt, Homo sapiens
  misc_RNA (1)...(19): siRNA sense strand
gacaguugcaggcuuacuu

SEQ ID NO: 2179199 - RNA, 19 nt, Homo sapiens
  misc_RNA (1)...(19): siRNA sense strand
cgagaacugggaauaggaa

SEQ ID NO: 2179200 - RNA, 19 nt, Homo sapiens
  misc_RNA (1)...(19): siRNA sense strand
gaaggaccucuaccgagau

SEQ ID NO: 2179201 - RNA, 19 nt, Homo sapiens
  misc_RNA (1)...(19): siRNA sense strand
gaggauucacaccaaagaa

SEQ ID NO: 2179202 - RNA, 19 nt, Homo sapiens
  misc_RNA (1)...(19): siRNA sense strand
cagcucgcguaucuuguug

SEQ ID NO: 2179203 - RNA, 19 nt, Homo sapiens
  misc_RNA (1)...(19): siRNA sense strand
agcaaagucuuaugaaugc

SEQ ID NO: 2179204 - RNA, 19 nt, Homo sapiens
  misc_RNA (1)...(19): siRNA sense strand
gaagcagggcagauaugau

SEQ ID NO: 2179205 - RNA, 19 nt, Homo sapiens
  misc_RNA (1)...(19): siRNA sense strand
cuaccgagaacugggaaua

SEQ ID NO: 2179206 - RNA, 19 nt, Homo sapiens
  misc_RNA (1)...(19): siRNA sense strand
ggaagccaacccuaccaau

SEQ ID NO: 2179207 - RNA, 19 nt, Homo sapiens
  misc_RNA (1)...(19): siRNA sense strand
cgacaucaggucauucaca

SEQ ID NO: 2179208 - RNA, 19 nt, Homo sapiens
  misc_RNA (1)...(19): siRNA sense strand
ucccaaaccugagaugauc

SEQ ID NO: 2179209 - RNA, 19 nt, Homo sapiens
  misc_RNA (1)...(19): siRNA sense strand
ggaccucuaccgagaugug

SEQ ID NO: 2179210 - RNA, 19 nt, Homo sapiens
  misc_RNA (1)...(19): siRNA sense strand
gaaugcagugaauguggaa

SEQ ID NO: 2179211 - RNA, 19 nt, Homo sapiens
  misc_RNA (1)...(19): siRNA sense strand
aagccaacccuaccaaugu

SEQ ID NO: 2179212 - RNA, 19 nt, Homo sapiens
  misc_RNA (1)...(19): siRNA sense strand
ggagaacuacaggaacaug

SEQ ID NO: 2179213 - RNA, 19 nt, Homo sapiens
  misc_RNA (1)...(19): siRNA sense strand
cggcagcucgcguaucuug

SEQ ID NO: 2179214 - RNA, 19 nt, Homo sapiens
  misc_RNA (1)...(19): siRNA sense strand
aggcaugguuugaucaaca

SEQ ID NO: 2179215 - RNA, 19 nt, Homo sapiens
  misc_RNA (1)...(19): siRNA sense strand
ggaaucagcugagaaacuu

SEQ ID NO: 2179216 - RNA, 19 nt, Homo sapiens
  misc_RNA (1)...(19): siRNA sense strand
ggcaaacccuucaaucaaa

SEQ ID NO: 2179217 - RNA, 19 nt, Homo sapiens
  misc_RNA (1)...(19): siRNA sense strand
agacagcggucagcucuua

SEQ ID NO: 2179218 - RNA, 19 nt, Homo sapiens
  misc_RNA (1)...(19): siRNA sense strand
gaacauaagaggauucaca

SEQ ID NO: 2179219 - RNA, 19 nt, Homo sapiens
  misc_RNA (1)...(19): siRNA sense strand
gagcaaagucuuaugaaug

SEQ ID NO: 2179220 - RNA, 19 nt, Homo sapiens
  misc_RNA (1)...(19): siRNA sense strand
gcaggaaucagcugagaaa

SEQ ID NO: 2179221 - RNA, 19 nt, Homo sapiens
  misc_RNA (1)...(19): siRNA sense strand
gagaugugauguuggagaa

SEQ ID NO: 2179222 - RNA, 19 nt, Homo sapiens
  misc_RNA (1)...(19): siRNA sense strand
gggcagauaugaugaggau

SEQ ID NO: 2179223 - RNA, 19 nt, Homo sapiens
  misc_RNA (1)...(19): siRNA sense strand
gaggaauucuuucaaugug

SEQ ID NO: 2179224 - RNA, 19 nt, Homo sapiens
  misc_RNA (1)...(19): siRNA sense strand
agucagaauucaacccuua

SEQ ID NO: 2179225 - RNA, 19 nt, Homo sapiens
  misc_RNA (1)...(19): siRNA sense strand
guggacaguugcaggcuua

SEQ ID NO: 2179226 - RNA, 19 nt, Homo sapiens
  misc_RNA (1)...(19): siRNA sense strand
guaaaccgaacacccauaa

SEQ ID NO: 2179227 - RNA, 19 nt, Homo sapiens
  misc_RNA (1)...(19): siRNA sense strand
uaagaggauucacaccaaa

SEQ ID NO: 2179228 - RNA, 19 nt, Homo sapiens
  misc_RNA (1)...(19): siRNA sense strand
gcacacaagcuuuauuaag

SEQ ID NO: 2179229 - RNA, 19 nt, Homo sapiens
  misc_RNA (1)...(19): siRNA sense strand
caucaaagaauccauacaa

SEQ ID NO: 2179230 - RNA, 19 nt, Homo sapiens
  misc_RNA (1)...(19): siRNA sense strand
ccagggcacucacaaagga

SEQ ID NO: 2179231 - RNA, 19 nt, Homo sapiens
  misc_RNA (1)...(19): siRNA sense strand
cuaccaaugugucauaugu

SEQ ID NO: 2179232 - RNA, 19 nt, Homo sapiens
  misc_RNA (1)...(19): siRNA sense strand
ggaggaauucuuucaaugu

SEQ ID NO: 2179233 - RNA, 19 nt, Homo sapiens
  misc_RNA (1)...(19): siRNA sense strand
gcaaacccuucaaucaaag

SEQ ID NO: 2179234 - RNA, 19 nt, Homo sapiens
  misc_RNA (1)...(19): siRNA sense strand
cugaagauuuagagucaua

SEQ ID NO: 2179235 - RNA, 19 nt, Homo sapiens
  misc_RNA (1)...(19): siRNA sense strand
caaagaauccauacaaagg

SEQ ID NO: 2179236 - RNA, 19 nt, Homo sapiens
  misc_RNA (1)...(19): siRNA sense strand
uaagauaucagugguaaug

SEQ ID NO: 2179237 - RNA, 19 nt, Homo sapiens
  misc_RNA (1)...(19): siRNA sense strand
gcauucaacccuucuaugu

SEQ ID NO: 2179238 - RNA, 19 nt, Homo sapiens
  misc_RNA (1)...(19): siRNA sense strand
ggaagcagggcagauauga

SEQ ID NO: 2179239 - RNA, 19 nt, Homo sapiens
  misc_RNA (1)...(19): siRNA sense strand
gaagccaacccuaccaaug

SEQ ID NO: 2179240 - RNA, 19 nt, Homo sapiens
  misc_RNA (1)...(19): siRNA sense strand
gaagccagacacaagauga

SEQ ID NO: 2179241 - RNA, 19 nt, Homo sapiens
  misc_RNA (1)...(19): siRNA sense strand
cuaccgagaugugauguug

SEQ ID NO: 2179242 - RNA, 19 nt, Homo sapiens
  misc_RNA (1)...(19): siRNA sense strand
uggcacacaagcuuuauua

SEQ ID NO: 2179243 - RNA, 19 nt, Homo sapiens
  misc_RNA (1)...(19): siRNA sense strand
gaucagaaugcgcaaacaa

SEQ ID NO: 2179244 - RNA, 19 nt, Homo sapiens
  misc_RNA (1)...(19): siRNA sense strand
gaucaacaucaaagaauuc

SEQ ID NO: 2179245 - RNA, 19 nt, Homo sapiens
  misc_RNA (1)...(19): siRNA sense strand
gaaaagucauuaggcguaa

SEQ ID NO: 2179246 - RNA, 19 nt, Homo sapiens
  misc_RNA (1)...(19): siRNA sense strand
aaacaagccauacagaugu

SEQ ID NO: 2179247 - RNA, 19 nt, Homo sapiens
  misc_RNA (1)...(19): siRNA sense strand
gguggaagcagggcagaua

SEQ ID NO: 2179248 - RNA, 19 nt, Homo sapiens
  misc_RNA (1)...(19): siRNA sense strand
aucaacagauucacaguaa

SEQ ID NO: 2179249 - RNA, 19 nt, Homo sapiens
  misc_RNA (1)...(19): siRNA sense strand
uaaacagugucaccugcaa

SEQ ID NO: 2179250 - RNA, 19 nt, Homo sapiens
  misc_RNA (1)...(19): siRNA sense strand
uaaagaauuuguggacagu

SEQ ID NO: 2179251 - RNA, 19 nt, Homo sapiens
  misc_RNA (1)...(19): siRNA sense strand
cagcaucaaagaauccaua

SEQ ID NO: 2179252 - RNA, 19 nt, Homo sapiens
  misc_RNA (1)...(19): siRNA sense strand
caucaacagauucacagua

SEQ ID NO: 2179253 - RNA, 19 nt, Homo sapiens
  misc_RNA (1)...(19): siRNA sense strand
gcucgcguaucuuguugaa

SEQ ID NO: 2179254 - RNA, 19 nt, Homo sapiens
  misc_RNA (1)...(19): siRNA sense strand
aagaauuuguggacaguug

SEQ ID NO: 2179255 - RNA, 19 nt, Homo sapiens
  misc_RNA (1)...(19): siRNA sense strand
gcaccagggcacucacaaa

SEQ ID NO: 2179256 - RNA, 19 nt, Homo sapiens
  misc_RNA (1)...(19): siRNA sense strand
aaaccgaacacccauaaau

SEQ ID NO: 2179257 - RNA, 19 nt, Homo sapiens
  misc_RNA (1)...(19): siRNA sense strand
gcagcucgcguaucuuguu

SEQ ID NO: 2179258 - RNA, 19 nt, Homo sapiens
  misc_RNA (1)...(19): siRNA sense strand
cuacuaguggugaugaaua

SEQ ID NO: 2179259 - RNA, 19 nt, Homo sapiens
  misc_RNA (1)...(19): siRNA sense strand
guaggaauguggaucucau

SEQ ID NO: 2179260 - RNA, 19 nt, Homo sapiens
  misc_RNA (1)...(19): siRNA sense strand
auaagaggauucacaccaa

SEQ ID NO: 2179261 - RNA, 19 nt, Homo sapiens
  misc_RNA (1)...(19): siRNA sense strand
agagcaaagucuuaugaau

SEQ ID NO: 2179262 - RNA, 19 nt, Homo sapiens
  misc_RNA (1)...(19): siRNA sense strand
cgauguacuucaccagaga

SEQ ID NO: 2179263 - RNA, 19 nt, Homo sapiens
  misc_RNA (1)...(19): siRNA sense strand
uugaggauguggcgaugua

SEQ ID NO: 2179264 - RNA, 19 nt, Homo sapiens
  misc_RNA (1)...(19): siRNA sense strand
aggcuuacuuucccuacua

SEQ ID NO: 2179265 - RNA, 19 nt, Homo sapiens
  misc_RNA (1)...(19): siRNA sense strand
caacagauucacaguaaac

SEQ ID NO: 2179266 - RNA, 19 nt, Homo sapiens
  misc_RNA (1)...(19): siRNA sense strand
ucaacagauucacaguaaa

SEQ ID NO: 2179267 - RNA, 19 nt, Homo sapiens
  misc_RNA (1)...(19): siRNA sense strand
ccauacagaugucaugacu

SEQ ID NO: 2179268 - RNA, 19 nt, Homo sapiens
  misc_RNA (1)...(19): siRNA sense strand
cguaaggcaugguuugauc

SEQ ID NO: 2179269 - RNA, 19 nt, Homo sapiens
  misc_RNA (1)...(19): siRNA sense strand
gguagugcuugcccagguu

SEQ ID NO: 2179270 - RNA, 19 nt, Homo sapiens
  misc_RNA (1)...(19): siRNA sense strand
aaggaggaauucuuucaau

SEQ ID NO: 2179271 - RNA, 19 nt, Homo sapiens
  misc_RNA (1)...(19): siRNA sense strand
ucaaagaauccauacaaag

SEQ ID NO: 2179272 - RNA, 19 nt, Homo sapiens
  misc_RNA (1)...(19): siRNA sense strand
auucaacccuucuauguca

SEQ ID NO: 2179273 - RNA, 19 nt, Homo sapiens
  misc_RNA (1)...(19): siRNA sense strand
uggcaaacccuucaaucaa

SEQ ID NO: 2179274 - RNA, 19 nt, Homo sapiens
  misc_RNA (1)...(19): siRNA sense strand
ccauaaaugccuugagugu

SEQ ID NO: 2179275 - RNA, 19 nt, Homo sapiens
  misc_RNA (1)...(19): siRNA sense strand
cgaauucucacaagagcaa

SEQ ID NO: 2179276 - RNA, 19 nt, Homo sapiens
  misc_RNA (1)...(19): siRNA sense strand
caaugugucauauguggaa

SEQ ID NO: 2179277 - RNA, 19 nt, Homo sapiens
  misc_RNA (1)...(19): siRNA sense strand
gaucucauucagcaucaaa

SEQ ID NO: 2179278 - RNA, 19 nt, Homo sapiens
  misc_RNA (1)...(19): siRNA sense strand
ccauaaaugcagugaaugu

SEQ ID NO: 2179279 - RNA, 19 nt, Homo sapiens
  misc_RNA (1)...(19): siRNA sense strand
cgccauaaaugccuugagu

SEQ ID NO: 2179280 - RNA, 19 nt, Homo sapiens
  misc_RNA (1)...(19): siRNA sense strand
ugucaugacuguggaaagu

SEQ ID NO: 2179281 - RNA, 19 nt, Homo sapiens
  misc_RNA (1)...(19): siRNA sense strand
aaggacagauauccacaug

SEQ ID NO: 2179282 - RNA, 19 nt, Homo sapiens
  misc_RNA (1)...(19): siRNA sense strand
acccauaaaugcagugaau

SEQ ID NO: 2179283 - RNA, 19 nt, Homo sapiens
  misc_RNA (1)...(19): siRNA sense strand
cuucaaaaccuuaaccuua

SEQ ID NO: 2179284 - RNA, 19 nt, Homo sapiens
  misc_RNA (1)...(19): siRNA sense strand
caaguggcacacaagcuuu

SEQ ID NO: 2179285 - RNA, 19 nt, Homo sapiens
  misc_RNA (1)...(19): siRNA sense strand
ucaaguggcacacaagcuu

SEQ ID NO: 2179286 - RNA, 19 nt, Homo sapiens
  misc_RNA (1)...(19): siRNA sense strand
ucuaugucaucaacagauu

SEQ ID NO: 2179287 - RNA, 19 nt, Homo sapiens
  misc_RNA (1)...(19): siRNA sense strand
caacaucaaagaauucacu

SEQ ID NO: 2179288 - RNA, 19 nt, Homo sapiens
  misc_RNA (1)...(19): siRNA sense strand
cagaaaaguuacauaagug

SEQ ID NO: 2179289 - RNA, 19 nt, Homo sapiens
  misc_RNA (1)...(19): siRNA sense strand
ucugucagcuggagaacug

SEQ ID NO: 2179290 - RNA, 19 nt, Homo sapiens
  misc_RNA (1)...(19): siRNA sense strand
gagcgaauucucacaagag

SEQ ID NO: 2179291 - RNA, 19 nt, Homo sapiens
  misc_RNA (1)...(19): siRNA sense strand
aagcagggcagauaugaug

SEQ ID NO: 2179292 - RNA, 19 nt, Homo sapiens
  misc_RNA (1)...(19): siRNA sense strand
gaugugauguuggagaacu

SEQ ID NO: 2179293 - RNA, 19 nt, Homo sapiens
  misc_RNA (1)...(19): siRNA sense strand
gaggauggcaaacccuuca

SEQ ID NO: 2179294 - RNA, 19 nt, Homo sapiens
  misc_RNA (1)...(19): siRNA sense strand
aggaggaauucuuucaaug

SEQ ID NO: 2179295 - RNA, 19 nt, Homo sapiens
  misc_RNA (1)...(19): siRNA sense strand
auacaaaggaggaauucuu

SEQ ID NO: 2179296 - RNA, 19 nt, Homo sapiens
  misc_RNA (1)...(19): siRNA sense strand
aaagaauccauacaaagga

SEQ ID NO: 2179297 - RNA, 19 nt, Homo sapiens
  misc_RNA (1)...(19): siRNA sense strand
ucaugacuguggaaagugu

SEQ ID NO: 2179298 - RNA, 19 nt, Homo sapiens
  misc_RNA (1)...(19): siRNA sense strand
gacaguugcaggcuuacuu

SEQ ID NO: 2179299 - RNA, 19 nt, Homo sapiens
  misc_RNA (1)...(19): siRNA sense strand
cgagaacugggaauaggaa

SEQ ID NO: 2179300 - RNA, 19 nt, Homo sapiens
  misc_RNA (1)...(19): siRNA sense strand
gaaggaccucuaccgagau

SEQ ID NO: 2179301 - RNA, 19 nt, Homo sapiens
  misc_RNA (1)...(19): siRNA sense strand
gaggauucacaccaaagaa

SEQ ID NO: 2179302 - RNA, 19 nt, Homo sapiens
  misc_RNA (1)...(19): siRNA sense strand
cagcucgcguaucuuguug

SEQ ID NO: 2179303 - RNA, 19 nt, Homo sapiens
  misc_RNA (1)...(19): siRNA sense strand
agcaaagucuuaugaaugc

SEQ ID NO: 2179304 - RNA, 19 nt, Homo sapiens
  misc_RNA (1)...(19): siRNA sense strand
gaagcagggcagauaugau

SEQ ID NO: 2179305 - RNA, 19 nt, Homo sapiens
  misc_RNA (1)...(19): siRNA sense strand
cuaccgagaacugggaaua

SEQ ID NO: 2179306 - RNA, 19 nt, Homo sapiens
  misc_RNA (1)...(19): siRNA sense strand
ggaagccaacccuaccaau

SEQ ID NO: 2179307 - RNA, 19 nt, Homo sapiens
  misc_RNA (1)...(19): siRNA sense strand
cgacaucaggucauucaca

SEQ ID NO: 2179308 - RNA, 19 nt, Homo sapiens
  misc_RNA (1)...(19): siRNA sense strand
ucccaaaccugagaugauc

SEQ ID NO: 2179309 - RNA, 19 nt, Homo sapiens
  misc_RNA (1)...(19): siRNA sense strand
ggaccucuaccgagaugug

SEQ ID NO: 2179310 - RNA, 19 nt, Homo sapiens
  misc_RNA (1)...(19): siRNA sense strand
gaaugcagugaauguggaa

SEQ ID NO: 2179311 - RNA, 19 nt, Homo sapiens
  misc_RNA (1)...(19): siRNA sense strand
aagccaacccuaccaaugu

SEQ ID NO: 2179312 - RNA, 19 nt, Homo sapiens
  misc_RNA (1)...(19): siRNA sense strand
ggagaacuacaggaacaug

SEQ ID NO: 2179313 - RNA, 19 nt, Homo sapiens
  misc_RNA (1)...(19): siRNA sense strand
cggcagcucgcguaucuug

SEQ ID NO: 2179314 - RNA, 19 nt, Homo sapiens
  misc_RNA (1)...(19): siRNA sense strand
aggcaugguuugaucaaca

SEQ ID NO: 2179315 - RNA, 19 nt, Homo sapiens
  misc_RNA (1)...(19): siRNA sense strand
gggaaagccuucagucuua

SEQ ID NO: 2179316 - RNA, 19 nt, Homo sapiens
  misc_RNA (1)...(19): siRNA sense strand
ggagaaggaugguaucgua

SEQ ID NO: 2179317 - RNA, 19 nt, Homo sapiens
  misc_RNA (1)...(19): siRNA sense strand
gaaggaugguaucguaaua

SEQ ID NO: 2179318 - RNA, 19 nt, Homo sapiens
  misc_RNA (1)...(19): siRNA sense strand
gaaagaguuuggagagaaa

SEQ ID NO: 2179319 - RNA, 19 nt, Homo sapiens
  misc_RNA (1)...(19): siRNA sense strand
gaacaaagucucacagaug

SEQ ID NO: 2179320 - RNA, 19 nt, Homo sapiens
  misc_RNA (1)...(19): siRNA sense strand
ggagaaacccuaugaaugu

SEQ ID NO: 2179321 - RNA, 19 nt, Homo sapiens
  misc_RNA (1)...(19): siRNA sense strand
agagaaaccuuaugaaugu

SEQ ID NO: 2179322 - RNA, 19 nt, Homo sapiens
  misc_RNA (1)...(19): siRNA sense strand
gguaaaugcuucacgagaa

SEQ ID NO: 2179323 - RNA, 19 nt, Homo sapiens
  misc_RNA (1)...(19): siRNA sense strand
agagaaaccucaugaaugu

SEQ ID NO: 2179324 - RNA, 19 nt, Homo sapiens
  misc_RNA (1)...(19): siRNA sense strand
gagaaacccuaugaaugua

SEQ ID NO: 2179325 - RNA, 19 nt, Homo sapiens
  misc_RNA (1)...(19): siRNA sense strand
gagagaaaccuuaugaaug

SEQ ID NO: 2179326 - RNA, 19 nt, Homo sapiens
  misc_RNA (1)...(19): siRNA sense strand
gcugaaaccucggaagauu

SEQ ID NO: 2179327 - RNA, 19 nt, Homo sapiens
  misc_RNA (1)...(19): siRNA sense strand
gagagaaaccucaugaaug

SEQ ID NO: 2179328 - RNA, 19 nt, Homo sapiens
  misc_RNA (1)...(19): siRNA sense strand
ggaaagccuucagucuuaa

SEQ ID NO: 2179329 - RNA, 19 nt, Homo sapiens
  misc_RNA (1)...(19): siRNA sense strand
gaagaucccagaaagaguu

SEQ ID NO: 2179330 - RNA, 19 nt, Homo sapiens
  misc_RNA (1)...(19): siRNA sense strand
ggaacaaagucucacagau

SEQ ID NO: 2179331 - RNA, 19 nt, Homo sapiens
  misc_RNA (1)...(19): siRNA sense strand
ggagagaaaccuuaugaau

SEQ ID NO: 2179332 - RNA, 19 nt, Homo sapiens
  misc_RNA (1)...(19): siRNA sense strand
gggaaaggauugggaagaa

SEQ ID NO: 2179333 - RNA, 19 nt, Homo sapiens
  misc_RNA (1)...(19): siRNA sense strand
ugaaggaacuuugucauca

SEQ ID NO: 2179334 - RNA, 19 nt, Homo sapiens
  misc_RNA (1)...(19): siRNA sense strand
ggagagaaaccucaugaau

SEQ ID NO: 2179335 - RNA, 19 nt, Homo sapiens
  misc_RNA (1)...(19): siRNA sense strand
gaugguaucguaauaguga

SEQ ID NO: 2179336 - RNA, 19 nt, Homo sapiens
  misc_RNA (1)...(19): siRNA sense strand
gaaaagcccuaugaaugua

SEQ ID NO: 2179337 - RNA, 19 nt, Homo sapiens
  misc_RNA (1)...(19): siRNA sense strand
acaacaggcaggagaauua

SEQ ID NO: 2179338 - RNA, 19 nt, Homo sapiens
  misc_RNA (1)...(19): siRNA sense strand
gcucggaccucaccaagca

SEQ ID NO: 2179339 - RNA, 19 nt, Homo sapiens
  misc_RNA (1)...(19): siRNA sense strand
acgagaaguucaagccuua

SEQ ID NO: 2179340 - RNA, 19 nt, Homo sapiens
  misc_RNA (1)...(19): siRNA sense strand
gagaaaccuuaugaaugua

SEQ ID NO: 2179341 - RNA, 19 nt, Homo sapiens
  misc_RNA (1)...(19): siRNA sense strand
gggagaaacccuaugaaug

SEQ ID NO: 2179342 - RNA, 19 nt, Homo sapiens
  misc_RNA (1)...(19): siRNA sense strand
agacuuggagcuugauuua

SEQ ID NO: 2179343 - RNA, 19 nt, Homo sapiens
  misc_RNA (1)...(19): siRNA sense strand
agaaagaguuuggagagaa

SEQ ID NO: 2179344 - RNA, 19 nt, Homo sapiens
  misc_RNA (1)...(19): siRNA sense strand
ggaagaggaagaugaggaa

SEQ ID NO: 2179345 - RNA, 19 nt, Homo sapiens
  misc_RNA (1)...(19): siRNA sense strand
gagaaaagcccuaugaaug

SEQ ID NO: 2179346 - RNA, 19 nt, Homo sapiens
  misc_RNA (1)...(19): siRNA sense strand
uagaagacuuggagcuuga

SEQ ID NO: 2179347 - RNA, 19 nt, Homo sapiens
  misc_RNA (1)...(19): siRNA sense strand
gaaggaacuuugucaucag

SEQ ID NO: 2179348 - RNA, 19 nt, Homo sapiens
  misc_RNA (1)...(19): siRNA sense strand
cgaaacucauaccugauuu

SEQ ID NO: 2179349 - RNA, 19 nt, Homo sapiens
  misc_RNA (1)...(19): siRNA sense strand
gagaaaagcccuacaagug

SEQ ID NO: 2179350 - RNA, 19 nt, Homo sapiens
  misc_RNA (1)...(19): siRNA sense strand
ggccagaaauaaacaccaa

SEQ ID NO: 2179351 - RNA, 19 nt, Homo sapiens
  misc_RNA (1)...(19): siRNA sense strand
gaaacccuaugaauguagu

SEQ ID NO: 2179352 - RNA, 19 nt, Homo sapiens
  misc_RNA (1)...(19): siRNA sense strand
agucugagcuccaacuuca

SEQ ID NO: 2179353 - RNA, 19 nt, Homo sapiens
  misc_RNA (1)...(19): siRNA sense strand
agaaaccucaugaauguaa

SEQ ID NO: 2179354 - RNA, 19 nt, Homo sapiens
  misc_RNA (1)...(19): siRNA sense strand
ggaaaggauugggaagaag

SEQ ID NO: 2179355 - RNA, 19 nt, Homo sapiens
  misc_RNA (1)...(19): siRNA sense strand
aacaaagucucacagaugu

SEQ ID NO: 2179356 - RNA, 19 nt, Homo sapiens
  misc_RNA (1)...(19): siRNA sense strand
gaaucuggcucggaggaau

SEQ ID NO: 2179357 - RNA, 19 nt, Homo sapiens
  misc_RNA (1)...(19): siRNA sense strand
cagccucccuugaugcauu

SEQ ID NO: 2179358 - RNA, 19 nt, Homo sapiens
  misc_RNA (1)...(19): siRNA sense strand
gagaaggaugguaucguaa

SEQ ID NO: 2179359 - RNA, 19 nt, Homo sapiens
  misc_RNA (1)...(19): siRNA sense strand
cagaaagaguuuggagaga

SEQ ID NO: 2179360 - RNA, 19 nt, Homo sapiens
  misc_RNA (1)...(19): siRNA sense strand
acaggaagaucccagaaag

SEQ ID NO: 2179361 - RNA, 19 nt, Homo sapiens
  misc_RNA (1)...(19): siRNA sense strand
agaaauaaacaccaaggaa

SEQ ID NO: 2179362 - RNA, 19 nt, Homo sapiens
  misc_RNA (1)...(19): siRNA sense strand
gcucggaggaaucucagua

SEQ ID NO: 2179363 - RNA, 19 nt, Homo sapiens
  misc_RNA (1)...(19): siRNA sense strand
ggagaaagacagcagaaaa

SEQ ID NO: 2179364 - RNA, 19 nt, Homo sapiens
  misc_RNA (1)...(19): siRNA sense strand
gaauguagugaauguggaa

SEQ ID NO: 2179365 - RNA, 19 nt, Homo sapiens
  misc_RNA (1)...(19): siRNA sense strand
gauccacacaggagagaaa

SEQ ID NO: 2179366 - RNA, 19 nt, Homo sapiens
  misc_RNA (1)...(19): siRNA sense strand
ucaccaagcaucagagaau

SEQ ID NO: 2179367 - RNA, 19 nt, Homo sapiens
  misc_RNA (1)...(19): siRNA sense strand
caccaagcaucagagaauu

SEQ ID NO: 2179368 - RNA, 19 nt, Homo sapiens
  misc_RNA (1)...(19): siRNA sense strand
agaauucacacucgagaaa

SEQ ID NO: 2179369 - RNA, 19 nt, Homo sapiens
  misc_RNA (1)...(19): siRNA sense strand
gcuucaggcgcuucuguua

SEQ ID NO: 2179370 - RNA, 19 nt, Homo sapiens
  misc_RNA (1)...(19): siRNA sense strand
cuaugaauguagugaaugu

SEQ ID NO: 2179371 - RNA, 19 nt, Homo sapiens
  misc_RNA (1)...(19): siRNA sense strand
ccgaaacucauaccugauu

SEQ ID NO: 2179372 - RNA, 19 nt, Homo sapiens
  misc_RNA (1)...(19): siRNA sense strand
ccugaaaaguuguguguaa

SEQ ID NO: 2179373 - RNA, 19 nt, Homo sapiens
  misc_RNA (1)...(19): siRNA sense strand
gaauuaugggagcgcauuu

SEQ ID NO: 2179374 - RNA, 19 nt, Homo sapiens
  misc_RNA (1)...(19): siRNA sense strand
ugaugaaugugguaaaugc

SEQ ID NO: 2179375 - RNA, 19 nt, Homo sapiens
  misc_RNA (1)...(19): siRNA sense strand
ggccgugacccuucuagaa

SEQ ID NO: 2179376 - RNA, 19 nt, Homo sapiens
  misc_RNA (1)...(19): siRNA sense strand
gagaaaaccaggaaagaga

SEQ ID NO: 2179377 - RNA, 19 nt, Homo sapiens
  misc_RNA (1)...(19): siRNA sense strand
caacaggaagaucccagaa

SEQ ID NO: 2179378 - RNA, 19 nt, Homo sapiens
  misc_RNA (1)...(19): siRNA sense strand
caacaggcaggagaauuau

SEQ ID NO: 2179379 - RNA, 19 nt, Homo sapiens
  misc_RNA (1)...(19): siRNA sense strand
acuuggagcuugauuuauc

SEQ ID NO: 2179380 - RNA, 19 nt, Homo sapiens
  misc_RNA (1)...(19): siRNA sense strand
gcacaggagaaggauggua

SEQ ID NO: 2179381 - RNA, 19 nt, Homo sapiens
  misc_RNA (1)...(19): siRNA sense strand
caggagagaaaccucauga

SEQ ID NO: 2179382 - RNA, 19 nt, Homo sapiens
  misc_RNA (1)...(19): siRNA sense strand
gggaacaaagucucacaga

SEQ ID NO: 2179383 - RNA, 19 nt, Homo sapiens
  misc_RNA (1)...(19): siRNA sense strand
caacaggucccaggucaag

SEQ ID NO: 2179384 - RNA, 19 nt, Homo sapiens
  misc_RNA (1)...(19): siRNA sense strand
gaagguggaagaggaagau

SEQ ID NO: 2179385 - RNA, 19 nt, Homo sapiens
  misc_RNA (1)...(19): siRNA sense strand
ucaugaauguaacgagugu

SEQ ID NO: 2179386 - RNA, 19 nt, Homo sapiens
  misc_RNA (1)...(19): siRNA sense strand
aaauaaacaccaaggaaca

SEQ ID NO: 2179387 - RNA, 19 nt, Homo sapiens
  misc_RNA (1)...(19): siRNA sense strand
ccaaucucauccuccauca

SEQ ID NO: 2179388 - RNA, 19 nt, Homo sapiens
  misc_RNA (1)...(19): siRNA sense strand
gagaaaccucaugaaugua

SEQ ID NO: 2179389 - RNA, 19 nt, Homo sapiens
  misc_RNA (1)...(19): siRNA sense strand
gaauggggaugucagaauc

SEQ ID NO: 2179390 - RNA, 19 nt, Homo sapiens
  misc_RNA (1)...(19): siRNA sense strand
aaacauucgucucggaaac

SEQ ID NO: 2179391 - RNA, 19 nt, Homo sapiens
  misc_RNA (1)...(19): siRNA sense strand
gagaauucacacucgagaa

SEQ ID NO: 2179392 - RNA, 19 nt, Homo sapiens
  misc_RNA (1)...(19): siRNA sense strand
aggucuggcugcaggaaua

SEQ ID NO: 2179393 - RNA, 19 nt, Homo sapiens
  misc_RNA (1)...(19): siRNA sense strand
ggagaaaagcccuaugaau

SEQ ID NO: 2179394 - RNA, 19 nt, Homo sapiens
  misc_RNA (1)...(19): siRNA sense strand
gggcaaaacaggagaaaga

SEQ ID NO: 2179395 - RNA, 19 nt, Homo sapiens
  misc_RNA (1)...(19): siRNA sense strand
ggaagaucccagaaagagu

SEQ ID NO: 2179396 - RNA, 19 nt, Homo sapiens
  misc_RNA (1)...(19): siRNA sense strand
gacaacaggcaggagaauu

SEQ ID NO: 2179397 - RNA, 19 nt, Homo sapiens
  misc_RNA (1)...(19): siRNA sense strand
ggacaacaggcaggagaau

SEQ ID NO: 2179398 - RNA, 19 nt, Homo sapiens
  misc_RNA (1)...(19): siRNA sense strand
ggucccaggucaaguucau

SEQ ID NO: 2179399 - RNA, 19 nt, Homo sapiens
  misc_RNA (1)...(19): siRNA sense strand
caaacauucgucucggaaa

SEQ ID NO: 2179400 - RNA, 19 nt, Homo sapiens
  misc_RNA (1)...(19): siRNA sense strand
cuaugaauguagugagugu

SEQ ID NO: 2179401 - RNA, 19 nt, Homo sapiens
  misc_RNA (1)...(19): siRNA sense strand
gaagacuuggagcuugauu

SEQ ID NO: 2179402 - RNA, 19 nt, Homo sapiens
  misc_RNA (1)...(19): siRNA sense strand
gaaaccucaugaauguaac

SEQ ID NO: 2179403 - RNA, 19 nt, Homo sapiens
  misc_RNA (1)...(19): siRNA sense strand
uagagcaguuucuuuccau

SEQ ID NO: 2179404 - RNA, 19 nt, Homo sapiens
  misc_RNA (1)...(19): siRNA sense strand
ugggaaagccuucagucuu

SEQ ID NO: 2179405 - RNA, 19 nt, Homo sapiens
  misc_RNA (1)...(19): siRNA sense strand
ugugaugaaugugguaaau

SEQ ID NO: 2179406 - RNA, 19 nt, Homo sapiens
  misc_RNA (1)...(19): siRNA sense strand
gagauucagggccagcuau

SEQ ID NO: 2179407 - RNA, 19 nt, Homo sapiens
  misc_RNA (1)...(19): siRNA sense strand
gcacuauucacagcggauu

SEQ ID NO: 2179408 - RNA, 19 nt, Homo sapiens
  misc_RNA (1)...(19): siRNA sense strand
cagucccacuucaaacauu

SEQ ID NO: 2179409 - RNA, 19 nt, Homo sapiens
  misc_RNA (1)...(19): siRNA sense strand
gaaugagaacgaggaguca

SEQ ID NO: 2179410 - RNA, 19 nt, Homo sapiens
  misc_RNA (1)...(19): siRNA sense strand
ccuuaugaauguaaugagu

SEQ ID NO: 2179411 - RNA, 19 nt, Homo sapiens
  misc_RNA (1)...(19): siRNA sense strand
ccacaguuccaaucucauc

SEQ ID NO: 2179412 - RNA, 19 nt, Homo sapiens
  misc_RNA (1)...(19): siRNA sense strand
cucggaagauucagcauca

SEQ ID NO: 2179413 - RNA, 19 nt, Homo sapiens
  misc_RNA (1)...(19): siRNA sense strand
ccaagcaucagagaauuca

SEQ ID NO: 2179414 - RNA, 19 nt, Homo sapiens
  misc_RNA (1)...(19): siRNA sense strand
gcgcguuccugaaaaguug

SEQ ID NO: 2179415 - RNA, 19 nt, Homo sapiens
  misc_RNA (1)...(19): siRNA sense strand
ggaagagccuguguacauu

SEQ ID NO: 2179416 - RNA, 19 nt, Homo sapiens
  misc_RNA (1)...(19): siRNA sense strand
caaaggaguuggacaaggu

SEQ ID NO: 2179417 - RNA, 19 nt, Homo sapiens
  misc_RNA (1)...(19): siRNA sense strand
gaaagcaggcucacagaag

SEQ ID NO: 2179418 - RNA, 19 nt, Homo sapiens
  misc_RNA (1)...(19): siRNA sense strand
ggaggcagcacaaggaaga

SEQ ID NO: 2179419 - RNA, 19 nt, Homo sapiens
  misc_RNA (1)...(19): siRNA sense strand
gaagagccuguguacauug

SEQ ID NO: 2179420 - RNA, 19 nt, Homo sapiens
  misc_RNA (1)...(19): siRNA sense strand
aagaggagcuccaguaagg

SEQ ID NO: 2179421 - RNA, 19 nt, Homo sapiens
  misc_RNA (1)...(19): siRNA sense strand
ccaagaggagcuccaguaa

SEQ ID NO: 2179422 - RNA, 19 nt, Homo sapiens
  misc_RNA (1)...(19): siRNA sense strand
agagugaggccaucuauga

SEQ ID NO: 2179423 - RNA, 19 nt, Homo sapiens
  misc_RNA (1)...(19): siRNA sense strand
gccaagaggagcuccagua

SEQ ID NO: 2179424 - RNA, 19 nt, Homo sapiens
  misc_RNA (1)...(19): siRNA sense strand
gaccacuccuugugaaauc

SEQ ID NO: 2179425 - RNA, 19 nt, Homo sapiens
  misc_RNA (1)...(19): siRNA sense strand
ggaagcugcuggaggugau

SEQ ID NO: 2179426 - RNA, 19 nt, Homo sapiens
  misc_RNA (1)...(19): siRNA sense strand
gugaggccaucuaugaaga

SEQ ID NO: 2179427 - RNA, 19 nt, Homo sapiens
  misc_RNA (1)...(19): siRNA sense strand
ggacagcagcacccgaaga

SEQ ID NO: 2179428 - RNA, 19 nt, Homo sapiens
  misc_RNA (1)...(19): siRNA sense strand
gagccuguguacauugaga

SEQ ID NO: 2179429 - RNA, 19 nt, Homo sapiens
  misc_RNA (1)...(19): siRNA sense strand
gaagguuccuccgcagaag

SEQ ID NO: 2179430 - RNA, 19 nt, Homo sapiens
  misc_RNA (1)...(19): siRNA sense strand
ccaccgcaauggagacuuc

SEQ ID NO: 2179431 - RNA, 19 nt, Homo sapiens
  misc_RNA (1)...(19): siRNA sense strand
ucuaugaagagaugaagua

SEQ ID NO: 2179432 - RNA, 19 nt, Homo sapiens
  misc_RNA (1)...(19): siRNA sense strand
ggacaccagaggaggaaga

SEQ ID NO: 2179433 - RNA, 19 nt, Homo sapiens
  misc_RNA (1)...(19): siRNA sense strand
caaagacggagaaggagau

SEQ ID NO: 2179434 - RNA, 19 nt, Homo sapiens
  misc_RNA (1)...(19): siRNA sense strand
ggauggguuucaugacgau

SEQ ID NO: 2179435 - RNA, 19 nt, Homo sapiens
  misc_RNA (1)...(19): siRNA sense strand
gagugaggccaucuaugaa

SEQ ID NO: 2179436 - RNA, 19 nt, Homo sapiens
  misc_RNA (1)...(19): siRNA sense strand
aggaagagccuguguacau

SEQ ID NO: 2179437 - RNA, 19 nt, Homo sapiens
  misc_RNA (1)...(19): siRNA sense strand
caccagaggaggaagaaga

SEQ ID NO: 2179438 - RNA, 19 nt, Homo sapiens
  misc_RNA (1)...(19): siRNA sense strand
aagagccuguguacauuga

SEQ ID NO: 2179439 - RNA, 19 nt, Homo sapiens
  misc_RNA (1)...(19): siRNA sense strand
gaggccaucuaugaagaga

SEQ ID NO: 2179440 - RNA, 19 nt, Homo sapiens
  misc_RNA (1)...(19): siRNA sense strand
aagcaaaggaguuggacaa

SEQ ID NO: 2179441 - RNA, 19 nt, Homo sapiens
  misc_RNA (1)...(19): siRNA sense strand
gcaagaaagcaggcucaca

SEQ ID NO: 2179442 - RNA, 19 nt, Homo sapiens
  misc_RNA (1)...(19): siRNA sense strand
gagaaaagcaaaggaguug

SEQ ID NO: 2179443 - RNA, 19 nt, Homo sapiens
  misc_RNA (1)...(19): siRNA sense strand
gaaaagcaaaggaguugga

SEQ ID NO: 2179444 - RNA, 19 nt, Homo sapiens
  misc_RNA (1)...(19): siRNA sense strand
agaaagcaggcucacagaa

SEQ ID NO: 2179445 - RNA, 19 nt, Homo sapiens
  misc_RNA (1)...(19): siRNA sense strand
ggagaaaagcaaaggaguu

SEQ ID NO: 2179446 - RNA, 19 nt, Homo sapiens
  misc_RNA (1)...(19): siRNA sense strand
caagaggagcuccaguaag

SEQ ID NO: 2179447 - RNA, 19 nt, Homo sapiens
  misc_RNA (1)...(19): siRNA sense strand
gagagugaggccaucuaug

SEQ ID NO: 2179448 - RNA, 19 nt, Homo sapiens
  misc_RNA (1)...(19): siRNA sense strand
gaagagagugaggccaucu

SEQ ID NO: 2179449 - RNA, 19 nt, Homo sapiens
  misc_RNA (1)...(19): siRNA sense strand
agccaaagacggagaagga

SEQ ID NO: 2179450 - RNA, 19 nt, Homo sapiens
  misc_RNA (1)...(19): siRNA sense strand
ggaagagccuguguacauu

SEQ ID NO: 2179451 - RNA, 19 nt, Homo sapiens
  misc_RNA (1)...(19): siRNA sense strand
caaaggaguuggacaaggu

SEQ ID NO: 2179452 - RNA, 19 nt, Homo sapiens
  misc_RNA (1)...(19): siRNA sense strand
gaaagcaggcucacagaag

SEQ ID NO: 2179453 - RNA, 19 nt, Homo sapiens
  misc_RNA (1)...(19): siRNA sense strand
ggaggcagcacaaggaaga

SEQ ID NO: 2179454 - RNA, 19 nt, Homo sapiens
  misc_RNA (1)...(19): siRNA sense strand
gaagagccuguguacauug

SEQ ID NO: 2179455 - RNA, 19 nt, Homo sapiens
  misc_RNA (1)...(19): siRNA sense strand
aagaggagcuccaguaagg

SEQ ID NO: 2179456 - RNA, 19 nt, Homo sapiens
  misc_RNA (1)...(19): siRNA sense strand
ccaagaggagcuccaguaa

SEQ ID NO: 2179457 - RNA, 19 nt, Homo sapiens
  misc_RNA (1)...(19): siRNA sense strand
agagugaggccaucuauga

SEQ ID NO: 2179458 - RNA, 19 nt, Homo sapiens
  misc_RNA (1)...(19): siRNA sense strand
gccaagaggagcuccagua

SEQ ID NO: 2179459 - RNA, 19 nt, Homo sapiens
  misc_RNA (1)...(19): siRNA sense strand
gaccacuccuugugaaauc

SEQ ID NO: 2179460 - RNA, 19 nt, Homo sapiens
  misc_RNA (1)...(19): siRNA sense strand
ggaagcugcuggaggugau

SEQ ID NO: 2179461 - RNA, 19 nt, Homo sapiens
  misc_RNA (1)...(19): siRNA sense strand
gugaggccaucuaugaaga

SEQ ID NO: 2179462 - RNA, 19 nt, Homo sapiens
  misc_RNA (1)...(19): siRNA sense strand
ggacagcagcacccgaaga

SEQ ID NO: 2179463 - RNA, 19 nt, Homo sapiens
  misc_RNA (1)...(19): siRNA sense strand
gagccuguguacauugaga

SEQ ID NO: 2179464 - RNA, 19 nt, Homo sapiens
  misc_RNA (1)...(19): siRNA sense strand
gaagguuccuccgcagaag

SEQ ID NO: 2179465 - RNA, 19 nt, Homo sapiens
  misc_RNA (1)...(19): siRNA sense strand
ccaccgcaauggagacuuc

SEQ ID NO: 2179466 - RNA, 19 nt, Homo sapiens
  misc_RNA (1)...(19): siRNA sense strand
ucuaugaagagaugaagua

SEQ ID NO: 2179467 - RNA, 19 nt, Homo sapiens
  misc_RNA (1)...(19): siRNA sense strand
ggacaccagaggaggaaga

SEQ ID NO: 2179468 - RNA, 19 nt, Homo sapiens
  misc_RNA (1)...(19): siRNA sense strand
caaagacggagaaggagau

SEQ ID NO: 2179469 - RNA, 19 nt, Homo sapiens
  misc_RNA (1)...(19): siRNA sense strand
ggauggguuucaugacgau

SEQ ID NO: 2179470 - RNA, 19 nt, Homo sapiens
  misc_RNA (1)...(19): siRNA sense strand
gagugaggccaucuaugaa

SEQ ID NO: 2179471 - RNA, 19 nt, Homo sapiens
  misc_RNA (1)...(19): siRNA sense strand
aggaagagccuguguacau

SEQ ID NO: 2179472 - RNA, 19 nt, Homo sapiens
  misc_RNA (1)...(19): siRNA sense strand
caccagaggaggaagaaga

SEQ ID NO: 2179473 - RNA, 19 nt, Homo sapiens
  misc_RNA (1)...(19): siRNA sense strand
aagagccuguguacauuga

SEQ ID NO: 2179474 - RNA, 19 nt, Homo sapiens
  misc_RNA (1)...(19): siRNA sense strand
gaggccaucuaugaagaga

SEQ ID NO: 2179475 - RNA, 19 nt, Homo sapiens
  misc_RNA (1)...(19): siRNA sense strand
aagcaaaggaguuggacaa

SEQ ID NO: 2179476 - RNA, 19 nt, Homo sapiens
  misc_RNA (1)...(19): siRNA sense strand
gcaagaaagcaggcucaca

SEQ ID NO: 2179477 - RNA, 19 nt, Homo sapiens
  misc_RNA (1)...(19): siRNA sense strand
gagaaaagcaaaggaguug

SEQ ID NO: 2179478 - RNA, 19 nt, Homo sapiens
  misc_RNA (1)...(19): siRNA sense strand
gaaaagcaaaggaguugga

SEQ ID NO: 2179479 - RNA, 19 nt, Homo sapiens
  misc_RNA (1)...(19): siRNA sense strand
agaaagcaggcucacagaa

SEQ ID NO: 2179480 - RNA, 19 nt, Homo sapiens
  misc_RNA (1)...(19): siRNA sense strand
ggagaaaagcaaaggaguu

SEQ ID NO: 2179481 - RNA, 19 nt, Homo sapiens
  misc_RNA (1)...(19): siRNA sense strand
caagaggagcuccaguaag

SEQ ID NO: 2179482 - RNA, 19 nt, Homo sapiens
  misc_RNA (1)...(19): siRNA sense strand
gagagugaggccaucuaug

SEQ ID NO: 2179483 - RNA, 19 nt, Homo sapiens
  misc_RNA (1)...(19): siRNA sense strand
gaagagagugaggccaucu

SEQ ID NO: 2179484 - RNA, 19 nt, Homo sapiens
  misc_RNA (1)...(19): siRNA sense strand
agccaaagacggagaagga

SEQ ID NO: 2179485 - RNA, 19 nt, Homo sapiens
  misc_RNA (1)...(19): siRNA sense strand
ggaagagccuguguacauu

SEQ ID NO: 2179486 - RNA, 19 nt, Homo sapiens
  misc_RNA (1)...(19): siRNA sense strand
caaaggaguuggacaaggu

SEQ ID NO: 2179487 - RNA, 19 nt, Homo sapiens
  misc_RNA (1)...(19): siRNA sense strand
gaaagcaggcucacagaag

SEQ ID NO: 2179488 - RNA, 19 nt, Homo sapiens
  misc_RNA (1)...(19): siRNA sense strand
ggaggcagcacaaggaaga

SEQ ID NO: 2179489 - RNA, 19 nt, Homo sapiens
  misc_RNA (1)...(19): siRNA sense strand
gaagagccuguguacauug

SEQ ID NO: 2179490 - RNA, 19 nt, Homo sapiens
  misc_RNA (1)...(19): siRNA sense strand
aagaggagcuccaguaagg

SEQ ID NO: 2179491 - RNA, 19 nt, Homo sapiens
  misc_RNA (1)...(19): siRNA sense strand
ccaagaggagcuccaguaa

SEQ ID NO: 2179492 - RNA, 19 nt, Homo sapiens
  misc_RNA (1)...(19): siRNA sense strand
agagugaggccaucuauga

SEQ ID NO: 2179493 - RNA, 19 nt, Homo sapiens
  misc_RNA (1)...(19): siRNA sense strand
gccaagaggagcuccagua

SEQ ID NO: 2179494 - RNA, 19 nt, Homo sapiens
  misc_RNA (1)...(19): siRNA sense strand
gaccacuccuugugaaauc

SEQ ID NO: 2179495 - RNA, 19 nt, Homo sapiens
  misc_RNA (1)...(19): siRNA sense strand
ggaagcugcuggaggugau

SEQ ID NO: 2179496 - RNA, 19 nt, Homo sapiens
  misc_RNA (1)...(19): siRNA sense strand
gugaggccaucuaugaaga

SEQ ID NO: 2179497 - RNA, 19 nt, Homo sapiens
  misc_RNA (1)...(19): siRNA sense strand
ggacagcagcacccgaaga

SEQ ID NO: 2179498 - RNA, 19 nt, Homo sapiens
  misc_RNA (1)...(19): siRNA sense strand
gagccuguguacauugaga

SEQ ID NO: 2179499 - RNA, 19 nt, Homo sapiens
  misc_RNA (1)...(19): siRNA sense strand
gaagguuccuccgcagaag

SEQ ID NO: 2179500 - RNA, 19 nt, Homo sapiens
  misc_RNA (1)...(19): siRNA sense strand
ccaccgcaauggagacuuc

SEQ ID NO: 2179501 - RNA, 19 nt, Homo sapiens
  misc_RNA (1)...(19): siRNA sense strand
ucuaugaagagaugaagua

SEQ ID NO: 2179502 - RNA, 19 nt, Homo sapiens
  misc_RNA (1)...(19): siRNA sense strand
ggacaccagaggaggaaga

SEQ ID NO: 2179503 - RNA, 19 nt, Homo sapiens
  misc_RNA (1)...(19): siRNA sense strand
caaagacggagaaggagau

SEQ ID NO: 2179504 - RNA, 19 nt, Homo sapiens
  misc_RNA (1)...(19): siRNA sense strand
ggauggguuucaugacgau

SEQ ID NO: 2179505 - RNA, 19 nt, Homo sapiens
  misc_RNA (1)...(19): siRNA sense strand
gagugaggccaucuaugaa

SEQ ID NO: 2179506 - RNA, 19 nt, Homo sapiens
  misc_RNA (1)...(19): siRNA sense strand
aggaagagccuguguacau

SEQ ID NO: 2179507 - RNA, 19 nt, Homo sapiens
  misc_RNA (1)...(19): siRNA sense strand
caccagaggaggaagaaga

SEQ ID NO: 2179508 - RNA, 19 nt, Homo sapiens
  misc_RNA (1)...(19): siRNA sense strand
aagagccuguguacauuga

SEQ ID NO: 2179509 - RNA, 19 nt, Homo sapiens
  misc_RNA (1)...(19): siRNA sense strand
gaggccaucuaugaagaga

SEQ ID NO: 2179510 - RNA, 19 nt, Homo sapiens
  misc_RNA (1)...(19): siRNA sense strand
aagcaaaggaguuggacaa

SEQ ID NO: 2179511 - RNA, 19 nt, Homo sapiens
  misc_RNA (1)...(19): siRNA sense strand
gcaagaaagcaggcucaca

SEQ ID NO: 2179512 - RNA, 19 nt, Homo sapiens
  misc_RNA (1)...(19): siRNA sense strand
gagaaaagcaaaggaguug

SEQ ID NO: 2179513 - RNA, 19 nt, Homo sapiens
  misc_RNA (1)...(19): siRNA sense strand
gaaaagcaaaggaguugga

SEQ ID NO: 2179514 - RNA, 19 nt, Homo sapiens
  misc_RNA (1)...(19): siRNA sense strand
agaaagcaggcucacagaa

SEQ ID NO: 2179515 - RNA, 19 nt, Homo sapiens
  misc_RNA (1)...(19): siRNA sense strand
ggagaaaagcaaaggaguu

SEQ ID NO: 2179516 - RNA, 19 nt, Homo sapiens
  misc_RNA (1)...(19): siRNA sense strand
caagaggagcuccaguaag

SEQ ID NO: 2179517 - RNA, 19 nt, Homo sapiens
  misc_RNA (1)...(19): siRNA sense strand
gagagugaggccaucuaug

SEQ ID NO: 2179518 - RNA, 19 nt, Homo sapiens
  misc_RNA (1)...(19): siRNA sense strand
gaagagagugaggccaucu

SEQ ID NO: 2179519 - RNA, 19 nt, Homo sapiens
  misc_RNA (1)...(19): siRNA sense strand
agccaaagacggagaagga

SEQ ID NO: 2179520 - RNA, 19 nt, Homo sapiens
  misc_RNA (1)...(19): siRNA sense strand
ggaaguacgucuacaaaug

SEQ ID NO: 2179521 - RNA, 19 nt, Homo sapiens
  misc_RNA (1)...(19): siRNA sense strand
ccaacgagcuuuauaauca

SEQ ID NO: 2179522 - RNA, 19 nt, Homo sapiens
  misc_RNA (1)...(19): siRNA sense strand
gaacacacaucauuucauc

SEQ ID NO: 2179523 - RNA, 19 nt, Homo sapiens
  misc_RNA (1)...(19): siRNA sense strand
gagacuaccucacacagua

SEQ ID NO: 2179524 - RNA, 19 nt, Homo sapiens
  misc_RNA (1)...(19): siRNA sense strand
gaacagacaaggauacaaa

SEQ ID NO: 2179525 - RNA, 19 nt, Homo sapiens
  misc_RNA (1)...(19): siRNA sense strand
agaaugacccucagaauua

SEQ ID NO: 2179526 - RNA, 19 nt, Homo sapiens
  misc_RNA (1)...(19): siRNA sense strand
gagaccaccucacacaaua

SEQ ID NO: 2179527 - RNA, 19 nt, Homo sapiens
  misc_RNA (1)...(19): siRNA sense strand
ggaaucagaugcagaagau

SEQ ID NO: 2179528 - RNA, 19 nt, Homo sapiens
  misc_RNA (1)...(19): siRNA sense strand
caaauacagugacuucuau

SEQ ID NO: 2179529 - RNA, 19 nt, Homo sapiens
  misc_RNA (1)...(19): siRNA sense strand
cagcauaacuccaguguuc

SEQ ID NO: 2179530 - RNA, 19 nt, Homo sapiens
  misc_RNA (1)...(19): siRNA sense strand
ucaaucacuuccacaaaua

SEQ ID NO: 2179531 - RNA, 19 nt, Homo sapiens
  misc_RNA (1)...(19): siRNA sense strand
ccacagcucucacugaaau

SEQ ID NO: 2179532 - RNA, 19 nt, Homo sapiens
  misc_RNA (1)...(19): siRNA sense strand
gagaccaccucacacagua

SEQ ID NO: 2179533 - RNA, 19 nt, Homo sapiens
  misc_RNA (1)...(19): siRNA sense strand
gaccacagcucucacugaa

SEQ ID NO: 2179534 - RNA, 19 nt, Homo sapiens
  misc_RNA (1)...(19): siRNA sense strand
caaaugcaaucuugacuuc

SEQ ID NO: 2179535 - RNA, 19 nt, Homo sapiens
  misc_RNA (1)...(19): siRNA sense strand
gagaaugacccucagaauu

SEQ ID NO: 2179536 - RNA, 19 nt, Homo sapiens
  misc_RNA (1)...(19): siRNA sense strand
gagaccaccucacacagua

SEQ ID NO: 2179537 - RNA, 19 nt, Homo sapiens
  misc_RNA (1)...(19): siRNA sense strand
cuacauauauggacacuuc

SEQ ID NO: 2179538 - RNA, 19 nt, Homo sapiens
  misc_RNA (1)...(19): siRNA sense strand
ccacagacuuucccucuau

SEQ ID NO: 2179539 - RNA, 19 nt, Homo sapiens
  misc_RNA (1)...(19): siRNA sense strand
ggacacuucuuccaugaug

SEQ ID NO: 2179540 - RNA, 19 nt, Homo sapiens
  misc_RNA (1)...(19): siRNA sense strand
gaaagugaguccagcaucu

SEQ ID NO: 2179541 - RNA, 19 nt, Homo sapiens
  misc_RNA (1)...(19): siRNA sense strand
gacacaaccuuccacacua

SEQ ID NO: 2179542 - RNA, 19 nt, Homo sapiens
  misc_RNA (1)...(19): siRNA sense strand
gaaauggucaccuguccua

SEQ ID NO: 2179543 - RNA, 19 nt, Homo sapiens
  misc_RNA (1)...(19): siRNA sense strand
uuaacagucuuucccuuua

SEQ ID NO: 2179544 - RNA, 19 nt, Homo sapiens
  misc_RNA (1)...(19): siRNA sense strand
ucaaccagcuccucucuga

SEQ ID NO: 2179545 - RNA, 19 nt, Homo sapiens
  misc_RNA (1)...(19): siRNA sense strand
cagauucacuucuucauuc

SEQ ID NO: 2179546 - RNA, 19 nt, Homo sapiens
  misc_RNA (1)...(19): siRNA sense strand
gcucgcagcuucacuucuu

SEQ ID NO: 2179547 - RNA, 19 nt, Homo sapiens
  misc_RNA (1)...(19): siRNA sense strand
aagaccaccucacacauua

SEQ ID NO: 2179548 - RNA, 19 nt, Homo sapiens
  misc_RNA (1)...(19): siRNA sense strand
ggacaacgccaucgacugu

SEQ ID NO: 2179549 - RNA, 19 nt, Homo sapiens
  misc_RNA (1)...(19): siRNA sense strand
ccaggaacuauaacaauua

SEQ ID NO: 2179550 - RNA, 19 nt, Homo sapiens
  misc_RNA (1)...(19): siRNA sense strand
ggauacaaauuuccaugug

SEQ ID NO: 2179551 - RNA, 19 nt, Homo sapiens
  misc_RNA (1)...(19): siRNA sense strand
ggacaacucgcaucacuuc

SEQ ID NO: 2179552 - RNA, 19 nt, Homo sapiens
  misc_RNA (1)...(19): siRNA sense strand
gcucaacucuccagucagu

SEQ ID NO: 2179553 - RNA, 19 nt, Homo sapiens
  misc_RNA (1)...(19): siRNA sense strand
gagaucuccucccacagua

SEQ ID NO: 2179554 - RNA, 19 nt, Homo sapiens
  misc_RNA (1)...(19): siRNA sense strand
agacaaggauacaaauuuc

SEQ ID NO: 2179555 - RNA, 19 nt, Homo sapiens
  misc_RNA (1)...(19): siRNA sense strand
aaacuucacucacaucuac

SEQ ID NO: 2179556 - RNA, 19 nt, Homo sapiens
  misc_RNA (1)...(19): siRNA sense strand
acucaucucugaaacauug

SEQ ID NO: 2179557 - RNA, 19 nt, Homo sapiens
  misc_RNA (1)...(19): siRNA sense strand
caacaagaccuucuggaau

SEQ ID NO: 2179558 - RNA, 19 nt, Homo sapiens
  misc_RNA (1)...(19): siRNA sense strand
acagguggaucuagaugua

SEQ ID NO: 2179559 - RNA, 19 nt, Homo sapiens
  misc_RNA (1)...(19): siRNA sense strand
gaacagggacagugugcuu

SEQ ID NO: 2179560 - RNA, 19 nt, Homo sapiens
  misc_RNA (1)...(19): siRNA sense strand
acagucaccucacacagua

SEQ ID NO: 2179561 - RNA, 19 nt, Homo sapiens
  misc_RNA (1)...(19): siRNA sense strand
gagaccaccucagagagua

SEQ ID NO: 2179562 - RNA, 19 nt, Homo sapiens
  misc_RNA (1)...(19): siRNA sense strand
ccacuaccauucauucugu

SEQ ID NO: 2179563 - RNA, 19 nt, Homo sapiens
  misc_RNA (1)...(19): siRNA sense strand
ccacgacuccuaugacaaa

SEQ ID NO: 2179564 - RNA, 19 nt, Homo sapiens
  misc_RNA (1)...(19): siRNA sense strand
cagacaaggauacaaauuu

SEQ ID NO: 2179565 - RNA, 19 nt, Homo sapiens
  misc_RNA (1)...(19): siRNA sense strand
cuacagggauuucaacaag

SEQ ID NO: 2179566 - RNA, 19 nt, Homo sapiens
  misc_RNA (1)...(19): siRNA sense strand
caacaucacagguuccuau

SEQ ID NO: 2179567 - RNA, 19 nt, Homo sapiens
  misc_RNA (1)...(19): siRNA sense strand
ccacagccacuaauacauu

SEQ ID NO: 2179568 - RNA, 19 nt, Homo sapiens
  misc_RNA (1)...(19): siRNA sense strand
ccacauccaucucucaagu

SEQ ID NO: 2179569 - RNA, 19 nt, Homo sapiens
  misc_RNA (1)...(19): siRNA sense strand
ucagugggauggccucaaa

SEQ ID NO: 2179570 - RNA, 19 nt, Homo sapiens
  misc_RNA (1)...(19): siRNA sense strand
ggucuacaccuacaucuga

SEQ ID NO: 2179571 - RNA, 19 nt, Homo sapiens
  misc_RNA (1)...(19): siRNA sense strand
gaacaacaacagcaagaca

SEQ ID NO: 2179572 - RNA, 19 nt, Homo sapiens
  misc_RNA (1)...(19): siRNA sense strand
caacucgcaucacuucuca

SEQ ID NO: 2179573 - RNA, 19 nt, Homo sapiens
  misc_RNA (1)...(19): siRNA sense strand
uguccuaccuccaucagua

SEQ ID NO: 2179574 - RNA, 19 nt, Homo sapiens
  misc_RNA (1)...(19): siRNA sense strand
caacugccaucaccucaca

SEQ ID NO: 2179575 - RNA, 19 nt, Homo sapiens
  misc_RNA (1)...(19): siRNA sense strand
cagcuucacuucuuugauc

SEQ ID NO: 2179576 - RNA, 19 nt, Homo sapiens
  misc_RNA (1)...(19): siRNA sense strand
gaaacagccacgacuccua

SEQ ID NO: 2179577 - RNA, 19 nt, Homo sapiens
  misc_RNA (1)...(19): siRNA sense strand
caagaccaccucacacauu

SEQ ID NO: 2179578 - RNA, 19 nt, Homo sapiens
  misc_RNA (1)...(19): siRNA sense strand
ccaaucaguuccuuuagca

SEQ ID NO: 2179579 - RNA, 19 nt, Homo sapiens
  misc_RNA (1)...(19): siRNA sense strand
acacaguacucccagauuc

SEQ ID NO: 2179580 - RNA, 19 nt, Homo sapiens
  misc_RNA (1)...(19): siRNA sense strand
ccaucaaggugaacaacaa

SEQ ID NO: 2179581 - RNA, 19 nt, Homo sapiens
  misc_RNA (1)...(19): siRNA sense strand
gaacagguggaucuagaug

SEQ ID NO: 2179582 - RNA, 19 nt, Homo sapiens
  misc_RNA (1)...(19): siRNA sense strand
gaaugacccucagaauuac

SEQ ID NO: 2179583 - RNA, 19 nt, Homo sapiens
  misc_RNA (1)...(19): siRNA sense strand
gccaucaccucacauuuua

SEQ ID NO: 2179584 - RNA, 19 nt, Homo sapiens
  misc_RNA (1)...(19): siRNA sense strand
acacaguacucccagauuc

SEQ ID NO: 2179585 - RNA, 19 nt, Homo sapiens
  misc_RNA (1)...(19): siRNA sense strand
gggcuccgcuucuaucaca

SEQ ID NO: 2179586 - RNA, 19 nt, Homo sapiens
  misc_RNA (1)...(19): siRNA sense strand
ccacaaauacagugacuuc

SEQ ID NO: 2179587 - RNA, 19 nt, Homo sapiens
  misc_RNA (1)...(19): siRNA sense strand
aacaagaccuucuggaauc

SEQ ID NO: 2179588 - RNA, 19 nt, Homo sapiens
  misc_RNA (1)...(19): siRNA sense strand
gcaguagccucccgaccau

SEQ ID NO: 2179589 - RNA, 19 nt, Homo sapiens
  misc_RNA (1)...(19): siRNA sense strand
ucaaacaacuccuucuacu

SEQ ID NO: 2179590 - RNA, 19 nt, Homo sapiens
  misc_RNA (1)...(19): siRNA sense strand
gcacuucauugacuacaac

SEQ ID NO: 2179591 - RNA, 19 nt, Homo sapiens
  misc_RNA (1)...(19): siRNA sense strand
cgacuccuaugacaaacuu

SEQ ID NO: 2179592 - RNA, 19 nt, Homo sapiens
  misc_RNA (1)...(19): siRNA sense strand
aaaggaacgucagccauga

SEQ ID NO: 2179593 - RNA, 19 nt, Homo sapiens
  misc_RNA (1)...(19): siRNA sense strand
gcaccuaugacacucacua

SEQ ID NO: 2179594 - RNA, 19 nt, Homo sapiens
  misc_RNA (1)...(19): siRNA sense strand
uccaggaacuauaacaauu

SEQ ID NO: 2179595 - RNA, 19 nt, Homo sapiens
  misc_RNA (1)...(19): siRNA sense strand
acucggagcuucacuucuu

SEQ ID NO: 2179596 - RNA, 19 nt, Homo sapiens
  misc_RNA (1)...(19): siRNA sense strand
acaaauacagugacuucua

SEQ ID NO: 2179597 - RNA, 19 nt, Homo sapiens
  misc_RNA (1)...(19): siRNA sense strand
gcaacuaccagcacuucuu

SEQ ID NO: 2179598 - RNA, 19 nt, Homo sapiens
  misc_RNA (1)...(19): siRNA sense strand
acuacaaucucaucuacaa

SEQ ID NO: 2179599 - RNA, 19 nt, Homo sapiens
  misc_RNA (1)...(19): siRNA sense strand
gaaguacgucuacaaaugc

SEQ ID NO: 2179600 - RNA, 19 nt, Homo sapiens
  misc_RNA (1)...(19): siRNA sense strand
caagaccaccucacacaga

SEQ ID NO: 2179601 - RNA, 19 nt, Homo sapiens
  misc_RNA (1)...(19): siRNA sense strand
ccaaacuacucuuacuaca

SEQ ID NO: 2179602 - RNA, 19 nt, Homo sapiens
  misc_RNA (1)...(19): siRNA sense strand
gaccaacucucacaguacu

SEQ ID NO: 2179603 - RNA, 19 nt, Homo sapiens
  misc_RNA (1)...(19): siRNA sense strand
uaugaccacuacugagaaa

SEQ ID NO: 2179604 - RNA, 19 nt, Homo sapiens
  misc_RNA (1)...(19): siRNA sense strand
gaaggugcacaucaagaga

SEQ ID NO: 2179605 - RNA, 19 nt, Homo sapiens
  misc_RNA (1)...(19): siRNA sense strand
ucaacaagaccuucuggaa

SEQ ID NO: 2179606 - RNA, 19 nt, Homo sapiens
  misc_RNA (1)...(19): siRNA sense strand
ccucaacacccacuauuau

SEQ ID NO: 2179607 - RNA, 19 nt, Homo sapiens
  misc_RNA (1)...(19): siRNA sense strand
cagcuucaguucuucaauc

SEQ ID NO: 2179608 - RNA, 19 nt, Homo sapiens
  misc_RNA (1)...(19): siRNA sense strand
cuaugaaggugcacaucaa

SEQ ID NO: 2179609 - RNA, 19 nt, Homo sapiens
  misc_RNA (1)...(19): siRNA sense strand
ggaccucaaugacaacacu

SEQ ID NO: 2179610 - RNA, 19 nt, Homo sapiens
  misc_RNA (1)...(19): siRNA sense strand
uggaacagguggaucuaga

SEQ ID NO: 2179611 - RNA, 19 nt, Homo sapiens
  misc_RNA (1)...(19): siRNA sense strand
cagaccagaugccagaaug

SEQ ID NO: 2179612 - RNA, 19 nt, Homo sapiens
  misc_RNA (1)...(19): siRNA sense strand
ugaguucacuacagaaucu

SEQ ID NO: 2179613 - RNA, 19 nt, Homo sapiens
  misc_RNA (1)...(19): siRNA sense strand
cggcuucacuucuucaauc

SEQ ID NO: 2179614 - RNA, 19 nt, Homo sapiens
  misc_RNA (1)...(19): siRNA sense strand
cgacucccgugacacagaa

SEQ ID NO: 2179615 - RNA, 19 nt, Homo sapiens
  misc_RNA (1)...(19): siRNA sense strand
ggaagugucuguggaucag

SEQ ID NO: 2179616 - RNA, 19 nt, Homo sapiens
  misc_RNA (1)...(19): siRNA sense strand
acaaucucaucuacaacua

SEQ ID NO: 2179617 - RNA, 19 nt, Homo sapiens
  misc_RNA (1)...(19): siRNA sense strand
gcuaugaagaguucuacuu

SEQ ID NO: 2179618 - RNA, 19 nt, Homo sapiens
  misc_RNA (1)...(19): siRNA sense strand
cacagacuuucccucuaua

SEQ ID NO: 2179619 - RNA, 19 nt, Homo sapiens
  misc_RNA (1)...(19): siRNA sense strand
uauccaacgagcuuuauaa

SEQ ID NO: 2179620 - RNA, 19 nt, Homo sapiens
  misc_RNA (1)...(19): siRNA sense strand
gaaagaagcacuccauuaa

SEQ ID NO: 2179621 - RNA, 19 nt, Homo sapiens
  misc_RNA (1)...(19): siRNA sense strand
gaaagaagcacuccauuaa

SEQ ID NO: 2179622 - RNA, 19 nt, Homo sapiens
  misc_RNA (1)...(19): siRNA sense strand
gaaagaagcacuccauuaa

SEQ ID NO: 2179623 - RNA, 19 nt, Homo sapiens
  misc_RNA (1)...(19): siRNA sense strand
gaaagaggcacuacaauaa

SEQ ID NO: 2179624 - RNA, 19 nt, Homo sapiens
  misc_RNA (1)...(19): siRNA sense strand
ggagaugggugccagaaua

SEQ ID NO: 2179625 - RNA, 19 nt, Homo sapiens
  misc_RNA (1)...(19): siRNA sense strand
gaaagaagaacuccauuaa

SEQ ID NO: 2179626 - RNA, 19 nt, Homo sapiens
  misc_RNA (1)...(19): siRNA sense strand
gaaguaagcacuccauuaa

SEQ ID NO: 2179627 - RNA, 19 nt, Homo sapiens
  misc_RNA (1)...(19): siRNA sense strand
ggacaccugugaccacuua

SEQ ID NO: 2179628 - RNA, 19 nt, Homo sapiens
  misc_RNA (1)...(19): siRNA sense strand
gaaggaagcacuccauuaa

SEQ ID NO: 2179629 - RNA, 19 nt, Homo sapiens
  misc_RNA (1)...(19): siRNA sense strand
gaaggaagcacuccauuaa

SEQ ID NO: 2179630 - RNA, 19 nt, Homo sapiens
  misc_RNA (1)...(19): siRNA sense strand
gaaggaagcacuccauuaa

SEQ ID NO: 2179631 - RNA, 19 nt, Homo sapiens
  misc_RNA (1)...(19): siRNA sense strand
gaaggaagcacuccauuaa

SEQ ID NO: 2179632 - RNA, 19 nt, Homo sapiens
  misc_RNA (1)...(19): siRNA sense strand
gaaggaagcacuccauuaa

SEQ ID NO: 2179633 - RNA, 19 nt, Homo sapiens
  misc_RNA (1)...(19): siRNA sense strand
gaaggaagcacuccauuaa

SEQ ID NO: 2179634 - RNA, 19 nt, Homo sapiens
  misc_RNA (1)...(19): siRNA sense strand
gaaaucaguucaucugcua

SEQ ID NO: 2179635 - RNA, 19 nt, Homo sapiens
  misc_RNA (1)...(19): siRNA sense strand
gaaggaagcacuccauuaa

SEQ ID NO: 2179636 - RNA, 19 nt, Homo sapiens
  misc_RNA (1)...(19): siRNA sense strand
gaaggaagcacuccauuaa

SEQ ID NO: 2179637 - RNA, 19 nt, Homo sapiens
  misc_RNA (1)...(19): siRNA sense strand
gaaggaagcacuccauuaa

SEQ ID NO: 2179638 - RNA, 19 nt, Homo sapiens
  misc_RNA (1)...(19): siRNA sense strand
gaaggaagcacuccauuaa

SEQ ID NO: 2179639 - RNA, 19 nt, Homo sapiens
  misc_RNA (1)...(19): siRNA sense strand
gaaggaagcacuccauuaa

SEQ ID NO: 2179640 - RNA, 19 nt, Homo sapiens
  misc_RNA (1)...(19): siRNA sense strand
gaaggaagcacuccauuaa

SEQ ID NO: 2179641 - RNA, 19 nt, Homo sapiens
  misc_RNA (1)...(19): siRNA sense strand
gaaggaagcacuccauuaa

SEQ ID NO: 2179642 - RNA, 19 nt, Homo sapiens
  misc_RNA (1)...(19): siRNA sense strand
gaaggaagcacuccauuaa

SEQ ID NO: 2179643 - RNA, 19 nt, Homo sapiens
  misc_RNA (1)...(19): siRNA sense strand
gaaggaagcacuccauuaa

SEQ ID NO: 2179644 - RNA, 19 nt, Homo sapiens
  misc_RNA (1)...(19): siRNA sense strand
ugaaggaaguacucuauua

SEQ ID NO: 2179645 - RNA, 19 nt, Homo sapiens
  misc_RNA (1)...(19): siRNA sense strand
ugaaggaaguacucuauua

SEQ ID NO: 2179646 - RNA, 19 nt, Homo sapiens
  misc_RNA (1)...(19): siRNA sense strand
ugaaggaaguacucuauua

SEQ ID NO: 2179647 - RNA, 19 nt, Homo sapiens
  misc_RNA (1)...(19): siRNA sense strand
gaaggaagcacuccacuaa

SEQ ID NO: 2179648 - RNA, 19 nt, Homo sapiens
  misc_RNA (1)...(19): siRNA sense strand
gaaggaagcacuccacuaa

SEQ ID NO: 2179649 - RNA, 19 nt, Homo sapiens
  misc_RNA (1)...(19): siRNA sense strand
gaaggaagcacuccacuaa

SEQ ID NO: 2179650 - RNA, 19 nt, Homo sapiens
  misc_RNA (1)...(19): siRNA sense strand
gaaggaagcacuccacuaa

SEQ ID NO: 2179651 - RNA, 19 nt, Homo sapiens
  misc_RNA (1)...(19): siRNA sense strand
gaaggaagcacuccacuaa

SEQ ID NO: 2179652 - RNA, 19 nt, Homo sapiens
  misc_RNA (1)...(19): siRNA sense strand
gaagaggacugccggaaga

SEQ ID NO: 2179653 - RNA, 19 nt, Homo sapiens
  misc_RNA (1)...(19): siRNA sense strand
gaaggaaggccuccauuaa

SEQ ID NO: 2179654 - RNA, 19 nt, Homo sapiens
  misc_RNA (1)...(19): siRNA sense strand
gaaggaaacacuccauuaa

SEQ ID NO: 2179655 - RNA, 19 nt, Homo sapiens
  misc_RNA (1)...(19): siRNA sense strand
ugaaacaaguacuccauua

SEQ ID NO: 2179656 - RNA, 19 nt, Homo sapiens
  misc_RNA (1)...(19): siRNA sense strand
gcacacauaucaccacuuc

SEQ ID NO: 2179657 - RNA, 19 nt, Homo sapiens
  misc_RNA (1)...(19): siRNA sense strand
gaaguacuccauuaacaua

SEQ ID NO: 2179658 - RNA, 19 nt, Homo sapiens
  misc_RNA (1)...(19): siRNA sense strand
ugaaggaaguacuccauua

SEQ ID NO: 2179659 - RNA, 19 nt, Homo sapiens
  misc_RNA (1)...(19): siRNA sense strand
ugaaggaaguacuccauua

SEQ ID NO: 2179660 - RNA, 19 nt, Homo sapiens
  misc_RNA (1)...(19): siRNA sense strand
cagaagaacuccuuuaaca

SEQ ID NO: 2179661 - RNA, 19 nt, Homo sapiens
  misc_RNA (1)...(19): siRNA sense strand
gaagucaguucaucuccua

SEQ ID NO: 2179662 - RNA, 19 nt, Homo sapiens
  misc_RNA (1)...(19): siRNA sense strand
gaaggaagcacuccauuau

SEQ ID NO: 2179663 - RNA, 19 nt, Homo sapiens
  misc_RNA (1)...(19): siRNA sense strand
gaagucaguucaucuccua

SEQ ID NO: 2179664 - RNA, 19 nt, Homo sapiens
  misc_RNA (1)...(19): siRNA sense strand
gaagucaguucaucuccua

SEQ ID NO: 2179665 - RNA, 19 nt, Homo sapiens
  misc_RNA (1)...(19): siRNA sense strand
gaagucaguucaucuccua

SEQ ID NO: 2179666 - RNA, 19 nt, Homo sapiens
  misc_RNA (1)...(19): siRNA sense strand
gcacuccacuaacaaguuu

SEQ ID NO: 2179667 - RNA, 19 nt, Homo sapiens
  misc_RNA (1)...(19): siRNA sense strand
gaagucaguucaucuccua

SEQ ID NO: 2179668 - RNA, 19 nt, Homo sapiens
  misc_RNA (1)...(19): siRNA sense strand
gcacuccacuaacaaauau

SEQ ID NO: 2179669 - RNA, 19 nt, Homo sapiens
  misc_RNA (1)...(19): siRNA sense strand
ggaaggaagcacuccauua

SEQ ID NO: 2179670 - RNA, 19 nt, Homo sapiens
  misc_RNA (1)...(19): siRNA sense strand
gaaaccaguucaucuccua

SEQ ID NO: 2179671 - RNA, 19 nt, Homo sapiens
  misc_RNA (1)...(19): siRNA sense strand
gaaggaaguacucuauuaa

SEQ ID NO: 2179672 - RNA, 19 nt, Homo sapiens
  misc_RNA (1)...(19): siRNA sense strand
gaaggcaguucaucuccua

SEQ ID NO: 2179673 - RNA, 19 nt, Homo sapiens
  misc_RNA (1)...(19): siRNA sense strand
gaaggaaguacucuauuaa

SEQ ID NO: 2179674 - RNA, 19 nt, Homo sapiens
  misc_RNA (1)...(19): siRNA sense strand
gaaggaaguacucuauuaa

SEQ ID NO: 2179675 - RNA, 19 nt, Homo sapiens
  misc_RNA (1)...(19): siRNA sense strand
gaaggcaguucaucuccua

SEQ ID NO: 2179676 - RNA, 19 nt, Homo sapiens
  misc_RNA (1)...(19): siRNA sense strand
ggaaggaaggccuccauua

SEQ ID NO: 2179677 - RNA, 19 nt, Homo sapiens
  misc_RNA (1)...(19): siRNA sense strand
gaaggaagcacugcauuaa

SEQ ID NO: 2179678 - RNA, 19 nt, Homo sapiens
  misc_RNA (1)...(19): siRNA sense strand
gaaggaagcacugcauuaa

SEQ ID NO: 2179679 - RNA, 19 nt, Homo sapiens
  misc_RNA (1)...(19): siRNA sense strand
gcacaccucugaccacuuc

SEQ ID NO: 2179680 - RNA, 19 nt, Homo sapiens
  misc_RNA (1)...(19): siRNA sense strand
gcacuacaauaacaaguau

SEQ ID NO: 2179681 - RNA, 19 nt, Homo sapiens
  misc_RNA (1)...(19): siRNA sense strand
gaaacaaguacuccauuaa

SEQ ID NO: 2179682 - RNA, 19 nt, Homo sapiens
  misc_RNA (1)...(19): siRNA sense strand
gaaaccaguuccucuccua

SEQ ID NO: 2179683 - RNA, 19 nt, Homo sapiens
  misc_RNA (1)...(19): siRNA sense strand
gaaggaaagacuccauuaa

SEQ ID NO: 2179684 - RNA, 19 nt, Homo sapiens
  misc_RNA (1)...(19): siRNA sense strand
guacagauugucucaguua

SEQ ID NO: 2179685 - RNA, 19 nt, Homo sapiens
  misc_RNA (1)...(19): siRNA sense strand
ggacaaugccaccgaagua

SEQ ID NO: 2179686 - RNA, 19 nt, Homo sapiens
  misc_RNA (1)...(19): siRNA sense strand
gaaggaaguacuccauuaa

SEQ ID NO: 2179687 - RNA, 19 nt, Homo sapiens
  misc_RNA (1)...(19): siRNA sense strand
gaaggaaguacuccauuaa

SEQ ID NO: 2179688 - RNA, 19 nt, Homo sapiens
  misc_RNA (1)...(19): siRNA sense strand
gcaaguucaucuccuacua

SEQ ID NO: 2179689 - RNA, 19 nt, Homo sapiens
  misc_RNA (1)...(19): siRNA sense strand
gauaugagcacaccucuga

SEQ ID NO: 2179690 - RNA, 19 nt, Homo sapiens
  misc_RNA (1)...(19): siRNA sense strand
gaacuaaacacaccaucaa

SEQ ID NO: 2179691 - RNA, 19 nt, Homo sapiens
  misc_RNA (1)...(19): siRNA sense strand
gaaguacucuauuaacaag

SEQ ID NO: 2179692 - RNA, 19 nt, Homo sapiens
  misc_RNA (1)...(19): siRNA sense strand
gaaguacucuauuaacaag

SEQ ID NO: 2179693 - RNA, 19 nt, Homo sapiens
  misc_RNA (1)...(19): siRNA sense strand
gaaggaagcacuccauuca

SEQ ID NO: 2179694 - RNA, 19 nt, Homo sapiens
  misc_RNA (1)...(19): siRNA sense strand
auacaaaccucaacuccua

SEQ ID NO: 2179695 - RNA, 19 nt, Homo sapiens
  misc_RNA (1)...(19): siRNA sense strand
gaaggaaccacuccguuaa

SEQ ID NO: 2179696 - RNA, 19 nt, Homo sapiens
  misc_RNA (1)...(19): siRNA sense strand
gaaguacucuauuaacaag

SEQ ID NO: 2179697 - RNA, 19 nt, Homo sapiens
  misc_RNA (1)...(19): siRNA sense strand
ggaaguccuuuauuaacaa

SEQ ID NO: 2179698 - RNA, 19 nt, Homo sapiens
  misc_RNA (1)...(19): siRNA sense strand
ugaaagaggcacuacaaua

SEQ ID NO: 2179699 - RNA, 19 nt, Homo sapiens
  misc_RNA (1)...(19): siRNA sense strand
gcaugccaaucucaacuua

SEQ ID NO: 2179700 - RNA, 19 nt, Homo sapiens
  misc_RNA (1)...(19): siRNA sense strand
auaccaaccucgacucuua

SEQ ID NO: 2179701 - RNA, 19 nt, Homo sapiens
  misc_RNA (1)...(19): siRNA sense strand
gaagauaccagcauugcaa

SEQ ID NO: 2179702 - RNA, 19 nt, Homo sapiens
  misc_RNA (1)...(19): siRNA sense strand
gauauuugcucagacauga

SEQ ID NO: 2179703 - RNA, 19 nt, Homo sapiens
  misc_RNA (1)...(19): siRNA sense strand
ccacgaauacuacaauuaa

SEQ ID NO: 2179704 - RNA, 19 nt, Homo sapiens
  misc_RNA (1)...(19): siRNA sense strand
ccacaucggugaccauuuc

SEQ ID NO: 2179705 - RNA, 19 nt, Homo sapiens
  misc_RNA (1)...(19): siRNA sense strand
aagaagaacuccauuaaca

SEQ ID NO: 2179706 - RNA, 19 nt, Homo sapiens
  misc_RNA (1)...(19): siRNA sense strand
gaaggaacgacuccauuaa

SEQ ID NO: 2179707 - RNA, 19 nt, Homo sapiens
  misc_RNA (1)...(19): siRNA sense strand
aaacucaggugaccaauuc

SEQ ID NO: 2179708 - RNA, 19 nt, Homo sapiens
  misc_RNA (1)...(19): siRNA sense strand
auaccaaccucaacuuaua

SEQ ID NO: 2179709 - RNA, 19 nt, Homo sapiens
  misc_RNA (1)...(19): siRNA sense strand
gaagauggccaaggaauau

SEQ ID NO: 2179710 - RNA, 19 nt, Homo sapiens
  misc_RNA (1)...(19): siRNA sense strand
ugaaagaagcacuccauua

SEQ ID NO: 2179711 - RNA, 19 nt, Homo sapiens
  misc_RNA (1)...(19): siRNA sense strand
ugaaggaaccacuccauua

SEQ ID NO: 2179712 - RNA, 19 nt, Homo sapiens
  misc_RNA (1)...(19): siRNA sense strand
gaagccaguuuaucuccua

SEQ ID NO: 2179713 - RNA, 19 nt, Homo sapiens
  misc_RNA (1)...(19): siRNA sense strand
caaaucaacuaacagugaa

SEQ ID NO: 2179714 - RNA, 19 nt, Homo sapiens
  misc_RNA (1)...(19): siRNA sense strand
ugaaagaagcacuccauua

SEQ ID NO: 2179715 - RNA, 19 nt, Homo sapiens
  misc_RNA (1)...(19): siRNA sense strand
augcaaaccucaacuuaua

SEQ ID NO: 2179716 - RNA, 19 nt, Homo sapiens
  misc_RNA (1)...(19): siRNA sense strand
gcacuccacuaacaaguau

SEQ ID NO: 2179717 - RNA, 19 nt, Homo sapiens
  misc_RNA (1)...(19): siRNA sense strand
augcaaaccucaacuuaua

SEQ ID NO: 2179718 - RNA, 19 nt, Homo sapiens
  misc_RNA (1)...(19): siRNA sense strand
gaagaacuccuuuaacaag

SEQ ID NO: 2179719 - RNA, 19 nt, Homo sapiens
  misc_RNA (1)...(19): siRNA sense strand
gaaguucaccgaagagcua

SEQ ID NO: 2179720 - RNA, 19 nt, Homo sapiens
  misc_RNA (1)...(19): siRNA sense strand
aaagaaagcugcucaagaa

SEQ ID NO: 2179721 - RNA, 19 nt, Homo sapiens
  misc_RNA (1)...(19): siRNA sense strand
gaagaugguuugaagcuuu

SEQ ID NO: 2179722 - RNA, 19 nt, Homo sapiens
  misc_RNA (1)...(19): siRNA sense strand
gagaggagauggauugaaa

SEQ ID NO: 2179723 - RNA, 19 nt, Homo sapiens
  misc_RNA (1)...(19): siRNA sense strand
gggaaguuauugcuaauua

SEQ ID NO: 2179724 - RNA, 19 nt, Homo sapiens
  misc_RNA (1)...(19): siRNA sense strand
ggaagaaccaagaucauua

SEQ ID NO: 2179725 - RNA, 19 nt, Homo sapiens
  misc_RNA (1)...(19): siRNA sense strand
gaucaaagcagcucauaaa

SEQ ID NO: 2179726 - RNA, 19 nt, Homo sapiens
  misc_RNA (1)...(19): siRNA sense strand
gaaagcugcucaagaacaa

SEQ ID NO: 2179727 - RNA, 19 nt, Homo sapiens
  misc_RNA (1)...(19): siRNA sense strand
gaaccaagaucauuaugca

SEQ ID NO: 2179728 - RNA, 19 nt, Homo sapiens
  misc_RNA (1)...(19): siRNA sense strand
caaagcagcucauaaagca

SEQ ID NO: 2179729 - RNA, 19 nt, Homo sapiens
  misc_RNA (1)...(19): siRNA sense strand
gaugggaaguuauugcuaa

SEQ ID NO: 2179730 - RNA, 19 nt, Homo sapiens
  misc_RNA (1)...(19): siRNA sense strand
gauaaugacuacuucacuu

SEQ ID NO: 2179731 - RNA, 19 nt, Homo sapiens
  misc_RNA (1)...(19): siRNA sense strand
acaaagacaagcugaauua

SEQ ID NO: 2179732 - RNA, 19 nt, Homo sapiens
  misc_RNA (1)...(19): siRNA sense strand
ggaaggagcaagaagcuaa

SEQ ID NO: 2179733 - RNA, 19 nt, Homo sapiens
  misc_RNA (1)...(19): siRNA sense strand
aagacaagcugaauuagaa

SEQ ID NO: 2179734 - RNA, 19 nt, Homo sapiens
  misc_RNA (1)...(19): siRNA sense strand
gaaaugcuucugccucuuu

SEQ ID NO: 2179735 - RNA, 19 nt, Homo sapiens
  misc_RNA (1)...(19): siRNA sense strand
gaaagaagcagaaaagaaa

SEQ ID NO: 2179736 - RNA, 19 nt, Homo sapiens
  misc_RNA (1)...(19): siRNA sense strand
gaaaggaauuccagauggu

SEQ ID NO: 2179737 - RNA, 19 nt, Homo sapiens
  misc_RNA (1)...(19): siRNA sense strand
ggaaucagaagaugaagaa

SEQ ID NO: 2179738 - RNA, 19 nt, Homo sapiens
  misc_RNA (1)...(19): siRNA sense strand
gaacaagugcugaaugcaa

SEQ ID NO: 2179739 - RNA, 19 nt, Homo sapiens
  misc_RNA (1)...(19): siRNA sense strand
caaaagaacugccaaagau

SEQ ID NO: 2179740 - RNA, 19 nt, Homo sapiens
  misc_RNA (1)...(19): siRNA sense strand
auuagaagcugcucgguua

SEQ ID NO: 2179741 - RNA, 19 nt, Homo sapiens
  misc_RNA (1)...(19): siRNA sense strand
gaacuugucgagaugguaa

SEQ ID NO: 2179742 - RNA, 19 nt, Homo sapiens
  misc_RNA (1)...(19): siRNA sense strand
gcaacaagagcacaaagaa

SEQ ID NO: 2179743 - RNA, 19 nt, Homo sapiens
  misc_RNA (1)...(19): siRNA sense strand
gaagaaccaagaucauuau

SEQ ID NO: 2179744 - RNA, 19 nt, Homo sapiens
  misc_RNA (1)...(19): siRNA sense strand
gcaaguagagccaagaaau

SEQ ID NO: 2179745 - RNA, 19 nt, Homo sapiens
  misc_RNA (1)...(19): siRNA sense strand
gcauacagcugugauccaa

SEQ ID NO: 2179746 - RNA, 19 nt, Homo sapiens
  misc_RNA (1)...(19): siRNA sense strand
gauaauuucuucgaagugu

SEQ ID NO: 2179747 - RNA, 19 nt, Homo sapiens
  misc_RNA (1)...(19): siRNA sense strand
gaugagaggagauggauug

SEQ ID NO: 2179748 - RNA, 19 nt, Homo sapiens
  misc_RNA (1)...(19): siRNA sense strand
caaagaaagcugcucaaga

SEQ ID NO: 2179749 - RNA, 19 nt, Homo sapiens
  misc_RNA (1)...(19): siRNA sense strand
cgacaagcaucuaagaaca

SEQ ID NO: 2179750 - RNA, 19 nt, Homo sapiens
  misc_RNA (1)...(19): siRNA sense strand
uaaauacaccugaaagaug

SEQ ID NO: 2179751 - RNA, 19 nt, Homo sapiens
  misc_RNA (1)...(19): siRNA sense strand
gcucauaaagcaaugguuu

SEQ ID NO: 2179752 - RNA, 19 nt, Homo sapiens
  misc_RNA (1)...(19): siRNA sense strand
caacaagagcacaaagaaa

SEQ ID NO: 2179753 - RNA, 19 nt, Homo sapiens
  misc_RNA (1)...(19): siRNA sense strand
aaacauacccaguaaauac

SEQ ID NO: 2179754 - RNA, 19 nt, Homo sapiens
  misc_RNA (1)...(19): siRNA sense strand
gaaaacacuugaucccaaa

SEQ ID NO: 2179755 - RNA, 19 nt, Homo sapiens
  misc_RNA (1)...(19): siRNA sense strand
gagcaagaagcuaaagaaa

SEQ ID NO: 2179756 - RNA, 19 nt, Homo sapiens
  misc_RNA (1)...(19): siRNA sense strand
auacaaggcuacacagaga

SEQ ID NO: 2179757 - RNA, 19 nt, Homo sapiens
  misc_RNA (1)...(19): siRNA sense strand
aaagaaggacugcaugaaa

SEQ ID NO: 2179758 - RNA, 19 nt, Homo sapiens
  misc_RNA (1)...(19): siRNA sense strand
ggagcaagaagcuaaagaa

SEQ ID NO: 2179759 - RNA, 19 nt, Homo sapiens
  misc_RNA (1)...(19): siRNA sense strand
ggaacuggaggauaagaaa

SEQ ID NO: 2179760 - RNA, 19 nt, Homo sapiens
  misc_RNA (1)...(19): siRNA sense strand
ggacaaagaaggacugcau

SEQ ID NO: 2179761 - RNA, 19 nt, Homo sapiens
  misc_RNA (1)...(19): siRNA sense strand
cuucgaaacucaugcaaga

SEQ ID NO: 2179762 - RNA, 19 nt, Homo sapiens
  misc_RNA (1)...(19): siRNA sense strand
caaagauguuauuggcaaa

SEQ ID NO: 2179763 - RNA, 19 nt, Homo sapiens
  misc_RNA (1)...(19): siRNA sense strand
gcucugaccucugccucua

SEQ ID NO: 2179764 - RNA, 19 nt, Homo sapiens
  misc_RNA (1)...(19): siRNA sense strand
ggaacaagcuuugaaaaca

SEQ ID NO: 2179765 - RNA, 19 nt, Homo sapiens
  misc_RNA (1)...(19): siRNA sense strand
ccaagaucauuaugcaguu

SEQ ID NO: 2179766 - RNA, 19 nt, Homo sapiens
  misc_RNA (1)...(19): siRNA sense strand
guaaauacaccugaaagau

SEQ ID NO: 2179767 - RNA, 19 nt, Homo sapiens
  misc_RNA (1)...(19): siRNA sense strand
gaaagaagaggaggaaguc

SEQ ID NO: 2179768 - RNA, 19 nt, Homo sapiens
  misc_RNA (1)...(19): siRNA sense strand
ggaagaugguuugaagcuu

SEQ ID NO: 2179769 - RNA, 19 nt, Homo sapiens
  misc_RNA (1)...(19): siRNA sense strand
gugaagcaaaggauaauuu

SEQ ID NO: 2179770 - RNA, 19 nt, Homo sapiens
  misc_RNA (1)...(19): siRNA sense strand
cuacuucacuugcauaacu

SEQ ID NO: 2179771 - RNA, 19 nt, Homo sapiens
  misc_RNA (1)...(19): siRNA sense strand
gaaaacauacccaguaaau

SEQ ID NO: 2179772 - RNA, 19 nt, Homo sapiens
  misc_RNA (1)...(19): siRNA sense strand
ggagaaagaagaggaggaa

SEQ ID NO: 2179773 - RNA, 19 nt, Homo sapiens
  misc_RNA (1)...(19): siRNA sense strand
agaaggagauaaugacuac

SEQ ID NO: 2179774 - RNA, 19 nt, Homo sapiens
  misc_RNA (1)...(19): siRNA sense strand
guuaagaggagaaacagaa

SEQ ID NO: 2179775 - RNA, 19 nt, Homo sapiens
  misc_RNA (1)...(19): siRNA sense strand
aaaagaacauggaguggua

SEQ ID NO: 2179776 - RNA, 19 nt, Homo sapiens
  misc_RNA (1)...(19): siRNA sense strand
ggaaguuauugcuaauuac

SEQ ID NO: 2179777 - RNA, 19 nt, Homo sapiens
  misc_RNA (1)...(19): siRNA sense strand
uuaaagcugugaaucuguu

SEQ ID NO: 2179778 - RNA, 19 nt, Homo sapiens
  misc_RNA (1)...(19): siRNA sense strand
uucaggaacuggaggauaa

SEQ ID NO: 2179779 - RNA, 19 nt, Homo sapiens
  misc_RNA (1)...(19): siRNA sense strand
aaagugaagcaaaggauaa

SEQ ID NO: 2179780 - RNA, 19 nt, Homo sapiens
  misc_RNA (1)...(19): siRNA sense strand
gaaagaguuauccgaggaa

SEQ ID NO: 2179781 - RNA, 19 nt, Homo sapiens
  misc_RNA (1)...(19): siRNA sense strand
caaguagagccaagaaaug

SEQ ID NO: 2179782 - RNA, 19 nt, Homo sapiens
  misc_RNA (1)...(19): siRNA sense strand
gaacaagcuuugaaaacau

SEQ ID NO: 2179783 - RNA, 19 nt, Homo sapiens
  misc_RNA (1)...(19): siRNA sense strand
caacgcaacgccuucagaa

SEQ ID NO: 2179784 - RNA, 19 nt, Homo sapiens
  misc_RNA (1)...(19): siRNA sense strand
gaacacagagaaaucaacu

SEQ ID NO: 2179785 - RNA, 19 nt, Homo sapiens
  misc_RNA (1)...(19): siRNA sense strand
gaaggagcaagaagcuaaa

SEQ ID NO: 2179786 - RNA, 19 nt, Homo sapiens
  misc_RNA (1)...(19): siRNA sense strand
aauuccagauggucaaaua

SEQ ID NO: 2179787 - RNA, 19 nt, Homo sapiens
  misc_RNA (1)...(19): siRNA sense strand
aucagaagaugaagaauug

SEQ ID NO: 2179788 - RNA, 19 nt, Homo sapiens
  misc_RNA (1)...(19): siRNA sense strand
ggacaacagaagaacagaa

SEQ ID NO: 2179789 - RNA, 19 nt, Homo sapiens
  misc_RNA (1)...(19): siRNA sense strand
gaagguccauauacagacu

SEQ ID NO: 2179790 - RNA, 19 nt, Homo sapiens
  misc_RNA (1)...(19): siRNA sense strand
ucgaaacucaugcaagaua

SEQ ID NO: 2179791 - RNA, 19 nt, Homo sapiens
  misc_RNA (1)...(19): siRNA sense strand
ggagauggauugaaaagca

SEQ ID NO: 2179792 - RNA, 19 nt, Homo sapiens
  misc_RNA (1)...(19): siRNA sense strand
cgaggaaucagaagaugaa

SEQ ID NO: 2179793 - RNA, 19 nt, Homo sapiens
  misc_RNA (1)...(19): siRNA sense strand
caaagaaggacugcaugaa

SEQ ID NO: 2179794 - RNA, 19 nt, Homo sapiens
  misc_RNA (1)...(19): siRNA sense strand
ggaggauaagaaagaguua

SEQ ID NO: 2179795 - RNA, 19 nt, Homo sapiens
  misc_RNA (1)...(19): siRNA sense strand
caucuaagaacacagagaa

SEQ ID NO: 2179796 - RNA, 19 nt, Homo sapiens
  misc_RNA (1)...(19): siRNA sense strand
gcagaacagagcaacaaga

SEQ ID NO: 2179797 - RNA, 19 nt, Homo sapiens
  misc_RNA (1)...(19): siRNA sense strand
gugggaagaugguuugaag

SEQ ID NO: 2179798 - RNA, 19 nt, Homo sapiens
  misc_RNA (1)...(19): siRNA sense strand
aaaggcauuugauaaguuc

SEQ ID NO: 2179799 - RNA, 19 nt, Homo sapiens
  misc_RNA (1)...(19): siRNA sense strand
gaacugccaaagauguuau

SEQ ID NO: 2179800 - RNA, 19 nt, Homo sapiens
  misc_RNA (1)...(19): siRNA sense strand
aauucaagaugggaaguua

SEQ ID NO: 2179801 - RNA, 19 nt, Homo sapiens
  misc_RNA (1)...(19): siRNA sense strand
guuaucugauccagugaaa

SEQ ID NO: 2179802 - RNA, 19 nt, Homo sapiens
  misc_RNA (1)...(19): siRNA sense strand
caugcaagauagaagaaau

SEQ ID NO: 2179803 - RNA, 19 nt, Homo sapiens
  misc_RNA (1)...(19): siRNA sense strand
cgaaacucaugcaagauag

SEQ ID NO: 2179804 - RNA, 19 nt, Homo sapiens
  misc_RNA (1)...(19): siRNA sense strand
ucuacacucugucaaguug

SEQ ID NO: 2179805 - RNA, 19 nt, Homo sapiens
  misc_RNA (1)...(19): siRNA sense strand
caaaggauaauuucuucga

SEQ ID NO: 2179806 - RNA, 19 nt, Homo sapiens
  misc_RNA (1)...(19): siRNA sense strand
gacgagcauuuaacagugu

SEQ ID NO: 2179807 - RNA, 19 nt, Homo sapiens
  misc_RNA (1)...(19): siRNA sense strand
aaagacaagcugaauuaga

SEQ ID NO: 2179808 - RNA, 19 nt, Homo sapiens
  misc_RNA (1)...(19): siRNA sense strand
gaaacgauacaaggaacuu

SEQ ID NO: 2179809 - RNA, 19 nt, Homo sapiens
  misc_RNA (1)...(19): siRNA sense strand
gcaugaaacgauacaagga

SEQ ID NO: 2179810 - RNA, 19 nt, Homo sapiens
  misc_RNA (1)...(19): siRNA sense strand
gaauugcaguuggaagagu

SEQ ID NO: 2179811 - RNA, 19 nt, Homo sapiens
  misc_RNA (1)...(19): siRNA sense strand
caagaacaagugcugaaug

SEQ ID NO: 2179812 - RNA, 19 nt, Homo sapiens
  misc_RNA (1)...(19): siRNA sense strand
uaagaacacagagaaauca

SEQ ID NO: 2179813 - RNA, 19 nt, Homo sapiens
  misc_RNA (1)...(19): siRNA sense strand
aaacaaagacaagcugaau

SEQ ID NO: 2179814 - RNA, 19 nt, Homo sapiens
  misc_RNA (1)...(19): siRNA sense strand
ucgguuagcuaaggagaaa

SEQ ID NO: 2179815 - RNA, 19 nt, Homo sapiens
  misc_RNA (1)...(19): siRNA sense strand
gagcaaaucagaaaagaga

SEQ ID NO: 2179816 - RNA, 19 nt, Homo sapiens
  misc_RNA (1)...(19): siRNA sense strand
gaaacucaugcaagauaga

SEQ ID NO: 2179817 - RNA, 19 nt, Homo sapiens
  misc_RNA (1)...(19): siRNA sense strand
aagaaggacugcaugaaac

SEQ ID NO: 2179818 - RNA, 19 nt, Homo sapiens
  misc_RNA (1)...(19): siRNA sense strand
gcaaagaaagcugcucaag

SEQ ID NO: 2179819 - RNA, 19 nt, Homo sapiens
  misc_RNA (1)...(19): siRNA sense strand
ggagguggaaauggaagua

SEQ ID NO: 2179820 - RNA, 19 nt, Homo sapiens
  misc_RNA (1)...(19): siRNA sense strand
caaggaagauguauuugua

SEQ ID NO: 2179821 - RNA, 19 nt, Homo sapiens
  misc_RNA (1)...(19): siRNA sense strand
gaacggauaugguuucauc

SEQ ID NO: 2179822 - RNA, 19 nt, Homo sapiens
  misc_RNA (1)...(19): siRNA sense strand
gcucaccucuucuuacaua

SEQ ID NO: 2179823 - RNA, 19 nt, Homo sapiens
  misc_RNA (1)...(19): siRNA sense strand
gcaaagaaguguucaaugc

SEQ ID NO: 2179824 - RNA, 19 nt, Homo sapiens
  misc_RNA (1)...(19): siRNA sense strand
gcgaaaggaucaagggaua

SEQ ID NO: 2179825 - RNA, 19 nt, Homo sapiens
  misc_RNA (1)...(19): siRNA sense strand
gaucuuaaauggcaaagga

SEQ ID NO: 2179826 - RNA, 19 nt, Homo sapiens
  misc_RNA (1)...(19): siRNA sense strand
caacgcagaugcccagaaa

SEQ ID NO: 2179827 - RNA, 19 nt, Homo sapiens
  misc_RNA (1)...(19): siRNA sense strand
cagcagaucguaaccauua

SEQ ID NO: 2179828 - RNA, 19 nt, Homo sapiens
  misc_RNA (1)...(19): siRNA sense strand
gauagaagaugggaucguu

SEQ ID NO: 2179829 - RNA, 19 nt, Homo sapiens
  misc_RNA (1)...(19): siRNA sense strand
cagagaagaucuuaaaugg

SEQ ID NO: 2179830 - RNA, 19 nt, Homo sapiens
  misc_RNA (1)...(19): siRNA sense strand
gaacaagguagaccaguga

SEQ ID NO: 2179831 - RNA, 19 nt, Homo sapiens
  misc_RNA (1)...(19): siRNA sense strand
uaaacacuguggaguauug

SEQ ID NO: 2179832 - RNA, 19 nt, Homo sapiens
  misc_RNA (1)...(19): siRNA sense strand
ggaguuugauguuguugaa

SEQ ID NO: 2179833 - RNA, 19 nt, Homo sapiens
  misc_RNA (1)...(19): siRNA sense strand
ggacuugccuaaccaaucu

SEQ ID NO: 2179834 - RNA, 19 nt, Homo sapiens
  misc_RNA (1)...(19): siRNA sense strand
caagaucccucaccugcaa

SEQ ID NO: 2179835 - RNA, 19 nt, Homo sapiens
  misc_RNA (1)...(19): siRNA sense strand
ggacgaggguacuaugugu

SEQ ID NO: 2179836 - RNA, 19 nt, Homo sapiens
  misc_RNA (1)...(19): siRNA sense strand
gugcacaacucaaacaaug

SEQ ID NO: 2179837 - RNA, 19 nt, Homo sapiens
  misc_RNA (1)...(19): siRNA sense strand
aaacgcagcuuucgugaca

SEQ ID NO: 2179838 - RNA, 19 nt, Homo sapiens
  misc_RNA (1)...(19): siRNA sense strand
ggaaugacaccaaggaaga

SEQ ID NO: 2179839 - RNA, 19 nt, Homo sapiens
  misc_RNA (1)...(19): siRNA sense strand
ccaggagacuacaguguuu

SEQ ID NO: 2179840 - RNA, 19 nt, Homo sapiens
  misc_RNA (1)...(19): siRNA sense strand
ugaagagacuguggaguuu

SEQ ID NO: 2179841 - RNA, 19 nt, Homo sapiens
  misc_RNA (1)...(19): siRNA sense strand
agacugccauaaagaauaa

SEQ ID NO: 2179842 - RNA, 19 nt, Homo sapiens
  misc_RNA (1)...(19): siRNA sense strand
caucagccaugcucucaaa

SEQ ID NO: 2179843 - RNA, 19 nt, Homo sapiens
  misc_RNA (1)...(19): siRNA sense strand
gaaaggaucaagggauaaa

SEQ ID NO: 2179844 - RNA, 19 nt, Homo sapiens
  misc_RNA (1)...(19): siRNA sense strand
ccaacaagaagaaauauga

SEQ ID NO: 2179845 - RNA, 19 nt, Homo sapiens
  misc_RNA (1)...(19): siRNA sense strand
caaaugaagcagugggaua

SEQ ID NO: 2179846 - RNA, 19 nt, Homo sapiens
  misc_RNA (1)...(19): siRNA sense strand
guacggcaaugaagaagau

SEQ ID NO: 2179847 - RNA, 19 nt, Homo sapiens
  misc_RNA (1)...(19): siRNA sense strand
ggauaugguuucaucaaca

SEQ ID NO: 2179848 - RNA, 19 nt, Homo sapiens
  misc_RNA (1)...(19): siRNA sense strand
caaccagggugcaggagaa

SEQ ID NO: 2179849 - RNA, 19 nt, Homo sapiens
  misc_RNA (1)...(19): siRNA sense strand
gcaaacagcacacagucuu

SEQ ID NO: 2179850 - RNA, 19 nt, Homo sapiens
  misc_RNA (1)...(19): siRNA sense strand
guaaggaacggauaugguu

SEQ ID NO: 2179851 - RNA, 19 nt, Homo sapiens
  misc_RNA (1)...(19): siRNA sense strand
ccaacacaguauucucuuu

SEQ ID NO: 2179852 - RNA, 19 nt, Homo sapiens
  misc_RNA (1)...(19): siRNA sense strand
cugaguaaaugccggcuua

SEQ ID NO: 2179853 - RNA, 19 nt, Homo sapiens
  misc_RNA (1)...(19): siRNA sense strand
gcagaucguaaccauuaua

SEQ ID NO: 2179854 - RNA, 19 nt, Homo sapiens
  misc_RNA (1)...(19): siRNA sense strand
caaccaccauagacaagaa

SEQ ID NO: 2179855 - RNA, 19 nt, Homo sapiens
  misc_RNA (1)...(19): siRNA sense strand
ccgagaagcuagacuguca

SEQ ID NO: 2179856 - RNA, 19 nt, Homo sapiens
  misc_RNA (1)...(19): siRNA sense strand
uaaaccauguguuccaguu

SEQ ID NO: 2179857 - RNA, 19 nt, Homo sapiens
  misc_RNA (1)...(19): siRNA sense strand
cagcacaucuucaaaucau

SEQ ID NO: 2179858 - RNA, 19 nt, Homo sapiens
  misc_RNA (1)...(19): siRNA sense strand
gaaaauuccuaaccuagug

SEQ ID NO: 2179859 - RNA, 19 nt, Homo sapiens
  misc_RNA (1)...(19): siRNA sense strand
aaagacagccuagagagua

SEQ ID NO: 2179860 - RNA, 19 nt, Homo sapiens
  misc_RNA (1)...(19): siRNA sense strand
uaaccaaucugcugucacu

SEQ ID NO: 2179861 - RNA, 19 nt, Homo sapiens
  misc_RNA (1)...(19): siRNA sense strand
aaauaaacacuguggagua

SEQ ID NO: 2179862 - RNA, 19 nt, Homo sapiens
  misc_RNA (1)...(19): siRNA sense strand
ggaagacauuaggaagaaa

SEQ ID NO: 2179863 - RNA, 19 nt, Homo sapiens
  misc_RNA (1)...(19): siRNA sense strand
agaauucuuuccuuccuaa

SEQ ID NO: 2179864 - RNA, 19 nt, Homo sapiens
  misc_RNA (1)...(19): siRNA sense strand
uaaaaugccugguaugaau

SEQ ID NO: 2179865 - RNA, 19 nt, Homo sapiens
  misc_RNA (1)...(19): siRNA sense strand
gaaugccaguucugcuuug

SEQ ID NO: 2179866 - RNA, 19 nt, Homo sapiens
  misc_RNA (1)...(19): siRNA sense strand
ccagagaagaucuuaaaug

SEQ ID NO: 2179867 - RNA, 19 nt, Homo sapiens
  misc_RNA (1)...(19): siRNA sense strand
cauccaacaagaagaaaua

SEQ ID NO: 2179868 - RNA, 19 nt, Homo sapiens
  misc_RNA (1)...(19): siRNA sense strand
caccaaggaagauguauuu

SEQ ID NO: 2179869 - RNA, 19 nt, Homo sapiens
  misc_RNA (1)...(19): siRNA sense strand
aauaaacacuguggaguau

SEQ ID NO: 2179870 - RNA, 19 nt, Homo sapiens
  misc_RNA (1)...(19): siRNA sense strand
ccacagcuuucccucaugu

SEQ ID NO: 2179871 - RNA, 19 nt, Homo sapiens
  misc_RNA (1)...(19): siRNA sense strand
caggagacuuucagagaga

SEQ ID NO: 2179872 - RNA, 19 nt, Homo sapiens
  misc_RNA (1)...(19): siRNA sense strand
uggaagacauuaggaagaa

SEQ ID NO: 2179873 - RNA, 19 nt, Homo sapiens
  misc_RNA (1)...(19): siRNA sense strand
uguagucaguuuagagaaa

SEQ ID NO: 2179874 - RNA, 19 nt, Homo sapiens
  misc_RNA (1)...(19): siRNA sense strand
gcggaggcagcaaauguua

SEQ ID NO: 2179875 - RNA, 19 nt, Homo sapiens
  misc_RNA (1)...(19): siRNA sense strand
gauaggaguguguaugguu

SEQ ID NO: 2179876 - RNA, 19 nt, Homo sapiens
  misc_RNA (1)...(19): siRNA sense strand
gaaauacuuccaagccaau

SEQ ID NO: 2179877 - RNA, 19 nt, Homo sapiens
  misc_RNA (1)...(19): siRNA sense strand
caccagagaagaucuuaaa

SEQ ID NO: 2179878 - RNA, 19 nt, Homo sapiens
  misc_RNA (1)...(19): siRNA sense strand
gucaccagcuggcaaagaa

SEQ ID NO: 2179879 - RNA, 19 nt, Homo sapiens
  misc_RNA (1)...(19): siRNA sense strand
cgacgaauccgagaagcua

SEQ ID NO: 2179880 - RNA, 19 nt, Homo sapiens
  misc_RNA (1)...(19): siRNA sense strand
gagaguacggcaaugaaga

SEQ ID NO: 2179881 - RNA, 19 nt, Homo sapiens
  misc_RNA (1)...(19): siRNA sense strand
gcgacgagucuccaaguaa

SEQ ID NO: 2179882 - RNA, 19 nt, Homo sapiens
  misc_RNA (1)...(19): siRNA sense strand
aaagcaaagucccgggaaa

SEQ ID NO: 2179883 - RNA, 19 nt, Homo sapiens
  misc_RNA (1)...(19): siRNA sense strand
gcacaucuucaaaucauag

SEQ ID NO: 2179884 - RNA, 19 nt, Homo sapiens
  misc_RNA (1)...(19): siRNA sense strand
aagagcaucuccugacuuc

SEQ ID NO: 2179885 - RNA, 19 nt, Homo sapiens
  misc_RNA (1)...(19): siRNA sense strand
ggcacaggauucucugcua

SEQ ID NO: 2179886 - RNA, 19 nt, Homo sapiens
  misc_RNA (1)...(19): siRNA sense strand
guucccaccuuacuacaug

SEQ ID NO: 2179887 - RNA, 19 nt, Homo sapiens
  misc_RNA (1)...(19): siRNA sense strand
aagagacuguggaguuuga

SEQ ID NO: 2179888 - RNA, 19 nt, Homo sapiens
  misc_RNA (1)...(19): siRNA sense strand
cagaauucuuuccuuccua

SEQ ID NO: 2179889 - RNA, 19 nt, Homo sapiens
  misc_RNA (1)...(19): siRNA sense strand
caacacaguauucucuuuc

SEQ ID NO: 2179890 - RNA, 19 nt, Homo sapiens
  misc_RNA (1)...(19): siRNA sense strand
gcccaaagacaaucuacuu

SEQ ID NO: 2179891 - RNA, 19 nt, Homo sapiens
  misc_RNA (1)...(19): siRNA sense strand
gaagaucuuaaauggcaaa

SEQ ID NO: 2179892 - RNA, 19 nt, Homo sapiens
  misc_RNA (1)...(19): siRNA sense strand
gcagcaacuucaauuacca

SEQ ID NO: 2179893 - RNA, 19 nt, Homo sapiens
  misc_RNA (1)...(19): siRNA sense strand
gaucguaaccauuauagac

SEQ ID NO: 2179894 - RNA, 19 nt, Homo sapiens
  misc_RNA (1)...(19): siRNA sense strand
cagacugccauaaagaaua

SEQ ID NO: 2179895 - RNA, 19 nt, Homo sapiens
  misc_RNA (1)...(19): siRNA sense strand
acaaagaaaccuugcacaa

SEQ ID NO: 2179896 - RNA, 19 nt, Homo sapiens
  misc_RNA (1)...(19): siRNA sense strand
uaaagagcaucuccugacu

SEQ ID NO: 2179897 - RNA, 19 nt, Homo sapiens
  misc_RNA (1)...(19): siRNA sense strand
ccagugaggcagaauaugu

SEQ ID NO: 2179898 - RNA, 19 nt, Homo sapiens
  misc_RNA (1)...(19): siRNA sense strand
caaacagcacacagucuuu

SEQ ID NO: 2179899 - RNA, 19 nt, Homo sapiens
  misc_RNA (1)...(19): siRNA sense strand
gauaugguuucaucaacag

SEQ ID NO: 2179900 - RNA, 19 nt, Homo sapiens
  misc_RNA (1)...(19): siRNA sense strand
cgacaggcuagucaaauga

SEQ ID NO: 2179901 - RNA, 19 nt, Homo sapiens
  misc_RNA (1)...(19): siRNA sense strand
ccgacaggcuagucaaaug

SEQ ID NO: 2179902 - RNA, 19 nt, Homo sapiens
  misc_RNA (1)...(19): siRNA sense strand
gcagauaggaguguguaug

SEQ ID NO: 2179903 - RNA, 19 nt, Homo sapiens
  misc_RNA (1)...(19): siRNA sense strand
gcagauggugccaauguca

SEQ ID NO: 2179904 - RNA, 19 nt, Homo sapiens
  misc_RNA (1)...(19): siRNA sense strand
acaccagacugccauaaag

SEQ ID NO: 2179905 - RNA, 19 nt, Homo sapiens
  misc_RNA (1)...(19): siRNA sense strand
ggccuggacaucacuagua

SEQ ID NO: 2179906 - RNA, 19 nt, Homo sapiens
  misc_RNA (1)...(19): siRNA sense strand
ccaaggaagauguauuugu

SEQ ID NO: 2179907 - RNA, 19 nt, Homo sapiens
  misc_RNA (1)...(19): siRNA sense strand
gcagaauucuuuccuuccu

SEQ ID NO: 2179908 - RNA, 19 nt, Homo sapiens
  misc_RNA (1)...(19): siRNA sense strand
cgacgagucuccaaguaac

SEQ ID NO: 2179909 - RNA, 19 nt, Homo sapiens
  misc_RNA (1)...(19): siRNA sense strand
ccacccaacucuguacuuc

SEQ ID NO: 2179910 - RNA, 19 nt, Homo sapiens
  misc_RNA (1)...(19): siRNA sense strand
uaauuaagccuguccugau

SEQ ID NO: 2179911 - RNA, 19 nt, Homo sapiens
  misc_RNA (1)...(19): siRNA sense strand
uaaaucacaagauggcaaa

SEQ ID NO: 2179912 - RNA, 19 nt, Homo sapiens
  misc_RNA (1)...(19): siRNA sense strand
gauggagggugcugacaac

SEQ ID NO: 2179913 - RNA, 19 nt, Homo sapiens
  misc_RNA (1)...(19): siRNA sense strand
gaagagacuguggaguuug

SEQ ID NO: 2179914 - RNA, 19 nt, Homo sapiens
  misc_RNA (1)...(19): siRNA sense strand
ucaaugccauggugcagau

SEQ ID NO: 2179915 - RNA, 19 nt, Homo sapiens
  misc_RNA (1)...(19): siRNA sense strand
ucucuggccucacacaaug

SEQ ID NO: 2179916 - RNA, 19 nt, Homo sapiens
  misc_RNA (1)...(19): siRNA sense strand
gcauuuaacucugcaucag

SEQ ID NO: 2179917 - RNA, 19 nt, Homo sapiens
  misc_RNA (1)...(19): siRNA sense strand
caaccucgcugcccaaacc

SEQ ID NO: 2179918 - RNA, 19 nt, Homo sapiens
  misc_RNA (1)...(19): siRNA sense strand
cccaaagacaaucuacuua

SEQ ID NO: 2179919 - RNA, 19 nt, Homo sapiens
  misc_RNA (1)...(19): siRNA sense strand
gaccagugaggcagaauau

SEQ ID NO: 2179920 - RNA, 19 nt, Homo sapiens
  misc_RNA (1)...(19): siRNA sense strand
gaaacuaguuccaccauua

SEQ ID NO: 2179921 - RNA, 19 nt, Homo sapiens
  misc_RNA (1)...(19): siRNA sense strand
gcaauugucuucaagguua

SEQ ID NO: 2179922 - RNA, 19 nt, Homo sapiens
  misc_RNA (1)...(19): siRNA sense strand
gaacgugucugaaauagaa

SEQ ID NO: 2179923 - RNA, 19 nt, Homo sapiens
  misc_RNA (1)...(19): siRNA sense strand
gaaugaagcagaccucuua

SEQ ID NO: 2179924 - RNA, 19 nt, Homo sapiens
  misc_RNA (1)...(19): siRNA sense strand
ggacuuagaggcauuauuu

SEQ ID NO: 2179925 - RNA, 19 nt, Homo sapiens
  misc_RNA (1)...(19): siRNA sense strand
gaaagcaguguaugaauuu

SEQ ID NO: 2179926 - RNA, 19 nt, Homo sapiens
  misc_RNA (1)...(19): siRNA sense strand
ggagaaugcucuacugguu

SEQ ID NO: 2179927 - RNA, 19 nt, Homo sapiens
  misc_RNA (1)...(19): siRNA sense strand
ugacaaaccugaggauaaa

SEQ ID NO: 2179928 - RNA, 19 nt, Homo sapiens
  misc_RNA (1)...(19): siRNA sense strand
ccuaggaccucucaaagua

SEQ ID NO: 2179929 - RNA, 19 nt, Homo sapiens
  misc_RNA (1)...(19): siRNA sense strand
ugacuuacuuaccaucuua

SEQ ID NO: 2179930 - RNA, 19 nt, Homo sapiens
  misc_RNA (1)...(19): siRNA sense strand
gaaagcagcaaauauucua

SEQ ID NO: 2179931 - RNA, 19 nt, Homo sapiens
  misc_RNA (1)...(19): siRNA sense strand
ugaaagcaguguaugaauu

SEQ ID NO: 2179932 - RNA, 19 nt, Homo sapiens
  misc_RNA (1)...(19): siRNA sense strand
aaagguguauugaugguua

SEQ ID NO: 2179933 - RNA, 19 nt, Homo sapiens
  misc_RNA (1)...(19): siRNA sense strand
gagacuggcugcuaacaug

SEQ ID NO: 2179934 - RNA, 19 nt, Homo sapiens
  misc_RNA (1)...(19): siRNA sense strand
caaaggacacuguauguga

SEQ ID NO: 2179935 - RNA, 19 nt, Homo sapiens
  misc_RNA (1)...(19): siRNA sense strand
ccagggaaaugaagaguga

SEQ ID NO: 2179936 - RNA, 19 nt, Homo sapiens
  misc_RNA (1)...(19): siRNA sense strand
aagcagaccucuuacuuga

SEQ ID NO: 2179937 - RNA, 19 nt, Homo sapiens
  misc_RNA (1)...(19): siRNA sense strand
gauguaaucugcaauuguc

SEQ ID NO: 2179938 - RNA, 19 nt, Homo sapiens
  misc_RNA (1)...(19): siRNA sense strand
gaugaucccucaagcaauc

SEQ ID NO: 2179939 - RNA, 19 nt, Homo sapiens
  misc_RNA (1)...(19): siRNA sense strand
cgggcaaacucuaccauua

SEQ ID NO: 2179940 - RNA, 19 nt, Homo sapiens
  misc_RNA (1)...(19): siRNA sense strand
ugagaaagcagcaaauauu

SEQ ID NO: 2179941 - RNA, 19 nt, Homo sapiens
  misc_RNA (1)...(19): siRNA sense strand
gaaaacagguuaaaugaag

SEQ ID NO: 2179942 - RNA, 19 nt, Homo sapiens
  misc_RNA (1)...(19): siRNA sense strand
ggaaacuugucauuggaaa

SEQ ID NO: 2179943 - RNA, 19 nt, Homo sapiens
  misc_RNA (1)...(19): siRNA sense strand
gacaagcacuacaggacua

SEQ ID NO: 2179944 - RNA, 19 nt, Homo sapiens
  misc_RNA (1)...(19): siRNA sense strand
gaucgaaaguauaagugaa

SEQ ID NO: 2179945 - RNA, 19 nt, Homo sapiens
  misc_RNA (1)...(19): siRNA sense strand
gaaaagaaaugguggcaau

SEQ ID NO: 2179946 - RNA, 19 nt, Homo sapiens
  misc_RNA (1)...(19): siRNA sense strand
gcagaccucuuacuugaag

SEQ ID NO: 2179947 - RNA, 19 nt, Homo sapiens
  misc_RNA (1)...(19): siRNA sense strand
gccaagauaagaagaauaa

SEQ ID NO: 2179948 - RNA, 19 nt, Homo sapiens
  misc_RNA (1)...(19): siRNA sense strand
caaagcagcugagaaagca

SEQ ID NO: 2179949 - RNA, 19 nt, Homo sapiens
  misc_RNA (1)...(19): siRNA sense strand
aaucagaccugcagaagau

SEQ ID NO: 2179950 - RNA, 19 nt, Homo sapiens
  misc_RNA (1)...(19): siRNA sense strand
caaaggagacauuaggaaa

SEQ ID NO: 2179951 - RNA, 19 nt, Homo sapiens
  misc_RNA (1)...(19): siRNA sense strand
uaaugagacuggcugcuaa

SEQ ID NO: 2179952 - RNA, 19 nt, Homo sapiens
  misc_RNA (1)...(19): siRNA sense strand
cuacuugucuucaauguca

SEQ ID NO: 2179953 - RNA, 19 nt, Homo sapiens
  misc_RNA (1)...(19): siRNA sense strand
ggaauucccuacuugucuu

SEQ ID NO: 2179954 - RNA, 19 nt, Homo sapiens
  misc_RNA (1)...(19): siRNA sense strand
agaaccagauguacaauau

SEQ ID NO: 2179955 - RNA, 19 nt, Homo sapiens
  misc_RNA (1)...(19): siRNA sense strand
aaaggaaacuugucauugg

SEQ ID NO: 2179956 - RNA, 19 nt, Homo sapiens
  misc_RNA (1)...(19): siRNA sense strand
gaagcagaccucuuacuug

SEQ ID NO: 2179957 - RNA, 19 nt, Homo sapiens
  misc_RNA (1)...(19): siRNA sense strand
uaucaugacucuguuagaa

SEQ ID NO: 2179958 - RNA, 19 nt, Homo sapiens
  misc_RNA (1)...(19): siRNA sense strand
caaugucacuugugcuuug

SEQ ID NO: 2179959 - RNA, 19 nt, Homo sapiens
  misc_RNA (1)...(19): siRNA sense strand
gggagugccuucgauguuu

SEQ ID NO: 2179960 - RNA, 19 nt, Homo sapiens
  misc_RNA (1)...(19): siRNA sense strand
gcaagcaggacuuagauga

SEQ ID NO: 2179961 - RNA, 19 nt, Homo sapiens
  misc_RNA (1)...(19): siRNA sense strand
acuggaaaguguucaaaua

SEQ ID NO: 2179962 - RNA, 19 nt, Homo sapiens
  misc_RNA (1)...(19): siRNA sense strand
gaagagugagcuggaguua

SEQ ID NO: 2179963 - RNA, 19 nt, Homo sapiens
  misc_RNA (1)...(19): siRNA sense strand
gcaauccaguguccuuaau

SEQ ID NO: 2179964 - RNA, 19 nt, Homo sapiens
  misc_RNA (1)...(19): siRNA sense strand
gcagcuaaaugaacaacug

SEQ ID NO: 2179965 - RNA, 19 nt, Homo sapiens
  misc_RNA (1)...(19): siRNA sense strand
gagggaacgugucugaaau

SEQ ID NO: 2179966 - RNA, 19 nt, Homo sapiens
  misc_RNA (1)...(19): siRNA sense strand
gagcagagcccagaaauac

SEQ ID NO: 2179967 - RNA, 19 nt, Homo sapiens
  misc_RNA (1)...(19): siRNA sense strand
caaaaugauucccuugaua

SEQ ID NO: 2179968 - RNA, 19 nt, Homo sapiens
  misc_RNA (1)...(19): siRNA sense strand
caccuuauccugaccuuua

SEQ ID NO: 2179969 - RNA, 19 nt, Homo sapiens
  misc_RNA (1)...(19): siRNA sense strand
cuacaggacuaacaaagga

SEQ ID NO: 2179970 - RNA, 19 nt, Homo sapiens
  misc_RNA (1)...(19): siRNA sense strand
ggaauuuguugagcugaaa

SEQ ID NO: 2179971 - RNA, 19 nt, Homo sapiens
  misc_RNA (1)...(19): siRNA sense strand
agacaaaucaugcagcuaa

SEQ ID NO: 2179972 - RNA, 19 nt, Homo sapiens
  misc_RNA (1)...(19): siRNA sense strand
gaacguggaaggagccaaa

SEQ ID NO: 2179973 - RNA, 19 nt, Homo sapiens
  misc_RNA (1)...(19): siRNA sense strand
ccacucugauccugccuua

SEQ ID NO: 2179974 - RNA, 19 nt, Homo sapiens
  misc_RNA (1)...(19): siRNA sense strand
gacaggugcucaacuggaa

SEQ ID NO: 2179975 - RNA, 19 nt, Homo sapiens
  misc_RNA (1)...(19): siRNA sense strand
ggccaaagcagcugagaaa

SEQ ID NO: 2179976 - RNA, 19 nt, Homo sapiens
  misc_RNA (1)...(19): siRNA sense strand
cugcuaacauggaagauaa

SEQ ID NO: 2179977 - RNA, 19 nt, Homo sapiens
  misc_RNA (1)...(19): siRNA sense strand
caaaccaggucacuaugga

SEQ ID NO: 2179978 - RNA, 19 nt, Homo sapiens
  misc_RNA (1)...(19): siRNA sense strand
guacaauauuccauagaug

SEQ ID NO: 2179979 - RNA, 19 nt, Homo sapiens
  misc_RNA (1)...(19): siRNA sense strand
gaagcaaaauccauuauuc

SEQ ID NO: 2179980 - RNA, 19 nt, Homo sapiens
  misc_RNA (1)...(19): siRNA sense strand
uagauacacuaaccucaaa

SEQ ID NO: 2179981 - RNA, 19 nt, Homo sapiens
  misc_RNA (1)...(19): siRNA sense strand
ugugaaagguguauugaug

SEQ ID NO: 2179982 - RNA, 19 nt, Homo sapiens
  misc_RNA (1)...(19): siRNA sense strand
gaucaaaggacacuguaug

SEQ ID NO: 2179983 - RNA, 19 nt, Homo sapiens
  misc_RNA (1)...(19): siRNA sense strand
caacuggaagcuaugauuu

SEQ ID NO: 2179984 - RNA, 19 nt, Homo sapiens
  misc_RNA (1)...(19): siRNA sense strand
gagauuugcugucaacaac

SEQ ID NO: 2179985 - RNA, 19 nt, Homo sapiens
  misc_RNA (1)...(19): siRNA sense strand
acagcugacugccaauaua

SEQ ID NO: 2179986 - RNA, 19 nt, Homo sapiens
  misc_RNA (1)...(19): siRNA sense strand
ggacuuagaugaguaucag

SEQ ID NO: 2179987 - RNA, 19 nt, Homo sapiens
  misc_RNA (1)...(19): siRNA sense strand
ccauugccauucacuauga

SEQ ID NO: 2179988 - RNA, 19 nt, Homo sapiens
  misc_RNA (1)...(19): siRNA sense strand
gcaucagacuggacuuaga

SEQ ID NO: 2179989 - RNA, 19 nt, Homo sapiens
  misc_RNA (1)...(19): siRNA sense strand
gagaaagcagcaaauauuc

SEQ ID NO: 2179990 - RNA, 19 nt, Homo sapiens
  misc_RNA (1)...(19): siRNA sense strand
cagaagacaucgagaaggu

SEQ ID NO: 2179991 - RNA, 19 nt, Homo sapiens
  misc_RNA (1)...(19): siRNA sense strand
caaagugacucugaagaag

SEQ ID NO: 2179992 - RNA, 19 nt, Homo sapiens
  misc_RNA (1)...(19): siRNA sense strand
gugcggagauccaggaaau

SEQ ID NO: 2179993 - RNA, 19 nt, Homo sapiens
  misc_RNA (1)...(19): siRNA sense strand
cagauuaagauaccagaua

SEQ ID NO: 2179994 - RNA, 19 nt, Homo sapiens
  misc_RNA (1)...(19): siRNA sense strand
ggacuucaccauugccauu

SEQ ID NO: 2179995 - RNA, 19 nt, Homo sapiens
  misc_RNA (1)...(19): siRNA sense strand
caacguaagacaagcacua

SEQ ID NO: 2179996 - RNA, 19 nt, Homo sapiens
  misc_RNA (1)...(19): siRNA sense strand
gaaaccaaagugacucuga

SEQ ID NO: 2179997 - RNA, 19 nt, Homo sapiens
  misc_RNA (1)...(19): siRNA sense strand
caggaaaugugccaugugu

SEQ ID NO: 2179998 - RNA, 19 nt, Homo sapiens
  misc_RNA (1)...(19): siRNA sense strand
gacaaaucaugcagcuaaa

SEQ ID NO: 2179999 - RNA, 19 nt, Homo sapiens
  misc_RNA (1)...(19): siRNA sense strand
ccaguguccguguaaauua

SEQ ID NO: 2180000 - RNA, 19 nt, Homo sapiens
  misc_RNA (1)...(19): siRNA sense strand
ugggagacauuguuuguga

SEQ ID NO: 2180001 - RNA, 19 nt, Homo sapiens
  misc_RNA (1)...(19): siRNA sense strand
ucaaguuguugccauuaaa

SEQ ID NO: 2180002 - RNA, 19 nt, Homo sapiens
  misc_RNA (1)...(19): siRNA sense strand
gacauucaccuaccaauuc

SEQ ID NO: 2180003 - RNA, 19 nt, Homo sapiens
  misc_RNA (1)...(19): siRNA sense strand
ccaaagugacucugaagaa

SEQ ID NO: 2180004 - RNA, 19 nt, Homo sapiens
  misc_RNA (1)...(19): siRNA sense strand
gaaaggauuuugaaacauc

SEQ ID NO: 2180005 - RNA, 19 nt, Homo sapiens
  misc_RNA (1)...(19): siRNA sense strand
gaggaugucagucauguga

SEQ ID NO: 2180006 - RNA, 19 nt, Homo sapiens
  misc_RNA (1)...(19): siRNA sense strand
gcagcaagcaggacuuaga

SEQ ID NO: 2180007 - RNA, 19 nt, Homo sapiens
  misc_RNA (1)...(19): siRNA sense strand
gcccauuccuguuaucaga

SEQ ID NO: 2180008 - RNA, 19 nt, Homo sapiens
  misc_RNA (1)...(19): siRNA sense strand
aaaccaaagugacucugaa

SEQ ID NO: 2180009 - RNA, 19 nt, Homo sapiens
  misc_RNA (1)...(19): siRNA sense strand
ggaaugacuuacuuaccau

SEQ ID NO: 2180010 - RNA, 19 nt, Homo sapiens
  misc_RNA (1)...(19): siRNA sense strand
ggagugccuucgauguuug

SEQ ID NO: 2180011 - RNA, 19 nt, Homo sapiens
  misc_RNA (1)...(19): siRNA sense strand
gagaaugcucuacugguuu

SEQ ID NO: 2180012 - RNA, 19 nt, Homo sapiens
  misc_RNA (1)...(19): siRNA sense strand
gugcucaacuggaagcuau

SEQ ID NO: 2180013 - RNA, 19 nt, Homo sapiens
  misc_RNA (1)...(19): siRNA sense strand
acaacaagcucaaaucacu

SEQ ID NO: 2180014 - RNA, 19 nt, Homo sapiens
  misc_RNA (1)...(19): siRNA sense strand
gauguacaauauuccauag

SEQ ID NO: 2180015 - RNA, 19 nt, Homo sapiens
  misc_RNA (1)...(19): siRNA sense strand
gaucaaguuguugccauua

SEQ ID NO: 2180016 - RNA, 19 nt, Homo sapiens
  misc_RNA (1)...(19): siRNA sense strand
gcugaucaacugagaauau

SEQ ID NO: 2180017 - RNA, 19 nt, Homo sapiens
  misc_RNA (1)...(19): siRNA sense strand
ucaugacucuguuagaaga

SEQ ID NO: 2180018 - RNA, 19 nt, Homo sapiens
  misc_RNA (1)...(19): siRNA sense strand
gaaaugguggcaaucugaa

SEQ ID NO: 2180019 - RNA, 19 nt, Homo sapiens
  misc_RNA (1)...(19): siRNA sense strand
gagacagggucaugcuuca

SEQ ID NO: 2180020 - RNA, 19 nt, Homo sapiens
  misc_RNA (1)...(19): siRNA sense strand
ggaaucaacucucauuauu

SEQ ID NO: 2180021 - RNA, 19 nt, Homo sapiens
  misc_RNA (1)...(19): siRNA sense strand
gaauaacccuucggcauua

SEQ ID NO: 2180022 - RNA, 19 nt, Homo sapiens
  misc_RNA (1)...(19): siRNA sense strand
cauauuagcuuucauguug

SEQ ID NO: 2180023 - RNA, 19 nt, Homo sapiens
  misc_RNA (1)...(19): siRNA sense strand
aaacauaccucuagaugaa

SEQ ID NO: 2180024 - RNA, 19 nt, Homo sapiens
  misc_RNA (1)...(19): siRNA sense strand
ccaaagcucugcauuacua

SEQ ID NO: 2180025 - RNA, 19 nt, Homo sapiens
  misc_RNA (1)...(19): siRNA sense strand
gagguuugcuucugaauaa

SEQ ID NO: 2180026 - RNA, 19 nt, Homo sapiens
  misc_RNA (1)...(19): siRNA sense strand
gaucugcacugaugauuga

SEQ ID NO: 2180027 - RNA, 19 nt, Homo sapiens
  misc_RNA (1)...(19): siRNA sense strand
gcaagcaacuguauuucuu

SEQ ID NO: 2180028 - RNA, 19 nt, Homo sapiens
  misc_RNA (1)...(19): siRNA sense strand
gaagcaagcaacuguauuu

SEQ ID NO: 2180029 - RNA, 19 nt, Homo sapiens
  misc_RNA (1)...(19): siRNA sense strand
uaagguagcugcuguaagu

SEQ ID NO: 2180030 - RNA, 19 nt, Homo sapiens
  misc_RNA (1)...(19): siRNA sense strand
ggacaaaucagaacuugaa

SEQ ID NO: 2180031 - RNA, 19 nt, Homo sapiens
  misc_RNA (1)...(19): siRNA sense strand
ccacaucagucuacaaaga

SEQ ID NO: 2180032 - RNA, 19 nt, Homo sapiens
  misc_RNA (1)...(19): siRNA sense strand
gaugggaucugcacugaug

SEQ ID NO: 2180033 - RNA, 19 nt, Homo sapiens
  misc_RNA (1)...(19): siRNA sense strand
gugaggaacuuuaucgaaa

SEQ ID NO: 2180034 - RNA, 19 nt, Homo sapiens
  misc_RNA (1)...(19): siRNA sense strand
cagaagaaguccauauaau

SEQ ID NO: 2180035 - RNA, 19 nt, Homo sapiens
  misc_RNA (1)...(19): siRNA sense strand
gaugaaagucgaaaugaaa

SEQ ID NO: 2180036 - RNA, 19 nt, Homo sapiens
  misc_RNA (1)...(19): siRNA sense strand
gcaacuguauuucuuguuc

SEQ ID NO: 2180037 - RNA, 19 nt, Homo sapiens
  misc_RNA (1)...(19): siRNA sense strand
gaagcacauucuugcagua

SEQ ID NO: 2180038 - RNA, 19 nt, Homo sapiens
  misc_RNA (1)...(19): siRNA sense strand
cauaguaaauagagggaua

SEQ ID NO: 2180039 - RNA, 19 nt, Homo sapiens
  misc_RNA (1)...(19): siRNA sense strand
ugagacaaauuaaggauga

SEQ ID NO: 2180040 - RNA, 19 nt, Homo sapiens
  misc_RNA (1)...(19): siRNA sense strand
ggcauuaguucaggcauua

SEQ ID NO: 2180041 - RNA, 19 nt, Homo sapiens
  misc_RNA (1)...(19): siRNA sense strand
gaagagaaaagucacauua

SEQ ID NO: 2180042 - RNA, 19 nt, Homo sapiens
  misc_RNA (1)...(19): siRNA sense strand
caacagugcuacagauaca

SEQ ID NO: 2180043 - RNA, 19 nt, Homo sapiens
  misc_RNA (1)...(19): siRNA sense strand
gaagaacaacugacccaaa

SEQ ID NO: 2180044 - RNA, 19 nt, Homo sapiens
  misc_RNA (1)...(19): siRNA sense strand
gcaagggugaguauugaua

SEQ ID NO: 2180045 - RNA, 19 nt, Homo sapiens
  misc_RNA (1)...(19): siRNA sense strand
ugagaaacacgguaacaua

SEQ ID NO: 2180046 - RNA, 19 nt, Homo sapiens
  misc_RNA (1)...(19): siRNA sense strand
ggauaacacccaaagcuuu

SEQ ID NO: 2180047 - RNA, 19 nt, Homo sapiens
  misc_RNA (1)...(19): siRNA sense strand
guucaggcauuaagaagaa

SEQ ID NO: 2180048 - RNA, 19 nt, Homo sapiens
  misc_RNA (1)...(19): siRNA sense strand
caaguucuauaaccacaaa

SEQ ID NO: 2180049 - RNA, 19 nt, Homo sapiens
  misc_RNA (1)...(19): siRNA sense strand
gauggagguuugcuucuga

SEQ ID NO: 2180050 - RNA, 19 nt, Homo sapiens
  misc_RNA (1)...(19): siRNA sense strand
aagcauuacuggaggauaa

SEQ ID NO: 2180051 - RNA, 19 nt, Homo sapiens
  misc_RNA (1)...(19): siRNA sense strand
uccaaggucuacaugauua

SEQ ID NO: 2180052 - RNA, 19 nt, Homo sapiens
  misc_RNA (1)...(19): siRNA sense strand
aagccaaguucccaaauuu

SEQ ID NO: 2180053 - RNA, 19 nt, Homo sapiens
  misc_RNA (1)...(19): siRNA sense strand
uaagccaaguucccaaauu

SEQ ID NO: 2180054 - RNA, 19 nt, Homo sapiens
  misc_RNA (1)...(19): siRNA sense strand
gaagaaguccauauaaugc

SEQ ID NO: 2180055 - RNA, 19 nt, Homo sapiens
  misc_RNA (1)...(19): siRNA sense strand
gacccaaagcucugcauua

SEQ ID NO: 2180056 - RNA, 19 nt, Homo sapiens
  misc_RNA (1)...(19): siRNA sense strand
gaacugacuuuucaucuuc

SEQ ID NO: 2180057 - RNA, 19 nt, Homo sapiens
  misc_RNA (1)...(19): siRNA sense strand
caaacaagccaucaaaucu

SEQ ID NO: 2180058 - RNA, 19 nt, Homo sapiens
  misc_RNA (1)...(19): siRNA sense strand
ggccagaugugccguuaga

SEQ ID NO: 2180059 - RNA, 19 nt, Homo sapiens
  misc_RNA (1)...(19): siRNA sense strand
gcucuuugauuacauuugu

SEQ ID NO: 2180060 - RNA, 19 nt, Homo sapiens
  misc_RNA (1)...(19): siRNA sense strand
caaagaagaagauauaggu

SEQ ID NO: 2180061 - RNA, 19 nt, Homo sapiens
  misc_RNA (1)...(19): siRNA sense strand
ugaauaacccuucggcauu

SEQ ID NO: 2180062 - RNA, 19 nt, Homo sapiens
  misc_RNA (1)...(19): siRNA sense strand
ggagguuugcuucugaaua

SEQ ID NO: 2180063 - RNA, 19 nt, Homo sapiens
  misc_RNA (1)...(19): siRNA sense strand
caugauuaccugaaguuua

SEQ ID NO: 2180064 - RNA, 19 nt, Homo sapiens
  misc_RNA (1)...(19): siRNA sense strand
ggaagguguacaagcuuua

SEQ ID NO: 2180065 - RNA, 19 nt, Homo sapiens
  misc_RNA (1)...(19): siRNA sense strand
aaacaacucugcagaaaau

SEQ ID NO: 2180066 - RNA, 19 nt, Homo sapiens
  misc_RNA (1)...(19): siRNA sense strand
ggguugaaauacauagaaa

SEQ ID NO: 2180067 - RNA, 19 nt, Homo sapiens
  misc_RNA (1)...(19): siRNA sense strand
ggaugaaugugaggaacuu

SEQ ID NO: 2180068 - RNA, 19 nt, Homo sapiens
  misc_RNA (1)...(19): siRNA sense strand
ccauauuuauuacgacuga

SEQ ID NO: 2180069 - RNA, 19 nt, Homo sapiens
  misc_RNA (1)...(19): siRNA sense strand
caaagagucagucagaaga

SEQ ID NO: 2180070 - RNA, 19 nt, Homo sapiens
  misc_RNA (1)...(19): siRNA sense strand
caaaucagaacuugaagau

SEQ ID NO: 2180071 - RNA, 19 nt, Homo sapiens
  misc_RNA (1)...(19): siRNA sense strand
uacaaguccuucugcgaua

SEQ ID NO: 2180072 - RNA, 19 nt, Homo sapiens
  misc_RNA (1)...(19): siRNA sense strand
caucaaacaagccaucaaa

SEQ ID NO: 2180073 - RNA, 19 nt, Homo sapiens
  misc_RNA (1)...(19): siRNA sense strand
agaagaaguccauauaaug

SEQ ID NO: 2180074 - RNA, 19 nt, Homo sapiens
  misc_RNA (1)...(19): siRNA sense strand
caggcuacuuugcagaaua

SEQ ID NO: 2180075 - RNA, 19 nt, Homo sapiens
  misc_RNA (1)...(19): siRNA sense strand
uuacgacugagacaaauua

SEQ ID NO: 2180076 - RNA, 19 nt, Homo sapiens
  misc_RNA (1)...(19): siRNA sense strand
gggcauuaguucaggcauu

SEQ ID NO: 2180077 - RNA, 19 nt, Homo sapiens
  misc_RNA (1)...(19): siRNA sense strand
gagaagcaagcaacuguau

SEQ ID NO: 2180078 - RNA, 19 nt, Homo sapiens
  misc_RNA (1)...(19): siRNA sense strand
ggaaggguugaaauacaua

SEQ ID NO: 2180079 - RNA, 19 nt, Homo sapiens
  misc_RNA (1)...(19): siRNA sense strand
gggaaaacauucuuaagga

SEQ ID NO: 2180080 - RNA, 19 nt, Homo sapiens
  misc_RNA (1)...(19): siRNA sense strand
uguacaagcuuuaguaggu

SEQ ID NO: 2180081 - RNA, 19 nt, Homo sapiens
  misc_RNA (1)...(19): siRNA sense strand
gaaacacgguaacauacac

SEQ ID NO: 2180082 - RNA, 19 nt, Homo sapiens
  misc_RNA (1)...(19): siRNA sense strand
gcuguaaguaccauaguaa

SEQ ID NO: 2180083 - RNA, 19 nt, Homo sapiens
  misc_RNA (1)...(19): siRNA sense strand
caagggugaguauugauaa

SEQ ID NO: 2180084 - RNA, 19 nt, Homo sapiens
  misc_RNA (1)...(19): siRNA sense strand
gagaaacacgguaacauac

SEQ ID NO: 2180085 - RNA, 19 nt, Homo sapiens
  misc_RNA (1)...(19): siRNA sense strand
cuauguggauccagugaaa

SEQ ID NO: 2180086 - RNA, 19 nt, Homo sapiens
  misc_RNA (1)...(19): siRNA sense strand
auuuguaugucccguauua

SEQ ID NO: 2180087 - RNA, 19 nt, Homo sapiens
  misc_RNA (1)...(19): siRNA sense strand
acagaagaaguccauauaa

SEQ ID NO: 2180088 - RNA, 19 nt, Homo sapiens
  misc_RNA (1)...(19): siRNA sense strand
uacagaagaaguccauaua

SEQ ID NO: 2180089 - RNA, 19 nt, Homo sapiens
  misc_RNA (1)...(19): siRNA sense strand
gaugugagaaacacgguaa

SEQ ID NO: 2180090 - RNA, 19 nt, Homo sapiens
  misc_RNA (1)...(19): siRNA sense strand
gggaggcugucaguauaaa

SEQ ID NO: 2180091 - RNA, 19 nt, Homo sapiens
  misc_RNA (1)...(19): siRNA sense strand
cagaaacuauggucauuuu

SEQ ID NO: 2180092 - RNA, 19 nt, Homo sapiens
  misc_RNA (1)...(19): siRNA sense strand
aagaacaacugacccaaag

SEQ ID NO: 2180093 - RNA, 19 nt, Homo sapiens
  misc_RNA (1)...(19): siRNA sense strand
gaaaaggaguggcugucaa

SEQ ID NO: 2180094 - RNA, 19 nt, Homo sapiens
  misc_RNA (1)...(19): siRNA sense strand
agaugaaagucgaaaugaa

SEQ ID NO: 2180095 - RNA, 19 nt, Homo sapiens
  misc_RNA (1)...(19): siRNA sense strand
gaaaacauaccucuagaug

SEQ ID NO: 2180096 - RNA, 19 nt, Homo sapiens
  misc_RNA (1)...(19): siRNA sense strand
gccguuagagugcauagua

SEQ ID NO: 2180097 - RNA, 19 nt, Homo sapiens
  misc_RNA (1)...(19): siRNA sense strand
gcugucaaggaaagaauua

SEQ ID NO: 2180098 - RNA, 19 nt, Homo sapiens
  misc_RNA (1)...(19): siRNA sense strand
caaagagguuuucauacaa

SEQ ID NO: 2180099 - RNA, 19 nt, Homo sapiens
  misc_RNA (1)...(19): siRNA sense strand
ucaauccuguaauguguga

SEQ ID NO: 2180100 - RNA, 19 nt, Homo sapiens
  misc_RNA (1)...(19): siRNA sense strand
uaucaacagugcuacagau

SEQ ID NO: 2180101 - RNA, 19 nt, Homo sapiens
  misc_RNA (1)...(19): siRNA sense strand
aggaguggcugucaaggaa

SEQ ID NO: 2180102 - RNA, 19 nt, Homo sapiens
  misc_RNA (1)...(19): siRNA sense strand
gcauuaagaagaacaacug

SEQ ID NO: 2180103 - RNA, 19 nt, Homo sapiens
  misc_RNA (1)...(19): siRNA sense strand
cggaagguguacaagcuuu

SEQ ID NO: 2180104 - RNA, 19 nt, Homo sapiens
  misc_RNA (1)...(19): siRNA sense strand
ucaaacaagccaucaaauc

SEQ ID NO: 2180105 - RNA, 19 nt, Homo sapiens
  misc_RNA (1)...(19): siRNA sense strand
gauaguggcugguuaaaac

SEQ ID NO: 2180106 - RNA, 19 nt, Homo sapiens
  misc_RNA (1)...(19): siRNA sense strand
guaaauggaccaaaaguga

SEQ ID NO: 2180107 - RNA, 19 nt, Homo sapiens
  misc_RNA (1)...(19): siRNA sense strand
uggaucagcugcaguugga

SEQ ID NO: 2180108 - RNA, 19 nt, Homo sapiens
  misc_RNA (1)...(19): siRNA sense strand
cagaauaugcauugggaaa

SEQ ID NO: 2180109 - RNA, 19 nt, Homo sapiens
  misc_RNA (1)...(19): siRNA sense strand
uugggaggcugucaguaua

SEQ ID NO: 2180110 - RNA, 19 nt, Homo sapiens
  misc_RNA (1)...(19): siRNA sense strand
guaaauagagggauaacac

SEQ ID NO: 2180111 - RNA, 19 nt, Homo sapiens
  misc_RNA (1)...(19): siRNA sense strand
cauaugcccuuggaugaau

SEQ ID NO: 2180112 - RNA, 19 nt, Homo sapiens
  misc_RNA (1)...(19): siRNA sense strand
gaggauaagccacaucagu

SEQ ID NO: 2180113 - RNA, 19 nt, Homo sapiens
  misc_RNA (1)...(19): siRNA sense strand
ucacguuuagcucaauuua

SEQ ID NO: 2180114 - RNA, 19 nt, Homo sapiens
  misc_RNA (1)...(19): siRNA sense strand
cuacaaagagguuuucaua

SEQ ID NO: 2180115 - RNA, 19 nt, Homo sapiens
  misc_RNA (1)...(19): siRNA sense strand
ugauauguaugaaggacuu

SEQ ID NO: 2180116 - RNA, 19 nt, Homo sapiens
  misc_RNA (1)...(19): siRNA sense strand
uaacauacacaagcuugaa

SEQ ID NO: 2180117 - RNA, 19 nt, Homo sapiens
  misc_RNA (1)...(19): siRNA sense strand
ucgcaagggugaguauuga

SEQ ID NO: 2180118 - RNA, 19 nt, Homo sapiens
  misc_RNA (1)...(19): siRNA sense strand
gcacauucuugcaguaagc

SEQ ID NO: 2180119 - RNA, 19 nt, Homo sapiens
  misc_RNA (1)...(19): siRNA sense strand
ggacuuccauucuuuucaa

SEQ ID NO: 2180120 - RNA, 19 nt, Homo sapiens
  misc_RNA (1)...(19): siRNA sense strand
gaaauaggcaagauaaaga

SEQ ID NO: 2180121 - RNA, 19 nt, Homo sapiens
  misc_RNA (1)...(19): siRNA sense strand
gcagauaaucgcaaacuuu

SEQ ID NO: 2180122 - RNA, 19 nt, Homo sapiens
  misc_RNA (1)...(19): siRNA sense strand
guaaacagcgauaucagua

SEQ ID NO: 2180123 - RNA, 19 nt, Homo sapiens
  misc_RNA (1)...(19): siRNA sense strand
gaggaaauaggcaagauaa

SEQ ID NO: 2180124 - RNA, 19 nt, Homo sapiens
  misc_RNA (1)...(19): siRNA sense strand
aaacacggauccgcagaua

SEQ ID NO: 2180125 - RNA, 19 nt, Homo sapiens
  misc_RNA (1)...(19): siRNA sense strand
guaagaagagcaaaguaaa

SEQ ID NO: 2180126 - RNA, 19 nt, Homo sapiens
  misc_RNA (1)...(19): siRNA sense strand
gccaaguggugaggaaaua

SEQ ID NO: 2180127 - RNA, 19 nt, Homo sapiens
  misc_RNA (1)...(19): siRNA sense strand
ggaaauaggcaagauaaag

SEQ ID NO: 2180128 - RNA, 19 nt, Homo sapiens
  misc_RNA (1)...(19): siRNA sense strand
gauaaagacaauacugaga

SEQ ID NO: 2180129 - RNA, 19 nt, Homo sapiens
  misc_RNA (1)...(19): siRNA sense strand
caguccagcuugucuguaa

SEQ ID NO: 2180130 - RNA, 19 nt, Homo sapiens
  misc_RNA (1)...(19): siRNA sense strand
gacaauacugagaaagaua

SEQ ID NO: 2180131 - RNA, 19 nt, Homo sapiens
  misc_RNA (1)...(19): siRNA sense strand
uaacucaagcuaccaauag

SEQ ID NO: 2180132 - RNA, 19 nt, Homo sapiens
  misc_RNA (1)...(19): siRNA sense strand
aaacagcgauaucaguaag

SEQ ID NO: 2180133 - RNA, 19 nt, Homo sapiens
  misc_RNA (1)...(19): siRNA sense strand
gauggugaacucauuagaa

SEQ ID NO: 2180134 - RNA, 19 nt, Homo sapiens
  misc_RNA (1)...(19): siRNA sense strand
ccacacaggucugagcaau

SEQ ID NO: 2180135 - RNA, 19 nt, Homo sapiens
  misc_RNA (1)...(19): siRNA sense strand
gauaaagaacggccacaca

SEQ ID NO: 2180136 - RNA, 19 nt, Homo sapiens
  misc_RNA (1)...(19): siRNA sense strand
uaaacagcgauaucaguaa

SEQ ID NO: 2180137 - RNA, 19 nt, Homo sapiens
  misc_RNA (1)...(19): siRNA sense strand
acacaggucugagcaaugg

SEQ ID NO: 2180138 - RNA, 19 nt, Homo sapiens
  misc_RNA (1)...(19): siRNA sense strand
agacaauacugagaaagau

SEQ ID NO: 2180139 - RNA, 19 nt, Homo sapiens
  misc_RNA (1)...(19): siRNA sense strand
gugauaaagacaauacuga

SEQ ID NO: 2180140 - RNA, 19 nt, Homo sapiens
  misc_RNA (1)...(19): siRNA sense strand
gagcaauggaaauggaauu

SEQ ID NO: 2180141 - RNA, 19 nt, Homo sapiens
  misc_RNA (1)...(19): siRNA sense strand
acacggauccgcagauaau

SEQ ID NO: 2180142 - RNA, 19 nt, Homo sapiens
  misc_RNA (1)...(19): siRNA sense strand
cagauaaucgcaaacuuuc

SEQ ID NO: 2180143 - RNA, 19 nt, Homo sapiens
  misc_RNA (1)...(19): siRNA sense strand
ugccucagcuucagacuuc

SEQ ID NO: 2180144 - RNA, 19 nt, Homo sapiens
  misc_RNA (1)...(19): siRNA sense strand
aguaagaagagcaaaguaa

SEQ ID NO: 2180145 - RNA, 19 nt, Homo sapiens
  misc_RNA (1)...(19): siRNA sense strand
aauagccacuucacacaug

SEQ ID NO: 2180146 - RNA, 19 nt, Homo sapiens
  misc_RNA (1)...(19): siRNA sense strand
ggucugagcaauggaaaug

SEQ ID NO: 2180147 - RNA, 19 nt, Homo sapiens
  misc_RNA (1)...(19): siRNA sense strand
ugaggaaauaggcaagaua

SEQ ID NO: 2180148 - RNA, 19 nt, Homo sapiens
  misc_RNA (1)...(19): siRNA sense strand
cuucacacauggagagaug

SEQ ID NO: 2180149 - RNA, 19 nt, Homo sapiens
  misc_RNA (1)...(19): siRNA sense strand
ugaagacaaacaggaauuu

SEQ ID NO: 2180150 - RNA, 19 nt, Homo sapiens
  misc_RNA (1)...(19): siRNA sense strand
acagcgauaucaguaagaa

SEQ ID NO: 2180151 - RNA, 19 nt, Homo sapiens
  misc_RNA (1)...(19): siRNA sense strand
aagaagagcaaaguaaaug

SEQ ID NO: 2180152 - RNA, 19 nt, Homo sapiens
  misc_RNA (1)...(19): siRNA sense strand
gcaauggaaauggaauuca

SEQ ID NO: 2180153 - RNA, 19 nt, Homo sapiens
  misc_RNA (1)...(19): siRNA sense strand
gauaaucgcaaacuuucag

SEQ ID NO: 2180154 - RNA, 19 nt, Homo sapiens
  misc_RNA (1)...(19): siRNA sense strand
gcaagaccaguccauuugg

SEQ ID NO: 2180155 - RNA, 19 nt, Homo sapiens
  misc_RNA (1)...(19): siRNA sense strand
gcaaaguaaaugcugucuu

SEQ ID NO: 2180156 - RNA, 19 nt, Homo sapiens
  misc_RNA (1)...(19): siRNA sense strand
gagaaagauauaacucaag

SEQ ID NO: 2180157 - RNA, 19 nt, Homo sapiens
  misc_RNA (1)...(19): siRNA sense strand
ccaauagccacuucacaca

SEQ ID NO: 2180158 - RNA, 19 nt, Homo sapiens
  misc_RNA (1)...(19): siRNA sense strand
caauggaaauggaauucac

SEQ ID NO: 2180159 - RNA, 19 nt, Homo sapiens
  misc_RNA (1)...(19): siRNA sense strand
gggaaaaugugauaaagac

SEQ ID NO: 2180160 - RNA, 19 nt, Homo sapiens
  misc_RNA (1)...(19): siRNA sense strand
aagacaauacugagaaaga

SEQ ID NO: 2180161 - RNA, 19 nt, Homo sapiens
  misc_RNA (1)...(19): siRNA sense strand
ggugccaaguggugaggaa

SEQ ID NO: 2180162 - RNA, 19 nt, Homo sapiens
  misc_RNA (1)...(19): siRNA sense strand
gaugcaagaccaguccauu

SEQ ID NO: 2180163 - RNA, 19 nt, Homo sapiens
  misc_RNA (1)...(19): siRNA sense strand
ugcaagaccaguccauuug

SEQ ID NO: 2180164 - RNA, 19 nt, Homo sapiens
  misc_RNA (1)...(19): siRNA sense strand
ucugagcaauggaaaugga

SEQ ID NO: 2180165 - RNA, 19 nt, Homo sapiens
  misc_RNA (1)...(19): siRNA sense strand
gugaggaaauaggcaagau

SEQ ID NO: 2180166 - RNA, 19 nt, Homo sapiens
  misc_RNA (1)...(19): siRNA sense strand
gaagacaaacaggaauuuu

SEQ ID NO: 2180167 - RNA, 19 nt, Homo sapiens
  misc_RNA (1)...(19): siRNA sense strand
ggauggugaacucauuaga

SEQ ID NO: 2180168 - RNA, 19 nt, Homo sapiens
  misc_RNA (1)...(19): siRNA sense strand
cagcaccuguuucucaaaa

SEQ ID NO: 2180169 - RNA, 19 nt, Homo sapiens
  misc_RNA (1)...(19): siRNA sense strand
caaacacggauccgcagau

SEQ ID NO: 2180170 - RNA, 19 nt, Homo sapiens
  misc_RNA (1)...(19): siRNA sense strand
caguaagaagagcaaagua

SEQ ID NO: 2180171 - RNA, 19 nt, Homo sapiens
  misc_RNA (1)...(19): siRNA sense strand
uuucagcaccuguuucuca

SEQ ID NO: 2180172 - RNA, 19 nt, Homo sapiens
  misc_RNA (1)...(19): siRNA sense strand
caauagccacuucacacau

SEQ ID NO: 2180173 - RNA, 19 nt, Homo sapiens
  misc_RNA (1)...(19): siRNA sense strand
auaacucaagcuaccaaua

SEQ ID NO: 2180174 - RNA, 19 nt, Homo sapiens
  misc_RNA (1)...(19): siRNA sense strand
caaacuuucagcaccuguu

SEQ ID NO: 2180175 - RNA, 19 nt, Homo sapiens
  misc_RNA (1)...(19): siRNA sense strand
ucggauggugaacucauua

SEQ ID NO: 2180176 - RNA, 19 nt, Homo sapiens
  misc_RNA (1)...(19): siRNA sense strand
ucaguaagaagagcaaagu

SEQ ID NO: 2180177 - RNA, 19 nt, Homo sapiens
  misc_RNA (1)...(19): siRNA sense strand
augcaagaccaguccauuu

SEQ ID NO: 2180178 - RNA, 19 nt, Homo sapiens
  misc_RNA (1)...(19): siRNA sense strand
gaaauaggcaagauaaaga

SEQ ID NO: 2180179 - RNA, 19 nt, Homo sapiens
  misc_RNA (1)...(19): siRNA sense strand
gcagauaaucgcaaacuuu

SEQ ID NO: 2180180 - RNA, 19 nt, Homo sapiens
  misc_RNA (1)...(19): siRNA sense strand
guaaacagcgauaucagua

SEQ ID NO: 2180181 - RNA, 19 nt, Homo sapiens
  misc_RNA (1)...(19): siRNA sense strand
gaggaaauaggcaagauaa

SEQ ID NO: 2180182 - RNA, 19 nt, Homo sapiens
  misc_RNA (1)...(19): siRNA sense strand
aaacacggauccgcagaua

SEQ ID NO: 2180183 - RNA, 19 nt, Homo sapiens
  misc_RNA (1)...(19): siRNA sense strand
guaagaagagcaaaguaaa

SEQ ID NO: 2180184 - RNA, 19 nt, Homo sapiens
  misc_RNA (1)...(19): siRNA sense strand
gccaaguggugaggaaaua

SEQ ID NO: 2180185 - RNA, 19 nt, Homo sapiens
  misc_RNA (1)...(19): siRNA sense strand
ggaaauaggcaagauaaag

SEQ ID NO: 2180186 - RNA, 19 nt, Homo sapiens
  misc_RNA (1)...(19): siRNA sense strand
gauaaagacaauacugaga

SEQ ID NO: 2180187 - RNA, 19 nt, Homo sapiens
  misc_RNA (1)...(19): siRNA sense strand
caguccagcuugucuguaa

SEQ ID NO: 2180188 - RNA, 19 nt, Homo sapiens
  misc_RNA (1)...(19): siRNA sense strand
gacaauacugagaaagaua

SEQ ID NO: 2180189 - RNA, 19 nt, Homo sapiens
  misc_RNA (1)...(19): siRNA sense strand
uaacucaagcuaccaauag

SEQ ID NO: 2180190 - RNA, 19 nt, Homo sapiens
  misc_RNA (1)...(19): siRNA sense strand
aaacagcgauaucaguaag

SEQ ID NO: 2180191 - RNA, 19 nt, Homo sapiens
  misc_RNA (1)...(19): siRNA sense strand
gauggugaacucauuagaa

SEQ ID NO: 2180192 - RNA, 19 nt, Homo sapiens
  misc_RNA (1)...(19): siRNA sense strand
ccacacaggucugagcaau

SEQ ID NO: 2180193 - RNA, 19 nt, Homo sapiens
  misc_RNA (1)...(19): siRNA sense strand
gauaaagaacggccacaca

SEQ ID NO: 2180194 - RNA, 19 nt, Homo sapiens
  misc_RNA (1)...(19): siRNA sense strand
uaaacagcgauaucaguaa

SEQ ID NO: 2180195 - RNA, 19 nt, Homo sapiens
  misc_RNA (1)...(19): siRNA sense strand
acacaggucugagcaaugg

SEQ ID NO: 2180196 - RNA, 19 nt, Homo sapiens
  misc_RNA (1)...(19): siRNA sense strand
agacaauacugagaaagau

SEQ ID NO: 2180197 - RNA, 19 nt, Homo sapiens
  misc_RNA (1)...(19): siRNA sense strand
gugauaaagacaauacuga

SEQ ID NO: 2180198 - RNA, 19 nt, Homo sapiens
  misc_RNA (1)...(19): siRNA sense strand
gagcaauggaaauggaauu

SEQ ID NO: 2180199 - RNA, 19 nt, Homo sapiens
  misc_RNA (1)...(19): siRNA sense strand
acacggauccgcagauaau

SEQ ID NO: 2180200 - RNA, 19 nt, Homo sapiens
  misc_RNA (1)...(19): siRNA sense strand
cagauaaucgcaaacuuuc

SEQ ID NO: 2180201 - RNA, 19 nt, Homo sapiens
  misc_RNA (1)...(19): siRNA sense strand
ugccucagcuucagacuuc

SEQ ID NO: 2180202 - RNA, 19 nt, Homo sapiens
  misc_RNA (1)...(19): siRNA sense strand
aguaagaagagcaaaguaa

SEQ ID NO: 2180203 - RNA, 19 nt, Homo sapiens
  misc_RNA (1)...(19): siRNA sense strand
aauagccacuucacacaug

SEQ ID NO: 2180204 - RNA, 19 nt, Homo sapiens
  misc_RNA (1)...(19): siRNA sense strand
ggucugagcaauggaaaug

SEQ ID NO: 2180205 - RNA, 19 nt, Homo sapiens
  misc_RNA (1)...(19): siRNA sense strand
ugaggaaauaggcaagaua

SEQ ID NO: 2180206 - RNA, 19 nt, Homo sapiens
  misc_RNA (1)...(19): siRNA sense strand
cuucacacauggagagaug

SEQ ID NO: 2180207 - RNA, 19 nt, Homo sapiens
  misc_RNA (1)...(19): siRNA sense strand
ugaagacaaacaggaauuu

SEQ ID NO: 2180208 - RNA, 19 nt, Homo sapiens
  misc_RNA (1)...(19): siRNA sense strand
acagcgauaucaguaagaa

SEQ ID NO: 2180209 - RNA, 19 nt, Homo sapiens
  misc_RNA (1)...(19): siRNA sense strand
aagaagagcaaaguaaaug

SEQ ID NO: 2180210 - RNA, 19 nt, Homo sapiens
  misc_RNA (1)...(19): siRNA sense strand
gcaauggaaauggaauuca

SEQ ID NO: 2180211 - RNA, 19 nt, Homo sapiens
  misc_RNA (1)...(19): siRNA sense strand
gauaaucgcaaacuuucag

SEQ ID NO: 2180212 - RNA, 19 nt, Homo sapiens
  misc_RNA (1)...(19): siRNA sense strand
gcaagaccaguccauuugg

SEQ ID NO: 2180213 - RNA, 19 nt, Homo sapiens
  misc_RNA (1)...(19): siRNA sense strand
gcaaaguaaaugcugucuu

SEQ ID NO: 2180214 - RNA, 19 nt, Homo sapiens
  misc_RNA (1)...(19): siRNA sense strand
gagaaagauauaacucaag

SEQ ID NO: 2180215 - RNA, 19 nt, Homo sapiens
  misc_RNA (1)...(19): siRNA sense strand
ccaauagccacuucacaca

SEQ ID NO: 2180216 - RNA, 19 nt, Homo sapiens
  misc_RNA (1)...(19): siRNA sense strand
caauggaaauggaauucac

SEQ ID NO: 2180217 - RNA, 19 nt, Homo sapiens
  misc_RNA (1)...(19): siRNA sense strand
gggaaaaugugauaaagac

SEQ ID NO: 2180218 - RNA, 19 nt, Homo sapiens
  misc_RNA (1)...(19): siRNA sense strand
aagacaauacugagaaaga

SEQ ID NO: 2180219 - RNA, 19 nt, Homo sapiens
  misc_RNA (1)...(19): siRNA sense strand
ggugccaaguggugaggaa

SEQ ID NO: 2180220 - RNA, 19 nt, Homo sapiens
  misc_RNA (1)...(19): siRNA sense strand
gaugcaagaccaguccauu

SEQ ID NO: 2180221 - RNA, 19 nt, Homo sapiens
  misc_RNA (1)...(19): siRNA sense strand
ugcaagaccaguccauuug

SEQ ID NO: 2180222 - RNA, 19 nt, Homo sapiens
  misc_RNA (1)...(19): siRNA sense strand
ucugagcaauggaaaugga

SEQ ID NO: 2180223 - RNA, 19 nt, Homo sapiens
  misc_RNA (1)...(19): siRNA sense strand
gugaggaaauaggcaagau

SEQ ID NO: 2180224 - RNA, 19 nt, Homo sapiens
  misc_RNA (1)...(19): siRNA sense strand
gaagacaaacaggaauuuu

SEQ ID NO: 2180225 - RNA, 19 nt, Homo sapiens
  misc_RNA (1)...(19): siRNA sense strand
ggauggugaacucauuaga

SEQ ID NO: 2180226 - RNA, 19 nt, Homo sapiens
  misc_RNA (1)...(19): siRNA sense strand
cagcaccuguuucucaaaa

SEQ ID NO: 2180227 - RNA, 19 nt, Homo sapiens
  misc_RNA (1)...(19): siRNA sense strand
caaacacggauccgcagau

SEQ ID NO: 2180228 - RNA, 19 nt, Homo sapiens
  misc_RNA (1)...(19): siRNA sense strand
caguaagaagagcaaagua

SEQ ID NO: 2180229 - RNA, 19 nt, Homo sapiens
  misc_RNA (1)...(19): siRNA sense strand
uuucagcaccuguuucuca

SEQ ID NO: 2180230 - RNA, 19 nt, Homo sapiens
  misc_RNA (1)...(19): siRNA sense strand
caauagccacuucacacau

SEQ ID NO: 2180231 - RNA, 19 nt, Homo sapiens
  misc_RNA (1)...(19): siRNA sense strand
auaacucaagcuaccaaua

SEQ ID NO: 2180232 - RNA, 19 nt, Homo sapiens
  misc_RNA (1)...(19): siRNA sense strand
caaacuuucagcaccuguu

SEQ ID NO: 2180233 - RNA, 19 nt, Homo sapiens
  misc_RNA (1)...(19): siRNA sense strand
ucggauggugaacucauua

SEQ ID NO: 2180234 - RNA, 19 nt, Homo sapiens
  misc_RNA (1)...(19): siRNA sense strand
ucaguaagaagagcaaagu

SEQ ID NO: 2180235 - RNA, 19 nt, Homo sapiens
  misc_RNA (1)...(19): siRNA sense strand
augcaagaccaguccauuu

SEQ ID NO: 2180236 - RNA, 19 nt, Homo sapiens
  misc_RNA (1)...(19): siRNA sense strand
aggcacagcuccaucguua

SEQ ID NO: 2180237 - RNA, 19 nt, Homo sapiens
  misc_RNA (1)...(19): siRNA sense strand
agaccaagcucaugacuca

SEQ ID NO: 2180238 - RNA, 19 nt, Homo sapiens
  misc_RNA (1)...(19): siRNA sense strand
gcacagcuccaucguuaca

SEQ ID NO: 2180239 - RNA, 19 nt, Homo sapiens
  misc_RNA (1)...(19): siRNA sense strand
gacucacaauggccuauuu

SEQ ID NO: 2180240 - RNA, 19 nt, Homo sapiens
  misc_RNA (1)...(19): siRNA sense strand
cuacagaccaagcucauga

SEQ ID NO: 2180241 - RNA, 19 nt, Homo sapiens
  misc_RNA (1)...(19): siRNA sense strand
gcccagcucaugcuucuuu

SEQ ID NO: 2180242 - RNA, 19 nt, Homo sapiens
  misc_RNA (1)...(19): siRNA sense strand
aagccaagcucccaaccuu

SEQ ID NO: 2180243 - RNA, 19 nt, Homo sapiens
  misc_RNA (1)...(19): siRNA sense strand
gcccagcuccugcaucuug

SEQ ID NO: 2180244 - RNA, 19 nt, Homo sapiens
  misc_RNA (1)...(19): siRNA sense strand
uuacaauggccucuuuaga

SEQ ID NO: 2180245 - RNA, 19 nt, Homo sapiens
  misc_RNA (1)...(19): siRNA sense strand
gccaagcucccaaccuuuc

SEQ ID NO: 2180246 - RNA, 19 nt, Homo sapiens
  misc_RNA (1)...(19): siRNA sense strand
ccucacagcagauucuuca

SEQ ID NO: 2180247 - RNA, 19 nt, Homo sapiens
  misc_RNA (1)...(19): siRNA sense strand
ucguuacaauggccucuuu

SEQ ID NO: 2180248 - RNA, 19 nt, Homo sapiens
  misc_RNA (1)...(19): siRNA sense strand
ccaagcucaugacucacaa

SEQ ID NO: 2180249 - RNA, 19 nt, Homo sapiens
  misc_RNA (1)...(19): siRNA sense strand
acucacaauggccuauuua

SEQ ID NO: 2180250 - RNA, 19 nt, Homo sapiens
  misc_RNA (1)...(19): siRNA sense strand
acagcuccaucguuacaau

SEQ ID NO: 2180251 - RNA, 19 nt, Homo sapiens
  misc_RNA (1)...(19): siRNA sense strand
uacaauggccucuuuagac

SEQ ID NO: 2180252 - RNA, 19 nt, Homo sapiens
  misc_RNA (1)...(19): siRNA sense strand
aggcacagcuccaucguua

SEQ ID NO: 2180253 - RNA, 19 nt, Homo sapiens
  misc_RNA (1)...(19): siRNA sense strand
agaccaagcucaugacuca

SEQ ID NO: 2180254 - RNA, 19 nt, Homo sapiens
  misc_RNA (1)...(19): siRNA sense strand
gcacagcuccaucguuaca

SEQ ID NO: 2180255 - RNA, 19 nt, Homo sapiens
  misc_RNA (1)...(19): siRNA sense strand
gacucacaauggccuauuu

SEQ ID NO: 2180256 - RNA, 19 nt, Homo sapiens
  misc_RNA (1)...(19): siRNA sense strand
cuacagaccaagcucauga

SEQ ID NO: 2180257 - RNA, 19 nt, Homo sapiens
  misc_RNA (1)...(19): siRNA sense strand
gcccagcucaugcuucuuu

SEQ ID NO: 2180258 - RNA, 19 nt, Homo sapiens
  misc_RNA (1)...(19): siRNA sense strand
aagccaagcucccaaccuu

SEQ ID NO: 2180259 - RNA, 19 nt, Homo sapiens
  misc_RNA (1)...(19): siRNA sense strand
gcccagcuccugcaucuug

SEQ ID NO: 2180260 - RNA, 19 nt, Homo sapiens
  misc_RNA (1)...(19): siRNA sense strand
uuacaauggccucuuuaga

SEQ ID NO: 2180261 - RNA, 19 nt, Homo sapiens
  misc_RNA (1)...(19): siRNA sense strand
gccaagcucccaaccuuuc

SEQ ID NO: 2180262 - RNA, 19 nt, Homo sapiens
  misc_RNA (1)...(19): siRNA sense strand
ccucacagcagauucuuca

SEQ ID NO: 2180263 - RNA, 19 nt, Homo sapiens
  misc_RNA (1)...(19): siRNA sense strand
ucguuacaauggccucuuu

SEQ ID NO: 2180264 - RNA, 19 nt, Homo sapiens
  misc_RNA (1)...(19): siRNA sense strand
ccaagcucaugacucacaa

SEQ ID NO: 2180265 - RNA, 19 nt, Homo sapiens
  misc_RNA (1)...(19): siRNA sense strand
acucacaauggccuauuua

SEQ ID NO: 2180266 - RNA, 19 nt, Homo sapiens
  misc_RNA (1)...(19): siRNA sense strand
acagcuccaucguuacaau

SEQ ID NO: 2180267 - RNA, 19 nt, Homo sapiens
  misc_RNA (1)...(19): siRNA sense strand
uacaauggccucuuuagac

SEQ ID NO: 2180268 - RNA, 19 nt, Homo sapiens
  misc_RNA (1)...(19): siRNA sense strand
ucucacagcucucaggaaa

SEQ ID NO: 2180269 - RNA, 19 nt, Homo sapiens
  misc_RNA (1)...(19): siRNA sense strand
ccaacucggugguguuuga

SEQ ID NO: 2180270 - RNA, 19 nt, Homo sapiens
  misc_RNA (1)...(19): siRNA sense strand
ggaaugagcaccuucuaca

SEQ ID NO: 2180271 - RNA, 19 nt, Homo sapiens
  misc_RNA (1)...(19): siRNA sense strand
cagaaaggccuguccauca

SEQ ID NO: 2180272 - RNA, 19 nt, Homo sapiens
  misc_RNA (1)...(19): siRNA sense strand
cagcagacaggaacaauga

SEQ ID NO: 2180273 - RNA, 19 nt, Homo sapiens
  misc_RNA (1)...(19): siRNA sense strand
cagcgcauccugaggguua

SEQ ID NO: 2180274 - RNA, 19 nt, Homo sapiens
  misc_RNA (1)...(19): siRNA sense strand
ucauauagccaguuaccua

SEQ ID NO: 2180275 - RNA, 19 nt, Homo sapiens
  misc_RNA (1)...(19): siRNA sense strand
gaacaagaggacuggaaug

SEQ ID NO: 2180276 - RNA, 19 nt, Homo sapiens
  misc_RNA (1)...(19): siRNA sense strand
ccaguggcaucuccaauca

SEQ ID NO: 2180277 - RNA, 19 nt, Homo sapiens
  misc_RNA (1)...(19): siRNA sense strand
gaacuggagagaugucugu

SEQ ID NO: 2180278 - RNA, 19 nt, Homo sapiens
  misc_RNA (1)...(19): siRNA sense strand
gcagaccaguggcaguuuc

SEQ ID NO: 2180279 - RNA, 19 nt, Homo sapiens
  misc_RNA (1)...(19): siRNA sense strand
caaagacccgagaaucaaa

SEQ ID NO: 2180280 - RNA, 19 nt, Homo sapiens
  misc_RNA (1)...(19): siRNA sense strand
gaaaauggccuucuuuguc

SEQ ID NO: 2180281 - RNA, 19 nt, Homo sapiens
  misc_RNA (1)...(19): siRNA sense strand
ggacuggaaugagcaccuu

SEQ ID NO: 2180282 - RNA, 19 nt, Homo sapiens
  misc_RNA (1)...(19): siRNA sense strand
uggcaucuccaaucaauuu

SEQ ID NO: 2180283 - RNA, 19 nt, Homo sapiens
  misc_RNA (1)...(19): siRNA sense strand
ccaaagacccgagaaucaa

SEQ ID NO: 2180284 - RNA, 19 nt, Homo sapiens
  misc_RNA (1)...(19): siRNA sense strand
gaaugagcaccuucuacaa

SEQ ID NO: 2180285 - RNA, 19 nt, Homo sapiens
  misc_RNA (1)...(19): siRNA sense strand
acccagagauuguguuuca

SEQ ID NO: 2180286 - RNA, 19 nt, Homo sapiens
  misc_RNA (1)...(19): siRNA sense strand
ggaacaagaggacuggaau

SEQ ID NO: 2180287 - RNA, 19 nt, Homo sapiens
  misc_RNA (1)...(19): siRNA sense strand
ggccuucuuugucaacuga

SEQ ID NO: 2180288 - RNA, 19 nt, Homo sapiens
  misc_RNA (1)...(19): siRNA sense strand
gagcagaccaguggcaguu

SEQ ID NO: 2180289 - RNA, 19 nt, Homo sapiens
  misc_RNA (1)...(19): siRNA sense strand
cuggagagaugucugugaa

SEQ ID NO: 2180290 - RNA, 19 nt, Homo sapiens
  misc_RNA (1)...(19): siRNA sense strand
acagaaacaacaccugaaa

SEQ ID NO: 2180291 - RNA, 19 nt, Homo sapiens
  misc_RNA (1)...(19): siRNA sense strand
aaguucauauagccaguua

SEQ ID NO: 2180292 - RNA, 19 nt, Homo sapiens
  misc_RNA (1)...(19): siRNA sense strand
aaaauggccuucuuuguca

SEQ ID NO: 2180293 - RNA, 19 nt, Homo sapiens
  misc_RNA (1)...(19): siRNA sense strand
uaucugaagcuccacgaaa

SEQ ID NO: 2180294 - RNA, 19 nt, Homo sapiens
  misc_RNA (1)...(19): siRNA sense strand
ccuaggagagcacuucuug

SEQ ID NO: 2180295 - RNA, 19 nt, Homo sapiens
  misc_RNA (1)...(19): siRNA sense strand
gcagacaggaacaaugaca

SEQ ID NO: 2180296 - RNA, 19 nt, Homo sapiens
  misc_RNA (1)...(19): siRNA sense strand
ucacagcucucaggaaagc

SEQ ID NO: 2180297 - RNA, 19 nt, Homo sapiens
  misc_RNA (1)...(19): siRNA sense strand
cccaccaacuccacagaaa

SEQ ID NO: 2180298 - RNA, 19 nt, Homo sapiens
  misc_RNA (1)...(19): siRNA sense strand
uauagccaguuaccuagga

SEQ ID NO: 2180299 - RNA, 19 nt, Homo sapiens
  misc_RNA (1)...(19): siRNA sense strand
cccgggaacuggagagaug

SEQ ID NO: 2180300 - RNA, 19 nt, Homo sapiens
  misc_RNA (1)...(19): siRNA sense strand
uuugucaacugauucauuc

SEQ ID NO: 2180301 - RNA, 19 nt, Homo sapiens
  misc_RNA (1)...(19): siRNA sense strand
caacuccacagaaacaaca

SEQ ID NO: 2180302 - RNA, 19 nt, Homo sapiens
  misc_RNA (1)...(19): siRNA sense strand
guacguggagcuacgaauc

SEQ ID NO: 2180303 - RNA, 19 nt, Homo sapiens
  misc_RNA (1)...(19): siRNA sense strand
gggaacaagaggacuggaa

SEQ ID NO: 2180304 - RNA, 19 nt, Homo sapiens
  misc_RNA (1)...(19): siRNA sense strand
gagcaccuucuacaaguuc

SEQ ID NO: 2180305 - RNA, 19 nt, Homo sapiens
  misc_RNA (1)...(19): siRNA sense strand
ugagcaccuucuacaaguu

SEQ ID NO: 2180306 - RNA, 19 nt, Homo sapiens
  misc_RNA (1)...(19): siRNA sense strand
ucaauuuguucuccaacuc

SEQ ID NO: 2180307 - RNA, 19 nt, Homo sapiens
  misc_RNA (1)...(19): siRNA sense strand
agaaaggccuguccaucac

SEQ ID NO: 2180308 - RNA, 19 nt, Homo sapiens
  misc_RNA (1)...(19): siRNA sense strand
aguggcaucuccaaucaau

SEQ ID NO: 2180309 - RNA, 19 nt, Homo sapiens
  misc_RNA (1)...(19): siRNA sense strand
guuaggacagugaccgaaa

SEQ ID NO: 2180310 - RNA, 19 nt, Homo sapiens
  misc_RNA (1)...(19): siRNA sense strand
ggaaaauggccuucuuugu

SEQ ID NO: 2180311 - RNA, 19 nt, Homo sapiens
  misc_RNA (1)...(19): siRNA sense strand
ccaagaugcccaccaacuc

SEQ ID NO: 2180312 - RNA, 19 nt, Homo sapiens
  misc_RNA (1)...(19): siRNA sense strand
aacaagaggacuggaauga

SEQ ID NO: 2180313 - RNA, 19 nt, Homo sapiens
  misc_RNA (1)...(19): siRNA sense strand
cuccugauggccaauguua

SEQ ID NO: 2180314 - RNA, 19 nt, Homo sapiens
  misc_RNA (1)...(19): siRNA sense strand
caccaacuccacagaaaca

SEQ ID NO: 2180315 - RNA, 19 nt, Homo sapiens
  misc_RNA (1)...(19): siRNA sense strand
ggacagugaccgaaaagau

SEQ ID NO: 2180316 - RNA, 19 nt, Homo sapiens
  misc_RNA (1)...(19): siRNA sense strand
gaacuugggguggaaaaug

SEQ ID NO: 2180317 - RNA, 19 nt, Homo sapiens
  misc_RNA (1)...(19): siRNA sense strand
gaccaguggcaguuucuca

SEQ ID NO: 2180318 - RNA, 19 nt, Homo sapiens
  misc_RNA (1)...(19): siRNA sense strand
gaaguacguggagcuacga

SEQ ID NO: 2180319 - RNA, 19 nt, Homo sapiens
  misc_RNA (1)...(19): siRNA sense strand
ugcagcagcuacaagauac

SEQ ID NO: 2180320 - RNA, 19 nt, Homo sapiens
  misc_RNA (1)...(19): siRNA sense strand
ccaccaaagacccgagaau

SEQ ID NO: 2180321 - RNA, 19 nt, Homo sapiens
  misc_RNA (1)...(19): siRNA sense strand
caccaaagacccgagaauc

SEQ ID NO: 2180322 - RNA, 19 nt, Homo sapiens
  misc_RNA (1)...(19): siRNA sense strand
gaaacaacaccugaaaaca

SEQ ID NO: 2180323 - RNA, 19 nt, Homo sapiens
  misc_RNA (1)...(19): siRNA sense strand
accaaagacccgagaauca

SEQ ID NO: 2180324 - RNA, 19 nt, Homo sapiens
  misc_RNA (1)...(19): siRNA sense strand
ucucacagcucucaggaaa

SEQ ID NO: 2180325 - RNA, 19 nt, Homo sapiens
  misc_RNA (1)...(19): siRNA sense strand
ccaacucggugguguuuga

SEQ ID NO: 2180326 - RNA, 19 nt, Homo sapiens
  misc_RNA (1)...(19): siRNA sense strand
ggaaugagcaccuucuaca

SEQ ID NO: 2180327 - RNA, 19 nt, Homo sapiens
  misc_RNA (1)...(19): siRNA sense strand
cagaaaggccuguccauca

SEQ ID NO: 2180328 - RNA, 19 nt, Homo sapiens
  misc_RNA (1)...(19): siRNA sense strand
cagcagacaggaacaauga

SEQ ID NO: 2180329 - RNA, 19 nt, Homo sapiens
  misc_RNA (1)...(19): siRNA sense strand
cagcgcauccugaggguua

SEQ ID NO: 2180330 - RNA, 19 nt, Homo sapiens
  misc_RNA (1)...(19): siRNA sense strand
ucauauagccaguuaccua

SEQ ID NO: 2180331 - RNA, 19 nt, Homo sapiens
  misc_RNA (1)...(19): siRNA sense strand
gaacaagaggacuggaaug

SEQ ID NO: 2180332 - RNA, 19 nt, Homo sapiens
  misc_RNA (1)...(19): siRNA sense strand
ccaguggcaucuccaauca

SEQ ID NO: 2180333 - RNA, 19 nt, Homo sapiens
  misc_RNA (1)...(19): siRNA sense strand
gaacuggagagaugucugu

SEQ ID NO: 2180334 - RNA, 19 nt, Homo sapiens
  misc_RNA (1)...(19): siRNA sense strand
gcagaccaguggcaguuuc

SEQ ID NO: 2180335 - RNA, 19 nt, Homo sapiens
  misc_RNA (1)...(19): siRNA sense strand
caaagacccgagaaucaaa

SEQ ID NO: 2180336 - RNA, 19 nt, Homo sapiens
  misc_RNA (1)...(19): siRNA sense strand
gaaaauggccuucuuuguc

SEQ ID NO: 2180337 - RNA, 19 nt, Homo sapiens
  misc_RNA (1)...(19): siRNA sense strand
ggacuggaaugagcaccuu

SEQ ID NO: 2180338 - RNA, 19 nt, Homo sapiens
  misc_RNA (1)...(19): siRNA sense strand
uggcaucuccaaucaauuu

SEQ ID NO: 2180339 - RNA, 19 nt, Homo sapiens
  misc_RNA (1)...(19): siRNA sense strand
ccaaagacccgagaaucaa

SEQ ID NO: 2180340 - RNA, 19 nt, Homo sapiens
  misc_RNA (1)...(19): siRNA sense strand
gaaugagcaccuucuacaa

SEQ ID NO: 2180341 - RNA, 19 nt, Homo sapiens
  misc_RNA (1)...(19): siRNA sense strand
acccagagauuguguuuca

SEQ ID NO: 2180342 - RNA, 19 nt, Homo sapiens
  misc_RNA (1)...(19): siRNA sense strand
ggaacaagaggacuggaau

SEQ ID NO: 2180343 - RNA, 19 nt, Homo sapiens
  misc_RNA (1)...(19): siRNA sense strand
ggccuucuuugucaacuga

SEQ ID NO: 2180344 - RNA, 19 nt, Homo sapiens
  misc_RNA (1)...(19): siRNA sense strand
gagcagaccaguggcaguu

SEQ ID NO: 2180345 - RNA, 19 nt, Homo sapiens
  misc_RNA (1)...(19): siRNA sense strand
cuggagagaugucugugaa

SEQ ID NO: 2180346 - RNA, 19 nt, Homo sapiens
  misc_RNA (1)...(19): siRNA sense strand
acagaaacaacaccugaaa

SEQ ID NO: 2180347 - RNA, 19 nt, Homo sapiens
  misc_RNA (1)...(19): siRNA sense strand
aaguucauauagccaguua

SEQ ID NO: 2180348 - RNA, 19 nt, Homo sapiens
  misc_RNA (1)...(19): siRNA sense strand
aaaauggccuucuuuguca

SEQ ID NO: 2180349 - RNA, 19 nt, Homo sapiens
  misc_RNA (1)...(19): siRNA sense strand
uaucugaagcuccacgaaa

SEQ ID NO: 2180350 - RNA, 19 nt, Homo sapiens
  misc_RNA (1)...(19): siRNA sense strand
ccuaggagagcacuucuug

SEQ ID NO: 2180351 - RNA, 19 nt, Homo sapiens
  misc_RNA (1)...(19): siRNA sense strand
gcagacaggaacaaugaca

SEQ ID NO: 2180352 - RNA, 19 nt, Homo sapiens
  misc_RNA (1)...(19): siRNA sense strand
ucacagcucucaggaaagc

SEQ ID NO: 2180353 - RNA, 19 nt, Homo sapiens
  misc_RNA (1)...(19): siRNA sense strand
cccaccaacuccacagaaa

SEQ ID NO: 2180354 - RNA, 19 nt, Homo sapiens
  misc_RNA (1)...(19): siRNA sense strand
uauagccaguuaccuagga

SEQ ID NO: 2180355 - RNA, 19 nt, Homo sapiens
  misc_RNA (1)...(19): siRNA sense strand
cccgggaacuggagagaug

SEQ ID NO: 2180356 - RNA, 19 nt, Homo sapiens
  misc_RNA (1)...(19): siRNA sense strand
uuugucaacugauucauuc

SEQ ID NO: 2180357 - RNA, 19 nt, Homo sapiens
  misc_RNA (1)...(19): siRNA sense strand
caacuccacagaaacaaca

SEQ ID NO: 2180358 - RNA, 19 nt, Homo sapiens
  misc_RNA (1)...(19): siRNA sense strand
guacguggagcuacgaauc

SEQ ID NO: 2180359 - RNA, 19 nt, Homo sapiens
  misc_RNA (1)...(19): siRNA sense strand
gggaacaagaggacuggaa

SEQ ID NO: 2180360 - RNA, 19 nt, Homo sapiens
  misc_RNA (1)...(19): siRNA sense strand
gagcaccuucuacaaguuc

SEQ ID NO: 2180361 - RNA, 19 nt, Homo sapiens
  misc_RNA (1)...(19): siRNA sense strand
ugagcaccuucuacaaguu

SEQ ID NO: 2180362 - RNA, 19 nt, Homo sapiens
  misc_RNA (1)...(19): siRNA sense strand
ucaauuuguucuccaacuc

SEQ ID NO: 2180363 - RNA, 19 nt, Homo sapiens
  misc_RNA (1)...(19): siRNA sense strand
agaaaggccuguccaucac

SEQ ID NO: 2180364 - RNA, 19 nt, Homo sapiens
  misc_RNA (1)...(19): siRNA sense strand
aguggcaucuccaaucaau

SEQ ID NO: 2180365 - RNA, 19 nt, Homo sapiens
  misc_RNA (1)...(19): siRNA sense strand
guuaggacagugaccgaaa

SEQ ID NO: 2180366 - RNA, 19 nt, Homo sapiens
  misc_RNA (1)...(19): siRNA sense strand
ggaaaauggccuucuuugu

SEQ ID NO: 2180367 - RNA, 19 nt, Homo sapiens
  misc_RNA (1)...(19): siRNA sense strand
ccaagaugcccaccaacuc

SEQ ID NO: 2180368 - RNA, 19 nt, Homo sapiens
  misc_RNA (1)...(19): siRNA sense strand
aacaagaggacuggaauga

SEQ ID NO: 2180369 - RNA, 19 nt, Homo sapiens
  misc_RNA (1)...(19): siRNA sense strand
cuccugauggccaauguua

SEQ ID NO: 2180370 - RNA, 19 nt, Homo sapiens
  misc_RNA (1)...(19): siRNA sense strand
caccaacuccacagaaaca

SEQ ID NO: 2180371 - RNA, 19 nt, Homo sapiens
  misc_RNA (1)...(19): siRNA sense strand
ggacagugaccgaaaagau

SEQ ID NO: 2180372 - RNA, 19 nt, Homo sapiens
  misc_RNA (1)...(19): siRNA sense strand
gaacuugggguggaaaaug

SEQ ID NO: 2180373 - RNA, 19 nt, Homo sapiens
  misc_RNA (1)...(19): siRNA sense strand
gaccaguggcaguuucuca

SEQ ID NO: 2180374 - RNA, 19 nt, Homo sapiens
  misc_RNA (1)...(19): siRNA sense strand
gaaguacguggagcuacga

SEQ ID NO: 2180375 - RNA, 19 nt, Homo sapiens
  misc_RNA (1)...(19): siRNA sense strand
ugcagcagcuacaagauac

SEQ ID NO: 2180376 - RNA, 19 nt, Homo sapiens
  misc_RNA (1)...(19): siRNA sense strand
ccaccaaagacccgagaau

SEQ ID NO: 2180377 - RNA, 19 nt, Homo sapiens
  misc_RNA (1)...(19): siRNA sense strand
caccaaagacccgagaauc

SEQ ID NO: 2180378 - RNA, 19 nt, Homo sapiens
  misc_RNA (1)...(19): siRNA sense strand
gaaacaacaccugaaaaca

SEQ ID NO: 2180379 - RNA, 19 nt, Homo sapiens
  misc_RNA (1)...(19): siRNA sense strand
accaaagacccgagaauca

SEQ ID NO: 2180380 - RNA, 19 nt, Homo sapiens
  misc_RNA (1)...(19): siRNA sense strand
gaaaccagcugucuccaua

SEQ ID NO: 2180381 - RNA, 19 nt, Homo sapiens
  misc_RNA (1)...(19): siRNA sense strand
gaaggcaacuccucacuaa

SEQ ID NO: 2180382 - RNA, 19 nt, Homo sapiens
  misc_RNA (1)...(19): siRNA sense strand
ucaauaaacugaccaaaug

SEQ ID NO: 2180383 - RNA, 19 nt, Homo sapiens
  misc_RNA (1)...(19): siRNA sense strand
ggacacagauacauugguu

SEQ ID NO: 2180384 - RNA, 19 nt, Homo sapiens
  misc_RNA (1)...(19): siRNA sense strand
gcagaagaauguaccuuga

SEQ ID NO: 2180385 - RNA, 19 nt, Homo sapiens
  misc_RNA (1)...(19): siRNA sense strand
uaaaucggcaccaaucuua

SEQ ID NO: 2180386 - RNA, 19 nt, Homo sapiens
  misc_RNA (1)...(19): siRNA sense strand
uaaagcagcacaaguauau

SEQ ID NO: 2180387 - RNA, 19 nt, Homo sapiens
  misc_RNA (1)...(19): siRNA sense strand
gcaucucaguccuggauua

SEQ ID NO: 2180388 - RNA, 19 nt, Homo sapiens
  misc_RNA (1)...(19): siRNA sense strand
aagaggagcuggagaagug

SEQ ID NO: 2180389 - RNA, 19 nt, Homo sapiens
  misc_RNA (1)...(19): siRNA sense strand
aagacagacucuaucaaua

SEQ ID NO: 2180390 - RNA, 19 nt, Homo sapiens
  misc_RNA (1)...(19): siRNA sense strand
gaagugcccuaugucuuug

SEQ ID NO: 2180391 - RNA, 19 nt, Homo sapiens
  misc_RNA (1)...(19): siRNA sense strand
ggaagguggucauguuuac

SEQ ID NO: 2180392 - RNA, 19 nt, Homo sapiens
  misc_RNA (1)...(19): siRNA sense strand
gggccaacauugaggcuuu

SEQ ID NO: 2180393 - RNA, 19 nt, Homo sapiens
  misc_RNA (1)...(19): siRNA sense strand
uauaugaucgcucugcuua

SEQ ID NO: 2180394 - RNA, 19 nt, Homo sapiens
  misc_RNA (1)...(19): siRNA sense strand
ggaagaagaugcccaaaag

SEQ ID NO: 2180395 - RNA, 19 nt, Homo sapiens
  misc_RNA (1)...(19): siRNA sense strand
ugacugggcuuacgggaau

SEQ ID NO: 2180396 - RNA, 19 nt, Homo sapiens
  misc_RNA (1)...(19): siRNA sense strand
ugccggagcuuacuacuga

SEQ ID NO: 2180397 - RNA, 19 nt, Homo sapiens
  misc_RNA (1)...(19): siRNA sense strand
ggacauugagcacuucuug

SEQ ID NO: 2180398 - RNA, 19 nt, Homo sapiens
  misc_RNA (1)...(19): siRNA sense strand
ggaggugcuuugaagaaga

SEQ ID NO: 2180399 - RNA, 19 nt, Homo sapiens
  misc_RNA (1)...(19): siRNA sense strand
uaaaguuacagaccaagua

SEQ ID NO: 2180400 - RNA, 19 nt, Homo sapiens
  misc_RNA (1)...(19): siRNA sense strand
gguuggaucugccugaaga

SEQ ID NO: 2180401 - RNA, 19 nt, Homo sapiens
  misc_RNA (1)...(19): siRNA sense strand
gagaugagcaggaacaagu

SEQ ID NO: 2180402 - RNA, 19 nt, Homo sapiens
  misc_RNA (1)...(19): siRNA sense strand
gcaggacacagauacauug

SEQ ID NO: 2180403 - RNA, 19 nt, Homo sapiens
  misc_RNA (1)...(19): siRNA sense strand
gaccuuccgcacugaauua

SEQ ID NO: 2180404 - RNA, 19 nt, Homo sapiens
  misc_RNA (1)...(19): siRNA sense strand
cagccgaguugucagaauu

SEQ ID NO: 2180405 - RNA, 19 nt, Homo sapiens
  misc_RNA (1)...(19): siRNA sense strand
uaagacagacucuaucaau

SEQ ID NO: 2180406 - RNA, 19 nt, Homo sapiens
  misc_RNA (1)...(19): siRNA sense strand
gagcacuucuuggagauga

SEQ ID NO: 2180407 - RNA, 19 nt, Homo sapiens
  misc_RNA (1)...(19): siRNA sense strand
uuacucuucuccaugguua

SEQ ID NO: 2180408 - RNA, 19 nt, Homo sapiens
  misc_RNA (1)...(19): siRNA sense strand
agacagacucuaucaauau

SEQ ID NO: 2180409 - RNA, 19 nt, Homo sapiens
  misc_RNA (1)...(19): siRNA sense strand
ccagagacgccaugugaaa

SEQ ID NO: 2180410 - RNA, 19 nt, Homo sapiens
  misc_RNA (1)...(19): siRNA sense strand
agaagugcccuaugucuuu

SEQ ID NO: 2180411 - RNA, 19 nt, Homo sapiens
  misc_RNA (1)...(19): siRNA sense strand
aagaagauuucaagacuca

SEQ ID NO: 2180412 - RNA, 19 nt, Homo sapiens
  misc_RNA (1)...(19): siRNA sense strand
gccugaagauuuccacuau

SEQ ID NO: 2180413 - RNA, 19 nt, Homo sapiens
  misc_RNA (1)...(19): siRNA sense strand
gaacaggcacaaggagauu

SEQ ID NO: 2180414 - RNA, 19 nt, Homo sapiens
  misc_RNA (1)...(19): siRNA sense strand
gcaugaagcugggcaucga

SEQ ID NO: 2180415 - RNA, 19 nt, Homo sapiens
  misc_RNA (1)...(19): siRNA sense strand
gacagacucuaucaauauc

SEQ ID NO: 2180416 - RNA, 19 nt, Homo sapiens
  misc_RNA (1)...(19): siRNA sense strand
gaagaggugguaccagaga

SEQ ID NO: 2180417 - RNA, 19 nt, Homo sapiens
  misc_RNA (1)...(19): siRNA sense strand
gccuggacaucuacaauga

SEQ ID NO: 2180418 - RNA, 19 nt, Homo sapiens
  misc_RNA (1)...(19): siRNA sense strand
ggagauuauuguaaagagu

SEQ ID NO: 2180419 - RNA, 19 nt, Homo sapiens
  misc_RNA (1)...(19): siRNA sense strand
agaaggacauugagcacuu

SEQ ID NO: 2180420 - RNA, 19 nt, Homo sapiens
  misc_RNA (1)...(19): siRNA sense strand
ggagucugcuggugaugga

SEQ ID NO: 2180421 - RNA, 19 nt, Homo sapiens
  misc_RNA (1)...(19): siRNA sense strand
ucaauauccuggcagaugu

SEQ ID NO: 2180422 - RNA, 19 nt, Homo sapiens
  misc_RNA (1)...(19): siRNA sense strand
cugaagauuuccacuauuc

SEQ ID NO: 2180423 - RNA, 19 nt, Homo sapiens
  misc_RNA (1)...(19): siRNA sense strand
aaccauaucuaccaguuug

SEQ ID NO: 2180424 - RNA, 19 nt, Homo sapiens
  misc_RNA (1)...(19): siRNA sense strand
ccaaaaggccuauauaaug

SEQ ID NO: 2180425 - RNA, 19 nt, Homo sapiens
  misc_RNA (1)...(19): siRNA sense strand
aaacauucccggaccauga

SEQ ID NO: 2180426 - RNA, 19 nt, Homo sapiens
  misc_RNA (1)...(19): siRNA sense strand
caaaaggccuauauaaugg

SEQ ID NO: 2180427 - RNA, 19 nt, Homo sapiens
  misc_RNA (1)...(19): siRNA sense strand
uccuaaagcuacuaaaguu

SEQ ID NO: 2180428 - RNA, 19 nt, Homo sapiens
  misc_RNA (1)...(19): siRNA sense strand
aaccuggaauucaccaaua

SEQ ID NO: 2180429 - RNA, 19 nt, Homo sapiens
  misc_RNA (1)...(19): siRNA sense strand
guacagccuuccgcaguau

SEQ ID NO: 2180430 - RNA, 19 nt, Homo sapiens
  misc_RNA (1)...(19): siRNA sense strand
cuaccaguuugaauaugua

SEQ ID NO: 2180431 - RNA, 19 nt, Homo sapiens
  misc_RNA (1)...(19): siRNA sense strand
ucaaccauaucuaccaguu

SEQ ID NO: 2180432 - RNA, 19 nt, Homo sapiens
  misc_RNA (1)...(19): siRNA sense strand
gaguaucucuacccugcuu

SEQ ID NO: 2180433 - RNA, 19 nt, Homo sapiens
  misc_RNA (1)...(19): siRNA sense strand
aggaauggcuggaguugga

SEQ ID NO: 2180434 - RNA, 19 nt, Homo sapiens
  misc_RNA (1)...(19): siRNA sense strand
ucaaacacuucaaacucaa

SEQ ID NO: 2180435 - RNA, 19 nt, Homo sapiens
  misc_RNA (1)...(19): siRNA sense strand
gagaagugcccuaugucuu

SEQ ID NO: 2180436 - RNA, 19 nt, Homo sapiens
  misc_RNA (1)...(19): siRNA sense strand
ucugcagacucucaaagua

SEQ ID NO: 2180437 - RNA, 19 nt, Homo sapiens
  misc_RNA (1)...(19): siRNA sense strand
uuaagcuucuccaugcaua

SEQ ID NO: 2180438 - RNA, 19 nt, Homo sapiens
  misc_RNA (1)...(19): siRNA sense strand
ggcuagagguggucaguag

SEQ ID NO: 2180439 - RNA, 19 nt, Homo sapiens
  misc_RNA (1)...(19): siRNA sense strand
ugucagccauuuaccagaa

SEQ ID NO: 2180440 - RNA, 19 nt, Homo sapiens
  misc_RNA (1)...(19): siRNA sense strand
gcugcaacuuuauguccua

SEQ ID NO: 2180441 - RNA, 19 nt, Homo sapiens
  misc_RNA (1)...(19): siRNA sense strand
gaggugcuuugaagaagau

SEQ ID NO: 2180442 - RNA, 19 nt, Homo sapiens
  misc_RNA (1)...(19): siRNA sense strand
gaaccuggaauucaccaau

SEQ ID NO: 2180443 - RNA, 19 nt, Homo sapiens
  misc_RNA (1)...(19): siRNA sense strand
acacugagaaccuggaauu

SEQ ID NO: 2180444 - RNA, 19 nt, Homo sapiens
  misc_RNA (1)...(19): siRNA sense strand
gcagaugugcagaucaaga

SEQ ID NO: 2180445 - RNA, 19 nt, Homo sapiens
  misc_RNA (1)...(19): siRNA sense strand
cagauacauugguuggauu

SEQ ID NO: 2180446 - RNA, 19 nt, Homo sapiens
  misc_RNA (1)...(19): siRNA sense strand
ggacaucuacaaugaaagg

SEQ ID NO: 2180447 - RNA, 19 nt, Homo sapiens
  misc_RNA (1)...(19): siRNA sense strand
gcuucuccaugcauaauga

SEQ ID NO: 2180448 - RNA, 19 nt, Homo sapiens
  misc_RNA (1)...(19): siRNA sense strand
gauuuccacuauucauaug

SEQ ID NO: 2180449 - RNA, 19 nt, Homo sapiens
  misc_RNA (1)...(19): siRNA sense strand
ccuaaagcuacuaaaguua

SEQ ID NO: 2180450 - RNA, 19 nt, Homo sapiens
  misc_RNA (1)...(19): siRNA sense strand
caaggagauuauuguaaag

SEQ ID NO: 2180451 - RNA, 19 nt, Homo sapiens
  misc_RNA (1)...(19): siRNA sense strand
gcuaagacagacucuauca

SEQ ID NO: 2180452 - RNA, 19 nt, Homo sapiens
  misc_RNA (1)...(19): siRNA sense strand
uaccagagacgccauguga

SEQ ID NO: 2180453 - RNA, 19 nt, Homo sapiens
  misc_RNA (1)...(19): siRNA sense strand
gcaaggaauggcuggaguu

SEQ ID NO: 2180454 - RNA, 19 nt, Homo sapiens
  misc_RNA (1)...(19): siRNA sense strand
ucgcagaugugcagaucaa

SEQ ID NO: 2180455 - RNA, 19 nt, Homo sapiens
  misc_RNA (1)...(19): siRNA sense strand
ucuggaagguggucauguu

SEQ ID NO: 2180456 - RNA, 19 nt, Homo sapiens
  misc_RNA (1)...(19): siRNA sense strand
ggagcuuacuacugaaagu

SEQ ID NO: 2180457 - RNA, 19 nt, Homo sapiens
  misc_RNA (1)...(19): siRNA sense strand
cucaaacacuucaaacuca

SEQ ID NO: 2180458 - RNA, 19 nt, Homo sapiens
  misc_RNA (1)...(19): siRNA sense strand
uaacaggaggugcuuugaa

SEQ ID NO: 2180459 - RNA, 19 nt, Homo sapiens
  misc_RNA (1)...(19): siRNA sense strand
cuggacaucuacaaugaaa

SEQ ID NO: 2180460 - RNA, 19 nt, Homo sapiens
  misc_RNA (1)...(19): siRNA sense strand
ucagacagaaggacauuga

SEQ ID NO: 2180461 - RNA, 19 nt, Homo sapiens
  misc_RNA (1)...(19): siRNA sense strand
gaagauuuccacuauucau

SEQ ID NO: 2180462 - RNA, 19 nt, Homo sapiens
  misc_RNA (1)...(19): siRNA sense strand
cgaguugucagaauuguau

SEQ ID NO: 2180463 - RNA, 19 nt, Homo sapiens
  misc_RNA (1)...(19): siRNA sense strand
aggccaugcugcaacuuua

SEQ ID NO: 2180464 - RNA, 19 nt, Homo sapiens
  misc_RNA (1)...(19): siRNA sense strand
uguacagccuuccgcagua

SEQ ID NO: 2180465 - RNA, 19 nt, Homo sapiens
  misc_RNA (1)...(19): siRNA sense strand
cuaaagcagcacaaguaua

SEQ ID NO: 2180466 - RNA, 19 nt, Homo sapiens
  misc_RNA (1)...(19): siRNA sense strand
ccucuaaggcuaagacaga

SEQ ID NO: 2180467 - RNA, 19 nt, Homo sapiens
  misc_RNA (1)...(19): siRNA sense strand
gagguuggaucugccugaa

SEQ ID NO: 2180468 - RNA, 19 nt, Homo sapiens
  misc_RNA (1)...(19): siRNA sense strand
ccaugaugcugguaguguu

SEQ ID NO: 2180469 - RNA, 19 nt, Homo sapiens
  misc_RNA (1)...(19): siRNA sense strand
uaaacugaccaaauggaaa

SEQ ID NO: 2180470 - RNA, 19 nt, Homo sapiens
  misc_RNA (1)...(19): siRNA sense strand
guacagaagcgggcagaau

SEQ ID NO: 2180471 - RNA, 19 nt, Homo sapiens
  misc_RNA (1)...(19): siRNA sense strand
uaacagccgucgcuaugac

SEQ ID NO: 2180472 - RNA, 19 nt, Homo sapiens
  misc_RNA (1)...(19): siRNA sense strand
cgaaggcaacuccucacua

SEQ ID NO: 2180473 - RNA, 19 nt, Homo sapiens
  misc_RNA (1)...(19): siRNA sense strand
uacagaagcgggcagaauu

SEQ ID NO: 2180474 - RNA, 19 nt, Homo sapiens
  misc_RNA (1)...(19): siRNA sense strand
cccuaaagcagcacaagua

SEQ ID NO: 2180475 - RNA, 19 nt, Homo sapiens
  misc_RNA (1)...(19): siRNA sense strand
uaugaucgcucugcuuaag

SEQ ID NO: 2180476 - RNA, 19 nt, Homo sapiens
  misc_RNA (1)...(19): siRNA sense strand
ggagaagugcccuaugucu

SEQ ID NO: 2180477 - RNA, 19 nt, Homo sapiens
  misc_RNA (1)...(19): siRNA sense strand
cuggagaagugcccuaugu

SEQ ID NO: 2180478 - RNA, 19 nt, Homo sapiens
  misc_RNA (1)...(19): siRNA sense strand
caugugaaauccucuacca

SEQ ID NO: 2180479 - RNA, 19 nt, Homo sapiens
  misc_RNA (1)...(19): siRNA sense strand
gcagccgaguugucagaau

SEQ ID NO: 2180480 - RNA, 19 nt, Homo sapiens
  misc_RNA (1)...(19): siRNA sense strand
gaaaccagcugucuccaua

SEQ ID NO: 2180481 - RNA, 19 nt, Homo sapiens
  misc_RNA (1)...(19): siRNA sense strand
gaaggcaacuccucacuaa

SEQ ID NO: 2180482 - RNA, 19 nt, Homo sapiens
  misc_RNA (1)...(19): siRNA sense strand
ucaauaaacugaccaaaug

SEQ ID NO: 2180483 - RNA, 19 nt, Homo sapiens
  misc_RNA (1)...(19): siRNA sense strand
ggacacagauacauugguu

SEQ ID NO: 2180484 - RNA, 19 nt, Homo sapiens
  misc_RNA (1)...(19): siRNA sense strand
gcagaagaauguaccuuga

SEQ ID NO: 2180485 - RNA, 19 nt, Homo sapiens
  misc_RNA (1)...(19): siRNA sense strand
uaaaucggcaccaaucuua

SEQ ID NO: 2180486 - RNA, 19 nt, Homo sapiens
  misc_RNA (1)...(19): siRNA sense strand
uaaagcagcacaaguauau

SEQ ID NO: 2180487 - RNA, 19 nt, Homo sapiens
  misc_RNA (1)...(19): siRNA sense strand
gcaucucaguccuggauua

SEQ ID NO: 2180488 - RNA, 19 nt, Homo sapiens
  misc_RNA (1)...(19): siRNA sense strand
aagaggagcuggagaagug

SEQ ID NO: 2180489 - RNA, 19 nt, Homo sapiens
  misc_RNA (1)...(19): siRNA sense strand
aagacagacucuaucaaua

SEQ ID NO: 2180490 - RNA, 19 nt, Homo sapiens
  misc_RNA (1)...(19): siRNA sense strand
gaagugcccuaugucuuug

SEQ ID NO: 2180491 - RNA, 19 nt, Homo sapiens
  misc_RNA (1)...(19): siRNA sense strand
ggaagguggucauguuuac

SEQ ID NO: 2180492 - RNA, 19 nt, Homo sapiens
  misc_RNA (1)...(19): siRNA sense strand
gggccaacauugaggcuuu

SEQ ID NO: 2180493 - RNA, 19 nt, Homo sapiens
  misc_RNA (1)...(19): siRNA sense strand
uauaugaucgcucugcuua

SEQ ID NO: 2180494 - RNA, 19 nt, Homo sapiens
  misc_RNA (1)...(19): siRNA sense strand
ggaagaagaugcccaaaag

SEQ ID NO: 2180495 - RNA, 19 nt, Homo sapiens
  misc_RNA (1)...(19): siRNA sense strand
ugacugggcuuacgggaau

SEQ ID NO: 2180496 - RNA, 19 nt, Homo sapiens
  misc_RNA (1)...(19): siRNA sense strand
ugccggagcuuacuacuga

SEQ ID NO: 2180497 - RNA, 19 nt, Homo sapiens
  misc_RNA (1)...(19): siRNA sense strand
ggacauugagcacuucuug

SEQ ID NO: 2180498 - RNA, 19 nt, Homo sapiens
  misc_RNA (1)...(19): siRNA sense strand
ggaggugcuuugaagaaga

SEQ ID NO: 2180499 - RNA, 19 nt, Homo sapiens
  misc_RNA (1)...(19): siRNA sense strand
uaaaguuacagaccaagua

SEQ ID NO: 2180500 - RNA, 19 nt, Homo sapiens
  misc_RNA (1)...(19): siRNA sense strand
gguuggaucugccugaaga

SEQ ID NO: 2180501 - RNA, 19 nt, Homo sapiens
  misc_RNA (1)...(19): siRNA sense strand
gagaugagcaggaacaagu

SEQ ID NO: 2180502 - RNA, 19 nt, Homo sapiens
  misc_RNA (1)...(19): siRNA sense strand
gcaggacacagauacauug

SEQ ID NO: 2180503 - RNA, 19 nt, Homo sapiens
  misc_RNA (1)...(19): siRNA sense strand
gaccuuccgcacugaauua

SEQ ID NO: 2180504 - RNA, 19 nt, Homo sapiens
  misc_RNA (1)...(19): siRNA sense strand
cagccgaguugucagaauu

SEQ ID NO: 2180505 - RNA, 19 nt, Homo sapiens
  misc_RNA (1)...(19): siRNA sense strand
uaagacagacucuaucaau

SEQ ID NO: 2180506 - RNA, 19 nt, Homo sapiens
  misc_RNA (1)...(19): siRNA sense strand
gagcacuucuuggagauga

SEQ ID NO: 2180507 - RNA, 19 nt, Homo sapiens
  misc_RNA (1)...(19): siRNA sense strand
uuacucuucuccaugguua

SEQ ID NO: 2180508 - RNA, 19 nt, Homo sapiens
  misc_RNA (1)...(19): siRNA sense strand
agacagacucuaucaauau

SEQ ID NO: 2180509 - RNA, 19 nt, Homo sapiens
  misc_RNA (1)...(19): siRNA sense strand
ccagagacgccaugugaaa

SEQ ID NO: 2180510 - RNA, 19 nt, Homo sapiens
  misc_RNA (1)...(19): siRNA sense strand
agaagugcccuaugucuuu

SEQ ID NO: 2180511 - RNA, 19 nt, Homo sapiens
  misc_RNA (1)...(19): siRNA sense strand
aagaagauuucaagacuca

SEQ ID NO: 2180512 - RNA, 19 nt, Homo sapiens
  misc_RNA (1)...(19): siRNA sense strand
gccugaagauuuccacuau

SEQ ID NO: 2180513 - RNA, 19 nt, Homo sapiens
  misc_RNA (1)...(19): siRNA sense strand
gaacaggcacaaggagauu

SEQ ID NO: 2180514 - RNA, 19 nt, Homo sapiens
  misc_RNA (1)...(19): siRNA sense strand
gcaugaagcugggcaucga

SEQ ID NO: 2180515 - RNA, 19 nt, Homo sapiens
  misc_RNA (1)...(19): siRNA sense strand
gacagacucuaucaauauc

SEQ ID NO: 2180516 - RNA, 19 nt, Homo sapiens
  misc_RNA (1)...(19): siRNA sense strand
gaagaggugguaccagaga

SEQ ID NO: 2180517 - RNA, 19 nt, Homo sapiens
  misc_RNA (1)...(19): siRNA sense strand
gccuggacaucuacaauga

SEQ ID NO: 2180518 - RNA, 19 nt, Homo sapiens
  misc_RNA (1)...(19): siRNA sense strand
ggagauuauuguaaagagu

SEQ ID NO: 2180519 - RNA, 19 nt, Homo sapiens
  misc_RNA (1)...(19): siRNA sense strand
agaaggacauugagcacuu

SEQ ID NO: 2180520 - RNA, 19 nt, Homo sapiens
  misc_RNA (1)...(19): siRNA sense strand
ggagucugcuggugaugga

SEQ ID NO: 2180521 - RNA, 19 nt, Homo sapiens
  misc_RNA (1)...(19): siRNA sense strand
ucaauauccuggcagaugu

SEQ ID NO: 2180522 - RNA, 19 nt, Homo sapiens
  misc_RNA (1)...(19): siRNA sense strand
cugaagauuuccacuauuc

SEQ ID NO: 2180523 - RNA, 19 nt, Homo sapiens
  misc_RNA (1)...(19): siRNA sense strand
aaccauaucuaccaguuug

SEQ ID NO: 2180524 - RNA, 19 nt, Homo sapiens
  misc_RNA (1)...(19): siRNA sense strand
ccaaaaggccuauauaaug

SEQ ID NO: 2180525 - RNA, 19 nt, Homo sapiens
  misc_RNA (1)...(19): siRNA sense strand
aaacauucccggaccauga

SEQ ID NO: 2180526 - RNA, 19 nt, Homo sapiens
  misc_RNA (1)...(19): siRNA sense strand
caaaaggccuauauaaugg

SEQ ID NO: 2180527 - RNA, 19 nt, Homo sapiens
  misc_RNA (1)...(19): siRNA sense strand
uccuaaagcuacuaaaguu

SEQ ID NO: 2180528 - RNA, 19 nt, Homo sapiens
  misc_RNA (1)...(19): siRNA sense strand
aaccuggaauucaccaaua

SEQ ID NO: 2180529 - RNA, 19 nt, Homo sapiens
  misc_RNA (1)...(19): siRNA sense strand
guacagccuuccgcaguau

SEQ ID NO: 2180530 - RNA, 19 nt, Homo sapiens
  misc_RNA (1)...(19): siRNA sense strand
cuaccaguuugaauaugua

SEQ ID NO: 2180531 - RNA, 19 nt, Homo sapiens
  misc_RNA (1)...(19): siRNA sense strand
ucaaccauaucuaccaguu

SEQ ID NO: 2180532 - RNA, 19 nt, Homo sapiens
  misc_RNA (1)...(19): siRNA sense strand
gaguaucucuacccugcuu

SEQ ID NO: 2180533 - RNA, 19 nt, Homo sapiens
  misc_RNA (1)...(19): siRNA sense strand
aggaauggcuggaguugga

SEQ ID NO: 2180534 - RNA, 19 nt, Homo sapiens
  misc_RNA (1)...(19): siRNA sense strand
ucaaacacuucaaacucaa

SEQ ID NO: 2180535 - RNA, 19 nt, Homo sapiens
  misc_RNA (1)...(19): siRNA sense strand
gagaagugcccuaugucuu

SEQ ID NO: 2180536 - RNA, 19 nt, Homo sapiens
  misc_RNA (1)...(19): siRNA sense strand
ucugcagacucucaaagua

SEQ ID NO: 2180537 - RNA, 19 nt, Homo sapiens
  misc_RNA (1)...(19): siRNA sense strand
uuaagcuucuccaugcaua

SEQ ID NO: 2180538 - RNA, 19 nt, Homo sapiens
  misc_RNA (1)...(19): siRNA sense strand
ggcuagagguggucaguag

SEQ ID NO: 2180539 - RNA, 19 nt, Homo sapiens
  misc_RNA (1)...(19): siRNA sense strand
ugucagccauuuaccagaa

SEQ ID NO: 2180540 - RNA, 19 nt, Homo sapiens
  misc_RNA (1)...(19): siRNA sense strand
gcugcaacuuuauguccua

SEQ ID NO: 2180541 - RNA, 19 nt, Homo sapiens
  misc_RNA (1)...(19): siRNA sense strand
gaggugcuuugaagaagau

SEQ ID NO: 2180542 - RNA, 19 nt, Homo sapiens
  misc_RNA (1)...(19): siRNA sense strand
gaaccuggaauucaccaau

SEQ ID NO: 2180543 - RNA, 19 nt, Homo sapiens
  misc_RNA (1)...(19): siRNA sense strand
acacugagaaccuggaauu

SEQ ID NO: 2180544 - RNA, 19 nt, Homo sapiens
  misc_RNA (1)...(19): siRNA sense strand
gcagaugugcagaucaaga

SEQ ID NO: 2180545 - RNA, 19 nt, Homo sapiens
  misc_RNA (1)...(19): siRNA sense strand
cagauacauugguuggauu

SEQ ID NO: 2180546 - RNA, 19 nt, Homo sapiens
  misc_RNA (1)...(19): siRNA sense strand
ggacaucuacaaugaaagg

SEQ ID NO: 2180547 - RNA, 19 nt, Homo sapiens
  misc_RNA (1)...(19): siRNA sense strand
gcuucuccaugcauaauga

SEQ ID NO: 2180548 - RNA, 19 nt, Homo sapiens
  misc_RNA (1)...(19): siRNA sense strand
gauuuccacuauucauaug

SEQ ID NO: 2180549 - RNA, 19 nt, Homo sapiens
  misc_RNA (1)...(19): siRNA sense strand
ccuaaagcuacuaaaguua

SEQ ID NO: 2180550 - RNA, 19 nt, Homo sapiens
  misc_RNA (1)...(19): siRNA sense strand
caaggagauuauuguaaag

SEQ ID NO: 2180551 - RNA, 19 nt, Homo sapiens
  misc_RNA (1)...(19): siRNA sense strand
gcuaagacagacucuauca

SEQ ID NO: 2180552 - RNA, 19 nt, Homo sapiens
  misc_RNA (1)...(19): siRNA sense strand
uaccagagacgccauguga

SEQ ID NO: 2180553 - RNA, 19 nt, Homo sapiens
  misc_RNA (1)...(19): siRNA sense strand
gcaaggaauggcuggaguu

SEQ ID NO: 2180554 - RNA, 19 nt, Homo sapiens
  misc_RNA (1)...(19): siRNA sense strand
ucgcagaugugcagaucaa

SEQ ID NO: 2180555 - RNA, 19 nt, Homo sapiens
  misc_RNA (1)...(19): siRNA sense strand
ucuggaagguggucauguu

SEQ ID NO: 2180556 - RNA, 19 nt, Homo sapiens
  misc_RNA (1)...(19): siRNA sense strand
ggagcuuacuacugaaagu

SEQ ID NO: 2180557 - RNA, 19 nt, Homo sapiens
  misc_RNA (1)...(19): siRNA sense strand
cucaaacacuucaaacuca

SEQ ID NO: 2180558 - RNA, 19 nt, Homo sapiens
  misc_RNA (1)...(19): siRNA sense strand
uaacaggaggugcuuugaa

SEQ ID NO: 2180559 - RNA, 19 nt, Homo sapiens
  misc_RNA (1)...(19): siRNA sense strand
cuggacaucuacaaugaaa

SEQ ID NO: 2180560 - RNA, 19 nt, Homo sapiens
  misc_RNA (1)...(19): siRNA sense strand
ucagacagaaggacauuga

SEQ ID NO: 2180561 - RNA, 19 nt, Homo sapiens
  misc_RNA (1)...(19): siRNA sense strand
gaagauuuccacuauucau

SEQ ID NO: 2180562 - RNA, 19 nt, Homo sapiens
  misc_RNA (1)...(19): siRNA sense strand
cgaguugucagaauuguau

SEQ ID NO: 2180563 - RNA, 19 nt, Homo sapiens
  misc_RNA (1)...(19): siRNA sense strand
aggccaugcugcaacuuua

SEQ ID NO: 2180564 - RNA, 19 nt, Homo sapiens
  misc_RNA (1)...(19): siRNA sense strand
uguacagccuuccgcagua

SEQ ID NO: 2180565 - RNA, 19 nt, Homo sapiens
  misc_RNA (1)...(19): siRNA sense strand
cuaaagcagcacaaguaua

SEQ ID NO: 2180566 - RNA, 19 nt, Homo sapiens
  misc_RNA (1)...(19): siRNA sense strand
ccucuaaggcuaagacaga

SEQ ID NO: 2180567 - RNA, 19 nt, Homo sapiens
  misc_RNA (1)...(19): siRNA sense strand
gagguuggaucugccugaa

SEQ ID NO: 2180568 - RNA, 19 nt, Homo sapiens
  misc_RNA (1)...(19): siRNA sense strand
ccaugaugcugguaguguu

SEQ ID NO: 2180569 - RNA, 19 nt, Homo sapiens
  misc_RNA (1)...(19): siRNA sense strand
uaaacugaccaaauggaaa

SEQ ID NO: 2180570 - RNA, 19 nt, Homo sapiens
  misc_RNA (1)...(19): siRNA sense strand
guacagaagcgggcagaau

SEQ ID NO: 2180571 - RNA, 19 nt, Homo sapiens
  misc_RNA (1)...(19): siRNA sense strand
uaacagccgucgcuaugac

SEQ ID NO: 2180572 - RNA, 19 nt, Homo sapiens
  misc_RNA (1)...(19): siRNA sense strand
cgaaggcaacuccucacua

SEQ ID NO: 2180573 - RNA, 19 nt, Homo sapiens
  misc_RNA (1)...(19): siRNA sense strand
uacagaagcgggcagaauu

SEQ ID NO: 2180574 - RNA, 19 nt, Homo sapiens
  misc_RNA (1)...(19): siRNA sense strand
cccuaaagcagcacaagua

SEQ ID NO: 2180575 - RNA, 19 nt, Homo sapiens
  misc_RNA (1)...(19): siRNA sense strand
uaugaucgcucugcuuaag

SEQ ID NO: 2180576 - RNA, 19 nt, Homo sapiens
  misc_RNA (1)...(19): siRNA sense strand
ggagaagugcccuaugucu

SEQ ID NO: 2180577 - RNA, 19 nt, Homo sapiens
  misc_RNA (1)...(19): siRNA sense strand
cuggagaagugcccuaugu

SEQ ID NO: 2180578 - RNA, 19 nt, Homo sapiens
  misc_RNA (1)...(19): siRNA sense strand
caugugaaauccucuacca

SEQ ID NO: 2180579 - RNA, 19 nt, Homo sapiens
  misc_RNA (1)...(19): siRNA sense strand
gcagccgaguugucagaau

SEQ ID NO: 2180580 - RNA, 19 nt, Homo sapiens
  misc_RNA (1)...(19): siRNA sense strand
ccaagaagauguuugcaua

SEQ ID NO: 2180581 - RNA, 19 nt, Homo sapiens
  misc_RNA (1)...(19): siRNA sense strand
gaaccagggugaacacuuu

SEQ ID NO: 2180582 - RNA, 19 nt, Homo sapiens
  misc_RNA (1)...(19): siRNA sense strand
ggauaaaguuuccagugua

SEQ ID NO: 2180583 - RNA, 19 nt, Homo sapiens
  misc_RNA (1)...(19): siRNA sense strand
ccaagaagcugcaucaagu

SEQ ID NO: 2180584 - RNA, 19 nt, Homo sapiens
  misc_RNA (1)...(19): siRNA sense strand
gauaagcuaugaugugguu

SEQ ID NO: 2180585 - RNA, 19 nt, Homo sapiens
  misc_RNA (1)...(19): siRNA sense strand
caaugaaacuccaaucaau

SEQ ID NO: 2180586 - RNA, 19 nt, Homo sapiens
  misc_RNA (1)...(19): siRNA sense strand
gauaaaguuuccaguguau

SEQ ID NO: 2180587 - RNA, 19 nt, Homo sapiens
  misc_RNA (1)...(19): siRNA sense strand
cuaaagacaugacuggaaa

SEQ ID NO: 2180588 - RNA, 19 nt, Homo sapiens
  misc_RNA (1)...(19): siRNA sense strand
guuaagcgcuggaucaaug

SEQ ID NO: 2180589 - RNA, 19 nt, Homo sapiens
  misc_RNA (1)...(19): siRNA sense strand
gaagauaagcuaugaugug

SEQ ID NO: 2180590 - RNA, 19 nt, Homo sapiens
  misc_RNA (1)...(19): siRNA sense strand
uaucuuagcuucuguugga

SEQ ID NO: 2180591 - RNA, 19 nt, Homo sapiens
  misc_RNA (1)...(19): siRNA sense strand
gaucaccgauggaacaaug

SEQ ID NO: 2180592 - RNA, 19 nt, Homo sapiens
  misc_RNA (1)...(19): siRNA sense strand
ugaagaggcugucaacaau

SEQ ID NO: 2180593 - RNA, 19 nt, Homo sapiens
  misc_RNA (1)...(19): siRNA sense strand
ggagaagagugcuguuuua

SEQ ID NO: 2180594 - RNA, 19 nt, Homo sapiens
  misc_RNA (1)...(19): siRNA sense strand
gaagauguuugcauauucu

SEQ ID NO: 2180595 - RNA, 19 nt, Homo sapiens
  misc_RNA (1)...(19): siRNA sense strand
agaaaguacugaagccuaa

SEQ ID NO: 2180596 - RNA, 19 nt, Homo sapiens
  misc_RNA (1)...(19): siRNA sense strand
gaagaggcugucaacaaua

SEQ ID NO: 2180597 - RNA, 19 nt, Homo sapiens
  misc_RNA (1)...(19): siRNA sense strand
gguaguggcuccaauccuu

SEQ ID NO: 2180598 - RNA, 19 nt, Homo sapiens
  misc_RNA (1)...(19): siRNA sense strand
acaggaggcucguauauuc

SEQ ID NO: 2180599 - RNA, 19 nt, Homo sapiens
  misc_RNA (1)...(19): siRNA sense strand
ugagagguccgauaaagua

SEQ ID NO: 2180600 - RNA, 19 nt, Homo sapiens
  misc_RNA (1)...(19): siRNA sense strand
gcuggaagaucucgaagug

SEQ ID NO: 2180601 - RNA, 19 nt, Homo sapiens
  misc_RNA (1)...(19): siRNA sense strand
ggaguccuguaucaccuua

SEQ ID NO: 2180602 - RNA, 19 nt, Homo sapiens
  misc_RNA (1)...(19): siRNA sense strand
guucagcacugguaucuuc

SEQ ID NO: 2180603 - RNA, 19 nt, Homo sapiens
  misc_RNA (1)...(19): siRNA sense strand
uaaaguaccugagaacaag

SEQ ID NO: 2180604 - RNA, 19 nt, Homo sapiens
  misc_RNA (1)...(19): siRNA sense strand
gaacaacggaagcuacaga

SEQ ID NO: 2180605 - RNA, 19 nt, Homo sapiens
  misc_RNA (1)...(19): siRNA sense strand
ccaagauguugaauaaguu

SEQ ID NO: 2180606 - RNA, 19 nt, Homo sapiens
  misc_RNA (1)...(19): siRNA sense strand
aggagaaugugcuaccuua

SEQ ID NO: 2180607 - RNA, 19 nt, Homo sapiens
  misc_RNA (1)...(19): siRNA sense strand
ucaagucacaguuugcuua

SEQ ID NO: 2180608 - RNA, 19 nt, Homo sapiens
  misc_RNA (1)...(19): siRNA sense strand
guacugaagccuaacuuug

SEQ ID NO: 2180609 - RNA, 19 nt, Homo sapiens
  misc_RNA (1)...(19): siRNA sense strand
ggugaacacuuuggaacaa

SEQ ID NO: 2180610 - RNA, 19 nt, Homo sapiens
  misc_RNA (1)...(19): siRNA sense strand
ggucucaagucacaguuug

SEQ ID NO: 2180611 - RNA, 19 nt, Homo sapiens
  misc_RNA (1)...(19): siRNA sense strand
ugcaagccauugaaagaua

SEQ ID NO: 2180612 - RNA, 19 nt, Homo sapiens
  misc_RNA (1)...(19): siRNA sense strand
gauguuaucuuagcuucug

SEQ ID NO: 2180613 - RNA, 19 nt, Homo sapiens
  misc_RNA (1)...(19): siRNA sense strand
gacugugucugaccauauu

SEQ ID NO: 2180614 - RNA, 19 nt, Homo sapiens
  misc_RNA (1)...(19): siRNA sense strand
gggaagaggugggagauac

SEQ ID NO: 2180615 - RNA, 19 nt, Homo sapiens
  misc_RNA (1)...(19): siRNA sense strand
cagagguggcuaugauuua

SEQ ID NO: 2180616 - RNA, 19 nt, Homo sapiens
  misc_RNA (1)...(19): siRNA sense strand
ugaugaagauaagcuauga

SEQ ID NO: 2180617 - RNA, 19 nt, Homo sapiens
  misc_RNA (1)...(19): siRNA sense strand
uaaaucuggucucaaguca

SEQ ID NO: 2180618 - RNA, 19 nt, Homo sapiens
  misc_RNA (1)...(19): siRNA sense strand
uagaaagaaugaucgacuu

SEQ ID NO: 2180619 - RNA, 19 nt, Homo sapiens
  misc_RNA (1)...(19): siRNA sense strand
gaucaaugaagcccaagaa

SEQ ID NO: 2180620 - RNA, 19 nt, Homo sapiens
  misc_RNA (1)...(19): siRNA sense strand
aagaggcugucaacaauau

SEQ ID NO: 2180621 - RNA, 19 nt, Homo sapiens
  misc_RNA (1)...(19): siRNA sense strand
ggaaaccuuugcccucagu

SEQ ID NO: 2180622 - RNA, 19 nt, Homo sapiens
  misc_RNA (1)...(19): siRNA sense strand
agaagauguuugcauauuc

SEQ ID NO: 2180623 - RNA, 19 nt, Homo sapiens
  misc_RNA (1)...(19): siRNA sense strand
ugucagaaguaaagagaga

SEQ ID NO: 2180624 - RNA, 19 nt, Homo sapiens
  misc_RNA (1)...(19): siRNA sense strand
gaggauggguaugaugaug

SEQ ID NO: 2180625 - RNA, 19 nt, Homo sapiens
  misc_RNA (1)...(19): siRNA sense strand
agacaugacuggaaaagaa

SEQ ID NO: 2180626 - RNA, 19 nt, Homo sapiens
  misc_RNA (1)...(19): siRNA sense strand
gcaagccauugaaagauac

SEQ ID NO: 2180627 - RNA, 19 nt, Homo sapiens
  misc_RNA (1)...(19): siRNA sense strand
uguaucaccuuagaaagaa

SEQ ID NO: 2180628 - RNA, 19 nt, Homo sapiens
  misc_RNA (1)...(19): siRNA sense strand
caugugagagguccgauaa

SEQ ID NO: 2180629 - RNA, 19 nt, Homo sapiens
  misc_RNA (1)...(19): siRNA sense strand
gguaugaugaugaguaugu

SEQ ID NO: 2180630 - RNA, 19 nt, Homo sapiens
  misc_RNA (1)...(19): siRNA sense strand
uccaagauguugaauaagu

SEQ ID NO: 2180631 - RNA, 19 nt, Homo sapiens
  misc_RNA (1)...(19): siRNA sense strand
gggagauaccuuugagaaa

SEQ ID NO: 2180632 - RNA, 19 nt, Homo sapiens
  misc_RNA (1)...(19): siRNA sense strand
uaucuucccugcacaugau

SEQ ID NO: 2180633 - RNA, 19 nt, Homo sapiens
  misc_RNA (1)...(19): siRNA sense strand
aaagagagaacaccuguag

SEQ ID NO: 2180634 - RNA, 19 nt, Homo sapiens
  misc_RNA (1)...(19): siRNA sense strand
ucaaugaaacuccaaucaa

SEQ ID NO: 2180635 - RNA, 19 nt, Homo sapiens
  misc_RNA (1)...(19): siRNA sense strand
ccgauaaaguaccugagaa

SEQ ID NO: 2180636 - RNA, 19 nt, Homo sapiens
  misc_RNA (1)...(19): siRNA sense strand
uccuuuagcugcaccauga

SEQ ID NO: 2180637 - RNA, 19 nt, Homo sapiens
  misc_RNA (1)...(19): siRNA sense strand
gaaacuccaaucaauccaa

SEQ ID NO: 2180638 - RNA, 19 nt, Homo sapiens
  misc_RNA (1)...(19): siRNA sense strand
ccgaauugccagucgcuua

SEQ ID NO: 2180639 - RNA, 19 nt, Homo sapiens
  misc_RNA (1)...(19): siRNA sense strand
caagaagauguuugcauau

SEQ ID NO: 2180640 - RNA, 19 nt, Homo sapiens
  misc_RNA (1)...(19): siRNA sense strand
cugaggaugugauaauugu

SEQ ID NO: 2180641 - RNA, 19 nt, Homo sapiens
  misc_RNA (1)...(19): siRNA sense strand
agagguggcuaugauuuau

SEQ ID NO: 2180642 - RNA, 19 nt, Homo sapiens
  misc_RNA (1)...(19): siRNA sense strand
aaucuggucucaagucaca

SEQ ID NO: 2180643 - RNA, 19 nt, Homo sapiens
  misc_RNA (1)...(19): siRNA sense strand
gaagcaggccauuguggau

SEQ ID NO: 2180644 - RNA, 19 nt, Homo sapiens
  misc_RNA (1)...(19): siRNA sense strand
uaccuuaccaucaaagaaa

SEQ ID NO: 2180645 - RNA, 19 nt, Homo sapiens
  misc_RNA (1)...(19): siRNA sense strand
gagagaacaccuguagaug

SEQ ID NO: 2180646 - RNA, 19 nt, Homo sapiens
  misc_RNA (1)...(19): siRNA sense strand
ucagagguggcuaugauuu

SEQ ID NO: 2180647 - RNA, 19 nt, Homo sapiens
  misc_RNA (1)...(19): siRNA sense strand
caaugaagcccaagaagcu

SEQ ID NO: 2180648 - RNA, 19 nt, Homo sapiens
  misc_RNA (1)...(19): siRNA sense strand
gaggaugugauaauuguca

SEQ ID NO: 2180649 - RNA, 19 nt, Homo sapiens
  misc_RNA (1)...(19): siRNA sense strand
uaagcuaugaugugguuaa

SEQ ID NO: 2180650 - RNA, 19 nt, Homo sapiens
  misc_RNA (1)...(19): siRNA sense strand
gagaacaagaauucccauu

SEQ ID NO: 2180651 - RNA, 19 nt, Homo sapiens
  misc_RNA (1)...(19): siRNA sense strand
cagaugaggauggguauga

SEQ ID NO: 2180652 - RNA, 19 nt, Homo sapiens
  misc_RNA (1)...(19): siRNA sense strand
gcaggccauuguggauaaa

SEQ ID NO: 2180653 - RNA, 19 nt, Homo sapiens
  misc_RNA (1)...(19): siRNA sense strand
cuuagcuucuguuggauaa

SEQ ID NO: 2180654 - RNA, 19 nt, Homo sapiens
  misc_RNA (1)...(19): siRNA sense strand
ggauggguaugaugaugag

SEQ ID NO: 2180655 - RNA, 19 nt, Homo sapiens
  misc_RNA (1)...(19): siRNA sense strand
uccaaucaauccaagaaga

SEQ ID NO: 2180656 - RNA, 19 nt, Homo sapiens
  misc_RNA (1)...(19): siRNA sense strand
uacuaaaucuggucucaag

SEQ ID NO: 2180657 - RNA, 19 nt, Homo sapiens
  misc_RNA (1)...(19): siRNA sense strand
guugcaagccauugaaaga

SEQ ID NO: 2180658 - RNA, 19 nt, Homo sapiens
  misc_RNA (1)...(19): siRNA sense strand
agagaacaccuguagaugu

SEQ ID NO: 2180659 - RNA, 19 nt, Homo sapiens
  misc_RNA (1)...(19): siRNA sense strand
agagagaacaccuguagau

SEQ ID NO: 2180660 - RNA, 19 nt, Homo sapiens
  misc_RNA (1)...(19): siRNA sense strand
ggugggagauaccuuugag

SEQ ID NO: 2180661 - RNA, 19 nt, Homo sapiens
  misc_RNA (1)...(19): siRNA sense strand
gauaaaguaccugagaaca

SEQ ID NO: 2180662 - RNA, 19 nt, Homo sapiens
  misc_RNA (1)...(19): siRNA sense strand
gugcuaccuuaccaucaaa

SEQ ID NO: 2180663 - RNA, 19 nt, Homo sapiens
  misc_RNA (1)...(19): siRNA sense strand
auucagagguggcuaugau

SEQ ID NO: 2180664 - RNA, 19 nt, Homo sapiens
  misc_RNA (1)...(19): siRNA sense strand
cauugggaguccuguauca

SEQ ID NO: 2180665 - RNA, 19 nt, Homo sapiens
  misc_RNA (1)...(19): siRNA sense strand
ugugagagguccgauaaag

SEQ ID NO: 2180666 - RNA, 19 nt, Homo sapiens
  misc_RNA (1)...(19): siRNA sense strand
uaccugagaacaagaauuc

SEQ ID NO: 2180667 - RNA, 19 nt, Homo sapiens
  misc_RNA (1)...(19): siRNA sense strand
guaguggcuccaauccuuu

SEQ ID NO: 2180668 - RNA, 19 nt, Homo sapiens
  misc_RNA (1)...(19): siRNA sense strand
uuacaggaggcucguauau

SEQ ID NO: 2180669 - RNA, 19 nt, Homo sapiens
  misc_RNA (1)...(19): siRNA sense strand
gacgaggagucugguagug

SEQ ID NO: 2180670 - RNA, 19 nt, Homo sapiens
  misc_RNA (1)...(19): siRNA sense strand
ggacgaggagucugguagu

SEQ ID NO: 2180671 - RNA, 19 nt, Homo sapiens
  misc_RNA (1)...(19): siRNA sense strand
ggaggcucguauauucaau

SEQ ID NO: 2180672 - RNA, 19 nt, Homo sapiens
  misc_RNA (1)...(19): siRNA sense strand
ugucaacaauaucaucaca

SEQ ID NO: 2180673 - RNA, 19 nt, Homo sapiens
  misc_RNA (1)...(19): siRNA sense strand
ugaccauauucagaaagua

SEQ ID NO: 2180674 - RNA, 19 nt, Homo sapiens
  misc_RNA (1)...(19): siRNA sense strand
ugugcuaccuuaccaucaa

SEQ ID NO: 2180675 - RNA, 19 nt, Homo sapiens
  misc_RNA (1)...(19): siRNA sense strand
ccaaucaauccaagaagau

SEQ ID NO: 2180676 - RNA, 19 nt, Homo sapiens
  misc_RNA (1)...(19): siRNA sense strand
uggguaugaugaugaguau

SEQ ID NO: 2180677 - RNA, 19 nt, Homo sapiens
  misc_RNA (1)...(19): siRNA sense strand
uaaagagagaacaccugua

SEQ ID NO: 2180678 - RNA, 19 nt, Homo sapiens
  misc_RNA (1)...(19): siRNA sense strand
auaaaguaccugagaacaa

SEQ ID NO: 2180679 - RNA, 19 nt, Homo sapiens
  misc_RNA (1)...(19): siRNA sense strand
gugacugugucugaccaua

SEQ ID NO: 2180680 - RNA, 19 nt, Homo sapiens
  misc_RNA (1)...(19): siRNA sense strand
ccaagaagauguuugcaua

SEQ ID NO: 2180681 - RNA, 19 nt, Homo sapiens
  misc_RNA (1)...(19): siRNA sense strand
gaaccagggugaacacuuu

SEQ ID NO: 2180682 - RNA, 19 nt, Homo sapiens
  misc_RNA (1)...(19): siRNA sense strand
ggauaaaguuuccagugua

SEQ ID NO: 2180683 - RNA, 19 nt, Homo sapiens
  misc_RNA (1)...(19): siRNA sense strand
ccaagaagcugcaucaagu

SEQ ID NO: 2180684 - RNA, 19 nt, Homo sapiens
  misc_RNA (1)...(19): siRNA sense strand
gauaagcuaugaugugguu

SEQ ID NO: 2180685 - RNA, 19 nt, Homo sapiens
  misc_RNA (1)...(19): siRNA sense strand
caaugaaacuccaaucaau

SEQ ID NO: 2180686 - RNA, 19 nt, Homo sapiens
  misc_RNA (1)...(19): siRNA sense strand
gauaaaguuuccaguguau

SEQ ID NO: 2180687 - RNA, 19 nt, Homo sapiens
  misc_RNA (1)...(19): siRNA sense strand
cuaaagacaugacuggaaa

SEQ ID NO: 2180688 - RNA, 19 nt, Homo sapiens
  misc_RNA (1)...(19): siRNA sense strand
guuaagcgcuggaucaaug

SEQ ID NO: 2180689 - RNA, 19 nt, Homo sapiens
  misc_RNA (1)...(19): siRNA sense strand
gaagauaagcuaugaugug

SEQ ID NO: 2180690 - RNA, 19 nt, Homo sapiens
  misc_RNA (1)...(19): siRNA sense strand
uaucuuagcuucuguugga

SEQ ID NO: 2180691 - RNA, 19 nt, Homo sapiens
  misc_RNA (1)...(19): siRNA sense strand
gaucaccgauggaacaaug

SEQ ID NO: 2180692 - RNA, 19 nt, Homo sapiens
  misc_RNA (1)...(19): siRNA sense strand
ugaagaggcugucaacaau

SEQ ID NO: 2180693 - RNA, 19 nt, Homo sapiens
  misc_RNA (1)...(19): siRNA sense strand
ggagaagagugcuguuuua

SEQ ID NO: 2180694 - RNA, 19 nt, Homo sapiens
  misc_RNA (1)...(19): siRNA sense strand
gaagauguuugcauauucu

SEQ ID NO: 2180695 - RNA, 19 nt, Homo sapiens
  misc_RNA (1)...(19): siRNA sense strand
agaaaguacugaagccuaa

SEQ ID NO: 2180696 - RNA, 19 nt, Homo sapiens
  misc_RNA (1)...(19): siRNA sense strand
gaagaggcugucaacaaua

SEQ ID NO: 2180697 - RNA, 19 nt, Homo sapiens
  misc_RNA (1)...(19): siRNA sense strand
gguaguggcuccaauccuu

SEQ ID NO: 2180698 - RNA, 19 nt, Homo sapiens
  misc_RNA (1)...(19): siRNA sense strand
acaggaggcucguauauuc

SEQ ID NO: 2180699 - RNA, 19 nt, Homo sapiens
  misc_RNA (1)...(19): siRNA sense strand
ugagagguccgauaaagua

SEQ ID NO: 2180700 - RNA, 19 nt, Homo sapiens
  misc_RNA (1)...(19): siRNA sense strand
gcuggaagaucucgaagug

SEQ ID NO: 2180701 - RNA, 19 nt, Homo sapiens
  misc_RNA (1)...(19): siRNA sense strand
ggaguccuguaucaccuua

SEQ ID NO: 2180702 - RNA, 19 nt, Homo sapiens
  misc_RNA (1)...(19): siRNA sense strand
guucagcacugguaucuuc

SEQ ID NO: 2180703 - RNA, 19 nt, Homo sapiens
  misc_RNA (1)...(19): siRNA sense strand
uaaaguaccugagaacaag

SEQ ID NO: 2180704 - RNA, 19 nt, Homo sapiens
  misc_RNA (1)...(19): siRNA sense strand
gaacaacggaagcuacaga

SEQ ID NO: 2180705 - RNA, 19 nt, Homo sapiens
  misc_RNA (1)...(19): siRNA sense strand
ccaagauguugaauaaguu

SEQ ID NO: 2180706 - RNA, 19 nt, Homo sapiens
  misc_RNA (1)...(19): siRNA sense strand
aggagaaugugcuaccuua

SEQ ID NO: 2180707 - RNA, 19 nt, Homo sapiens
  misc_RNA (1)...(19): siRNA sense strand
ucaagucacaguuugcuua

SEQ ID NO: 2180708 - RNA, 19 nt, Homo sapiens
  misc_RNA (1)...(19): siRNA sense strand
guacugaagccuaacuuug

SEQ ID NO: 2180709 - RNA, 19 nt, Homo sapiens
  misc_RNA (1)...(19): siRNA sense strand
ggugaacacuuuggaacaa

SEQ ID NO: 2180710 - RNA, 19 nt, Homo sapiens
  misc_RNA (1)...(19): siRNA sense strand
ggucucaagucacaguuug

SEQ ID NO: 2180711 - RNA, 19 nt, Homo sapiens
  misc_RNA (1)...(19): siRNA sense strand
ugcaagccauugaaagaua

SEQ ID NO: 2180712 - RNA, 19 nt, Homo sapiens
  misc_RNA (1)...(19): siRNA sense strand
gauguuaucuuagcuucug

SEQ ID NO: 2180713 - RNA, 19 nt, Homo sapiens
  misc_RNA (1)...(19): siRNA sense strand
gacugugucugaccauauu

SEQ ID NO: 2180714 - RNA, 19 nt, Homo sapiens
  misc_RNA (1)...(19): siRNA sense strand
gggaagaggugggagauac

SEQ ID NO: 2180715 - RNA, 19 nt, Homo sapiens
  misc_RNA (1)...(19): siRNA sense strand
cagagguggcuaugauuua

SEQ ID NO: 2180716 - RNA, 19 nt, Homo sapiens
  misc_RNA (1)...(19): siRNA sense strand
ugaugaagauaagcuauga

SEQ ID NO: 2180717 - RNA, 19 nt, Homo sapiens
  misc_RNA (1)...(19): siRNA sense strand
uaaaucuggucucaaguca

SEQ ID NO: 2180718 - RNA, 19 nt, Homo sapiens
  misc_RNA (1)...(19): siRNA sense strand
uagaaagaaugaucgacuu

SEQ ID NO: 2180719 - RNA, 19 nt, Homo sapiens
  misc_RNA (1)...(19): siRNA sense strand
gaucaaugaagcccaagaa

SEQ ID NO: 2180720 - RNA, 19 nt, Homo sapiens
  misc_RNA (1)...(19): siRNA sense strand
aagaggcugucaacaauau

SEQ ID NO: 2180721 - RNA, 19 nt, Homo sapiens
  misc_RNA (1)...(19): siRNA sense strand
ggaaaccuuugcccucagu

SEQ ID NO: 2180722 - RNA, 19 nt, Homo sapiens
  misc_RNA (1)...(19): siRNA sense strand
agaagauguuugcauauuc

SEQ ID NO: 2180723 - RNA, 19 nt, Homo sapiens
  misc_RNA (1)...(19): siRNA sense strand
ugucagaaguaaagagaga

SEQ ID NO: 2180724 - RNA, 19 nt, Homo sapiens
  misc_RNA (1)...(19): siRNA sense strand
gaggauggguaugaugaug

SEQ ID NO: 2180725 - RNA, 19 nt, Homo sapiens
  misc_RNA (1)...(19): siRNA sense strand
agacaugacuggaaaagaa

SEQ ID NO: 2180726 - RNA, 19 nt, Homo sapiens
  misc_RNA (1)...(19): siRNA sense strand
gcaagccauugaaagauac

SEQ ID NO: 2180727 - RNA, 19 nt, Homo sapiens
  misc_RNA (1)...(19): siRNA sense strand
uguaucaccuuagaaagaa

SEQ ID NO: 2180728 - RNA, 19 nt, Homo sapiens
  misc_RNA (1)...(19): siRNA sense strand
caugugagagguccgauaa

SEQ ID NO: 2180729 - RNA, 19 nt, Homo sapiens
  misc_RNA (1)...(19): siRNA sense strand
gguaugaugaugaguaugu

SEQ ID NO: 2180730 - RNA, 19 nt, Homo sapiens
  misc_RNA (1)...(19): siRNA sense strand
uccaagauguugaauaagu

SEQ ID NO: 2180731 - RNA, 19 nt, Homo sapiens
  misc_RNA (1)...(19): siRNA sense strand
gggagauaccuuugagaaa

SEQ ID NO: 2180732 - RNA, 19 nt, Homo sapiens
  misc_RNA (1)...(19): siRNA sense strand
uaucuucccugcacaugau

SEQ ID NO: 2180733 - RNA, 19 nt, Homo sapiens
  misc_RNA (1)...(19): siRNA sense strand
aaagagagaacaccuguag

SEQ ID NO: 2180734 - RNA, 19 nt, Homo sapiens
  misc_RNA (1)...(19): siRNA sense strand
ucaaugaaacuccaaucaa

SEQ ID NO: 2180735 - RNA, 19 nt, Homo sapiens
  misc_RNA (1)...(19): siRNA sense strand
ccgauaaaguaccugagaa

SEQ ID NO: 2180736 - RNA, 19 nt, Homo sapiens
  misc_RNA (1)...(19): siRNA sense strand
uccuuuagcugcaccauga

SEQ ID NO: 2180737 - RNA, 19 nt, Homo sapiens
  misc_RNA (1)...(19): siRNA sense strand
gaaacuccaaucaauccaa

SEQ ID NO: 2180738 - RNA, 19 nt, Homo sapiens
  misc_RNA (1)...(19): siRNA sense strand
ccgaauugccagucgcuua

SEQ ID NO: 2180739 - RNA, 19 nt, Homo sapiens
  misc_RNA (1)...(19): siRNA sense strand
caagaagauguuugcauau

SEQ ID NO: 2180740 - RNA, 19 nt, Homo sapiens
  misc_RNA (1)...(19): siRNA sense strand
cugaggaugugauaauugu

SEQ ID NO: 2180741 - RNA, 19 nt, Homo sapiens
  misc_RNA (1)...(19): siRNA sense strand
agagguggcuaugauuuau

SEQ ID NO: 2180742 - RNA, 19 nt, Homo sapiens
  misc_RNA (1)...(19): siRNA sense strand
aaucuggucucaagucaca

SEQ ID NO: 2180743 - RNA, 19 nt, Homo sapiens
  misc_RNA (1)...(19): siRNA sense strand
gaagcaggccauuguggau

SEQ ID NO: 2180744 - RNA, 19 nt, Homo sapiens
  misc_RNA (1)...(19): siRNA sense strand
uaccuuaccaucaaagaaa

SEQ ID NO: 2180745 - RNA, 19 nt, Homo sapiens
  misc_RNA (1)...(19): siRNA sense strand
gagagaacaccuguagaug

SEQ ID NO: 2180746 - RNA, 19 nt, Homo sapiens
  misc_RNA (1)...(19): siRNA sense strand
ucagagguggcuaugauuu

SEQ ID NO: 2180747 - RNA, 19 nt, Homo sapiens
  misc_RNA (1)...(19): siRNA sense strand
caaugaagcccaagaagcu

SEQ ID NO: 2180748 - RNA, 19 nt, Homo sapiens
  misc_RNA (1)...(19): siRNA sense strand
gaggaugugauaauuguca

SEQ ID NO: 2180749 - RNA, 19 nt, Homo sapiens
  misc_RNA (1)...(19): siRNA sense strand
uaagcuaugaugugguuaa

SEQ ID NO: 2180750 - RNA, 19 nt, Homo sapiens
  misc_RNA (1)...(19): siRNA sense strand
gagaacaagaauucccauu

SEQ ID NO: 2180751 - RNA, 19 nt, Homo sapiens
  misc_RNA (1)...(19): siRNA sense strand
cagaugaggauggguauga

SEQ ID NO: 2180752 - RNA, 19 nt, Homo sapiens
  misc_RNA (1)...(19): siRNA sense strand
gcaggccauuguggauaaa

SEQ ID NO: 2180753 - RNA, 19 nt, Homo sapiens
  misc_RNA (1)...(19): siRNA sense strand
cuuagcuucuguuggauaa

SEQ ID NO: 2180754 - RNA, 19 nt, Homo sapiens
  misc_RNA (1)...(19): siRNA sense strand
ggauggguaugaugaugag

SEQ ID NO: 2180755 - RNA, 19 nt, Homo sapiens
  misc_RNA (1)...(19): siRNA sense strand
uccaaucaauccaagaaga

SEQ ID NO: 2180756 - RNA, 19 nt, Homo sapiens
  misc_RNA (1)...(19): siRNA sense strand
uacuaaaucuggucucaag

SEQ ID NO: 2180757 - RNA, 19 nt, Homo sapiens
  misc_RNA (1)...(19): siRNA sense strand
guugcaagccauugaaaga

SEQ ID NO: 2180758 - RNA, 19 nt, Homo sapiens
  misc_RNA (1)...(19): siRNA sense strand
agagaacaccuguagaugu

SEQ ID NO: 2180759 - RNA, 19 nt, Homo sapiens
  misc_RNA (1)...(19): siRNA sense strand
agagagaacaccuguagau

SEQ ID NO: 2180760 - RNA, 19 nt, Homo sapiens
  misc_RNA (1)...(19): siRNA sense strand
ggugggagauaccuuugag

SEQ ID NO: 2180761 - RNA, 19 nt, Homo sapiens
  misc_RNA (1)...(19): siRNA sense strand
gauaaaguaccugagaaca

SEQ ID NO: 2180762 - RNA, 19 nt, Homo sapiens
  misc_RNA (1)...(19): siRNA sense strand
gugcuaccuuaccaucaaa

SEQ ID NO: 2180763 - RNA, 19 nt, Homo sapiens
  misc_RNA (1)...(19): siRNA sense strand
auucagagguggcuaugau

SEQ ID NO: 2180764 - RNA, 19 nt, Homo sapiens
  misc_RNA (1)...(19): siRNA sense strand
cauugggaguccuguauca

SEQ ID NO: 2180765 - RNA, 19 nt, Homo sapiens
  misc_RNA (1)...(19): siRNA sense strand
ugugagagguccgauaaag

SEQ ID NO: 2180766 - RNA, 19 nt, Homo sapiens
  misc_RNA (1)...(19): siRNA sense strand
uaccugagaacaagaauuc

SEQ ID NO: 2180767 - RNA, 19 nt, Homo sapiens
  misc_RNA (1)...(19): siRNA sense strand
guaguggcuccaauccuuu

SEQ ID NO: 2180768 - RNA, 19 nt, Homo sapiens
  misc_RNA (1)...(19): siRNA sense strand
uuacaggaggcucguauau

SEQ ID NO: 2180769 - RNA, 19 nt, Homo sapiens
  misc_RNA (1)...(19): siRNA sense strand
gacgaggagucugguagug

SEQ ID NO: 2180770 - RNA, 19 nt, Homo sapiens
  misc_RNA (1)...(19): siRNA sense strand
ggacgaggagucugguagu

SEQ ID NO: 2180771 - RNA, 19 nt, Homo sapiens
  misc_RNA (1)...(19): siRNA sense strand
ggaggcucguauauucaau

SEQ ID NO: 2180772 - RNA, 19 nt, Homo sapiens
  misc_RNA (1)...(19): siRNA sense strand
ugucaacaauaucaucaca

SEQ ID NO: 2180773 - RNA, 19 nt, Homo sapiens
  misc_RNA (1)...(19): siRNA sense strand
ugaccauauucagaaagua

SEQ ID NO: 2180774 - RNA, 19 nt, Homo sapiens
  misc_RNA (1)...(19): siRNA sense strand
ugugcuaccuuaccaucaa

SEQ ID NO: 2180775 - RNA, 19 nt, Homo sapiens
  misc_RNA (1)...(19): siRNA sense strand
ccaaucaauccaagaagau

SEQ ID NO: 2180776 - RNA, 19 nt, Homo sapiens
  misc_RNA (1)...(19): siRNA sense strand
uggguaugaugaugaguau

SEQ ID NO: 2180777 - RNA, 19 nt, Homo sapiens
  misc_RNA (1)...(19): siRNA sense strand
uaaagagagaacaccugua

SEQ ID NO: 2180778 - RNA, 19 nt, Homo sapiens
  misc_RNA (1)...(19): siRNA sense strand
auaaaguaccugagaacaa

SEQ ID NO: 2180779 - RNA, 19 nt, Homo sapiens
  misc_RNA (1)...(19): siRNA sense strand
gugacugugucugaccaua

SEQ ID NO: 2180780 - RNA, 19 nt, Homo sapiens
  misc_RNA (1)...(19): siRNA sense strand
gaacaccucuuauuccuau

SEQ ID NO: 2180781 - RNA, 19 nt, Homo sapiens
  misc_RNA (1)...(19): siRNA sense strand
ggaaggagcacaucaauau

SEQ ID NO: 2180782 - RNA, 19 nt, Homo sapiens
  misc_RNA (1)...(19): siRNA sense strand
gcaaucagauccagugcua

SEQ ID NO: 2180783 - RNA, 19 nt, Homo sapiens
  misc_RNA (1)...(19): siRNA sense strand
gaacagaucgugugugaga

SEQ ID NO: 2180784 - RNA, 19 nt, Homo sapiens
  misc_RNA (1)...(19): siRNA sense strand
gaacuacacugugcugguu

SEQ ID NO: 2180785 - RNA, 19 nt, Homo sapiens
  misc_RNA (1)...(19): siRNA sense strand
gaauaaaguucaccucuac

SEQ ID NO: 2180786 - RNA, 19 nt, Homo sapiens
  misc_RNA (1)...(19): siRNA sense strand
cagaggagcuggccuguug

SEQ ID NO: 2180787 - RNA, 19 nt, Homo sapiens
  misc_RNA (1)...(19): siRNA sense strand
cagaacagaucguguguga

SEQ ID NO: 2180788 - RNA, 19 nt, Homo sapiens
  misc_RNA (1)...(19): siRNA sense strand
caacccagcucagaauaaa

SEQ ID NO: 2180789 - RNA, 19 nt, Homo sapiens
  misc_RNA (1)...(19): siRNA sense strand
ccucacagcucuauuacuu

SEQ ID NO: 2180790 - RNA, 19 nt, Homo sapiens
  misc_RNA (1)...(19): siRNA sense strand
gaaccugggccuggaauuu

SEQ ID NO: 2180791 - RNA, 19 nt, Homo sapiens
  misc_RNA (1)...(19): siRNA sense strand
agaauaaaguucaccucua

SEQ ID NO: 2180792 - RNA, 19 nt, Homo sapiens
  misc_RNA (1)...(19): siRNA sense strand
ggagcugucuggugccaaa

SEQ ID NO: 2180793 - RNA, 19 nt, Homo sapiens
  misc_RNA (1)...(19): siRNA sense strand
gcacgcccaucauccuaaa

SEQ ID NO: 2180794 - RNA, 19 nt, Homo sapiens
  misc_RNA (1)...(19): siRNA sense strand
gcaagucccgcgaaaguga

SEQ ID NO: 2180795 - RNA, 19 nt, Homo sapiens
  misc_RNA (1)...(19): siRNA sense strand
gguccucacagcucuauua

SEQ ID NO: 2180796 - RNA, 19 nt, Homo sapiens
  misc_RNA (1)...(19): siRNA sense strand
ucacagcucuauuacuuca

SEQ ID NO: 2180797 - RNA, 19 nt, Homo sapiens
  misc_RNA (1)...(19): siRNA sense strand
gcaccagcuuugucuucua

SEQ ID NO: 2180798 - RNA, 19 nt, Homo sapiens
  misc_RNA (1)...(19): siRNA sense strand
cagaugaggugcuagagau

SEQ ID NO: 2180799 - RNA, 19 nt, Homo sapiens
  misc_RNA (1)...(19): siRNA sense strand
gcaacgugguggugauguu

SEQ ID NO: 2180800 - RNA, 19 nt, Homo sapiens
  misc_RNA (1)...(19): siRNA sense strand
ggaaugggcacuucaacau

SEQ ID NO: 2180801 - RNA, 19 nt, Homo sapiens
  misc_RNA (1)...(19): siRNA sense strand
gaagcaacgugguggugau

SEQ ID NO: 2180802 - RNA, 19 nt, Homo sapiens
  misc_RNA (1)...(19): siRNA sense strand
gcccuuuaguggaugguua

SEQ ID NO: 2180803 - RNA, 19 nt, Homo sapiens
  misc_RNA (1)...(19): siRNA sense strand
aaacgcaagucccgcgaaa

SEQ ID NO: 2180804 - RNA, 19 nt, Homo sapiens
  misc_RNA (1)...(19): siRNA sense strand
gggaaggagcacaucaaua

SEQ ID NO: 2180805 - RNA, 19 nt, Homo sapiens
  misc_RNA (1)...(19): siRNA sense strand
gaaagcagcccugucucuu

SEQ ID NO: 2180806 - RNA, 19 nt, Homo sapiens
  misc_RNA (1)...(19): siRNA sense strand
gugcagcccuuuaguggau

SEQ ID NO: 2180807 - RNA, 19 nt, Homo sapiens
  misc_RNA (1)...(19): siRNA sense strand
agaccaacuucaccuacua

SEQ ID NO: 2180808 - RNA, 19 nt, Homo sapiens
  misc_RNA (1)...(19): siRNA sense strand
ggauggagaucaacaaccu

SEQ ID NO: 2180809 - RNA, 19 nt, Homo sapiens
  misc_RNA (1)...(19): siRNA sense strand
cauccuacauugucugcaa

SEQ ID NO: 2180810 - RNA, 19 nt, Homo sapiens
  misc_RNA (1)...(19): siRNA sense strand
ggaaagcagcccugucucu

SEQ ID NO: 2180811 - RNA, 19 nt, Homo sapiens
  misc_RNA (1)...(19): siRNA sense strand
ucugaacgcuacugagaug

SEQ ID NO: 2180812 - RNA, 19 nt, Homo sapiens
  misc_RNA (1)...(19): siRNA sense strand
ggcgucaacugcaccuuug

SEQ ID NO: 2180813 - RNA, 19 nt, Homo sapiens
  misc_RNA (1)...(19): siRNA sense strand
gcaacgugaagcugaacua

SEQ ID NO: 2180814 - RNA, 19 nt, Homo sapiens
  misc_RNA (1)...(19): siRNA sense strand
uuacaucccugcagaacag

SEQ ID NO: 2180815 - RNA, 19 nt, Homo sapiens
  misc_RNA (1)...(19): siRNA sense strand
ggugugagcgguccaagga

SEQ ID NO: 2180816 - RNA, 19 nt, Homo sapiens
  misc_RNA (1)...(19): siRNA sense strand
gccagaacaccucuuauuc

SEQ ID NO: 2180817 - RNA, 19 nt, Homo sapiens
  misc_RNA (1)...(19): siRNA sense strand
gacaacccagcucagaaua

SEQ ID NO: 2180818 - RNA, 19 nt, Homo sapiens
  misc_RNA (1)...(19): siRNA sense strand
ggacccaccuggaccucau

SEQ ID NO: 2180819 - RNA, 19 nt, Homo sapiens
  misc_RNA (1)...(19): siRNA sense strand
ggaccaccaugucguacag

SEQ ID NO: 2180820 - RNA, 19 nt, Homo sapiens
  misc_RNA (1)...(19): siRNA sense strand
cgagaggcccgaggaguuu

SEQ ID NO: 2180821 - RNA, 19 nt, Homo sapiens
  misc_RNA (1)...(19): siRNA sense strand
ggagugcagcccuuuagug

SEQ ID NO: 2180822 - RNA, 19 nt, Homo sapiens
  misc_RNA (1)...(19): siRNA sense strand
gaaggagcacaucaauauc

SEQ ID NO: 2180823 - RNA, 19 nt, Homo sapiens
  misc_RNA (1)...(19): siRNA sense strand
gaagggauggagaucaaca

SEQ ID NO: 2180824 - RNA, 19 nt, Homo sapiens
  misc_RNA (1)...(19): siRNA sense strand
gaugaggugcuagagauga

SEQ ID NO: 2180825 - RNA, 19 nt, Homo sapiens
  misc_RNA (1)...(19): siRNA sense strand
gacgguccaucccaacaau

SEQ ID NO: 2180826 - RNA, 19 nt, Homo sapiens
  misc_RNA (1)...(19): siRNA sense strand
caacgugguggugauguuu

SEQ ID NO: 2180827 - RNA, 19 nt, Homo sapiens
  misc_RNA (1)...(19): siRNA sense strand
ugacaacccagcucagaau

SEQ ID NO: 2180828 - RNA, 19 nt, Homo sapiens
  misc_RNA (1)...(19): siRNA sense strand
cagaacaccucuuauuccu

SEQ ID NO: 2180829 - RNA, 19 nt, Homo sapiens
  misc_RNA (1)...(19): siRNA sense strand
caacaccacauccucagau

SEQ ID NO: 2180830 - RNA, 19 nt, Homo sapiens
  misc_RNA (1)...(19): siRNA sense strand
cgaucuccauccuacauug

SEQ ID NO: 2180831 - RNA, 19 nt, Homo sapiens
  misc_RNA (1)...(19): siRNA sense strand
gagggaaggagcacaucaa

SEQ ID NO: 2180832 - RNA, 19 nt, Homo sapiens
  misc_RNA (1)...(19): siRNA sense strand
ucaagccuaucacgcugaa

SEQ ID NO: 2180833 - RNA, 19 nt, Homo sapiens
  misc_RNA (1)...(19): siRNA sense strand
caucguggccgugcucauu

SEQ ID NO: 2180834 - RNA, 19 nt, Homo sapiens
  misc_RNA (1)...(19): siRNA sense strand
ccagauccgugccaagcau

SEQ ID NO: 2180835 - RNA, 19 nt, Homo sapiens
  misc_RNA (1)...(19): siRNA sense strand
caacagcuccagcguacag

SEQ ID NO: 2180836 - RNA, 19 nt, Homo sapiens
  misc_RNA (1)...(19): siRNA sense strand
uugaggaccugucagagau

SEQ ID NO: 2180837 - RNA, 19 nt, Homo sapiens
  misc_RNA (1)...(19): siRNA sense strand
acagcucuauuacuucaug

SEQ ID NO: 2180838 - RNA, 19 nt, Homo sapiens
  misc_RNA (1)...(19): siRNA sense strand
aaaguucaccucuacaagu

SEQ ID NO: 2180839 - RNA, 19 nt, Homo sapiens
  misc_RNA (1)...(19): siRNA sense strand
ugccagaacaccucuuauu

SEQ ID NO: 2180840 - RNA, 19 nt, Homo sapiens
  misc_RNA (1)...(19): siRNA sense strand
gcaacaccacauccucaga

SEQ ID NO: 2180841 - RNA, 19 nt, Homo sapiens
  misc_RNA (1)...(19): siRNA sense strand
ccaggaaggccgagugaag

SEQ ID NO: 2180842 - RNA, 19 nt, Homo sapiens
  misc_RNA (1)...(19): siRNA sense strand
cgaggaguuuggcuucauc

SEQ ID NO: 2180843 - RNA, 19 nt, Homo sapiens
  misc_RNA (1)...(19): siRNA sense strand
caauaucugugagguucug

SEQ ID NO: 2180844 - RNA, 19 nt, Homo sapiens
  misc_RNA (1)...(19): siRNA sense strand
ggagggaaggagcacauca

SEQ ID NO: 2180845 - RNA, 19 nt, Homo sapiens
  misc_RNA (1)...(19): siRNA sense strand
aaguucaccucuacaagug

SEQ ID NO: 2180846 - RNA, 19 nt, Homo sapiens
  misc_RNA (1)...(19): siRNA sense strand
ggagcauugucaguggaaa

SEQ ID NO: 2180847 - RNA, 19 nt, Homo sapiens
  misc_RNA (1)...(19): siRNA sense strand
acacacccaucgccguaug

SEQ ID NO: 2180848 - RNA, 19 nt, Homo sapiens
  misc_RNA (1)...(19): siRNA sense strand
augaagggauggagaucaa

SEQ ID NO: 2180849 - RNA, 19 nt, Homo sapiens
  misc_RNA (1)...(19): siRNA sense strand
gaccaacuucaccuacuau

SEQ ID NO: 2180850 - RNA, 19 nt, Homo sapiens
  misc_RNA (1)...(19): siRNA sense strand
ggagaaccugggccuggaa

SEQ ID NO: 2180851 - RNA, 19 nt, Homo sapiens
  misc_RNA (1)...(19): siRNA sense strand
acaacccagcucagaauaa

SEQ ID NO: 2180852 - RNA, 19 nt, Homo sapiens
  misc_RNA (1)...(19): siRNA sense strand
caccuggaccucauacaga

SEQ ID NO: 2180853 - RNA, 19 nt, Homo sapiens
  misc_RNA (1)...(19): siRNA sense strand
caccagcuuugucuucuac

SEQ ID NO: 2180854 - RNA, 19 nt, Homo sapiens
  misc_RNA (1)...(19): siRNA sense strand
gaucugcguggcugugugu

SEQ ID NO: 2180855 - RNA, 19 nt, Homo sapiens
  misc_RNA (1)...(19): siRNA sense strand
gacccagacuucgcaugug

SEQ ID NO: 2180856 - RNA, 19 nt, Homo sapiens
  misc_RNA (1)...(19): siRNA sense strand
cagcucagaauaaaguuca

SEQ ID NO: 2180857 - RNA, 19 nt, Homo sapiens
  misc_RNA (1)...(19): siRNA sense strand
ugacagucguguggaaugg

SEQ ID NO: 2180858 - RNA, 19 nt, Homo sapiens
  misc_RNA (1)...(19): siRNA sense strand
acgaaugcauccucaacau

SEQ ID NO: 2180859 - RNA, 19 nt, Homo sapiens
  misc_RNA (1)...(19): siRNA sense strand
uggaggugaucaagccuau

SEQ ID NO: 2180860 - RNA, 19 nt, Homo sapiens
  misc_RNA (1)...(19): siRNA sense strand
ugacccagacuucgcaugu

SEQ ID NO: 2180861 - RNA, 19 nt, Homo sapiens
  misc_RNA (1)...(19): siRNA sense strand
caacaauaucuccgucucu

SEQ ID NO: 2180862 - RNA, 19 nt, Homo sapiens
  misc_RNA (1)...(19): siRNA sense strand
cauugucaguggaaacaca

SEQ ID NO: 2180863 - RNA, 19 nt, Homo sapiens
  misc_RNA (1)...(19): siRNA sense strand
ucagaugaggugcuagaga

SEQ ID NO: 2180864 - RNA, 19 nt, Homo sapiens
  misc_RNA (1)...(19): siRNA sense strand
ccagaacaccucuuauucc

SEQ ID NO: 2180865 - RNA, 19 nt, Homo sapiens
  misc_RNA (1)...(19): siRNA sense strand
acaagaccaacuucaccua

SEQ ID NO: 2180866 - RNA, 19 nt, Homo sapiens
  misc_RNA (1)...(19): siRNA sense strand
gaucuccauccuacauugu

SEQ ID NO: 2180867 - RNA, 19 nt, Homo sapiens
  misc_RNA (1)...(19): siRNA sense strand
aaagcagcccugucucuuc

SEQ ID NO: 2180868 - RNA, 19 nt, Homo sapiens
  misc_RNA (1)...(19): siRNA sense strand
ucuauuacuucaugacacu

SEQ ID NO: 2180869 - RNA, 19 nt, Homo sapiens
  misc_RNA (1)...(19): siRNA sense strand
cagcaccagcuuugucuuc

SEQ ID NO: 2180870 - RNA, 19 nt, Homo sapiens
  misc_RNA (1)...(19): siRNA sense strand
gugucggccugaauucaug

SEQ ID NO: 2180871 - RNA, 19 nt, Homo sapiens
  misc_RNA (1)...(19): siRNA sense strand
uaaaguucaccucuacaag

SEQ ID NO: 2180872 - RNA, 19 nt, Homo sapiens
  misc_RNA (1)...(19): siRNA sense strand
gcagaggagcuggccuguu

SEQ ID NO: 2180873 - RNA, 19 nt, Homo sapiens
  misc_RNA (1)...(19): siRNA sense strand
cagcguggcuacgaaugca

SEQ ID NO: 2180874 - RNA, 19 nt, Homo sapiens
  misc_RNA (1)...(19): siRNA sense strand
ccaccaucgugcggauuga

SEQ ID NO: 2180875 - RNA, 19 nt, Homo sapiens
  misc_RNA (1)...(19): siRNA sense strand
ccuggaauuucgcgacauc

SEQ ID NO: 2180876 - RNA, 19 nt, Homo sapiens
  misc_RNA (1)...(19): siRNA sense strand
caucaauaucugugagguu

SEQ ID NO: 2180877 - RNA, 19 nt, Homo sapiens
  misc_RNA (1)...(19): siRNA sense strand
guguggcccuggagugcaa

SEQ ID NO: 2180878 - RNA, 19 nt, Homo sapiens
  misc_RNA (1)...(19): siRNA sense strand
cgugcucauugccuauaaa

SEQ ID NO: 2180879 - RNA, 19 nt, Homo sapiens
  misc_RNA (1)...(19): siRNA sense strand
cugcucauccucaacaaga

SEQ ID NO: 2180880 - RNA, 19 nt, Homo sapiens
  misc_RNA (1)...(19): siRNA sense strand
gaacaccucuuauuccuau

SEQ ID NO: 2180881 - RNA, 19 nt, Homo sapiens
  misc_RNA (1)...(19): siRNA sense strand
ggaaggagcacaucaauau

SEQ ID NO: 2180882 - RNA, 19 nt, Homo sapiens
  misc_RNA (1)...(19): siRNA sense strand
gcaaucagauccagugcua

SEQ ID NO: 2180883 - RNA, 19 nt, Homo sapiens
  misc_RNA (1)...(19): siRNA sense strand
gaacagaucgugugugaga

SEQ ID NO: 2180884 - RNA, 19 nt, Homo sapiens
  misc_RNA (1)...(19): siRNA sense strand
gaacuacacugugcugguu

SEQ ID NO: 2180885 - RNA, 19 nt, Homo sapiens
  misc_RNA (1)...(19): siRNA sense strand
gaauaaaguucaccucuac

SEQ ID NO: 2180886 - RNA, 19 nt, Homo sapiens
  misc_RNA (1)...(19): siRNA sense strand
cagaggagcuggccuguug

SEQ ID NO: 2180887 - RNA, 19 nt, Homo sapiens
  misc_RNA (1)...(19): siRNA sense strand
cagaacagaucguguguga

SEQ ID NO: 2180888 - RNA, 19 nt, Homo sapiens
  misc_RNA (1)...(19): siRNA sense strand
caacccagcucagaauaaa

SEQ ID NO: 2180889 - RNA, 19 nt, Homo sapiens
  misc_RNA (1)...(19): siRNA sense strand
ccucacagcucuauuacuu

SEQ ID NO: 2180890 - RNA, 19 nt, Homo sapiens
  misc_RNA (1)...(19): siRNA sense strand
gaaccugggccuggaauuu

SEQ ID NO: 2180891 - RNA, 19 nt, Homo sapiens
  misc_RNA (1)...(19): siRNA sense strand
agaauaaaguucaccucua

SEQ ID NO: 2180892 - RNA, 19 nt, Homo sapiens
  misc_RNA (1)...(19): siRNA sense strand
ggagcugucuggugccaaa

SEQ ID NO: 2180893 - RNA, 19 nt, Homo sapiens
  misc_RNA (1)...(19): siRNA sense strand
gcacgcccaucauccuaaa

SEQ ID NO: 2180894 - RNA, 19 nt, Homo sapiens
  misc_RNA (1)...(19): siRNA sense strand
gcaagucccgcgaaaguga

SEQ ID NO: 2180895 - RNA, 19 nt, Homo sapiens
  misc_RNA (1)...(19): siRNA sense strand
gguccucacagcucuauua

SEQ ID NO: 2180896 - RNA, 19 nt, Homo sapiens
  misc_RNA (1)...(19): siRNA sense strand
ucacagcucuauuacuuca

SEQ ID NO: 2180897 - RNA, 19 nt, Homo sapiens
  misc_RNA (1)...(19): siRNA sense strand
gcaccagcuuugucuucua

SEQ ID NO: 2180898 - RNA, 19 nt, Homo sapiens
  misc_RNA (1)...(19): siRNA sense strand
cagaugaggugcuagagau

SEQ ID NO: 2180899 - RNA, 19 nt, Homo sapiens
  misc_RNA (1)...(19): siRNA sense strand
gcaacgugguggugauguu

SEQ ID NO: 2180900 - RNA, 19 nt, Homo sapiens
  misc_RNA (1)...(19): siRNA sense strand
ggaaugggcacuucaacau

SEQ ID NO: 2180901 - RNA, 19 nt, Homo sapiens
  misc_RNA (1)...(19): siRNA sense strand
gaagcaacgugguggugau

SEQ ID NO: 2180902 - RNA, 19 nt, Homo sapiens
  misc_RNA (1)...(19): siRNA sense strand
gcccuuuaguggaugguua

SEQ ID NO: 2180903 - RNA, 19 nt, Homo sapiens
  misc_RNA (1)...(19): siRNA sense strand
aaacgcaagucccgcgaaa

SEQ ID NO: 2180904 - RNA, 19 nt, Homo sapiens
  misc_RNA (1)...(19): siRNA sense strand
gggaaggagcacaucaaua

SEQ ID NO: 2180905 - RNA, 19 nt, Homo sapiens
  misc_RNA (1)...(19): siRNA sense strand
gaaagcagcccugucucuu

SEQ ID NO: 2180906 - RNA, 19 nt, Homo sapiens
  misc_RNA (1)...(19): siRNA sense strand
gugcagcccuuuaguggau

SEQ ID NO: 2180907 - RNA, 19 nt, Homo sapiens
  misc_RNA (1)...(19): siRNA sense strand
agaccaacuucaccuacua

SEQ ID NO: 2180908 - RNA, 19 nt, Homo sapiens
  misc_RNA (1)...(19): siRNA sense strand
ggauggagaucaacaaccu

SEQ ID NO: 2180909 - RNA, 19 nt, Homo sapiens
  misc_RNA (1)...(19): siRNA sense strand
cauccuacauugucugcaa

SEQ ID NO: 2180910 - RNA, 19 nt, Homo sapiens
  misc_RNA (1)...(19): siRNA sense strand
ggaaagcagcccugucucu

SEQ ID NO: 2180911 - RNA, 19 nt, Homo sapiens
  misc_RNA (1)...(19): siRNA sense strand
ucugaacgcuacugagaug

SEQ ID NO: 2180912 - RNA, 19 nt, Homo sapiens
  misc_RNA (1)...(19): siRNA sense strand
ggcgucaacugcaccuuug

SEQ ID NO: 2180913 - RNA, 19 nt, Homo sapiens
  misc_RNA (1)...(19): siRNA sense strand
gcaacgugaagcugaacua

SEQ ID NO: 2180914 - RNA, 19 nt, Homo sapiens
  misc_RNA (1)...(19): siRNA sense strand
uuacaucccugcagaacag

SEQ ID NO: 2180915 - RNA, 19 nt, Homo sapiens
  misc_RNA (1)...(19): siRNA sense strand
ggugugagcgguccaagga

SEQ ID NO: 2180916 - RNA, 19 nt, Homo sapiens
  misc_RNA (1)...(19): siRNA sense strand
gccagaacaccucuuauuc

SEQ ID NO: 2180917 - RNA, 19 nt, Homo sapiens
  misc_RNA (1)...(19): siRNA sense strand
gacaacccagcucagaaua

SEQ ID NO: 2180918 - RNA, 19 nt, Homo sapiens
  misc_RNA (1)...(19): siRNA sense strand
ggacccaccuggaccucau

SEQ ID NO: 2180919 - RNA, 19 nt, Homo sapiens
  misc_RNA (1)...(19): siRNA sense strand
ggaccaccaugucguacag

SEQ ID NO: 2180920 - RNA, 19 nt, Homo sapiens
  misc_RNA (1)...(19): siRNA sense strand
cgagaggcccgaggaguuu

SEQ ID NO: 2180921 - RNA, 19 nt, Homo sapiens
  misc_RNA (1)...(19): siRNA sense strand
ggagugcagcccuuuagug

SEQ ID NO: 2180922 - RNA, 19 nt, Homo sapiens
  misc_RNA (1)...(19): siRNA sense strand
gaaggagcacaucaauauc

SEQ ID NO: 2180923 - RNA, 19 nt, Homo sapiens
  misc_RNA (1)...(19): siRNA sense strand
gaagggauggagaucaaca

SEQ ID NO: 2180924 - RNA, 19 nt, Homo sapiens
  misc_RNA (1)...(19): siRNA sense strand
gaugaggugcuagagauga

SEQ ID NO: 2180925 - RNA, 19 nt, Homo sapiens
  misc_RNA (1)...(19): siRNA sense strand
gacgguccaucccaacaau

SEQ ID NO: 2180926 - RNA, 19 nt, Homo sapiens
  misc_RNA (1)...(19): siRNA sense strand
caacgugguggugauguuu

SEQ ID NO: 2180927 - RNA, 19 nt, Homo sapiens
  misc_RNA (1)...(19): siRNA sense strand
ugacaacccagcucagaau

SEQ ID NO: 2180928 - RNA, 19 nt, Homo sapiens
  misc_RNA (1)...(19): siRNA sense strand
cagaacaccucuuauuccu

SEQ ID NO: 2180929 - RNA, 19 nt, Homo sapiens
  misc_RNA (1)...(19): siRNA sense strand
caacaccacauccucagau

SEQ ID NO: 2180930 - RNA, 19 nt, Homo sapiens
  misc_RNA (1)...(19): siRNA sense strand
cgaucuccauccuacauug

SEQ ID NO: 2180931 - RNA, 19 nt, Homo sapiens
  misc_RNA (1)...(19): siRNA sense strand
gagggaaggagcacaucaa

SEQ ID NO: 2180932 - RNA, 19 nt, Homo sapiens
  misc_RNA (1)...(19): siRNA sense strand
ucaagccuaucacgcugaa

SEQ ID NO: 2180933 - RNA, 19 nt, Homo sapiens
  misc_RNA (1)...(19): siRNA sense strand
caucguggccgugcucauu

SEQ ID NO: 2180934 - RNA, 19 nt, Homo sapiens
  misc_RNA (1)...(19): siRNA sense strand
ccagauccgugccaagcau

SEQ ID NO: 2180935 - RNA, 19 nt, Homo sapiens
  misc_RNA (1)...(19): siRNA sense strand
caacagcuccagcguacag

SEQ ID NO: 2180936 - RNA, 19 nt, Homo sapiens
  misc_RNA (1)...(19): siRNA sense strand
uugaggaccugucagagau

SEQ ID NO: 2180937 - RNA, 19 nt, Homo sapiens
  misc_RNA (1)...(19): siRNA sense strand
acagcucuauuacuucaug

SEQ ID NO: 2180938 - RNA, 19 nt, Homo sapiens
  misc_RNA (1)...(19): siRNA sense strand
aaaguucaccucuacaagu

SEQ ID NO: 2180939 - RNA, 19 nt, Homo sapiens
  misc_RNA (1)...(19): siRNA sense strand
ugccagaacaccucuuauu

SEQ ID NO: 2180940 - RNA, 19 nt, Homo sapiens
  misc_RNA (1)...(19): siRNA sense strand
gcaacaccacauccucaga

SEQ ID NO: 2180941 - RNA, 19 nt, Homo sapiens
  misc_RNA (1)...(19): siRNA sense strand
ccaggaaggccgagugaag

SEQ ID NO: 2180942 - RNA, 19 nt, Homo sapiens
  misc_RNA (1)...(19): siRNA sense strand
cgaggaguuuggcuucauc

SEQ ID NO: 2180943 - RNA, 19 nt, Homo sapiens
  misc_RNA (1)...(19): siRNA sense strand
caauaucugugagguucug

SEQ ID NO: 2180944 - RNA, 19 nt, Homo sapiens
  misc_RNA (1)...(19): siRNA sense strand
ggagggaaggagcacauca

SEQ ID NO: 2180945 - RNA, 19 nt, Homo sapiens
  misc_RNA (1)...(19): siRNA sense strand
aaguucaccucuacaagug

SEQ ID NO: 2180946 - RNA, 19 nt, Homo sapiens
  misc_RNA (1)...(19): siRNA sense strand
ggagcauugucaguggaaa

SEQ ID NO: 2180947 - RNA, 19 nt, Homo sapiens
  misc_RNA (1)...(19): siRNA sense strand
acacacccaucgccguaug

SEQ ID NO: 2180948 - RNA, 19 nt, Homo sapiens
  misc_RNA (1)...(19): siRNA sense strand
augaagggauggagaucaa

SEQ ID NO: 2180949 - RNA, 19 nt, Homo sapiens
  misc_RNA (1)...(19): siRNA sense strand
gaccaacuucaccuacuau

SEQ ID NO: 2180950 - RNA, 19 nt, Homo sapiens
  misc_RNA (1)...(19): siRNA sense strand
ggagaaccugggccuggaa

SEQ ID NO: 2180951 - RNA, 19 nt, Homo sapiens
  misc_RNA (1)...(19): siRNA sense strand
acaacccagcucagaauaa

SEQ ID NO: 2180952 - RNA, 19 nt, Homo sapiens
  misc_RNA (1)...(19): siRNA sense strand
caccuggaccucauacaga

SEQ ID NO: 2180953 - RNA, 19 nt, Homo sapiens
  misc_RNA (1)...(19): siRNA sense strand
caccagcuuugucuucuac

SEQ ID NO: 2180954 - RNA, 19 nt, Homo sapiens
  misc_RNA (1)...(19): siRNA sense strand
gaucugcguggcugugugu

SEQ ID NO: 2180955 - RNA, 19 nt, Homo sapiens
  misc_RNA (1)...(19): siRNA sense strand
gacccagacuucgcaugug

SEQ ID NO: 2180956 - RNA, 19 nt, Homo sapiens
  misc_RNA (1)...(19): siRNA sense strand
cagcucagaauaaaguuca

SEQ ID NO: 2180957 - RNA, 19 nt, Homo sapiens
  misc_RNA (1)...(19): siRNA sense strand
ugacagucguguggaaugg

SEQ ID NO: 2180958 - RNA, 19 nt, Homo sapiens
  misc_RNA (1)...(19): siRNA sense strand
acgaaugcauccucaacau

SEQ ID NO: 2180959 - RNA, 19 nt, Homo sapiens
  misc_RNA (1)...(19): siRNA sense strand
uggaggugaucaagccuau

SEQ ID NO: 2180960 - RNA, 19 nt, Homo sapiens
  misc_RNA (1)...(19): siRNA sense strand
ugacccagacuucgcaugu

SEQ ID NO: 2180961 - RNA, 19 nt, Homo sapiens
  misc_RNA (1)...(19): siRNA sense strand
caacaauaucuccgucucu

SEQ ID NO: 2180962 - RNA, 19 nt, Homo sapiens
  misc_RNA (1)...(19): siRNA sense strand
cauugucaguggaaacaca

SEQ ID NO: 2180963 - RNA, 19 nt, Homo sapiens
  misc_RNA (1)...(19): siRNA sense strand
ucagaugaggugcuagaga

SEQ ID NO: 2180964 - RNA, 19 nt, Homo sapiens
  misc_RNA (1)...(19): siRNA sense strand
ccagaacaccucuuauucc

SEQ ID NO: 2180965 - RNA, 19 nt, Homo sapiens
  misc_RNA (1)...(19): siRNA sense strand
acaagaccaacuucaccua

SEQ ID NO: 2180966 - RNA, 19 nt, Homo sapiens
  misc_RNA (1)...(19): siRNA sense strand
gaucuccauccuacauugu

SEQ ID NO: 2180967 - RNA, 19 nt, Homo sapiens
  misc_RNA (1)...(19): siRNA sense strand
aaagcagcccugucucuuc

SEQ ID NO: 2180968 - RNA, 19 nt, Homo sapiens
  misc_RNA (1)...(19): siRNA sense strand
ucuauuacuucaugacacu

SEQ ID NO: 2180969 - RNA, 19 nt, Homo sapiens
  misc_RNA (1)...(19): siRNA sense strand
cagcaccagcuuugucuuc

SEQ ID NO: 2180970 - RNA, 19 nt, Homo sapiens
  misc_RNA (1)...(19): siRNA sense strand
gugucggccugaauucaug

SEQ ID NO: 2180971 - RNA, 19 nt, Homo sapiens
  misc_RNA (1)...(19): siRNA sense strand
uaaaguucaccucuacaag

SEQ ID NO: 2180972 - RNA, 19 nt, Homo sapiens
  misc_RNA (1)...(19): siRNA sense strand
gcagaggagcuggccuguu

SEQ ID NO: 2180973 - RNA, 19 nt, Homo sapiens
  misc_RNA (1)...(19): siRNA sense strand
cagcguggcuacgaaugca

SEQ ID NO: 2180974 - RNA, 19 nt, Homo sapiens
  misc_RNA (1)...(19): siRNA sense strand
ccaccaucgugcggauuga

SEQ ID NO: 2180975 - RNA, 19 nt, Homo sapiens
  misc_RNA (1)...(19): siRNA sense strand
ccuggaauuucgcgacauc

SEQ ID NO: 2180976 - RNA, 19 nt, Homo sapiens
  misc_RNA (1)...(19): siRNA sense strand
caucaauaucugugagguu

SEQ ID NO: 2180977 - RNA, 19 nt, Homo sapiens
  misc_RNA (1)...(19): siRNA sense strand
guguggcccuggagugcaa

SEQ ID NO: 2180978 - RNA, 19 nt, Homo sapiens
  misc_RNA (1)...(19): siRNA sense strand
cgugcucauugccuauaaa

SEQ ID NO: 2180979 - RNA, 19 nt, Homo sapiens
  misc_RNA (1)...(19): siRNA sense strand
cugcucauccucaacaaga

SEQ ID NO: 2180980 - RNA, 19 nt, Homo sapiens
  misc_RNA (1)...(19): siRNA sense strand
caacgaaucuucccacuua

SEQ ID NO: 2180981 - RNA, 19 nt, Homo sapiens
  misc_RNA (1)...(19): siRNA sense strand
gaagaacucugacucaaga

SEQ ID NO: 2180982 - RNA, 19 nt, Homo sapiens
  misc_RNA (1)...(19): siRNA sense strand
gagaccaaaucaaguauua

SEQ ID NO: 2180983 - RNA, 19 nt, Homo sapiens
  misc_RNA (1)...(19): siRNA sense strand
ugacagaucuaagacauua

SEQ ID NO: 2180984 - RNA, 19 nt, Homo sapiens
  misc_RNA (1)...(19): siRNA sense strand
cgaaagaccuggaaucaau

SEQ ID NO: 2180985 - RNA, 19 nt, Homo sapiens
  misc_RNA (1)...(19): siRNA sense strand
gugauucucucuuggauua

SEQ ID NO: 2180986 - RNA, 19 nt, Homo sapiens
  misc_RNA (1)...(19): siRNA sense strand
ugaaaggcuuccuagauua

SEQ ID NO: 2180987 - RNA, 19 nt, Homo sapiens
  misc_RNA (1)...(19): siRNA sense strand
gaagaaauggaaagacaua

SEQ ID NO: 2180988 - RNA, 19 nt, Homo sapiens
  misc_RNA (1)...(19): siRNA sense strand
gaggauauguucaugaaau

SEQ ID NO: 2180989 - RNA, 19 nt, Homo sapiens
  misc_RNA (1)...(19): siRNA sense strand
caaggaagcuacugugguu

SEQ ID NO: 2180990 - RNA, 19 nt, Homo sapiens
  misc_RNA (1)...(19): siRNA sense strand
ggaagacuauucagacaga

SEQ ID NO: 2180991 - RNA, 19 nt, Homo sapiens
  misc_RNA (1)...(19): siRNA sense strand
ugaagcagccuguggauua

SEQ ID NO: 2180992 - RNA, 19 nt, Homo sapiens
  misc_RNA (1)...(19): siRNA sense strand
acaccaaccugcaagaaua

SEQ ID NO: 2180993 - RNA, 19 nt, Homo sapiens
  misc_RNA (1)...(19): siRNA sense strand
ggccaaggcucaucacauu

SEQ ID NO: 2180994 - RNA, 19 nt, Homo sapiens
  misc_RNA (1)...(19): siRNA sense strand
gacaauacuuugauguuug

SEQ ID NO: 2180995 - RNA, 19 nt, Homo sapiens
  misc_RNA (1)...(19): siRNA sense strand
caacagcucuuggaucaug

SEQ ID NO: 2180996 - RNA, 19 nt, Homo sapiens
  misc_RNA (1)...(19): siRNA sense strand
gcccugaccucuucacaaa

SEQ ID NO: 2180997 - RNA, 19 nt, Homo sapiens
  misc_RNA (1)...(19): siRNA sense strand
gaauacgaauaccaauuga

SEQ ID NO: 2180998 - RNA, 19 nt, Homo sapiens
  misc_RNA (1)...(19): siRNA sense strand
ccugaccucuucacaaaua

SEQ ID NO: 2180999 - RNA, 19 nt, Homo sapiens
  misc_RNA (1)...(19): siRNA sense strand
gaacaacccaggccaagau

SEQ ID NO: 2181000 - RNA, 19 nt, Homo sapiens
  misc_RNA (1)...(19): siRNA sense strand
gaaacgagagguuauuuua

SEQ ID NO: 2181001 - RNA, 19 nt, Homo sapiens
  misc_RNA (1)...(19): siRNA sense strand
gagaauaggagaccaaauc

SEQ ID NO: 2181002 - RNA, 19 nt, Homo sapiens
  misc_RNA (1)...(19): siRNA sense strand
ggaaucaggaacagcuuua

SEQ ID NO: 2181003 - RNA, 19 nt, Homo sapiens
  misc_RNA (1)...(19): siRNA sense strand
cuaggaacaugguguauau

SEQ ID NO: 2181004 - RNA, 19 nt, Homo sapiens
  misc_RNA (1)...(19): siRNA sense strand
cuacacagauacuauuaga

SEQ ID NO: 2181005 - RNA, 19 nt, Homo sapiens
  misc_RNA (1)...(19): siRNA sense strand
gaucuacucuggguaacaa

SEQ ID NO: 2181006 - RNA, 19 nt, Homo sapiens
  misc_RNA (1)...(19): siRNA sense strand
caaaguggcagaauacgaa

SEQ ID NO: 2181007 - RNA, 19 nt, Homo sapiens
  misc_RNA (1)...(19): siRNA sense strand
ggacuacacagauacuauu

SEQ ID NO: 2181008 - RNA, 19 nt, Homo sapiens
  misc_RNA (1)...(19): siRNA sense strand
gaagggugguaauguggaa

SEQ ID NO: 2181009 - RNA, 19 nt, Homo sapiens
  misc_RNA (1)...(19): siRNA sense strand
gaaaggcuuccuagauuau

SEQ ID NO: 2181010 - RNA, 19 nt, Homo sapiens
  misc_RNA (1)...(19): siRNA sense strand
ccacuguucuauucugaaa

SEQ ID NO: 2181011 - RNA, 19 nt, Homo sapiens
  misc_RNA (1)...(19): siRNA sense strand
uagaagaaauggaaagaca

SEQ ID NO: 2181012 - RNA, 19 nt, Homo sapiens
  misc_RNA (1)...(19): siRNA sense strand
gaaauuaucgcuguuccuu

SEQ ID NO: 2181013 - RNA, 19 nt, Homo sapiens
  misc_RNA (1)...(19): siRNA sense strand
ggauuuauauggugucucu

SEQ ID NO: 2181014 - RNA, 19 nt, Homo sapiens
  misc_RNA (1)...(19): siRNA sense strand
uuaggaaacucaagugaug

SEQ ID NO: 2181015 - RNA, 19 nt, Homo sapiens
  misc_RNA (1)...(19): siRNA sense strand
gaaccaagggauuuauaug

SEQ ID NO: 2181016 - RNA, 19 nt, Homo sapiens
  misc_RNA (1)...(19): siRNA sense strand
cuacuuugcucauugcuau

SEQ ID NO: 2181017 - RNA, 19 nt, Homo sapiens
  misc_RNA (1)...(19): siRNA sense strand
gaauaccaauugacuguac

SEQ ID NO: 2181018 - RNA, 19 nt, Homo sapiens
  misc_RNA (1)...(19): siRNA sense strand
cacauuggcuggcagagaa

SEQ ID NO: 2181019 - RNA, 19 nt, Homo sapiens
  misc_RNA (1)...(19): siRNA sense strand
augaaaggcuuccuagauu

SEQ ID NO: 2181020 - RNA, 19 nt, Homo sapiens
  misc_RNA (1)...(19): siRNA sense strand
ugaagaugcuuacaaagag

SEQ ID NO: 2181021 - RNA, 19 nt, Homo sapiens
  misc_RNA (1)...(19): siRNA sense strand
auucucagcuugcaaguuu

SEQ ID NO: 2181022 - RNA, 19 nt, Homo sapiens
  misc_RNA (1)...(19): siRNA sense strand
gcucauugcuauccauaca

SEQ ID NO: 2181023 - RNA, 19 nt, Homo sapiens
  misc_RNA (1)...(19): siRNA sense strand
gcucuuggaucaugaaagg

SEQ ID NO: 2181024 - RNA, 19 nt, Homo sapiens
  misc_RNA (1)...(19): siRNA sense strand
ugauagacauuacauugga

SEQ ID NO: 2181025 - RNA, 19 nt, Homo sapiens
  misc_RNA (1)...(19): siRNA sense strand
gagaaacgagagguuauuu

SEQ ID NO: 2181026 - RNA, 19 nt, Homo sapiens
  misc_RNA (1)...(19): siRNA sense strand
ggaagcuacugugguuuau

SEQ ID NO: 2181027 - RNA, 19 nt, Homo sapiens
  misc_RNA (1)...(19): siRNA sense strand
caccaaaccugcuagucuu

SEQ ID NO: 2181028 - RNA, 19 nt, Homo sapiens
  misc_RNA (1)...(19): siRNA sense strand
gucuacagauucacuauug

SEQ ID NO: 2181029 - RNA, 19 nt, Homo sapiens
  misc_RNA (1)...(19): siRNA sense strand
ggaacaugguguauauuuu

SEQ ID NO: 2181030 - RNA, 19 nt, Homo sapiens
  misc_RNA (1)...(19): siRNA sense strand
gcacucauuucagcacgaa

SEQ ID NO: 2181031 - RNA, 19 nt, Homo sapiens
  misc_RNA (1)...(19): siRNA sense strand
gaacaggaagggugguaau

SEQ ID NO: 2181032 - RNA, 19 nt, Homo sapiens
  misc_RNA (1)...(19): siRNA sense strand
gccacacgcuugcuaggaa

SEQ ID NO: 2181033 - RNA, 19 nt, Homo sapiens
  misc_RNA (1)...(19): siRNA sense strand
gaucaugaaaggcuuccua

SEQ ID NO: 2181034 - RNA, 19 nt, Homo sapiens
  misc_RNA (1)...(19): siRNA sense strand
ggagaaacgagagguuauu

SEQ ID NO: 2181035 - RNA, 19 nt, Homo sapiens
  misc_RNA (1)...(19): siRNA sense strand
agaauacgaauaccaauug

SEQ ID NO: 2181036 - RNA, 19 nt, Homo sapiens
  misc_RNA (1)...(19): siRNA sense strand
gaaagaccuggaaucaaug

SEQ ID NO: 2181037 - RNA, 19 nt, Homo sapiens
  misc_RNA (1)...(19): siRNA sense strand
ggaacagcuuuaccaugga

SEQ ID NO: 2181038 - RNA, 19 nt, Homo sapiens
  misc_RNA (1)...(19): siRNA sense strand
gaagagcaaagaaggaaca

SEQ ID NO: 2181039 - RNA, 19 nt, Homo sapiens
  misc_RNA (1)...(19): siRNA sense strand
gguagugacagaucuaaga

SEQ ID NO: 2181040 - RNA, 19 nt, Homo sapiens
  misc_RNA (1)...(19): siRNA sense strand
ucucuuacauggacauuuc

SEQ ID NO: 2181041 - RNA, 19 nt, Homo sapiens
  misc_RNA (1)...(19): siRNA sense strand
caggaauagucuacagauu

SEQ ID NO: 2181042 - RNA, 19 nt, Homo sapiens
  misc_RNA (1)...(19): siRNA sense strand
uauauggugucucuucuuc

SEQ ID NO: 2181043 - RNA, 19 nt, Homo sapiens
  misc_RNA (1)...(19): siRNA sense strand
ccugaaagaauuagaagaa

SEQ ID NO: 2181044 - RNA, 19 nt, Homo sapiens
  misc_RNA (1)...(19): siRNA sense strand
caggaagggugguaaugug

SEQ ID NO: 2181045 - RNA, 19 nt, Homo sapiens
  misc_RNA (1)...(19): siRNA sense strand
gacauuauacuuacagcaa

SEQ ID NO: 2181046 - RNA, 19 nt, Homo sapiens
  misc_RNA (1)...(19): siRNA sense strand
gaucuucauggccauagua

SEQ ID NO: 2181047 - RNA, 19 nt, Homo sapiens
  misc_RNA (1)...(19): siRNA sense strand
caugaaaggcuuccuagau

SEQ ID NO: 2181048 - RNA, 19 nt, Homo sapiens
  misc_RNA (1)...(19): siRNA sense strand
gcuaggaacaugguguaua

SEQ ID NO: 2181049 - RNA, 19 nt, Homo sapiens
  misc_RNA (1)...(19): siRNA sense strand
cgccauuauuucucucuua

SEQ ID NO: 2181050 - RNA, 19 nt, Homo sapiens
  misc_RNA (1)...(19): siRNA sense strand
uaggagaccaaaucaagua

SEQ ID NO: 2181051 - RNA, 19 nt, Homo sapiens
  misc_RNA (1)...(19): siRNA sense strand
gaagcagccuguggauuac

SEQ ID NO: 2181052 - RNA, 19 nt, Homo sapiens
  misc_RNA (1)...(19): siRNA sense strand
gauucucucuuggauuauu

SEQ ID NO: 2181053 - RNA, 19 nt, Homo sapiens
  misc_RNA (1)...(19): siRNA sense strand
aaacgaggcacucauuuca

SEQ ID NO: 2181054 - RNA, 19 nt, Homo sapiens
  misc_RNA (1)...(19): siRNA sense strand
uagucaaaguggcagaaua

SEQ ID NO: 2181055 - RNA, 19 nt, Homo sapiens
  misc_RNA (1)...(19): siRNA sense strand
acauggacauuucaauuuc

SEQ ID NO: 2181056 - RNA, 19 nt, Homo sapiens
  misc_RNA (1)...(19): siRNA sense strand
gcacgaaagaccuggaauc

SEQ ID NO: 2181057 - RNA, 19 nt, Homo sapiens
  misc_RNA (1)...(19): siRNA sense strand
caaacgaggcacucauuuc

SEQ ID NO: 2181058 - RNA, 19 nt, Homo sapiens
  misc_RNA (1)...(19): siRNA sense strand
gacuacacagauacuauua

SEQ ID NO: 2181059 - RNA, 19 nt, Homo sapiens
  misc_RNA (1)...(19): siRNA sense strand
uuucuggcaucaauaauga

SEQ ID NO: 2181060 - RNA, 19 nt, Homo sapiens
  misc_RNA (1)...(19): siRNA sense strand
cuucaucggugugcacuuu

SEQ ID NO: 2181061 - RNA, 19 nt, Homo sapiens
  misc_RNA (1)...(19): siRNA sense strand
guccugagccaguguauau

SEQ ID NO: 2181062 - RNA, 19 nt, Homo sapiens
  misc_RNA (1)...(19): siRNA sense strand
gagcaggaauagucuacag

SEQ ID NO: 2181063 - RNA, 19 nt, Homo sapiens
  misc_RNA (1)...(19): siRNA sense strand
uaauaugcgagcaggaaua

SEQ ID NO: 2181064 - RNA, 19 nt, Homo sapiens
  misc_RNA (1)...(19): siRNA sense strand
cagaauacgaauaccaauu

SEQ ID NO: 2181065 - RNA, 19 nt, Homo sapiens
  misc_RNA (1)...(19): siRNA sense strand
gauagacauuacauuggau

SEQ ID NO: 2181066 - RNA, 19 nt, Homo sapiens
  misc_RNA (1)...(19): siRNA sense strand
ccaaaccugcuagucuuua

SEQ ID NO: 2181067 - RNA, 19 nt, Homo sapiens
  misc_RNA (1)...(19): siRNA sense strand
gauucacuauugucaacuu

SEQ ID NO: 2181068 - RNA, 19 nt, Homo sapiens
  misc_RNA (1)...(19): siRNA sense strand
gaagacuauucagacagaa

SEQ ID NO: 2181069 - RNA, 19 nt, Homo sapiens
  misc_RNA (1)...(19): siRNA sense strand
uacagaagguagucaaagu

SEQ ID NO: 2181070 - RNA, 19 nt, Homo sapiens
  misc_RNA (1)...(19): siRNA sense strand
agacauauaacccuggaaa

SEQ ID NO: 2181071 - RNA, 19 nt, Homo sapiens
  misc_RNA (1)...(19): siRNA sense strand
caaguuuaauguccagaag

SEQ ID NO: 2181072 - RNA, 19 nt, Homo sapiens
  misc_RNA (1)...(19): siRNA sense strand
gaacucugacucaagaaag

SEQ ID NO: 2181073 - RNA, 19 nt, Homo sapiens
  misc_RNA (1)...(19): siRNA sense strand
gaauaggagaccaaaucaa

SEQ ID NO: 2181074 - RNA, 19 nt, Homo sapiens
  misc_RNA (1)...(19): siRNA sense strand
cugaagaugcuuacaaaga

SEQ ID NO: 2181075 - RNA, 19 nt, Homo sapiens
  misc_RNA (1)...(19): siRNA sense strand
aauuaucgcuguuccuuag

SEQ ID NO: 2181076 - RNA, 19 nt, Homo sapiens
  misc_RNA (1)...(19): siRNA sense strand
gcggaaggcugugauucug

SEQ ID NO: 2181077 - RNA, 19 nt, Homo sapiens
  misc_RNA (1)...(19): siRNA sense strand
gcaggaauagucuacagau

SEQ ID NO: 2181078 - RNA, 19 nt, Homo sapiens
  misc_RNA (1)...(19): siRNA sense strand
gguaaccgaacaccuuuga

SEQ ID NO: 2181079 - RNA, 19 nt, Homo sapiens
  misc_RNA (1)...(19): siRNA sense strand
gcaaguuuaauguccagaa

SEQ ID NO: 2181080 - RNA, 19 nt, Homo sapiens
  misc_RNA (1)...(19): siRNA sense strand
caacgaaucuucccacuua

SEQ ID NO: 2181081 - RNA, 19 nt, Homo sapiens
  misc_RNA (1)...(19): siRNA sense strand
gaagaacucugacucaaga

SEQ ID NO: 2181082 - RNA, 19 nt, Homo sapiens
  misc_RNA (1)...(19): siRNA sense strand
gagaccaaaucaaguauua

SEQ ID NO: 2181083 - RNA, 19 nt, Homo sapiens
  misc_RNA (1)...(19): siRNA sense strand
ugacagaucuaagacauua

SEQ ID NO: 2181084 - RNA, 19 nt, Homo sapiens
  misc_RNA (1)...(19): siRNA sense strand
cgaaagaccuggaaucaau

SEQ ID NO: 2181085 - RNA, 19 nt, Homo sapiens
  misc_RNA (1)...(19): siRNA sense strand
gugauucucucuuggauua

SEQ ID NO: 2181086 - RNA, 19 nt, Homo sapiens
  misc_RNA (1)...(19): siRNA sense strand
ugaaaggcuuccuagauua

SEQ ID NO: 2181087 - RNA, 19 nt, Homo sapiens
  misc_RNA (1)...(19): siRNA sense strand
gaagaaauggaaagacaua

SEQ ID NO: 2181088 - RNA, 19 nt, Homo sapiens
  misc_RNA (1)...(19): siRNA sense strand
gaggauauguucaugaaau

SEQ ID NO: 2181089 - RNA, 19 nt, Homo sapiens
  misc_RNA (1)...(19): siRNA sense strand
caaggaagcuacugugguu

SEQ ID NO: 2181090 - RNA, 19 nt, Homo sapiens
  misc_RNA (1)...(19): siRNA sense strand
ggaagacuauucagacaga

SEQ ID NO: 2181091 - RNA, 19 nt, Homo sapiens
  misc_RNA (1)...(19): siRNA sense strand
ugaagcagccuguggauua

SEQ ID NO: 2181092 - RNA, 19 nt, Homo sapiens
  misc_RNA (1)...(19): siRNA sense strand
acaccaaccugcaagaaua

SEQ ID NO: 2181093 - RNA, 19 nt, Homo sapiens
  misc_RNA (1)...(19): siRNA sense strand
ggccaaggcucaucacauu

SEQ ID NO: 2181094 - RNA, 19 nt, Homo sapiens
  misc_RNA (1)...(19): siRNA sense strand
gacaauacuuugauguuug

SEQ ID NO: 2181095 - RNA, 19 nt, Homo sapiens
  misc_RNA (1)...(19): siRNA sense strand
caacagcucuuggaucaug

SEQ ID NO: 2181096 - RNA, 19 nt, Homo sapiens
  misc_RNA (1)...(19): siRNA sense strand
gcccugaccucuucacaaa

SEQ ID NO: 2181097 - RNA, 19 nt, Homo sapiens
  misc_RNA (1)...(19): siRNA sense strand
gaauacgaauaccaauuga

SEQ ID NO: 2181098 - RNA, 19 nt, Homo sapiens
  misc_RNA (1)...(19): siRNA sense strand
ccugaccucuucacaaaua

SEQ ID NO: 2181099 - RNA, 19 nt, Homo sapiens
  misc_RNA (1)...(19): siRNA sense strand
gaacaacccaggccaagau

SEQ ID NO: 2181100 - RNA, 19 nt, Homo sapiens
  misc_RNA (1)...(19): siRNA sense strand
gaaacgagagguuauuuua

SEQ ID NO: 2181101 - RNA, 19 nt, Homo sapiens
  misc_RNA (1)...(19): siRNA sense strand
gagaauaggagaccaaauc

SEQ ID NO: 2181102 - RNA, 19 nt, Homo sapiens
  misc_RNA (1)...(19): siRNA sense strand
ggaaucaggaacagcuuua

SEQ ID NO: 2181103 - RNA, 19 nt, Homo sapiens
  misc_RNA (1)...(19): siRNA sense strand
cuaggaacaugguguauau

SEQ ID NO: 2181104 - RNA, 19 nt, Homo sapiens
  misc_RNA (1)...(19): siRNA sense strand
cuacacagauacuauuaga

SEQ ID NO: 2181105 - RNA, 19 nt, Homo sapiens
  misc_RNA (1)...(19): siRNA sense strand
gaucuacucuggguaacaa

SEQ ID NO: 2181106 - RNA, 19 nt, Homo sapiens
  misc_RNA (1)...(19): siRNA sense strand
caaaguggcagaauacgaa

SEQ ID NO: 2181107 - RNA, 19 nt, Homo sapiens
  misc_RNA (1)...(19): siRNA sense strand
ggacuacacagauacuauu

SEQ ID NO: 2181108 - RNA, 19 nt, Homo sapiens
  misc_RNA (1)...(19): siRNA sense strand
gaagggugguaauguggaa

SEQ ID NO: 2181109 - RNA, 19 nt, Homo sapiens
  misc_RNA (1)...(19): siRNA sense strand
gaaaggcuuccuagauuau

SEQ ID NO: 2181110 - RNA, 19 nt, Homo sapiens
  misc_RNA (1)...(19): siRNA sense strand
ccacuguucuauucugaaa

SEQ ID NO: 2181111 - RNA, 19 nt, Homo sapiens
  misc_RNA (1)...(19): siRNA sense strand
uagaagaaauggaaagaca

SEQ ID NO: 2181112 - RNA, 19 nt, Homo sapiens
  misc_RNA (1)...(19): siRNA sense strand
gaaauuaucgcuguuccuu

SEQ ID NO: 2181113 - RNA, 19 nt, Homo sapiens
  misc_RNA (1)...(19): siRNA sense strand
ggauuuauauggugucucu

SEQ ID NO: 2181114 - RNA, 19 nt, Homo sapiens
  misc_RNA (1)...(19): siRNA sense strand
uuaggaaacucaagugaug

SEQ ID NO: 2181115 - RNA, 19 nt, Homo sapiens
  misc_RNA (1)...(19): siRNA sense strand
gaaccaagggauuuauaug

SEQ ID NO: 2181116 - RNA, 19 nt, Homo sapiens
  misc_RNA (1)...(19): siRNA sense strand
cuacuuugcucauugcuau

SEQ ID NO: 2181117 - RNA, 19 nt, Homo sapiens
  misc_RNA (1)...(19): siRNA sense strand
gaauaccaauugacuguac

SEQ ID NO: 2181118 - RNA, 19 nt, Homo sapiens
  misc_RNA (1)...(19): siRNA sense strand
cacauuggcuggcagagaa

SEQ ID NO: 2181119 - RNA, 19 nt, Homo sapiens
  misc_RNA (1)...(19): siRNA sense strand
augaaaggcuuccuagauu

SEQ ID NO: 2181120 - RNA, 19 nt, Homo sapiens
  misc_RNA (1)...(19): siRNA sense strand
ugaagaugcuuacaaagag

SEQ ID NO: 2181121 - RNA, 19 nt, Homo sapiens
  misc_RNA (1)...(19): siRNA sense strand
auucucagcuugcaaguuu

SEQ ID NO: 2181122 - RNA, 19 nt, Homo sapiens
  misc_RNA (1)...(19): siRNA sense strand
gcucauugcuauccauaca

SEQ ID NO: 2181123 - RNA, 19 nt, Homo sapiens
  misc_RNA (1)...(19): siRNA sense strand
gcucuuggaucaugaaagg

SEQ ID NO: 2181124 - RNA, 19 nt, Homo sapiens
  misc_RNA (1)...(19): siRNA sense strand
ugauagacauuacauugga

SEQ ID NO: 2181125 - RNA, 19 nt, Homo sapiens
  misc_RNA (1)...(19): siRNA sense strand
gagaaacgagagguuauuu

SEQ ID NO: 2181126 - RNA, 19 nt, Homo sapiens
  misc_RNA (1)...(19): siRNA sense strand
ggaagcuacugugguuuau

SEQ ID NO: 2181127 - RNA, 19 nt, Homo sapiens
  misc_RNA (1)...(19): siRNA sense strand
caccaaaccugcuagucuu

SEQ ID NO: 2181128 - RNA, 19 nt, Homo sapiens
  misc_RNA (1)...(19): siRNA sense strand
gucuacagauucacuauug

SEQ ID NO: 2181129 - RNA, 19 nt, Homo sapiens
  misc_RNA (1)...(19): siRNA sense strand
ggaacaugguguauauuuu

SEQ ID NO: 2181130 - RNA, 19 nt, Homo sapiens
  misc_RNA (1)...(19): siRNA sense strand
gcacucauuucagcacgaa

SEQ ID NO: 2181131 - RNA, 19 nt, Homo sapiens
  misc_RNA (1)...(19): siRNA sense strand
gaacaggaagggugguaau

SEQ ID NO: 2181132 - RNA, 19 nt, Homo sapiens
  misc_RNA (1)...(19): siRNA sense strand
gccacacgcuugcuaggaa

SEQ ID NO: 2181133 - RNA, 19 nt, Homo sapiens
  misc_RNA (1)...(19): siRNA sense strand
gaucaugaaaggcuuccua

SEQ ID NO: 2181134 - RNA, 19 nt, Homo sapiens
  misc_RNA (1)...(19): siRNA sense strand
ggagaaacgagagguuauu

SEQ ID NO: 2181135 - RNA, 19 nt, Homo sapiens
  misc_RNA (1)...(19): siRNA sense strand
agaauacgaauaccaauug

SEQ ID NO: 2181136 - RNA, 19 nt, Homo sapiens
  misc_RNA (1)...(19): siRNA sense strand
gaaagaccuggaaucaaug

SEQ ID NO: 2181137 - RNA, 19 nt, Homo sapiens
  misc_RNA (1)...(19): siRNA sense strand
ggaacagcuuuaccaugga

SEQ ID NO: 2181138 - RNA, 19 nt, Homo sapiens
  misc_RNA (1)...(19): siRNA sense strand
gaagagcaaagaaggaaca

SEQ ID NO: 2181139 - RNA, 19 nt, Homo sapiens
  misc_RNA (1)...(19): siRNA sense strand
gguagugacagaucuaaga

SEQ ID NO: 2181140 - RNA, 19 nt, Homo sapiens
  misc_RNA (1)...(19): siRNA sense strand
ucucuuacauggacauuuc

SEQ ID NO: 2181141 - RNA, 19 nt, Homo sapiens
  misc_RNA (1)...(19): siRNA sense strand
caggaauagucuacagauu

SEQ ID NO: 2181142 - RNA, 19 nt, Homo sapiens
  misc_RNA (1)...(19): siRNA sense strand
uauauggugucucuucuuc

SEQ ID NO: 2181143 - RNA, 19 nt, Homo sapiens
  misc_RNA (1)...(19): siRNA sense strand
ccugaaagaauuagaagaa

SEQ ID NO: 2181144 - RNA, 19 nt, Homo sapiens
  misc_RNA (1)...(19): siRNA sense strand
caggaagggugguaaugug

SEQ ID NO: 2181145 - RNA, 19 nt, Homo sapiens
  misc_RNA (1)...(19): siRNA sense strand
gacauuauacuuacagcaa

SEQ ID NO: 2181146 - RNA, 19 nt, Homo sapiens
  misc_RNA (1)...(19): siRNA sense strand
gaucuucauggccauagua

SEQ ID NO: 2181147 - RNA, 19 nt, Homo sapiens
  misc_RNA (1)...(19): siRNA sense strand
caugaaaggcuuccuagau

SEQ ID NO: 2181148 - RNA, 19 nt, Homo sapiens
  misc_RNA (1)...(19): siRNA sense strand
gcuaggaacaugguguaua

SEQ ID NO: 2181149 - RNA, 19 nt, Homo sapiens
  misc_RNA (1)...(19): siRNA sense strand
cgccauuauuucucucuua

SEQ ID NO: 2181150 - RNA, 19 nt, Homo sapiens
  misc_RNA (1)...(19): siRNA sense strand
uaggagaccaaaucaagua

SEQ ID NO: 2181151 - RNA, 19 nt, Homo sapiens
  misc_RNA (1)...(19): siRNA sense strand
gaagcagccuguggauuac

SEQ ID NO: 2181152 - RNA, 19 nt, Homo sapiens
  misc_RNA (1)...(19): siRNA sense strand
gauucucucuuggauuauu

SEQ ID NO: 2181153 - RNA, 19 nt, Homo sapiens
  misc_RNA (1)...(19): siRNA sense strand
aaacgaggcacucauuuca

SEQ ID NO: 2181154 - RNA, 19 nt, Homo sapiens
  misc_RNA (1)...(19): siRNA sense strand
uagucaaaguggcagaaua

SEQ ID NO: 2181155 - RNA, 19 nt, Homo sapiens
  misc_RNA (1)...(19): siRNA sense strand
acauggacauuucaauuuc

SEQ ID NO: 2181156 - RNA, 19 nt, Homo sapiens
  misc_RNA (1)...(19): siRNA sense strand
gcacgaaagaccuggaauc

SEQ ID NO: 2181157 - RNA, 19 nt, Homo sapiens
  misc_RNA (1)...(19): siRNA sense strand
caaacgaggcacucauuuc

SEQ ID NO: 2181158 - RNA, 19 nt, Homo sapiens
  misc_RNA (1)...(19): siRNA sense strand
gacuacacagauacuauua

SEQ ID NO: 2181159 - RNA, 19 nt, Homo sapiens
  misc_RNA (1)...(19): siRNA sense strand
uuucuggcaucaauaauga

SEQ ID NO: 2181160 - RNA, 19 nt, Homo sapiens
  misc_RNA (1)...(19): siRNA sense strand
cuucaucggugugcacuuu

SEQ ID NO: 2181161 - RNA, 19 nt, Homo sapiens
  misc_RNA (1)...(19): siRNA sense strand
guccugagccaguguauau

SEQ ID NO: 2181162 - RNA, 19 nt, Homo sapiens
  misc_RNA (1)...(19): siRNA sense strand
gagcaggaauagucuacag

SEQ ID NO: 2181163 - RNA, 19 nt, Homo sapiens
  misc_RNA (1)...(19): siRNA sense strand
uaauaugcgagcaggaaua

SEQ ID NO: 2181164 - RNA, 19 nt, Homo sapiens
  misc_RNA (1)...(19): siRNA sense strand
cagaauacgaauaccaauu

SEQ ID NO: 2181165 - RNA, 19 nt, Homo sapiens
  misc_RNA (1)...(19): siRNA sense strand
gauagacauuacauuggau

SEQ ID NO: 2181166 - RNA, 19 nt, Homo sapiens
  misc_RNA (1)...(19): siRNA sense strand
ccaaaccugcuagucuuua

SEQ ID NO: 2181167 - RNA, 19 nt, Homo sapiens
  misc_RNA (1)...(19): siRNA sense strand
gauucacuauugucaacuu

SEQ ID NO: 2181168 - RNA, 19 nt, Homo sapiens
  misc_RNA (1)...(19): siRNA sense strand
gaagacuauucagacagaa

SEQ ID NO: 2181169 - RNA, 19 nt, Homo sapiens
  misc_RNA (1)...(19): siRNA sense strand
uacagaagguagucaaagu

SEQ ID NO: 2181170 - RNA, 19 nt, Homo sapiens
  misc_RNA (1)...(19): siRNA sense strand
agacauauaacccuggaaa

SEQ ID NO: 2181171 - RNA, 19 nt, Homo sapiens
  misc_RNA (1)...(19): siRNA sense strand
caaguuuaauguccagaag

SEQ ID NO: 2181172 - RNA, 19 nt, Homo sapiens
  misc_RNA (1)...(19): siRNA sense strand
gaacucugacucaagaaag

SEQ ID NO: 2181173 - RNA, 19 nt, Homo sapiens
  misc_RNA (1)...(19): siRNA sense strand
gaauaggagaccaaaucaa

SEQ ID NO: 2181174 - RNA, 19 nt, Homo sapiens
  misc_RNA (1)...(19): siRNA sense strand
cugaagaugcuuacaaaga

SEQ ID NO: 2181175 - RNA, 19 nt, Homo sapiens
  misc_RNA (1)...(19): siRNA sense strand
aauuaucgcuguuccuuag

SEQ ID NO: 2181176 - RNA, 19 nt, Homo sapiens
  misc_RNA (1)...(19): siRNA sense strand
gcggaaggcugugauucug

SEQ ID NO: 2181177 - RNA, 19 nt, Homo sapiens
  misc_RNA (1)...(19): siRNA sense strand
gcaggaauagucuacagau

SEQ ID NO: 2181178 - RNA, 19 nt, Homo sapiens
  misc_RNA (1)...(19): siRNA sense strand
gguaaccgaacaccuuuga

SEQ ID NO: 2181179 - RNA, 19 nt, Homo sapiens
  misc_RNA (1)...(19): siRNA sense strand
gcaaguuuaauguccagaa

SEQ ID NO: 2181180 - RNA, 19 nt, Homo sapiens
  misc_RNA (1)...(19): siRNA sense strand
gagcaaggauugacuuaua

SEQ ID NO: 2181181 - RNA, 19 nt, Homo sapiens
  misc_RNA (1)...(19): siRNA sense strand
ggaacgagaugauaugauu

SEQ ID NO: 2181182 - RNA, 19 nt, Homo sapiens
  misc_RNA (1)...(19): siRNA sense strand
gcaaaugggugaccuguug

SEQ ID NO: 2181183 - RNA, 19 nt, Homo sapiens
  misc_RNA (1)...(19): siRNA sense strand
gaacuaagaaggcagauaa

SEQ ID NO: 2181184 - RNA, 19 nt, Homo sapiens
  misc_RNA (1)...(19): siRNA sense strand
gcaaagagguuucugaucu

SEQ ID NO: 2181185 - RNA, 19 nt, Homo sapiens
  misc_RNA (1)...(19): siRNA sense strand
gaagacaggugguggauuc

SEQ ID NO: 2181186 - RNA, 19 nt, Homo sapiens
  misc_RNA (1)...(19): siRNA sense strand
gaaggcagauaauguggua

SEQ ID NO: 2181187 - RNA, 19 nt, Homo sapiens
  misc_RNA (1)...(19): siRNA sense strand
gaagggaccuggaacacuu

SEQ ID NO: 2181188 - RNA, 19 nt, Homo sapiens
  misc_RNA (1)...(19): siRNA sense strand
ggagcaagauggauugauu

SEQ ID NO: 2181189 - RNA, 19 nt, Homo sapiens
  misc_RNA (1)...(19): siRNA sense strand
gaagagggaucagaacuug

SEQ ID NO: 2181190 - RNA, 19 nt, Homo sapiens
  misc_RNA (1)...(19): siRNA sense strand
gaaguggucugucgagaug

SEQ ID NO: 2181191 - RNA, 19 nt, Homo sapiens
  misc_RNA (1)...(19): siRNA sense strand
caagaaagaugagauugaa

SEQ ID NO: 2181192 - RNA, 19 nt, Homo sapiens
  misc_RNA (1)...(19): siRNA sense strand
gaaauauguucuagcaaga

SEQ ID NO: 2181193 - RNA, 19 nt, Homo sapiens
  misc_RNA (1)...(19): siRNA sense strand
gaagugggcuggcuauagu

SEQ ID NO: 2181194 - RNA, 19 nt, Homo sapiens
  misc_RNA (1)...(19): siRNA sense strand
gaucagaacuugaaaagaa

SEQ ID NO: 2181195 - RNA, 19 nt, Homo sapiens
  misc_RNA (1)...(19): siRNA sense strand
gaucaacaaucgagcuaaa

SEQ ID NO: 2181196 - RNA, 19 nt, Homo sapiens
  misc_RNA (1)...(19): siRNA sense strand
gaaucuggcucuucuuaug

SEQ ID NO: 2181197 - RNA, 19 nt, Homo sapiens
  misc_RNA (1)...(19): siRNA sense strand
cauggaaucuguaguggua

SEQ ID NO: 2181198 - RNA, 19 nt, Homo sapiens
  misc_RNA (1)...(19): siRNA sense strand
caagauggauugauugcuu

SEQ ID NO: 2181199 - RNA, 19 nt, Homo sapiens
  misc_RNA (1)...(19): siRNA sense strand
gcagauuugugccaaugua

SEQ ID NO: 2181200 - RNA, 19 nt, Homo sapiens
  misc_RNA (1)...(19): siRNA sense strand
ugaagaaacuguuagacuu

SEQ ID NO: 2181201 - RNA, 19 nt, Homo sapiens
  misc_RNA (1)...(19): siRNA sense strand
gaaauuauacugacagcuu

SEQ ID NO: 2181202 - RNA, 19 nt, Homo sapiens
  misc_RNA (1)...(19): siRNA sense strand
gaauuaaucccagaacuaa

SEQ ID NO: 2181203 - RNA, 19 nt, Homo sapiens
  misc_RNA (1)...(19): siRNA sense strand
guauugagguugaacuaaa

SEQ ID NO: 2181204 - RNA, 19 nt, Homo sapiens
  misc_RNA (1)...(19): siRNA sense strand
uacaagaugugcaugauaa

SEQ ID NO: 2181205 - RNA, 19 nt, Homo sapiens
  misc_RNA (1)...(19): siRNA sense strand
cagccaggauuucuuauuu

SEQ ID NO: 2181206 - RNA, 19 nt, Homo sapiens
  misc_RNA (1)...(19): siRNA sense strand
gaaaugcucuuuggagaag

SEQ ID NO: 2181207 - RNA, 19 nt, Homo sapiens
  misc_RNA (1)...(19): siRNA sense strand
gaacuugacguugauguaa

SEQ ID NO: 2181208 - RNA, 19 nt, Homo sapiens
  misc_RNA (1)...(19): siRNA sense strand
gagagacccuccaauguuc

SEQ ID NO: 2181209 - RNA, 19 nt, Homo sapiens
  misc_RNA (1)...(19): siRNA sense strand
ggaauuaaucccagaacua

SEQ ID NO: 2181210 - RNA, 19 nt, Homo sapiens
  misc_RNA (1)...(19): siRNA sense strand
gcucauuuccuucuaauuu

SEQ ID NO: 2181211 - RNA, 19 nt, Homo sapiens
  misc_RNA (1)...(19): siRNA sense strand
ugaagaugcucgaaugauu

SEQ ID NO: 2181212 - RNA, 19 nt, Homo sapiens
  misc_RNA (1)...(19): siRNA sense strand
acacaaaccugacuucauc

SEQ ID NO: 2181213 - RNA, 19 nt, Homo sapiens
  misc_RNA (1)...(19): siRNA sense strand
gaggaucgacaacugauua

SEQ ID NO: 2181214 - RNA, 19 nt, Homo sapiens
  misc_RNA (1)...(19): siRNA sense strand
cugaacagcucauuaaaga

SEQ ID NO: 2181215 - RNA, 19 nt, Homo sapiens
  misc_RNA (1)...(19): siRNA sense strand
ugaagacacucgcagcuuu

SEQ ID NO: 2181216 - RNA, 19 nt, Homo sapiens
  misc_RNA (1)...(19): siRNA sense strand
gaacagcucauuaaagaag

SEQ ID NO: 2181217 - RNA, 19 nt, Homo sapiens
  misc_RNA (1)...(19): siRNA sense strand
ggacauugaaggauuauau

SEQ ID NO: 2181218 - RNA, 19 nt, Homo sapiens
  misc_RNA (1)...(19): siRNA sense strand
gcaagaaagaugagauuga

SEQ ID NO: 2181219 - RNA, 19 nt, Homo sapiens
  misc_RNA (1)...(19): siRNA sense strand
ggaauuggcucugcugaca

SEQ ID NO: 2181220 - RNA, 19 nt, Homo sapiens
  misc_RNA (1)...(19): siRNA sense strand
gaguauaagucagaaacua

SEQ ID NO: 2181221 - RNA, 19 nt, Homo sapiens
  misc_RNA (1)...(19): siRNA sense strand
guggagagcucauuuccuu

SEQ ID NO: 2181222 - RNA, 19 nt, Homo sapiens
  misc_RNA (1)...(19): siRNA sense strand
caacacgcuuuacagauga

SEQ ID NO: 2181223 - RNA, 19 nt, Homo sapiens
  misc_RNA (1)...(19): siRNA sense strand
gaaacagagugcuaaugau

SEQ ID NO: 2181224 - RNA, 19 nt, Homo sapiens
  misc_RNA (1)...(19): siRNA sense strand
cagaaacaguuaauagaga

SEQ ID NO: 2181225 - RNA, 19 nt, Homo sapiens
  misc_RNA (1)...(19): siRNA sense strand
ggaauacacucagauacug

SEQ ID NO: 2181226 - RNA, 19 nt, Homo sapiens
  misc_RNA (1)...(19): siRNA sense strand
ccaccuggauuuagucuga

SEQ ID NO: 2181227 - RNA, 19 nt, Homo sapiens
  misc_RNA (1)...(19): siRNA sense strand
gagauaaaguaagcaagaa

SEQ ID NO: 2181228 - RNA, 19 nt, Homo sapiens
  misc_RNA (1)...(19): siRNA sense strand
caacugauuauucgugaua

SEQ ID NO: 2181229 - RNA, 19 nt, Homo sapiens
  misc_RNA (1)...(19): siRNA sense strand
ggaggcaacuaguagaaau

SEQ ID NO: 2181230 - RNA, 19 nt, Homo sapiens
  misc_RNA (1)...(19): siRNA sense strand
gccaagauccucuguugua

SEQ ID NO: 2181231 - RNA, 19 nt, Homo sapiens
  misc_RNA (1)...(19): siRNA sense strand
ggaaguugcugaggugguu

SEQ ID NO: 2181232 - RNA, 19 nt, Homo sapiens
  misc_RNA (1)...(19): siRNA sense strand
ggagaucccugagccuuug

SEQ ID NO: 2181233 - RNA, 19 nt, Homo sapiens
  misc_RNA (1)...(19): siRNA sense strand
aaccagaugucauggcuua

SEQ ID NO: 2181234 - RNA, 19 nt, Homo sapiens
  misc_RNA (1)...(19): siRNA sense strand
gaaacuaauggcuggauuu

SEQ ID NO: 2181235 - RNA, 19 nt, Homo sapiens
  misc_RNA (1)...(19): siRNA sense strand
uaaaguugguuggagauuu

SEQ ID NO: 2181236 - RNA, 19 nt, Homo sapiens
  misc_RNA (1)...(19): siRNA sense strand
caucuugaaucuucucauu

SEQ ID NO: 2181237 - RNA, 19 nt, Homo sapiens
  misc_RNA (1)...(19): siRNA sense strand
ggagauaaaguaagcaaga

SEQ ID NO: 2181238 - RNA, 19 nt, Homo sapiens
  misc_RNA (1)...(19): siRNA sense strand
guaaaugaagggucucuaa

SEQ ID NO: 2181239 - RNA, 19 nt, Homo sapiens
  misc_RNA (1)...(19): siRNA sense strand
ggaaugcaauccacccaau

SEQ ID NO: 2181240 - RNA, 19 nt, Homo sapiens
  misc_RNA (1)...(19): siRNA sense strand
ccagucaccuuuaggcaaa

SEQ ID NO: 2181241 - RNA, 19 nt, Homo sapiens
  misc_RNA (1)...(19): siRNA sense strand
gaaaucagcacuguacuuc

SEQ ID NO: 2181242 - RNA, 19 nt, Homo sapiens
  misc_RNA (1)...(19): siRNA sense strand
acaaggagaagaaaucaua

SEQ ID NO: 2181243 - RNA, 19 nt, Homo sapiens
  misc_RNA (1)...(19): siRNA sense strand
acacaugaccagaguauaa

SEQ ID NO: 2181244 - RNA, 19 nt, Homo sapiens
  misc_RNA (1)...(19): siRNA sense strand
cuaaugauuucuucagcua

SEQ ID NO: 2181245 - RNA, 19 nt, Homo sapiens
  misc_RNA (1)...(19): siRNA sense strand
ugaaacagagugcuaauga

SEQ ID NO: 2181246 - RNA, 19 nt, Homo sapiens
  misc_RNA (1)...(19): siRNA sense strand
ccagagaccugaugaacca

SEQ ID NO: 2181247 - RNA, 19 nt, Homo sapiens
  misc_RNA (1)...(19): siRNA sense strand
gcucacgucuaccaucauu

SEQ ID NO: 2181248 - RNA, 19 nt, Homo sapiens
  misc_RNA (1)...(19): siRNA sense strand
gcaauacuaauccagaauu

SEQ ID NO: 2181249 - RNA, 19 nt, Homo sapiens
  misc_RNA (1)...(19): siRNA sense strand
acaauucacucucgucuuc

SEQ ID NO: 2181250 - RNA, 19 nt, Homo sapiens
  misc_RNA (1)...(19): siRNA sense strand
cauacaggcucuugucaga

SEQ ID NO: 2181251 - RNA, 19 nt, Homo sapiens
  misc_RNA (1)...(19): siRNA sense strand
aaacagagugcuaaugauu

SEQ ID NO: 2181252 - RNA, 19 nt, Homo sapiens
  misc_RNA (1)...(19): siRNA sense strand
ugaagaugcagaagaauuu

SEQ ID NO: 2181253 - RNA, 19 nt, Homo sapiens
  misc_RNA (1)...(19): siRNA sense strand
gcuguucaccuucuugaua

SEQ ID NO: 2181254 - RNA, 19 nt, Homo sapiens
  misc_RNA (1)...(19): siRNA sense strand
ugaagaugcuccagggauu

SEQ ID NO: 2181255 - RNA, 19 nt, Homo sapiens
  misc_RNA (1)...(19): siRNA sense strand
acaacacgcuuuacagaug

SEQ ID NO: 2181256 - RNA, 19 nt, Homo sapiens
  misc_RNA (1)...(19): siRNA sense strand
gagaaucacuacaaaagaa

SEQ ID NO: 2181257 - RNA, 19 nt, Homo sapiens
  misc_RNA (1)...(19): siRNA sense strand
ucacaagaguggcaaagau

SEQ ID NO: 2181258 - RNA, 19 nt, Homo sapiens
  misc_RNA (1)...(19): siRNA sense strand
guagacagcuugguagaag

SEQ ID NO: 2181259 - RNA, 19 nt, Homo sapiens
  misc_RNA (1)...(19): siRNA sense strand
gcucucugcuuuauuacuu

SEQ ID NO: 2181260 - RNA, 19 nt, Homo sapiens
  misc_RNA (1)...(19): siRNA sense strand
uaugaaaacugccucaaua

SEQ ID NO: 2181261 - RNA, 19 nt, Homo sapiens
  misc_RNA (1)...(19): siRNA sense strand
ucuaauagucuguccuuua

SEQ ID NO: 2181262 - RNA, 19 nt, Homo sapiens
  misc_RNA (1)...(19): siRNA sense strand
ggagaaagcaguacagcau

SEQ ID NO: 2181263 - RNA, 19 nt, Homo sapiens
  misc_RNA (1)...(19): siRNA sense strand
ucaacuggcucuaauaguc

SEQ ID NO: 2181264 - RNA, 19 nt, Homo sapiens
  misc_RNA (1)...(19): siRNA sense strand
gugccaauguaauggaaua

SEQ ID NO: 2181265 - RNA, 19 nt, Homo sapiens
  misc_RNA (1)...(19): siRNA sense strand
ggagggagauaaaguaagc

SEQ ID NO: 2181266 - RNA, 19 nt, Homo sapiens
  misc_RNA (1)...(19): siRNA sense strand
ugacguugauguaaaugaa

SEQ ID NO: 2181267 - RNA, 19 nt, Homo sapiens
  misc_RNA (1)...(19): siRNA sense strand
ggaaaugcucuuuggagaa

SEQ ID NO: 2181268 - RNA, 19 nt, Homo sapiens
  misc_RNA (1)...(19): siRNA sense strand
gugccaagauccucuguug

SEQ ID NO: 2181269 - RNA, 19 nt, Homo sapiens
  misc_RNA (1)...(19): siRNA sense strand
gaaacugccugggcuccaa

SEQ ID NO: 2181270 - RNA, 19 nt, Homo sapiens
  misc_RNA (1)...(19): siRNA sense strand
cuaaacugcuuucccuuug

SEQ ID NO: 2181271 - RNA, 19 nt, Homo sapiens
  misc_RNA (1)...(19): siRNA sense strand
gaagaugaccguacuuugc

SEQ ID NO: 2181272 - RNA, 19 nt, Homo sapiens
  misc_RNA (1)...(19): siRNA sense strand
agaauugucuccguggaua

SEQ ID NO: 2181273 - RNA, 19 nt, Homo sapiens
  misc_RNA (1)...(19): siRNA sense strand
gaucgacaacugauuauuc

SEQ ID NO: 2181274 - RNA, 19 nt, Homo sapiens
  misc_RNA (1)...(19): siRNA sense strand
ucuuguagcugaaguaaau

SEQ ID NO: 2181275 - RNA, 19 nt, Homo sapiens
  misc_RNA (1)...(19): siRNA sense strand
gaaacaagaauccacaucu

SEQ ID NO: 2181276 - RNA, 19 nt, Homo sapiens
  misc_RNA (1)...(19): siRNA sense strand
ugguaaacauugccagaua

SEQ ID NO: 2181277 - RNA, 19 nt, Homo sapiens
  misc_RNA (1)...(19): siRNA sense strand
gaaugagucaccaauguug

SEQ ID NO: 2181278 - RNA, 19 nt, Homo sapiens
  misc_RNA (1)...(19): siRNA sense strand
cgacuaucaugggcucuua

SEQ ID NO: 2181279 - RNA, 19 nt, Homo sapiens
  misc_RNA (1)...(19): siRNA sense strand
guaugcagauggguaauga

SEQ ID NO: 2181280 - RNA, 19 nt, Homo sapiens
  misc_RNA (1)...(19): siRNA sense strand
gagcaaggauugacuuaua

SEQ ID NO: 2181281 - RNA, 19 nt, Homo sapiens
  misc_RNA (1)...(19): siRNA sense strand
ggaacgagaugauaugauu

SEQ ID NO: 2181282 - RNA, 19 nt, Homo sapiens
  misc_RNA (1)...(19): siRNA sense strand
gcaaaugggugaccuguug

SEQ ID NO: 2181283 - RNA, 19 nt, Homo sapiens
  misc_RNA (1)...(19): siRNA sense strand
gaacuaagaaggcagauaa

SEQ ID NO: 2181284 - RNA, 19 nt, Homo sapiens
  misc_RNA (1)...(19): siRNA sense strand
gcaaagagguuucugaucu

SEQ ID NO: 2181285 - RNA, 19 nt, Homo sapiens
  misc_RNA (1)...(19): siRNA sense strand
gaagacaggugguggauuc

SEQ ID NO: 2181286 - RNA, 19 nt, Homo sapiens
  misc_RNA (1)...(19): siRNA sense strand
gaaggcagauaauguggua

SEQ ID NO: 2181287 - RNA, 19 nt, Homo sapiens
  misc_RNA (1)...(19): siRNA sense strand
gaagggaccuggaacacuu

SEQ ID NO: 2181288 - RNA, 19 nt, Homo sapiens
  misc_RNA (1)...(19): siRNA sense strand
ggagcaagauggauugauu

SEQ ID NO: 2181289 - RNA, 19 nt, Homo sapiens
  misc_RNA (1)...(19): siRNA sense strand
gaagagggaucagaacuug

SEQ ID NO: 2181290 - RNA, 19 nt, Homo sapiens
  misc_RNA (1)...(19): siRNA sense strand
gaaguggucugucgagaug

SEQ ID NO: 2181291 - RNA, 19 nt, Homo sapiens
  misc_RNA (1)...(19): siRNA sense strand
caagaaagaugagauugaa

SEQ ID NO: 2181292 - RNA, 19 nt, Homo sapiens
  misc_RNA (1)...(19): siRNA sense strand
gaaauauguucuagcaaga

SEQ ID NO: 2181293 - RNA, 19 nt, Homo sapiens
  misc_RNA (1)...(19): siRNA sense strand
gaagugggcuggcuauagu

SEQ ID NO: 2181294 - RNA, 19 nt, Homo sapiens
  misc_RNA (1)...(19): siRNA sense strand
gaucagaacuugaaaagaa

SEQ ID NO: 2181295 - RNA, 19 nt, Homo sapiens
  misc_RNA (1)...(19): siRNA sense strand
gaucaacaaucgagcuaaa

SEQ ID NO: 2181296 - RNA, 19 nt, Homo sapiens
  misc_RNA (1)...(19): siRNA sense strand
gaaucuggcucuucuuaug

SEQ ID NO: 2181297 - RNA, 19 nt, Homo sapiens
  misc_RNA (1)...(19): siRNA sense strand
cauggaaucuguaguggua

SEQ ID NO: 2181298 - RNA, 19 nt, Homo sapiens
  misc_RNA (1)...(19): siRNA sense strand
caagauggauugauugcuu

SEQ ID NO: 2181299 - RNA, 19 nt, Homo sapiens
  misc_RNA (1)...(19): siRNA sense strand
gcagauuugugccaaugua

SEQ ID NO: 2181300 - RNA, 19 nt, Homo sapiens
  misc_RNA (1)...(19): siRNA sense strand
ugaagaaacuguuagacuu

SEQ ID NO: 2181301 - RNA, 19 nt, Homo sapiens
  misc_RNA (1)...(19): siRNA sense strand
gaaauuauacugacagcuu

SEQ ID NO: 2181302 - RNA, 19 nt, Homo sapiens
  misc_RNA (1)...(19): siRNA sense strand
gaauuaaucccagaacuaa

SEQ ID NO: 2181303 - RNA, 19 nt, Homo sapiens
  misc_RNA (1)...(19): siRNA sense strand
guauugagguugaacuaaa

SEQ ID NO: 2181304 - RNA, 19 nt, Homo sapiens
  misc_RNA (1)...(19): siRNA sense strand
uacaagaugugcaugauaa

SEQ ID NO: 2181305 - RNA, 19 nt, Homo sapiens
  misc_RNA (1)...(19): siRNA sense strand
cagccaggauuucuuauuu

SEQ ID NO: 2181306 - RNA, 19 nt, Homo sapiens
  misc_RNA (1)...(19): siRNA sense strand
gaaaugcucuuuggagaag

SEQ ID NO: 2181307 - RNA, 19 nt, Homo sapiens
  misc_RNA (1)...(19): siRNA sense strand
gaacuugacguugauguaa

SEQ ID NO: 2181308 - RNA, 19 nt, Homo sapiens
  misc_RNA (1)...(19): siRNA sense strand
gagagacccuccaauguuc

SEQ ID NO: 2181309 - RNA, 19 nt, Homo sapiens
  misc_RNA (1)...(19): siRNA sense strand
ggaauuaaucccagaacua

SEQ ID NO: 2181310 - RNA, 19 nt, Homo sapiens
  misc_RNA (1)...(19): siRNA sense strand
gcucauuuccuucuaauuu

SEQ ID NO: 2181311 - RNA, 19 nt, Homo sapiens
  misc_RNA (1)...(19): siRNA sense strand
ugaagaugcucgaaugauu

SEQ ID NO: 2181312 - RNA, 19 nt, Homo sapiens
  misc_RNA (1)...(19): siRNA sense strand
acacaaaccugacuucauc

SEQ ID NO: 2181313 - RNA, 19 nt, Homo sapiens
  misc_RNA (1)...(19): siRNA sense strand
gaggaucgacaacugauua

SEQ ID NO: 2181314 - RNA, 19 nt, Homo sapiens
  misc_RNA (1)...(19): siRNA sense strand
cugaacagcucauuaaaga

SEQ ID NO: 2181315 - RNA, 19 nt, Homo sapiens
  misc_RNA (1)...(19): siRNA sense strand
ugaagacacucgcagcuuu

SEQ ID NO: 2181316 - RNA, 19 nt, Homo sapiens
  misc_RNA (1)...(19): siRNA sense strand
gaacagcucauuaaagaag

SEQ ID NO: 2181317 - RNA, 19 nt, Homo sapiens
  misc_RNA (1)...(19): siRNA sense strand
ggacauugaaggauuauau

SEQ ID NO: 2181318 - RNA, 19 nt, Homo sapiens
  misc_RNA (1)...(19): siRNA sense strand
gcaagaaagaugagauuga

SEQ ID NO: 2181319 - RNA, 19 nt, Homo sapiens
  misc_RNA (1)...(19): siRNA sense strand
ggaauuggcucugcugaca

SEQ ID NO: 2181320 - RNA, 19 nt, Homo sapiens
  misc_RNA (1)...(19): siRNA sense strand
gaguauaagucagaaacua

SEQ ID NO: 2181321 - RNA, 19 nt, Homo sapiens
  misc_RNA (1)...(19): siRNA sense strand
guggagagcucauuuccuu

SEQ ID NO: 2181322 - RNA, 19 nt, Homo sapiens
  misc_RNA (1)...(19): siRNA sense strand
caacacgcuuuacagauga

SEQ ID NO: 2181323 - RNA, 19 nt, Homo sapiens
  misc_RNA (1)...(19): siRNA sense strand
gaaacagagugcuaaugau

SEQ ID NO: 2181324 - RNA, 19 nt, Homo sapiens
  misc_RNA (1)...(19): siRNA sense strand
cagaaacaguuaauagaga

SEQ ID NO: 2181325 - RNA, 19 nt, Homo sapiens
  misc_RNA (1)...(19): siRNA sense strand
ggaauacacucagauacug

SEQ ID NO: 2181326 - RNA, 19 nt, Homo sapiens
  misc_RNA (1)...(19): siRNA sense strand
ccaccuggauuuagucuga

SEQ ID NO: 2181327 - RNA, 19 nt, Homo sapiens
  misc_RNA (1)...(19): siRNA sense strand
gagauaaaguaagcaagaa

SEQ ID NO: 2181328 - RNA, 19 nt, Homo sapiens
  misc_RNA (1)...(19): siRNA sense strand
caacugauuauucgugaua

SEQ ID NO: 2181329 - RNA, 19 nt, Homo sapiens
  misc_RNA (1)...(19): siRNA sense strand
ggaggcaacuaguagaaau

SEQ ID NO: 2181330 - RNA, 19 nt, Homo sapiens
  misc_RNA (1)...(19): siRNA sense strand
gccaagauccucuguugua

SEQ ID NO: 2181331 - RNA, 19 nt, Homo sapiens
  misc_RNA (1)...(19): siRNA sense strand
ggaaguugcugaggugguu

SEQ ID NO: 2181332 - RNA, 19 nt, Homo sapiens
  misc_RNA (1)...(19): siRNA sense strand
ggagaucccugagccuuug

SEQ ID NO: 2181333 - RNA, 19 nt, Homo sapiens
  misc_RNA (1)...(19): siRNA sense strand
aaccagaugucauggcuua

SEQ ID NO: 2181334 - RNA, 19 nt, Homo sapiens
  misc_RNA (1)...(19): siRNA sense strand
gaaacuaauggcuggauuu

SEQ ID NO: 2181335 - RNA, 19 nt, Homo sapiens
  misc_RNA (1)...(19): siRNA sense strand
uaaaguugguuggagauuu

SEQ ID NO: 2181336 - RNA, 19 nt, Homo sapiens
  misc_RNA (1)...(19): siRNA sense strand
caucuugaaucuucucauu

SEQ ID NO: 2181337 - RNA, 19 nt, Homo sapiens
  misc_RNA (1)...(19): siRNA sense strand
ggagauaaaguaagcaaga

SEQ ID NO: 2181338 - RNA, 19 nt, Homo sapiens
  misc_RNA (1)...(19): siRNA sense strand
guaaaugaagggucucuaa

SEQ ID NO: 2181339 - RNA, 19 nt, Homo sapiens
  misc_RNA (1)...(19): siRNA sense strand
ggaaugcaauccacccaau

SEQ ID NO: 2181340 - RNA, 19 nt, Homo sapiens
  misc_RNA (1)...(19): siRNA sense strand
ccagucaccuuuaggcaaa

SEQ ID NO: 2181341 - RNA, 19 nt, Homo sapiens
  misc_RNA (1)...(19): siRNA sense strand
gaaaucagcacuguacuuc

SEQ ID NO: 2181342 - RNA, 19 nt, Homo sapiens
  misc_RNA (1)...(19): siRNA sense strand
acaaggagaagaaaucaua

SEQ ID NO: 2181343 - RNA, 19 nt, Homo sapiens
  misc_RNA (1)...(19): siRNA sense strand
acacaugaccagaguauaa

SEQ ID NO: 2181344 - RNA, 19 nt, Homo sapiens
  misc_RNA (1)...(19): siRNA sense strand
cuaaugauuucuucagcua

SEQ ID NO: 2181345 - RNA, 19 nt, Homo sapiens
  misc_RNA (1)...(19): siRNA sense strand
ugaaacagagugcuaauga

SEQ ID NO: 2181346 - RNA, 19 nt, Homo sapiens
  misc_RNA (1)...(19): siRNA sense strand
ccagagaccugaugaacca

SEQ ID NO: 2181347 - RNA, 19 nt, Homo sapiens
  misc_RNA (1)...(19): siRNA sense strand
gcucacgucuaccaucauu

SEQ ID NO: 2181348 - RNA, 19 nt, Homo sapiens
  misc_RNA (1)...(19): siRNA sense strand
gcaauacuaauccagaauu

SEQ ID NO: 2181349 - RNA, 19 nt, Homo sapiens
  misc_RNA (1)...(19): siRNA sense strand
acaauucacucucgucuuc

SEQ ID NO: 2181350 - RNA, 19 nt, Homo sapiens
  misc_RNA (1)...(19): siRNA sense strand
cauacaggcucuugucaga

SEQ ID NO: 2181351 - RNA, 19 nt, Homo sapiens
  misc_RNA (1)...(19): siRNA sense strand
aaacagagugcuaaugauu

SEQ ID NO: 2181352 - RNA, 19 nt, Homo sapiens
  misc_RNA (1)...(19): siRNA sense strand
ugaagaugcagaagaauuu

SEQ ID NO: 2181353 - RNA, 19 nt, Homo sapiens
  misc_RNA (1)...(19): siRNA sense strand
gcuguucaccuucuugaua

SEQ ID NO: 2181354 - RNA, 19 nt, Homo sapiens
  misc_RNA (1)...(19): siRNA sense strand
ugaagaugcuccagggauu

SEQ ID NO: 2181355 - RNA, 19 nt, Homo sapiens
  misc_RNA (1)...(19): siRNA sense strand
acaacacgcuuuacagaug

SEQ ID NO: 2181356 - RNA, 19 nt, Homo sapiens
  misc_RNA (1)...(19): siRNA sense strand
gagaaucacuacaaaagaa

SEQ ID NO: 2181357 - RNA, 19 nt, Homo sapiens
  misc_RNA (1)...(19): siRNA sense strand
ucacaagaguggcaaagau

SEQ ID NO: 2181358 - RNA, 19 nt, Homo sapiens
  misc_RNA (1)...(19): siRNA sense strand
guagacagcuugguagaag

SEQ ID NO: 2181359 - RNA, 19 nt, Homo sapiens
  misc_RNA (1)...(19): siRNA sense strand
gcucucugcuuuauuacuu

SEQ ID NO: 2181360 - RNA, 19 nt, Homo sapiens
  misc_RNA (1)...(19): siRNA sense strand
uaugaaaacugccucaaua

SEQ ID NO: 2181361 - RNA, 19 nt, Homo sapiens
  misc_RNA (1)...(19): siRNA sense strand
ucuaauagucuguccuuua

SEQ ID NO: 2181362 - RNA, 19 nt, Homo sapiens
  misc_RNA (1)...(19): siRNA sense strand
ggagaaagcaguacagcau

SEQ ID NO: 2181363 - RNA, 19 nt, Homo sapiens
  misc_RNA (1)...(19): siRNA sense strand
ucaacuggcucuaauaguc

SEQ ID NO: 2181364 - RNA, 19 nt, Homo sapiens
  misc_RNA (1)...(19): siRNA sense strand
gugccaauguaauggaaua

SEQ ID NO: 2181365 - RNA, 19 nt, Homo sapiens
  misc_RNA (1)...(19): siRNA sense strand
ggagggagauaaaguaagc

SEQ ID NO: 2181366 - RNA, 19 nt, Homo sapiens
  misc_RNA (1)...(19): siRNA sense strand
ugacguugauguaaaugaa

SEQ ID NO: 2181367 - RNA, 19 nt, Homo sapiens
  misc_RNA (1)...(19): siRNA sense strand
ggaaaugcucuuuggagaa

SEQ ID NO: 2181368 - RNA, 19 nt, Homo sapiens
  misc_RNA (1)...(19): siRNA sense strand
gugccaagauccucuguug

SEQ ID NO: 2181369 - RNA, 19 nt, Homo sapiens
  misc_RNA (1)...(19): siRNA sense strand
gaaacugccugggcuccaa

SEQ ID NO: 2181370 - RNA, 19 nt, Homo sapiens
  misc_RNA (1)...(19): siRNA sense strand
cuaaacugcuuucccuuug

SEQ ID NO: 2181371 - RNA, 19 nt, Homo sapiens
  misc_RNA (1)...(19): siRNA sense strand
gaagaugaccguacuuugc

SEQ ID NO: 2181372 - RNA, 19 nt, Homo sapiens
  misc_RNA (1)...(19): siRNA sense strand
agaauugucuccguggaua

SEQ ID NO: 2181373 - RNA, 19 nt, Homo sapiens
  misc_RNA (1)...(19): siRNA sense strand
gaucgacaacugauuauuc

SEQ ID NO: 2181374 - RNA, 19 nt, Homo sapiens
  misc_RNA (1)...(19): siRNA sense strand
ucuuguagcugaaguaaau

SEQ ID NO: 2181375 - RNA, 19 nt, Homo sapiens
  misc_RNA (1)...(19): siRNA sense strand
gaaacaagaauccacaucu

SEQ ID NO: 2181376 - RNA, 19 nt, Homo sapiens
  misc_RNA (1)...(19): siRNA sense strand
ugguaaacauugccagaua

SEQ ID NO: 2181377 - RNA, 19 nt, Homo sapiens
  misc_RNA (1)...(19): siRNA sense strand
gaaugagucaccaauguug

SEQ ID NO: 2181378 - RNA, 19 nt, Homo sapiens
  misc_RNA (1)...(19): siRNA sense strand
cgacuaucaugggcucuua

SEQ ID NO: 2181379 - RNA, 19 nt, Homo sapiens
  misc_RNA (1)...(19): siRNA sense strand
guaugcagauggguaauga

SEQ ID NO: 2181380 - RNA, 19 nt, Homo sapiens
  misc_RNA (1)...(19): siRNA sense strand
ucaacaccgucuacauuua

SEQ ID NO: 2181381 - RNA, 19 nt, Homo sapiens
  misc_RNA (1)...(19): siRNA sense strand
uuacagaucugggucauau

SEQ ID NO: 2181382 - RNA, 19 nt, Homo sapiens
  misc_RNA (1)...(19): siRNA sense strand
caucguggccuucaaguuu

SEQ ID NO: 2181383 - RNA, 19 nt, Homo sapiens
  misc_RNA (1)...(19): siRNA sense strand
gaaauaccgaggcuauaug

SEQ ID NO: 2181384 - RNA, 19 nt, Homo sapiens
  misc_RNA (1)...(19): siRNA sense strand
ucugguagcugcaaacuuc

SEQ ID NO: 2181385 - RNA, 19 nt, Homo sapiens
  misc_RNA (1)...(19): siRNA sense strand
auaccgaggcuauauguua

SEQ ID NO: 2181386 - RNA, 19 nt, Homo sapiens
  misc_RNA (1)...(19): siRNA sense strand
gcagaccuauuggaugcua

SEQ ID NO: 2181387 - RNA, 19 nt, Homo sapiens
  misc_RNA (1)...(19): siRNA sense strand
ggucugugguucaaaguca

SEQ ID NO: 2181388 - RNA, 19 nt, Homo sapiens
  misc_RNA (1)...(19): siRNA sense strand
cgaaauaccgaggcuauau

SEQ ID NO: 2181389 - RNA, 19 nt, Homo sapiens
  misc_RNA (1)...(19): siRNA sense strand
ggagcgcguugccaagaug

SEQ ID NO: 2181390 - RNA, 19 nt, Homo sapiens
  misc_RNA (1)...(19): siRNA sense strand
gaagauuugcagaccuauu

SEQ ID NO: 2181391 - RNA, 19 nt, Homo sapiens
  misc_RNA (1)...(19): siRNA sense strand
uuacacagcugaggucuac

SEQ ID NO: 2181392 - RNA, 19 nt, Homo sapiens
  misc_RNA (1)...(19): siRNA sense strand
aggaagauuugcagaccua

SEQ ID NO: 2181393 - RNA, 19 nt, Homo sapiens
  misc_RNA (1)...(19): siRNA sense strand
ggacuuggucugugguuca

SEQ ID NO: 2181394 - RNA, 19 nt, Homo sapiens
  misc_RNA (1)...(19): siRNA sense strand
gaaucugcccgguucaaug

SEQ ID NO: 2181395 - RNA, 19 nt, Homo sapiens
  misc_RNA (1)...(19): siRNA sense strand
cugauuggcuuccucuuca

SEQ ID NO: 2181396 - RNA, 19 nt, Homo sapiens
  misc_RNA (1)...(19): siRNA sense strand
ccaccacgaugcgcgcuuu

SEQ ID NO: 2181397 - RNA, 19 nt, Homo sapiens
  misc_RNA (1)...(19): siRNA sense strand
gguuaaucauaaagacuga

SEQ ID NO: 2181398 - RNA, 19 nt, Homo sapiens
  misc_RNA (1)...(19): siRNA sense strand
ggucauauggcuuggaauc

SEQ ID NO: 2181399 - RNA, 19 nt, Homo sapiens
  misc_RNA (1)...(19): siRNA sense strand
ggcuauauguuacccuugu

SEQ ID NO: 2181400 - RNA, 19 nt, Homo sapiens
  misc_RNA (1)...(19): siRNA sense strand
cuucaacaccgucuacauu

SEQ ID NO: 2181401 - RNA, 19 nt, Homo sapiens
  misc_RNA (1)...(19): siRNA sense strand
uuacggaccacauuacaga

SEQ ID NO: 2181402 - RNA, 19 nt, Homo sapiens
  misc_RNA (1)...(19): siRNA sense strand
caacaccgucuacauuuac

SEQ ID NO: 2181403 - RNA, 19 nt, Homo sapiens
  misc_RNA (1)...(19): siRNA sense strand
aagauuugcagaccuauug

SEQ ID NO: 2181404 - RNA, 19 nt, Homo sapiens
  misc_RNA (1)...(19): siRNA sense strand
gcugagggcucugguagcu

SEQ ID NO: 2181405 - RNA, 19 nt, Homo sapiens
  misc_RNA (1)...(19): siRNA sense strand
ggaccacauuacagaucug

SEQ ID NO: 2181406 - RNA, 19 nt, Homo sapiens
  misc_RNA (1)...(19): siRNA sense strand
gaaucucuuuugccuacua

SEQ ID NO: 2181407 - RNA, 19 nt, Homo sapiens
  misc_RNA (1)...(19): siRNA sense strand
cauauggcuuggaaucucu

SEQ ID NO: 2181408 - RNA, 19 nt, Homo sapiens
  misc_RNA (1)...(19): siRNA sense strand
aucguggccuucaaguuua

SEQ ID NO: 2181409 - RNA, 19 nt, Homo sapiens
  misc_RNA (1)...(19): siRNA sense strand
ucauauggcuuggaaucuc

SEQ ID NO: 2181410 - RNA, 19 nt, Homo sapiens
  misc_RNA (1)...(19): siRNA sense strand
gcucccugcucaucauugg

SEQ ID NO: 2181411 - RNA, 19 nt, Homo sapiens
  misc_RNA (1)...(19): siRNA sense strand
uaccgaggcuauauguuac

SEQ ID NO: 2181412 - RNA, 19 nt, Homo sapiens
  misc_RNA (1)...(19): siRNA sense strand
gggcucugguagcugcaaa

SEQ ID NO: 2181413 - RNA, 19 nt, Homo sapiens
  misc_RNA (1)...(19): siRNA sense strand
cacgaaauaccgaggcuau

SEQ ID NO: 2181414 - RNA, 19 nt, Homo sapiens
  misc_RNA (1)...(19): siRNA sense strand
ugggucauauggcuuggaa

SEQ ID NO: 2181415 - RNA, 19 nt, Homo sapiens
  misc_RNA (1)...(19): siRNA sense strand
gacuuggucugugguucaa

SEQ ID NO: 2181416 - RNA, 19 nt, Homo sapiens
  misc_RNA (1)...(19): siRNA sense strand
aaauaccgaggcuauaugu

SEQ ID NO: 2181417 - RNA, 19 nt, Homo sapiens
  misc_RNA (1)...(19): siRNA sense strand
cugcuacugccacauguuu

SEQ ID NO: 2181418 - RNA, 19 nt, Homo sapiens
  misc_RNA (1)...(19): siRNA sense strand
uucaacaccgucuacauuu

SEQ ID NO: 2181419 - RNA, 19 nt, Homo sapiens
  misc_RNA (1)...(19): siRNA sense strand
gacuaucggaccaugauca

SEQ ID NO: 2181420 - RNA, 19 nt, Homo sapiens
  misc_RNA (1)...(19): siRNA sense strand
aaucugcccgguucaaugu

SEQ ID NO: 2181421 - RNA, 19 nt, Homo sapiens
  misc_RNA (1)...(19): siRNA sense strand
gcuauauguuacccuuguc

SEQ ID NO: 2181422 - RNA, 19 nt, Homo sapiens
  misc_RNA (1)...(19): siRNA sense strand
auauuuacggaccacauua

SEQ ID NO: 2181423 - RNA, 19 nt, Homo sapiens
  misc_RNA (1)...(19): siRNA sense strand
aauauuuacggaccacauu

SEQ ID NO: 2181424 - RNA, 19 nt, Homo sapiens
  misc_RNA (1)...(19): siRNA sense strand
ucaacaccgucuacauuua

SEQ ID NO: 2181425 - RNA, 19 nt, Homo sapiens
  misc_RNA (1)...(19): siRNA sense strand
uuacagaucugggucauau

SEQ ID NO: 2181426 - RNA, 19 nt, Homo sapiens
  misc_RNA (1)...(19): siRNA sense strand
caucguggccuucaaguuu

SEQ ID NO: 2181427 - RNA, 19 nt, Homo sapiens
  misc_RNA (1)...(19): siRNA sense strand
gaaauaccgaggcuauaug

SEQ ID NO: 2181428 - RNA, 19 nt, Homo sapiens
  misc_RNA (1)...(19): siRNA sense strand
ucugguagcugcaaacuuc

SEQ ID NO: 2181429 - RNA, 19 nt, Homo sapiens
  misc_RNA (1)...(19): siRNA sense strand
auaccgaggcuauauguua

SEQ ID NO: 2181430 - RNA, 19 nt, Homo sapiens
  misc_RNA (1)...(19): siRNA sense strand
gcagaccuauuggaugcua

SEQ ID NO: 2181431 - RNA, 19 nt, Homo sapiens
  misc_RNA (1)...(19): siRNA sense strand
ggucugugguucaaaguca

SEQ ID NO: 2181432 - RNA, 19 nt, Homo sapiens
  misc_RNA (1)...(19): siRNA sense strand
ccuccuggcugacagauau

SEQ ID NO: 2181433 - RNA, 19 nt, Homo sapiens
  misc_RNA (1)...(19): siRNA sense strand
cgaaauaccgaggcuauau

SEQ ID NO: 2181434 - RNA, 19 nt, Homo sapiens
  misc_RNA (1)...(19): siRNA sense strand
ggagcgcguugccaagaug

SEQ ID NO: 2181435 - RNA, 19 nt, Homo sapiens
  misc_RNA (1)...(19): siRNA sense strand
gaagauuugcagaccuauu

SEQ ID NO: 2181436 - RNA, 19 nt, Homo sapiens
  misc_RNA (1)...(19): siRNA sense strand
uuacacagcugaggucuac

SEQ ID NO: 2181437 - RNA, 19 nt, Homo sapiens
  misc_RNA (1)...(19): siRNA sense strand
aggaagauuugcagaccua

SEQ ID NO: 2181438 - RNA, 19 nt, Homo sapiens
  misc_RNA (1)...(19): siRNA sense strand
ggacuuggucugugguuca

SEQ ID NO: 2181439 - RNA, 19 nt, Homo sapiens
  misc_RNA (1)...(19): siRNA sense strand
gaaucugcccgguucaaug

SEQ ID NO: 2181440 - RNA, 19 nt, Homo sapiens
  misc_RNA (1)...(19): siRNA sense strand
cugauuggcuuccucuuca

SEQ ID NO: 2181441 - RNA, 19 nt, Homo sapiens
  misc_RNA (1)...(19): siRNA sense strand
ccaccacgaugcgcgcuuu

SEQ ID NO: 2181442 - RNA, 19 nt, Homo sapiens
  misc_RNA (1)...(19): siRNA sense strand
gguuaaucauaaagacuga

SEQ ID NO: 2181443 - RNA, 19 nt, Homo sapiens
  misc_RNA (1)...(19): siRNA sense strand
ggucauauggcuuggaauc

SEQ ID NO: 2181444 - RNA, 19 nt, Homo sapiens
  misc_RNA (1)...(19): siRNA sense strand
ggcuauauguuacccuugu

SEQ ID NO: 2181445 - RNA, 19 nt, Homo sapiens
  misc_RNA (1)...(19): siRNA sense strand
cuucaacaccgucuacauu

SEQ ID NO: 2181446 - RNA, 19 nt, Homo sapiens
  misc_RNA (1)...(19): siRNA sense strand
uuacggaccacauuacaga

SEQ ID NO: 2181447 - RNA, 19 nt, Homo sapiens
  misc_RNA (1)...(19): siRNA sense strand
caacaccgucuacauuuac

SEQ ID NO: 2181448 - RNA, 19 nt, Homo sapiens
  misc_RNA (1)...(19): siRNA sense strand
aagauuugcagaccuauug

SEQ ID NO: 2181449 - RNA, 19 nt, Homo sapiens
  misc_RNA (1)...(19): siRNA sense strand
gcugagggcucugguagcu

SEQ ID NO: 2181450 - RNA, 19 nt, Homo sapiens
  misc_RNA (1)...(19): siRNA sense strand
ggaccacauuacagaucug

SEQ ID NO: 2181451 - RNA, 19 nt, Homo sapiens
  misc_RNA (1)...(19): siRNA sense strand
gaaucucuuuugccuacua

SEQ ID NO: 2181452 - RNA, 19 nt, Homo sapiens
  misc_RNA (1)...(19): siRNA sense strand
cauauggcuuggaaucucu

SEQ ID NO: 2181453 - RNA, 19 nt, Homo sapiens
  misc_RNA (1)...(19): siRNA sense strand
aucguggccuucaaguuua

SEQ ID NO: 2181454 - RNA, 19 nt, Homo sapiens
  misc_RNA (1)...(19): siRNA sense strand
ucauauggcuuggaaucuc

SEQ ID NO: 2181455 - RNA, 19 nt, Homo sapiens
  misc_RNA (1)...(19): siRNA sense strand
uaccgaggcuauauguuac

SEQ ID NO: 2181456 - RNA, 19 nt, Homo sapiens
  misc_RNA (1)...(19): siRNA sense strand
gggcucugguagcugcaaa

SEQ ID NO: 2181457 - RNA, 19 nt, Homo sapiens
  misc_RNA (1)...(19): siRNA sense strand
gcucccugcucaucauugg

SEQ ID NO: 2181458 - RNA, 19 nt, Homo sapiens
  misc_RNA (1)...(19): siRNA sense strand
cacgaaauaccgaggcuau

SEQ ID NO: 2181459 - RNA, 19 nt, Homo sapiens
  misc_RNA (1)...(19): siRNA sense strand
ugggucauauggcuuggaa

SEQ ID NO: 2181460 - RNA, 19 nt, Homo sapiens
  misc_RNA (1)...(19): siRNA sense strand
gacuuggucugugguucaa

SEQ ID NO: 2181461 - RNA, 19 nt, Homo sapiens
  misc_RNA (1)...(19): siRNA sense strand
aaauaccgaggcuauaugu

SEQ ID NO: 2181462 - RNA, 19 nt, Homo sapiens
  misc_RNA (1)...(19): siRNA sense strand
cugcuacugccacauguuu

SEQ ID NO: 2181463 - RNA, 19 nt, Homo sapiens
  misc_RNA (1)...(19): siRNA sense strand
uucaacaccgucuacauuu

SEQ ID NO: 2181464 - RNA, 19 nt, Homo sapiens
  misc_RNA (1)...(19): siRNA sense strand
gacuaucggaccaugauca

SEQ ID NO: 2181465 - RNA, 19 nt, Homo sapiens
  misc_RNA (1)...(19): siRNA sense strand
aaucugcccgguucaaugu

SEQ ID NO: 2181466 - RNA, 19 nt, Homo sapiens
  misc_RNA (1)...(19): siRNA sense strand
gcuauauguuacccuuguc

SEQ ID NO: 2181467 - RNA, 19 nt, Homo sapiens
  misc_RNA (1)...(19): siRNA sense strand
auauuuacggaccacauua

SEQ ID NO: 2181468 - RNA, 19 nt, Homo sapiens
  misc_RNA (1)...(19): siRNA sense strand
aauauuuacggaccacauu

SEQ ID NO: 2181469 - RNA, 19 nt, Homo sapiens
  misc_RNA (1)...(19): siRNA sense strand
ucaacaccgucuacauuua

SEQ ID NO: 2181470 - RNA, 19 nt, Homo sapiens
  misc_RNA (1)...(19): siRNA sense strand
uuacagaucugggucauau

SEQ ID NO: 2181471 - RNA, 19 nt, Homo sapiens
  misc_RNA (1)...(19): siRNA sense strand
caucguggccuucaaguuu

SEQ ID NO: 2181472 - RNA, 19 nt, Homo sapiens
  misc_RNA (1)...(19): siRNA sense strand
gaaauaccgaggcuauaug

SEQ ID NO: 2181473 - RNA, 19 nt, Homo sapiens
  misc_RNA (1)...(19): siRNA sense strand
ucugguagcugcaaacuuc

SEQ ID NO: 2181474 - RNA, 19 nt, Homo sapiens
  misc_RNA (1)...(19): siRNA sense strand
auaccgaggcuauauguua

SEQ ID NO: 2181475 - RNA, 19 nt, Homo sapiens
  misc_RNA (1)...(19): siRNA sense strand
gcagaccuauuggaugcua

SEQ ID NO: 2181476 - RNA, 19 nt, Homo sapiens
  misc_RNA (1)...(19): siRNA sense strand
ggucugugguucaaaguca

SEQ ID NO: 2181477 - RNA, 19 nt, Homo sapiens
  misc_RNA (1)...(19): siRNA sense strand
ccuccuggcugacagauau

SEQ ID NO: 2181478 - RNA, 19 nt, Homo sapiens
  misc_RNA (1)...(19): siRNA sense strand
cgaaauaccgaggcuauau

SEQ ID NO: 2181479 - RNA, 19 nt, Homo sapiens
  misc_RNA (1)...(19): siRNA sense strand
ggagcgcguugccaagaug

SEQ ID NO: 2181480 - RNA, 19 nt, Homo sapiens
  misc_RNA (1)...(19): siRNA sense strand
gaagauuugcagaccuauu

SEQ ID NO: 2181481 - RNA, 19 nt, Homo sapiens
  misc_RNA (1)...(19): siRNA sense strand
uuacacagcugaggucuac

SEQ ID NO: 2181482 - RNA, 19 nt, Homo sapiens
  misc_RNA (1)...(19): siRNA sense strand
aggaagauuugcagaccua

SEQ ID NO: 2181483 - RNA, 19 nt, Homo sapiens
  misc_RNA (1)...(19): siRNA sense strand
ggacuuggucugugguuca

SEQ ID NO: 2181484 - RNA, 19 nt, Homo sapiens
  misc_RNA (1)...(19): siRNA sense strand
gaaucugcccgguucaaug

SEQ ID NO: 2181485 - RNA, 19 nt, Homo sapiens
  misc_RNA (1)...(19): siRNA sense strand
cugauuggcuuccucuuca

SEQ ID NO: 2181486 - RNA, 19 nt, Homo sapiens
  misc_RNA (1)...(19): siRNA sense strand
ccaccacgaugcgcgcuuu

SEQ ID NO: 2181487 - RNA, 19 nt, Homo sapiens
  misc_RNA (1)...(19): siRNA sense strand
gguuaaucauaaagacuga

SEQ ID NO: 2181488 - RNA, 19 nt, Homo sapiens
  misc_RNA (1)...(19): siRNA sense strand
ggucauauggcuuggaauc

SEQ ID NO: 2181489 - RNA, 19 nt, Homo sapiens
  misc_RNA (1)...(19): siRNA sense strand
ggcuauauguuacccuugu

SEQ ID NO: 2181490 - RNA, 19 nt, Homo sapiens
  misc_RNA (1)...(19): siRNA sense strand
cuucaacaccgucuacauu

SEQ ID NO: 2181491 - RNA, 19 nt, Homo sapiens
  misc_RNA (1)...(19): siRNA sense strand
uuacggaccacauuacaga

SEQ ID NO: 2181492 - RNA, 19 nt, Homo sapiens
  misc_RNA (1)...(19): siRNA sense strand
caacaccgucuacauuuac

SEQ ID NO: 2181493 - RNA, 19 nt, Homo sapiens
  misc_RNA (1)...(19): siRNA sense strand
aagauuugcagaccuauug

SEQ ID NO: 2181494 - RNA, 19 nt, Homo sapiens
  misc_RNA (1)...(19): siRNA sense strand
gcugagggcucugguagcu

SEQ ID NO: 2181495 - RNA, 19 nt, Homo sapiens
  misc_RNA (1)...(19): siRNA sense strand
ggaccacauuacagaucug

SEQ ID NO: 2181496 - RNA, 19 nt, Homo sapiens
  misc_RNA (1)...(19): siRNA sense strand
gaaucucuuuugccuacua

SEQ ID NO: 2181497 - RNA, 19 nt, Homo sapiens
  misc_RNA (1)...(19): siRNA sense strand
cauauggcuuggaaucucu

SEQ ID NO: 2181498 - RNA, 19 nt, Homo sapiens
  misc_RNA (1)...(19): siRNA sense strand
aucguggccuucaaguuua

SEQ ID NO: 2181499 - RNA, 19 nt, Homo sapiens
  misc_RNA (1)...(19): siRNA sense strand
ucauauggcuuggaaucuc

SEQ ID NO: 2181500 - RNA, 19 nt, Homo sapiens
  misc_RNA (1)...(19): siRNA sense strand
uaccgaggcuauauguuac

SEQ ID NO: 2181501 - RNA, 19 nt, Homo sapiens
  misc_RNA (1)...(19): siRNA sense strand
gggcucugguagcugcaaa

SEQ ID NO: 2181502 - RNA, 19 nt, Homo sapiens
  misc_RNA (1)...(19): siRNA sense strand
gcucccugcucaucauugg

SEQ ID NO: 2181503 - RNA, 19 nt, Homo sapiens
  misc_RNA (1)...(19): siRNA sense strand
cacgaaauaccgaggcuau

SEQ ID NO: 2181504 - RNA, 19 nt, Homo sapiens
  misc_RNA (1)...(19): siRNA sense strand
ugggucauauggcuuggaa

SEQ ID NO: 2181505 - RNA, 19 nt, Homo sapiens
  misc_RNA (1)...(19): siRNA sense strand
gacuuggucugugguucaa

SEQ ID NO: 2181506 - RNA, 19 nt, Homo sapiens
  misc_RNA (1)...(19): siRNA sense strand
aaauaccgaggcuauaugu

SEQ ID NO: 2181507 - RNA, 19 nt, Homo sapiens
  misc_RNA (1)...(19): siRNA sense strand
cugcuacugccacauguuu

SEQ ID NO: 2181508 - RNA, 19 nt, Homo sapiens
  misc_RNA (1)...(19): siRNA sense strand
uucaacaccgucuacauuu

SEQ ID NO: 2181509 - RNA, 19 nt, Homo sapiens
  misc_RNA (1)...(19): siRNA sense strand
gacuaucggaccaugauca

SEQ ID NO: 2181510 - RNA, 19 nt, Homo sapiens
  misc_RNA (1)...(19): siRNA sense strand
aaucugcccgguucaaugu

SEQ ID NO: 2181511 - RNA, 19 nt, Homo sapiens
  misc_RNA (1)...(19): siRNA sense strand
gcuauauguuacccuuguc

SEQ ID NO: 2181512 - RNA, 19 nt, Homo sapiens
  misc_RNA (1)...(19): siRNA sense strand
auauuuacggaccacauua

SEQ ID NO: 2181513 - RNA, 19 nt, Homo sapiens
  misc_RNA (1)...(19): siRNA sense strand
aauauuuacggaccacauu

SEQ ID NO: 2181514 - RNA, 19 nt, Homo sapiens
  misc_RNA (1)...(19): siRNA sense strand
gaaacuaccuccuaucuug

SEQ ID NO: 2181515 - RNA, 19 nt, Homo sapiens
  misc_RNA (1)...(19): siRNA sense strand
ggaagauccucaaguauuu

SEQ ID NO: 2181516 - RNA, 19 nt, Homo sapiens
  misc_RNA (1)...(19): siRNA sense strand
gcacagcgcugcacaagug

SEQ ID NO: 2181517 - RNA, 19 nt, Homo sapiens
  misc_RNA (1)...(19): siRNA sense strand
gaaaccaucucuccaagaa

SEQ ID NO: 2181518 - RNA, 19 nt, Homo sapiens
  misc_RNA (1)...(19): siRNA sense strand
gaaagcagcaucucucuaa

SEQ ID NO: 2181519 - RNA, 19 nt, Homo sapiens
  misc_RNA (1)...(19): siRNA sense strand
gaagagcugugcaggagua

SEQ ID NO: 2181520 - RNA, 19 nt, Homo sapiens
  misc_RNA (1)...(19): siRNA sense strand
gcaggaauuuggugcuuua

SEQ ID NO: 2181521 - RNA, 19 nt, Homo sapiens
  misc_RNA (1)...(19): siRNA sense strand
gugcagaucuugaauauca

SEQ ID NO: 2181522 - RNA, 19 nt, Homo sapiens
  misc_RNA (1)...(19): siRNA sense strand
caaguggccuuaacagaaa

SEQ ID NO: 2181523 - RNA, 19 nt, Homo sapiens
  misc_RNA (1)...(19): siRNA sense strand
aggaagagcucacggauaa

SEQ ID NO: 2181524 - RNA, 19 nt, Homo sapiens
  misc_RNA (1)...(19): siRNA sense strand
ggaucaagauggagaaaga

SEQ ID NO: 2181525 - RNA, 19 nt, Homo sapiens
  misc_RNA (1)...(19): siRNA sense strand
guaaagagguggccgucaa

SEQ ID NO: 2181526 - RNA, 19 nt, Homo sapiens
  misc_RNA (1)...(19): siRNA sense strand
agaagcaacuccagaauga

SEQ ID NO: 2181527 - RNA, 19 nt, Homo sapiens
  misc_RNA (1)...(19): siRNA sense strand
ccacagaggugccacugaa

SEQ ID NO: 2181528 - RNA, 19 nt, Homo sapiens
  misc_RNA (1)...(19): siRNA sense strand
gcagacagauacacugaug

SEQ ID NO: 2181529 - RNA, 19 nt, Homo sapiens
  misc_RNA (1)...(19): siRNA sense strand
gaagaaaccaucucuccaa

SEQ ID NO: 2181530 - RNA, 19 nt, Homo sapiens
  misc_RNA (1)...(19): siRNA sense strand
gugcaggaguacaucauua

SEQ ID NO: 2181531 - RNA, 19 nt, Homo sapiens
  misc_RNA (1)...(19): siRNA sense strand
caagcaacaucaccauuga

SEQ ID NO: 2181532 - RNA, 19 nt, Homo sapiens
  misc_RNA (1)...(19): siRNA sense strand
gacgacauauugauuauuc

SEQ ID NO: 2181533 - RNA, 19 nt, Homo sapiens
  misc_RNA (1)...(19): siRNA sense strand
caauauccgucauaaaugu

SEQ ID NO: 2181534 - RNA, 19 nt, Homo sapiens
  misc_RNA (1)...(19): siRNA sense strand
caucuuggguuaccgaauu

SEQ ID NO: 2181535 - RNA, 19 nt, Homo sapiens
  misc_RNA (1)...(19): siRNA sense strand
aaagaucccuuccaagaau

SEQ ID NO: 2181536 - RNA, 19 nt, Homo sapiens
  misc_RNA (1)...(19): siRNA sense strand
gcacgcagcccuugcauuc

SEQ ID NO: 2181537 - RNA, 19 nt, Homo sapiens
  misc_RNA (1)...(19): siRNA sense strand
ucaaagaucccuuccaaga

SEQ ID NO: 2181538 - RNA, 19 nt, Homo sapiens
  misc_RNA (1)...(19): siRNA sense strand
uaugcucacuccaucauua

SEQ ID NO: 2181539 - RNA, 19 nt, Homo sapiens
  misc_RNA (1)...(19): siRNA sense strand
gcacaauaaagacgacaua

SEQ ID NO: 2181540 - RNA, 19 nt, Homo sapiens
  misc_RNA (1)...(19): siRNA sense strand
gcagagcccuuccaguauc

SEQ ID NO: 2181541 - RNA, 19 nt, Homo sapiens
  misc_RNA (1)...(19): siRNA sense strand
ccacgagccucauggagaa

SEQ ID NO: 2181542 - RNA, 19 nt, Homo sapiens
  misc_RNA (1)...(19): siRNA sense strand
gauuguggcuucccuaaca

SEQ ID NO: 2181543 - RNA, 19 nt, Homo sapiens
  misc_RNA (1)...(19): siRNA sense strand
ugacagcucucuuugaagu

SEQ ID NO: 2181544 - RNA, 19 nt, Homo sapiens
  misc_RNA (1)...(19): siRNA sense strand
ggcaauauccgucauaaau

SEQ ID NO: 2181545 - RNA, 19 nt, Homo sapiens
  misc_RNA (1)...(19): siRNA sense strand
ccacaaaucuugaguuuuc

SEQ ID NO: 2181546 - RNA, 19 nt, Homo sapiens
  misc_RNA (1)...(19): siRNA sense strand
gaagauccucaaguauuua

SEQ ID NO: 2181547 - RNA, 19 nt, Homo sapiens
  misc_RNA (1)...(19): siRNA sense strand
gcagaucccuagugugaag

SEQ ID NO: 2181548 - RNA, 19 nt, Homo sapiens
  misc_RNA (1)...(19): siRNA sense strand
aaugacagcucucuuugaa

SEQ ID NO: 2181549 - RNA, 19 nt, Homo sapiens
  misc_RNA (1)...(19): siRNA sense strand
guuccaaguucaaacagua

SEQ ID NO: 2181550 - RNA, 19 nt, Homo sapiens
  misc_RNA (1)...(19): siRNA sense strand
gcaucuuuguggcaacuua

SEQ ID NO: 2181551 - RNA, 19 nt, Homo sapiens
  misc_RNA (1)...(19): siRNA sense strand
cagcaucucucuaaugagu

SEQ ID NO: 2181552 - RNA, 19 nt, Homo sapiens
  misc_RNA (1)...(19): siRNA sense strand
guugagacauuuacauugu

SEQ ID NO: 2181553 - RNA, 19 nt, Homo sapiens
  misc_RNA (1)...(19): siRNA sense strand
cagacaagcuagacuuuca

SEQ ID NO: 2181554 - RNA, 19 nt, Homo sapiens
  misc_RNA (1)...(19): siRNA sense strand
aauaucaucuuugcgguua

SEQ ID NO: 2181555 - RNA, 19 nt, Homo sapiens
  misc_RNA (1)...(19): siRNA sense strand
ggucaagcuucccuucuga

SEQ ID NO: 2181556 - RNA, 19 nt, Homo sapiens
  misc_RNA (1)...(19): siRNA sense strand
uaacugagucuucuuuguu

SEQ ID NO: 2181557 - RNA, 19 nt, Homo sapiens
  misc_RNA (1)...(19): siRNA sense strand
caagaauguucgucacaga

SEQ ID NO: 2181558 - RNA, 19 nt, Homo sapiens
  misc_RNA (1)...(19): siRNA sense strand
gagagcagccaucaucuug

SEQ ID NO: 2181559 - RNA, 19 nt, Homo sapiens
  misc_RNA (1)...(19): siRNA sense strand
gaaguccucuugggucaga

SEQ ID NO: 2181560 - RNA, 19 nt, Homo sapiens
  misc_RNA (1)...(19): siRNA sense strand
gcacagcaguccucuccau

SEQ ID NO: 2181561 - RNA, 19 nt, Homo sapiens
  misc_RNA (1)...(19): siRNA sense strand
caacugugcuggccagaag

SEQ ID NO: 2181562 - RNA, 19 nt, Homo sapiens
  misc_RNA (1)...(19): siRNA sense strand
guacgguguugaucacuga

SEQ ID NO: 2181563 - RNA, 19 nt, Homo sapiens
  misc_RNA (1)...(19): siRNA sense strand
gcaauauccgucauaaaug

SEQ ID NO: 2181564 - RNA, 19 nt, Homo sapiens
  misc_RNA (1)...(19): siRNA sense strand
ucgcagagcccuuccagua

SEQ ID NO: 2181565 - RNA, 19 nt, Homo sapiens
  misc_RNA (1)...(19): siRNA sense strand
guggauaugaguaguguua

SEQ ID NO: 2181566 - RNA, 19 nt, Homo sapiens
  misc_RNA (1)...(19): siRNA sense strand
gagaaggaccggcucauca

SEQ ID NO: 2181567 - RNA, 19 nt, Homo sapiens
  misc_RNA (1)...(19): siRNA sense strand
caaagaucccuuccaagaa

SEQ ID NO: 2181568 - RNA, 19 nt, Homo sapiens
  misc_RNA (1)...(19): siRNA sense strand
gcacagacaagcuagacuu

SEQ ID NO: 2181569 - RNA, 19 nt, Homo sapiens
  misc_RNA (1)...(19): siRNA sense strand
guacagcucaucuacuuug

SEQ ID NO: 2181570 - RNA, 19 nt, Homo sapiens
  misc_RNA (1)...(19): siRNA sense strand
gaacucagcggcuccaucu

SEQ ID NO: 2181571 - RNA, 19 nt, Homo sapiens
  misc_RNA (1)...(19): siRNA sense strand
gaacacaacgcgacaacca

SEQ ID NO: 2181572 - RNA, 19 nt, Homo sapiens
  misc_RNA (1)...(19): siRNA sense strand
ucaaagaaguacugaggau

SEQ ID NO: 2181573 - RNA, 19 nt, Homo sapiens
  misc_RNA (1)...(19): siRNA sense strand
ggagaaagacgugggauca

SEQ ID NO: 2181574 - RNA, 19 nt, Homo sapiens
  misc_RNA (1)...(19): siRNA sense strand
caggacacauucuccauug

SEQ ID NO: 2181575 - RNA, 19 nt, Homo sapiens
  misc_RNA (1)...(19): siRNA sense strand
ggaauuuggugcuuuaucc

SEQ ID NO: 2181576 - RNA, 19 nt, Homo sapiens
  misc_RNA (1)...(19): siRNA sense strand
ggaguucaguuucuaucug

SEQ ID NO: 2181577 - RNA, 19 nt, Homo sapiens
  misc_RNA (1)...(19): siRNA sense strand
gauacuggcuucugcaacu

SEQ ID NO: 2181578 - RNA, 19 nt, Homo sapiens
  misc_RNA (1)...(19): siRNA sense strand
ugaccagacuccuuuaauc

SEQ ID NO: 2181579 - RNA, 19 nt, Homo sapiens
  misc_RNA (1)...(19): siRNA sense strand
ccacaagugcagacagaua

SEQ ID NO: 2181580 - RNA, 19 nt, Homo sapiens
  misc_RNA (1)...(19): siRNA sense strand
gcauucagcaggacacauu

SEQ ID NO: 2181581 - RNA, 19 nt, Homo sapiens
  misc_RNA (1)...(19): siRNA sense strand
gggcacagaugcagaucga

SEQ ID NO: 2181582 - RNA, 19 nt, Homo sapiens
  misc_RNA (1)...(19): siRNA sense strand
cuucggaccugauuaacaa

SEQ ID NO: 2181583 - RNA, 19 nt, Homo sapiens
  misc_RNA (1)...(19): siRNA sense strand
cuagugaucugcagucauc

SEQ ID NO: 2181584 - RNA, 19 nt, Homo sapiens
  misc_RNA (1)...(19): siRNA sense strand
acacugaugugaccacugu

SEQ ID NO: 2181585 - RNA, 19 nt, Homo sapiens
  misc_RNA (1)...(19): siRNA sense strand
gagaagcaacuccagaaug

SEQ ID NO: 2181586 - RNA, 19 nt, Homo sapiens
  misc_RNA (1)...(19): siRNA sense strand
cagcucaacuuaucucagu

SEQ ID NO: 2181587 - RNA, 19 nt, Homo sapiens
  misc_RNA (1)...(19): siRNA sense strand
guugaagcgucuacgguuu

SEQ ID NO: 2181588 - RNA, 19 nt, Homo sapiens
  misc_RNA (1)...(19): siRNA sense strand
agucaaagaucccuuccaa

SEQ ID NO: 2181589 - RNA, 19 nt, Homo sapiens
  misc_RNA (1)...(19): siRNA sense strand
acgaugagauggauaacuu

SEQ ID NO: 2181590 - RNA, 19 nt, Homo sapiens
  misc_RNA (1)...(19): siRNA sense strand
ccuccuaucuugagucuuc

SEQ ID NO: 2181591 - RNA, 19 nt, Homo sapiens
  misc_RNA (1)...(19): siRNA sense strand
caacuccucuugcauuugc

SEQ ID NO: 2181592 - RNA, 19 nt, Homo sapiens
  misc_RNA (1)...(19): siRNA sense strand
acaaguggccuuaacagaa

SEQ ID NO: 2181593 - RNA, 19 nt, Homo sapiens
  misc_RNA (1)...(19): siRNA sense strand
guacaucauuacagcaauc

SEQ ID NO: 2181594 - RNA, 19 nt, Homo sapiens
  misc_RNA (1)...(19): siRNA sense strand
ggauaugaguaguguuaca

SEQ ID NO: 2181595 - RNA, 19 nt, Homo sapiens
  misc_RNA (1)...(19): siRNA sense strand
gcaugaccgugcuggaaga

SEQ ID NO: 2181596 - RNA, 19 nt, Homo sapiens
  misc_RNA (1)...(19): siRNA sense strand
ccaaaucagugcucuagac

SEQ ID NO: 2181597 - RNA, 19 nt, Homo sapiens
  misc_RNA (1)...(19): siRNA sense strand
cgguacagcucaucuacuu

SEQ ID NO: 2181598 - RNA, 19 nt, Homo sapiens
  misc_RNA (1)...(19): siRNA sense strand
ugacuucacuuuucuggua

SEQ ID NO: 2181599 - RNA, 19 nt, Homo sapiens
  misc_RNA (1)...(19): siRNA sense strand
ggccacaagugcagacaga

SEQ ID NO: 2181600 - RNA, 19 nt, Homo sapiens
  misc_RNA (1)...(19): siRNA sense strand
gggauugccagcagaauug

SEQ ID NO: 2181601 - RNA, 19 nt, Homo sapiens
  misc_RNA (1)...(19): siRNA sense strand
caacaaucccugcaguaga

SEQ ID NO: 2181602 - RNA, 19 nt, Homo sapiens
  misc_RNA (1)...(19): siRNA sense strand
guacugaggauucacuuca

SEQ ID NO: 2181603 - RNA, 19 nt, Homo sapiens
  misc_RNA (1)...(19): siRNA sense strand
gcaggacacauucuccauu

SEQ ID NO: 2181604 - RNA, 19 nt, Homo sapiens
  misc_RNA (1)...(19): siRNA sense strand
cauuacccaugguuucuuu

SEQ ID NO: 2181605 - RNA, 19 nt, Homo sapiens
  misc_RNA (1)...(19): siRNA sense strand
gagcucagccaguggaaau

SEQ ID NO: 2181606 - RNA, 19 nt, Homo sapiens
  misc_RNA (1)...(19): siRNA sense strand
ccagagagcagccaucauc

SEQ ID NO: 2181607 - RNA, 19 nt, Homo sapiens
  misc_RNA (1)...(19): siRNA sense strand
ccuaaugacagcucucuuu

SEQ ID NO: 2181608 - RNA, 19 nt, Homo sapiens
  misc_RNA (1)...(19): siRNA sense strand
cauccgguccuuucguuua

SEQ ID NO: 2181609 - RNA, 19 nt, Homo sapiens
  misc_RNA (1)...(19): siRNA sense strand
acggaugguuucuccaaua

SEQ ID NO: 2181610 - RNA, 19 nt, Homo sapiens
  misc_RNA (1)...(19): siRNA sense strand
uuacagcaaucaaagaagu

SEQ ID NO: 2181611 - RNA, 19 nt, Homo sapiens
  misc_RNA (1)...(19): siRNA sense strand
gcagucaucucagcugucu

SEQ ID NO: 2181612 - RNA, 19 nt, Homo sapiens
  misc_RNA (1)...(19): siRNA sense strand
ccaagaacguuccaguuuu

SEQ ID NO: 2181613 - RNA, 19 nt, Homo sapiens
  misc_RNA (1)...(19): siRNA sense strand
ugagaaaggccuaaugaca

SEQ ID NO: 2181614 - RNA, 19 nt, Homo sapiens
  misc_RNA (1)...(19): siRNA sense strand
gaaacuaccuccuaucuug

SEQ ID NO: 2181615 - RNA, 19 nt, Homo sapiens
  misc_RNA (1)...(19): siRNA sense strand
ggaagauccucaaguauuu

SEQ ID NO: 2181616 - RNA, 19 nt, Homo sapiens
  misc_RNA (1)...(19): siRNA sense strand
gcacagcgcugcacaagug

SEQ ID NO: 2181617 - RNA, 19 nt, Homo sapiens
  misc_RNA (1)...(19): siRNA sense strand
gaaaccaucucuccaagaa

SEQ ID NO: 2181618 - RNA, 19 nt, Homo sapiens
  misc_RNA (1)...(19): siRNA sense strand
gaaagcagcaucucucuaa

SEQ ID NO: 2181619 - RNA, 19 nt, Homo sapiens
  misc_RNA (1)...(19): siRNA sense strand
gaagagcugugcaggagua

SEQ ID NO: 2181620 - RNA, 19 nt, Homo sapiens
  misc_RNA (1)...(19): siRNA sense strand
gcaggaauuuggugcuuua

SEQ ID NO: 2181621 - RNA, 19 nt, Homo sapiens
  misc_RNA (1)...(19): siRNA sense strand
gugcagaucuugaauauca

SEQ ID NO: 2181622 - RNA, 19 nt, Homo sapiens
  misc_RNA (1)...(19): siRNA sense strand
caaguggccuuaacagaaa

SEQ ID NO: 2181623 - RNA, 19 nt, Homo sapiens
  misc_RNA (1)...(19): siRNA sense strand
aggaagagcucacggauaa

SEQ ID NO: 2181624 - RNA, 19 nt, Homo sapiens
  misc_RNA (1)...(19): siRNA sense strand
ggaucaagauggagaaaga

SEQ ID NO: 2181625 - RNA, 19 nt, Homo sapiens
  misc_RNA (1)...(19): siRNA sense strand
guaaagagguggccgucaa

SEQ ID NO: 2181626 - RNA, 19 nt, Homo sapiens
  misc_RNA (1)...(19): siRNA sense strand
agaagcaacuccagaauga

SEQ ID NO: 2181627 - RNA, 19 nt, Homo sapiens
  misc_RNA (1)...(19): siRNA sense strand
ccacagaggugccacugaa

SEQ ID NO: 2181628 - RNA, 19 nt, Homo sapiens
  misc_RNA (1)...(19): siRNA sense strand
gcagacagauacacugaug

SEQ ID NO: 2181629 - RNA, 19 nt, Homo sapiens
  misc_RNA (1)...(19): siRNA sense strand
gaagaaaccaucucuccaa

SEQ ID NO: 2181630 - RNA, 19 nt, Homo sapiens
  misc_RNA (1)...(19): siRNA sense strand
gugcaggaguacaucauua

SEQ ID NO: 2181631 - RNA, 19 nt, Homo sapiens
  misc_RNA (1)...(19): siRNA sense strand
caagcaacaucaccauuga

SEQ ID NO: 2181632 - RNA, 19 nt, Homo sapiens
  misc_RNA (1)...(19): siRNA sense strand
gacgacauauugauuauuc

SEQ ID NO: 2181633 - RNA, 19 nt, Homo sapiens
  misc_RNA (1)...(19): siRNA sense strand
caauauccgucauaaaugu

SEQ ID NO: 2181634 - RNA, 19 nt, Homo sapiens
  misc_RNA (1)...(19): siRNA sense strand
caucuuggguuaccgaauu

SEQ ID NO: 2181635 - RNA, 19 nt, Homo sapiens
  misc_RNA (1)...(19): siRNA sense strand
aaagaucccuuccaagaau

SEQ ID NO: 2181636 - RNA, 19 nt, Homo sapiens
  misc_RNA (1)...(19): siRNA sense strand
gcacgcagcccuugcauuc

SEQ ID NO: 2181637 - RNA, 19 nt, Homo sapiens
  misc_RNA (1)...(19): siRNA sense strand
ucaaagaucccuuccaaga

SEQ ID NO: 2181638 - RNA, 19 nt, Homo sapiens
  misc_RNA (1)...(19): siRNA sense strand
uaugcucacuccaucauua

SEQ ID NO: 2181639 - RNA, 19 nt, Homo sapiens
  misc_RNA (1)...(19): siRNA sense strand
gcacaauaaagacgacaua

SEQ ID NO: 2181640 - RNA, 19 nt, Homo sapiens
  misc_RNA (1)...(19): siRNA sense strand
gcagagcccuuccaguauc

SEQ ID NO: 2181641 - RNA, 19 nt, Homo sapiens
  misc_RNA (1)...(19): siRNA sense strand
ccacgagccucauggagaa

SEQ ID NO: 2181642 - RNA, 19 nt, Homo sapiens
  misc_RNA (1)...(19): siRNA sense strand
gauuguggcuucccuaaca

SEQ ID NO: 2181643 - RNA, 19 nt, Homo sapiens
  misc_RNA (1)...(19): siRNA sense strand
ugacagcucucuuugaagu

SEQ ID NO: 2181644 - RNA, 19 nt, Homo sapiens
  misc_RNA (1)...(19): siRNA sense strand
ggcaauauccgucauaaau

SEQ ID NO: 2181645 - RNA, 19 nt, Homo sapiens
  misc_RNA (1)...(19): siRNA sense strand
ccacaaaucuugaguuuuc

SEQ ID NO: 2181646 - RNA, 19 nt, Homo sapiens
  misc_RNA (1)...(19): siRNA sense strand
gaagauccucaaguauuua

SEQ ID NO: 2181647 - RNA, 19 nt, Homo sapiens
  misc_RNA (1)...(19): siRNA sense strand
gcagaucccuagugugaag

SEQ ID NO: 2181648 - RNA, 19 nt, Homo sapiens
  misc_RNA (1)...(19): siRNA sense strand
aaugacagcucucuuugaa

SEQ ID NO: 2181649 - RNA, 19 nt, Homo sapiens
  misc_RNA (1)...(19): siRNA sense strand
guuccaaguucaaacagua

SEQ ID NO: 2181650 - RNA, 19 nt, Homo sapiens
  misc_RNA (1)...(19): siRNA sense strand
gcaucuuuguggcaacuua

SEQ ID NO: 2181651 - RNA, 19 nt, Homo sapiens
  misc_RNA (1)...(19): siRNA sense strand
cagcaucucucuaaugagu

SEQ ID NO: 2181652 - RNA, 19 nt, Homo sapiens
  misc_RNA (1)...(19): siRNA sense strand
guugagacauuuacauugu

SEQ ID NO: 2181653 - RNA, 19 nt, Homo sapiens
  misc_RNA (1)...(19): siRNA sense strand
cagacaagcuagacuuuca

SEQ ID NO: 2181654 - RNA, 19 nt, Homo sapiens
  misc_RNA (1)...(19): siRNA sense strand
aauaucaucuuugcgguua

SEQ ID NO: 2181655 - RNA, 19 nt, Homo sapiens
  misc_RNA (1)...(19): siRNA sense strand
ggucaagcuucccuucuga

SEQ ID NO: 2181656 - RNA, 19 nt, Homo sapiens
  misc_RNA (1)...(19): siRNA sense strand
uaacugagucuucuuuguu

SEQ ID NO: 2181657 - RNA, 19 nt, Homo sapiens
  misc_RNA (1)...(19): siRNA sense strand
caagaauguucgucacaga

SEQ ID NO: 2181658 - RNA, 19 nt, Homo sapiens
  misc_RNA (1)...(19): siRNA sense strand
gagagcagccaucaucuug

SEQ ID NO: 2181659 - RNA, 19 nt, Homo sapiens
  misc_RNA (1)...(19): siRNA sense strand
gaaguccucuugggucaga

SEQ ID NO: 2181660 - RNA, 19 nt, Homo sapiens
  misc_RNA (1)...(19): siRNA sense strand
gcacagcaguccucuccau

SEQ ID NO: 2181661 - RNA, 19 nt, Homo sapiens
  misc_RNA (1)...(19): siRNA sense strand
caacugugcuggccagaag

SEQ ID NO: 2181662 - RNA, 19 nt, Homo sapiens
  misc_RNA (1)...(19): siRNA sense strand
guacgguguugaucacuga

SEQ ID NO: 2181663 - RNA, 19 nt, Homo sapiens
  misc_RNA (1)...(19): siRNA sense strand
gcaauauccgucauaaaug

SEQ ID NO: 2181664 - RNA, 19 nt, Homo sapiens
  misc_RNA (1)...(19): siRNA sense strand
ucgcagagcccuuccagua

SEQ ID NO: 2181665 - RNA, 19 nt, Homo sapiens
  misc_RNA (1)...(19): siRNA sense strand
guggauaugaguaguguua

SEQ ID NO: 2181666 - RNA, 19 nt, Homo sapiens
  misc_RNA (1)...(19): siRNA sense strand
gagaaggaccggcucauca

SEQ ID NO: 2181667 - RNA, 19 nt, Homo sapiens
  misc_RNA (1)...(19): siRNA sense strand
caaagaucccuuccaagaa

SEQ ID NO: 2181668 - RNA, 19 nt, Homo sapiens
  misc_RNA (1)...(19): siRNA sense strand
gcacagacaagcuagacuu

SEQ ID NO: 2181669 - RNA, 19 nt, Homo sapiens
  misc_RNA (1)...(19): siRNA sense strand
guacagcucaucuacuuug

SEQ ID NO: 2181670 - RNA, 19 nt, Homo sapiens
  misc_RNA (1)...(19): siRNA sense strand
gaacucagcggcuccaucu

SEQ ID NO: 2181671 - RNA, 19 nt, Homo sapiens
  misc_RNA (1)...(19): siRNA sense strand
gaacacaacgcgacaacca

SEQ ID NO: 2181672 - RNA, 19 nt, Homo sapiens
  misc_RNA (1)...(19): siRNA sense strand
ucaaagaaguacugaggau

SEQ ID NO: 2181673 - RNA, 19 nt, Homo sapiens
  misc_RNA (1)...(19): siRNA sense strand
ggagaaagacgugggauca

SEQ ID NO: 2181674 - RNA, 19 nt, Homo sapiens
  misc_RNA (1)...(19): siRNA sense strand
caggacacauucuccauug

SEQ ID NO: 2181675 - RNA, 19 nt, Homo sapiens
  misc_RNA (1)...(19): siRNA sense strand
ggaauuuggugcuuuaucc

SEQ ID NO: 2181676 - RNA, 19 nt, Homo sapiens
  misc_RNA (1)...(19): siRNA sense strand
ggaguucaguuucuaucug

SEQ ID NO: 2181677 - RNA, 19 nt, Homo sapiens
  misc_RNA (1)...(19): siRNA sense strand
gauacuggcuucugcaacu

SEQ ID NO: 2181678 - RNA, 19 nt, Homo sapiens
  misc_RNA (1)...(19): siRNA sense strand
ugaccagacuccuuuaauc

SEQ ID NO: 2181679 - RNA, 19 nt, Homo sapiens
  misc_RNA (1)...(19): siRNA sense strand
ccacaagugcagacagaua

SEQ ID NO: 2181680 - RNA, 19 nt, Homo sapiens
  misc_RNA (1)...(19): siRNA sense strand
gcauucagcaggacacauu

SEQ ID NO: 2181681 - RNA, 19 nt, Homo sapiens
  misc_RNA (1)...(19): siRNA sense strand
gggcacagaugcagaucga

SEQ ID NO: 2181682 - RNA, 19 nt, Homo sapiens
  misc_RNA (1)...(19): siRNA sense strand
cuucggaccugauuaacaa

SEQ ID NO: 2181683 - RNA, 19 nt, Homo sapiens
  misc_RNA (1)...(19): siRNA sense strand
cuagugaucugcagucauc

SEQ ID NO: 2181684 - RNA, 19 nt, Homo sapiens
  misc_RNA (1)...(19): siRNA sense strand
acacugaugugaccacugu

SEQ ID NO: 2181685 - RNA, 19 nt, Homo sapiens
  misc_RNA (1)...(19): siRNA sense strand
gagaagcaacuccagaaug

SEQ ID NO: 2181686 - RNA, 19 nt, Homo sapiens
  misc_RNA (1)...(19): siRNA sense strand
cagcucaacuuaucucagu

SEQ ID NO: 2181687 - RNA, 19 nt, Homo sapiens
  misc_RNA (1)...(19): siRNA sense strand
guugaagcgucuacgguuu

SEQ ID NO: 2181688 - RNA, 19 nt, Homo sapiens
  misc_RNA (1)...(19): siRNA sense strand
agucaaagaucccuuccaa

SEQ ID NO: 2181689 - RNA, 19 nt, Homo sapiens
  misc_RNA (1)...(19): siRNA sense strand
acgaugagauggauaacuu

SEQ ID NO: 2181690 - RNA, 19 nt, Homo sapiens
  misc_RNA (1)...(19): siRNA sense strand
ccuccuaucuugagucuuc

SEQ ID NO: 2181691 - RNA, 19 nt, Homo sapiens
  misc_RNA (1)...(19): siRNA sense strand
caacuccucuugcauuugc

SEQ ID NO: 2181692 - RNA, 19 nt, Homo sapiens
  misc_RNA (1)...(19): siRNA sense strand
acaaguggccuuaacagaa

SEQ ID NO: 2181693 - RNA, 19 nt, Homo sapiens
  misc_RNA (1)...(19): siRNA sense strand
guacaucauuacagcaauc

SEQ ID NO: 2181694 - RNA, 19 nt, Homo sapiens
  misc_RNA (1)...(19): siRNA sense strand
ggauaugaguaguguuaca

SEQ ID NO: 2181695 - RNA, 19 nt, Homo sapiens
  misc_RNA (1)...(19): siRNA sense strand
gcaugaccgugcuggaaga

SEQ ID NO: 2181696 - RNA, 19 nt, Homo sapiens
  misc_RNA (1)...(19): siRNA sense strand
ccaaaucagugcucuagac

SEQ ID NO: 2181697 - RNA, 19 nt, Homo sapiens
  misc_RNA (1)...(19): siRNA sense strand
cgguacagcucaucuacuu

SEQ ID NO: 2181698 - RNA, 19 nt, Homo sapiens
  misc_RNA (1)...(19): siRNA sense strand
ugacuucacuuuucuggua

SEQ ID NO: 2181699 - RNA, 19 nt, Homo sapiens
  misc_RNA (1)...(19): siRNA sense strand
ggccacaagugcagacaga

SEQ ID NO: 2181700 - RNA, 19 nt, Homo sapiens
  misc_RNA (1)...(19): siRNA sense strand
gggauugccagcagaauug

SEQ ID NO: 2181701 - RNA, 19 nt, Homo sapiens
  misc_RNA (1)...(19): siRNA sense strand
caacaaucccugcaguaga

SEQ ID NO: 2181702 - RNA, 19 nt, Homo sapiens
  misc_RNA (1)...(19): siRNA sense strand
guacugaggauucacuuca

SEQ ID NO: 2181703 - RNA, 19 nt, Homo sapiens
  misc_RNA (1)...(19): siRNA sense strand
gcaggacacauucuccauu

SEQ ID NO: 2181704 - RNA, 19 nt, Homo sapiens
  misc_RNA (1)...(19): siRNA sense strand
cauuacccaugguuucuuu

SEQ ID NO: 2181705 - RNA, 19 nt, Homo sapiens
  misc_RNA (1)...(19): siRNA sense strand
gagcucagccaguggaaau

SEQ ID NO: 2181706 - RNA, 19 nt, Homo sapiens
  misc_RNA (1)...(19): siRNA sense strand
ccagagagcagccaucauc

SEQ ID NO: 2181707 - RNA, 19 nt, Homo sapiens
  misc_RNA (1)...(19): siRNA sense strand
ccuaaugacagcucucuuu

SEQ ID NO: 2181708 - RNA, 19 nt, Homo sapiens
  misc_RNA (1)...(19): siRNA sense strand
cauccgguccuuucguuua

SEQ ID NO: 2181709 - RNA, 19 nt, Homo sapiens
  misc_RNA (1)...(19): siRNA sense strand
acggaugguuucuccaaua

SEQ ID NO: 2181710 - RNA, 19 nt, Homo sapiens
  misc_RNA (1)...(19): siRNA sense strand
uuacagcaaucaaagaagu

SEQ ID NO: 2181711 - RNA, 19 nt, Homo sapiens
  misc_RNA (1)...(19): siRNA sense strand
gcagucaucucagcugucu

SEQ ID NO: 2181712 - RNA, 19 nt, Homo sapiens
  misc_RNA (1)...(19): siRNA sense strand
ccaagaacguuccaguuuu

SEQ ID NO: 2181713 - RNA, 19 nt, Homo sapiens
  misc_RNA (1)...(19): siRNA sense strand
ugagaaaggccuaaugaca

SEQ ID NO: 2181714 - RNA, 19 nt, Homo sapiens
  misc_RNA (1)...(19): siRNA sense strand
ggacacagcuggagugaca

SEQ ID NO: 2181715 - RNA, 19 nt, Homo sapiens
  misc_RNA (1)...(19): siRNA sense strand
gaaagagaaggaugcauua

SEQ ID NO: 2181716 - RNA, 19 nt, Homo sapiens
  misc_RNA (1)...(19): siRNA sense strand
ccaguuggcucaaggauaa

SEQ ID NO: 2181717 - RNA, 19 nt, Homo sapiens
  misc_RNA (1)...(19): siRNA sense strand
uaaaggaggugaugguaaa

SEQ ID NO: 2181718 - RNA, 19 nt, Homo sapiens
  misc_RNA (1)...(19): siRNA sense strand
gaaacuggcuguuagcaau

SEQ ID NO: 2181719 - RNA, 19 nt, Homo sapiens
  misc_RNA (1)...(19): siRNA sense strand
gcuaagaaguuugaaauga

SEQ ID NO: 2181720 - RNA, 19 nt, Homo sapiens
  misc_RNA (1)...(19): siRNA sense strand
gcuaaugccucaccucuga

SEQ ID NO: 2181721 - RNA, 19 nt, Homo sapiens
  misc_RNA (1)...(19): siRNA sense strand
gcagacagaugaagaacga

SEQ ID NO: 2181722 - RNA, 19 nt, Homo sapiens
  misc_RNA (1)...(19): siRNA sense strand
ugagacagauccauuuauu

SEQ ID NO: 2181723 - RNA, 19 nt, Homo sapiens
  misc_RNA (1)...(19): siRNA sense strand
gaacaagggcccuccaguu

SEQ ID NO: 2181724 - RNA, 19 nt, Homo sapiens
  misc_RNA (1)...(19): siRNA sense strand
uagcaaguaucaugaguaa

SEQ ID NO: 2181725 - RNA, 19 nt, Homo sapiens
  misc_RNA (1)...(19): siRNA sense strand
gaacuaugugucuccauua

SEQ ID NO: 2181726 - RNA, 19 nt, Homo sapiens
  misc_RNA (1)...(19): siRNA sense strand
ggcaagagguggaaauguu

SEQ ID NO: 2181727 - RNA, 19 nt, Homo sapiens
  misc_RNA (1)...(19): siRNA sense strand
ggagauauuuggcuuugga

SEQ ID NO: 2181728 - RNA, 19 nt, Homo sapiens
  misc_RNA (1)...(19): siRNA sense strand
gcaccuaaacccaaaguaa

SEQ ID NO: 2181729 - RNA, 19 nt, Homo sapiens
  misc_RNA (1)...(19): siRNA sense strand
uagccuaacucagaauuua

SEQ ID NO: 2181730 - RNA, 19 nt, Homo sapiens
  misc_RNA (1)...(19): siRNA sense strand
gucgugaaguuaaguaaua

SEQ ID NO: 2181731 - RNA, 19 nt, Homo sapiens
  misc_RNA (1)...(19): siRNA sense strand
aagaacagcuugaguggaa

SEQ ID NO: 2181732 - RNA, 19 nt, Homo sapiens
  misc_RNA (1)...(19): siRNA sense strand
gagcaucauuauuggcuaa

SEQ ID NO: 2181733 - RNA, 19 nt, Homo sapiens
  misc_RNA (1)...(19): siRNA sense strand
ggaaggaucggcuacaaga

SEQ ID NO: 2181734 - RNA, 19 nt, Homo sapiens
  misc_RNA (1)...(19): siRNA sense strand
acacauucuucaagucuua

SEQ ID NO: 2181735 - RNA, 19 nt, Homo sapiens
  misc_RNA (1)...(19): siRNA sense strand
gaacuaggcccugucauuc

SEQ ID NO: 2181736 - RNA, 19 nt, Homo sapiens
  misc_RNA (1)...(19): siRNA sense strand
gaugagacagauccauuua

SEQ ID NO: 2181737 - RNA, 19 nt, Homo sapiens
  misc_RNA (1)...(19): siRNA sense strand
gaccaugcccuuccaguuu

SEQ ID NO: 2181738 - RNA, 19 nt, Homo sapiens
  misc_RNA (1)...(19): siRNA sense strand
gcuaugaguuagaaccaaa

SEQ ID NO: 2181739 - RNA, 19 nt, Homo sapiens
  misc_RNA (1)...(19): siRNA sense strand
gaacacagggugcuaccaa

SEQ ID NO: 2181740 - RNA, 19 nt, Homo sapiens
  misc_RNA (1)...(19): siRNA sense strand
ccaaguaguuccaguccaa

SEQ ID NO: 2181741 - RNA, 19 nt, Homo sapiens
  misc_RNA (1)...(19): siRNA sense strand
agacagauccauuuauuga

SEQ ID NO: 2181742 - RNA, 19 nt, Homo sapiens
  misc_RNA (1)...(19): siRNA sense strand
uagagaugcuagaugauuu

SEQ ID NO: 2181743 - RNA, 19 nt, Homo sapiens
  misc_RNA (1)...(19): siRNA sense strand
uaucaacacuggcacucua

SEQ ID NO: 2181744 - RNA, 19 nt, Homo sapiens
  misc_RNA (1)...(19): siRNA sense strand
aaacugaaacuggcuguua

SEQ ID NO: 2181745 - RNA, 19 nt, Homo sapiens
  misc_RNA (1)...(19): siRNA sense strand
uaaauucacacaagucuga

SEQ ID NO: 2181746 - RNA, 19 nt, Homo sapiens
  misc_RNA (1)...(19): siRNA sense strand
uaacagcccaguccauaaa

SEQ ID NO: 2181747 - RNA, 19 nt, Homo sapiens
  misc_RNA (1)...(19): siRNA sense strand
gaagcucauucacacagaa

SEQ ID NO: 2181748 - RNA, 19 nt, Homo sapiens
  misc_RNA (1)...(19): siRNA sense strand
gcaagcauuucacgaugga

SEQ ID NO: 2181749 - RNA, 19 nt, Homo sapiens
  misc_RNA (1)...(19): siRNA sense strand
caccauagccuaacucaga

SEQ ID NO: 2181750 - RNA, 19 nt, Homo sapiens
  misc_RNA (1)...(19): siRNA sense strand
gccuggagcuggugcuuaa

SEQ ID NO: 2181751 - RNA, 19 nt, Homo sapiens
  misc_RNA (1)...(19): siRNA sense strand
guagcaaccuuaacucaag

SEQ ID NO: 2181752 - RNA, 19 nt, Homo sapiens
  misc_RNA (1)...(19): siRNA sense strand
ggacauugaguuacagcua

SEQ ID NO: 2181753 - RNA, 19 nt, Homo sapiens
  misc_RNA (1)...(19): siRNA sense strand
gauccagaccuucccauuu

SEQ ID NO: 2181754 - RNA, 19 nt, Homo sapiens
  misc_RNA (1)...(19): siRNA sense strand
ccaggaugaucguuuaaga

SEQ ID NO: 2181755 - RNA, 19 nt, Homo sapiens
  misc_RNA (1)...(19): siRNA sense strand
ccucaaagcuaacaaacuc

SEQ ID NO: 2181756 - RNA, 19 nt, Homo sapiens
  misc_RNA (1)...(19): siRNA sense strand
caagccagauucacacuuc

SEQ ID NO: 2181757 - RNA, 19 nt, Homo sapiens
  misc_RNA (1)...(19): siRNA sense strand
ccaaauugcagacagauga

SEQ ID NO: 2181758 - RNA, 19 nt, Homo sapiens
  misc_RNA (1)...(19): siRNA sense strand
agagaaggaugcauuaaag

SEQ ID NO: 2181759 - RNA, 19 nt, Homo sapiens
  misc_RNA (1)...(19): siRNA sense strand
uaacacaaguaacaaaggu

SEQ ID NO: 2181760 - RNA, 19 nt, Homo sapiens
  misc_RNA (1)...(19): siRNA sense strand
gaacauccgaggcccaaga

SEQ ID NO: 2181761 - RNA, 19 nt, Homo sapiens
  misc_RNA (1)...(19): siRNA sense strand
gaucugaagaggaugauga

SEQ ID NO: 2181762 - RNA, 19 nt, Homo sapiens
  misc_RNA (1)...(19): siRNA sense strand
ugucaugccugaacagcua

SEQ ID NO: 2181763 - RNA, 19 nt, Homo sapiens
  misc_RNA (1)...(19): siRNA sense strand
ucacacagaagacccauuu

SEQ ID NO: 2181764 - RNA, 19 nt, Homo sapiens
  misc_RNA (1)...(19): siRNA sense strand
aaugaaauauggugggaaa

SEQ ID NO: 2181765 - RNA, 19 nt, Homo sapiens
  misc_RNA (1)...(19): siRNA sense strand
gcaggagcaucauuauugg

SEQ ID NO: 2181766 - RNA, 19 nt, Homo sapiens
  misc_RNA (1)...(19): siRNA sense strand
gcaccacuaccuccaguaa

SEQ ID NO: 2181767 - RNA, 19 nt, Homo sapiens
  misc_RNA (1)...(19): siRNA sense strand
ccaaauugcugccucuucu

SEQ ID NO: 2181768 - RNA, 19 nt, Homo sapiens
  misc_RNA (1)...(19): siRNA sense strand
gaaagccggaguguucaua

SEQ ID NO: 2181769 - RNA, 19 nt, Homo sapiens
  misc_RNA (1)...(19): siRNA sense strand
agaggcuuaugaugaauua

SEQ ID NO: 2181770 - RNA, 19 nt, Homo sapiens
  misc_RNA (1)...(19): siRNA sense strand
gcuaauaggacuagucugu

SEQ ID NO: 2181771 - RNA, 19 nt, Homo sapiens
  misc_RNA (1)...(19): siRNA sense strand
gaaugaacaucagcagaca

SEQ ID NO: 2181772 - RNA, 19 nt, Homo sapiens
  misc_RNA (1)...(19): siRNA sense strand
gguagccacuccagcacua

SEQ ID NO: 2181773 - RNA, 19 nt, Homo sapiens
  misc_RNA (1)...(19): siRNA sense strand
caaagaaaccccaggauuu

SEQ ID NO: 2181774 - RNA, 19 nt, Homo sapiens
  misc_RNA (1)...(19): siRNA sense strand
guaaaggaggugaugguaa

SEQ ID NO: 2181775 - RNA, 19 nt, Homo sapiens
  misc_RNA (1)...(19): siRNA sense strand
acacagaagacccauuuaa

SEQ ID NO: 2181776 - RNA, 19 nt, Homo sapiens
  misc_RNA (1)...(19): siRNA sense strand
uagcugccaugauuagaaa

SEQ ID NO: 2181777 - RNA, 19 nt, Homo sapiens
  misc_RNA (1)...(19): siRNA sense strand
ggaguuguggcucuaaauu

SEQ ID NO: 2181778 - RNA, 19 nt, Homo sapiens
  misc_RNA (1)...(19): siRNA sense strand
gccacuagcuacucccaaa

SEQ ID NO: 2181779 - RNA, 19 nt, Homo sapiens
  misc_RNA (1)...(19): siRNA sense strand
gcaagagguggaaauguug

SEQ ID NO: 2181780 - RNA, 19 nt, Homo sapiens
  misc_RNA (1)...(19): siRNA sense strand
ccagucugcugaagauuau

SEQ ID NO: 2181781 - RNA, 19 nt, Homo sapiens
  misc_RNA (1)...(19): siRNA sense strand
uauguaaccuuguugagau

SEQ ID NO: 2181782 - RNA, 19 nt, Homo sapiens
  misc_RNA (1)...(19): siRNA sense strand
gcaaugucaugccugaaca

SEQ ID NO: 2181783 - RNA, 19 nt, Homo sapiens
  misc_RNA (1)...(19): siRNA sense strand
uaaaacgucugaagaaguu

SEQ ID NO: 2181784 - RNA, 19 nt, Homo sapiens
  misc_RNA (1)...(19): siRNA sense strand
gcucuaaauucacacaagu

SEQ ID NO: 2181785 - RNA, 19 nt, Homo sapiens
  misc_RNA (1)...(19): siRNA sense strand
gaacagcuugaguggaauu

SEQ ID NO: 2181786 - RNA, 19 nt, Homo sapiens
  misc_RNA (1)...(19): siRNA sense strand
gcaaguaucaugaguaagc

SEQ ID NO: 2181787 - RNA, 19 nt, Homo sapiens
  misc_RNA (1)...(19): siRNA sense strand
cacuggaucuuguuucuga

SEQ ID NO: 2181788 - RNA, 19 nt, Homo sapiens
  misc_RNA (1)...(19): siRNA sense strand
aaauggaucugaagaggau

SEQ ID NO: 2181789 - RNA, 19 nt, Homo sapiens
  misc_RNA (1)...(19): siRNA sense strand
gaugaucguuuaagagaac

SEQ ID NO: 2181790 - RNA, 19 nt, Homo sapiens
  misc_RNA (1)...(19): siRNA sense strand
uguccaggaugaucguuua

SEQ ID NO: 2181791 - RNA, 19 nt, Homo sapiens
  misc_RNA (1)...(19): siRNA sense strand
cugaagaaguuacaucuca

SEQ ID NO: 2181792 - RNA, 19 nt, Homo sapiens
  misc_RNA (1)...(19): siRNA sense strand
cauuaaagaaggagucuaa

SEQ ID NO: 2181793 - RNA, 19 nt, Homo sapiens
  misc_RNA (1)...(19): siRNA sense strand
ccgcuucucuaacaacaaa

SEQ ID NO: 2181794 - RNA, 19 nt, Homo sapiens
  misc_RNA (1)...(19): siRNA sense strand
agaacuaugugucuccauu

SEQ ID NO: 2181795 - RNA, 19 nt, Homo sapiens
  misc_RNA (1)...(19): siRNA sense strand
gggaugcuaugaguuagaa

SEQ ID NO: 2181796 - RNA, 19 nt, Homo sapiens
  misc_RNA (1)...(19): siRNA sense strand
guggaaauguuggcuaaga

SEQ ID NO: 2181797 - RNA, 19 nt, Homo sapiens
  misc_RNA (1)...(19): siRNA sense strand
gccagucugcugaagauua

SEQ ID NO: 2181798 - RNA, 19 nt, Homo sapiens
  misc_RNA (1)...(19): siRNA sense strand
ccacugggaugacacuauc

SEQ ID NO: 2181799 - RNA, 19 nt, Homo sapiens
  misc_RNA (1)...(19): siRNA sense strand
ggaugaucguuuaagagaa

SEQ ID NO: 2181800 - RNA, 19 nt, Homo sapiens
  misc_RNA (1)...(19): siRNA sense strand
agaaagagaaggaugcauu

SEQ ID NO: 2181801 - RNA, 19 nt, Homo sapiens
  misc_RNA (1)...(19): siRNA sense strand
gaaggaugcauuaaagaag

SEQ ID NO: 2181802 - RNA, 19 nt, Homo sapiens
  misc_RNA (1)...(19): siRNA sense strand
ugaguggaauugcaaugaa

SEQ ID NO: 2181803 - RNA, 19 nt, Homo sapiens
  misc_RNA (1)...(19): siRNA sense strand
gaguagcguucauuagcuu

SEQ ID NO: 2181804 - RNA, 19 nt, Homo sapiens
  misc_RNA (1)...(19): siRNA sense strand
gaagaaguuacaucucaau

SEQ ID NO: 2181805 - RNA, 19 nt, Homo sapiens
  misc_RNA (1)...(19): siRNA sense strand
gagaaggaugcauuaaaga

SEQ ID NO: 2181806 - RNA, 19 nt, Homo sapiens
  misc_RNA (1)...(19): siRNA sense strand
uaaaggggacacuaaauua

SEQ ID NO: 2181807 - RNA, 19 nt, Homo sapiens
  misc_RNA (1)...(19): siRNA sense strand
gaguggaauugcaaugaau

SEQ ID NO: 2181808 - RNA, 19 nt, Homo sapiens
  misc_RNA (1)...(19): siRNA sense strand
auucagaacccuaaaguuu

SEQ ID NO: 2181809 - RNA, 19 nt, Homo sapiens
  misc_RNA (1)...(19): siRNA sense strand
gaucaaauugggaugcuau

SEQ ID NO: 2181810 - RNA, 19 nt, Homo sapiens
  misc_RNA (1)...(19): siRNA sense strand
agaggaugaugaugagaaa

SEQ ID NO: 2181811 - RNA, 19 nt, Homo sapiens
  misc_RNA (1)...(19): siRNA sense strand
acacuuacagcaagcauuu

SEQ ID NO: 2181812 - RNA, 19 nt, Homo sapiens
  misc_RNA (1)...(19): siRNA sense strand
gaugcuggguggccuuguu

SEQ ID NO: 2181813 - RNA, 19 nt, Homo sapiens
  misc_RNA (1)...(19): siRNA sense strand
ccaaggcuauggugucaca

SEQ ID NO: 2181814 - RNA, 19 nt, Homo sapiens
  misc_RNA (1)...(19): siRNA sense strand
ggacacagcuggagugaca

SEQ ID NO: 2181815 - RNA, 19 nt, Homo sapiens
  misc_RNA (1)...(19): siRNA sense strand
gaaagagaaggaugcauua

SEQ ID NO: 2181816 - RNA, 19 nt, Homo sapiens
  misc_RNA (1)...(19): siRNA sense strand
ccaguuggcucaaggauaa

SEQ ID NO: 2181817 - RNA, 19 nt, Homo sapiens
  misc_RNA (1)...(19): siRNA sense strand
uaaaggaggugaugguaaa

SEQ ID NO: 2181818 - RNA, 19 nt, Homo sapiens
  misc_RNA (1)...(19): siRNA sense strand
gaaacuggcuguuagcaau

SEQ ID NO: 2181819 - RNA, 19 nt, Homo sapiens
  misc_RNA (1)...(19): siRNA sense strand
gcuaagaaguuugaaauga

SEQ ID NO: 2181820 - RNA, 19 nt, Homo sapiens
  misc_RNA (1)...(19): siRNA sense strand
gcuaaugccucaccucuga

SEQ ID NO: 2181821 - RNA, 19 nt, Homo sapiens
  misc_RNA (1)...(19): siRNA sense strand
gcagacagaugaagaacga

SEQ ID NO: 2181822 - RNA, 19 nt, Homo sapiens
  misc_RNA (1)...(19): siRNA sense strand
ugagacagauccauuuauu

SEQ ID NO: 2181823 - RNA, 19 nt, Homo sapiens
  misc_RNA (1)...(19): siRNA sense strand
gaacaagggcccuccaguu

SEQ ID NO: 2181824 - RNA, 19 nt, Homo sapiens
  misc_RNA (1)...(19): siRNA sense strand
uagcaaguaucaugaguaa

SEQ ID NO: 2181825 - RNA, 19 nt, Homo sapiens
  misc_RNA (1)...(19): siRNA sense strand
gaacuaugugucuccauua

SEQ ID NO: 2181826 - RNA, 19 nt, Homo sapiens
  misc_RNA (1)...(19): siRNA sense strand
ggcaagagguggaaauguu

SEQ ID NO: 2181827 - RNA, 19 nt, Homo sapiens
  misc_RNA (1)...(19): siRNA sense strand
ggagauauuuggcuuugga

SEQ ID NO: 2181828 - RNA, 19 nt, Homo sapiens
  misc_RNA (1)...(19): siRNA sense strand
gcaccuaaacccaaaguaa

SEQ ID NO: 2181829 - RNA, 19 nt, Homo sapiens
  misc_RNA (1)...(19): siRNA sense strand
uagccuaacucagaauuua

SEQ ID NO: 2181830 - RNA, 19 nt, Homo sapiens
  misc_RNA (1)...(19): siRNA sense strand
gucgugaaguuaaguaaua

SEQ ID NO: 2181831 - RNA, 19 nt, Homo sapiens
  misc_RNA (1)...(19): siRNA sense strand
aagaacagcuugaguggaa

SEQ ID NO: 2181832 - RNA, 19 nt, Homo sapiens
  misc_RNA (1)...(19): siRNA sense strand
gagcaucauuauuggcuaa

SEQ ID NO: 2181833 - RNA, 19 nt, Homo sapiens
  misc_RNA (1)...(19): siRNA sense strand
ggaaggaucggcuacaaga

SEQ ID NO: 2181834 - RNA, 19 nt, Homo sapiens
  misc_RNA (1)...(19): siRNA sense strand
acacauucuucaagucuua

SEQ ID NO: 2181835 - RNA, 19 nt, Homo sapiens
  misc_RNA (1)...(19): siRNA sense strand
gaacuaggcccugucauuc

SEQ ID NO: 2181836 - RNA, 19 nt, Homo sapiens
  misc_RNA (1)...(19): siRNA sense strand
gaugagacagauccauuua

SEQ ID NO: 2181837 - RNA, 19 nt, Homo sapiens
  misc_RNA (1)...(19): siRNA sense strand
gaccaugcccuuccaguuu

SEQ ID NO: 2181838 - RNA, 19 nt, Homo sapiens
  misc_RNA (1)...(19): siRNA sense strand
gcuaugaguuagaaccaaa

SEQ ID NO: 2181839 - RNA, 19 nt, Homo sapiens
  misc_RNA (1)...(19): siRNA sense strand
gaacacagggugcuaccaa

SEQ ID NO: 2181840 - RNA, 19 nt, Homo sapiens
  misc_RNA (1)...(19): siRNA sense strand
ccaaguaguuccaguccaa

SEQ ID NO: 2181841 - RNA, 19 nt, Homo sapiens
  misc_RNA (1)...(19): siRNA sense strand
agacagauccauuuauuga

SEQ ID NO: 2181842 - RNA, 19 nt, Homo sapiens
  misc_RNA (1)...(19): siRNA sense strand
uagagaugcuagaugauuu

SEQ ID NO: 2181843 - RNA, 19 nt, Homo sapiens
  misc_RNA (1)...(19): siRNA sense strand
uaucaacacuggcacucua

SEQ ID NO: 2181844 - RNA, 19 nt, Homo sapiens
  misc_RNA (1)...(19): siRNA sense strand
aaacugaaacuggcuguua

SEQ ID NO: 2181845 - RNA, 19 nt, Homo sapiens
  misc_RNA (1)...(19): siRNA sense strand
uaaauucacacaagucuga

SEQ ID NO: 2181846 - RNA, 19 nt, Homo sapiens
  misc_RNA (1)...(19): siRNA sense strand
uaacagcccaguccauaaa

SEQ ID NO: 2181847 - RNA, 19 nt, Homo sapiens
  misc_RNA (1)...(19): siRNA sense strand
gaagcucauucacacagaa

SEQ ID NO: 2181848 - RNA, 19 nt, Homo sapiens
  misc_RNA (1)...(19): siRNA sense strand
gcaagcauuucacgaugga

SEQ ID NO: 2181849 - RNA, 19 nt, Homo sapiens
  misc_RNA (1)...(19): siRNA sense strand
caccauagccuaacucaga

SEQ ID NO: 2181850 - RNA, 19 nt, Homo sapiens
  misc_RNA (1)...(19): siRNA sense strand
gccuggagcuggugcuuaa

SEQ ID NO: 2181851 - RNA, 19 nt, Homo sapiens
  misc_RNA (1)...(19): siRNA sense strand
guagcaaccuuaacucaag

SEQ ID NO: 2181852 - RNA, 19 nt, Homo sapiens
  misc_RNA (1)...(19): siRNA sense strand
ggacauugaguuacagcua

SEQ ID NO: 2181853 - RNA, 19 nt, Homo sapiens
  misc_RNA (1)...(19): siRNA sense strand
gauccagaccuucccauuu

SEQ ID NO: 2181854 - RNA, 19 nt, Homo sapiens
  misc_RNA (1)...(19): siRNA sense strand
ccaggaugaucguuuaaga

SEQ ID NO: 2181855 - RNA, 19 nt, Homo sapiens
  misc_RNA (1)...(19): siRNA sense strand
ccucaaagcuaacaaacuc

SEQ ID NO: 2181856 - RNA, 19 nt, Homo sapiens
  misc_RNA (1)...(19): siRNA sense strand
caagccagauucacacuuc

SEQ ID NO: 2181857 - RNA, 19 nt, Homo sapiens
  misc_RNA (1)...(19): siRNA sense strand
ccaaauugcagacagauga

SEQ ID NO: 2181858 - RNA, 19 nt, Homo sapiens
  misc_RNA (1)...(19): siRNA sense strand
agagaaggaugcauuaaag

SEQ ID NO: 2181859 - RNA, 19 nt, Homo sapiens
  misc_RNA (1)...(19): siRNA sense strand
uaacacaaguaacaaaggu

SEQ ID NO: 2181860 - RNA, 19 nt, Homo sapiens
  misc_RNA (1)...(19): siRNA sense strand
gaacauccgaggcccaaga

SEQ ID NO: 2181861 - RNA, 19 nt, Homo sapiens
  misc_RNA (1)...(19): siRNA sense strand
gaucugaagaggaugauga

SEQ ID NO: 2181862 - RNA, 19 nt, Homo sapiens
  misc_RNA (1)...(19): siRNA sense strand
ugucaugccugaacagcua

SEQ ID NO: 2181863 - RNA, 19 nt, Homo sapiens
  misc_RNA (1)...(19): siRNA sense strand
ucacacagaagacccauuu

SEQ ID NO: 2181864 - RNA, 19 nt, Homo sapiens
  misc_RNA (1)...(19): siRNA sense strand
aaugaaauauggugggaaa

SEQ ID NO: 2181865 - RNA, 19 nt, Homo sapiens
  misc_RNA (1)...(19): siRNA sense strand
gcaggagcaucauuauugg

SEQ ID NO: 2181866 - RNA, 19 nt, Homo sapiens
  misc_RNA (1)...(19): siRNA sense strand
gcaccacuaccuccaguaa

SEQ ID NO: 2181867 - RNA, 19 nt, Homo sapiens
  misc_RNA (1)...(19): siRNA sense strand
ccaaauugcugccucuucu

SEQ ID NO: 2181868 - RNA, 19 nt, Homo sapiens
  misc_RNA (1)...(19): siRNA sense strand
gaaagccggaguguucaua

SEQ ID NO: 2181869 - RNA, 19 nt, Homo sapiens
  misc_RNA (1)...(19): siRNA sense strand
agaggcuuaugaugaauua

SEQ ID NO: 2181870 - RNA, 19 nt, Homo sapiens
  misc_RNA (1)...(19): siRNA sense strand
gcuaauaggacuagucugu

SEQ ID NO: 2181871 - RNA, 19 nt, Homo sapiens
  misc_RNA (1)...(19): siRNA sense strand
gaaugaacaucagcagaca

SEQ ID NO: 2181872 - RNA, 19 nt, Homo sapiens
  misc_RNA (1)...(19): siRNA sense strand
gguagccacuccagcacua

SEQ ID NO: 2181873 - RNA, 19 nt, Homo sapiens
  misc_RNA (1)...(19): siRNA sense strand
caaagaaaccccaggauuu

SEQ ID NO: 2181874 - RNA, 19 nt, Homo sapiens
  misc_RNA (1)...(19): siRNA sense strand
guaaaggaggugaugguaa

SEQ ID NO: 2181875 - RNA, 19 nt, Homo sapiens
  misc_RNA (1)...(19): siRNA sense strand
acacagaagacccauuuaa

SEQ ID NO: 2181876 - RNA, 19 nt, Homo sapiens
  misc_RNA (1)...(19): siRNA sense strand
uagcugccaugauuagaaa

SEQ ID NO: 2181877 - RNA, 19 nt, Homo sapiens
  misc_RNA (1)...(19): siRNA sense strand
ggaguuguggcucuaaauu

SEQ ID NO: 2181878 - RNA, 19 nt, Homo sapiens
  misc_RNA (1)...(19): siRNA sense strand
gccacuagcuacucccaaa

SEQ ID NO: 2181879 - RNA, 19 nt, Homo sapiens
  misc_RNA (1)...(19): siRNA sense strand
gcaagagguggaaauguug

SEQ ID NO: 2181880 - RNA, 19 nt, Homo sapiens
  misc_RNA (1)...(19): siRNA sense strand
ccagucugcugaagauuau

SEQ ID NO: 2181881 - RNA, 19 nt, Homo sapiens
  misc_RNA (1)...(19): siRNA sense strand
uauguaaccuuguugagau

SEQ ID NO: 2181882 - RNA, 19 nt, Homo sapiens
  misc_RNA (1)...(19): siRNA sense strand
gcaaugucaugccugaaca

SEQ ID NO: 2181883 - RNA, 19 nt, Homo sapiens
  misc_RNA (1)...(19): siRNA sense strand
uaaaacgucugaagaaguu

SEQ ID NO: 2181884 - RNA, 19 nt, Homo sapiens
  misc_RNA (1)...(19): siRNA sense strand
gcucuaaauucacacaagu

SEQ ID NO: 2181885 - RNA, 19 nt, Homo sapiens
  misc_RNA (1)...(19): siRNA sense strand
gaacagcuugaguggaauu

SEQ ID NO: 2181886 - RNA, 19 nt, Homo sapiens
  misc_RNA (1)...(19): siRNA sense strand
gcaaguaucaugaguaagc

SEQ ID NO: 2181887 - RNA, 19 nt, Homo sapiens
  misc_RNA (1)...(19): siRNA sense strand
cacuggaucuuguuucuga

SEQ ID NO: 2181888 - RNA, 19 nt, Homo sapiens
  misc_RNA (1)...(19): siRNA sense strand
aaauggaucugaagaggau

SEQ ID NO: 2181889 - RNA, 19 nt, Homo sapiens
  misc_RNA (1)...(19): siRNA sense strand
gaugaucguuuaagagaac

SEQ ID NO: 2181890 - RNA, 19 nt, Homo sapiens
  misc_RNA (1)...(19): siRNA sense strand
uguccaggaugaucguuua

SEQ ID NO: 2181891 - RNA, 19 nt, Homo sapiens
  misc_RNA (1)...(19): siRNA sense strand
cugaagaaguuacaucuca

SEQ ID NO: 2181892 - RNA, 19 nt, Homo sapiens
  misc_RNA (1)...(19): siRNA sense strand
cauuaaagaaggagucuaa

SEQ ID NO: 2181893 - RNA, 19 nt, Homo sapiens
  misc_RNA (1)...(19): siRNA sense strand
ccgcuucucuaacaacaaa

SEQ ID NO: 2181894 - RNA, 19 nt, Homo sapiens
  misc_RNA (1)...(19): siRNA sense strand
agaacuaugugucuccauu

SEQ ID NO: 2181895 - RNA, 19 nt, Homo sapiens
  misc_RNA (1)...(19): siRNA sense strand
gggaugcuaugaguuagaa

SEQ ID NO: 2181896 - RNA, 19 nt, Homo sapiens
  misc_RNA (1)...(19): siRNA sense strand
guggaaauguuggcuaaga

SEQ ID NO: 2181897 - RNA, 19 nt, Homo sapiens
  misc_RNA (1)...(19): siRNA sense strand
gccagucugcugaagauua

SEQ ID NO: 2181898 - RNA, 19 nt, Homo sapiens
  misc_RNA (1)...(19): siRNA sense strand
ccacugggaugacacuauc

SEQ ID NO: 2181899 - RNA, 19 nt, Homo sapiens
  misc_RNA (1)...(19): siRNA sense strand
ggaugaucguuuaagagaa

SEQ ID NO: 2181900 - RNA, 19 nt, Homo sapiens
  misc_RNA (1)...(19): siRNA sense strand
agaaagagaaggaugcauu

SEQ ID NO: 2181901 - RNA, 19 nt, Homo sapiens
  misc_RNA (1)...(19): siRNA sense strand
gaaggaugcauuaaagaag

SEQ ID NO: 2181902 - RNA, 19 nt, Homo sapiens
  misc_RNA (1)...(19): siRNA sense strand
ugaguggaauugcaaugaa

SEQ ID NO: 2181903 - RNA, 19 nt, Homo sapiens
  misc_RNA (1)...(19): siRNA sense strand
gaguagcguucauuagcuu

SEQ ID NO: 2181904 - RNA, 19 nt, Homo sapiens
  misc_RNA (1)...(19): siRNA sense strand
gaagaaguuacaucucaau

SEQ ID NO: 2181905 - RNA, 19 nt, Homo sapiens
  misc_RNA (1)...(19): siRNA sense strand
gagaaggaugcauuaaaga

SEQ ID NO: 2181906 - RNA, 19 nt, Homo sapiens
  misc_RNA (1)...(19): siRNA sense strand
uaaaggggacacuaaauua

SEQ ID NO: 2181907 - RNA, 19 nt, Homo sapiens
  misc_RNA (1)...(19): siRNA sense strand
gaguggaauugcaaugaau

SEQ ID NO: 2181908 - RNA, 19 nt, Homo sapiens
  misc_RNA (1)...(19): siRNA sense strand
auucagaacccuaaaguuu

SEQ ID NO: 2181909 - RNA, 19 nt, Homo sapiens
  misc_RNA (1)...(19): siRNA sense strand
gaucaaauugggaugcuau

SEQ ID NO: 2181910 - RNA, 19 nt, Homo sapiens
  misc_RNA (1)...(19): siRNA sense strand
agaggaugaugaugagaaa

SEQ ID NO: 2181911 - RNA, 19 nt, Homo sapiens
  misc_RNA (1)...(19): siRNA sense strand
acacuuacagcaagcauuu

SEQ ID NO: 2181912 - RNA, 19 nt, Homo sapiens
  misc_RNA (1)...(19): siRNA sense strand
gaugcuggguggccuuguu

SEQ ID NO: 2181913 - RNA, 19 nt, Homo sapiens
  misc_RNA (1)...(19): siRNA sense strand
ccaaggcuauggugucaca

SEQ ID NO: 2181914 - RNA, 19 nt, Homo sapiens
  misc_RNA (1)...(19): siRNA sense strand
gcacagaccugcacaaguu

SEQ ID NO: 2181915 - RNA, 19 nt, Homo sapiens
  misc_RNA (1)...(19): siRNA sense strand
ggagauaucuggaaguuga

SEQ ID NO: 2181916 - RNA, 19 nt, Homo sapiens
  misc_RNA (1)...(19): siRNA sense strand
ggacacaacugaaaccaaa

SEQ ID NO: 2181917 - RNA, 19 nt, Homo sapiens
  misc_RNA (1)...(19): siRNA sense strand
uaaacaagauccaugcaua

SEQ ID NO: 2181918 - RNA, 19 nt, Homo sapiens
  misc_RNA (1)...(19): siRNA sense strand
gaagaaacccagucguaua

SEQ ID NO: 2181919 - RNA, 19 nt, Homo sapiens
  misc_RNA (1)...(19): siRNA sense strand
caaacaaccuauccuguga

SEQ ID NO: 2181920 - RNA, 19 nt, Homo sapiens
  misc_RNA (1)...(19): siRNA sense strand
gaaacccagucguauauau

SEQ ID NO: 2181921 - RNA, 19 nt, Homo sapiens
  misc_RNA (1)...(19): siRNA sense strand
gggaggaaauugcaacaaa

SEQ ID NO: 2181922 - RNA, 19 nt, Homo sapiens
  misc_RNA (1)...(19): siRNA sense strand
gaacauccaugaaaacaaa

SEQ ID NO: 2181923 - RNA, 19 nt, Homo sapiens
  misc_RNA (1)...(19): siRNA sense strand
guacaaccggcuauauuua

SEQ ID NO: 2181924 - RNA, 19 nt, Homo sapiens
  misc_RNA (1)...(19): siRNA sense strand
gcauauuccuuaaacaaga

SEQ ID NO: 2181925 - RNA, 19 nt, Homo sapiens
  misc_RNA (1)...(19): siRNA sense strand
uaacccagauuaugaugaa

SEQ ID NO: 2181926 - RNA, 19 nt, Homo sapiens
  misc_RNA (1)...(19): siRNA sense strand
ggaauuggcaucuauguca

SEQ ID NO: 2181927 - RNA, 19 nt, Homo sapiens
  misc_RNA (1)...(19): siRNA sense strand
gggcacagauggcuacaug

SEQ ID NO: 2181928 - RNA, 19 nt, Homo sapiens
  misc_RNA (1)...(19): siRNA sense strand
cauacaaccuugaaacgaa

SEQ ID NO: 2181929 - RNA, 19 nt, Homo sapiens
  misc_RNA (1)...(19): siRNA sense strand
gaagagaggauuuacaucu

SEQ ID NO: 2181930 - RNA, 19 nt, Homo sapiens
  misc_RNA (1)...(19): siRNA sense strand
caaccuauccugugaucua

SEQ ID NO: 2181931 - RNA, 19 nt, Homo sapiens
  misc_RNA (1)...(19): siRNA sense strand
gggagggccugauaaugaa

SEQ ID NO: 2181932 - RNA, 19 nt, Homo sapiens
  misc_RNA (1)...(19): siRNA sense strand
gauaauaccaaccuauaug

SEQ ID NO: 2181933 - RNA, 19 nt, Homo sapiens
  misc_RNA (1)...(19): siRNA sense strand
gggaagaaacccagucgua

SEQ ID NO: 2181934 - RNA, 19 nt, Homo sapiens
  misc_RNA (1)...(19): siRNA sense strand
gguacaaccggcuauauuu

SEQ ID NO: 2181935 - RNA, 19 nt, Homo sapiens
  misc_RNA (1)...(19): siRNA sense strand
ggacugggucauuguuuaa

SEQ ID NO: 2181936 - RNA, 19 nt, Homo sapiens
  misc_RNA (1)...(19): siRNA sense strand
caacaaaaccccaugaaaa

SEQ ID NO: 2181937 - RNA, 19 nt, Homo sapiens
  misc_RNA (1)...(19): siRNA sense strand
cagauaauaccaaccuaua

SEQ ID NO: 2181938 - RNA, 19 nt, Homo sapiens
  misc_RNA (1)...(19): siRNA sense strand
ggaagaaacccagucguau

SEQ ID NO: 2181939 - RNA, 19 nt, Homo sapiens
  misc_RNA (1)...(19): siRNA sense strand
ucagggaacucuggaggua

SEQ ID NO: 2181940 - RNA, 19 nt, Homo sapiens
  misc_RNA (1)...(19): siRNA sense strand
gaggugauccugggagaua

SEQ ID NO: 2181941 - RNA, 19 nt, Homo sapiens
  misc_RNA (1)...(19): siRNA sense strand
caaacggacugggucauug

SEQ ID NO: 2181942 - RNA, 19 nt, Homo sapiens
  misc_RNA (1)...(19): siRNA sense strand
ggacagcauauuccuuaaa

SEQ ID NO: 2181943 - RNA, 19 nt, Homo sapiens
  misc_RNA (1)...(19): siRNA sense strand
cggacugggucauuguuua

SEQ ID NO: 2181944 - RNA, 19 nt, Homo sapiens
  misc_RNA (1)...(19): siRNA sense strand
ugccagagccaguuuauuu

SEQ ID NO: 2181945 - RNA, 19 nt, Homo sapiens
  misc_RNA (1)...(19): siRNA sense strand
guccauguguguaauguga

SEQ ID NO: 2181946 - RNA, 19 nt, Homo sapiens
  misc_RNA (1)...(19): siRNA sense strand
caaccuauauguguuugga

SEQ ID NO: 2181947 - RNA, 19 nt, Homo sapiens
  misc_RNA (1)...(19): siRNA sense strand
gcaaaccucucccgaacac

SEQ ID NO: 2181948 - RNA, 19 nt, Homo sapiens
  misc_RNA (1)...(19): siRNA sense strand
caagauccaugcauacaac

SEQ ID NO: 2181949 - RNA, 19 nt, Homo sapiens
  misc_RNA (1)...(19): siRNA sense strand
caaguuagaucucaauacc

SEQ ID NO: 2181950 - RNA, 19 nt, Homo sapiens
  misc_RNA (1)...(19): siRNA sense strand
gcagauaauaccaaccuau

SEQ ID NO: 2181951 - RNA, 19 nt, Homo sapiens
  misc_RNA (1)...(19): siRNA sense strand
aguugaaucugcagacuuu

SEQ ID NO: 2181952 - RNA, 19 nt, Homo sapiens
  misc_RNA (1)...(19): siRNA sense strand
ggaggaaauugcaacaaaa

SEQ ID NO: 2181953 - RNA, 19 nt, Homo sapiens
  misc_RNA (1)...(19): siRNA sense strand
agagaggauuuacaucuug

SEQ ID NO: 2181954 - RNA, 19 nt, Homo sapiens
  misc_RNA (1)...(19): siRNA sense strand
gaacucuggagguaucauu

SEQ ID NO: 2181955 - RNA, 19 nt, Homo sapiens
  misc_RNA (1)...(19): siRNA sense strand
cgggagggccugauaauga

SEQ ID NO: 2181956 - RNA, 19 nt, Homo sapiens
  misc_RNA (1)...(19): siRNA sense strand
gacagcauauuccuuaaac

SEQ ID NO: 2181957 - RNA, 19 nt, Homo sapiens
  misc_RNA (1)...(19): siRNA sense strand
cagcauauuccuuaaacaa

SEQ ID NO: 2181958 - RNA, 19 nt, Homo sapiens
  misc_RNA (1)...(19): siRNA sense strand
gaaucgggagggccugaua

SEQ ID NO: 2181959 - RNA, 19 nt, Homo sapiens
  misc_RNA (1)...(19): siRNA sense strand
gcacaaguuagaucucaau

SEQ ID NO: 2181960 - RNA, 19 nt, Homo sapiens
  misc_RNA (1)...(19): siRNA sense strand
caacggcaaugacguccau

SEQ ID NO: 2181961 - RNA, 19 nt, Homo sapiens
  misc_RNA (1)...(19): siRNA sense strand
guacgggcaucccauuugg

SEQ ID NO: 2181962 - RNA, 19 nt, Homo sapiens
  misc_RNA (1)...(19): siRNA sense strand
ggagagagcaacggcaaug

SEQ ID NO: 2181963 - RNA, 19 nt, Homo sapiens
  misc_RNA (1)...(19): siRNA sense strand
ggacucaucgaacgcuuga

SEQ ID NO: 2181964 - RNA, 19 nt, Homo sapiens
  misc_RNA (1)...(19): siRNA sense strand
ccugugaucuaccagaaga

SEQ ID NO: 2181965 - RNA, 19 nt, Homo sapiens
  misc_RNA (1)...(19): siRNA sense strand
cagaagagaggauuuacau

SEQ ID NO: 2181966 - RNA, 19 nt, Homo sapiens
  misc_RNA (1)...(19): siRNA sense strand
ggucauuguuuaagaucug

SEQ ID NO: 2181967 - RNA, 19 nt, Homo sapiens
  misc_RNA (1)...(19): siRNA sense strand
gaaguugaaucugcagacu

SEQ ID NO: 2181968 - RNA, 19 nt, Homo sapiens
  misc_RNA (1)...(19): siRNA sense strand
uauauguguuuggagguua

SEQ ID NO: 2181969 - RNA, 19 nt, Homo sapiens
  misc_RNA (1)...(19): siRNA sense strand
caucgaacgcuugaaauga

SEQ ID NO: 2181970 - RNA, 19 nt, Homo sapiens
  misc_RNA (1)...(19): siRNA sense strand
cuggacagcauauuccuua

SEQ ID NO: 2181971 - RNA, 19 nt, Homo sapiens
  misc_RNA (1)...(19): siRNA sense strand
aagaaacccagucguauau

SEQ ID NO: 2181972 - RNA, 19 nt, Homo sapiens
  misc_RNA (1)...(19): siRNA sense strand
uauaagagaugggcuuugc

SEQ ID NO: 2181973 - RNA, 19 nt, Homo sapiens
  misc_RNA (1)...(19): siRNA sense strand
ggagguacaaccggcuaua

SEQ ID NO: 2181974 - RNA, 19 nt, Homo sapiens
  misc_RNA (1)...(19): siRNA sense strand
gaaguggacaucguugugu

SEQ ID NO: 2181975 - RNA, 19 nt, Homo sapiens
  misc_RNA (1)...(19): siRNA sense strand
guggugaacauccaugaaa

SEQ ID NO: 2181976 - RNA, 19 nt, Homo sapiens
  misc_RNA (1)...(19): siRNA sense strand
caucaauggcucccuuuau

SEQ ID NO: 2181977 - RNA, 19 nt, Homo sapiens
  misc_RNA (1)...(19): siRNA sense strand
gcuauggccaucaucaaug

SEQ ID NO: 2181978 - RNA, 19 nt, Homo sapiens
  misc_RNA (1)...(19): siRNA sense strand
ugggagauaucuggaaguu

SEQ ID NO: 2181979 - RNA, 19 nt, Homo sapiens
  misc_RNA (1)...(19): siRNA sense strand
gcauacaaccuugaaacga

SEQ ID NO: 2181980 - RNA, 19 nt, Homo sapiens
  misc_RNA (1)...(19): siRNA sense strand
gguacgggcaucccauuug

SEQ ID NO: 2181981 - RNA, 19 nt, Homo sapiens
  misc_RNA (1)...(19): siRNA sense strand
auaccaaccuauauguguu

SEQ ID NO: 2181982 - RNA, 19 nt, Homo sapiens
  misc_RNA (1)...(19): siRNA sense strand
guacuuccuggacagcaua

SEQ ID NO: 2181983 - RNA, 19 nt, Homo sapiens
  misc_RNA (1)...(19): siRNA sense strand
gagaguggacacaacugaa

SEQ ID NO: 2181984 - RNA, 19 nt, Homo sapiens
  misc_RNA (1)...(19): siRNA sense strand
aucaauggcucccuuuaug

SEQ ID NO: 2181985 - RNA, 19 nt, Homo sapiens
  misc_RNA (1)...(19): siRNA sense strand
uaccagaagagaggauuua

SEQ ID NO: 2181986 - RNA, 19 nt, Homo sapiens
  misc_RNA (1)...(19): siRNA sense strand
gaggaguggugaacaucca

SEQ ID NO: 2181987 - RNA, 19 nt, Homo sapiens
  misc_RNA (1)...(19): siRNA sense strand
uggcaucuaugucacuugu

SEQ ID NO: 2181988 - RNA, 19 nt, Homo sapiens
  misc_RNA (1)...(19): siRNA sense strand
gcaacaaaaccccaugaaa

SEQ ID NO: 2181989 - RNA, 19 nt, Homo sapiens
  misc_RNA (1)...(19): siRNA sense strand
ggccugauaaugaagacua

SEQ ID NO: 2181990 - RNA, 19 nt, Homo sapiens
  misc_RNA (1)...(19): siRNA sense strand
ucacuugugcugcauggaa

SEQ ID NO: 2181991 - RNA, 19 nt, Homo sapiens
  misc_RNA (1)...(19): siRNA sense strand
cuuuaugucuuuggaggua

SEQ ID NO: 2181992 - RNA, 19 nt, Homo sapiens
  misc_RNA (1)...(19): siRNA sense strand
gagagagcaacggcaauga

SEQ ID NO: 2181993 - RNA, 19 nt, Homo sapiens
  misc_RNA (1)...(19): siRNA sense strand
auacaaccuugaaacgaau

SEQ ID NO: 2181994 - RNA, 19 nt, Homo sapiens
  misc_RNA (1)...(19): siRNA sense strand
acaaccggcuauauuuaca

SEQ ID NO: 2181995 - RNA, 19 nt, Homo sapiens
  misc_RNA (1)...(19): siRNA sense strand
gacaggcuauggccaucau

SEQ ID NO: 2181996 - RNA, 19 nt, Homo sapiens
  misc_RNA (1)...(19): siRNA sense strand
ccaguggcgaccagaaauu

SEQ ID NO: 2181997 - RNA, 19 nt, Homo sapiens
  misc_RNA (1)...(19): siRNA sense strand
gagguacaaccggcuauau

SEQ ID NO: 2181998 - RNA, 19 nt, Homo sapiens
  misc_RNA (1)...(19): siRNA sense strand
ggcaaugacguccaugugu

SEQ ID NO: 2181999 - RNA, 19 nt, Homo sapiens
  misc_RNA (1)...(19): siRNA sense strand
gagguacgggcaucccauu

SEQ ID NO: 2182000 - RNA, 19 nt, Homo sapiens
  misc_RNA (1)...(19): siRNA sense strand
guaaugugaaguauaagag

SEQ ID NO: 2182001 - RNA, 19 nt, Homo sapiens
  misc_RNA (1)...(19): siRNA sense strand
aaugaagacuauccucucu

SEQ ID NO: 2182002 - RNA, 19 nt, Homo sapiens
  misc_RNA (1)...(19): siRNA sense strand
acgaaugccugggaggaaa

SEQ ID NO: 2182003 - RNA, 19 nt, Homo sapiens
  misc_RNA (1)...(19): siRNA sense strand
ggcagauaauaccaaccua

SEQ ID NO: 2182004 - RNA, 19 nt, Homo sapiens
  misc_RNA (1)...(19): siRNA sense strand
agaguggacacaacugaaa

SEQ ID NO: 2182005 - RNA, 19 nt, Homo sapiens
  misc_RNA (1)...(19): siRNA sense strand
uggcucccuuuaugucuuu

SEQ ID NO: 2182006 - RNA, 19 nt, Homo sapiens
  misc_RNA (1)...(19): siRNA sense strand
ugacguccauguguguaau

SEQ ID NO: 2182007 - RNA, 19 nt, Homo sapiens
  misc_RNA (1)...(19): siRNA sense strand
aaaccucucccgaacacaa

SEQ ID NO: 2182008 - RNA, 19 nt, Homo sapiens
  misc_RNA (1)...(19): siRNA sense strand
uaagaucuggcugguggua

SEQ ID NO: 2182009 - RNA, 19 nt, Homo sapiens
  misc_RNA (1)...(19): siRNA sense strand
cuauauguguuuggagguu

SEQ ID NO: 2182010 - RNA, 19 nt, Homo sapiens
  misc_RNA (1)...(19): siRNA sense strand
gauccaugcauacaaccuu

SEQ ID NO: 2182011 - RNA, 19 nt, Homo sapiens
  misc_RNA (1)...(19): siRNA sense strand
aaacaagauccaugcauac

SEQ ID NO: 2182012 - RNA, 19 nt, Homo sapiens
  misc_RNA (1)...(19): siRNA sense strand
ucaauggcucccuuuaugu

SEQ ID NO: 2182013 - RNA, 19 nt, Homo sapiens
  misc_RNA (1)...(19): siRNA sense strand
aaacccagucguauauaug

SEQ ID NO: 2182014 - RNA, 19 nt, Homo sapiens
  misc_RNA (1)...(19): siRNA sense strand
gcacagaccugcacaaguu

SEQ ID NO: 2182015 - RNA, 19 nt, Homo sapiens
  misc_RNA (1)...(19): siRNA sense strand
ggagauaucuggaaguuga

SEQ ID NO: 2182016 - RNA, 19 nt, Homo sapiens
  misc_RNA (1)...(19): siRNA sense strand
ggacacaacugaaaccaaa

SEQ ID NO: 2182017 - RNA, 19 nt, Homo sapiens
  misc_RNA (1)...(19): siRNA sense strand
uaaacaagauccaugcaua

SEQ ID NO: 2182018 - RNA, 19 nt, Homo sapiens
  misc_RNA (1)...(19): siRNA sense strand
gaagaaacccagucguaua

SEQ ID NO: 2182019 - RNA, 19 nt, Homo sapiens
  misc_RNA (1)...(19): siRNA sense strand
caaacaaccuauccuguga

SEQ ID NO: 2182020 - RNA, 19 nt, Homo sapiens
  misc_RNA (1)...(19): siRNA sense strand
gaaacccagucguauauau

SEQ ID NO: 2182021 - RNA, 19 nt, Homo sapiens
  misc_RNA (1)...(19): siRNA sense strand
gggaggaaauugcaacaaa

SEQ ID NO: 2182022 - RNA, 19 nt, Homo sapiens
  misc_RNA (1)...(19): siRNA sense strand
gaacauccaugaaaacaaa

SEQ ID NO: 2182023 - RNA, 19 nt, Homo sapiens
  misc_RNA (1)...(19): siRNA sense strand
guacaaccggcuauauuua

SEQ ID NO: 2182024 - RNA, 19 nt, Homo sapiens
  misc_RNA (1)...(19): siRNA sense strand
gcauauuccuuaaacaaga

SEQ ID NO: 2182025 - RNA, 19 nt, Homo sapiens
  misc_RNA (1)...(19): siRNA sense strand
uaacccagauuaugaugaa

SEQ ID NO: 2182026 - RNA, 19 nt, Homo sapiens
  misc_RNA (1)...(19): siRNA sense strand
ggaauuggcaucuauguca

SEQ ID NO: 2182027 - RNA, 19 nt, Homo sapiens
  misc_RNA (1)...(19): siRNA sense strand
gggcacagauggcuacaug

SEQ ID NO: 2182028 - RNA, 19 nt, Homo sapiens
  misc_RNA (1)...(19): siRNA sense strand
cauacaaccuugaaacgaa

SEQ ID NO: 2182029 - RNA, 19 nt, Homo sapiens
  misc_RNA (1)...(19): siRNA sense strand
gaagagaggauuuacaucu

SEQ ID NO: 2182030 - RNA, 19 nt, Homo sapiens
  misc_RNA (1)...(19): siRNA sense strand
caaccuauccugugaucua

SEQ ID NO: 2182031 - RNA, 19 nt, Homo sapiens
  misc_RNA (1)...(19): siRNA sense strand
gggagggccugauaaugaa

SEQ ID NO: 2182032 - RNA, 19 nt, Homo sapiens
  misc_RNA (1)...(19): siRNA sense strand
gauaauaccaaccuauaug

SEQ ID NO: 2182033 - RNA, 19 nt, Homo sapiens
  misc_RNA (1)...(19): siRNA sense strand
gggaagaaacccagucgua

SEQ ID NO: 2182034 - RNA, 19 nt, Homo sapiens
  misc_RNA (1)...(19): siRNA sense strand
gguacaaccggcuauauuu

SEQ ID NO: 2182035 - RNA, 19 nt, Homo sapiens
  misc_RNA (1)...(19): siRNA sense strand
ggacugggucauuguuuaa

SEQ ID NO: 2182036 - RNA, 19 nt, Homo sapiens
  misc_RNA (1)...(19): siRNA sense strand
caacaaaaccccaugaaaa

SEQ ID NO: 2182037 - RNA, 19 nt, Homo sapiens
  misc_RNA (1)...(19): siRNA sense strand
cagauaauaccaaccuaua

SEQ ID NO: 2182038 - RNA, 19 nt, Homo sapiens
  misc_RNA (1)...(19): siRNA sense strand
ggaagaaacccagucguau

SEQ ID NO: 2182039 - RNA, 19 nt, Homo sapiens
  misc_RNA (1)...(19): siRNA sense strand
ucagggaacucuggaggua

SEQ ID NO: 2182040 - RNA, 19 nt, Homo sapiens
  misc_RNA (1)...(19): siRNA sense strand
gaggugauccugggagaua

SEQ ID NO: 2182041 - RNA, 19 nt, Homo sapiens
  misc_RNA (1)...(19): siRNA sense strand
caaacggacugggucauug

SEQ ID NO: 2182042 - RNA, 19 nt, Homo sapiens
  misc_RNA (1)...(19): siRNA sense strand
ggacagcauauuccuuaaa

SEQ ID NO: 2182043 - RNA, 19 nt, Homo sapiens
  misc_RNA (1)...(19): siRNA sense strand
cggacugggucauuguuua

SEQ ID NO: 2182044 - RNA, 19 nt, Homo sapiens
  misc_RNA (1)...(19): siRNA sense strand
ugccagagccaguuuauuu

SEQ ID NO: 2182045 - RNA, 19 nt, Homo sapiens
  misc_RNA (1)...(19): siRNA sense strand
guccauguguguaauguga

SEQ ID NO: 2182046 - RNA, 19 nt, Homo sapiens
  misc_RNA (1)...(19): siRNA sense strand
caaccuauauguguuugga

SEQ ID NO: 2182047 - RNA, 19 nt, Homo sapiens
  misc_RNA (1)...(19): siRNA sense strand
gcaaaccucucccgaacac

SEQ ID NO: 2182048 - RNA, 19 nt, Homo sapiens
  misc_RNA (1)...(19): siRNA sense strand
caagauccaugcauacaac

SEQ ID NO: 2182049 - RNA, 19 nt, Homo sapiens
  misc_RNA (1)...(19): siRNA sense strand
caaguuagaucucaauacc

SEQ ID NO: 2182050 - RNA, 19 nt, Homo sapiens
  misc_RNA (1)...(19): siRNA sense strand
gcagauaauaccaaccuau

SEQ ID NO: 2182051 - RNA, 19 nt, Homo sapiens
  misc_RNA (1)...(19): siRNA sense strand
aguugaaucugcagacuuu

SEQ ID NO: 2182052 - RNA, 19 nt, Homo sapiens
  misc_RNA (1)...(19): siRNA sense strand
ggaggaaauugcaacaaaa

SEQ ID NO: 2182053 - RNA, 19 nt, Homo sapiens
  misc_RNA (1)...(19): siRNA sense strand
agagaggauuuacaucuug

SEQ ID NO: 2182054 - RNA, 19 nt, Homo sapiens
  misc_RNA (1)...(19): siRNA sense strand
gaacucuggagguaucauu

SEQ ID NO: 2182055 - RNA, 19 nt, Homo sapiens
  misc_RNA (1)...(19): siRNA sense strand
cgggagggccugauaauga

SEQ ID NO: 2182056 - RNA, 19 nt, Homo sapiens
  misc_RNA (1)...(19): siRNA sense strand
gacagcauauuccuuaaac

SEQ ID NO: 2182057 - RNA, 19 nt, Homo sapiens
  misc_RNA (1)...(19): siRNA sense strand
cagcauauuccuuaaacaa

SEQ ID NO: 2182058 - RNA, 19 nt, Homo sapiens
  misc_RNA (1)...(19): siRNA sense strand
gaaucgggagggccugaua

SEQ ID NO: 2182059 - RNA, 19 nt, Homo sapiens
  misc_RNA (1)...(19): siRNA sense strand
gcacaaguuagaucucaau

SEQ ID NO: 2182060 - RNA, 19 nt, Homo sapiens
  misc_RNA (1)...(19): siRNA sense strand
caacggcaaugacguccau

SEQ ID NO: 2182061 - RNA, 19 nt, Homo sapiens
  misc_RNA (1)...(19): siRNA sense strand
guacgggcaucccauuugg

SEQ ID NO: 2182062 - RNA, 19 nt, Homo sapiens
  misc_RNA (1)...(19): siRNA sense strand
ggagagagcaacggcaaug

SEQ ID NO: 2182063 - RNA, 19 nt, Homo sapiens
  misc_RNA (1)...(19): siRNA sense strand
ggacucaucgaacgcuuga

SEQ ID NO: 2182064 - RNA, 19 nt, Homo sapiens
  misc_RNA (1)...(19): siRNA sense strand
ccugugaucuaccagaaga

SEQ ID NO: 2182065 - RNA, 19 nt, Homo sapiens
  misc_RNA (1)...(19): siRNA sense strand
cagaagagaggauuuacau

SEQ ID NO: 2182066 - RNA, 19 nt, Homo sapiens
  misc_RNA (1)...(19): siRNA sense strand
ggucauuguuuaagaucug

SEQ ID NO: 2182067 - RNA, 19 nt, Homo sapiens
  misc_RNA (1)...(19): siRNA sense strand
gaaguugaaucugcagacu

SEQ ID NO: 2182068 - RNA, 19 nt, Homo sapiens
  misc_RNA (1)...(19): siRNA sense strand
uauauguguuuggagguua

SEQ ID NO: 2182069 - RNA, 19 nt, Homo sapiens
  misc_RNA (1)...(19): siRNA sense strand
caucgaacgcuugaaauga

SEQ ID NO: 2182070 - RNA, 19 nt, Homo sapiens
  misc_RNA (1)...(19): siRNA sense strand
cuggacagcauauuccuua

SEQ ID NO: 2182071 - RNA, 19 nt, Homo sapiens
  misc_RNA (1)...(19): siRNA sense strand
aagaaacccagucguauau

SEQ ID NO: 2182072 - RNA, 19 nt, Homo sapiens
  misc_RNA (1)...(19): siRNA sense strand
uauaagagaugggcuuugc

SEQ ID NO: 2182073 - RNA, 19 nt, Homo sapiens
  misc_RNA (1)...(19): siRNA sense strand
ggagguacaaccggcuaua

SEQ ID NO: 2182074 - RNA, 19 nt, Homo sapiens
  misc_RNA (1)...(19): siRNA sense strand
gaaguggacaucguugugu

SEQ ID NO: 2182075 - RNA, 19 nt, Homo sapiens
  misc_RNA (1)...(19): siRNA sense strand
guggugaacauccaugaaa

SEQ ID NO: 2182076 - RNA, 19 nt, Homo sapiens
  misc_RNA (1)...(19): siRNA sense strand
caucaauggcucccuuuau

SEQ ID NO: 2182077 - RNA, 19 nt, Homo sapiens
  misc_RNA (1)...(19): siRNA sense strand
gcuauggccaucaucaaug

SEQ ID NO: 2182078 - RNA, 19 nt, Homo sapiens
  misc_RNA (1)...(19): siRNA sense strand
ugggagauaucuggaaguu

SEQ ID NO: 2182079 - RNA, 19 nt, Homo sapiens
  misc_RNA (1)...(19): siRNA sense strand
gcauacaaccuugaaacga

SEQ ID NO: 2182080 - RNA, 19 nt, Homo sapiens
  misc_RNA (1)...(19): siRNA sense strand
gguacgggcaucccauuug

SEQ ID NO: 2182081 - RNA, 19 nt, Homo sapiens
  misc_RNA (1)...(19): siRNA sense strand
auaccaaccuauauguguu

SEQ ID NO: 2182082 - RNA, 19 nt, Homo sapiens
  misc_RNA (1)...(19): siRNA sense strand
guacuuccuggacagcaua

SEQ ID NO: 2182083 - RNA, 19 nt, Homo sapiens
  misc_RNA (1)...(19): siRNA sense strand
gagaguggacacaacugaa

SEQ ID NO: 2182084 - RNA, 19 nt, Homo sapiens
  misc_RNA (1)...(19): siRNA sense strand
aucaauggcucccuuuaug

SEQ ID NO: 2182085 - RNA, 19 nt, Homo sapiens
  misc_RNA (1)...(19): siRNA sense strand
uaccagaagagaggauuua

SEQ ID NO: 2182086 - RNA, 19 nt, Homo sapiens
  misc_RNA (1)...(19): siRNA sense strand
gaggaguggugaacaucca

SEQ ID NO: 2182087 - RNA, 19 nt, Homo sapiens
  misc_RNA (1)...(19): siRNA sense strand
uggcaucuaugucacuugu

SEQ ID NO: 2182088 - RNA, 19 nt, Homo sapiens
  misc_RNA (1)...(19): siRNA sense strand
gcaacaaaaccccaugaaa

SEQ ID NO: 2182089 - RNA, 19 nt, Homo sapiens
  misc_RNA (1)...(19): siRNA sense strand
ggccugauaaugaagacua

SEQ ID NO: 2182090 - RNA, 19 nt, Homo sapiens
  misc_RNA (1)...(19): siRNA sense strand
ucacuugugcugcauggaa

SEQ ID NO: 2182091 - RNA, 19 nt, Homo sapiens
  misc_RNA (1)...(19): siRNA sense strand
cuuuaugucuuuggaggua

SEQ ID NO: 2182092 - RNA, 19 nt, Homo sapiens
  misc_RNA (1)...(19): siRNA sense strand
gagagagcaacggcaauga

SEQ ID NO: 2182093 - RNA, 19 nt, Homo sapiens
  misc_RNA (1)...(19): siRNA sense strand
auacaaccuugaaacgaau

SEQ ID NO: 2182094 - RNA, 19 nt, Homo sapiens
  misc_RNA (1)...(19): siRNA sense strand
acaaccggcuauauuuaca

SEQ ID NO: 2182095 - RNA, 19 nt, Homo sapiens
  misc_RNA (1)...(19): siRNA sense strand
gacaggcuauggccaucau

SEQ ID NO: 2182096 - RNA, 19 nt, Homo sapiens
  misc_RNA (1)...(19): siRNA sense strand
ccaguggcgaccagaaauu

SEQ ID NO: 2182097 - RNA, 19 nt, Homo sapiens
  misc_RNA (1)...(19): siRNA sense strand
gagguacaaccggcuauau

SEQ ID NO: 2182098 - RNA, 19 nt, Homo sapiens
  misc_RNA (1)...(19): siRNA sense strand
ggcaaugacguccaugugu

SEQ ID NO: 2182099 - RNA, 19 nt, Homo sapiens
  misc_RNA (1)...(19): siRNA sense strand
gagguacgggcaucccauu

SEQ ID NO: 2182100 - RNA, 19 nt, Homo sapiens
  misc_RNA (1)...(19): siRNA sense strand
guaaugugaaguauaagag

SEQ ID NO: 2182101 - RNA, 19 nt, Homo sapiens
  misc_RNA (1)...(19): siRNA sense strand
aaugaagacuauccucucu

SEQ ID NO: 2182102 - RNA, 19 nt, Homo sapiens
  misc_RNA (1)...(19): siRNA sense strand
acgaaugccugggaggaaa

SEQ ID NO: 2182103 - RNA, 19 nt, Homo sapiens
  misc_RNA (1)...(19): siRNA sense strand
ggcagauaauaccaaccua

SEQ ID NO: 2182104 - RNA, 19 nt, Homo sapiens
  misc_RNA (1)...(19): siRNA sense strand
agaguggacacaacugaaa

SEQ ID NO: 2182105 - RNA, 19 nt, Homo sapiens
  misc_RNA (1)...(19): siRNA sense strand
uggcucccuuuaugucuuu

SEQ ID NO: 2182106 - RNA, 19 nt, Homo sapiens
  misc_RNA (1)...(19): siRNA sense strand
ugacguccauguguguaau

SEQ ID NO: 2182107 - RNA, 19 nt, Homo sapiens
  misc_RNA (1)...(19): siRNA sense strand
aaaccucucccgaacacaa

SEQ ID NO: 2182108 - RNA, 19 nt, Homo sapiens
  misc_RNA (1)...(19): siRNA sense strand
uaagaucuggcugguggua

SEQ ID NO: 2182109 - RNA, 19 nt, Homo sapiens
  misc_RNA (1)...(19): siRNA sense strand
cuauauguguuuggagguu

SEQ ID NO: 2182110 - RNA, 19 nt, Homo sapiens
  misc_RNA (1)...(19): siRNA sense strand
gauccaugcauacaaccuu

SEQ ID NO: 2182111 - RNA, 19 nt, Homo sapiens
  misc_RNA (1)...(19): siRNA sense strand
aaacaagauccaugcauac

SEQ ID NO: 2182112 - RNA, 19 nt, Homo sapiens
  misc_RNA (1)...(19): siRNA sense strand
ucaauggcucccuuuaugu

SEQ ID NO: 2182113 - RNA, 19 nt, Homo sapiens
  misc_RNA (1)...(19): siRNA sense strand
aaacccagucguauauaug

SEQ ID NO: 2182114 - RNA, 19 nt, Homo sapiens
  misc_RNA (1)...(19): siRNA sense strand
ggaaagugaucuagaaauu

SEQ ID NO: 2182115 - RNA, 19 nt, Homo sapiens
  misc_RNA (1)...(19): siRNA sense strand
ccagaaagccguugacuua

SEQ ID NO: 2182116 - RNA, 19 nt, Homo sapiens
  misc_RNA (1)...(19): siRNA sense strand
ugacagagccauugaaaua

SEQ ID NO: 2182117 - RNA, 19 nt, Homo sapiens
  misc_RNA (1)...(19): siRNA sense strand
gaaagaauagaacgaguua

SEQ ID NO: 2182118 - RNA, 19 nt, Homo sapiens
  misc_RNA (1)...(19): siRNA sense strand
guaaugcccuucugauaaa

SEQ ID NO: 2182119 - RNA, 19 nt, Homo sapiens
  misc_RNA (1)...(19): siRNA sense strand
guaagaagguggaggaaga

SEQ ID NO: 2182120 - RNA, 19 nt, Homo sapiens
  misc_RNA (1)...(19): siRNA sense strand
gaaagccguugacuuauuc

SEQ ID NO: 2182121 - RNA, 19 nt, Homo sapiens
  misc_RNA (1)...(19): siRNA sense strand
gaaagaaguucaacauagg

SEQ ID NO: 2182122 - RNA, 19 nt, Homo sapiens
  misc_RNA (1)...(19): siRNA sense strand
gaagguggaggaagacuua

SEQ ID NO: 2182123 - RNA, 19 nt, Homo sapiens
  misc_RNA (1)...(19): siRNA sense strand
uaaagaaggugugauugaa

SEQ ID NO: 2182124 - RNA, 19 nt, Homo sapiens
  misc_RNA (1)...(19): siRNA sense strand
gaauagaacgaguuaagaa

SEQ ID NO: 2182125 - RNA, 19 nt, Homo sapiens
  misc_RNA (1)...(19): siRNA sense strand
uaagaaggcucgagaagag

SEQ ID NO: 2182126 - RNA, 19 nt, Homo sapiens
  misc_RNA (1)...(19): siRNA sense strand
ugaggaaagugaucuagaa

SEQ ID NO: 2182127 - RNA, 19 nt, Homo sapiens
  misc_RNA (1)...(19): siRNA sense strand
gcucgaaacccagcaaaua

SEQ ID NO: 2182128 - RNA, 19 nt, Homo sapiens
  misc_RNA (1)...(19): siRNA sense strand
gaacaucggagaaaguaug

SEQ ID NO: 2182129 - RNA, 19 nt, Homo sapiens
  misc_RNA (1)...(19): siRNA sense strand
agaaagccguugacuuauu

SEQ ID NO: 2182130 - RNA, 19 nt, Homo sapiens
  misc_RNA (1)...(19): siRNA sense strand
gaacgagcuucaggccuuu

SEQ ID NO: 2182131 - RNA, 19 nt, Homo sapiens
  misc_RNA (1)...(19): siRNA sense strand
gaaagugaucuagaaauug

SEQ ID NO: 2182132 - RNA, 19 nt, Homo sapiens
  misc_RNA (1)...(19): siRNA sense strand
ggaagaagcagcccaugau

SEQ ID NO: 2182133 - RNA, 19 nt, Homo sapiens
  misc_RNA (1)...(19): siRNA sense strand
gaaagcauacagacuucua

SEQ ID NO: 2182134 - RNA, 19 nt, Homo sapiens
  misc_RNA (1)...(19): siRNA sense strand
acagagccauugaaauaaa

SEQ ID NO: 2182135 - RNA, 19 nt, Homo sapiens
  misc_RNA (1)...(19): siRNA sense strand
ggacucaaugaaauucuua

SEQ ID NO: 2182136 - RNA, 19 nt, Homo sapiens
  misc_RNA (1)...(19): siRNA sense strand
aaagguggcugcuauugga

SEQ ID NO: 2182137 - RNA, 19 nt, Homo sapiens
  misc_RNA (1)...(19): siRNA sense strand
ggagaaaguaugagcgaaa

SEQ ID NO: 2182138 - RNA, 19 nt, Homo sapiens
  misc_RNA (1)...(19): siRNA sense strand
cguaaugcccuucugauaa

SEQ ID NO: 2182139 - RNA, 19 nt, Homo sapiens
  misc_RNA (1)...(19): siRNA sense strand
ccuguaaauuggauuauga

SEQ ID NO: 2182140 - RNA, 19 nt, Homo sapiens
  misc_RNA (1)...(19): siRNA sense strand
gaggaaaugcgcuucuuga

SEQ ID NO: 2182141 - RNA, 19 nt, Homo sapiens
  misc_RNA (1)...(19): siRNA sense strand
gcgaaaaugugaagaguga

SEQ ID NO: 2182142 - RNA, 19 nt, Homo sapiens
  misc_RNA (1)...(19): siRNA sense strand
aaauaaagcccuugcugaa

SEQ ID NO: 2182143 - RNA, 19 nt, Homo sapiens
  misc_RNA (1)...(19): siRNA sense strand
aaaggcauaugaaacauca

SEQ ID NO: 2182144 - RNA, 19 nt, Homo sapiens
  misc_RNA (1)...(19): siRNA sense strand
gugcaaugcugaaagaagu

SEQ ID NO: 2182145 - RNA, 19 nt, Homo sapiens
  misc_RNA (1)...(19): siRNA sense strand
gggaaagcauacagacuuc

SEQ ID NO: 2182146 - RNA, 19 nt, Homo sapiens
  misc_RNA (1)...(19): siRNA sense strand
ugaagaugcuagugcaaug

SEQ ID NO: 2182147 - RNA, 19 nt, Homo sapiens
  misc_RNA (1)...(19): siRNA sense strand
cggaaugccuggacucaau

SEQ ID NO: 2182148 - RNA, 19 nt, Homo sapiens
  misc_RNA (1)...(19): siRNA sense strand
gaagaagccagacgacagu

SEQ ID NO: 2182149 - RNA, 19 nt, Homo sapiens
  misc_RNA (1)...(19): siRNA sense strand
ggagauaacggaggagaug

SEQ ID NO: 2182150 - RNA, 19 nt, Homo sapiens
  misc_RNA (1)...(19): siRNA sense strand
gaagauguguaagcaggau

SEQ ID NO: 2182151 - RNA, 19 nt, Homo sapiens
  misc_RNA (1)...(19): siRNA sense strand
gaggaaagugaucuagaaa

SEQ ID NO: 2182152 - RNA, 19 nt, Homo sapiens
  misc_RNA (1)...(19): siRNA sense strand
cuagugcaaugcugaaaga

SEQ ID NO: 2182153 - RNA, 19 nt, Homo sapiens
  misc_RNA (1)...(19): siRNA sense strand
ucaagaaacgggagaugaa

SEQ ID NO: 2182154 - RNA, 19 nt, Homo sapiens
  misc_RNA (1)...(19): siRNA sense strand
caacguaaugcccuucuga

SEQ ID NO: 2182155 - RNA, 19 nt, Homo sapiens
  misc_RNA (1)...(19): siRNA sense strand
gggagugccugguaauuuu

SEQ ID NO: 2182156 - RNA, 19 nt, Homo sapiens
  misc_RNA (1)...(19): siRNA sense strand
gacagagccauugaaauaa

SEQ ID NO: 2182157 - RNA, 19 nt, Homo sapiens
  misc_RNA (1)...(19): siRNA sense strand
ugauaaagaaggugugauu

SEQ ID NO: 2182158 - RNA, 19 nt, Homo sapiens
  misc_RNA (1)...(19): siRNA sense strand
cauaugaaacaucaaguga

SEQ ID NO: 2182159 - RNA, 19 nt, Homo sapiens
  misc_RNA (1)...(19): siRNA sense strand
cagaacaucggagaaagua

SEQ ID NO: 2182160 - RNA, 19 nt, Homo sapiens
  misc_RNA (1)...(19): siRNA sense strand
caacauagggcacagaaaa

SEQ ID NO: 2182161 - RNA, 19 nt, Homo sapiens
  misc_RNA (1)...(19): siRNA sense strand
gggaagaagcagcccauga

SEQ ID NO: 2182162 - RNA, 19 nt, Homo sapiens
  misc_RNA (1)...(19): siRNA sense strand
caagaaacgggagaugaaa

SEQ ID NO: 2182163 - RNA, 19 nt, Homo sapiens
  misc_RNA (1)...(19): siRNA sense strand
caugcaggauccagaaguu

SEQ ID NO: 2182164 - RNA, 19 nt, Homo sapiens
  misc_RNA (1)...(19): siRNA sense strand
uaacggaggagaugaugga

SEQ ID NO: 2182165 - RNA, 19 nt, Homo sapiens
  misc_RNA (1)...(19): siRNA sense strand
acccaaagguuaugaaucu

SEQ ID NO: 2182166 - RNA, 19 nt, Homo sapiens
  misc_RNA (1)...(19): siRNA sense strand
gaagaagcagcccaugauc

SEQ ID NO: 2182167 - RNA, 19 nt, Homo sapiens
  misc_RNA (1)...(19): siRNA sense strand
ccagugucuucgucaaauu

SEQ ID NO: 2182168 - RNA, 19 nt, Homo sapiens
  misc_RNA (1)...(19): siRNA sense strand
aauccucgcuuggccauuu

SEQ ID NO: 2182169 - RNA, 19 nt, Homo sapiens
  misc_RNA (1)...(19): siRNA sense strand
gauaaagaaggugugauug

SEQ ID NO: 2182170 - RNA, 19 nt, Homo sapiens
  misc_RNA (1)...(19): siRNA sense strand
aggaagacuuaaaggcaua

SEQ ID NO: 2182171 - RNA, 19 nt, Homo sapiens
  misc_RNA (1)...(19): siRNA sense strand
gcccuugccuguaaauugg

SEQ ID NO: 2182172 - RNA, 19 nt, Homo sapiens
  misc_RNA (1)...(19): siRNA sense strand
cagcucagccucacaagug

SEQ ID NO: 2182173 - RNA, 19 nt, Homo sapiens
  misc_RNA (1)...(19): siRNA sense strand
gaucuugcccuugccugua

SEQ ID NO: 2182174 - RNA, 19 nt, Homo sapiens
  misc_RNA (1)...(19): siRNA sense strand
agugagagaucaaagaaag

SEQ ID NO: 2182175 - RNA, 19 nt, Homo sapiens
  misc_RNA (1)...(19): siRNA sense strand
auaaagaaggugugauuga

SEQ ID NO: 2182176 - RNA, 19 nt, Homo sapiens
  misc_RNA (1)...(19): siRNA sense strand
caaagaaagaauagaacga

SEQ ID NO: 2182177 - RNA, 19 nt, Homo sapiens
  misc_RNA (1)...(19): siRNA sense strand
gcagaacaucggagaaagu

SEQ ID NO: 2182178 - RNA, 19 nt, Homo sapiens
  misc_RNA (1)...(19): siRNA sense strand
gagcuucaggccuuuguga

SEQ ID NO: 2182179 - RNA, 19 nt, Homo sapiens
  misc_RNA (1)...(19): siRNA sense strand
gcauaugaaacaucaagug

SEQ ID NO: 2182180 - RNA, 19 nt, Homo sapiens
  misc_RNA (1)...(19): siRNA sense strand
ucaaauuacagaagccaaa

SEQ ID NO: 2182181 - RNA, 19 nt, Homo sapiens
  misc_RNA (1)...(19): siRNA sense strand
gagaaaguaugagcgaaaa

SEQ ID NO: 2182182 - RNA, 19 nt, Homo sapiens
  misc_RNA (1)...(19): siRNA sense strand
cagagccauugaaauaaau

SEQ ID NO: 2182183 - RNA, 19 nt, Homo sapiens
  misc_RNA (1)...(19): siRNA sense strand
caucaagugaggaaaguga

SEQ ID NO: 2182184 - RNA, 19 nt, Homo sapiens
  misc_RNA (1)...(19): siRNA sense strand
ucucaucaguaaauuguca

SEQ ID NO: 2182185 - RNA, 19 nt, Homo sapiens
  misc_RNA (1)...(19): siRNA sense strand
ugaaacaucaagugaggaa

SEQ ID NO: 2182186 - RNA, 19 nt, Homo sapiens
  misc_RNA (1)...(19): siRNA sense strand
gccagugucuucgucaaau

SEQ ID NO: 2182187 - RNA, 19 nt, Homo sapiens
  misc_RNA (1)...(19): siRNA sense strand
ugacuggaauggccggaau

SEQ ID NO: 2182188 - RNA, 19 nt, Homo sapiens
  misc_RNA (1)...(19): siRNA sense strand
gagaucaaagaaagaauag

SEQ ID NO: 2182189 - RNA, 19 nt, Homo sapiens
  misc_RNA (1)...(19): siRNA sense strand
gggaguggguggagagcau

SEQ ID NO: 2182190 - RNA, 19 nt, Homo sapiens
  misc_RNA (1)...(19): siRNA sense strand
agaagcagcccaugaucuu

SEQ ID NO: 2182191 - RNA, 19 nt, Homo sapiens
  misc_RNA (1)...(19): siRNA sense strand
cagugucuucgucaaauua

SEQ ID NO: 2182192 - RNA, 19 nt, Homo sapiens
  misc_RNA (1)...(19): siRNA sense strand
acacugaugcuccucaaga

SEQ ID NO: 2182193 - RNA, 19 nt, Homo sapiens
  misc_RNA (1)...(19): siRNA sense strand
gaaucucaucaguaaauug

SEQ ID NO: 2182194 - RNA, 19 nt, Homo sapiens
  misc_RNA (1)...(19): siRNA sense strand
agacuuaaaggcauaugaa

SEQ ID NO: 2182195 - RNA, 19 nt, Homo sapiens
  misc_RNA (1)...(19): siRNA sense strand
ugauugaaccagacacuga

SEQ ID NO: 2182196 - RNA, 19 nt, Homo sapiens
  misc_RNA (1)...(19): siRNA sense strand
ugagagaucaaagaaagaa

SEQ ID NO: 2182197 - RNA, 19 nt, Homo sapiens
  misc_RNA (1)...(19): siRNA sense strand
cuuaaaggcauaugaaaca

SEQ ID NO: 2182198 - RNA, 19 nt, Homo sapiens
  misc_RNA (1)...(19): siRNA sense strand
cacugaugcuccucaagaa

SEQ ID NO: 2182199 - RNA, 19 nt, Homo sapiens
  misc_RNA (1)...(19): siRNA sense strand
cgaaacccagcaaauaugu

SEQ ID NO: 2182200 - RNA, 19 nt, Homo sapiens
  misc_RNA (1)...(19): siRNA sense strand
gcaggauccagaaguuaug

SEQ ID NO: 2182201 - RNA, 19 nt, Homo sapiens
  misc_RNA (1)...(19): siRNA sense strand
agaaagaauagaacgaguu

SEQ ID NO: 2182202 - RNA, 19 nt, Homo sapiens
  misc_RNA (1)...(19): siRNA sense strand
gaagcagcccaugaucuug

SEQ ID NO: 2182203 - RNA, 19 nt, Homo sapiens
  misc_RNA (1)...(19): siRNA sense strand
gaagagugagagaucaaag

SEQ ID NO: 2182204 - RNA, 19 nt, Homo sapiens
  misc_RNA (1)...(19): siRNA sense strand
aaauuuggaggucaacgua

SEQ ID NO: 2182205 - RNA, 19 nt, Homo sapiens
  misc_RNA (1)...(19): siRNA sense strand
ccaaagguuaugaaucuca

SEQ ID NO: 2182206 - RNA, 19 nt, Homo sapiens
  misc_RNA (1)...(19): siRNA sense strand
gacuuaaaggcauaugaaa

SEQ ID NO: 2182207 - RNA, 19 nt, Homo sapiens
  misc_RNA (1)...(19): siRNA sense strand
ggaaugccuggacucaaug

SEQ ID NO: 2182208 - RNA, 19 nt, Homo sapiens
  misc_RNA (1)...(19): siRNA sense strand
ugccuggacucaaugaaau

SEQ ID NO: 2182209 - RNA, 19 nt, Homo sapiens
  misc_RNA (1)...(19): siRNA sense strand
agacccaaaugauggugaa

SEQ ID NO: 2182210 - RNA, 19 nt, Homo sapiens
  misc_RNA (1)...(19): siRNA sense strand
aagaauagaacgaguuaag

SEQ ID NO: 2182211 - RNA, 19 nt, Homo sapiens
  misc_RNA (1)...(19): siRNA sense strand
agagugagagaucaaagaa

SEQ ID NO: 2182212 - RNA, 19 nt, Homo sapiens
  misc_RNA (1)...(19): siRNA sense strand
ggauuaugaugaagaugcu

SEQ ID NO: 2182213 - RNA, 19 nt, Homo sapiens
  misc_RNA (1)...(19): siRNA sense strand
uccaggauguggcucgaaa

SEQ ID NO: 2182214 - RNA, 19 nt, Homo sapiens
  misc_RNA (1)...(19): siRNA sense strand
ggaggaagaucaagaauaa

SEQ ID NO: 2182215 - RNA, 19 nt, Homo sapiens
  misc_RNA (1)...(19): siRNA sense strand
ggagaaagaagaaagaaua

SEQ ID NO: 2182216 - RNA, 19 nt, Homo sapiens
  misc_RNA (1)...(19): siRNA sense strand
ccagaaaccugcugaucua

SEQ ID NO: 2182217 - RNA, 19 nt, Homo sapiens
  misc_RNA (1)...(19): siRNA sense strand
gaaaguaggagaaagaaga

SEQ ID NO: 2182218 - RNA, 19 nt, Homo sapiens
  misc_RNA (1)...(19): siRNA sense strand
caacauccaucaagacaga

SEQ ID NO: 2182219 - RNA, 19 nt, Homo sapiens
  misc_RNA (1)...(19): siRNA sense strand
uccagaagcuucagacuuu

SEQ ID NO: 2182220 - RNA, 19 nt, Homo sapiens
  misc_RNA (1)...(19): siRNA sense strand
uaagauuucugcucaggaa

SEQ ID NO: 2182221 - RNA, 19 nt, Homo sapiens
  misc_RNA (1)...(19): siRNA sense strand
gaaugauccuuuccucuca

SEQ ID NO: 2182222 - RNA, 19 nt, Homo sapiens
  misc_RNA (1)...(19): siRNA sense strand
ggagaaggcccugaagaaa

SEQ ID NO: 2182223 - RNA, 19 nt, Homo sapiens
  misc_RNA (1)...(19): siRNA sense strand
gaaaccugcugaucuacga

SEQ ID NO: 2182224 - RNA, 19 nt, Homo sapiens
  misc_RNA (1)...(19): siRNA sense strand
ccucacggcuccucauaaa

SEQ ID NO: 2182225 - RNA, 19 nt, Homo sapiens
  misc_RNA (1)...(19): siRNA sense strand
gagaaaugguaccugucua

SEQ ID NO: 2182226 - RNA, 19 nt, Homo sapiens
  misc_RNA (1)...(19): siRNA sense strand
gcaccugccucaugguugu

SEQ ID NO: 2182227 - RNA, 19 nt, Homo sapiens
  misc_RNA (1)...(19): siRNA sense strand
agacagagccaauuacaga

SEQ ID NO: 2182228 - RNA, 19 nt, Homo sapiens
  misc_RNA (1)...(19): siRNA sense strand
gccagaccauuauuccuaa

SEQ ID NO: 2182229 - RNA, 19 nt, Homo sapiens
  misc_RNA (1)...(19): siRNA sense strand
uuucuaaacuucucuccua

SEQ ID NO: 2182230 - RNA, 19 nt, Homo sapiens
  misc_RNA (1)...(19): siRNA sense strand
ugaaguggaucaguuucua

SEQ ID NO: 2182231 - RNA, 19 nt, Homo sapiens
  misc_RNA (1)...(19): siRNA sense strand
gaaguggaucaguuucuaa

SEQ ID NO: 2182232 - RNA, 19 nt, Homo sapiens
  misc_RNA (1)...(19): siRNA sense strand
acgaugagguggaaaguga

SEQ ID NO: 2182233 - RNA, 19 nt, Homo sapiens
  misc_RNA (1)...(19): siRNA sense strand
gcuggagccucaugaagug

SEQ ID NO: 2182234 - RNA, 19 nt, Homo sapiens
  misc_RNA (1)...(19): siRNA sense strand
gagaagagugugucaaugg

SEQ ID NO: 2182235 - RNA, 19 nt, Homo sapiens
  misc_RNA (1)...(19): siRNA sense strand
ccagugacagcuucaauga

SEQ ID NO: 2182236 - RNA, 19 nt, Homo sapiens
  misc_RNA (1)...(19): siRNA sense strand
cuagagaacacuaauagga

SEQ ID NO: 2182237 - RNA, 19 nt, Homo sapiens
  misc_RNA (1)...(19): siRNA sense strand
cuaaacuucucuccuaaag

SEQ ID NO: 2182238 - RNA, 19 nt, Homo sapiens
  misc_RNA (1)...(19): siRNA sense strand
gaucuuccccauuucauua

SEQ ID NO: 2182239 - RNA, 19 nt, Homo sapiens
  misc_RNA (1)...(19): siRNA sense strand
caaugacgaugagguggaa

SEQ ID NO: 2182240 - RNA, 19 nt, Homo sapiens
  misc_RNA (1)...(19): siRNA sense strand
ucucgaaccugcaaguuag

SEQ ID NO: 2182241 - RNA, 19 nt, Homo sapiens
  misc_RNA (1)...(19): siRNA sense strand
aaaguggagucuuguucaa

SEQ ID NO: 2182242 - RNA, 19 nt, Homo sapiens
  misc_RNA (1)...(19): siRNA sense strand
gaaccuccucuggaaauga

SEQ ID NO: 2182243 - RNA, 19 nt, Homo sapiens
  misc_RNA (1)...(19): siRNA sense strand
agaagagugugucaaugga

SEQ ID NO: 2182244 - RNA, 19 nt, Homo sapiens
  misc_RNA (1)...(19): siRNA sense strand
cggaggaagaucaagaaua

SEQ ID NO: 2182245 - RNA, 19 nt, Homo sapiens
  misc_RNA (1)...(19): siRNA sense strand
caagacagagccaauuaca

SEQ ID NO: 2182246 - RNA, 19 nt, Homo sapiens
  misc_RNA (1)...(19): siRNA sense strand
ggaaccuccucuggaaaug

SEQ ID NO: 2182247 - RNA, 19 nt, Homo sapiens
  misc_RNA (1)...(19): siRNA sense strand
gaggagaaggcccugaaga

SEQ ID NO: 2182248 - RNA, 19 nt, Homo sapiens
  misc_RNA (1)...(19): siRNA sense strand
gguggaaagugagaaaugg

SEQ ID NO: 2182249 - RNA, 19 nt, Homo sapiens
  misc_RNA (1)...(19): siRNA sense strand
ggacucuccuucagcaacu

SEQ ID NO: 2182250 - RNA, 19 nt, Homo sapiens
  misc_RNA (1)...(19): siRNA sense strand
caggaaaguaggagaaaga

SEQ ID NO: 2182251 - RNA, 19 nt, Homo sapiens
  misc_RNA (1)...(19): siRNA sense strand
gagaaggcccugaagaaaa

SEQ ID NO: 2182252 - RNA, 19 nt, Homo sapiens
  misc_RNA (1)...(19): siRNA sense strand
cuacagacuucccuucaac

SEQ ID NO: 2182253 - RNA, 19 nt, Homo sapiens
  misc_RNA (1)...(19): siRNA sense strand
ggaggggaaugaaacacua

SEQ ID NO: 2182254 - RNA, 19 nt, Homo sapiens
  misc_RNA (1)...(19): siRNA sense strand
gagaaagaagaaagaauac

SEQ ID NO: 2182255 - RNA, 19 nt, Homo sapiens
  misc_RNA (1)...(19): siRNA sense strand
guaggagaaagaagaaaga

SEQ ID NO: 2182256 - RNA, 19 nt, Homo sapiens
  misc_RNA (1)...(19): siRNA sense strand
cagagaagagugugucaau

SEQ ID NO: 2182257 - RNA, 19 nt, Homo sapiens
  misc_RNA (1)...(19): siRNA sense strand
ggaagaucaagaauaagau

SEQ ID NO: 2182258 - RNA, 19 nt, Homo sapiens
  misc_RNA (1)...(19): siRNA sense strand
gcuccugaaugauccuuuc

SEQ ID NO: 2182259 - RNA, 19 nt, Homo sapiens
  misc_RNA (1)...(19): siRNA sense strand
ugacagaggaggagaagag

SEQ ID NO: 2182260 - RNA, 19 nt, Homo sapiens
  misc_RNA (1)...(19): siRNA sense strand
ccugaucgcugagggcuau

SEQ ID NO: 2182261 - RNA, 19 nt, Homo sapiens
  misc_RNA (1)...(19): siRNA sense strand
gaaaugguaccugucuaca

SEQ ID NO: 2182262 - RNA, 19 nt, Homo sapiens
  misc_RNA (1)...(19): siRNA sense strand
gcucaggaaaguaggagaa

SEQ ID NO: 2182263 - RNA, 19 nt, Homo sapiens
  misc_RNA (1)...(19): siRNA sense strand
ccagaccauuauuccuaaa

SEQ ID NO: 2182264 - RNA, 19 nt, Homo sapiens
  misc_RNA (1)...(19): siRNA sense strand
gaucuacgaggaacauucu

SEQ ID NO: 2182265 - RNA, 19 nt, Homo sapiens
  misc_RNA (1)...(19): siRNA sense strand
ccagaagcuucagacuuug

SEQ ID NO: 2182266 - RNA, 19 nt, Homo sapiens
  misc_RNA (1)...(19): siRNA sense strand
ucaugaaguggaucaguuu

SEQ ID NO: 2182267 - RNA, 19 nt, Homo sapiens
  misc_RNA (1)...(19): siRNA sense strand
caucaagacagagccaauu

SEQ ID NO: 2182268 - RNA, 19 nt, Homo sapiens
  misc_RNA (1)...(19): siRNA sense strand
aggaagaucaagaauaaga

SEQ ID NO: 2182269 - RNA, 19 nt, Homo sapiens
  misc_RNA (1)...(19): siRNA sense strand
agagaagagugugucaaug

SEQ ID NO: 2182270 - RNA, 19 nt, Homo sapiens
  misc_RNA (1)...(19): siRNA sense strand
aaaguaggagaaagaagaa

SEQ ID NO: 2182271 - RNA, 19 nt, Homo sapiens
  misc_RNA (1)...(19): siRNA sense strand
cucaugaaguggaucaguu

SEQ ID NO: 2182272 - RNA, 19 nt, Homo sapiens
  misc_RNA (1)...(19): siRNA sense strand
cuggagaagucagugcuuu

SEQ ID NO: 2182273 - RNA, 19 nt, Homo sapiens
  misc_RNA (1)...(19): siRNA sense strand
ccaaauugccccugucaaa

SEQ ID NO: 2182274 - RNA, 19 nt, Homo sapiens
  misc_RNA (1)...(19): siRNA sense strand
ugccagaccauuauuccua

SEQ ID NO: 2182275 - RNA, 19 nt, Homo sapiens
  misc_RNA (1)...(19): siRNA sense strand
agaaggcccugaagaaaau

SEQ ID NO: 2182276 - RNA, 19 nt, Homo sapiens
  misc_RNA (1)...(19): siRNA sense strand
cagcuucaaugacgaugag

SEQ ID NO: 2182277 - RNA, 19 nt, Homo sapiens
  misc_RNA (1)...(19): siRNA sense strand
aggagaaggcccugaagaa

SEQ ID NO: 2182278 - RNA, 19 nt, Homo sapiens
  misc_RNA (1)...(19): siRNA sense strand
ucacggcuccucauaaacu

SEQ ID NO: 2182279 - RNA, 19 nt, Homo sapiens
  misc_RNA (1)...(19): siRNA sense strand
gugcuuugccguugcauuc

SEQ ID NO: 2182280 - RNA, 19 nt, Homo sapiens
  misc_RNA (1)...(19): siRNA sense strand
uggaaagugagaaauggua

SEQ ID NO: 2182281 - RNA, 19 nt, Homo sapiens
  misc_RNA (1)...(19): siRNA sense strand
ucuacagacuucccuucaa

SEQ ID NO: 2182282 - RNA, 19 nt, Homo sapiens
  misc_RNA (1)...(19): siRNA sense strand
aaccuccucuggaaaugaa

SEQ ID NO: 2182283 - RNA, 19 nt, Homo sapiens
  misc_RNA (1)...(19): siRNA sense strand
ggaaugaaacacuaaaagu

SEQ ID NO: 2182284 - RNA, 19 nt, Homo sapiens
  misc_RNA (1)...(19): siRNA sense strand
gcucugcccagccagcauu

SEQ ID NO: 2182285 - RNA, 19 nt, Homo sapiens
  misc_RNA (1)...(19): siRNA sense strand
ggacucguuccgucuguca

SEQ ID NO: 2182286 - RNA, 19 nt, Homo sapiens
  misc_RNA (1)...(19): siRNA sense strand
cagaggagaaggcccugaa

SEQ ID NO: 2182287 - RNA, 19 nt, Homo sapiens
  misc_RNA (1)...(19): siRNA sense strand
gcauucggcagcuucuuuc

SEQ ID NO: 2182288 - RNA, 19 nt, Homo sapiens
  misc_RNA (1)...(19): siRNA sense strand
gaugagguggaaagugaga

SEQ ID NO: 2182289 - RNA, 19 nt, Homo sapiens
  misc_RNA (1)...(19): siRNA sense strand
gagucuuguucaacugaga

SEQ ID NO: 2182290 - RNA, 19 nt, Homo sapiens
  misc_RNA (1)...(19): siRNA sense strand
ccuucaacauccaucaaga

SEQ ID NO: 2182291 - RNA, 19 nt, Homo sapiens
  misc_RNA (1)...(19): siRNA sense strand
guagaacucgacagaagag

SEQ ID NO: 2182292 - RNA, 19 nt, Homo sapiens
  misc_RNA (1)...(19): siRNA sense strand
uuguagaacucgacagaag

SEQ ID NO: 2182293 - RNA, 19 nt, Homo sapiens
  misc_RNA (1)...(19): siRNA sense strand
gcaccuggucagcgccaaa

SEQ ID NO: 2182294 - RNA, 19 nt, Homo sapiens
  misc_RNA (1)...(19): siRNA sense strand
guggugagauccagaaacc

SEQ ID NO: 2182295 - RNA, 19 nt, Homo sapiens
  misc_RNA (1)...(19): siRNA sense strand
ugagaaaugguaccugucu

SEQ ID NO: 2182296 - RNA, 19 nt, Homo sapiens
  misc_RNA (1)...(19): siRNA sense strand
cccauuucauuaucucgaa

SEQ ID NO: 2182297 - RNA, 19 nt, Homo sapiens
  misc_RNA (1)...(19): siRNA sense strand
ggaaaguaggagaaagaag

SEQ ID NO: 2182298 - RNA, 19 nt, Homo sapiens
  misc_RNA (1)...(19): siRNA sense strand
uaaacuucucuccuaaaga

SEQ ID NO: 2182299 - RNA, 19 nt, Homo sapiens
  misc_RNA (1)...(19): siRNA sense strand
ugagguggaaagugagaaa

SEQ ID NO: 2182300 - RNA, 19 nt, Homo sapiens
  misc_RNA (1)...(19): siRNA sense strand
gcuucagacuuuggugaug

SEQ ID NO: 2182301 - RNA, 19 nt, Homo sapiens
  misc_RNA (1)...(19): siRNA sense strand
ugaagaaaauucggaggaa

SEQ ID NO: 2182302 - RNA, 19 nt, Homo sapiens
  misc_RNA (1)...(19): siRNA sense strand
caaauugccccugucaaaa

SEQ ID NO: 2182303 - RNA, 19 nt, Homo sapiens
  misc_RNA (1)...(19): siRNA sense strand
uaagcuggagccucaugaa

SEQ ID NO: 2182304 - RNA, 19 nt, Homo sapiens
  misc_RNA (1)...(19): siRNA sense strand
aucaagacagagccaauua

SEQ ID NO: 2182305 - RNA, 19 nt, Homo sapiens
  misc_RNA (1)...(19): siRNA sense strand
ggagaagaggacccugauc

SEQ ID NO: 2182306 - RNA, 19 nt, Homo sapiens
  misc_RNA (1)...(19): siRNA sense strand
ccucgugccagaccauuau

SEQ ID NO: 2182307 - RNA, 19 nt, Homo sapiens
  misc_RNA (1)...(19): siRNA sense strand
cagccuccguggugagauc

SEQ ID NO: 2182308 - RNA, 19 nt, Homo sapiens
  misc_RNA (1)...(19): siRNA sense strand
ucaggaaaguaggagaaag

SEQ ID NO: 2182309 - RNA, 19 nt, Homo sapiens
  misc_RNA (1)...(19): siRNA sense strand
ucuaaacuucucuccuaaa

SEQ ID NO: 2182310 - RNA, 19 nt, Homo sapiens
  misc_RNA (1)...(19): siRNA sense strand
ggaggaagaucaagaauaa

SEQ ID NO: 2182311 - RNA, 19 nt, Homo sapiens
  misc_RNA (1)...(19): siRNA sense strand
ggagaaagaagaaagaaua

SEQ ID NO: 2182312 - RNA, 19 nt, Homo sapiens
  misc_RNA (1)...(19): siRNA sense strand
ccagaaaccugcugaucua

SEQ ID NO: 2182313 - RNA, 19 nt, Homo sapiens
  misc_RNA (1)...(19): siRNA sense strand
gaaaguaggagaaagaaga

SEQ ID NO: 2182314 - RNA, 19 nt, Homo sapiens
  misc_RNA (1)...(19): siRNA sense strand
caacauccaucaagacaga

SEQ ID NO: 2182315 - RNA, 19 nt, Homo sapiens
  misc_RNA (1)...(19): siRNA sense strand
uccagaagcuucagacuuu

SEQ ID NO: 2182316 - RNA, 19 nt, Homo sapiens
  misc_RNA (1)...(19): siRNA sense strand
uaagauuucugcucaggaa

SEQ ID NO: 2182317 - RNA, 19 nt, Homo sapiens
  misc_RNA (1)...(19): siRNA sense strand
gaaugauccuuuccucuca

SEQ ID NO: 2182318 - RNA, 19 nt, Homo sapiens
  misc_RNA (1)...(19): siRNA sense strand
ggagaaggcccugaagaaa

SEQ ID NO: 2182319 - RNA, 19 nt, Homo sapiens
  misc_RNA (1)...(19): siRNA sense strand
gaaaccugcugaucuacga

SEQ ID NO: 2182320 - RNA, 19 nt, Homo sapiens
  misc_RNA (1)...(19): siRNA sense strand
ccucacggcuccucauaaa

SEQ ID NO: 2182321 - RNA, 19 nt, Homo sapiens
  misc_RNA (1)...(19): siRNA sense strand
gagaaaugguaccugucua

SEQ ID NO: 2182322 - RNA, 19 nt, Homo sapiens
  misc_RNA (1)...(19): siRNA sense strand
gcaccugccucaugguugu

SEQ ID NO: 2182323 - RNA, 19 nt, Homo sapiens
  misc_RNA (1)...(19): siRNA sense strand
agacagagccaauuacaga

SEQ ID NO: 2182324 - RNA, 19 nt, Homo sapiens
  misc_RNA (1)...(19): siRNA sense strand
gccagaccauuauuccuaa

SEQ ID NO: 2182325 - RNA, 19 nt, Homo sapiens
  misc_RNA (1)...(19): siRNA sense strand
uuucuaaacuucucuccua

SEQ ID NO: 2182326 - RNA, 19 nt, Homo sapiens
  misc_RNA (1)...(19): siRNA sense strand
ugaaguggaucaguuucua

SEQ ID NO: 2182327 - RNA, 19 nt, Homo sapiens
  misc_RNA (1)...(19): siRNA sense strand
gaaguggaucaguuucuaa

SEQ ID NO: 2182328 - RNA, 19 nt, Homo sapiens
  misc_RNA (1)...(19): siRNA sense strand
acgaugagguggaaaguga

SEQ ID NO: 2182329 - RNA, 19 nt, Homo sapiens
  misc_RNA (1)...(19): siRNA sense strand
gcuggagccucaugaagug

SEQ ID NO: 2182330 - RNA, 19 nt, Homo sapiens
  misc_RNA (1)...(19): siRNA sense strand
gagaagagugugucaaugg

SEQ ID NO: 2182331 - RNA, 19 nt, Homo sapiens
  misc_RNA (1)...(19): siRNA sense strand
ccagugacagcuucaauga

SEQ ID NO: 2182332 - RNA, 19 nt, Homo sapiens
  misc_RNA (1)...(19): siRNA sense strand
cuagagaacacuaauagga

SEQ ID NO: 2182333 - RNA, 19 nt, Homo sapiens
  misc_RNA (1)...(19): siRNA sense strand
cuaaacuucucuccuaaag

SEQ ID NO: 2182334 - RNA, 19 nt, Homo sapiens
  misc_RNA (1)...(19): siRNA sense strand
gaucuuccccauuucauua

SEQ ID NO: 2182335 - RNA, 19 nt, Homo sapiens
  misc_RNA (1)...(19): siRNA sense strand
caaugacgaugagguggaa

SEQ ID NO: 2182336 - RNA, 19 nt, Homo sapiens
  misc_RNA (1)...(19): siRNA sense strand
ucucgaaccugcaaguuag

SEQ ID NO: 2182337 - RNA, 19 nt, Homo sapiens
  misc_RNA (1)...(19): siRNA sense strand
aaaguggagucuuguucaa

SEQ ID NO: 2182338 - RNA, 19 nt, Homo sapiens
  misc_RNA (1)...(19): siRNA sense strand
gaaccuccucuggaaauga

SEQ ID NO: 2182339 - RNA, 19 nt, Homo sapiens
  misc_RNA (1)...(19): siRNA sense strand
agaagagugugucaaugga

SEQ ID NO: 2182340 - RNA, 19 nt, Homo sapiens
  misc_RNA (1)...(19): siRNA sense strand
cggaggaagaucaagaaua

SEQ ID NO: 2182341 - RNA, 19 nt, Homo sapiens
  misc_RNA (1)...(19): siRNA sense strand
caagacagagccaauuaca

SEQ ID NO: 2182342 - RNA, 19 nt, Homo sapiens
  misc_RNA (1)...(19): siRNA sense strand
ggaaccuccucuggaaaug

SEQ ID NO: 2182343 - RNA, 19 nt, Homo sapiens
  misc_RNA (1)...(19): siRNA sense strand
gaggagaaggcccugaaga

SEQ ID NO: 2182344 - RNA, 19 nt, Homo sapiens
  misc_RNA (1)...(19): siRNA sense strand
gguggaaagugagaaaugg

SEQ ID NO: 2182345 - RNA, 19 nt, Homo sapiens
  misc_RNA (1)...(19): siRNA sense strand
ggacucuccuucagcaacu

SEQ ID NO: 2182346 - RNA, 19 nt, Homo sapiens
  misc_RNA (1)...(19): siRNA sense strand
caggaaaguaggagaaaga

SEQ ID NO: 2182347 - RNA, 19 nt, Homo sapiens
  misc_RNA (1)...(19): siRNA sense strand
gagaaggcccugaagaaaa

SEQ ID NO: 2182348 - RNA, 19 nt, Homo sapiens
  misc_RNA (1)...(19): siRNA sense strand
cuacagacuucccuucaac

SEQ ID NO: 2182349 - RNA, 19 nt, Homo sapiens
  misc_RNA (1)...(19): siRNA sense strand
ggaggggaaugaaacacua

SEQ ID NO: 2182350 - RNA, 19 nt, Homo sapiens
  misc_RNA (1)...(19): siRNA sense strand
gagaaagaagaaagaauac

SEQ ID NO: 2182351 - RNA, 19 nt, Homo sapiens
  misc_RNA (1)...(19): siRNA sense strand
guaggagaaagaagaaaga

SEQ ID NO: 2182352 - RNA, 19 nt, Homo sapiens
  misc_RNA (1)...(19): siRNA sense strand
cagagaagagugugucaau

SEQ ID NO: 2182353 - RNA, 19 nt, Homo sapiens
  misc_RNA (1)...(19): siRNA sense strand
ggaagaucaagaauaagau

SEQ ID NO: 2182354 - RNA, 19 nt, Homo sapiens
  misc_RNA (1)...(19): siRNA sense strand
gcuccugaaugauccuuuc

SEQ ID NO: 2182355 - RNA, 19 nt, Homo sapiens
  misc_RNA (1)...(19): siRNA sense strand
ugacagaggaggagaagag

SEQ ID NO: 2182356 - RNA, 19 nt, Homo sapiens
  misc_RNA (1)...(19): siRNA sense strand
ccugaucgcugagggcuau

SEQ ID NO: 2182357 - RNA, 19 nt, Homo sapiens
  misc_RNA (1)...(19): siRNA sense strand
gaaaugguaccugucuaca

SEQ ID NO: 2182358 - RNA, 19 nt, Homo sapiens
  misc_RNA (1)...(19): siRNA sense strand
gcucaggaaaguaggagaa

SEQ ID NO: 2182359 - RNA, 19 nt, Homo sapiens
  misc_RNA (1)...(19): siRNA sense strand
ccagaccauuauuccuaaa

SEQ ID NO: 2182360 - RNA, 19 nt, Homo sapiens
  misc_RNA (1)...(19): siRNA sense strand
gaucuacgaggaacauucu

SEQ ID NO: 2182361 - RNA, 19 nt, Homo sapiens
  misc_RNA (1)...(19): siRNA sense strand
ccagaagcuucagacuuug

SEQ ID NO: 2182362 - RNA, 19 nt, Homo sapiens
  misc_RNA (1)...(19): siRNA sense strand
ucaugaaguggaucaguuu

SEQ ID NO: 2182363 - RNA, 19 nt, Homo sapiens
  misc_RNA (1)...(19): siRNA sense strand
caucaagacagagccaauu

SEQ ID NO: 2182364 - RNA, 19 nt, Homo sapiens
  misc_RNA (1)...(19): siRNA sense strand
aggaagaucaagaauaaga

SEQ ID NO: 2182365 - RNA, 19 nt, Homo sapiens
  misc_RNA (1)...(19): siRNA sense strand
agagaagagugugucaaug

SEQ ID NO: 2182366 - RNA, 19 nt, Homo sapiens
  misc_RNA (1)...(19): siRNA sense strand
aaaguaggagaaagaagaa

SEQ ID NO: 2182367 - RNA, 19 nt, Homo sapiens
  misc_RNA (1)...(19): siRNA sense strand
cucaugaaguggaucaguu

SEQ ID NO: 2182368 - RNA, 19 nt, Homo sapiens
  misc_RNA (1)...(19): siRNA sense strand
cuggagaagucagugcuuu

SEQ ID NO: 2182369 - RNA, 19 nt, Homo sapiens
  misc_RNA (1)...(19): siRNA sense strand
ccaaauugccccugucaaa

SEQ ID NO: 2182370 - RNA, 19 nt, Homo sapiens
  misc_RNA (1)...(19): siRNA sense strand
ugccagaccauuauuccua

SEQ ID NO: 2182371 - RNA, 19 nt, Homo sapiens
  misc_RNA (1)...(19): siRNA sense strand
agaaggcccugaagaaaau

SEQ ID NO: 2182372 - RNA, 19 nt, Homo sapiens
  misc_RNA (1)...(19): siRNA sense strand
cagcuucaaugacgaugag

SEQ ID NO: 2182373 - RNA, 19 nt, Homo sapiens
  misc_RNA (1)...(19): siRNA sense strand
aggagaaggcccugaagaa

SEQ ID NO: 2182374 - RNA, 19 nt, Homo sapiens
  misc_RNA (1)...(19): siRNA sense strand
ucacggcuccucauaaacu

SEQ ID NO: 2182375 - RNA, 19 nt, Homo sapiens
  misc_RNA (1)...(19): siRNA sense strand
gugcuuugccguugcauuc

SEQ ID NO: 2182376 - RNA, 19 nt, Homo sapiens
  misc_RNA (1)...(19): siRNA sense strand
uggaaagugagaaauggua

SEQ ID NO: 2182377 - RNA, 19 nt, Homo sapiens
  misc_RNA (1)...(19): siRNA sense strand
ucuacagacuucccuucaa

SEQ ID NO: 2182378 - RNA, 19 nt, Homo sapiens
  misc_RNA (1)...(19): siRNA sense strand
aaccuccucuggaaaugaa

SEQ ID NO: 2182379 - RNA, 19 nt, Homo sapiens
  misc_RNA (1)...(19): siRNA sense strand
ggaaugaaacacuaaaagu

SEQ ID NO: 2182380 - RNA, 19 nt, Homo sapiens
  misc_RNA (1)...(19): siRNA sense strand
gcucugcccagccagcauu

SEQ ID NO: 2182381 - RNA, 19 nt, Homo sapiens
  misc_RNA (1)...(19): siRNA sense strand
ggacucguuccgucuguca

SEQ ID NO: 2182382 - RNA, 19 nt, Homo sapiens
  misc_RNA (1)...(19): siRNA sense strand
cagaggagaaggcccugaa

SEQ ID NO: 2182383 - RNA, 19 nt, Homo sapiens
  misc_RNA (1)...(19): siRNA sense strand
gcauucggcagcuucuuuc

SEQ ID NO: 2182384 - RNA, 19 nt, Homo sapiens
  misc_RNA (1)...(19): siRNA sense strand
gaugagguggaaagugaga

SEQ ID NO: 2182385 - RNA, 19 nt, Homo sapiens
  misc_RNA (1)...(19): siRNA sense strand
gagucuuguucaacugaga

SEQ ID NO: 2182386 - RNA, 19 nt, Homo sapiens
  misc_RNA (1)...(19): siRNA sense strand
ccuucaacauccaucaaga

SEQ ID NO: 2182387 - RNA, 19 nt, Homo sapiens
  misc_RNA (1)...(19): siRNA sense strand
guagaacucgacagaagag

SEQ ID NO: 2182388 - RNA, 19 nt, Homo sapiens
  misc_RNA (1)...(19): siRNA sense strand
uuguagaacucgacagaag

SEQ ID NO: 2182389 - RNA, 19 nt, Homo sapiens
  misc_RNA (1)...(19): siRNA sense strand
gcaccuggucagcgccaaa

SEQ ID NO: 2182390 - RNA, 19 nt, Homo sapiens
  misc_RNA (1)...(19): siRNA sense strand
guggugagauccagaaacc

SEQ ID NO: 2182391 - RNA, 19 nt, Homo sapiens
  misc_RNA (1)...(19): siRNA sense strand
ugagaaaugguaccugucu

SEQ ID NO: 2182392 - RNA, 19 nt, Homo sapiens
  misc_RNA (1)...(19): siRNA sense strand
cccauuucauuaucucgaa

SEQ ID NO: 2182393 - RNA, 19 nt, Homo sapiens
  misc_RNA (1)...(19): siRNA sense strand
ggaaaguaggagaaagaag

SEQ ID NO: 2182394 - RNA, 19 nt, Homo sapiens
  misc_RNA (1)...(19): siRNA sense strand
uaaacuucucuccuaaaga

SEQ ID NO: 2182395 - RNA, 19 nt, Homo sapiens
  misc_RNA (1)...(19): siRNA sense strand
ugagguggaaagugagaaa

SEQ ID NO: 2182396 - RNA, 19 nt, Homo sapiens
  misc_RNA (1)...(19): siRNA sense strand
gcuucagacuuuggugaug

SEQ ID NO: 2182397 - RNA, 19 nt, Homo sapiens
  misc_RNA (1)...(19): siRNA sense strand
ugaagaaaauucggaggaa

SEQ ID NO: 2182398 - RNA, 19 nt, Homo sapiens
  misc_RNA (1)...(19): siRNA sense strand
caaauugccccugucaaaa

SEQ ID NO: 2182399 - RNA, 19 nt, Homo sapiens
  misc_RNA (1)...(19): siRNA sense strand
uaagcuggagccucaugaa

SEQ ID NO: 2182400 - RNA, 19 nt, Homo sapiens
  misc_RNA (1)...(19): siRNA sense strand
aucaagacagagccaauua

SEQ ID NO: 2182401 - RNA, 19 nt, Homo sapiens
  misc_RNA (1)...(19): siRNA sense strand
ggagaagaggacccugauc

SEQ ID NO: 2182402 - RNA, 19 nt, Homo sapiens
  misc_RNA (1)...(19): siRNA sense strand
ccucgugccagaccauuau

SEQ ID NO: 2182403 - RNA, 19 nt, Homo sapiens
  misc_RNA (1)...(19): siRNA sense strand
cagccuccguggugagauc

SEQ ID NO: 2182404 - RNA, 19 nt, Homo sapiens
  misc_RNA (1)...(19): siRNA sense strand
ucaggaaaguaggagaaag

SEQ ID NO: 2182405 - RNA, 19 nt, Homo sapiens
  misc_RNA (1)...(19): siRNA sense strand
ucuaaacuucucuccuaaa

SEQ ID NO: 2182406 - RNA, 19 nt, Homo sapiens
  misc_RNA (1)...(19): siRNA sense strand
cgacacagcuuuccaaaua

SEQ ID NO: 2182407 - RNA, 19 nt, Homo sapiens
  misc_RNA (1)...(19): siRNA sense strand
gaacacagcggguggauga

SEQ ID NO: 2182408 - RNA, 19 nt, Homo sapiens
  misc_RNA (1)...(19): siRNA sense strand
gcaaggcgguucucuggaa

SEQ ID NO: 2182409 - RNA, 19 nt, Homo sapiens
  misc_RNA (1)...(19): siRNA sense strand
gaaauaaagcugccauuca

SEQ ID NO: 2182410 - RNA, 19 nt, Homo sapiens
  misc_RNA (1)...(19): siRNA sense strand
cugaauguguuucuucuua

SEQ ID NO: 2182411 - RNA, 19 nt, Homo sapiens
  misc_RNA (1)...(19): siRNA sense strand
gguaacugcugggcauuua

SEQ ID NO: 2182412 - RNA, 19 nt, Homo sapiens
  misc_RNA (1)...(19): siRNA sense strand
gcacaaacaaaucagcuuu

SEQ ID NO: 2182413 - RNA, 19 nt, Homo sapiens
  misc_RNA (1)...(19): siRNA sense strand
gagggagacugacuuuaug

SEQ ID NO: 2182414 - RNA, 19 nt, Homo sapiens
  misc_RNA (1)...(19): siRNA sense strand
gaucuuaaagguggaaaua

SEQ ID NO: 2182415 - RNA, 19 nt, Homo sapiens
  misc_RNA (1)...(19): siRNA sense strand
gguaccaguuuguuacuuu

SEQ ID NO: 2182416 - RNA, 19 nt, Homo sapiens
  misc_RNA (1)...(19): siRNA sense strand
gaacacgggcuacacguau

SEQ ID NO: 2182417 - RNA, 19 nt, Homo sapiens
  misc_RNA (1)...(19): siRNA sense strand
uccgagagcugaccacuuu

SEQ ID NO: 2182418 - RNA, 19 nt, Homo sapiens
  misc_RNA (1)...(19): siRNA sense strand
gaagcuguauucccaagau

SEQ ID NO: 2182419 - RNA, 19 nt, Homo sapiens
  misc_RNA (1)...(19): siRNA sense strand
ggacuucgccgucuaugga

SEQ ID NO: 2182420 - RNA, 19 nt, Homo sapiens
  misc_RNA (1)...(19): siRNA sense strand
ggacuuugcucuggaaucu

SEQ ID NO: 2182421 - RNA, 19 nt, Homo sapiens
  misc_RNA (1)...(19): siRNA sense strand
gugaggcucuccaugauga

SEQ ID NO: 2182422 - RNA, 19 nt, Homo sapiens
  misc_RNA (1)...(19): siRNA sense strand
gcacaaauuggacccugua

SEQ ID NO: 2182423 - RNA, 19 nt, Homo sapiens
  misc_RNA (1)...(19): siRNA sense strand
uggcgaaccugucaaguga

SEQ ID NO: 2182424 - RNA, 19 nt, Homo sapiens
  misc_RNA (1)...(19): siRNA sense strand
gacaguggaugccguacaa

SEQ ID NO: 2182425 - RNA, 19 nt, Homo sapiens
  misc_RNA (1)...(19): siRNA sense strand
uggaagauauucugggaaa

SEQ ID NO: 2182426 - RNA, 19 nt, Homo sapiens
  misc_RNA (1)...(19): siRNA sense strand
aaacggcgcugaugagucu

SEQ ID NO: 2182427 - RNA, 19 nt, Homo sapiens
  misc_RNA (1)...(19): siRNA sense strand
gaaccgagcggccagaaca

SEQ ID NO: 2182428 - RNA, 19 nt, Homo sapiens
  misc_RNA (1)...(19): siRNA sense strand
aaauaaagcugccauucag

SEQ ID NO: 2182429 - RNA, 19 nt, Homo sapiens
  misc_RNA (1)...(19): siRNA sense strand
acuagcaggucucuccuua

SEQ ID NO: 2182430 - RNA, 19 nt, Homo sapiens
  misc_RNA (1)...(19): siRNA sense strand
gagguucucaucacaguuu

SEQ ID NO: 2182431 - RNA, 19 nt, Homo sapiens
  misc_RNA (1)...(19): siRNA sense strand
ucagagaaauggugaaacu

SEQ ID NO: 2182432 - RNA, 19 nt, Homo sapiens
  misc_RNA (1)...(19): siRNA sense strand
ggaaauaaagcugccauuc

SEQ ID NO: 2182433 - RNA, 19 nt, Homo sapiens
  misc_RNA (1)...(19): siRNA sense strand
ggaugguaccaguuuguua

SEQ ID NO: 2182434 - RNA, 19 nt, Homo sapiens
  misc_RNA (1)...(19): siRNA sense strand
cgagggagacugacuuuau

SEQ ID NO: 2182435 - RNA, 19 nt, Homo sapiens
  misc_RNA (1)...(19): siRNA sense strand
gcgcucaguuccagcuauu

SEQ ID NO: 2182436 - RNA, 19 nt, Homo sapiens
  misc_RNA (1)...(19): siRNA sense strand
caaaucagcuuuuaguauc

SEQ ID NO: 2182437 - RNA, 19 nt, Homo sapiens
  misc_RNA (1)...(19): siRNA sense strand
gcgcagaagcacaaacaaa

SEQ ID NO: 2182438 - RNA, 19 nt, Homo sapiens
  misc_RNA (1)...(19): siRNA sense strand
ucauccagccugacauuua

SEQ ID NO: 2182439 - RNA, 19 nt, Homo sapiens
  misc_RNA (1)...(19): siRNA sense strand
gaaaagacccgacgacaca

SEQ ID NO: 2182440 - RNA, 19 nt, Homo sapiens
  misc_RNA (1)...(19): siRNA sense strand
ccaaggacuucgccgucua

SEQ ID NO: 2182441 - RNA, 19 nt, Homo sapiens
  misc_RNA (1)...(19): siRNA sense strand
guaccaguuuguuacuuug

SEQ ID NO: 2182442 - RNA, 19 nt, Homo sapiens
  misc_RNA (1)...(19): siRNA sense strand
aaacagcgcagaagcacaa

SEQ ID NO: 2182443 - RNA, 19 nt, Homo sapiens
  misc_RNA (1)...(19): siRNA sense strand
ugggacaguucacguauga

SEQ ID NO: 2182444 - RNA, 19 nt, Homo sapiens
  misc_RNA (1)...(19): siRNA sense strand
aguacucgcuguucugaaa

SEQ ID NO: 2182445 - RNA, 19 nt, Homo sapiens
  misc_RNA (1)...(19): siRNA sense strand
gguggcagcaucuugagua

SEQ ID NO: 2182446 - RNA, 19 nt, Homo sapiens
  misc_RNA (1)...(19): siRNA sense strand
gaagaccggcugugagaca

SEQ ID NO: 2182447 - RNA, 19 nt, Homo sapiens
  misc_RNA (1)...(19): siRNA sense strand
uggaucagcuaaagucaga

SEQ ID NO: 2182448 - RNA, 19 nt, Homo sapiens
  misc_RNA (1)...(19): siRNA sense strand
gcagaagcacaaacaaauc

SEQ ID NO: 2182449 - RNA, 19 nt, Homo sapiens
  misc_RNA (1)...(19): siRNA sense strand
ugaugauggugaucuuaaa

SEQ ID NO: 2182450 - RNA, 19 nt, Homo sapiens
  misc_RNA (1)...(19): siRNA sense strand
ggacaguucacguaugauc

SEQ ID NO: 2182451 - RNA, 19 nt, Homo sapiens
  misc_RNA (1)...(19): siRNA sense strand
uuucucggcuucacaugua

SEQ ID NO: 2182452 - RNA, 19 nt, Homo sapiens
  misc_RNA (1)...(19): siRNA sense strand
gcagguggccucucugucu

SEQ ID NO: 2182453 - RNA, 19 nt, Homo sapiens
  misc_RNA (1)...(19): siRNA sense strand
gauuggaugguaccaguuu

SEQ ID NO: 2182454 - RNA, 19 nt, Homo sapiens
  misc_RNA (1)...(19): siRNA sense strand
uaacugcugggcauuuaaa

SEQ ID NO: 2182455 - RNA, 19 nt, Homo sapiens
  misc_RNA (1)...(19): siRNA sense strand
gaugaugauggugaucuua

SEQ ID NO: 2182456 - RNA, 19 nt, Homo sapiens
  misc_RNA (1)...(19): siRNA sense strand
ggacgugcaagucagagaa

SEQ ID NO: 2182457 - RNA, 19 nt, Homo sapiens
  misc_RNA (1)...(19): siRNA sense strand
gggcaagcaugcauagaac

SEQ ID NO: 2182458 - RNA, 19 nt, Homo sapiens
  misc_RNA (1)...(19): siRNA sense strand
gaacugggcaagcaugcau

SEQ ID NO: 2182459 - RNA, 19 nt, Homo sapiens
  misc_RNA (1)...(19): siRNA sense strand
ccaguuuguuacuuugauu

SEQ ID NO: 2182460 - RNA, 19 nt, Homo sapiens
  misc_RNA (1)...(19): siRNA sense strand
agacggagcacaaauugga

SEQ ID NO: 2182461 - RNA, 19 nt, Homo sapiens
  misc_RNA (1)...(19): siRNA sense strand
gugaagaccggcugugaga

SEQ ID NO: 2182462 - RNA, 19 nt, Homo sapiens
  misc_RNA (1)...(19): siRNA sense strand
ugucacacuuggaagauau

SEQ ID NO: 2182463 - RNA, 19 nt, Homo sapiens
  misc_RNA (1)...(19): siRNA sense strand
uuucuuggcugaauguguu

SEQ ID NO: 2182464 - RNA, 19 nt, Homo sapiens
  misc_RNA (1)...(19): siRNA sense strand
ucgacggccuccuguauug

SEQ ID NO: 2182465 - RNA, 19 nt, Homo sapiens
  misc_RNA (1)...(19): siRNA sense strand
gcagcgcugucucccugaa

SEQ ID NO: 2182466 - RNA, 19 nt, Homo sapiens
  misc_RNA (1)...(19): siRNA sense strand
gacacagcuuuccaaauag

SEQ ID NO: 2182467 - RNA, 19 nt, Homo sapiens
  misc_RNA (1)...(19): siRNA sense strand
cagaagcacaaacaaauca

SEQ ID NO: 2182468 - RNA, 19 nt, Homo sapiens
  misc_RNA (1)...(19): siRNA sense strand
gguuugaaguggugaacau

SEQ ID NO: 2182469 - RNA, 19 nt, Homo sapiens
  misc_RNA (1)...(19): siRNA sense strand
acacagcuuuccaaauagu

SEQ ID NO: 2182470 - RNA, 19 nt, Homo sapiens
  misc_RNA (1)...(19): siRNA sense strand
ggcagcaucuugaguacuc

SEQ ID NO: 2182471 - RNA, 19 nt, Homo sapiens
  misc_RNA (1)...(19): siRNA sense strand
gaaguggugaacauggauu

SEQ ID NO: 2182472 - RNA, 19 nt, Homo sapiens
  misc_RNA (1)...(19): siRNA sense strand
guggugaggcucuccauga

SEQ ID NO: 2182473 - RNA, 19 nt, Homo sapiens
  misc_RNA (1)...(19): siRNA sense strand
cauccagccugacauuuac

SEQ ID NO: 2182474 - RNA, 19 nt, Homo sapiens
  misc_RNA (1)...(19): siRNA sense strand
ggcagccucuggaguguuc

SEQ ID NO: 2182475 - RNA, 19 nt, Homo sapiens
  misc_RNA (1)...(19): siRNA sense strand
aaaugaguaucaggaagaa

SEQ ID NO: 2182476 - RNA, 19 nt, Homo sapiens
  misc_RNA (1)...(19): siRNA sense strand
ggugugugcauuaugguuu

SEQ ID NO: 2182477 - RNA, 19 nt, Homo sapiens
  misc_RNA (1)...(19): siRNA sense strand
aagcuguauucccaagaua

SEQ ID NO: 2182478 - RNA, 19 nt, Homo sapiens
  misc_RNA (1)...(19): siRNA sense strand
cagagguucucaucacagu

SEQ ID NO: 2182479 - RNA, 19 nt, Homo sapiens
  misc_RNA (1)...(19): siRNA sense strand
ccacuuugcuacagaagcu

SEQ ID NO: 2182480 - RNA, 19 nt, Homo sapiens
  misc_RNA (1)...(19): siRNA sense strand
aagcugccauucagggaaa

SEQ ID NO: 2182481 - RNA, 19 nt, Homo sapiens
  misc_RNA (1)...(19): siRNA sense strand
gguggacuuugcucuggaa

SEQ ID NO: 2182482 - RNA, 19 nt, Homo sapiens
  misc_RNA (1)...(19): siRNA sense strand
ugagacggagcacaaauug

SEQ ID NO: 2182483 - RNA, 19 nt, Homo sapiens
  misc_RNA (1)...(19): siRNA sense strand
ugaccacuuugcuacagaa

SEQ ID NO: 2182484 - RNA, 19 nt, Homo sapiens
  misc_RNA (1)...(19): siRNA sense strand
gcucaucccacucuuccuu

SEQ ID NO: 2182485 - RNA, 19 nt, Homo sapiens
  misc_RNA (1)...(19): siRNA sense strand
ugucgagaguuuauucuag

SEQ ID NO: 2182486 - RNA, 19 nt, Homo sapiens
  misc_RNA (1)...(19): siRNA sense strand
gggccagggcaauuucuuu

SEQ ID NO: 2182487 - RNA, 19 nt, Homo sapiens
  misc_RNA (1)...(19): siRNA sense strand
guucacguaugaucaggau

SEQ ID NO: 2182488 - RNA, 19 nt, Homo sapiens
  misc_RNA (1)...(19): siRNA sense strand
guggaugccguacaagaaa

SEQ ID NO: 2182489 - RNA, 19 nt, Homo sapiens
  misc_RNA (1)...(19): siRNA sense strand
ucaccaagaacaugaagug

SEQ ID NO: 2182490 - RNA, 19 nt, Homo sapiens
  misc_RNA (1)...(19): siRNA sense strand
gccgucagcuucggucaga

SEQ ID NO: 2182491 - RNA, 19 nt, Homo sapiens
  misc_RNA (1)...(19): siRNA sense strand
gaugguaccaguuuguuac

SEQ ID NO: 2182492 - RNA, 19 nt, Homo sapiens
  misc_RNA (1)...(19): siRNA sense strand
cagggugugugcauuaugg

SEQ ID NO: 2182493 - RNA, 19 nt, Homo sapiens
  misc_RNA (1)...(19): siRNA sense strand
ggaucccgcugugguacuu

SEQ ID NO: 2182494 - RNA, 19 nt, Homo sapiens
  misc_RNA (1)...(19): siRNA sense strand
gcgcugaugagucuguuug

SEQ ID NO: 2182495 - RNA, 19 nt, Homo sapiens
  misc_RNA (1)...(19): siRNA sense strand
ggugguggcagcaucuuga

SEQ ID NO: 2182496 - RNA, 19 nt, Homo sapiens
  misc_RNA (1)...(19): siRNA sense strand
ccaggugccuucgaaacau

SEQ ID NO: 2182497 - RNA, 19 nt, Homo sapiens
  misc_RNA (1)...(19): siRNA sense strand
acacguaugcgcucaguuc

SEQ ID NO: 2182498 - RNA, 19 nt, Homo sapiens
  misc_RNA (1)...(19): siRNA sense strand
agucagggugugugcauua

SEQ ID NO: 2182499 - RNA, 19 nt, Homo sapiens
  misc_RNA (1)...(19): siRNA sense strand
cgacgacacagcuuuccaa

SEQ ID NO: 2182500 - RNA, 19 nt, Homo sapiens
  misc_RNA (1)...(19): siRNA sense strand
guaacugcugggcauuuaa

SEQ ID NO: 2182501 - RNA, 19 nt, Homo sapiens
  misc_RNA (1)...(19): siRNA sense strand
aauuggacccuguauuuga

SEQ ID NO: 2182502 - RNA, 19 nt, Homo sapiens
  misc_RNA (1)...(19): siRNA sense strand
ugaauguguuucuucuuac

SEQ ID NO: 2182503 - RNA, 19 nt, Homo sapiens
  misc_RNA (1)...(19): siRNA sense strand
agaccgggaugguggacuu

SEQ ID NO: 2182504 - RNA, 19 nt, Homo sapiens
  misc_RNA (1)...(19): siRNA sense strand
guaugucacacuuggaaga

SEQ ID NO: 2182505 - RNA, 19 nt, Homo sapiens
  misc_RNA (1)...(19): siRNA sense strand
uagcaggucucuccuuacg

SEQ ID NO: 2182506 - RNA, 19 nt, Homo sapiens
  misc_RNA (1)...(19): siRNA sense strand
cgacacagcuuuccaaaua

SEQ ID NO: 2182507 - RNA, 19 nt, Homo sapiens
  misc_RNA (1)...(19): siRNA sense strand
gaacacagcggguggauga

SEQ ID NO: 2182508 - RNA, 19 nt, Homo sapiens
  misc_RNA (1)...(19): siRNA sense strand
gcaaggcgguucucuggaa

SEQ ID NO: 2182509 - RNA, 19 nt, Homo sapiens
  misc_RNA (1)...(19): siRNA sense strand
gaaauaaagcugccauuca

SEQ ID NO: 2182510 - RNA, 19 nt, Homo sapiens
  misc_RNA (1)...(19): siRNA sense strand
cugaauguguuucuucuua

SEQ ID NO: 2182511 - RNA, 19 nt, Homo sapiens
  misc_RNA (1)...(19): siRNA sense strand
gguaacugcugggcauuua

SEQ ID NO: 2182512 - RNA, 19 nt, Homo sapiens
  misc_RNA (1)...(19): siRNA sense strand
gcacaaacaaaucagcuuu

SEQ ID NO: 2182513 - RNA, 19 nt, Homo sapiens
  misc_RNA (1)...(19): siRNA sense strand
gagggagacugacuuuaug

SEQ ID NO: 2182514 - RNA, 19 nt, Homo sapiens
  misc_RNA (1)...(19): siRNA sense strand
gaucuuaaagguggaaaua

SEQ ID NO: 2182515 - RNA, 19 nt, Homo sapiens
  misc_RNA (1)...(19): siRNA sense strand
gguaccaguuuguuacuuu

SEQ ID NO: 2182516 - RNA, 19 nt, Homo sapiens
  misc_RNA (1)...(19): siRNA sense strand
gaacacgggcuacacguau

SEQ ID NO: 2182517 - RNA, 19 nt, Homo sapiens
  misc_RNA (1)...(19): siRNA sense strand
uccgagagcugaccacuuu

SEQ ID NO: 2182518 - RNA, 19 nt, Homo sapiens
  misc_RNA (1)...(19): siRNA sense strand
gaagcuguauucccaagau

SEQ ID NO: 2182519 - RNA, 19 nt, Homo sapiens
  misc_RNA (1)...(19): siRNA sense strand
ggacuucgccgucuaugga

SEQ ID NO: 2182520 - RNA, 19 nt, Homo sapiens
  misc_RNA (1)...(19): siRNA sense strand
ggacuuugcucuggaaucu

SEQ ID NO: 2182521 - RNA, 19 nt, Homo sapiens
  misc_RNA (1)...(19): siRNA sense strand
gugaggcucuccaugauga

SEQ ID NO: 2182522 - RNA, 19 nt, Homo sapiens
  misc_RNA (1)...(19): siRNA sense strand
gcacaaauuggacccugua

SEQ ID NO: 2182523 - RNA, 19 nt, Homo sapiens
  misc_RNA (1)...(19): siRNA sense strand
uggcgaaccugucaaguga

SEQ ID NO: 2182524 - RNA, 19 nt, Homo sapiens
  misc_RNA (1)...(19): siRNA sense strand
gacaguggaugccguacaa

SEQ ID NO: 2182525 - RNA, 19 nt, Homo sapiens
  misc_RNA (1)...(19): siRNA sense strand
uggaagauauucugggaaa

SEQ ID NO: 2182526 - RNA, 19 nt, Homo sapiens
  misc_RNA (1)...(19): siRNA sense strand
aaacggcgcugaugagucu

SEQ ID NO: 2182527 - RNA, 19 nt, Homo sapiens
  misc_RNA (1)...(19): siRNA sense strand
gaaccgagcggccagaaca

SEQ ID NO: 2182528 - RNA, 19 nt, Homo sapiens
  misc_RNA (1)...(19): siRNA sense strand
aaauaaagcugccauucag

SEQ ID NO: 2182529 - RNA, 19 nt, Homo sapiens
  misc_RNA (1)...(19): siRNA sense strand
acuagcaggucucuccuua

SEQ ID NO: 2182530 - RNA, 19 nt, Homo sapiens
  misc_RNA (1)...(19): siRNA sense strand
gagguucucaucacaguuu

SEQ ID NO: 2182531 - RNA, 19 nt, Homo sapiens
  misc_RNA (1)...(19): siRNA sense strand
ucagagaaauggugaaacu

SEQ ID NO: 2182532 - RNA, 19 nt, Homo sapiens
  misc_RNA (1)...(19): siRNA sense strand
ggaaauaaagcugccauuc

SEQ ID NO: 2182533 - RNA, 19 nt, Homo sapiens
  misc_RNA (1)...(19): siRNA sense strand
ggaugguaccaguuuguua

SEQ ID NO: 2182534 - RNA, 19 nt, Homo sapiens
  misc_RNA (1)...(19): siRNA sense strand
cgagggagacugacuuuau

SEQ ID NO: 2182535 - RNA, 19 nt, Homo sapiens
  misc_RNA (1)...(19): siRNA sense strand
gcgcucaguuccagcuauu

SEQ ID NO: 2182536 - RNA, 19 nt, Homo sapiens
  misc_RNA (1)...(19): siRNA sense strand
caaaucagcuuuuaguauc

SEQ ID NO: 2182537 - RNA, 19 nt, Homo sapiens
  misc_RNA (1)...(19): siRNA sense strand
gcgcagaagcacaaacaaa

SEQ ID NO: 2182538 - RNA, 19 nt, Homo sapiens
  misc_RNA (1)...(19): siRNA sense strand
ucauccagccugacauuua

SEQ ID NO: 2182539 - RNA, 19 nt, Homo sapiens
  misc_RNA (1)...(19): siRNA sense strand
gaaaagacccgacgacaca

SEQ ID NO: 2182540 - RNA, 19 nt, Homo sapiens
  misc_RNA (1)...(19): siRNA sense strand
ccaaggacuucgccgucua

SEQ ID NO: 2182541 - RNA, 19 nt, Homo sapiens
  misc_RNA (1)...(19): siRNA sense strand
guaccaguuuguuacuuug

SEQ ID NO: 2182542 - RNA, 19 nt, Homo sapiens
  misc_RNA (1)...(19): siRNA sense strand
aaacagcgcagaagcacaa

SEQ ID NO: 2182543 - RNA, 19 nt, Homo sapiens
  misc_RNA (1)...(19): siRNA sense strand
ugggacaguucacguauga

SEQ ID NO: 2182544 - RNA, 19 nt, Homo sapiens
  misc_RNA (1)...(19): siRNA sense strand
aguacucgcuguucugaaa

SEQ ID NO: 2182545 - RNA, 19 nt, Homo sapiens
  misc_RNA (1)...(19): siRNA sense strand
gguggcagcaucuugagua

SEQ ID NO: 2182546 - RNA, 19 nt, Homo sapiens
  misc_RNA (1)...(19): siRNA sense strand
gaagaccggcugugagaca

SEQ ID NO: 2182547 - RNA, 19 nt, Homo sapiens
  misc_RNA (1)...(19): siRNA sense strand
uggaucagcuaaagucaga

SEQ ID NO: 2182548 - RNA, 19 nt, Homo sapiens
  misc_RNA (1)...(19): siRNA sense strand
gcagaagcacaaacaaauc

SEQ ID NO: 2182549 - RNA, 19 nt, Homo sapiens
  misc_RNA (1)...(19): siRNA sense strand
ugaugauggugaucuuaaa

SEQ ID NO: 2182550 - RNA, 19 nt, Homo sapiens
  misc_RNA (1)...(19): siRNA sense strand
ggacaguucacguaugauc

SEQ ID NO: 2182551 - RNA, 19 nt, Homo sapiens
  misc_RNA (1)...(19): siRNA sense strand
uuucucggcuucacaugua

SEQ ID NO: 2182552 - RNA, 19 nt, Homo sapiens
  misc_RNA (1)...(19): siRNA sense strand
gcagguggccucucugucu

SEQ ID NO: 2182553 - RNA, 19 nt, Homo sapiens
  misc_RNA (1)...(19): siRNA sense strand
gauuggaugguaccaguuu

SEQ ID NO: 2182554 - RNA, 19 nt, Homo sapiens
  misc_RNA (1)...(19): siRNA sense strand
uaacugcugggcauuuaaa

SEQ ID NO: 2182555 - RNA, 19 nt, Homo sapiens
  misc_RNA (1)...(19): siRNA sense strand
gaugaugauggugaucuua

SEQ ID NO: 2182556 - RNA, 19 nt, Homo sapiens
  misc_RNA (1)...(19): siRNA sense strand
ggacgugcaagucagagaa

SEQ ID NO: 2182557 - RNA, 19 nt, Homo sapiens
  misc_RNA (1)...(19): siRNA sense strand
gggcaagcaugcauagaac

SEQ ID NO: 2182558 - RNA, 19 nt, Homo sapiens
  misc_RNA (1)...(19): siRNA sense strand
gaacugggcaagcaugcau

SEQ ID NO: 2182559 - RNA, 19 nt, Homo sapiens
  misc_RNA (1)...(19): siRNA sense strand
ccaguuuguuacuuugauu

SEQ ID NO: 2182560 - RNA, 19 nt, Homo sapiens
  misc_RNA (1)...(19): siRNA sense strand
agacggagcacaaauugga

SEQ ID NO: 2182561 - RNA, 19 nt, Homo sapiens
  misc_RNA (1)...(19): siRNA sense strand
gugaagaccggcugugaga

SEQ ID NO: 2182562 - RNA, 19 nt, Homo sapiens
  misc_RNA (1)...(19): siRNA sense strand
ugucacacuuggaagauau

SEQ ID NO: 2182563 - RNA, 19 nt, Homo sapiens
  misc_RNA (1)...(19): siRNA sense strand
uuucuuggcugaauguguu

SEQ ID NO: 2182564 - RNA, 19 nt, Homo sapiens
  misc_RNA (1)...(19): siRNA sense strand
ucgacggccuccuguauug

SEQ ID NO: 2182565 - RNA, 19 nt, Homo sapiens
  misc_RNA (1)...(19): siRNA sense strand
gcagcgcugucucccugaa

SEQ ID NO: 2182566 - RNA, 19 nt, Homo sapiens
  misc_RNA (1)...(19): siRNA sense strand
gacacagcuuuccaaauag

SEQ ID NO: 2182567 - RNA, 19 nt, Homo sapiens
  misc_RNA (1)...(19): siRNA sense strand
cagaagcacaaacaaauca

SEQ ID NO: 2182568 - RNA, 19 nt, Homo sapiens
  misc_RNA (1)...(19): siRNA sense strand
gguuugaaguggugaacau

SEQ ID NO: 2182569 - RNA, 19 nt, Homo sapiens
  misc_RNA (1)...(19): siRNA sense strand
acacagcuuuccaaauagu

SEQ ID NO: 2182570 - RNA, 19 nt, Homo sapiens
  misc_RNA (1)...(19): siRNA sense strand
ggcagcaucuugaguacuc

SEQ ID NO: 2182571 - RNA, 19 nt, Homo sapiens
  misc_RNA (1)...(19): siRNA sense strand
gaaguggugaacauggauu

SEQ ID NO: 2182572 - RNA, 19 nt, Homo sapiens
  misc_RNA (1)...(19): siRNA sense strand
guggugaggcucuccauga

SEQ ID NO: 2182573 - RNA, 19 nt, Homo sapiens
  misc_RNA (1)...(19): siRNA sense strand
cauccagccugacauuuac

SEQ ID NO: 2182574 - RNA, 19 nt, Homo sapiens
  misc_RNA (1)...(19): siRNA sense strand
ggcagccucuggaguguuc

SEQ ID NO: 2182575 - RNA, 19 nt, Homo sapiens
  misc_RNA (1)...(19): siRNA sense strand
aaaugaguaucaggaagaa

SEQ ID NO: 2182576 - RNA, 19 nt, Homo sapiens
  misc_RNA (1)...(19): siRNA sense strand
ggugugugcauuaugguuu

SEQ ID NO: 2182577 - RNA, 19 nt, Homo sapiens
  misc_RNA (1)...(19): siRNA sense strand
aagcuguauucccaagaua

SEQ ID NO: 2182578 - RNA, 19 nt, Homo sapiens
  misc_RNA (1)...(19): siRNA sense strand
cagagguucucaucacagu

SEQ ID NO: 2182579 - RNA, 19 nt, Homo sapiens
  misc_RNA (1)...(19): siRNA sense strand
ccacuuugcuacagaagcu

SEQ ID NO: 2182580 - RNA, 19 nt, Homo sapiens
  misc_RNA (1)...(19): siRNA sense strand
aagcugccauucagggaaa

SEQ ID NO: 2182581 - RNA, 19 nt, Homo sapiens
  misc_RNA (1)...(19): siRNA sense strand
gguggacuuugcucuggaa

SEQ ID NO: 2182582 - RNA, 19 nt, Homo sapiens
  misc_RNA (1)...(19): siRNA sense strand
ugagacggagcacaaauug

SEQ ID NO: 2182583 - RNA, 19 nt, Homo sapiens
  misc_RNA (1)...(19): siRNA sense strand
ugaccacuuugcuacagaa

SEQ ID NO: 2182584 - RNA, 19 nt, Homo sapiens
  misc_RNA (1)...(19): siRNA sense strand
gcucaucccacucuuccuu

SEQ ID NO: 2182585 - RNA, 19 nt, Homo sapiens
  misc_RNA (1)...(19): siRNA sense strand
ugucgagaguuuauucuag

SEQ ID NO: 2182586 - RNA, 19 nt, Homo sapiens
  misc_RNA (1)...(19): siRNA sense strand
gggccagggcaauuucuuu

SEQ ID NO: 2182587 - RNA, 19 nt, Homo sapiens
  misc_RNA (1)...(19): siRNA sense strand
guucacguaugaucaggau

SEQ ID NO: 2182588 - RNA, 19 nt, Homo sapiens
  misc_RNA (1)...(19): siRNA sense strand
guggaugccguacaagaaa

SEQ ID NO: 2182589 - RNA, 19 nt, Homo sapiens
  misc_RNA (1)...(19): siRNA sense strand
ucaccaagaacaugaagug

SEQ ID NO: 2182590 - RNA, 19 nt, Homo sapiens
  misc_RNA (1)...(19): siRNA sense strand
gccgucagcuucggucaga

SEQ ID NO: 2182591 - RNA, 19 nt, Homo sapiens
  misc_RNA (1)...(19): siRNA sense strand
gaugguaccaguuuguuac

SEQ ID NO: 2182592 - RNA, 19 nt, Homo sapiens
  misc_RNA (1)...(19): siRNA sense strand
cagggugugugcauuaugg

SEQ ID NO: 2182593 - RNA, 19 nt, Homo sapiens
  misc_RNA (1)...(19): siRNA sense strand
ggaucccgcugugguacuu

SEQ ID NO: 2182594 - RNA, 19 nt, Homo sapiens
  misc_RNA (1)...(19): siRNA sense strand
gcgcugaugagucuguuug

SEQ ID NO: 2182595 - RNA, 19 nt, Homo sapiens
  misc_RNA (1)...(19): siRNA sense strand
ggugguggcagcaucuuga

SEQ ID NO: 2182596 - RNA, 19 nt, Homo sapiens
  misc_RNA (1)...(19): siRNA sense strand
ccaggugccuucgaaacau

SEQ ID NO: 2182597 - RNA, 19 nt, Homo sapiens
  misc_RNA (1)...(19): siRNA sense strand
acacguaugcgcucaguuc

SEQ ID NO: 2182598 - RNA, 19 nt, Homo sapiens
  misc_RNA (1)...(19): siRNA sense strand
agucagggugugugcauua

SEQ ID NO: 2182599 - RNA, 19 nt, Homo sapiens
  misc_RNA (1)...(19): siRNA sense strand
cgacgacacagcuuuccaa

SEQ ID NO: 2182600 - RNA, 19 nt, Homo sapiens
  misc_RNA (1)...(19): siRNA sense strand
guaacugcugggcauuuaa

SEQ ID NO: 2182601 - RNA, 19 nt, Homo sapiens
  misc_RNA (1)...(19): siRNA sense strand
aauuggacccuguauuuga

SEQ ID NO: 2182602 - RNA, 19 nt, Homo sapiens
  misc_RNA (1)...(19): siRNA sense strand
ugaauguguuucuucuuac

SEQ ID NO: 2182603 - RNA, 19 nt, Homo sapiens
  misc_RNA (1)...(19): siRNA sense strand
agaccgggaugguggacuu

SEQ ID NO: 2182604 - RNA, 19 nt, Homo sapiens
  misc_RNA (1)...(19): siRNA sense strand
guaugucacacuuggaaga

SEQ ID NO: 2182605 - RNA, 19 nt, Homo sapiens
  misc_RNA (1)...(19): siRNA sense strand
uagcaggucucuccuuacg

SEQ ID NO: 2182606 - RNA, 19 nt, Homo sapiens
  misc_RNA (1)...(19): siRNA sense strand
gaacuggcccgagaucuuu

SEQ ID NO: 2182607 - RNA, 19 nt, Homo sapiens
  misc_RNA (1)...(19): siRNA sense strand
ccacggugcugcuggauga

SEQ ID NO: 2182608 - RNA, 19 nt, Homo sapiens
  misc_RNA (1)...(19): siRNA sense strand
gcgccuaccugaucuacuu

SEQ ID NO: 2182609 - RNA, 19 nt, Homo sapiens
  misc_RNA (1)...(19): siRNA sense strand
caaagggucaggccaauga

SEQ ID NO: 2182610 - RNA, 19 nt, Homo sapiens
  misc_RNA (1)...(19): siRNA sense strand
cgaccuggcuggcauguuc

SEQ ID NO: 2182611 - RNA, 19 nt, Homo sapiens
  misc_RNA (1)...(19): siRNA sense strand
gaucgacgccguucugaau

SEQ ID NO: 2182612 - RNA, 19 nt, Homo sapiens
  misc_RNA (1)...(19): siRNA sense strand
gaucaagcccaacaucuuc

SEQ ID NO: 2182613 - RNA, 19 nt, Homo sapiens
  misc_RNA (1)...(19): siRNA sense strand
ccaagcagaccaucacuga

SEQ ID NO: 2182614 - RNA, 19 nt, Homo sapiens
  misc_RNA (1)...(19): siRNA sense strand
caucuguggugccaauuga

SEQ ID NO: 2182615 - RNA, 19 nt, Homo sapiens
  misc_RNA (1)...(19): siRNA sense strand
ugaagaugcucauggagau

SEQ ID NO: 2182616 - RNA, 19 nt, Homo sapiens
  misc_RNA (1)...(19): siRNA sense strand
ugucugugcuggccuguaa

SEQ ID NO: 2182617 - RNA, 19 nt, Homo sapiens
  misc_RNA (1)...(19): siRNA sense strand
ccacugagggcgucauuga

SEQ ID NO: 2182618 - RNA, 19 nt, Homo sapiens
  misc_RNA (1)...(19): siRNA sense strand
gcacgaugcuguggacgau

SEQ ID NO: 2182619 - RNA, 19 nt, Homo sapiens
  misc_RNA (1)...(19): siRNA sense strand
ucucacaccugaucaagau

SEQ ID NO: 2182620 - RNA, 19 nt, Homo sapiens
  misc_RNA (1)...(19): siRNA sense strand
ucauguaccuggccaagau

SEQ ID NO: 2182621 - RNA, 19 nt, Homo sapiens
  misc_RNA (1)...(19): siRNA sense strand
caacaugcagguccucuau

SEQ ID NO: 2182622 - RNA, 19 nt, Homo sapiens
  misc_RNA (1)...(19): siRNA sense strand
gcaaggagccgcaguaccu

SEQ ID NO: 2182623 - RNA, 19 nt, Homo sapiens
  misc_RNA (1)...(19): siRNA sense strand
gacccgagauccugagcuu

SEQ ID NO: 2182624 - RNA, 19 nt, Homo sapiens
  misc_RNA (1)...(19): siRNA sense strand
cgugugaggugcuggacua

SEQ ID NO: 2182625 - RNA, 19 nt, Homo sapiens
  misc_RNA (1)...(19): siRNA sense strand
ccauuucuccgucgauuaa

SEQ ID NO: 2182626 - RNA, 19 nt, Homo sapiens
  misc_RNA (1)...(19): siRNA sense strand
cuaguggacuggcuggaaa

SEQ ID NO: 2182627 - RNA, 19 nt, Homo sapiens
  misc_RNA (1)...(19): siRNA sense strand
gugaggugcuggacuacuu

SEQ ID NO: 2182628 - RNA, 19 nt, Homo sapiens
  misc_RNA (1)...(19): siRNA sense strand
gcacgguuccgaagacaug

SEQ ID NO: 2182629 - RNA, 19 nt, Homo sapiens
  misc_RNA (1)...(19): siRNA sense strand
ucaaguuggugaucuucaa

SEQ ID NO: 2182630 - RNA, 19 nt, Homo sapiens
  misc_RNA (1)...(19): siRNA sense strand
gaacaucauggacaagagu

SEQ ID NO: 2182631 - RNA, 19 nt, Homo sapiens
  misc_RNA (1)...(19): siRNA sense strand
gcacccaccucaacuucca

SEQ ID NO: 2182632 - RNA, 19 nt, Homo sapiens
  misc_RNA (1)...(19): siRNA sense strand
ugaaggugcuccugcagau

SEQ ID NO: 2182633 - RNA, 19 nt, Homo sapiens
  misc_RNA (1)...(19): siRNA sense strand
ucucuacccucuacuggaa

SEQ ID NO: 2182634 - RNA, 19 nt, Homo sapiens
  misc_RNA (1)...(19): siRNA sense strand
gcugcugacugcauucuuc

SEQ ID NO: 2182635 - RNA, 19 nt, Homo sapiens
  misc_RNA (1)...(19): siRNA sense strand
caucaugucccaccucuuc

SEQ ID NO: 2182636 - RNA, 19 nt, Homo sapiens
  misc_RNA (1)...(19): siRNA sense strand
cagagcagccggagaccua

SEQ ID NO: 2182637 - RNA, 19 nt, Homo sapiens
  misc_RNA (1)...(19): siRNA sense strand
gccaaacgguggaggaucu

SEQ ID NO: 2182638 - RNA, 19 nt, Homo sapiens
  misc_RNA (1)...(19): siRNA sense strand
ugcagaagcuggagaugug

SEQ ID NO: 2182639 - RNA, 19 nt, Homo sapiens
  misc_RNA (1)...(19): siRNA sense strand
guucauccauaaguacauu

SEQ ID NO: 2182640 - RNA, 19 nt, Homo sapiens
  misc_RNA (1)...(19): siRNA sense strand
ccucaccggucucaccaaa

SEQ ID NO: 2182641 - RNA, 19 nt, Homo sapiens
  misc_RNA (1)...(19): siRNA sense strand
ggcaagagccgggaacaga

SEQ ID NO: 2182642 - RNA, 19 nt, Homo sapiens
  misc_RNA (1)...(19): siRNA sense strand
agacauggacgucaucuca

SEQ ID NO: 2182643 - RNA, 19 nt, Homo sapiens
  misc_RNA (1)...(19): siRNA sense strand
cggagagcguggaggagua

SEQ ID NO: 2182644 - RNA, 19 nt, Homo sapiens
  misc_RNA (1)...(19): siRNA sense strand
ggacucauccaccgcuuca

SEQ ID NO: 2182645 - RNA, 19 nt, Homo sapiens
  misc_RNA (1)...(19): siRNA sense strand
gcccugaggauccugcaua

SEQ ID NO: 2182646 - RNA, 19 nt, Homo sapiens
  misc_RNA (1)...(19): siRNA sense strand
uccggaaccugccugagua

SEQ ID NO: 2182647 - RNA, 19 nt, Homo sapiens
  misc_RNA (1)...(19): siRNA sense strand
gcuccgaggugcccauuuu

SEQ ID NO: 2182648 - RNA, 19 nt, Homo sapiens
  misc_RNA (1)...(19): siRNA sense strand
ggacgccuccaucaacuuc

SEQ ID NO: 2182649 - RNA, 19 nt, Homo sapiens
  misc_RNA (1)...(19): siRNA sense strand
gcugaaaucccuccuugca

SEQ ID NO: 2182650 - RNA, 19 nt, Homo sapiens
  misc_RNA (1)...(19): siRNA sense strand
gcauguuccuccagauuuu

SEQ ID NO: 2182651 - RNA, 19 nt, Homo sapiens
  misc_RNA (1)...(19): siRNA sense strand
cagccgaaacccugacuuu

SEQ ID NO: 2182652 - RNA, 19 nt, Homo sapiens
  misc_RNA (1)...(19): siRNA sense strand
ggaagugcuccgcucauuc

SEQ ID NO: 2182653 - RNA, 19 nt, Homo sapiens
  misc_RNA (1)...(19): siRNA sense strand
cgcaguaccuggagaugga

SEQ ID NO: 2182654 - RNA, 19 nt, Homo sapiens
  misc_RNA (1)...(19): siRNA sense strand
ggcccgagaucuuugucaa

SEQ ID NO: 2182655 - RNA, 19 nt, Homo sapiens
  misc_RNA (1)...(19): siRNA sense strand
ggcauguuccuccagauuu

SEQ ID NO: 2182656 - RNA, 19 nt, Homo sapiens
  misc_RNA (1)...(19): siRNA sense strand
cagaggcacccaaaccaaa

SEQ ID NO: 2182657 - RNA, 19 nt, Homo sapiens
  misc_RNA (1)...(19): siRNA sense strand
cggcccagcucaugagugu

SEQ ID NO: 2182658 - RNA, 19 nt, Homo sapiens
  misc_RNA (1)...(19): siRNA sense strand
ccggagaccuacuacaagu

SEQ ID NO: 2182659 - RNA, 19 nt, Homo sapiens
  misc_RNA (1)...(19): siRNA sense strand
uggaagugcuccgcucauu

SEQ ID NO: 2182660 - RNA, 19 nt, Homo sapiens
  misc_RNA (1)...(19): siRNA sense strand
aagcagaccaucacugaga

SEQ ID NO: 2182661 - RNA, 19 nt, Homo sapiens
  misc_RNA (1)...(19): siRNA sense strand
ucaggccaaugaaucgaaa

SEQ ID NO: 2182662 - RNA, 19 nt, Homo sapiens
  misc_RNA (1)...(19): siRNA sense strand
ccaucuggcugccuucauc

SEQ ID NO: 2182663 - RNA, 19 nt, Homo sapiens
  misc_RNA (1)...(19): siRNA sense strand
ucauugcucugggcucaaa

SEQ ID NO: 2182664 - RNA, 19 nt, Homo sapiens
  misc_RNA (1)...(19): siRNA sense strand
ccaagguccuccucaacca

SEQ ID NO: 2182665 - RNA, 19 nt, Homo sapiens
  misc_RNA (1)...(19): siRNA sense strand
ugaggauccugcauaugga

SEQ ID NO: 2182666 - RNA, 19 nt, Homo sapiens
  misc_RNA (1)...(19): siRNA sense strand
ugagugacauagacgagau

SEQ ID NO: 2182667 - RNA, 19 nt, Homo sapiens
  misc_RNA (1)...(19): siRNA sense strand
gcacagaggcacccaaacc

SEQ ID NO: 2182668 - RNA, 19 nt, Homo sapiens
  misc_RNA (1)...(19): siRNA sense strand
guuugucgcuggugcuuuc

SEQ ID NO: 2182669 - RNA, 19 nt, Homo sapiens
  misc_RNA (1)...(19): siRNA sense strand
gggcaccaccaucaaguug

SEQ ID NO: 2182670 - RNA, 19 nt, Homo sapiens
  misc_RNA (1)...(19): siRNA sense strand
ucagcaagcucgccccuaa

SEQ ID NO: 2182671 - RNA, 19 nt, Homo sapiens
  misc_RNA (1)...(19): siRNA sense strand
gggcauguacggccagaug

SEQ ID NO: 2182672 - RNA, 19 nt, Homo sapiens
  misc_RNA (1)...(19): siRNA sense strand
ggucagcgucucccuguuc

SEQ ID NO: 2182673 - RNA, 19 nt, Homo sapiens
  misc_RNA (1)...(19): siRNA sense strand
caacagugaccuggugaug

SEQ ID NO: 2182674 - RNA, 19 nt, Homo sapiens
  misc_RNA (1)...(19): siRNA sense strand
ccaaguuccuggccauggu

SEQ ID NO: 2182675 - RNA, 19 nt, Homo sapiens
  misc_RNA (1)...(19): siRNA sense strand
ugcaguucauccauaagua

SEQ ID NO: 2182676 - RNA, 19 nt, Homo sapiens
  misc_RNA (1)...(19): siRNA sense strand
gggcacagcucaggaugcu

SEQ ID NO: 2182677 - RNA, 19 nt, Homo sapiens
  misc_RNA (1)...(19): siRNA sense strand
ucuccucgcucuuccugaa

SEQ ID NO: 2182678 - RNA, 19 nt, Homo sapiens
  misc_RNA (1)...(19): siRNA sense strand
cggcaucgccugggacaaa

SEQ ID NO: 2182679 - RNA, 19 nt, Homo sapiens
  misc_RNA (1)...(19): siRNA sense strand
cagcacagaggcacccaaa

SEQ ID NO: 2182680 - RNA, 19 nt, Homo sapiens
  misc_RNA (1)...(19): siRNA sense strand
gagagugaccgcaacuucu

SEQ ID NO: 2182681 - RNA, 19 nt, Homo sapiens
  misc_RNA (1)...(19): siRNA sense strand
gaagugcuccgcucauucc

SEQ ID NO: 2182682 - RNA, 19 nt, Homo sapiens
  misc_RNA (1)...(19): siRNA sense strand
caagaucaagcccaacauc

SEQ ID NO: 2182683 - RNA, 19 nt, Homo sapiens
  misc_RNA (1)...(19): siRNA sense strand
gaaguccucccgccaucug

SEQ ID NO: 2182684 - RNA, 19 nt, Homo sapiens
  misc_RNA (1)...(19): siRNA sense strand
ugucccaccucuucucgaa

SEQ ID NO: 2182685 - RNA, 19 nt, Homo sapiens
  misc_RNA (1)...(19): siRNA sense strand
cgugcacccugacggauga

SEQ ID NO: 2182686 - RNA, 19 nt, Homo sapiens
  misc_RNA (1)...(19): siRNA sense strand
acaugcagguccucuauac

SEQ ID NO: 2182687 - RNA, 19 nt, Homo sapiens
  misc_RNA (1)...(19): siRNA sense strand
ccaacaucuucgccacuga

SEQ ID NO: 2182688 - RNA, 19 nt, Homo sapiens
  misc_RNA (1)...(19): siRNA sense strand
ucgacaacgucuccaggaa

SEQ ID NO: 2182689 - RNA, 19 nt, Homo sapiens
  misc_RNA (1)...(19): siRNA sense strand
uuugugcaguucauccaua

SEQ ID NO: 2182690 - RNA, 19 nt, Homo sapiens
  misc_RNA (1)...(19): siRNA sense strand
gugcugagcgcucuguugu

SEQ ID NO: 2182691 - RNA, 19 nt, Homo sapiens
  misc_RNA (1)...(19): siRNA sense strand
gcagcaggcaauccacaug

SEQ ID NO: 2182692 - RNA, 19 nt, Homo sapiens
  misc_RNA (1)...(19): siRNA sense strand
ggugcuggacuacuucuug

SEQ ID NO: 2182693 - RNA, 19 nt, Homo sapiens
  misc_RNA (1)...(19): siRNA sense strand
ccgaagacauggacgucau

SEQ ID NO: 2182694 - RNA, 19 nt, Homo sapiens
  misc_RNA (1)...(19): siRNA sense strand
ucauugaggcucuguguag

SEQ ID NO: 2182695 - RNA, 19 nt, Homo sapiens
  misc_RNA (1)...(19): siRNA sense strand
gcaguucauccauaaguac

SEQ ID NO: 2182696 - RNA, 19 nt, Homo sapiens
  misc_RNA (1)...(19): siRNA sense strand
uccgccugcugcugaauua

SEQ ID NO: 2182697 - RNA, 19 nt, Homo sapiens
  misc_RNA (1)...(19): siRNA sense strand
ugcuacgguuugcagauua

SEQ ID NO: 2182698 - RNA, 19 nt, Homo sapiens
  misc_RNA (1)...(19): siRNA sense strand
ugaccaacaacuacuccua

SEQ ID NO: 2182699 - RNA, 19 nt, Homo sapiens
  misc_RNA (1)...(19): siRNA sense strand
ggucgucgccgcauucaac

SEQ ID NO: 2182700 - RNA, 19 nt, Homo sapiens
  misc_RNA (1)...(19): siRNA sense strand
cgagagugaccgcaacuuc

SEQ ID NO: 2182701 - RNA, 19 nt, Homo sapiens
  misc_RNA (1)...(19): siRNA sense strand
caacuggccacccgagagu

SEQ ID NO: 2182702 - RNA, 19 nt, Homo sapiens
  misc_RNA (1)...(19): siRNA sense strand
agaccaagcacgagaucaa

SEQ ID NO: 2182703 - RNA, 19 nt, Homo sapiens
  misc_RNA (1)...(19): siRNA sense strand
gcccggaacccgaacaaca

SEQ ID NO: 2182704 - RNA, 19 nt, Homo sapiens
  misc_RNA (1)...(19): siRNA sense strand
acagugaccuggugaugcu

SEQ ID NO: 2182705 - RNA, 19 nt, Homo sapiens
  misc_RNA (1)...(19): siRNA sense strand
ugcuggagguucugaguga

SEQ ID NO: 2182706 - RNA, 19 nt, Homo sapiens
  misc_RNA (1)...(19): siRNA sense strand
gaacuggcccgagaucuuu

SEQ ID NO: 2182707 - RNA, 19 nt, Homo sapiens
  misc_RNA (1)...(19): siRNA sense strand
ccacggugcugcuggauga

SEQ ID NO: 2182708 - RNA, 19 nt, Homo sapiens
  misc_RNA (1)...(19): siRNA sense strand
gcgccuaccugaucuacuu

SEQ ID NO: 2182709 - RNA, 19 nt, Homo sapiens
  misc_RNA (1)...(19): siRNA sense strand
caaagggucaggccaauga

SEQ ID NO: 2182710 - RNA, 19 nt, Homo sapiens
  misc_RNA (1)...(19): siRNA sense strand
cgaccuggcuggcauguuc

SEQ ID NO: 2182711 - RNA, 19 nt, Homo sapiens
  misc_RNA (1)...(19): siRNA sense strand
gaucgacgccguucugaau

SEQ ID NO: 2182712 - RNA, 19 nt, Homo sapiens
  misc_RNA (1)...(19): siRNA sense strand
gaucaagcccaacaucuuc

SEQ ID NO: 2182713 - RNA, 19 nt, Homo sapiens
  misc_RNA (1)...(19): siRNA sense strand
ccaagcagaccaucacuga

SEQ ID NO: 2182714 - RNA, 19 nt, Homo sapiens
  misc_RNA (1)...(19): siRNA sense strand
caucuguggugccaauuga

SEQ ID NO: 2182715 - RNA, 19 nt, Homo sapiens
  misc_RNA (1)...(19): siRNA sense strand
ugaagaugcucauggagau

SEQ ID NO: 2182716 - RNA, 19 nt, Homo sapiens
  misc_RNA (1)...(19): siRNA sense strand
ugucugugcuggccuguaa

SEQ ID NO: 2182717 - RNA, 19 nt, Homo sapiens
  misc_RNA (1)...(19): siRNA sense strand
ccacugagggcgucauuga

SEQ ID NO: 2182718 - RNA, 19 nt, Homo sapiens
  misc_RNA (1)...(19): siRNA sense strand
gcacgaugcuguggacgau

SEQ ID NO: 2182719 - RNA, 19 nt, Homo sapiens
  misc_RNA (1)...(19): siRNA sense strand
ucucacaccugaucaagau

SEQ ID NO: 2182720 - RNA, 19 nt, Homo sapiens
  misc_RNA (1)...(19): siRNA sense strand
ucauguaccuggccaagau

SEQ ID NO: 2182721 - RNA, 19 nt, Homo sapiens
  misc_RNA (1)...(19): siRNA sense strand
caacaugcagguccucuau

SEQ ID NO: 2182722 - RNA, 19 nt, Homo sapiens
  misc_RNA (1)...(19): siRNA sense strand
gcaaggagccgcaguaccu

SEQ ID NO: 2182723 - RNA, 19 nt, Homo sapiens
  misc_RNA (1)...(19): siRNA sense strand
gacccgagauccugagcuu

SEQ ID NO: 2182724 - RNA, 19 nt, Homo sapiens
  misc_RNA (1)...(19): siRNA sense strand
cgugugaggugcuggacua

SEQ ID NO: 2182725 - RNA, 19 nt, Homo sapiens
  misc_RNA (1)...(19): siRNA sense strand
ccauuucuccgucgauuaa

SEQ ID NO: 2182726 - RNA, 19 nt, Homo sapiens
  misc_RNA (1)...(19): siRNA sense strand
cuaguggacuggcuggaaa

SEQ ID NO: 2182727 - RNA, 19 nt, Homo sapiens
  misc_RNA (1)...(19): siRNA sense strand
gugaggugcuggacuacuu

SEQ ID NO: 2182728 - RNA, 19 nt, Homo sapiens
  misc_RNA (1)...(19): siRNA sense strand
gcacgguuccgaagacaug

SEQ ID NO: 2182729 - RNA, 19 nt, Homo sapiens
  misc_RNA (1)...(19): siRNA sense strand
ucaaguuggugaucuucaa

SEQ ID NO: 2182730 - RNA, 19 nt, Homo sapiens
  misc_RNA (1)...(19): siRNA sense strand
gaacaucauggacaagagu

SEQ ID NO: 2182731 - RNA, 19 nt, Homo sapiens
  misc_RNA (1)...(19): siRNA sense strand
gcacccaccucaacuucca

SEQ ID NO: 2182732 - RNA, 19 nt, Homo sapiens
  misc_RNA (1)...(19): siRNA sense strand
ugaaggugcuccugcagau

SEQ ID NO: 2182733 - RNA, 19 nt, Homo sapiens
  misc_RNA (1)...(19): siRNA sense strand
ucucuacccucuacuggaa

SEQ ID NO: 2182734 - RNA, 19 nt, Homo sapiens
  misc_RNA (1)...(19): siRNA sense strand
gcugcugacugcauucuuc

SEQ ID NO: 2182735 - RNA, 19 nt, Homo sapiens
  misc_RNA (1)...(19): siRNA sense strand
caucaugucccaccucuuc

SEQ ID NO: 2182736 - RNA, 19 nt, Homo sapiens
  misc_RNA (1)...(19): siRNA sense strand
cagagcagccggagaccua

SEQ ID NO: 2182737 - RNA, 19 nt, Homo sapiens
  misc_RNA (1)...(19): siRNA sense strand
gccaaacgguggaggaucu

SEQ ID NO: 2182738 - RNA, 19 nt, Homo sapiens
  misc_RNA (1)...(19): siRNA sense strand
ugcagaagcuggagaugug

SEQ ID NO: 2182739 - RNA, 19 nt, Homo sapiens
  misc_RNA (1)...(19): siRNA sense strand
guucauccauaaguacauu

SEQ ID NO: 2182740 - RNA, 19 nt, Homo sapiens
  misc_RNA (1)...(19): siRNA sense strand
ccucaccggucucaccaaa

SEQ ID NO: 2182741 - RNA, 19 nt, Homo sapiens
  misc_RNA (1)...(19): siRNA sense strand
ggcaagagccgggaacaga

SEQ ID NO: 2182742 - RNA, 19 nt, Homo sapiens
  misc_RNA (1)...(19): siRNA sense strand
agacauggacgucaucuca

SEQ ID NO: 2182743 - RNA, 19 nt, Homo sapiens
  misc_RNA (1)...(19): siRNA sense strand
cggagagcguggaggagua

SEQ ID NO: 2182744 - RNA, 19 nt, Homo sapiens
  misc_RNA (1)...(19): siRNA sense strand
ggacucauccaccgcuuca

SEQ ID NO: 2182745 - RNA, 19 nt, Homo sapiens
  misc_RNA (1)...(19): siRNA sense strand
gcccugaggauccugcaua

SEQ ID NO: 2182746 - RNA, 19 nt, Homo sapiens
  misc_RNA (1)...(19): siRNA sense strand
uccggaaccugccugagua

SEQ ID NO: 2182747 - RNA, 19 nt, Homo sapiens
  misc_RNA (1)...(19): siRNA sense strand
gcuccgaggugcccauuuu

SEQ ID NO: 2182748 - RNA, 19 nt, Homo sapiens
  misc_RNA (1)...(19): siRNA sense strand
ggacgccuccaucaacuuc

SEQ ID NO: 2182749 - RNA, 19 nt, Homo sapiens
  misc_RNA (1)...(19): siRNA sense strand
gcugaaaucccuccuugca

SEQ ID NO: 2182750 - RNA, 19 nt, Homo sapiens
  misc_RNA (1)...(19): siRNA sense strand
gcauguuccuccagauuuu

SEQ ID NO: 2182751 - RNA, 19 nt, Homo sapiens
  misc_RNA (1)...(19): siRNA sense strand
cagccgaaacccugacuuu

SEQ ID NO: 2182752 - RNA, 19 nt, Homo sapiens
  misc_RNA (1)...(19): siRNA sense strand
ggaagugcuccgcucauuc

SEQ ID NO: 2182753 - RNA, 19 nt, Homo sapiens
  misc_RNA (1)...(19): siRNA sense strand
cgcaguaccuggagaugga

SEQ ID NO: 2182754 - RNA, 19 nt, Homo sapiens
  misc_RNA (1)...(19): siRNA sense strand
ggcccgagaucuuugucaa

SEQ ID NO: 2182755 - RNA, 19 nt, Homo sapiens
  misc_RNA (1)...(19): siRNA sense strand
ggcauguuccuccagauuu

SEQ ID NO: 2182756 - RNA, 19 nt, Homo sapiens
  misc_RNA (1)...(19): siRNA sense strand
cagaggcacccaaaccaaa

SEQ ID NO: 2182757 - RNA, 19 nt, Homo sapiens
  misc_RNA (1)...(19): siRNA sense strand
cggcccagcucaugagugu

SEQ ID NO: 2182758 - RNA, 19 nt, Homo sapiens
  misc_RNA (1)...(19): siRNA sense strand
ccggagaccuacuacaagu

SEQ ID NO: 2182759 - RNA, 19 nt, Homo sapiens
  misc_RNA (1)...(19): siRNA sense strand
uggaagugcuccgcucauu

SEQ ID NO: 2182760 - RNA, 19 nt, Homo sapiens
  misc_RNA (1)...(19): siRNA sense strand
aagcagaccaucacugaga

SEQ ID NO: 2182761 - RNA, 19 nt, Homo sapiens
  misc_RNA (1)...(19): siRNA sense strand
ucaggccaaugaaucgaaa

SEQ ID NO: 2182762 - RNA, 19 nt, Homo sapiens
  misc_RNA (1)...(19): siRNA sense strand
ccaucuggcugccuucauc

SEQ ID NO: 2182763 - RNA, 19 nt, Homo sapiens
  misc_RNA (1)...(19): siRNA sense strand
ucauugcucugggcucaaa

SEQ ID NO: 2182764 - RNA, 19 nt, Homo sapiens
  misc_RNA (1)...(19): siRNA sense strand
ccaagguccuccucaacca

SEQ ID NO: 2182765 - RNA, 19 nt, Homo sapiens
  misc_RNA (1)...(19): siRNA sense strand
ugaggauccugcauaugga

SEQ ID NO: 2182766 - RNA, 19 nt, Homo sapiens
  misc_RNA (1)...(19): siRNA sense strand
ugagugacauagacgagau

SEQ ID NO: 2182767 - RNA, 19 nt, Homo sapiens
  misc_RNA (1)...(19): siRNA sense strand
gcacagaggcacccaaacc

SEQ ID NO: 2182768 - RNA, 19 nt, Homo sapiens
  misc_RNA (1)...(19): siRNA sense strand
guuugucgcuggugcuuuc

SEQ ID NO: 2182769 - RNA, 19 nt, Homo sapiens
  misc_RNA (1)...(19): siRNA sense strand
gggcaccaccaucaaguug

SEQ ID NO: 2182770 - RNA, 19 nt, Homo sapiens
  misc_RNA (1)...(19): siRNA sense strand
ucagcaagcucgccccuaa

SEQ ID NO: 2182771 - RNA, 19 nt, Homo sapiens
  misc_RNA (1)...(19): siRNA sense strand
gggcauguacggccagaug

SEQ ID NO: 2182772 - RNA, 19 nt, Homo sapiens
  misc_RNA (1)...(19): siRNA sense strand
ggucagcgucucccuguuc

SEQ ID NO: 2182773 - RNA, 19 nt, Homo sapiens
  misc_RNA (1)...(19): siRNA sense strand
caacagugaccuggugaug

SEQ ID NO: 2182774 - RNA, 19 nt, Homo sapiens
  misc_RNA (1)...(19): siRNA sense strand
ccaaguuccuggccauggu

SEQ ID NO: 2182775 - RNA, 19 nt, Homo sapiens
  misc_RNA (1)...(19): siRNA sense strand
ugcaguucauccauaagua

SEQ ID NO: 2182776 - RNA, 19 nt, Homo sapiens
  misc_RNA (1)...(19): siRNA sense strand
gggcacagcucaggaugcu

SEQ ID NO: 2182777 - RNA, 19 nt, Homo sapiens
  misc_RNA (1)...(19): siRNA sense strand
ucuccucgcucuuccugaa

SEQ ID NO: 2182778 - RNA, 19 nt, Homo sapiens
  misc_RNA (1)...(19): siRNA sense strand
cggcaucgccugggacaaa

SEQ ID NO: 2182779 - RNA, 19 nt, Homo sapiens
  misc_RNA (1)...(19): siRNA sense strand
cagcacagaggcacccaaa

SEQ ID NO: 2182780 - RNA, 19 nt, Homo sapiens
  misc_RNA (1)...(19): siRNA sense strand
gagagugaccgcaacuucu

SEQ ID NO: 2182781 - RNA, 19 nt, Homo sapiens
  misc_RNA (1)...(19): siRNA sense strand
gaagugcuccgcucauucc

SEQ ID NO: 2182782 - RNA, 19 nt, Homo sapiens
  misc_RNA (1)...(19): siRNA sense strand
caagaucaagcccaacauc

SEQ ID NO: 2182783 - RNA, 19 nt, Homo sapiens
  misc_RNA (1)...(19): siRNA sense strand
gaaguccucccgccaucug

SEQ ID NO: 2182784 - RNA, 19 nt, Homo sapiens
  misc_RNA (1)...(19): siRNA sense strand
ugucccaccucuucucgaa

SEQ ID NO: 2182785 - RNA, 19 nt, Homo sapiens
  misc_RNA (1)...(19): siRNA sense strand
cgugcacccugacggauga

SEQ ID NO: 2182786 - RNA, 19 nt, Homo sapiens
  misc_RNA (1)...(19): siRNA sense strand
acaugcagguccucuauac

SEQ ID NO: 2182787 - RNA, 19 nt, Homo sapiens
  misc_RNA (1)...(19): siRNA sense strand
ccaacaucuucgccacuga

SEQ ID NO: 2182788 - RNA, 19 nt, Homo sapiens
  misc_RNA (1)...(19): siRNA sense strand
ucgacaacgucuccaggaa

SEQ ID NO: 2182789 - RNA, 19 nt, Homo sapiens
  misc_RNA (1)...(19): siRNA sense strand
uuugugcaguucauccaua

SEQ ID NO: 2182790 - RNA, 19 nt, Homo sapiens
  misc_RNA (1)...(19): siRNA sense strand
gugcugagcgcucuguugu

SEQ ID NO: 2182791 - RNA, 19 nt, Homo sapiens
  misc_RNA (1)...(19): siRNA sense strand
gcagcaggcaauccacaug

SEQ ID NO: 2182792 - RNA, 19 nt, Homo sapiens
  misc_RNA (1)...(19): siRNA sense strand
ggugcuggacuacuucuug

SEQ ID NO: 2182793 - RNA, 19 nt, Homo sapiens
  misc_RNA (1)...(19): siRNA sense strand
ccgaagacauggacgucau

SEQ ID NO: 2182794 - RNA, 19 nt, Homo sapiens
  misc_RNA (1)...(19): siRNA sense strand
ucauugaggcucuguguag

SEQ ID NO: 2182795 - RNA, 19 nt, Homo sapiens
  misc_RNA (1)...(19): siRNA sense strand
gcaguucauccauaaguac

SEQ ID NO: 2182796 - RNA, 19 nt, Homo sapiens
  misc_RNA (1)...(19): siRNA sense strand
uccgccugcugcugaauua

SEQ ID NO: 2182797 - RNA, 19 nt, Homo sapiens
  misc_RNA (1)...(19): siRNA sense strand
ugcuacgguuugcagauua

SEQ ID NO: 2182798 - RNA, 19 nt, Homo sapiens
  misc_RNA (1)...(19): siRNA sense strand
ugaccaacaacuacuccua

SEQ ID NO: 2182799 - RNA, 19 nt, Homo sapiens
  misc_RNA (1)...(19): siRNA sense strand
ggucgucgccgcauucaac

SEQ ID NO: 2182800 - RNA, 19 nt, Homo sapiens
  misc_RNA (1)...(19): siRNA sense strand
cgagagugaccgcaacuuc

SEQ ID NO: 2182801 - RNA, 19 nt, Homo sapiens
  misc_RNA (1)...(19): siRNA sense strand
caacuggccacccgagagu

SEQ ID NO: 2182802 - RNA, 19 nt, Homo sapiens
  misc_RNA (1)...(19): siRNA sense strand
agaccaagcacgagaucaa

SEQ ID NO: 2182803 - RNA, 19 nt, Homo sapiens
  misc_RNA (1)...(19): siRNA sense strand
gcccggaacccgaacaaca

SEQ ID NO: 2182804 - RNA, 19 nt, Homo sapiens
  misc_RNA (1)...(19): siRNA sense strand
acagugaccuggugaugcu

SEQ ID NO: 2182805 - RNA, 19 nt, Homo sapiens
  misc_RNA (1)...(19): siRNA sense strand
ugcuggagguucugaguga

SEQ ID NO: 2182806 - RNA, 19 nt, Homo sapiens
  misc_RNA (1)...(19): siRNA sense strand
ugaggaagcugcagcaugu

SEQ ID NO: 2182807 - RNA, 19 nt, Homo sapiens
  misc_RNA (1)...(19): siRNA sense strand
ggaagcacaucuaccuaca

SEQ ID NO: 2182808 - RNA, 19 nt, Homo sapiens
  misc_RNA (1)...(19): siRNA sense strand
caugaggccuggagcuuca

SEQ ID NO: 2182809 - RNA, 19 nt, Homo sapiens
  misc_RNA (1)...(19): siRNA sense strand
gccuggagcuucaccuuca

SEQ ID NO: 2182810 - RNA, 19 nt, Homo sapiens
  misc_RNA (1)...(19): siRNA sense strand
gcacagaggccuucuuccu

SEQ ID NO: 2182811 - RNA, 19 nt, Homo sapiens
  misc_RNA (1)...(19): siRNA sense strand
gaagcugagugcccgaaaa

SEQ ID NO: 2182812 - RNA, 19 nt, Homo sapiens
  misc_RNA (1)...(19): siRNA sense strand
ggcauccuguccuucuuga

SEQ ID NO: 2182813 - RNA, 19 nt, Homo sapiens
  misc_RNA (1)...(19): siRNA sense strand
gugcugggccucacacugu

SEQ ID NO: 2182814 - RNA, 19 nt, Homo sapiens
  misc_RNA (1)...(19): siRNA sense strand
ggcuccagcuccacacaga

SEQ ID NO: 2182815 - RNA, 19 nt, Homo sapiens
  misc_RNA (1)...(19): siRNA sense strand
cagaggaagggcugagcua

SEQ ID NO: 2182816 - RNA, 19 nt, Homo sapiens
  misc_RNA (1)...(19): siRNA sense strand
ucaggcucaucgagaggua

SEQ ID NO: 2182817 - RNA, 19 nt, Homo sapiens
  misc_RNA (1)...(19): siRNA sense strand
cagcauguccuggguuuca

SEQ ID NO: 2182818 - RNA, 19 nt, Homo sapiens
  misc_RNA (1)...(19): siRNA sense strand
gggcaugugcugugagagu

SEQ ID NO: 2182819 - RNA, 19 nt, Homo sapiens
  misc_RNA (1)...(19): siRNA sense strand
ggaagcugagugcccgaaa

SEQ ID NO: 2182820 - RNA, 19 nt, Homo sapiens
  misc_RNA (1)...(19): siRNA sense strand
ccgaggacuuccagaccuu

SEQ ID NO: 2182821 - RNA, 19 nt, Homo sapiens
  misc_RNA (1)...(19): siRNA sense strand
ugcagcauguccuggguuu

SEQ ID NO: 2182822 - RNA, 19 nt, Homo sapiens
  misc_RNA (1)...(19): siRNA sense strand
cacacugucugaccuguac

SEQ ID NO: 2182823 - RNA, 19 nt, Homo sapiens
  misc_RNA (1)...(19): siRNA sense strand
cagacggcauccuguccuu

SEQ ID NO: 2182824 - RNA, 19 nt, Homo sapiens
  misc_RNA (1)...(19): siRNA sense strand
gcaugugcugugagaguga

SEQ ID NO: 2182825 - RNA, 19 nt, Homo sapiens
  misc_RNA (1)...(19): siRNA sense strand
ucacacugucugaccugua

SEQ ID NO: 2182826 - RNA, 19 nt, Homo sapiens
  misc_RNA (1)...(19): siRNA sense strand
ugaggaagcugcagcaugu

SEQ ID NO: 2182827 - RNA, 19 nt, Homo sapiens
  misc_RNA (1)...(19): siRNA sense strand
ggaagcacaucuaccuaca

SEQ ID NO: 2182828 - RNA, 19 nt, Homo sapiens
  misc_RNA (1)...(19): siRNA sense strand
caugaggccuggagcuuca

SEQ ID NO: 2182829 - RNA, 19 nt, Homo sapiens
  misc_RNA (1)...(19): siRNA sense strand
gccuggagcuucaccuuca

SEQ ID NO: 2182830 - RNA, 19 nt, Homo sapiens
  misc_RNA (1)...(19): siRNA sense strand
gcacagaggccuucuuccu

SEQ ID NO: 2182831 - RNA, 19 nt, Homo sapiens
  misc_RNA (1)...(19): siRNA sense strand
gaagcugagugcccgaaaa

SEQ ID NO: 2182832 - RNA, 19 nt, Homo sapiens
  misc_RNA (1)...(19): siRNA sense strand
ggcauccuguccuucuuga

SEQ ID NO: 2182833 - RNA, 19 nt, Homo sapiens
  misc_RNA (1)...(19): siRNA sense strand
gugcugggccucacacugu

SEQ ID NO: 2182834 - RNA, 19 nt, Homo sapiens
  misc_RNA (1)...(19): siRNA sense strand
ggcuccagcuccacacaga

SEQ ID NO: 2182835 - RNA, 19 nt, Homo sapiens
  misc_RNA (1)...(19): siRNA sense strand
cagaggaagggcugagcua

SEQ ID NO: 2182836 - RNA, 19 nt, Homo sapiens
  misc_RNA (1)...(19): siRNA sense strand
ucaggcucaucgagaggua

SEQ ID NO: 2182837 - RNA, 19 nt, Homo sapiens
  misc_RNA (1)...(19): siRNA sense strand
cagcauguccuggguuuca

SEQ ID NO: 2182838 - RNA, 19 nt, Homo sapiens
  misc_RNA (1)...(19): siRNA sense strand
gggcaugugcugugagagu

SEQ ID NO: 2182839 - RNA, 19 nt, Homo sapiens
  misc_RNA (1)...(19): siRNA sense strand
ggaagcugagugcccgaaa

SEQ ID NO: 2182840 - RNA, 19 nt, Homo sapiens
  misc_RNA (1)...(19): siRNA sense strand
ccgaggacuuccagaccuu

SEQ ID NO: 2182841 - RNA, 19 nt, Homo sapiens
  misc_RNA (1)...(19): siRNA sense strand
ugcagcauguccuggguuu

SEQ ID NO: 2182842 - RNA, 19 nt, Homo sapiens
  misc_RNA (1)...(19): siRNA sense strand
cacacugucugaccuguac

SEQ ID NO: 2182843 - RNA, 19 nt, Homo sapiens
  misc_RNA (1)...(19): siRNA sense strand
cagacggcauccuguccuu

SEQ ID NO: 2182844 - RNA, 19 nt, Homo sapiens
  misc_RNA (1)...(19): siRNA sense strand
gcaugugcugugagaguga

SEQ ID NO: 2182845 - RNA, 19 nt, Homo sapiens
  misc_RNA (1)...(19): siRNA sense strand
ucacacugucugaccugua

SEQ ID NO: 2182846 - RNA, 19 nt, Homo sapiens
  misc_RNA (1)...(19): siRNA sense strand
gcagguacuugacuccuua

SEQ ID NO: 2182847 - RNA, 19 nt, Homo sapiens
  misc_RNA (1)...(19): siRNA sense strand
gaagaaagacuuggaguug

SEQ ID NO: 2182848 - RNA, 19 nt, Homo sapiens
  misc_RNA (1)...(19): siRNA sense strand
ucagucagcuaaagauuaa

SEQ ID NO: 2182849 - RNA, 19 nt, Homo sapiens
  misc_RNA (1)...(19): siRNA sense strand
gcaagucucugcugacauc

SEQ ID NO: 2182850 - RNA, 19 nt, Homo sapiens
  misc_RNA (1)...(19): siRNA sense strand
cagagaagguaaacacaaa

SEQ ID NO: 2182851 - RNA, 19 nt, Homo sapiens
  misc_RNA (1)...(19): siRNA sense strand
gggcggagauggaagagaa

SEQ ID NO: 2182852 - RNA, 19 nt, Homo sapiens
  misc_RNA (1)...(19): siRNA sense strand
gggaagagcggccacagua

SEQ ID NO: 2182853 - RNA, 19 nt, Homo sapiens
  misc_RNA (1)...(19): siRNA sense strand
gaaccagacuugggaugaa

SEQ ID NO: 2182854 - RNA, 19 nt, Homo sapiens
  misc_RNA (1)...(19): siRNA sense strand
gcacagaguucgaguacac

SEQ ID NO: 2182855 - RNA, 19 nt, Homo sapiens
  misc_RNA (1)...(19): siRNA sense strand
gaagugagcagcuacucuu

SEQ ID NO: 2182856 - RNA, 19 nt, Homo sapiens
  misc_RNA (1)...(19): siRNA sense strand
ggcaagcucugaccaguuc

SEQ ID NO: 2182857 - RNA, 19 nt, Homo sapiens
  misc_RNA (1)...(19): siRNA sense strand
ugcagagccuuauaaagua

SEQ ID NO: 2182858 - RNA, 19 nt, Homo sapiens
  misc_RNA (1)...(19): siRNA sense strand
gccaagagccgacccaaga

SEQ ID NO: 2182859 - RNA, 19 nt, Homo sapiens
  misc_RNA (1)...(19): siRNA sense strand
aggagaagcugcucagaga

SEQ ID NO: 2182860 - RNA, 19 nt, Homo sapiens
  misc_RNA (1)...(19): siRNA sense strand
gagcggauguaugccauga

SEQ ID NO: 2182861 - RNA, 19 nt, Homo sapiens
  misc_RNA (1)...(19): siRNA sense strand
ggacucagaggaagacgaa

SEQ ID NO: 2182862 - RNA, 19 nt, Homo sapiens
  misc_RNA (1)...(19): siRNA sense strand
ggaaucguuugaccaagau

SEQ ID NO: 2182863 - RNA, 19 nt, Homo sapiens
  misc_RNA (1)...(19): siRNA sense strand
ggaggaaucguuugaccaa

SEQ ID NO: 2182864 - RNA, 19 nt, Homo sapiens
  misc_RNA (1)...(19): siRNA sense strand
agaauguggucgagaagaa

SEQ ID NO: 2182865 - RNA, 19 nt, Homo sapiens
  misc_RNA (1)...(19): siRNA sense strand
gagcugaagcccaacaaga

SEQ ID NO: 2182866 - RNA, 19 nt, Homo sapiens
  misc_RNA (1)...(19): siRNA sense strand
agaaagacuuggaguugga

SEQ ID NO: 2182867 - RNA, 19 nt, Homo sapiens
  misc_RNA (1)...(19): siRNA sense strand
gaagaagaagaaagggaaa

SEQ ID NO: 2182868 - RNA, 19 nt, Homo sapiens
  misc_RNA (1)...(19): siRNA sense strand
gagcagcuacucuuacaau

SEQ ID NO: 2182869 - RNA, 19 nt, Homo sapiens
  misc_RNA (1)...(19): siRNA sense strand
ggucugaggaggaacauga

SEQ ID NO: 2182870 - RNA, 19 nt, Homo sapiens
  misc_RNA (1)...(19): siRNA sense strand
gagaagcugcucagagaga

SEQ ID NO: 2182871 - RNA, 19 nt, Homo sapiens
  misc_RNA (1)...(19): siRNA sense strand
cauccuaccuccaccugaa

SEQ ID NO: 2182872 - RNA, 19 nt, Homo sapiens
  misc_RNA (1)...(19): siRNA sense strand
gagaggaggagccaagaga

SEQ ID NO: 2182873 - RNA, 19 nt, Homo sapiens
  misc_RNA (1)...(19): siRNA sense strand
ucaccaagcaggacaaguu

SEQ ID NO: 2182874 - RNA, 19 nt, Homo sapiens
  misc_RNA (1)...(19): siRNA sense strand
gcccugagcauaaauggaa

SEQ ID NO: 2182875 - RNA, 19 nt, Homo sapiens
  misc_RNA (1)...(19): siRNA sense strand
guagcaugguggcaaagaa

SEQ ID NO: 2182876 - RNA, 19 nt, Homo sapiens
  misc_RNA (1)...(19): siRNA sense strand
ccgagaauguggucgagaa

SEQ ID NO: 2182877 - RNA, 19 nt, Homo sapiens
  misc_RNA (1)...(19): siRNA sense strand
gcagagccuuauaaaguac

SEQ ID NO: 2182878 - RNA, 19 nt, Homo sapiens
  misc_RNA (1)...(19): siRNA sense strand
gagcagaugaggacugugu

SEQ ID NO: 2182879 - RNA, 19 nt, Homo sapiens
  misc_RNA (1)...(19): siRNA sense strand
gagcagggauaagaaagag

SEQ ID NO: 2182880 - RNA, 19 nt, Homo sapiens
  misc_RNA (1)...(19): siRNA sense strand
agaggaagacgaagaauuc

SEQ ID NO: 2182881 - RNA, 19 nt, Homo sapiens
  misc_RNA (1)...(19): siRNA sense strand
gugagcagcuacucuuaca

SEQ ID NO: 2182882 - RNA, 19 nt, Homo sapiens
  misc_RNA (1)...(19): siRNA sense strand
ggaaccagacuugggauga

SEQ ID NO: 2182883 - RNA, 19 nt, Homo sapiens
  misc_RNA (1)...(19): siRNA sense strand
ggagcagggauaagaaaga

SEQ ID NO: 2182884 - RNA, 19 nt, Homo sapiens
  misc_RNA (1)...(19): siRNA sense strand
gaaauccuccagagaaggu

SEQ ID NO: 2182885 - RNA, 19 nt, Homo sapiens
  misc_RNA (1)...(19): siRNA sense strand
gcggauguaugccaugaag

SEQ ID NO: 2182886 - RNA, 19 nt, Homo sapiens
  misc_RNA (1)...(19): siRNA sense strand
ccacagacgaggacucuuc

SEQ ID NO: 2182887 - RNA, 19 nt, Homo sapiens
  misc_RNA (1)...(19): siRNA sense strand
gaaggaggagcggauguau

SEQ ID NO: 2182888 - RNA, 19 nt, Homo sapiens
  misc_RNA (1)...(19): siRNA sense strand
gaauguggucgagaagaaa

SEQ ID NO: 2182889 - RNA, 19 nt, Homo sapiens
  misc_RNA (1)...(19): siRNA sense strand
cagcgacucuucggaggaa

SEQ ID NO: 2182890 - RNA, 19 nt, Homo sapiens
  misc_RNA (1)...(19): siRNA sense strand
cagcuaaagauuaagaaga

SEQ ID NO: 2182891 - RNA, 19 nt, Homo sapiens
  misc_RNA (1)...(19): siRNA sense strand
gauaagaaagagacacaag

SEQ ID NO: 2182892 - RNA, 19 nt, Homo sapiens
  misc_RNA (1)...(19): siRNA sense strand
ggaccgggaucaggagaag

SEQ ID NO: 2182893 - RNA, 19 nt, Homo sapiens
  misc_RNA (1)...(19): siRNA sense strand
aggaaucguuugaccaaga

SEQ ID NO: 2182894 - RNA, 19 nt, Homo sapiens
  misc_RNA (1)...(19): siRNA sense strand
cagaggaagacgaagaauu

SEQ ID NO: 2182895 - RNA, 19 nt, Homo sapiens
  misc_RNA (1)...(19): siRNA sense strand
ccaagcaggacaaguugaa

SEQ ID NO: 2182896 - RNA, 19 nt, Homo sapiens
  misc_RNA (1)...(19): siRNA sense strand
gagcugggagcagggauaa

SEQ ID NO: 2182897 - RNA, 19 nt, Homo sapiens
  misc_RNA (1)...(19): siRNA sense strand
ggauguaugccaugaaguc

SEQ ID NO: 2182898 - RNA, 19 nt, Homo sapiens
  misc_RNA (1)...(19): siRNA sense strand
ccgagagccuugucuugga

SEQ ID NO: 2182899 - RNA, 19 nt, Homo sapiens
  misc_RNA (1)...(19): siRNA sense strand
gaggaggagccaagagaug

SEQ ID NO: 2182900 - RNA, 19 nt, Homo sapiens
  misc_RNA (1)...(19): siRNA sense strand
ccagagaagguaaacacaa

SEQ ID NO: 2182901 - RNA, 19 nt, Homo sapiens
  misc_RNA (1)...(19): siRNA sense strand
gccaugcagagccuuauaa

SEQ ID NO: 2182902 - RNA, 19 nt, Homo sapiens
  misc_RNA (1)...(19): siRNA sense strand
gcaggaagcagccguuuug

SEQ ID NO: 2182903 - RNA, 19 nt, Homo sapiens
  misc_RNA (1)...(19): siRNA sense strand
caauacggacucagaggaa

SEQ ID NO: 2182904 - RNA, 19 nt, Homo sapiens
  misc_RNA (1)...(19): siRNA sense strand
agacuugggaugaacauga

SEQ ID NO: 2182905 - RNA, 19 nt, Homo sapiens
  misc_RNA (1)...(19): siRNA sense strand
augcagagccuuauaaagu

SEQ ID NO: 2182906 - RNA, 19 nt, Homo sapiens
  misc_RNA (1)...(19): siRNA sense strand
cgagagcgccaaagcuuuc

SEQ ID NO: 2182907 - RNA, 19 nt, Homo sapiens
  misc_RNA (1)...(19): siRNA sense strand
cagcuacucuuacaauacg

SEQ ID NO: 2182908 - RNA, 19 nt, Homo sapiens
  misc_RNA (1)...(19): siRNA sense strand
gcagcuacucuuacaauac

SEQ ID NO: 2182909 - RNA, 19 nt, Homo sapiens
  misc_RNA (1)...(19): siRNA sense strand
gcugggagcagggauaaga

SEQ ID NO: 2182910 - RNA, 19 nt, Homo sapiens
  misc_RNA (1)...(19): siRNA sense strand
gagcccaggccuuggagaa

SEQ ID NO: 2182911 - RNA, 19 nt, Homo sapiens
  misc_RNA (1)...(19): siRNA sense strand
ccuaccagcugugcuccua

SEQ ID NO: 2182912 - RNA, 19 nt, Homo sapiens
  misc_RNA (1)...(19): siRNA sense strand
ccucggaagugagcagcua

SEQ ID NO: 2182913 - RNA, 19 nt, Homo sapiens
  misc_RNA (1)...(19): siRNA sense strand
ggcagguacuugacuccuu

SEQ ID NO: 2182914 - RNA, 19 nt, Homo sapiens
  misc_RNA (1)...(19): siRNA sense strand
ggaagagcggccacaguag

SEQ ID NO: 2182915 - RNA, 19 nt, Homo sapiens
  misc_RNA (1)...(19): siRNA sense strand
aggccaaggucauccagaa

SEQ ID NO: 2182916 - RNA, 19 nt, Homo sapiens
  misc_RNA (1)...(19): siRNA sense strand
gaucaccuuccucacuuug

SEQ ID NO: 2182917 - RNA, 19 nt, Homo sapiens
  misc_RNA (1)...(19): siRNA sense strand
ccaagagccgacccaagaa

SEQ ID NO: 2182918 - RNA, 19 nt, Homo sapiens
  misc_RNA (1)...(19): siRNA sense strand
ugaagcccaacaagaagua

SEQ ID NO: 2182919 - RNA, 19 nt, Homo sapiens
  misc_RNA (1)...(19): siRNA sense strand
agaagaaagacuuggaguu

SEQ ID NO: 2182920 - RNA, 19 nt, Homo sapiens
  misc_RNA (1)...(19): siRNA sense strand
ggaaggaccccaggaagaa

SEQ ID NO: 2182921 - RNA, 19 nt, Homo sapiens
  misc_RNA (1)...(19): siRNA sense strand
gaagaagaaagggaaagag

SEQ ID NO: 2182922 - RNA, 19 nt, Homo sapiens
  misc_RNA (1)...(19): siRNA sense strand
gagaauguggucgagaaga

SEQ ID NO: 2182923 - RNA, 19 nt, Homo sapiens
  misc_RNA (1)...(19): siRNA sense strand
ccaccaaggccaccaagca

SEQ ID NO: 2182924 - RNA, 19 nt, Homo sapiens
  misc_RNA (1)...(19): siRNA sense strand
ccaugcagagccuuauaaa

SEQ ID NO: 2182925 - RNA, 19 nt, Homo sapiens
  misc_RNA (1)...(19): siRNA sense strand
ccaggaagaagaagaaagg

SEQ ID NO: 2182926 - RNA, 19 nt, Homo sapiens
  misc_RNA (1)...(19): siRNA sense strand
gggauaagaaagagacaca

SEQ ID NO: 2182927 - RNA, 19 nt, Homo sapiens
  misc_RNA (1)...(19): siRNA sense strand
ggcaucacccugcuaagug

SEQ ID NO: 2182928 - RNA, 19 nt, Homo sapiens
  misc_RNA (1)...(19): siRNA sense strand
aggcagagguggaggacau

SEQ ID NO: 2182929 - RNA, 19 nt, Homo sapiens
  misc_RNA (1)...(19): siRNA sense strand
ccugguggcuguggcaaga

SEQ ID NO: 2182930 - RNA, 19 nt, Homo sapiens
  misc_RNA (1)...(19): siRNA sense strand
ugaucaccuuccucacuuu

SEQ ID NO: 2182931 - RNA, 19 nt, Homo sapiens
  misc_RNA (1)...(19): siRNA sense strand
cccgucagccuaccaguuu

SEQ ID NO: 2182932 - RNA, 19 nt, Homo sapiens
  misc_RNA (1)...(19): siRNA sense strand
gaccaggagcgcucucugu

SEQ ID NO: 2182933 - RNA, 19 nt, Homo sapiens
  misc_RNA (1)...(19): siRNA sense strand
ggccaugcagagccuuaua

SEQ ID NO: 2182934 - RNA, 19 nt, Homo sapiens
  misc_RNA (1)...(19): siRNA sense strand
gggcacagaguucgaguac

SEQ ID NO: 2182935 - RNA, 19 nt, Homo sapiens
  misc_RNA (1)...(19): siRNA sense strand
ggaagcagccguuuugucu

SEQ ID NO: 2182936 - RNA, 19 nt, Homo sapiens
  misc_RNA (1)...(19): siRNA sense strand
cgccuucccuccuguguag

SEQ ID NO: 2182937 - RNA, 19 nt, Homo sapiens
  misc_RNA (1)...(19): siRNA sense strand
agacgaagaauuccugaag

SEQ ID NO: 2182938 - RNA, 19 nt, Homo sapiens
  misc_RNA (1)...(19): siRNA sense strand
agcagcuacucuuacaaua

SEQ ID NO: 2182939 - RNA, 19 nt, Homo sapiens
  misc_RNA (1)...(19): siRNA sense strand
ggaagugagcagcuacucu

SEQ ID NO: 2182940 - RNA, 19 nt, Homo sapiens
  misc_RNA (1)...(19): siRNA sense strand
gcuaaagauuaagaagaag

SEQ ID NO: 2182941 - RNA, 19 nt, Homo sapiens
  misc_RNA (1)...(19): siRNA sense strand
caucagucagcuaaagauu

SEQ ID NO: 2182942 - RNA, 19 nt, Homo sapiens
  misc_RNA (1)...(19): siRNA sense strand
agaaggaggagcggaugua

SEQ ID NO: 2182943 - RNA, 19 nt, Homo sapiens
  misc_RNA (1)...(19): siRNA sense strand
ggagguuugggcaccauga

SEQ ID NO: 2182944 - RNA, 19 nt, Homo sapiens
  misc_RNA (1)...(19): siRNA sense strand
cauggcaucacccugcuaa

SEQ ID NO: 2182945 - RNA, 19 nt, Homo sapiens
  misc_RNA (1)...(19): siRNA sense strand
gugcaaaggacaggaagga

SEQ ID NO: 2182946 - RNA, 19 nt, Homo sapiens
  misc_RNA (1)...(19): siRNA sense strand
gcagguacuugacuccuua

SEQ ID NO: 2182947 - RNA, 19 nt, Homo sapiens
  misc_RNA (1)...(19): siRNA sense strand
gaagaaagacuuggaguug

SEQ ID NO: 2182948 - RNA, 19 nt, Homo sapiens
  misc_RNA (1)...(19): siRNA sense strand
ucagucagcuaaagauuaa

SEQ ID NO: 2182949 - RNA, 19 nt, Homo sapiens
  misc_RNA (1)...(19): siRNA sense strand
gcaagucucugcugacauc

SEQ ID NO: 2182950 - RNA, 19 nt, Homo sapiens
  misc_RNA (1)...(19): siRNA sense strand
cagagaagguaaacacaaa

SEQ ID NO: 2182951 - RNA, 19 nt, Homo sapiens
  misc_RNA (1)...(19): siRNA sense strand
gggcggagauggaagagaa

SEQ ID NO: 2182952 - RNA, 19 nt, Homo sapiens
  misc_RNA (1)...(19): siRNA sense strand
gggaagagcggccacagua

SEQ ID NO: 2182953 - RNA, 19 nt, Homo sapiens
  misc_RNA (1)...(19): siRNA sense strand
gaaccagacuugggaugaa

SEQ ID NO: 2182954 - RNA, 19 nt, Homo sapiens
  misc_RNA (1)...(19): siRNA sense strand
gcacagaguucgaguacac

SEQ ID NO: 2182955 - RNA, 19 nt, Homo sapiens
  misc_RNA (1)...(19): siRNA sense strand
gaagugagcagcuacucuu

SEQ ID NO: 2182956 - RNA, 19 nt, Homo sapiens
  misc_RNA (1)...(19): siRNA sense strand
ggcaagcucugaccaguuc

SEQ ID NO: 2182957 - RNA, 19 nt, Homo sapiens
  misc_RNA (1)...(19): siRNA sense strand
ugcagagccuuauaaagua

SEQ ID NO: 2182958 - RNA, 19 nt, Homo sapiens
  misc_RNA (1)...(19): siRNA sense strand
gccaagagccgacccaaga

SEQ ID NO: 2182959 - RNA, 19 nt, Homo sapiens
  misc_RNA (1)...(19): siRNA sense strand
aggagaagcugcucagaga

SEQ ID NO: 2182960 - RNA, 19 nt, Homo sapiens
  misc_RNA (1)...(19): siRNA sense strand
gagcggauguaugccauga

SEQ ID NO: 2182961 - RNA, 19 nt, Homo sapiens
  misc_RNA (1)...(19): siRNA sense strand
ggacucagaggaagacgaa

SEQ ID NO: 2182962 - RNA, 19 nt, Homo sapiens
  misc_RNA (1)...(19): siRNA sense strand
ggaaucguuugaccaagau

SEQ ID NO: 2182963 - RNA, 19 nt, Homo sapiens
  misc_RNA (1)...(19): siRNA sense strand
ggaggaaucguuugaccaa

SEQ ID NO: 2182964 - RNA, 19 nt, Homo sapiens
  misc_RNA (1)...(19): siRNA sense strand
agaauguggucgagaagaa

SEQ ID NO: 2182965 - RNA, 19 nt, Homo sapiens
  misc_RNA (1)...(19): siRNA sense strand
gagcugaagcccaacaaga

SEQ ID NO: 2182966 - RNA, 19 nt, Homo sapiens
  misc_RNA (1)...(19): siRNA sense strand
agaaagacuuggaguugga

SEQ ID NO: 2182967 - RNA, 19 nt, Homo sapiens
  misc_RNA (1)...(19): siRNA sense strand
gaagaagaagaaagggaaa

SEQ ID NO: 2182968 - RNA, 19 nt, Homo sapiens
  misc_RNA (1)...(19): siRNA sense strand
gagcagcuacucuuacaau

SEQ ID NO: 2182969 - RNA, 19 nt, Homo sapiens
  misc_RNA (1)...(19): siRNA sense strand
ggucugaggaggaacauga

SEQ ID NO: 2182970 - RNA, 19 nt, Homo sapiens
  misc_RNA (1)...(19): siRNA sense strand
gagaagcugcucagagaga

SEQ ID NO: 2182971 - RNA, 19 nt, Homo sapiens
  misc_RNA (1)...(19): siRNA sense strand
cauccuaccuccaccugaa

SEQ ID NO: 2182972 - RNA, 19 nt, Homo sapiens
  misc_RNA (1)...(19): siRNA sense strand
gagaggaggagccaagaga

SEQ ID NO: 2182973 - RNA, 19 nt, Homo sapiens
  misc_RNA (1)...(19): siRNA sense strand
ucaccaagcaggacaaguu

SEQ ID NO: 2182974 - RNA, 19 nt, Homo sapiens
  misc_RNA (1)...(19): siRNA sense strand
gcccugagcauaaauggaa

SEQ ID NO: 2182975 - RNA, 19 nt, Homo sapiens
  misc_RNA (1)...(19): siRNA sense strand
guagcaugguggcaaagaa

SEQ ID NO: 2182976 - RNA, 19 nt, Homo sapiens
  misc_RNA (1)...(19): siRNA sense strand
ccgagaauguggucgagaa

SEQ ID NO: 2182977 - RNA, 19 nt, Homo sapiens
  misc_RNA (1)...(19): siRNA sense strand
gcagagccuuauaaaguac

SEQ ID NO: 2182978 - RNA, 19 nt, Homo sapiens
  misc_RNA (1)...(19): siRNA sense strand
gagcagaugaggacugugu

SEQ ID NO: 2182979 - RNA, 19 nt, Homo sapiens
  misc_RNA (1)...(19): siRNA sense strand
gagcagggauaagaaagag

SEQ ID NO: 2182980 - RNA, 19 nt, Homo sapiens
  misc_RNA (1)...(19): siRNA sense strand
agaggaagacgaagaauuc

SEQ ID NO: 2182981 - RNA, 19 nt, Homo sapiens
  misc_RNA (1)...(19): siRNA sense strand
gugagcagcuacucuuaca

SEQ ID NO: 2182982 - RNA, 19 nt, Homo sapiens
  misc_RNA (1)...(19): siRNA sense strand
ggaaccagacuugggauga

SEQ ID NO: 2182983 - RNA, 19 nt, Homo sapiens
  misc_RNA (1)...(19): siRNA sense strand
ggagcagggauaagaaaga

SEQ ID NO: 2182984 - RNA, 19 nt, Homo sapiens
  misc_RNA (1)...(19): siRNA sense strand
gaaauccuccagagaaggu

SEQ ID NO: 2182985 - RNA, 19 nt, Homo sapiens
  misc_RNA (1)...(19): siRNA sense strand
gcggauguaugccaugaag

SEQ ID NO: 2182986 - RNA, 19 nt, Homo sapiens
  misc_RNA (1)...(19): siRNA sense strand
ccacagacgaggacucuuc

SEQ ID NO: 2182987 - RNA, 19 nt, Homo sapiens
  misc_RNA (1)...(19): siRNA sense strand
gaaggaggagcggauguau

SEQ ID NO: 2182988 - RNA, 19 nt, Homo sapiens
  misc_RNA (1)...(19): siRNA sense strand
gaauguggucgagaagaaa

SEQ ID NO: 2182989 - RNA, 19 nt, Homo sapiens
  misc_RNA (1)...(19): siRNA sense strand
cagcgacucuucggaggaa

SEQ ID NO: 2182990 - RNA, 19 nt, Homo sapiens
  misc_RNA (1)...(19): siRNA sense strand
cagcuaaagauuaagaaga

SEQ ID NO: 2182991 - RNA, 19 nt, Homo sapiens
  misc_RNA (1)...(19): siRNA sense strand
gauaagaaagagacacaag

SEQ ID NO: 2182992 - RNA, 19 nt, Homo sapiens
  misc_RNA (1)...(19): siRNA sense strand
ggaccgggaucaggagaag

SEQ ID NO: 2182993 - RNA, 19 nt, Homo sapiens
  misc_RNA (1)...(19): siRNA sense strand
aggaaucguuugaccaaga

SEQ ID NO: 2182994 - RNA, 19 nt, Homo sapiens
  misc_RNA (1)...(19): siRNA sense strand
cagaggaagacgaagaauu

SEQ ID NO: 2182995 - RNA, 19 nt, Homo sapiens
  misc_RNA (1)...(19): siRNA sense strand
ccaagcaggacaaguugaa

SEQ ID NO: 2182996 - RNA, 19 nt, Homo sapiens
  misc_RNA (1)...(19): siRNA sense strand
gagcugggagcagggauaa

SEQ ID NO: 2182997 - RNA, 19 nt, Homo sapiens
  misc_RNA (1)...(19): siRNA sense strand
ggauguaugccaugaaguc

SEQ ID NO: 2182998 - RNA, 19 nt, Homo sapiens
  misc_RNA (1)...(19): siRNA sense strand
ccgagagccuugucuugga

SEQ ID NO: 2182999 - RNA, 19 nt, Homo sapiens
  misc_RNA (1)...(19): siRNA sense strand
gaggaggagccaagagaug

SEQ ID NO: 2183000 - RNA, 19 nt, Homo sapiens
  misc_RNA (1)...(19): siRNA sense strand
ccagagaagguaaacacaa

SEQ ID NO: 2183001 - RNA, 19 nt, Homo sapiens
  misc_RNA (1)...(19): siRNA sense strand
gccaugcagagccuuauaa

SEQ ID NO: 2183002 - RNA, 19 nt, Homo sapiens
  misc_RNA (1)...(19): siRNA sense strand
gcaggaagcagccguuuug

SEQ ID NO: 2183003 - RNA, 19 nt, Homo sapiens
  misc_RNA (1)...(19): siRNA sense strand
caauacggacucagaggaa

SEQ ID NO: 2183004 - RNA, 19 nt, Homo sapiens
  misc_RNA (1)...(19): siRNA sense strand
agacuugggaugaacauga

SEQ ID NO: 2183005 - RNA, 19 nt, Homo sapiens
  misc_RNA (1)...(19): siRNA sense strand
augcagagccuuauaaagu

SEQ ID NO: 2183006 - RNA, 19 nt, Homo sapiens
  misc_RNA (1)...(19): siRNA sense strand
cgagagcgccaaagcuuuc

SEQ ID NO: 2183007 - RNA, 19 nt, Homo sapiens
  misc_RNA (1)...(19): siRNA sense strand
cagcuacucuuacaauacg

SEQ ID NO: 2183008 - RNA, 19 nt, Homo sapiens
  misc_RNA (1)...(19): siRNA sense strand
gcagcuacucuuacaauac

SEQ ID NO: 2183009 - RNA, 19 nt, Homo sapiens
  misc_RNA (1)...(19): siRNA sense strand
gcugggagcagggauaaga

SEQ ID NO: 2183010 - RNA, 19 nt, Homo sapiens
  misc_RNA (1)...(19): siRNA sense strand
gagcccaggccuuggagaa

SEQ ID NO: 2183011 - RNA, 19 nt, Homo sapiens
  misc_RNA (1)...(19): siRNA sense strand
ccuaccagcugugcuccua

SEQ ID NO: 2183012 - RNA, 19 nt, Homo sapiens
  misc_RNA (1)...(19): siRNA sense strand
ccucggaagugagcagcua

SEQ ID NO: 2183013 - RNA, 19 nt, Homo sapiens
  misc_RNA (1)...(19): siRNA sense strand
ggcagguacuugacuccuu

SEQ ID NO: 2183014 - RNA, 19 nt, Homo sapiens
  misc_RNA (1)...(19): siRNA sense strand
ggaagagcggccacaguag

SEQ ID NO: 2183015 - RNA, 19 nt, Homo sapiens
  misc_RNA (1)...(19): siRNA sense strand
aggccaaggucauccagaa

SEQ ID NO: 2183016 - RNA, 19 nt, Homo sapiens
  misc_RNA (1)...(19): siRNA sense strand
gaucaccuuccucacuuug

SEQ ID NO: 2183017 - RNA, 19 nt, Homo sapiens
  misc_RNA (1)...(19): siRNA sense strand
ccaagagccgacccaagaa

SEQ ID NO: 2183018 - RNA, 19 nt, Homo sapiens
  misc_RNA (1)...(19): siRNA sense strand
ugaagcccaacaagaagua

SEQ ID NO: 2183019 - RNA, 19 nt, Homo sapiens
  misc_RNA (1)...(19): siRNA sense strand
agaagaaagacuuggaguu

SEQ ID NO: 2183020 - RNA, 19 nt, Homo sapiens
  misc_RNA (1)...(19): siRNA sense strand
ggaaggaccccaggaagaa

SEQ ID NO: 2183021 - RNA, 19 nt, Homo sapiens
  misc_RNA (1)...(19): siRNA sense strand
gaagaagaaagggaaagag

SEQ ID NO: 2183022 - RNA, 19 nt, Homo sapiens
  misc_RNA (1)...(19): siRNA sense strand
gagaauguggucgagaaga

SEQ ID NO: 2183023 - RNA, 19 nt, Homo sapiens
  misc_RNA (1)...(19): siRNA sense strand
ccaccaaggccaccaagca

SEQ ID NO: 2183024 - RNA, 19 nt, Homo sapiens
  misc_RNA (1)...(19): siRNA sense strand
ccaugcagagccuuauaaa

SEQ ID NO: 2183025 - RNA, 19 nt, Homo sapiens
  misc_RNA (1)...(19): siRNA sense strand
ccaggaagaagaagaaagg

SEQ ID NO: 2183026 - RNA, 19 nt, Homo sapiens
  misc_RNA (1)...(19): siRNA sense strand
gggauaagaaagagacaca

SEQ ID NO: 2183027 - RNA, 19 nt, Homo sapiens
  misc_RNA (1)...(19): siRNA sense strand
ggcaucacccugcuaagug

SEQ ID NO: 2183028 - RNA, 19 nt, Homo sapiens
  misc_RNA (1)...(19): siRNA sense strand
aggcagagguggaggacau

SEQ ID NO: 2183029 - RNA, 19 nt, Homo sapiens
  misc_RNA (1)...(19): siRNA sense strand
ccugguggcuguggcaaga

SEQ ID NO: 2183030 - RNA, 19 nt, Homo sapiens
  misc_RNA (1)...(19): siRNA sense strand
ugaucaccuuccucacuuu

SEQ ID NO: 2183031 - RNA, 19 nt, Homo sapiens
  misc_RNA (1)...(19): siRNA sense strand
cccgucagccuaccaguuu

SEQ ID NO: 2183032 - RNA, 19 nt, Homo sapiens
  misc_RNA (1)...(19): siRNA sense strand
gaccaggagcgcucucugu

SEQ ID NO: 2183033 - RNA, 19 nt, Homo sapiens
  misc_RNA (1)...(19): siRNA sense strand
ggccaugcagagccuuaua

SEQ ID NO: 2183034 - RNA, 19 nt, Homo sapiens
  misc_RNA (1)...(19): siRNA sense strand
gggcacagaguucgaguac

SEQ ID NO: 2183035 - RNA, 19 nt, Homo sapiens
  misc_RNA (1)...(19): siRNA sense strand
ggaagcagccguuuugucu

SEQ ID NO: 2183036 - RNA, 19 nt, Homo sapiens
  misc_RNA (1)...(19): siRNA sense strand
cgccuucccuccuguguag

SEQ ID NO: 2183037 - RNA, 19 nt, Homo sapiens
  misc_RNA (1)...(19): siRNA sense strand
agacgaagaauuccugaag

SEQ ID NO: 2183038 - RNA, 19 nt, Homo sapiens
  misc_RNA (1)...(19): siRNA sense strand
agcagcuacucuuacaaua

SEQ ID NO: 2183039 - RNA, 19 nt, Homo sapiens
  misc_RNA (1)...(19): siRNA sense strand
ggaagugagcagcuacucu

SEQ ID NO: 2183040 - RNA, 19 nt, Homo sapiens
  misc_RNA (1)...(19): siRNA sense strand
gcuaaagauuaagaagaag

SEQ ID NO: 2183041 - RNA, 19 nt, Homo sapiens
  misc_RNA (1)...(19): siRNA sense strand
caucagucagcuaaagauu

SEQ ID NO: 2183042 - RNA, 19 nt, Homo sapiens
  misc_RNA (1)...(19): siRNA sense strand
agaaggaggagcggaugua

SEQ ID NO: 2183043 - RNA, 19 nt, Homo sapiens
  misc_RNA (1)...(19): siRNA sense strand
ggagguuugggcaccauga

SEQ ID NO: 2183044 - RNA, 19 nt, Homo sapiens
  misc_RNA (1)...(19): siRNA sense strand
cauggcaucacccugcuaa

SEQ ID NO: 2183045 - RNA, 19 nt, Homo sapiens
  misc_RNA (1)...(19): siRNA sense strand
gugcaaaggacaggaagga

SEQ ID NO: 2183046 - RNA, 19 nt, Homo sapiens
  misc_RNA (1)...(19): siRNA sense strand
ggaaacagcccucaaccaa

SEQ ID NO: 2183047 - RNA, 19 nt, Homo sapiens
  misc_RNA (1)...(19): siRNA sense strand
gaaacagcccucaaccaaa

SEQ ID NO: 2183048 - RNA, 19 nt, Homo sapiens
  misc_RNA (1)...(19): siRNA sense strand
aaacagcccucaaccaaaa

SEQ ID NO: 2183049 - RNA, 19 nt, Homo sapiens
  misc_RNA (1)...(19): siRNA sense strand
ggacaucgccagggaaaca

SEQ ID NO: 2183050 - RNA, 19 nt, Homo sapiens
  misc_RNA (1)...(19): siRNA sense strand
gaagcugcaugggugaaga

SEQ ID NO: 2183051 - RNA, 19 nt, Homo sapiens
  misc_RNA (1)...(19): siRNA sense strand
gaagagaccgugggaucgu

SEQ ID NO: 2183052 - RNA, 19 nt, Homo sapiens
  misc_RNA (1)...(19): siRNA sense strand
ccagaagucacaccucauc

SEQ ID NO: 2183053 - RNA, 19 nt, Homo sapiens
  misc_RNA (1)...(19): siRNA sense strand
caccucauccugcgucaga

SEQ ID NO: 2183054 - RNA, 19 nt, Homo sapiens
  misc_RNA (1)...(19): siRNA sense strand
gggaaacagcccucaacca

SEQ ID NO: 2183055 - RNA, 19 nt, Homo sapiens
  misc_RNA (1)...(19): siRNA sense strand
accgugggaucgucacaaa

SEQ ID NO: 2183056 - RNA, 19 nt, Homo sapiens
  misc_RNA (1)...(19): siRNA sense strand
ggaaacagcccucaaccaa

SEQ ID NO: 2183057 - RNA, 19 nt, Homo sapiens
  misc_RNA (1)...(19): siRNA sense strand
gaaacagcccucaaccaaa

SEQ ID NO: 2183058 - RNA, 19 nt, Homo sapiens
  misc_RNA (1)...(19): siRNA sense strand
aaacagcccucaaccaaaa

SEQ ID NO: 2183059 - RNA, 19 nt, Homo sapiens
  misc_RNA (1)...(19): siRNA sense strand
ggacaucgccagggaaaca

SEQ ID NO: 2183060 - RNA, 19 nt, Homo sapiens
  misc_RNA (1)...(19): siRNA sense strand
gaagcugcaugggugaaga

SEQ ID NO: 2183061 - RNA, 19 nt, Homo sapiens
  misc_RNA (1)...(19): siRNA sense strand
gaagagaccgugggaucgu

SEQ ID NO: 2183062 - RNA, 19 nt, Homo sapiens
  misc_RNA (1)...(19): siRNA sense strand
ccagaagucacaccucauc

SEQ ID NO: 2183063 - RNA, 19 nt, Homo sapiens
  misc_RNA (1)...(19): siRNA sense strand
caccucauccugcgucaga

SEQ ID NO: 2183064 - RNA, 19 nt, Homo sapiens
  misc_RNA (1)...(19): siRNA sense strand
gggaaacagcccucaacca

SEQ ID NO: 2183065 - RNA, 19 nt, Homo sapiens
  misc_RNA (1)...(19): siRNA sense strand
accgugggaucgucacaaa

SEQ ID NO: 2183066 - RNA, 19 nt, Homo sapiens
  misc_RNA (1)...(19): siRNA sense strand
cgacagaacugcacuugua

SEQ ID NO: 2183067 - RNA, 19 nt, Homo sapiens
  misc_RNA (1)...(19): siRNA sense strand
ugacaaagcuucugaaucu

SEQ ID NO: 2183068 - RNA, 19 nt, Homo sapiens
  misc_RNA (1)...(19): siRNA sense strand
gaucuagagucaaauguuu

SEQ ID NO: 2183069 - RNA, 19 nt, Homo sapiens
  misc_RNA (1)...(19): siRNA sense strand
guuaauagguccucaguga

SEQ ID NO: 2183070 - RNA, 19 nt, Homo sapiens
  misc_RNA (1)...(19): siRNA sense strand
uuagagaccuucaggcuua

SEQ ID NO: 2183071 - RNA, 19 nt, Homo sapiens
  misc_RNA (1)...(19): siRNA sense strand
gauaaaggcugcucagagu

SEQ ID NO: 2183072 - RNA, 19 nt, Homo sapiens
  misc_RNA (1)...(19): siRNA sense strand
caaccuaaccuucauagua

SEQ ID NO: 2183073 - RNA, 19 nt, Homo sapiens
  misc_RNA (1)...(19): siRNA sense strand
caccaccucuugccaauua

SEQ ID NO: 2183074 - RNA, 19 nt, Homo sapiens
  misc_RNA (1)...(19): siRNA sense strand
gaagagacauucaagaaaa

SEQ ID NO: 2183075 - RNA, 19 nt, Homo sapiens
  misc_RNA (1)...(19): siRNA sense strand
ccaagaagaugcccaugaa

SEQ ID NO: 2183076 - RNA, 19 nt, Homo sapiens
  misc_RNA (1)...(19): siRNA sense strand
gaccacagcuucccucuca

SEQ ID NO: 2183077 - RNA, 19 nt, Homo sapiens
  misc_RNA (1)...(19): siRNA sense strand
gaauggcagcaauaaauua

SEQ ID NO: 2183078 - RNA, 19 nt, Homo sapiens
  misc_RNA (1)...(19): siRNA sense strand
gauauuagaucgguacuca

SEQ ID NO: 2183079 - RNA, 19 nt, Homo sapiens
  misc_RNA (1)...(19): siRNA sense strand
ccuaagaucuagagucaaa

SEQ ID NO: 2183080 - RNA, 19 nt, Homo sapiens
  misc_RNA (1)...(19): siRNA sense strand
gaauccaccucacuuaaau

SEQ ID NO: 2183081 - RNA, 19 nt, Homo sapiens
  misc_RNA (1)...(19): siRNA sense strand
gcaauggccucugguauca

SEQ ID NO: 2183082 - RNA, 19 nt, Homo sapiens
  misc_RNA (1)...(19): siRNA sense strand
aaccuaaccuucauaguaa

SEQ ID NO: 2183083 - RNA, 19 nt, Homo sapiens
  misc_RNA (1)...(19): siRNA sense strand
uagaagagccuaaagcaaa

SEQ ID NO: 2183084 - RNA, 19 nt, Homo sapiens
  misc_RNA (1)...(19): siRNA sense strand
ccaauuacaugcuaucaca

SEQ ID NO: 2183085 - RNA, 19 nt, Homo sapiens
  misc_RNA (1)...(19): siRNA sense strand
gcaauaaauuagacagaca

SEQ ID NO: 2183086 - RNA, 19 nt, Homo sapiens
  misc_RNA (1)...(19): siRNA sense strand
cagcuucccucucacauga

SEQ ID NO: 2183087 - RNA, 19 nt, Homo sapiens
  misc_RNA (1)...(19): siRNA sense strand
acagaaggauccucuagaa

SEQ ID NO: 2183088 - RNA, 19 nt, Homo sapiens
  misc_RNA (1)...(19): siRNA sense strand
gaugucaguuucuaguaaa

SEQ ID NO: 2183089 - RNA, 19 nt, Homo sapiens
  misc_RNA (1)...(19): siRNA sense strand
guucaucuguaccugauaa

SEQ ID NO: 2183090 - RNA, 19 nt, Homo sapiens
  misc_RNA (1)...(19): siRNA sense strand
ggacuggaccauugaaaga

SEQ ID NO: 2183091 - RNA, 19 nt, Homo sapiens
  misc_RNA (1)...(19): siRNA sense strand
ucaaagagguucacuaucc

SEQ ID NO: 2183092 - RNA, 19 nt, Homo sapiens
  misc_RNA (1)...(19): siRNA sense strand
gaggauaccuaagaucuag

SEQ ID NO: 2183093 - RNA, 19 nt, Homo sapiens
  misc_RNA (1)...(19): siRNA sense strand
cgaugucaguuucuaguaa

SEQ ID NO: 2183094 - RNA, 19 nt, Homo sapiens
  misc_RNA (1)...(19): siRNA sense strand
gcaagggcguuucagauac

SEQ ID NO: 2183095 - RNA, 19 nt, Homo sapiens
  misc_RNA (1)...(19): siRNA sense strand
caaaucacacacuuucuuu

SEQ ID NO: 2183096 - RNA, 19 nt, Homo sapiens
  misc_RNA (1)...(19): siRNA sense strand
ggugucgucucuuugagua

SEQ ID NO: 2183097 - RNA, 19 nt, Homo sapiens
  misc_RNA (1)...(19): siRNA sense strand
gaacagaaggauccucuag

SEQ ID NO: 2183098 - RNA, 19 nt, Homo sapiens
  misc_RNA (1)...(19): siRNA sense strand
ccaccacucuuguuuguca

SEQ ID NO: 2183099 - RNA, 19 nt, Homo sapiens
  misc_RNA (1)...(19): siRNA sense strand
gaacauccuaagaaacaaa

SEQ ID NO: 2183100 - RNA, 19 nt, Homo sapiens
  misc_RNA (1)...(19): siRNA sense strand
ucacacacuuucuuuagga

SEQ ID NO: 2183101 - RNA, 19 nt, Homo sapiens
  misc_RNA (1)...(19): siRNA sense strand
caagaacccaugacccuaa

SEQ ID NO: 2183102 - RNA, 19 nt, Homo sapiens
  misc_RNA (1)...(19): siRNA sense strand
gaaugggauugguacgauu

SEQ ID NO: 2183103 - RNA, 19 nt, Homo sapiens
  misc_RNA (1)...(19): siRNA sense strand
ggagaaaacucguacaagu

SEQ ID NO: 2183104 - RNA, 19 nt, Homo sapiens
  misc_RNA (1)...(19): siRNA sense strand
ugucuuaaguggcaacaaa

SEQ ID NO: 2183105 - RNA, 19 nt, Homo sapiens
  misc_RNA (1)...(19): siRNA sense strand
uaccuaagaucuagaguca

SEQ ID NO: 2183106 - RNA, 19 nt, Homo sapiens
  misc_RNA (1)...(19): siRNA sense strand
gaccauaguugacaaagcu

SEQ ID NO: 2183107 - RNA, 19 nt, Homo sapiens
  misc_RNA (1)...(19): siRNA sense strand
ggaacagcuugauggagaa

SEQ ID NO: 2183108 - RNA, 19 nt, Homo sapiens
  misc_RNA (1)...(19): siRNA sense strand
aaagaauccaccucacuua

SEQ ID NO: 2183109 - RNA, 19 nt, Homo sapiens
  misc_RNA (1)...(19): siRNA sense strand
ccucucacaugauaaagaa

SEQ ID NO: 2183110 - RNA, 19 nt, Homo sapiens
  misc_RNA (1)...(19): siRNA sense strand
cagaacauccuaagaaaca

SEQ ID NO: 2183111 - RNA, 19 nt, Homo sapiens
  misc_RNA (1)...(19): siRNA sense strand
guugaugccugcuccuuug

SEQ ID NO: 2183112 - RNA, 19 nt, Homo sapiens
  misc_RNA (1)...(19): siRNA sense strand
gacagugacccgaaagaaa

SEQ ID NO: 2183113 - RNA, 19 nt, Homo sapiens
  misc_RNA (1)...(19): siRNA sense strand
ggaggauaccuaagaucua

SEQ ID NO: 2183114 - RNA, 19 nt, Homo sapiens
  misc_RNA (1)...(19): siRNA sense strand
gcccuuagcguuuauugaa

SEQ ID NO: 2183115 - RNA, 19 nt, Homo sapiens
  misc_RNA (1)...(19): siRNA sense strand
agaaggauccucuagaaga

SEQ ID NO: 2183116 - RNA, 19 nt, Homo sapiens
  misc_RNA (1)...(19): siRNA sense strand
cauuacuucugcuacauaa

SEQ ID NO: 2183117 - RNA, 19 nt, Homo sapiens
  misc_RNA (1)...(19): siRNA sense strand
aaucagaggacuuuguuaa

SEQ ID NO: 2183118 - RNA, 19 nt, Homo sapiens
  misc_RNA (1)...(19): siRNA sense strand
cccagaacauccuaagaaa

SEQ ID NO: 2183119 - RNA, 19 nt, Homo sapiens
  misc_RNA (1)...(19): siRNA sense strand
uaaagaauccaccucacuu

SEQ ID NO: 2183120 - RNA, 19 nt, Homo sapiens
  misc_RNA (1)...(19): siRNA sense strand
guucuuacacuuucucuga

SEQ ID NO: 2183121 - RNA, 19 nt, Homo sapiens
  misc_RNA (1)...(19): siRNA sense strand
aagaagagacauucaagaa

SEQ ID NO: 2183122 - RNA, 19 nt, Homo sapiens
  misc_RNA (1)...(19): siRNA sense strand
ccuaaacggugcuaauagu

SEQ ID NO: 2183123 - RNA, 19 nt, Homo sapiens
  misc_RNA (1)...(19): siRNA sense strand
gccaagaugccgaagauga

SEQ ID NO: 2183124 - RNA, 19 nt, Homo sapiens
  misc_RNA (1)...(19): siRNA sense strand
gucaguuucuaguaaagua

SEQ ID NO: 2183125 - RNA, 19 nt, Homo sapiens
  misc_RNA (1)...(19): siRNA sense strand
ucagauauuuggaggauac

SEQ ID NO: 2183126 - RNA, 19 nt, Homo sapiens
  misc_RNA (1)...(19): siRNA sense strand
gaugugaaauacccugagu

SEQ ID NO: 2183127 - RNA, 19 nt, Homo sapiens
  misc_RNA (1)...(19): siRNA sense strand
cuaauguucuuacacuuuc

SEQ ID NO: 2183128 - RNA, 19 nt, Homo sapiens
  misc_RNA (1)...(19): siRNA sense strand
aaagaugguuccagcuuca

SEQ ID NO: 2183129 - RNA, 19 nt, Homo sapiens
  misc_RNA (1)...(19): siRNA sense strand
ggccaccacucuuguuugu

SEQ ID NO: 2183130 - RNA, 19 nt, Homo sapiens
  misc_RNA (1)...(19): siRNA sense strand
caaucaguauucacaacaa

SEQ ID NO: 2183131 - RNA, 19 nt, Homo sapiens
  misc_RNA (1)...(19): siRNA sense strand
caaagagguucacuaucca

SEQ ID NO: 2183132 - RNA, 19 nt, Homo sapiens
  misc_RNA (1)...(19): siRNA sense strand
aagaagaugcccaugaauu

SEQ ID NO: 2183133 - RNA, 19 nt, Homo sapiens
  misc_RNA (1)...(19): siRNA sense strand
ugaauggcagcaauaaauu

SEQ ID NO: 2183134 - RNA, 19 nt, Homo sapiens
  misc_RNA (1)...(19): siRNA sense strand
agagagagcaggagcaaga

SEQ ID NO: 2183135 - RNA, 19 nt, Homo sapiens
  misc_RNA (1)...(19): siRNA sense strand
cauuaccaauucugcagua

SEQ ID NO: 2183136 - RNA, 19 nt, Homo sapiens
  misc_RNA (1)...(19): siRNA sense strand
gcuucccucucacaugaua

SEQ ID NO: 2183137 - RNA, 19 nt, Homo sapiens
  misc_RNA (1)...(19): siRNA sense strand
uugcuaaggaugugaaaua

SEQ ID NO: 2183138 - RNA, 19 nt, Homo sapiens
  misc_RNA (1)...(19): siRNA sense strand
ggugcugugucuucauuga

SEQ ID NO: 2183139 - RNA, 19 nt, Homo sapiens
  misc_RNA (1)...(19): siRNA sense strand
uguuaaagauucagaacug

SEQ ID NO: 2183140 - RNA, 19 nt, Homo sapiens
  misc_RNA (1)...(19): siRNA sense strand
agaagagacauucaagaaa

SEQ ID NO: 2183141 - RNA, 19 nt, Homo sapiens
  misc_RNA (1)...(19): siRNA sense strand
agaagaugcccaugaauuc

SEQ ID NO: 2183142 - RNA, 19 nt, Homo sapiens
  misc_RNA (1)...(19): siRNA sense strand
cagcgacagugacccgaaa

SEQ ID NO: 2183143 - RNA, 19 nt, Homo sapiens
  misc_RNA (1)...(19): siRNA sense strand
agacauggaugcagguucu

SEQ ID NO: 2183144 - RNA, 19 nt, Homo sapiens
  misc_RNA (1)...(19): siRNA sense strand
ucaaaucacacacuuucuu

SEQ ID NO: 2183145 - RNA, 19 nt, Homo sapiens
  misc_RNA (1)...(19): siRNA sense strand
gaguucaucuguaccugau

SEQ ID NO: 2183146 - RNA, 19 nt, Homo sapiens
  misc_RNA (1)...(19): siRNA sense strand
caggguggcuuuccucucu

SEQ ID NO: 2183147 - RNA, 19 nt, Homo sapiens
  misc_RNA (1)...(19): siRNA sense strand
ucaaaaccaucaccacaaa

SEQ ID NO: 2183148 - RNA, 19 nt, Homo sapiens
  misc_RNA (1)...(19): siRNA sense strand
cagaaaaucccuuugcuaa

SEQ ID NO: 2183149 - RNA, 19 nt, Homo sapiens
  misc_RNA (1)...(19): siRNA sense strand
ccucugguaucaaaugaau

SEQ ID NO: 2183150 - RNA, 19 nt, Homo sapiens
  misc_RNA (1)...(19): siRNA sense strand
gauauuuggaggauaccua

SEQ ID NO: 2183151 - RNA, 19 nt, Homo sapiens
  misc_RNA (1)...(19): siRNA sense strand
ugcaagggcguuucagaua

SEQ ID NO: 2183152 - RNA, 19 nt, Homo sapiens
  misc_RNA (1)...(19): siRNA sense strand
gcaggacucagaccucuca

SEQ ID NO: 2183153 - RNA, 19 nt, Homo sapiens
  misc_RNA (1)...(19): siRNA sense strand
caucgcuccuccacagaaa

SEQ ID NO: 2183154 - RNA, 19 nt, Homo sapiens
  misc_RNA (1)...(19): siRNA sense strand
caacggagagccaauuguc

SEQ ID NO: 2183155 - RNA, 19 nt, Homo sapiens
  misc_RNA (1)...(19): siRNA sense strand
uagcuaggcacuuccguuu

SEQ ID NO: 2183156 - RNA, 19 nt, Homo sapiens
  misc_RNA (1)...(19): siRNA sense strand
aaauggaggugaacuuacu

SEQ ID NO: 2183157 - RNA, 19 nt, Homo sapiens
  misc_RNA (1)...(19): siRNA sense strand
gcuaggcacuuccguuuug

SEQ ID NO: 2183158 - RNA, 19 nt, Homo sapiens
  misc_RNA (1)...(19): siRNA sense strand
agaagagccuaaagcaaag

SEQ ID NO: 2183159 - RNA, 19 nt, Homo sapiens
  misc_RNA (1)...(19): siRNA sense strand
gcaaauccaagcugaacuc

SEQ ID NO: 2183160 - RNA, 19 nt, Homo sapiens
  misc_RNA (1)...(19): siRNA sense strand
agaauccaccucacuuaaa

SEQ ID NO: 2183161 - RNA, 19 nt, Homo sapiens
  misc_RNA (1)...(19): siRNA sense strand
ggaggugaacuuacucauc

SEQ ID NO: 2183162 - RNA, 19 nt, Homo sapiens
  misc_RNA (1)...(19): siRNA sense strand
gaacagcuugauggagaaa

SEQ ID NO: 2183163 - RNA, 19 nt, Homo sapiens
  misc_RNA (1)...(19): siRNA sense strand
aauggccucugguaucaaa

SEQ ID NO: 2183164 - RNA, 19 nt, Homo sapiens
  misc_RNA (1)...(19): siRNA sense strand
ugagaaaacgaaacacuua

SEQ ID NO: 2183165 - RNA, 19 nt, Homo sapiens
  misc_RNA (1)...(19): siRNA sense strand
gaaaggcucgacggaugaa

SEQ ID NO: 2183166 - RNA, 19 nt, Homo sapiens
  misc_RNA (1)...(19): siRNA sense strand
cgacagaacugcacuugua

SEQ ID NO: 2183167 - RNA, 19 nt, Homo sapiens
  misc_RNA (1)...(19): siRNA sense strand
ugacaaagcuucugaaucu

SEQ ID NO: 2183168 - RNA, 19 nt, Homo sapiens
  misc_RNA (1)...(19): siRNA sense strand
gaucuagagucaaauguuu

SEQ ID NO: 2183169 - RNA, 19 nt, Homo sapiens
  misc_RNA (1)...(19): siRNA sense strand
guuaauagguccucaguga

SEQ ID NO: 2183170 - RNA, 19 nt, Homo sapiens
  misc_RNA (1)...(19): siRNA sense strand
uuagagaccuucaggcuua

SEQ ID NO: 2183171 - RNA, 19 nt, Homo sapiens
  misc_RNA (1)...(19): siRNA sense strand
gauaaaggcugcucagagu

SEQ ID NO: 2183172 - RNA, 19 nt, Homo sapiens
  misc_RNA (1)...(19): siRNA sense strand
caaccuaaccuucauagua

SEQ ID NO: 2183173 - RNA, 19 nt, Homo sapiens
  misc_RNA (1)...(19): siRNA sense strand
caccaccucuugccaauua

SEQ ID NO: 2183174 - RNA, 19 nt, Homo sapiens
  misc_RNA (1)...(19): siRNA sense strand
gaagagacauucaagaaaa

SEQ ID NO: 2183175 - RNA, 19 nt, Homo sapiens
  misc_RNA (1)...(19): siRNA sense strand
ccaagaagaugcccaugaa

SEQ ID NO: 2183176 - RNA, 19 nt, Homo sapiens
  misc_RNA (1)...(19): siRNA sense strand
gaccacagcuucccucuca

SEQ ID NO: 2183177 - RNA, 19 nt, Homo sapiens
  misc_RNA (1)...(19): siRNA sense strand
gaauggcagcaauaaauua

SEQ ID NO: 2183178 - RNA, 19 nt, Homo sapiens
  misc_RNA (1)...(19): siRNA sense strand
gauauuagaucgguacuca

SEQ ID NO: 2183179 - RNA, 19 nt, Homo sapiens
  misc_RNA (1)...(19): siRNA sense strand
ccuaagaucuagagucaaa

SEQ ID NO: 2183180 - RNA, 19 nt, Homo sapiens
  misc_RNA (1)...(19): siRNA sense strand
gaauccaccucacuuaaau

SEQ ID NO: 2183181 - RNA, 19 nt, Homo sapiens
  misc_RNA (1)...(19): siRNA sense strand
gcaauggccucugguauca

SEQ ID NO: 2183182 - RNA, 19 nt, Homo sapiens
  misc_RNA (1)...(19): siRNA sense strand
aaccuaaccuucauaguaa

SEQ ID NO: 2183183 - RNA, 19 nt, Homo sapiens
  misc_RNA (1)...(19): siRNA sense strand
uagaagagccuaaagcaaa

SEQ ID NO: 2183184 - RNA, 19 nt, Homo sapiens
  misc_RNA (1)...(19): siRNA sense strand
ccaauuacaugcuaucaca

SEQ ID NO: 2183185 - RNA, 19 nt, Homo sapiens
  misc_RNA (1)...(19): siRNA sense strand
gcaauaaauuagacagaca

SEQ ID NO: 2183186 - RNA, 19 nt, Homo sapiens
  misc_RNA (1)...(19): siRNA sense strand
cagcuucccucucacauga

SEQ ID NO: 2183187 - RNA, 19 nt, Homo sapiens
  misc_RNA (1)...(19): siRNA sense strand
acagaaggauccucuagaa

SEQ ID NO: 2183188 - RNA, 19 nt, Homo sapiens
  misc_RNA (1)...(19): siRNA sense strand
gaugucaguuucuaguaaa

SEQ ID NO: 2183189 - RNA, 19 nt, Homo sapiens
  misc_RNA (1)...(19): siRNA sense strand
guucaucuguaccugauaa

SEQ ID NO: 2183190 - RNA, 19 nt, Homo sapiens
  misc_RNA (1)...(19): siRNA sense strand
ggacuggaccauugaaaga

SEQ ID NO: 2183191 - RNA, 19 nt, Homo sapiens
  misc_RNA (1)...(19): siRNA sense strand
ucaaagagguucacuaucc

SEQ ID NO: 2183192 - RNA, 19 nt, Homo sapiens
  misc_RNA (1)...(19): siRNA sense strand
gaggauaccuaagaucuag

SEQ ID NO: 2183193 - RNA, 19 nt, Homo sapiens
  misc_RNA (1)...(19): siRNA sense strand
cgaugucaguuucuaguaa

SEQ ID NO: 2183194 - RNA, 19 nt, Homo sapiens
  misc_RNA (1)...(19): siRNA sense strand
gcaagggcguuucagauac

SEQ ID NO: 2183195 - RNA, 19 nt, Homo sapiens
  misc_RNA (1)...(19): siRNA sense strand
caaaucacacacuuucuuu

SEQ ID NO: 2183196 - RNA, 19 nt, Homo sapiens
  misc_RNA (1)...(19): siRNA sense strand
ggugucgucucuuugagua

SEQ ID NO: 2183197 - RNA, 19 nt, Homo sapiens
  misc_RNA (1)...(19): siRNA sense strand
gaacagaaggauccucuag

SEQ ID NO: 2183198 - RNA, 19 nt, Homo sapiens
  misc_RNA (1)...(19): siRNA sense strand
ccaccacucuuguuuguca

SEQ ID NO: 2183199 - RNA, 19 nt, Homo sapiens
  misc_RNA (1)...(19): siRNA sense strand
gaacauccuaagaaacaaa

SEQ ID NO: 2183200 - RNA, 19 nt, Homo sapiens
  misc_RNA (1)...(19): siRNA sense strand
ucacacacuuucuuuagga

SEQ ID NO: 2183201 - RNA, 19 nt, Homo sapiens
  misc_RNA (1)...(19): siRNA sense strand
caagaacccaugacccuaa

SEQ ID NO: 2183202 - RNA, 19 nt, Homo sapiens
  misc_RNA (1)...(19): siRNA sense strand
gaaugggauugguacgauu

SEQ ID NO: 2183203 - RNA, 19 nt, Homo sapiens
  misc_RNA (1)...(19): siRNA sense strand
ggagaaaacucguacaagu

SEQ ID NO: 2183204 - RNA, 19 nt, Homo sapiens
  misc_RNA (1)...(19): siRNA sense strand
ugucuuaaguggcaacaaa

SEQ ID NO: 2183205 - RNA, 19 nt, Homo sapiens
  misc_RNA (1)...(19): siRNA sense strand
uaccuaagaucuagaguca

SEQ ID NO: 2183206 - RNA, 19 nt, Homo sapiens
  misc_RNA (1)...(19): siRNA sense strand
gaccauaguugacaaagcu

SEQ ID NO: 2183207 - RNA, 19 nt, Homo sapiens
  misc_RNA (1)...(19): siRNA sense strand
ggaacagcuugauggagaa

SEQ ID NO: 2183208 - RNA, 19 nt, Homo sapiens
  misc_RNA (1)...(19): siRNA sense strand
aaagaauccaccucacuua

SEQ ID NO: 2183209 - RNA, 19 nt, Homo sapiens
  misc_RNA (1)...(19): siRNA sense strand
ccucucacaugauaaagaa

SEQ ID NO: 2183210 - RNA, 19 nt, Homo sapiens
  misc_RNA (1)...(19): siRNA sense strand
cagaacauccuaagaaaca

SEQ ID NO: 2183211 - RNA, 19 nt, Homo sapiens
  misc_RNA (1)...(19): siRNA sense strand
guugaugccugcuccuuug

SEQ ID NO: 2183212 - RNA, 19 nt, Homo sapiens
  misc_RNA (1)...(19): siRNA sense strand
gacagugacccgaaagaaa

SEQ ID NO: 2183213 - RNA, 19 nt, Homo sapiens
  misc_RNA (1)...(19): siRNA sense strand
ggaggauaccuaagaucua

SEQ ID NO: 2183214 - RNA, 19 nt, Homo sapiens
  misc_RNA (1)...(19): siRNA sense strand
gcccuuagcguuuauugaa

SEQ ID NO: 2183215 - RNA, 19 nt, Homo sapiens
  misc_RNA (1)...(19): siRNA sense strand
agaaggauccucuagaaga

SEQ ID NO: 2183216 - RNA, 19 nt, Homo sapiens
  misc_RNA (1)...(19): siRNA sense strand
cauuacuucugcuacauaa

SEQ ID NO: 2183217 - RNA, 19 nt, Homo sapiens
  misc_RNA (1)...(19): siRNA sense strand
aaucagaggacuuuguuaa

SEQ ID NO: 2183218 - RNA, 19 nt, Homo sapiens
  misc_RNA (1)...(19): siRNA sense strand
cccagaacauccuaagaaa

SEQ ID NO: 2183219 - RNA, 19 nt, Homo sapiens
  misc_RNA (1)...(19): siRNA sense strand
uaaagaauccaccucacuu

SEQ ID NO: 2183220 - RNA, 19 nt, Homo sapiens
  misc_RNA (1)...(19): siRNA sense strand
guucuuacacuuucucuga

SEQ ID NO: 2183221 - RNA, 19 nt, Homo sapiens
  misc_RNA (1)...(19): siRNA sense strand
aagaagagacauucaagaa

SEQ ID NO: 2183222 - RNA, 19 nt, Homo sapiens
  misc_RNA (1)...(19): siRNA sense strand
ccuaaacggugcuaauagu

SEQ ID NO: 2183223 - RNA, 19 nt, Homo sapiens
  misc_RNA (1)...(19): siRNA sense strand
gccaagaugccgaagauga

SEQ ID NO: 2183224 - RNA, 19 nt, Homo sapiens
  misc_RNA (1)...(19): siRNA sense strand
gucaguuucuaguaaagua

SEQ ID NO: 2183225 - RNA, 19 nt, Homo sapiens
  misc_RNA (1)...(19): siRNA sense strand
ucagauauuuggaggauac

SEQ ID NO: 2183226 - RNA, 19 nt, Homo sapiens
  misc_RNA (1)...(19): siRNA sense strand
gaugugaaauacccugagu

SEQ ID NO: 2183227 - RNA, 19 nt, Homo sapiens
  misc_RNA (1)...(19): siRNA sense strand
cuaauguucuuacacuuuc

SEQ ID NO: 2183228 - RNA, 19 nt, Homo sapiens
  misc_RNA (1)...(19): siRNA sense strand
aaagaugguuccagcuuca

SEQ ID NO: 2183229 - RNA, 19 nt, Homo sapiens
  misc_RNA (1)...(19): siRNA sense strand
ggccaccacucuuguuugu

SEQ ID NO: 2183230 - RNA, 19 nt, Homo sapiens
  misc_RNA (1)...(19): siRNA sense strand
caaucaguauucacaacaa

SEQ ID NO: 2183231 - RNA, 19 nt, Homo sapiens
  misc_RNA (1)...(19): siRNA sense strand
caaagagguucacuaucca

SEQ ID NO: 2183232 - RNA, 19 nt, Homo sapiens
  misc_RNA (1)...(19): siRNA sense strand
aagaagaugcccaugaauu

SEQ ID NO: 2183233 - RNA, 19 nt, Homo sapiens
  misc_RNA (1)...(19): siRNA sense strand
ugaauggcagcaauaaauu

SEQ ID NO: 2183234 - RNA, 19 nt, Homo sapiens
  misc_RNA (1)...(19): siRNA sense strand
agagagagcaggagcaaga

SEQ ID NO: 2183235 - RNA, 19 nt, Homo sapiens
  misc_RNA (1)...(19): siRNA sense strand
cauuaccaauucugcagua

SEQ ID NO: 2183236 - RNA, 19 nt, Homo sapiens
  misc_RNA (1)...(19): siRNA sense strand
gcuucccucucacaugaua

SEQ ID NO: 2183237 - RNA, 19 nt, Homo sapiens
  misc_RNA (1)...(19): siRNA sense strand
uugcuaaggaugugaaaua

SEQ ID NO: 2183238 - RNA, 19 nt, Homo sapiens
  misc_RNA (1)...(19): siRNA sense strand
ggugcugugucuucauuga

SEQ ID NO: 2183239 - RNA, 19 nt, Homo sapiens
  misc_RNA (1)...(19): siRNA sense strand
uguuaaagauucagaacug

SEQ ID NO: 2183240 - RNA, 19 nt, Homo sapiens
  misc_RNA (1)...(19): siRNA sense strand
agaagagacauucaagaaa

SEQ ID NO: 2183241 - RNA, 19 nt, Homo sapiens
  misc_RNA (1)...(19): siRNA sense strand
agaagaugcccaugaauuc

SEQ ID NO: 2183242 - RNA, 19 nt, Homo sapiens
  misc_RNA (1)...(19): siRNA sense strand
cagcgacagugacccgaaa

SEQ ID NO: 2183243 - RNA, 19 nt, Homo sapiens
  misc_RNA (1)...(19): siRNA sense strand
agacauggaugcagguucu

SEQ ID NO: 2183244 - RNA, 19 nt, Homo sapiens
  misc_RNA (1)...(19): siRNA sense strand
ucaaaucacacacuuucuu

SEQ ID NO: 2183245 - RNA, 19 nt, Homo sapiens
  misc_RNA (1)...(19): siRNA sense strand
gaguucaucuguaccugau

SEQ ID NO: 2183246 - RNA, 19 nt, Homo sapiens
  misc_RNA (1)...(19): siRNA sense strand
caggguggcuuuccucucu

SEQ ID NO: 2183247 - RNA, 19 nt, Homo sapiens
  misc_RNA (1)...(19): siRNA sense strand
ucaaaaccaucaccacaaa

SEQ ID NO: 2183248 - RNA, 19 nt, Homo sapiens
  misc_RNA (1)...(19): siRNA sense strand
cagaaaaucccuuugcuaa

SEQ ID NO: 2183249 - RNA, 19 nt, Homo sapiens
  misc_RNA (1)...(19): siRNA sense strand
ccucugguaucaaaugaau

SEQ ID NO: 2183250 - RNA, 19 nt, Homo sapiens
  misc_RNA (1)...(19): siRNA sense strand
gauauuuggaggauaccua

SEQ ID NO: 2183251 - RNA, 19 nt, Homo sapiens
  misc_RNA (1)...(19): siRNA sense strand
ugcaagggcguuucagaua

SEQ ID NO: 2183252 - RNA, 19 nt, Homo sapiens
  misc_RNA (1)...(19): siRNA sense strand
gcaggacucagaccucuca

SEQ ID NO: 2183253 - RNA, 19 nt, Homo sapiens
  misc_RNA (1)...(19): siRNA sense strand
caucgcuccuccacagaaa

SEQ ID NO: 2183254 - RNA, 19 nt, Homo sapiens
  misc_RNA (1)...(19): siRNA sense strand
caacggagagccaauuguc

SEQ ID NO: 2183255 - RNA, 19 nt, Homo sapiens
  misc_RNA (1)...(19): siRNA sense strand
uagcuaggcacuuccguuu

SEQ ID NO: 2183256 - RNA, 19 nt, Homo sapiens
  misc_RNA (1)...(19): siRNA sense strand
aaauggaggugaacuuacu

SEQ ID NO: 2183257 - RNA, 19 nt, Homo sapiens
  misc_RNA (1)...(19): siRNA sense strand
gcuaggcacuuccguuuug

SEQ ID NO: 2183258 - RNA, 19 nt, Homo sapiens
  misc_RNA (1)...(19): siRNA sense strand
agaagagccuaaagcaaag

SEQ ID NO: 2183259 - RNA, 19 nt, Homo sapiens
  misc_RNA (1)...(19): siRNA sense strand
gcaaauccaagcugaacuc

SEQ ID NO: 2183260 - RNA, 19 nt, Homo sapiens
  misc_RNA (1)...(19): siRNA sense strand
agaauccaccucacuuaaa

SEQ ID NO: 2183261 - RNA, 19 nt, Homo sapiens
  misc_RNA (1)...(19): siRNA sense strand
ggaggugaacuuacucauc

SEQ ID NO: 2183262 - RNA, 19 nt, Homo sapiens
  misc_RNA (1)...(19): siRNA sense strand
gaacagcuugauggagaaa

SEQ ID NO: 2183263 - RNA, 19 nt, Homo sapiens
  misc_RNA (1)...(19): siRNA sense strand
aauggccucugguaucaaa

SEQ ID NO: 2183264 - RNA, 19 nt, Homo sapiens
  misc_RNA (1)...(19): siRNA sense strand
ugagaaaacgaaacacuua

SEQ ID NO: 2183265 - RNA, 19 nt, Homo sapiens
  misc_RNA (1)...(19): siRNA sense strand
gaaaggcucgacggaugaa

SEQ ID NO: 2183266 - RNA, 19 nt, Homo sapiens
  misc_RNA (1)...(19): siRNA sense strand
ggagaaagaucgccaguca

SEQ ID NO: 2183267 - RNA, 19 nt, Homo sapiens
  misc_RNA (1)...(19): siRNA sense strand
cagaagauuugcucuauga

SEQ ID NO: 2183268 - RNA, 19 nt, Homo sapiens
  misc_RNA (1)...(19): siRNA sense strand
gaauaaguccugaauuaga

SEQ ID NO: 2183269 - RNA, 19 nt, Homo sapiens
  misc_RNA (1)...(19): siRNA sense strand
gagcagaucgccaaacuga

SEQ ID NO: 2183270 - RNA, 19 nt, Homo sapiens
  misc_RNA (1)...(19): siRNA sense strand
agacaaagcuacucagaca

SEQ ID NO: 2183271 - RNA, 19 nt, Homo sapiens
  misc_RNA (1)...(19): siRNA sense strand
guucggaccucuaguacaa

SEQ ID NO: 2183272 - RNA, 19 nt, Homo sapiens
  misc_RNA (1)...(19): siRNA sense strand
uuacgucucuuucugauga

SEQ ID NO: 2183273 - RNA, 19 nt, Homo sapiens
  misc_RNA (1)...(19): siRNA sense strand
gcucuaugaucgugauaaa

SEQ ID NO: 2183274 - RNA, 19 nt, Homo sapiens
  misc_RNA (1)...(19): siRNA sense strand
gggaguagcucaccguuac

SEQ ID NO: 2183275 - RNA, 19 nt, Homo sapiens
  misc_RNA (1)...(19): siRNA sense strand
gcucagaacuaugugauca

SEQ ID NO: 2183276 - RNA, 19 nt, Homo sapiens
  misc_RNA (1)...(19): siRNA sense strand
caacagaagauuugcucua

SEQ ID NO: 2183277 - RNA, 19 nt, Homo sapiens
  misc_RNA (1)...(19): siRNA sense strand
gaaggucuuugaggaaaug

SEQ ID NO: 2183278 - RNA, 19 nt, Homo sapiens
  misc_RNA (1)...(19): siRNA sense strand
gcucaccguuacccaagua

SEQ ID NO: 2183279 - RNA, 19 nt, Homo sapiens
  misc_RNA (1)...(19): siRNA sense strand
agaacuaugugaucaucua

SEQ ID NO: 2183280 - RNA, 19 nt, Homo sapiens
  misc_RNA (1)...(19): siRNA sense strand
caaguucggaccucuagua

SEQ ID NO: 2183281 - RNA, 19 nt, Homo sapiens
  misc_RNA (1)...(19): siRNA sense strand
gaacuaugugaucaucuaa

SEQ ID NO: 2183282 - RNA, 19 nt, Homo sapiens
  misc_RNA (1)...(19): siRNA sense strand
ggaucaaggucaguuccua

SEQ ID NO: 2183283 - RNA, 19 nt, Homo sapiens
  misc_RNA (1)...(19): siRNA sense strand
gauaaagacagugggagua

SEQ ID NO: 2183284 - RNA, 19 nt, Homo sapiens
  misc_RNA (1)...(19): siRNA sense strand
gugaaggucuuugaggaaa

SEQ ID NO: 2183285 - RNA, 19 nt, Homo sapiens
  misc_RNA (1)...(19): siRNA sense strand
ggaauaaguccugaauuag

SEQ ID NO: 2183286 - RNA, 19 nt, Homo sapiens
  misc_RNA (1)...(19): siRNA sense strand
cuacaacgcaguaaacaga

SEQ ID NO: 2183287 - RNA, 19 nt, Homo sapiens
  misc_RNA (1)...(19): siRNA sense strand
cagaguagucgucacagua

SEQ ID NO: 2183288 - RNA, 19 nt, Homo sapiens
  misc_RNA (1)...(19): siRNA sense strand
gaugguagcccuugcucaa

SEQ ID NO: 2183289 - RNA, 19 nt, Homo sapiens
  misc_RNA (1)...(19): siRNA sense strand
gcagagcggacaaggcaaa

SEQ ID NO: 2183290 - RNA, 19 nt, Homo sapiens
  misc_RNA (1)...(19): siRNA sense strand
ucagcuuucuguccuguaa

SEQ ID NO: 2183291 - RNA, 19 nt, Homo sapiens
  misc_RNA (1)...(19): siRNA sense strand
ccaaacaacagcuacaugu

SEQ ID NO: 2183292 - RNA, 19 nt, Homo sapiens
  misc_RNA (1)...(19): siRNA sense strand
gaagauuugcucuaugauc

SEQ ID NO: 2183293 - RNA, 19 nt, Homo sapiens
  misc_RNA (1)...(19): siRNA sense strand
cgaaccuccucuuuggaua

SEQ ID NO: 2183294 - RNA, 19 nt, Homo sapiens
  misc_RNA (1)...(19): siRNA sense strand
gcaacuacaacgcaguaaa

SEQ ID NO: 2183295 - RNA, 19 nt, Homo sapiens
  misc_RNA (1)...(19): siRNA sense strand
gaucgccagucaccucuuc

SEQ ID NO: 2183296 - RNA, 19 nt, Homo sapiens
  misc_RNA (1)...(19): siRNA sense strand
ccuaugccacugucaaaua

SEQ ID NO: 2183297 - RNA, 19 nt, Homo sapiens
  misc_RNA (1)...(19): siRNA sense strand
cuaugccacugucaaauau

SEQ ID NO: 2183298 - RNA, 19 nt, Homo sapiens
  misc_RNA (1)...(19): siRNA sense strand
ucggaccucuaguacaaua

SEQ ID NO: 2183299 - RNA, 19 nt, Homo sapiens
  misc_RNA (1)...(19): siRNA sense strand
caauguagaaggaauaagu

SEQ ID NO: 2183300 - RNA, 19 nt, Homo sapiens
  misc_RNA (1)...(19): siRNA sense strand
gcccugcaauguagaagga

SEQ ID NO: 2183301 - RNA, 19 nt, Homo sapiens
  misc_RNA (1)...(19): siRNA sense strand
ucuaugaucgugauaaaga

SEQ ID NO: 2183302 - RNA, 19 nt, Homo sapiens
  misc_RNA (1)...(19): siRNA sense strand
caacgcaguaaacagagua

SEQ ID NO: 2183303 - RNA, 19 nt, Homo sapiens
  misc_RNA (1)...(19): siRNA sense strand
aacagaagauuugcucuau

SEQ ID NO: 2183304 - RNA, 19 nt, Homo sapiens
  misc_RNA (1)...(19): siRNA sense strand
ggaaggaagaaguauccaa

SEQ ID NO: 2183305 - RNA, 19 nt, Homo sapiens
  misc_RNA (1)...(19): siRNA sense strand
gaucaaggucaguuccuau

SEQ ID NO: 2183306 - RNA, 19 nt, Homo sapiens
  misc_RNA (1)...(19): siRNA sense strand
ggggagugcugaucaacua

SEQ ID NO: 2183307 - RNA, 19 nt, Homo sapiens
  misc_RNA (1)...(19): siRNA sense strand
cuucugaccuuaugcucaa

SEQ ID NO: 2183308 - RNA, 19 nt, Homo sapiens
  misc_RNA (1)...(19): siRNA sense strand
ggagugcugaucaacuaaa

SEQ ID NO: 2183309 - RNA, 19 nt, Homo sapiens
  misc_RNA (1)...(19): siRNA sense strand
caacuacaacgcaguaaac

SEQ ID NO: 2183310 - RNA, 19 nt, Homo sapiens
  misc_RNA (1)...(19): siRNA sense strand
gcucagcuuuggcaacucu

SEQ ID NO: 2183311 - RNA, 19 nt, Homo sapiens
  misc_RNA (1)...(19): siRNA sense strand
ggcaaaaucucagcaaguu

SEQ ID NO: 2183312 - RNA, 19 nt, Homo sapiens
  misc_RNA (1)...(19): siRNA sense strand
aacaggaccuuaccucaca

SEQ ID NO: 2183313 - RNA, 19 nt, Homo sapiens
  misc_RNA (1)...(19): siRNA sense strand
agaguagucgucacaguaa

SEQ ID NO: 2183314 - RNA, 19 nt, Homo sapiens
  misc_RNA (1)...(19): siRNA sense strand
aaacagaguagucgucaca

SEQ ID NO: 2183315 - RNA, 19 nt, Homo sapiens
  misc_RNA (1)...(19): siRNA sense strand
cagcaacuacaacgcagua

SEQ ID NO: 2183316 - RNA, 19 nt, Homo sapiens
  misc_RNA (1)...(19): siRNA sense strand
gccacgggauccucauguu

SEQ ID NO: 2183317 - RNA, 19 nt, Homo sapiens
  misc_RNA (1)...(19): siRNA sense strand
uaaugggaaggaagaagua

SEQ ID NO: 2183318 - RNA, 19 nt, Homo sapiens
  misc_RNA (1)...(19): siRNA sense strand
ugaaagacaaagcuacuca

SEQ ID NO: 2183319 - RNA, 19 nt, Homo sapiens
  misc_RNA (1)...(19): siRNA sense strand
ucagaacuaugugaucauc

SEQ ID NO: 2183320 - RNA, 19 nt, Homo sapiens
  misc_RNA (1)...(19): siRNA sense strand
gcagaagagggugcagaaa

SEQ ID NO: 2183321 - RNA, 19 nt, Homo sapiens
  misc_RNA (1)...(19): siRNA sense strand
gcaaccauauaacaaucag

SEQ ID NO: 2183322 - RNA, 19 nt, Homo sapiens
  misc_RNA (1)...(19): siRNA sense strand
gaugugagcgagugaaggu

SEQ ID NO: 2183323 - RNA, 19 nt, Homo sapiens
  misc_RNA (1)...(19): siRNA sense strand
ccaaaccaaacaacagcua

SEQ ID NO: 2183324 - RNA, 19 nt, Homo sapiens
  misc_RNA (1)...(19): siRNA sense strand
acagaagauuugcucuaug

SEQ ID NO: 2183325 - RNA, 19 nt, Homo sapiens
  misc_RNA (1)...(19): siRNA sense strand
uaaggcgaaccuccucuuu

SEQ ID NO: 2183326 - RNA, 19 nt, Homo sapiens
  misc_RNA (1)...(19): siRNA sense strand
cgugugcccugcaauguag

SEQ ID NO: 2183327 - RNA, 19 nt, Homo sapiens
  misc_RNA (1)...(19): siRNA sense strand
aaagacaaagcuacucaga

SEQ ID NO: 2183328 - RNA, 19 nt, Homo sapiens
  misc_RNA (1)...(19): siRNA sense strand
cuucaucucccaaaccaaa

SEQ ID NO: 2183329 - RNA, 19 nt, Homo sapiens
  misc_RNA (1)...(19): siRNA sense strand
gcgugugcccugcaaugua

SEQ ID NO: 2183330 - RNA, 19 nt, Homo sapiens
  misc_RNA (1)...(19): siRNA sense strand
gugccaaaaucaucuguuu

SEQ ID NO: 2183331 - RNA, 19 nt, Homo sapiens
  misc_RNA (1)...(19): siRNA sense strand
uaacaaucagucacacuca

SEQ ID NO: 2183332 - RNA, 19 nt, Homo sapiens
  misc_RNA (1)...(19): siRNA sense strand
aaacugaggcagcaacuac

SEQ ID NO: 2183333 - RNA, 19 nt, Homo sapiens
  misc_RNA (1)...(19): siRNA sense strand
gaaccuccucuuuggauac

SEQ ID NO: 2183334 - RNA, 19 nt, Homo sapiens
  misc_RNA (1)...(19): siRNA sense strand
gggauccucauguucacua

SEQ ID NO: 2183335 - RNA, 19 nt, Homo sapiens
  misc_RNA (1)...(19): siRNA sense strand
gcgaaccuccucuuuggau

SEQ ID NO: 2183336 - RNA, 19 nt, Homo sapiens
  misc_RNA (1)...(19): siRNA sense strand
ugaaggucuuugaggaaau

SEQ ID NO: 2183337 - RNA, 19 nt, Homo sapiens
  misc_RNA (1)...(19): siRNA sense strand
aggcgaaccuccucuuugg

SEQ ID NO: 2183338 - RNA, 19 nt, Homo sapiens
  misc_RNA (1)...(19): siRNA sense strand
ggcagaagagggugcagaa

SEQ ID NO: 2183339 - RNA, 19 nt, Homo sapiens
  misc_RNA (1)...(19): siRNA sense strand
aagagcagaucgccaaacu

SEQ ID NO: 2183340 - RNA, 19 nt, Homo sapiens
  misc_RNA (1)...(19): siRNA sense strand
guaguacucgcagcauuga

SEQ ID NO: 2183341 - RNA, 19 nt, Homo sapiens
  misc_RNA (1)...(19): siRNA sense strand
cauauaacaaucagucaca

SEQ ID NO: 2183342 - RNA, 19 nt, Homo sapiens
  misc_RNA (1)...(19): siRNA sense strand
uggcaaccauauaacaauc

SEQ ID NO: 2183343 - RNA, 19 nt, Homo sapiens
  misc_RNA (1)...(19): siRNA sense strand
ggaccucuaguacaauaag

SEQ ID NO: 2183344 - RNA, 19 nt, Homo sapiens
  misc_RNA (1)...(19): siRNA sense strand
gaccuuaugcucaagaacu

SEQ ID NO: 2183345 - RNA, 19 nt, Homo sapiens
  misc_RNA (1)...(19): siRNA sense strand
uuaccugcuucugaccuua

SEQ ID NO: 2183346 - RNA, 19 nt, Homo sapiens
  misc_RNA (1)...(19): siRNA sense strand
cagcucucaucccggguuu

SEQ ID NO: 2183347 - RNA, 19 nt, Homo sapiens
  misc_RNA (1)...(19): siRNA sense strand
cauguucacuacccuucau

SEQ ID NO: 2183348 - RNA, 19 nt, Homo sapiens
  misc_RNA (1)...(19): siRNA sense strand
cauuaccggagcaguagua

SEQ ID NO: 2183349 - RNA, 19 nt, Homo sapiens
  misc_RNA (1)...(19): siRNA sense strand
caaauauaucagugccaaa

SEQ ID NO: 2183350 - RNA, 19 nt, Homo sapiens
  misc_RNA (1)...(19): siRNA sense strand
cagaagagggugcagaaaa

SEQ ID NO: 2183351 - RNA, 19 nt, Homo sapiens
  misc_RNA (1)...(19): siRNA sense strand
guccaggagcgcagcagua

SEQ ID NO: 2183352 - RNA, 19 nt, Homo sapiens
  misc_RNA (1)...(19): siRNA sense strand
caaacugaggcagcaacua

SEQ ID NO: 2183353 - RNA, 19 nt, Homo sapiens
  misc_RNA (1)...(19): siRNA sense strand
gaguagucgucacaguaag

SEQ ID NO: 2183354 - RNA, 19 nt, Homo sapiens
  misc_RNA (1)...(19): siRNA sense strand
ccacgggauccucauguuc

SEQ ID NO: 2183355 - RNA, 19 nt, Homo sapiens
  misc_RNA (1)...(19): siRNA sense strand
augccacugucaaauauau

SEQ ID NO: 2183356 - RNA, 19 nt, Homo sapiens
  misc_RNA (1)...(19): siRNA sense strand
gggagugcugaucaacuaa

SEQ ID NO: 2183357 - RNA, 19 nt, Homo sapiens
  misc_RNA (1)...(19): siRNA sense strand
caucccggguuuccuuuac

SEQ ID NO: 2183358 - RNA, 19 nt, Homo sapiens
  misc_RNA (1)...(19): siRNA sense strand
ugguagcccuugcucaaca

SEQ ID NO: 2183359 - RNA, 19 nt, Homo sapiens
  misc_RNA (1)...(19): siRNA sense strand
acagaguagucgucacagu

SEQ ID NO: 2183360 - RNA, 19 nt, Homo sapiens
  misc_RNA (1)...(19): siRNA sense strand
cagcaaguucggaccucua

SEQ ID NO: 2183361 - RNA, 19 nt, Homo sapiens
  misc_RNA (1)...(19): siRNA sense strand
ggagaaagaucgccaguca

SEQ ID NO: 2183362 - RNA, 19 nt, Homo sapiens
  misc_RNA (1)...(19): siRNA sense strand
cagaagauuugcucuauga

SEQ ID NO: 2183363 - RNA, 19 nt, Homo sapiens
  misc_RNA (1)...(19): siRNA sense strand
gaauaaguccugaauuaga

SEQ ID NO: 2183364 - RNA, 19 nt, Homo sapiens
  misc_RNA (1)...(19): siRNA sense strand
gagcagaucgccaaacuga

SEQ ID NO: 2183365 - RNA, 19 nt, Homo sapiens
  misc_RNA (1)...(19): siRNA sense strand
agacaaagcuacucagaca

SEQ ID NO: 2183366 - RNA, 19 nt, Homo sapiens
  misc_RNA (1)...(19): siRNA sense strand
guucggaccucuaguacaa

SEQ ID NO: 2183367 - RNA, 19 nt, Homo sapiens
  misc_RNA (1)...(19): siRNA sense strand
uuacgucucuuucugauga

SEQ ID NO: 2183368 - RNA, 19 nt, Homo sapiens
  misc_RNA (1)...(19): siRNA sense strand
gcucuaugaucgugauaaa

SEQ ID NO: 2183369 - RNA, 19 nt, Homo sapiens
  misc_RNA (1)...(19): siRNA sense strand
gggaguagcucaccguuac

SEQ ID NO: 2183370 - RNA, 19 nt, Homo sapiens
  misc_RNA (1)...(19): siRNA sense strand
gcucagaacuaugugauca

SEQ ID NO: 2183371 - RNA, 19 nt, Homo sapiens
  misc_RNA (1)...(19): siRNA sense strand
caacagaagauuugcucua

SEQ ID NO: 2183372 - RNA, 19 nt, Homo sapiens
  misc_RNA (1)...(19): siRNA sense strand
gaaggucuuugaggaaaug

SEQ ID NO: 2183373 - RNA, 19 nt, Homo sapiens
  misc_RNA (1)...(19): siRNA sense strand
gcucaccguuacccaagua

SEQ ID NO: 2183374 - RNA, 19 nt, Homo sapiens
  misc_RNA (1)...(19): siRNA sense strand
agaacuaugugaucaucua

SEQ ID NO: 2183375 - RNA, 19 nt, Homo sapiens
  misc_RNA (1)...(19): siRNA sense strand
caaguucggaccucuagua

SEQ ID NO: 2183376 - RNA, 19 nt, Homo sapiens
  misc_RNA (1)...(19): siRNA sense strand
gaacuaugugaucaucuaa

SEQ ID NO: 2183377 - RNA, 19 nt, Homo sapiens
  misc_RNA (1)...(19): siRNA sense strand
ggaucaaggucaguuccua

SEQ ID NO: 2183378 - RNA, 19 nt, Homo sapiens
  misc_RNA (1)...(19): siRNA sense strand
gauaaagacagugggagua

SEQ ID NO: 2183379 - RNA, 19 nt, Homo sapiens
  misc_RNA (1)...(19): siRNA sense strand
gugaaggucuuugaggaaa

SEQ ID NO: 2183380 - RNA, 19 nt, Homo sapiens
  misc_RNA (1)...(19): siRNA sense strand
ggaauaaguccugaauuag

SEQ ID NO: 2183381 - RNA, 19 nt, Homo sapiens
  misc_RNA (1)...(19): siRNA sense strand
cuacaacgcaguaaacaga

SEQ ID NO: 2183382 - RNA, 19 nt, Homo sapiens
  misc_RNA (1)...(19): siRNA sense strand
cagaguagucgucacagua

SEQ ID NO: 2183383 - RNA, 19 nt, Homo sapiens
  misc_RNA (1)...(19): siRNA sense strand
gaugguagcccuugcucaa

SEQ ID NO: 2183384 - RNA, 19 nt, Homo sapiens
  misc_RNA (1)...(19): siRNA sense strand
gcagagcggacaaggcaaa

SEQ ID NO: 2183385 - RNA, 19 nt, Homo sapiens
  misc_RNA (1)...(19): siRNA sense strand
ucagcuuucuguccuguaa

SEQ ID NO: 2183386 - RNA, 19 nt, Homo sapiens
  misc_RNA (1)...(19): siRNA sense strand
ccaaacaacagcuacaugu

SEQ ID NO: 2183387 - RNA, 19 nt, Homo sapiens
  misc_RNA (1)...(19): siRNA sense strand
gaagauuugcucuaugauc

SEQ ID NO: 2183388 - RNA, 19 nt, Homo sapiens
  misc_RNA (1)...(19): siRNA sense strand
cgaaccuccucuuuggaua

SEQ ID NO: 2183389 - RNA, 19 nt, Homo sapiens
  misc_RNA (1)...(19): siRNA sense strand
gcaacuacaacgcaguaaa

SEQ ID NO: 2183390 - RNA, 19 nt, Homo sapiens
  misc_RNA (1)...(19): siRNA sense strand
gaucgccagucaccucuuc

SEQ ID NO: 2183391 - RNA, 19 nt, Homo sapiens
  misc_RNA (1)...(19): siRNA sense strand
ccuaugccacugucaaaua

SEQ ID NO: 2183392 - RNA, 19 nt, Homo sapiens
  misc_RNA (1)...(19): siRNA sense strand
cuaugccacugucaaauau

SEQ ID NO: 2183393 - RNA, 19 nt, Homo sapiens
  misc_RNA (1)...(19): siRNA sense strand
ucggaccucuaguacaaua

SEQ ID NO: 2183394 - RNA, 19 nt, Homo sapiens
  misc_RNA (1)...(19): siRNA sense strand
caauguagaaggaauaagu

SEQ ID NO: 2183395 - RNA, 19 nt, Homo sapiens
  misc_RNA (1)...(19): siRNA sense strand
gcccugcaauguagaagga

SEQ ID NO: 2183396 - RNA, 19 nt, Homo sapiens
  misc_RNA (1)...(19): siRNA sense strand
ucuaugaucgugauaaaga

SEQ ID NO: 2183397 - RNA, 19 nt, Homo sapiens
  misc_RNA (1)...(19): siRNA sense strand
caacgcaguaaacagagua

SEQ ID NO: 2183398 - RNA, 19 nt, Homo sapiens
  misc_RNA (1)...(19): siRNA sense strand
aacagaagauuugcucuau

SEQ ID NO: 2183399 - RNA, 19 nt, Homo sapiens
  misc_RNA (1)...(19): siRNA sense strand
ggaaggaagaaguauccaa

SEQ ID NO: 2183400 - RNA, 19 nt, Homo sapiens
  misc_RNA (1)...(19): siRNA sense strand
gaucaaggucaguuccuau

SEQ ID NO: 2183401 - RNA, 19 nt, Homo sapiens
  misc_RNA (1)...(19): siRNA sense strand
ggggagugcugaucaacua

SEQ ID NO: 2183402 - RNA, 19 nt, Homo sapiens
  misc_RNA (1)...(19): siRNA sense strand
cuucugaccuuaugcucaa

SEQ ID NO: 2183403 - RNA, 19 nt, Homo sapiens
  misc_RNA (1)...(19): siRNA sense strand
ggagugcugaucaacuaaa

SEQ ID NO: 2183404 - RNA, 19 nt, Homo sapiens
  misc_RNA (1)...(19): siRNA sense strand
caacuacaacgcaguaaac

SEQ ID NO: 2183405 - RNA, 19 nt, Homo sapiens
  misc_RNA (1)...(19): siRNA sense strand
gcucagcuuuggcaacucu

SEQ ID NO: 2183406 - RNA, 19 nt, Homo sapiens
  misc_RNA (1)...(19): siRNA sense strand
ggcaaaaucucagcaaguu

SEQ ID NO: 2183407 - RNA, 19 nt, Homo sapiens
  misc_RNA (1)...(19): siRNA sense strand
aacaggaccuuaccucaca

SEQ ID NO: 2183408 - RNA, 19 nt, Homo sapiens
  misc_RNA (1)...(19): siRNA sense strand
agaguagucgucacaguaa

SEQ ID NO: 2183409 - RNA, 19 nt, Homo sapiens
  misc_RNA (1)...(19): siRNA sense strand
aaacagaguagucgucaca

SEQ ID NO: 2183410 - RNA, 19 nt, Homo sapiens
  misc_RNA (1)...(19): siRNA sense strand
cagcaacuacaacgcagua

SEQ ID NO: 2183411 - RNA, 19 nt, Homo sapiens
  misc_RNA (1)...(19): siRNA sense strand
gccacgggauccucauguu

SEQ ID NO: 2183412 - RNA, 19 nt, Homo sapiens
  misc_RNA (1)...(19): siRNA sense strand
uaaugggaaggaagaagua

SEQ ID NO: 2183413 - RNA, 19 nt, Homo sapiens
  misc_RNA (1)...(19): siRNA sense strand
ugaaagacaaagcuacuca

SEQ ID NO: 2183414 - RNA, 19 nt, Homo sapiens
  misc_RNA (1)...(19): siRNA sense strand
ucagaacuaugugaucauc

SEQ ID NO: 2183415 - RNA, 19 nt, Homo sapiens
  misc_RNA (1)...(19): siRNA sense strand
gcagaagagggugcagaaa

SEQ ID NO: 2183416 - RNA, 19 nt, Homo sapiens
  misc_RNA (1)...(19): siRNA sense strand
gcaaccauauaacaaucag

SEQ ID NO: 2183417 - RNA, 19 nt, Homo sapiens
  misc_RNA (1)...(19): siRNA sense strand
gaugugagcgagugaaggu

SEQ ID NO: 2183418 - RNA, 19 nt, Homo sapiens
  misc_RNA (1)...(19): siRNA sense strand
ccaaaccaaacaacagcua

SEQ ID NO: 2183419 - RNA, 19 nt, Homo sapiens
  misc_RNA (1)...(19): siRNA sense strand
acagaagauuugcucuaug

SEQ ID NO: 2183420 - RNA, 19 nt, Homo sapiens
  misc_RNA (1)...(19): siRNA sense strand
uaaggcgaaccuccucuuu

SEQ ID NO: 2183421 - RNA, 19 nt, Homo sapiens
  misc_RNA (1)...(19): siRNA sense strand
cgugugcccugcaauguag

SEQ ID NO: 2183422 - RNA, 19 nt, Homo sapiens
  misc_RNA (1)...(19): siRNA sense strand
aaagacaaagcuacucaga

SEQ ID NO: 2183423 - RNA, 19 nt, Homo sapiens
  misc_RNA (1)...(19): siRNA sense strand
cuucaucucccaaaccaaa

SEQ ID NO: 2183424 - RNA, 19 nt, Homo sapiens
  misc_RNA (1)...(19): siRNA sense strand
gcgugugcccugcaaugua

SEQ ID NO: 2183425 - RNA, 19 nt, Homo sapiens
  misc_RNA (1)...(19): siRNA sense strand
gugccaaaaucaucuguuu

SEQ ID NO: 2183426 - RNA, 19 nt, Homo sapiens
  misc_RNA (1)...(19): siRNA sense strand
uaacaaucagucacacuca

SEQ ID NO: 2183427 - RNA, 19 nt, Homo sapiens
  misc_RNA (1)...(19): siRNA sense strand
aaacugaggcagcaacuac

SEQ ID NO: 2183428 - RNA, 19 nt, Homo sapiens
  misc_RNA (1)...(19): siRNA sense strand
gaaccuccucuuuggauac

SEQ ID NO: 2183429 - RNA, 19 nt, Homo sapiens
  misc_RNA (1)...(19): siRNA sense strand
gggauccucauguucacua

SEQ ID NO: 2183430 - RNA, 19 nt, Homo sapiens
  misc_RNA (1)...(19): siRNA sense strand
gcgaaccuccucuuuggau

SEQ ID NO: 2183431 - RNA, 19 nt, Homo sapiens
  misc_RNA (1)...(19): siRNA sense strand
ugaaggucuuugaggaaau

SEQ ID NO: 2183432 - RNA, 19 nt, Homo sapiens
  misc_RNA (1)...(19): siRNA sense strand
aggcgaaccuccucuuugg

SEQ ID NO: 2183433 - RNA, 19 nt, Homo sapiens
  misc_RNA (1)...(19): siRNA sense strand
ggcagaagagggugcagaa

SEQ ID NO: 2183434 - RNA, 19 nt, Homo sapiens
  misc_RNA (1)...(19): siRNA sense strand
aagagcagaucgccaaacu

SEQ ID NO: 2183435 - RNA, 19 nt, Homo sapiens
  misc_RNA (1)...(19): siRNA sense strand
guaguacucgcagcauuga

SEQ ID NO: 2183436 - RNA, 19 nt, Homo sapiens
  misc_RNA (1)...(19): siRNA sense strand
cauauaacaaucagucaca

SEQ ID NO: 2183437 - RNA, 19 nt, Homo sapiens
  misc_RNA (1)...(19): siRNA sense strand
uggcaaccauauaacaauc

SEQ ID NO: 2183438 - RNA, 19 nt, Homo sapiens
  misc_RNA (1)...(19): siRNA sense strand
ggaccucuaguacaauaag

SEQ ID NO: 2183439 - RNA, 19 nt, Homo sapiens
  misc_RNA (1)...(19): siRNA sense strand
gaccuuaugcucaagaacu

SEQ ID NO: 2183440 - RNA, 19 nt, Homo sapiens
  misc_RNA (1)...(19): siRNA sense strand
uuaccugcuucugaccuua

SEQ ID NO: 2183441 - RNA, 19 nt, Homo sapiens
  misc_RNA (1)...(19): siRNA sense strand
cagcucucaucccggguuu

SEQ ID NO: 2183442 - RNA, 19 nt, Homo sapiens
  misc_RNA (1)...(19): siRNA sense strand
cauguucacuacccuucau

SEQ ID NO: 2183443 - RNA, 19 nt, Homo sapiens
  misc_RNA (1)...(19): siRNA sense strand
cauuaccggagcaguagua

SEQ ID NO: 2183444 - RNA, 19 nt, Homo sapiens
  misc_RNA (1)...(19): siRNA sense strand
caaauauaucagugccaaa

SEQ ID NO: 2183445 - RNA, 19 nt, Homo sapiens
  misc_RNA (1)...(19): siRNA sense strand
cagaagagggugcagaaaa

SEQ ID NO: 2183446 - RNA, 19 nt, Homo sapiens
  misc_RNA (1)...(19): siRNA sense strand
guccaggagcgcagcagua

SEQ ID NO: 2183447 - RNA, 19 nt, Homo sapiens
  misc_RNA (1)...(19): siRNA sense strand
caaacugaggcagcaacua

SEQ ID NO: 2183448 - RNA, 19 nt, Homo sapiens
  misc_RNA (1)...(19): siRNA sense strand
gaguagucgucacaguaag

SEQ ID NO: 2183449 - RNA, 19 nt, Homo sapiens
  misc_RNA (1)...(19): siRNA sense strand
ccacgggauccucauguuc

SEQ ID NO: 2183450 - RNA, 19 nt, Homo sapiens
  misc_RNA (1)...(19): siRNA sense strand
augccacugucaaauauau

SEQ ID NO: 2183451 - RNA, 19 nt, Homo sapiens
  misc_RNA (1)...(19): siRNA sense strand
gggagugcugaucaacuaa

SEQ ID NO: 2183452 - RNA, 19 nt, Homo sapiens
  misc_RNA (1)...(19): siRNA sense strand
caucccggguuuccuuuac

SEQ ID NO: 2183453 - RNA, 19 nt, Homo sapiens
  misc_RNA (1)...(19): siRNA sense strand
ugguagcccuugcucaaca

SEQ ID NO: 2183454 - RNA, 19 nt, Homo sapiens
  misc_RNA (1)...(19): siRNA sense strand
acagaguagucgucacagu

SEQ ID NO: 2183455 - RNA, 19 nt, Homo sapiens
  misc_RNA (1)...(19): siRNA sense strand
cagcaaguucggaccucua

SEQ ID NO: 2183456 - RNA, 19 nt, Homo sapiens
  misc_RNA (1)...(19): siRNA sense strand
ggaauucgcuguccaaaua

SEQ ID NO: 2183457 - RNA, 19 nt, Homo sapiens
  misc_RNA (1)...(19): siRNA sense strand
gaacauuucuuguguagua

SEQ ID NO: 2183458 - RNA, 19 nt, Homo sapiens
  misc_RNA (1)...(19): siRNA sense strand
ggacuacacugcauacuaa

SEQ ID NO: 2183459 - RNA, 19 nt, Homo sapiens
  misc_RNA (1)...(19): siRNA sense strand
gagaagaacuggcagauga

SEQ ID NO: 2183460 - RNA, 19 nt, Homo sapiens
  misc_RNA (1)...(19): siRNA sense strand
ggacagugcuaugaauaua

SEQ ID NO: 2183461 - RNA, 19 nt, Homo sapiens
  misc_RNA (1)...(19): siRNA sense strand
gaacaaauauugggacauc

SEQ ID NO: 2183462 - RNA, 19 nt, Homo sapiens
  misc_RNA (1)...(19): siRNA sense strand
gugaagagccugccuguua

SEQ ID NO: 2183463 - RNA, 19 nt, Homo sapiens
  misc_RNA (1)...(19): siRNA sense strand
ggaauucugugcugacauu

SEQ ID NO: 2183464 - RNA, 19 nt, Homo sapiens
  misc_RNA (1)...(19): siRNA sense strand
caacagugauggagaagaa

SEQ ID NO: 2183465 - RNA, 19 nt, Homo sapiens
  misc_RNA (1)...(19): siRNA sense strand
ggaaggaccugguuucuac

SEQ ID NO: 2183466 - RNA, 19 nt, Homo sapiens
  misc_RNA (1)...(19): siRNA sense strand
ggggaaagcugcugauuua

SEQ ID NO: 2183467 - RNA, 19 nt, Homo sapiens
  misc_RNA (1)...(19): siRNA sense strand
ggaccuaucccuaauacua

SEQ ID NO: 2183468 - RNA, 19 nt, Homo sapiens
  misc_RNA (1)...(19): siRNA sense strand
gcagaauuguuucaaaguu

SEQ ID NO: 2183469 - RNA, 19 nt, Homo sapiens
  misc_RNA (1)...(19): siRNA sense strand
gagaagaaguugacagaca

SEQ ID NO: 2183470 - RNA, 19 nt, Homo sapiens
  misc_RNA (1)...(19): siRNA sense strand
acugaaaccuuuaaccuua

SEQ ID NO: 2183471 - RNA, 19 nt, Homo sapiens
  misc_RNA (1)...(19): siRNA sense strand
gacaagagaacaaauauug

SEQ ID NO: 2183472 - RNA, 19 nt, Homo sapiens
  misc_RNA (1)...(19): siRNA sense strand
caagagaagcuuccaauga

SEQ ID NO: 2183473 - RNA, 19 nt, Homo sapiens
  misc_RNA (1)...(19): siRNA sense strand
gaacaaagaagccucaaag

SEQ ID NO: 2183474 - RNA, 19 nt, Homo sapiens
  misc_RNA (1)...(19): siRNA sense strand
gaaggcaguuuguggaaau

SEQ ID NO: 2183475 - RNA, 19 nt, Homo sapiens
  misc_RNA (1)...(19): siRNA sense strand
ccaggugacuguuauuuga

SEQ ID NO: 2183476 - RNA, 19 nt, Homo sapiens
  misc_RNA (1)...(19): siRNA sense strand
gaacagacaagagaacaaa

SEQ ID NO: 2183477 - RNA, 19 nt, Homo sapiens
  misc_RNA (1)...(19): siRNA sense strand
gaagaaggguacacugaag

SEQ ID NO: 2183478 - RNA, 19 nt, Homo sapiens
  misc_RNA (1)...(19): siRNA sense strand
gaucuaggcuuugguggaa

SEQ ID NO: 2183479 - RNA, 19 nt, Homo sapiens
  misc_RNA (1)...(19): siRNA sense strand
caguugaccugaaauauug

SEQ ID NO: 2183480 - RNA, 19 nt, Homo sapiens
  misc_RNA (1)...(19): siRNA sense strand
gcacuggaccuaucccuaa

SEQ ID NO: 2183481 - RNA, 19 nt, Homo sapiens
  misc_RNA (1)...(19): siRNA sense strand
aaaggaguguccagaauuu

SEQ ID NO: 2183482 - RNA, 19 nt, Homo sapiens
  misc_RNA (1)...(19): siRNA sense strand
caaagccaauggacuuaaa

SEQ ID NO: 2183483 - RNA, 19 nt, Homo sapiens
  misc_RNA (1)...(19): siRNA sense strand
aagaaggacuguauuguga

SEQ ID NO: 2183484 - RNA, 19 nt, Homo sapiens
  misc_RNA (1)...(19): siRNA sense strand
caaagcaguuuccggcaaa

SEQ ID NO: 2183485 - RNA, 19 nt, Homo sapiens
  misc_RNA (1)...(19): siRNA sense strand
gaacuggucagacuguauu

SEQ ID NO: 2183486 - RNA, 19 nt, Homo sapiens
  misc_RNA (1)...(19): siRNA sense strand
gaaagcugcugauuuaagc

SEQ ID NO: 2183487 - RNA, 19 nt, Homo sapiens
  misc_RNA (1)...(19): siRNA sense strand
gcacagauccccucuauga

SEQ ID NO: 2183488 - RNA, 19 nt, Homo sapiens
  misc_RNA (1)...(19): siRNA sense strand
uacaagaacuagagaauca

SEQ ID NO: 2183489 - RNA, 19 nt, Homo sapiens
  misc_RNA (1)...(19): siRNA sense strand
gaagggaccagaacaagga

SEQ ID NO: 2183490 - RNA, 19 nt, Homo sapiens
  misc_RNA (1)...(19): siRNA sense strand
ggaaugcccugugaacugu

SEQ ID NO: 2183491 - RNA, 19 nt, Homo sapiens
  misc_RNA (1)...(19): siRNA sense strand
gaaguacgaagcuguaaug

SEQ ID NO: 2183492 - RNA, 19 nt, Homo sapiens
  misc_RNA (1)...(19): siRNA sense strand
gaagguucguucuaaaugg

SEQ ID NO: 2183493 - RNA, 19 nt, Homo sapiens
  misc_RNA (1)...(19): siRNA sense strand
guacaugucagcugaguga

SEQ ID NO: 2183494 - RNA, 19 nt, Homo sapiens
  misc_RNA (1)...(19): siRNA sense strand
ccagaaagacaaagacauu

SEQ ID NO: 2183495 - RNA, 19 nt, Homo sapiens
  misc_RNA (1)...(19): siRNA sense strand
ugucaaaggucagauggua

SEQ ID NO: 2183496 - RNA, 19 nt, Homo sapiens
  misc_RNA (1)...(19): siRNA sense strand
ccugugaacugucagcuuu

SEQ ID NO: 2183497 - RNA, 19 nt, Homo sapiens
  misc_RNA (1)...(19): siRNA sense strand
cuaaugcuguugagaaaga

SEQ ID NO: 2183498 - RNA, 19 nt, Homo sapiens
  misc_RNA (1)...(19): siRNA sense strand
ccagagagguuaugugcau

SEQ ID NO: 2183499 - RNA, 19 nt, Homo sapiens
  misc_RNA (1)...(19): siRNA sense strand
guccaaaccugacggaguu

SEQ ID NO: 2183500 - RNA, 19 nt, Homo sapiens
  misc_RNA (1)...(19): siRNA sense strand
gaaaguacaaggagacauc

SEQ ID NO: 2183501 - RNA, 19 nt, Homo sapiens
  misc_RNA (1)...(19): siRNA sense strand
caacccaacccuccaguaa

SEQ ID NO: 2183502 - RNA, 19 nt, Homo sapiens
  misc_RNA (1)...(19): siRNA sense strand
cggaggauaucaucuguga

SEQ ID NO: 2183503 - RNA, 19 nt, Homo sapiens
  misc_RNA (1)...(19): siRNA sense strand
ucaaaggucagaugguaua

SEQ ID NO: 2183504 - RNA, 19 nt, Homo sapiens
  misc_RNA (1)...(19): siRNA sense strand
ggaagaucuugcccuaaug

SEQ ID NO: 2183505 - RNA, 19 nt, Homo sapiens
  misc_RNA (1)...(19): siRNA sense strand
ugaagagccugccuguuau

SEQ ID NO: 2183506 - RNA, 19 nt, Homo sapiens
  misc_RNA (1)...(19): siRNA sense strand
gaaaaggaguguccagaau

SEQ ID NO: 2183507 - RNA, 19 nt, Homo sapiens
  misc_RNA (1)...(19): siRNA sense strand
uaucaucugugaguacuuu

SEQ ID NO: 2183508 - RNA, 19 nt, Homo sapiens
  misc_RNA (1)...(19): siRNA sense strand
cugaacauguagaggauua

SEQ ID NO: 2183509 - RNA, 19 nt, Homo sapiens
  misc_RNA (1)...(19): siRNA sense strand
ggaaugcggacaaggauau

SEQ ID NO: 2183510 - RNA, 19 nt, Homo sapiens
  misc_RNA (1)...(19): siRNA sense strand
aaacugcccucacuuacug

SEQ ID NO: 2183511 - RNA, 19 nt, Homo sapiens
  misc_RNA (1)...(19): siRNA sense strand
gagagguuaugugcauuaa

SEQ ID NO: 2183512 - RNA, 19 nt, Homo sapiens
  misc_RNA (1)...(19): siRNA sense strand
cuugagcaaugcacacuua

SEQ ID NO: 2183513 - RNA, 19 nt, Homo sapiens
  misc_RNA (1)...(19): siRNA sense strand
gcgcuuggcuuggagaaga

SEQ ID NO: 2183514 - RNA, 19 nt, Homo sapiens
  misc_RNA (1)...(19): siRNA sense strand
acaaccagcugaugaagga

SEQ ID NO: 2183515 - RNA, 19 nt, Homo sapiens
  misc_RNA (1)...(19): siRNA sense strand
gcucuagagugugcaaauu

SEQ ID NO: 2183516 - RNA, 19 nt, Homo sapiens
  misc_RNA (1)...(19): siRNA sense strand
gaaggggacuccaguauca

SEQ ID NO: 2183517 - RNA, 19 nt, Homo sapiens
  misc_RNA (1)...(19): siRNA sense strand
gagcauccuugcacagugu

SEQ ID NO: 2183518 - RNA, 19 nt, Homo sapiens
  misc_RNA (1)...(19): siRNA sense strand
ucaaggagauggaguuguc

SEQ ID NO: 2183519 - RNA, 19 nt, Homo sapiens
  misc_RNA (1)...(19): siRNA sense strand
gaaacaggcagaacagaca

SEQ ID NO: 2183520 - RNA, 19 nt, Homo sapiens
  misc_RNA (1)...(19): siRNA sense strand
ggucagaugguauaaaugu

SEQ ID NO: 2183521 - RNA, 19 nt, Homo sapiens
  misc_RNA (1)...(19): siRNA sense strand
cgaacaguguggugucaaa

SEQ ID NO: 2183522 - RNA, 19 nt, Homo sapiens
  misc_RNA (1)...(19): siRNA sense strand
guaacagacuggaguacau

SEQ ID NO: 2183523 - RNA, 19 nt, Homo sapiens
  misc_RNA (1)...(19): siRNA sense strand
acaaggauaucguuaccaa

SEQ ID NO: 2183524 - RNA, 19 nt, Homo sapiens
  misc_RNA (1)...(19): siRNA sense strand
gauacgagcacgauccauu

SEQ ID NO: 2183525 - RNA, 19 nt, Homo sapiens
  misc_RNA (1)...(19): siRNA sense strand
gacagaagggaaacagaua

SEQ ID NO: 2183526 - RNA, 19 nt, Homo sapiens
  misc_RNA (1)...(19): siRNA sense strand
ggaaagcugcugauuuaag

SEQ ID NO: 2183527 - RNA, 19 nt, Homo sapiens
  misc_RNA (1)...(19): siRNA sense strand
gaccuggguuuacggugua

SEQ ID NO: 2183528 - RNA, 19 nt, Homo sapiens
  misc_RNA (1)...(19): siRNA sense strand
gauggacagugcuaugaau

SEQ ID NO: 2183529 - RNA, 19 nt, Homo sapiens
  misc_RNA (1)...(19): siRNA sense strand
gaccggugauuauacaaga

SEQ ID NO: 2183530 - RNA, 19 nt, Homo sapiens
  misc_RNA (1)...(19): siRNA sense strand
gauguuggauuguguucga

SEQ ID NO: 2183531 - RNA, 19 nt, Homo sapiens
  misc_RNA (1)...(19): siRNA sense strand
caagaaguacgaagcugua

SEQ ID NO: 2183532 - RNA, 19 nt, Homo sapiens
  misc_RNA (1)...(19): siRNA sense strand
ggagacgcgggaagaauaa

SEQ ID NO: 2183533 - RNA, 19 nt, Homo sapiens
  misc_RNA (1)...(19): siRNA sense strand
uaacagcacccuugagcaa

SEQ ID NO: 2183534 - RNA, 19 nt, Homo sapiens
  misc_RNA (1)...(19): siRNA sense strand
ccagcagaauuguuucaaa

SEQ ID NO: 2183535 - RNA, 19 nt, Homo sapiens
  misc_RNA (1)...(19): siRNA sense strand
cagcagaauuguuucaaag

SEQ ID NO: 2183536 - RNA, 19 nt, Homo sapiens
  misc_RNA (1)...(19): siRNA sense strand
gguggaagacucacaaaug

SEQ ID NO: 2183537 - RNA, 19 nt, Homo sapiens
  misc_RNA (1)...(19): siRNA sense strand
guaaggacacgaaccauca

SEQ ID NO: 2183538 - RNA, 19 nt, Homo sapiens
  misc_RNA (1)...(19): siRNA sense strand
gcccagagcagauguuaga

SEQ ID NO: 2183539 - RNA, 19 nt, Homo sapiens
  misc_RNA (1)...(19): siRNA sense strand
cagcugaccugugugaaug

SEQ ID NO: 2183540 - RNA, 19 nt, Homo sapiens
  misc_RNA (1)...(19): siRNA sense strand
agaaagcgcacucuuguug

SEQ ID NO: 2183541 - RNA, 19 nt, Homo sapiens
  misc_RNA (1)...(19): siRNA sense strand
guggaagacucacaaaugg

SEQ ID NO: 2183542 - RNA, 19 nt, Homo sapiens
  misc_RNA (1)...(19): siRNA sense strand
gccaauggacuuaaaauua

SEQ ID NO: 2183543 - RNA, 19 nt, Homo sapiens
  misc_RNA (1)...(19): siRNA sense strand
gcaaggagacgcgggaaga

SEQ ID NO: 2183544 - RNA, 19 nt, Homo sapiens
  misc_RNA (1)...(19): siRNA sense strand
ucagcaaagugguggauga

SEQ ID NO: 2183545 - RNA, 19 nt, Homo sapiens
  misc_RNA (1)...(19): siRNA sense strand
ggagaagggaccagaacaa

SEQ ID NO: 2183546 - RNA, 19 nt, Homo sapiens
  misc_RNA (1)...(19): siRNA sense strand
aaaccuccucucacaauua

SEQ ID NO: 2183547 - RNA, 19 nt, Homo sapiens
  misc_RNA (1)...(19): siRNA sense strand
cggaaacugcccucacuua

SEQ ID NO: 2183548 - RNA, 19 nt, Homo sapiens
  misc_RNA (1)...(19): siRNA sense strand
gaacucauuauagauggua

SEQ ID NO: 2183549 - RNA, 19 nt, Homo sapiens
  misc_RNA (1)...(19): siRNA sense strand
ugagaugcaugcagaauac

SEQ ID NO: 2183550 - RNA, 19 nt, Homo sapiens
  misc_RNA (1)...(19): siRNA sense strand
ggauaucguuaccaagcaa

SEQ ID NO: 2183551 - RNA, 19 nt, Homo sapiens
  misc_RNA (1)...(19): siRNA sense strand
gaaagccuucgaccugaaa

SEQ ID NO: 2183552 - RNA, 19 nt, Homo sapiens
  misc_RNA (1)...(19): siRNA sense strand
agacagcugugcagagaug

SEQ ID NO: 2183553 - RNA, 19 nt, Homo sapiens
  misc_RNA (1)...(19): siRNA sense strand
gaccugaaauauugugaag

SEQ ID NO: 2183554 - RNA, 19 nt, Homo sapiens
  misc_RNA (1)...(19): siRNA sense strand
ugauggagaugccgacaug

SEQ ID NO: 2183555 - RNA, 19 nt, Homo sapiens
  misc_RNA (1)...(19): siRNA sense strand
gcauuuguguuacucaucu

SEQ ID NO: 2183556 - RNA, 19 nt, Homo sapiens
  misc_RNA (1)...(19): siRNA sense strand
ggaauucgcuguccaaaua

SEQ ID NO: 2183557 - RNA, 19 nt, Homo sapiens
  misc_RNA (1)...(19): siRNA sense strand
gaacauuucuuguguagua

SEQ ID NO: 2183558 - RNA, 19 nt, Homo sapiens
  misc_RNA (1)...(19): siRNA sense strand
ggacuacacugcauacuaa

SEQ ID NO: 2183559 - RNA, 19 nt, Homo sapiens
  misc_RNA (1)...(19): siRNA sense strand
gagaagaacuggcagauga

SEQ ID NO: 2183560 - RNA, 19 nt, Homo sapiens
  misc_RNA (1)...(19): siRNA sense strand
ggacagugcuaugaauaua

SEQ ID NO: 2183561 - RNA, 19 nt, Homo sapiens
  misc_RNA (1)...(19): siRNA sense strand
gaacaaauauugggacauc

SEQ ID NO: 2183562 - RNA, 19 nt, Homo sapiens
  misc_RNA (1)...(19): siRNA sense strand
gugaagagccugccuguua

SEQ ID NO: 2183563 - RNA, 19 nt, Homo sapiens
  misc_RNA (1)...(19): siRNA sense strand
ggaauucugugcugacauu

SEQ ID NO: 2183564 - RNA, 19 nt, Homo sapiens
  misc_RNA (1)...(19): siRNA sense strand
caacagugauggagaagaa

SEQ ID NO: 2183565 - RNA, 19 nt, Homo sapiens
  misc_RNA (1)...(19): siRNA sense strand
ggaaggaccugguuucuac

SEQ ID NO: 2183566 - RNA, 19 nt, Homo sapiens
  misc_RNA (1)...(19): siRNA sense strand
ggggaaagcugcugauuua

SEQ ID NO: 2183567 - RNA, 19 nt, Homo sapiens
  misc_RNA (1)...(19): siRNA sense strand
ggaccuaucccuaauacua

SEQ ID NO: 2183568 - RNA, 19 nt, Homo sapiens
  misc_RNA (1)...(19): siRNA sense strand
gcagaauuguuucaaaguu

SEQ ID NO: 2183569 - RNA, 19 nt, Homo sapiens
  misc_RNA (1)...(19): siRNA sense strand
gagaagaaguugacagaca

SEQ ID NO: 2183570 - RNA, 19 nt, Homo sapiens
  misc_RNA (1)...(19): siRNA sense strand
acugaaaccuuuaaccuua

SEQ ID NO: 2183571 - RNA, 19 nt, Homo sapiens
  misc_RNA (1)...(19): siRNA sense strand
gacaagagaacaaauauug

SEQ ID NO: 2183572 - RNA, 19 nt, Homo sapiens
  misc_RNA (1)...(19): siRNA sense strand
caagagaagcuuccaauga

SEQ ID NO: 2183573 - RNA, 19 nt, Homo sapiens
  misc_RNA (1)...(19): siRNA sense strand
gaacaaagaagccucaaag

SEQ ID NO: 2183574 - RNA, 19 nt, Homo sapiens
  misc_RNA (1)...(19): siRNA sense strand
gaaggcaguuuguggaaau

SEQ ID NO: 2183575 - RNA, 19 nt, Homo sapiens
  misc_RNA (1)...(19): siRNA sense strand
ccaggugacuguuauuuga

SEQ ID NO: 2183576 - RNA, 19 nt, Homo sapiens
  misc_RNA (1)...(19): siRNA sense strand
gaacagacaagagaacaaa

SEQ ID NO: 2183577 - RNA, 19 nt, Homo sapiens
  misc_RNA (1)...(19): siRNA sense strand
gaagaaggguacacugaag

SEQ ID NO: 2183578 - RNA, 19 nt, Homo sapiens
  misc_RNA (1)...(19): siRNA sense strand
gaucuaggcuuugguggaa

SEQ ID NO: 2183579 - RNA, 19 nt, Homo sapiens
  misc_RNA (1)...(19): siRNA sense strand
caguugaccugaaauauug

SEQ ID NO: 2183580 - RNA, 19 nt, Homo sapiens
  misc_RNA (1)...(19): siRNA sense strand
gcacuggaccuaucccuaa

SEQ ID NO: 2183581 - RNA, 19 nt, Homo sapiens
  misc_RNA (1)...(19): siRNA sense strand
aaaggaguguccagaauuu

SEQ ID NO: 2183582 - RNA, 19 nt, Homo sapiens
  misc_RNA (1)...(19): siRNA sense strand
caaagccaauggacuuaaa

SEQ ID NO: 2183583 - RNA, 19 nt, Homo sapiens
  misc_RNA (1)...(19): siRNA sense strand
aagaaggacuguauuguga

SEQ ID NO: 2183584 - RNA, 19 nt, Homo sapiens
  misc_RNA (1)...(19): siRNA sense strand
caaagcaguuuccggcaaa

SEQ ID NO: 2183585 - RNA, 19 nt, Homo sapiens
  misc_RNA (1)...(19): siRNA sense strand
gaacuggucagacuguauu

SEQ ID NO: 2183586 - RNA, 19 nt, Homo sapiens
  misc_RNA (1)...(19): siRNA sense strand
gaaagcugcugauuuaagc

SEQ ID NO: 2183587 - RNA, 19 nt, Homo sapiens
  misc_RNA (1)...(19): siRNA sense strand
gcacagauccccucuauga

SEQ ID NO: 2183588 - RNA, 19 nt, Homo sapiens
  misc_RNA (1)...(19): siRNA sense strand
uacaagaacuagagaauca

SEQ ID NO: 2183589 - RNA, 19 nt, Homo sapiens
  misc_RNA (1)...(19): siRNA sense strand
gaagggaccagaacaagga

SEQ ID NO: 2183590 - RNA, 19 nt, Homo sapiens
  misc_RNA (1)...(19): siRNA sense strand
ggaaugcccugugaacugu

SEQ ID NO: 2183591 - RNA, 19 nt, Homo sapiens
  misc_RNA (1)...(19): siRNA sense strand
gaaguacgaagcuguaaug

SEQ ID NO: 2183592 - RNA, 19 nt, Homo sapiens
  misc_RNA (1)...(19): siRNA sense strand
gaagguucguucuaaaugg

SEQ ID NO: 2183593 - RNA, 19 nt, Homo sapiens
  misc_RNA (1)...(19): siRNA sense strand
guacaugucagcugaguga

SEQ ID NO: 2183594 - RNA, 19 nt, Homo sapiens
  misc_RNA (1)...(19): siRNA sense strand
ccagaaagacaaagacauu

SEQ ID NO: 2183595 - RNA, 19 nt, Homo sapiens
  misc_RNA (1)...(19): siRNA sense strand
ugucaaaggucagauggua

SEQ ID NO: 2183596 - RNA, 19 nt, Homo sapiens
  misc_RNA (1)...(19): siRNA sense strand
ccugugaacugucagcuuu

SEQ ID NO: 2183597 - RNA, 19 nt, Homo sapiens
  misc_RNA (1)...(19): siRNA sense strand
cuaaugcuguugagaaaga

SEQ ID NO: 2183598 - RNA, 19 nt, Homo sapiens
  misc_RNA (1)...(19): siRNA sense strand
ccagagagguuaugugcau

SEQ ID NO: 2183599 - RNA, 19 nt, Homo sapiens
  misc_RNA (1)...(19): siRNA sense strand
guccaaaccugacggaguu

SEQ ID NO: 2183600 - RNA, 19 nt, Homo sapiens
  misc_RNA (1)...(19): siRNA sense strand
gaaaguacaaggagacauc

SEQ ID NO: 2183601 - RNA, 19 nt, Homo sapiens
  misc_RNA (1)...(19): siRNA sense strand
caacccaacccuccaguaa

SEQ ID NO: 2183602 - RNA, 19 nt, Homo sapiens
  misc_RNA (1)...(19): siRNA sense strand
cggaggauaucaucuguga

SEQ ID NO: 2183603 - RNA, 19 nt, Homo sapiens
  misc_RNA (1)...(19): siRNA sense strand
ucaaaggucagaugguaua

SEQ ID NO: 2183604 - RNA, 19 nt, Homo sapiens
  misc_RNA (1)...(19): siRNA sense strand
ggaagaucuugcccuaaug

SEQ ID NO: 2183605 - RNA, 19 nt, Homo sapiens
  misc_RNA (1)...(19): siRNA sense strand
ugaagagccugccuguuau

SEQ ID NO: 2183606 - RNA, 19 nt, Homo sapiens
  misc_RNA (1)...(19): siRNA sense strand
gaaaaggaguguccagaau

SEQ ID NO: 2183607 - RNA, 19 nt, Homo sapiens
  misc_RNA (1)...(19): siRNA sense strand
uaucaucugugaguacuuu

SEQ ID NO: 2183608 - RNA, 19 nt, Homo sapiens
  misc_RNA (1)...(19): siRNA sense strand
cugaacauguagaggauua

SEQ ID NO: 2183609 - RNA, 19 nt, Homo sapiens
  misc_RNA (1)...(19): siRNA sense strand
ggaaugcggacaaggauau

SEQ ID NO: 2183610 - RNA, 19 nt, Homo sapiens
  misc_RNA (1)...(19): siRNA sense strand
aaacugcccucacuuacug

SEQ ID NO: 2183611 - RNA, 19 nt, Homo sapiens
  misc_RNA (1)...(19): siRNA sense strand
gagagguuaugugcauuaa

SEQ ID NO: 2183612 - RNA, 19 nt, Homo sapiens
  misc_RNA (1)...(19): siRNA sense strand
cuugagcaaugcacacuua

SEQ ID NO: 2183613 - RNA, 19 nt, Homo sapiens
  misc_RNA (1)...(19): siRNA sense strand
gcgcuuggcuuggagaaga

SEQ ID NO: 2183614 - RNA, 19 nt, Homo sapiens
  misc_RNA (1)...(19): siRNA sense strand
acaaccagcugaugaagga

SEQ ID NO: 2183615 - RNA, 19 nt, Homo sapiens
  misc_RNA (1)...(19): siRNA sense strand
gcucuagagugugcaaauu

SEQ ID NO: 2183616 - RNA, 19 nt, Homo sapiens
  misc_RNA (1)...(19): siRNA sense strand
gaaggggacuccaguauca

SEQ ID NO: 2183617 - RNA, 19 nt, Homo sapiens
  misc_RNA (1)...(19): siRNA sense strand
gagcauccuugcacagugu

SEQ ID NO: 2183618 - RNA, 19 nt, Homo sapiens
  misc_RNA (1)...(19): siRNA sense strand
ucaaggagauggaguuguc

SEQ ID NO: 2183619 - RNA, 19 nt, Homo sapiens
  misc_RNA (1)...(19): siRNA sense strand
gaaacaggcagaacagaca

SEQ ID NO: 2183620 - RNA, 19 nt, Homo sapiens
  misc_RNA (1)...(19): siRNA sense strand
ggucagaugguauaaaugu

SEQ ID NO: 2183621 - RNA, 19 nt, Homo sapiens
  misc_RNA (1)...(19): siRNA sense strand
cgaacaguguggugucaaa

SEQ ID NO: 2183622 - RNA, 19 nt, Homo sapiens
  misc_RNA (1)...(19): siRNA sense strand
guaacagacuggaguacau

SEQ ID NO: 2183623 - RNA, 19 nt, Homo sapiens
  misc_RNA (1)...(19): siRNA sense strand
acaaggauaucguuaccaa

SEQ ID NO: 2183624 - RNA, 19 nt, Homo sapiens
  misc_RNA (1)...(19): siRNA sense strand
gauacgagcacgauccauu

SEQ ID NO: 2183625 - RNA, 19 nt, Homo sapiens
  misc_RNA (1)...(19): siRNA sense strand
gacagaagggaaacagaua

SEQ ID NO: 2183626 - RNA, 19 nt, Homo sapiens
  misc_RNA (1)...(19): siRNA sense strand
ggaaagcugcugauuuaag

SEQ ID NO: 2183627 - RNA, 19 nt, Homo sapiens
  misc_RNA (1)...(19): siRNA sense strand
gaccuggguuuacggugua

SEQ ID NO: 2183628 - RNA, 19 nt, Homo sapiens
  misc_RNA (1)...(19): siRNA sense strand
gauggacagugcuaugaau

SEQ ID NO: 2183629 - RNA, 19 nt, Homo sapiens
  misc_RNA (1)...(19): siRNA sense strand
gaccggugauuauacaaga

SEQ ID NO: 2183630 - RNA, 19 nt, Homo sapiens
  misc_RNA (1)...(19): siRNA sense strand
gauguuggauuguguucga

SEQ ID NO: 2183631 - RNA, 19 nt, Homo sapiens
  misc_RNA (1)...(19): siRNA sense strand
caagaaguacgaagcugua

SEQ ID NO: 2183632 - RNA, 19 nt, Homo sapiens
  misc_RNA (1)...(19): siRNA sense strand
ggagacgcgggaagaauaa

SEQ ID NO: 2183633 - RNA, 19 nt, Homo sapiens
  misc_RNA (1)...(19): siRNA sense strand
uaacagcacccuugagcaa

SEQ ID NO: 2183634 - RNA, 19 nt, Homo sapiens
  misc_RNA (1)...(19): siRNA sense strand
ccagcagaauuguuucaaa

SEQ ID NO: 2183635 - RNA, 19 nt, Homo sapiens
  misc_RNA (1)...(19): siRNA sense strand
cagcagaauuguuucaaag

SEQ ID NO: 2183636 - RNA, 19 nt, Homo sapiens
  misc_RNA (1)...(19): siRNA sense strand
gguggaagacucacaaaug

SEQ ID NO: 2183637 - RNA, 19 nt, Homo sapiens
  misc_RNA (1)...(19): siRNA sense strand
guaaggacacgaaccauca

SEQ ID NO: 2183638 - RNA, 19 nt, Homo sapiens
  misc_RNA (1)...(19): siRNA sense strand
gcccagagcagauguuaga

SEQ ID NO: 2183639 - RNA, 19 nt, Homo sapiens
  misc_RNA (1)...(19): siRNA sense strand
cagcugaccugugugaaug

SEQ ID NO: 2183640 - RNA, 19 nt, Homo sapiens
  misc_RNA (1)...(19): siRNA sense strand
agaaagcgcacucuuguug

SEQ ID NO: 2183641 - RNA, 19 nt, Homo sapiens
  misc_RNA (1)...(19): siRNA sense strand
guggaagacucacaaaugg

SEQ ID NO: 2183642 - RNA, 19 nt, Homo sapiens
  misc_RNA (1)...(19): siRNA sense strand
gccaauggacuuaaaauua

SEQ ID NO: 2183643 - RNA, 19 nt, Homo sapiens
  misc_RNA (1)...(19): siRNA sense strand
gcaaggagacgcgggaaga

SEQ ID NO: 2183644 - RNA, 19 nt, Homo sapiens
  misc_RNA (1)...(19): siRNA sense strand
ucagcaaagugguggauga

SEQ ID NO: 2183645 - RNA, 19 nt, Homo sapiens
  misc_RNA (1)...(19): siRNA sense strand
ggagaagggaccagaacaa

SEQ ID NO: 2183646 - RNA, 19 nt, Homo sapiens
  misc_RNA (1)...(19): siRNA sense strand
aaaccuccucucacaauua

SEQ ID NO: 2183647 - RNA, 19 nt, Homo sapiens
  misc_RNA (1)...(19): siRNA sense strand
cggaaacugcccucacuua

SEQ ID NO: 2183648 - RNA, 19 nt, Homo sapiens
  misc_RNA (1)...(19): siRNA sense strand
gaacucauuauagauggua

SEQ ID NO: 2183649 - RNA, 19 nt, Homo sapiens
  misc_RNA (1)...(19): siRNA sense strand
ugagaugcaugcagaauac

SEQ ID NO: 2183650 - RNA, 19 nt, Homo sapiens
  misc_RNA (1)...(19): siRNA sense strand
ggauaucguuaccaagcaa

SEQ ID NO: 2183651 - RNA, 19 nt, Homo sapiens
  misc_RNA (1)...(19): siRNA sense strand
gaaagccuucgaccugaaa

SEQ ID NO: 2183652 - RNA, 19 nt, Homo sapiens
  misc_RNA (1)...(19): siRNA sense strand
agacagcugugcagagaug

SEQ ID NO: 2183653 - RNA, 19 nt, Homo sapiens
  misc_RNA (1)...(19): siRNA sense strand
gaccugaaauauugugaag

SEQ ID NO: 2183654 - RNA, 19 nt, Homo sapiens
  misc_RNA (1)...(19): siRNA sense strand
ugauggagaugccgacaug

SEQ ID NO: 2183655 - RNA, 19 nt, Homo sapiens
  misc_RNA (1)...(19): siRNA sense strand
gcauuuguguuacucaucu

SEQ ID NO: 2183656 - RNA, 19 nt, Homo sapiens
  misc_RNA (1)...(19): siRNA sense strand
ugacauaacucaacuaaga

SEQ ID NO: 2183657 - RNA, 19 nt, Homo sapiens
  misc_RNA (1)...(19): siRNA sense strand
caccauagcuugcaaagua

SEQ ID NO: 2183658 - RNA, 19 nt, Homo sapiens
  misc_RNA (1)...(19): siRNA sense strand
ugacagaaaugguguguuu

SEQ ID NO: 2183659 - RNA, 19 nt, Homo sapiens
  misc_RNA (1)...(19): siRNA sense strand
caaggaaguuucuguauga

SEQ ID NO: 2183660 - RNA, 19 nt, Homo sapiens
  misc_RNA (1)...(19): siRNA sense strand
ggaagcaggugaaguaguu

SEQ ID NO: 2183661 - RNA, 19 nt, Homo sapiens
  misc_RNA (1)...(19): siRNA sense strand
gcacaguucucuaucacua

SEQ ID NO: 2183662 - RNA, 19 nt, Homo sapiens
  misc_RNA (1)...(19): siRNA sense strand
gagaugcacuuguuugauu

SEQ ID NO: 2183663 - RNA, 19 nt, Homo sapiens
  misc_RNA (1)...(19): siRNA sense strand
aaacauaucuccaguugug

SEQ ID NO: 2183664 - RNA, 19 nt, Homo sapiens
  misc_RNA (1)...(19): siRNA sense strand
gaaauaacaggaagagaaa

SEQ ID NO: 2183665 - RNA, 19 nt, Homo sapiens
  misc_RNA (1)...(19): siRNA sense strand
ggagaaaggaaagaaauua

SEQ ID NO: 2183666 - RNA, 19 nt, Homo sapiens
  misc_RNA (1)...(19): siRNA sense strand
aaucaagucugcuccuuua

SEQ ID NO: 2183667 - RNA, 19 nt, Homo sapiens
  misc_RNA (1)...(19): siRNA sense strand
gcacaugcccaucagagua

SEQ ID NO: 2183668 - RNA, 19 nt, Homo sapiens
  misc_RNA (1)...(19): siRNA sense strand
gaaagaaugguauguagga

SEQ ID NO: 2183669 - RNA, 19 nt, Homo sapiens
  misc_RNA (1)...(19): siRNA sense strand
ugacaagccacaagauuua

SEQ ID NO: 2183670 - RNA, 19 nt, Homo sapiens
  misc_RNA (1)...(19): siRNA sense strand
ggaagaauugcacaaagua

SEQ ID NO: 2183671 - RNA, 19 nt, Homo sapiens
  misc_RNA (1)...(19): siRNA sense strand
caggacagcuuacaauuuc

SEQ ID NO: 2183672 - RNA, 19 nt, Homo sapiens
  misc_RNA (1)...(19): siRNA sense strand
gguaauguaucuagugguu

SEQ ID NO: 2183673 - RNA, 19 nt, Homo sapiens
  misc_RNA (1)...(19): siRNA sense strand
uagcugauguccuggguua

SEQ ID NO: 2183674 - RNA, 19 nt, Homo sapiens
  misc_RNA (1)...(19): siRNA sense strand
ggaaaccugccuaugauuu

SEQ ID NO: 2183675 - RNA, 19 nt, Homo sapiens
  misc_RNA (1)...(19): siRNA sense strand
caaauuugauugacaugga

SEQ ID NO: 2183676 - RNA, 19 nt, Homo sapiens
  misc_RNA (1)...(19): siRNA sense strand
gacaaagcaagauugauua

SEQ ID NO: 2183677 - RNA, 19 nt, Homo sapiens
  misc_RNA (1)...(19): siRNA sense strand
acagagagaugcacuuguu

SEQ ID NO: 2183678 - RNA, 19 nt, Homo sapiens
  misc_RNA (1)...(19): siRNA sense strand
gaagcaaauuugauugaca

SEQ ID NO: 2183679 - RNA, 19 nt, Homo sapiens
  misc_RNA (1)...(19): siRNA sense strand
gauagugucuuuacaacca

SEQ ID NO: 2183680 - RNA, 19 nt, Homo sapiens
  misc_RNA (1)...(19): siRNA sense strand
caagauugauuacuuccuu

SEQ ID NO: 2183681 - RNA, 19 nt, Homo sapiens
  misc_RNA (1)...(19): siRNA sense strand
caaaguaaaccaucaagga

SEQ ID NO: 2183682 - RNA, 19 nt, Homo sapiens
  misc_RNA (1)...(19): siRNA sense strand
caagucugcuccuuuauca

SEQ ID NO: 2183683 - RNA, 19 nt, Homo sapiens
  misc_RNA (1)...(19): siRNA sense strand
gaaaucaagucugcuccuu

SEQ ID NO: 2183684 - RNA, 19 nt, Homo sapiens
  misc_RNA (1)...(19): siRNA sense strand
caaaggagcaaguaauguu

SEQ ID NO: 2183685 - RNA, 19 nt, Homo sapiens
  misc_RNA (1)...(19): siRNA sense strand
caaaguaugucugaagcaa

SEQ ID NO: 2183686 - RNA, 19 nt, Homo sapiens
  misc_RNA (1)...(19): siRNA sense strand
gccacaagauuuaaguauu

SEQ ID NO: 2183687 - RNA, 19 nt, Homo sapiens
  misc_RNA (1)...(19): siRNA sense strand
cagacuugcuucacaauug

SEQ ID NO: 2183688 - RNA, 19 nt, Homo sapiens
  misc_RNA (1)...(19): siRNA sense strand
gaagauugccacacagaga

SEQ ID NO: 2183689 - RNA, 19 nt, Homo sapiens
  misc_RNA (1)...(19): siRNA sense strand
gaaaauggauugccaagag

SEQ ID NO: 2183690 - RNA, 19 nt, Homo sapiens
  misc_RNA (1)...(19): siRNA sense strand
gcuaaucacugaaagaaaa

SEQ ID NO: 2183691 - RNA, 19 nt, Homo sapiens
  misc_RNA (1)...(19): siRNA sense strand
caaagaaucagagaaaguu

SEQ ID NO: 2183692 - RNA, 19 nt, Homo sapiens
  misc_RNA (1)...(19): siRNA sense strand
agacaaagaaucagagaaa

SEQ ID NO: 2183693 - RNA, 19 nt, Homo sapiens
  misc_RNA (1)...(19): siRNA sense strand
ugacuuauaucuacucagu

SEQ ID NO: 2183694 - RNA, 19 nt, Homo sapiens
  misc_RNA (1)...(19): siRNA sense strand
agacaaagcaagauugauu

SEQ ID NO: 2183695 - RNA, 19 nt, Homo sapiens
  misc_RNA (1)...(19): siRNA sense strand
gaucuuucgugcacuguga

SEQ ID NO: 2183696 - RNA, 19 nt, Homo sapiens
  misc_RNA (1)...(19): siRNA sense strand
aaaggaagauugccacaca

SEQ ID NO: 2183697 - RNA, 19 nt, Homo sapiens
  misc_RNA (1)...(19): siRNA sense strand
guaauaaugcuuccaaagu

SEQ ID NO: 2183698 - RNA, 19 nt, Homo sapiens
  misc_RNA (1)...(19): siRNA sense strand
gaaggagaaaggaaagaaa

SEQ ID NO: 2183699 - RNA, 19 nt, Homo sapiens
  misc_RNA (1)...(19): siRNA sense strand
gaugacauaacucaacuaa

SEQ ID NO: 2183700 - RNA, 19 nt, Homo sapiens
  misc_RNA (1)...(19): siRNA sense strand
agaaauaacaggaagagaa

SEQ ID NO: 2183701 - RNA, 19 nt, Homo sapiens
  misc_RNA (1)...(19): siRNA sense strand
uauuguggcucuucugaaa

SEQ ID NO: 2183702 - RNA, 19 nt, Homo sapiens
  misc_RNA (1)...(19): siRNA sense strand
cagauuguccugccuuuaa

SEQ ID NO: 2183703 - RNA, 19 nt, Homo sapiens
  misc_RNA (1)...(19): siRNA sense strand
gcacaaaguaugucugaag

SEQ ID NO: 2183704 - RNA, 19 nt, Homo sapiens
  misc_RNA (1)...(19): siRNA sense strand
gaagaaggaggaaaucaag

SEQ ID NO: 2183705 - RNA, 19 nt, Homo sapiens
  misc_RNA (1)...(19): siRNA sense strand
cagcuuacaauuucugaua

SEQ ID NO: 2183706 - RNA, 19 nt, Homo sapiens
  misc_RNA (1)...(19): siRNA sense strand
gcuccugccuugauuugaa

SEQ ID NO: 2183707 - RNA, 19 nt, Homo sapiens
  misc_RNA (1)...(19): siRNA sense strand
cagacuuccucaagaaauu

SEQ ID NO: 2183708 - RNA, 19 nt, Homo sapiens
  misc_RNA (1)...(19): siRNA sense strand
gcaaguaauguuuauguca

SEQ ID NO: 2183709 - RNA, 19 nt, Homo sapiens
  misc_RNA (1)...(19): siRNA sense strand
gagcaaguaauguuuaugu

SEQ ID NO: 2183710 - RNA, 19 nt, Homo sapiens
  misc_RNA (1)...(19): siRNA sense strand
ucaaggugauuucaaagga

SEQ ID NO: 2183711 - RNA, 19 nt, Homo sapiens
  misc_RNA (1)...(19): siRNA sense strand
gugaaagaaugguauguag

SEQ ID NO: 2183712 - RNA, 19 nt, Homo sapiens
  misc_RNA (1)...(19): siRNA sense strand
guuggaagcaggugaagua

SEQ ID NO: 2183713 - RNA, 19 nt, Homo sapiens
  misc_RNA (1)...(19): siRNA sense strand
gcaacugcuacauuuauaa

SEQ ID NO: 2183714 - RNA, 19 nt, Homo sapiens
  misc_RNA (1)...(19): siRNA sense strand
uaugucagauagugucuuu

SEQ ID NO: 2183715 - RNA, 19 nt, Homo sapiens
  misc_RNA (1)...(19): siRNA sense strand
guggaaaccugccuaugau

SEQ ID NO: 2183716 - RNA, 19 nt, Homo sapiens
  misc_RNA (1)...(19): siRNA sense strand
acaaggaaguuucuguaug

SEQ ID NO: 2183717 - RNA, 19 nt, Homo sapiens
  misc_RNA (1)...(19): siRNA sense strand
gaaauucuggaagaucuaa

SEQ ID NO: 2183718 - RNA, 19 nt, Homo sapiens
  misc_RNA (1)...(19): siRNA sense strand
uaacugcauucuccacuuc

SEQ ID NO: 2183719 - RNA, 19 nt, Homo sapiens
  misc_RNA (1)...(19): siRNA sense strand
ggagggaacuagcugaaaa

SEQ ID NO: 2183720 - RNA, 19 nt, Homo sapiens
  misc_RNA (1)...(19): siRNA sense strand
gagguaagauuggacuugu

SEQ ID NO: 2183721 - RNA, 19 nt, Homo sapiens
  misc_RNA (1)...(19): siRNA sense strand
gagagaugcacuuguuuga

SEQ ID NO: 2183722 - RNA, 19 nt, Homo sapiens
  misc_RNA (1)...(19): siRNA sense strand
gcacagagagaugcacuug

SEQ ID NO: 2183723 - RNA, 19 nt, Homo sapiens
  misc_RNA (1)...(19): siRNA sense strand
ccaggacagcuuacaauuu

SEQ ID NO: 2183724 - RNA, 19 nt, Homo sapiens
  misc_RNA (1)...(19): siRNA sense strand
caaccucaauacaauggaa

SEQ ID NO: 2183725 - RNA, 19 nt, Homo sapiens
  misc_RNA (1)...(19): siRNA sense strand
gauccuacuacacgacuua

SEQ ID NO: 2183726 - RNA, 19 nt, Homo sapiens
  misc_RNA (1)...(19): siRNA sense strand
acaauuggccggaugcuuu

SEQ ID NO: 2183727 - RNA, 19 nt, Homo sapiens
  misc_RNA (1)...(19): siRNA sense strand
gaagaauugcacaaaguau

SEQ ID NO: 2183728 - RNA, 19 nt, Homo sapiens
  misc_RNA (1)...(19): siRNA sense strand
caaauggaggcauaugaaa

SEQ ID NO: 2183729 - RNA, 19 nt, Homo sapiens
  misc_RNA (1)...(19): siRNA sense strand
aaucagacaucacuguuca

SEQ ID NO: 2183730 - RNA, 19 nt, Homo sapiens
  misc_RNA (1)...(19): siRNA sense strand
guaaauucuuuggagguuu

SEQ ID NO: 2183731 - RNA, 19 nt, Homo sapiens
  misc_RNA (1)...(19): siRNA sense strand
uaaacacuggagagaauua

SEQ ID NO: 2183732 - RNA, 19 nt, Homo sapiens
  misc_RNA (1)...(19): siRNA sense strand
ucacaaagcaacaaaugga

SEQ ID NO: 2183733 - RNA, 19 nt, Homo sapiens
  misc_RNA (1)...(19): siRNA sense strand
aauaaugcuuccaaaguug

SEQ ID NO: 2183734 - RNA, 19 nt, Homo sapiens
  misc_RNA (1)...(19): siRNA sense strand
ucagucagcuuuggacaga

SEQ ID NO: 2183735 - RNA, 19 nt, Homo sapiens
  misc_RNA (1)...(19): siRNA sense strand
caaggagggucaguacaau

SEQ ID NO: 2183736 - RNA, 19 nt, Homo sapiens
  misc_RNA (1)...(19): siRNA sense strand
gaaaauuggggcugaagua

SEQ ID NO: 2183737 - RNA, 19 nt, Homo sapiens
  misc_RNA (1)...(19): siRNA sense strand
uaaaauggcuugguuaagu

SEQ ID NO: 2183738 - RNA, 19 nt, Homo sapiens
  misc_RNA (1)...(19): siRNA sense strand
guaacugcauucuccacuu

SEQ ID NO: 2183739 - RNA, 19 nt, Homo sapiens
  misc_RNA (1)...(19): siRNA sense strand
acuaaacacuggagagaau

SEQ ID NO: 2183740 - RNA, 19 nt, Homo sapiens
  misc_RNA (1)...(19): siRNA sense strand
uaagacaaagcaagauuga

SEQ ID NO: 2183741 - RNA, 19 nt, Homo sapiens
  misc_RNA (1)...(19): siRNA sense strand
gacagaaggagaaaggaaa

SEQ ID NO: 2183742 - RNA, 19 nt, Homo sapiens
  misc_RNA (1)...(19): siRNA sense strand
gcuaagacaaagcaagauu

SEQ ID NO: 2183743 - RNA, 19 nt, Homo sapiens
  misc_RNA (1)...(19): siRNA sense strand
uaggcaaccucaauacaau

SEQ ID NO: 2183744 - RNA, 19 nt, Homo sapiens
  misc_RNA (1)...(19): siRNA sense strand
gcccaucagaguauacaua

SEQ ID NO: 2183745 - RNA, 19 nt, Homo sapiens
  misc_RNA (1)...(19): siRNA sense strand
gaaguuaaaggaagauugc

SEQ ID NO: 2183746 - RNA, 19 nt, Homo sapiens
  misc_RNA (1)...(19): siRNA sense strand
guugcaauauuacagaaug

SEQ ID NO: 2183747 - RNA, 19 nt, Homo sapiens
  misc_RNA (1)...(19): siRNA sense strand
cgacuuagaguggcuuaaa

SEQ ID NO: 2183748 - RNA, 19 nt, Homo sapiens
  misc_RNA (1)...(19): siRNA sense strand
aaauauauccaucccaguu

SEQ ID NO: 2183749 - RNA, 19 nt, Homo sapiens
  misc_RNA (1)...(19): siRNA sense strand
gaacuuauuguggcucuuc

SEQ ID NO: 2183750 - RNA, 19 nt, Homo sapiens
  misc_RNA (1)...(19): siRNA sense strand
acuuauaucuacucaguug

SEQ ID NO: 2183751 - RNA, 19 nt, Homo sapiens
  misc_RNA (1)...(19): siRNA sense strand
caaagugaaagaaugguau

SEQ ID NO: 2183752 - RNA, 19 nt, Homo sapiens
  misc_RNA (1)...(19): siRNA sense strand
gacccagacuugcuucaca

SEQ ID NO: 2183753 - RNA, 19 nt, Homo sapiens
  misc_RNA (1)...(19): siRNA sense strand
gcacgucucauccaagaag

SEQ ID NO: 2183754 - RNA, 19 nt, Homo sapiens
  misc_RNA (1)...(19): siRNA sense strand
gacaaagaaucagagaaag

SEQ ID NO: 2183755 - RNA, 19 nt, Homo sapiens
  misc_RNA (1)...(19): siRNA sense strand
ucagauagugucuuuacaa

SEQ ID NO: 2183756 - RNA, 19 nt, Homo sapiens
  misc_RNA (1)...(19): siRNA sense strand
ugacauaacucaacuaaga

SEQ ID NO: 2183757 - RNA, 19 nt, Homo sapiens
  misc_RNA (1)...(19): siRNA sense strand
caccauagcuugcaaagua

SEQ ID NO: 2183758 - RNA, 19 nt, Homo sapiens
  misc_RNA (1)...(19): siRNA sense strand
ugacagaaaugguguguuu

SEQ ID NO: 2183759 - RNA, 19 nt, Homo sapiens
  misc_RNA (1)...(19): siRNA sense strand
caaggaaguuucuguauga

SEQ ID NO: 2183760 - RNA, 19 nt, Homo sapiens
  misc_RNA (1)...(19): siRNA sense strand
ggaagcaggugaaguaguu

SEQ ID NO: 2183761 - RNA, 19 nt, Homo sapiens
  misc_RNA (1)...(19): siRNA sense strand
gcacaguucucuaucacua

SEQ ID NO: 2183762 - RNA, 19 nt, Homo sapiens
  misc_RNA (1)...(19): siRNA sense strand
gagaugcacuuguuugauu

SEQ ID NO: 2183763 - RNA, 19 nt, Homo sapiens
  misc_RNA (1)...(19): siRNA sense strand
aaacauaucuccaguugug

SEQ ID NO: 2183764 - RNA, 19 nt, Homo sapiens
  misc_RNA (1)...(19): siRNA sense strand
gaaauaacaggaagagaaa

SEQ ID NO: 2183765 - RNA, 19 nt, Homo sapiens
  misc_RNA (1)...(19): siRNA sense strand
ggagaaaggaaagaaauua

SEQ ID NO: 2183766 - RNA, 19 nt, Homo sapiens
  misc_RNA (1)...(19): siRNA sense strand
aaucaagucugcuccuuua

SEQ ID NO: 2183767 - RNA, 19 nt, Homo sapiens
  misc_RNA (1)...(19): siRNA sense strand
gcacaugcccaucagagua

SEQ ID NO: 2183768 - RNA, 19 nt, Homo sapiens
  misc_RNA (1)...(19): siRNA sense strand
gaaagaaugguauguagga

SEQ ID NO: 2183769 - RNA, 19 nt, Homo sapiens
  misc_RNA (1)...(19): siRNA sense strand
ugacaagccacaagauuua

SEQ ID NO: 2183770 - RNA, 19 nt, Homo sapiens
  misc_RNA (1)...(19): siRNA sense strand
ggaagaauugcacaaagua

SEQ ID NO: 2183771 - RNA, 19 nt, Homo sapiens
  misc_RNA (1)...(19): siRNA sense strand
caggacagcuuacaauuuc

SEQ ID NO: 2183772 - RNA, 19 nt, Homo sapiens
  misc_RNA (1)...(19): siRNA sense strand
gguaauguaucuagugguu

SEQ ID NO: 2183773 - RNA, 19 nt, Homo sapiens
  misc_RNA (1)...(19): siRNA sense strand
uagcugauguccuggguua

SEQ ID NO: 2183774 - RNA, 19 nt, Homo sapiens
  misc_RNA (1)...(19): siRNA sense strand
ggaaaccugccuaugauuu

SEQ ID NO: 2183775 - RNA, 19 nt, Homo sapiens
  misc_RNA (1)...(19): siRNA sense strand
caaauuugauugacaugga

SEQ ID NO: 2183776 - RNA, 19 nt, Homo sapiens
  misc_RNA (1)...(19): siRNA sense strand
gacaaagcaagauugauua

SEQ ID NO: 2183777 - RNA, 19 nt, Homo sapiens
  misc_RNA (1)...(19): siRNA sense strand
acagagagaugcacuuguu

SEQ ID NO: 2183778 - RNA, 19 nt, Homo sapiens
  misc_RNA (1)...(19): siRNA sense strand
gaagcaaauuugauugaca

SEQ ID NO: 2183779 - RNA, 19 nt, Homo sapiens
  misc_RNA (1)...(19): siRNA sense strand
gauagugucuuuacaacca

SEQ ID NO: 2183780 - RNA, 19 nt, Homo sapiens
  misc_RNA (1)...(19): siRNA sense strand
caagauugauuacuuccuu

SEQ ID NO: 2183781 - RNA, 19 nt, Homo sapiens
  misc_RNA (1)...(19): siRNA sense strand
caaaguaaaccaucaagga

SEQ ID NO: 2183782 - RNA, 19 nt, Homo sapiens
  misc_RNA (1)...(19): siRNA sense strand
caagucugcuccuuuauca

SEQ ID NO: 2183783 - RNA, 19 nt, Homo sapiens
  misc_RNA (1)...(19): siRNA sense strand
gaaaucaagucugcuccuu

SEQ ID NO: 2183784 - RNA, 19 nt, Homo sapiens
  misc_RNA (1)...(19): siRNA sense strand
caaaggagcaaguaauguu

SEQ ID NO: 2183785 - RNA, 19 nt, Homo sapiens
  misc_RNA (1)...(19): siRNA sense strand
caaaguaugucugaagcaa

SEQ ID NO: 2183786 - RNA, 19 nt, Homo sapiens
  misc_RNA (1)...(19): siRNA sense strand
gccacaagauuuaaguauu

SEQ ID NO: 2183787 - RNA, 19 nt, Homo sapiens
  misc_RNA (1)...(19): siRNA sense strand
cagacuugcuucacaauug

SEQ ID NO: 2183788 - RNA, 19 nt, Homo sapiens
  misc_RNA (1)...(19): siRNA sense strand
gaagauugccacacagaga

SEQ ID NO: 2183789 - RNA, 19 nt, Homo sapiens
  misc_RNA (1)...(19): siRNA sense strand
gaaaauggauugccaagag

SEQ ID NO: 2183790 - RNA, 19 nt, Homo sapiens
  misc_RNA (1)...(19): siRNA sense strand
gcuaaucacugaaagaaaa

SEQ ID NO: 2183791 - RNA, 19 nt, Homo sapiens
  misc_RNA (1)...(19): siRNA sense strand
caaagaaucagagaaaguu

SEQ ID NO: 2183792 - RNA, 19 nt, Homo sapiens
  misc_RNA (1)...(19): siRNA sense strand
agacaaagaaucagagaaa

SEQ ID NO: 2183793 - RNA, 19 nt, Homo sapiens
  misc_RNA (1)...(19): siRNA sense strand
ugacuuauaucuacucagu

SEQ ID NO: 2183794 - RNA, 19 nt, Homo sapiens
  misc_RNA (1)...(19): siRNA sense strand
agacaaagcaagauugauu

SEQ ID NO: 2183795 - RNA, 19 nt, Homo sapiens
  misc_RNA (1)...(19): siRNA sense strand
gaucuuucgugcacuguga

SEQ ID NO: 2183796 - RNA, 19 nt, Homo sapiens
  misc_RNA (1)...(19): siRNA sense strand
aaaggaagauugccacaca

SEQ ID NO: 2183797 - RNA, 19 nt, Homo sapiens
  misc_RNA (1)...(19): siRNA sense strand
guaauaaugcuuccaaagu

SEQ ID NO: 2183798 - RNA, 19 nt, Homo sapiens
  misc_RNA (1)...(19): siRNA sense strand
gaaggagaaaggaaagaaa

SEQ ID NO: 2183799 - RNA, 19 nt, Homo sapiens
  misc_RNA (1)...(19): siRNA sense strand
gaugacauaacucaacuaa

SEQ ID NO: 2183800 - RNA, 19 nt, Homo sapiens
  misc_RNA (1)...(19): siRNA sense strand
agaaauaacaggaagagaa

SEQ ID NO: 2183801 - RNA, 19 nt, Homo sapiens
  misc_RNA (1)...(19): siRNA sense strand
uauuguggcucuucugaaa

SEQ ID NO: 2183802 - RNA, 19 nt, Homo sapiens
  misc_RNA (1)...(19): siRNA sense strand
cagauuguccugccuuuaa

SEQ ID NO: 2183803 - RNA, 19 nt, Homo sapiens
  misc_RNA (1)...(19): siRNA sense strand
gcacaaaguaugucugaag

SEQ ID NO: 2183804 - RNA, 19 nt, Homo sapiens
  misc_RNA (1)...(19): siRNA sense strand
gaagaaggaggaaaucaag

SEQ ID NO: 2183805 - RNA, 19 nt, Homo sapiens
  misc_RNA (1)...(19): siRNA sense strand
cagcuuacaauuucugaua

SEQ ID NO: 2183806 - RNA, 19 nt, Homo sapiens
  misc_RNA (1)...(19): siRNA sense strand
gcuccugccuugauuugaa

SEQ ID NO: 2183807 - RNA, 19 nt, Homo sapiens
  misc_RNA (1)...(19): siRNA sense strand
cagacuuccucaagaaauu

SEQ ID NO: 2183808 - RNA, 19 nt, Homo sapiens
  misc_RNA (1)...(19): siRNA sense strand
gcaaguaauguuuauguca

SEQ ID NO: 2183809 - RNA, 19 nt, Homo sapiens
  misc_RNA (1)...(19): siRNA sense strand
gagcaaguaauguuuaugu

SEQ ID NO: 2183810 - RNA, 19 nt, Homo sapiens
  misc_RNA (1)...(19): siRNA sense strand
ucaaggugauuucaaagga

SEQ ID NO: 2183811 - RNA, 19 nt, Homo sapiens
  misc_RNA (1)...(19): siRNA sense strand
gugaaagaaugguauguag

SEQ ID NO: 2183812 - RNA, 19 nt, Homo sapiens
  misc_RNA (1)...(19): siRNA sense strand
guuggaagcaggugaagua

SEQ ID NO: 2183813 - RNA, 19 nt, Homo sapiens
  misc_RNA (1)...(19): siRNA sense strand
gcaacugcuacauuuauaa

SEQ ID NO: 2183814 - RNA, 19 nt, Homo sapiens
  misc_RNA (1)...(19): siRNA sense strand
uaugucagauagugucuuu

SEQ ID NO: 2183815 - RNA, 19 nt, Homo sapiens
  misc_RNA (1)...(19): siRNA sense strand
guggaaaccugccuaugau

SEQ ID NO: 2183816 - RNA, 19 nt, Homo sapiens
  misc_RNA (1)...(19): siRNA sense strand
acaaggaaguuucuguaug

SEQ ID NO: 2183817 - RNA, 19 nt, Homo sapiens
  misc_RNA (1)...(19): siRNA sense strand
gaaauucuggaagaucuaa

SEQ ID NO: 2183818 - RNA, 19 nt, Homo sapiens
  misc_RNA (1)...(19): siRNA sense strand
uaacugcauucuccacuuc

SEQ ID NO: 2183819 - RNA, 19 nt, Homo sapiens
  misc_RNA (1)...(19): siRNA sense strand
ggagggaacuagcugaaaa

SEQ ID NO: 2183820 - RNA, 19 nt, Homo sapiens
  misc_RNA (1)...(19): siRNA sense strand
gagguaagauuggacuugu

SEQ ID NO: 2183821 - RNA, 19 nt, Homo sapiens
  misc_RNA (1)...(19): siRNA sense strand
gagagaugcacuuguuuga

SEQ ID NO: 2183822 - RNA, 19 nt, Homo sapiens
  misc_RNA (1)...(19): siRNA sense strand
gcacagagagaugcacuug

SEQ ID NO: 2183823 - RNA, 19 nt, Homo sapiens
  misc_RNA (1)...(19): siRNA sense strand
ccaggacagcuuacaauuu

SEQ ID NO: 2183824 - RNA, 19 nt, Homo sapiens
  misc_RNA (1)...(19): siRNA sense strand
caaccucaauacaauggaa

SEQ ID NO: 2183825 - RNA, 19 nt, Homo sapiens
  misc_RNA (1)...(19): siRNA sense strand
gauccuacuacacgacuua

SEQ ID NO: 2183826 - RNA, 19 nt, Homo sapiens
  misc_RNA (1)...(19): siRNA sense strand
acaauuggccggaugcuuu

SEQ ID NO: 2183827 - RNA, 19 nt, Homo sapiens
  misc_RNA (1)...(19): siRNA sense strand
gaagaauugcacaaaguau

SEQ ID NO: 2183828 - RNA, 19 nt, Homo sapiens
  misc_RNA (1)...(19): siRNA sense strand
caaauggaggcauaugaaa

SEQ ID NO: 2183829 - RNA, 19 nt, Homo sapiens
  misc_RNA (1)...(19): siRNA sense strand
aaucagacaucacuguuca

SEQ ID NO: 2183830 - RNA, 19 nt, Homo sapiens
  misc_RNA (1)...(19): siRNA sense strand
guaaauucuuuggagguuu

SEQ ID NO: 2183831 - RNA, 19 nt, Homo sapiens
  misc_RNA (1)...(19): siRNA sense strand
uaaacacuggagagaauua

SEQ ID NO: 2183832 - RNA, 19 nt, Homo sapiens
  misc_RNA (1)...(19): siRNA sense strand
ucacaaagcaacaaaugga

SEQ ID NO: 2183833 - RNA, 19 nt, Homo sapiens
  misc_RNA (1)...(19): siRNA sense strand
aauaaugcuuccaaaguug

SEQ ID NO: 2183834 - RNA, 19 nt, Homo sapiens
  misc_RNA (1)...(19): siRNA sense strand
ucagucagcuuuggacaga

SEQ ID NO: 2183835 - RNA, 19 nt, Homo sapiens
  misc_RNA (1)...(19): siRNA sense strand
caaggagggucaguacaau

SEQ ID NO: 2183836 - RNA, 19 nt, Homo sapiens
  misc_RNA (1)...(19): siRNA sense strand
gaaaauuggggcugaagua

SEQ ID NO: 2183837 - RNA, 19 nt, Homo sapiens
  misc_RNA (1)...(19): siRNA sense strand
uaaaauggcuugguuaagu

SEQ ID NO: 2183838 - RNA, 19 nt, Homo sapiens
  misc_RNA (1)...(19): siRNA sense strand
guaacugcauucuccacuu

SEQ ID NO: 2183839 - RNA, 19 nt, Homo sapiens
  misc_RNA (1)...(19): siRNA sense strand
acuaaacacuggagagaau

SEQ ID NO: 2183840 - RNA, 19 nt, Homo sapiens
  misc_RNA (1)...(19): siRNA sense strand
uaagacaaagcaagauuga

SEQ ID NO: 2183841 - RNA, 19 nt, Homo sapiens
  misc_RNA (1)...(19): siRNA sense strand
gacagaaggagaaaggaaa

SEQ ID NO: 2183842 - RNA, 19 nt, Homo sapiens
  misc_RNA (1)...(19): siRNA sense strand
gcuaagacaaagcaagauu

SEQ ID NO: 2183843 - RNA, 19 nt, Homo sapiens
  misc_RNA (1)...(19): siRNA sense strand
uaggcaaccucaauacaau

SEQ ID NO: 2183844 - RNA, 19 nt, Homo sapiens
  misc_RNA (1)...(19): siRNA sense strand
gcccaucagaguauacaua

SEQ ID NO: 2183845 - RNA, 19 nt, Homo sapiens
  misc_RNA (1)...(19): siRNA sense strand
gaaguuaaaggaagauugc

SEQ ID NO: 2183846 - RNA, 19 nt, Homo sapiens
  misc_RNA (1)...(19): siRNA sense strand
guugcaauauuacagaaug

SEQ ID NO: 2183847 - RNA, 19 nt, Homo sapiens
  misc_RNA (1)...(19): siRNA sense strand
cgacuuagaguggcuuaaa

SEQ ID NO: 2183848 - RNA, 19 nt, Homo sapiens
  misc_RNA (1)...(19): siRNA sense strand
aaauauauccaucccaguu

SEQ ID NO: 2183849 - RNA, 19 nt, Homo sapiens
  misc_RNA (1)...(19): siRNA sense strand
gaacuuauuguggcucuuc

SEQ ID NO: 2183850 - RNA, 19 nt, Homo sapiens
  misc_RNA (1)...(19): siRNA sense strand
acuuauaucuacucaguug

SEQ ID NO: 2183851 - RNA, 19 nt, Homo sapiens
  misc_RNA (1)...(19): siRNA sense strand
caaagugaaagaaugguau

SEQ ID NO: 2183852 - RNA, 19 nt, Homo sapiens
  misc_RNA (1)...(19): siRNA sense strand
gacccagacuugcuucaca

SEQ ID NO: 2183853 - RNA, 19 nt, Homo sapiens
  misc_RNA (1)...(19): siRNA sense strand
gcacgucucauccaagaag

SEQ ID NO: 2183854 - RNA, 19 nt, Homo sapiens
  misc_RNA (1)...(19): siRNA sense strand
gacaaagaaucagagaaag

SEQ ID NO: 2183855 - RNA, 19 nt, Homo sapiens
  misc_RNA (1)...(19): siRNA sense strand
ucagauagugucuuuacaa

SEQ ID NO: 2183856 - RNA, 19 nt, Homo sapiens
  misc_RNA (1)...(19): siRNA sense strand
ugacauaacucaacuaaga

SEQ ID NO: 2183857 - RNA, 19 nt, Homo sapiens
  misc_RNA (1)...(19): siRNA sense strand
caccauagcuugcaaagua

SEQ ID NO: 2183858 - RNA, 19 nt, Homo sapiens
  misc_RNA (1)...(19): siRNA sense strand
ugacagaaaugguguguuu

SEQ ID NO: 2183859 - RNA, 19 nt, Homo sapiens
  misc_RNA (1)...(19): siRNA sense strand
caaggaaguuucuguauga

SEQ ID NO: 2183860 - RNA, 19 nt, Homo sapiens
  misc_RNA (1)...(19): siRNA sense strand
ggaagcaggugaaguaguu

SEQ ID NO: 2183861 - RNA, 19 nt, Homo sapiens
  misc_RNA (1)...(19): siRNA sense strand
gcacaguucucuaucacua

SEQ ID NO: 2183862 - RNA, 19 nt, Homo sapiens
  misc_RNA (1)...(19): siRNA sense strand
gagaugcacuuguuugauu

SEQ ID NO: 2183863 - RNA, 19 nt, Homo sapiens
  misc_RNA (1)...(19): siRNA sense strand
aaacauaucuccaguugug

SEQ ID NO: 2183864 - RNA, 19 nt, Homo sapiens
  misc_RNA (1)...(19): siRNA sense strand
gaaauaacaggaagagaaa

SEQ ID NO: 2183865 - RNA, 19 nt, Homo sapiens
  misc_RNA (1)...(19): siRNA sense strand
ggagaaaggaaagaaauua

SEQ ID NO: 2183866 - RNA, 19 nt, Homo sapiens
  misc_RNA (1)...(19): siRNA sense strand
aaucaagucugcuccuuua

SEQ ID NO: 2183867 - RNA, 19 nt, Homo sapiens
  misc_RNA (1)...(19): siRNA sense strand
gcacaugcccaucagagua

SEQ ID NO: 2183868 - RNA, 19 nt, Homo sapiens
  misc_RNA (1)...(19): siRNA sense strand
gaaagaaugguauguagga

SEQ ID NO: 2183869 - RNA, 19 nt, Homo sapiens
  misc_RNA (1)...(19): siRNA sense strand
ugacaagccacaagauuua

SEQ ID NO: 2183870 - RNA, 19 nt, Homo sapiens
  misc_RNA (1)...(19): siRNA sense strand
ggaagaauugcacaaagua

SEQ ID NO: 2183871 - RNA, 19 nt, Homo sapiens
  misc_RNA (1)...(19): siRNA sense strand
caggacagcuuacaauuuc

SEQ ID NO: 2183872 - RNA, 19 nt, Homo sapiens
  misc_RNA (1)...(19): siRNA sense strand
gguaauguaucuagugguu

SEQ ID NO: 2183873 - RNA, 19 nt, Homo sapiens
  misc_RNA (1)...(19): siRNA sense strand
uagcugauguccuggguua

SEQ ID NO: 2183874 - RNA, 19 nt, Homo sapiens
  misc_RNA (1)...(19): siRNA sense strand
ggaaaccugccuaugauuu

SEQ ID NO: 2183875 - RNA, 19 nt, Homo sapiens
  misc_RNA (1)...(19): siRNA sense strand
caaauuugauugacaugga

SEQ ID NO: 2183876 - RNA, 19 nt, Homo sapiens
  misc_RNA (1)...(19): siRNA sense strand
gacaaagcaagauugauua

SEQ ID NO: 2183877 - RNA, 19 nt, Homo sapiens
  misc_RNA (1)...(19): siRNA sense strand
acagagagaugcacuuguu

SEQ ID NO: 2183878 - RNA, 19 nt, Homo sapiens
  misc_RNA (1)...(19): siRNA sense strand
gaagcaaauuugauugaca

SEQ ID NO: 2183879 - RNA, 19 nt, Homo sapiens
  misc_RNA (1)...(19): siRNA sense strand
gauagugucuuuacaacca

SEQ ID NO: 2183880 - RNA, 19 nt, Homo sapiens
  misc_RNA (1)...(19): siRNA sense strand
caagauugauuacuuccuu

SEQ ID NO: 2183881 - RNA, 19 nt, Homo sapiens
  misc_RNA (1)...(19): siRNA sense strand
caaaguaaaccaucaagga

SEQ ID NO: 2183882 - RNA, 19 nt, Homo sapiens
  misc_RNA (1)...(19): siRNA sense strand
caagucugcuccuuuauca

SEQ ID NO: 2183883 - RNA, 19 nt, Homo sapiens
  misc_RNA (1)...(19): siRNA sense strand
gaaaucaagucugcuccuu

SEQ ID NO: 2183884 - RNA, 19 nt, Homo sapiens
  misc_RNA (1)...(19): siRNA sense strand
caaaggagcaaguaauguu

SEQ ID NO: 2183885 - RNA, 19 nt, Homo sapiens
  misc_RNA (1)...(19): siRNA sense strand
caaaguaugucugaagcaa

SEQ ID NO: 2183886 - RNA, 19 nt, Homo sapiens
  misc_RNA (1)...(19): siRNA sense strand
gccacaagauuuaaguauu

SEQ ID NO: 2183887 - RNA, 19 nt, Homo sapiens
  misc_RNA (1)...(19): siRNA sense strand
cagacuugcuucacaauug

SEQ ID NO: 2183888 - RNA, 19 nt, Homo sapiens
  misc_RNA (1)...(19): siRNA sense strand
gaagauugccacacagaga

SEQ ID NO: 2183889 - RNA, 19 nt, Homo sapiens
  misc_RNA (1)...(19): siRNA sense strand
gaaaauggauugccaagag

SEQ ID NO: 2183890 - RNA, 19 nt, Homo sapiens
  misc_RNA (1)...(19): siRNA sense strand
gcuaaucacugaaagaaaa

SEQ ID NO: 2183891 - RNA, 19 nt, Homo sapiens
  misc_RNA (1)...(19): siRNA sense strand
caaagaaucagagaaaguu

SEQ ID NO: 2183892 - RNA, 19 nt, Homo sapiens
  misc_RNA (1)...(19): siRNA sense strand
agacaaagaaucagagaaa

SEQ ID NO: 2183893 - RNA, 19 nt, Homo sapiens
  misc_RNA (1)...(19): siRNA sense strand
ugacuuauaucuacucagu

SEQ ID NO: 2183894 - RNA, 19 nt, Homo sapiens
  misc_RNA (1)...(19): siRNA sense strand
agacaaagcaagauugauu

SEQ ID NO: 2183895 - RNA, 19 nt, Homo sapiens
  misc_RNA (1)...(19): siRNA sense strand
gaucuuucgugcacuguga

SEQ ID NO: 2183896 - RNA, 19 nt, Homo sapiens
  misc_RNA (1)...(19): siRNA sense strand
aaaggaagauugccacaca

SEQ ID NO: 2183897 - RNA, 19 nt, Homo sapiens
  misc_RNA (1)...(19): siRNA sense strand
guaauaaugcuuccaaagu

SEQ ID NO: 2183898 - RNA, 19 nt, Homo sapiens
  misc_RNA (1)...(19): siRNA sense strand
gaaggagaaaggaaagaaa

SEQ ID NO: 2183899 - RNA, 19 nt, Homo sapiens
  misc_RNA (1)...(19): siRNA sense strand
gaugacauaacucaacuaa

SEQ ID NO: 2183900 - RNA, 19 nt, Homo sapiens
  misc_RNA (1)...(19): siRNA sense strand
agaaauaacaggaagagaa

SEQ ID NO: 2183901 - RNA, 19 nt, Homo sapiens
  misc_RNA (1)...(19): siRNA sense strand
uauuguggcucuucugaaa

SEQ ID NO: 2183902 - RNA, 19 nt, Homo sapiens
  misc_RNA (1)...(19): siRNA sense strand
cagauuguccugccuuuaa

SEQ ID NO: 2183903 - RNA, 19 nt, Homo sapiens
  misc_RNA (1)...(19): siRNA sense strand
gcacaaaguaugucugaag

SEQ ID NO: 2183904 - RNA, 19 nt, Homo sapiens
  misc_RNA (1)...(19): siRNA sense strand
gaagaaggaggaaaucaag

SEQ ID NO: 2183905 - RNA, 19 nt, Homo sapiens
  misc_RNA (1)...(19): siRNA sense strand
cagcuuacaauuucugaua

SEQ ID NO: 2183906 - RNA, 19 nt, Homo sapiens
  misc_RNA (1)...(19): siRNA sense strand
gcuccugccuugauuugaa

SEQ ID NO: 2183907 - RNA, 19 nt, Homo sapiens
  misc_RNA (1)...(19): siRNA sense strand
cagacuuccucaagaaauu

SEQ ID NO: 2183908 - RNA, 19 nt, Homo sapiens
  misc_RNA (1)...(19): siRNA sense strand
gcaaguaauguuuauguca

SEQ ID NO: 2183909 - RNA, 19 nt, Homo sapiens
  misc_RNA (1)...(19): siRNA sense strand
gagcaaguaauguuuaugu

SEQ ID NO: 2183910 - RNA, 19 nt, Homo sapiens
  misc_RNA (1)...(19): siRNA sense strand
ucaaggugauuucaaagga

SEQ ID NO: 2183911 - RNA, 19 nt, Homo sapiens
  misc_RNA (1)...(19): siRNA sense strand
gugaaagaaugguauguag

SEQ ID NO: 2183912 - RNA, 19 nt, Homo sapiens
  misc_RNA (1)...(19): siRNA sense strand
guuggaagcaggugaagua

SEQ ID NO: 2183913 - RNA, 19 nt, Homo sapiens
  misc_RNA (1)...(19): siRNA sense strand
gcaacugcuacauuuauaa

SEQ ID NO: 2183914 - RNA, 19 nt, Homo sapiens
  misc_RNA (1)...(19): siRNA sense strand
uaugucagauagugucuuu

SEQ ID NO: 2183915 - RNA, 19 nt, Homo sapiens
  misc_RNA (1)...(19): siRNA sense strand
guggaaaccugccuaugau

SEQ ID NO: 2183916 - RNA, 19 nt, Homo sapiens
  misc_RNA (1)...(19): siRNA sense strand
acaaggaaguuucuguaug

SEQ ID NO: 2183917 - RNA, 19 nt, Homo sapiens
  misc_RNA (1)...(19): siRNA sense strand
gaaauucuggaagaucuaa

SEQ ID NO: 2183918 - RNA, 19 nt, Homo sapiens
  misc_RNA (1)...(19): siRNA sense strand
uaacugcauucuccacuuc

SEQ ID NO: 2183919 - RNA, 19 nt, Homo sapiens
  misc_RNA (1)...(19): siRNA sense strand
ggagggaacuagcugaaaa

SEQ ID NO: 2183920 - RNA, 19 nt, Homo sapiens
  misc_RNA (1)...(19): siRNA sense strand
gagguaagauuggacuugu

SEQ ID NO: 2183921 - RNA, 19 nt, Homo sapiens
  misc_RNA (1)...(19): siRNA sense strand
gagagaugcacuuguuuga

SEQ ID NO: 2183922 - RNA, 19 nt, Homo sapiens
  misc_RNA (1)...(19): siRNA sense strand
gcacagagagaugcacuug

SEQ ID NO: 2183923 - RNA, 19 nt, Homo sapiens
  misc_RNA (1)...(19): siRNA sense strand
ccaggacagcuuacaauuu

SEQ ID NO: 2183924 - RNA, 19 nt, Homo sapiens
  misc_RNA (1)...(19): siRNA sense strand
caaccucaauacaauggaa

SEQ ID NO: 2183925 - RNA, 19 nt, Homo sapiens
  misc_RNA (1)...(19): siRNA sense strand
gauccuacuacacgacuua

SEQ ID NO: 2183926 - RNA, 19 nt, Homo sapiens
  misc_RNA (1)...(19): siRNA sense strand
acaauuggccggaugcuuu

SEQ ID NO: 2183927 - RNA, 19 nt, Homo sapiens
  misc_RNA (1)...(19): siRNA sense strand
gaagaauugcacaaaguau

SEQ ID NO: 2183928 - RNA, 19 nt, Homo sapiens
  misc_RNA (1)...(19): siRNA sense strand
caaauggaggcauaugaaa

SEQ ID NO: 2183929 - RNA, 19 nt, Homo sapiens
  misc_RNA (1)...(19): siRNA sense strand
aaucagacaucacuguuca

SEQ ID NO: 2183930 - RNA, 19 nt, Homo sapiens
  misc_RNA (1)...(19): siRNA sense strand
guaaauucuuuggagguuu

SEQ ID NO: 2183931 - RNA, 19 nt, Homo sapiens
  misc_RNA (1)...(19): siRNA sense strand
uaaacacuggagagaauua

SEQ ID NO: 2183932 - RNA, 19 nt, Homo sapiens
  misc_RNA (1)...(19): siRNA sense strand
ucacaaagcaacaaaugga

SEQ ID NO: 2183933 - RNA, 19 nt, Homo sapiens
  misc_RNA (1)...(19): siRNA sense strand
aauaaugcuuccaaaguug

SEQ ID NO: 2183934 - RNA, 19 nt, Homo sapiens
  misc_RNA (1)...(19): siRNA sense strand
ucagucagcuuuggacaga

SEQ ID NO: 2183935 - RNA, 19 nt, Homo sapiens
  misc_RNA (1)...(19): siRNA sense strand
caaggagggucaguacaau

SEQ ID NO: 2183936 - RNA, 19 nt, Homo sapiens
  misc_RNA (1)...(19): siRNA sense strand
gaaaauuggggcugaagua

SEQ ID NO: 2183937 - RNA, 19 nt, Homo sapiens
  misc_RNA (1)...(19): siRNA sense strand
uaaaauggcuugguuaagu

SEQ ID NO: 2183938 - RNA, 19 nt, Homo sapiens
  misc_RNA (1)...(19): siRNA sense strand
guaacugcauucuccacuu

SEQ ID NO: 2183939 - RNA, 19 nt, Homo sapiens
  misc_RNA (1)...(19): siRNA sense strand
acuaaacacuggagagaau

SEQ ID NO: 2183940 - RNA, 19 nt, Homo sapiens
  misc_RNA (1)...(19): siRNA sense strand
uaagacaaagcaagauuga

SEQ ID NO: 2183941 - RNA, 19 nt, Homo sapiens
  misc_RNA (1)...(19): siRNA sense strand
gacagaaggagaaaggaaa

SEQ ID NO: 2183942 - RNA, 19 nt, Homo sapiens
  misc_RNA (1)...(19): siRNA sense strand
gcuaagacaaagcaagauu

SEQ ID NO: 2183943 - RNA, 19 nt, Homo sapiens
  misc_RNA (1)...(19): siRNA sense strand
uaggcaaccucaauacaau

SEQ ID NO: 2183944 - RNA, 19 nt, Homo sapiens
  misc_RNA (1)...(19): siRNA sense strand
gcccaucagaguauacaua

SEQ ID NO: 2183945 - RNA, 19 nt, Homo sapiens
  misc_RNA (1)...(19): siRNA sense strand
gaaguuaaaggaagauugc

SEQ ID NO: 2183946 - RNA, 19 nt, Homo sapiens
  misc_RNA (1)...(19): siRNA sense strand
guugcaauauuacagaaug

SEQ ID NO: 2183947 - RNA, 19 nt, Homo sapiens
  misc_RNA (1)...(19): siRNA sense strand
cgacuuagaguggcuuaaa

SEQ ID NO: 2183948 - RNA, 19 nt, Homo sapiens
  misc_RNA (1)...(19): siRNA sense strand
aaauauauccaucccaguu

SEQ ID NO: 2183949 - RNA, 19 nt, Homo sapiens
  misc_RNA (1)...(19): siRNA sense strand
gaacuuauuguggcucuuc

SEQ ID NO: 2183950 - RNA, 19 nt, Homo sapiens
  misc_RNA (1)...(19): siRNA sense strand
acuuauaucuacucaguug

SEQ ID NO: 2183951 - RNA, 19 nt, Homo sapiens
  misc_RNA (1)...(19): siRNA sense strand
caaagugaaagaaugguau

SEQ ID NO: 2183952 - RNA, 19 nt, Homo sapiens
  misc_RNA (1)...(19): siRNA sense strand
gacccagacuugcuucaca

SEQ ID NO: 2183953 - RNA, 19 nt, Homo sapiens
  misc_RNA (1)...(19): siRNA sense strand
gcacgucucauccaagaag

SEQ ID NO: 2183954 - RNA, 19 nt, Homo sapiens
  misc_RNA (1)...(19): siRNA sense strand
gacaaagaaucagagaaag

SEQ ID NO: 2183955 - RNA, 19 nt, Homo sapiens
  misc_RNA (1)...(19): siRNA sense strand
ucagauagugucuuuacaa

SEQ ID NO: 2183956 - RNA, 19 nt, Homo sapiens
  misc_RNA (1)...(19): siRNA sense strand
caacagggauggauuguaa

SEQ ID NO: 2183957 - RNA, 19 nt, Homo sapiens
  misc_RNA (1)...(19): siRNA sense strand
gaaagacgauaccaggaaa

SEQ ID NO: 2183958 - RNA, 19 nt, Homo sapiens
  misc_RNA (1)...(19): siRNA sense strand
gaucugcccugccaaguga

SEQ ID NO: 2183959 - RNA, 19 nt, Homo sapiens
  misc_RNA (1)...(19): siRNA sense strand
gugcagggcuuaccuuuau

SEQ ID NO: 2183960 - RNA, 19 nt, Homo sapiens
  misc_RNA (1)...(19): siRNA sense strand
guagacagcccauuccuaa

SEQ ID NO: 2183961 - RNA, 19 nt, Homo sapiens
  misc_RNA (1)...(19): siRNA sense strand
ccagaaacguuaacagaug

SEQ ID NO: 2183962 - RNA, 19 nt, Homo sapiens
  misc_RNA (1)...(19): siRNA sense strand
ugauauggcuuucuuugaa

SEQ ID NO: 2183963 - RNA, 19 nt, Homo sapiens
  misc_RNA (1)...(19): siRNA sense strand
guagucaaguuucuucauu

SEQ ID NO: 2183964 - RNA, 19 nt, Homo sapiens
  misc_RNA (1)...(19): siRNA sense strand
gaugauggagggaaacuuu

SEQ ID NO: 2183965 - RNA, 19 nt, Homo sapiens
  misc_RNA (1)...(19): siRNA sense strand
caauacauguuccaagugu

SEQ ID NO: 2183966 - RNA, 19 nt, Homo sapiens
  misc_RNA (1)...(19): siRNA sense strand
gggauggauuguaaacuug

SEQ ID NO: 2183967 - RNA, 19 nt, Homo sapiens
  misc_RNA (1)...(19): siRNA sense strand
acacauagguauaaacaac

SEQ ID NO: 2183968 - RNA, 19 nt, Homo sapiens
  misc_RNA (1)...(19): siRNA sense strand
gagaauuguuggugaggau

SEQ ID NO: 2183969 - RNA, 19 nt, Homo sapiens
  misc_RNA (1)...(19): siRNA sense strand
gaugauauggcuuucuuug

SEQ ID NO: 2183970 - RNA, 19 nt, Homo sapiens
  misc_RNA (1)...(19): siRNA sense strand
guacacauagguauaaaca

SEQ ID NO: 2183971 - RNA, 19 nt, Homo sapiens
  misc_RNA (1)...(19): siRNA sense strand
cagaaacguuaacagaugu

SEQ ID NO: 2183972 - RNA, 19 nt, Homo sapiens
  misc_RNA (1)...(19): siRNA sense strand
ucaaguuucuucauuaagg

SEQ ID NO: 2183973 - RNA, 19 nt, Homo sapiens
  misc_RNA (1)...(19): siRNA sense strand
gcugcuaaguggaaaggaa

SEQ ID NO: 2183974 - RNA, 19 nt, Homo sapiens
  misc_RNA (1)...(19): siRNA sense strand
caaguuucuucauuaagga

SEQ ID NO: 2183975 - RNA, 19 nt, Homo sapiens
  misc_RNA (1)...(19): siRNA sense strand
uuccauagcugcuucacuu

SEQ ID NO: 2183976 - RNA, 19 nt, Homo sapiens
  misc_RNA (1)...(19): siRNA sense strand
aaggagaccugaagaggau

SEQ ID NO: 2183977 - RNA, 19 nt, Homo sapiens
  misc_RNA (1)...(19): siRNA sense strand
gguacaaguagucaaguuu

SEQ ID NO: 2183978 - RNA, 19 nt, Homo sapiens
  misc_RNA (1)...(19): siRNA sense strand
gaaagauuggcucaggaaa

SEQ ID NO: 2183979 - RNA, 19 nt, Homo sapiens
  misc_RNA (1)...(19): siRNA sense strand
ggaaacuaagcaagaaaga

SEQ ID NO: 2183980 - RNA, 19 nt, Homo sapiens
  misc_RNA (1)...(19): siRNA sense strand
ugaaagacgauaccaggaa

SEQ ID NO: 2183981 - RNA, 19 nt, Homo sapiens
  misc_RNA (1)...(19): siRNA sense strand
uuucaagcaucaucuaguu

SEQ ID NO: 2183982 - RNA, 19 nt, Homo sapiens
  misc_RNA (1)...(19): siRNA sense strand
ggaaggcuacaugcgguua

SEQ ID NO: 2183983 - RNA, 19 nt, Homo sapiens
  misc_RNA (1)...(19): siRNA sense strand
gcgccuggcuuuacaugca

SEQ ID NO: 2183984 - RNA, 19 nt, Homo sapiens
  misc_RNA (1)...(19): siRNA sense strand
gaaacuaagcaagaaagau

SEQ ID NO: 2183985 - RNA, 19 nt, Homo sapiens
  misc_RNA (1)...(19): siRNA sense strand
gaaaggaaaagcuccauug

SEQ ID NO: 2183986 - RNA, 19 nt, Homo sapiens
  misc_RNA (1)...(19): siRNA sense strand
guacaaguagucaaguuuc

SEQ ID NO: 2183987 - RNA, 19 nt, Homo sapiens
  misc_RNA (1)...(19): siRNA sense strand
agggauggauuguaaacuu

SEQ ID NO: 2183988 - RNA, 19 nt, Homo sapiens
  misc_RNA (1)...(19): siRNA sense strand
gaccugaagaggaugauau

SEQ ID NO: 2183989 - RNA, 19 nt, Homo sapiens
  misc_RNA (1)...(19): siRNA sense strand
ugaggaugauggagggaaa

SEQ ID NO: 2183990 - RNA, 19 nt, Homo sapiens
  misc_RNA (1)...(19): siRNA sense strand
gcaauacauguuccaagug

SEQ ID NO: 2183991 - RNA, 19 nt, Homo sapiens
  misc_RNA (1)...(19): siRNA sense strand
cauagcugcuucacuugug

SEQ ID NO: 2183992 - RNA, 19 nt, Homo sapiens
  misc_RNA (1)...(19): siRNA sense strand
ugcaauacauguuccaagu

SEQ ID NO: 2183993 - RNA, 19 nt, Homo sapiens
  misc_RNA (1)...(19): siRNA sense strand
caaguagucaaguuucuuc

SEQ ID NO: 2183994 - RNA, 19 nt, Homo sapiens
  misc_RNA (1)...(19): siRNA sense strand
gcauuucaagcaucaucua

SEQ ID NO: 2183995 - RNA, 19 nt, Homo sapiens
  misc_RNA (1)...(19): siRNA sense strand
acauaaaacugacuuggaa

SEQ ID NO: 2183996 - RNA, 19 nt, Homo sapiens
  misc_RNA (1)...(19): siRNA sense strand
gacgauaccaggaaaggau

SEQ ID NO: 2183997 - RNA, 19 nt, Homo sapiens
  misc_RNA (1)...(19): siRNA sense strand
gaauuguuggugaggauga

SEQ ID NO: 2183998 - RNA, 19 nt, Homo sapiens
  misc_RNA (1)...(19): siRNA sense strand
aggaugauauggcuuucuu

SEQ ID NO: 2183999 - RNA, 19 nt, Homo sapiens
  misc_RNA (1)...(19): siRNA sense strand
ggauugguguaccuucagu

SEQ ID NO: 2184000 - RNA, 19 nt, Homo sapiens
  misc_RNA (1)...(19): siRNA sense strand
gcuacaugcgguuagauga

SEQ ID NO: 2184001 - RNA, 19 nt, Homo sapiens
  misc_RNA (1)...(19): siRNA sense strand
caagcaucaucuaguucuu

SEQ ID NO: 2184002 - RNA, 19 nt, Homo sapiens
  misc_RNA (1)...(19): siRNA sense strand
gaaaggaugaaaauggaaa

SEQ ID NO: 2184003 - RNA, 19 nt, Homo sapiens
  misc_RNA (1)...(19): siRNA sense strand
gauggauuguaaacuugug

SEQ ID NO: 2184004 - RNA, 19 nt, Homo sapiens
  misc_RNA (1)...(19): siRNA sense strand
ggcuuuacaugcaauacau

SEQ ID NO: 2184005 - RNA, 19 nt, Homo sapiens
  misc_RNA (1)...(19): siRNA sense strand
gcagggcuuaccuuuaugu

SEQ ID NO: 2184006 - RNA, 19 nt, Homo sapiens
  misc_RNA (1)...(19): siRNA sense strand
gaguaccggagaauuguug

SEQ ID NO: 2184007 - RNA, 19 nt, Homo sapiens
  misc_RNA (1)...(19): siRNA sense strand
agaaagauuggcucaggaa

SEQ ID NO: 2184008 - RNA, 19 nt, Homo sapiens
  misc_RNA (1)...(19): siRNA sense strand
cugcuucacuugugcuugu

SEQ ID NO: 2184009 - RNA, 19 nt, Homo sapiens
  misc_RNA (1)...(19): siRNA sense strand
aagaggaugauauggcuuu

SEQ ID NO: 2184010 - RNA, 19 nt, Homo sapiens
  misc_RNA (1)...(19): siRNA sense strand
ggagaccugaagaggauga

SEQ ID NO: 2184011 - RNA, 19 nt, Homo sapiens
  misc_RNA (1)...(19): siRNA sense strand
aguggaaacuaagcaagaa

SEQ ID NO: 2184012 - RNA, 19 nt, Homo sapiens
  misc_RNA (1)...(19): siRNA sense strand
guagguacaaguagucaag

SEQ ID NO: 2184013 - RNA, 19 nt, Homo sapiens
  misc_RNA (1)...(19): siRNA sense strand
ggcaguagacagcccauuc

SEQ ID NO: 2184014 - RNA, 19 nt, Homo sapiens
  misc_RNA (1)...(19): siRNA sense strand
ccucugcgcuuacaaaaca

SEQ ID NO: 2184015 - RNA, 19 nt, Homo sapiens
  misc_RNA (1)...(19): siRNA sense strand
gcgcuuacaaaacagauua

SEQ ID NO: 2184016 - RNA, 19 nt, Homo sapiens
  misc_RNA (1)...(19): siRNA sense strand
ggaguaccggagaauuguu

SEQ ID NO: 2184017 - RNA, 19 nt, Homo sapiens
  misc_RNA (1)...(19): siRNA sense strand
ggaugauauggcuuucuuu

SEQ ID NO: 2184018 - RNA, 19 nt, Homo sapiens
  misc_RNA (1)...(19): siRNA sense strand
ccauugccaucagcuacaa

SEQ ID NO: 2184019 - RNA, 19 nt, Homo sapiens
  misc_RNA (1)...(19): siRNA sense strand
ccaacagggauggauugua

SEQ ID NO: 2184020 - RNA, 19 nt, Homo sapiens
  misc_RNA (1)...(19): siRNA sense strand
ggauggauuguaaacuugu

SEQ ID NO: 2184021 - RNA, 19 nt, Homo sapiens
  misc_RNA (1)...(19): siRNA sense strand
ccaugacacaguaguggaa

SEQ ID NO: 2184022 - RNA, 19 nt, Homo sapiens
  misc_RNA (1)...(19): siRNA sense strand
ucaccaacagggauggauu

SEQ ID NO: 2184023 - RNA, 19 nt, Homo sapiens
  misc_RNA (1)...(19): siRNA sense strand
aaacuugugggcccagaga

SEQ ID NO: 2184024 - RNA, 19 nt, Homo sapiens
  misc_RNA (1)...(19): siRNA sense strand
ugggaggauuaacugguuu

SEQ ID NO: 2184025 - RNA, 19 nt, Homo sapiens
  misc_RNA (1)...(19): siRNA sense strand
gcagccaugggaggauuaa

SEQ ID NO: 2184026 - RNA, 19 nt, Homo sapiens
  misc_RNA (1)...(19): siRNA sense strand
uuccaaguguucaggauuc

SEQ ID NO: 2184027 - RNA, 19 nt, Homo sapiens
  misc_RNA (1)...(19): siRNA sense strand
aaaggcugcuaaguggaaa

SEQ ID NO: 2184028 - RNA, 19 nt, Homo sapiens
  misc_RNA (1)...(19): siRNA sense strand
uacaaguagucaaguuucu

SEQ ID NO: 2184029 - RNA, 19 nt, Homo sapiens
  misc_RNA (1)...(19): siRNA sense strand
uuuagaaucucccauuacg

SEQ ID NO: 2184030 - RNA, 19 nt, Homo sapiens
  misc_RNA (1)...(19): siRNA sense strand
ugacagugggauuggugua

SEQ ID NO: 2184031 - RNA, 19 nt, Homo sapiens
  misc_RNA (1)...(19): siRNA sense strand
caccaacagggauggauug

SEQ ID NO: 2184032 - RNA, 19 nt, Homo sapiens
  misc_RNA (1)...(19): siRNA sense strand
ugggauugguguaccuuca

SEQ ID NO: 2184033 - RNA, 19 nt, Homo sapiens
  misc_RNA (1)...(19): siRNA sense strand
cuccagaaacguuaacaga

SEQ ID NO: 2184034 - RNA, 19 nt, Homo sapiens
  misc_RNA (1)...(19): siRNA sense strand
aaaagcauuucaagcauca

SEQ ID NO: 2184035 - RNA, 19 nt, Homo sapiens
  misc_RNA (1)...(19): siRNA sense strand
agacagcccauuccuaaaa

SEQ ID NO: 2184036 - RNA, 19 nt, Homo sapiens
  misc_RNA (1)...(19): siRNA sense strand
caacagggauggauuguaa

SEQ ID NO: 2184037 - RNA, 19 nt, Homo sapiens
  misc_RNA (1)...(19): siRNA sense strand
gaaagacgauaccaggaaa

SEQ ID NO: 2184038 - RNA, 19 nt, Homo sapiens
  misc_RNA (1)...(19): siRNA sense strand
gaucugcccugccaaguga

SEQ ID NO: 2184039 - RNA, 19 nt, Homo sapiens
  misc_RNA (1)...(19): siRNA sense strand
gugcagggcuuaccuuuau

SEQ ID NO: 2184040 - RNA, 19 nt, Homo sapiens
  misc_RNA (1)...(19): siRNA sense strand
guagacagcccauuccuaa

SEQ ID NO: 2184041 - RNA, 19 nt, Homo sapiens
  misc_RNA (1)...(19): siRNA sense strand
ccagaaacguuaacagaug

SEQ ID NO: 2184042 - RNA, 19 nt, Homo sapiens
  misc_RNA (1)...(19): siRNA sense strand
ugauauggcuuucuuugaa

SEQ ID NO: 2184043 - RNA, 19 nt, Homo sapiens
  misc_RNA (1)...(19): siRNA sense strand
guagucaaguuucuucauu

SEQ ID NO: 2184044 - RNA, 19 nt, Homo sapiens
  misc_RNA (1)...(19): siRNA sense strand
gaugauggagggaaacuuu

SEQ ID NO: 2184045 - RNA, 19 nt, Homo sapiens
  misc_RNA (1)...(19): siRNA sense strand
caauacauguuccaagugu

SEQ ID NO: 2184046 - RNA, 19 nt, Homo sapiens
  misc_RNA (1)...(19): siRNA sense strand
gggauggauuguaaacuug

SEQ ID NO: 2184047 - RNA, 19 nt, Homo sapiens
  misc_RNA (1)...(19): siRNA sense strand
acacauagguauaaacaac

SEQ ID NO: 2184048 - RNA, 19 nt, Homo sapiens
  misc_RNA (1)...(19): siRNA sense strand
gagaauuguuggugaggau

SEQ ID NO: 2184049 - RNA, 19 nt, Homo sapiens
  misc_RNA (1)...(19): siRNA sense strand
gaugauauggcuuucuuug

SEQ ID NO: 2184050 - RNA, 19 nt, Homo sapiens
  misc_RNA (1)...(19): siRNA sense strand
guacacauagguauaaaca

SEQ ID NO: 2184051 - RNA, 19 nt, Homo sapiens
  misc_RNA (1)...(19): siRNA sense strand
cagaaacguuaacagaugu

SEQ ID NO: 2184052 - RNA, 19 nt, Homo sapiens
  misc_RNA (1)...(19): siRNA sense strand
ucaaguuucuucauuaagg

SEQ ID NO: 2184053 - RNA, 19 nt, Homo sapiens
  misc_RNA (1)...(19): siRNA sense strand
gcugcuaaguggaaaggaa

SEQ ID NO: 2184054 - RNA, 19 nt, Homo sapiens
  misc_RNA (1)...(19): siRNA sense strand
caaguuucuucauuaagga

SEQ ID NO: 2184055 - RNA, 19 nt, Homo sapiens
  misc_RNA (1)...(19): siRNA sense strand
uuccauagcugcuucacuu

SEQ ID NO: 2184056 - RNA, 19 nt, Homo sapiens
  misc_RNA (1)...(19): siRNA sense strand
aaggagaccugaagaggau

SEQ ID NO: 2184057 - RNA, 19 nt, Homo sapiens
  misc_RNA (1)...(19): siRNA sense strand
gguacaaguagucaaguuu

SEQ ID NO: 2184058 - RNA, 19 nt, Homo sapiens
  misc_RNA (1)...(19): siRNA sense strand
gaaagauuggcucaggaaa

SEQ ID NO: 2184059 - RNA, 19 nt, Homo sapiens
  misc_RNA (1)...(19): siRNA sense strand
ggaaacuaagcaagaaaga

SEQ ID NO: 2184060 - RNA, 19 nt, Homo sapiens
  misc_RNA (1)...(19): siRNA sense strand
ugaaagacgauaccaggaa

SEQ ID NO: 2184061 - RNA, 19 nt, Homo sapiens
  misc_RNA (1)...(19): siRNA sense strand
uuucaagcaucaucuaguu

SEQ ID NO: 2184062 - RNA, 19 nt, Homo sapiens
  misc_RNA (1)...(19): siRNA sense strand
ggaaggcuacaugcgguua

SEQ ID NO: 2184063 - RNA, 19 nt, Homo sapiens
  misc_RNA (1)...(19): siRNA sense strand
gcgccuggcuuuacaugca

SEQ ID NO: 2184064 - RNA, 19 nt, Homo sapiens
  misc_RNA (1)...(19): siRNA sense strand
gaaacuaagcaagaaagau

SEQ ID NO: 2184065 - RNA, 19 nt, Homo sapiens
  misc_RNA (1)...(19): siRNA sense strand
gaaaggaaaagcuccauug

SEQ ID NO: 2184066 - RNA, 19 nt, Homo sapiens
  misc_RNA (1)...(19): siRNA sense strand
guacaaguagucaaguuuc

SEQ ID NO: 2184067 - RNA, 19 nt, Homo sapiens
  misc_RNA (1)...(19): siRNA sense strand
agggauggauuguaaacuu

SEQ ID NO: 2184068 - RNA, 19 nt, Homo sapiens
  misc_RNA (1)...(19): siRNA sense strand
gaccugaagaggaugauau

SEQ ID NO: 2184069 - RNA, 19 nt, Homo sapiens
  misc_RNA (1)...(19): siRNA sense strand
ugaggaugauggagggaaa

SEQ ID NO: 2184070 - RNA, 19 nt, Homo sapiens
  misc_RNA (1)...(19): siRNA sense strand
gcaauacauguuccaagug

SEQ ID NO: 2184071 - RNA, 19 nt, Homo sapiens
  misc_RNA (1)...(19): siRNA sense strand
cauagcugcuucacuugug

SEQ ID NO: 2184072 - RNA, 19 nt, Homo sapiens
  misc_RNA (1)...(19): siRNA sense strand
ugcaauacauguuccaagu

SEQ ID NO: 2184073 - RNA, 19 nt, Homo sapiens
  misc_RNA (1)...(19): siRNA sense strand
caaguagucaaguuucuuc

SEQ ID NO: 2184074 - RNA, 19 nt, Homo sapiens
  misc_RNA (1)...(19): siRNA sense strand
gcauuucaagcaucaucua

SEQ ID NO: 2184075 - RNA, 19 nt, Homo sapiens
  misc_RNA (1)...(19): siRNA sense strand
acauaaaacugacuuggaa

SEQ ID NO: 2184076 - RNA, 19 nt, Homo sapiens
  misc_RNA (1)...(19): siRNA sense strand
gacgauaccaggaaaggau

SEQ ID NO: 2184077 - RNA, 19 nt, Homo sapiens
  misc_RNA (1)...(19): siRNA sense strand
gaauuguuggugaggauga

SEQ ID NO: 2184078 - RNA, 19 nt, Homo sapiens
  misc_RNA (1)...(19): siRNA sense strand
aggaugauauggcuuucuu

SEQ ID NO: 2184079 - RNA, 19 nt, Homo sapiens
  misc_RNA (1)...(19): siRNA sense strand
ggauugguguaccuucagu

SEQ ID NO: 2184080 - RNA, 19 nt, Homo sapiens
  misc_RNA (1)...(19): siRNA sense strand
gcuacaugcgguuagauga

SEQ ID NO: 2184081 - RNA, 19 nt, Homo sapiens
  misc_RNA (1)...(19): siRNA sense strand
caagcaucaucuaguucuu

SEQ ID NO: 2184082 - RNA, 19 nt, Homo sapiens
  misc_RNA (1)...(19): siRNA sense strand
gaaaggaugaaaauggaaa

SEQ ID NO: 2184083 - RNA, 19 nt, Homo sapiens
  misc_RNA (1)...(19): siRNA sense strand
gauggauuguaaacuugug

SEQ ID NO: 2184084 - RNA, 19 nt, Homo sapiens
  misc_RNA (1)...(19): siRNA sense strand
ggcuuuacaugcaauacau

SEQ ID NO: 2184085 - RNA, 19 nt, Homo sapiens
  misc_RNA (1)...(19): siRNA sense strand
gcagggcuuaccuuuaugu

SEQ ID NO: 2184086 - RNA, 19 nt, Homo sapiens
  misc_RNA (1)...(19): siRNA sense strand
gaguaccggagaauuguug

SEQ ID NO: 2184087 - RNA, 19 nt, Homo sapiens
  misc_RNA (1)...(19): siRNA sense strand
agaaagauuggcucaggaa

SEQ ID NO: 2184088 - RNA, 19 nt, Homo sapiens
  misc_RNA (1)...(19): siRNA sense strand
cugcuucacuugugcuugu

SEQ ID NO: 2184089 - RNA, 19 nt, Homo sapiens
  misc_RNA (1)...(19): siRNA sense strand
aagaggaugauauggcuuu

SEQ ID NO: 2184090 - RNA, 19 nt, Homo sapiens
  misc_RNA (1)...(19): siRNA sense strand
ggagaccugaagaggauga

SEQ ID NO: 2184091 - RNA, 19 nt, Homo sapiens
  misc_RNA (1)...(19): siRNA sense strand
aguggaaacuaagcaagaa

SEQ ID NO: 2184092 - RNA, 19 nt, Homo sapiens
  misc_RNA (1)...(19): siRNA sense strand
guagguacaaguagucaag

SEQ ID NO: 2184093 - RNA, 19 nt, Homo sapiens
  misc_RNA (1)...(19): siRNA sense strand
ggcaguagacagcccauuc

SEQ ID NO: 2184094 - RNA, 19 nt, Homo sapiens
  misc_RNA (1)...(19): siRNA sense strand
ccucugcgcuuacaaaaca

SEQ ID NO: 2184095 - RNA, 19 nt, Homo sapiens
  misc_RNA (1)...(19): siRNA sense strand
gcgcuuacaaaacagauua

SEQ ID NO: 2184096 - RNA, 19 nt, Homo sapiens
  misc_RNA (1)...(19): siRNA sense strand
ggaguaccggagaauuguu

SEQ ID NO: 2184097 - RNA, 19 nt, Homo sapiens
  misc_RNA (1)...(19): siRNA sense strand
ggaugauauggcuuucuuu

SEQ ID NO: 2184098 - RNA, 19 nt, Homo sapiens
  misc_RNA (1)...(19): siRNA sense strand
ccauugccaucagcuacaa

SEQ ID NO: 2184099 - RNA, 19 nt, Homo sapiens
  misc_RNA (1)...(19): siRNA sense strand
ccaacagggauggauugua

SEQ ID NO: 2184100 - RNA, 19 nt, Homo sapiens
  misc_RNA (1)...(19): siRNA sense strand
ggauggauuguaaacuugu

SEQ ID NO: 2184101 - RNA, 19 nt, Homo sapiens
  misc_RNA (1)...(19): siRNA sense strand
ccaugacacaguaguggaa

SEQ ID NO: 2184102 - RNA, 19 nt, Homo sapiens
  misc_RNA (1)...(19): siRNA sense strand
ucaccaacagggauggauu

SEQ ID NO: 2184103 - RNA, 19 nt, Homo sapiens
  misc_RNA (1)...(19): siRNA sense strand
aaacuugugggcccagaga

SEQ ID NO: 2184104 - RNA, 19 nt, Homo sapiens
  misc_RNA (1)...(19): siRNA sense strand
ugggaggauuaacugguuu

SEQ ID NO: 2184105 - RNA, 19 nt, Homo sapiens
  misc_RNA (1)...(19): siRNA sense strand
gcagccaugggaggauuaa

SEQ ID NO: 2184106 - RNA, 19 nt, Homo sapiens
  misc_RNA (1)...(19): siRNA sense strand
uuccaaguguucaggauuc

SEQ ID NO: 2184107 - RNA, 19 nt, Homo sapiens
  misc_RNA (1)...(19): siRNA sense strand
aaaggcugcuaaguggaaa

SEQ ID NO: 2184108 - RNA, 19 nt, Homo sapiens
  misc_RNA (1)...(19): siRNA sense strand
uacaaguagucaaguuucu

SEQ ID NO: 2184109 - RNA, 19 nt, Homo sapiens
  misc_RNA (1)...(19): siRNA sense strand
uuuagaaucucccauuacg

SEQ ID NO: 2184110 - RNA, 19 nt, Homo sapiens
  misc_RNA (1)...(19): siRNA sense strand
ugacagugggauuggugua

SEQ ID NO: 2184111 - RNA, 19 nt, Homo sapiens
  misc_RNA (1)...(19): siRNA sense strand
caccaacagggauggauug

SEQ ID NO: 2184112 - RNA, 19 nt, Homo sapiens
  misc_RNA (1)...(19): siRNA sense strand
ugggauugguguaccuuca

SEQ ID NO: 2184113 - RNA, 19 nt, Homo sapiens
  misc_RNA (1)...(19): siRNA sense strand
cuccagaaacguuaacaga

SEQ ID NO: 2184114 - RNA, 19 nt, Homo sapiens
  misc_RNA (1)...(19): siRNA sense strand
aaaagcauuucaagcauca

SEQ ID NO: 2184115 - RNA, 19 nt, Homo sapiens
  misc_RNA (1)...(19): siRNA sense strand
agacagcccauuccuaaaa

SEQ ID NO: 2184116 - RNA, 19 nt, Homo sapiens
  misc_RNA (1)...(19): siRNA sense strand
caaagcagauggagucuua

SEQ ID NO: 2184117 - RNA, 19 nt, Homo sapiens
  misc_RNA (1)...(19): siRNA sense strand
gaaaugaucuucgaaaggu

SEQ ID NO: 2184118 - RNA, 19 nt, Homo sapiens
  misc_RNA (1)...(19): siRNA sense strand
agaaagggcuuaaagaaga

SEQ ID NO: 2184119 - RNA, 19 nt, Homo sapiens
  misc_RNA (1)...(19): siRNA sense strand
gaaggucccugagcucuuu

SEQ ID NO: 2184120 - RNA, 19 nt, Homo sapiens
  misc_RNA (1)...(19): siRNA sense strand
uauaugaccuuucagauga

SEQ ID NO: 2184121 - RNA, 19 nt, Homo sapiens
  misc_RNA (1)...(19): siRNA sense strand
caacagaaaugaucuucga

SEQ ID NO: 2184122 - RNA, 19 nt, Homo sapiens
  misc_RNA (1)...(19): siRNA sense strand
ggaaauacggcuaacaauu

SEQ ID NO: 2184123 - RNA, 19 nt, Homo sapiens
  misc_RNA (1)...(19): siRNA sense strand
gagauguacuugguaauuu

SEQ ID NO: 2184124 - RNA, 19 nt, Homo sapiens
  misc_RNA (1)...(19): siRNA sense strand
gcagaaagggcuuaaagaa

SEQ ID NO: 2184125 - RNA, 19 nt, Homo sapiens
  misc_RNA (1)...(19): siRNA sense strand
agacuacacugguaaauau

SEQ ID NO: 2184126 - RNA, 19 nt, Homo sapiens
  misc_RNA (1)...(19): siRNA sense strand
caacaaagcauucaucagu

SEQ ID NO: 2184127 - RNA, 19 nt, Homo sapiens
  misc_RNA (1)...(19): siRNA sense strand
gccaaagucuggucugauu

SEQ ID NO: 2184128 - RNA, 19 nt, Homo sapiens
  misc_RNA (1)...(19): siRNA sense strand
gaacaucauugucagaaac

SEQ ID NO: 2184129 - RNA, 19 nt, Homo sapiens
  misc_RNA (1)...(19): siRNA sense strand
gaaauaaagacccuucugu

SEQ ID NO: 2184130 - RNA, 19 nt, Homo sapiens
  misc_RNA (1)...(19): siRNA sense strand
acaaagcauucaucaguuu

SEQ ID NO: 2184131 - RNA, 19 nt, Homo sapiens
  misc_RNA (1)...(19): siRNA sense strand
gcagauggagucuuagaaa

SEQ ID NO: 2184132 - RNA, 19 nt, Homo sapiens
  misc_RNA (1)...(19): siRNA sense strand
gcacauggcuacuguacac

SEQ ID NO: 2184133 - RNA, 19 nt, Homo sapiens
  misc_RNA (1)...(19): siRNA sense strand
uaaagacccuucuguuugg

SEQ ID NO: 2184134 - RNA, 19 nt, Homo sapiens
  misc_RNA (1)...(19): siRNA sense strand
gggugaaacuccuguguug

SEQ ID NO: 2184135 - RNA, 19 nt, Homo sapiens
  misc_RNA (1)...(19): siRNA sense strand
uaacacagccucauuaaaa

SEQ ID NO: 2184136 - RNA, 19 nt, Homo sapiens
  misc_RNA (1)...(19): siRNA sense strand
gagacuacacugguaaaua

SEQ ID NO: 2184137 - RNA, 19 nt, Homo sapiens
  misc_RNA (1)...(19): siRNA sense strand
ggagauguacuugguaauu

SEQ ID NO: 2184138 - RNA, 19 nt, Homo sapiens
  misc_RNA (1)...(19): siRNA sense strand
uagaaacacuuacgcuuca

SEQ ID NO: 2184139 - RNA, 19 nt, Homo sapiens
  misc_RNA (1)...(19): siRNA sense strand
uaacaaagugccaucaaga

SEQ ID NO: 2184140 - RNA, 19 nt, Homo sapiens
  misc_RNA (1)...(19): siRNA sense strand
aauaaagacccuucuguuu

SEQ ID NO: 2184141 - RNA, 19 nt, Homo sapiens
  misc_RNA (1)...(19): siRNA sense strand
ggugguaauuccaggauga

SEQ ID NO: 2184142 - RNA, 19 nt, Homo sapiens
  misc_RNA (1)...(19): siRNA sense strand
cacaggaacuugucaaucu

SEQ ID NO: 2184143 - RNA, 19 nt, Homo sapiens
  misc_RNA (1)...(19): siRNA sense strand
cacuuacgcuucacaguuu

SEQ ID NO: 2184144 - RNA, 19 nt, Homo sapiens
  misc_RNA (1)...(19): siRNA sense strand
cuggaucacuuuggaaaua

SEQ ID NO: 2184145 - RNA, 19 nt, Homo sapiens
  misc_RNA (1)...(19): siRNA sense strand
gaagaugcaggauggagaa

SEQ ID NO: 2184146 - RNA, 19 nt, Homo sapiens
  misc_RNA (1)...(19): siRNA sense strand
gcauaaacaacagaaauga

SEQ ID NO: 2184147 - RNA, 19 nt, Homo sapiens
  misc_RNA (1)...(19): siRNA sense strand
gaaauacaaagcagaugga

SEQ ID NO: 2184148 - RNA, 19 nt, Homo sapiens
  misc_RNA (1)...(19): siRNA sense strand
ucaagaugcucagagacua

SEQ ID NO: 2184149 - RNA, 19 nt, Homo sapiens
  misc_RNA (1)...(19): siRNA sense strand
gauacuuucuggaucacuu

SEQ ID NO: 2184150 - RNA, 19 nt, Homo sapiens
  misc_RNA (1)...(19): siRNA sense strand
gcuaacaauuucacucaag

SEQ ID NO: 2184151 - RNA, 19 nt, Homo sapiens
  misc_RNA (1)...(19): siRNA sense strand
augaggaccuggugacuuu

SEQ ID NO: 2184152 - RNA, 19 nt, Homo sapiens
  misc_RNA (1)...(19): siRNA sense strand
auaaagacccuucuguuug

SEQ ID NO: 2184153 - RNA, 19 nt, Homo sapiens
  misc_RNA (1)...(19): siRNA sense strand
uuagugaacugaccguaga

SEQ ID NO: 2184154 - RNA, 19 nt, Homo sapiens
  misc_RNA (1)...(19): siRNA sense strand
cagaaaugaucuucgaaag

SEQ ID NO: 2184155 - RNA, 19 nt, Homo sapiens
  misc_RNA (1)...(19): siRNA sense strand
caucagugcucaaguugca

SEQ ID NO: 2184156 - RNA, 19 nt, Homo sapiens
  misc_RNA (1)...(19): siRNA sense strand
gagaacaaggcaaaggaaa

SEQ ID NO: 2184157 - RNA, 19 nt, Homo sapiens
  misc_RNA (1)...(19): siRNA sense strand
gaaagggcuuaaagaagac

SEQ ID NO: 2184158 - RNA, 19 nt, Homo sapiens
  misc_RNA (1)...(19): siRNA sense strand
ucgaggauguggaggauga

SEQ ID NO: 2184159 - RNA, 19 nt, Homo sapiens
  misc_RNA (1)...(19): siRNA sense strand
cuaacaauuucacucaaga

SEQ ID NO: 2184160 - RNA, 19 nt, Homo sapiens
  misc_RNA (1)...(19): siRNA sense strand
ggagaacaaggcaaaggaa

SEQ ID NO: 2184161 - RNA, 19 nt, Homo sapiens
  misc_RNA (1)...(19): siRNA sense strand
acacagcaguucaguccaa

SEQ ID NO: 2184162 - RNA, 19 nt, Homo sapiens
  misc_RNA (1)...(19): siRNA sense strand
ccaauugaccucucaguag

SEQ ID NO: 2184163 - RNA, 19 nt, Homo sapiens
  misc_RNA (1)...(19): siRNA sense strand
cuacuugccuggugguaau

SEQ ID NO: 2184164 - RNA, 19 nt, Homo sapiens
  misc_RNA (1)...(19): siRNA sense strand
ugaagaggaugggagagaa

SEQ ID NO: 2184165 - RNA, 19 nt, Homo sapiens
  misc_RNA (1)...(19): siRNA sense strand
gagaacaucauugucagaa

SEQ ID NO: 2184166 - RNA, 19 nt, Homo sapiens
  misc_RNA (1)...(19): siRNA sense strand
uuaaagaagacauguguga

SEQ ID NO: 2184167 - RNA, 19 nt, Homo sapiens
  misc_RNA (1)...(19): siRNA sense strand
gaacucaucaccagauacu

SEQ ID NO: 2184168 - RNA, 19 nt, Homo sapiens
  misc_RNA (1)...(19): siRNA sense strand
aaacuccuguguugacuuc

SEQ ID NO: 2184169 - RNA, 19 nt, Homo sapiens
  misc_RNA (1)...(19): siRNA sense strand
gggagaagauagacaagcu

SEQ ID NO: 2184170 - RNA, 19 nt, Homo sapiens
  misc_RNA (1)...(19): siRNA sense strand
guaacacagccucauuaaa

SEQ ID NO: 2184171 - RNA, 19 nt, Homo sapiens
  misc_RNA (1)...(19): siRNA sense strand
aaauaaagacccuucuguu

SEQ ID NO: 2184172 - RNA, 19 nt, Homo sapiens
  misc_RNA (1)...(19): siRNA sense strand
gggaguuccucagcagaaa

SEQ ID NO: 2184173 - RNA, 19 nt, Homo sapiens
  misc_RNA (1)...(19): siRNA sense strand
uaguaacacagccucauua

SEQ ID NO: 2184174 - RNA, 19 nt, Homo sapiens
  misc_RNA (1)...(19): siRNA sense strand
gaugcaggauggagaacau

SEQ ID NO: 2184175 - RNA, 19 nt, Homo sapiens
  misc_RNA (1)...(19): siRNA sense strand
ggaaauaaagacccuucug

SEQ ID NO: 2184176 - RNA, 19 nt, Homo sapiens
  misc_RNA (1)...(19): siRNA sense strand
gagccuuccuuggauguga

SEQ ID NO: 2184177 - RNA, 19 nt, Homo sapiens
  misc_RNA (1)...(19): siRNA sense strand
cccaaucccugcacucuca

SEQ ID NO: 2184178 - RNA, 19 nt, Homo sapiens
  misc_RNA (1)...(19): siRNA sense strand
aacaaagcauucaucaguu

SEQ ID NO: 2184179 - RNA, 19 nt, Homo sapiens
  misc_RNA (1)...(19): siRNA sense strand
cagcauaaacaacagaaau

SEQ ID NO: 2184180 - RNA, 19 nt, Homo sapiens
  misc_RNA (1)...(19): siRNA sense strand
gaagaggaugggagagaau

SEQ ID NO: 2184181 - RNA, 19 nt, Homo sapiens
  misc_RNA (1)...(19): siRNA sense strand
ggauguggaggaugaguug

SEQ ID NO: 2184182 - RNA, 19 nt, Homo sapiens
  misc_RNA (1)...(19): siRNA sense strand
acucucaguuccaaagaaa

SEQ ID NO: 2184183 - RNA, 19 nt, Homo sapiens
  misc_RNA (1)...(19): siRNA sense strand
gaccucagcauaaacaaca

SEQ ID NO: 2184184 - RNA, 19 nt, Homo sapiens
  misc_RNA (1)...(19): siRNA sense strand
uguggaggaugaguugaua

SEQ ID NO: 2184185 - RNA, 19 nt, Homo sapiens
  misc_RNA (1)...(19): siRNA sense strand
ggagaacaucauugucaga

SEQ ID NO: 2184186 - RNA, 19 nt, Homo sapiens
  misc_RNA (1)...(19): siRNA sense strand
acacuuacgcuucacaguu

SEQ ID NO: 2184187 - RNA, 19 nt, Homo sapiens
  misc_RNA (1)...(19): siRNA sense strand
gcuuaaagaagacaugugu

SEQ ID NO: 2184188 - RNA, 19 nt, Homo sapiens
  misc_RNA (1)...(19): siRNA sense strand
cagaaagggcuuaaagaag

SEQ ID NO: 2184189 - RNA, 19 nt, Homo sapiens
  misc_RNA (1)...(19): siRNA sense strand
agaacaucauugucagaaa

SEQ ID NO: 2184190 - RNA, 19 nt, Homo sapiens
  misc_RNA (1)...(19): siRNA sense strand
gcaaagccagacaugacaa

SEQ ID NO: 2184191 - RNA, 19 nt, Homo sapiens
  misc_RNA (1)...(19): siRNA sense strand
agagagagccguuguugca

SEQ ID NO: 2184192 - RNA, 19 nt, Homo sapiens
  misc_RNA (1)...(19): siRNA sense strand
caaagucuggucugauugu

SEQ ID NO: 2184193 - RNA, 19 nt, Homo sapiens
  misc_RNA (1)...(19): siRNA sense strand
gagaauuccaggccaaagu

SEQ ID NO: 2184194 - RNA, 19 nt, Homo sapiens
  misc_RNA (1)...(19): siRNA sense strand
ugauggagauguacuuggu

SEQ ID NO: 2184195 - RNA, 19 nt, Homo sapiens
  misc_RNA (1)...(19): siRNA sense strand
cgaaagguuuugcaucuug

SEQ ID NO: 2184196 - RNA, 19 nt, Homo sapiens
  misc_RNA (1)...(19): siRNA sense strand
gcucauccgccaggacuuu

SEQ ID NO: 2184197 - RNA, 19 nt, Homo sapiens
  misc_RNA (1)...(19): siRNA sense strand
gaaagguuuugcaucuuga

SEQ ID NO: 2184198 - RNA, 19 nt, Homo sapiens
  misc_RNA (1)...(19): siRNA sense strand
cgagagagagccguuguug

SEQ ID NO: 2184199 - RNA, 19 nt, Homo sapiens
  misc_RNA (1)...(19): siRNA sense strand
ucccaucagugcucaaguu

SEQ ID NO: 2184200 - RNA, 19 nt, Homo sapiens
  misc_RNA (1)...(19): siRNA sense strand
acagaaaugaucuucgaaa

SEQ ID NO: 2184201 - RNA, 19 nt, Homo sapiens
  misc_RNA (1)...(19): siRNA sense strand
acucaucaccagauacuuu

SEQ ID NO: 2184202 - RNA, 19 nt, Homo sapiens
  misc_RNA (1)...(19): siRNA sense strand
ggagucuuagaaacacuua

SEQ ID NO: 2184203 - RNA, 19 nt, Homo sapiens
  misc_RNA (1)...(19): siRNA sense strand
gaacaaggcaaaggaaaau

SEQ ID NO: 2184204 - RNA, 19 nt, Homo sapiens
  misc_RNA (1)...(19): siRNA sense strand
cagcagaaagggcuuaaag

SEQ ID NO: 2184205 - RNA, 19 nt, Homo sapiens
  misc_RNA (1)...(19): siRNA sense strand
gguuuugcaucuugaauuu

SEQ ID NO: 2184206 - RNA, 19 nt, Homo sapiens
  misc_RNA (1)...(19): siRNA sense strand
ucagagacuacacugguaa

SEQ ID NO: 2184207 - RNA, 19 nt, Homo sapiens
  misc_RNA (1)...(19): siRNA sense strand
ccagacaugacaaucuuga

SEQ ID NO: 2184208 - RNA, 19 nt, Homo sapiens
  misc_RNA (1)...(19): siRNA sense strand
cagauggagucuuagaaac

SEQ ID NO: 2184209 - RNA, 19 nt, Homo sapiens
  misc_RNA (1)...(19): siRNA sense strand
gcacuggcuucgagaacac

SEQ ID NO: 2184210 - RNA, 19 nt, Homo sapiens
  misc_RNA (1)...(19): siRNA sense strand
gcucgaggauguggaggau

SEQ ID NO: 2184211 - RNA, 19 nt, Homo sapiens
  misc_RNA (1)...(19): siRNA sense strand
caagcaaagccagacauga

SEQ ID NO: 2184212 - RNA, 19 nt, Homo sapiens
  misc_RNA (1)...(19): siRNA sense strand
caaugaagaauggaaacuu

SEQ ID NO: 2184213 - RNA, 19 nt, Homo sapiens
  misc_RNA (1)...(19): siRNA sense strand
guagcaaaggaaauaaaga

SEQ ID NO: 2184214 - RNA, 19 nt, Homo sapiens
  misc_RNA (1)...(19): siRNA sense strand
ggaaggucccugagcucuu

SEQ ID NO: 2184215 - RNA, 19 nt, Homo sapiens
  misc_RNA (1)...(19): siRNA sense strand
gauggagauguacuuggua

SEQ ID NO: 2184216 - RNA, 19 nt, Homo sapiens
  misc_RNA (1)...(19): siRNA sense strand
caaagcagauggagucuua

SEQ ID NO: 2184217 - RNA, 19 nt, Homo sapiens
  misc_RNA (1)...(19): siRNA sense strand
gaaaugaucuucgaaaggu

SEQ ID NO: 2184218 - RNA, 19 nt, Homo sapiens
  misc_RNA (1)...(19): siRNA sense strand
agaaagggcuuaaagaaga

SEQ ID NO: 2184219 - RNA, 19 nt, Homo sapiens
  misc_RNA (1)...(19): siRNA sense strand
gaaggucccugagcucuuu

SEQ ID NO: 2184220 - RNA, 19 nt, Homo sapiens
  misc_RNA (1)...(19): siRNA sense strand
uauaugaccuuucagauga

SEQ ID NO: 2184221 - RNA, 19 nt, Homo sapiens
  misc_RNA (1)...(19): siRNA sense strand
caacagaaaugaucuucga

SEQ ID NO: 2184222 - RNA, 19 nt, Homo sapiens
  misc_RNA (1)...(19): siRNA sense strand
ggaaauacggcuaacaauu

SEQ ID NO: 2184223 - RNA, 19 nt, Homo sapiens
  misc_RNA (1)...(19): siRNA sense strand
gagauguacuugguaauuu

SEQ ID NO: 2184224 - RNA, 19 nt, Homo sapiens
  misc_RNA (1)...(19): siRNA sense strand
gcagaaagggcuuaaagaa

SEQ ID NO: 2184225 - RNA, 19 nt, Homo sapiens
  misc_RNA (1)...(19): siRNA sense strand
agacuacacugguaaauau

SEQ ID NO: 2184226 - RNA, 19 nt, Homo sapiens
  misc_RNA (1)...(19): siRNA sense strand
caacaaagcauucaucagu

SEQ ID NO: 2184227 - RNA, 19 nt, Homo sapiens
  misc_RNA (1)...(19): siRNA sense strand
gccaaagucuggucugauu

SEQ ID NO: 2184228 - RNA, 19 nt, Homo sapiens
  misc_RNA (1)...(19): siRNA sense strand
gaacaucauugucagaaac

SEQ ID NO: 2184229 - RNA, 19 nt, Homo sapiens
  misc_RNA (1)...(19): siRNA sense strand
gaaauaaagacccuucugu

SEQ ID NO: 2184230 - RNA, 19 nt, Homo sapiens
  misc_RNA (1)...(19): siRNA sense strand
acaaagcauucaucaguuu

SEQ ID NO: 2184231 - RNA, 19 nt, Homo sapiens
  misc_RNA (1)...(19): siRNA sense strand
gcagauggagucuuagaaa

SEQ ID NO: 2184232 - RNA, 19 nt, Homo sapiens
  misc_RNA (1)...(19): siRNA sense strand
gcacauggcuacuguacac

SEQ ID NO: 2184233 - RNA, 19 nt, Homo sapiens
  misc_RNA (1)...(19): siRNA sense strand
uaaagacccuucuguuugg

SEQ ID NO: 2184234 - RNA, 19 nt, Homo sapiens
  misc_RNA (1)...(19): siRNA sense strand
gggugaaacuccuguguug

SEQ ID NO: 2184235 - RNA, 19 nt, Homo sapiens
  misc_RNA (1)...(19): siRNA sense strand
uaacacagccucauuaaaa

SEQ ID NO: 2184236 - RNA, 19 nt, Homo sapiens
  misc_RNA (1)...(19): siRNA sense strand
gagacuacacugguaaaua

SEQ ID NO: 2184237 - RNA, 19 nt, Homo sapiens
  misc_RNA (1)...(19): siRNA sense strand
ggagauguacuugguaauu

SEQ ID NO: 2184238 - RNA, 19 nt, Homo sapiens
  misc_RNA (1)...(19): siRNA sense strand
uagaaacacuuacgcuuca

SEQ ID NO: 2184239 - RNA, 19 nt, Homo sapiens
  misc_RNA (1)...(19): siRNA sense strand
uaacaaagugccaucaaga

SEQ ID NO: 2184240 - RNA, 19 nt, Homo sapiens
  misc_RNA (1)...(19): siRNA sense strand
aauaaagacccuucuguuu

SEQ ID NO: 2184241 - RNA, 19 nt, Homo sapiens
  misc_RNA (1)...(19): siRNA sense strand
ggugguaauuccaggauga

SEQ ID NO: 2184242 - RNA, 19 nt, Homo sapiens
  misc_RNA (1)...(19): siRNA sense strand
gcagugauauuggcuucuu

SEQ ID NO: 2184243 - RNA, 19 nt, Homo sapiens
  misc_RNA (1)...(19): siRNA sense strand
cacaggaacuugucaaucu

SEQ ID NO: 2184244 - RNA, 19 nt, Homo sapiens
  misc_RNA (1)...(19): siRNA sense strand
cacuuacgcuucacaguuu

SEQ ID NO: 2184245 - RNA, 19 nt, Homo sapiens
  misc_RNA (1)...(19): siRNA sense strand
cuggaucacuuuggaaaua

SEQ ID NO: 2184246 - RNA, 19 nt, Homo sapiens
  misc_RNA (1)...(19): siRNA sense strand
gaagaugcaggauggagaa

SEQ ID NO: 2184247 - RNA, 19 nt, Homo sapiens
  misc_RNA (1)...(19): siRNA sense strand
gcauaaacaacagaaauga

SEQ ID NO: 2184248 - RNA, 19 nt, Homo sapiens
  misc_RNA (1)...(19): siRNA sense strand
gaaauacaaagcagaugga

SEQ ID NO: 2184249 - RNA, 19 nt, Homo sapiens
  misc_RNA (1)...(19): siRNA sense strand
ucaagaugcucagagacua

SEQ ID NO: 2184250 - RNA, 19 nt, Homo sapiens
  misc_RNA (1)...(19): siRNA sense strand
gauacuuucuggaucacuu

SEQ ID NO: 2184251 - RNA, 19 nt, Homo sapiens
  misc_RNA (1)...(19): siRNA sense strand
ggacacagacaacgaccuu

SEQ ID NO: 2184252 - RNA, 19 nt, Homo sapiens
  misc_RNA (1)...(19): siRNA sense strand
gcuaacaauuucacucaag

SEQ ID NO: 2184253 - RNA, 19 nt, Homo sapiens
  misc_RNA (1)...(19): siRNA sense strand
augaggaccuggugacuuu

SEQ ID NO: 2184254 - RNA, 19 nt, Homo sapiens
  misc_RNA (1)...(19): siRNA sense strand
auaaagacccuucuguuug

SEQ ID NO: 2184255 - RNA, 19 nt, Homo sapiens
  misc_RNA (1)...(19): siRNA sense strand
uuagugaacugaccguaga

SEQ ID NO: 2184256 - RNA, 19 nt, Homo sapiens
  misc_RNA (1)...(19): siRNA sense strand
cagaaaugaucuucgaaag

SEQ ID NO: 2184257 - RNA, 19 nt, Homo sapiens
  misc_RNA (1)...(19): siRNA sense strand
caucagugcucaaguugca

SEQ ID NO: 2184258 - RNA, 19 nt, Homo sapiens
  misc_RNA (1)...(19): siRNA sense strand
gagaacaaggcaaaggaaa

SEQ ID NO: 2184259 - RNA, 19 nt, Homo sapiens
  misc_RNA (1)...(19): siRNA sense strand
gaaagggcuuaaagaagac

SEQ ID NO: 2184260 - RNA, 19 nt, Homo sapiens
  misc_RNA (1)...(19): siRNA sense strand
ucgaggauguggaggauga

SEQ ID NO: 2184261 - RNA, 19 nt, Homo sapiens
  misc_RNA (1)...(19): siRNA sense strand
cuaacaauuucacucaaga

SEQ ID NO: 2184262 - RNA, 19 nt, Homo sapiens
  misc_RNA (1)...(19): siRNA sense strand
ggagaacaaggcaaaggaa

SEQ ID NO: 2184263 - RNA, 19 nt, Homo sapiens
  misc_RNA (1)...(19): siRNA sense strand
acacagcaguucaguccaa

SEQ ID NO: 2184264 - RNA, 19 nt, Homo sapiens
  misc_RNA (1)...(19): siRNA sense strand
ccaauugaccucucaguag

SEQ ID NO: 2184265 - RNA, 19 nt, Homo sapiens
  misc_RNA (1)...(19): siRNA sense strand
cuacuugccuggugguaau

SEQ ID NO: 2184266 - RNA, 19 nt, Homo sapiens
  misc_RNA (1)...(19): siRNA sense strand
ugaagaggaugggagagaa

SEQ ID NO: 2184267 - RNA, 19 nt, Homo sapiens
  misc_RNA (1)...(19): siRNA sense strand
gagaacaucauugucagaa

SEQ ID NO: 2184268 - RNA, 19 nt, Homo sapiens
  misc_RNA (1)...(19): siRNA sense strand
uuaaagaagacauguguga

SEQ ID NO: 2184269 - RNA, 19 nt, Homo sapiens
  misc_RNA (1)...(19): siRNA sense strand
gaacucaucaccagauacu

SEQ ID NO: 2184270 - RNA, 19 nt, Homo sapiens
  misc_RNA (1)...(19): siRNA sense strand
aaacuccuguguugacuuc

SEQ ID NO: 2184271 - RNA, 19 nt, Homo sapiens
  misc_RNA (1)...(19): siRNA sense strand
gggagaagauagacaagcu

SEQ ID NO: 2184272 - RNA, 19 nt, Homo sapiens
  misc_RNA (1)...(19): siRNA sense strand
guaacacagccucauuaaa

SEQ ID NO: 2184273 - RNA, 19 nt, Homo sapiens
  misc_RNA (1)...(19): siRNA sense strand
aaauaaagacccuucuguu

SEQ ID NO: 2184274 - RNA, 19 nt, Homo sapiens
  misc_RNA (1)...(19): siRNA sense strand
gggaguuccucagcagaaa

SEQ ID NO: 2184275 - RNA, 19 nt, Homo sapiens
  misc_RNA (1)...(19): siRNA sense strand
uaguaacacagccucauua

SEQ ID NO: 2184276 - RNA, 19 nt, Homo sapiens
  misc_RNA (1)...(19): siRNA sense strand
gaugcaggauggagaacau

SEQ ID NO: 2184277 - RNA, 19 nt, Homo sapiens
  misc_RNA (1)...(19): siRNA sense strand
ggaaauaaagacccuucug

SEQ ID NO: 2184278 - RNA, 19 nt, Homo sapiens
  misc_RNA (1)...(19): siRNA sense strand
gagccuuccuuggauguga

SEQ ID NO: 2184279 - RNA, 19 nt, Homo sapiens
  misc_RNA (1)...(19): siRNA sense strand
cccaaucccugcacucuca

SEQ ID NO: 2184280 - RNA, 19 nt, Homo sapiens
  misc_RNA (1)...(19): siRNA sense strand
cagcauaaacaacagaaau

SEQ ID NO: 2184281 - RNA, 19 nt, Homo sapiens
  misc_RNA (1)...(19): siRNA sense strand
ccacuucagcauccucuuu

SEQ ID NO: 2184282 - RNA, 19 nt, Homo sapiens
  misc_RNA (1)...(19): siRNA sense strand
aacaaagcauucaucaguu

SEQ ID NO: 2184283 - RNA, 19 nt, Homo sapiens
  misc_RNA (1)...(19): siRNA sense strand
gaagaggaugggagagaau

SEQ ID NO: 2184284 - RNA, 19 nt, Homo sapiens
  misc_RNA (1)...(19): siRNA sense strand
ggauguggaggaugaguug

SEQ ID NO: 2184285 - RNA, 19 nt, Homo sapiens
  misc_RNA (1)...(19): siRNA sense strand
acucucaguuccaaagaaa

SEQ ID NO: 2184286 - RNA, 19 nt, Homo sapiens
  misc_RNA (1)...(19): siRNA sense strand
uguggaggaugaguugaua

SEQ ID NO: 2184287 - RNA, 19 nt, Homo sapiens
  misc_RNA (1)...(19): siRNA sense strand
gaccucagcauaaacaaca

SEQ ID NO: 2184288 - RNA, 19 nt, Homo sapiens
  misc_RNA (1)...(19): siRNA sense strand
ggagaacaucauugucaga

SEQ ID NO: 2184289 - RNA, 19 nt, Homo sapiens
  misc_RNA (1)...(19): siRNA sense strand
acacuuacgcuucacaguu

SEQ ID NO: 2184290 - RNA, 19 nt, Homo sapiens
  misc_RNA (1)...(19): siRNA sense strand
cagaaagggcuuaaagaag

SEQ ID NO: 2184291 - RNA, 19 nt, Homo sapiens
  misc_RNA (1)...(19): siRNA sense strand
gcuuaaagaagacaugugu

SEQ ID NO: 2184292 - RNA, 19 nt, Homo sapiens
  misc_RNA (1)...(19): siRNA sense strand
agaacaucauugucagaaa

SEQ ID NO: 2184293 - RNA, 19 nt, Homo sapiens
  misc_RNA (1)...(19): siRNA sense strand
gcaaagccagacaugacaa

SEQ ID NO: 2184294 - RNA, 19 nt, Homo sapiens
  misc_RNA (1)...(19): siRNA sense strand
agagagagccguuguugca

SEQ ID NO: 2184295 - RNA, 19 nt, Homo sapiens
  misc_RNA (1)...(19): siRNA sense strand
caaagucuggucugauugu

SEQ ID NO: 2184296 - RNA, 19 nt, Homo sapiens
  misc_RNA (1)...(19): siRNA sense strand
gagaauuccaggccaaagu

SEQ ID NO: 2184297 - RNA, 19 nt, Homo sapiens
  misc_RNA (1)...(19): siRNA sense strand
ugauggagauguacuuggu

SEQ ID NO: 2184298 - RNA, 19 nt, Homo sapiens
  misc_RNA (1)...(19): siRNA sense strand
gaaagguuuugcaucuuga

SEQ ID NO: 2184299 - RNA, 19 nt, Homo sapiens
  misc_RNA (1)...(19): siRNA sense strand
gcucauccgccaggacuuu

SEQ ID NO: 2184300 - RNA, 19 nt, Homo sapiens
  misc_RNA (1)...(19): siRNA sense strand
cgagagagagccguuguug

SEQ ID NO: 2184301 - RNA, 19 nt, Homo sapiens
  misc_RNA (1)...(19): siRNA sense strand
acagaaaugaucuucgaaa

SEQ ID NO: 2184302 - RNA, 19 nt, Homo sapiens
  misc_RNA (1)...(19): siRNA sense strand
ucccaucagugcucaaguu

SEQ ID NO: 2184303 - RNA, 19 nt, Homo sapiens
  misc_RNA (1)...(19): siRNA sense strand
cgaaagguuuugcaucuug

SEQ ID NO: 2184304 - RNA, 19 nt, Homo sapiens
  misc_RNA (1)...(19): siRNA sense strand
acucaucaccagauacuuu

SEQ ID NO: 2184305 - RNA, 19 nt, Homo sapiens
  misc_RNA (1)...(19): siRNA sense strand
ggagucuuagaaacacuua

SEQ ID NO: 2184306 - RNA, 19 nt, Homo sapiens
  misc_RNA (1)...(19): siRNA sense strand
ucagagacuacacugguaa

SEQ ID NO: 2184307 - RNA, 19 nt, Homo sapiens
  misc_RNA (1)...(19): siRNA sense strand
gaacaaggcaaaggaaaau

SEQ ID NO: 2184308 - RNA, 19 nt, Homo sapiens
  misc_RNA (1)...(19): siRNA sense strand
gguuuugcaucuugaauuu

SEQ ID NO: 2184309 - RNA, 19 nt, Homo sapiens
  misc_RNA (1)...(19): siRNA sense strand
cagcagaaagggcuuaaag

SEQ ID NO: 2184310 - RNA, 19 nt, Homo sapiens
  misc_RNA (1)...(19): siRNA sense strand
ccagacaugacaaucuuga

SEQ ID NO: 2184311 - RNA, 19 nt, Homo sapiens
  misc_RNA (1)...(19): siRNA sense strand
ccacccaaaccaucucuga

SEQ ID NO: 2184312 - RNA, 19 nt, Homo sapiens
  misc_RNA (1)...(19): siRNA sense strand
cagauggagucuuagaaac

SEQ ID NO: 2184313 - RNA, 19 nt, Homo sapiens
  misc_RNA (1)...(19): siRNA sense strand
gcacuggcuucgagaacac

SEQ ID NO: 2184314 - RNA, 19 nt, Homo sapiens
  misc_RNA (1)...(19): siRNA sense strand
gcucgaggauguggaggau

SEQ ID NO: 2184315 - RNA, 19 nt, Homo sapiens
  misc_RNA (1)...(19): siRNA sense strand
caaugaagaauggaaacuu

SEQ ID NO: 2184316 - RNA, 19 nt, Homo sapiens
  misc_RNA (1)...(19): siRNA sense strand
caaagcagauggagucuua

SEQ ID NO: 2184317 - RNA, 19 nt, Homo sapiens
  misc_RNA (1)...(19): siRNA sense strand
gaaaugaucuucgaaaggu

SEQ ID NO: 2184318 - RNA, 19 nt, Homo sapiens
  misc_RNA (1)...(19): siRNA sense strand
agaaagggcuuaaagaaga

SEQ ID NO: 2184319 - RNA, 19 nt, Homo sapiens
  misc_RNA (1)...(19): siRNA sense strand
gaaggucccugagcucuuu

SEQ ID NO: 2184320 - RNA, 19 nt, Homo sapiens
  misc_RNA (1)...(19): siRNA sense strand
uauaugaccuuucagauga

SEQ ID NO: 2184321 - RNA, 19 nt, Homo sapiens
  misc_RNA (1)...(19): siRNA sense strand
caacagaaaugaucuucga

SEQ ID NO: 2184322 - RNA, 19 nt, Homo sapiens
  misc_RNA (1)...(19): siRNA sense strand
ggaaauacggcuaacaauu

SEQ ID NO: 2184323 - RNA, 19 nt, Homo sapiens
  misc_RNA (1)...(19): siRNA sense strand
gagauguacuugguaauuu

SEQ ID NO: 2184324 - RNA, 19 nt, Homo sapiens
  misc_RNA (1)...(19): siRNA sense strand
gcagaaagggcuuaaagaa

SEQ ID NO: 2184325 - RNA, 19 nt, Homo sapiens
  misc_RNA (1)...(19): siRNA sense strand
agacuacacugguaaauau

SEQ ID NO: 2184326 - RNA, 19 nt, Homo sapiens
  misc_RNA (1)...(19): siRNA sense strand
caacaaagcauucaucagu

SEQ ID NO: 2184327 - RNA, 19 nt, Homo sapiens
  misc_RNA (1)...(19): siRNA sense strand
gccaaagucuggucugauu

SEQ ID NO: 2184328 - RNA, 19 nt, Homo sapiens
  misc_RNA (1)...(19): siRNA sense strand
gaacaucauugucagaaac

SEQ ID NO: 2184329 - RNA, 19 nt, Homo sapiens
  misc_RNA (1)...(19): siRNA sense strand
gaaauaaagacccuucugu

SEQ ID NO: 2184330 - RNA, 19 nt, Homo sapiens
  misc_RNA (1)...(19): siRNA sense strand
acaaagcauucaucaguuu

SEQ ID NO: 2184331 - RNA, 19 nt, Homo sapiens
  misc_RNA (1)...(19): siRNA sense strand
gcagauggagucuuagaaa

SEQ ID NO: 2184332 - RNA, 19 nt, Homo sapiens
  misc_RNA (1)...(19): siRNA sense strand
gcacauggcuacuguacac

SEQ ID NO: 2184333 - RNA, 19 nt, Homo sapiens
  misc_RNA (1)...(19): siRNA sense strand
uaaagacccuucuguuugg

SEQ ID NO: 2184334 - RNA, 19 nt, Homo sapiens
  misc_RNA (1)...(19): siRNA sense strand
gggugaaacuccuguguug

SEQ ID NO: 2184335 - RNA, 19 nt, Homo sapiens
  misc_RNA (1)...(19): siRNA sense strand
uaacacagccucauuaaaa

SEQ ID NO: 2184336 - RNA, 19 nt, Homo sapiens
  misc_RNA (1)...(19): siRNA sense strand
gagacuacacugguaaaua

SEQ ID NO: 2184337 - RNA, 19 nt, Homo sapiens
  misc_RNA (1)...(19): siRNA sense strand
ggagauguacuugguaauu

SEQ ID NO: 2184338 - RNA, 19 nt, Homo sapiens
  misc_RNA (1)...(19): siRNA sense strand
uagaaacacuuacgcuuca

SEQ ID NO: 2184339 - RNA, 19 nt, Homo sapiens
  misc_RNA (1)...(19): siRNA sense strand
uaacaaagugccaucaaga

SEQ ID NO: 2184340 - RNA, 19 nt, Homo sapiens
  misc_RNA (1)...(19): siRNA sense strand
aauaaagacccuucuguuu

SEQ ID NO: 2184341 - RNA, 19 nt, Homo sapiens
  misc_RNA (1)...(19): siRNA sense strand
ggugguaauuccaggauga

SEQ ID NO: 2184342 - RNA, 19 nt, Homo sapiens
  misc_RNA (1)...(19): siRNA sense strand
gcagugauauuggcuucuu

SEQ ID NO: 2184343 - RNA, 19 nt, Homo sapiens
  misc_RNA (1)...(19): siRNA sense strand
cacaggaacuugucaaucu

SEQ ID NO: 2184344 - RNA, 19 nt, Homo sapiens
  misc_RNA (1)...(19): siRNA sense strand
cacuuacgcuucacaguuu

SEQ ID NO: 2184345 - RNA, 19 nt, Homo sapiens
  misc_RNA (1)...(19): siRNA sense strand
cuggaucacuuuggaaaua

SEQ ID NO: 2184346 - RNA, 19 nt, Homo sapiens
  misc_RNA (1)...(19): siRNA sense strand
gaagaugcaggauggagaa

SEQ ID NO: 2184347 - RNA, 19 nt, Homo sapiens
  misc_RNA (1)...(19): siRNA sense strand
gcauaaacaacagaaauga

SEQ ID NO: 2184348 - RNA, 19 nt, Homo sapiens
  misc_RNA (1)...(19): siRNA sense strand
gaaauacaaagcagaugga

SEQ ID NO: 2184349 - RNA, 19 nt, Homo sapiens
  misc_RNA (1)...(19): siRNA sense strand
ucaagaugcucagagacua

SEQ ID NO: 2184350 - RNA, 19 nt, Homo sapiens
  misc_RNA (1)...(19): siRNA sense strand
gauacuuucuggaucacuu

SEQ ID NO: 2184351 - RNA, 19 nt, Homo sapiens
  misc_RNA (1)...(19): siRNA sense strand
ggacacagacaacgaccuu

SEQ ID NO: 2184352 - RNA, 19 nt, Homo sapiens
  misc_RNA (1)...(19): siRNA sense strand
gcuaacaauuucacucaag

SEQ ID NO: 2184353 - RNA, 19 nt, Homo sapiens
  misc_RNA (1)...(19): siRNA sense strand
augaggaccuggugacuuu

SEQ ID NO: 2184354 - RNA, 19 nt, Homo sapiens
  misc_RNA (1)...(19): siRNA sense strand
auaaagacccuucuguuug

SEQ ID NO: 2184355 - RNA, 19 nt, Homo sapiens
  misc_RNA (1)...(19): siRNA sense strand
uuagugaacugaccguaga

SEQ ID NO: 2184356 - RNA, 19 nt, Homo sapiens
  misc_RNA (1)...(19): siRNA sense strand
cagaaaugaucuucgaaag

SEQ ID NO: 2184357 - RNA, 19 nt, Homo sapiens
  misc_RNA (1)...(19): siRNA sense strand
caucagugcucaaguugca

SEQ ID NO: 2184358 - RNA, 19 nt, Homo sapiens
  misc_RNA (1)...(19): siRNA sense strand
gagaacaaggcaaaggaaa

SEQ ID NO: 2184359 - RNA, 19 nt, Homo sapiens
  misc_RNA (1)...(19): siRNA sense strand
gaaagggcuuaaagaagac

SEQ ID NO: 2184360 - RNA, 19 nt, Homo sapiens
  misc_RNA (1)...(19): siRNA sense strand
ucgaggauguggaggauga

SEQ ID NO: 2184361 - RNA, 19 nt, Homo sapiens
  misc_RNA (1)...(19): siRNA sense strand
cuaacaauuucacucaaga

SEQ ID NO: 2184362 - RNA, 19 nt, Homo sapiens
  misc_RNA (1)...(19): siRNA sense strand
ggagaacaaggcaaaggaa

SEQ ID NO: 2184363 - RNA, 19 nt, Homo sapiens
  misc_RNA (1)...(19): siRNA sense strand
acacagcaguucaguccaa

SEQ ID NO: 2184364 - RNA, 19 nt, Homo sapiens
  misc_RNA (1)...(19): siRNA sense strand
ccaauugaccucucaguag

SEQ ID NO: 2184365 - RNA, 19 nt, Homo sapiens
  misc_RNA (1)...(19): siRNA sense strand
cuacuugccuggugguaau

SEQ ID NO: 2184366 - RNA, 19 nt, Homo sapiens
  misc_RNA (1)...(19): siRNA sense strand
ugaagaggaugggagagaa

SEQ ID NO: 2184367 - RNA, 19 nt, Homo sapiens
  misc_RNA (1)...(19): siRNA sense strand
gagaacaucauugucagaa

SEQ ID NO: 2184368 - RNA, 19 nt, Homo sapiens
  misc_RNA (1)...(19): siRNA sense strand
uuaaagaagacauguguga

SEQ ID NO: 2184369 - RNA, 19 nt, Homo sapiens
  misc_RNA (1)...(19): siRNA sense strand
gaacucaucaccagauacu

SEQ ID NO: 2184370 - RNA, 19 nt, Homo sapiens
  misc_RNA (1)...(19): siRNA sense strand
aaacuccuguguugacuuc

SEQ ID NO: 2184371 - RNA, 19 nt, Homo sapiens
  misc_RNA (1)...(19): siRNA sense strand
gggagaagauagacaagcu

SEQ ID NO: 2184372 - RNA, 19 nt, Homo sapiens
  misc_RNA (1)...(19): siRNA sense strand
guaacacagccucauuaaa

SEQ ID NO: 2184373 - RNA, 19 nt, Homo sapiens
  misc_RNA (1)...(19): siRNA sense strand
aaauaaagacccuucuguu

SEQ ID NO: 2184374 - RNA, 19 nt, Homo sapiens
  misc_RNA (1)...(19): siRNA sense strand
gggaguuccucagcagaaa

SEQ ID NO: 2184375 - RNA, 19 nt, Homo sapiens
  misc_RNA (1)...(19): siRNA sense strand
uaguaacacagccucauua

SEQ ID NO: 2184376 - RNA, 19 nt, Homo sapiens
  misc_RNA (1)...(19): siRNA sense strand
gaugcaggauggagaacau

SEQ ID NO: 2184377 - RNA, 19 nt, Homo sapiens
  misc_RNA (1)...(19): siRNA sense strand
ggaaauaaagacccuucug

SEQ ID NO: 2184378 - RNA, 19 nt, Homo sapiens
  misc_RNA (1)...(19): siRNA sense strand
gagccuuccuuggauguga

SEQ ID NO: 2184379 - RNA, 19 nt, Homo sapiens
  misc_RNA (1)...(19): siRNA sense strand
cccaaucccugcacucuca

SEQ ID NO: 2184380 - RNA, 19 nt, Homo sapiens
  misc_RNA (1)...(19): siRNA sense strand
cagcauaaacaacagaaau

SEQ ID NO: 2184381 - RNA, 19 nt, Homo sapiens
  misc_RNA (1)...(19): siRNA sense strand
ccacuucagcauccucuuu

SEQ ID NO: 2184382 - RNA, 19 nt, Homo sapiens
  misc_RNA (1)...(19): siRNA sense strand
aacaaagcauucaucaguu

SEQ ID NO: 2184383 - RNA, 19 nt, Homo sapiens
  misc_RNA (1)...(19): siRNA sense strand
gaagaggaugggagagaau

SEQ ID NO: 2184384 - RNA, 19 nt, Homo sapiens
  misc_RNA (1)...(19): siRNA sense strand
ggauguggaggaugaguug

SEQ ID NO: 2184385 - RNA, 19 nt, Homo sapiens
  misc_RNA (1)...(19): siRNA sense strand
acucucaguuccaaagaaa

SEQ ID NO: 2184386 - RNA, 19 nt, Homo sapiens
  misc_RNA (1)...(19): siRNA sense strand
uguggaggaugaguugaua

SEQ ID NO: 2184387 - RNA, 19 nt, Homo sapiens
  misc_RNA (1)...(19): siRNA sense strand
gaccucagcauaaacaaca

SEQ ID NO: 2184388 - RNA, 19 nt, Homo sapiens
  misc_RNA (1)...(19): siRNA sense strand
ggagaacaucauugucaga

SEQ ID NO: 2184389 - RNA, 19 nt, Homo sapiens
  misc_RNA (1)...(19): siRNA sense strand
acacuuacgcuucacaguu

SEQ ID NO: 2184390 - RNA, 19 nt, Homo sapiens
  misc_RNA (1)...(19): siRNA sense strand
cagaaagggcuuaaagaag

SEQ ID NO: 2184391 - RNA, 19 nt, Homo sapiens
  misc_RNA (1)...(19): siRNA sense strand
gcuuaaagaagacaugugu

SEQ ID NO: 2184392 - RNA, 19 nt, Homo sapiens
  misc_RNA (1)...(19): siRNA sense strand
agaacaucauugucagaaa

SEQ ID NO: 2184393 - RNA, 19 nt, Homo sapiens
  misc_RNA (1)...(19): siRNA sense strand
gcaaagccagacaugacaa

SEQ ID NO: 2184394 - RNA, 19 nt, Homo sapiens
  misc_RNA (1)...(19): siRNA sense strand
agagagagccguuguugca

SEQ ID NO: 2184395 - RNA, 19 nt, Homo sapiens
  misc_RNA (1)...(19): siRNA sense strand
caaagucuggucugauugu

SEQ ID NO: 2184396 - RNA, 19 nt, Homo sapiens
  misc_RNA (1)...(19): siRNA sense strand
gagaauuccaggccaaagu

SEQ ID NO: 2184397 - RNA, 19 nt, Homo sapiens
  misc_RNA (1)...(19): siRNA sense strand
ugauggagauguacuuggu

SEQ ID NO: 2184398 - RNA, 19 nt, Homo sapiens
  misc_RNA (1)...(19): siRNA sense strand
gaaagguuuugcaucuuga

SEQ ID NO: 2184399 - RNA, 19 nt, Homo sapiens
  misc_RNA (1)...(19): siRNA sense strand
gcucauccgccaggacuuu

SEQ ID NO: 2184400 - RNA, 19 nt, Homo sapiens
  misc_RNA (1)...(19): siRNA sense strand
cgagagagagccguuguug

SEQ ID NO: 2184401 - RNA, 19 nt, Homo sapiens
  misc_RNA (1)...(19): siRNA sense strand
acagaaaugaucuucgaaa

SEQ ID NO: 2184402 - RNA, 19 nt, Homo sapiens
  misc_RNA (1)...(19): siRNA sense strand
ucccaucagugcucaaguu

SEQ ID NO: 2184403 - RNA, 19 nt, Homo sapiens
  misc_RNA (1)...(19): siRNA sense strand
cgaaagguuuugcaucuug

SEQ ID NO: 2184404 - RNA, 19 nt, Homo sapiens
  misc_RNA (1)...(19): siRNA sense strand
acucaucaccagauacuuu

SEQ ID NO: 2184405 - RNA, 19 nt, Homo sapiens
  misc_RNA (1)...(19): siRNA sense strand
ggagucuuagaaacacuua

SEQ ID NO: 2184406 - RNA, 19 nt, Homo sapiens
  misc_RNA (1)...(19): siRNA sense strand
ucagagacuacacugguaa

SEQ ID NO: 2184407 - RNA, 19 nt, Homo sapiens
  misc_RNA (1)...(19): siRNA sense strand
gaacaaggcaaaggaaaau

SEQ ID NO: 2184408 - RNA, 19 nt, Homo sapiens
  misc_RNA (1)...(19): siRNA sense strand
gguuuugcaucuugaauuu

SEQ ID NO: 2184409 - RNA, 19 nt, Homo sapiens
  misc_RNA (1)...(19): siRNA sense strand
cagcagaaagggcuuaaag

SEQ ID NO: 2184410 - RNA, 19 nt, Homo sapiens
  misc_RNA (1)...(19): siRNA sense strand
ccagacaugacaaucuuga

SEQ ID NO: 2184411 - RNA, 19 nt, Homo sapiens
  misc_RNA (1)...(19): siRNA sense strand
ccacccaaaccaucucuga

SEQ ID NO: 2184412 - RNA, 19 nt, Homo sapiens
  misc_RNA (1)...(19): siRNA sense strand
cagauggagucuuagaaac

SEQ ID NO: 2184413 - RNA, 19 nt, Homo sapiens
  misc_RNA (1)...(19): siRNA sense strand
gcacuggcuucgagaacac

SEQ ID NO: 2184414 - RNA, 19 nt, Homo sapiens
  misc_RNA (1)...(19): siRNA sense strand
gcucgaggauguggaggau

SEQ ID NO: 2184415 - RNA, 19 nt, Homo sapiens
  misc_RNA (1)...(19): siRNA sense strand
caaugaagaauggaaacuu

SEQ ID NO: 2184416 - RNA, 19 nt, Homo sapiens
  misc_RNA (1)...(19): siRNA sense strand
aaacagagcugaagagaaa

SEQ ID NO: 2184417 - RNA, 19 nt, Homo sapiens
  misc_RNA (1)...(19): siRNA sense strand
gaacaaagggccucaguau

SEQ ID NO: 2184418 - RNA, 19 nt, Homo sapiens
  misc_RNA (1)...(19): siRNA sense strand
gaaaugaucauacucaaga

SEQ ID NO: 2184419 - RNA, 19 nt, Homo sapiens
  misc_RNA (1)...(19): siRNA sense strand
gcaagacaguuaaaugaug

SEQ ID NO: 2184420 - RNA, 19 nt, Homo sapiens
  misc_RNA (1)...(19): siRNA sense strand
ccagaaagcucaucacagu

SEQ ID NO: 2184421 - RNA, 19 nt, Homo sapiens
  misc_RNA (1)...(19): siRNA sense strand
gcaaagcccuggcccugaa

SEQ ID NO: 2184422 - RNA, 19 nt, Homo sapiens
  misc_RNA (1)...(19): siRNA sense strand
gaaauugaacagcaccuua

SEQ ID NO: 2184423 - RNA, 19 nt, Homo sapiens
  misc_RNA (1)...(19): siRNA sense strand
caauauaacuggauagaag

SEQ ID NO: 2184424 - RNA, 19 nt, Homo sapiens
  misc_RNA (1)...(19): siRNA sense strand
gcuggacucuggauucuuu

SEQ ID NO: 2184425 - RNA, 19 nt, Homo sapiens
  misc_RNA (1)...(19): siRNA sense strand
ccacagccacuuccaaaua

SEQ ID NO: 2184426 - RNA, 19 nt, Homo sapiens
  misc_RNA (1)...(19): siRNA sense strand
gacagaagcugagauggaa

SEQ ID NO: 2184427 - RNA, 19 nt, Homo sapiens
  misc_RNA (1)...(19): siRNA sense strand
caacugaccuugcucaaac

SEQ ID NO: 2184428 - RNA, 19 nt, Homo sapiens
  misc_RNA (1)...(19): siRNA sense strand
caagacaaguuccuucaug

SEQ ID NO: 2184429 - RNA, 19 nt, Homo sapiens
  misc_RNA (1)...(19): siRNA sense strand
ugagggagcuggcaaagug

SEQ ID NO: 2184430 - RNA, 19 nt, Homo sapiens
  misc_RNA (1)...(19): siRNA sense strand
gggcagacuucauguucua

SEQ ID NO: 2184431 - RNA, 19 nt, Homo sapiens
  misc_RNA (1)...(19): siRNA sense strand
gaaagcucaucacagugua

SEQ ID NO: 2184432 - RNA, 19 nt, Homo sapiens
  misc_RNA (1)...(19): siRNA sense strand
gcaucaauauaacuggaua

SEQ ID NO: 2184433 - RNA, 19 nt, Homo sapiens
  misc_RNA (1)...(19): siRNA sense strand
ggagagagugugcaaagaa

SEQ ID NO: 2184434 - RNA, 19 nt, Homo sapiens
  misc_RNA (1)...(19): siRNA sense strand
ggacagaagcugagaugga

SEQ ID NO: 2184435 - RNA, 19 nt, Homo sapiens
  misc_RNA (1)...(19): siRNA sense strand
gaaaucacaccuuaugcaa

SEQ ID NO: 2184436 - RNA, 19 nt, Homo sapiens
  misc_RNA (1)...(19): siRNA sense strand
gcaaugggcagacuucaug

SEQ ID NO: 2184437 - RNA, 19 nt, Homo sapiens
  misc_RNA (1)...(19): siRNA sense strand
gacucaggcuucucuagua

SEQ ID NO: 2184438 - RNA, 19 nt, Homo sapiens
  misc_RNA (1)...(19): siRNA sense strand
gauacuaccugggacagaa

SEQ ID NO: 2184439 - RNA, 19 nt, Homo sapiens
  misc_RNA (1)...(19): siRNA sense strand
ccaaauccgucucucuaga

SEQ ID NO: 2184440 - RNA, 19 nt, Homo sapiens
  misc_RNA (1)...(19): siRNA sense strand
gaucagagccacagcuuag

SEQ ID NO: 2184441 - RNA, 19 nt, Homo sapiens
  misc_RNA (1)...(19): siRNA sense strand
caagggaugguucaaauga

SEQ ID NO: 2184442 - RNA, 19 nt, Homo sapiens
  misc_RNA (1)...(19): siRNA sense strand
gagaacagcaccaggaugu

SEQ ID NO: 2184443 - RNA, 19 nt, Homo sapiens
  misc_RNA (1)...(19): siRNA sense strand
gaagauuccaagcaagaaa

SEQ ID NO: 2184444 - RNA, 19 nt, Homo sapiens
  misc_RNA (1)...(19): siRNA sense strand
ugacaugacuucaggaacu

SEQ ID NO: 2184445 - RNA, 19 nt, Homo sapiens
  misc_RNA (1)...(19): siRNA sense strand
cagaggaacaucuuuagaa

SEQ ID NO: 2184446 - RNA, 19 nt, Homo sapiens
  misc_RNA (1)...(19): siRNA sense strand
ggaacaaagggccucagua

SEQ ID NO: 2184447 - RNA, 19 nt, Homo sapiens
  misc_RNA (1)...(19): siRNA sense strand
gcacuguuucuuuguauga

SEQ ID NO: 2184448 - RNA, 19 nt, Homo sapiens
  misc_RNA (1)...(19): siRNA sense strand
gacaaaagcaagacaguua

SEQ ID NO: 2184449 - RNA, 19 nt, Homo sapiens
  misc_RNA (1)...(19): siRNA sense strand
gaaaaccuuccucuaaaua

SEQ ID NO: 2184450 - RNA, 19 nt, Homo sapiens
  misc_RNA (1)...(19): siRNA sense strand
gucaaggucugguacuuug

SEQ ID NO: 2184451 - RNA, 19 nt, Homo sapiens
  misc_RNA (1)...(19): siRNA sense strand
cagaaaugcaggacaguuu

SEQ ID NO: 2184452 - RNA, 19 nt, Homo sapiens
  misc_RNA (1)...(19): siRNA sense strand
uggcagaguuggaauuuca

SEQ ID NO: 2184453 - RNA, 19 nt, Homo sapiens
  misc_RNA (1)...(19): siRNA sense strand
agaggaacaucuuuagaau

SEQ ID NO: 2184454 - RNA, 19 nt, Homo sapiens
  misc_RNA (1)...(19): siRNA sense strand
guagaaagccaagagauca

SEQ ID NO: 2184455 - RNA, 19 nt, Homo sapiens
  misc_RNA (1)...(19): siRNA sense strand
agaguuggaauuucaguua

SEQ ID NO: 2184456 - RNA, 19 nt, Homo sapiens
  misc_RNA (1)...(19): siRNA sense strand
ucuaguaucugcccaaugg

SEQ ID NO: 2184457 - RNA, 19 nt, Homo sapiens
  misc_RNA (1)...(19): siRNA sense strand
acaaguuccuucauguuga

SEQ ID NO: 2184458 - RNA, 19 nt, Homo sapiens
  misc_RNA (1)...(19): siRNA sense strand
gacaaguuccuucauguug

SEQ ID NO: 2184459 - RNA, 19 nt, Homo sapiens
  misc_RNA (1)...(19): siRNA sense strand
cacagccacuuccaaauau

SEQ ID NO: 2184460 - RNA, 19 nt, Homo sapiens
  misc_RNA (1)...(19): siRNA sense strand
ccagaguccugcugagaau

SEQ ID NO: 2184461 - RNA, 19 nt, Homo sapiens
  misc_RNA (1)...(19): siRNA sense strand
gugcaaagccaccacaaug

SEQ ID NO: 2184462 - RNA, 19 nt, Homo sapiens
  misc_RNA (1)...(19): siRNA sense strand
ggaggaagaguuucugcuu

SEQ ID NO: 2184463 - RNA, 19 nt, Homo sapiens
  misc_RNA (1)...(19): siRNA sense strand
gugaaagacuacaugagau

SEQ ID NO: 2184464 - RNA, 19 nt, Homo sapiens
  misc_RNA (1)...(19): siRNA sense strand
aagcaagacaguuaaauga

SEQ ID NO: 2184465 - RNA, 19 nt, Homo sapiens
  misc_RNA (1)...(19): siRNA sense strand
ggagaaugcccaaggaaag

SEQ ID NO: 2184466 - RNA, 19 nt, Homo sapiens
  misc_RNA (1)...(19): siRNA sense strand
aggaagaguuucugcuuga

SEQ ID NO: 2184467 - RNA, 19 nt, Homo sapiens
  misc_RNA (1)...(19): siRNA sense strand
ugagaucuuugcaucaguu

SEQ ID NO: 2184468 - RNA, 19 nt, Homo sapiens
  misc_RNA (1)...(19): siRNA sense strand
ccgagcaacugcaaacguu

SEQ ID NO: 2184469 - RNA, 19 nt, Homo sapiens
  misc_RNA (1)...(19): siRNA sense strand
ggacaugucagaggaggaa

SEQ ID NO: 2184470 - RNA, 19 nt, Homo sapiens
  misc_RNA (1)...(19): siRNA sense strand
caaccacagcuuacucgua

SEQ ID NO: 2184471 - RNA, 19 nt, Homo sapiens
  misc_RNA (1)...(19): siRNA sense strand
ucacaccaaccacagcuua

SEQ ID NO: 2184472 - RNA, 19 nt, Homo sapiens
  misc_RNA (1)...(19): siRNA sense strand
aaaugacugugaaagacua

SEQ ID NO: 2184473 - RNA, 19 nt, Homo sapiens
  misc_RNA (1)...(19): siRNA sense strand
uaacccacgucacagaaau

SEQ ID NO: 2184474 - RNA, 19 nt, Homo sapiens
  misc_RNA (1)...(19): siRNA sense strand
acaaagggccucaguaucu

SEQ ID NO: 2184475 - RNA, 19 nt, Homo sapiens
  misc_RNA (1)...(19): siRNA sense strand
aagacgauaugccaaaguu

SEQ ID NO: 2184476 - RNA, 19 nt, Homo sapiens
  misc_RNA (1)...(19): siRNA sense strand
gcaaguguaccacaaagca

SEQ ID NO: 2184477 - RNA, 19 nt, Homo sapiens
  misc_RNA (1)...(19): siRNA sense strand
gagaaugcccaaggaaaga

SEQ ID NO: 2184478 - RNA, 19 nt, Homo sapiens
  misc_RNA (1)...(19): siRNA sense strand
caaagggccucaguaucug

SEQ ID NO: 2184479 - RNA, 19 nt, Homo sapiens
  misc_RNA (1)...(19): siRNA sense strand
guagggcgagcaugucuuu

SEQ ID NO: 2184480 - RNA, 19 nt, Homo sapiens
  misc_RNA (1)...(19): siRNA sense strand
gagagagugugcaaagaac

SEQ ID NO: 2184481 - RNA, 19 nt, Homo sapiens
  misc_RNA (1)...(19): siRNA sense strand
ccagccagauuccuugguu

SEQ ID NO: 2184482 - RNA, 19 nt, Homo sapiens
  misc_RNA (1)...(19): siRNA sense strand
caccaaauccgucucucua

SEQ ID NO: 2184483 - RNA, 19 nt, Homo sapiens
  misc_RNA (1)...(19): siRNA sense strand
ccaguuggcugccuucacu

SEQ ID NO: 2184484 - RNA, 19 nt, Homo sapiens
  misc_RNA (1)...(19): siRNA sense strand
ggcagcagguggcagaguu

SEQ ID NO: 2184485 - RNA, 19 nt, Homo sapiens
  misc_RNA (1)...(19): siRNA sense strand
ucaaaugacugugaaagac

SEQ ID NO: 2184486 - RNA, 19 nt, Homo sapiens
  misc_RNA (1)...(19): siRNA sense strand
gggagaaugcccaaggaaa

SEQ ID NO: 2184487 - RNA, 19 nt, Homo sapiens
  misc_RNA (1)...(19): siRNA sense strand
aacaagggaugguucaaau

SEQ ID NO: 2184488 - RNA, 19 nt, Homo sapiens
  misc_RNA (1)...(19): siRNA sense strand
cagcagagccaccugaaca

SEQ ID NO: 2184489 - RNA, 19 nt, Homo sapiens
  misc_RNA (1)...(19): siRNA sense strand
gaaauccuggaccauguga

SEQ ID NO: 2184490 - RNA, 19 nt, Homo sapiens
  misc_RNA (1)...(19): siRNA sense strand
gaacagcaccaggaugucu

SEQ ID NO: 2184491 - RNA, 19 nt, Homo sapiens
  misc_RNA (1)...(19): siRNA sense strand
ccgggaguauuuagaagaa

SEQ ID NO: 2184492 - RNA, 19 nt, Homo sapiens
  misc_RNA (1)...(19): siRNA sense strand
aaaguuuccgggaguauuu

SEQ ID NO: 2184493 - RNA, 19 nt, Homo sapiens
  misc_RNA (1)...(19): siRNA sense strand
aggaacaucuuuagaaugc

SEQ ID NO: 2184494 - RNA, 19 nt, Homo sapiens
  misc_RNA (1)...(19): siRNA sense strand
gcaaagccaccacaaugag

SEQ ID NO: 2184495 - RNA, 19 nt, Homo sapiens
  misc_RNA (1)...(19): siRNA sense strand
uaucugugauggaggaaga

SEQ ID NO: 2184496 - RNA, 19 nt, Homo sapiens
  misc_RNA (1)...(19): siRNA sense strand
guaauccucuugacaugac

SEQ ID NO: 2184497 - RNA, 19 nt, Homo sapiens
  misc_RNA (1)...(19): siRNA sense strand
gaggagagagugugcaaag

SEQ ID NO: 2184498 - RNA, 19 nt, Homo sapiens
  misc_RNA (1)...(19): siRNA sense strand
caaacagagcugaagagaa

SEQ ID NO: 2184499 - RNA, 19 nt, Homo sapiens
  misc_RNA (1)...(19): siRNA sense strand
aaauuguccuguuggagaa

SEQ ID NO: 2184500 - RNA, 19 nt, Homo sapiens
  misc_RNA (1)...(19): siRNA sense strand
agagccaccugaacacuau

SEQ ID NO: 2184501 - RNA, 19 nt, Homo sapiens
  misc_RNA (1)...(19): siRNA sense strand
gaguuggaauuucaguuag

SEQ ID NO: 2184502 - RNA, 19 nt, Homo sapiens
  misc_RNA (1)...(19): siRNA sense strand
ccaggaagcccaguucaug

SEQ ID NO: 2184503 - RNA, 19 nt, Homo sapiens
  misc_RNA (1)...(19): siRNA sense strand
uagaaugcacuguguguga

SEQ ID NO: 2184504 - RNA, 19 nt, Homo sapiens
  misc_RNA (1)...(19): siRNA sense strand
gaggaacaucuuuagaaug

SEQ ID NO: 2184505 - RNA, 19 nt, Homo sapiens
  misc_RNA (1)...(19): siRNA sense strand
aaucacaccuuaugcaacu

SEQ ID NO: 2184506 - RNA, 19 nt, Homo sapiens
  misc_RNA (1)...(19): siRNA sense strand
gaagaagagacugguaauc

SEQ ID NO: 2184507 - RNA, 19 nt, Homo sapiens
  misc_RNA (1)...(19): siRNA sense strand
caacuuguacggucguuuc

SEQ ID NO: 2184508 - RNA, 19 nt, Homo sapiens
  misc_RNA (1)...(19): siRNA sense strand
gcagacuucauguucuaaa

SEQ ID NO: 2184509 - RNA, 19 nt, Homo sapiens
  misc_RNA (1)...(19): siRNA sense strand
uucagaaacucccauccua

SEQ ID NO: 2184510 - RNA, 19 nt, Homo sapiens
  misc_RNA (1)...(19): siRNA sense strand
gacgauaugccaaaguuuc

SEQ ID NO: 2184511 - RNA, 19 nt, Homo sapiens
  misc_RNA (1)...(19): siRNA sense strand
aaagcaagacaguuaaaug

SEQ ID NO: 2184512 - RNA, 19 nt, Homo sapiens
  misc_RNA (1)...(19): siRNA sense strand
ugaccuugcucaaacaucu

SEQ ID NO: 2184513 - RNA, 19 nt, Homo sapiens
  misc_RNA (1)...(19): siRNA sense strand
ugugaaagacuacaugaga

SEQ ID NO: 2184514 - RNA, 19 nt, Homo sapiens
  misc_RNA (1)...(19): siRNA sense strand
gagccacagcuuaguauca

SEQ ID NO: 2184515 - RNA, 19 nt, Homo sapiens
  misc_RNA (1)...(19): siRNA sense strand
ggaaaugaucauacucaag

SEQ ID NO: 2184516 - RNA, 19 nt, Homo sapiens
  misc_RNA (1)...(19): siRNA sense strand
aaacagagcugaagagaaa

SEQ ID NO: 2184517 - RNA, 19 nt, Homo sapiens
  misc_RNA (1)...(19): siRNA sense strand
gaacaaagggccucaguau

SEQ ID NO: 2184518 - RNA, 19 nt, Homo sapiens
  misc_RNA (1)...(19): siRNA sense strand
gaaaugaucauacucaaga

SEQ ID NO: 2184519 - RNA, 19 nt, Homo sapiens
  misc_RNA (1)...(19): siRNA sense strand
gcaagacaguuaaaugaug

SEQ ID NO: 2184520 - RNA, 19 nt, Homo sapiens
  misc_RNA (1)...(19): siRNA sense strand
ccagaaagcucaucacagu

SEQ ID NO: 2184521 - RNA, 19 nt, Homo sapiens
  misc_RNA (1)...(19): siRNA sense strand
gcaaagcccuggcccugaa

SEQ ID NO: 2184522 - RNA, 19 nt, Homo sapiens
  misc_RNA (1)...(19): siRNA sense strand
gaaauugaacagcaccuua

SEQ ID NO: 2184523 - RNA, 19 nt, Homo sapiens
  misc_RNA (1)...(19): siRNA sense strand
caauauaacuggauagaag

SEQ ID NO: 2184524 - RNA, 19 nt, Homo sapiens
  misc_RNA (1)...(19): siRNA sense strand
ccacagccacuuccaaaua

SEQ ID NO: 2184525 - RNA, 19 nt, Homo sapiens
  misc_RNA (1)...(19): siRNA sense strand
gacagaagcugagauggaa

SEQ ID NO: 2184526 - RNA, 19 nt, Homo sapiens
  misc_RNA (1)...(19): siRNA sense strand
caacugaccuugcucaaac

SEQ ID NO: 2184527 - RNA, 19 nt, Homo sapiens
  misc_RNA (1)...(19): siRNA sense strand
caagacaaguuccuucaug

SEQ ID NO: 2184528 - RNA, 19 nt, Homo sapiens
  misc_RNA (1)...(19): siRNA sense strand
ugagggagcuggcaaagug

SEQ ID NO: 2184529 - RNA, 19 nt, Homo sapiens
  misc_RNA (1)...(19): siRNA sense strand
gggcagacuucauguucua

SEQ ID NO: 2184530 - RNA, 19 nt, Homo sapiens
  misc_RNA (1)...(19): siRNA sense strand
gaaagcucaucacagugua

SEQ ID NO: 2184531 - RNA, 19 nt, Homo sapiens
  misc_RNA (1)...(19): siRNA sense strand
gcaucaauauaacuggaua

SEQ ID NO: 2184532 - RNA, 19 nt, Homo sapiens
  misc_RNA (1)...(19): siRNA sense strand
ggagagagugugcaaagaa

SEQ ID NO: 2184533 - RNA, 19 nt, Homo sapiens
  misc_RNA (1)...(19): siRNA sense strand
ggacagaagcugagaugga

SEQ ID NO: 2184534 - RNA, 19 nt, Homo sapiens
  misc_RNA (1)...(19): siRNA sense strand
gaaaucacaccuuaugcaa

SEQ ID NO: 2184535 - RNA, 19 nt, Homo sapiens
  misc_RNA (1)...(19): siRNA sense strand
gcaaugggcagacuucaug

SEQ ID NO: 2184536 - RNA, 19 nt, Homo sapiens
  misc_RNA (1)...(19): siRNA sense strand
gacucaggcuucucuagua

SEQ ID NO: 2184537 - RNA, 19 nt, Homo sapiens
  misc_RNA (1)...(19): siRNA sense strand
gauacuaccugggacagaa

SEQ ID NO: 2184538 - RNA, 19 nt, Homo sapiens
  misc_RNA (1)...(19): siRNA sense strand
ccaaauccgucucucuaga

SEQ ID NO: 2184539 - RNA, 19 nt, Homo sapiens
  misc_RNA (1)...(19): siRNA sense strand
gaucagagccacagcuuag

SEQ ID NO: 2184540 - RNA, 19 nt, Homo sapiens
  misc_RNA (1)...(19): siRNA sense strand
gagaacagcaccaggaugu

SEQ ID NO: 2184541 - RNA, 19 nt, Homo sapiens
  misc_RNA (1)...(19): siRNA sense strand
ugacaugacuucaggaacu

SEQ ID NO: 2184542 - RNA, 19 nt, Homo sapiens
  misc_RNA (1)...(19): siRNA sense strand
cagaggaacaucuuuagaa

SEQ ID NO: 2184543 - RNA, 19 nt, Homo sapiens
  misc_RNA (1)...(19): siRNA sense strand
ggaacaaagggccucagua

SEQ ID NO: 2184544 - RNA, 19 nt, Homo sapiens
  misc_RNA (1)...(19): siRNA sense strand
gucaaggucugguacuuug

SEQ ID NO: 2184545 - RNA, 19 nt, Homo sapiens
  misc_RNA (1)...(19): siRNA sense strand
gacaaaagcaagacaguua

SEQ ID NO: 2184546 - RNA, 19 nt, Homo sapiens
  misc_RNA (1)...(19): siRNA sense strand
gaaaaccuuccucuaaaua

SEQ ID NO: 2184547 - RNA, 19 nt, Homo sapiens
  misc_RNA (1)...(19): siRNA sense strand
cagaaaugcaggacaguuu

SEQ ID NO: 2184548 - RNA, 19 nt, Homo sapiens
  misc_RNA (1)...(19): siRNA sense strand
uggcagaguuggaauuuca

SEQ ID NO: 2184549 - RNA, 19 nt, Homo sapiens
  misc_RNA (1)...(19): siRNA sense strand
agaggaacaucuuuagaau

SEQ ID NO: 2184550 - RNA, 19 nt, Homo sapiens
  misc_RNA (1)...(19): siRNA sense strand
guagaaagccaagagauca

SEQ ID NO: 2184551 - RNA, 19 nt, Homo sapiens
  misc_RNA (1)...(19): siRNA sense strand
agaguuggaauuucaguua

SEQ ID NO: 2184552 - RNA, 19 nt, Homo sapiens
  misc_RNA (1)...(19): siRNA sense strand
ucuaguaucugcccaaugg

SEQ ID NO: 2184553 - RNA, 19 nt, Homo sapiens
  misc_RNA (1)...(19): siRNA sense strand
acaaguuccuucauguuga

SEQ ID NO: 2184554 - RNA, 19 nt, Homo sapiens
  misc_RNA (1)...(19): siRNA sense strand
gacaaguuccuucauguug

SEQ ID NO: 2184555 - RNA, 19 nt, Homo sapiens
  misc_RNA (1)...(19): siRNA sense strand
cacagccacuuccaaauau

SEQ ID NO: 2184556 - RNA, 19 nt, Homo sapiens
  misc_RNA (1)...(19): siRNA sense strand
ccagaguccugcugagaau

SEQ ID NO: 2184557 - RNA, 19 nt, Homo sapiens
  misc_RNA (1)...(19): siRNA sense strand
gugcaaagccaccacaaug

SEQ ID NO: 2184558 - RNA, 19 nt, Homo sapiens
  misc_RNA (1)...(19): siRNA sense strand
ggaggaagaguuucugcuu

SEQ ID NO: 2184559 - RNA, 19 nt, Homo sapiens
  misc_RNA (1)...(19): siRNA sense strand
aggaagaguuucugcuuga

SEQ ID NO: 2184560 - RNA, 19 nt, Homo sapiens
  misc_RNA (1)...(19): siRNA sense strand
aagcaagacaguuaaauga

SEQ ID NO: 2184561 - RNA, 19 nt, Homo sapiens
  misc_RNA (1)...(19): siRNA sense strand
gugaaagacuacaugagau

SEQ ID NO: 2184562 - RNA, 19 nt, Homo sapiens
  misc_RNA (1)...(19): siRNA sense strand
ggagaaugcccaaggaaag

SEQ ID NO: 2184563 - RNA, 19 nt, Homo sapiens
  misc_RNA (1)...(19): siRNA sense strand
aaaugacugugaaagacua

SEQ ID NO: 2184564 - RNA, 19 nt, Homo sapiens
  misc_RNA (1)...(19): siRNA sense strand
ccgagcaacugcaaacguu

SEQ ID NO: 2184565 - RNA, 19 nt, Homo sapiens
  misc_RNA (1)...(19): siRNA sense strand
ggacaugucagaggaggaa

SEQ ID NO: 2184566 - RNA, 19 nt, Homo sapiens
  misc_RNA (1)...(19): siRNA sense strand
ugagaucuuugcaucaguu

SEQ ID NO: 2184567 - RNA, 19 nt, Homo sapiens
  misc_RNA (1)...(19): siRNA sense strand
caaccacagcuuacucgua

SEQ ID NO: 2184568 - RNA, 19 nt, Homo sapiens
  misc_RNA (1)...(19): siRNA sense strand
ucacaccaaccacagcuua

SEQ ID NO: 2184569 - RNA, 19 nt, Homo sapiens
  misc_RNA (1)...(19): siRNA sense strand
uaacccacgucacagaaau

SEQ ID NO: 2184570 - RNA, 19 nt, Homo sapiens
  misc_RNA (1)...(19): siRNA sense strand
acaaagggccucaguaucu

SEQ ID NO: 2184571 - RNA, 19 nt, Homo sapiens
  misc_RNA (1)...(19): siRNA sense strand
aagacgauaugccaaaguu

SEQ ID NO: 2184572 - RNA, 19 nt, Homo sapiens
  misc_RNA (1)...(19): siRNA sense strand
ccagccagauuccuugguu

SEQ ID NO: 2184573 - RNA, 19 nt, Homo sapiens
  misc_RNA (1)...(19): siRNA sense strand
gagaaugcccaaggaaaga

SEQ ID NO: 2184574 - RNA, 19 nt, Homo sapiens
  misc_RNA (1)...(19): siRNA sense strand
caaagggccucaguaucug

SEQ ID NO: 2184575 - RNA, 19 nt, Homo sapiens
  misc_RNA (1)...(19): siRNA sense strand
gcaaguguaccacaaagca

SEQ ID NO: 2184576 - RNA, 19 nt, Homo sapiens
  misc_RNA (1)...(19): siRNA sense strand
guagggcgagcaugucuuu

SEQ ID NO: 2184577 - RNA, 19 nt, Homo sapiens
  misc_RNA (1)...(19): siRNA sense strand
gagagagugugcaaagaac

SEQ ID NO: 2184578 - RNA, 19 nt, Homo sapiens
  misc_RNA (1)...(19): siRNA sense strand
ucaaaugacugugaaagac

SEQ ID NO: 2184579 - RNA, 19 nt, Homo sapiens
  misc_RNA (1)...(19): siRNA sense strand
ccaguuggcugccuucacu

SEQ ID NO: 2184580 - RNA, 19 nt, Homo sapiens
  misc_RNA (1)...(19): siRNA sense strand
ggcagcagguggcagaguu

SEQ ID NO: 2184581 - RNA, 19 nt, Homo sapiens
  misc_RNA (1)...(19): siRNA sense strand
caccaaauccgucucucua

SEQ ID NO: 2184582 - RNA, 19 nt, Homo sapiens
  misc_RNA (1)...(19): siRNA sense strand
gggagaaugcccaaggaaa

SEQ ID NO: 2184583 - RNA, 19 nt, Homo sapiens
  misc_RNA (1)...(19): siRNA sense strand
cagcagagccaccugaaca

SEQ ID NO: 2184584 - RNA, 19 nt, Homo sapiens
  misc_RNA (1)...(19): siRNA sense strand
gaaauccuggaccauguga

SEQ ID NO: 2184585 - RNA, 19 nt, Homo sapiens
  misc_RNA (1)...(19): siRNA sense strand
gaacagcaccaggaugucu

SEQ ID NO: 2184586 - RNA, 19 nt, Homo sapiens
  misc_RNA (1)...(19): siRNA sense strand
ccgggaguauuuagaagaa

SEQ ID NO: 2184587 - RNA, 19 nt, Homo sapiens
  misc_RNA (1)...(19): siRNA sense strand
aaaguuuccgggaguauuu

SEQ ID NO: 2184588 - RNA, 19 nt, Homo sapiens
  misc_RNA (1)...(19): siRNA sense strand
aggaacaucuuuagaaugc

SEQ ID NO: 2184589 - RNA, 19 nt, Homo sapiens
  misc_RNA (1)...(19): siRNA sense strand
gcaaagccaccacaaugag

SEQ ID NO: 2184590 - RNA, 19 nt, Homo sapiens
  misc_RNA (1)...(19): siRNA sense strand
uaucugugauggaggaaga

SEQ ID NO: 2184591 - RNA, 19 nt, Homo sapiens
  misc_RNA (1)...(19): siRNA sense strand
guaauccucuugacaugac

SEQ ID NO: 2184592 - RNA, 19 nt, Homo sapiens
  misc_RNA (1)...(19): siRNA sense strand
gaggagagagugugcaaag

SEQ ID NO: 2184593 - RNA, 19 nt, Homo sapiens
  misc_RNA (1)...(19): siRNA sense strand
caaacagagcugaagagaa

SEQ ID NO: 2184594 - RNA, 19 nt, Homo sapiens
  misc_RNA (1)...(19): siRNA sense strand
aaauuguccuguuggagaa

SEQ ID NO: 2184595 - RNA, 19 nt, Homo sapiens
  misc_RNA (1)...(19): siRNA sense strand
agagccaccugaacacuau

SEQ ID NO: 2184596 - RNA, 19 nt, Homo sapiens
  misc_RNA (1)...(19): siRNA sense strand
gaguuggaauuucaguuag

SEQ ID NO: 2184597 - RNA, 19 nt, Homo sapiens
  misc_RNA (1)...(19): siRNA sense strand
ccaggaagcccaguucaug

SEQ ID NO: 2184598 - RNA, 19 nt, Homo sapiens
  misc_RNA (1)...(19): siRNA sense strand
uagaaugcacuguguguga

SEQ ID NO: 2184599 - RNA, 19 nt, Homo sapiens
  misc_RNA (1)...(19): siRNA sense strand
gaggaacaucuuuagaaug

SEQ ID NO: 2184600 - RNA, 19 nt, Homo sapiens
  misc_RNA (1)...(19): siRNA sense strand
aaucacaccuuaugcaacu

SEQ ID NO: 2184601 - RNA, 19 nt, Homo sapiens
  misc_RNA (1)...(19): siRNA sense strand
gaagaagagacugguaauc

SEQ ID NO: 2184602 - RNA, 19 nt, Homo sapiens
  misc_RNA (1)...(19): siRNA sense strand
caacuuguacggucguuuc

SEQ ID NO: 2184603 - RNA, 19 nt, Homo sapiens
  misc_RNA (1)...(19): siRNA sense strand
gcagacuucauguucuaaa

SEQ ID NO: 2184604 - RNA, 19 nt, Homo sapiens
  misc_RNA (1)...(19): siRNA sense strand
gacgauaugccaaaguuuc

SEQ ID NO: 2184605 - RNA, 19 nt, Homo sapiens
  misc_RNA (1)...(19): siRNA sense strand
aaagcaagacaguuaaaug

SEQ ID NO: 2184606 - RNA, 19 nt, Homo sapiens
  misc_RNA (1)...(19): siRNA sense strand
uucagaaacucccauccua

SEQ ID NO: 2184607 - RNA, 19 nt, Homo sapiens
  misc_RNA (1)...(19): siRNA sense strand
ugaccuugcucaaacaucu

SEQ ID NO: 2184608 - RNA, 19 nt, Homo sapiens
  misc_RNA (1)...(19): siRNA sense strand
ugugaaagacuacaugaga

SEQ ID NO: 2184609 - RNA, 19 nt, Homo sapiens
  misc_RNA (1)...(19): siRNA sense strand
gguagaaagccaagagauc

SEQ ID NO: 2184610 - RNA, 19 nt, Homo sapiens
  misc_RNA (1)...(19): siRNA sense strand
ggaaaugaucauacucaag

SEQ ID NO: 2184611 - RNA, 19 nt, Homo sapiens
  misc_RNA (1)...(19): siRNA sense strand
gagccacagcuuaguauca

SEQ ID NO: 2184612 - RNA, 19 nt, Homo sapiens
  misc_RNA (1)...(19): siRNA sense strand
ucagagccacagcuuagua

SEQ ID NO: 2184613 - RNA, 19 nt, Homo sapiens
  misc_RNA (1)...(19): siRNA sense strand
gccaaaguuuccgggagua

SEQ ID NO: 2184614 - RNA, 19 nt, Homo sapiens
  misc_RNA (1)...(19): siRNA sense strand
gaaagcaaugggcagacuu

SEQ ID NO: 2184615 - RNA, 19 nt, Homo sapiens
  misc_RNA (1)...(19): siRNA sense strand
gcagguggcagaguuggaa

SEQ ID NO: 2184616 - RNA, 19 nt, Homo sapiens
  misc_RNA (1)...(19): siRNA sense strand
aaacagagcugaagagaaa

SEQ ID NO: 2184617 - RNA, 19 nt, Homo sapiens
  misc_RNA (1)...(19): siRNA sense strand
gaacaaagggccucaguau

SEQ ID NO: 2184618 - RNA, 19 nt, Homo sapiens
  misc_RNA (1)...(19): siRNA sense strand
gaaaugaucauacucaaga

SEQ ID NO: 2184619 - RNA, 19 nt, Homo sapiens
  misc_RNA (1)...(19): siRNA sense strand
gcaagacaguuaaaugaug

SEQ ID NO: 2184620 - RNA, 19 nt, Homo sapiens
  misc_RNA (1)...(19): siRNA sense strand
ccagaaagcucaucacagu

SEQ ID NO: 2184621 - RNA, 19 nt, Homo sapiens
  misc_RNA (1)...(19): siRNA sense strand
gcaaagcccuggcccugaa

SEQ ID NO: 2184622 - RNA, 19 nt, Homo sapiens
  misc_RNA (1)...(19): siRNA sense strand
gaaauugaacagcaccuua

SEQ ID NO: 2184623 - RNA, 19 nt, Homo sapiens
  misc_RNA (1)...(19): siRNA sense strand
caauauaacuggauagaag

SEQ ID NO: 2184624 - RNA, 19 nt, Homo sapiens
  misc_RNA (1)...(19): siRNA sense strand
ccacagccacuuccaaaua

SEQ ID NO: 2184625 - RNA, 19 nt, Homo sapiens
  misc_RNA (1)...(19): siRNA sense strand
gacagaagcugagauggaa

SEQ ID NO: 2184626 - RNA, 19 nt, Homo sapiens
  misc_RNA (1)...(19): siRNA sense strand
caacugaccuugcucaaac

SEQ ID NO: 2184627 - RNA, 19 nt, Homo sapiens
  misc_RNA (1)...(19): siRNA sense strand
caagacaaguuccuucaug

SEQ ID NO: 2184628 - RNA, 19 nt, Homo sapiens
  misc_RNA (1)...(19): siRNA sense strand
ugagggagcuggcaaagug

SEQ ID NO: 2184629 - RNA, 19 nt, Homo sapiens
  misc_RNA (1)...(19): siRNA sense strand
gggcagacuucauguucua

SEQ ID NO: 2184630 - RNA, 19 nt, Homo sapiens
  misc_RNA (1)...(19): siRNA sense strand
gaaagcucaucacagugua

SEQ ID NO: 2184631 - RNA, 19 nt, Homo sapiens
  misc_RNA (1)...(19): siRNA sense strand
gcaucaauauaacuggaua

SEQ ID NO: 2184632 - RNA, 19 nt, Homo sapiens
  misc_RNA (1)...(19): siRNA sense strand
ggagagagugugcaaagaa

SEQ ID NO: 2184633 - RNA, 19 nt, Homo sapiens
  misc_RNA (1)...(19): siRNA sense strand
ggacagaagcugagaugga

SEQ ID NO: 2184634 - RNA, 19 nt, Homo sapiens
  misc_RNA (1)...(19): siRNA sense strand
gaaaucacaccuuaugcaa

SEQ ID NO: 2184635 - RNA, 19 nt, Homo sapiens
  misc_RNA (1)...(19): siRNA sense strand
gcaaugggcagacuucaug

SEQ ID NO: 2184636 - RNA, 19 nt, Homo sapiens
  misc_RNA (1)...(19): siRNA sense strand
gacucaggcuucucuagua

SEQ ID NO: 2184637 - RNA, 19 nt, Homo sapiens
  misc_RNA (1)...(19): siRNA sense strand
gauacuaccugggacagaa

SEQ ID NO: 2184638 - RNA, 19 nt, Homo sapiens
  misc_RNA (1)...(19): siRNA sense strand
ccaaauccgucucucuaga

SEQ ID NO: 2184639 - RNA, 19 nt, Homo sapiens
  misc_RNA (1)...(19): siRNA sense strand
gaucagagccacagcuuag

SEQ ID NO: 2184640 - RNA, 19 nt, Homo sapiens
  misc_RNA (1)...(19): siRNA sense strand
gagaacagcaccaggaugu

SEQ ID NO: 2184641 - RNA, 19 nt, Homo sapiens
  misc_RNA (1)...(19): siRNA sense strand
ugacaugacuucaggaacu

SEQ ID NO: 2184642 - RNA, 19 nt, Homo sapiens
  misc_RNA (1)...(19): siRNA sense strand
cagaggaacaucuuuagaa

SEQ ID NO: 2184643 - RNA, 19 nt, Homo sapiens
  misc_RNA (1)...(19): siRNA sense strand
ggaacaaagggccucagua

SEQ ID NO: 2184644 - RNA, 19 nt, Homo sapiens
  misc_RNA (1)...(19): siRNA sense strand
gucaaggucugguacuuug

SEQ ID NO: 2184645 - RNA, 19 nt, Homo sapiens
  misc_RNA (1)...(19): siRNA sense strand
gacaaaagcaagacaguua

SEQ ID NO: 2184646 - RNA, 19 nt, Homo sapiens
  misc_RNA (1)...(19): siRNA sense strand
gaaaaccuuccucuaaaua

SEQ ID NO: 2184647 - RNA, 19 nt, Homo sapiens
  misc_RNA (1)...(19): siRNA sense strand
cagaaaugcaggacaguuu

SEQ ID NO: 2184648 - RNA, 19 nt, Homo sapiens
  misc_RNA (1)...(19): siRNA sense strand
uggcagaguuggaauuuca

SEQ ID NO: 2184649 - RNA, 19 nt, Homo sapiens
  misc_RNA (1)...(19): siRNA sense strand
agaggaacaucuuuagaau

SEQ ID NO: 2184650 - RNA, 19 nt, Homo sapiens
  misc_RNA (1)...(19): siRNA sense strand
guagaaagccaagagauca

SEQ ID NO: 2184651 - RNA, 19 nt, Homo sapiens
  misc_RNA (1)...(19): siRNA sense strand
agaguuggaauuucaguua

SEQ ID NO: 2184652 - RNA, 19 nt, Homo sapiens
  misc_RNA (1)...(19): siRNA sense strand
ucuaguaucugcccaaugg

SEQ ID NO: 2184653 - RNA, 19 nt, Homo sapiens
  misc_RNA (1)...(19): siRNA sense strand
acaaguuccuucauguuga

SEQ ID NO: 2184654 - RNA, 19 nt, Homo sapiens
  misc_RNA (1)...(19): siRNA sense strand
gacaaguuccuucauguug

SEQ ID NO: 2184655 - RNA, 19 nt, Homo sapiens
  misc_RNA (1)...(19): siRNA sense strand
cacagccacuuccaaauau

SEQ ID NO: 2184656 - RNA, 19 nt, Homo sapiens
  misc_RNA (1)...(19): siRNA sense strand
ccagaguccugcugagaau

SEQ ID NO: 2184657 - RNA, 19 nt, Homo sapiens
  misc_RNA (1)...(19): siRNA sense strand
gugcaaagccaccacaaug

SEQ ID NO: 2184658 - RNA, 19 nt, Homo sapiens
  misc_RNA (1)...(19): siRNA sense strand
ggaggaagaguuucugcuu

SEQ ID NO: 2184659 - RNA, 19 nt, Homo sapiens
  misc_RNA (1)...(19): siRNA sense strand
aggaagaguuucugcuuga

SEQ ID NO: 2184660 - RNA, 19 nt, Homo sapiens
  misc_RNA (1)...(19): siRNA sense strand
aagcaagacaguuaaauga

SEQ ID NO: 2184661 - RNA, 19 nt, Homo sapiens
  misc_RNA (1)...(19): siRNA sense strand
gugaaagacuacaugagau

SEQ ID NO: 2184662 - RNA, 19 nt, Homo sapiens
  misc_RNA (1)...(19): siRNA sense strand
ggagaaugcccaaggaaag

SEQ ID NO: 2184663 - RNA, 19 nt, Homo sapiens
  misc_RNA (1)...(19): siRNA sense strand
aaaugacugugaaagacua

SEQ ID NO: 2184664 - RNA, 19 nt, Homo sapiens
  misc_RNA (1)...(19): siRNA sense strand
ccgagcaacugcaaacguu

SEQ ID NO: 2184665 - RNA, 19 nt, Homo sapiens
  misc_RNA (1)...(19): siRNA sense strand
ggacaugucagaggaggaa

SEQ ID NO: 2184666 - RNA, 19 nt, Homo sapiens
  misc_RNA (1)...(19): siRNA sense strand
ugagaucuuugcaucaguu

SEQ ID NO: 2184667 - RNA, 19 nt, Homo sapiens
  misc_RNA (1)...(19): siRNA sense strand
caaccacagcuuacucgua

SEQ ID NO: 2184668 - RNA, 19 nt, Homo sapiens
  misc_RNA (1)...(19): siRNA sense strand
ucacaccaaccacagcuua

SEQ ID NO: 2184669 - RNA, 19 nt, Homo sapiens
  misc_RNA (1)...(19): siRNA sense strand
uaacccacgucacagaaau

SEQ ID NO: 2184670 - RNA, 19 nt, Homo sapiens
  misc_RNA (1)...(19): siRNA sense strand
acaaagggccucaguaucu

SEQ ID NO: 2184671 - RNA, 19 nt, Homo sapiens
  misc_RNA (1)...(19): siRNA sense strand
aagacgauaugccaaaguu

SEQ ID NO: 2184672 - RNA, 19 nt, Homo sapiens
  misc_RNA (1)...(19): siRNA sense strand
ccagccagauuccuugguu

SEQ ID NO: 2184673 - RNA, 19 nt, Homo sapiens
  misc_RNA (1)...(19): siRNA sense strand
gagaaugcccaaggaaaga

SEQ ID NO: 2184674 - RNA, 19 nt, Homo sapiens
  misc_RNA (1)...(19): siRNA sense strand
caaagggccucaguaucug

SEQ ID NO: 2184675 - RNA, 19 nt, Homo sapiens
  misc_RNA (1)...(19): siRNA sense strand
gcaaguguaccacaaagca

SEQ ID NO: 2184676 - RNA, 19 nt, Homo sapiens
  misc_RNA (1)...(19): siRNA sense strand
guagggcgagcaugucuuu

SEQ ID NO: 2184677 - RNA, 19 nt, Homo sapiens
  misc_RNA (1)...(19): siRNA sense strand
gagagagugugcaaagaac

SEQ ID NO: 2184678 - RNA, 19 nt, Homo sapiens
  misc_RNA (1)...(19): siRNA sense strand
ucaaaugacugugaaagac

SEQ ID NO: 2184679 - RNA, 19 nt, Homo sapiens
  misc_RNA (1)...(19): siRNA sense strand
ccaguuggcugccuucacu

SEQ ID NO: 2184680 - RNA, 19 nt, Homo sapiens
  misc_RNA (1)...(19): siRNA sense strand
ggcagcagguggcagaguu

SEQ ID NO: 2184681 - RNA, 19 nt, Homo sapiens
  misc_RNA (1)...(19): siRNA sense strand
caccaaauccgucucucua

SEQ ID NO: 2184682 - RNA, 19 nt, Homo sapiens
  misc_RNA (1)...(19): siRNA sense strand
gggagaaugcccaaggaaa

SEQ ID NO: 2184683 - RNA, 19 nt, Homo sapiens
  misc_RNA (1)...(19): siRNA sense strand
cagcagagccaccugaaca

SEQ ID NO: 2184684 - RNA, 19 nt, Homo sapiens
  misc_RNA (1)...(19): siRNA sense strand
gaaauccuggaccauguga

SEQ ID NO: 2184685 - RNA, 19 nt, Homo sapiens
  misc_RNA (1)...(19): siRNA sense strand
gaacagcaccaggaugucu

SEQ ID NO: 2184686 - RNA, 19 nt, Homo sapiens
  misc_RNA (1)...(19): siRNA sense strand
ccgggaguauuuagaagaa

SEQ ID NO: 2184687 - RNA, 19 nt, Homo sapiens
  misc_RNA (1)...(19): siRNA sense strand
aaaguuuccgggaguauuu

SEQ ID NO: 2184688 - RNA, 19 nt, Homo sapiens
  misc_RNA (1)...(19): siRNA sense strand
aggaacaucuuuagaaugc

SEQ ID NO: 2184689 - RNA, 19 nt, Homo sapiens
  misc_RNA (1)...(19): siRNA sense strand
gcaaagccaccacaaugag

SEQ ID NO: 2184690 - RNA, 19 nt, Homo sapiens
  misc_RNA (1)...(19): siRNA sense strand
uaucugugauggaggaaga

SEQ ID NO: 2184691 - RNA, 19 nt, Homo sapiens
  misc_RNA (1)...(19): siRNA sense strand
guaauccucuugacaugac

SEQ ID NO: 2184692 - RNA, 19 nt, Homo sapiens
  misc_RNA (1)...(19): siRNA sense strand
gaggagagagugugcaaag

SEQ ID NO: 2184693 - RNA, 19 nt, Homo sapiens
  misc_RNA (1)...(19): siRNA sense strand
caaacagagcugaagagaa

SEQ ID NO: 2184694 - RNA, 19 nt, Homo sapiens
  misc_RNA (1)...(19): siRNA sense strand
aaauuguccuguuggagaa

SEQ ID NO: 2184695 - RNA, 19 nt, Homo sapiens
  misc_RNA (1)...(19): siRNA sense strand
agagccaccugaacacuau

SEQ ID NO: 2184696 - RNA, 19 nt, Homo sapiens
  misc_RNA (1)...(19): siRNA sense strand
gaguuggaauuucaguuag

SEQ ID NO: 2184697 - RNA, 19 nt, Homo sapiens
  misc_RNA (1)...(19): siRNA sense strand
ccaggaagcccaguucaug

SEQ ID NO: 2184698 - RNA, 19 nt, Homo sapiens
  misc_RNA (1)...(19): siRNA sense strand
uagaaugcacuguguguga

SEQ ID NO: 2184699 - RNA, 19 nt, Homo sapiens
  misc_RNA (1)...(19): siRNA sense strand
gaggaacaucuuuagaaug

SEQ ID NO: 2184700 - RNA, 19 nt, Homo sapiens
  misc_RNA (1)...(19): siRNA sense strand
aaucacaccuuaugcaacu

SEQ ID NO: 2184701 - RNA, 19 nt, Homo sapiens
  misc_RNA (1)...(19): siRNA sense strand
gaagaagagacugguaauc

SEQ ID NO: 2184702 - RNA, 19 nt, Homo sapiens
  misc_RNA (1)...(19): siRNA sense strand
caacuuguacggucguuuc

SEQ ID NO: 2184703 - RNA, 19 nt, Homo sapiens
  misc_RNA (1)...(19): siRNA sense strand
gcagacuucauguucuaaa

SEQ ID NO: 2184704 - RNA, 19 nt, Homo sapiens
  misc_RNA (1)...(19): siRNA sense strand
gacgauaugccaaaguuuc

SEQ ID NO: 2184705 - RNA, 19 nt, Homo sapiens
  misc_RNA (1)...(19): siRNA sense strand
aaagcaagacaguuaaaug

SEQ ID NO: 2184706 - RNA, 19 nt, Homo sapiens
  misc_RNA (1)...(19): siRNA sense strand
uucagaaacucccauccua

SEQ ID NO: 2184707 - RNA, 19 nt, Homo sapiens
  misc_RNA (1)...(19): siRNA sense strand
ugaccuugcucaaacaucu

SEQ ID NO: 2184708 - RNA, 19 nt, Homo sapiens
  misc_RNA (1)...(19): siRNA sense strand
ugugaaagacuacaugaga

SEQ ID NO: 2184709 - RNA, 19 nt, Homo sapiens
  misc_RNA (1)...(19): siRNA sense strand
gguagaaagccaagagauc

SEQ ID NO: 2184710 - RNA, 19 nt, Homo sapiens
  misc_RNA (1)...(19): siRNA sense strand
ggaaaugaucauacucaag

SEQ ID NO: 2184711 - RNA, 19 nt, Homo sapiens
  misc_RNA (1)...(19): siRNA sense strand
gagccacagcuuaguauca

SEQ ID NO: 2184712 - RNA, 19 nt, Homo sapiens
  misc_RNA (1)...(19): siRNA sense strand
ucagagccacagcuuagua

SEQ ID NO: 2184713 - RNA, 19 nt, Homo sapiens
  misc_RNA (1)...(19): siRNA sense strand
gccaaaguuuccgggagua

SEQ ID NO: 2184714 - RNA, 19 nt, Homo sapiens
  misc_RNA (1)...(19): siRNA sense strand
gaaagcaaugggcagacuu

SEQ ID NO: 2184715 - RNA, 19 nt, Homo sapiens
  misc_RNA (1)...(19): siRNA sense strand
gcagguggcagaguuggaa

SEQ ID NO: 2184716 - RNA, 19 nt, Homo sapiens
  misc_RNA (1)...(19): siRNA sense strand
gaucagaccagacaaauuu

SEQ ID NO: 2184717 - RNA, 19 nt, Homo sapiens
  misc_RNA (1)...(19): siRNA sense strand
ggaagaauacucacaacua

SEQ ID NO: 2184718 - RNA, 19 nt, Homo sapiens
  misc_RNA (1)...(19): siRNA sense strand
ucagagagucuuccaauua

SEQ ID NO: 2184719 - RNA, 19 nt, Homo sapiens
  misc_RNA (1)...(19): siRNA sense strand
gaagaauacucacaacuac

SEQ ID NO: 2184720 - RNA, 19 nt, Homo sapiens
  misc_RNA (1)...(19): siRNA sense strand
ccaggaagauacuguguuu

SEQ ID NO: 2184721 - RNA, 19 nt, Homo sapiens
  misc_RNA (1)...(19): siRNA sense strand
uaagcaagcugccucugua

SEQ ID NO: 2184722 - RNA, 19 nt, Homo sapiens
  misc_RNA (1)...(19): siRNA sense strand
cuucauggcuuuccacuuu

SEQ ID NO: 2184723 - RNA, 19 nt, Homo sapiens
  misc_RNA (1)...(19): siRNA sense strand
ggagggaggugacgaaugg

SEQ ID NO: 2184724 - RNA, 19 nt, Homo sapiens
  misc_RNA (1)...(19): siRNA sense strand
gggaggugcuucauuagaa

SEQ ID NO: 2184725 - RNA, 19 nt, Homo sapiens
  misc_RNA (1)...(19): siRNA sense strand
ggaaagucauggcaggaaa

SEQ ID NO: 2184726 - RNA, 19 nt, Homo sapiens
  misc_RNA (1)...(19): siRNA sense strand
cagagagacuguucagaaa

SEQ ID NO: 2184727 - RNA, 19 nt, Homo sapiens
  misc_RNA (1)...(19): siRNA sense strand
gcagauaucaccagagaga

SEQ ID NO: 2184728 - RNA, 19 nt, Homo sapiens
  misc_RNA (1)...(19): siRNA sense strand
caacaagcauccagcacuu

SEQ ID NO: 2184729 - RNA, 19 nt, Homo sapiens
  misc_RNA (1)...(19): siRNA sense strand
ggaaauggagccacaguau

SEQ ID NO: 2184730 - RNA, 19 nt, Homo sapiens
  misc_RNA (1)...(19): siRNA sense strand
gaaauggagccacaguauu

SEQ ID NO: 2184731 - RNA, 19 nt, Homo sapiens
  misc_RNA (1)...(19): siRNA sense strand
gaugacgucuuccuagaug

SEQ ID NO: 2184732 - RNA, 19 nt, Homo sapiens
  misc_RNA (1)...(19): siRNA sense strand
gggaacagcugggaucaga

SEQ ID NO: 2184733 - RNA, 19 nt, Homo sapiens
  misc_RNA (1)...(19): siRNA sense strand
cuugggaggugcuucauua

SEQ ID NO: 2184734 - RNA, 19 nt, Homo sapiens
  misc_RNA (1)...(19): siRNA sense strand
agaaggaucccaaguauau

SEQ ID NO: 2184735 - RNA, 19 nt, Homo sapiens
  misc_RNA (1)...(19): siRNA sense strand
gagaagaugcugccaugaa

SEQ ID NO: 2184736 - RNA, 19 nt, Homo sapiens
  misc_RNA (1)...(19): siRNA sense strand
gagaucuuguccuucauuu

SEQ ID NO: 2184737 - RNA, 19 nt, Homo sapiens
  misc_RNA (1)...(19): siRNA sense strand
cacaaggucuuaauccuau

SEQ ID NO: 2184738 - RNA, 19 nt, Homo sapiens
  misc_RNA (1)...(19): siRNA sense strand
ccagagagacuguucagaa

SEQ ID NO: 2184739 - RNA, 19 nt, Homo sapiens
  misc_RNA (1)...(19): siRNA sense strand
gaaucgggaugacgucuuc

SEQ ID NO: 2184740 - RNA, 19 nt, Homo sapiens
  misc_RNA (1)...(19): siRNA sense strand
uuagaaggaucccaaguau

SEQ ID NO: 2184741 - RNA, 19 nt, Homo sapiens
  misc_RNA (1)...(19): siRNA sense strand
gggcaggaacccaaugaua

SEQ ID NO: 2184742 - RNA, 19 nt, Homo sapiens
  misc_RNA (1)...(19): siRNA sense strand
ggaacuaucaggaaaguca

SEQ ID NO: 2184743 - RNA, 19 nt, Homo sapiens
  misc_RNA (1)...(19): siRNA sense strand
ggaaaaguaugucugaaga

SEQ ID NO: 2184744 - RNA, 19 nt, Homo sapiens
  misc_RNA (1)...(19): siRNA sense strand
gaaaguaaggcaagcagau

SEQ ID NO: 2184745 - RNA, 19 nt, Homo sapiens
  misc_RNA (1)...(19): siRNA sense strand
ucacugagccaccagauga

SEQ ID NO: 2184746 - RNA, 19 nt, Homo sapiens
  misc_RNA (1)...(19): siRNA sense strand
uaucagacaugaaguuaag

SEQ ID NO: 2184747 - RNA, 19 nt, Homo sapiens
  misc_RNA (1)...(19): siRNA sense strand
guuacagcauggaagaaua

SEQ ID NO: 2184748 - RNA, 19 nt, Homo sapiens
  misc_RNA (1)...(19): siRNA sense strand
aagcagauaucaccagaga

SEQ ID NO: 2184749 - RNA, 19 nt, Homo sapiens
  misc_RNA (1)...(19): siRNA sense strand
gggaugacgucuuccuaga

SEQ ID NO: 2184750 - RNA, 19 nt, Homo sapiens
  misc_RNA (1)...(19): siRNA sense strand
ggacaugacagccacacuu

SEQ ID NO: 2184751 - RNA, 19 nt, Homo sapiens
  misc_RNA (1)...(19): siRNA sense strand
ccaaggcacugaaaguaag

SEQ ID NO: 2184752 - RNA, 19 nt, Homo sapiens
  misc_RNA (1)...(19): siRNA sense strand
gaacauggucucagugacu

SEQ ID NO: 2184753 - RNA, 19 nt, Homo sapiens
  misc_RNA (1)...(19): siRNA sense strand
ggucacaacuagccggaau

SEQ ID NO: 2184754 - RNA, 19 nt, Homo sapiens
  misc_RNA (1)...(19): siRNA sense strand
aaguuaagguucucacauu

SEQ ID NO: 2184755 - RNA, 19 nt, Homo sapiens
  misc_RNA (1)...(19): siRNA sense strand
acaaagggauaucuguguu

SEQ ID NO: 2184756 - RNA, 19 nt, Homo sapiens
  misc_RNA (1)...(19): siRNA sense strand
cagagagucuuccaauuac

SEQ ID NO: 2184757 - RNA, 19 nt, Homo sapiens
  misc_RNA (1)...(19): siRNA sense strand
caagaagggcugccagguu

SEQ ID NO: 2184758 - RNA, 19 nt, Homo sapiens
  misc_RNA (1)...(19): siRNA sense strand
gacaugaaguuaagguucu

SEQ ID NO: 2184759 - RNA, 19 nt, Homo sapiens
  misc_RNA (1)...(19): siRNA sense strand
gacaugacagccacacuuu

SEQ ID NO: 2184760 - RNA, 19 nt, Homo sapiens
  misc_RNA (1)...(19): siRNA sense strand
gccaaggcacugaaaguaa

SEQ ID NO: 2184761 - RNA, 19 nt, Homo sapiens
  misc_RNA (1)...(19): siRNA sense strand
cagaaacaccucagugaug

SEQ ID NO: 2184762 - RNA, 19 nt, Homo sapiens
  misc_RNA (1)...(19): siRNA sense strand
caaagggauaucuguguuu

SEQ ID NO: 2184763 - RNA, 19 nt, Homo sapiens
  misc_RNA (1)...(19): siRNA sense strand
gauugaacauggucucagu

SEQ ID NO: 2184764 - RNA, 19 nt, Homo sapiens
  misc_RNA (1)...(19): siRNA sense strand
guacaaccucaagcuaaua

SEQ ID NO: 2184765 - RNA, 19 nt, Homo sapiens
  misc_RNA (1)...(19): siRNA sense strand
aaagggauaucuguguuug

SEQ ID NO: 2184766 - RNA, 19 nt, Homo sapiens
  misc_RNA (1)...(19): siRNA sense strand
gcaaaacuucaacucauua

SEQ ID NO: 2184767 - RNA, 19 nt, Homo sapiens
  misc_RNA (1)...(19): siRNA sense strand
ggaacccaaugauaccaau

SEQ ID NO: 2184768 - RNA, 19 nt, Homo sapiens
  misc_RNA (1)...(19): siRNA sense strand
gaagaugcugccaugaaga

SEQ ID NO: 2184769 - RNA, 19 nt, Homo sapiens
  misc_RNA (1)...(19): siRNA sense strand
ccugaagaauggaaguauu

SEQ ID NO: 2184770 - RNA, 19 nt, Homo sapiens
  misc_RNA (1)...(19): siRNA sense strand
gaaguuaagguucucacau

SEQ ID NO: 2184771 - RNA, 19 nt, Homo sapiens
  misc_RNA (1)...(19): siRNA sense strand
aaaguaaggcaagcagaua

SEQ ID NO: 2184772 - RNA, 19 nt, Homo sapiens
  misc_RNA (1)...(19): siRNA sense strand
gcuaugucuucauggcuuu

SEQ ID NO: 2184773 - RNA, 19 nt, Homo sapiens
  misc_RNA (1)...(19): siRNA sense strand
gaauagugaacguggcaaa

SEQ ID NO: 2184774 - RNA, 19 nt, Homo sapiens
  misc_RNA (1)...(19): siRNA sense strand
acacaaggucuuaauccua

SEQ ID NO: 2184775 - RNA, 19 nt, Homo sapiens
  misc_RNA (1)...(19): siRNA sense strand
gagccacaguauuugguau

SEQ ID NO: 2184776 - RNA, 19 nt, Homo sapiens
  misc_RNA (1)...(19): siRNA sense strand
ggucggauuucaccacaag

SEQ ID NO: 2184777 - RNA, 19 nt, Homo sapiens
  misc_RNA (1)...(19): siRNA sense strand
agaagaugcugccaugaag

SEQ ID NO: 2184778 - RNA, 19 nt, Homo sapiens
  misc_RNA (1)...(19): siRNA sense strand
gauggugggcuucaggaaa

SEQ ID NO: 2184779 - RNA, 19 nt, Homo sapiens
  misc_RNA (1)...(19): siRNA sense strand
gcaagcugccucuguaugg

SEQ ID NO: 2184780 - RNA, 19 nt, Homo sapiens
  misc_RNA (1)...(19): siRNA sense strand
aaaagugucuguguucuaa

SEQ ID NO: 2184781 - RNA, 19 nt, Homo sapiens
  misc_RNA (1)...(19): siRNA sense strand
cagccacacuuuaccugaa

SEQ ID NO: 2184782 - RNA, 19 nt, Homo sapiens
  misc_RNA (1)...(19): siRNA sense strand
ggaucagaccagacaaauu

SEQ ID NO: 2184783 - RNA, 19 nt, Homo sapiens
  misc_RNA (1)...(19): siRNA sense strand
gaaacgucauggucacaac

SEQ ID NO: 2184784 - RNA, 19 nt, Homo sapiens
  misc_RNA (1)...(19): siRNA sense strand
ugaggcacgugacugagaa

SEQ ID NO: 2184785 - RNA, 19 nt, Homo sapiens
  misc_RNA (1)...(19): siRNA sense strand
cacuuuaccugaagaaugg

SEQ ID NO: 2184786 - RNA, 19 nt, Homo sapiens
  misc_RNA (1)...(19): siRNA sense strand
gcacuugcagaaauaaauc

SEQ ID NO: 2184787 - RNA, 19 nt, Homo sapiens
  misc_RNA (1)...(19): siRNA sense strand
gcacugaugacuguguuau

SEQ ID NO: 2184788 - RNA, 19 nt, Homo sapiens
  misc_RNA (1)...(19): siRNA sense strand
uccagcacuugcagaaaua

SEQ ID NO: 2184789 - RNA, 19 nt, Homo sapiens
  misc_RNA (1)...(19): siRNA sense strand
ggagccacaguauuuggua

SEQ ID NO: 2184790 - RNA, 19 nt, Homo sapiens
  misc_RNA (1)...(19): siRNA sense strand
gcuguuggccagucaguug

SEQ ID NO: 2184791 - RNA, 19 nt, Homo sapiens
  misc_RNA (1)...(19): siRNA sense strand
cagcauggaagaauacuca

SEQ ID NO: 2184792 - RNA, 19 nt, Homo sapiens
  misc_RNA (1)...(19): siRNA sense strand
cugaagaauggaaguauuu

SEQ ID NO: 2184793 - RNA, 19 nt, Homo sapiens
  misc_RNA (1)...(19): siRNA sense strand
uguacaaccucaagcuaau

SEQ ID NO: 2184794 - RNA, 19 nt, Homo sapiens
  misc_RNA (1)...(19): siRNA sense strand
caaggucuuaauccuauuu

SEQ ID NO: 2184795 - RNA, 19 nt, Homo sapiens
  misc_RNA (1)...(19): siRNA sense strand
gauaucuguguuugccuua

SEQ ID NO: 2184796 - RNA, 19 nt, Homo sapiens
  misc_RNA (1)...(19): siRNA sense strand
gcaauuagacaaugaaaag

SEQ ID NO: 2184797 - RNA, 19 nt, Homo sapiens
  misc_RNA (1)...(19): siRNA sense strand
gaaaagugucuguguucua

SEQ ID NO: 2184798 - RNA, 19 nt, Homo sapiens
  misc_RNA (1)...(19): siRNA sense strand
acacugcaauuagacaaug

SEQ ID NO: 2184799 - RNA, 19 nt, Homo sapiens
  misc_RNA (1)...(19): siRNA sense strand
ccaguuugcggucuacauu

SEQ ID NO: 2184800 - RNA, 19 nt, Homo sapiens
  misc_RNA (1)...(19): siRNA sense strand
cccaaccacugcagaccua

SEQ ID NO: 2184801 - RNA, 19 nt, Homo sapiens
  misc_RNA (1)...(19): siRNA sense strand
uagaaggaucccaaguaua

SEQ ID NO: 2184802 - RNA, 19 nt, Homo sapiens
  misc_RNA (1)...(19): siRNA sense strand
uauuugguaucucuugcua

SEQ ID NO: 2184803 - RNA, 19 nt, Homo sapiens
  misc_RNA (1)...(19): siRNA sense strand
ugacugagaaucgggauga

SEQ ID NO: 2184804 - RNA, 19 nt, Homo sapiens
  misc_RNA (1)...(19): siRNA sense strand
gcucauuucggguuuggaa

SEQ ID NO: 2184805 - RNA, 19 nt, Homo sapiens
  misc_RNA (1)...(19): siRNA sense strand
cuugggaacuaucaggaaa

SEQ ID NO: 2184806 - RNA, 19 nt, Homo sapiens
  misc_RNA (1)...(19): siRNA sense strand
agacugaggagccuuuguu

SEQ ID NO: 2184807 - RNA, 19 nt, Homo sapiens
  misc_RNA (1)...(19): siRNA sense strand
gcauccagcacuugcagaa

SEQ ID NO: 2184808 - RNA, 19 nt, Homo sapiens
  misc_RNA (1)...(19): siRNA sense strand
ccucagugaugccauugug

SEQ ID NO: 2184809 - RNA, 19 nt, Homo sapiens
  misc_RNA (1)...(19): siRNA sense strand
acaccucagugaugccauu

SEQ ID NO: 2184810 - RNA, 19 nt, Homo sapiens
  misc_RNA (1)...(19): siRNA sense strand
ugaggagccuuuguuccaa

SEQ ID NO: 2184811 - RNA, 19 nt, Homo sapiens
  misc_RNA (1)...(19): siRNA sense strand
uagccggaauguuguacaa

SEQ ID NO: 2184812 - RNA, 19 nt, Homo sapiens
  misc_RNA (1)...(19): siRNA sense strand
ggaaacgucauggucacaa

SEQ ID NO: 2184813 - RNA, 19 nt, Homo sapiens
  misc_RNA (1)...(19): siRNA sense strand
gugaugccauuguggaagu

SEQ ID NO: 2184814 - RNA, 19 nt, Homo sapiens
  misc_RNA (1)...(19): siRNA sense strand
gaccccaacuugaaagaaa

SEQ ID NO: 2184815 - RNA, 19 nt, Homo sapiens
  misc_RNA (1)...(19): siRNA sense strand
ggcaggaacccaaugauac

SEQ ID NO: 2184816 - RNA, 19 nt, Homo sapiens
  misc_RNA (1)...(19): siRNA sense strand
gaucagaccagacaaauuu

SEQ ID NO: 2184817 - RNA, 19 nt, Homo sapiens
  misc_RNA (1)...(19): siRNA sense strand
ggaagaauacucacaacua

SEQ ID NO: 2184818 - RNA, 19 nt, Homo sapiens
  misc_RNA (1)...(19): siRNA sense strand
ucagagagucuuccaauua

SEQ ID NO: 2184819 - RNA, 19 nt, Homo sapiens
  misc_RNA (1)...(19): siRNA sense strand
gaagaauacucacaacuac

SEQ ID NO: 2184820 - RNA, 19 nt, Homo sapiens
  misc_RNA (1)...(19): siRNA sense strand
ccaggaagauacuguguuu

SEQ ID NO: 2184821 - RNA, 19 nt, Homo sapiens
  misc_RNA (1)...(19): siRNA sense strand
uaagcaagcugccucugua

SEQ ID NO: 2184822 - RNA, 19 nt, Homo sapiens
  misc_RNA (1)...(19): siRNA sense strand
cuucauggcuuuccacuuu

SEQ ID NO: 2184823 - RNA, 19 nt, Homo sapiens
  misc_RNA (1)...(19): siRNA sense strand
ggagggaggugacgaaugg

SEQ ID NO: 2184824 - RNA, 19 nt, Homo sapiens
  misc_RNA (1)...(19): siRNA sense strand
gggaggugcuucauuagaa

SEQ ID NO: 2184825 - RNA, 19 nt, Homo sapiens
  misc_RNA (1)...(19): siRNA sense strand
ggaaagucauggcaggaaa

SEQ ID NO: 2184826 - RNA, 19 nt, Homo sapiens
  misc_RNA (1)...(19): siRNA sense strand
cagagagacuguucagaaa

SEQ ID NO: 2184827 - RNA, 19 nt, Homo sapiens
  misc_RNA (1)...(19): siRNA sense strand
gcagauaucaccagagaga

SEQ ID NO: 2184828 - RNA, 19 nt, Homo sapiens
  misc_RNA (1)...(19): siRNA sense strand
caacaagcauccagcacuu

SEQ ID NO: 2184829 - RNA, 19 nt, Homo sapiens
  misc_RNA (1)...(19): siRNA sense strand
ggaaauggagccacaguau

SEQ ID NO: 2184830 - RNA, 19 nt, Homo sapiens
  misc_RNA (1)...(19): siRNA sense strand
gaaauggagccacaguauu

SEQ ID NO: 2184831 - RNA, 19 nt, Homo sapiens
  misc_RNA (1)...(19): siRNA sense strand
gaugacgucuuccuagaug

SEQ ID NO: 2184832 - RNA, 19 nt, Homo sapiens
  misc_RNA (1)...(19): siRNA sense strand
gggaacagcugggaucaga

SEQ ID NO: 2184833 - RNA, 19 nt, Homo sapiens
  misc_RNA (1)...(19): siRNA sense strand
cuugggaggugcuucauua

SEQ ID NO: 2184834 - RNA, 19 nt, Homo sapiens
  misc_RNA (1)...(19): siRNA sense strand
agaaggaucccaaguauau

SEQ ID NO: 2184835 - RNA, 19 nt, Homo sapiens
  misc_RNA (1)...(19): siRNA sense strand
gagaagaugcugccaugaa

SEQ ID NO: 2184836 - RNA, 19 nt, Homo sapiens
  misc_RNA (1)...(19): siRNA sense strand
gagaucuuguccuucauuu

SEQ ID NO: 2184837 - RNA, 19 nt, Homo sapiens
  misc_RNA (1)...(19): siRNA sense strand
cacaaggucuuaauccuau

SEQ ID NO: 2184838 - RNA, 19 nt, Homo sapiens
  misc_RNA (1)...(19): siRNA sense strand
ccagagagacuguucagaa

SEQ ID NO: 2184839 - RNA, 19 nt, Homo sapiens
  misc_RNA (1)...(19): siRNA sense strand
gaaucgggaugacgucuuc

SEQ ID NO: 2184840 - RNA, 19 nt, Homo sapiens
  misc_RNA (1)...(19): siRNA sense strand
uuagaaggaucccaaguau

SEQ ID NO: 2184841 - RNA, 19 nt, Homo sapiens
  misc_RNA (1)...(19): siRNA sense strand
gggcaggaacccaaugaua

SEQ ID NO: 2184842 - RNA, 19 nt, Homo sapiens
  misc_RNA (1)...(19): siRNA sense strand
ggaacuaucaggaaaguca

SEQ ID NO: 2184843 - RNA, 19 nt, Homo sapiens
  misc_RNA (1)...(19): siRNA sense strand
ggaaaaguaugucugaaga

SEQ ID NO: 2184844 - RNA, 19 nt, Homo sapiens
  misc_RNA (1)...(19): siRNA sense strand
gaaaguaaggcaagcagau

SEQ ID NO: 2184845 - RNA, 19 nt, Homo sapiens
  misc_RNA (1)...(19): siRNA sense strand
ucacugagccaccagauga

SEQ ID NO: 2184846 - RNA, 19 nt, Homo sapiens
  misc_RNA (1)...(19): siRNA sense strand
uaucagacaugaaguuaag

SEQ ID NO: 2184847 - RNA, 19 nt, Homo sapiens
  misc_RNA (1)...(19): siRNA sense strand
guuacagcauggaagaaua

SEQ ID NO: 2184848 - RNA, 19 nt, Homo sapiens
  misc_RNA (1)...(19): siRNA sense strand
aagcagauaucaccagaga

SEQ ID NO: 2184849 - RNA, 19 nt, Homo sapiens
  misc_RNA (1)...(19): siRNA sense strand
gggaugacgucuuccuaga

SEQ ID NO: 2184850 - RNA, 19 nt, Homo sapiens
  misc_RNA (1)...(19): siRNA sense strand
ggacaugacagccacacuu

SEQ ID NO: 2184851 - RNA, 19 nt, Homo sapiens
  misc_RNA (1)...(19): siRNA sense strand
ccaaggcacugaaaguaag

SEQ ID NO: 2184852 - RNA, 19 nt, Homo sapiens
  misc_RNA (1)...(19): siRNA sense strand
gaacauggucucagugacu

SEQ ID NO: 2184853 - RNA, 19 nt, Homo sapiens
  misc_RNA (1)...(19): siRNA sense strand
ggucacaacuagccggaau

SEQ ID NO: 2184854 - RNA, 19 nt, Homo sapiens
  misc_RNA (1)...(19): siRNA sense strand
aaguuaagguucucacauu

SEQ ID NO: 2184855 - RNA, 19 nt, Homo sapiens
  misc_RNA (1)...(19): siRNA sense strand
acaaagggauaucuguguu

SEQ ID NO: 2184856 - RNA, 19 nt, Homo sapiens
  misc_RNA (1)...(19): siRNA sense strand
cagagagucuuccaauuac

SEQ ID NO: 2184857 - RNA, 19 nt, Homo sapiens
  misc_RNA (1)...(19): siRNA sense strand
caagaagggcugccagguu

SEQ ID NO: 2184858 - RNA, 19 nt, Homo sapiens
  misc_RNA (1)...(19): siRNA sense strand
gacaugaaguuaagguucu

SEQ ID NO: 2184859 - RNA, 19 nt, Homo sapiens
  misc_RNA (1)...(19): siRNA sense strand
gacaugacagccacacuuu

SEQ ID NO: 2184860 - RNA, 19 nt, Homo sapiens
  misc_RNA (1)...(19): siRNA sense strand
gccaaggcacugaaaguaa

SEQ ID NO: 2184861 - RNA, 19 nt, Homo sapiens
  misc_RNA (1)...(19): siRNA sense strand
cagaaacaccucagugaug

SEQ ID NO: 2184862 - RNA, 19 nt, Homo sapiens
  misc_RNA (1)...(19): siRNA sense strand
caaagggauaucuguguuu

SEQ ID NO: 2184863 - RNA, 19 nt, Homo sapiens
  misc_RNA (1)...(19): siRNA sense strand
gauugaacauggucucagu

SEQ ID NO: 2184864 - RNA, 19 nt, Homo sapiens
  misc_RNA (1)...(19): siRNA sense strand
guacaaccucaagcuaaua

SEQ ID NO: 2184865 - RNA, 19 nt, Homo sapiens
  misc_RNA (1)...(19): siRNA sense strand
aaagggauaucuguguuug

SEQ ID NO: 2184866 - RNA, 19 nt, Homo sapiens
  misc_RNA (1)...(19): siRNA sense strand
gcaaaacuucaacucauua

SEQ ID NO: 2184867 - RNA, 19 nt, Homo sapiens
  misc_RNA (1)...(19): siRNA sense strand
ggaacccaaugauaccaau

SEQ ID NO: 2184868 - RNA, 19 nt, Homo sapiens
  misc_RNA (1)...(19): siRNA sense strand
gaagaugcugccaugaaga

SEQ ID NO: 2184869 - RNA, 19 nt, Homo sapiens
  misc_RNA (1)...(19): siRNA sense strand
ccugaagaauggaaguauu

SEQ ID NO: 2184870 - RNA, 19 nt, Homo sapiens
  misc_RNA (1)...(19): siRNA sense strand
gaaguuaagguucucacau

SEQ ID NO: 2184871 - RNA, 19 nt, Homo sapiens
  misc_RNA (1)...(19): siRNA sense strand
aaaguaaggcaagcagaua

SEQ ID NO: 2184872 - RNA, 19 nt, Homo sapiens
  misc_RNA (1)...(19): siRNA sense strand
gcuaugucuucauggcuuu

SEQ ID NO: 2184873 - RNA, 19 nt, Homo sapiens
  misc_RNA (1)...(19): siRNA sense strand
gaauagugaacguggcaaa

SEQ ID NO: 2184874 - RNA, 19 nt, Homo sapiens
  misc_RNA (1)...(19): siRNA sense strand
acacaaggucuuaauccua

SEQ ID NO: 2184875 - RNA, 19 nt, Homo sapiens
  misc_RNA (1)...(19): siRNA sense strand
gagccacaguauuugguau

SEQ ID NO: 2184876 - RNA, 19 nt, Homo sapiens
  misc_RNA (1)...(19): siRNA sense strand
ggucggauuucaccacaag

SEQ ID NO: 2184877 - RNA, 19 nt, Homo sapiens
  misc_RNA (1)...(19): siRNA sense strand
agaagaugcugccaugaag

SEQ ID NO: 2184878 - RNA, 19 nt, Homo sapiens
  misc_RNA (1)...(19): siRNA sense strand
gauggugggcuucaggaaa

SEQ ID NO: 2184879 - RNA, 19 nt, Homo sapiens
  misc_RNA (1)...(19): siRNA sense strand
gcaagcugccucuguaugg

SEQ ID NO: 2184880 - RNA, 19 nt, Homo sapiens
  misc_RNA (1)...(19): siRNA sense strand
aaaagugucuguguucuaa

SEQ ID NO: 2184881 - RNA, 19 nt, Homo sapiens
  misc_RNA (1)...(19): siRNA sense strand
cagccacacuuuaccugaa

SEQ ID NO: 2184882 - RNA, 19 nt, Homo sapiens
  misc_RNA (1)...(19): siRNA sense strand
ggaucagaccagacaaauu

SEQ ID NO: 2184883 - RNA, 19 nt, Homo sapiens
  misc_RNA (1)...(19): siRNA sense strand
gaaacgucauggucacaac

SEQ ID NO: 2184884 - RNA, 19 nt, Homo sapiens
  misc_RNA (1)...(19): siRNA sense strand
ugaggcacgugacugagaa

SEQ ID NO: 2184885 - RNA, 19 nt, Homo sapiens
  misc_RNA (1)...(19): siRNA sense strand
cacuuuaccugaagaaugg

SEQ ID NO: 2184886 - RNA, 19 nt, Homo sapiens
  misc_RNA (1)...(19): siRNA sense strand
gcacuugcagaaauaaauc

SEQ ID NO: 2184887 - RNA, 19 nt, Homo sapiens
  misc_RNA (1)...(19): siRNA sense strand
gcacugaugacuguguuau

SEQ ID NO: 2184888 - RNA, 19 nt, Homo sapiens
  misc_RNA (1)...(19): siRNA sense strand
uccagcacuugcagaaaua

SEQ ID NO: 2184889 - RNA, 19 nt, Homo sapiens
  misc_RNA (1)...(19): siRNA sense strand
ggagccacaguauuuggua

SEQ ID NO: 2184890 - RNA, 19 nt, Homo sapiens
  misc_RNA (1)...(19): siRNA sense strand
gcuguuggccagucaguug

SEQ ID NO: 2184891 - RNA, 19 nt, Homo sapiens
  misc_RNA (1)...(19): siRNA sense strand
cagcauggaagaauacuca

SEQ ID NO: 2184892 - RNA, 19 nt, Homo sapiens
  misc_RNA (1)...(19): siRNA sense strand
cugaagaauggaaguauuu

SEQ ID NO: 2184893 - RNA, 19 nt, Homo sapiens
  misc_RNA (1)...(19): siRNA sense strand
uguacaaccucaagcuaau

SEQ ID NO: 2184894 - RNA, 19 nt, Homo sapiens
  misc_RNA (1)...(19): siRNA sense strand
caaggucuuaauccuauuu

SEQ ID NO: 2184895 - RNA, 19 nt, Homo sapiens
  misc_RNA (1)...(19): siRNA sense strand
gauaucuguguuugccuua

SEQ ID NO: 2184896 - RNA, 19 nt, Homo sapiens
  misc_RNA (1)...(19): siRNA sense strand
gcaauuagacaaugaaaag

SEQ ID NO: 2184897 - RNA, 19 nt, Homo sapiens
  misc_RNA (1)...(19): siRNA sense strand
gaaaagugucuguguucua

SEQ ID NO: 2184898 - RNA, 19 nt, Homo sapiens
  misc_RNA (1)...(19): siRNA sense strand
acacugcaauuagacaaug

SEQ ID NO: 2184899 - RNA, 19 nt, Homo sapiens
  misc_RNA (1)...(19): siRNA sense strand
ccaguuugcggucuacauu

SEQ ID NO: 2184900 - RNA, 19 nt, Homo sapiens
  misc_RNA (1)...(19): siRNA sense strand
cccaaccacugcagaccua

SEQ ID NO: 2184901 - RNA, 19 nt, Homo sapiens
  misc_RNA (1)...(19): siRNA sense strand
uagaaggaucccaaguaua

SEQ ID NO: 2184902 - RNA, 19 nt, Homo sapiens
  misc_RNA (1)...(19): siRNA sense strand
uauuugguaucucuugcua

SEQ ID NO: 2184903 - RNA, 19 nt, Homo sapiens
  misc_RNA (1)...(19): siRNA sense strand
ugacugagaaucgggauga

SEQ ID NO: 2184904 - RNA, 19 nt, Homo sapiens
  misc_RNA (1)...(19): siRNA sense strand
gcucauuucggguuuggaa

SEQ ID NO: 2184905 - RNA, 19 nt, Homo sapiens
  misc_RNA (1)...(19): siRNA sense strand
cuugggaacuaucaggaaa

SEQ ID NO: 2184906 - RNA, 19 nt, Homo sapiens
  misc_RNA (1)...(19): siRNA sense strand
agacugaggagccuuuguu

SEQ ID NO: 2184907 - RNA, 19 nt, Homo sapiens
  misc_RNA (1)...(19): siRNA sense strand
gcauccagcacuugcagaa

SEQ ID NO: 2184908 - RNA, 19 nt, Homo sapiens
  misc_RNA (1)...(19): siRNA sense strand
ccucagugaugccauugug

SEQ ID NO: 2184909 - RNA, 19 nt, Homo sapiens
  misc_RNA (1)...(19): siRNA sense strand
acaccucagugaugccauu

SEQ ID NO: 2184910 - RNA, 19 nt, Homo sapiens
  misc_RNA (1)...(19): siRNA sense strand
ugaggagccuuuguuccaa

SEQ ID NO: 2184911 - RNA, 19 nt, Homo sapiens
  misc_RNA (1)...(19): siRNA sense strand
uagccggaauguuguacaa

SEQ ID NO: 2184912 - RNA, 19 nt, Homo sapiens
  misc_RNA (1)...(19): siRNA sense strand
ggaaacgucauggucacaa

SEQ ID NO: 2184913 - RNA, 19 nt, Homo sapiens
  misc_RNA (1)...(19): siRNA sense strand
gugaugccauuguggaagu

SEQ ID NO: 2184914 - RNA, 19 nt, Homo sapiens
  misc_RNA (1)...(19): siRNA sense strand
gaccccaacuugaaagaaa

SEQ ID NO: 2184915 - RNA, 19 nt, Homo sapiens
  misc_RNA (1)...(19): siRNA sense strand
ggcaggaacccaaugauac

SEQ ID NO: 2184916 - RNA, 19 nt, Homo sapiens
  misc_RNA (1)...(19): siRNA sense strand
uaaagggacuguauuauuc

SEQ ID NO: 2184917 - RNA, 19 nt, Homo sapiens
  misc_RNA (1)...(19): siRNA sense strand
gcagaugacgguuauauaa

SEQ ID NO: 2184918 - RNA, 19 nt, Homo sapiens
  misc_RNA (1)...(19): siRNA sense strand
gcaguuugcucaguuugua

SEQ ID NO: 2184919 - RNA, 19 nt, Homo sapiens
  misc_RNA (1)...(19): siRNA sense strand
gaucagacuuaauuuggaa

SEQ ID NO: 2184920 - RNA, 19 nt, Homo sapiens
  misc_RNA (1)...(19): siRNA sense strand
gaguauggaugauuaugaa

SEQ ID NO: 2184921 - RNA, 19 nt, Homo sapiens
  misc_RNA (1)...(19): siRNA sense strand
ugaaagcugugaaggauug

SEQ ID NO: 2184922 - RNA, 19 nt, Homo sapiens
  misc_RNA (1)...(19): siRNA sense strand
guaggacccugucugcuuu

SEQ ID NO: 2184923 - RNA, 19 nt, Homo sapiens
  misc_RNA (1)...(19): siRNA sense strand
gaugagugcuguuuauucu

SEQ ID NO: 2184924 - RNA, 19 nt, Homo sapiens
  misc_RNA (1)...(19): siRNA sense strand
guacuggauuuauaccaaa

SEQ ID NO: 2184925 - RNA, 19 nt, Homo sapiens
  misc_RNA (1)...(19): siRNA sense strand
ccagaugagugcuguuuau

SEQ ID NO: 2184926 - RNA, 19 nt, Homo sapiens
  misc_RNA (1)...(19): siRNA sense strand
ggacuucauugcaauucaa

SEQ ID NO: 2184927 - RNA, 19 nt, Homo sapiens
  misc_RNA (1)...(19): siRNA sense strand
gagaauguuucgcgagaau

SEQ ID NO: 2184928 - RNA, 19 nt, Homo sapiens
  misc_RNA (1)...(19): siRNA sense strand
aauggaguauggaugauua

SEQ ID NO: 2184929 - RNA, 19 nt, Homo sapiens
  misc_RNA (1)...(19): siRNA sense strand
gaaagcuucucauauccau

SEQ ID NO: 2184930 - RNA, 19 nt, Homo sapiens
  misc_RNA (1)...(19): siRNA sense strand
gaguguaccuguguaaugu

SEQ ID NO: 2184931 - RNA, 19 nt, Homo sapiens
  misc_RNA (1)...(19): siRNA sense strand
cuucagauguugcuuguga

SEQ ID NO: 2184932 - RNA, 19 nt, Homo sapiens
  misc_RNA (1)...(19): siRNA sense strand
gcaauucaaaccaagauau

SEQ ID NO: 2184933 - RNA, 19 nt, Homo sapiens
  misc_RNA (1)...(19): siRNA sense strand
ggaacugucauacuuaaau

SEQ ID NO: 2184934 - RNA, 19 nt, Homo sapiens
  misc_RNA (1)...(19): siRNA sense strand
ggaucagacuuaauuugga

SEQ ID NO: 2184935 - RNA, 19 nt, Homo sapiens
  misc_RNA (1)...(19): siRNA sense strand
ggaguauggaugauuauga

SEQ ID NO: 2184936 - RNA, 19 nt, Homo sapiens
  misc_RNA (1)...(19): siRNA sense strand
cgcgaaagcuucucauauc

SEQ ID NO: 2184937 - RNA, 19 nt, Homo sapiens
  misc_RNA (1)...(19): siRNA sense strand
gcacucugcauuuccaauu

SEQ ID NO: 2184938 - RNA, 19 nt, Homo sapiens
  misc_RNA (1)...(19): siRNA sense strand
gcgagaaucccaaggguau

SEQ ID NO: 2184939 - RNA, 19 nt, Homo sapiens
  misc_RNA (1)...(19): siRNA sense strand
gagaagggcagcacuacga

SEQ ID NO: 2184940 - RNA, 19 nt, Homo sapiens
  misc_RNA (1)...(19): siRNA sense strand
ggacuguauuauuccuauu

SEQ ID NO: 2184941 - RNA, 19 nt, Homo sapiens
  misc_RNA (1)...(19): siRNA sense strand
acucugcauuuccaauuua

SEQ ID NO: 2184942 - RNA, 19 nt, Homo sapiens
  misc_RNA (1)...(19): siRNA sense strand
ucauauccauuucuuguuc

SEQ ID NO: 2184943 - RNA, 19 nt, Homo sapiens
  misc_RNA (1)...(19): siRNA sense strand
gaucuugcuugcuucuaug

SEQ ID NO: 2184944 - RNA, 19 nt, Homo sapiens
  misc_RNA (1)...(19): siRNA sense strand
gggacuguauuauuccuau

SEQ ID NO: 2184945 - RNA, 19 nt, Homo sapiens
  misc_RNA (1)...(19): siRNA sense strand
ugggagaucuugcuugcuu

SEQ ID NO: 2184946 - RNA, 19 nt, Homo sapiens
  misc_RNA (1)...(19): siRNA sense strand
ggagaguguaccuguguaa

SEQ ID NO: 2184947 - RNA, 19 nt, Homo sapiens
  misc_RNA (1)...(19): siRNA sense strand
gaggagacgcggagaggaa

SEQ ID NO: 2184948 - RNA, 19 nt, Homo sapiens
  misc_RNA (1)...(19): siRNA sense strand
gcucaguuuguacuucuua

SEQ ID NO: 2184949 - RNA, 19 nt, Homo sapiens
  misc_RNA (1)...(19): siRNA sense strand
gauggcauuauucuucaua

SEQ ID NO: 2184950 - RNA, 19 nt, Homo sapiens
  misc_RNA (1)...(19): siRNA sense strand
gguaggacccugucugcuu

SEQ ID NO: 2184951 - RNA, 19 nt, Homo sapiens
  misc_RNA (1)...(19): siRNA sense strand
gaauggaguauggaugauu

SEQ ID NO: 2184952 - RNA, 19 nt, Homo sapiens
  misc_RNA (1)...(19): siRNA sense strand
gaucaacguugugggucuu

SEQ ID NO: 2184953 - RNA, 19 nt, Homo sapiens
  misc_RNA (1)...(19): siRNA sense strand
uuucaagacuauuguggaa

SEQ ID NO: 2184954 - RNA, 19 nt, Homo sapiens
  misc_RNA (1)...(19): siRNA sense strand
ucaagacuauuguggaaac

SEQ ID NO: 2184955 - RNA, 19 nt, Homo sapiens
  misc_RNA (1)...(19): siRNA sense strand
aagcuucucauauccauuu

SEQ ID NO: 2184956 - RNA, 19 nt, Homo sapiens
  misc_RNA (1)...(19): siRNA sense strand
ugaaugauaaacugacuga

SEQ ID NO: 2184957 - RNA, 19 nt, Homo sapiens
  misc_RNA (1)...(19): siRNA sense strand
uaggaggccugguuacagu

SEQ ID NO: 2184958 - RNA, 19 nt, Homo sapiens
  misc_RNA (1)...(19): siRNA sense strand
gacuggcggcugaagaaua

SEQ ID NO: 2184959 - RNA, 19 nt, Homo sapiens
  misc_RNA (1)...(19): siRNA sense strand
cuucuauguugcuguaauu

SEQ ID NO: 2184960 - RNA, 19 nt, Homo sapiens
  misc_RNA (1)...(19): siRNA sense strand
acuggcggcugaagaauau

SEQ ID NO: 2184961 - RNA, 19 nt, Homo sapiens
  misc_RNA (1)...(19): siRNA sense strand
gacaguacuuucuggaacu

SEQ ID NO: 2184962 - RNA, 19 nt, Homo sapiens
  misc_RNA (1)...(19): siRNA sense strand
uuggaacugucauacuuaa

SEQ ID NO: 2184963 - RNA, 19 nt, Homo sapiens
  misc_RNA (1)...(19): siRNA sense strand
uauagaggaaguuugauug

SEQ ID NO: 2184964 - RNA, 19 nt, Homo sapiens
  misc_RNA (1)...(19): siRNA sense strand
caauucaaaccaagauaug

SEQ ID NO: 2184965 - RNA, 19 nt, Homo sapiens
  misc_RNA (1)...(19): siRNA sense strand
guauugcagaugacgguua

SEQ ID NO: 2184966 - RNA, 19 nt, Homo sapiens
  misc_RNA (1)...(19): siRNA sense strand
agauguugcuugugacuca

SEQ ID NO: 2184967 - RNA, 19 nt, Homo sapiens
  misc_RNA (1)...(19): siRNA sense strand
cgauuaggaggccugguua

SEQ ID NO: 2184968 - RNA, 19 nt, Homo sapiens
  misc_RNA (1)...(19): siRNA sense strand
ucauugcaauucaaaccaa

SEQ ID NO: 2184969 - RNA, 19 nt, Homo sapiens
  misc_RNA (1)...(19): siRNA sense strand
gcgacuggcggcugaagaa

SEQ ID NO: 2184970 - RNA, 19 nt, Homo sapiens
  misc_RNA (1)...(19): siRNA sense strand
acugaaagcugugaaggau

SEQ ID NO: 2184971 - RNA, 19 nt, Homo sapiens
  misc_RNA (1)...(19): siRNA sense strand
guauggaugauuaugaaug

SEQ ID NO: 2184972 - RNA, 19 nt, Homo sapiens
  misc_RNA (1)...(19): siRNA sense strand
cagaugacgguuauauaau

SEQ ID NO: 2184973 - RNA, 19 nt, Homo sapiens
  misc_RNA (1)...(19): siRNA sense strand
cacucugcauuuccaauuu

SEQ ID NO: 2184974 - RNA, 19 nt, Homo sapiens
  misc_RNA (1)...(19): siRNA sense strand
gcgaaagcuucucauaucc

SEQ ID NO: 2184975 - RNA, 19 nt, Homo sapiens
  misc_RNA (1)...(19): siRNA sense strand
agaucuugcuugcuucuau

SEQ ID NO: 2184976 - RNA, 19 nt, Homo sapiens
  misc_RNA (1)...(19): siRNA sense strand
gggcagcacuacgagaaag

SEQ ID NO: 2184977 - RNA, 19 nt, Homo sapiens
  misc_RNA (1)...(19): siRNA sense strand
uucuggaacugcuagauuu

SEQ ID NO: 2184978 - RNA, 19 nt, Homo sapiens
  misc_RNA (1)...(19): siRNA sense strand
uguggaaacacccucauuu

SEQ ID NO: 2184979 - RNA, 19 nt, Homo sapiens
  misc_RNA (1)...(19): siRNA sense strand
uauugcagaugacgguuau

SEQ ID NO: 2184980 - RNA, 19 nt, Homo sapiens
  misc_RNA (1)...(19): siRNA sense strand
ccgcgaaagcuucucauau

SEQ ID NO: 2184981 - RNA, 19 nt, Homo sapiens
  misc_RNA (1)...(19): siRNA sense strand
uuuccuccauuaucucuuu

SEQ ID NO: 2184982 - RNA, 19 nt, Homo sapiens
  misc_RNA (1)...(19): siRNA sense strand
cgagaauguuucgcgagaa

SEQ ID NO: 2184983 - RNA, 19 nt, Homo sapiens
  misc_RNA (1)...(19): siRNA sense strand
uugcuucuauguugcugua

SEQ ID NO: 2184984 - RNA, 19 nt, Homo sapiens
  misc_RNA (1)...(19): siRNA sense strand
gcccuucacgagaauguuu

SEQ ID NO: 2184985 - RNA, 19 nt, Homo sapiens
  misc_RNA (1)...(19): siRNA sense strand
ucucauauccauuucuugu

SEQ ID NO: 2184986 - RNA, 19 nt, Homo sapiens
  misc_RNA (1)...(19): siRNA sense strand
gcuucuauguugcuguaau

SEQ ID NO: 2184987 - RNA, 19 nt, Homo sapiens
  misc_RNA (1)...(19): siRNA sense strand
acugcuagauuuccagaug

SEQ ID NO: 2184988 - RNA, 19 nt, Homo sapiens
  misc_RNA (1)...(19): siRNA sense strand
ugucugcuuuccucgguuu

SEQ ID NO: 2184989 - RNA, 19 nt, Homo sapiens
  misc_RNA (1)...(19): siRNA sense strand
cugcuagauuuccagauga

SEQ ID NO: 2184990 - RNA, 19 nt, Homo sapiens
  misc_RNA (1)...(19): siRNA sense strand
cuucucauauccauuucuu

SEQ ID NO: 2184991 - RNA, 19 nt, Homo sapiens
  misc_RNA (1)...(19): siRNA sense strand
gcuugugacucauauucuc

SEQ ID NO: 2184992 - RNA, 19 nt, Homo sapiens
  misc_RNA (1)...(19): siRNA sense strand
cuugcuugcuucuauguug

SEQ ID NO: 2184993 - RNA, 19 nt, Homo sapiens
  misc_RNA (1)...(19): siRNA sense strand
gcagcacuacgagaaagaa

SEQ ID NO: 2184994 - RNA, 19 nt, Homo sapiens
  misc_RNA (1)...(19): siRNA sense strand
caggagaagggcagcacua

SEQ ID NO: 2184995 - RNA, 19 nt, Homo sapiens
  misc_RNA (1)...(19): siRNA sense strand
guuauuuggaacugucaua

SEQ ID NO: 2184996 - RNA, 19 nt, Homo sapiens
  misc_RNA (1)...(19): siRNA sense strand
uuaaguggcagccgauuag

SEQ ID NO: 2184997 - RNA, 19 nt, Homo sapiens
  misc_RNA (1)...(19): siRNA sense strand
cagaugagugcuguuuauu

SEQ ID NO: 2184998 - RNA, 19 nt, Homo sapiens
  misc_RNA (1)...(19): siRNA sense strand
caugcuuccuuggcaguuu

SEQ ID NO: 2184999 - RNA, 19 nt, Homo sapiens
  misc_RNA (1)...(19): siRNA sense strand
uagaggaaguuugauugca

SEQ ID NO: 2185000 - RNA, 19 nt, Homo sapiens
  misc_RNA (1)...(19): siRNA sense strand
gaaggauugggagaucuug

SEQ ID NO: 2185001 - RNA, 19 nt, Homo sapiens
  misc_RNA (1)...(19): siRNA sense strand
uuaugcagaucaacguugu

SEQ ID NO: 2185002 - RNA, 19 nt, Homo sapiens
  misc_RNA (1)...(19): siRNA sense strand
auuuggaacugucauacuu

SEQ ID NO: 2185003 - RNA, 19 nt, Homo sapiens
  misc_RNA (1)...(19): siRNA sense strand
cuuuauagaggaaguuuga

SEQ ID NO: 2185004 - RNA, 19 nt, Homo sapiens
  misc_RNA (1)...(19): siRNA sense strand
uggagaguguaccugugua

SEQ ID NO: 2185005 - RNA, 19 nt, Homo sapiens
  misc_RNA (1)...(19): siRNA sense strand
cagaggagaaggacucagu

SEQ ID NO: 2185006 - RNA, 19 nt, Homo sapiens
  misc_RNA (1)...(19): siRNA sense strand
uugaauggaguauggauga

SEQ ID NO: 2185007 - RNA, 19 nt, Homo sapiens
  misc_RNA (1)...(19): siRNA sense strand
agaguguaccuguguaaug

SEQ ID NO: 2185008 - RNA, 19 nt, Homo sapiens
  misc_RNA (1)...(19): siRNA sense strand
aagauaugucggacgguua

SEQ ID NO: 2185009 - RNA, 19 nt, Homo sapiens
  misc_RNA (1)...(19): siRNA sense strand
ccuggucucacucgacuuu

SEQ ID NO: 2185010 - RNA, 19 nt, Homo sapiens
  misc_RNA (1)...(19): siRNA sense strand
gcggcugaagaauauauuu

SEQ ID NO: 2185011 - RNA, 19 nt, Homo sapiens
  misc_RNA (1)...(19): siRNA sense strand
ccgauuaggaggccugguu

SEQ ID NO: 2185012 - RNA, 19 nt, Homo sapiens
  misc_RNA (1)...(19): siRNA sense strand
caagacuauuguggaaaca

SEQ ID NO: 2185013 - RNA, 19 nt, Homo sapiens
  misc_RNA (1)...(19): siRNA sense strand
uuuaaguggcagccgauua

SEQ ID NO: 2185014 - RNA, 19 nt, Homo sapiens
  misc_RNA (1)...(19): siRNA sense strand
ugcagaugacgguuauaua

SEQ ID NO: 2185015 - RNA, 19 nt, Homo sapiens
  misc_RNA (1)...(19): siRNA sense strand
guuccuuccucucuguugu

SEQ ID NO: 2185016 - RNA, 19 nt, Homo sapiens
  misc_RNA (1)...(19): siRNA sense strand
uaaagggacuguauuauuc

SEQ ID NO: 2185017 - RNA, 19 nt, Homo sapiens
  misc_RNA (1)...(19): siRNA sense strand
gcagaugacgguuauauaa

SEQ ID NO: 2185018 - RNA, 19 nt, Homo sapiens
  misc_RNA (1)...(19): siRNA sense strand
gcaguuugcucaguuugua

SEQ ID NO: 2185019 - RNA, 19 nt, Homo sapiens
  misc_RNA (1)...(19): siRNA sense strand
gaucagacuuaauuuggaa

SEQ ID NO: 2185020 - RNA, 19 nt, Homo sapiens
  misc_RNA (1)...(19): siRNA sense strand
gaguauggaugauuaugaa

SEQ ID NO: 2185021 - RNA, 19 nt, Homo sapiens
  misc_RNA (1)...(19): siRNA sense strand
ugaaagcugugaaggauug

SEQ ID NO: 2185022 - RNA, 19 nt, Homo sapiens
  misc_RNA (1)...(19): siRNA sense strand
guaggacccugucugcuuu

SEQ ID NO: 2185023 - RNA, 19 nt, Homo sapiens
  misc_RNA (1)...(19): siRNA sense strand
gaugagugcuguuuauucu

SEQ ID NO: 2185024 - RNA, 19 nt, Homo sapiens
  misc_RNA (1)...(19): siRNA sense strand
guacuggauuuauaccaaa

SEQ ID NO: 2185025 - RNA, 19 nt, Homo sapiens
  misc_RNA (1)...(19): siRNA sense strand
ccagaugagugcuguuuau

SEQ ID NO: 2185026 - RNA, 19 nt, Homo sapiens
  misc_RNA (1)...(19): siRNA sense strand
ggacuucauugcaauucaa

SEQ ID NO: 2185027 - RNA, 19 nt, Homo sapiens
  misc_RNA (1)...(19): siRNA sense strand
gagaauguuucgcgagaau

SEQ ID NO: 2185028 - RNA, 19 nt, Homo sapiens
  misc_RNA (1)...(19): siRNA sense strand
aauggaguauggaugauua

SEQ ID NO: 2185029 - RNA, 19 nt, Homo sapiens
  misc_RNA (1)...(19): siRNA sense strand
gaaagcuucucauauccau

SEQ ID NO: 2185030 - RNA, 19 nt, Homo sapiens
  misc_RNA (1)...(19): siRNA sense strand
gaguguaccuguguaaugu

SEQ ID NO: 2185031 - RNA, 19 nt, Homo sapiens
  misc_RNA (1)...(19): siRNA sense strand
cuucagauguugcuuguga

SEQ ID NO: 2185032 - RNA, 19 nt, Homo sapiens
  misc_RNA (1)...(19): siRNA sense strand
gcaauucaaaccaagauau

SEQ ID NO: 2185033 - RNA, 19 nt, Homo sapiens
  misc_RNA (1)...(19): siRNA sense strand
ggaacugucauacuuaaau

SEQ ID NO: 2185034 - RNA, 19 nt, Homo sapiens
  misc_RNA (1)...(19): siRNA sense strand
ggaucagacuuaauuugga

SEQ ID NO: 2185035 - RNA, 19 nt, Homo sapiens
  misc_RNA (1)...(19): siRNA sense strand
ggaguauggaugauuauga

SEQ ID NO: 2185036 - RNA, 19 nt, Homo sapiens
  misc_RNA (1)...(19): siRNA sense strand
cgcgaaagcuucucauauc

SEQ ID NO: 2185037 - RNA, 19 nt, Homo sapiens
  misc_RNA (1)...(19): siRNA sense strand
gcacucugcauuuccaauu

SEQ ID NO: 2185038 - RNA, 19 nt, Homo sapiens
  misc_RNA (1)...(19): siRNA sense strand
gcgagaaucccaaggguau

SEQ ID NO: 2185039 - RNA, 19 nt, Homo sapiens
  misc_RNA (1)...(19): siRNA sense strand
gagaagggcagcacuacga

SEQ ID NO: 2185040 - RNA, 19 nt, Homo sapiens
  misc_RNA (1)...(19): siRNA sense strand
ggacuguauuauuccuauu

SEQ ID NO: 2185041 - RNA, 19 nt, Homo sapiens
  misc_RNA (1)...(19): siRNA sense strand
acucugcauuuccaauuua

SEQ ID NO: 2185042 - RNA, 19 nt, Homo sapiens
  misc_RNA (1)...(19): siRNA sense strand
ucauauccauuucuuguuc

SEQ ID NO: 2185043 - RNA, 19 nt, Homo sapiens
  misc_RNA (1)...(19): siRNA sense strand
gaucuugcuugcuucuaug

SEQ ID NO: 2185044 - RNA, 19 nt, Homo sapiens
  misc_RNA (1)...(19): siRNA sense strand
gggacuguauuauuccuau

SEQ ID NO: 2185045 - RNA, 19 nt, Homo sapiens
  misc_RNA (1)...(19): siRNA sense strand
ugggagaucuugcuugcuu

SEQ ID NO: 2185046 - RNA, 19 nt, Homo sapiens
  misc_RNA (1)...(19): siRNA sense strand
ggagaguguaccuguguaa

SEQ ID NO: 2185047 - RNA, 19 nt, Homo sapiens
  misc_RNA (1)...(19): siRNA sense strand
gaggagacgcggagaggaa

SEQ ID NO: 2185048 - RNA, 19 nt, Homo sapiens
  misc_RNA (1)...(19): siRNA sense strand
gcucaguuuguacuucuua

SEQ ID NO: 2185049 - RNA, 19 nt, Homo sapiens
  misc_RNA (1)...(19): siRNA sense strand
gauggcauuauucuucaua

SEQ ID NO: 2185050 - RNA, 19 nt, Homo sapiens
  misc_RNA (1)...(19): siRNA sense strand
gguaggacccugucugcuu

SEQ ID NO: 2185051 - RNA, 19 nt, Homo sapiens
  misc_RNA (1)...(19): siRNA sense strand
gaauggaguauggaugauu

SEQ ID NO: 2185052 - RNA, 19 nt, Homo sapiens
  misc_RNA (1)...(19): siRNA sense strand
gaucaacguugugggucuu

SEQ ID NO: 2185053 - RNA, 19 nt, Homo sapiens
  misc_RNA (1)...(19): siRNA sense strand
uuucaagacuauuguggaa

SEQ ID NO: 2185054 - RNA, 19 nt, Homo sapiens
  misc_RNA (1)...(19): siRNA sense strand
ucaagacuauuguggaaac

SEQ ID NO: 2185055 - RNA, 19 nt, Homo sapiens
  misc_RNA (1)...(19): siRNA sense strand
aagcuucucauauccauuu

SEQ ID NO: 2185056 - RNA, 19 nt, Homo sapiens
  misc_RNA (1)...(19): siRNA sense strand
ugaaugauaaacugacuga

SEQ ID NO: 2185057 - RNA, 19 nt, Homo sapiens
  misc_RNA (1)...(19): siRNA sense strand
uaggaggccugguuacagu

SEQ ID NO: 2185058 - RNA, 19 nt, Homo sapiens
  misc_RNA (1)...(19): siRNA sense strand
gacuggcggcugaagaaua

SEQ ID NO: 2185059 - RNA, 19 nt, Homo sapiens
  misc_RNA (1)...(19): siRNA sense strand
cuucuauguugcuguaauu

SEQ ID NO: 2185060 - RNA, 19 nt, Homo sapiens
  misc_RNA (1)...(19): siRNA sense strand
acuggcggcugaagaauau

SEQ ID NO: 2185061 - RNA, 19 nt, Homo sapiens
  misc_RNA (1)...(19): siRNA sense strand
gacaguacuuucuggaacu

SEQ ID NO: 2185062 - RNA, 19 nt, Homo sapiens
  misc_RNA (1)...(19): siRNA sense strand
uuggaacugucauacuuaa

SEQ ID NO: 2185063 - RNA, 19 nt, Homo sapiens
  misc_RNA (1)...(19): siRNA sense strand
uauagaggaaguuugauug

SEQ ID NO: 2185064 - RNA, 19 nt, Homo sapiens
  misc_RNA (1)...(19): siRNA sense strand
caauucaaaccaagauaug

SEQ ID NO: 2185065 - RNA, 19 nt, Homo sapiens
  misc_RNA (1)...(19): siRNA sense strand
guauugcagaugacgguua

SEQ ID NO: 2185066 - RNA, 19 nt, Homo sapiens
  misc_RNA (1)...(19): siRNA sense strand
agauguugcuugugacuca

SEQ ID NO: 2185067 - RNA, 19 nt, Homo sapiens
  misc_RNA (1)...(19): siRNA sense strand
cgauuaggaggccugguua

SEQ ID NO: 2185068 - RNA, 19 nt, Homo sapiens
  misc_RNA (1)...(19): siRNA sense strand
ucauugcaauucaaaccaa

SEQ ID NO: 2185069 - RNA, 19 nt, Homo sapiens
  misc_RNA (1)...(19): siRNA sense strand
gcgacuggcggcugaagaa

SEQ ID NO: 2185070 - RNA, 19 nt, Homo sapiens
  misc_RNA (1)...(19): siRNA sense strand
acugaaagcugugaaggau

SEQ ID NO: 2185071 - RNA, 19 nt, Homo sapiens
  misc_RNA (1)...(19): siRNA sense strand
guauggaugauuaugaaug

SEQ ID NO: 2185072 - RNA, 19 nt, Homo sapiens
  misc_RNA (1)...(19): siRNA sense strand
cagaugacgguuauauaau

SEQ ID NO: 2185073 - RNA, 19 nt, Homo sapiens
  misc_RNA (1)...(19): siRNA sense strand
cacucugcauuuccaauuu

SEQ ID NO: 2185074 - RNA, 19 nt, Homo sapiens
  misc_RNA (1)...(19): siRNA sense strand
gcgaaagcuucucauaucc

SEQ ID NO: 2185075 - RNA, 19 nt, Homo sapiens
  misc_RNA (1)...(19): siRNA sense strand
agaucuugcuugcuucuau

SEQ ID NO: 2185076 - RNA, 19 nt, Homo sapiens
  misc_RNA (1)...(19): siRNA sense strand
gggcagcacuacgagaaag

SEQ ID NO: 2185077 - RNA, 19 nt, Homo sapiens
  misc_RNA (1)...(19): siRNA sense strand
uucuggaacugcuagauuu

SEQ ID NO: 2185078 - RNA, 19 nt, Homo sapiens
  misc_RNA (1)...(19): siRNA sense strand
uguggaaacacccucauuu

SEQ ID NO: 2185079 - RNA, 19 nt, Homo sapiens
  misc_RNA (1)...(19): siRNA sense strand
uauugcagaugacgguuau

SEQ ID NO: 2185080 - RNA, 19 nt, Homo sapiens
  misc_RNA (1)...(19): siRNA sense strand
ccgcgaaagcuucucauau

SEQ ID NO: 2185081 - RNA, 19 nt, Homo sapiens
  misc_RNA (1)...(19): siRNA sense strand
uuuccuccauuaucucuuu

SEQ ID NO: 2185082 - RNA, 19 nt, Homo sapiens
  misc_RNA (1)...(19): siRNA sense strand
cgagaauguuucgcgagaa

SEQ ID NO: 2185083 - RNA, 19 nt, Homo sapiens
  misc_RNA (1)...(19): siRNA sense strand
uugcuucuauguugcugua

SEQ ID NO: 2185084 - RNA, 19 nt, Homo sapiens
  misc_RNA (1)...(19): siRNA sense strand
gcccuucacgagaauguuu

SEQ ID NO: 2185085 - RNA, 19 nt, Homo sapiens
  misc_RNA (1)...(19): siRNA sense strand
ucucauauccauuucuugu

SEQ ID NO: 2185086 - RNA, 19 nt, Homo sapiens
  misc_RNA (1)...(19): siRNA sense strand
gcuucuauguugcuguaau

SEQ ID NO: 2185087 - RNA, 19 nt, Homo sapiens
  misc_RNA (1)...(19): siRNA sense strand
acugcuagauuuccagaug

SEQ ID NO: 2185088 - RNA, 19 nt, Homo sapiens
  misc_RNA (1)...(19): siRNA sense strand
ugucugcuuuccucgguuu

SEQ ID NO: 2185089 - RNA, 19 nt, Homo sapiens
  misc_RNA (1)...(19): siRNA sense strand
cugcuagauuuccagauga

SEQ ID NO: 2185090 - RNA, 19 nt, Homo sapiens
  misc_RNA (1)...(19): siRNA sense strand
cuucucauauccauuucuu

SEQ ID NO: 2185091 - RNA, 19 nt, Homo sapiens
  misc_RNA (1)...(19): siRNA sense strand
gcuugugacucauauucuc

SEQ ID NO: 2185092 - RNA, 19 nt, Homo sapiens
  misc_RNA (1)...(19): siRNA sense strand
cuugcuugcuucuauguug

SEQ ID NO: 2185093 - RNA, 19 nt, Homo sapiens
  misc_RNA (1)...(19): siRNA sense strand
gcagcacuacgagaaagaa

SEQ ID NO: 2185094 - RNA, 19 nt, Homo sapiens
  misc_RNA (1)...(19): siRNA sense strand
caggagaagggcagcacua

SEQ ID NO: 2185095 - RNA, 19 nt, Homo sapiens
  misc_RNA (1)...(19): siRNA sense strand
guuauuuggaacugucaua

SEQ ID NO: 2185096 - RNA, 19 nt, Homo sapiens
  misc_RNA (1)...(19): siRNA sense strand
uuaaguggcagccgauuag

SEQ ID NO: 2185097 - RNA, 19 nt, Homo sapiens
  misc_RNA (1)...(19): siRNA sense strand
cagaugagugcuguuuauu

SEQ ID NO: 2185098 - RNA, 19 nt, Homo sapiens
  misc_RNA (1)...(19): siRNA sense strand
caugcuuccuuggcaguuu

SEQ ID NO: 2185099 - RNA, 19 nt, Homo sapiens
  misc_RNA (1)...(19): siRNA sense strand
uagaggaaguuugauugca

SEQ ID NO: 2185100 - RNA, 19 nt, Homo sapiens
  misc_RNA (1)...(19): siRNA sense strand
gaaggauugggagaucuug

SEQ ID NO: 2185101 - RNA, 19 nt, Homo sapiens
  misc_RNA (1)...(19): siRNA sense strand
uuaugcagaucaacguugu

SEQ ID NO: 2185102 - RNA, 19 nt, Homo sapiens
  misc_RNA (1)...(19): siRNA sense strand
auuuggaacugucauacuu

SEQ ID NO: 2185103 - RNA, 19 nt, Homo sapiens
  misc_RNA (1)...(19): siRNA sense strand
cuuuauagaggaaguuuga

SEQ ID NO: 2185104 - RNA, 19 nt, Homo sapiens
  misc_RNA (1)...(19): siRNA sense strand
uggagaguguaccugugua

SEQ ID NO: 2185105 - RNA, 19 nt, Homo sapiens
  misc_RNA (1)...(19): siRNA sense strand
cagaggagaaggacucagu

SEQ ID NO: 2185106 - RNA, 19 nt, Homo sapiens
  misc_RNA (1)...(19): siRNA sense strand
uugaauggaguauggauga

SEQ ID NO: 2185107 - RNA, 19 nt, Homo sapiens
  misc_RNA (1)...(19): siRNA sense strand
agaguguaccuguguaaug

SEQ ID NO: 2185108 - RNA, 19 nt, Homo sapiens
  misc_RNA (1)...(19): siRNA sense strand
aagauaugucggacgguua

SEQ ID NO: 2185109 - RNA, 19 nt, Homo sapiens
  misc_RNA (1)...(19): siRNA sense strand
ccuggucucacucgacuuu

SEQ ID NO: 2185110 - RNA, 19 nt, Homo sapiens
  misc_RNA (1)...(19): siRNA sense strand
gcggcugaagaauauauuu

SEQ ID NO: 2185111 - RNA, 19 nt, Homo sapiens
  misc_RNA (1)...(19): siRNA sense strand
ccgauuaggaggccugguu

SEQ ID NO: 2185112 - RNA, 19 nt, Homo sapiens
  misc_RNA (1)...(19): siRNA sense strand
caagacuauuguggaaaca

SEQ ID NO: 2185113 - RNA, 19 nt, Homo sapiens
  misc_RNA (1)...(19): siRNA sense strand
uuuaaguggcagccgauua

SEQ ID NO: 2185114 - RNA, 19 nt, Homo sapiens
  misc_RNA (1)...(19): siRNA sense strand
ugcagaugacgguuauaua

SEQ ID NO: 2185115 - RNA, 19 nt, Homo sapiens
  misc_RNA (1)...(19): siRNA sense strand
guuccuuccucucuguugu

SEQ ID NO: 2185116 - RNA, 19 nt, Homo sapiens
  misc_RNA (1)...(19): siRNA sense strand
gcauauaucugaacgugua

SEQ ID NO: 2185117 - RNA, 19 nt, Homo sapiens
  misc_RNA (1)...(19): siRNA sense strand
guagaugggucuucaguaa

SEQ ID NO: 2185118 - RNA, 19 nt, Homo sapiens
  misc_RNA (1)...(19): siRNA sense strand
gaagauguguuacaacguu

SEQ ID NO: 2185119 - RNA, 19 nt, Homo sapiens
  misc_RNA (1)...(19): siRNA sense strand
ugaaacagcuugcuuccua

SEQ ID NO: 2185120 - RNA, 19 nt, Homo sapiens
  misc_RNA (1)...(19): siRNA sense strand
uaaaugagcgagcuaaaua

SEQ ID NO: 2185121 - RNA, 19 nt, Homo sapiens
  misc_RNA (1)...(19): siRNA sense strand
gcagaucaauacugaauau

SEQ ID NO: 2185122 - RNA, 19 nt, Homo sapiens
  misc_RNA (1)...(19): siRNA sense strand
ggaagaaaccguucgagaa

SEQ ID NO: 2185123 - RNA, 19 nt, Homo sapiens
  misc_RNA (1)...(19): siRNA sense strand
caacauguagcucuuauuu

SEQ ID NO: 2185124 - RNA, 19 nt, Homo sapiens
  misc_RNA (1)...(19): siRNA sense strand
gaucucaaauucucuaugu

SEQ ID NO: 2185125 - RNA, 19 nt, Homo sapiens
  misc_RNA (1)...(19): siRNA sense strand
caaguucacugcuguguau

SEQ ID NO: 2185126 - RNA, 19 nt, Homo sapiens
  misc_RNA (1)...(19): siRNA sense strand
gagaaacccacuuaaauga

SEQ ID NO: 2185127 - RNA, 19 nt, Homo sapiens
  misc_RNA (1)...(19): siRNA sense strand
gcacugaauucccuuguca

SEQ ID NO: 2185128 - RNA, 19 nt, Homo sapiens
  misc_RNA (1)...(19): siRNA sense strand
gaaaauccuuguagucuuu

SEQ ID NO: 2185129 - RNA, 19 nt, Homo sapiens
  misc_RNA (1)...(19): siRNA sense strand
ggaggaccguagaaagaua

SEQ ID NO: 2185130 - RNA, 19 nt, Homo sapiens
  misc_RNA (1)...(19): siRNA sense strand
gcaauggagugcagcaguu

SEQ ID NO: 2185131 - RNA, 19 nt, Homo sapiens
  misc_RNA (1)...(19): siRNA sense strand
gacauaguguuaauuguug

SEQ ID NO: 2185132 - RNA, 19 nt, Homo sapiens
  misc_RNA (1)...(19): siRNA sense strand
guucaugacugcauuuaug

SEQ ID NO: 2185133 - RNA, 19 nt, Homo sapiens
  misc_RNA (1)...(19): siRNA sense strand
gguagaagauguguuacaa

SEQ ID NO: 2185134 - RNA, 19 nt, Homo sapiens
  misc_RNA (1)...(19): siRNA sense strand
ugaagagucuccauggaaa

SEQ ID NO: 2185135 - RNA, 19 nt, Homo sapiens
  misc_RNA (1)...(19): siRNA sense strand
gaagaaaccguucgagaag

SEQ ID NO: 2185136 - RNA, 19 nt, Homo sapiens
  misc_RNA (1)...(19): siRNA sense strand
gaaauggccaugagacaga

SEQ ID NO: 2185137 - RNA, 19 nt, Homo sapiens
  misc_RNA (1)...(19): siRNA sense strand
caaaauaccugguuuccaa

SEQ ID NO: 2185138 - RNA, 19 nt, Homo sapiens
  misc_RNA (1)...(19): siRNA sense strand
acauguagcucuuauuuca

SEQ ID NO: 2185139 - RNA, 19 nt, Homo sapiens
  misc_RNA (1)...(19): siRNA sense strand
gaaucacgaucccaguauu

SEQ ID NO: 2185140 - RNA, 19 nt, Homo sapiens
  misc_RNA (1)...(19): siRNA sense strand
aauaugaccuggaacuuga

SEQ ID NO: 2185141 - RNA, 19 nt, Homo sapiens
  misc_RNA (1)...(19): siRNA sense strand
gcugccaccuuacagauaa

SEQ ID NO: 2185142 - RNA, 19 nt, Homo sapiens
  misc_RNA (1)...(19): siRNA sense strand
gcgagaaacccacuuaaau

SEQ ID NO: 2185143 - RNA, 19 nt, Homo sapiens
  misc_RNA (1)...(19): siRNA sense strand
uagaacagcuuuaugaaac

SEQ ID NO: 2185144 - RNA, 19 nt, Homo sapiens
  misc_RNA (1)...(19): siRNA sense strand
gagcuguugugaucucaaa

SEQ ID NO: 2185145 - RNA, 19 nt, Homo sapiens
  misc_RNA (1)...(19): siRNA sense strand
ucucaguagugacaauuua

SEQ ID NO: 2185146 - RNA, 19 nt, Homo sapiens
  misc_RNA (1)...(19): siRNA sense strand
gacgagaggcagaucaaua

SEQ ID NO: 2185147 - RNA, 19 nt, Homo sapiens
  misc_RNA (1)...(19): siRNA sense strand
guagaacagcuuuaugaaa

SEQ ID NO: 2185148 - RNA, 19 nt, Homo sapiens
  misc_RNA (1)...(19): siRNA sense strand
ugaacuggauggagaaaug

SEQ ID NO: 2185149 - RNA, 19 nt, Homo sapiens
  misc_RNA (1)...(19): siRNA sense strand
cauggaaaccaccaacuua

SEQ ID NO: 2185150 - RNA, 19 nt, Homo sapiens
  misc_RNA (1)...(19): siRNA sense strand
cgagaaacccacuuaaaug

SEQ ID NO: 2185151 - RNA, 19 nt, Homo sapiens
  misc_RNA (1)...(19): siRNA sense strand
uagcguagguggagaacuu

SEQ ID NO: 2185152 - RNA, 19 nt, Homo sapiens
  misc_RNA (1)...(19): siRNA sense strand
acagguagaagauguguua

SEQ ID NO: 2185153 - RNA, 19 nt, Homo sapiens
  misc_RNA (1)...(19): siRNA sense strand
ugaauaugcugugucauug

SEQ ID NO: 2185154 - RNA, 19 nt, Homo sapiens
  misc_RNA (1)...(19): siRNA sense strand
ugaauucccuugucauaag

SEQ ID NO: 2185155 - RNA, 19 nt, Homo sapiens
  misc_RNA (1)...(19): siRNA sense strand
acagagagcuugguuucaa

SEQ ID NO: 2185156 - RNA, 19 nt, Homo sapiens
  misc_RNA (1)...(19): siRNA sense strand
cagaauugaugcacuuuca

SEQ ID NO: 2185157 - RNA, 19 nt, Homo sapiens
  misc_RNA (1)...(19): siRNA sense strand
ugauagauauucucaguag

SEQ ID NO: 2185158 - RNA, 19 nt, Homo sapiens
  misc_RNA (1)...(19): siRNA sense strand
agaggcagaucaauacuga

SEQ ID NO: 2185159 - RNA, 19 nt, Homo sapiens
  misc_RNA (1)...(19): siRNA sense strand
gaauucccuugucauaaga

SEQ ID NO: 2185160 - RNA, 19 nt, Homo sapiens
  misc_RNA (1)...(19): siRNA sense strand
ugucgaugcugccaccuua

SEQ ID NO: 2185161 - RNA, 19 nt, Homo sapiens
  misc_RNA (1)...(19): siRNA sense strand
guauuugucuucuguucuu

SEQ ID NO: 2185162 - RNA, 19 nt, Homo sapiens
  misc_RNA (1)...(19): siRNA sense strand
caaauucucuauguguguu

SEQ ID NO: 2185163 - RNA, 19 nt, Homo sapiens
  misc_RNA (1)...(19): siRNA sense strand
gacuugggaugacuaaaga

SEQ ID NO: 2185164 - RNA, 19 nt, Homo sapiens
  misc_RNA (1)...(19): siRNA sense strand
gauacgacacugagaaaga

SEQ ID NO: 2185165 - RNA, 19 nt, Homo sapiens
  misc_RNA (1)...(19): siRNA sense strand
gcagagaauuguguacgau

SEQ ID NO: 2185166 - RNA, 19 nt, Homo sapiens
  misc_RNA (1)...(19): siRNA sense strand
cagccaacaucccugcuaa

SEQ ID NO: 2185167 - RNA, 19 nt, Homo sapiens
  misc_RNA (1)...(19): siRNA sense strand
gaucaauacugaauaugcu

SEQ ID NO: 2185168 - RNA, 19 nt, Homo sapiens
  misc_RNA (1)...(19): siRNA sense strand
ucacugcuguguaucauca

SEQ ID NO: 2185169 - RNA, 19 nt, Homo sapiens
  misc_RNA (1)...(19): siRNA sense strand
cacaugaccuacugauaga

SEQ ID NO: 2185170 - RNA, 19 nt, Homo sapiens
  misc_RNA (1)...(19): siRNA sense strand
gccaugagacagacuagua

SEQ ID NO: 2185171 - RNA, 19 nt, Homo sapiens
  misc_RNA (1)...(19): siRNA sense strand
gcauuuaugugaugacacu

SEQ ID NO: 2185172 - RNA, 19 nt, Homo sapiens
  misc_RNA (1)...(19): siRNA sense strand
cagcaguugugguucauga

SEQ ID NO: 2185173 - RNA, 19 nt, Homo sapiens
  misc_RNA (1)...(19): siRNA sense strand
gcuagaguauaacacagaa

SEQ ID NO: 2185174 - RNA, 19 nt, Homo sapiens
  misc_RNA (1)...(19): siRNA sense strand
ucacaugaccuacugauag

SEQ ID NO: 2185175 - RNA, 19 nt, Homo sapiens
  misc_RNA (1)...(19): siRNA sense strand
ggaugggacagaagaguuu

SEQ ID NO: 2185176 - RNA, 19 nt, Homo sapiens
  misc_RNA (1)...(19): siRNA sense strand
cuaccaauaugaccuggaa

SEQ ID NO: 2185177 - RNA, 19 nt, Homo sapiens
  misc_RNA (1)...(19): siRNA sense strand
ggcuauaucuaugcaauug

SEQ ID NO: 2185178 - RNA, 19 nt, Homo sapiens
  misc_RNA (1)...(19): siRNA sense strand
gaauugaugcacuuucaga

SEQ ID NO: 2185179 - RNA, 19 nt, Homo sapiens
  misc_RNA (1)...(19): siRNA sense strand
gcaaacaaacccauguaca

SEQ ID NO: 2185180 - RNA, 19 nt, Homo sapiens
  misc_RNA (1)...(19): siRNA sense strand
ggaaaccaccaacuuaucu

SEQ ID NO: 2185181 - RNA, 19 nt, Homo sapiens
  misc_RNA (1)...(19): siRNA sense strand
ggacgaugguaagcccuuu

SEQ ID NO: 2185182 - RNA, 19 nt, Homo sapiens
  misc_RNA (1)...(19): siRNA sense strand
ucagaacugugaauugcuu

SEQ ID NO: 2185183 - RNA, 19 nt, Homo sapiens
  misc_RNA (1)...(19): siRNA sense strand
ggucugccacccaaugaua

SEQ ID NO: 2185184 - RNA, 19 nt, Homo sapiens
  misc_RNA (1)...(19): siRNA sense strand
gaaguaacacagagagcuu

SEQ ID NO: 2185185 - RNA, 19 nt, Homo sapiens
  misc_RNA (1)...(19): siRNA sense strand
ugaaccucauguacuguua

SEQ ID NO: 2185186 - RNA, 19 nt, Homo sapiens
  misc_RNA (1)...(19): siRNA sense strand
uguuagagcuguugugauc

SEQ ID NO: 2185187 - RNA, 19 nt, Homo sapiens
  misc_RNA (1)...(19): siRNA sense strand
ugacugcauuuaugugaug

SEQ ID NO: 2185188 - RNA, 19 nt, Homo sapiens
  misc_RNA (1)...(19): siRNA sense strand
cuucaguugugaggaauua

SEQ ID NO: 2185189 - RNA, 19 nt, Homo sapiens
  misc_RNA (1)...(19): siRNA sense strand
caacggaugggacagaaga

SEQ ID NO: 2185190 - RNA, 19 nt, Homo sapiens
  misc_RNA (1)...(19): siRNA sense strand
gaaagauacgacacugaga

SEQ ID NO: 2185191 - RNA, 19 nt, Homo sapiens
  misc_RNA (1)...(19): siRNA sense strand
aaagaaugguggagcacaa

SEQ ID NO: 2185192 - RNA, 19 nt, Homo sapiens
  misc_RNA (1)...(19): siRNA sense strand
agagaauuguguacgauug

SEQ ID NO: 2185193 - RNA, 19 nt, Homo sapiens
  misc_RNA (1)...(19): siRNA sense strand
gaacagcuuuaugaaacag

SEQ ID NO: 2185194 - RNA, 19 nt, Homo sapiens
  misc_RNA (1)...(19): siRNA sense strand
gauauucucaguagugaca

SEQ ID NO: 2185195 - RNA, 19 nt, Homo sapiens
  misc_RNA (1)...(19): siRNA sense strand
caauaugaccuggaacuug

SEQ ID NO: 2185196 - RNA, 19 nt, Homo sapiens
  misc_RNA (1)...(19): siRNA sense strand
gggucaaguuccucugaaa

SEQ ID NO: 2185197 - RNA, 19 nt, Homo sapiens
  misc_RNA (1)...(19): siRNA sense strand
cguuguaacuccugauaau

SEQ ID NO: 2185198 - RNA, 19 nt, Homo sapiens
  misc_RNA (1)...(19): siRNA sense strand
aauaugcugugucauuguu

SEQ ID NO: 2185199 - RNA, 19 nt, Homo sapiens
  misc_RNA (1)...(19): siRNA sense strand
auaaguccaugcccaaguu

SEQ ID NO: 2185200 - RNA, 19 nt, Homo sapiens
  misc_RNA (1)...(19): siRNA sense strand
uagauauucucaguaguga

SEQ ID NO: 2185201 - RNA, 19 nt, Homo sapiens
  misc_RNA (1)...(19): siRNA sense strand
caugaccuacugauagaua

SEQ ID NO: 2185202 - RNA, 19 nt, Homo sapiens
  misc_RNA (1)...(19): siRNA sense strand
gaaaccaccaacuuaucuu

SEQ ID NO: 2185203 - RNA, 19 nt, Homo sapiens
  misc_RNA (1)...(19): siRNA sense strand
guugugaucucaaauucuc

SEQ ID NO: 2185204 - RNA, 19 nt, Homo sapiens
  misc_RNA (1)...(19): siRNA sense strand
acuaguagguccuuugcuu

SEQ ID NO: 2185205 - RNA, 19 nt, Homo sapiens
  misc_RNA (1)...(19): siRNA sense strand
aaagauacgacacugagaa

SEQ ID NO: 2185206 - RNA, 19 nt, Homo sapiens
  misc_RNA (1)...(19): siRNA sense strand
ugugaaggcuauaucuaug

SEQ ID NO: 2185207 - RNA, 19 nt, Homo sapiens
  misc_RNA (1)...(19): siRNA sense strand
caucuuugguuugcuguga

SEQ ID NO: 2185208 - RNA, 19 nt, Homo sapiens
  misc_RNA (1)...(19): siRNA sense strand
cagcugauuugcauaaggu

SEQ ID NO: 2185209 - RNA, 19 nt, Homo sapiens
  misc_RNA (1)...(19): siRNA sense strand
uaacacagagagcuugguu

SEQ ID NO: 2185210 - RNA, 19 nt, Homo sapiens
  misc_RNA (1)...(19): siRNA sense strand
gcuaugcuguggcuagagu

SEQ ID NO: 2185211 - RNA, 19 nt, Homo sapiens
  misc_RNA (1)...(19): siRNA sense strand
cagaaucacgaucccagua

SEQ ID NO: 2185212 - RNA, 19 nt, Homo sapiens
  misc_RNA (1)...(19): siRNA sense strand
gugcagcaguugugguuca

SEQ ID NO: 2185213 - RNA, 19 nt, Homo sapiens
  misc_RNA (1)...(19): siRNA sense strand
guuguuuacugacauagug

SEQ ID NO: 2185214 - RNA, 19 nt, Homo sapiens
  misc_RNA (1)...(19): siRNA sense strand
gacuaaagaggaaaugaug

SEQ ID NO: 2185215 - RNA, 19 nt, Homo sapiens
  misc_RNA (1)...(19): siRNA sense strand
uauauuggaggguugcaua

SEQ ID NO: 2185216 - RNA, 19 nt, Homo sapiens
  misc_RNA (1)...(19): siRNA sense strand
gcauauaucugaacgugua

SEQ ID NO: 2185217 - RNA, 19 nt, Homo sapiens
  misc_RNA (1)...(19): siRNA sense strand
guagaugggucuucaguaa

SEQ ID NO: 2185218 - RNA, 19 nt, Homo sapiens
  misc_RNA (1)...(19): siRNA sense strand
gaagauguguuacaacguu

SEQ ID NO: 2185219 - RNA, 19 nt, Homo sapiens
  misc_RNA (1)...(19): siRNA sense strand
ugaaacagcuugcuuccua

SEQ ID NO: 2185220 - RNA, 19 nt, Homo sapiens
  misc_RNA (1)...(19): siRNA sense strand
uaaaugagcgagcuaaaua

SEQ ID NO: 2185221 - RNA, 19 nt, Homo sapiens
  misc_RNA (1)...(19): siRNA sense strand
gcagaucaauacugaauau

SEQ ID NO: 2185222 - RNA, 19 nt, Homo sapiens
  misc_RNA (1)...(19): siRNA sense strand
ggaagaaaccguucgagaa

SEQ ID NO: 2185223 - RNA, 19 nt, Homo sapiens
  misc_RNA (1)...(19): siRNA sense strand
caacauguagcucuuauuu

SEQ ID NO: 2185224 - RNA, 19 nt, Homo sapiens
  misc_RNA (1)...(19): siRNA sense strand
gaucucaaauucucuaugu

SEQ ID NO: 2185225 - RNA, 19 nt, Homo sapiens
  misc_RNA (1)...(19): siRNA sense strand
caaguucacugcuguguau

SEQ ID NO: 2185226 - RNA, 19 nt, Homo sapiens
  misc_RNA (1)...(19): siRNA sense strand
gagaaacccacuuaaauga

SEQ ID NO: 2185227 - RNA, 19 nt, Homo sapiens
  misc_RNA (1)...(19): siRNA sense strand
gcacugaauucccuuguca

SEQ ID NO: 2185228 - RNA, 19 nt, Homo sapiens
  misc_RNA (1)...(19): siRNA sense strand
gaaaauccuuguagucuuu

SEQ ID NO: 2185229 - RNA, 19 nt, Homo sapiens
  misc_RNA (1)...(19): siRNA sense strand
ggaggaccguagaaagaua

SEQ ID NO: 2185230 - RNA, 19 nt, Homo sapiens
  misc_RNA (1)...(19): siRNA sense strand
gcaauggagugcagcaguu

SEQ ID NO: 2185231 - RNA, 19 nt, Homo sapiens
  misc_RNA (1)...(19): siRNA sense strand
gacauaguguuaauuguug

SEQ ID NO: 2185232 - RNA, 19 nt, Homo sapiens
  misc_RNA (1)...(19): siRNA sense strand
guucaugacugcauuuaug

SEQ ID NO: 2185233 - RNA, 19 nt, Homo sapiens
  misc_RNA (1)...(19): siRNA sense strand
gguagaagauguguuacaa

SEQ ID NO: 2185234 - RNA, 19 nt, Homo sapiens
  misc_RNA (1)...(19): siRNA sense strand
ugaagagucuccauggaaa

SEQ ID NO: 2185235 - RNA, 19 nt, Homo sapiens
  misc_RNA (1)...(19): siRNA sense strand
gaagaaaccguucgagaag

SEQ ID NO: 2185236 - RNA, 19 nt, Homo sapiens
  misc_RNA (1)...(19): siRNA sense strand
gaaauggccaugagacaga

SEQ ID NO: 2185237 - RNA, 19 nt, Homo sapiens
  misc_RNA (1)...(19): siRNA sense strand
caaaauaccugguuuccaa

SEQ ID NO: 2185238 - RNA, 19 nt, Homo sapiens
  misc_RNA (1)...(19): siRNA sense strand
acauguagcucuuauuuca

SEQ ID NO: 2185239 - RNA, 19 nt, Homo sapiens
  misc_RNA (1)...(19): siRNA sense strand
gaaucacgaucccaguauu

SEQ ID NO: 2185240 - RNA, 19 nt, Homo sapiens
  misc_RNA (1)...(19): siRNA sense strand
aauaugaccuggaacuuga

SEQ ID NO: 2185241 - RNA, 19 nt, Homo sapiens
  misc_RNA (1)...(19): siRNA sense strand
gcugccaccuuacagauaa

SEQ ID NO: 2185242 - RNA, 19 nt, Homo sapiens
  misc_RNA (1)...(19): siRNA sense strand
gcgagaaacccacuuaaau

SEQ ID NO: 2185243 - RNA, 19 nt, Homo sapiens
  misc_RNA (1)...(19): siRNA sense strand
uagaacagcuuuaugaaac

SEQ ID NO: 2185244 - RNA, 19 nt, Homo sapiens
  misc_RNA (1)...(19): siRNA sense strand
gagcuguugugaucucaaa

SEQ ID NO: 2185245 - RNA, 19 nt, Homo sapiens
  misc_RNA (1)...(19): siRNA sense strand
ucucaguagugacaauuua

SEQ ID NO: 2185246 - RNA, 19 nt, Homo sapiens
  misc_RNA (1)...(19): siRNA sense strand
gacgagaggcagaucaaua

SEQ ID NO: 2185247 - RNA, 19 nt, Homo sapiens
  misc_RNA (1)...(19): siRNA sense strand
guagaacagcuuuaugaaa

SEQ ID NO: 2185248 - RNA, 19 nt, Homo sapiens
  misc_RNA (1)...(19): siRNA sense strand
ugaacuggauggagaaaug

SEQ ID NO: 2185249 - RNA, 19 nt, Homo sapiens
  misc_RNA (1)...(19): siRNA sense strand
cauggaaaccaccaacuua

SEQ ID NO: 2185250 - RNA, 19 nt, Homo sapiens
  misc_RNA (1)...(19): siRNA sense strand
cgagaaacccacuuaaaug

SEQ ID NO: 2185251 - RNA, 19 nt, Homo sapiens
  misc_RNA (1)...(19): siRNA sense strand
uagcguagguggagaacuu

SEQ ID NO: 2185252 - RNA, 19 nt, Homo sapiens
  misc_RNA (1)...(19): siRNA sense strand
acagguagaagauguguua

SEQ ID NO: 2185253 - RNA, 19 nt, Homo sapiens
  misc_RNA (1)...(19): siRNA sense strand
ugaauaugcugugucauug

SEQ ID NO: 2185254 - RNA, 19 nt, Homo sapiens
  misc_RNA (1)...(19): siRNA sense strand
ugaauucccuugucauaag

SEQ ID NO: 2185255 - RNA, 19 nt, Homo sapiens
  misc_RNA (1)...(19): siRNA sense strand
acagagagcuugguuucaa

SEQ ID NO: 2185256 - RNA, 19 nt, Homo sapiens
  misc_RNA (1)...(19): siRNA sense strand
cagaauugaugcacuuuca

SEQ ID NO: 2185257 - RNA, 19 nt, Homo sapiens
  misc_RNA (1)...(19): siRNA sense strand
ugauagauauucucaguag

SEQ ID NO: 2185258 - RNA, 19 nt, Homo sapiens
  misc_RNA (1)...(19): siRNA sense strand
agaggcagaucaauacuga

SEQ ID NO: 2185259 - RNA, 19 nt, Homo sapiens
  misc_RNA (1)...(19): siRNA sense strand
gaauucccuugucauaaga

SEQ ID NO: 2185260 - RNA, 19 nt, Homo sapiens
  misc_RNA (1)...(19): siRNA sense strand
ugucgaugcugccaccuua

SEQ ID NO: 2185261 - RNA, 19 nt, Homo sapiens
  misc_RNA (1)...(19): siRNA sense strand
guauuugucuucuguucuu

SEQ ID NO: 2185262 - RNA, 19 nt, Homo sapiens
  misc_RNA (1)...(19): siRNA sense strand
caaauucucuauguguguu

SEQ ID NO: 2185263 - RNA, 19 nt, Homo sapiens
  misc_RNA (1)...(19): siRNA sense strand
gacuugggaugacuaaaga

SEQ ID NO: 2185264 - RNA, 19 nt, Homo sapiens
  misc_RNA (1)...(19): siRNA sense strand
gauacgacacugagaaaga

SEQ ID NO: 2185265 - RNA, 19 nt, Homo sapiens
  misc_RNA (1)...(19): siRNA sense strand
gcagagaauuguguacgau

SEQ ID NO: 2185266 - RNA, 19 nt, Homo sapiens
  misc_RNA (1)...(19): siRNA sense strand
cagccaacaucccugcuaa

SEQ ID NO: 2185267 - RNA, 19 nt, Homo sapiens
  misc_RNA (1)...(19): siRNA sense strand
gaucaauacugaauaugcu

SEQ ID NO: 2185268 - RNA, 19 nt, Homo sapiens
  misc_RNA (1)...(19): siRNA sense strand
ucacugcuguguaucauca

SEQ ID NO: 2185269 - RNA, 19 nt, Homo sapiens
  misc_RNA (1)...(19): siRNA sense strand
cacaugaccuacugauaga

SEQ ID NO: 2185270 - RNA, 19 nt, Homo sapiens
  misc_RNA (1)...(19): siRNA sense strand
gccaugagacagacuagua

SEQ ID NO: 2185271 - RNA, 19 nt, Homo sapiens
  misc_RNA (1)...(19): siRNA sense strand
gcauuuaugugaugacacu

SEQ ID NO: 2185272 - RNA, 19 nt, Homo sapiens
  misc_RNA (1)...(19): siRNA sense strand
cagcaguugugguucauga

SEQ ID NO: 2185273 - RNA, 19 nt, Homo sapiens
  misc_RNA (1)...(19): siRNA sense strand
gcuagaguauaacacagaa

SEQ ID NO: 2185274 - RNA, 19 nt, Homo sapiens
  misc_RNA (1)...(19): siRNA sense strand
ucacaugaccuacugauag

SEQ ID NO: 2185275 - RNA, 19 nt, Homo sapiens
  misc_RNA (1)...(19): siRNA sense strand
ggaugggacagaagaguuu

SEQ ID NO: 2185276 - RNA, 19 nt, Homo sapiens
  misc_RNA (1)...(19): siRNA sense strand
cuaccaauaugaccuggaa

SEQ ID NO: 2185277 - RNA, 19 nt, Homo sapiens
  misc_RNA (1)...(19): siRNA sense strand
ggcuauaucuaugcaauug

SEQ ID NO: 2185278 - RNA, 19 nt, Homo sapiens
  misc_RNA (1)...(19): siRNA sense strand
gaauugaugcacuuucaga

SEQ ID NO: 2185279 - RNA, 19 nt, Homo sapiens
  misc_RNA (1)...(19): siRNA sense strand
gcaaacaaacccauguaca

SEQ ID NO: 2185280 - RNA, 19 nt, Homo sapiens
  misc_RNA (1)...(19): siRNA sense strand
ggaaaccaccaacuuaucu

SEQ ID NO: 2185281 - RNA, 19 nt, Homo sapiens
  misc_RNA (1)...(19): siRNA sense strand
ggacgaugguaagcccuuu

SEQ ID NO: 2185282 - RNA, 19 nt, Homo sapiens
  misc_RNA (1)...(19): siRNA sense strand
ucagaacugugaauugcuu

SEQ ID NO: 2185283 - RNA, 19 nt, Homo sapiens
  misc_RNA (1)...(19): siRNA sense strand
ggucugccacccaaugaua

SEQ ID NO: 2185284 - RNA, 19 nt, Homo sapiens
  misc_RNA (1)...(19): siRNA sense strand
gaaguaacacagagagcuu

SEQ ID NO: 2185285 - RNA, 19 nt, Homo sapiens
  misc_RNA (1)...(19): siRNA sense strand
ugaaccucauguacuguua

SEQ ID NO: 2185286 - RNA, 19 nt, Homo sapiens
  misc_RNA (1)...(19): siRNA sense strand
uguuagagcuguugugauc

SEQ ID NO: 2185287 - RNA, 19 nt, Homo sapiens
  misc_RNA (1)...(19): siRNA sense strand
ugacugcauuuaugugaug

SEQ ID NO: 2185288 - RNA, 19 nt, Homo sapiens
  misc_RNA (1)...(19): siRNA sense strand
cuucaguugugaggaauua

SEQ ID NO: 2185289 - RNA, 19 nt, Homo sapiens
  misc_RNA (1)...(19): siRNA sense strand
caacggaugggacagaaga

SEQ ID NO: 2185290 - RNA, 19 nt, Homo sapiens
  misc_RNA (1)...(19): siRNA sense strand
gaaagauacgacacugaga

SEQ ID NO: 2185291 - RNA, 19 nt, Homo sapiens
  misc_RNA (1)...(19): siRNA sense strand
aaagaaugguggagcacaa

SEQ ID NO: 2185292 - RNA, 19 nt, Homo sapiens
  misc_RNA (1)...(19): siRNA sense strand
agagaauuguguacgauug

SEQ ID NO: 2185293 - RNA, 19 nt, Homo sapiens
  misc_RNA (1)...(19): siRNA sense strand
gaacagcuuuaugaaacag

SEQ ID NO: 2185294 - RNA, 19 nt, Homo sapiens
  misc_RNA (1)...(19): siRNA sense strand
gauauucucaguagugaca

SEQ ID NO: 2185295 - RNA, 19 nt, Homo sapiens
  misc_RNA (1)...(19): siRNA sense strand
caauaugaccuggaacuug

SEQ ID NO: 2185296 - RNA, 19 nt, Homo sapiens
  misc_RNA (1)...(19): siRNA sense strand
gggucaaguuccucugaaa

SEQ ID NO: 2185297 - RNA, 19 nt, Homo sapiens
  misc_RNA (1)...(19): siRNA sense strand
cguuguaacuccugauaau

SEQ ID NO: 2185298 - RNA, 19 nt, Homo sapiens
  misc_RNA (1)...(19): siRNA sense strand
aauaugcugugucauuguu

SEQ ID NO: 2185299 - RNA, 19 nt, Homo sapiens
  misc_RNA (1)...(19): siRNA sense strand
auaaguccaugcccaaguu

SEQ ID NO: 2185300 - RNA, 19 nt, Homo sapiens
  misc_RNA (1)...(19): siRNA sense strand
uagauauucucaguaguga

SEQ ID NO: 2185301 - RNA, 19 nt, Homo sapiens
  misc_RNA (1)...(19): siRNA sense strand
caugaccuacugauagaua

SEQ ID NO: 2185302 - RNA, 19 nt, Homo sapiens
  misc_RNA (1)...(19): siRNA sense strand
gaaaccaccaacuuaucuu

SEQ ID NO: 2185303 - RNA, 19 nt, Homo sapiens
  misc_RNA (1)...(19): siRNA sense strand
guugugaucucaaauucuc

SEQ ID NO: 2185304 - RNA, 19 nt, Homo sapiens
  misc_RNA (1)...(19): siRNA sense strand
acuaguagguccuuugcuu

SEQ ID NO: 2185305 - RNA, 19 nt, Homo sapiens
  misc_RNA (1)...(19): siRNA sense strand
aaagauacgacacugagaa

SEQ ID NO: 2185306 - RNA, 19 nt, Homo sapiens
  misc_RNA (1)...(19): siRNA sense strand
ugugaaggcuauaucuaug

SEQ ID NO: 2185307 - RNA, 19 nt, Homo sapiens
  misc_RNA (1)...(19): siRNA sense strand
caucuuugguuugcuguga

SEQ ID NO: 2185308 - RNA, 19 nt, Homo sapiens
  misc_RNA (1)...(19): siRNA sense strand
cagcugauuugcauaaggu

SEQ ID NO: 2185309 - RNA, 19 nt, Homo sapiens
  misc_RNA (1)...(19): siRNA sense strand
uaacacagagagcuugguu

SEQ ID NO: 2185310 - RNA, 19 nt, Homo sapiens
  misc_RNA (1)...(19): siRNA sense strand
gcuaugcuguggcuagagu

SEQ ID NO: 2185311 - RNA, 19 nt, Homo sapiens
  misc_RNA (1)...(19): siRNA sense strand
cagaaucacgaucccagua

SEQ ID NO: 2185312 - RNA, 19 nt, Homo sapiens
  misc_RNA (1)...(19): siRNA sense strand
gugcagcaguugugguuca

SEQ ID NO: 2185313 - RNA, 19 nt, Homo sapiens
  misc_RNA (1)...(19): siRNA sense strand
guuguuuacugacauagug

SEQ ID NO: 2185314 - RNA, 19 nt, Homo sapiens
  misc_RNA (1)...(19): siRNA sense strand
gacuaaagaggaaaugaug

SEQ ID NO: 2185315 - RNA, 19 nt, Homo sapiens
  misc_RNA (1)...(19): siRNA sense strand
uauauuggaggguugcaua

SEQ ID NO: 2185316 - RNA, 19 nt, Homo sapiens
  misc_RNA (1)...(19): siRNA sense strand
gaagugauguuuaugacaa

SEQ ID NO: 2185317 - RNA, 19 nt, Homo sapiens
  misc_RNA (1)...(19): siRNA sense strand
ggaaauaucuugggaugga

SEQ ID NO: 2185318 - RNA, 19 nt, Homo sapiens
  misc_RNA (1)...(19): siRNA sense strand
caacuacaauggacauaaa

SEQ ID NO: 2185319 - RNA, 19 nt, Homo sapiens
  misc_RNA (1)...(19): siRNA sense strand
acauaaacgugaugacuua

SEQ ID NO: 2185320 - RNA, 19 nt, Homo sapiens
  misc_RNA (1)...(19): siRNA sense strand
acaaggaagugacauguaa

SEQ ID NO: 2185321 - RNA, 19 nt, Homo sapiens
  misc_RNA (1)...(19): siRNA sense strand
uauaacagcuccuucaaau

SEQ ID NO: 2185322 - RNA, 19 nt, Homo sapiens
  misc_RNA (1)...(19): siRNA sense strand
agacaacccuugcauaaug

SEQ ID NO: 2185323 - RNA, 19 nt, Homo sapiens
  misc_RNA (1)...(19): siRNA sense strand
caacagaccucagagaaag

SEQ ID NO: 2185324 - RNA, 19 nt, Homo sapiens
  misc_RNA (1)...(19): siRNA sense strand
ccucauuucuguacgauaa

SEQ ID NO: 2185325 - RNA, 19 nt, Homo sapiens
  misc_RNA (1)...(19): siRNA sense strand
ggaagcaaauguaccaagu

SEQ ID NO: 2185326 - RNA, 19 nt, Homo sapiens
  misc_RNA (1)...(19): siRNA sense strand
caucugugcuugugugaaa

SEQ ID NO: 2185327 - RNA, 19 nt, Homo sapiens
  misc_RNA (1)...(19): siRNA sense strand
gcaaauguaccaaguguuc

SEQ ID NO: 2185328 - RNA, 19 nt, Homo sapiens
  misc_RNA (1)...(19): siRNA sense strand
gagaugugguccucuauca

SEQ ID NO: 2185329 - RNA, 19 nt, Homo sapiens
  misc_RNA (1)...(19): siRNA sense strand
cagaagacaucaaaguaug

SEQ ID NO: 2185330 - RNA, 19 nt, Homo sapiens
  misc_RNA (1)...(19): siRNA sense strand
gcucaaauccugggaguuu

SEQ ID NO: 2185331 - RNA, 19 nt, Homo sapiens
  misc_RNA (1)...(19): siRNA sense strand
gcaacagaccucagagaaa

SEQ ID NO: 2185332 - RNA, 19 nt, Homo sapiens
  misc_RNA (1)...(19): siRNA sense strand
ggucggacauuuaacuuuc

SEQ ID NO: 2185333 - RNA, 19 nt, Homo sapiens
  misc_RNA (1)...(19): siRNA sense strand
ggaagugacauguaagaga

SEQ ID NO: 2185334 - RNA, 19 nt, Homo sapiens
  misc_RNA (1)...(19): siRNA sense strand
ggcaagcucuguggucuuu

SEQ ID NO: 2185335 - RNA, 19 nt, Homo sapiens
  misc_RNA (1)...(19): siRNA sense strand
uaacagcuccuucaaaugg

SEQ ID NO: 2185336 - RNA, 19 nt, Homo sapiens
  misc_RNA (1)...(19): siRNA sense strand
ggacggagugucgcaauaa

SEQ ID NO: 2185337 - RNA, 19 nt, Homo sapiens
  misc_RNA (1)...(19): siRNA sense strand
ugacagacaugugugaaug

SEQ ID NO: 2185338 - RNA, 19 nt, Homo sapiens
  misc_RNA (1)...(19): siRNA sense strand
ugugacaacuggaaugaaa

SEQ ID NO: 2185339 - RNA, 19 nt, Homo sapiens
  misc_RNA (1)...(19): siRNA sense strand
gaaauugguccaugcaaca

SEQ ID NO: 2185340 - RNA, 19 nt, Homo sapiens
  misc_RNA (1)...(19): siRNA sense strand
gaacaaggaagugacaugu

SEQ ID NO: 2185341 - RNA, 19 nt, Homo sapiens
  misc_RNA (1)...(19): siRNA sense strand
agagaagucugucccauuc

SEQ ID NO: 2185342 - RNA, 19 nt, Homo sapiens
  misc_RNA (1)...(19): siRNA sense strand
gcuguguuguucauuguaa

SEQ ID NO: 2185343 - RNA, 19 nt, Homo sapiens
  misc_RNA (1)...(19): siRNA sense strand
caacuggaaugaaauuggu

SEQ ID NO: 2185344 - RNA, 19 nt, Homo sapiens
  misc_RNA (1)...(19): siRNA sense strand
gaaagugaccaccaaagca

SEQ ID NO: 2185345 - RNA, 19 nt, Homo sapiens
  misc_RNA (1)...(19): siRNA sense strand
acagacaacccuugcauaa

SEQ ID NO: 2185346 - RNA, 19 nt, Homo sapiens
  misc_RNA (1)...(19): siRNA sense strand
ccagagagagggcaucaaa

SEQ ID NO: 2185347 - RNA, 19 nt, Homo sapiens
  misc_RNA (1)...(19): siRNA sense strand
gagagaagucugucccauu

SEQ ID NO: 2185348 - RNA, 19 nt, Homo sapiens
  misc_RNA (1)...(19): siRNA sense strand
gaaggaaauaccuauaaca

SEQ ID NO: 2185349 - RNA, 19 nt, Homo sapiens
  misc_RNA (1)...(19): siRNA sense strand
gaaggaagcaaauguacca

SEQ ID NO: 2185350 - RNA, 19 nt, Homo sapiens
  misc_RNA (1)...(19): siRNA sense strand
ggaggaauuucagccagaa

SEQ ID NO: 2185351 - RNA, 19 nt, Homo sapiens
  misc_RNA (1)...(19): siRNA sense strand
ccagaaggaagcaaaugua

SEQ ID NO: 2185352 - RNA, 19 nt, Homo sapiens
  misc_RNA (1)...(19): siRNA sense strand
gguccgggauguaucaaga

SEQ ID NO: 2185353 - RNA, 19 nt, Homo sapiens
  misc_RNA (1)...(19): siRNA sense strand
caggagggcuguugugaag

SEQ ID NO: 2185354 - RNA, 19 nt, Homo sapiens
  misc_RNA (1)...(19): siRNA sense strand
gcaacuacaauggacauaa

SEQ ID NO: 2185355 - RNA, 19 nt, Homo sapiens
  misc_RNA (1)...(19): siRNA sense strand
gugaauguccaguccauaa

SEQ ID NO: 2185356 - RNA, 19 nt, Homo sapiens
  misc_RNA (1)...(19): siRNA sense strand
ggacuacgccacuuucuac

SEQ ID NO: 2185357 - RNA, 19 nt, Homo sapiens
  misc_RNA (1)...(19): siRNA sense strand
ccagaagacaucaaaguau

SEQ ID NO: 2185358 - RNA, 19 nt, Homo sapiens
  misc_RNA (1)...(19): siRNA sense strand
caaacuugguccuucacaa

SEQ ID NO: 2185359 - RNA, 19 nt, Homo sapiens
  misc_RNA (1)...(19): siRNA sense strand
ggacagugcugccccaaau

SEQ ID NO: 2185360 - RNA, 19 nt, Homo sapiens
  misc_RNA (1)...(19): siRNA sense strand
cagcaaacuugguccuuca

SEQ ID NO: 2185361 - RNA, 19 nt, Homo sapiens
  misc_RNA (1)...(19): siRNA sense strand
caagggacagucaagguaa

SEQ ID NO: 2185362 - RNA, 19 nt, Homo sapiens
  misc_RNA (1)...(19): siRNA sense strand
gaaagccagugccugaacu

SEQ ID NO: 2185363 - RNA, 19 nt, Homo sapiens
  misc_RNA (1)...(19): siRNA sense strand
caaauuuggcaacaagauu

SEQ ID NO: 2185364 - RNA, 19 nt, Homo sapiens
  misc_RNA (1)...(19): siRNA sense strand
ggagggcuguugugaagag

SEQ ID NO: 2185365 - RNA, 19 nt, Homo sapiens
  misc_RNA (1)...(19): siRNA sense strand
gacaacccuugcauaaugu

SEQ ID NO: 2185366 - RNA, 19 nt, Homo sapiens
  misc_RNA (1)...(19): siRNA sense strand
ugacuuaauugguggagau

SEQ ID NO: 2185367 - RNA, 19 nt, Homo sapiens
  misc_RNA (1)...(19): siRNA sense strand
uacgauaacugcacagcuu

SEQ ID NO: 2185368 - RNA, 19 nt, Homo sapiens
  misc_RNA (1)...(19): siRNA sense strand
aagcaaauguaccaagugu

SEQ ID NO: 2185369 - RNA, 19 nt, Homo sapiens
  misc_RNA (1)...(19): siRNA sense strand
aaacuguuauugcgaguca

SEQ ID NO: 2185370 - RNA, 19 nt, Homo sapiens
  misc_RNA (1)...(19): siRNA sense strand
gacauaaacgugaugacuu

SEQ ID NO: 2185371 - RNA, 19 nt, Homo sapiens
  misc_RNA (1)...(19): siRNA sense strand
gaugugguccucuaucaau

SEQ ID NO: 2185372 - RNA, 19 nt, Homo sapiens
  misc_RNA (1)...(19): siRNA sense strand
ucaagggacagucaaggua

SEQ ID NO: 2185373 - RNA, 19 nt, Homo sapiens
  misc_RNA (1)...(19): siRNA sense strand
gcaaauuuggcaacaagau

SEQ ID NO: 2185374 - RNA, 19 nt, Homo sapiens
  misc_RNA (1)...(19): siRNA sense strand
ggugaaguccuccagauuc

SEQ ID NO: 2185375 - RNA, 19 nt, Homo sapiens
  misc_RNA (1)...(19): siRNA sense strand
caagcucuguggucuuugu

SEQ ID NO: 2185376 - RNA, 19 nt, Homo sapiens
  misc_RNA (1)...(19): siRNA sense strand
ggcuaccucuugaaaguga

SEQ ID NO: 2185377 - RNA, 19 nt, Homo sapiens
  misc_RNA (1)...(19): siRNA sense strand
gcagugcauucccaucagu

SEQ ID NO: 2185378 - RNA, 19 nt, Homo sapiens
  misc_RNA (1)...(19): siRNA sense strand
gcaucaagccaguccuuug

SEQ ID NO: 2185379 - RNA, 19 nt, Homo sapiens
  misc_RNA (1)...(19): siRNA sense strand
ugacaacuggaaugaaauu

SEQ ID NO: 2185380 - RNA, 19 nt, Homo sapiens
  misc_RNA (1)...(19): siRNA sense strand
ggaugacuuugcugaaucu

SEQ ID NO: 2185381 - RNA, 19 nt, Homo sapiens
  misc_RNA (1)...(19): siRNA sense strand
ggauggcuaccucuugaaa

SEQ ID NO: 2185382 - RNA, 19 nt, Homo sapiens
  misc_RNA (1)...(19): siRNA sense strand
ugaaggaaauaccuauaac

SEQ ID NO: 2185383 - RNA, 19 nt, Homo sapiens
  misc_RNA (1)...(19): siRNA sense strand
ggacauaaacgugaugacu

SEQ ID NO: 2185384 - RNA, 19 nt, Homo sapiens
  misc_RNA (1)...(19): siRNA sense strand
gauccucauuucuguacga

SEQ ID NO: 2185385 - RNA, 19 nt, Homo sapiens
  misc_RNA (1)...(19): siRNA sense strand
gugcagccacccaguguaa

SEQ ID NO: 2185386 - RNA, 19 nt, Homo sapiens
  misc_RNA (1)...(19): siRNA sense strand
gaagcaaauguaccaagug

SEQ ID NO: 2185387 - RNA, 19 nt, Homo sapiens
  misc_RNA (1)...(19): siRNA sense strand
guggaugacuuugcugaau

SEQ ID NO: 2185388 - RNA, 19 nt, Homo sapiens
  misc_RNA (1)...(19): siRNA sense strand
cccagaagacaucaaagua

SEQ ID NO: 2185389 - RNA, 19 nt, Homo sapiens
  misc_RNA (1)...(19): siRNA sense strand
gauaacugcacagcuugua

SEQ ID NO: 2185390 - RNA, 19 nt, Homo sapiens
  misc_RNA (1)...(19): siRNA sense strand
gcgcuguguuguucauugu

SEQ ID NO: 2185391 - RNA, 19 nt, Homo sapiens
  misc_RNA (1)...(19): siRNA sense strand
aaagcagguuuggaaauau

SEQ ID NO: 2185392 - RNA, 19 nt, Homo sapiens
  misc_RNA (1)...(19): siRNA sense strand
ccagcaccuuagucacaua

SEQ ID NO: 2185393 - RNA, 19 nt, Homo sapiens
  misc_RNA (1)...(19): siRNA sense strand
gggcaaaauucucaacaga

SEQ ID NO: 2185394 - RNA, 19 nt, Homo sapiens
  misc_RNA (1)...(19): siRNA sense strand
gguccucuaucaauuguac

SEQ ID NO: 2185395 - RNA, 19 nt, Homo sapiens
  misc_RNA (1)...(19): siRNA sense strand
cagggacucuacugugguu

SEQ ID NO: 2185396 - RNA, 19 nt, Homo sapiens
  misc_RNA (1)...(19): siRNA sense strand
uguccuauuugcacugaaa

SEQ ID NO: 2185397 - RNA, 19 nt, Homo sapiens
  misc_RNA (1)...(19): siRNA sense strand
ccaaugaguucugcaacag

SEQ ID NO: 2185398 - RNA, 19 nt, Homo sapiens
  misc_RNA (1)...(19): siRNA sense strand
caauggacauaaacgugau

SEQ ID NO: 2185399 - RNA, 19 nt, Homo sapiens
  misc_RNA (1)...(19): siRNA sense strand
cuggauggcuaccucuuga

SEQ ID NO: 2185400 - RNA, 19 nt, Homo sapiens
  misc_RNA (1)...(19): siRNA sense strand
ugugaacagugcaaagguu

SEQ ID NO: 2185401 - RNA, 19 nt, Homo sapiens
  misc_RNA (1)...(19): siRNA sense strand
gcauggugcuguguacgau

SEQ ID NO: 2185402 - RNA, 19 nt, Homo sapiens
  misc_RNA (1)...(19): siRNA sense strand
ggaauuucagccagaagga

SEQ ID NO: 2185403 - RNA, 19 nt, Homo sapiens
  misc_RNA (1)...(19): siRNA sense strand
caucaagccaguccuuugu

SEQ ID NO: 2185404 - RNA, 19 nt, Homo sapiens
  misc_RNA (1)...(19): siRNA sense strand
gggagccucagcagaauug

SEQ ID NO: 2185405 - RNA, 19 nt, Homo sapiens
  misc_RNA (1)...(19): siRNA sense strand
gcaauaagcagugcauucc

SEQ ID NO: 2185406 - RNA, 19 nt, Homo sapiens
  misc_RNA (1)...(19): siRNA sense strand
agacaucaaaguaugcaaa

SEQ ID NO: 2185407 - RNA, 19 nt, Homo sapiens
  misc_RNA (1)...(19): siRNA sense strand
gaauuucagccagaaggaa

SEQ ID NO: 2185408 - RNA, 19 nt, Homo sapiens
  misc_RNA (1)...(19): siRNA sense strand
ugaauguccaguccauaaa

SEQ ID NO: 2185409 - RNA, 19 nt, Homo sapiens
  misc_RNA (1)...(19): siRNA sense strand
ugguggagauggaaacuuc

SEQ ID NO: 2185410 - RNA, 19 nt, Homo sapiens
  misc_RNA (1)...(19): siRNA sense strand
uuugggagcugccucuuuc

SEQ ID NO: 2185411 - RNA, 19 nt, Homo sapiens
  misc_RNA (1)...(19): siRNA sense strand
uaucaauuguaccaucugu

SEQ ID NO: 2185412 - RNA, 19 nt, Homo sapiens
  misc_RNA (1)...(19): siRNA sense strand
ccacuguccagcaaacuug

SEQ ID NO: 2185413 - RNA, 19 nt, Homo sapiens
  misc_RNA (1)...(19): siRNA sense strand
gagagagggcaucaaaguc

SEQ ID NO: 2185414 - RNA, 19 nt, Homo sapiens
  misc_RNA (1)...(19): siRNA sense strand
agagagagggcaucaaagu

SEQ ID NO: 2185415 - RNA, 19 nt, Homo sapiens
  misc_RNA (1)...(19): siRNA sense strand
uaaugugugucugcuugaa

SEQ ID NO: 2185416 - RNA, 19 nt, Homo sapiens
  misc_RNA (1)...(19): siRNA sense strand
gaagugauguuuaugacaa

SEQ ID NO: 2185417 - RNA, 19 nt, Homo sapiens
  misc_RNA (1)...(19): siRNA sense strand
ggaaauaucuugggaugga

SEQ ID NO: 2185418 - RNA, 19 nt, Homo sapiens
  misc_RNA (1)...(19): siRNA sense strand
caacuacaauggacauaaa

SEQ ID NO: 2185419 - RNA, 19 nt, Homo sapiens
  misc_RNA (1)...(19): siRNA sense strand
acauaaacgugaugacuua

SEQ ID NO: 2185420 - RNA, 19 nt, Homo sapiens
  misc_RNA (1)...(19): siRNA sense strand
acaaggaagugacauguaa

SEQ ID NO: 2185421 - RNA, 19 nt, Homo sapiens
  misc_RNA (1)...(19): siRNA sense strand
uauaacagcuccuucaaau

SEQ ID NO: 2185422 - RNA, 19 nt, Homo sapiens
  misc_RNA (1)...(19): siRNA sense strand
agacaacccuugcauaaug

SEQ ID NO: 2185423 - RNA, 19 nt, Homo sapiens
  misc_RNA (1)...(19): siRNA sense strand
caacagaccucagagaaag

SEQ ID NO: 2185424 - RNA, 19 nt, Homo sapiens
  misc_RNA (1)...(19): siRNA sense strand
ccucauuucuguacgauaa

SEQ ID NO: 2185425 - RNA, 19 nt, Homo sapiens
  misc_RNA (1)...(19): siRNA sense strand
ggaagcaaauguaccaagu

SEQ ID NO: 2185426 - RNA, 19 nt, Homo sapiens
  misc_RNA (1)...(19): siRNA sense strand
caucugugcuugugugaaa

SEQ ID NO: 2185427 - RNA, 19 nt, Homo sapiens
  misc_RNA (1)...(19): siRNA sense strand
gcaaauguaccaaguguuc

SEQ ID NO: 2185428 - RNA, 19 nt, Homo sapiens
  misc_RNA (1)...(19): siRNA sense strand
gagaugugguccucuauca

SEQ ID NO: 2185429 - RNA, 19 nt, Homo sapiens
  misc_RNA (1)...(19): siRNA sense strand
cagaagacaucaaaguaug

SEQ ID NO: 2185430 - RNA, 19 nt, Homo sapiens
  misc_RNA (1)...(19): siRNA sense strand
gcucaaauccugggaguuu

SEQ ID NO: 2185431 - RNA, 19 nt, Homo sapiens
  misc_RNA (1)...(19): siRNA sense strand
gcaacagaccucagagaaa

SEQ ID NO: 2185432 - RNA, 19 nt, Homo sapiens
  misc_RNA (1)...(19): siRNA sense strand
ggucggacauuuaacuuuc

SEQ ID NO: 2185433 - RNA, 19 nt, Homo sapiens
  misc_RNA (1)...(19): siRNA sense strand
ggaagugacauguaagaga

SEQ ID NO: 2185434 - RNA, 19 nt, Homo sapiens
  misc_RNA (1)...(19): siRNA sense strand
ggcaagcucuguggucuuu

SEQ ID NO: 2185435 - RNA, 19 nt, Homo sapiens
  misc_RNA (1)...(19): siRNA sense strand
uaacagcuccuucaaaugg

SEQ ID NO: 2185436 - RNA, 19 nt, Homo sapiens
  misc_RNA (1)...(19): siRNA sense strand
ggacggagugucgcaauaa

SEQ ID NO: 2185437 - RNA, 19 nt, Homo sapiens
  misc_RNA (1)...(19): siRNA sense strand
ugacagacaugugugaaug

SEQ ID NO: 2185438 - RNA, 19 nt, Homo sapiens
  misc_RNA (1)...(19): siRNA sense strand
ugugacaacuggaaugaaa

SEQ ID NO: 2185439 - RNA, 19 nt, Homo sapiens
  misc_RNA (1)...(19): siRNA sense strand
gaaauugguccaugcaaca

SEQ ID NO: 2185440 - RNA, 19 nt, Homo sapiens
  misc_RNA (1)...(19): siRNA sense strand
gaacaaggaagugacaugu

SEQ ID NO: 2185441 - RNA, 19 nt, Homo sapiens
  misc_RNA (1)...(19): siRNA sense strand
agagaagucugucccauuc

SEQ ID NO: 2185442 - RNA, 19 nt, Homo sapiens
  misc_RNA (1)...(19): siRNA sense strand
gcuguguuguucauuguaa

SEQ ID NO: 2185443 - RNA, 19 nt, Homo sapiens
  misc_RNA (1)...(19): siRNA sense strand
caacuggaaugaaauuggu

SEQ ID NO: 2185444 - RNA, 19 nt, Homo sapiens
  misc_RNA (1)...(19): siRNA sense strand
gaaagugaccaccaaagca

SEQ ID NO: 2185445 - RNA, 19 nt, Homo sapiens
  misc_RNA (1)...(19): siRNA sense strand
acagacaacccuugcauaa

SEQ ID NO: 2185446 - RNA, 19 nt, Homo sapiens
  misc_RNA (1)...(19): siRNA sense strand
ccagagagagggcaucaaa

SEQ ID NO: 2185447 - RNA, 19 nt, Homo sapiens
  misc_RNA (1)...(19): siRNA sense strand
gagagaagucugucccauu

SEQ ID NO: 2185448 - RNA, 19 nt, Homo sapiens
  misc_RNA (1)...(19): siRNA sense strand
gaaggaaauaccuauaaca

SEQ ID NO: 2185449 - RNA, 19 nt, Homo sapiens
  misc_RNA (1)...(19): siRNA sense strand
gaaggaagcaaauguacca

SEQ ID NO: 2185450 - RNA, 19 nt, Homo sapiens
  misc_RNA (1)...(19): siRNA sense strand
ggaggaauuucagccagaa

SEQ ID NO: 2185451 - RNA, 19 nt, Homo sapiens
  misc_RNA (1)...(19): siRNA sense strand
ccagaaggaagcaaaugua

SEQ ID NO: 2185452 - RNA, 19 nt, Homo sapiens
  misc_RNA (1)...(19): siRNA sense strand
gguccgggauguaucaaga

SEQ ID NO: 2185453 - RNA, 19 nt, Homo sapiens
  misc_RNA (1)...(19): siRNA sense strand
caggagggcuguugugaag

SEQ ID NO: 2185454 - RNA, 19 nt, Homo sapiens
  misc_RNA (1)...(19): siRNA sense strand
gcaacuacaauggacauaa

SEQ ID NO: 2185455 - RNA, 19 nt, Homo sapiens
  misc_RNA (1)...(19): siRNA sense strand
gugaauguccaguccauaa

SEQ ID NO: 2185456 - RNA, 19 nt, Homo sapiens
  misc_RNA (1)...(19): siRNA sense strand
ggacuacgccacuuucuac

SEQ ID NO: 2185457 - RNA, 19 nt, Homo sapiens
  misc_RNA (1)...(19): siRNA sense strand
ccagaagacaucaaaguau

SEQ ID NO: 2185458 - RNA, 19 nt, Homo sapiens
  misc_RNA (1)...(19): siRNA sense strand
caaacuugguccuucacaa

SEQ ID NO: 2185459 - RNA, 19 nt, Homo sapiens
  misc_RNA (1)...(19): siRNA sense strand
ggacagugcugccccaaau

SEQ ID NO: 2185460 - RNA, 19 nt, Homo sapiens
  misc_RNA (1)...(19): siRNA sense strand
cagcaaacuugguccuuca

SEQ ID NO: 2185461 - RNA, 19 nt, Homo sapiens
  misc_RNA (1)...(19): siRNA sense strand
caagggacagucaagguaa

SEQ ID NO: 2185462 - RNA, 19 nt, Homo sapiens
  misc_RNA (1)...(19): siRNA sense strand
gaaagccagugccugaacu

SEQ ID NO: 2185463 - RNA, 19 nt, Homo sapiens
  misc_RNA (1)...(19): siRNA sense strand
caaauuuggcaacaagauu

SEQ ID NO: 2185464 - RNA, 19 nt, Homo sapiens
  misc_RNA (1)...(19): siRNA sense strand
ggagggcuguugugaagag

SEQ ID NO: 2185465 - RNA, 19 nt, Homo sapiens
  misc_RNA (1)...(19): siRNA sense strand
gacaacccuugcauaaugu

SEQ ID NO: 2185466 - RNA, 19 nt, Homo sapiens
  misc_RNA (1)...(19): siRNA sense strand
ugacuuaauugguggagau

SEQ ID NO: 2185467 - RNA, 19 nt, Homo sapiens
  misc_RNA (1)...(19): siRNA sense strand
uacgauaacugcacagcuu

SEQ ID NO: 2185468 - RNA, 19 nt, Homo sapiens
  misc_RNA (1)...(19): siRNA sense strand
aagcaaauguaccaagugu

SEQ ID NO: 2185469 - RNA, 19 nt, Homo sapiens
  misc_RNA (1)...(19): siRNA sense strand
aaacuguuauugcgaguca

SEQ ID NO: 2185470 - RNA, 19 nt, Homo sapiens
  misc_RNA (1)...(19): siRNA sense strand
gacauaaacgugaugacuu

SEQ ID NO: 2185471 - RNA, 19 nt, Homo sapiens
  misc_RNA (1)...(19): siRNA sense strand
gaugugguccucuaucaau

SEQ ID NO: 2185472 - RNA, 19 nt, Homo sapiens
  misc_RNA (1)...(19): siRNA sense strand
ucaagggacagucaaggua

SEQ ID NO: 2185473 - RNA, 19 nt, Homo sapiens
  misc_RNA (1)...(19): siRNA sense strand
gcaaauuuggcaacaagau

SEQ ID NO: 2185474 - RNA, 19 nt, Homo sapiens
  misc_RNA (1)...(19): siRNA sense strand
ggugaaguccuccagauuc

SEQ ID NO: 2185475 - RNA, 19 nt, Homo sapiens
  misc_RNA (1)...(19): siRNA sense strand
caagcucuguggucuuugu

SEQ ID NO: 2185476 - RNA, 19 nt, Homo sapiens
  misc_RNA (1)...(19): siRNA sense strand
ggcuaccucuugaaaguga

SEQ ID NO: 2185477 - RNA, 19 nt, Homo sapiens
  misc_RNA (1)...(19): siRNA sense strand
gcagugcauucccaucagu

SEQ ID NO: 2185478 - RNA, 19 nt, Homo sapiens
  misc_RNA (1)...(19): siRNA sense strand
gcaucaagccaguccuuug

SEQ ID NO: 2185479 - RNA, 19 nt, Homo sapiens
  misc_RNA (1)...(19): siRNA sense strand
ugacaacuggaaugaaauu

SEQ ID NO: 2185480 - RNA, 19 nt, Homo sapiens
  misc_RNA (1)...(19): siRNA sense strand
ggaugacuuugcugaaucu

SEQ ID NO: 2185481 - RNA, 19 nt, Homo sapiens
  misc_RNA (1)...(19): siRNA sense strand
ggauggcuaccucuugaaa

SEQ ID NO: 2185482 - RNA, 19 nt, Homo sapiens
  misc_RNA (1)...(19): siRNA sense strand
ugaaggaaauaccuauaac

SEQ ID NO: 2185483 - RNA, 19 nt, Homo sapiens
  misc_RNA (1)...(19): siRNA sense strand
ggacauaaacgugaugacu

SEQ ID NO: 2185484 - RNA, 19 nt, Homo sapiens
  misc_RNA (1)...(19): siRNA sense strand
gauccucauuucuguacga

SEQ ID NO: 2185485 - RNA, 19 nt, Homo sapiens
  misc_RNA (1)...(19): siRNA sense strand
gugcagccacccaguguaa

SEQ ID NO: 2185486 - RNA, 19 nt, Homo sapiens
  misc_RNA (1)...(19): siRNA sense strand
gaagcaaauguaccaagug

SEQ ID NO: 2185487 - RNA, 19 nt, Homo sapiens
  misc_RNA (1)...(19): siRNA sense strand
guggaugacuuugcugaau

SEQ ID NO: 2185488 - RNA, 19 nt, Homo sapiens
  misc_RNA (1)...(19): siRNA sense strand
cccagaagacaucaaagua

SEQ ID NO: 2185489 - RNA, 19 nt, Homo sapiens
  misc_RNA (1)...(19): siRNA sense strand
gauaacugcacagcuugua

SEQ ID NO: 2185490 - RNA, 19 nt, Homo sapiens
  misc_RNA (1)...(19): siRNA sense strand
gcgcuguguuguucauugu

SEQ ID NO: 2185491 - RNA, 19 nt, Homo sapiens
  misc_RNA (1)...(19): siRNA sense strand
aaagcagguuuggaaauau

SEQ ID NO: 2185492 - RNA, 19 nt, Homo sapiens
  misc_RNA (1)...(19): siRNA sense strand
ccagcaccuuagucacaua

SEQ ID NO: 2185493 - RNA, 19 nt, Homo sapiens
  misc_RNA (1)...(19): siRNA sense strand
gggcaaaauucucaacaga

SEQ ID NO: 2185494 - RNA, 19 nt, Homo sapiens
  misc_RNA (1)...(19): siRNA sense strand
gguccucuaucaauuguac

SEQ ID NO: 2185495 - RNA, 19 nt, Homo sapiens
  misc_RNA (1)...(19): siRNA sense strand
cagggacucuacugugguu

SEQ ID NO: 2185496 - RNA, 19 nt, Homo sapiens
  misc_RNA (1)...(19): siRNA sense strand
uguccuauuugcacugaaa

SEQ ID NO: 2185497 - RNA, 19 nt, Homo sapiens
  misc_RNA (1)...(19): siRNA sense strand
ccaaugaguucugcaacag

SEQ ID NO: 2185498 - RNA, 19 nt, Homo sapiens
  misc_RNA (1)...(19): siRNA sense strand
caauggacauaaacgugau

SEQ ID NO: 2185499 - RNA, 19 nt, Homo sapiens
  misc_RNA (1)...(19): siRNA sense strand
cuggauggcuaccucuuga

SEQ ID NO: 2185500 - RNA, 19 nt, Homo sapiens
  misc_RNA (1)...(19): siRNA sense strand
ugugaacagugcaaagguu

SEQ ID NO: 2185501 - RNA, 19 nt, Homo sapiens
  misc_RNA (1)...(19): siRNA sense strand
gcauggugcuguguacgau

SEQ ID NO: 2185502 - RNA, 19 nt, Homo sapiens
  misc_RNA (1)...(19): siRNA sense strand
ggaauuucagccagaagga

SEQ ID NO: 2185503 - RNA, 19 nt, Homo sapiens
  misc_RNA (1)...(19): siRNA sense strand
caucaagccaguccuuugu

SEQ ID NO: 2185504 - RNA, 19 nt, Homo sapiens
  misc_RNA (1)...(19): siRNA sense strand
gggagccucagcagaauug

SEQ ID NO: 2185505 - RNA, 19 nt, Homo sapiens
  misc_RNA (1)...(19): siRNA sense strand
gcaauaagcagugcauucc

SEQ ID NO: 2185506 - RNA, 19 nt, Homo sapiens
  misc_RNA (1)...(19): siRNA sense strand
agacaucaaaguaugcaaa

SEQ ID NO: 2185507 - RNA, 19 nt, Homo sapiens
  misc_RNA (1)...(19): siRNA sense strand
gaauuucagccagaaggaa

SEQ ID NO: 2185508 - RNA, 19 nt, Homo sapiens
  misc_RNA (1)...(19): siRNA sense strand
ugaauguccaguccauaaa

SEQ ID NO: 2185509 - RNA, 19 nt, Homo sapiens
  misc_RNA (1)...(19): siRNA sense strand
ugguggagauggaaacuuc

SEQ ID NO: 2185510 - RNA, 19 nt, Homo sapiens
  misc_RNA (1)...(19): siRNA sense strand
uuugggagcugccucuuuc

SEQ ID NO: 2185511 - RNA, 19 nt, Homo sapiens
  misc_RNA (1)...(19): siRNA sense strand
uaucaauuguaccaucugu

SEQ ID NO: 2185512 - RNA, 19 nt, Homo sapiens
  misc_RNA (1)...(19): siRNA sense strand
ccacuguccagcaaacuug

SEQ ID NO: 2185513 - RNA, 19 nt, Homo sapiens
  misc_RNA (1)...(19): siRNA sense strand
gagagagggcaucaaaguc

SEQ ID NO: 2185514 - RNA, 19 nt, Homo sapiens
  misc_RNA (1)...(19): siRNA sense strand
agagagagggcaucaaagu

SEQ ID NO: 2185515 - RNA, 19 nt, Homo sapiens
  misc_RNA (1)...(19): siRNA sense strand
uaaugugugucugcuugaa

SEQ ID NO: 2185516 - RNA, 19 nt, Homo sapiens
  misc_RNA (1)...(19): siRNA sense strand
gaagugauguuuaugacaa

SEQ ID NO: 2185517 - RNA, 19 nt, Homo sapiens
  misc_RNA (1)...(19): siRNA sense strand
ggaaauaucuugggaugga

SEQ ID NO: 2185518 - RNA, 19 nt, Homo sapiens
  misc_RNA (1)...(19): siRNA sense strand
caacuacaauggacauaaa

SEQ ID NO: 2185519 - RNA, 19 nt, Homo sapiens
  misc_RNA (1)...(19): siRNA sense strand
acauaaacgugaugacuua

SEQ ID NO: 2185520 - RNA, 19 nt, Homo sapiens
  misc_RNA (1)...(19): siRNA sense strand
acaaggaagugacauguaa

SEQ ID NO: 2185521 - RNA, 19 nt, Homo sapiens
  misc_RNA (1)...(19): siRNA sense strand
uauaacagcuccuucaaau

SEQ ID NO: 2185522 - RNA, 19 nt, Homo sapiens
  misc_RNA (1)...(19): siRNA sense strand
agacaacccuugcauaaug

SEQ ID NO: 2185523 - RNA, 19 nt, Homo sapiens
  misc_RNA (1)...(19): siRNA sense strand
caacagaccucagagaaag

SEQ ID NO: 2185524 - RNA, 19 nt, Homo sapiens
  misc_RNA (1)...(19): siRNA sense strand
ccucauuucuguacgauaa

SEQ ID NO: 2185525 - RNA, 19 nt, Homo sapiens
  misc_RNA (1)...(19): siRNA sense strand
ggaagcaaauguaccaagu

SEQ ID NO: 2185526 - RNA, 19 nt, Homo sapiens
  misc_RNA (1)...(19): siRNA sense strand
caucugugcuugugugaaa

SEQ ID NO: 2185527 - RNA, 19 nt, Homo sapiens
  misc_RNA (1)...(19): siRNA sense strand
gcaaauguaccaaguguuc

SEQ ID NO: 2185528 - RNA, 19 nt, Homo sapiens
  misc_RNA (1)...(19): siRNA sense strand
gagaugugguccucuauca

SEQ ID NO: 2185529 - RNA, 19 nt, Homo sapiens
  misc_RNA (1)...(19): siRNA sense strand
cagaagacaucaaaguaug

SEQ ID NO: 2185530 - RNA, 19 nt, Homo sapiens
  misc_RNA (1)...(19): siRNA sense strand
gcucaaauccugggaguuu

SEQ ID NO: 2185531 - RNA, 19 nt, Homo sapiens
  misc_RNA (1)...(19): siRNA sense strand
gcaacagaccucagagaaa

SEQ ID NO: 2185532 - RNA, 19 nt, Homo sapiens
  misc_RNA (1)...(19): siRNA sense strand
ggucggacauuuaacuuuc

SEQ ID NO: 2185533 - RNA, 19 nt, Homo sapiens
  misc_RNA (1)...(19): siRNA sense strand
ggaagugacauguaagaga

SEQ ID NO: 2185534 - RNA, 19 nt, Homo sapiens
  misc_RNA (1)...(19): siRNA sense strand
ggcaagcucuguggucuuu

SEQ ID NO: 2185535 - RNA, 19 nt, Homo sapiens
  misc_RNA (1)...(19): siRNA sense strand
uaacagcuccuucaaaugg

SEQ ID NO: 2185536 - RNA, 19 nt, Homo sapiens
  misc_RNA (1)...(19): siRNA sense strand
ggacggagugucgcaauaa

SEQ ID NO: 2185537 - RNA, 19 nt, Homo sapiens
  misc_RNA (1)...(19): siRNA sense strand
ugacagacaugugugaaug

SEQ ID NO: 2185538 - RNA, 19 nt, Homo sapiens
  misc_RNA (1)...(19): siRNA sense strand
ugugacaacuggaaugaaa

SEQ ID NO: 2185539 - RNA, 19 nt, Homo sapiens
  misc_RNA (1)...(19): siRNA sense strand
gaaauugguccaugcaaca

SEQ ID NO: 2185540 - RNA, 19 nt, Homo sapiens
  misc_RNA (1)...(19): siRNA sense strand
gaacaaggaagugacaugu

SEQ ID NO: 2185541 - RNA, 19 nt, Homo sapiens
  misc_RNA (1)...(19): siRNA sense strand
agagaagucugucccauuc

SEQ ID NO: 2185542 - RNA, 19 nt, Homo sapiens
  misc_RNA (1)...(19): siRNA sense strand
gcuguguuguucauuguaa

SEQ ID NO: 2185543 - RNA, 19 nt, Homo sapiens
  misc_RNA (1)...(19): siRNA sense strand
caacuggaaugaaauuggu

SEQ ID NO: 2185544 - RNA, 19 nt, Homo sapiens
  misc_RNA (1)...(19): siRNA sense strand
gaaagugaccaccaaagca

SEQ ID NO: 2185545 - RNA, 19 nt, Homo sapiens
  misc_RNA (1)...(19): siRNA sense strand
acagacaacccuugcauaa

SEQ ID NO: 2185546 - RNA, 19 nt, Homo sapiens
  misc_RNA (1)...(19): siRNA sense strand
ccagagagagggcaucaaa

SEQ ID NO: 2185547 - RNA, 19 nt, Homo sapiens
  misc_RNA (1)...(19): siRNA sense strand
gagagaagucugucccauu

SEQ ID NO: 2185548 - RNA, 19 nt, Homo sapiens
  misc_RNA (1)...(19): siRNA sense strand
gaaggaaauaccuauaaca

SEQ ID NO: 2185549 - RNA, 19 nt, Homo sapiens
  misc_RNA (1)...(19): siRNA sense strand
gaaggaagcaaauguacca

SEQ ID NO: 2185550 - RNA, 19 nt, Homo sapiens
  misc_RNA (1)...(19): siRNA sense strand
ggaggaauuucagccagaa

SEQ ID NO: 2185551 - RNA, 19 nt, Homo sapiens
  misc_RNA (1)...(19): siRNA sense strand
ccagaaggaagcaaaugua

SEQ ID NO: 2185552 - RNA, 19 nt, Homo sapiens
  misc_RNA (1)...(19): siRNA sense strand
gguccgggauguaucaaga

SEQ ID NO: 2185553 - RNA, 19 nt, Homo sapiens
  misc_RNA (1)...(19): siRNA sense strand
caggagggcuguugugaag

SEQ ID NO: 2185554 - RNA, 19 nt, Homo sapiens
  misc_RNA (1)...(19): siRNA sense strand
gcaacuacaauggacauaa

SEQ ID NO: 2185555 - RNA, 19 nt, Homo sapiens
  misc_RNA (1)...(19): siRNA sense strand
gugaauguccaguccauaa

SEQ ID NO: 2185556 - RNA, 19 nt, Homo sapiens
  misc_RNA (1)...(19): siRNA sense strand
ggacuacgccacuuucuac

SEQ ID NO: 2185557 - RNA, 19 nt, Homo sapiens
  misc_RNA (1)...(19): siRNA sense strand
ccagaagacaucaaaguau

SEQ ID NO: 2185558 - RNA, 19 nt, Homo sapiens
  misc_RNA (1)...(19): siRNA sense strand
caaacuugguccuucacaa

SEQ ID NO: 2185559 - RNA, 19 nt, Homo sapiens
  misc_RNA (1)...(19): siRNA sense strand
ggacagugcugccccaaau

SEQ ID NO: 2185560 - RNA, 19 nt, Homo sapiens
  misc_RNA (1)...(19): siRNA sense strand
cagcaaacuugguccuuca

SEQ ID NO: 2185561 - RNA, 19 nt, Homo sapiens
  misc_RNA (1)...(19): siRNA sense strand
caagggacagucaagguaa

SEQ ID NO: 2185562 - RNA, 19 nt, Homo sapiens
  misc_RNA (1)...(19): siRNA sense strand
gaaagccagugccugaacu

SEQ ID NO: 2185563 - RNA, 19 nt, Homo sapiens
  misc_RNA (1)...(19): siRNA sense strand
caaauuuggcaacaagauu

SEQ ID NO: 2185564 - RNA, 19 nt, Homo sapiens
  misc_RNA (1)...(19): siRNA sense strand
ggagggcuguugugaagag

SEQ ID NO: 2185565 - RNA, 19 nt, Homo sapiens
  misc_RNA (1)...(19): siRNA sense strand
gacaacccuugcauaaugu

SEQ ID NO: 2185566 - RNA, 19 nt, Homo sapiens
  misc_RNA (1)...(19): siRNA sense strand
ugacuuaauugguggagau

SEQ ID NO: 2185567 - RNA, 19 nt, Homo sapiens
  misc_RNA (1)...(19): siRNA sense strand
uacgauaacugcacagcuu

SEQ ID NO: 2185568 - RNA, 19 nt, Homo sapiens
  misc_RNA (1)...(19): siRNA sense strand
aagcaaauguaccaagugu

SEQ ID NO: 2185569 - RNA, 19 nt, Homo sapiens
  misc_RNA (1)...(19): siRNA sense strand
aaacuguuauugcgaguca

SEQ ID NO: 2185570 - RNA, 19 nt, Homo sapiens
  misc_RNA (1)...(19): siRNA sense strand
gacauaaacgugaugacuu

SEQ ID NO: 2185571 - RNA, 19 nt, Homo sapiens
  misc_RNA (1)...(19): siRNA sense strand
gaugugguccucuaucaau

SEQ ID NO: 2185572 - RNA, 19 nt, Homo sapiens
  misc_RNA (1)...(19): siRNA sense strand
ucaagggacagucaaggua

SEQ ID NO: 2185573 - RNA, 19 nt, Homo sapiens
  misc_RNA (1)...(19): siRNA sense strand
gcaaauuuggcaacaagau

SEQ ID NO: 2185574 - RNA, 19 nt, Homo sapiens
  misc_RNA (1)...(19): siRNA sense strand
ggugaaguccuccagauuc

SEQ ID NO: 2185575 - RNA, 19 nt, Homo sapiens
  misc_RNA (1)...(19): siRNA sense strand
caagcucuguggucuuugu

SEQ ID NO: 2185576 - RNA, 19 nt, Homo sapiens
  misc_RNA (1)...(19): siRNA sense strand
ggcuaccucuugaaaguga

SEQ ID NO: 2185577 - RNA, 19 nt, Homo sapiens
  misc_RNA (1)...(19): siRNA sense strand
gcagugcauucccaucagu

SEQ ID NO: 2185578 - RNA, 19 nt, Homo sapiens
  misc_RNA (1)...(19): siRNA sense strand
gcaucaagccaguccuuug

SEQ ID NO: 2185579 - RNA, 19 nt, Homo sapiens
  misc_RNA (1)...(19): siRNA sense strand
ugacaacuggaaugaaauu

SEQ ID NO: 2185580 - RNA, 19 nt, Homo sapiens
  misc_RNA (1)...(19): siRNA sense strand
ggaugacuuugcugaaucu

SEQ ID NO: 2185581 - RNA, 19 nt, Homo sapiens
  misc_RNA (1)...(19): siRNA sense strand
ggauggcuaccucuugaaa

SEQ ID NO: 2185582 - RNA, 19 nt, Homo sapiens
  misc_RNA (1)...(19): siRNA sense strand
ugaaggaaauaccuauaac

SEQ ID NO: 2185583 - RNA, 19 nt, Homo sapiens
  misc_RNA (1)...(19): siRNA sense strand
ggacauaaacgugaugacu

SEQ ID NO: 2185584 - RNA, 19 nt, Homo sapiens
  misc_RNA (1)...(19): siRNA sense strand
gauccucauuucuguacga

SEQ ID NO: 2185585 - RNA, 19 nt, Homo sapiens
  misc_RNA (1)...(19): siRNA sense strand
gugcagccacccaguguaa

SEQ ID NO: 2185586 - RNA, 19 nt, Homo sapiens
  misc_RNA (1)...(19): siRNA sense strand
gaagcaaauguaccaagug

SEQ ID NO: 2185587 - RNA, 19 nt, Homo sapiens
  misc_RNA (1)...(19): siRNA sense strand
guggaugacuuugcugaau

SEQ ID NO: 2185588 - RNA, 19 nt, Homo sapiens
  misc_RNA (1)...(19): siRNA sense strand
cccagaagacaucaaagua

SEQ ID NO: 2185589 - RNA, 19 nt, Homo sapiens
  misc_RNA (1)...(19): siRNA sense strand
gauaacugcacagcuugua

SEQ ID NO: 2185590 - RNA, 19 nt, Homo sapiens
  misc_RNA (1)...(19): siRNA sense strand
gcgcuguguuguucauugu

SEQ ID NO: 2185591 - RNA, 19 nt, Homo sapiens
  misc_RNA (1)...(19): siRNA sense strand
aaagcagguuuggaaauau

SEQ ID NO: 2185592 - RNA, 19 nt, Homo sapiens
  misc_RNA (1)...(19): siRNA sense strand
ccagcaccuuagucacaua

SEQ ID NO: 2185593 - RNA, 19 nt, Homo sapiens
  misc_RNA (1)...(19): siRNA sense strand
gggcaaaauucucaacaga

SEQ ID NO: 2185594 - RNA, 19 nt, Homo sapiens
  misc_RNA (1)...(19): siRNA sense strand
gguccucuaucaauuguac

SEQ ID NO: 2185595 - RNA, 19 nt, Homo sapiens
  misc_RNA (1)...(19): siRNA sense strand
cagggacucuacugugguu

SEQ ID NO: 2185596 - RNA, 19 nt, Homo sapiens
  misc_RNA (1)...(19): siRNA sense strand
uguccuauuugcacugaaa

SEQ ID NO: 2185597 - RNA, 19 nt, Homo sapiens
  misc_RNA (1)...(19): siRNA sense strand
ccaaugaguucugcaacag

SEQ ID NO: 2185598 - RNA, 19 nt, Homo sapiens
  misc_RNA (1)...(19): siRNA sense strand
caauggacauaaacgugau

SEQ ID NO: 2185599 - RNA, 19 nt, Homo sapiens
  misc_RNA (1)...(19): siRNA sense strand
cuggauggcuaccucuuga

SEQ ID NO: 2185600 - RNA, 19 nt, Homo sapiens
  misc_RNA (1)...(19): siRNA sense strand
ugugaacagugcaaagguu

SEQ ID NO: 2185601 - RNA, 19 nt, Homo sapiens
  misc_RNA (1)...(19): siRNA sense strand
gcauggugcuguguacgau

SEQ ID NO: 2185602 - RNA, 19 nt, Homo sapiens
  misc_RNA (1)...(19): siRNA sense strand
ggaauuucagccagaagga

SEQ ID NO: 2185603 - RNA, 19 nt, Homo sapiens
  misc_RNA (1)...(19): siRNA sense strand
caucaagccaguccuuugu

SEQ ID NO: 2185604 - RNA, 19 nt, Homo sapiens
  misc_RNA (1)...(19): siRNA sense strand
gggagccucagcagaauug

SEQ ID NO: 2185605 - RNA, 19 nt, Homo sapiens
  misc_RNA (1)...(19): siRNA sense strand
gcaauaagcagugcauucc

SEQ ID NO: 2185606 - RNA, 19 nt, Homo sapiens
  misc_RNA (1)...(19): siRNA sense strand
agacaucaaaguaugcaaa

SEQ ID NO: 2185607 - RNA, 19 nt, Homo sapiens
  misc_RNA (1)...(19): siRNA sense strand
gaauuucagccagaaggaa

SEQ ID NO: 2185608 - RNA, 19 nt, Homo sapiens
  misc_RNA (1)...(19): siRNA sense strand
ugaauguccaguccauaaa

SEQ ID NO: 2185609 - RNA, 19 nt, Homo sapiens
  misc_RNA (1)...(19): siRNA sense strand
ugguggagauggaaacuuc

SEQ ID NO: 2185610 - RNA, 19 nt, Homo sapiens
  misc_RNA (1)...(19): siRNA sense strand
uuugggagcugccucuuuc

SEQ ID NO: 2185611 - RNA, 19 nt, Homo sapiens
  misc_RNA (1)...(19): siRNA sense strand
uaucaauuguaccaucugu

SEQ ID NO: 2185612 - RNA, 19 nt, Homo sapiens
  misc_RNA (1)...(19): siRNA sense strand
ccacuguccagcaaacuug

SEQ ID NO: 2185613 - RNA, 19 nt, Homo sapiens
  misc_RNA (1)...(19): siRNA sense strand
gagagagggcaucaaaguc

SEQ ID NO: 2185614 - RNA, 19 nt, Homo sapiens
  misc_RNA (1)...(19): siRNA sense strand
agagagagggcaucaaagu

SEQ ID NO: 2185615 - RNA, 19 nt, Homo sapiens
  misc_RNA (1)...(19): siRNA sense strand
uaaugugugucugcuugaa

SEQ ID NO: 2185616 - RNA, 19 nt, Homo sapiens
  misc_RNA (1)...(19): siRNA sense strand
gaagagucaugguguguaa

SEQ ID NO: 2185617 - RNA, 19 nt, Homo sapiens
  misc_RNA (1)...(19): siRNA sense strand
gaaagcagccgaagaagug

SEQ ID NO: 2185618 - RNA, 19 nt, Homo sapiens
  misc_RNA (1)...(19): siRNA sense strand
ccacugagauacacaaaga

SEQ ID NO: 2185619 - RNA, 19 nt, Homo sapiens
  misc_RNA (1)...(19): siRNA sense strand
gcaguuugcucaguuugua

SEQ ID NO: 2185620 - RNA, 19 nt, Homo sapiens
  misc_RNA (1)...(19): siRNA sense strand
gaguauggaugauuaugaa

SEQ ID NO: 2185621 - RNA, 19 nt, Homo sapiens
  misc_RNA (1)...(19): siRNA sense strand
ugaaagcugugaaggauug

SEQ ID NO: 2185622 - RNA, 19 nt, Homo sapiens
  misc_RNA (1)...(19): siRNA sense strand
gcaacuuacuaacaucaaa

SEQ ID NO: 2185623 - RNA, 19 nt, Homo sapiens
  misc_RNA (1)...(19): siRNA sense strand
gaguuugacuuuauggaaa

SEQ ID NO: 2185624 - RNA, 19 nt, Homo sapiens
  misc_RNA (1)...(19): siRNA sense strand
auaauggacuugauuggua

SEQ ID NO: 2185625 - RNA, 19 nt, Homo sapiens
  misc_RNA (1)...(19): siRNA sense strand
gcacuucggcccauuguga

SEQ ID NO: 2185626 - RNA, 19 nt, Homo sapiens
  misc_RNA (1)...(19): siRNA sense strand
ccaagaagaacuuauagaa

SEQ ID NO: 2185627 - RNA, 19 nt, Homo sapiens
  misc_RNA (1)...(19): siRNA sense strand
cgugaaagcuucucauauc

SEQ ID NO: 2185628 - RNA, 19 nt, Homo sapiens
  misc_RNA (1)...(19): siRNA sense strand
uuacucagauugcaucauu

SEQ ID NO: 2185629 - RNA, 19 nt, Homo sapiens
  misc_RNA (1)...(19): siRNA sense strand
cagauugcaucauuauuug

SEQ ID NO: 2185630 - RNA, 19 nt, Homo sapiens
  misc_RNA (1)...(19): siRNA sense strand
ggaaaacucccuuauguaa

SEQ ID NO: 2185631 - RNA, 19 nt, Homo sapiens
  misc_RNA (1)...(19): siRNA sense strand
gcaguaugccugaaauuug

SEQ ID NO: 2185632 - RNA, 19 nt, Homo sapiens
  misc_RNA (1)...(19): siRNA sense strand
cagcggaguuugacuuuau

SEQ ID NO: 2185633 - RNA, 19 nt, Homo sapiens
  misc_RNA (1)...(19): siRNA sense strand
gaccagggacuauauuauu

SEQ ID NO: 2185634 - RNA, 19 nt, Homo sapiens
  misc_RNA (1)...(19): siRNA sense strand
gaacuuauagaauggauca

SEQ ID NO: 2185635 - RNA, 19 nt, Homo sapiens
  misc_RNA (1)...(19): siRNA sense strand
caaacccaguggaauauug

SEQ ID NO: 2185636 - RNA, 19 nt, Homo sapiens
  misc_RNA (1)...(19): siRNA sense strand
gggacuauauuauuccuau

SEQ ID NO: 2185637 - RNA, 19 nt, Homo sapiens
  misc_RNA (1)...(19): siRNA sense strand
ggagcuggcugccuguaga

SEQ ID NO: 2185638 - RNA, 19 nt, Homo sapiens
  misc_RNA (1)...(19): siRNA sense strand
aauggaguauggaugauua

SEQ ID NO: 2185639 - RNA, 19 nt, Homo sapiens
  misc_RNA (1)...(19): siRNA sense strand
gaaagcuucucauauccau

SEQ ID NO: 2185640 - RNA, 19 nt, Homo sapiens
  misc_RNA (1)...(19): siRNA sense strand
gggagauccugcuugcuuu

SEQ ID NO: 2185641 - RNA, 19 nt, Homo sapiens
  misc_RNA (1)...(19): siRNA sense strand
gaagugaagcgagaacuga

SEQ ID NO: 2185642 - RNA, 19 nt, Homo sapiens
  misc_RNA (1)...(19): siRNA sense strand
gcagcaaugucaauacaag

SEQ ID NO: 2185643 - RNA, 19 nt, Homo sapiens
  misc_RNA (1)...(19): siRNA sense strand
gcagcggaguuugacuuua

SEQ ID NO: 2185644 - RNA, 19 nt, Homo sapiens
  misc_RNA (1)...(19): siRNA sense strand
cuucagauguugcuaguga

SEQ ID NO: 2185645 - RNA, 19 nt, Homo sapiens
  misc_RNA (1)...(19): siRNA sense strand
ggaacugucauacuuaaau

SEQ ID NO: 2185646 - RNA, 19 nt, Homo sapiens
  misc_RNA (1)...(19): siRNA sense strand
gcauauacagcccuuggua

SEQ ID NO: 2185647 - RNA, 19 nt, Homo sapiens
  misc_RNA (1)...(19): siRNA sense strand
aaacaacagacacauguaa

SEQ ID NO: 2185648 - RNA, 19 nt, Homo sapiens
  misc_RNA (1)...(19): siRNA sense strand
gagauacacaaagacauua

SEQ ID NO: 2185649 - RNA, 19 nt, Homo sapiens
  misc_RNA (1)...(19): siRNA sense strand
ucacugaucugcucaagac

SEQ ID NO: 2185650 - RNA, 19 nt, Homo sapiens
  misc_RNA (1)...(19): siRNA sense strand
ggaguauggaugauuauga

SEQ ID NO: 2185651 - RNA, 19 nt, Homo sapiens
  misc_RNA (1)...(19): siRNA sense strand
uuacaaaguccuagaaguu

SEQ ID NO: 2185652 - RNA, 19 nt, Homo sapiens
  misc_RNA (1)...(19): siRNA sense strand
uauguaaccucuuggugaa

SEQ ID NO: 2185653 - RNA, 19 nt, Homo sapiens
  misc_RNA (1)...(19): siRNA sense strand
caacagacacauguaagaa

SEQ ID NO: 2185654 - RNA, 19 nt, Homo sapiens
  misc_RNA (1)...(19): siRNA sense strand
cauauuggcaacuuacuaa

SEQ ID NO: 2185655 - RNA, 19 nt, Homo sapiens
  misc_RNA (1)...(19): siRNA sense strand
uauauuagcagcaauguca

SEQ ID NO: 2185656 - RNA, 19 nt, Homo sapiens
  misc_RNA (1)...(19): siRNA sense strand
guaccggauuuauaccaaa

SEQ ID NO: 2185657 - RNA, 19 nt, Homo sapiens
  misc_RNA (1)...(19): siRNA sense strand
gaacuccccuccccacuug

SEQ ID NO: 2185658 - RNA, 19 nt, Homo sapiens
  misc_RNA (1)...(19): siRNA sense strand
gaucauggagagcugguuu

SEQ ID NO: 2185659 - RNA, 19 nt, Homo sapiens
  misc_RNA (1)...(19): siRNA sense strand
ggaguuugacuuuauggaa

SEQ ID NO: 2185660 - RNA, 19 nt, Homo sapiens
  misc_RNA (1)...(19): siRNA sense strand
ugauuucucuugcacuuug

SEQ ID NO: 2185661 - RNA, 19 nt, Homo sapiens
  misc_RNA (1)...(19): siRNA sense strand
ucauauccauuucuuguuc

SEQ ID NO: 2185662 - RNA, 19 nt, Homo sapiens
  misc_RNA (1)...(19): siRNA sense strand
aauacaagguucagcaaau

SEQ ID NO: 2185663 - RNA, 19 nt, Homo sapiens
  misc_RNA (1)...(19): siRNA sense strand
ggaaagcagccgaagaagu

SEQ ID NO: 2185664 - RNA, 19 nt, Homo sapiens
  misc_RNA (1)...(19): siRNA sense strand
guuaagcucucugcacuuc

SEQ ID NO: 2185665 - RNA, 19 nt, Homo sapiens
  misc_RNA (1)...(19): siRNA sense strand
uaauggacuugauugguau

SEQ ID NO: 2185666 - RNA, 19 nt, Homo sapiens
  misc_RNA (1)...(19): siRNA sense strand
gcuagugacucauauucuc

SEQ ID NO: 2185667 - RNA, 19 nt, Homo sapiens
  misc_RNA (1)...(19): siRNA sense strand
aagauauguuggacgguua

SEQ ID NO: 2185668 - RNA, 19 nt, Homo sapiens
  misc_RNA (1)...(19): siRNA sense strand
ugagauacacaaagacauu

SEQ ID NO: 2185669 - RNA, 19 nt, Homo sapiens
  misc_RNA (1)...(19): siRNA sense strand
cggaagaucauuuauauac

SEQ ID NO: 2185670 - RNA, 19 nt, Homo sapiens
  misc_RNA (1)...(19): siRNA sense strand
cugcaaacccaguggaaua

SEQ ID NO: 2185671 - RNA, 19 nt, Homo sapiens
  misc_RNA (1)...(19): siRNA sense strand
uagcagcaaugucaauaca

SEQ ID NO: 2185672 - RNA, 19 nt, Homo sapiens
  misc_RNA (1)...(19): siRNA sense strand
caugauuucucuugcacuu

SEQ ID NO: 2185673 - RNA, 19 nt, Homo sapiens
  misc_RNA (1)...(19): siRNA sense strand
gcucaguuuguacuucuua

SEQ ID NO: 2185674 - RNA, 19 nt, Homo sapiens
  misc_RNA (1)...(19): siRNA sense strand
caaaguccuagaaguugua

SEQ ID NO: 2185675 - RNA, 19 nt, Homo sapiens
  misc_RNA (1)...(19): siRNA sense strand
uguagaagauccugccaau

SEQ ID NO: 2185676 - RNA, 19 nt, Homo sapiens
  misc_RNA (1)...(19): siRNA sense strand
guugucggguacauugaua

SEQ ID NO: 2185677 - RNA, 19 nt, Homo sapiens
  misc_RNA (1)...(19): siRNA sense strand
gauggcauuauucuucaua

SEQ ID NO: 2185678 - RNA, 19 nt, Homo sapiens
  misc_RNA (1)...(19): siRNA sense strand
gcauugcaauuguuagcau

SEQ ID NO: 2185679 - RNA, 19 nt, Homo sapiens
  misc_RNA (1)...(19): siRNA sense strand
ggagaguguacccguguaa

SEQ ID NO: 2185680 - RNA, 19 nt, Homo sapiens
  misc_RNA (1)...(19): siRNA sense strand
gaauggaguauggaugauu

SEQ ID NO: 2185681 - RNA, 19 nt, Homo sapiens
  misc_RNA (1)...(19): siRNA sense strand
gccaguugguaccggauuu

SEQ ID NO: 2185682 - RNA, 19 nt, Homo sapiens
  misc_RNA (1)...(19): siRNA sense strand
ucacuucaccacuguauuc

SEQ ID NO: 2185683 - RNA, 19 nt, Homo sapiens
  misc_RNA (1)...(19): siRNA sense strand
caguaugccugaaauuugg

SEQ ID NO: 2185684 - RNA, 19 nt, Homo sapiens
  misc_RNA (1)...(19): siRNA sense strand
agaagaacuuauagaaugg

SEQ ID NO: 2185685 - RNA, 19 nt, Homo sapiens
  misc_RNA (1)...(19): siRNA sense strand
ugucuuagcuaaacaacag

SEQ ID NO: 2185686 - RNA, 19 nt, Homo sapiens
  misc_RNA (1)...(19): siRNA sense strand
cauuauugcuuccaguugu

SEQ ID NO: 2185687 - RNA, 19 nt, Homo sapiens
  misc_RNA (1)...(19): siRNA sense strand
gacaccaccucuccgugaa

SEQ ID NO: 2185688 - RNA, 19 nt, Homo sapiens
  misc_RNA (1)...(19): siRNA sense strand
uuucaagacuauuguggaa

SEQ ID NO: 2185689 - RNA, 19 nt, Homo sapiens
  misc_RNA (1)...(19): siRNA sense strand
uagaagauccugccaaugc

SEQ ID NO: 2185690 - RNA, 19 nt, Homo sapiens
  misc_RNA (1)...(19): siRNA sense strand
gugaagcgagaacugauaa

SEQ ID NO: 2185691 - RNA, 19 nt, Homo sapiens
  misc_RNA (1)...(19): siRNA sense strand
ugaagacgcaggcuugaga

SEQ ID NO: 2185692 - RNA, 19 nt, Homo sapiens
  misc_RNA (1)...(19): siRNA sense strand
cauugcaauuguuagcaua

SEQ ID NO: 2185693 - RNA, 19 nt, Homo sapiens
  misc_RNA (1)...(19): siRNA sense strand
uaaacaacagacacaugua

SEQ ID NO: 2185694 - RNA, 19 nt, Homo sapiens
  misc_RNA (1)...(19): siRNA sense strand
cuaaacaacagacacaugu

SEQ ID NO: 2185695 - RNA, 19 nt, Homo sapiens
  misc_RNA (1)...(19): siRNA sense strand
aagcuucucauauccauuu

SEQ ID NO: 2185696 - RNA, 19 nt, Homo sapiens
  misc_RNA (1)...(19): siRNA sense strand
ugaaugauaaacugacuga

SEQ ID NO: 2185697 - RNA, 19 nt, Homo sapiens
  misc_RNA (1)...(19): siRNA sense strand
gaucugcucaagacagcua

SEQ ID NO: 2185698 - RNA, 19 nt, Homo sapiens
  misc_RNA (1)...(19): siRNA sense strand
gcuuccaguuguucuugua

SEQ ID NO: 2185699 - RNA, 19 nt, Homo sapiens
  misc_RNA (1)...(19): siRNA sense strand
uuugggaacucaauguuau

SEQ ID NO: 2185700 - RNA, 19 nt, Homo sapiens
  misc_RNA (1)...(19): siRNA sense strand
ucggguacauugauauaug

SEQ ID NO: 2185701 - RNA, 19 nt, Homo sapiens
  misc_RNA (1)...(19): siRNA sense strand
uguggaagcacccucauuu

SEQ ID NO: 2185702 - RNA, 19 nt, Homo sapiens
  misc_RNA (1)...(19): siRNA sense strand
gguauucaaaccaagauau

SEQ ID NO: 2185703 - RNA, 19 nt, Homo sapiens
  misc_RNA (1)...(19): siRNA sense strand
gaagcgagaacugauaaag

SEQ ID NO: 2185704 - RNA, 19 nt, Homo sapiens
  misc_RNA (1)...(19): siRNA sense strand
gcaaugucaauacaagguu

SEQ ID NO: 2185705 - RNA, 19 nt, Homo sapiens
  misc_RNA (1)...(19): siRNA sense strand
uaggaggccugguuacagu

SEQ ID NO: 2185706 - RNA, 19 nt, Homo sapiens
  misc_RNA (1)...(19): siRNA sense strand
uagaccagggacuauauua

SEQ ID NO: 2185707 - RNA, 19 nt, Homo sapiens
  misc_RNA (1)...(19): siRNA sense strand
guacuucuuacucagauug

SEQ ID NO: 2185708 - RNA, 19 nt, Homo sapiens
  misc_RNA (1)...(19): siRNA sense strand
ggugaaggauuccaaaccu

SEQ ID NO: 2185709 - RNA, 19 nt, Homo sapiens
  misc_RNA (1)...(19): siRNA sense strand
gucaugguguguaagaaga

SEQ ID NO: 2185710 - RNA, 19 nt, Homo sapiens
  misc_RNA (1)...(19): siRNA sense strand
gcaaacccaguggaauauu

SEQ ID NO: 2185711 - RNA, 19 nt, Homo sapiens
  misc_RNA (1)...(19): siRNA sense strand
aaaagagacuccacugaga

SEQ ID NO: 2185712 - RNA, 19 nt, Homo sapiens
  misc_RNA (1)...(19): siRNA sense strand
uuggaacugucauacuuaa

SEQ ID NO: 2185713 - RNA, 19 nt, Homo sapiens
  misc_RNA (1)...(19): siRNA sense strand
guuugggaacucaauguua

SEQ ID NO: 2185714 - RNA, 19 nt, Homo sapiens
  misc_RNA (1)...(19): siRNA sense strand
gcuaaacaacagacacaug

SEQ ID NO: 2185715 - RNA, 19 nt, Homo sapiens
  misc_RNA (1)...(19): siRNA sense strand
aagagacuccacugagaua

SEQ ID NO: 2185716 - RNA, 19 nt, Homo sapiens
  misc_RNA (1)...(19): siRNA sense strand
gaagagucaugguguguaa

SEQ ID NO: 2185717 - RNA, 19 nt, Homo sapiens
  misc_RNA (1)...(19): siRNA sense strand
gaaagcagccgaagaagug

SEQ ID NO: 2185718 - RNA, 19 nt, Homo sapiens
  misc_RNA (1)...(19): siRNA sense strand
ccacugagauacacaaaga

SEQ ID NO: 2185719 - RNA, 19 nt, Homo sapiens
  misc_RNA (1)...(19): siRNA sense strand
gcaguuugcucaguuugua

SEQ ID NO: 2185720 - RNA, 19 nt, Homo sapiens
  misc_RNA (1)...(19): siRNA sense strand
gaguauggaugauuaugaa

SEQ ID NO: 2185721 - RNA, 19 nt, Homo sapiens
  misc_RNA (1)...(19): siRNA sense strand
ugaaagcugugaaggauug

SEQ ID NO: 2185722 - RNA, 19 nt, Homo sapiens
  misc_RNA (1)...(19): siRNA sense strand
gcaacuuacuaacaucaaa

SEQ ID NO: 2185723 - RNA, 19 nt, Homo sapiens
  misc_RNA (1)...(19): siRNA sense strand
gaguuugacuuuauggaaa

SEQ ID NO: 2185724 - RNA, 19 nt, Homo sapiens
  misc_RNA (1)...(19): siRNA sense strand
auaauggacuugauuggua

SEQ ID NO: 2185725 - RNA, 19 nt, Homo sapiens
  misc_RNA (1)...(19): siRNA sense strand
gcacuucggcccauuguga

SEQ ID NO: 2185726 - RNA, 19 nt, Homo sapiens
  misc_RNA (1)...(19): siRNA sense strand
ccaagaagaacuuauagaa

SEQ ID NO: 2185727 - RNA, 19 nt, Homo sapiens
  misc_RNA (1)...(19): siRNA sense strand
cgugaaagcuucucauauc

SEQ ID NO: 2185728 - RNA, 19 nt, Homo sapiens
  misc_RNA (1)...(19): siRNA sense strand
uuacucagauugcaucauu

SEQ ID NO: 2185729 - RNA, 19 nt, Homo sapiens
  misc_RNA (1)...(19): siRNA sense strand
cagauugcaucauuauuug

SEQ ID NO: 2185730 - RNA, 19 nt, Homo sapiens
  misc_RNA (1)...(19): siRNA sense strand
ggaaaacucccuuauguaa

SEQ ID NO: 2185731 - RNA, 19 nt, Homo sapiens
  misc_RNA (1)...(19): siRNA sense strand
gcaguaugccugaaauuug

SEQ ID NO: 2185732 - RNA, 19 nt, Homo sapiens
  misc_RNA (1)...(19): siRNA sense strand
cagcggaguuugacuuuau

SEQ ID NO: 2185733 - RNA, 19 nt, Homo sapiens
  misc_RNA (1)...(19): siRNA sense strand
gaccagggacuauauuauu

SEQ ID NO: 2185734 - RNA, 19 nt, Homo sapiens
  misc_RNA (1)...(19): siRNA sense strand
gaacuuauagaauggauca

SEQ ID NO: 2185735 - RNA, 19 nt, Homo sapiens
  misc_RNA (1)...(19): siRNA sense strand
caaacccaguggaauauug

SEQ ID NO: 2185736 - RNA, 19 nt, Homo sapiens
  misc_RNA (1)...(19): siRNA sense strand
gggacuauauuauuccuau

SEQ ID NO: 2185737 - RNA, 19 nt, Homo sapiens
  misc_RNA (1)...(19): siRNA sense strand
ggagcuggcugccuguaga

SEQ ID NO: 2185738 - RNA, 19 nt, Homo sapiens
  misc_RNA (1)...(19): siRNA sense strand
aauggaguauggaugauua

SEQ ID NO: 2185739 - RNA, 19 nt, Homo sapiens
  misc_RNA (1)...(19): siRNA sense strand
gaaagcuucucauauccau

SEQ ID NO: 2185740 - RNA, 19 nt, Homo sapiens
  misc_RNA (1)...(19): siRNA sense strand
gggagauccugcuugcuuu

SEQ ID NO: 2185741 - RNA, 19 nt, Homo sapiens
  misc_RNA (1)...(19): siRNA sense strand
gaagugaagcgagaacuga

SEQ ID NO: 2185742 - RNA, 19 nt, Homo sapiens
  misc_RNA (1)...(19): siRNA sense strand
gcagcaaugucaauacaag

SEQ ID NO: 2185743 - RNA, 19 nt, Homo sapiens
  misc_RNA (1)...(19): siRNA sense strand
gcagcggaguuugacuuua

SEQ ID NO: 2185744 - RNA, 19 nt, Homo sapiens
  misc_RNA (1)...(19): siRNA sense strand
cuucagauguugcuaguga

SEQ ID NO: 2185745 - RNA, 19 nt, Homo sapiens
  misc_RNA (1)...(19): siRNA sense strand
ggaacugucauacuuaaau

SEQ ID NO: 2185746 - RNA, 19 nt, Homo sapiens
  misc_RNA (1)...(19): siRNA sense strand
gcauauacagcccuuggua

SEQ ID NO: 2185747 - RNA, 19 nt, Homo sapiens
  misc_RNA (1)...(19): siRNA sense strand
aaacaacagacacauguaa

SEQ ID NO: 2185748 - RNA, 19 nt, Homo sapiens
  misc_RNA (1)...(19): siRNA sense strand
gagauacacaaagacauua

SEQ ID NO: 2185749 - RNA, 19 nt, Homo sapiens
  misc_RNA (1)...(19): siRNA sense strand
ucacugaucugcucaagac

SEQ ID NO: 2185750 - RNA, 19 nt, Homo sapiens
  misc_RNA (1)...(19): siRNA sense strand
ggaguauggaugauuauga

SEQ ID NO: 2185751 - RNA, 19 nt, Homo sapiens
  misc_RNA (1)...(19): siRNA sense strand
uuacaaaguccuagaaguu

SEQ ID NO: 2185752 - RNA, 19 nt, Homo sapiens
  misc_RNA (1)...(19): siRNA sense strand
uauguaaccucuuggugaa

SEQ ID NO: 2185753 - RNA, 19 nt, Homo sapiens
  misc_RNA (1)...(19): siRNA sense strand
caacagacacauguaagaa

SEQ ID NO: 2185754 - RNA, 19 nt, Homo sapiens
  misc_RNA (1)...(19): siRNA sense strand
cauauuggcaacuuacuaa

SEQ ID NO: 2185755 - RNA, 19 nt, Homo sapiens
  misc_RNA (1)...(19): siRNA sense strand
uauauuagcagcaauguca

SEQ ID NO: 2185756 - RNA, 19 nt, Homo sapiens
  misc_RNA (1)...(19): siRNA sense strand
guaccggauuuauaccaaa

SEQ ID NO: 2185757 - RNA, 19 nt, Homo sapiens
  misc_RNA (1)...(19): siRNA sense strand
gaacuccccuccccacuug

SEQ ID NO: 2185758 - RNA, 19 nt, Homo sapiens
  misc_RNA (1)...(19): siRNA sense strand
gaucauggagagcugguuu

SEQ ID NO: 2185759 - RNA, 19 nt, Homo sapiens
  misc_RNA (1)...(19): siRNA sense strand
ggaguuugacuuuauggaa

SEQ ID NO: 2185760 - RNA, 19 nt, Homo sapiens
  misc_RNA (1)...(19): siRNA sense strand
ugauuucucuugcacuuug

SEQ ID NO: 2185761 - RNA, 19 nt, Homo sapiens
  misc_RNA (1)...(19): siRNA sense strand
ucauauccauuucuuguuc

SEQ ID NO: 2185762 - RNA, 19 nt, Homo sapiens
  misc_RNA (1)...(19): siRNA sense strand
aauacaagguucagcaaau

SEQ ID NO: 2185763 - RNA, 19 nt, Homo sapiens
  misc_RNA (1)...(19): siRNA sense strand
ggaaagcagccgaagaagu

SEQ ID NO: 2185764 - RNA, 19 nt, Homo sapiens
  misc_RNA (1)...(19): siRNA sense strand
guuaagcucucugcacuuc

SEQ ID NO: 2185765 - RNA, 19 nt, Homo sapiens
  misc_RNA (1)...(19): siRNA sense strand
uaauggacuugauugguau

SEQ ID NO: 2185766 - RNA, 19 nt, Homo sapiens
  misc_RNA (1)...(19): siRNA sense strand
gcuagugacucauauucuc

SEQ ID NO: 2185767 - RNA, 19 nt, Homo sapiens
  misc_RNA (1)...(19): siRNA sense strand
aagauauguuggacgguua

SEQ ID NO: 2185768 - RNA, 19 nt, Homo sapiens
  misc_RNA (1)...(19): siRNA sense strand
ugagauacacaaagacauu

SEQ ID NO: 2185769 - RNA, 19 nt, Homo sapiens
  misc_RNA (1)...(19): siRNA sense strand
cggaagaucauuuauauac

SEQ ID NO: 2185770 - RNA, 19 nt, Homo sapiens
  misc_RNA (1)...(19): siRNA sense strand
cugcaaacccaguggaaua

SEQ ID NO: 2185771 - RNA, 19 nt, Homo sapiens
  misc_RNA (1)...(19): siRNA sense strand
uagcagcaaugucaauaca

SEQ ID NO: 2185772 - RNA, 19 nt, Homo sapiens
  misc_RNA (1)...(19): siRNA sense strand
caugauuucucuugcacuu

SEQ ID NO: 2185773 - RNA, 19 nt, Homo sapiens
  misc_RNA (1)...(19): siRNA sense strand
gcucaguuuguacuucuua

SEQ ID NO: 2185774 - RNA, 19 nt, Homo sapiens
  misc_RNA (1)...(19): siRNA sense strand
caaaguccuagaaguugua

SEQ ID NO: 2185775 - RNA, 19 nt, Homo sapiens
  misc_RNA (1)...(19): siRNA sense strand
uguagaagauccugccaau

SEQ ID NO: 2185776 - RNA, 19 nt, Homo sapiens
  misc_RNA (1)...(19): siRNA sense strand
guugucggguacauugaua

SEQ ID NO: 2185777 - RNA, 19 nt, Homo sapiens
  misc_RNA (1)...(19): siRNA sense strand
gauggcauuauucuucaua

SEQ ID NO: 2185778 - RNA, 19 nt, Homo sapiens
  misc_RNA (1)...(19): siRNA sense strand
gcauugcaauuguuagcau

SEQ ID NO: 2185779 - RNA, 19 nt, Homo sapiens
  misc_RNA (1)...(19): siRNA sense strand
ggagaguguacccguguaa

SEQ ID NO: 2185780 - RNA, 19 nt, Homo sapiens
  misc_RNA (1)...(19): siRNA sense strand
gaauggaguauggaugauu

SEQ ID NO: 2185781 - RNA, 19 nt, Homo sapiens
  misc_RNA (1)...(19): siRNA sense strand
gccaguugguaccggauuu

SEQ ID NO: 2185782 - RNA, 19 nt, Homo sapiens
  misc_RNA (1)...(19): siRNA sense strand
ucacuucaccacuguauuc

SEQ ID NO: 2185783 - RNA, 19 nt, Homo sapiens
  misc_RNA (1)...(19): siRNA sense strand
caguaugccugaaauuugg

SEQ ID NO: 2185784 - RNA, 19 nt, Homo sapiens
  misc_RNA (1)...(19): siRNA sense strand
agaagaacuuauagaaugg

SEQ ID NO: 2185785 - RNA, 19 nt, Homo sapiens
  misc_RNA (1)...(19): siRNA sense strand
ugucuuagcuaaacaacag

SEQ ID NO: 2185786 - RNA, 19 nt, Homo sapiens
  misc_RNA (1)...(19): siRNA sense strand
cauuauugcuuccaguugu

SEQ ID NO: 2185787 - RNA, 19 nt, Homo sapiens
  misc_RNA (1)...(19): siRNA sense strand
gacaccaccucuccgugaa

SEQ ID NO: 2185788 - RNA, 19 nt, Homo sapiens
  misc_RNA (1)...(19): siRNA sense strand
uuucaagacuauuguggaa

SEQ ID NO: 2185789 - RNA, 19 nt, Homo sapiens
  misc_RNA (1)...(19): siRNA sense strand
uagaagauccugccaaugc

SEQ ID NO: 2185790 - RNA, 19 nt, Homo sapiens
  misc_RNA (1)...(19): siRNA sense strand
gugaagcgagaacugauaa

SEQ ID NO: 2185791 - RNA, 19 nt, Homo sapiens
  misc_RNA (1)...(19): siRNA sense strand
ugaagacgcaggcuugaga

SEQ ID NO: 2185792 - RNA, 19 nt, Homo sapiens
  misc_RNA (1)...(19): siRNA sense strand
cauugcaauuguuagcaua

SEQ ID NO: 2185793 - RNA, 19 nt, Homo sapiens
  misc_RNA (1)...(19): siRNA sense strand
uaaacaacagacacaugua

SEQ ID NO: 2185794 - RNA, 19 nt, Homo sapiens
  misc_RNA (1)...(19): siRNA sense strand
cuaaacaacagacacaugu

SEQ ID NO: 2185795 - RNA, 19 nt, Homo sapiens
  misc_RNA (1)...(19): siRNA sense strand
aagcuucucauauccauuu

SEQ ID NO: 2185796 - RNA, 19 nt, Homo sapiens
  misc_RNA (1)...(19): siRNA sense strand
ugaaugauaaacugacuga

SEQ ID NO: 2185797 - RNA, 19 nt, Homo sapiens
  misc_RNA (1)...(19): siRNA sense strand
gaucugcucaagacagcua

SEQ ID NO: 2185798 - RNA, 19 nt, Homo sapiens
  misc_RNA (1)...(19): siRNA sense strand
gcuuccaguuguucuugua

SEQ ID NO: 2185799 - RNA, 19 nt, Homo sapiens
  misc_RNA (1)...(19): siRNA sense strand
uuugggaacucaauguuau

SEQ ID NO: 2185800 - RNA, 19 nt, Homo sapiens
  misc_RNA (1)...(19): siRNA sense strand
ucggguacauugauauaug

SEQ ID NO: 2185801 - RNA, 19 nt, Homo sapiens
  misc_RNA (1)...(19): siRNA sense strand
uguggaagcacccucauuu

SEQ ID NO: 2185802 - RNA, 19 nt, Homo sapiens
  misc_RNA (1)...(19): siRNA sense strand
gguauucaaaccaagauau

SEQ ID NO: 2185803 - RNA, 19 nt, Homo sapiens
  misc_RNA (1)...(19): siRNA sense strand
gaagcgagaacugauaaag

SEQ ID NO: 2185804 - RNA, 19 nt, Homo sapiens
  misc_RNA (1)...(19): siRNA sense strand
gcaaugucaauacaagguu

SEQ ID NO: 2185805 - RNA, 19 nt, Homo sapiens
  misc_RNA (1)...(19): siRNA sense strand
uaggaggccugguuacagu

SEQ ID NO: 2185806 - RNA, 19 nt, Homo sapiens
  misc_RNA (1)...(19): siRNA sense strand
uagaccagggacuauauua

SEQ ID NO: 2185807 - RNA, 19 nt, Homo sapiens
  misc_RNA (1)...(19): siRNA sense strand
guacuucuuacucagauug

SEQ ID NO: 2185808 - RNA, 19 nt, Homo sapiens
  misc_RNA (1)...(19): siRNA sense strand
ggugaaggauuccaaaccu

SEQ ID NO: 2185809 - RNA, 19 nt, Homo sapiens
  misc_RNA (1)...(19): siRNA sense strand
gucaugguguguaagaaga

SEQ ID NO: 2185810 - RNA, 19 nt, Homo sapiens
  misc_RNA (1)...(19): siRNA sense strand
gcaaacccaguggaauauu

SEQ ID NO: 2185811 - RNA, 19 nt, Homo sapiens
  misc_RNA (1)...(19): siRNA sense strand
aaaagagacuccacugaga

SEQ ID NO: 2185812 - RNA, 19 nt, Homo sapiens
  misc_RNA (1)...(19): siRNA sense strand
uuggaacugucauacuuaa

SEQ ID NO: 2185813 - RNA, 19 nt, Homo sapiens
  misc_RNA (1)...(19): siRNA sense strand
guuugggaacucaauguua

SEQ ID NO: 2185814 - RNA, 19 nt, Homo sapiens
  misc_RNA (1)...(19): siRNA sense strand
gcuaaacaacagacacaug

SEQ ID NO: 2185815 - RNA, 19 nt, Homo sapiens
  misc_RNA (1)...(19): siRNA sense strand
aagagacuccacugagaua

SEQ ID NO: 2185816 - RNA, 19 nt, Homo sapiens
  misc_RNA (1)...(19): siRNA sense strand
gaagauucauugaucauug

SEQ ID NO: 2185817 - RNA, 19 nt, Homo sapiens
  misc_RNA (1)...(19): siRNA sense strand
ccacgcaucugaccgauuu

SEQ ID NO: 2185818 - RNA, 19 nt, Homo sapiens
  misc_RNA (1)...(19): siRNA sense strand
gcaaaucuccuaacacuuc

SEQ ID NO: 2185819 - RNA, 19 nt, Homo sapiens
  misc_RNA (1)...(19): siRNA sense strand
gcauaguacugccaccuaa

SEQ ID NO: 2185820 - RNA, 19 nt, Homo sapiens
  misc_RNA (1)...(19): siRNA sense strand
gcagaagauucauugauca

SEQ ID NO: 2185821 - RNA, 19 nt, Homo sapiens
  misc_RNA (1)...(19): siRNA sense strand
guaaagaccagguauacuu

SEQ ID NO: 2185822 - RNA, 19 nt, Homo sapiens
  misc_RNA (1)...(19): siRNA sense strand
gcaucugaccgauuucuua

SEQ ID NO: 2185823 - RNA, 19 nt, Homo sapiens
  misc_RNA (1)...(19): siRNA sense strand
uaacacuucucguagcaaa

SEQ ID NO: 2185824 - RNA, 19 nt, Homo sapiens
  misc_RNA (1)...(19): siRNA sense strand
gcaggaccauggccgauau

SEQ ID NO: 2185825 - RNA, 19 nt, Homo sapiens
  misc_RNA (1)...(19): siRNA sense strand
cagcaaaucuccuaacacu

SEQ ID NO: 2185826 - RNA, 19 nt, Homo sapiens
  misc_RNA (1)...(19): siRNA sense strand
gagaagaucauggaaguga

SEQ ID NO: 2185827 - RNA, 19 nt, Homo sapiens
  misc_RNA (1)...(19): siRNA sense strand
ucgggaagguuucuuauga

SEQ ID NO: 2185828 - RNA, 19 nt, Homo sapiens
  misc_RNA (1)...(19): siRNA sense strand
ggauggaauucuucaaauc

SEQ ID NO: 2185829 - RNA, 19 nt, Homo sapiens
  misc_RNA (1)...(19): siRNA sense strand
gucaaguccuguaaaguuu

SEQ ID NO: 2185830 - RNA, 19 nt, Homo sapiens
  misc_RNA (1)...(19): siRNA sense strand
ggaacugaaagaucuuaua

SEQ ID NO: 2185831 - RNA, 19 nt, Homo sapiens
  misc_RNA (1)...(19): siRNA sense strand
cuacuacacuguuuaucaa

SEQ ID NO: 2185832 - RNA, 19 nt, Homo sapiens
  misc_RNA (1)...(19): siRNA sense strand
gagcuaaagccaaauaauc

SEQ ID NO: 2185833 - RNA, 19 nt, Homo sapiens
  misc_RNA (1)...(19): siRNA sense strand
gauauuggcagguuuguca

SEQ ID NO: 2185834 - RNA, 19 nt, Homo sapiens
  misc_RNA (1)...(19): siRNA sense strand
ggaagugaaugaacugacu

SEQ ID NO: 2185835 - RNA, 19 nt, Homo sapiens
  misc_RNA (1)...(19): siRNA sense strand
aagaugggauuauugugua

SEQ ID NO: 2185836 - RNA, 19 nt, Homo sapiens
  misc_RNA (1)...(19): siRNA sense strand
uagagaagaucauggaagu

SEQ ID NO: 2185837 - RNA, 19 nt, Homo sapiens
  misc_RNA (1)...(19): siRNA sense strand
caaccaggguguuuuagua

SEQ ID NO: 2185838 - RNA, 19 nt, Homo sapiens
  misc_RNA (1)...(19): siRNA sense strand
uaaagauauuggcagguuu

SEQ ID NO: 2185839 - RNA, 19 nt, Homo sapiens
  misc_RNA (1)...(19): siRNA sense strand
gaagauguggaucgcuuaa

SEQ ID NO: 2185840 - RNA, 19 nt, Homo sapiens
  misc_RNA (1)...(19): siRNA sense strand
gaaccaguaguuacaaugu

SEQ ID NO: 2185841 - RNA, 19 nt, Homo sapiens
  misc_RNA (1)...(19): siRNA sense strand
uuaaagauauuggcagguu

SEQ ID NO: 2185842 - RNA, 19 nt, Homo sapiens
  misc_RNA (1)...(19): siRNA sense strand
cagcagccauggaacaguu

SEQ ID NO: 2185843 - RNA, 19 nt, Homo sapiens
  misc_RNA (1)...(19): siRNA sense strand
ucacuggccugagcaagaa

SEQ ID NO: 2185844 - RNA, 19 nt, Homo sapiens
  misc_RNA (1)...(19): siRNA sense strand
aacaugagcuaaagccaaa

SEQ ID NO: 2185845 - RNA, 19 nt, Homo sapiens
  misc_RNA (1)...(19): siRNA sense strand
uacagggaauggcauagua

SEQ ID NO: 2185846 - RNA, 19 nt, Homo sapiens
  misc_RNA (1)...(19): siRNA sense strand
gccgauauauggaacacuu

SEQ ID NO: 2185847 - RNA, 19 nt, Homo sapiens
  misc_RNA (1)...(19): siRNA sense strand
uaccuacaauccucaguuu

SEQ ID NO: 2185848 - RNA, 19 nt, Homo sapiens
  misc_RNA (1)...(19): siRNA sense strand
caagaugggauuauugugu

SEQ ID NO: 2185849 - RNA, 19 nt, Homo sapiens
  misc_RNA (1)...(19): siRNA sense strand
uuaagcagauuguaguuca

SEQ ID NO: 2185850 - RNA, 19 nt, Homo sapiens
  misc_RNA (1)...(19): siRNA sense strand
aagaagcauuucacauuug

SEQ ID NO: 2185851 - RNA, 19 nt, Homo sapiens
  misc_RNA (1)...(19): siRNA sense strand
acagggaacugaaagaucu

SEQ ID NO: 2185852 - RNA, 19 nt, Homo sapiens
  misc_RNA (1)...(19): siRNA sense strand
uagcaagcauucacagugu

SEQ ID NO: 2185853 - RNA, 19 nt, Homo sapiens
  misc_RNA (1)...(19): siRNA sense strand
ccaccaacuuagagaaaga

SEQ ID NO: 2185854 - RNA, 19 nt, Homo sapiens
  misc_RNA (1)...(19): siRNA sense strand
acacaugauaucucuguua

SEQ ID NO: 2185855 - RNA, 19 nt, Homo sapiens
  misc_RNA (1)...(19): siRNA sense strand
gggaagguuucuuaugaag

SEQ ID NO: 2185856 - RNA, 19 nt, Homo sapiens
  misc_RNA (1)...(19): siRNA sense strand
gaagaucauggaagugaau

SEQ ID NO: 2185857 - RNA, 19 nt, Homo sapiens
  misc_RNA (1)...(19): siRNA sense strand
caugaaauagguacacauu

SEQ ID NO: 2185858 - RNA, 19 nt, Homo sapiens
  misc_RNA (1)...(19): siRNA sense strand
uuaaaaggauuggcaguua

SEQ ID NO: 2185859 - RNA, 19 nt, Homo sapiens
  misc_RNA (1)...(19): siRNA sense strand
gaaggacuagcaagcauuc

SEQ ID NO: 2185860 - RNA, 19 nt, Homo sapiens
  misc_RNA (1)...(19): siRNA sense strand
ggaaggacuagcaagcauu

SEQ ID NO: 2185861 - RNA, 19 nt, Homo sapiens
  misc_RNA (1)...(19): siRNA sense strand
uggaagcgcugcucacagu

SEQ ID NO: 2185862 - RNA, 19 nt, Homo sapiens
  misc_RNA (1)...(19): siRNA sense strand
uaaagaccagguauacuug

SEQ ID NO: 2185863 - RNA, 19 nt, Homo sapiens
  misc_RNA (1)...(19): siRNA sense strand
gcugaggcaugaaauaggu

SEQ ID NO: 2185864 - RNA, 19 nt, Homo sapiens
  misc_RNA (1)...(19): siRNA sense strand
caucugaccgauuucuuaa

SEQ ID NO: 2185865 - RNA, 19 nt, Homo sapiens
  misc_RNA (1)...(19): siRNA sense strand
ugucaaguccuguaaaguu

SEQ ID NO: 2185866 - RNA, 19 nt, Homo sapiens
  misc_RNA (1)...(19): siRNA sense strand
uauaaaacccaccaacuua

SEQ ID NO: 2185867 - RNA, 19 nt, Homo sapiens
  misc_RNA (1)...(19): siRNA sense strand
auacuuggauggaauucuu

SEQ ID NO: 2185868 - RNA, 19 nt, Homo sapiens
  misc_RNA (1)...(19): siRNA sense strand
ucaaaucugacuauaccua

SEQ ID NO: 2185869 - RNA, 19 nt, Homo sapiens
  misc_RNA (1)...(19): siRNA sense strand
ccacugcacgugagcauug

SEQ ID NO: 2185870 - RNA, 19 nt, Homo sapiens
  misc_RNA (1)...(19): siRNA sense strand
cgggaagguuucuuaugaa

SEQ ID NO: 2185871 - RNA, 19 nt, Homo sapiens
  misc_RNA (1)...(19): siRNA sense strand
ccuacaauccucaguuuga

SEQ ID NO: 2185872 - RNA, 19 nt, Homo sapiens
  misc_RNA (1)...(19): siRNA sense strand
gauuguaguucaucucacu

SEQ ID NO: 2185873 - RNA, 19 nt, Homo sapiens
  misc_RNA (1)...(19): siRNA sense strand
agaagcauuucacauuugu

SEQ ID NO: 2185874 - RNA, 19 nt, Homo sapiens
  misc_RNA (1)...(19): siRNA sense strand
ugcagaagauucauugauc

SEQ ID NO: 2185875 - RNA, 19 nt, Homo sapiens
  misc_RNA (1)...(19): siRNA sense strand
caaugacaguaguaaaugg

SEQ ID NO: 2185876 - RNA, 19 nt, Homo sapiens
  misc_RNA (1)...(19): siRNA sense strand
auacagagauaccauagac

SEQ ID NO: 2185877 - RNA, 19 nt, Homo sapiens
  misc_RNA (1)...(19): siRNA sense strand
caugagcuaaagccaaaua

SEQ ID NO: 2185878 - RNA, 19 nt, Homo sapiens
  misc_RNA (1)...(19): siRNA sense strand
ggaaccaguaguuacaaug

SEQ ID NO: 2185879 - RNA, 19 nt, Homo sapiens
  misc_RNA (1)...(19): siRNA sense strand
uggauggaauucuucaaau

SEQ ID NO: 2185880 - RNA, 19 nt, Homo sapiens
  misc_RNA (1)...(19): siRNA sense strand
uaucaagccagccaaaugu

SEQ ID NO: 2185881 - RNA, 19 nt, Homo sapiens
  misc_RNA (1)...(19): siRNA sense strand
guccgacucugacuaucaa

SEQ ID NO: 2185882 - RNA, 19 nt, Homo sapiens
  misc_RNA (1)...(19): siRNA sense strand
gauguccgacucugacuau

SEQ ID NO: 2185883 - RNA, 19 nt, Homo sapiens
  misc_RNA (1)...(19): siRNA sense strand
uacaauguccuacuacaga

SEQ ID NO: 2185884 - RNA, 19 nt, Homo sapiens
  misc_RNA (1)...(19): siRNA sense strand
cacaugauaucucuguuac

SEQ ID NO: 2185885 - RNA, 19 nt, Homo sapiens
  misc_RNA (1)...(19): siRNA sense strand
ggaccauggccgauauaug

SEQ ID NO: 2185886 - RNA, 19 nt, Homo sapiens
  misc_RNA (1)...(19): siRNA sense strand
gaagcgcugcucacaguca

SEQ ID NO: 2185887 - RNA, 19 nt, Homo sapiens
  misc_RNA (1)...(19): siRNA sense strand
ccaauacaagaugggauua

SEQ ID NO: 2185888 - RNA, 19 nt, Homo sapiens
  misc_RNA (1)...(19): siRNA sense strand
ggacuagcaagcauucaca

SEQ ID NO: 2185889 - RNA, 19 nt, Homo sapiens
  misc_RNA (1)...(19): siRNA sense strand
gaagucuauucuaaaugca

SEQ ID NO: 2185890 - RNA, 19 nt, Homo sapiens
  misc_RNA (1)...(19): siRNA sense strand
guuacaauguccuacuaca

SEQ ID NO: 2185891 - RNA, 19 nt, Homo sapiens
  misc_RNA (1)...(19): siRNA sense strand
gaacacuuagagaagauca

SEQ ID NO: 2185892 - RNA, 19 nt, Homo sapiens
  misc_RNA (1)...(19): siRNA sense strand
acagagauaccauagacuu

SEQ ID NO: 2185893 - RNA, 19 nt, Homo sapiens
  misc_RNA (1)...(19): siRNA sense strand
ucaaauccuccgauacaga

SEQ ID NO: 2185894 - RNA, 19 nt, Homo sapiens
  misc_RNA (1)...(19): siRNA sense strand
gcaagcauucacaguguuc

SEQ ID NO: 2185895 - RNA, 19 nt, Homo sapiens
  misc_RNA (1)...(19): siRNA sense strand
ucaaugacaguaguaaaug

SEQ ID NO: 2185896 - RNA, 19 nt, Homo sapiens
  misc_RNA (1)...(19): siRNA sense strand
cuacagagcaaggaggaaa

SEQ ID NO: 2185897 - RNA, 19 nt, Homo sapiens
  misc_RNA (1)...(19): siRNA sense strand
gagauaccauagacuucca

SEQ ID NO: 2185898 - RNA, 19 nt, Homo sapiens
  misc_RNA (1)...(19): siRNA sense strand
caaagccucagcugucuag

SEQ ID NO: 2185899 - RNA, 19 nt, Homo sapiens
  misc_RNA (1)...(19): siRNA sense strand
agaagaucauggaagugaa

SEQ ID NO: 2185900 - RNA, 19 nt, Homo sapiens
  misc_RNA (1)...(19): siRNA sense strand
ugaagauguggaucgcuua

SEQ ID NO: 2185901 - RNA, 19 nt, Homo sapiens
  misc_RNA (1)...(19): siRNA sense strand
cuucaaauccuccgauaca

SEQ ID NO: 2185902 - RNA, 19 nt, Homo sapiens
  misc_RNA (1)...(19): siRNA sense strand
uuaguaaagaccagguaua

SEQ ID NO: 2185903 - RNA, 19 nt, Homo sapiens
  misc_RNA (1)...(19): siRNA sense strand
aaagauauuggcagguuug

SEQ ID NO: 2185904 - RNA, 19 nt, Homo sapiens
  misc_RNA (1)...(19): siRNA sense strand
aaacccagcaaaucuccua

SEQ ID NO: 2185905 - RNA, 19 nt, Homo sapiens
  misc_RNA (1)...(19): siRNA sense strand
ugacugcucucgggaaggu

SEQ ID NO: 2185906 - RNA, 19 nt, Homo sapiens
  misc_RNA (1)...(19): siRNA sense strand
cgacucugacuaucaaugu

SEQ ID NO: 2185907 - RNA, 19 nt, Homo sapiens
  misc_RNA (1)...(19): siRNA sense strand
ucacugaggaccugcuuuc

SEQ ID NO: 2185908 - RNA, 19 nt, Homo sapiens
  misc_RNA (1)...(19): siRNA sense strand
ugccaagcguauuagcuaa

SEQ ID NO: 2185909 - RNA, 19 nt, Homo sapiens
  misc_RNA (1)...(19): siRNA sense strand
gccaaagccucagcugucu

SEQ ID NO: 2185910 - RNA, 19 nt, Homo sapiens
  misc_RNA (1)...(19): siRNA sense strand
ggucaaguggugccauuuc

SEQ ID NO: 2185911 - RNA, 19 nt, Homo sapiens
  misc_RNA (1)...(19): siRNA sense strand
caaaucuccuaacacuucu

SEQ ID NO: 2185912 - RNA, 19 nt, Homo sapiens
  misc_RNA (1)...(19): siRNA sense strand
aagaggggauggacugaua

SEQ ID NO: 2185913 - RNA, 19 nt, Homo sapiens
  misc_RNA (1)...(19): siRNA sense strand
gauauauggaacacuuaga

SEQ ID NO: 2185914 - RNA, 19 nt, Homo sapiens
  misc_RNA (1)...(19): siRNA sense strand
gauacagagauaccauaga

SEQ ID NO: 2185915 - RNA, 19 nt, Homo sapiens
  misc_RNA (1)...(19): siRNA sense strand
gguauacuuggauggaauu

SEQ ID NO: 2185916 - RNA, 19 nt, Homo sapiens
  misc_RNA (1)...(19): siRNA sense strand
gaagauucauugaucauug

SEQ ID NO: 2185917 - RNA, 19 nt, Homo sapiens
  misc_RNA (1)...(19): siRNA sense strand
ccacgcaucugaccgauuu

SEQ ID NO: 2185918 - RNA, 19 nt, Homo sapiens
  misc_RNA (1)...(19): siRNA sense strand
gcaaaucuccuaacacuuc

SEQ ID NO: 2185919 - RNA, 19 nt, Homo sapiens
  misc_RNA (1)...(19): siRNA sense strand
gcauaguacugccaccuaa

SEQ ID NO: 2185920 - RNA, 19 nt, Homo sapiens
  misc_RNA (1)...(19): siRNA sense strand
gcagaagauucauugauca

SEQ ID NO: 2185921 - RNA, 19 nt, Homo sapiens
  misc_RNA (1)...(19): siRNA sense strand
guaaagaccagguauacuu

SEQ ID NO: 2185922 - RNA, 19 nt, Homo sapiens
  misc_RNA (1)...(19): siRNA sense strand
gcaucugaccgauuucuua

SEQ ID NO: 2185923 - RNA, 19 nt, Homo sapiens
  misc_RNA (1)...(19): siRNA sense strand
uaacacuucucguagcaaa

SEQ ID NO: 2185924 - RNA, 19 nt, Homo sapiens
  misc_RNA (1)...(19): siRNA sense strand
gcaggaccauggccgauau

SEQ ID NO: 2185925 - RNA, 19 nt, Homo sapiens
  misc_RNA (1)...(19): siRNA sense strand
cagcaaaucuccuaacacu

SEQ ID NO: 2185926 - RNA, 19 nt, Homo sapiens
  misc_RNA (1)...(19): siRNA sense strand
gagaagaucauggaaguga

SEQ ID NO: 2185927 - RNA, 19 nt, Homo sapiens
  misc_RNA (1)...(19): siRNA sense strand
ucgggaagguuucuuauga

SEQ ID NO: 2185928 - RNA, 19 nt, Homo sapiens
  misc_RNA (1)...(19): siRNA sense strand
ggauggaauucuucaaauc

SEQ ID NO: 2185929 - RNA, 19 nt, Homo sapiens
  misc_RNA (1)...(19): siRNA sense strand
gucaaguccuguaaaguuu

SEQ ID NO: 2185930 - RNA, 19 nt, Homo sapiens
  misc_RNA (1)...(19): siRNA sense strand
ggaacugaaagaucuuaua

SEQ ID NO: 2185931 - RNA, 19 nt, Homo sapiens
  misc_RNA (1)...(19): siRNA sense strand
cuacuacacuguuuaucaa

SEQ ID NO: 2185932 - RNA, 19 nt, Homo sapiens
  misc_RNA (1)...(19): siRNA sense strand
gagcuaaagccaaauaauc

SEQ ID NO: 2185933 - RNA, 19 nt, Homo sapiens
  misc_RNA (1)...(19): siRNA sense strand
gauauuggcagguuuguca

SEQ ID NO: 2185934 - RNA, 19 nt, Homo sapiens
  misc_RNA (1)...(19): siRNA sense strand
ggaagugaaugaacugacu

SEQ ID NO: 2185935 - RNA, 19 nt, Homo sapiens
  misc_RNA (1)...(19): siRNA sense strand
aagaugggauuauugugua

SEQ ID NO: 2185936 - RNA, 19 nt, Homo sapiens
  misc_RNA (1)...(19): siRNA sense strand
uagagaagaucauggaagu

SEQ ID NO: 2185937 - RNA, 19 nt, Homo sapiens
  misc_RNA (1)...(19): siRNA sense strand
caaccaggguguuuuagua

SEQ ID NO: 2185938 - RNA, 19 nt, Homo sapiens
  misc_RNA (1)...(19): siRNA sense strand
uaaagauauuggcagguuu

SEQ ID NO: 2185939 - RNA, 19 nt, Homo sapiens
  misc_RNA (1)...(19): siRNA sense strand
gaagauguggaucgcuuaa

SEQ ID NO: 2185940 - RNA, 19 nt, Homo sapiens
  misc_RNA (1)...(19): siRNA sense strand
gaaccaguaguuacaaugu

SEQ ID NO: 2185941 - RNA, 19 nt, Homo sapiens
  misc_RNA (1)...(19): siRNA sense strand
uuaaagauauuggcagguu

SEQ ID NO: 2185942 - RNA, 19 nt, Homo sapiens
  misc_RNA (1)...(19): siRNA sense strand
cagcagccauggaacaguu

SEQ ID NO: 2185943 - RNA, 19 nt, Homo sapiens
  misc_RNA (1)...(19): siRNA sense strand
ucacuggccugagcaagaa

SEQ ID NO: 2185944 - RNA, 19 nt, Homo sapiens
  misc_RNA (1)...(19): siRNA sense strand
aacaugagcuaaagccaaa

SEQ ID NO: 2185945 - RNA, 19 nt, Homo sapiens
  misc_RNA (1)...(19): siRNA sense strand
uacagggaauggcauagua

SEQ ID NO: 2185946 - RNA, 19 nt, Homo sapiens
  misc_RNA (1)...(19): siRNA sense strand
gccgauauauggaacacuu

SEQ ID NO: 2185947 - RNA, 19 nt, Homo sapiens
  misc_RNA (1)...(19): siRNA sense strand
uaccuacaauccucaguuu

SEQ ID NO: 2185948 - RNA, 19 nt, Homo sapiens
  misc_RNA (1)...(19): siRNA sense strand
caagaugggauuauugugu

SEQ ID NO: 2185949 - RNA, 19 nt, Homo sapiens
  misc_RNA (1)...(19): siRNA sense strand
uuaagcagauuguaguuca

SEQ ID NO: 2185950 - RNA, 19 nt, Homo sapiens
  misc_RNA (1)...(19): siRNA sense strand
aagaagcauuucacauuug

SEQ ID NO: 2185951 - RNA, 19 nt, Homo sapiens
  misc_RNA (1)...(19): siRNA sense strand
acagggaacugaaagaucu

SEQ ID NO: 2185952 - RNA, 19 nt, Homo sapiens
  misc_RNA (1)...(19): siRNA sense strand
uagcaagcauucacagugu

SEQ ID NO: 2185953 - RNA, 19 nt, Homo sapiens
  misc_RNA (1)...(19): siRNA sense strand
ccaccaacuuagagaaaga

SEQ ID NO: 2185954 - RNA, 19 nt, Homo sapiens
  misc_RNA (1)...(19): siRNA sense strand
acacaugauaucucuguua

SEQ ID NO: 2185955 - RNA, 19 nt, Homo sapiens
  misc_RNA (1)...(19): siRNA sense strand
gggaagguuucuuaugaag

SEQ ID NO: 2185956 - RNA, 19 nt, Homo sapiens
  misc_RNA (1)...(19): siRNA sense strand
gaagaucauggaagugaau

SEQ ID NO: 2185957 - RNA, 19 nt, Homo sapiens
  misc_RNA (1)...(19): siRNA sense strand
caugaaauagguacacauu

SEQ ID NO: 2185958 - RNA, 19 nt, Homo sapiens
  misc_RNA (1)...(19): siRNA sense strand
uuaaaaggauuggcaguua

SEQ ID NO: 2185959 - RNA, 19 nt, Homo sapiens
  misc_RNA (1)...(19): siRNA sense strand
gaaggacuagcaagcauuc

SEQ ID NO: 2185960 - RNA, 19 nt, Homo sapiens
  misc_RNA (1)...(19): siRNA sense strand
ggaaggacuagcaagcauu

SEQ ID NO: 2185961 - RNA, 19 nt, Homo sapiens
  misc_RNA (1)...(19): siRNA sense strand
uggaagcgcugcucacagu

SEQ ID NO: 2185962 - RNA, 19 nt, Homo sapiens
  misc_RNA (1)...(19): siRNA sense strand
uaaagaccagguauacuug

SEQ ID NO: 2185963 - RNA, 19 nt, Homo sapiens
  misc_RNA (1)...(19): siRNA sense strand
gcugaggcaugaaauaggu

SEQ ID NO: 2185964 - RNA, 19 nt, Homo sapiens
  misc_RNA (1)...(19): siRNA sense strand
caucugaccgauuucuuaa

SEQ ID NO: 2185965 - RNA, 19 nt, Homo sapiens
  misc_RNA (1)...(19): siRNA sense strand
ugucaaguccuguaaaguu

SEQ ID NO: 2185966 - RNA, 19 nt, Homo sapiens
  misc_RNA (1)...(19): siRNA sense strand
uauaaaacccaccaacuua

SEQ ID NO: 2185967 - RNA, 19 nt, Homo sapiens
  misc_RNA (1)...(19): siRNA sense strand
auacuuggauggaauucuu

SEQ ID NO: 2185968 - RNA, 19 nt, Homo sapiens
  misc_RNA (1)...(19): siRNA sense strand
ucaaaucugacuauaccua

SEQ ID NO: 2185969 - RNA, 19 nt, Homo sapiens
  misc_RNA (1)...(19): siRNA sense strand
ccacugcacgugagcauug

SEQ ID NO: 2185970 - RNA, 19 nt, Homo sapiens
  misc_RNA (1)...(19): siRNA sense strand
cgggaagguuucuuaugaa

SEQ ID NO: 2185971 - RNA, 19 nt, Homo sapiens
  misc_RNA (1)...(19): siRNA sense strand
ccuacaauccucaguuuga

SEQ ID NO: 2185972 - RNA, 19 nt, Homo sapiens
  misc_RNA (1)...(19): siRNA sense strand
gauuguaguucaucucacu

SEQ ID NO: 2185973 - RNA, 19 nt, Homo sapiens
  misc_RNA (1)...(19): siRNA sense strand
agaagcauuucacauuugu

SEQ ID NO: 2185974 - RNA, 19 nt, Homo sapiens
  misc_RNA (1)...(19): siRNA sense strand
ugcagaagauucauugauc

SEQ ID NO: 2185975 - RNA, 19 nt, Homo sapiens
  misc_RNA (1)...(19): siRNA sense strand
caaugacaguaguaaaugg

SEQ ID NO: 2185976 - RNA, 19 nt, Homo sapiens
  misc_RNA (1)...(19): siRNA sense strand
auacagagauaccauagac

SEQ ID NO: 2185977 - RNA, 19 nt, Homo sapiens
  misc_RNA (1)...(19): siRNA sense strand
caugagcuaaagccaaaua

SEQ ID NO: 2185978 - RNA, 19 nt, Homo sapiens
  misc_RNA (1)...(19): siRNA sense strand
ggaaccaguaguuacaaug

SEQ ID NO: 2185979 - RNA, 19 nt, Homo sapiens
  misc_RNA (1)...(19): siRNA sense strand
uggauggaauucuucaaau

SEQ ID NO: 2185980 - RNA, 19 nt, Homo sapiens
  misc_RNA (1)...(19): siRNA sense strand
uaucaagccagccaaaugu

SEQ ID NO: 2185981 - RNA, 19 nt, Homo sapiens
  misc_RNA (1)...(19): siRNA sense strand
guccgacucugacuaucaa

SEQ ID NO: 2185982 - RNA, 19 nt, Homo sapiens
  misc_RNA (1)...(19): siRNA sense strand
gauguccgacucugacuau

SEQ ID NO: 2185983 - RNA, 19 nt, Homo sapiens
  misc_RNA (1)...(19): siRNA sense strand
uacaauguccuacuacaga

SEQ ID NO: 2185984 - RNA, 19 nt, Homo sapiens
  misc_RNA (1)...(19): siRNA sense strand
cacaugauaucucuguuac

SEQ ID NO: 2185985 - RNA, 19 nt, Homo sapiens
  misc_RNA (1)...(19): siRNA sense strand
ggaccauggccgauauaug

SEQ ID NO: 2185986 - RNA, 19 nt, Homo sapiens
  misc_RNA (1)...(19): siRNA sense strand
gaagcgcugcucacaguca

SEQ ID NO: 2185987 - RNA, 19 nt, Homo sapiens
  misc_RNA (1)...(19): siRNA sense strand
ccaauacaagaugggauua

SEQ ID NO: 2185988 - RNA, 19 nt, Homo sapiens
  misc_RNA (1)...(19): siRNA sense strand
ggacuagcaagcauucaca

SEQ ID NO: 2185989 - RNA, 19 nt, Homo sapiens
  misc_RNA (1)...(19): siRNA sense strand
gaagucuauucuaaaugca

SEQ ID NO: 2185990 - RNA, 19 nt, Homo sapiens
  misc_RNA (1)...(19): siRNA sense strand
guuacaauguccuacuaca

SEQ ID NO: 2185991 - RNA, 19 nt, Homo sapiens
  misc_RNA (1)...(19): siRNA sense strand
gaacacuuagagaagauca

SEQ ID NO: 2185992 - RNA, 19 nt, Homo sapiens
  misc_RNA (1)...(19): siRNA sense strand
acagagauaccauagacuu

SEQ ID NO: 2185993 - RNA, 19 nt, Homo sapiens
  misc_RNA (1)...(19): siRNA sense strand
ucaaauccuccgauacaga

SEQ ID NO: 2185994 - RNA, 19 nt, Homo sapiens
  misc_RNA (1)...(19): siRNA sense strand
gcaagcauucacaguguuc

SEQ ID NO: 2185995 - RNA, 19 nt, Homo sapiens
  misc_RNA (1)...(19): siRNA sense strand
ucaaugacaguaguaaaug

SEQ ID NO: 2185996 - RNA, 19 nt, Homo sapiens
  misc_RNA (1)...(19): siRNA sense strand
cuacagagcaaggaggaaa

SEQ ID NO: 2185997 - RNA, 19 nt, Homo sapiens
  misc_RNA (1)...(19): siRNA sense strand
gagauaccauagacuucca

SEQ ID NO: 2185998 - RNA, 19 nt, Homo sapiens
  misc_RNA (1)...(19): siRNA sense strand
caaagccucagcugucuag

SEQ ID NO: 2185999 - RNA, 19 nt, Homo sapiens
  misc_RNA (1)...(19): siRNA sense strand
agaagaucauggaagugaa

SEQ ID NO: 2186000 - RNA, 19 nt, Homo sapiens
  misc_RNA (1)...(19): siRNA sense strand
ugaagauguggaucgcuua

SEQ ID NO: 2186001 - RNA, 19 nt, Homo sapiens
  misc_RNA (1)...(19): siRNA sense strand
cuucaaauccuccgauaca

SEQ ID NO: 2186002 - RNA, 19 nt, Homo sapiens
  misc_RNA (1)...(19): siRNA sense strand
uuaguaaagaccagguaua

SEQ ID NO: 2186003 - RNA, 19 nt, Homo sapiens
  misc_RNA (1)...(19): siRNA sense strand
aaagauauuggcagguuug

SEQ ID NO: 2186004 - RNA, 19 nt, Homo sapiens
  misc_RNA (1)...(19): siRNA sense strand
aaacccagcaaaucuccua

SEQ ID NO: 2186005 - RNA, 19 nt, Homo sapiens
  misc_RNA (1)...(19): siRNA sense strand
ugacugcucucgggaaggu

SEQ ID NO: 2186006 - RNA, 19 nt, Homo sapiens
  misc_RNA (1)...(19): siRNA sense strand
cgacucugacuaucaaugu

SEQ ID NO: 2186007 - RNA, 19 nt, Homo sapiens
  misc_RNA (1)...(19): siRNA sense strand
ucacugaggaccugcuuuc

SEQ ID NO: 2186008 - RNA, 19 nt, Homo sapiens
  misc_RNA (1)...(19): siRNA sense strand
ugccaagcguauuagcuaa

SEQ ID NO: 2186009 - RNA, 19 nt, Homo sapiens
  misc_RNA (1)...(19): siRNA sense strand
gccaaagccucagcugucu

SEQ ID NO: 2186010 - RNA, 19 nt, Homo sapiens
  misc_RNA (1)...(19): siRNA sense strand
ggucaaguggugccauuuc

SEQ ID NO: 2186011 - RNA, 19 nt, Homo sapiens
  misc_RNA (1)...(19): siRNA sense strand
caaaucuccuaacacuucu

SEQ ID NO: 2186012 - RNA, 19 nt, Homo sapiens
  misc_RNA (1)...(19): siRNA sense strand
aagaggggauggacugaua

SEQ ID NO: 2186013 - RNA, 19 nt, Homo sapiens
  misc_RNA (1)...(19): siRNA sense strand
gauauauggaacacuuaga

SEQ ID NO: 2186014 - RNA, 19 nt, Homo sapiens
  misc_RNA (1)...(19): siRNA sense strand
gauacagagauaccauaga

SEQ ID NO: 2186015 - RNA, 19 nt, Homo sapiens
  misc_RNA (1)...(19): siRNA sense strand
gguauacuuggauggaauu

SEQ ID NO: 2186016 - RNA, 19 nt, Homo sapiens
  misc_RNA (1)...(19): siRNA sense strand
ccacgggacugcauuauaa

SEQ ID NO: 2186017 - RNA, 19 nt, Homo sapiens
  misc_RNA (1)...(19): siRNA sense strand
gaccaacccugaugagcua

SEQ ID NO: 2186018 - RNA, 19 nt, Homo sapiens
  misc_RNA (1)...(19): siRNA sense strand
gcuuugaccuggagucgua

SEQ ID NO: 2186019 - RNA, 19 nt, Homo sapiens
  misc_RNA (1)...(19): siRNA sense strand
gccaggagcugagccagua

SEQ ID NO: 2186020 - RNA, 19 nt, Homo sapiens
  misc_RNA (1)...(19): siRNA sense strand
uacaagacccugauaauga

SEQ ID NO: 2186021 - RNA, 19 nt, Homo sapiens
  misc_RNA (1)...(19): siRNA sense strand
gaacugaccaacccugaug

SEQ ID NO: 2186022 - RNA, 19 nt, Homo sapiens
  misc_RNA (1)...(19): siRNA sense strand
caugaacccuacuggcaua

SEQ ID NO: 2186023 - RNA, 19 nt, Homo sapiens
  misc_RNA (1)...(19): siRNA sense strand
gcaagacccuccacugacu

SEQ ID NO: 2186024 - RNA, 19 nt, Homo sapiens
  misc_RNA (1)...(19): siRNA sense strand
ggaaugacacccuuguaug

SEQ ID NO: 2186025 - RNA, 19 nt, Homo sapiens
  misc_RNA (1)...(19): siRNA sense strand
cagcgucccuuacauguca

SEQ ID NO: 2186026 - RNA, 19 nt, Homo sapiens
  misc_RNA (1)...(19): siRNA sense strand
gaacuuucccugaguccuu

SEQ ID NO: 2186027 - RNA, 19 nt, Homo sapiens
  misc_RNA (1)...(19): siRNA sense strand
cugaugagcuacuguccua

SEQ ID NO: 2186028 - RNA, 19 nt, Homo sapiens
  misc_RNA (1)...(19): siRNA sense strand
gcacugcaucaccaagaua

SEQ ID NO: 2186029 - RNA, 19 nt, Homo sapiens
  misc_RNA (1)...(19): siRNA sense strand
cgaccugcuuucucuguuu

SEQ ID NO: 2186030 - RNA, 19 nt, Homo sapiens
  misc_RNA (1)...(19): siRNA sense strand
ucaugacugucgccacaua

SEQ ID NO: 2186031 - RNA, 19 nt, Homo sapiens
  misc_RNA (1)...(19): siRNA sense strand
ggaagccagugcccgugaa

SEQ ID NO: 2186032 - RNA, 19 nt, Homo sapiens
  misc_RNA (1)...(19): siRNA sense strand
gaaugacacccuuguaugc

SEQ ID NO: 2186033 - RNA, 19 nt, Homo sapiens
  misc_RNA (1)...(19): siRNA sense strand
caacaaugacgaccugcuu

SEQ ID NO: 2186034 - RNA, 19 nt, Homo sapiens
  misc_RNA (1)...(19): siRNA sense strand
ggagguguccugugugcaa

SEQ ID NO: 2186035 - RNA, 19 nt, Homo sapiens
  misc_RNA (1)...(19): siRNA sense strand
gaccugcuuucucuguuug

SEQ ID NO: 2186036 - RNA, 19 nt, Homo sapiens
  misc_RNA (1)...(19): siRNA sense strand
cuacaagacccugauaaug

SEQ ID NO: 2186037 - RNA, 19 nt, Homo sapiens
  misc_RNA (1)...(19): siRNA sense strand
ccagcagccuccugacuuc

SEQ ID NO: 2186038 - RNA, 19 nt, Homo sapiens
  misc_RNA (1)...(19): siRNA sense strand
acaagacccugauaaugag

SEQ ID NO: 2186039 - RNA, 19 nt, Homo sapiens
  misc_RNA (1)...(19): siRNA sense strand
acacggugaugguucauuc

SEQ ID NO: 2186040 - RNA, 19 nt, Homo sapiens
  misc_RNA (1)...(19): siRNA sense strand
gagcguggcgacaacaaga

SEQ ID NO: 2186041 - RNA, 19 nt, Homo sapiens
  misc_RNA (1)...(19): siRNA sense strand
cacccgaccucccuacgaa

SEQ ID NO: 2186042 - RNA, 19 nt, Homo sapiens
  misc_RNA (1)...(19): siRNA sense strand
acaagccacucuaccugaa

SEQ ID NO: 2186043 - RNA, 19 nt, Homo sapiens
  misc_RNA (1)...(19): siRNA sense strand
caacaagaccucgcacaag

SEQ ID NO: 2186044 - RNA, 19 nt, Homo sapiens
  misc_RNA (1)...(19): siRNA sense strand
gagcacugcaucaccaaga

SEQ ID NO: 2186045 - RNA, 19 nt, Homo sapiens
  misc_RNA (1)...(19): siRNA sense strand
gcaaggaggccaguaugca

SEQ ID NO: 2186046 - RNA, 19 nt, Homo sapiens
  misc_RNA (1)...(19): siRNA sense strand
ugauuuacauucagaacuc

SEQ ID NO: 2186047 - RNA, 19 nt, Homo sapiens
  misc_RNA (1)...(19): siRNA sense strand
caagauaaagcggaacuuc

SEQ ID NO: 2186048 - RNA, 19 nt, Homo sapiens
  misc_RNA (1)...(19): siRNA sense strand
gcagcagcgucccuuacau

SEQ ID NO: 2186049 - RNA, 19 nt, Homo sapiens
  misc_RNA (1)...(19): siRNA sense strand
ucccuuacaugucaccaaa

SEQ ID NO: 2186050 - RNA, 19 nt, Homo sapiens
  misc_RNA (1)...(19): siRNA sense strand
gcauccugauuuacauuca

SEQ ID NO: 2186051 - RNA, 19 nt, Homo sapiens
  misc_RNA (1)...(19): siRNA sense strand
gcucaugcccagcgugaug

SEQ ID NO: 2186052 - RNA, 19 nt, Homo sapiens
  misc_RNA (1)...(19): siRNA sense strand
ggagguggaccaguacaug

SEQ ID NO: 2186053 - RNA, 19 nt, Homo sapiens
  misc_RNA (1)...(19): siRNA sense strand
gcaggaaugacacccuugu

SEQ ID NO: 2186054 - RNA, 19 nt, Homo sapiens
  misc_RNA (1)...(19): siRNA sense strand
caagcagcagcgucccuua

SEQ ID NO: 2186055 - RNA, 19 nt, Homo sapiens
  misc_RNA (1)...(19): siRNA sense strand
gaggucaagucucccuucu

SEQ ID NO: 2186056 - RNA, 19 nt, Homo sapiens
  misc_RNA (1)...(19): siRNA sense strand
cuaucaaggugucccugaa

SEQ ID NO: 2186057 - RNA, 19 nt, Homo sapiens
  misc_RNA (1)...(19): siRNA sense strand
agucguaccugcagcucaa

SEQ ID NO: 2186058 - RNA, 19 nt, Homo sapiens
  misc_RNA (1)...(19): siRNA sense strand
cugcaagacccuccacuga

SEQ ID NO: 2186059 - RNA, 19 nt, Homo sapiens
  misc_RNA (1)...(19): siRNA sense strand
uuacaugucaccaaaccaa

SEQ ID NO: 2186060 - RNA, 19 nt, Homo sapiens
  misc_RNA (1)...(19): siRNA sense strand
gaugguucauucgcauaug

SEQ ID NO: 2186061 - RNA, 19 nt, Homo sapiens
  misc_RNA (1)...(19): siRNA sense strand
cagcagcgucccuuacaug

SEQ ID NO: 2186062 - RNA, 19 nt, Homo sapiens
  misc_RNA (1)...(19): siRNA sense strand
ggguggagcagacagcuau

SEQ ID NO: 2186063 - RNA, 19 nt, Homo sapiens
  misc_RNA (1)...(19): siRNA sense strand
gaccugcucccggaacuga

SEQ ID NO: 2186064 - RNA, 19 nt, Homo sapiens
  misc_RNA (1)...(19): siRNA sense strand
gccacacggugaugguuca

SEQ ID NO: 2186065 - RNA, 19 nt, Homo sapiens
  misc_RNA (1)...(19): siRNA sense strand
gaccuggagcugcaauuca

SEQ ID NO: 2186066 - RNA, 19 nt, Homo sapiens
  misc_RNA (1)...(19): siRNA sense strand
gcaacaccauccagaucac

SEQ ID NO: 2186067 - RNA, 19 nt, Homo sapiens
  misc_RNA (1)...(19): siRNA sense strand
acaacaagaccucgcacaa

SEQ ID NO: 2186068 - RNA, 19 nt, Homo sapiens
  misc_RNA (1)...(19): siRNA sense strand
cacgaggaccggcagauga

SEQ ID NO: 2186069 - RNA, 19 nt, Homo sapiens
  misc_RNA (1)...(19): siRNA sense strand
cacucuaccugaagcaugu

SEQ ID NO: 2186070 - RNA, 19 nt, Homo sapiens
  misc_RNA (1)...(19): siRNA sense strand
ugcugggcauccugauuua

SEQ ID NO: 2186071 - RNA, 19 nt, Homo sapiens
  misc_RNA (1)...(19): siRNA sense strand
ugucuguggucacuacugu

SEQ ID NO: 2186072 - RNA, 19 nt, Homo sapiens
  misc_RNA (1)...(19): siRNA sense strand
gcuguaagcaaccaugucu

SEQ ID NO: 2186073 - RNA, 19 nt, Homo sapiens
  misc_RNA (1)...(19): siRNA sense strand
caggaaugacacccuugua

SEQ ID NO: 2186074 - RNA, 19 nt, Homo sapiens
  misc_RNA (1)...(19): siRNA sense strand
gggcauccugauuuacauu

SEQ ID NO: 2186075 - RNA, 19 nt, Homo sapiens
  misc_RNA (1)...(19): siRNA sense strand
aaaccaagaggucaagucu

SEQ ID NO: 2186076 - RNA, 19 nt, Homo sapiens
  misc_RNA (1)...(19): siRNA sense strand
ucaacuccuugcacucauc

SEQ ID NO: 2186077 - RNA, 19 nt, Homo sapiens
  misc_RNA (1)...(19): siRNA sense strand
ggaacugaccaacccugau

SEQ ID NO: 2186078 - RNA, 19 nt, Homo sapiens
  misc_RNA (1)...(19): siRNA sense strand
ccacauacagugcuuugac

SEQ ID NO: 2186079 - RNA, 19 nt, Homo sapiens
  misc_RNA (1)...(19): siRNA sense strand
ggagcagacagcuaucaag

SEQ ID NO: 2186080 - RNA, 19 nt, Homo sapiens
  misc_RNA (1)...(19): siRNA sense strand
gcugcagggccuccucaaa

SEQ ID NO: 2186081 - RNA, 19 nt, Homo sapiens
  misc_RNA (1)...(19): siRNA sense strand
uguaagcaaccaugucuuc

SEQ ID NO: 2186082 - RNA, 19 nt, Homo sapiens
  misc_RNA (1)...(19): siRNA sense strand
aggaaugacacccuuguau

SEQ ID NO: 2186083 - RNA, 19 nt, Homo sapiens
  misc_RNA (1)...(19): siRNA sense strand
uguccugugugcaacaaga

SEQ ID NO: 2186084 - RNA, 19 nt, Homo sapiens
  misc_RNA (1)...(19): siRNA sense strand
accugcagcucaacuguga

SEQ ID NO: 2186085 - RNA, 19 nt, Homo sapiens
  misc_RNA (1)...(19): siRNA sense strand
aagauaaagcggaacuuca

SEQ ID NO: 2186086 - RNA, 19 nt, Homo sapiens
  misc_RNA (1)...(19): siRNA sense strand
ucuacaagacccugauaau

SEQ ID NO: 2186087 - RNA, 19 nt, Homo sapiens
  misc_RNA (1)...(19): siRNA sense strand
cccacgggacugcauuaua

SEQ ID NO: 2186088 - RNA, 19 nt, Homo sapiens
  misc_RNA (1)...(19): siRNA sense strand
ccagcgugauggagaugau

SEQ ID NO: 2186089 - RNA, 19 nt, Homo sapiens
  misc_RNA (1)...(19): siRNA sense strand
ugcccgaggucaugacugu

SEQ ID NO: 2186090 - RNA, 19 nt, Homo sapiens
  misc_RNA (1)...(19): siRNA sense strand
ccucaacuccuugcacuca

SEQ ID NO: 2186091 - RNA, 19 nt, Homo sapiens
  misc_RNA (1)...(19): siRNA sense strand
augaggagaucaccaucga

SEQ ID NO: 2186092 - RNA, 19 nt, Homo sapiens
  misc_RNA (1)...(19): siRNA sense strand
acuuggagguguccugugu

SEQ ID NO: 2186093 - RNA, 19 nt, Homo sapiens
  misc_RNA (1)...(19): siRNA sense strand
caucgagcguggcgacaac

SEQ ID NO: 2186094 - RNA, 19 nt, Homo sapiens
  misc_RNA (1)...(19): siRNA sense strand
accuggagcugcaauucaa

SEQ ID NO: 2186095 - RNA, 19 nt, Homo sapiens
  misc_RNA (1)...(19): siRNA sense strand
gcacaaccuggcuguaagc

SEQ ID NO: 2186096 - RNA, 19 nt, Homo sapiens
  misc_RNA (1)...(19): siRNA sense strand
ccacgggacugcauuauaa

SEQ ID NO: 2186097 - RNA, 19 nt, Homo sapiens
  misc_RNA (1)...(19): siRNA sense strand
gaccaacccugaugagcua

SEQ ID NO: 2186098 - RNA, 19 nt, Homo sapiens
  misc_RNA (1)...(19): siRNA sense strand
gcuuugaccuggagucgua

SEQ ID NO: 2186099 - RNA, 19 nt, Homo sapiens
  misc_RNA (1)...(19): siRNA sense strand
gccaggagcugagccagua

SEQ ID NO: 2186100 - RNA, 19 nt, Homo sapiens
  misc_RNA (1)...(19): siRNA sense strand
uacaagacccugauaauga

SEQ ID NO: 2186101 - RNA, 19 nt, Homo sapiens
  misc_RNA (1)...(19): siRNA sense strand
gaacugaccaacccugaug

SEQ ID NO: 2186102 - RNA, 19 nt, Homo sapiens
  misc_RNA (1)...(19): siRNA sense strand
caugaacccuacuggcaua

SEQ ID NO: 2186103 - RNA, 19 nt, Homo sapiens
  misc_RNA (1)...(19): siRNA sense strand
gcaagacccuccacugacu

SEQ ID NO: 2186104 - RNA, 19 nt, Homo sapiens
  misc_RNA (1)...(19): siRNA sense strand
ggaaugacacccuuguaug

SEQ ID NO: 2186105 - RNA, 19 nt, Homo sapiens
  misc_RNA (1)...(19): siRNA sense strand
cagcgucccuuacauguca

SEQ ID NO: 2186106 - RNA, 19 nt, Homo sapiens
  misc_RNA (1)...(19): siRNA sense strand
gaacuuucccugaguccuu

SEQ ID NO: 2186107 - RNA, 19 nt, Homo sapiens
  misc_RNA (1)...(19): siRNA sense strand
cugaugagcuacuguccua

SEQ ID NO: 2186108 - RNA, 19 nt, Homo sapiens
  misc_RNA (1)...(19): siRNA sense strand
gcacugcaucaccaagaua

SEQ ID NO: 2186109 - RNA, 19 nt, Homo sapiens
  misc_RNA (1)...(19): siRNA sense strand
cgaccugcuuucucuguuu

SEQ ID NO: 2186110 - RNA, 19 nt, Homo sapiens
  misc_RNA (1)...(19): siRNA sense strand
ucaugacugucgccacaua

SEQ ID NO: 2186111 - RNA, 19 nt, Homo sapiens
  misc_RNA (1)...(19): siRNA sense strand
ggaagccagugcccgugaa

SEQ ID NO: 2186112 - RNA, 19 nt, Homo sapiens
  misc_RNA (1)...(19): siRNA sense strand
gaaugacacccuuguaugc

SEQ ID NO: 2186113 - RNA, 19 nt, Homo sapiens
  misc_RNA (1)...(19): siRNA sense strand
caacaaugacgaccugcuu

SEQ ID NO: 2186114 - RNA, 19 nt, Homo sapiens
  misc_RNA (1)...(19): siRNA sense strand
ggagguguccugugugcaa

SEQ ID NO: 2186115 - RNA, 19 nt, Homo sapiens
  misc_RNA (1)...(19): siRNA sense strand
gaccugcuuucucuguuug

SEQ ID NO: 2186116 - RNA, 19 nt, Homo sapiens
  misc_RNA (1)...(19): siRNA sense strand
cuacaagacccugauaaug

SEQ ID NO: 2186117 - RNA, 19 nt, Homo sapiens
  misc_RNA (1)...(19): siRNA sense strand
ccagcagccuccugacuuc

SEQ ID NO: 2186118 - RNA, 19 nt, Homo sapiens
  misc_RNA (1)...(19): siRNA sense strand
acaagacccugauaaugag

SEQ ID NO: 2186119 - RNA, 19 nt, Homo sapiens
  misc_RNA (1)...(19): siRNA sense strand
acacggugaugguucauuc

SEQ ID NO: 2186120 - RNA, 19 nt, Homo sapiens
  misc_RNA (1)...(19): siRNA sense strand
gagcguggcgacaacaaga

SEQ ID NO: 2186121 - RNA, 19 nt, Homo sapiens
  misc_RNA (1)...(19): siRNA sense strand
cacccgaccucccuacgaa

SEQ ID NO: 2186122 - RNA, 19 nt, Homo sapiens
  misc_RNA (1)...(19): siRNA sense strand
acaagccacucuaccugaa

SEQ ID NO: 2186123 - RNA, 19 nt, Homo sapiens
  misc_RNA (1)...(19): siRNA sense strand
caacaagaccucgcacaag

SEQ ID NO: 2186124 - RNA, 19 nt, Homo sapiens
  misc_RNA (1)...(19): siRNA sense strand
gagcacugcaucaccaaga

SEQ ID NO: 2186125 - RNA, 19 nt, Homo sapiens
  misc_RNA (1)...(19): siRNA sense strand
gcaaggaggccaguaugca

SEQ ID NO: 2186126 - RNA, 19 nt, Homo sapiens
  misc_RNA (1)...(19): siRNA sense strand
ugauuuacauucagaacuc

SEQ ID NO: 2186127 - RNA, 19 nt, Homo sapiens
  misc_RNA (1)...(19): siRNA sense strand
caagauaaagcggaacuuc

SEQ ID NO: 2186128 - RNA, 19 nt, Homo sapiens
  misc_RNA (1)...(19): siRNA sense strand
gcagcagcgucccuuacau

SEQ ID NO: 2186129 - RNA, 19 nt, Homo sapiens
  misc_RNA (1)...(19): siRNA sense strand
ucccuuacaugucaccaaa

SEQ ID NO: 2186130 - RNA, 19 nt, Homo sapiens
  misc_RNA (1)...(19): siRNA sense strand
gcauccugauuuacauuca

SEQ ID NO: 2186131 - RNA, 19 nt, Homo sapiens
  misc_RNA (1)...(19): siRNA sense strand
gcucaugcccagcgugaug

SEQ ID NO: 2186132 - RNA, 19 nt, Homo sapiens
  misc_RNA (1)...(19): siRNA sense strand
ggagguggaccaguacaug

SEQ ID NO: 2186133 - RNA, 19 nt, Homo sapiens
  misc_RNA (1)...(19): siRNA sense strand
gcaggaaugacacccuugu

SEQ ID NO: 2186134 - RNA, 19 nt, Homo sapiens
  misc_RNA (1)...(19): siRNA sense strand
caagcagcagcgucccuua

SEQ ID NO: 2186135 - RNA, 19 nt, Homo sapiens
  misc_RNA (1)...(19): siRNA sense strand
gaggucaagucucccuucu

SEQ ID NO: 2186136 - RNA, 19 nt, Homo sapiens
  misc_RNA (1)...(19): siRNA sense strand
cuaucaaggugucccugaa

SEQ ID NO: 2186137 - RNA, 19 nt, Homo sapiens
  misc_RNA (1)...(19): siRNA sense strand
agucguaccugcagcucaa

SEQ ID NO: 2186138 - RNA, 19 nt, Homo sapiens
  misc_RNA (1)...(19): siRNA sense strand
cugcaagacccuccacuga

SEQ ID NO: 2186139 - RNA, 19 nt, Homo sapiens
  misc_RNA (1)...(19): siRNA sense strand
uuacaugucaccaaaccaa

SEQ ID NO: 2186140 - RNA, 19 nt, Homo sapiens
  misc_RNA (1)...(19): siRNA sense strand
gaugguucauucgcauaug

SEQ ID NO: 2186141 - RNA, 19 nt, Homo sapiens
  misc_RNA (1)...(19): siRNA sense strand
cagcagcgucccuuacaug

SEQ ID NO: 2186142 - RNA, 19 nt, Homo sapiens
  misc_RNA (1)...(19): siRNA sense strand
ggguggagcagacagcuau

SEQ ID NO: 2186143 - RNA, 19 nt, Homo sapiens
  misc_RNA (1)...(19): siRNA sense strand
gaccugcucccggaacuga

SEQ ID NO: 2186144 - RNA, 19 nt, Homo sapiens
  misc_RNA (1)...(19): siRNA sense strand
gccacacggugaugguuca

SEQ ID NO: 2186145 - RNA, 19 nt, Homo sapiens
  misc_RNA (1)...(19): siRNA sense strand
gaccuggagcugcaauuca

SEQ ID NO: 2186146 - RNA, 19 nt, Homo sapiens
  misc_RNA (1)...(19): siRNA sense strand
gcaacaccauccagaucac

SEQ ID NO: 2186147 - RNA, 19 nt, Homo sapiens
  misc_RNA (1)...(19): siRNA sense strand
acaacaagaccucgcacaa

SEQ ID NO: 2186148 - RNA, 19 nt, Homo sapiens
  misc_RNA (1)...(19): siRNA sense strand
cacgaggaccggcagauga

SEQ ID NO: 2186149 - RNA, 19 nt, Homo sapiens
  misc_RNA (1)...(19): siRNA sense strand
cacucuaccugaagcaugu

SEQ ID NO: 2186150 - RNA, 19 nt, Homo sapiens
  misc_RNA (1)...(19): siRNA sense strand
ugcugggcauccugauuua

SEQ ID NO: 2186151 - RNA, 19 nt, Homo sapiens
  misc_RNA (1)...(19): siRNA sense strand
ugucuguggucacuacugu

SEQ ID NO: 2186152 - RNA, 19 nt, Homo sapiens
  misc_RNA (1)...(19): siRNA sense strand
gcuguaagcaaccaugucu

SEQ ID NO: 2186153 - RNA, 19 nt, Homo sapiens
  misc_RNA (1)...(19): siRNA sense strand
caggaaugacacccuugua

SEQ ID NO: 2186154 - RNA, 19 nt, Homo sapiens
  misc_RNA (1)...(19): siRNA sense strand
gggcauccugauuuacauu

SEQ ID NO: 2186155 - RNA, 19 nt, Homo sapiens
  misc_RNA (1)...(19): siRNA sense strand
aaaccaagaggucaagucu

SEQ ID NO: 2186156 - RNA, 19 nt, Homo sapiens
  misc_RNA (1)...(19): siRNA sense strand
ucaacuccuugcacucauc

SEQ ID NO: 2186157 - RNA, 19 nt, Homo sapiens
  misc_RNA (1)...(19): siRNA sense strand
ggaacugaccaacccugau

SEQ ID NO: 2186158 - RNA, 19 nt, Homo sapiens
  misc_RNA (1)...(19): siRNA sense strand
ccacauacagugcuuugac

SEQ ID NO: 2186159 - RNA, 19 nt, Homo sapiens
  misc_RNA (1)...(19): siRNA sense strand
ggagcagacagcuaucaag

SEQ ID NO: 2186160 - RNA, 19 nt, Homo sapiens
  misc_RNA (1)...(19): siRNA sense strand
gcugcagggccuccucaaa

SEQ ID NO: 2186161 - RNA, 19 nt, Homo sapiens
  misc_RNA (1)...(19): siRNA sense strand
uguaagcaaccaugucuuc

SEQ ID NO: 2186162 - RNA, 19 nt, Homo sapiens
  misc_RNA (1)...(19): siRNA sense strand
aggaaugacacccuuguau

SEQ ID NO: 2186163 - RNA, 19 nt, Homo sapiens
  misc_RNA (1)...(19): siRNA sense strand
uguccugugugcaacaaga

SEQ ID NO: 2186164 - RNA, 19 nt, Homo sapiens
  misc_RNA (1)...(19): siRNA sense strand
accugcagcucaacuguga

SEQ ID NO: 2186165 - RNA, 19 nt, Homo sapiens
  misc_RNA (1)...(19): siRNA sense strand
aagauaaagcggaacuuca

SEQ ID NO: 2186166 - RNA, 19 nt, Homo sapiens
  misc_RNA (1)...(19): siRNA sense strand
ucuacaagacccugauaau

SEQ ID NO: 2186167 - RNA, 19 nt, Homo sapiens
  misc_RNA (1)...(19): siRNA sense strand
cccacgggacugcauuaua

SEQ ID NO: 2186168 - RNA, 19 nt, Homo sapiens
  misc_RNA (1)...(19): siRNA sense strand
ccagcgugauggagaugau

SEQ ID NO: 2186169 - RNA, 19 nt, Homo sapiens
  misc_RNA (1)...(19): siRNA sense strand
ugcccgaggucaugacugu

SEQ ID NO: 2186170 - RNA, 19 nt, Homo sapiens
  misc_RNA (1)...(19): siRNA sense strand
ccucaacuccuugcacuca

SEQ ID NO: 2186171 - RNA, 19 nt, Homo sapiens
  misc_RNA (1)...(19): siRNA sense strand
augaggagaucaccaucga

SEQ ID NO: 2186172 - RNA, 19 nt, Homo sapiens
  misc_RNA (1)...(19): siRNA sense strand
acuuggagguguccugugu

SEQ ID NO: 2186173 - RNA, 19 nt, Homo sapiens
  misc_RNA (1)...(19): siRNA sense strand
caucgagcguggcgacaac

SEQ ID NO: 2186174 - RNA, 19 nt, Homo sapiens
  misc_RNA (1)...(19): siRNA sense strand
accuggagcugcaauucaa

SEQ ID NO: 2186175 - RNA, 19 nt, Homo sapiens
  misc_RNA (1)...(19): siRNA sense strand
gcacaaccuggcuguaagc

SEQ ID NO: 2186176 - RNA, 19 nt, Homo sapiens
  misc_RNA (1)...(19): siRNA sense strand
gcaaagagaggcugaggaa

SEQ ID NO: 2186177 - RNA, 19 nt, Homo sapiens
  misc_RNA (1)...(19): siRNA sense strand
gggcaucaguguuaucuca

SEQ ID NO: 2186178 - RNA, 19 nt, Homo sapiens
  misc_RNA (1)...(19): siRNA sense strand
caaaguaucugagcaaagc

SEQ ID NO: 2186179 - RNA, 19 nt, Homo sapiens
  misc_RNA (1)...(19): siRNA sense strand
acaguucaccuaccaauuu

SEQ ID NO: 2186180 - RNA, 19 nt, Homo sapiens
  misc_RNA (1)...(19): siRNA sense strand
acucggagauacuggauaa

SEQ ID NO: 2186181 - RNA, 19 nt, Homo sapiens
  misc_RNA (1)...(19): siRNA sense strand
gcaaugguuauaaggauga

SEQ ID NO: 2186182 - RNA, 19 nt, Homo sapiens
  misc_RNA (1)...(19): siRNA sense strand
gaucccaggucucagcaau

SEQ ID NO: 2186183 - RNA, 19 nt, Homo sapiens
  misc_RNA (1)...(19): siRNA sense strand
gaacacaagcaaggaacuu

SEQ ID NO: 2186184 - RNA, 19 nt, Homo sapiens
  misc_RNA (1)...(19): siRNA sense strand
ucccaggucucagcaauuu

SEQ ID NO: 2186185 - RNA, 19 nt, Homo sapiens
  misc_RNA (1)...(19): siRNA sense strand
uagcaaugguuauaaggau

SEQ ID NO: 2186186 - RNA, 19 nt, Homo sapiens
  misc_RNA (1)...(19): siRNA sense strand
caagguggcaggcccgauu

SEQ ID NO: 2186187 - RNA, 19 nt, Homo sapiens
  misc_RNA (1)...(19): siRNA sense strand
caccagcagagcucaaaua

SEQ ID NO: 2186188 - RNA, 19 nt, Homo sapiens
  misc_RNA (1)...(19): siRNA sense strand
guuauaaggaugagugguu

SEQ ID NO: 2186189 - RNA, 19 nt, Homo sapiens
  misc_RNA (1)...(19): siRNA sense strand
ucaagccaaugguagcuau

SEQ ID NO: 2186190 - RNA, 19 nt, Homo sapiens
  misc_RNA (1)...(19): siRNA sense strand
aagagaggcugaggaacuu

SEQ ID NO: 2186191 - RNA, 19 nt, Homo sapiens
  misc_RNA (1)...(19): siRNA sense strand
cuccagggcaucaguguua

SEQ ID NO: 2186192 - RNA, 19 nt, Homo sapiens
  misc_RNA (1)...(19): siRNA sense strand
ucaaagcccagaagaaucu

SEQ ID NO: 2186193 - RNA, 19 nt, Homo sapiens
  misc_RNA (1)...(19): siRNA sense strand
gcaucaguguuaucucagu

SEQ ID NO: 2186194 - RNA, 19 nt, Homo sapiens
  misc_RNA (1)...(19): siRNA sense strand
gaaucuguaucugcaucaa

SEQ ID NO: 2186195 - RNA, 19 nt, Homo sapiens
  misc_RNA (1)...(19): siRNA sense strand
gaggaacacaagcaaggaa

SEQ ID NO: 2186196 - RNA, 19 nt, Homo sapiens
  misc_RNA (1)...(19): siRNA sense strand
ucucaaagcccagaagaau

SEQ ID NO: 2186197 - RNA, 19 nt, Homo sapiens
  misc_RNA (1)...(19): siRNA sense strand
uuuccaaacucauuagcaa

SEQ ID NO: 2186198 - RNA, 19 nt, Homo sapiens
  misc_RNA (1)...(19): siRNA sense strand
ccagugaagcgcucugaga

SEQ ID NO: 2186199 - RNA, 19 nt, Homo sapiens
  misc_RNA (1)...(19): siRNA sense strand
uggcaggcccgauuuguug

SEQ ID NO: 2186200 - RNA, 19 nt, Homo sapiens
  misc_RNA (1)...(19): siRNA sense strand
aaagagaggcugaggaacu

SEQ ID NO: 2186201 - RNA, 19 nt, Homo sapiens
  misc_RNA (1)...(19): siRNA sense strand
gagaggcugaggaacuuga

SEQ ID NO: 2186202 - RNA, 19 nt, Homo sapiens
  misc_RNA (1)...(19): siRNA sense strand
gaagaccuccagggcauca

SEQ ID NO: 2186203 - RNA, 19 nt, Homo sapiens
  misc_RNA (1)...(19): siRNA sense strand
cgacagccagccagcaaga

SEQ ID NO: 2186204 - RNA, 19 nt, Homo sapiens
  misc_RNA (1)...(19): siRNA sense strand
cagugaagcgcucugagaa

SEQ ID NO: 2186205 - RNA, 19 nt, Homo sapiens
  misc_RNA (1)...(19): siRNA sense strand
ggagauacuggauaaaaga

SEQ ID NO: 2186206 - RNA, 19 nt, Homo sapiens
  misc_RNA (1)...(19): siRNA sense strand
aaacaguucaccuaccaau

SEQ ID NO: 2186207 - RNA, 19 nt, Homo sapiens
  misc_RNA (1)...(19): siRNA sense strand
gcaauuugggagacucaca

SEQ ID NO: 2186208 - RNA, 19 nt, Homo sapiens
  misc_RNA (1)...(19): siRNA sense strand
uagcuaugcauccagaaga

SEQ ID NO: 2186209 - RNA, 19 nt, Homo sapiens
  misc_RNA (1)...(19): siRNA sense strand
ggcccgauuuguugaagca

SEQ ID NO: 2186210 - RNA, 19 nt, Homo sapiens
  misc_RNA (1)...(19): siRNA sense strand
gcaggcccgauuuguugaa

SEQ ID NO: 2186211 - RNA, 19 nt, Homo sapiens
  misc_RNA (1)...(19): siRNA sense strand
cugaggaacuugaaaagga

SEQ ID NO: 2186212 - RNA, 19 nt, Homo sapiens
  misc_RNA (1)...(19): siRNA sense strand
ccgauuuguugaagcacuu

SEQ ID NO: 2186213 - RNA, 19 nt, Homo sapiens
  misc_RNA (1)...(19): siRNA sense strand
ggacucggagauacuggau

SEQ ID NO: 2186214 - RNA, 19 nt, Homo sapiens
  misc_RNA (1)...(19): siRNA sense strand
accagcagagcucaaauaa

SEQ ID NO: 2186215 - RNA, 19 nt, Homo sapiens
  misc_RNA (1)...(19): siRNA sense strand
gaagaaucuguaucugcau

SEQ ID NO: 2186216 - RNA, 19 nt, Homo sapiens
  misc_RNA (1)...(19): siRNA sense strand
gcucuccaguggccuacuc

SEQ ID NO: 2186217 - RNA, 19 nt, Homo sapiens
  misc_RNA (1)...(19): siRNA sense strand
gcaaagagaggcugaggaa

SEQ ID NO: 2186218 - RNA, 19 nt, Homo sapiens
  misc_RNA (1)...(19): siRNA sense strand
gggcaucaguguuaucuca

SEQ ID NO: 2186219 - RNA, 19 nt, Homo sapiens
  misc_RNA (1)...(19): siRNA sense strand
caaaguaucugagcaaagc

SEQ ID NO: 2186220 - RNA, 19 nt, Homo sapiens
  misc_RNA (1)...(19): siRNA sense strand
acaguucaccuaccaauuu

SEQ ID NO: 2186221 - RNA, 19 nt, Homo sapiens
  misc_RNA (1)...(19): siRNA sense strand
acucggagauacuggauaa

SEQ ID NO: 2186222 - RNA, 19 nt, Homo sapiens
  misc_RNA (1)...(19): siRNA sense strand
gcaaugguuauaaggauga

SEQ ID NO: 2186223 - RNA, 19 nt, Homo sapiens
  misc_RNA (1)...(19): siRNA sense strand
gaucccaggucucagcaau

SEQ ID NO: 2186224 - RNA, 19 nt, Homo sapiens
  misc_RNA (1)...(19): siRNA sense strand
gaacacaagcaaggaacuu

SEQ ID NO: 2186225 - RNA, 19 nt, Homo sapiens
  misc_RNA (1)...(19): siRNA sense strand
ucccaggucucagcaauuu

SEQ ID NO: 2186226 - RNA, 19 nt, Homo sapiens
  misc_RNA (1)...(19): siRNA sense strand
uagcaaugguuauaaggau

SEQ ID NO: 2186227 - RNA, 19 nt, Homo sapiens
  misc_RNA (1)...(19): siRNA sense strand
caagguggcaggcccgauu

SEQ ID NO: 2186228 - RNA, 19 nt, Homo sapiens
  misc_RNA (1)...(19): siRNA sense strand
caccagcagagcucaaaua

SEQ ID NO: 2186229 - RNA, 19 nt, Homo sapiens
  misc_RNA (1)...(19): siRNA sense strand
guuauaaggaugagugguu

SEQ ID NO: 2186230 - RNA, 19 nt, Homo sapiens
  misc_RNA (1)...(19): siRNA sense strand
ucaagccaaugguagcuau

SEQ ID NO: 2186231 - RNA, 19 nt, Homo sapiens
  misc_RNA (1)...(19): siRNA sense strand
aagagaggcugaggaacuu

SEQ ID NO: 2186232 - RNA, 19 nt, Homo sapiens
  misc_RNA (1)...(19): siRNA sense strand
cuccagggcaucaguguua

SEQ ID NO: 2186233 - RNA, 19 nt, Homo sapiens
  misc_RNA (1)...(19): siRNA sense strand
ucaaagcccagaagaaucu

SEQ ID NO: 2186234 - RNA, 19 nt, Homo sapiens
  misc_RNA (1)...(19): siRNA sense strand
gcaucaguguuaucucagu

SEQ ID NO: 2186235 - RNA, 19 nt, Homo sapiens
  misc_RNA (1)...(19): siRNA sense strand
gaaucuguaucugcaucaa

SEQ ID NO: 2186236 - RNA, 19 nt, Homo sapiens
  misc_RNA (1)...(19): siRNA sense strand
gaggaacacaagcaaggaa

SEQ ID NO: 2186237 - RNA, 19 nt, Homo sapiens
  misc_RNA (1)...(19): siRNA sense strand
ucucaaagcccagaagaau

SEQ ID NO: 2186238 - RNA, 19 nt, Homo sapiens
  misc_RNA (1)...(19): siRNA sense strand
uuuccaaacucauuagcaa

SEQ ID NO: 2186239 - RNA, 19 nt, Homo sapiens
  misc_RNA (1)...(19): siRNA sense strand
ccagugaagcgcucugaga

SEQ ID NO: 2186240 - RNA, 19 nt, Homo sapiens
  misc_RNA (1)...(19): siRNA sense strand
uggcaggcccgauuuguug

SEQ ID NO: 2186241 - RNA, 19 nt, Homo sapiens
  misc_RNA (1)...(19): siRNA sense strand
aaagagaggcugaggaacu

SEQ ID NO: 2186242 - RNA, 19 nt, Homo sapiens
  misc_RNA (1)...(19): siRNA sense strand
gagaggcugaggaacuuga

SEQ ID NO: 2186243 - RNA, 19 nt, Homo sapiens
  misc_RNA (1)...(19): siRNA sense strand
gaagaccuccagggcauca

SEQ ID NO: 2186244 - RNA, 19 nt, Homo sapiens
  misc_RNA (1)...(19): siRNA sense strand
cgacagccagccagcaaga

SEQ ID NO: 2186245 - RNA, 19 nt, Homo sapiens
  misc_RNA (1)...(19): siRNA sense strand
cagugaagcgcucugagaa

SEQ ID NO: 2186246 - RNA, 19 nt, Homo sapiens
  misc_RNA (1)...(19): siRNA sense strand
ggagauacuggauaaaaga

SEQ ID NO: 2186247 - RNA, 19 nt, Homo sapiens
  misc_RNA (1)...(19): siRNA sense strand
aaacaguucaccuaccaau

SEQ ID NO: 2186248 - RNA, 19 nt, Homo sapiens
  misc_RNA (1)...(19): siRNA sense strand
gcaauuugggagacucaca

SEQ ID NO: 2186249 - RNA, 19 nt, Homo sapiens
  misc_RNA (1)...(19): siRNA sense strand
uagcuaugcauccagaaga

SEQ ID NO: 2186250 - RNA, 19 nt, Homo sapiens
  misc_RNA (1)...(19): siRNA sense strand
ggcccgauuuguugaagca

SEQ ID NO: 2186251 - RNA, 19 nt, Homo sapiens
  misc_RNA (1)...(19): siRNA sense strand
gcaggcccgauuuguugaa

SEQ ID NO: 2186252 - RNA, 19 nt, Homo sapiens
  misc_RNA (1)...(19): siRNA sense strand
cugaggaacuugaaaagga

SEQ ID NO: 2186253 - RNA, 19 nt, Homo sapiens
  misc_RNA (1)...(19): siRNA sense strand
ccgauuuguugaagcacuu

SEQ ID NO: 2186254 - RNA, 19 nt, Homo sapiens
  misc_RNA (1)...(19): siRNA sense strand
ggacucggagauacuggau

SEQ ID NO: 2186255 - RNA, 19 nt, Homo sapiens
  misc_RNA (1)...(19): siRNA sense strand
accagcagagcucaaauaa

SEQ ID NO: 2186256 - RNA, 19 nt, Homo sapiens
  misc_RNA (1)...(19): siRNA sense strand
gaagaaucuguaucugcau

SEQ ID NO: 2186257 - RNA, 19 nt, Homo sapiens
  misc_RNA (1)...(19): siRNA sense strand
gcucuccaguggccuacuc

SEQ ID NO: 2186258 - RNA, 19 nt, Homo sapiens
  misc_RNA (1)...(19): siRNA sense strand
agacauagcuauagaauuc

SEQ ID NO: 2186259 - RNA, 19 nt, Homo sapiens
  misc_RNA (1)...(19): siRNA sense strand
cuacaaaugugaagaaugu

SEQ ID NO: 2186260 - RNA, 19 nt, Homo sapiens
  misc_RNA (1)...(19): siRNA sense strand
cuacaaaugugaagaaugu

SEQ ID NO: 2186261 - RNA, 19 nt, Homo sapiens
  misc_RNA (1)...(19): siRNA sense strand
cuacaaaugugaagaaugu

SEQ ID NO: 2186262 - RNA, 19 nt, Homo sapiens
  misc_RNA (1)...(19): siRNA sense strand
caucaaagauucacuccaa

SEQ ID NO: 2186263 - RNA, 19 nt, Homo sapiens
  misc_RNA (1)...(19): siRNA sense strand
caagggagguuauagugaa

SEQ ID NO: 2186264 - RNA, 19 nt, Homo sapiens
  misc_RNA (1)...(19): siRNA sense strand
gagagaaacccuacaaaug

SEQ ID NO: 2186265 - RNA, 19 nt, Homo sapiens
  misc_RNA (1)...(19): siRNA sense strand
gagagaaacccuacaaaug

SEQ ID NO: 2186266 - RNA, 19 nt, Homo sapiens
  misc_RNA (1)...(19): siRNA sense strand
caacaucagguaauucaua

SEQ ID NO: 2186267 - RNA, 19 nt, Homo sapiens
  misc_RNA (1)...(19): siRNA sense strand
agacauaggagaauucaua

SEQ ID NO: 2186268 - RNA, 19 nt, Homo sapiens
  misc_RNA (1)...(19): siRNA sense strand
aauaaagagucccagaaua

SEQ ID NO: 2186269 - RNA, 19 nt, Homo sapiens
  misc_RNA (1)...(19): siRNA sense strand
ggagagagacccuacaaau

SEQ ID NO: 2186270 - RNA, 19 nt, Homo sapiens
  misc_RNA (1)...(19): siRNA sense strand
ggagagagacccuacaaau

SEQ ID NO: 2186271 - RNA, 19 nt, Homo sapiens
  misc_RNA (1)...(19): siRNA sense strand
ggagagagacccuacaaau

SEQ ID NO: 2186272 - RNA, 19 nt, Homo sapiens
  misc_RNA (1)...(19): siRNA sense strand
gagcagggcaucaaagauu

SEQ ID NO: 2186273 - RNA, 19 nt, Homo sapiens
  misc_RNA (1)...(19): siRNA sense strand
aaagagaaaugagauggua

SEQ ID NO: 2186274 - RNA, 19 nt, Homo sapiens
  misc_RNA (1)...(19): siRNA sense strand
gaauguggcaaauccuuua

SEQ ID NO: 2186275 - RNA, 19 nt, Homo sapiens
  misc_RNA (1)...(19): siRNA sense strand
gagaaacccuacaaaugug

SEQ ID NO: 2186276 - RNA, 19 nt, Homo sapiens
  misc_RNA (1)...(19): siRNA sense strand
gagaaacccuacaaaugug

SEQ ID NO: 2186277 - RNA, 19 nt, Homo sapiens
  misc_RNA (1)...(19): siRNA sense strand
cuacaaaugugaagagugu

SEQ ID NO: 2186278 - RNA, 19 nt, Homo sapiens
  misc_RNA (1)...(19): siRNA sense strand
gagaugugauguuagagaa

SEQ ID NO: 2186279 - RNA, 19 nt, Homo sapiens
  misc_RNA (1)...(19): siRNA sense strand
ggagagaaaccauauagau

SEQ ID NO: 2186280 - RNA, 19 nt, Homo sapiens
  misc_RNA (1)...(19): siRNA sense strand
gagagaaacccuacacaug

SEQ ID NO: 2186281 - RNA, 19 nt, Homo sapiens
  misc_RNA (1)...(19): siRNA sense strand
gagaaacccuacacaugug

SEQ ID NO: 2186282 - RNA, 19 nt, Homo sapiens
  misc_RNA (1)...(19): siRNA sense strand
ggagagaaacccuacaaau

SEQ ID NO: 2186283 - RNA, 19 nt, Homo sapiens
  misc_RNA (1)...(19): siRNA sense strand
ggagagaaacccuacaaau

SEQ ID NO: 2186284 - RNA, 19 nt, Homo sapiens
  misc_RNA (1)...(19): siRNA sense strand
uaaagagucccagaauaua

SEQ ID NO: 2186285 - RNA, 19 nt, Homo sapiens
  misc_RNA (1)...(19): siRNA sense strand
gagagaaaccauauagaug

SEQ ID NO: 2186286 - RNA, 19 nt, Homo sapiens
  misc_RNA (1)...(19): siRNA sense strand
gagagagacccuacaaaug

SEQ ID NO: 2186287 - RNA, 19 nt, Homo sapiens
  misc_RNA (1)...(19): siRNA sense strand
gagagagacccuacaaaug

SEQ ID NO: 2186288 - RNA, 19 nt, Homo sapiens
  misc_RNA (1)...(19): siRNA sense strand
gagagagacccuacaaaug

SEQ ID NO: 2186289 - RNA, 19 nt, Homo sapiens
  misc_RNA (1)...(19): siRNA sense strand
caaagaauguggcaaaucc

SEQ ID NO: 2186290 - RNA, 19 nt, Homo sapiens
  misc_RNA (1)...(19): siRNA sense strand
gaauguggccaagacuuua

SEQ ID NO: 2186291 - RNA, 19 nt, Homo sapiens
  misc_RNA (1)...(19): siRNA sense strand
gagaaaccauauagaugug

SEQ ID NO: 2186292 - RNA, 19 nt, Homo sapiens
  misc_RNA (1)...(19): siRNA sense strand
caaaccauacuacacauaa

SEQ ID NO: 2186293 - RNA, 19 nt, Homo sapiens
  misc_RNA (1)...(19): siRNA sense strand
gaauguggccaagccuuua

SEQ ID NO: 2186294 - RNA, 19 nt, Homo sapiens
  misc_RNA (1)...(19): siRNA sense strand
ucagagacauagcuauaga

SEQ ID NO: 2186295 - RNA, 19 nt, Homo sapiens
  misc_RNA (1)...(19): siRNA sense strand
gagagacccuacaaaugug

SEQ ID NO: 2186296 - RNA, 19 nt, Homo sapiens
  misc_RNA (1)...(19): siRNA sense strand
gagagacccuacaaaugug

SEQ ID NO: 2186297 - RNA, 19 nt, Homo sapiens
  misc_RNA (1)...(19): siRNA sense strand
gaaaugggacuguugacau

SEQ ID NO: 2186298 - RNA, 19 nt, Homo sapiens
  misc_RNA (1)...(19): siRNA sense strand
gaauguggccaagccuuua

SEQ ID NO: 2186299 - RNA, 19 nt, Homo sapiens
  misc_RNA (1)...(19): siRNA sense strand
gagagacccuacaaaugug

SEQ ID NO: 2186300 - RNA, 19 nt, Homo sapiens
  misc_RNA (1)...(19): siRNA sense strand
gaccacaagagaauucaua

SEQ ID NO: 2186301 - RNA, 19 nt, Homo sapiens
  misc_RNA (1)...(19): siRNA sense strand
agagaaacccuacaaaugu

SEQ ID NO: 2186302 - RNA, 19 nt, Homo sapiens
  misc_RNA (1)...(19): siRNA sense strand
gugcucagcggaauuuaua

SEQ ID NO: 2186303 - RNA, 19 nt, Homo sapiens
  misc_RNA (1)...(19): siRNA sense strand
agagaaacccuacaaaugu

SEQ ID NO: 2186304 - RNA, 19 nt, Homo sapiens
  misc_RNA (1)...(19): siRNA sense strand
gcucagcggaauuuauaua

SEQ ID NO: 2186305 - RNA, 19 nt, Homo sapiens
  misc_RNA (1)...(19): siRNA sense strand
gaccacaagagaauucaua

SEQ ID NO: 2186306 - RNA, 19 nt, Homo sapiens
  misc_RNA (1)...(19): siRNA sense strand
gaccacaagagaauucaua

SEQ ID NO: 2186307 - RNA, 19 nt, Homo sapiens
  misc_RNA (1)...(19): siRNA sense strand
ggagaaguccuacaaaugc

SEQ ID NO: 2186308 - RNA, 19 nt, Homo sapiens
  misc_RNA (1)...(19): siRNA sense strand
gaaacccuaugccugugaa

SEQ ID NO: 2186309 - RNA, 19 nt, Homo sapiens
  misc_RNA (1)...(19): siRNA sense strand
gagguuauagugaaguuaa

SEQ ID NO: 2186310 - RNA, 19 nt, Homo sapiens
  misc_RNA (1)...(19): siRNA sense strand
gagagacccuacacaugug

SEQ ID NO: 2186311 - RNA, 19 nt, Homo sapiens
  misc_RNA (1)...(19): siRNA sense strand
auagagaugugauguuaga

SEQ ID NO: 2186312 - RNA, 19 nt, Homo sapiens
  misc_RNA (1)...(19): siRNA sense strand
ggagagagacccuacacau

SEQ ID NO: 2186313 - RNA, 19 nt, Homo sapiens
  misc_RNA (1)...(19): siRNA sense strand
agagagacccuacaaaugu

SEQ ID NO: 2186314 - RNA, 19 nt, Homo sapiens
  misc_RNA (1)...(19): siRNA sense strand
agagagacccuacaaaugu

SEQ ID NO: 2186315 - RNA, 19 nt, Homo sapiens
  misc_RNA (1)...(19): siRNA sense strand
ccucgaaccuuaugagaca

SEQ ID NO: 2186316 - RNA, 19 nt, Homo sapiens
  misc_RNA (1)...(19): siRNA sense strand
agagagacccuacaaaugu

SEQ ID NO: 2186317 - RNA, 19 nt, Homo sapiens
  misc_RNA (1)...(19): siRNA sense strand
aaagagucccagaauauaa

SEQ ID NO: 2186318 - RNA, 19 nt, Homo sapiens
  misc_RNA (1)...(19): siRNA sense strand
gagagagacccuacacaug

SEQ ID NO: 2186319 - RNA, 19 nt, Homo sapiens
  misc_RNA (1)...(19): siRNA sense strand
gggagaaguccuacaaaug

SEQ ID NO: 2186320 - RNA, 19 nt, Homo sapiens
  misc_RNA (1)...(19): siRNA sense strand
auaaagagucccagaauau

SEQ ID NO: 2186321 - RNA, 19 nt, Homo sapiens
  misc_RNA (1)...(19): siRNA sense strand
ccucaacccuuaugcaaca

SEQ ID NO: 2186322 - RNA, 19 nt, Homo sapiens
  misc_RNA (1)...(19): siRNA sense strand
cuacacgugugaagaaugu

SEQ ID NO: 2186323 - RNA, 19 nt, Homo sapiens
  misc_RNA (1)...(19): siRNA sense strand
gcacaagggagguuauagu

SEQ ID NO: 2186324 - RNA, 19 nt, Homo sapiens
  misc_RNA (1)...(19): siRNA sense strand
gcacuuacuauccacaaga

SEQ ID NO: 2186325 - RNA, 19 nt, Homo sapiens
  misc_RNA (1)...(19): siRNA sense strand
ccauauagaugugaggaau

SEQ ID NO: 2186326 - RNA, 19 nt, Homo sapiens
  misc_RNA (1)...(19): siRNA sense strand
cauaagagaauucauacug

SEQ ID NO: 2186327 - RNA, 19 nt, Homo sapiens
  misc_RNA (1)...(19): siRNA sense strand
ggacaugagaaauuacaau

SEQ ID NO: 2186328 - RNA, 19 nt, Homo sapiens
  misc_RNA (1)...(19): siRNA sense strand
gccuuuagcuggucugcaa

SEQ ID NO: 2186329 - RNA, 19 nt, Homo sapiens
  misc_RNA (1)...(19): siRNA sense strand
cuacaaaugcaaagaaugu

SEQ ID NO: 2186330 - RNA, 19 nt, Homo sapiens
  misc_RNA (1)...(19): siRNA sense strand
gagaaguccuacaaaugca

SEQ ID NO: 2186331 - RNA, 19 nt, Homo sapiens
  misc_RNA (1)...(19): siRNA sense strand
caucagguaauucauacua

SEQ ID NO: 2186332 - RNA, 19 nt, Homo sapiens
  misc_RNA (1)...(19): siRNA sense strand
gccuuuagcuuauccucaa

SEQ ID NO: 2186333 - RNA, 19 nt, Homo sapiens
  misc_RNA (1)...(19): siRNA sense strand
agagaaacccuacacaugu

SEQ ID NO: 2186334 - RNA, 19 nt, Homo sapiens
  misc_RNA (1)...(19): siRNA sense strand
ggagagaaacccuacacau

SEQ ID NO: 2186335 - RNA, 19 nt, Homo sapiens
  misc_RNA (1)...(19): siRNA sense strand
cccagaauauaaagagaaa

SEQ ID NO: 2186336 - RNA, 19 nt, Homo sapiens
  misc_RNA (1)...(19): siRNA sense strand
agaauucucucuggaggaa

SEQ ID NO: 2186337 - RNA, 19 nt, Homo sapiens
  misc_RNA (1)...(19): siRNA sense strand
cagcggaauuuauauagag

SEQ ID NO: 2186338 - RNA, 19 nt, Homo sapiens
  misc_RNA (1)...(19): siRNA sense strand
agagaaaccauauagaugu

SEQ ID NO: 2186339 - RNA, 19 nt, Homo sapiens
  misc_RNA (1)...(19): siRNA sense strand
gauguuagagaacuacaga

SEQ ID NO: 2186340 - RNA, 19 nt, Homo sapiens
  misc_RNA (1)...(19): siRNA sense strand
agagagacccuacacaugu

SEQ ID NO: 2186341 - RNA, 19 nt, Homo sapiens
  misc_RNA (1)...(19): siRNA sense strand
ugaagaguguggcaaaguc

SEQ ID NO: 2186342 - RNA, 19 nt, Homo sapiens
  misc_RNA (1)...(19): siRNA sense strand
ugaagaauguggccaagac

SEQ ID NO: 2186343 - RNA, 19 nt, Homo sapiens
  misc_RNA (1)...(19): siRNA sense strand
ccucagcacuuacuaacca

SEQ ID NO: 2186344 - RNA, 19 nt, Homo sapiens
  misc_RNA (1)...(19): siRNA sense strand
cuaaaucaacaucagguaa

SEQ ID NO: 2186345 - RNA, 19 nt, Homo sapiens
  misc_RNA (1)...(19): siRNA sense strand
uaaguggcauucaagucuu

SEQ ID NO: 2186346 - RNA, 19 nt, Homo sapiens
  misc_RNA (1)...(19): siRNA sense strand
ucacugaccacaagagaau

SEQ ID NO: 2186347 - RNA, 19 nt, Homo sapiens
  misc_RNA (1)...(19): siRNA sense strand
ucacugaccacaagagaau

SEQ ID NO: 2186348 - RNA, 19 nt, Homo sapiens
  misc_RNA (1)...(19): siRNA sense strand
ucacugaccacaagagaau

SEQ ID NO: 2186349 - RNA, 19 nt, Homo sapiens
  misc_RNA (1)...(19): siRNA sense strand
gcaaagaauguggcaaauc

SEQ ID NO: 2186350 - RNA, 19 nt, Homo sapiens
  misc_RNA (1)...(19): siRNA sense strand
guaauaccaagaacauaug

SEQ ID NO: 2186351 - RNA, 19 nt, Homo sapiens
  misc_RNA (1)...(19): siRNA sense strand
cgagaaaugggacuguuga

SEQ ID NO: 2186352 - RNA, 19 nt, Homo sapiens
  misc_RNA (1)...(19): siRNA sense strand
ucagcggaauuuauauaga

SEQ ID NO: 2186353 - RNA, 19 nt, Homo sapiens
  misc_RNA (1)...(19): siRNA sense strand
gggagguuauagugaaguu

SEQ ID NO: 2186354 - RNA, 19 nt, Homo sapiens
  misc_RNA (1)...(19): siRNA sense strand
gaaguccuacaaaugcaaa

SEQ ID NO: 2186355 - RNA, 19 nt, Homo sapiens
  misc_RNA (1)...(19): siRNA sense strand
gccuuuagcugguccucaa

SEQ ID NO: 2186356 - RNA, 19 nt, Homo sapiens
  misc_RNA (1)...(19): siRNA sense strand
gcacuuacuaaccacaaga

SEQ ID NO: 2186357 - RNA, 19 nt, Homo sapiens
  misc_RNA (1)...(19): siRNA sense strand
gaauucauacuagagagaa

SEQ ID NO: 2186358 - RNA, 19 nt, Homo sapiens
  misc_RNA (1)...(19): siRNA sense strand
agacauagcuauagaauuc

SEQ ID NO: 2186359 - RNA, 19 nt, Homo sapiens
  misc_RNA (1)...(19): siRNA sense strand
cuacaaaugugaagaaugu

SEQ ID NO: 2186360 - RNA, 19 nt, Homo sapiens
  misc_RNA (1)...(19): siRNA sense strand
cuacaaaugugaagaaugu

SEQ ID NO: 2186361 - RNA, 19 nt, Homo sapiens
  misc_RNA (1)...(19): siRNA sense strand
cuacaaaugugaagaaugu

SEQ ID NO: 2186362 - RNA, 19 nt, Homo sapiens
  misc_RNA (1)...(19): siRNA sense strand
caucaaagauucacuccaa

SEQ ID NO: 2186363 - RNA, 19 nt, Homo sapiens
  misc_RNA (1)...(19): siRNA sense strand
caagggagguuauagugaa

SEQ ID NO: 2186364 - RNA, 19 nt, Homo sapiens
  misc_RNA (1)...(19): siRNA sense strand
gagagaaacccuacaaaug

SEQ ID NO: 2186365 - RNA, 19 nt, Homo sapiens
  misc_RNA (1)...(19): siRNA sense strand
gagagaaacccuacaaaug

SEQ ID NO: 2186366 - RNA, 19 nt, Homo sapiens
  misc_RNA (1)...(19): siRNA sense strand
caacaucagguaauucaua

SEQ ID NO: 2186367 - RNA, 19 nt, Homo sapiens
  misc_RNA (1)...(19): siRNA sense strand
agacauaggagaauucaua

SEQ ID NO: 2186368 - RNA, 19 nt, Homo sapiens
  misc_RNA (1)...(19): siRNA sense strand
aauaaagagucccagaaua

SEQ ID NO: 2186369 - RNA, 19 nt, Homo sapiens
  misc_RNA (1)...(19): siRNA sense strand
ggagagagacccuacaaau

SEQ ID NO: 2186370 - RNA, 19 nt, Homo sapiens
  misc_RNA (1)...(19): siRNA sense strand
ggagagagacccuacaaau

SEQ ID NO: 2186371 - RNA, 19 nt, Homo sapiens
  misc_RNA (1)...(19): siRNA sense strand
ggagagagacccuacaaau

SEQ ID NO: 2186372 - RNA, 19 nt, Homo sapiens
  misc_RNA (1)...(19): siRNA sense strand
gagcagggcaucaaagauu

SEQ ID NO: 2186373 - RNA, 19 nt, Homo sapiens
  misc_RNA (1)...(19): siRNA sense strand
aaagagaaaugagauggua

SEQ ID NO: 2186374 - RNA, 19 nt, Homo sapiens
  misc_RNA (1)...(19): siRNA sense strand
gaauguggcaaauccuuua

SEQ ID NO: 2186375 - RNA, 19 nt, Homo sapiens
  misc_RNA (1)...(19): siRNA sense strand
gagaaacccuacaaaugug

SEQ ID NO: 2186376 - RNA, 19 nt, Homo sapiens
  misc_RNA (1)...(19): siRNA sense strand
gagaaacccuacaaaugug

SEQ ID NO: 2186377 - RNA, 19 nt, Homo sapiens
  misc_RNA (1)...(19): siRNA sense strand
cuacaaaugugaagagugu

SEQ ID NO: 2186378 - RNA, 19 nt, Homo sapiens
  misc_RNA (1)...(19): siRNA sense strand
gagaugugauguuagagaa

SEQ ID NO: 2186379 - RNA, 19 nt, Homo sapiens
  misc_RNA (1)...(19): siRNA sense strand
ggagagaaaccauauagau

SEQ ID NO: 2186380 - RNA, 19 nt, Homo sapiens
  misc_RNA (1)...(19): siRNA sense strand
gagagaaacccuacacaug

SEQ ID NO: 2186381 - RNA, 19 nt, Homo sapiens
  misc_RNA (1)...(19): siRNA sense strand
gagaaacccuacacaugug

SEQ ID NO: 2186382 - RNA, 19 nt, Homo sapiens
  misc_RNA (1)...(19): siRNA sense strand
ggagagaaacccuacaaau

SEQ ID NO: 2186383 - RNA, 19 nt, Homo sapiens
  misc_RNA (1)...(19): siRNA sense strand
ggagagaaacccuacaaau

SEQ ID NO: 2186384 - RNA, 19 nt, Homo sapiens
  misc_RNA (1)...(19): siRNA sense strand
uaaagagucccagaauaua

SEQ ID NO: 2186385 - RNA, 19 nt, Homo sapiens
  misc_RNA (1)...(19): siRNA sense strand
gagagaaaccauauagaug

SEQ ID NO: 2186386 - RNA, 19 nt, Homo sapiens
  misc_RNA (1)...(19): siRNA sense strand
gagagagacccuacaaaug

SEQ ID NO: 2186387 - RNA, 19 nt, Homo sapiens
  misc_RNA (1)...(19): siRNA sense strand
gagagagacccuacaaaug

SEQ ID NO: 2186388 - RNA, 19 nt, Homo sapiens
  misc_RNA (1)...(19): siRNA sense strand
gagagagacccuacaaaug

SEQ ID NO: 2186389 - RNA, 19 nt, Homo sapiens
  misc_RNA (1)...(19): siRNA sense strand
caaagaauguggcaaaucc

SEQ ID NO: 2186390 - RNA, 19 nt, Homo sapiens
  misc_RNA (1)...(19): siRNA sense strand
gaauguggccaagacuuua

SEQ ID NO: 2186391 - RNA, 19 nt, Homo sapiens
  misc_RNA (1)...(19): siRNA sense strand
gagaaaccauauagaugug

SEQ ID NO: 2186392 - RNA, 19 nt, Homo sapiens
  misc_RNA (1)...(19): siRNA sense strand
caaaccauacuacacauaa

SEQ ID NO: 2186393 - RNA, 19 nt, Homo sapiens
  misc_RNA (1)...(19): siRNA sense strand
gaauguggccaagccuuua

SEQ ID NO: 2186394 - RNA, 19 nt, Homo sapiens
  misc_RNA (1)...(19): siRNA sense strand
ucagagacauagcuauaga

SEQ ID NO: 2186395 - RNA, 19 nt, Homo sapiens
  misc_RNA (1)...(19): siRNA sense strand
gagagacccuacaaaugug

SEQ ID NO: 2186396 - RNA, 19 nt, Homo sapiens
  misc_RNA (1)...(19): siRNA sense strand
gagagacccuacaaaugug

SEQ ID NO: 2186397 - RNA, 19 nt, Homo sapiens
  misc_RNA (1)...(19): siRNA sense strand
gaaaugggacuguugacau

SEQ ID NO: 2186398 - RNA, 19 nt, Homo sapiens
  misc_RNA (1)...(19): siRNA sense strand
gaauguggccaagccuuua

SEQ ID NO: 2186399 - RNA, 19 nt, Homo sapiens
  misc_RNA (1)...(19): siRNA sense strand
gagagacccuacaaaugug

SEQ ID NO: 2186400 - RNA, 19 nt, Homo sapiens
  misc_RNA (1)...(19): siRNA sense strand
gaccacaagagaauucaua

SEQ ID NO: 2186401 - RNA, 19 nt, Homo sapiens
  misc_RNA (1)...(19): siRNA sense strand
agagaaacccuacaaaugu

SEQ ID NO: 2186402 - RNA, 19 nt, Homo sapiens
  misc_RNA (1)...(19): siRNA sense strand
gugcucagcggaauuuaua

SEQ ID NO: 2186403 - RNA, 19 nt, Homo sapiens
  misc_RNA (1)...(19): siRNA sense strand
agagaaacccuacaaaugu

SEQ ID NO: 2186404 - RNA, 19 nt, Homo sapiens
  misc_RNA (1)...(19): siRNA sense strand
gcucagcggaauuuauaua

SEQ ID NO: 2186405 - RNA, 19 nt, Homo sapiens
  misc_RNA (1)...(19): siRNA sense strand
gaccacaagagaauucaua

SEQ ID NO: 2186406 - RNA, 19 nt, Homo sapiens
  misc_RNA (1)...(19): siRNA sense strand
gaccacaagagaauucaua

SEQ ID NO: 2186407 - RNA, 19 nt, Homo sapiens
  misc_RNA (1)...(19): siRNA sense strand
ggagaaguccuacaaaugc

SEQ ID NO: 2186408 - RNA, 19 nt, Homo sapiens
  misc_RNA (1)...(19): siRNA sense strand
gaaacccuaugccugugaa

SEQ ID NO: 2186409 - RNA, 19 nt, Homo sapiens
  misc_RNA (1)...(19): siRNA sense strand
gagguuauagugaaguuaa

SEQ ID NO: 2186410 - RNA, 19 nt, Homo sapiens
  misc_RNA (1)...(19): siRNA sense strand
gagagacccuacacaugug

SEQ ID NO: 2186411 - RNA, 19 nt, Homo sapiens
  misc_RNA (1)...(19): siRNA sense strand
auagagaugugauguuaga

SEQ ID NO: 2186412 - RNA, 19 nt, Homo sapiens
  misc_RNA (1)...(19): siRNA sense strand
ggagagagacccuacacau

SEQ ID NO: 2186413 - RNA, 19 nt, Homo sapiens
  misc_RNA (1)...(19): siRNA sense strand
agagagacccuacaaaugu

SEQ ID NO: 2186414 - RNA, 19 nt, Homo sapiens
  misc_RNA (1)...(19): siRNA sense strand
agagagacccuacaaaugu

SEQ ID NO: 2186415 - RNA, 19 nt, Homo sapiens
  misc_RNA (1)...(19): siRNA sense strand
ccucgaaccuuaugagaca

SEQ ID NO: 2186416 - RNA, 19 nt, Homo sapiens
  misc_RNA (1)...(19): siRNA sense strand
agagagacccuacaaaugu

SEQ ID NO: 2186417 - RNA, 19 nt, Homo sapiens
  misc_RNA (1)...(19): siRNA sense strand
aaagagucccagaauauaa

SEQ ID NO: 2186418 - RNA, 19 nt, Homo sapiens
  misc_RNA (1)...(19): siRNA sense strand
gagagagacccuacacaug

SEQ ID NO: 2186419 - RNA, 19 nt, Homo sapiens
  misc_RNA (1)...(19): siRNA sense strand
gggagaaguccuacaaaug

SEQ ID NO: 2186420 - RNA, 19 nt, Homo sapiens
  misc_RNA (1)...(19): siRNA sense strand
auaaagagucccagaauau

SEQ ID NO: 2186421 - RNA, 19 nt, Homo sapiens
  misc_RNA (1)...(19): siRNA sense strand
ccucaacccuuaugcaaca

SEQ ID NO: 2186422 - RNA, 19 nt, Homo sapiens
  misc_RNA (1)...(19): siRNA sense strand
cuacacgugugaagaaugu

SEQ ID NO: 2186423 - RNA, 19 nt, Homo sapiens
  misc_RNA (1)...(19): siRNA sense strand
gcacaagggagguuauagu

SEQ ID NO: 2186424 - RNA, 19 nt, Homo sapiens
  misc_RNA (1)...(19): siRNA sense strand
gcacuuacuauccacaaga

SEQ ID NO: 2186425 - RNA, 19 nt, Homo sapiens
  misc_RNA (1)...(19): siRNA sense strand
ccauauagaugugaggaau

SEQ ID NO: 2186426 - RNA, 19 nt, Homo sapiens
  misc_RNA (1)...(19): siRNA sense strand
cauaagagaauucauacug

SEQ ID NO: 2186427 - RNA, 19 nt, Homo sapiens
  misc_RNA (1)...(19): siRNA sense strand
ggacaugagaaauuacaau

SEQ ID NO: 2186428 - RNA, 19 nt, Homo sapiens
  misc_RNA (1)...(19): siRNA sense strand
gccuuuagcuggucugcaa

SEQ ID NO: 2186429 - RNA, 19 nt, Homo sapiens
  misc_RNA (1)...(19): siRNA sense strand
cuacaaaugcaaagaaugu

SEQ ID NO: 2186430 - RNA, 19 nt, Homo sapiens
  misc_RNA (1)...(19): siRNA sense strand
gagaaguccuacaaaugca

SEQ ID NO: 2186431 - RNA, 19 nt, Homo sapiens
  misc_RNA (1)...(19): siRNA sense strand
caucagguaauucauacua

SEQ ID NO: 2186432 - RNA, 19 nt, Homo sapiens
  misc_RNA (1)...(19): siRNA sense strand
gccuuuagcuuauccucaa

SEQ ID NO: 2186433 - RNA, 19 nt, Homo sapiens
  misc_RNA (1)...(19): siRNA sense strand
agagaaacccuacacaugu

SEQ ID NO: 2186434 - RNA, 19 nt, Homo sapiens
  misc_RNA (1)...(19): siRNA sense strand
ggagagaaacccuacacau

SEQ ID NO: 2186435 - RNA, 19 nt, Homo sapiens
  misc_RNA (1)...(19): siRNA sense strand
cccagaauauaaagagaaa

SEQ ID NO: 2186436 - RNA, 19 nt, Homo sapiens
  misc_RNA (1)...(19): siRNA sense strand
agaauucucucuggaggaa

SEQ ID NO: 2186437 - RNA, 19 nt, Homo sapiens
  misc_RNA (1)...(19): siRNA sense strand
cagcggaauuuauauagag

SEQ ID NO: 2186438 - RNA, 19 nt, Homo sapiens
  misc_RNA (1)...(19): siRNA sense strand
agagaaaccauauagaugu

SEQ ID NO: 2186439 - RNA, 19 nt, Homo sapiens
  misc_RNA (1)...(19): siRNA sense strand
gauguuagagaacuacaga

SEQ ID NO: 2186440 - RNA, 19 nt, Homo sapiens
  misc_RNA (1)...(19): siRNA sense strand
agagagacccuacacaugu

SEQ ID NO: 2186441 - RNA, 19 nt, Homo sapiens
  misc_RNA (1)...(19): siRNA sense strand
ugaagaguguggcaaaguc

SEQ ID NO: 2186442 - RNA, 19 nt, Homo sapiens
  misc_RNA (1)...(19): siRNA sense strand
ugaagaauguggccaagac

SEQ ID NO: 2186443 - RNA, 19 nt, Homo sapiens
  misc_RNA (1)...(19): siRNA sense strand
ccucagcacuuacuaacca

SEQ ID NO: 2186444 - RNA, 19 nt, Homo sapiens
  misc_RNA (1)...(19): siRNA sense strand
cuaaaucaacaucagguaa

SEQ ID NO: 2186445 - RNA, 19 nt, Homo sapiens
  misc_RNA (1)...(19): siRNA sense strand
uaaguggcauucaagucuu

SEQ ID NO: 2186446 - RNA, 19 nt, Homo sapiens
  misc_RNA (1)...(19): siRNA sense strand
ucacugaccacaagagaau

SEQ ID NO: 2186447 - RNA, 19 nt, Homo sapiens
  misc_RNA (1)...(19): siRNA sense strand
ucacugaccacaagagaau

SEQ ID NO: 2186448 - RNA, 19 nt, Homo sapiens
  misc_RNA (1)...(19): siRNA sense strand
ucacugaccacaagagaau

SEQ ID NO: 2186449 - RNA, 19 nt, Homo sapiens
  misc_RNA (1)...(19): siRNA sense strand
gcaaagaauguggcaaauc

SEQ ID NO: 2186450 - RNA, 19 nt, Homo sapiens
  misc_RNA (1)...(19): siRNA sense strand
guaauaccaagaacauaug

SEQ ID NO: 2186451 - RNA, 19 nt, Homo sapiens
  misc_RNA (1)...(19): siRNA sense strand
cgagaaaugggacuguuga

SEQ ID NO: 2186452 - RNA, 19 nt, Homo sapiens
  misc_RNA (1)...(19): siRNA sense strand
ucagcggaauuuauauaga

SEQ ID NO: 2186453 - RNA, 19 nt, Homo sapiens
  misc_RNA (1)...(19): siRNA sense strand
gggagguuauagugaaguu

SEQ ID NO: 2186454 - RNA, 19 nt, Homo sapiens
  misc_RNA (1)...(19): siRNA sense strand
gaaguccuacaaaugcaaa

SEQ ID NO: 2186455 - RNA, 19 nt, Homo sapiens
  misc_RNA (1)...(19): siRNA sense strand
gccuuuagcugguccucaa

SEQ ID NO: 2186456 - RNA, 19 nt, Homo sapiens
  misc_RNA (1)...(19): siRNA sense strand
gcacuuacuaaccacaaga

SEQ ID NO: 2186457 - RNA, 19 nt, Homo sapiens
  misc_RNA (1)...(19): siRNA sense strand
gaauucauacuagagagaa

SEQ ID NO: 2186458 - RNA, 19 nt, Homo sapiens
  misc_RNA (1)...(19): siRNA sense strand
ggucaucuauuucuucaua

SEQ ID NO: 2186459 - RNA, 19 nt, Homo sapiens
  misc_RNA (1)...(19): siRNA sense strand
ggaacacugucuacacaug

SEQ ID NO: 2186460 - RNA, 19 nt, Homo sapiens
  misc_RNA (1)...(19): siRNA sense strand
caucuggcaucucuuugua

SEQ ID NO: 2186461 - RNA, 19 nt, Homo sapiens
  misc_RNA (1)...(19): siRNA sense strand
agaccaagguguccaaaug

SEQ ID NO: 2186462 - RNA, 19 nt, Homo sapiens
  misc_RNA (1)...(19): siRNA sense strand
gcaucucuuuguagcauuu

SEQ ID NO: 2186463 - RNA, 19 nt, Homo sapiens
  misc_RNA (1)...(19): siRNA sense strand
gguaccagcccacagagua

SEQ ID NO: 2186464 - RNA, 19 nt, Homo sapiens
  misc_RNA (1)...(19): siRNA sense strand
gaaauacgcgagguucaug

SEQ ID NO: 2186465 - RNA, 19 nt, Homo sapiens
  misc_RNA (1)...(19): siRNA sense strand
caccaucuaugucuucuuc

SEQ ID NO: 2186466 - RNA, 19 nt, Homo sapiens
  misc_RNA (1)...(19): siRNA sense strand
gaacacugucuacacaugu

SEQ ID NO: 2186467 - RNA, 19 nt, Homo sapiens
  misc_RNA (1)...(19): siRNA sense strand
gaccaagguguccaaauga

SEQ ID NO: 2186468 - RNA, 19 nt, Homo sapiens
  misc_RNA (1)...(19): siRNA sense strand
guggaacacugucuacaca

SEQ ID NO: 2186469 - RNA, 19 nt, Homo sapiens
  misc_RNA (1)...(19): siRNA sense strand
uggcuggucuggauuaugg

SEQ ID NO: 2186470 - RNA, 19 nt, Homo sapiens
  misc_RNA (1)...(19): siRNA sense strand
uuguggagcuucucugcua

SEQ ID NO: 2186471 - RNA, 19 nt, Homo sapiens
  misc_RNA (1)...(19): siRNA sense strand
ccaucuaugucuucuucuu

SEQ ID NO: 2186472 - RNA, 19 nt, Homo sapiens
  misc_RNA (1)...(19): siRNA sense strand
cacaccaucuccuggaaga

SEQ ID NO: 2186473 - RNA, 19 nt, Homo sapiens
  misc_RNA (1)...(19): siRNA sense strand
ccagcacccugcagaccaa

SEQ ID NO: 2186474 - RNA, 19 nt, Homo sapiens
  misc_RNA (1)...(19): siRNA sense strand
guaccagcccacagaguau

SEQ ID NO: 2186475 - RNA, 19 nt, Homo sapiens
  misc_RNA (1)...(19): siRNA sense strand
gaugguggaacacugucua

SEQ ID NO: 2186476 - RNA, 19 nt, Homo sapiens
  misc_RNA (1)...(19): siRNA sense strand
gugcugguacccacuacua

SEQ ID NO: 2186477 - RNA, 19 nt, Homo sapiens
  misc_RNA (1)...(19): siRNA sense strand
gggcauggucuucuucaag

SEQ ID NO: 2186478 - RNA, 19 nt, Homo sapiens
  misc_RNA (1)...(19): siRNA sense strand
gcuccaaccucuacuuccu

SEQ ID NO: 2186479 - RNA, 19 nt, Homo sapiens
  misc_RNA (1)...(19): siRNA sense strand
gcugguacccacuacuaug

SEQ ID NO: 2186480 - RNA, 19 nt, Homo sapiens
  misc_RNA (1)...(19): siRNA sense strand
gggcagcuccaaccucuac

SEQ ID NO: 2186481 - RNA, 19 nt, Homo sapiens
  misc_RNA (1)...(19): siRNA sense strand
agagguaccagcccacaga

SEQ ID NO: 2186482 - RNA, 19 nt, Homo sapiens
  misc_RNA (1)...(19): siRNA sense strand
cgaaauacgcgagguucau

SEQ ID NO: 2186483 - RNA, 19 nt, Homo sapiens
  misc_RNA (1)...(19): siRNA sense strand
gcccacagaguaugaacau

SEQ ID NO: 2186484 - RNA, 19 nt, Homo sapiens
  misc_RNA (1)...(19): siRNA sense strand
acuaugccaucuggaggua

SEQ ID NO: 2186485 - RNA, 19 nt, Homo sapiens
  misc_RNA (1)...(19): siRNA sense strand
uggcaucucuuuguagcau

SEQ ID NO: 2186486 - RNA, 19 nt, Homo sapiens
  misc_RNA (1)...(19): siRNA sense strand
gcagcuccaaccucuacuu

SEQ ID NO: 2186487 - RNA, 19 nt, Homo sapiens
  misc_RNA (1)...(19): siRNA sense strand
caucuaugucuucuucuuc

SEQ ID NO: 2186488 - RNA, 19 nt, Homo sapiens
  misc_RNA (1)...(19): siRNA sense strand
gggcaccaucuaugucuuc

SEQ ID NO: 2186489 - RNA, 19 nt, Homo sapiens
  misc_RNA (1)...(19): siRNA sense strand
ggucaucuauuucuucaua

SEQ ID NO: 2186490 - RNA, 19 nt, Homo sapiens
  misc_RNA (1)...(19): siRNA sense strand
ggaacacugucuacacaug

SEQ ID NO: 2186491 - RNA, 19 nt, Homo sapiens
  misc_RNA (1)...(19): siRNA sense strand
caucuggcaucucuuugua

SEQ ID NO: 2186492 - RNA, 19 nt, Homo sapiens
  misc_RNA (1)...(19): siRNA sense strand
agaccaagguguccaaaug

SEQ ID NO: 2186493 - RNA, 19 nt, Homo sapiens
  misc_RNA (1)...(19): siRNA sense strand
gcaucucuuuguagcauuu

SEQ ID NO: 2186494 - RNA, 19 nt, Homo sapiens
  misc_RNA (1)...(19): siRNA sense strand
gguaccagcccacagagua

SEQ ID NO: 2186495 - RNA, 19 nt, Homo sapiens
  misc_RNA (1)...(19): siRNA sense strand
gaaauacgcgagguucaug

SEQ ID NO: 2186496 - RNA, 19 nt, Homo sapiens
  misc_RNA (1)...(19): siRNA sense strand
caccaucuaugucuucuuc

SEQ ID NO: 2186497 - RNA, 19 nt, Homo sapiens
  misc_RNA (1)...(19): siRNA sense strand
gaacacugucuacacaugu

SEQ ID NO: 2186498 - RNA, 19 nt, Homo sapiens
  misc_RNA (1)...(19): siRNA sense strand
gaccaagguguccaaauga

SEQ ID NO: 2186499 - RNA, 19 nt, Homo sapiens
  misc_RNA (1)...(19): siRNA sense strand
guggaacacugucuacaca

SEQ ID NO: 2186500 - RNA, 19 nt, Homo sapiens
  misc_RNA (1)...(19): siRNA sense strand
uggcuggucuggauuaugg

SEQ ID NO: 2186501 - RNA, 19 nt, Homo sapiens
  misc_RNA (1)...(19): siRNA sense strand
uuguggagcuucucugcua

SEQ ID NO: 2186502 - RNA, 19 nt, Homo sapiens
  misc_RNA (1)...(19): siRNA sense strand
ccaucuaugucuucuucuu

SEQ ID NO: 2186503 - RNA, 19 nt, Homo sapiens
  misc_RNA (1)...(19): siRNA sense strand
cacaccaucuccuggaaga

SEQ ID NO: 2186504 - RNA, 19 nt, Homo sapiens
  misc_RNA (1)...(19): siRNA sense strand
ccagcacccugcagaccaa

SEQ ID NO: 2186505 - RNA, 19 nt, Homo sapiens
  misc_RNA (1)...(19): siRNA sense strand
guaccagcccacagaguau

SEQ ID NO: 2186506 - RNA, 19 nt, Homo sapiens
  misc_RNA (1)...(19): siRNA sense strand
gaugguggaacacugucua

SEQ ID NO: 2186507 - RNA, 19 nt, Homo sapiens
  misc_RNA (1)...(19): siRNA sense strand
gugcugguacccacuacua

SEQ ID NO: 2186508 - RNA, 19 nt, Homo sapiens
  misc_RNA (1)...(19): siRNA sense strand
gggcauggucuucuucaag

SEQ ID NO: 2186509 - RNA, 19 nt, Homo sapiens
  misc_RNA (1)...(19): siRNA sense strand
gcuccaaccucuacuuccu

SEQ ID NO: 2186510 - RNA, 19 nt, Homo sapiens
  misc_RNA (1)...(19): siRNA sense strand
gcugguacccacuacuaug

SEQ ID NO: 2186511 - RNA, 19 nt, Homo sapiens
  misc_RNA (1)...(19): siRNA sense strand
gggcagcuccaaccucuac

SEQ ID NO: 2186512 - RNA, 19 nt, Homo sapiens
  misc_RNA (1)...(19): siRNA sense strand
agagguaccagcccacaga

SEQ ID NO: 2186513 - RNA, 19 nt, Homo sapiens
  misc_RNA (1)...(19): siRNA sense strand
cgaaauacgcgagguucau

SEQ ID NO: 2186514 - RNA, 19 nt, Homo sapiens
  misc_RNA (1)...(19): siRNA sense strand
uggcaucucuuuguagcau

SEQ ID NO: 2186515 - RNA, 19 nt, Homo sapiens
  misc_RNA (1)...(19): siRNA sense strand
acuaugccaucuggaggua

SEQ ID NO: 2186516 - RNA, 19 nt, Homo sapiens
  misc_RNA (1)...(19): siRNA sense strand
gcccacagaguaugaacau

SEQ ID NO: 2186517 - RNA, 19 nt, Homo sapiens
  misc_RNA (1)...(19): siRNA sense strand
gcagcuccaaccucuacuu

SEQ ID NO: 2186518 - RNA, 19 nt, Homo sapiens
  misc_RNA (1)...(19): siRNA sense strand
caucuaugucuucuucuuc

SEQ ID NO: 2186519 - RNA, 19 nt, Homo sapiens
  misc_RNA (1)...(19): siRNA sense strand
gggcaccaucuaugucuuc

SEQ ID NO: 2186520 - RNA, 19 nt, Homo sapiens
  misc_RNA (1)...(19): siRNA sense strand
ggucaucuauuucuucaua

SEQ ID NO: 2186521 - RNA, 19 nt, Homo sapiens
  misc_RNA (1)...(19): siRNA sense strand
ggaacacugucuacacaug

SEQ ID NO: 2186522 - RNA, 19 nt, Homo sapiens
  misc_RNA (1)...(19): siRNA sense strand
caucuggcaucucuuugua

SEQ ID NO: 2186523 - RNA, 19 nt, Homo sapiens
  misc_RNA (1)...(19): siRNA sense strand
agaccaagguguccaaaug

SEQ ID NO: 2186524 - RNA, 19 nt, Homo sapiens
  misc_RNA (1)...(19): siRNA sense strand
gcaucucuuuguagcauuu

SEQ ID NO: 2186525 - RNA, 19 nt, Homo sapiens
  misc_RNA (1)...(19): siRNA sense strand
gguaccagcccacagagua

SEQ ID NO: 2186526 - RNA, 19 nt, Homo sapiens
  misc_RNA (1)...(19): siRNA sense strand
gaaauacgcgagguucaug

SEQ ID NO: 2186527 - RNA, 19 nt, Homo sapiens
  misc_RNA (1)...(19): siRNA sense strand
caccaucuaugucuucuuc

SEQ ID NO: 2186528 - RNA, 19 nt, Homo sapiens
  misc_RNA (1)...(19): siRNA sense strand
gaacacugucuacacaugu

SEQ ID NO: 2186529 - RNA, 19 nt, Homo sapiens
  misc_RNA (1)...(19): siRNA sense strand
gaccaagguguccaaauga

SEQ ID NO: 2186530 - RNA, 19 nt, Homo sapiens
  misc_RNA (1)...(19): siRNA sense strand
guggaacacugucuacaca

SEQ ID NO: 2186531 - RNA, 19 nt, Homo sapiens
  misc_RNA (1)...(19): siRNA sense strand
uggcuggucuggauuaugg

SEQ ID NO: 2186532 - RNA, 19 nt, Homo sapiens
  misc_RNA (1)...(19): siRNA sense strand
uuguggagcuucucugcua

SEQ ID NO: 2186533 - RNA, 19 nt, Homo sapiens
  misc_RNA (1)...(19): siRNA sense strand
ccaucuaugucuucuucuu

SEQ ID NO: 2186534 - RNA, 19 nt, Homo sapiens
  misc_RNA (1)...(19): siRNA sense strand
cacaccaucuccuggaaga

SEQ ID NO: 2186535 - RNA, 19 nt, Homo sapiens
  misc_RNA (1)...(19): siRNA sense strand
ccagcacccugcagaccaa

SEQ ID NO: 2186536 - RNA, 19 nt, Homo sapiens
  misc_RNA (1)...(19): siRNA sense strand
guaccagcccacagaguau

SEQ ID NO: 2186537 - RNA, 19 nt, Homo sapiens
  misc_RNA (1)...(19): siRNA sense strand
gaugguggaacacugucua

SEQ ID NO: 2186538 - RNA, 19 nt, Homo sapiens
  misc_RNA (1)...(19): siRNA sense strand
gugcugguacccacuacua

SEQ ID NO: 2186539 - RNA, 19 nt, Homo sapiens
  misc_RNA (1)...(19): siRNA sense strand
gggcauggucuucuucaag

SEQ ID NO: 2186540 - RNA, 19 nt, Homo sapiens
  misc_RNA (1)...(19): siRNA sense strand
gcuccaaccucuacuuccu

SEQ ID NO: 2186541 - RNA, 19 nt, Homo sapiens
  misc_RNA (1)...(19): siRNA sense strand
gcugguacccacuacuaug

SEQ ID NO: 2186542 - RNA, 19 nt, Homo sapiens
  misc_RNA (1)...(19): siRNA sense strand
gggcagcuccaaccucuac

SEQ ID NO: 2186543 - RNA, 19 nt, Homo sapiens
  misc_RNA (1)...(19): siRNA sense strand
agagguaccagcccacaga

SEQ ID NO: 2186544 - RNA, 19 nt, Homo sapiens
  misc_RNA (1)...(19): siRNA sense strand
cgaaauacgcgagguucau

SEQ ID NO: 2186545 - RNA, 19 nt, Homo sapiens
  misc_RNA (1)...(19): siRNA sense strand
uggcaucucuuuguagcau

SEQ ID NO: 2186546 - RNA, 19 nt, Homo sapiens
  misc_RNA (1)...(19): siRNA sense strand
acuaugccaucuggaggua

SEQ ID NO: 2186547 - RNA, 19 nt, Homo sapiens
  misc_RNA (1)...(19): siRNA sense strand
gcccacagaguaugaacau

SEQ ID NO: 2186548 - RNA, 19 nt, Homo sapiens
  misc_RNA (1)...(19): siRNA sense strand
gcagcuccaaccucuacuu

SEQ ID NO: 2186549 - RNA, 19 nt, Homo sapiens
  misc_RNA (1)...(19): siRNA sense strand
caucuaugucuucuucuuc

SEQ ID NO: 2186550 - RNA, 19 nt, Homo sapiens
  misc_RNA (1)...(19): siRNA sense strand
gggcaccaucuaugucuuc

SEQ ID NO: 2186551 - RNA, 19 nt, Homo sapiens
  misc_RNA (1)...(19): siRNA sense strand
gcaaauaugcucucuauag

SEQ ID NO: 2186552 - RNA, 19 nt, Homo sapiens
  misc_RNA (1)...(19): siRNA sense strand
uggaagaacugcauuauug

SEQ ID NO: 2186553 - RNA, 19 nt, Homo sapiens
  misc_RNA (1)...(19): siRNA sense strand
gcaagguggugacuaagaa

SEQ ID NO: 2186554 - RNA, 19 nt, Homo sapiens
  misc_RNA (1)...(19): siRNA sense strand
caucaacacugcaugcuuu

SEQ ID NO: 2186555 - RNA, 19 nt, Homo sapiens
  misc_RNA (1)...(19): siRNA sense strand
gaaaucaacgacagucuaa

SEQ ID NO: 2186556 - RNA, 19 nt, Homo sapiens
  misc_RNA (1)...(19): siRNA sense strand
gaagaaggccaaugaagug

SEQ ID NO: 2186557 - RNA, 19 nt, Homo sapiens
  misc_RNA (1)...(19): siRNA sense strand
guucagccauguuccuuua

SEQ ID NO: 2186558 - RNA, 19 nt, Homo sapiens
  misc_RNA (1)...(19): siRNA sense strand
ggaagaaggccaaugaagu

SEQ ID NO: 2186559 - RNA, 19 nt, Homo sapiens
  misc_RNA (1)...(19): siRNA sense strand
ggaccuacaugcuucucaa

SEQ ID NO: 2186560 - RNA, 19 nt, Homo sapiens
  misc_RNA (1)...(19): siRNA sense strand
caaccagaguuuaugcuau

SEQ ID NO: 2186561 - RNA, 19 nt, Homo sapiens
  misc_RNA (1)...(19): siRNA sense strand
guaauugacaucuccauga

SEQ ID NO: 2186562 - RNA, 19 nt, Homo sapiens
  misc_RNA (1)...(19): siRNA sense strand
cuacaugcuucucaaauuc

SEQ ID NO: 2186563 - RNA, 19 nt, Homo sapiens
  misc_RNA (1)...(19): siRNA sense strand
gcagaagccauaaggagaa

SEQ ID NO: 2186564 - RNA, 19 nt, Homo sapiens
  misc_RNA (1)...(19): siRNA sense strand
uaggcaagguggugacuaa

SEQ ID NO: 2186565 - RNA, 19 nt, Homo sapiens
  misc_RNA (1)...(19): siRNA sense strand
gccauaaggagaacucaua

SEQ ID NO: 2186566 - RNA, 19 nt, Homo sapiens
  misc_RNA (1)...(19): siRNA sense strand
ccucgcagcugacaaacuu

SEQ ID NO: 2186567 - RNA, 19 nt, Homo sapiens
  misc_RNA (1)...(19): siRNA sense strand
gaauguggacuuugcuuug

SEQ ID NO: 2186568 - RNA, 19 nt, Homo sapiens
  misc_RNA (1)...(19): siRNA sense strand
ccuacaugcuucucaaauu

SEQ ID NO: 2186569 - RNA, 19 nt, Homo sapiens
  misc_RNA (1)...(19): siRNA sense strand
caaauaugcucucuauagc

SEQ ID NO: 2186570 - RNA, 19 nt, Homo sapiens
  misc_RNA (1)...(19): siRNA sense strand
gacaggauaagaaggauaa

SEQ ID NO: 2186571 - RNA, 19 nt, Homo sapiens
  misc_RNA (1)...(19): siRNA sense strand
ucagccauguuccuuuaua

SEQ ID NO: 2186572 - RNA, 19 nt, Homo sapiens
  misc_RNA (1)...(19): siRNA sense strand
ggacuuugcuuugauucau

SEQ ID NO: 2186573 - RNA, 19 nt, Homo sapiens
  misc_RNA (1)...(19): siRNA sense strand
caacuguccugaaguggau

SEQ ID NO: 2186574 - RNA, 19 nt, Homo sapiens
  misc_RNA (1)...(19): siRNA sense strand
gauuaaugccugcaagauu

SEQ ID NO: 2186575 - RNA, 19 nt, Homo sapiens
  misc_RNA (1)...(19): siRNA sense strand
uugcaaauaugcucucuau

SEQ ID NO: 2186576 - RNA, 19 nt, Homo sapiens
  misc_RNA (1)...(19): siRNA sense strand
cagccauguuccuuuauaa

SEQ ID NO: 2186577 - RNA, 19 nt, Homo sapiens
  misc_RNA (1)...(19): siRNA sense strand
ccaauaccauaccucaaga

SEQ ID NO: 2186578 - RNA, 19 nt, Homo sapiens
  misc_RNA (1)...(19): siRNA sense strand
gcaaccagaguuuaugcua

SEQ ID NO: 2186579 - RNA, 19 nt, Homo sapiens
  misc_RNA (1)...(19): siRNA sense strand
gacuuugcuuugauucaua

SEQ ID NO: 2186580 - RNA, 19 nt, Homo sapiens
  misc_RNA (1)...(19): siRNA sense strand
ccaguugaauguggacuuu

SEQ ID NO: 2186581 - RNA, 19 nt, Homo sapiens
  misc_RNA (1)...(19): siRNA sense strand
ccaagcuuguugcaaauau

SEQ ID NO: 2186582 - RNA, 19 nt, Homo sapiens
  misc_RNA (1)...(19): siRNA sense strand
uaucuugacucauggaauc

SEQ ID NO: 2186583 - RNA, 19 nt, Homo sapiens
  misc_RNA (1)...(19): siRNA sense strand
ccaaugaaguggacugcau

SEQ ID NO: 2186584 - RNA, 19 nt, Homo sapiens
  misc_RNA (1)...(19): siRNA sense strand
uaugcuaucuugacucaug

SEQ ID NO: 2186585 - RNA, 19 nt, Homo sapiens
  misc_RNA (1)...(19): siRNA sense strand
ggaagaacugcauuauugu

SEQ ID NO: 2186586 - RNA, 19 nt, Homo sapiens
  misc_RNA (1)...(19): siRNA sense strand
ggacuuaucccagaaaauu

SEQ ID NO: 2186587 - RNA, 19 nt, Homo sapiens
  misc_RNA (1)...(19): siRNA sense strand
uaauugacaucuccaugau

SEQ ID NO: 2186588 - RNA, 19 nt, Homo sapiens
  misc_RNA (1)...(19): siRNA sense strand
cagaguuuaugcuaucuug

SEQ ID NO: 2186589 - RNA, 19 nt, Homo sapiens
  misc_RNA (1)...(19): siRNA sense strand
auuaaugccugcaagauug

SEQ ID NO: 2186590 - RNA, 19 nt, Homo sapiens
  misc_RNA (1)...(19): siRNA sense strand
cgaaaucaacgacagucua

SEQ ID NO: 2186591 - RNA, 19 nt, Homo sapiens
  misc_RNA (1)...(19): siRNA sense strand
caacacugcaugcuuugaa

SEQ ID NO: 2186592 - RNA, 19 nt, Homo sapiens
  misc_RNA (1)...(19): siRNA sense strand
caaugaaguggacugcaua

SEQ ID NO: 2186593 - RNA, 19 nt, Homo sapiens
  misc_RNA (1)...(19): siRNA sense strand
ugaaugaucguguggcuau

SEQ ID NO: 2186594 - RNA, 19 nt, Homo sapiens
  misc_RNA (1)...(19): siRNA sense strand
gaguggaagaacugcauua

SEQ ID NO: 2186595 - RNA, 19 nt, Homo sapiens
  misc_RNA (1)...(19): siRNA sense strand
gauccuugcagaagccaua

SEQ ID NO: 2186596 - RNA, 19 nt, Homo sapiens
  misc_RNA (1)...(19): siRNA sense strand
gaagaacugcauuauuguc

SEQ ID NO: 2186597 - RNA, 19 nt, Homo sapiens
  misc_RNA (1)...(19): siRNA sense strand
uggcuauccuuguagauga

SEQ ID NO: 2186598 - RNA, 19 nt, Homo sapiens
  misc_RNA (1)...(19): siRNA sense strand
caagcuuguugcaaauaug

SEQ ID NO: 2186599 - RNA, 19 nt, Homo sapiens
  misc_RNA (1)...(19): siRNA sense strand
ugacauggcagacacuugu

SEQ ID NO: 2186600 - RNA, 19 nt, Homo sapiens
  misc_RNA (1)...(19): siRNA sense strand
ugaaguggacugcauagug

SEQ ID NO: 2186601 - RNA, 19 nt, Homo sapiens
  misc_RNA (1)...(19): siRNA sense strand
ugaaguggauaagggagaa

SEQ ID NO: 2186602 - RNA, 19 nt, Homo sapiens
  misc_RNA (1)...(19): siRNA sense strand
auaaggagaacucauaaug

SEQ ID NO: 2186603 - RNA, 19 nt, Homo sapiens
  misc_RNA (1)...(19): siRNA sense strand
ccauaaggagaacucauaa

SEQ ID NO: 2186604 - RNA, 19 nt, Homo sapiens
  misc_RNA (1)...(19): siRNA sense strand
aauguggacuuugcuuuga

SEQ ID NO: 2186605 - RNA, 19 nt, Homo sapiens
  misc_RNA (1)...(19): siRNA sense strand
guggaagaacugcauuauu

SEQ ID NO: 2186606 - RNA, 19 nt, Homo sapiens
  misc_RNA (1)...(19): siRNA sense strand
gaacggaagaaggccaaug

SEQ ID NO: 2186607 - RNA, 19 nt, Homo sapiens
  misc_RNA (1)...(19): siRNA sense strand
aaucaacgacagucuaaug

SEQ ID NO: 2186608 - RNA, 19 nt, Homo sapiens
  misc_RNA (1)...(19): siRNA sense strand
uaaggagaacucauaaugg

SEQ ID NO: 2186609 - RNA, 19 nt, Homo sapiens
  misc_RNA (1)...(19): siRNA sense strand
aaccagaguuuaugcuauc

SEQ ID NO: 2186610 - RNA, 19 nt, Homo sapiens
  misc_RNA (1)...(19): siRNA sense strand
ucguguggcuauccuugua

SEQ ID NO: 2186611 - RNA, 19 nt, Homo sapiens
  misc_RNA (1)...(19): siRNA sense strand
cgacaggauaagaaggaua

SEQ ID NO: 2186612 - RNA, 19 nt, Homo sapiens
  misc_RNA (1)...(19): siRNA sense strand
ggagcaaccagaguuuaug

SEQ ID NO: 2186613 - RNA, 19 nt, Homo sapiens
  misc_RNA (1)...(19): siRNA sense strand
ugaauguggacuuugcuuu

SEQ ID NO: 2186614 - RNA, 19 nt, Homo sapiens
  misc_RNA (1)...(19): siRNA sense strand
uagcaggugcggaucauau

SEQ ID NO: 2186615 - RNA, 19 nt, Homo sapiens
  misc_RNA (1)...(19): siRNA sense strand
uaauggagcuuuugaucau

SEQ ID NO: 2186616 - RNA, 19 nt, Homo sapiens
  misc_RNA (1)...(19): siRNA sense strand
cagagugguuguggcgaaa

SEQ ID NO: 2186617 - RNA, 19 nt, Homo sapiens
  misc_RNA (1)...(19): siRNA sense strand
gcuagugggagaugugaau

SEQ ID NO: 2186618 - RNA, 19 nt, Homo sapiens
  misc_RNA (1)...(19): siRNA sense strand
ccuuaugcccgacaggaua

SEQ ID NO: 2186619 - RNA, 19 nt, Homo sapiens
  misc_RNA (1)...(19): siRNA sense strand
uuuaugcuaucuugacuca

SEQ ID NO: 2186620 - RNA, 19 nt, Homo sapiens
  misc_RNA (1)...(19): siRNA sense strand
ggcaagguggugacuaaga

SEQ ID NO: 2186621 - RNA, 19 nt, Homo sapiens
  misc_RNA (1)...(19): siRNA sense strand
auuauugucucgccagaug

SEQ ID NO: 2186622 - RNA, 19 nt, Homo sapiens
  misc_RNA (1)...(19): siRNA sense strand
gcaggugcggaucauauca

SEQ ID NO: 2186623 - RNA, 19 nt, Homo sapiens
  misc_RNA (1)...(19): siRNA sense strand
gccaagcuuguugcaaaua

SEQ ID NO: 2186624 - RNA, 19 nt, Homo sapiens
  misc_RNA (1)...(19): siRNA sense strand
gagugugcguggagaggau

SEQ ID NO: 2186625 - RNA, 19 nt, Homo sapiens
  misc_RNA (1)...(19): siRNA sense strand
gagugguuguggcgaaauc

SEQ ID NO: 2186626 - RNA, 19 nt, Homo sapiens
  misc_RNA (1)...(19): siRNA sense strand
ccgaguuacugcagucauc

SEQ ID NO: 2186627 - RNA, 19 nt, Homo sapiens
  misc_RNA (1)...(19): siRNA sense strand
uugcagaccaguugaaugu

SEQ ID NO: 2186628 - RNA, 19 nt, Homo sapiens
  misc_RNA (1)...(19): siRNA sense strand
agaauaucccugaguggaa

SEQ ID NO: 2186629 - RNA, 19 nt, Homo sapiens
  misc_RNA (1)...(19): siRNA sense strand
uguggacuuugcuuugauu

SEQ ID NO: 2186630 - RNA, 19 nt, Homo sapiens
  misc_RNA (1)...(19): siRNA sense strand
gaccuacaugcuucucaaa

SEQ ID NO: 2186631 - RNA, 19 nt, Homo sapiens
  misc_RNA (1)...(19): siRNA sense strand
ccagccauuucucgcauca

SEQ ID NO: 2186632 - RNA, 19 nt, Homo sapiens
  misc_RNA (1)...(19): siRNA sense strand
cggaucauaucaucaccau

SEQ ID NO: 2186633 - RNA, 19 nt, Homo sapiens
  misc_RNA (1)...(19): siRNA sense strand
cuugacucauggaaucuuu

SEQ ID NO: 2186634 - RNA, 19 nt, Homo sapiens
  misc_RNA (1)...(19): siRNA sense strand
gagcuuuugaucaugauua

SEQ ID NO: 2186635 - RNA, 19 nt, Homo sapiens
  misc_RNA (1)...(19): siRNA sense strand
agagccaacuguccugaag

SEQ ID NO: 2186636 - RNA, 19 nt, Homo sapiens
  misc_RNA (1)...(19): siRNA sense strand
uaucaucaccauggaccua

SEQ ID NO: 2186637 - RNA, 19 nt, Homo sapiens
  misc_RNA (1)...(19): siRNA sense strand
gagcaaccagaguuuaugc

SEQ ID NO: 2186638 - RNA, 19 nt, Homo sapiens
  misc_RNA (1)...(19): siRNA sense strand
cagcucccaccaggacuua

SEQ ID NO: 2186639 - RNA, 19 nt, Homo sapiens
  misc_RNA (1)...(19): siRNA sense strand
ugacaucuccaugauccuu

SEQ ID NO: 2186640 - RNA, 19 nt, Homo sapiens
  misc_RNA (1)...(19): siRNA sense strand
guagaugacauggcagaca

SEQ ID NO: 2186641 - RNA, 19 nt, Homo sapiens
  misc_RNA (1)...(19): siRNA sense strand
gaaugaucguguggcuauc

SEQ ID NO: 2186642 - RNA, 19 nt, Homo sapiens
  misc_RNA (1)...(19): siRNA sense strand
agccaacuguccugaagug

SEQ ID NO: 2186643 - RNA, 19 nt, Homo sapiens
  misc_RNA (1)...(19): siRNA sense strand
cauaaggagaacucauaau

SEQ ID NO: 2186644 - RNA, 19 nt, Homo sapiens
  misc_RNA (1)...(19): siRNA sense strand
aacggaagaaggccaauga

SEQ ID NO: 2186645 - RNA, 19 nt, Homo sapiens
  misc_RNA (1)...(19): siRNA sense strand
gcagcucccaccaggacuu

SEQ ID NO: 2186646 - RNA, 19 nt, Homo sapiens
  misc_RNA (1)...(19): siRNA sense strand
gcaaauaugcucucuauag

SEQ ID NO: 2186647 - RNA, 19 nt, Homo sapiens
  misc_RNA (1)...(19): siRNA sense strand
uggaagaacugcauuauug

SEQ ID NO: 2186648 - RNA, 19 nt, Homo sapiens
  misc_RNA (1)...(19): siRNA sense strand
gcaagguggugacuaagaa

SEQ ID NO: 2186649 - RNA, 19 nt, Homo sapiens
  misc_RNA (1)...(19): siRNA sense strand
caucaacacugcaugcuuu

SEQ ID NO: 2186650 - RNA, 19 nt, Homo sapiens
  misc_RNA (1)...(19): siRNA sense strand
gaaaucaacgacagucuaa

SEQ ID NO: 2186651 - RNA, 19 nt, Homo sapiens
  misc_RNA (1)...(19): siRNA sense strand
gaagaaggccaaugaagug

SEQ ID NO: 2186652 - RNA, 19 nt, Homo sapiens
  misc_RNA (1)...(19): siRNA sense strand
guucagccauguuccuuua

SEQ ID NO: 2186653 - RNA, 19 nt, Homo sapiens
  misc_RNA (1)...(19): siRNA sense strand
ggaagaaggccaaugaagu

SEQ ID NO: 2186654 - RNA, 19 nt, Homo sapiens
  misc_RNA (1)...(19): siRNA sense strand
ggaccuacaugcuucucaa

SEQ ID NO: 2186655 - RNA, 19 nt, Homo sapiens
  misc_RNA (1)...(19): siRNA sense strand
caaccagaguuuaugcuau

SEQ ID NO: 2186656 - RNA, 19 nt, Homo sapiens
  misc_RNA (1)...(19): siRNA sense strand
guaauugacaucuccauga

SEQ ID NO: 2186657 - RNA, 19 nt, Homo sapiens
  misc_RNA (1)...(19): siRNA sense strand
cuacaugcuucucaaauuc

SEQ ID NO: 2186658 - RNA, 19 nt, Homo sapiens
  misc_RNA (1)...(19): siRNA sense strand
gcagaagccauaaggagaa

SEQ ID NO: 2186659 - RNA, 19 nt, Homo sapiens
  misc_RNA (1)...(19): siRNA sense strand
uaggcaagguggugacuaa

SEQ ID NO: 2186660 - RNA, 19 nt, Homo sapiens
  misc_RNA (1)...(19): siRNA sense strand
gccauaaggagaacucaua

SEQ ID NO: 2186661 - RNA, 19 nt, Homo sapiens
  misc_RNA (1)...(19): siRNA sense strand
ccucgcagcugacaaacuu

SEQ ID NO: 2186662 - RNA, 19 nt, Homo sapiens
  misc_RNA (1)...(19): siRNA sense strand
gaauguggacuuugcuuug

SEQ ID NO: 2186663 - RNA, 19 nt, Homo sapiens
  misc_RNA (1)...(19): siRNA sense strand
ccuacaugcuucucaaauu

SEQ ID NO: 2186664 - RNA, 19 nt, Homo sapiens
  misc_RNA (1)...(19): siRNA sense strand
caaauaugcucucuauagc

SEQ ID NO: 2186665 - RNA, 19 nt, Homo sapiens
  misc_RNA (1)...(19): siRNA sense strand
gacaggauaagaaggauaa

SEQ ID NO: 2186666 - RNA, 19 nt, Homo sapiens
  misc_RNA (1)...(19): siRNA sense strand
ucagccauguuccuuuaua

SEQ ID NO: 2186667 - RNA, 19 nt, Homo sapiens
  misc_RNA (1)...(19): siRNA sense strand
ggacuuugcuuugauucau

SEQ ID NO: 2186668 - RNA, 19 nt, Homo sapiens
  misc_RNA (1)...(19): siRNA sense strand
caacuguccugaaguggau

SEQ ID NO: 2186669 - RNA, 19 nt, Homo sapiens
  misc_RNA (1)...(19): siRNA sense strand
gauuaaugccugcaagauu

SEQ ID NO: 2186670 - RNA, 19 nt, Homo sapiens
  misc_RNA (1)...(19): siRNA sense strand
uugcaaauaugcucucuau

SEQ ID NO: 2186671 - RNA, 19 nt, Homo sapiens
  misc_RNA (1)...(19): siRNA sense strand
cagccauguuccuuuauaa

SEQ ID NO: 2186672 - RNA, 19 nt, Homo sapiens
  misc_RNA (1)...(19): siRNA sense strand
ccaagacgccgaauaucaa

SEQ ID NO: 2186673 - RNA, 19 nt, Homo sapiens
  misc_RNA (1)...(19): siRNA sense strand
ccaauaccauaccucaaga

SEQ ID NO: 2186674 - RNA, 19 nt, Homo sapiens
  misc_RNA (1)...(19): siRNA sense strand
gcaaccagaguuuaugcua

SEQ ID NO: 2186675 - RNA, 19 nt, Homo sapiens
  misc_RNA (1)...(19): siRNA sense strand
gacuuugcuuugauucaua

SEQ ID NO: 2186676 - RNA, 19 nt, Homo sapiens
  misc_RNA (1)...(19): siRNA sense strand
ccaguugaauguggacuuu

SEQ ID NO: 2186677 - RNA, 19 nt, Homo sapiens
  misc_RNA (1)...(19): siRNA sense strand
ccaagcuuguugcaaauau

SEQ ID NO: 2186678 - RNA, 19 nt, Homo sapiens
  misc_RNA (1)...(19): siRNA sense strand
uaucuugacucauggaauc

SEQ ID NO: 2186679 - RNA, 19 nt, Homo sapiens
  misc_RNA (1)...(19): siRNA sense strand
ccaaugaaguggacugcau

SEQ ID NO: 2186680 - RNA, 19 nt, Homo sapiens
  misc_RNA (1)...(19): siRNA sense strand
uaugcuaucuugacucaug

SEQ ID NO: 2186681 - RNA, 19 nt, Homo sapiens
  misc_RNA (1)...(19): siRNA sense strand
ggaagaacugcauuauugu

SEQ ID NO: 2186682 - RNA, 19 nt, Homo sapiens
  misc_RNA (1)...(19): siRNA sense strand
ggacuuaucccagaaaauu

SEQ ID NO: 2186683 - RNA, 19 nt, Homo sapiens
  misc_RNA (1)...(19): siRNA sense strand
uaauugacaucuccaugau

SEQ ID NO: 2186684 - RNA, 19 nt, Homo sapiens
  misc_RNA (1)...(19): siRNA sense strand
cagaguuuaugcuaucuug

SEQ ID NO: 2186685 - RNA, 19 nt, Homo sapiens
  misc_RNA (1)...(19): siRNA sense strand
auuaaugccugcaagauug

SEQ ID NO: 2186686 - RNA, 19 nt, Homo sapiens
  misc_RNA (1)...(19): siRNA sense strand
cgaaaucaacgacagucua

SEQ ID NO: 2186687 - RNA, 19 nt, Homo sapiens
  misc_RNA (1)...(19): siRNA sense strand
caacacugcaugcuuugaa

SEQ ID NO: 2186688 - RNA, 19 nt, Homo sapiens
  misc_RNA (1)...(19): siRNA sense strand
gccaagacgccgaauauca

SEQ ID NO: 2186689 - RNA, 19 nt, Homo sapiens
  misc_RNA (1)...(19): siRNA sense strand
caaugaaguggacugcaua

SEQ ID NO: 2186690 - RNA, 19 nt, Homo sapiens
  misc_RNA (1)...(19): siRNA sense strand
ugaaugaucguguggcuau

SEQ ID NO: 2186691 - RNA, 19 nt, Homo sapiens
  misc_RNA (1)...(19): siRNA sense strand
gaguggaagaacugcauua

SEQ ID NO: 2186692 - RNA, 19 nt, Homo sapiens
  misc_RNA (1)...(19): siRNA sense strand
gauccuugcagaagccaua

SEQ ID NO: 2186693 - RNA, 19 nt, Homo sapiens
  misc_RNA (1)...(19): siRNA sense strand
gaagaacugcauuauuguc

SEQ ID NO: 2186694 - RNA, 19 nt, Homo sapiens
  misc_RNA (1)...(19): siRNA sense strand
uggcuauccuuguagauga

SEQ ID NO: 2186695 - RNA, 19 nt, Homo sapiens
  misc_RNA (1)...(19): siRNA sense strand
caagcuuguugcaaauaug

SEQ ID NO: 2186696 - RNA, 19 nt, Homo sapiens
  misc_RNA (1)...(19): siRNA sense strand
ugacauggcagacacuugu

SEQ ID NO: 2186697 - RNA, 19 nt, Homo sapiens
  misc_RNA (1)...(19): siRNA sense strand
ugaaguggacugcauagug

SEQ ID NO: 2186698 - RNA, 19 nt, Homo sapiens
  misc_RNA (1)...(19): siRNA sense strand
ugaaguggauaagggagaa

SEQ ID NO: 2186699 - RNA, 19 nt, Homo sapiens
  misc_RNA (1)...(19): siRNA sense strand
auaaggagaacucauaaug

SEQ ID NO: 2186700 - RNA, 19 nt, Homo sapiens
  misc_RNA (1)...(19): siRNA sense strand
ccauaaggagaacucauaa

SEQ ID NO: 2186701 - RNA, 19 nt, Homo sapiens
  misc_RNA (1)...(19): siRNA sense strand
caagacgccgaauaucaaa

SEQ ID NO: 2186702 - RNA, 19 nt, Homo sapiens
  misc_RNA (1)...(19): siRNA sense strand
aauguggacuuugcuuuga

SEQ ID NO: 2186703 - RNA, 19 nt, Homo sapiens
  misc_RNA (1)...(19): siRNA sense strand
guggaagaacugcauuauu

SEQ ID NO: 2186704 - RNA, 19 nt, Homo sapiens
  misc_RNA (1)...(19): siRNA sense strand
gaacggaagaaggccaaug

SEQ ID NO: 2186705 - RNA, 19 nt, Homo sapiens
  misc_RNA (1)...(19): siRNA sense strand
aaucaacgacagucuaaug

SEQ ID NO: 2186706 - RNA, 19 nt, Homo sapiens
  misc_RNA (1)...(19): siRNA sense strand
uaaggagaacucauaaugg

SEQ ID NO: 2186707 - RNA, 19 nt, Homo sapiens
  misc_RNA (1)...(19): siRNA sense strand
aaccagaguuuaugcuauc

SEQ ID NO: 2186708 - RNA, 19 nt, Homo sapiens
  misc_RNA (1)...(19): siRNA sense strand
ucguguggcuauccuugua

SEQ ID NO: 2186709 - RNA, 19 nt, Homo sapiens
  misc_RNA (1)...(19): siRNA sense strand
cgacaggauaagaaggaua

SEQ ID NO: 2186710 - RNA, 19 nt, Homo sapiens
  misc_RNA (1)...(19): siRNA sense strand
ggagcaaccagaguuuaug

SEQ ID NO: 2186711 - RNA, 19 nt, Homo sapiens
  misc_RNA (1)...(19): siRNA sense strand
ugaauguggacuuugcuuu

SEQ ID NO: 2186712 - RNA, 19 nt, Homo sapiens
  misc_RNA (1)...(19): siRNA sense strand
uagcaggugcggaucauau

SEQ ID NO: 2186713 - RNA, 19 nt, Homo sapiens
  misc_RNA (1)...(19): siRNA sense strand
cagagugguuguggcgaaa

SEQ ID NO: 2186714 - RNA, 19 nt, Homo sapiens
  misc_RNA (1)...(19): siRNA sense strand
gcuagugggagaugugaau

SEQ ID NO: 2186715 - RNA, 19 nt, Homo sapiens
  misc_RNA (1)...(19): siRNA sense strand
uaauggagcuuuugaucau

SEQ ID NO: 2186716 - RNA, 19 nt, Homo sapiens
  misc_RNA (1)...(19): siRNA sense strand
ccuuaugcccgacaggaua

SEQ ID NO: 2186717 - RNA, 19 nt, Homo sapiens
  misc_RNA (1)...(19): siRNA sense strand
uuuaugcuaucuugacuca

SEQ ID NO: 2186718 - RNA, 19 nt, Homo sapiens
  misc_RNA (1)...(19): siRNA sense strand
ggcaagguggugacuaaga

SEQ ID NO: 2186719 - RNA, 19 nt, Homo sapiens
  misc_RNA (1)...(19): siRNA sense strand
auuauugucucgccagaug

SEQ ID NO: 2186720 - RNA, 19 nt, Homo sapiens
  misc_RNA (1)...(19): siRNA sense strand
gcaggugcggaucauauca

SEQ ID NO: 2186721 - RNA, 19 nt, Homo sapiens
  misc_RNA (1)...(19): siRNA sense strand
ccgaguuacugcagucauc

SEQ ID NO: 2186722 - RNA, 19 nt, Homo sapiens
  misc_RNA (1)...(19): siRNA sense strand
gagugugcguggagaggau

SEQ ID NO: 2186723 - RNA, 19 nt, Homo sapiens
  misc_RNA (1)...(19): siRNA sense strand
uggccaagacgccgaauau

SEQ ID NO: 2186724 - RNA, 19 nt, Homo sapiens
  misc_RNA (1)...(19): siRNA sense strand
gagugguuguggcgaaauc

SEQ ID NO: 2186725 - RNA, 19 nt, Homo sapiens
  misc_RNA (1)...(19): siRNA sense strand
uugcagaccaguugaaugu

SEQ ID NO: 2186726 - RNA, 19 nt, Homo sapiens
  misc_RNA (1)...(19): siRNA sense strand
agaauaucccugaguggaa

SEQ ID NO: 2186727 - RNA, 19 nt, Homo sapiens
  misc_RNA (1)...(19): siRNA sense strand
gccaagcuuguugcaaaua

SEQ ID NO: 2186728 - RNA, 19 nt, Homo sapiens
  misc_RNA (1)...(19): siRNA sense strand
uguggacuuugcuuugauu

SEQ ID NO: 2186729 - RNA, 19 nt, Homo sapiens
  misc_RNA (1)...(19): siRNA sense strand
gaccuacaugcuucucaaa

SEQ ID NO: 2186730 - RNA, 19 nt, Homo sapiens
  misc_RNA (1)...(19): siRNA sense strand
ccagccauuucucgcauca

SEQ ID NO: 2186731 - RNA, 19 nt, Homo sapiens
  misc_RNA (1)...(19): siRNA sense strand
cggaucauaucaucaccau

SEQ ID NO: 2186732 - RNA, 19 nt, Homo sapiens
  misc_RNA (1)...(19): siRNA sense strand
cuugacucauggaaucuuu

SEQ ID NO: 2186733 - RNA, 19 nt, Homo sapiens
  misc_RNA (1)...(19): siRNA sense strand
gagcuuuugaucaugauua

SEQ ID NO: 2186734 - RNA, 19 nt, Homo sapiens
  misc_RNA (1)...(19): siRNA sense strand
agagccaacuguccugaag

SEQ ID NO: 2186735 - RNA, 19 nt, Homo sapiens
  misc_RNA (1)...(19): siRNA sense strand
uaucaucaccauggaccua

SEQ ID NO: 2186736 - RNA, 19 nt, Homo sapiens
  misc_RNA (1)...(19): siRNA sense strand
gagcaaccagaguuuaugc

SEQ ID NO: 2186737 - RNA, 19 nt, Homo sapiens
  misc_RNA (1)...(19): siRNA sense strand
cagcucccaccaggacuua

SEQ ID NO: 2186738 - RNA, 19 nt, Homo sapiens
  misc_RNA (1)...(19): siRNA sense strand
ugacaucuccaugauccuu

SEQ ID NO: 2186739 - RNA, 19 nt, Homo sapiens
  misc_RNA (1)...(19): siRNA sense strand
guagaugacauggcagaca

SEQ ID NO: 2186740 - RNA, 19 nt, Homo sapiens
  misc_RNA (1)...(19): siRNA sense strand
gaaugaucguguggcuauc

SEQ ID NO: 2186741 - RNA, 19 nt, Homo sapiens
  misc_RNA (1)...(19): siRNA sense strand
agccaacuguccugaagug

SEQ ID NO: 2186742 - RNA, 19 nt, Homo sapiens
  misc_RNA (1)...(19): siRNA sense strand
cauaaggagaacucauaau

SEQ ID NO: 2186743 - RNA, 19 nt, Homo sapiens
  misc_RNA (1)...(19): siRNA sense strand
aacggaagaaggccaauga

SEQ ID NO: 2186744 - RNA, 19 nt, Homo sapiens
  misc_RNA (1)...(19): siRNA sense strand
gcagcucccaccaggacuu

SEQ ID NO: 2186745 - RNA, 19 nt, Homo sapiens
  misc_RNA (1)...(19): siRNA sense strand
gauaauaccagaccgauuu

SEQ ID NO: 2186746 - RNA, 19 nt, Homo sapiens
  misc_RNA (1)...(19): siRNA sense strand
gaugcuacaugguuauaua

SEQ ID NO: 2186747 - RNA, 19 nt, Homo sapiens
  misc_RNA (1)...(19): siRNA sense strand
caguauggcuuccuuaauu

SEQ ID NO: 2186748 - RNA, 19 nt, Homo sapiens
  misc_RNA (1)...(19): siRNA sense strand
ggagauacacccuauauuc

SEQ ID NO: 2186749 - RNA, 19 nt, Homo sapiens
  misc_RNA (1)...(19): siRNA sense strand
aaacggagauuuaaauugg

SEQ ID NO: 2186750 - RNA, 19 nt, Homo sapiens
  misc_RNA (1)...(19): siRNA sense strand
gcaaugguuuacagauauu

SEQ ID NO: 2186751 - RNA, 19 nt, Homo sapiens
  misc_RNA (1)...(19): siRNA sense strand
uaaagaaggcaaugcagua

SEQ ID NO: 2186752 - RNA, 19 nt, Homo sapiens
  misc_RNA (1)...(19): siRNA sense strand
gaccaaagagugcaucaaa

SEQ ID NO: 2186753 - RNA, 19 nt, Homo sapiens
  misc_RNA (1)...(19): siRNA sense strand
gcuacaucaugaagcauua

SEQ ID NO: 2186754 - RNA, 19 nt, Homo sapiens
  misc_RNA (1)...(19): siRNA sense strand
agaagcagcauauagaaua

SEQ ID NO: 2186755 - RNA, 19 nt, Homo sapiens
  misc_RNA (1)...(19): siRNA sense strand
ggcaaugguuuacagauau

SEQ ID NO: 2186756 - RNA, 19 nt, Homo sapiens
  misc_RNA (1)...(19): siRNA sense strand
gugcugaccuuuacacugu

SEQ ID NO: 2186757 - RNA, 19 nt, Homo sapiens
  misc_RNA (1)...(19): siRNA sense strand
cagauauuguugcaagaua

SEQ ID NO: 2186758 - RNA, 19 nt, Homo sapiens
  misc_RNA (1)...(19): siRNA sense strand
uggcaaugguuuacagaua

SEQ ID NO: 2186759 - RNA, 19 nt, Homo sapiens
  misc_RNA (1)...(19): siRNA sense strand
cgaaaucaauggagugaca

SEQ ID NO: 2186760 - RNA, 19 nt, Homo sapiens
  misc_RNA (1)...(19): siRNA sense strand
cuacaugguuauauacuug

SEQ ID NO: 2186761 - RNA, 19 nt, Homo sapiens
  misc_RNA (1)...(19): siRNA sense strand
aaacuucucucugguguug

SEQ ID NO: 2186762 - RNA, 19 nt, Homo sapiens
  misc_RNA (1)...(19): siRNA sense strand
uuacacuucuugacuguuu

SEQ ID NO: 2186763 - RNA, 19 nt, Homo sapiens
  misc_RNA (1)...(19): siRNA sense strand
ccaaagagugcaucaaaug

SEQ ID NO: 2186764 - RNA, 19 nt, Homo sapiens
  misc_RNA (1)...(19): siRNA sense strand
cagcauagauaaugaacuc

SEQ ID NO: 2186765 - RNA, 19 nt, Homo sapiens
  misc_RNA (1)...(19): siRNA sense strand
uauggaagcugcaauuucu

SEQ ID NO: 2186766 - RNA, 19 nt, Homo sapiens
  misc_RNA (1)...(19): siRNA sense strand
guacauuauuucagcauag

SEQ ID NO: 2186767 - RNA, 19 nt, Homo sapiens
  misc_RNA (1)...(19): siRNA sense strand
gacacaaggugauagaagu

SEQ ID NO: 2186768 - RNA, 19 nt, Homo sapiens
  misc_RNA (1)...(19): siRNA sense strand
guuggaugcuacaugguua

SEQ ID NO: 2186769 - RNA, 19 nt, Homo sapiens
  misc_RNA (1)...(19): siRNA sense strand
guugucaucugguggauug

SEQ ID NO: 2186770 - RNA, 19 nt, Homo sapiens
  misc_RNA (1)...(19): siRNA sense strand
gauacacccuauauuccuu

SEQ ID NO: 2186771 - RNA, 19 nt, Homo sapiens
  misc_RNA (1)...(19): siRNA sense strand
aaagagugcaucaaaugua

SEQ ID NO: 2186772 - RNA, 19 nt, Homo sapiens
  misc_RNA (1)...(19): siRNA sense strand
gucaaaagauuucuggaua

SEQ ID NO: 2186773 - RNA, 19 nt, Homo sapiens
  misc_RNA (1)...(19): siRNA sense strand
gcuacaugguuauauacuu

SEQ ID NO: 2186774 - RNA, 19 nt, Homo sapiens
  misc_RNA (1)...(19): siRNA sense strand
guugaugacauuuccauaa

SEQ ID NO: 2186775 - RNA, 19 nt, Homo sapiens
  misc_RNA (1)...(19): siRNA sense strand
aagcugcaauuucuacauu

SEQ ID NO: 2186776 - RNA, 19 nt, Homo sapiens
  misc_RNA (1)...(19): siRNA sense strand
uuucagagaugcugccuau

SEQ ID NO: 2186777 - RNA, 19 nt, Homo sapiens
  misc_RNA (1)...(19): siRNA sense strand
ggagugacacaaggugaua

SEQ ID NO: 2186778 - RNA, 19 nt, Homo sapiens
  misc_RNA (1)...(19): siRNA sense strand
gaaucaagaccagcaagaa

SEQ ID NO: 2186779 - RNA, 19 nt, Homo sapiens
  misc_RNA (1)...(19): siRNA sense strand
agcaagaacccaaaccuua

SEQ ID NO: 2186780 - RNA, 19 nt, Homo sapiens
  misc_RNA (1)...(19): siRNA sense strand
gauuguuugugacuacauu

SEQ ID NO: 2186781 - RNA, 19 nt, Homo sapiens
  misc_RNA (1)...(19): siRNA sense strand
gcaagaacccaaaccuuac

SEQ ID NO: 2186782 - RNA, 19 nt, Homo sapiens
  misc_RNA (1)...(19): siRNA sense strand
cagagaugcugccuaugga

SEQ ID NO: 2186783 - RNA, 19 nt, Homo sapiens
  misc_RNA (1)...(19): siRNA sense strand
cagagcagccuucuccaaa

SEQ ID NO: 2186784 - RNA, 19 nt, Homo sapiens
  misc_RNA (1)...(19): siRNA sense strand
aguauggcuuccuuaauuu

SEQ ID NO: 2186785 - RNA, 19 nt, Homo sapiens
  misc_RNA (1)...(19): siRNA sense strand
cauagauaaugaacucgaa

SEQ ID NO: 2186786 - RNA, 19 nt, Homo sapiens
  misc_RNA (1)...(19): siRNA sense strand
gauaaugaacucgaauaug

SEQ ID NO: 2186787 - RNA, 19 nt, Homo sapiens
  misc_RNA (1)...(19): siRNA sense strand
uaaauggggucgagaauca

SEQ ID NO: 2186788 - RNA, 19 nt, Homo sapiens
  misc_RNA (1)...(19): siRNA sense strand
gagcagccuucuccaaacu

SEQ ID NO: 2186789 - RNA, 19 nt, Homo sapiens
  misc_RNA (1)...(19): siRNA sense strand
caaagagugcaucaaaugu

SEQ ID NO: 2186790 - RNA, 19 nt, Homo sapiens
  misc_RNA (1)...(19): siRNA sense strand
caacucauuuaaccuugau

SEQ ID NO: 2186791 - RNA, 19 nt, Homo sapiens
  misc_RNA (1)...(19): siRNA sense strand
ucugguggauuguuuguga

SEQ ID NO: 2186792 - RNA, 19 nt, Homo sapiens
  misc_RNA (1)...(19): siRNA sense strand
ggagaauggacaacacaga

SEQ ID NO: 2186793 - RNA, 19 nt, Homo sapiens
  misc_RNA (1)...(19): siRNA sense strand
agaaggcaaugcaguaugg

SEQ ID NO: 2186794 - RNA, 19 nt, Homo sapiens
  misc_RNA (1)...(19): siRNA sense strand
gcagaaaacggagauuuaa

SEQ ID NO: 2186795 - RNA, 19 nt, Homo sapiens
  misc_RNA (1)...(19): siRNA sense strand
ccagaagcagcauauagaa

SEQ ID NO: 2186796 - RNA, 19 nt, Homo sapiens
  misc_RNA (1)...(19): siRNA sense strand
gcagccuucuccaaacuuc

SEQ ID NO: 2186797 - RNA, 19 nt, Homo sapiens
  misc_RNA (1)...(19): siRNA sense strand
gcaguauggcuuccuuaau

SEQ ID NO: 2186798 - RNA, 19 nt, Homo sapiens
  misc_RNA (1)...(19): siRNA sense strand
uauauuccuuucagagaug

SEQ ID NO: 2186799 - RNA, 19 nt, Homo sapiens
  misc_RNA (1)...(19): siRNA sense strand
ucaccgaucgccuucguuu

SEQ ID NO: 2186800 - RNA, 19 nt, Homo sapiens
  misc_RNA (1)...(19): siRNA sense strand
gcaggagaauggacaacac

SEQ ID NO: 2186801 - RNA, 19 nt, Homo sapiens
  misc_RNA (1)...(19): siRNA sense strand
caaaugcugccuuccuugu

SEQ ID NO: 2186802 - RNA, 19 nt, Homo sapiens
  misc_RNA (1)...(19): siRNA sense strand
gucaucugguggauuguuu

SEQ ID NO: 2186803 - RNA, 19 nt, Homo sapiens
  misc_RNA (1)...(19): siRNA sense strand
uaugaugccaaacgcuuua

SEQ ID NO: 2186804 - RNA, 19 nt, Homo sapiens
  misc_RNA (1)...(19): siRNA sense strand
ucagagaugcugccuaugg

SEQ ID NO: 2186805 - RNA, 19 nt, Homo sapiens
  misc_RNA (1)...(19): siRNA sense strand
ggauaauaccagaccgauu

SEQ ID NO: 2186806 - RNA, 19 nt, Homo sapiens
  misc_RNA (1)...(19): siRNA sense strand
aaugcugccuuccuuguug

SEQ ID NO: 2186807 - RNA, 19 nt, Homo sapiens
  misc_RNA (1)...(19): siRNA sense strand
ucgcacaggcacucugaua

SEQ ID NO: 2186808 - RNA, 19 nt, Homo sapiens
  misc_RNA (1)...(19): siRNA sense strand
auaccagaccgauuuauug

SEQ ID NO: 2186809 - RNA, 19 nt, Homo sapiens
  misc_RNA (1)...(19): siRNA sense strand
cuauauuccuuucagagau

SEQ ID NO: 2186810 - RNA, 19 nt, Homo sapiens
  misc_RNA (1)...(19): siRNA sense strand
gacagcagccgagaccauu

SEQ ID NO: 2186811 - RNA, 19 nt, Homo sapiens
  misc_RNA (1)...(19): siRNA sense strand
gaacucgaauaugagaacu

SEQ ID NO: 2186812 - RNA, 19 nt, Homo sapiens
  misc_RNA (1)...(19): siRNA sense strand
gcugcaauuucuacauuac

SEQ ID NO: 2186813 - RNA, 19 nt, Homo sapiens
  misc_RNA (1)...(19): siRNA sense strand
guuugugacuacauucuuc

SEQ ID NO: 2186814 - RNA, 19 nt, Homo sapiens
  misc_RNA (1)...(19): siRNA sense strand
gacgaaaucaauggaguga

SEQ ID NO: 2186815 - RNA, 19 nt, Homo sapiens
  misc_RNA (1)...(19): siRNA sense strand
ucccgagacuuauauucaa

SEQ ID NO: 2186816 - RNA, 19 nt, Homo sapiens
  misc_RNA (1)...(19): siRNA sense strand
cuguggaccucauucaaga

SEQ ID NO: 2186817 - RNA, 19 nt, Homo sapiens
  misc_RNA (1)...(19): siRNA sense strand
cccagaagcagcauauaga

SEQ ID NO: 2186818 - RNA, 19 nt, Homo sapiens
  misc_RNA (1)...(19): siRNA sense strand
ucaaucuggcaaugguuua

SEQ ID NO: 2186819 - RNA, 19 nt, Homo sapiens
  misc_RNA (1)...(19): siRNA sense strand
gcacaggcacucugauagc

SEQ ID NO: 2186820 - RNA, 19 nt, Homo sapiens
  misc_RNA (1)...(19): siRNA sense strand
caaaagauuucuggauauc

SEQ ID NO: 2186821 - RNA, 19 nt, Homo sapiens
  misc_RNA (1)...(19): siRNA sense strand
cauuacacuucuugacugu

SEQ ID NO: 2186822 - RNA, 19 nt, Homo sapiens
  misc_RNA (1)...(19): siRNA sense strand
gagauacacccuauauucc

SEQ ID NO: 2186823 - RNA, 19 nt, Homo sapiens
  misc_RNA (1)...(19): siRNA sense strand
aagagugcaucaaauguac

SEQ ID NO: 2186824 - RNA, 19 nt, Homo sapiens
  misc_RNA (1)...(19): siRNA sense strand
ucaugaagcauuacaggau

SEQ ID NO: 2186825 - RNA, 19 nt, Homo sapiens
  misc_RNA (1)...(19): siRNA sense strand
gaagcugcaauuucuacau

SEQ ID NO: 2186826 - RNA, 19 nt, Homo sapiens
  misc_RNA (1)...(19): siRNA sense strand
gaugacgacgaaaucaaug

SEQ ID NO: 2186827 - RNA, 19 nt, Homo sapiens
  misc_RNA (1)...(19): siRNA sense strand
cagcaagaacccaaaccuu

SEQ ID NO: 2186828 - RNA, 19 nt, Homo sapiens
  misc_RNA (1)...(19): siRNA sense strand
ugagggugccauugcagua

SEQ ID NO: 2186829 - RNA, 19 nt, Homo sapiens
  misc_RNA (1)...(19): siRNA sense strand
ucaccaugaucuuuucuuu

SEQ ID NO: 2186830 - RNA, 19 nt, Homo sapiens
  misc_RNA (1)...(19): siRNA sense strand
aaagaaggcaaugcaguau

SEQ ID NO: 2186831 - RNA, 19 nt, Homo sapiens
  misc_RNA (1)...(19): siRNA sense strand
cagaagcagcauauagaau

SEQ ID NO: 2186832 - RNA, 19 nt, Homo sapiens
  misc_RNA (1)...(19): siRNA sense strand
acucgaauaugagaacuuc

SEQ ID NO: 2186833 - RNA, 19 nt, Homo sapiens
  misc_RNA (1)...(19): siRNA sense strand
auaauaccagaccgauuua

SEQ ID NO: 2186834 - RNA, 19 nt, Homo sapiens
  misc_RNA (1)...(19): siRNA sense strand
cuacugaugccauugucaa

SEQ ID NO: 2186835 - RNA, 19 nt, Homo sapiens
  misc_RNA (1)...(19): siRNA sense strand
gguggauuguuugugacua

SEQ ID NO: 2186836 - RNA, 19 nt, Homo sapiens
  misc_RNA (1)...(19): siRNA sense strand
accaaagagugcaucaaau

SEQ ID NO: 2186837 - RNA, 19 nt, Homo sapiens
  misc_RNA (1)...(19): siRNA sense strand
uggcugugcugaccuuuac

SEQ ID NO: 2186838 - RNA, 19 nt, Homo sapiens
  misc_RNA (1)...(19): siRNA sense strand
guuuacagauauuguugca

SEQ ID NO: 2186839 - RNA, 19 nt, Homo sapiens
  misc_RNA (1)...(19): siRNA sense strand
ggucgcacaggcacucuga

SEQ ID NO: 2186840 - RNA, 19 nt, Homo sapiens
  misc_RNA (1)...(19): siRNA sense strand
ccuauauuccuuucagaga

SEQ ID NO: 2186841 - RNA, 19 nt, Homo sapiens
  misc_RNA (1)...(19): siRNA sense strand
caucaccgaucgccuucgu

SEQ ID NO: 2186842 - RNA, 19 nt, Homo sapiens
  misc_RNA (1)...(19): siRNA sense strand
guggauuguuugugacuac

SEQ ID NO: 2186843 - RNA, 19 nt, Homo sapiens
  misc_RNA (1)...(19): siRNA sense strand
ugacacaaggugauagaag

SEQ ID NO: 2186844 - RNA, 19 nt, Homo sapiens
  misc_RNA (1)...(19): siRNA sense strand
uuguaaagcuggccuuggu

SEQ ID NO: 2186845 - RNA, 19 nt, Homo sapiens
  misc_RNA (1)...(19): siRNA sense strand
gauaauaccagaccgauuu

SEQ ID NO: 2186846 - RNA, 19 nt, Homo sapiens
  misc_RNA (1)...(19): siRNA sense strand
gaugcuacaugguuauaua

SEQ ID NO: 2186847 - RNA, 19 nt, Homo sapiens
  misc_RNA (1)...(19): siRNA sense strand
caguauggcuuccuuaauu

SEQ ID NO: 2186848 - RNA, 19 nt, Homo sapiens
  misc_RNA (1)...(19): siRNA sense strand
ggagauacacccuauauuc

SEQ ID NO: 2186849 - RNA, 19 nt, Homo sapiens
  misc_RNA (1)...(19): siRNA sense strand
aaacggagauuuaaauugg

SEQ ID NO: 2186850 - RNA, 19 nt, Homo sapiens
  misc_RNA (1)...(19): siRNA sense strand
gcaaugguuuacagauauu

SEQ ID NO: 2186851 - RNA, 19 nt, Homo sapiens
  misc_RNA (1)...(19): siRNA sense strand
uaaagaaggcaaugcagua

SEQ ID NO: 2186852 - RNA, 19 nt, Homo sapiens
  misc_RNA (1)...(19): siRNA sense strand
gaccaaagagugcaucaaa

SEQ ID NO: 2186853 - RNA, 19 nt, Homo sapiens
  misc_RNA (1)...(19): siRNA sense strand
gcuacaucaugaagcauua

SEQ ID NO: 2186854 - RNA, 19 nt, Homo sapiens
  misc_RNA (1)...(19): siRNA sense strand
agaagcagcauauagaaua

SEQ ID NO: 2186855 - RNA, 19 nt, Homo sapiens
  misc_RNA (1)...(19): siRNA sense strand
ggcaaugguuuacagauau

SEQ ID NO: 2186856 - RNA, 19 nt, Homo sapiens
  misc_RNA (1)...(19): siRNA sense strand
gugcugaccuuuacacugu

SEQ ID NO: 2186857 - RNA, 19 nt, Homo sapiens
  misc_RNA (1)...(19): siRNA sense strand
cagauauuguugcaagaua

SEQ ID NO: 2186858 - RNA, 19 nt, Homo sapiens
  misc_RNA (1)...(19): siRNA sense strand
uggcaaugguuuacagaua

SEQ ID NO: 2186859 - RNA, 19 nt, Homo sapiens
  misc_RNA (1)...(19): siRNA sense strand
cgaaaucaauggagugaca

SEQ ID NO: 2186860 - RNA, 19 nt, Homo sapiens
  misc_RNA (1)...(19): siRNA sense strand
cuacaugguuauauacuug

SEQ ID NO: 2186861 - RNA, 19 nt, Homo sapiens
  misc_RNA (1)...(19): siRNA sense strand
aaacuucucucugguguug

SEQ ID NO: 2186862 - RNA, 19 nt, Homo sapiens
  misc_RNA (1)...(19): siRNA sense strand
uuacacuucuugacuguuu

SEQ ID NO: 2186863 - RNA, 19 nt, Homo sapiens
  misc_RNA (1)...(19): siRNA sense strand
ccaaagagugcaucaaaug

SEQ ID NO: 2186864 - RNA, 19 nt, Homo sapiens
  misc_RNA (1)...(19): siRNA sense strand
cagcauagauaaugaacuc

SEQ ID NO: 2186865 - RNA, 19 nt, Homo sapiens
  misc_RNA (1)...(19): siRNA sense strand
uauggaagcugcaauuucu

SEQ ID NO: 2186866 - RNA, 19 nt, Homo sapiens
  misc_RNA (1)...(19): siRNA sense strand
guacauuauuucagcauag

SEQ ID NO: 2186867 - RNA, 19 nt, Homo sapiens
  misc_RNA (1)...(19): siRNA sense strand
gacacaaggugauagaagu

SEQ ID NO: 2186868 - RNA, 19 nt, Homo sapiens
  misc_RNA (1)...(19): siRNA sense strand
guuggaugcuacaugguua

SEQ ID NO: 2186869 - RNA, 19 nt, Homo sapiens
  misc_RNA (1)...(19): siRNA sense strand
guugucaucugguggauug

SEQ ID NO: 2186870 - RNA, 19 nt, Homo sapiens
  misc_RNA (1)...(19): siRNA sense strand
gauacacccuauauuccuu

SEQ ID NO: 2186871 - RNA, 19 nt, Homo sapiens
  misc_RNA (1)...(19): siRNA sense strand
aaagagugcaucaaaugua

SEQ ID NO: 2186872 - RNA, 19 nt, Homo sapiens
  misc_RNA (1)...(19): siRNA sense strand
gucaaaagauuucuggaua

SEQ ID NO: 2186873 - RNA, 19 nt, Homo sapiens
  misc_RNA (1)...(19): siRNA sense strand
gcuacaugguuauauacuu

SEQ ID NO: 2186874 - RNA, 19 nt, Homo sapiens
  misc_RNA (1)...(19): siRNA sense strand
guugaugacauuuccauaa

SEQ ID NO: 2186875 - RNA, 19 nt, Homo sapiens
  misc_RNA (1)...(19): siRNA sense strand
aagcugcaauuucuacauu

SEQ ID NO: 2186876 - RNA, 19 nt, Homo sapiens
  misc_RNA (1)...(19): siRNA sense strand
uuucagagaugcugccuau

SEQ ID NO: 2186877 - RNA, 19 nt, Homo sapiens
  misc_RNA (1)...(19): siRNA sense strand
ggagugacacaaggugaua

SEQ ID NO: 2186878 - RNA, 19 nt, Homo sapiens
  misc_RNA (1)...(19): siRNA sense strand
gaaucaagaccagcaagaa

SEQ ID NO: 2186879 - RNA, 19 nt, Homo sapiens
  misc_RNA (1)...(19): siRNA sense strand
agcaagaacccaaaccuua

SEQ ID NO: 2186880 - RNA, 19 nt, Homo sapiens
  misc_RNA (1)...(19): siRNA sense strand
gauuguuugugacuacauu

SEQ ID NO: 2186881 - RNA, 19 nt, Homo sapiens
  misc_RNA (1)...(19): siRNA sense strand
gcaagaacccaaaccuuac

SEQ ID NO: 2186882 - RNA, 19 nt, Homo sapiens
  misc_RNA (1)...(19): siRNA sense strand
cagagaugcugccuaugga

SEQ ID NO: 2186883 - RNA, 19 nt, Homo sapiens
  misc_RNA (1)...(19): siRNA sense strand
cagagcagccuucuccaaa

SEQ ID NO: 2186884 - RNA, 19 nt, Homo sapiens
  misc_RNA (1)...(19): siRNA sense strand
aguauggcuuccuuaauuu

SEQ ID NO: 2186885 - RNA, 19 nt, Homo sapiens
  misc_RNA (1)...(19): siRNA sense strand
cauagauaaugaacucgaa

SEQ ID NO: 2186886 - RNA, 19 nt, Homo sapiens
  misc_RNA (1)...(19): siRNA sense strand
uaaauggggucgagaauca

SEQ ID NO: 2186887 - RNA, 19 nt, Homo sapiens
  misc_RNA (1)...(19): siRNA sense strand
caaagagugcaucaaaugu

SEQ ID NO: 2186888 - RNA, 19 nt, Homo sapiens
  misc_RNA (1)...(19): siRNA sense strand
gagcagccuucuccaaacu

SEQ ID NO: 2186889 - RNA, 19 nt, Homo sapiens
  misc_RNA (1)...(19): siRNA sense strand
gauaaugaacucgaauaug

SEQ ID NO: 2186890 - RNA, 19 nt, Homo sapiens
  misc_RNA (1)...(19): siRNA sense strand
caacucauuuaaccuugau

SEQ ID NO: 2186891 - RNA, 19 nt, Homo sapiens
  misc_RNA (1)...(19): siRNA sense strand
ucugguggauuguuuguga

SEQ ID NO: 2186892 - RNA, 19 nt, Homo sapiens
  misc_RNA (1)...(19): siRNA sense strand
ggagaauggacaacacaga

SEQ ID NO: 2186893 - RNA, 19 nt, Homo sapiens
  misc_RNA (1)...(19): siRNA sense strand
agaaggcaaugcaguaugg

SEQ ID NO: 2186894 - RNA, 19 nt, Homo sapiens
  misc_RNA (1)...(19): siRNA sense strand
gcagaaaacggagauuuaa

SEQ ID NO: 2186895 - RNA, 19 nt, Homo sapiens
  misc_RNA (1)...(19): siRNA sense strand
ccagaagcagcauauagaa

SEQ ID NO: 2186896 - RNA, 19 nt, Homo sapiens
  misc_RNA (1)...(19): siRNA sense strand
gcagccuucuccaaacuuc

SEQ ID NO: 2186897 - RNA, 19 nt, Homo sapiens
  misc_RNA (1)...(19): siRNA sense strand
gcaguauggcuuccuuaau

SEQ ID NO: 2186898 - RNA, 19 nt, Homo sapiens
  misc_RNA (1)...(19): siRNA sense strand
uauauuccuuucagagaug

SEQ ID NO: 2186899 - RNA, 19 nt, Homo sapiens
  misc_RNA (1)...(19): siRNA sense strand
ucaccgaucgccuucguuu

SEQ ID NO: 2186900 - RNA, 19 nt, Homo sapiens
  misc_RNA (1)...(19): siRNA sense strand
gcaggagaauggacaacac

SEQ ID NO: 2186901 - RNA, 19 nt, Homo sapiens
  misc_RNA (1)...(19): siRNA sense strand
caaaugcugccuuccuugu

SEQ ID NO: 2186902 - RNA, 19 nt, Homo sapiens
  misc_RNA (1)...(19): siRNA sense strand
gucaucugguggauuguuu

SEQ ID NO: 2186903 - RNA, 19 nt, Homo sapiens
  misc_RNA (1)...(19): siRNA sense strand
uaugaugccaaacgcuuua

SEQ ID NO: 2186904 - RNA, 19 nt, Homo sapiens
  misc_RNA (1)...(19): siRNA sense strand
ucagagaugcugccuaugg

SEQ ID NO: 2186905 - RNA, 19 nt, Homo sapiens
  misc_RNA (1)...(19): siRNA sense strand
ggauaauaccagaccgauu

SEQ ID NO: 2186906 - RNA, 19 nt, Homo sapiens
  misc_RNA (1)...(19): siRNA sense strand
aaugcugccuuccuuguug

SEQ ID NO: 2186907 - RNA, 19 nt, Homo sapiens
  misc_RNA (1)...(19): siRNA sense strand
ucgcacaggcacucugaua

SEQ ID NO: 2186908 - RNA, 19 nt, Homo sapiens
  misc_RNA (1)...(19): siRNA sense strand
auaccagaccgauuuauug

SEQ ID NO: 2186909 - RNA, 19 nt, Homo sapiens
  misc_RNA (1)...(19): siRNA sense strand
cuauauuccuuucagagau

SEQ ID NO: 2186910 - RNA, 19 nt, Homo sapiens
  misc_RNA (1)...(19): siRNA sense strand
gacagcagccgagaccauu

SEQ ID NO: 2186911 - RNA, 19 nt, Homo sapiens
  misc_RNA (1)...(19): siRNA sense strand
gaacucgaauaugagaacu

SEQ ID NO: 2186912 - RNA, 19 nt, Homo sapiens
  misc_RNA (1)...(19): siRNA sense strand
gcugcaauuucuacauuac

SEQ ID NO: 2186913 - RNA, 19 nt, Homo sapiens
  misc_RNA (1)...(19): siRNA sense strand
guuugugacuacauucuuc

SEQ ID NO: 2186914 - RNA, 19 nt, Homo sapiens
  misc_RNA (1)...(19): siRNA sense strand
gacgaaaucaauggaguga

SEQ ID NO: 2186915 - RNA, 19 nt, Homo sapiens
  misc_RNA (1)...(19): siRNA sense strand
ucccgagacuuauauucaa

SEQ ID NO: 2186916 - RNA, 19 nt, Homo sapiens
  misc_RNA (1)...(19): siRNA sense strand
cuguggaccucauucaaga

SEQ ID NO: 2186917 - RNA, 19 nt, Homo sapiens
  misc_RNA (1)...(19): siRNA sense strand
cccagaagcagcauauaga

SEQ ID NO: 2186918 - RNA, 19 nt, Homo sapiens
  misc_RNA (1)...(19): siRNA sense strand
gcacaggcacucugauagc

SEQ ID NO: 2186919 - RNA, 19 nt, Homo sapiens
  misc_RNA (1)...(19): siRNA sense strand
caaaagauuucuggauauc

SEQ ID NO: 2186920 - RNA, 19 nt, Homo sapiens
  misc_RNA (1)...(19): siRNA sense strand
ucaaucuggcaaugguuua

SEQ ID NO: 2186921 - RNA, 19 nt, Homo sapiens
  misc_RNA (1)...(19): siRNA sense strand
cauuacacuucuugacugu

SEQ ID NO: 2186922 - RNA, 19 nt, Homo sapiens
  misc_RNA (1)...(19): siRNA sense strand
gagauacacccuauauucc

SEQ ID NO: 2186923 - RNA, 19 nt, Homo sapiens
  misc_RNA (1)...(19): siRNA sense strand
aagagugcaucaaauguac

SEQ ID NO: 2186924 - RNA, 19 nt, Homo sapiens
  misc_RNA (1)...(19): siRNA sense strand
ucaugaagcauuacaggau

SEQ ID NO: 2186925 - RNA, 19 nt, Homo sapiens
  misc_RNA (1)...(19): siRNA sense strand
gaagcugcaauuucuacau

SEQ ID NO: 2186926 - RNA, 19 nt, Homo sapiens
  misc_RNA (1)...(19): siRNA sense strand
gaugacgacgaaaucaaug

SEQ ID NO: 2186927 - RNA, 19 nt, Homo sapiens
  misc_RNA (1)...(19): siRNA sense strand
cagcaagaacccaaaccuu

SEQ ID NO: 2186928 - RNA, 19 nt, Homo sapiens
  misc_RNA (1)...(19): siRNA sense strand
ugagggugccauugcagua

SEQ ID NO: 2186929 - RNA, 19 nt, Homo sapiens
  misc_RNA (1)...(19): siRNA sense strand
ucaccaugaucuuuucuuu

SEQ ID NO: 2186930 - RNA, 19 nt, Homo sapiens
  misc_RNA (1)...(19): siRNA sense strand
aaagaaggcaaugcaguau

SEQ ID NO: 2186931 - RNA, 19 nt, Homo sapiens
  misc_RNA (1)...(19): siRNA sense strand
cagaagcagcauauagaau

SEQ ID NO: 2186932 - RNA, 19 nt, Homo sapiens
  misc_RNA (1)...(19): siRNA sense strand
auaauaccagaccgauuua

SEQ ID NO: 2186933 - RNA, 19 nt, Homo sapiens
  misc_RNA (1)...(19): siRNA sense strand
acucgaauaugagaacuuc

SEQ ID NO: 2186934 - RNA, 19 nt, Homo sapiens
  misc_RNA (1)...(19): siRNA sense strand
cuacugaugccauugucaa

SEQ ID NO: 2186935 - RNA, 19 nt, Homo sapiens
  misc_RNA (1)...(19): siRNA sense strand
gguggauuguuugugacua

SEQ ID NO: 2186936 - RNA, 19 nt, Homo sapiens
  misc_RNA (1)...(19): siRNA sense strand
ccuauauuccuuucagaga

SEQ ID NO: 2186937 - RNA, 19 nt, Homo sapiens
  misc_RNA (1)...(19): siRNA sense strand
uggcugugcugaccuuuac

SEQ ID NO: 2186938 - RNA, 19 nt, Homo sapiens
  misc_RNA (1)...(19): siRNA sense strand
guuuacagauauuguugca

SEQ ID NO: 2186939 - RNA, 19 nt, Homo sapiens
  misc_RNA (1)...(19): siRNA sense strand
ggucgcacaggcacucuga

SEQ ID NO: 2186940 - RNA, 19 nt, Homo sapiens
  misc_RNA (1)...(19): siRNA sense strand
accaaagagugcaucaaau

SEQ ID NO: 2186941 - RNA, 19 nt, Homo sapiens
  misc_RNA (1)...(19): siRNA sense strand
uuguaaagcuggccuuggu

SEQ ID NO: 2186942 - RNA, 19 nt, Homo sapiens
  misc_RNA (1)...(19): siRNA sense strand
guggauuguuugugacuac

SEQ ID NO: 2186943 - RNA, 19 nt, Homo sapiens
  misc_RNA (1)...(19): siRNA sense strand
ugacacaaggugauagaag

SEQ ID NO: 2186944 - RNA, 19 nt, Homo sapiens
  misc_RNA (1)...(19): siRNA sense strand
caucaccgaucgccuucgu

SEQ ID NO: 2186945 - RNA, 19 nt, Homo sapiens
  misc_RNA (1)...(19): siRNA sense strand
aagcagggcccuagcagua

SEQ ID NO: 2186946 - RNA, 19 nt, Homo sapiens
  misc_RNA (1)...(19): siRNA sense strand
gcugcaggcugagcuagaa

SEQ ID NO: 2186947 - RNA, 19 nt, Homo sapiens
  misc_RNA (1)...(19): siRNA sense strand
gcagggcccuagcaguaag

SEQ ID NO: 2186948 - RNA, 19 nt, Homo sapiens
  misc_RNA (1)...(19): siRNA sense strand
ggcccuagcaguaagaaga

SEQ ID NO: 2186949 - RNA, 19 nt, Homo sapiens
  misc_RNA (1)...(19): siRNA sense strand
acuacgcgcuggccaagga

SEQ ID NO: 2186950 - RNA, 19 nt, Homo sapiens
  misc_RNA (1)...(19): siRNA sense strand
caucaaauaccaggagcuu

SEQ ID NO: 2186951 - RNA, 19 nt, Homo sapiens
  misc_RNA (1)...(19): siRNA sense strand
ggacgcaggcagagaagcu

SEQ ID NO: 2186952 - RNA, 19 nt, Homo sapiens
  misc_RNA (1)...(19): siRNA sense strand
ggaggcagaggagcagaug

SEQ ID NO: 2186953 - RNA, 19 nt, Homo sapiens
  misc_RNA (1)...(19): siRNA sense strand
aagcagggcccuagcagua

SEQ ID NO: 2186954 - RNA, 19 nt, Homo sapiens
  misc_RNA (1)...(19): siRNA sense strand
gcugcaggcugagcuagaa

SEQ ID NO: 2186955 - RNA, 19 nt, Homo sapiens
  misc_RNA (1)...(19): siRNA sense strand
gcagggcccuagcaguaag

SEQ ID NO: 2186956 - RNA, 19 nt, Homo sapiens
  misc_RNA (1)...(19): siRNA sense strand
ggcccuagcaguaagaaga

SEQ ID NO: 2186957 - RNA, 19 nt, Homo sapiens
  misc_RNA (1)...(19): siRNA sense strand
acuacgcgcuggccaagga

SEQ ID NO: 2186958 - RNA, 19 nt, Homo sapiens
  misc_RNA (1)...(19): siRNA sense strand
caucaaauaccaggagcuu

SEQ ID NO: 2186959 - RNA, 19 nt, Homo sapiens
  misc_RNA (1)...(19): siRNA sense strand
ggacgcaggcagagaagcu

SEQ ID NO: 2186960 - RNA, 19 nt, Homo sapiens
  misc_RNA (1)...(19): siRNA sense strand
ggaggcagaggagcagaug

SEQ ID NO: 2186961 - RNA, 19 nt, Homo sapiens
  misc_RNA (1)...(19): siRNA sense strand
ggacguagcucuuuccaaa

SEQ ID NO: 2186962 - RNA, 19 nt, Homo sapiens
  misc_RNA (1)...(19): siRNA sense strand
ucaacaagcuuaucgacuu

SEQ ID NO: 2186963 - RNA, 19 nt, Homo sapiens
  misc_RNA (1)...(19): siRNA sense strand
gcacuucacccaagccauu

SEQ ID NO: 2186964 - RNA, 19 nt, Homo sapiens
  misc_RNA (1)...(19): siRNA sense strand
caagauacuuuggaacaga

SEQ ID NO: 2186965 - RNA, 19 nt, Homo sapiens
  misc_RNA (1)...(19): siRNA sense strand
uccaaaagcugcaauauaa

SEQ ID NO: 2186966 - RNA, 19 nt, Homo sapiens
  misc_RNA (1)...(19): siRNA sense strand
caacaagcuuaucgacuuc

SEQ ID NO: 2186967 - RNA, 19 nt, Homo sapiens
  misc_RNA (1)...(19): siRNA sense strand
gcaauggaucaacuucaua

SEQ ID NO: 2186968 - RNA, 19 nt, Homo sapiens
  misc_RNA (1)...(19): siRNA sense strand
ggaacuaugugcaggaaac

SEQ ID NO: 2186969 - RNA, 19 nt, Homo sapiens
  misc_RNA (1)...(19): siRNA sense strand
gcugcaagauacuuuggaa

SEQ ID NO: 2186970 - RNA, 19 nt, Homo sapiens
  misc_RNA (1)...(19): siRNA sense strand
auucaaagcugcaagauac

SEQ ID NO: 2186971 - RNA, 19 nt, Homo sapiens
  misc_RNA (1)...(19): siRNA sense strand
uggaacagauugaggaaca

SEQ ID NO: 2186972 - RNA, 19 nt, Homo sapiens
  misc_RNA (1)...(19): siRNA sense strand
gcaagauacuuuggaacag

SEQ ID NO: 2186973 - RNA, 19 nt, Homo sapiens
  misc_RNA (1)...(19): siRNA sense strand
caauggaucaacuucauau

SEQ ID NO: 2186974 - RNA, 19 nt, Homo sapiens
  misc_RNA (1)...(19): siRNA sense strand
caauauaaggaucucugua

SEQ ID NO: 2186975 - RNA, 19 nt, Homo sapiens
  misc_RNA (1)...(19): siRNA sense strand
ccaagguucaacaagcuua

SEQ ID NO: 2186976 - RNA, 19 nt, Homo sapiens
  misc_RNA (1)...(19): siRNA sense strand
gacauuaaccauuauacca

SEQ ID NO: 2186977 - RNA, 19 nt, Homo sapiens
  misc_RNA (1)...(19): siRNA sense strand
caggaaacacagacacaaa

SEQ ID NO: 2186978 - RNA, 19 nt, Homo sapiens
  misc_RNA (1)...(19): siRNA sense strand
gcuuaucgacuucuuggaa

SEQ ID NO: 2186979 - RNA, 19 nt, Homo sapiens
  misc_RNA (1)...(19): siRNA sense strand
aaacacagacagcaaugga

SEQ ID NO: 2186980 - RNA, 19 nt, Homo sapiens
  misc_RNA (1)...(19): siRNA sense strand
gcaggaaacacagacacaa

SEQ ID NO: 2186981 - RNA, 19 nt, Homo sapiens
  misc_RNA (1)...(19): siRNA sense strand
uccaaaaucugcaagaauu

SEQ ID NO: 2186982 - RNA, 19 nt, Homo sapiens
  misc_RNA (1)...(19): siRNA sense strand
gcaauauaaggaucucugu

SEQ ID NO: 2186983 - RNA, 19 nt, Homo sapiens
  misc_RNA (1)...(19): siRNA sense strand
agacagcaauggaucaacu

SEQ ID NO: 2186984 - RNA, 19 nt, Homo sapiens
  misc_RNA (1)...(19): siRNA sense strand
cuuaucgacuucuuggaaa

SEQ ID NO: 2186985 - RNA, 19 nt, Homo sapiens
  misc_RNA (1)...(19): siRNA sense strand
uggaucaacuucauaugca

SEQ ID NO: 2186986 - RNA, 19 nt, Homo sapiens
  misc_RNA (1)...(19): siRNA sense strand
gaaacacagacacaaaauu

SEQ ID NO: 2186987 - RNA, 19 nt, Homo sapiens
  misc_RNA (1)...(19): siRNA sense strand
caccguguuucaaguuguu

SEQ ID NO: 2186988 - RNA, 19 nt, Homo sapiens
  misc_RNA (1)...(19): siRNA sense strand
guggaacuaugugcaggaa

SEQ ID NO: 2186989 - RNA, 19 nt, Homo sapiens
  misc_RNA (1)...(19): siRNA sense strand
ugaauucaaagcugcaaga

SEQ ID NO: 2186990 - RNA, 19 nt, Homo sapiens
  misc_RNA (1)...(19): siRNA sense strand
gaacuaugugcaggaaaca

SEQ ID NO: 2186991 - RNA, 19 nt, Homo sapiens
  misc_RNA (1)...(19): siRNA sense strand
caacuucauaugcacuuca

SEQ ID NO: 2186992 - RNA, 19 nt, Homo sapiens
  misc_RNA (1)...(19): siRNA sense strand
auauaaggaucucuguaca

SEQ ID NO: 2186993 - RNA, 19 nt, Homo sapiens
  misc_RNA (1)...(19): siRNA sense strand
aaacacagacacaaaauuc

SEQ ID NO: 2186994 - RNA, 19 nt, Homo sapiens
  misc_RNA (1)...(19): siRNA sense strand
aagauacuuuggaacagau

SEQ ID NO: 2186995 - RNA, 19 nt, Homo sapiens
  misc_RNA (1)...(19): siRNA sense strand
aauauaaggaucucuguac

SEQ ID NO: 2186996 - RNA, 19 nt, Homo sapiens
  misc_RNA (1)...(19): siRNA sense strand
gaauucaaagcugcaagau

SEQ ID NO: 2186997 - RNA, 19 nt, Homo sapiens
  misc_RNA (1)...(19): siRNA sense strand
aauucaaagcugcaagaua

SEQ ID NO: 2186998 - RNA, 19 nt, Homo sapiens
  misc_RNA (1)...(19): siRNA sense strand
uaccaagguucaacaagcu

SEQ ID NO: 2186999 - RNA, 19 nt, Homo sapiens
  misc_RNA (1)...(19): siRNA sense strand
ggaacagauugaggaacag

SEQ ID NO: 2187000 - RNA, 19 nt, Homo sapiens
  misc_RNA (1)...(19): siRNA sense strand
uugguuauguggaacuaug

SEQ ID NO: 2187001 - RNA, 19 nt, Homo sapiens
  misc_RNA (1)...(19): siRNA sense strand
agcaauggaucaacuucau

SEQ ID NO: 2187002 - RNA, 19 nt, Homo sapiens
  misc_RNA (1)...(19): siRNA sense strand
cugcaagaauuuugacauu

SEQ ID NO: 2187003 - RNA, 19 nt, Homo sapiens
  misc_RNA (1)...(19): siRNA sense strand
ggaaacacagacacaaaau

SEQ ID NO: 2187004 - RNA, 19 nt, Homo sapiens
  misc_RNA (1)...(19): siRNA sense strand
gcacuucacccaagccauu

SEQ ID NO: 2187005 - RNA, 19 nt, Homo sapiens
  misc_RNA (1)...(19): siRNA sense strand
uccaaaagcugcaauauaa

SEQ ID NO: 2187006 - RNA, 19 nt, Homo sapiens
  misc_RNA (1)...(19): siRNA sense strand
ggaacuaugugcaggaaac

SEQ ID NO: 2187007 - RNA, 19 nt, Homo sapiens
  misc_RNA (1)...(19): siRNA sense strand
caauauaaggaucucugua

SEQ ID NO: 2187008 - RNA, 19 nt, Homo sapiens
  misc_RNA (1)...(19): siRNA sense strand
caggaaacacagacacaaa

SEQ ID NO: 2187009 - RNA, 19 nt, Homo sapiens
  misc_RNA (1)...(19): siRNA sense strand
gcaggaaacacagacacaa

SEQ ID NO: 2187010 - RNA, 19 nt, Homo sapiens
  misc_RNA (1)...(19): siRNA sense strand
gcaauauaaggaucucugu

SEQ ID NO: 2187011 - RNA, 19 nt, Homo sapiens
  misc_RNA (1)...(19): siRNA sense strand
gaaacacagacacaaaauu

SEQ ID NO: 2187012 - RNA, 19 nt, Homo sapiens
  misc_RNA (1)...(19): siRNA sense strand
caccguguuucaaguuguu

SEQ ID NO: 2187013 - RNA, 19 nt, Homo sapiens
  misc_RNA (1)...(19): siRNA sense strand
guggaacuaugugcaggaa

SEQ ID NO: 2187014 - RNA, 19 nt, Homo sapiens
  misc_RNA (1)...(19): siRNA sense strand
gaacuaugugcaggaaaca

SEQ ID NO: 2187015 - RNA, 19 nt, Homo sapiens
  misc_RNA (1)...(19): siRNA sense strand
caacuucauaugcacuuca

SEQ ID NO: 2187016 - RNA, 19 nt, Homo sapiens
  misc_RNA (1)...(19): siRNA sense strand
auauaaggaucucuguaca

SEQ ID NO: 2187017 - RNA, 19 nt, Homo sapiens
  misc_RNA (1)...(19): siRNA sense strand
aaacacagacacaaaauuc

SEQ ID NO: 2187018 - RNA, 19 nt, Homo sapiens
  misc_RNA (1)...(19): siRNA sense strand
aauauaaggaucucuguac

SEQ ID NO: 2187019 - RNA, 19 nt, Homo sapiens
  misc_RNA (1)...(19): siRNA sense strand
uugguuauguggaacuaug

SEQ ID NO: 2187020 - RNA, 19 nt, Homo sapiens
  misc_RNA (1)...(19): siRNA sense strand
ggaaacacagacacaaaau

SEQ ID NO: 2187021 - RNA, 19 nt, Homo sapiens
  misc_RNA (1)...(19): siRNA sense strand
gcacuucacccaagccauu

SEQ ID NO: 2187022 - RNA, 19 nt, Homo sapiens
  misc_RNA (1)...(19): siRNA sense strand
uccaaaagcugcaauauaa

SEQ ID NO: 2187023 - RNA, 19 nt, Homo sapiens
  misc_RNA (1)...(19): siRNA sense strand
ggaacuaugugcaggaaac

SEQ ID NO: 2187024 - RNA, 19 nt, Homo sapiens
  misc_RNA (1)...(19): siRNA sense strand
caauauaaggaucucugua

SEQ ID NO: 2187025 - RNA, 19 nt, Homo sapiens
  misc_RNA (1)...(19): siRNA sense strand
caggaaacacagacacaaa

SEQ ID NO: 2187026 - RNA, 19 nt, Homo sapiens
  misc_RNA (1)...(19): siRNA sense strand
gcaggaaacacagacacaa

SEQ ID NO: 2187027 - RNA, 19 nt, Homo sapiens
  misc_RNA (1)...(19): siRNA sense strand
gcaauauaaggaucucugu

SEQ ID NO: 2187028 - RNA, 19 nt, Homo sapiens
  misc_RNA (1)...(19): siRNA sense strand
gaaacacagacacaaaauu

SEQ ID NO: 2187029 - RNA, 19 nt, Homo sapiens
  misc_RNA (1)...(19): siRNA sense strand
caccguguuucaaguuguu

SEQ ID NO: 2187030 - RNA, 19 nt, Homo sapiens
  misc_RNA (1)...(19): siRNA sense strand
guggaacuaugugcaggaa

SEQ ID NO: 2187031 - RNA, 19 nt, Homo sapiens
  misc_RNA (1)...(19): siRNA sense strand
gaacuaugugcaggaaaca

SEQ ID NO: 2187032 - RNA, 19 nt, Homo sapiens
  misc_RNA (1)...(19): siRNA sense strand
caacuucauaugcacuuca

SEQ ID NO: 2187033 - RNA, 19 nt, Homo sapiens
  misc_RNA (1)...(19): siRNA sense strand
auauaaggaucucuguaca

SEQ ID NO: 2187034 - RNA, 19 nt, Homo sapiens
  misc_RNA (1)...(19): siRNA sense strand
aaacacagacacaaaauuc

SEQ ID NO: 2187035 - RNA, 19 nt, Homo sapiens
  misc_RNA (1)...(19): siRNA sense strand
aauauaaggaucucuguac

SEQ ID NO: 2187036 - RNA, 19 nt, Homo sapiens
  misc_RNA (1)...(19): siRNA sense strand
uugguuauguggaacuaug

SEQ ID NO: 2187037 - RNA, 19 nt, Homo sapiens
  misc_RNA (1)...(19): siRNA sense strand
ggaaacacagacacaaaau

SEQ ID NO: 2187038 - RNA, 19 nt, Homo sapiens
  misc_RNA (1)...(19): siRNA sense strand
ggaaagaaguggaaagaaa

SEQ ID NO: 2187039 - RNA, 19 nt, Homo sapiens
  misc_RNA (1)...(19): siRNA sense strand
gagaacagcuccugcaguu

SEQ ID NO: 2187040 - RNA, 19 nt, Homo sapiens
  misc_RNA (1)...(19): siRNA sense strand
gcaguuggauggaaauaaa

SEQ ID NO: 2187041 - RNA, 19 nt, Homo sapiens
  misc_RNA (1)...(19): siRNA sense strand
gcagguuucucacugguua

SEQ ID NO: 2187042 - RNA, 19 nt, Homo sapiens
  misc_RNA (1)...(19): siRNA sense strand
gggagacacuucacuguuu

SEQ ID NO: 2187043 - RNA, 19 nt, Homo sapiens
  misc_RNA (1)...(19): siRNA sense strand
ccaaauuacuuccaccuaa

SEQ ID NO: 2187044 - RNA, 19 nt, Homo sapiens
  misc_RNA (1)...(19): siRNA sense strand
gcucagaccuccacucguu

SEQ ID NO: 2187045 - RNA, 19 nt, Homo sapiens
  misc_RNA (1)...(19): siRNA sense strand
cagaugagauccuugauga

SEQ ID NO: 2187046 - RNA, 19 nt, Homo sapiens
  misc_RNA (1)...(19): siRNA sense strand
gaaaggagcaagagcaaau

SEQ ID NO: 2187047 - RNA, 19 nt, Homo sapiens
  misc_RNA (1)...(19): siRNA sense strand
gccuaaaucuggagcagua

SEQ ID NO: 2187048 - RNA, 19 nt, Homo sapiens
  misc_RNA (1)...(19): siRNA sense strand
gaaaugaagaugucucuag

SEQ ID NO: 2187049 - RNA, 19 nt, Homo sapiens
  misc_RNA (1)...(19): siRNA sense strand
gagaaaagcuaaggagaaa

SEQ ID NO: 2187050 - RNA, 19 nt, Homo sapiens
  misc_RNA (1)...(19): siRNA sense strand
ugccaaagaucccaaauca

SEQ ID NO: 2187051 - RNA, 19 nt, Homo sapiens
  misc_RNA (1)...(19): siRNA sense strand
aaacaucacuggagaacag

SEQ ID NO: 2187052 - RNA, 19 nt, Homo sapiens
  misc_RNA (1)...(19): siRNA sense strand
aaaugaagaugucucuaga

SEQ ID NO: 2187053 - RNA, 19 nt, Homo sapiens
  misc_RNA (1)...(19): siRNA sense strand
gaaaagaugacgucaacua

SEQ ID NO: 2187054 - RNA, 19 nt, Homo sapiens
  misc_RNA (1)...(19): siRNA sense strand
gcagguagcaggaucuuca

SEQ ID NO: 2187055 - RNA, 19 nt, Homo sapiens
  misc_RNA (1)...(19): siRNA sense strand
caaauuacuuccaccuaag

SEQ ID NO: 2187056 - RNA, 19 nt, Homo sapiens
  misc_RNA (1)...(19): siRNA sense strand
gaugagauccuugaugaug

SEQ ID NO: 2187057 - RNA, 19 nt, Homo sapiens
  misc_RNA (1)...(19): siRNA sense strand
gggccucucuccucuaugu

SEQ ID NO: 2187058 - RNA, 19 nt, Homo sapiens
  misc_RNA (1)...(19): siRNA sense strand
ucaaggaaaugaagauguc

SEQ ID NO: 2187059 - RNA, 19 nt, Homo sapiens
  misc_RNA (1)...(19): siRNA sense strand
ggauggaaauaaacuuaag

SEQ ID NO: 2187060 - RNA, 19 nt, Homo sapiens
  misc_RNA (1)...(19): siRNA sense strand
ccaaagaucccaaaucacu

SEQ ID NO: 2187061 - RNA, 19 nt, Homo sapiens
  misc_RNA (1)...(19): siRNA sense strand
ggagcaguauguaucugaa

SEQ ID NO: 2187062 - RNA, 19 nt, Homo sapiens
  misc_RNA (1)...(19): siRNA sense strand
gagacucuaauuucagaua

SEQ ID NO: 2187063 - RNA, 19 nt, Homo sapiens
  misc_RNA (1)...(19): siRNA sense strand
gaaagaaguggaaagaaaa

SEQ ID NO: 2187064 - RNA, 19 nt, Homo sapiens
  misc_RNA (1)...(19): siRNA sense strand
aaagaucccaaaucacuaa

SEQ ID NO: 2187065 - RNA, 19 nt, Homo sapiens
  misc_RNA (1)...(19): siRNA sense strand
ccaaaccaccaacaagaaa

SEQ ID NO: 2187066 - RNA, 19 nt, Homo sapiens
  misc_RNA (1)...(19): siRNA sense strand
cuucucgucugaccacaua

SEQ ID NO: 2187067 - RNA, 19 nt, Homo sapiens
  misc_RNA (1)...(19): siRNA sense strand
gagaaaggagcaagagcaa

SEQ ID NO: 2187068 - RNA, 19 nt, Homo sapiens
  misc_RNA (1)...(19): siRNA sense strand
guuucucacugguuaauga

SEQ ID NO: 2187069 - RNA, 19 nt, Homo sapiens
  misc_RNA (1)...(19): siRNA sense strand
caaagaucccaaaucacua

SEQ ID NO: 2187070 - RNA, 19 nt, Homo sapiens
  misc_RNA (1)...(19): siRNA sense strand
gcaagggaaagaaguggaa

SEQ ID NO: 2187071 - RNA, 19 nt, Homo sapiens
  misc_RNA (1)...(19): siRNA sense strand
gaaccugccugcgccuaca

SEQ ID NO: 2187072 - RNA, 19 nt, Homo sapiens
  misc_RNA (1)...(19): siRNA sense strand
ggagacacuucacuguuuu

SEQ ID NO: 2187073 - RNA, 19 nt, Homo sapiens
  misc_RNA (1)...(19): siRNA sense strand
aaacuuaaggcucuuggaa

SEQ ID NO: 2187074 - RNA, 19 nt, Homo sapiens
  misc_RNA (1)...(19): siRNA sense strand
aaauuaagcggaaguuugu

SEQ ID NO: 2187075 - RNA, 19 nt, Homo sapiens
  misc_RNA (1)...(19): siRNA sense strand
ucacuaagggcauccaguu

SEQ ID NO: 2187076 - RNA, 19 nt, Homo sapiens
  misc_RNA (1)...(19): siRNA sense strand
cuucaaagucugaucauga

SEQ ID NO: 2187077 - RNA, 19 nt, Homo sapiens
  misc_RNA (1)...(19): siRNA sense strand
gagcaaaugcagaggaagu

SEQ ID NO: 2187078 - RNA, 19 nt, Homo sapiens
  misc_RNA (1)...(19): siRNA sense strand
ccuuagcacugucaucaga

SEQ ID NO: 2187079 - RNA, 19 nt, Homo sapiens
  misc_RNA (1)...(19): siRNA sense strand
caaagucugaucaugaugu

SEQ ID NO: 2187080 - RNA, 19 nt, Homo sapiens
  misc_RNA (1)...(19): siRNA sense strand
caccaaaccaccaacaaga

SEQ ID NO: 2187081 - RNA, 19 nt, Homo sapiens
  misc_RNA (1)...(19): siRNA sense strand
gaaacucaaggaaaugaag

SEQ ID NO: 2187082 - RNA, 19 nt, Homo sapiens
  misc_RNA (1)...(19): siRNA sense strand
acuuaaggcucuuggaaug

SEQ ID NO: 2187083 - RNA, 19 nt, Homo sapiens
  misc_RNA (1)...(19): siRNA sense strand
ugagauccuugaugaugga

SEQ ID NO: 2187084 - RNA, 19 nt, Homo sapiens
  misc_RNA (1)...(19): siRNA sense strand
aagagcaaaugcagaggaa

SEQ ID NO: 2187085 - RNA, 19 nt, Homo sapiens
  misc_RNA (1)...(19): siRNA sense strand
ucggaaggcccaagagaaa

SEQ ID NO: 2187086 - RNA, 19 nt, Homo sapiens
  misc_RNA (1)...(19): siRNA sense strand
aaaagaagccaguagguuu

SEQ ID NO: 2187087 - RNA, 19 nt, Homo sapiens
  misc_RNA (1)...(19): siRNA sense strand
gcaguauguaucugaauuc

SEQ ID NO: 2187088 - RNA, 19 nt, Homo sapiens
  misc_RNA (1)...(19): siRNA sense strand
uaccuucaaugaugacuuc

SEQ ID NO: 2187089 - RNA, 19 nt, Homo sapiens
  misc_RNA (1)...(19): siRNA sense strand
ggacacccaagccauguuc

SEQ ID NO: 2187090 - RNA, 19 nt, Homo sapiens
  misc_RNA (1)...(19): siRNA sense strand
gauggacagucucccaaac

SEQ ID NO: 2187091 - RNA, 19 nt, Homo sapiens
  misc_RNA (1)...(19): siRNA sense strand
ggaaaugaagaugucucua

SEQ ID NO: 2187092 - RNA, 19 nt, Homo sapiens
  misc_RNA (1)...(19): siRNA sense strand
gggaaagaaguggaaagaa

SEQ ID NO: 2187093 - RNA, 19 nt, Homo sapiens
  misc_RNA (1)...(19): siRNA sense strand
agcaguauguaucugaauu

SEQ ID NO: 2187094 - RNA, 19 nt, Homo sapiens
  misc_RNA (1)...(19): siRNA sense strand
ccaccuaaggguuugagaa

SEQ ID NO: 2187095 - RNA, 19 nt, Homo sapiens
  misc_RNA (1)...(19): siRNA sense strand
ggagugugcagcagguuuc

SEQ ID NO: 2187096 - RNA, 19 nt, Homo sapiens
  misc_RNA (1)...(19): siRNA sense strand
ccaagaauuuuaccuucaa

SEQ ID NO: 2187097 - RNA, 19 nt, Homo sapiens
  misc_RNA (1)...(19): siRNA sense strand
aagaugacgucaacuacag

SEQ ID NO: 2187098 - RNA, 19 nt, Homo sapiens
  misc_RNA (1)...(19): siRNA sense strand
cagaaaagaugacgucaac

SEQ ID NO: 2187099 - RNA, 19 nt, Homo sapiens
  misc_RNA (1)...(19): siRNA sense strand
ccuaaggguuugagaacgu

SEQ ID NO: 2187100 - RNA, 19 nt, Homo sapiens
  misc_RNA (1)...(19): siRNA sense strand
caguauguaucugaauuca

SEQ ID NO: 2187101 - RNA, 19 nt, Homo sapiens
  misc_RNA (1)...(19): siRNA sense strand
cacagucagugucagaauc

SEQ ID NO: 2187102 - RNA, 19 nt, Homo sapiens
  misc_RNA (1)...(19): siRNA sense strand
aaagucugaucaugaugug

SEQ ID NO: 2187103 - RNA, 19 nt, Homo sapiens
  misc_RNA (1)...(19): siRNA sense strand
cuucaaugaugacuucagu

SEQ ID NO: 2187104 - RNA, 19 nt, Homo sapiens
  misc_RNA (1)...(19): siRNA sense strand
gcucggaaggcccaagaga

SEQ ID NO: 2187105 - RNA, 19 nt, Homo sapiens
  misc_RNA (1)...(19): siRNA sense strand
ggacagucucccaaacaca

SEQ ID NO: 2187106 - RNA, 19 nt, Homo sapiens
  misc_RNA (1)...(19): siRNA sense strand
cuaagggcauccaguucau

SEQ ID NO: 2187107 - RNA, 19 nt, Homo sapiens
  misc_RNA (1)...(19): siRNA sense strand
uucaaagucugaucaugau

SEQ ID NO: 2187108 - RNA, 19 nt, Homo sapiens
  misc_RNA (1)...(19): siRNA sense strand
ugaccacauagcugaauuu

SEQ ID NO: 2187109 - RNA, 19 nt, Homo sapiens
  misc_RNA (1)...(19): siRNA sense strand
aaaagggguccaagaauuu

SEQ ID NO: 2187110 - RNA, 19 nt, Homo sapiens
  misc_RNA (1)...(19): siRNA sense strand
augccuuucucaugguuua

SEQ ID NO: 2187111 - RNA, 19 nt, Homo sapiens
  misc_RNA (1)...(19): siRNA sense strand
aaagaugacgucaacuaca

SEQ ID NO: 2187112 - RNA, 19 nt, Homo sapiens
  misc_RNA (1)...(19): siRNA sense strand
uaaaucuggagcaguaugu

SEQ ID NO: 2187113 - RNA, 19 nt, Homo sapiens
  misc_RNA (1)...(19): siRNA sense strand
uaaggagaaaggagcaaga

SEQ ID NO: 2187114 - RNA, 19 nt, Homo sapiens
  misc_RNA (1)...(19): siRNA sense strand
aaugacagccggaaaggau

SEQ ID NO: 2187115 - RNA, 19 nt, Homo sapiens
  misc_RNA (1)...(19): siRNA sense strand
aaacucaaggaaaugaaga

SEQ ID NO: 2187116 - RNA, 19 nt, Homo sapiens
  misc_RNA (1)...(19): siRNA sense strand
aaagaaacucaaggaaaug

SEQ ID NO: 2187117 - RNA, 19 nt, Homo sapiens
  misc_RNA (1)...(19): siRNA sense strand
ucagaugagauccuugaug

SEQ ID NO: 2187118 - RNA, 19 nt, Homo sapiens
  misc_RNA (1)...(19): siRNA sense strand
aaaagaugaugccaaagau

SEQ ID NO: 2187119 - RNA, 19 nt, Homo sapiens
  misc_RNA (1)...(19): siRNA sense strand
aagaaacucaaggaaauga

SEQ ID NO: 2187120 - RNA, 19 nt, Homo sapiens
  misc_RNA (1)...(19): siRNA sense strand
gagcaguauguaucugaau

SEQ ID NO: 2187121 - RNA, 19 nt, Homo sapiens
  misc_RNA (1)...(19): siRNA sense strand
guuaaugagccuaaaucug

SEQ ID NO: 2187122 - RNA, 19 nt, Homo sapiens
  misc_RNA (1)...(19): siRNA sense strand
cuucagaggcagacuggaa

SEQ ID NO: 2187123 - RNA, 19 nt, Homo sapiens
  misc_RNA (1)...(19): siRNA sense strand
gaaaagcuaaggagaaagg

SEQ ID NO: 2187124 - RNA, 19 nt, Homo sapiens
  misc_RNA (1)...(19): siRNA sense strand
aagaaucuccuugccauca

SEQ ID NO: 2187125 - RNA, 19 nt, Homo sapiens
  misc_RNA (1)...(19): siRNA sense strand
ucaccaaaccaccaacaag

SEQ ID NO: 2187126 - RNA, 19 nt, Homo sapiens
  misc_RNA (1)...(19): siRNA sense strand
gaucaugauguggaagaau

SEQ ID NO: 2187127 - RNA, 19 nt, Homo sapiens
  misc_RNA (1)...(19): siRNA sense strand
aaaauuaagcggaaguuug

SEQ ID NO: 2187128 - RNA, 19 nt, Homo sapiens
  misc_RNA (1)...(19): siRNA sense strand
acacuucacuguuuucuac

SEQ ID NO: 2187129 - RNA, 19 nt, Homo sapiens
  misc_RNA (1)...(19): siRNA sense strand
gaccacauagcugaauuuc

SEQ ID NO: 2187130 - RNA, 19 nt, Homo sapiens
  misc_RNA (1)...(19): siRNA sense strand
ggaaagaaguggaaagaaa

SEQ ID NO: 2187131 - RNA, 19 nt, Homo sapiens
  misc_RNA (1)...(19): siRNA sense strand
gagaacagcuccugcaguu

SEQ ID NO: 2187132 - RNA, 19 nt, Homo sapiens
  misc_RNA (1)...(19): siRNA sense strand
gcaguuggauggaaauaaa

SEQ ID NO: 2187133 - RNA, 19 nt, Homo sapiens
  misc_RNA (1)...(19): siRNA sense strand
gcagguuucucacugguua

SEQ ID NO: 2187134 - RNA, 19 nt, Homo sapiens
  misc_RNA (1)...(19): siRNA sense strand
gggagacacuucacuguuu

SEQ ID NO: 2187135 - RNA, 19 nt, Homo sapiens
  misc_RNA (1)...(19): siRNA sense strand
ccaaauuacuuccaccuaa

SEQ ID NO: 2187136 - RNA, 19 nt, Homo sapiens
  misc_RNA (1)...(19): siRNA sense strand
gcucagaccuccacucguu

SEQ ID NO: 2187137 - RNA, 19 nt, Homo sapiens
  misc_RNA (1)...(19): siRNA sense strand
cagaugagauccuugauga

SEQ ID NO: 2187138 - RNA, 19 nt, Homo sapiens
  misc_RNA (1)...(19): siRNA sense strand
gaaaggagcaagagcaaau

SEQ ID NO: 2187139 - RNA, 19 nt, Homo sapiens
  misc_RNA (1)...(19): siRNA sense strand
gccuaaaucuggagcagua

SEQ ID NO: 2187140 - RNA, 19 nt, Homo sapiens
  misc_RNA (1)...(19): siRNA sense strand
gaaaugaagaugucucuag

SEQ ID NO: 2187141 - RNA, 19 nt, Homo sapiens
  misc_RNA (1)...(19): siRNA sense strand
gagaaaagcuaaggagaaa

SEQ ID NO: 2187142 - RNA, 19 nt, Homo sapiens
  misc_RNA (1)...(19): siRNA sense strand
ugccaaagaucccaaauca

SEQ ID NO: 2187143 - RNA, 19 nt, Homo sapiens
  misc_RNA (1)...(19): siRNA sense strand
aaacaucacuggagaacag

SEQ ID NO: 2187144 - RNA, 19 nt, Homo sapiens
  misc_RNA (1)...(19): siRNA sense strand
aaaugaagaugucucuaga

SEQ ID NO: 2187145 - RNA, 19 nt, Homo sapiens
  misc_RNA (1)...(19): siRNA sense strand
gaaaagaugacgucaacua

SEQ ID NO: 2187146 - RNA, 19 nt, Homo sapiens
  misc_RNA (1)...(19): siRNA sense strand
gcagguagcaggaucuuca

SEQ ID NO: 2187147 - RNA, 19 nt, Homo sapiens
  misc_RNA (1)...(19): siRNA sense strand
caaauuacuuccaccuaag

SEQ ID NO: 2187148 - RNA, 19 nt, Homo sapiens
  misc_RNA (1)...(19): siRNA sense strand
gaugagauccuugaugaug

SEQ ID NO: 2187149 - RNA, 19 nt, Homo sapiens
  misc_RNA (1)...(19): siRNA sense strand
gggccucucuccucuaugu

SEQ ID NO: 2187150 - RNA, 19 nt, Homo sapiens
  misc_RNA (1)...(19): siRNA sense strand
ucaaggaaaugaagauguc

SEQ ID NO: 2187151 - RNA, 19 nt, Homo sapiens
  misc_RNA (1)...(19): siRNA sense strand
ggauggaaauaaacuuaag

SEQ ID NO: 2187152 - RNA, 19 nt, Homo sapiens
  misc_RNA (1)...(19): siRNA sense strand
ccaaagaucccaaaucacu

SEQ ID NO: 2187153 - RNA, 19 nt, Homo sapiens
  misc_RNA (1)...(19): siRNA sense strand
ggagcaguauguaucugaa

SEQ ID NO: 2187154 - RNA, 19 nt, Homo sapiens
  misc_RNA (1)...(19): siRNA sense strand
gagacucuaauuucagaua

SEQ ID NO: 2187155 - RNA, 19 nt, Homo sapiens
  misc_RNA (1)...(19): siRNA sense strand
gaaagaaguggaaagaaaa

SEQ ID NO: 2187156 - RNA, 19 nt, Homo sapiens
  misc_RNA (1)...(19): siRNA sense strand
aaagaucccaaaucacuaa

SEQ ID NO: 2187157 - RNA, 19 nt, Homo sapiens
  misc_RNA (1)...(19): siRNA sense strand
ccaaaccaccaacaagaaa

SEQ ID NO: 2187158 - RNA, 19 nt, Homo sapiens
  misc_RNA (1)...(19): siRNA sense strand
cuucucgucugaccacaua

SEQ ID NO: 2187159 - RNA, 19 nt, Homo sapiens
  misc_RNA (1)...(19): siRNA sense strand
gagaaaggagcaagagcaa

SEQ ID NO: 2187160 - RNA, 19 nt, Homo sapiens
  misc_RNA (1)...(19): siRNA sense strand
guuucucacugguuaauga

SEQ ID NO: 2187161 - RNA, 19 nt, Homo sapiens
  misc_RNA (1)...(19): siRNA sense strand
caaagaucccaaaucacua

SEQ ID NO: 2187162 - RNA, 19 nt, Homo sapiens
  misc_RNA (1)...(19): siRNA sense strand
gcaagggaaagaaguggaa

SEQ ID NO: 2187163 - RNA, 19 nt, Homo sapiens
  misc_RNA (1)...(19): siRNA sense strand
gaaccugccugcgccuaca

SEQ ID NO: 2187164 - RNA, 19 nt, Homo sapiens
  misc_RNA (1)...(19): siRNA sense strand
ggagacacuucacuguuuu

SEQ ID NO: 2187165 - RNA, 19 nt, Homo sapiens
  misc_RNA (1)...(19): siRNA sense strand
aaacuuaaggcucuuggaa

SEQ ID NO: 2187166 - RNA, 19 nt, Homo sapiens
  misc_RNA (1)...(19): siRNA sense strand
aaauuaagcggaaguuugu

SEQ ID NO: 2187167 - RNA, 19 nt, Homo sapiens
  misc_RNA (1)...(19): siRNA sense strand
ucacuaagggcauccaguu

SEQ ID NO: 2187168 - RNA, 19 nt, Homo sapiens
  misc_RNA (1)...(19): siRNA sense strand
cuucaaagucugaucauga

SEQ ID NO: 2187169 - RNA, 19 nt, Homo sapiens
  misc_RNA (1)...(19): siRNA sense strand
gagcaaaugcagaggaagu

SEQ ID NO: 2187170 - RNA, 19 nt, Homo sapiens
  misc_RNA (1)...(19): siRNA sense strand
ccuuagcacugucaucaga

SEQ ID NO: 2187171 - RNA, 19 nt, Homo sapiens
  misc_RNA (1)...(19): siRNA sense strand
caaagucugaucaugaugu

SEQ ID NO: 2187172 - RNA, 19 nt, Homo sapiens
  misc_RNA (1)...(19): siRNA sense strand
caccaaaccaccaacaaga

SEQ ID NO: 2187173 - RNA, 19 nt, Homo sapiens
  misc_RNA (1)...(19): siRNA sense strand
gaaacucaaggaaaugaag

SEQ ID NO: 2187174 - RNA, 19 nt, Homo sapiens
  misc_RNA (1)...(19): siRNA sense strand
acuuaaggcucuuggaaug

SEQ ID NO: 2187175 - RNA, 19 nt, Homo sapiens
  misc_RNA (1)...(19): siRNA sense strand
ugagauccuugaugaugga

SEQ ID NO: 2187176 - RNA, 19 nt, Homo sapiens
  misc_RNA (1)...(19): siRNA sense strand
aagagcaaaugcagaggaa

SEQ ID NO: 2187177 - RNA, 19 nt, Homo sapiens
  misc_RNA (1)...(19): siRNA sense strand
ucggaaggcccaagagaaa

SEQ ID NO: 2187178 - RNA, 19 nt, Homo sapiens
  misc_RNA (1)...(19): siRNA sense strand
aaaagaagccaguagguuu

SEQ ID NO: 2187179 - RNA, 19 nt, Homo sapiens
  misc_RNA (1)...(19): siRNA sense strand
gcaguauguaucugaauuc

SEQ ID NO: 2187180 - RNA, 19 nt, Homo sapiens
  misc_RNA (1)...(19): siRNA sense strand
uaccuucaaugaugacuuc

SEQ ID NO: 2187181 - RNA, 19 nt, Homo sapiens
  misc_RNA (1)...(19): siRNA sense strand
ggacacccaagccauguuc

SEQ ID NO: 2187182 - RNA, 19 nt, Homo sapiens
  misc_RNA (1)...(19): siRNA sense strand
gauggacagucucccaaac

SEQ ID NO: 2187183 - RNA, 19 nt, Homo sapiens
  misc_RNA (1)...(19): siRNA sense strand
ggaaaugaagaugucucua

SEQ ID NO: 2187184 - RNA, 19 nt, Homo sapiens
  misc_RNA (1)...(19): siRNA sense strand
gggaaagaaguggaaagaa

SEQ ID NO: 2187185 - RNA, 19 nt, Homo sapiens
  misc_RNA (1)...(19): siRNA sense strand
agcaguauguaucugaauu

SEQ ID NO: 2187186 - RNA, 19 nt, Homo sapiens
  misc_RNA (1)...(19): siRNA sense strand
ccaccuaaggguuugagaa

SEQ ID NO: 2187187 - RNA, 19 nt, Homo sapiens
  misc_RNA (1)...(19): siRNA sense strand
ggagugugcagcagguuuc

SEQ ID NO: 2187188 - RNA, 19 nt, Homo sapiens
  misc_RNA (1)...(19): siRNA sense strand
ccaagaauuuuaccuucaa

SEQ ID NO: 2187189 - RNA, 19 nt, Homo sapiens
  misc_RNA (1)...(19): siRNA sense strand
aagaugacgucaacuacag

SEQ ID NO: 2187190 - RNA, 19 nt, Homo sapiens
  misc_RNA (1)...(19): siRNA sense strand
cagaaaagaugacgucaac

SEQ ID NO: 2187191 - RNA, 19 nt, Homo sapiens
  misc_RNA (1)...(19): siRNA sense strand
ccuaaggguuugagaacgu

SEQ ID NO: 2187192 - RNA, 19 nt, Homo sapiens
  misc_RNA (1)...(19): siRNA sense strand
caguauguaucugaauuca

SEQ ID NO: 2187193 - RNA, 19 nt, Homo sapiens
  misc_RNA (1)...(19): siRNA sense strand
cacagucagugucagaauc

SEQ ID NO: 2187194 - RNA, 19 nt, Homo sapiens
  misc_RNA (1)...(19): siRNA sense strand
aaagucugaucaugaugug

SEQ ID NO: 2187195 - RNA, 19 nt, Homo sapiens
  misc_RNA (1)...(19): siRNA sense strand
cuucaaugaugacuucagu

SEQ ID NO: 2187196 - RNA, 19 nt, Homo sapiens
  misc_RNA (1)...(19): siRNA sense strand
gcucggaaggcccaagaga

SEQ ID NO: 2187197 - RNA, 19 nt, Homo sapiens
  misc_RNA (1)...(19): siRNA sense strand
ggacagucucccaaacaca

SEQ ID NO: 2187198 - RNA, 19 nt, Homo sapiens
  misc_RNA (1)...(19): siRNA sense strand
cuaagggcauccaguucau

SEQ ID NO: 2187199 - RNA, 19 nt, Homo sapiens
  misc_RNA (1)...(19): siRNA sense strand
uucaaagucugaucaugau

SEQ ID NO: 2187200 - RNA, 19 nt, Homo sapiens
  misc_RNA (1)...(19): siRNA sense strand
ugaccacauagcugaauuu

SEQ ID NO: 2187201 - RNA, 19 nt, Homo sapiens
  misc_RNA (1)...(19): siRNA sense strand
aaaagggguccaagaauuu

SEQ ID NO: 2187202 - RNA, 19 nt, Homo sapiens
  misc_RNA (1)...(19): siRNA sense strand
augccuuucucaugguuua

SEQ ID NO: 2187203 - RNA, 19 nt, Homo sapiens
  misc_RNA (1)...(19): siRNA sense strand
aaagaugacgucaacuaca

SEQ ID NO: 2187204 - RNA, 19 nt, Homo sapiens
  misc_RNA (1)...(19): siRNA sense strand
uaaaucuggagcaguaugu

SEQ ID NO: 2187205 - RNA, 19 nt, Homo sapiens
  misc_RNA (1)...(19): siRNA sense strand
uaaggagaaaggagcaaga

SEQ ID NO: 2187206 - RNA, 19 nt, Homo sapiens
  misc_RNA (1)...(19): siRNA sense strand
aaugacagccggaaaggau

SEQ ID NO: 2187207 - RNA, 19 nt, Homo sapiens
  misc_RNA (1)...(19): siRNA sense strand
aaacucaaggaaaugaaga

SEQ ID NO: 2187208 - RNA, 19 nt, Homo sapiens
  misc_RNA (1)...(19): siRNA sense strand
aaagaaacucaaggaaaug

SEQ ID NO: 2187209 - RNA, 19 nt, Homo sapiens
  misc_RNA (1)...(19): siRNA sense strand
ucagaugagauccuugaug

SEQ ID NO: 2187210 - RNA, 19 nt, Homo sapiens
  misc_RNA (1)...(19): siRNA sense strand
aaaagaugaugccaaagau

SEQ ID NO: 2187211 - RNA, 19 nt, Homo sapiens
  misc_RNA (1)...(19): siRNA sense strand
aagaaacucaaggaaauga

SEQ ID NO: 2187212 - RNA, 19 nt, Homo sapiens
  misc_RNA (1)...(19): siRNA sense strand
gagcaguauguaucugaau

SEQ ID NO: 2187213 - RNA, 19 nt, Homo sapiens
  misc_RNA (1)...(19): siRNA sense strand
guuaaugagccuaaaucug

SEQ ID NO: 2187214 - RNA, 19 nt, Homo sapiens
  misc_RNA (1)...(19): siRNA sense strand
cuucagaggcagacuggaa

SEQ ID NO: 2187215 - RNA, 19 nt, Homo sapiens
  misc_RNA (1)...(19): siRNA sense strand
gaaaagcuaaggagaaagg

SEQ ID NO: 2187216 - RNA, 19 nt, Homo sapiens
  misc_RNA (1)...(19): siRNA sense strand
aagaaucuccuugccauca

SEQ ID NO: 2187217 - RNA, 19 nt, Homo sapiens
  misc_RNA (1)...(19): siRNA sense strand
ucaccaaaccaccaacaag

SEQ ID NO: 2187218 - RNA, 19 nt, Homo sapiens
  misc_RNA (1)...(19): siRNA sense strand
gaucaugauguggaagaau

SEQ ID NO: 2187219 - RNA, 19 nt, Homo sapiens
  misc_RNA (1)...(19): siRNA sense strand
aaaauuaagcggaaguuug

SEQ ID NO: 2187220 - RNA, 19 nt, Homo sapiens
  misc_RNA (1)...(19): siRNA sense strand
acacuucacuguuuucuac

SEQ ID NO: 2187221 - RNA, 19 nt, Homo sapiens
  misc_RNA (1)...(19): siRNA sense strand
gaccacauagcugaauuuc

SEQ ID NO: 2187222 - RNA, 19 nt, Homo sapiens
  misc_RNA (1)...(19): siRNA sense strand
gcacuuggcuuugaauaua

SEQ ID NO: 2187223 - RNA, 19 nt, Homo sapiens
  misc_RNA (1)...(19): siRNA sense strand
gaagauauguucccaguuc

SEQ ID NO: 2187224 - RNA, 19 nt, Homo sapiens
  misc_RNA (1)...(19): siRNA sense strand
gaauauaaaugguggaaug

SEQ ID NO: 2187225 - RNA, 19 nt, Homo sapiens
  misc_RNA (1)...(19): siRNA sense strand
gaaaggagccaaagaaugu

SEQ ID NO: 2187226 - RNA, 19 nt, Homo sapiens
  misc_RNA (1)...(19): siRNA sense strand
gaaaucaggcacaaacaua

SEQ ID NO: 2187227 - RNA, 19 nt, Homo sapiens
  misc_RNA (1)...(19): siRNA sense strand
gaaagacacagauaaugua

SEQ ID NO: 2187228 - RNA, 19 nt, Homo sapiens
  misc_RNA (1)...(19): siRNA sense strand
guacaaaugugguagaauc

SEQ ID NO: 2187229 - RNA, 19 nt, Homo sapiens
  misc_RNA (1)...(19): siRNA sense strand
caacaauuauuccuucuga

SEQ ID NO: 2187230 - RNA, 19 nt, Homo sapiens
  misc_RNA (1)...(19): siRNA sense strand
gcacaaacauacucuacug

SEQ ID NO: 2187231 - RNA, 19 nt, Homo sapiens
  misc_RNA (1)...(19): siRNA sense strand
uaaagacgacucucaauuu

SEQ ID NO: 2187232 - RNA, 19 nt, Homo sapiens
  misc_RNA (1)...(19): siRNA sense strand
gauaauagacgguucauca

SEQ ID NO: 2187233 - RNA, 19 nt, Homo sapiens
  misc_RNA (1)...(19): siRNA sense strand
gaaggaaagacacagauaa

SEQ ID NO: 2187234 - RNA, 19 nt, Homo sapiens
  misc_RNA (1)...(19): siRNA sense strand
ggaaagacacagauaaugu

SEQ ID NO: 2187235 - RNA, 19 nt, Homo sapiens
  misc_RNA (1)...(19): siRNA sense strand
guaugccagucaacaauua

SEQ ID NO: 2187236 - RNA, 19 nt, Homo sapiens
  misc_RNA (1)...(19): siRNA sense strand
ggaaggagaagauaaugaa

SEQ ID NO: 2187237 - RNA, 19 nt, Homo sapiens
  misc_RNA (1)...(19): siRNA sense strand
caaagaauguagaccaugu

SEQ ID NO: 2187238 - RNA, 19 nt, Homo sapiens
  misc_RNA (1)...(19): siRNA sense strand
caggaaaccuuguaugugu

SEQ ID NO: 2187239 - RNA, 19 nt, Homo sapiens
  misc_RNA (1)...(19): siRNA sense strand
caaagaggcuuguauucca

SEQ ID NO: 2187240 - RNA, 19 nt, Homo sapiens
  misc_RNA (1)...(19): siRNA sense strand
ggucaagccugugcuggua

SEQ ID NO: 2187241 - RNA, 19 nt, Homo sapiens
  misc_RNA (1)...(19): siRNA sense strand
ucacagaugcuauuagauu

SEQ ID NO: 2187242 - RNA, 19 nt, Homo sapiens
  misc_RNA (1)...(19): siRNA sense strand
guaaagacgacucucaauu

SEQ ID NO: 2187243 - RNA, 19 nt, Homo sapiens
  misc_RNA (1)...(19): siRNA sense strand
gcagacaguugugcuauca

SEQ ID NO: 2187244 - RNA, 19 nt, Homo sapiens
  misc_RNA (1)...(19): siRNA sense strand
gaacuaaucagggucaaga

SEQ ID NO: 2187245 - RNA, 19 nt, Homo sapiens
  misc_RNA (1)...(19): siRNA sense strand
ucaaugacauggugaagau

SEQ ID NO: 2187246 - RNA, 19 nt, Homo sapiens
  misc_RNA (1)...(19): siRNA sense strand
agacacagauaauguacaa

SEQ ID NO: 2187247 - RNA, 19 nt, Homo sapiens
  misc_RNA (1)...(19): siRNA sense strand
caagagaggauuucaggaa

SEQ ID NO: 2187248 - RNA, 19 nt, Homo sapiens
  misc_RNA (1)...(19): siRNA sense strand
gagcaggagugauuucagu

SEQ ID NO: 2187249 - RNA, 19 nt, Homo sapiens
  misc_RNA (1)...(19): siRNA sense strand
ggagguggcuggagaucau

SEQ ID NO: 2187250 - RNA, 19 nt, Homo sapiens
  misc_RNA (1)...(19): siRNA sense strand
gaacuaggaagaauaacau

SEQ ID NO: 2187251 - RNA, 19 nt, Homo sapiens
  misc_RNA (1)...(19): siRNA sense strand
aagaggaaguuguauauuc

SEQ ID NO: 2187252 - RNA, 19 nt, Homo sapiens
  misc_RNA (1)...(19): siRNA sense strand
gaggaaggauccagugagu

SEQ ID NO: 2187253 - RNA, 19 nt, Homo sapiens
  misc_RNA (1)...(19): siRNA sense strand
aaacaagcuuacacccaua

SEQ ID NO: 2187254 - RNA, 19 nt, Homo sapiens
  misc_RNA (1)...(19): siRNA sense strand
ggaaggauccagugagugu

SEQ ID NO: 2187255 - RNA, 19 nt, Homo sapiens
  misc_RNA (1)...(19): siRNA sense strand
ggucagaugauuacacaaa

SEQ ID NO: 2187256 - RNA, 19 nt, Homo sapiens
  misc_RNA (1)...(19): siRNA sense strand
caauaaacagucacuacua

SEQ ID NO: 2187257 - RNA, 19 nt, Homo sapiens
  misc_RNA (1)...(19): siRNA sense strand
ccgaucaacugcugugaaa

SEQ ID NO: 2187258 - RNA, 19 nt, Homo sapiens
  misc_RNA (1)...(19): siRNA sense strand
gagguucugacaaugauua

SEQ ID NO: 2187259 - RNA, 19 nt, Homo sapiens
  misc_RNA (1)...(19): siRNA sense strand
gaagaaggaaagacacaga

SEQ ID NO: 2187260 - RNA, 19 nt, Homo sapiens
  misc_RNA (1)...(19): siRNA sense strand
ggaauuucuuugccugaga

SEQ ID NO: 2187261 - RNA, 19 nt, Homo sapiens
  misc_RNA (1)...(19): siRNA sense strand
aaagugcgauggaaugaau

SEQ ID NO: 2187262 - RNA, 19 nt, Homo sapiens
  misc_RNA (1)...(19): siRNA sense strand
ucucacagaugcuauuaga

SEQ ID NO: 2187263 - RNA, 19 nt, Homo sapiens
  misc_RNA (1)...(19): siRNA sense strand
ugacaaugauuaccugauc

SEQ ID NO: 2187264 - RNA, 19 nt, Homo sapiens
  misc_RNA (1)...(19): siRNA sense strand
aaaaugagguguaauccua

SEQ ID NO: 2187265 - RNA, 19 nt, Homo sapiens
  misc_RNA (1)...(19): siRNA sense strand
gccacuacauugagaaaga

SEQ ID NO: 2187266 - RNA, 19 nt, Homo sapiens
  misc_RNA (1)...(19): siRNA sense strand
gguguaauccuacuaaauc

SEQ ID NO: 2187267 - RNA, 19 nt, Homo sapiens
  misc_RNA (1)...(19): siRNA sense strand
gaagaggaaguuguauauu

SEQ ID NO: 2187268 - RNA, 19 nt, Homo sapiens
  misc_RNA (1)...(19): siRNA sense strand
gcucugaccugcuacuucu

SEQ ID NO: 2187269 - RNA, 19 nt, Homo sapiens
  misc_RNA (1)...(19): siRNA sense strand
gaagcuugcccucugugua

SEQ ID NO: 2187270 - RNA, 19 nt, Homo sapiens
  misc_RNA (1)...(19): siRNA sense strand
gaacuacaggcauccuuau

SEQ ID NO: 2187271 - RNA, 19 nt, Homo sapiens
  misc_RNA (1)...(19): siRNA sense strand
ugagaaaggagccaaagaa

SEQ ID NO: 2187272 - RNA, 19 nt, Homo sapiens
  misc_RNA (1)...(19): siRNA sense strand
uaaugaagaggaaguugua

SEQ ID NO: 2187273 - RNA, 19 nt, Homo sapiens
  misc_RNA (1)...(19): siRNA sense strand
aaucagaguuugcacuaug

SEQ ID NO: 2187274 - RNA, 19 nt, Homo sapiens
  misc_RNA (1)...(19): siRNA sense strand
ggaagaauaacauuugucu

SEQ ID NO: 2187275 - RNA, 19 nt, Homo sapiens
  misc_RNA (1)...(19): siRNA sense strand
gagaaaggagccaaagaau

SEQ ID NO: 2187276 - RNA, 19 nt, Homo sapiens
  misc_RNA (1)...(19): siRNA sense strand
gaauguauaagguguaaag

SEQ ID NO: 2187277 - RNA, 19 nt, Homo sapiens
  misc_RNA (1)...(19): siRNA sense strand
ugaagaggaaguuguauau

SEQ ID NO: 2187278 - RNA, 19 nt, Homo sapiens
  misc_RNA (1)...(19): siRNA sense strand
ccaacaauauaacagacuu

SEQ ID NO: 2187279 - RNA, 19 nt, Homo sapiens
  misc_RNA (1)...(19): siRNA sense strand
aauagacgguucaucaaug

SEQ ID NO: 2187280 - RNA, 19 nt, Homo sapiens
  misc_RNA (1)...(19): siRNA sense strand
gccaaagaauguauaaggu

SEQ ID NO: 2187281 - RNA, 19 nt, Homo sapiens
  misc_RNA (1)...(19): siRNA sense strand
aauaaacagucacuacuag

SEQ ID NO: 2187282 - RNA, 19 nt, Homo sapiens
  misc_RNA (1)...(19): siRNA sense strand
ugagggagccugcaagaga

SEQ ID NO: 2187283 - RNA, 19 nt, Homo sapiens
  misc_RNA (1)...(19): siRNA sense strand
gagguguaauccuacuaaa

SEQ ID NO: 2187284 - RNA, 19 nt, Homo sapiens
  misc_RNA (1)...(19): siRNA sense strand
cuaaucagggucaagauaa

SEQ ID NO: 2187285 - RNA, 19 nt, Homo sapiens
  misc_RNA (1)...(19): siRNA sense strand
cacagaugcuauuagauug

SEQ ID NO: 2187286 - RNA, 19 nt, Homo sapiens
  misc_RNA (1)...(19): siRNA sense strand
gauaauguacaaguggaua

SEQ ID NO: 2187287 - RNA, 19 nt, Homo sapiens
  misc_RNA (1)...(19): siRNA sense strand
ccacuacauugagaaagaa

SEQ ID NO: 2187288 - RNA, 19 nt, Homo sapiens
  misc_RNA (1)...(19): siRNA sense strand
caugguggauauuaauaga

SEQ ID NO: 2187289 - RNA, 19 nt, Homo sapiens
  misc_RNA (1)...(19): siRNA sense strand
acaccuaccuguccauaca

SEQ ID NO: 2187290 - RNA, 19 nt, Homo sapiens
  misc_RNA (1)...(19): siRNA sense strand
uaaugacgacuaacucaaa

SEQ ID NO: 2187291 - RNA, 19 nt, Homo sapiens
  misc_RNA (1)...(19): siRNA sense strand
uaccagaugugcauuucuu

SEQ ID NO: 2187292 - RNA, 19 nt, Homo sapiens
  misc_RNA (1)...(19): siRNA sense strand
aaagacgacucucaauuuu

SEQ ID NO: 2187293 - RNA, 19 nt, Homo sapiens
  misc_RNA (1)...(19): siRNA sense strand
ccaaauaccagaugugcau

SEQ ID NO: 2187294 - RNA, 19 nt, Homo sapiens
  misc_RNA (1)...(19): siRNA sense strand
ucauaggagucacaguuga

SEQ ID NO: 2187295 - RNA, 19 nt, Homo sapiens
  misc_RNA (1)...(19): siRNA sense strand
gaguuugcacuaugacuuu

SEQ ID NO: 2187296 - RNA, 19 nt, Homo sapiens
  misc_RNA (1)...(19): siRNA sense strand
cuaggaagaauaacauuug

SEQ ID NO: 2187297 - RNA, 19 nt, Homo sapiens
  misc_RNA (1)...(19): siRNA sense strand
ccagauccauacuccaugu

SEQ ID NO: 2187298 - RNA, 19 nt, Homo sapiens
  misc_RNA (1)...(19): siRNA sense strand
ggagccaaagaauguauaa

SEQ ID NO: 2187299 - RNA, 19 nt, Homo sapiens
  misc_RNA (1)...(19): siRNA sense strand
agacaguugugcuaucaug

SEQ ID NO: 2187300 - RNA, 19 nt, Homo sapiens
  misc_RNA (1)...(19): siRNA sense strand
caacaucuuguauuaaugg

SEQ ID NO: 2187301 - RNA, 19 nt, Homo sapiens
  misc_RNA (1)...(19): siRNA sense strand
gagcagccuuaucaucaca

SEQ ID NO: 2187302 - RNA, 19 nt, Homo sapiens
  misc_RNA (1)...(19): siRNA sense strand
guaccaacaauauaacaga

SEQ ID NO: 2187303 - RNA, 19 nt, Homo sapiens
  misc_RNA (1)...(19): siRNA sense strand
guccauacaucaggucuau

SEQ ID NO: 2187304 - RNA, 19 nt, Homo sapiens
  misc_RNA (1)...(19): siRNA sense strand
uaaucagggucaagauaau

SEQ ID NO: 2187305 - RNA, 19 nt, Homo sapiens
  misc_RNA (1)...(19): siRNA sense strand
aacaauggaucaucuucuu

SEQ ID NO: 2187306 - RNA, 19 nt, Homo sapiens
  misc_RNA (1)...(19): siRNA sense strand
agaagauaaugaagaggaa

SEQ ID NO: 2187307 - RNA, 19 nt, Homo sapiens
  misc_RNA (1)...(19): siRNA sense strand
gaagaagauggcucucugu

SEQ ID NO: 2187308 - RNA, 19 nt, Homo sapiens
  misc_RNA (1)...(19): siRNA sense strand
agaaggaaagacacagaua

SEQ ID NO: 2187309 - RNA, 19 nt, Homo sapiens
  misc_RNA (1)...(19): siRNA sense strand
gcaaagaggcuuguauucc

SEQ ID NO: 2187310 - RNA, 19 nt, Homo sapiens
  misc_RNA (1)...(19): siRNA sense strand
ggugaagauuuauucuauc

SEQ ID NO: 2187311 - RNA, 19 nt, Homo sapiens
  misc_RNA (1)...(19): siRNA sense strand
ucaagccugugcugguaaa

SEQ ID NO: 2187312 - RNA, 19 nt, Homo sapiens
  misc_RNA (1)...(19): siRNA sense strand
ggauuuaaaccaccaacau

SEQ ID NO: 2187313 - RNA, 19 nt, Homo sapiens
  misc_RNA (1)...(19): siRNA sense strand
gaucuuaaacuugcauauc

SEQ ID NO: 2187314 - RNA, 19 nt, Homo sapiens
  misc_RNA (1)...(19): siRNA sense strand
gauggaaccaaagaaugua

SEQ ID NO: 2187315 - RNA, 19 nt, Homo sapiens
  misc_RNA (1)...(19): siRNA sense strand
gugaaacgguugacuuuug

SEQ ID NO: 2187316 - RNA, 19 nt, Homo sapiens
  misc_RNA (1)...(19): siRNA sense strand
cacuuggcuuugaauauaa

SEQ ID NO: 2187317 - RNA, 19 nt, Homo sapiens
  misc_RNA (1)...(19): siRNA sense strand
ccaggccacuacauugaga

SEQ ID NO: 2187318 - RNA, 19 nt, Homo sapiens
  misc_RNA (1)...(19): siRNA sense strand
uaaacagucacuacuagga

SEQ ID NO: 2187319 - RNA, 19 nt, Homo sapiens
  misc_RNA (1)...(19): siRNA sense strand
agaacuacaggcauccuua

SEQ ID NO: 2187320 - RNA, 19 nt, Homo sapiens
  misc_RNA (1)...(19): siRNA sense strand
auacucuacuggagaacua

SEQ ID NO: 2187321 - RNA, 19 nt, Homo sapiens
  misc_RNA (1)...(19): siRNA sense strand
guacggagcaugacuucca

SEQ ID NO: 2187322 - RNA, 19 nt, Homo sapiens
  misc_RNA (1)...(19): siRNA sense strand
gcacuuggcuuugaauaua

SEQ ID NO: 2187323 - RNA, 19 nt, Homo sapiens
  misc_RNA (1)...(19): siRNA sense strand
gaagauauguucccaguuc

SEQ ID NO: 2187324 - RNA, 19 nt, Homo sapiens
  misc_RNA (1)...(19): siRNA sense strand
gaauauaaaugguggaaug

SEQ ID NO: 2187325 - RNA, 19 nt, Homo sapiens
  misc_RNA (1)...(19): siRNA sense strand
gaaaggagccaaagaaugu

SEQ ID NO: 2187326 - RNA, 19 nt, Homo sapiens
  misc_RNA (1)...(19): siRNA sense strand
gaaaucaggcacaaacaua

SEQ ID NO: 2187327 - RNA, 19 nt, Homo sapiens
  misc_RNA (1)...(19): siRNA sense strand
gaaagacacagauaaugua

SEQ ID NO: 2187328 - RNA, 19 nt, Homo sapiens
  misc_RNA (1)...(19): siRNA sense strand
guacaaaugugguagaauc

SEQ ID NO: 2187329 - RNA, 19 nt, Homo sapiens
  misc_RNA (1)...(19): siRNA sense strand
caacaauuauuccuucuga

SEQ ID NO: 2187330 - RNA, 19 nt, Homo sapiens
  misc_RNA (1)...(19): siRNA sense strand
gcacaaacauacucuacug

SEQ ID NO: 2187331 - RNA, 19 nt, Homo sapiens
  misc_RNA (1)...(19): siRNA sense strand
uaaagacgacucucaauuu

SEQ ID NO: 2187332 - RNA, 19 nt, Homo sapiens
  misc_RNA (1)...(19): siRNA sense strand
gauaauagacgguucauca

SEQ ID NO: 2187333 - RNA, 19 nt, Homo sapiens
  misc_RNA (1)...(19): siRNA sense strand
gaaggaaagacacagauaa

SEQ ID NO: 2187334 - RNA, 19 nt, Homo sapiens
  misc_RNA (1)...(19): siRNA sense strand
ggaaagacacagauaaugu

SEQ ID NO: 2187335 - RNA, 19 nt, Homo sapiens
  misc_RNA (1)...(19): siRNA sense strand
guaugccagucaacaauua

SEQ ID NO: 2187336 - RNA, 19 nt, Homo sapiens
  misc_RNA (1)...(19): siRNA sense strand
ggaaggagaagauaaugaa

SEQ ID NO: 2187337 - RNA, 19 nt, Homo sapiens
  misc_RNA (1)...(19): siRNA sense strand
caaagaauguagaccaugu

SEQ ID NO: 2187338 - RNA, 19 nt, Homo sapiens
  misc_RNA (1)...(19): siRNA sense strand
caggaaaccuuguaugugu

SEQ ID NO: 2187339 - RNA, 19 nt, Homo sapiens
  misc_RNA (1)...(19): siRNA sense strand
caaagaggcuuguauucca

SEQ ID NO: 2187340 - RNA, 19 nt, Homo sapiens
  misc_RNA (1)...(19): siRNA sense strand
ggucaagccugugcuggua

SEQ ID NO: 2187341 - RNA, 19 nt, Homo sapiens
  misc_RNA (1)...(19): siRNA sense strand
ucacagaugcuauuagauu

SEQ ID NO: 2187342 - RNA, 19 nt, Homo sapiens
  misc_RNA (1)...(19): siRNA sense strand
guaaagacgacucucaauu

SEQ ID NO: 2187343 - RNA, 19 nt, Homo sapiens
  misc_RNA (1)...(19): siRNA sense strand
gcagacaguugugcuauca

SEQ ID NO: 2187344 - RNA, 19 nt, Homo sapiens
  misc_RNA (1)...(19): siRNA sense strand
gaacuaaucagggucaaga

SEQ ID NO: 2187345 - RNA, 19 nt, Homo sapiens
  misc_RNA (1)...(19): siRNA sense strand
ucaaugacauggugaagau

SEQ ID NO: 2187346 - RNA, 19 nt, Homo sapiens
  misc_RNA (1)...(19): siRNA sense strand
agacacagauaauguacaa

SEQ ID NO: 2187347 - RNA, 19 nt, Homo sapiens
  misc_RNA (1)...(19): siRNA sense strand
caagagaggauuucaggaa

SEQ ID NO: 2187348 - RNA, 19 nt, Homo sapiens
  misc_RNA (1)...(19): siRNA sense strand
gagcaggagugauuucagu

SEQ ID NO: 2187349 - RNA, 19 nt, Homo sapiens
  misc_RNA (1)...(19): siRNA sense strand
ggagguggcuggagaucau

SEQ ID NO: 2187350 - RNA, 19 nt, Homo sapiens
  misc_RNA (1)...(19): siRNA sense strand
gaacuaggaagaauaacau

SEQ ID NO: 2187351 - RNA, 19 nt, Homo sapiens
  misc_RNA (1)...(19): siRNA sense strand
aagaggaaguuguauauuc

SEQ ID NO: 2187352 - RNA, 19 nt, Homo sapiens
  misc_RNA (1)...(19): siRNA sense strand
gaggaaggauccagugagu

SEQ ID NO: 2187353 - RNA, 19 nt, Homo sapiens
  misc_RNA (1)...(19): siRNA sense strand
aaacaagcuuacacccaua

SEQ ID NO: 2187354 - RNA, 19 nt, Homo sapiens
  misc_RNA (1)...(19): siRNA sense strand
ggaaggauccagugagugu

SEQ ID NO: 2187355 - RNA, 19 nt, Homo sapiens
  misc_RNA (1)...(19): siRNA sense strand
ggucagaugauuacacaaa

SEQ ID NO: 2187356 - RNA, 19 nt, Homo sapiens
  misc_RNA (1)...(19): siRNA sense strand
caauaaacagucacuacua

SEQ ID NO: 2187357 - RNA, 19 nt, Homo sapiens
  misc_RNA (1)...(19): siRNA sense strand
ccgaucaacugcugugaaa

SEQ ID NO: 2187358 - RNA, 19 nt, Homo sapiens
  misc_RNA (1)...(19): siRNA sense strand
gagguucugacaaugauua

SEQ ID NO: 2187359 - RNA, 19 nt, Homo sapiens
  misc_RNA (1)...(19): siRNA sense strand
gaagaaggaaagacacaga

SEQ ID NO: 2187360 - RNA, 19 nt, Homo sapiens
  misc_RNA (1)...(19): siRNA sense strand
ggaauuucuuugccugaga

SEQ ID NO: 2187361 - RNA, 19 nt, Homo sapiens
  misc_RNA (1)...(19): siRNA sense strand
aaagugcgauggaaugaau

SEQ ID NO: 2187362 - RNA, 19 nt, Homo sapiens
  misc_RNA (1)...(19): siRNA sense strand
ucucacagaugcuauuaga

SEQ ID NO: 2187363 - RNA, 19 nt, Homo sapiens
  misc_RNA (1)...(19): siRNA sense strand
ugacaaugauuaccugauc

SEQ ID NO: 2187364 - RNA, 19 nt, Homo sapiens
  misc_RNA (1)...(19): siRNA sense strand
aaaaugagguguaauccua

SEQ ID NO: 2187365 - RNA, 19 nt, Homo sapiens
  misc_RNA (1)...(19): siRNA sense strand
gccacuacauugagaaaga

SEQ ID NO: 2187366 - RNA, 19 nt, Homo sapiens
  misc_RNA (1)...(19): siRNA sense strand
gguguaauccuacuaaauc

SEQ ID NO: 2187367 - RNA, 19 nt, Homo sapiens
  misc_RNA (1)...(19): siRNA sense strand
gaagaggaaguuguauauu

SEQ ID NO: 2187368 - RNA, 19 nt, Homo sapiens
  misc_RNA (1)...(19): siRNA sense strand
gcucugaccugcuacuucu

SEQ ID NO: 2187369 - RNA, 19 nt, Homo sapiens
  misc_RNA (1)...(19): siRNA sense strand
gaacuacaggcauccuuau

SEQ ID NO: 2187370 - RNA, 19 nt, Homo sapiens
  misc_RNA (1)...(19): siRNA sense strand
gaagcuugcccucugugua

SEQ ID NO: 2187371 - RNA, 19 nt, Homo sapiens
  misc_RNA (1)...(19): siRNA sense strand
ugagaaaggagccaaagaa

SEQ ID NO: 2187372 - RNA, 19 nt, Homo sapiens
  misc_RNA (1)...(19): siRNA sense strand
uaaugaagaggaaguugua

SEQ ID NO: 2187373 - RNA, 19 nt, Homo sapiens
  misc_RNA (1)...(19): siRNA sense strand
aaucagaguuugcacuaug

SEQ ID NO: 2187374 - RNA, 19 nt, Homo sapiens
  misc_RNA (1)...(19): siRNA sense strand
ggaagaauaacauuugucu

SEQ ID NO: 2187375 - RNA, 19 nt, Homo sapiens
  misc_RNA (1)...(19): siRNA sense strand
gagaaaggagccaaagaau

SEQ ID NO: 2187376 - RNA, 19 nt, Homo sapiens
  misc_RNA (1)...(19): siRNA sense strand
gaauguauaagguguaaag

SEQ ID NO: 2187377 - RNA, 19 nt, Homo sapiens
  misc_RNA (1)...(19): siRNA sense strand
ugaagaggaaguuguauau

SEQ ID NO: 2187378 - RNA, 19 nt, Homo sapiens
  misc_RNA (1)...(19): siRNA sense strand
ccaacaauauaacagacuu

SEQ ID NO: 2187379 - RNA, 19 nt, Homo sapiens
  misc_RNA (1)...(19): siRNA sense strand
aauagacgguucaucaaug

SEQ ID NO: 2187380 - RNA, 19 nt, Homo sapiens
  misc_RNA (1)...(19): siRNA sense strand
gccaaagaauguauaaggu

SEQ ID NO: 2187381 - RNA, 19 nt, Homo sapiens
  misc_RNA (1)...(19): siRNA sense strand
aauaaacagucacuacuag

SEQ ID NO: 2187382 - RNA, 19 nt, Homo sapiens
  misc_RNA (1)...(19): siRNA sense strand
ugagggagccugcaagaga

SEQ ID NO: 2187383 - RNA, 19 nt, Homo sapiens
  misc_RNA (1)...(19): siRNA sense strand
gagguguaauccuacuaaa

SEQ ID NO: 2187384 - RNA, 19 nt, Homo sapiens
  misc_RNA (1)...(19): siRNA sense strand
cuaaucagggucaagauaa

SEQ ID NO: 2187385 - RNA, 19 nt, Homo sapiens
  misc_RNA (1)...(19): siRNA sense strand
cacagaugcuauuagauug

SEQ ID NO: 2187386 - RNA, 19 nt, Homo sapiens
  misc_RNA (1)...(19): siRNA sense strand
gauaauguacaaguggaua

SEQ ID NO: 2187387 - RNA, 19 nt, Homo sapiens
  misc_RNA (1)...(19): siRNA sense strand
ccacuacauugagaaagaa

SEQ ID NO: 2187388 - RNA, 19 nt, Homo sapiens
  misc_RNA (1)...(19): siRNA sense strand
caugguggauauuaauaga

SEQ ID NO: 2187389 - RNA, 19 nt, Homo sapiens
  misc_RNA (1)...(19): siRNA sense strand
acaccuaccuguccauaca

SEQ ID NO: 2187390 - RNA, 19 nt, Homo sapiens
  misc_RNA (1)...(19): siRNA sense strand
uaaugacgacuaacucaaa

SEQ ID NO: 2187391 - RNA, 19 nt, Homo sapiens
  misc_RNA (1)...(19): siRNA sense strand
uaccagaugugcauuucuu

SEQ ID NO: 2187392 - RNA, 19 nt, Homo sapiens
  misc_RNA (1)...(19): siRNA sense strand
aaagacgacucucaauuuu

SEQ ID NO: 2187393 - RNA, 19 nt, Homo sapiens
  misc_RNA (1)...(19): siRNA sense strand
ccaaauaccagaugugcau

SEQ ID NO: 2187394 - RNA, 19 nt, Homo sapiens
  misc_RNA (1)...(19): siRNA sense strand
ucauaggagucacaguuga

SEQ ID NO: 2187395 - RNA, 19 nt, Homo sapiens
  misc_RNA (1)...(19): siRNA sense strand
gaguuugcacuaugacuuu

SEQ ID NO: 2187396 - RNA, 19 nt, Homo sapiens
  misc_RNA (1)...(19): siRNA sense strand
cuaggaagaauaacauuug

SEQ ID NO: 2187397 - RNA, 19 nt, Homo sapiens
  misc_RNA (1)...(19): siRNA sense strand
ccagauccauacuccaugu

SEQ ID NO: 2187398 - RNA, 19 nt, Homo sapiens
  misc_RNA (1)...(19): siRNA sense strand
ggagccaaagaauguauaa

SEQ ID NO: 2187399 - RNA, 19 nt, Homo sapiens
  misc_RNA (1)...(19): siRNA sense strand
agacaguugugcuaucaug

SEQ ID NO: 2187400 - RNA, 19 nt, Homo sapiens
  misc_RNA (1)...(19): siRNA sense strand
caacaucuuguauuaaugg

SEQ ID NO: 2187401 - RNA, 19 nt, Homo sapiens
  misc_RNA (1)...(19): siRNA sense strand
gagcagccuuaucaucaca

SEQ ID NO: 2187402 - RNA, 19 nt, Homo sapiens
  misc_RNA (1)...(19): siRNA sense strand
guaccaacaauauaacaga

SEQ ID NO: 2187403 - RNA, 19 nt, Homo sapiens
  misc_RNA (1)...(19): siRNA sense strand
guccauacaucaggucuau

SEQ ID NO: 2187404 - RNA, 19 nt, Homo sapiens
  misc_RNA (1)...(19): siRNA sense strand
uaaucagggucaagauaau

SEQ ID NO: 2187405 - RNA, 19 nt, Homo sapiens
  misc_RNA (1)...(19): siRNA sense strand
aacaauggaucaucuucuu

SEQ ID NO: 2187406 - RNA, 19 nt, Homo sapiens
  misc_RNA (1)...(19): siRNA sense strand
agaagauaaugaagaggaa

SEQ ID NO: 2187407 - RNA, 19 nt, Homo sapiens
  misc_RNA (1)...(19): siRNA sense strand
gaagaagauggcucucugu

SEQ ID NO: 2187408 - RNA, 19 nt, Homo sapiens
  misc_RNA (1)...(19): siRNA sense strand
ucaagccugugcugguaaa

SEQ ID NO: 2187409 - RNA, 19 nt, Homo sapiens
  misc_RNA (1)...(19): siRNA sense strand
gcaaagaggcuuguauucc

SEQ ID NO: 2187410 - RNA, 19 nt, Homo sapiens
  misc_RNA (1)...(19): siRNA sense strand
ggugaagauuuauucuauc

SEQ ID NO: 2187411 - RNA, 19 nt, Homo sapiens
  misc_RNA (1)...(19): siRNA sense strand
ggauuuaaaccaccaacau

SEQ ID NO: 2187412 - RNA, 19 nt, Homo sapiens
  misc_RNA (1)...(19): siRNA sense strand
gaucuuaaacuugcauauc

SEQ ID NO: 2187413 - RNA, 19 nt, Homo sapiens
  misc_RNA (1)...(19): siRNA sense strand
agaaggaaagacacagaua

SEQ ID NO: 2187414 - RNA, 19 nt, Homo sapiens
  misc_RNA (1)...(19): siRNA sense strand
gauggaaccaaagaaugua

SEQ ID NO: 2187415 - RNA, 19 nt, Homo sapiens
  misc_RNA (1)...(19): siRNA sense strand
gugaaacgguugacuuuug

SEQ ID NO: 2187416 - RNA, 19 nt, Homo sapiens
  misc_RNA (1)...(19): siRNA sense strand
cacuuggcuuugaauauaa

SEQ ID NO: 2187417 - RNA, 19 nt, Homo sapiens
  misc_RNA (1)...(19): siRNA sense strand
ccaggcacauucagcaaca

SEQ ID NO: 2187418 - RNA, 19 nt, Homo sapiens
  misc_RNA (1)...(19): siRNA sense strand
uaaacagucacuacuagga

SEQ ID NO: 2187419 - RNA, 19 nt, Homo sapiens
  misc_RNA (1)...(19): siRNA sense strand
guacggagcaugacuucca

SEQ ID NO: 2187420 - RNA, 19 nt, Homo sapiens
  misc_RNA (1)...(19): siRNA sense strand
ccaggccacuacauugaga

SEQ ID NO: 2187421 - RNA, 19 nt, Homo sapiens
  misc_RNA (1)...(19): siRNA sense strand
auacucuacuggagaacua

SEQ ID NO: 2187422 - RNA, 19 nt, Homo sapiens
  misc_RNA (1)...(19): siRNA sense strand
gcacuuggcuuugaauaua

SEQ ID NO: 2187423 - RNA, 19 nt, Homo sapiens
  misc_RNA (1)...(19): siRNA sense strand
gaagauauguucccaguuc

SEQ ID NO: 2187424 - RNA, 19 nt, Homo sapiens
  misc_RNA (1)...(19): siRNA sense strand
gaauauaaaugguggaaug

SEQ ID NO: 2187425 - RNA, 19 nt, Homo sapiens
  misc_RNA (1)...(19): siRNA sense strand
gaaaggagccaaagaaugu

SEQ ID NO: 2187426 - RNA, 19 nt, Homo sapiens
  misc_RNA (1)...(19): siRNA sense strand
gaaaucaggcacaaacaua

SEQ ID NO: 2187427 - RNA, 19 nt, Homo sapiens
  misc_RNA (1)...(19): siRNA sense strand
gaaagacacagauaaugua

SEQ ID NO: 2187428 - RNA, 19 nt, Homo sapiens
  misc_RNA (1)...(19): siRNA sense strand
guacaaaugugguagaauc

SEQ ID NO: 2187429 - RNA, 19 nt, Homo sapiens
  misc_RNA (1)...(19): siRNA sense strand
caacaauuauuccuucuga

SEQ ID NO: 2187430 - RNA, 19 nt, Homo sapiens
  misc_RNA (1)...(19): siRNA sense strand
gcacaaacauacucuacug

SEQ ID NO: 2187431 - RNA, 19 nt, Homo sapiens
  misc_RNA (1)...(19): siRNA sense strand
uaaagacgacucucaauuu

SEQ ID NO: 2187432 - RNA, 19 nt, Homo sapiens
  misc_RNA (1)...(19): siRNA sense strand
gauaauagacgguucauca

SEQ ID NO: 2187433 - RNA, 19 nt, Homo sapiens
  misc_RNA (1)...(19): siRNA sense strand
gaaggaaagacacagauaa

SEQ ID NO: 2187434 - RNA, 19 nt, Homo sapiens
  misc_RNA (1)...(19): siRNA sense strand
ggaaagacacagauaaugu

SEQ ID NO: 2187435 - RNA, 19 nt, Homo sapiens
  misc_RNA (1)...(19): siRNA sense strand
guaugccagucaacaauua

SEQ ID NO: 2187436 - RNA, 19 nt, Homo sapiens
  misc_RNA (1)...(19): siRNA sense strand
ggaaggagaagauaaugaa

SEQ ID NO: 2187437 - RNA, 19 nt, Homo sapiens
  misc_RNA (1)...(19): siRNA sense strand
caaagaauguagaccaugu

SEQ ID NO: 2187438 - RNA, 19 nt, Homo sapiens
  misc_RNA (1)...(19): siRNA sense strand
caggaaaccuuguaugugu

SEQ ID NO: 2187439 - RNA, 19 nt, Homo sapiens
  misc_RNA (1)...(19): siRNA sense strand
caaagaggcuuguauucca

SEQ ID NO: 2187440 - RNA, 19 nt, Homo sapiens
  misc_RNA (1)...(19): siRNA sense strand
ggucaagccugugcuggua

SEQ ID NO: 2187441 - RNA, 19 nt, Homo sapiens
  misc_RNA (1)...(19): siRNA sense strand
ucacagaugcuauuagauu

SEQ ID NO: 2187442 - RNA, 19 nt, Homo sapiens
  misc_RNA (1)...(19): siRNA sense strand
guaaagacgacucucaauu

SEQ ID NO: 2187443 - RNA, 19 nt, Homo sapiens
  misc_RNA (1)...(19): siRNA sense strand
gcagacaguugugcuauca

SEQ ID NO: 2187444 - RNA, 19 nt, Homo sapiens
  misc_RNA (1)...(19): siRNA sense strand
gaacuaaucagggucaaga

SEQ ID NO: 2187445 - RNA, 19 nt, Homo sapiens
  misc_RNA (1)...(19): siRNA sense strand
ucaaugacauggugaagau

SEQ ID NO: 2187446 - RNA, 19 nt, Homo sapiens
  misc_RNA (1)...(19): siRNA sense strand
agacacagauaauguacaa

SEQ ID NO: 2187447 - RNA, 19 nt, Homo sapiens
  misc_RNA (1)...(19): siRNA sense strand
caagagaggauuucaggaa

SEQ ID NO: 2187448 - RNA, 19 nt, Homo sapiens
  misc_RNA (1)...(19): siRNA sense strand
gagcaggagugauuucagu

SEQ ID NO: 2187449 - RNA, 19 nt, Homo sapiens
  misc_RNA (1)...(19): siRNA sense strand
ggagguggcuggagaucau

SEQ ID NO: 2187450 - RNA, 19 nt, Homo sapiens
  misc_RNA (1)...(19): siRNA sense strand
gaacuaggaagaauaacau

SEQ ID NO: 2187451 - RNA, 19 nt, Homo sapiens
  misc_RNA (1)...(19): siRNA sense strand
aagaggaaguuguauauuc

SEQ ID NO: 2187452 - RNA, 19 nt, Homo sapiens
  misc_RNA (1)...(19): siRNA sense strand
gaggaaggauccagugagu

SEQ ID NO: 2187453 - RNA, 19 nt, Homo sapiens
  misc_RNA (1)...(19): siRNA sense strand
aaacaagcuuacacccaua

SEQ ID NO: 2187454 - RNA, 19 nt, Homo sapiens
  misc_RNA (1)...(19): siRNA sense strand
ggaaggauccagugagugu

SEQ ID NO: 2187455 - RNA, 19 nt, Homo sapiens
  misc_RNA (1)...(19): siRNA sense strand
ggucagaugauuacacaaa

SEQ ID NO: 2187456 - RNA, 19 nt, Homo sapiens
  misc_RNA (1)...(19): siRNA sense strand
caauaaacagucacuacua

SEQ ID NO: 2187457 - RNA, 19 nt, Homo sapiens
  misc_RNA (1)...(19): siRNA sense strand
ccgaucaacugcugugaaa

SEQ ID NO: 2187458 - RNA, 19 nt, Homo sapiens
  misc_RNA (1)...(19): siRNA sense strand
gagguucugacaaugauua

SEQ ID NO: 2187459 - RNA, 19 nt, Homo sapiens
  misc_RNA (1)...(19): siRNA sense strand
gaagaaggaaagacacaga

SEQ ID NO: 2187460 - RNA, 19 nt, Homo sapiens
  misc_RNA (1)...(19): siRNA sense strand
ggaauuucuuugccugaga

SEQ ID NO: 2187461 - RNA, 19 nt, Homo sapiens
  misc_RNA (1)...(19): siRNA sense strand
aaagugcgauggaaugaau

SEQ ID NO: 2187462 - RNA, 19 nt, Homo sapiens
  misc_RNA (1)...(19): siRNA sense strand
ucucacagaugcuauuaga

SEQ ID NO: 2187463 - RNA, 19 nt, Homo sapiens
  misc_RNA (1)...(19): siRNA sense strand
ugacaaugauuaccugauc

SEQ ID NO: 2187464 - RNA, 19 nt, Homo sapiens
  misc_RNA (1)...(19): siRNA sense strand
aaaaugagguguaauccua

SEQ ID NO: 2187465 - RNA, 19 nt, Homo sapiens
  misc_RNA (1)...(19): siRNA sense strand
gccacuacauugagaaaga

SEQ ID NO: 2187466 - RNA, 19 nt, Homo sapiens
  misc_RNA (1)...(19): siRNA sense strand
gguguaauccuacuaaauc

SEQ ID NO: 2187467 - RNA, 19 nt, Homo sapiens
  misc_RNA (1)...(19): siRNA sense strand
gaagaggaaguuguauauu

SEQ ID NO: 2187468 - RNA, 19 nt, Homo sapiens
  misc_RNA (1)...(19): siRNA sense strand
gcucugaccugcuacuucu

SEQ ID NO: 2187469 - RNA, 19 nt, Homo sapiens
  misc_RNA (1)...(19): siRNA sense strand
gaacuacaggcauccuuau

SEQ ID NO: 2187470 - RNA, 19 nt, Homo sapiens
  misc_RNA (1)...(19): siRNA sense strand
gaagcuugcccucugugua

SEQ ID NO: 2187471 - RNA, 19 nt, Homo sapiens
  misc_RNA (1)...(19): siRNA sense strand
ugagaaaggagccaaagaa

SEQ ID NO: 2187472 - RNA, 19 nt, Homo sapiens
  misc_RNA (1)...(19): siRNA sense strand
uaaugaagaggaaguugua

SEQ ID NO: 2187473 - RNA, 19 nt, Homo sapiens
  misc_RNA (1)...(19): siRNA sense strand
aaucagaguuugcacuaug

SEQ ID NO: 2187474 - RNA, 19 nt, Homo sapiens
  misc_RNA (1)...(19): siRNA sense strand
ggaagaauaacauuugucu

SEQ ID NO: 2187475 - RNA, 19 nt, Homo sapiens
  misc_RNA (1)...(19): siRNA sense strand
gagaaaggagccaaagaau

SEQ ID NO: 2187476 - RNA, 19 nt, Homo sapiens
  misc_RNA (1)...(19): siRNA sense strand
gaauguauaagguguaaag

SEQ ID NO: 2187477 - RNA, 19 nt, Homo sapiens
  misc_RNA (1)...(19): siRNA sense strand
ugaagaggaaguuguauau

SEQ ID NO: 2187478 - RNA, 19 nt, Homo sapiens
  misc_RNA (1)...(19): siRNA sense strand
ccaacaauauaacagacuu

SEQ ID NO: 2187479 - RNA, 19 nt, Homo sapiens
  misc_RNA (1)...(19): siRNA sense strand
aauagacgguucaucaaug

SEQ ID NO: 2187480 - RNA, 19 nt, Homo sapiens
  misc_RNA (1)...(19): siRNA sense strand
gccaaagaauguauaaggu

SEQ ID NO: 2187481 - RNA, 19 nt, Homo sapiens
  misc_RNA (1)...(19): siRNA sense strand
aauaaacagucacuacuag

SEQ ID NO: 2187482 - RNA, 19 nt, Homo sapiens
  misc_RNA (1)...(19): siRNA sense strand
ugagggagccugcaagaga

SEQ ID NO: 2187483 - RNA, 19 nt, Homo sapiens
  misc_RNA (1)...(19): siRNA sense strand
gagguguaauccuacuaaa

SEQ ID NO: 2187484 - RNA, 19 nt, Homo sapiens
  misc_RNA (1)...(19): siRNA sense strand
cuaaucagggucaagauaa

SEQ ID NO: 2187485 - RNA, 19 nt, Homo sapiens
  misc_RNA (1)...(19): siRNA sense strand
cacagaugcuauuagauug

SEQ ID NO: 2187486 - RNA, 19 nt, Homo sapiens
  misc_RNA (1)...(19): siRNA sense strand
gauaauguacaaguggaua

SEQ ID NO: 2187487 - RNA, 19 nt, Homo sapiens
  misc_RNA (1)...(19): siRNA sense strand
ccacuacauugagaaagaa

SEQ ID NO: 2187488 - RNA, 19 nt, Homo sapiens
  misc_RNA (1)...(19): siRNA sense strand
caugguggauauuaauaga

SEQ ID NO: 2187489 - RNA, 19 nt, Homo sapiens
  misc_RNA (1)...(19): siRNA sense strand
acaccuaccuguccauaca

SEQ ID NO: 2187490 - RNA, 19 nt, Homo sapiens
  misc_RNA (1)...(19): siRNA sense strand
uaaugacgacuaacucaaa

SEQ ID NO: 2187491 - RNA, 19 nt, Homo sapiens
  misc_RNA (1)...(19): siRNA sense strand
uaccagaugugcauuucuu

SEQ ID NO: 2187492 - RNA, 19 nt, Homo sapiens
  misc_RNA (1)...(19): siRNA sense strand
aaagacgacucucaauuuu

SEQ ID NO: 2187493 - RNA, 19 nt, Homo sapiens
  misc_RNA (1)...(19): siRNA sense strand
ccaaauaccagaugugcau

SEQ ID NO: 2187494 - RNA, 19 nt, Homo sapiens
  misc_RNA (1)...(19): siRNA sense strand
ucauaggagucacaguuga

SEQ ID NO: 2187495 - RNA, 19 nt, Homo sapiens
  misc_RNA (1)...(19): siRNA sense strand
gaguuugcacuaugacuuu

SEQ ID NO: 2187496 - RNA, 19 nt, Homo sapiens
  misc_RNA (1)...(19): siRNA sense strand
cuaggaagaauaacauuug

SEQ ID NO: 2187497 - RNA, 19 nt, Homo sapiens
  misc_RNA (1)...(19): siRNA sense strand
ccagauccauacuccaugu

SEQ ID NO: 2187498 - RNA, 19 nt, Homo sapiens
  misc_RNA (1)...(19): siRNA sense strand
ggagccaaagaauguauaa

SEQ ID NO: 2187499 - RNA, 19 nt, Homo sapiens
  misc_RNA (1)...(19): siRNA sense strand
agacaguugugcuaucaug

SEQ ID NO: 2187500 - RNA, 19 nt, Homo sapiens
  misc_RNA (1)...(19): siRNA sense strand
caacaucuuguauuaaugg

SEQ ID NO: 2187501 - RNA, 19 nt, Homo sapiens
  misc_RNA (1)...(19): siRNA sense strand
gagcagccuuaucaucaca

SEQ ID NO: 2187502 - RNA, 19 nt, Homo sapiens
  misc_RNA (1)...(19): siRNA sense strand
guaccaacaauauaacaga

SEQ ID NO: 2187503 - RNA, 19 nt, Homo sapiens
  misc_RNA (1)...(19): siRNA sense strand
guccauacaucaggucuau

SEQ ID NO: 2187504 - RNA, 19 nt, Homo sapiens
  misc_RNA (1)...(19): siRNA sense strand
uaaucagggucaagauaau

SEQ ID NO: 2187505 - RNA, 19 nt, Homo sapiens
  misc_RNA (1)...(19): siRNA sense strand
aacaauggaucaucuucuu

SEQ ID NO: 2187506 - RNA, 19 nt, Homo sapiens
  misc_RNA (1)...(19): siRNA sense strand
agaagauaaugaagaggaa

SEQ ID NO: 2187507 - RNA, 19 nt, Homo sapiens
  misc_RNA (1)...(19): siRNA sense strand
gaagaagauggcucucugu

SEQ ID NO: 2187508 - RNA, 19 nt, Homo sapiens
  misc_RNA (1)...(19): siRNA sense strand
ucaagccugugcugguaaa

SEQ ID NO: 2187509 - RNA, 19 nt, Homo sapiens
  misc_RNA (1)...(19): siRNA sense strand
gcaaagaggcuuguauucc

SEQ ID NO: 2187510 - RNA, 19 nt, Homo sapiens
  misc_RNA (1)...(19): siRNA sense strand
ggugaagauuuauucuauc

SEQ ID NO: 2187511 - RNA, 19 nt, Homo sapiens
  misc_RNA (1)...(19): siRNA sense strand
ggauuuaaaccaccaacau

SEQ ID NO: 2187512 - RNA, 19 nt, Homo sapiens
  misc_RNA (1)...(19): siRNA sense strand
gaucuuaaacuugcauauc

SEQ ID NO: 2187513 - RNA, 19 nt, Homo sapiens
  misc_RNA (1)...(19): siRNA sense strand
agaaggaaagacacagaua

SEQ ID NO: 2187514 - RNA, 19 nt, Homo sapiens
  misc_RNA (1)...(19): siRNA sense strand
gauggaaccaaagaaugua

SEQ ID NO: 2187515 - RNA, 19 nt, Homo sapiens
  misc_RNA (1)...(19): siRNA sense strand
gugaaacgguugacuuuug

SEQ ID NO: 2187516 - RNA, 19 nt, Homo sapiens
  misc_RNA (1)...(19): siRNA sense strand
cacuuggcuuugaauauaa

SEQ ID NO: 2187517 - RNA, 19 nt, Homo sapiens
  misc_RNA (1)...(19): siRNA sense strand
ccaggcacauucagcaaca

SEQ ID NO: 2187518 - RNA, 19 nt, Homo sapiens
  misc_RNA (1)...(19): siRNA sense strand
uaaacagucacuacuagga

SEQ ID NO: 2187519 - RNA, 19 nt, Homo sapiens
  misc_RNA (1)...(19): siRNA sense strand
guacggagcaugacuucca

SEQ ID NO: 2187520 - RNA, 19 nt, Homo sapiens
  misc_RNA (1)...(19): siRNA sense strand
ccaggccacuacauugaga

SEQ ID NO: 2187521 - RNA, 19 nt, Homo sapiens
  misc_RNA (1)...(19): siRNA sense strand
auacucuacuggagaacua

SEQ ID NO: 2187522 - RNA, 19 nt, Homo sapiens
  misc_RNA (1)...(19): siRNA sense strand
caggaaagcucaaacauuu

SEQ ID NO: 2187523 - RNA, 19 nt, Homo sapiens
  misc_RNA (1)...(19): siRNA sense strand
caacacaaguucaccauga

SEQ ID NO: 2187524 - RNA, 19 nt, Homo sapiens
  misc_RNA (1)...(19): siRNA sense strand
uaucaacccuacaaaguua

SEQ ID NO: 2187525 - RNA, 19 nt, Homo sapiens
  misc_RNA (1)...(19): siRNA sense strand
ggacugacaauacuacaua

SEQ ID NO: 2187526 - RNA, 19 nt, Homo sapiens
  misc_RNA (1)...(19): siRNA sense strand
gcaagaccauccagaguga

SEQ ID NO: 2187527 - RNA, 19 nt, Homo sapiens
  misc_RNA (1)...(19): siRNA sense strand
gcaauuacaucgugaaggu

SEQ ID NO: 2187528 - RNA, 19 nt, Homo sapiens
  misc_RNA (1)...(19): siRNA sense strand
ggaaagugauaucauuaug

SEQ ID NO: 2187529 - RNA, 19 nt, Homo sapiens
  misc_RNA (1)...(19): siRNA sense strand
ggagaagcuugcacagaaa

SEQ ID NO: 2187530 - RNA, 19 nt, Homo sapiens
  misc_RNA (1)...(19): siRNA sense strand
gagaggccauccuauuuga

SEQ ID NO: 2187531 - RNA, 19 nt, Homo sapiens
  misc_RNA (1)...(19): siRNA sense strand
gaaaguagcccagaagaca

SEQ ID NO: 2187532 - RNA, 19 nt, Homo sapiens
  misc_RNA (1)...(19): siRNA sense strand
aggaagacauugggaauua

SEQ ID NO: 2187533 - RNA, 19 nt, Homo sapiens
  misc_RNA (1)...(19): siRNA sense strand
gcaugggccucgcuuagaa

SEQ ID NO: 2187534 - RNA, 19 nt, Homo sapiens
  misc_RNA (1)...(19): siRNA sense strand
ucagugaaauggaaaguga

SEQ ID NO: 2187535 - RNA, 19 nt, Homo sapiens
  misc_RNA (1)...(19): siRNA sense strand
uuacugggcucugugaaua

SEQ ID NO: 2187536 - RNA, 19 nt, Homo sapiens
  misc_RNA (1)...(19): siRNA sense strand
gaaaaucauugucaccuuu

SEQ ID NO: 2187537 - RNA, 19 nt, Homo sapiens
  misc_RNA (1)...(19): siRNA sense strand
gcuuagaaguugcaucuga

SEQ ID NO: 2187538 - RNA, 19 nt, Homo sapiens
  misc_RNA (1)...(19): siRNA sense strand
gaggaacccugucagugaa

SEQ ID NO: 2187539 - RNA, 19 nt, Homo sapiens
  misc_RNA (1)...(19): siRNA sense strand
uaucaucacuuccguagga

SEQ ID NO: 2187540 - RNA, 19 nt, Homo sapiens
  misc_RNA (1)...(19): siRNA sense strand
uggagaagcuugcacagaa

SEQ ID NO: 2187541 - RNA, 19 nt, Homo sapiens
  misc_RNA (1)...(19): siRNA sense strand
cagaucauauggcuauuug

SEQ ID NO: 2187542 - RNA, 19 nt, Homo sapiens
  misc_RNA (1)...(19): siRNA sense strand
ggagaggccauccuauuug

SEQ ID NO: 2187543 - RNA, 19 nt, Homo sapiens
  misc_RNA (1)...(19): siRNA sense strand
gcaaguauaacuggaauau

SEQ ID NO: 2187544 - RNA, 19 nt, Homo sapiens
  misc_RNA (1)...(19): siRNA sense strand
cacaaugcccaaauacuua

SEQ ID NO: 2187545 - RNA, 19 nt, Homo sapiens
  misc_RNA (1)...(19): siRNA sense strand
gaaacagaauacaggaaag

SEQ ID NO: 2187546 - RNA, 19 nt, Homo sapiens
  misc_RNA (1)...(19): siRNA sense strand
cccaaugcaucucugcuua

SEQ ID NO: 2187547 - RNA, 19 nt, Homo sapiens
  misc_RNA (1)...(19): siRNA sense strand
gggaaguguuuacuguuga

SEQ ID NO: 2187548 - RNA, 19 nt, Homo sapiens
  misc_RNA (1)...(19): siRNA sense strand
agaagacaauggacuaugu

SEQ ID NO: 2187549 - RNA, 19 nt, Homo sapiens
  misc_RNA (1)...(19): siRNA sense strand
ucagggaaauggaacucua

SEQ ID NO: 2187550 - RNA, 19 nt, Homo sapiens
  misc_RNA (1)...(19): siRNA sense strand
ucacaguuaucaucacuuc

SEQ ID NO: 2187551 - RNA, 19 nt, Homo sapiens
  misc_RNA (1)...(19): siRNA sense strand
gaaauggaaagugauauca

SEQ ID NO: 2187552 - RNA, 19 nt, Homo sapiens
  misc_RNA (1)...(19): siRNA sense strand
ccacugcaguucccugaug

SEQ ID NO: 2187553 - RNA, 19 nt, Homo sapiens
  misc_RNA (1)...(19): siRNA sense strand
gaaguugcaucugagaaag

SEQ ID NO: 2187554 - RNA, 19 nt, Homo sapiens
  misc_RNA (1)...(19): siRNA sense strand
gggccucgcuuagaaguug

SEQ ID NO: 2187555 - RNA, 19 nt, Homo sapiens
  misc_RNA (1)...(19): siRNA sense strand
gcacucggcuagcuuacca

SEQ ID NO: 2187556 - RNA, 19 nt, Homo sapiens
  misc_RNA (1)...(19): siRNA sense strand
ggaaauggaacucuaucug

SEQ ID NO: 2187557 - RNA, 19 nt, Homo sapiens
  misc_RNA (1)...(19): siRNA sense strand
caucagacauccagaucau

SEQ ID NO: 2187558 - RNA, 19 nt, Homo sapiens
  misc_RNA (1)...(19): siRNA sense strand
ugaggaacccugucaguga

SEQ ID NO: 2187559 - RNA, 19 nt, Homo sapiens
  misc_RNA (1)...(19): siRNA sense strand
caagugaauucugauaaag

SEQ ID NO: 2187560 - RNA, 19 nt, Homo sapiens
  misc_RNA (1)...(19): siRNA sense strand
ccaugaagaugcucuggau

SEQ ID NO: 2187561 - RNA, 19 nt, Homo sapiens
  misc_RNA (1)...(19): siRNA sense strand
ggaauaccaacacaaguuc

SEQ ID NO: 2187562 - RNA, 19 nt, Homo sapiens
  misc_RNA (1)...(19): siRNA sense strand
acacaaugcccaaauacuu

SEQ ID NO: 2187563 - RNA, 19 nt, Homo sapiens
  misc_RNA (1)...(19): siRNA sense strand
gaggccauccuauuugauu

SEQ ID NO: 2187564 - RNA, 19 nt, Homo sapiens
  misc_RNA (1)...(19): siRNA sense strand
caacaccuacuccuggauu

SEQ ID NO: 2187565 - RNA, 19 nt, Homo sapiens
  misc_RNA (1)...(19): siRNA sense strand
gagaaaguagcccagaaga

SEQ ID NO: 2187566 - RNA, 19 nt, Homo sapiens
  misc_RNA (1)...(19): siRNA sense strand
agaaacagaauacaggaaa

SEQ ID NO: 2187567 - RNA, 19 nt, Homo sapiens
  misc_RNA (1)...(19): siRNA sense strand
gaucauauggcuauuugag

SEQ ID NO: 2187568 - RNA, 19 nt, Homo sapiens
  misc_RNA (1)...(19): siRNA sense strand
cuagaaggcaggccagaaa

SEQ ID NO: 2187569 - RNA, 19 nt, Homo sapiens
  misc_RNA (1)...(19): siRNA sense strand
cccacacaaugcccaaaua

SEQ ID NO: 2187570 - RNA, 19 nt, Homo sapiens
  misc_RNA (1)...(19): siRNA sense strand
uggagaggccauccuauuu

SEQ ID NO: 2187571 - RNA, 19 nt, Homo sapiens
  misc_RNA (1)...(19): siRNA sense strand
gaaagugauaucauuaugc

SEQ ID NO: 2187572 - RNA, 19 nt, Homo sapiens
  misc_RNA (1)...(19): siRNA sense strand
caaagccaguggugcagau

SEQ ID NO: 2187573 - RNA, 19 nt, Homo sapiens
  misc_RNA (1)...(19): siRNA sense strand
ggaagacauugggaauuac

SEQ ID NO: 2187574 - RNA, 19 nt, Homo sapiens
  misc_RNA (1)...(19): siRNA sense strand
ggaugacuucggaauauau

SEQ ID NO: 2187575 - RNA, 19 nt, Homo sapiens
  misc_RNA (1)...(19): siRNA sense strand
uggaugacuucggaauaua

SEQ ID NO: 2187576 - RNA, 19 nt, Homo sapiens
  misc_RNA (1)...(19): siRNA sense strand
aagaugcucuggaugacuu

SEQ ID NO: 2187577 - RNA, 19 nt, Homo sapiens
  misc_RNA (1)...(19): siRNA sense strand
ucagacauccagaucauau

SEQ ID NO: 2187578 - RNA, 19 nt, Homo sapiens
  misc_RNA (1)...(19): siRNA sense strand
uuauggaccuuauggacuu

SEQ ID NO: 2187579 - RNA, 19 nt, Homo sapiens
  misc_RNA (1)...(19): siRNA sense strand
gaagacauugggaauuaca

SEQ ID NO: 2187580 - RNA, 19 nt, Homo sapiens
  misc_RNA (1)...(19): siRNA sense strand
caaggaagacauugggaau

SEQ ID NO: 2187581 - RNA, 19 nt, Homo sapiens
  misc_RNA (1)...(19): siRNA sense strand
gaauacaggaaagcucaaa

SEQ ID NO: 2187582 - RNA, 19 nt, Homo sapiens
  misc_RNA (1)...(19): siRNA sense strand
ugucuucucuuccuaugga

SEQ ID NO: 2187583 - RNA, 19 nt, Homo sapiens
  misc_RNA (1)...(19): siRNA sense strand
gaaaggaaaaucauuguca

SEQ ID NO: 2187584 - RNA, 19 nt, Homo sapiens
  misc_RNA (1)...(19): siRNA sense strand
gaagacaauggacuaugug

SEQ ID NO: 2187585 - RNA, 19 nt, Homo sapiens
  misc_RNA (1)...(19): siRNA sense strand
caaugcaucucugcuuauc

SEQ ID NO: 2187586 - RNA, 19 nt, Homo sapiens
  misc_RNA (1)...(19): siRNA sense strand
acaggaaagcucaaacauu

SEQ ID NO: 2187587 - RNA, 19 nt, Homo sapiens
  misc_RNA (1)...(19): siRNA sense strand
ggucaacauucagggaaau

SEQ ID NO: 2187588 - RNA, 19 nt, Homo sapiens
  misc_RNA (1)...(19): siRNA sense strand
cuaccuacccguccacuau

SEQ ID NO: 2187589 - RNA, 19 nt, Homo sapiens
  misc_RNA (1)...(19): siRNA sense strand
ucggcuagcuuaccaaugg

SEQ ID NO: 2187590 - RNA, 19 nt, Homo sapiens
  misc_RNA (1)...(19): siRNA sense strand
agauacaagucacgguuga

SEQ ID NO: 2187591 - RNA, 19 nt, Homo sapiens
  misc_RNA (1)...(19): siRNA sense strand
gaaggugacagugccauca

SEQ ID NO: 2187592 - RNA, 19 nt, Homo sapiens
  misc_RNA (1)...(19): siRNA sense strand
cuggaugacuucggaauau

SEQ ID NO: 2187593 - RNA, 19 nt, Homo sapiens
  misc_RNA (1)...(19): siRNA sense strand
uagcaaguauaacuggaau

SEQ ID NO: 2187594 - RNA, 19 nt, Homo sapiens
  misc_RNA (1)...(19): siRNA sense strand
ggaaaaucauugucaccuu

SEQ ID NO: 2187595 - RNA, 19 nt, Homo sapiens
  misc_RNA (1)...(19): siRNA sense strand
agaaguugcaucugagaaa

SEQ ID NO: 2187596 - RNA, 19 nt, Homo sapiens
  misc_RNA (1)...(19): siRNA sense strand
gaauaagucugugguuccu

SEQ ID NO: 2187597 - RNA, 19 nt, Homo sapiens
  misc_RNA (1)...(19): siRNA sense strand
uugaugauccugucacaaa

SEQ ID NO: 2187598 - RNA, 19 nt, Homo sapiens
  misc_RNA (1)...(19): siRNA sense strand
gacugacaauacuacauau

SEQ ID NO: 2187599 - RNA, 19 nt, Homo sapiens
  misc_RNA (1)...(19): siRNA sense strand
uggaauaccaacacaaguu

SEQ ID NO: 2187600 - RNA, 19 nt, Homo sapiens
  misc_RNA (1)...(19): siRNA sense strand
gcaggcaagaugaaacuca

SEQ ID NO: 2187601 - RNA, 19 nt, Homo sapiens
  misc_RNA (1)...(19): siRNA sense strand
gacuaugugugcugugcuu

SEQ ID NO: 2187602 - RNA, 19 nt, Homo sapiens
  misc_RNA (1)...(19): siRNA sense strand
ggaacccugucagugaaau

SEQ ID NO: 2187603 - RNA, 19 nt, Homo sapiens
  misc_RNA (1)...(19): siRNA sense strand
gugcugugcuuacaacaac

SEQ ID NO: 2187604 - RNA, 19 nt, Homo sapiens
  misc_RNA (1)...(19): siRNA sense strand
uaggaggacugacaauacu

SEQ ID NO: 2187605 - RNA, 19 nt, Homo sapiens
  misc_RNA (1)...(19): siRNA sense strand
augcaucucugcuuaucaa

SEQ ID NO: 2187606 - RNA, 19 nt, Homo sapiens
  misc_RNA (1)...(19): siRNA sense strand
gcaggccagaaacagaaua

SEQ ID NO: 2187607 - RNA, 19 nt, Homo sapiens
  misc_RNA (1)...(19): siRNA sense strand
aaaaguaggggaaguguuu

SEQ ID NO: 2187608 - RNA, 19 nt, Homo sapiens
  misc_RNA (1)...(19): siRNA sense strand
gauaaagggcuaaaaguag

SEQ ID NO: 2187609 - RNA, 19 nt, Homo sapiens
  misc_RNA (1)...(19): siRNA sense strand
cagcuccaccuacuccuuu

SEQ ID NO: 2187610 - RNA, 19 nt, Homo sapiens
  misc_RNA (1)...(19): siRNA sense strand
caaaacaauacccuucaua

SEQ ID NO: 2187611 - RNA, 19 nt, Homo sapiens
  misc_RNA (1)...(19): siRNA sense strand
ggaaguguuuacuguugac

SEQ ID NO: 2187612 - RNA, 19 nt, Homo sapiens
  misc_RNA (1)...(19): siRNA sense strand
acagcugccuggugaggaa

SEQ ID NO: 2187613 - RNA, 19 nt, Homo sapiens
  misc_RNA (1)...(19): siRNA sense strand
ccagaucauauggcuauuu

SEQ ID NO: 2187614 - RNA, 19 nt, Homo sapiens
  misc_RNA (1)...(19): siRNA sense strand
aauaucaacccuacaaagu

SEQ ID NO: 2187615 - RNA, 19 nt, Homo sapiens
  misc_RNA (1)...(19): siRNA sense strand
ggggaaguguuuacuguug

SEQ ID NO: 2187616 - RNA, 19 nt, Homo sapiens
  misc_RNA (1)...(19): siRNA sense strand
ugaaauggaaagugauauc

SEQ ID NO: 2187617 - RNA, 19 nt, Homo sapiens
  misc_RNA (1)...(19): siRNA sense strand
ugacuucggaauauaugaa

SEQ ID NO: 2187618 - RNA, 19 nt, Homo sapiens
  misc_RNA (1)...(19): siRNA sense strand
ucaccuuuagcaaguauaa

SEQ ID NO: 2187619 - RNA, 19 nt, Homo sapiens
  misc_RNA (1)...(19): siRNA sense strand
ggauuaggaggacugacaa

SEQ ID NO: 2187620 - RNA, 19 nt, Homo sapiens
  misc_RNA (1)...(19): siRNA sense strand
aacaccuacuccuggauua

SEQ ID NO: 2187621 - RNA, 19 nt, Homo sapiens
  misc_RNA (1)...(19): siRNA sense strand
gauaucauuaugcccauca

SEQ ID NO: 2187622 - RNA, 19 nt, Homo sapiens
  misc_RNA (1)...(19): siRNA sense strand
caggaaagcucaaacauuu

SEQ ID NO: 2187623 - RNA, 19 nt, Homo sapiens
  misc_RNA (1)...(19): siRNA sense strand
caacacaaguucaccauga

SEQ ID NO: 2187624 - RNA, 19 nt, Homo sapiens
  misc_RNA (1)...(19): siRNA sense strand
uaucaacccuacaaaguua

SEQ ID NO: 2187625 - RNA, 19 nt, Homo sapiens
  misc_RNA (1)...(19): siRNA sense strand
ggacugacaauacuacaua

SEQ ID NO: 2187626 - RNA, 19 nt, Homo sapiens
  misc_RNA (1)...(19): siRNA sense strand
gcaagaccauccagaguga

SEQ ID NO: 2187627 - RNA, 19 nt, Homo sapiens
  misc_RNA (1)...(19): siRNA sense strand
gcaauuacaucgugaaggu

SEQ ID NO: 2187628 - RNA, 19 nt, Homo sapiens
  misc_RNA (1)...(19): siRNA sense strand
ggaaagugauaucauuaug

SEQ ID NO: 2187629 - RNA, 19 nt, Homo sapiens
  misc_RNA (1)...(19): siRNA sense strand
ggagaagcuugcacagaaa

SEQ ID NO: 2187630 - RNA, 19 nt, Homo sapiens
  misc_RNA (1)...(19): siRNA sense strand
gagaggccauccuauuuga

SEQ ID NO: 2187631 - RNA, 19 nt, Homo sapiens
  misc_RNA (1)...(19): siRNA sense strand
gaaaguagcccagaagaca

SEQ ID NO: 2187632 - RNA, 19 nt, Homo sapiens
  misc_RNA (1)...(19): siRNA sense strand
aggaagacauugggaauua

SEQ ID NO: 2187633 - RNA, 19 nt, Homo sapiens
  misc_RNA (1)...(19): siRNA sense strand
gcaugggccucgcuuagaa

SEQ ID NO: 2187634 - RNA, 19 nt, Homo sapiens
  misc_RNA (1)...(19): siRNA sense strand
ucagugaaauggaaaguga

SEQ ID NO: 2187635 - RNA, 19 nt, Homo sapiens
  misc_RNA (1)...(19): siRNA sense strand
uuacugggcucugugaaua

SEQ ID NO: 2187636 - RNA, 19 nt, Homo sapiens
  misc_RNA (1)...(19): siRNA sense strand
gaaaaucauugucaccuuu

SEQ ID NO: 2187637 - RNA, 19 nt, Homo sapiens
  misc_RNA (1)...(19): siRNA sense strand
gcuuagaaguugcaucuga

SEQ ID NO: 2187638 - RNA, 19 nt, Homo sapiens
  misc_RNA (1)...(19): siRNA sense strand
gaggaacccugucagugaa

SEQ ID NO: 2187639 - RNA, 19 nt, Homo sapiens
  misc_RNA (1)...(19): siRNA sense strand
uaucaucacuuccguagga

SEQ ID NO: 2187640 - RNA, 19 nt, Homo sapiens
  misc_RNA (1)...(19): siRNA sense strand
uggagaagcuugcacagaa

SEQ ID NO: 2187641 - RNA, 19 nt, Homo sapiens
  misc_RNA (1)...(19): siRNA sense strand
cagaucauauggcuauuug

SEQ ID NO: 2187642 - RNA, 19 nt, Homo sapiens
  misc_RNA (1)...(19): siRNA sense strand
ggagaggccauccuauuug

SEQ ID NO: 2187643 - RNA, 19 nt, Homo sapiens
  misc_RNA (1)...(19): siRNA sense strand
gcaaguauaacuggaauau

SEQ ID NO: 2187644 - RNA, 19 nt, Homo sapiens
  misc_RNA (1)...(19): siRNA sense strand
cacaaugcccaaauacuua

SEQ ID NO: 2187645 - RNA, 19 nt, Homo sapiens
  misc_RNA (1)...(19): siRNA sense strand
gaaacagaauacaggaaag

SEQ ID NO: 2187646 - RNA, 19 nt, Homo sapiens
  misc_RNA (1)...(19): siRNA sense strand
cccaaugcaucucugcuua

SEQ ID NO: 2187647 - RNA, 19 nt, Homo sapiens
  misc_RNA (1)...(19): siRNA sense strand
gggaaguguuuacuguuga

SEQ ID NO: 2187648 - RNA, 19 nt, Homo sapiens
  misc_RNA (1)...(19): siRNA sense strand
agaagacaauggacuaugu

SEQ ID NO: 2187649 - RNA, 19 nt, Homo sapiens
  misc_RNA (1)...(19): siRNA sense strand
ucagggaaauggaacucua

SEQ ID NO: 2187650 - RNA, 19 nt, Homo sapiens
  misc_RNA (1)...(19): siRNA sense strand
ucacaguuaucaucacuuc

SEQ ID NO: 2187651 - RNA, 19 nt, Homo sapiens
  misc_RNA (1)...(19): siRNA sense strand
gaaauggaaagugauauca

SEQ ID NO: 2187652 - RNA, 19 nt, Homo sapiens
  misc_RNA (1)...(19): siRNA sense strand
ccacugcaguucccugaug

SEQ ID NO: 2187653 - RNA, 19 nt, Homo sapiens
  misc_RNA (1)...(19): siRNA sense strand
gaaguugcaucugagaaag

SEQ ID NO: 2187654 - RNA, 19 nt, Homo sapiens
  misc_RNA (1)...(19): siRNA sense strand
gggccucgcuuagaaguug

SEQ ID NO: 2187655 - RNA, 19 nt, Homo sapiens
  misc_RNA (1)...(19): siRNA sense strand
gcacucggcuagcuuacca

SEQ ID NO: 2187656 - RNA, 19 nt, Homo sapiens
  misc_RNA (1)...(19): siRNA sense strand
ggaaauggaacucuaucug

SEQ ID NO: 2187657 - RNA, 19 nt, Homo sapiens
  misc_RNA (1)...(19): siRNA sense strand
caucagacauccagaucau

SEQ ID NO: 2187658 - RNA, 19 nt, Homo sapiens
  misc_RNA (1)...(19): siRNA sense strand
ugaggaacccugucaguga

SEQ ID NO: 2187659 - RNA, 19 nt, Homo sapiens
  misc_RNA (1)...(19): siRNA sense strand
caagugaauucugauaaag

SEQ ID NO: 2187660 - RNA, 19 nt, Homo sapiens
  misc_RNA (1)...(19): siRNA sense strand
ccaugaagaugcucuggau

SEQ ID NO: 2187661 - RNA, 19 nt, Homo sapiens
  misc_RNA (1)...(19): siRNA sense strand
ggaauaccaacacaaguuc

SEQ ID NO: 2187662 - RNA, 19 nt, Homo sapiens
  misc_RNA (1)...(19): siRNA sense strand
acacaaugcccaaauacuu

SEQ ID NO: 2187663 - RNA, 19 nt, Homo sapiens
  misc_RNA (1)...(19): siRNA sense strand
gaggccauccuauuugauu

SEQ ID NO: 2187664 - RNA, 19 nt, Homo sapiens
  misc_RNA (1)...(19): siRNA sense strand
caacaccuacuccuggauu

SEQ ID NO: 2187665 - RNA, 19 nt, Homo sapiens
  misc_RNA (1)...(19): siRNA sense strand
gagaaaguagcccagaaga

SEQ ID NO: 2187666 - RNA, 19 nt, Homo sapiens
  misc_RNA (1)...(19): siRNA sense strand
agaaacagaauacaggaaa

SEQ ID NO: 2187667 - RNA, 19 nt, Homo sapiens
  misc_RNA (1)...(19): siRNA sense strand
gaucauauggcuauuugag

SEQ ID NO: 2187668 - RNA, 19 nt, Homo sapiens
  misc_RNA (1)...(19): siRNA sense strand
cuagaaggcaggccagaaa

SEQ ID NO: 2187669 - RNA, 19 nt, Homo sapiens
  misc_RNA (1)...(19): siRNA sense strand
cccacacaaugcccaaaua

SEQ ID NO: 2187670 - RNA, 19 nt, Homo sapiens
  misc_RNA (1)...(19): siRNA sense strand
uggagaggccauccuauuu

SEQ ID NO: 2187671 - RNA, 19 nt, Homo sapiens
  misc_RNA (1)...(19): siRNA sense strand
gaaagugauaucauuaugc

SEQ ID NO: 2187672 - RNA, 19 nt, Homo sapiens
  misc_RNA (1)...(19): siRNA sense strand
caaagccaguggugcagau

SEQ ID NO: 2187673 - RNA, 19 nt, Homo sapiens
  misc_RNA (1)...(19): siRNA sense strand
ggaagacauugggaauuac

SEQ ID NO: 2187674 - RNA, 19 nt, Homo sapiens
  misc_RNA (1)...(19): siRNA sense strand
ggaugacuucggaauauau

SEQ ID NO: 2187675 - RNA, 19 nt, Homo sapiens
  misc_RNA (1)...(19): siRNA sense strand
uggaugacuucggaauaua

SEQ ID NO: 2187676 - RNA, 19 nt, Homo sapiens
  misc_RNA (1)...(19): siRNA sense strand
aagaugcucuggaugacuu

SEQ ID NO: 2187677 - RNA, 19 nt, Homo sapiens
  misc_RNA (1)...(19): siRNA sense strand
ucagacauccagaucauau

SEQ ID NO: 2187678 - RNA, 19 nt, Homo sapiens
  misc_RNA (1)...(19): siRNA sense strand
uuauggaccuuauggacuu

SEQ ID NO: 2187679 - RNA, 19 nt, Homo sapiens
  misc_RNA (1)...(19): siRNA sense strand
gaagacauugggaauuaca

SEQ ID NO: 2187680 - RNA, 19 nt, Homo sapiens
  misc_RNA (1)...(19): siRNA sense strand
caaggaagacauugggaau

SEQ ID NO: 2187681 - RNA, 19 nt, Homo sapiens
  misc_RNA (1)...(19): siRNA sense strand
gaauacaggaaagcucaaa

SEQ ID NO: 2187682 - RNA, 19 nt, Homo sapiens
  misc_RNA (1)...(19): siRNA sense strand
ugucuucucuuccuaugga

SEQ ID NO: 2187683 - RNA, 19 nt, Homo sapiens
  misc_RNA (1)...(19): siRNA sense strand
gaaaggaaaaucauuguca

SEQ ID NO: 2187684 - RNA, 19 nt, Homo sapiens
  misc_RNA (1)...(19): siRNA sense strand
gaagacaauggacuaugug

SEQ ID NO: 2187685 - RNA, 19 nt, Homo sapiens
  misc_RNA (1)...(19): siRNA sense strand
caaugcaucucugcuuauc

SEQ ID NO: 2187686 - RNA, 19 nt, Homo sapiens
  misc_RNA (1)...(19): siRNA sense strand
acaggaaagcucaaacauu

SEQ ID NO: 2187687 - RNA, 19 nt, Homo sapiens
  misc_RNA (1)...(19): siRNA sense strand
ggucaacauucagggaaau

SEQ ID NO: 2187688 - RNA, 19 nt, Homo sapiens
  misc_RNA (1)...(19): siRNA sense strand
cuaccuacccguccacuau

SEQ ID NO: 2187689 - RNA, 19 nt, Homo sapiens
  misc_RNA (1)...(19): siRNA sense strand
ucggcuagcuuaccaaugg

SEQ ID NO: 2187690 - RNA, 19 nt, Homo sapiens
  misc_RNA (1)...(19): siRNA sense strand
agauacaagucacgguuga

SEQ ID NO: 2187691 - RNA, 19 nt, Homo sapiens
  misc_RNA (1)...(19): siRNA sense strand
gaaggugacagugccauca

SEQ ID NO: 2187692 - RNA, 19 nt, Homo sapiens
  misc_RNA (1)...(19): siRNA sense strand
cuggaugacuucggaauau

SEQ ID NO: 2187693 - RNA, 19 nt, Homo sapiens
  misc_RNA (1)...(19): siRNA sense strand
uagcaaguauaacuggaau

SEQ ID NO: 2187694 - RNA, 19 nt, Homo sapiens
  misc_RNA (1)...(19): siRNA sense strand
ggaaaaucauugucaccuu

SEQ ID NO: 2187695 - RNA, 19 nt, Homo sapiens
  misc_RNA (1)...(19): siRNA sense strand
agaaguugcaucugagaaa

SEQ ID NO: 2187696 - RNA, 19 nt, Homo sapiens
  misc_RNA (1)...(19): siRNA sense strand
gaauaagucugugguuccu

SEQ ID NO: 2187697 - RNA, 19 nt, Homo sapiens
  misc_RNA (1)...(19): siRNA sense strand
uugaugauccugucacaaa

SEQ ID NO: 2187698 - RNA, 19 nt, Homo sapiens
  misc_RNA (1)...(19): siRNA sense strand
gacugacaauacuacauau

SEQ ID NO: 2187699 - RNA, 19 nt, Homo sapiens
  misc_RNA (1)...(19): siRNA sense strand
uggaauaccaacacaaguu

SEQ ID NO: 2187700 - RNA, 19 nt, Homo sapiens
  misc_RNA (1)...(19): siRNA sense strand
gcaggcaagaugaaacuca

SEQ ID NO: 2187701 - RNA, 19 nt, Homo sapiens
  misc_RNA (1)...(19): siRNA sense strand
gacuaugugugcugugcuu

SEQ ID NO: 2187702 - RNA, 19 nt, Homo sapiens
  misc_RNA (1)...(19): siRNA sense strand
ggaacccugucagugaaau

SEQ ID NO: 2187703 - RNA, 19 nt, Homo sapiens
  misc_RNA (1)...(19): siRNA sense strand
gugcugugcuuacaacaac

SEQ ID NO: 2187704 - RNA, 19 nt, Homo sapiens
  misc_RNA (1)...(19): siRNA sense strand
uaggaggacugacaauacu

SEQ ID NO: 2187705 - RNA, 19 nt, Homo sapiens
  misc_RNA (1)...(19): siRNA sense strand
augcaucucugcuuaucaa

SEQ ID NO: 2187706 - RNA, 19 nt, Homo sapiens
  misc_RNA (1)...(19): siRNA sense strand
gcaggccagaaacagaaua

SEQ ID NO: 2187707 - RNA, 19 nt, Homo sapiens
  misc_RNA (1)...(19): siRNA sense strand
aaaaguaggggaaguguuu

SEQ ID NO: 2187708 - RNA, 19 nt, Homo sapiens
  misc_RNA (1)...(19): siRNA sense strand
gauaaagggcuaaaaguag

SEQ ID NO: 2187709 - RNA, 19 nt, Homo sapiens
  misc_RNA (1)...(19): siRNA sense strand
cagcuccaccuacuccuuu

SEQ ID NO: 2187710 - RNA, 19 nt, Homo sapiens
  misc_RNA (1)...(19): siRNA sense strand
caaaacaauacccuucaua

SEQ ID NO: 2187711 - RNA, 19 nt, Homo sapiens
  misc_RNA (1)...(19): siRNA sense strand
ggaaguguuuacuguugac

SEQ ID NO: 2187712 - RNA, 19 nt, Homo sapiens
  misc_RNA (1)...(19): siRNA sense strand
acagcugccuggugaggaa

SEQ ID NO: 2187713 - RNA, 19 nt, Homo sapiens
  misc_RNA (1)...(19): siRNA sense strand
ccagaucauauggcuauuu

SEQ ID NO: 2187714 - RNA, 19 nt, Homo sapiens
  misc_RNA (1)...(19): siRNA sense strand
aauaucaacccuacaaagu

SEQ ID NO: 2187715 - RNA, 19 nt, Homo sapiens
  misc_RNA (1)...(19): siRNA sense strand
ggggaaguguuuacuguug

SEQ ID NO: 2187716 - RNA, 19 nt, Homo sapiens
  misc_RNA (1)...(19): siRNA sense strand
ugaaauggaaagugauauc

SEQ ID NO: 2187717 - RNA, 19 nt, Homo sapiens
  misc_RNA (1)...(19): siRNA sense strand
ugacuucggaauauaugaa

SEQ ID NO: 2187718 - RNA, 19 nt, Homo sapiens
  misc_RNA (1)...(19): siRNA sense strand
ucaccuuuagcaaguauaa

SEQ ID NO: 2187719 - RNA, 19 nt, Homo sapiens
  misc_RNA (1)...(19): siRNA sense strand
ggauuaggaggacugacaa

SEQ ID NO: 2187720 - RNA, 19 nt, Homo sapiens
  misc_RNA (1)...(19): siRNA sense strand
aacaccuacuccuggauua

SEQ ID NO: 2187721 - RNA, 19 nt, Homo sapiens
  misc_RNA (1)...(19): siRNA sense strand
gauaucauuaugcccauca

SEQ ID NO: 2187722 - RNA, 19 nt, Homo sapiens
  misc_RNA (1)...(19): siRNA sense strand
caggaaagcucaaacauuu

SEQ ID NO: 2187723 - RNA, 19 nt, Homo sapiens
  misc_RNA (1)...(19): siRNA sense strand
caacacaaguucaccauga

SEQ ID NO: 2187724 - RNA, 19 nt, Homo sapiens
  misc_RNA (1)...(19): siRNA sense strand
uaucaacccuacaaaguua

SEQ ID NO: 2187725 - RNA, 19 nt, Homo sapiens
  misc_RNA (1)...(19): siRNA sense strand
ggacugacaauacuacaua

SEQ ID NO: 2187726 - RNA, 19 nt, Homo sapiens
  misc_RNA (1)...(19): siRNA sense strand
gcaagaccauccagaguga

SEQ ID NO: 2187727 - RNA, 19 nt, Homo sapiens
  misc_RNA (1)...(19): siRNA sense strand
gcaauuacaucgugaaggu

SEQ ID NO: 2187728 - RNA, 19 nt, Homo sapiens
  misc_RNA (1)...(19): siRNA sense strand
ggaaagugauaucauuaug

SEQ ID NO: 2187729 - RNA, 19 nt, Homo sapiens
  misc_RNA (1)...(19): siRNA sense strand
ggagaagcuugcacagaaa

SEQ ID NO: 2187730 - RNA, 19 nt, Homo sapiens
  misc_RNA (1)...(19): siRNA sense strand
gagaggccauccuauuuga

SEQ ID NO: 2187731 - RNA, 19 nt, Homo sapiens
  misc_RNA (1)...(19): siRNA sense strand
gaaaguagcccagaagaca

SEQ ID NO: 2187732 - RNA, 19 nt, Homo sapiens
  misc_RNA (1)...(19): siRNA sense strand
aggaagacauugggaauua

SEQ ID NO: 2187733 - RNA, 19 nt, Homo sapiens
  misc_RNA (1)...(19): siRNA sense strand
gcaugggccucgcuuagaa

SEQ ID NO: 2187734 - RNA, 19 nt, Homo sapiens
  misc_RNA (1)...(19): siRNA sense strand
ucagugaaauggaaaguga

SEQ ID NO: 2187735 - RNA, 19 nt, Homo sapiens
  misc_RNA (1)...(19): siRNA sense strand
uuacugggcucugugaaua

SEQ ID NO: 2187736 - RNA, 19 nt, Homo sapiens
  misc_RNA (1)...(19): siRNA sense strand
gaaaaucauugucaccuuu

SEQ ID NO: 2187737 - RNA, 19 nt, Homo sapiens
  misc_RNA (1)...(19): siRNA sense strand
gcuuagaaguugcaucuga

SEQ ID NO: 2187738 - RNA, 19 nt, Homo sapiens
  misc_RNA (1)...(19): siRNA sense strand
gaggaacccugucagugaa

SEQ ID NO: 2187739 - RNA, 19 nt, Homo sapiens
  misc_RNA (1)...(19): siRNA sense strand
uaucaucacuuccguagga

SEQ ID NO: 2187740 - RNA, 19 nt, Homo sapiens
  misc_RNA (1)...(19): siRNA sense strand
uggagaagcuugcacagaa

SEQ ID NO: 2187741 - RNA, 19 nt, Homo sapiens
  misc_RNA (1)...(19): siRNA sense strand
cagaucauauggcuauuug

SEQ ID NO: 2187742 - RNA, 19 nt, Homo sapiens
  misc_RNA (1)...(19): siRNA sense strand
ggagaggccauccuauuug

SEQ ID NO: 2187743 - RNA, 19 nt, Homo sapiens
  misc_RNA (1)...(19): siRNA sense strand
gcaaguauaacuggaauau

SEQ ID NO: 2187744 - RNA, 19 nt, Homo sapiens
  misc_RNA (1)...(19): siRNA sense strand
cacaaugcccaaauacuua

SEQ ID NO: 2187745 - RNA, 19 nt, Homo sapiens
  misc_RNA (1)...(19): siRNA sense strand
gaaacagaauacaggaaag

SEQ ID NO: 2187746 - RNA, 19 nt, Homo sapiens
  misc_RNA (1)...(19): siRNA sense strand
cccaaugcaucucugcuua

SEQ ID NO: 2187747 - RNA, 19 nt, Homo sapiens
  misc_RNA (1)...(19): siRNA sense strand
gggaaguguuuacuguuga

SEQ ID NO: 2187748 - RNA, 19 nt, Homo sapiens
  misc_RNA (1)...(19): siRNA sense strand
agaagacaauggacuaugu

SEQ ID NO: 2187749 - RNA, 19 nt, Homo sapiens
  misc_RNA (1)...(19): siRNA sense strand
ucagggaaauggaacucua

SEQ ID NO: 2187750 - RNA, 19 nt, Homo sapiens
  misc_RNA (1)...(19): siRNA sense strand
ucacaguuaucaucacuuc

SEQ ID NO: 2187751 - RNA, 19 nt, Homo sapiens
  misc_RNA (1)...(19): siRNA sense strand
gaaauggaaagugauauca

SEQ ID NO: 2187752 - RNA, 19 nt, Homo sapiens
  misc_RNA (1)...(19): siRNA sense strand
ccacugcaguucccugaug

SEQ ID NO: 2187753 - RNA, 19 nt, Homo sapiens
  misc_RNA (1)...(19): siRNA sense strand
gaaguugcaucugagaaag

SEQ ID NO: 2187754 - RNA, 19 nt, Homo sapiens
  misc_RNA (1)...(19): siRNA sense strand
gggccucgcuuagaaguug

SEQ ID NO: 2187755 - RNA, 19 nt, Homo sapiens
  misc_RNA (1)...(19): siRNA sense strand
gcacucggcuagcuuacca

SEQ ID NO: 2187756 - RNA, 19 nt, Homo sapiens
  misc_RNA (1)...(19): siRNA sense strand
ggaaauggaacucuaucug

SEQ ID NO: 2187757 - RNA, 19 nt, Homo sapiens
  misc_RNA (1)...(19): siRNA sense strand
caucagacauccagaucau

SEQ ID NO: 2187758 - RNA, 19 nt, Homo sapiens
  misc_RNA (1)...(19): siRNA sense strand
ugaggaacccugucaguga

SEQ ID NO: 2187759 - RNA, 19 nt, Homo sapiens
  misc_RNA (1)...(19): siRNA sense strand
caagugaauucugauaaag

SEQ ID NO: 2187760 - RNA, 19 nt, Homo sapiens
  misc_RNA (1)...(19): siRNA sense strand
ccaugaagaugcucuggau

SEQ ID NO: 2187761 - RNA, 19 nt, Homo sapiens
  misc_RNA (1)...(19): siRNA sense strand
ggaauaccaacacaaguuc

SEQ ID NO: 2187762 - RNA, 19 nt, Homo sapiens
  misc_RNA (1)...(19): siRNA sense strand
acacaaugcccaaauacuu

SEQ ID NO: 2187763 - RNA, 19 nt, Homo sapiens
  misc_RNA (1)...(19): siRNA sense strand
gaggccauccuauuugauu

SEQ ID NO: 2187764 - RNA, 19 nt, Homo sapiens
  misc_RNA (1)...(19): siRNA sense strand
caacaccuacuccuggauu

SEQ ID NO: 2187765 - RNA, 19 nt, Homo sapiens
  misc_RNA (1)...(19): siRNA sense strand
gagaaaguagcccagaaga

SEQ ID NO: 2187766 - RNA, 19 nt, Homo sapiens
  misc_RNA (1)...(19): siRNA sense strand
agaaacagaauacaggaaa

SEQ ID NO: 2187767 - RNA, 19 nt, Homo sapiens
  misc_RNA (1)...(19): siRNA sense strand
gaucauauggcuauuugag

SEQ ID NO: 2187768 - RNA, 19 nt, Homo sapiens
  misc_RNA (1)...(19): siRNA sense strand
cuagaaggcaggccagaaa

SEQ ID NO: 2187769 - RNA, 19 nt, Homo sapiens
  misc_RNA (1)...(19): siRNA sense strand
cccacacaaugcccaaaua

SEQ ID NO: 2187770 - RNA, 19 nt, Homo sapiens
  misc_RNA (1)...(19): siRNA sense strand
uggagaggccauccuauuu

SEQ ID NO: 2187771 - RNA, 19 nt, Homo sapiens
  misc_RNA (1)...(19): siRNA sense strand
gaaagugauaucauuaugc

SEQ ID NO: 2187772 - RNA, 19 nt, Homo sapiens
  misc_RNA (1)...(19): siRNA sense strand
caaagccaguggugcagau

SEQ ID NO: 2187773 - RNA, 19 nt, Homo sapiens
  misc_RNA (1)...(19): siRNA sense strand
ggaagacauugggaauuac

SEQ ID NO: 2187774 - RNA, 19 nt, Homo sapiens
  misc_RNA (1)...(19): siRNA sense strand
ggaugacuucggaauauau

SEQ ID NO: 2187775 - RNA, 19 nt, Homo sapiens
  misc_RNA (1)...(19): siRNA sense strand
uggaugacuucggaauaua

SEQ ID NO: 2187776 - RNA, 19 nt, Homo sapiens
  misc_RNA (1)...(19): siRNA sense strand
aagaugcucuggaugacuu

SEQ ID NO: 2187777 - RNA, 19 nt, Homo sapiens
  misc_RNA (1)...(19): siRNA sense strand
ucagacauccagaucauau

SEQ ID NO: 2187778 - RNA, 19 nt, Homo sapiens
  misc_RNA (1)...(19): siRNA sense strand
uuauggaccuuauggacuu

SEQ ID NO: 2187779 - RNA, 19 nt, Homo sapiens
  misc_RNA (1)...(19): siRNA sense strand
gaagacauugggaauuaca

SEQ ID NO: 2187780 - RNA, 19 nt, Homo sapiens
  misc_RNA (1)...(19): siRNA sense strand
caaggaagacauugggaau

SEQ ID NO: 2187781 - RNA, 19 nt, Homo sapiens
  misc_RNA (1)...(19): siRNA sense strand
gaauacaggaaagcucaaa

SEQ ID NO: 2187782 - RNA, 19 nt, Homo sapiens
  misc_RNA (1)...(19): siRNA sense strand
ugucuucucuuccuaugga

SEQ ID NO: 2187783 - RNA, 19 nt, Homo sapiens
  misc_RNA (1)...(19): siRNA sense strand
gaaaggaaaaucauuguca

SEQ ID NO: 2187784 - RNA, 19 nt, Homo sapiens
  misc_RNA (1)...(19): siRNA sense strand
gaagacaauggacuaugug

SEQ ID NO: 2187785 - RNA, 19 nt, Homo sapiens
  misc_RNA (1)...(19): siRNA sense strand
caaugcaucucugcuuauc

SEQ ID NO: 2187786 - RNA, 19 nt, Homo sapiens
  misc_RNA (1)...(19): siRNA sense strand
acaggaaagcucaaacauu

SEQ ID NO: 2187787 - RNA, 19 nt, Homo sapiens
  misc_RNA (1)...(19): siRNA sense strand
ggucaacauucagggaaau

SEQ ID NO: 2187788 - RNA, 19 nt, Homo sapiens
  misc_RNA (1)...(19): siRNA sense strand
cuaccuacccguccacuau

SEQ ID NO: 2187789 - RNA, 19 nt, Homo sapiens
  misc_RNA (1)...(19): siRNA sense strand
ucggcuagcuuaccaaugg

SEQ ID NO: 2187790 - RNA, 19 nt, Homo sapiens
  misc_RNA (1)...(19): siRNA sense strand
agauacaagucacgguuga

SEQ ID NO: 2187791 - RNA, 19 nt, Homo sapiens
  misc_RNA (1)...(19): siRNA sense strand
gaaggugacagugccauca

SEQ ID NO: 2187792 - RNA, 19 nt, Homo sapiens
  misc_RNA (1)...(19): siRNA sense strand
cuggaugacuucggaauau

SEQ ID NO: 2187793 - RNA, 19 nt, Homo sapiens
  misc_RNA (1)...(19): siRNA sense strand
uagcaaguauaacuggaau

SEQ ID NO: 2187794 - RNA, 19 nt, Homo sapiens
  misc_RNA (1)...(19): siRNA sense strand
ggaaaaucauugucaccuu

SEQ ID NO: 2187795 - RNA, 19 nt, Homo sapiens
  misc_RNA (1)...(19): siRNA sense strand
agaaguugcaucugagaaa

SEQ ID NO: 2187796 - RNA, 19 nt, Homo sapiens
  misc_RNA (1)...(19): siRNA sense strand
gaauaagucugugguuccu

SEQ ID NO: 2187797 - RNA, 19 nt, Homo sapiens
  misc_RNA (1)...(19): siRNA sense strand
uugaugauccugucacaaa

SEQ ID NO: 2187798 - RNA, 19 nt, Homo sapiens
  misc_RNA (1)...(19): siRNA sense strand
gacugacaauacuacauau

SEQ ID NO: 2187799 - RNA, 19 nt, Homo sapiens
  misc_RNA (1)...(19): siRNA sense strand
uggaauaccaacacaaguu

SEQ ID NO: 2187800 - RNA, 19 nt, Homo sapiens
  misc_RNA (1)...(19): siRNA sense strand
gcaggcaagaugaaacuca

SEQ ID NO: 2187801 - RNA, 19 nt, Homo sapiens
  misc_RNA (1)...(19): siRNA sense strand
gacuaugugugcugugcuu

SEQ ID NO: 2187802 - RNA, 19 nt, Homo sapiens
  misc_RNA (1)...(19): siRNA sense strand
ggaacccugucagugaaau

SEQ ID NO: 2187803 - RNA, 19 nt, Homo sapiens
  misc_RNA (1)...(19): siRNA sense strand
gugcugugcuuacaacaac

SEQ ID NO: 2187804 - RNA, 19 nt, Homo sapiens
  misc_RNA (1)...(19): siRNA sense strand
uaggaggacugacaauacu

SEQ ID NO: 2187805 - RNA, 19 nt, Homo sapiens
  misc_RNA (1)...(19): siRNA sense strand
augcaucucugcuuaucaa

SEQ ID NO: 2187806 - RNA, 19 nt, Homo sapiens
  misc_RNA (1)...(19): siRNA sense strand
gcaggccagaaacagaaua

SEQ ID NO: 2187807 - RNA, 19 nt, Homo sapiens
  misc_RNA (1)...(19): siRNA sense strand
aaaaguaggggaaguguuu

SEQ ID NO: 2187808 - RNA, 19 nt, Homo sapiens
  misc_RNA (1)...(19): siRNA sense strand
gauaaagggcuaaaaguag

SEQ ID NO: 2187809 - RNA, 19 nt, Homo sapiens
  misc_RNA (1)...(19): siRNA sense strand
cagcuccaccuacuccuuu

SEQ ID NO: 2187810 - RNA, 19 nt, Homo sapiens
  misc_RNA (1)...(19): siRNA sense strand
caaaacaauacccuucaua

SEQ ID NO: 2187811 - RNA, 19 nt, Homo sapiens
  misc_RNA (1)...(19): siRNA sense strand
ggaaguguuuacuguugac

SEQ ID NO: 2187812 - RNA, 19 nt, Homo sapiens
  misc_RNA (1)...(19): siRNA sense strand
acagcugccuggugaggaa

SEQ ID NO: 2187813 - RNA, 19 nt, Homo sapiens
  misc_RNA (1)...(19): siRNA sense strand
ccagaucauauggcuauuu

SEQ ID NO: 2187814 - RNA, 19 nt, Homo sapiens
  misc_RNA (1)...(19): siRNA sense strand
aauaucaacccuacaaagu

SEQ ID NO: 2187815 - RNA, 19 nt, Homo sapiens
  misc_RNA (1)...(19): siRNA sense strand
ggggaaguguuuacuguug

SEQ ID NO: 2187816 - RNA, 19 nt, Homo sapiens
  misc_RNA (1)...(19): siRNA sense strand
ugaaauggaaagugauauc

SEQ ID NO: 2187817 - RNA, 19 nt, Homo sapiens
  misc_RNA (1)...(19): siRNA sense strand
ugacuucggaauauaugaa

SEQ ID NO: 2187818 - RNA, 19 nt, Homo sapiens
  misc_RNA (1)...(19): siRNA sense strand
ucaccuuuagcaaguauaa

SEQ ID NO: 2187819 - RNA, 19 nt, Homo sapiens
  misc_RNA (1)...(19): siRNA sense strand
ggauuaggaggacugacaa

SEQ ID NO: 2187820 - RNA, 19 nt, Homo sapiens
  misc_RNA (1)...(19): siRNA sense strand
aacaccuacuccuggauua

SEQ ID NO: 2187821 - RNA, 19 nt, Homo sapiens
  misc_RNA (1)...(19): siRNA sense strand
gauaucauuaugcccauca

SEQ ID NO: 2187822 - RNA, 19 nt, Homo sapiens
  misc_RNA (1)...(19): siRNA sense strand
ggaaucagcugagaaacuu

SEQ ID NO: 2187823 - RNA, 19 nt, Homo sapiens
  misc_RNA (1)...(19): siRNA sense strand
ggcaaacccuucaaucaaa

SEQ ID NO: 2187824 - RNA, 19 nt, Homo sapiens
  misc_RNA (1)...(19): siRNA sense strand
agacagcggucagcucuua

SEQ ID NO: 2187825 - RNA, 19 nt, Homo sapiens
  misc_RNA (1)...(19): siRNA sense strand
gaacauaagaggauucaca

SEQ ID NO: 2187826 - RNA, 19 nt, Homo sapiens
  misc_RNA (1)...(19): siRNA sense strand
gagcaaagucuuaugaaug

SEQ ID NO: 2187827 - RNA, 19 nt, Homo sapiens
  misc_RNA (1)...(19): siRNA sense strand
gcaggaaucagcugagaaa

SEQ ID NO: 2187828 - RNA, 19 nt, Homo sapiens
  misc_RNA (1)...(19): siRNA sense strand
gagaugugauguuggagaa

SEQ ID NO: 2187829 - RNA, 19 nt, Homo sapiens
  misc_RNA (1)...(19): siRNA sense strand
gggcagauaugaugaggau

SEQ ID NO: 2187830 - RNA, 19 nt, Homo sapiens
  misc_RNA (1)...(19): siRNA sense strand
gaggaauucuuucaaugug

SEQ ID NO: 2187831 - RNA, 19 nt, Homo sapiens
  misc_RNA (1)...(19): siRNA sense strand
agucagaauucaacccuua

SEQ ID NO: 2187832 - RNA, 19 nt, Homo sapiens
  misc_RNA (1)...(19): siRNA sense strand
guggacaguugcaggcuua

SEQ ID NO: 2187833 - RNA, 19 nt, Homo sapiens
  misc_RNA (1)...(19): siRNA sense strand
guaaaccgaacacccauaa

SEQ ID NO: 2187834 - RNA, 19 nt, Homo sapiens
  misc_RNA (1)...(19): siRNA sense strand
uaagaggauucacaccaaa

SEQ ID NO: 2187835 - RNA, 19 nt, Homo sapiens
  misc_RNA (1)...(19): siRNA sense strand
gcacacaagcuuuauuaag

SEQ ID NO: 2187836 - RNA, 19 nt, Homo sapiens
  misc_RNA (1)...(19): siRNA sense strand
caucaaagaauccauacaa

SEQ ID NO: 2187837 - RNA, 19 nt, Homo sapiens
  misc_RNA (1)...(19): siRNA sense strand
ccagggcacucacaaagga

SEQ ID NO: 2187838 - RNA, 19 nt, Homo sapiens
  misc_RNA (1)...(19): siRNA sense strand
cuaccaaugugucauaugu

SEQ ID NO: 2187839 - RNA, 19 nt, Homo sapiens
  misc_RNA (1)...(19): siRNA sense strand
ggaggaauucuuucaaugu

SEQ ID NO: 2187840 - RNA, 19 nt, Homo sapiens
  misc_RNA (1)...(19): siRNA sense strand
gcaaacccuucaaucaaag

SEQ ID NO: 2187841 - RNA, 19 nt, Homo sapiens
  misc_RNA (1)...(19): siRNA sense strand
cugaagauuuagagucaua

SEQ ID NO: 2187842 - RNA, 19 nt, Homo sapiens
  misc_RNA (1)...(19): siRNA sense strand
caaagaauccauacaaagg

SEQ ID NO: 2187843 - RNA, 19 nt, Homo sapiens
  misc_RNA (1)...(19): siRNA sense strand
uaagauaucagugguaaug

SEQ ID NO: 2187844 - RNA, 19 nt, Homo sapiens
  misc_RNA (1)...(19): siRNA sense strand
gcauucaacccuucuaugu

SEQ ID NO: 2187845 - RNA, 19 nt, Homo sapiens
  misc_RNA (1)...(19): siRNA sense strand
ggaagcagggcagauauga

SEQ ID NO: 2187846 - RNA, 19 nt, Homo sapiens
  misc_RNA (1)...(19): siRNA sense strand
gaagccaacccuaccaaug

SEQ ID NO: 2187847 - RNA, 19 nt, Homo sapiens
  misc_RNA (1)...(19): siRNA sense strand
gaagccagacacaagauga

SEQ ID NO: 2187848 - RNA, 19 nt, Homo sapiens
  misc_RNA (1)...(19): siRNA sense strand
cuaccgagaugugauguug

SEQ ID NO: 2187849 - RNA, 19 nt, Homo sapiens
  misc_RNA (1)...(19): siRNA sense strand
uggcacacaagcuuuauua

SEQ ID NO: 2187850 - RNA, 19 nt, Homo sapiens
  misc_RNA (1)...(19): siRNA sense strand
gaucagaaugcgcaaacaa

SEQ ID NO: 2187851 - RNA, 19 nt, Homo sapiens
  misc_RNA (1)...(19): siRNA sense strand
gaucaacaucaaagaauuc

SEQ ID NO: 2187852 - RNA, 19 nt, Homo sapiens
  misc_RNA (1)...(19): siRNA sense strand
gaaaagucauuaggcguaa

SEQ ID NO: 2187853 - RNA, 19 nt, Homo sapiens
  misc_RNA (1)...(19): siRNA sense strand
aaacaagccauacagaugu

SEQ ID NO: 2187854 - RNA, 19 nt, Homo sapiens
  misc_RNA (1)...(19): siRNA sense strand
gguggaagcagggcagaua

SEQ ID NO: 2187855 - RNA, 19 nt, Homo sapiens
  misc_RNA (1)...(19): siRNA sense strand
aucaacagauucacaguaa

SEQ ID NO: 2187856 - RNA, 19 nt, Homo sapiens
  misc_RNA (1)...(19): siRNA sense strand
uaaacagugucaccugcaa

SEQ ID NO: 2187857 - RNA, 19 nt, Homo sapiens
  misc_RNA (1)...(19): siRNA sense strand
uaaagaauuuguggacagu

SEQ ID NO: 2187858 - RNA, 19 nt, Homo sapiens
  misc_RNA (1)...(19): siRNA sense strand
cagcaucaaagaauccaua

SEQ ID NO: 2187859 - RNA, 19 nt, Homo sapiens
  misc_RNA (1)...(19): siRNA sense strand
caucaacagauucacagua

SEQ ID NO: 2187860 - RNA, 19 nt, Homo sapiens
  misc_RNA (1)...(19): siRNA sense strand
gcucgcguaucuuguugaa

SEQ ID NO: 2187861 - RNA, 19 nt, Homo sapiens
  misc_RNA (1)...(19): siRNA sense strand
aagaauuuguggacaguug

SEQ ID NO: 2187862 - RNA, 19 nt, Homo sapiens
  misc_RNA (1)...(19): siRNA sense strand
gcaccagggcacucacaaa

SEQ ID NO: 2187863 - RNA, 19 nt, Homo sapiens
  misc_RNA (1)...(19): siRNA sense strand
aaaccgaacacccauaaau

SEQ ID NO: 2187864 - RNA, 19 nt, Homo sapiens
  misc_RNA (1)...(19): siRNA sense strand
gcagcucgcguaucuuguu

SEQ ID NO: 2187865 - RNA, 19 nt, Homo sapiens
  misc_RNA (1)...(19): siRNA sense strand
cuacuaguggugaugaaua

SEQ ID NO: 2187866 - RNA, 19 nt, Homo sapiens
  misc_RNA (1)...(19): siRNA sense strand
guaggaauguggaucucau

SEQ ID NO: 2187867 - RNA, 19 nt, Homo sapiens
  misc_RNA (1)...(19): siRNA sense strand
auaagaggauucacaccaa

SEQ ID NO: 2187868 - RNA, 19 nt, Homo sapiens
  misc_RNA (1)...(19): siRNA sense strand
agagcaaagucuuaugaau

SEQ ID NO: 2187869 - RNA, 19 nt, Homo sapiens
  misc_RNA (1)...(19): siRNA sense strand
cgauguacuucaccagaga

SEQ ID NO: 2187870 - RNA, 19 nt, Homo sapiens
  misc_RNA (1)...(19): siRNA sense strand
uugaggauguggcgaugua

SEQ ID NO: 2187871 - RNA, 19 nt, Homo sapiens
  misc_RNA (1)...(19): siRNA sense strand
aggcuuacuuucccuacua

SEQ ID NO: 2187872 - RNA, 19 nt, Homo sapiens
  misc_RNA (1)...(19): siRNA sense strand
caacagauucacaguaaac

SEQ ID NO: 2187873 - RNA, 19 nt, Homo sapiens
  misc_RNA (1)...(19): siRNA sense strand
ucaacagauucacaguaaa

SEQ ID NO: 2187874 - RNA, 19 nt, Homo sapiens
  misc_RNA (1)...(19): siRNA sense strand
ccauacagaugucaugacu

SEQ ID NO: 2187875 - RNA, 19 nt, Homo sapiens
  misc_RNA (1)...(19): siRNA sense strand
cguaaggcaugguuugauc

SEQ ID NO: 2187876 - RNA, 19 nt, Homo sapiens
  misc_RNA (1)...(19): siRNA sense strand
gguagugcuugcccagguu

SEQ ID NO: 2187877 - RNA, 19 nt, Homo sapiens
  misc_RNA (1)...(19): siRNA sense strand
aaggaggaauucuuucaau

SEQ ID NO: 2187878 - RNA, 19 nt, Homo sapiens
  misc_RNA (1)...(19): siRNA sense strand
ucaaagaauccauacaaag

SEQ ID NO: 2187879 - RNA, 19 nt, Homo sapiens
  misc_RNA (1)...(19): siRNA sense strand
auucaacccuucuauguca

SEQ ID NO: 2187880 - RNA, 19 nt, Homo sapiens
  misc_RNA (1)...(19): siRNA sense strand
uggcaaacccuucaaucaa

SEQ ID NO: 2187881 - RNA, 19 nt, Homo sapiens
  misc_RNA (1)...(19): siRNA sense strand
ccauaaaugccuugagugu

SEQ ID NO: 2187882 - RNA, 19 nt, Homo sapiens
  misc_RNA (1)...(19): siRNA sense strand
cgaauucucacaagagcaa

SEQ ID NO: 2187883 - RNA, 19 nt, Homo sapiens
  misc_RNA (1)...(19): siRNA sense strand
caaugugucauauguggaa

SEQ ID NO: 2187884 - RNA, 19 nt, Homo sapiens
  misc_RNA (1)...(19): siRNA sense strand
gaucucauucagcaucaaa

SEQ ID NO: 2187885 - RNA, 19 nt, Homo sapiens
  misc_RNA (1)...(19): siRNA sense strand
ccauaaaugcagugaaugu

SEQ ID NO: 2187886 - RNA, 19 nt, Homo sapiens
  misc_RNA (1)...(19): siRNA sense strand
cgccauaaaugccuugagu

SEQ ID NO: 2187887 - RNA, 19 nt, Homo sapiens
  misc_RNA (1)...(19): siRNA sense strand
ugucaugacuguggaaagu

SEQ ID NO: 2187888 - RNA, 19 nt, Homo sapiens
  misc_RNA (1)...(19): siRNA sense strand
aaggacagauauccacaug

SEQ ID NO: 2187889 - RNA, 19 nt, Homo sapiens
  misc_RNA (1)...(19): siRNA sense strand
acccauaaaugcagugaau

SEQ ID NO: 2187890 - RNA, 19 nt, Homo sapiens
  misc_RNA (1)...(19): siRNA sense strand
cuucaaaaccuuaaccuua

SEQ ID NO: 2187891 - RNA, 19 nt, Homo sapiens
  misc_RNA (1)...(19): siRNA sense strand
caaguggcacacaagcuuu

SEQ ID NO: 2187892 - RNA, 19 nt, Homo sapiens
  misc_RNA (1)...(19): siRNA sense strand
ucaaguggcacacaagcuu

SEQ ID NO: 2187893 - RNA, 19 nt, Homo sapiens
  misc_RNA (1)...(19): siRNA sense strand
ucuaugucaucaacagauu

SEQ ID NO: 2187894 - RNA, 19 nt, Homo sapiens
  misc_RNA (1)...(19): siRNA sense strand
caacaucaaagaauucacu

SEQ ID NO: 2187895 - RNA, 19 nt, Homo sapiens
  misc_RNA (1)...(19): siRNA sense strand
cagaaaaguuacauaagug

SEQ ID NO: 2187896 - RNA, 19 nt, Homo sapiens
  misc_RNA (1)...(19): siRNA sense strand
ucugucagcuggagaacug

SEQ ID NO: 2187897 - RNA, 19 nt, Homo sapiens
  misc_RNA (1)...(19): siRNA sense strand
gagcgaauucucacaagag

SEQ ID NO: 2187898 - RNA, 19 nt, Homo sapiens
  misc_RNA (1)...(19): siRNA sense strand
aagcagggcagauaugaug

SEQ ID NO: 2187899 - RNA, 19 nt, Homo sapiens
  misc_RNA (1)...(19): siRNA sense strand
gaugugauguuggagaacu

SEQ ID NO: 2187900 - RNA, 19 nt, Homo sapiens
  misc_RNA (1)...(19): siRNA sense strand
gaggauggcaaacccuuca

SEQ ID NO: 2187901 - RNA, 19 nt, Homo sapiens
  misc_RNA (1)...(19): siRNA sense strand
aggaggaauucuuucaaug

SEQ ID NO: 2187902 - RNA, 19 nt, Homo sapiens
  misc_RNA (1)...(19): siRNA sense strand
auacaaaggaggaauucuu

SEQ ID NO: 2187903 - RNA, 19 nt, Homo sapiens
  misc_RNA (1)...(19): siRNA sense strand
aaagaauccauacaaagga

SEQ ID NO: 2187904 - RNA, 19 nt, Homo sapiens
  misc_RNA (1)...(19): siRNA sense strand
ucaugacuguggaaagugu

SEQ ID NO: 2187905 - RNA, 19 nt, Homo sapiens
  misc_RNA (1)...(19): siRNA sense strand
gacaguugcaggcuuacuu

SEQ ID NO: 2187906 - RNA, 19 nt, Homo sapiens
  misc_RNA (1)...(19): siRNA sense strand
cgagaacugggaauaggaa

SEQ ID NO: 2187907 - RNA, 19 nt, Homo sapiens
  misc_RNA (1)...(19): siRNA sense strand
gaaggaccucuaccgagau

SEQ ID NO: 2187908 - RNA, 19 nt, Homo sapiens
  misc_RNA (1)...(19): siRNA sense strand
gaggauucacaccaaagaa

SEQ ID NO: 2187909 - RNA, 19 nt, Homo sapiens
  misc_RNA (1)...(19): siRNA sense strand
cagcucgcguaucuuguug

SEQ ID NO: 2187910 - RNA, 19 nt, Homo sapiens
  misc_RNA (1)...(19): siRNA sense strand
agcaaagucuuaugaaugc

SEQ ID NO: 2187911 - RNA, 19 nt, Homo sapiens
  misc_RNA (1)...(19): siRNA sense strand
gaagcagggcagauaugau

SEQ ID NO: 2187912 - RNA, 19 nt, Homo sapiens
  misc_RNA (1)...(19): siRNA sense strand
cuaccgagaacugggaaua

SEQ ID NO: 2187913 - RNA, 19 nt, Homo sapiens
  misc_RNA (1)...(19): siRNA sense strand
ggaagccaacccuaccaau

SEQ ID NO: 2187914 - RNA, 19 nt, Homo sapiens
  misc_RNA (1)...(19): siRNA sense strand
cgacaucaggucauucaca

SEQ ID NO: 2187915 - RNA, 19 nt, Homo sapiens
  misc_RNA (1)...(19): siRNA sense strand
ucccaaaccugagaugauc

SEQ ID NO: 2187916 - RNA, 19 nt, Homo sapiens
  misc_RNA (1)...(19): siRNA sense strand
ggaccucuaccgagaugug

SEQ ID NO: 2187917 - RNA, 19 nt, Homo sapiens
  misc_RNA (1)...(19): siRNA sense strand
gaaugcagugaauguggaa

SEQ ID NO: 2187918 - RNA, 19 nt, Homo sapiens
  misc_RNA (1)...(19): siRNA sense strand
aagccaacccuaccaaugu

SEQ ID NO: 2187919 - RNA, 19 nt, Homo sapiens
  misc_RNA (1)...(19): siRNA sense strand
ggagaacuacaggaacaug

SEQ ID NO: 2187920 - RNA, 19 nt, Homo sapiens
  misc_RNA (1)...(19): siRNA sense strand
cggcagcucgcguaucuug

SEQ ID NO: 2187921 - RNA, 19 nt, Homo sapiens
  misc_RNA (1)...(19): siRNA sense strand
aggcaugguuugaucaaca

SEQ ID NO: 2187922 - RNA, 19 nt, Homo sapiens
  misc_RNA (1)...(19): siRNA sense strand
ggaaucagcugagaaacuu

SEQ ID NO: 2187923 - RNA, 19 nt, Homo sapiens
  misc_RNA (1)...(19): siRNA sense strand
ggcaaacccuucaaucaaa

SEQ ID NO: 2187924 - RNA, 19 nt, Homo sapiens
  misc_RNA (1)...(19): siRNA sense strand
agacagcggucagcucuua

SEQ ID NO: 2187925 - RNA, 19 nt, Homo sapiens
  misc_RNA (1)...(19): siRNA sense strand
gaacauaagaggauucaca

SEQ ID NO: 2187926 - RNA, 19 nt, Homo sapiens
  misc_RNA (1)...(19): siRNA sense strand
gagcaaagucuuaugaaug

SEQ ID NO: 2187927 - RNA, 19 nt, Homo sapiens
  misc_RNA (1)...(19): siRNA sense strand
gcaggaaucagcugagaaa

SEQ ID NO: 2187928 - RNA, 19 nt, Homo sapiens
  misc_RNA (1)...(19): siRNA sense strand
gagaugugauguuggagaa

SEQ ID NO: 2187929 - RNA, 19 nt, Homo sapiens
  misc_RNA (1)...(19): siRNA sense strand
gggcagauaugaugaggau

SEQ ID NO: 2187930 - RNA, 19 nt, Homo sapiens
  misc_RNA (1)...(19): siRNA sense strand
gaggaauucuuucaaugug

SEQ ID NO: 2187931 - RNA, 19 nt, Homo sapiens
  misc_RNA (1)...(19): siRNA sense strand
agucagaauucaacccuua

SEQ ID NO: 2187932 - RNA, 19 nt, Homo sapiens
  misc_RNA (1)...(19): siRNA sense strand
guggacaguugcaggcuua

SEQ ID NO: 2187933 - RNA, 19 nt, Homo sapiens
  misc_RNA (1)...(19): siRNA sense strand
guaaaccgaacacccauaa

SEQ ID NO: 2187934 - RNA, 19 nt, Homo sapiens
  misc_RNA (1)...(19): siRNA sense strand
uaagaggauucacaccaaa

SEQ ID NO: 2187935 - RNA, 19 nt, Homo sapiens
  misc_RNA (1)...(19): siRNA sense strand
gcacacaagcuuuauuaag

SEQ ID NO: 2187936 - RNA, 19 nt, Homo sapiens
  misc_RNA (1)...(19): siRNA sense strand
caucaaagaauccauacaa

SEQ ID NO: 2187937 - RNA, 19 nt, Homo sapiens
  misc_RNA (1)...(19): siRNA sense strand
ccagggcacucacaaagga

SEQ ID NO: 2187938 - RNA, 19 nt, Homo sapiens
  misc_RNA (1)...(19): siRNA sense strand
cuaccaaugugucauaugu

SEQ ID NO: 2187939 - RNA, 19 nt, Homo sapiens
  misc_RNA (1)...(19): siRNA sense strand
ggaggaauucuuucaaugu

SEQ ID NO: 2187940 - RNA, 19 nt, Homo sapiens
  misc_RNA (1)...(19): siRNA sense strand
gcaaacccuucaaucaaag

SEQ ID NO: 2187941 - RNA, 19 nt, Homo sapiens
  misc_RNA (1)...(19): siRNA sense strand
cugaagauuuagagucaua

SEQ ID NO: 2187942 - RNA, 19 nt, Homo sapiens
  misc_RNA (1)...(19): siRNA sense strand
caaagaauccauacaaagg

SEQ ID NO: 2187943 - RNA, 19 nt, Homo sapiens
  misc_RNA (1)...(19): siRNA sense strand
uaagauaucagugguaaug

SEQ ID NO: 2187944 - RNA, 19 nt, Homo sapiens
  misc_RNA (1)...(19): siRNA sense strand
gcauucaacccuucuaugu

SEQ ID NO: 2187945 - RNA, 19 nt, Homo sapiens
  misc_RNA (1)...(19): siRNA sense strand
ggaagcagggcagauauga

SEQ ID NO: 2187946 - RNA, 19 nt, Homo sapiens
  misc_RNA (1)...(19): siRNA sense strand
gaagccaacccuaccaaug

SEQ ID NO: 2187947 - RNA, 19 nt, Homo sapiens
  misc_RNA (1)...(19): siRNA sense strand
gaagccagacacaagauga

SEQ ID NO: 2187948 - RNA, 19 nt, Homo sapiens
  misc_RNA (1)...(19): siRNA sense strand
cuaccgagaugugauguug

SEQ ID NO: 2187949 - RNA, 19 nt, Homo sapiens
  misc_RNA (1)...(19): siRNA sense strand
uggcacacaagcuuuauua

SEQ ID NO: 2187950 - RNA, 19 nt, Homo sapiens
  misc_RNA (1)...(19): siRNA sense strand
gaucagaaugcgcaaacaa

SEQ ID NO: 2187951 - RNA, 19 nt, Homo sapiens
  misc_RNA (1)...(19): siRNA sense strand
gaucaacaucaaagaauuc

SEQ ID NO: 2187952 - RNA, 19 nt, Homo sapiens
  misc_RNA (1)...(19): siRNA sense strand
gaaaagucauuaggcguaa

SEQ ID NO: 2187953 - RNA, 19 nt, Homo sapiens
  misc_RNA (1)...(19): siRNA sense strand
aaacaagccauacagaugu

SEQ ID NO: 2187954 - RNA, 19 nt, Homo sapiens
  misc_RNA (1)...(19): siRNA sense strand
gguggaagcagggcagaua

SEQ ID NO: 2187955 - RNA, 19 nt, Homo sapiens
  misc_RNA (1)...(19): siRNA sense strand
aucaacagauucacaguaa

SEQ ID NO: 2187956 - RNA, 19 nt, Homo sapiens
  misc_RNA (1)...(19): siRNA sense strand
uaaacagugucaccugcaa

SEQ ID NO: 2187957 - RNA, 19 nt, Homo sapiens
  misc_RNA (1)...(19): siRNA sense strand
uaaagaauuuguggacagu

SEQ ID NO: 2187958 - RNA, 19 nt, Homo sapiens
  misc_RNA (1)...(19): siRNA sense strand
cagcaucaaagaauccaua

SEQ ID NO: 2187959 - RNA, 19 nt, Homo sapiens
  misc_RNA (1)...(19): siRNA sense strand
caucaacagauucacagua

SEQ ID NO: 2187960 - RNA, 19 nt, Homo sapiens
  misc_RNA (1)...(19): siRNA sense strand
gcucgcguaucuuguugaa

SEQ ID NO: 2187961 - RNA, 19 nt, Homo sapiens
  misc_RNA (1)...(19): siRNA sense strand
aagaauuuguggacaguug

SEQ ID NO: 2187962 - RNA, 19 nt, Homo sapiens
  misc_RNA (1)...(19): siRNA sense strand
gcaccagggcacucacaaa

SEQ ID NO: 2187963 - RNA, 19 nt, Homo sapiens
  misc_RNA (1)...(19): siRNA sense strand
aaaccgaacacccauaaau

SEQ ID NO: 2187964 - RNA, 19 nt, Homo sapiens
  misc_RNA (1)...(19): siRNA sense strand
gcagcucgcguaucuuguu

SEQ ID NO: 2187965 - RNA, 19 nt, Homo sapiens
  misc_RNA (1)...(19): siRNA sense strand
cuacuaguggugaugaaua

SEQ ID NO: 2187966 - RNA, 19 nt, Homo sapiens
  misc_RNA (1)...(19): siRNA sense strand
guaggaauguggaucucau

SEQ ID NO: 2187967 - RNA, 19 nt, Homo sapiens
  misc_RNA (1)...(19): siRNA sense strand
auaagaggauucacaccaa

SEQ ID NO: 2187968 - RNA, 19 nt, Homo sapiens
  misc_RNA (1)...(19): siRNA sense strand
agagcaaagucuuaugaau

SEQ ID NO: 2187969 - RNA, 19 nt, Homo sapiens
  misc_RNA (1)...(19): siRNA sense strand
cgauguacuucaccagaga

SEQ ID NO: 2187970 - RNA, 19 nt, Homo sapiens
  misc_RNA (1)...(19): siRNA sense strand
uugaggauguggcgaugua

SEQ ID NO: 2187971 - RNA, 19 nt, Homo sapiens
  misc_RNA (1)...(19): siRNA sense strand
aggcuuacuuucccuacua

SEQ ID NO: 2187972 - RNA, 19 nt, Homo sapiens
  misc_RNA (1)...(19): siRNA sense strand
caacagauucacaguaaac

SEQ ID NO: 2187973 - RNA, 19 nt, Homo sapiens
  misc_RNA (1)...(19): siRNA sense strand
ucaacagauucacaguaaa

SEQ ID NO: 2187974 - RNA, 19 nt, Homo sapiens
  misc_RNA (1)...(19): siRNA sense strand
ccauacagaugucaugacu

SEQ ID NO: 2187975 - RNA, 19 nt, Homo sapiens
  misc_RNA (1)...(19): siRNA sense strand
cguaaggcaugguuugauc

SEQ ID NO: 2187976 - RNA, 19 nt, Homo sapiens
  misc_RNA (1)...(19): siRNA sense strand
gguagugcuugcccagguu

SEQ ID NO: 2187977 - RNA, 19 nt, Homo sapiens
  misc_RNA (1)...(19): siRNA sense strand
aaggaggaauucuuucaau

SEQ ID NO: 2187978 - RNA, 19 nt, Homo sapiens
  misc_RNA (1)...(19): siRNA sense strand
ucaaagaauccauacaaag

SEQ ID NO: 2187979 - RNA, 19 nt, Homo sapiens
  misc_RNA (1)...(19): siRNA sense strand
auucaacccuucuauguca

SEQ ID NO: 2187980 - RNA, 19 nt, Homo sapiens
  misc_RNA (1)...(19): siRNA sense strand
uggcaaacccuucaaucaa

SEQ ID NO: 2187981 - RNA, 19 nt, Homo sapiens
  misc_RNA (1)...(19): siRNA sense strand
ccauaaaugccuugagugu

SEQ ID NO: 2187982 - RNA, 19 nt, Homo sapiens
  misc_RNA (1)...(19): siRNA sense strand
cgaauucucacaagagcaa

SEQ ID NO: 2187983 - RNA, 19 nt, Homo sapiens
  misc_RNA (1)...(19): siRNA sense strand
caaugugucauauguggaa

SEQ ID NO: 2187984 - RNA, 19 nt, Homo sapiens
  misc_RNA (1)...(19): siRNA sense strand
gaucucauucagcaucaaa

SEQ ID NO: 2187985 - RNA, 19 nt, Homo sapiens
  misc_RNA (1)...(19): siRNA sense strand
ccauaaaugcagugaaugu

SEQ ID NO: 2187986 - RNA, 19 nt, Homo sapiens
  misc_RNA (1)...(19): siRNA sense strand
cgccauaaaugccuugagu

SEQ ID NO: 2187987 - RNA, 19 nt, Homo sapiens
  misc_RNA (1)...(19): siRNA sense strand
ugucaugacuguggaaagu

SEQ ID NO: 2187988 - RNA, 19 nt, Homo sapiens
  misc_RNA (1)...(19): siRNA sense strand
aaggacagauauccacaug

SEQ ID NO: 2187989 - RNA, 19 nt, Homo sapiens
  misc_RNA (1)...(19): siRNA sense strand
acccauaaaugcagugaau

SEQ ID NO: 2187990 - RNA, 19 nt, Homo sapiens
  misc_RNA (1)...(19): siRNA sense strand
cuucaaaaccuuaaccuua

SEQ ID NO: 2187991 - RNA, 19 nt, Homo sapiens
  misc_RNA (1)...(19): siRNA sense strand
caaguggcacacaagcuuu

SEQ ID NO: 2187992 - RNA, 19 nt, Homo sapiens
  misc_RNA (1)...(19): siRNA sense strand
ucaaguggcacacaagcuu

SEQ ID NO: 2187993 - RNA, 19 nt, Homo sapiens
  misc_RNA (1)...(19): siRNA sense strand
ucuaugucaucaacagauu

SEQ ID NO: 2187994 - RNA, 19 nt, Homo sapiens
  misc_RNA (1)...(19): siRNA sense strand
caacaucaaagaauucacu

SEQ ID NO: 2187995 - RNA, 19 nt, Homo sapiens
  misc_RNA (1)...(19): siRNA sense strand
cagaaaaguuacauaagug

SEQ ID NO: 2187996 - RNA, 19 nt, Homo sapiens
  misc_RNA (1)...(19): siRNA sense strand
ucugucagcuggagaacug

SEQ ID NO: 2187997 - RNA, 19 nt, Homo sapiens
  misc_RNA (1)...(19): siRNA sense strand
gagcgaauucucacaagag

SEQ ID NO: 2187998 - RNA, 19 nt, Homo sapiens
  misc_RNA (1)...(19): siRNA sense strand
aagcagggcagauaugaug

SEQ ID NO: 2187999 - RNA, 19 nt, Homo sapiens
  misc_RNA (1)...(19): siRNA sense strand
gaugugauguuggagaacu

SEQ ID NO: 2188000 - RNA, 19 nt, Homo sapiens
  misc_RNA (1)...(19): siRNA sense strand
gaggauggcaaacccuuca

SEQ ID NO: 2188001 - RNA, 19 nt, Homo sapiens
  misc_RNA (1)...(19): siRNA sense strand
aggaggaauucuuucaaug

SEQ ID NO: 2188002 - RNA, 19 nt, Homo sapiens
  misc_RNA (1)...(19): siRNA sense strand
auacaaaggaggaauucuu

SEQ ID NO: 2188003 - RNA, 19 nt, Homo sapiens
  misc_RNA (1)...(19): siRNA sense strand
aaagaauccauacaaagga

SEQ ID NO: 2188004 - RNA, 19 nt, Homo sapiens
  misc_RNA (1)...(19): siRNA sense strand
ucaugacuguggaaagugu

SEQ ID NO: 2188005 - RNA, 19 nt, Homo sapiens
  misc_RNA (1)...(19): siRNA sense strand
gacaguugcaggcuuacuu

SEQ ID NO: 2188006 - RNA, 19 nt, Homo sapiens
  misc_RNA (1)...(19): siRNA sense strand
cgagaacugggaauaggaa

SEQ ID NO: 2188007 - RNA, 19 nt, Homo sapiens
  misc_RNA (1)...(19): siRNA sense strand
gaaggaccucuaccgagau

SEQ ID NO: 2188008 - RNA, 19 nt, Homo sapiens
  misc_RNA (1)...(19): siRNA sense strand
gaggauucacaccaaagaa

SEQ ID NO: 2188009 - RNA, 19 nt, Homo sapiens
  misc_RNA (1)...(19): siRNA sense strand
cagcucgcguaucuuguug

SEQ ID NO: 2188010 - RNA, 19 nt, Homo sapiens
  misc_RNA (1)...(19): siRNA sense strand
agcaaagucuuaugaaugc

SEQ ID NO: 2188011 - RNA, 19 nt, Homo sapiens
  misc_RNA (1)...(19): siRNA sense strand
gaagcagggcagauaugau

SEQ ID NO: 2188012 - RNA, 19 nt, Homo sapiens
  misc_RNA (1)...(19): siRNA sense strand
cuaccgagaacugggaaua

SEQ ID NO: 2188013 - RNA, 19 nt, Homo sapiens
  misc_RNA (1)...(19): siRNA sense strand
ggaagccaacccuaccaau

SEQ ID NO: 2188014 - RNA, 19 nt, Homo sapiens
  misc_RNA (1)...(19): siRNA sense strand
cgacaucaggucauucaca

SEQ ID NO: 2188015 - RNA, 19 nt, Homo sapiens
  misc_RNA (1)...(19): siRNA sense strand
ucccaaaccugagaugauc

SEQ ID NO: 2188016 - RNA, 19 nt, Homo sapiens
  misc_RNA (1)...(19): siRNA sense strand
ggaccucuaccgagaugug

SEQ ID NO: 2188017 - RNA, 19 nt, Homo sapiens
  misc_RNA (1)...(19): siRNA sense strand
gaaugcagugaauguggaa

SEQ ID NO: 2188018 - RNA, 19 nt, Homo sapiens
  misc_RNA (1)...(19): siRNA sense strand
aagccaacccuaccaaugu

SEQ ID NO: 2188019 - RNA, 19 nt, Homo sapiens
  misc_RNA (1)...(19): siRNA sense strand
ggagaacuacaggaacaug

SEQ ID NO: 2188020 - RNA, 19 nt, Homo sapiens
  misc_RNA (1)...(19): siRNA sense strand
cggcagcucgcguaucuug

SEQ ID NO: 2188021 - RNA, 19 nt, Homo sapiens
  misc_RNA (1)...(19): siRNA sense strand
aggcaugguuugaucaaca

SEQ ID NO: 2188022 - RNA, 19 nt, Homo sapiens
  misc_RNA (1)...(19): siRNA sense strand
ggaagagccuguguacauu

SEQ ID NO: 2188023 - RNA, 19 nt, Homo sapiens
  misc_RNA (1)...(19): siRNA sense strand
caaaggaguuggacaaggu

SEQ ID NO: 2188024 - RNA, 19 nt, Homo sapiens
  misc_RNA (1)...(19): siRNA sense strand
gaaagcaggcucacagaag

SEQ ID NO: 2188025 - RNA, 19 nt, Homo sapiens
  misc_RNA (1)...(19): siRNA sense strand
ggaggcagcacaaggaaga

SEQ ID NO: 2188026 - RNA, 19 nt, Homo sapiens
  misc_RNA (1)...(19): siRNA sense strand
gaagagccuguguacauug

SEQ ID NO: 2188027 - RNA, 19 nt, Homo sapiens
  misc_RNA (1)...(19): siRNA sense strand
aagaggagcuccaguaagg

SEQ ID NO: 2188028 - RNA, 19 nt, Homo sapiens
  misc_RNA (1)...(19): siRNA sense strand
ccaagaggagcuccaguaa

SEQ ID NO: 2188029 - RNA, 19 nt, Homo sapiens
  misc_RNA (1)...(19): siRNA sense strand
agagugaggccaucuauga

SEQ ID NO: 2188030 - RNA, 19 nt, Homo sapiens
  misc_RNA (1)...(19): siRNA sense strand
gccaagaggagcuccagua

SEQ ID NO: 2188031 - RNA, 19 nt, Homo sapiens
  misc_RNA (1)...(19): siRNA sense strand
gaccacuccuugugaaauc

SEQ ID NO: 2188032 - RNA, 19 nt, Homo sapiens
  misc_RNA (1)...(19): siRNA sense strand
ggaagcugcuggaggugau

SEQ ID NO: 2188033 - RNA, 19 nt, Homo sapiens
  misc_RNA (1)...(19): siRNA sense strand
gugaggccaucuaugaaga

SEQ ID NO: 2188034 - RNA, 19 nt, Homo sapiens
  misc_RNA (1)...(19): siRNA sense strand
ggacagcagcacccgaaga

SEQ ID NO: 2188035 - RNA, 19 nt, Homo sapiens
  misc_RNA (1)...(19): siRNA sense strand
gagccuguguacauugaga

SEQ ID NO: 2188036 - RNA, 19 nt, Homo sapiens
  misc_RNA (1)...(19): siRNA sense strand
gaagguuccuccgcagaag

SEQ ID NO: 2188037 - RNA, 19 nt, Homo sapiens
  misc_RNA (1)...(19): siRNA sense strand
ccaccgcaauggagacuuc

SEQ ID NO: 2188038 - RNA, 19 nt, Homo sapiens
  misc_RNA (1)...(19): siRNA sense strand
ucuaugaagagaugaagua

SEQ ID NO: 2188039 - RNA, 19 nt, Homo sapiens
  misc_RNA (1)...(19): siRNA sense strand
ggacaccagaggaggaaga

SEQ ID NO: 2188040 - RNA, 19 nt, Homo sapiens
  misc_RNA (1)...(19): siRNA sense strand
caaagacggagaaggagau

SEQ ID NO: 2188041 - RNA, 19 nt, Homo sapiens
  misc_RNA (1)...(19): siRNA sense strand
ggauggguuucaugacgau

SEQ ID NO: 2188042 - RNA, 19 nt, Homo sapiens
  misc_RNA (1)...(19): siRNA sense strand
gagugaggccaucuaugaa

SEQ ID NO: 2188043 - RNA, 19 nt, Homo sapiens
  misc_RNA (1)...(19): siRNA sense strand
aggaagagccuguguacau

SEQ ID NO: 2188044 - RNA, 19 nt, Homo sapiens
  misc_RNA (1)...(19): siRNA sense strand
caccagaggaggaagaaga

SEQ ID NO: 2188045 - RNA, 19 nt, Homo sapiens
  misc_RNA (1)...(19): siRNA sense strand
aagagccuguguacauuga

SEQ ID NO: 2188046 - RNA, 19 nt, Homo sapiens
  misc_RNA (1)...(19): siRNA sense strand
gaggccaucuaugaagaga

SEQ ID NO: 2188047 - RNA, 19 nt, Homo sapiens
  misc_RNA (1)...(19): siRNA sense strand
aagcaaaggaguuggacaa

SEQ ID NO: 2188048 - RNA, 19 nt, Homo sapiens
  misc_RNA (1)...(19): siRNA sense strand
gcaagaaagcaggcucaca

SEQ ID NO: 2188049 - RNA, 19 nt, Homo sapiens
  misc_RNA (1)...(19): siRNA sense strand
gagaaaagcaaaggaguug

SEQ ID NO: 2188050 - RNA, 19 nt, Homo sapiens
  misc_RNA (1)...(19): siRNA sense strand
gaaaagcaaaggaguugga

SEQ ID NO: 2188051 - RNA, 19 nt, Homo sapiens
  misc_RNA (1)...(19): siRNA sense strand
agaaagcaggcucacagaa

SEQ ID NO: 2188052 - RNA, 19 nt, Homo sapiens
  misc_RNA (1)...(19): siRNA sense strand
ggagaaaagcaaaggaguu

SEQ ID NO: 2188053 - RNA, 19 nt, Homo sapiens
  misc_RNA (1)...(19): siRNA sense strand
caagaggagcuccaguaag

SEQ ID NO: 2188054 - RNA, 19 nt, Homo sapiens
  misc_RNA (1)...(19): siRNA sense strand
gagagugaggccaucuaug

SEQ ID NO: 2188055 - RNA, 19 nt, Homo sapiens
  misc_RNA (1)...(19): siRNA sense strand
gaagagagugaggccaucu

SEQ ID NO: 2188056 - RNA, 19 nt, Homo sapiens
  misc_RNA (1)...(19): siRNA sense strand
agccaaagacggagaagga

SEQ ID NO: 2188057 - RNA, 19 nt, Homo sapiens
  misc_RNA (1)...(19): siRNA sense strand
ggaagagccuguguacauu

SEQ ID NO: 2188058 - RNA, 19 nt, Homo sapiens
  misc_RNA (1)...(19): siRNA sense strand
caaaggaguuggacaaggu

SEQ ID NO: 2188059 - RNA, 19 nt, Homo sapiens
  misc_RNA (1)...(19): siRNA sense strand
gaaagcaggcucacagaag

SEQ ID NO: 2188060 - RNA, 19 nt, Homo sapiens
  misc_RNA (1)...(19): siRNA sense strand
ggaggcagcacaaggaaga

SEQ ID NO: 2188061 - RNA, 19 nt, Homo sapiens
  misc_RNA (1)...(19): siRNA sense strand
gaagagccuguguacauug

SEQ ID NO: 2188062 - RNA, 19 nt, Homo sapiens
  misc_RNA (1)...(19): siRNA sense strand
aagaggagcuccaguaagg

SEQ ID NO: 2188063 - RNA, 19 nt, Homo sapiens
  misc_RNA (1)...(19): siRNA sense strand
ccaagaggagcuccaguaa

SEQ ID NO: 2188064 - RNA, 19 nt, Homo sapiens
  misc_RNA (1)...(19): siRNA sense strand
agagugaggccaucuauga

SEQ ID NO: 2188065 - RNA, 19 nt, Homo sapiens
  misc_RNA (1)...(19): siRNA sense strand
gccaagaggagcuccagua

SEQ ID NO: 2188066 - RNA, 19 nt, Homo sapiens
  misc_RNA (1)...(19): siRNA sense strand
gaccacuccuugugaaauc

SEQ ID NO: 2188067 - RNA, 19 nt, Homo sapiens
  misc_RNA (1)...(19): siRNA sense strand
ggaagcugcuggaggugau

SEQ ID NO: 2188068 - RNA, 19 nt, Homo sapiens
  misc_RNA (1)...(19): siRNA sense strand
gugaggccaucuaugaaga

SEQ ID NO: 2188069 - RNA, 19 nt, Homo sapiens
  misc_RNA (1)...(19): siRNA sense strand
ggacagcagcacccgaaga

SEQ ID NO: 2188070 - RNA, 19 nt, Homo sapiens
  misc_RNA (1)...(19): siRNA sense strand
gagccuguguacauugaga

SEQ ID NO: 2188071 - RNA, 19 nt, Homo sapiens
  misc_RNA (1)...(19): siRNA sense strand
gaagguuccuccgcagaag

SEQ ID NO: 2188072 - RNA, 19 nt, Homo sapiens
  misc_RNA (1)...(19): siRNA sense strand
ccaccgcaauggagacuuc

SEQ ID NO: 2188073 - RNA, 19 nt, Homo sapiens
  misc_RNA (1)...(19): siRNA sense strand
ucuaugaagagaugaagua

SEQ ID NO: 2188074 - RNA, 19 nt, Homo sapiens
  misc_RNA (1)...(19): siRNA sense strand
ggacaccagaggaggaaga

SEQ ID NO: 2188075 - RNA, 19 nt, Homo sapiens
  misc_RNA (1)...(19): siRNA sense strand
caaagacggagaaggagau

SEQ ID NO: 2188076 - RNA, 19 nt, Homo sapiens
  misc_RNA (1)...(19): siRNA sense strand
ggauggguuucaugacgau

SEQ ID NO: 2188077 - RNA, 19 nt, Homo sapiens
  misc_RNA (1)...(19): siRNA sense strand
gagugaggccaucuaugaa

SEQ ID NO: 2188078 - RNA, 19 nt, Homo sapiens
  misc_RNA (1)...(19): siRNA sense strand
aggaagagccuguguacau

SEQ ID NO: 2188079 - RNA, 19 nt, Homo sapiens
  misc_RNA (1)...(19): siRNA sense strand
caccagaggaggaagaaga

SEQ ID NO: 2188080 - RNA, 19 nt, Homo sapiens
  misc_RNA (1)...(19): siRNA sense strand
aagagccuguguacauuga

SEQ ID NO: 2188081 - RNA, 19 nt, Homo sapiens
  misc_RNA (1)...(19): siRNA sense strand
gaggccaucuaugaagaga

SEQ ID NO: 2188082 - RNA, 19 nt, Homo sapiens
  misc_RNA (1)...(19): siRNA sense strand
aagcaaaggaguuggacaa

SEQ ID NO: 2188083 - RNA, 19 nt, Homo sapiens
  misc_RNA (1)...(19): siRNA sense strand
gcaagaaagcaggcucaca

SEQ ID NO: 2188084 - RNA, 19 nt, Homo sapiens
  misc_RNA (1)...(19): siRNA sense strand
gagaaaagcaaaggaguug

SEQ ID NO: 2188085 - RNA, 19 nt, Homo sapiens
  misc_RNA (1)...(19): siRNA sense strand
gaaaagcaaaggaguugga

SEQ ID NO: 2188086 - RNA, 19 nt, Homo sapiens
  misc_RNA (1)...(19): siRNA sense strand
agaaagcaggcucacagaa

SEQ ID NO: 2188087 - RNA, 19 nt, Homo sapiens
  misc_RNA (1)...(19): siRNA sense strand
ggagaaaagcaaaggaguu

SEQ ID NO: 2188088 - RNA, 19 nt, Homo sapiens
  misc_RNA (1)...(19): siRNA sense strand
caagaggagcuccaguaag

SEQ ID NO: 2188089 - RNA, 19 nt, Homo sapiens
  misc_RNA (1)...(19): siRNA sense strand
gagagugaggccaucuaug

SEQ ID NO: 2188090 - RNA, 19 nt, Homo sapiens
  misc_RNA (1)...(19): siRNA sense strand
gaagagagugaggccaucu

SEQ ID NO: 2188091 - RNA, 19 nt, Homo sapiens
  misc_RNA (1)...(19): siRNA sense strand
agccaaagacggagaagga

SEQ ID NO: 2188092 - RNA, 19 nt, Homo sapiens
  misc_RNA (1)...(19): siRNA sense strand
ggaagagccuguguacauu

SEQ ID NO: 2188093 - RNA, 19 nt, Homo sapiens
  misc_RNA (1)...(19): siRNA sense strand
caaaggaguuggacaaggu

SEQ ID NO: 2188094 - RNA, 19 nt, Homo sapiens
  misc_RNA (1)...(19): siRNA sense strand
gaaagcaggcucacagaag

SEQ ID NO: 2188095 - RNA, 19 nt, Homo sapiens
  misc_RNA (1)...(19): siRNA sense strand
ggaggcagcacaaggaaga

SEQ ID NO: 2188096 - RNA, 19 nt, Homo sapiens
  misc_RNA (1)...(19): siRNA sense strand
gaagagccuguguacauug

SEQ ID NO: 2188097 - RNA, 19 nt, Homo sapiens
  misc_RNA (1)...(19): siRNA sense strand
aagaggagcuccaguaagg

SEQ ID NO: 2188098 - RNA, 19 nt, Homo sapiens
  misc_RNA (1)...(19): siRNA sense strand
ccaagaggagcuccaguaa

SEQ ID NO: 2188099 - RNA, 19 nt, Homo sapiens
  misc_RNA (1)...(19): siRNA sense strand
agagugaggccaucuauga

SEQ ID NO: 2188100 - RNA, 19 nt, Homo sapiens
  misc_RNA (1)...(19): siRNA sense strand
gccaagaggagcuccagua

SEQ ID NO: 2188101 - RNA, 19 nt, Homo sapiens
  misc_RNA (1)...(19): siRNA sense strand
gaccacuccuugugaaauc

SEQ ID NO: 2188102 - RNA, 19 nt, Homo sapiens
  misc_RNA (1)...(19): siRNA sense strand
ggaagcugcuggaggugau

SEQ ID NO: 2188103 - RNA, 19 nt, Homo sapiens
  misc_RNA (1)...(19): siRNA sense strand
gugaggccaucuaugaaga

SEQ ID NO: 2188104 - RNA, 19 nt, Homo sapiens
  misc_RNA (1)...(19): siRNA sense strand
ggacagcagcacccgaaga

SEQ ID NO: 2188105 - RNA, 19 nt, Homo sapiens
  misc_RNA (1)...(19): siRNA sense strand
gagccuguguacauugaga

SEQ ID NO: 2188106 - RNA, 19 nt, Homo sapiens
  misc_RNA (1)...(19): siRNA sense strand
gaagguuccuccgcagaag

SEQ ID NO: 2188107 - RNA, 19 nt, Homo sapiens
  misc_RNA (1)...(19): siRNA sense strand
ccaccgcaauggagacuuc

SEQ ID NO: 2188108 - RNA, 19 nt, Homo sapiens
  misc_RNA (1)...(19): siRNA sense strand
ucuaugaagagaugaagua

SEQ ID NO: 2188109 - RNA, 19 nt, Homo sapiens
  misc_RNA (1)...(19): siRNA sense strand
ggacaccagaggaggaaga

SEQ ID NO: 2188110 - RNA, 19 nt, Homo sapiens
  misc_RNA (1)...(19): siRNA sense strand
caaagacggagaaggagau

SEQ ID NO: 2188111 - RNA, 19 nt, Homo sapiens
  misc_RNA (1)...(19): siRNA sense strand
ggauggguuucaugacgau

SEQ ID NO: 2188112 - RNA, 19 nt, Homo sapiens
  misc_RNA (1)...(19): siRNA sense strand
gagugaggccaucuaugaa

SEQ ID NO: 2188113 - RNA, 19 nt, Homo sapiens
  misc_RNA (1)...(19): siRNA sense strand
aggaagagccuguguacau

SEQ ID NO: 2188114 - RNA, 19 nt, Homo sapiens
  misc_RNA (1)...(19): siRNA sense strand
caccagaggaggaagaaga

SEQ ID NO: 2188115 - RNA, 19 nt, Homo sapiens
  misc_RNA (1)...(19): siRNA sense strand
aagagccuguguacauuga

SEQ ID NO: 2188116 - RNA, 19 nt, Homo sapiens
  misc_RNA (1)...(19): siRNA sense strand
gaggccaucuaugaagaga

SEQ ID NO: 2188117 - RNA, 19 nt, Homo sapiens
  misc_RNA (1)...(19): siRNA sense strand
aagcaaaggaguuggacaa

SEQ ID NO: 2188118 - RNA, 19 nt, Homo sapiens
  misc_RNA (1)...(19): siRNA sense strand
gcaagaaagcaggcucaca

SEQ ID NO: 2188119 - RNA, 19 nt, Homo sapiens
  misc_RNA (1)...(19): siRNA sense strand
gagaaaagcaaaggaguug

SEQ ID NO: 2188120 - RNA, 19 nt, Homo sapiens
  misc_RNA (1)...(19): siRNA sense strand
gaaaagcaaaggaguugga

SEQ ID NO: 2188121 - RNA, 19 nt, Homo sapiens
  misc_RNA (1)...(19): siRNA sense strand
agaaagcaggcucacagaa

SEQ ID NO: 2188122 - RNA, 19 nt, Homo sapiens
  misc_RNA (1)...(19): siRNA sense strand
ggagaaaagcaaaggaguu

SEQ ID NO: 2188123 - RNA, 19 nt, Homo sapiens
  misc_RNA (1)...(19): siRNA sense strand
caagaggagcuccaguaag

SEQ ID NO: 2188124 - RNA, 19 nt, Homo sapiens
  misc_RNA (1)...(19): siRNA sense strand
gagagugaggccaucuaug

SEQ ID NO: 2188125 - RNA, 19 nt, Homo sapiens
  misc_RNA (1)...(19): siRNA sense strand
gaagagagugaggccaucu

SEQ ID NO: 2188126 - RNA, 19 nt, Homo sapiens
  misc_RNA (1)...(19): siRNA sense strand
agccaaagacggagaagga

SEQ ID NO: 2188127 - RNA, 19 nt, Homo sapiens
  misc_RNA (1)...(19): siRNA sense strand
gaaagaagaugcugagaaa

SEQ ID NO: 2188128 - RNA, 19 nt, Homo sapiens
  misc_RNA (1)...(19): siRNA sense strand
gaagaagacugcccaaauc

SEQ ID NO: 2188129 - RNA, 19 nt, Homo sapiens
  misc_RNA (1)...(19): siRNA sense strand
gcgagaagcugaaaggaaa

SEQ ID NO: 2188130 - RNA, 19 nt, Homo sapiens
  misc_RNA (1)...(19): siRNA sense strand
gcucaaauguguucgagaa

SEQ ID NO: 2188131 - RNA, 19 nt, Homo sapiens
  misc_RNA (1)...(19): siRNA sense strand
gcaagaucauucauacuga

SEQ ID NO: 2188132 - RNA, 19 nt, Homo sapiens
  misc_RNA (1)...(19): siRNA sense strand
ugaagaugcugcacaguuu

SEQ ID NO: 2188133 - RNA, 19 nt, Homo sapiens
  misc_RNA (1)...(19): siRNA sense strand
gaagaggcaggcugaguua

SEQ ID NO: 2188134 - RNA, 19 nt, Homo sapiens
  misc_RNA (1)...(19): siRNA sense strand
gaucauucauacugacaua

SEQ ID NO: 2188135 - RNA, 19 nt, Homo sapiens
  misc_RNA (1)...(19): siRNA sense strand
gcccagaggugaaacuaaa

SEQ ID NO: 2188136 - RNA, 19 nt, Homo sapiens
  misc_RNA (1)...(19): siRNA sense strand
gaaaagauuuguugcaaug

SEQ ID NO: 2188137 - RNA, 19 nt, Homo sapiens
  misc_RNA (1)...(19): siRNA sense strand
guuguucucuggauccuua

SEQ ID NO: 2188138 - RNA, 19 nt, Homo sapiens
  misc_RNA (1)...(19): siRNA sense strand
gcagaaaccuauaggaaaa

SEQ ID NO: 2188139 - RNA, 19 nt, Homo sapiens
  misc_RNA (1)...(19): siRNA sense strand
ucugagggaucaccacuua

SEQ ID NO: 2188140 - RNA, 19 nt, Homo sapiens
  misc_RNA (1)...(19): siRNA sense strand
ucaaguggaucaucaaauc

SEQ ID NO: 2188141 - RNA, 19 nt, Homo sapiens
  misc_RNA (1)...(19): siRNA sense strand
gaagaugcugcacaguuua

SEQ ID NO: 2188142 - RNA, 19 nt, Homo sapiens
  misc_RNA (1)...(19): siRNA sense strand
cgaugaagaugaugaugaa

SEQ ID NO: 2188143 - RNA, 19 nt, Homo sapiens
  misc_RNA (1)...(19): siRNA sense strand
ugaagaugaugaugaagaa

SEQ ID NO: 2188144 - RNA, 19 nt, Homo sapiens
  misc_RNA (1)...(19): siRNA sense strand
gacagaagcagaacgguuu

SEQ ID NO: 2188145 - RNA, 19 nt, Homo sapiens
  misc_RNA (1)...(19): siRNA sense strand
gaggcaggcugaguuauug

SEQ ID NO: 2188146 - RNA, 19 nt, Homo sapiens
  misc_RNA (1)...(19): siRNA sense strand
aacgggagauuauuuguuu

SEQ ID NO: 2188147 - RNA, 19 nt, Homo sapiens
  misc_RNA (1)...(19): siRNA sense strand
ggagacagccuuggaugaa

SEQ ID NO: 2188148 - RNA, 19 nt, Homo sapiens
  misc_RNA (1)...(19): siRNA sense strand
gagacagccuuggaugaaa

SEQ ID NO: 2188149 - RNA, 19 nt, Homo sapiens
  misc_RNA (1)...(19): siRNA sense strand
caaauguguucgagaaagu

SEQ ID NO: 2188150 - RNA, 19 nt, Homo sapiens
  misc_RNA (1)...(19): siRNA sense strand
cugcacaguuuacagauuu

SEQ ID NO: 2188151 - RNA, 19 nt, Homo sapiens
  misc_RNA (1)...(19): siRNA sense strand
gaucaucaaauccaacuau

SEQ ID NO: 2188152 - RNA, 19 nt, Homo sapiens
  misc_RNA (1)...(19): siRNA sense strand
cagaaagugauuacacaua

SEQ ID NO: 2188153 - RNA, 19 nt, Homo sapiens
  misc_RNA (1)...(19): siRNA sense strand
ggaauauaaucuugaugag

SEQ ID NO: 2188154 - RNA, 19 nt, Homo sapiens
  misc_RNA (1)...(19): siRNA sense strand
agaagaugcugagaaagaa

SEQ ID NO: 2188155 - RNA, 19 nt, Homo sapiens
  misc_RNA (1)...(19): siRNA sense strand
gagaaagugaucccaguga

SEQ ID NO: 2188156 - RNA, 19 nt, Homo sapiens
  misc_RNA (1)...(19): siRNA sense strand
agaugaagaugauguagau

SEQ ID NO: 2188157 - RNA, 19 nt, Homo sapiens
  misc_RNA (1)...(19): siRNA sense strand
cagcugcaccuuccaauga

SEQ ID NO: 2188158 - RNA, 19 nt, Homo sapiens
  misc_RNA (1)...(19): siRNA sense strand
cagcagaaaccuauaggaa

SEQ ID NO: 2188159 - RNA, 19 nt, Homo sapiens
  misc_RNA (1)...(19): siRNA sense strand
caucaaauccaacuaucaa

SEQ ID NO: 2188160 - RNA, 19 nt, Homo sapiens
  misc_RNA (1)...(19): siRNA sense strand
ggagaacugcgacacauca

SEQ ID NO: 2188161 - RNA, 19 nt, Homo sapiens
  misc_RNA (1)...(19): siRNA sense strand
gaggagaacugcgacacau

SEQ ID NO: 2188162 - RNA, 19 nt, Homo sapiens
  misc_RNA (1)...(19): siRNA sense strand
ccgggcagcugacuuguug

SEQ ID NO: 2188163 - RNA, 19 nt, Homo sapiens
  misc_RNA (1)...(19): siRNA sense strand
ugaagaagacugcccaaau

SEQ ID NO: 2188164 - RNA, 19 nt, Homo sapiens
  misc_RNA (1)...(19): siRNA sense strand
ucaggaacuugcgaacaua

SEQ ID NO: 2188165 - RNA, 19 nt, Homo sapiens
  misc_RNA (1)...(19): siRNA sense strand
cacaguaagugcaagauca

SEQ ID NO: 2188166 - RNA, 19 nt, Homo sapiens
  misc_RNA (1)...(19): siRNA sense strand
ccagugacccaaacaaaga

SEQ ID NO: 2188167 - RNA, 19 nt, Homo sapiens
  misc_RNA (1)...(19): siRNA sense strand
gcaacuggacgaugaagau

SEQ ID NO: 2188168 - RNA, 19 nt, Homo sapiens
  misc_RNA (1)...(19): siRNA sense strand
gacccuacguggauagaau

SEQ ID NO: 2188169 - RNA, 19 nt, Homo sapiens
  misc_RNA (1)...(19): siRNA sense strand
gccggagccucaacagaaa

SEQ ID NO: 2188170 - RNA, 19 nt, Homo sapiens
  misc_RNA (1)...(19): siRNA sense strand
gaagaugcugagaaagaaa

SEQ ID NO: 2188171 - RNA, 19 nt, Homo sapiens
  misc_RNA (1)...(19): siRNA sense strand
ucaaggguuagauuacuua

SEQ ID NO: 2188172 - RNA, 19 nt, Homo sapiens
  misc_RNA (1)...(19): siRNA sense strand
cagcuccuaugaacaauuc

SEQ ID NO: 2188173 - RNA, 19 nt, Homo sapiens
  misc_RNA (1)...(19): siRNA sense strand
caaaugcagaaagugauua

SEQ ID NO: 2188174 - RNA, 19 nt, Homo sapiens
  misc_RNA (1)...(19): siRNA sense strand
aagaagaugcugagaaaga

SEQ ID NO: 2188175 - RNA, 19 nt, Homo sapiens
  misc_RNA (1)...(19): siRNA sense strand
gaugaugcauaugugagaa

SEQ ID NO: 2188176 - RNA, 19 nt, Homo sapiens
  misc_RNA (1)...(19): siRNA sense strand
gcugcacaguuuacagauu

SEQ ID NO: 2188177 - RNA, 19 nt, Homo sapiens
  misc_RNA (1)...(19): siRNA sense strand
gagccucuuugauguacuu

SEQ ID NO: 2188178 - RNA, 19 nt, Homo sapiens
  misc_RNA (1)...(19): siRNA sense strand
cauagacccuacguggaua

SEQ ID NO: 2188179 - RNA, 19 nt, Homo sapiens
  misc_RNA (1)...(19): siRNA sense strand
ccaaauggacgacauaaaa

SEQ ID NO: 2188180 - RNA, 19 nt, Homo sapiens
  misc_RNA (1)...(19): siRNA sense strand
cggcauccuugguugaauu

SEQ ID NO: 2188181 - RNA, 19 nt, Homo sapiens
  misc_RNA (1)...(19): siRNA sense strand
ugcaggagauagaagaauu

SEQ ID NO: 2188182 - RNA, 19 nt, Homo sapiens
  misc_RNA (1)...(19): siRNA sense strand
ggagauuauuuguuugaac

SEQ ID NO: 2188183 - RNA, 19 nt, Homo sapiens
  misc_RNA (1)...(19): siRNA sense strand
cggcguguauggcauuuga

SEQ ID NO: 2188184 - RNA, 19 nt, Homo sapiens
  misc_RNA (1)...(19): siRNA sense strand
uagcagcuccuaugaacaa

SEQ ID NO: 2188185 - RNA, 19 nt, Homo sapiens
  misc_RNA (1)...(19): siRNA sense strand
gcaggagauagaagaauug

SEQ ID NO: 2188186 - RNA, 19 nt, Homo sapiens
  misc_RNA (1)...(19): siRNA sense strand
agacagccuuggaugaaau

SEQ ID NO: 2188187 - RNA, 19 nt, Homo sapiens
  misc_RNA (1)...(19): siRNA sense strand
caacgggagauuauuuguu

SEQ ID NO: 2188188 - RNA, 19 nt, Homo sapiens
  misc_RNA (1)...(19): siRNA sense strand
cagcugacuuguuggugaa

SEQ ID NO: 2188189 - RNA, 19 nt, Homo sapiens
  misc_RNA (1)...(19): siRNA sense strand
ccugaggaauauaaucuug

SEQ ID NO: 2188190 - RNA, 19 nt, Homo sapiens
  misc_RNA (1)...(19): siRNA sense strand
ugaccaggauggcgaauac

SEQ ID NO: 2188191 - RNA, 19 nt, Homo sapiens
  misc_RNA (1)...(19): siRNA sense strand
aauggccgguaucauguua

SEQ ID NO: 2188192 - RNA, 19 nt, Homo sapiens
  misc_RNA (1)...(19): siRNA sense strand
agaaagaagaugcugagaa

SEQ ID NO: 2188193 - RNA, 19 nt, Homo sapiens
  misc_RNA (1)...(19): siRNA sense strand
guuuacagauuuccugauc

SEQ ID NO: 2188194 - RNA, 19 nt, Homo sapiens
  misc_RNA (1)...(19): siRNA sense strand
ucaaauguguucgagaaag

SEQ ID NO: 2188195 - RNA, 19 nt, Homo sapiens
  misc_RNA (1)...(19): siRNA sense strand
cugcaaagguggauaucau

SEQ ID NO: 2188196 - RNA, 19 nt, Homo sapiens
  misc_RNA (1)...(19): siRNA sense strand
ccaaaugcagaaagugauu

SEQ ID NO: 2188197 - RNA, 19 nt, Homo sapiens
  misc_RNA (1)...(19): siRNA sense strand
uaaaaccaauggccauauu

SEQ ID NO: 2188198 - RNA, 19 nt, Homo sapiens
  misc_RNA (1)...(19): siRNA sense strand
guggauagaaucaccuaaa

SEQ ID NO: 2188199 - RNA, 19 nt, Homo sapiens
  misc_RNA (1)...(19): siRNA sense strand
ggaaaagauuuguugcaau

SEQ ID NO: 2188200 - RNA, 19 nt, Homo sapiens
  misc_RNA (1)...(19): siRNA sense strand
guguguggaugaugcauau

SEQ ID NO: 2188201 - RNA, 19 nt, Homo sapiens
  misc_RNA (1)...(19): siRNA sense strand
gccaccaucuccucaagug

SEQ ID NO: 2188202 - RNA, 19 nt, Homo sapiens
  misc_RNA (1)...(19): siRNA sense strand
uuggagaccucuucaaugg

SEQ ID NO: 2188203 - RNA, 19 nt, Homo sapiens
  misc_RNA (1)...(19): siRNA sense strand
cgaaguacuuggccaccau

SEQ ID NO: 2188204 - RNA, 19 nt, Homo sapiens
  misc_RNA (1)...(19): siRNA sense strand
auccuugguugaauucuua

SEQ ID NO: 2188205 - RNA, 19 nt, Homo sapiens
  misc_RNA (1)...(19): siRNA sense strand
uuagaaaugguuccagaaa

SEQ ID NO: 2188206 - RNA, 19 nt, Homo sapiens
  misc_RNA (1)...(19): siRNA sense strand
gcggcucugugcuuucuga

SEQ ID NO: 2188207 - RNA, 19 nt, Homo sapiens
  misc_RNA (1)...(19): siRNA sense strand
aauggugaauugccaaaug

SEQ ID NO: 2188208 - RNA, 19 nt, Homo sapiens
  misc_RNA (1)...(19): siRNA sense strand
guacggcuccacagcagaa

SEQ ID NO: 2188209 - RNA, 19 nt, Homo sapiens
  misc_RNA (1)...(19): siRNA sense strand
ggaugaugcauaugugaga

SEQ ID NO: 2188210 - RNA, 19 nt, Homo sapiens
  misc_RNA (1)...(19): siRNA sense strand
guaagugcaagaucauuca

SEQ ID NO: 2188211 - RNA, 19 nt, Homo sapiens
  misc_RNA (1)...(19): siRNA sense strand
gggagauuauuuguuugaa

SEQ ID NO: 2188212 - RNA, 19 nt, Homo sapiens
  misc_RNA (1)...(19): siRNA sense strand
gggaaaagauuuguugcaa

SEQ ID NO: 2188213 - RNA, 19 nt, Homo sapiens
  misc_RNA (1)...(19): siRNA sense strand
uaucaaggccucccaguac

SEQ ID NO: 2188214 - RNA, 19 nt, Homo sapiens
  misc_RNA (1)...(19): siRNA sense strand
ccuggagccucuuugaugu

SEQ ID NO: 2188215 - RNA, 19 nt, Homo sapiens
  misc_RNA (1)...(19): siRNA sense strand
ggaccaggaagagaaagaa

SEQ ID NO: 2188216 - RNA, 19 nt, Homo sapiens
  misc_RNA (1)...(19): siRNA sense strand
gggcacuucucuacugucu

SEQ ID NO: 2188217 - RNA, 19 nt, Homo sapiens
  misc_RNA (1)...(19): siRNA sense strand
guacguugugugaagagua

SEQ ID NO: 2188218 - RNA, 19 nt, Homo sapiens
  misc_RNA (1)...(19): siRNA sense strand
ccaguacguugugugaaga

SEQ ID NO: 2188219 - RNA, 19 nt, Homo sapiens
  misc_RNA (1)...(19): siRNA sense strand
cugcauggucuucgaagua

SEQ ID NO: 2188220 - RNA, 19 nt, Homo sapiens
  misc_RNA (1)...(19): siRNA sense strand
uggcaacgggagauuauuu

SEQ ID NO: 2188221 - RNA, 19 nt, Homo sapiens
  misc_RNA (1)...(19): siRNA sense strand
agucacaguucccagaguu

SEQ ID NO: 2188222 - RNA, 19 nt, Homo sapiens
  misc_RNA (1)...(19): siRNA sense strand
gcagaaagugauuacacau

SEQ ID NO: 2188223 - RNA, 19 nt, Homo sapiens
  misc_RNA (1)...(19): siRNA sense strand
aagaggacccugcggacua

SEQ ID NO: 2188224 - RNA, 19 nt, Homo sapiens
  misc_RNA (1)...(19): siRNA sense strand
gcauaugugagaagaaugg

SEQ ID NO: 2188225 - RNA, 19 nt, Homo sapiens
  misc_RNA (1)...(19): siRNA sense strand
ccucuucaauggccgguau

SEQ ID NO: 2188226 - RNA, 19 nt, Homo sapiens
  misc_RNA (1)...(19): siRNA sense strand
gcaacgggagauuauuugu

SEQ ID NO: 2188227 - RNA, 19 nt, Homo sapiens
  misc_RNA (1)...(19): siRNA sense strand
gaaagaagaugcugagaaa

SEQ ID NO: 2188228 - RNA, 19 nt, Homo sapiens
  misc_RNA (1)...(19): siRNA sense strand
gaagaagacugcccaaauc

SEQ ID NO: 2188229 - RNA, 19 nt, Homo sapiens
  misc_RNA (1)...(19): siRNA sense strand
gcgagaagcugaaaggaaa

SEQ ID NO: 2188230 - RNA, 19 nt, Homo sapiens
  misc_RNA (1)...(19): siRNA sense strand
gcucaaauguguucgagaa

SEQ ID NO: 2188231 - RNA, 19 nt, Homo sapiens
  misc_RNA (1)...(19): siRNA sense strand
gcaagaucauucauacuga

SEQ ID NO: 2188232 - RNA, 19 nt, Homo sapiens
  misc_RNA (1)...(19): siRNA sense strand
ugaagaugcugcacaguuu

SEQ ID NO: 2188233 - RNA, 19 nt, Homo sapiens
  misc_RNA (1)...(19): siRNA sense strand
gaagaggcaggcugaguua

SEQ ID NO: 2188234 - RNA, 19 nt, Homo sapiens
  misc_RNA (1)...(19): siRNA sense strand
gaucauucauacugacaua

SEQ ID NO: 2188235 - RNA, 19 nt, Homo sapiens
  misc_RNA (1)...(19): siRNA sense strand
gcccagaggugaaacuaaa

SEQ ID NO: 2188236 - RNA, 19 nt, Homo sapiens
  misc_RNA (1)...(19): siRNA sense strand
gaaaagauuuguugcaaug

SEQ ID NO: 2188237 - RNA, 19 nt, Homo sapiens
  misc_RNA (1)...(19): siRNA sense strand
guuguucucuggauccuua

SEQ ID NO: 2188238 - RNA, 19 nt, Homo sapiens
  misc_RNA (1)...(19): siRNA sense strand
gcagaaaccuauaggaaaa

SEQ ID NO: 2188239 - RNA, 19 nt, Homo sapiens
  misc_RNA (1)...(19): siRNA sense strand
ucugagggaucaccacuua

SEQ ID NO: 2188240 - RNA, 19 nt, Homo sapiens
  misc_RNA (1)...(19): siRNA sense strand
ucaaguggaucaucaaauc

SEQ ID NO: 2188241 - RNA, 19 nt, Homo sapiens
  misc_RNA (1)...(19): siRNA sense strand
gaagaugcugcacaguuua

SEQ ID NO: 2188242 - RNA, 19 nt, Homo sapiens
  misc_RNA (1)...(19): siRNA sense strand
cgaugaagaugaugaugaa

SEQ ID NO: 2188243 - RNA, 19 nt, Homo sapiens
  misc_RNA (1)...(19): siRNA sense strand
ugaagaugaugaugaagaa

SEQ ID NO: 2188244 - RNA, 19 nt, Homo sapiens
  misc_RNA (1)...(19): siRNA sense strand
gacagaagcagaacgguuu

SEQ ID NO: 2188245 - RNA, 19 nt, Homo sapiens
  misc_RNA (1)...(19): siRNA sense strand
gaggcaggcugaguuauug

SEQ ID NO: 2188246 - RNA, 19 nt, Homo sapiens
  misc_RNA (1)...(19): siRNA sense strand
aacgggagauuauuuguuu

SEQ ID NO: 2188247 - RNA, 19 nt, Homo sapiens
  misc_RNA (1)...(19): siRNA sense strand
ggagacagccuuggaugaa

SEQ ID NO: 2188248 - RNA, 19 nt, Homo sapiens
  misc_RNA (1)...(19): siRNA sense strand
gagacagccuuggaugaaa

SEQ ID NO: 2188249 - RNA, 19 nt, Homo sapiens
  misc_RNA (1)...(19): siRNA sense strand
caaauguguucgagaaagu

SEQ ID NO: 2188250 - RNA, 19 nt, Homo sapiens
  misc_RNA (1)...(19): siRNA sense strand
cugcacaguuuacagauuu

SEQ ID NO: 2188251 - RNA, 19 nt, Homo sapiens
  misc_RNA (1)...(19): siRNA sense strand
gaucaucaaauccaacuau

SEQ ID NO: 2188252 - RNA, 19 nt, Homo sapiens
  misc_RNA (1)...(19): siRNA sense strand
cagaaagugauuacacaua

SEQ ID NO: 2188253 - RNA, 19 nt, Homo sapiens
  misc_RNA (1)...(19): siRNA sense strand
ggaauauaaucuugaugag

SEQ ID NO: 2188254 - RNA, 19 nt, Homo sapiens
  misc_RNA (1)...(19): siRNA sense strand
agaagaugcugagaaagaa

SEQ ID NO: 2188255 - RNA, 19 nt, Homo sapiens
  misc_RNA (1)...(19): siRNA sense strand
gagaaagugaucccaguga

SEQ ID NO: 2188256 - RNA, 19 nt, Homo sapiens
  misc_RNA (1)...(19): siRNA sense strand
agaugaagaugauguagau

SEQ ID NO: 2188257 - RNA, 19 nt, Homo sapiens
  misc_RNA (1)...(19): siRNA sense strand
cagcugcaccuuccaauga

SEQ ID NO: 2188258 - RNA, 19 nt, Homo sapiens
  misc_RNA (1)...(19): siRNA sense strand
cagcagaaaccuauaggaa

SEQ ID NO: 2188259 - RNA, 19 nt, Homo sapiens
  misc_RNA (1)...(19): siRNA sense strand
caucaaauccaacuaucaa

SEQ ID NO: 2188260 - RNA, 19 nt, Homo sapiens
  misc_RNA (1)...(19): siRNA sense strand
ggagaacugcgacacauca

SEQ ID NO: 2188261 - RNA, 19 nt, Homo sapiens
  misc_RNA (1)...(19): siRNA sense strand
gaggagaacugcgacacau

SEQ ID NO: 2188262 - RNA, 19 nt, Homo sapiens
  misc_RNA (1)...(19): siRNA sense strand
ccgggcagcugacuuguug

SEQ ID NO: 2188263 - RNA, 19 nt, Homo sapiens
  misc_RNA (1)...(19): siRNA sense strand
ugaagaagacugcccaaau

SEQ ID NO: 2188264 - RNA, 19 nt, Homo sapiens
  misc_RNA (1)...(19): siRNA sense strand
ucaggaacuugcgaacaua

SEQ ID NO: 2188265 - RNA, 19 nt, Homo sapiens
  misc_RNA (1)...(19): siRNA sense strand
cacaguaagugcaagauca

SEQ ID NO: 2188266 - RNA, 19 nt, Homo sapiens
  misc_RNA (1)...(19): siRNA sense strand
ccagugacccaaacaaaga

SEQ ID NO: 2188267 - RNA, 19 nt, Homo sapiens
  misc_RNA (1)...(19): siRNA sense strand
gcaacuggacgaugaagau

SEQ ID NO: 2188268 - RNA, 19 nt, Homo sapiens
  misc_RNA (1)...(19): siRNA sense strand
gacccuacguggauagaau

SEQ ID NO: 2188269 - RNA, 19 nt, Homo sapiens
  misc_RNA (1)...(19): siRNA sense strand
gccggagccucaacagaaa

SEQ ID NO: 2188270 - RNA, 19 nt, Homo sapiens
  misc_RNA (1)...(19): siRNA sense strand
gaagaugcugagaaagaaa

SEQ ID NO: 2188271 - RNA, 19 nt, Homo sapiens
  misc_RNA (1)...(19): siRNA sense strand
ucaaggguuagauuacuua

SEQ ID NO: 2188272 - RNA, 19 nt, Homo sapiens
  misc_RNA (1)...(19): siRNA sense strand
cagcuccuaugaacaauuc

SEQ ID NO: 2188273 - RNA, 19 nt, Homo sapiens
  misc_RNA (1)...(19): siRNA sense strand
caaaugcagaaagugauua

SEQ ID NO: 2188274 - RNA, 19 nt, Homo sapiens
  misc_RNA (1)...(19): siRNA sense strand
aagaagaugcugagaaaga

SEQ ID NO: 2188275 - RNA, 19 nt, Homo sapiens
  misc_RNA (1)...(19): siRNA sense strand
gaugaugcauaugugagaa

SEQ ID NO: 2188276 - RNA, 19 nt, Homo sapiens
  misc_RNA (1)...(19): siRNA sense strand
gcugcacaguuuacagauu

SEQ ID NO: 2188277 - RNA, 19 nt, Homo sapiens
  misc_RNA (1)...(19): siRNA sense strand
gagccucuuugauguacuu

SEQ ID NO: 2188278 - RNA, 19 nt, Homo sapiens
  misc_RNA (1)...(19): siRNA sense strand
cauagacccuacguggaua

SEQ ID NO: 2188279 - RNA, 19 nt, Homo sapiens
  misc_RNA (1)...(19): siRNA sense strand
ccaaauggacgacauaaaa

SEQ ID NO: 2188280 - RNA, 19 nt, Homo sapiens
  misc_RNA (1)...(19): siRNA sense strand
cggcauccuugguugaauu

SEQ ID NO: 2188281 - RNA, 19 nt, Homo sapiens
  misc_RNA (1)...(19): siRNA sense strand
ugcaggagauagaagaauu

SEQ ID NO: 2188282 - RNA, 19 nt, Homo sapiens
  misc_RNA (1)...(19): siRNA sense strand
ggagauuauuuguuugaac

SEQ ID NO: 2188283 - RNA, 19 nt, Homo sapiens
  misc_RNA (1)...(19): siRNA sense strand
cggcguguauggcauuuga

SEQ ID NO: 2188284 - RNA, 19 nt, Homo sapiens
  misc_RNA (1)...(19): siRNA sense strand
uagcagcuccuaugaacaa

SEQ ID NO: 2188285 - RNA, 19 nt, Homo sapiens
  misc_RNA (1)...(19): siRNA sense strand
gcaggagauagaagaauug

SEQ ID NO: 2188286 - RNA, 19 nt, Homo sapiens
  misc_RNA (1)...(19): siRNA sense strand
agacagccuuggaugaaau

SEQ ID NO: 2188287 - RNA, 19 nt, Homo sapiens
  misc_RNA (1)...(19): siRNA sense strand
caacgggagauuauuuguu

SEQ ID NO: 2188288 - RNA, 19 nt, Homo sapiens
  misc_RNA (1)...(19): siRNA sense strand
cagcugacuuguuggugaa

SEQ ID NO: 2188289 - RNA, 19 nt, Homo sapiens
  misc_RNA (1)...(19): siRNA sense strand
ccugaggaauauaaucuug

SEQ ID NO: 2188290 - RNA, 19 nt, Homo sapiens
  misc_RNA (1)...(19): siRNA sense strand
ugaccaggauggcgaauac

SEQ ID NO: 2188291 - RNA, 19 nt, Homo sapiens
  misc_RNA (1)...(19): siRNA sense strand
aauggccgguaucauguua

SEQ ID NO: 2188292 - RNA, 19 nt, Homo sapiens
  misc_RNA (1)...(19): siRNA sense strand
agaaagaagaugcugagaa

SEQ ID NO: 2188293 - RNA, 19 nt, Homo sapiens
  misc_RNA (1)...(19): siRNA sense strand
guuuacagauuuccugauc

SEQ ID NO: 2188294 - RNA, 19 nt, Homo sapiens
  misc_RNA (1)...(19): siRNA sense strand
ucaaauguguucgagaaag

SEQ ID NO: 2188295 - RNA, 19 nt, Homo sapiens
  misc_RNA (1)...(19): siRNA sense strand
cugcaaagguggauaucau

SEQ ID NO: 2188296 - RNA, 19 nt, Homo sapiens
  misc_RNA (1)...(19): siRNA sense strand
ccaaaugcagaaagugauu

SEQ ID NO: 2188297 - RNA, 19 nt, Homo sapiens
  misc_RNA (1)...(19): siRNA sense strand
uaaaaccaauggccauauu

SEQ ID NO: 2188298 - RNA, 19 nt, Homo sapiens
  misc_RNA (1)...(19): siRNA sense strand
guggauagaaucaccuaaa

SEQ ID NO: 2188299 - RNA, 19 nt, Homo sapiens
  misc_RNA (1)...(19): siRNA sense strand
ggaaaagauuuguugcaau

SEQ ID NO: 2188300 - RNA, 19 nt, Homo sapiens
  misc_RNA (1)...(19): siRNA sense strand
guguguggaugaugcauau

SEQ ID NO: 2188301 - RNA, 19 nt, Homo sapiens
  misc_RNA (1)...(19): siRNA sense strand
gccaccaucuccucaagug

SEQ ID NO: 2188302 - RNA, 19 nt, Homo sapiens
  misc_RNA (1)...(19): siRNA sense strand
uuggagaccucuucaaugg

SEQ ID NO: 2188303 - RNA, 19 nt, Homo sapiens
  misc_RNA (1)...(19): siRNA sense strand
cgaaguacuuggccaccau

SEQ ID NO: 2188304 - RNA, 19 nt, Homo sapiens
  misc_RNA (1)...(19): siRNA sense strand
auccuugguugaauucuua

SEQ ID NO: 2188305 - RNA, 19 nt, Homo sapiens
  misc_RNA (1)...(19): siRNA sense strand
uuagaaaugguuccagaaa

SEQ ID NO: 2188306 - RNA, 19 nt, Homo sapiens
  misc_RNA (1)...(19): siRNA sense strand
gcggcucugugcuuucuga

SEQ ID NO: 2188307 - RNA, 19 nt, Homo sapiens
  misc_RNA (1)...(19): siRNA sense strand
aauggugaauugccaaaug

SEQ ID NO: 2188308 - RNA, 19 nt, Homo sapiens
  misc_RNA (1)...(19): siRNA sense strand
guacggcuccacagcagaa

SEQ ID NO: 2188309 - RNA, 19 nt, Homo sapiens
  misc_RNA (1)...(19): siRNA sense strand
ggaugaugcauaugugaga

SEQ ID NO: 2188310 - RNA, 19 nt, Homo sapiens
  misc_RNA (1)...(19): siRNA sense strand
guaagugcaagaucauuca

SEQ ID NO: 2188311 - RNA, 19 nt, Homo sapiens
  misc_RNA (1)...(19): siRNA sense strand
gggagauuauuuguuugaa

SEQ ID NO: 2188312 - RNA, 19 nt, Homo sapiens
  misc_RNA (1)...(19): siRNA sense strand
gggaaaagauuuguugcaa

SEQ ID NO: 2188313 - RNA, 19 nt, Homo sapiens
  misc_RNA (1)...(19): siRNA sense strand
uaucaaggccucccaguac

SEQ ID NO: 2188314 - RNA, 19 nt, Homo sapiens
  misc_RNA (1)...(19): siRNA sense strand
ccuggagccucuuugaugu

SEQ ID NO: 2188315 - RNA, 19 nt, Homo sapiens
  misc_RNA (1)...(19): siRNA sense strand
ggaccaggaagagaaagaa

SEQ ID NO: 2188316 - RNA, 19 nt, Homo sapiens
  misc_RNA (1)...(19): siRNA sense strand
gggcacuucucuacugucu

SEQ ID NO: 2188317 - RNA, 19 nt, Homo sapiens
  misc_RNA (1)...(19): siRNA sense strand
guacguugugugaagagua

SEQ ID NO: 2188318 - RNA, 19 nt, Homo sapiens
  misc_RNA (1)...(19): siRNA sense strand
ccaguacguugugugaaga

SEQ ID NO: 2188319 - RNA, 19 nt, Homo sapiens
  misc_RNA (1)...(19): siRNA sense strand
cugcauggucuucgaagua

SEQ ID NO: 2188320 - RNA, 19 nt, Homo sapiens
  misc_RNA (1)...(19): siRNA sense strand
uggcaacgggagauuauuu

SEQ ID NO: 2188321 - RNA, 19 nt, Homo sapiens
  misc_RNA (1)...(19): siRNA sense strand
agucacaguucccagaguu

SEQ ID NO: 2188322 - RNA, 19 nt, Homo sapiens
  misc_RNA (1)...(19): siRNA sense strand
gcagaaagugauuacacau

SEQ ID NO: 2188323 - RNA, 19 nt, Homo sapiens
  misc_RNA (1)...(19): siRNA sense strand
aagaggacccugcggacua

SEQ ID NO: 2188324 - RNA, 19 nt, Homo sapiens
  misc_RNA (1)...(19): siRNA sense strand
gcauaugugagaagaaugg

SEQ ID NO: 2188325 - RNA, 19 nt, Homo sapiens
  misc_RNA (1)...(19): siRNA sense strand
ccucuucaauggccgguau

SEQ ID NO: 2188326 - RNA, 19 nt, Homo sapiens
  misc_RNA (1)...(19): siRNA sense strand
gcaacgggagauuauuugu

SEQ ID NO: 2188327 - RNA, 19 nt, Homo sapiens
  misc_RNA (1)...(19): siRNA sense strand
gaaagaagaugcugagaaa

SEQ ID NO: 2188328 - RNA, 19 nt, Homo sapiens
  misc_RNA (1)...(19): siRNA sense strand
gaagaagacugcccaaauc

SEQ ID NO: 2188329 - RNA, 19 nt, Homo sapiens
  misc_RNA (1)...(19): siRNA sense strand
gcgagaagcugaaaggaaa

SEQ ID NO: 2188330 - RNA, 19 nt, Homo sapiens
  misc_RNA (1)...(19): siRNA sense strand
gcucaaauguguucgagaa

SEQ ID NO: 2188331 - RNA, 19 nt, Homo sapiens
  misc_RNA (1)...(19): siRNA sense strand
gcaagaucauucauacuga

SEQ ID NO: 2188332 - RNA, 19 nt, Homo sapiens
  misc_RNA (1)...(19): siRNA sense strand
ugaagaugcugcacaguuu

SEQ ID NO: 2188333 - RNA, 19 nt, Homo sapiens
  misc_RNA (1)...(19): siRNA sense strand
gaagaggcaggcugaguua

SEQ ID NO: 2188334 - RNA, 19 nt, Homo sapiens
  misc_RNA (1)...(19): siRNA sense strand
gaucauucauacugacaua

SEQ ID NO: 2188335 - RNA, 19 nt, Homo sapiens
  misc_RNA (1)...(19): siRNA sense strand
gcccagaggugaaacuaaa

SEQ ID NO: 2188336 - RNA, 19 nt, Homo sapiens
  misc_RNA (1)...(19): siRNA sense strand
gaaaagauuuguugcaaug

SEQ ID NO: 2188337 - RNA, 19 nt, Homo sapiens
  misc_RNA (1)...(19): siRNA sense strand
guuguucucuggauccuua

SEQ ID NO: 2188338 - RNA, 19 nt, Homo sapiens
  misc_RNA (1)...(19): siRNA sense strand
gcagaaaccuauaggaaaa

SEQ ID NO: 2188339 - RNA, 19 nt, Homo sapiens
  misc_RNA (1)...(19): siRNA sense strand
ucugagggaucaccacuua

SEQ ID NO: 2188340 - RNA, 19 nt, Homo sapiens
  misc_RNA (1)...(19): siRNA sense strand
ucaaguggaucaucaaauc

SEQ ID NO: 2188341 - RNA, 19 nt, Homo sapiens
  misc_RNA (1)...(19): siRNA sense strand
gaagaugcugcacaguuua

SEQ ID NO: 2188342 - RNA, 19 nt, Homo sapiens
  misc_RNA (1)...(19): siRNA sense strand
cgaugaagaugaugaugaa

SEQ ID NO: 2188343 - RNA, 19 nt, Homo sapiens
  misc_RNA (1)...(19): siRNA sense strand
ugaagaugaugaugaagaa

SEQ ID NO: 2188344 - RNA, 19 nt, Homo sapiens
  misc_RNA (1)...(19): siRNA sense strand
gacagaagcagaacgguuu

SEQ ID NO: 2188345 - RNA, 19 nt, Homo sapiens
  misc_RNA (1)...(19): siRNA sense strand
gaggcaggcugaguuauug

SEQ ID NO: 2188346 - RNA, 19 nt, Homo sapiens
  misc_RNA (1)...(19): siRNA sense strand
aacgggagauuauuuguuu

SEQ ID NO: 2188347 - RNA, 19 nt, Homo sapiens
  misc_RNA (1)...(19): siRNA sense strand
ggagacagccuuggaugaa

SEQ ID NO: 2188348 - RNA, 19 nt, Homo sapiens
  misc_RNA (1)...(19): siRNA sense strand
gagacagccuuggaugaaa

SEQ ID NO: 2188349 - RNA, 19 nt, Homo sapiens
  misc_RNA (1)...(19): siRNA sense strand
caaauguguucgagaaagu

SEQ ID NO: 2188350 - RNA, 19 nt, Homo sapiens
  misc_RNA (1)...(19): siRNA sense strand
cugcacaguuuacagauuu

SEQ ID NO: 2188351 - RNA, 19 nt, Homo sapiens
  misc_RNA (1)...(19): siRNA sense strand
gaucaucaaauccaacuau

SEQ ID NO: 2188352 - RNA, 19 nt, Homo sapiens
  misc_RNA (1)...(19): siRNA sense strand
cagaaagugauuacacaua

SEQ ID NO: 2188353 - RNA, 19 nt, Homo sapiens
  misc_RNA (1)...(19): siRNA sense strand
ggaauauaaucuugaugag

SEQ ID NO: 2188354 - RNA, 19 nt, Homo sapiens
  misc_RNA (1)...(19): siRNA sense strand
agaagaugcugagaaagaa

SEQ ID NO: 2188355 - RNA, 19 nt, Homo sapiens
  misc_RNA (1)...(19): siRNA sense strand
gagaaagugaucccaguga

SEQ ID NO: 2188356 - RNA, 19 nt, Homo sapiens
  misc_RNA (1)...(19): siRNA sense strand
agaugaagaugauguagau

SEQ ID NO: 2188357 - RNA, 19 nt, Homo sapiens
  misc_RNA (1)...(19): siRNA sense strand
cagcugcaccuuccaauga

SEQ ID NO: 2188358 - RNA, 19 nt, Homo sapiens
  misc_RNA (1)...(19): siRNA sense strand
cagcagaaaccuauaggaa

SEQ ID NO: 2188359 - RNA, 19 nt, Homo sapiens
  misc_RNA (1)...(19): siRNA sense strand
caucaaauccaacuaucaa

SEQ ID NO: 2188360 - RNA, 19 nt, Homo sapiens
  misc_RNA (1)...(19): siRNA sense strand
ggagaacugcgacacauca

SEQ ID NO: 2188361 - RNA, 19 nt, Homo sapiens
  misc_RNA (1)...(19): siRNA sense strand
gaggagaacugcgacacau

SEQ ID NO: 2188362 - RNA, 19 nt, Homo sapiens
  misc_RNA (1)...(19): siRNA sense strand
ccgggcagcugacuuguug

SEQ ID NO: 2188363 - RNA, 19 nt, Homo sapiens
  misc_RNA (1)...(19): siRNA sense strand
ugaagaagacugcccaaau

SEQ ID NO: 2188364 - RNA, 19 nt, Homo sapiens
  misc_RNA (1)...(19): siRNA sense strand
ucaggaacuugcgaacaua

SEQ ID NO: 2188365 - RNA, 19 nt, Homo sapiens
  misc_RNA (1)...(19): siRNA sense strand
cacaguaagugcaagauca

SEQ ID NO: 2188366 - RNA, 19 nt, Homo sapiens
  misc_RNA (1)...(19): siRNA sense strand
ccagugacccaaacaaaga

SEQ ID NO: 2188367 - RNA, 19 nt, Homo sapiens
  misc_RNA (1)...(19): siRNA sense strand
gcaacuggacgaugaagau

SEQ ID NO: 2188368 - RNA, 19 nt, Homo sapiens
  misc_RNA (1)...(19): siRNA sense strand
gacccuacguggauagaau

SEQ ID NO: 2188369 - RNA, 19 nt, Homo sapiens
  misc_RNA (1)...(19): siRNA sense strand
gccggagccucaacagaaa

SEQ ID NO: 2188370 - RNA, 19 nt, Homo sapiens
  misc_RNA (1)...(19): siRNA sense strand
gaagaugcugagaaagaaa

SEQ ID NO: 2188371 - RNA, 19 nt, Homo sapiens
  misc_RNA (1)...(19): siRNA sense strand
ucaaggguuagauuacuua

SEQ ID NO: 2188372 - RNA, 19 nt, Homo sapiens
  misc_RNA (1)...(19): siRNA sense strand
cagcuccuaugaacaauuc

SEQ ID NO: 2188373 - RNA, 19 nt, Homo sapiens
  misc_RNA (1)...(19): siRNA sense strand
caaaugcagaaagugauua

SEQ ID NO: 2188374 - RNA, 19 nt, Homo sapiens
  misc_RNA (1)...(19): siRNA sense strand
aagaagaugcugagaaaga

SEQ ID NO: 2188375 - RNA, 19 nt, Homo sapiens
  misc_RNA (1)...(19): siRNA sense strand
gaugaugcauaugugagaa

SEQ ID NO: 2188376 - RNA, 19 nt, Homo sapiens
  misc_RNA (1)...(19): siRNA sense strand
gcugcacaguuuacagauu

SEQ ID NO: 2188377 - RNA, 19 nt, Homo sapiens
  misc_RNA (1)...(19): siRNA sense strand
gagccucuuugauguacuu

SEQ ID NO: 2188378 - RNA, 19 nt, Homo sapiens
  misc_RNA (1)...(19): siRNA sense strand
cauagacccuacguggaua

SEQ ID NO: 2188379 - RNA, 19 nt, Homo sapiens
  misc_RNA (1)...(19): siRNA sense strand
ccaaauggacgacauaaaa

SEQ ID NO: 2188380 - RNA, 19 nt, Homo sapiens
  misc_RNA (1)...(19): siRNA sense strand
cggcauccuugguugaauu

SEQ ID NO: 2188381 - RNA, 19 nt, Homo sapiens
  misc_RNA (1)...(19): siRNA sense strand
ugcaggagauagaagaauu

SEQ ID NO: 2188382 - RNA, 19 nt, Homo sapiens
  misc_RNA (1)...(19): siRNA sense strand
ggagauuauuuguuugaac

SEQ ID NO: 2188383 - RNA, 19 nt, Homo sapiens
  misc_RNA (1)...(19): siRNA sense strand
cggcguguauggcauuuga

SEQ ID NO: 2188384 - RNA, 19 nt, Homo sapiens
  misc_RNA (1)...(19): siRNA sense strand
uagcagcuccuaugaacaa

SEQ ID NO: 2188385 - RNA, 19 nt, Homo sapiens
  misc_RNA (1)...(19): siRNA sense strand
gcaggagauagaagaauug

SEQ ID NO: 2188386 - RNA, 19 nt, Homo sapiens
  misc_RNA (1)...(19): siRNA sense strand
agacagccuuggaugaaau

SEQ ID NO: 2188387 - RNA, 19 nt, Homo sapiens
  misc_RNA (1)...(19): siRNA sense strand
caacgggagauuauuuguu

SEQ ID NO: 2188388 - RNA, 19 nt, Homo sapiens
  misc_RNA (1)...(19): siRNA sense strand
cagcugacuuguuggugaa

SEQ ID NO: 2188389 - RNA, 19 nt, Homo sapiens
  misc_RNA (1)...(19): siRNA sense strand
ccugaggaauauaaucuug

SEQ ID NO: 2188390 - RNA, 19 nt, Homo sapiens
  misc_RNA (1)...(19): siRNA sense strand
ugaccaggauggcgaauac

SEQ ID NO: 2188391 - RNA, 19 nt, Homo sapiens
  misc_RNA (1)...(19): siRNA sense strand
aauggccgguaucauguua

SEQ ID NO: 2188392 - RNA, 19 nt, Homo sapiens
  misc_RNA (1)...(19): siRNA sense strand
agaaagaagaugcugagaa

SEQ ID NO: 2188393 - RNA, 19 nt, Homo sapiens
  misc_RNA (1)...(19): siRNA sense strand
guuuacagauuuccugauc

SEQ ID NO: 2188394 - RNA, 19 nt, Homo sapiens
  misc_RNA (1)...(19): siRNA sense strand
ucaaauguguucgagaaag

SEQ ID NO: 2188395 - RNA, 19 nt, Homo sapiens
  misc_RNA (1)...(19): siRNA sense strand
cugcaaagguggauaucau

SEQ ID NO: 2188396 - RNA, 19 nt, Homo sapiens
  misc_RNA (1)...(19): siRNA sense strand
ccaaaugcagaaagugauu

SEQ ID NO: 2188397 - RNA, 19 nt, Homo sapiens
  misc_RNA (1)...(19): siRNA sense strand
uaaaaccaauggccauauu

SEQ ID NO: 2188398 - RNA, 19 nt, Homo sapiens
  misc_RNA (1)...(19): siRNA sense strand
guggauagaaucaccuaaa

SEQ ID NO: 2188399 - RNA, 19 nt, Homo sapiens
  misc_RNA (1)...(19): siRNA sense strand
ggaaaagauuuguugcaau

SEQ ID NO: 2188400 - RNA, 19 nt, Homo sapiens
  misc_RNA (1)...(19): siRNA sense strand
guguguggaugaugcauau

SEQ ID NO: 2188401 - RNA, 19 nt, Homo sapiens
  misc_RNA (1)...(19): siRNA sense strand
gccaccaucuccucaagug

SEQ ID NO: 2188402 - RNA, 19 nt, Homo sapiens
  misc_RNA (1)...(19): siRNA sense strand
uuggagaccucuucaaugg

SEQ ID NO: 2188403 - RNA, 19 nt, Homo sapiens
  misc_RNA (1)...(19): siRNA sense strand
cgaaguacuuggccaccau

SEQ ID NO: 2188404 - RNA, 19 nt, Homo sapiens
  misc_RNA (1)...(19): siRNA sense strand
auccuugguugaauucuua

SEQ ID NO: 2188405 - RNA, 19 nt, Homo sapiens
  misc_RNA (1)...(19): siRNA sense strand
uuagaaaugguuccagaaa

SEQ ID NO: 2188406 - RNA, 19 nt, Homo sapiens
  misc_RNA (1)...(19): siRNA sense strand
gcggcucugugcuuucuga

SEQ ID NO: 2188407 - RNA, 19 nt, Homo sapiens
  misc_RNA (1)...(19): siRNA sense strand
aauggugaauugccaaaug

SEQ ID NO: 2188408 - RNA, 19 nt, Homo sapiens
  misc_RNA (1)...(19): siRNA sense strand
guacggcuccacagcagaa

SEQ ID NO: 2188409 - RNA, 19 nt, Homo sapiens
  misc_RNA (1)...(19): siRNA sense strand
ggaugaugcauaugugaga

SEQ ID NO: 2188410 - RNA, 19 nt, Homo sapiens
  misc_RNA (1)...(19): siRNA sense strand
guaagugcaagaucauuca

SEQ ID NO: 2188411 - RNA, 19 nt, Homo sapiens
  misc_RNA (1)...(19): siRNA sense strand
gggagauuauuuguuugaa

SEQ ID NO: 2188412 - RNA, 19 nt, Homo sapiens
  misc_RNA (1)...(19): siRNA sense strand
gggaaaagauuuguugcaa

SEQ ID NO: 2188413 - RNA, 19 nt, Homo sapiens
  misc_RNA (1)...(19): siRNA sense strand
uaucaaggccucccaguac

SEQ ID NO: 2188414 - RNA, 19 nt, Homo sapiens
  misc_RNA (1)...(19): siRNA sense strand
ccuggagccucuuugaugu

SEQ ID NO: 2188415 - RNA, 19 nt, Homo sapiens
  misc_RNA (1)...(19): siRNA sense strand
ggaccaggaagagaaagaa

SEQ ID NO: 2188416 - RNA, 19 nt, Homo sapiens
  misc_RNA (1)...(19): siRNA sense strand
gggcacuucucuacugucu

SEQ ID NO: 2188417 - RNA, 19 nt, Homo sapiens
  misc_RNA (1)...(19): siRNA sense strand
guacguugugugaagagua

SEQ ID NO: 2188418 - RNA, 19 nt, Homo sapiens
  misc_RNA (1)...(19): siRNA sense strand
ccaguacguugugugaaga

SEQ ID NO: 2188419 - RNA, 19 nt, Homo sapiens
  misc_RNA (1)...(19): siRNA sense strand
cugcauggucuucgaagua

SEQ ID NO: 2188420 - RNA, 19 nt, Homo sapiens
  misc_RNA (1)...(19): siRNA sense strand
uggcaacgggagauuauuu

SEQ ID NO: 2188421 - RNA, 19 nt, Homo sapiens
  misc_RNA (1)...(19): siRNA sense strand
agucacaguucccagaguu

SEQ ID NO: 2188422 - RNA, 19 nt, Homo sapiens
  misc_RNA (1)...(19): siRNA sense strand
gcagaaagugauuacacau

SEQ ID NO: 2188423 - RNA, 19 nt, Homo sapiens
  misc_RNA (1)...(19): siRNA sense strand
aagaggacccugcggacua

SEQ ID NO: 2188424 - RNA, 19 nt, Homo sapiens
  misc_RNA (1)...(19): siRNA sense strand
gcauaugugagaagaaugg

SEQ ID NO: 2188425 - RNA, 19 nt, Homo sapiens
  misc_RNA (1)...(19): siRNA sense strand
ccucuucaauggccgguau

SEQ ID NO: 2188426 - RNA, 19 nt, Homo sapiens
  misc_RNA (1)...(19): siRNA sense strand
gcaacgggagauuauuugu

SEQ ID NO: 2188427 - RNA, 19 nt, Homo sapiens
  misc_RNA (1)...(19): siRNA sense strand
gaaagaagaugcugagaaa

SEQ ID NO: 2188428 - RNA, 19 nt, Homo sapiens
  misc_RNA (1)...(19): siRNA sense strand
gaagaagacugcccaaauc

SEQ ID NO: 2188429 - RNA, 19 nt, Homo sapiens
  misc_RNA (1)...(19): siRNA sense strand
gcgagaagcugaaaggaaa

SEQ ID NO: 2188430 - RNA, 19 nt, Homo sapiens
  misc_RNA (1)...(19): siRNA sense strand
gcucaaauguguucgagaa

SEQ ID NO: 2188431 - RNA, 19 nt, Homo sapiens
  misc_RNA (1)...(19): siRNA sense strand
gcaagaucauucauacuga

SEQ ID NO: 2188432 - RNA, 19 nt, Homo sapiens
  misc_RNA (1)...(19): siRNA sense strand
ugaagaugcugcacaguuu

SEQ ID NO: 2188433 - RNA, 19 nt, Homo sapiens
  misc_RNA (1)...(19): siRNA sense strand
gaagaggcaggcugaguua

SEQ ID NO: 2188434 - RNA, 19 nt, Homo sapiens
  misc_RNA (1)...(19): siRNA sense strand
gaucauucauacugacaua

SEQ ID NO: 2188435 - RNA, 19 nt, Homo sapiens
  misc_RNA (1)...(19): siRNA sense strand
gcccagaggugaaacuaaa

SEQ ID NO: 2188436 - RNA, 19 nt, Homo sapiens
  misc_RNA (1)...(19): siRNA sense strand
gaaaagauuuguugcaaug

SEQ ID NO: 2188437 - RNA, 19 nt, Homo sapiens
  misc_RNA (1)...(19): siRNA sense strand
guuguucucuggauccuua

SEQ ID NO: 2188438 - RNA, 19 nt, Homo sapiens
  misc_RNA (1)...(19): siRNA sense strand
gcagaaaccuauaggaaaa

SEQ ID NO: 2188439 - RNA, 19 nt, Homo sapiens
  misc_RNA (1)...(19): siRNA sense strand
ucugagggaucaccacuua

SEQ ID NO: 2188440 - RNA, 19 nt, Homo sapiens
  misc_RNA (1)...(19): siRNA sense strand
ucaaguggaucaucaaauc

SEQ ID NO: 2188441 - RNA, 19 nt, Homo sapiens
  misc_RNA (1)...(19): siRNA sense strand
gaagaugcugcacaguuua

SEQ ID NO: 2188442 - RNA, 19 nt, Homo sapiens
  misc_RNA (1)...(19): siRNA sense strand
cgaugaagaugaugaugaa

SEQ ID NO: 2188443 - RNA, 19 nt, Homo sapiens
  misc_RNA (1)...(19): siRNA sense strand
ugaagaugaugaugaagaa

SEQ ID NO: 2188444 - RNA, 19 nt, Homo sapiens
  misc_RNA (1)...(19): siRNA sense strand
gacagaagcagaacgguuu

SEQ ID NO: 2188445 - RNA, 19 nt, Homo sapiens
  misc_RNA (1)...(19): siRNA sense strand
gaggcaggcugaguuauug

SEQ ID NO: 2188446 - RNA, 19 nt, Homo sapiens
  misc_RNA (1)...(19): siRNA sense strand
aacgggagauuauuuguuu

SEQ ID NO: 2188447 - RNA, 19 nt, Homo sapiens
  misc_RNA (1)...(19): siRNA sense strand
gagacagccuuggaugaaa

SEQ ID NO: 2188448 - RNA, 19 nt, Homo sapiens
  misc_RNA (1)...(19): siRNA sense strand
ggagacagccuuggaugaa

SEQ ID NO: 2188449 - RNA, 19 nt, Homo sapiens
  misc_RNA (1)...(19): siRNA sense strand
caaauguguucgagaaagu

SEQ ID NO: 2188450 - RNA, 19 nt, Homo sapiens
  misc_RNA (1)...(19): siRNA sense strand
cugcacaguuuacagauuu

SEQ ID NO: 2188451 - RNA, 19 nt, Homo sapiens
  misc_RNA (1)...(19): siRNA sense strand
gaucaucaaauccaacuau

SEQ ID NO: 2188452 - RNA, 19 nt, Homo sapiens
  misc_RNA (1)...(19): siRNA sense strand
cagaaagugauuacacaua

SEQ ID NO: 2188453 - RNA, 19 nt, Homo sapiens
  misc_RNA (1)...(19): siRNA sense strand
ggaauauaaucuugaugag

SEQ ID NO: 2188454 - RNA, 19 nt, Homo sapiens
  misc_RNA (1)...(19): siRNA sense strand
agaagaugcugagaaagaa

SEQ ID NO: 2188455 - RNA, 19 nt, Homo sapiens
  misc_RNA (1)...(19): siRNA sense strand
gagaaagugaucccaguga

SEQ ID NO: 2188456 - RNA, 19 nt, Homo sapiens
  misc_RNA (1)...(19): siRNA sense strand
agaugaagaugauguagau

SEQ ID NO: 2188457 - RNA, 19 nt, Homo sapiens
  misc_RNA (1)...(19): siRNA sense strand
cagcugcaccuuccaauga

SEQ ID NO: 2188458 - RNA, 19 nt, Homo sapiens
  misc_RNA (1)...(19): siRNA sense strand
cagcagaaaccuauaggaa

SEQ ID NO: 2188459 - RNA, 19 nt, Homo sapiens
  misc_RNA (1)...(19): siRNA sense strand
caucaaauccaacuaucaa

SEQ ID NO: 2188460 - RNA, 19 nt, Homo sapiens
  misc_RNA (1)...(19): siRNA sense strand
ggagaacugcgacacauca

SEQ ID NO: 2188461 - RNA, 19 nt, Homo sapiens
  misc_RNA (1)...(19): siRNA sense strand
gaggagaacugcgacacau

SEQ ID NO: 2188462 - RNA, 19 nt, Homo sapiens
  misc_RNA (1)...(19): siRNA sense strand
ccgggcagcugacuuguug

SEQ ID NO: 2188463 - RNA, 19 nt, Homo sapiens
  misc_RNA (1)...(19): siRNA sense strand
ugaagaagacugcccaaau

SEQ ID NO: 2188464 - RNA, 19 nt, Homo sapiens
  misc_RNA (1)...(19): siRNA sense strand
ucaggaacuugcgaacaua

SEQ ID NO: 2188465 - RNA, 19 nt, Homo sapiens
  misc_RNA (1)...(19): siRNA sense strand
cacaguaagugcaagauca

SEQ ID NO: 2188466 - RNA, 19 nt, Homo sapiens
  misc_RNA (1)...(19): siRNA sense strand
ccagugacccaaacaaaga

SEQ ID NO: 2188467 - RNA, 19 nt, Homo sapiens
  misc_RNA (1)...(19): siRNA sense strand
gcaacuggacgaugaagau

SEQ ID NO: 2188468 - RNA, 19 nt, Homo sapiens
  misc_RNA (1)...(19): siRNA sense strand
gacccuacguggauagaau

SEQ ID NO: 2188469 - RNA, 19 nt, Homo sapiens
  misc_RNA (1)...(19): siRNA sense strand
gaagaugcugagaaagaaa

SEQ ID NO: 2188470 - RNA, 19 nt, Homo sapiens
  misc_RNA (1)...(19): siRNA sense strand
ucaaggguuagauuacuua

SEQ ID NO: 2188471 - RNA, 19 nt, Homo sapiens
  misc_RNA (1)...(19): siRNA sense strand
cagcuccuaugaacaauuc

SEQ ID NO: 2188472 - RNA, 19 nt, Homo sapiens
  misc_RNA (1)...(19): siRNA sense strand
caaaugcagaaagugauua

SEQ ID NO: 2188473 - RNA, 19 nt, Homo sapiens
  misc_RNA (1)...(19): siRNA sense strand
aagaagaugcugagaaaga

SEQ ID NO: 2188474 - RNA, 19 nt, Homo sapiens
  misc_RNA (1)...(19): siRNA sense strand
gaugaugcauaugugagaa

SEQ ID NO: 2188475 - RNA, 19 nt, Homo sapiens
  misc_RNA (1)...(19): siRNA sense strand
gcugcacaguuuacagauu

SEQ ID NO: 2188476 - RNA, 19 nt, Homo sapiens
  misc_RNA (1)...(19): siRNA sense strand
gagccucuuugauguacuu

SEQ ID NO: 2188477 - RNA, 19 nt, Homo sapiens
  misc_RNA (1)...(19): siRNA sense strand
cauagacccuacguggaua

SEQ ID NO: 2188478 - RNA, 19 nt, Homo sapiens
  misc_RNA (1)...(19): siRNA sense strand
ccaaauggacgacauaaaa

SEQ ID NO: 2188479 - RNA, 19 nt, Homo sapiens
  misc_RNA (1)...(19): siRNA sense strand
cggcauccuugguugaauu

SEQ ID NO: 2188480 - RNA, 19 nt, Homo sapiens
  misc_RNA (1)...(19): siRNA sense strand
ugcaggagauagaagaauu

SEQ ID NO: 2188481 - RNA, 19 nt, Homo sapiens
  misc_RNA (1)...(19): siRNA sense strand
ggagauuauuuguuugaac

SEQ ID NO: 2188482 - RNA, 19 nt, Homo sapiens
  misc_RNA (1)...(19): siRNA sense strand
cggcguguauggcauuuga

SEQ ID NO: 2188483 - RNA, 19 nt, Homo sapiens
  misc_RNA (1)...(19): siRNA sense strand
uagcagcuccuaugaacaa

SEQ ID NO: 2188484 - RNA, 19 nt, Homo sapiens
  misc_RNA (1)...(19): siRNA sense strand
gcaggagauagaagaauug

SEQ ID NO: 2188485 - RNA, 19 nt, Homo sapiens
  misc_RNA (1)...(19): siRNA sense strand
ugaccaggauggcgaauac

SEQ ID NO: 2188486 - RNA, 19 nt, Homo sapiens
  misc_RNA (1)...(19): siRNA sense strand
agacagccuuggaugaaau

SEQ ID NO: 2188487 - RNA, 19 nt, Homo sapiens
  misc_RNA (1)...(19): siRNA sense strand
caacgggagauuauuuguu

SEQ ID NO: 2188488 - RNA, 19 nt, Homo sapiens
  misc_RNA (1)...(19): siRNA sense strand
cagcugacuuguuggugaa

SEQ ID NO: 2188489 - RNA, 19 nt, Homo sapiens
  misc_RNA (1)...(19): siRNA sense strand
ccugaggaauauaaucuug

SEQ ID NO: 2188490 - RNA, 19 nt, Homo sapiens
  misc_RNA (1)...(19): siRNA sense strand
agaaagaagaugcugagaa

SEQ ID NO: 2188491 - RNA, 19 nt, Homo sapiens
  misc_RNA (1)...(19): siRNA sense strand
guuuacagauuuccugauc

SEQ ID NO: 2188492 - RNA, 19 nt, Homo sapiens
  misc_RNA (1)...(19): siRNA sense strand
ucaaauguguucgagaaag

SEQ ID NO: 2188493 - RNA, 19 nt, Homo sapiens
  misc_RNA (1)...(19): siRNA sense strand
ggaaaagauuuguugcaau

SEQ ID NO: 2188494 - RNA, 19 nt, Homo sapiens
  misc_RNA (1)...(19): siRNA sense strand
ccaaaugcagaaagugauu

SEQ ID NO: 2188495 - RNA, 19 nt, Homo sapiens
  misc_RNA (1)...(19): siRNA sense strand
uaaaaccaauggccauauu

SEQ ID NO: 2188496 - RNA, 19 nt, Homo sapiens
  misc_RNA (1)...(19): siRNA sense strand
guggauagaaucaccuaaa

SEQ ID NO: 2188497 - RNA, 19 nt, Homo sapiens
  misc_RNA (1)...(19): siRNA sense strand
guguguggaugaugcauau

SEQ ID NO: 2188498 - RNA, 19 nt, Homo sapiens
  misc_RNA (1)...(19): siRNA sense strand
gccaccaucuccucaagug

SEQ ID NO: 2188499 - RNA, 19 nt, Homo sapiens
  misc_RNA (1)...(19): siRNA sense strand
ggaugaugcauaugugaga

SEQ ID NO: 2188500 - RNA, 19 nt, Homo sapiens
  misc_RNA (1)...(19): siRNA sense strand
auccuugguugaauucuua

SEQ ID NO: 2188501 - RNA, 19 nt, Homo sapiens
  misc_RNA (1)...(19): siRNA sense strand
uuagaaaugguuccagaaa

SEQ ID NO: 2188502 - RNA, 19 nt, Homo sapiens
  misc_RNA (1)...(19): siRNA sense strand
gcggcucugugcuuucuga

SEQ ID NO: 2188503 - RNA, 19 nt, Homo sapiens
  misc_RNA (1)...(19): siRNA sense strand
cgaaguacuuggccaccau

SEQ ID NO: 2188504 - RNA, 19 nt, Homo sapiens
  misc_RNA (1)...(19): siRNA sense strand
aauggugaauugccaaaug

SEQ ID NO: 2188505 - RNA, 19 nt, Homo sapiens
  misc_RNA (1)...(19): siRNA sense strand
guacggcuccacagcagaa

SEQ ID NO: 2188506 - RNA, 19 nt, Homo sapiens
  misc_RNA (1)...(19): siRNA sense strand
guaagugcaagaucauuca

SEQ ID NO: 2188507 - RNA, 19 nt, Homo sapiens
  misc_RNA (1)...(19): siRNA sense strand
gggagauuauuuguuugaa

SEQ ID NO: 2188508 - RNA, 19 nt, Homo sapiens
  misc_RNA (1)...(19): siRNA sense strand
gggaaaagauuuguugcaa

SEQ ID NO: 2188509 - RNA, 19 nt, Homo sapiens
  misc_RNA (1)...(19): siRNA sense strand
uaucaaggccucccaguac

SEQ ID NO: 2188510 - RNA, 19 nt, Homo sapiens
  misc_RNA (1)...(19): siRNA sense strand
ccuggagccucuuugaugu

SEQ ID NO: 2188511 - RNA, 19 nt, Homo sapiens
  misc_RNA (1)...(19): siRNA sense strand
ggaccaggaagagaaagaa

SEQ ID NO: 2188512 - RNA, 19 nt, Homo sapiens
  misc_RNA (1)...(19): siRNA sense strand
guacguugugugaagagua

SEQ ID NO: 2188513 - RNA, 19 nt, Homo sapiens
  misc_RNA (1)...(19): siRNA sense strand
ccaguacguugugugaaga

SEQ ID NO: 2188514 - RNA, 19 nt, Homo sapiens
  misc_RNA (1)...(19): siRNA sense strand
cugcauggucuucgaagua

SEQ ID NO: 2188515 - RNA, 19 nt, Homo sapiens
  misc_RNA (1)...(19): siRNA sense strand
uggcaacgggagauuauuu

SEQ ID NO: 2188516 - RNA, 19 nt, Homo sapiens
  misc_RNA (1)...(19): siRNA sense strand
agucacaguucccagaguu

SEQ ID NO: 2188517 - RNA, 19 nt, Homo sapiens
  misc_RNA (1)...(19): siRNA sense strand
gcagaaagugauuacacau

SEQ ID NO: 2188518 - RNA, 19 nt, Homo sapiens
  misc_RNA (1)...(19): siRNA sense strand
gcauaugugagaagaaugg

SEQ ID NO: 2188519 - RNA, 19 nt, Homo sapiens
  misc_RNA (1)...(19): siRNA sense strand
acauaaagccggaaaauau

SEQ ID NO: 2188520 - RNA, 19 nt, Homo sapiens
  misc_RNA (1)...(19): siRNA sense strand
gcaacgggagauuauuugu

SEQ ID NO: 2188521 - RNA, 19 nt, Homo sapiens
  misc_RNA (1)...(19): siRNA sense strand
ggacgaugaagaugaugau

SEQ ID NO: 2188522 - RNA, 19 nt, Homo sapiens
  misc_RNA (1)...(19): siRNA sense strand
gaagcugaaaggaaaauaa

SEQ ID NO: 2188523 - RNA, 19 nt, Homo sapiens
  misc_RNA (1)...(19): siRNA sense strand
agaagaggcaggcugaguu

SEQ ID NO: 2188524 - RNA, 19 nt, Homo sapiens
  misc_RNA (1)...(19): siRNA sense strand
ccucuuugauguacuugug

SEQ ID NO: 2188525 - RNA, 19 nt, Homo sapiens
  misc_RNA (1)...(19): siRNA sense strand
cauccuugguugaauucuu

SEQ ID NO: 2188526 - RNA, 19 nt, Homo sapiens
  misc_RNA (1)...(19): siRNA sense strand
gacagccuuggaugaaaua

SEQ ID NO: 2188527 - RNA, 19 nt, Homo sapiens
  misc_RNA (1)...(19): siRNA sense strand
gaaauaggcaagauaaaga

SEQ ID NO: 2188528 - RNA, 19 nt, Homo sapiens
  misc_RNA (1)...(19): siRNA sense strand
gcagauaaucgcaaacuuu

SEQ ID NO: 2188529 - RNA, 19 nt, Homo sapiens
  misc_RNA (1)...(19): siRNA sense strand
guaaacagcgauaucagua

SEQ ID NO: 2188530 - RNA, 19 nt, Homo sapiens
  misc_RNA (1)...(19): siRNA sense strand
gaggaaauaggcaagauaa

SEQ ID NO: 2188531 - RNA, 19 nt, Homo sapiens
  misc_RNA (1)...(19): siRNA sense strand
aaacacggauccgcagaua

SEQ ID NO: 2188532 - RNA, 19 nt, Homo sapiens
  misc_RNA (1)...(19): siRNA sense strand
guaagaagagcaaaguaaa

SEQ ID NO: 2188533 - RNA, 19 nt, Homo sapiens
  misc_RNA (1)...(19): siRNA sense strand
gccaaguggugaggaaaua

SEQ ID NO: 2188534 - RNA, 19 nt, Homo sapiens
  misc_RNA (1)...(19): siRNA sense strand
ggaaauaggcaagauaaag

SEQ ID NO: 2188535 - RNA, 19 nt, Homo sapiens
  misc_RNA (1)...(19): siRNA sense strand
gauaaagacaauacugaga

SEQ ID NO: 2188536 - RNA, 19 nt, Homo sapiens
  misc_RNA (1)...(19): siRNA sense strand
caguccagcuugucuguaa

SEQ ID NO: 2188537 - RNA, 19 nt, Homo sapiens
  misc_RNA (1)...(19): siRNA sense strand
gacaauacugagaaagaua

SEQ ID NO: 2188538 - RNA, 19 nt, Homo sapiens
  misc_RNA (1)...(19): siRNA sense strand
uaacucaagcuaccaauag

SEQ ID NO: 2188539 - RNA, 19 nt, Homo sapiens
  misc_RNA (1)...(19): siRNA sense strand
aaacagcgauaucaguaag

SEQ ID NO: 2188540 - RNA, 19 nt, Homo sapiens
  misc_RNA (1)...(19): siRNA sense strand
gauggugaacucauuagaa

SEQ ID NO: 2188541 - RNA, 19 nt, Homo sapiens
  misc_RNA (1)...(19): siRNA sense strand
ccacacaggucugagcaau

SEQ ID NO: 2188542 - RNA, 19 nt, Homo sapiens
  misc_RNA (1)...(19): siRNA sense strand
gauaaagaacggccacaca

SEQ ID NO: 2188543 - RNA, 19 nt, Homo sapiens
  misc_RNA (1)...(19): siRNA sense strand
uaaacagcgauaucaguaa

SEQ ID NO: 2188544 - RNA, 19 nt, Homo sapiens
  misc_RNA (1)...(19): siRNA sense strand
acacaggucugagcaaugg

SEQ ID NO: 2188545 - RNA, 19 nt, Homo sapiens
  misc_RNA (1)...(19): siRNA sense strand
agacaauacugagaaagau

SEQ ID NO: 2188546 - RNA, 19 nt, Homo sapiens
  misc_RNA (1)...(19): siRNA sense strand
gugauaaagacaauacuga

SEQ ID NO: 2188547 - RNA, 19 nt, Homo sapiens
  misc_RNA (1)...(19): siRNA sense strand
gagcaauggaaauggaauu

SEQ ID NO: 2188548 - RNA, 19 nt, Homo sapiens
  misc_RNA (1)...(19): siRNA sense strand
acacggauccgcagauaau

SEQ ID NO: 2188549 - RNA, 19 nt, Homo sapiens
  misc_RNA (1)...(19): siRNA sense strand
cagauaaucgcaaacuuuc

SEQ ID NO: 2188550 - RNA, 19 nt, Homo sapiens
  misc_RNA (1)...(19): siRNA sense strand
ugccucagcuucagacuuc

SEQ ID NO: 2188551 - RNA, 19 nt, Homo sapiens
  misc_RNA (1)...(19): siRNA sense strand
aguaagaagagcaaaguaa

SEQ ID NO: 2188552 - RNA, 19 nt, Homo sapiens
  misc_RNA (1)...(19): siRNA sense strand
aauagccacuucacacaug

SEQ ID NO: 2188553 - RNA, 19 nt, Homo sapiens
  misc_RNA (1)...(19): siRNA sense strand
ggucugagcaauggaaaug

SEQ ID NO: 2188554 - RNA, 19 nt, Homo sapiens
  misc_RNA (1)...(19): siRNA sense strand
ugaggaaauaggcaagaua

SEQ ID NO: 2188555 - RNA, 19 nt, Homo sapiens
  misc_RNA (1)...(19): siRNA sense strand
cuucacacauggagagaug

SEQ ID NO: 2188556 - RNA, 19 nt, Homo sapiens
  misc_RNA (1)...(19): siRNA sense strand
ugaagacaaacaggaauuu

SEQ ID NO: 2188557 - RNA, 19 nt, Homo sapiens
  misc_RNA (1)...(19): siRNA sense strand
acagcgauaucaguaagaa

SEQ ID NO: 2188558 - RNA, 19 nt, Homo sapiens
  misc_RNA (1)...(19): siRNA sense strand
aagaagagcaaaguaaaug

SEQ ID NO: 2188559 - RNA, 19 nt, Homo sapiens
  misc_RNA (1)...(19): siRNA sense strand
gcaauggaaauggaauuca

SEQ ID NO: 2188560 - RNA, 19 nt, Homo sapiens
  misc_RNA (1)...(19): siRNA sense strand
gauaaucgcaaacuuucag

SEQ ID NO: 2188561 - RNA, 19 nt, Homo sapiens
  misc_RNA (1)...(19): siRNA sense strand
gcaagaccaguccauuugg

SEQ ID NO: 2188562 - RNA, 19 nt, Homo sapiens
  misc_RNA (1)...(19): siRNA sense strand
gcaaaguaaaugcugucuu

SEQ ID NO: 2188563 - RNA, 19 nt, Homo sapiens
  misc_RNA (1)...(19): siRNA sense strand
gagaaagauauaacucaag

SEQ ID NO: 2188564 - RNA, 19 nt, Homo sapiens
  misc_RNA (1)...(19): siRNA sense strand
ccaauagccacuucacaca

SEQ ID NO: 2188565 - RNA, 19 nt, Homo sapiens
  misc_RNA (1)...(19): siRNA sense strand
caauggaaauggaauucac

SEQ ID NO: 2188566 - RNA, 19 nt, Homo sapiens
  misc_RNA (1)...(19): siRNA sense strand
gggaaaaugugauaaagac

SEQ ID NO: 2188567 - RNA, 19 nt, Homo sapiens
  misc_RNA (1)...(19): siRNA sense strand
aagacaauacugagaaaga

SEQ ID NO: 2188568 - RNA, 19 nt, Homo sapiens
  misc_RNA (1)...(19): siRNA sense strand
ggugccaaguggugaggaa

SEQ ID NO: 2188569 - RNA, 19 nt, Homo sapiens
  misc_RNA (1)...(19): siRNA sense strand
gaugcaagaccaguccauu

SEQ ID NO: 2188570 - RNA, 19 nt, Homo sapiens
  misc_RNA (1)...(19): siRNA sense strand
ugcaagaccaguccauuug

SEQ ID NO: 2188571 - RNA, 19 nt, Homo sapiens
  misc_RNA (1)...(19): siRNA sense strand
ucugagcaauggaaaugga

SEQ ID NO: 2188572 - RNA, 19 nt, Homo sapiens
  misc_RNA (1)...(19): siRNA sense strand
gugaggaaauaggcaagau

SEQ ID NO: 2188573 - RNA, 19 nt, Homo sapiens
  misc_RNA (1)...(19): siRNA sense strand
gaagacaaacaggaauuuu

SEQ ID NO: 2188574 - RNA, 19 nt, Homo sapiens
  misc_RNA (1)...(19): siRNA sense strand
ggauggugaacucauuaga

SEQ ID NO: 2188575 - RNA, 19 nt, Homo sapiens
  misc_RNA (1)...(19): siRNA sense strand
cagcaccuguuucucaaaa

SEQ ID NO: 2188576 - RNA, 19 nt, Homo sapiens
  misc_RNA (1)...(19): siRNA sense strand
caaacacggauccgcagau

SEQ ID NO: 2188577 - RNA, 19 nt, Homo sapiens
  misc_RNA (1)...(19): siRNA sense strand
caguaagaagagcaaagua

SEQ ID NO: 2188578 - RNA, 19 nt, Homo sapiens
  misc_RNA (1)...(19): siRNA sense strand
uuucagcaccuguuucuca

SEQ ID NO: 2188579 - RNA, 19 nt, Homo sapiens
  misc_RNA (1)...(19): siRNA sense strand
caauagccacuucacacau

SEQ ID NO: 2188580 - RNA, 19 nt, Homo sapiens
  misc_RNA (1)...(19): siRNA sense strand
auaacucaagcuaccaaua

SEQ ID NO: 2188581 - RNA, 19 nt, Homo sapiens
  misc_RNA (1)...(19): siRNA sense strand
caaacuuucagcaccuguu

SEQ ID NO: 2188582 - RNA, 19 nt, Homo sapiens
  misc_RNA (1)...(19): siRNA sense strand
ucggauggugaacucauua

SEQ ID NO: 2188583 - RNA, 19 nt, Homo sapiens
  misc_RNA (1)...(19): siRNA sense strand
ucaguaagaagagcaaagu

SEQ ID NO: 2188584 - RNA, 19 nt, Homo sapiens
  misc_RNA (1)...(19): siRNA sense strand
augcaagaccaguccauuu

SEQ ID NO: 2188585 - RNA, 19 nt, Homo sapiens
  misc_RNA (1)...(19): siRNA sense strand
gaaauaggcaagauaaaga

SEQ ID NO: 2188586 - RNA, 19 nt, Homo sapiens
  misc_RNA (1)...(19): siRNA sense strand
gcagauaaucgcaaacuuu

SEQ ID NO: 2188587 - RNA, 19 nt, Homo sapiens
  misc_RNA (1)...(19): siRNA sense strand
guaaacagcgauaucagua

SEQ ID NO: 2188588 - RNA, 19 nt, Homo sapiens
  misc_RNA (1)...(19): siRNA sense strand
gaggaaauaggcaagauaa

SEQ ID NO: 2188589 - RNA, 19 nt, Homo sapiens
  misc_RNA (1)...(19): siRNA sense strand
aaacacggauccgcagaua

SEQ ID NO: 2188590 - RNA, 19 nt, Homo sapiens
  misc_RNA (1)...(19): siRNA sense strand
guaagaagagcaaaguaaa

SEQ ID NO: 2188591 - RNA, 19 nt, Homo sapiens
  misc_RNA (1)...(19): siRNA sense strand
gccaaguggugaggaaaua

SEQ ID NO: 2188592 - RNA, 19 nt, Homo sapiens
  misc_RNA (1)...(19): siRNA sense strand
ggaaauaggcaagauaaag

SEQ ID NO: 2188593 - RNA, 19 nt, Homo sapiens
  misc_RNA (1)...(19): siRNA sense strand
gauaaagacaauacugaga

SEQ ID NO: 2188594 - RNA, 19 nt, Homo sapiens
  misc_RNA (1)...(19): siRNA sense strand
caguccagcuugucuguaa

SEQ ID NO: 2188595 - RNA, 19 nt, Homo sapiens
  misc_RNA (1)...(19): siRNA sense strand
gacaauacugagaaagaua

SEQ ID NO: 2188596 - RNA, 19 nt, Homo sapiens
  misc_RNA (1)...(19): siRNA sense strand
uaacucaagcuaccaauag

SEQ ID NO: 2188597 - RNA, 19 nt, Homo sapiens
  misc_RNA (1)...(19): siRNA sense strand
aaacagcgauaucaguaag

SEQ ID NO: 2188598 - RNA, 19 nt, Homo sapiens
  misc_RNA (1)...(19): siRNA sense strand
gauggugaacucauuagaa

SEQ ID NO: 2188599 - RNA, 19 nt, Homo sapiens
  misc_RNA (1)...(19): siRNA sense strand
ccacacaggucugagcaau

SEQ ID NO: 2188600 - RNA, 19 nt, Homo sapiens
  misc_RNA (1)...(19): siRNA sense strand
gauaaagaacggccacaca

SEQ ID NO: 2188601 - RNA, 19 nt, Homo sapiens
  misc_RNA (1)...(19): siRNA sense strand
uaaacagcgauaucaguaa

SEQ ID NO: 2188602 - RNA, 19 nt, Homo sapiens
  misc_RNA (1)...(19): siRNA sense strand
acacaggucugagcaaugg

SEQ ID NO: 2188603 - RNA, 19 nt, Homo sapiens
  misc_RNA (1)...(19): siRNA sense strand
agacaauacugagaaagau

SEQ ID NO: 2188604 - RNA, 19 nt, Homo sapiens
  misc_RNA (1)...(19): siRNA sense strand
gugauaaagacaauacuga

SEQ ID NO: 2188605 - RNA, 19 nt, Homo sapiens
  misc_RNA (1)...(19): siRNA sense strand
gagcaauggaaauggaauu

SEQ ID NO: 2188606 - RNA, 19 nt, Homo sapiens
  misc_RNA (1)...(19): siRNA sense strand
acacggauccgcagauaau

SEQ ID NO: 2188607 - RNA, 19 nt, Homo sapiens
  misc_RNA (1)...(19): siRNA sense strand
cagauaaucgcaaacuuuc

SEQ ID NO: 2188608 - RNA, 19 nt, Homo sapiens
  misc_RNA (1)...(19): siRNA sense strand
ugccucagcuucagacuuc

SEQ ID NO: 2188609 - RNA, 19 nt, Homo sapiens
  misc_RNA (1)...(19): siRNA sense strand
aguaagaagagcaaaguaa

SEQ ID NO: 2188610 - RNA, 19 nt, Homo sapiens
  misc_RNA (1)...(19): siRNA sense strand
aauagccacuucacacaug

SEQ ID NO: 2188611 - RNA, 19 nt, Homo sapiens
  misc_RNA (1)...(19): siRNA sense strand
ggucugagcaauggaaaug

SEQ ID NO: 2188612 - RNA, 19 nt, Homo sapiens
  misc_RNA (1)...(19): siRNA sense strand
ugaggaaauaggcaagaua

SEQ ID NO: 2188613 - RNA, 19 nt, Homo sapiens
  misc_RNA (1)...(19): siRNA sense strand
cuucacacauggagagaug

SEQ ID NO: 2188614 - RNA, 19 nt, Homo sapiens
  misc_RNA (1)...(19): siRNA sense strand
ugaagacaaacaggaauuu

SEQ ID NO: 2188615 - RNA, 19 nt, Homo sapiens
  misc_RNA (1)...(19): siRNA sense strand
acagcgauaucaguaagaa

SEQ ID NO: 2188616 - RNA, 19 nt, Homo sapiens
  misc_RNA (1)...(19): siRNA sense strand
aagaagagcaaaguaaaug

SEQ ID NO: 2188617 - RNA, 19 nt, Homo sapiens
  misc_RNA (1)...(19): siRNA sense strand
gcaauggaaauggaauuca

SEQ ID NO: 2188618 - RNA, 19 nt, Homo sapiens
  misc_RNA (1)...(19): siRNA sense strand
gauaaucgcaaacuuucag

SEQ ID NO: 2188619 - RNA, 19 nt, Homo sapiens
  misc_RNA (1)...(19): siRNA sense strand
gcaagaccaguccauuugg

SEQ ID NO: 2188620 - RNA, 19 nt, Homo sapiens
  misc_RNA (1)...(19): siRNA sense strand
gcaaaguaaaugcugucuu

SEQ ID NO: 2188621 - RNA, 19 nt, Homo sapiens
  misc_RNA (1)...(19): siRNA sense strand
gagaaagauauaacucaag

SEQ ID NO: 2188622 - RNA, 19 nt, Homo sapiens
  misc_RNA (1)...(19): siRNA sense strand
ccaauagccacuucacaca

SEQ ID NO: 2188623 - RNA, 19 nt, Homo sapiens
  misc_RNA (1)...(19): siRNA sense strand
caauggaaauggaauucac

SEQ ID NO: 2188624 - RNA, 19 nt, Homo sapiens
  misc_RNA (1)...(19): siRNA sense strand
gggaaaaugugauaaagac

SEQ ID NO: 2188625 - RNA, 19 nt, Homo sapiens
  misc_RNA (1)...(19): siRNA sense strand
aagacaauacugagaaaga

SEQ ID NO: 2188626 - RNA, 19 nt, Homo sapiens
  misc_RNA (1)...(19): siRNA sense strand
ggugccaaguggugaggaa

SEQ ID NO: 2188627 - RNA, 19 nt, Homo sapiens
  misc_RNA (1)...(19): siRNA sense strand
gaugcaagaccaguccauu

SEQ ID NO: 2188628 - RNA, 19 nt, Homo sapiens
  misc_RNA (1)...(19): siRNA sense strand
ugcaagaccaguccauuug

SEQ ID NO: 2188629 - RNA, 19 nt, Homo sapiens
  misc_RNA (1)...(19): siRNA sense strand
ucugagcaauggaaaugga

SEQ ID NO: 2188630 - RNA, 19 nt, Homo sapiens
  misc_RNA (1)...(19): siRNA sense strand
gugaggaaauaggcaagau

SEQ ID NO: 2188631 - RNA, 19 nt, Homo sapiens
  misc_RNA (1)...(19): siRNA sense strand
gaagacaaacaggaauuuu

SEQ ID NO: 2188632 - RNA, 19 nt, Homo sapiens
  misc_RNA (1)...(19): siRNA sense strand
ggauggugaacucauuaga

SEQ ID NO: 2188633 - RNA, 19 nt, Homo sapiens
  misc_RNA (1)...(19): siRNA sense strand
cagcaccuguuucucaaaa

SEQ ID NO: 2188634 - RNA, 19 nt, Homo sapiens
  misc_RNA (1)...(19): siRNA sense strand
caaacacggauccgcagau

SEQ ID NO: 2188635 - RNA, 19 nt, Homo sapiens
  misc_RNA (1)...(19): siRNA sense strand
caguaagaagagcaaagua

SEQ ID NO: 2188636 - RNA, 19 nt, Homo sapiens
  misc_RNA (1)...(19): siRNA sense strand
uuucagcaccuguuucuca

SEQ ID NO: 2188637 - RNA, 19 nt, Homo sapiens
  misc_RNA (1)...(19): siRNA sense strand
caauagccacuucacacau

SEQ ID NO: 2188638 - RNA, 19 nt, Homo sapiens
  misc_RNA (1)...(19): siRNA sense strand
auaacucaagcuaccaaua

SEQ ID NO: 2188639 - RNA, 19 nt, Homo sapiens
  misc_RNA (1)...(19): siRNA sense strand
caaacuuucagcaccuguu

SEQ ID NO: 2188640 - RNA, 19 nt, Homo sapiens
  misc_RNA (1)...(19): siRNA sense strand
ucggauggugaacucauua

SEQ ID NO: 2188641 - RNA, 19 nt, Homo sapiens
  misc_RNA (1)...(19): siRNA sense strand
ucaguaagaagagcaaagu

SEQ ID NO: 2188642 - RNA, 19 nt, Homo sapiens
  misc_RNA (1)...(19): siRNA sense strand
augcaagaccaguccauuu

SEQ ID NO: 2188643 - RNA, 19 nt, Homo sapiens
  misc_RNA (1)...(19): siRNA sense strand
aggcacagcuccaucguua

SEQ ID NO: 2188644 - RNA, 19 nt, Homo sapiens
  misc_RNA (1)...(19): siRNA sense strand
agaccaagcucaugacuca

SEQ ID NO: 2188645 - RNA, 19 nt, Homo sapiens
  misc_RNA (1)...(19): siRNA sense strand
gcacagcuccaucguuaca

SEQ ID NO: 2188646 - RNA, 19 nt, Homo sapiens
  misc_RNA (1)...(19): siRNA sense strand
gacucacaauggccuauuu

SEQ ID NO: 2188647 - RNA, 19 nt, Homo sapiens
  misc_RNA (1)...(19): siRNA sense strand
cuacagaccaagcucauga

SEQ ID NO: 2188648 - RNA, 19 nt, Homo sapiens
  misc_RNA (1)...(19): siRNA sense strand
gcccagcucaugcuucuuu

SEQ ID NO: 2188649 - RNA, 19 nt, Homo sapiens
  misc_RNA (1)...(19): siRNA sense strand
aagccaagcucccaaccuu

SEQ ID NO: 2188650 - RNA, 19 nt, Homo sapiens
  misc_RNA (1)...(19): siRNA sense strand
gcccagcuccugcaucuug

SEQ ID NO: 2188651 - RNA, 19 nt, Homo sapiens
  misc_RNA (1)...(19): siRNA sense strand
uuacaauggccucuuuaga

SEQ ID NO: 2188652 - RNA, 19 nt, Homo sapiens
  misc_RNA (1)...(19): siRNA sense strand
gccaagcucccaaccuuuc

SEQ ID NO: 2188653 - RNA, 19 nt, Homo sapiens
  misc_RNA (1)...(19): siRNA sense strand
ccucacagcagauucuuca

SEQ ID NO: 2188654 - RNA, 19 nt, Homo sapiens
  misc_RNA (1)...(19): siRNA sense strand
ucguuacaauggccucuuu

SEQ ID NO: 2188655 - RNA, 19 nt, Homo sapiens
  misc_RNA (1)...(19): siRNA sense strand
ccaagcucaugacucacaa

SEQ ID NO: 2188656 - RNA, 19 nt, Homo sapiens
  misc_RNA (1)...(19): siRNA sense strand
acucacaauggccuauuua

SEQ ID NO: 2188657 - RNA, 19 nt, Homo sapiens
  misc_RNA (1)...(19): siRNA sense strand
acagcuccaucguuacaau

SEQ ID NO: 2188658 - RNA, 19 nt, Homo sapiens
  misc_RNA (1)...(19): siRNA sense strand
uacaauggccucuuuagac

SEQ ID NO: 2188659 - RNA, 19 nt, Homo sapiens
  misc_RNA (1)...(19): siRNA sense strand
aggcacagcuccaucguua

SEQ ID NO: 2188660 - RNA, 19 nt, Homo sapiens
  misc_RNA (1)...(19): siRNA sense strand
agaccaagcucaugacuca

SEQ ID NO: 2188661 - RNA, 19 nt, Homo sapiens
  misc_RNA (1)...(19): siRNA sense strand
gcacagcuccaucguuaca

SEQ ID NO: 2188662 - RNA, 19 nt, Homo sapiens
  misc_RNA (1)...(19): siRNA sense strand
gacucacaauggccuauuu

SEQ ID NO: 2188663 - RNA, 19 nt, Homo sapiens
  misc_RNA (1)...(19): siRNA sense strand
cuacagaccaagcucauga

SEQ ID NO: 2188664 - RNA, 19 nt, Homo sapiens
  misc_RNA (1)...(19): siRNA sense strand
gcccagcucaugcuucuuu

SEQ ID NO: 2188665 - RNA, 19 nt, Homo sapiens
  misc_RNA (1)...(19): siRNA sense strand
aagccaagcucccaaccuu

SEQ ID NO: 2188666 - RNA, 19 nt, Homo sapiens
  misc_RNA (1)...(19): siRNA sense strand
gcccagcuccugcaucuug

SEQ ID NO: 2188667 - RNA, 19 nt, Homo sapiens
  misc_RNA (1)...(19): siRNA sense strand
uuacaauggccucuuuaga

SEQ ID NO: 2188668 - RNA, 19 nt, Homo sapiens
  misc_RNA (1)...(19): siRNA sense strand
gccaagcucccaaccuuuc

SEQ ID NO: 2188669 - RNA, 19 nt, Homo sapiens
  misc_RNA (1)...(19): siRNA sense strand
ccucacagcagauucuuca

SEQ ID NO: 2188670 - RNA, 19 nt, Homo sapiens
  misc_RNA (1)...(19): siRNA sense strand
ucguuacaauggccucuuu

SEQ ID NO: 2188671 - RNA, 19 nt, Homo sapiens
  misc_RNA (1)...(19): siRNA sense strand
ccaagcucaugacucacaa

SEQ ID NO: 2188672 - RNA, 19 nt, Homo sapiens
  misc_RNA (1)...(19): siRNA sense strand
acucacaauggccuauuua

SEQ ID NO: 2188673 - RNA, 19 nt, Homo sapiens
  misc_RNA (1)...(19): siRNA sense strand
acagcuccaucguuacaau

SEQ ID NO: 2188674 - RNA, 19 nt, Homo sapiens
  misc_RNA (1)...(19): siRNA sense strand
uacaauggccucuuuagac

SEQ ID NO: 2188675 - RNA, 19 nt, Homo sapiens
  misc_RNA (1)...(19): siRNA sense strand
ucucacagcucucaggaaa

SEQ ID NO: 2188676 - RNA, 19 nt, Homo sapiens
  misc_RNA (1)...(19): siRNA sense strand
ccaacucggugguguuuga

SEQ ID NO: 2188677 - RNA, 19 nt, Homo sapiens
  misc_RNA (1)...(19): siRNA sense strand
ggaaugagcaccuucuaca

SEQ ID NO: 2188678 - RNA, 19 nt, Homo sapiens
  misc_RNA (1)...(19): siRNA sense strand
cagaaaggccuguccauca

SEQ ID NO: 2188679 - RNA, 19 nt, Homo sapiens
  misc_RNA (1)...(19): siRNA sense strand
cagcagacaggaacaauga

SEQ ID NO: 2188680 - RNA, 19 nt, Homo sapiens
  misc_RNA (1)...(19): siRNA sense strand
cagcgcauccugaggguua

SEQ ID NO: 2188681 - RNA, 19 nt, Homo sapiens
  misc_RNA (1)...(19): siRNA sense strand
ucauauagccaguuaccua

SEQ ID NO: 2188682 - RNA, 19 nt, Homo sapiens
  misc_RNA (1)...(19): siRNA sense strand
gaacaagaggacuggaaug

SEQ ID NO: 2188683 - RNA, 19 nt, Homo sapiens
  misc_RNA (1)...(19): siRNA sense strand
ccaguggcaucuccaauca

SEQ ID NO: 2188684 - RNA, 19 nt, Homo sapiens
  misc_RNA (1)...(19): siRNA sense strand
gaacuggagagaugucugu

SEQ ID NO: 2188685 - RNA, 19 nt, Homo sapiens
  misc_RNA (1)...(19): siRNA sense strand
gcagaccaguggcaguuuc

SEQ ID NO: 2188686 - RNA, 19 nt, Homo sapiens
  misc_RNA (1)...(19): siRNA sense strand
caaagacccgagaaucaaa

SEQ ID NO: 2188687 - RNA, 19 nt, Homo sapiens
  misc_RNA (1)...(19): siRNA sense strand
gaaaauggccuucuuuguc

SEQ ID NO: 2188688 - RNA, 19 nt, Homo sapiens
  misc_RNA (1)...(19): siRNA sense strand
ggacuggaaugagcaccuu

SEQ ID NO: 2188689 - RNA, 19 nt, Homo sapiens
  misc_RNA (1)...(19): siRNA sense strand
uggcaucuccaaucaauuu

SEQ ID NO: 2188690 - RNA, 19 nt, Homo sapiens
  misc_RNA (1)...(19): siRNA sense strand
ccaaagacccgagaaucaa

SEQ ID NO: 2188691 - RNA, 19 nt, Homo sapiens
  misc_RNA (1)...(19): siRNA sense strand
gaaugagcaccuucuacaa

SEQ ID NO: 2188692 - RNA, 19 nt, Homo sapiens
  misc_RNA (1)...(19): siRNA sense strand
acccagagauuguguuuca

SEQ ID NO: 2188693 - RNA, 19 nt, Homo sapiens
  misc_RNA (1)...(19): siRNA sense strand
ggaacaagaggacuggaau

SEQ ID NO: 2188694 - RNA, 19 nt, Homo sapiens
  misc_RNA (1)...(19): siRNA sense strand
ggccuucuuugucaacuga

SEQ ID NO: 2188695 - RNA, 19 nt, Homo sapiens
  misc_RNA (1)...(19): siRNA sense strand
gagcagaccaguggcaguu

SEQ ID NO: 2188696 - RNA, 19 nt, Homo sapiens
  misc_RNA (1)...(19): siRNA sense strand
cuggagagaugucugugaa

SEQ ID NO: 2188697 - RNA, 19 nt, Homo sapiens
  misc_RNA (1)...(19): siRNA sense strand
acagaaacaacaccugaaa

SEQ ID NO: 2188698 - RNA, 19 nt, Homo sapiens
  misc_RNA (1)...(19): siRNA sense strand
aaguucauauagccaguua

SEQ ID NO: 2188699 - RNA, 19 nt, Homo sapiens
  misc_RNA (1)...(19): siRNA sense strand
aaaauggccuucuuuguca

SEQ ID NO: 2188700 - RNA, 19 nt, Homo sapiens
  misc_RNA (1)...(19): siRNA sense strand
uaucugaagcuccacgaaa

SEQ ID NO: 2188701 - RNA, 19 nt, Homo sapiens
  misc_RNA (1)...(19): siRNA sense strand
ccuaggagagcacuucuug

SEQ ID NO: 2188702 - RNA, 19 nt, Homo sapiens
  misc_RNA (1)...(19): siRNA sense strand
gcagacaggaacaaugaca

SEQ ID NO: 2188703 - RNA, 19 nt, Homo sapiens
  misc_RNA (1)...(19): siRNA sense strand
ucacagcucucaggaaagc

SEQ ID NO: 2188704 - RNA, 19 nt, Homo sapiens
  misc_RNA (1)...(19): siRNA sense strand
cccaccaacuccacagaaa

SEQ ID NO: 2188705 - RNA, 19 nt, Homo sapiens
  misc_RNA (1)...(19): siRNA sense strand
uauagccaguuaccuagga

SEQ ID NO: 2188706 - RNA, 19 nt, Homo sapiens
  misc_RNA (1)...(19): siRNA sense strand
cccgggaacuggagagaug

SEQ ID NO: 2188707 - RNA, 19 nt, Homo sapiens
  misc_RNA (1)...(19): siRNA sense strand
uuugucaacugauucauuc

SEQ ID NO: 2188708 - RNA, 19 nt, Homo sapiens
  misc_RNA (1)...(19): siRNA sense strand
caacuccacagaaacaaca

SEQ ID NO: 2188709 - RNA, 19 nt, Homo sapiens
  misc_RNA (1)...(19): siRNA sense strand
guacguggagcuacgaauc

SEQ ID NO: 2188710 - RNA, 19 nt, Homo sapiens
  misc_RNA (1)...(19): siRNA sense strand
gggaacaagaggacuggaa

SEQ ID NO: 2188711 - RNA, 19 nt, Homo sapiens
  misc_RNA (1)...(19): siRNA sense strand
gagcaccuucuacaaguuc

SEQ ID NO: 2188712 - RNA, 19 nt, Homo sapiens
  misc_RNA (1)...(19): siRNA sense strand
ugagcaccuucuacaaguu

SEQ ID NO: 2188713 - RNA, 19 nt, Homo sapiens
  misc_RNA (1)...(19): siRNA sense strand
ucaauuuguucuccaacuc

SEQ ID NO: 2188714 - RNA, 19 nt, Homo sapiens
  misc_RNA (1)...(19): siRNA sense strand
agaaaggccuguccaucac

SEQ ID NO: 2188715 - RNA, 19 nt, Homo sapiens
  misc_RNA (1)...(19): siRNA sense strand
aguggcaucuccaaucaau

SEQ ID NO: 2188716 - RNA, 19 nt, Homo sapiens
  misc_RNA (1)...(19): siRNA sense strand
guuaggacagugaccgaaa

SEQ ID NO: 2188717 - RNA, 19 nt, Homo sapiens
  misc_RNA (1)...(19): siRNA sense strand
ggaaaauggccuucuuugu

SEQ ID NO: 2188718 - RNA, 19 nt, Homo sapiens
  misc_RNA (1)...(19): siRNA sense strand
ccaagaugcccaccaacuc

SEQ ID NO: 2188719 - RNA, 19 nt, Homo sapiens
  misc_RNA (1)...(19): siRNA sense strand
aacaagaggacuggaauga

SEQ ID NO: 2188720 - RNA, 19 nt, Homo sapiens
  misc_RNA (1)...(19): siRNA sense strand
cuccugauggccaauguua

SEQ ID NO: 2188721 - RNA, 19 nt, Homo sapiens
  misc_RNA (1)...(19): siRNA sense strand
caccaacuccacagaaaca

SEQ ID NO: 2188722 - RNA, 19 nt, Homo sapiens
  misc_RNA (1)...(19): siRNA sense strand
ggacagugaccgaaaagau

SEQ ID NO: 2188723 - RNA, 19 nt, Homo sapiens
  misc_RNA (1)...(19): siRNA sense strand
gaacuugggguggaaaaug

SEQ ID NO: 2188724 - RNA, 19 nt, Homo sapiens
  misc_RNA (1)...(19): siRNA sense strand
gaccaguggcaguuucuca

SEQ ID NO: 2188725 - RNA, 19 nt, Homo sapiens
  misc_RNA (1)...(19): siRNA sense strand
gaaguacguggagcuacga

SEQ ID NO: 2188726 - RNA, 19 nt, Homo sapiens
  misc_RNA (1)...(19): siRNA sense strand
ugcagcagcuacaagauac

SEQ ID NO: 2188727 - RNA, 19 nt, Homo sapiens
  misc_RNA (1)...(19): siRNA sense strand
ccaccaaagacccgagaau

SEQ ID NO: 2188728 - RNA, 19 nt, Homo sapiens
  misc_RNA (1)...(19): siRNA sense strand
caccaaagacccgagaauc

SEQ ID NO: 2188729 - RNA, 19 nt, Homo sapiens
  misc_RNA (1)...(19): siRNA sense strand
gaaacaacaccugaaaaca

SEQ ID NO: 2188730 - RNA, 19 nt, Homo sapiens
  misc_RNA (1)...(19): siRNA sense strand
accaaagacccgagaauca

SEQ ID NO: 2188731 - RNA, 19 nt, Homo sapiens
  misc_RNA (1)...(19): siRNA sense strand
ucucacagcucucaggaaa

SEQ ID NO: 2188732 - RNA, 19 nt, Homo sapiens
  misc_RNA (1)...(19): siRNA sense strand
ccaacucggugguguuuga

SEQ ID NO: 2188733 - RNA, 19 nt, Homo sapiens
  misc_RNA (1)...(19): siRNA sense strand
ggaaugagcaccuucuaca

SEQ ID NO: 2188734 - RNA, 19 nt, Homo sapiens
  misc_RNA (1)...(19): siRNA sense strand
cagaaaggccuguccauca

SEQ ID NO: 2188735 - RNA, 19 nt, Homo sapiens
  misc_RNA (1)...(19): siRNA sense strand
cagcagacaggaacaauga

SEQ ID NO: 2188736 - RNA, 19 nt, Homo sapiens
  misc_RNA (1)...(19): siRNA sense strand
cagcgcauccugaggguua

SEQ ID NO: 2188737 - RNA, 19 nt, Homo sapiens
  misc_RNA (1)...(19): siRNA sense strand
ucauauagccaguuaccua

SEQ ID NO: 2188738 - RNA, 19 nt, Homo sapiens
  misc_RNA (1)...(19): siRNA sense strand
gaacaagaggacuggaaug

SEQ ID NO: 2188739 - RNA, 19 nt, Homo sapiens
  misc_RNA (1)...(19): siRNA sense strand
ccaguggcaucuccaauca

SEQ ID NO: 2188740 - RNA, 19 nt, Homo sapiens
  misc_RNA (1)...(19): siRNA sense strand
gaacuggagagaugucugu

SEQ ID NO: 2188741 - RNA, 19 nt, Homo sapiens
  misc_RNA (1)...(19): siRNA sense strand
gcagaccaguggcaguuuc

SEQ ID NO: 2188742 - RNA, 19 nt, Homo sapiens
  misc_RNA (1)...(19): siRNA sense strand
caaagacccgagaaucaaa

SEQ ID NO: 2188743 - RNA, 19 nt, Homo sapiens
  misc_RNA (1)...(19): siRNA sense strand
gaaaauggccuucuuuguc

SEQ ID NO: 2188744 - RNA, 19 nt, Homo sapiens
  misc_RNA (1)...(19): siRNA sense strand
ggacuggaaugagcaccuu

SEQ ID NO: 2188745 - RNA, 19 nt, Homo sapiens
  misc_RNA (1)...(19): siRNA sense strand
uggcaucuccaaucaauuu

SEQ ID NO: 2188746 - RNA, 19 nt, Homo sapiens
  misc_RNA (1)...(19): siRNA sense strand
ccaaagacccgagaaucaa

SEQ ID NO: 2188747 - RNA, 19 nt, Homo sapiens
  misc_RNA (1)...(19): siRNA sense strand
gaaugagcaccuucuacaa

SEQ ID NO: 2188748 - RNA, 19 nt, Homo sapiens
  misc_RNA (1)...(19): siRNA sense strand
acccagagauuguguuuca

SEQ ID NO: 2188749 - RNA, 19 nt, Homo sapiens
  misc_RNA (1)...(19): siRNA sense strand
ggaacaagaggacuggaau

SEQ ID NO: 2188750 - RNA, 19 nt, Homo sapiens
  misc_RNA (1)...(19): siRNA sense strand
ggccuucuuugucaacuga

SEQ ID NO: 2188751 - RNA, 19 nt, Homo sapiens
  misc_RNA (1)...(19): siRNA sense strand
gagcagaccaguggcaguu

SEQ ID NO: 2188752 - RNA, 19 nt, Homo sapiens
  misc_RNA (1)...(19): siRNA sense strand
cuggagagaugucugugaa

SEQ ID NO: 2188753 - RNA, 19 nt, Homo sapiens
  misc_RNA (1)...(19): siRNA sense strand
acagaaacaacaccugaaa

SEQ ID NO: 2188754 - RNA, 19 nt, Homo sapiens
  misc_RNA (1)...(19): siRNA sense strand
aaguucauauagccaguua

SEQ ID NO: 2188755 - RNA, 19 nt, Homo sapiens
  misc_RNA (1)...(19): siRNA sense strand
aaaauggccuucuuuguca

SEQ ID NO: 2188756 - RNA, 19 nt, Homo sapiens
  misc_RNA (1)...(19): siRNA sense strand
uaucugaagcuccacgaaa

SEQ ID NO: 2188757 - RNA, 19 nt, Homo sapiens
  misc_RNA (1)...(19): siRNA sense strand
ccuaggagagcacuucuug

SEQ ID NO: 2188758 - RNA, 19 nt, Homo sapiens
  misc_RNA (1)...(19): siRNA sense strand
gcagacaggaacaaugaca

SEQ ID NO: 2188759 - RNA, 19 nt, Homo sapiens
  misc_RNA (1)...(19): siRNA sense strand
ucacagcucucaggaaagc

SEQ ID NO: 2188760 - RNA, 19 nt, Homo sapiens
  misc_RNA (1)...(19): siRNA sense strand
cccaccaacuccacagaaa

SEQ ID NO: 2188761 - RNA, 19 nt, Homo sapiens
  misc_RNA (1)...(19): siRNA sense strand
uauagccaguuaccuagga

SEQ ID NO: 2188762 - RNA, 19 nt, Homo sapiens
  misc_RNA (1)...(19): siRNA sense strand
cccgggaacuggagagaug

SEQ ID NO: 2188763 - RNA, 19 nt, Homo sapiens
  misc_RNA (1)...(19): siRNA sense strand
uuugucaacugauucauuc

SEQ ID NO: 2188764 - RNA, 19 nt, Homo sapiens
  misc_RNA (1)...(19): siRNA sense strand
caacuccacagaaacaaca

SEQ ID NO: 2188765 - RNA, 19 nt, Homo sapiens
  misc_RNA (1)...(19): siRNA sense strand
guacguggagcuacgaauc

SEQ ID NO: 2188766 - RNA, 19 nt, Homo sapiens
  misc_RNA (1)...(19): siRNA sense strand
gggaacaagaggacuggaa

SEQ ID NO: 2188767 - RNA, 19 nt, Homo sapiens
  misc_RNA (1)...(19): siRNA sense strand
gagcaccuucuacaaguuc

SEQ ID NO: 2188768 - RNA, 19 nt, Homo sapiens
  misc_RNA (1)...(19): siRNA sense strand
ugagcaccuucuacaaguu

SEQ ID NO: 2188769 - RNA, 19 nt, Homo sapiens
  misc_RNA (1)...(19): siRNA sense strand
ucaauuuguucuccaacuc

SEQ ID NO: 2188770 - RNA, 19 nt, Homo sapiens
  misc_RNA (1)...(19): siRNA sense strand
agaaaggccuguccaucac

SEQ ID NO: 2188771 - RNA, 19 nt, Homo sapiens
  misc_RNA (1)...(19): siRNA sense strand
aguggcaucuccaaucaau

SEQ ID NO: 2188772 - RNA, 19 nt, Homo sapiens
  misc_RNA (1)...(19): siRNA sense strand
guuaggacagugaccgaaa

SEQ ID NO: 2188773 - RNA, 19 nt, Homo sapiens
  misc_RNA (1)...(19): siRNA sense strand
ggaaaauggccuucuuugu

SEQ ID NO: 2188774 - RNA, 19 nt, Homo sapiens
  misc_RNA (1)...(19): siRNA sense strand
ccaagaugcccaccaacuc

SEQ ID NO: 2188775 - RNA, 19 nt, Homo sapiens
  misc_RNA (1)...(19): siRNA sense strand
aacaagaggacuggaauga

SEQ ID NO: 2188776 - RNA, 19 nt, Homo sapiens
  misc_RNA (1)...(19): siRNA sense strand
cuccugauggccaauguua

SEQ ID NO: 2188777 - RNA, 19 nt, Homo sapiens
  misc_RNA (1)...(19): siRNA sense strand
caccaacuccacagaaaca

SEQ ID NO: 2188778 - RNA, 19 nt, Homo sapiens
  misc_RNA (1)...(19): siRNA sense strand
ggacagugaccgaaaagau

SEQ ID NO: 2188779 - RNA, 19 nt, Homo sapiens
  misc_RNA (1)...(19): siRNA sense strand
gaacuugggguggaaaaug

SEQ ID NO: 2188780 - RNA, 19 nt, Homo sapiens
  misc_RNA (1)...(19): siRNA sense strand
gaccaguggcaguuucuca

SEQ ID NO: 2188781 - RNA, 19 nt, Homo sapiens
  misc_RNA (1)...(19): siRNA sense strand
gaaguacguggagcuacga

SEQ ID NO: 2188782 - RNA, 19 nt, Homo sapiens
  misc_RNA (1)...(19): siRNA sense strand
ugcagcagcuacaagauac

SEQ ID NO: 2188783 - RNA, 19 nt, Homo sapiens
  misc_RNA (1)...(19): siRNA sense strand
ccaccaaagacccgagaau

SEQ ID NO: 2188784 - RNA, 19 nt, Homo sapiens
  misc_RNA (1)...(19): siRNA sense strand
caccaaagacccgagaauc

SEQ ID NO: 2188785 - RNA, 19 nt, Homo sapiens
  misc_RNA (1)...(19): siRNA sense strand
gaaacaacaccugaaaaca

SEQ ID NO: 2188786 - RNA, 19 nt, Homo sapiens
  misc_RNA (1)...(19): siRNA sense strand
accaaagacccgagaauca

SEQ ID NO: 2188787 - RNA, 19 nt, Homo sapiens
  misc_RNA (1)...(19): siRNA sense strand
gaaaccagcugucuccaua

SEQ ID NO: 2188788 - RNA, 19 nt, Homo sapiens
  misc_RNA (1)...(19): siRNA sense strand
gaaggcaacuccucacuaa

SEQ ID NO: 2188789 - RNA, 19 nt, Homo sapiens
  misc_RNA (1)...(19): siRNA sense strand
ucaauaaacugaccaaaug

SEQ ID NO: 2188790 - RNA, 19 nt, Homo sapiens
  misc_RNA (1)...(19): siRNA sense strand
ggacacagauacauugguu

SEQ ID NO: 2188791 - RNA, 19 nt, Homo sapiens
  misc_RNA (1)...(19): siRNA sense strand
gcagaagaauguaccuuga

SEQ ID NO: 2188792 - RNA, 19 nt, Homo sapiens
  misc_RNA (1)...(19): siRNA sense strand
uaaaucggcaccaaucuua

SEQ ID NO: 2188793 - RNA, 19 nt, Homo sapiens
  misc_RNA (1)...(19): siRNA sense strand
uaaagcagcacaaguauau

SEQ ID NO: 2188794 - RNA, 19 nt, Homo sapiens
  misc_RNA (1)...(19): siRNA sense strand
gcaucucaguccuggauua

SEQ ID NO: 2188795 - RNA, 19 nt, Homo sapiens
  misc_RNA (1)...(19): siRNA sense strand
aagaggagcuggagaagug

SEQ ID NO: 2188796 - RNA, 19 nt, Homo sapiens
  misc_RNA (1)...(19): siRNA sense strand
aagacagacucuaucaaua

SEQ ID NO: 2188797 - RNA, 19 nt, Homo sapiens
  misc_RNA (1)...(19): siRNA sense strand
gaagugcccuaugucuuug

SEQ ID NO: 2188798 - RNA, 19 nt, Homo sapiens
  misc_RNA (1)...(19): siRNA sense strand
ggaagguggucauguuuac

SEQ ID NO: 2188799 - RNA, 19 nt, Homo sapiens
  misc_RNA (1)...(19): siRNA sense strand
gggccaacauugaggcuuu

SEQ ID NO: 2188800 - RNA, 19 nt, Homo sapiens
  misc_RNA (1)...(19): siRNA sense strand
uauaugaucgcucugcuua

SEQ ID NO: 2188801 - RNA, 19 nt, Homo sapiens
  misc_RNA (1)...(19): siRNA sense strand
ggaagaagaugcccaaaag

SEQ ID NO: 2188802 - RNA, 19 nt, Homo sapiens
  misc_RNA (1)...(19): siRNA sense strand
ugacugggcuuacgggaau

SEQ ID NO: 2188803 - RNA, 19 nt, Homo sapiens
  misc_RNA (1)...(19): siRNA sense strand
ugccggagcuuacuacuga

SEQ ID NO: 2188804 - RNA, 19 nt, Homo sapiens
  misc_RNA (1)...(19): siRNA sense strand
ggacauugagcacuucuug

SEQ ID NO: 2188805 - RNA, 19 nt, Homo sapiens
  misc_RNA (1)...(19): siRNA sense strand
ggaggugcuuugaagaaga

SEQ ID NO: 2188806 - RNA, 19 nt, Homo sapiens
  misc_RNA (1)...(19): siRNA sense strand
uaaaguuacagaccaagua

SEQ ID NO: 2188807 - RNA, 19 nt, Homo sapiens
  misc_RNA (1)...(19): siRNA sense strand
gguuggaucugccugaaga

SEQ ID NO: 2188808 - RNA, 19 nt, Homo sapiens
  misc_RNA (1)...(19): siRNA sense strand
gagaugagcaggaacaagu

SEQ ID NO: 2188809 - RNA, 19 nt, Homo sapiens
  misc_RNA (1)...(19): siRNA sense strand
gcaggacacagauacauug

SEQ ID NO: 2188810 - RNA, 19 nt, Homo sapiens
  misc_RNA (1)...(19): siRNA sense strand
gaccuuccgcacugaauua

SEQ ID NO: 2188811 - RNA, 19 nt, Homo sapiens
  misc_RNA (1)...(19): siRNA sense strand
cagccgaguugucagaauu

SEQ ID NO: 2188812 - RNA, 19 nt, Homo sapiens
  misc_RNA (1)...(19): siRNA sense strand
uaagacagacucuaucaau

SEQ ID NO: 2188813 - RNA, 19 nt, Homo sapiens
  misc_RNA (1)...(19): siRNA sense strand
gagcacuucuuggagauga

SEQ ID NO: 2188814 - RNA, 19 nt, Homo sapiens
  misc_RNA (1)...(19): siRNA sense strand
uuacucuucuccaugguua

SEQ ID NO: 2188815 - RNA, 19 nt, Homo sapiens
  misc_RNA (1)...(19): siRNA sense strand
agacagacucuaucaauau

SEQ ID NO: 2188816 - RNA, 19 nt, Homo sapiens
  misc_RNA (1)...(19): siRNA sense strand
ccagagacgccaugugaaa

SEQ ID NO: 2188817 - RNA, 19 nt, Homo sapiens
  misc_RNA (1)...(19): siRNA sense strand
agaagugcccuaugucuuu

SEQ ID NO: 2188818 - RNA, 19 nt, Homo sapiens
  misc_RNA (1)...(19): siRNA sense strand
aagaagauuucaagacuca

SEQ ID NO: 2188819 - RNA, 19 nt, Homo sapiens
  misc_RNA (1)...(19): siRNA sense strand
gccugaagauuuccacuau

SEQ ID NO: 2188820 - RNA, 19 nt, Homo sapiens
  misc_RNA (1)...(19): siRNA sense strand
gaacaggcacaaggagauu

SEQ ID NO: 2188821 - RNA, 19 nt, Homo sapiens
  misc_RNA (1)...(19): siRNA sense strand
gcaugaagcugggcaucga

SEQ ID NO: 2188822 - RNA, 19 nt, Homo sapiens
  misc_RNA (1)...(19): siRNA sense strand
gacagacucuaucaauauc

SEQ ID NO: 2188823 - RNA, 19 nt, Homo sapiens
  misc_RNA (1)...(19): siRNA sense strand
gaagaggugguaccagaga

SEQ ID NO: 2188824 - RNA, 19 nt, Homo sapiens
  misc_RNA (1)...(19): siRNA sense strand
gccuggacaucuacaauga

SEQ ID NO: 2188825 - RNA, 19 nt, Homo sapiens
  misc_RNA (1)...(19): siRNA sense strand
ggagauuauuguaaagagu

SEQ ID NO: 2188826 - RNA, 19 nt, Homo sapiens
  misc_RNA (1)...(19): siRNA sense strand
agaaggacauugagcacuu

SEQ ID NO: 2188827 - RNA, 19 nt, Homo sapiens
  misc_RNA (1)...(19): siRNA sense strand
ggagucugcuggugaugga

SEQ ID NO: 2188828 - RNA, 19 nt, Homo sapiens
  misc_RNA (1)...(19): siRNA sense strand
ucaauauccuggcagaugu

SEQ ID NO: 2188829 - RNA, 19 nt, Homo sapiens
  misc_RNA (1)...(19): siRNA sense strand
cugaagauuuccacuauuc

SEQ ID NO: 2188830 - RNA, 19 nt, Homo sapiens
  misc_RNA (1)...(19): siRNA sense strand
aaccauaucuaccaguuug

SEQ ID NO: 2188831 - RNA, 19 nt, Homo sapiens
  misc_RNA (1)...(19): siRNA sense strand
ccaaaaggccuauauaaug

SEQ ID NO: 2188832 - RNA, 19 nt, Homo sapiens
  misc_RNA (1)...(19): siRNA sense strand
aaacauucccggaccauga

SEQ ID NO: 2188833 - RNA, 19 nt, Homo sapiens
  misc_RNA (1)...(19): siRNA sense strand
caaaaggccuauauaaugg

SEQ ID NO: 2188834 - RNA, 19 nt, Homo sapiens
  misc_RNA (1)...(19): siRNA sense strand
uccuaaagcuacuaaaguu

SEQ ID NO: 2188835 - RNA, 19 nt, Homo sapiens
  misc_RNA (1)...(19): siRNA sense strand
aaccuggaauucaccaaua

SEQ ID NO: 2188836 - RNA, 19 nt, Homo sapiens
  misc_RNA (1)...(19): siRNA sense strand
guacagccuuccgcaguau

SEQ ID NO: 2188837 - RNA, 19 nt, Homo sapiens
  misc_RNA (1)...(19): siRNA sense strand
cuaccaguuugaauaugua

SEQ ID NO: 2188838 - RNA, 19 nt, Homo sapiens
  misc_RNA (1)...(19): siRNA sense strand
ucaaccauaucuaccaguu

SEQ ID NO: 2188839 - RNA, 19 nt, Homo sapiens
  misc_RNA (1)...(19): siRNA sense strand
gaguaucucuacccugcuu

SEQ ID NO: 2188840 - RNA, 19 nt, Homo sapiens
  misc_RNA (1)...(19): siRNA sense strand
aggaauggcuggaguugga

SEQ ID NO: 2188841 - RNA, 19 nt, Homo sapiens
  misc_RNA (1)...(19): siRNA sense strand
ucaaacacuucaaacucaa

SEQ ID NO: 2188842 - RNA, 19 nt, Homo sapiens
  misc_RNA (1)...(19): siRNA sense strand
gagaagugcccuaugucuu

SEQ ID NO: 2188843 - RNA, 19 nt, Homo sapiens
  misc_RNA (1)...(19): siRNA sense strand
ucugcagacucucaaagua

SEQ ID NO: 2188844 - RNA, 19 nt, Homo sapiens
  misc_RNA (1)...(19): siRNA sense strand
uuaagcuucuccaugcaua

SEQ ID NO: 2188845 - RNA, 19 nt, Homo sapiens
  misc_RNA (1)...(19): siRNA sense strand
ggcuagagguggucaguag

SEQ ID NO: 2188846 - RNA, 19 nt, Homo sapiens
  misc_RNA (1)...(19): siRNA sense strand
ugucagccauuuaccagaa

SEQ ID NO: 2188847 - RNA, 19 nt, Homo sapiens
  misc_RNA (1)...(19): siRNA sense strand
gcugcaacuuuauguccua

SEQ ID NO: 2188848 - RNA, 19 nt, Homo sapiens
  misc_RNA (1)...(19): siRNA sense strand
gaggugcuuugaagaagau

SEQ ID NO: 2188849 - RNA, 19 nt, Homo sapiens
  misc_RNA (1)...(19): siRNA sense strand
gaaccuggaauucaccaau

SEQ ID NO: 2188850 - RNA, 19 nt, Homo sapiens
  misc_RNA (1)...(19): siRNA sense strand
acacugagaaccuggaauu

SEQ ID NO: 2188851 - RNA, 19 nt, Homo sapiens
  misc_RNA (1)...(19): siRNA sense strand
gcagaugugcagaucaaga

SEQ ID NO: 2188852 - RNA, 19 nt, Homo sapiens
  misc_RNA (1)...(19): siRNA sense strand
cagauacauugguuggauu

SEQ ID NO: 2188853 - RNA, 19 nt, Homo sapiens
  misc_RNA (1)...(19): siRNA sense strand
ggacaucuacaaugaaagg

SEQ ID NO: 2188854 - RNA, 19 nt, Homo sapiens
  misc_RNA (1)...(19): siRNA sense strand
gcuucuccaugcauaauga

SEQ ID NO: 2188855 - RNA, 19 nt, Homo sapiens
  misc_RNA (1)...(19): siRNA sense strand
gauuuccacuauucauaug

SEQ ID NO: 2188856 - RNA, 19 nt, Homo sapiens
  misc_RNA (1)...(19): siRNA sense strand
ccuaaagcuacuaaaguua

SEQ ID NO: 2188857 - RNA, 19 nt, Homo sapiens
  misc_RNA (1)...(19): siRNA sense strand
caaggagauuauuguaaag

SEQ ID NO: 2188858 - RNA, 19 nt, Homo sapiens
  misc_RNA (1)...(19): siRNA sense strand
gcuaagacagacucuauca

SEQ ID NO: 2188859 - RNA, 19 nt, Homo sapiens
  misc_RNA (1)...(19): siRNA sense strand
uaccagagacgccauguga

SEQ ID NO: 2188860 - RNA, 19 nt, Homo sapiens
  misc_RNA (1)...(19): siRNA sense strand
gcaaggaauggcuggaguu

SEQ ID NO: 2188861 - RNA, 19 nt, Homo sapiens
  misc_RNA (1)...(19): siRNA sense strand
ucgcagaugugcagaucaa

SEQ ID NO: 2188862 - RNA, 19 nt, Homo sapiens
  misc_RNA (1)...(19): siRNA sense strand
ucuggaagguggucauguu

SEQ ID NO: 2188863 - RNA, 19 nt, Homo sapiens
  misc_RNA (1)...(19): siRNA sense strand
ggagcuuacuacugaaagu

SEQ ID NO: 2188864 - RNA, 19 nt, Homo sapiens
  misc_RNA (1)...(19): siRNA sense strand
cucaaacacuucaaacuca

SEQ ID NO: 2188865 - RNA, 19 nt, Homo sapiens
  misc_RNA (1)...(19): siRNA sense strand
uaacaggaggugcuuugaa

SEQ ID NO: 2188866 - RNA, 19 nt, Homo sapiens
  misc_RNA (1)...(19): siRNA sense strand
cuggacaucuacaaugaaa

SEQ ID NO: 2188867 - RNA, 19 nt, Homo sapiens
  misc_RNA (1)...(19): siRNA sense strand
ucagacagaaggacauuga

SEQ ID NO: 2188868 - RNA, 19 nt, Homo sapiens
  misc_RNA (1)...(19): siRNA sense strand
gaagauuuccacuauucau

SEQ ID NO: 2188869 - RNA, 19 nt, Homo sapiens
  misc_RNA (1)...(19): siRNA sense strand
cgaguugucagaauuguau

SEQ ID NO: 2188870 - RNA, 19 nt, Homo sapiens
  misc_RNA (1)...(19): siRNA sense strand
aggccaugcugcaacuuua

SEQ ID NO: 2188871 - RNA, 19 nt, Homo sapiens
  misc_RNA (1)...(19): siRNA sense strand
uguacagccuuccgcagua

SEQ ID NO: 2188872 - RNA, 19 nt, Homo sapiens
  misc_RNA (1)...(19): siRNA sense strand
cuaaagcagcacaaguaua

SEQ ID NO: 2188873 - RNA, 19 nt, Homo sapiens
  misc_RNA (1)...(19): siRNA sense strand
ccucuaaggcuaagacaga

SEQ ID NO: 2188874 - RNA, 19 nt, Homo sapiens
  misc_RNA (1)...(19): siRNA sense strand
gagguuggaucugccugaa

SEQ ID NO: 2188875 - RNA, 19 nt, Homo sapiens
  misc_RNA (1)...(19): siRNA sense strand
ccaugaugcugguaguguu

SEQ ID NO: 2188876 - RNA, 19 nt, Homo sapiens
  misc_RNA (1)...(19): siRNA sense strand
uaaacugaccaaauggaaa

SEQ ID NO: 2188877 - RNA, 19 nt, Homo sapiens
  misc_RNA (1)...(19): siRNA sense strand
guacagaagcgggcagaau

SEQ ID NO: 2188878 - RNA, 19 nt, Homo sapiens
  misc_RNA (1)...(19): siRNA sense strand
uaacagccgucgcuaugac

SEQ ID NO: 2188879 - RNA, 19 nt, Homo sapiens
  misc_RNA (1)...(19): siRNA sense strand
cgaaggcaacuccucacua

SEQ ID NO: 2188880 - RNA, 19 nt, Homo sapiens
  misc_RNA (1)...(19): siRNA sense strand
uacagaagcgggcagaauu

SEQ ID NO: 2188881 - RNA, 19 nt, Homo sapiens
  misc_RNA (1)...(19): siRNA sense strand
cccuaaagcagcacaagua

SEQ ID NO: 2188882 - RNA, 19 nt, Homo sapiens
  misc_RNA (1)...(19): siRNA sense strand
uaugaucgcucugcuuaag

SEQ ID NO: 2188883 - RNA, 19 nt, Homo sapiens
  misc_RNA (1)...(19): siRNA sense strand
ggagaagugcccuaugucu

SEQ ID NO: 2188884 - RNA, 19 nt, Homo sapiens
  misc_RNA (1)...(19): siRNA sense strand
cuggagaagugcccuaugu

SEQ ID NO: 2188885 - RNA, 19 nt, Homo sapiens
  misc_RNA (1)...(19): siRNA sense strand
caugugaaauccucuacca

SEQ ID NO: 2188886 - RNA, 19 nt, Homo sapiens
  misc_RNA (1)...(19): siRNA sense strand
gcagccgaguugucagaau

SEQ ID NO: 2188887 - RNA, 19 nt, Homo sapiens
  misc_RNA (1)...(19): siRNA sense strand
gaaaccagcugucuccaua

SEQ ID NO: 2188888 - RNA, 19 nt, Homo sapiens
  misc_RNA (1)...(19): siRNA sense strand
gaaggcaacuccucacuaa

SEQ ID NO: 2188889 - RNA, 19 nt, Homo sapiens
  misc_RNA (1)...(19): siRNA sense strand
ucaauaaacugaccaaaug

SEQ ID NO: 2188890 - RNA, 19 nt, Homo sapiens
  misc_RNA (1)...(19): siRNA sense strand
ggacacagauacauugguu

SEQ ID NO: 2188891 - RNA, 19 nt, Homo sapiens
  misc_RNA (1)...(19): siRNA sense strand
gcagaagaauguaccuuga

SEQ ID NO: 2188892 - RNA, 19 nt, Homo sapiens
  misc_RNA (1)...(19): siRNA sense strand
uaaaucggcaccaaucuua

SEQ ID NO: 2188893 - RNA, 19 nt, Homo sapiens
  misc_RNA (1)...(19): siRNA sense strand
uaaagcagcacaaguauau

SEQ ID NO: 2188894 - RNA, 19 nt, Homo sapiens
  misc_RNA (1)...(19): siRNA sense strand
gcaucucaguccuggauua

SEQ ID NO: 2188895 - RNA, 19 nt, Homo sapiens
  misc_RNA (1)...(19): siRNA sense strand
aagaggagcuggagaagug

SEQ ID NO: 2188896 - RNA, 19 nt, Homo sapiens
  misc_RNA (1)...(19): siRNA sense strand
aagacagacucuaucaaua

SEQ ID NO: 2188897 - RNA, 19 nt, Homo sapiens
  misc_RNA (1)...(19): siRNA sense strand
gaagugcccuaugucuuug

SEQ ID NO: 2188898 - RNA, 19 nt, Homo sapiens
  misc_RNA (1)...(19): siRNA sense strand
ggaagguggucauguuuac

SEQ ID NO: 2188899 - RNA, 19 nt, Homo sapiens
  misc_RNA (1)...(19): siRNA sense strand
gggccaacauugaggcuuu

SEQ ID NO: 2188900 - RNA, 19 nt, Homo sapiens
  misc_RNA (1)...(19): siRNA sense strand
uauaugaucgcucugcuua

SEQ ID NO: 2188901 - RNA, 19 nt, Homo sapiens
  misc_RNA (1)...(19): siRNA sense strand
ggaagaagaugcccaaaag

SEQ ID NO: 2188902 - RNA, 19 nt, Homo sapiens
  misc_RNA (1)...(19): siRNA sense strand
ugacugggcuuacgggaau

SEQ ID NO: 2188903 - RNA, 19 nt, Homo sapiens
  misc_RNA (1)...(19): siRNA sense strand
ugccggagcuuacuacuga

SEQ ID NO: 2188904 - RNA, 19 nt, Homo sapiens
  misc_RNA (1)...(19): siRNA sense strand
ggacauugagcacuucuug

SEQ ID NO: 2188905 - RNA, 19 nt, Homo sapiens
  misc_RNA (1)...(19): siRNA sense strand
ggaggugcuuugaagaaga

SEQ ID NO: 2188906 - RNA, 19 nt, Homo sapiens
  misc_RNA (1)...(19): siRNA sense strand
uaaaguuacagaccaagua

SEQ ID NO: 2188907 - RNA, 19 nt, Homo sapiens
  misc_RNA (1)...(19): siRNA sense strand
gguuggaucugccugaaga

SEQ ID NO: 2188908 - RNA, 19 nt, Homo sapiens
  misc_RNA (1)...(19): siRNA sense strand
gagaugagcaggaacaagu

SEQ ID NO: 2188909 - RNA, 19 nt, Homo sapiens
  misc_RNA (1)...(19): siRNA sense strand
gcaggacacagauacauug

SEQ ID NO: 2188910 - RNA, 19 nt, Homo sapiens
  misc_RNA (1)...(19): siRNA sense strand
gaccuuccgcacugaauua

SEQ ID NO: 2188911 - RNA, 19 nt, Homo sapiens
  misc_RNA (1)...(19): siRNA sense strand
cagccgaguugucagaauu

SEQ ID NO: 2188912 - RNA, 19 nt, Homo sapiens
  misc_RNA (1)...(19): siRNA sense strand
uaagacagacucuaucaau

SEQ ID NO: 2188913 - RNA, 19 nt, Homo sapiens
  misc_RNA (1)...(19): siRNA sense strand
gagcacuucuuggagauga

SEQ ID NO: 2188914 - RNA, 19 nt, Homo sapiens
  misc_RNA (1)...(19): siRNA sense strand
uuacucuucuccaugguua

SEQ ID NO: 2188915 - RNA, 19 nt, Homo sapiens
  misc_RNA (1)...(19): siRNA sense strand
agacagacucuaucaauau

SEQ ID NO: 2188916 - RNA, 19 nt, Homo sapiens
  misc_RNA (1)...(19): siRNA sense strand
ccagagacgccaugugaaa

SEQ ID NO: 2188917 - RNA, 19 nt, Homo sapiens
  misc_RNA (1)...(19): siRNA sense strand
agaagugcccuaugucuuu

SEQ ID NO: 2188918 - RNA, 19 nt, Homo sapiens
  misc_RNA (1)...(19): siRNA sense strand
aagaagauuucaagacuca

SEQ ID NO: 2188919 - RNA, 19 nt, Homo sapiens
  misc_RNA (1)...(19): siRNA sense strand
gccugaagauuuccacuau

SEQ ID NO: 2188920 - RNA, 19 nt, Homo sapiens
  misc_RNA (1)...(19): siRNA sense strand
gaacaggcacaaggagauu

SEQ ID NO: 2188921 - RNA, 19 nt, Homo sapiens
  misc_RNA (1)...(19): siRNA sense strand
gcaugaagcugggcaucga

SEQ ID NO: 2188922 - RNA, 19 nt, Homo sapiens
  misc_RNA (1)...(19): siRNA sense strand
gacagacucuaucaauauc

SEQ ID NO: 2188923 - RNA, 19 nt, Homo sapiens
  misc_RNA (1)...(19): siRNA sense strand
gaagaggugguaccagaga

SEQ ID NO: 2188924 - RNA, 19 nt, Homo sapiens
  misc_RNA (1)...(19): siRNA sense strand
gccuggacaucuacaauga

SEQ ID NO: 2188925 - RNA, 19 nt, Homo sapiens
  misc_RNA (1)...(19): siRNA sense strand
ggagauuauuguaaagagu

SEQ ID NO: 2188926 - RNA, 19 nt, Homo sapiens
  misc_RNA (1)...(19): siRNA sense strand
agaaggacauugagcacuu

SEQ ID NO: 2188927 - RNA, 19 nt, Homo sapiens
  misc_RNA (1)...(19): siRNA sense strand
ggagucugcuggugaugga

SEQ ID NO: 2188928 - RNA, 19 nt, Homo sapiens
  misc_RNA (1)...(19): siRNA sense strand
ucaauauccuggcagaugu

SEQ ID NO: 2188929 - RNA, 19 nt, Homo sapiens
  misc_RNA (1)...(19): siRNA sense strand
cugaagauuuccacuauuc

SEQ ID NO: 2188930 - RNA, 19 nt, Homo sapiens
  misc_RNA (1)...(19): siRNA sense strand
aaccauaucuaccaguuug

SEQ ID NO: 2188931 - RNA, 19 nt, Homo sapiens
  misc_RNA (1)...(19): siRNA sense strand
ccaaaaggccuauauaaug

SEQ ID NO: 2188932 - RNA, 19 nt, Homo sapiens
  misc_RNA (1)...(19): siRNA sense strand
aaacauucccggaccauga

SEQ ID NO: 2188933 - RNA, 19 nt, Homo sapiens
  misc_RNA (1)...(19): siRNA sense strand
caaaaggccuauauaaugg

SEQ ID NO: 2188934 - RNA, 19 nt, Homo sapiens
  misc_RNA (1)...(19): siRNA sense strand
uccuaaagcuacuaaaguu

SEQ ID NO: 2188935 - RNA, 19 nt, Homo sapiens
  misc_RNA (1)...(19): siRNA sense strand
aaccuggaauucaccaaua

SEQ ID NO: 2188936 - RNA, 19 nt, Homo sapiens
  misc_RNA (1)...(19): siRNA sense strand
guacagccuuccgcaguau

SEQ ID NO: 2188937 - RNA, 19 nt, Homo sapiens
  misc_RNA (1)...(19): siRNA sense strand
cuaccaguuugaauaugua

SEQ ID NO: 2188938 - RNA, 19 nt, Homo sapiens
  misc_RNA (1)...(19): siRNA sense strand
ucaaccauaucuaccaguu

SEQ ID NO: 2188939 - RNA, 19 nt, Homo sapiens
  misc_RNA (1)...(19): siRNA sense strand
gaguaucucuacccugcuu

SEQ ID NO: 2188940 - RNA, 19 nt, Homo sapiens
  misc_RNA (1)...(19): siRNA sense strand
aggaauggcuggaguugga

SEQ ID NO: 2188941 - RNA, 19 nt, Homo sapiens
  misc_RNA (1)...(19): siRNA sense strand
ucaaacacuucaaacucaa

SEQ ID NO: 2188942 - RNA, 19 nt, Homo sapiens
  misc_RNA (1)...(19): siRNA sense strand
gagaagugcccuaugucuu

SEQ ID NO: 2188943 - RNA, 19 nt, Homo sapiens
  misc_RNA (1)...(19): siRNA sense strand
ucugcagacucucaaagua

SEQ ID NO: 2188944 - RNA, 19 nt, Homo sapiens
  misc_RNA (1)...(19): siRNA sense strand
uuaagcuucuccaugcaua

SEQ ID NO: 2188945 - RNA, 19 nt, Homo sapiens
  misc_RNA (1)...(19): siRNA sense strand
ggcuagagguggucaguag

SEQ ID NO: 2188946 - RNA, 19 nt, Homo sapiens
  misc_RNA (1)...(19): siRNA sense strand
ugucagccauuuaccagaa

SEQ ID NO: 2188947 - RNA, 19 nt, Homo sapiens
  misc_RNA (1)...(19): siRNA sense strand
gcugcaacuuuauguccua

SEQ ID NO: 2188948 - RNA, 19 nt, Homo sapiens
  misc_RNA (1)...(19): siRNA sense strand
gaggugcuuugaagaagau

SEQ ID NO: 2188949 - RNA, 19 nt, Homo sapiens
  misc_RNA (1)...(19): siRNA sense strand
gaaccuggaauucaccaau

SEQ ID NO: 2188950 - RNA, 19 nt, Homo sapiens
  misc_RNA (1)...(19): siRNA sense strand
acacugagaaccuggaauu

SEQ ID NO: 2188951 - RNA, 19 nt, Homo sapiens
  misc_RNA (1)...(19): siRNA sense strand
gcagaugugcagaucaaga

SEQ ID NO: 2188952 - RNA, 19 nt, Homo sapiens
  misc_RNA (1)...(19): siRNA sense strand
cagauacauugguuggauu

SEQ ID NO: 2188953 - RNA, 19 nt, Homo sapiens
  misc_RNA (1)...(19): siRNA sense strand
ggacaucuacaaugaaagg

SEQ ID NO: 2188954 - RNA, 19 nt, Homo sapiens
  misc_RNA (1)...(19): siRNA sense strand
gcuucuccaugcauaauga

SEQ ID NO: 2188955 - RNA, 19 nt, Homo sapiens
  misc_RNA (1)...(19): siRNA sense strand
gauuuccacuauucauaug

SEQ ID NO: 2188956 - RNA, 19 nt, Homo sapiens
  misc_RNA (1)...(19): siRNA sense strand
ccuaaagcuacuaaaguua

SEQ ID NO: 2188957 - RNA, 19 nt, Homo sapiens
  misc_RNA (1)...(19): siRNA sense strand
caaggagauuauuguaaag

SEQ ID NO: 2188958 - RNA, 19 nt, Homo sapiens
  misc_RNA (1)...(19): siRNA sense strand
gcuaagacagacucuauca

SEQ ID NO: 2188959 - RNA, 19 nt, Homo sapiens
  misc_RNA (1)...(19): siRNA sense strand
uaccagagacgccauguga

SEQ ID NO: 2188960 - RNA, 19 nt, Homo sapiens
  misc_RNA (1)...(19): siRNA sense strand
gcaaggaauggcuggaguu

SEQ ID NO: 2188961 - RNA, 19 nt, Homo sapiens
  misc_RNA (1)...(19): siRNA sense strand
ucgcagaugugcagaucaa

SEQ ID NO: 2188962 - RNA, 19 nt, Homo sapiens
  misc_RNA (1)...(19): siRNA sense strand
ucuggaagguggucauguu

SEQ ID NO: 2188963 - RNA, 19 nt, Homo sapiens
  misc_RNA (1)...(19): siRNA sense strand
ggagcuuacuacugaaagu

SEQ ID NO: 2188964 - RNA, 19 nt, Homo sapiens
  misc_RNA (1)...(19): siRNA sense strand
cucaaacacuucaaacuca

SEQ ID NO: 2188965 - RNA, 19 nt, Homo sapiens
  misc_RNA (1)...(19): siRNA sense strand
uaacaggaggugcuuugaa

SEQ ID NO: 2188966 - RNA, 19 nt, Homo sapiens
  misc_RNA (1)...(19): siRNA sense strand
cuggacaucuacaaugaaa

SEQ ID NO: 2188967 - RNA, 19 nt, Homo sapiens
  misc_RNA (1)...(19): siRNA sense strand
ucagacagaaggacauuga

SEQ ID NO: 2188968 - RNA, 19 nt, Homo sapiens
  misc_RNA (1)...(19): siRNA sense strand
gaagauuuccacuauucau

SEQ ID NO: 2188969 - RNA, 19 nt, Homo sapiens
  misc_RNA (1)...(19): siRNA sense strand
cgaguugucagaauuguau

SEQ ID NO: 2188970 - RNA, 19 nt, Homo sapiens
  misc_RNA (1)...(19): siRNA sense strand
aggccaugcugcaacuuua

SEQ ID NO: 2188971 - RNA, 19 nt, Homo sapiens
  misc_RNA (1)...(19): siRNA sense strand
uguacagccuuccgcagua

SEQ ID NO: 2188972 - RNA, 19 nt, Homo sapiens
  misc_RNA (1)...(19): siRNA sense strand
cuaaagcagcacaaguaua

SEQ ID NO: 2188973 - RNA, 19 nt, Homo sapiens
  misc_RNA (1)...(19): siRNA sense strand
ccucuaaggcuaagacaga

SEQ ID NO: 2188974 - RNA, 19 nt, Homo sapiens
  misc_RNA (1)...(19): siRNA sense strand
gagguuggaucugccugaa

SEQ ID NO: 2188975 - RNA, 19 nt, Homo sapiens
  misc_RNA (1)...(19): siRNA sense strand
ccaugaugcugguaguguu

SEQ ID NO: 2188976 - RNA, 19 nt, Homo sapiens
  misc_RNA (1)...(19): siRNA sense strand
uaaacugaccaaauggaaa

SEQ ID NO: 2188977 - RNA, 19 nt, Homo sapiens
  misc_RNA (1)...(19): siRNA sense strand
guacagaagcgggcagaau

SEQ ID NO: 2188978 - RNA, 19 nt, Homo sapiens
  misc_RNA (1)...(19): siRNA sense strand
uaacagccgucgcuaugac

SEQ ID NO: 2188979 - RNA, 19 nt, Homo sapiens
  misc_RNA (1)...(19): siRNA sense strand
cgaaggcaacuccucacua

SEQ ID NO: 2188980 - RNA, 19 nt, Homo sapiens
  misc_RNA (1)...(19): siRNA sense strand
uacagaagcgggcagaauu

SEQ ID NO: 2188981 - RNA, 19 nt, Homo sapiens
  misc_RNA (1)...(19): siRNA sense strand
cccuaaagcagcacaagua

SEQ ID NO: 2188982 - RNA, 19 nt, Homo sapiens
  misc_RNA (1)...(19): siRNA sense strand
uaugaucgcucugcuuaag

SEQ ID NO: 2188983 - RNA, 19 nt, Homo sapiens
  misc_RNA (1)...(19): siRNA sense strand
ggagaagugcccuaugucu

SEQ ID NO: 2188984 - RNA, 19 nt, Homo sapiens
  misc_RNA (1)...(19): siRNA sense strand
cuggagaagugcccuaugu

SEQ ID NO: 2188985 - RNA, 19 nt, Homo sapiens
  misc_RNA (1)...(19): siRNA sense strand
caugugaaauccucuacca

SEQ ID NO: 2188986 - RNA, 19 nt, Homo sapiens
  misc_RNA (1)...(19): siRNA sense strand
gcagccgaguugucagaau

SEQ ID NO: 2188987 - RNA, 19 nt, Homo sapiens
  misc_RNA (1)...(19): siRNA sense strand
gaacaccucuuauuccuau

SEQ ID NO: 2188988 - RNA, 19 nt, Homo sapiens
  misc_RNA (1)...(19): siRNA sense strand
ggaaggagcacaucaauau

SEQ ID NO: 2188989 - RNA, 19 nt, Homo sapiens
  misc_RNA (1)...(19): siRNA sense strand
gcaaucagauccagugcua

SEQ ID NO: 2188990 - RNA, 19 nt, Homo sapiens
  misc_RNA (1)...(19): siRNA sense strand
gaacagaucgugugugaga

SEQ ID NO: 2188991 - RNA, 19 nt, Homo sapiens
  misc_RNA (1)...(19): siRNA sense strand
gaacuacacugugcugguu

SEQ ID NO: 2188992 - RNA, 19 nt, Homo sapiens
  misc_RNA (1)...(19): siRNA sense strand
gaauaaaguucaccucuac

SEQ ID NO: 2188993 - RNA, 19 nt, Homo sapiens
  misc_RNA (1)...(19): siRNA sense strand
cagaggagcuggccuguug

SEQ ID NO: 2188994 - RNA, 19 nt, Homo sapiens
  misc_RNA (1)...(19): siRNA sense strand
cagaacagaucguguguga

SEQ ID NO: 2188995 - RNA, 19 nt, Homo sapiens
  misc_RNA (1)...(19): siRNA sense strand
caacccagcucagaauaaa

SEQ ID NO: 2188996 - RNA, 19 nt, Homo sapiens
  misc_RNA (1)...(19): siRNA sense strand
ccucacagcucuauuacuu

SEQ ID NO: 2188997 - RNA, 19 nt, Homo sapiens
  misc_RNA (1)...(19): siRNA sense strand
gaaccugggccuggaauuu

SEQ ID NO: 2188998 - RNA, 19 nt, Homo sapiens
  misc_RNA (1)...(19): siRNA sense strand
agaauaaaguucaccucua

SEQ ID NO: 2188999 - RNA, 19 nt, Homo sapiens
  misc_RNA (1)...(19): siRNA sense strand
ggagcugucuggugccaaa

SEQ ID NO: 2189000 - RNA, 19 nt, Homo sapiens
  misc_RNA (1)...(19): siRNA sense strand
gcacgcccaucauccuaaa

SEQ ID NO: 2189001 - RNA, 19 nt, Homo sapiens
  misc_RNA (1)...(19): siRNA sense strand
gcaagucccgcgaaaguga

SEQ ID NO: 2189002 - RNA, 19 nt, Homo sapiens
  misc_RNA (1)...(19): siRNA sense strand
gguccucacagcucuauua

SEQ ID NO: 2189003 - RNA, 19 nt, Homo sapiens
  misc_RNA (1)...(19): siRNA sense strand
ucacagcucuauuacuuca

SEQ ID NO: 2189004 - RNA, 19 nt, Homo sapiens
  misc_RNA (1)...(19): siRNA sense strand
gcaccagcuuugucuucua

SEQ ID NO: 2189005 - RNA, 19 nt, Homo sapiens
  misc_RNA (1)...(19): siRNA sense strand
cagaugaggugcuagagau

SEQ ID NO: 2189006 - RNA, 19 nt, Homo sapiens
  misc_RNA (1)...(19): siRNA sense strand
gcaacgugguggugauguu

SEQ ID NO: 2189007 - RNA, 19 nt, Homo sapiens
  misc_RNA (1)...(19): siRNA sense strand
ggaaugggcacuucaacau

SEQ ID NO: 2189008 - RNA, 19 nt, Homo sapiens
  misc_RNA (1)...(19): siRNA sense strand
gaagcaacgugguggugau

SEQ ID NO: 2189009 - RNA, 19 nt, Homo sapiens
  misc_RNA (1)...(19): siRNA sense strand
gcccuuuaguggaugguua

SEQ ID NO: 2189010 - RNA, 19 nt, Homo sapiens
  misc_RNA (1)...(19): siRNA sense strand
aaacgcaagucccgcgaaa

SEQ ID NO: 2189011 - RNA, 19 nt, Homo sapiens
  misc_RNA (1)...(19): siRNA sense strand
gggaaggagcacaucaaua

SEQ ID NO: 2189012 - RNA, 19 nt, Homo sapiens
  misc_RNA (1)...(19): siRNA sense strand
gaaagcagcccugucucuu

SEQ ID NO: 2189013 - RNA, 19 nt, Homo sapiens
  misc_RNA (1)...(19): siRNA sense strand
gugcagcccuuuaguggau

SEQ ID NO: 2189014 - RNA, 19 nt, Homo sapiens
  misc_RNA (1)...(19): siRNA sense strand
agaccaacuucaccuacua

SEQ ID NO: 2189015 - RNA, 19 nt, Homo sapiens
  misc_RNA (1)...(19): siRNA sense strand
ggauggagaucaacaaccu

SEQ ID NO: 2189016 - RNA, 19 nt, Homo sapiens
  misc_RNA (1)...(19): siRNA sense strand
cauccuacauugucugcaa

SEQ ID NO: 2189017 - RNA, 19 nt, Homo sapiens
  misc_RNA (1)...(19): siRNA sense strand
ggaaagcagcccugucucu

SEQ ID NO: 2189018 - RNA, 19 nt, Homo sapiens
  misc_RNA (1)...(19): siRNA sense strand
ucugaacgcuacugagaug

SEQ ID NO: 2189019 - RNA, 19 nt, Homo sapiens
  misc_RNA (1)...(19): siRNA sense strand
ggcgucaacugcaccuuug

SEQ ID NO: 2189020 - RNA, 19 nt, Homo sapiens
  misc_RNA (1)...(19): siRNA sense strand
gcaacgugaagcugaacua

SEQ ID NO: 2189021 - RNA, 19 nt, Homo sapiens
  misc_RNA (1)...(19): siRNA sense strand
uuacaucccugcagaacag

SEQ ID NO: 2189022 - RNA, 19 nt, Homo sapiens
  misc_RNA (1)...(19): siRNA sense strand
ggugugagcgguccaagga

SEQ ID NO: 2189023 - RNA, 19 nt, Homo sapiens
  misc_RNA (1)...(19): siRNA sense strand
gccagaacaccucuuauuc

SEQ ID NO: 2189024 - RNA, 19 nt, Homo sapiens
  misc_RNA (1)...(19): siRNA sense strand
gacaacccagcucagaaua

SEQ ID NO: 2189025 - RNA, 19 nt, Homo sapiens
  misc_RNA (1)...(19): siRNA sense strand
ggacccaccuggaccucau

SEQ ID NO: 2189026 - RNA, 19 nt, Homo sapiens
  misc_RNA (1)...(19): siRNA sense strand
ggaccaccaugucguacag

SEQ ID NO: 2189027 - RNA, 19 nt, Homo sapiens
  misc_RNA (1)...(19): siRNA sense strand
cgagaggcccgaggaguuu

SEQ ID NO: 2189028 - RNA, 19 nt, Homo sapiens
  misc_RNA (1)...(19): siRNA sense strand
ggagugcagcccuuuagug

SEQ ID NO: 2189029 - RNA, 19 nt, Homo sapiens
  misc_RNA (1)...(19): siRNA sense strand
gaaggagcacaucaauauc

SEQ ID NO: 2189030 - RNA, 19 nt, Homo sapiens
  misc_RNA (1)...(19): siRNA sense strand
gaagggauggagaucaaca

SEQ ID NO: 2189031 - RNA, 19 nt, Homo sapiens
  misc_RNA (1)...(19): siRNA sense strand
gaugaggugcuagagauga

SEQ ID NO: 2189032 - RNA, 19 nt, Homo sapiens
  misc_RNA (1)...(19): siRNA sense strand
gacgguccaucccaacaau

SEQ ID NO: 2189033 - RNA, 19 nt, Homo sapiens
  misc_RNA (1)...(19): siRNA sense strand
caacgugguggugauguuu

SEQ ID NO: 2189034 - RNA, 19 nt, Homo sapiens
  misc_RNA (1)...(19): siRNA sense strand
ugacaacccagcucagaau

SEQ ID NO: 2189035 - RNA, 19 nt, Homo sapiens
  misc_RNA (1)...(19): siRNA sense strand
cagaacaccucuuauuccu

SEQ ID NO: 2189036 - RNA, 19 nt, Homo sapiens
  misc_RNA (1)...(19): siRNA sense strand
caacaccacauccucagau

SEQ ID NO: 2189037 - RNA, 19 nt, Homo sapiens
  misc_RNA (1)...(19): siRNA sense strand
cgaucuccauccuacauug

SEQ ID NO: 2189038 - RNA, 19 nt, Homo sapiens
  misc_RNA (1)...(19): siRNA sense strand
gagggaaggagcacaucaa

SEQ ID NO: 2189039 - RNA, 19 nt, Homo sapiens
  misc_RNA (1)...(19): siRNA sense strand
ucaagccuaucacgcugaa

SEQ ID NO: 2189040 - RNA, 19 nt, Homo sapiens
  misc_RNA (1)...(19): siRNA sense strand
caucguggccgugcucauu

SEQ ID NO: 2189041 - RNA, 19 nt, Homo sapiens
  misc_RNA (1)...(19): siRNA sense strand
ccagauccgugccaagcau

SEQ ID NO: 2189042 - RNA, 19 nt, Homo sapiens
  misc_RNA (1)...(19): siRNA sense strand
caacagcuccagcguacag

SEQ ID NO: 2189043 - RNA, 19 nt, Homo sapiens
  misc_RNA (1)...(19): siRNA sense strand
uugaggaccugucagagau

SEQ ID NO: 2189044 - RNA, 19 nt, Homo sapiens
  misc_RNA (1)...(19): siRNA sense strand
acagcucuauuacuucaug

SEQ ID NO: 2189045 - RNA, 19 nt, Homo sapiens
  misc_RNA (1)...(19): siRNA sense strand
aaaguucaccucuacaagu

SEQ ID NO: 2189046 - RNA, 19 nt, Homo sapiens
  misc_RNA (1)...(19): siRNA sense strand
ugccagaacaccucuuauu

SEQ ID NO: 2189047 - RNA, 19 nt, Homo sapiens
  misc_RNA (1)...(19): siRNA sense strand
gcaacaccacauccucaga

SEQ ID NO: 2189048 - RNA, 19 nt, Homo sapiens
  misc_RNA (1)...(19): siRNA sense strand
ccaggaaggccgagugaag

SEQ ID NO: 2189049 - RNA, 19 nt, Homo sapiens
  misc_RNA (1)...(19): siRNA sense strand
cgaggaguuuggcuucauc

SEQ ID NO: 2189050 - RNA, 19 nt, Homo sapiens
  misc_RNA (1)...(19): siRNA sense strand
caauaucugugagguucug

SEQ ID NO: 2189051 - RNA, 19 nt, Homo sapiens
  misc_RNA (1)...(19): siRNA sense strand
ggagggaaggagcacauca

SEQ ID NO: 2189052 - RNA, 19 nt, Homo sapiens
  misc_RNA (1)...(19): siRNA sense strand
aaguucaccucuacaagug

SEQ ID NO: 2189053 - RNA, 19 nt, Homo sapiens
  misc_RNA (1)...(19): siRNA sense strand
ggagcauugucaguggaaa

SEQ ID NO: 2189054 - RNA, 19 nt, Homo sapiens
  misc_RNA (1)...(19): siRNA sense strand
acacacccaucgccguaug

SEQ ID NO: 2189055 - RNA, 19 nt, Homo sapiens
  misc_RNA (1)...(19): siRNA sense strand
augaagggauggagaucaa

SEQ ID NO: 2189056 - RNA, 19 nt, Homo sapiens
  misc_RNA (1)...(19): siRNA sense strand
gaccaacuucaccuacuau

SEQ ID NO: 2189057 - RNA, 19 nt, Homo sapiens
  misc_RNA (1)...(19): siRNA sense strand
ggagaaccugggccuggaa

SEQ ID NO: 2189058 - RNA, 19 nt, Homo sapiens
  misc_RNA (1)...(19): siRNA sense strand
acaacccagcucagaauaa

SEQ ID NO: 2189059 - RNA, 19 nt, Homo sapiens
  misc_RNA (1)...(19): siRNA sense strand
caccuggaccucauacaga

SEQ ID NO: 2189060 - RNA, 19 nt, Homo sapiens
  misc_RNA (1)...(19): siRNA sense strand
caccagcuuugucuucuac

SEQ ID NO: 2189061 - RNA, 19 nt, Homo sapiens
  misc_RNA (1)...(19): siRNA sense strand
gaucugcguggcugugugu

SEQ ID NO: 2189062 - RNA, 19 nt, Homo sapiens
  misc_RNA (1)...(19): siRNA sense strand
gacccagacuucgcaugug

SEQ ID NO: 2189063 - RNA, 19 nt, Homo sapiens
  misc_RNA (1)...(19): siRNA sense strand
cagcucagaauaaaguuca

SEQ ID NO: 2189064 - RNA, 19 nt, Homo sapiens
  misc_RNA (1)...(19): siRNA sense strand
ugacagucguguggaaugg

SEQ ID NO: 2189065 - RNA, 19 nt, Homo sapiens
  misc_RNA (1)...(19): siRNA sense strand
acgaaugcauccucaacau

SEQ ID NO: 2189066 - RNA, 19 nt, Homo sapiens
  misc_RNA (1)...(19): siRNA sense strand
uggaggugaucaagccuau

SEQ ID NO: 2189067 - RNA, 19 nt, Homo sapiens
  misc_RNA (1)...(19): siRNA sense strand
ugacccagacuucgcaugu

SEQ ID NO: 2189068 - RNA, 19 nt, Homo sapiens
  misc_RNA (1)...(19): siRNA sense strand
caacaauaucuccgucucu

SEQ ID NO: 2189069 - RNA, 19 nt, Homo sapiens
  misc_RNA (1)...(19): siRNA sense strand
cauugucaguggaaacaca

SEQ ID NO: 2189070 - RNA, 19 nt, Homo sapiens
  misc_RNA (1)...(19): siRNA sense strand
ucagaugaggugcuagaga

SEQ ID NO: 2189071 - RNA, 19 nt, Homo sapiens
  misc_RNA (1)...(19): siRNA sense strand
ccagaacaccucuuauucc

SEQ ID NO: 2189072 - RNA, 19 nt, Homo sapiens
  misc_RNA (1)...(19): siRNA sense strand
acaagaccaacuucaccua

SEQ ID NO: 2189073 - RNA, 19 nt, Homo sapiens
  misc_RNA (1)...(19): siRNA sense strand
gaucuccauccuacauugu

SEQ ID NO: 2189074 - RNA, 19 nt, Homo sapiens
  misc_RNA (1)...(19): siRNA sense strand
aaagcagcccugucucuuc

SEQ ID NO: 2189075 - RNA, 19 nt, Homo sapiens
  misc_RNA (1)...(19): siRNA sense strand
ucuauuacuucaugacacu

SEQ ID NO: 2189076 - RNA, 19 nt, Homo sapiens
  misc_RNA (1)...(19): siRNA sense strand
cagcaccagcuuugucuuc

SEQ ID NO: 2189077 - RNA, 19 nt, Homo sapiens
  misc_RNA (1)...(19): siRNA sense strand
gugucggccugaauucaug

SEQ ID NO: 2189078 - RNA, 19 nt, Homo sapiens
  misc_RNA (1)...(19): siRNA sense strand
uaaaguucaccucuacaag

SEQ ID NO: 2189079 - RNA, 19 nt, Homo sapiens
  misc_RNA (1)...(19): siRNA sense strand
gcagaggagcuggccuguu

SEQ ID NO: 2189080 - RNA, 19 nt, Homo sapiens
  misc_RNA (1)...(19): siRNA sense strand
cagcguggcuacgaaugca

SEQ ID NO: 2189081 - RNA, 19 nt, Homo sapiens
  misc_RNA (1)...(19): siRNA sense strand
ccaccaucgugcggauuga

SEQ ID NO: 2189082 - RNA, 19 nt, Homo sapiens
  misc_RNA (1)...(19): siRNA sense strand
ccuggaauuucgcgacauc

SEQ ID NO: 2189083 - RNA, 19 nt, Homo sapiens
  misc_RNA (1)...(19): siRNA sense strand
caucaauaucugugagguu

SEQ ID NO: 2189084 - RNA, 19 nt, Homo sapiens
  misc_RNA (1)...(19): siRNA sense strand
guguggcccuggagugcaa

SEQ ID NO: 2189085 - RNA, 19 nt, Homo sapiens
  misc_RNA (1)...(19): siRNA sense strand
cgugcucauugccuauaaa

SEQ ID NO: 2189086 - RNA, 19 nt, Homo sapiens
  misc_RNA (1)...(19): siRNA sense strand
cugcucauccucaacaaga

SEQ ID NO: 2189087 - RNA, 19 nt, Homo sapiens
  misc_RNA (1)...(19): siRNA sense strand
gaacaccucuuauuccuau

SEQ ID NO: 2189088 - RNA, 19 nt, Homo sapiens
  misc_RNA (1)...(19): siRNA sense strand
ggaaggagcacaucaauau

SEQ ID NO: 2189089 - RNA, 19 nt, Homo sapiens
  misc_RNA (1)...(19): siRNA sense strand
gcaaucagauccagugcua

SEQ ID NO: 2189090 - RNA, 19 nt, Homo sapiens
  misc_RNA (1)...(19): siRNA sense strand
gaacagaucgugugugaga

SEQ ID NO: 2189091 - RNA, 19 nt, Homo sapiens
  misc_RNA (1)...(19): siRNA sense strand
gaacuacacugugcugguu

SEQ ID NO: 2189092 - RNA, 19 nt, Homo sapiens
  misc_RNA (1)...(19): siRNA sense strand
gaauaaaguucaccucuac

SEQ ID NO: 2189093 - RNA, 19 nt, Homo sapiens
  misc_RNA (1)...(19): siRNA sense strand
cagaggagcuggccuguug

SEQ ID NO: 2189094 - RNA, 19 nt, Homo sapiens
  misc_RNA (1)...(19): siRNA sense strand
cagaacagaucguguguga

SEQ ID NO: 2189095 - RNA, 19 nt, Homo sapiens
  misc_RNA (1)...(19): siRNA sense strand
caacccagcucagaauaaa

SEQ ID NO: 2189096 - RNA, 19 nt, Homo sapiens
  misc_RNA (1)...(19): siRNA sense strand
ccucacagcucuauuacuu

SEQ ID NO: 2189097 - RNA, 19 nt, Homo sapiens
  misc_RNA (1)...(19): siRNA sense strand
gaaccugggccuggaauuu

SEQ ID NO: 2189098 - RNA, 19 nt, Homo sapiens
  misc_RNA (1)...(19): siRNA sense strand
agaauaaaguucaccucua

SEQ ID NO: 2189099 - RNA, 19 nt, Homo sapiens
  misc_RNA (1)...(19): siRNA sense strand
ggagcugucuggugccaaa

SEQ ID NO: 2189100 - RNA, 19 nt, Homo sapiens
  misc_RNA (1)...(19): siRNA sense strand
gcacgcccaucauccuaaa

SEQ ID NO: 2189101 - RNA, 19 nt, Homo sapiens
  misc_RNA (1)...(19): siRNA sense strand
gcaagucccgcgaaaguga

SEQ ID NO: 2189102 - RNA, 19 nt, Homo sapiens
  misc_RNA (1)...(19): siRNA sense strand
gguccucacagcucuauua

SEQ ID NO: 2189103 - RNA, 19 nt, Homo sapiens
  misc_RNA (1)...(19): siRNA sense strand
ucacagcucuauuacuuca

SEQ ID NO: 2189104 - RNA, 19 nt, Homo sapiens
  misc_RNA (1)...(19): siRNA sense strand
gcaccagcuuugucuucua

SEQ ID NO: 2189105 - RNA, 19 nt, Homo sapiens
  misc_RNA (1)...(19): siRNA sense strand
cagaugaggugcuagagau

SEQ ID NO: 2189106 - RNA, 19 nt, Homo sapiens
  misc_RNA (1)...(19): siRNA sense strand
gcaacgugguggugauguu

SEQ ID NO: 2189107 - RNA, 19 nt, Homo sapiens
  misc_RNA (1)...(19): siRNA sense strand
ggaaugggcacuucaacau

SEQ ID NO: 2189108 - RNA, 19 nt, Homo sapiens
  misc_RNA (1)...(19): siRNA sense strand
gaagcaacgugguggugau

SEQ ID NO: 2189109 - RNA, 19 nt, Homo sapiens
  misc_RNA (1)...(19): siRNA sense strand
gcccuuuaguggaugguua

SEQ ID NO: 2189110 - RNA, 19 nt, Homo sapiens
  misc_RNA (1)...(19): siRNA sense strand
aaacgcaagucccgcgaaa

SEQ ID NO: 2189111 - RNA, 19 nt, Homo sapiens
  misc_RNA (1)...(19): siRNA sense strand
gggaaggagcacaucaaua

SEQ ID NO: 2189112 - RNA, 19 nt, Homo sapiens
  misc_RNA (1)...(19): siRNA sense strand
gaaagcagcccugucucuu

SEQ ID NO: 2189113 - RNA, 19 nt, Homo sapiens
  misc_RNA (1)...(19): siRNA sense strand
gugcagcccuuuaguggau

SEQ ID NO: 2189114 - RNA, 19 nt, Homo sapiens
  misc_RNA (1)...(19): siRNA sense strand
agaccaacuucaccuacua

SEQ ID NO: 2189115 - RNA, 19 nt, Homo sapiens
  misc_RNA (1)...(19): siRNA sense strand
ggauggagaucaacaaccu

SEQ ID NO: 2189116 - RNA, 19 nt, Homo sapiens
  misc_RNA (1)...(19): siRNA sense strand
cauccuacauugucugcaa

SEQ ID NO: 2189117 - RNA, 19 nt, Homo sapiens
  misc_RNA (1)...(19): siRNA sense strand
ggaaagcagcccugucucu

SEQ ID NO: 2189118 - RNA, 19 nt, Homo sapiens
  misc_RNA (1)...(19): siRNA sense strand
ucugaacgcuacugagaug

SEQ ID NO: 2189119 - RNA, 19 nt, Homo sapiens
  misc_RNA (1)...(19): siRNA sense strand
ggcgucaacugcaccuuug

SEQ ID NO: 2189120 - RNA, 19 nt, Homo sapiens
  misc_RNA (1)...(19): siRNA sense strand
gcaacgugaagcugaacua

SEQ ID NO: 2189121 - RNA, 19 nt, Homo sapiens
  misc_RNA (1)...(19): siRNA sense strand
uuacaucccugcagaacag

SEQ ID NO: 2189122 - RNA, 19 nt, Homo sapiens
  misc_RNA (1)...(19): siRNA sense strand
ggugugagcgguccaagga

SEQ ID NO: 2189123 - RNA, 19 nt, Homo sapiens
  misc_RNA (1)...(19): siRNA sense strand
gccagaacaccucuuauuc

SEQ ID NO: 2189124 - RNA, 19 nt, Homo sapiens
  misc_RNA (1)...(19): siRNA sense strand
gacaacccagcucagaaua

SEQ ID NO: 2189125 - RNA, 19 nt, Homo sapiens
  misc_RNA (1)...(19): siRNA sense strand
ggacccaccuggaccucau

SEQ ID NO: 2189126 - RNA, 19 nt, Homo sapiens
  misc_RNA (1)...(19): siRNA sense strand
ggaccaccaugucguacag

SEQ ID NO: 2189127 - RNA, 19 nt, Homo sapiens
  misc_RNA (1)...(19): siRNA sense strand
cgagaggcccgaggaguuu

SEQ ID NO: 2189128 - RNA, 19 nt, Homo sapiens
  misc_RNA (1)...(19): siRNA sense strand
ggagugcagcccuuuagug

SEQ ID NO: 2189129 - RNA, 19 nt, Homo sapiens
  misc_RNA (1)...(19): siRNA sense strand
gaaggagcacaucaauauc

SEQ ID NO: 2189130 - RNA, 19 nt, Homo sapiens
  misc_RNA (1)...(19): siRNA sense strand
gaagggauggagaucaaca

SEQ ID NO: 2189131 - RNA, 19 nt, Homo sapiens
  misc_RNA (1)...(19): siRNA sense strand
gaugaggugcuagagauga

SEQ ID NO: 2189132 - RNA, 19 nt, Homo sapiens
  misc_RNA (1)...(19): siRNA sense strand
gacgguccaucccaacaau

SEQ ID NO: 2189133 - RNA, 19 nt, Homo sapiens
  misc_RNA (1)...(19): siRNA sense strand
caacgugguggugauguuu

SEQ ID NO: 2189134 - RNA, 19 nt, Homo sapiens
  misc_RNA (1)...(19): siRNA sense strand
ugacaacccagcucagaau

SEQ ID NO: 2189135 - RNA, 19 nt, Homo sapiens
  misc_RNA (1)...(19): siRNA sense strand
cagaacaccucuuauuccu

SEQ ID NO: 2189136 - RNA, 19 nt, Homo sapiens
  misc_RNA (1)...(19): siRNA sense strand
caacaccacauccucagau

SEQ ID NO: 2189137 - RNA, 19 nt, Homo sapiens
  misc_RNA (1)...(19): siRNA sense strand
cgaucuccauccuacauug

SEQ ID NO: 2189138 - RNA, 19 nt, Homo sapiens
  misc_RNA (1)...(19): siRNA sense strand
gagggaaggagcacaucaa

SEQ ID NO: 2189139 - RNA, 19 nt, Homo sapiens
  misc_RNA (1)...(19): siRNA sense strand
ucaagccuaucacgcugaa

SEQ ID NO: 2189140 - RNA, 19 nt, Homo sapiens
  misc_RNA (1)...(19): siRNA sense strand
caucguggccgugcucauu

SEQ ID NO: 2189141 - RNA, 19 nt, Homo sapiens
  misc_RNA (1)...(19): siRNA sense strand
ccagauccgugccaagcau

SEQ ID NO: 2189142 - RNA, 19 nt, Homo sapiens
  misc_RNA (1)...(19): siRNA sense strand
caacagcuccagcguacag

SEQ ID NO: 2189143 - RNA, 19 nt, Homo sapiens
  misc_RNA (1)...(19): siRNA sense strand
uugaggaccugucagagau

SEQ ID NO: 2189144 - RNA, 19 nt, Homo sapiens
  misc_RNA (1)...(19): siRNA sense strand
acagcucuauuacuucaug

SEQ ID NO: 2189145 - RNA, 19 nt, Homo sapiens
  misc_RNA (1)...(19): siRNA sense strand
aaaguucaccucuacaagu

SEQ ID NO: 2189146 - RNA, 19 nt, Homo sapiens
  misc_RNA (1)...(19): siRNA sense strand
ugccagaacaccucuuauu

SEQ ID NO: 2189147 - RNA, 19 nt, Homo sapiens
  misc_RNA (1)...(19): siRNA sense strand
gcaacaccacauccucaga

SEQ ID NO: 2189148 - RNA, 19 nt, Homo sapiens
  misc_RNA (1)...(19): siRNA sense strand
ccaggaaggccgagugaag

SEQ ID NO: 2189149 - RNA, 19 nt, Homo sapiens
  misc_RNA (1)...(19): siRNA sense strand
cgaggaguuuggcuucauc

SEQ ID NO: 2189150 - RNA, 19 nt, Homo sapiens
  misc_RNA (1)...(19): siRNA sense strand
caauaucugugagguucug

SEQ ID NO: 2189151 - RNA, 19 nt, Homo sapiens
  misc_RNA (1)...(19): siRNA sense strand
ggagggaaggagcacauca

SEQ ID NO: 2189152 - RNA, 19 nt, Homo sapiens
  misc_RNA (1)...(19): siRNA sense strand
aaguucaccucuacaagug

SEQ ID NO: 2189153 - RNA, 19 nt, Homo sapiens
  misc_RNA (1)...(19): siRNA sense strand
ggagcauugucaguggaaa

SEQ ID NO: 2189154 - RNA, 19 nt, Homo sapiens
  misc_RNA (1)...(19): siRNA sense strand
acacacccaucgccguaug

SEQ ID NO: 2189155 - RNA, 19 nt, Homo sapiens
  misc_RNA (1)...(19): siRNA sense strand
augaagggauggagaucaa

SEQ ID NO: 2189156 - RNA, 19 nt, Homo sapiens
  misc_RNA (1)...(19): siRNA sense strand
gaccaacuucaccuacuau

SEQ ID NO: 2189157 - RNA, 19 nt, Homo sapiens
  misc_RNA (1)...(19): siRNA sense strand
ggagaaccugggccuggaa

SEQ ID NO: 2189158 - RNA, 19 nt, Homo sapiens
  misc_RNA (1)...(19): siRNA sense strand
acaacccagcucagaauaa

SEQ ID NO: 2189159 - RNA, 19 nt, Homo sapiens
  misc_RNA (1)...(19): siRNA sense strand
caccuggaccucauacaga

SEQ ID NO: 2189160 - RNA, 19 nt, Homo sapiens
  misc_RNA (1)...(19): siRNA sense strand
caccagcuuugucuucuac

SEQ ID NO: 2189161 - RNA, 19 nt, Homo sapiens
  misc_RNA (1)...(19): siRNA sense strand
gaucugcguggcugugugu

SEQ ID NO: 2189162 - RNA, 19 nt, Homo sapiens
  misc_RNA (1)...(19): siRNA sense strand
gacccagacuucgcaugug

SEQ ID NO: 2189163 - RNA, 19 nt, Homo sapiens
  misc_RNA (1)...(19): siRNA sense strand
cagcucagaauaaaguuca

SEQ ID NO: 2189164 - RNA, 19 nt, Homo sapiens
  misc_RNA (1)...(19): siRNA sense strand
ugacagucguguggaaugg

SEQ ID NO: 2189165 - RNA, 19 nt, Homo sapiens
  misc_RNA (1)...(19): siRNA sense strand
acgaaugcauccucaacau

SEQ ID NO: 2189166 - RNA, 19 nt, Homo sapiens
  misc_RNA (1)...(19): siRNA sense strand
uggaggugaucaagccuau

SEQ ID NO: 2189167 - RNA, 19 nt, Homo sapiens
  misc_RNA (1)...(19): siRNA sense strand
ugacccagacuucgcaugu

SEQ ID NO: 2189168 - RNA, 19 nt, Homo sapiens
  misc_RNA (1)...(19): siRNA sense strand
caacaauaucuccgucucu

SEQ ID NO: 2189169 - RNA, 19 nt, Homo sapiens
  misc_RNA (1)...(19): siRNA sense strand
cauugucaguggaaacaca

SEQ ID NO: 2189170 - RNA, 19 nt, Homo sapiens
  misc_RNA (1)...(19): siRNA sense strand
ucagaugaggugcuagaga

SEQ ID NO: 2189171 - RNA, 19 nt, Homo sapiens
  misc_RNA (1)...(19): siRNA sense strand
ccagaacaccucuuauucc

SEQ ID NO: 2189172 - RNA, 19 nt, Homo sapiens
  misc_RNA (1)...(19): siRNA sense strand
acaagaccaacuucaccua

SEQ ID NO: 2189173 - RNA, 19 nt, Homo sapiens
  misc_RNA (1)...(19): siRNA sense strand
gaucuccauccuacauugu

SEQ ID NO: 2189174 - RNA, 19 nt, Homo sapiens
  misc_RNA (1)...(19): siRNA sense strand
aaagcagcccugucucuuc

SEQ ID NO: 2189175 - RNA, 19 nt, Homo sapiens
  misc_RNA (1)...(19): siRNA sense strand
ucuauuacuucaugacacu

SEQ ID NO: 2189176 - RNA, 19 nt, Homo sapiens
  misc_RNA (1)...(19): siRNA sense strand
cagcaccagcuuugucuuc

SEQ ID NO: 2189177 - RNA, 19 nt, Homo sapiens
  misc_RNA (1)...(19): siRNA sense strand
gugucggccugaauucaug

SEQ ID NO: 2189178 - RNA, 19 nt, Homo sapiens
  misc_RNA (1)...(19): siRNA sense strand
uaaaguucaccucuacaag

SEQ ID NO: 2189179 - RNA, 19 nt, Homo sapiens
  misc_RNA (1)...(19): siRNA sense strand
gcagaggagcuggccuguu

SEQ ID NO: 2189180 - RNA, 19 nt, Homo sapiens
  misc_RNA (1)...(19): siRNA sense strand
cagcguggcuacgaaugca

SEQ ID NO: 2189181 - RNA, 19 nt, Homo sapiens
  misc_RNA (1)...(19): siRNA sense strand
ccaccaucgugcggauuga

SEQ ID NO: 2189182 - RNA, 19 nt, Homo sapiens
  misc_RNA (1)...(19): siRNA sense strand
ccuggaauuucgcgacauc

SEQ ID NO: 2189183 - RNA, 19 nt, Homo sapiens
  misc_RNA (1)...(19): siRNA sense strand
caucaauaucugugagguu

SEQ ID NO: 2189184 - RNA, 19 nt, Homo sapiens
  misc_RNA (1)...(19): siRNA sense strand
guguggcccuggagugcaa

SEQ ID NO: 2189185 - RNA, 19 nt, Homo sapiens
  misc_RNA (1)...(19): siRNA sense strand
cgugcucauugccuauaaa

SEQ ID NO: 2189186 - RNA, 19 nt, Homo sapiens
  misc_RNA (1)...(19): siRNA sense strand
cugcucauccucaacaaga

SEQ ID NO: 2189187 - RNA, 19 nt, Homo sapiens
  misc_RNA (1)...(19): siRNA sense strand
caacgaaucuucccacuua

SEQ ID NO: 2189188 - RNA, 19 nt, Homo sapiens
  misc_RNA (1)...(19): siRNA sense strand
gaagaacucugacucaaga

SEQ ID NO: 2189189 - RNA, 19 nt, Homo sapiens
  misc_RNA (1)...(19): siRNA sense strand
gagaccaaaucaaguauua

SEQ ID NO: 2189190 - RNA, 19 nt, Homo sapiens
  misc_RNA (1)...(19): siRNA sense strand
ugacagaucuaagacauua

SEQ ID NO: 2189191 - RNA, 19 nt, Homo sapiens
  misc_RNA (1)...(19): siRNA sense strand
cgaaagaccuggaaucaau

SEQ ID NO: 2189192 - RNA, 19 nt, Homo sapiens
  misc_RNA (1)...(19): siRNA sense strand
gugauucucucuuggauua

SEQ ID NO: 2189193 - RNA, 19 nt, Homo sapiens
  misc_RNA (1)...(19): siRNA sense strand
ugaaaggcuuccuagauua

SEQ ID NO: 2189194 - RNA, 19 nt, Homo sapiens
  misc_RNA (1)...(19): siRNA sense strand
gaagaaauggaaagacaua

SEQ ID NO: 2189195 - RNA, 19 nt, Homo sapiens
  misc_RNA (1)...(19): siRNA sense strand
gaggauauguucaugaaau

SEQ ID NO: 2189196 - RNA, 19 nt, Homo sapiens
  misc_RNA (1)...(19): siRNA sense strand
caaggaagcuacugugguu

SEQ ID NO: 2189197 - RNA, 19 nt, Homo sapiens
  misc_RNA (1)...(19): siRNA sense strand
ggaagacuauucagacaga

SEQ ID NO: 2189198 - RNA, 19 nt, Homo sapiens
  misc_RNA (1)...(19): siRNA sense strand
ugaagcagccuguggauua

SEQ ID NO: 2189199 - RNA, 19 nt, Homo sapiens
  misc_RNA (1)...(19): siRNA sense strand
acaccaaccugcaagaaua

SEQ ID NO: 2189200 - RNA, 19 nt, Homo sapiens
  misc_RNA (1)...(19): siRNA sense strand
ggccaaggcucaucacauu

SEQ ID NO: 2189201 - RNA, 19 nt, Homo sapiens
  misc_RNA (1)...(19): siRNA sense strand
gacaauacuuugauguuug

SEQ ID NO: 2189202 - RNA, 19 nt, Homo sapiens
  misc_RNA (1)...(19): siRNA sense strand
caacagcucuuggaucaug

SEQ ID NO: 2189203 - RNA, 19 nt, Homo sapiens
  misc_RNA (1)...(19): siRNA sense strand
gcccugaccucuucacaaa

SEQ ID NO: 2189204 - RNA, 19 nt, Homo sapiens
  misc_RNA (1)...(19): siRNA sense strand
gaauacgaauaccaauuga

SEQ ID NO: 2189205 - RNA, 19 nt, Homo sapiens
  misc_RNA (1)...(19): siRNA sense strand
ccugaccucuucacaaaua

SEQ ID NO: 2189206 - RNA, 19 nt, Homo sapiens
  misc_RNA (1)...(19): siRNA sense strand
gaacaacccaggccaagau

SEQ ID NO: 2189207 - RNA, 19 nt, Homo sapiens
  misc_RNA (1)...(19): siRNA sense strand
gaaacgagagguuauuuua

SEQ ID NO: 2189208 - RNA, 19 nt, Homo sapiens
  misc_RNA (1)...(19): siRNA sense strand
gagaauaggagaccaaauc

SEQ ID NO: 2189209 - RNA, 19 nt, Homo sapiens
  misc_RNA (1)...(19): siRNA sense strand
ggaaucaggaacagcuuua

SEQ ID NO: 2189210 - RNA, 19 nt, Homo sapiens
  misc_RNA (1)...(19): siRNA sense strand
cuaggaacaugguguauau

SEQ ID NO: 2189211 - RNA, 19 nt, Homo sapiens
  misc_RNA (1)...(19): siRNA sense strand
cuacacagauacuauuaga

SEQ ID NO: 2189212 - RNA, 19 nt, Homo sapiens
  misc_RNA (1)...(19): siRNA sense strand
gaucuacucuggguaacaa

SEQ ID NO: 2189213 - RNA, 19 nt, Homo sapiens
  misc_RNA (1)...(19): siRNA sense strand
caaaguggcagaauacgaa

SEQ ID NO: 2189214 - RNA, 19 nt, Homo sapiens
  misc_RNA (1)...(19): siRNA sense strand
ggacuacacagauacuauu

SEQ ID NO: 2189215 - RNA, 19 nt, Homo sapiens
  misc_RNA (1)...(19): siRNA sense strand
gaagggugguaauguggaa

SEQ ID NO: 2189216 - RNA, 19 nt, Homo sapiens
  misc_RNA (1)...(19): siRNA sense strand
gaaaggcuuccuagauuau

SEQ ID NO: 2189217 - RNA, 19 nt, Homo sapiens
  misc_RNA (1)...(19): siRNA sense strand
ccacuguucuauucugaaa

SEQ ID NO: 2189218 - RNA, 19 nt, Homo sapiens
  misc_RNA (1)...(19): siRNA sense strand
uagaagaaauggaaagaca

SEQ ID NO: 2189219 - RNA, 19 nt, Homo sapiens
  misc_RNA (1)...(19): siRNA sense strand
gaaauuaucgcuguuccuu

SEQ ID NO: 2189220 - RNA, 19 nt, Homo sapiens
  misc_RNA (1)...(19): siRNA sense strand
ggauuuauauggugucucu

SEQ ID NO: 2189221 - RNA, 19 nt, Homo sapiens
  misc_RNA (1)...(19): siRNA sense strand
uuaggaaacucaagugaug

SEQ ID NO: 2189222 - RNA, 19 nt, Homo sapiens
  misc_RNA (1)...(19): siRNA sense strand
gaaccaagggauuuauaug

SEQ ID NO: 2189223 - RNA, 19 nt, Homo sapiens
  misc_RNA (1)...(19): siRNA sense strand
cuacuuugcucauugcuau

SEQ ID NO: 2189224 - RNA, 19 nt, Homo sapiens
  misc_RNA (1)...(19): siRNA sense strand
gaauaccaauugacuguac

SEQ ID NO: 2189225 - RNA, 19 nt, Homo sapiens
  misc_RNA (1)...(19): siRNA sense strand
cacauuggcuggcagagaa

SEQ ID NO: 2189226 - RNA, 19 nt, Homo sapiens
  misc_RNA (1)...(19): siRNA sense strand
augaaaggcuuccuagauu

SEQ ID NO: 2189227 - RNA, 19 nt, Homo sapiens
  misc_RNA (1)...(19): siRNA sense strand
ugaagaugcuuacaaagag

SEQ ID NO: 2189228 - RNA, 19 nt, Homo sapiens
  misc_RNA (1)...(19): siRNA sense strand
auucucagcuugcaaguuu

SEQ ID NO: 2189229 - RNA, 19 nt, Homo sapiens
  misc_RNA (1)...(19): siRNA sense strand
gcucauugcuauccauaca

SEQ ID NO: 2189230 - RNA, 19 nt, Homo sapiens
  misc_RNA (1)...(19): siRNA sense strand
gcucuuggaucaugaaagg

SEQ ID NO: 2189231 - RNA, 19 nt, Homo sapiens
  misc_RNA (1)...(19): siRNA sense strand
ugauagacauuacauugga

SEQ ID NO: 2189232 - RNA, 19 nt, Homo sapiens
  misc_RNA (1)...(19): siRNA sense strand
gagaaacgagagguuauuu

SEQ ID NO: 2189233 - RNA, 19 nt, Homo sapiens
  misc_RNA (1)...(19): siRNA sense strand
ggaagcuacugugguuuau

SEQ ID NO: 2189234 - RNA, 19 nt, Homo sapiens
  misc_RNA (1)...(19): siRNA sense strand
caccaaaccugcuagucuu

SEQ ID NO: 2189235 - RNA, 19 nt, Homo sapiens
  misc_RNA (1)...(19): siRNA sense strand
gucuacagauucacuauug

SEQ ID NO: 2189236 - RNA, 19 nt, Homo sapiens
  misc_RNA (1)...(19): siRNA sense strand
ggaacaugguguauauuuu

SEQ ID NO: 2189237 - RNA, 19 nt, Homo sapiens
  misc_RNA (1)...(19): siRNA sense strand
gcacucauuucagcacgaa

SEQ ID NO: 2189238 - RNA, 19 nt, Homo sapiens
  misc_RNA (1)...(19): siRNA sense strand
gaacaggaagggugguaau

SEQ ID NO: 2189239 - RNA, 19 nt, Homo sapiens
  misc_RNA (1)...(19): siRNA sense strand
gccacacgcuugcuaggaa

SEQ ID NO: 2189240 - RNA, 19 nt, Homo sapiens
  misc_RNA (1)...(19): siRNA sense strand
gaucaugaaaggcuuccua

SEQ ID NO: 2189241 - RNA, 19 nt, Homo sapiens
  misc_RNA (1)...(19): siRNA sense strand
ggagaaacgagagguuauu

SEQ ID NO: 2189242 - RNA, 19 nt, Homo sapiens
  misc_RNA (1)...(19): siRNA sense strand
agaauacgaauaccaauug

SEQ ID NO: 2189243 - RNA, 19 nt, Homo sapiens
  misc_RNA (1)...(19): siRNA sense strand
gaaagaccuggaaucaaug

SEQ ID NO: 2189244 - RNA, 19 nt, Homo sapiens
  misc_RNA (1)...(19): siRNA sense strand
ggaacagcuuuaccaugga

SEQ ID NO: 2189245 - RNA, 19 nt, Homo sapiens
  misc_RNA (1)...(19): siRNA sense strand
gaagagcaaagaaggaaca

SEQ ID NO: 2189246 - RNA, 19 nt, Homo sapiens
  misc_RNA (1)...(19): siRNA sense strand
gguagugacagaucuaaga

SEQ ID NO: 2189247 - RNA, 19 nt, Homo sapiens
  misc_RNA (1)...(19): siRNA sense strand
ucucuuacauggacauuuc

SEQ ID NO: 2189248 - RNA, 19 nt, Homo sapiens
  misc_RNA (1)...(19): siRNA sense strand
caggaauagucuacagauu

SEQ ID NO: 2189249 - RNA, 19 nt, Homo sapiens
  misc_RNA (1)...(19): siRNA sense strand
uauauggugucucuucuuc

SEQ ID NO: 2189250 - RNA, 19 nt, Homo sapiens
  misc_RNA (1)...(19): siRNA sense strand
ccugaaagaauuagaagaa

SEQ ID NO: 2189251 - RNA, 19 nt, Homo sapiens
  misc_RNA (1)...(19): siRNA sense strand
caggaagggugguaaugug

SEQ ID NO: 2189252 - RNA, 19 nt, Homo sapiens
  misc_RNA (1)...(19): siRNA sense strand
gacauuauacuuacagcaa

SEQ ID NO: 2189253 - RNA, 19 nt, Homo sapiens
  misc_RNA (1)...(19): siRNA sense strand
gaucuucauggccauagua

SEQ ID NO: 2189254 - RNA, 19 nt, Homo sapiens
  misc_RNA (1)...(19): siRNA sense strand
caugaaaggcuuccuagau

SEQ ID NO: 2189255 - RNA, 19 nt, Homo sapiens
  misc_RNA (1)...(19): siRNA sense strand
gcuaggaacaugguguaua

SEQ ID NO: 2189256 - RNA, 19 nt, Homo sapiens
  misc_RNA (1)...(19): siRNA sense strand
cgccauuauuucucucuua

SEQ ID NO: 2189257 - RNA, 19 nt, Homo sapiens
  misc_RNA (1)...(19): siRNA sense strand
uaggagaccaaaucaagua

SEQ ID NO: 2189258 - RNA, 19 nt, Homo sapiens
  misc_RNA (1)...(19): siRNA sense strand
gaagcagccuguggauuac

SEQ ID NO: 2189259 - RNA, 19 nt, Homo sapiens
  misc_RNA (1)...(19): siRNA sense strand
gauucucucuuggauuauu

SEQ ID NO: 2189260 - RNA, 19 nt, Homo sapiens
  misc_RNA (1)...(19): siRNA sense strand
aaacgaggcacucauuuca

SEQ ID NO: 2189261 - RNA, 19 nt, Homo sapiens
  misc_RNA (1)...(19): siRNA sense strand
uagucaaaguggcagaaua

SEQ ID NO: 2189262 - RNA, 19 nt, Homo sapiens
  misc_RNA (1)...(19): siRNA sense strand
acauggacauuucaauuuc

SEQ ID NO: 2189263 - RNA, 19 nt, Homo sapiens
  misc_RNA (1)...(19): siRNA sense strand
gcacgaaagaccuggaauc

SEQ ID NO: 2189264 - RNA, 19 nt, Homo sapiens
  misc_RNA (1)...(19): siRNA sense strand
caaacgaggcacucauuuc

SEQ ID NO: 2189265 - RNA, 19 nt, Homo sapiens
  misc_RNA (1)...(19): siRNA sense strand
gacuacacagauacuauua

SEQ ID NO: 2189266 - RNA, 19 nt, Homo sapiens
  misc_RNA (1)...(19): siRNA sense strand
uuucuggcaucaauaauga

SEQ ID NO: 2189267 - RNA, 19 nt, Homo sapiens
  misc_RNA (1)...(19): siRNA sense strand
cuucaucggugugcacuuu

SEQ ID NO: 2189268 - RNA, 19 nt, Homo sapiens
  misc_RNA (1)...(19): siRNA sense strand
guccugagccaguguauau

SEQ ID NO: 2189269 - RNA, 19 nt, Homo sapiens
  misc_RNA (1)...(19): siRNA sense strand
gagcaggaauagucuacag

SEQ ID NO: 2189270 - RNA, 19 nt, Homo sapiens
  misc_RNA (1)...(19): siRNA sense strand
uaauaugcgagcaggaaua

SEQ ID NO: 2189271 - RNA, 19 nt, Homo sapiens
  misc_RNA (1)...(19): siRNA sense strand
cagaauacgaauaccaauu

SEQ ID NO: 2189272 - RNA, 19 nt, Homo sapiens
  misc_RNA (1)...(19): siRNA sense strand
gauagacauuacauuggau

SEQ ID NO: 2189273 - RNA, 19 nt, Homo sapiens
  misc_RNA (1)...(19): siRNA sense strand
ccaaaccugcuagucuuua

SEQ ID NO: 2189274 - RNA, 19 nt, Homo sapiens
  misc_RNA (1)...(19): siRNA sense strand
gauucacuauugucaacuu

SEQ ID NO: 2189275 - RNA, 19 nt, Homo sapiens
  misc_RNA (1)...(19): siRNA sense strand
gaagacuauucagacagaa

SEQ ID NO: 2189276 - RNA, 19 nt, Homo sapiens
  misc_RNA (1)...(19): siRNA sense strand
uacagaagguagucaaagu

SEQ ID NO: 2189277 - RNA, 19 nt, Homo sapiens
  misc_RNA (1)...(19): siRNA sense strand
agacauauaacccuggaaa

SEQ ID NO: 2189278 - RNA, 19 nt, Homo sapiens
  misc_RNA (1)...(19): siRNA sense strand
caaguuuaauguccagaag

SEQ ID NO: 2189279 - RNA, 19 nt, Homo sapiens
  misc_RNA (1)...(19): siRNA sense strand
gaacucugacucaagaaag

SEQ ID NO: 2189280 - RNA, 19 nt, Homo sapiens
  misc_RNA (1)...(19): siRNA sense strand
gaauaggagaccaaaucaa

SEQ ID NO: 2189281 - RNA, 19 nt, Homo sapiens
  misc_RNA (1)...(19): siRNA sense strand
cugaagaugcuuacaaaga

SEQ ID NO: 2189282 - RNA, 19 nt, Homo sapiens
  misc_RNA (1)...(19): siRNA sense strand
aauuaucgcuguuccuuag

SEQ ID NO: 2189283 - RNA, 19 nt, Homo sapiens
  misc_RNA (1)...(19): siRNA sense strand
gcggaaggcugugauucug

SEQ ID NO: 2189284 - RNA, 19 nt, Homo sapiens
  misc_RNA (1)...(19): siRNA sense strand
gcaggaauagucuacagau

SEQ ID NO: 2189285 - RNA, 19 nt, Homo sapiens
  misc_RNA (1)...(19): siRNA sense strand
gguaaccgaacaccuuuga

SEQ ID NO: 2189286 - RNA, 19 nt, Homo sapiens
  misc_RNA (1)...(19): siRNA sense strand
gcaaguuuaauguccagaa

SEQ ID NO: 2189287 - RNA, 19 nt, Homo sapiens
  misc_RNA (1)...(19): siRNA sense strand
caacgaaucuucccacuua

SEQ ID NO: 2189288 - RNA, 19 nt, Homo sapiens
  misc_RNA (1)...(19): siRNA sense strand
gaagaacucugacucaaga

SEQ ID NO: 2189289 - RNA, 19 nt, Homo sapiens
  misc_RNA (1)...(19): siRNA sense strand
gagaccaaaucaaguauua

SEQ ID NO: 2189290 - RNA, 19 nt, Homo sapiens
  misc_RNA (1)...(19): siRNA sense strand
ugacagaucuaagacauua

SEQ ID NO: 2189291 - RNA, 19 nt, Homo sapiens
  misc_RNA (1)...(19): siRNA sense strand
cgaaagaccuggaaucaau

SEQ ID NO: 2189292 - RNA, 19 nt, Homo sapiens
  misc_RNA (1)...(19): siRNA sense strand
gugauucucucuuggauua

SEQ ID NO: 2189293 - RNA, 19 nt, Homo sapiens
  misc_RNA (1)...(19): siRNA sense strand
ugaaaggcuuccuagauua

SEQ ID NO: 2189294 - RNA, 19 nt, Homo sapiens
  misc_RNA (1)...(19): siRNA sense strand
gaagaaauggaaagacaua

SEQ ID NO: 2189295 - RNA, 19 nt, Homo sapiens
  misc_RNA (1)...(19): siRNA sense strand
gaggauauguucaugaaau

SEQ ID NO: 2189296 - RNA, 19 nt, Homo sapiens
  misc_RNA (1)...(19): siRNA sense strand
caaggaagcuacugugguu

SEQ ID NO: 2189297 - RNA, 19 nt, Homo sapiens
  misc_RNA (1)...(19): siRNA sense strand
ggaagacuauucagacaga

SEQ ID NO: 2189298 - RNA, 19 nt, Homo sapiens
  misc_RNA (1)...(19): siRNA sense strand
ugaagcagccuguggauua

SEQ ID NO: 2189299 - RNA, 19 nt, Homo sapiens
  misc_RNA (1)...(19): siRNA sense strand
acaccaaccugcaagaaua

SEQ ID NO: 2189300 - RNA, 19 nt, Homo sapiens
  misc_RNA (1)...(19): siRNA sense strand
ggccaaggcucaucacauu

SEQ ID NO: 2189301 - RNA, 19 nt, Homo sapiens
  misc_RNA (1)...(19): siRNA sense strand
gacaauacuuugauguuug

SEQ ID NO: 2189302 - RNA, 19 nt, Homo sapiens
  misc_RNA (1)...(19): siRNA sense strand
caacagcucuuggaucaug

SEQ ID NO: 2189303 - RNA, 19 nt, Homo sapiens
  misc_RNA (1)...(19): siRNA sense strand
gcccugaccucuucacaaa

SEQ ID NO: 2189304 - RNA, 19 nt, Homo sapiens
  misc_RNA (1)...(19): siRNA sense strand
gaauacgaauaccaauuga

SEQ ID NO: 2189305 - RNA, 19 nt, Homo sapiens
  misc_RNA (1)...(19): siRNA sense strand
ccugaccucuucacaaaua

SEQ ID NO: 2189306 - RNA, 19 nt, Homo sapiens
  misc_RNA (1)...(19): siRNA sense strand
gaacaacccaggccaagau

SEQ ID NO: 2189307 - RNA, 19 nt, Homo sapiens
  misc_RNA (1)...(19): siRNA sense strand
gaaacgagagguuauuuua

SEQ ID NO: 2189308 - RNA, 19 nt, Homo sapiens
  misc_RNA (1)...(19): siRNA sense strand
gagaauaggagaccaaauc

SEQ ID NO: 2189309 - RNA, 19 nt, Homo sapiens
  misc_RNA (1)...(19): siRNA sense strand
ggaaucaggaacagcuuua

SEQ ID NO: 2189310 - RNA, 19 nt, Homo sapiens
  misc_RNA (1)...(19): siRNA sense strand
cuaggaacaugguguauau

SEQ ID NO: 2189311 - RNA, 19 nt, Homo sapiens
  misc_RNA (1)...(19): siRNA sense strand
cuacacagauacuauuaga

SEQ ID NO: 2189312 - RNA, 19 nt, Homo sapiens
  misc_RNA (1)...(19): siRNA sense strand
gaucuacucuggguaacaa

SEQ ID NO: 2189313 - RNA, 19 nt, Homo sapiens
  misc_RNA (1)...(19): siRNA sense strand
caaaguggcagaauacgaa

SEQ ID NO: 2189314 - RNA, 19 nt, Homo sapiens
  misc_RNA (1)...(19): siRNA sense strand
ggacuacacagauacuauu

SEQ ID NO: 2189315 - RNA, 19 nt, Homo sapiens
  misc_RNA (1)...(19): siRNA sense strand
gaagggugguaauguggaa

SEQ ID NO: 2189316 - RNA, 19 nt, Homo sapiens
  misc_RNA (1)...(19): siRNA sense strand
gaaaggcuuccuagauuau

SEQ ID NO: 2189317 - RNA, 19 nt, Homo sapiens
  misc_RNA (1)...(19): siRNA sense strand
ccacuguucuauucugaaa

SEQ ID NO: 2189318 - RNA, 19 nt, Homo sapiens
  misc_RNA (1)...(19): siRNA sense strand
uagaagaaauggaaagaca

SEQ ID NO: 2189319 - RNA, 19 nt, Homo sapiens
  misc_RNA (1)...(19): siRNA sense strand
gaaauuaucgcuguuccuu

SEQ ID NO: 2189320 - RNA, 19 nt, Homo sapiens
  misc_RNA (1)...(19): siRNA sense strand
ggauuuauauggugucucu

SEQ ID NO: 2189321 - RNA, 19 nt, Homo sapiens
  misc_RNA (1)...(19): siRNA sense strand
uuaggaaacucaagugaug

SEQ ID NO: 2189322 - RNA, 19 nt, Homo sapiens
  misc_RNA (1)...(19): siRNA sense strand
gaaccaagggauuuauaug

SEQ ID NO: 2189323 - RNA, 19 nt, Homo sapiens
  misc_RNA (1)...(19): siRNA sense strand
cuacuuugcucauugcuau

SEQ ID NO: 2189324 - RNA, 19 nt, Homo sapiens
  misc_RNA (1)...(19): siRNA sense strand
gaauaccaauugacuguac

SEQ ID NO: 2189325 - RNA, 19 nt, Homo sapiens
  misc_RNA (1)...(19): siRNA sense strand
cacauuggcuggcagagaa

SEQ ID NO: 2189326 - RNA, 19 nt, Homo sapiens
  misc_RNA (1)...(19): siRNA sense strand
augaaaggcuuccuagauu

SEQ ID NO: 2189327 - RNA, 19 nt, Homo sapiens
  misc_RNA (1)...(19): siRNA sense strand
ugaagaugcuuacaaagag

SEQ ID NO: 2189328 - RNA, 19 nt, Homo sapiens
  misc_RNA (1)...(19): siRNA sense strand
auucucagcuugcaaguuu

SEQ ID NO: 2189329 - RNA, 19 nt, Homo sapiens
  misc_RNA (1)...(19): siRNA sense strand
gcucauugcuauccauaca

SEQ ID NO: 2189330 - RNA, 19 nt, Homo sapiens
  misc_RNA (1)...(19): siRNA sense strand
gcucuuggaucaugaaagg

SEQ ID NO: 2189331 - RNA, 19 nt, Homo sapiens
  misc_RNA (1)...(19): siRNA sense strand
ugauagacauuacauugga

SEQ ID NO: 2189332 - RNA, 19 nt, Homo sapiens
  misc_RNA (1)...(19): siRNA sense strand
gagaaacgagagguuauuu

SEQ ID NO: 2189333 - RNA, 19 nt, Homo sapiens
  misc_RNA (1)...(19): siRNA sense strand
ggaagcuacugugguuuau

SEQ ID NO: 2189334 - RNA, 19 nt, Homo sapiens
  misc_RNA (1)...(19): siRNA sense strand
caccaaaccugcuagucuu

SEQ ID NO: 2189335 - RNA, 19 nt, Homo sapiens
  misc_RNA (1)...(19): siRNA sense strand
gucuacagauucacuauug

SEQ ID NO: 2189336 - RNA, 19 nt, Homo sapiens
  misc_RNA (1)...(19): siRNA sense strand
ggaacaugguguauauuuu

SEQ ID NO: 2189337 - RNA, 19 nt, Homo sapiens
  misc_RNA (1)...(19): siRNA sense strand
gcacucauuucagcacgaa

SEQ ID NO: 2189338 - RNA, 19 nt, Homo sapiens
  misc_RNA (1)...(19): siRNA sense strand
gaacaggaagggugguaau

SEQ ID NO: 2189339 - RNA, 19 nt, Homo sapiens
  misc_RNA (1)...(19): siRNA sense strand
gccacacgcuugcuaggaa

SEQ ID NO: 2189340 - RNA, 19 nt, Homo sapiens
  misc_RNA (1)...(19): siRNA sense strand
gaucaugaaaggcuuccua

SEQ ID NO: 2189341 - RNA, 19 nt, Homo sapiens
  misc_RNA (1)...(19): siRNA sense strand
ggagaaacgagagguuauu

SEQ ID NO: 2189342 - RNA, 19 nt, Homo sapiens
  misc_RNA (1)...(19): siRNA sense strand
agaauacgaauaccaauug

SEQ ID NO: 2189343 - RNA, 19 nt, Homo sapiens
  misc_RNA (1)...(19): siRNA sense strand
gaaagaccuggaaucaaug

SEQ ID NO: 2189344 - RNA, 19 nt, Homo sapiens
  misc_RNA (1)...(19): siRNA sense strand
ggaacagcuuuaccaugga

SEQ ID NO: 2189345 - RNA, 19 nt, Homo sapiens
  misc_RNA (1)...(19): siRNA sense strand
gaagagcaaagaaggaaca

SEQ ID NO: 2189346 - RNA, 19 nt, Homo sapiens
  misc_RNA (1)...(19): siRNA sense strand
gguagugacagaucuaaga

SEQ ID NO: 2189347 - RNA, 19 nt, Homo sapiens
  misc_RNA (1)...(19): siRNA sense strand
ucucuuacauggacauuuc

SEQ ID NO: 2189348 - RNA, 19 nt, Homo sapiens
  misc_RNA (1)...(19): siRNA sense strand
caggaauagucuacagauu

SEQ ID NO: 2189349 - RNA, 19 nt, Homo sapiens
  misc_RNA (1)...(19): siRNA sense strand
uauauggugucucuucuuc

SEQ ID NO: 2189350 - RNA, 19 nt, Homo sapiens
  misc_RNA (1)...(19): siRNA sense strand
ccugaaagaauuagaagaa

SEQ ID NO: 2189351 - RNA, 19 nt, Homo sapiens
  misc_RNA (1)...(19): siRNA sense strand
caggaagggugguaaugug

SEQ ID NO: 2189352 - RNA, 19 nt, Homo sapiens
  misc_RNA (1)...(19): siRNA sense strand
gacauuauacuuacagcaa

SEQ ID NO: 2189353 - RNA, 19 nt, Homo sapiens
  misc_RNA (1)...(19): siRNA sense strand
gaucuucauggccauagua

SEQ ID NO: 2189354 - RNA, 19 nt, Homo sapiens
  misc_RNA (1)...(19): siRNA sense strand
caugaaaggcuuccuagau

SEQ ID NO: 2189355 - RNA, 19 nt, Homo sapiens
  misc_RNA (1)...(19): siRNA sense strand
gcuaggaacaugguguaua

SEQ ID NO: 2189356 - RNA, 19 nt, Homo sapiens
  misc_RNA (1)...(19): siRNA sense strand
cgccauuauuucucucuua

SEQ ID NO: 2189357 - RNA, 19 nt, Homo sapiens
  misc_RNA (1)...(19): siRNA sense strand
uaggagaccaaaucaagua

SEQ ID NO: 2189358 - RNA, 19 nt, Homo sapiens
  misc_RNA (1)...(19): siRNA sense strand
gaagcagccuguggauuac

SEQ ID NO: 2189359 - RNA, 19 nt, Homo sapiens
  misc_RNA (1)...(19): siRNA sense strand
gauucucucuuggauuauu

SEQ ID NO: 2189360 - RNA, 19 nt, Homo sapiens
  misc_RNA (1)...(19): siRNA sense strand
aaacgaggcacucauuuca

SEQ ID NO: 2189361 - RNA, 19 nt, Homo sapiens
  misc_RNA (1)...(19): siRNA sense strand
uagucaaaguggcagaaua

SEQ ID NO: 2189362 - RNA, 19 nt, Homo sapiens
  misc_RNA (1)...(19): siRNA sense strand
acauggacauuucaauuuc

SEQ ID NO: 2189363 - RNA, 19 nt, Homo sapiens
  misc_RNA (1)...(19): siRNA sense strand
gcacgaaagaccuggaauc

SEQ ID NO: 2189364 - RNA, 19 nt, Homo sapiens
  misc_RNA (1)...(19): siRNA sense strand
caaacgaggcacucauuuc

SEQ ID NO: 2189365 - RNA, 19 nt, Homo sapiens
  misc_RNA (1)...(19): siRNA sense strand
gacuacacagauacuauua

SEQ ID NO: 2189366 - RNA, 19 nt, Homo sapiens
  misc_RNA (1)...(19): siRNA sense strand
uuucuggcaucaauaauga

SEQ ID NO: 2189367 - RNA, 19 nt, Homo sapiens
  misc_RNA (1)...(19): siRNA sense strand
cuucaucggugugcacuuu

SEQ ID NO: 2189368 - RNA, 19 nt, Homo sapiens
  misc_RNA (1)...(19): siRNA sense strand
guccugagccaguguauau

SEQ ID NO: 2189369 - RNA, 19 nt, Homo sapiens
  misc_RNA (1)...(19): siRNA sense strand
gagcaggaauagucuacag

SEQ ID NO: 2189370 - RNA, 19 nt, Homo sapiens
  misc_RNA (1)...(19): siRNA sense strand
uaauaugcgagcaggaaua

SEQ ID NO: 2189371 - RNA, 19 nt, Homo sapiens
  misc_RNA (1)...(19): siRNA sense strand
cagaauacgaauaccaauu

SEQ ID NO: 2189372 - RNA, 19 nt, Homo sapiens
  misc_RNA (1)...(19): siRNA sense strand
gauagacauuacauuggau

SEQ ID NO: 2189373 - RNA, 19 nt, Homo sapiens
  misc_RNA (1)...(19): siRNA sense strand
ccaaaccugcuagucuuua

SEQ ID NO: 2189374 - RNA, 19 nt, Homo sapiens
  misc_RNA (1)...(19): siRNA sense strand
gauucacuauugucaacuu

SEQ ID NO: 2189375 - RNA, 19 nt, Homo sapiens
  misc_RNA (1)...(19): siRNA sense strand
gaagacuauucagacagaa

SEQ ID NO: 2189376 - RNA, 19 nt, Homo sapiens
  misc_RNA (1)...(19): siRNA sense strand
uacagaagguagucaaagu

SEQ ID NO: 2189377 - RNA, 19 nt, Homo sapiens
  misc_RNA (1)...(19): siRNA sense strand
agacauauaacccuggaaa

SEQ ID NO: 2189378 - RNA, 19 nt, Homo sapiens
  misc_RNA (1)...(19): siRNA sense strand
caaguuuaauguccagaag

SEQ ID NO: 2189379 - RNA, 19 nt, Homo sapiens
  misc_RNA (1)...(19): siRNA sense strand
gaacucugacucaagaaag

SEQ ID NO: 2189380 - RNA, 19 nt, Homo sapiens
  misc_RNA (1)...(19): siRNA sense strand
gaauaggagaccaaaucaa

SEQ ID NO: 2189381 - RNA, 19 nt, Homo sapiens
  misc_RNA (1)...(19): siRNA sense strand
cugaagaugcuuacaaaga

SEQ ID NO: 2189382 - RNA, 19 nt, Homo sapiens
  misc_RNA (1)...(19): siRNA sense strand
aauuaucgcuguuccuuag

SEQ ID NO: 2189383 - RNA, 19 nt, Homo sapiens
  misc_RNA (1)...(19): siRNA sense strand
gcggaaggcugugauucug

SEQ ID NO: 2189384 - RNA, 19 nt, Homo sapiens
  misc_RNA (1)...(19): siRNA sense strand
gcaggaauagucuacagau

SEQ ID NO: 2189385 - RNA, 19 nt, Homo sapiens
  misc_RNA (1)...(19): siRNA sense strand
gguaaccgaacaccuuuga

SEQ ID NO: 2189386 - RNA, 19 nt, Homo sapiens
  misc_RNA (1)...(19): siRNA sense strand
gcaaguuuaauguccagaa

SEQ ID NO: 2189387 - RNA, 19 nt, Homo sapiens
  misc_RNA (1)...(19): siRNA sense strand
gagcaaggauugacuuaua

SEQ ID NO: 2189388 - RNA, 19 nt, Homo sapiens
  misc_RNA (1)...(19): siRNA sense strand
ggaacgagaugauaugauu

SEQ ID NO: 2189389 - RNA, 19 nt, Homo sapiens
  misc_RNA (1)...(19): siRNA sense strand
gcaaaugggugaccuguug

SEQ ID NO: 2189390 - RNA, 19 nt, Homo sapiens
  misc_RNA (1)...(19): siRNA sense strand
gaacuaagaaggcagauaa

SEQ ID NO: 2189391 - RNA, 19 nt, Homo sapiens
  misc_RNA (1)...(19): siRNA sense strand
gcaaagagguuucugaucu

SEQ ID NO: 2189392 - RNA, 19 nt, Homo sapiens
  misc_RNA (1)...(19): siRNA sense strand
gaagacaggugguggauuc

SEQ ID NO: 2189393 - RNA, 19 nt, Homo sapiens
  misc_RNA (1)...(19): siRNA sense strand
gaaggcagauaauguggua

SEQ ID NO: 2189394 - RNA, 19 nt, Homo sapiens
  misc_RNA (1)...(19): siRNA sense strand
gaagggaccuggaacacuu

SEQ ID NO: 2189395 - RNA, 19 nt, Homo sapiens
  misc_RNA (1)...(19): siRNA sense strand
ggagcaagauggauugauu

SEQ ID NO: 2189396 - RNA, 19 nt, Homo sapiens
  misc_RNA (1)...(19): siRNA sense strand
gaagagggaucagaacuug

SEQ ID NO: 2189397 - RNA, 19 nt, Homo sapiens
  misc_RNA (1)...(19): siRNA sense strand
gaaguggucugucgagaug

SEQ ID NO: 2189398 - RNA, 19 nt, Homo sapiens
  misc_RNA (1)...(19): siRNA sense strand
caagaaagaugagauugaa

SEQ ID NO: 2189399 - RNA, 19 nt, Homo sapiens
  misc_RNA (1)...(19): siRNA sense strand
gaaauauguucuagcaaga

SEQ ID NO: 2189400 - RNA, 19 nt, Homo sapiens
  misc_RNA (1)...(19): siRNA sense strand
gaagugggcuggcuauagu

SEQ ID NO: 2189401 - RNA, 19 nt, Homo sapiens
  misc_RNA (1)...(19): siRNA sense strand
gaucagaacuugaaaagaa

SEQ ID NO: 2189402 - RNA, 19 nt, Homo sapiens
  misc_RNA (1)...(19): siRNA sense strand
gaucaacaaucgagcuaaa

SEQ ID NO: 2189403 - RNA, 19 nt, Homo sapiens
  misc_RNA (1)...(19): siRNA sense strand
gaaucuggcucuucuuaug

SEQ ID NO: 2189404 - RNA, 19 nt, Homo sapiens
  misc_RNA (1)...(19): siRNA sense strand
cauggaaucuguaguggua

SEQ ID NO: 2189405 - RNA, 19 nt, Homo sapiens
  misc_RNA (1)...(19): siRNA sense strand
caagauggauugauugcuu

SEQ ID NO: 2189406 - RNA, 19 nt, Homo sapiens
  misc_RNA (1)...(19): siRNA sense strand
gcagauuugugccaaugua

SEQ ID NO: 2189407 - RNA, 19 nt, Homo sapiens
  misc_RNA (1)...(19): siRNA sense strand
ugaagaaacuguuagacuu

SEQ ID NO: 2189408 - RNA, 19 nt, Homo sapiens
  misc_RNA (1)...(19): siRNA sense strand
gaaauuauacugacagcuu

SEQ ID NO: 2189409 - RNA, 19 nt, Homo sapiens
  misc_RNA (1)...(19): siRNA sense strand
gaauuaaucccagaacuaa

SEQ ID NO: 2189410 - RNA, 19 nt, Homo sapiens
  misc_RNA (1)...(19): siRNA sense strand
guauugagguugaacuaaa

SEQ ID NO: 2189411 - RNA, 19 nt, Homo sapiens
  misc_RNA (1)...(19): siRNA sense strand
uacaagaugugcaugauaa

SEQ ID NO: 2189412 - RNA, 19 nt, Homo sapiens
  misc_RNA (1)...(19): siRNA sense strand
cagccaggauuucuuauuu

SEQ ID NO: 2189413 - RNA, 19 nt, Homo sapiens
  misc_RNA (1)...(19): siRNA sense strand
gaaaugcucuuuggagaag

SEQ ID NO: 2189414 - RNA, 19 nt, Homo sapiens
  misc_RNA (1)...(19): siRNA sense strand
gaacuugacguugauguaa

SEQ ID NO: 2189415 - RNA, 19 nt, Homo sapiens
  misc_RNA (1)...(19): siRNA sense strand
gagagacccuccaauguuc

SEQ ID NO: 2189416 - RNA, 19 nt, Homo sapiens
  misc_RNA (1)...(19): siRNA sense strand
ggaauuaaucccagaacua

SEQ ID NO: 2189417 - RNA, 19 nt, Homo sapiens
  misc_RNA (1)...(19): siRNA sense strand
gcucauuuccuucuaauuu

SEQ ID NO: 2189418 - RNA, 19 nt, Homo sapiens
  misc_RNA (1)...(19): siRNA sense strand
ugaagaugcucgaaugauu

SEQ ID NO: 2189419 - RNA, 19 nt, Homo sapiens
  misc_RNA (1)...(19): siRNA sense strand
acacaaaccugacuucauc

SEQ ID NO: 2189420 - RNA, 19 nt, Homo sapiens
  misc_RNA (1)...(19): siRNA sense strand
gaggaucgacaacugauua

SEQ ID NO: 2189421 - RNA, 19 nt, Homo sapiens
  misc_RNA (1)...(19): siRNA sense strand
cugaacagcucauuaaaga

SEQ ID NO: 2189422 - RNA, 19 nt, Homo sapiens
  misc_RNA (1)...(19): siRNA sense strand
ugaagacacucgcagcuuu

SEQ ID NO: 2189423 - RNA, 19 nt, Homo sapiens
  misc_RNA (1)...(19): siRNA sense strand
gaacagcucauuaaagaag

SEQ ID NO: 2189424 - RNA, 19 nt, Homo sapiens
  misc_RNA (1)...(19): siRNA sense strand
ggacauugaaggauuauau

SEQ ID NO: 2189425 - RNA, 19 nt, Homo sapiens
  misc_RNA (1)...(19): siRNA sense strand
gcaagaaagaugagauuga

SEQ ID NO: 2189426 - RNA, 19 nt, Homo sapiens
  misc_RNA (1)...(19): siRNA sense strand
ggaauuggcucugcugaca

SEQ ID NO: 2189427 - RNA, 19 nt, Homo sapiens
  misc_RNA (1)...(19): siRNA sense strand
gaguauaagucagaaacua

SEQ ID NO: 2189428 - RNA, 19 nt, Homo sapiens
  misc_RNA (1)...(19): siRNA sense strand
guggagagcucauuuccuu

SEQ ID NO: 2189429 - RNA, 19 nt, Homo sapiens
  misc_RNA (1)...(19): siRNA sense strand
caacacgcuuuacagauga

SEQ ID NO: 2189430 - RNA, 19 nt, Homo sapiens
  misc_RNA (1)...(19): siRNA sense strand
gaaacagagugcuaaugau

SEQ ID NO: 2189431 - RNA, 19 nt, Homo sapiens
  misc_RNA (1)...(19): siRNA sense strand
cagaaacaguuaauagaga

SEQ ID NO: 2189432 - RNA, 19 nt, Homo sapiens
  misc_RNA (1)...(19): siRNA sense strand
ggaauacacucagauacug

SEQ ID NO: 2189433 - RNA, 19 nt, Homo sapiens
  misc_RNA (1)...(19): siRNA sense strand
ccaccuggauuuagucuga

SEQ ID NO: 2189434 - RNA, 19 nt, Homo sapiens
  misc_RNA (1)...(19): siRNA sense strand
gagauaaaguaagcaagaa

SEQ ID NO: 2189435 - RNA, 19 nt, Homo sapiens
  misc_RNA (1)...(19): siRNA sense strand
caacugauuauucgugaua

SEQ ID NO: 2189436 - RNA, 19 nt, Homo sapiens
  misc_RNA (1)...(19): siRNA sense strand
ggaggcaacuaguagaaau

SEQ ID NO: 2189437 - RNA, 19 nt, Homo sapiens
  misc_RNA (1)...(19): siRNA sense strand
gccaagauccucuguugua

SEQ ID NO: 2189438 - RNA, 19 nt, Homo sapiens
  misc_RNA (1)...(19): siRNA sense strand
ggaaguugcugaggugguu

SEQ ID NO: 2189439 - RNA, 19 nt, Homo sapiens
  misc_RNA (1)...(19): siRNA sense strand
ggagaucccugagccuuug

SEQ ID NO: 2189440 - RNA, 19 nt, Homo sapiens
  misc_RNA (1)...(19): siRNA sense strand
aaccagaugucauggcuua

SEQ ID NO: 2189441 - RNA, 19 nt, Homo sapiens
  misc_RNA (1)...(19): siRNA sense strand
gaaacuaauggcuggauuu

SEQ ID NO: 2189442 - RNA, 19 nt, Homo sapiens
  misc_RNA (1)...(19): siRNA sense strand
uaaaguugguuggagauuu

SEQ ID NO: 2189443 - RNA, 19 nt, Homo sapiens
  misc_RNA (1)...(19): siRNA sense strand
caucuugaaucuucucauu

SEQ ID NO: 2189444 - RNA, 19 nt, Homo sapiens
  misc_RNA (1)...(19): siRNA sense strand
ggagauaaaguaagcaaga

SEQ ID NO: 2189445 - RNA, 19 nt, Homo sapiens
  misc_RNA (1)...(19): siRNA sense strand
guaaaugaagggucucuaa

SEQ ID NO: 2189446 - RNA, 19 nt, Homo sapiens
  misc_RNA (1)...(19): siRNA sense strand
ggaaugcaauccacccaau

SEQ ID NO: 2189447 - RNA, 19 nt, Homo sapiens
  misc_RNA (1)...(19): siRNA sense strand
ccagucaccuuuaggcaaa

SEQ ID NO: 2189448 - RNA, 19 nt, Homo sapiens
  misc_RNA (1)...(19): siRNA sense strand
gaaaucagcacuguacuuc

SEQ ID NO: 2189449 - RNA, 19 nt, Homo sapiens
  misc_RNA (1)...(19): siRNA sense strand
acaaggagaagaaaucaua

SEQ ID NO: 2189450 - RNA, 19 nt, Homo sapiens
  misc_RNA (1)...(19): siRNA sense strand
acacaugaccagaguauaa

SEQ ID NO: 2189451 - RNA, 19 nt, Homo sapiens
  misc_RNA (1)...(19): siRNA sense strand
cuaaugauuucuucagcua

SEQ ID NO: 2189452 - RNA, 19 nt, Homo sapiens
  misc_RNA (1)...(19): siRNA sense strand
ugaaacagagugcuaauga

SEQ ID NO: 2189453 - RNA, 19 nt, Homo sapiens
  misc_RNA (1)...(19): siRNA sense strand
ccagagaccugaugaacca

SEQ ID NO: 2189454 - RNA, 19 nt, Homo sapiens
  misc_RNA (1)...(19): siRNA sense strand
gcucacgucuaccaucauu

SEQ ID NO: 2189455 - RNA, 19 nt, Homo sapiens
  misc_RNA (1)...(19): siRNA sense strand
gcaauacuaauccagaauu

SEQ ID NO: 2189456 - RNA, 19 nt, Homo sapiens
  misc_RNA (1)...(19): siRNA sense strand
acaauucacucucgucuuc

SEQ ID NO: 2189457 - RNA, 19 nt, Homo sapiens
  misc_RNA (1)...(19): siRNA sense strand
cauacaggcucuugucaga

SEQ ID NO: 2189458 - RNA, 19 nt, Homo sapiens
  misc_RNA (1)...(19): siRNA sense strand
aaacagagugcuaaugauu

SEQ ID NO: 2189459 - RNA, 19 nt, Homo sapiens
  misc_RNA (1)...(19): siRNA sense strand
ugaagaugcagaagaauuu

SEQ ID NO: 2189460 - RNA, 19 nt, Homo sapiens
  misc_RNA (1)...(19): siRNA sense strand
gcuguucaccuucuugaua

SEQ ID NO: 2189461 - RNA, 19 nt, Homo sapiens
  misc_RNA (1)...(19): siRNA sense strand
ugaagaugcuccagggauu

SEQ ID NO: 2189462 - RNA, 19 nt, Homo sapiens
  misc_RNA (1)...(19): siRNA sense strand
acaacacgcuuuacagaug

SEQ ID NO: 2189463 - RNA, 19 nt, Homo sapiens
  misc_RNA (1)...(19): siRNA sense strand
gagaaucacuacaaaagaa

SEQ ID NO: 2189464 - RNA, 19 nt, Homo sapiens
  misc_RNA (1)...(19): siRNA sense strand
ucacaagaguggcaaagau

SEQ ID NO: 2189465 - RNA, 19 nt, Homo sapiens
  misc_RNA (1)...(19): siRNA sense strand
guagacagcuugguagaag

SEQ ID NO: 2189466 - RNA, 19 nt, Homo sapiens
  misc_RNA (1)...(19): siRNA sense strand
gcucucugcuuuauuacuu

SEQ ID NO: 2189467 - RNA, 19 nt, Homo sapiens
  misc_RNA (1)...(19): siRNA sense strand
uaugaaaacugccucaaua

SEQ ID NO: 2189468 - RNA, 19 nt, Homo sapiens
  misc_RNA (1)...(19): siRNA sense strand
ucuaauagucuguccuuua

SEQ ID NO: 2189469 - RNA, 19 nt, Homo sapiens
  misc_RNA (1)...(19): siRNA sense strand
ggagaaagcaguacagcau

SEQ ID NO: 2189470 - RNA, 19 nt, Homo sapiens
  misc_RNA (1)...(19): siRNA sense strand
ucaacuggcucuaauaguc

SEQ ID NO: 2189471 - RNA, 19 nt, Homo sapiens
  misc_RNA (1)...(19): siRNA sense strand
gugccaauguaauggaaua

SEQ ID NO: 2189472 - RNA, 19 nt, Homo sapiens
  misc_RNA (1)...(19): siRNA sense strand
ggagggagauaaaguaagc

SEQ ID NO: 2189473 - RNA, 19 nt, Homo sapiens
  misc_RNA (1)...(19): siRNA sense strand
ugacguugauguaaaugaa

SEQ ID NO: 2189474 - RNA, 19 nt, Homo sapiens
  misc_RNA (1)...(19): siRNA sense strand
ggaaaugcucuuuggagaa

SEQ ID NO: 2189475 - RNA, 19 nt, Homo sapiens
  misc_RNA (1)...(19): siRNA sense strand
gugccaagauccucuguug

SEQ ID NO: 2189476 - RNA, 19 nt, Homo sapiens
  misc_RNA (1)...(19): siRNA sense strand
gaaacugccugggcuccaa

SEQ ID NO: 2189477 - RNA, 19 nt, Homo sapiens
  misc_RNA (1)...(19): siRNA sense strand
cuaaacugcuuucccuuug

SEQ ID NO: 2189478 - RNA, 19 nt, Homo sapiens
  misc_RNA (1)...(19): siRNA sense strand
gaagaugaccguacuuugc

SEQ ID NO: 2189479 - RNA, 19 nt, Homo sapiens
  misc_RNA (1)...(19): siRNA sense strand
agaauugucuccguggaua

SEQ ID NO: 2189480 - RNA, 19 nt, Homo sapiens
  misc_RNA (1)...(19): siRNA sense strand
gaucgacaacugauuauuc

SEQ ID NO: 2189481 - RNA, 19 nt, Homo sapiens
  misc_RNA (1)...(19): siRNA sense strand
ucuuguagcugaaguaaau

SEQ ID NO: 2189482 - RNA, 19 nt, Homo sapiens
  misc_RNA (1)...(19): siRNA sense strand
gaaacaagaauccacaucu

SEQ ID NO: 2189483 - RNA, 19 nt, Homo sapiens
  misc_RNA (1)...(19): siRNA sense strand
ugguaaacauugccagaua

SEQ ID NO: 2189484 - RNA, 19 nt, Homo sapiens
  misc_RNA (1)...(19): siRNA sense strand
gaaugagucaccaauguug

SEQ ID NO: 2189485 - RNA, 19 nt, Homo sapiens
  misc_RNA (1)...(19): siRNA sense strand
cgacuaucaugggcucuua

SEQ ID NO: 2189486 - RNA, 19 nt, Homo sapiens
  misc_RNA (1)...(19): siRNA sense strand
guaugcagauggguaauga

SEQ ID NO: 2189487 - RNA, 19 nt, Homo sapiens
  misc_RNA (1)...(19): siRNA sense strand
gagcaaggauugacuuaua

SEQ ID NO: 2189488 - RNA, 19 nt, Homo sapiens
  misc_RNA (1)...(19): siRNA sense strand
ggaacgagaugauaugauu

SEQ ID NO: 2189489 - RNA, 19 nt, Homo sapiens
  misc_RNA (1)...(19): siRNA sense strand
gcaaaugggugaccuguug

SEQ ID NO: 2189490 - RNA, 19 nt, Homo sapiens
  misc_RNA (1)...(19): siRNA sense strand
gaacuaagaaggcagauaa

SEQ ID NO: 2189491 - RNA, 19 nt, Homo sapiens
  misc_RNA (1)...(19): siRNA sense strand
gcaaagagguuucugaucu

SEQ ID NO: 2189492 - RNA, 19 nt, Homo sapiens
  misc_RNA (1)...(19): siRNA sense strand
gaagacaggugguggauuc

SEQ ID NO: 2189493 - RNA, 19 nt, Homo sapiens
  misc_RNA (1)...(19): siRNA sense strand
gaaggcagauaauguggua

SEQ ID NO: 2189494 - RNA, 19 nt, Homo sapiens
  misc_RNA (1)...(19): siRNA sense strand
gaagggaccuggaacacuu

SEQ ID NO: 2189495 - RNA, 19 nt, Homo sapiens
  misc_RNA (1)...(19): siRNA sense strand
ggagcaagauggauugauu

SEQ ID NO: 2189496 - RNA, 19 nt, Homo sapiens
  misc_RNA (1)...(19): siRNA sense strand
gaagagggaucagaacuug

SEQ ID NO: 2189497 - RNA, 19 nt, Homo sapiens
  misc_RNA (1)...(19): siRNA sense strand
gaaguggucugucgagaug

SEQ ID NO: 2189498 - RNA, 19 nt, Homo sapiens
  misc_RNA (1)...(19): siRNA sense strand
caagaaagaugagauugaa

SEQ ID NO: 2189499 - RNA, 19 nt, Homo sapiens
  misc_RNA (1)...(19): siRNA sense strand
gaaauauguucuagcaaga

SEQ ID NO: 2189500 - RNA, 19 nt, Homo sapiens
  misc_RNA (1)...(19): siRNA sense strand
gaagugggcuggcuauagu

SEQ ID NO: 2189501 - RNA, 19 nt, Homo sapiens
  misc_RNA (1)...(19): siRNA sense strand
gaucagaacuugaaaagaa

SEQ ID NO: 2189502 - RNA, 19 nt, Homo sapiens
  misc_RNA (1)...(19): siRNA sense strand
gaucaacaaucgagcuaaa

SEQ ID NO: 2189503 - RNA, 19 nt, Homo sapiens
  misc_RNA (1)...(19): siRNA sense strand
gaaucuggcucuucuuaug

SEQ ID NO: 2189504 - RNA, 19 nt, Homo sapiens
  misc_RNA (1)...(19): siRNA sense strand
cauggaaucuguaguggua

SEQ ID NO: 2189505 - RNA, 19 nt, Homo sapiens
  misc_RNA (1)...(19): siRNA sense strand
caagauggauugauugcuu

SEQ ID NO: 2189506 - RNA, 19 nt, Homo sapiens
  misc_RNA (1)...(19): siRNA sense strand
gcagauuugugccaaugua

SEQ ID NO: 2189507 - RNA, 19 nt, Homo sapiens
  misc_RNA (1)...(19): siRNA sense strand
ugaagaaacuguuagacuu

SEQ ID NO: 2189508 - RNA, 19 nt, Homo sapiens
  misc_RNA (1)...(19): siRNA sense strand
gaaauuauacugacagcuu

SEQ ID NO: 2189509 - RNA, 19 nt, Homo sapiens
  misc_RNA (1)...(19): siRNA sense strand
gaauuaaucccagaacuaa

SEQ ID NO: 2189510 - RNA, 19 nt, Homo sapiens
  misc_RNA (1)...(19): siRNA sense strand
guauugagguugaacuaaa

SEQ ID NO: 2189511 - RNA, 19 nt, Homo sapiens
  misc_RNA (1)...(19): siRNA sense strand
uacaagaugugcaugauaa

SEQ ID NO: 2189512 - RNA, 19 nt, Homo sapiens
  misc_RNA (1)...(19): siRNA sense strand
cagccaggauuucuuauuu

SEQ ID NO: 2189513 - RNA, 19 nt, Homo sapiens
  misc_RNA (1)...(19): siRNA sense strand
gaaaugcucuuuggagaag

SEQ ID NO: 2189514 - RNA, 19 nt, Homo sapiens
  misc_RNA (1)...(19): siRNA sense strand
gaacuugacguugauguaa

SEQ ID NO: 2189515 - RNA, 19 nt, Homo sapiens
  misc_RNA (1)...(19): siRNA sense strand
gagagacccuccaauguuc

SEQ ID NO: 2189516 - RNA, 19 nt, Homo sapiens
  misc_RNA (1)...(19): siRNA sense strand
ggaauuaaucccagaacua

SEQ ID NO: 2189517 - RNA, 19 nt, Homo sapiens
  misc_RNA (1)...(19): siRNA sense strand
gcucauuuccuucuaauuu

SEQ ID NO: 2189518 - RNA, 19 nt, Homo sapiens
  misc_RNA (1)...(19): siRNA sense strand
ugaagaugcucgaaugauu

SEQ ID NO: 2189519 - RNA, 19 nt, Homo sapiens
  misc_RNA (1)...(19): siRNA sense strand
acacaaaccugacuucauc

SEQ ID NO: 2189520 - RNA, 19 nt, Homo sapiens
  misc_RNA (1)...(19): siRNA sense strand
gaggaucgacaacugauua

SEQ ID NO: 2189521 - RNA, 19 nt, Homo sapiens
  misc_RNA (1)...(19): siRNA sense strand
cugaacagcucauuaaaga

SEQ ID NO: 2189522 - RNA, 19 nt, Homo sapiens
  misc_RNA (1)...(19): siRNA sense strand
ugaagacacucgcagcuuu

SEQ ID NO: 2189523 - RNA, 19 nt, Homo sapiens
  misc_RNA (1)...(19): siRNA sense strand
gaacagcucauuaaagaag

SEQ ID NO: 2189524 - RNA, 19 nt, Homo sapiens
  misc_RNA (1)...(19): siRNA sense strand
ggacauugaaggauuauau

SEQ ID NO: 2189525 - RNA, 19 nt, Homo sapiens
  misc_RNA (1)...(19): siRNA sense strand
gcaagaaagaugagauuga

SEQ ID NO: 2189526 - RNA, 19 nt, Homo sapiens
  misc_RNA (1)...(19): siRNA sense strand
ggaauuggcucugcugaca

SEQ ID NO: 2189527 - RNA, 19 nt, Homo sapiens
  misc_RNA (1)...(19): siRNA sense strand
gaguauaagucagaaacua

SEQ ID NO: 2189528 - RNA, 19 nt, Homo sapiens
  misc_RNA (1)...(19): siRNA sense strand
guggagagcucauuuccuu

SEQ ID NO: 2189529 - RNA, 19 nt, Homo sapiens
  misc_RNA (1)...(19): siRNA sense strand
caacacgcuuuacagauga

SEQ ID NO: 2189530 - RNA, 19 nt, Homo sapiens
  misc_RNA (1)...(19): siRNA sense strand
gaaacagagugcuaaugau

SEQ ID NO: 2189531 - RNA, 19 nt, Homo sapiens
  misc_RNA (1)...(19): siRNA sense strand
cagaaacaguuaauagaga

SEQ ID NO: 2189532 - RNA, 19 nt, Homo sapiens
  misc_RNA (1)...(19): siRNA sense strand
ggaauacacucagauacug

SEQ ID NO: 2189533 - RNA, 19 nt, Homo sapiens
  misc_RNA (1)...(19): siRNA sense strand
ccaccuggauuuagucuga

SEQ ID NO: 2189534 - RNA, 19 nt, Homo sapiens
  misc_RNA (1)...(19): siRNA sense strand
gagauaaaguaagcaagaa

SEQ ID NO: 2189535 - RNA, 19 nt, Homo sapiens
  misc_RNA (1)...(19): siRNA sense strand
caacugauuauucgugaua

SEQ ID NO: 2189536 - RNA, 19 nt, Homo sapiens
  misc_RNA (1)...(19): siRNA sense strand
ggaggcaacuaguagaaau

SEQ ID NO: 2189537 - RNA, 19 nt, Homo sapiens
  misc_RNA (1)...(19): siRNA sense strand
gccaagauccucuguugua

SEQ ID NO: 2189538 - RNA, 19 nt, Homo sapiens
  misc_RNA (1)...(19): siRNA sense strand
ggaaguugcugaggugguu

SEQ ID NO: 2189539 - RNA, 19 nt, Homo sapiens
  misc_RNA (1)...(19): siRNA sense strand
ggagaucccugagccuuug

SEQ ID NO: 2189540 - RNA, 19 nt, Homo sapiens
  misc_RNA (1)...(19): siRNA sense strand
aaccagaugucauggcuua

SEQ ID NO: 2189541 - RNA, 19 nt, Homo sapiens
  misc_RNA (1)...(19): siRNA sense strand
gaaacuaauggcuggauuu

SEQ ID NO: 2189542 - RNA, 19 nt, Homo sapiens
  misc_RNA (1)...(19): siRNA sense strand
uaaaguugguuggagauuu

SEQ ID NO: 2189543 - RNA, 19 nt, Homo sapiens
  misc_RNA (1)...(19): siRNA sense strand
caucuugaaucuucucauu

SEQ ID NO: 2189544 - RNA, 19 nt, Homo sapiens
  misc_RNA (1)...(19): siRNA sense strand
ggagauaaaguaagcaaga

SEQ ID NO: 2189545 - RNA, 19 nt, Homo sapiens
  misc_RNA (1)...(19): siRNA sense strand
guaaaugaagggucucuaa

SEQ ID NO: 2189546 - RNA, 19 nt, Homo sapiens
  misc_RNA (1)...(19): siRNA sense strand
ggaaugcaauccacccaau

SEQ ID NO: 2189547 - RNA, 19 nt, Homo sapiens
  misc_RNA (1)...(19): siRNA sense strand
ccagucaccuuuaggcaaa

SEQ ID NO: 2189548 - RNA, 19 nt, Homo sapiens
  misc_RNA (1)...(19): siRNA sense strand
gaaaucagcacuguacuuc

SEQ ID NO: 2189549 - RNA, 19 nt, Homo sapiens
  misc_RNA (1)...(19): siRNA sense strand
acaaggagaagaaaucaua

SEQ ID NO: 2189550 - RNA, 19 nt, Homo sapiens
  misc_RNA (1)...(19): siRNA sense strand
acacaugaccagaguauaa

SEQ ID NO: 2189551 - RNA, 19 nt, Homo sapiens
  misc_RNA (1)...(19): siRNA sense strand
cuaaugauuucuucagcua

SEQ ID NO: 2189552 - RNA, 19 nt, Homo sapiens
  misc_RNA (1)...(19): siRNA sense strand
ugaaacagagugcuaauga

SEQ ID NO: 2189553 - RNA, 19 nt, Homo sapiens
  misc_RNA (1)...(19): siRNA sense strand
ccagagaccugaugaacca

SEQ ID NO: 2189554 - RNA, 19 nt, Homo sapiens
  misc_RNA (1)...(19): siRNA sense strand
gcucacgucuaccaucauu

SEQ ID NO: 2189555 - RNA, 19 nt, Homo sapiens
  misc_RNA (1)...(19): siRNA sense strand
gcaauacuaauccagaauu

SEQ ID NO: 2189556 - RNA, 19 nt, Homo sapiens
  misc_RNA (1)...(19): siRNA sense strand
acaauucacucucgucuuc

SEQ ID NO: 2189557 - RNA, 19 nt, Homo sapiens
  misc_RNA (1)...(19): siRNA sense strand
cauacaggcucuugucaga

SEQ ID NO: 2189558 - RNA, 19 nt, Homo sapiens
  misc_RNA (1)...(19): siRNA sense strand
aaacagagugcuaaugauu

SEQ ID NO: 2189559 - RNA, 19 nt, Homo sapiens
  misc_RNA (1)...(19): siRNA sense strand
ugaagaugcagaagaauuu

SEQ ID NO: 2189560 - RNA, 19 nt, Homo sapiens
  misc_RNA (1)...(19): siRNA sense strand
gcuguucaccuucuugaua

SEQ ID NO: 2189561 - RNA, 19 nt, Homo sapiens
  misc_RNA (1)...(19): siRNA sense strand
ugaagaugcuccagggauu

SEQ ID NO: 2189562 - RNA, 19 nt, Homo sapiens
  misc_RNA (1)...(19): siRNA sense strand
acaacacgcuuuacagaug

SEQ ID NO: 2189563 - RNA, 19 nt, Homo sapiens
  misc_RNA (1)...(19): siRNA sense strand
gagaaucacuacaaaagaa

SEQ ID NO: 2189564 - RNA, 19 nt, Homo sapiens
  misc_RNA (1)...(19): siRNA sense strand
ucacaagaguggcaaagau

SEQ ID NO: 2189565 - RNA, 19 nt, Homo sapiens
  misc_RNA (1)...(19): siRNA sense strand
guagacagcuugguagaag

SEQ ID NO: 2189566 - RNA, 19 nt, Homo sapiens
  misc_RNA (1)...(19): siRNA sense strand
gcucucugcuuuauuacuu

SEQ ID NO: 2189567 - RNA, 19 nt, Homo sapiens
  misc_RNA (1)...(19): siRNA sense strand
uaugaaaacugccucaaua

SEQ ID NO: 2189568 - RNA, 19 nt, Homo sapiens
  misc_RNA (1)...(19): siRNA sense strand
ucuaauagucuguccuuua

SEQ ID NO: 2189569 - RNA, 19 nt, Homo sapiens
  misc_RNA (1)...(19): siRNA sense strand
ggagaaagcaguacagcau

SEQ ID NO: 2189570 - RNA, 19 nt, Homo sapiens
  misc_RNA (1)...(19): siRNA sense strand
ucaacuggcucuaauaguc

SEQ ID NO: 2189571 - RNA, 19 nt, Homo sapiens
  misc_RNA (1)...(19): siRNA sense strand
gugccaauguaauggaaua

SEQ ID NO: 2189572 - RNA, 19 nt, Homo sapiens
  misc_RNA (1)...(19): siRNA sense strand
ggagggagauaaaguaagc

SEQ ID NO: 2189573 - RNA, 19 nt, Homo sapiens
  misc_RNA (1)...(19): siRNA sense strand
ugacguugauguaaaugaa

SEQ ID NO: 2189574 - RNA, 19 nt, Homo sapiens
  misc_RNA (1)...(19): siRNA sense strand
ggaaaugcucuuuggagaa

SEQ ID NO: 2189575 - RNA, 19 nt, Homo sapiens
  misc_RNA (1)...(19): siRNA sense strand
gugccaagauccucuguug

SEQ ID NO: 2189576 - RNA, 19 nt, Homo sapiens
  misc_RNA (1)...(19): siRNA sense strand
gaaacugccugggcuccaa

SEQ ID NO: 2189577 - RNA, 19 nt, Homo sapiens
  misc_RNA (1)...(19): siRNA sense strand
cuaaacugcuuucccuuug

SEQ ID NO: 2189578 - RNA, 19 nt, Homo sapiens
  misc_RNA (1)...(19): siRNA sense strand
gaagaugaccguacuuugc

SEQ ID NO: 2189579 - RNA, 19 nt, Homo sapiens
  misc_RNA (1)...(19): siRNA sense strand
agaauugucuccguggaua

SEQ ID NO: 2189580 - RNA, 19 nt, Homo sapiens
  misc_RNA (1)...(19): siRNA sense strand
gaucgacaacugauuauuc

SEQ ID NO: 2189581 - RNA, 19 nt, Homo sapiens
  misc_RNA (1)...(19): siRNA sense strand
ucuuguagcugaaguaaau

SEQ ID NO: 2189582 - RNA, 19 nt, Homo sapiens
  misc_RNA (1)...(19): siRNA sense strand
gaaacaagaauccacaucu

SEQ ID NO: 2189583 - RNA, 19 nt, Homo sapiens
  misc_RNA (1)...(19): siRNA sense strand
ugguaaacauugccagaua

SEQ ID NO: 2189584 - RNA, 19 nt, Homo sapiens
  misc_RNA (1)...(19): siRNA sense strand
gaaugagucaccaauguug

SEQ ID NO: 2189585 - RNA, 19 nt, Homo sapiens
  misc_RNA (1)...(19): siRNA sense strand
cgacuaucaugggcucuua

SEQ ID NO: 2189586 - RNA, 19 nt, Homo sapiens
  misc_RNA (1)...(19): siRNA sense strand
guaugcagauggguaauga

SEQ ID NO: 2189587 - RNA, 19 nt, Homo sapiens
  misc_RNA (1)...(19): siRNA sense strand
ucaacaccgucuacauuua

SEQ ID NO: 2189588 - RNA, 19 nt, Homo sapiens
  misc_RNA (1)...(19): siRNA sense strand
uuacagaucugggucauau

SEQ ID NO: 2189589 - RNA, 19 nt, Homo sapiens
  misc_RNA (1)...(19): siRNA sense strand
caucguggccuucaaguuu

SEQ ID NO: 2189590 - RNA, 19 nt, Homo sapiens
  misc_RNA (1)...(19): siRNA sense strand
gaaauaccgaggcuauaug

SEQ ID NO: 2189591 - RNA, 19 nt, Homo sapiens
  misc_RNA (1)...(19): siRNA sense strand
ucugguagcugcaaacuuc

SEQ ID NO: 2189592 - RNA, 19 nt, Homo sapiens
  misc_RNA (1)...(19): siRNA sense strand
auaccgaggcuauauguua

SEQ ID NO: 2189593 - RNA, 19 nt, Homo sapiens
  misc_RNA (1)...(19): siRNA sense strand
gcagaccuauuggaugcua

SEQ ID NO: 2189594 - RNA, 19 nt, Homo sapiens
  misc_RNA (1)...(19): siRNA sense strand
ggucugugguucaaaguca

SEQ ID NO: 2189595 - RNA, 19 nt, Homo sapiens
  misc_RNA (1)...(19): siRNA sense strand
cgaaauaccgaggcuauau

SEQ ID NO: 2189596 - RNA, 19 nt, Homo sapiens
  misc_RNA (1)...(19): siRNA sense strand
ggagcgcguugccaagaug

SEQ ID NO: 2189597 - RNA, 19 nt, Homo sapiens
  misc_RNA (1)...(19): siRNA sense strand
gaagauuugcagaccuauu

SEQ ID NO: 2189598 - RNA, 19 nt, Homo sapiens
  misc_RNA (1)...(19): siRNA sense strand
uuacacagcugaggucuac

SEQ ID NO: 2189599 - RNA, 19 nt, Homo sapiens
  misc_RNA (1)...(19): siRNA sense strand
aggaagauuugcagaccua

SEQ ID NO: 2189600 - RNA, 19 nt, Homo sapiens
  misc_RNA (1)...(19): siRNA sense strand
ggacuuggucugugguuca

SEQ ID NO: 2189601 - RNA, 19 nt, Homo sapiens
  misc_RNA (1)...(19): siRNA sense strand
gaaucugcccgguucaaug

SEQ ID NO: 2189602 - RNA, 19 nt, Homo sapiens
  misc_RNA (1)...(19): siRNA sense strand
cugauuggcuuccucuuca

SEQ ID NO: 2189603 - RNA, 19 nt, Homo sapiens
  misc_RNA (1)...(19): siRNA sense strand
ccaccacgaugcgcgcuuu

SEQ ID NO: 2189604 - RNA, 19 nt, Homo sapiens
  misc_RNA (1)...(19): siRNA sense strand
gguuaaucauaaagacuga

SEQ ID NO: 2189605 - RNA, 19 nt, Homo sapiens
  misc_RNA (1)...(19): siRNA sense strand
ggucauauggcuuggaauc

SEQ ID NO: 2189606 - RNA, 19 nt, Homo sapiens
  misc_RNA (1)...(19): siRNA sense strand
ggcuauauguuacccuugu

SEQ ID NO: 2189607 - RNA, 19 nt, Homo sapiens
  misc_RNA (1)...(19): siRNA sense strand
cuucaacaccgucuacauu

SEQ ID NO: 2189608 - RNA, 19 nt, Homo sapiens
  misc_RNA (1)...(19): siRNA sense strand
uuacggaccacauuacaga

SEQ ID NO: 2189609 - RNA, 19 nt, Homo sapiens
  misc_RNA (1)...(19): siRNA sense strand
caacaccgucuacauuuac

SEQ ID NO: 2189610 - RNA, 19 nt, Homo sapiens
  misc_RNA (1)...(19): siRNA sense strand
aagauuugcagaccuauug

SEQ ID NO: 2189611 - RNA, 19 nt, Homo sapiens
  misc_RNA (1)...(19): siRNA sense strand
gcugagggcucugguagcu

SEQ ID NO: 2189612 - RNA, 19 nt, Homo sapiens
  misc_RNA (1)...(19): siRNA sense strand
ggaccacauuacagaucug

SEQ ID NO: 2189613 - RNA, 19 nt, Homo sapiens
  misc_RNA (1)...(19): siRNA sense strand
gaaucucuuuugccuacua

SEQ ID NO: 2189614 - RNA, 19 nt, Homo sapiens
  misc_RNA (1)...(19): siRNA sense strand
cauauggcuuggaaucucu

SEQ ID NO: 2189615 - RNA, 19 nt, Homo sapiens
  misc_RNA (1)...(19): siRNA sense strand
aucguggccuucaaguuua

SEQ ID NO: 2189616 - RNA, 19 nt, Homo sapiens
  misc_RNA (1)...(19): siRNA sense strand
ucauauggcuuggaaucuc

SEQ ID NO: 2189617 - RNA, 19 nt, Homo sapiens
  misc_RNA (1)...(19): siRNA sense strand
gcucccugcucaucauugg

SEQ ID NO: 2189618 - RNA, 19 nt, Homo sapiens
  misc_RNA (1)...(19): siRNA sense strand
uaccgaggcuauauguuac

SEQ ID NO: 2189619 - RNA, 19 nt, Homo sapiens
  misc_RNA (1)...(19): siRNA sense strand
gggcucugguagcugcaaa

SEQ ID NO: 2189620 - RNA, 19 nt, Homo sapiens
  misc_RNA (1)...(19): siRNA sense strand
cacgaaauaccgaggcuau

SEQ ID NO: 2189621 - RNA, 19 nt, Homo sapiens
  misc_RNA (1)...(19): siRNA sense strand
ugggucauauggcuuggaa

SEQ ID NO: 2189622 - RNA, 19 nt, Homo sapiens
  misc_RNA (1)...(19): siRNA sense strand
gacuuggucugugguucaa

SEQ ID NO: 2189623 - RNA, 19 nt, Homo sapiens
  misc_RNA (1)...(19): siRNA sense strand
aaauaccgaggcuauaugu

SEQ ID NO: 2189624 - RNA, 19 nt, Homo sapiens
  misc_RNA (1)...(19): siRNA sense strand
cugcuacugccacauguuu

SEQ ID NO: 2189625 - RNA, 19 nt, Homo sapiens
  misc_RNA (1)...(19): siRNA sense strand
uucaacaccgucuacauuu

SEQ ID NO: 2189626 - RNA, 19 nt, Homo sapiens
  misc_RNA (1)...(19): siRNA sense strand
gacuaucggaccaugauca

SEQ ID NO: 2189627 - RNA, 19 nt, Homo sapiens
  misc_RNA (1)...(19): siRNA sense strand
aaucugcccgguucaaugu

SEQ ID NO: 2189628 - RNA, 19 nt, Homo sapiens
  misc_RNA (1)...(19): siRNA sense strand
gcuauauguuacccuuguc

SEQ ID NO: 2189629 - RNA, 19 nt, Homo sapiens
  misc_RNA (1)...(19): siRNA sense strand
auauuuacggaccacauua

SEQ ID NO: 2189630 - RNA, 19 nt, Homo sapiens
  misc_RNA (1)...(19): siRNA sense strand
aauauuuacggaccacauu

SEQ ID NO: 2189631 - RNA, 19 nt, Homo sapiens
  misc_RNA (1)...(19): siRNA sense strand
ucaacaccgucuacauuua

SEQ ID NO: 2189632 - RNA, 19 nt, Homo sapiens
  misc_RNA (1)...(19): siRNA sense strand
uuacagaucugggucauau

SEQ ID NO: 2189633 - RNA, 19 nt, Homo sapiens
  misc_RNA (1)...(19): siRNA sense strand
caucguggccuucaaguuu

SEQ ID NO: 2189634 - RNA, 19 nt, Homo sapiens
  misc_RNA (1)...(19): siRNA sense strand
gaaauaccgaggcuauaug

SEQ ID NO: 2189635 - RNA, 19 nt, Homo sapiens
  misc_RNA (1)...(19): siRNA sense strand
ucugguagcugcaaacuuc

SEQ ID NO: 2189636 - RNA, 19 nt, Homo sapiens
  misc_RNA (1)...(19): siRNA sense strand
auaccgaggcuauauguua

SEQ ID NO: 2189637 - RNA, 19 nt, Homo sapiens
  misc_RNA (1)...(19): siRNA sense strand
gcagaccuauuggaugcua

SEQ ID NO: 2189638 - RNA, 19 nt, Homo sapiens
  misc_RNA (1)...(19): siRNA sense strand
ggucugugguucaaaguca

SEQ ID NO: 2189639 - RNA, 19 nt, Homo sapiens
  misc_RNA (1)...(19): siRNA sense strand
ccuccuggcugacagauau

SEQ ID NO: 2189640 - RNA, 19 nt, Homo sapiens
  misc_RNA (1)...(19): siRNA sense strand
cgaaauaccgaggcuauau

SEQ ID NO: 2189641 - RNA, 19 nt, Homo sapiens
  misc_RNA (1)...(19): siRNA sense strand
ggagcgcguugccaagaug

SEQ ID NO: 2189642 - RNA, 19 nt, Homo sapiens
  misc_RNA (1)...(19): siRNA sense strand
gaagauuugcagaccuauu

SEQ ID NO: 2189643 - RNA, 19 nt, Homo sapiens
  misc_RNA (1)...(19): siRNA sense strand
uuacacagcugaggucuac

SEQ ID NO: 2189644 - RNA, 19 nt, Homo sapiens
  misc_RNA (1)...(19): siRNA sense strand
aggaagauuugcagaccua

SEQ ID NO: 2189645 - RNA, 19 nt, Homo sapiens
  misc_RNA (1)...(19): siRNA sense strand
ggacuuggucugugguuca

SEQ ID NO: 2189646 - RNA, 19 nt, Homo sapiens
  misc_RNA (1)...(19): siRNA sense strand
gaaucugcccgguucaaug

SEQ ID NO: 2189647 - RNA, 19 nt, Homo sapiens
  misc_RNA (1)...(19): siRNA sense strand
cugauuggcuuccucuuca

SEQ ID NO: 2189648 - RNA, 19 nt, Homo sapiens
  misc_RNA (1)...(19): siRNA sense strand
ccaccacgaugcgcgcuuu

SEQ ID NO: 2189649 - RNA, 19 nt, Homo sapiens
  misc_RNA (1)...(19): siRNA sense strand
gguuaaucauaaagacuga

SEQ ID NO: 2189650 - RNA, 19 nt, Homo sapiens
  misc_RNA (1)...(19): siRNA sense strand
ggucauauggcuuggaauc

SEQ ID NO: 2189651 - RNA, 19 nt, Homo sapiens
  misc_RNA (1)...(19): siRNA sense strand
ggcuauauguuacccuugu

SEQ ID NO: 2189652 - RNA, 19 nt, Homo sapiens
  misc_RNA (1)...(19): siRNA sense strand
cuucaacaccgucuacauu

SEQ ID NO: 2189653 - RNA, 19 nt, Homo sapiens
  misc_RNA (1)...(19): siRNA sense strand
uuacggaccacauuacaga

SEQ ID NO: 2189654 - RNA, 19 nt, Homo sapiens
  misc_RNA (1)...(19): siRNA sense strand
caacaccgucuacauuuac

SEQ ID NO: 2189655 - RNA, 19 nt, Homo sapiens
  misc_RNA (1)...(19): siRNA sense strand
aagauuugcagaccuauug

SEQ ID NO: 2189656 - RNA, 19 nt, Homo sapiens
  misc_RNA (1)...(19): siRNA sense strand
gcugagggcucugguagcu

SEQ ID NO: 2189657 - RNA, 19 nt, Homo sapiens
  misc_RNA (1)...(19): siRNA sense strand
ggaccacauuacagaucug

SEQ ID NO: 2189658 - RNA, 19 nt, Homo sapiens
  misc_RNA (1)...(19): siRNA sense strand
gaaucucuuuugccuacua

SEQ ID NO: 2189659 - RNA, 19 nt, Homo sapiens
  misc_RNA (1)...(19): siRNA sense strand
cauauggcuuggaaucucu

SEQ ID NO: 2189660 - RNA, 19 nt, Homo sapiens
  misc_RNA (1)...(19): siRNA sense strand
aucguggccuucaaguuua

SEQ ID NO: 2189661 - RNA, 19 nt, Homo sapiens
  misc_RNA (1)...(19): siRNA sense strand
ucauauggcuuggaaucuc

SEQ ID NO: 2189662 - RNA, 19 nt, Homo sapiens
  misc_RNA (1)...(19): siRNA sense strand
uaccgaggcuauauguuac

SEQ ID NO: 2189663 - RNA, 19 nt, Homo sapiens
  misc_RNA (1)...(19): siRNA sense strand
gggcucugguagcugcaaa

SEQ ID NO: 2189664 - RNA, 19 nt, Homo sapiens
  misc_RNA (1)...(19): siRNA sense strand
gcucccugcucaucauugg

SEQ ID NO: 2189665 - RNA, 19 nt, Homo sapiens
  misc_RNA (1)...(19): siRNA sense strand
cacgaaauaccgaggcuau

SEQ ID NO: 2189666 - RNA, 19 nt, Homo sapiens
  misc_RNA (1)...(19): siRNA sense strand
ugggucauauggcuuggaa

SEQ ID NO: 2189667 - RNA, 19 nt, Homo sapiens
  misc_RNA (1)...(19): siRNA sense strand
gacuuggucugugguucaa

SEQ ID NO: 2189668 - RNA, 19 nt, Homo sapiens
  misc_RNA (1)...(19): siRNA sense strand
aaauaccgaggcuauaugu

SEQ ID NO: 2189669 - RNA, 19 nt, Homo sapiens
  misc_RNA (1)...(19): siRNA sense strand
cugcuacugccacauguuu

SEQ ID NO: 2189670 - RNA, 19 nt, Homo sapiens
  misc_RNA (1)...(19): siRNA sense strand
uucaacaccgucuacauuu

SEQ ID NO: 2189671 - RNA, 19 nt, Homo sapiens
  misc_RNA (1)...(19): siRNA sense strand
gacuaucggaccaugauca

SEQ ID NO: 2189672 - RNA, 19 nt, Homo sapiens
  misc_RNA (1)...(19): siRNA sense strand
aaucugcccgguucaaugu

SEQ ID NO: 2189673 - RNA, 19 nt, Homo sapiens
  misc_RNA (1)...(19): siRNA sense strand
gcuauauguuacccuuguc

SEQ ID NO: 2189674 - RNA, 19 nt, Homo sapiens
  misc_RNA (1)...(19): siRNA sense strand
auauuuacggaccacauua

SEQ ID NO: 2189675 - RNA, 19 nt, Homo sapiens
  misc_RNA (1)...(19): siRNA sense strand
aauauuuacggaccacauu

SEQ ID NO: 2189676 - RNA, 19 nt, Homo sapiens
  misc_RNA (1)...(19): siRNA sense strand
ucaacaccgucuacauuua

SEQ ID NO: 2189677 - RNA, 19 nt, Homo sapiens
  misc_RNA (1)...(19): siRNA sense strand
uuacagaucugggucauau

SEQ ID NO: 2189678 - RNA, 19 nt, Homo sapiens
  misc_RNA (1)...(19): siRNA sense strand
caucguggccuucaaguuu

SEQ ID NO: 2189679 - RNA, 19 nt, Homo sapiens
  misc_RNA (1)...(19): siRNA sense strand
gaaauaccgaggcuauaug

SEQ ID NO: 2189680 - RNA, 19 nt, Homo sapiens
  misc_RNA (1)...(19): siRNA sense strand
ucugguagcugcaaacuuc

SEQ ID NO: 2189681 - RNA, 19 nt, Homo sapiens
  misc_RNA (1)...(19): siRNA sense strand
auaccgaggcuauauguua

SEQ ID NO: 2189682 - RNA, 19 nt, Homo sapiens
  misc_RNA (1)...(19): siRNA sense strand
gcagaccuauuggaugcua

SEQ ID NO: 2189683 - RNA, 19 nt, Homo sapiens
  misc_RNA (1)...(19): siRNA sense strand
ggucugugguucaaaguca

SEQ ID NO: 2189684 - RNA, 19 nt, Homo sapiens
  misc_RNA (1)...(19): siRNA sense strand
ccuccuggcugacagauau

SEQ ID NO: 2189685 - RNA, 19 nt, Homo sapiens
  misc_RNA (1)...(19): siRNA sense strand
cgaaauaccgaggcuauau

SEQ ID NO: 2189686 - RNA, 19 nt, Homo sapiens
  misc_RNA (1)...(19): siRNA sense strand
ggagcgcguugccaagaug

SEQ ID NO: 2189687 - RNA, 19 nt, Homo sapiens
  misc_RNA (1)...(19): siRNA sense strand
gaagauuugcagaccuauu

SEQ ID NO: 2189688 - RNA, 19 nt, Homo sapiens
  misc_RNA (1)...(19): siRNA sense strand
uuacacagcugaggucuac

SEQ ID NO: 2189689 - RNA, 19 nt, Homo sapiens
  misc_RNA (1)...(19): siRNA sense strand
aggaagauuugcagaccua

SEQ ID NO: 2189690 - RNA, 19 nt, Homo sapiens
  misc_RNA (1)...(19): siRNA sense strand
ggacuuggucugugguuca

SEQ ID NO: 2189691 - RNA, 19 nt, Homo sapiens
  misc_RNA (1)...(19): siRNA sense strand
gaaucugcccgguucaaug

SEQ ID NO: 2189692 - RNA, 19 nt, Homo sapiens
  misc_RNA (1)...(19): siRNA sense strand
cugauuggcuuccucuuca

SEQ ID NO: 2189693 - RNA, 19 nt, Homo sapiens
  misc_RNA (1)...(19): siRNA sense strand
ccaccacgaugcgcgcuuu

SEQ ID NO: 2189694 - RNA, 19 nt, Homo sapiens
  misc_RNA (1)...(19): siRNA sense strand
gguuaaucauaaagacuga

SEQ ID NO: 2189695 - RNA, 19 nt, Homo sapiens
  misc_RNA (1)...(19): siRNA sense strand
ggucauauggcuuggaauc

SEQ ID NO: 2189696 - RNA, 19 nt, Homo sapiens
  misc_RNA (1)...(19): siRNA sense strand
ggcuauauguuacccuugu

SEQ ID NO: 2189697 - RNA, 19 nt, Homo sapiens
  misc_RNA (1)...(19): siRNA sense strand
cuucaacaccgucuacauu

SEQ ID NO: 2189698 - RNA, 19 nt, Homo sapiens
  misc_RNA (1)...(19): siRNA sense strand
uuacggaccacauuacaga

SEQ ID NO: 2189699 - RNA, 19 nt, Homo sapiens
  misc_RNA (1)...(19): siRNA sense strand
caacaccgucuacauuuac

SEQ ID NO: 2189700 - RNA, 19 nt, Homo sapiens
  misc_RNA (1)...(19): siRNA sense strand
aagauuugcagaccuauug

SEQ ID NO: 2189701 - RNA, 19 nt, Homo sapiens
  misc_RNA (1)...(19): siRNA sense strand
gcugagggcucugguagcu

SEQ ID NO: 2189702 - RNA, 19 nt, Homo sapiens
  misc_RNA (1)...(19): siRNA sense strand
ggaccacauuacagaucug

SEQ ID NO: 2189703 - RNA, 19 nt, Homo sapiens
  misc_RNA (1)...(19): siRNA sense strand
gaaucucuuuugccuacua

SEQ ID NO: 2189704 - RNA, 19 nt, Homo sapiens
  misc_RNA (1)...(19): siRNA sense strand
cauauggcuuggaaucucu

SEQ ID NO: 2189705 - RNA, 19 nt, Homo sapiens
  misc_RNA (1)...(19): siRNA sense strand
aucguggccuucaaguuua

SEQ ID NO: 2189706 - RNA, 19 nt, Homo sapiens
  misc_RNA (1)...(19): siRNA sense strand
ucauauggcuuggaaucuc

SEQ ID NO: 2189707 - RNA, 19 nt, Homo sapiens
  misc_RNA (1)...(19): siRNA sense strand
uaccgaggcuauauguuac

SEQ ID NO: 2189708 - RNA, 19 nt, Homo sapiens
  misc_RNA (1)...(19): siRNA sense strand
gggcucugguagcugcaaa

SEQ ID NO: 2189709 - RNA, 19 nt, Homo sapiens
  misc_RNA (1)...(19): siRNA sense strand
gcucccugcucaucauugg

SEQ ID NO: 2189710 - RNA, 19 nt, Homo sapiens
  misc_RNA (1)...(19): siRNA sense strand
cacgaaauaccgaggcuau

SEQ ID NO: 2189711 - RNA, 19 nt, Homo sapiens
  misc_RNA (1)...(19): siRNA sense strand
ugggucauauggcuuggaa

SEQ ID NO: 2189712 - RNA, 19 nt, Homo sapiens
  misc_RNA (1)...(19): siRNA sense strand
gacuuggucugugguucaa

SEQ ID NO: 2189713 - RNA, 19 nt, Homo sapiens
  misc_RNA (1)...(19): siRNA sense strand
aaauaccgaggcuauaugu

SEQ ID NO: 2189714 - RNA, 19 nt, Homo sapiens
  misc_RNA (1)...(19): siRNA sense strand
cugcuacugccacauguuu

SEQ ID NO: 2189715 - RNA, 19 nt, Homo sapiens
  misc_RNA (1)...(19): siRNA sense strand
uucaacaccgucuacauuu

SEQ ID NO: 2189716 - RNA, 19 nt, Homo sapiens
  misc_RNA (1)...(19): siRNA sense strand
gacuaucggaccaugauca

SEQ ID NO: 2189717 - RNA, 19 nt, Homo sapiens
  misc_RNA (1)...(19): siRNA sense strand
aaucugcccgguucaaugu

SEQ ID NO: 2189718 - RNA, 19 nt, Homo sapiens
  misc_RNA (1)...(19): siRNA sense strand
gcuauauguuacccuuguc

SEQ ID NO: 2189719 - RNA, 19 nt, Homo sapiens
  misc_RNA (1)...(19): siRNA sense strand
auauuuacggaccacauua

SEQ ID NO: 2189720 - RNA, 19 nt, Homo sapiens
  misc_RNA (1)...(19): siRNA sense strand
aauauuuacggaccacauu

SEQ ID NO: 2189721 - RNA, 19 nt, Homo sapiens
  misc_RNA (1)...(19): siRNA sense strand
gaaacuaccuccuaucuug

SEQ ID NO: 2189722 - RNA, 19 nt, Homo sapiens
  misc_RNA (1)...(19): siRNA sense strand
ggaagauccucaaguauuu

SEQ ID NO: 2189723 - RNA, 19 nt, Homo sapiens
  misc_RNA (1)...(19): siRNA sense strand
gcacagcgcugcacaagug

SEQ ID NO: 2189724 - RNA, 19 nt, Homo sapiens
  misc_RNA (1)...(19): siRNA sense strand
gaaaccaucucuccaagaa

SEQ ID NO: 2189725 - RNA, 19 nt, Homo sapiens
  misc_RNA (1)...(19): siRNA sense strand
gaaagcagcaucucucuaa

SEQ ID NO: 2189726 - RNA, 19 nt, Homo sapiens
  misc_RNA (1)...(19): siRNA sense strand
gaagagcugugcaggagua

SEQ ID NO: 2189727 - RNA, 19 nt, Homo sapiens
  misc_RNA (1)...(19): siRNA sense strand
gcaggaauuuggugcuuua

SEQ ID NO: 2189728 - RNA, 19 nt, Homo sapiens
  misc_RNA (1)...(19): siRNA sense strand
gugcagaucuugaauauca

SEQ ID NO: 2189729 - RNA, 19 nt, Homo sapiens
  misc_RNA (1)...(19): siRNA sense strand
caaguggccuuaacagaaa

SEQ ID NO: 2189730 - RNA, 19 nt, Homo sapiens
  misc_RNA (1)...(19): siRNA sense strand
aggaagagcucacggauaa

SEQ ID NO: 2189731 - RNA, 19 nt, Homo sapiens
  misc_RNA (1)...(19): siRNA sense strand
ggaucaagauggagaaaga

SEQ ID NO: 2189732 - RNA, 19 nt, Homo sapiens
  misc_RNA (1)...(19): siRNA sense strand
guaaagagguggccgucaa

SEQ ID NO: 2189733 - RNA, 19 nt, Homo sapiens
  misc_RNA (1)...(19): siRNA sense strand
agaagcaacuccagaauga

SEQ ID NO: 2189734 - RNA, 19 nt, Homo sapiens
  misc_RNA (1)...(19): siRNA sense strand
ccacagaggugccacugaa

SEQ ID NO: 2189735 - RNA, 19 nt, Homo sapiens
  misc_RNA (1)...(19): siRNA sense strand
gcagacagauacacugaug

SEQ ID NO: 2189736 - RNA, 19 nt, Homo sapiens
  misc_RNA (1)...(19): siRNA sense strand
gaagaaaccaucucuccaa

SEQ ID NO: 2189737 - RNA, 19 nt, Homo sapiens
  misc_RNA (1)...(19): siRNA sense strand
gugcaggaguacaucauua

SEQ ID NO: 2189738 - RNA, 19 nt, Homo sapiens
  misc_RNA (1)...(19): siRNA sense strand
caagcaacaucaccauuga

SEQ ID NO: 2189739 - RNA, 19 nt, Homo sapiens
  misc_RNA (1)...(19): siRNA sense strand
gacgacauauugauuauuc

SEQ ID NO: 2189740 - RNA, 19 nt, Homo sapiens
  misc_RNA (1)...(19): siRNA sense strand
caauauccgucauaaaugu

SEQ ID NO: 2189741 - RNA, 19 nt, Homo sapiens
  misc_RNA (1)...(19): siRNA sense strand
caucuuggguuaccgaauu

SEQ ID NO: 2189742 - RNA, 19 nt, Homo sapiens
  misc_RNA (1)...(19): siRNA sense strand
aaagaucccuuccaagaau

SEQ ID NO: 2189743 - RNA, 19 nt, Homo sapiens
  misc_RNA (1)...(19): siRNA sense strand
gcacgcagcccuugcauuc

SEQ ID NO: 2189744 - RNA, 19 nt, Homo sapiens
  misc_RNA (1)...(19): siRNA sense strand
ucaaagaucccuuccaaga

SEQ ID NO: 2189745 - RNA, 19 nt, Homo sapiens
  misc_RNA (1)...(19): siRNA sense strand
uaugcucacuccaucauua

SEQ ID NO: 2189746 - RNA, 19 nt, Homo sapiens
  misc_RNA (1)...(19): siRNA sense strand
gcacaauaaagacgacaua

SEQ ID NO: 2189747 - RNA, 19 nt, Homo sapiens
  misc_RNA (1)...(19): siRNA sense strand
gcagagcccuuccaguauc

SEQ ID NO: 2189748 - RNA, 19 nt, Homo sapiens
  misc_RNA (1)...(19): siRNA sense strand
ccacgagccucauggagaa

SEQ ID NO: 2189749 - RNA, 19 nt, Homo sapiens
  misc_RNA (1)...(19): siRNA sense strand
gauuguggcuucccuaaca

SEQ ID NO: 2189750 - RNA, 19 nt, Homo sapiens
  misc_RNA (1)...(19): siRNA sense strand
ugacagcucucuuugaagu

SEQ ID NO: 2189751 - RNA, 19 nt, Homo sapiens
  misc_RNA (1)...(19): siRNA sense strand
ggcaauauccgucauaaau

SEQ ID NO: 2189752 - RNA, 19 nt, Homo sapiens
  misc_RNA (1)...(19): siRNA sense strand
ccacaaaucuugaguuuuc

SEQ ID NO: 2189753 - RNA, 19 nt, Homo sapiens
  misc_RNA (1)...(19): siRNA sense strand
gaagauccucaaguauuua

SEQ ID NO: 2189754 - RNA, 19 nt, Homo sapiens
  misc_RNA (1)...(19): siRNA sense strand
gcagaucccuagugugaag

SEQ ID NO: 2189755 - RNA, 19 nt, Homo sapiens
  misc_RNA (1)...(19): siRNA sense strand
aaugacagcucucuuugaa

SEQ ID NO: 2189756 - RNA, 19 nt, Homo sapiens
  misc_RNA (1)...(19): siRNA sense strand
guuccaaguucaaacagua

SEQ ID NO: 2189757 - RNA, 19 nt, Homo sapiens
  misc_RNA (1)...(19): siRNA sense strand
gcaucuuuguggcaacuua

SEQ ID NO: 2189758 - RNA, 19 nt, Homo sapiens
  misc_RNA (1)...(19): siRNA sense strand
cagcaucucucuaaugagu

SEQ ID NO: 2189759 - RNA, 19 nt, Homo sapiens
  misc_RNA (1)...(19): siRNA sense strand
guugagacauuuacauugu

SEQ ID NO: 2189760 - RNA, 19 nt, Homo sapiens
  misc_RNA (1)...(19): siRNA sense strand
cagacaagcuagacuuuca

SEQ ID NO: 2189761 - RNA, 19 nt, Homo sapiens
  misc_RNA (1)...(19): siRNA sense strand
aauaucaucuuugcgguua

SEQ ID NO: 2189762 - RNA, 19 nt, Homo sapiens
  misc_RNA (1)...(19): siRNA sense strand
ggucaagcuucccuucuga

SEQ ID NO: 2189763 - RNA, 19 nt, Homo sapiens
  misc_RNA (1)...(19): siRNA sense strand
uaacugagucuucuuuguu

SEQ ID NO: 2189764 - RNA, 19 nt, Homo sapiens
  misc_RNA (1)...(19): siRNA sense strand
caagaauguucgucacaga

SEQ ID NO: 2189765 - RNA, 19 nt, Homo sapiens
  misc_RNA (1)...(19): siRNA sense strand
gagagcagccaucaucuug

SEQ ID NO: 2189766 - RNA, 19 nt, Homo sapiens
  misc_RNA (1)...(19): siRNA sense strand
gaaguccucuugggucaga

SEQ ID NO: 2189767 - RNA, 19 nt, Homo sapiens
  misc_RNA (1)...(19): siRNA sense strand
gcacagcaguccucuccau

SEQ ID NO: 2189768 - RNA, 19 nt, Homo sapiens
  misc_RNA (1)...(19): siRNA sense strand
caacugugcuggccagaag

SEQ ID NO: 2189769 - RNA, 19 nt, Homo sapiens
  misc_RNA (1)...(19): siRNA sense strand
guacgguguugaucacuga

SEQ ID NO: 2189770 - RNA, 19 nt, Homo sapiens
  misc_RNA (1)...(19): siRNA sense strand
gcaauauccgucauaaaug

SEQ ID NO: 2189771 - RNA, 19 nt, Homo sapiens
  misc_RNA (1)...(19): siRNA sense strand
ucgcagagcccuuccagua

SEQ ID NO: 2189772 - RNA, 19 nt, Homo sapiens
  misc_RNA (1)...(19): siRNA sense strand
guggauaugaguaguguua

SEQ ID NO: 2189773 - RNA, 19 nt, Homo sapiens
  misc_RNA (1)...(19): siRNA sense strand
gagaaggaccggcucauca

SEQ ID NO: 2189774 - RNA, 19 nt, Homo sapiens
  misc_RNA (1)...(19): siRNA sense strand
caaagaucccuuccaagaa

SEQ ID NO: 2189775 - RNA, 19 nt, Homo sapiens
  misc_RNA (1)...(19): siRNA sense strand
gcacagacaagcuagacuu

SEQ ID NO: 2189776 - RNA, 19 nt, Homo sapiens
  misc_RNA (1)...(19): siRNA sense strand
guacagcucaucuacuuug

SEQ ID NO: 2189777 - RNA, 19 nt, Homo sapiens
  misc_RNA (1)...(19): siRNA sense strand
gaacucagcggcuccaucu

SEQ ID NO: 2189778 - RNA, 19 nt, Homo sapiens
  misc_RNA (1)...(19): siRNA sense strand
gaacacaacgcgacaacca

SEQ ID NO: 2189779 - RNA, 19 nt, Homo sapiens
  misc_RNA (1)...(19): siRNA sense strand
ucaaagaaguacugaggau

SEQ ID NO: 2189780 - RNA, 19 nt, Homo sapiens
  misc_RNA (1)...(19): siRNA sense strand
ggagaaagacgugggauca

SEQ ID NO: 2189781 - RNA, 19 nt, Homo sapiens
  misc_RNA (1)...(19): siRNA sense strand
caggacacauucuccauug

SEQ ID NO: 2189782 - RNA, 19 nt, Homo sapiens
  misc_RNA (1)...(19): siRNA sense strand
ggaauuuggugcuuuaucc

SEQ ID NO: 2189783 - RNA, 19 nt, Homo sapiens
  misc_RNA (1)...(19): siRNA sense strand
ggaguucaguuucuaucug

SEQ ID NO: 2189784 - RNA, 19 nt, Homo sapiens
  misc_RNA (1)...(19): siRNA sense strand
gauacuggcuucugcaacu

SEQ ID NO: 2189785 - RNA, 19 nt, Homo sapiens
  misc_RNA (1)...(19): siRNA sense strand
ugaccagacuccuuuaauc

SEQ ID NO: 2189786 - RNA, 19 nt, Homo sapiens
  misc_RNA (1)...(19): siRNA sense strand
ccacaagugcagacagaua

SEQ ID NO: 2189787 - RNA, 19 nt, Homo sapiens
  misc_RNA (1)...(19): siRNA sense strand
gcauucagcaggacacauu

SEQ ID NO: 2189788 - RNA, 19 nt, Homo sapiens
  misc_RNA (1)...(19): siRNA sense strand
gggcacagaugcagaucga

SEQ ID NO: 2189789 - RNA, 19 nt, Homo sapiens
  misc_RNA (1)...(19): siRNA sense strand
cuucggaccugauuaacaa

SEQ ID NO: 2189790 - RNA, 19 nt, Homo sapiens
  misc_RNA (1)...(19): siRNA sense strand
cuagugaucugcagucauc

SEQ ID NO: 2189791 - RNA, 19 nt, Homo sapiens
  misc_RNA (1)...(19): siRNA sense strand
acacugaugugaccacugu

SEQ ID NO: 2189792 - RNA, 19 nt, Homo sapiens
  misc_RNA (1)...(19): siRNA sense strand
gagaagcaacuccagaaug

SEQ ID NO: 2189793 - RNA, 19 nt, Homo sapiens
  misc_RNA (1)...(19): siRNA sense strand
cagcucaacuuaucucagu

SEQ ID NO: 2189794 - RNA, 19 nt, Homo sapiens
  misc_RNA (1)...(19): siRNA sense strand
guugaagcgucuacgguuu

SEQ ID NO: 2189795 - RNA, 19 nt, Homo sapiens
  misc_RNA (1)...(19): siRNA sense strand
agucaaagaucccuuccaa

SEQ ID NO: 2189796 - RNA, 19 nt, Homo sapiens
  misc_RNA (1)...(19): siRNA sense strand
acgaugagauggauaacuu

SEQ ID NO: 2189797 - RNA, 19 nt, Homo sapiens
  misc_RNA (1)...(19): siRNA sense strand
ccuccuaucuugagucuuc

SEQ ID NO: 2189798 - RNA, 19 nt, Homo sapiens
  misc_RNA (1)...(19): siRNA sense strand
caacuccucuugcauuugc

SEQ ID NO: 2189799 - RNA, 19 nt, Homo sapiens
  misc_RNA (1)...(19): siRNA sense strand
acaaguggccuuaacagaa

SEQ ID NO: 2189800 - RNA, 19 nt, Homo sapiens
  misc_RNA (1)...(19): siRNA sense strand
guacaucauuacagcaauc

SEQ ID NO: 2189801 - RNA, 19 nt, Homo sapiens
  misc_RNA (1)...(19): siRNA sense strand
ggauaugaguaguguuaca

SEQ ID NO: 2189802 - RNA, 19 nt, Homo sapiens
  misc_RNA (1)...(19): siRNA sense strand
gcaugaccgugcuggaaga

SEQ ID NO: 2189803 - RNA, 19 nt, Homo sapiens
  misc_RNA (1)...(19): siRNA sense strand
ccaaaucagugcucuagac

SEQ ID NO: 2189804 - RNA, 19 nt, Homo sapiens
  misc_RNA (1)...(19): siRNA sense strand
cgguacagcucaucuacuu

SEQ ID NO: 2189805 - RNA, 19 nt, Homo sapiens
  misc_RNA (1)...(19): siRNA sense strand
ugacuucacuuuucuggua

SEQ ID NO: 2189806 - RNA, 19 nt, Homo sapiens
  misc_RNA (1)...(19): siRNA sense strand
ggccacaagugcagacaga

SEQ ID NO: 2189807 - RNA, 19 nt, Homo sapiens
  misc_RNA (1)...(19): siRNA sense strand
gggauugccagcagaauug

SEQ ID NO: 2189808 - RNA, 19 nt, Homo sapiens
  misc_RNA (1)...(19): siRNA sense strand
caacaaucccugcaguaga

SEQ ID NO: 2189809 - RNA, 19 nt, Homo sapiens
  misc_RNA (1)...(19): siRNA sense strand
guacugaggauucacuuca

SEQ ID NO: 2189810 - RNA, 19 nt, Homo sapiens
  misc_RNA (1)...(19): siRNA sense strand
gcaggacacauucuccauu

SEQ ID NO: 2189811 - RNA, 19 nt, Homo sapiens
  misc_RNA (1)...(19): siRNA sense strand
cauuacccaugguuucuuu

SEQ ID NO: 2189812 - RNA, 19 nt, Homo sapiens
  misc_RNA (1)...(19): siRNA sense strand
gagcucagccaguggaaau

SEQ ID NO: 2189813 - RNA, 19 nt, Homo sapiens
  misc_RNA (1)...(19): siRNA sense strand
ccagagagcagccaucauc

SEQ ID NO: 2189814 - RNA, 19 nt, Homo sapiens
  misc_RNA (1)...(19): siRNA sense strand
ccuaaugacagcucucuuu

SEQ ID NO: 2189815 - RNA, 19 nt, Homo sapiens
  misc_RNA (1)...(19): siRNA sense strand
cauccgguccuuucguuua

SEQ ID NO: 2189816 - RNA, 19 nt, Homo sapiens
  misc_RNA (1)...(19): siRNA sense strand
acggaugguuucuccaaua

SEQ ID NO: 2189817 - RNA, 19 nt, Homo sapiens
  misc_RNA (1)...(19): siRNA sense strand
uuacagcaaucaaagaagu

SEQ ID NO: 2189818 - RNA, 19 nt, Homo sapiens
  misc_RNA (1)...(19): siRNA sense strand
gcagucaucucagcugucu

SEQ ID NO: 2189819 - RNA, 19 nt, Homo sapiens
  misc_RNA (1)...(19): siRNA sense strand
ccaagaacguuccaguuuu

SEQ ID NO: 2189820 - RNA, 19 nt, Homo sapiens
  misc_RNA (1)...(19): siRNA sense strand
ugagaaaggccuaaugaca

SEQ ID NO: 2189821 - RNA, 19 nt, Homo sapiens
  misc_RNA (1)...(19): siRNA sense strand
gaaacuaccuccuaucuug

SEQ ID NO: 2189822 - RNA, 19 nt, Homo sapiens
  misc_RNA (1)...(19): siRNA sense strand
ggaagauccucaaguauuu

SEQ ID NO: 2189823 - RNA, 19 nt, Homo sapiens
  misc_RNA (1)...(19): siRNA sense strand
gcacagcgcugcacaagug

SEQ ID NO: 2189824 - RNA, 19 nt, Homo sapiens
  misc_RNA (1)...(19): siRNA sense strand
gaaaccaucucuccaagaa

SEQ ID NO: 2189825 - RNA, 19 nt, Homo sapiens
  misc_RNA (1)...(19): siRNA sense strand
gaaagcagcaucucucuaa

SEQ ID NO: 2189826 - RNA, 19 nt, Homo sapiens
  misc_RNA (1)...(19): siRNA sense strand
gaagagcugugcaggagua

SEQ ID NO: 2189827 - RNA, 19 nt, Homo sapiens
  misc_RNA (1)...(19): siRNA sense strand
gcaggaauuuggugcuuua

SEQ ID NO: 2189828 - RNA, 19 nt, Homo sapiens
  misc_RNA (1)...(19): siRNA sense strand
gugcagaucuugaauauca

SEQ ID NO: 2189829 - RNA, 19 nt, Homo sapiens
  misc_RNA (1)...(19): siRNA sense strand
caaguggccuuaacagaaa

SEQ ID NO: 2189830 - RNA, 19 nt, Homo sapiens
  misc_RNA (1)...(19): siRNA sense strand
aggaagagcucacggauaa

SEQ ID NO: 2189831 - RNA, 19 nt, Homo sapiens
  misc_RNA (1)...(19): siRNA sense strand
ggaucaagauggagaaaga

SEQ ID NO: 2189832 - RNA, 19 nt, Homo sapiens
  misc_RNA (1)...(19): siRNA sense strand
guaaagagguggccgucaa

SEQ ID NO: 2189833 - RNA, 19 nt, Homo sapiens
  misc_RNA (1)...(19): siRNA sense strand
agaagcaacuccagaauga

SEQ ID NO: 2189834 - RNA, 19 nt, Homo sapiens
  misc_RNA (1)...(19): siRNA sense strand
ccacagaggugccacugaa

SEQ ID NO: 2189835 - RNA, 19 nt, Homo sapiens
  misc_RNA (1)...(19): siRNA sense strand
gcagacagauacacugaug

SEQ ID NO: 2189836 - RNA, 19 nt, Homo sapiens
  misc_RNA (1)...(19): siRNA sense strand
gaagaaaccaucucuccaa

SEQ ID NO: 2189837 - RNA, 19 nt, Homo sapiens
  misc_RNA (1)...(19): siRNA sense strand
gugcaggaguacaucauua

SEQ ID NO: 2189838 - RNA, 19 nt, Homo sapiens
  misc_RNA (1)...(19): siRNA sense strand
caagcaacaucaccauuga

SEQ ID NO: 2189839 - RNA, 19 nt, Homo sapiens
  misc_RNA (1)...(19): siRNA sense strand
gacgacauauugauuauuc

SEQ ID NO: 2189840 - RNA, 19 nt, Homo sapiens
  misc_RNA (1)...(19): siRNA sense strand
caauauccgucauaaaugu

SEQ ID NO: 2189841 - RNA, 19 nt, Homo sapiens
  misc_RNA (1)...(19): siRNA sense strand
caucuuggguuaccgaauu

SEQ ID NO: 2189842 - RNA, 19 nt, Homo sapiens
  misc_RNA (1)...(19): siRNA sense strand
aaagaucccuuccaagaau

SEQ ID NO: 2189843 - RNA, 19 nt, Homo sapiens
  misc_RNA (1)...(19): siRNA sense strand
gcacgcagcccuugcauuc

SEQ ID NO: 2189844 - RNA, 19 nt, Homo sapiens
  misc_RNA (1)...(19): siRNA sense strand
ucaaagaucccuuccaaga

SEQ ID NO: 2189845 - RNA, 19 nt, Homo sapiens
  misc_RNA (1)...(19): siRNA sense strand
uaugcucacuccaucauua

SEQ ID NO: 2189846 - RNA, 19 nt, Homo sapiens
  misc_RNA (1)...(19): siRNA sense strand
gcacaauaaagacgacaua

SEQ ID NO: 2189847 - RNA, 19 nt, Homo sapiens
  misc_RNA (1)...(19): siRNA sense strand
gcagagcccuuccaguauc

SEQ ID NO: 2189848 - RNA, 19 nt, Homo sapiens
  misc_RNA (1)...(19): siRNA sense strand
ccacgagccucauggagaa

SEQ ID NO: 2189849 - RNA, 19 nt, Homo sapiens
  misc_RNA (1)...(19): siRNA sense strand
gauuguggcuucccuaaca

SEQ ID NO: 2189850 - RNA, 19 nt, Homo sapiens
  misc_RNA (1)...(19): siRNA sense strand
ugacagcucucuuugaagu

SEQ ID NO: 2189851 - RNA, 19 nt, Homo sapiens
  misc_RNA (1)...(19): siRNA sense strand
ggcaauauccgucauaaau

SEQ ID NO: 2189852 - RNA, 19 nt, Homo sapiens
  misc_RNA (1)...(19): siRNA sense strand
ccacaaaucuugaguuuuc

SEQ ID NO: 2189853 - RNA, 19 nt, Homo sapiens
  misc_RNA (1)...(19): siRNA sense strand
gaagauccucaaguauuua

SEQ ID NO: 2189854 - RNA, 19 nt, Homo sapiens
  misc_RNA (1)...(19): siRNA sense strand
gcagaucccuagugugaag

SEQ ID NO: 2189855 - RNA, 19 nt, Homo sapiens
  misc_RNA (1)...(19): siRNA sense strand
aaugacagcucucuuugaa

SEQ ID NO: 2189856 - RNA, 19 nt, Homo sapiens
  misc_RNA (1)...(19): siRNA sense strand
guuccaaguucaaacagua

SEQ ID NO: 2189857 - RNA, 19 nt, Homo sapiens
  misc_RNA (1)...(19): siRNA sense strand
gcaucuuuguggcaacuua

SEQ ID NO: 2189858 - RNA, 19 nt, Homo sapiens
  misc_RNA (1)...(19): siRNA sense strand
cagcaucucucuaaugagu

SEQ ID NO: 2189859 - RNA, 19 nt, Homo sapiens
  misc_RNA (1)...(19): siRNA sense strand
guugagacauuuacauugu

SEQ ID NO: 2189860 - RNA, 19 nt, Homo sapiens
  misc_RNA (1)...(19): siRNA sense strand
cagacaagcuagacuuuca

SEQ ID NO: 2189861 - RNA, 19 nt, Homo sapiens
  misc_RNA (1)...(19): siRNA sense strand
aauaucaucuuugcgguua

SEQ ID NO: 2189862 - RNA, 19 nt, Homo sapiens
  misc_RNA (1)...(19): siRNA sense strand
ggucaagcuucccuucuga

SEQ ID NO: 2189863 - RNA, 19 nt, Homo sapiens
  misc_RNA (1)...(19): siRNA sense strand
uaacugagucuucuuuguu

SEQ ID NO: 2189864 - RNA, 19 nt, Homo sapiens
  misc_RNA (1)...(19): siRNA sense strand
caagaauguucgucacaga

SEQ ID NO: 2189865 - RNA, 19 nt, Homo sapiens
  misc_RNA (1)...(19): siRNA sense strand
gagagcagccaucaucuug

SEQ ID NO: 2189866 - RNA, 19 nt, Homo sapiens
  misc_RNA (1)...(19): siRNA sense strand
gaaguccucuugggucaga

SEQ ID NO: 2189867 - RNA, 19 nt, Homo sapiens
  misc_RNA (1)...(19): siRNA sense strand
gcacagcaguccucuccau

SEQ ID NO: 2189868 - RNA, 19 nt, Homo sapiens
  misc_RNA (1)...(19): siRNA sense strand
caacugugcuggccagaag

SEQ ID NO: 2189869 - RNA, 19 nt, Homo sapiens
  misc_RNA (1)...(19): siRNA sense strand
guacgguguugaucacuga

SEQ ID NO: 2189870 - RNA, 19 nt, Homo sapiens
  misc_RNA (1)...(19): siRNA sense strand
gcaauauccgucauaaaug

SEQ ID NO: 2189871 - RNA, 19 nt, Homo sapiens
  misc_RNA (1)...(19): siRNA sense strand
ucgcagagcccuuccagua

SEQ ID NO: 2189872 - RNA, 19 nt, Homo sapiens
  misc_RNA (1)...(19): siRNA sense strand
guggauaugaguaguguua

SEQ ID NO: 2189873 - RNA, 19 nt, Homo sapiens
  misc_RNA (1)...(19): siRNA sense strand
gagaaggaccggcucauca

SEQ ID NO: 2189874 - RNA, 19 nt, Homo sapiens
  misc_RNA (1)...(19): siRNA sense strand
caaagaucccuuccaagaa

SEQ ID NO: 2189875 - RNA, 19 nt, Homo sapiens
  misc_RNA (1)...(19): siRNA sense strand
gcacagacaagcuagacuu

SEQ ID NO: 2189876 - RNA, 19 nt, Homo sapiens
  misc_RNA (1)...(19): siRNA sense strand
guacagcucaucuacuuug

SEQ ID NO: 2189877 - RNA, 19 nt, Homo sapiens
  misc_RNA (1)...(19): siRNA sense strand
gaacucagcggcuccaucu

SEQ ID NO: 2189878 - RNA, 19 nt, Homo sapiens
  misc_RNA (1)...(19): siRNA sense strand
gaacacaacgcgacaacca

SEQ ID NO: 2189879 - RNA, 19 nt, Homo sapiens
  misc_RNA (1)...(19): siRNA sense strand
ucaaagaaguacugaggau

SEQ ID NO: 2189880 - RNA, 19 nt, Homo sapiens
  misc_RNA (1)...(19): siRNA sense strand
ggagaaagacgugggauca

SEQ ID NO: 2189881 - RNA, 19 nt, Homo sapiens
  misc_RNA (1)...(19): siRNA sense strand
caggacacauucuccauug

SEQ ID NO: 2189882 - RNA, 19 nt, Homo sapiens
  misc_RNA (1)...(19): siRNA sense strand
ggaauuuggugcuuuaucc

SEQ ID NO: 2189883 - RNA, 19 nt, Homo sapiens
  misc_RNA (1)...(19): siRNA sense strand
ggaguucaguuucuaucug

SEQ ID NO: 2189884 - RNA, 19 nt, Homo sapiens
  misc_RNA (1)...(19): siRNA sense strand
gauacuggcuucugcaacu

SEQ ID NO: 2189885 - RNA, 19 nt, Homo sapiens
  misc_RNA (1)...(19): siRNA sense strand
ugaccagacuccuuuaauc

SEQ ID NO: 2189886 - RNA, 19 nt, Homo sapiens
  misc_RNA (1)...(19): siRNA sense strand
ccacaagugcagacagaua

SEQ ID NO: 2189887 - RNA, 19 nt, Homo sapiens
  misc_RNA (1)...(19): siRNA sense strand
gcauucagcaggacacauu

SEQ ID NO: 2189888 - RNA, 19 nt, Homo sapiens
  misc_RNA (1)...(19): siRNA sense strand
gggcacagaugcagaucga

SEQ ID NO: 2189889 - RNA, 19 nt, Homo sapiens
  misc_RNA (1)...(19): siRNA sense strand
cuucggaccugauuaacaa

SEQ ID NO: 2189890 - RNA, 19 nt, Homo sapiens
  misc_RNA (1)...(19): siRNA sense strand
cuagugaucugcagucauc

SEQ ID NO: 2189891 - RNA, 19 nt, Homo sapiens
  misc_RNA (1)...(19): siRNA sense strand
acacugaugugaccacugu

SEQ ID NO: 2189892 - RNA, 19 nt, Homo sapiens
  misc_RNA (1)...(19): siRNA sense strand
gagaagcaacuccagaaug

SEQ ID NO: 2189893 - RNA, 19 nt, Homo sapiens
  misc_RNA (1)...(19): siRNA sense strand
cagcucaacuuaucucagu

SEQ ID NO: 2189894 - RNA, 19 nt, Homo sapiens
  misc_RNA (1)...(19): siRNA sense strand
guugaagcgucuacgguuu

SEQ ID NO: 2189895 - RNA, 19 nt, Homo sapiens
  misc_RNA (1)...(19): siRNA sense strand
agucaaagaucccuuccaa

SEQ ID NO: 2189896 - RNA, 19 nt, Homo sapiens
  misc_RNA (1)...(19): siRNA sense strand
acgaugagauggauaacuu

SEQ ID NO: 2189897 - RNA, 19 nt, Homo sapiens
  misc_RNA (1)...(19): siRNA sense strand
ccuccuaucuugagucuuc

SEQ ID NO: 2189898 - RNA, 19 nt, Homo sapiens
  misc_RNA (1)...(19): siRNA sense strand
caacuccucuugcauuugc

SEQ ID NO: 2189899 - RNA, 19 nt, Homo sapiens
  misc_RNA (1)...(19): siRNA sense strand
acaaguggccuuaacagaa

SEQ ID NO: 2189900 - RNA, 19 nt, Homo sapiens
  misc_RNA (1)...(19): siRNA sense strand
guacaucauuacagcaauc

SEQ ID NO: 2189901 - RNA, 19 nt, Homo sapiens
  misc_RNA (1)...(19): siRNA sense strand
ggauaugaguaguguuaca

SEQ ID NO: 2189902 - RNA, 19 nt, Homo sapiens
  misc_RNA (1)...(19): siRNA sense strand
gcaugaccgugcuggaaga

SEQ ID NO: 2189903 - RNA, 19 nt, Homo sapiens
  misc_RNA (1)...(19): siRNA sense strand
ccaaaucagugcucuagac

SEQ ID NO: 2189904 - RNA, 19 nt, Homo sapiens
  misc_RNA (1)...(19): siRNA sense strand
cgguacagcucaucuacuu

SEQ ID NO: 2189905 - RNA, 19 nt, Homo sapiens
  misc_RNA (1)...(19): siRNA sense strand
ugacuucacuuuucuggua

SEQ ID NO: 2189906 - RNA, 19 nt, Homo sapiens
  misc_RNA (1)...(19): siRNA sense strand
ggccacaagugcagacaga

SEQ ID NO: 2189907 - RNA, 19 nt, Homo sapiens
  misc_RNA (1)...(19): siRNA sense strand
gggauugccagcagaauug

SEQ ID NO: 2189908 - RNA, 19 nt, Homo sapiens
  misc_RNA (1)...(19): siRNA sense strand
caacaaucccugcaguaga

SEQ ID NO: 2189909 - RNA, 19 nt, Homo sapiens
  misc_RNA (1)...(19): siRNA sense strand
guacugaggauucacuuca

SEQ ID NO: 2189910 - RNA, 19 nt, Homo sapiens
  misc_RNA (1)...(19): siRNA sense strand
gcaggacacauucuccauu

SEQ ID NO: 2189911 - RNA, 19 nt, Homo sapiens
  misc_RNA (1)...(19): siRNA sense strand
cauuacccaugguuucuuu

SEQ ID NO: 2189912 - RNA, 19 nt, Homo sapiens
  misc_RNA (1)...(19): siRNA sense strand
gagcucagccaguggaaau

SEQ ID NO: 2189913 - RNA, 19 nt, Homo sapiens
  misc_RNA (1)...(19): siRNA sense strand
ccagagagcagccaucauc

SEQ ID NO: 2189914 - RNA, 19 nt, Homo sapiens
  misc_RNA (1)...(19): siRNA sense strand
ccuaaugacagcucucuuu

SEQ ID NO: 2189915 - RNA, 19 nt, Homo sapiens
  misc_RNA (1)...(19): siRNA sense strand
cauccgguccuuucguuua

SEQ ID NO: 2189916 - RNA, 19 nt, Homo sapiens
  misc_RNA (1)...(19): siRNA sense strand
acggaugguuucuccaaua

SEQ ID NO: 2189917 - RNA, 19 nt, Homo sapiens
  misc_RNA (1)...(19): siRNA sense strand
uuacagcaaucaaagaagu

SEQ ID NO: 2189918 - RNA, 19 nt, Homo sapiens
  misc_RNA (1)...(19): siRNA sense strand
gcagucaucucagcugucu

SEQ ID NO: 2189919 - RNA, 19 nt, Homo sapiens
  misc_RNA (1)...(19): siRNA sense strand
ccaagaacguuccaguuuu

SEQ ID NO: 2189920 - RNA, 19 nt, Homo sapiens
  misc_RNA (1)...(19): siRNA sense strand
ugagaaaggccuaaugaca

SEQ ID NO: 2189921 - RNA, 19 nt, Homo sapiens
  misc_RNA (1)...(19): siRNA sense strand
ggacacagcuggagugaca

SEQ ID NO: 2189922 - RNA, 19 nt, Homo sapiens
  misc_RNA (1)...(19): siRNA sense strand
gaaagagaaggaugcauua

SEQ ID NO: 2189923 - RNA, 19 nt, Homo sapiens
  misc_RNA (1)...(19): siRNA sense strand
ccaguuggcucaaggauaa

SEQ ID NO: 2189924 - RNA, 19 nt, Homo sapiens
  misc_RNA (1)...(19): siRNA sense strand
uaaaggaggugaugguaaa

SEQ ID NO: 2189925 - RNA, 19 nt, Homo sapiens
  misc_RNA (1)...(19): siRNA sense strand
gaaacuggcuguuagcaau

SEQ ID NO: 2189926 - RNA, 19 nt, Homo sapiens
  misc_RNA (1)...(19): siRNA sense strand
gcuaagaaguuugaaauga

SEQ ID NO: 2189927 - RNA, 19 nt, Homo sapiens
  misc_RNA (1)...(19): siRNA sense strand
gcuaaugccucaccucuga

SEQ ID NO: 2189928 - RNA, 19 nt, Homo sapiens
  misc_RNA (1)...(19): siRNA sense strand
gcagacagaugaagaacga

SEQ ID NO: 2189929 - RNA, 19 nt, Homo sapiens
  misc_RNA (1)...(19): siRNA sense strand
ugagacagauccauuuauu

SEQ ID NO: 2189930 - RNA, 19 nt, Homo sapiens
  misc_RNA (1)...(19): siRNA sense strand
gaacaagggcccuccaguu

SEQ ID NO: 2189931 - RNA, 19 nt, Homo sapiens
  misc_RNA (1)...(19): siRNA sense strand
uagcaaguaucaugaguaa

SEQ ID NO: 2189932 - RNA, 19 nt, Homo sapiens
  misc_RNA (1)...(19): siRNA sense strand
gaacuaugugucuccauua

SEQ ID NO: 2189933 - RNA, 19 nt, Homo sapiens
  misc_RNA (1)...(19): siRNA sense strand
ggcaagagguggaaauguu

SEQ ID NO: 2189934 - RNA, 19 nt, Homo sapiens
  misc_RNA (1)...(19): siRNA sense strand
ggagauauuuggcuuugga

SEQ ID NO: 2189935 - RNA, 19 nt, Homo sapiens
  misc_RNA (1)...(19): siRNA sense strand
gcaccuaaacccaaaguaa

SEQ ID NO: 2189936 - RNA, 19 nt, Homo sapiens
  misc_RNA (1)...(19): siRNA sense strand
uagccuaacucagaauuua

SEQ ID NO: 2189937 - RNA, 19 nt, Homo sapiens
  misc_RNA (1)...(19): siRNA sense strand
gucgugaaguuaaguaaua

SEQ ID NO: 2189938 - RNA, 19 nt, Homo sapiens
  misc_RNA (1)...(19): siRNA sense strand
aagaacagcuugaguggaa

SEQ ID NO: 2189939 - RNA, 19 nt, Homo sapiens
  misc_RNA (1)...(19): siRNA sense strand
gagcaucauuauuggcuaa

SEQ ID NO: 2189940 - RNA, 19 nt, Homo sapiens
  misc_RNA (1)...(19): siRNA sense strand
ggaaggaucggcuacaaga

SEQ ID NO: 2189941 - RNA, 19 nt, Homo sapiens
  misc_RNA (1)...(19): siRNA sense strand
acacauucuucaagucuua

SEQ ID NO: 2189942 - RNA, 19 nt, Homo sapiens
  misc_RNA (1)...(19): siRNA sense strand
gaacuaggcccugucauuc

SEQ ID NO: 2189943 - RNA, 19 nt, Homo sapiens
  misc_RNA (1)...(19): siRNA sense strand
gaugagacagauccauuua

SEQ ID NO: 2189944 - RNA, 19 nt, Homo sapiens
  misc_RNA (1)...(19): siRNA sense strand
gaccaugcccuuccaguuu

SEQ ID NO: 2189945 - RNA, 19 nt, Homo sapiens
  misc_RNA (1)...(19): siRNA sense strand
gcuaugaguuagaaccaaa

SEQ ID NO: 2189946 - RNA, 19 nt, Homo sapiens
  misc_RNA (1)...(19): siRNA sense strand
gaacacagggugcuaccaa

SEQ ID NO: 2189947 - RNA, 19 nt, Homo sapiens
  misc_RNA (1)...(19): siRNA sense strand
ccaaguaguuccaguccaa

SEQ ID NO: 2189948 - RNA, 19 nt, Homo sapiens
  misc_RNA (1)...(19): siRNA sense strand
agacagauccauuuauuga

SEQ ID NO: 2189949 - RNA, 19 nt, Homo sapiens
  misc_RNA (1)...(19): siRNA sense strand
uagagaugcuagaugauuu

SEQ ID NO: 2189950 - RNA, 19 nt, Homo sapiens
  misc_RNA (1)...(19): siRNA sense strand
uaucaacacuggcacucua

SEQ ID NO: 2189951 - RNA, 19 nt, Homo sapiens
  misc_RNA (1)...(19): siRNA sense strand
aaacugaaacuggcuguua

SEQ ID NO: 2189952 - RNA, 19 nt, Homo sapiens
  misc_RNA (1)...(19): siRNA sense strand
uaaauucacacaagucuga

SEQ ID NO: 2189953 - RNA, 19 nt, Homo sapiens
  misc_RNA (1)...(19): siRNA sense strand
uaacagcccaguccauaaa

SEQ ID NO: 2189954 - RNA, 19 nt, Homo sapiens
  misc_RNA (1)...(19): siRNA sense strand
gaagcucauucacacagaa

SEQ ID NO: 2189955 - RNA, 19 nt, Homo sapiens
  misc_RNA (1)...(19): siRNA sense strand
gcaagcauuucacgaugga

SEQ ID NO: 2189956 - RNA, 19 nt, Homo sapiens
  misc_RNA (1)...(19): siRNA sense strand
caccauagccuaacucaga

SEQ ID NO: 2189957 - RNA, 19 nt, Homo sapiens
  misc_RNA (1)...(19): siRNA sense strand
gccuggagcuggugcuuaa

SEQ ID NO: 2189958 - RNA, 19 nt, Homo sapiens
  misc_RNA (1)...(19): siRNA sense strand
guagcaaccuuaacucaag

SEQ ID NO: 2189959 - RNA, 19 nt, Homo sapiens
  misc_RNA (1)...(19): siRNA sense strand
ggacauugaguuacagcua

SEQ ID NO: 2189960 - RNA, 19 nt, Homo sapiens
  misc_RNA (1)...(19): siRNA sense strand
gauccagaccuucccauuu

SEQ ID NO: 2189961 - RNA, 19 nt, Homo sapiens
  misc_RNA (1)...(19): siRNA sense strand
ccaggaugaucguuuaaga

SEQ ID NO: 2189962 - RNA, 19 nt, Homo sapiens
  misc_RNA (1)...(19): siRNA sense strand
ccucaaagcuaacaaacuc

SEQ ID NO: 2189963 - RNA, 19 nt, Homo sapiens
  misc_RNA (1)...(19): siRNA sense strand
caagccagauucacacuuc

SEQ ID NO: 2189964 - RNA, 19 nt, Homo sapiens
  misc_RNA (1)...(19): siRNA sense strand
ccaaauugcagacagauga

SEQ ID NO: 2189965 - RNA, 19 nt, Homo sapiens
  misc_RNA (1)...(19): siRNA sense strand
agagaaggaugcauuaaag

SEQ ID NO: 2189966 - RNA, 19 nt, Homo sapiens
  misc_RNA (1)...(19): siRNA sense strand
uaacacaaguaacaaaggu

SEQ ID NO: 2189967 - RNA, 19 nt, Homo sapiens
  misc_RNA (1)...(19): siRNA sense strand
gaacauccgaggcccaaga

SEQ ID NO: 2189968 - RNA, 19 nt, Homo sapiens
  misc_RNA (1)...(19): siRNA sense strand
gaucugaagaggaugauga

SEQ ID NO: 2189969 - RNA, 19 nt, Homo sapiens
  misc_RNA (1)...(19): siRNA sense strand
ugucaugccugaacagcua

SEQ ID NO: 2189970 - RNA, 19 nt, Homo sapiens
  misc_RNA (1)...(19): siRNA sense strand
ucacacagaagacccauuu

SEQ ID NO: 2189971 - RNA, 19 nt, Homo sapiens
  misc_RNA (1)...(19): siRNA sense strand
aaugaaauauggugggaaa

SEQ ID NO: 2189972 - RNA, 19 nt, Homo sapiens
  misc_RNA (1)...(19): siRNA sense strand
gcaggagcaucauuauugg

SEQ ID NO: 2189973 - RNA, 19 nt, Homo sapiens
  misc_RNA (1)...(19): siRNA sense strand
gcaccacuaccuccaguaa

SEQ ID NO: 2189974 - RNA, 19 nt, Homo sapiens
  misc_RNA (1)...(19): siRNA sense strand
ccaaauugcugccucuucu

SEQ ID NO: 2189975 - RNA, 19 nt, Homo sapiens
  misc_RNA (1)...(19): siRNA sense strand
gaaagccggaguguucaua

SEQ ID NO: 2189976 - RNA, 19 nt, Homo sapiens
  misc_RNA (1)...(19): siRNA sense strand
agaggcuuaugaugaauua

SEQ ID NO: 2189977 - RNA, 19 nt, Homo sapiens
  misc_RNA (1)...(19): siRNA sense strand
gcuaauaggacuagucugu

SEQ ID NO: 2189978 - RNA, 19 nt, Homo sapiens
  misc_RNA (1)...(19): siRNA sense strand
gaaugaacaucagcagaca

SEQ ID NO: 2189979 - RNA, 19 nt, Homo sapiens
  misc_RNA (1)...(19): siRNA sense strand
gguagccacuccagcacua

SEQ ID NO: 2189980 - RNA, 19 nt, Homo sapiens
  misc_RNA (1)...(19): siRNA sense strand
caaagaaaccccaggauuu

SEQ ID NO: 2189981 - RNA, 19 nt, Homo sapiens
  misc_RNA (1)...(19): siRNA sense strand
guaaaggaggugaugguaa

SEQ ID NO: 2189982 - RNA, 19 nt, Homo sapiens
  misc_RNA (1)...(19): siRNA sense strand
acacagaagacccauuuaa

SEQ ID NO: 2189983 - RNA, 19 nt, Homo sapiens
  misc_RNA (1)...(19): siRNA sense strand
uagcugccaugauuagaaa

SEQ ID NO: 2189984 - RNA, 19 nt, Homo sapiens
  misc_RNA (1)...(19): siRNA sense strand
ggaguuguggcucuaaauu

SEQ ID NO: 2189985 - RNA, 19 nt, Homo sapiens
  misc_RNA (1)...(19): siRNA sense strand
gccacuagcuacucccaaa

SEQ ID NO: 2189986 - RNA, 19 nt, Homo sapiens
  misc_RNA (1)...(19): siRNA sense strand
gcaagagguggaaauguug

SEQ ID NO: 2189987 - RNA, 19 nt, Homo sapiens
  misc_RNA (1)...(19): siRNA sense strand
ccagucugcugaagauuau

SEQ ID NO: 2189988 - RNA, 19 nt, Homo sapiens
  misc_RNA (1)...(19): siRNA sense strand
uauguaaccuuguugagau

SEQ ID NO: 2189989 - RNA, 19 nt, Homo sapiens
  misc_RNA (1)...(19): siRNA sense strand
gcaaugucaugccugaaca

SEQ ID NO: 2189990 - RNA, 19 nt, Homo sapiens
  misc_RNA (1)...(19): siRNA sense strand
uaaaacgucugaagaaguu

SEQ ID NO: 2189991 - RNA, 19 nt, Homo sapiens
  misc_RNA (1)...(19): siRNA sense strand
gcucuaaauucacacaagu

SEQ ID NO: 2189992 - RNA, 19 nt, Homo sapiens
  misc_RNA (1)...(19): siRNA sense strand
gaacagcuugaguggaauu

SEQ ID NO: 2189993 - RNA, 19 nt, Homo sapiens
  misc_RNA (1)...(19): siRNA sense strand
gcaaguaucaugaguaagc

SEQ ID NO: 2189994 - RNA, 19 nt, Homo sapiens
  misc_RNA (1)...(19): siRNA sense strand
cacuggaucuuguuucuga

SEQ ID NO: 2189995 - RNA, 19 nt, Homo sapiens
  misc_RNA (1)...(19): siRNA sense strand
aaauggaucugaagaggau

SEQ ID NO: 2189996 - RNA, 19 nt, Homo sapiens
  misc_RNA (1)...(19): siRNA sense strand
gaugaucguuuaagagaac

SEQ ID NO: 2189997 - RNA, 19 nt, Homo sapiens
  misc_RNA (1)...(19): siRNA sense strand
uguccaggaugaucguuua

SEQ ID NO: 2189998 - RNA, 19 nt, Homo sapiens
  misc_RNA (1)...(19): siRNA sense strand
cugaagaaguuacaucuca

SEQ ID NO: 2189999 - RNA, 19 nt, Homo sapiens
  misc_RNA (1)...(19): siRNA sense strand
cauuaaagaaggagucuaa

SEQ ID NO: 2190000 - RNA, 19 nt, Homo sapiens
  misc_RNA (1)...(19): siRNA sense strand
ccgcuucucuaacaacaaa

SEQ ID NO: 2190001 - RNA, 19 nt, Homo sapiens
  misc_RNA (1)...(19): siRNA sense strand
agaacuaugugucuccauu

SEQ ID NO: 2190002 - RNA, 19 nt, Homo sapiens
  misc_RNA (1)...(19): siRNA sense strand
gggaugcuaugaguuagaa

SEQ ID NO: 2190003 - RNA, 19 nt, Homo sapiens
  misc_RNA (1)...(19): siRNA sense strand
guggaaauguuggcuaaga

SEQ ID NO: 2190004 - RNA, 19 nt, Homo sapiens
  misc_RNA (1)...(19): siRNA sense strand
gccagucugcugaagauua

SEQ ID NO: 2190005 - RNA, 19 nt, Homo sapiens
  misc_RNA (1)...(19): siRNA sense strand
ccacugggaugacacuauc

SEQ ID NO: 2190006 - RNA, 19 nt, Homo sapiens
  misc_RNA (1)...(19): siRNA sense strand
ggaugaucguuuaagagaa

SEQ ID NO: 2190007 - RNA, 19 nt, Homo sapiens
  misc_RNA (1)...(19): siRNA sense strand
agaaagagaaggaugcauu

SEQ ID NO: 2190008 - RNA, 19 nt, Homo sapiens
  misc_RNA (1)...(19): siRNA sense strand
gaaggaugcauuaaagaag

SEQ ID NO: 2190009 - RNA, 19 nt, Homo sapiens
  misc_RNA (1)...(19): siRNA sense strand
ugaguggaauugcaaugaa

SEQ ID NO: 2190010 - RNA, 19 nt, Homo sapiens
  misc_RNA (1)...(19): siRNA sense strand
gaguagcguucauuagcuu

SEQ ID NO: 2190011 - RNA, 19 nt, Homo sapiens
  misc_RNA (1)...(19): siRNA sense strand
gaagaaguuacaucucaau

SEQ ID NO: 2190012 - RNA, 19 nt, Homo sapiens
  misc_RNA (1)...(19): siRNA sense strand
gagaaggaugcauuaaaga

SEQ ID NO: 2190013 - RNA, 19 nt, Homo sapiens
  misc_RNA (1)...(19): siRNA sense strand
uaaaggggacacuaaauua

SEQ ID NO: 2190014 - RNA, 19 nt, Homo sapiens
  misc_RNA (1)...(19): siRNA sense strand
gaguggaauugcaaugaau

SEQ ID NO: 2190015 - RNA, 19 nt, Homo sapiens
  misc_RNA (1)...(19): siRNA sense strand
auucagaacccuaaaguuu

SEQ ID NO: 2190016 - RNA, 19 nt, Homo sapiens
  misc_RNA (1)...(19): siRNA sense strand
gaucaaauugggaugcuau

SEQ ID NO: 2190017 - RNA, 19 nt, Homo sapiens
  misc_RNA (1)...(19): siRNA sense strand
agaggaugaugaugagaaa

SEQ ID NO: 2190018 - RNA, 19 nt, Homo sapiens
  misc_RNA (1)...(19): siRNA sense strand
acacuuacagcaagcauuu

SEQ ID NO: 2190019 - RNA, 19 nt, Homo sapiens
  misc_RNA (1)...(19): siRNA sense strand
gaugcuggguggccuuguu

SEQ ID NO: 2190020 - RNA, 19 nt, Homo sapiens
  misc_RNA (1)...(19): siRNA sense strand
ccaaggcuauggugucaca

SEQ ID NO: 2190021 - RNA, 19 nt, Homo sapiens
  misc_RNA (1)...(19): siRNA sense strand
ggacacagcuggagugaca

SEQ ID NO: 2190022 - RNA, 19 nt, Homo sapiens
  misc_RNA (1)...(19): siRNA sense strand
gaaagagaaggaugcauua

SEQ ID NO: 2190023 - RNA, 19 nt, Homo sapiens
  misc_RNA (1)...(19): siRNA sense strand
ccaguuggcucaaggauaa

SEQ ID NO: 2190024 - RNA, 19 nt, Homo sapiens
  misc_RNA (1)...(19): siRNA sense strand
uaaaggaggugaugguaaa

SEQ ID NO: 2190025 - RNA, 19 nt, Homo sapiens
  misc_RNA (1)...(19): siRNA sense strand
gaaacuggcuguuagcaau

SEQ ID NO: 2190026 - RNA, 19 nt, Homo sapiens
  misc_RNA (1)...(19): siRNA sense strand
gcuaagaaguuugaaauga

SEQ ID NO: 2190027 - RNA, 19 nt, Homo sapiens
  misc_RNA (1)...(19): siRNA sense strand
gcuaaugccucaccucuga

SEQ ID NO: 2190028 - RNA, 19 nt, Homo sapiens
  misc_RNA (1)...(19): siRNA sense strand
gcagacagaugaagaacga

SEQ ID NO: 2190029 - RNA, 19 nt, Homo sapiens
  misc_RNA (1)...(19): siRNA sense strand
ugagacagauccauuuauu

SEQ ID NO: 2190030 - RNA, 19 nt, Homo sapiens
  misc_RNA (1)...(19): siRNA sense strand
gaacaagggcccuccaguu

SEQ ID NO: 2190031 - RNA, 19 nt, Homo sapiens
  misc_RNA (1)...(19): siRNA sense strand
uagcaaguaucaugaguaa

SEQ ID NO: 2190032 - RNA, 19 nt, Homo sapiens
  misc_RNA (1)...(19): siRNA sense strand
gaacuaugugucuccauua

SEQ ID NO: 2190033 - RNA, 19 nt, Homo sapiens
  misc_RNA (1)...(19): siRNA sense strand
ggcaagagguggaaauguu

SEQ ID NO: 2190034 - RNA, 19 nt, Homo sapiens
  misc_RNA (1)...(19): siRNA sense strand
ggagauauuuggcuuugga

SEQ ID NO: 2190035 - RNA, 19 nt, Homo sapiens
  misc_RNA (1)...(19): siRNA sense strand
gcaccuaaacccaaaguaa

SEQ ID NO: 2190036 - RNA, 19 nt, Homo sapiens
  misc_RNA (1)...(19): siRNA sense strand
uagccuaacucagaauuua

SEQ ID NO: 2190037 - RNA, 19 nt, Homo sapiens
  misc_RNA (1)...(19): siRNA sense strand
gucgugaaguuaaguaaua

SEQ ID NO: 2190038 - RNA, 19 nt, Homo sapiens
  misc_RNA (1)...(19): siRNA sense strand
aagaacagcuugaguggaa

SEQ ID NO: 2190039 - RNA, 19 nt, Homo sapiens
  misc_RNA (1)...(19): siRNA sense strand
gagcaucauuauuggcuaa

SEQ ID NO: 2190040 - RNA, 19 nt, Homo sapiens
  misc_RNA (1)...(19): siRNA sense strand
ggaaggaucggcuacaaga

SEQ ID NO: 2190041 - RNA, 19 nt, Homo sapiens
  misc_RNA (1)...(19): siRNA sense strand
acacauucuucaagucuua

SEQ ID NO: 2190042 - RNA, 19 nt, Homo sapiens
  misc_RNA (1)...(19): siRNA sense strand
gaacuaggcccugucauuc

SEQ ID NO: 2190043 - RNA, 19 nt, Homo sapiens
  misc_RNA (1)...(19): siRNA sense strand
gaugagacagauccauuua

SEQ ID NO: 2190044 - RNA, 19 nt, Homo sapiens
  misc_RNA (1)...(19): siRNA sense strand
gaccaugcccuuccaguuu

SEQ ID NO: 2190045 - RNA, 19 nt, Homo sapiens
  misc_RNA (1)...(19): siRNA sense strand
gcuaugaguuagaaccaaa

SEQ ID NO: 2190046 - RNA, 19 nt, Homo sapiens
  misc_RNA (1)...(19): siRNA sense strand
gaacacagggugcuaccaa

SEQ ID NO: 2190047 - RNA, 19 nt, Homo sapiens
  misc_RNA (1)...(19): siRNA sense strand
ccaaguaguuccaguccaa

SEQ ID NO: 2190048 - RNA, 19 nt, Homo sapiens
  misc_RNA (1)...(19): siRNA sense strand
agacagauccauuuauuga

SEQ ID NO: 2190049 - RNA, 19 nt, Homo sapiens
  misc_RNA (1)...(19): siRNA sense strand
uagagaugcuagaugauuu

SEQ ID NO: 2190050 - RNA, 19 nt, Homo sapiens
  misc_RNA (1)...(19): siRNA sense strand
uaucaacacuggcacucua

SEQ ID NO: 2190051 - RNA, 19 nt, Homo sapiens
  misc_RNA (1)...(19): siRNA sense strand
aaacugaaacuggcuguua

SEQ ID NO: 2190052 - RNA, 19 nt, Homo sapiens
  misc_RNA (1)...(19): siRNA sense strand
uaaauucacacaagucuga

SEQ ID NO: 2190053 - RNA, 19 nt, Homo sapiens
  misc_RNA (1)...(19): siRNA sense strand
uaacagcccaguccauaaa

SEQ ID NO: 2190054 - RNA, 19 nt, Homo sapiens
  misc_RNA (1)...(19): siRNA sense strand
gaagcucauucacacagaa

SEQ ID NO: 2190055 - RNA, 19 nt, Homo sapiens
  misc_RNA (1)...(19): siRNA sense strand
gcaagcauuucacgaugga

SEQ ID NO: 2190056 - RNA, 19 nt, Homo sapiens
  misc_RNA (1)...(19): siRNA sense strand
caccauagccuaacucaga

SEQ ID NO: 2190057 - RNA, 19 nt, Homo sapiens
  misc_RNA (1)...(19): siRNA sense strand
gccuggagcuggugcuuaa

SEQ ID NO: 2190058 - RNA, 19 nt, Homo sapiens
  misc_RNA (1)...(19): siRNA sense strand
guagcaaccuuaacucaag

SEQ ID NO: 2190059 - RNA, 19 nt, Homo sapiens
  misc_RNA (1)...(19): siRNA sense strand
ggacauugaguuacagcua

SEQ ID NO: 2190060 - RNA, 19 nt, Homo sapiens
  misc_RNA (1)...(19): siRNA sense strand
gauccagaccuucccauuu

SEQ ID NO: 2190061 - RNA, 19 nt, Homo sapiens
  misc_RNA (1)...(19): siRNA sense strand
ccaggaugaucguuuaaga

SEQ ID NO: 2190062 - RNA, 19 nt, Homo sapiens
  misc_RNA (1)...(19): siRNA sense strand
ccucaaagcuaacaaacuc

SEQ ID NO: 2190063 - RNA, 19 nt, Homo sapiens
  misc_RNA (1)...(19): siRNA sense strand
caagccagauucacacuuc

SEQ ID NO: 2190064 - RNA, 19 nt, Homo sapiens
  misc_RNA (1)...(19): siRNA sense strand
ccaaauugcagacagauga

SEQ ID NO: 2190065 - RNA, 19 nt, Homo sapiens
  misc_RNA (1)...(19): siRNA sense strand
agagaaggaugcauuaaag

SEQ ID NO: 2190066 - RNA, 19 nt, Homo sapiens
  misc_RNA (1)...(19): siRNA sense strand
uaacacaaguaacaaaggu

SEQ ID NO: 2190067 - RNA, 19 nt, Homo sapiens
  misc_RNA (1)...(19): siRNA sense strand
gaacauccgaggcccaaga

SEQ ID NO: 2190068 - RNA, 19 nt, Homo sapiens
  misc_RNA (1)...(19): siRNA sense strand
gaucugaagaggaugauga

SEQ ID NO: 2190069 - RNA, 19 nt, Homo sapiens
  misc_RNA (1)...(19): siRNA sense strand
ugucaugccugaacagcua

SEQ ID NO: 2190070 - RNA, 19 nt, Homo sapiens
  misc_RNA (1)...(19): siRNA sense strand
ucacacagaagacccauuu

SEQ ID NO: 2190071 - RNA, 19 nt, Homo sapiens
  misc_RNA (1)...(19): siRNA sense strand
aaugaaauauggugggaaa

SEQ ID NO: 2190072 - RNA, 19 nt, Homo sapiens
  misc_RNA (1)...(19): siRNA sense strand
gcaggagcaucauuauugg

SEQ ID NO: 2190073 - RNA, 19 nt, Homo sapiens
  misc_RNA (1)...(19): siRNA sense strand
gcaccacuaccuccaguaa

SEQ ID NO: 2190074 - RNA, 19 nt, Homo sapiens
  misc_RNA (1)...(19): siRNA sense strand
ccaaauugcugccucuucu

SEQ ID NO: 2190075 - RNA, 19 nt, Homo sapiens
  misc_RNA (1)...(19): siRNA sense strand
gaaagccggaguguucaua

SEQ ID NO: 2190076 - RNA, 19 nt, Homo sapiens
  misc_RNA (1)...(19): siRNA sense strand
agaggcuuaugaugaauua

SEQ ID NO: 2190077 - RNA, 19 nt, Homo sapiens
  misc_RNA (1)...(19): siRNA sense strand
gcuaauaggacuagucugu

SEQ ID NO: 2190078 - RNA, 19 nt, Homo sapiens
  misc_RNA (1)...(19): siRNA sense strand
gaaugaacaucagcagaca

SEQ ID NO: 2190079 - RNA, 19 nt, Homo sapiens
  misc_RNA (1)...(19): siRNA sense strand
gguagccacuccagcacua

SEQ ID NO: 2190080 - RNA, 19 nt, Homo sapiens
  misc_RNA (1)...(19): siRNA sense strand
caaagaaaccccaggauuu

SEQ ID NO: 2190081 - RNA, 19 nt, Homo sapiens
  misc_RNA (1)...(19): siRNA sense strand
guaaaggaggugaugguaa

SEQ ID NO: 2190082 - RNA, 19 nt, Homo sapiens
  misc_RNA (1)...(19): siRNA sense strand
acacagaagacccauuuaa

SEQ ID NO: 2190083 - RNA, 19 nt, Homo sapiens
  misc_RNA (1)...(19): siRNA sense strand
uagcugccaugauuagaaa

SEQ ID NO: 2190084 - RNA, 19 nt, Homo sapiens
  misc_RNA (1)...(19): siRNA sense strand
ggaguuguggcucuaaauu

SEQ ID NO: 2190085 - RNA, 19 nt, Homo sapiens
  misc_RNA (1)...(19): siRNA sense strand
gccacuagcuacucccaaa

SEQ ID NO: 2190086 - RNA, 19 nt, Homo sapiens
  misc_RNA (1)...(19): siRNA sense strand
gcaagagguggaaauguug

SEQ ID NO: 2190087 - RNA, 19 nt, Homo sapiens
  misc_RNA (1)...(19): siRNA sense strand
ccagucugcugaagauuau

SEQ ID NO: 2190088 - RNA, 19 nt, Homo sapiens
  misc_RNA (1)...(19): siRNA sense strand
uauguaaccuuguugagau

SEQ ID NO: 2190089 - RNA, 19 nt, Homo sapiens
  misc_RNA (1)...(19): siRNA sense strand
gcaaugucaugccugaaca

SEQ ID NO: 2190090 - RNA, 19 nt, Homo sapiens
  misc_RNA (1)...(19): siRNA sense strand
uaaaacgucugaagaaguu

SEQ ID NO: 2190091 - RNA, 19 nt, Homo sapiens
  misc_RNA (1)...(19): siRNA sense strand
gcucuaaauucacacaagu

SEQ ID NO: 2190092 - RNA, 19 nt, Homo sapiens
  misc_RNA (1)...(19): siRNA sense strand
gaacagcuugaguggaauu

SEQ ID NO: 2190093 - RNA, 19 nt, Homo sapiens
  misc_RNA (1)...(19): siRNA sense strand
gcaaguaucaugaguaagc

SEQ ID NO: 2190094 - RNA, 19 nt, Homo sapiens
  misc_RNA (1)...(19): siRNA sense strand
cacuggaucuuguuucuga

SEQ ID NO: 2190095 - RNA, 19 nt, Homo sapiens
  misc_RNA (1)...(19): siRNA sense strand
aaauggaucugaagaggau

SEQ ID NO: 2190096 - RNA, 19 nt, Homo sapiens
  misc_RNA (1)...(19): siRNA sense strand
gaugaucguuuaagagaac

SEQ ID NO: 2190097 - RNA, 19 nt, Homo sapiens
  misc_RNA (1)...(19): siRNA sense strand
uguccaggaugaucguuua

SEQ ID NO: 2190098 - RNA, 19 nt, Homo sapiens
  misc_RNA (1)...(19): siRNA sense strand
cugaagaaguuacaucuca

SEQ ID NO: 2190099 - RNA, 19 nt, Homo sapiens
  misc_RNA (1)...(19): siRNA sense strand
cauuaaagaaggagucuaa

SEQ ID NO: 2190100 - RNA, 19 nt, Homo sapiens
  misc_RNA (1)...(19): siRNA sense strand
ccgcuucucuaacaacaaa

SEQ ID NO: 2190101 - RNA, 19 nt, Homo sapiens
  misc_RNA (1)...(19): siRNA sense strand
agaacuaugugucuccauu

SEQ ID NO: 2190102 - RNA, 19 nt, Homo sapiens
  misc_RNA (1)...(19): siRNA sense strand
gggaugcuaugaguuagaa

SEQ ID NO: 2190103 - RNA, 19 nt, Homo sapiens
  misc_RNA (1)...(19): siRNA sense strand
guggaaauguuggcuaaga

SEQ ID NO: 2190104 - RNA, 19 nt, Homo sapiens
  misc_RNA (1)...(19): siRNA sense strand
gccagucugcugaagauua

SEQ ID NO: 2190105 - RNA, 19 nt, Homo sapiens
  misc_RNA (1)...(19): siRNA sense strand
ccacugggaugacacuauc

SEQ ID NO: 2190106 - RNA, 19 nt, Homo sapiens
  misc_RNA (1)...(19): siRNA sense strand
ggaugaucguuuaagagaa

SEQ ID NO: 2190107 - RNA, 19 nt, Homo sapiens
  misc_RNA (1)...(19): siRNA sense strand
agaaagagaaggaugcauu

SEQ ID NO: 2190108 - RNA, 19 nt, Homo sapiens
  misc_RNA (1)...(19): siRNA sense strand
gaaggaugcauuaaagaag

SEQ ID NO: 2190109 - RNA, 19 nt, Homo sapiens
  misc_RNA (1)...(19): siRNA sense strand
ugaguggaauugcaaugaa

SEQ ID NO: 2190110 - RNA, 19 nt, Homo sapiens
  misc_RNA (1)...(19): siRNA sense strand
gaguagcguucauuagcuu

SEQ ID NO: 2190111 - RNA, 19 nt, Homo sapiens
  misc_RNA (1)...(19): siRNA sense strand
gaagaaguuacaucucaau

SEQ ID NO: 2190112 - RNA, 19 nt, Homo sapiens
  misc_RNA (1)...(19): siRNA sense strand
gagaaggaugcauuaaaga

SEQ ID NO: 2190113 - RNA, 19 nt, Homo sapiens
  misc_RNA (1)...(19): siRNA sense strand
uaaaggggacacuaaauua

SEQ ID NO: 2190114 - RNA, 19 nt, Homo sapiens
  misc_RNA (1)...(19): siRNA sense strand
gaguggaauugcaaugaau

SEQ ID NO: 2190115 - RNA, 19 nt, Homo sapiens
  misc_RNA (1)...(19): siRNA sense strand
auucagaacccuaaaguuu

SEQ ID NO: 2190116 - RNA, 19 nt, Homo sapiens
  misc_RNA (1)...(19): siRNA sense strand
gaucaaauugggaugcuau

SEQ ID NO: 2190117 - RNA, 19 nt, Homo sapiens
  misc_RNA (1)...(19): siRNA sense strand
agaggaugaugaugagaaa

SEQ ID NO: 2190118 - RNA, 19 nt, Homo sapiens
  misc_RNA (1)...(19): siRNA sense strand
acacuuacagcaagcauuu

SEQ ID NO: 2190119 - RNA, 19 nt, Homo sapiens
  misc_RNA (1)...(19): siRNA sense strand
gaugcuggguggccuuguu

SEQ ID NO: 2190120 - RNA, 19 nt, Homo sapiens
  misc_RNA (1)...(19): siRNA sense strand
ccaaggcuauggugucaca

SEQ ID NO: 2190121 - RNA, 19 nt, Homo sapiens
  misc_RNA (1)...(19): siRNA sense strand
ggaacgagcuggcuuguga

SEQ ID NO: 2190122 - RNA, 19 nt, Homo sapiens
  misc_RNA (1)...(19): siRNA sense strand
gcacaagucccucaacaua

SEQ ID NO: 2190123 - RNA, 19 nt, Homo sapiens
  misc_RNA (1)...(19): siRNA sense strand
gaaguuuacugcauuguga

SEQ ID NO: 2190124 - RNA, 19 nt, Homo sapiens
  misc_RNA (1)...(19): siRNA sense strand
caacauaaaggacaagaua

SEQ ID NO: 2190125 - RNA, 19 nt, Homo sapiens
  misc_RNA (1)...(19): siRNA sense strand
gaacagagagcacagagaa

SEQ ID NO: 2190126 - RNA, 19 nt, Homo sapiens
  misc_RNA (1)...(19): siRNA sense strand
gaacugaggugaucgaacu

SEQ ID NO: 2190127 - RNA, 19 nt, Homo sapiens
  misc_RNA (1)...(19): siRNA sense strand
gcacagcggugucaauaag

SEQ ID NO: 2190128 - RNA, 19 nt, Homo sapiens
  misc_RNA (1)...(19): siRNA sense strand
agaagugugucuugaauuu

SEQ ID NO: 2190129 - RNA, 19 nt, Homo sapiens
  misc_RNA (1)...(19): siRNA sense strand
gaauggauauguucagcuu

SEQ ID NO: 2190130 - RNA, 19 nt, Homo sapiens
  misc_RNA (1)...(19): siRNA sense strand
gcaaagcugucuccuccaa

SEQ ID NO: 2190131 - RNA, 19 nt, Homo sapiens
  misc_RNA (1)...(19): siRNA sense strand
ccuaugaguuugaagauuu

SEQ ID NO: 2190132 - RNA, 19 nt, Homo sapiens
  misc_RNA (1)...(19): siRNA sense strand
gcacagagaaggagaggaa

SEQ ID NO: 2190133 - RNA, 19 nt, Homo sapiens
  misc_RNA (1)...(19): siRNA sense strand
gagagaagcugaggaccaa

SEQ ID NO: 2190134 - RNA, 19 nt, Homo sapiens
  misc_RNA (1)...(19): siRNA sense strand
cagcagcccugaugacauu

SEQ ID NO: 2190135 - RNA, 19 nt, Homo sapiens
  misc_RNA (1)...(19): siRNA sense strand
ccacaaagcccuucaucaa

SEQ ID NO: 2190136 - RNA, 19 nt, Homo sapiens
  misc_RNA (1)...(19): siRNA sense strand
acaagucccucaacauaaa

SEQ ID NO: 2190137 - RNA, 19 nt, Homo sapiens
  misc_RNA (1)...(19): siRNA sense strand
ucagacagauggacgauga

SEQ ID NO: 2190138 - RNA, 19 nt, Homo sapiens
  misc_RNA (1)...(19): siRNA sense strand
cagaaaguccuaugaguuu

SEQ ID NO: 2190139 - RNA, 19 nt, Homo sapiens
  misc_RNA (1)...(19): siRNA sense strand
gcagcaggguggacuggua

SEQ ID NO: 2190140 - RNA, 19 nt, Homo sapiens
  misc_RNA (1)...(19): siRNA sense strand
gaaagaaacgggugaagag

SEQ ID NO: 2190141 - RNA, 19 nt, Homo sapiens
  misc_RNA (1)...(19): siRNA sense strand
ugaacgagguggugucuga

SEQ ID NO: 2190142 - RNA, 19 nt, Homo sapiens
  misc_RNA (1)...(19): siRNA sense strand
gaaucaacgccauuuauga

SEQ ID NO: 2190143 - RNA, 19 nt, Homo sapiens
  misc_RNA (1)...(19): siRNA sense strand
gagcacagcggugucaaua

SEQ ID NO: 2190144 - RNA, 19 nt, Homo sapiens
  misc_RNA (1)...(19): siRNA sense strand
guucaaacaugccggagaa

SEQ ID NO: 2190145 - RNA, 19 nt, Homo sapiens
  misc_RNA (1)...(19): siRNA sense strand
gguggugucugaagccuuu

SEQ ID NO: 2190146 - RNA, 19 nt, Homo sapiens
  misc_RNA (1)...(19): siRNA sense strand
ugaagggacuaggcaauaa

SEQ ID NO: 2190147 - RNA, 19 nt, Homo sapiens
  misc_RNA (1)...(19): siRNA sense strand
ggaaagaaacgggugaaga

SEQ ID NO: 2190148 - RNA, 19 nt, Homo sapiens
  misc_RNA (1)...(19): siRNA sense strand
gaucuuggaugagguggaa

SEQ ID NO: 2190149 - RNA, 19 nt, Homo sapiens
  misc_RNA (1)...(19): siRNA sense strand
gaaaguccuaugaguuuga

SEQ ID NO: 2190150 - RNA, 19 nt, Homo sapiens
  misc_RNA (1)...(19): siRNA sense strand
ucacagaggcuaagaaugg

SEQ ID NO: 2190151 - RNA, 19 nt, Homo sapiens
  misc_RNA (1)...(19): siRNA sense strand
ccacagaacggcaggaaga

SEQ ID NO: 2190152 - RNA, 19 nt, Homo sapiens
  misc_RNA (1)...(19): siRNA sense strand
gaagggacuaggcaauaaa

SEQ ID NO: 2190153 - RNA, 19 nt, Homo sapiens
  misc_RNA (1)...(19): siRNA sense strand
gggaguggcucagaaguca

SEQ ID NO: 2190154 - RNA, 19 nt, Homo sapiens
  misc_RNA (1)...(19): siRNA sense strand
cauggagacucagauguuu

SEQ ID NO: 2190155 - RNA, 19 nt, Homo sapiens
  misc_RNA (1)...(19): siRNA sense strand
gguccgagcccaagaguau

SEQ ID NO: 2190156 - RNA, 19 nt, Homo sapiens
  misc_RNA (1)...(19): siRNA sense strand
ugacagaugagaacaguga

SEQ ID NO: 2190157 - RNA, 19 nt, Homo sapiens
  misc_RNA (1)...(19): siRNA sense strand
gauauguucagcuuggaua

SEQ ID NO: 2190158 - RNA, 19 nt, Homo sapiens
  misc_RNA (1)...(19): siRNA sense strand
ggaagagguccuugugguu

SEQ ID NO: 2190159 - RNA, 19 nt, Homo sapiens
  misc_RNA (1)...(19): siRNA sense strand
gguccacccuuccugagaa

SEQ ID NO: 2190160 - RNA, 19 nt, Homo sapiens
  misc_RNA (1)...(19): siRNA sense strand
gagaggaggaguagugaug

SEQ ID NO: 2190161 - RNA, 19 nt, Homo sapiens
  misc_RNA (1)...(19): siRNA sense strand
uaaaggacaagauaucaga

SEQ ID NO: 2190162 - RNA, 19 nt, Homo sapiens
  misc_RNA (1)...(19): siRNA sense strand
ugaagcaggucaagaaacu

SEQ ID NO: 2190163 - RNA, 19 nt, Homo sapiens
  misc_RNA (1)...(19): siRNA sense strand
cggagaacguucaaacaug

SEQ ID NO: 2190164 - RNA, 19 nt, Homo sapiens
  misc_RNA (1)...(19): siRNA sense strand
gcgaaucaacgccauuuau

SEQ ID NO: 2190165 - RNA, 19 nt, Homo sapiens
  misc_RNA (1)...(19): siRNA sense strand
gcagaagguucgguuacug

SEQ ID NO: 2190166 - RNA, 19 nt, Homo sapiens
  misc_RNA (1)...(19): siRNA sense strand
gaagaugggagcagaaggu

SEQ ID NO: 2190167 - RNA, 19 nt, Homo sapiens
  misc_RNA (1)...(19): siRNA sense strand
gaacagugagucugacagu

SEQ ID NO: 2190168 - RNA, 19 nt, Homo sapiens
  misc_RNA (1)...(19): siRNA sense strand
cagagaaggagaggaauaa

SEQ ID NO: 2190169 - RNA, 19 nt, Homo sapiens
  misc_RNA (1)...(19): siRNA sense strand
gaauaaaggagcagugaac

SEQ ID NO: 2190170 - RNA, 19 nt, Homo sapiens
  misc_RNA (1)...(19): siRNA sense strand
ucagaacccuugcccaucu

SEQ ID NO: 2190171 - RNA, 19 nt, Homo sapiens
  misc_RNA (1)...(19): siRNA sense strand
aaagcugucuccuccaaga

SEQ ID NO: 2190172 - RNA, 19 nt, Homo sapiens
  misc_RNA (1)...(19): siRNA sense strand
gaggagaacgucuaugaag

SEQ ID NO: 2190173 - RNA, 19 nt, Homo sapiens
  misc_RNA (1)...(19): siRNA sense strand
gaucaggagucaggcuuca

SEQ ID NO: 2190174 - RNA, 19 nt, Homo sapiens
  misc_RNA (1)...(19): siRNA sense strand
ggacaucgaguuacauggu

SEQ ID NO: 2190175 - RNA, 19 nt, Homo sapiens
  misc_RNA (1)...(19): siRNA sense strand
ggaggagaacgucuaugaa

SEQ ID NO: 2190176 - RNA, 19 nt, Homo sapiens
  misc_RNA (1)...(19): siRNA sense strand
gggcugacacgcacuuuau

SEQ ID NO: 2190177 - RNA, 19 nt, Homo sapiens
  misc_RNA (1)...(19): siRNA sense strand
ggacuaggcaauaaaauga

SEQ ID NO: 2190178 - RNA, 19 nt, Homo sapiens
  misc_RNA (1)...(19): siRNA sense strand
ccaagaguaucuggaaaca

SEQ ID NO: 2190179 - RNA, 19 nt, Homo sapiens
  misc_RNA (1)...(19): siRNA sense strand
ggacaagauaucagaaugg

SEQ ID NO: 2190180 - RNA, 19 nt, Homo sapiens
  misc_RNA (1)...(19): siRNA sense strand
gcccaagaguaucuggaaa

SEQ ID NO: 2190181 - RNA, 19 nt, Homo sapiens
  misc_RNA (1)...(19): siRNA sense strand
gagaggagggucaucuuca

SEQ ID NO: 2190182 - RNA, 19 nt, Homo sapiens
  misc_RNA (1)...(19): siRNA sense strand
caacaguucccucugaagu

SEQ ID NO: 2190183 - RNA, 19 nt, Homo sapiens
  misc_RNA (1)...(19): siRNA sense strand
cgaaucaacgccauuuaug

SEQ ID NO: 2190184 - RNA, 19 nt, Homo sapiens
  misc_RNA (1)...(19): siRNA sense strand
cacaagucccucaacauaa

SEQ ID NO: 2190185 - RNA, 19 nt, Homo sapiens
  misc_RNA (1)...(19): siRNA sense strand
aagaguaucuggaaacacu

SEQ ID NO: 2190186 - RNA, 19 nt, Homo sapiens
  misc_RNA (1)...(19): siRNA sense strand
ggagcagaagguucgguua

SEQ ID NO: 2190187 - RNA, 19 nt, Homo sapiens
  misc_RNA (1)...(19): siRNA sense strand
ucaagcugcuggacacuag

SEQ ID NO: 2190188 - RNA, 19 nt, Homo sapiens
  misc_RNA (1)...(19): siRNA sense strand
ggaauaaaggagcagugaa

SEQ ID NO: 2190189 - RNA, 19 nt, Homo sapiens
  misc_RNA (1)...(19): siRNA sense strand
agucaagaauggauauguu

SEQ ID NO: 2190190 - RNA, 19 nt, Homo sapiens
  misc_RNA (1)...(19): siRNA sense strand
cagacggacaggaggauua

SEQ ID NO: 2190191 - RNA, 19 nt, Homo sapiens
  misc_RNA (1)...(19): siRNA sense strand
caacagccgguuccucaga

SEQ ID NO: 2190192 - RNA, 19 nt, Homo sapiens
  misc_RNA (1)...(19): siRNA sense strand
cggaggagaacgucuauga

SEQ ID NO: 2190193 - RNA, 19 nt, Homo sapiens
  misc_RNA (1)...(19): siRNA sense strand
acagaaaguccuaugaguu

SEQ ID NO: 2190194 - RNA, 19 nt, Homo sapiens
  misc_RNA (1)...(19): siRNA sense strand
gagaaggagaggaauaaag

SEQ ID NO: 2190195 - RNA, 19 nt, Homo sapiens
  misc_RNA (1)...(19): siRNA sense strand
ggucacagaggcuaagaau

SEQ ID NO: 2190196 - RNA, 19 nt, Homo sapiens
  misc_RNA (1)...(19): siRNA sense strand
gcaaaaccauccuugucaa

SEQ ID NO: 2190197 - RNA, 19 nt, Homo sapiens
  misc_RNA (1)...(19): siRNA sense strand
acaguucccucugaaguug

SEQ ID NO: 2190198 - RNA, 19 nt, Homo sapiens
  misc_RNA (1)...(19): siRNA sense strand
ugccagaacucacccaaca

SEQ ID NO: 2190199 - RNA, 19 nt, Homo sapiens
  misc_RNA (1)...(19): siRNA sense strand
gcaggaagaagagaaagau

SEQ ID NO: 2190200 - RNA, 19 nt, Homo sapiens
  misc_RNA (1)...(19): siRNA sense strand
aggagaacgucuaugaaga

SEQ ID NO: 2190201 - RNA, 19 nt, Homo sapiens
  misc_RNA (1)...(19): siRNA sense strand
cacagaaaguccuaugagu

SEQ ID NO: 2190202 - RNA, 19 nt, Homo sapiens
  misc_RNA (1)...(19): siRNA sense strand
gaacgggaaguggauccua

SEQ ID NO: 2190203 - RNA, 19 nt, Homo sapiens
  misc_RNA (1)...(19): siRNA sense strand
gaaggagaggaauaaagga

SEQ ID NO: 2190204 - RNA, 19 nt, Homo sapiens
  misc_RNA (1)...(19): siRNA sense strand
gaggagggucaucuucauu

SEQ ID NO: 2190205 - RNA, 19 nt, Homo sapiens
  misc_RNA (1)...(19): siRNA sense strand
ggagaggagggucaucuuc

SEQ ID NO: 2190206 - RNA, 19 nt, Homo sapiens
  misc_RNA (1)...(19): siRNA sense strand
aagcugguguugcgaauca

SEQ ID NO: 2190207 - RNA, 19 nt, Homo sapiens
  misc_RNA (1)...(19): siRNA sense strand
acacugcccuccugacaag

SEQ ID NO: 2190208 - RNA, 19 nt, Homo sapiens
  misc_RNA (1)...(19): siRNA sense strand
aggaaagguucaugcagaa

SEQ ID NO: 2190209 - RNA, 19 nt, Homo sapiens
  misc_RNA (1)...(19): siRNA sense strand
ccaagagccuccgccacuu

SEQ ID NO: 2190210 - RNA, 19 nt, Homo sapiens
  misc_RNA (1)...(19): siRNA sense strand
ccaccuggucuguguguuu

SEQ ID NO: 2190211 - RNA, 19 nt, Homo sapiens
  misc_RNA (1)...(19): siRNA sense strand
caggaaaagugacagauga

SEQ ID NO: 2190212 - RNA, 19 nt, Homo sapiens
  misc_RNA (1)...(19): siRNA sense strand
ggcaucggcuucaggaaag

SEQ ID NO: 2190213 - RNA, 19 nt, Homo sapiens
  misc_RNA (1)...(19): siRNA sense strand
gaaugaggccaggaacaga

SEQ ID NO: 2190214 - RNA, 19 nt, Homo sapiens
  misc_RNA (1)...(19): siRNA sense strand
acacagaggagaagcugaa

SEQ ID NO: 2190215 - RNA, 19 nt, Homo sapiens
  misc_RNA (1)...(19): siRNA sense strand
gaagaggcugucccaguca

SEQ ID NO: 2190216 - RNA, 19 nt, Homo sapiens
  misc_RNA (1)...(19): siRNA sense strand
agagaaagauacccaagcu

SEQ ID NO: 2190217 - RNA, 19 nt, Homo sapiens
  misc_RNA (1)...(19): siRNA sense strand
acagagaaggagaggaaua

SEQ ID NO: 2190218 - RNA, 19 nt, Homo sapiens
  misc_RNA (1)...(19): siRNA sense strand
gaggacaucgaguuacaug

SEQ ID NO: 2190219 - RNA, 19 nt, Homo sapiens
  misc_RNA (1)...(19): siRNA sense strand
ucgagcacguggacuuuga

SEQ ID NO: 2190220 - RNA, 19 nt, Homo sapiens
  misc_RNA (1)...(19): siRNA sense strand
gaagcugagucgggaugga

SEQ ID NO: 2190221 - RNA, 19 nt, Homo sapiens
  misc_RNA (1)...(19): siRNA sense strand
ggaacgagcuggcuuguga

SEQ ID NO: 2190222 - RNA, 19 nt, Homo sapiens
  misc_RNA (1)...(19): siRNA sense strand
gcacaagucccucaacaua

SEQ ID NO: 2190223 - RNA, 19 nt, Homo sapiens
  misc_RNA (1)...(19): siRNA sense strand
gaaguuuacugcauuguga

SEQ ID NO: 2190224 - RNA, 19 nt, Homo sapiens
  misc_RNA (1)...(19): siRNA sense strand
caacauaaaggacaagaua

SEQ ID NO: 2190225 - RNA, 19 nt, Homo sapiens
  misc_RNA (1)...(19): siRNA sense strand
gaacagagagcacagagaa

SEQ ID NO: 2190226 - RNA, 19 nt, Homo sapiens
  misc_RNA (1)...(19): siRNA sense strand
gaacugaggugaucgaacu

SEQ ID NO: 2190227 - RNA, 19 nt, Homo sapiens
  misc_RNA (1)...(19): siRNA sense strand
gcacagcggugucaauaag

SEQ ID NO: 2190228 - RNA, 19 nt, Homo sapiens
  misc_RNA (1)...(19): siRNA sense strand
agaagugugucuugaauuu

SEQ ID NO: 2190229 - RNA, 19 nt, Homo sapiens
  misc_RNA (1)...(19): siRNA sense strand
gaauggauauguucagcuu

SEQ ID NO: 2190230 - RNA, 19 nt, Homo sapiens
  misc_RNA (1)...(19): siRNA sense strand
gcaaagcugucuccuccaa

SEQ ID NO: 2190231 - RNA, 19 nt, Homo sapiens
  misc_RNA (1)...(19): siRNA sense strand
ccuaugaguuugaagauuu

SEQ ID NO: 2190232 - RNA, 19 nt, Homo sapiens
  misc_RNA (1)...(19): siRNA sense strand
gcacagagaaggagaggaa

SEQ ID NO: 2190233 - RNA, 19 nt, Homo sapiens
  misc_RNA (1)...(19): siRNA sense strand
gagagaagcugaggaccaa

SEQ ID NO: 2190234 - RNA, 19 nt, Homo sapiens
  misc_RNA (1)...(19): siRNA sense strand
cagcagcccugaugacauu

SEQ ID NO: 2190235 - RNA, 19 nt, Homo sapiens
  misc_RNA (1)...(19): siRNA sense strand
ccacaaagcccuucaucaa

SEQ ID NO: 2190236 - RNA, 19 nt, Homo sapiens
  misc_RNA (1)...(19): siRNA sense strand
acaagucccucaacauaaa

SEQ ID NO: 2190237 - RNA, 19 nt, Homo sapiens
  misc_RNA (1)...(19): siRNA sense strand
ucagacagauggacgauga

SEQ ID NO: 2190238 - RNA, 19 nt, Homo sapiens
  misc_RNA (1)...(19): siRNA sense strand
cagaaaguccuaugaguuu

SEQ ID NO: 2190239 - RNA, 19 nt, Homo sapiens
  misc_RNA (1)...(19): siRNA sense strand
gcagcaggguggacuggua

SEQ ID NO: 2190240 - RNA, 19 nt, Homo sapiens
  misc_RNA (1)...(19): siRNA sense strand
gaaagaaacgggugaagag

SEQ ID NO: 2190241 - RNA, 19 nt, Homo sapiens
  misc_RNA (1)...(19): siRNA sense strand
ugaacgagguggugucuga

SEQ ID NO: 2190242 - RNA, 19 nt, Homo sapiens
  misc_RNA (1)...(19): siRNA sense strand
gaaucaacgccauuuauga

SEQ ID NO: 2190243 - RNA, 19 nt, Homo sapiens
  misc_RNA (1)...(19): siRNA sense strand
gagcacagcggugucaaua

SEQ ID NO: 2190244 - RNA, 19 nt, Homo sapiens
  misc_RNA (1)...(19): siRNA sense strand
guucaaacaugccggagaa

SEQ ID NO: 2190245 - RNA, 19 nt, Homo sapiens
  misc_RNA (1)...(19): siRNA sense strand
gguggugucugaagccuuu

SEQ ID NO: 2190246 - RNA, 19 nt, Homo sapiens
  misc_RNA (1)...(19): siRNA sense strand
ugaagggacuaggcaauaa

SEQ ID NO: 2190247 - RNA, 19 nt, Homo sapiens
  misc_RNA (1)...(19): siRNA sense strand
ggaaagaaacgggugaaga

SEQ ID NO: 2190248 - RNA, 19 nt, Homo sapiens
  misc_RNA (1)...(19): siRNA sense strand
gaucuuggaugagguggaa

SEQ ID NO: 2190249 - RNA, 19 nt, Homo sapiens
  misc_RNA (1)...(19): siRNA sense strand
gaaaguccuaugaguuuga

SEQ ID NO: 2190250 - RNA, 19 nt, Homo sapiens
  misc_RNA (1)...(19): siRNA sense strand
ucacagaggcuaagaaugg

SEQ ID NO: 2190251 - RNA, 19 nt, Homo sapiens
  misc_RNA (1)...(19): siRNA sense strand
ccacagaacggcaggaaga

SEQ ID NO: 2190252 - RNA, 19 nt, Homo sapiens
  misc_RNA (1)...(19): siRNA sense strand
gaagggacuaggcaauaaa

SEQ ID NO: 2190253 - RNA, 19 nt, Homo sapiens
  misc_RNA (1)...(19): siRNA sense strand
gggaguggcucagaaguca

SEQ ID NO: 2190254 - RNA, 19 nt, Homo sapiens
  misc_RNA (1)...(19): siRNA sense strand
cauggagacucagauguuu

SEQ ID NO: 2190255 - RNA, 19 nt, Homo sapiens
  misc_RNA (1)...(19): siRNA sense strand
gguccgagcccaagaguau

SEQ ID NO: 2190256 - RNA, 19 nt, Homo sapiens
  misc_RNA (1)...(19): siRNA sense strand
ugacagaugagaacaguga

SEQ ID NO: 2190257 - RNA, 19 nt, Homo sapiens
  misc_RNA (1)...(19): siRNA sense strand
gauauguucagcuuggaua

SEQ ID NO: 2190258 - RNA, 19 nt, Homo sapiens
  misc_RNA (1)...(19): siRNA sense strand
ggaagagguccuugugguu

SEQ ID NO: 2190259 - RNA, 19 nt, Homo sapiens
  misc_RNA (1)...(19): siRNA sense strand
gguccacccuuccugagaa

SEQ ID NO: 2190260 - RNA, 19 nt, Homo sapiens
  misc_RNA (1)...(19): siRNA sense strand
gagaggaggaguagugaug

SEQ ID NO: 2190261 - RNA, 19 nt, Homo sapiens
  misc_RNA (1)...(19): siRNA sense strand
uaaaggacaagauaucaga

SEQ ID NO: 2190262 - RNA, 19 nt, Homo sapiens
  misc_RNA (1)...(19): siRNA sense strand
ugaagcaggucaagaaacu

SEQ ID NO: 2190263 - RNA, 19 nt, Homo sapiens
  misc_RNA (1)...(19): siRNA sense strand
cggagaacguucaaacaug

SEQ ID NO: 2190264 - RNA, 19 nt, Homo sapiens
  misc_RNA (1)...(19): siRNA sense strand
gcgaaucaacgccauuuau

SEQ ID NO: 2190265 - RNA, 19 nt, Homo sapiens
  misc_RNA (1)...(19): siRNA sense strand
gcagaagguucgguuacug

SEQ ID NO: 2190266 - RNA, 19 nt, Homo sapiens
  misc_RNA (1)...(19): siRNA sense strand
gaagaugggagcagaaggu

SEQ ID NO: 2190267 - RNA, 19 nt, Homo sapiens
  misc_RNA (1)...(19): siRNA sense strand
gaacagugagucugacagu

SEQ ID NO: 2190268 - RNA, 19 nt, Homo sapiens
  misc_RNA (1)...(19): siRNA sense strand
cagagaaggagaggaauaa

SEQ ID NO: 2190269 - RNA, 19 nt, Homo sapiens
  misc_RNA (1)...(19): siRNA sense strand
gaauaaaggagcagugaac

SEQ ID NO: 2190270 - RNA, 19 nt, Homo sapiens
  misc_RNA (1)...(19): siRNA sense strand
ucagaacccuugcccaucu

SEQ ID NO: 2190271 - RNA, 19 nt, Homo sapiens
  misc_RNA (1)...(19): siRNA sense strand
aaagcugucuccuccaaga

SEQ ID NO: 2190272 - RNA, 19 nt, Homo sapiens
  misc_RNA (1)...(19): siRNA sense strand
gaggagaacgucuaugaag

SEQ ID NO: 2190273 - RNA, 19 nt, Homo sapiens
  misc_RNA (1)...(19): siRNA sense strand
gaucaggagucaggcuuca

SEQ ID NO: 2190274 - RNA, 19 nt, Homo sapiens
  misc_RNA (1)...(19): siRNA sense strand
ggacaucgaguuacauggu

SEQ ID NO: 2190275 - RNA, 19 nt, Homo sapiens
  misc_RNA (1)...(19): siRNA sense strand
ggaggagaacgucuaugaa

SEQ ID NO: 2190276 - RNA, 19 nt, Homo sapiens
  misc_RNA (1)...(19): siRNA sense strand
gggcugacacgcacuuuau

SEQ ID NO: 2190277 - RNA, 19 nt, Homo sapiens
  misc_RNA (1)...(19): siRNA sense strand
ggacuaggcaauaaaauga

SEQ ID NO: 2190278 - RNA, 19 nt, Homo sapiens
  misc_RNA (1)...(19): siRNA sense strand
ccaagaguaucuggaaaca

SEQ ID NO: 2190279 - RNA, 19 nt, Homo sapiens
  misc_RNA (1)...(19): siRNA sense strand
ggacaagauaucagaaugg

SEQ ID NO: 2190280 - RNA, 19 nt, Homo sapiens
  misc_RNA (1)...(19): siRNA sense strand
gcccaagaguaucuggaaa

SEQ ID NO: 2190281 - RNA, 19 nt, Homo sapiens
  misc_RNA (1)...(19): siRNA sense strand
gagaggagggucaucuuca

SEQ ID NO: 2190282 - RNA, 19 nt, Homo sapiens
  misc_RNA (1)...(19): siRNA sense strand
caacaguucccucugaagu

SEQ ID NO: 2190283 - RNA, 19 nt, Homo sapiens
  misc_RNA (1)...(19): siRNA sense strand
cgaaucaacgccauuuaug

SEQ ID NO: 2190284 - RNA, 19 nt, Homo sapiens
  misc_RNA (1)...(19): siRNA sense strand
cacaagucccucaacauaa

SEQ ID NO: 2190285 - RNA, 19 nt, Homo sapiens
  misc_RNA (1)...(19): siRNA sense strand
aagaguaucuggaaacacu

SEQ ID NO: 2190286 - RNA, 19 nt, Homo sapiens
  misc_RNA (1)...(19): siRNA sense strand
ggagcagaagguucgguua

SEQ ID NO: 2190287 - RNA, 19 nt, Homo sapiens
  misc_RNA (1)...(19): siRNA sense strand
ucaagcugcuggacacuag

SEQ ID NO: 2190288 - RNA, 19 nt, Homo sapiens
  misc_RNA (1)...(19): siRNA sense strand
ggaauaaaggagcagugaa

SEQ ID NO: 2190289 - RNA, 19 nt, Homo sapiens
  misc_RNA (1)...(19): siRNA sense strand
agucaagaauggauauguu

SEQ ID NO: 2190290 - RNA, 19 nt, Homo sapiens
  misc_RNA (1)...(19): siRNA sense strand
cagacggacaggaggauua

SEQ ID NO: 2190291 - RNA, 19 nt, Homo sapiens
  misc_RNA (1)...(19): siRNA sense strand
caacagccgguuccucaga

SEQ ID NO: 2190292 - RNA, 19 nt, Homo sapiens
  misc_RNA (1)...(19): siRNA sense strand
cggaggagaacgucuauga

SEQ ID NO: 2190293 - RNA, 19 nt, Homo sapiens
  misc_RNA (1)...(19): siRNA sense strand
acagaaaguccuaugaguu

SEQ ID NO: 2190294 - RNA, 19 nt, Homo sapiens
  misc_RNA (1)...(19): siRNA sense strand
gagaaggagaggaauaaag

SEQ ID NO: 2190295 - RNA, 19 nt, Homo sapiens
  misc_RNA (1)...(19): siRNA sense strand
ggucacagaggcuaagaau

SEQ ID NO: 2190296 - RNA, 19 nt, Homo sapiens
  misc_RNA (1)...(19): siRNA sense strand
gcaaaaccauccuugucaa

SEQ ID NO: 2190297 - RNA, 19 nt, Homo sapiens
  misc_RNA (1)...(19): siRNA sense strand
acaguucccucugaaguug

SEQ ID NO: 2190298 - RNA, 19 nt, Homo sapiens
  misc_RNA (1)...(19): siRNA sense strand
ugccagaacucacccaaca

SEQ ID NO: 2190299 - RNA, 19 nt, Homo sapiens
  misc_RNA (1)...(19): siRNA sense strand
gcaggaagaagagaaagau

SEQ ID NO: 2190300 - RNA, 19 nt, Homo sapiens
  misc_RNA (1)...(19): siRNA sense strand
aggagaacgucuaugaaga

SEQ ID NO: 2190301 - RNA, 19 nt, Homo sapiens
  misc_RNA (1)...(19): siRNA sense strand
cacagaaaguccuaugagu

SEQ ID NO: 2190302 - RNA, 19 nt, Homo sapiens
  misc_RNA (1)...(19): siRNA sense strand
gaacgggaaguggauccua

SEQ ID NO: 2190303 - RNA, 19 nt, Homo sapiens
  misc_RNA (1)...(19): siRNA sense strand
gaaggagaggaauaaagga

SEQ ID NO: 2190304 - RNA, 19 nt, Homo sapiens
  misc_RNA (1)...(19): siRNA sense strand
gaggagggucaucuucauu

SEQ ID NO: 2190305 - RNA, 19 nt, Homo sapiens
  misc_RNA (1)...(19): siRNA sense strand
ggagaggagggucaucuuc

SEQ ID NO: 2190306 - RNA, 19 nt, Homo sapiens
  misc_RNA (1)...(19): siRNA sense strand
aagcugguguugcgaauca

SEQ ID NO: 2190307 - RNA, 19 nt, Homo sapiens
  misc_RNA (1)...(19): siRNA sense strand
acacugcccuccugacaag

SEQ ID NO: 2190308 - RNA, 19 nt, Homo sapiens
  misc_RNA (1)...(19): siRNA sense strand
aggaaagguucaugcagaa

SEQ ID NO: 2190309 - RNA, 19 nt, Homo sapiens
  misc_RNA (1)...(19): siRNA sense strand
ccaagagccuccgccacuu

SEQ ID NO: 2190310 - RNA, 19 nt, Homo sapiens
  misc_RNA (1)...(19): siRNA sense strand
ccaccuggucuguguguuu

SEQ ID NO: 2190311 - RNA, 19 nt, Homo sapiens
  misc_RNA (1)...(19): siRNA sense strand
caggaaaagugacagauga

SEQ ID NO: 2190312 - RNA, 19 nt, Homo sapiens
  misc_RNA (1)...(19): siRNA sense strand
ggcaucggcuucaggaaag

SEQ ID NO: 2190313 - RNA, 19 nt, Homo sapiens
  misc_RNA (1)...(19): siRNA sense strand
gaaugaggccaggaacaga

SEQ ID NO: 2190314 - RNA, 19 nt, Homo sapiens
  misc_RNA (1)...(19): siRNA sense strand
acacagaggagaagcugaa

SEQ ID NO: 2190315 - RNA, 19 nt, Homo sapiens
  misc_RNA (1)...(19): siRNA sense strand
gaagaggcugucccaguca

SEQ ID NO: 2190316 - RNA, 19 nt, Homo sapiens
  misc_RNA (1)...(19): siRNA sense strand
agagaaagauacccaagcu

SEQ ID NO: 2190317 - RNA, 19 nt, Homo sapiens
  misc_RNA (1)...(19): siRNA sense strand
acagagaaggagaggaaua

SEQ ID NO: 2190318 - RNA, 19 nt, Homo sapiens
  misc_RNA (1)...(19): siRNA sense strand
gaggacaucgaguuacaug

SEQ ID NO: 2190319 - RNA, 19 nt, Homo sapiens
  misc_RNA (1)...(19): siRNA sense strand
ucgagcacguggacuuuga

SEQ ID NO: 2190320 - RNA, 19 nt, Homo sapiens
  misc_RNA (1)...(19): siRNA sense strand
gaagcugagucgggaugga

SEQ ID NO: 2190321 - RNA, 19 nt, Homo sapiens
  misc_RNA (1)...(19): siRNA sense strand
gaacagggaugcuuagaua

SEQ ID NO: 2190322 - RNA, 19 nt, Homo sapiens
  misc_RNA (1)...(19): siRNA sense strand
gaagaauacuggaaaguug

SEQ ID NO: 2190323 - RNA, 19 nt, Homo sapiens
  misc_RNA (1)...(19): siRNA sense strand
gaagaggauugccguuuaa

SEQ ID NO: 2190324 - RNA, 19 nt, Homo sapiens
  misc_RNA (1)...(19): siRNA sense strand
ggacuugugugcugccuua

SEQ ID NO: 2190325 - RNA, 19 nt, Homo sapiens
  misc_RNA (1)...(19): siRNA sense strand
gacaagagcuacugcauca

SEQ ID NO: 2190326 - RNA, 19 nt, Homo sapiens
  misc_RNA (1)...(19): siRNA sense strand
gaugaacaguugaacauga

SEQ ID NO: 2190327 - RNA, 19 nt, Homo sapiens
  misc_RNA (1)...(19): siRNA sense strand
agaagaggauugccguuua

SEQ ID NO: 2190328 - RNA, 19 nt, Homo sapiens
  misc_RNA (1)...(19): siRNA sense strand
agaaagaccugcggcauaa

SEQ ID NO: 2190329 - RNA, 19 nt, Homo sapiens
  misc_RNA (1)...(19): siRNA sense strand
gcaggaaauucaucuacaa

SEQ ID NO: 2190330 - RNA, 19 nt, Homo sapiens
  misc_RNA (1)...(19): siRNA sense strand
gaacaagggagaaugcuau

SEQ ID NO: 2190331 - RNA, 19 nt, Homo sapiens
  misc_RNA (1)...(19): siRNA sense strand
gcaaaggcuuccuccagaa

SEQ ID NO: 2190332 - RNA, 19 nt, Homo sapiens
  misc_RNA (1)...(19): siRNA sense strand
caagggagaaugcuauuaa

SEQ ID NO: 2190333 - RNA, 19 nt, Homo sapiens
  misc_RNA (1)...(19): siRNA sense strand
gcagauacccaaaguacaa

SEQ ID NO: 2190334 - RNA, 19 nt, Homo sapiens
  misc_RNA (1)...(19): siRNA sense strand
gcuugaagguccacuugua

SEQ ID NO: 2190335 - RNA, 19 nt, Homo sapiens
  misc_RNA (1)...(19): siRNA sense strand
gacaagaccuuccgguaca

SEQ ID NO: 2190336 - RNA, 19 nt, Homo sapiens
  misc_RNA (1)...(19): siRNA sense strand
ggcagaagcaaauguauaa

SEQ ID NO: 2190337 - RNA, 19 nt, Homo sapiens
  misc_RNA (1)...(19): siRNA sense strand
caacuagcccuccuacuga

SEQ ID NO: 2190338 - RNA, 19 nt, Homo sapiens
  misc_RNA (1)...(19): siRNA sense strand
gaggauugccguuuaaaug

SEQ ID NO: 2190339 - RNA, 19 nt, Homo sapiens
  misc_RNA (1)...(19): siRNA sense strand
ccagggcgcuuagaaauuc

SEQ ID NO: 2190340 - RNA, 19 nt, Homo sapiens
  misc_RNA (1)...(19): siRNA sense strand
cuggaaaguugcuauguuu

SEQ ID NO: 2190341 - RNA, 19 nt, Homo sapiens
  misc_RNA (1)...(19): siRNA sense strand
gggagaaugcuauuaauca

SEQ ID NO: 2190342 - RNA, 19 nt, Homo sapiens
  misc_RNA (1)...(19): siRNA sense strand
gccauucucuugugugaug

SEQ ID NO: 2190343 - RNA, 19 nt, Homo sapiens
  misc_RNA (1)...(19): siRNA sense strand
guaaggagggauuugcuaa

SEQ ID NO: 2190344 - RNA, 19 nt, Homo sapiens
  misc_RNA (1)...(19): siRNA sense strand
uugaugauguggccuuaua

SEQ ID NO: 2190345 - RNA, 19 nt, Homo sapiens
  misc_RNA (1)...(19): siRNA sense strand
ggaaagagagaaagauuuu

SEQ ID NO: 2190346 - RNA, 19 nt, Homo sapiens
  misc_RNA (1)...(19): siRNA sense strand
gggaaagagagaaagauuu

SEQ ID NO: 2190347 - RNA, 19 nt, Homo sapiens
  misc_RNA (1)...(19): siRNA sense strand
gcaaauguauaagcaagag

SEQ ID NO: 2190348 - RNA, 19 nt, Homo sapiens
  misc_RNA (1)...(19): siRNA sense strand
cauaugauccagacaagaa

SEQ ID NO: 2190349 - RNA, 19 nt, Homo sapiens
  misc_RNA (1)...(19): siRNA sense strand
ggagaaugcuauuaaucag

SEQ ID NO: 2190350 - RNA, 19 nt, Homo sapiens
  misc_RNA (1)...(19): siRNA sense strand
gggccaaccugaagaagca

SEQ ID NO: 2190351 - RNA, 19 nt, Homo sapiens
  misc_RNA (1)...(19): siRNA sense strand
gaaaguugcuauguuuuga

SEQ ID NO: 2190352 - RNA, 19 nt, Homo sapiens
  misc_RNA (1)...(19): siRNA sense strand
caagagaugaagaccaauu

SEQ ID NO: 2190353 - RNA, 19 nt, Homo sapiens
  misc_RNA (1)...(19): siRNA sense strand
ggaacaagggagaaugcua

SEQ ID NO: 2190354 - RNA, 19 nt, Homo sapiens
  misc_RNA (1)...(19): siRNA sense strand
caguugaacaugaagaaua

SEQ ID NO: 2190355 - RNA, 19 nt, Homo sapiens
  misc_RNA (1)...(19): siRNA sense strand
gggagauccuggagaagug

SEQ ID NO: 2190356 - RNA, 19 nt, Homo sapiens
  misc_RNA (1)...(19): siRNA sense strand
ugaagguccacuuguauaa

SEQ ID NO: 2190357 - RNA, 19 nt, Homo sapiens
  misc_RNA (1)...(19): siRNA sense strand
ggaaggccuccaugaaguu

SEQ ID NO: 2190358 - RNA, 19 nt, Homo sapiens
  misc_RNA (1)...(19): siRNA sense strand
ccucgucacucaucagguu

SEQ ID NO: 2190359 - RNA, 19 nt, Homo sapiens
  misc_RNA (1)...(19): siRNA sense strand
gaugauguggccuuauauu

SEQ ID NO: 2190360 - RNA, 19 nt, Homo sapiens
  misc_RNA (1)...(19): siRNA sense strand
agaagcaaauguauaagca

SEQ ID NO: 2190361 - RNA, 19 nt, Homo sapiens
  misc_RNA (1)...(19): siRNA sense strand
gaaagucuuccaaguaagg

SEQ ID NO: 2190362 - RNA, 19 nt, Homo sapiens
  misc_RNA (1)...(19): siRNA sense strand
aagaaagaccugcggcaua

SEQ ID NO: 2190363 - RNA, 19 nt, Homo sapiens
  misc_RNA (1)...(19): siRNA sense strand
gaaggaacucccaggacaa

SEQ ID NO: 2190364 - RNA, 19 nt, Homo sapiens
  misc_RNA (1)...(19): siRNA sense strand
gaacaguugaacaugaaga

SEQ ID NO: 2190365 - RNA, 19 nt, Homo sapiens
  misc_RNA (1)...(19): siRNA sense strand
cagcgaacagggaugcuua

SEQ ID NO: 2190366 - RNA, 19 nt, Homo sapiens
  misc_RNA (1)...(19): siRNA sense strand
gaagaagcaccugugucua

SEQ ID NO: 2190367 - RNA, 19 nt, Homo sapiens
  misc_RNA (1)...(19): siRNA sense strand
uaacugugacauuugauga

SEQ ID NO: 2190368 - RNA, 19 nt, Homo sapiens
  misc_RNA (1)...(19): siRNA sense strand
aagagaugaagaccaauua

SEQ ID NO: 2190369 - RNA, 19 nt, Homo sapiens
  misc_RNA (1)...(19): siRNA sense strand
ggcaggaaauucaucuaca

SEQ ID NO: 2190370 - RNA, 19 nt, Homo sapiens
  misc_RNA (1)...(19): siRNA sense strand
ugaagaauacuggaaaguu

SEQ ID NO: 2190371 - RNA, 19 nt, Homo sapiens
  misc_RNA (1)...(19): siRNA sense strand
ccaauuacgagacccuuga

SEQ ID NO: 2190372 - RNA, 19 nt, Homo sapiens
  misc_RNA (1)...(19): siRNA sense strand
ggacgagcacaucagaguu

SEQ ID NO: 2190373 - RNA, 19 nt, Homo sapiens
  misc_RNA (1)...(19): siRNA sense strand
ugaagaagcaccugugucu

SEQ ID NO: 2190374 - RNA, 19 nt, Homo sapiens
  misc_RNA (1)...(19): siRNA sense strand
ccacagggccaagaugcua

SEQ ID NO: 2190375 - RNA, 19 nt, Homo sapiens
  misc_RNA (1)...(19): siRNA sense strand
ggauugccguuuaaauggu

SEQ ID NO: 2190376 - RNA, 19 nt, Homo sapiens
  misc_RNA (1)...(19): siRNA sense strand
cagauuugaucacauggau

SEQ ID NO: 2190377 - RNA, 19 nt, Homo sapiens
  misc_RNA (1)...(19): siRNA sense strand
agcaagagaugaagaccaa

SEQ ID NO: 2190378 - RNA, 19 nt, Homo sapiens
  misc_RNA (1)...(19): siRNA sense strand
gagaaguggcagaagcaaa

SEQ ID NO: 2190379 - RNA, 19 nt, Homo sapiens
  misc_RNA (1)...(19): siRNA sense strand
cgguaacugugacauuuga

SEQ ID NO: 2190380 - RNA, 19 nt, Homo sapiens
  misc_RNA (1)...(19): siRNA sense strand
gcaaaaguuucacucaaca

SEQ ID NO: 2190381 - RNA, 19 nt, Homo sapiens
  misc_RNA (1)...(19): siRNA sense strand
caaaagccauucucuugug

SEQ ID NO: 2190382 - RNA, 19 nt, Homo sapiens
  misc_RNA (1)...(19): siRNA sense strand
cgcagaggcuccuguguca

SEQ ID NO: 2190383 - RNA, 19 nt, Homo sapiens
  misc_RNA (1)...(19): siRNA sense strand
acagggaugcuuagauaaa

SEQ ID NO: 2190384 - RNA, 19 nt, Homo sapiens
  misc_RNA (1)...(19): siRNA sense strand
gaagcaaauguauaagcaa

SEQ ID NO: 2190385 - RNA, 19 nt, Homo sapiens
  misc_RNA (1)...(19): siRNA sense strand
caagccagauuugaucaca

SEQ ID NO: 2190386 - RNA, 19 nt, Homo sapiens
  misc_RNA (1)...(19): siRNA sense strand
uaaggagggauuugcuaaa

SEQ ID NO: 2190387 - RNA, 19 nt, Homo sapiens
  misc_RNA (1)...(19): siRNA sense strand
uggcagaagcaaauguaua

SEQ ID NO: 2190388 - RNA, 19 nt, Homo sapiens
  misc_RNA (1)...(19): siRNA sense strand
aagaugcuauuccugcuau

SEQ ID NO: 2190389 - RNA, 19 nt, Homo sapiens
  misc_RNA (1)...(19): siRNA sense strand
aaacaagaaggacaacuag

SEQ ID NO: 2190390 - RNA, 19 nt, Homo sapiens
  misc_RNA (1)...(19): siRNA sense strand
gcucaagacccacauugca

SEQ ID NO: 2190391 - RNA, 19 nt, Homo sapiens
  misc_RNA (1)...(19): siRNA sense strand
acaagagcuucuccuggaa

SEQ ID NO: 2190392 - RNA, 19 nt, Homo sapiens
  misc_RNA (1)...(19): siRNA sense strand
acaacuagcccuccuacug

SEQ ID NO: 2190393 - RNA, 19 nt, Homo sapiens
  misc_RNA (1)...(19): siRNA sense strand
agaaguggcagaagcaaau

SEQ ID NO: 2190394 - RNA, 19 nt, Homo sapiens
  misc_RNA (1)...(19): siRNA sense strand
caagaugcuauuccugcua

SEQ ID NO: 2190395 - RNA, 19 nt, Homo sapiens
  misc_RNA (1)...(19): siRNA sense strand
agugggagauccuggagaa

SEQ ID NO: 2190396 - RNA, 19 nt, Homo sapiens
  misc_RNA (1)...(19): siRNA sense strand
cagcauaugauccagacaa

SEQ ID NO: 2190397 - RNA, 19 nt, Homo sapiens
  misc_RNA (1)...(19): siRNA sense strand
aagccauucucuuguguga

SEQ ID NO: 2190398 - RNA, 19 nt, Homo sapiens
  misc_RNA (1)...(19): siRNA sense strand
gcagugagugugagaagag

SEQ ID NO: 2190399 - RNA, 19 nt, Homo sapiens
  misc_RNA (1)...(19): siRNA sense strand
cagaggcuccugugucaga

SEQ ID NO: 2190400 - RNA, 19 nt, Homo sapiens
  misc_RNA (1)...(19): siRNA sense strand
caugaagaauacuggaaag

SEQ ID NO: 2190401 - RNA, 19 nt, Homo sapiens
  misc_RNA (1)...(19): siRNA sense strand
aaaguuucacucaacagua

SEQ ID NO: 2190402 - RNA, 19 nt, Homo sapiens
  misc_RNA (1)...(19): siRNA sense strand
uguauaagcaagagaugaa

SEQ ID NO: 2190403 - RNA, 19 nt, Homo sapiens
  misc_RNA (1)...(19): siRNA sense strand
acuggaaaguugcuauguu

SEQ ID NO: 2190404 - RNA, 19 nt, Homo sapiens
  misc_RNA (1)...(19): siRNA sense strand
augaacaguugaacaugaa

SEQ ID NO: 2190405 - RNA, 19 nt, Homo sapiens
  misc_RNA (1)...(19): siRNA sense strand
gacgagcacaucagaguuc

SEQ ID NO: 2190406 - RNA, 19 nt, Homo sapiens
  misc_RNA (1)...(19): siRNA sense strand
ggcaugaagguccaucuga

SEQ ID NO: 2190407 - RNA, 19 nt, Homo sapiens
  misc_RNA (1)...(19): siRNA sense strand
ggacaaaagaagaggauug

SEQ ID NO: 2190408 - RNA, 19 nt, Homo sapiens
  misc_RNA (1)...(19): siRNA sense strand
ggaaaguugcuauguuuug

SEQ ID NO: 2190409 - RNA, 19 nt, Homo sapiens
  misc_RNA (1)...(19): siRNA sense strand
gaagguccacuuguauaag

SEQ ID NO: 2190410 - RNA, 19 nt, Homo sapiens
  misc_RNA (1)...(19): siRNA sense strand
gagcacaucagaguucaca

SEQ ID NO: 2190411 - RNA, 19 nt, Homo sapiens
  misc_RNA (1)...(19): siRNA sense strand
aagggagaaugcuauuaau

SEQ ID NO: 2190412 - RNA, 19 nt, Homo sapiens
  misc_RNA (1)...(19): siRNA sense strand
gcucacagaacacauucga

SEQ ID NO: 2190413 - RNA, 19 nt, Homo sapiens
  misc_RNA (1)...(19): siRNA sense strand
gccaaaagccauucucuug

SEQ ID NO: 2190414 - RNA, 19 nt, Homo sapiens
  misc_RNA (1)...(19): siRNA sense strand
agagaagcccuaccagugu

SEQ ID NO: 2190415 - RNA, 19 nt, Homo sapiens
  misc_RNA (1)...(19): siRNA sense strand
ggaacaagagugggagauc

SEQ ID NO: 2190416 - RNA, 19 nt, Homo sapiens
  misc_RNA (1)...(19): siRNA sense strand
aagaagaggauugccguuu

SEQ ID NO: 2190417 - RNA, 19 nt, Homo sapiens
  misc_RNA (1)...(19): siRNA sense strand
cgaggagcccuuccagugu

SEQ ID NO: 2190418 - RNA, 19 nt, Homo sapiens
  misc_RNA (1)...(19): siRNA sense strand
guaacugugacauuugaug

SEQ ID NO: 2190419 - RNA, 19 nt, Homo sapiens
  misc_RNA (1)...(19): siRNA sense strand
cgagggaaagagagaaaga

SEQ ID NO: 2190420 - RNA, 19 nt, Homo sapiens
  misc_RNA (1)...(19): siRNA sense strand
uucgguaacugugacauuu

SEQ ID NO: 2190421 - RNA, 19 nt, Homo sapiens
  misc_RNA (1)...(19): siRNA sense strand
gaacagggaugcuuagaua

SEQ ID NO: 2190422 - RNA, 19 nt, Homo sapiens
  misc_RNA (1)...(19): siRNA sense strand
gaagaauacuggaaaguug

SEQ ID NO: 2190423 - RNA, 19 nt, Homo sapiens
  misc_RNA (1)...(19): siRNA sense strand
gaagaggauugccguuuaa

SEQ ID NO: 2190424 - RNA, 19 nt, Homo sapiens
  misc_RNA (1)...(19): siRNA sense strand
ggacuugugugcugccuua

SEQ ID NO: 2190425 - RNA, 19 nt, Homo sapiens
  misc_RNA (1)...(19): siRNA sense strand
gacaagagcuacugcauca

SEQ ID NO: 2190426 - RNA, 19 nt, Homo sapiens
  misc_RNA (1)...(19): siRNA sense strand
gaugaacaguugaacauga

SEQ ID NO: 2190427 - RNA, 19 nt, Homo sapiens
  misc_RNA (1)...(19): siRNA sense strand
agaagaggauugccguuua

SEQ ID NO: 2190428 - RNA, 19 nt, Homo sapiens
  misc_RNA (1)...(19): siRNA sense strand
agaaagaccugcggcauaa

SEQ ID NO: 2190429 - RNA, 19 nt, Homo sapiens
  misc_RNA (1)...(19): siRNA sense strand
gcaggaaauucaucuacaa

SEQ ID NO: 2190430 - RNA, 19 nt, Homo sapiens
  misc_RNA (1)...(19): siRNA sense strand
gaacaagggagaaugcuau

SEQ ID NO: 2190431 - RNA, 19 nt, Homo sapiens
  misc_RNA (1)...(19): siRNA sense strand
gcaaaggcuuccuccagaa

SEQ ID NO: 2190432 - RNA, 19 nt, Homo sapiens
  misc_RNA (1)...(19): siRNA sense strand
caagggagaaugcuauuaa

SEQ ID NO: 2190433 - RNA, 19 nt, Homo sapiens
  misc_RNA (1)...(19): siRNA sense strand
gcagauacccaaaguacaa

SEQ ID NO: 2190434 - RNA, 19 nt, Homo sapiens
  misc_RNA (1)...(19): siRNA sense strand
gcuugaagguccacuugua

SEQ ID NO: 2190435 - RNA, 19 nt, Homo sapiens
  misc_RNA (1)...(19): siRNA sense strand
gacaagaccuuccgguaca

SEQ ID NO: 2190436 - RNA, 19 nt, Homo sapiens
  misc_RNA (1)...(19): siRNA sense strand
ggcagaagcaaauguauaa

SEQ ID NO: 2190437 - RNA, 19 nt, Homo sapiens
  misc_RNA (1)...(19): siRNA sense strand
caacuagcccuccuacuga

SEQ ID NO: 2190438 - RNA, 19 nt, Homo sapiens
  misc_RNA (1)...(19): siRNA sense strand
gaggauugccguuuaaaug

SEQ ID NO: 2190439 - RNA, 19 nt, Homo sapiens
  misc_RNA (1)...(19): siRNA sense strand
ccagggcgcuuagaaauuc

SEQ ID NO: 2190440 - RNA, 19 nt, Homo sapiens
  misc_RNA (1)...(19): siRNA sense strand
cuggaaaguugcuauguuu

SEQ ID NO: 2190441 - RNA, 19 nt, Homo sapiens
  misc_RNA (1)...(19): siRNA sense strand
gggagaaugcuauuaauca

SEQ ID NO: 2190442 - RNA, 19 nt, Homo sapiens
  misc_RNA (1)...(19): siRNA sense strand
gccauucucuugugugaug

SEQ ID NO: 2190443 - RNA, 19 nt, Homo sapiens
  misc_RNA (1)...(19): siRNA sense strand
guaaggagggauuugcuaa

SEQ ID NO: 2190444 - RNA, 19 nt, Homo sapiens
  misc_RNA (1)...(19): siRNA sense strand
uugaugauguggccuuaua

SEQ ID NO: 2190445 - RNA, 19 nt, Homo sapiens
  misc_RNA (1)...(19): siRNA sense strand
ggaaagagagaaagauuuu

SEQ ID NO: 2190446 - RNA, 19 nt, Homo sapiens
  misc_RNA (1)...(19): siRNA sense strand
gggaaagagagaaagauuu

SEQ ID NO: 2190447 - RNA, 19 nt, Homo sapiens
  misc_RNA (1)...(19): siRNA sense strand
gcaaauguauaagcaagag

SEQ ID NO: 2190448 - RNA, 19 nt, Homo sapiens
  misc_RNA (1)...(19): siRNA sense strand
cauaugauccagacaagaa

SEQ ID NO: 2190449 - RNA, 19 nt, Homo sapiens
  misc_RNA (1)...(19): siRNA sense strand
ggagaaugcuauuaaucag

SEQ ID NO: 2190450 - RNA, 19 nt, Homo sapiens
  misc_RNA (1)...(19): siRNA sense strand
gggccaaccugaagaagca

SEQ ID NO: 2190451 - RNA, 19 nt, Homo sapiens
  misc_RNA (1)...(19): siRNA sense strand
gaaaguugcuauguuuuga

SEQ ID NO: 2190452 - RNA, 19 nt, Homo sapiens
  misc_RNA (1)...(19): siRNA sense strand
caagagaugaagaccaauu

SEQ ID NO: 2190453 - RNA, 19 nt, Homo sapiens
  misc_RNA (1)...(19): siRNA sense strand
ggaacaagggagaaugcua

SEQ ID NO: 2190454 - RNA, 19 nt, Homo sapiens
  misc_RNA (1)...(19): siRNA sense strand
caguugaacaugaagaaua

SEQ ID NO: 2190455 - RNA, 19 nt, Homo sapiens
  misc_RNA (1)...(19): siRNA sense strand
gggagauccuggagaagug

SEQ ID NO: 2190456 - RNA, 19 nt, Homo sapiens
  misc_RNA (1)...(19): siRNA sense strand
ugaagguccacuuguauaa

SEQ ID NO: 2190457 - RNA, 19 nt, Homo sapiens
  misc_RNA (1)...(19): siRNA sense strand
ggaaggccuccaugaaguu

SEQ ID NO: 2190458 - RNA, 19 nt, Homo sapiens
  misc_RNA (1)...(19): siRNA sense strand
ccucgucacucaucagguu

SEQ ID NO: 2190459 - RNA, 19 nt, Homo sapiens
  misc_RNA (1)...(19): siRNA sense strand
gaugauguggccuuauauu

SEQ ID NO: 2190460 - RNA, 19 nt, Homo sapiens
  misc_RNA (1)...(19): siRNA sense strand
agaagcaaauguauaagca

SEQ ID NO: 2190461 - RNA, 19 nt, Homo sapiens
  misc_RNA (1)...(19): siRNA sense strand
gaaagucuuccaaguaagg

SEQ ID NO: 2190462 - RNA, 19 nt, Homo sapiens
  misc_RNA (1)...(19): siRNA sense strand
aagaaagaccugcggcaua

SEQ ID NO: 2190463 - RNA, 19 nt, Homo sapiens
  misc_RNA (1)...(19): siRNA sense strand
gaaggaacucccaggacaa

SEQ ID NO: 2190464 - RNA, 19 nt, Homo sapiens
  misc_RNA (1)...(19): siRNA sense strand
gaacaguugaacaugaaga

SEQ ID NO: 2190465 - RNA, 19 nt, Homo sapiens
  misc_RNA (1)...(19): siRNA sense strand
cagcgaacagggaugcuua

SEQ ID NO: 2190466 - RNA, 19 nt, Homo sapiens
  misc_RNA (1)...(19): siRNA sense strand
gaagaagcaccugugucua

SEQ ID NO: 2190467 - RNA, 19 nt, Homo sapiens
  misc_RNA (1)...(19): siRNA sense strand
uaacugugacauuugauga

SEQ ID NO: 2190468 - RNA, 19 nt, Homo sapiens
  misc_RNA (1)...(19): siRNA sense strand
aagagaugaagaccaauua

SEQ ID NO: 2190469 - RNA, 19 nt, Homo sapiens
  misc_RNA (1)...(19): siRNA sense strand
ggcaggaaauucaucuaca

SEQ ID NO: 2190470 - RNA, 19 nt, Homo sapiens
  misc_RNA (1)...(19): siRNA sense strand
ugaagaauacuggaaaguu

SEQ ID NO: 2190471 - RNA, 19 nt, Homo sapiens
  misc_RNA (1)...(19): siRNA sense strand
ccaauuacgagacccuuga

SEQ ID NO: 2190472 - RNA, 19 nt, Homo sapiens
  misc_RNA (1)...(19): siRNA sense strand
ggacgagcacaucagaguu

SEQ ID NO: 2190473 - RNA, 19 nt, Homo sapiens
  misc_RNA (1)...(19): siRNA sense strand
ugaagaagcaccugugucu

SEQ ID NO: 2190474 - RNA, 19 nt, Homo sapiens
  misc_RNA (1)...(19): siRNA sense strand
ccacagggccaagaugcua

SEQ ID NO: 2190475 - RNA, 19 nt, Homo sapiens
  misc_RNA (1)...(19): siRNA sense strand
ggauugccguuuaaauggu

SEQ ID NO: 2190476 - RNA, 19 nt, Homo sapiens
  misc_RNA (1)...(19): siRNA sense strand
cagauuugaucacauggau

SEQ ID NO: 2190477 - RNA, 19 nt, Homo sapiens
  misc_RNA (1)...(19): siRNA sense strand
agcaagagaugaagaccaa

SEQ ID NO: 2190478 - RNA, 19 nt, Homo sapiens
  misc_RNA (1)...(19): siRNA sense strand
gagaaguggcagaagcaaa

SEQ ID NO: 2190479 - RNA, 19 nt, Homo sapiens
  misc_RNA (1)...(19): siRNA sense strand
cgguaacugugacauuuga

SEQ ID NO: 2190480 - RNA, 19 nt, Homo sapiens
  misc_RNA (1)...(19): siRNA sense strand
gcaaaaguuucacucaaca

SEQ ID NO: 2190481 - RNA, 19 nt, Homo sapiens
  misc_RNA (1)...(19): siRNA sense strand
caaaagccauucucuugug

SEQ ID NO: 2190482 - RNA, 19 nt, Homo sapiens
  misc_RNA (1)...(19): siRNA sense strand
cgcagaggcuccuguguca

SEQ ID NO: 2190483 - RNA, 19 nt, Homo sapiens
  misc_RNA (1)...(19): siRNA sense strand
acagggaugcuuagauaaa

SEQ ID NO: 2190484 - RNA, 19 nt, Homo sapiens
  misc_RNA (1)...(19): siRNA sense strand
gaagcaaauguauaagcaa

SEQ ID NO: 2190485 - RNA, 19 nt, Homo sapiens
  misc_RNA (1)...(19): siRNA sense strand
caagccagauuugaucaca

SEQ ID NO: 2190486 - RNA, 19 nt, Homo sapiens
  misc_RNA (1)...(19): siRNA sense strand
uaaggagggauuugcuaaa

SEQ ID NO: 2190487 - RNA, 19 nt, Homo sapiens
  misc_RNA (1)...(19): siRNA sense strand
uggcagaagcaaauguaua

SEQ ID NO: 2190488 - RNA, 19 nt, Homo sapiens
  misc_RNA (1)...(19): siRNA sense strand
aagaugcuauuccugcuau

SEQ ID NO: 2190489 - RNA, 19 nt, Homo sapiens
  misc_RNA (1)...(19): siRNA sense strand
aaacaagaaggacaacuag

SEQ ID NO: 2190490 - RNA, 19 nt, Homo sapiens
  misc_RNA (1)...(19): siRNA sense strand
gcucaagacccacauugca

SEQ ID NO: 2190491 - RNA, 19 nt, Homo sapiens
  misc_RNA (1)...(19): siRNA sense strand
acaagagcuucuccuggaa

SEQ ID NO: 2190492 - RNA, 19 nt, Homo sapiens
  misc_RNA (1)...(19): siRNA sense strand
acaacuagcccuccuacug

SEQ ID NO: 2190493 - RNA, 19 nt, Homo sapiens
  misc_RNA (1)...(19): siRNA sense strand
agaaguggcagaagcaaau

SEQ ID NO: 2190494 - RNA, 19 nt, Homo sapiens
  misc_RNA (1)...(19): siRNA sense strand
caagaugcuauuccugcua

SEQ ID NO: 2190495 - RNA, 19 nt, Homo sapiens
  misc_RNA (1)...(19): siRNA sense strand
agugggagauccuggagaa

SEQ ID NO: 2190496 - RNA, 19 nt, Homo sapiens
  misc_RNA (1)...(19): siRNA sense strand
cagcauaugauccagacaa

SEQ ID NO: 2190497 - RNA, 19 nt, Homo sapiens
  misc_RNA (1)...(19): siRNA sense strand
aagccauucucuuguguga

SEQ ID NO: 2190498 - RNA, 19 nt, Homo sapiens
  misc_RNA (1)...(19): siRNA sense strand
gcagugagugugagaagag

SEQ ID NO: 2190499 - RNA, 19 nt, Homo sapiens
  misc_RNA (1)...(19): siRNA sense strand
cagaggcuccugugucaga

SEQ ID NO: 2190500 - RNA, 19 nt, Homo sapiens
  misc_RNA (1)...(19): siRNA sense strand
caugaagaauacuggaaag

SEQ ID NO: 2190501 - RNA, 19 nt, Homo sapiens
  misc_RNA (1)...(19): siRNA sense strand
aaaguuucacucaacagua

SEQ ID NO: 2190502 - RNA, 19 nt, Homo sapiens
  misc_RNA (1)...(19): siRNA sense strand
uguauaagcaagagaugaa

SEQ ID NO: 2190503 - RNA, 19 nt, Homo sapiens
  misc_RNA (1)...(19): siRNA sense strand
acuggaaaguugcuauguu

SEQ ID NO: 2190504 - RNA, 19 nt, Homo sapiens
  misc_RNA (1)...(19): siRNA sense strand
augaacaguugaacaugaa

SEQ ID NO: 2190505 - RNA, 19 nt, Homo sapiens
  misc_RNA (1)...(19): siRNA sense strand
gacgagcacaucagaguuc

SEQ ID NO: 2190506 - RNA, 19 nt, Homo sapiens
  misc_RNA (1)...(19): siRNA sense strand
ggcaugaagguccaucuga

SEQ ID NO: 2190507 - RNA, 19 nt, Homo sapiens
  misc_RNA (1)...(19): siRNA sense strand
ggacaaaagaagaggauug

SEQ ID NO: 2190508 - RNA, 19 nt, Homo sapiens
  misc_RNA (1)...(19): siRNA sense strand
ggaaaguugcuauguuuug

SEQ ID NO: 2190509 - RNA, 19 nt, Homo sapiens
  misc_RNA (1)...(19): siRNA sense strand
gaagguccacuuguauaag

SEQ ID NO: 2190510 - RNA, 19 nt, Homo sapiens
  misc_RNA (1)...(19): siRNA sense strand
gagcacaucagaguucaca

SEQ ID NO: 2190511 - RNA, 19 nt, Homo sapiens
  misc_RNA (1)...(19): siRNA sense strand
aagggagaaugcuauuaau

SEQ ID NO: 2190512 - RNA, 19 nt, Homo sapiens
  misc_RNA (1)...(19): siRNA sense strand
gcucacagaacacauucga

SEQ ID NO: 2190513 - RNA, 19 nt, Homo sapiens
  misc_RNA (1)...(19): siRNA sense strand
gccaaaagccauucucuug

SEQ ID NO: 2190514 - RNA, 19 nt, Homo sapiens
  misc_RNA (1)...(19): siRNA sense strand
agagaagcccuaccagugu

SEQ ID NO: 2190515 - RNA, 19 nt, Homo sapiens
  misc_RNA (1)...(19): siRNA sense strand
ggaacaagagugggagauc

SEQ ID NO: 2190516 - RNA, 19 nt, Homo sapiens
  misc_RNA (1)...(19): siRNA sense strand
aagaagaggauugccguuu

SEQ ID NO: 2190517 - RNA, 19 nt, Homo sapiens
  misc_RNA (1)...(19): siRNA sense strand
cgaggagcccuuccagugu

SEQ ID NO: 2190518 - RNA, 19 nt, Homo sapiens
  misc_RNA (1)...(19): siRNA sense strand
guaacugugacauuugaug

SEQ ID NO: 2190519 - RNA, 19 nt, Homo sapiens
  misc_RNA (1)...(19): siRNA sense strand
cgagggaaagagagaaaga

SEQ ID NO: 2190520 - RNA, 19 nt, Homo sapiens
  misc_RNA (1)...(19): siRNA sense strand
uucgguaacugugacauuu

SEQ ID NO: 2190521 - RNA, 19 nt, Homo sapiens
  misc_RNA (1)...(19): siRNA sense strand
gagaagcgcuuucgcaaga

SEQ ID NO: 2190522 - RNA, 19 nt, Homo sapiens
  misc_RNA (1)...(19): siRNA sense strand
gagcagauguccucuucua

SEQ ID NO: 2190523 - RNA, 19 nt, Homo sapiens
  misc_RNA (1)...(19): siRNA sense strand
gacaagcgcuucagcaaga

SEQ ID NO: 2190524 - RNA, 19 nt, Homo sapiens
  misc_RNA (1)...(19): siRNA sense strand
ggagaggaguggaugauuc

SEQ ID NO: 2190525 - RNA, 19 nt, Homo sapiens
  misc_RNA (1)...(19): siRNA sense strand
ggaggaaggugcccacaca

SEQ ID NO: 2190526 - RNA, 19 nt, Homo sapiens
  misc_RNA (1)...(19): siRNA sense strand
cagcaucuaucguuacuuc

SEQ ID NO: 2190527 - RNA, 19 nt, Homo sapiens
  misc_RNA (1)...(19): siRNA sense strand
ggaaggugcccacacagaa

SEQ ID NO: 2190528 - RNA, 19 nt, Homo sapiens
  misc_RNA (1)...(19): siRNA sense strand
caccugggcucgcaccaaa

SEQ ID NO: 2190529 - RNA, 19 nt, Homo sapiens
  misc_RNA (1)...(19): siRNA sense strand
gaagguggaggacgaagau

SEQ ID NO: 2190530 - RNA, 19 nt, Homo sapiens
  misc_RNA (1)...(19): siRNA sense strand
cagaagaggaggucgaaug

SEQ ID NO: 2190531 - RNA, 19 nt, Homo sapiens
  misc_RNA (1)...(19): siRNA sense strand
gaagcgcuuucgcaagaag

SEQ ID NO: 2190532 - RNA, 19 nt, Homo sapiens
  misc_RNA (1)...(19): siRNA sense strand
gcgacaagcgcuucagcaa

SEQ ID NO: 2190533 - RNA, 19 nt, Homo sapiens
  misc_RNA (1)...(19): siRNA sense strand
gcaagcgcuucagccagaa

SEQ ID NO: 2190534 - RNA, 19 nt, Homo sapiens
  misc_RNA (1)...(19): siRNA sense strand
ggaaugcgagaagcgcuuu

SEQ ID NO: 2190535 - RNA, 19 nt, Homo sapiens
  misc_RNA (1)...(19): siRNA sense strand
gaaggugcccacacagaac

SEQ ID NO: 2190536 - RNA, 19 nt, Homo sapiens
  misc_RNA (1)...(19): siRNA sense strand
aagaagacgcacuugauuc

SEQ ID NO: 2190537 - RNA, 19 nt, Homo sapiens
  misc_RNA (1)...(19): siRNA sense strand
ggcgagcgguccuucuucu

SEQ ID NO: 2190538 - RNA, 19 nt, Homo sapiens
  misc_RNA (1)...(19): siRNA sense strand
gagaggaguggaugauucg

SEQ ID NO: 2190539 - RNA, 19 nt, Homo sapiens
  misc_RNA (1)...(19): siRNA sense strand
gagaagcgcuuucgcaaga

SEQ ID NO: 2190540 - RNA, 19 nt, Homo sapiens
  misc_RNA (1)...(19): siRNA sense strand
gagcagauguccucuucua

SEQ ID NO: 2190541 - RNA, 19 nt, Homo sapiens
  misc_RNA (1)...(19): siRNA sense strand
gacaagcgcuucagcaaga

SEQ ID NO: 2190542 - RNA, 19 nt, Homo sapiens
  misc_RNA (1)...(19): siRNA sense strand
ggagaggaguggaugauuc

SEQ ID NO: 2190543 - RNA, 19 nt, Homo sapiens
  misc_RNA (1)...(19): siRNA sense strand
ggaggaaggugcccacaca

SEQ ID NO: 2190544 - RNA, 19 nt, Homo sapiens
  misc_RNA (1)...(19): siRNA sense strand
cagcaucuaucguuacuuc

SEQ ID NO: 2190545 - RNA, 19 nt, Homo sapiens
  misc_RNA (1)...(19): siRNA sense strand
ggaaggugcccacacagaa

SEQ ID NO: 2190546 - RNA, 19 nt, Homo sapiens
  misc_RNA (1)...(19): siRNA sense strand
caccugggcucgcaccaaa

SEQ ID NO: 2190547 - RNA, 19 nt, Homo sapiens
  misc_RNA (1)...(19): siRNA sense strand
gaagguggaggacgaagau

SEQ ID NO: 2190548 - RNA, 19 nt, Homo sapiens
  misc_RNA (1)...(19): siRNA sense strand
cagaagaggaggucgaaug

SEQ ID NO: 2190549 - RNA, 19 nt, Homo sapiens
  misc_RNA (1)...(19): siRNA sense strand
gaagcgcuuucgcaagaag

SEQ ID NO: 2190550 - RNA, 19 nt, Homo sapiens
  misc_RNA (1)...(19): siRNA sense strand
gcgacaagcgcuucagcaa

SEQ ID NO: 2190551 - RNA, 19 nt, Homo sapiens
  misc_RNA (1)...(19): siRNA sense strand
gcaagcgcuucagccagaa

SEQ ID NO: 2190552 - RNA, 19 nt, Homo sapiens
  misc_RNA (1)...(19): siRNA sense strand
ggaaugcgagaagcgcuuu

SEQ ID NO: 2190553 - RNA, 19 nt, Homo sapiens
  misc_RNA (1)...(19): siRNA sense strand
gaaggugcccacacagaac

SEQ ID NO: 2190554 - RNA, 19 nt, Homo sapiens
  misc_RNA (1)...(19): siRNA sense strand
aagaagacgcacuugauuc

SEQ ID NO: 2190555 - RNA, 19 nt, Homo sapiens
  misc_RNA (1)...(19): siRNA sense strand
ggcgagcgguccuucuucu

SEQ ID NO: 2190556 - RNA, 19 nt, Homo sapiens
  misc_RNA (1)...(19): siRNA sense strand
gagaggaguggaugauucg

SEQ ID NO: 2190557 - RNA, 19 nt, Homo sapiens
  misc_RNA (1)...(19): siRNA sense strand
gggauguccugcuccaaua

SEQ ID NO: 2190558 - RNA, 19 nt, Homo sapiens
  misc_RNA (1)...(19): siRNA sense strand
gcacugcucuggaguuugc

SEQ ID NO: 2190559 - RNA, 19 nt, Homo sapiens
  misc_RNA (1)...(19): siRNA sense strand
ccaccgccgucugcuguua

SEQ ID NO: 2190560 - RNA, 19 nt, Homo sapiens
  misc_RNA (1)...(19): siRNA sense strand
gugcccagcucucggaaug

SEQ ID NO: 2190561 - RNA, 19 nt, Homo sapiens
  misc_RNA (1)...(19): siRNA sense strand
gguggggucuuucccuuua

SEQ ID NO: 2190562 - RNA, 19 nt, Homo sapiens
  misc_RNA (1)...(19): siRNA sense strand
ccgcacugcucuggaguuu

SEQ ID NO: 2190563 - RNA, 19 nt, Homo sapiens
  misc_RNA (1)...(19): siRNA sense strand
ucuggaguuugcccucuuu

SEQ ID NO: 2190564 - RNA, 19 nt, Homo sapiens
  misc_RNA (1)...(19): siRNA sense strand
gggauguccugcuccaaua

SEQ ID NO: 2190565 - RNA, 19 nt, Homo sapiens
  misc_RNA (1)...(19): siRNA sense strand
gcacugcucuggaguuugc

SEQ ID NO: 2190566 - RNA, 19 nt, Homo sapiens
  misc_RNA (1)...(19): siRNA sense strand
gggccucuauuggguuaua

SEQ ID NO: 2190567 - RNA, 19 nt, Homo sapiens
  misc_RNA (1)...(19): siRNA sense strand
gugcccagcucucggaaug

SEQ ID NO: 2190568 - RNA, 19 nt, Homo sapiens
  misc_RNA (1)...(19): siRNA sense strand
gguggggucuuucccuuua

SEQ ID NO: 2190569 - RNA, 19 nt, Homo sapiens
  misc_RNA (1)...(19): siRNA sense strand
ccgcacugcucuggaguuu

SEQ ID NO: 2190570 - RNA, 19 nt, Homo sapiens
  misc_RNA (1)...(19): siRNA sense strand
ucuggaguuugcccucuuu

SEQ ID NO: 2190571 - RNA, 19 nt, Homo sapiens
  misc_RNA (1)...(19): siRNA sense strand
gagcuacacuguccacuuu

SEQ ID NO: 2190572 - RNA, 19 nt, Homo sapiens
  misc_RNA (1)...(19): siRNA sense strand
gacacucucuucuuccuua

SEQ ID NO: 2190573 - RNA, 19 nt, Homo sapiens
  misc_RNA (1)...(19): siRNA sense strand
caaccaagaccuguacuua

SEQ ID NO: 2190574 - RNA, 19 nt, Homo sapiens
  misc_RNA (1)...(19): siRNA sense strand
gcagcaguaucgcucauuu

SEQ ID NO: 2190575 - RNA, 19 nt, Homo sapiens
  misc_RNA (1)...(19): siRNA sense strand
ccaacaagcccuacaagaa

SEQ ID NO: 2190576 - RNA, 19 nt, Homo sapiens
  misc_RNA (1)...(19): siRNA sense strand
ggagcgggcuuacagugaa

SEQ ID NO: 2190577 - RNA, 19 nt, Homo sapiens
  misc_RNA (1)...(19): siRNA sense strand
ggaugcagguggugucuca

SEQ ID NO: 2190578 - RNA, 19 nt, Homo sapiens
  misc_RNA (1)...(19): siRNA sense strand
gagcucggcuuuccugagu

SEQ ID NO: 2190579 - RNA, 19 nt, Homo sapiens
  misc_RNA (1)...(19): siRNA sense strand
caacaagcccuacaagaag

SEQ ID NO: 2190580 - RNA, 19 nt, Homo sapiens
  misc_RNA (1)...(19): siRNA sense strand
gaagggagcucggcuuucc

SEQ ID NO: 2190581 - RNA, 19 nt, Homo sapiens
  misc_RNA (1)...(19): siRNA sense strand
ucacagagcagcacaccuu

SEQ ID NO: 2190582 - RNA, 19 nt, Homo sapiens
  misc_RNA (1)...(19): siRNA sense strand
gcggagggcugcuucuaca

SEQ ID NO: 2190583 - RNA, 19 nt, Homo sapiens
  misc_RNA (1)...(19): siRNA sense strand
guccugaccucccgagcua

SEQ ID NO: 2190584 - RNA, 19 nt, Homo sapiens
  misc_RNA (1)...(19): siRNA sense strand
caaccgcugucgcaugaau

SEQ ID NO: 2190585 - RNA, 19 nt, Homo sapiens
  misc_RNA (1)...(19): siRNA sense strand
gagcgggcuuacagugaaa

SEQ ID NO: 2190586 - RNA, 19 nt, Homo sapiens
  misc_RNA (1)...(19): siRNA sense strand
gagcucggcuagaccaaag

SEQ ID NO: 2190587 - RNA, 19 nt, Homo sapiens
  misc_RNA (1)...(19): siRNA sense strand
guucaauccugcccuguca

SEQ ID NO: 2190588 - RNA, 19 nt, Homo sapiens
  misc_RNA (1)...(19): siRNA sense strand
gcucaggacucgguacauc

SEQ ID NO: 2190589 - RNA, 19 nt, Homo sapiens
  misc_RNA (1)...(19): siRNA sense strand
caugcaggaugacacauau

SEQ ID NO: 2190590 - RNA, 19 nt, Homo sapiens
  misc_RNA (1)...(19): siRNA sense strand
caguaucgcucauuugaac

SEQ ID NO: 2190591 - RNA, 19 nt, Homo sapiens
  misc_RNA (1)...(19): siRNA sense strand
ggguggaaauccuaccuau

SEQ ID NO: 2190592 - RNA, 19 nt, Homo sapiens
  misc_RNA (1)...(19): siRNA sense strand
gaacaacugcaggcucaga

SEQ ID NO: 2190593 - RNA, 19 nt, Homo sapiens
  misc_RNA (1)...(19): siRNA sense strand
cuucagcgcucuggaguug

SEQ ID NO: 2190594 - RNA, 19 nt, Homo sapiens
  misc_RNA (1)...(19): siRNA sense strand
acaccacacucucgcuuug

SEQ ID NO: 2190595 - RNA, 19 nt, Homo sapiens
  misc_RNA (1)...(19): siRNA sense strand
ccgccuggcucaugucaga

SEQ ID NO: 2190596 - RNA, 19 nt, Homo sapiens
  misc_RNA (1)...(19): siRNA sense strand
cuuggacgcugccucauug

SEQ ID NO: 2190597 - RNA, 19 nt, Homo sapiens
  misc_RNA (1)...(19): siRNA sense strand
gggcuuacagugaaauaga

SEQ ID NO: 2190598 - RNA, 19 nt, Homo sapiens
  misc_RNA (1)...(19): siRNA sense strand
gcccacggcucagugaaga

SEQ ID NO: 2190599 - RNA, 19 nt, Homo sapiens
  misc_RNA (1)...(19): siRNA sense strand
ucucagggcuccaccucuu

SEQ ID NO: 2190600 - RNA, 19 nt, Homo sapiens
  misc_RNA (1)...(19): siRNA sense strand
ucauggacguggucucgaa

SEQ ID NO: 2190601 - RNA, 19 nt, Homo sapiens
  misc_RNA (1)...(19): siRNA sense strand
gcuccagacccauuucuug

SEQ ID NO: 2190602 - RNA, 19 nt, Homo sapiens
  misc_RNA (1)...(19): siRNA sense strand
ggcuuacagugaaauagaa

SEQ ID NO: 2190603 - RNA, 19 nt, Homo sapiens
  misc_RNA (1)...(19): siRNA sense strand
cucaaccgcugucgcauga

SEQ ID NO: 2190604 - RNA, 19 nt, Homo sapiens
  misc_RNA (1)...(19): siRNA sense strand
gagcaggagcaggccaaua

SEQ ID NO: 2190605 - RNA, 19 nt, Homo sapiens
  misc_RNA (1)...(19): siRNA sense strand
gggcagaggaguucauugg

SEQ ID NO: 2190606 - RNA, 19 nt, Homo sapiens
  misc_RNA (1)...(19): siRNA sense strand
gcaguaucgcucauuugaa

SEQ ID NO: 2190607 - RNA, 19 nt, Homo sapiens
  misc_RNA (1)...(19): siRNA sense strand
ggcuggaggugauggaugu

SEQ ID NO: 2190608 - RNA, 19 nt, Homo sapiens
  misc_RNA (1)...(19): siRNA sense strand
gacuacgacugguucuuca

SEQ ID NO: 2190609 - RNA, 19 nt, Homo sapiens
  misc_RNA (1)...(19): siRNA sense strand
uguggacacucucuucuuc

SEQ ID NO: 2190610 - RNA, 19 nt, Homo sapiens
  misc_RNA (1)...(19): siRNA sense strand
guggaaauccuaccuaugc

SEQ ID NO: 2190611 - RNA, 19 nt, Homo sapiens
  misc_RNA (1)...(19): siRNA sense strand
ccgaagguacccucaugua

SEQ ID NO: 2190612 - RNA, 19 nt, Homo sapiens
  misc_RNA (1)...(19): siRNA sense strand
gaagcacccuguggacacu

SEQ ID NO: 2190613 - RNA, 19 nt, Homo sapiens
  misc_RNA (1)...(19): siRNA sense strand
ggcuauggcucucuuugag

SEQ ID NO: 2190614 - RNA, 19 nt, Homo sapiens
  misc_RNA (1)...(19): siRNA sense strand
gggcuuuggcuaccuguug

SEQ ID NO: 2190615 - RNA, 19 nt, Homo sapiens
  misc_RNA (1)...(19): siRNA sense strand
gagcaggccaauagcacuu

SEQ ID NO: 2190616 - RNA, 19 nt, Homo sapiens
  misc_RNA (1)...(19): siRNA sense strand
gcgaggagggccacagaau

SEQ ID NO: 2190617 - RNA, 19 nt, Homo sapiens
  misc_RNA (1)...(19): siRNA sense strand
gcuacacuguccacuuugg

SEQ ID NO: 2190618 - RNA, 19 nt, Homo sapiens
  misc_RNA (1)...(19): siRNA sense strand
gcaggccaauagcacuuag

SEQ ID NO: 2190619 - RNA, 19 nt, Homo sapiens
  misc_RNA (1)...(19): siRNA sense strand
gcagcucaaucggcgcuau

SEQ ID NO: 2190620 - RNA, 19 nt, Homo sapiens
  misc_RNA (1)...(19): siRNA sense strand
ucagcgcucuggaguugga

SEQ ID NO: 2190621 - RNA, 19 nt, Homo sapiens
  misc_RNA (1)...(19): siRNA sense strand
gcaucaaccaagaccugua

SEQ ID NO: 2190622 - RNA, 19 nt, Homo sapiens
  misc_RNA (1)...(19): siRNA sense strand
ucacuucccucgguuacuc

SEQ ID NO: 2190623 - RNA, 19 nt, Homo sapiens
  misc_RNA (1)...(19): siRNA sense strand
agaccaaagugaugaagac

SEQ ID NO: 2190624 - RNA, 19 nt, Homo sapiens
  misc_RNA (1)...(19): siRNA sense strand
gggcugggacuacuucaca

SEQ ID NO: 2190625 - RNA, 19 nt, Homo sapiens
  misc_RNA (1)...(19): siRNA sense strand
cgacuacgacugguucuuc

SEQ ID NO: 2190626 - RNA, 19 nt, Homo sapiens
  misc_RNA (1)...(19): siRNA sense strand
cgacugguucuucaucaug

SEQ ID NO: 2190627 - RNA, 19 nt, Homo sapiens
  misc_RNA (1)...(19): siRNA sense strand
gccacgagaacaugcauug

SEQ ID NO: 2190628 - RNA, 19 nt, Homo sapiens
  misc_RNA (1)...(19): siRNA sense strand
cacccugucuccgaaggua

SEQ ID NO: 2190629 - RNA, 19 nt, Homo sapiens
  misc_RNA (1)...(19): siRNA sense strand
accaagaccuguacuuagg

SEQ ID NO: 2190630 - RNA, 19 nt, Homo sapiens
  misc_RNA (1)...(19): siRNA sense strand
ggucuacgggccacgagaa

SEQ ID NO: 2190631 - RNA, 19 nt, Homo sapiens
  misc_RNA (1)...(19): siRNA sense strand
gaccugcuguuggaaugug

SEQ ID NO: 2190632 - RNA, 19 nt, Homo sapiens
  misc_RNA (1)...(19): siRNA sense strand
gcucccugcuccuuucaca

SEQ ID NO: 2190633 - RNA, 19 nt, Homo sapiens
  misc_RNA (1)...(19): siRNA sense strand
gcuuggacgcugccucauu

SEQ ID NO: 2190634 - RNA, 19 nt, Homo sapiens
  misc_RNA (1)...(19): siRNA sense strand
guacgguggcccaucacuu

SEQ ID NO: 2190635 - RNA, 19 nt, Homo sapiens
  misc_RNA (1)...(19): siRNA sense strand
cagggcuggugcagaaguu

SEQ ID NO: 2190636 - RNA, 19 nt, Homo sapiens
  misc_RNA (1)...(19): siRNA sense strand
cuaccuaugcccuauguca

SEQ ID NO: 2190637 - RNA, 19 nt, Homo sapiens
  misc_RNA (1)...(19): siRNA sense strand
acagugaaauagaacaacu

SEQ ID NO: 2190638 - RNA, 19 nt, Homo sapiens
  misc_RNA (1)...(19): siRNA sense strand
ggacgcugccucauugacu

SEQ ID NO: 2190639 - RNA, 19 nt, Homo sapiens
  misc_RNA (1)...(19): siRNA sense strand
gaggagggccacagaaucc

SEQ ID NO: 2190640 - RNA, 19 nt, Homo sapiens
  misc_RNA (1)...(19): siRNA sense strand
augcauugcucacccuguu

SEQ ID NO: 2190641 - RNA, 19 nt, Homo sapiens
  misc_RNA (1)...(19): siRNA sense strand
ggcuuuggcuaccuguugu

SEQ ID NO: 2190642 - RNA, 19 nt, Homo sapiens
  misc_RNA (1)...(19): siRNA sense strand
cgaggagggccacagaauc

SEQ ID NO: 2190643 - RNA, 19 nt, Homo sapiens
  misc_RNA (1)...(19): siRNA sense strand
ggacacucucuucuuccuu

SEQ ID NO: 2190644 - RNA, 19 nt, Homo sapiens
  misc_RNA (1)...(19): siRNA sense strand
ggacguggucucgaagaag

SEQ ID NO: 2190645 - RNA, 19 nt, Homo sapiens
  misc_RNA (1)...(19): siRNA sense strand
uggacguggucucgaagaa

SEQ ID NO: 2190646 - RNA, 19 nt, Homo sapiens
  misc_RNA (1)...(19): siRNA sense strand
gagccggguggaaauccua

SEQ ID NO: 2190647 - RNA, 19 nt, Homo sapiens
  misc_RNA (1)...(19): siRNA sense strand
ggaagggagcucggcuuuc

SEQ ID NO: 2190648 - RNA, 19 nt, Homo sapiens
  misc_RNA (1)...(19): siRNA sense strand
gggcagcaguaucgcucau

SEQ ID NO: 2190649 - RNA, 19 nt, Homo sapiens
  misc_RNA (1)...(19): siRNA sense strand
ggagggcugcuucuacaac

SEQ ID NO: 2190650 - RNA, 19 nt, Homo sapiens
  misc_RNA (1)...(19): siRNA sense strand
cagcaguaucgcucauuug

SEQ ID NO: 2190651 - RNA, 19 nt, Homo sapiens
  misc_RNA (1)...(19): siRNA sense strand
gcucagugaagaacucuac

SEQ ID NO: 2190652 - RNA, 19 nt, Homo sapiens
  misc_RNA (1)...(19): siRNA sense strand
aauccuaccuaugcccuau

SEQ ID NO: 2190653 - RNA, 19 nt, Homo sapiens
  misc_RNA (1)...(19): siRNA sense strand
gguggaaauccuaccuaug

SEQ ID NO: 2190654 - RNA, 19 nt, Homo sapiens
  misc_RNA (1)...(19): siRNA sense strand
cuccgaagguacccucaug

SEQ ID NO: 2190655 - RNA, 19 nt, Homo sapiens
  misc_RNA (1)...(19): siRNA sense strand
gagcuacacuguccacuuu

SEQ ID NO: 2190656 - RNA, 19 nt, Homo sapiens
  misc_RNA (1)...(19): siRNA sense strand
gacacucucuucuuccuua

SEQ ID NO: 2190657 - RNA, 19 nt, Homo sapiens
  misc_RNA (1)...(19): siRNA sense strand
caaccaagaccuguacuua

SEQ ID NO: 2190658 - RNA, 19 nt, Homo sapiens
  misc_RNA (1)...(19): siRNA sense strand
gcagcaguaucgcucauuu

SEQ ID NO: 2190659 - RNA, 19 nt, Homo sapiens
  misc_RNA (1)...(19): siRNA sense strand
ccaacaagcccuacaagaa

SEQ ID NO: 2190660 - RNA, 19 nt, Homo sapiens
  misc_RNA (1)...(19): siRNA sense strand
ggagcgggcuuacagugaa

SEQ ID NO: 2190661 - RNA, 19 nt, Homo sapiens
  misc_RNA (1)...(19): siRNA sense strand
ggaugcagguggugucuca

SEQ ID NO: 2190662 - RNA, 19 nt, Homo sapiens
  misc_RNA (1)...(19): siRNA sense strand
gagcucggcuuuccugagu

SEQ ID NO: 2190663 - RNA, 19 nt, Homo sapiens
  misc_RNA (1)...(19): siRNA sense strand
caacaagcccuacaagaag

SEQ ID NO: 2190664 - RNA, 19 nt, Homo sapiens
  misc_RNA (1)...(19): siRNA sense strand
gaagggagcucggcuuucc

SEQ ID NO: 2190665 - RNA, 19 nt, Homo sapiens
  misc_RNA (1)...(19): siRNA sense strand
ucacagagcagcacaccuu

SEQ ID NO: 2190666 - RNA, 19 nt, Homo sapiens
  misc_RNA (1)...(19): siRNA sense strand
gcggagggcugcuucuaca

SEQ ID NO: 2190667 - RNA, 19 nt, Homo sapiens
  misc_RNA (1)...(19): siRNA sense strand
guccugaccucccgagcua

SEQ ID NO: 2190668 - RNA, 19 nt, Homo sapiens
  misc_RNA (1)...(19): siRNA sense strand
caaccgcugucgcaugaau

SEQ ID NO: 2190669 - RNA, 19 nt, Homo sapiens
  misc_RNA (1)...(19): siRNA sense strand
gagcgggcuuacagugaaa

SEQ ID NO: 2190670 - RNA, 19 nt, Homo sapiens
  misc_RNA (1)...(19): siRNA sense strand
gagcucggcuagaccaaag

SEQ ID NO: 2190671 - RNA, 19 nt, Homo sapiens
  misc_RNA (1)...(19): siRNA sense strand
guucaauccugcccuguca

SEQ ID NO: 2190672 - RNA, 19 nt, Homo sapiens
  misc_RNA (1)...(19): siRNA sense strand
gcucaggacucgguacauc

SEQ ID NO: 2190673 - RNA, 19 nt, Homo sapiens
  misc_RNA (1)...(19): siRNA sense strand
caugcaggaugacacauau

SEQ ID NO: 2190674 - RNA, 19 nt, Homo sapiens
  misc_RNA (1)...(19): siRNA sense strand
caguaucgcucauuugaac

SEQ ID NO: 2190675 - RNA, 19 nt, Homo sapiens
  misc_RNA (1)...(19): siRNA sense strand
ggguggaaauccuaccuau

SEQ ID NO: 2190676 - RNA, 19 nt, Homo sapiens
  misc_RNA (1)...(19): siRNA sense strand
gaacaacugcaggcucaga

SEQ ID NO: 2190677 - RNA, 19 nt, Homo sapiens
  misc_RNA (1)...(19): siRNA sense strand
cuucagcgcucuggaguug

SEQ ID NO: 2190678 - RNA, 19 nt, Homo sapiens
  misc_RNA (1)...(19): siRNA sense strand
acaccacacucucgcuuug

SEQ ID NO: 2190679 - RNA, 19 nt, Homo sapiens
  misc_RNA (1)...(19): siRNA sense strand
ccgccuggcucaugucaga

SEQ ID NO: 2190680 - RNA, 19 nt, Homo sapiens
  misc_RNA (1)...(19): siRNA sense strand
cuuggacgcugccucauug

SEQ ID NO: 2190681 - RNA, 19 nt, Homo sapiens
  misc_RNA (1)...(19): siRNA sense strand
gggcuuacagugaaauaga

SEQ ID NO: 2190682 - RNA, 19 nt, Homo sapiens
  misc_RNA (1)...(19): siRNA sense strand
gcccacggcucagugaaga

SEQ ID NO: 2190683 - RNA, 19 nt, Homo sapiens
  misc_RNA (1)...(19): siRNA sense strand
ucucagggcuccaccucuu

SEQ ID NO: 2190684 - RNA, 19 nt, Homo sapiens
  misc_RNA (1)...(19): siRNA sense strand
ucauggacguggucucgaa

SEQ ID NO: 2190685 - RNA, 19 nt, Homo sapiens
  misc_RNA (1)...(19): siRNA sense strand
gcuccagacccauuucuug

SEQ ID NO: 2190686 - RNA, 19 nt, Homo sapiens
  misc_RNA (1)...(19): siRNA sense strand
ggcuuacagugaaauagaa

SEQ ID NO: 2190687 - RNA, 19 nt, Homo sapiens
  misc_RNA (1)...(19): siRNA sense strand
cucaaccgcugucgcauga

SEQ ID NO: 2190688 - RNA, 19 nt, Homo sapiens
  misc_RNA (1)...(19): siRNA sense strand
gagcaggagcaggccaaua

SEQ ID NO: 2190689 - RNA, 19 nt, Homo sapiens
  misc_RNA (1)...(19): siRNA sense strand
gggcagaggaguucauugg

SEQ ID NO: 2190690 - RNA, 19 nt, Homo sapiens
  misc_RNA (1)...(19): siRNA sense strand
gcaguaucgcucauuugaa

SEQ ID NO: 2190691 - RNA, 19 nt, Homo sapiens
  misc_RNA (1)...(19): siRNA sense strand
ggcuggaggugauggaugu

SEQ ID NO: 2190692 - RNA, 19 nt, Homo sapiens
  misc_RNA (1)...(19): siRNA sense strand
gacuacgacugguucuuca

SEQ ID NO: 2190693 - RNA, 19 nt, Homo sapiens
  misc_RNA (1)...(19): siRNA sense strand
uguggacacucucuucuuc

SEQ ID NO: 2190694 - RNA, 19 nt, Homo sapiens
  misc_RNA (1)...(19): siRNA sense strand
guggaaauccuaccuaugc

SEQ ID NO: 2190695 - RNA, 19 nt, Homo sapiens
  misc_RNA (1)...(19): siRNA sense strand
ccgaagguacccucaugua

SEQ ID NO: 2190696 - RNA, 19 nt, Homo sapiens
  misc_RNA (1)...(19): siRNA sense strand
gaagcacccuguggacacu

SEQ ID NO: 2190697 - RNA, 19 nt, Homo sapiens
  misc_RNA (1)...(19): siRNA sense strand
ggcuauggcucucuuugag

SEQ ID NO: 2190698 - RNA, 19 nt, Homo sapiens
  misc_RNA (1)...(19): siRNA sense strand
gggcuuuggcuaccuguug

SEQ ID NO: 2190699 - RNA, 19 nt, Homo sapiens
  misc_RNA (1)...(19): siRNA sense strand
gagcaggccaauagcacuu

SEQ ID NO: 2190700 - RNA, 19 nt, Homo sapiens
  misc_RNA (1)...(19): siRNA sense strand
gcgaggagggccacagaau

SEQ ID NO: 2190701 - RNA, 19 nt, Homo sapiens
  misc_RNA (1)...(19): siRNA sense strand
gcuacacuguccacuuugg

SEQ ID NO: 2190702 - RNA, 19 nt, Homo sapiens
  misc_RNA (1)...(19): siRNA sense strand
gcaggccaauagcacuuag

SEQ ID NO: 2190703 - RNA, 19 nt, Homo sapiens
  misc_RNA (1)...(19): siRNA sense strand
gcagcucaaucggcgcuau

SEQ ID NO: 2190704 - RNA, 19 nt, Homo sapiens
  misc_RNA (1)...(19): siRNA sense strand
ucagcgcucuggaguugga

SEQ ID NO: 2190705 - RNA, 19 nt, Homo sapiens
  misc_RNA (1)...(19): siRNA sense strand
gcaucaaccaagaccugua

SEQ ID NO: 2190706 - RNA, 19 nt, Homo sapiens
  misc_RNA (1)...(19): siRNA sense strand
ucacuucccucgguuacuc

SEQ ID NO: 2190707 - RNA, 19 nt, Homo sapiens
  misc_RNA (1)...(19): siRNA sense strand
agaccaaagugaugaagac

SEQ ID NO: 2190708 - RNA, 19 nt, Homo sapiens
  misc_RNA (1)...(19): siRNA sense strand
gggcugggacuacuucaca

SEQ ID NO: 2190709 - RNA, 19 nt, Homo sapiens
  misc_RNA (1)...(19): siRNA sense strand
cgacuacgacugguucuuc

SEQ ID NO: 2190710 - RNA, 19 nt, Homo sapiens
  misc_RNA (1)...(19): siRNA sense strand
cgacugguucuucaucaug

SEQ ID NO: 2190711 - RNA, 19 nt, Homo sapiens
  misc_RNA (1)...(19): siRNA sense strand
gccacgagaacaugcauug

SEQ ID NO: 2190712 - RNA, 19 nt, Homo sapiens
  misc_RNA (1)...(19): siRNA sense strand
cacccugucuccgaaggua

SEQ ID NO: 2190713 - RNA, 19 nt, Homo sapiens
  misc_RNA (1)...(19): siRNA sense strand
accaagaccuguacuuagg

SEQ ID NO: 2190714 - RNA, 19 nt, Homo sapiens
  misc_RNA (1)...(19): siRNA sense strand
ggucuacgggccacgagaa

SEQ ID NO: 2190715 - RNA, 19 nt, Homo sapiens
  misc_RNA (1)...(19): siRNA sense strand
gaccugcuguuggaaugug

SEQ ID NO: 2190716 - RNA, 19 nt, Homo sapiens
  misc_RNA (1)...(19): siRNA sense strand
gcucccugcuccuuucaca

SEQ ID NO: 2190717 - RNA, 19 nt, Homo sapiens
  misc_RNA (1)...(19): siRNA sense strand
gcuuggacgcugccucauu

SEQ ID NO: 2190718 - RNA, 19 nt, Homo sapiens
  misc_RNA (1)...(19): siRNA sense strand
guacgguggcccaucacuu

SEQ ID NO: 2190719 - RNA, 19 nt, Homo sapiens
  misc_RNA (1)...(19): siRNA sense strand
cagggcuggugcagaaguu

SEQ ID NO: 2190720 - RNA, 19 nt, Homo sapiens
  misc_RNA (1)...(19): siRNA sense strand
cuaccuaugcccuauguca

SEQ ID NO: 2190721 - RNA, 19 nt, Homo sapiens
  misc_RNA (1)...(19): siRNA sense strand
acagugaaauagaacaacu

SEQ ID NO: 2190722 - RNA, 19 nt, Homo sapiens
  misc_RNA (1)...(19): siRNA sense strand
ggacgcugccucauugacu

SEQ ID NO: 2190723 - RNA, 19 nt, Homo sapiens
  misc_RNA (1)...(19): siRNA sense strand
gaggagggccacagaaucc

SEQ ID NO: 2190724 - RNA, 19 nt, Homo sapiens
  misc_RNA (1)...(19): siRNA sense strand
augcauugcucacccuguu

SEQ ID NO: 2190725 - RNA, 19 nt, Homo sapiens
  misc_RNA (1)...(19): siRNA sense strand
ggcuuuggcuaccuguugu

SEQ ID NO: 2190726 - RNA, 19 nt, Homo sapiens
  misc_RNA (1)...(19): siRNA sense strand
cgaggagggccacagaauc

SEQ ID NO: 2190727 - RNA, 19 nt, Homo sapiens
  misc_RNA (1)...(19): siRNA sense strand
ggacacucucuucuuccuu

SEQ ID NO: 2190728 - RNA, 19 nt, Homo sapiens
  misc_RNA (1)...(19): siRNA sense strand
ggacguggucucgaagaag

SEQ ID NO: 2190729 - RNA, 19 nt, Homo sapiens
  misc_RNA (1)...(19): siRNA sense strand
uggacguggucucgaagaa

SEQ ID NO: 2190730 - RNA, 19 nt, Homo sapiens
  misc_RNA (1)...(19): siRNA sense strand
gagccggguggaaauccua

SEQ ID NO: 2190731 - RNA, 19 nt, Homo sapiens
  misc_RNA (1)...(19): siRNA sense strand
ggaagggagcucggcuuuc

SEQ ID NO: 2190732 - RNA, 19 nt, Homo sapiens
  misc_RNA (1)...(19): siRNA sense strand
gggcagcaguaucgcucau

SEQ ID NO: 2190733 - RNA, 19 nt, Homo sapiens
  misc_RNA (1)...(19): siRNA sense strand
ggagggcugcuucuacaac

SEQ ID NO: 2190734 - RNA, 19 nt, Homo sapiens
  misc_RNA (1)...(19): siRNA sense strand
cagcaguaucgcucauuug

SEQ ID NO: 2190735 - RNA, 19 nt, Homo sapiens
  misc_RNA (1)...(19): siRNA sense strand
gcucagugaagaacucuac

SEQ ID NO: 2190736 - RNA, 19 nt, Homo sapiens
  misc_RNA (1)...(19): siRNA sense strand
aauccuaccuaugcccuau

SEQ ID NO: 2190737 - RNA, 19 nt, Homo sapiens
  misc_RNA (1)...(19): siRNA sense strand
gguggaaauccuaccuaug

SEQ ID NO: 2190738 - RNA, 19 nt, Homo sapiens
  misc_RNA (1)...(19): siRNA sense strand
cuccgaagguacccucaug

SEQ ID NO: 2190739 - RNA, 19 nt, Homo sapiens
  misc_RNA (1)...(19): siRNA sense strand
ggccacacauucaucauca

SEQ ID NO: 2190740 - RNA, 19 nt, Homo sapiens
  misc_RNA (1)...(19): siRNA sense strand
acacauucaucaucaacug

SEQ ID NO: 2190741 - RNA, 19 nt, Homo sapiens
  misc_RNA (1)...(19): siRNA sense strand
ucucgcggcucuucagcaa

SEQ ID NO: 2190742 - RNA, 19 nt, Homo sapiens
  misc_RNA (1)...(19): siRNA sense strand
ucgcggcucuucagcaaca

SEQ ID NO: 2190743 - RNA, 19 nt, Homo sapiens
  misc_RNA (1)...(19): siRNA sense strand
cgucgcaggcgucugguuu

SEQ ID NO: 2190744 - RNA, 19 nt, Homo sapiens
  misc_RNA (1)...(19): siRNA sense strand
gugcagugcugugccuagu

SEQ ID NO: 2190745 - RNA, 19 nt, Homo sapiens
  misc_RNA (1)...(19): siRNA sense strand
gccacacauucaucaucaa

SEQ ID NO: 2190746 - RNA, 19 nt, Homo sapiens
  misc_RNA (1)...(19): siRNA sense strand
ggccacacauucaucauca

SEQ ID NO: 2190747 - RNA, 19 nt, Homo sapiens
  misc_RNA (1)...(19): siRNA sense strand
gcagaugucccgggaguuc

SEQ ID NO: 2190748 - RNA, 19 nt, Homo sapiens
  misc_RNA (1)...(19): siRNA sense strand
acacauucaucaucaacug

SEQ ID NO: 2190749 - RNA, 19 nt, Homo sapiens
  misc_RNA (1)...(19): siRNA sense strand
ucugccagcuggaggauga

SEQ ID NO: 2190750 - RNA, 19 nt, Homo sapiens
  misc_RNA (1)...(19): siRNA sense strand
aaagcuaugugaccuucug

SEQ ID NO: 2190751 - RNA, 19 nt, Homo sapiens
  misc_RNA (1)...(19): siRNA sense strand
ucucgcggcucuucagcaa

SEQ ID NO: 2190752 - RNA, 19 nt, Homo sapiens
  misc_RNA (1)...(19): siRNA sense strand
ucgcggcucuucagcaaca

SEQ ID NO: 2190753 - RNA, 19 nt, Homo sapiens
  misc_RNA (1)...(19): siRNA sense strand
ggucuggaguguggacaag

SEQ ID NO: 2190754 - RNA, 19 nt, Homo sapiens
  misc_RNA (1)...(19): siRNA sense strand
gccaacaaccagcucuuca

SEQ ID NO: 2190755 - RNA, 19 nt, Homo sapiens
  misc_RNA (1)...(19): siRNA sense strand
gugcagugcugugccuagu

SEQ ID NO: 2190756 - RNA, 19 nt, Homo sapiens
  misc_RNA (1)...(19): siRNA sense strand
gccacacauucaucaucaa

SEQ ID NO: 2190757 - RNA, 19 nt, Homo sapiens
  misc_RNA (1)...(19): siRNA sense strand
ggccacacauucaucauca

SEQ ID NO: 2190758 - RNA, 19 nt, Homo sapiens
  misc_RNA (1)...(19): siRNA sense strand
gcagaugucccgggaguuc

SEQ ID NO: 2190759 - RNA, 19 nt, Homo sapiens
  misc_RNA (1)...(19): siRNA sense strand
acacauucaucaucaacug

SEQ ID NO: 2190760 - RNA, 19 nt, Homo sapiens
  misc_RNA (1)...(19): siRNA sense strand
ucugccagcuggaggauga

SEQ ID NO: 2190761 - RNA, 19 nt, Homo sapiens
  misc_RNA (1)...(19): siRNA sense strand
aaagcuaugugaccuucug

SEQ ID NO: 2190762 - RNA, 19 nt, Homo sapiens
  misc_RNA (1)...(19): siRNA sense strand
ucucgcggcucuucagcaa

SEQ ID NO: 2190763 - RNA, 19 nt, Homo sapiens
  misc_RNA (1)...(19): siRNA sense strand
ucgcggcucuucagcaaca

SEQ ID NO: 2190764 - RNA, 19 nt, Homo sapiens
  misc_RNA (1)...(19): siRNA sense strand
ggucuggaguguggacaag

SEQ ID NO: 2190765 - RNA, 19 nt, Homo sapiens
  misc_RNA (1)...(19): siRNA sense strand
gccaacaaccagcucuuca

SEQ ID NO: 2190766 - RNA, 19 nt, Homo sapiens
  misc_RNA (1)...(19): siRNA sense strand
gugcagugcugugccuagu

SEQ ID NO: 2190767 - RNA, 19 nt, Homo sapiens
  misc_RNA (1)...(19): siRNA sense strand
gccacacauucaucaucaa

SEQ ID NO: 2190768 - RNA, 19 nt, Homo sapiens
  misc_RNA (1)...(19): siRNA sense strand
gcacagaccugcacaaguu

SEQ ID NO: 2190769 - RNA, 19 nt, Homo sapiens
  misc_RNA (1)...(19): siRNA sense strand
ggagauaucuggaaguuga

SEQ ID NO: 2190770 - RNA, 19 nt, Homo sapiens
  misc_RNA (1)...(19): siRNA sense strand
ggacacaacugaaaccaaa

SEQ ID NO: 2190771 - RNA, 19 nt, Homo sapiens
  misc_RNA (1)...(19): siRNA sense strand
uaaacaagauccaugcaua

SEQ ID NO: 2190772 - RNA, 19 nt, Homo sapiens
  misc_RNA (1)...(19): siRNA sense strand
gaagaaacccagucguaua

SEQ ID NO: 2190773 - RNA, 19 nt, Homo sapiens
  misc_RNA (1)...(19): siRNA sense strand
caaacaaccuauccuguga

SEQ ID NO: 2190774 - RNA, 19 nt, Homo sapiens
  misc_RNA (1)...(19): siRNA sense strand
gaaacccagucguauauau

SEQ ID NO: 2190775 - RNA, 19 nt, Homo sapiens
  misc_RNA (1)...(19): siRNA sense strand
gggaggaaauugcaacaaa

SEQ ID NO: 2190776 - RNA, 19 nt, Homo sapiens
  misc_RNA (1)...(19): siRNA sense strand
gaacauccaugaaaacaaa

SEQ ID NO: 2190777 - RNA, 19 nt, Homo sapiens
  misc_RNA (1)...(19): siRNA sense strand
guacaaccggcuauauuua

SEQ ID NO: 2190778 - RNA, 19 nt, Homo sapiens
  misc_RNA (1)...(19): siRNA sense strand
gcauauuccuuaaacaaga

SEQ ID NO: 2190779 - RNA, 19 nt, Homo sapiens
  misc_RNA (1)...(19): siRNA sense strand
uaacccagauuaugaugaa

SEQ ID NO: 2190780 - RNA, 19 nt, Homo sapiens
  misc_RNA (1)...(19): siRNA sense strand
ggaauuggcaucuauguca

SEQ ID NO: 2190781 - RNA, 19 nt, Homo sapiens
  misc_RNA (1)...(19): siRNA sense strand
gggcacagauggcuacaug

SEQ ID NO: 2190782 - RNA, 19 nt, Homo sapiens
  misc_RNA (1)...(19): siRNA sense strand
cauacaaccuugaaacgaa

SEQ ID NO: 2190783 - RNA, 19 nt, Homo sapiens
  misc_RNA (1)...(19): siRNA sense strand
gaagagaggauuuacaucu

SEQ ID NO: 2190784 - RNA, 19 nt, Homo sapiens
  misc_RNA (1)...(19): siRNA sense strand
caaccuauccugugaucua

SEQ ID NO: 2190785 - RNA, 19 nt, Homo sapiens
  misc_RNA (1)...(19): siRNA sense strand
gggagggccugauaaugaa

SEQ ID NO: 2190786 - RNA, 19 nt, Homo sapiens
  misc_RNA (1)...(19): siRNA sense strand
gauaauaccaaccuauaug

SEQ ID NO: 2190787 - RNA, 19 nt, Homo sapiens
  misc_RNA (1)...(19): siRNA sense strand
gggaagaaacccagucgua

SEQ ID NO: 2190788 - RNA, 19 nt, Homo sapiens
  misc_RNA (1)...(19): siRNA sense strand
gguacaaccggcuauauuu

SEQ ID NO: 2190789 - RNA, 19 nt, Homo sapiens
  misc_RNA (1)...(19): siRNA sense strand
ggacugggucauuguuuaa

SEQ ID NO: 2190790 - RNA, 19 nt, Homo sapiens
  misc_RNA (1)...(19): siRNA sense strand
caacaaaaccccaugaaaa

SEQ ID NO: 2190791 - RNA, 19 nt, Homo sapiens
  misc_RNA (1)...(19): siRNA sense strand
cagauaauaccaaccuaua

SEQ ID NO: 2190792 - RNA, 19 nt, Homo sapiens
  misc_RNA (1)...(19): siRNA sense strand
ggaagaaacccagucguau

SEQ ID NO: 2190793 - RNA, 19 nt, Homo sapiens
  misc_RNA (1)...(19): siRNA sense strand
ucagggaacucuggaggua

SEQ ID NO: 2190794 - RNA, 19 nt, Homo sapiens
  misc_RNA (1)...(19): siRNA sense strand
gaggugauccugggagaua

SEQ ID NO: 2190795 - RNA, 19 nt, Homo sapiens
  misc_RNA (1)...(19): siRNA sense strand
caaacggacugggucauug

SEQ ID NO: 2190796 - RNA, 19 nt, Homo sapiens
  misc_RNA (1)...(19): siRNA sense strand
ggacagcauauuccuuaaa

SEQ ID NO: 2190797 - RNA, 19 nt, Homo sapiens
  misc_RNA (1)...(19): siRNA sense strand
cggacugggucauuguuua

SEQ ID NO: 2190798 - RNA, 19 nt, Homo sapiens
  misc_RNA (1)...(19): siRNA sense strand
ugccagagccaguuuauuu

SEQ ID NO: 2190799 - RNA, 19 nt, Homo sapiens
  misc_RNA (1)...(19): siRNA sense strand
guccauguguguaauguga

SEQ ID NO: 2190800 - RNA, 19 nt, Homo sapiens
  misc_RNA (1)...(19): siRNA sense strand
caaccuauauguguuugga

SEQ ID NO: 2190801 - RNA, 19 nt, Homo sapiens
  misc_RNA (1)...(19): siRNA sense strand
gcaaaccucucccgaacac

SEQ ID NO: 2190802 - RNA, 19 nt, Homo sapiens
  misc_RNA (1)...(19): siRNA sense strand
caagauccaugcauacaac

SEQ ID NO: 2190803 - RNA, 19 nt, Homo sapiens
  misc_RNA (1)...(19): siRNA sense strand
caaguuagaucucaauacc

SEQ ID NO: 2190804 - RNA, 19 nt, Homo sapiens
  misc_RNA (1)...(19): siRNA sense strand
gcagauaauaccaaccuau

SEQ ID NO: 2190805 - RNA, 19 nt, Homo sapiens
  misc_RNA (1)...(19): siRNA sense strand
aguugaaucugcagacuuu

SEQ ID NO: 2190806 - RNA, 19 nt, Homo sapiens
  misc_RNA (1)...(19): siRNA sense strand
ggaggaaauugcaacaaaa

SEQ ID NO: 2190807 - RNA, 19 nt, Homo sapiens
  misc_RNA (1)...(19): siRNA sense strand
agagaggauuuacaucuug

SEQ ID NO: 2190808 - RNA, 19 nt, Homo sapiens
  misc_RNA (1)...(19): siRNA sense strand
gaacucuggagguaucauu

SEQ ID NO: 2190809 - RNA, 19 nt, Homo sapiens
  misc_RNA (1)...(19): siRNA sense strand
cgggagggccugauaauga

SEQ ID NO: 2190810 - RNA, 19 nt, Homo sapiens
  misc_RNA (1)...(19): siRNA sense strand
gacagcauauuccuuaaac

SEQ ID NO: 2190811 - RNA, 19 nt, Homo sapiens
  misc_RNA (1)...(19): siRNA sense strand
cagcauauuccuuaaacaa

SEQ ID NO: 2190812 - RNA, 19 nt, Homo sapiens
  misc_RNA (1)...(19): siRNA sense strand
gaaucgggagggccugaua

SEQ ID NO: 2190813 - RNA, 19 nt, Homo sapiens
  misc_RNA (1)...(19): siRNA sense strand
gcacaaguuagaucucaau

SEQ ID NO: 2190814 - RNA, 19 nt, Homo sapiens
  misc_RNA (1)...(19): siRNA sense strand
caacggcaaugacguccau

SEQ ID NO: 2190815 - RNA, 19 nt, Homo sapiens
  misc_RNA (1)...(19): siRNA sense strand
guacgggcaucccauuugg

SEQ ID NO: 2190816 - RNA, 19 nt, Homo sapiens
  misc_RNA (1)...(19): siRNA sense strand
ggagagagcaacggcaaug

SEQ ID NO: 2190817 - RNA, 19 nt, Homo sapiens
  misc_RNA (1)...(19): siRNA sense strand
ggacucaucgaacgcuuga

SEQ ID NO: 2190818 - RNA, 19 nt, Homo sapiens
  misc_RNA (1)...(19): siRNA sense strand
ccugugaucuaccagaaga

SEQ ID NO: 2190819 - RNA, 19 nt, Homo sapiens
  misc_RNA (1)...(19): siRNA sense strand
cagaagagaggauuuacau

SEQ ID NO: 2190820 - RNA, 19 nt, Homo sapiens
  misc_RNA (1)...(19): siRNA sense strand
ggucauuguuuaagaucug

SEQ ID NO: 2190821 - RNA, 19 nt, Homo sapiens
  misc_RNA (1)...(19): siRNA sense strand
gaaguugaaucugcagacu

SEQ ID NO: 2190822 - RNA, 19 nt, Homo sapiens
  misc_RNA (1)...(19): siRNA sense strand
uauauguguuuggagguua

SEQ ID NO: 2190823 - RNA, 19 nt, Homo sapiens
  misc_RNA (1)...(19): siRNA sense strand
caucgaacgcuugaaauga

SEQ ID NO: 2190824 - RNA, 19 nt, Homo sapiens
  misc_RNA (1)...(19): siRNA sense strand
cuggacagcauauuccuua

SEQ ID NO: 2190825 - RNA, 19 nt, Homo sapiens
  misc_RNA (1)...(19): siRNA sense strand
aagaaacccagucguauau

SEQ ID NO: 2190826 - RNA, 19 nt, Homo sapiens
  misc_RNA (1)...(19): siRNA sense strand
uauaagagaugggcuuugc

SEQ ID NO: 2190827 - RNA, 19 nt, Homo sapiens
  misc_RNA (1)...(19): siRNA sense strand
ggagguacaaccggcuaua

SEQ ID NO: 2190828 - RNA, 19 nt, Homo sapiens
  misc_RNA (1)...(19): siRNA sense strand
gaaguggacaucguugugu

SEQ ID NO: 2190829 - RNA, 19 nt, Homo sapiens
  misc_RNA (1)...(19): siRNA sense strand
guggugaacauccaugaaa

SEQ ID NO: 2190830 - RNA, 19 nt, Homo sapiens
  misc_RNA (1)...(19): siRNA sense strand
caucaauggcucccuuuau

SEQ ID NO: 2190831 - RNA, 19 nt, Homo sapiens
  misc_RNA (1)...(19): siRNA sense strand
gcuauggccaucaucaaug

SEQ ID NO: 2190832 - RNA, 19 nt, Homo sapiens
  misc_RNA (1)...(19): siRNA sense strand
ugggagauaucuggaaguu

SEQ ID NO: 2190833 - RNA, 19 nt, Homo sapiens
  misc_RNA (1)...(19): siRNA sense strand
gcauacaaccuugaaacga

SEQ ID NO: 2190834 - RNA, 19 nt, Homo sapiens
  misc_RNA (1)...(19): siRNA sense strand
gguacgggcaucccauuug

SEQ ID NO: 2190835 - RNA, 19 nt, Homo sapiens
  misc_RNA (1)...(19): siRNA sense strand
auaccaaccuauauguguu

SEQ ID NO: 2190836 - RNA, 19 nt, Homo sapiens
  misc_RNA (1)...(19): siRNA sense strand
guacuuccuggacagcaua

SEQ ID NO: 2190837 - RNA, 19 nt, Homo sapiens
  misc_RNA (1)...(19): siRNA sense strand
gagaguggacacaacugaa

SEQ ID NO: 2190838 - RNA, 19 nt, Homo sapiens
  misc_RNA (1)...(19): siRNA sense strand
aucaauggcucccuuuaug

SEQ ID NO: 2190839 - RNA, 19 nt, Homo sapiens
  misc_RNA (1)...(19): siRNA sense strand
uaccagaagagaggauuua

SEQ ID NO: 2190840 - RNA, 19 nt, Homo sapiens
  misc_RNA (1)...(19): siRNA sense strand
gaggaguggugaacaucca

SEQ ID NO: 2190841 - RNA, 19 nt, Homo sapiens
  misc_RNA (1)...(19): siRNA sense strand
uggcaucuaugucacuugu

SEQ ID NO: 2190842 - RNA, 19 nt, Homo sapiens
  misc_RNA (1)...(19): siRNA sense strand
gcaacaaaaccccaugaaa

SEQ ID NO: 2190843 - RNA, 19 nt, Homo sapiens
  misc_RNA (1)...(19): siRNA sense strand
ggccugauaaugaagacua

SEQ ID NO: 2190844 - RNA, 19 nt, Homo sapiens
  misc_RNA (1)...(19): siRNA sense strand
ucacuugugcugcauggaa

SEQ ID NO: 2190845 - RNA, 19 nt, Homo sapiens
  misc_RNA (1)...(19): siRNA sense strand
cuuuaugucuuuggaggua

SEQ ID NO: 2190846 - RNA, 19 nt, Homo sapiens
  misc_RNA (1)...(19): siRNA sense strand
gagagagcaacggcaauga

SEQ ID NO: 2190847 - RNA, 19 nt, Homo sapiens
  misc_RNA (1)...(19): siRNA sense strand
auacaaccuugaaacgaau

SEQ ID NO: 2190848 - RNA, 19 nt, Homo sapiens
  misc_RNA (1)...(19): siRNA sense strand
acaaccggcuauauuuaca

SEQ ID NO: 2190849 - RNA, 19 nt, Homo sapiens
  misc_RNA (1)...(19): siRNA sense strand
gacaggcuauggccaucau

SEQ ID NO: 2190850 - RNA, 19 nt, Homo sapiens
  misc_RNA (1)...(19): siRNA sense strand
ccaguggcgaccagaaauu

SEQ ID NO: 2190851 - RNA, 19 nt, Homo sapiens
  misc_RNA (1)...(19): siRNA sense strand
gagguacaaccggcuauau

SEQ ID NO: 2190852 - RNA, 19 nt, Homo sapiens
  misc_RNA (1)...(19): siRNA sense strand
ggcaaugacguccaugugu

SEQ ID NO: 2190853 - RNA, 19 nt, Homo sapiens
  misc_RNA (1)...(19): siRNA sense strand
gagguacgggcaucccauu

SEQ ID NO: 2190854 - RNA, 19 nt, Homo sapiens
  misc_RNA (1)...(19): siRNA sense strand
guaaugugaaguauaagag

SEQ ID NO: 2190855 - RNA, 19 nt, Homo sapiens
  misc_RNA (1)...(19): siRNA sense strand
aaugaagacuauccucucu

SEQ ID NO: 2190856 - RNA, 19 nt, Homo sapiens
  misc_RNA (1)...(19): siRNA sense strand
acgaaugccugggaggaaa

SEQ ID NO: 2190857 - RNA, 19 nt, Homo sapiens
  misc_RNA (1)...(19): siRNA sense strand
ggcagauaauaccaaccua

SEQ ID NO: 2190858 - RNA, 19 nt, Homo sapiens
  misc_RNA (1)...(19): siRNA sense strand
agaguggacacaacugaaa

SEQ ID NO: 2190859 - RNA, 19 nt, Homo sapiens
  misc_RNA (1)...(19): siRNA sense strand
uggcucccuuuaugucuuu

SEQ ID NO: 2190860 - RNA, 19 nt, Homo sapiens
  misc_RNA (1)...(19): siRNA sense strand
ugacguccauguguguaau

SEQ ID NO: 2190861 - RNA, 19 nt, Homo sapiens
  misc_RNA (1)...(19): siRNA sense strand
aaaccucucccgaacacaa

SEQ ID NO: 2190862 - RNA, 19 nt, Homo sapiens
  misc_RNA (1)...(19): siRNA sense strand
uaagaucuggcugguggua

SEQ ID NO: 2190863 - RNA, 19 nt, Homo sapiens
  misc_RNA (1)...(19): siRNA sense strand
cuauauguguuuggagguu

SEQ ID NO: 2190864 - RNA, 19 nt, Homo sapiens
  misc_RNA (1)...(19): siRNA sense strand
gauccaugcauacaaccuu

SEQ ID NO: 2190865 - RNA, 19 nt, Homo sapiens
  misc_RNA (1)...(19): siRNA sense strand
aaacaagauccaugcauac

SEQ ID NO: 2190866 - RNA, 19 nt, Homo sapiens
  misc_RNA (1)...(19): siRNA sense strand
ucaauggcucccuuuaugu

SEQ ID NO: 2190867 - RNA, 19 nt, Homo sapiens
  misc_RNA (1)...(19): siRNA sense strand
aaacccagucguauauaug

SEQ ID NO: 2190868 - RNA, 19 nt, Homo sapiens
  misc_RNA (1)...(19): siRNA sense strand
gcacagaccugcacaaguu

SEQ ID NO: 2190869 - RNA, 19 nt, Homo sapiens
  misc_RNA (1)...(19): siRNA sense strand
ggagauaucuggaaguuga

SEQ ID NO: 2190870 - RNA, 19 nt, Homo sapiens
  misc_RNA (1)...(19): siRNA sense strand
ggacacaacugaaaccaaa

SEQ ID NO: 2190871 - RNA, 19 nt, Homo sapiens
  misc_RNA (1)...(19): siRNA sense strand
uaaacaagauccaugcaua

SEQ ID NO: 2190872 - RNA, 19 nt, Homo sapiens
  misc_RNA (1)...(19): siRNA sense strand
gaagaaacccagucguaua

SEQ ID NO: 2190873 - RNA, 19 nt, Homo sapiens
  misc_RNA (1)...(19): siRNA sense strand
caaacaaccuauccuguga

SEQ ID NO: 2190874 - RNA, 19 nt, Homo sapiens
  misc_RNA (1)...(19): siRNA sense strand
gaaacccagucguauauau

SEQ ID NO: 2190875 - RNA, 19 nt, Homo sapiens
  misc_RNA (1)...(19): siRNA sense strand
gggaggaaauugcaacaaa

SEQ ID NO: 2190876 - RNA, 19 nt, Homo sapiens
  misc_RNA (1)...(19): siRNA sense strand
gaacauccaugaaaacaaa

SEQ ID NO: 2190877 - RNA, 19 nt, Homo sapiens
  misc_RNA (1)...(19): siRNA sense strand
guacaaccggcuauauuua

SEQ ID NO: 2190878 - RNA, 19 nt, Homo sapiens
  misc_RNA (1)...(19): siRNA sense strand
gcauauuccuuaaacaaga

SEQ ID NO: 2190879 - RNA, 19 nt, Homo sapiens
  misc_RNA (1)...(19): siRNA sense strand
uaacccagauuaugaugaa

SEQ ID NO: 2190880 - RNA, 19 nt, Homo sapiens
  misc_RNA (1)...(19): siRNA sense strand
ggaauuggcaucuauguca

SEQ ID NO: 2190881 - RNA, 19 nt, Homo sapiens
  misc_RNA (1)...(19): siRNA sense strand
gggcacagauggcuacaug

SEQ ID NO: 2190882 - RNA, 19 nt, Homo sapiens
  misc_RNA (1)...(19): siRNA sense strand
cauacaaccuugaaacgaa

SEQ ID NO: 2190883 - RNA, 19 nt, Homo sapiens
  misc_RNA (1)...(19): siRNA sense strand
gaagagaggauuuacaucu

SEQ ID NO: 2190884 - RNA, 19 nt, Homo sapiens
  misc_RNA (1)...(19): siRNA sense strand
caaccuauccugugaucua

SEQ ID NO: 2190885 - RNA, 19 nt, Homo sapiens
  misc_RNA (1)...(19): siRNA sense strand
gggagggccugauaaugaa

SEQ ID NO: 2190886 - RNA, 19 nt, Homo sapiens
  misc_RNA (1)...(19): siRNA sense strand
gauaauaccaaccuauaug

SEQ ID NO: 2190887 - RNA, 19 nt, Homo sapiens
  misc_RNA (1)...(19): siRNA sense strand
gggaagaaacccagucgua

SEQ ID NO: 2190888 - RNA, 19 nt, Homo sapiens
  misc_RNA (1)...(19): siRNA sense strand
gguacaaccggcuauauuu

SEQ ID NO: 2190889 - RNA, 19 nt, Homo sapiens
  misc_RNA (1)...(19): siRNA sense strand
ggacugggucauuguuuaa

SEQ ID NO: 2190890 - RNA, 19 nt, Homo sapiens
  misc_RNA (1)...(19): siRNA sense strand
caacaaaaccccaugaaaa

SEQ ID NO: 2190891 - RNA, 19 nt, Homo sapiens
  misc_RNA (1)...(19): siRNA sense strand
cagauaauaccaaccuaua

SEQ ID NO: 2190892 - RNA, 19 nt, Homo sapiens
  misc_RNA (1)...(19): siRNA sense strand
ggaagaaacccagucguau

SEQ ID NO: 2190893 - RNA, 19 nt, Homo sapiens
  misc_RNA (1)...(19): siRNA sense strand
ucagggaacucuggaggua

SEQ ID NO: 2190894 - RNA, 19 nt, Homo sapiens
  misc_RNA (1)...(19): siRNA sense strand
gaggugauccugggagaua

SEQ ID NO: 2190895 - RNA, 19 nt, Homo sapiens
  misc_RNA (1)...(19): siRNA sense strand
caaacggacugggucauug

SEQ ID NO: 2190896 - RNA, 19 nt, Homo sapiens
  misc_RNA (1)...(19): siRNA sense strand
ggacagcauauuccuuaaa

SEQ ID NO: 2190897 - RNA, 19 nt, Homo sapiens
  misc_RNA (1)...(19): siRNA sense strand
cggacugggucauuguuua

SEQ ID NO: 2190898 - RNA, 19 nt, Homo sapiens
  misc_RNA (1)...(19): siRNA sense strand
ugccagagccaguuuauuu

SEQ ID NO: 2190899 - RNA, 19 nt, Homo sapiens
  misc_RNA (1)...(19): siRNA sense strand
guccauguguguaauguga

SEQ ID NO: 2190900 - RNA, 19 nt, Homo sapiens
  misc_RNA (1)...(19): siRNA sense strand
caaccuauauguguuugga

SEQ ID NO: 2190901 - RNA, 19 nt, Homo sapiens
  misc_RNA (1)...(19): siRNA sense strand
gcaaaccucucccgaacac

SEQ ID NO: 2190902 - RNA, 19 nt, Homo sapiens
  misc_RNA (1)...(19): siRNA sense strand
caagauccaugcauacaac

SEQ ID NO: 2190903 - RNA, 19 nt, Homo sapiens
  misc_RNA (1)...(19): siRNA sense strand
caaguuagaucucaauacc

SEQ ID NO: 2190904 - RNA, 19 nt, Homo sapiens
  misc_RNA (1)...(19): siRNA sense strand
gcagauaauaccaaccuau

SEQ ID NO: 2190905 - RNA, 19 nt, Homo sapiens
  misc_RNA (1)...(19): siRNA sense strand
aguugaaucugcagacuuu

SEQ ID NO: 2190906 - RNA, 19 nt, Homo sapiens
  misc_RNA (1)...(19): siRNA sense strand
ggaggaaauugcaacaaaa

SEQ ID NO: 2190907 - RNA, 19 nt, Homo sapiens
  misc_RNA (1)...(19): siRNA sense strand
agagaggauuuacaucuug

SEQ ID NO: 2190908 - RNA, 19 nt, Homo sapiens
  misc_RNA (1)...(19): siRNA sense strand
gaacucuggagguaucauu

SEQ ID NO: 2190909 - RNA, 19 nt, Homo sapiens
  misc_RNA (1)...(19): siRNA sense strand
cgggagggccugauaauga

SEQ ID NO: 2190910 - RNA, 19 nt, Homo sapiens
  misc_RNA (1)...(19): siRNA sense strand
gacagcauauuccuuaaac

SEQ ID NO: 2190911 - RNA, 19 nt, Homo sapiens
  misc_RNA (1)...(19): siRNA sense strand
cagcauauuccuuaaacaa

SEQ ID NO: 2190912 - RNA, 19 nt, Homo sapiens
  misc_RNA (1)...(19): siRNA sense strand
gaaucgggagggccugaua

SEQ ID NO: 2190913 - RNA, 19 nt, Homo sapiens
  misc_RNA (1)...(19): siRNA sense strand
gcacaaguuagaucucaau

SEQ ID NO: 2190914 - RNA, 19 nt, Homo sapiens
  misc_RNA (1)...(19): siRNA sense strand
caacggcaaugacguccau

SEQ ID NO: 2190915 - RNA, 19 nt, Homo sapiens
  misc_RNA (1)...(19): siRNA sense strand
guacgggcaucccauuugg

SEQ ID NO: 2190916 - RNA, 19 nt, Homo sapiens
  misc_RNA (1)...(19): siRNA sense strand
ggagagagcaacggcaaug

SEQ ID NO: 2190917 - RNA, 19 nt, Homo sapiens
  misc_RNA (1)...(19): siRNA sense strand
ggacucaucgaacgcuuga

SEQ ID NO: 2190918 - RNA, 19 nt, Homo sapiens
  misc_RNA (1)...(19): siRNA sense strand
ccugugaucuaccagaaga

SEQ ID NO: 2190919 - RNA, 19 nt, Homo sapiens
  misc_RNA (1)...(19): siRNA sense strand
cagaagagaggauuuacau

SEQ ID NO: 2190920 - RNA, 19 nt, Homo sapiens
  misc_RNA (1)...(19): siRNA sense strand
ggucauuguuuaagaucug

SEQ ID NO: 2190921 - RNA, 19 nt, Homo sapiens
  misc_RNA (1)...(19): siRNA sense strand
gaaguugaaucugcagacu

SEQ ID NO: 2190922 - RNA, 19 nt, Homo sapiens
  misc_RNA (1)...(19): siRNA sense strand
uauauguguuuggagguua

SEQ ID NO: 2190923 - RNA, 19 nt, Homo sapiens
  misc_RNA (1)...(19): siRNA sense strand
caucgaacgcuugaaauga

SEQ ID NO: 2190924 - RNA, 19 nt, Homo sapiens
  misc_RNA (1)...(19): siRNA sense strand
cuggacagcauauuccuua

SEQ ID NO: 2190925 - RNA, 19 nt, Homo sapiens
  misc_RNA (1)...(19): siRNA sense strand
aagaaacccagucguauau

SEQ ID NO: 2190926 - RNA, 19 nt, Homo sapiens
  misc_RNA (1)...(19): siRNA sense strand
uauaagagaugggcuuugc

SEQ ID NO: 2190927 - RNA, 19 nt, Homo sapiens
  misc_RNA (1)...(19): siRNA sense strand
ggagguacaaccggcuaua

SEQ ID NO: 2190928 - RNA, 19 nt, Homo sapiens
  misc_RNA (1)...(19): siRNA sense strand
gaaguggacaucguugugu

SEQ ID NO: 2190929 - RNA, 19 nt, Homo sapiens
  misc_RNA (1)...(19): siRNA sense strand
guggugaacauccaugaaa

SEQ ID NO: 2190930 - RNA, 19 nt, Homo sapiens
  misc_RNA (1)...(19): siRNA sense strand
caucaauggcucccuuuau

SEQ ID NO: 2190931 - RNA, 19 nt, Homo sapiens
  misc_RNA (1)...(19): siRNA sense strand
gcuauggccaucaucaaug

SEQ ID NO: 2190932 - RNA, 19 nt, Homo sapiens
  misc_RNA (1)...(19): siRNA sense strand
ugggagauaucuggaaguu

SEQ ID NO: 2190933 - RNA, 19 nt, Homo sapiens
  misc_RNA (1)...(19): siRNA sense strand
gcauacaaccuugaaacga

SEQ ID NO: 2190934 - RNA, 19 nt, Homo sapiens
  misc_RNA (1)...(19): siRNA sense strand
gguacgggcaucccauuug

SEQ ID NO: 2190935 - RNA, 19 nt, Homo sapiens
  misc_RNA (1)...(19): siRNA sense strand
auaccaaccuauauguguu

SEQ ID NO: 2190936 - RNA, 19 nt, Homo sapiens
  misc_RNA (1)...(19): siRNA sense strand
guacuuccuggacagcaua

SEQ ID NO: 2190937 - RNA, 19 nt, Homo sapiens
  misc_RNA (1)...(19): siRNA sense strand
gagaguggacacaacugaa

SEQ ID NO: 2190938 - RNA, 19 nt, Homo sapiens
  misc_RNA (1)...(19): siRNA sense strand
aucaauggcucccuuuaug

SEQ ID NO: 2190939 - RNA, 19 nt, Homo sapiens
  misc_RNA (1)...(19): siRNA sense strand
uaccagaagagaggauuua

SEQ ID NO: 2190940 - RNA, 19 nt, Homo sapiens
  misc_RNA (1)...(19): siRNA sense strand
gaggaguggugaacaucca

SEQ ID NO: 2190941 - RNA, 19 nt, Homo sapiens
  misc_RNA (1)...(19): siRNA sense strand
uggcaucuaugucacuugu

SEQ ID NO: 2190942 - RNA, 19 nt, Homo sapiens
  misc_RNA (1)...(19): siRNA sense strand
gcaacaaaaccccaugaaa

SEQ ID NO: 2190943 - RNA, 19 nt, Homo sapiens
  misc_RNA (1)...(19): siRNA sense strand
ggccugauaaugaagacua

SEQ ID NO: 2190944 - RNA, 19 nt, Homo sapiens
  misc_RNA (1)...(19): siRNA sense strand
ucacuugugcugcauggaa

SEQ ID NO: 2190945 - RNA, 19 nt, Homo sapiens
  misc_RNA (1)...(19): siRNA sense strand
cuuuaugucuuuggaggua

SEQ ID NO: 2190946 - RNA, 19 nt, Homo sapiens
  misc_RNA (1)...(19): siRNA sense strand
gagagagcaacggcaauga

SEQ ID NO: 2190947 - RNA, 19 nt, Homo sapiens
  misc_RNA (1)...(19): siRNA sense strand
auacaaccuugaaacgaau

SEQ ID NO: 2190948 - RNA, 19 nt, Homo sapiens
  misc_RNA (1)...(19): siRNA sense strand
acaaccggcuauauuuaca

SEQ ID NO: 2190949 - RNA, 19 nt, Homo sapiens
  misc_RNA (1)...(19): siRNA sense strand
gacaggcuauggccaucau

SEQ ID NO: 2190950 - RNA, 19 nt, Homo sapiens
  misc_RNA (1)...(19): siRNA sense strand
ccaguggcgaccagaaauu

SEQ ID NO: 2190951 - RNA, 19 nt, Homo sapiens
  misc_RNA (1)...(19): siRNA sense strand
gagguacaaccggcuauau

SEQ ID NO: 2190952 - RNA, 19 nt, Homo sapiens
  misc_RNA (1)...(19): siRNA sense strand
ggcaaugacguccaugugu

SEQ ID NO: 2190953 - RNA, 19 nt, Homo sapiens
  misc_RNA (1)...(19): siRNA sense strand
gagguacgggcaucccauu

SEQ ID NO: 2190954 - RNA, 19 nt, Homo sapiens
  misc_RNA (1)...(19): siRNA sense strand
guaaugugaaguauaagag

SEQ ID NO: 2190955 - RNA, 19 nt, Homo sapiens
  misc_RNA (1)...(19): siRNA sense strand
aaugaagacuauccucucu

SEQ ID NO: 2190956 - RNA, 19 nt, Homo sapiens
  misc_RNA (1)...(19): siRNA sense strand
acgaaugccugggaggaaa

SEQ ID NO: 2190957 - RNA, 19 nt, Homo sapiens
  misc_RNA (1)...(19): siRNA sense strand
ggcagauaauaccaaccua

SEQ ID NO: 2190958 - RNA, 19 nt, Homo sapiens
  misc_RNA (1)...(19): siRNA sense strand
agaguggacacaacugaaa

SEQ ID NO: 2190959 - RNA, 19 nt, Homo sapiens
  misc_RNA (1)...(19): siRNA sense strand
uggcucccuuuaugucuuu

SEQ ID NO: 2190960 - RNA, 19 nt, Homo sapiens
  misc_RNA (1)...(19): siRNA sense strand
ugacguccauguguguaau

SEQ ID NO: 2190961 - RNA, 19 nt, Homo sapiens
  misc_RNA (1)...(19): siRNA sense strand
aaaccucucccgaacacaa

SEQ ID NO: 2190962 - RNA, 19 nt, Homo sapiens
  misc_RNA (1)...(19): siRNA sense strand
uaagaucuggcugguggua

SEQ ID NO: 2190963 - RNA, 19 nt, Homo sapiens
  misc_RNA (1)...(19): siRNA sense strand
cuauauguguuuggagguu

SEQ ID NO: 2190964 - RNA, 19 nt, Homo sapiens
  misc_RNA (1)...(19): siRNA sense strand
gauccaugcauacaaccuu

SEQ ID NO: 2190965 - RNA, 19 nt, Homo sapiens
  misc_RNA (1)...(19): siRNA sense strand
aaacaagauccaugcauac

SEQ ID NO: 2190966 - RNA, 19 nt, Homo sapiens
  misc_RNA (1)...(19): siRNA sense strand
ucaauggcucccuuuaugu

SEQ ID NO: 2190967 - RNA, 19 nt, Homo sapiens
  misc_RNA (1)...(19): siRNA sense strand
aaacccagucguauauaug

SEQ ID NO: 2190968 - RNA, 19 nt, Homo sapiens
  misc_RNA (1)...(19): siRNA sense strand
ggaggaauguucuuguaua

SEQ ID NO: 2190969 - RNA, 19 nt, Homo sapiens
  misc_RNA (1)...(19): siRNA sense strand
ccaacaagcucucuucuuc

SEQ ID NO: 2190970 - RNA, 19 nt, Homo sapiens
  misc_RNA (1)...(19): siRNA sense strand
gcgacggccuccauaauuu

SEQ ID NO: 2190971 - RNA, 19 nt, Homo sapiens
  misc_RNA (1)...(19): siRNA sense strand
ucaacccucuggaagauua

SEQ ID NO: 2190972 - RNA, 19 nt, Homo sapiens
  misc_RNA (1)...(19): siRNA sense strand
gaggaauguucuuguauau

SEQ ID NO: 2190973 - RNA, 19 nt, Homo sapiens
  misc_RNA (1)...(19): siRNA sense strand
gccaagcgcuguugaagug

SEQ ID NO: 2190974 - RNA, 19 nt, Homo sapiens
  misc_RNA (1)...(19): siRNA sense strand
gcugauauguucccugaga

SEQ ID NO: 2190975 - RNA, 19 nt, Homo sapiens
  misc_RNA (1)...(19): siRNA sense strand
gguguccgcuacucugaua

SEQ ID NO: 2190976 - RNA, 19 nt, Homo sapiens
  misc_RNA (1)...(19): siRNA sense strand
ugaaugaggucugucaaga

SEQ ID NO: 2190977 - RNA, 19 nt, Homo sapiens
  misc_RNA (1)...(19): siRNA sense strand
gugaggaguucccacauga

SEQ ID NO: 2190978 - RNA, 19 nt, Homo sapiens
  misc_RNA (1)...(19): siRNA sense strand
gauacggucuccucugugu

SEQ ID NO: 2190979 - RNA, 19 nt, Homo sapiens
  misc_RNA (1)...(19): siRNA sense strand
ucacagagaagaucuugaa

SEQ ID NO: 2190980 - RNA, 19 nt, Homo sapiens
  misc_RNA (1)...(19): siRNA sense strand
ggaccuggaccacaugauu

SEQ ID NO: 2190981 - RNA, 19 nt, Homo sapiens
  misc_RNA (1)...(19): siRNA sense strand
gggauacggucuccucugu

SEQ ID NO: 2190982 - RNA, 19 nt, Homo sapiens
  misc_RNA (1)...(19): siRNA sense strand
cuucauagcucuggcgauu

SEQ ID NO: 2190983 - RNA, 19 nt, Homo sapiens
  misc_RNA (1)...(19): siRNA sense strand
gcaucuugauuccauuuau

SEQ ID NO: 2190984 - RNA, 19 nt, Homo sapiens
  misc_RNA (1)...(19): siRNA sense strand
cugcuuggcuuauggagaa

SEQ ID NO: 2190985 - RNA, 19 nt, Homo sapiens
  misc_RNA (1)...(19): siRNA sense strand
gaagggcagcaucuugauu

SEQ ID NO: 2190986 - RNA, 19 nt, Homo sapiens
  misc_RNA (1)...(19): siRNA sense strand
ggaguucccacaugagcua

SEQ ID NO: 2190987 - RNA, 19 nt, Homo sapiens
  misc_RNA (1)...(19): siRNA sense strand
gaaaggaagggcagcaucu

SEQ ID NO: 2190988 - RNA, 19 nt, Homo sapiens
  misc_RNA (1)...(19): siRNA sense strand
gcuaggagacuuugucauc

SEQ ID NO: 2190989 - RNA, 19 nt, Homo sapiens
  misc_RNA (1)...(19): siRNA sense strand
ccucuucacugcccacaau

SEQ ID NO: 2190990 - RNA, 19 nt, Homo sapiens
  misc_RNA (1)...(19): siRNA sense strand
caggacagauccagauugg

SEQ ID NO: 2190991 - RNA, 19 nt, Homo sapiens
  misc_RNA (1)...(19): siRNA sense strand
aagaagaccuuuuacaaga

SEQ ID NO: 2190992 - RNA, 19 nt, Homo sapiens
  misc_RNA (1)...(19): siRNA sense strand
gaaccucuccacgugcuuu

SEQ ID NO: 2190993 - RNA, 19 nt, Homo sapiens
  misc_RNA (1)...(19): siRNA sense strand
caagcucucuucuucaacu

SEQ ID NO: 2190994 - RNA, 19 nt, Homo sapiens
  misc_RNA (1)...(19): siRNA sense strand
aacaagcucucuucuucaa

SEQ ID NO: 2190995 - RNA, 19 nt, Homo sapiens
  misc_RNA (1)...(19): siRNA sense strand
gagcgacggccuccauaau

SEQ ID NO: 2190996 - RNA, 19 nt, Homo sapiens
  misc_RNA (1)...(19): siRNA sense strand
cuggaggaauguucuugua

SEQ ID NO: 2190997 - RNA, 19 nt, Homo sapiens
  misc_RNA (1)...(19): siRNA sense strand
caacaagcucucuucuuca

SEQ ID NO: 2190998 - RNA, 19 nt, Homo sapiens
  misc_RNA (1)...(19): siRNA sense strand
ccuccgagcgccagguuua

SEQ ID NO: 2190999 - RNA, 19 nt, Homo sapiens
  misc_RNA (1)...(19): siRNA sense strand
gcucaucccggaggcauuu

SEQ ID NO: 2191000 - RNA, 19 nt, Homo sapiens
  misc_RNA (1)...(19): siRNA sense strand
caucuugauuccauuuauc

SEQ ID NO: 2191001 - RNA, 19 nt, Homo sapiens
  misc_RNA (1)...(19): siRNA sense strand
gauauguucccugagauga

SEQ ID NO: 2191002 - RNA, 19 nt, Homo sapiens
  misc_RNA (1)...(19): siRNA sense strand
gaagaagaccuuuuacaag

SEQ ID NO: 2191003 - RNA, 19 nt, Homo sapiens
  misc_RNA (1)...(19): siRNA sense strand
ggcagcaucuugauuccau

SEQ ID NO: 2191004 - RNA, 19 nt, Homo sapiens
  misc_RNA (1)...(19): siRNA sense strand
ucuggaagauuauuauguc

SEQ ID NO: 2191005 - RNA, 19 nt, Homo sapiens
  misc_RNA (1)...(19): siRNA sense strand
ggaggcauuugguuucaac

SEQ ID NO: 2191006 - RNA, 19 nt, Homo sapiens
  misc_RNA (1)...(19): siRNA sense strand
ucauagcucuggcgauugg

SEQ ID NO: 2191007 - RNA, 19 nt, Homo sapiens
  misc_RNA (1)...(19): siRNA sense strand
cugagucgcuucccuccaa

SEQ ID NO: 2191008 - RNA, 19 nt, Homo sapiens
  misc_RNA (1)...(19): siRNA sense strand
gcagcaucuugauuccauu

SEQ ID NO: 2191009 - RNA, 19 nt, Homo sapiens
  misc_RNA (1)...(19): siRNA sense strand
gucaagaggaugaaaggaa

SEQ ID NO: 2191010 - RNA, 19 nt, Homo sapiens
  misc_RNA (1)...(19): siRNA sense strand
ugagaugaaugaggucugu

SEQ ID NO: 2191011 - RNA, 19 nt, Homo sapiens
  misc_RNA (1)...(19): siRNA sense strand
cacaugagcuaggagacuu

SEQ ID NO: 2191012 - RNA, 19 nt, Homo sapiens
  misc_RNA (1)...(19): siRNA sense strand
ggacgagaaggucauugug

SEQ ID NO: 2191013 - RNA, 19 nt, Homo sapiens
  misc_RNA (1)...(19): siRNA sense strand
gggcuuuuaucuuuucuuu

SEQ ID NO: 2191014 - RNA, 19 nt, Homo sapiens
  misc_RNA (1)...(19): siRNA sense strand
gaaagguguccgcuacucu

SEQ ID NO: 2191015 - RNA, 19 nt, Homo sapiens
  misc_RNA (1)...(19): siRNA sense strand
acucuggccuggaugauca

SEQ ID NO: 2191016 - RNA, 19 nt, Homo sapiens
  misc_RNA (1)...(19): siRNA sense strand
gaaugaggucugucaagag

SEQ ID NO: 2191017 - RNA, 19 nt, Homo sapiens
  misc_RNA (1)...(19): siRNA sense strand
ugaaggcccuacucaacca

SEQ ID NO: 2191018 - RNA, 19 nt, Homo sapiens
  misc_RNA (1)...(19): siRNA sense strand
gagcuaggagacuuuguca

SEQ ID NO: 2191019 - RNA, 19 nt, Homo sapiens
  misc_RNA (1)...(19): siRNA sense strand
caucggugcuuccuucacu

SEQ ID NO: 2191020 - RNA, 19 nt, Homo sapiens
  misc_RNA (1)...(19): siRNA sense strand
cuaccugggucuggccuuu

SEQ ID NO: 2191021 - RNA, 19 nt, Homo sapiens
  misc_RNA (1)...(19): siRNA sense strand
gaaccugggccuccugacu

SEQ ID NO: 2191022 - RNA, 19 nt, Homo sapiens
  misc_RNA (1)...(19): siRNA sense strand
ugaggucugucaagaggau

SEQ ID NO: 2191023 - RNA, 19 nt, Homo sapiens
  misc_RNA (1)...(19): siRNA sense strand
gcugaaggcccuacucaac

SEQ ID NO: 2191024 - RNA, 19 nt, Homo sapiens
  misc_RNA (1)...(19): siRNA sense strand
gaccuggaccacaugauuc

SEQ ID NO: 2191025 - RNA, 19 nt, Homo sapiens
  misc_RNA (1)...(19): siRNA sense strand
ggaagggcagcaucuugau

SEQ ID NO: 2191026 - RNA, 19 nt, Homo sapiens
  misc_RNA (1)...(19): siRNA sense strand
uauguucccugagaugaau

SEQ ID NO: 2191027 - RNA, 19 nt, Homo sapiens
  misc_RNA (1)...(19): siRNA sense strand
ugaagaagaccuuuuacaa

SEQ ID NO: 2191028 - RNA, 19 nt, Homo sapiens
  misc_RNA (1)...(19): siRNA sense strand
ggugcuuccuucacugugu

SEQ ID NO: 2191029 - RNA, 19 nt, Homo sapiens
  misc_RNA (1)...(19): siRNA sense strand
ugcgcuagcuggaggaaug

SEQ ID NO: 2191030 - RNA, 19 nt, Homo sapiens
  misc_RNA (1)...(19): siRNA sense strand
cagcaucuugauuccauuu

SEQ ID NO: 2191031 - RNA, 19 nt, Homo sapiens
  misc_RNA (1)...(19): siRNA sense strand
auuauuaugucuccaaguc

SEQ ID NO: 2191032 - RNA, 19 nt, Homo sapiens
  misc_RNA (1)...(19): siRNA sense strand
ugaaagguguccgcuacuc

SEQ ID NO: 2191033 - RNA, 19 nt, Homo sapiens
  misc_RNA (1)...(19): siRNA sense strand
cugcugcucuacuucauag

SEQ ID NO: 2191034 - RNA, 19 nt, Homo sapiens
  misc_RNA (1)...(19): siRNA sense strand
ugacuggauucaccaucau

SEQ ID NO: 2191035 - RNA, 19 nt, Homo sapiens
  misc_RNA (1)...(19): siRNA sense strand
cugacuggauucaccauca

SEQ ID NO: 2191036 - RNA, 19 nt, Homo sapiens
  misc_RNA (1)...(19): siRNA sense strand
caagucugcagugguguuu

SEQ ID NO: 2191037 - RNA, 19 nt, Homo sapiens
  misc_RNA (1)...(19): siRNA sense strand
ucaugaagaagaccuuuua

SEQ ID NO: 2191038 - RNA, 19 nt, Homo sapiens
  misc_RNA (1)...(19): siRNA sense strand
guauauuucucuggcugau

SEQ ID NO: 2191039 - RNA, 19 nt, Homo sapiens
  misc_RNA (1)...(19): siRNA sense strand
cgacggccuccauaauuuc

SEQ ID NO: 2191040 - RNA, 19 nt, Homo sapiens
  misc_RNA (1)...(19): siRNA sense strand
uuucaacccucuggaagau

SEQ ID NO: 2191041 - RNA, 19 nt, Homo sapiens
  misc_RNA (1)...(19): siRNA sense strand
gcugcugcucuacuucaua

SEQ ID NO: 2191042 - RNA, 19 nt, Homo sapiens
  misc_RNA (1)...(19): siRNA sense strand
ugauggagaagcugcagaa

SEQ ID NO: 2191043 - RNA, 19 nt, Homo sapiens
  misc_RNA (1)...(19): siRNA sense strand
gacccugcuuggcuuaugg

SEQ ID NO: 2191044 - RNA, 19 nt, Homo sapiens
  misc_RNA (1)...(19): siRNA sense strand
aggaagggcagcaucuuga

SEQ ID NO: 2191045 - RNA, 19 nt, Homo sapiens
  misc_RNA (1)...(19): siRNA sense strand
ugagcgacggccuccauaa

SEQ ID NO: 2191046 - RNA, 19 nt, Homo sapiens
  misc_RNA (1)...(19): siRNA sense strand
cagcugaaggcccuacuca

SEQ ID NO: 2191047 - RNA, 19 nt, Homo sapiens
  misc_RNA (1)...(19): siRNA sense strand
ccugcaggaucuaauacau

SEQ ID NO: 2191048 - RNA, 19 nt, Homo sapiens
  misc_RNA (1)...(19): siRNA sense strand
gaugaaugaggucugucaa

SEQ ID NO: 2191049 - RNA, 19 nt, Homo sapiens
  misc_RNA (1)...(19): siRNA sense strand
ccugcaggcuucccagagu

SEQ ID NO: 2191050 - RNA, 19 nt, Homo sapiens
  misc_RNA (1)...(19): siRNA sense strand
ucaggacagauccagauug

SEQ ID NO: 2191051 - RNA, 19 nt, Homo sapiens
  misc_RNA (1)...(19): siRNA sense strand
gaagguggaugaugaagaa

SEQ ID NO: 2191052 - RNA, 19 nt, Homo sapiens
  misc_RNA (1)...(19): siRNA sense strand
gcagaucggugacacaguu

SEQ ID NO: 2191053 - RNA, 19 nt, Homo sapiens
  misc_RNA (1)...(19): siRNA sense strand
uggcagagcucaagaagaa

SEQ ID NO: 2191054 - RNA, 19 nt, Homo sapiens
  misc_RNA (1)...(19): siRNA sense strand
gauauacccuccaaaauaa

SEQ ID NO: 2191055 - RNA, 19 nt, Homo sapiens
  misc_RNA (1)...(19): siRNA sense strand
gaaauagagaagcucaaua

SEQ ID NO: 2191056 - RNA, 19 nt, Homo sapiens
  misc_RNA (1)...(19): siRNA sense strand
gaagaugcagaguuguuua

SEQ ID NO: 2191057 - RNA, 19 nt, Homo sapiens
  misc_RNA (1)...(19): siRNA sense strand
ggcgaaagcucuacgugaa

SEQ ID NO: 2191058 - RNA, 19 nt, Homo sapiens
  misc_RNA (1)...(19): siRNA sense strand
gaagaaagucacagccaaa

SEQ ID NO: 2191059 - RNA, 19 nt, Homo sapiens
  misc_RNA (1)...(19): siRNA sense strand
cuacaaugcuucucaagau

SEQ ID NO: 2191060 - RNA, 19 nt, Homo sapiens
  misc_RNA (1)...(19): siRNA sense strand
ggauauacccuccaaaaua

SEQ ID NO: 2191061 - RNA, 19 nt, Homo sapiens
  misc_RNA (1)...(19): siRNA sense strand
gaaagaggcaacuguggaa

SEQ ID NO: 2191062 - RNA, 19 nt, Homo sapiens
  misc_RNA (1)...(19): siRNA sense strand
ggguugcgaucuauaacua

SEQ ID NO: 2191063 - RNA, 19 nt, Homo sapiens
  misc_RNA (1)...(19): siRNA sense strand
ccaaaaggauugaggaaaa

SEQ ID NO: 2191064 - RNA, 19 nt, Homo sapiens
  misc_RNA (1)...(19): siRNA sense strand
ccacaccuauggccucuau

SEQ ID NO: 2191065 - RNA, 19 nt, Homo sapiens
  misc_RNA (1)...(19): siRNA sense strand
guaacgggaugcccaagga

SEQ ID NO: 2191066 - RNA, 19 nt, Homo sapiens
  misc_RNA (1)...(19): siRNA sense strand
uaacuacaaugcuucucaa

SEQ ID NO: 2191067 - RNA, 19 nt, Homo sapiens
  misc_RNA (1)...(19): siRNA sense strand
ggaagaugcagaguuguuu

SEQ ID NO: 2191068 - RNA, 19 nt, Homo sapiens
  misc_RNA (1)...(19): siRNA sense strand
cgaccaagaggcagaagua

SEQ ID NO: 2191069 - RNA, 19 nt, Homo sapiens
  misc_RNA (1)...(19): siRNA sense strand
agugagaacuaucuaauuc

SEQ ID NO: 2191070 - RNA, 19 nt, Homo sapiens
  misc_RNA (1)...(19): siRNA sense strand
gaaagucacagccaaaauu

SEQ ID NO: 2191071 - RNA, 19 nt, Homo sapiens
  misc_RNA (1)...(19): siRNA sense strand
ucaagaacuuugucugcaa

SEQ ID NO: 2191072 - RNA, 19 nt, Homo sapiens
  misc_RNA (1)...(19): siRNA sense strand
acaacaagcucacccucuu

SEQ ID NO: 2191073 - RNA, 19 nt, Homo sapiens
  misc_RNA (1)...(19): siRNA sense strand
uagagaagcucaauaaccu

SEQ ID NO: 2191074 - RNA, 19 nt, Homo sapiens
  misc_RNA (1)...(19): siRNA sense strand
ggaaauagagaagcucaau

SEQ ID NO: 2191075 - RNA, 19 nt, Homo sapiens
  misc_RNA (1)...(19): siRNA sense strand
gacgaaaccagcaccauug

SEQ ID NO: 2191076 - RNA, 19 nt, Homo sapiens
  misc_RNA (1)...(19): siRNA sense strand
gaagcucaauaaccuccaa

SEQ ID NO: 2191077 - RNA, 19 nt, Homo sapiens
  misc_RNA (1)...(19): siRNA sense strand
ccugaaacauauauccauu

SEQ ID NO: 2191078 - RNA, 19 nt, Homo sapiens
  misc_RNA (1)...(19): siRNA sense strand
agaagucaauccugcagaa

SEQ ID NO: 2191079 - RNA, 19 nt, Homo sapiens
  misc_RNA (1)...(19): siRNA sense strand
gaguggcagugauggauau

SEQ ID NO: 2191080 - RNA, 19 nt, Homo sapiens
  misc_RNA (1)...(19): siRNA sense strand
ucaguaccauccacaccua

SEQ ID NO: 2191081 - RNA, 19 nt, Homo sapiens
  misc_RNA (1)...(19): siRNA sense strand
gaacuuugucugcaacauc

SEQ ID NO: 2191082 - RNA, 19 nt, Homo sapiens
  misc_RNA (1)...(19): siRNA sense strand
ggaguggcagugauggaua

SEQ ID NO: 2191083 - RNA, 19 nt, Homo sapiens
  misc_RNA (1)...(19): siRNA sense strand
cgaaagcucuacgugaaca

SEQ ID NO: 2191084 - RNA, 19 nt, Homo sapiens
  misc_RNA (1)...(19): siRNA sense strand
gaugcagaguuguuuaugg

SEQ ID NO: 2191085 - RNA, 19 nt, Homo sapiens
  misc_RNA (1)...(19): siRNA sense strand
ccuauggccucuaugugaa

SEQ ID NO: 2191086 - RNA, 19 nt, Homo sapiens
  misc_RNA (1)...(19): siRNA sense strand
gagaaugggcugucaucug

SEQ ID NO: 2191087 - RNA, 19 nt, Homo sapiens
  misc_RNA (1)...(19): siRNA sense strand
gaaaagauccaagaagaga

SEQ ID NO: 2191088 - RNA, 19 nt, Homo sapiens
  misc_RNA (1)...(19): siRNA sense strand
ugacgaaaccagcaccauu

SEQ ID NO: 2191089 - RNA, 19 nt, Homo sapiens
  misc_RNA (1)...(19): siRNA sense strand
ggaagguggaugaugaaga

SEQ ID NO: 2191090 - RNA, 19 nt, Homo sapiens
  misc_RNA (1)...(19): siRNA sense strand
gggaagaugcagaguuguu

SEQ ID NO: 2191091 - RNA, 19 nt, Homo sapiens
  misc_RNA (1)...(19): siRNA sense strand
gaacuggcagagcucaaga

SEQ ID NO: 2191092 - RNA, 19 nt, Homo sapiens
  misc_RNA (1)...(19): siRNA sense strand
ccaaggaaauagagaagcu

SEQ ID NO: 2191093 - RNA, 19 nt, Homo sapiens
  misc_RNA (1)...(19): siRNA sense strand
ccagaccaguccacuuuua

SEQ ID NO: 2191094 - RNA, 19 nt, Homo sapiens
  misc_RNA (1)...(19): siRNA sense strand
uuacagaccuuagcagcau

SEQ ID NO: 2191095 - RNA, 19 nt, Homo sapiens
  misc_RNA (1)...(19): siRNA sense strand
gaacagaaugcugggguua

SEQ ID NO: 2191096 - RNA, 19 nt, Homo sapiens
  misc_RNA (1)...(19): siRNA sense strand
uaaccuccaagcaguguuu

SEQ ID NO: 2191097 - RNA, 19 nt, Homo sapiens
  misc_RNA (1)...(19): siRNA sense strand
gcagagcucaagaagaaag

SEQ ID NO: 2191098 - RNA, 19 nt, Homo sapiens
  misc_RNA (1)...(19): siRNA sense strand
ugagaacuaucuaauucgu

SEQ ID NO: 2191099 - RNA, 19 nt, Homo sapiens
  misc_RNA (1)...(19): siRNA sense strand
gaacuucaagaacuuuguc

SEQ ID NO: 2191100 - RNA, 19 nt, Homo sapiens
  misc_RNA (1)...(19): siRNA sense strand
uacaaugcuucucaagaug

SEQ ID NO: 2191101 - RNA, 19 nt, Homo sapiens
  misc_RNA (1)...(19): siRNA sense strand
cauccuagacccugacgaa

SEQ ID NO: 2191102 - RNA, 19 nt, Homo sapiens
  misc_RNA (1)...(19): siRNA sense strand
gcugucaucuggcgaaagc

SEQ ID NO: 2191103 - RNA, 19 nt, Homo sapiens
  misc_RNA (1)...(19): siRNA sense strand
augggaagguggaugauga

SEQ ID NO: 2191104 - RNA, 19 nt, Homo sapiens
  misc_RNA (1)...(19): siRNA sense strand
uccaagcaguguuuacaga

SEQ ID NO: 2191105 - RNA, 19 nt, Homo sapiens
  misc_RNA (1)...(19): siRNA sense strand
caacaagcucacccucuuc

SEQ ID NO: 2191106 - RNA, 19 nt, Homo sapiens
  misc_RNA (1)...(19): siRNA sense strand
gugauggauauuacugaua

SEQ ID NO: 2191107 - RNA, 19 nt, Homo sapiens
  misc_RNA (1)...(19): siRNA sense strand
caaugcuucucaagaugug

SEQ ID NO: 2191108 - RNA, 19 nt, Homo sapiens
  misc_RNA (1)...(19): siRNA sense strand
gaucaugggaacagaaugc

SEQ ID NO: 2191109 - RNA, 19 nt, Homo sapiens
  misc_RNA (1)...(19): siRNA sense strand
cagugagaacuaucuaauu

SEQ ID NO: 2191110 - RNA, 19 nt, Homo sapiens
  misc_RNA (1)...(19): siRNA sense strand
ucagugagaacuaucuaau

SEQ ID NO: 2191111 - RNA, 19 nt, Homo sapiens
  misc_RNA (1)...(19): siRNA sense strand
gccaguccaucuucaguac

SEQ ID NO: 2191112 - RNA, 19 nt, Homo sapiens
  misc_RNA (1)...(19): siRNA sense strand
ggccaguccaucuucagua

SEQ ID NO: 2191113 - RNA, 19 nt, Homo sapiens
  misc_RNA (1)...(19): siRNA sense strand
gauccaagaagagaaguca

SEQ ID NO: 2191114 - RNA, 19 nt, Homo sapiens
  misc_RNA (1)...(19): siRNA sense strand
cagcaccauugcccucuuc

SEQ ID NO: 2191115 - RNA, 19 nt, Homo sapiens
  misc_RNA (1)...(19): siRNA sense strand
aggaaaagauccaagaaga

SEQ ID NO: 2191116 - RNA, 19 nt, Homo sapiens
  misc_RNA (1)...(19): siRNA sense strand
gagaacuaucuaauucguu

SEQ ID NO: 2191117 - RNA, 19 nt, Homo sapiens
  misc_RNA (1)...(19): siRNA sense strand
uggcagugauggauauuac

SEQ ID NO: 2191118 - RNA, 19 nt, Homo sapiens
  misc_RNA (1)...(19): siRNA sense strand
gaggguugguacagaggau

SEQ ID NO: 2191119 - RNA, 19 nt, Homo sapiens
  misc_RNA (1)...(19): siRNA sense strand
guugcgaucuauaacuaca

SEQ ID NO: 2191120 - RNA, 19 nt, Homo sapiens
  misc_RNA (1)...(19): siRNA sense strand
cgggaugcccaaggaaaua

SEQ ID NO: 2191121 - RNA, 19 nt, Homo sapiens
  misc_RNA (1)...(19): siRNA sense strand
acccagaccaguccacuuu

SEQ ID NO: 2191122 - RNA, 19 nt, Homo sapiens
  misc_RNA (1)...(19): siRNA sense strand
gagcucaagaagaaaguca

SEQ ID NO: 2191123 - RNA, 19 nt, Homo sapiens
  misc_RNA (1)...(19): siRNA sense strand
ugacaaugggaacauccua

SEQ ID NO: 2191124 - RNA, 19 nt, Homo sapiens
  misc_RNA (1)...(19): siRNA sense strand
ugaaggaaggcaagaagca

SEQ ID NO: 2191125 - RNA, 19 nt, Homo sapiens
  misc_RNA (1)...(19): siRNA sense strand
gcgagaaugggcugucauc

SEQ ID NO: 2191126 - RNA, 19 nt, Homo sapiens
  misc_RNA (1)...(19): siRNA sense strand
gaaagcucuacgugaacaa

SEQ ID NO: 2191127 - RNA, 19 nt, Homo sapiens
  misc_RNA (1)...(19): siRNA sense strand
gggcugucaucuggcgaaa

SEQ ID NO: 2191128 - RNA, 19 nt, Homo sapiens
  misc_RNA (1)...(19): siRNA sense strand
gcucaauaaccuccaagca

SEQ ID NO: 2191129 - RNA, 19 nt, Homo sapiens
  misc_RNA (1)...(19): siRNA sense strand
gagaugacaaugggaacau

SEQ ID NO: 2191130 - RNA, 19 nt, Homo sapiens
  misc_RNA (1)...(19): siRNA sense strand
gcugaaggaaggcaagaag

SEQ ID NO: 2191131 - RNA, 19 nt, Homo sapiens
  misc_RNA (1)...(19): siRNA sense strand
gcaguguuuacagaccuua

SEQ ID NO: 2191132 - RNA, 19 nt, Homo sapiens
  misc_RNA (1)...(19): siRNA sense strand
caaaaggauugaggaaaag

SEQ ID NO: 2191133 - RNA, 19 nt, Homo sapiens
  misc_RNA (1)...(19): siRNA sense strand
acaaugggaacauccuaga

SEQ ID NO: 2191134 - RNA, 19 nt, Homo sapiens
  misc_RNA (1)...(19): siRNA sense strand
gcaccauugcccucuucaa

SEQ ID NO: 2191135 - RNA, 19 nt, Homo sapiens
  misc_RNA (1)...(19): siRNA sense strand
cggggaagaugcagaguug

SEQ ID NO: 2191136 - RNA, 19 nt, Homo sapiens
  misc_RNA (1)...(19): siRNA sense strand
ccaagaagagaagucaauc

SEQ ID NO: 2191137 - RNA, 19 nt, Homo sapiens
  misc_RNA (1)...(19): siRNA sense strand
caccauugcccucuucaag

SEQ ID NO: 2191138 - RNA, 19 nt, Homo sapiens
  misc_RNA (1)...(19): siRNA sense strand
gcaccugccuuucuaaaua

SEQ ID NO: 2191139 - RNA, 19 nt, Homo sapiens
  misc_RNA (1)...(19): siRNA sense strand
ggagaugucuuaauugaaa

SEQ ID NO: 2191140 - RNA, 19 nt, Homo sapiens
  misc_RNA (1)...(19): siRNA sense strand
gaaacaaaguguacaaaga

SEQ ID NO: 2191141 - RNA, 19 nt, Homo sapiens
  misc_RNA (1)...(19): siRNA sense strand
gaaagaagcagaagaugaa

SEQ ID NO: 2191142 - RNA, 19 nt, Homo sapiens
  misc_RNA (1)...(19): siRNA sense strand
guaacaaccucuaugauga

SEQ ID NO: 2191143 - RNA, 19 nt, Homo sapiens
  misc_RNA (1)...(19): siRNA sense strand
aaagagacauugcuucuaa

SEQ ID NO: 2191144 - RNA, 19 nt, Homo sapiens
  misc_RNA (1)...(19): siRNA sense strand
gggcagcucuguagaaauu

SEQ ID NO: 2191145 - RNA, 19 nt, Homo sapiens
  misc_RNA (1)...(19): siRNA sense strand
gcaaugcaaucguuuaaug

SEQ ID NO: 2191146 - RNA, 19 nt, Homo sapiens
  misc_RNA (1)...(19): siRNA sense strand
ucagaagcaugccgaauua

SEQ ID NO: 2191147 - RNA, 19 nt, Homo sapiens
  misc_RNA (1)...(19): siRNA sense strand
gcagcagggucaagaauuu

SEQ ID NO: 2191148 - RNA, 19 nt, Homo sapiens
  misc_RNA (1)...(19): siRNA sense strand
gagaauauccuaucagaga

SEQ ID NO: 2191149 - RNA, 19 nt, Homo sapiens
  misc_RNA (1)...(19): siRNA sense strand
gaaaguagcaguguuguga

SEQ ID NO: 2191150 - RNA, 19 nt, Homo sapiens
  misc_RNA (1)...(19): siRNA sense strand
gcacgaggcuacagaagga

SEQ ID NO: 2191151 - RNA, 19 nt, Homo sapiens
  misc_RNA (1)...(19): siRNA sense strand
gaaaggaaagggaaagaaa

SEQ ID NO: 2191152 - RNA, 19 nt, Homo sapiens
  misc_RNA (1)...(19): siRNA sense strand
ggaaaggauugaacauaau

SEQ ID NO: 2191153 - RNA, 19 nt, Homo sapiens
  misc_RNA (1)...(19): siRNA sense strand
gaagaaacccucuguuaag

SEQ ID NO: 2191154 - RNA, 19 nt, Homo sapiens
  misc_RNA (1)...(19): siRNA sense strand
gaggaagucucaagaaaca

SEQ ID NO: 2191155 - RNA, 19 nt, Homo sapiens
  misc_RNA (1)...(19): siRNA sense strand
gaaaucaauuggucagugu

SEQ ID NO: 2191156 - RNA, 19 nt, Homo sapiens
  misc_RNA (1)...(19): siRNA sense strand
gaaacccucuguuaagaug

SEQ ID NO: 2191157 - RNA, 19 nt, Homo sapiens
  misc_RNA (1)...(19): siRNA sense strand
guucucaguucuccuaaua

SEQ ID NO: 2191158 - RNA, 19 nt, Homo sapiens
  misc_RNA (1)...(19): siRNA sense strand
uggaaaggauugaacauaa

SEQ ID NO: 2191159 - RNA, 19 nt, Homo sapiens
  misc_RNA (1)...(19): siRNA sense strand
aaacgaaggucuuguaugg

SEQ ID NO: 2191160 - RNA, 19 nt, Homo sapiens
  misc_RNA (1)...(19): siRNA sense strand
gcagaaagaagaaaggaaa

SEQ ID NO: 2191161 - RNA, 19 nt, Homo sapiens
  misc_RNA (1)...(19): siRNA sense strand
gaacguguggcaucagaua

SEQ ID NO: 2191162 - RNA, 19 nt, Homo sapiens
  misc_RNA (1)...(19): siRNA sense strand
ugacagacuugaccagaaa

SEQ ID NO: 2191163 - RNA, 19 nt, Homo sapiens
  misc_RNA (1)...(19): siRNA sense strand
gaagacguuccauguguua

SEQ ID NO: 2191164 - RNA, 19 nt, Homo sapiens
  misc_RNA (1)...(19): siRNA sense strand
gaaaauauccucuccuaaa

SEQ ID NO: 2191165 - RNA, 19 nt, Homo sapiens
  misc_RNA (1)...(19): siRNA sense strand
gaaacaaaccaucugauuc

SEQ ID NO: 2191166 - RNA, 19 nt, Homo sapiens
  misc_RNA (1)...(19): siRNA sense strand
guuaagaugugucuagaga

SEQ ID NO: 2191167 - RNA, 19 nt, Homo sapiens
  misc_RNA (1)...(19): siRNA sense strand
gcuaauauuugcacuaaag

SEQ ID NO: 2191168 - RNA, 19 nt, Homo sapiens
  misc_RNA (1)...(19): siRNA sense strand
caaggagucugcaaugaau

SEQ ID NO: 2191169 - RNA, 19 nt, Homo sapiens
  misc_RNA (1)...(19): siRNA sense strand
gcacugauaccuuuaguuc

SEQ ID NO: 2191170 - RNA, 19 nt, Homo sapiens
  misc_RNA (1)...(19): siRNA sense strand
uaggagaugucuuaauuga

SEQ ID NO: 2191171 - RNA, 19 nt, Homo sapiens
  misc_RNA (1)...(19): siRNA sense strand
gaauaacaaggacuucuaa

SEQ ID NO: 2191172 - RNA, 19 nt, Homo sapiens
  misc_RNA (1)...(19): siRNA sense strand
uaauuggucuccagauauu

SEQ ID NO: 2191173 - RNA, 19 nt, Homo sapiens
  misc_RNA (1)...(19): siRNA sense strand
agagagcacuuccuaagaa

SEQ ID NO: 2191174 - RNA, 19 nt, Homo sapiens
  misc_RNA (1)...(19): siRNA sense strand
ugaagaaacccucuguuaa

SEQ ID NO: 2191175 - RNA, 19 nt, Homo sapiens
  misc_RNA (1)...(19): siRNA sense strand
gaugucaggucaccagcua

SEQ ID NO: 2191176 - RNA, 19 nt, Homo sapiens
  misc_RNA (1)...(19): siRNA sense strand
gaacauaauggagaaagaa

SEQ ID NO: 2191177 - RNA, 19 nt, Homo sapiens
  misc_RNA (1)...(19): siRNA sense strand
gcaguggauuugaaaguau

SEQ ID NO: 2191178 - RNA, 19 nt, Homo sapiens
  misc_RNA (1)...(19): siRNA sense strand
gcaaugcuacuucugauga

SEQ ID NO: 2191179 - RNA, 19 nt, Homo sapiens
  misc_RNA (1)...(19): siRNA sense strand
ugaagcaccugccuuucua

SEQ ID NO: 2191180 - RNA, 19 nt, Homo sapiens
  misc_RNA (1)...(19): siRNA sense strand
ggaaguguuugaugaaucu

SEQ ID NO: 2191181 - RNA, 19 nt, Homo sapiens
  misc_RNA (1)...(19): siRNA sense strand
gcacuguaucgaaauguua

SEQ ID NO: 2191182 - RNA, 19 nt, Homo sapiens
  misc_RNA (1)...(19): siRNA sense strand
gauagaagacguuccaugu

SEQ ID NO: 2191183 - RNA, 19 nt, Homo sapiens
  misc_RNA (1)...(19): siRNA sense strand
gcauaugcaucaaggcuau

SEQ ID NO: 2191184 - RNA, 19 nt, Homo sapiens
  misc_RNA (1)...(19): siRNA sense strand
agagaguguuugcaacuua

SEQ ID NO: 2191185 - RNA, 19 nt, Homo sapiens
  misc_RNA (1)...(19): siRNA sense strand
caaauacuccauugcguaa

SEQ ID NO: 2191186 - RNA, 19 nt, Homo sapiens
  misc_RNA (1)...(19): siRNA sense strand
ugacagcaguggauuugaa

SEQ ID NO: 2191187 - RNA, 19 nt, Homo sapiens
  misc_RNA (1)...(19): siRNA sense strand
ccugaaagcuuuguuagga

SEQ ID NO: 2191188 - RNA, 19 nt, Homo sapiens
  misc_RNA (1)...(19): siRNA sense strand
gaaaggauugaacauaaug

SEQ ID NO: 2191189 - RNA, 19 nt, Homo sapiens
  misc_RNA (1)...(19): siRNA sense strand
uaaagccacuucccaguuc

SEQ ID NO: 2191190 - RNA, 19 nt, Homo sapiens
  misc_RNA (1)...(19): siRNA sense strand
gcccggaaguguuugauga

SEQ ID NO: 2191191 - RNA, 19 nt, Homo sapiens
  misc_RNA (1)...(19): siRNA sense strand
aaagguugcugacugugua

SEQ ID NO: 2191192 - RNA, 19 nt, Homo sapiens
  misc_RNA (1)...(19): siRNA sense strand
ggaagucucaagaaacaaa

SEQ ID NO: 2191193 - RNA, 19 nt, Homo sapiens
  misc_RNA (1)...(19): siRNA sense strand
uagaagacguuccaugugu

SEQ ID NO: 2191194 - RNA, 19 nt, Homo sapiens
  misc_RNA (1)...(19): siRNA sense strand
gaagacuggguucagguua

SEQ ID NO: 2191195 - RNA, 19 nt, Homo sapiens
  misc_RNA (1)...(19): siRNA sense strand
gaaagagacauugcuucua

SEQ ID NO: 2191196 - RNA, 19 nt, Homo sapiens
  misc_RNA (1)...(19): siRNA sense strand
cauccgagcuuaaucucaa

SEQ ID NO: 2191197 - RNA, 19 nt, Homo sapiens
  misc_RNA (1)...(19): siRNA sense strand
ggucgaaguuuacauuugg

SEQ ID NO: 2191198 - RNA, 19 nt, Homo sapiens
  misc_RNA (1)...(19): siRNA sense strand
gcaaucguuuaaugccuaa

SEQ ID NO: 2191199 - RNA, 19 nt, Homo sapiens
  misc_RNA (1)...(19): siRNA sense strand
ucucaaaucucccaaacug

SEQ ID NO: 2191200 - RNA, 19 nt, Homo sapiens
  misc_RNA (1)...(19): siRNA sense strand
ucugaauucugcucuuaua

SEQ ID NO: 2191201 - RNA, 19 nt, Homo sapiens
  misc_RNA (1)...(19): siRNA sense strand
uaucuacacuugcaaauac

SEQ ID NO: 2191202 - RNA, 19 nt, Homo sapiens
  misc_RNA (1)...(19): siRNA sense strand
cuuaggagcugcagaagga

SEQ ID NO: 2191203 - RNA, 19 nt, Homo sapiens
  misc_RNA (1)...(19): siRNA sense strand
gauaucaucuaaacuuggu

SEQ ID NO: 2191204 - RNA, 19 nt, Homo sapiens
  misc_RNA (1)...(19): siRNA sense strand
gauggcaccucccgucuca

SEQ ID NO: 2191205 - RNA, 19 nt, Homo sapiens
  misc_RNA (1)...(19): siRNA sense strand
gaaggucuuguauggauuu

SEQ ID NO: 2191206 - RNA, 19 nt, Homo sapiens
  misc_RNA (1)...(19): siRNA sense strand
guucagccuuguaaagaaa

SEQ ID NO: 2191207 - RNA, 19 nt, Homo sapiens
  misc_RNA (1)...(19): siRNA sense strand
gagaguguuugcaacuuau

SEQ ID NO: 2191208 - RNA, 19 nt, Homo sapiens
  misc_RNA (1)...(19): siRNA sense strand
gccauuaccucaaccagau

SEQ ID NO: 2191209 - RNA, 19 nt, Homo sapiens
  misc_RNA (1)...(19): siRNA sense strand
ugaaacaaaccaucugauu

SEQ ID NO: 2191210 - RNA, 19 nt, Homo sapiens
  misc_RNA (1)...(19): siRNA sense strand
gauugaacauaauggagaa

SEQ ID NO: 2191211 - RNA, 19 nt, Homo sapiens
  misc_RNA (1)...(19): siRNA sense strand
gaaaccaaagugcgacgua

SEQ ID NO: 2191212 - RNA, 19 nt, Homo sapiens
  misc_RNA (1)...(19): siRNA sense strand
cauaaagugugaaagaaag

SEQ ID NO: 2191213 - RNA, 19 nt, Homo sapiens
  misc_RNA (1)...(19): siRNA sense strand
ggaaagagacauugcuucu

SEQ ID NO: 2191214 - RNA, 19 nt, Homo sapiens
  misc_RNA (1)...(19): siRNA sense strand
ucucaguucuccuaauaaa

SEQ ID NO: 2191215 - RNA, 19 nt, Homo sapiens
  misc_RNA (1)...(19): siRNA sense strand
cugaagaaacccucuguua

SEQ ID NO: 2191216 - RNA, 19 nt, Homo sapiens
  misc_RNA (1)...(19): siRNA sense strand
agacagagcaugugcaguu

SEQ ID NO: 2191217 - RNA, 19 nt, Homo sapiens
  misc_RNA (1)...(19): siRNA sense strand
aguaauuggucuccagaua

SEQ ID NO: 2191218 - RNA, 19 nt, Homo sapiens
  misc_RNA (1)...(19): siRNA sense strand
gcccugcacuguaucgaaa

SEQ ID NO: 2191219 - RNA, 19 nt, Homo sapiens
  misc_RNA (1)...(19): siRNA sense strand
gagaugacaccuuccauuc

SEQ ID NO: 2191220 - RNA, 19 nt, Homo sapiens
  misc_RNA (1)...(19): siRNA sense strand
gaauuacaccugaaagcuu

SEQ ID NO: 2191221 - RNA, 19 nt, Homo sapiens
  misc_RNA (1)...(19): siRNA sense strand
aaacauagaaccacuucaa

SEQ ID NO: 2191222 - RNA, 19 nt, Homo sapiens
  misc_RNA (1)...(19): siRNA sense strand
cggagaauauccuaucaga

SEQ ID NO: 2191223 - RNA, 19 nt, Homo sapiens
  misc_RNA (1)...(19): siRNA sense strand
gaaaucuccuuuggcacaa

SEQ ID NO: 2191224 - RNA, 19 nt, Homo sapiens
  misc_RNA (1)...(19): siRNA sense strand
aggaagagcuuuuguauau

SEQ ID NO: 2191225 - RNA, 19 nt, Homo sapiens
  misc_RNA (1)...(19): siRNA sense strand
gcagagacaggaaagauag

SEQ ID NO: 2191226 - RNA, 19 nt, Homo sapiens
  misc_RNA (1)...(19): siRNA sense strand
gaaguucagccuuguaaag

SEQ ID NO: 2191227 - RNA, 19 nt, Homo sapiens
  misc_RNA (1)...(19): siRNA sense strand
aagaaacccucuguuaaga

SEQ ID NO: 2191228 - RNA, 19 nt, Homo sapiens
  misc_RNA (1)...(19): siRNA sense strand
caauauugauacagacaga

SEQ ID NO: 2191229 - RNA, 19 nt, Homo sapiens
  misc_RNA (1)...(19): siRNA sense strand
guaauuggucuccagauau

SEQ ID NO: 2191230 - RNA, 19 nt, Homo sapiens
  misc_RNA (1)...(19): siRNA sense strand
ugaugaagauccaaauaca

SEQ ID NO: 2191231 - RNA, 19 nt, Homo sapiens
  misc_RNA (1)...(19): siRNA sense strand
aauuacaccugaaagcuuu

SEQ ID NO: 2191232 - RNA, 19 nt, Homo sapiens
  misc_RNA (1)...(19): siRNA sense strand
acaaagagagcacuuccua

SEQ ID NO: 2191233 - RNA, 19 nt, Homo sapiens
  misc_RNA (1)...(19): siRNA sense strand
guuaggaacucugcaggaa

SEQ ID NO: 2191234 - RNA, 19 nt, Homo sapiens
  misc_RNA (1)...(19): siRNA sense strand
ucaguucccugcugcuuga

SEQ ID NO: 2191235 - RNA, 19 nt, Homo sapiens
  misc_RNA (1)...(19): siRNA sense strand
ucacagagacuucaaaugc

SEQ ID NO: 2191236 - RNA, 19 nt, Homo sapiens
  misc_RNA (1)...(19): siRNA sense strand
aacaaggacuucuaacaga

SEQ ID NO: 2191237 - RNA, 19 nt, Homo sapiens
  misc_RNA (1)...(19): siRNA sense strand
guagcaguguugugaguug

SEQ ID NO: 2191238 - RNA, 19 nt, Homo sapiens
  misc_RNA (1)...(19): siRNA sense strand
gaagaaagaacguguagua

SEQ ID NO: 2191239 - RNA, 19 nt, Homo sapiens
  misc_RNA (1)...(19): siRNA sense strand
aaucaaggcucaccauuua

SEQ ID NO: 2191240 - RNA, 19 nt, Homo sapiens
  misc_RNA (1)...(19): siRNA sense strand
gaaagaacguguaguagca

SEQ ID NO: 2191241 - RNA, 19 nt, Homo sapiens
  misc_RNA (1)...(19): siRNA sense strand
gguagaagauguccaagaa

SEQ ID NO: 2191242 - RNA, 19 nt, Homo sapiens
  misc_RNA (1)...(19): siRNA sense strand
guaguuggguguuuaauug

SEQ ID NO: 2191243 - RNA, 19 nt, Homo sapiens
  misc_RNA (1)...(19): siRNA sense strand
gagaguaguuggguguuua

SEQ ID NO: 2191244 - RNA, 19 nt, Homo sapiens
  misc_RNA (1)...(19): siRNA sense strand
gauccaagcuuugcuauca

SEQ ID NO: 2191245 - RNA, 19 nt, Homo sapiens
  misc_RNA (1)...(19): siRNA sense strand
caucgacgcuggucagaaa

SEQ ID NO: 2191246 - RNA, 19 nt, Homo sapiens
  misc_RNA (1)...(19): siRNA sense strand
gcaaguuguuccuaaaugu

SEQ ID NO: 2191247 - RNA, 19 nt, Homo sapiens
  misc_RNA (1)...(19): siRNA sense strand
caaaggaacauaaaguuga

SEQ ID NO: 2191248 - RNA, 19 nt, Homo sapiens
  misc_RNA (1)...(19): siRNA sense strand
cauugaagauucugaugua

SEQ ID NO: 2191249 - RNA, 19 nt, Homo sapiens
  misc_RNA (1)...(19): siRNA sense strand
gcaagacgacugguugaua

SEQ ID NO: 2191250 - RNA, 19 nt, Homo sapiens
  misc_RNA (1)...(19): siRNA sense strand
gaagcaggauucuuugaag

SEQ ID NO: 2191251 - RNA, 19 nt, Homo sapiens
  misc_RNA (1)...(19): siRNA sense strand
ugacagaguuucuucaaag

SEQ ID NO: 2191252 - RNA, 19 nt, Homo sapiens
  misc_RNA (1)...(19): siRNA sense strand
caucuucagucaauucaaa

SEQ ID NO: 2191253 - RNA, 19 nt, Homo sapiens
  misc_RNA (1)...(19): siRNA sense strand
aaucagaagucauugaaga

SEQ ID NO: 2191254 - RNA, 19 nt, Homo sapiens
  misc_RNA (1)...(19): siRNA sense strand
ucaaauauguggguuggaa

SEQ ID NO: 2191255 - RNA, 19 nt, Homo sapiens
  misc_RNA (1)...(19): siRNA sense strand
agagaaagcugauaaaaga

SEQ ID NO: 2191256 - RNA, 19 nt, Homo sapiens
  misc_RNA (1)...(19): siRNA sense strand
gaguaaaucagaagucauu

SEQ ID NO: 2191257 - RNA, 19 nt, Homo sapiens
  misc_RNA (1)...(19): siRNA sense strand
uaccagagauacaaguaaa

SEQ ID NO: 2191258 - RNA, 19 nt, Homo sapiens
  misc_RNA (1)...(19): siRNA sense strand
ggaauugcuucauguuugg

SEQ ID NO: 2191259 - RNA, 19 nt, Homo sapiens
  misc_RNA (1)...(19): siRNA sense strand
caagacgacugguugauac

SEQ ID NO: 2191260 - RNA, 19 nt, Homo sapiens
  misc_RNA (1)...(19): siRNA sense strand
ggaagcaggauucuuugaa

SEQ ID NO: 2191261 - RNA, 19 nt, Homo sapiens
  misc_RNA (1)...(19): siRNA sense strand
cuaaguaucaaccaaagua

SEQ ID NO: 2191262 - RNA, 19 nt, Homo sapiens
  misc_RNA (1)...(19): siRNA sense strand
aaaccagucugcuccaaga

SEQ ID NO: 2191263 - RNA, 19 nt, Homo sapiens
  misc_RNA (1)...(19): siRNA sense strand
guugauacccucaggaauu

SEQ ID NO: 2191264 - RNA, 19 nt, Homo sapiens
  misc_RNA (1)...(19): siRNA sense strand
agaggaagcaggauucuuu

SEQ ID NO: 2191265 - RNA, 19 nt, Homo sapiens
  misc_RNA (1)...(19): siRNA sense strand
caaccaaaguauagacaca

SEQ ID NO: 2191266 - RNA, 19 nt, Homo sapiens
  misc_RNA (1)...(19): siRNA sense strand
cagaguuucuucaaaggaa

SEQ ID NO: 2191267 - RNA, 19 nt, Homo sapiens
  misc_RNA (1)...(19): siRNA sense strand
uggaaggaaucaaauaugu

SEQ ID NO: 2191268 - RNA, 19 nt, Homo sapiens
  misc_RNA (1)...(19): siRNA sense strand
ccagcaaguuguuccuaaa

SEQ ID NO: 2191269 - RNA, 19 nt, Homo sapiens
  misc_RNA (1)...(19): siRNA sense strand
caaagugcuugguccuaga

SEQ ID NO: 2191270 - RNA, 19 nt, Homo sapiens
  misc_RNA (1)...(19): siRNA sense strand
aacaccagauggcaaguua

SEQ ID NO: 2191271 - RNA, 19 nt, Homo sapiens
  misc_RNA (1)...(19): siRNA sense strand
gcacugaugaaauagcauu

SEQ ID NO: 2191272 - RNA, 19 nt, Homo sapiens
  misc_RNA (1)...(19): siRNA sense strand
ggaagaggaagcaggauuc

SEQ ID NO: 2191273 - RNA, 19 nt, Homo sapiens
  misc_RNA (1)...(19): siRNA sense strand
gaaaaucgucccuggaaaa

SEQ ID NO: 2191274 - RNA, 19 nt, Homo sapiens
  misc_RNA (1)...(19): siRNA sense strand
cagaagucauugaagauuc

SEQ ID NO: 2191275 - RNA, 19 nt, Homo sapiens
  misc_RNA (1)...(19): siRNA sense strand
gcaggauucuuugaagugu

SEQ ID NO: 2191276 - RNA, 19 nt, Homo sapiens
  misc_RNA (1)...(19): siRNA sense strand
aggaauugcuucauguuug

SEQ ID NO: 2191277 - RNA, 19 nt, Homo sapiens
  misc_RNA (1)...(19): siRNA sense strand
ccagauggcaaguuauuug

SEQ ID NO: 2191278 - RNA, 19 nt, Homo sapiens
  misc_RNA (1)...(19): siRNA sense strand
gcucaaaacaacugaaaua

SEQ ID NO: 2191279 - RNA, 19 nt, Homo sapiens
  misc_RNA (1)...(19): siRNA sense strand
ccucaggaauugcuucaug

SEQ ID NO: 2191280 - RNA, 19 nt, Homo sapiens
  misc_RNA (1)...(19): siRNA sense strand
guuccuaaauguccaaaca

SEQ ID NO: 2191281 - RNA, 19 nt, Homo sapiens
  misc_RNA (1)...(19): siRNA sense strand
guaaaucagaagucauuga

SEQ ID NO: 2191282 - RNA, 19 nt, Homo sapiens
  misc_RNA (1)...(19): siRNA sense strand
ucaaggcucaccauuuaaa

SEQ ID NO: 2191283 - RNA, 19 nt, Homo sapiens
  misc_RNA (1)...(19): siRNA sense strand
uagaagauguccaagaacu

SEQ ID NO: 2191284 - RNA, 19 nt, Homo sapiens
  misc_RNA (1)...(19): siRNA sense strand
ugugggaucugucaacuuc

SEQ ID NO: 2191285 - RNA, 19 nt, Homo sapiens
  misc_RNA (1)...(19): siRNA sense strand
ggugagaauaagacaauuu

SEQ ID NO: 2191286 - RNA, 19 nt, Homo sapiens
  misc_RNA (1)...(19): siRNA sense strand
ucaaaggaacauaaaguug

SEQ ID NO: 2191287 - RNA, 19 nt, Homo sapiens
  misc_RNA (1)...(19): siRNA sense strand
ugaagauucugauguagag

SEQ ID NO: 2191288 - RNA, 19 nt, Homo sapiens
  misc_RNA (1)...(19): siRNA sense strand
ccagucugcuccaagaaga

SEQ ID NO: 2191289 - RNA, 19 nt, Homo sapiens
  misc_RNA (1)...(19): siRNA sense strand
gcaaccaaguacugcaaca

SEQ ID NO: 2191290 - RNA, 19 nt, Homo sapiens
  misc_RNA (1)...(19): siRNA sense strand
ucuagaaauuccaagcaaa

SEQ ID NO: 2191291 - RNA, 19 nt, Homo sapiens
  misc_RNA (1)...(19): siRNA sense strand
ggaaggaaucaaauaugug

SEQ ID NO: 2191292 - RNA, 19 nt, Homo sapiens
  misc_RNA (1)...(19): siRNA sense strand
ucaugaaacagaccaauau

SEQ ID NO: 2191293 - RNA, 19 nt, Homo sapiens
  misc_RNA (1)...(19): siRNA sense strand
gaugacagaguuucuucaa

SEQ ID NO: 2191294 - RNA, 19 nt, Homo sapiens
  misc_RNA (1)...(19): siRNA sense strand
uguccugucugaaccaauu

SEQ ID NO: 2191295 - RNA, 19 nt, Homo sapiens
  misc_RNA (1)...(19): siRNA sense strand
caaaucaaggcucaccauu

SEQ ID NO: 2191296 - RNA, 19 nt, Homo sapiens
  misc_RNA (1)...(19): siRNA sense strand
gaagagaagaaagcgcauu

SEQ ID NO: 2191297 - RNA, 19 nt, Homo sapiens
  misc_RNA (1)...(19): siRNA sense strand
uaagacaauuucuccuaag

SEQ ID NO: 2191298 - RNA, 19 nt, Homo sapiens
  misc_RNA (1)...(19): siRNA sense strand
caaaguauagacacaucaa

SEQ ID NO: 2191299 - RNA, 19 nt, Homo sapiens
  misc_RNA (1)...(19): siRNA sense strand
auaaguagaaucuggguuu

SEQ ID NO: 2191300 - RNA, 19 nt, Homo sapiens
  misc_RNA (1)...(19): siRNA sense strand
ccacagguuucuggaagga

SEQ ID NO: 2191301 - RNA, 19 nt, Homo sapiens
  misc_RNA (1)...(19): siRNA sense strand
uauccaaucuucagugcau

SEQ ID NO: 2191302 - RNA, 19 nt, Homo sapiens
  misc_RNA (1)...(19): siRNA sense strand
cagugcaucuucagucaau

SEQ ID NO: 2191303 - RNA, 19 nt, Homo sapiens
  misc_RNA (1)...(19): siRNA sense strand
cuguuuccaucaccuaaua

SEQ ID NO: 2191304 - RNA, 19 nt, Homo sapiens
  misc_RNA (1)...(19): siRNA sense strand
gcuccaagaagaacaacaa

SEQ ID NO: 2191305 - RNA, 19 nt, Homo sapiens
  misc_RNA (1)...(19): siRNA sense strand
ccuaauuuccucguauaua

SEQ ID NO: 2191306 - RNA, 19 nt, Homo sapiens
  misc_RNA (1)...(19): siRNA sense strand
gagaagaaagcgcauugca

SEQ ID NO: 2191307 - RNA, 19 nt, Homo sapiens
  misc_RNA (1)...(19): siRNA sense strand
uccuaaauguccaaacaaa

SEQ ID NO: 2191308 - RNA, 19 nt, Homo sapiens
  misc_RNA (1)...(19): siRNA sense strand
gccacaugauccaagcuuu

SEQ ID NO: 2191309 - RNA, 19 nt, Homo sapiens
  misc_RNA (1)...(19): siRNA sense strand
aagaguaaaucagaaguca

SEQ ID NO: 2191310 - RNA, 19 nt, Homo sapiens
  misc_RNA (1)...(19): siRNA sense strand
gguccuagaagagaaauug

SEQ ID NO: 2191311 - RNA, 19 nt, Homo sapiens
  misc_RNA (1)...(19): siRNA sense strand
cagcacugaugaaauagca

SEQ ID NO: 2191312 - RNA, 19 nt, Homo sapiens
  misc_RNA (1)...(19): siRNA sense strand
ccacaugauccaagcuuug

SEQ ID NO: 2191313 - RNA, 19 nt, Homo sapiens
  misc_RNA (1)...(19): siRNA sense strand
acagaccaauauccagaaa

SEQ ID NO: 2191314 - RNA, 19 nt, Homo sapiens
  misc_RNA (1)...(19): siRNA sense strand
ccuagaagagaaauugaaa

SEQ ID NO: 2191315 - RNA, 19 nt, Homo sapiens
  misc_RNA (1)...(19): siRNA sense strand
aagccuguaucaaggaauu

SEQ ID NO: 2191316 - RNA, 19 nt, Homo sapiens
  misc_RNA (1)...(19): siRNA sense strand
caccagauggcaaguuauu

SEQ ID NO: 2191317 - RNA, 19 nt, Homo sapiens
  misc_RNA (1)...(19): siRNA sense strand
gaagugugacagccuuuua

SEQ ID NO: 2191318 - RNA, 19 nt, Homo sapiens
  misc_RNA (1)...(19): siRNA sense strand
gcuuggcaauguucagaug

SEQ ID NO: 2191319 - RNA, 19 nt, Homo sapiens
  misc_RNA (1)...(19): siRNA sense strand
gacagaguuucuucaaagg

SEQ ID NO: 2191320 - RNA, 19 nt, Homo sapiens
  misc_RNA (1)...(19): siRNA sense strand
gcaaaucaaggcucaccau

SEQ ID NO: 2191321 - RNA, 19 nt, Homo sapiens
  misc_RNA (1)...(19): siRNA sense strand
gauaaaucuuuucccauug

SEQ ID NO: 2191322 - RNA, 19 nt, Homo sapiens
  misc_RNA (1)...(19): siRNA sense strand
caggaauugcuucauguuu

SEQ ID NO: 2191323 - RNA, 19 nt, Homo sapiens
  misc_RNA (1)...(19): siRNA sense strand
aaagguagaagauguccaa

SEQ ID NO: 2191324 - RNA, 19 nt, Homo sapiens
  misc_RNA (1)...(19): siRNA sense strand
gaggaagcaggauucuuug

SEQ ID NO: 2191325 - RNA, 19 nt, Homo sapiens
  misc_RNA (1)...(19): siRNA sense strand
ccaaaagaguaaaucagaa

SEQ ID NO: 2191326 - RNA, 19 nt, Homo sapiens
  misc_RNA (1)...(19): siRNA sense strand
ucaagccuguaucaaggaa

SEQ ID NO: 2191327 - RNA, 19 nt, Homo sapiens
  misc_RNA (1)...(19): siRNA sense strand
uugauacccucaggaauug

SEQ ID NO: 2191328 - RNA, 19 nt, Homo sapiens
  misc_RNA (1)...(19): siRNA sense strand
gcucuccacuguaucuuuu

SEQ ID NO: 2191329 - RNA, 19 nt, Homo sapiens
  misc_RNA (1)...(19): siRNA sense strand
agagaguaguuggguguuu

SEQ ID NO: 2191330 - RNA, 19 nt, Homo sapiens
  misc_RNA (1)...(19): siRNA sense strand
ugaauugggcuuccagcaa

SEQ ID NO: 2191331 - RNA, 19 nt, Homo sapiens
  misc_RNA (1)...(19): siRNA sense strand
ugauauauacugcuuccaa

SEQ ID NO: 2191332 - RNA, 19 nt, Homo sapiens
  misc_RNA (1)...(19): siRNA sense strand
cugcauugcucucaacaag

SEQ ID NO: 2191333 - RNA, 19 nt, Homo sapiens
  misc_RNA (1)...(19): siRNA sense strand
ucagaagucauugaagauu

SEQ ID NO: 2191334 - RNA, 19 nt, Homo sapiens
  misc_RNA (1)...(19): siRNA sense strand
acacaucaagccuguauca

SEQ ID NO: 2191335 - RNA, 19 nt, Homo sapiens
  misc_RNA (1)...(19): siRNA sense strand
uccagcaaguuguuccuaa

SEQ ID NO: 2191336 - RNA, 19 nt, Homo sapiens
  misc_RNA (1)...(19): siRNA sense strand
uuccaacccugaagaugaa

SEQ ID NO: 2191337 - RNA, 19 nt, Homo sapiens
  misc_RNA (1)...(19): siRNA sense strand
gugagaauaagacaauuuc

SEQ ID NO: 2191338 - RNA, 19 nt, Homo sapiens
  misc_RNA (1)...(19): siRNA sense strand
ggacaaaggugugagaaug

SEQ ID NO: 2191339 - RNA, 19 nt, Homo sapiens
  misc_RNA (1)...(19): siRNA sense strand
gaagaaggagauucagaua

SEQ ID NO: 2191340 - RNA, 19 nt, Homo sapiens
  misc_RNA (1)...(19): siRNA sense strand
agaaggagauucagauaga

SEQ ID NO: 2191341 - RNA, 19 nt, Homo sapiens
  misc_RNA (1)...(19): siRNA sense strand
ggaggacggucaucuguca

SEQ ID NO: 2191342 - RNA, 19 nt, Homo sapiens
  misc_RNA (1)...(19): siRNA sense strand
cagacaaccugacgaagaa

SEQ ID NO: 2191343 - RNA, 19 nt, Homo sapiens
  misc_RNA (1)...(19): siRNA sense strand
ggagauggccacacgguuu

SEQ ID NO: 2191344 - RNA, 19 nt, Homo sapiens
  misc_RNA (1)...(19): siRNA sense strand
ggaaggagagucuguugga

SEQ ID NO: 2191345 - RNA, 19 nt, Homo sapiens
  misc_RNA (1)...(19): siRNA sense strand
agaagcagcugucaaaggu

SEQ ID NO: 2191346 - RNA, 19 nt, Homo sapiens
  misc_RNA (1)...(19): siRNA sense strand
agaagagccuggagauguu

SEQ ID NO: 2191347 - RNA, 19 nt, Homo sapiens
  misc_RNA (1)...(19): siRNA sense strand
ggaccuugcccacguggua

SEQ ID NO: 2191348 - RNA, 19 nt, Homo sapiens
  misc_RNA (1)...(19): siRNA sense strand
gaaccaagcagucaaagcu

SEQ ID NO: 2191349 - RNA, 19 nt, Homo sapiens
  misc_RNA (1)...(19): siRNA sense strand
agagaucuaugacuuugaa

SEQ ID NO: 2191350 - RNA, 19 nt, Homo sapiens
  misc_RNA (1)...(19): siRNA sense strand
gacaaaggugugagaauga

SEQ ID NO: 2191351 - RNA, 19 nt, Homo sapiens
  misc_RNA (1)...(19): siRNA sense strand
gagagucuguuggagaaga

SEQ ID NO: 2191352 - RNA, 19 nt, Homo sapiens
  misc_RNA (1)...(19): siRNA sense strand
agauagagaagauccauuu

SEQ ID NO: 2191353 - RNA, 19 nt, Homo sapiens
  misc_RNA (1)...(19): siRNA sense strand
cagaagagccuggagaugu

SEQ ID NO: 2191354 - RNA, 19 nt, Homo sapiens
  misc_RNA (1)...(19): siRNA sense strand
gagaagggguucaggauuc

SEQ ID NO: 2191355 - RNA, 19 nt, Homo sapiens
  misc_RNA (1)...(19): siRNA sense strand
ggagcugccuggagagaag

SEQ ID NO: 2191356 - RNA, 19 nt, Homo sapiens
  misc_RNA (1)...(19): siRNA sense strand
cuaaagggcccaggacaaa

SEQ ID NO: 2191357 - RNA, 19 nt, Homo sapiens
  misc_RNA (1)...(19): siRNA sense strand
ggacgaagaggagguggaa

SEQ ID NO: 2191358 - RNA, 19 nt, Homo sapiens
  misc_RNA (1)...(19): siRNA sense strand
gaacagcagagaauuuuga

SEQ ID NO: 2191359 - RNA, 19 nt, Homo sapiens
  misc_RNA (1)...(19): siRNA sense strand
ccucggugcucaagagaga

SEQ ID NO: 2191360 - RNA, 19 nt, Homo sapiens
  misc_RNA (1)...(19): siRNA sense strand
gaaggagauucagauagag

SEQ ID NO: 2191361 - RNA, 19 nt, Homo sapiens
  misc_RNA (1)...(19): siRNA sense strand
ugacgaagaaggagauuca

SEQ ID NO: 2191362 - RNA, 19 nt, Homo sapiens
  misc_RNA (1)...(19): siRNA sense strand
ucacagacaaccugacgaa

SEQ ID NO: 2191363 - RNA, 19 nt, Homo sapiens
  misc_RNA (1)...(19): siRNA sense strand
cgaagaaggagauucagau

SEQ ID NO: 2191364 - RNA, 19 nt, Homo sapiens
  misc_RNA (1)...(19): siRNA sense strand
gguccacccugcagcuaga

SEQ ID NO: 2191365 - RNA, 19 nt, Homo sapiens
  misc_RNA (1)...(19): siRNA sense strand
ggaggaagaggacgaagag

SEQ ID NO: 2191366 - RNA, 19 nt, Homo sapiens
  misc_RNA (1)...(19): siRNA sense strand
ccauagaacagcagagaau

SEQ ID NO: 2191367 - RNA, 19 nt, Homo sapiens
  misc_RNA (1)...(19): siRNA sense strand
gaaagcuagucgugucacu

SEQ ID NO: 2191368 - RNA, 19 nt, Homo sapiens
  misc_RNA (1)...(19): siRNA sense strand
ggaggaacuggaccgcuuu

SEQ ID NO: 2191369 - RNA, 19 nt, Homo sapiens
  misc_RNA (1)...(19): siRNA sense strand
gagauggccacacgguuug

SEQ ID NO: 2191370 - RNA, 19 nt, Homo sapiens
  misc_RNA (1)...(19): siRNA sense strand
aggagagucuguuggagaa

SEQ ID NO: 2191371 - RNA, 19 nt, Homo sapiens
  misc_RNA (1)...(19): siRNA sense strand
gaggaggacggucaucugu

SEQ ID NO: 2191372 - RNA, 19 nt, Homo sapiens
  misc_RNA (1)...(19): siRNA sense strand
gauagagaagauccauuug

SEQ ID NO: 2191373 - RNA, 19 nt, Homo sapiens
  misc_RNA (1)...(19): siRNA sense strand
acagacaaccugacgaaga

SEQ ID NO: 2191374 - RNA, 19 nt, Homo sapiens
  misc_RNA (1)...(19): siRNA sense strand
gggaacagaggaccuaaag

SEQ ID NO: 2191375 - RNA, 19 nt, Homo sapiens
  misc_RNA (1)...(19): siRNA sense strand
gagaggccacagacaaaug

SEQ ID NO: 2191376 - RNA, 19 nt, Homo sapiens
  misc_RNA (1)...(19): siRNA sense strand
gcaagccugaccagccuuu

SEQ ID NO: 2191377 - RNA, 19 nt, Homo sapiens
  misc_RNA (1)...(19): siRNA sense strand
gcugcucggaggacgauua

SEQ ID NO: 2191378 - RNA, 19 nt, Homo sapiens
  misc_RNA (1)...(19): siRNA sense strand
gaagagccuggagauguug

SEQ ID NO: 2191379 - RNA, 19 nt, Homo sapiens
  misc_RNA (1)...(19): siRNA sense strand
ggagaggccacagacaaau

SEQ ID NO: 2191380 - RNA, 19 nt, Homo sapiens
  misc_RNA (1)...(19): siRNA sense strand
cugcuuggauggugucuuc

SEQ ID NO: 2191381 - RNA, 19 nt, Homo sapiens
  misc_RNA (1)...(19): siRNA sense strand
gaggugaugaggcucuuga

SEQ ID NO: 2191382 - RNA, 19 nt, Homo sapiens
  misc_RNA (1)...(19): siRNA sense strand
auagaacagcagagaauuu

SEQ ID NO: 2191383 - RNA, 19 nt, Homo sapiens
  misc_RNA (1)...(19): siRNA sense strand
ucacgcacucggcaucuuu

SEQ ID NO: 2191384 - RNA, 19 nt, Homo sapiens
  misc_RNA (1)...(19): siRNA sense strand
ggauucaguggguggauga

SEQ ID NO: 2191385 - RNA, 19 nt, Homo sapiens
  misc_RNA (1)...(19): siRNA sense strand
ggaacuggaccgcuuucug

SEQ ID NO: 2191386 - RNA, 19 nt, Homo sapiens
  misc_RNA (1)...(19): siRNA sense strand
ugcagaagcagcugucaaa

SEQ ID NO: 2191387 - RNA, 19 nt, Homo sapiens
  misc_RNA (1)...(19): siRNA sense strand
gaaggagaggccacagaca

SEQ ID NO: 2191388 - RNA, 19 nt, Homo sapiens
  misc_RNA (1)...(19): siRNA sense strand
gaucuaugacuuugaacca

SEQ ID NO: 2191389 - RNA, 19 nt, Homo sapiens
  misc_RNA (1)...(19): siRNA sense strand
ugaccagccuuuguaugug

SEQ ID NO: 2191390 - RNA, 19 nt, Homo sapiens
  misc_RNA (1)...(19): siRNA sense strand
agauucagauagagaagau

SEQ ID NO: 2191391 - RNA, 19 nt, Homo sapiens
  misc_RNA (1)...(19): siRNA sense strand
gcccaucuccaaccaagga

SEQ ID NO: 2191392 - RNA, 19 nt, Homo sapiens
  misc_RNA (1)...(19): siRNA sense strand
uccgguaccugauccauag

SEQ ID NO: 2191393 - RNA, 19 nt, Homo sapiens
  misc_RNA (1)...(19): siRNA sense strand
cuaccucggugcucaagag

SEQ ID NO: 2191394 - RNA, 19 nt, Homo sapiens
  misc_RNA (1)...(19): siRNA sense strand
cauagaacagcagagaauu

SEQ ID NO: 2191395 - RNA, 19 nt, Homo sapiens
  misc_RNA (1)...(19): siRNA sense strand
ggacucccugugcugauga

SEQ ID NO: 2191396 - RNA, 19 nt, Homo sapiens
  misc_RNA (1)...(19): siRNA sense strand
gagauucagauagagaaga

SEQ ID NO: 2191397 - RNA, 19 nt, Homo sapiens
  misc_RNA (1)...(19): siRNA sense strand
ggaccugcuggcaacguuu

SEQ ID NO: 2191398 - RNA, 19 nt, Homo sapiens
  misc_RNA (1)...(19): siRNA sense strand
ucccugugcugaugacuca

SEQ ID NO: 2191399 - RNA, 19 nt, Homo sapiens
  misc_RNA (1)...(19): siRNA sense strand
cggaggacgauuacaguga

SEQ ID NO: 2191400 - RNA, 19 nt, Homo sapiens
  misc_RNA (1)...(19): siRNA sense strand
ucgugucacucuaggagaa

SEQ ID NO: 2191401 - RNA, 19 nt, Homo sapiens
  misc_RNA (1)...(19): siRNA sense strand
gaagcagcugucaaagguu

SEQ ID NO: 2191402 - RNA, 19 nt, Homo sapiens
  misc_RNA (1)...(19): siRNA sense strand
ccuaaagggcccaggacaa

SEQ ID NO: 2191403 - RNA, 19 nt, Homo sapiens
  misc_RNA (1)...(19): siRNA sense strand
aaggagaggccacagacaa

SEQ ID NO: 2191404 - RNA, 19 nt, Homo sapiens
  misc_RNA (1)...(19): siRNA sense strand
ggaagaggaggacggucau

SEQ ID NO: 2191405 - RNA, 19 nt, Homo sapiens
  misc_RNA (1)...(19): siRNA sense strand
acaaaggugugagaaugag

SEQ ID NO: 2191406 - RNA, 19 nt, Homo sapiens
  misc_RNA (1)...(19): siRNA sense strand
gcgcaggcaggaagaaugg

SEQ ID NO: 2191407 - RNA, 19 nt, Homo sapiens
  misc_RNA (1)...(19): siRNA sense strand
cagaagcagcugucaaagg

SEQ ID NO: 2191408 - RNA, 19 nt, Homo sapiens
  misc_RNA (1)...(19): siRNA sense strand
acgaagaggagguggaaga

SEQ ID NO: 2191409 - RNA, 19 nt, Homo sapiens
  misc_RNA (1)...(19): siRNA sense strand
agggagacaugguggagau

SEQ ID NO: 2191410 - RNA, 19 nt, Homo sapiens
  misc_RNA (1)...(19): siRNA sense strand
cugaccagccuuuguaugu

SEQ ID NO: 2191411 - RNA, 19 nt, Homo sapiens
  misc_RNA (1)...(19): siRNA sense strand
gcucggaggacgauuacag

SEQ ID NO: 2191412 - RNA, 19 nt, Homo sapiens
  misc_RNA (1)...(19): siRNA sense strand
ucagggaacagaggaccua

SEQ ID NO: 2191413 - RNA, 19 nt, Homo sapiens
  misc_RNA (1)...(19): siRNA sense strand
gaggagcugccuggagaga

SEQ ID NO: 2191414 - RNA, 19 nt, Homo sapiens
  misc_RNA (1)...(19): siRNA sense strand
aggagaggccacagacaaa

SEQ ID NO: 2191415 - RNA, 19 nt, Homo sapiens
  misc_RNA (1)...(19): siRNA sense strand
caaaguugguggucccaua

SEQ ID NO: 2191416 - RNA, 19 nt, Homo sapiens
  misc_RNA (1)...(19): siRNA sense strand
gauggcaccuggccucuug

SEQ ID NO: 2191417 - RNA, 19 nt, Homo sapiens
  misc_RNA (1)...(19): siRNA sense strand
cgucagggcucuuguucuc

SEQ ID NO: 2191418 - RNA, 19 nt, Homo sapiens
  misc_RNA (1)...(19): siRNA sense strand
ggcauccucucugcucaaa

SEQ ID NO: 2191419 - RNA, 19 nt, Homo sapiens
  misc_RNA (1)...(19): siRNA sense strand
ggacagccagcacccaucu

SEQ ID NO: 2191420 - RNA, 19 nt, Homo sapiens
  misc_RNA (1)...(19): siRNA sense strand
gcuuauaggcuuccuuguc

SEQ ID NO: 2191421 - RNA, 19 nt, Homo sapiens
  misc_RNA (1)...(19): siRNA sense strand
caccuggccucuugagucu

SEQ ID NO: 2191422 - RNA, 19 nt, Homo sapiens
  misc_RNA (1)...(19): siRNA sense strand
caccugcugugcccucuca

SEQ ID NO: 2191423 - RNA, 19 nt, Homo sapiens
  misc_RNA (1)...(19): siRNA sense strand
cauccucucugcucaaaau

SEQ ID NO: 2191424 - RNA, 19 nt, Homo sapiens
  misc_RNA (1)...(19): siRNA sense strand
ccucaucccucaccccauu

SEQ ID NO: 2191425 - RNA, 19 nt, Homo sapiens
  misc_RNA (1)...(19): siRNA sense strand
gacaauuacagagcucaga

SEQ ID NO: 2191426 - RNA, 19 nt, Homo sapiens
  misc_RNA (1)...(19): siRNA sense strand
acacagacaucaucaacau

SEQ ID NO: 2191427 - RNA, 19 nt, Homo sapiens
  misc_RNA (1)...(19): siRNA sense strand
gagaaugucuggaccuacu

SEQ ID NO: 2191428 - RNA, 19 nt, Homo sapiens
  misc_RNA (1)...(19): siRNA sense strand
gaccuacuaugucuccuau

SEQ ID NO: 2191429 - RNA, 19 nt, Homo sapiens
  misc_RNA (1)...(19): siRNA sense strand
gggagaaugucuggaccua

SEQ ID NO: 2191430 - RNA, 19 nt, Homo sapiens
  misc_RNA (1)...(19): siRNA sense strand
gccauucucugcaucuuca

SEQ ID NO: 2191431 - RNA, 19 nt, Homo sapiens
  misc_RNA (1)...(19): siRNA sense strand
gcuacgacuucaccucaug

SEQ ID NO: 2191432 - RNA, 19 nt, Homo sapiens
  misc_RNA (1)...(19): siRNA sense strand
ucaucaacaucuuccugua

SEQ ID NO: 2191433 - RNA, 19 nt, Homo sapiens
  misc_RNA (1)...(19): siRNA sense strand
uugcugcgcugaaccugua

SEQ ID NO: 2191434 - RNA, 19 nt, Homo sapiens
  misc_RNA (1)...(19): siRNA sense strand
gaugaucgccagcuucuac

SEQ ID NO: 2191435 - RNA, 19 nt, Homo sapiens
  misc_RNA (1)...(19): siRNA sense strand
guacauccucaccaucauu

SEQ ID NO: 2191436 - RNA, 19 nt, Homo sapiens
  misc_RNA (1)...(19): siRNA sense strand
ggaccuacuaugucuccua

SEQ ID NO: 2191437 - RNA, 19 nt, Homo sapiens
  misc_RNA (1)...(19): siRNA sense strand
cccagaagaguauguguuu

SEQ ID NO: 2191438 - RNA, 19 nt, Homo sapiens
  misc_RNA (1)...(19): siRNA sense strand
ggaaccgcauccuggagau

SEQ ID NO: 2191439 - RNA, 19 nt, Homo sapiens
  misc_RNA (1)...(19): siRNA sense strand
ccagaagaguauguguuug

SEQ ID NO: 2191440 - RNA, 19 nt, Homo sapiens
  misc_RNA (1)...(19): siRNA sense strand
guacacagacaucaucaac

SEQ ID NO: 2191441 - RNA, 19 nt, Homo sapiens
  misc_RNA (1)...(19): siRNA sense strand
cggugucuguguucacuuu

SEQ ID NO: 2191442 - RNA, 19 nt, Homo sapiens
  misc_RNA (1)...(19): siRNA sense strand
gcagacccgcuacgacuuc

SEQ ID NO: 2191443 - RNA, 19 nt, Homo sapiens
  misc_RNA (1)...(19): siRNA sense strand
caacaccgaggcagucauc

SEQ ID NO: 2191444 - RNA, 19 nt, Homo sapiens
  misc_RNA (1)...(19): siRNA sense strand
gaaugucuggaccuacuau

SEQ ID NO: 2191445 - RNA, 19 nt, Homo sapiens
  misc_RNA (1)...(19): siRNA sense strand
gcaugguggugcucuucau

SEQ ID NO: 2191446 - RNA, 19 nt, Homo sapiens
  misc_RNA (1)...(19): siRNA sense strand
ccuacuaugucuccuaugc

SEQ ID NO: 2191447 - RNA, 19 nt, Homo sapiens
  misc_RNA (1)...(19): siRNA sense strand
uaugcugucuucuucaucu

SEQ ID NO: 2191448 - RNA, 19 nt, Homo sapiens
  misc_RNA (1)...(19): siRNA sense strand
caacaucuuccuguacauc

SEQ ID NO: 2191449 - RNA, 19 nt, Homo sapiens
  misc_RNA (1)...(19): siRNA sense strand
gcccagaagaguauguguu

SEQ ID NO: 2191450 - RNA, 19 nt, Homo sapiens
  misc_RNA (1)...(19): siRNA sense strand
cuccuaugcugucuucuuc

SEQ ID NO: 2191451 - RNA, 19 nt, Homo sapiens
  misc_RNA (1)...(19): siRNA sense strand
gcucuucaucuucgccauu

SEQ ID NO: 2191452 - RNA, 19 nt, Homo sapiens
  misc_RNA (1)...(19): siRNA sense strand
ccuaugcugucuucuucau

SEQ ID NO: 2191453 - RNA, 19 nt, Homo sapiens
  misc_RNA (1)...(19): siRNA sense strand
gggaugaucgccagcuucu

SEQ ID NO: 2191454 - RNA, 19 nt, Homo sapiens
  misc_RNA (1)...(19): siRNA sense strand
cagacaucaucaacaucuu

SEQ ID NO: 2191455 - RNA, 19 nt, Homo sapiens
  misc_RNA (1)...(19): siRNA sense strand
cagaagaguauguguuugc

SEQ ID NO: 2191456 - RNA, 19 nt, Homo sapiens
  misc_RNA (1)...(19): siRNA sense strand
caccgaggcagucaucaug

SEQ ID NO: 2191457 - RNA, 19 nt, Homo sapiens
  misc_RNA (1)...(19): siRNA sense strand
ugucuccuaugcugucuuc

SEQ ID NO: 2191458 - RNA, 19 nt, Homo sapiens
  misc_RNA (1)...(19): siRNA sense strand
ccugagcccagaagaguau

SEQ ID NO: 2191459 - RNA, 19 nt, Homo sapiens
  misc_RNA (1)...(19): siRNA sense strand
uguccacggugucuguguu

SEQ ID NO: 2191460 - RNA, 19 nt, Homo sapiens
  misc_RNA (1)...(19): siRNA sense strand
acagacaucaucaacaucu

SEQ ID NO: 2191461 - RNA, 19 nt, Homo sapiens
  misc_RNA (1)...(19): siRNA sense strand
ggagaacgaucaaauucaa

SEQ ID NO: 2191462 - RNA, 19 nt, Homo sapiens
  misc_RNA (1)...(19): siRNA sense strand
ggagagaaccaaccacuuu

SEQ ID NO: 2191463 - RNA, 19 nt, Homo sapiens
  misc_RNA (1)...(19): siRNA sense strand
ccagaaaccugcacgacaa

SEQ ID NO: 2191464 - RNA, 19 nt, Homo sapiens
  misc_RNA (1)...(19): siRNA sense strand
gcacagccaucuccaccaa

SEQ ID NO: 2191465 - RNA, 19 nt, Homo sapiens
  misc_RNA (1)...(19): siRNA sense strand
ccacugaggucaacagcuu

SEQ ID NO: 2191466 - RNA, 19 nt, Homo sapiens
  misc_RNA (1)...(19): siRNA sense strand
ggccggagguguuugguaa

SEQ ID NO: 2191467 - RNA, 19 nt, Homo sapiens
  misc_RNA (1)...(19): siRNA sense strand
ggaguuuggcuuugucaua

SEQ ID NO: 2191468 - RNA, 19 nt, Homo sapiens
  misc_RNA (1)...(19): siRNA sense strand
cuucaggucuggccucuuu

SEQ ID NO: 2191469 - RNA, 19 nt, Homo sapiens
  misc_RNA (1)...(19): siRNA sense strand
cagaggacccugccaacua

SEQ ID NO: 2191470 - RNA, 19 nt, Homo sapiens
  misc_RNA (1)...(19): siRNA sense strand
ucaaggaugugcagguguu

SEQ ID NO: 2191471 - RNA, 19 nt, Homo sapiens
  misc_RNA (1)...(19): siRNA sense strand
ugccugaggugcuguauga

SEQ ID NO: 2191472 - RNA, 19 nt, Homo sapiens
  misc_RNA (1)...(19): siRNA sense strand
acaggagggugccgucuuu

SEQ ID NO: 2191473 - RNA, 19 nt, Homo sapiens
  misc_RNA (1)...(19): siRNA sense strand
ggaauucgagcacgucuuc

SEQ ID NO: 2191474 - RNA, 19 nt, Homo sapiens
  misc_RNA (1)...(19): siRNA sense strand
agaggacccugccaacuau

SEQ ID NO: 2191475 - RNA, 19 nt, Homo sapiens
  misc_RNA (1)...(19): siRNA sense strand
ugccagaccugacuguuau

SEQ ID NO: 2191476 - RNA, 19 nt, Homo sapiens
  misc_RNA (1)...(19): siRNA sense strand
gaacgaucaaauucaagaa

SEQ ID NO: 2191477 - RNA, 19 nt, Homo sapiens
  misc_RNA (1)...(19): siRNA sense strand
gcggagaacgaucaaauuc

SEQ ID NO: 2191478 - RNA, 19 nt, Homo sapiens
  misc_RNA (1)...(19): siRNA sense strand
uggcagagcugggcuaugg

SEQ ID NO: 2191479 - RNA, 19 nt, Homo sapiens
  misc_RNA (1)...(19): siRNA sense strand
uggcugacguggugcauga

SEQ ID NO: 2191480 - RNA, 19 nt, Homo sapiens
  misc_RNA (1)...(19): siRNA sense strand
ugacagugacggaugcuaa

SEQ ID NO: 2191481 - RNA, 19 nt, Homo sapiens
  misc_RNA (1)...(19): siRNA sense strand
gaguuuggcuuugucauac

SEQ ID NO: 2191482 - RNA, 19 nt, Homo sapiens
  misc_RNA (1)...(19): siRNA sense strand
ucaaggagcgucuggacuu

SEQ ID NO: 2191483 - RNA, 19 nt, Homo sapiens
  misc_RNA (1)...(19): siRNA sense strand
gcagcgccguguuugacuu

SEQ ID NO: 2191484 - RNA, 19 nt, Homo sapiens
  misc_RNA (1)...(19): siRNA sense strand
caugggcccugccucauca

SEQ ID NO: 2191485 - RNA, 19 nt, Homo sapiens
  misc_RNA (1)...(19): siRNA sense strand
agaccugacuguuaucaca

SEQ ID NO: 2191486 - RNA, 19 nt, Homo sapiens
  misc_RNA (1)...(19): siRNA sense strand
gagagaaccaaccacuuuc

SEQ ID NO: 2191487 - RNA, 19 nt, Homo sapiens
  misc_RNA (1)...(19): siRNA sense strand
gaugacccagugcuacuuu

SEQ ID NO: 2191488 - RNA, 19 nt, Homo sapiens
  misc_RNA (1)...(19): siRNA sense strand
cugaggugcuguaugaaga

SEQ ID NO: 2191489 - RNA, 19 nt, Homo sapiens
  misc_RNA (1)...(19): siRNA sense strand
caaggagcgucuggacuuc

SEQ ID NO: 2191490 - RNA, 19 nt, Homo sapiens
  misc_RNA (1)...(19): siRNA sense strand
caugagggaguuuggcuuu

SEQ ID NO: 2191491 - RNA, 19 nt, Homo sapiens
  misc_RNA (1)...(19): siRNA sense strand
ucccagggcugcaugaaca

SEQ ID NO: 2191492 - RNA, 19 nt, Homo sapiens
  misc_RNA (1)...(19): siRNA sense strand
ugaagcuggugcucaggaa

SEQ ID NO: 2191493 - RNA, 19 nt, Homo sapiens
  misc_RNA (1)...(19): siRNA sense strand
gagaccugcugcacauugg

SEQ ID NO: 2191494 - RNA, 19 nt, Homo sapiens
  misc_RNA (1)...(19): siRNA sense strand
ggagguguuugguaaucuc

SEQ ID NO: 2191495 - RNA, 19 nt, Homo sapiens
  misc_RNA (1)...(19): siRNA sense strand
ugagggaguuuggcuuugu

SEQ ID NO: 2191496 - RNA, 19 nt, Homo sapiens
  misc_RNA (1)...(19): siRNA sense strand
acacgugggcccagcauga

SEQ ID NO: 2191497 - RNA, 19 nt, Homo sapiens
  misc_RNA (1)...(19): siRNA sense strand
uuucuguccuucaaacuug

SEQ ID NO: 2191498 - RNA, 19 nt, Homo sapiens
  misc_RNA (1)...(19): siRNA sense strand
uggaggcuguggccacuga

SEQ ID NO: 2191499 - RNA, 19 nt, Homo sapiens
  misc_RNA (1)...(19): siRNA sense strand
cugccagaccugacuguua

SEQ ID NO: 2191500 - RNA, 19 nt, Homo sapiens
  misc_RNA (1)...(19): siRNA sense strand
aggcagaggugaccaagac

SEQ ID NO: 2191501 - RNA, 19 nt, Homo sapiens
  misc_RNA (1)...(19): siRNA sense strand
cauguugcgugccuuugga

SEQ ID NO: 2191502 - RNA, 19 nt, Homo sapiens
  misc_RNA (1)...(19): siRNA sense strand
ggagggugccgucuuucug

SEQ ID NO: 2191503 - RNA, 19 nt, Homo sapiens
  misc_RNA (1)...(19): siRNA sense strand
cuauccagcuguccaucuu

SEQ ID NO: 2191504 - RNA, 19 nt, Homo sapiens
  misc_RNA (1)...(19): siRNA sense strand
ccagucauaucgccagcau

SEQ ID NO: 2191505 - RNA, 19 nt, Homo sapiens
  misc_RNA (1)...(19): siRNA sense strand
ggcggagaacgaucaaauu

SEQ ID NO: 2191506 - RNA, 19 nt, Homo sapiens
  misc_RNA (1)...(19): siRNA sense strand
gagggugccgucuuucugu

SEQ ID NO: 2191507 - RNA, 19 nt, Homo sapiens
  misc_RNA (1)...(19): siRNA sense strand
uaccuucacagacgucuuu

SEQ ID NO: 2191508 - RNA, 19 nt, Homo sapiens
  misc_RNA (1)...(19): siRNA sense strand
cgagaccugcugcacauug

SEQ ID NO: 2191509 - RNA, 19 nt, Homo sapiens
  misc_RNA (1)...(19): siRNA sense strand
gagggaguuuggcuuuguc

SEQ ID NO: 2191510 - RNA, 19 nt, Homo sapiens
  misc_RNA (1)...(19): siRNA sense strand
cggcagcgucuaugaguau

SEQ ID NO: 2191511 - RNA, 19 nt, Homo sapiens
  misc_RNA (1)...(19): siRNA sense strand
cuucuccugugcccucuuu

SEQ ID NO: 2191512 - RNA, 19 nt, Homo sapiens
  misc_RNA (1)...(19): siRNA sense strand
agaacgaucaaauucaaga

SEQ ID NO: 2191513 - RNA, 19 nt, Homo sapiens
  misc_RNA (1)...(19): siRNA sense strand
gcacggcagcgucuaugag

SEQ ID NO: 2191514 - RNA, 19 nt, Homo sapiens
  misc_RNA (1)...(19): siRNA sense strand
aggaggcgcugcugucagu

SEQ ID NO: 2191515 - RNA, 19 nt, Homo sapiens
  misc_RNA (1)...(19): siRNA sense strand
ucagggcagcgccguguuu

SEQ ID NO: 2191516 - RNA, 19 nt, Homo sapiens
  misc_RNA (1)...(19): siRNA sense strand
acaagaugacccagugcua

SEQ ID NO: 2191517 - RNA, 19 nt, Homo sapiens
  misc_RNA (1)...(19): siRNA sense strand
acagccaucuccaccaaca

SEQ ID NO: 2191518 - RNA, 19 nt, Homo sapiens
  misc_RNA (1)...(19): siRNA sense strand
gacagugacggaugcuaau

SEQ ID NO: 2191519 - RNA, 19 nt, Homo sapiens
  misc_RNA (1)...(19): siRNA sense strand
gcaggagacggugcaguuc

SEQ ID NO: 2191520 - RNA, 19 nt, Homo sapiens
  misc_RNA (1)...(19): siRNA sense strand
gcacgugcgggucuuaaaa

SEQ ID NO: 2191521 - RNA, 19 nt, Homo sapiens
  misc_RNA (1)...(19): siRNA sense strand
ucaacagcuuccugaccaa

SEQ ID NO: 2191522 - RNA, 19 nt, Homo sapiens
  misc_RNA (1)...(19): siRNA sense strand
gggagagaaccaaccacuu

SEQ ID NO: 2191523 - RNA, 19 nt, Homo sapiens
  misc_RNA (1)...(19): siRNA sense strand
gcuacucagccaccaccua

SEQ ID NO: 2191524 - RNA, 19 nt, Homo sapiens
  misc_RNA (1)...(19): siRNA sense strand
agacauguugcgugccuuu

SEQ ID NO: 2191525 - RNA, 19 nt, Homo sapiens
  misc_RNA (1)...(19): siRNA sense strand
gggagcucauugggcagua

SEQ ID NO: 2191526 - RNA, 19 nt, Homo sapiens
  misc_RNA (1)...(19): siRNA sense strand
ggcccugccucaucaucga

SEQ ID NO: 2191527 - RNA, 19 nt, Homo sapiens
  misc_RNA (1)...(19): siRNA sense strand
cacggacugugcucugaug

SEQ ID NO: 2191528 - RNA, 19 nt, Homo sapiens
  misc_RNA (1)...(19): siRNA sense strand
gcauggacacggugcacau

SEQ ID NO: 2191529 - RNA, 19 nt, Homo sapiens
  misc_RNA (1)...(19): siRNA sense strand
gagcacggcagcgucuaug

SEQ ID NO: 2191530 - RNA, 19 nt, Homo sapiens
  misc_RNA (1)...(19): siRNA sense strand
caucaccgacccugagauc

SEQ ID NO: 2191531 - RNA, 19 nt, Homo sapiens
  misc_RNA (1)...(19): siRNA sense strand
cggagaacgaucaaauuca

SEQ ID NO: 2191532 - RNA, 19 nt, Homo sapiens
  misc_RNA (1)...(19): siRNA sense strand
ggacuucggggcagccuuu

SEQ ID NO: 2191533 - RNA, 19 nt, Homo sapiens
  misc_RNA (1)...(19): siRNA sense strand
cccaugugcuggccugcuu

SEQ ID NO: 2191534 - RNA, 19 nt, Homo sapiens
  misc_RNA (1)...(19): siRNA sense strand
ccggagguguuugguaauc

SEQ ID NO: 2191535 - RNA, 19 nt, Homo sapiens
  misc_RNA (1)...(19): siRNA sense strand
ggaggagcaguguguggau

SEQ ID NO: 2191536 - RNA, 19 nt, Homo sapiens
  misc_RNA (1)...(19): siRNA sense strand
gcacauccacaggcacagu

SEQ ID NO: 2191537 - RNA, 19 nt, Homo sapiens
  misc_RNA (1)...(19): siRNA sense strand
ggaacagcauugugucuuc

SEQ ID NO: 2191538 - RNA, 19 nt, Homo sapiens
  misc_RNA (1)...(19): siRNA sense strand
cauccuaccuaguuaagaa

SEQ ID NO: 2191539 - RNA, 19 nt, Homo sapiens
  misc_RNA (1)...(19): siRNA sense strand
gggcgacaguccgcgauua

SEQ ID NO: 2191540 - RNA, 19 nt, Homo sapiens
  misc_RNA (1)...(19): siRNA sense strand
gcaccagccuccacgaagu

SEQ ID NO: 2191541 - RNA, 19 nt, Homo sapiens
  misc_RNA (1)...(19): siRNA sense strand
gaguggcucucgucgaaga

SEQ ID NO: 2191542 - RNA, 19 nt, Homo sapiens
  misc_RNA (1)...(19): siRNA sense strand
aagaaugaguugacuuuca

SEQ ID NO: 2191543 - RNA, 19 nt, Homo sapiens
  misc_RNA (1)...(19): siRNA sense strand
uggaguggcucucgucgaa

SEQ ID NO: 2191544 - RNA, 19 nt, Homo sapiens
  misc_RNA (1)...(19): siRNA sense strand
ggcagaaggcuacaaccua

SEQ ID NO: 2191545 - RNA, 19 nt, Homo sapiens
  misc_RNA (1)...(19): siRNA sense strand
ccuacauccuaccuaguua

SEQ ID NO: 2191546 - RNA, 19 nt, Homo sapiens
  misc_RNA (1)...(19): siRNA sense strand
gcgaggaaguagaggcaau

SEQ ID NO: 2191547 - RNA, 19 nt, Homo sapiens
  misc_RNA (1)...(19): siRNA sense strand
ucucggaccuggcuuacug

SEQ ID NO: 2191548 - RNA, 19 nt, Homo sapiens
  misc_RNA (1)...(19): siRNA sense strand
caucuggacugcugagaac

SEQ ID NO: 2191549 - RNA, 19 nt, Homo sapiens
  misc_RNA (1)...(19): siRNA sense strand
ccuggacucucguagaugu

SEQ ID NO: 2191550 - RNA, 19 nt, Homo sapiens
  misc_RNA (1)...(19): siRNA sense strand
gcaucuggacugcugagaa

SEQ ID NO: 2191551 - RNA, 19 nt, Homo sapiens
  misc_RNA (1)...(19): siRNA sense strand
gccuacauccuaccuaguu

SEQ ID NO: 2191552 - RNA, 19 nt, Homo sapiens
  misc_RNA (1)...(19): siRNA sense strand
ccuacggccuggugcaguu

SEQ ID NO: 2191553 - RNA, 19 nt, Homo sapiens
  misc_RNA (1)...(19): siRNA sense strand
cuacauccuaccuaguuaa

SEQ ID NO: 2191554 - RNA, 19 nt, Homo sapiens
  misc_RNA (1)...(19): siRNA sense strand
agaaugaguugacuuucac

SEQ ID NO: 2191555 - RNA, 19 nt, Homo sapiens
  misc_RNA (1)...(19): siRNA sense strand
gaccugacggugaagaugu

SEQ ID NO: 2191556 - RNA, 19 nt, Homo sapiens
  misc_RNA (1)...(19): siRNA sense strand
gcgccuggaagaacaagaa

SEQ ID NO: 2191557 - RNA, 19 nt, Homo sapiens
  misc_RNA (1)...(19): siRNA sense strand
ugacugugcucccgaacac

SEQ ID NO: 2191558 - RNA, 19 nt, Homo sapiens
  misc_RNA (1)...(19): siRNA sense strand
cuaccuaguuaagaagaug

SEQ ID NO: 2191559 - RNA, 19 nt, Homo sapiens
  misc_RNA (1)...(19): siRNA sense strand
ugccuggacucucguagau

SEQ ID NO: 2191560 - RNA, 19 nt, Homo sapiens
  misc_RNA (1)...(19): siRNA sense strand
ggaccugacggugaagaug

SEQ ID NO: 2191561 - RNA, 19 nt, Homo sapiens
  misc_RNA (1)...(19): siRNA sense strand
ccaccucacggaucucgaa

SEQ ID NO: 2191562 - RNA, 19 nt, Homo sapiens
  misc_RNA (1)...(19): siRNA sense strand
gaaaagaaugaguugacuu

SEQ ID NO: 2191563 - RNA, 19 nt, Homo sapiens
  misc_RNA (1)...(19): siRNA sense strand
ggacucggaccuguaugau

SEQ ID NO: 2191564 - RNA, 19 nt, Homo sapiens
  misc_RNA (1)...(19): siRNA sense strand
ggcucuaccugccuacauc

SEQ ID NO: 2191565 - RNA, 19 nt, Homo sapiens
  misc_RNA (1)...(19): siRNA sense strand
agaaggcuacaaccuaguu

SEQ ID NO: 2191566 - RNA, 19 nt, Homo sapiens
  misc_RNA (1)...(19): siRNA sense strand
gaaggcuacaaccuaguuc

SEQ ID NO: 2191567 - RNA, 19 nt, Homo sapiens
  misc_RNA (1)...(19): siRNA sense strand
ccaucucggaccuggcuua

SEQ ID NO: 2191568 - RNA, 19 nt, Homo sapiens
  misc_RNA (1)...(19): siRNA sense strand
gccccacgcucaaacugua

SEQ ID NO: 2191569 - RNA, 19 nt, Homo sapiens
  misc_RNA (1)...(19): siRNA sense strand
ggaggcagaaggcuacaac

SEQ ID NO: 2191570 - RNA, 19 nt, Homo sapiens
  misc_RNA (1)...(19): siRNA sense strand
cuugcugucugcaccugua

SEQ ID NO: 2191571 - RNA, 19 nt, Homo sapiens
  misc_RNA (1)...(19): siRNA sense strand
guaugaugcggauggcuau

SEQ ID NO: 2191572 - RNA, 19 nt, Homo sapiens
  misc_RNA (1)...(19): siRNA sense strand
cgaggaagaugauacaauu

SEQ ID NO: 2191573 - RNA, 19 nt, Homo sapiens
  misc_RNA (1)...(19): siRNA sense strand
gcacacaguauucuaaauu

SEQ ID NO: 2191574 - RNA, 19 nt, Homo sapiens
  misc_RNA (1)...(19): siRNA sense strand
gaggaagacguuaaagaua

SEQ ID NO: 2191575 - RNA, 19 nt, Homo sapiens
  misc_RNA (1)...(19): siRNA sense strand
gcaagauacugagagauug

SEQ ID NO: 2191576 - RNA, 19 nt, Homo sapiens
  misc_RNA (1)...(19): siRNA sense strand
ggaggaagacguuaaagau

SEQ ID NO: 2191577 - RNA, 19 nt, Homo sapiens
  misc_RNA (1)...(19): siRNA sense strand
gaagcaugcucuggaaaug

SEQ ID NO: 2191578 - RNA, 19 nt, Homo sapiens
  misc_RNA (1)...(19): siRNA sense strand
gaggaagaugauacaauua

SEQ ID NO: 2191579 - RNA, 19 nt, Homo sapiens
  misc_RNA (1)...(19): siRNA sense strand
gaugauacaauuaccaaug

SEQ ID NO: 2191580 - RNA, 19 nt, Homo sapiens
  misc_RNA (1)...(19): siRNA sense strand
gaagucaacacaggaaaug

SEQ ID NO: 2191581 - RNA, 19 nt, Homo sapiens
  misc_RNA (1)...(19): siRNA sense strand
ggaggaagacguuaaagac

SEQ ID NO: 2191582 - RNA, 19 nt, Homo sapiens
  misc_RNA (1)...(19): siRNA sense strand
gaggaccugcugagagaua

SEQ ID NO: 2191583 - RNA, 19 nt, Homo sapiens
  misc_RNA (1)...(19): siRNA sense strand
ggauggaggagauagagaa

SEQ ID NO: 2191584 - RNA, 19 nt, Homo sapiens
  misc_RNA (1)...(19): siRNA sense strand
ggaggaagacgguaaagac

SEQ ID NO: 2191585 - RNA, 19 nt, Homo sapiens
  misc_RNA (1)...(19): siRNA sense strand
cugaggaccugcugagaga

SEQ ID NO: 2191586 - RNA, 19 nt, Homo sapiens
  misc_RNA (1)...(19): siRNA sense strand
gggaggaagacguuaaaga

SEQ ID NO: 2191587 - RNA, 19 nt, Homo sapiens
  misc_RNA (1)...(19): siRNA sense strand
gggaggaagacguuaaaga

SEQ ID NO: 2191588 - RNA, 19 nt, Homo sapiens
  misc_RNA (1)...(19): siRNA sense strand
caagauacugagagauuga

SEQ ID NO: 2191589 - RNA, 19 nt, Homo sapiens
  misc_RNA (1)...(19): siRNA sense strand
gaggauuugccaagaggua

SEQ ID NO: 2191590 - RNA, 19 nt, Homo sapiens
  misc_RNA (1)...(19): siRNA sense strand
gaggacagcagcaaugaag

SEQ ID NO: 2191591 - RNA, 19 nt, Homo sapiens
  misc_RNA (1)...(19): siRNA sense strand
aggaagacguuaaagauac

SEQ ID NO: 2191592 - RNA, 19 nt, Homo sapiens
  misc_RNA (1)...(19): siRNA sense strand
ggacgccagugaggaagau

SEQ ID NO: 2191593 - RNA, 19 nt, Homo sapiens
  misc_RNA (1)...(19): siRNA sense strand
uggaggagauagagaaugg

SEQ ID NO: 2191594 - RNA, 19 nt, Homo sapiens
  misc_RNA (1)...(19): siRNA sense strand
gaaaaggcacacaguauuc

SEQ ID NO: 2191595 - RNA, 19 nt, Homo sapiens
  misc_RNA (1)...(19): siRNA sense strand
gaggaagacgguaaagaca

SEQ ID NO: 2191596 - RNA, 19 nt, Homo sapiens
  misc_RNA (1)...(19): siRNA sense strand
gaagaugauacaauuacca

SEQ ID NO: 2191597 - RNA, 19 nt, Homo sapiens
  misc_RNA (1)...(19): siRNA sense strand
gcgaggaagaugauacaau

SEQ ID NO: 2191598 - RNA, 19 nt, Homo sapiens
  misc_RNA (1)...(19): siRNA sense strand
cuccagagaugcagcuuca

SEQ ID NO: 2191599 - RNA, 19 nt, Homo sapiens
  misc_RNA (1)...(19): siRNA sense strand
cugcugcuccugcaagaua

SEQ ID NO: 2191600 - RNA, 19 nt, Homo sapiens
  misc_RNA (1)...(19): siRNA sense strand
agucaacacaggaaaugua

SEQ ID NO: 2191601 - RNA, 19 nt, Homo sapiens
  misc_RNA (1)...(19): siRNA sense strand
ugcaagauacugagagauu

SEQ ID NO: 2191602 - RNA, 19 nt, Homo sapiens
  misc_RNA (1)...(19): siRNA sense strand
ggaagaugauacaauuacc

SEQ ID NO: 2191603 - RNA, 19 nt, Homo sapiens
  misc_RNA (1)...(19): siRNA sense strand
gcugaggauuugccaagag

SEQ ID NO: 2191604 - RNA, 19 nt, Homo sapiens
  misc_RNA (1)...(19): siRNA sense strand
ggcacacaguauucuaaau

SEQ ID NO: 2191605 - RNA, 19 nt, Homo sapiens
  misc_RNA (1)...(19): siRNA sense strand
ggaagacguuaaagauacc

SEQ ID NO: 2191606 - RNA, 19 nt, Homo sapiens
  misc_RNA (1)...(19): siRNA sense strand
ccugcaagauacugagaga

SEQ ID NO: 2191607 - RNA, 19 nt, Homo sapiens
  misc_RNA (1)...(19): siRNA sense strand
ugaagcaugcucuggaaau

SEQ ID NO: 2191608 - RNA, 19 nt, Homo sapiens
  misc_RNA (1)...(19): siRNA sense strand
agcaugcucuggaaauguu

SEQ ID NO: 2191609 - RNA, 19 nt, Homo sapiens
  misc_RNA (1)...(19): siRNA sense strand
cauccuguaccacaugaaa

SEQ ID NO: 2191610 - RNA, 19 nt, Homo sapiens
  misc_RNA (1)...(19): siRNA sense strand
ggacaccauugaggaagac

SEQ ID NO: 2191611 - RNA, 19 nt, Homo sapiens
  misc_RNA (1)...(19): siRNA sense strand
gcgaggaagacccgacaug

SEQ ID NO: 2191612 - RNA, 19 nt, Homo sapiens
  misc_RNA (1)...(19): siRNA sense strand
gggaggaagacgguaaaga

SEQ ID NO: 2191613 - RNA, 19 nt, Homo sapiens
  misc_RNA (1)...(19): siRNA sense strand
ugaaaaggcacacaguauu

SEQ ID NO: 2191614 - RNA, 19 nt, Homo sapiens
  misc_RNA (1)...(19): siRNA sense strand
gauggaggagauagagaau

SEQ ID NO: 2191615 - RNA, 19 nt, Homo sapiens
  misc_RNA (1)...(19): siRNA sense strand
aaaggcacacaguauucua

SEQ ID NO: 2191616 - RNA, 19 nt, Homo sapiens
  misc_RNA (1)...(19): siRNA sense strand
caaggugcagccacagguu

SEQ ID NO: 2191617 - RNA, 19 nt, Homo sapiens
  misc_RNA (1)...(19): siRNA sense strand
ugaagucaacacaggaaau

SEQ ID NO: 2191618 - RNA, 19 nt, Homo sapiens
  misc_RNA (1)...(19): siRNA sense strand
uggacaccauugaggaaga

SEQ ID NO: 2191619 - RNA, 19 nt, Homo sapiens
  misc_RNA (1)...(19): siRNA sense strand
gucaacacaggaaauguau

SEQ ID NO: 2191620 - RNA, 19 nt, Homo sapiens
  misc_RNA (1)...(19): siRNA sense strand
aaggugcagccacagguua

SEQ ID NO: 2191621 - RNA, 19 nt, Homo sapiens
  misc_RNA (1)...(19): siRNA sense strand
gaacauggcugugcuuuca

SEQ ID NO: 2191622 - RNA, 19 nt, Homo sapiens
  misc_RNA (1)...(19): siRNA sense strand
gggaacaucuguauuauug

SEQ ID NO: 2191623 - RNA, 19 nt, Homo sapiens
  misc_RNA (1)...(19): siRNA sense strand
gaacaaacauggcuugaag

SEQ ID NO: 2191624 - RNA, 19 nt, Homo sapiens
  misc_RNA (1)...(19): siRNA sense strand
gcaacaaggucuucaaguu

SEQ ID NO: 2191625 - RNA, 19 nt, Homo sapiens
  misc_RNA (1)...(19): siRNA sense strand
gaacuccucucccacguuu

SEQ ID NO: 2191626 - RNA, 19 nt, Homo sapiens
  misc_RNA (1)...(19): siRNA sense strand
gcagacaccuuaugagcaa

SEQ ID NO: 2191627 - RNA, 19 nt, Homo sapiens
  misc_RNA (1)...(19): siRNA sense strand
ugaaagggcuaauuggaaa

SEQ ID NO: 2191628 - RNA, 19 nt, Homo sapiens
  misc_RNA (1)...(19): siRNA sense strand
gaagaaacccaucauaagu

SEQ ID NO: 2191629 - RNA, 19 nt, Homo sapiens
  misc_RNA (1)...(19): siRNA sense strand
gcaagaagaaguacucuga

SEQ ID NO: 2191630 - RNA, 19 nt, Homo sapiens
  misc_RNA (1)...(19): siRNA sense strand
gaaguacucugacgucaag

SEQ ID NO: 2191631 - RNA, 19 nt, Homo sapiens
  misc_RNA (1)...(19): siRNA sense strand
gaggaucgauugauaaagu

SEQ ID NO: 2191632 - RNA, 19 nt, Homo sapiens
  misc_RNA (1)...(19): siRNA sense strand
gaaacacaguaacaucuug

SEQ ID NO: 2191633 - RNA, 19 nt, Homo sapiens
  misc_RNA (1)...(19): siRNA sense strand
uaacgagucugaccuugaa

SEQ ID NO: 2191634 - RNA, 19 nt, Homo sapiens
  misc_RNA (1)...(19): siRNA sense strand
ggaaagagagccaugaaau

SEQ ID NO: 2191635 - RNA, 19 nt, Homo sapiens
  misc_RNA (1)...(19): siRNA sense strand
gcgaagaaacccaucauaa

SEQ ID NO: 2191636 - RNA, 19 nt, Homo sapiens
  misc_RNA (1)...(19): siRNA sense strand
gaaagagagccaugaaaug

SEQ ID NO: 2191637 - RNA, 19 nt, Homo sapiens
  misc_RNA (1)...(19): siRNA sense strand
gaaacaggagcuacaaauu

SEQ ID NO: 2191638 - RNA, 19 nt, Homo sapiens
  misc_RNA (1)...(19): siRNA sense strand
cuacucaacuccagauaaa

SEQ ID NO: 2191639 - RNA, 19 nt, Homo sapiens
  misc_RNA (1)...(19): siRNA sense strand
ugacauguguggcaagaaa

SEQ ID NO: 2191640 - RNA, 19 nt, Homo sapiens
  misc_RNA (1)...(19): siRNA sense strand
gcauuaucgugcugaauuu

SEQ ID NO: 2191641 - RNA, 19 nt, Homo sapiens
  misc_RNA (1)...(19): siRNA sense strand
ucaagaaccucaucaagca

SEQ ID NO: 2191642 - RNA, 19 nt, Homo sapiens
  misc_RNA (1)...(19): siRNA sense strand
ccucaaggcucauaugaau

SEQ ID NO: 2191643 - RNA, 19 nt, Homo sapiens
  misc_RNA (1)...(19): siRNA sense strand
gacgagcucugccugauga

SEQ ID NO: 2191644 - RNA, 19 nt, Homo sapiens
  misc_RNA (1)...(19): siRNA sense strand
gagcggauccggaagguuu

SEQ ID NO: 2191645 - RNA, 19 nt, Homo sapiens
  misc_RNA (1)...(19): siRNA sense strand
ugaagguccugaacaguuu

SEQ ID NO: 2191646 - RNA, 19 nt, Homo sapiens
  misc_RNA (1)...(19): siRNA sense strand
gcaggugucucaggucaaa

SEQ ID NO: 2191647 - RNA, 19 nt, Homo sapiens
  misc_RNA (1)...(19): siRNA sense strand
ugaaugcacucaaggaaga

SEQ ID NO: 2191648 - RNA, 19 nt, Homo sapiens
  misc_RNA (1)...(19): siRNA sense strand
ccucagaccugcauucuca

SEQ ID NO: 2191649 - RNA, 19 nt, Homo sapiens
  misc_RNA (1)...(19): siRNA sense strand
ggcaagaaauucaaaucaa

SEQ ID NO: 2191650 - RNA, 19 nt, Homo sapiens
  misc_RNA (1)...(19): siRNA sense strand
gaagaaguccagcacagaa

SEQ ID NO: 2191651 - RNA, 19 nt, Homo sapiens
  misc_RNA (1)...(19): siRNA sense strand
ggucaggcaucaccgcuuu

SEQ ID NO: 2191652 - RNA, 19 nt, Homo sapiens
  misc_RNA (1)...(19): siRNA sense strand
ggaagcacaucugcauuau

SEQ ID NO: 2191653 - RNA, 19 nt, Homo sapiens
  misc_RNA (1)...(19): siRNA sense strand
gccaugaaaugcccauauu

SEQ ID NO: 2191654 - RNA, 19 nt, Homo sapiens
  misc_RNA (1)...(19): siRNA sense strand
gguuugaaguguccuguuu

SEQ ID NO: 2191655 - RNA, 19 nt, Homo sapiens
  misc_RNA (1)...(19): siRNA sense strand
gaacaucuguauuauugcu

SEQ ID NO: 2191656 - RNA, 19 nt, Homo sapiens
  misc_RNA (1)...(19): siRNA sense strand
gcagaugggaagcaguuua

SEQ ID NO: 2191657 - RNA, 19 nt, Homo sapiens
  misc_RNA (1)...(19): siRNA sense strand
gaauuugggugaggaggaa

SEQ ID NO: 2191658 - RNA, 19 nt, Homo sapiens
  misc_RNA (1)...(19): siRNA sense strand
caacaaggucuucaaguuc

SEQ ID NO: 2191659 - RNA, 19 nt, Homo sapiens
  misc_RNA (1)...(19): siRNA sense strand
ugaaggugguggaaauuga

SEQ ID NO: 2191660 - RNA, 19 nt, Homo sapiens
  misc_RNA (1)...(19): siRNA sense strand
cagagaaaguccagaagau

SEQ ID NO: 2191661 - RNA, 19 nt, Homo sapiens
  misc_RNA (1)...(19): siRNA sense strand
ucacagaggccgaagaaga

SEQ ID NO: 2191662 - RNA, 19 nt, Homo sapiens
  misc_RNA (1)...(19): siRNA sense strand
caucaccgcuuucaugaag

SEQ ID NO: 2191663 - RNA, 19 nt, Homo sapiens
  misc_RNA (1)...(19): siRNA sense strand
gaccuucagcgucauauuu

SEQ ID NO: 2191664 - RNA, 19 nt, Homo sapiens
  misc_RNA (1)...(19): siRNA sense strand
ugaauacuguggcaaacuu

SEQ ID NO: 2191665 - RNA, 19 nt, Homo sapiens
  misc_RNA (1)...(19): siRNA sense strand
cggaagcacaucugcauua

SEQ ID NO: 2191666 - RNA, 19 nt, Homo sapiens
  misc_RNA (1)...(19): siRNA sense strand
ggacggugacugugguuaa

SEQ ID NO: 2191667 - RNA, 19 nt, Homo sapiens
  misc_RNA (1)...(19): siRNA sense strand
ugaaaugcccauauuguga

SEQ ID NO: 2191668 - RNA, 19 nt, Homo sapiens
  misc_RNA (1)...(19): siRNA sense strand
caucauaagugugguuuua

SEQ ID NO: 2191669 - RNA, 19 nt, Homo sapiens
  misc_RNA (1)...(19): siRNA sense strand
aaacaggagcuacaaauuc

SEQ ID NO: 2191670 - RNA, 19 nt, Homo sapiens
  misc_RNA (1)...(19): siRNA sense strand
cagaagaucucaggaaagg

SEQ ID NO: 2191671 - RNA, 19 nt, Homo sapiens
  misc_RNA (1)...(19): siRNA sense strand
ccaaaugggaguucaauag

SEQ ID NO: 2191672 - RNA, 19 nt, Homo sapiens
  misc_RNA (1)...(19): siRNA sense strand
gcaaggugguuugaagugu

SEQ ID NO: 2191673 - RNA, 19 nt, Homo sapiens
  misc_RNA (1)...(19): siRNA sense strand
acaggaagcacccuaauga

SEQ ID NO: 2191674 - RNA, 19 nt, Homo sapiens
  misc_RNA (1)...(19): siRNA sense strand
gaagaggagcuggcagaaa

SEQ ID NO: 2191675 - RNA, 19 nt, Homo sapiens
  misc_RNA (1)...(19): siRNA sense strand
gcuugaaggugguggaaau

SEQ ID NO: 2191676 - RNA, 19 nt, Homo sapiens
  misc_RNA (1)...(19): siRNA sense strand
ccauuacuccugcaacaua

SEQ ID NO: 2191677 - RNA, 19 nt, Homo sapiens
  misc_RNA (1)...(19): siRNA sense strand
gaagaauggcucagaccuu

SEQ ID NO: 2191678 - RNA, 19 nt, Homo sapiens
  misc_RNA (1)...(19): siRNA sense strand
gagcaccauuucugagguu

SEQ ID NO: 2191679 - RNA, 19 nt, Homo sapiens
  misc_RNA (1)...(19): siRNA sense strand
caaaugaacaccagcuugu

SEQ ID NO: 2191680 - RNA, 19 nt, Homo sapiens
  misc_RNA (1)...(19): siRNA sense strand
cgaagaaacccaucauaag

SEQ ID NO: 2191681 - RNA, 19 nt, Homo sapiens
  misc_RNA (1)...(19): siRNA sense strand
cagagaagcacauggaaga

SEQ ID NO: 2191682 - RNA, 19 nt, Homo sapiens
  misc_RNA (1)...(19): siRNA sense strand
ggagaggcuaccaggaaua

SEQ ID NO: 2191683 - RNA, 19 nt, Homo sapiens
  misc_RNA (1)...(19): siRNA sense strand
ccauucagcagacaccuua

SEQ ID NO: 2191684 - RNA, 19 nt, Homo sapiens
  misc_RNA (1)...(19): siRNA sense strand
gggaacagccugccuccaa

SEQ ID NO: 2191685 - RNA, 19 nt, Homo sapiens
  misc_RNA (1)...(19): siRNA sense strand
gcauugagacggugacugu

SEQ ID NO: 2191686 - RNA, 19 nt, Homo sapiens
  misc_RNA (1)...(19): siRNA sense strand
acaggcacaucuuaaaguu

SEQ ID NO: 2191687 - RNA, 19 nt, Homo sapiens
  misc_RNA (1)...(19): siRNA sense strand
acucaacuccagauaaaua

SEQ ID NO: 2191688 - RNA, 19 nt, Homo sapiens
  misc_RNA (1)...(19): siRNA sense strand
aaacagagaaaguccagaa

SEQ ID NO: 2191689 - RNA, 19 nt, Homo sapiens
  misc_RNA (1)...(19): siRNA sense strand
gguuaauguugaugagauu

SEQ ID NO: 2191690 - RNA, 19 nt, Homo sapiens
  misc_RNA (1)...(19): siRNA sense strand
ggaguucaauaggcacuug

SEQ ID NO: 2191691 - RNA, 19 nt, Homo sapiens
  misc_RNA (1)...(19): siRNA sense strand
cucaagaggugguuucaga

SEQ ID NO: 2191692 - RNA, 19 nt, Homo sapiens
  misc_RNA (1)...(19): siRNA sense strand
acaguaacaucuugcugaa

SEQ ID NO: 2191693 - RNA, 19 nt, Homo sapiens
  misc_RNA (1)...(19): siRNA sense strand
gaagguccugaacaguuua

SEQ ID NO: 2191694 - RNA, 19 nt, Homo sapiens
  misc_RNA (1)...(19): siRNA sense strand
uccagaagaucucaggaaa

SEQ ID NO: 2191695 - RNA, 19 nt, Homo sapiens
  misc_RNA (1)...(19): siRNA sense strand
ccagcaaggugguuugaag

SEQ ID NO: 2191696 - RNA, 19 nt, Homo sapiens
  misc_RNA (1)...(19): siRNA sense strand
gcuacaggcacaucuuaaa

SEQ ID NO: 2191697 - RNA, 19 nt, Homo sapiens
  misc_RNA (1)...(19): siRNA sense strand
gagcaccggucaggcauca

SEQ ID NO: 2191698 - RNA, 19 nt, Homo sapiens
  misc_RNA (1)...(19): siRNA sense strand
uaaauguuguaaccucuuc

SEQ ID NO: 2191699 - RNA, 19 nt, Homo sapiens
  misc_RNA (1)...(19): siRNA sense strand
ggagacaaguggccuuuug

SEQ ID NO: 2191700 - RNA, 19 nt, Homo sapiens
  misc_RNA (1)...(19): siRNA sense strand
caagcacacuggagagaag

SEQ ID NO: 2191701 - RNA, 19 nt, Homo sapiens
  misc_RNA (1)...(19): siRNA sense strand
agaaacccaucauaagugu

SEQ ID NO: 2191702 - RNA, 19 nt, Homo sapiens
  misc_RNA (1)...(19): siRNA sense strand
aagcacaucugcauuaucg

SEQ ID NO: 2191703 - RNA, 19 nt, Homo sapiens
  misc_RNA (1)...(19): siRNA sense strand
gaacagcaugucuccuuca

SEQ ID NO: 2191704 - RNA, 19 nt, Homo sapiens
  misc_RNA (1)...(19): siRNA sense strand
cagaugggaagcaguuuaa

SEQ ID NO: 2191705 - RNA, 19 nt, Homo sapiens
  misc_RNA (1)...(19): siRNA sense strand
cccgggaacaucuguauua

SEQ ID NO: 2191706 - RNA, 19 nt, Homo sapiens
  misc_RNA (1)...(19): siRNA sense strand
agucugaccuugaacuaga

SEQ ID NO: 2191707 - RNA, 19 nt, Homo sapiens
  misc_RNA (1)...(19): siRNA sense strand
guaacgagucugaccuuga

SEQ ID NO: 2191708 - RNA, 19 nt, Homo sapiens
  misc_RNA (1)...(19): siRNA sense strand
ccucggaguucaucgucua

SEQ ID NO: 2191709 - RNA, 19 nt, Homo sapiens
  misc_RNA (1)...(19): siRNA sense strand
aauaggcacuugaagaaca

SEQ ID NO: 2191710 - RNA, 19 nt, Homo sapiens
  misc_RNA (1)...(19): siRNA sense strand
cagcugaaagggcuaauug

SEQ ID NO: 2191711 - RNA, 19 nt, Homo sapiens
  misc_RNA (1)...(19): siRNA sense strand
cagaggaucgauugauaaa

SEQ ID NO: 2191712 - RNA, 19 nt, Homo sapiens
  misc_RNA (1)...(19): siRNA sense strand
uucagaggaucgauugaua

SEQ ID NO: 2191713 - RNA, 19 nt, Homo sapiens
  misc_RNA (1)...(19): siRNA sense strand
ucacacagcacuggacaaa

SEQ ID NO: 2191714 - RNA, 19 nt, Homo sapiens
  misc_RNA (1)...(19): siRNA sense strand
aggcacaucuuaaaguuca

SEQ ID NO: 2191715 - RNA, 19 nt, Homo sapiens
  misc_RNA (1)...(19): siRNA sense strand
guaauucagaaacacagua

SEQ ID NO: 2191716 - RNA, 19 nt, Homo sapiens
  misc_RNA (1)...(19): siRNA sense strand
cugaacaguuuacagaaga

SEQ ID NO: 2191717 - RNA, 19 nt, Homo sapiens
  misc_RNA (1)...(19): siRNA sense strand
gacgcaaggugaagugauc

SEQ ID NO: 2191718 - RNA, 19 nt, Homo sapiens
  misc_RNA (1)...(19): siRNA sense strand
ggacaagaaggucaaagag

SEQ ID NO: 2191719 - RNA, 19 nt, Homo sapiens
  misc_RNA (1)...(19): siRNA sense strand
gagaaaguccagaagaucu

SEQ ID NO: 2191720 - RNA, 19 nt, Homo sapiens
  misc_RNA (1)...(19): siRNA sense strand
gaagaagggguuaauguug

SEQ ID NO: 2191721 - RNA, 19 nt, Homo sapiens
  misc_RNA (1)...(19): siRNA sense strand
ggaggaagccgagcacuuu

SEQ ID NO: 2191722 - RNA, 19 nt, Homo sapiens
  misc_RNA (1)...(19): siRNA sense strand
uaucaucagugcucaaugu

SEQ ID NO: 2191723 - RNA, 19 nt, Homo sapiens
  misc_RNA (1)...(19): siRNA sense strand
caucagugcucaauguuac

SEQ ID NO: 2191724 - RNA, 19 nt, Homo sapiens
  misc_RNA (1)...(19): siRNA sense strand
gaacuccgcacccgcuuuc

SEQ ID NO: 2191725 - RNA, 19 nt, Homo sapiens
  misc_RNA (1)...(19): siRNA sense strand
caaagaugcccguggacaa

SEQ ID NO: 2191726 - RNA, 19 nt, Homo sapiens
  misc_RNA (1)...(19): siRNA sense strand
ccaggucucugcauuuguc

SEQ ID NO: 2191727 - RNA, 19 nt, Homo sapiens
  misc_RNA (1)...(19): siRNA sense strand
cagaaucacagcauugaga

SEQ ID NO: 2191728 - RNA, 19 nt, Homo sapiens
  misc_RNA (1)...(19): siRNA sense strand
cagaaucucauuguccuaa

SEQ ID NO: 2191729 - RNA, 19 nt, Homo sapiens
  misc_RNA (1)...(19): siRNA sense strand
gcagauggcagggaguguu

SEQ ID NO: 2191730 - RNA, 19 nt, Homo sapiens
  misc_RNA (1)...(19): siRNA sense strand
aaagaugcccguggacaaa

SEQ ID NO: 2191731 - RNA, 19 nt, Homo sapiens
  misc_RNA (1)...(19): siRNA sense strand
ugagagguauguaucaacu

SEQ ID NO: 2191732 - RNA, 19 nt, Homo sapiens
  misc_RNA (1)...(19): siRNA sense strand
gaaggcauccaggagaaug

SEQ ID NO: 2191733 - RNA, 19 nt, Homo sapiens
  misc_RNA (1)...(19): siRNA sense strand
cagggaguguuguguguuc

SEQ ID NO: 2191734 - RNA, 19 nt, Homo sapiens
  misc_RNA (1)...(19): siRNA sense strand
ggcagggaguguugugugu

SEQ ID NO: 2191735 - RNA, 19 nt, Homo sapiens
  misc_RNA (1)...(19): siRNA sense strand
gcucaauguuacagcuuca

SEQ ID NO: 2191736 - RNA, 19 nt, Homo sapiens
  misc_RNA (1)...(19): siRNA sense strand
gcucucauuugcccagcuu

SEQ ID NO: 2191737 - RNA, 19 nt, Homo sapiens
  misc_RNA (1)...(19): siRNA sense strand
gcauugagagguauguauc

SEQ ID NO: 2191738 - RNA, 19 nt, Homo sapiens
  misc_RNA (1)...(19): siRNA sense strand
ucacagcauugagagguau

SEQ ID NO: 2191739 - RNA, 19 nt, Homo sapiens
  misc_RNA (1)...(19): siRNA sense strand
gcugaggacagaacauugu

SEQ ID NO: 2191740 - RNA, 19 nt, Homo sapiens
  misc_RNA (1)...(19): siRNA sense strand
ucaucagugcucaauguua

SEQ ID NO: 2191741 - RNA, 19 nt, Homo sapiens
  misc_RNA (1)...(19): siRNA sense strand
uuccaucucuuucugauag

SEQ ID NO: 2191742 - RNA, 19 nt, Homo sapiens
  misc_RNA (1)...(19): siRNA sense strand
ggaacuccgcacccgcuuu

SEQ ID NO: 2191743 - RNA, 19 nt, Homo sapiens
  misc_RNA (1)...(19): siRNA sense strand
uccaugacccucagaauca

SEQ ID NO: 2191744 - RNA, 19 nt, Homo sapiens
  misc_RNA (1)...(19): siRNA sense strand
gcagaaucucauuguccua

SEQ ID NO: 2191745 - RNA, 19 nt, Homo sapiens
  misc_RNA (1)...(19): siRNA sense strand
uugcccagcuugugcagaa

SEQ ID NO: 2191746 - RNA, 19 nt, Homo sapiens
  misc_RNA (1)...(19): siRNA sense strand
aggcuuggguccaucaugu

SEQ ID NO: 2191747 - RNA, 19 nt, Homo sapiens
  misc_RNA (1)...(19): siRNA sense strand
gcauuuguccgcguucuuc

SEQ ID NO: 2191748 - RNA, 19 nt, Homo sapiens
  misc_RNA (1)...(19): siRNA sense strand
aaaccaggcuuggguccau

SEQ ID NO: 2191749 - RNA, 19 nt, Homo sapiens
  misc_RNA (1)...(19): siRNA sense strand
guuacagcuucaaacauag

SEQ ID NO: 2191750 - RNA, 19 nt, Homo sapiens
  misc_RNA (1)...(19): siRNA sense strand
ccucagaaucacagcauug

SEQ ID NO: 2191751 - RNA, 19 nt, Homo sapiens
  misc_RNA (1)...(19): siRNA sense strand
cuccaggucucugcauuug

SEQ ID NO: 2191752 - RNA, 19 nt, Homo sapiens
  misc_RNA (1)...(19): siRNA sense strand
ccgaugugauagcaaagau

SEQ ID NO: 2191753 - RNA, 19 nt, Homo sapiens
  misc_RNA (1)...(19): siRNA sense strand
ucaauguuacagcuucaaa

SEQ ID NO: 2191754 - RNA, 19 nt, Homo sapiens
  misc_RNA (1)...(19): siRNA sense strand
gcagggaguguuguguguu

SEQ ID NO: 2191755 - RNA, 19 nt, Homo sapiens
  misc_RNA (1)...(19): siRNA sense strand
ggaaggcauccaggagaau

SEQ ID NO: 2191756 - RNA, 19 nt, Homo sapiens
  misc_RNA (1)...(19): siRNA sense strand
gaacauugucuucuuuucu

SEQ ID NO: 2191757 - RNA, 19 nt, Homo sapiens
  misc_RNA (1)...(19): siRNA sense strand
gcuuggguccaucauguug

SEQ ID NO: 2191758 - RNA, 19 nt, Homo sapiens
  misc_RNA (1)...(19): siRNA sense strand
gguccaucauguuggcaau

SEQ ID NO: 2191759 - RNA, 19 nt, Homo sapiens
  misc_RNA (1)...(19): siRNA sense strand
cagauggcagggaguguug

SEQ ID NO: 2191760 - RNA, 19 nt, Homo sapiens
  misc_RNA (1)...(19): siRNA sense strand
gaucaaaggugacaaagga

SEQ ID NO: 2191761 - RNA, 19 nt, Homo sapiens
  misc_RNA (1)...(19): siRNA sense strand
ccaaggaaaucacagguuu

SEQ ID NO: 2191762 - RNA, 19 nt, Homo sapiens
  misc_RNA (1)...(19): siRNA sense strand
gaaaggugaugugggcaua

SEQ ID NO: 2191763 - RNA, 19 nt, Homo sapiens
  misc_RNA (1)...(19): siRNA sense strand
acauaaaucucuuggcuaa

SEQ ID NO: 2191764 - RNA, 19 nt, Homo sapiens
  misc_RNA (1)...(19): siRNA sense strand
ggauggaccuccugguuug

SEQ ID NO: 2191765 - RNA, 19 nt, Homo sapiens
  misc_RNA (1)...(19): siRNA sense strand
aaagggaacucgaggagaa

SEQ ID NO: 2191766 - RNA, 19 nt, Homo sapiens
  misc_RNA (1)...(19): siRNA sense strand
ggauugugaucuauuguga

SEQ ID NO: 2191767 - RNA, 19 nt, Homo sapiens
  misc_RNA (1)...(19): siRNA sense strand
gcaaggaggacuuugagaa

SEQ ID NO: 2191768 - RNA, 19 nt, Homo sapiens
  misc_RNA (1)...(19): siRNA sense strand
gaaaggagaccagggagaa

SEQ ID NO: 2191769 - RNA, 19 nt, Homo sapiens
  misc_RNA (1)...(19): siRNA sense strand
ggaaaggacgggccaaaug

SEQ ID NO: 2191770 - RNA, 19 nt, Homo sapiens
  misc_RNA (1)...(19): siRNA sense strand
gcucagaguuccuauguac

SEQ ID NO: 2191771 - RNA, 19 nt, Homo sapiens
  misc_RNA (1)...(19): siRNA sense strand
gaaccuggcuaugcuaaag

SEQ ID NO: 2191772 - RNA, 19 nt, Homo sapiens
  misc_RNA (1)...(19): siRNA sense strand
gaacgucucccugcacauu

SEQ ID NO: 2191773 - RNA, 19 nt, Homo sapiens
  misc_RNA (1)...(19): siRNA sense strand
ccaaggcccaucuggauua

SEQ ID NO: 2191774 - RNA, 19 nt, Homo sapiens
  misc_RNA (1)...(19): siRNA sense strand
gaagauggucugccuggaa

SEQ ID NO: 2191775 - RNA, 19 nt, Homo sapiens
  misc_RNA (1)...(19): siRNA sense strand
cuaaggaugugugcaauga

SEQ ID NO: 2191776 - RNA, 19 nt, Homo sapiens
  misc_RNA (1)...(19): siRNA sense strand
gcaaaguacugaggaugug

SEQ ID NO: 2191777 - RNA, 19 nt, Homo sapiens
  misc_RNA (1)...(19): siRNA sense strand
ucacgaggcuuaccuggau

SEQ ID NO: 2191778 - RNA, 19 nt, Homo sapiens
  misc_RNA (1)...(19): siRNA sense strand
agaaggagaucgcuuuaag

SEQ ID NO: 2191779 - RNA, 19 nt, Homo sapiens
  misc_RNA (1)...(19): siRNA sense strand
gaccgggacuggcacaaga

SEQ ID NO: 2191780 - RNA, 19 nt, Homo sapiens
  misc_RNA (1)...(19): siRNA sense strand
gcucaguggugcagcaaga

SEQ ID NO: 2191781 - RNA, 19 nt, Homo sapiens
  misc_RNA (1)...(19): siRNA sense strand
caggaaggguuaccaggaa

SEQ ID NO: 2191782 - RNA, 19 nt, Homo sapiens
  misc_RNA (1)...(19): siRNA sense strand
gaaaggacgggccaaaugg

SEQ ID NO: 2191783 - RNA, 19 nt, Homo sapiens
  misc_RNA (1)...(19): siRNA sense strand
guagaaggagaucgcuuua

SEQ ID NO: 2191784 - RNA, 19 nt, Homo sapiens
  misc_RNA (1)...(19): siRNA sense strand
gaaacccugcgucggcuua

SEQ ID NO: 2191785 - RNA, 19 nt, Homo sapiens
  misc_RNA (1)...(19): siRNA sense strand
acaaaggugucccaggaaa

SEQ ID NO: 2191786 - RNA, 19 nt, Homo sapiens
  misc_RNA (1)...(19): siRNA sense strand
gaaggaagacugguauauc

SEQ ID NO: 2191787 - RNA, 19 nt, Homo sapiens
  misc_RNA (1)...(19): siRNA sense strand
gagaauggagcucagaguu

SEQ ID NO: 2191788 - RNA, 19 nt, Homo sapiens
  misc_RNA (1)...(19): siRNA sense strand
ggaaggaagacugguauau

SEQ ID NO: 2191789 - RNA, 19 nt, Homo sapiens
  misc_RNA (1)...(19): siRNA sense strand
gggagaaccaggagaaaga

SEQ ID NO: 2191790 - RNA, 19 nt, Homo sapiens
  misc_RNA (1)...(19): siRNA sense strand
gggagaaccaggagagaaa

SEQ ID NO: 2191791 - RNA, 19 nt, Homo sapiens
  misc_RNA (1)...(19): siRNA sense strand
uggagagccuggauucaaa

SEQ ID NO: 2191792 - RNA, 19 nt, Homo sapiens
  misc_RNA (1)...(19): siRNA sense strand
ucaaugccaucgacaagau

SEQ ID NO: 2191793 - RNA, 19 nt, Homo sapiens
  misc_RNA (1)...(19): siRNA sense strand
ccacuacgaucuggucuuc

SEQ ID NO: 2191794 - RNA, 19 nt, Homo sapiens
  misc_RNA (1)...(19): siRNA sense strand
gaaaggugaccgaggugaa

SEQ ID NO: 2191795 - RNA, 19 nt, Homo sapiens
  misc_RNA (1)...(19): siRNA sense strand
gagguucucgggucaauga

SEQ ID NO: 2191796 - RNA, 19 nt, Homo sapiens
  misc_RNA (1)...(19): siRNA sense strand
gagcucagaguuccuaugu

SEQ ID NO: 2191797 - RNA, 19 nt, Homo sapiens
  misc_RNA (1)...(19): siRNA sense strand
acagggaagucaaggagaa

SEQ ID NO: 2191798 - RNA, 19 nt, Homo sapiens
  misc_RNA (1)...(19): siRNA sense strand
gggccguccuggagaauug

SEQ ID NO: 2191799 - RNA, 19 nt, Homo sapiens
  misc_RNA (1)...(19): siRNA sense strand
gggauggaccuccugguuu

SEQ ID NO: 2191800 - RNA, 19 nt, Homo sapiens
  misc_RNA (1)...(19): siRNA sense strand
gaaaaugugcucuguccua

SEQ ID NO: 2191801 - RNA, 19 nt, Homo sapiens
  misc_RNA (1)...(19): siRNA sense strand
aagauggucugccuggaaa

SEQ ID NO: 2191802 - RNA, 19 nt, Homo sapiens
  misc_RNA (1)...(19): siRNA sense strand
caagggagaaccaggagaa

SEQ ID NO: 2191803 - RNA, 19 nt, Homo sapiens
  misc_RNA (1)...(19): siRNA sense strand
gaaaaccucucggaaggaa

SEQ ID NO: 2191804 - RNA, 19 nt, Homo sapiens
  misc_RNA (1)...(19): siRNA sense strand
aaggaagacugguauaucu

SEQ ID NO: 2191805 - RNA, 19 nt, Homo sapiens
  misc_RNA (1)...(19): siRNA sense strand
ggagacuuguugugauauc

SEQ ID NO: 2191806 - RNA, 19 nt, Homo sapiens
  misc_RNA (1)...(19): siRNA sense strand
uuggagacuuguugugaua

SEQ ID NO: 2191807 - RNA, 19 nt, Homo sapiens
  misc_RNA (1)...(19): siRNA sense strand
acaaggcagucgaguacaa

SEQ ID NO: 2191808 - RNA, 19 nt, Homo sapiens
  misc_RNA (1)...(19): siRNA sense strand
ccacguguccgacuucaau

SEQ ID NO: 2191809 - RNA, 19 nt, Homo sapiens
  misc_RNA (1)...(19): siRNA sense strand
gggccucucuucacuacug

SEQ ID NO: 2191810 - RNA, 19 nt, Homo sapiens
  misc_RNA (1)...(19): siRNA sense strand
ggacggugcaccaggaaau

SEQ ID NO: 2191811 - RNA, 19 nt, Homo sapiens
  misc_RNA (1)...(19): siRNA sense strand
acgcagaauuggagacuug

SEQ ID NO: 2191812 - RNA, 19 nt, Homo sapiens
  misc_RNA (1)...(19): siRNA sense strand
gggagaacauugacaucca

SEQ ID NO: 2191813 - RNA, 19 nt, Homo sapiens
  misc_RNA (1)...(19): siRNA sense strand
aaacaaggcagucgaguac

SEQ ID NO: 2191814 - RNA, 19 nt, Homo sapiens
  misc_RNA (1)...(19): siRNA sense strand
aggaggagcuggaggagau

SEQ ID NO: 2191815 - RNA, 19 nt, Homo sapiens
  misc_RNA (1)...(19): siRNA sense strand
ccaaggagaacgaggugaa

SEQ ID NO: 2191816 - RNA, 19 nt, Homo sapiens
  misc_RNA (1)...(19): siRNA sense strand
gaaaggugaucagggucau

SEQ ID NO: 2191817 - RNA, 19 nt, Homo sapiens
  misc_RNA (1)...(19): siRNA sense strand
caaguccgcccacgucuuc

SEQ ID NO: 2191818 - RNA, 19 nt, Homo sapiens
  misc_RNA (1)...(19): siRNA sense strand
ggaggaaccaaggaaauca

SEQ ID NO: 2191819 - RNA, 19 nt, Homo sapiens
  misc_RNA (1)...(19): siRNA sense strand
gcacugggagggcaaugug

SEQ ID NO: 2191820 - RNA, 19 nt, Homo sapiens
  misc_RNA (1)...(19): siRNA sense strand
gaccuacagcggauuguga

SEQ ID NO: 2191821 - RNA, 19 nt, Homo sapiens
  misc_RNA (1)...(19): siRNA sense strand
gaggaacgggagaacauug

SEQ ID NO: 2191822 - RNA, 19 nt, Homo sapiens
  misc_RNA (1)...(19): siRNA sense strand
gagacgcgcuccgcuacau

SEQ ID NO: 2191823 - RNA, 19 nt, Homo sapiens
  misc_RNA (1)...(19): siRNA sense strand
caaggaggacuuugagaag

SEQ ID NO: 2191824 - RNA, 19 nt, Homo sapiens
  misc_RNA (1)...(19): siRNA sense strand
ggaaagccagggagagaag

SEQ ID NO: 2191825 - RNA, 19 nt, Homo sapiens
  misc_RNA (1)...(19): siRNA sense strand
ggagggcaauguguuaagg

SEQ ID NO: 2191826 - RNA, 19 nt, Homo sapiens
  misc_RNA (1)...(19): siRNA sense strand
gacaugggaccaccuggaa

SEQ ID NO: 2191827 - RNA, 19 nt, Homo sapiens
  misc_RNA (1)...(19): siRNA sense strand
ugauggauuuguucagugu

SEQ ID NO: 2191828 - RNA, 19 nt, Homo sapiens
  misc_RNA (1)...(19): siRNA sense strand
caaagagggcagagaugga

SEQ ID NO: 2191829 - RNA, 19 nt, Homo sapiens
  misc_RNA (1)...(19): siRNA sense strand
aaagucagagggucagaaa

SEQ ID NO: 2191830 - RNA, 19 nt, Homo sapiens
  misc_RNA (1)...(19): siRNA sense strand
guuuugaccugauggauuu

SEQ ID NO: 2191831 - RNA, 19 nt, Homo sapiens
  misc_RNA (1)...(19): siRNA sense strand
ccaagggucaccugggaaa

SEQ ID NO: 2191832 - RNA, 19 nt, Homo sapiens
  misc_RNA (1)...(19): siRNA sense strand
ggagacauaggagccauug

SEQ ID NO: 2191833 - RNA, 19 nt, Homo sapiens
  misc_RNA (1)...(19): siRNA sense strand
ggagagaagggugaaaugg

SEQ ID NO: 2191834 - RNA, 19 nt, Homo sapiens
  misc_RNA (1)...(19): siRNA sense strand
uacagcggauugugaucua

SEQ ID NO: 2191835 - RNA, 19 nt, Homo sapiens
  misc_RNA (1)...(19): siRNA sense strand
ugaguacgccuuugucaca

SEQ ID NO: 2191836 - RNA, 19 nt, Homo sapiens
  misc_RNA (1)...(19): siRNA sense strand
gaacgggagaacauugaca

SEQ ID NO: 2191837 - RNA, 19 nt, Homo sapiens
  misc_RNA (1)...(19): siRNA sense strand
cggaaucccaggagaagaa

SEQ ID NO: 2191838 - RNA, 19 nt, Homo sapiens
  misc_RNA (1)...(19): siRNA sense strand
uaaaucucuuggcuaagga

SEQ ID NO: 2191839 - RNA, 19 nt, Homo sapiens
  misc_RNA (1)...(19): siRNA sense strand
auaaaucucuuggcuaagg

SEQ ID NO: 2191840 - RNA, 19 nt, Homo sapiens
  misc_RNA (1)...(19): siRNA sense strand
cggguuaccuggaacuaca

SEQ ID NO: 2191841 - RNA, 19 nt, Homo sapiens
  misc_RNA (1)...(19): siRNA sense strand
ggguuugccuggagagauc

SEQ ID NO: 2191842 - RNA, 19 nt, Homo sapiens
  misc_RNA (1)...(19): siRNA sense strand
caccacggccuucgaguug

SEQ ID NO: 2191843 - RNA, 19 nt, Homo sapiens
  misc_RNA (1)...(19): siRNA sense strand
cagaauuggagacuuguug

SEQ ID NO: 2191844 - RNA, 19 nt, Homo sapiens
  misc_RNA (1)...(19): siRNA sense strand
gcccauugacuuugaccua

SEQ ID NO: 2191845 - RNA, 19 nt, Homo sapiens
  misc_RNA (1)...(19): siRNA sense strand
gaugaguacgccuuuguca

SEQ ID NO: 2191846 - RNA, 19 nt, Homo sapiens
  misc_RNA (1)...(19): siRNA sense strand
uguagaaggagaucgcuuu

SEQ ID NO: 2191847 - RNA, 19 nt, Homo sapiens
  misc_RNA (1)...(19): siRNA sense strand
ggacaggaaggugcacaug

SEQ ID NO: 2191848 - RNA, 19 nt, Homo sapiens
  misc_RNA (1)...(19): siRNA sense strand
gacacuacccaucgaggaa

SEQ ID NO: 2191849 - RNA, 19 nt, Homo sapiens
  misc_RNA (1)...(19): siRNA sense strand
gcuggcauccgcaucuuug

SEQ ID NO: 2191850 - RNA, 19 nt, Homo sapiens
  misc_RNA (1)...(19): siRNA sense strand
ggagaauggaccaguugga

SEQ ID NO: 2191851 - RNA, 19 nt, Homo sapiens
  misc_RNA (1)...(19): siRNA sense strand
ggacuuccaggacugaaag

SEQ ID NO: 2191852 - RNA, 19 nt, Homo sapiens
  misc_RNA (1)...(19): siRNA sense strand
cccaggcagugaacagauu

SEQ ID NO: 2191853 - RNA, 19 nt, Homo sapiens
  misc_RNA (1)...(19): siRNA sense strand
caaggagaacgaggugaaa

SEQ ID NO: 2191854 - RNA, 19 nt, Homo sapiens
  misc_RNA (1)...(19): siRNA sense strand
aaagagggcagagauggaa

SEQ ID NO: 2191855 - RNA, 19 nt, Homo sapiens
  misc_RNA (1)...(19): siRNA sense strand
gagcgaggccuggauggau

SEQ ID NO: 2191856 - RNA, 19 nt, Homo sapiens
  misc_RNA (1)...(19): siRNA sense strand
ggaaccuggcuaugcuaaa

SEQ ID NO: 2191857 - RNA, 19 nt, Homo sapiens
  misc_RNA (1)...(19): siRNA sense strand
gggaaccuggcuaugcuaa

SEQ ID NO: 2191858 - RNA, 19 nt, Homo sapiens
  misc_RNA (1)...(19): siRNA sense strand
acccauaggucccaaaggu

SEQ ID NO: 2191859 - RNA, 19 nt, Homo sapiens
  misc_RNA (1)...(19): siRNA sense strand
caaggucuccgagggaaga

SEQ ID NO: 2191860 - RNA, 19 nt, Homo sapiens
  misc_RNA (1)...(19): siRNA sense strand
ggaagaagcuggccgauga

SEQ ID NO: 2191861 - RNA, 19 nt, Homo sapiens
  misc_RNA (1)...(19): siRNA sense strand
gaacacagagucuuuaaua

SEQ ID NO: 2191862 - RNA, 19 nt, Homo sapiens
  misc_RNA (1)...(19): siRNA sense strand
caaggaagccgacgguuua

SEQ ID NO: 2191863 - RNA, 19 nt, Homo sapiens
  misc_RNA (1)...(19): siRNA sense strand
ccagaaacauucaaagauu

SEQ ID NO: 2191864 - RNA, 19 nt, Homo sapiens
  misc_RNA (1)...(19): siRNA sense strand
gaaguggacagucauauaa

SEQ ID NO: 2191865 - RNA, 19 nt, Homo sapiens
  misc_RNA (1)...(19): siRNA sense strand
ggacugccuuuccuguuua

SEQ ID NO: 2191866 - RNA, 19 nt, Homo sapiens
  misc_RNA (1)...(19): siRNA sense strand
gagaaccacuacuacauuu

SEQ ID NO: 2191867 - RNA, 19 nt, Homo sapiens
  misc_RNA (1)...(19): siRNA sense strand
gaggagaacuucaaagaca

SEQ ID NO: 2191868 - RNA, 19 nt, Homo sapiens
  misc_RNA (1)...(19): siRNA sense strand
gcaagugcgugcaggcaua

SEQ ID NO: 2191869 - RNA, 19 nt, Homo sapiens
  misc_RNA (1)...(19): siRNA sense strand
gaaggacgccagcaucaua

SEQ ID NO: 2191870 - RNA, 19 nt, Homo sapiens
  misc_RNA (1)...(19): siRNA sense strand
gaaagucgccauuuggaaa

SEQ ID NO: 2191871 - RNA, 19 nt, Homo sapiens
  misc_RNA (1)...(19): siRNA sense strand
gaaacucaacugccagaua

SEQ ID NO: 2191872 - RNA, 19 nt, Homo sapiens
  misc_RNA (1)...(19): siRNA sense strand
uggaaacacugaagcauaa

SEQ ID NO: 2191873 - RNA, 19 nt, Homo sapiens
  misc_RNA (1)...(19): siRNA sense strand
cagaauaaauggaaugcuu

SEQ ID NO: 2191874 - RNA, 19 nt, Homo sapiens
  misc_RNA (1)...(19): siRNA sense strand
ggaagaccguggagaagga

SEQ ID NO: 2191875 - RNA, 19 nt, Homo sapiens
  misc_RNA (1)...(19): siRNA sense strand
ugaagucgcuccagauugu

SEQ ID NO: 2191876 - RNA, 19 nt, Homo sapiens
  misc_RNA (1)...(19): siRNA sense strand
gcaaggaagccgacgguuu

SEQ ID NO: 2191877 - RNA, 19 nt, Homo sapiens
  misc_RNA (1)...(19): siRNA sense strand
ggagaauacccacuuuaaa

SEQ ID NO: 2191878 - RNA, 19 nt, Homo sapiens
  misc_RNA (1)...(19): siRNA sense strand
gcccagacguuuauucaga

SEQ ID NO: 2191879 - RNA, 19 nt, Homo sapiens
  misc_RNA (1)...(19): siRNA sense strand
uaagaugaguaacgaaaug

SEQ ID NO: 2191880 - RNA, 19 nt, Homo sapiens
  misc_RNA (1)...(19): siRNA sense strand
ggagaaccacuacuacauu

SEQ ID NO: 2191881 - RNA, 19 nt, Homo sapiens
  misc_RNA (1)...(19): siRNA sense strand
gauaagaugaguaacgaaa

SEQ ID NO: 2191882 - RNA, 19 nt, Homo sapiens
  misc_RNA (1)...(19): siRNA sense strand
gcgaagcugucuuuaauac

SEQ ID NO: 2191883 - RNA, 19 nt, Homo sapiens
  misc_RNA (1)...(19): siRNA sense strand
ucaaagauuucuacaacug

SEQ ID NO: 2191884 - RNA, 19 nt, Homo sapiens
  misc_RNA (1)...(19): siRNA sense strand
ccagagguccuguccauuu

SEQ ID NO: 2191885 - RNA, 19 nt, Homo sapiens
  misc_RNA (1)...(19): siRNA sense strand
aaacaaaucgacccagaaa

SEQ ID NO: 2191886 - RNA, 19 nt, Homo sapiens
  misc_RNA (1)...(19): siRNA sense strand
gcauggugcugguguggaa

SEQ ID NO: 2191887 - RNA, 19 nt, Homo sapiens
  misc_RNA (1)...(19): siRNA sense strand
cugaagcccuguaaagauu

SEQ ID NO: 2191888 - RNA, 19 nt, Homo sapiens
  misc_RNA (1)...(19): siRNA sense strand
gcucugagaucaacugcau

SEQ ID NO: 2191889 - RNA, 19 nt, Homo sapiens
  misc_RNA (1)...(19): siRNA sense strand
gcagcgagguuuacaucug

SEQ ID NO: 2191890 - RNA, 19 nt, Homo sapiens
  misc_RNA (1)...(19): siRNA sense strand
gaaacaaaucgacccagaa

SEQ ID NO: 2191891 - RNA, 19 nt, Homo sapiens
  misc_RNA (1)...(19): siRNA sense strand
aaacucaacugccagauac

SEQ ID NO: 2191892 - RNA, 19 nt, Homo sapiens
  misc_RNA (1)...(19): siRNA sense strand
cugcgaagcugucuuuaau

SEQ ID NO: 2191893 - RNA, 19 nt, Homo sapiens
  misc_RNA (1)...(19): siRNA sense strand
ucuccagguuucccuauua

SEQ ID NO: 2191894 - RNA, 19 nt, Homo sapiens
  misc_RNA (1)...(19): siRNA sense strand
ggaagccgacgguuuaguu

SEQ ID NO: 2191895 - RNA, 19 nt, Homo sapiens
  misc_RNA (1)...(19): siRNA sense strand
cggaugcgcuccuugagaa

SEQ ID NO: 2191896 - RNA, 19 nt, Homo sapiens
  misc_RNA (1)...(19): siRNA sense strand
gcuccagugucacggauuu

SEQ ID NO: 2191897 - RNA, 19 nt, Homo sapiens
  misc_RNA (1)...(19): siRNA sense strand
gagaauacccacuuuaaaa

SEQ ID NO: 2191898 - RNA, 19 nt, Homo sapiens
  misc_RNA (1)...(19): siRNA sense strand
gaaggagacggaagcagaa

SEQ ID NO: 2191899 - RNA, 19 nt, Homo sapiens
  misc_RNA (1)...(19): siRNA sense strand
gcagcgcaguucugaaugu

SEQ ID NO: 2191900 - RNA, 19 nt, Homo sapiens
  misc_RNA (1)...(19): siRNA sense strand
gaggaggacagaauaaaug

SEQ ID NO: 2191901 - RNA, 19 nt, Homo sapiens
  misc_RNA (1)...(19): siRNA sense strand
cacagagucuuuaauagug

SEQ ID NO: 2191902 - RNA, 19 nt, Homo sapiens
  misc_RNA (1)...(19): siRNA sense strand
gaugcuggauuucgucaug

SEQ ID NO: 2191903 - RNA, 19 nt, Homo sapiens
  misc_RNA (1)...(19): siRNA sense strand
ucagggauguaaagaauca

SEQ ID NO: 2191904 - RNA, 19 nt, Homo sapiens
  misc_RNA (1)...(19): siRNA sense strand
gaugaguacuguuucuaca

SEQ ID NO: 2191905 - RNA, 19 nt, Homo sapiens
  misc_RNA (1)...(19): siRNA sense strand
caccagcacuccuuuaaag

SEQ ID NO: 2191906 - RNA, 19 nt, Homo sapiens
  misc_RNA (1)...(19): siRNA sense strand
ugaaguggacagucauaua

SEQ ID NO: 2191907 - RNA, 19 nt, Homo sapiens
  misc_RNA (1)...(19): siRNA sense strand
ggaagacuccgucaucuac

SEQ ID NO: 2191908 - RNA, 19 nt, Homo sapiens
  misc_RNA (1)...(19): siRNA sense strand
uaaagaggacagucaaaug

SEQ ID NO: 2191909 - RNA, 19 nt, Homo sapiens
  misc_RNA (1)...(19): siRNA sense strand
ggaaagucgccauuuggaa

SEQ ID NO: 2191910 - RNA, 19 nt, Homo sapiens
  misc_RNA (1)...(19): siRNA sense strand
uaaauggaaugcuucuaag

SEQ ID NO: 2191911 - RNA, 19 nt, Homo sapiens
  misc_RNA (1)...(19): siRNA sense strand
gaggacagaauaaauggaa

SEQ ID NO: 2191912 - RNA, 19 nt, Homo sapiens
  misc_RNA (1)...(19): siRNA sense strand
ggaggaggacagaauaaau

SEQ ID NO: 2191913 - RNA, 19 nt, Homo sapiens
  misc_RNA (1)...(19): siRNA sense strand
ggacugcucugagaucaac

SEQ ID NO: 2191914 - RNA, 19 nt, Homo sapiens
  misc_RNA (1)...(19): siRNA sense strand
ggacagaauaaauggaaug

SEQ ID NO: 2191915 - RNA, 19 nt, Homo sapiens
  misc_RNA (1)...(19): siRNA sense strand
ccacugauuuggugaagag

SEQ ID NO: 2191916 - RNA, 19 nt, Homo sapiens
  misc_RNA (1)...(19): siRNA sense strand
guaaagaggacagucaaau

SEQ ID NO: 2191917 - RNA, 19 nt, Homo sapiens
  misc_RNA (1)...(19): siRNA sense strand
gugcugguguggaauguga

SEQ ID NO: 2191918 - RNA, 19 nt, Homo sapiens
  misc_RNA (1)...(19): siRNA sense strand
ugaguacuguuucuacaau

SEQ ID NO: 2191919 - RNA, 19 nt, Homo sapiens
  misc_RNA (1)...(19): siRNA sense strand
ggagaccgaccguugagaa

SEQ ID NO: 2191920 - RNA, 19 nt, Homo sapiens
  misc_RNA (1)...(19): siRNA sense strand
ggacgccuuugcucagaug

SEQ ID NO: 2191921 - RNA, 19 nt, Homo sapiens
  misc_RNA (1)...(19): siRNA sense strand
acaccuacauguuccauuc

SEQ ID NO: 2191922 - RNA, 19 nt, Homo sapiens
  misc_RNA (1)...(19): siRNA sense strand
cuucagggauguaaagaau

SEQ ID NO: 2191923 - RNA, 19 nt, Homo sapiens
  misc_RNA (1)...(19): siRNA sense strand
cggagaauacccacuuuaa

SEQ ID NO: 2191924 - RNA, 19 nt, Homo sapiens
  misc_RNA (1)...(19): siRNA sense strand
cuacgcugccuccaaguua

SEQ ID NO: 2191925 - RNA, 19 nt, Homo sapiens
  misc_RNA (1)...(19): siRNA sense strand
ccguauacauucaagauuc

SEQ ID NO: 2191926 - RNA, 19 nt, Homo sapiens
  misc_RNA (1)...(19): siRNA sense strand
aauugaagauugaggagaa

SEQ ID NO: 2191927 - RNA, 19 nt, Homo sapiens
  misc_RNA (1)...(19): siRNA sense strand
ggagacaacccuggaaaca

SEQ ID NO: 2191928 - RNA, 19 nt, Homo sapiens
  misc_RNA (1)...(19): siRNA sense strand
caaggagaccgaccguuga

SEQ ID NO: 2191929 - RNA, 19 nt, Homo sapiens
  misc_RNA (1)...(19): siRNA sense strand
ggacagauacgugcugagu

SEQ ID NO: 2191930 - RNA, 19 nt, Homo sapiens
  misc_RNA (1)...(19): siRNA sense strand
agacaacccuggaaacacu

SEQ ID NO: 2191931 - RNA, 19 nt, Homo sapiens
  misc_RNA (1)...(19): siRNA sense strand
gaugugggcugggaagaag

SEQ ID NO: 2191932 - RNA, 19 nt, Homo sapiens
  misc_RNA (1)...(19): siRNA sense strand
cagaguggcguccaagaaa

SEQ ID NO: 2191933 - RNA, 19 nt, Homo sapiens
  misc_RNA (1)...(19): siRNA sense strand
gaaccacuacuacauuucu

SEQ ID NO: 2191934 - RNA, 19 nt, Homo sapiens
  misc_RNA (1)...(19): siRNA sense strand
aaacagacauacggaucuu

SEQ ID NO: 2191935 - RNA, 19 nt, Homo sapiens
  misc_RNA (1)...(19): siRNA sense strand
acaaaucgacccagaaaca

SEQ ID NO: 2191936 - RNA, 19 nt, Homo sapiens
  misc_RNA (1)...(19): siRNA sense strand
aaacaucuuucugcucuuc

SEQ ID NO: 2191937 - RNA, 19 nt, Homo sapiens
  misc_RNA (1)...(19): siRNA sense strand
ggagauuuccaccuucaga

SEQ ID NO: 2191938 - RNA, 19 nt, Homo sapiens
  misc_RNA (1)...(19): siRNA sense strand
ccagcuccgucaagacaaa

SEQ ID NO: 2191939 - RNA, 19 nt, Homo sapiens
  misc_RNA (1)...(19): siRNA sense strand
ucagcgagauccuggacaa

SEQ ID NO: 2191940 - RNA, 19 nt, Homo sapiens
  misc_RNA (1)...(19): siRNA sense strand
gaggacugcucugagauca

SEQ ID NO: 2191941 - RNA, 19 nt, Homo sapiens
  misc_RNA (1)...(19): siRNA sense strand
ugauggaacaccuggauaa

SEQ ID NO: 2191942 - RNA, 19 nt, Homo sapiens
  misc_RNA (1)...(19): siRNA sense strand
cuacagauccugacaugca

SEQ ID NO: 2191943 - RNA, 19 nt, Homo sapiens
  misc_RNA (1)...(19): siRNA sense strand
agucagggaucgugaagga

SEQ ID NO: 2191944 - RNA, 19 nt, Homo sapiens
  misc_RNA (1)...(19): siRNA sense strand
gaucuuucccacugauuug

SEQ ID NO: 2191945 - RNA, 19 nt, Homo sapiens
  misc_RNA (1)...(19): siRNA sense strand
ugaacgcccucuuggacuu

SEQ ID NO: 2191946 - RNA, 19 nt, Homo sapiens
  misc_RNA (1)...(19): siRNA sense strand
ggaaugcuucuaaguccaa

SEQ ID NO: 2191947 - RNA, 19 nt, Homo sapiens
  misc_RNA (1)...(19): siRNA sense strand
acacagagucuuuaauagu

SEQ ID NO: 2191948 - RNA, 19 nt, Homo sapiens
  misc_RNA (1)...(19): siRNA sense strand
gcugcgaagcugucuuuaa

SEQ ID NO: 2191949 - RNA, 19 nt, Homo sapiens
  misc_RNA (1)...(19): siRNA sense strand
gcaggacgcagcgagguuu

SEQ ID NO: 2191950 - RNA, 19 nt, Homo sapiens
  misc_RNA (1)...(19): siRNA sense strand
gcaaggugaccguguucaa

SEQ ID NO: 2191951 - RNA, 19 nt, Homo sapiens
  misc_RNA (1)...(19): siRNA sense strand
gauggaacaccuggauaaa

SEQ ID NO: 2191952 - RNA, 19 nt, Homo sapiens
  misc_RNA (1)...(19): siRNA sense strand
ggaucuuucccacugauuu

SEQ ID NO: 2191953 - RNA, 19 nt, Homo sapiens
  misc_RNA (1)...(19): siRNA sense strand
gagcgaggccaugugcuuu

SEQ ID NO: 2191954 - RNA, 19 nt, Homo sapiens
  misc_RNA (1)...(19): siRNA sense strand
cauucaagauucccgaaau

SEQ ID NO: 2191955 - RNA, 19 nt, Homo sapiens
  misc_RNA (1)...(19): siRNA sense strand
cagcagcgcaguucugaau

SEQ ID NO: 2191956 - RNA, 19 nt, Homo sapiens
  misc_RNA (1)...(19): siRNA sense strand
acagagucuuuaauaguga

SEQ ID NO: 2191957 - RNA, 19 nt, Homo sapiens
  misc_RNA (1)...(19): siRNA sense strand
cuucauggccuaccuguau

SEQ ID NO: 2191958 - RNA, 19 nt, Homo sapiens
  misc_RNA (1)...(19): siRNA sense strand
ccacaaggacccucacuac

SEQ ID NO: 2191959 - RNA, 19 nt, Homo sapiens
  misc_RNA (1)...(19): siRNA sense strand
gagguggccugacguccau

SEQ ID NO: 2191960 - RNA, 19 nt, Homo sapiens
  misc_RNA (1)...(19): siRNA sense strand
gacgagaccuugcuggaua

SEQ ID NO: 2191961 - RNA, 19 nt, Homo sapiens
  misc_RNA (1)...(19): siRNA sense strand
gauaaucacuugaaugaag

SEQ ID NO: 2191962 - RNA, 19 nt, Homo sapiens
  misc_RNA (1)...(19): siRNA sense strand
ccacugaggucaaaucaau

SEQ ID NO: 2191963 - RNA, 19 nt, Homo sapiens
  misc_RNA (1)...(19): siRNA sense strand
ggacauggcccucaacauc

SEQ ID NO: 2191964 - RNA, 19 nt, Homo sapiens
  misc_RNA (1)...(19): siRNA sense strand
ccacauuccuggugaucua

SEQ ID NO: 2191965 - RNA, 19 nt, Homo sapiens
  misc_RNA (1)...(19): siRNA sense strand
ucaaaucaauggagucuuc

SEQ ID NO: 2191966 - RNA, 19 nt, Homo sapiens
  misc_RNA (1)...(19): siRNA sense strand
ucaauggagucuucagaaa

SEQ ID NO: 2191967 - RNA, 19 nt, Homo sapiens
  misc_RNA (1)...(19): siRNA sense strand
agaaguacuuggacaacua

SEQ ID NO: 2191968 - RNA, 19 nt, Homo sapiens
  misc_RNA (1)...(19): siRNA sense strand
ucacuugaaugaagcuaaa

SEQ ID NO: 2191969 - RNA, 19 nt, Homo sapiens
  misc_RNA (1)...(19): siRNA sense strand
caggugcucuucuucuuug

SEQ ID NO: 2191970 - RNA, 19 nt, Homo sapiens
  misc_RNA (1)...(19): siRNA sense strand
agaccuugcuggauaauca

SEQ ID NO: 2191971 - RNA, 19 nt, Homo sapiens
  misc_RNA (1)...(19): siRNA sense strand
uggauaaucacuugaauga

SEQ ID NO: 2191972 - RNA, 19 nt, Homo sapiens
  misc_RNA (1)...(19): siRNA sense strand
gaacuccaagcgaggguuu

SEQ ID NO: 2191973 - RNA, 19 nt, Homo sapiens
  misc_RNA (1)...(19): siRNA sense strand
caagcgaggguuuggcaua

SEQ ID NO: 2191974 - RNA, 19 nt, Homo sapiens
  misc_RNA (1)...(19): siRNA sense strand
gcuggggccuggucauuua

SEQ ID NO: 2191975 - RNA, 19 nt, Homo sapiens
  misc_RNA (1)...(19): siRNA sense strand
ggacaucaugcgcagcaaa

SEQ ID NO: 2191976 - RNA, 19 nt, Homo sapiens
  misc_RNA (1)...(19): siRNA sense strand
gaaccaggugcucuucuuc

SEQ ID NO: 2191977 - RNA, 19 nt, Homo sapiens
  misc_RNA (1)...(19): siRNA sense strand
accaugacaucaagcagua

SEQ ID NO: 2191978 - RNA, 19 nt, Homo sapiens
  misc_RNA (1)...(19): siRNA sense strand
caucuucacaccucucauu

SEQ ID NO: 2191979 - RNA, 19 nt, Homo sapiens
  misc_RNA (1)...(19): siRNA sense strand
ccaguaccaugacaucaag

SEQ ID NO: 2191980 - RNA, 19 nt, Homo sapiens
  misc_RNA (1)...(19): siRNA sense strand
caacauccacgccuucucu

SEQ ID NO: 2191981 - RNA, 19 nt, Homo sapiens
  misc_RNA (1)...(19): siRNA sense strand
ccacuggugcuauuuguuc

SEQ ID NO: 2191982 - RNA, 19 nt, Homo sapiens
  misc_RNA (1)...(19): siRNA sense strand
gcgaggguuuggcauagau

SEQ ID NO: 2191983 - RNA, 19 nt, Homo sapiens
  misc_RNA (1)...(19): siRNA sense strand
ccagcaccuucuccuacua

SEQ ID NO: 2191984 - RNA, 19 nt, Homo sapiens
  misc_RNA (1)...(19): siRNA sense strand
ucaaggaagccgccaagga

SEQ ID NO: 2191985 - RNA, 19 nt, Homo sapiens
  misc_RNA (1)...(19): siRNA sense strand
gagcagaaaggccugucuu

SEQ ID NO: 2191986 - RNA, 19 nt, Homo sapiens
  misc_RNA (1)...(19): siRNA sense strand
ugaguccacugaggucaaa

SEQ ID NO: 2191987 - RNA, 19 nt, Homo sapiens
  misc_RNA (1)...(19): siRNA sense strand
gcuggauaaucacuugaau

SEQ ID NO: 2191988 - RNA, 19 nt, Homo sapiens
  misc_RNA (1)...(19): siRNA sense strand
guucuacaccgacuucaug

SEQ ID NO: 2191989 - RNA, 19 nt, Homo sapiens
  misc_RNA (1)...(19): siRNA sense strand
ccaggugcucuucuucuuu

SEQ ID NO: 2191990 - RNA, 19 nt, Homo sapiens
  misc_RNA (1)...(19): siRNA sense strand
ggacgagaccuugcuggau

SEQ ID NO: 2191991 - RNA, 19 nt, Homo sapiens
  misc_RNA (1)...(19): siRNA sense strand
caucgagcccuccaucuuc

SEQ ID NO: 2191992 - RNA, 19 nt, Homo sapiens
  misc_RNA (1)...(19): siRNA sense strand
ugagcgaccuguacgacau

SEQ ID NO: 2191993 - RNA, 19 nt, Homo sapiens
  misc_RNA (1)...(19): siRNA sense strand
gggcugucccguccaaaga

SEQ ID NO: 2191994 - RNA, 19 nt, Homo sapiens
  misc_RNA (1)...(19): siRNA sense strand
ccaaggaggagcagaaagg

SEQ ID NO: 2191995 - RNA, 19 nt, Homo sapiens
  misc_RNA (1)...(19): siRNA sense strand
gcaucgacgaggagcagua

SEQ ID NO: 2191996 - RNA, 19 nt, Homo sapiens
  misc_RNA (1)...(19): siRNA sense strand
caauggagucuucagaaag

SEQ ID NO: 2191997 - RNA, 19 nt, Homo sapiens
  misc_RNA (1)...(19): siRNA sense strand
acgagaccuugcuggauaa

SEQ ID NO: 2191998 - RNA, 19 nt, Homo sapiens
  misc_RNA (1)...(19): siRNA sense strand
aauggagucuucagaaagg

SEQ ID NO: 2191999 - RNA, 19 nt, Homo sapiens
  misc_RNA (1)...(19): siRNA sense strand
gccaguaccaugacaucaa

SEQ ID NO: 2192000 - RNA, 19 nt, Homo sapiens
  misc_RNA (1)...(19): siRNA sense strand
gcccauccgugccuaucug

SEQ ID NO: 2192001 - RNA, 19 nt, Homo sapiens
  misc_RNA (1)...(19): siRNA sense strand
ccaugagcaucuccuacug

SEQ ID NO: 2192002 - RNA, 19 nt, Homo sapiens
  misc_RNA (1)...(19): siRNA sense strand
gaaguacuuggacaacuac

SEQ ID NO: 2192003 - RNA, 19 nt, Homo sapiens
  misc_RNA (1)...(19): siRNA sense strand
gcguugcacuuuuccuuaa

SEQ ID NO: 2192004 - RNA, 19 nt, Homo sapiens
  misc_RNA (1)...(19): siRNA sense strand
cagccgugauggccauguu

SEQ ID NO: 2192005 - RNA, 19 nt, Homo sapiens
  misc_RNA (1)...(19): siRNA sense strand
ucagggcugucccguccaa

SEQ ID NO: 2192006 - RNA, 19 nt, Homo sapiens
  misc_RNA (1)...(19): siRNA sense strand
ggauaaucacuugaaugaa

SEQ ID NO: 2192007 - RNA, 19 nt, Homo sapiens
  misc_RNA (1)...(19): siRNA sense strand
ugucagaggaggccaagga

SEQ ID NO: 2192008 - RNA, 19 nt, Homo sapiens
  misc_RNA (1)...(19): siRNA sense strand
gaagcuaaagucccaaacg

SEQ ID NO: 2192009 - RNA, 19 nt, Homo sapiens
  misc_RNA (1)...(19): siRNA sense strand
acuacagccucaccugguu

SEQ ID NO: 2192010 - RNA, 19 nt, Homo sapiens
  misc_RNA (1)...(19): siRNA sense strand
cagaaguacuuggacaacu

SEQ ID NO: 2192011 - RNA, 19 nt, Homo sapiens
  misc_RNA (1)...(19): siRNA sense strand
uaaagucccaaacggaagu

SEQ ID NO: 2192012 - RNA, 19 nt, Homo sapiens
  misc_RNA (1)...(19): siRNA sense strand
uauuuguucagcccuguua

SEQ ID NO: 2192013 - RNA, 19 nt, Homo sapiens
  misc_RNA (1)...(19): siRNA sense strand
cauccuguccugccaagug

SEQ ID NO: 2192014 - RNA, 19 nt, Homo sapiens
  misc_RNA (1)...(19): siRNA sense strand
aagcgaggguuuggcauag

SEQ ID NO: 2192015 - RNA, 19 nt, Homo sapiens
  misc_RNA (1)...(19): siRNA sense strand
ggucaaaucaauggagucu

SEQ ID NO: 2192016 - RNA, 19 nt, Homo sapiens
  misc_RNA (1)...(19): siRNA sense strand
gaggguuuggcauagauug

SEQ ID NO: 2192017 - RNA, 19 nt, Homo sapiens
  misc_RNA (1)...(19): siRNA sense strand
gcagcaugagcgaccugua

SEQ ID NO: 2192018 - RNA, 19 nt, Homo sapiens
  misc_RNA (1)...(19): siRNA sense strand
ccaacgccguggugcugau

SEQ ID NO: 2192019 - RNA, 19 nt, Homo sapiens
  misc_RNA (1)...(19): siRNA sense strand
ggccaaggaggagcagaaa

SEQ ID NO: 2192020 - RNA, 19 nt, Homo sapiens
  misc_RNA (1)...(19): siRNA sense strand
gcggaauucuccacgaguu

SEQ ID NO: 2192021 - RNA, 19 nt, Homo sapiens
  misc_RNA (1)...(19): siRNA sense strand
cgacgucccuccugaagag

SEQ ID NO: 2192022 - RNA, 19 nt, Homo sapiens
  misc_RNA (1)...(19): siRNA sense strand
agaagaggcugcggcugua

SEQ ID NO: 2192023 - RNA, 19 nt, Homo sapiens
  misc_RNA (1)...(19): siRNA sense strand
agaagaggcugcggcuguu

SEQ ID NO: 2192024 - RNA, 19 nt, Homo sapiens
  misc_RNA (1)...(19): siRNA sense strand
gaagaggcugcggcuguug

SEQ ID NO: 2192025 - RNA, 19 nt, Homo sapiens
  misc_RNA (1)...(19): siRNA sense strand
gcagaggagcggaauucuc

SEQ ID NO: 2192026 - RNA, 19 nt, Homo sapiens
  misc_RNA (1)...(19): siRNA sense strand
ccaaaucauggaagacaca

SEQ ID NO: 2192027 - RNA, 19 nt, Homo sapiens
  misc_RNA (1)...(19): siRNA sense strand
cggcagaggagcggaauuc

SEQ ID NO: 2192028 - RNA, 19 nt, Homo sapiens
  misc_RNA (1)...(19): siRNA sense strand
aaagaaaucucuccaguua

SEQ ID NO: 2192029 - RNA, 19 nt, Homo sapiens
  misc_RNA (1)...(19): siRNA sense strand
ggagaacucuggcugguua

SEQ ID NO: 2192030 - RNA, 19 nt, Homo sapiens
  misc_RNA (1)...(19): siRNA sense strand
agacauacuugcuuuguua

SEQ ID NO: 2192031 - RNA, 19 nt, Homo sapiens
  misc_RNA (1)...(19): siRNA sense strand
ggaagaaacucagcagcua

SEQ ID NO: 2192032 - RNA, 19 nt, Homo sapiens
  misc_RNA (1)...(19): siRNA sense strand
gcaggaaucuucauugcaa

SEQ ID NO: 2192033 - RNA, 19 nt, Homo sapiens
  misc_RNA (1)...(19): siRNA sense strand
gacagucaguuacagauua

SEQ ID NO: 2192034 - RNA, 19 nt, Homo sapiens
  misc_RNA (1)...(19): siRNA sense strand
agaaaucucuccaguuauu

SEQ ID NO: 2192035 - RNA, 19 nt, Homo sapiens
  misc_RNA (1)...(19): siRNA sense strand
gacgagaacucaagauuca

SEQ ID NO: 2192036 - RNA, 19 nt, Homo sapiens
  misc_RNA (1)...(19): siRNA sense strand
gaaaggcuaugagaaugaa

SEQ ID NO: 2192037 - RNA, 19 nt, Homo sapiens
  misc_RNA (1)...(19): siRNA sense strand
gaacucaagauucaagaaa

SEQ ID NO: 2192038 - RNA, 19 nt, Homo sapiens
  misc_RNA (1)...(19): siRNA sense strand
gcaguuaauggaacaauuu

SEQ ID NO: 2192039 - RNA, 19 nt, Homo sapiens
  misc_RNA (1)...(19): siRNA sense strand
ggaugggccucccuaauca

SEQ ID NO: 2192040 - RNA, 19 nt, Homo sapiens
  misc_RNA (1)...(19): siRNA sense strand
gauuuccuguccuuucuua

SEQ ID NO: 2192041 - RNA, 19 nt, Homo sapiens
  misc_RNA (1)...(19): siRNA sense strand
ggccuaaacuuaaugcaau

SEQ ID NO: 2192042 - RNA, 19 nt, Homo sapiens
  misc_RNA (1)...(19): siRNA sense strand
gcugaucgaucuuagugaa

SEQ ID NO: 2192043 - RNA, 19 nt, Homo sapiens
  misc_RNA (1)...(19): siRNA sense strand
cauaauggaugcaggaauc

SEQ ID NO: 2192044 - RNA, 19 nt, Homo sapiens
  misc_RNA (1)...(19): siRNA sense strand
ggaaaggcuaugagaauga

SEQ ID NO: 2192045 - RNA, 19 nt, Homo sapiens
  misc_RNA (1)...(19): siRNA sense strand
gaaagccaauccaggaagu

SEQ ID NO: 2192046 - RNA, 19 nt, Homo sapiens
  misc_RNA (1)...(19): siRNA sense strand
gggaaaggcuaugagaaug

SEQ ID NO: 2192047 - RNA, 19 nt, Homo sapiens
  misc_RNA (1)...(19): siRNA sense strand
gcucagcgaugugaauaga

SEQ ID NO: 2192048 - RNA, 19 nt, Homo sapiens
  misc_RNA (1)...(19): siRNA sense strand
ugacuucguuuaugucguu

SEQ ID NO: 2192049 - RNA, 19 nt, Homo sapiens
  misc_RNA (1)...(19): siRNA sense strand
gcagcuagaggaagaacua

SEQ ID NO: 2192050 - RNA, 19 nt, Homo sapiens
  misc_RNA (1)...(19): siRNA sense strand
ucaccgauauggcaaucua

SEQ ID NO: 2192051 - RNA, 19 nt, Homo sapiens
  misc_RNA (1)...(19): siRNA sense strand
agugaaauaugaggaguua

SEQ ID NO: 2192052 - RNA, 19 nt, Homo sapiens
  misc_RNA (1)...(19): siRNA sense strand
gaggaacagucugcagaaa

SEQ ID NO: 2192053 - RNA, 19 nt, Homo sapiens
  misc_RNA (1)...(19): siRNA sense strand
gagacgagaacucaagauu

SEQ ID NO: 2192054 - RNA, 19 nt, Homo sapiens
  misc_RNA (1)...(19): siRNA sense strand
cuaccugaauccucuguuu

SEQ ID NO: 2192055 - RNA, 19 nt, Homo sapiens
  misc_RNA (1)...(19): siRNA sense strand
gggcucaccuguggaagaa

SEQ ID NO: 2192056 - RNA, 19 nt, Homo sapiens
  misc_RNA (1)...(19): siRNA sense strand
ggauuuccuuuggucauaa

SEQ ID NO: 2192057 - RNA, 19 nt, Homo sapiens
  misc_RNA (1)...(19): siRNA sense strand
agaagguacugccaaguug

SEQ ID NO: 2192058 - RNA, 19 nt, Homo sapiens
  misc_RNA (1)...(19): siRNA sense strand
ggaacagucugcagaaaau

SEQ ID NO: 2192059 - RNA, 19 nt, Homo sapiens
  misc_RNA (1)...(19): siRNA sense strand
gaagguacugccaaguuga

SEQ ID NO: 2192060 - RNA, 19 nt, Homo sapiens
  misc_RNA (1)...(19): siRNA sense strand
ucagcgaugugaauagaga

SEQ ID NO: 2192061 - RNA, 19 nt, Homo sapiens
  misc_RNA (1)...(19): siRNA sense strand
ggacuggauuuccuuuggu

SEQ ID NO: 2192062 - RNA, 19 nt, Homo sapiens
  misc_RNA (1)...(19): siRNA sense strand
ggccacggcacacaucaua

SEQ ID NO: 2192063 - RNA, 19 nt, Homo sapiens
  misc_RNA (1)...(19): siRNA sense strand
uuucugugcuuauuucuug

SEQ ID NO: 2192064 - RNA, 19 nt, Homo sapiens
  misc_RNA (1)...(19): siRNA sense strand
gaguguguuuggcaguuaa

SEQ ID NO: 2192065 - RNA, 19 nt, Homo sapiens
  misc_RNA (1)...(19): siRNA sense strand
gagaugucccuguguucua

SEQ ID NO: 2192066 - RNA, 19 nt, Homo sapiens
  misc_RNA (1)...(19): siRNA sense strand
gcuaugagaaugaagacaa

SEQ ID NO: 2192067 - RNA, 19 nt, Homo sapiens
  misc_RNA (1)...(19): siRNA sense strand
gcagggaaaggcuaugaga

SEQ ID NO: 2192068 - RNA, 19 nt, Homo sapiens
  misc_RNA (1)...(19): siRNA sense strand
ggcaguuaauggaacaauu

SEQ ID NO: 2192069 - RNA, 19 nt, Homo sapiens
  misc_RNA (1)...(19): siRNA sense strand
uaauggcagugaaggaaga

SEQ ID NO: 2192070 - RNA, 19 nt, Homo sapiens
  misc_RNA (1)...(19): siRNA sense strand
caauuucccugugccuuug

SEQ ID NO: 2192071 - RNA, 19 nt, Homo sapiens
  misc_RNA (1)...(19): siRNA sense strand
ugaguguguuuggcaguua

SEQ ID NO: 2192072 - RNA, 19 nt, Homo sapiens
  misc_RNA (1)...(19): siRNA sense strand
gaauguauaaccgcuuuga

SEQ ID NO: 2192073 - RNA, 19 nt, Homo sapiens
  misc_RNA (1)...(19): siRNA sense strand
uggaauguauaaccgcuuu

SEQ ID NO: 2192074 - RNA, 19 nt, Homo sapiens
  misc_RNA (1)...(19): siRNA sense strand
uaaagaagaaagagagcaa

SEQ ID NO: 2192075 - RNA, 19 nt, Homo sapiens
  misc_RNA (1)...(19): siRNA sense strand
gcucaccuguggaagaauc

SEQ ID NO: 2192076 - RNA, 19 nt, Homo sapiens
  misc_RNA (1)...(19): siRNA sense strand
gaaauaugaggaguuauac

SEQ ID NO: 2192077 - RNA, 19 nt, Homo sapiens
  misc_RNA (1)...(19): siRNA sense strand
caagaaagaacauacucau

SEQ ID NO: 2192078 - RNA, 19 nt, Homo sapiens
  misc_RNA (1)...(19): siRNA sense strand
acucaagauucaagaaaga

SEQ ID NO: 2192079 - RNA, 19 nt, Homo sapiens
  misc_RNA (1)...(19): siRNA sense strand
ggagagacgagaacucaag

SEQ ID NO: 2192080 - RNA, 19 nt, Homo sapiens
  misc_RNA (1)...(19): siRNA sense strand
caugcuggauaaagaagaa

SEQ ID NO: 2192081 - RNA, 19 nt, Homo sapiens
  misc_RNA (1)...(19): siRNA sense strand
ugaguucaaugagagguuu

SEQ ID NO: 2192082 - RNA, 19 nt, Homo sapiens
  misc_RNA (1)...(19): siRNA sense strand
gcgauuuccuguccuuucu

SEQ ID NO: 2192083 - RNA, 19 nt, Homo sapiens
  misc_RNA (1)...(19): siRNA sense strand
agaugucccuguguucuaa

SEQ ID NO: 2192084 - RNA, 19 nt, Homo sapiens
  misc_RNA (1)...(19): siRNA sense strand
uggauuuccuuuggucaua

SEQ ID NO: 2192085 - RNA, 19 nt, Homo sapiens
  misc_RNA (1)...(19): siRNA sense strand
cauacuugcuuuguuaauc

SEQ ID NO: 2192086 - RNA, 19 nt, Homo sapiens
  misc_RNA (1)...(19): siRNA sense strand
guuauugaccaguucauug

SEQ ID NO: 2192087 - RNA, 19 nt, Homo sapiens
  misc_RNA (1)...(19): siRNA sense strand
uagaggcccuggaagaagu

SEQ ID NO: 2192088 - RNA, 19 nt, Homo sapiens
  misc_RNA (1)...(19): siRNA sense strand
cagaugcuccaggccauua

SEQ ID NO: 2192089 - RNA, 19 nt, Homo sapiens
  misc_RNA (1)...(19): siRNA sense strand
gggcuucaugguauuaauu

SEQ ID NO: 2192090 - RNA, 19 nt, Homo sapiens
  misc_RNA (1)...(19): siRNA sense strand
gcugggugcugaucgaucu

SEQ ID NO: 2192091 - RNA, 19 nt, Homo sapiens
  misc_RNA (1)...(19): siRNA sense strand
gaugcaggaaucuucauug

SEQ ID NO: 2192092 - RNA, 19 nt, Homo sapiens
  misc_RNA (1)...(19): siRNA sense strand
cgacagucaguuacagauu

SEQ ID NO: 2192093 - RNA, 19 nt, Homo sapiens
  misc_RNA (1)...(19): siRNA sense strand
uaccugaauccucuguuua

SEQ ID NO: 2192094 - RNA, 19 nt, Homo sapiens
  misc_RNA (1)...(19): siRNA sense strand
gagagacgagaacucaaga

SEQ ID NO: 2192095 - RNA, 19 nt, Homo sapiens
  misc_RNA (1)...(19): siRNA sense strand
gaaaucucuccaguuauug

SEQ ID NO: 2192096 - RNA, 19 nt, Homo sapiens
  misc_RNA (1)...(19): siRNA sense strand
ggaugcaggaaucuucauu

SEQ ID NO: 2192097 - RNA, 19 nt, Homo sapiens
  misc_RNA (1)...(19): siRNA sense strand
gaaacuuccuauguaacag

SEQ ID NO: 2192098 - RNA, 19 nt, Homo sapiens
  misc_RNA (1)...(19): siRNA sense strand
acaauuucccugugccuuu

SEQ ID NO: 2192099 - RNA, 19 nt, Homo sapiens
  misc_RNA (1)...(19): siRNA sense strand
cuuguucacuguucugaug

SEQ ID NO: 2192100 - RNA, 19 nt, Homo sapiens
  misc_RNA (1)...(19): siRNA sense strand
cagcucagcgaugugaaua

SEQ ID NO: 2192101 - RNA, 19 nt, Homo sapiens
  misc_RNA (1)...(19): siRNA sense strand
ucacauucaacaucacauu

SEQ ID NO: 2192102 - RNA, 19 nt, Homo sapiens
  misc_RNA (1)...(19): siRNA sense strand
caggaaucuucauugcaaa

SEQ ID NO: 2192103 - RNA, 19 nt, Homo sapiens
  misc_RNA (1)...(19): siRNA sense strand
cuaugagaaugaagacaau

SEQ ID NO: 2192104 - RNA, 19 nt, Homo sapiens
  misc_RNA (1)...(19): siRNA sense strand
aaaucgugcugcagggaaa

SEQ ID NO: 2192105 - RNA, 19 nt, Homo sapiens
  misc_RNA (1)...(19): siRNA sense strand
uuaaugcaauggcaaaucg

SEQ ID NO: 2192106 - RNA, 19 nt, Homo sapiens
  misc_RNA (1)...(19): siRNA sense strand
guacugccaaguugaguuc

SEQ ID NO: 2192107 - RNA, 19 nt, Homo sapiens
  misc_RNA (1)...(19): siRNA sense strand
gcuccaggccauuaggaaa

SEQ ID NO: 2192108 - RNA, 19 nt, Homo sapiens
  misc_RNA (1)...(19): siRNA sense strand
gucugugacucuuauccua

SEQ ID NO: 2192109 - RNA, 19 nt, Homo sapiens
  misc_RNA (1)...(19): siRNA sense strand
cggaguagacggcgauuuc

SEQ ID NO: 2192110 - RNA, 19 nt, Homo sapiens
  misc_RNA (1)...(19): siRNA sense strand
gacauacuugcuuuguuaa

SEQ ID NO: 2192111 - RNA, 19 nt, Homo sapiens
  misc_RNA (1)...(19): siRNA sense strand
ucaguuacagauuaccuaa

SEQ ID NO: 2192112 - RNA, 19 nt, Homo sapiens
  misc_RNA (1)...(19): siRNA sense strand
acaacaccauguaacuuca

SEQ ID NO: 2192113 - RNA, 19 nt, Homo sapiens
  misc_RNA (1)...(19): siRNA sense strand
caacaucacauuuauuccu

SEQ ID NO: 2192114 - RNA, 19 nt, Homo sapiens
  misc_RNA (1)...(19): siRNA sense strand
cgauauggcaaucuagaug

SEQ ID NO: 2192115 - RNA, 19 nt, Homo sapiens
  misc_RNA (1)...(19): siRNA sense strand
aagaagguacugccaaguu

SEQ ID NO: 2192116 - RNA, 19 nt, Homo sapiens
  misc_RNA (1)...(19): siRNA sense strand
gccuaaacuuaaugcaaug

SEQ ID NO: 2192117 - RNA, 19 nt, Homo sapiens
  misc_RNA (1)...(19): siRNA sense strand
aagacauacuugcuuuguu

SEQ ID NO: 2192118 - RNA, 19 nt, Homo sapiens
  misc_RNA (1)...(19): siRNA sense strand
cggaugggccucccuaauc

SEQ ID NO: 2192119 - RNA, 19 nt, Homo sapiens
  misc_RNA (1)...(19): siRNA sense strand
uaagacauacuugcuuugu

SEQ ID NO: 2192120 - RNA, 19 nt, Homo sapiens
  misc_RNA (1)...(19): siRNA sense strand
guaagacauacuugcuuug

SEQ ID NO: 2192121 - RNA, 19 nt, Homo sapiens
  misc_RNA (1)...(19): siRNA sense strand
ucaagaaagaacauacuca

SEQ ID NO: 2192122 - RNA, 19 nt, Homo sapiens
  misc_RNA (1)...(19): siRNA sense strand
cacauucaacaucacauuu

SEQ ID NO: 2192123 - RNA, 19 nt, Homo sapiens
  misc_RNA (1)...(19): siRNA sense strand
uuauugaccaguucauuga

SEQ ID NO: 2192124 - RNA, 19 nt, Homo sapiens
  misc_RNA (1)...(19): siRNA sense strand
uuccuuuggucauaaguuu

SEQ ID NO: 2192125 - RNA, 19 nt, Homo sapiens
  misc_RNA (1)...(19): siRNA sense strand
gauaaccacgccuccaucu

SEQ ID NO: 2192126 - RNA, 19 nt, Homo sapiens
  misc_RNA (1)...(19): siRNA sense strand
gcuucaugguauuaauuga

SEQ ID NO: 2192127 - RNA, 19 nt, Homo sapiens
  misc_RNA (1)...(19): siRNA sense strand
ggaguuauacugcuuuuca

SEQ ID NO: 2192128 - RNA, 19 nt, Homo sapiens
  misc_RNA (1)...(19): siRNA sense strand
gcauggaacuauauaauca

SEQ ID NO: 2192129 - RNA, 19 nt, Homo sapiens
  misc_RNA (1)...(19): siRNA sense strand
caacaugggcugagacuug

SEQ ID NO: 2192130 - RNA, 19 nt, Homo sapiens
  misc_RNA (1)...(19): siRNA sense strand
cagcagagauaccaagaug

SEQ ID NO: 2192131 - RNA, 19 nt, Homo sapiens
  misc_RNA (1)...(19): siRNA sense strand
gcaacaacaugggcugaga

SEQ ID NO: 2192132 - RNA, 19 nt, Homo sapiens
  misc_RNA (1)...(19): siRNA sense strand
cgaauagcuucucuuccua

SEQ ID NO: 2192133 - RNA, 19 nt, Homo sapiens
  misc_RNA (1)...(19): siRNA sense strand
gccagugcauggaacuaua

SEQ ID NO: 2192134 - RNA, 19 nt, Homo sapiens
  misc_RNA (1)...(19): siRNA sense strand
uagccuuccucuuuauaua

SEQ ID NO: 2192135 - RNA, 19 nt, Homo sapiens
  misc_RNA (1)...(19): siRNA sense strand
gaagaaaacacacggcuuu

SEQ ID NO: 2192136 - RNA, 19 nt, Homo sapiens
  misc_RNA (1)...(19): siRNA sense strand
uuuguagccuuccucuuua

SEQ ID NO: 2192137 - RNA, 19 nt, Homo sapiens
  misc_RNA (1)...(19): siRNA sense strand
gcagagauaccaagaugag

SEQ ID NO: 2192138 - RNA, 19 nt, Homo sapiens
  misc_RNA (1)...(19): siRNA sense strand
uacaaacucauucggcuua

SEQ ID NO: 2192139 - RNA, 19 nt, Homo sapiens
  misc_RNA (1)...(19): siRNA sense strand
ccgaauagcuucucuuccu

SEQ ID NO: 2192140 - RNA, 19 nt, Homo sapiens
  misc_RNA (1)...(19): siRNA sense strand
ccuguagugucauuuguga

SEQ ID NO: 2192141 - RNA, 19 nt, Homo sapiens
  misc_RNA (1)...(19): siRNA sense strand
cacauuggauacaaacuca

SEQ ID NO: 2192142 - RNA, 19 nt, Homo sapiens
  misc_RNA (1)...(19): siRNA sense strand
aagaugagguugaagaaaa

SEQ ID NO: 2192143 - RNA, 19 nt, Homo sapiens
  misc_RNA (1)...(19): siRNA sense strand
caaugaggauggcaacaac

SEQ ID NO: 2192144 - RNA, 19 nt, Homo sapiens
  misc_RNA (1)...(19): siRNA sense strand
gcacauuggauacaaacuc

SEQ ID NO: 2192145 - RNA, 19 nt, Homo sapiens
  misc_RNA (1)...(19): siRNA sense strand
gagauaccaagaugagguu

SEQ ID NO: 2192146 - RNA, 19 nt, Homo sapiens
  misc_RNA (1)...(19): siRNA sense strand
caagaugagguugaagaaa

SEQ ID NO: 2192147 - RNA, 19 nt, Homo sapiens
  misc_RNA (1)...(19): siRNA sense strand
ccaagaugagguugaagaa

SEQ ID NO: 2192148 - RNA, 19 nt, Homo sapiens
  misc_RNA (1)...(19): siRNA sense strand
gugcauggaacuauauaau

SEQ ID NO: 2192149 - RNA, 19 nt, Homo sapiens
  misc_RNA (1)...(19): siRNA sense strand
uagcuucucuuccuauucg

SEQ ID NO: 2192150 - RNA, 19 nt, Homo sapiens
  misc_RNA (1)...(19): siRNA sense strand
auaccaagaugagguugaa

SEQ ID NO: 2192151 - RNA, 19 nt, Homo sapiens
  misc_RNA (1)...(19): siRNA sense strand
ccaaugaggauggcaacaa

SEQ ID NO: 2192152 - RNA, 19 nt, Homo sapiens
  misc_RNA (1)...(19): siRNA sense strand
acacggcuuucuccacuca

SEQ ID NO: 2192153 - RNA, 19 nt, Homo sapiens
  misc_RNA (1)...(19): siRNA sense strand
aacaugggcugagacuuga

SEQ ID NO: 2192154 - RNA, 19 nt, Homo sapiens
  misc_RNA (1)...(19): siRNA sense strand
guagccuuccucuuuauau

SEQ ID NO: 2192155 - RNA, 19 nt, Homo sapiens
  misc_RNA (1)...(19): siRNA sense strand
gauaccaagaugagguuga

SEQ ID NO: 2192156 - RNA, 19 nt, Homo sapiens
  misc_RNA (1)...(19): siRNA sense strand
auuuguagccuuccucuuu

SEQ ID NO: 2192157 - RNA, 19 nt, Homo sapiens
  misc_RNA (1)...(19): siRNA sense strand
cauaccaaccgaauagcuu

SEQ ID NO: 2192158 - RNA, 19 nt, Homo sapiens
  misc_RNA (1)...(19): siRNA sense strand
ccagugcauggaacuauau

SEQ ID NO: 2192159 - RNA, 19 nt, Homo sapiens
  misc_RNA (1)...(19): siRNA sense strand
cauuggauacaaacucauu

SEQ ID NO: 2192160 - RNA, 19 nt, Homo sapiens
  misc_RNA (1)...(19): siRNA sense strand
caaacucauucggcuuagu

SEQ ID NO: 2192161 - RNA, 19 nt, Homo sapiens
  misc_RNA (1)...(19): siRNA sense strand
uagagagccacuacucgaa

SEQ ID NO: 2192162 - RNA, 19 nt, Homo sapiens
  misc_RNA (1)...(19): siRNA sense strand
guuccauaccaaccgaaua

SEQ ID NO: 2192163 - RNA, 19 nt, Homo sapiens
  misc_RNA (1)...(19): siRNA sense strand
gcagcagagauaccaagau

SEQ ID NO: 2192164 - RNA, 19 nt, Homo sapiens
  misc_RNA (1)...(19): siRNA sense strand
ugugacaccaggaauaugu

SEQ ID NO: 2192165 - RNA, 19 nt, Homo sapiens
  misc_RNA (1)...(19): siRNA sense strand
agucgaagcucaacucuua

SEQ ID NO: 2192166 - RNA, 19 nt, Homo sapiens
  misc_RNA (1)...(19): siRNA sense strand
gagagagggucuuuaaaug

SEQ ID NO: 2192167 - RNA, 19 nt, Homo sapiens
  misc_RNA (1)...(19): siRNA sense strand
ggaaacgccuucaguggaa

SEQ ID NO: 2192168 - RNA, 19 nt, Homo sapiens
  misc_RNA (1)...(19): siRNA sense strand
gagagaaaccugcuuuaaa

SEQ ID NO: 2192169 - RNA, 19 nt, Homo sapiens
  misc_RNA (1)...(19): siRNA sense strand
agagaaaccugcuuuaaau

SEQ ID NO: 2192170 - RNA, 19 nt, Homo sapiens
  misc_RNA (1)...(19): siRNA sense strand
ggaaccagauaucuugaaa

SEQ ID NO: 2192171 - RNA, 19 nt, Homo sapiens
  misc_RNA (1)...(19): siRNA sense strand
gagaaacccuauguaugua

SEQ ID NO: 2192172 - RNA, 19 nt, Homo sapiens
  misc_RNA (1)...(19): siRNA sense strand
gcucaacucuuauucaaca

SEQ ID NO: 2192173 - RNA, 19 nt, Homo sapiens
  misc_RNA (1)...(19): siRNA sense strand
agucagagcucaagccuuu

SEQ ID NO: 2192174 - RNA, 19 nt, Homo sapiens
  misc_RNA (1)...(19): siRNA sense strand
agucgaagcuccagccuua

SEQ ID NO: 2192175 - RNA, 19 nt, Homo sapiens
  misc_RNA (1)...(19): siRNA sense strand
gagagaagccgcaugaaug

SEQ ID NO: 2192176 - RNA, 19 nt, Homo sapiens
  misc_RNA (1)...(19): siRNA sense strand
ggagagagggucuuuaaau

SEQ ID NO: 2192177 - RNA, 19 nt, Homo sapiens
  misc_RNA (1)...(19): siRNA sense strand
ggagagaaacccuauguau

SEQ ID NO: 2192178 - RNA, 19 nt, Homo sapiens
  misc_RNA (1)...(19): siRNA sense strand
gagagggucuuuaaaugug

SEQ ID NO: 2192179 - RNA, 19 nt, Homo sapiens
  misc_RNA (1)...(19): siRNA sense strand
gaaaccugcuuuaaaugau

SEQ ID NO: 2192180 - RNA, 19 nt, Homo sapiens
  misc_RNA (1)...(19): siRNA sense strand
gaaagaacccaagagugua

SEQ ID NO: 2192181 - RNA, 19 nt, Homo sapiens
  misc_RNA (1)...(19): siRNA sense strand
ggagagaaaccugcuuuaa

SEQ ID NO: 2192182 - RNA, 19 nt, Homo sapiens
  misc_RNA (1)...(19): siRNA sense strand
gaaagucaacccuuauuca

SEQ ID NO: 2192183 - RNA, 19 nt, Homo sapiens
  misc_RNA (1)...(19): siRNA sense strand
acucacagcucaaaucuug

SEQ ID NO: 2192184 - RNA, 19 nt, Homo sapiens
  misc_RNA (1)...(19): siRNA sense strand
gagagaaacccuacaagug

SEQ ID NO: 2192185 - RNA, 19 nt, Homo sapiens
  misc_RNA (1)...(19): siRNA sense strand
ccaagaguguagugcauuu

SEQ ID NO: 2192186 - RNA, 19 nt, Homo sapiens
  misc_RNA (1)...(19): siRNA sense strand
ggucagaaaccaugucauu

SEQ ID NO: 2192187 - RNA, 19 nt, Homo sapiens
  misc_RNA (1)...(19): siRNA sense strand
guagugcauuugauagaaa

SEQ ID NO: 2192188 - RNA, 19 nt, Homo sapiens
  misc_RNA (1)...(19): siRNA sense strand
gguuuuaacucucaucuua

SEQ ID NO: 2192189 - RNA, 19 nt, Homo sapiens
  misc_RNA (1)...(19): siRNA sense strand
gagagaaacccuauguaug

SEQ ID NO: 2192190 - RNA, 19 nt, Homo sapiens
  misc_RNA (1)...(19): siRNA sense strand
ucaaagagcgcgugggaaa

SEQ ID NO: 2192191 - RNA, 19 nt, Homo sapiens
  misc_RNA (1)...(19): siRNA sense strand
gggagaagccguacgaaug

SEQ ID NO: 2192192 - RNA, 19 nt, Homo sapiens
  misc_RNA (1)...(19): siRNA sense strand
gaaacccuauguauguaau

SEQ ID NO: 2192193 - RNA, 19 nt, Homo sapiens
  misc_RNA (1)...(19): siRNA sense strand
ggagaagccguacgaaugu

SEQ ID NO: 2192194 - RNA, 19 nt, Homo sapiens
  misc_RNA (1)...(19): siRNA sense strand
ggagagaagccgcaugaau

SEQ ID NO: 2192195 - RNA, 19 nt, Homo sapiens
  misc_RNA (1)...(19): siRNA sense strand
gaacaaacccaauauucac

SEQ ID NO: 2192196 - RNA, 19 nt, Homo sapiens
  misc_RNA (1)...(19): siRNA sense strand
agagaaacccuauguaugu

SEQ ID NO: 2192197 - RNA, 19 nt, Homo sapiens
  misc_RNA (1)...(19): siRNA sense strand
caagagaguuuuaacagaa

SEQ ID NO: 2192198 - RNA, 19 nt, Homo sapiens
  misc_RNA (1)...(19): siRNA sense strand
caagaaggaacuaucuauu

SEQ ID NO: 2192199 - RNA, 19 nt, Homo sapiens
  misc_RNA (1)...(19): siRNA sense strand
agaaagaacccaagagugu

SEQ ID NO: 2192200 - RNA, 19 nt, Homo sapiens
  misc_RNA (1)...(19): siRNA sense strand
gaauuuguaucaagaagac

SEQ ID NO: 2192201 - RNA, 19 nt, Homo sapiens
  misc_RNA (1)...(19): siRNA sense strand
ggagaaagaacccaagagu

SEQ ID NO: 2192202 - RNA, 19 nt, Homo sapiens
  misc_RNA (1)...(19): siRNA sense strand
ggagagaaacccuacaagu

SEQ ID NO: 2192203 - RNA, 19 nt, Homo sapiens
  misc_RNA (1)...(19): siRNA sense strand
caggagagagggucuuuaa

SEQ ID NO: 2192204 - RNA, 19 nt, Homo sapiens
  misc_RNA (1)...(19): siRNA sense strand
gggaaaagcccuauaaaug

SEQ ID NO: 2192205 - RNA, 19 nt, Homo sapiens
  misc_RNA (1)...(19): siRNA sense strand
cacagcagauggacagauu

SEQ ID NO: 2192206 - RNA, 19 nt, Homo sapiens
  misc_RNA (1)...(19): siRNA sense strand
uaacucagcaucagagaau

SEQ ID NO: 2192207 - RNA, 19 nt, Homo sapiens
  misc_RNA (1)...(19): siRNA sense strand
guuguuagacuucaaagaa

SEQ ID NO: 2192208 - RNA, 19 nt, Homo sapiens
  misc_RNA (1)...(19): siRNA sense strand
gaaaagcccuauaaauguc

SEQ ID NO: 2192209 - RNA, 19 nt, Homo sapiens
  misc_RNA (1)...(19): siRNA sense strand
ggaaaagcccuauaaaugu

SEQ ID NO: 2192210 - RNA, 19 nt, Homo sapiens
  misc_RNA (1)...(19): siRNA sense strand
gggaaggcuuucagucgaa

SEQ ID NO: 2192211 - RNA, 19 nt, Homo sapiens
  misc_RNA (1)...(19): siRNA sense strand
gggcgagccuuuacucaca

SEQ ID NO: 2192212 - RNA, 19 nt, Homo sapiens
  misc_RNA (1)...(19): siRNA sense strand
gaguguagugcauuugaua

SEQ ID NO: 2192213 - RNA, 19 nt, Homo sapiens
  misc_RNA (1)...(19): siRNA sense strand
caacaucggaucauucaca

SEQ ID NO: 2192214 - RNA, 19 nt, Homo sapiens
  misc_RNA (1)...(19): siRNA sense strand
ucaagaagauuuuccaaga

SEQ ID NO: 2192215 - RNA, 19 nt, Homo sapiens
  misc_RNA (1)...(19): siRNA sense strand
ggaaagucaacccuuauuc

SEQ ID NO: 2192216 - RNA, 19 nt, Homo sapiens
  misc_RNA (1)...(19): siRNA sense strand
aguggaaagucaacccuua

SEQ ID NO: 2192217 - RNA, 19 nt, Homo sapiens
  misc_RNA (1)...(19): siRNA sense strand
gggaugugaugcuggagaa

SEQ ID NO: 2192218 - RNA, 19 nt, Homo sapiens
  misc_RNA (1)...(19): siRNA sense strand
gagagaagccccauaaaug

SEQ ID NO: 2192219 - RNA, 19 nt, Homo sapiens
  misc_RNA (1)...(19): siRNA sense strand
gaauguggaagaggcuuua

SEQ ID NO: 2192220 - RNA, 19 nt, Homo sapiens
  misc_RNA (1)...(19): siRNA sense strand
ggaccaaaauguuguuaga

SEQ ID NO: 2192221 - RNA, 19 nt, Homo sapiens
  misc_RNA (1)...(19): siRNA sense strand
gaaacgccuucaguggaaa

SEQ ID NO: 2192222 - RNA, 19 nt, Homo sapiens
  misc_RNA (1)...(19): siRNA sense strand
ccaagaaggaacuaucuau

SEQ ID NO: 2192223 - RNA, 19 nt, Homo sapiens
  misc_RNA (1)...(19): siRNA sense strand
aagcucaacucuuauucaa

SEQ ID NO: 2192224 - RNA, 19 nt, Homo sapiens
  misc_RNA (1)...(19): siRNA sense strand
gaagcucaacucuuauuca

SEQ ID NO: 2192225 - RNA, 19 nt, Homo sapiens
  misc_RNA (1)...(19): siRNA sense strand
agagaaacccuacaagugu

SEQ ID NO: 2192226 - RNA, 19 nt, Homo sapiens
  misc_RNA (1)...(19): siRNA sense strand
agaaaccugcuuuaaauga

SEQ ID NO: 2192227 - RNA, 19 nt, Homo sapiens
  misc_RNA (1)...(19): siRNA sense strand
gagcugaggaaccagauau

SEQ ID NO: 2192228 - RNA, 19 nt, Homo sapiens
  misc_RNA (1)...(19): siRNA sense strand
gagaaaccugcuuuaaaug

SEQ ID NO: 2192229 - RNA, 19 nt, Homo sapiens
  misc_RNA (1)...(19): siRNA sense strand
cagcaaaaccuucaaauau

SEQ ID NO: 2192230 - RNA, 19 nt, Homo sapiens
  misc_RNA (1)...(19): siRNA sense strand
gaacacguaaggauucaca

SEQ ID NO: 2192231 - RNA, 19 nt, Homo sapiens
  misc_RNA (1)...(19): siRNA sense strand
ugaggaaccagauaucuug

SEQ ID NO: 2192232 - RNA, 19 nt, Homo sapiens
  misc_RNA (1)...(19): siRNA sense strand
cauucacacuggaaauaaa

SEQ ID NO: 2192233 - RNA, 19 nt, Homo sapiens
  misc_RNA (1)...(19): siRNA sense strand
gcagcaaaaccuucaaaua

SEQ ID NO: 2192234 - RNA, 19 nt, Homo sapiens
  misc_RNA (1)...(19): siRNA sense strand
aaagagcgcgugggaaauu

SEQ ID NO: 2192235 - RNA, 19 nt, Homo sapiens
  misc_RNA (1)...(19): siRNA sense strand
cagaaaccaugucauugca

SEQ ID NO: 2192236 - RNA, 19 nt, Homo sapiens
  misc_RNA (1)...(19): siRNA sense strand
agucaacccuuauucaaca

SEQ ID NO: 2192237 - RNA, 19 nt, Homo sapiens
  misc_RNA (1)...(19): siRNA sense strand
gaacuuuggguccugaauc

SEQ ID NO: 2192238 - RNA, 19 nt, Homo sapiens
  misc_RNA (1)...(19): siRNA sense strand
gaagcacggcagagccuuu

SEQ ID NO: 2192239 - RNA, 19 nt, Homo sapiens
  misc_RNA (1)...(19): siRNA sense strand
aaaccugcuuuaaaugaug

SEQ ID NO: 2192240 - RNA, 19 nt, Homo sapiens
  misc_RNA (1)...(19): siRNA sense strand
caagaagauuuuccaagaa

SEQ ID NO: 2192241 - RNA, 19 nt, Homo sapiens
  misc_RNA (1)...(19): siRNA sense strand
ggagagaagcccuaugacu

SEQ ID NO: 2192242 - RNA, 19 nt, Homo sapiens
  misc_RNA (1)...(19): siRNA sense strand
caacaucagguaacucaca

SEQ ID NO: 2192243 - RNA, 19 nt, Homo sapiens
  misc_RNA (1)...(19): siRNA sense strand
cuaaguagacaccagagaa

SEQ ID NO: 2192244 - RNA, 19 nt, Homo sapiens
  misc_RNA (1)...(19): siRNA sense strand
gcucccagcucacccuaca

SEQ ID NO: 2192245 - RNA, 19 nt, Homo sapiens
  misc_RNA (1)...(19): siRNA sense strand
ggaccaagaaggaacuauc

SEQ ID NO: 2192246 - RNA, 19 nt, Homo sapiens
  misc_RNA (1)...(19): siRNA sense strand
uaacucucaucuuacugaa

SEQ ID NO: 2192247 - RNA, 19 nt, Homo sapiens
  misc_RNA (1)...(19): siRNA sense strand
aaacuugaaucuggaccaa

SEQ ID NO: 2192248 - RNA, 19 nt, Homo sapiens
  misc_RNA (1)...(19): siRNA sense strand
caacccuuauucaacauca

SEQ ID NO: 2192249 - RNA, 19 nt, Homo sapiens
  misc_RNA (1)...(19): siRNA sense strand
aaagucaacccuuauucaa

SEQ ID NO: 2192250 - RNA, 19 nt, Homo sapiens
  misc_RNA (1)...(19): siRNA sense strand
cggcagagccuuuaaccau

SEQ ID NO: 2192251 - RNA, 19 nt, Homo sapiens
  misc_RNA (1)...(19): siRNA sense strand
gguccagccuuuguucaug

SEQ ID NO: 2192252 - RNA, 19 nt, Homo sapiens
  misc_RNA (1)...(19): siRNA sense strand
ucaucuuacugaacacgua

SEQ ID NO: 2192253 - RNA, 19 nt, Homo sapiens
  misc_RNA (1)...(19): siRNA sense strand
cccagaauuuguaucaaga

SEQ ID NO: 2192254 - RNA, 19 nt, Homo sapiens
  misc_RNA (1)...(19): siRNA sense strand
gagaagccguacgaaugug

SEQ ID NO: 2192255 - RNA, 19 nt, Homo sapiens
  misc_RNA (1)...(19): siRNA sense strand
cagcucaaaucuuguucug

SEQ ID NO: 2192256 - RNA, 19 nt, Homo sapiens
  misc_RNA (1)...(19): siRNA sense strand
ucacagcucaaaucuuguu

SEQ ID NO: 2192257 - RNA, 19 nt, Homo sapiens
  misc_RNA (1)...(19): siRNA sense strand
ggauguggccguguacuuc

SEQ ID NO: 2192258 - RNA, 19 nt, Homo sapiens
  misc_RNA (1)...(19): siRNA sense strand
ccagauaucuugaaaagcu

SEQ ID NO: 2192259 - RNA, 19 nt, Homo sapiens
  misc_RNA (1)...(19): siRNA sense strand
acucucaucuuacugaaca

SEQ ID NO: 2192260 - RNA, 19 nt, Homo sapiens
  misc_RNA (1)...(19): siRNA sense strand
gcagagccuuugguuuuaa

SEQ ID NO: 2192261 - RNA, 19 nt, Homo sapiens
  misc_RNA (1)...(19): siRNA sense strand
gguucauacuggagagaaa

SEQ ID NO: 2192262 - RNA, 19 nt, Homo sapiens
  misc_RNA (1)...(19): siRNA sense strand
ggagagaagccccauaaau

SEQ ID NO: 2192263 - RNA, 19 nt, Homo sapiens
  misc_RNA (1)...(19): siRNA sense strand
cacauucacacuggaaaua

SEQ ID NO: 2192264 - RNA, 19 nt, Homo sapiens
  misc_RNA (1)...(19): siRNA sense strand
ucagcagacucguguugga

SEQ ID NO: 2192265 - RNA, 19 nt, Homo sapiens
  misc_RNA (1)...(19): siRNA sense strand
gcaaggcguucagauacaa

SEQ ID NO: 2192266 - RNA, 19 nt, Homo sapiens
  misc_RNA (1)...(19): siRNA sense strand
caaggguucugcaggaaga

SEQ ID NO: 2192267 - RNA, 19 nt, Homo sapiens
  misc_RNA (1)...(19): siRNA sense strand
gcggcaaggcguucagaua

SEQ ID NO: 2192268 - RNA, 19 nt, Homo sapiens
  misc_RNA (1)...(19): siRNA sense strand
gguccucgcuccugaagca

SEQ ID NO: 2192269 - RNA, 19 nt, Homo sapiens
  misc_RNA (1)...(19): siRNA sense strand
ggcaaggcguucagauaca

SEQ ID NO: 2192270 - RNA, 19 nt, Homo sapiens
  misc_RNA (1)...(19): siRNA sense strand
gauccacacugaggagaag

SEQ ID NO: 2192271 - RNA, 19 nt, Homo sapiens
  misc_RNA (1)...(19): siRNA sense strand
gaggacgggucagauaaac

SEQ ID NO: 2192272 - RNA, 19 nt, Homo sapiens
  misc_RNA (1)...(19): siRNA sense strand
ggagcuacacgcugaacga

SEQ ID NO: 2192273 - RNA, 19 nt, Homo sapiens
  misc_RNA (1)...(19): siRNA sense strand
ugaggacgggucagauaaa

SEQ ID NO: 2192274 - RNA, 19 nt, Homo sapiens
  misc_RNA (1)...(19): siRNA sense strand
gcaaguccaaccucacucu

SEQ ID NO: 2192275 - RNA, 19 nt, Homo sapiens
  misc_RNA (1)...(19): siRNA sense strand
accagaagauccacaccaa

SEQ ID NO: 2192276 - RNA, 19 nt, Homo sapiens
  misc_RNA (1)...(19): siRNA sense strand
ggaggccguuccgacacaa

SEQ ID NO: 2192277 - RNA, 19 nt, Homo sapiens
  misc_RNA (1)...(19): siRNA sense strand
cggcaaggcguucagauac

SEQ ID NO: 2192278 - RNA, 19 nt, Homo sapiens
  misc_RNA (1)...(19): siRNA sense strand
gcagguucacccucaacga

SEQ ID NO: 2192279 - RNA, 19 nt, Homo sapiens
  misc_RNA (1)...(19): siRNA sense strand
gggaaagccuucaaccaua

SEQ ID NO: 2192280 - RNA, 19 nt, Homo sapiens
  misc_RNA (1)...(19): siRNA sense strand
cagacaaccucaaauauga

SEQ ID NO: 2192281 - RNA, 19 nt, Homo sapiens
  misc_RNA (1)...(19): siRNA sense strand
gaaagcaacucugauugug

SEQ ID NO: 2192282 - RNA, 19 nt, Homo sapiens
  misc_RNA (1)...(19): siRNA sense strand
gagagaagccucacgaaug

SEQ ID NO: 2192283 - RNA, 19 nt, Homo sapiens
  misc_RNA (1)...(19): siRNA sense strand
ggaaaccuaugggaaugua

SEQ ID NO: 2192284 - RNA, 19 nt, Homo sapiens
  misc_RNA (1)...(19): siRNA sense strand
ggagaaaggccauaugugu

SEQ ID NO: 2192285 - RNA, 19 nt, Homo sapiens
  misc_RNA (1)...(19): siRNA sense strand
ggaaagccuucaaccauag

SEQ ID NO: 2192286 - RNA, 19 nt, Homo sapiens
  misc_RNA (1)...(19): siRNA sense strand
gaaaugugaugauggaaac

SEQ ID NO: 2192287 - RNA, 19 nt, Homo sapiens
  misc_RNA (1)...(19): siRNA sense strand
guucaggucuuaagccaaa

SEQ ID NO: 2192288 - RNA, 19 nt, Homo sapiens
  misc_RNA (1)...(19): siRNA sense strand
ggagagaggcccuacaugu

SEQ ID NO: 2192289 - RNA, 19 nt, Homo sapiens
  misc_RNA (1)...(19): siRNA sense strand
gauccaagccugacauaau

SEQ ID NO: 2192290 - RNA, 19 nt, Homo sapiens
  misc_RNA (1)...(19): siRNA sense strand
gaaagugcacagaaaguug

SEQ ID NO: 2192291 - RNA, 19 nt, Homo sapiens
  misc_RNA (1)...(19): siRNA sense strand
gggaaaaccuucaguguga

SEQ ID NO: 2192292 - RNA, 19 nt, Homo sapiens
  misc_RNA (1)...(19): siRNA sense strand
gagaagcccuaugagugua

SEQ ID NO: 2192293 - RNA, 19 nt, Homo sapiens
  misc_RNA (1)...(19): siRNA sense strand
guacacaacaagacaguuu

SEQ ID NO: 2192294 - RNA, 19 nt, Homo sapiens
  misc_RNA (1)...(19): siRNA sense strand
ucacgaaugucuugagugu

SEQ ID NO: 2192295 - RNA, 19 nt, Homo sapiens
  misc_RNA (1)...(19): siRNA sense strand
agagugagcucagaucuug

SEQ ID NO: 2192296 - RNA, 19 nt, Homo sapiens
  misc_RNA (1)...(19): siRNA sense strand
agagaagccucacgaaugu

SEQ ID NO: 2192297 - RNA, 19 nt, Homo sapiens
  misc_RNA (1)...(19): siRNA sense strand
ggagaagcccuaugugugu

SEQ ID NO: 2192298 - RNA, 19 nt, Homo sapiens
  misc_RNA (1)...(19): siRNA sense strand
ggagagaagcccuaugugu

SEQ ID NO: 2192299 - RNA, 19 nt, Homo sapiens
  misc_RNA (1)...(19): siRNA sense strand
cuacagaaaugugaugaug

SEQ ID NO: 2192300 - RNA, 19 nt, Homo sapiens
  misc_RNA (1)...(19): siRNA sense strand
agccagagcucaguccuua

SEQ ID NO: 2192301 - RNA, 19 nt, Homo sapiens
  misc_RNA (1)...(19): siRNA sense strand
cuacauguguguugagugu

SEQ ID NO: 2192302 - RNA, 19 nt, Homo sapiens
  misc_RNA (1)...(19): siRNA sense strand
acagaaaugugaugaugga

SEQ ID NO: 2192303 - RNA, 19 nt, Homo sapiens
  misc_RNA (1)...(19): siRNA sense strand
caaccagcauggccaccua

SEQ ID NO: 2192304 - RNA, 19 nt, Homo sapiens
  misc_RNA (1)...(19): siRNA sense strand
ggaaagccuucacucaacu

SEQ ID NO: 2192305 - RNA, 19 nt, Homo sapiens
  misc_RNA (1)...(19): siRNA sense strand
ucacucaacucucacaucu

SEQ ID NO: 2192306 - RNA, 19 nt, Homo sapiens
  misc_RNA (1)...(19): siRNA sense strand
cagcaucacaagauacaua

SEQ ID NO: 2192307 - RNA, 19 nt, Homo sapiens
  misc_RNA (1)...(19): siRNA sense strand
gagagaggcccuacaugug

SEQ ID NO: 2192308 - RNA, 19 nt, Homo sapiens
  misc_RNA (1)...(19): siRNA sense strand
ggagagaagccucacgaau

SEQ ID NO: 2192309 - RNA, 19 nt, Homo sapiens
  misc_RNA (1)...(19): siRNA sense strand
gauggaaaccuaugggaau

SEQ ID NO: 2192310 - RNA, 19 nt, Homo sapiens
  misc_RNA (1)...(19): siRNA sense strand
gcucaguccuuaguaaaca

SEQ ID NO: 2192311 - RNA, 19 nt, Homo sapiens
  misc_RNA (1)...(19): siRNA sense strand
ucagacaaccucaaauaug

SEQ ID NO: 2192312 - RNA, 19 nt, Homo sapiens
  misc_RNA (1)...(19): siRNA sense strand
acucaacucucacaucuca

SEQ ID NO: 2192313 - RNA, 19 nt, Homo sapiens
  misc_RNA (1)...(19): siRNA sense strand
gagcucaguccuuaguaaa

SEQ ID NO: 2192314 - RNA, 19 nt, Homo sapiens
  misc_RNA (1)...(19): siRNA sense strand
ggucucugauccagcauga

SEQ ID NO: 2192315 - RNA, 19 nt, Homo sapiens
  misc_RNA (1)...(19): siRNA sense strand
acucagacaaccucaaaua

SEQ ID NO: 2192316 - RNA, 19 nt, Homo sapiens
  misc_RNA (1)...(19): siRNA sense strand
gccauuaauuucagagcaa

SEQ ID NO: 2192317 - RNA, 19 nt, Homo sapiens
  misc_RNA (1)...(19): siRNA sense strand
agagcucaguccuuaguaa

SEQ ID NO: 2192318 - RNA, 19 nt, Homo sapiens
  misc_RNA (1)...(19): siRNA sense strand
gcaaagcuucugucugagu

SEQ ID NO: 2192319 - RNA, 19 nt, Homo sapiens
  misc_RNA (1)...(19): siRNA sense strand
ccucaaauaugaccacacu

SEQ ID NO: 2192320 - RNA, 19 nt, Homo sapiens
  misc_RNA (1)...(19): siRNA sense strand
gaagccauaugagugcaau

SEQ ID NO: 2192321 - RNA, 19 nt, Homo sapiens
  misc_RNA (1)...(19): siRNA sense strand
ugaaagcaacucugauugu

SEQ ID NO: 2192322 - RNA, 19 nt, Homo sapiens
  misc_RNA (1)...(19): siRNA sense strand
caggugagaagcccuauga

SEQ ID NO: 2192323 - RNA, 19 nt, Homo sapiens
  misc_RNA (1)...(19): siRNA sense strand
gaggauugaucaagaaaau

SEQ ID NO: 2192324 - RNA, 19 nt, Homo sapiens
  misc_RNA (1)...(19): siRNA sense strand
ccugaaagcaacucugauu

SEQ ID NO: 2192325 - RNA, 19 nt, Homo sapiens
  misc_RNA (1)...(19): siRNA sense strand
aaacacaggagaauucaca

SEQ ID NO: 2192326 - RNA, 19 nt, Homo sapiens
  misc_RNA (1)...(19): siRNA sense strand
ugagaagcccuaugagugu

SEQ ID NO: 2192327 - RNA, 19 nt, Homo sapiens
  misc_RNA (1)...(19): siRNA sense strand
cggaaagccuucacucaac

SEQ ID NO: 2192328 - RNA, 19 nt, Homo sapiens
  misc_RNA (1)...(19): siRNA sense strand
ccauauguguguccguugu

SEQ ID NO: 2192329 - RNA, 19 nt, Homo sapiens
  misc_RNA (1)...(19): siRNA sense strand
cuacucagacaaccucaaa

SEQ ID NO: 2192330 - RNA, 19 nt, Homo sapiens
  misc_RNA (1)...(19): siRNA sense strand
accagaaagugcacagaaa

SEQ ID NO: 2192331 - RNA, 19 nt, Homo sapiens
  misc_RNA (1)...(19): siRNA sense strand
ccauuaauuucagagcaaa

SEQ ID NO: 2192332 - RNA, 19 nt, Homo sapiens
  misc_RNA (1)...(19): siRNA sense strand
guccgaagccauuaauuuc

SEQ ID NO: 2192333 - RNA, 19 nt, Homo sapiens
  misc_RNA (1)...(19): siRNA sense strand
ucaaauaugaccacacuac

SEQ ID NO: 2192334 - RNA, 19 nt, Homo sapiens
  misc_RNA (1)...(19): siRNA sense strand
cgaagccauuaauuucaga

SEQ ID NO: 2192335 - RNA, 19 nt, Homo sapiens
  misc_RNA (1)...(19): siRNA sense strand
gagaauccacacaggugaa

SEQ ID NO: 2192336 - RNA, 19 nt, Homo sapiens
  misc_RNA (1)...(19): siRNA sense strand
agaaaggccauaugugugu

SEQ ID NO: 2192337 - RNA, 19 nt, Homo sapiens
  misc_RNA (1)...(19): siRNA sense strand
ucaacucucacaucucauu

SEQ ID NO: 2192338 - RNA, 19 nt, Homo sapiens
  misc_RNA (1)...(19): siRNA sense strand
caaauaugaccacacuaca

SEQ ID NO: 2192339 - RNA, 19 nt, Homo sapiens
  misc_RNA (1)...(19): siRNA sense strand
cuauguguguggugaaugu

SEQ ID NO: 2192340 - RNA, 19 nt, Homo sapiens
  misc_RNA (1)...(19): siRNA sense strand
agaaaugugaugauggaaa

SEQ ID NO: 2192341 - RNA, 19 nt, Homo sapiens
  misc_RNA (1)...(19): siRNA sense strand
agccaccgcuccacacuga

SEQ ID NO: 2192342 - RNA, 19 nt, Homo sapiens
  misc_RNA (1)...(19): siRNA sense strand
aguccgaagccauuaauuu

SEQ ID NO: 2192343 - RNA, 19 nt, Homo sapiens
  misc_RNA (1)...(19): siRNA sense strand
ggugagaagcccuaugagu

SEQ ID NO: 2192344 - RNA, 19 nt, Homo sapiens
  misc_RNA (1)...(19): siRNA sense strand
guaaacacaggagaauuca

SEQ ID NO: 2192345 - RNA, 19 nt, Homo sapiens
  misc_RNA (1)...(19): siRNA sense strand
gauccagcaugagagaauc

SEQ ID NO: 2192346 - RNA, 19 nt, Homo sapiens
  misc_RNA (1)...(19): siRNA sense strand
ccauaugagugcaauagcu

SEQ ID NO: 2192347 - RNA, 19 nt, Homo sapiens
  misc_RNA (1)...(19): siRNA sense strand
agagaggcccuacaugugu

SEQ ID NO: 2192348 - RNA, 19 nt, Homo sapiens
  misc_RNA (1)...(19): siRNA sense strand
agaaagugcacagaaaguu

SEQ ID NO: 2192349 - RNA, 19 nt, Homo sapiens
  misc_RNA (1)...(19): siRNA sense strand
ccagaaagugcacagaaag

SEQ ID NO: 2192350 - RNA, 19 nt, Homo sapiens
  misc_RNA (1)...(19): siRNA sense strand
cuaugggaauguagucuca

SEQ ID NO: 2192351 - RNA, 19 nt, Homo sapiens
  misc_RNA (1)...(19): siRNA sense strand
cgaccgcucaguccucauu

SEQ ID NO: 2192352 - RNA, 19 nt, Homo sapiens
  misc_RNA (1)...(19): siRNA sense strand
ucggaaagccuucacucaa

SEQ ID NO: 2192353 - RNA, 19 nt, Homo sapiens
  misc_RNA (1)...(19): siRNA sense strand
gaagcccuaugaguguaau

SEQ ID NO: 2192354 - RNA, 19 nt, Homo sapiens
  misc_RNA (1)...(19): siRNA sense strand
aguaaacacaggagaauuc

SEQ ID NO: 2192355 - RNA, 19 nt, Homo sapiens
  misc_RNA (1)...(19): siRNA sense strand
caccagaaagugcacagaa

SEQ ID NO: 2192356 - RNA, 19 nt, Homo sapiens
  misc_RNA (1)...(19): siRNA sense strand
gggaggauugaucaagaaa

SEQ ID NO: 2192357 - RNA, 19 nt, Homo sapiens
  misc_RNA (1)...(19): siRNA sense strand
caggcgagaagcccuauga

SEQ ID NO: 2192358 - RNA, 19 nt, Homo sapiens
  misc_RNA (1)...(19): siRNA sense strand
uacacaacaagacaguuua

SEQ ID NO: 2192359 - RNA, 19 nt, Homo sapiens
  misc_RNA (1)...(19): siRNA sense strand
ggcccuacauguguguuga

SEQ ID NO: 2192360 - RNA, 19 nt, Homo sapiens
  misc_RNA (1)...(19): siRNA sense strand
aggccaagcugaccuucga

SEQ ID NO: 2192361 - RNA, 19 nt, Homo sapiens
  misc_RNA (1)...(19): siRNA sense strand
ccuaauccagcaccagaaa

SEQ ID NO: 2192362 - RNA, 19 nt, Homo sapiens
  misc_RNA (1)...(19): siRNA sense strand
gggagaaaggccauaugug

SEQ ID NO: 2192363 - RNA, 19 nt, Homo sapiens
  misc_RNA (1)...(19): siRNA sense strand
acaacaagacaguuuaucu

SEQ ID NO: 2192364 - RNA, 19 nt, Homo sapiens
  misc_RNA (1)...(19): siRNA sense strand
ccgaagccauuaauuucag

SEQ ID NO: 2192365 - RNA, 19 nt, Homo sapiens
  misc_RNA (1)...(19): siRNA sense strand
ggucucuacagaaauguga

SEQ ID NO: 2192366 - RNA, 19 nt, Homo sapiens
  misc_RNA (1)...(19): siRNA sense strand
caagcugaccuucgaggau

SEQ ID NO: 2192367 - RNA, 19 nt, Homo sapiens
  misc_RNA (1)...(19): siRNA sense strand
acacaacaagacaguuuau

SEQ ID NO: 2192368 - RNA, 19 nt, Homo sapiens
  misc_RNA (1)...(19): siRNA sense strand
ucacaggugcaaugagugu

SEQ ID NO: 2192369 - RNA, 19 nt, Homo sapiens
  misc_RNA (1)...(19): siRNA sense strand
ugggaaagccuucaaccau

SEQ ID NO: 2192370 - RNA, 19 nt, Homo sapiens
  misc_RNA (1)...(19): siRNA sense strand
agccuucacucaacucuca

SEQ ID NO: 2192371 - RNA, 19 nt, Homo sapiens
  misc_RNA (1)...(19): siRNA sense strand
auccaagccugacauaauc

SEQ ID NO: 2192372 - RNA, 19 nt, Homo sapiens
  misc_RNA (1)...(19): siRNA sense strand
ccagagcucaguccuuagu

SEQ ID NO: 2192373 - RNA, 19 nt, Homo sapiens
  misc_RNA (1)...(19): siRNA sense strand
ggauccaagccugacauaa

SEQ ID NO: 2192374 - RNA, 19 nt, Homo sapiens
  misc_RNA (1)...(19): siRNA sense strand
cagaaagugcacagaaagu

SEQ ID NO: 2192375 - RNA, 19 nt, Homo sapiens
  misc_RNA (1)...(19): siRNA sense strand
gcuucugucugaguccaaa

SEQ ID NO: 2192376 - RNA, 19 nt, Homo sapiens
  misc_RNA (1)...(19): siRNA sense strand
aaaccaagggagagaguca

SEQ ID NO: 2192377 - RNA, 19 nt, Homo sapiens
  misc_RNA (1)...(19): siRNA sense strand
aaagugcacagaaaguugu

SEQ ID NO: 2192378 - RNA, 19 nt, Homo sapiens
  misc_RNA (1)...(19): siRNA sense strand
ggccuucguucagcacuca

SEQ ID NO: 2192379 - RNA, 19 nt, Homo sapiens
  misc_RNA (1)...(19): siRNA sense strand
gaaagaaacccaagccuua

SEQ ID NO: 2192380 - RNA, 19 nt, Homo sapiens
  misc_RNA (1)...(19): siRNA sense strand
gaaagaaacacuaagaaga

SEQ ID NO: 2192381 - RNA, 19 nt, Homo sapiens
  misc_RNA (1)...(19): siRNA sense strand
gagaaggacuaugagauuu

SEQ ID NO: 2192382 - RNA, 19 nt, Homo sapiens
  misc_RNA (1)...(19): siRNA sense strand
gaagaaguccaaauugaga

SEQ ID NO: 2192383 - RNA, 19 nt, Homo sapiens
  misc_RNA (1)...(19): siRNA sense strand
aagaagaaguccaaauuga

SEQ ID NO: 2192384 - RNA, 19 nt, Homo sapiens
  misc_RNA (1)...(19): siRNA sense strand
gggcagaagaugaagaaua

SEQ ID NO: 2192385 - RNA, 19 nt, Homo sapiens
  misc_RNA (1)...(19): siRNA sense strand
ggcagaagaugaagaauac

SEQ ID NO: 2192386 - RNA, 19 nt, Homo sapiens
  misc_RNA (1)...(19): siRNA sense strand
gaacuuuccggcaauguga

SEQ ID NO: 2192387 - RNA, 19 nt, Homo sapiens
  misc_RNA (1)...(19): siRNA sense strand
uaaaagagcuccuggaaag

SEQ ID NO: 2192388 - RNA, 19 nt, Homo sapiens
  misc_RNA (1)...(19): siRNA sense strand
cuaagaagaaguccaaauu

SEQ ID NO: 2192389 - RNA, 19 nt, Homo sapiens
  misc_RNA (1)...(19): siRNA sense strand
ggaaagaaacacuaagaag

SEQ ID NO: 2192390 - RNA, 19 nt, Homo sapiens
  misc_RNA (1)...(19): siRNA sense strand
gcucaacggugaccagaca

SEQ ID NO: 2192391 - RNA, 19 nt, Homo sapiens
  misc_RNA (1)...(19): siRNA sense strand
ucaccuggcugacgauuca

SEQ ID NO: 2192392 - RNA, 19 nt, Homo sapiens
  misc_RNA (1)...(19): siRNA sense strand
gaaggacuaugagauuuac

SEQ ID NO: 2192393 - RNA, 19 nt, Homo sapiens
  misc_RNA (1)...(19): siRNA sense strand
gcacguaugccaaguacug

SEQ ID NO: 2192394 - RNA, 19 nt, Homo sapiens
  misc_RNA (1)...(19): siRNA sense strand
uaagaagaaguccaaauug

SEQ ID NO: 2192395 - RNA, 19 nt, Homo sapiens
  misc_RNA (1)...(19): siRNA sense strand
uggagaggcuggcaccuuu

SEQ ID NO: 2192396 - RNA, 19 nt, Homo sapiens
  misc_RNA (1)...(19): siRNA sense strand
gcaggcggcuuugcaaaca

SEQ ID NO: 2192397 - RNA, 19 nt, Homo sapiens
  misc_RNA (1)...(19): siRNA sense strand
ugagaaggacuaugagauu

SEQ ID NO: 2192398 - RNA, 19 nt, Homo sapiens
  misc_RNA (1)...(19): siRNA sense strand
ccucugggccguaaacuaa

SEQ ID NO: 2192399 - RNA, 19 nt, Homo sapiens
  misc_RNA (1)...(19): siRNA sense strand
ucaagcugauccagaugua

SEQ ID NO: 2192400 - RNA, 19 nt, Homo sapiens
  misc_RNA (1)...(19): siRNA sense strand
caaguacuguuaccacaag

SEQ ID NO: 2192401 - RNA, 19 nt, Homo sapiens
  misc_RNA (1)...(19): siRNA sense strand
uaaagugacacagcacaua

SEQ ID NO: 2192402 - RNA, 19 nt, Homo sapiens
  misc_RNA (1)...(19): siRNA sense strand
agaaggacuaugagauuua

SEQ ID NO: 2192403 - RNA, 19 nt, Homo sapiens
  misc_RNA (1)...(19): siRNA sense strand
gcagcgaguccaucaagaa

SEQ ID NO: 2192404 - RNA, 19 nt, Homo sapiens
  misc_RNA (1)...(19): siRNA sense strand
ucacagcccagccgcauuu

SEQ ID NO: 2192405 - RNA, 19 nt, Homo sapiens
  misc_RNA (1)...(19): siRNA sense strand
gggacgagcucuacaucca

SEQ ID NO: 2192406 - RNA, 19 nt, Homo sapiens
  misc_RNA (1)...(19): siRNA sense strand
aaagugacacagcacauaa

SEQ ID NO: 2192407 - RNA, 19 nt, Homo sapiens
  misc_RNA (1)...(19): siRNA sense strand
guguguaccugcuggaaga

SEQ ID NO: 2192408 - RNA, 19 nt, Homo sapiens
  misc_RNA (1)...(19): siRNA sense strand
agacggacaucgagaacug

SEQ ID NO: 2192409 - RNA, 19 nt, Homo sapiens
  misc_RNA (1)...(19): siRNA sense strand
ugagaaagcgcaggaguug

SEQ ID NO: 2192410 - RNA, 19 nt, Homo sapiens
  misc_RNA (1)...(19): siRNA sense strand
acucaugacuggaacuuuc

SEQ ID NO: 2192411 - RNA, 19 nt, Homo sapiens
  misc_RNA (1)...(19): siRNA sense strand
gaaacacuaagaagaaguc

SEQ ID NO: 2192412 - RNA, 19 nt, Homo sapiens
  misc_RNA (1)...(19): siRNA sense strand
ugcagacgcugaagcagaa

SEQ ID NO: 2192413 - RNA, 19 nt, Homo sapiens
  misc_RNA (1)...(19): siRNA sense strand
ggacauugacgaggugaau

SEQ ID NO: 2192414 - RNA, 19 nt, Homo sapiens
  misc_RNA (1)...(19): siRNA sense strand
aaagagcuccuggaaagaa

SEQ ID NO: 2192415 - RNA, 19 nt, Homo sapiens
  misc_RNA (1)...(19): siRNA sense strand
ccaagcacuucaacaagca

SEQ ID NO: 2192416 - RNA, 19 nt, Homo sapiens
  misc_RNA (1)...(19): siRNA sense strand
caacacgucccgcuucuac

SEQ ID NO: 2192417 - RNA, 19 nt, Homo sapiens
  misc_RNA (1)...(19): siRNA sense strand
gagcaggcggcuuugcaaa

SEQ ID NO: 2192418 - RNA, 19 nt, Homo sapiens
  misc_RNA (1)...(19): siRNA sense strand
cguaugccaaguacuguua

SEQ ID NO: 2192419 - RNA, 19 nt, Homo sapiens
  misc_RNA (1)...(19): siRNA sense strand
acccaagccuuauguugaa

SEQ ID NO: 2192420 - RNA, 19 nt, Homo sapiens
  misc_RNA (1)...(19): siRNA sense strand
gaggacagcggcagguuca

SEQ ID NO: 2192421 - RNA, 19 nt, Homo sapiens
  misc_RNA (1)...(19): siRNA sense strand
uaugagauuuaccgggauu

SEQ ID NO: 2192422 - RNA, 19 nt, Homo sapiens
  misc_RNA (1)...(19): siRNA sense strand
guacuguuaccacaagcua

SEQ ID NO: 2192423 - RNA, 19 nt, Homo sapiens
  misc_RNA (1)...(19): siRNA sense strand
ucaagaagcccaugaucgu

SEQ ID NO: 2192424 - RNA, 19 nt, Homo sapiens
  misc_RNA (1)...(19): siRNA sense strand
gagcagcgaguccaucaag

SEQ ID NO: 2192425 - RNA, 19 nt, Homo sapiens
  misc_RNA (1)...(19): siRNA sense strand
acacgucccgcuucuacua

SEQ ID NO: 2192426 - RNA, 19 nt, Homo sapiens
  misc_RNA (1)...(19): siRNA sense strand
gaaacccaagccuuauguu

SEQ ID NO: 2192427 - RNA, 19 nt, Homo sapiens
  misc_RNA (1)...(19): siRNA sense strand
acacuaagaagaaguccaa

SEQ ID NO: 2192428 - RNA, 19 nt, Homo sapiens
  misc_RNA (1)...(19): siRNA sense strand
gcugaauacuaugaagguu

SEQ ID NO: 2192429 - RNA, 19 nt, Homo sapiens
  misc_RNA (1)...(19): siRNA sense strand
ggacucagggcagaagaug

SEQ ID NO: 2192430 - RNA, 19 nt, Homo sapiens
  misc_RNA (1)...(19): siRNA sense strand
gcagaccaccgagaacuuc

SEQ ID NO: 2192431 - RNA, 19 nt, Homo sapiens
  misc_RNA (1)...(19): siRNA sense strand
ggucuuuguuugccaagca

SEQ ID NO: 2192432 - RNA, 19 nt, Homo sapiens
  misc_RNA (1)...(19): siRNA sense strand
gugcccaccuggucuuugu

SEQ ID NO: 2192433 - RNA, 19 nt, Homo sapiens
  misc_RNA (1)...(19): siRNA sense strand
guucagaccacgaguacau

SEQ ID NO: 2192434 - RNA, 19 nt, Homo sapiens
  misc_RNA (1)...(19): siRNA sense strand
cgaggugaaugcccugaag

SEQ ID NO: 2192435 - RNA, 19 nt, Homo sapiens
  misc_RNA (1)...(19): siRNA sense strand
ccagacagagggcaucuuc

SEQ ID NO: 2192436 - RNA, 19 nt, Homo sapiens
  misc_RNA (1)...(19): siRNA sense strand
aaacccaagccuuauguug

SEQ ID NO: 2192437 - RNA, 19 nt, Homo sapiens
  misc_RNA (1)...(19): siRNA sense strand
aagagcuccuggaaagaaa

SEQ ID NO: 2192438 - RNA, 19 nt, Homo sapiens
  misc_RNA (1)...(19): siRNA sense strand
ugacacagcacauaaaaga

SEQ ID NO: 2192439 - RNA, 19 nt, Homo sapiens
  misc_RNA (1)...(19): siRNA sense strand
gcaagcggaagagcagaaa

SEQ ID NO: 2192440 - RNA, 19 nt, Homo sapiens
  misc_RNA (1)...(19): siRNA sense strand
ccauggacgugcaauucga

SEQ ID NO: 2192441 - RNA, 19 nt, Homo sapiens
  misc_RNA (1)...(19): siRNA sense strand
ggagcaggcggcuuugcaa

SEQ ID NO: 2192442 - RNA, 19 nt, Homo sapiens
  misc_RNA (1)...(19): siRNA sense strand
uaagcacguaugccaagua

SEQ ID NO: 2192443 - RNA, 19 nt, Homo sapiens
  misc_RNA (1)...(19): siRNA sense strand
aaagaaacccaagccuuau

SEQ ID NO: 2192444 - RNA, 19 nt, Homo sapiens
  misc_RNA (1)...(19): siRNA sense strand
caggcccacuuccacauga

SEQ ID NO: 2192445 - RNA, 19 nt, Homo sapiens
  misc_RNA (1)...(19): siRNA sense strand
gcccgacucacuggcauua

SEQ ID NO: 2192446 - RNA, 19 nt, Homo sapiens
  misc_RNA (1)...(19): siRNA sense strand
ccuccaagcacuucaacaa

SEQ ID NO: 2192447 - RNA, 19 nt, Homo sapiens
  misc_RNA (1)...(19): siRNA sense strand
gcacauggaccccgucaau

SEQ ID NO: 2192448 - RNA, 19 nt, Homo sapiens
  misc_RNA (1)...(19): siRNA sense strand
ucagcaaccuggccauggu

SEQ ID NO: 2192449 - RNA, 19 nt, Homo sapiens
  misc_RNA (1)...(19): siRNA sense strand
acggccagcuucuucacua

SEQ ID NO: 2192450 - RNA, 19 nt, Homo sapiens
  misc_RNA (1)...(19): siRNA sense strand
gaacacccgcaaggagaug

SEQ ID NO: 2192451 - RNA, 19 nt, Homo sapiens
  misc_RNA (1)...(19): siRNA sense strand
guucagcccguccauguuc

SEQ ID NO: 2192452 - RNA, 19 nt, Homo sapiens
  misc_RNA (1)...(19): siRNA sense strand
gauccggcaugccaagaac

SEQ ID NO: 2192453 - RNA, 19 nt, Homo sapiens
  misc_RNA (1)...(19): siRNA sense strand
gcaaugugagaaaggugaa

SEQ ID NO: 2192454 - RNA, 19 nt, Homo sapiens
  misc_RNA (1)...(19): siRNA sense strand
aacccaagccuuauguuga

SEQ ID NO: 2192455 - RNA, 19 nt, Homo sapiens
  misc_RNA (1)...(19): siRNA sense strand
ugacggcaccaucuucuuc

SEQ ID NO: 2192456 - RNA, 19 nt, Homo sapiens
  misc_RNA (1)...(19): siRNA sense strand
ccgacucacuggcauuauc

SEQ ID NO: 2192457 - RNA, 19 nt, Homo sapiens
  misc_RNA (1)...(19): siRNA sense strand
cuucuucacuacagcaugu

SEQ ID NO: 2192458 - RNA, 19 nt, Homo sapiens
  misc_RNA (1)...(19): siRNA sense strand
uggaaagaaacacuaagaa

SEQ ID NO: 2192459 - RNA, 19 nt, Homo sapiens
  misc_RNA (1)...(19): siRNA sense strand
gagugcaggagccauaaug

SEQ ID NO: 2192460 - RNA, 19 nt, Homo sapiens
  misc_RNA (1)...(19): siRNA sense strand
ccaaguacuguuaccacaa

SEQ ID NO: 2192461 - RNA, 19 nt, Homo sapiens
  misc_RNA (1)...(19): siRNA sense strand
aagaaacacuaagaagaag

SEQ ID NO: 2192462 - RNA, 19 nt, Homo sapiens
  misc_RNA (1)...(19): siRNA sense strand
cagggcagaagaugaagaa

SEQ ID NO: 2192463 - RNA, 19 nt, Homo sapiens
  misc_RNA (1)...(19): siRNA sense strand
ucuucaagcugauccagau

SEQ ID NO: 2192464 - RNA, 19 nt, Homo sapiens
  misc_RNA (1)...(19): siRNA sense strand
gagaggcuggcaccuuuca

SEQ ID NO: 2192465 - RNA, 19 nt, Homo sapiens
  misc_RNA (1)...(19): siRNA sense strand
cauuaucccugagcucauc

SEQ ID NO: 2192466 - RNA, 19 nt, Homo sapiens
  misc_RNA (1)...(19): siRNA sense strand
acucagggcagaagaugaa

SEQ ID NO: 2192467 - RNA, 19 nt, Homo sapiens
  misc_RNA (1)...(19): siRNA sense strand
caaccuggccauggugaug

SEQ ID NO: 2192468 - RNA, 19 nt, Homo sapiens
  misc_RNA (1)...(19): siRNA sense strand
ccaggcagaugcuguuucc

SEQ ID NO: 2192469 - RNA, 19 nt, Homo sapiens
  misc_RNA (1)...(19): siRNA sense strand
ggguggcgauaagcacgua

SEQ ID NO: 2192470 - RNA, 19 nt, Homo sapiens
  misc_RNA (1)...(19): siRNA sense strand
caagcgaccggcacgugaa

SEQ ID NO: 2192471 - RNA, 19 nt, Homo sapiens
  misc_RNA (1)...(19): siRNA sense strand
gcaggcccacuuccacaug

SEQ ID NO: 2192472 - RNA, 19 nt, Homo sapiens
  misc_RNA (1)...(19): siRNA sense strand
gagacuacagcaccaugga

SEQ ID NO: 2192473 - RNA, 19 nt, Homo sapiens
  misc_RNA (1)...(19): siRNA sense strand
gcccaccuggucuuuguuu

SEQ ID NO: 2192474 - RNA, 19 nt, Homo sapiens
  misc_RNA (1)...(19): siRNA sense strand
cauggagggugugcuguag

SEQ ID NO: 2192475 - RNA, 19 nt, Homo sapiens
  misc_RNA (1)...(19): siRNA sense strand
ucauggagggugugcugua

SEQ ID NO: 2192476 - RNA, 19 nt, Homo sapiens
  misc_RNA (1)...(19): siRNA sense strand
ccaacgcgacugcauccuu

SEQ ID NO: 2192477 - RNA, 19 nt, Homo sapiens
  misc_RNA (1)...(19): siRNA sense strand
agaagaaguccaaauugag

SEQ ID NO: 2192478 - RNA, 19 nt, Homo sapiens
  misc_RNA (1)...(19): siRNA sense strand
gcgaccggcacgugaagaa

SEQ ID NO: 2192479 - RNA, 19 nt, Homo sapiens
  misc_RNA (1)...(19): siRNA sense strand
gaagugggauugagacauu

SEQ ID NO: 2192480 - RNA, 19 nt, Homo sapiens
  misc_RNA (1)...(19): siRNA sense strand
ggagaaggcugugcacaaa

SEQ ID NO: 2192481 - RNA, 19 nt, Homo sapiens
  misc_RNA (1)...(19): siRNA sense strand
gggcugagcuccagggaaa

SEQ ID NO: 2192482 - RNA, 19 nt, Homo sapiens
  misc_RNA (1)...(19): siRNA sense strand
gaaucucacuuuagcuauu

SEQ ID NO: 2192483 - RNA, 19 nt, Homo sapiens
  misc_RNA (1)...(19): siRNA sense strand
ggaaagccaugcucacagu

SEQ ID NO: 2192484 - RNA, 19 nt, Homo sapiens
  misc_RNA (1)...(19): siRNA sense strand
gagcuccacuucaaugaga

SEQ ID NO: 2192485 - RNA, 19 nt, Homo sapiens
  misc_RNA (1)...(19): siRNA sense strand
gaaacuggcugccuuugcu

SEQ ID NO: 2192486 - RNA, 19 nt, Homo sapiens
  misc_RNA (1)...(19): siRNA sense strand
gggcagaacagcaaaguug

SEQ ID NO: 2192487 - RNA, 19 nt, Homo sapiens
  misc_RNA (1)...(19): siRNA sense strand
gauuacugcucccucauga

SEQ ID NO: 2192488 - RNA, 19 nt, Homo sapiens
  misc_RNA (1)...(19): siRNA sense strand
gaacccaucuaugcugaga

SEQ ID NO: 2192489 - RNA, 19 nt, Homo sapiens
  misc_RNA (1)...(19): siRNA sense strand
ggccagguaugcacaggua

SEQ ID NO: 2192490 - RNA, 19 nt, Homo sapiens
  misc_RNA (1)...(19): siRNA sense strand
ggacagaagugggauugag

SEQ ID NO: 2192491 - RNA, 19 nt, Homo sapiens
  misc_RNA (1)...(19): siRNA sense strand
agacaggcauccucaucua

SEQ ID NO: 2192492 - RNA, 19 nt, Homo sapiens
  misc_RNA (1)...(19): siRNA sense strand
cgacgaaucucacuuuagc

SEQ ID NO: 2192493 - RNA, 19 nt, Homo sapiens
  misc_RNA (1)...(19): siRNA sense strand
guaacaagcccugcuguga

SEQ ID NO: 2192494 - RNA, 19 nt, Homo sapiens
  misc_RNA (1)...(19): siRNA sense strand
agaaggcugugcacaaaga

SEQ ID NO: 2192495 - RNA, 19 nt, Homo sapiens
  misc_RNA (1)...(19): siRNA sense strand
ccacgacgaaucucacuuu

SEQ ID NO: 2192496 - RNA, 19 nt, Homo sapiens
  misc_RNA (1)...(19): siRNA sense strand
ggaccgggaugagcaaauc

SEQ ID NO: 2192497 - RNA, 19 nt, Homo sapiens
  misc_RNA (1)...(19): siRNA sense strand
gggaugccauuuauuacug

SEQ ID NO: 2192498 - RNA, 19 nt, Homo sapiens
  misc_RNA (1)...(19): siRNA sense strand
gagcaaauccgccucuuuu

SEQ ID NO: 2192499 - RNA, 19 nt, Homo sapiens
  misc_RNA (1)...(19): siRNA sense strand
aaaaggagcuccacuucaa

SEQ ID NO: 2192500 - RNA, 19 nt, Homo sapiens
  misc_RNA (1)...(19): siRNA sense strand
caagucacaggccaagaua

SEQ ID NO: 2192501 - RNA, 19 nt, Homo sapiens
  misc_RNA (1)...(19): siRNA sense strand
cacgacgaaucucacuuua

SEQ ID NO: 2192502 - RNA, 19 nt, Homo sapiens
  misc_RNA (1)...(19): siRNA sense strand
cacuuuagcuauucguuga

SEQ ID NO: 2192503 - RNA, 19 nt, Homo sapiens
  misc_RNA (1)...(19): siRNA sense strand
ugaugaaguuugcggagaa

SEQ ID NO: 2192504 - RNA, 19 nt, Homo sapiens
  misc_RNA (1)...(19): siRNA sense strand
acaacuggaucgacaugaa

SEQ ID NO: 2192505 - RNA, 19 nt, Homo sapiens
  misc_RNA (1)...(19): siRNA sense strand
ggagagcuuccgccagaaa

SEQ ID NO: 2192506 - RNA, 19 nt, Homo sapiens
  misc_RNA (1)...(19): siRNA sense strand
gcaaggagggcaccuaugc

SEQ ID NO: 2192507 - RNA, 19 nt, Homo sapiens
  misc_RNA (1)...(19): siRNA sense strand
ggaugacagugaucaaagg

SEQ ID NO: 2192508 - RNA, 19 nt, Homo sapiens
  misc_RNA (1)...(19): siRNA sense strand
gaacuccgagguaggugaa

SEQ ID NO: 2192509 - RNA, 19 nt, Homo sapiens
  misc_RNA (1)...(19): siRNA sense strand
caaccugagugccgaaguc

SEQ ID NO: 2192510 - RNA, 19 nt, Homo sapiens
  misc_RNA (1)...(19): siRNA sense strand
gaggaugacagugaucaaa

SEQ ID NO: 2192511 - RNA, 19 nt, Homo sapiens
  misc_RNA (1)...(19): siRNA sense strand
gcucaucaucagcaacuuu

SEQ ID NO: 2192512 - RNA, 19 nt, Homo sapiens
  misc_RNA (1)...(19): siRNA sense strand
gcacaacuggaucgacaug

SEQ ID NO: 2192513 - RNA, 19 nt, Homo sapiens
  misc_RNA (1)...(19): siRNA sense strand
gugaagcccaccaugauga

SEQ ID NO: 2192514 - RNA, 19 nt, Homo sapiens
  misc_RNA (1)...(19): siRNA sense strand
ggagguggagcaggaauug

SEQ ID NO: 2192515 - RNA, 19 nt, Homo sapiens
  misc_RNA (1)...(19): siRNA sense strand
gagccagaacuccgaggua

SEQ ID NO: 2192516 - RNA, 19 nt, Homo sapiens
  misc_RNA (1)...(19): siRNA sense strand
cccgagaggugccacauca

SEQ ID NO: 2192517 - RNA, 19 nt, Homo sapiens
  misc_RNA (1)...(19): siRNA sense strand
ggaugccauuuauuacugu

SEQ ID NO: 2192518 - RNA, 19 nt, Homo sapiens
  misc_RNA (1)...(19): siRNA sense strand
cagcgaggguggagaguac

SEQ ID NO: 2192519 - RNA, 19 nt, Homo sapiens
  misc_RNA (1)...(19): siRNA sense strand
gaacugccgccuggaagau

SEQ ID NO: 2192520 - RNA, 19 nt, Homo sapiens
  misc_RNA (1)...(19): siRNA sense strand
cccaaguuguccaagagua

SEQ ID NO: 2192521 - RNA, 19 nt, Homo sapiens
  misc_RNA (1)...(19): siRNA sense strand
aaacccggguccugcaaga

SEQ ID NO: 2192522 - RNA, 19 nt, Homo sapiens
  misc_RNA (1)...(19): siRNA sense strand
gacagaagugggauugaga

SEQ ID NO: 2192523 - RNA, 19 nt, Homo sapiens
  misc_RNA (1)...(19): siRNA sense strand
ggacagcccagacccaacu

SEQ ID NO: 2192524 - RNA, 19 nt, Homo sapiens
  misc_RNA (1)...(19): siRNA sense strand
gaagaugaaggugugaaca

SEQ ID NO: 2192525 - RNA, 19 nt, Homo sapiens
  misc_RNA (1)...(19): siRNA sense strand
cauccugucuucuccucuu

SEQ ID NO: 2192526 - RNA, 19 nt, Homo sapiens
  misc_RNA (1)...(19): siRNA sense strand
ccagggcucugcagaaagc

SEQ ID NO: 2192527 - RNA, 19 nt, Homo sapiens
  misc_RNA (1)...(19): siRNA sense strand
gagagcaccaagaggaaga

SEQ ID NO: 2192528 - RNA, 19 nt, Homo sapiens
  misc_RNA (1)...(19): siRNA sense strand
cgagaggugccacaucaga

SEQ ID NO: 2192529 - RNA, 19 nt, Homo sapiens
  misc_RNA (1)...(19): siRNA sense strand
caaagucgcggcaccuucu

SEQ ID NO: 2192530 - RNA, 19 nt, Homo sapiens
  misc_RNA (1)...(19): siRNA sense strand
ccacggaccauucaaacuc

SEQ ID NO: 2192531 - RNA, 19 nt, Homo sapiens
  misc_RNA (1)...(19): siRNA sense strand
ccaagucacaggccaagau

SEQ ID NO: 2192532 - RNA, 19 nt, Homo sapiens
  misc_RNA (1)...(19): siRNA sense strand
gcuccgaggccucugaugu

SEQ ID NO: 2192533 - RNA, 19 nt, Homo sapiens
  misc_RNA (1)...(19): siRNA sense strand
ucagaccgccuccgacuuc

SEQ ID NO: 2192534 - RNA, 19 nt, Homo sapiens
  misc_RNA (1)...(19): siRNA sense strand
uaacuggucgcucuucaag

SEQ ID NO: 2192535 - RNA, 19 nt, Homo sapiens
  misc_RNA (1)...(19): siRNA sense strand
guccaagaguagcccugua

SEQ ID NO: 2192536 - RNA, 19 nt, Homo sapiens
  misc_RNA (1)...(19): siRNA sense strand
ccucauuuccuuaccaaga

SEQ ID NO: 2192537 - RNA, 19 nt, Homo sapiens
  misc_RNA (1)...(19): siRNA sense strand
ccacuucaaugagaauaac

SEQ ID NO: 2192538 - RNA, 19 nt, Homo sapiens
  misc_RNA (1)...(19): siRNA sense strand
cagcuccggugccuuccaa

SEQ ID NO: 2192539 - RNA, 19 nt, Homo sapiens
  misc_RNA (1)...(19): siRNA sense strand
gaaggcugugcacaaagaa

SEQ ID NO: 2192540 - RNA, 19 nt, Homo sapiens
  misc_RNA (1)...(19): siRNA sense strand
gggcagcuuccgaggugua

SEQ ID NO: 2192541 - RNA, 19 nt, Homo sapiens
  misc_RNA (1)...(19): siRNA sense strand
gaugaaguuugcggagaag

SEQ ID NO: 2192542 - RNA, 19 nt, Homo sapiens
  misc_RNA (1)...(19): siRNA sense strand
gaauaacuggucgcucuuc

SEQ ID NO: 2192543 - RNA, 19 nt, Homo sapiens
  misc_RNA (1)...(19): siRNA sense strand
ggaaacccggguccugcaa

SEQ ID NO: 2192544 - RNA, 19 nt, Homo sapiens
  misc_RNA (1)...(19): siRNA sense strand
gggcccugaugaugaugaa

SEQ ID NO: 2192545 - RNA, 19 nt, Homo sapiens
  misc_RNA (1)...(19): siRNA sense strand
gcaccuaugcugugaaaau

SEQ ID NO: 2192546 - RNA, 19 nt, Homo sapiens
  misc_RNA (1)...(19): siRNA sense strand
cagcaaggagggcaccuau

SEQ ID NO: 2192547 - RNA, 19 nt, Homo sapiens
  misc_RNA (1)...(19): siRNA sense strand
gacagaggccaaccugagu

SEQ ID NO: 2192548 - RNA, 19 nt, Homo sapiens
  misc_RNA (1)...(19): siRNA sense strand
caacuggaucgacaugaag

SEQ ID NO: 2192549 - RNA, 19 nt, Homo sapiens
  misc_RNA (1)...(19): siRNA sense strand
gcccacaauugccgugaag

SEQ ID NO: 2192550 - RNA, 19 nt, Homo sapiens
  misc_RNA (1)...(19): siRNA sense strand
acgaaucucacuuuagcua

SEQ ID NO: 2192551 - RNA, 19 nt, Homo sapiens
  misc_RNA (1)...(19): siRNA sense strand
ugagcaaauccgccucuuu

SEQ ID NO: 2192552 - RNA, 19 nt, Homo sapiens
  misc_RNA (1)...(19): siRNA sense strand
gccgugaagcccaccauga

SEQ ID NO: 2192553 - RNA, 19 nt, Homo sapiens
  misc_RNA (1)...(19): siRNA sense strand
gagcuggaggacuggcuuu

SEQ ID NO: 2192554 - RNA, 19 nt, Homo sapiens
  misc_RNA (1)...(19): siRNA sense strand
gcacgcugcacaacuggau

SEQ ID NO: 2192555 - RNA, 19 nt, Homo sapiens
  misc_RNA (1)...(19): siRNA sense strand
gaaggagcacgggaucauc

SEQ ID NO: 2192556 - RNA, 19 nt, Homo sapiens
  misc_RNA (1)...(19): siRNA sense strand
gcagcaaggagggcaccua

SEQ ID NO: 2192557 - RNA, 19 nt, Homo sapiens
  misc_RNA (1)...(19): siRNA sense strand
aaucucacuuuagcuauuc

SEQ ID NO: 2192558 - RNA, 19 nt, Homo sapiens
  misc_RNA (1)...(19): siRNA sense strand
aaccuaagccacucggaaa

SEQ ID NO: 2192559 - RNA, 19 nt, Homo sapiens
  misc_RNA (1)...(19): siRNA sense strand
ugagaacugccgccuggaa

SEQ ID NO: 2192560 - RNA, 19 nt, Homo sapiens
  misc_RNA (1)...(19): siRNA sense strand
ggaggaugacagugaucaa

SEQ ID NO: 2192561 - RNA, 19 nt, Homo sapiens
  misc_RNA (1)...(19): siRNA sense strand
agucacaggccaagauaga

SEQ ID NO: 2192562 - RNA, 19 nt, Homo sapiens
  misc_RNA (1)...(19): siRNA sense strand
ccagacaggcauccucauc

SEQ ID NO: 2192563 - RNA, 19 nt, Homo sapiens
  misc_RNA (1)...(19): siRNA sense strand
aauaacuggucgcucuuca

SEQ ID NO: 2192564 - RNA, 19 nt, Homo sapiens
  misc_RNA (1)...(19): siRNA sense strand
ggaagaugaaggugugaac

SEQ ID NO: 2192565 - RNA, 19 nt, Homo sapiens
  misc_RNA (1)...(19): siRNA sense strand
ccaaguuguccaagaguag

SEQ ID NO: 2192566 - RNA, 19 nt, Homo sapiens
  misc_RNA (1)...(19): siRNA sense strand
gagggccugugagccagaa

SEQ ID NO: 2192567 - RNA, 19 nt, Homo sapiens
  misc_RNA (1)...(19): siRNA sense strand
ugagcaacaucagcagcaa

SEQ ID NO: 2192568 - RNA, 19 nt, Homo sapiens
  misc_RNA (1)...(19): siRNA sense strand
gagaaggcugugcacaaag

SEQ ID NO: 2192569 - RNA, 19 nt, Homo sapiens
  misc_RNA (1)...(19): siRNA sense strand
aacaagcccugcugugacu

SEQ ID NO: 2192570 - RNA, 19 nt, Homo sapiens
  misc_RNA (1)...(19): siRNA sense strand
uuacugcucccucaugaag

SEQ ID NO: 2192571 - RNA, 19 nt, Homo sapiens
  misc_RNA (1)...(19): siRNA sense strand
gaaguugccucaccugguu

SEQ ID NO: 2192572 - RNA, 19 nt, Homo sapiens
  misc_RNA (1)...(19): siRNA sense strand
gagcagauuuaaccacaug

SEQ ID NO: 2192573 - RNA, 19 nt, Homo sapiens
  misc_RNA (1)...(19): siRNA sense strand
gauuuaaccacaugaaguu

SEQ ID NO: 2192574 - RNA, 19 nt, Homo sapiens
  misc_RNA (1)...(19): siRNA sense strand
gcaagacccuuugguacca

SEQ ID NO: 2192575 - RNA, 19 nt, Homo sapiens
  misc_RNA (1)...(19): siRNA sense strand
gaaaagaaggagcagauuu

SEQ ID NO: 2192576 - RNA, 19 nt, Homo sapiens
  misc_RNA (1)...(19): siRNA sense strand
ggagugggcaagacccuuu

SEQ ID NO: 2192577 - RNA, 19 nt, Homo sapiens
  misc_RNA (1)...(19): siRNA sense strand
aaaagaaggagcagauuua

SEQ ID NO: 2192578 - RNA, 19 nt, Homo sapiens
  misc_RNA (1)...(19): siRNA sense strand
aaagaaggagcagauuuaa

SEQ ID NO: 2192579 - RNA, 19 nt, Homo sapiens
  misc_RNA (1)...(19): siRNA sense strand
ggcuggcccucgacuacua

SEQ ID NO: 2192580 - RNA, 19 nt, Homo sapiens
  misc_RNA (1)...(19): siRNA sense strand
gcagauuuaaccacaugaa

SEQ ID NO: 2192581 - RNA, 19 nt, Homo sapiens
  misc_RNA (1)...(19): siRNA sense strand
gcugguucgugcaggacua

SEQ ID NO: 2192582 - RNA, 19 nt, Homo sapiens
  misc_RNA (1)...(19): siRNA sense strand
gcaacaccuccucgugcua

SEQ ID NO: 2192583 - RNA, 19 nt, Homo sapiens
  misc_RNA (1)...(19): siRNA sense strand
ggagcagauuuaaccacau

SEQ ID NO: 2192584 - RNA, 19 nt, Homo sapiens
  misc_RNA (1)...(19): siRNA sense strand
ugccucaccugguuucuuc

SEQ ID NO: 2192585 - RNA, 19 nt, Homo sapiens
  misc_RNA (1)...(19): siRNA sense strand
agaaggagcagauuuaacc

SEQ ID NO: 2192586 - RNA, 19 nt, Homo sapiens
  misc_RNA (1)...(19): siRNA sense strand
gaaggagcagauuuaacca

SEQ ID NO: 2192587 - RNA, 19 nt, Homo sapiens
  misc_RNA (1)...(19): siRNA sense strand
ugggcaagacccuuuggua

SEQ ID NO: 2192588 - RNA, 19 nt, Homo sapiens
  misc_RNA (1)...(19): siRNA sense strand
ucacggugcaggucagcua

SEQ ID NO: 2192589 - RNA, 19 nt, Homo sapiens
  misc_RNA (1)...(19): siRNA sense strand
cgucagcaccauccaagug

SEQ ID NO: 2192590 - RNA, 19 nt, Homo sapiens
  misc_RNA (1)...(19): siRNA sense strand
ggagggaacuagccuaagu

SEQ ID NO: 2192591 - RNA, 19 nt, Homo sapiens
  misc_RNA (1)...(19): siRNA sense strand
caggagggaacuagccuaa

SEQ ID NO: 2192592 - RNA, 19 nt, Homo sapiens
  misc_RNA (1)...(19): siRNA sense strand
agaagacgacggcggagaa

SEQ ID NO: 2192593 - RNA, 19 nt, Homo sapiens
  misc_RNA (1)...(19): siRNA sense strand
ucacggugcaggucagcua

SEQ ID NO: 2192594 - RNA, 19 nt, Homo sapiens
  misc_RNA (1)...(19): siRNA sense strand
gagggaacuagccuaagug

SEQ ID NO: 2192595 - RNA, 19 nt, Homo sapiens
  misc_RNA (1)...(19): siRNA sense strand
cgucagcaccauccaagug

SEQ ID NO: 2192596 - RNA, 19 nt, Homo sapiens
  misc_RNA (1)...(19): siRNA sense strand
gaagacgacggcggagaag

SEQ ID NO: 2192597 - RNA, 19 nt, Homo sapiens
  misc_RNA (1)...(19): siRNA sense strand
gaucugaccuguaugguaa

SEQ ID NO: 2192598 - RNA, 19 nt, Homo sapiens
  misc_RNA (1)...(19): siRNA sense strand
gaaaccaccuuaccuuaaa

SEQ ID NO: 2192599 - RNA, 19 nt, Homo sapiens
  misc_RNA (1)...(19): siRNA sense strand
gaacuucuaugucaucuug

SEQ ID NO: 2192600 - RNA, 19 nt, Homo sapiens
  misc_RNA (1)...(19): siRNA sense strand
gccaaagacugaaauaauu

SEQ ID NO: 2192601 - RNA, 19 nt, Homo sapiens
  misc_RNA (1)...(19): siRNA sense strand
caacaaggaucuucucuag

SEQ ID NO: 2192602 - RNA, 19 nt, Homo sapiens
  misc_RNA (1)...(19): siRNA sense strand
ggagaaagauggagacgau

SEQ ID NO: 2192603 - RNA, 19 nt, Homo sapiens
  misc_RNA (1)...(19): siRNA sense strand
gaaaaugaauuccguauug

SEQ ID NO: 2192604 - RNA, 19 nt, Homo sapiens
  misc_RNA (1)...(19): siRNA sense strand
uuaaagaucugaccuguau

SEQ ID NO: 2192605 - RNA, 19 nt, Homo sapiens
  misc_RNA (1)...(19): siRNA sense strand
agaaacagcagcaaauuua

SEQ ID NO: 2192606 - RNA, 19 nt, Homo sapiens
  misc_RNA (1)...(19): siRNA sense strand
gaaguggcaugauaaagga

SEQ ID NO: 2192607 - RNA, 19 nt, Homo sapiens
  misc_RNA (1)...(19): siRNA sense strand
gaaaggaaaggaaguagaa

SEQ ID NO: 2192608 - RNA, 19 nt, Homo sapiens
  misc_RNA (1)...(19): siRNA sense strand
ggacuugaagaacuaauua

SEQ ID NO: 2192609 - RNA, 19 nt, Homo sapiens
  misc_RNA (1)...(19): siRNA sense strand
ugccuuagcuaaagaaaua

SEQ ID NO: 2192610 - RNA, 19 nt, Homo sapiens
  misc_RNA (1)...(19): siRNA sense strand
caccuuaccuuaaagaauu

SEQ ID NO: 2192611 - RNA, 19 nt, Homo sapiens
  misc_RNA (1)...(19): siRNA sense strand
cgaccaaacugaaacuauu

SEQ ID NO: 2192612 - RNA, 19 nt, Homo sapiens
  misc_RNA (1)...(19): siRNA sense strand
gagucuuccucuuuaauua

SEQ ID NO: 2192613 - RNA, 19 nt, Homo sapiens
  misc_RNA (1)...(19): siRNA sense strand
gcagagcauaucagaauua

SEQ ID NO: 2192614 - RNA, 19 nt, Homo sapiens
  misc_RNA (1)...(19): siRNA sense strand
gacaugagcuggcacaaca

SEQ ID NO: 2192615 - RNA, 19 nt, Homo sapiens
  misc_RNA (1)...(19): siRNA sense strand
aaaugagucuuccucuuua

SEQ ID NO: 2192616 - RNA, 19 nt, Homo sapiens
  misc_RNA (1)...(19): siRNA sense strand
gaaagugacuauggaaaca

SEQ ID NO: 2192617 - RNA, 19 nt, Homo sapiens
  misc_RNA (1)...(19): siRNA sense strand
cuaaagaaauagccaaaga

SEQ ID NO: 2192618 - RNA, 19 nt, Homo sapiens
  misc_RNA (1)...(19): siRNA sense strand
uaacagcaccuaucgauga

SEQ ID NO: 2192619 - RNA, 19 nt, Homo sapiens
  misc_RNA (1)...(19): siRNA sense strand
gaaagacaaaugaaaguga

SEQ ID NO: 2192620 - RNA, 19 nt, Homo sapiens
  misc_RNA (1)...(19): siRNA sense strand
gcaacaacuucaucaacuu

SEQ ID NO: 2192621 - RNA, 19 nt, Homo sapiens
  misc_RNA (1)...(19): siRNA sense strand
uauguaagcucaucuuuag

SEQ ID NO: 2192622 - RNA, 19 nt, Homo sapiens
  misc_RNA (1)...(19): siRNA sense strand
gccaaggaaucacuaauau

SEQ ID NO: 2192623 - RNA, 19 nt, Homo sapiens
  misc_RNA (1)...(19): siRNA sense strand
gagcauaucagaauuaucu

SEQ ID NO: 2192624 - RNA, 19 nt, Homo sapiens
  misc_RNA (1)...(19): siRNA sense strand
gccagaagauuucaagaug

SEQ ID NO: 2192625 - RNA, 19 nt, Homo sapiens
  misc_RNA (1)...(19): siRNA sense strand
ugaauuccguauugcuuua

SEQ ID NO: 2192626 - RNA, 19 nt, Homo sapiens
  misc_RNA (1)...(19): siRNA sense strand
gaucugucaucuaaucaaa

SEQ ID NO: 2192627 - RNA, 19 nt, Homo sapiens
  misc_RNA (1)...(19): siRNA sense strand
acaagaggaucaccuuaaa

SEQ ID NO: 2192628 - RNA, 19 nt, Homo sapiens
  misc_RNA (1)...(19): siRNA sense strand
caaaugaaagugauaguga

SEQ ID NO: 2192629 - RNA, 19 nt, Homo sapiens
  misc_RNA (1)...(19): siRNA sense strand
cagaagauuucaagauguu

SEQ ID NO: 2192630 - RNA, 19 nt, Homo sapiens
  misc_RNA (1)...(19): siRNA sense strand
aaucggaaguggcaugaua

SEQ ID NO: 2192631 - RNA, 19 nt, Homo sapiens
  misc_RNA (1)...(19): siRNA sense strand
gcaaguacaccaagugaug

SEQ ID NO: 2192632 - RNA, 19 nt, Homo sapiens
  misc_RNA (1)...(19): siRNA sense strand
gaccaaacugaaacuauua

SEQ ID NO: 2192633 - RNA, 19 nt, Homo sapiens
  misc_RNA (1)...(19): siRNA sense strand
ggacuaaacacacugacaa

SEQ ID NO: 2192634 - RNA, 19 nt, Homo sapiens
  misc_RNA (1)...(19): siRNA sense strand
agaaggacuugaagaacua

SEQ ID NO: 2192635 - RNA, 19 nt, Homo sapiens
  misc_RNA (1)...(19): siRNA sense strand
ggaaaggcacaaugaaaga

SEQ ID NO: 2192636 - RNA, 19 nt, Homo sapiens
  misc_RNA (1)...(19): siRNA sense strand
agagagaaauuccaaagga

SEQ ID NO: 2192637 - RNA, 19 nt, Homo sapiens
  misc_RNA (1)...(19): siRNA sense strand
cagcaaauuuacagaauca

SEQ ID NO: 2192638 - RNA, 19 nt, Homo sapiens
  misc_RNA (1)...(19): siRNA sense strand
gaguuuaucuagagagaau

SEQ ID NO: 2192639 - RNA, 19 nt, Homo sapiens
  misc_RNA (1)...(19): siRNA sense strand
gauagaaugccagugauaa

SEQ ID NO: 2192640 - RNA, 19 nt, Homo sapiens
  misc_RNA (1)...(19): siRNA sense strand
gaacaagcgcaacaacuuc

SEQ ID NO: 2192641 - RNA, 19 nt, Homo sapiens
  misc_RNA (1)...(19): siRNA sense strand
cagauaggcuaaaggaaau

SEQ ID NO: 2192642 - RNA, 19 nt, Homo sapiens
  misc_RNA (1)...(19): siRNA sense strand
caaagucacucagaagaca

SEQ ID NO: 2192643 - RNA, 19 nt, Homo sapiens
  misc_RNA (1)...(19): siRNA sense strand
gagaguuuaucuagagaga

SEQ ID NO: 2192644 - RNA, 19 nt, Homo sapiens
  misc_RNA (1)...(19): siRNA sense strand
gaacuucucaagcacgaaa

SEQ ID NO: 2192645 - RNA, 19 nt, Homo sapiens
  misc_RNA (1)...(19): siRNA sense strand
gaagaugacaagcagaaga

SEQ ID NO: 2192646 - RNA, 19 nt, Homo sapiens
  misc_RNA (1)...(19): siRNA sense strand
gcagcaggcagcacagaua

SEQ ID NO: 2192647 - RNA, 19 nt, Homo sapiens
  misc_RNA (1)...(19): siRNA sense strand
caacaagaggaucaccuua

SEQ ID NO: 2192648 - RNA, 19 nt, Homo sapiens
  misc_RNA (1)...(19): siRNA sense strand
caacacccuugaaauuuua

SEQ ID NO: 2192649 - RNA, 19 nt, Homo sapiens
  misc_RNA (1)...(19): siRNA sense strand
uugaugagcugcauaaaca

SEQ ID NO: 2192650 - RNA, 19 nt, Homo sapiens
  misc_RNA (1)...(19): siRNA sense strand
ggaucaccuuaaacacuua

SEQ ID NO: 2192651 - RNA, 19 nt, Homo sapiens
  misc_RNA (1)...(19): siRNA sense strand
agcaaacuguccuauguua

SEQ ID NO: 2192652 - RNA, 19 nt, Homo sapiens
  misc_RNA (1)...(19): siRNA sense strand
ggaaguggcaugauaaagg

SEQ ID NO: 2192653 - RNA, 19 nt, Homo sapiens
  misc_RNA (1)...(19): siRNA sense strand
gcagcaaauuuacagaauc

SEQ ID NO: 2192654 - RNA, 19 nt, Homo sapiens
  misc_RNA (1)...(19): siRNA sense strand
guacagagcaguuauucuc

SEQ ID NO: 2192655 - RNA, 19 nt, Homo sapiens
  misc_RNA (1)...(19): siRNA sense strand
gaacuugaagaaaucagaa

SEQ ID NO: 2192656 - RNA, 19 nt, Homo sapiens
  misc_RNA (1)...(19): siRNA sense strand
ugauagugaugcauuaaga

SEQ ID NO: 2192657 - RNA, 19 nt, Homo sapiens
  misc_RNA (1)...(19): siRNA sense strand
ugaaaccaccuuaccuuaa

SEQ ID NO: 2192658 - RNA, 19 nt, Homo sapiens
  misc_RNA (1)...(19): siRNA sense strand
uagaaggucuuuuggauaa

SEQ ID NO: 2192659 - RNA, 19 nt, Homo sapiens
  misc_RNA (1)...(19): siRNA sense strand
gaaaggcacaaugaaagaa

SEQ ID NO: 2192660 - RNA, 19 nt, Homo sapiens
  misc_RNA (1)...(19): siRNA sense strand
caagaaacagcagcaaauu

SEQ ID NO: 2192661 - RNA, 19 nt, Homo sapiens
  misc_RNA (1)...(19): siRNA sense strand
gaacacaggaaggaacuug

SEQ ID NO: 2192662 - RNA, 19 nt, Homo sapiens
  misc_RNA (1)...(19): siRNA sense strand
agauaagacugauccaaga

SEQ ID NO: 2192663 - RNA, 19 nt, Homo sapiens
  misc_RNA (1)...(19): siRNA sense strand
gaacagcuagaccaagaga

SEQ ID NO: 2192664 - RNA, 19 nt, Homo sapiens
  misc_RNA (1)...(19): siRNA sense strand
gaucuuaguggauugauuc

SEQ ID NO: 2192665 - RNA, 19 nt, Homo sapiens
  misc_RNA (1)...(19): siRNA sense strand
gaaugaaugucugcgaaag

SEQ ID NO: 2192666 - RNA, 19 nt, Homo sapiens
  misc_RNA (1)...(19): siRNA sense strand
ccagaagauuucaagaugu

SEQ ID NO: 2192667 - RNA, 19 nt, Homo sapiens
  misc_RNA (1)...(19): siRNA sense strand
acagauaggcuaaaggaaa

SEQ ID NO: 2192668 - RNA, 19 nt, Homo sapiens
  misc_RNA (1)...(19): siRNA sense strand
uuagcaaacuguccuaugu

SEQ ID NO: 2192669 - RNA, 19 nt, Homo sapiens
  misc_RNA (1)...(19): siRNA sense strand
gaaagauggagacgauaau

SEQ ID NO: 2192670 - RNA, 19 nt, Homo sapiens
  misc_RNA (1)...(19): siRNA sense strand
gaaaaugagucuuccucuu

SEQ ID NO: 2192671 - RNA, 19 nt, Homo sapiens
  misc_RNA (1)...(19): siRNA sense strand
cgaagccauugaucauauu

SEQ ID NO: 2192672 - RNA, 19 nt, Homo sapiens
  misc_RNA (1)...(19): siRNA sense strand
gaaaagaucacagaaauag

SEQ ID NO: 2192673 - RNA, 19 nt, Homo sapiens
  misc_RNA (1)...(19): siRNA sense strand
agaaauagccaaagaagag

SEQ ID NO: 2192674 - RNA, 19 nt, Homo sapiens
  misc_RNA (1)...(19): siRNA sense strand
gauaggcuaaaggaaauua

SEQ ID NO: 2192675 - RNA, 19 nt, Homo sapiens
  misc_RNA (1)...(19): siRNA sense strand
ccacagauaggcuaaagga

SEQ ID NO: 2192676 - RNA, 19 nt, Homo sapiens
  misc_RNA (1)...(19): siRNA sense strand
ucgaagccauugaucauau

SEQ ID NO: 2192677 - RNA, 19 nt, Homo sapiens
  misc_RNA (1)...(19): siRNA sense strand
ugaccaaauucuacaacuu

SEQ ID NO: 2192678 - RNA, 19 nt, Homo sapiens
  misc_RNA (1)...(19): siRNA sense strand
gaccaaauucuacaacuuc

SEQ ID NO: 2192679 - RNA, 19 nt, Homo sapiens
  misc_RNA (1)...(19): siRNA sense strand
agagaaaauugacguguua

SEQ ID NO: 2192680 - RNA, 19 nt, Homo sapiens
  misc_RNA (1)...(19): siRNA sense strand
agaccaaagucacucagaa

SEQ ID NO: 2192681 - RNA, 19 nt, Homo sapiens
  misc_RNA (1)...(19): siRNA sense strand
ugacaaaacugugcacauu

SEQ ID NO: 2192682 - RNA, 19 nt, Homo sapiens
  misc_RNA (1)...(19): siRNA sense strand
gaugacaagcagaagagua

SEQ ID NO: 2192683 - RNA, 19 nt, Homo sapiens
  misc_RNA (1)...(19): siRNA sense strand
aaacaaaacuggcagaagu

SEQ ID NO: 2192684 - RNA, 19 nt, Homo sapiens
  misc_RNA (1)...(19): siRNA sense strand
cauagucuggcucuacuua

SEQ ID NO: 2192685 - RNA, 19 nt, Homo sapiens
  misc_RNA (1)...(19): siRNA sense strand
ccaaaaccauucaaacuau

SEQ ID NO: 2192686 - RNA, 19 nt, Homo sapiens
  misc_RNA (1)...(19): siRNA sense strand
caauagauaacguucuuga

SEQ ID NO: 2192687 - RNA, 19 nt, Homo sapiens
  misc_RNA (1)...(19): siRNA sense strand
caguuauucuccagacuuu

SEQ ID NO: 2192688 - RNA, 19 nt, Homo sapiens
  misc_RNA (1)...(19): siRNA sense strand
uagaaggacuugaagaacu

SEQ ID NO: 2192689 - RNA, 19 nt, Homo sapiens
  misc_RNA (1)...(19): siRNA sense strand
cagaaaagcuuacaguaca

SEQ ID NO: 2192690 - RNA, 19 nt, Homo sapiens
  misc_RNA (1)...(19): siRNA sense strand
gaaauagccaaagaagaga

SEQ ID NO: 2192691 - RNA, 19 nt, Homo sapiens
  misc_RNA (1)...(19): siRNA sense strand
gcaggcagcacagauaaga

SEQ ID NO: 2192692 - RNA, 19 nt, Homo sapiens
  misc_RNA (1)...(19): siRNA sense strand
acucagaagacaacacuua

SEQ ID NO: 2192693 - RNA, 19 nt, Homo sapiens
  misc_RNA (1)...(19): siRNA sense strand
ugacuagacuaaauguauc

SEQ ID NO: 2192694 - RNA, 19 nt, Homo sapiens
  misc_RNA (1)...(19): siRNA sense strand
gaaggacuaaacacacuga

SEQ ID NO: 2192695 - RNA, 19 nt, Homo sapiens
  misc_RNA (1)...(19): siRNA sense strand
gaagaaaucagaaaagcuu

SEQ ID NO: 2192696 - RNA, 19 nt, Homo sapiens
  misc_RNA (1)...(19): siRNA sense strand
uggaugagguacuugagaa

SEQ ID NO: 2192697 - RNA, 19 nt, Homo sapiens
  misc_RNA (1)...(19): siRNA sense strand
gagcaggacucacauguua

SEQ ID NO: 2192698 - RNA, 19 nt, Homo sapiens
  misc_RNA (1)...(19): siRNA sense strand
caagacagaucaaugguua

SEQ ID NO: 2192699 - RNA, 19 nt, Homo sapiens
  misc_RNA (1)...(19): siRNA sense strand
gccagaagcuuuaugguua

SEQ ID NO: 2192700 - RNA, 19 nt, Homo sapiens
  misc_RNA (1)...(19): siRNA sense strand
gaacaggacagagaaauua

SEQ ID NO: 2192701 - RNA, 19 nt, Homo sapiens
  misc_RNA (1)...(19): siRNA sense strand
gaaacaacauuggcuuuaa

SEQ ID NO: 2192702 - RNA, 19 nt, Homo sapiens
  misc_RNA (1)...(19): siRNA sense strand
gaauuggucuugcacagua

SEQ ID NO: 2192703 - RNA, 19 nt, Homo sapiens
  misc_RNA (1)...(19): siRNA sense strand
ggaccacacuugacaguuu

SEQ ID NO: 2192704 - RNA, 19 nt, Homo sapiens
  misc_RNA (1)...(19): siRNA sense strand
ggaauggacuacaauguga

SEQ ID NO: 2192705 - RNA, 19 nt, Homo sapiens
  misc_RNA (1)...(19): siRNA sense strand
uaacaggucuugcuuugaa

SEQ ID NO: 2192706 - RNA, 19 nt, Homo sapiens
  misc_RNA (1)...(19): siRNA sense strand
ccacacagauauugaauug

SEQ ID NO: 2192707 - RNA, 19 nt, Homo sapiens
  misc_RNA (1)...(19): siRNA sense strand
gaucaaugguuaucgaauu

SEQ ID NO: 2192708 - RNA, 19 nt, Homo sapiens
  misc_RNA (1)...(19): siRNA sense strand
ggacuacaaugugaagaua

SEQ ID NO: 2192709 - RNA, 19 nt, Homo sapiens
  misc_RNA (1)...(19): siRNA sense strand
gugaaaggcuauagaauug

SEQ ID NO: 2192710 - RNA, 19 nt, Homo sapiens
  misc_RNA (1)...(19): siRNA sense strand
gcacucauguguacaaugu

SEQ ID NO: 2192711 - RNA, 19 nt, Homo sapiens
  misc_RNA (1)...(19): siRNA sense strand
ggacucacauguuauugaa

SEQ ID NO: 2192712 - RNA, 19 nt, Homo sapiens
  misc_RNA (1)...(19): siRNA sense strand
ggagagacccacacagaua

SEQ ID NO: 2192713 - RNA, 19 nt, Homo sapiens
  misc_RNA (1)...(19): siRNA sense strand
uauaaccgguugcgcauua

SEQ ID NO: 2192714 - RNA, 19 nt, Homo sapiens
  misc_RNA (1)...(19): siRNA sense strand
cuacaaaccugucaguguu

SEQ ID NO: 2192715 - RNA, 19 nt, Homo sapiens
  misc_RNA (1)...(19): siRNA sense strand
ccacaagguuaagauauaa

SEQ ID NO: 2192716 - RNA, 19 nt, Homo sapiens
  misc_RNA (1)...(19): siRNA sense strand
ugaaugagcugcaggagau

SEQ ID NO: 2192717 - RNA, 19 nt, Homo sapiens
  misc_RNA (1)...(19): siRNA sense strand
cagaagaagugaaauuugu

SEQ ID NO: 2192718 - RNA, 19 nt, Homo sapiens
  misc_RNA (1)...(19): siRNA sense strand
guauacagauuucauggaa

SEQ ID NO: 2192719 - RNA, 19 nt, Homo sapiens
  misc_RNA (1)...(19): siRNA sense strand
ggugguagauggaacugua

SEQ ID NO: 2192720 - RNA, 19 nt, Homo sapiens
  misc_RNA (1)...(19): siRNA sense strand
gacauuaacaccauccuua

SEQ ID NO: 2192721 - RNA, 19 nt, Homo sapiens
  misc_RNA (1)...(19): siRNA sense strand
uccgaaaccucccauauaa

SEQ ID NO: 2192722 - RNA, 19 nt, Homo sapiens
  misc_RNA (1)...(19): siRNA sense strand
ggugaaaggcuauagaauu

SEQ ID NO: 2192723 - RNA, 19 nt, Homo sapiens
  misc_RNA (1)...(19): siRNA sense strand
gaagucauaggaacgguua

SEQ ID NO: 2192724 - RNA, 19 nt, Homo sapiens
  misc_RNA (1)...(19): siRNA sense strand
guacaauguugccgaauuc

SEQ ID NO: 2192725 - RNA, 19 nt, Homo sapiens
  misc_RNA (1)...(19): siRNA sense strand
gagggaaauuuggugguua

SEQ ID NO: 2192726 - RNA, 19 nt, Homo sapiens
  misc_RNA (1)...(19): siRNA sense strand
gaaaggcuauagaauuguc

SEQ ID NO: 2192727 - RNA, 19 nt, Homo sapiens
  misc_RNA (1)...(19): siRNA sense strand
gaauacacagucacaguuu

SEQ ID NO: 2192728 - RNA, 19 nt, Homo sapiens
  misc_RNA (1)...(19): siRNA sense strand
ccagaagcuuuaugguuaa

SEQ ID NO: 2192729 - RNA, 19 nt, Homo sapiens
  misc_RNA (1)...(19): siRNA sense strand
cccacaagguuaagauaua

SEQ ID NO: 2192730 - RNA, 19 nt, Homo sapiens
  misc_RNA (1)...(19): siRNA sense strand
gcaacuaaagcaauuauuc

SEQ ID NO: 2192731 - RNA, 19 nt, Homo sapiens
  misc_RNA (1)...(19): siRNA sense strand
uguaauaucucaugacagu

SEQ ID NO: 2192732 - RNA, 19 nt, Homo sapiens
  misc_RNA (1)...(19): siRNA sense strand
gaauggcacuugaaugcau

SEQ ID NO: 2192733 - RNA, 19 nt, Homo sapiens
  misc_RNA (1)...(19): siRNA sense strand
ggaccuagugugagcauaa

SEQ ID NO: 2192734 - RNA, 19 nt, Homo sapiens
  misc_RNA (1)...(19): siRNA sense strand
gaacagcaugcgagucaaa

SEQ ID NO: 2192735 - RNA, 19 nt, Homo sapiens
  misc_RNA (1)...(19): siRNA sense strand
cuacggaguugauuacuuc

SEQ ID NO: 2192736 - RNA, 19 nt, Homo sapiens
  misc_RNA (1)...(19): siRNA sense strand
gaugguucauggaguauug

SEQ ID NO: 2192737 - RNA, 19 nt, Homo sapiens
  misc_RNA (1)...(19): siRNA sense strand
gagcugacauuaacaccau

SEQ ID NO: 2192738 - RNA, 19 nt, Homo sapiens
  misc_RNA (1)...(19): siRNA sense strand
agaaccagcuacaaccaua

SEQ ID NO: 2192739 - RNA, 19 nt, Homo sapiens
  misc_RNA (1)...(19): siRNA sense strand
gagaacagcaugcgaguca

SEQ ID NO: 2192740 - RNA, 19 nt, Homo sapiens
  misc_RNA (1)...(19): siRNA sense strand
gaugugggcucagagaaga

SEQ ID NO: 2192741 - RNA, 19 nt, Homo sapiens
  misc_RNA (1)...(19): siRNA sense strand
gauugaagcuguccgaaac

SEQ ID NO: 2192742 - RNA, 19 nt, Homo sapiens
  misc_RNA (1)...(19): siRNA sense strand
gaaagaagagcaggacuca

SEQ ID NO: 2192743 - RNA, 19 nt, Homo sapiens
  misc_RNA (1)...(19): siRNA sense strand
ggaagaacaggacagagaa

SEQ ID NO: 2192744 - RNA, 19 nt, Homo sapiens
  misc_RNA (1)...(19): siRNA sense strand
ccaagaaaccugagaaucu

SEQ ID NO: 2192745 - RNA, 19 nt, Homo sapiens
  misc_RNA (1)...(19): siRNA sense strand
cuucugaccuucuacugua

SEQ ID NO: 2192746 - RNA, 19 nt, Homo sapiens
  misc_RNA (1)...(19): siRNA sense strand
gcaggacucacauguuauu

SEQ ID NO: 2192747 - RNA, 19 nt, Homo sapiens
  misc_RNA (1)...(19): siRNA sense strand
gcaauuauucaaggccuua

SEQ ID NO: 2192748 - RNA, 19 nt, Homo sapiens
  misc_RNA (1)...(19): siRNA sense strand
acacagauauugaauugag

SEQ ID NO: 2192749 - RNA, 19 nt, Homo sapiens
  misc_RNA (1)...(19): siRNA sense strand
gcucaaggccaauucagaa

SEQ ID NO: 2192750 - RNA, 19 nt, Homo sapiens
  misc_RNA (1)...(19): siRNA sense strand
gaccagaauuacacaguuc

SEQ ID NO: 2192751 - RNA, 19 nt, Homo sapiens
  misc_RNA (1)...(19): siRNA sense strand
agacagcacucauguguac

SEQ ID NO: 2192752 - RNA, 19 nt, Homo sapiens
  misc_RNA (1)...(19): siRNA sense strand
ggaaucagaaaccuaguug

SEQ ID NO: 2192753 - RNA, 19 nt, Homo sapiens
  misc_RNA (1)...(19): siRNA sense strand
gaagggcuacacaaauuga

SEQ ID NO: 2192754 - RNA, 19 nt, Homo sapiens
  misc_RNA (1)...(19): siRNA sense strand
guugaagucgauccuauua

SEQ ID NO: 2192755 - RNA, 19 nt, Homo sapiens
  misc_RNA (1)...(19): siRNA sense strand
gaagaacaggacagagaaa

SEQ ID NO: 2192756 - RNA, 19 nt, Homo sapiens
  misc_RNA (1)...(19): siRNA sense strand
uaaaggaggaaauacacua

SEQ ID NO: 2192757 - RNA, 19 nt, Homo sapiens
  misc_RNA (1)...(19): siRNA sense strand
aaucagaaaccuaguugua

SEQ ID NO: 2192758 - RNA, 19 nt, Homo sapiens
  misc_RNA (1)...(19): siRNA sense strand
ggacagaaccagcuacaac

SEQ ID NO: 2192759 - RNA, 19 nt, Homo sapiens
  misc_RNA (1)...(19): siRNA sense strand
gcccagcaauacuuagaaa

SEQ ID NO: 2192760 - RNA, 19 nt, Homo sapiens
  misc_RNA (1)...(19): siRNA sense strand
agaauagaauggcacuuga

SEQ ID NO: 2192761 - RNA, 19 nt, Homo sapiens
  misc_RNA (1)...(19): siRNA sense strand
augaagggcuacacaaauu

SEQ ID NO: 2192762 - RNA, 19 nt, Homo sapiens
  misc_RNA (1)...(19): siRNA sense strand
gaugaagggcuacacaaau

SEQ ID NO: 2192763 - RNA, 19 nt, Homo sapiens
  misc_RNA (1)...(19): siRNA sense strand
ccagcaauacuuagaaauu

SEQ ID NO: 2192764 - RNA, 19 nt, Homo sapiens
  misc_RNA (1)...(19): siRNA sense strand
uaacagugcucgauuaacc

SEQ ID NO: 2192765 - RNA, 19 nt, Homo sapiens
  misc_RNA (1)...(19): siRNA sense strand
guccgaaaccucccauaua

SEQ ID NO: 2192766 - RNA, 19 nt, Homo sapiens
  misc_RNA (1)...(19): siRNA sense strand
gcacuugaaugcauuuagc

SEQ ID NO: 2192767 - RNA, 19 nt, Homo sapiens
  misc_RNA (1)...(19): siRNA sense strand
gaauagaauggcacuugaa

SEQ ID NO: 2192768 - RNA, 19 nt, Homo sapiens
  misc_RNA (1)...(19): siRNA sense strand
gauacugaauacaaaguca

SEQ ID NO: 2192769 - RNA, 19 nt, Homo sapiens
  misc_RNA (1)...(19): siRNA sense strand
gaagucgauccuauuacua

SEQ ID NO: 2192770 - RNA, 19 nt, Homo sapiens
  misc_RNA (1)...(19): siRNA sense strand
aauacacagucacaguuua

SEQ ID NO: 2192771 - RNA, 19 nt, Homo sapiens
  misc_RNA (1)...(19): siRNA sense strand
gcaagaugcgguacugguu

SEQ ID NO: 2192772 - RNA, 19 nt, Homo sapiens
  misc_RNA (1)...(19): siRNA sense strand
gaucugaugcacacaguug

SEQ ID NO: 2192773 - RNA, 19 nt, Homo sapiens
  misc_RNA (1)...(19): siRNA sense strand
gaaccagacagcacucaug

SEQ ID NO: 2192774 - RNA, 19 nt, Homo sapiens
  misc_RNA (1)...(19): siRNA sense strand
cacaaaagaugaagugauu

SEQ ID NO: 2192775 - RNA, 19 nt, Homo sapiens
  misc_RNA (1)...(19): siRNA sense strand
aaacaacauuggcuuuaag

SEQ ID NO: 2192776 - RNA, 19 nt, Homo sapiens
  misc_RNA (1)...(19): siRNA sense strand
gaagcuuuaugguuaacug

SEQ ID NO: 2192777 - RNA, 19 nt, Homo sapiens
  misc_RNA (1)...(19): siRNA sense strand
ucagagaagacacgaauug

SEQ ID NO: 2192778 - RNA, 19 nt, Homo sapiens
  misc_RNA (1)...(19): siRNA sense strand
gagagacccacacagauau

SEQ ID NO: 2192779 - RNA, 19 nt, Homo sapiens
  misc_RNA (1)...(19): siRNA sense strand
ccauauaaaggaggaaaua

SEQ ID NO: 2192780 - RNA, 19 nt, Homo sapiens
  misc_RNA (1)...(19): siRNA sense strand
guagaacuguuugccauag

SEQ ID NO: 2192781 - RNA, 19 nt, Homo sapiens
  misc_RNA (1)...(19): siRNA sense strand
ccaaacauguugaaaugac

SEQ ID NO: 2192782 - RNA, 19 nt, Homo sapiens
  misc_RNA (1)...(19): siRNA sense strand
agaaacaacauuggcuuua

SEQ ID NO: 2192783 - RNA, 19 nt, Homo sapiens
  misc_RNA (1)...(19): siRNA sense strand
cggaguugauuacuucuga

SEQ ID NO: 2192784 - RNA, 19 nt, Homo sapiens
  misc_RNA (1)...(19): siRNA sense strand
cgaaaccucccauauaaag

SEQ ID NO: 2192785 - RNA, 19 nt, Homo sapiens
  misc_RNA (1)...(19): siRNA sense strand
agccaaacauguugaaaug

SEQ ID NO: 2192786 - RNA, 19 nt, Homo sapiens
  misc_RNA (1)...(19): siRNA sense strand
acaccauccuuaucacaaa

SEQ ID NO: 2192787 - RNA, 19 nt, Homo sapiens
  misc_RNA (1)...(19): siRNA sense strand
ugaauugaguggguuguug

SEQ ID NO: 2192788 - RNA, 19 nt, Homo sapiens
  misc_RNA (1)...(19): siRNA sense strand
gauggcuucugaccuucua

SEQ ID NO: 2192789 - RNA, 19 nt, Homo sapiens
  misc_RNA (1)...(19): siRNA sense strand
gcucuagaguggaagaaca

SEQ ID NO: 2192790 - RNA, 19 nt, Homo sapiens
  misc_RNA (1)...(19): siRNA sense strand
acuaacaggucuugcuuug

SEQ ID NO: 2192791 - RNA, 19 nt, Homo sapiens
  misc_RNA (1)...(19): siRNA sense strand
aaacuaaccagcugaaucu

SEQ ID NO: 2192792 - RNA, 19 nt, Homo sapiens
  misc_RNA (1)...(19): siRNA sense strand
guuuauuucugcaccauug

SEQ ID NO: 2192793 - RNA, 19 nt, Homo sapiens
  misc_RNA (1)...(19): siRNA sense strand
ugaagucgauccuauuacu

SEQ ID NO: 2192794 - RNA, 19 nt, Homo sapiens
  misc_RNA (1)...(19): siRNA sense strand
ggacaagaaacaacauugg

SEQ ID NO: 2192795 - RNA, 19 nt, Homo sapiens
  misc_RNA (1)...(19): siRNA sense strand
ugaaacuacacuugcuuua

SEQ ID NO: 2192796 - RNA, 19 nt, Homo sapiens
  misc_RNA (1)...(19): siRNA sense strand
ggaguugauuacuucugaa

SEQ ID NO: 2192797 - RNA, 19 nt, Homo sapiens
  misc_RNA (1)...(19): siRNA sense strand
gaaguaaccuaccagauua

SEQ ID NO: 2192798 - RNA, 19 nt, Homo sapiens
  misc_RNA (1)...(19): siRNA sense strand
gcauuuagaucaucacaaa

SEQ ID NO: 2192799 - RNA, 19 nt, Homo sapiens
  misc_RNA (1)...(19): siRNA sense strand
gaacaucuacccauacuuu

SEQ ID NO: 2192800 - RNA, 19 nt, Homo sapiens
  misc_RNA (1)...(19): siRNA sense strand
ucacagacguuaugacuuu

SEQ ID NO: 2192801 - RNA, 19 nt, Homo sapiens
  misc_RNA (1)...(19): siRNA sense strand
ggaaguaaccuaccagauu

SEQ ID NO: 2192802 - RNA, 19 nt, Homo sapiens
  misc_RNA (1)...(19): siRNA sense strand
gaagaucgacuuucuagaa

SEQ ID NO: 2192803 - RNA, 19 nt, Homo sapiens
  misc_RNA (1)...(19): siRNA sense strand
ggaaguggauauaguguug

SEQ ID NO: 2192804 - RNA, 19 nt, Homo sapiens
  misc_RNA (1)...(19): siRNA sense strand
ggauguagcugaccuaaag

SEQ ID NO: 2192805 - RNA, 19 nt, Homo sapiens
  misc_RNA (1)...(19): siRNA sense strand
caaauuugcuucaugauag

SEQ ID NO: 2192806 - RNA, 19 nt, Homo sapiens
  misc_RNA (1)...(19): siRNA sense strand
gagcagggauguugucaga

SEQ ID NO: 2192807 - RNA, 19 nt, Homo sapiens
  misc_RNA (1)...(19): siRNA sense strand
gauauaguguugagagauu

SEQ ID NO: 2192808 - RNA, 19 nt, Homo sapiens
  misc_RNA (1)...(19): siRNA sense strand
ggucagaaaucaugauguu

SEQ ID NO: 2192809 - RNA, 19 nt, Homo sapiens
  misc_RNA (1)...(19): siRNA sense strand
cagcauaccucaacuuugu

SEQ ID NO: 2192810 - RNA, 19 nt, Homo sapiens
  misc_RNA (1)...(19): siRNA sense strand
gaacuucgggccaccauuu

SEQ ID NO: 2192811 - RNA, 19 nt, Homo sapiens
  misc_RNA (1)...(19): siRNA sense strand
gaggauaauuugccaaugu

SEQ ID NO: 2192812 - RNA, 19 nt, Homo sapiens
  misc_RNA (1)...(19): siRNA sense strand
gcacauauauuuggguugu

SEQ ID NO: 2192813 - RNA, 19 nt, Homo sapiens
  misc_RNA (1)...(19): siRNA sense strand
ugauagacuugcccaaaua

SEQ ID NO: 2192814 - RNA, 19 nt, Homo sapiens
  misc_RNA (1)...(19): siRNA sense strand
ucauagugauccagaaaua

SEQ ID NO: 2192815 - RNA, 19 nt, Homo sapiens
  misc_RNA (1)...(19): siRNA sense strand
cuauugaacuggcuaauga

SEQ ID NO: 2192816 - RNA, 19 nt, Homo sapiens
  misc_RNA (1)...(19): siRNA sense strand
gaacagagauacgaauugc

SEQ ID NO: 2192817 - RNA, 19 nt, Homo sapiens
  misc_RNA (1)...(19): siRNA sense strand
gagaugaaguuuccagauc

SEQ ID NO: 2192818 - RNA, 19 nt, Homo sapiens
  misc_RNA (1)...(19): siRNA sense strand
gcagaaugcuaucauccaa

SEQ ID NO: 2192819 - RNA, 19 nt, Homo sapiens
  misc_RNA (1)...(19): siRNA sense strand
uagcugaccuaaagauaaa

SEQ ID NO: 2192820 - RNA, 19 nt, Homo sapiens
  misc_RNA (1)...(19): siRNA sense strand
gaaacuggaucgaauuggu

SEQ ID NO: 2192821 - RNA, 19 nt, Homo sapiens
  misc_RNA (1)...(19): siRNA sense strand
guugagagauugucaguuc

SEQ ID NO: 2192822 - RNA, 19 nt, Homo sapiens
  misc_RNA (1)...(19): siRNA sense strand
uaucagaggucagaaauca

SEQ ID NO: 2192823 - RNA, 19 nt, Homo sapiens
  misc_RNA (1)...(19): siRNA sense strand
ggugaccucuggauauaaa

SEQ ID NO: 2192824 - RNA, 19 nt, Homo sapiens
  misc_RNA (1)...(19): siRNA sense strand
uugcugagaucuuugcuua

SEQ ID NO: 2192825 - RNA, 19 nt, Homo sapiens
  misc_RNA (1)...(19): siRNA sense strand
guuagaggcuguugccauu

SEQ ID NO: 2192826 - RNA, 19 nt, Homo sapiens
  misc_RNA (1)...(19): siRNA sense strand
ugaacuggcuaaugaagaa

SEQ ID NO: 2192827 - RNA, 19 nt, Homo sapiens
  misc_RNA (1)...(19): siRNA sense strand
ggaagacaacguucagaaa

SEQ ID NO: 2192828 - RNA, 19 nt, Homo sapiens
  misc_RNA (1)...(19): siRNA sense strand
gcugagaucuuugcuuaug

SEQ ID NO: 2192829 - RNA, 19 nt, Homo sapiens
  misc_RNA (1)...(19): siRNA sense strand
cagagaaacuggaucgaau

SEQ ID NO: 2192830 - RNA, 19 nt, Homo sapiens
  misc_RNA (1)...(19): siRNA sense strand
gaaguaaugcauaaucuca

SEQ ID NO: 2192831 - RNA, 19 nt, Homo sapiens
  misc_RNA (1)...(19): siRNA sense strand
caaagacaaugaugagaag

SEQ ID NO: 2192832 - RNA, 19 nt, Homo sapiens
  misc_RNA (1)...(19): siRNA sense strand
gcaaaacagucaacgauga

SEQ ID NO: 2192833 - RNA, 19 nt, Homo sapiens
  misc_RNA (1)...(19): siRNA sense strand
uggcaaagcugcuggaauc

SEQ ID NO: 2192834 - RNA, 19 nt, Homo sapiens
  misc_RNA (1)...(19): siRNA sense strand
gcagacaagacacaaguuu

SEQ ID NO: 2192835 - RNA, 19 nt, Homo sapiens
  misc_RNA (1)...(19): siRNA sense strand
ggucuuuccuggauccuuu

SEQ ID NO: 2192836 - RNA, 19 nt, Homo sapiens
  misc_RNA (1)...(19): siRNA sense strand
uguaggcagugucaacuua

SEQ ID NO: 2192837 - RNA, 19 nt, Homo sapiens
  misc_RNA (1)...(19): siRNA sense strand
gaacacugaccauuacuuc

SEQ ID NO: 2192838 - RNA, 19 nt, Homo sapiens
  misc_RNA (1)...(19): siRNA sense strand
acagugcaauuaucaauga

SEQ ID NO: 2192839 - RNA, 19 nt, Homo sapiens
  misc_RNA (1)...(19): siRNA sense strand
cugaugaugugguuaguaa

SEQ ID NO: 2192840 - RNA, 19 nt, Homo sapiens
  misc_RNA (1)...(19): siRNA sense strand
caacauauucccugaagau

SEQ ID NO: 2192841 - RNA, 19 nt, Homo sapiens
  misc_RNA (1)...(19): siRNA sense strand
cgacagugcuggaagucuu

SEQ ID NO: 2192842 - RNA, 19 nt, Homo sapiens
  misc_RNA (1)...(19): siRNA sense strand
uaauguugcugagaucuuu

SEQ ID NO: 2192843 - RNA, 19 nt, Homo sapiens
  misc_RNA (1)...(19): siRNA sense strand
gcauuaagccauuuguaga

SEQ ID NO: 2192844 - RNA, 19 nt, Homo sapiens
  misc_RNA (1)...(19): siRNA sense strand
gaagaaguaguuauugauc

SEQ ID NO: 2192845 - RNA, 19 nt, Homo sapiens
  misc_RNA (1)...(19): siRNA sense strand
guagcugaccuaaagauaa

SEQ ID NO: 2192846 - RNA, 19 nt, Homo sapiens
  misc_RNA (1)...(19): siRNA sense strand
gcauauggauaagauuguu

SEQ ID NO: 2192847 - RNA, 19 nt, Homo sapiens
  misc_RNA (1)...(19): siRNA sense strand
gaaccucagcauauggaua

SEQ ID NO: 2192848 - RNA, 19 nt, Homo sapiens
  misc_RNA (1)...(19): siRNA sense strand
ccaaagacaaugaugagaa

SEQ ID NO: 2192849 - RNA, 19 nt, Homo sapiens
  misc_RNA (1)...(19): siRNA sense strand
agaaauagcagcacagugu

SEQ ID NO: 2192850 - RNA, 19 nt, Homo sapiens
  misc_RNA (1)...(19): siRNA sense strand
gacaacauauucccugaag

SEQ ID NO: 2192851 - RNA, 19 nt, Homo sapiens
  misc_RNA (1)...(19): siRNA sense strand
cagauaauguugcugagau

SEQ ID NO: 2192852 - RNA, 19 nt, Homo sapiens
  misc_RNA (1)...(19): siRNA sense strand
ccagaaauacgaacagaga

SEQ ID NO: 2192853 - RNA, 19 nt, Homo sapiens
  misc_RNA (1)...(19): siRNA sense strand
ggacagugcaauuaucaau

SEQ ID NO: 2192854 - RNA, 19 nt, Homo sapiens
  misc_RNA (1)...(19): siRNA sense strand
uuacaggacagugcaauua

SEQ ID NO: 2192855 - RNA, 19 nt, Homo sapiens
  misc_RNA (1)...(19): siRNA sense strand
gaaguugacagucgcauag

SEQ ID NO: 2192856 - RNA, 19 nt, Homo sapiens
  misc_RNA (1)...(19): siRNA sense strand
ggagaauucagauaauguu

SEQ ID NO: 2192857 - RNA, 19 nt, Homo sapiens
  misc_RNA (1)...(19): siRNA sense strand
cagagcauaucuucagaga

SEQ ID NO: 2192858 - RNA, 19 nt, Homo sapiens
  misc_RNA (1)...(19): siRNA sense strand
caagacacaaguuucauga

SEQ ID NO: 2192859 - RNA, 19 nt, Homo sapiens
  misc_RNA (1)...(19): siRNA sense strand
gcacuggaccaacuucuca

SEQ ID NO: 2192860 - RNA, 19 nt, Homo sapiens
  misc_RNA (1)...(19): siRNA sense strand
gauugucaguuccguaugu

SEQ ID NO: 2192861 - RNA, 19 nt, Homo sapiens
  misc_RNA (1)...(19): siRNA sense strand
uuuccuggauccuuuguua

SEQ ID NO: 2192862 - RNA, 19 nt, Homo sapiens
  misc_RNA (1)...(19): siRNA sense strand
ccaggagaauucagauaau

SEQ ID NO: 2192863 - RNA, 19 nt, Homo sapiens
  misc_RNA (1)...(19): siRNA sense strand
agacaaugaugagaagauu

SEQ ID NO: 2192864 - RNA, 19 nt, Homo sapiens
  misc_RNA (1)...(19): siRNA sense strand
agaaauacgaacagagaua

SEQ ID NO: 2192865 - RNA, 19 nt, Homo sapiens
  misc_RNA (1)...(19): siRNA sense strand
gagaaacuggaucgaauug

SEQ ID NO: 2192866 - RNA, 19 nt, Homo sapiens
  misc_RNA (1)...(19): siRNA sense strand
uaguaacacugaagaaauc

SEQ ID NO: 2192867 - RNA, 19 nt, Homo sapiens
  misc_RNA (1)...(19): siRNA sense strand
ggaagccccuuauuuucua

SEQ ID NO: 2192868 - RNA, 19 nt, Homo sapiens
  misc_RNA (1)...(19): siRNA sense strand
auacuucucuugcucuuau

SEQ ID NO: 2192869 - RNA, 19 nt, Homo sapiens
  misc_RNA (1)...(19): siRNA sense strand
gaacuacuuuauacuucuc

SEQ ID NO: 2192870 - RNA, 19 nt, Homo sapiens
  misc_RNA (1)...(19): siRNA sense strand
gauauaaagcgaagacgau

SEQ ID NO: 2192871 - RNA, 19 nt, Homo sapiens
  misc_RNA (1)...(19): siRNA sense strand
gauagaagaaguugacagu

SEQ ID NO: 2192872 - RNA, 19 nt, Homo sapiens
  misc_RNA (1)...(19): siRNA sense strand
aaccaaagcuucaaguucu

SEQ ID NO: 2192873 - RNA, 19 nt, Homo sapiens
  misc_RNA (1)...(19): siRNA sense strand
gcauaggcccuccuucuuc

SEQ ID NO: 2192874 - RNA, 19 nt, Homo sapiens
  misc_RNA (1)...(19): siRNA sense strand
ucaaagcauuaagccauuu

SEQ ID NO: 2192875 - RNA, 19 nt, Homo sapiens
  misc_RNA (1)...(19): siRNA sense strand
caggaacacugaccauuac

SEQ ID NO: 2192876 - RNA, 19 nt, Homo sapiens
  misc_RNA (1)...(19): siRNA sense strand
gauaagugcaugcuuccaa

SEQ ID NO: 2192877 - RNA, 19 nt, Homo sapiens
  misc_RNA (1)...(19): siRNA sense strand
gcaagguuauugaaauucg

SEQ ID NO: 2192878 - RNA, 19 nt, Homo sapiens
  misc_RNA (1)...(19): siRNA sense strand
gaagacaacguucagaaaa

SEQ ID NO: 2192879 - RNA, 19 nt, Homo sapiens
  misc_RNA (1)...(19): siRNA sense strand
gagaagauugugcagaaug

SEQ ID NO: 2192880 - RNA, 19 nt, Homo sapiens
  misc_RNA (1)...(19): siRNA sense strand
gaagacacaccauccuauc

SEQ ID NO: 2192881 - RNA, 19 nt, Homo sapiens
  misc_RNA (1)...(19): siRNA sense strand
cgaguaugcugcugcuguu

SEQ ID NO: 2192882 - RNA, 19 nt, Homo sapiens
  misc_RNA (1)...(19): siRNA sense strand
uuccaucccuccuguuuaa

SEQ ID NO: 2192883 - RNA, 19 nt, Homo sapiens
  misc_RNA (1)...(19): siRNA sense strand
aaagcgaagacgauuguua

SEQ ID NO: 2192884 - RNA, 19 nt, Homo sapiens
  misc_RNA (1)...(19): siRNA sense strand
caggagaauucagauaaug

SEQ ID NO: 2192885 - RNA, 19 nt, Homo sapiens
  misc_RNA (1)...(19): siRNA sense strand
ggcagugucaacuuaaaua

SEQ ID NO: 2192886 - RNA, 19 nt, Homo sapiens
  misc_RNA (1)...(19): siRNA sense strand
uaaagaggaagacaacguu

SEQ ID NO: 2192887 - RNA, 19 nt, Homo sapiens
  misc_RNA (1)...(19): siRNA sense strand
gaagaaagcaauugauacc

SEQ ID NO: 2192888 - RNA, 19 nt, Homo sapiens
  misc_RNA (1)...(19): siRNA sense strand
caagagaggagcacugaca

SEQ ID NO: 2192889 - RNA, 19 nt, Homo sapiens
  misc_RNA (1)...(19): siRNA sense strand
gagauugucaguuccguau

SEQ ID NO: 2192890 - RNA, 19 nt, Homo sapiens
  misc_RNA (1)...(19): siRNA sense strand
gcauaccucaacuuuguaa

SEQ ID NO: 2192891 - RNA, 19 nt, Homo sapiens
  misc_RNA (1)...(19): siRNA sense strand
ucucagcguugaauucgaa

SEQ ID NO: 2192892 - RNA, 19 nt, Homo sapiens
  misc_RNA (1)...(19): siRNA sense strand
gcuaaugaagaaguaguua

SEQ ID NO: 2192893 - RNA, 19 nt, Homo sapiens
  misc_RNA (1)...(19): siRNA sense strand
acaaacgccugguggacaa

SEQ ID NO: 2192894 - RNA, 19 nt, Homo sapiens
  misc_RNA (1)...(19): siRNA sense strand
gaauucagauaauguugcu

SEQ ID NO: 2192895 - RNA, 19 nt, Homo sapiens
  misc_RNA (1)...(19): siRNA sense strand
ggaaccaggagaauucaga

SEQ ID NO: 2192896 - RNA, 19 nt, Homo sapiens
  misc_RNA (1)...(19): siRNA sense strand
ucagaaaucaugauguuca

SEQ ID NO: 2192897 - RNA, 19 nt, Homo sapiens
  misc_RNA (1)...(19): siRNA sense strand
ggaauugaaugcagcuauu

SEQ ID NO: 2192898 - RNA, 19 nt, Homo sapiens
  misc_RNA (1)...(19): siRNA sense strand
caagaggacccuaacauuu

SEQ ID NO: 2192899 - RNA, 19 nt, Homo sapiens
  misc_RNA (1)...(19): siRNA sense strand
gauuacugaucucucauua

SEQ ID NO: 2192900 - RNA, 19 nt, Homo sapiens
  misc_RNA (1)...(19): siRNA sense strand
gaaaucuucucugguuaaa

SEQ ID NO: 2192901 - RNA, 19 nt, Homo sapiens
  misc_RNA (1)...(19): siRNA sense strand
uauuguagcuugugaaaug

SEQ ID NO: 2192902 - RNA, 19 nt, Homo sapiens
  misc_RNA (1)...(19): siRNA sense strand
aaauggaacugaaaucuuc

SEQ ID NO: 2192903 - RNA, 19 nt, Homo sapiens
  misc_RNA (1)...(19): siRNA sense strand
uaaaggcaaucaaccaaau

SEQ ID NO: 2192904 - RNA, 19 nt, Homo sapiens
  misc_RNA (1)...(19): siRNA sense strand
uggaaucaauguuguauga

SEQ ID NO: 2192905 - RNA, 19 nt, Homo sapiens
  misc_RNA (1)...(19): siRNA sense strand
cuacccagcuucugaauuc

SEQ ID NO: 2192906 - RNA, 19 nt, Homo sapiens
  misc_RNA (1)...(19): siRNA sense strand
gaaauggaacugaaaucuu

SEQ ID NO: 2192907 - RNA, 19 nt, Homo sapiens
  misc_RNA (1)...(19): siRNA sense strand
guauaggccucauguuuua

SEQ ID NO: 2192908 - RNA, 19 nt, Homo sapiens
  misc_RNA (1)...(19): siRNA sense strand
ucaucgagcucaaguggaa

SEQ ID NO: 2192909 - RNA, 19 nt, Homo sapiens
  misc_RNA (1)...(19): siRNA sense strand
acugaaaucuucucugguu

SEQ ID NO: 2192910 - RNA, 19 nt, Homo sapiens
  misc_RNA (1)...(19): siRNA sense strand
ggagguggaaucaauguug

SEQ ID NO: 2192911 - RNA, 19 nt, Homo sapiens
  misc_RNA (1)...(19): siRNA sense strand
gggcaugggucugaugaug

SEQ ID NO: 2192912 - RNA, 19 nt, Homo sapiens
  misc_RNA (1)...(19): siRNA sense strand
gcucuucauucuacaacaa

SEQ ID NO: 2192913 - RNA, 19 nt, Homo sapiens
  misc_RNA (1)...(19): siRNA sense strand
ggaggaagcggccugaaag

SEQ ID NO: 2192914 - RNA, 19 nt, Homo sapiens
  misc_RNA (1)...(19): siRNA sense strand
gagguggaaucaauguugu

SEQ ID NO: 2192915 - RNA, 19 nt, Homo sapiens
  misc_RNA (1)...(19): siRNA sense strand
ugaaaucuucucugguuaa

SEQ ID NO: 2192916 - RNA, 19 nt, Homo sapiens
  misc_RNA (1)...(19): siRNA sense strand
gcaugggucugaugauggu

SEQ ID NO: 2192917 - RNA, 19 nt, Homo sapiens
  misc_RNA (1)...(19): siRNA sense strand
cccagcuucugaauucuua

SEQ ID NO: 2192918 - RNA, 19 nt, Homo sapiens
  misc_RNA (1)...(19): siRNA sense strand
gggaggaagcggccugaaa

SEQ ID NO: 2192919 - RNA, 19 nt, Homo sapiens
  misc_RNA (1)...(19): siRNA sense strand
acaagaggacccuaacauu

SEQ ID NO: 2192920 - RNA, 19 nt, Homo sapiens
  misc_RNA (1)...(19): siRNA sense strand
aaguauaggccucauguuu

SEQ ID NO: 2192921 - RNA, 19 nt, Homo sapiens
  misc_RNA (1)...(19): siRNA sense strand
gcuucagaaugcaguguuu

SEQ ID NO: 2192922 - RNA, 19 nt, Homo sapiens
  misc_RNA (1)...(19): siRNA sense strand
gcaccuucaucgcccaugu

SEQ ID NO: 2192923 - RNA, 19 nt, Homo sapiens
  misc_RNA (1)...(19): siRNA sense strand
aaucuucucugguuaaagg

SEQ ID NO: 2192924 - RNA, 19 nt, Homo sapiens
  misc_RNA (1)...(19): siRNA sense strand
gaauugaaugcagcuauug

SEQ ID NO: 2192925 - RNA, 19 nt, Homo sapiens
  misc_RNA (1)...(19): siRNA sense strand
gagaagcugagcgcgguua

SEQ ID NO: 2192926 - RNA, 19 nt, Homo sapiens
  misc_RNA (1)...(19): siRNA sense strand
gcuucugaauucuuacuug

SEQ ID NO: 2192927 - RNA, 19 nt, Homo sapiens
  misc_RNA (1)...(19): siRNA sense strand
cugaaaucuucucugguua

SEQ ID NO: 2192928 - RNA, 19 nt, Homo sapiens
  misc_RNA (1)...(19): siRNA sense strand
guaccacccugcggacaau

SEQ ID NO: 2192929 - RNA, 19 nt, Homo sapiens
  misc_RNA (1)...(19): siRNA sense strand
aaaggcaaucaaccaaaua

SEQ ID NO: 2192930 - RNA, 19 nt, Homo sapiens
  misc_RNA (1)...(19): siRNA sense strand
ggaagaugucauugcagaa

SEQ ID NO: 2192931 - RNA, 19 nt, Homo sapiens
  misc_RNA (1)...(19): siRNA sense strand
gaagaugucauugcagaac

SEQ ID NO: 2192932 - RNA, 19 nt, Homo sapiens
  misc_RNA (1)...(19): siRNA sense strand
caacaagaggacccuaaca

SEQ ID NO: 2192933 - RNA, 19 nt, Homo sapiens
  misc_RNA (1)...(19): siRNA sense strand
gacugacacccauaccuuu

SEQ ID NO: 2192934 - RNA, 19 nt, Homo sapiens
  misc_RNA (1)...(19): siRNA sense strand
guuaaaggcaaucaaccaa

SEQ ID NO: 2192935 - RNA, 19 nt, Homo sapiens
  misc_RNA (1)...(19): siRNA sense strand
uuacugaucucucauuacc

SEQ ID NO: 2192936 - RNA, 19 nt, Homo sapiens
  misc_RNA (1)...(19): siRNA sense strand
gaagcugagcgcgguuauu

SEQ ID NO: 2192937 - RNA, 19 nt, Homo sapiens
  misc_RNA (1)...(19): siRNA sense strand
gaucagcaacgaccuaagc

SEQ ID NO: 2192938 - RNA, 19 nt, Homo sapiens
  misc_RNA (1)...(19): siRNA sense strand
acagaguguuaguggauau

SEQ ID NO: 2192939 - RNA, 19 nt, Homo sapiens
  misc_RNA (1)...(19): siRNA sense strand
cuugugaaauggaacugaa

SEQ ID NO: 2192940 - RNA, 19 nt, Homo sapiens
  misc_RNA (1)...(19): siRNA sense strand
caguggcucuucauucuac

SEQ ID NO: 2192941 - RNA, 19 nt, Homo sapiens
  misc_RNA (1)...(19): siRNA sense strand
ccaaauaccaguggcucuu

SEQ ID NO: 2192942 - RNA, 19 nt, Homo sapiens
  misc_RNA (1)...(19): siRNA sense strand
uuaaaggcaaucaaccaaa

SEQ ID NO: 2192943 - RNA, 19 nt, Homo sapiens
  misc_RNA (1)...(19): siRNA sense strand
agacugacacccauaccuu

SEQ ID NO: 2192944 - RNA, 19 nt, Homo sapiens
  misc_RNA (1)...(19): siRNA sense strand
ugaaauggaacugaaaucu

SEQ ID NO: 2192945 - RNA, 19 nt, Homo sapiens
  misc_RNA (1)...(19): siRNA sense strand
gcuucaucguggucucuuu

SEQ ID NO: 2192946 - RNA, 19 nt, Homo sapiens
  misc_RNA (1)...(19): siRNA sense strand
aaauaccaguggcucuuca

SEQ ID NO: 2192947 - RNA, 19 nt, Homo sapiens
  misc_RNA (1)...(19): siRNA sense strand
aagcugagcgcgguuauuc

SEQ ID NO: 2192948 - RNA, 19 nt, Homo sapiens
  misc_RNA (1)...(19): siRNA sense strand
gaggaagcggccugaaagu

SEQ ID NO: 2192949 - RNA, 19 nt, Homo sapiens
  misc_RNA (1)...(19): siRNA sense strand
gaucucucauuacccaacu

SEQ ID NO: 2192950 - RNA, 19 nt, Homo sapiens
  misc_RNA (1)...(19): siRNA sense strand
gguggaaucaauguuguau

SEQ ID NO: 2192951 - RNA, 19 nt, Homo sapiens
  misc_RNA (1)...(19): siRNA sense strand
aagaggacccuaacauuuu

SEQ ID NO: 2192952 - RNA, 19 nt, Homo sapiens
  misc_RNA (1)...(19): siRNA sense strand
ccaguggcucuucauucua

SEQ ID NO: 2192953 - RNA, 19 nt, Homo sapiens
  misc_RNA (1)...(19): siRNA sense strand
caaauaccaguggcucuuc

SEQ ID NO: 2192954 - RNA, 19 nt, Homo sapiens
  misc_RNA (1)...(19): siRNA sense strand
cgauuacugaucucucauu

SEQ ID NO: 2192955 - RNA, 19 nt, Homo sapiens
  misc_RNA (1)...(19): siRNA sense strand
accaguggcucuucauucu

SEQ ID NO: 2192956 - RNA, 19 nt, Homo sapiens
  misc_RNA (1)...(19): siRNA sense strand
ucacgggagcggaccagaa

SEQ ID NO: 2192957 - RNA, 19 nt, Homo sapiens
  misc_RNA (1)...(19): siRNA sense strand
ccucauguuuuauguaguu

SEQ ID NO: 2192958 - RNA, 19 nt, Homo sapiens
  misc_RNA (1)...(19): siRNA sense strand
gaguguuaguggauauuuu

SEQ ID NO: 2192959 - RNA, 19 nt, Homo sapiens
  misc_RNA (1)...(19): siRNA sense strand
gguaccacccugcggacaa

SEQ ID NO: 2192960 - RNA, 19 nt, Homo sapiens
  misc_RNA (1)...(19): siRNA sense strand
uacaacaagaggacccuaa

SEQ ID NO: 2192961 - RNA, 19 nt, Homo sapiens
  misc_RNA (1)...(19): siRNA sense strand
ggcaaucaaccaaauacca

SEQ ID NO: 2192962 - RNA, 19 nt, Homo sapiens
  misc_RNA (1)...(19): siRNA sense strand
ggccagacugacacccaua

SEQ ID NO: 2192963 - RNA, 19 nt, Homo sapiens
  misc_RNA (1)...(19): siRNA sense strand
gaaauacagcuacaaagaa

SEQ ID NO: 2192964 - RNA, 19 nt, Homo sapiens
  misc_RNA (1)...(19): siRNA sense strand
ucaauagccugcccgauuu

SEQ ID NO: 2192965 - RNA, 19 nt, Homo sapiens
  misc_RNA (1)...(19): siRNA sense strand
ggagagcacaccuacuuua

SEQ ID NO: 2192966 - RNA, 19 nt, Homo sapiens
  misc_RNA (1)...(19): siRNA sense strand
uaaaugauucccuacguua

SEQ ID NO: 2192967 - RNA, 19 nt, Homo sapiens
  misc_RNA (1)...(19): siRNA sense strand
caacgacgccuccaaguuc

SEQ ID NO: 2192968 - RNA, 19 nt, Homo sapiens
  misc_RNA (1)...(19): siRNA sense strand
aaaguuaaaucccuuaugg

SEQ ID NO: 2192969 - RNA, 19 nt, Homo sapiens
  misc_RNA (1)...(19): siRNA sense strand
aagaaugcccuaaaccuua

SEQ ID NO: 2192970 - RNA, 19 nt, Homo sapiens
  misc_RNA (1)...(19): siRNA sense strand
ugaaauacagcuacaaaga

SEQ ID NO: 2192971 - RNA, 19 nt, Homo sapiens
  misc_RNA (1)...(19): siRNA sense strand
ggaaacaggagcccacaga

SEQ ID NO: 2192972 - RNA, 19 nt, Homo sapiens
  misc_RNA (1)...(19): siRNA sense strand
gccuagagcuggagaaucu

SEQ ID NO: 2192973 - RNA, 19 nt, Homo sapiens
  misc_RNA (1)...(19): siRNA sense strand
caaguucacucugccauuc

SEQ ID NO: 2192974 - RNA, 19 nt, Homo sapiens
  misc_RNA (1)...(19): siRNA sense strand
cgucauggcugagcuaugu

SEQ ID NO: 2192975 - RNA, 19 nt, Homo sapiens
  misc_RNA (1)...(19): siRNA sense strand
ggaaguaaccauggaaaca

SEQ ID NO: 2192976 - RNA, 19 nt, Homo sapiens
  misc_RNA (1)...(19): siRNA sense strand
ggaggucccuucggucaau

SEQ ID NO: 2192977 - RNA, 19 nt, Homo sapiens
  misc_RNA (1)...(19): siRNA sense strand
aaauacagcuacaaagaag

SEQ ID NO: 2192978 - RNA, 19 nt, Homo sapiens
  misc_RNA (1)...(19): siRNA sense strand
gcuggagaaucuuucagaa

SEQ ID NO: 2192979 - RNA, 19 nt, Homo sapiens
  misc_RNA (1)...(19): siRNA sense strand
gcgcagcugugacuuugga

SEQ ID NO: 2192980 - RNA, 19 nt, Homo sapiens
  misc_RNA (1)...(19): siRNA sense strand
caagaaugcccuaaaccuu

SEQ ID NO: 2192981 - RNA, 19 nt, Homo sapiens
  misc_RNA (1)...(19): siRNA sense strand
gccaggagaucgaguacug

SEQ ID NO: 2192982 - RNA, 19 nt, Homo sapiens
  misc_RNA (1)...(19): siRNA sense strand
caucaacgaguucuucauu

SEQ ID NO: 2192983 - RNA, 19 nt, Homo sapiens
  misc_RNA (1)...(19): siRNA sense strand
agaaugcccuaaaccuuau

SEQ ID NO: 2192984 - RNA, 19 nt, Homo sapiens
  misc_RNA (1)...(19): siRNA sense strand
uuaaaugauucccuacguu

SEQ ID NO: 2192985 - RNA, 19 nt, Homo sapiens
  misc_RNA (1)...(19): siRNA sense strand
guggagcacuuuggcauug

SEQ ID NO: 2192986 - RNA, 19 nt, Homo sapiens
  misc_RNA (1)...(19): siRNA sense strand
cagcuaccauggccgcaaa

SEQ ID NO: 2192987 - RNA, 19 nt, Homo sapiens
  misc_RNA (1)...(19): siRNA sense strand
guggagagcacaccuacuu

SEQ ID NO: 2192988 - RNA, 19 nt, Homo sapiens
  misc_RNA (1)...(19): siRNA sense strand
ccuacgugcugcauuucua

SEQ ID NO: 2192989 - RNA, 19 nt, Homo sapiens
  misc_RNA (1)...(19): siRNA sense strand
agcaggagcucaccaagug

SEQ ID NO: 2192990 - RNA, 19 nt, Homo sapiens
  misc_RNA (1)...(19): siRNA sense strand
gagagcacaccuacuuuag

SEQ ID NO: 2192991 - RNA, 19 nt, Homo sapiens
  misc_RNA (1)...(19): siRNA sense strand
gcaagccugacgaacauga

SEQ ID NO: 2192992 - RNA, 19 nt, Homo sapiens
  misc_RNA (1)...(19): siRNA sense strand
auacagcuacaaagaagua

SEQ ID NO: 2192993 - RNA, 19 nt, Homo sapiens
  misc_RNA (1)...(19): siRNA sense strand
cgaaaucguggagcacuuu

SEQ ID NO: 2192994 - RNA, 19 nt, Homo sapiens
  misc_RNA (1)...(19): siRNA sense strand
gaaguaaccauggaaacag

SEQ ID NO: 2192995 - RNA, 19 nt, Homo sapiens
  misc_RNA (1)...(19): siRNA sense strand
uggcaagccugacgaacau

SEQ ID NO: 2192996 - RNA, 19 nt, Homo sapiens
  misc_RNA (1)...(19): siRNA sense strand
ccgcaacccugagcucuuc

SEQ ID NO: 2192997 - RNA, 19 nt, Homo sapiens
  misc_RNA (1)...(19): siRNA sense strand
cuaugugucuucuccuuca

SEQ ID NO: 2192998 - RNA, 19 nt, Homo sapiens
  misc_RNA (1)...(19): siRNA sense strand
cucaauagccugcccgauu

SEQ ID NO: 2192999 - RNA, 19 nt, Homo sapiens
  misc_RNA (1)...(19): siRNA sense strand
ccacgucuuccuucgauga

SEQ ID NO: 2193000 - RNA, 19 nt, Homo sapiens
  misc_RNA (1)...(19): siRNA sense strand
ggagauccgcaucaaugug

SEQ ID NO: 2193001 - RNA, 19 nt, Homo sapiens
  misc_RNA (1)...(19): siRNA sense strand
gaaaucguggagcacuuug

SEQ ID NO: 2193002 - RNA, 19 nt, Homo sapiens
  misc_RNA (1)...(19): siRNA sense strand
caccacgucuuccuucgau

SEQ ID NO: 2193003 - RNA, 19 nt, Homo sapiens
  misc_RNA (1)...(19): siRNA sense strand
uaccauggccgcaaaguag

SEQ ID NO: 2193004 - RNA, 19 nt, Homo sapiens
  misc_RNA (1)...(19): siRNA sense strand
cggcaagcuucacgucaug

SEQ ID NO: 2193005 - RNA, 19 nt, Homo sapiens
  misc_RNA (1)...(19): siRNA sense strand
gaucuuccgcaucuuaaag

SEQ ID NO: 2193006 - RNA, 19 nt, Homo sapiens
  misc_RNA (1)...(19): siRNA sense strand
gacccuagguucgaaaucg

SEQ ID NO: 2193007 - RNA, 19 nt, Homo sapiens
  misc_RNA (1)...(19): siRNA sense strand
gaagugggacgagcagagu

SEQ ID NO: 2193008 - RNA, 19 nt, Homo sapiens
  misc_RNA (1)...(19): siRNA sense strand
gaugagauccuugccuucu

SEQ ID NO: 2193009 - RNA, 19 nt, Homo sapiens
  misc_RNA (1)...(19): siRNA sense strand
uuauugaccucauguccau

SEQ ID NO: 2193010 - RNA, 19 nt, Homo sapiens
  misc_RNA (1)...(19): siRNA sense strand
cgaggacccuagguucgaa

SEQ ID NO: 2193011 - RNA, 19 nt, Homo sapiens
  misc_RNA (1)...(19): siRNA sense strand
ugagauccuugccuucuac

SEQ ID NO: 2193012 - RNA, 19 nt, Homo sapiens
  misc_RNA (1)...(19): siRNA sense strand
acucugccauucaaggaaa

SEQ ID NO: 2193013 - RNA, 19 nt, Homo sapiens
  misc_RNA (1)...(19): siRNA sense strand
gugcugcauuucuaucaca

SEQ ID NO: 2193014 - RNA, 19 nt, Homo sapiens
  misc_RNA (1)...(19): siRNA sense strand
ggucccuucggucaauuua

SEQ ID NO: 2193015 - RNA, 19 nt, Homo sapiens
  misc_RNA (1)...(19): siRNA sense strand
caggagagcaccacgucuu

SEQ ID NO: 2193016 - RNA, 19 nt, Homo sapiens
  misc_RNA (1)...(19): siRNA sense strand
cuaccauggccgcaaagua

SEQ ID NO: 2193017 - RNA, 19 nt, Homo sapiens
  misc_RNA (1)...(19): siRNA sense strand
cuucaagaaugcccuaaac

SEQ ID NO: 2193018 - RNA, 19 nt, Homo sapiens
  misc_RNA (1)...(19): siRNA sense strand
acaacgacgccuccaaguu

SEQ ID NO: 2193019 - RNA, 19 nt, Homo sapiens
  misc_RNA (1)...(19): siRNA sense strand
aaaccuuauugaccucaug

SEQ ID NO: 2193020 - RNA, 19 nt, Homo sapiens
  misc_RNA (1)...(19): siRNA sense strand
gggcaucaacgaguucuuc

SEQ ID NO: 2193021 - RNA, 19 nt, Homo sapiens
  misc_RNA (1)...(19): siRNA sense strand
gcauccagggcuccaaguu

SEQ ID NO: 2193022 - RNA, 19 nt, Homo sapiens
  misc_RNA (1)...(19): siRNA sense strand
ccaaguucacucugccauu

SEQ ID NO: 2193023 - RNA, 19 nt, Homo sapiens
  misc_RNA (1)...(19): siRNA sense strand
guggugggcuaccgucagu

SEQ ID NO: 2193024 - RNA, 19 nt, Homo sapiens
  misc_RNA (1)...(19): siRNA sense strand
gggagauccgcaucaaugu

SEQ ID NO: 2193025 - RNA, 19 nt, Homo sapiens
  misc_RNA (1)...(19): siRNA sense strand
agaaguagggcugcucuug

SEQ ID NO: 2193026 - RNA, 19 nt, Homo sapiens
  misc_RNA (1)...(19): siRNA sense strand
ccacuuugaaauacagcua

SEQ ID NO: 2193027 - RNA, 19 nt, Homo sapiens
  misc_RNA (1)...(19): siRNA sense strand
cuagagcuggagaaucuuu

SEQ ID NO: 2193028 - RNA, 19 nt, Homo sapiens
  misc_RNA (1)...(19): siRNA sense strand
ggaucuuccgcaucuuaaa

SEQ ID NO: 2193029 - RNA, 19 nt, Homo sapiens
  misc_RNA (1)...(19): siRNA sense strand
uggcugagcuaugugucuu

SEQ ID NO: 2193030 - RNA, 19 nt, Homo sapiens
  misc_RNA (1)...(19): siRNA sense strand
gaggucccuucggucaauu

SEQ ID NO: 2193031 - RNA, 19 nt, Homo sapiens
  misc_RNA (1)...(19): siRNA sense strand
ggugggcuaccgucaguau

SEQ ID NO: 2193032 - RNA, 19 nt, Homo sapiens
  misc_RNA (1)...(19): siRNA sense strand
uagggcugcucuugcucua

SEQ ID NO: 2193033 - RNA, 19 nt, Homo sapiens
  misc_RNA (1)...(19): siRNA sense strand
gcauugccugguucacauu

SEQ ID NO: 2193034 - RNA, 19 nt, Homo sapiens
  misc_RNA (1)...(19): siRNA sense strand
gauccuugccuucuacaac

SEQ ID NO: 2193035 - RNA, 19 nt, Homo sapiens
  misc_RNA (1)...(19): siRNA sense strand
gcaccacgucuuccuucga

SEQ ID NO: 2193036 - RNA, 19 nt, Homo sapiens
  misc_RNA (1)...(19): siRNA sense strand
ucccuucggucaauuuaag

SEQ ID NO: 2193037 - RNA, 19 nt, Homo sapiens
  misc_RNA (1)...(19): siRNA sense strand
gguccaucaucaccaugug

SEQ ID NO: 2193038 - RNA, 19 nt, Homo sapiens
  misc_RNA (1)...(19): siRNA sense strand
auccagggcuccaaguuca

SEQ ID NO: 2193039 - RNA, 19 nt, Homo sapiens
  misc_RNA (1)...(19): siRNA sense strand
cuuuggagauggaaugaag

SEQ ID NO: 2193040 - RNA, 19 nt, Homo sapiens
  misc_RNA (1)...(19): siRNA sense strand
ugacuuuggagauggaaug

SEQ ID NO: 2193041 - RNA, 19 nt, Homo sapiens
  misc_RNA (1)...(19): siRNA sense strand
cauccagggcuccaaguuc

SEQ ID NO: 2193042 - RNA, 19 nt, Homo sapiens
  misc_RNA (1)...(19): siRNA sense strand
uugccugguucacauuuga

SEQ ID NO: 2193043 - RNA, 19 nt, Homo sapiens
  misc_RNA (1)...(19): siRNA sense strand
ucgaaaucguggagcacuu

SEQ ID NO: 2193044 - RNA, 19 nt, Homo sapiens
  misc_RNA (1)...(19): siRNA sense strand
ugagcagggucuucagcau

SEQ ID NO: 2193045 - RNA, 19 nt, Homo sapiens
  misc_RNA (1)...(19): siRNA sense strand
ucagccaggagaucgagua

SEQ ID NO: 2193046 - RNA, 19 nt, Homo sapiens
  misc_RNA (1)...(19): siRNA sense strand
gcugagcuaugugucuucu

SEQ ID NO: 2193047 - RNA, 19 nt, Homo sapiens
  misc_RNA (1)...(19): siRNA sense strand
ccggcaagcuucacgucau

SEQ ID NO: 2193048 - RNA, 19 nt, Homo sapiens
  misc_RNA (1)...(19): siRNA sense strand
gcaaacagcugagagugaa

SEQ ID NO: 2193049 - RNA, 19 nt, Homo sapiens
  misc_RNA (1)...(19): siRNA sense strand
gcagaggaguaaauaaaga

SEQ ID NO: 2193050 - RNA, 19 nt, Homo sapiens
  misc_RNA (1)...(19): siRNA sense strand
guaaaugauucuucucaga

SEQ ID NO: 2193051 - RNA, 19 nt, Homo sapiens
  misc_RNA (1)...(19): siRNA sense strand
gcaaagcgcagaggaguaa

SEQ ID NO: 2193052 - RNA, 19 nt, Homo sapiens
  misc_RNA (1)...(19): siRNA sense strand
ggccacagauuaucaagga

SEQ ID NO: 2193053 - RNA, 19 nt, Homo sapiens
  misc_RNA (1)...(19): siRNA sense strand
gcgcagaggaguaaauaaa

SEQ ID NO: 2193054 - RNA, 19 nt, Homo sapiens
  misc_RNA (1)...(19): siRNA sense strand
agccugaacuggugcauua

SEQ ID NO: 2193055 - RNA, 19 nt, Homo sapiens
  misc_RNA (1)...(19): siRNA sense strand
gaguauugcuguugaucuu

SEQ ID NO: 2193056 - RNA, 19 nt, Homo sapiens
  misc_RNA (1)...(19): siRNA sense strand
guagacaucugccaguuac

SEQ ID NO: 2193057 - RNA, 19 nt, Homo sapiens
  misc_RNA (1)...(19): siRNA sense strand
gagugaaagugccauggaa

SEQ ID NO: 2193058 - RNA, 19 nt, Homo sapiens
  misc_RNA (1)...(19): siRNA sense strand
ggugaaaggauuuaacaga

SEQ ID NO: 2193059 - RNA, 19 nt, Homo sapiens
  misc_RNA (1)...(19): siRNA sense strand
gaacaggaggugaaaggau

SEQ ID NO: 2193060 - RNA, 19 nt, Homo sapiens
  misc_RNA (1)...(19): siRNA sense strand
gauggggacuuuaauuauu

SEQ ID NO: 2193061 - RNA, 19 nt, Homo sapiens
  misc_RNA (1)...(19): siRNA sense strand
ggaagaacaggaggugaaa

SEQ ID NO: 2193062 - RNA, 19 nt, Homo sapiens
  misc_RNA (1)...(19): siRNA sense strand
cugcaagccuguauugaug

SEQ ID NO: 2193063 - RNA, 19 nt, Homo sapiens
  misc_RNA (1)...(19): siRNA sense strand
uggcauugcuuauuaugug

SEQ ID NO: 2193064 - RNA, 19 nt, Homo sapiens
  misc_RNA (1)...(19): siRNA sense strand
cagaggaacccacucgaaa

SEQ ID NO: 2193065 - RNA, 19 nt, Homo sapiens
  misc_RNA (1)...(19): siRNA sense strand
aacaggaggugaaaggauu

SEQ ID NO: 2193066 - RNA, 19 nt, Homo sapiens
  misc_RNA (1)...(19): siRNA sense strand
ccacagauuaucaaggaaa

SEQ ID NO: 2193067 - RNA, 19 nt, Homo sapiens
  misc_RNA (1)...(19): siRNA sense strand
ggagaguauugcuguugau

SEQ ID NO: 2193068 - RNA, 19 nt, Homo sapiens
  misc_RNA (1)...(19): siRNA sense strand
gaggugaaaggauuuaaca

SEQ ID NO: 2193069 - RNA, 19 nt, Homo sapiens
  misc_RNA (1)...(19): siRNA sense strand
ccacguggcaggaguuugu

SEQ ID NO: 2193070 - RNA, 19 nt, Homo sapiens
  misc_RNA (1)...(19): siRNA sense strand
ggcauugcuuauuauguga

SEQ ID NO: 2193071 - RNA, 19 nt, Homo sapiens
  misc_RNA (1)...(19): siRNA sense strand
gugcuacccuucguggaaa

SEQ ID NO: 2193072 - RNA, 19 nt, Homo sapiens
  misc_RNA (1)...(19): siRNA sense strand
gaaccacguggcaggaguu

SEQ ID NO: 2193073 - RNA, 19 nt, Homo sapiens
  misc_RNA (1)...(19): siRNA sense strand
gcugcaagccuguauugau

SEQ ID NO: 2193074 - RNA, 19 nt, Homo sapiens
  misc_RNA (1)...(19): siRNA sense strand
cucuuggcauugcuuauua

SEQ ID NO: 2193075 - RNA, 19 nt, Homo sapiens
  misc_RNA (1)...(19): siRNA sense strand
gaucuucgucauugcuuug

SEQ ID NO: 2193076 - RNA, 19 nt, Homo sapiens
  misc_RNA (1)...(19): siRNA sense strand
uggagaguauugcuguuga

SEQ ID NO: 2193077 - RNA, 19 nt, Homo sapiens
  misc_RNA (1)...(19): siRNA sense strand
gaaacuggagaccaugcaa

SEQ ID NO: 2193078 - RNA, 19 nt, Homo sapiens
  misc_RNA (1)...(19): siRNA sense strand
caaggaaacacagcucuuc

SEQ ID NO: 2193079 - RNA, 19 nt, Homo sapiens
  misc_RNA (1)...(19): siRNA sense strand
cagaacaggccuucaccuu

SEQ ID NO: 2193080 - RNA, 19 nt, Homo sapiens
  misc_RNA (1)...(19): siRNA sense strand
gccauucacuccucaaucc

SEQ ID NO: 2193081 - RNA, 19 nt, Homo sapiens
  misc_RNA (1)...(19): siRNA sense strand
ggugcuacccuucguggaa

SEQ ID NO: 2193082 - RNA, 19 nt, Homo sapiens
  misc_RNA (1)...(19): siRNA sense strand
uguagacaucugccaguua

SEQ ID NO: 2193083 - RNA, 19 nt, Homo sapiens
  misc_RNA (1)...(19): siRNA sense strand
gauauuugcaaucaucaag

SEQ ID NO: 2193084 - RNA, 19 nt, Homo sapiens
  misc_RNA (1)...(19): siRNA sense strand
acucgaaacuggagaccau

SEQ ID NO: 2193085 - RNA, 19 nt, Homo sapiens
  misc_RNA (1)...(19): siRNA sense strand
gaggaacccacucgaaacu

SEQ ID NO: 2193086 - RNA, 19 nt, Homo sapiens
  misc_RNA (1)...(19): siRNA sense strand
cgucauugcuuugcugucu

SEQ ID NO: 2193087 - RNA, 19 nt, Homo sapiens
  misc_RNA (1)...(19): siRNA sense strand
guggccauguggauacuau

SEQ ID NO: 2193088 - RNA, 19 nt, Homo sapiens
  misc_RNA (1)...(19): siRNA sense strand
gcaggaguuuguggaggau

SEQ ID NO: 2193089 - RNA, 19 nt, Homo sapiens
  misc_RNA (1)...(19): siRNA sense strand
aaacuggagaccaugcaaa

SEQ ID NO: 2193090 - RNA, 19 nt, Homo sapiens
  misc_RNA (1)...(19): siRNA sense strand
gaggaguaaauaaagaugu

SEQ ID NO: 2193091 - RNA, 19 nt, Homo sapiens
  misc_RNA (1)...(19): siRNA sense strand
aagcgcagaggaguaaaua

SEQ ID NO: 2193092 - RNA, 19 nt, Homo sapiens
  misc_RNA (1)...(19): siRNA sense strand
ggcaaagcgcagaggagua

SEQ ID NO: 2193093 - RNA, 19 nt, Homo sapiens
  misc_RNA (1)...(19): siRNA sense strand
ucaccucuguggccaugug

SEQ ID NO: 2193094 - RNA, 19 nt, Homo sapiens
  misc_RNA (1)...(19): siRNA sense strand
gcagcucgagggaauguag

SEQ ID NO: 2193095 - RNA, 19 nt, Homo sapiens
  misc_RNA (1)...(19): siRNA sense strand
cuguugaucuucgucauug

SEQ ID NO: 2193096 - RNA, 19 nt, Homo sapiens
  misc_RNA (1)...(19): siRNA sense strand
gcuguugaucuucgucauu

SEQ ID NO: 2193097 - RNA, 19 nt, Homo sapiens
  misc_RNA (1)...(19): siRNA sense strand
gggcuucuggagaguauug

SEQ ID NO: 2193098 - RNA, 19 nt, Homo sapiens
  misc_RNA (1)...(19): siRNA sense strand
uggaagaacaggaggugaa

SEQ ID NO: 2193099 - RNA, 19 nt, Homo sapiens
  misc_RNA (1)...(19): siRNA sense strand
aaugauucuucucagacua

SEQ ID NO: 2193100 - RNA, 19 nt, Homo sapiens
  misc_RNA (1)...(19): siRNA sense strand
ugcagcagcucgagggaau

SEQ ID NO: 2193101 - RNA, 19 nt, Homo sapiens
  misc_RNA (1)...(19): siRNA sense strand
agacuaacgugcccuugcu

SEQ ID NO: 2193102 - RNA, 19 nt, Homo sapiens
  misc_RNA (1)...(19): siRNA sense strand
cagaggaguaaauaaagau

SEQ ID NO: 2193103 - RNA, 19 nt, Homo sapiens
  misc_RNA (1)...(19): siRNA sense strand
aaaugauucuucucagacu

SEQ ID NO: 2193104 - RNA, 19 nt, Homo sapiens
  misc_RNA (1)...(19): siRNA sense strand
ugaucuucgucauugcuuu

SEQ ID NO: 2193105 - RNA, 19 nt, Homo sapiens
  misc_RNA (1)...(19): siRNA sense strand
acagaggaacccacucgaa

SEQ ID NO: 2193106 - RNA, 19 nt, Homo sapiens
  misc_RNA (1)...(19): siRNA sense strand
gucauccgauugcuggaau

SEQ ID NO: 2193107 - RNA, 19 nt, Homo sapiens
  misc_RNA (1)...(19): siRNA sense strand
gugaaagugccauggaaag

SEQ ID NO: 2193108 - RNA, 19 nt, Homo sapiens
  misc_RNA (1)...(19): siRNA sense strand
uauuugcaaucaucaaggu

SEQ ID NO: 2193109 - RNA, 19 nt, Homo sapiens
  misc_RNA (1)...(19): siRNA sense strand
ucucuuggcauugcuuauu

SEQ ID NO: 2193110 - RNA, 19 nt, Homo sapiens
  misc_RNA (1)...(19): siRNA sense strand
ggaggugaaaggauuuaac

SEQ ID NO: 2193111 - RNA, 19 nt, Homo sapiens
  misc_RNA (1)...(19): siRNA sense strand
caggaggugaaaggauuua

SEQ ID NO: 2193112 - RNA, 19 nt, Homo sapiens
  misc_RNA (1)...(19): siRNA sense strand
ggaguaaauaaagauguca

SEQ ID NO: 2193113 - RNA, 19 nt, Homo sapiens
  misc_RNA (1)...(19): siRNA sense strand
aggaguaaauaaagauguc

SEQ ID NO: 2193114 - RNA, 19 nt, Homo sapiens
  misc_RNA (1)...(19): siRNA sense strand
gcaaacagcugagagugaa

SEQ ID NO: 2193115 - RNA, 19 nt, Homo sapiens
  misc_RNA (1)...(19): siRNA sense strand
gcagaggaguaaauaaaga

SEQ ID NO: 2193116 - RNA, 19 nt, Homo sapiens
  misc_RNA (1)...(19): siRNA sense strand
guaaaugauucuucucaga

SEQ ID NO: 2193117 - RNA, 19 nt, Homo sapiens
  misc_RNA (1)...(19): siRNA sense strand
gcaaagcgcagaggaguaa

SEQ ID NO: 2193118 - RNA, 19 nt, Homo sapiens
  misc_RNA (1)...(19): siRNA sense strand
ggccacagauuaucaagga

SEQ ID NO: 2193119 - RNA, 19 nt, Homo sapiens
  misc_RNA (1)...(19): siRNA sense strand
gcgcagaggaguaaauaaa

SEQ ID NO: 2193120 - RNA, 19 nt, Homo sapiens
  misc_RNA (1)...(19): siRNA sense strand
agccugaacuggugcauua

SEQ ID NO: 2193121 - RNA, 19 nt, Homo sapiens
  misc_RNA (1)...(19): siRNA sense strand
gaguauugcuguugaucuu

SEQ ID NO: 2193122 - RNA, 19 nt, Homo sapiens
  misc_RNA (1)...(19): siRNA sense strand
guagacaucugccaguuac

SEQ ID NO: 2193123 - RNA, 19 nt, Homo sapiens
  misc_RNA (1)...(19): siRNA sense strand
gagugaaagugccauggaa

SEQ ID NO: 2193124 - RNA, 19 nt, Homo sapiens
  misc_RNA (1)...(19): siRNA sense strand
ggugaaaggauuuaacaga

SEQ ID NO: 2193125 - RNA, 19 nt, Homo sapiens
  misc_RNA (1)...(19): siRNA sense strand
gaacaggaggugaaaggau

SEQ ID NO: 2193126 - RNA, 19 nt, Homo sapiens
  misc_RNA (1)...(19): siRNA sense strand
gauggggacuuuaauuauu

SEQ ID NO: 2193127 - RNA, 19 nt, Homo sapiens
  misc_RNA (1)...(19): siRNA sense strand
ggaagaacaggaggugaaa

SEQ ID NO: 2193128 - RNA, 19 nt, Homo sapiens
  misc_RNA (1)...(19): siRNA sense strand
cugcaagccuguauugaug

SEQ ID NO: 2193129 - RNA, 19 nt, Homo sapiens
  misc_RNA (1)...(19): siRNA sense strand
uggcauugcuuauuaugug

SEQ ID NO: 2193130 - RNA, 19 nt, Homo sapiens
  misc_RNA (1)...(19): siRNA sense strand
cagaggaacccacucgaaa

SEQ ID NO: 2193131 - RNA, 19 nt, Homo sapiens
  misc_RNA (1)...(19): siRNA sense strand
aacaggaggugaaaggauu

SEQ ID NO: 2193132 - RNA, 19 nt, Homo sapiens
  misc_RNA (1)...(19): siRNA sense strand
ccacagauuaucaaggaaa

SEQ ID NO: 2193133 - RNA, 19 nt, Homo sapiens
  misc_RNA (1)...(19): siRNA sense strand
ggagaguauugcuguugau

SEQ ID NO: 2193134 - RNA, 19 nt, Homo sapiens
  misc_RNA (1)...(19): siRNA sense strand
gaggugaaaggauuuaaca

SEQ ID NO: 2193135 - RNA, 19 nt, Homo sapiens
  misc_RNA (1)...(19): siRNA sense strand
ccacguggcaggaguuugu

SEQ ID NO: 2193136 - RNA, 19 nt, Homo sapiens
  misc_RNA (1)...(19): siRNA sense strand
ggcauugcuuauuauguga

SEQ ID NO: 2193137 - RNA, 19 nt, Homo sapiens
  misc_RNA (1)...(19): siRNA sense strand
gugcuacccuucguggaaa

SEQ ID NO: 2193138 - RNA, 19 nt, Homo sapiens
  misc_RNA (1)...(19): siRNA sense strand
gaaccacguggcaggaguu

SEQ ID NO: 2193139 - RNA, 19 nt, Homo sapiens
  misc_RNA (1)...(19): siRNA sense strand
gcugcaagccuguauugau

SEQ ID NO: 2193140 - RNA, 19 nt, Homo sapiens
  misc_RNA (1)...(19): siRNA sense strand
cucuuggcauugcuuauua

SEQ ID NO: 2193141 - RNA, 19 nt, Homo sapiens
  misc_RNA (1)...(19): siRNA sense strand
gaucuucgucauugcuuug

SEQ ID NO: 2193142 - RNA, 19 nt, Homo sapiens
  misc_RNA (1)...(19): siRNA sense strand
uggagaguauugcuguuga

SEQ ID NO: 2193143 - RNA, 19 nt, Homo sapiens
  misc_RNA (1)...(19): siRNA sense strand
gaaacuggagaccaugcaa

SEQ ID NO: 2193144 - RNA, 19 nt, Homo sapiens
  misc_RNA (1)...(19): siRNA sense strand
caaggaaacacagcucuuc

SEQ ID NO: 2193145 - RNA, 19 nt, Homo sapiens
  misc_RNA (1)...(19): siRNA sense strand
cagaacaggccuucaccuu

SEQ ID NO: 2193146 - RNA, 19 nt, Homo sapiens
  misc_RNA (1)...(19): siRNA sense strand
gccauucacuccucaaucc

SEQ ID NO: 2193147 - RNA, 19 nt, Homo sapiens
  misc_RNA (1)...(19): siRNA sense strand
ggugcuacccuucguggaa

SEQ ID NO: 2193148 - RNA, 19 nt, Homo sapiens
  misc_RNA (1)...(19): siRNA sense strand
uguagacaucugccaguua

SEQ ID NO: 2193149 - RNA, 19 nt, Homo sapiens
  misc_RNA (1)...(19): siRNA sense strand
gauauuugcaaucaucaag

SEQ ID NO: 2193150 - RNA, 19 nt, Homo sapiens
  misc_RNA (1)...(19): siRNA sense strand
acucgaaacuggagaccau

SEQ ID NO: 2193151 - RNA, 19 nt, Homo sapiens
  misc_RNA (1)...(19): siRNA sense strand
gaggaacccacucgaaacu

SEQ ID NO: 2193152 - RNA, 19 nt, Homo sapiens
  misc_RNA (1)...(19): siRNA sense strand
cgucauugcuuugcugucu

SEQ ID NO: 2193153 - RNA, 19 nt, Homo sapiens
  misc_RNA (1)...(19): siRNA sense strand
guggccauguggauacuau

SEQ ID NO: 2193154 - RNA, 19 nt, Homo sapiens
  misc_RNA (1)...(19): siRNA sense strand
gcaggaguuuguggaggau

SEQ ID NO: 2193155 - RNA, 19 nt, Homo sapiens
  misc_RNA (1)...(19): siRNA sense strand
aaacuggagaccaugcaaa

SEQ ID NO: 2193156 - RNA, 19 nt, Homo sapiens
  misc_RNA (1)...(19): siRNA sense strand
gaggaguaaauaaagaugu

SEQ ID NO: 2193157 - RNA, 19 nt, Homo sapiens
  misc_RNA (1)...(19): siRNA sense strand
aagcgcagaggaguaaaua

SEQ ID NO: 2193158 - RNA, 19 nt, Homo sapiens
  misc_RNA (1)...(19): siRNA sense strand
ggcaaagcgcagaggagua

SEQ ID NO: 2193159 - RNA, 19 nt, Homo sapiens
  misc_RNA (1)...(19): siRNA sense strand
ucaccucuguggccaugug

SEQ ID NO: 2193160 - RNA, 19 nt, Homo sapiens
  misc_RNA (1)...(19): siRNA sense strand
gcagcucgagggaauguag

SEQ ID NO: 2193161 - RNA, 19 nt, Homo sapiens
  misc_RNA (1)...(19): siRNA sense strand
cuguugaucuucgucauug

SEQ ID NO: 2193162 - RNA, 19 nt, Homo sapiens
  misc_RNA (1)...(19): siRNA sense strand
gcuguugaucuucgucauu

SEQ ID NO: 2193163 - RNA, 19 nt, Homo sapiens
  misc_RNA (1)...(19): siRNA sense strand
gggcuucuggagaguauug

SEQ ID NO: 2193164 - RNA, 19 nt, Homo sapiens
  misc_RNA (1)...(19): siRNA sense strand
uggaagaacaggaggugaa

SEQ ID NO: 2193165 - RNA, 19 nt, Homo sapiens
  misc_RNA (1)...(19): siRNA sense strand
aaugauucuucucagacua

SEQ ID NO: 2193166 - RNA, 19 nt, Homo sapiens
  misc_RNA (1)...(19): siRNA sense strand
ugcagcagcucgagggaau

SEQ ID NO: 2193167 - RNA, 19 nt, Homo sapiens
  misc_RNA (1)...(19): siRNA sense strand
agacuaacgugcccuugcu

SEQ ID NO: 2193168 - RNA, 19 nt, Homo sapiens
  misc_RNA (1)...(19): siRNA sense strand
cagaggaguaaauaaagau

SEQ ID NO: 2193169 - RNA, 19 nt, Homo sapiens
  misc_RNA (1)...(19): siRNA sense strand
aaaugauucuucucagacu

SEQ ID NO: 2193170 - RNA, 19 nt, Homo sapiens
  misc_RNA (1)...(19): siRNA sense strand
ugaucuucgucauugcuuu

SEQ ID NO: 2193171 - RNA, 19 nt, Homo sapiens
  misc_RNA (1)...(19): siRNA sense strand
acagaggaacccacucgaa

SEQ ID NO: 2193172 - RNA, 19 nt, Homo sapiens
  misc_RNA (1)...(19): siRNA sense strand
gucauccgauugcuggaau

SEQ ID NO: 2193173 - RNA, 19 nt, Homo sapiens
  misc_RNA (1)...(19): siRNA sense strand
gugaaagugccauggaaag

SEQ ID NO: 2193174 - RNA, 19 nt, Homo sapiens
  misc_RNA (1)...(19): siRNA sense strand
uauuugcaaucaucaaggu

SEQ ID NO: 2193175 - RNA, 19 nt, Homo sapiens
  misc_RNA (1)...(19): siRNA sense strand
ucucuuggcauugcuuauu

SEQ ID NO: 2193176 - RNA, 19 nt, Homo sapiens
  misc_RNA (1)...(19): siRNA sense strand
ggaggugaaaggauuuaac

SEQ ID NO: 2193177 - RNA, 19 nt, Homo sapiens
  misc_RNA (1)...(19): siRNA sense strand
caggaggugaaaggauuua

SEQ ID NO: 2193178 - RNA, 19 nt, Homo sapiens
  misc_RNA (1)...(19): siRNA sense strand
ggaguaaauaaagauguca

SEQ ID NO: 2193179 - RNA, 19 nt, Homo sapiens
  misc_RNA (1)...(19): siRNA sense strand
aggaguaaauaaagauguc

SEQ ID NO: 2193180 - RNA, 19 nt, Homo sapiens
  misc_RNA (1)...(19): siRNA sense strand
ugacagagccauugaaaua

SEQ ID NO: 2193181 - RNA, 19 nt, Homo sapiens
  misc_RNA (1)...(19): siRNA sense strand
ccagaaagccauugaguua

SEQ ID NO: 2193182 - RNA, 19 nt, Homo sapiens
  misc_RNA (1)...(19): siRNA sense strand
guaagaagguggaggaaga

SEQ ID NO: 2193183 - RNA, 19 nt, Homo sapiens
  misc_RNA (1)...(19): siRNA sense strand
gaaagaaguucaacauagg

SEQ ID NO: 2193184 - RNA, 19 nt, Homo sapiens
  misc_RNA (1)...(19): siRNA sense strand
gaagguggaggaagacuua

SEQ ID NO: 2193185 - RNA, 19 nt, Homo sapiens
  misc_RNA (1)...(19): siRNA sense strand
gaaagaguagaacgaguua

SEQ ID NO: 2193186 - RNA, 19 nt, Homo sapiens
  misc_RNA (1)...(19): siRNA sense strand
uaaagaaggugugauugaa

SEQ ID NO: 2193187 - RNA, 19 nt, Homo sapiens
  misc_RNA (1)...(19): siRNA sense strand
gaucaaagaaagaguagaa

SEQ ID NO: 2193188 - RNA, 19 nt, Homo sapiens
  misc_RNA (1)...(19): siRNA sense strand
cagcaaaugugucaaaaua

SEQ ID NO: 2193189 - RNA, 19 nt, Homo sapiens
  misc_RNA (1)...(19): siRNA sense strand
agaaagccauugaguuauu

SEQ ID NO: 2193190 - RNA, 19 nt, Homo sapiens
  misc_RNA (1)...(19): siRNA sense strand
gaaagccauugaguuauug

SEQ ID NO: 2193191 - RNA, 19 nt, Homo sapiens
  misc_RNA (1)...(19): siRNA sense strand
gaacaucggagaaaguaug

SEQ ID NO: 2193192 - RNA, 19 nt, Homo sapiens
  misc_RNA (1)...(19): siRNA sense strand
acagagccauugaaauaaa

SEQ ID NO: 2193193 - RNA, 19 nt, Homo sapiens
  misc_RNA (1)...(19): siRNA sense strand
gaacgagcuucgggccuuu

SEQ ID NO: 2193194 - RNA, 19 nt, Homo sapiens
  misc_RNA (1)...(19): siRNA sense strand
gggaaugccugguaauuuu

SEQ ID NO: 2193195 - RNA, 19 nt, Homo sapiens
  misc_RNA (1)...(19): siRNA sense strand
ggagaaaguaugagcgaaa

SEQ ID NO: 2193196 - RNA, 19 nt, Homo sapiens
  misc_RNA (1)...(19): siRNA sense strand
gaaagcacacagacuucua

SEQ ID NO: 2193197 - RNA, 19 nt, Homo sapiens
  misc_RNA (1)...(19): siRNA sense strand
ccuguaaauuggauuauga

SEQ ID NO: 2193198 - RNA, 19 nt, Homo sapiens
  misc_RNA (1)...(19): siRNA sense strand
gcucagaacccagcaaaug

SEQ ID NO: 2193199 - RNA, 19 nt, Homo sapiens
  misc_RNA (1)...(19): siRNA sense strand
gugcaaugcugaaagaagu

SEQ ID NO: 2193200 - RNA, 19 nt, Homo sapiens
  misc_RNA (1)...(19): siRNA sense strand
ugaagaugcuagugcaaug

SEQ ID NO: 2193201 - RNA, 19 nt, Homo sapiens
  misc_RNA (1)...(19): siRNA sense strand
gaacccagcaaauguguca

SEQ ID NO: 2193202 - RNA, 19 nt, Homo sapiens
  misc_RNA (1)...(19): siRNA sense strand
gaagaagccagacgacagu

SEQ ID NO: 2193203 - RNA, 19 nt, Homo sapiens
  misc_RNA (1)...(19): siRNA sense strand
ggagauaacggaggagaug

SEQ ID NO: 2193204 - RNA, 19 nt, Homo sapiens
  misc_RNA (1)...(19): siRNA sense strand
gaguagaacgaguuaagaa

SEQ ID NO: 2193205 - RNA, 19 nt, Homo sapiens
  misc_RNA (1)...(19): siRNA sense strand
aaaaguggcugcuauugaa

SEQ ID NO: 2193206 - RNA, 19 nt, Homo sapiens
  misc_RNA (1)...(19): siRNA sense strand
cuagugcaaugcugaaaga

SEQ ID NO: 2193207 - RNA, 19 nt, Homo sapiens
  misc_RNA (1)...(19): siRNA sense strand
caagaaaugggagaugaaa

SEQ ID NO: 2193208 - RNA, 19 nt, Homo sapiens
  misc_RNA (1)...(19): siRNA sense strand
caaagaaagaguagaacga

SEQ ID NO: 2193209 - RNA, 19 nt, Homo sapiens
  misc_RNA (1)...(19): siRNA sense strand
gacagagccauugaaauaa

SEQ ID NO: 2193210 - RNA, 19 nt, Homo sapiens
  misc_RNA (1)...(19): siRNA sense strand
ugauaaagaaggugugauu

SEQ ID NO: 2193211 - RNA, 19 nt, Homo sapiens
  misc_RNA (1)...(19): siRNA sense strand
gagcuucgggccuuuguga

SEQ ID NO: 2193212 - RNA, 19 nt, Homo sapiens
  misc_RNA (1)...(19): siRNA sense strand
ccauugaguuauugacaga

SEQ ID NO: 2193213 - RNA, 19 nt, Homo sapiens
  misc_RNA (1)...(19): siRNA sense strand
caacauagggcacagaaaa

SEQ ID NO: 2193214 - RNA, 19 nt, Homo sapiens
  misc_RNA (1)...(19): siRNA sense strand
cagaacaucggagaaagua

SEQ ID NO: 2193215 - RNA, 19 nt, Homo sapiens
  misc_RNA (1)...(19): siRNA sense strand
caaaugcugccacccaaga

SEQ ID NO: 2193216 - RNA, 19 nt, Homo sapiens
  misc_RNA (1)...(19): siRNA sense strand
caugcaggauccagaaguu

SEQ ID NO: 2193217 - RNA, 19 nt, Homo sapiens
  misc_RNA (1)...(19): siRNA sense strand
gagcgagagaucaaagaaa

SEQ ID NO: 2193218 - RNA, 19 nt, Homo sapiens
  misc_RNA (1)...(19): siRNA sense strand
uaacggaggagaugaugga

SEQ ID NO: 2193219 - RNA, 19 nt, Homo sapiens
  misc_RNA (1)...(19): siRNA sense strand
acccaaagguuaugaaucu

SEQ ID NO: 2193220 - RNA, 19 nt, Homo sapiens
  misc_RNA (1)...(19): siRNA sense strand
aauccucgcuuggccauuu

SEQ ID NO: 2193221 - RNA, 19 nt, Homo sapiens
  misc_RNA (1)...(19): siRNA sense strand
gauaaagaaggugugauug

SEQ ID NO: 2193222 - RNA, 19 nt, Homo sapiens
  misc_RNA (1)...(19): siRNA sense strand
gaagagcgagagaucaaag

SEQ ID NO: 2193223 - RNA, 19 nt, Homo sapiens
  misc_RNA (1)...(19): siRNA sense strand
gcccuugccuguaaauugg

SEQ ID NO: 2193224 - RNA, 19 nt, Homo sapiens
  misc_RNA (1)...(19): siRNA sense strand
gggagaagcagaccaugau

SEQ ID NO: 2193225 - RNA, 19 nt, Homo sapiens
  misc_RNA (1)...(19): siRNA sense strand
cagcucagccucacaagug

SEQ ID NO: 2193226 - RNA, 19 nt, Homo sapiens
  misc_RNA (1)...(19): siRNA sense strand
gaucuugcccuugccugua

SEQ ID NO: 2193227 - RNA, 19 nt, Homo sapiens
  misc_RNA (1)...(19): siRNA sense strand
gaaaauaccgaggaagaaa

SEQ ID NO: 2193228 - RNA, 19 nt, Homo sapiens
  misc_RNA (1)...(19): siRNA sense strand
uaagaaggcucgaaaagag

SEQ ID NO: 2193229 - RNA, 19 nt, Homo sapiens
  misc_RNA (1)...(19): siRNA sense strand
gcagacgaaccaucaagug

SEQ ID NO: 2193230 - RNA, 19 nt, Homo sapiens
  misc_RNA (1)...(19): siRNA sense strand
agaaagaguagaacgaguu

SEQ ID NO: 2193231 - RNA, 19 nt, Homo sapiens
  misc_RNA (1)...(19): siRNA sense strand
gcagaacaucggagaaagu

SEQ ID NO: 2193232 - RNA, 19 nt, Homo sapiens
  misc_RNA (1)...(19): siRNA sense strand
auaaagaaggugugauuga

SEQ ID NO: 2193233 - RNA, 19 nt, Homo sapiens
  misc_RNA (1)...(19): siRNA sense strand
cuauugaagcccuaaauga

SEQ ID NO: 2193234 - RNA, 19 nt, Homo sapiens
  misc_RNA (1)...(19): siRNA sense strand
gaguuaagaaggcucgaaa

SEQ ID NO: 2193235 - RNA, 19 nt, Homo sapiens
  misc_RNA (1)...(19): siRNA sense strand
gagaaaguaugagcgaaaa

SEQ ID NO: 2193236 - RNA, 19 nt, Homo sapiens
  misc_RNA (1)...(19): siRNA sense strand
cagagccauugaaauaaau

SEQ ID NO: 2193237 - RNA, 19 nt, Homo sapiens
  misc_RNA (1)...(19): siRNA sense strand
ucaaauuacagaagccaaa

SEQ ID NO: 2193238 - RNA, 19 nt, Homo sapiens
  misc_RNA (1)...(19): siRNA sense strand
ucucaucaguaaauuguca

SEQ ID NO: 2193239 - RNA, 19 nt, Homo sapiens
  misc_RNA (1)...(19): siRNA sense strand
gaagcagaccaugaucuug

SEQ ID NO: 2193240 - RNA, 19 nt, Homo sapiens
  misc_RNA (1)...(19): siRNA sense strand
caaauuuggaggucaagug

SEQ ID NO: 2193241 - RNA, 19 nt, Homo sapiens
  misc_RNA (1)...(19): siRNA sense strand
cagacgaaccaucaaguga

SEQ ID NO: 2193242 - RNA, 19 nt, Homo sapiens
  misc_RNA (1)...(19): siRNA sense strand
gggaguggguggagagcau

SEQ ID NO: 2193243 - RNA, 19 nt, Homo sapiens
  misc_RNA (1)...(19): siRNA sense strand
acacugaugcuccucaaga

SEQ ID NO: 2193244 - RNA, 19 nt, Homo sapiens
  misc_RNA (1)...(19): siRNA sense strand
auuuggaggucaaguguaa

SEQ ID NO: 2193245 - RNA, 19 nt, Homo sapiens
  misc_RNA (1)...(19): siRNA sense strand
gaaucucaucaguaaauug

SEQ ID NO: 2193246 - RNA, 19 nt, Homo sapiens
  misc_RNA (1)...(19): siRNA sense strand
agagaucaaagaaagagua

SEQ ID NO: 2193247 - RNA, 19 nt, Homo sapiens
  misc_RNA (1)...(19): siRNA sense strand
gcuauugaagcccuaaaug

SEQ ID NO: 2193248 - RNA, 19 nt, Homo sapiens
  misc_RNA (1)...(19): siRNA sense strand
ugauugaaccagacacuga

SEQ ID NO: 2193249 - RNA, 19 nt, Homo sapiens
  misc_RNA (1)...(19): siRNA sense strand
uaagcaggauccgagcauu

SEQ ID NO: 2193250 - RNA, 19 nt, Homo sapiens
  misc_RNA (1)...(19): siRNA sense strand
cacugaugcuccucaagaa

SEQ ID NO: 2193251 - RNA, 19 nt, Homo sapiens
  misc_RNA (1)...(19): siRNA sense strand
gcaggauccagaaguuaug

SEQ ID NO: 2193252 - RNA, 19 nt, Homo sapiens
  misc_RNA (1)...(19): siRNA sense strand
cucaagaaaugggagauga

SEQ ID NO: 2193253 - RNA, 19 nt, Homo sapiens
  misc_RNA (1)...(19): siRNA sense strand
ccaaagguuaugaaucuca

SEQ ID NO: 2193254 - RNA, 19 nt, Homo sapiens
  misc_RNA (1)...(19): siRNA sense strand
aaaggcagacgaaccauca

SEQ ID NO: 2193255 - RNA, 19 nt, Homo sapiens
  misc_RNA (1)...(19): siRNA sense strand
ccuaaaugauggugaacuc

SEQ ID NO: 2193256 - RNA, 19 nt, Homo sapiens
  misc_RNA (1)...(19): siRNA sense strand
agacuuaaaggcagacgaa

SEQ ID NO: 2193257 - RNA, 19 nt, Homo sapiens
  misc_RNA (1)...(19): siRNA sense strand
ggauuaugaugaagaugcu

SEQ ID NO: 2193258 - RNA, 19 nt, Homo sapiens
  misc_RNA (1)...(19): siRNA sense strand
gcuucgggccuuugugaaa

SEQ ID NO: 2193259 - RNA, 19 nt, Homo sapiens
  misc_RNA (1)...(19): siRNA sense strand
uauugaagcccuaaaugau

SEQ ID NO: 2193260 - RNA, 19 nt, Homo sapiens
  misc_RNA (1)...(19): siRNA sense strand
ucaagaaaugggagaugaa

SEQ ID NO: 2193261 - RNA, 19 nt, Homo sapiens
  misc_RNA (1)...(19): siRNA sense strand
uccaggauguggcucagaa

SEQ ID NO: 2193262 - RNA, 19 nt, Homo sapiens
  misc_RNA (1)...(19): siRNA sense strand
gaaaauguguaagcaggau

SEQ ID NO: 2193263 - RNA, 19 nt, Homo sapiens
  misc_RNA (1)...(19): siRNA sense strand
gagaagcagaccaugaucu

SEQ ID NO: 2193264 - RNA, 19 nt, Homo sapiens
  misc_RNA (1)...(19): siRNA sense strand
ugaugcuccucaagaaaug

SEQ ID NO: 2193265 - RNA, 19 nt, Homo sapiens
  misc_RNA (1)...(19): siRNA sense strand
ggaaagcacacagacuucu

SEQ ID NO: 2193266 - RNA, 19 nt, Homo sapiens
  misc_RNA (1)...(19): siRNA sense strand
gggaaagcacacagacuuc

SEQ ID NO: 2193267 - RNA, 19 nt, Homo sapiens
  misc_RNA (1)...(19): siRNA sense strand
gagauaacggaggagauga

SEQ ID NO: 2193268 - RNA, 19 nt, Homo sapiens
  misc_RNA (1)...(19): siRNA sense strand
uggcuggaaugccuggauu

SEQ ID NO: 2193269 - RNA, 19 nt, Homo sapiens
  misc_RNA (1)...(19): siRNA sense strand
agaagcagaccaugaucuu

SEQ ID NO: 2193270 - RNA, 19 nt, Homo sapiens
  misc_RNA (1)...(19): siRNA sense strand
caaauuacagaagccaaau

SEQ ID NO: 2193271 - RNA, 19 nt, Homo sapiens
  misc_RNA (1)...(19): siRNA sense strand
gauaacggaggagaugaug

SEQ ID NO: 2193272 - RNA, 19 nt, Homo sapiens
  misc_RNA (1)...(19): siRNA sense strand
gagaucaaagaaagaguag

SEQ ID NO: 2193273 - RNA, 19 nt, Homo sapiens
  misc_RNA (1)...(19): siRNA sense strand
agcgagagaucaaagaaag

SEQ ID NO: 2193274 - RNA, 19 nt, Homo sapiens
  misc_RNA (1)...(19): siRNA sense strand
cagacgccaucaagcugaa

SEQ ID NO: 2193275 - RNA, 19 nt, Homo sapiens
  misc_RNA (1)...(19): siRNA sense strand
ugacagacgccaucaagcu

SEQ ID NO: 2193276 - RNA, 19 nt, Homo sapiens
  misc_RNA (1)...(19): siRNA sense strand
aaacaugaagagcgagaga

SEQ ID NO: 2193277 - RNA, 19 nt, Homo sapiens
  misc_RNA (1)...(19): siRNA sense strand
gccuguaaauuggauuaug

SEQ ID NO: 2193278 - RNA, 19 nt, Homo sapiens
  misc_RNA (1)...(19): siRNA sense strand
gagcccagagggaggaaga

SEQ ID NO: 2193279 - RNA, 19 nt, Homo sapiens
  misc_RNA (1)...(19): siRNA sense strand
ucagaacccagcaaaugug

SEQ ID NO: 2193280 - RNA, 19 nt, Homo sapiens
  misc_RNA (1)...(19): siRNA sense strand
gcccagauguuuguaauua

SEQ ID NO: 2193281 - RNA, 19 nt, Homo sapiens
  misc_RNA (1)...(19): siRNA sense strand
gaaaguuguugccaaagaa

SEQ ID NO: 2193282 - RNA, 19 nt, Homo sapiens
  misc_RNA (1)...(19): siRNA sense strand
gaacuguccucuugcuuca

SEQ ID NO: 2193283 - RNA, 19 nt, Homo sapiens
  misc_RNA (1)...(19): siRNA sense strand
ugaacgaacuguccucuug

SEQ ID NO: 2193284 - RNA, 19 nt, Homo sapiens
  misc_RNA (1)...(19): siRNA sense strand
ugagaaaguuguugccaaa

SEQ ID NO: 2193285 - RNA, 19 nt, Homo sapiens
  misc_RNA (1)...(19): siRNA sense strand
agacagagcuacgaaguga

SEQ ID NO: 2193286 - RNA, 19 nt, Homo sapiens
  misc_RNA (1)...(19): siRNA sense strand
caagaugccuguggaaugu

SEQ ID NO: 2193287 - RNA, 19 nt, Homo sapiens
  misc_RNA (1)...(19): siRNA sense strand
ccucacagcucauccaaau

SEQ ID NO: 2193288 - RNA, 19 nt, Homo sapiens
  misc_RNA (1)...(19): siRNA sense strand
gaacagaggccggaagaca

SEQ ID NO: 2193289 - RNA, 19 nt, Homo sapiens
  misc_RNA (1)...(19): siRNA sense strand
gggauucucuccuggaugu

SEQ ID NO: 2193290 - RNA, 19 nt, Homo sapiens
  misc_RNA (1)...(19): siRNA sense strand
ggaaugaagguucuacaga

SEQ ID NO: 2193291 - RNA, 19 nt, Homo sapiens
  misc_RNA (1)...(19): siRNA sense strand
ccaguuacccgcugcuuaa

SEQ ID NO: 2193292 - RNA, 19 nt, Homo sapiens
  misc_RNA (1)...(19): siRNA sense strand
gaaguugcccuguuauucu

SEQ ID NO: 2193293 - RNA, 19 nt, Homo sapiens
  misc_RNA (1)...(19): siRNA sense strand
gccuggagcuggccugaaa

SEQ ID NO: 2193294 - RNA, 19 nt, Homo sapiens
  misc_RNA (1)...(19): siRNA sense strand
ccaaaucugggacaaauug

SEQ ID NO: 2193295 - RNA, 19 nt, Homo sapiens
  misc_RNA (1)...(19): siRNA sense strand
ggaaguugcccuguuauuc

SEQ ID NO: 2193296 - RNA, 19 nt, Homo sapiens
  misc_RNA (1)...(19): siRNA sense strand
guaauuaagggucuaacaa

SEQ ID NO: 2193297 - RNA, 19 nt, Homo sapiens
  misc_RNA (1)...(19): siRNA sense strand
agaaaguuguugccaaaga

SEQ ID NO: 2193298 - RNA, 19 nt, Homo sapiens
  misc_RNA (1)...(19): siRNA sense strand
aguggaaguugcccuguua

SEQ ID NO: 2193299 - RNA, 19 nt, Homo sapiens
  misc_RNA (1)...(19): siRNA sense strand
gaagacagagcuacgaagu

SEQ ID NO: 2193300 - RNA, 19 nt, Homo sapiens
  misc_RNA (1)...(19): siRNA sense strand
gaccagcccugugaagaga

SEQ ID NO: 2193301 - RNA, 19 nt, Homo sapiens
  misc_RNA (1)...(19): siRNA sense strand
gagcuggccugaaaguucu

SEQ ID NO: 2193302 - RNA, 19 nt, Homo sapiens
  misc_RNA (1)...(19): siRNA sense strand
ggacauaccccuuccaaga

SEQ ID NO: 2193303 - RNA, 19 nt, Homo sapiens
  misc_RNA (1)...(19): siRNA sense strand
ggagcuggccugaaaguuc

SEQ ID NO: 2193304 - RNA, 19 nt, Homo sapiens
  misc_RNA (1)...(19): siRNA sense strand
ccagauguuuguaauuaag

SEQ ID NO: 2193305 - RNA, 19 nt, Homo sapiens
  misc_RNA (1)...(19): siRNA sense strand
ucucauggccuguguguga

SEQ ID NO: 2193306 - RNA, 19 nt, Homo sapiens
  misc_RNA (1)...(19): siRNA sense strand
caacaccugucaacuccau

SEQ ID NO: 2193307 - RNA, 19 nt, Homo sapiens
  misc_RNA (1)...(19): siRNA sense strand
gccaccagcuccucccaaa

SEQ ID NO: 2193308 - RNA, 19 nt, Homo sapiens
  misc_RNA (1)...(19): siRNA sense strand
aaacgaaggaggagagaga

SEQ ID NO: 2193309 - RNA, 19 nt, Homo sapiens
  misc_RNA (1)...(19): siRNA sense strand
ccagcccugugaagagaua

SEQ ID NO: 2193310 - RNA, 19 nt, Homo sapiens
  misc_RNA (1)...(19): siRNA sense strand
aaacccugcuggucuaugu

SEQ ID NO: 2193311 - RNA, 19 nt, Homo sapiens
  misc_RNA (1)...(19): siRNA sense strand
gagccugccuucugguaca

SEQ ID NO: 2193312 - RNA, 19 nt, Homo sapiens
  misc_RNA (1)...(19): siRNA sense strand
ugccaugugugagcaguua

SEQ ID NO: 2193313 - RNA, 19 nt, Homo sapiens
  misc_RNA (1)...(19): siRNA sense strand
ccaaaacccugcuggucua

SEQ ID NO: 2193314 - RNA, 19 nt, Homo sapiens
  misc_RNA (1)...(19): siRNA sense strand
aaccacagcugaagagucu

SEQ ID NO: 2193315 - RNA, 19 nt, Homo sapiens
  misc_RNA (1)...(19): siRNA sense strand
aaucugggacaaauugaua

SEQ ID NO: 2193316 - RNA, 19 nt, Homo sapiens
  misc_RNA (1)...(19): siRNA sense strand
gagggauucucuccuggau

SEQ ID NO: 2193317 - RNA, 19 nt, Homo sapiens
  misc_RNA (1)...(19): siRNA sense strand
cccagauguuuguaauuaa

SEQ ID NO: 2193318 - RNA, 19 nt, Homo sapiens
  misc_RNA (1)...(19): siRNA sense strand
ucuaugccacggugauuua

SEQ ID NO: 2193319 - RNA, 19 nt, Homo sapiens
  misc_RNA (1)...(19): siRNA sense strand
cagcggggauuuucaguuu

SEQ ID NO: 2193320 - RNA, 19 nt, Homo sapiens
  misc_RNA (1)...(19): siRNA sense strand
cagaaagucaccagaggaa

SEQ ID NO: 2193321 - RNA, 19 nt, Homo sapiens
  misc_RNA (1)...(19): siRNA sense strand
ucacagcucauccaaaucu

SEQ ID NO: 2193322 - RNA, 19 nt, Homo sapiens
  misc_RNA (1)...(19): siRNA sense strand
ccucacagccucuucuuca

SEQ ID NO: 2193323 - RNA, 19 nt, Homo sapiens
  misc_RNA (1)...(19): siRNA sense strand
gaaauccagguugugugua

SEQ ID NO: 2193324 - RNA, 19 nt, Homo sapiens
  misc_RNA (1)...(19): siRNA sense strand
ggacccaugggcacaaaga

SEQ ID NO: 2193325 - RNA, 19 nt, Homo sapiens
  misc_RNA (1)...(19): siRNA sense strand
gagaucuggcugcuaguga

SEQ ID NO: 2193326 - RNA, 19 nt, Homo sapiens
  misc_RNA (1)...(19): siRNA sense strand
aaacagcgcaucccaacca

SEQ ID NO: 2193327 - RNA, 19 nt, Homo sapiens
  misc_RNA (1)...(19): siRNA sense strand
aaacugauuauuccaagug

SEQ ID NO: 2193328 - RNA, 19 nt, Homo sapiens
  misc_RNA (1)...(19): siRNA sense strand
ccacggugauuuaccaaaa

SEQ ID NO: 2193329 - RNA, 19 nt, Homo sapiens
  misc_RNA (1)...(19): siRNA sense strand
guacaagaugccuguggaa

SEQ ID NO: 2193330 - RNA, 19 nt, Homo sapiens
  misc_RNA (1)...(19): siRNA sense strand
aaauccagguuguguguag

SEQ ID NO: 2193331 - RNA, 19 nt, Homo sapiens
  misc_RNA (1)...(19): siRNA sense strand
gacgaagaccccauuuaua

SEQ ID NO: 2193332 - RNA, 19 nt, Homo sapiens
  misc_RNA (1)...(19): siRNA sense strand
ugauauaauugacgaagac

SEQ ID NO: 2193333 - RNA, 19 nt, Homo sapiens
  misc_RNA (1)...(19): siRNA sense strand
ccaaagaagauucagaaaa

SEQ ID NO: 2193334 - RNA, 19 nt, Homo sapiens
  misc_RNA (1)...(19): siRNA sense strand
acaagaugccuguggaaug

SEQ ID NO: 2193335 - RNA, 19 nt, Homo sapiens
  misc_RNA (1)...(19): siRNA sense strand
acgaagaccccauuuauaa

SEQ ID NO: 2193336 - RNA, 19 nt, Homo sapiens
  misc_RNA (1)...(19): siRNA sense strand
ugaaauccagguugugugu

SEQ ID NO: 2193337 - RNA, 19 nt, Homo sapiens
  misc_RNA (1)...(19): siRNA sense strand
gaaggcaagacaguuggaa

SEQ ID NO: 2193338 - RNA, 19 nt, Homo sapiens
  misc_RNA (1)...(19): siRNA sense strand
gguuguguguaguggugua

SEQ ID NO: 2193339 - RNA, 19 nt, Homo sapiens
  misc_RNA (1)...(19): siRNA sense strand
gcugaagagucugcugcuu

SEQ ID NO: 2193340 - RNA, 19 nt, Homo sapiens
  misc_RNA (1)...(19): siRNA sense strand
guuacccgcugcuuaagag

SEQ ID NO: 2193341 - RNA, 19 nt, Homo sapiens
  misc_RNA (1)...(19): siRNA sense strand
gauuguuugugcugaacga

SEQ ID NO: 2193342 - RNA, 19 nt, Homo sapiens
  misc_RNA (1)...(19): siRNA sense strand
ugccaaagaagauucagaa

SEQ ID NO: 2193343 - RNA, 19 nt, Homo sapiens
  misc_RNA (1)...(19): siRNA sense strand
gccaaagaagauucagaaa

SEQ ID NO: 2193344 - RNA, 19 nt, Homo sapiens
  misc_RNA (1)...(19): siRNA sense strand
caaaucugggacaaauuga

SEQ ID NO: 2193345 - RNA, 19 nt, Homo sapiens
  misc_RNA (1)...(19): siRNA sense strand
ccuccagccuuguguuaca

SEQ ID NO: 2193346 - RNA, 19 nt, Homo sapiens
  misc_RNA (1)...(19): siRNA sense strand
gagugguggugcaaagagu

SEQ ID NO: 2193347 - RNA, 19 nt, Homo sapiens
  misc_RNA (1)...(19): siRNA sense strand
gcacaaagaagcaaaacag

SEQ ID NO: 2193348 - RNA, 19 nt, Homo sapiens
  misc_RNA (1)...(19): siRNA sense strand
caccagcuccucccaaagu

SEQ ID NO: 2193349 - RNA, 19 nt, Homo sapiens
  misc_RNA (1)...(19): siRNA sense strand
gcaaacgaaggaggagaga

SEQ ID NO: 2193350 - RNA, 19 nt, Homo sapiens
  misc_RNA (1)...(19): siRNA sense strand
gugcaaagaguguauucuc

SEQ ID NO: 2193351 - RNA, 19 nt, Homo sapiens
  misc_RNA (1)...(19): siRNA sense strand
ggagaucuggcugcuagug

SEQ ID NO: 2193352 - RNA, 19 nt, Homo sapiens
  misc_RNA (1)...(19): siRNA sense strand
ugacgaagaccccauuuau

SEQ ID NO: 2193353 - RNA, 19 nt, Homo sapiens
  misc_RNA (1)...(19): siRNA sense strand
gcggggauuuucaguuuga

SEQ ID NO: 2193354 - RNA, 19 nt, Homo sapiens
  misc_RNA (1)...(19): siRNA sense strand
gcgaccagcccugugaaga

SEQ ID NO: 2193355 - RNA, 19 nt, Homo sapiens
  misc_RNA (1)...(19): siRNA sense strand
acagaggccggaagacaga

SEQ ID NO: 2193356 - RNA, 19 nt, Homo sapiens
  misc_RNA (1)...(19): siRNA sense strand
gcaacgggagauuggaaca

SEQ ID NO: 2193357 - RNA, 19 nt, Homo sapiens
  misc_RNA (1)...(19): siRNA sense strand
ucaacuccaucugcagugu

SEQ ID NO: 2193358 - RNA, 19 nt, Homo sapiens
  misc_RNA (1)...(19): siRNA sense strand
uggcccagauguuuguaau

SEQ ID NO: 2193359 - RNA, 19 nt, Homo sapiens
  misc_RNA (1)...(19): siRNA sense strand
auccaaaucugggacaaau

SEQ ID NO: 2193360 - RNA, 19 nt, Homo sapiens
  misc_RNA (1)...(19): siRNA sense strand
aacgggagauuggaacaga

SEQ ID NO: 2193361 - RNA, 19 nt, Homo sapiens
  misc_RNA (1)...(19): siRNA sense strand
uguggucucuggugcaagu

SEQ ID NO: 2193362 - RNA, 19 nt, Homo sapiens
  misc_RNA (1)...(19): siRNA sense strand
gcagccuggugggaaugaa

SEQ ID NO: 2193363 - RNA, 19 nt, Homo sapiens
  misc_RNA (1)...(19): siRNA sense strand
gacauaccccuuccaagaa

SEQ ID NO: 2193364 - RNA, 19 nt, Homo sapiens
  misc_RNA (1)...(19): siRNA sense strand
ucugggacaaauugauaua

SEQ ID NO: 2193365 - RNA, 19 nt, Homo sapiens
  misc_RNA (1)...(19): siRNA sense strand
guacgaaaccacuuuauaa

SEQ ID NO: 2193366 - RNA, 19 nt, Homo sapiens
  misc_RNA (1)...(19): siRNA sense strand
ggagauauuuccacacaau

SEQ ID NO: 2193367 - RNA, 19 nt, Homo sapiens
  misc_RNA (1)...(19): siRNA sense strand
guaccugucuuucaaguga

SEQ ID NO: 2193368 - RNA, 19 nt, Homo sapiens
  misc_RNA (1)...(19): siRNA sense strand
caaagaugaugcccuuauu

SEQ ID NO: 2193369 - RNA, 19 nt, Homo sapiens
  misc_RNA (1)...(19): siRNA sense strand
gcugcaggcuauucauuua

SEQ ID NO: 2193370 - RNA, 19 nt, Homo sapiens
  misc_RNA (1)...(19): siRNA sense strand
gggaagagauuguguucga

SEQ ID NO: 2193371 - RNA, 19 nt, Homo sapiens
  misc_RNA (1)...(19): siRNA sense strand
gggauuaucuauaucuuca

SEQ ID NO: 2193372 - RNA, 19 nt, Homo sapiens
  misc_RNA (1)...(19): siRNA sense strand
gauguauuaugccuucuuu

SEQ ID NO: 2193373 - RNA, 19 nt, Homo sapiens
  misc_RNA (1)...(19): siRNA sense strand
cguacagacucauagcuua

SEQ ID NO: 2193374 - RNA, 19 nt, Homo sapiens
  misc_RNA (1)...(19): siRNA sense strand
acaagaagcccaucagcua

SEQ ID NO: 2193375 - RNA, 19 nt, Homo sapiens
  misc_RNA (1)...(19): siRNA sense strand
ggaaaaugguauaugagua

SEQ ID NO: 2193376 - RNA, 19 nt, Homo sapiens
  misc_RNA (1)...(19): siRNA sense strand
ggaguacgaaaccacuuua

SEQ ID NO: 2193377 - RNA, 19 nt, Homo sapiens
  misc_RNA (1)...(19): siRNA sense strand
ccagauugcagacgcauuu

SEQ ID NO: 2193378 - RNA, 19 nt, Homo sapiens
  misc_RNA (1)...(19): siRNA sense strand
caucacguuugcccucuuu

SEQ ID NO: 2193379 - RNA, 19 nt, Homo sapiens
  misc_RNA (1)...(19): siRNA sense strand
gcaggcuauucauuuacua

SEQ ID NO: 2193380 - RNA, 19 nt, Homo sapiens
  misc_RNA (1)...(19): siRNA sense strand
gcugguuugugcacgauuu

SEQ ID NO: 2193381 - RNA, 19 nt, Homo sapiens
  misc_RNA (1)...(19): siRNA sense strand
cuacaaggcuccccagauu

SEQ ID NO: 2193382 - RNA, 19 nt, Homo sapiens
  misc_RNA (1)...(19): siRNA sense strand
cacacaauauacuuaggua

SEQ ID NO: 2193383 - RNA, 19 nt, Homo sapiens
  misc_RNA (1)...(19): siRNA sense strand
uacaggcccuccaagguuu

SEQ ID NO: 2193384 - RNA, 19 nt, Homo sapiens
  misc_RNA (1)...(19): siRNA sense strand
aaauugacuuguucaggaa

SEQ ID NO: 2193385 - RNA, 19 nt, Homo sapiens
  misc_RNA (1)...(19): siRNA sense strand
cgaccgcgaucagaaauuc

SEQ ID NO: 2193386 - RNA, 19 nt, Homo sapiens
  misc_RNA (1)...(19): siRNA sense strand
gcagacgcauuugccauuc

SEQ ID NO: 2193387 - RNA, 19 nt, Homo sapiens
  misc_RNA (1)...(19): siRNA sense strand
cuacauggccgucaucauc

SEQ ID NO: 2193388 - RNA, 19 nt, Homo sapiens
  misc_RNA (1)...(19): siRNA sense strand
agaauucuguaucaccaaa

SEQ ID NO: 2193389 - RNA, 19 nt, Homo sapiens
  misc_RNA (1)...(19): siRNA sense strand
gaccgaagccuccgaaagg

SEQ ID NO: 2193390 - RNA, 19 nt, Homo sapiens
  misc_RNA (1)...(19): siRNA sense strand
uauuaugccuucuuucauc

SEQ ID NO: 2193391 - RNA, 19 nt, Homo sapiens
  misc_RNA (1)...(19): siRNA sense strand
cuccaaggcugcaguacaa

SEQ ID NO: 2193392 - RNA, 19 nt, Homo sapiens
  misc_RNA (1)...(19): siRNA sense strand
guguguaccugucuuucaa

SEQ ID NO: 2193393 - RNA, 19 nt, Homo sapiens
  misc_RNA (1)...(19): siRNA sense strand
guccuucacuggugcauca

SEQ ID NO: 2193394 - RNA, 19 nt, Homo sapiens
  misc_RNA (1)...(19): siRNA sense strand
caccaaaugggaagagauu

SEQ ID NO: 2193395 - RNA, 19 nt, Homo sapiens
  misc_RNA (1)...(19): siRNA sense strand
gcaucuaacgccagcaaga

SEQ ID NO: 2193396 - RNA, 19 nt, Homo sapiens
  misc_RNA (1)...(19): siRNA sense strand
acaaagaugaugcccuuau

SEQ ID NO: 2193397 - RNA, 19 nt, Homo sapiens
  misc_RNA (1)...(19): siRNA sense strand
uuacaggcccuccaagguu

SEQ ID NO: 2193398 - RNA, 19 nt, Homo sapiens
  misc_RNA (1)...(19): siRNA sense strand
ccaaaugggaagagauugu

SEQ ID NO: 2193399 - RNA, 19 nt, Homo sapiens
  misc_RNA (1)...(19): siRNA sense strand
ucaguugguucaaugucaa

SEQ ID NO: 2193400 - RNA, 19 nt, Homo sapiens
  misc_RNA (1)...(19): siRNA sense strand
gcuagccaccuuucuggaa

SEQ ID NO: 2193401 - RNA, 19 nt, Homo sapiens
  misc_RNA (1)...(19): siRNA sense strand
caaggcugcaguacaaaga

SEQ ID NO: 2193402 - RNA, 19 nt, Homo sapiens
  misc_RNA (1)...(19): siRNA sense strand
ggaccgaagccuccgaaag

SEQ ID NO: 2193403 - RNA, 19 nt, Homo sapiens
  misc_RNA (1)...(19): siRNA sense strand
gcauuaucguacagacuca

SEQ ID NO: 2193404 - RNA, 19 nt, Homo sapiens
  misc_RNA (1)...(19): siRNA sense strand
cgcaaaggcaagcaucuaa

SEQ ID NO: 2193405 - RNA, 19 nt, Homo sapiens
  misc_RNA (1)...(19): siRNA sense strand
gguauucgaagccgacaga

SEQ ID NO: 2193406 - RNA, 19 nt, Homo sapiens
  misc_RNA (1)...(19): siRNA sense strand
gaucguccacugugagaca

SEQ ID NO: 2193407 - RNA, 19 nt, Homo sapiens
  misc_RNA (1)...(19): siRNA sense strand
aguacgaaaccacuuuaua

SEQ ID NO: 2193408 - RNA, 19 nt, Homo sapiens
  misc_RNA (1)...(19): siRNA sense strand
cuucacuggugcaucauga

SEQ ID NO: 2193409 - RNA, 19 nt, Homo sapiens
  misc_RNA (1)...(19): siRNA sense strand
uaucuucaguugguucaau

SEQ ID NO: 2193410 - RNA, 19 nt, Homo sapiens
  misc_RNA (1)...(19): siRNA sense strand
gaaugacagauggagguuu

SEQ ID NO: 2193411 - RNA, 19 nt, Homo sapiens
  misc_RNA (1)...(19): siRNA sense strand
uguauuaugccuucuuuca

SEQ ID NO: 2193412 - RNA, 19 nt, Homo sapiens
  misc_RNA (1)...(19): siRNA sense strand
ccgccagggucaucacguu

SEQ ID NO: 2193413 - RNA, 19 nt, Homo sapiens
  misc_RNA (1)...(19): siRNA sense strand
aagaugaugcccuuauuca

SEQ ID NO: 2193414 - RNA, 19 nt, Homo sapiens
  misc_RNA (1)...(19): siRNA sense strand
cagcgaccgcgaucagaaa

SEQ ID NO: 2193415 - RNA, 19 nt, Homo sapiens
  misc_RNA (1)...(19): siRNA sense strand
gcaaaggcaagcaucuaac

SEQ ID NO: 2193416 - RNA, 19 nt, Homo sapiens
  misc_RNA (1)...(19): siRNA sense strand
aaagaugaugcccuuauuc

SEQ ID NO: 2193417 - RNA, 19 nt, Homo sapiens
  misc_RNA (1)...(19): siRNA sense strand
caaaugggaagagauugug

SEQ ID NO: 2193418 - RNA, 19 nt, Homo sapiens
  misc_RNA (1)...(19): siRNA sense strand
gauggagguuuuacuggaa

SEQ ID NO: 2193419 - RNA, 19 nt, Homo sapiens
  misc_RNA (1)...(19): siRNA sense strand
gccaacagcggcagcaaca

SEQ ID NO: 2193420 - RNA, 19 nt, Homo sapiens
  misc_RNA (1)...(19): siRNA sense strand
guacagacucauagcuuac

SEQ ID NO: 2193421 - RNA, 19 nt, Homo sapiens
  misc_RNA (1)...(19): siRNA sense strand
aggacacgcugcaggcuau

SEQ ID NO: 2193422 - RNA, 19 nt, Homo sapiens
  misc_RNA (1)...(19): siRNA sense strand
aggaauagguacccagcau

SEQ ID NO: 2193423 - RNA, 19 nt, Homo sapiens
  misc_RNA (1)...(19): siRNA sense strand
aaugacagauggagguuuu

SEQ ID NO: 2193424 - RNA, 19 nt, Homo sapiens
  misc_RNA (1)...(19): siRNA sense strand
gacgggaggcugaaaauga

SEQ ID NO: 2193425 - RNA, 19 nt, Homo sapiens
  misc_RNA (1)...(19): siRNA sense strand
uauaugaguaugcggaugu

SEQ ID NO: 2193426 - RNA, 19 nt, Homo sapiens
  misc_RNA (1)...(19): siRNA sense strand
ccacacaauauacuuaggu

SEQ ID NO: 2193427 - RNA, 19 nt, Homo sapiens
  misc_RNA (1)...(19): siRNA sense strand
gguguguaccugucuuuca

SEQ ID NO: 2193428 - RNA, 19 nt, Homo sapiens
  misc_RNA (1)...(19): siRNA sense strand
ggaucuucaucguccuuca

SEQ ID NO: 2193429 - RNA, 19 nt, Homo sapiens
  misc_RNA (1)...(19): siRNA sense strand
gcauuugcuagccaccuuu

SEQ ID NO: 2193430 - RNA, 19 nt, Homo sapiens
  misc_RNA (1)...(19): siRNA sense strand
gcuguacuuugggaucuuc

SEQ ID NO: 2193431 - RNA, 19 nt, Homo sapiens
  misc_RNA (1)...(19): siRNA sense strand
gguucgggcucacgcucuu

SEQ ID NO: 2193432 - RNA, 19 nt, Homo sapiens
  misc_RNA (1)...(19): siRNA sense strand
guauuaugccuucuuucau

SEQ ID NO: 2193433 - RNA, 19 nt, Homo sapiens
  misc_RNA (1)...(19): siRNA sense strand
ccgcaaaggcaagcaucua

SEQ ID NO: 2193434 - RNA, 19 nt, Homo sapiens
  misc_RNA (1)...(19): siRNA sense strand
uacgguccaucuccaacaa

SEQ ID NO: 2193435 - RNA, 19 nt, Homo sapiens
  misc_RNA (1)...(19): siRNA sense strand
gaguacgaaaccacuuuau

SEQ ID NO: 2193436 - RNA, 19 nt, Homo sapiens
  misc_RNA (1)...(19): siRNA sense strand
uucaggagcgguuggagua

SEQ ID NO: 2193437 - RNA, 19 nt, Homo sapiens
  misc_RNA (1)...(19): siRNA sense strand
acuggaaaaugguauauga

SEQ ID NO: 2193438 - RNA, 19 nt, Homo sapiens
  misc_RNA (1)...(19): siRNA sense strand
gcccaccacggauugaaga

SEQ ID NO: 2193439 - RNA, 19 nt, Homo sapiens
  misc_RNA (1)...(19): siRNA sense strand
ucagcgaccgcgaucagaa

SEQ ID NO: 2193440 - RNA, 19 nt, Homo sapiens
  misc_RNA (1)...(19): siRNA sense strand
aauucuguaucaccaaaug

SEQ ID NO: 2193441 - RNA, 19 nt, Homo sapiens
  misc_RNA (1)...(19): siRNA sense strand
gccagggucaucacguuug

SEQ ID NO: 2193442 - RNA, 19 nt, Homo sapiens
  misc_RNA (1)...(19): siRNA sense strand
guaugcggaugugaguaug

SEQ ID NO: 2193443 - RNA, 19 nt, Homo sapiens
  misc_RNA (1)...(19): siRNA sense strand
gagcaaugguuucaguuua

SEQ ID NO: 2193444 - RNA, 19 nt, Homo sapiens
  misc_RNA (1)...(19): siRNA sense strand
gaagugaagugcaaaucuu

SEQ ID NO: 2193445 - RNA, 19 nt, Homo sapiens
  misc_RNA (1)...(19): siRNA sense strand
gaacaugaauacaguggau

SEQ ID NO: 2193446 - RNA, 19 nt, Homo sapiens
  misc_RNA (1)...(19): siRNA sense strand
gcaaaucuuccaagucuaa

SEQ ID NO: 2193447 - RNA, 19 nt, Homo sapiens
  misc_RNA (1)...(19): siRNA sense strand
ggauacagauuggguaguu

SEQ ID NO: 2193448 - RNA, 19 nt, Homo sapiens
  misc_RNA (1)...(19): siRNA sense strand
gcugcaagauguucagauu

SEQ ID NO: 2193449 - RNA, 19 nt, Homo sapiens
  misc_RNA (1)...(19): siRNA sense strand
gugcaaaucuuccaagucu

SEQ ID NO: 2193450 - RNA, 19 nt, Homo sapiens
  misc_RNA (1)...(19): siRNA sense strand
gaaauucagcaacuuaugu

SEQ ID NO: 2193451 - RNA, 19 nt, Homo sapiens
  misc_RNA (1)...(19): siRNA sense strand
guaugaagaugaagugaag

SEQ ID NO: 2193452 - RNA, 19 nt, Homo sapiens
  misc_RNA (1)...(19): siRNA sense strand
cacaagagcuucaggugau

SEQ ID NO: 2193453 - RNA, 19 nt, Homo sapiens
  misc_RNA (1)...(19): siRNA sense strand
gacaccaccucaacgguuu

SEQ ID NO: 2193454 - RNA, 19 nt, Homo sapiens
  misc_RNA (1)...(19): siRNA sense strand
uguaagcggucugaauaua

SEQ ID NO: 2193455 - RNA, 19 nt, Homo sapiens
  misc_RNA (1)...(19): siRNA sense strand
gcaaugguuucaguuuaga

SEQ ID NO: 2193456 - RNA, 19 nt, Homo sapiens
  misc_RNA (1)...(19): siRNA sense strand
caguuuagaugauggagaa

SEQ ID NO: 2193457 - RNA, 19 nt, Homo sapiens
  misc_RNA (1)...(19): siRNA sense strand
aaauauaguucgaccuuca

SEQ ID NO: 2193458 - RNA, 19 nt, Homo sapiens
  misc_RNA (1)...(19): siRNA sense strand
ggagcaaugguuucaguuu

SEQ ID NO: 2193459 - RNA, 19 nt, Homo sapiens
  misc_RNA (1)...(19): siRNA sense strand
gagcuucaggugaugauaa

SEQ ID NO: 2193460 - RNA, 19 nt, Homo sapiens
  misc_RNA (1)...(19): siRNA sense strand
gauggagaauugagaccuu

SEQ ID NO: 2193461 - RNA, 19 nt, Homo sapiens
  misc_RNA (1)...(19): siRNA sense strand
uaagcggucugaauauauc

SEQ ID NO: 2193462 - RNA, 19 nt, Homo sapiens
  misc_RNA (1)...(19): siRNA sense strand
uuacucaagugaacaugaa

SEQ ID NO: 2193463 - RNA, 19 nt, Homo sapiens
  misc_RNA (1)...(19): siRNA sense strand
uggcagaauuguaugaaga

SEQ ID NO: 2193464 - RNA, 19 nt, Homo sapiens
  misc_RNA (1)...(19): siRNA sense strand
guaagcggucugaauauau

SEQ ID NO: 2193465 - RNA, 19 nt, Homo sapiens
  misc_RNA (1)...(19): siRNA sense strand
gcaguuggccuuggcagaa

SEQ ID NO: 2193466 - RNA, 19 nt, Homo sapiens
  misc_RNA (1)...(19): siRNA sense strand
aaaaucagcugcaagaugu

SEQ ID NO: 2193467 - RNA, 19 nt, Homo sapiens
  misc_RNA (1)...(19): siRNA sense strand
aagaugaagugaagugcaa

SEQ ID NO: 2193468 - RNA, 19 nt, Homo sapiens
  misc_RNA (1)...(19): siRNA sense strand
caggugaugauaaaucuaa

SEQ ID NO: 2193469 - RNA, 19 nt, Homo sapiens
  misc_RNA (1)...(19): siRNA sense strand
gcagaauuguaugaagaug

SEQ ID NO: 2193470 - RNA, 19 nt, Homo sapiens
  misc_RNA (1)...(19): siRNA sense strand
gaaaaucagcugcaagaug

SEQ ID NO: 2193471 - RNA, 19 nt, Homo sapiens
  misc_RNA (1)...(19): siRNA sense strand
gggcugucccucugaauga

SEQ ID NO: 2193472 - RNA, 19 nt, Homo sapiens
  misc_RNA (1)...(19): siRNA sense strand
acaugaauacaguggauua

SEQ ID NO: 2193473 - RNA, 19 nt, Homo sapiens
  misc_RNA (1)...(19): siRNA sense strand
caauuucuggagucuguua

SEQ ID NO: 2193474 - RNA, 19 nt, Homo sapiens
  misc_RNA (1)...(19): siRNA sense strand
uuuagaugauggagaauug

SEQ ID NO: 2193475 - RNA, 19 nt, Homo sapiens
  misc_RNA (1)...(19): siRNA sense strand
caagugaacaugaauacag

SEQ ID NO: 2193476 - RNA, 19 nt, Homo sapiens
  misc_RNA (1)...(19): siRNA sense strand
ucuggagucuguuaagaga

SEQ ID NO: 2193477 - RNA, 19 nt, Homo sapiens
  misc_RNA (1)...(19): siRNA sense strand
cuuaaacuguggagcaaug

SEQ ID NO: 2193478 - RNA, 19 nt, Homo sapiens
  misc_RNA (1)...(19): siRNA sense strand
uuuguaagcggucugaaua

SEQ ID NO: 2193479 - RNA, 19 nt, Homo sapiens
  misc_RNA (1)...(19): siRNA sense strand
ggccuuggcagaauuguau

SEQ ID NO: 2193480 - RNA, 19 nt, Homo sapiens
  misc_RNA (1)...(19): siRNA sense strand
gagaaaaucagcugcaaga

SEQ ID NO: 2193481 - RNA, 19 nt, Homo sapiens
  misc_RNA (1)...(19): siRNA sense strand
ugacucucauugcauguau

SEQ ID NO: 2193482 - RNA, 19 nt, Homo sapiens
  misc_RNA (1)...(19): siRNA sense strand
gagaauugagaccuuacaa

SEQ ID NO: 2193483 - RNA, 19 nt, Homo sapiens
  misc_RNA (1)...(19): siRNA sense strand
uacaaugaaccaacaaaug

SEQ ID NO: 2193484 - RNA, 19 nt, Homo sapiens
  misc_RNA (1)...(19): siRNA sense strand
cagcaacuuauguuagaaa

SEQ ID NO: 2193485 - RNA, 19 nt, Homo sapiens
  misc_RNA (1)...(19): siRNA sense strand
guggagcaaugguuucagu

SEQ ID NO: 2193486 - RNA, 19 nt, Homo sapiens
  misc_RNA (1)...(19): siRNA sense strand
cagaauuguaugaagauga

SEQ ID NO: 2193487 - RNA, 19 nt, Homo sapiens
  misc_RNA (1)...(19): siRNA sense strand
acaaugaaccaacaaaugc

SEQ ID NO: 2193488 - RNA, 19 nt, Homo sapiens
  misc_RNA (1)...(19): siRNA sense strand
gauacagauuggguaguuc

SEQ ID NO: 2193489 - RNA, 19 nt, Homo sapiens
  misc_RNA (1)...(19): siRNA sense strand
gguggaggauacagauugg

SEQ ID NO: 2193490 - RNA, 19 nt, Homo sapiens
  misc_RNA (1)...(19): siRNA sense strand
ugcaagauguucagauuuu

SEQ ID NO: 2193491 - RNA, 19 nt, Homo sapiens
  misc_RNA (1)...(19): siRNA sense strand
uucagcaacuuauguuaga

SEQ ID NO: 2193492 - RNA, 19 nt, Homo sapiens
  misc_RNA (1)...(19): siRNA sense strand
ggucugaauauaucuaugg

SEQ ID NO: 2193493 - RNA, 19 nt, Homo sapiens
  misc_RNA (1)...(19): siRNA sense strand
gaaccaacaaaugcucaau

SEQ ID NO: 2193494 - RNA, 19 nt, Homo sapiens
  misc_RNA (1)...(19): siRNA sense strand
gaccuaaagccacagucuu

SEQ ID NO: 2193495 - RNA, 19 nt, Homo sapiens
  misc_RNA (1)...(19): siRNA sense strand
ggaaaauugugaaugaacu

SEQ ID NO: 2193496 - RNA, 19 nt, Homo sapiens
  misc_RNA (1)...(19): siRNA sense strand
gguuucaguuuagaugaug

SEQ ID NO: 2193497 - RNA, 19 nt, Homo sapiens
  misc_RNA (1)...(19): siRNA sense strand
gcaagauguucagauuuug

SEQ ID NO: 2193498 - RNA, 19 nt, Homo sapiens
  misc_RNA (1)...(19): siRNA sense strand
cagauuggguaguucuuuu

SEQ ID NO: 2193499 - RNA, 19 nt, Homo sapiens
  misc_RNA (1)...(19): siRNA sense strand
caugaauacaguggauuaa

SEQ ID NO: 2193500 - RNA, 19 nt, Homo sapiens
  misc_RNA (1)...(19): siRNA sense strand
ggagaauugagaccuuaca

SEQ ID NO: 2193501 - RNA, 19 nt, Homo sapiens
  misc_RNA (1)...(19): siRNA sense strand
auggagaauugagaccuua

SEQ ID NO: 2193502 - RNA, 19 nt, Homo sapiens
  misc_RNA (1)...(19): siRNA sense strand
agcaaugguuucaguuuag

SEQ ID NO: 2193503 - RNA, 19 nt, Homo sapiens
  misc_RNA (1)...(19): siRNA sense strand
gaugaagugaagugcaaau

SEQ ID NO: 2193504 - RNA, 19 nt, Homo sapiens
  misc_RNA (1)...(19): siRNA sense strand
ucaaagaggcaagggaaca

SEQ ID NO: 2193505 - RNA, 19 nt, Homo sapiens
  misc_RNA (1)...(19): siRNA sense strand
aagugaacaugaauacagu

SEQ ID NO: 2193506 - RNA, 19 nt, Homo sapiens
  misc_RNA (1)...(19): siRNA sense strand
ucagcaacuuauguuagaa

SEQ ID NO: 2193507 - RNA, 19 nt, Homo sapiens
  misc_RNA (1)...(19): siRNA sense strand
cucaauuucuggagucugu

SEQ ID NO: 2193508 - RNA, 19 nt, Homo sapiens
  misc_RNA (1)...(19): siRNA sense strand
aaacuguggagcaaugguu

SEQ ID NO: 2193509 - RNA, 19 nt, Homo sapiens
  misc_RNA (1)...(19): siRNA sense strand
uaaagccacagucuucaag

SEQ ID NO: 2193510 - RNA, 19 nt, Homo sapiens
  misc_RNA (1)...(19): siRNA sense strand
ugaagugaagugcaaaucu

SEQ ID NO: 2193511 - RNA, 19 nt, Homo sapiens
  misc_RNA (1)...(19): siRNA sense strand
gauguucagauuuugcuua

SEQ ID NO: 2193512 - RNA, 19 nt, Homo sapiens
  misc_RNA (1)...(19): siRNA sense strand
caaagaggcaagggaacau

SEQ ID NO: 2193513 - RNA, 19 nt, Homo sapiens
  misc_RNA (1)...(19): siRNA sense strand
gcaacuuauguuagaaauc

SEQ ID NO: 2193514 - RNA, 19 nt, Homo sapiens
  misc_RNA (1)...(19): siRNA sense strand
gagcaggagaggaggucuu

SEQ ID NO: 2193515 - RNA, 19 nt, Homo sapiens
  misc_RNA (1)...(19): siRNA sense strand
acucaagugaacaugaaua

SEQ ID NO: 2193516 - RNA, 19 nt, Homo sapiens
  misc_RNA (1)...(19): siRNA sense strand
ccacggacaccaccucaac

SEQ ID NO: 2193517 - RNA, 19 nt, Homo sapiens
  misc_RNA (1)...(19): siRNA sense strand
acaagagcuucaggugaug

SEQ ID NO: 2193518 - RNA, 19 nt, Homo sapiens
  misc_RNA (1)...(19): siRNA sense strand
cuaaagccacagucuucaa

SEQ ID NO: 2193519 - RNA, 19 nt, Homo sapiens
  misc_RNA (1)...(19): siRNA sense strand
caagagcuucaggugauga

SEQ ID NO: 2193520 - RNA, 19 nt, Homo sapiens
  misc_RNA (1)...(19): siRNA sense strand
aaacaaagcugacacauuu

SEQ ID NO: 2193521 - RNA, 19 nt, Homo sapiens
  misc_RNA (1)...(19): siRNA sense strand
uaacguaccuaaccuauua

SEQ ID NO: 2193522 - RNA, 19 nt, Homo sapiens
  misc_RNA (1)...(19): siRNA sense strand
gaacaaagacucugagaaa

SEQ ID NO: 2193523 - RNA, 19 nt, Homo sapiens
  misc_RNA (1)...(19): siRNA sense strand
ggacggagauccuucagua

SEQ ID NO: 2193524 - RNA, 19 nt, Homo sapiens
  misc_RNA (1)...(19): siRNA sense strand
ggacauagaucaagcaaag

SEQ ID NO: 2193525 - RNA, 19 nt, Homo sapiens
  misc_RNA (1)...(19): siRNA sense strand
gcagacaggugaagagaaa

SEQ ID NO: 2193526 - RNA, 19 nt, Homo sapiens
  misc_RNA (1)...(19): siRNA sense strand
ggacagauauuuccuugga

SEQ ID NO: 2193527 - RNA, 19 nt, Homo sapiens
  misc_RNA (1)...(19): siRNA sense strand
cgacaaggcuaguuugaaa

SEQ ID NO: 2193528 - RNA, 19 nt, Homo sapiens
  misc_RNA (1)...(19): siRNA sense strand
gaaaggaaaugagaaugaa

SEQ ID NO: 2193529 - RNA, 19 nt, Homo sapiens
  misc_RNA (1)...(19): siRNA sense strand
caaguucucuuugccauua

SEQ ID NO: 2193530 - RNA, 19 nt, Homo sapiens
  misc_RNA (1)...(19): siRNA sense strand
ggaaagggaagcuauuaua

SEQ ID NO: 2193531 - RNA, 19 nt, Homo sapiens
  misc_RNA (1)...(19): siRNA sense strand
gcaagaauuuggugaucua

SEQ ID NO: 2193532 - RNA, 19 nt, Homo sapiens
  misc_RNA (1)...(19): siRNA sense strand
gcagacaaaucccucuuaa

SEQ ID NO: 2193533 - RNA, 19 nt, Homo sapiens
  misc_RNA (1)...(19): siRNA sense strand
gagaggagguagaaauuga

SEQ ID NO: 2193534 - RNA, 19 nt, Homo sapiens
  misc_RNA (1)...(19): siRNA sense strand
gaaauguacuucaaagauc

SEQ ID NO: 2193535 - RNA, 19 nt, Homo sapiens
  misc_RNA (1)...(19): siRNA sense strand
gcucuuaucuucauuguca

SEQ ID NO: 2193536 - RNA, 19 nt, Homo sapiens
  misc_RNA (1)...(19): siRNA sense strand
guucaaacaugccacauuu

SEQ ID NO: 2193537 - RNA, 19 nt, Homo sapiens
  misc_RNA (1)...(19): siRNA sense strand
gagaagaauuucacauuuc

SEQ ID NO: 2193538 - RNA, 19 nt, Homo sapiens
  misc_RNA (1)...(19): siRNA sense strand
gaagauggguggagcuaug

SEQ ID NO: 2193539 - RNA, 19 nt, Homo sapiens
  misc_RNA (1)...(19): siRNA sense strand
gcaacaagcucuaccucaa

SEQ ID NO: 2193540 - RNA, 19 nt, Homo sapiens
  misc_RNA (1)...(19): siRNA sense strand
gguaauacaucuuccuuga

SEQ ID NO: 2193541 - RNA, 19 nt, Homo sapiens
  misc_RNA (1)...(19): siRNA sense strand
ggaagaauccauggaaaua

SEQ ID NO: 2193542 - RNA, 19 nt, Homo sapiens
  misc_RNA (1)...(19): siRNA sense strand
gaagagaagaggcugauuu

SEQ ID NO: 2193543 - RNA, 19 nt, Homo sapiens
  misc_RNA (1)...(19): siRNA sense strand
cgaaggagcugucucuaga

SEQ ID NO: 2193544 - RNA, 19 nt, Homo sapiens
  misc_RNA (1)...(19): siRNA sense strand
caaaugaacacacaaacua

SEQ ID NO: 2193545 - RNA, 19 nt, Homo sapiens
  misc_RNA (1)...(19): siRNA sense strand
gcaaauggccaguaaauag

SEQ ID NO: 2193546 - RNA, 19 nt, Homo sapiens
  misc_RNA (1)...(19): siRNA sense strand
gagaaauacuucaguuguu

SEQ ID NO: 2193547 - RNA, 19 nt, Homo sapiens
  misc_RNA (1)...(19): siRNA sense strand
gaaggaagaugagcugaug

SEQ ID NO: 2193548 - RNA, 19 nt, Homo sapiens
  misc_RNA (1)...(19): siRNA sense strand
gaacagcagccacaacaaa

SEQ ID NO: 2193549 - RNA, 19 nt, Homo sapiens
  misc_RNA (1)...(19): siRNA sense strand
gaagaaagggugccuguug

SEQ ID NO: 2193550 - RNA, 19 nt, Homo sapiens
  misc_RNA (1)...(19): siRNA sense strand
gggaagcuauuauaucuga

SEQ ID NO: 2193551 - RNA, 19 nt, Homo sapiens
  misc_RNA (1)...(19): siRNA sense strand
gcagcagucucguccauuu

SEQ ID NO: 2193552 - RNA, 19 nt, Homo sapiens
  misc_RNA (1)...(19): siRNA sense strand
ggaggacccuuuaaagaug

SEQ ID NO: 2193553 - RNA, 19 nt, Homo sapiens
  misc_RNA (1)...(19): siRNA sense strand
agacaaaucccucuuaauu

SEQ ID NO: 2193554 - RNA, 19 nt, Homo sapiens
  misc_RNA (1)...(19): siRNA sense strand
ugaauuugcuguaguagaa

SEQ ID NO: 2193555 - RNA, 19 nt, Homo sapiens
  misc_RNA (1)...(19): siRNA sense strand
gaaccaauuuagagccuuu

SEQ ID NO: 2193556 - RNA, 19 nt, Homo sapiens
  misc_RNA (1)...(19): siRNA sense strand
uaagaaggcugaauuggau

SEQ ID NO: 2193557 - RNA, 19 nt, Homo sapiens
  misc_RNA (1)...(19): siRNA sense strand
gcaggagguuuaggcauua

SEQ ID NO: 2193558 - RNA, 19 nt, Homo sapiens
  misc_RNA (1)...(19): siRNA sense strand
gguguucacuuccuuauga

SEQ ID NO: 2193559 - RNA, 19 nt, Homo sapiens
  misc_RNA (1)...(19): siRNA sense strand
gaacauagaggaaccaagu

SEQ ID NO: 2193560 - RNA, 19 nt, Homo sapiens
  misc_RNA (1)...(19): siRNA sense strand
gagcuagacucacuugaug

SEQ ID NO: 2193561 - RNA, 19 nt, Homo sapiens
  misc_RNA (1)...(19): siRNA sense strand
gaaugcagaugugcuguuu

SEQ ID NO: 2193562 - RNA, 19 nt, Homo sapiens
  misc_RNA (1)...(19): siRNA sense strand
caaguuauguaccaaagaa

SEQ ID NO: 2193563 - RNA, 19 nt, Homo sapiens
  misc_RNA (1)...(19): siRNA sense strand
gauaagagaauucagcaaa

SEQ ID NO: 2193564 - RNA, 19 nt, Homo sapiens
  misc_RNA (1)...(19): siRNA sense strand
ggaacaagccgaaggcaaa

SEQ ID NO: 2193565 - RNA, 19 nt, Homo sapiens
  misc_RNA (1)...(19): siRNA sense strand
gaaagggaagcuauuauau

SEQ ID NO: 2193566 - RNA, 19 nt, Homo sapiens
  misc_RNA (1)...(19): siRNA sense strand
gaauauaaaccaaccagaa

SEQ ID NO: 2193567 - RNA, 19 nt, Homo sapiens
  misc_RNA (1)...(19): siRNA sense strand
uacaacagcuuuccaagaa

SEQ ID NO: 2193568 - RNA, 19 nt, Homo sapiens
  misc_RNA (1)...(19): siRNA sense strand
gcuaaucacaguauguuua

SEQ ID NO: 2193569 - RNA, 19 nt, Homo sapiens
  misc_RNA (1)...(19): siRNA sense strand
caauggaaguuggcaguua

SEQ ID NO: 2193570 - RNA, 19 nt, Homo sapiens
  misc_RNA (1)...(19): siRNA sense strand
ggacugauauaguuaagca

SEQ ID NO: 2193571 - RNA, 19 nt, Homo sapiens
  misc_RNA (1)...(19): siRNA sense strand
caaaguuuaucuugccuaa

SEQ ID NO: 2193572 - RNA, 19 nt, Homo sapiens
  misc_RNA (1)...(19): siRNA sense strand
caaagaagaggaagaagaa

SEQ ID NO: 2193573 - RNA, 19 nt, Homo sapiens
  misc_RNA (1)...(19): siRNA sense strand
ggauauugaugccuuaaau

SEQ ID NO: 2193574 - RNA, 19 nt, Homo sapiens
  misc_RNA (1)...(19): siRNA sense strand
gcaggaaucuguugaugca

SEQ ID NO: 2193575 - RNA, 19 nt, Homo sapiens
  misc_RNA (1)...(19): siRNA sense strand
ccgcaaacccuuaacuuua

SEQ ID NO: 2193576 - RNA, 19 nt, Homo sapiens
  misc_RNA (1)...(19): siRNA sense strand
ggagaaaugugagggcaaa

SEQ ID NO: 2193577 - RNA, 19 nt, Homo sapiens
  misc_RNA (1)...(19): siRNA sense strand
caucucaucugcucauauu

SEQ ID NO: 2193578 - RNA, 19 nt, Homo sapiens
  misc_RNA (1)...(19): siRNA sense strand
cgaaagaacccaaggagaa

SEQ ID NO: 2193579 - RNA, 19 nt, Homo sapiens
  misc_RNA (1)...(19): siRNA sense strand
ugagaguaaugcugaguua

SEQ ID NO: 2193580 - RNA, 19 nt, Homo sapiens
  misc_RNA (1)...(19): siRNA sense strand
agaagaaucugcuugucua

SEQ ID NO: 2193581 - RNA, 19 nt, Homo sapiens
  misc_RNA (1)...(19): siRNA sense strand
ccacauuuaugcaagaauu

SEQ ID NO: 2193582 - RNA, 19 nt, Homo sapiens
  misc_RNA (1)...(19): siRNA sense strand
gaccuggaguucaagauuu

SEQ ID NO: 2193583 - RNA, 19 nt, Homo sapiens
  misc_RNA (1)...(19): siRNA sense strand
gaaagaacccaaggagaaa

SEQ ID NO: 2193584 - RNA, 19 nt, Homo sapiens
  misc_RNA (1)...(19): siRNA sense strand
ggcuagaugucauagaaua

SEQ ID NO: 2193585 - RNA, 19 nt, Homo sapiens
  misc_RNA (1)...(19): siRNA sense strand
agacuggacugauauaguu

SEQ ID NO: 2193586 - RNA, 19 nt, Homo sapiens
  misc_RNA (1)...(19): siRNA sense strand
cgaagaggaugaagaggaa

SEQ ID NO: 2193587 - RNA, 19 nt, Homo sapiens
  misc_RNA (1)...(19): siRNA sense strand
ggccauagcugccgagcaa

SEQ ID NO: 2193588 - RNA, 19 nt, Homo sapiens
  misc_RNA (1)...(19): siRNA sense strand
aagaugagcugauggaguu

SEQ ID NO: 2193589 - RNA, 19 nt, Homo sapiens
  misc_RNA (1)...(19): siRNA sense strand
ggaauugacugggcacaug

SEQ ID NO: 2193590 - RNA, 19 nt, Homo sapiens
  misc_RNA (1)...(19): siRNA sense strand
guaaauaggcgccagaugu

SEQ ID NO: 2193591 - RNA, 19 nt, Homo sapiens
  misc_RNA (1)...(19): siRNA sense strand
gcaaagaagaggaagaaga

SEQ ID NO: 2193592 - RNA, 19 nt, Homo sapiens
  misc_RNA (1)...(19): siRNA sense strand
gaaaccaucugcagaacca

SEQ ID NO: 2193593 - RNA, 19 nt, Homo sapiens
  misc_RNA (1)...(19): siRNA sense strand
cauuugagcucuuaucuuc

SEQ ID NO: 2193594 - RNA, 19 nt, Homo sapiens
  misc_RNA (1)...(19): siRNA sense strand
caacuuuacuggccuaaca

SEQ ID NO: 2193595 - RNA, 19 nt, Homo sapiens
  misc_RNA (1)...(19): siRNA sense strand
agaaacaccugaagcauca

SEQ ID NO: 2193596 - RNA, 19 nt, Homo sapiens
  misc_RNA (1)...(19): siRNA sense strand
aaacaguggucaaggacua

SEQ ID NO: 2193597 - RNA, 19 nt, Homo sapiens
  misc_RNA (1)...(19): siRNA sense strand
ugacaugcaucauccuaaa

SEQ ID NO: 2193598 - RNA, 19 nt, Homo sapiens
  misc_RNA (1)...(19): siRNA sense strand
gaugaagggucuaaauucu

SEQ ID NO: 2193599 - RNA, 19 nt, Homo sapiens
  misc_RNA (1)...(19): siRNA sense strand
aagcaaagaucgaggaguu

SEQ ID NO: 2193600 - RNA, 19 nt, Homo sapiens
  misc_RNA (1)...(19): siRNA sense strand
aguagaaacugaagagaaa

SEQ ID NO: 2193601 - RNA, 19 nt, Homo sapiens
  misc_RNA (1)...(19): siRNA sense strand
gaggagagccuggauaaga

SEQ ID NO: 2193602 - RNA, 19 nt, Homo sapiens
  misc_RNA (1)...(19): siRNA sense strand
ucgaaacccuaauaaauug

SEQ ID NO: 2193603 - RNA, 19 nt, Homo sapiens
  misc_RNA (1)...(19): siRNA sense strand
caaagacgguacccauaug

SEQ ID NO: 2193604 - RNA, 19 nt, Homo sapiens
  misc_RNA (1)...(19): siRNA sense strand
gaagacuaccucauucaaa

SEQ ID NO: 2193605 - RNA, 19 nt, Homo sapiens
  misc_RNA (1)...(19): siRNA sense strand
gcaaucauccguaccuuau

SEQ ID NO: 2193606 - RNA, 19 nt, Homo sapiens
  misc_RNA (1)...(19): siRNA sense strand
ggaauucuaugugaaauac

SEQ ID NO: 2193607 - RNA, 19 nt, Homo sapiens
  misc_RNA (1)...(19): siRNA sense strand
guagauaaccaagaacuaa

SEQ ID NO: 2193608 - RNA, 19 nt, Homo sapiens
  misc_RNA (1)...(19): siRNA sense strand
gaugaagacccagaauaua

SEQ ID NO: 2193609 - RNA, 19 nt, Homo sapiens
  misc_RNA (1)...(19): siRNA sense strand
gggagaauuugauagagaa

SEQ ID NO: 2193610 - RNA, 19 nt, Homo sapiens
  misc_RNA (1)...(19): siRNA sense strand
gcaaaucugugaaaaucua

SEQ ID NO: 2193611 - RNA, 19 nt, Homo sapiens
  misc_RNA (1)...(19): siRNA sense strand
uuucagagauugaggauga

SEQ ID NO: 2193612 - RNA, 19 nt, Homo sapiens
  misc_RNA (1)...(19): siRNA sense strand
gcagucucguccauuuaua

SEQ ID NO: 2193613 - RNA, 19 nt, Homo sapiens
  misc_RNA (1)...(19): siRNA sense strand
gaaugaagacgagaacaaa

SEQ ID NO: 2193614 - RNA, 19 nt, Homo sapiens
  misc_RNA (1)...(19): siRNA sense strand
aaaggcaaauggccaguaa

SEQ ID NO: 2193615 - RNA, 19 nt, Homo sapiens
  misc_RNA (1)...(19): siRNA sense strand
gcucagcuccuucaugaaa

SEQ ID NO: 2193616 - RNA, 19 nt, Homo sapiens
  misc_RNA (1)...(19): siRNA sense strand
gcaaagaggaacagacaug

SEQ ID NO: 2193617 - RNA, 19 nt, Homo sapiens
  misc_RNA (1)...(19): siRNA sense strand
uaugagugcugaagagaaa

SEQ ID NO: 2193618 - RNA, 19 nt, Homo sapiens
  misc_RNA (1)...(19): siRNA sense strand
ccagaacacuguggaagaa

SEQ ID NO: 2193619 - RNA, 19 nt, Homo sapiens
  misc_RNA (1)...(19): siRNA sense strand
cagauuauguggagguuga

SEQ ID NO: 2193620 - RNA, 19 nt, Homo sapiens
  misc_RNA (1)...(19): siRNA sense strand
gaagauaucugaguacuua

SEQ ID NO: 2193621 - RNA, 19 nt, Homo sapiens
  misc_RNA (1)...(19): siRNA sense strand
ggacgaggaugauaaauua

SEQ ID NO: 2193622 - RNA, 19 nt, Homo sapiens
  misc_RNA (1)...(19): siRNA sense strand
gcaagaagauaucugagua

SEQ ID NO: 2193623 - RNA, 19 nt, Homo sapiens
  misc_RNA (1)...(19): siRNA sense strand
gcagaaagcucucauuaca

SEQ ID NO: 2193624 - RNA, 19 nt, Homo sapiens
  misc_RNA (1)...(19): siRNA sense strand
ggaaacaacucccaaagau

SEQ ID NO: 2193625 - RNA, 19 nt, Homo sapiens
  misc_RNA (1)...(19): siRNA sense strand
gaacagaccuauuccucaa

SEQ ID NO: 2193626 - RNA, 19 nt, Homo sapiens
  misc_RNA (1)...(19): siRNA sense strand
ggagugacguuaccaguuu

SEQ ID NO: 2193627 - RNA, 19 nt, Homo sapiens
  misc_RNA (1)...(19): siRNA sense strand
gacaauaggugcaacuuga

SEQ ID NO: 2193628 - RNA, 19 nt, Homo sapiens
  misc_RNA (1)...(19): siRNA sense strand
caagagcucucauacugua

SEQ ID NO: 2193629 - RNA, 19 nt, Homo sapiens
  misc_RNA (1)...(19): siRNA sense strand
gaacuugagaugcuucuua

SEQ ID NO: 2193630 - RNA, 19 nt, Homo sapiens
  misc_RNA (1)...(19): siRNA sense strand
ucagaggguuauugaauua

SEQ ID NO: 2193631 - RNA, 19 nt, Homo sapiens
  misc_RNA (1)...(19): siRNA sense strand
ggaaauacaugacaauagg

SEQ ID NO: 2193632 - RNA, 19 nt, Homo sapiens
  misc_RNA (1)...(19): siRNA sense strand
gaacgauggugguaauaug

SEQ ID NO: 2193633 - RNA, 19 nt, Homo sapiens
  misc_RNA (1)...(19): siRNA sense strand
cagugaagcuguuccuuua

SEQ ID NO: 2193634 - RNA, 19 nt, Homo sapiens
  misc_RNA (1)...(19): siRNA sense strand
ccaaauauagccaaguuua

SEQ ID NO: 2193635 - RNA, 19 nt, Homo sapiens
  misc_RNA (1)...(19): siRNA sense strand
gaagaccaacuuauuauga

SEQ ID NO: 2193636 - RNA, 19 nt, Homo sapiens
  misc_RNA (1)...(19): siRNA sense strand
ggaaaucguugggcagaaa

SEQ ID NO: 2193637 - RNA, 19 nt, Homo sapiens
  misc_RNA (1)...(19): siRNA sense strand
caucuaaacuucaacacaa

SEQ ID NO: 2193638 - RNA, 19 nt, Homo sapiens
  misc_RNA (1)...(19): siRNA sense strand
gccauggaaugccaauuua

SEQ ID NO: 2193639 - RNA, 19 nt, Homo sapiens
  misc_RNA (1)...(19): siRNA sense strand
uaaagaaguugguugaaca

SEQ ID NO: 2193640 - RNA, 19 nt, Homo sapiens
  misc_RNA (1)...(19): siRNA sense strand
gggcagaaagcucucauua

SEQ ID NO: 2193641 - RNA, 19 nt, Homo sapiens
  misc_RNA (1)...(19): siRNA sense strand
agagaaagauggcauaauc

SEQ ID NO: 2193642 - RNA, 19 nt, Homo sapiens
  misc_RNA (1)...(19): siRNA sense strand
gaaaaucacuagucuuaga

SEQ ID NO: 2193643 - RNA, 19 nt, Homo sapiens
  misc_RNA (1)...(19): siRNA sense strand
gcaauuguauagaacaugu

SEQ ID NO: 2193644 - RNA, 19 nt, Homo sapiens
  misc_RNA (1)...(19): siRNA sense strand
ucagaacgaucuucaucua

SEQ ID NO: 2193645 - RNA, 19 nt, Homo sapiens
  misc_RNA (1)...(19): siRNA sense strand
ggaacaggagggcuauuua

SEQ ID NO: 2193646 - RNA, 19 nt, Homo sapiens
  misc_RNA (1)...(19): siRNA sense strand
gaagauauucgggaaguuu

SEQ ID NO: 2193647 - RNA, 19 nt, Homo sapiens
  misc_RNA (1)...(19): siRNA sense strand
caagaacuccuacuccuuu

SEQ ID NO: 2193648 - RNA, 19 nt, Homo sapiens
  misc_RNA (1)...(19): siRNA sense strand
uuacauaccuguucagauc

SEQ ID NO: 2193649 - RNA, 19 nt, Homo sapiens
  misc_RNA (1)...(19): siRNA sense strand
ugaaggcaauuguauagaa

SEQ ID NO: 2193650 - RNA, 19 nt, Homo sapiens
  misc_RNA (1)...(19): siRNA sense strand
ggaggcaaacgcuguguua

SEQ ID NO: 2193651 - RNA, 19 nt, Homo sapiens
  misc_RNA (1)...(19): siRNA sense strand
cagcaacccuucauugaug

SEQ ID NO: 2193652 - RNA, 19 nt, Homo sapiens
  misc_RNA (1)...(19): siRNA sense strand
gaaagcgaauuccaucaca

SEQ ID NO: 2193653 - RNA, 19 nt, Homo sapiens
  misc_RNA (1)...(19): siRNA sense strand
acagaagaccaacuuauua

SEQ ID NO: 2193654 - RNA, 19 nt, Homo sapiens
  misc_RNA (1)...(19): siRNA sense strand
caacacauguccugguaau

SEQ ID NO: 2193655 - RNA, 19 nt, Homo sapiens
  misc_RNA (1)...(19): siRNA sense strand
gauaacaugucuaauacuc

SEQ ID NO: 2193656 - RNA, 19 nt, Homo sapiens
  misc_RNA (1)...(19): siRNA sense strand
gaucagaggguuauugaau

SEQ ID NO: 2193657 - RNA, 19 nt, Homo sapiens
  misc_RNA (1)...(19): siRNA sense strand
agaacgaucuucaucuaaa

SEQ ID NO: 2193658 - RNA, 19 nt, Homo sapiens
  misc_RNA (1)...(19): siRNA sense strand
ggacaagggacgaggauga

SEQ ID NO: 2193659 - RNA, 19 nt, Homo sapiens
  misc_RNA (1)...(19): siRNA sense strand
gacagaagaccaacuuauu

SEQ ID NO: 2193660 - RNA, 19 nt, Homo sapiens
  misc_RNA (1)...(19): siRNA sense strand
gaagacagaagaccaacuu

SEQ ID NO: 2193661 - RNA, 19 nt, Homo sapiens
  misc_RNA (1)...(19): siRNA sense strand
uaacgucagucuuguacuu

SEQ ID NO: 2193662 - RNA, 19 nt, Homo sapiens
  misc_RNA (1)...(19): siRNA sense strand
ggagggcuauuuacaagau

SEQ ID NO: 2193663 - RNA, 19 nt, Homo sapiens
  misc_RNA (1)...(19): siRNA sense strand
gaagaagaucagaggguua

SEQ ID NO: 2193664 - RNA, 19 nt, Homo sapiens
  misc_RNA (1)...(19): siRNA sense strand
uuacaacuccucuucauaa

SEQ ID NO: 2193665 - RNA, 19 nt, Homo sapiens
  misc_RNA (1)...(19): siRNA sense strand
gaaugaaguuagaagaaag

SEQ ID NO: 2193666 - RNA, 19 nt, Homo sapiens
  misc_RNA (1)...(19): siRNA sense strand
agaugaaccugcuuacaaa

SEQ ID NO: 2193667 - RNA, 19 nt, Homo sapiens
  misc_RNA (1)...(19): siRNA sense strand
ggcaagcaguguagagaaa

SEQ ID NO: 2193668 - RNA, 19 nt, Homo sapiens
  misc_RNA (1)...(19): siRNA sense strand
gagaaugaaguuagaagaa

SEQ ID NO: 2193669 - RNA, 19 nt, Homo sapiens
  misc_RNA (1)...(19): siRNA sense strand
uaaaggaacuugagaugcu

SEQ ID NO: 2193670 - RNA, 19 nt, Homo sapiens
  misc_RNA (1)...(19): siRNA sense strand
gaaauugccaaacuacuuc

SEQ ID NO: 2193671 - RNA, 19 nt, Homo sapiens
  misc_RNA (1)...(19): siRNA sense strand
uagaacaccuacuauuaga

SEQ ID NO: 2193672 - RNA, 19 nt, Homo sapiens
  misc_RNA (1)...(19): siRNA sense strand
gaacaagcaagaagauauc

SEQ ID NO: 2193673 - RNA, 19 nt, Homo sapiens
  misc_RNA (1)...(19): siRNA sense strand
aaacaacucccaaagauca

SEQ ID NO: 2193674 - RNA, 19 nt, Homo sapiens
  misc_RNA (1)...(19): siRNA sense strand
gaaggacugauaauucuau

SEQ ID NO: 2193675 - RNA, 19 nt, Homo sapiens
  misc_RNA (1)...(19): siRNA sense strand
uauugaaucugauccugua

SEQ ID NO: 2193676 - RNA, 19 nt, Homo sapiens
  misc_RNA (1)...(19): siRNA sense strand
ggaugaggaugaugaccuu

SEQ ID NO: 2193677 - RNA, 19 nt, Homo sapiens
  misc_RNA (1)...(19): siRNA sense strand
gaacaacauggaacugaug

SEQ ID NO: 2193678 - RNA, 19 nt, Homo sapiens
  misc_RNA (1)...(19): siRNA sense strand
gaacaccuacuauuagaag

SEQ ID NO: 2193679 - RNA, 19 nt, Homo sapiens
  misc_RNA (1)...(19): siRNA sense strand
caucacagccuggaaguuu

SEQ ID NO: 2193680 - RNA, 19 nt, Homo sapiens
  misc_RNA (1)...(19): siRNA sense strand
gaagaucagaggguuauug

SEQ ID NO: 2193681 - RNA, 19 nt, Homo sapiens
  misc_RNA (1)...(19): siRNA sense strand
caauuuaacgucagucuug

SEQ ID NO: 2193682 - RNA, 19 nt, Homo sapiens
  misc_RNA (1)...(19): siRNA sense strand
gaacgaucuucaucuaaac

SEQ ID NO: 2193683 - RNA, 19 nt, Homo sapiens
  misc_RNA (1)...(19): siRNA sense strand
caagggacgaggaugauaa

SEQ ID NO: 2193684 - RNA, 19 nt, Homo sapiens
  misc_RNA (1)...(19): siRNA sense strand
gcagaccaucccagaauuu

SEQ ID NO: 2193685 - RNA, 19 nt, Homo sapiens
  misc_RNA (1)...(19): siRNA sense strand
cgagcacacuagugaguuu

SEQ ID NO: 2193686 - RNA, 19 nt, Homo sapiens
  misc_RNA (1)...(19): siRNA sense strand
caacauggaacugaugauu

SEQ ID NO: 2193687 - RNA, 19 nt, Homo sapiens
  misc_RNA (1)...(19): siRNA sense strand
caagcaagaagauaucuga

SEQ ID NO: 2193688 - RNA, 19 nt, Homo sapiens
  misc_RNA (1)...(19): siRNA sense strand
agaaagcucucauuacaac

SEQ ID NO: 2193689 - RNA, 19 nt, Homo sapiens
  misc_RNA (1)...(19): siRNA sense strand
gaaggcaauuguauagaac

SEQ ID NO: 2193690 - RNA, 19 nt, Homo sapiens
  misc_RNA (1)...(19): siRNA sense strand
cagcaucgauggcagaaag

SEQ ID NO: 2193691 - RNA, 19 nt, Homo sapiens
  misc_RNA (1)...(19): siRNA sense strand
uuccaaaguugucaaauug

SEQ ID NO: 2193692 - RNA, 19 nt, Homo sapiens
  misc_RNA (1)...(19): siRNA sense strand
cagaaaaucacuagucuua

SEQ ID NO: 2193693 - RNA, 19 nt, Homo sapiens
  misc_RNA (1)...(19): siRNA sense strand
gaugauuggacucuaauug

SEQ ID NO: 2193694 - RNA, 19 nt, Homo sapiens
  misc_RNA (1)...(19): siRNA sense strand
gggacgaggaugauaaauu

SEQ ID NO: 2193695 - RNA, 19 nt, Homo sapiens
  misc_RNA (1)...(19): siRNA sense strand
cagcagaauucacccacaa

SEQ ID NO: 2193696 - RNA, 19 nt, Homo sapiens
  misc_RNA (1)...(19): siRNA sense strand
gaugaugaccuucaguaug

SEQ ID NO: 2193697 - RNA, 19 nt, Homo sapiens
  misc_RNA (1)...(19): siRNA sense strand
guaugccgaucaugauuau

SEQ ID NO: 2193698 - RNA, 19 nt, Homo sapiens
  misc_RNA (1)...(19): siRNA sense strand
gaacaggagggcuauuuac

SEQ ID NO: 2193699 - RNA, 19 nt, Homo sapiens
  misc_RNA (1)...(19): siRNA sense strand
ggacuaaagaagaagauca

SEQ ID NO: 2193700 - RNA, 19 nt, Homo sapiens
  misc_RNA (1)...(19): siRNA sense strand
cagaagaccaacuuauuau

SEQ ID NO: 2193701 - RNA, 19 nt, Homo sapiens
  misc_RNA (1)...(19): siRNA sense strand
cuuccaaaguugucaaauu

SEQ ID NO: 2193702 - RNA, 19 nt, Homo sapiens
  misc_RNA (1)...(19): siRNA sense strand
caccagccauccucagaaa

SEQ ID NO: 2193703 - RNA, 19 nt, Homo sapiens
  misc_RNA (1)...(19): siRNA sense strand
cauaagcgguugggaaauc

SEQ ID NO: 2193704 - RNA, 19 nt, Homo sapiens
  misc_RNA (1)...(19): siRNA sense strand
gaggguuauugaauuaguu

SEQ ID NO: 2193705 - RNA, 19 nt, Homo sapiens
  misc_RNA (1)...(19): siRNA sense strand
gaaacaacucccaaagauc

SEQ ID NO: 2193706 - RNA, 19 nt, Homo sapiens
  misc_RNA (1)...(19): siRNA sense strand
gugguaauauggcgcuaaa

SEQ ID NO: 2193707 - RNA, 19 nt, Homo sapiens
  misc_RNA (1)...(19): siRNA sense strand
agaauucacccacaaaguu

SEQ ID NO: 2193708 - RNA, 19 nt, Homo sapiens
  misc_RNA (1)...(19): siRNA sense strand
caagcaguguagagaaaga

SEQ ID NO: 2193709 - RNA, 19 nt, Homo sapiens
  misc_RNA (1)...(19): siRNA sense strand
gaaaauguaggguuuagaa

SEQ ID NO: 2193710 - RNA, 19 nt, Homo sapiens
  misc_RNA (1)...(19): siRNA sense strand
acacauguccugguaauga

SEQ ID NO: 2193711 - RNA, 19 nt, Homo sapiens
  misc_RNA (1)...(19): siRNA sense strand
gaauucacccacaaaguuc

SEQ ID NO: 2193712 - RNA, 19 nt, Homo sapiens
  misc_RNA (1)...(19): siRNA sense strand
gcgcugaggaugaggauga

SEQ ID NO: 2193713 - RNA, 19 nt, Homo sapiens
  misc_RNA (1)...(19): siRNA sense strand
caggagggcuauuuacaag

SEQ ID NO: 2193714 - RNA, 19 nt, Homo sapiens
  misc_RNA (1)...(19): siRNA sense strand
caggaaggacugauaauuc

SEQ ID NO: 2193715 - RNA, 19 nt, Homo sapiens
  misc_RNA (1)...(19): siRNA sense strand
gaacuuauugaaucugauc

SEQ ID NO: 2193716 - RNA, 19 nt, Homo sapiens
  misc_RNA (1)...(19): siRNA sense strand
ugagaugcuucuuauguca

SEQ ID NO: 2193717 - RNA, 19 nt, Homo sapiens
  misc_RNA (1)...(19): siRNA sense strand
ugaugaagauccugauaag

SEQ ID NO: 2193718 - RNA, 19 nt, Homo sapiens
  misc_RNA (1)...(19): siRNA sense strand
ucagucaaauugugaaugg

SEQ ID NO: 2193719 - RNA, 19 nt, Homo sapiens
  misc_RNA (1)...(19): siRNA sense strand
uucaagagcucucauacug

SEQ ID NO: 2193720 - RNA, 19 nt, Homo sapiens
  misc_RNA (1)...(19): siRNA sense strand
gcaaagguuucuucaauau

SEQ ID NO: 2193721 - RNA, 19 nt, Homo sapiens
  misc_RNA (1)...(19): siRNA sense strand
uggagaaccuuuacaaaua

SEQ ID NO: 2193722 - RNA, 19 nt, Homo sapiens
  misc_RNA (1)...(19): siRNA sense strand
gaggaacccugauuucaaa

SEQ ID NO: 2193723 - RNA, 19 nt, Homo sapiens
  misc_RNA (1)...(19): siRNA sense strand
ggacaaagacaauaaguau

SEQ ID NO: 2193724 - RNA, 19 nt, Homo sapiens
  misc_RNA (1)...(19): siRNA sense strand
gaaaugaaccgaauauaca

SEQ ID NO: 2193725 - RNA, 19 nt, Homo sapiens
  misc_RNA (1)...(19): siRNA sense strand
gaaaaggauucgcuaaaua

SEQ ID NO: 2193726 - RNA, 19 nt, Homo sapiens
  misc_RNA (1)...(19): siRNA sense strand
acaaauagaucacuugguu

SEQ ID NO: 2193727 - RNA, 19 nt, Homo sapiens
  misc_RNA (1)...(19): siRNA sense strand
gaagaaguccugccuauca

SEQ ID NO: 2193728 - RNA, 19 nt, Homo sapiens
  misc_RNA (1)...(19): siRNA sense strand
ggacacaguugcuucugaa

SEQ ID NO: 2193729 - RNA, 19 nt, Homo sapiens
  misc_RNA (1)...(19): siRNA sense strand
caaagcuuauggugcauua

SEQ ID NO: 2193730 - RNA, 19 nt, Homo sapiens
  misc_RNA (1)...(19): siRNA sense strand
ggagaaccuuuacaaauag

SEQ ID NO: 2193731 - RNA, 19 nt, Homo sapiens
  misc_RNA (1)...(19): siRNA sense strand
ggagaagccuauugaaagu

SEQ ID NO: 2193732 - RNA, 19 nt, Homo sapiens
  misc_RNA (1)...(19): siRNA sense strand
agaagaaacugaagcagaa

SEQ ID NO: 2193733 - RNA, 19 nt, Homo sapiens
  misc_RNA (1)...(19): siRNA sense strand
gugcaaagguuucuucaau

SEQ ID NO: 2193734 - RNA, 19 nt, Homo sapiens
  misc_RNA (1)...(19): siRNA sense strand
gaacuggcaucggaaguga

SEQ ID NO: 2193735 - RNA, 19 nt, Homo sapiens
  misc_RNA (1)...(19): siRNA sense strand
guauggaccuuaagaacaa

SEQ ID NO: 2193736 - RNA, 19 nt, Homo sapiens
  misc_RNA (1)...(19): siRNA sense strand
gaugucuucuucuacaaua

SEQ ID NO: 2193737 - RNA, 19 nt, Homo sapiens
  misc_RNA (1)...(19): siRNA sense strand
ggagaguuguuccuacuga

SEQ ID NO: 2193738 - RNA, 19 nt, Homo sapiens
  misc_RNA (1)...(19): siRNA sense strand
ggaagcggaugcacuuaga

SEQ ID NO: 2193739 - RNA, 19 nt, Homo sapiens
  misc_RNA (1)...(19): siRNA sense strand
gaaucugaguucugcagua

SEQ ID NO: 2193740 - RNA, 19 nt, Homo sapiens
  misc_RNA (1)...(19): siRNA sense strand
ucaaagagaucuaccaaac

SEQ ID NO: 2193741 - RNA, 19 nt, Homo sapiens
  misc_RNA (1)...(19): siRNA sense strand
ggaugaguauggaccuuaa

SEQ ID NO: 2193742 - RNA, 19 nt, Homo sapiens
  misc_RNA (1)...(19): siRNA sense strand
gaaaguagauaaggaagcu

SEQ ID NO: 2193743 - RNA, 19 nt, Homo sapiens
  misc_RNA (1)...(19): siRNA sense strand
gaauaacccugcccagcau

SEQ ID NO: 2193744 - RNA, 19 nt, Homo sapiens
  misc_RNA (1)...(19): siRNA sense strand
ggagaaaguagauaaggaa

SEQ ID NO: 2193745 - RNA, 19 nt, Homo sapiens
  misc_RNA (1)...(19): siRNA sense strand
agacauggauuccuuucaa

SEQ ID NO: 2193746 - RNA, 19 nt, Homo sapiens
  misc_RNA (1)...(19): siRNA sense strand
ggagauacaccuacacuag

SEQ ID NO: 2193747 - RNA, 19 nt, Homo sapiens
  misc_RNA (1)...(19): siRNA sense strand
uagguucgcuuauauuguu

SEQ ID NO: 2193748 - RNA, 19 nt, Homo sapiens
  misc_RNA (1)...(19): siRNA sense strand
aagaacaacuugcuagguu

SEQ ID NO: 2193749 - RNA, 19 nt, Homo sapiens
  misc_RNA (1)...(19): siRNA sense strand
agaggaagauuugaagaaa

SEQ ID NO: 2193750 - RNA, 19 nt, Homo sapiens
  misc_RNA (1)...(19): siRNA sense strand
gcaggugucugugaaauac

SEQ ID NO: 2193751 - RNA, 19 nt, Homo sapiens
  misc_RNA (1)...(19): siRNA sense strand
agaggaaacuuacaugcuu

SEQ ID NO: 2193752 - RNA, 19 nt, Homo sapiens
  misc_RNA (1)...(19): siRNA sense strand
agaagccuauugaaaguuu

SEQ ID NO: 2193753 - RNA, 19 nt, Homo sapiens
  misc_RNA (1)...(19): siRNA sense strand
ugcaaagguuucuucaaua

SEQ ID NO: 2193754 - RNA, 19 nt, Homo sapiens
  misc_RNA (1)...(19): siRNA sense strand
gaagugagacgauguacgu

SEQ ID NO: 2193755 - RNA, 19 nt, Homo sapiens
  misc_RNA (1)...(19): siRNA sense strand
cuagugauguuaacacaga

SEQ ID NO: 2193756 - RNA, 19 nt, Homo sapiens
  misc_RNA (1)...(19): siRNA sense strand
gaucccaacuacagauuuc

SEQ ID NO: 2193757 - RNA, 19 nt, Homo sapiens
  misc_RNA (1)...(19): siRNA sense strand
guagaucugcagcgaauaa

SEQ ID NO: 2193758 - RNA, 19 nt, Homo sapiens
  misc_RNA (1)...(19): siRNA sense strand
ggagcagggucgaccaaga

SEQ ID NO: 2193759 - RNA, 19 nt, Homo sapiens
  misc_RNA (1)...(19): siRNA sense strand
gaagagaggaguugagaac

SEQ ID NO: 2193760 - RNA, 19 nt, Homo sapiens
  misc_RNA (1)...(19): siRNA sense strand
gcaggaagcggaugcacuu

SEQ ID NO: 2193761 - RNA, 19 nt, Homo sapiens
  misc_RNA (1)...(19): siRNA sense strand
agaccgagaucuucaggaa

SEQ ID NO: 2193762 - RNA, 19 nt, Homo sapiens
  misc_RNA (1)...(19): siRNA sense strand
cacaguugcuucugaaaug

SEQ ID NO: 2193763 - RNA, 19 nt, Homo sapiens
  misc_RNA (1)...(19): siRNA sense strand
ugacauucauuguggagaa

SEQ ID NO: 2193764 - RNA, 19 nt, Homo sapiens
  misc_RNA (1)...(19): siRNA sense strand
caggguaucuuccuugauc

SEQ ID NO: 2193765 - RNA, 19 nt, Homo sapiens
  misc_RNA (1)...(19): siRNA sense strand
gauauucuuugccuuugga

SEQ ID NO: 2193766 - RNA, 19 nt, Homo sapiens
  misc_RNA (1)...(19): siRNA sense strand
gagauauucuuugccuuug

SEQ ID NO: 2193767 - RNA, 19 nt, Homo sapiens
  misc_RNA (1)...(19): siRNA sense strand
gagcagggucgaccaagaa

SEQ ID NO: 2193768 - RNA, 19 nt, Homo sapiens
  misc_RNA (1)...(19): siRNA sense strand
aagaagaaguccugccuau

SEQ ID NO: 2193769 - RNA, 19 nt, Homo sapiens
  misc_RNA (1)...(19): siRNA sense strand
cuuacaagcuucagaaaca

SEQ ID NO: 2193770 - RNA, 19 nt, Homo sapiens
  misc_RNA (1)...(19): siRNA sense strand
ggaccaagaaagaagauau

SEQ ID NO: 2193771 - RNA, 19 nt, Homo sapiens
  misc_RNA (1)...(19): siRNA sense strand
uaguuuagguucgcuuaua

SEQ ID NO: 2193772 - RNA, 19 nt, Homo sapiens
  misc_RNA (1)...(19): siRNA sense strand
gcacaguccuuugcauucu

SEQ ID NO: 2193773 - RNA, 19 nt, Homo sapiens
  misc_RNA (1)...(19): siRNA sense strand
gagaggaguugagaacauc

SEQ ID NO: 2193774 - RNA, 19 nt, Homo sapiens
  misc_RNA (1)...(19): siRNA sense strand
gagauacaccuacacuaga

SEQ ID NO: 2193775 - RNA, 19 nt, Homo sapiens
  misc_RNA (1)...(19): siRNA sense strand
cagcuuguaugaaccaguu

SEQ ID NO: 2193776 - RNA, 19 nt, Homo sapiens
  misc_RNA (1)...(19): siRNA sense strand
gaauugaucccaacuacag

SEQ ID NO: 2193777 - RNA, 19 nt, Homo sapiens
  misc_RNA (1)...(19): siRNA sense strand
uaagaaagcccaagaaaau

SEQ ID NO: 2193778 - RNA, 19 nt, Homo sapiens
  misc_RNA (1)...(19): siRNA sense strand
gagaaccuuuacaaauaga

SEQ ID NO: 2193779 - RNA, 19 nt, Homo sapiens
  misc_RNA (1)...(19): siRNA sense strand
gggacaaagacaauaagua

SEQ ID NO: 2193780 - RNA, 19 nt, Homo sapiens
  misc_RNA (1)...(19): siRNA sense strand
gaucaaggagauacaccua

SEQ ID NO: 2193781 - RNA, 19 nt, Homo sapiens
  misc_RNA (1)...(19): siRNA sense strand
cccaacagagaaauuauua

SEQ ID NO: 2193782 - RNA, 19 nt, Homo sapiens
  misc_RNA (1)...(19): siRNA sense strand
caggagaagccuauugaaa

SEQ ID NO: 2193783 - RNA, 19 nt, Homo sapiens
  misc_RNA (1)...(19): siRNA sense strand
agaaggagaaaguagauaa

SEQ ID NO: 2193784 - RNA, 19 nt, Homo sapiens
  misc_RNA (1)...(19): siRNA sense strand
gcauauagcucuggaaaag

SEQ ID NO: 2193785 - RNA, 19 nt, Homo sapiens
  misc_RNA (1)...(19): siRNA sense strand
agagaagccuagugauguu

SEQ ID NO: 2193786 - RNA, 19 nt, Homo sapiens
  misc_RNA (1)...(19): siRNA sense strand
ucaaggagauacaccuaca

SEQ ID NO: 2193787 - RNA, 19 nt, Homo sapiens
  misc_RNA (1)...(19): siRNA sense strand
ucaggcacuucaccaauga

SEQ ID NO: 2193788 - RNA, 19 nt, Homo sapiens
  misc_RNA (1)...(19): siRNA sense strand
guggagaaccuuuacaaau

SEQ ID NO: 2193789 - RNA, 19 nt, Homo sapiens
  misc_RNA (1)...(19): siRNA sense strand
aaacuggaaucucccaaca

SEQ ID NO: 2193790 - RNA, 19 nt, Homo sapiens
  misc_RNA (1)...(19): siRNA sense strand
uuacacaauccaaagcuua

SEQ ID NO: 2193791 - RNA, 19 nt, Homo sapiens
  misc_RNA (1)...(19): siRNA sense strand
gagaagccuagugauguua

SEQ ID NO: 2193792 - RNA, 19 nt, Homo sapiens
  misc_RNA (1)...(19): siRNA sense strand
ggauuccuuucaacucuga

SEQ ID NO: 2193793 - RNA, 19 nt, Homo sapiens
  misc_RNA (1)...(19): siRNA sense strand
gaacugagagagggcuuga

SEQ ID NO: 2193794 - RNA, 19 nt, Homo sapiens
  misc_RNA (1)...(19): siRNA sense strand
gggcaaacauccccaaaga

SEQ ID NO: 2193795 - RNA, 19 nt, Homo sapiens
  misc_RNA (1)...(19): siRNA sense strand
gaccaagaaagaagauauu

SEQ ID NO: 2193796 - RNA, 19 nt, Homo sapiens
  misc_RNA (1)...(19): siRNA sense strand
aaccgaauauacacacuuu

SEQ ID NO: 2193797 - RNA, 19 nt, Homo sapiens
  misc_RNA (1)...(19): siRNA sense strand
gcacuucaccaaugacaca

SEQ ID NO: 2193798 - RNA, 19 nt, Homo sapiens
  misc_RNA (1)...(19): siRNA sense strand
gagacgauguacgugguuu

SEQ ID NO: 2193799 - RNA, 19 nt, Homo sapiens
  misc_RNA (1)...(19): siRNA sense strand
gccaacgcauugacuaugu

SEQ ID NO: 2193800 - RNA, 19 nt, Homo sapiens
  misc_RNA (1)...(19): siRNA sense strand
guacagaccgagaucuuca

SEQ ID NO: 2193801 - RNA, 19 nt, Homo sapiens
  misc_RNA (1)...(19): siRNA sense strand
uguaauggaucaaggagau

SEQ ID NO: 2193802 - RNA, 19 nt, Homo sapiens
  misc_RNA (1)...(19): siRNA sense strand
guacaguguguuaaugauu

SEQ ID NO: 2193803 - RNA, 19 nt, Homo sapiens
  misc_RNA (1)...(19): siRNA sense strand
ugaaaugaaccgaauauac

SEQ ID NO: 2193804 - RNA, 19 nt, Homo sapiens
  misc_RNA (1)...(19): siRNA sense strand
cggaugcacuuagaacuga

SEQ ID NO: 2193805 - RNA, 19 nt, Homo sapiens
  misc_RNA (1)...(19): siRNA sense strand
caaauagaucacuugguuu

SEQ ID NO: 2193806 - RNA, 19 nt, Homo sapiens
  misc_RNA (1)...(19): siRNA sense strand
gaaguccugccuaucaaug

SEQ ID NO: 2193807 - RNA, 19 nt, Homo sapiens
  misc_RNA (1)...(19): siRNA sense strand
acacaauucuggaugucuu

SEQ ID NO: 2193808 - RNA, 19 nt, Homo sapiens
  misc_RNA (1)...(19): siRNA sense strand
gaaccgaauauacacacuu

SEQ ID NO: 2193809 - RNA, 19 nt, Homo sapiens
  misc_RNA (1)...(19): siRNA sense strand
agagauauucuuugccuuu

SEQ ID NO: 2193810 - RNA, 19 nt, Homo sapiens
  misc_RNA (1)...(19): siRNA sense strand
uacuagaaauggugacuau

SEQ ID NO: 2193811 - RNA, 19 nt, Homo sapiens
  misc_RNA (1)...(19): siRNA sense strand
gaggaagauuugaagaaac

SEQ ID NO: 2193812 - RNA, 19 nt, Homo sapiens
  misc_RNA (1)...(19): siRNA sense strand
cuacagaggaacccugauu

SEQ ID NO: 2193813 - RNA, 19 nt, Homo sapiens
  misc_RNA (1)...(19): siRNA sense strand
agaccucuguggcaguuaa

SEQ ID NO: 2193814 - RNA, 19 nt, Homo sapiens
  misc_RNA (1)...(19): siRNA sense strand
cagagaagccuagugaugu

SEQ ID NO: 2193815 - RNA, 19 nt, Homo sapiens
  misc_RNA (1)...(19): siRNA sense strand
ucagagaagccuagugaug

SEQ ID NO: 2193816 - RNA, 19 nt, Homo sapiens
  misc_RNA (1)...(19): siRNA sense strand
gggcaggugucugugaaau

SEQ ID NO: 2193817 - RNA, 19 nt, Homo sapiens
  misc_RNA (1)...(19): siRNA sense strand
gcaaacauccccaaagaau

SEQ ID NO: 2193818 - RNA, 19 nt, Homo sapiens
  misc_RNA (1)...(19): siRNA sense strand
gagaaggagaaaguagaua

SEQ ID NO: 2193819 - RNA, 19 nt, Homo sapiens
  misc_RNA (1)...(19): siRNA sense strand
aggauucgcuaaauauugu

SEQ ID NO: 2193820 - RNA, 19 nt, Homo sapiens
  misc_RNA (1)...(19): siRNA sense strand
gaacagagguuaauacaca

SEQ ID NO: 2193821 - RNA, 19 nt, Homo sapiens
  misc_RNA (1)...(19): siRNA sense strand
ggaaguaccugaaccaguu

SEQ ID NO: 2193822 - RNA, 19 nt, Homo sapiens
  misc_RNA (1)...(19): siRNA sense strand
ccaauaaucuuaacagugu

SEQ ID NO: 2193823 - RNA, 19 nt, Homo sapiens
  misc_RNA (1)...(19): siRNA sense strand
caaguuggauuucuucaaa

SEQ ID NO: 2193824 - RNA, 19 nt, Homo sapiens
  misc_RNA (1)...(19): siRNA sense strand
ggaaacaggugagcagauu

SEQ ID NO: 2193825 - RNA, 19 nt, Homo sapiens
  misc_RNA (1)...(19): siRNA sense strand
gaacaagaccagaguuuca

SEQ ID NO: 2193826 - RNA, 19 nt, Homo sapiens
  misc_RNA (1)...(19): siRNA sense strand
guggugagcuuaaugaaug

SEQ ID NO: 2193827 - RNA, 19 nt, Homo sapiens
  misc_RNA (1)...(19): siRNA sense strand
gcaaggagaacagagguua

SEQ ID NO: 2193828 - RNA, 19 nt, Homo sapiens
  misc_RNA (1)...(19): siRNA sense strand
agauugaccuggagaagua

SEQ ID NO: 2193829 - RNA, 19 nt, Homo sapiens
  misc_RNA (1)...(19): siRNA sense strand
gacauugccucugcgcuua

SEQ ID NO: 2193830 - RNA, 19 nt, Homo sapiens
  misc_RNA (1)...(19): siRNA sense strand
gcgcuuagauaccuucaug

SEQ ID NO: 2193831 - RNA, 19 nt, Homo sapiens
  misc_RNA (1)...(19): siRNA sense strand
cagcagaaguacacaguga

SEQ ID NO: 2193832 - RNA, 19 nt, Homo sapiens
  misc_RNA (1)...(19): siRNA sense strand
gcacggaucccacguaugg

SEQ ID NO: 2193833 - RNA, 19 nt, Homo sapiens
  misc_RNA (1)...(19): siRNA sense strand
gacuggagcugguuacaga

SEQ ID NO: 2193834 - RNA, 19 nt, Homo sapiens
  misc_RNA (1)...(19): siRNA sense strand
gagaagaaagugcgaguga

SEQ ID NO: 2193835 - RNA, 19 nt, Homo sapiens
  misc_RNA (1)...(19): siRNA sense strand
caagaagagugaagaacug

SEQ ID NO: 2193836 - RNA, 19 nt, Homo sapiens
  misc_RNA (1)...(19): siRNA sense strand
augaaugccucucgacuua

SEQ ID NO: 2193837 - RNA, 19 nt, Homo sapiens
  misc_RNA (1)...(19): siRNA sense strand
gaagagguggugagcuuaa

SEQ ID NO: 2193838 - RNA, 19 nt, Homo sapiens
  misc_RNA (1)...(19): siRNA sense strand
gaauggaacggugaaguuu

SEQ ID NO: 2193839 - RNA, 19 nt, Homo sapiens
  misc_RNA (1)...(19): siRNA sense strand
acuuaaagcugguucauau

SEQ ID NO: 2193840 - RNA, 19 nt, Homo sapiens
  misc_RNA (1)...(19): siRNA sense strand
ugaugaaucuccuccgaaa

SEQ ID NO: 2193841 - RNA, 19 nt, Homo sapiens
  misc_RNA (1)...(19): siRNA sense strand
gaagaaagugcgagugauc

SEQ ID NO: 2193842 - RNA, 19 nt, Homo sapiens
  misc_RNA (1)...(19): siRNA sense strand
agaaggcgcuggaacuguu

SEQ ID NO: 2193843 - RNA, 19 nt, Homo sapiens
  misc_RNA (1)...(19): siRNA sense strand
gagaaguggcugcaacuga

SEQ ID NO: 2193844 - RNA, 19 nt, Homo sapiens
  misc_RNA (1)...(19): siRNA sense strand
gaccgacauuguggacuua

SEQ ID NO: 2193845 - RNA, 19 nt, Homo sapiens
  misc_RNA (1)...(19): siRNA sense strand
caacagcugccucuccaaa

SEQ ID NO: 2193846 - RNA, 19 nt, Homo sapiens
  misc_RNA (1)...(19): siRNA sense strand
gaucacaucagauaaacug

SEQ ID NO: 2193847 - RNA, 19 nt, Homo sapiens
  misc_RNA (1)...(19): siRNA sense strand
aaaccagcauccagauuga

SEQ ID NO: 2193848 - RNA, 19 nt, Homo sapiens
  misc_RNA (1)...(19): siRNA sense strand
agagugagguggacauugu

SEQ ID NO: 2193849 - RNA, 19 nt, Homo sapiens
  misc_RNA (1)...(19): siRNA sense strand
gagguggacauuguuguua

SEQ ID NO: 2193850 - RNA, 19 nt, Homo sapiens
  misc_RNA (1)...(19): siRNA sense strand
gagaacagagguuaauaca

SEQ ID NO: 2193851 - RNA, 19 nt, Homo sapiens
  misc_RNA (1)...(19): siRNA sense strand
uggaagagguggugagcuu

SEQ ID NO: 2193852 - RNA, 19 nt, Homo sapiens
  misc_RNA (1)...(19): siRNA sense strand
agaggaaucucgccuucuu

SEQ ID NO: 2193853 - RNA, 19 nt, Homo sapiens
  misc_RNA (1)...(19): siRNA sense strand
gggcacggaucccacguau

SEQ ID NO: 2193854 - RNA, 19 nt, Homo sapiens
  misc_RNA (1)...(19): siRNA sense strand
agaaguggcugcaacugau

SEQ ID NO: 2193855 - RNA, 19 nt, Homo sapiens
  misc_RNA (1)...(19): siRNA sense strand
gggaacaagaccagaguuu

SEQ ID NO: 2193856 - RNA, 19 nt, Homo sapiens
  misc_RNA (1)...(19): siRNA sense strand
gagcuguacaggagacuaa

SEQ ID NO: 2193857 - RNA, 19 nt, Homo sapiens
  misc_RNA (1)...(19): siRNA sense strand
aaagcugguucauaucuug

SEQ ID NO: 2193858 - RNA, 19 nt, Homo sapiens
  misc_RNA (1)...(19): siRNA sense strand
uaaagcugguucauaucuu

SEQ ID NO: 2193859 - RNA, 19 nt, Homo sapiens
  misc_RNA (1)...(19): siRNA sense strand
ggaagagguggugagcuua

SEQ ID NO: 2193860 - RNA, 19 nt, Homo sapiens
  misc_RNA (1)...(19): siRNA sense strand
gugagcagauugccaucaa

SEQ ID NO: 2193861 - RNA, 19 nt, Homo sapiens
  misc_RNA (1)...(19): siRNA sense strand
gaucagggcagucuuugca

SEQ ID NO: 2193862 - RNA, 19 nt, Homo sapiens
  misc_RNA (1)...(19): siRNA sense strand
gaaagugcgagugaucuau

SEQ ID NO: 2193863 - RNA, 19 nt, Homo sapiens
  misc_RNA (1)...(19): siRNA sense strand
gaaagugucagcuguaucc

SEQ ID NO: 2193864 - RNA, 19 nt, Homo sapiens
  misc_RNA (1)...(19): siRNA sense strand
ggagaacagagguuaauac

SEQ ID NO: 2193865 - RNA, 19 nt, Homo sapiens
  misc_RNA (1)...(19): siRNA sense strand
gagccgccaugaugaaucu

SEQ ID NO: 2193866 - RNA, 19 nt, Homo sapiens
  misc_RNA (1)...(19): siRNA sense strand
ccgauaagccugccacuca

SEQ ID NO: 2193867 - RNA, 19 nt, Homo sapiens
  misc_RNA (1)...(19): siRNA sense strand
gaaguaccugaaccaguuu

SEQ ID NO: 2193868 - RNA, 19 nt, Homo sapiens
  misc_RNA (1)...(19): siRNA sense strand
aaagugcgagugaucuaua

SEQ ID NO: 2193869 - RNA, 19 nt, Homo sapiens
  misc_RNA (1)...(19): siRNA sense strand
uauuucagacggcaaguua

SEQ ID NO: 2193870 - RNA, 19 nt, Homo sapiens
  misc_RNA (1)...(19): siRNA sense strand
gaagagugagguggacauu

SEQ ID NO: 2193871 - RNA, 19 nt, Homo sapiens
  misc_RNA (1)...(19): siRNA sense strand
gcuuagauaccuucaugaa

SEQ ID NO: 2193872 - RNA, 19 nt, Homo sapiens
  misc_RNA (1)...(19): siRNA sense strand
ggaacaagaccagaguuuc

SEQ ID NO: 2193873 - RNA, 19 nt, Homo sapiens
  misc_RNA (1)...(19): siRNA sense strand
gcucuggaaucuccugaag

SEQ ID NO: 2193874 - RNA, 19 nt, Homo sapiens
  misc_RNA (1)...(19): siRNA sense strand
gaaugaggaugagaagacu

SEQ ID NO: 2193875 - RNA, 19 nt, Homo sapiens
  misc_RNA (1)...(19): siRNA sense strand
ucuauacgcagcucaguaa

SEQ ID NO: 2193876 - RNA, 19 nt, Homo sapiens
  misc_RNA (1)...(19): siRNA sense strand
ucaaggcccuggaugacau

SEQ ID NO: 2193877 - RNA, 19 nt, Homo sapiens
  misc_RNA (1)...(19): siRNA sense strand
ugaauggaacggugaaguu

SEQ ID NO: 2193878 - RNA, 19 nt, Homo sapiens
  misc_RNA (1)...(19): siRNA sense strand
gagguggugagcuuaauga

SEQ ID NO: 2193879 - RNA, 19 nt, Homo sapiens
  misc_RNA (1)...(19): siRNA sense strand
gaaacaggugagcagauug

SEQ ID NO: 2193880 - RNA, 19 nt, Homo sapiens
  misc_RNA (1)...(19): siRNA sense strand
cgaagugaaacuccuggua

SEQ ID NO: 2193881 - RNA, 19 nt, Homo sapiens
  misc_RNA (1)...(19): siRNA sense strand
acaguaaaaucaccuauga

SEQ ID NO: 2193882 - RNA, 19 nt, Homo sapiens
  misc_RNA (1)...(19): siRNA sense strand
caaggagaacagagguuaa

SEQ ID NO: 2193883 - RNA, 19 nt, Homo sapiens
  misc_RNA (1)...(19): siRNA sense strand
gggcagucuuugcacauca

SEQ ID NO: 2193884 - RNA, 19 nt, Homo sapiens
  misc_RNA (1)...(19): siRNA sense strand
agaccgacauuguggacuu

SEQ ID NO: 2193885 - RNA, 19 nt, Homo sapiens
  misc_RNA (1)...(19): siRNA sense strand
ugacagaggaugagagucu

SEQ ID NO: 2193886 - RNA, 19 nt, Homo sapiens
  misc_RNA (1)...(19): siRNA sense strand
ucagcuguauccuucaaga

SEQ ID NO: 2193887 - RNA, 19 nt, Homo sapiens
  misc_RNA (1)...(19): siRNA sense strand
gaaugccucucgacuuagc

SEQ ID NO: 2193888 - RNA, 19 nt, Homo sapiens
  misc_RNA (1)...(19): siRNA sense strand
gcagaaggcgcuggaacug

SEQ ID NO: 2193889 - RNA, 19 nt, Homo sapiens
  misc_RNA (1)...(19): siRNA sense strand
gguuacagacggaagaaga

SEQ ID NO: 2193890 - RNA, 19 nt, Homo sapiens
  misc_RNA (1)...(19): siRNA sense strand
uaccugagccagccaagaa

SEQ ID NO: 2193891 - RNA, 19 nt, Homo sapiens
  misc_RNA (1)...(19): siRNA sense strand
gcaguggcauucaaaagug

SEQ ID NO: 2193892 - RNA, 19 nt, Homo sapiens
  misc_RNA (1)...(19): siRNA sense strand
uacaggagacuaagggaaa

SEQ ID NO: 2193893 - RNA, 19 nt, Homo sapiens
  misc_RNA (1)...(19): siRNA sense strand
aagugaaacuccugguaga

SEQ ID NO: 2193894 - RNA, 19 nt, Homo sapiens
  misc_RNA (1)...(19): siRNA sense strand
ggagaaguacagcgagcaa

SEQ ID NO: 2193895 - RNA, 19 nt, Homo sapiens
  misc_RNA (1)...(19): siRNA sense strand
gaaguggcugcaacugaug

SEQ ID NO: 2193896 - RNA, 19 nt, Homo sapiens
  misc_RNA (1)...(19): siRNA sense strand
ccaagaagagugaagaacu

SEQ ID NO: 2193897 - RNA, 19 nt, Homo sapiens
  misc_RNA (1)...(19): siRNA sense strand
cugggcagcugaugucuca

SEQ ID NO: 2193898 - RNA, 19 nt, Homo sapiens
  misc_RNA (1)...(19): siRNA sense strand
caauucagagcuucgagaa

SEQ ID NO: 2193899 - RNA, 19 nt, Homo sapiens
  misc_RNA (1)...(19): siRNA sense strand
caaaauuauugaccuagga

SEQ ID NO: 2193900 - RNA, 19 nt, Homo sapiens
  misc_RNA (1)...(19): siRNA sense strand
uaaugaaugaggaugagaa

SEQ ID NO: 2193901 - RNA, 19 nt, Homo sapiens
  misc_RNA (1)...(19): siRNA sense strand
gggaucacaucagauaaac

SEQ ID NO: 2193902 - RNA, 19 nt, Homo sapiens
  misc_RNA (1)...(19): siRNA sense strand
cauuggacauggaucuugu

SEQ ID NO: 2193903 - RNA, 19 nt, Homo sapiens
  misc_RNA (1)...(19): siRNA sense strand
acacagugaccgucgacua

SEQ ID NO: 2193904 - RNA, 19 nt, Homo sapiens
  misc_RNA (1)...(19): siRNA sense strand
gaggaugagaagacuguug

SEQ ID NO: 2193905 - RNA, 19 nt, Homo sapiens
  misc_RNA (1)...(19): siRNA sense strand
gcgggagaacgaagugaaa

SEQ ID NO: 2193906 - RNA, 19 nt, Homo sapiens
  misc_RNA (1)...(19): siRNA sense strand
cugcuggccuggagggaaa

SEQ ID NO: 2193907 - RNA, 19 nt, Homo sapiens
  misc_RNA (1)...(19): siRNA sense strand
uccagacccugaaggaaga

SEQ ID NO: 2193908 - RNA, 19 nt, Homo sapiens
  misc_RNA (1)...(19): siRNA sense strand
uucaagagcccaagaggaa

SEQ ID NO: 2193909 - RNA, 19 nt, Homo sapiens
  misc_RNA (1)...(19): siRNA sense strand
ucagacggcaaguuaaaug

SEQ ID NO: 2193910 - RNA, 19 nt, Homo sapiens
  misc_RNA (1)...(19): siRNA sense strand
gagagucugcagagcuuga

SEQ ID NO: 2193911 - RNA, 19 nt, Homo sapiens
  misc_RNA (1)...(19): siRNA sense strand
agcgaagacuugaauggaa

SEQ ID NO: 2193912 - RNA, 19 nt, Homo sapiens
  misc_RNA (1)...(19): siRNA sense strand
cagcgagccgccaugauga

SEQ ID NO: 2193913 - RNA, 19 nt, Homo sapiens
  misc_RNA (1)...(19): siRNA sense strand
gaaguuuucaagcucuuua

SEQ ID NO: 2193914 - RNA, 19 nt, Homo sapiens
  misc_RNA (1)...(19): siRNA sense strand
caugaaugccucucgacuu

SEQ ID NO: 2193915 - RNA, 19 nt, Homo sapiens
  misc_RNA (1)...(19): siRNA sense strand
agaaagugcgagugaucua

SEQ ID NO: 2193916 - RNA, 19 nt, Homo sapiens
  misc_RNA (1)...(19): siRNA sense strand
uuugggaucacaucagaua

SEQ ID NO: 2193917 - RNA, 19 nt, Homo sapiens
  misc_RNA (1)...(19): siRNA sense strand
gcauccagacccugaagga

SEQ ID NO: 2193918 - RNA, 19 nt, Homo sapiens
  misc_RNA (1)...(19): siRNA sense strand
gcagcucaaggccaaguug

SEQ ID NO: 2193919 - RNA, 19 nt, Homo sapiens
  misc_RNA (1)...(19): siRNA sense strand
gagaaguacagcgagcaaa

SEQ ID NO: 2193920 - RNA, 19 nt, Homo sapiens
  misc_RNA (1)...(19): siRNA sense strand
gaacgaggauccaguugau

SEQ ID NO: 2193921 - RNA, 19 nt, Homo sapiens
  misc_RNA (1)...(19): siRNA sense strand
guaaagaacauccauaaug

SEQ ID NO: 2193922 - RNA, 19 nt, Homo sapiens
  misc_RNA (1)...(19): siRNA sense strand
gaagauggaucaggcuuug

SEQ ID NO: 2193923 - RNA, 19 nt, Homo sapiens
  misc_RNA (1)...(19): siRNA sense strand
gauaguaaccuuccuguga

SEQ ID NO: 2193924 - RNA, 19 nt, Homo sapiens
  misc_RNA (1)...(19): siRNA sense strand
gcacccaucuucugcugua

SEQ ID NO: 2193925 - RNA, 19 nt, Homo sapiens
  misc_RNA (1)...(19): siRNA sense strand
gaacuucucuggaccaacu

SEQ ID NO: 2193926 - RNA, 19 nt, Homo sapiens
  misc_RNA (1)...(19): siRNA sense strand
ucacuacgcucaguucuuu

SEQ ID NO: 2193927 - RNA, 19 nt, Homo sapiens
  misc_RNA (1)...(19): siRNA sense strand
aaacuauucucucuuggua

SEQ ID NO: 2193928 - RNA, 19 nt, Homo sapiens
  misc_RNA (1)...(19): siRNA sense strand
gaauacagauuuggagaau

SEQ ID NO: 2193929 - RNA, 19 nt, Homo sapiens
  misc_RNA (1)...(19): siRNA sense strand
gcauaggaauuaucauugu

SEQ ID NO: 2193930 - RNA, 19 nt, Homo sapiens
  misc_RNA (1)...(19): siRNA sense strand
gagcauugcauuccuuauu

SEQ ID NO: 2193931 - RNA, 19 nt, Homo sapiens
  misc_RNA (1)...(19): siRNA sense strand
gaucaggcuuugcuacuca

SEQ ID NO: 2193932 - RNA, 19 nt, Homo sapiens
  misc_RNA (1)...(19): siRNA sense strand
gaccaaagacauccugauu

SEQ ID NO: 2193933 - RNA, 19 nt, Homo sapiens
  misc_RNA (1)...(19): siRNA sense strand
ggaaaucugaaugcuguua

SEQ ID NO: 2193934 - RNA, 19 nt, Homo sapiens
  misc_RNA (1)...(19): siRNA sense strand
gaagagaaagaaguuugua

SEQ ID NO: 2193935 - RNA, 19 nt, Homo sapiens
  misc_RNA (1)...(19): siRNA sense strand
ggaccaacuugaccgucua

SEQ ID NO: 2193936 - RNA, 19 nt, Homo sapiens
  misc_RNA (1)...(19): siRNA sense strand
agaaagaaguuuguagguu

SEQ ID NO: 2193937 - RNA, 19 nt, Homo sapiens
  misc_RNA (1)...(19): siRNA sense strand
ccaaagacauccugauucg

SEQ ID NO: 2193938 - RNA, 19 nt, Homo sapiens
  misc_RNA (1)...(19): siRNA sense strand
gaucuauccugcagcugaa

SEQ ID NO: 2193939 - RNA, 19 nt, Homo sapiens
  misc_RNA (1)...(19): siRNA sense strand
uggaugacuuuaacaauug

SEQ ID NO: 2193940 - RNA, 19 nt, Homo sapiens
  misc_RNA (1)...(19): siRNA sense strand
uuagugaaauugccuguga

SEQ ID NO: 2193941 - RNA, 19 nt, Homo sapiens
  misc_RNA (1)...(19): siRNA sense strand
uuacaaggcucggaccaaa

SEQ ID NO: 2193942 - RNA, 19 nt, Homo sapiens
  misc_RNA (1)...(19): siRNA sense strand
uggaaacuauucucucuug

SEQ ID NO: 2193943 - RNA, 19 nt, Homo sapiens
  misc_RNA (1)...(19): siRNA sense strand
ggaauuaucauugugaauc

SEQ ID NO: 2193944 - RNA, 19 nt, Homo sapiens
  misc_RNA (1)...(19): siRNA sense strand
cauaauggaguuagugaaa

SEQ ID NO: 2193945 - RNA, 19 nt, Homo sapiens
  misc_RNA (1)...(19): siRNA sense strand
gguaaacguuccucagagu

SEQ ID NO: 2193946 - RNA, 19 nt, Homo sapiens
  misc_RNA (1)...(19): siRNA sense strand
ggaguuuccuguuaaucug

SEQ ID NO: 2193947 - RNA, 19 nt, Homo sapiens
  misc_RNA (1)...(19): siRNA sense strand
ggaauacagauuuggagaa

SEQ ID NO: 2193948 - RNA, 19 nt, Homo sapiens
  misc_RNA (1)...(19): siRNA sense strand
gccacgagguguuugagaa

SEQ ID NO: 2193949 - RNA, 19 nt, Homo sapiens
  misc_RNA (1)...(19): siRNA sense strand
caucuucugcuguacuuua

SEQ ID NO: 2193950 - RNA, 19 nt, Homo sapiens
  misc_RNA (1)...(19): siRNA sense strand
ucauggucuuugucaauua

SEQ ID NO: 2193951 - RNA, 19 nt, Homo sapiens
  misc_RNA (1)...(19): siRNA sense strand
gggagacgaucaccuuuac

SEQ ID NO: 2193952 - RNA, 19 nt, Homo sapiens
  misc_RNA (1)...(19): siRNA sense strand
ggauugcucuuauacucau

SEQ ID NO: 2193953 - RNA, 19 nt, Homo sapiens
  misc_RNA (1)...(19): siRNA sense strand
augcagagcugaagaugga

SEQ ID NO: 2193954 - RNA, 19 nt, Homo sapiens
  misc_RNA (1)...(19): siRNA sense strand
ggaagagaaagaaguuugu

SEQ ID NO: 2193955 - RNA, 19 nt, Homo sapiens
  misc_RNA (1)...(19): siRNA sense strand
gauugggagugacauacuu

SEQ ID NO: 2193956 - RNA, 19 nt, Homo sapiens
  misc_RNA (1)...(19): siRNA sense strand
ccagcaacguggcgucuau

SEQ ID NO: 2193957 - RNA, 19 nt, Homo sapiens
  misc_RNA (1)...(19): siRNA sense strand
acuauucucucuugguaaa

SEQ ID NO: 2193958 - RNA, 19 nt, Homo sapiens
  misc_RNA (1)...(19): siRNA sense strand
gaacgacaccuuggaagag

SEQ ID NO: 2193959 - RNA, 19 nt, Homo sapiens
  misc_RNA (1)...(19): siRNA sense strand
acaauuggauuucuaaagc

SEQ ID NO: 2193960 - RNA, 19 nt, Homo sapiens
  misc_RNA (1)...(19): siRNA sense strand
uggagaauuuggaaacuau

SEQ ID NO: 2193961 - RNA, 19 nt, Homo sapiens
  misc_RNA (1)...(19): siRNA sense strand
gaaaucugaaugcuguuau

SEQ ID NO: 2193962 - RNA, 19 nt, Homo sapiens
  misc_RNA (1)...(19): siRNA sense strand
aguggaagcugaaggacaa

SEQ ID NO: 2193963 - RNA, 19 nt, Homo sapiens
  misc_RNA (1)...(19): siRNA sense strand
acaaggagcaccugacuca

SEQ ID NO: 2193964 - RNA, 19 nt, Homo sapiens
  misc_RNA (1)...(19): siRNA sense strand
gaaacuauucucucuuggu

SEQ ID NO: 2193965 - RNA, 19 nt, Homo sapiens
  misc_RNA (1)...(19): siRNA sense strand
ccuacauccucuauagaaa

SEQ ID NO: 2193966 - RNA, 19 nt, Homo sapiens
  misc_RNA (1)...(19): siRNA sense strand
gaugacuucuauacugcaa

SEQ ID NO: 2193967 - RNA, 19 nt, Homo sapiens
  misc_RNA (1)...(19): siRNA sense strand
cauggucuuugucaauuau

SEQ ID NO: 2193968 - RNA, 19 nt, Homo sapiens
  misc_RNA (1)...(19): siRNA sense strand
gaguuuggaugacuuuaac

SEQ ID NO: 2193969 - RNA, 19 nt, Homo sapiens
  misc_RNA (1)...(19): siRNA sense strand
gaggauccaguugauagua

SEQ ID NO: 2193970 - RNA, 19 nt, Homo sapiens
  misc_RNA (1)...(19): siRNA sense strand
ccugugaccuggcugugaa

SEQ ID NO: 2193971 - RNA, 19 nt, Homo sapiens
  misc_RNA (1)...(19): siRNA sense strand
aaagacauccugauucgau

SEQ ID NO: 2193972 - RNA, 19 nt, Homo sapiens
  misc_RNA (1)...(19): siRNA sense strand
gaauuaucauugugaaucc

SEQ ID NO: 2193973 - RNA, 19 nt, Homo sapiens
  misc_RNA (1)...(19): siRNA sense strand
cauaggaauuaucauugug

SEQ ID NO: 2193974 - RNA, 19 nt, Homo sapiens
  misc_RNA (1)...(19): siRNA sense strand
gacagacccucucgauggu

SEQ ID NO: 2193975 - RNA, 19 nt, Homo sapiens
  misc_RNA (1)...(19): siRNA sense strand
gagaaagaaguuuguaggu

SEQ ID NO: 2193976 - RNA, 19 nt, Homo sapiens
  misc_RNA (1)...(19): siRNA sense strand
cugaggcucuuguugaguu

SEQ ID NO: 2193977 - RNA, 19 nt, Homo sapiens
  misc_RNA (1)...(19): siRNA sense strand
gcauugcauuccuuauugg

SEQ ID NO: 2193978 - RNA, 19 nt, Homo sapiens
  misc_RNA (1)...(19): siRNA sense strand
ucuggucccuuucguaugu

SEQ ID NO: 2193979 - RNA, 19 nt, Homo sapiens
  misc_RNA (1)...(19): siRNA sense strand
gagcuccucuuugcuaaac

SEQ ID NO: 2193980 - RNA, 19 nt, Homo sapiens
  misc_RNA (1)...(19): siRNA sense strand
cuguuaaucugcauaggaa

SEQ ID NO: 2193981 - RNA, 19 nt, Homo sapiens
  misc_RNA (1)...(19): siRNA sense strand
aaacaugcaaguuggaaug

SEQ ID NO: 2193982 - RNA, 19 nt, Homo sapiens
  misc_RNA (1)...(19): siRNA sense strand
gcacccagcacggaucuau

SEQ ID NO: 2193983 - RNA, 19 nt, Homo sapiens
  misc_RNA (1)...(19): siRNA sense strand
uacauccucuauagaaaga

SEQ ID NO: 2193984 - RNA, 19 nt, Homo sapiens
  misc_RNA (1)...(19): siRNA sense strand
gacaggaaccccauucuuu

SEQ ID NO: 2193985 - RNA, 19 nt, Homo sapiens
  misc_RNA (1)...(19): siRNA sense strand
gagcugccuuucucuucga

SEQ ID NO: 2193986 - RNA, 19 nt, Homo sapiens
  misc_RNA (1)...(19): siRNA sense strand
guuaaucugcauaggaauu

SEQ ID NO: 2193987 - RNA, 19 nt, Homo sapiens
  misc_RNA (1)...(19): siRNA sense strand
aagauugcauggaggaguu

SEQ ID NO: 2193988 - RNA, 19 nt, Homo sapiens
  misc_RNA (1)...(19): siRNA sense strand
gguaaagaacauccauaau

SEQ ID NO: 2193989 - RNA, 19 nt, Homo sapiens
  misc_RNA (1)...(19): siRNA sense strand
ugguaaagaacauccauaa

SEQ ID NO: 2193990 - RNA, 19 nt, Homo sapiens
  misc_RNA (1)...(19): siRNA sense strand
gccuacauccucuauagaa

SEQ ID NO: 2193991 - RNA, 19 nt, Homo sapiens
  misc_RNA (1)...(19): siRNA sense strand
cuaaaccugugccugaaca

SEQ ID NO: 2193992 - RNA, 19 nt, Homo sapiens
  misc_RNA (1)...(19): siRNA sense strand
uaaccuuccugugagcauu

SEQ ID NO: 2193993 - RNA, 19 nt, Homo sapiens
  misc_RNA (1)...(19): siRNA sense strand
aggauccaguugauaguaa

SEQ ID NO: 2193994 - RNA, 19 nt, Homo sapiens
  misc_RNA (1)...(19): siRNA sense strand
uagguuggaauacagauuu

SEQ ID NO: 2193995 - RNA, 19 nt, Homo sapiens
  misc_RNA (1)...(19): siRNA sense strand
agcauugcauuccuuauug

SEQ ID NO: 2193996 - RNA, 19 nt, Homo sapiens
  misc_RNA (1)...(19): siRNA sense strand
auugugauauccuuucuga

SEQ ID NO: 2193997 - RNA, 19 nt, Homo sapiens
  misc_RNA (1)...(19): siRNA sense strand
gcuugguguuguauucuug

SEQ ID NO: 2193998 - RNA, 19 nt, Homo sapiens
  misc_RNA (1)...(19): siRNA sense strand
ggagaggagcugccuuucu

SEQ ID NO: 2193999 - RNA, 19 nt, Homo sapiens
  misc_RNA (1)...(19): siRNA sense strand
ugaguuuggaugacuuuaa

SEQ ID NO: 2194000 - RNA, 19 nt, Homo sapiens
  misc_RNA (1)...(19): siRNA sense strand
cugauucgauucacugcuu

SEQ ID NO: 2194001 - RNA, 19 nt, Homo sapiens
  misc_RNA (1)...(19): siRNA sense strand
gcugggagacgaucaccuu

SEQ ID NO: 2194002 - RNA, 19 nt, Homo sapiens
  misc_RNA (1)...(19): siRNA sense strand
cugcagcgauugggaguga

SEQ ID NO: 2194003 - RNA, 19 nt, Homo sapiens
  misc_RNA (1)...(19): siRNA sense strand
ggaucaggcuuugcuacuc

SEQ ID NO: 2194004 - RNA, 19 nt, Homo sapiens
  misc_RNA (1)...(19): siRNA sense strand
gcugaacgacaccuuggaa

SEQ ID NO: 2194005 - RNA, 19 nt, Homo sapiens
  misc_RNA (1)...(19): siRNA sense strand
acaaggcucggaccaaaga

SEQ ID NO: 2194006 - RNA, 19 nt, Homo sapiens
  misc_RNA (1)...(19): siRNA sense strand
cugcauaggaauuaucauu

SEQ ID NO: 2194007 - RNA, 19 nt, Homo sapiens
  misc_RNA (1)...(19): siRNA sense strand
agaaacugaucgccucauc

SEQ ID NO: 2194008 - RNA, 19 nt, Homo sapiens
  misc_RNA (1)...(19): siRNA sense strand
ugaacgaggauccaguuga

SEQ ID NO: 2194009 - RNA, 19 nt, Homo sapiens
  misc_RNA (1)...(19): siRNA sense strand
ggagaauuuggaaacuauu

SEQ ID NO: 2194010 - RNA, 19 nt, Homo sapiens
  misc_RNA (1)...(19): siRNA sense strand
uguuaucacugcuuguuuc

SEQ ID NO: 2194011 - RNA, 19 nt, Homo sapiens
  misc_RNA (1)...(19): siRNA sense strand
ugaacgacaccuuggaaga

SEQ ID NO: 2194012 - RNA, 19 nt, Homo sapiens
  misc_RNA (1)...(19): siRNA sense strand
gcuuugcuacucauccaua

SEQ ID NO: 2194013 - RNA, 19 nt, Homo sapiens
  misc_RNA (1)...(19): siRNA sense strand
ugggagacgaucaccuuua

SEQ ID NO: 2194014 - RNA, 19 nt, Homo sapiens
  misc_RNA (1)...(19): siRNA sense strand
ggaugacuuuaacaauugg

SEQ ID NO: 2194015 - RNA, 19 nt, Homo sapiens
  misc_RNA (1)...(19): siRNA sense strand
ggaaaauauugguacuuca

SEQ ID NO: 2194016 - RNA, 19 nt, Homo sapiens
  misc_RNA (1)...(19): siRNA sense strand
gagacgaucaccuuuacca

SEQ ID NO: 2194017 - RNA, 19 nt, Homo sapiens
  misc_RNA (1)...(19): siRNA sense strand
gggagugacauacuuugug

SEQ ID NO: 2194018 - RNA, 19 nt, Homo sapiens
  misc_RNA (1)...(19): siRNA sense strand
ucccgugguuuguauuuau

SEQ ID NO: 2194019 - RNA, 19 nt, Homo sapiens
  misc_RNA (1)...(19): siRNA sense strand
uauugguacuucaaacaug

SEQ ID NO: 2194020 - RNA, 19 nt, Homo sapiens
  misc_RNA (1)...(19): siRNA sense strand
caacaaacuuccucaauug

SEQ ID NO: 2194021 - RNA, 19 nt, Homo sapiens
  misc_RNA (1)...(19): siRNA sense strand
ucacauaucugaagaguau

SEQ ID NO: 2194022 - RNA, 19 nt, Homo sapiens
  misc_RNA (1)...(19): siRNA sense strand
ugaaagaacuuccagauca

SEQ ID NO: 2194023 - RNA, 19 nt, Homo sapiens
  misc_RNA (1)...(19): siRNA sense strand
ggaaagcuaucacauaucu

SEQ ID NO: 2194024 - RNA, 19 nt, Homo sapiens
  misc_RNA (1)...(19): siRNA sense strand
ccaacaaacuuccucaauu

SEQ ID NO: 2194025 - RNA, 19 nt, Homo sapiens
  misc_RNA (1)...(19): siRNA sense strand
gaguauggcuuucuucuuc

SEQ ID NO: 2194026 - RNA, 19 nt, Homo sapiens
  misc_RNA (1)...(19): siRNA sense strand
gaaagaacuuccagaucau

SEQ ID NO: 2194027 - RNA, 19 nt, Homo sapiens
  misc_RNA (1)...(19): siRNA sense strand
caaacuuccucaauugauu

SEQ ID NO: 2194028 - RNA, 19 nt, Homo sapiens
  misc_RNA (1)...(19): siRNA sense strand
gaacuuccagaucauuaua

SEQ ID NO: 2194029 - RNA, 19 nt, Homo sapiens
  misc_RNA (1)...(19): siRNA sense strand
gauggaaauugccaacaaa

SEQ ID NO: 2194030 - RNA, 19 nt, Homo sapiens
  misc_RNA (1)...(19): siRNA sense strand
ggauggaaauugccaacaa

SEQ ID NO: 2194031 - RNA, 19 nt, Homo sapiens
  misc_RNA (1)...(19): siRNA sense strand
ggaaauugccaacaaacuu

SEQ ID NO: 2194032 - RNA, 19 nt, Homo sapiens
  misc_RNA (1)...(19): siRNA sense strand
gaagacagcagugccauug

SEQ ID NO: 2194033 - RNA, 19 nt, Homo sapiens
  misc_RNA (1)...(19): siRNA sense strand
gaaauugccaacaaacuuc

SEQ ID NO: 2194034 - RNA, 19 nt, Homo sapiens
  misc_RNA (1)...(19): siRNA sense strand
gaaucuugcccuuccauuu

SEQ ID NO: 2194035 - RNA, 19 nt, Homo sapiens
  misc_RNA (1)...(19): siRNA sense strand
uuggaaagcuaucacauau

SEQ ID NO: 2194036 - RNA, 19 nt, Homo sapiens
  misc_RNA (1)...(19): siRNA sense strand
gcuaucacauaucugaaga

SEQ ID NO: 2194037 - RNA, 19 nt, Homo sapiens
  misc_RNA (1)...(19): siRNA sense strand
gcagugccauugucuuugg

SEQ ID NO: 2194038 - RNA, 19 nt, Homo sapiens
  misc_RNA (1)...(19): siRNA sense strand
cagcagugccauugucuuu

SEQ ID NO: 2194039 - RNA, 19 nt, Homo sapiens
  misc_RNA (1)...(19): siRNA sense strand
gauugaugcucaccagcuu

SEQ ID NO: 2194040 - RNA, 19 nt, Homo sapiens
  misc_RNA (1)...(19): siRNA sense strand
aaagcuaucacauaucuga

SEQ ID NO: 2194041 - RNA, 19 nt, Homo sapiens
  misc_RNA (1)...(19): siRNA sense strand
aagaacuuccagaucauua

SEQ ID NO: 2194042 - RNA, 19 nt, Homo sapiens
  misc_RNA (1)...(19): siRNA sense strand
aaucuugcccuuccauuug

SEQ ID NO: 2194043 - RNA, 19 nt, Homo sapiens
  misc_RNA (1)...(19): siRNA sense strand
uauaggccuuggauggaaa

SEQ ID NO: 2194044 - RNA, 19 nt, Homo sapiens
  misc_RNA (1)...(19): siRNA sense strand
uaucacauaucugaagagu

SEQ ID NO: 2194045 - RNA, 19 nt, Homo sapiens
  misc_RNA (1)...(19): siRNA sense strand
aagcucauguggacaagau

SEQ ID NO: 2194046 - RNA, 19 nt, Homo sapiens
  misc_RNA (1)...(19): siRNA sense strand
ggccuuggauggaaauugc

SEQ ID NO: 2194047 - RNA, 19 nt, Homo sapiens
  misc_RNA (1)...(19): siRNA sense strand
gccaacaaacuuccucaau

SEQ ID NO: 2194048 - RNA, 19 nt, Homo sapiens
  misc_RNA (1)...(19): siRNA sense strand
cagacuuggugcugacgaa

SEQ ID NO: 2194049 - RNA, 19 nt, Homo sapiens
  misc_RNA (1)...(19): siRNA sense strand
uuauaggccuuggauggaa

SEQ ID NO: 2194050 - RNA, 19 nt, Homo sapiens
  misc_RNA (1)...(19): siRNA sense strand
uuuggaaagcuaucacaua

SEQ ID NO: 2194051 - RNA, 19 nt, Homo sapiens
  misc_RNA (1)...(19): siRNA sense strand
gcuuucuucuuccagauuc

SEQ ID NO: 2194052 - RNA, 19 nt, Homo sapiens
  misc_RNA (1)...(19): siRNA sense strand
aaagaacuuccagaucauu

SEQ ID NO: 2194053 - RNA, 19 nt, Homo sapiens
  misc_RNA (1)...(19): siRNA sense strand
gugccauugucuuuggaaa

SEQ ID NO: 2194054 - RNA, 19 nt, Homo sapiens
  misc_RNA (1)...(19): siRNA sense strand
gucgaagucuccaggaacu

SEQ ID NO: 2194055 - RNA, 19 nt, Homo sapiens
  misc_RNA (1)...(19): siRNA sense strand
ugaagacagcagugccauu

SEQ ID NO: 2194056 - RNA, 19 nt, Homo sapiens
  misc_RNA (1)...(19): siRNA sense strand
caacaaacuuccucaauug

SEQ ID NO: 2194057 - RNA, 19 nt, Homo sapiens
  misc_RNA (1)...(19): siRNA sense strand
ucacauaucugaagaguau

SEQ ID NO: 2194058 - RNA, 19 nt, Homo sapiens
  misc_RNA (1)...(19): siRNA sense strand
guuaugagcuuucuuaaga

SEQ ID NO: 2194059 - RNA, 19 nt, Homo sapiens
  misc_RNA (1)...(19): siRNA sense strand
ugaaagaacuuccagauca

SEQ ID NO: 2194060 - RNA, 19 nt, Homo sapiens
  misc_RNA (1)...(19): siRNA sense strand
ggaaagcuaucacauaucu

SEQ ID NO: 2194061 - RNA, 19 nt, Homo sapiens
  misc_RNA (1)...(19): siRNA sense strand
ccaacaaacuuccucaauu

SEQ ID NO: 2194062 - RNA, 19 nt, Homo sapiens
  misc_RNA (1)...(19): siRNA sense strand
ggagagagccugcaugguu

SEQ ID NO: 2194063 - RNA, 19 nt, Homo sapiens
  misc_RNA (1)...(19): siRNA sense strand
gagagagccugcaugguuu

SEQ ID NO: 2194064 - RNA, 19 nt, Homo sapiens
  misc_RNA (1)...(19): siRNA sense strand
gcaguuaugagcuuucuua

SEQ ID NO: 2194065 - RNA, 19 nt, Homo sapiens
  misc_RNA (1)...(19): siRNA sense strand
gaguauggcuuucuucuuc

SEQ ID NO: 2194066 - RNA, 19 nt, Homo sapiens
  misc_RNA (1)...(19): siRNA sense strand
gaaagaacuuccagaucau

SEQ ID NO: 2194067 - RNA, 19 nt, Homo sapiens
  misc_RNA (1)...(19): siRNA sense strand
gauaaaggcucuuguucag

SEQ ID NO: 2194068 - RNA, 19 nt, Homo sapiens
  misc_RNA (1)...(19): siRNA sense strand
caaacuuccucaauugauu

SEQ ID NO: 2194069 - RNA, 19 nt, Homo sapiens
  misc_RNA (1)...(19): siRNA sense strand
gaacuuccagaucauuaua

SEQ ID NO: 2194070 - RNA, 19 nt, Homo sapiens
  misc_RNA (1)...(19): siRNA sense strand
gauggaaauugccaacaaa

SEQ ID NO: 2194071 - RNA, 19 nt, Homo sapiens
  misc_RNA (1)...(19): siRNA sense strand
ggauggaaauugccaacaa

SEQ ID NO: 2194072 - RNA, 19 nt, Homo sapiens
  misc_RNA (1)...(19): siRNA sense strand
gauaagaccuuggagucaa

SEQ ID NO: 2194073 - RNA, 19 nt, Homo sapiens
  misc_RNA (1)...(19): siRNA sense strand
cugcagggcugauguauga

SEQ ID NO: 2194074 - RNA, 19 nt, Homo sapiens
  misc_RNA (1)...(19): siRNA sense strand
ggaaauugccaacaaacuu

SEQ ID NO: 2194075 - RNA, 19 nt, Homo sapiens
  misc_RNA (1)...(19): siRNA sense strand
gaaccgcaguuaugagcuu

SEQ ID NO: 2194076 - RNA, 19 nt, Homo sapiens
  misc_RNA (1)...(19): siRNA sense strand
gaagacagcagugccauug

SEQ ID NO: 2194077 - RNA, 19 nt, Homo sapiens
  misc_RNA (1)...(19): siRNA sense strand
gaaagacaacccagcaaug

SEQ ID NO: 2194078 - RNA, 19 nt, Homo sapiens
  misc_RNA (1)...(19): siRNA sense strand
gaaauugccaacaaacuuc

SEQ ID NO: 2194079 - RNA, 19 nt, Homo sapiens
  misc_RNA (1)...(19): siRNA sense strand
ccauaaggccuucauagaa

SEQ ID NO: 2194080 - RNA, 19 nt, Homo sapiens
  misc_RNA (1)...(19): siRNA sense strand
gaaucuugcccuuccauuu

SEQ ID NO: 2194081 - RNA, 19 nt, Homo sapiens
  misc_RNA (1)...(19): siRNA sense strand
gcugauguaugaaggaguu

SEQ ID NO: 2194082 - RNA, 19 nt, Homo sapiens
  misc_RNA (1)...(19): siRNA sense strand
ggauaaaggcucuuguuca

SEQ ID NO: 2194083 - RNA, 19 nt, Homo sapiens
  misc_RNA (1)...(19): siRNA sense strand
ggacaucaccaaaaccuua

SEQ ID NO: 2194084 - RNA, 19 nt, Homo sapiens
  misc_RNA (1)...(19): siRNA sense strand
uuggaaagcuaucacauau

SEQ ID NO: 2194085 - RNA, 19 nt, Homo sapiens
  misc_RNA (1)...(19): siRNA sense strand
ggaaagacaacccagcaau

SEQ ID NO: 2194086 - RNA, 19 nt, Homo sapiens
  misc_RNA (1)...(19): siRNA sense strand
gcagugccauugucuuugg

SEQ ID NO: 2194087 - RNA, 19 nt, Homo sapiens
  misc_RNA (1)...(19): siRNA sense strand
gcuaucacauaucugaaga

SEQ ID NO: 2194088 - RNA, 19 nt, Homo sapiens
  misc_RNA (1)...(19): siRNA sense strand
ugaaggaguuucccaagag

SEQ ID NO: 2194089 - RNA, 19 nt, Homo sapiens
  misc_RNA (1)...(19): siRNA sense strand
gaugaguucuuaggcauuc

SEQ ID NO: 2194090 - RNA, 19 nt, Homo sapiens
  misc_RNA (1)...(19): siRNA sense strand
cagcagugccauugucuuu

SEQ ID NO: 2194091 - RNA, 19 nt, Homo sapiens
  misc_RNA (1)...(19): siRNA sense strand
ggccacgaaugcuaucuug

SEQ ID NO: 2194092 - RNA, 19 nt, Homo sapiens
  misc_RNA (1)...(19): siRNA sense strand
gauugaugcucaccagcuu

SEQ ID NO: 2194093 - RNA, 19 nt, Homo sapiens
  misc_RNA (1)...(19): siRNA sense strand
uuaagagugucagggauaa

SEQ ID NO: 2194094 - RNA, 19 nt, Homo sapiens
  misc_RNA (1)...(19): siRNA sense strand
ugacugcuuugguagagaa

SEQ ID NO: 2194095 - RNA, 19 nt, Homo sapiens
  misc_RNA (1)...(19): siRNA sense strand
aaagcuaucacauaucuga

SEQ ID NO: 2194096 - RNA, 19 nt, Homo sapiens
  misc_RNA (1)...(19): siRNA sense strand
gagccugcaugguuuuaua

SEQ ID NO: 2194097 - RNA, 19 nt, Homo sapiens
  misc_RNA (1)...(19): siRNA sense strand
acuggugacugcuuuggua

SEQ ID NO: 2194098 - RNA, 19 nt, Homo sapiens
  misc_RNA (1)...(19): siRNA sense strand
gaagcagugccugggauaa

SEQ ID NO: 2194099 - RNA, 19 nt, Homo sapiens
  misc_RNA (1)...(19): siRNA sense strand
cauagaagacauccacuca

SEQ ID NO: 2194100 - RNA, 19 nt, Homo sapiens
  misc_RNA (1)...(19): siRNA sense strand
ggauaagaccuuggaguca

SEQ ID NO: 2194101 - RNA, 19 nt, Homo sapiens
  misc_RNA (1)...(19): siRNA sense strand
caaagcaugggaagccaaa

SEQ ID NO: 2194102 - RNA, 19 nt, Homo sapiens
  misc_RNA (1)...(19): siRNA sense strand
cccaagagccccugaaaua

SEQ ID NO: 2194103 - RNA, 19 nt, Homo sapiens
  misc_RNA (1)...(19): siRNA sense strand
uguacagaaugagggauua

SEQ ID NO: 2194104 - RNA, 19 nt, Homo sapiens
  misc_RNA (1)...(19): siRNA sense strand
gggauaaaggcucuuguuc

SEQ ID NO: 2194105 - RNA, 19 nt, Homo sapiens
  misc_RNA (1)...(19): siRNA sense strand
gguggaaccgcaguuauga

SEQ ID NO: 2194106 - RNA, 19 nt, Homo sapiens
  misc_RNA (1)...(19): siRNA sense strand
aaucuugcccuuccauuug

SEQ ID NO: 2194107 - RNA, 19 nt, Homo sapiens
  misc_RNA (1)...(19): siRNA sense strand
aagaacuuccagaucauua

SEQ ID NO: 2194108 - RNA, 19 nt, Homo sapiens
  misc_RNA (1)...(19): siRNA sense strand
ugccuuugaugaguucuua

SEQ ID NO: 2194109 - RNA, 19 nt, Homo sapiens
  misc_RNA (1)...(19): siRNA sense strand
cacagugcuucaugccuuu

SEQ ID NO: 2194110 - RNA, 19 nt, Homo sapiens
  misc_RNA (1)...(19): siRNA sense strand
guucaggccacgaaugcua

SEQ ID NO: 2194111 - RNA, 19 nt, Homo sapiens
  misc_RNA (1)...(19): siRNA sense strand
uauaggccuuggauggaaa

SEQ ID NO: 2194112 - RNA, 19 nt, Homo sapiens
  misc_RNA (1)...(19): siRNA sense strand
ugagcuuucuuaagagugu

SEQ ID NO: 2194113 - RNA, 19 nt, Homo sapiens
  misc_RNA (1)...(19): siRNA sense strand
aagcucauguggacaagau

SEQ ID NO: 2194114 - RNA, 19 nt, Homo sapiens
  misc_RNA (1)...(19): siRNA sense strand
cuuaagagugucagggaua

SEQ ID NO: 2194115 - RNA, 19 nt, Homo sapiens
  misc_RNA (1)...(19): siRNA sense strand
ggccuuggauggaaauugc

SEQ ID NO: 2194116 - RNA, 19 nt, Homo sapiens
  misc_RNA (1)...(19): siRNA sense strand
ccacgaaugcuaucuugca

SEQ ID NO: 2194117 - RNA, 19 nt, Homo sapiens
  misc_RNA (1)...(19): siRNA sense strand
uaucacauaucugaagagu

SEQ ID NO: 2194118 - RNA, 19 nt, Homo sapiens
  misc_RNA (1)...(19): siRNA sense strand
gccaacaaacuuccucaau

SEQ ID NO: 2194119 - RNA, 19 nt, Homo sapiens
  misc_RNA (1)...(19): siRNA sense strand
gaaccuggagaccaucauc

SEQ ID NO: 2194120 - RNA, 19 nt, Homo sapiens
  misc_RNA (1)...(19): siRNA sense strand
cagacuuggugcugacgaa

SEQ ID NO: 2194121 - RNA, 19 nt, Homo sapiens
  misc_RNA (1)...(19): siRNA sense strand
cagaaugagggauuacaug

SEQ ID NO: 2194122 - RNA, 19 nt, Homo sapiens
  misc_RNA (1)...(19): siRNA sense strand
caccaaauaccucaucaca

SEQ ID NO: 2194123 - RNA, 19 nt, Homo sapiens
  misc_RNA (1)...(19): siRNA sense strand
uuauaggccuuggauggaa

SEQ ID NO: 2194124 - RNA, 19 nt, Homo sapiens
  misc_RNA (1)...(19): siRNA sense strand
uuuggaaagcuaucacaua

SEQ ID NO: 2194125 - RNA, 19 nt, Homo sapiens
  misc_RNA (1)...(19): siRNA sense strand
uaugagcuuucuuaagagu

SEQ ID NO: 2194126 - RNA, 19 nt, Homo sapiens
  misc_RNA (1)...(19): siRNA sense strand
uuauacuggugacugcuuu

SEQ ID NO: 2194127 - RNA, 19 nt, Homo sapiens
  misc_RNA (1)...(19): siRNA sense strand
cagcuuauaaccagugugu

SEQ ID NO: 2194128 - RNA, 19 nt, Homo sapiens
  misc_RNA (1)...(19): siRNA sense strand
gacauccacucagcaccuu

SEQ ID NO: 2194129 - RNA, 19 nt, Homo sapiens
  misc_RNA (1)...(19): siRNA sense strand
cccauaaggccuucauaga

SEQ ID NO: 2194130 - RNA, 19 nt, Homo sapiens
  misc_RNA (1)...(19): siRNA sense strand
gcuuucuucuuccagauuc

SEQ ID NO: 2194131 - RNA, 19 nt, Homo sapiens
  misc_RNA (1)...(19): siRNA sense strand
augaaggaguuucccaaga

SEQ ID NO: 2194132 - RNA, 19 nt, Homo sapiens
  misc_RNA (1)...(19): siRNA sense strand
gaccuuggagucaauccuu

SEQ ID NO: 2194133 - RNA, 19 nt, Homo sapiens
  misc_RNA (1)...(19): siRNA sense strand
auaagaccuuggagucaau

SEQ ID NO: 2194134 - RNA, 19 nt, Homo sapiens
  misc_RNA (1)...(19): siRNA sense strand
ggugacugcuuugguagag

SEQ ID NO: 2194135 - RNA, 19 nt, Homo sapiens
  misc_RNA (1)...(19): siRNA sense strand
aaagaacuuccagaucauu

SEQ ID NO: 2194136 - RNA, 19 nt, Homo sapiens
  misc_RNA (1)...(19): siRNA sense strand
gugccauugucuuuggaaa

SEQ ID NO: 2194137 - RNA, 19 nt, Homo sapiens
  misc_RNA (1)...(19): siRNA sense strand
cgucauagcaaggaaagug

SEQ ID NO: 2194138 - RNA, 19 nt, Homo sapiens
  misc_RNA (1)...(19): siRNA sense strand
agaagcagugccugggaua

SEQ ID NO: 2194139 - RNA, 19 nt, Homo sapiens
  misc_RNA (1)...(19): siRNA sense strand
acagguggaaccgcaguua

SEQ ID NO: 2194140 - RNA, 19 nt, Homo sapiens
  misc_RNA (1)...(19): siRNA sense strand
aagcagugccugggauaaa

SEQ ID NO: 2194141 - RNA, 19 nt, Homo sapiens
  misc_RNA (1)...(19): siRNA sense strand
cagcugcagccaaggcaaa

SEQ ID NO: 2194142 - RNA, 19 nt, Homo sapiens
  misc_RNA (1)...(19): siRNA sense strand
gcagggcugauguaugaag

SEQ ID NO: 2194143 - RNA, 19 nt, Homo sapiens
  misc_RNA (1)...(19): siRNA sense strand
gucgaagucuccaggaacu

SEQ ID NO: 2194144 - RNA, 19 nt, Homo sapiens
  misc_RNA (1)...(19): siRNA sense strand
acaugccuccuucccauaa

SEQ ID NO: 2194145 - RNA, 19 nt, Homo sapiens
  misc_RNA (1)...(19): siRNA sense strand
ugaagacagcagugccauu

SEQ ID NO: 2194146 - RNA, 19 nt, Homo sapiens
  misc_RNA (1)...(19): siRNA sense strand
ggagaugucugugcaguuc

SEQ ID NO: 2194147 - RNA, 19 nt, Homo sapiens
  misc_RNA (1)...(19): siRNA sense strand
gcaggaagcggaugucguu

SEQ ID NO: 2194148 - RNA, 19 nt, Homo sapiens
  misc_RNA (1)...(19): siRNA sense strand
gagcagcacgcuauucuug

SEQ ID NO: 2194149 - RNA, 19 nt, Homo sapiens
  misc_RNA (1)...(19): siRNA sense strand
ggaagcggaugucguugag

SEQ ID NO: 2194150 - RNA, 19 nt, Homo sapiens
  misc_RNA (1)...(19): siRNA sense strand
ggaugucguugagcuguga

SEQ ID NO: 2194151 - RNA, 19 nt, Homo sapiens
  misc_RNA (1)...(19): siRNA sense strand
ggaggauguuuuacaguug

SEQ ID NO: 2194152 - RNA, 19 nt, Homo sapiens
  misc_RNA (1)...(19): siRNA sense strand
gaggauguuuuacaguuga

SEQ ID NO: 2194153 - RNA, 19 nt, Homo sapiens
  misc_RNA (1)...(19): siRNA sense strand
gucaggagcagcacgcuau

SEQ ID NO: 2194154 - RNA, 19 nt, Homo sapiens
  misc_RNA (1)...(19): siRNA sense strand
ugugaaggcguuucuggaa

SEQ ID NO: 2194155 - RNA, 19 nt, Homo sapiens
  misc_RNA (1)...(19): siRNA sense strand
gcaggaggauguuuuacag

SEQ ID NO: 2194156 - RNA, 19 nt, Homo sapiens
  misc_RNA (1)...(19): siRNA sense strand
ggagcagcacgcuauucuu

SEQ ID NO: 2194157 - RNA, 19 nt, Homo sapiens
  misc_RNA (1)...(19): siRNA sense strand
gacguugucgagucagauu

SEQ ID NO: 2194158 - RNA, 19 nt, Homo sapiens
  misc_RNA (1)...(19): siRNA sense strand
gagcgcaggaagcggaugu

SEQ ID NO: 2194159 - RNA, 19 nt, Homo sapiens
  misc_RNA (1)...(19): siRNA sense strand
gcaaugggcuguacaacuu

SEQ ID NO: 2194160 - RNA, 19 nt, Homo sapiens
  misc_RNA (1)...(19): siRNA sense strand
ggguaaaccugggauauuu

SEQ ID NO: 2194161 - RNA, 19 nt, Homo sapiens
  misc_RNA (1)...(19): siRNA sense strand
caacugggcuccuauucug

SEQ ID NO: 2194162 - RNA, 19 nt, Homo sapiens
  misc_RNA (1)...(19): siRNA sense strand
ggacguagcaaauuuaaca

SEQ ID NO: 2194163 - RNA, 19 nt, Homo sapiens
  misc_RNA (1)...(19): siRNA sense strand
gaacucggccuucaucuuc

SEQ ID NO: 2194164 - RNA, 19 nt, Homo sapiens
  misc_RNA (1)...(19): siRNA sense strand
gagccaagauggacaaugg

SEQ ID NO: 2194165 - RNA, 19 nt, Homo sapiens
  misc_RNA (1)...(19): siRNA sense strand
ccagggcucugcacucaaa

SEQ ID NO: 2194166 - RNA, 19 nt, Homo sapiens
  misc_RNA (1)...(19): siRNA sense strand
gcaacgagguguaccacau

SEQ ID NO: 2194167 - RNA, 19 nt, Homo sapiens
  misc_RNA (1)...(19): siRNA sense strand
gagaucaacugggcuccua

SEQ ID NO: 2194168 - RNA, 19 nt, Homo sapiens
  misc_RNA (1)...(19): siRNA sense strand
ggucaucguggccauaaua

SEQ ID NO: 2194169 - RNA, 19 nt, Homo sapiens
  misc_RNA (1)...(19): siRNA sense strand
guaccucugugccaugaaa

SEQ ID NO: 2194170 - RNA, 19 nt, Homo sapiens
  misc_RNA (1)...(19): siRNA sense strand
caaccggaccuucgaguuu

SEQ ID NO: 2194171 - RNA, 19 nt, Homo sapiens
  misc_RNA (1)...(19): siRNA sense strand
ucuccgagcuggugaagaa

SEQ ID NO: 2194172 - RNA, 19 nt, Homo sapiens
  misc_RNA (1)...(19): siRNA sense strand
caagaucgaccuucucaug

SEQ ID NO: 2194173 - RNA, 19 nt, Homo sapiens
  misc_RNA (1)...(19): siRNA sense strand
gaggagaacucggccuuca

SEQ ID NO: 2194174 - RNA, 19 nt, Homo sapiens
  misc_RNA (1)...(19): siRNA sense strand
gugaaggacuacaugauca

SEQ ID NO: 2194175 - RNA, 19 nt, Homo sapiens
  misc_RNA (1)...(19): siRNA sense strand
caaccuggccuucauguuc

SEQ ID NO: 2194176 - RNA, 19 nt, Homo sapiens
  misc_RNA (1)...(19): siRNA sense strand
gcagaacuacuccuucaau

SEQ ID NO: 2194177 - RNA, 19 nt, Homo sapiens
  misc_RNA (1)...(19): siRNA sense strand
ggacagagagccacgucuu

SEQ ID NO: 2194178 - RNA, 19 nt, Homo sapiens
  misc_RNA (1)...(19): siRNA sense strand
gaacuacuccuucaaugac

SEQ ID NO: 2194179 - RNA, 19 nt, Homo sapiens
  misc_RNA (1)...(19): siRNA sense strand
gaggagaagcggaagaaga

SEQ ID NO: 2194180 - RNA, 19 nt, Homo sapiens
  misc_RNA (1)...(19): siRNA sense strand
ggauccggcuguucaacuu

SEQ ID NO: 2194181 - RNA, 19 nt, Homo sapiens
  misc_RNA (1)...(19): siRNA sense strand
aagcagaacuacuccuuca

SEQ ID NO: 2194182 - RNA, 19 nt, Homo sapiens
  misc_RNA (1)...(19): siRNA sense strand
acgaggacguagcaaauuu

SEQ ID NO: 2194183 - RNA, 19 nt, Homo sapiens
  misc_RNA (1)...(19): siRNA sense strand
cagaacuacuccuucaaug

SEQ ID NO: 2194184 - RNA, 19 nt, Homo sapiens
  misc_RNA (1)...(19): siRNA sense strand
ugggauauuugcaagguaa

SEQ ID NO: 2194185 - RNA, 19 nt, Homo sapiens
  misc_RNA (1)...(19): siRNA sense strand
ccagugaugucaugaaucg

SEQ ID NO: 2194186 - RNA, 19 nt, Homo sapiens
  misc_RNA (1)...(19): siRNA sense strand
cgaggacguagcaaauuua

SEQ ID NO: 2194187 - RNA, 19 nt, Homo sapiens
  misc_RNA (1)...(19): siRNA sense strand
ggacacagucagccauguu

SEQ ID NO: 2194188 - RNA, 19 nt, Homo sapiens
  misc_RNA (1)...(19): siRNA sense strand
caaguuucacgucaaguuu

SEQ ID NO: 2194189 - RNA, 19 nt, Homo sapiens
  misc_RNA (1)...(19): siRNA sense strand
gcuacucucuggcucuuuc

SEQ ID NO: 2194190 - RNA, 19 nt, Homo sapiens
  misc_RNA (1)...(19): siRNA sense strand
gcaaguucuuccgcgagua

SEQ ID NO: 2194191 - RNA, 19 nt, Homo sapiens
  misc_RNA (1)...(19): siRNA sense strand
gagagaaagaugacacugu

SEQ ID NO: 2194192 - RNA, 19 nt, Homo sapiens
  misc_RNA (1)...(19): siRNA sense strand
gaggacguagcaaauuuaa

SEQ ID NO: 2194193 - RNA, 19 nt, Homo sapiens
  misc_RNA (1)...(19): siRNA sense strand
gcacaacagcuaugaagac

SEQ ID NO: 2194194 - RNA, 19 nt, Homo sapiens
  misc_RNA (1)...(19): siRNA sense strand
gcaagcacaacagcuauga

SEQ ID NO: 2194195 - RNA, 19 nt, Homo sapiens
  misc_RNA (1)...(19): siRNA sense strand
ggagaacucggccuucauc

SEQ ID NO: 2194196 - RNA, 19 nt, Homo sapiens
  misc_RNA (1)...(19): siRNA sense strand
agaacaagcugaucaucgu

SEQ ID NO: 2194197 - RNA, 19 nt, Homo sapiens
  misc_RNA (1)...(19): siRNA sense strand
caaagcagaacuacuccuu

SEQ ID NO: 2194198 - RNA, 19 nt, Homo sapiens
  misc_RNA (1)...(19): siRNA sense strand
ugugucagcucccucaaga

SEQ ID NO: 2194199 - RNA, 19 nt, Homo sapiens
  misc_RNA (1)...(19): siRNA sense strand
gaucaacugggcuccuauu

SEQ ID NO: 2194200 - RNA, 19 nt, Homo sapiens
  misc_RNA (1)...(19): siRNA sense strand
ggauggagcggcagaaguc

SEQ ID NO: 2194201 - RNA, 19 nt, Homo sapiens
  misc_RNA (1)...(19): siRNA sense strand
gcuccaaccuggccuucau

SEQ ID NO: 2194202 - RNA, 19 nt, Homo sapiens
  misc_RNA (1)...(19): siRNA sense strand
gacaccugcuucuacauca

SEQ ID NO: 2194203 - RNA, 19 nt, Homo sapiens
  misc_RNA (1)...(19): siRNA sense strand
gucuaaaggugcugugugu

SEQ ID NO: 2194204 - RNA, 19 nt, Homo sapiens
  misc_RNA (1)...(19): siRNA sense strand
gaaaagagggagcgagaga

SEQ ID NO: 2194205 - RNA, 19 nt, Homo sapiens
  misc_RNA (1)...(19): siRNA sense strand
caaauuuaacagccaguga

SEQ ID NO: 2194206 - RNA, 19 nt, Homo sapiens
  misc_RNA (1)...(19): siRNA sense strand
ucaccugccugcucuacau

SEQ ID NO: 2194207 - RNA, 19 nt, Homo sapiens
  misc_RNA (1)...(19): siRNA sense strand
ggacacacgggaagugaag

SEQ ID NO: 2194208 - RNA, 19 nt, Homo sapiens
  misc_RNA (1)...(19): siRNA sense strand
ccaagaccaucgucaacgu

SEQ ID NO: 2194209 - RNA, 19 nt, Homo sapiens
  misc_RNA (1)...(19): siRNA sense strand
gacaaggagagcaccauga

SEQ ID NO: 2194210 - RNA, 19 nt, Homo sapiens
  misc_RNA (1)...(19): siRNA sense strand
gcccaaagcagaacuacuc

SEQ ID NO: 2194211 - RNA, 19 nt, Homo sapiens
  misc_RNA (1)...(19): siRNA sense strand
agaacuacuccuucaauga

SEQ ID NO: 2194212 - RNA, 19 nt, Homo sapiens
  misc_RNA (1)...(19): siRNA sense strand
ugaagaaccgcaugaagca

SEQ ID NO: 2194213 - RNA, 19 nt, Homo sapiens
  misc_RNA (1)...(19): siRNA sense strand
acucugcccuucaucauca

SEQ ID NO: 2194214 - RNA, 19 nt, Homo sapiens
  misc_RNA (1)...(19): siRNA sense strand
caaagaccaggaccucaug

SEQ ID NO: 2194215 - RNA, 19 nt, Homo sapiens
  misc_RNA (1)...(19): siRNA sense strand
gguaaaccugggauauuug

SEQ ID NO: 2194216 - RNA, 19 nt, Homo sapiens
  misc_RNA (1)...(19): siRNA sense strand
gcaguguggcaucaucuau

SEQ ID NO: 2194217 - RNA, 19 nt, Homo sapiens
  misc_RNA (1)...(19): siRNA sense strand
ggagggcucuguggacaac

SEQ ID NO: 2194218 - RNA, 19 nt, Homo sapiens
  misc_RNA (1)...(19): siRNA sense strand
gugaggaggagugcaagua

SEQ ID NO: 2194219 - RNA, 19 nt, Homo sapiens
  misc_RNA (1)...(19): siRNA sense strand
gcaguggcagcgcauguau

SEQ ID NO: 2194220 - RNA, 19 nt, Homo sapiens
  misc_RNA (1)...(19): siRNA sense strand
ucaacacucugcccuucau

SEQ ID NO: 2194221 - RNA, 19 nt, Homo sapiens
  misc_RNA (1)...(19): siRNA sense strand
gauauuugcaagguaauuc

SEQ ID NO: 2194222 - RNA, 19 nt, Homo sapiens
  misc_RNA (1)...(19): siRNA sense strand
ggguaccucugugccauga

SEQ ID NO: 2194223 - RNA, 19 nt, Homo sapiens
  misc_RNA (1)...(19): siRNA sense strand
ucaucuaccucagcuacaa

SEQ ID NO: 2194224 - RNA, 19 nt, Homo sapiens
  misc_RNA (1)...(19): siRNA sense strand
cacccacccuuccaacaug

SEQ ID NO: 2194225 - RNA, 19 nt, Homo sapiens
  misc_RNA (1)...(19): siRNA sense strand
caagcuguucuucaucaaa

SEQ ID NO: 2194226 - RNA, 19 nt, Homo sapiens
  misc_RNA (1)...(19): siRNA sense strand
agaucgaccuucucaugga

SEQ ID NO: 2194227 - RNA, 19 nt, Homo sapiens
  misc_RNA (1)...(19): siRNA sense strand
gaggacacacgggaaguga

SEQ ID NO: 2194228 - RNA, 19 nt, Homo sapiens
  misc_RNA (1)...(19): siRNA sense strand
ccucaaaccugaaaacaag

SEQ ID NO: 2194229 - RNA, 19 nt, Homo sapiens
  misc_RNA (1)...(19): siRNA sense strand
ggucccagcgggucaucua

SEQ ID NO: 2194230 - RNA, 19 nt, Homo sapiens
  misc_RNA (1)...(19): siRNA sense strand
acaucaacaucaccaagga

SEQ ID NO: 2194231 - RNA, 19 nt, Homo sapiens
  misc_RNA (1)...(19): siRNA sense strand
ccacugcuacggcgcaaga

SEQ ID NO: 2194232 - RNA, 19 nt, Homo sapiens
  misc_RNA (1)...(19): siRNA sense strand
aaagagggagcgagagaau

SEQ ID NO: 2194233 - RNA, 19 nt, Homo sapiens
  misc_RNA (1)...(19): siRNA sense strand
uaagcuuccuggagacgau

SEQ ID NO: 2194234 - RNA, 19 nt, Homo sapiens
  misc_RNA (1)...(19): siRNA sense strand
gggcaacgcgagggaagaa

SEQ ID NO: 2194235 - RNA, 19 nt, Homo sapiens
  misc_RNA (1)...(19): siRNA sense strand
ggcucaagcuguucuucau

SEQ ID NO: 2194236 - RNA, 19 nt, Homo sapiens
  misc_RNA (1)...(19): siRNA sense strand
ggauauuugcaagguaauu

SEQ ID NO: 2194237 - RNA, 19 nt, Homo sapiens
  misc_RNA (1)...(19): siRNA sense strand
cucaagcuguucuucauca

SEQ ID NO: 2194238 - RNA, 19 nt, Homo sapiens
  misc_RNA (1)...(19): siRNA sense strand
aaccggaccuucgaguuug

SEQ ID NO: 2194239 - RNA, 19 nt, Homo sapiens
  misc_RNA (1)...(19): siRNA sense strand
ccugcagcaucuuaaguug

SEQ ID NO: 2194240 - RNA, 19 nt, Homo sapiens
  misc_RNA (1)...(19): siRNA sense strand
ucugacaccugcuucuaca

SEQ ID NO: 2194241 - RNA, 19 nt, Homo sapiens
  misc_RNA (1)...(19): siRNA sense strand
gaagcgggaggacaacaag

SEQ ID NO: 2194242 - RNA, 19 nt, Homo sapiens
  misc_RNA (1)...(19): siRNA sense strand
caacgagguguaccacauc

SEQ ID NO: 2194243 - RNA, 19 nt, Homo sapiens
  misc_RNA (1)...(19): siRNA sense strand
gccaagcacgcgcuggaaa

SEQ ID NO: 2194244 - RNA, 19 nt, Homo sapiens
  misc_RNA (1)...(19): siRNA sense strand
ucagcucccucaagaucga

SEQ ID NO: 2194245 - RNA, 19 nt, Homo sapiens
  misc_RNA (1)...(19): siRNA sense strand
gaugucaugaaucggguaa

SEQ ID NO: 2194246 - RNA, 19 nt, Homo sapiens
  misc_RNA (1)...(19): siRNA sense strand
gacagagagccacgucuuc

SEQ ID NO: 2194247 - RNA, 19 nt, Homo sapiens
  misc_RNA (1)...(19): siRNA sense strand
cagcuacucucuggcucuu

SEQ ID NO: 2194248 - RNA, 19 nt, Homo sapiens
  misc_RNA (1)...(19): siRNA sense strand
ucaacgagaacaccuucaa

SEQ ID NO: 2194249 - RNA, 19 nt, Homo sapiens
  misc_RNA (1)...(19): siRNA sense strand
ucaagcuguucuucaucaa

SEQ ID NO: 2194250 - RNA, 19 nt, Homo sapiens
  misc_RNA (1)...(19): siRNA sense strand
acaaguuucacgucaaguu

SEQ ID NO: 2194251 - RNA, 19 nt, Homo sapiens
  misc_RNA (1)...(19): siRNA sense strand
ucaaagaccaggaccucau

SEQ ID NO: 2194252 - RNA, 19 nt, Homo sapiens
  misc_RNA (1)...(19): siRNA sense strand
ucauggacuuccugaacga

SEQ ID NO: 2194253 - RNA, 19 nt, Homo sapiens
  misc_RNA (1)...(19): siRNA sense strand
gaagcacgugguccugugu

SEQ ID NO: 2194254 - RNA, 19 nt, Homo sapiens
  misc_RNA (1)...(19): siRNA sense strand
caacgagaacaccuucaag

SEQ ID NO: 2194255 - RNA, 19 nt, Homo sapiens
  misc_RNA (1)...(19): siRNA sense strand
gagcaguggcagcgcaugu

SEQ ID NO: 2194256 - RNA, 19 nt, Homo sapiens
  misc_RNA (1)...(19): siRNA sense strand
caacgugcagaccauguuc

SEQ ID NO: 2194257 - RNA, 19 nt, Homo sapiens
  misc_RNA (1)...(19): siRNA sense strand
ccaaggacagcuacucucu

SEQ ID NO: 2194258 - RNA, 19 nt, Homo sapiens
  misc_RNA (1)...(19): siRNA sense strand
cggguaaaccugggauauu

SEQ ID NO: 2194259 - RNA, 19 nt, Homo sapiens
  misc_RNA (1)...(19): siRNA sense strand
gagggaagguuauauguua

SEQ ID NO: 2194260 - RNA, 19 nt, Homo sapiens
  misc_RNA (1)...(19): siRNA sense strand
gaaggaacaugaagacaaa

SEQ ID NO: 2194261 - RNA, 19 nt, Homo sapiens
  misc_RNA (1)...(19): siRNA sense strand
caaagaacaucaccaagaa

SEQ ID NO: 2194262 - RNA, 19 nt, Homo sapiens
  misc_RNA (1)...(19): siRNA sense strand
ccacaagaauuccauauug

SEQ ID NO: 2194263 - RNA, 19 nt, Homo sapiens
  misc_RNA (1)...(19): siRNA sense strand
gaggaaaucuacaaacuca

SEQ ID NO: 2194264 - RNA, 19 nt, Homo sapiens
  misc_RNA (1)...(19): siRNA sense strand
aagaugagcucgccaagaa

SEQ ID NO: 2194265 - RNA, 19 nt, Homo sapiens
  misc_RNA (1)...(19): siRNA sense strand
gugccaggcucuaagaaua

SEQ ID NO: 2194266 - RNA, 19 nt, Homo sapiens
  misc_RNA (1)...(19): siRNA sense strand
caaacaagccgauuauuca

SEQ ID NO: 2194267 - RNA, 19 nt, Homo sapiens
  misc_RNA (1)...(19): siRNA sense strand
gagcacagccucucagaug

SEQ ID NO: 2194268 - RNA, 19 nt, Homo sapiens
  misc_RNA (1)...(19): siRNA sense strand
ucagggcgcuuuacugcua

SEQ ID NO: 2194269 - RNA, 19 nt, Homo sapiens
  misc_RNA (1)...(19): siRNA sense strand
ggagaagugugaugccaau

SEQ ID NO: 2194270 - RNA, 19 nt, Homo sapiens
  misc_RNA (1)...(19): siRNA sense strand
ccaaagaacaucaccaaga

SEQ ID NO: 2194271 - RNA, 19 nt, Homo sapiens
  misc_RNA (1)...(19): siRNA sense strand
guuacaggcuccaugauga

SEQ ID NO: 2194272 - RNA, 19 nt, Homo sapiens
  misc_RNA (1)...(19): siRNA sense strand
gagcagggccagccucauu

SEQ ID NO: 2194273 - RNA, 19 nt, Homo sapiens
  misc_RNA (1)...(19): siRNA sense strand
gaacaugaagacaaagaug

SEQ ID NO: 2194274 - RNA, 19 nt, Homo sapiens
  misc_RNA (1)...(19): siRNA sense strand
gaacagaaagcggaagaug

SEQ ID NO: 2194275 - RNA, 19 nt, Homo sapiens
  misc_RNA (1)...(19): siRNA sense strand
aagagcagcuucugaugaa

SEQ ID NO: 2194276 - RNA, 19 nt, Homo sapiens
  misc_RNA (1)...(19): siRNA sense strand
uggaggagcuggagaagug

SEQ ID NO: 2194277 - RNA, 19 nt, Homo sapiens
  misc_RNA (1)...(19): siRNA sense strand
ggcccagacucguaaauga

SEQ ID NO: 2194278 - RNA, 19 nt, Homo sapiens
  misc_RNA (1)...(19): siRNA sense strand
ccucagaugucucgggaaa

SEQ ID NO: 2194279 - RNA, 19 nt, Homo sapiens
  misc_RNA (1)...(19): siRNA sense strand
gcgcaaagcugaggaagac

SEQ ID NO: 2194280 - RNA, 19 nt, Homo sapiens
  misc_RNA (1)...(19): siRNA sense strand
ggagagaaauaaggugauc

SEQ ID NO: 2194281 - RNA, 19 nt, Homo sapiens
  misc_RNA (1)...(19): siRNA sense strand
gucccaagcucuuuaagga

SEQ ID NO: 2194282 - RNA, 19 nt, Homo sapiens
  misc_RNA (1)...(19): siRNA sense strand
caagagcagcuucugauga

SEQ ID NO: 2194283 - RNA, 19 nt, Homo sapiens
  misc_RNA (1)...(19): siRNA sense strand
uuaaggagcccaguaguaa

SEQ ID NO: 2194284 - RNA, 19 nt, Homo sapiens
  misc_RNA (1)...(19): siRNA sense strand
gaaaaucucucagcagcaa

SEQ ID NO: 2194285 - RNA, 19 nt, Homo sapiens
  misc_RNA (1)...(19): siRNA sense strand
ggaagguuauauguuaguu

SEQ ID NO: 2194286 - RNA, 19 nt, Homo sapiens
  misc_RNA (1)...(19): siRNA sense strand
ucaaacaagccgauuauuc

SEQ ID NO: 2194287 - RNA, 19 nt, Homo sapiens
  misc_RNA (1)...(19): siRNA sense strand
gugaaugaaugugaccuuu

SEQ ID NO: 2194288 - RNA, 19 nt, Homo sapiens
  misc_RNA (1)...(19): siRNA sense strand
ggaggaagcagcagcagau

SEQ ID NO: 2194289 - RNA, 19 nt, Homo sapiens
  misc_RNA (1)...(19): siRNA sense strand
uuccaaagaugccaacauu

SEQ ID NO: 2194290 - RNA, 19 nt, Homo sapiens
  misc_RNA (1)...(19): siRNA sense strand
gguuauauguuaguuguuc

SEQ ID NO: 2194291 - RNA, 19 nt, Homo sapiens
  misc_RNA (1)...(19): siRNA sense strand
gaaugaaugugaccuuucc

SEQ ID NO: 2194292 - RNA, 19 nt, Homo sapiens
  misc_RNA (1)...(19): siRNA sense strand
gaaggugaaggaacaugaa

SEQ ID NO: 2194293 - RNA, 19 nt, Homo sapiens
  misc_RNA (1)...(19): siRNA sense strand
gaacgaaccccacaagaau

SEQ ID NO: 2194294 - RNA, 19 nt, Homo sapiens
  misc_RNA (1)...(19): siRNA sense strand
ucgagaagcuuaacgaaac

SEQ ID NO: 2194295 - RNA, 19 nt, Homo sapiens
  misc_RNA (1)...(19): siRNA sense strand
uagagacgcucccgcacuu

SEQ ID NO: 2194296 - RNA, 19 nt, Homo sapiens
  misc_RNA (1)...(19): siRNA sense strand
ugcacgagcuggagagaaa

SEQ ID NO: 2194297 - RNA, 19 nt, Homo sapiens
  misc_RNA (1)...(19): siRNA sense strand
gccaaucacuacaucauac

SEQ ID NO: 2194298 - RNA, 19 nt, Homo sapiens
  misc_RNA (1)...(19): siRNA sense strand
ccaaagaugccaacauucu

SEQ ID NO: 2194299 - RNA, 19 nt, Homo sapiens
  misc_RNA (1)...(19): siRNA sense strand
gcgugaagaugaccagcuu

SEQ ID NO: 2194300 - RNA, 19 nt, Homo sapiens
  misc_RNA (1)...(19): siRNA sense strand
ggccugcagugccaaagaa

SEQ ID NO: 2194301 - RNA, 19 nt, Homo sapiens
  misc_RNA (1)...(19): siRNA sense strand
gaagaugagcucgccaaga

SEQ ID NO: 2194302 - RNA, 19 nt, Homo sapiens
  misc_RNA (1)...(19): siRNA sense strand
gcaaucagcggacacuuac

SEQ ID NO: 2194303 - RNA, 19 nt, Homo sapiens
  misc_RNA (1)...(19): siRNA sense strand
agaggaagcuccagagacu

SEQ ID NO: 2194304 - RNA, 19 nt, Homo sapiens
  misc_RNA (1)...(19): siRNA sense strand
acaugcagcuggaggagaa

SEQ ID NO: 2194305 - RNA, 19 nt, Homo sapiens
  misc_RNA (1)...(19): siRNA sense strand
gauggcuucuuccuucaug

SEQ ID NO: 2194306 - RNA, 19 nt, Homo sapiens
  misc_RNA (1)...(19): siRNA sense strand
acaagccgauuauucacaa

SEQ ID NO: 2194307 - RNA, 19 nt, Homo sapiens
  misc_RNA (1)...(19): siRNA sense strand
ugaaggaacaugaagacaa

SEQ ID NO: 2194308 - RNA, 19 nt, Homo sapiens
  misc_RNA (1)...(19): siRNA sense strand
ggaagagucggccaaacug

SEQ ID NO: 2194309 - RNA, 19 nt, Homo sapiens
  misc_RNA (1)...(19): siRNA sense strand
cagaagaccacgccagaug

SEQ ID NO: 2194310 - RNA, 19 nt, Homo sapiens
  misc_RNA (1)...(19): siRNA sense strand
cacaagaauuccauauugg

SEQ ID NO: 2194311 - RNA, 19 nt, Homo sapiens
  misc_RNA (1)...(19): siRNA sense strand
caucuucccuggccucagu

SEQ ID NO: 2194312 - RNA, 19 nt, Homo sapiens
  misc_RNA (1)...(19): siRNA sense strand
gcaagagcagcuucugaug

SEQ ID NO: 2194313 - RNA, 19 nt, Homo sapiens
  misc_RNA (1)...(19): siRNA sense strand
ccgaagacuuucucgugaa

SEQ ID NO: 2194314 - RNA, 19 nt, Homo sapiens
  misc_RNA (1)...(19): siRNA sense strand
ggccggagcacuuugcaaa

SEQ ID NO: 2194315 - RNA, 19 nt, Homo sapiens
  misc_RNA (1)...(19): siRNA sense strand
ggaguacucucagcacaac

SEQ ID NO: 2194316 - RNA, 19 nt, Homo sapiens
  misc_RNA (1)...(19): siRNA sense strand
ggacaugaaggugaaggaa

SEQ ID NO: 2194317 - RNA, 19 nt, Homo sapiens
  misc_RNA (1)...(19): siRNA sense strand
cgaggagcaucgugucuag

SEQ ID NO: 2194318 - RNA, 19 nt, Homo sapiens
  misc_RNA (1)...(19): siRNA sense strand
acaugaaggugaaggaaca

SEQ ID NO: 2194319 - RNA, 19 nt, Homo sapiens
  misc_RNA (1)...(19): siRNA sense strand
gaagguuauauguuaguug

SEQ ID NO: 2194320 - RNA, 19 nt, Homo sapiens
  misc_RNA (1)...(19): siRNA sense strand
gcgcuuuacugcuacuauc

SEQ ID NO: 2194321 - RNA, 19 nt, Homo sapiens
  misc_RNA (1)...(19): siRNA sense strand
cgaaagagaagcaggugau

SEQ ID NO: 2194322 - RNA, 19 nt, Homo sapiens
  misc_RNA (1)...(19): siRNA sense strand
ggagcccaguaguaaauca

SEQ ID NO: 2194323 - RNA, 19 nt, Homo sapiens
  misc_RNA (1)...(19): siRNA sense strand
agacaccgagggaagguua

SEQ ID NO: 2194324 - RNA, 19 nt, Homo sapiens
  misc_RNA (1)...(19): siRNA sense strand
ggcgcgagcucaucaagca

SEQ ID NO: 2194325 - RNA, 19 nt, Homo sapiens
  misc_RNA (1)...(19): siRNA sense strand
gggccagccucauugaagu

SEQ ID NO: 2194326 - RNA, 19 nt, Homo sapiens
  misc_RNA (1)...(19): siRNA sense strand
ugaaggaggagcagagaga

SEQ ID NO: 2194327 - RNA, 19 nt, Homo sapiens
  misc_RNA (1)...(19): siRNA sense strand
cgaagacuuucucgugaag

SEQ ID NO: 2194328 - RNA, 19 nt, Homo sapiens
  misc_RNA (1)...(19): siRNA sense strand
gaacaucaccaagaaaaug

SEQ ID NO: 2194329 - RNA, 19 nt, Homo sapiens
  misc_RNA (1)...(19): siRNA sense strand
ggaaaucuacaaacucacu

SEQ ID NO: 2194330 - RNA, 19 nt, Homo sapiens
  misc_RNA (1)...(19): siRNA sense strand
ggaagccgagcacgauuuc

SEQ ID NO: 2194331 - RNA, 19 nt, Homo sapiens
  misc_RNA (1)...(19): siRNA sense strand
ccaagaaaaugaucgacaa

SEQ ID NO: 2194332 - RNA, 19 nt, Homo sapiens
  misc_RNA (1)...(19): siRNA sense strand
ggccaaagaacaucaccaa

SEQ ID NO: 2194333 - RNA, 19 nt, Homo sapiens
  misc_RNA (1)...(19): siRNA sense strand
ggguccagcuccucagaug

SEQ ID NO: 2194334 - RNA, 19 nt, Homo sapiens
  misc_RNA (1)...(19): siRNA sense strand
aaugugaccuuuccaucga

SEQ ID NO: 2194335 - RNA, 19 nt, Homo sapiens
  misc_RNA (1)...(19): siRNA sense strand
ggaggaagagucggccaaa

SEQ ID NO: 2194336 - RNA, 19 nt, Homo sapiens
  misc_RNA (1)...(19): siRNA sense strand
cagggcuccucccgaagua

SEQ ID NO: 2194337 - RNA, 19 nt, Homo sapiens
  misc_RNA (1)...(19): siRNA sense strand
ccaagucaaagccgaagaa

SEQ ID NO: 2194338 - RNA, 19 nt, Homo sapiens
  misc_RNA (1)...(19): siRNA sense strand
gagacgcucccgcacuuga

SEQ ID NO: 2194339 - RNA, 19 nt, Homo sapiens
  misc_RNA (1)...(19): siRNA sense strand
gcagggccagccucauuga

SEQ ID NO: 2194340 - RNA, 19 nt, Homo sapiens
  misc_RNA (1)...(19): siRNA sense strand
gaucgacaaacuguauaaa

SEQ ID NO: 2194341 - RNA, 19 nt, Homo sapiens
  misc_RNA (1)...(19): siRNA sense strand
uaaggagcccaguaguaaa

SEQ ID NO: 2194342 - RNA, 19 nt, Homo sapiens
  misc_RNA (1)...(19): siRNA sense strand
gaagcccugcccauacuga

SEQ ID NO: 2194343 - RNA, 19 nt, Homo sapiens
  misc_RNA (1)...(19): siRNA sense strand
ggaccucuccgaccugaag

SEQ ID NO: 2194344 - RNA, 19 nt, Homo sapiens
  misc_RNA (1)...(19): siRNA sense strand
gcuccaugaugaaagcaau

SEQ ID NO: 2194345 - RNA, 19 nt, Homo sapiens
  misc_RNA (1)...(19): siRNA sense strand
uaacuugaucccagccaaa

SEQ ID NO: 2194346 - RNA, 19 nt, Homo sapiens
  misc_RNA (1)...(19): siRNA sense strand
cgagggaagguuauauguu

SEQ ID NO: 2194347 - RNA, 19 nt, Homo sapiens
  misc_RNA (1)...(19): siRNA sense strand
ucacuacaucauacuguuu

SEQ ID NO: 2194348 - RNA, 19 nt, Homo sapiens
  misc_RNA (1)...(19): siRNA sense strand
aagcggagguggagcucaa

SEQ ID NO: 2194349 - RNA, 19 nt, Homo sapiens
  misc_RNA (1)...(19): siRNA sense strand
ggaacaugaagacaaagau

SEQ ID NO: 2194350 - RNA, 19 nt, Homo sapiens
  misc_RNA (1)...(19): siRNA sense strand
ccuggcaucugagcuggua

SEQ ID NO: 2194351 - RNA, 19 nt, Homo sapiens
  misc_RNA (1)...(19): siRNA sense strand
gugaagaugaccagcuuug

SEQ ID NO: 2194352 - RNA, 19 nt, Homo sapiens
  misc_RNA (1)...(19): siRNA sense strand
gaaagagaagcaggugauc

SEQ ID NO: 2194353 - RNA, 19 nt, Homo sapiens
  misc_RNA (1)...(19): siRNA sense strand
agaaggcccagacucguaa

SEQ ID NO: 2194354 - RNA, 19 nt, Homo sapiens
  misc_RNA (1)...(19): siRNA sense strand
aagaaggcccagacucgua

SEQ ID NO: 2194355 - RNA, 19 nt, Homo sapiens
  misc_RNA (1)...(19): siRNA sense strand
cagcggacacuuacucugu

SEQ ID NO: 2194356 - RNA, 19 nt, Homo sapiens
  misc_RNA (1)...(19): siRNA sense strand
cagcaagagcagcuucuga

SEQ ID NO: 2194357 - RNA, 19 nt, Homo sapiens
  misc_RNA (1)...(19): siRNA sense strand
cugaggaaaucuacaaacu

SEQ ID NO: 2194358 - RNA, 19 nt, Homo sapiens
  misc_RNA (1)...(19): siRNA sense strand
gauuauucacaaugccaua

SEQ ID NO: 2194359 - RNA, 19 nt, Homo sapiens
  misc_RNA (1)...(19): siRNA sense strand
gaagugcgcuggagaaauc

SEQ ID NO: 2194360 - RNA, 19 nt, Homo sapiens
  misc_RNA (1)...(19): siRNA sense strand
gauagucucucuggaauaa

SEQ ID NO: 2194361 - RNA, 19 nt, Homo sapiens
  misc_RNA (1)...(19): siRNA sense strand
acacaaagaucaagaguug

SEQ ID NO: 2194362 - RNA, 19 nt, Homo sapiens
  misc_RNA (1)...(19): siRNA sense strand
gaacacaaccucaccuuga

SEQ ID NO: 2194363 - RNA, 19 nt, Homo sapiens
  misc_RNA (1)...(19): siRNA sense strand
caacacuucugaacuauau

SEQ ID NO: 2194364 - RNA, 19 nt, Homo sapiens
  misc_RNA (1)...(19): siRNA sense strand
agacaacacuucugaacua

SEQ ID NO: 2194365 - RNA, 19 nt, Homo sapiens
  misc_RNA (1)...(19): siRNA sense strand
gaaauuugaugacauacug

SEQ ID NO: 2194366 - RNA, 19 nt, Homo sapiens
  misc_RNA (1)...(19): siRNA sense strand
ggacaacacauuucaaaga

SEQ ID NO: 2194367 - RNA, 19 nt, Homo sapiens
  misc_RNA (1)...(19): siRNA sense strand
gacaacacauuucaaagaa

SEQ ID NO: 2194368 - RNA, 19 nt, Homo sapiens
  misc_RNA (1)...(19): siRNA sense strand
guggagagcucuaugaaga

SEQ ID NO: 2194369 - RNA, 19 nt, Homo sapiens
  misc_RNA (1)...(19): siRNA sense strand
caacacauuucaaagaaga

SEQ ID NO: 2194370 - RNA, 19 nt, Homo sapiens
  misc_RNA (1)...(19): siRNA sense strand
gaguugaucucucuaaugu

SEQ ID NO: 2194371 - RNA, 19 nt, Homo sapiens
  misc_RNA (1)...(19): siRNA sense strand
gcagaaauuuagauaagga

SEQ ID NO: 2194372 - RNA, 19 nt, Homo sapiens
  misc_RNA (1)...(19): siRNA sense strand
ugacagagcaacauaguaa

SEQ ID NO: 2194373 - RNA, 19 nt, Homo sapiens
  misc_RNA (1)...(19): siRNA sense strand
ggacaaaucuuagaaacac

SEQ ID NO: 2194374 - RNA, 19 nt, Homo sapiens
  misc_RNA (1)...(19): siRNA sense strand
gaagaguggcuggaacuua

SEQ ID NO: 2194375 - RNA, 19 nt, Homo sapiens
  misc_RNA (1)...(19): siRNA sense strand
ggaauaaguuugcagaaaa

SEQ ID NO: 2194376 - RNA, 19 nt, Homo sapiens
  misc_RNA (1)...(19): siRNA sense strand
guugaucucucuaauguau

SEQ ID NO: 2194377 - RNA, 19 nt, Homo sapiens
  misc_RNA (1)...(19): siRNA sense strand
ucauaaggcugaagggauu

SEQ ID NO: 2194378 - RNA, 19 nt, Homo sapiens
  misc_RNA (1)...(19): siRNA sense strand
ugcaguggcuucuauguuu

SEQ ID NO: 2194379 - RNA, 19 nt, Homo sapiens
  misc_RNA (1)...(19): siRNA sense strand
caagaucccagucacaauu

SEQ ID NO: 2194380 - RNA, 19 nt, Homo sapiens
  misc_RNA (1)...(19): siRNA sense strand
gaauuagggagugauauuu

SEQ ID NO: 2194381 - RNA, 19 nt, Homo sapiens
  misc_RNA (1)...(19): siRNA sense strand
gagaaauccuuagcuguca

SEQ ID NO: 2194382 - RNA, 19 nt, Homo sapiens
  misc_RNA (1)...(19): siRNA sense strand
ggauuguccugaauugguu

SEQ ID NO: 2194383 - RNA, 19 nt, Homo sapiens
  misc_RNA (1)...(19): siRNA sense strand
gaacgacaauuagauccau

SEQ ID NO: 2194384 - RNA, 19 nt, Homo sapiens
  misc_RNA (1)...(19): siRNA sense strand
agacuugguuccagaagaa

SEQ ID NO: 2194385 - RNA, 19 nt, Homo sapiens
  misc_RNA (1)...(19): siRNA sense strand
cagaagaagauguaaagaa

SEQ ID NO: 2194386 - RNA, 19 nt, Homo sapiens
  misc_RNA (1)...(19): siRNA sense strand
guuagagaccacuggauua

SEQ ID NO: 2194387 - RNA, 19 nt, Homo sapiens
  misc_RNA (1)...(19): siRNA sense strand
uggaauaaguuugcagaaa

SEQ ID NO: 2194388 - RNA, 19 nt, Homo sapiens
  misc_RNA (1)...(19): siRNA sense strand
ccuuagagcuauugagaau

SEQ ID NO: 2194389 - RNA, 19 nt, Homo sapiens
  misc_RNA (1)...(19): siRNA sense strand
gaagaucaaguuuguacau

SEQ ID NO: 2194390 - RNA, 19 nt, Homo sapiens
  misc_RNA (1)...(19): siRNA sense strand
guuuauagcuacugugaca

SEQ ID NO: 2194391 - RNA, 19 nt, Homo sapiens
  misc_RNA (1)...(19): siRNA sense strand
agacaaaucacaacaagug

SEQ ID NO: 2194392 - RNA, 19 nt, Homo sapiens
  misc_RNA (1)...(19): siRNA sense strand
aaagacaaaucacaacaag

SEQ ID NO: 2194393 - RNA, 19 nt, Homo sapiens
  misc_RNA (1)...(19): siRNA sense strand
gaugacauacuguuagaga

SEQ ID NO: 2194394 - RNA, 19 nt, Homo sapiens
  misc_RNA (1)...(19): siRNA sense strand
gaaaugcaaaggaagaaca

SEQ ID NO: 2194395 - RNA, 19 nt, Homo sapiens
  misc_RNA (1)...(19): siRNA sense strand
uaaauggacuaggacaaau

SEQ ID NO: 2194396 - RNA, 19 nt, Homo sapiens
  misc_RNA (1)...(19): siRNA sense strand
gaaaccugauggccuuauc

SEQ ID NO: 2194397 - RNA, 19 nt, Homo sapiens
  misc_RNA (1)...(19): siRNA sense strand
gaucuucaugccuuugaua

SEQ ID NO: 2194398 - RNA, 19 nt, Homo sapiens
  misc_RNA (1)...(19): siRNA sense strand
ggggaaauuugaugacaua

SEQ ID NO: 2194399 - RNA, 19 nt, Homo sapiens
  misc_RNA (1)...(19): siRNA sense strand
uggcagaaauuuagauaag

SEQ ID NO: 2194400 - RNA, 19 nt, Homo sapiens
  misc_RNA (1)...(19): siRNA sense strand
gacaacacuucugaacuau

SEQ ID NO: 2194401 - RNA, 19 nt, Homo sapiens
  misc_RNA (1)...(19): siRNA sense strand
ugagagaacaaaucgauug

SEQ ID NO: 2194402 - RNA, 19 nt, Homo sapiens
  misc_RNA (1)...(19): siRNA sense strand
caaagacaaaucacaacaa

SEQ ID NO: 2194403 - RNA, 19 nt, Homo sapiens
  misc_RNA (1)...(19): siRNA sense strand
ugaauuagggagugauauu

SEQ ID NO: 2194404 - RNA, 19 nt, Homo sapiens
  misc_RNA (1)...(19): siRNA sense strand
uuggguugaugcugaauua

SEQ ID NO: 2194405 - RNA, 19 nt, Homo sapiens
  misc_RNA (1)...(19): siRNA sense strand
ggacuaggacaaaucuuag

SEQ ID NO: 2194406 - RNA, 19 nt, Homo sapiens
  misc_RNA (1)...(19): siRNA sense strand
aagaguggcuggaacuuag

SEQ ID NO: 2194407 - RNA, 19 nt, Homo sapiens
  misc_RNA (1)...(19): siRNA sense strand
gaguagcggucauuuuaaa

SEQ ID NO: 2194408 - RNA, 19 nt, Homo sapiens
  misc_RNA (1)...(19): siRNA sense strand
ggaugacacugagagaaca

SEQ ID NO: 2194409 - RNA, 19 nt, Homo sapiens
  misc_RNA (1)...(19): siRNA sense strand
ugagaaacaaggacaauca

SEQ ID NO: 2194410 - RNA, 19 nt, Homo sapiens
  misc_RNA (1)...(19): siRNA sense strand
cugaauugguucccauuga

SEQ ID NO: 2194411 - RNA, 19 nt, Homo sapiens
  misc_RNA (1)...(19): siRNA sense strand
uggacuaggacaaaucuua

SEQ ID NO: 2194412 - RNA, 19 nt, Homo sapiens
  misc_RNA (1)...(19): siRNA sense strand
gcaaagcgaggaggaggaa

SEQ ID NO: 2194413 - RNA, 19 nt, Homo sapiens
  misc_RNA (1)...(19): siRNA sense strand
gaagcuacuaggcaaguug

SEQ ID NO: 2194414 - RNA, 19 nt, Homo sapiens
  misc_RNA (1)...(19): siRNA sense strand
gcuggaaggaugacacuga

SEQ ID NO: 2194415 - RNA, 19 nt, Homo sapiens
  misc_RNA (1)...(19): siRNA sense strand
gaaguaccaggaaaugcaa

SEQ ID NO: 2194416 - RNA, 19 nt, Homo sapiens
  misc_RNA (1)...(19): siRNA sense strand
gaaggaugacacugagaga

SEQ ID NO: 2194417 - RNA, 19 nt, Homo sapiens
  misc_RNA (1)...(19): siRNA sense strand
uaagaacgacaauuagauc

SEQ ID NO: 2194418 - RNA, 19 nt, Homo sapiens
  misc_RNA (1)...(19): siRNA sense strand
gaaaagaaugugagaaaca

SEQ ID NO: 2194419 - RNA, 19 nt, Homo sapiens
  misc_RNA (1)...(19): siRNA sense strand
guggacaacacauuucaaa

SEQ ID NO: 2194420 - RNA, 19 nt, Homo sapiens
  misc_RNA (1)...(19): siRNA sense strand
gaauugguucccauugaga

SEQ ID NO: 2194421 - RNA, 19 nt, Homo sapiens
  misc_RNA (1)...(19): siRNA sense strand
gaaacacaaagaucaagag

SEQ ID NO: 2194422 - RNA, 19 nt, Homo sapiens
  misc_RNA (1)...(19): siRNA sense strand
ggccuuagagcuauugaga

SEQ ID NO: 2194423 - RNA, 19 nt, Homo sapiens
  misc_RNA (1)...(19): siRNA sense strand
agagaccacuggauuagca

SEQ ID NO: 2194424 - RNA, 19 nt, Homo sapiens
  misc_RNA (1)...(19): siRNA sense strand
aagaguagcggucauuuua

SEQ ID NO: 2194425 - RNA, 19 nt, Homo sapiens
  misc_RNA (1)...(19): siRNA sense strand
gcaguggacaacacauuuc

SEQ ID NO: 2194426 - RNA, 19 nt, Homo sapiens
  misc_RNA (1)...(19): siRNA sense strand
gggaaaagaaugugagaaa

SEQ ID NO: 2194427 - RNA, 19 nt, Homo sapiens
  misc_RNA (1)...(19): siRNA sense strand
cauuugaaguaccaggaaa

SEQ ID NO: 2194428 - RNA, 19 nt, Homo sapiens
  misc_RNA (1)...(19): siRNA sense strand
ugaauugguucccauugag

SEQ ID NO: 2194429 - RNA, 19 nt, Homo sapiens
  misc_RNA (1)...(19): siRNA sense strand
gcugaauuagggagugaua

SEQ ID NO: 2194430 - RNA, 19 nt, Homo sapiens
  misc_RNA (1)...(19): siRNA sense strand
cagacuugguuccagaaga

SEQ ID NO: 2194431 - RNA, 19 nt, Homo sapiens
  misc_RNA (1)...(19): siRNA sense strand
gcaaaagaaggggaaauuu

SEQ ID NO: 2194432 - RNA, 19 nt, Homo sapiens
  misc_RNA (1)...(19): siRNA sense strand
gaaaagcaguggacaacac

SEQ ID NO: 2194433 - RNA, 19 nt, Homo sapiens
  misc_RNA (1)...(19): siRNA sense strand
caaccucaccuugaucaga

SEQ ID NO: 2194434 - RNA, 19 nt, Homo sapiens
  misc_RNA (1)...(19): siRNA sense strand
gcaguggcuucuauguuuu

SEQ ID NO: 2194435 - RNA, 19 nt, Homo sapiens
  misc_RNA (1)...(19): siRNA sense strand
aauuaucaccggguauuua

SEQ ID NO: 2194436 - RNA, 19 nt, Homo sapiens
  misc_RNA (1)...(19): siRNA sense strand
auaaauggacuaggacaaa

SEQ ID NO: 2194437 - RNA, 19 nt, Homo sapiens
  misc_RNA (1)...(19): siRNA sense strand
aagaucccagucacaauua

SEQ ID NO: 2194438 - RNA, 19 nt, Homo sapiens
  misc_RNA (1)...(19): siRNA sense strand
cuugaucagaguauuguua

SEQ ID NO: 2194439 - RNA, 19 nt, Homo sapiens
  misc_RNA (1)...(19): siRNA sense strand
ggaagugcgcuggagaaau

SEQ ID NO: 2194440 - RNA, 19 nt, Homo sapiens
  misc_RNA (1)...(19): siRNA sense strand
gaucuguggaugaggaaga

SEQ ID NO: 2194441 - RNA, 19 nt, Homo sapiens
  misc_RNA (1)...(19): siRNA sense strand
caggaaaugcaaaggaaga

SEQ ID NO: 2194442 - RNA, 19 nt, Homo sapiens
  misc_RNA (1)...(19): siRNA sense strand
uaggacaaaucuuagaaac

SEQ ID NO: 2194443 - RNA, 19 nt, Homo sapiens
  misc_RNA (1)...(19): siRNA sense strand
cgacaauuagauccauaaa

SEQ ID NO: 2194444 - RNA, 19 nt, Homo sapiens
  misc_RNA (1)...(19): siRNA sense strand
gccaagaucccagucacaa

SEQ ID NO: 2194445 - RNA, 19 nt, Homo sapiens
  misc_RNA (1)...(19): siRNA sense strand
ucaaagacaaaucacaaca

SEQ ID NO: 2194446 - RNA, 19 nt, Homo sapiens
  misc_RNA (1)...(19): siRNA sense strand
ugaaguaccaggaaaugca

SEQ ID NO: 2194447 - RNA, 19 nt, Homo sapiens
  misc_RNA (1)...(19): siRNA sense strand
aaaagaaggggaaauuuga

SEQ ID NO: 2194448 - RNA, 19 nt, Homo sapiens
  misc_RNA (1)...(19): siRNA sense strand
gcaacauaguaaaagagua

SEQ ID NO: 2194449 - RNA, 19 nt, Homo sapiens
  misc_RNA (1)...(19): siRNA sense strand
gacagagcaacauaguaaa

SEQ ID NO: 2194450 - RNA, 19 nt, Homo sapiens
  misc_RNA (1)...(19): siRNA sense strand
accaggaaaugcaaaggaa

SEQ ID NO: 2194451 - RNA, 19 nt, Homo sapiens
  misc_RNA (1)...(19): siRNA sense strand
gacaaaucuuagaaacaca

SEQ ID NO: 2194452 - RNA, 19 nt, Homo sapiens
  misc_RNA (1)...(19): siRNA sense strand
uugaugacauacuguuaga

SEQ ID NO: 2194453 - RNA, 19 nt, Homo sapiens
  misc_RNA (1)...(19): siRNA sense strand
ggaaauuugaugacauacu

SEQ ID NO: 2194454 - RNA, 19 nt, Homo sapiens
  misc_RNA (1)...(19): siRNA sense strand
acaaucacauuugaaguac

SEQ ID NO: 2194455 - RNA, 19 nt, Homo sapiens
  misc_RNA (1)...(19): siRNA sense strand
cuucaugccuuugauaguc

SEQ ID NO: 2194456 - RNA, 19 nt, Homo sapiens
  misc_RNA (1)...(19): siRNA sense strand
cuuagaaacacaaagauca

SEQ ID NO: 2194457 - RNA, 19 nt, Homo sapiens
  misc_RNA (1)...(19): siRNA sense strand
ucaccuugaucagaguauu

SEQ ID NO: 2194458 - RNA, 19 nt, Homo sapiens
  misc_RNA (1)...(19): siRNA sense strand
guuaccggcuguuggaucu

SEQ ID NO: 2194459 - RNA, 19 nt, Homo sapiens
  misc_RNA (1)...(19): siRNA sense strand
ccucuuagguguuaucuua

SEQ ID NO: 2194460 - RNA, 19 nt, Homo sapiens
  misc_RNA (1)...(19): siRNA sense strand
ccucuuagguguuaucuua

SEQ ID NO: 2194461 - RNA, 19 nt, Homo sapiens
  misc_RNA (1)...(19): siRNA sense strand
ggacgugucuuuccuuuca

SEQ ID NO: 2194462 - RNA, 19 nt, Homo sapiens
  misc_RNA (1)...(19): siRNA sense strand
gaaagaagagguccacauu

SEQ ID NO: 2194463 - RNA, 19 nt, Homo sapiens
  misc_RNA (1)...(19): siRNA sense strand
gcacaaagaacacaucaga

SEQ ID NO: 2194464 - RNA, 19 nt, Homo sapiens
  misc_RNA (1)...(19): siRNA sense strand
gcaacugcaugaacuugua

SEQ ID NO: 2194465 - RNA, 19 nt, Homo sapiens
  misc_RNA (1)...(19): siRNA sense strand
ucagagugcuucaagagua

SEQ ID NO: 2194466 - RNA, 19 nt, Homo sapiens
  misc_RNA (1)...(19): siRNA sense strand
gaaaucagaaugagaagga

SEQ ID NO: 2194467 - RNA, 19 nt, Homo sapiens
  misc_RNA (1)...(19): siRNA sense strand
gucaaaggcugcacaaaga

SEQ ID NO: 2194468 - RNA, 19 nt, Homo sapiens
  misc_RNA (1)...(19): siRNA sense strand
ucaaugguauucagucaaa

SEQ ID NO: 2194469 - RNA, 19 nt, Homo sapiens
  misc_RNA (1)...(19): siRNA sense strand
aagaagagguccacauuca

SEQ ID NO: 2194470 - RNA, 19 nt, Homo sapiens
  misc_RNA (1)...(19): siRNA sense strand
aagaagagguccacauuca

SEQ ID NO: 2194471 - RNA, 19 nt, Homo sapiens
  misc_RNA (1)...(19): siRNA sense strand
uaaagaagagguccacauu

SEQ ID NO: 2194472 - RNA, 19 nt, Homo sapiens
  misc_RNA (1)...(19): siRNA sense strand
agaaugagaaggauuguuu

SEQ ID NO: 2194473 - RNA, 19 nt, Homo sapiens
  misc_RNA (1)...(19): siRNA sense strand
gauguuggagguuugauuu

SEQ ID NO: 2194474 - RNA, 19 nt, Homo sapiens
  misc_RNA (1)...(19): siRNA sense strand
ggucaguacuguaaagaag

SEQ ID NO: 2194475 - RNA, 19 nt, Homo sapiens
  misc_RNA (1)...(19): siRNA sense strand
uaucuuauuccgccucuua

SEQ ID NO: 2194476 - RNA, 19 nt, Homo sapiens
  misc_RNA (1)...(19): siRNA sense strand
gaagagguccacauucaag

SEQ ID NO: 2194477 - RNA, 19 nt, Homo sapiens
  misc_RNA (1)...(19): siRNA sense strand
gaagagguccacauucaag

SEQ ID NO: 2194478 - RNA, 19 nt, Homo sapiens
  misc_RNA (1)...(19): siRNA sense strand
uaucuuauuccgccucuua

SEQ ID NO: 2194479 - RNA, 19 nt, Homo sapiens
  misc_RNA (1)...(19): siRNA sense strand
ggucaguacuggaaagaag

SEQ ID NO: 2194480 - RNA, 19 nt, Homo sapiens
  misc_RNA (1)...(19): siRNA sense strand
ggcagaaccuggucaguac

SEQ ID NO: 2194481 - RNA, 19 nt, Homo sapiens
  misc_RNA (1)...(19): siRNA sense strand
ucacugcccuuccauggau

SEQ ID NO: 2194482 - RNA, 19 nt, Homo sapiens
  misc_RNA (1)...(19): siRNA sense strand
caagagaauucugcaacug

SEQ ID NO: 2194483 - RNA, 19 nt, Homo sapiens
  misc_RNA (1)...(19): siRNA sense strand
ggaaagaagagguccacau

SEQ ID NO: 2194484 - RNA, 19 nt, Homo sapiens
  misc_RNA (1)...(19): siRNA sense strand
gaaccuggucaguacugua

SEQ ID NO: 2194485 - RNA, 19 nt, Homo sapiens
  misc_RNA (1)...(19): siRNA sense strand
gcaaucauucuuugugcaa

SEQ ID NO: 2194486 - RNA, 19 nt, Homo sapiens
  misc_RNA (1)...(19): siRNA sense strand
gacaaaaccuggucaguac

SEQ ID NO: 2194487 - RNA, 19 nt, Homo sapiens
  misc_RNA (1)...(19): siRNA sense strand
acucacugcugcaaucauu

SEQ ID NO: 2194488 - RNA, 19 nt, Homo sapiens
  misc_RNA (1)...(19): siRNA sense strand
acaaagaacacaucagagu

SEQ ID NO: 2194489 - RNA, 19 nt, Homo sapiens
  misc_RNA (1)...(19): siRNA sense strand
ucaagauguuggagguuug

SEQ ID NO: 2194490 - RNA, 19 nt, Homo sapiens
  misc_RNA (1)...(19): siRNA sense strand
caacugcaugaacuuguaa

SEQ ID NO: 2194491 - RNA, 19 nt, Homo sapiens
  misc_RNA (1)...(19): siRNA sense strand
gaacuuguaacuacucacu

SEQ ID NO: 2194492 - RNA, 19 nt, Homo sapiens
  misc_RNA (1)...(19): siRNA sense strand
ugcaugaacuuguaacuac

SEQ ID NO: 2194493 - RNA, 19 nt, Homo sapiens
  misc_RNA (1)...(19): siRNA sense strand
guaaagaagagguccacau

SEQ ID NO: 2194494 - RNA, 19 nt, Homo sapiens
  misc_RNA (1)...(19): siRNA sense strand
ucaagagaauucugcaacu

SEQ ID NO: 2194495 - RNA, 19 nt, Homo sapiens
  misc_RNA (1)...(19): siRNA sense strand
uugcugguguuaucuuauu

SEQ ID NO: 2194496 - RNA, 19 nt, Homo sapiens
  misc_RNA (1)...(19): siRNA sense strand
gcaugaacuuguaacuacu

SEQ ID NO: 2194497 - RNA, 19 nt, Homo sapiens
  misc_RNA (1)...(19): siRNA sense strand
cauucaagguggcauucaa

SEQ ID NO: 2194498 - RNA, 19 nt, Homo sapiens
  misc_RNA (1)...(19): siRNA sense strand
ucaaaggcugcacaaagaa

SEQ ID NO: 2194499 - RNA, 19 nt, Homo sapiens
  misc_RNA (1)...(19): siRNA sense strand
cugcugcaaucauucuuug

SEQ ID NO: 2194500 - RNA, 19 nt, Homo sapiens
  misc_RNA (1)...(19): siRNA sense strand
aggcagaaccuggucagua

SEQ ID NO: 2194501 - RNA, 19 nt, Homo sapiens
  misc_RNA (1)...(19): siRNA sense strand
gcagagcaugcaaucuuuc

SEQ ID NO: 2194502 - RNA, 19 nt, Homo sapiens
  misc_RNA (1)...(19): siRNA sense strand
ugggacgugucuuuccuuu

SEQ ID NO: 2194503 - RNA, 19 nt, Homo sapiens
  misc_RNA (1)...(19): siRNA sense strand
aaagaagagguccacauuc

SEQ ID NO: 2194504 - RNA, 19 nt, Homo sapiens
  misc_RNA (1)...(19): siRNA sense strand
cagagugcuucaagaguac

SEQ ID NO: 2194505 - RNA, 19 nt, Homo sapiens
  misc_RNA (1)...(19): siRNA sense strand
caucagagugcuucaagag

SEQ ID NO: 2194506 - RNA, 19 nt, Homo sapiens
  misc_RNA (1)...(19): siRNA sense strand
aaagaagagguccacauuc

SEQ ID NO: 2194507 - RNA, 19 nt, Homo sapiens
  misc_RNA (1)...(19): siRNA sense strand
ucaguacuguaaagaagag

SEQ ID NO: 2194508 - RNA, 19 nt, Homo sapiens
  misc_RNA (1)...(19): siRNA sense strand
uucaagauguuggagguuu

SEQ ID NO: 2194509 - RNA, 19 nt, Homo sapiens
  misc_RNA (1)...(19): siRNA sense strand
gagguccacauucaagaug

SEQ ID NO: 2194510 - RNA, 19 nt, Homo sapiens
  misc_RNA (1)...(19): siRNA sense strand
gcccuuccauggaugucuu

SEQ ID NO: 2194511 - RNA, 19 nt, Homo sapiens
  misc_RNA (1)...(19): siRNA sense strand
gagcaugcaaucuuucacu

SEQ ID NO: 2194512 - RNA, 19 nt, Homo sapiens
  misc_RNA (1)...(19): siRNA sense strand
caagauguuggagguuuga

SEQ ID NO: 2194513 - RNA, 19 nt, Homo sapiens
  misc_RNA (1)...(19): siRNA sense strand
gcugcaaucauucuuugug

SEQ ID NO: 2194514 - RNA, 19 nt, Homo sapiens
  misc_RNA (1)...(19): siRNA sense strand
agacaaaaccuggucagua

SEQ ID NO: 2194515 - RNA, 19 nt, Homo sapiens
  misc_RNA (1)...(19): siRNA sense strand
uuggaaaucagaaugagaa

SEQ ID NO: 2194516 - RNA, 19 nt, Homo sapiens
  misc_RNA (1)...(19): siRNA sense strand
uaacuacucacugcugcaa

SEQ ID NO: 2194517 - RNA, 19 nt, Homo sapiens
  misc_RNA (1)...(19): siRNA sense strand
agucaaaggcugcacaaag

SEQ ID NO: 2194518 - RNA, 19 nt, Homo sapiens
  misc_RNA (1)...(19): siRNA sense strand
aaccuggucaguacuguaa

SEQ ID NO: 2194519 - RNA, 19 nt, Homo sapiens
  misc_RNA (1)...(19): siRNA sense strand
guuggagguuugauuugca

SEQ ID NO: 2194520 - RNA, 19 nt, Homo sapiens
  misc_RNA (1)...(19): siRNA sense strand
gguuugauuugcagagcau

SEQ ID NO: 2194521 - RNA, 19 nt, Homo sapiens
  misc_RNA (1)...(19): siRNA sense strand
uuccgccucuuagguguua

SEQ ID NO: 2194522 - RNA, 19 nt, Homo sapiens
  misc_RNA (1)...(19): siRNA sense strand
uuccgccucuuagguguua

SEQ ID NO: 2194523 - RNA, 19 nt, Homo sapiens
  misc_RNA (1)...(19): siRNA sense strand
cuuagguguuaucuuauuc

SEQ ID NO: 2194524 - RNA, 19 nt, Homo sapiens
  misc_RNA (1)...(19): siRNA sense strand
caaucauucuuugugcaau

SEQ ID NO: 2194525 - RNA, 19 nt, Homo sapiens
  misc_RNA (1)...(19): siRNA sense strand
agaagagguccacauucaa

SEQ ID NO: 2194526 - RNA, 19 nt, Homo sapiens
  misc_RNA (1)...(19): siRNA sense strand
cuuagguguuaucuuauuc

SEQ ID NO: 2194527 - RNA, 19 nt, Homo sapiens
  misc_RNA (1)...(19): siRNA sense strand
agaagagguccacauucaa

SEQ ID NO: 2194528 - RNA, 19 nt, Homo sapiens
  misc_RNA (1)...(19): siRNA sense strand
gaaccaacaugucuaauua

SEQ ID NO: 2194529 - RNA, 19 nt, Homo sapiens
  misc_RNA (1)...(19): siRNA sense strand
ggagauaaauucuucagua

SEQ ID NO: 2194530 - RNA, 19 nt, Homo sapiens
  misc_RNA (1)...(19): siRNA sense strand
ccaagaaucugaacuaauu

SEQ ID NO: 2194531 - RNA, 19 nt, Homo sapiens
  misc_RNA (1)...(19): siRNA sense strand
gcacuuauaucucaucuug

SEQ ID NO: 2194532 - RNA, 19 nt, Homo sapiens
  misc_RNA (1)...(19): siRNA sense strand
gaaccagccucacucuaua

SEQ ID NO: 2194533 - RNA, 19 nt, Homo sapiens
  misc_RNA (1)...(19): siRNA sense strand
gaugguagcugaagacuau

SEQ ID NO: 2194534 - RNA, 19 nt, Homo sapiens
  misc_RNA (1)...(19): siRNA sense strand
ccaaagagccucgaauuua

SEQ ID NO: 2194535 - RNA, 19 nt, Homo sapiens
  misc_RNA (1)...(19): siRNA sense strand
aagcauagcugaauuagaa

SEQ ID NO: 2194536 - RNA, 19 nt, Homo sapiens
  misc_RNA (1)...(19): siRNA sense strand
gaaagcagauggugagaau

SEQ ID NO: 2194537 - RNA, 19 nt, Homo sapiens
  misc_RNA (1)...(19): siRNA sense strand
gcacacagaugguaagaau

SEQ ID NO: 2194538 - RNA, 19 nt, Homo sapiens
  misc_RNA (1)...(19): siRNA sense strand
gaucacacauggacuaauu

SEQ ID NO: 2194539 - RNA, 19 nt, Homo sapiens
  misc_RNA (1)...(19): siRNA sense strand
gcaaugauauucaagacaa

SEQ ID NO: 2194540 - RNA, 19 nt, Homo sapiens
  misc_RNA (1)...(19): siRNA sense strand
ccagagugcugaaacaaua

SEQ ID NO: 2194541 - RNA, 19 nt, Homo sapiens
  misc_RNA (1)...(19): siRNA sense strand
gaagggagacuaauugaaa

SEQ ID NO: 2194542 - RNA, 19 nt, Homo sapiens
  misc_RNA (1)...(19): siRNA sense strand
gaacgaagauaauucucaa

SEQ ID NO: 2194543 - RNA, 19 nt, Homo sapiens
  misc_RNA (1)...(19): siRNA sense strand
gcaaauaucucccaaagcu

SEQ ID NO: 2194544 - RNA, 19 nt, Homo sapiens
  misc_RNA (1)...(19): siRNA sense strand
gaacaaaccaccugauaga

SEQ ID NO: 2194545 - RNA, 19 nt, Homo sapiens
  misc_RNA (1)...(19): siRNA sense strand
caacacccaugaauaguuu

SEQ ID NO: 2194546 - RNA, 19 nt, Homo sapiens
  misc_RNA (1)...(19): siRNA sense strand
ggaauugccuccugaaauc

SEQ ID NO: 2194547 - RNA, 19 nt, Homo sapiens
  misc_RNA (1)...(19): siRNA sense strand
gagcaacucuggaacauuc

SEQ ID NO: 2194548 - RNA, 19 nt, Homo sapiens
  misc_RNA (1)...(19): siRNA sense strand
ggagaaggauauugacuug

SEQ ID NO: 2194549 - RNA, 19 nt, Homo sapiens
  misc_RNA (1)...(19): siRNA sense strand
gaaacccgauuuacaguga

SEQ ID NO: 2194550 - RNA, 19 nt, Homo sapiens
  misc_RNA (1)...(19): siRNA sense strand
ucacagaccuugagauuca

SEQ ID NO: 2194551 - RNA, 19 nt, Homo sapiens
  misc_RNA (1)...(19): siRNA sense strand
gagaaugccucagggauuu

SEQ ID NO: 2194552 - RNA, 19 nt, Homo sapiens
  misc_RNA (1)...(19): siRNA sense strand
caggaaaucugcauuaaau

SEQ ID NO: 2194553 - RNA, 19 nt, Homo sapiens
  misc_RNA (1)...(19): siRNA sense strand
caaagagccugagcagaua

SEQ ID NO: 2194554 - RNA, 19 nt, Homo sapiens
  misc_RNA (1)...(19): siRNA sense strand
cgacagcccugauauaugu

SEQ ID NO: 2194555 - RNA, 19 nt, Homo sapiens
  misc_RNA (1)...(19): siRNA sense strand
gaaacacacuauacuaauc

SEQ ID NO: 2194556 - RNA, 19 nt, Homo sapiens
  misc_RNA (1)...(19): siRNA sense strand
ccagugagauaaacaauga

SEQ ID NO: 2194557 - RNA, 19 nt, Homo sapiens
  misc_RNA (1)...(19): siRNA sense strand
gggaaacccugcaaaguga

SEQ ID NO: 2194558 - RNA, 19 nt, Homo sapiens
  misc_RNA (1)...(19): siRNA sense strand
gaacacaagccauuugcua

SEQ ID NO: 2194559 - RNA, 19 nt, Homo sapiens
  misc_RNA (1)...(19): siRNA sense strand
ggacagugcucccagugaa

SEQ ID NO: 2194560 - RNA, 19 nt, Homo sapiens
  misc_RNA (1)...(19): siRNA sense strand
guauguagguuccaaagaa

SEQ ID NO: 2194561 - RNA, 19 nt, Homo sapiens
  misc_RNA (1)...(19): siRNA sense strand
gaucuauucucucugauga

SEQ ID NO: 2194562 - RNA, 19 nt, Homo sapiens
  misc_RNA (1)...(19): siRNA sense strand
aagccaagcuccauugaua

SEQ ID NO: 2194563 - RNA, 19 nt, Homo sapiens
  misc_RNA (1)...(19): siRNA sense strand
gaagaaaugcuaccagaug

SEQ ID NO: 2194564 - RNA, 19 nt, Homo sapiens
  misc_RNA (1)...(19): siRNA sense strand
uuaaaugacucuucaguug

SEQ ID NO: 2194565 - RNA, 19 nt, Homo sapiens
  misc_RNA (1)...(19): siRNA sense strand
gaaacaaaccgacaacuca

SEQ ID NO: 2194566 - RNA, 19 nt, Homo sapiens
  misc_RNA (1)...(19): siRNA sense strand
ggaacugucuucucugguu

SEQ ID NO: 2194567 - RNA, 19 nt, Homo sapiens
  misc_RNA (1)...(19): siRNA sense strand
cuaauucucuggaucuuaa

SEQ ID NO: 2194568 - RNA, 19 nt, Homo sapiens
  misc_RNA (1)...(19): siRNA sense strand
gaaaugaagccucuagaau

SEQ ID NO: 2194569 - RNA, 19 nt, Homo sapiens
  misc_RNA (1)...(19): siRNA sense strand
ggaggaagauucucugaag

SEQ ID NO: 2194570 - RNA, 19 nt, Homo sapiens
  misc_RNA (1)...(19): siRNA sense strand
gaacuggguagcaaugaua

SEQ ID NO: 2194571 - RNA, 19 nt, Homo sapiens
  misc_RNA (1)...(19): siRNA sense strand
gagaaagcauagcugaauu

SEQ ID NO: 2194572 - RNA, 19 nt, Homo sapiens
  misc_RNA (1)...(19): siRNA sense strand
cagcagagaaugagaauaa

SEQ ID NO: 2194573 - RNA, 19 nt, Homo sapiens
  misc_RNA (1)...(19): siRNA sense strand
guaagaauaucuccaugga

SEQ ID NO: 2194574 - RNA, 19 nt, Homo sapiens
  misc_RNA (1)...(19): siRNA sense strand
ccagagaccugugaagaaa

SEQ ID NO: 2194575 - RNA, 19 nt, Homo sapiens
  misc_RNA (1)...(19): siRNA sense strand
ugacaacaguacagguuua

SEQ ID NO: 2194576 - RNA, 19 nt, Homo sapiens
  misc_RNA (1)...(19): siRNA sense strand
gaugacaaauucaagcauu

SEQ ID NO: 2194577 - RNA, 19 nt, Homo sapiens
  misc_RNA (1)...(19): siRNA sense strand
gaacaugacauuucugcaa

SEQ ID NO: 2194578 - RNA, 19 nt, Homo sapiens
  misc_RNA (1)...(19): siRNA sense strand
gcaaauauucugaacauuc

SEQ ID NO: 2194579 - RNA, 19 nt, Homo sapiens
  misc_RNA (1)...(19): siRNA sense strand
caaaccaccugauagaaga

SEQ ID NO: 2194580 - RNA, 19 nt, Homo sapiens
  misc_RNA (1)...(19): siRNA sense strand
caaauggacuacugucaga

SEQ ID NO: 2194581 - RNA, 19 nt, Homo sapiens
  misc_RNA (1)...(19): siRNA sense strand
gagagagccugaacacuuc

SEQ ID NO: 2194582 - RNA, 19 nt, Homo sapiens
  misc_RNA (1)...(19): siRNA sense strand
ucucagauauggacaauga

SEQ ID NO: 2194583 - RNA, 19 nt, Homo sapiens
  misc_RNA (1)...(19): siRNA sense strand
ugaagcagcuccagaaauc

SEQ ID NO: 2194584 - RNA, 19 nt, Homo sapiens
  misc_RNA (1)...(19): siRNA sense strand
gggcuaggcuggaugaaga

SEQ ID NO: 2194585 - RNA, 19 nt, Homo sapiens
  misc_RNA (1)...(19): siRNA sense strand
acacauggauuacauacuu

SEQ ID NO: 2194586 - RNA, 19 nt, Homo sapiens
  misc_RNA (1)...(19): siRNA sense strand
guacacaccucccuuugau

SEQ ID NO: 2194587 - RNA, 19 nt, Homo sapiens
  misc_RNA (1)...(19): siRNA sense strand
caguacagguuuacaagua

SEQ ID NO: 2194588 - RNA, 19 nt, Homo sapiens
  misc_RNA (1)...(19): siRNA sense strand
cagauaaccugcagccaaa

SEQ ID NO: 2194589 - RNA, 19 nt, Homo sapiens
  misc_RNA (1)...(19): siRNA sense strand
ucagaacccuugccuagaa

SEQ ID NO: 2194590 - RNA, 19 nt, Homo sapiens
  misc_RNA (1)...(19): siRNA sense strand
gcugaagacuauaugauug

SEQ ID NO: 2194591 - RNA, 19 nt, Homo sapiens
  misc_RNA (1)...(19): siRNA sense strand
gaaagcagccaguccaguu

SEQ ID NO: 2194592 - RNA, 19 nt, Homo sapiens
  misc_RNA (1)...(19): siRNA sense strand
guacggguaugauggcuuu

SEQ ID NO: 2194593 - RNA, 19 nt, Homo sapiens
  misc_RNA (1)...(19): siRNA sense strand
caaagagccucgaauuuac

SEQ ID NO: 2194594 - RNA, 19 nt, Homo sapiens
  misc_RNA (1)...(19): siRNA sense strand
gcagucagauuugcuguga

SEQ ID NO: 2194595 - RNA, 19 nt, Homo sapiens
  misc_RNA (1)...(19): siRNA sense strand
caacccagcucugugaauu

SEQ ID NO: 2194596 - RNA, 19 nt, Homo sapiens
  misc_RNA (1)...(19): siRNA sense strand
gugaugagauccuggugua

SEQ ID NO: 2194597 - RNA, 19 nt, Homo sapiens
  misc_RNA (1)...(19): siRNA sense strand
gcaagagcuuuguuugaug

SEQ ID NO: 2194598 - RNA, 19 nt, Homo sapiens
  misc_RNA (1)...(19): siRNA sense strand
uaaugaaggucaagaaaca

SEQ ID NO: 2194599 - RNA, 19 nt, Homo sapiens
  misc_RNA (1)...(19): siRNA sense strand
gaagaacucccaugagcaa

SEQ ID NO: 2194600 - RNA, 19 nt, Homo sapiens
  misc_RNA (1)...(19): siRNA sense strand
uuaccaggcuccucacaua

SEQ ID NO: 2194601 - RNA, 19 nt, Homo sapiens
  misc_RNA (1)...(19): siRNA sense strand
guagaaagcucgccaucca

SEQ ID NO: 2194602 - RNA, 19 nt, Homo sapiens
  misc_RNA (1)...(19): siRNA sense strand
acacauggacuaauucuaa

SEQ ID NO: 2194603 - RNA, 19 nt, Homo sapiens
  misc_RNA (1)...(19): siRNA sense strand
gaagaaagagaaagcauag

SEQ ID NO: 2194604 - RNA, 19 nt, Homo sapiens
  misc_RNA (1)...(19): siRNA sense strand
cgaugaagauuuacugaga

SEQ ID NO: 2194605 - RNA, 19 nt, Homo sapiens
  misc_RNA (1)...(19): siRNA sense strand
caacaaagcagcccugauc

SEQ ID NO: 2194606 - RNA, 19 nt, Homo sapiens
  misc_RNA (1)...(19): siRNA sense strand
gaucuggaaugacucaguu

SEQ ID NO: 2194607 - RNA, 19 nt, Homo sapiens
  misc_RNA (1)...(19): siRNA sense strand
ggaaaucugcauuaaauca

SEQ ID NO: 2194608 - RNA, 19 nt, Homo sapiens
  misc_RNA (1)...(19): siRNA sense strand
caacuggagugaacagaau

SEQ ID NO: 2194609 - RNA, 19 nt, Homo sapiens
  misc_RNA (1)...(19): siRNA sense strand
ugaguaaacugacauuauc

SEQ ID NO: 2194610 - RNA, 19 nt, Homo sapiens
  misc_RNA (1)...(19): siRNA sense strand
ggaaccaacaugucuaauu

SEQ ID NO: 2194611 - RNA, 19 nt, Homo sapiens
  misc_RNA (1)...(19): siRNA sense strand
agaaggauauugacuugaa

SEQ ID NO: 2194612 - RNA, 19 nt, Homo sapiens
  misc_RNA (1)...(19): siRNA sense strand
gaacaagagcagcgcauug

SEQ ID NO: 2194613 - RNA, 19 nt, Homo sapiens
  misc_RNA (1)...(19): siRNA sense strand
ccaaagagccugagcagau

SEQ ID NO: 2194614 - RNA, 19 nt, Homo sapiens
  misc_RNA (1)...(19): siRNA sense strand
ggaaccaguugacagaaga

SEQ ID NO: 2194615 - RNA, 19 nt, Homo sapiens
  misc_RNA (1)...(19): siRNA sense strand
uaggugagaugacaaauuc

SEQ ID NO: 2194616 - RNA, 19 nt, Homo sapiens
  misc_RNA (1)...(19): siRNA sense strand
ugacagagauacuauuucu

SEQ ID NO: 2194617 - RNA, 19 nt, Homo sapiens
  misc_RNA (1)...(19): siRNA sense strand
ugaugcaacuguacaauga

SEQ ID NO: 2194618 - RNA, 19 nt, Homo sapiens
  misc_RNA (1)...(19): siRNA sense strand
caacagucaucucgaaauc

SEQ ID NO: 2194619 - RNA, 19 nt, Homo sapiens
  misc_RNA (1)...(19): siRNA sense strand
caaauguucugauuacagu

SEQ ID NO: 2194620 - RNA, 19 nt, Homo sapiens
  misc_RNA (1)...(19): siRNA sense strand
caagacagucccagagaua

SEQ ID NO: 2194621 - RNA, 19 nt, Homo sapiens
  misc_RNA (1)...(19): siRNA sense strand
caagaggacccuucaguga

SEQ ID NO: 2194622 - RNA, 19 nt, Homo sapiens
  misc_RNA (1)...(19): siRNA sense strand
ccagauauggcaccaauuu

SEQ ID NO: 2194623 - RNA, 19 nt, Homo sapiens
  misc_RNA (1)...(19): siRNA sense strand
gagauaaauucuucaguac

SEQ ID NO: 2194624 - RNA, 19 nt, Homo sapiens
  misc_RNA (1)...(19): siRNA sense strand
ggucacagcugauccuaag

SEQ ID NO: 2194625 - RNA, 19 nt, Homo sapiens
  misc_RNA (1)...(19): siRNA sense strand
gaacagaaucaccaagaau

SEQ ID NO: 2194626 - RNA, 19 nt, Homo sapiens
  misc_RNA (1)...(19): siRNA sense strand
ggaaagaggaucccaccaa

SEQ ID NO: 2194627 - RNA, 19 nt, Homo sapiens
  misc_RNA (1)...(19): siRNA sense strand
gaaaaugucuucuaaaagc

SEQ ID NO: 2194628 - RNA, 19 nt, Homo sapiens
  misc_RNA (1)...(19): siRNA sense strand
gcaaagggauugaauaaau

SEQ ID NO: 2194629 - RNA, 19 nt, Homo sapiens
  misc_RNA (1)...(19): siRNA sense strand
ggacacagguucugacaug

SEQ ID NO: 2194630 - RNA, 19 nt, Homo sapiens
  misc_RNA (1)...(19): siRNA sense strand
uaaagaaccuggagcuaaa

SEQ ID NO: 2194631 - RNA, 19 nt, Homo sapiens
  misc_RNA (1)...(19): siRNA sense strand
gaagaaaccugggcugaga

SEQ ID NO: 2194632 - RNA, 19 nt, Homo sapiens
  misc_RNA (1)...(19): siRNA sense strand
ggagcuaaauggacuaauu

SEQ ID NO: 2194633 - RNA, 19 nt, Homo sapiens
  misc_RNA (1)...(19): siRNA sense strand
gaagaggaguuguccagaa

SEQ ID NO: 2194634 - RNA, 19 nt, Homo sapiens
  misc_RNA (1)...(19): siRNA sense strand
gaugaaagcaguuaucaaa

SEQ ID NO: 2194635 - RNA, 19 nt, Homo sapiens
  misc_RNA (1)...(19): siRNA sense strand
ucagugagcuggaacauga

SEQ ID NO: 2194636 - RNA, 19 nt, Homo sapiens
  misc_RNA (1)...(19): siRNA sense strand
gauggagguuuagaaauua

SEQ ID NO: 2194637 - RNA, 19 nt, Homo sapiens
  misc_RNA (1)...(19): siRNA sense strand
gaccugaucuugacuguau

SEQ ID NO: 2194638 - RNA, 19 nt, Homo sapiens
  misc_RNA (1)...(19): siRNA sense strand
cagaugacuucuacuguua

SEQ ID NO: 2194639 - RNA, 19 nt, Homo sapiens
  misc_RNA (1)...(19): siRNA sense strand
gaggaguuguccagaaaua

SEQ ID NO: 2194640 - RNA, 19 nt, Homo sapiens
  misc_RNA (1)...(19): siRNA sense strand
ggauagaucagucagauuu

SEQ ID NO: 2194641 - RNA, 19 nt, Homo sapiens
  misc_RNA (1)...(19): siRNA sense strand
gaaguuucaugcuuucuug

SEQ ID NO: 2194642 - RNA, 19 nt, Homo sapiens
  misc_RNA (1)...(19): siRNA sense strand
caagaagcauuacaggaaa

SEQ ID NO: 2194643 - RNA, 19 nt, Homo sapiens
  misc_RNA (1)...(19): siRNA sense strand
agaaggcgcuugaagauga

SEQ ID NO: 2194644 - RNA, 19 nt, Homo sapiens
  misc_RNA (1)...(19): siRNA sense strand
gaauaaaucggcuucuuug

SEQ ID NO: 2194645 - RNA, 19 nt, Homo sapiens
  misc_RNA (1)...(19): siRNA sense strand
caaagaaaccuguaaguag

SEQ ID NO: 2194646 - RNA, 19 nt, Homo sapiens
  misc_RNA (1)...(19): siRNA sense strand
gcgauaagauacaaagaug

SEQ ID NO: 2194647 - RNA, 19 nt, Homo sapiens
  misc_RNA (1)...(19): siRNA sense strand
gcaccugucucuugcaaau

SEQ ID NO: 2194648 - RNA, 19 nt, Homo sapiens
  misc_RNA (1)...(19): siRNA sense strand
ggauuuaacuauucuagca

SEQ ID NO: 2194649 - RNA, 19 nt, Homo sapiens
  misc_RNA (1)...(19): siRNA sense strand
gaacuggaagucaaagaaa

SEQ ID NO: 2194650 - RNA, 19 nt, Homo sapiens
  misc_RNA (1)...(19): siRNA sense strand
gaauuggauuggcuacaaa

SEQ ID NO: 2194651 - RNA, 19 nt, Homo sapiens
  misc_RNA (1)...(19): siRNA sense strand
agauggagguuuagaaauu

SEQ ID NO: 2194652 - RNA, 19 nt, Homo sapiens
  misc_RNA (1)...(19): siRNA sense strand
gaugugaccuuccaguugu

SEQ ID NO: 2194653 - RNA, 19 nt, Homo sapiens
  misc_RNA (1)...(19): siRNA sense strand
aaagaaaccuguaaguagu

SEQ ID NO: 2194654 - RNA, 19 nt, Homo sapiens
  misc_RNA (1)...(19): siRNA sense strand
gccaagaucuuaaaguauc

SEQ ID NO: 2194655 - RNA, 19 nt, Homo sapiens
  misc_RNA (1)...(19): siRNA sense strand
gagagggauuuaacuauuc

SEQ ID NO: 2194656 - RNA, 19 nt, Homo sapiens
  misc_RNA (1)...(19): siRNA sense strand
uaucaagugugcuaaagaa

SEQ ID NO: 2194657 - RNA, 19 nt, Homo sapiens
  misc_RNA (1)...(19): siRNA sense strand
ccagaugacuucuacuguu

SEQ ID NO: 2194658 - RNA, 19 nt, Homo sapiens
  misc_RNA (1)...(19): siRNA sense strand
uggccaagaucuuaaagua

SEQ ID NO: 2194659 - RNA, 19 nt, Homo sapiens
  misc_RNA (1)...(19): siRNA sense strand
ggagauggagguuuagaaa

SEQ ID NO: 2194660 - RNA, 19 nt, Homo sapiens
  misc_RNA (1)...(19): siRNA sense strand
ucacauggccaagaucuua

SEQ ID NO: 2194661 - RNA, 19 nt, Homo sapiens
  misc_RNA (1)...(19): siRNA sense strand
cuaaauggacuaauucuga

SEQ ID NO: 2194662 - RNA, 19 nt, Homo sapiens
  misc_RNA (1)...(19): siRNA sense strand
agagagggauuuaacuauu

SEQ ID NO: 2194663 - RNA, 19 nt, Homo sapiens
  misc_RNA (1)...(19): siRNA sense strand
gcagggagcagaucacaug

SEQ ID NO: 2194664 - RNA, 19 nt, Homo sapiens
  misc_RNA (1)...(19): siRNA sense strand
gcaguuaaaggaagaaaga

SEQ ID NO: 2194665 - RNA, 19 nt, Homo sapiens
  misc_RNA (1)...(19): siRNA sense strand
uagcaaagggauugaauaa

SEQ ID NO: 2194666 - RNA, 19 nt, Homo sapiens
  misc_RNA (1)...(19): siRNA sense strand
ccagagggcuuaggaacuu

SEQ ID NO: 2194667 - RNA, 19 nt, Homo sapiens
  misc_RNA (1)...(19): siRNA sense strand
gaaguggucacaaaggaaa

SEQ ID NO: 2194668 - RNA, 19 nt, Homo sapiens
  misc_RNA (1)...(19): siRNA sense strand
ggacuaauucugagagaga

SEQ ID NO: 2194669 - RNA, 19 nt, Homo sapiens
  misc_RNA (1)...(19): siRNA sense strand
uaaagcaguuaaaggaaga

SEQ ID NO: 2194670 - RNA, 19 nt, Homo sapiens
  misc_RNA (1)...(19): siRNA sense strand
gggagggcgugcuggauuu

SEQ ID NO: 2194671 - RNA, 19 nt, Homo sapiens
  misc_RNA (1)...(19): siRNA sense strand
aauuggagauggagguuua

SEQ ID NO: 2194672 - RNA, 19 nt, Homo sapiens
  misc_RNA (1)...(19): siRNA sense strand
gcugagagucuucgcuaua

SEQ ID NO: 2194673 - RNA, 19 nt, Homo sapiens
  misc_RNA (1)...(19): siRNA sense strand
caaaacacgugauauaugu

SEQ ID NO: 2194674 - RNA, 19 nt, Homo sapiens
  misc_RNA (1)...(19): siRNA sense strand
acacagggguuucccauua

SEQ ID NO: 2194675 - RNA, 19 nt, Homo sapiens
  misc_RNA (1)...(19): siRNA sense strand
acaaagaaaccuguaagua

SEQ ID NO: 2194676 - RNA, 19 nt, Homo sapiens
  misc_RNA (1)...(19): siRNA sense strand
uggauuggcuacaaagaaa

SEQ ID NO: 2194677 - RNA, 19 nt, Homo sapiens
  misc_RNA (1)...(19): siRNA sense strand
caauacaacucuggucguu

SEQ ID NO: 2194678 - RNA, 19 nt, Homo sapiens
  misc_RNA (1)...(19): siRNA sense strand
ugaauaaaucggcuucuuu

SEQ ID NO: 2194679 - RNA, 19 nt, Homo sapiens
  misc_RNA (1)...(19): siRNA sense strand
aagaggaguuguccagaaa

SEQ ID NO: 2194680 - RNA, 19 nt, Homo sapiens
  misc_RNA (1)...(19): siRNA sense strand
uugaagagguugaugauuc

SEQ ID NO: 2194681 - RNA, 19 nt, Homo sapiens
  misc_RNA (1)...(19): siRNA sense strand
gaaggagugccaaaucaga

SEQ ID NO: 2194682 - RNA, 19 nt, Homo sapiens
  misc_RNA (1)...(19): siRNA sense strand
cuaaagaaccuggagcuaa

SEQ ID NO: 2194683 - RNA, 19 nt, Homo sapiens
  misc_RNA (1)...(19): siRNA sense strand
ggaacuggaagucaaagaa

SEQ ID NO: 2194684 - RNA, 19 nt, Homo sapiens
  misc_RNA (1)...(19): siRNA sense strand
gaaggcgcuugaagaugaa

SEQ ID NO: 2194685 - RNA, 19 nt, Homo sapiens
  misc_RNA (1)...(19): siRNA sense strand
gauaagauacaaagaugug

SEQ ID NO: 2194686 - RNA, 19 nt, Homo sapiens
  misc_RNA (1)...(19): siRNA sense strand
gaaaaugcccaguuaagaa

SEQ ID NO: 2194687 - RNA, 19 nt, Homo sapiens
  misc_RNA (1)...(19): siRNA sense strand
acaagaagcauuacaggaa

SEQ ID NO: 2194688 - RNA, 19 nt, Homo sapiens
  misc_RNA (1)...(19): siRNA sense strand
gagagagggauuuaacuau

SEQ ID NO: 2194689 - RNA, 19 nt, Homo sapiens
  misc_RNA (1)...(19): siRNA sense strand
ucuaggaaguggucacaaa

SEQ ID NO: 2194690 - RNA, 19 nt, Homo sapiens
  misc_RNA (1)...(19): siRNA sense strand
aaaggaagaaagagugaua

SEQ ID NO: 2194691 - RNA, 19 nt, Homo sapiens
  misc_RNA (1)...(19): siRNA sense strand
guaauccaccuaaagaaga

SEQ ID NO: 2194692 - RNA, 19 nt, Homo sapiens
  misc_RNA (1)...(19): siRNA sense strand
agacguaucacacugaauu

SEQ ID NO: 2194693 - RNA, 19 nt, Homo sapiens
  misc_RNA (1)...(19): siRNA sense strand
gaaauagcagaucuucuuc

SEQ ID NO: 2194694 - RNA, 19 nt, Homo sapiens
  misc_RNA (1)...(19): siRNA sense strand
gagcuaaauggacuaauuc

SEQ ID NO: 2194695 - RNA, 19 nt, Homo sapiens
  misc_RNA (1)...(19): siRNA sense strand
uaagacguaucacacugaa

SEQ ID NO: 2194696 - RNA, 19 nt, Homo sapiens
  misc_RNA (1)...(19): siRNA sense strand
gguauaaagagcucuauca

SEQ ID NO: 2194697 - RNA, 19 nt, Homo sapiens
  misc_RNA (1)...(19): siRNA sense strand
uaauccaccuaaagaagaa

SEQ ID NO: 2194698 - RNA, 19 nt, Homo sapiens
  misc_RNA (1)...(19): siRNA sense strand
cacaauggcugggauagau

SEQ ID NO: 2194699 - RNA, 19 nt, Homo sapiens
  misc_RNA (1)...(19): siRNA sense strand
agaaaacacucccuuggua

SEQ ID NO: 2194700 - RNA, 19 nt, Homo sapiens
  misc_RNA (1)...(19): siRNA sense strand
caaaacugcuaaacagaaa

SEQ ID NO: 2194701 - RNA, 19 nt, Homo sapiens
  misc_RNA (1)...(19): siRNA sense strand
gaauugcaacacacuuauu

SEQ ID NO: 2194702 - RNA, 19 nt, Homo sapiens
  misc_RNA (1)...(19): siRNA sense strand
gaaccuggagcuaaaugga

SEQ ID NO: 2194703 - RNA, 19 nt, Homo sapiens
  misc_RNA (1)...(19): siRNA sense strand
gcaggagucuuuugaagga

SEQ ID NO: 2194704 - RNA, 19 nt, Homo sapiens
  misc_RNA (1)...(19): siRNA sense strand
cuguauggcuggcuuaaga

SEQ ID NO: 2194705 - RNA, 19 nt, Homo sapiens
  misc_RNA (1)...(19): siRNA sense strand
caaaauauccaguuucaga

SEQ ID NO: 2194706 - RNA, 19 nt, Homo sapiens
  misc_RNA (1)...(19): siRNA sense strand
uuucuuggaucuccuuaaa

SEQ ID NO: 2194707 - RNA, 19 nt, Homo sapiens
  misc_RNA (1)...(19): siRNA sense strand
auaaagaccugcccuuggu

SEQ ID NO: 2194708 - RNA, 19 nt, Homo sapiens
  misc_RNA (1)...(19): siRNA sense strand
agaauuggauuggcuacaa

SEQ ID NO: 2194709 - RNA, 19 nt, Homo sapiens
  misc_RNA (1)...(19): siRNA sense strand
cagaaaaggagaacuauaa

SEQ ID NO: 2194710 - RNA, 19 nt, Homo sapiens
  misc_RNA (1)...(19): siRNA sense strand
uggaaggagugccaaauca

SEQ ID NO: 2194711 - RNA, 19 nt, Homo sapiens
  misc_RNA (1)...(19): siRNA sense strand
uagaggcccuugaaaccaa

SEQ ID NO: 2194712 - RNA, 19 nt, Homo sapiens
  misc_RNA (1)...(19): siRNA sense strand
gagaaggcaugaagaaacc

SEQ ID NO: 2194713 - RNA, 19 nt, Homo sapiens
  misc_RNA (1)...(19): siRNA sense strand
aaagaaggcgcuugaagau

SEQ ID NO: 2194714 - RNA, 19 nt, Homo sapiens
  misc_RNA (1)...(19): siRNA sense strand
gcuuaagguugauaaacga

SEQ ID NO: 2194715 - RNA, 19 nt, Homo sapiens
  misc_RNA (1)...(19): siRNA sense strand
ggaaguggucacaaaggaa

SEQ ID NO: 2194716 - RNA, 19 nt, Homo sapiens
  misc_RNA (1)...(19): siRNA sense strand
gaguaccaguggauaacuu

SEQ ID NO: 2194717 - RNA, 19 nt, Homo sapiens
  misc_RNA (1)...(19): siRNA sense strand
guaucacacugaauugcaa

SEQ ID NO: 2194718 - RNA, 19 nt, Homo sapiens
  misc_RNA (1)...(19): siRNA sense strand
caacuucacaggauguaau

SEQ ID NO: 2194719 - RNA, 19 nt, Homo sapiens
  misc_RNA (1)...(19): siRNA sense strand
acaaagaugugaccuucca

SEQ ID NO: 2194720 - RNA, 19 nt, Homo sapiens
  misc_RNA (1)...(19): siRNA sense strand
guauagaacaagaagcauu

SEQ ID NO: 2194721 - RNA, 19 nt, Homo sapiens
  misc_RNA (1)...(19): siRNA sense strand
ugaagagguugaugauucu

SEQ ID NO: 2194722 - RNA, 19 nt, Homo sapiens
  misc_RNA (1)...(19): siRNA sense strand
cagaucacauggccaagau

SEQ ID NO: 2194723 - RNA, 19 nt, Homo sapiens
  misc_RNA (1)...(19): siRNA sense strand
agagagagggauuuaacua

SEQ ID NO: 2194724 - RNA, 19 nt, Homo sapiens
  misc_RNA (1)...(19): siRNA sense strand
gauaagcaacacccuggaa

SEQ ID NO: 2194725 - RNA, 19 nt, Homo sapiens
  misc_RNA (1)...(19): siRNA sense strand
gaaggauucauugcuagaa

SEQ ID NO: 2194726 - RNA, 19 nt, Homo sapiens
  misc_RNA (1)...(19): siRNA sense strand
gcccaguuaagaaauauaa

SEQ ID NO: 2194727 - RNA, 19 nt, Homo sapiens
  misc_RNA (1)...(19): siRNA sense strand
uuucagaaguuucaugcuu

SEQ ID NO: 2194728 - RNA, 19 nt, Homo sapiens
  misc_RNA (1)...(19): siRNA sense strand
gaacuuagccuuaaugaaa

SEQ ID NO: 2194729 - RNA, 19 nt, Homo sapiens
  misc_RNA (1)...(19): siRNA sense strand
gcucaacccuuuaaauuua

SEQ ID NO: 2194730 - RNA, 19 nt, Homo sapiens
  misc_RNA (1)...(19): siRNA sense strand
ggcauuaugucauguauua

SEQ ID NO: 2194731 - RNA, 19 nt, Homo sapiens
  misc_RNA (1)...(19): siRNA sense strand
ccaaagaacuuagccuuaa

SEQ ID NO: 2194732 - RNA, 19 nt, Homo sapiens
  misc_RNA (1)...(19): siRNA sense strand
gaacagggauaacuacauc

SEQ ID NO: 2194733 - RNA, 19 nt, Homo sapiens
  misc_RNA (1)...(19): siRNA sense strand
gaacagcaauguggaaguu

SEQ ID NO: 2194734 - RNA, 19 nt, Homo sapiens
  misc_RNA (1)...(19): siRNA sense strand
gaacugaacgccaucauug

SEQ ID NO: 2194735 - RNA, 19 nt, Homo sapiens
  misc_RNA (1)...(19): siRNA sense strand
gcauacuccuuccauguua

SEQ ID NO: 2194736 - RNA, 19 nt, Homo sapiens
  misc_RNA (1)...(19): siRNA sense strand
ugacagcgauggugagaaa

SEQ ID NO: 2194737 - RNA, 19 nt, Homo sapiens
  misc_RNA (1)...(19): siRNA sense strand
ucaagaggcugaaugcuau

SEQ ID NO: 2194738 - RNA, 19 nt, Homo sapiens
  misc_RNA (1)...(19): siRNA sense strand
gugagaaacucgccaguga

SEQ ID NO: 2194739 - RNA, 19 nt, Homo sapiens
  misc_RNA (1)...(19): siRNA sense strand
gauaagaaggccacaguuu

SEQ ID NO: 2194740 - RNA, 19 nt, Homo sapiens
  misc_RNA (1)...(19): siRNA sense strand
ugacaaugaucaccaaaga

SEQ ID NO: 2194741 - RNA, 19 nt, Homo sapiens
  misc_RNA (1)...(19): siRNA sense strand
ggcaguaccuuguccauau

SEQ ID NO: 2194742 - RNA, 19 nt, Homo sapiens
  misc_RNA (1)...(19): siRNA sense strand
ucaccaagccagacaaaua

SEQ ID NO: 2194743 - RNA, 19 nt, Homo sapiens
  misc_RNA (1)...(19): siRNA sense strand
gcagaaaacugaagaaaag

SEQ ID NO: 2194744 - RNA, 19 nt, Homo sapiens
  misc_RNA (1)...(19): siRNA sense strand
uaaggaagaguuucaguuu

SEQ ID NO: 2194745 - RNA, 19 nt, Homo sapiens
  misc_RNA (1)...(19): siRNA sense strand
ggagccagcuguauugaca

SEQ ID NO: 2194746 - RNA, 19 nt, Homo sapiens
  misc_RNA (1)...(19): siRNA sense strand
gugcacaagucauuccuuu

SEQ ID NO: 2194747 - RNA, 19 nt, Homo sapiens
  misc_RNA (1)...(19): siRNA sense strand
ggccacaguuuaugaaguu

SEQ ID NO: 2194748 - RNA, 19 nt, Homo sapiens
  misc_RNA (1)...(19): siRNA sense strand
gccaguacuuuguccauuu

SEQ ID NO: 2194749 - RNA, 19 nt, Homo sapiens
  misc_RNA (1)...(19): siRNA sense strand
gaagaagcaccaugacaau

SEQ ID NO: 2194750 - RNA, 19 nt, Homo sapiens
  misc_RNA (1)...(19): siRNA sense strand
caaagaacuuagccuuaau

SEQ ID NO: 2194751 - RNA, 19 nt, Homo sapiens
  misc_RNA (1)...(19): siRNA sense strand
gaaauguccuauggguuga

SEQ ID NO: 2194752 - RNA, 19 nt, Homo sapiens
  misc_RNA (1)...(19): siRNA sense strand
ggaaauugcagcucguuau

SEQ ID NO: 2194753 - RNA, 19 nt, Homo sapiens
  misc_RNA (1)...(19): siRNA sense strand
gcagacuacuccucagaga

SEQ ID NO: 2194754 - RNA, 19 nt, Homo sapiens
  misc_RNA (1)...(19): siRNA sense strand
ggaggucagucccaucuuc

SEQ ID NO: 2194755 - RNA, 19 nt, Homo sapiens
  misc_RNA (1)...(19): siRNA sense strand
gagaauggccuagacaaga

SEQ ID NO: 2194756 - RNA, 19 nt, Homo sapiens
  misc_RNA (1)...(19): siRNA sense strand
agacacgccugcucaagaa

SEQ ID NO: 2194757 - RNA, 19 nt, Homo sapiens
  misc_RNA (1)...(19): siRNA sense strand
uaagaaggccacaguuuau

SEQ ID NO: 2194758 - RNA, 19 nt, Homo sapiens
  misc_RNA (1)...(19): siRNA sense strand
gauggucgcacccuaauug

SEQ ID NO: 2194759 - RNA, 19 nt, Homo sapiens
  misc_RNA (1)...(19): siRNA sense strand
auaagaaggccacaguuua

SEQ ID NO: 2194760 - RNA, 19 nt, Homo sapiens
  misc_RNA (1)...(19): siRNA sense strand
gaaauugcagcucguuaug

SEQ ID NO: 2194761 - RNA, 19 nt, Homo sapiens
  misc_RNA (1)...(19): siRNA sense strand
gaagcaccaugacaaugau

SEQ ID NO: 2194762 - RNA, 19 nt, Homo sapiens
  misc_RNA (1)...(19): siRNA sense strand
uaacucuacucccggauug

SEQ ID NO: 2194763 - RNA, 19 nt, Homo sapiens
  misc_RNA (1)...(19): siRNA sense strand
caagaaagaugccccgauu

SEQ ID NO: 2194764 - RNA, 19 nt, Homo sapiens
  misc_RNA (1)...(19): siRNA sense strand
gucugaagcuggaauguga

SEQ ID NO: 2194765 - RNA, 19 nt, Homo sapiens
  misc_RNA (1)...(19): siRNA sense strand
gaagcuggaaugugagaaa

SEQ ID NO: 2194766 - RNA, 19 nt, Homo sapiens
  misc_RNA (1)...(19): siRNA sense strand
gagaaacucgccagugaga

SEQ ID NO: 2194767 - RNA, 19 nt, Homo sapiens
  misc_RNA (1)...(19): siRNA sense strand
gcagcggcauuaugucaug

SEQ ID NO: 2194768 - RNA, 19 nt, Homo sapiens
  misc_RNA (1)...(19): siRNA sense strand
ggucgcacccuaauuguug

SEQ ID NO: 2194769 - RNA, 19 nt, Homo sapiens
  misc_RNA (1)...(19): siRNA sense strand
caccaggaguugacccuuu

SEQ ID NO: 2194770 - RNA, 19 nt, Homo sapiens
  misc_RNA (1)...(19): siRNA sense strand
gcucaaguuugcccauugu

SEQ ID NO: 2194771 - RNA, 19 nt, Homo sapiens
  misc_RNA (1)...(19): siRNA sense strand
ccaguacuuuguccauuug

SEQ ID NO: 2194772 - RNA, 19 nt, Homo sapiens
  misc_RNA (1)...(19): siRNA sense strand
gaaacucgccagugagaag

SEQ ID NO: 2194773 - RNA, 19 nt, Homo sapiens
  misc_RNA (1)...(19): siRNA sense strand
gaaggccacaguuuaugaa

SEQ ID NO: 2194774 - RNA, 19 nt, Homo sapiens
  misc_RNA (1)...(19): siRNA sense strand
ccaaugaggauccaucuuc

SEQ ID NO: 2194775 - RNA, 19 nt, Homo sapiens
  misc_RNA (1)...(19): siRNA sense strand
gcaguaccuuguccauauc

SEQ ID NO: 2194776 - RNA, 19 nt, Homo sapiens
  misc_RNA (1)...(19): siRNA sense strand
gugcuuagcugugacaucu

SEQ ID NO: 2194777 - RNA, 19 nt, Homo sapiens
  misc_RNA (1)...(19): siRNA sense strand
gauggagccagcuguauug

SEQ ID NO: 2194778 - RNA, 19 nt, Homo sapiens
  misc_RNA (1)...(19): siRNA sense strand
agucccaucuuccaauuaa

SEQ ID NO: 2194779 - RNA, 19 nt, Homo sapiens
  misc_RNA (1)...(19): siRNA sense strand
caucggugcuuagcuguga

SEQ ID NO: 2194780 - RNA, 19 nt, Homo sapiens
  misc_RNA (1)...(19): siRNA sense strand
uagcgcagauggucagaug

SEQ ID NO: 2194781 - RNA, 19 nt, Homo sapiens
  misc_RNA (1)...(19): siRNA sense strand
gugaucggauuaaggaaga

SEQ ID NO: 2194782 - RNA, 19 nt, Homo sapiens
  misc_RNA (1)...(19): siRNA sense strand
gucaagaggcugaaugcua

SEQ ID NO: 2194783 - RNA, 19 nt, Homo sapiens
  misc_RNA (1)...(19): siRNA sense strand
cuacuacucccgucucaaa

SEQ ID NO: 2194784 - RNA, 19 nt, Homo sapiens
  misc_RNA (1)...(19): siRNA sense strand
agaagcaccaugacaauga

SEQ ID NO: 2194785 - RNA, 19 nt, Homo sapiens
  misc_RNA (1)...(19): siRNA sense strand
caacuacaucuucaugaga

SEQ ID NO: 2194786 - RNA, 19 nt, Homo sapiens
  misc_RNA (1)...(19): siRNA sense strand
ggagaacagcaauguggaa

SEQ ID NO: 2194787 - RNA, 19 nt, Homo sapiens
  misc_RNA (1)...(19): siRNA sense strand
ggacaggugguuuggacaa

SEQ ID NO: 2194788 - RNA, 19 nt, Homo sapiens
  misc_RNA (1)...(19): siRNA sense strand
gcaguacucccuccuccaa

SEQ ID NO: 2194789 - RNA, 19 nt, Homo sapiens
  misc_RNA (1)...(19): siRNA sense strand
acaaugaucaccaaagaga

SEQ ID NO: 2194790 - RNA, 19 nt, Homo sapiens
  misc_RNA (1)...(19): siRNA sense strand
gcccagcauuuaucacaug

SEQ ID NO: 2194791 - RNA, 19 nt, Homo sapiens
  misc_RNA (1)...(19): siRNA sense strand
ccaacuacaucuucaugag

SEQ ID NO: 2194792 - RNA, 19 nt, Homo sapiens
  misc_RNA (1)...(19): siRNA sense strand
cgagggagcccagcacauu

SEQ ID NO: 2194793 - RNA, 19 nt, Homo sapiens
  misc_RNA (1)...(19): siRNA sense strand
agaagaagcaccaugacaa

SEQ ID NO: 2194794 - RNA, 19 nt, Homo sapiens
  misc_RNA (1)...(19): siRNA sense strand
gagaagaagcaccaugaca

SEQ ID NO: 2194795 - RNA, 19 nt, Homo sapiens
  misc_RNA (1)...(19): siRNA sense strand
gaggcugaaugcuaucugu

SEQ ID NO: 2194796 - RNA, 19 nt, Homo sapiens
  misc_RNA (1)...(19): siRNA sense strand
agacaaauaccaacuacau

SEQ ID NO: 2194797 - RNA, 19 nt, Homo sapiens
  misc_RNA (1)...(19): siRNA sense strand
ccagcuguauugacauuuc

SEQ ID NO: 2194798 - RNA, 19 nt, Homo sapiens
  misc_RNA (1)...(19): siRNA sense strand
ugguugacguuuccaauga

SEQ ID NO: 2194799 - RNA, 19 nt, Homo sapiens
  misc_RNA (1)...(19): siRNA sense strand
ucagucccaucuuccaauu

SEQ ID NO: 2194800 - RNA, 19 nt, Homo sapiens
  misc_RNA (1)...(19): siRNA sense strand
ccagacaaauaccaacuac

SEQ ID NO: 2194801 - RNA, 19 nt, Homo sapiens
  misc_RNA (1)...(19): siRNA sense strand
gcucaauaccacagucuga

SEQ ID NO: 2194802 - RNA, 19 nt, Homo sapiens
  misc_RNA (1)...(19): siRNA sense strand
ggauuaaggaagaguuuca

SEQ ID NO: 2194803 - RNA, 19 nt, Homo sapiens
  misc_RNA (1)...(19): siRNA sense strand
gagagaauggccuagacaa

SEQ ID NO: 2194804 - RNA, 19 nt, Homo sapiens
  misc_RNA (1)...(19): siRNA sense strand
cugcucaacccuuuaaauu

SEQ ID NO: 2194805 - RNA, 19 nt, Homo sapiens
  misc_RNA (1)...(19): siRNA sense strand
caaauaccaacuacaucuu

SEQ ID NO: 2194806 - RNA, 19 nt, Homo sapiens
  misc_RNA (1)...(19): siRNA sense strand
gcacaagucauuccuuucc

SEQ ID NO: 2194807 - RNA, 19 nt, Homo sapiens
  misc_RNA (1)...(19): siRNA sense strand
cagcucgacugucugaaca

SEQ ID NO: 2194808 - RNA, 19 nt, Homo sapiens
  misc_RNA (1)...(19): siRNA sense strand
ccuuuggccucaagccuaa

SEQ ID NO: 2194809 - RNA, 19 nt, Homo sapiens
  misc_RNA (1)...(19): siRNA sense strand
cagccucuauugcaucuuc

SEQ ID NO: 2194810 - RNA, 19 nt, Homo sapiens
  misc_RNA (1)...(19): siRNA sense strand
gaauauagaaaugcacaag

SEQ ID NO: 2194811 - RNA, 19 nt, Homo sapiens
  misc_RNA (1)...(19): siRNA sense strand
cgacuucaccucccagauc

SEQ ID NO: 2194812 - RNA, 19 nt, Homo sapiens
  misc_RNA (1)...(19): siRNA sense strand
guccauauccaacuccauu

SEQ ID NO: 2194813 - RNA, 19 nt, Homo sapiens
  misc_RNA (1)...(19): siRNA sense strand
ccaugacaaugaucaccaa

SEQ ID NO: 2194814 - RNA, 19 nt, Homo sapiens
  misc_RNA (1)...(19): siRNA sense strand
gcauuuaucacauggacau

SEQ ID NO: 2194815 - RNA, 19 nt, Homo sapiens
  misc_RNA (1)...(19): siRNA sense strand
uccaaagaacuuagccuua

SEQ ID NO: 2194816 - RNA, 19 nt, Homo sapiens
  misc_RNA (1)...(19): siRNA sense strand
ggauaagaaggccacaguu

SEQ ID NO: 2194817 - RNA, 19 nt, Homo sapiens
  misc_RNA (1)...(19): siRNA sense strand
guauauuccaguccaaaga

SEQ ID NO: 2194818 - RNA, 19 nt, Homo sapiens
  misc_RNA (1)...(19): siRNA sense strand
gcugugugcugucgcucaa

SEQ ID NO: 2194819 - RNA, 19 nt, Homo sapiens
  misc_RNA (1)...(19): siRNA sense strand
caagagcaccagcaacaag

SEQ ID NO: 2194820 - RNA, 19 nt, Homo sapiens
  misc_RNA (1)...(19): siRNA sense strand
auauagaaaugcacaagca

SEQ ID NO: 2194821 - RNA, 19 nt, Homo sapiens
  misc_RNA (1)...(19): siRNA sense strand
gaauccucaucggugcuua

SEQ ID NO: 2194822 - RNA, 19 nt, Homo sapiens
  misc_RNA (1)...(19): siRNA sense strand
ggauggagaacagcaaugu

SEQ ID NO: 2194823 - RNA, 19 nt, Homo sapiens
  misc_RNA (1)...(19): siRNA sense strand
gucaaggucugggacauca

SEQ ID NO: 2194824 - RNA, 19 nt, Homo sapiens
  misc_RNA (1)...(19): siRNA sense strand
ucagccugcucaacccuuu

SEQ ID NO: 2194825 - RNA, 19 nt, Homo sapiens
  misc_RNA (1)...(19): siRNA sense strand
cagcauacuccuuccaugu

SEQ ID NO: 2194826 - RNA, 19 nt, Homo sapiens
  misc_RNA (1)...(19): siRNA sense strand
cagaaacuccgcagacuac

SEQ ID NO: 2194827 - RNA, 19 nt, Homo sapiens
  misc_RNA (1)...(19): siRNA sense strand
agaaggccacaguuuauga

SEQ ID NO: 2194828 - RNA, 19 nt, Homo sapiens
  misc_RNA (1)...(19): siRNA sense strand
gaacuuagccuuaaugaaa

SEQ ID NO: 2194829 - RNA, 19 nt, Homo sapiens
  misc_RNA (1)...(19): siRNA sense strand
gcucaacccuuuaaauuua

SEQ ID NO: 2194830 - RNA, 19 nt, Homo sapiens
  misc_RNA (1)...(19): siRNA sense strand
ggcauuaugucauguauua

SEQ ID NO: 2194831 - RNA, 19 nt, Homo sapiens
  misc_RNA (1)...(19): siRNA sense strand
ccaaagaacuuagccuuaa

SEQ ID NO: 2194832 - RNA, 19 nt, Homo sapiens
  misc_RNA (1)...(19): siRNA sense strand
gaacagggauaacuacauc

SEQ ID NO: 2194833 - RNA, 19 nt, Homo sapiens
  misc_RNA (1)...(19): siRNA sense strand
gaacagcaauguggaaguu

SEQ ID NO: 2194834 - RNA, 19 nt, Homo sapiens
  misc_RNA (1)...(19): siRNA sense strand
gaacugaacgccaucauug

SEQ ID NO: 2194835 - RNA, 19 nt, Homo sapiens
  misc_RNA (1)...(19): siRNA sense strand
gcauacuccuuccauguua

SEQ ID NO: 2194836 - RNA, 19 nt, Homo sapiens
  misc_RNA (1)...(19): siRNA sense strand
ugacagcgauggugagaaa

SEQ ID NO: 2194837 - RNA, 19 nt, Homo sapiens
  misc_RNA (1)...(19): siRNA sense strand
ucaagaggcugaaugcuau

SEQ ID NO: 2194838 - RNA, 19 nt, Homo sapiens
  misc_RNA (1)...(19): siRNA sense strand
gugagaaacucgccaguga

SEQ ID NO: 2194839 - RNA, 19 nt, Homo sapiens
  misc_RNA (1)...(19): siRNA sense strand
gauaagaaggccacaguuu

SEQ ID NO: 2194840 - RNA, 19 nt, Homo sapiens
  misc_RNA (1)...(19): siRNA sense strand
ugacaaugaucaccaaaga

SEQ ID NO: 2194841 - RNA, 19 nt, Homo sapiens
  misc_RNA (1)...(19): siRNA sense strand
ggcaguaccuuguccauau

SEQ ID NO: 2194842 - RNA, 19 nt, Homo sapiens
  misc_RNA (1)...(19): siRNA sense strand
ucaccaagccagacaaaua

SEQ ID NO: 2194843 - RNA, 19 nt, Homo sapiens
  misc_RNA (1)...(19): siRNA sense strand
gcagaaaacugaagaaaag

SEQ ID NO: 2194844 - RNA, 19 nt, Homo sapiens
  misc_RNA (1)...(19): siRNA sense strand
uaaggaagaguuucaguuu

SEQ ID NO: 2194845 - RNA, 19 nt, Homo sapiens
  misc_RNA (1)...(19): siRNA sense strand
ggagccagcuguauugaca

SEQ ID NO: 2194846 - RNA, 19 nt, Homo sapiens
  misc_RNA (1)...(19): siRNA sense strand
gugcacaagucauuccuuu

SEQ ID NO: 2194847 - RNA, 19 nt, Homo sapiens
  misc_RNA (1)...(19): siRNA sense strand
ggccacaguuuaugaaguu

SEQ ID NO: 2194848 - RNA, 19 nt, Homo sapiens
  misc_RNA (1)...(19): siRNA sense strand
gccaguacuuuguccauuu

SEQ ID NO: 2194849 - RNA, 19 nt, Homo sapiens
  misc_RNA (1)...(19): siRNA sense strand
gaagaagcaccaugacaau

SEQ ID NO: 2194850 - RNA, 19 nt, Homo sapiens
  misc_RNA (1)...(19): siRNA sense strand
caaagaacuuagccuuaau

SEQ ID NO: 2194851 - RNA, 19 nt, Homo sapiens
  misc_RNA (1)...(19): siRNA sense strand
gaaauguccuauggguuga

SEQ ID NO: 2194852 - RNA, 19 nt, Homo sapiens
  misc_RNA (1)...(19): siRNA sense strand
ggaaauugcagcucguuau

SEQ ID NO: 2194853 - RNA, 19 nt, Homo sapiens
  misc_RNA (1)...(19): siRNA sense strand
gcagacuacuccucagaga

SEQ ID NO: 2194854 - RNA, 19 nt, Homo sapiens
  misc_RNA (1)...(19): siRNA sense strand
ggaggucagucccaucuuc

SEQ ID NO: 2194855 - RNA, 19 nt, Homo sapiens
  misc_RNA (1)...(19): siRNA sense strand
gagaauggccuagacaaga

SEQ ID NO: 2194856 - RNA, 19 nt, Homo sapiens
  misc_RNA (1)...(19): siRNA sense strand
agacacgccugcucaagaa

SEQ ID NO: 2194857 - RNA, 19 nt, Homo sapiens
  misc_RNA (1)...(19): siRNA sense strand
uaagaaggccacaguuuau

SEQ ID NO: 2194858 - RNA, 19 nt, Homo sapiens
  misc_RNA (1)...(19): siRNA sense strand
gauggucgcacccuaauug

SEQ ID NO: 2194859 - RNA, 19 nt, Homo sapiens
  misc_RNA (1)...(19): siRNA sense strand
auaagaaggccacaguuua

SEQ ID NO: 2194860 - RNA, 19 nt, Homo sapiens
  misc_RNA (1)...(19): siRNA sense strand
gaaauugcagcucguuaug

SEQ ID NO: 2194861 - RNA, 19 nt, Homo sapiens
  misc_RNA (1)...(19): siRNA sense strand
gaagcaccaugacaaugau

SEQ ID NO: 2194862 - RNA, 19 nt, Homo sapiens
  misc_RNA (1)...(19): siRNA sense strand
uaacucuacucccggauug

SEQ ID NO: 2194863 - RNA, 19 nt, Homo sapiens
  misc_RNA (1)...(19): siRNA sense strand
caagaaagaugccccgauu

SEQ ID NO: 2194864 - RNA, 19 nt, Homo sapiens
  misc_RNA (1)...(19): siRNA sense strand
gucugaagcuggaauguga

SEQ ID NO: 2194865 - RNA, 19 nt, Homo sapiens
  misc_RNA (1)...(19): siRNA sense strand
gaagcuggaaugugagaaa

SEQ ID NO: 2194866 - RNA, 19 nt, Homo sapiens
  misc_RNA (1)...(19): siRNA sense strand
gagaaacucgccagugaga

SEQ ID NO: 2194867 - RNA, 19 nt, Homo sapiens
  misc_RNA (1)...(19): siRNA sense strand
gcagcggcauuaugucaug

SEQ ID NO: 2194868 - RNA, 19 nt, Homo sapiens
  misc_RNA (1)...(19): siRNA sense strand
ggucgcacccuaauuguug

SEQ ID NO: 2194869 - RNA, 19 nt, Homo sapiens
  misc_RNA (1)...(19): siRNA sense strand
caccaggaguugacccuuu

SEQ ID NO: 2194870 - RNA, 19 nt, Homo sapiens
  misc_RNA (1)...(19): siRNA sense strand
gcucaaguuugcccauugu

SEQ ID NO: 2194871 - RNA, 19 nt, Homo sapiens
  misc_RNA (1)...(19): siRNA sense strand
ccaguacuuuguccauuug

SEQ ID NO: 2194872 - RNA, 19 nt, Homo sapiens
  misc_RNA (1)...(19): siRNA sense strand
gaaacucgccagugagaag

SEQ ID NO: 2194873 - RNA, 19 nt, Homo sapiens
  misc_RNA (1)...(19): siRNA sense strand
gaaggccacaguuuaugaa

SEQ ID NO: 2194874 - RNA, 19 nt, Homo sapiens
  misc_RNA (1)...(19): siRNA sense strand
ccaaugaggauccaucuuc

SEQ ID NO: 2194875 - RNA, 19 nt, Homo sapiens
  misc_RNA (1)...(19): siRNA sense strand
gcaguaccuuguccauauc

SEQ ID NO: 2194876 - RNA, 19 nt, Homo sapiens
  misc_RNA (1)...(19): siRNA sense strand
gugcuuagcugugacaucu

SEQ ID NO: 2194877 - RNA, 19 nt, Homo sapiens
  misc_RNA (1)...(19): siRNA sense strand
gauggagccagcuguauug

SEQ ID NO: 2194878 - RNA, 19 nt, Homo sapiens
  misc_RNA (1)...(19): siRNA sense strand
agucccaucuuccaauuaa

SEQ ID NO: 2194879 - RNA, 19 nt, Homo sapiens
  misc_RNA (1)...(19): siRNA sense strand
caucggugcuuagcuguga

SEQ ID NO: 2194880 - RNA, 19 nt, Homo sapiens
  misc_RNA (1)...(19): siRNA sense strand
uagcgcagauggucagaug

SEQ ID NO: 2194881 - RNA, 19 nt, Homo sapiens
  misc_RNA (1)...(19): siRNA sense strand
gugaucggauuaaggaaga

SEQ ID NO: 2194882 - RNA, 19 nt, Homo sapiens
  misc_RNA (1)...(19): siRNA sense strand
gucaagaggcugaaugcua

SEQ ID NO: 2194883 - RNA, 19 nt, Homo sapiens
  misc_RNA (1)...(19): siRNA sense strand
cuacuacucccgucucaaa

SEQ ID NO: 2194884 - RNA, 19 nt, Homo sapiens
  misc_RNA (1)...(19): siRNA sense strand
agaagcaccaugacaauga

SEQ ID NO: 2194885 - RNA, 19 nt, Homo sapiens
  misc_RNA (1)...(19): siRNA sense strand
caacuacaucuucaugaga

SEQ ID NO: 2194886 - RNA, 19 nt, Homo sapiens
  misc_RNA (1)...(19): siRNA sense strand
ggagaacagcaauguggaa

SEQ ID NO: 2194887 - RNA, 19 nt, Homo sapiens
  misc_RNA (1)...(19): siRNA sense strand
ggacaggugguuuggacaa

SEQ ID NO: 2194888 - RNA, 19 nt, Homo sapiens
  misc_RNA (1)...(19): siRNA sense strand
gcaguacucccuccuccaa

SEQ ID NO: 2194889 - RNA, 19 nt, Homo sapiens
  misc_RNA (1)...(19): siRNA sense strand
acaaugaucaccaaagaga

SEQ ID NO: 2194890 - RNA, 19 nt, Homo sapiens
  misc_RNA (1)...(19): siRNA sense strand
gcccagcauuuaucacaug

SEQ ID NO: 2194891 - RNA, 19 nt, Homo sapiens
  misc_RNA (1)...(19): siRNA sense strand
ccaacuacaucuucaugag

SEQ ID NO: 2194892 - RNA, 19 nt, Homo sapiens
  misc_RNA (1)...(19): siRNA sense strand
cgagggagcccagcacauu

SEQ ID NO: 2194893 - RNA, 19 nt, Homo sapiens
  misc_RNA (1)...(19): siRNA sense strand
agaagaagcaccaugacaa

SEQ ID NO: 2194894 - RNA, 19 nt, Homo sapiens
  misc_RNA (1)...(19): siRNA sense strand
gagaagaagcaccaugaca

SEQ ID NO: 2194895 - RNA, 19 nt, Homo sapiens
  misc_RNA (1)...(19): siRNA sense strand
gaggcugaaugcuaucugu

SEQ ID NO: 2194896 - RNA, 19 nt, Homo sapiens
  misc_RNA (1)...(19): siRNA sense strand
agacaaauaccaacuacau

SEQ ID NO: 2194897 - RNA, 19 nt, Homo sapiens
  misc_RNA (1)...(19): siRNA sense strand
ccagcuguauugacauuuc

SEQ ID NO: 2194898 - RNA, 19 nt, Homo sapiens
  misc_RNA (1)...(19): siRNA sense strand
ugguugacguuuccaauga

SEQ ID NO: 2194899 - RNA, 19 nt, Homo sapiens
  misc_RNA (1)...(19): siRNA sense strand
ucagucccaucuuccaauu

SEQ ID NO: 2194900 - RNA, 19 nt, Homo sapiens
  misc_RNA (1)...(19): siRNA sense strand
ccagacaaauaccaacuac

SEQ ID NO: 2194901 - RNA, 19 nt, Homo sapiens
  misc_RNA (1)...(19): siRNA sense strand
gcucaauaccacagucuga

SEQ ID NO: 2194902 - RNA, 19 nt, Homo sapiens
  misc_RNA (1)...(19): siRNA sense strand
ggauuaaggaagaguuuca

SEQ ID NO: 2194903 - RNA, 19 nt, Homo sapiens
  misc_RNA (1)...(19): siRNA sense strand
gagagaauggccuagacaa

SEQ ID NO: 2194904 - RNA, 19 nt, Homo sapiens
  misc_RNA (1)...(19): siRNA sense strand
cugcucaacccuuuaaauu

SEQ ID NO: 2194905 - RNA, 19 nt, Homo sapiens
  misc_RNA (1)...(19): siRNA sense strand
caaauaccaacuacaucuu

SEQ ID NO: 2194906 - RNA, 19 nt, Homo sapiens
  misc_RNA (1)...(19): siRNA sense strand
gcacaagucauuccuuucc

SEQ ID NO: 2194907 - RNA, 19 nt, Homo sapiens
  misc_RNA (1)...(19): siRNA sense strand
cagcucgacugucugaaca

SEQ ID NO: 2194908 - RNA, 19 nt, Homo sapiens
  misc_RNA (1)...(19): siRNA sense strand
ccuuuggccucaagccuaa

SEQ ID NO: 2194909 - RNA, 19 nt, Homo sapiens
  misc_RNA (1)...(19): siRNA sense strand
cagccucuauugcaucuuc

SEQ ID NO: 2194910 - RNA, 19 nt, Homo sapiens
  misc_RNA (1)...(19): siRNA sense strand
gaauauagaaaugcacaag

SEQ ID NO: 2194911 - RNA, 19 nt, Homo sapiens
  misc_RNA (1)...(19): siRNA sense strand
cgacuucaccucccagauc

SEQ ID NO: 2194912 - RNA, 19 nt, Homo sapiens
  misc_RNA (1)...(19): siRNA sense strand
guccauauccaacuccauu

SEQ ID NO: 2194913 - RNA, 19 nt, Homo sapiens
  misc_RNA (1)...(19): siRNA sense strand
ccaugacaaugaucaccaa

SEQ ID NO: 2194914 - RNA, 19 nt, Homo sapiens
  misc_RNA (1)...(19): siRNA sense strand
gcauuuaucacauggacau

SEQ ID NO: 2194915 - RNA, 19 nt, Homo sapiens
  misc_RNA (1)...(19): siRNA sense strand
uccaaagaacuuagccuua

SEQ ID NO: 2194916 - RNA, 19 nt, Homo sapiens
  misc_RNA (1)...(19): siRNA sense strand
ggauaagaaggccacaguu

SEQ ID NO: 2194917 - RNA, 19 nt, Homo sapiens
  misc_RNA (1)...(19): siRNA sense strand
guauauuccaguccaaaga

SEQ ID NO: 2194918 - RNA, 19 nt, Homo sapiens
  misc_RNA (1)...(19): siRNA sense strand
gcugugugcugucgcucaa

SEQ ID NO: 2194919 - RNA, 19 nt, Homo sapiens
  misc_RNA (1)...(19): siRNA sense strand
caagagcaccagcaacaag

SEQ ID NO: 2194920 - RNA, 19 nt, Homo sapiens
  misc_RNA (1)...(19): siRNA sense strand
auauagaaaugcacaagca

SEQ ID NO: 2194921 - RNA, 19 nt, Homo sapiens
  misc_RNA (1)...(19): siRNA sense strand
gaauccucaucggugcuua

SEQ ID NO: 2194922 - RNA, 19 nt, Homo sapiens
  misc_RNA (1)...(19): siRNA sense strand
ggauggagaacagcaaugu

SEQ ID NO: 2194923 - RNA, 19 nt, Homo sapiens
  misc_RNA (1)...(19): siRNA sense strand
gucaaggucugggacauca

SEQ ID NO: 2194924 - RNA, 19 nt, Homo sapiens
  misc_RNA (1)...(19): siRNA sense strand
ucagccugcucaacccuuu

SEQ ID NO: 2194925 - RNA, 19 nt, Homo sapiens
  misc_RNA (1)...(19): siRNA sense strand
cagcauacuccuuccaugu

SEQ ID NO: 2194926 - RNA, 19 nt, Homo sapiens
  misc_RNA (1)...(19): siRNA sense strand
cagaaacuccgcagacuac

SEQ ID NO: 2194927 - RNA, 19 nt, Homo sapiens
  misc_RNA (1)...(19): siRNA sense strand
agaaggccacaguuuauga

SEQ ID NO: 2194928 - RNA, 19 nt, Homo sapiens
  misc_RNA (1)...(19): siRNA sense strand
gaagaucccuacucuguua

SEQ ID NO: 2194929 - RNA, 19 nt, Homo sapiens
  misc_RNA (1)...(19): siRNA sense strand
gaacagaggcuggaaauua

SEQ ID NO: 2194930 - RNA, 19 nt, Homo sapiens
  misc_RNA (1)...(19): siRNA sense strand
gaaccuaggcucaccauua

SEQ ID NO: 2194931 - RNA, 19 nt, Homo sapiens
  misc_RNA (1)...(19): siRNA sense strand
ugaagaggaugaugaguua

SEQ ID NO: 2194932 - RNA, 19 nt, Homo sapiens
  misc_RNA (1)...(19): siRNA sense strand
gaauuuggcuuacacaaug

SEQ ID NO: 2194933 - RNA, 19 nt, Homo sapiens
  misc_RNA (1)...(19): siRNA sense strand
guugauggcuggaauauuu

SEQ ID NO: 2194934 - RNA, 19 nt, Homo sapiens
  misc_RNA (1)...(19): siRNA sense strand
ggaaguagauaucaguuug

SEQ ID NO: 2194935 - RNA, 19 nt, Homo sapiens
  misc_RNA (1)...(19): siRNA sense strand
gacaaagacuuaagagaaa

SEQ ID NO: 2194936 - RNA, 19 nt, Homo sapiens
  misc_RNA (1)...(19): siRNA sense strand
gaucauggauugaaggauu

SEQ ID NO: 2194937 - RNA, 19 nt, Homo sapiens
  misc_RNA (1)...(19): siRNA sense strand
caacacaaguuaccaguga

SEQ ID NO: 2194938 - RNA, 19 nt, Homo sapiens
  misc_RNA (1)...(19): siRNA sense strand
uaagacgacuguuucauaa

SEQ ID NO: 2194939 - RNA, 19 nt, Homo sapiens
  misc_RNA (1)...(19): siRNA sense strand
agaaagagcucuccuagug

SEQ ID NO: 2194940 - RNA, 19 nt, Homo sapiens
  misc_RNA (1)...(19): siRNA sense strand
uuacaagggugauaaagua

SEQ ID NO: 2194941 - RNA, 19 nt, Homo sapiens
  misc_RNA (1)...(19): siRNA sense strand
ggaccuagaauuccuguua

SEQ ID NO: 2194942 - RNA, 19 nt, Homo sapiens
  misc_RNA (1)...(19): siRNA sense strand
gcaagcaucuguugacugu

SEQ ID NO: 2194943 - RNA, 19 nt, Homo sapiens
  misc_RNA (1)...(19): siRNA sense strand
gaagagaagggcacauuaa

SEQ ID NO: 2194944 - RNA, 19 nt, Homo sapiens
  misc_RNA (1)...(19): siRNA sense strand
gauagauguugucgaauuu

SEQ ID NO: 2194945 - RNA, 19 nt, Homo sapiens
  misc_RNA (1)...(19): siRNA sense strand
guacagccacuuacucuua

SEQ ID NO: 2194946 - RNA, 19 nt, Homo sapiens
  misc_RNA (1)...(19): siRNA sense strand
gaaguggucuggaaguaga

SEQ ID NO: 2194947 - RNA, 19 nt, Homo sapiens
  misc_RNA (1)...(19): siRNA sense strand
gaaacuacccuacagcaaa

SEQ ID NO: 2194948 - RNA, 19 nt, Homo sapiens
  misc_RNA (1)...(19): siRNA sense strand
gauguuaacucugaugauu

SEQ ID NO: 2194949 - RNA, 19 nt, Homo sapiens
  misc_RNA (1)...(19): siRNA sense strand
ggacuugccacuuuagaua

SEQ ID NO: 2194950 - RNA, 19 nt, Homo sapiens
  misc_RNA (1)...(19): siRNA sense strand
guaagacgacuguuucaua

SEQ ID NO: 2194951 - RNA, 19 nt, Homo sapiens
  misc_RNA (1)...(19): siRNA sense strand
gaagaugcccugaaccaaa

SEQ ID NO: 2194952 - RNA, 19 nt, Homo sapiens
  misc_RNA (1)...(19): siRNA sense strand
gaagagacaggaugacaaa

SEQ ID NO: 2194953 - RNA, 19 nt, Homo sapiens
  misc_RNA (1)...(19): siRNA sense strand
aaagggaggugucaacaaa

SEQ ID NO: 2194954 - RNA, 19 nt, Homo sapiens
  misc_RNA (1)...(19): siRNA sense strand
gcaaagaggacaaagaaau

SEQ ID NO: 2194955 - RNA, 19 nt, Homo sapiens
  misc_RNA (1)...(19): siRNA sense strand
agagauggcugucugauga

SEQ ID NO: 2194956 - RNA, 19 nt, Homo sapiens
  misc_RNA (1)...(19): siRNA sense strand
aaacuuaucuucaccaaag

SEQ ID NO: 2194957 - RNA, 19 nt, Homo sapiens
  misc_RNA (1)...(19): siRNA sense strand
caagagaaacgccgauuaa

SEQ ID NO: 2194958 - RNA, 19 nt, Homo sapiens
  misc_RNA (1)...(19): siRNA sense strand
caagaacccuaaauaguca

SEQ ID NO: 2194959 - RNA, 19 nt, Homo sapiens
  misc_RNA (1)...(19): siRNA sense strand
uaaagagacugcugaaagu

SEQ ID NO: 2194960 - RNA, 19 nt, Homo sapiens
  misc_RNA (1)...(19): siRNA sense strand
gcaagaacccuaaauaguc

SEQ ID NO: 2194961 - RNA, 19 nt, Homo sapiens
  misc_RNA (1)...(19): siRNA sense strand
acaaagaugugugauauug

SEQ ID NO: 2194962 - RNA, 19 nt, Homo sapiens
  misc_RNA (1)...(19): siRNA sense strand
gagaaguggucuggaagua

SEQ ID NO: 2194963 - RNA, 19 nt, Homo sapiens
  misc_RNA (1)...(19): siRNA sense strand
cagcaaaggugccaauugu

SEQ ID NO: 2194964 - RNA, 19 nt, Homo sapiens
  misc_RNA (1)...(19): siRNA sense strand
agagagcacuuuggauuua

SEQ ID NO: 2194965 - RNA, 19 nt, Homo sapiens
  misc_RNA (1)...(19): siRNA sense strand
gcauuuaacugcccuugga

SEQ ID NO: 2194966 - RNA, 19 nt, Homo sapiens
  misc_RNA (1)...(19): siRNA sense strand
ggaagagaagggcacauua

SEQ ID NO: 2194967 - RNA, 19 nt, Homo sapiens
  misc_RNA (1)...(19): siRNA sense strand
gcaaaggugccaauuguga

SEQ ID NO: 2194968 - RNA, 19 nt, Homo sapiens
  misc_RNA (1)...(19): siRNA sense strand
uaauuuggcugauuuagug

SEQ ID NO: 2194969 - RNA, 19 nt, Homo sapiens
  misc_RNA (1)...(19): siRNA sense strand
gaaggauucucauuaagca

SEQ ID NO: 2194970 - RNA, 19 nt, Homo sapiens
  misc_RNA (1)...(19): siRNA sense strand
gauugaaggauucucauua

SEQ ID NO: 2194971 - RNA, 19 nt, Homo sapiens
  misc_RNA (1)...(19): siRNA sense strand
ugacaaagacuuaagagaa

SEQ ID NO: 2194972 - RNA, 19 nt, Homo sapiens
  misc_RNA (1)...(19): siRNA sense strand
uagaugaacugccuaccua

SEQ ID NO: 2194973 - RNA, 19 nt, Homo sapiens
  misc_RNA (1)...(19): siRNA sense strand
gaagaggcaccaagagaaa

SEQ ID NO: 2194974 - RNA, 19 nt, Homo sapiens
  misc_RNA (1)...(19): siRNA sense strand
gcaauuacauguauuucag

SEQ ID NO: 2194975 - RNA, 19 nt, Homo sapiens
  misc_RNA (1)...(19): siRNA sense strand
ugucagaacuauugaagaa

SEQ ID NO: 2194976 - RNA, 19 nt, Homo sapiens
  misc_RNA (1)...(19): siRNA sense strand
caaccuguguuugaauaua

SEQ ID NO: 2194977 - RNA, 19 nt, Homo sapiens
  misc_RNA (1)...(19): siRNA sense strand
uuuaaaggcucuucaggua

SEQ ID NO: 2194978 - RNA, 19 nt, Homo sapiens
  misc_RNA (1)...(19): siRNA sense strand
caaagaggacaaagaaauu

SEQ ID NO: 2194979 - RNA, 19 nt, Homo sapiens
  misc_RNA (1)...(19): siRNA sense strand
ugagaaacaucuuaccuau

SEQ ID NO: 2194980 - RNA, 19 nt, Homo sapiens
  misc_RNA (1)...(19): siRNA sense strand
gaacuaaauugagccuguu

SEQ ID NO: 2194981 - RNA, 19 nt, Homo sapiens
  misc_RNA (1)...(19): siRNA sense strand
uaagcaaacuagggaauuu

SEQ ID NO: 2194982 - RNA, 19 nt, Homo sapiens
  misc_RNA (1)...(19): siRNA sense strand
caaagaaauucacaacaag

SEQ ID NO: 2194983 - RNA, 19 nt, Homo sapiens
  misc_RNA (1)...(19): siRNA sense strand
ugauagauguugucgaauu

SEQ ID NO: 2194984 - RNA, 19 nt, Homo sapiens
  misc_RNA (1)...(19): siRNA sense strand
gaaaugauucccucugaug

SEQ ID NO: 2194985 - RNA, 19 nt, Homo sapiens
  misc_RNA (1)...(19): siRNA sense strand
gauaaguauucgugucaaa

SEQ ID NO: 2194986 - RNA, 19 nt, Homo sapiens
  misc_RNA (1)...(19): siRNA sense strand
gugagggacuugccacuuu

SEQ ID NO: 2194987 - RNA, 19 nt, Homo sapiens
  misc_RNA (1)...(19): siRNA sense strand
cagguagccuuuccaguaa

SEQ ID NO: 2194988 - RNA, 19 nt, Homo sapiens
  misc_RNA (1)...(19): siRNA sense strand
ucagguagccuuuccagua

SEQ ID NO: 2194989 - RNA, 19 nt, Homo sapiens
  misc_RNA (1)...(19): siRNA sense strand
gaagauaagcccauacagu

SEQ ID NO: 2194990 - RNA, 19 nt, Homo sapiens
  misc_RNA (1)...(19): siRNA sense strand
gaaccucugccaccauuaa

SEQ ID NO: 2194991 - RNA, 19 nt, Homo sapiens
  misc_RNA (1)...(19): siRNA sense strand
gaagaugaguuagacaaca

SEQ ID NO: 2194992 - RNA, 19 nt, Homo sapiens
  misc_RNA (1)...(19): siRNA sense strand
gaagauggcauggcuaaug

SEQ ID NO: 2194993 - RNA, 19 nt, Homo sapiens
  misc_RNA (1)...(19): siRNA sense strand
aacagaggcuggaaauuaa

SEQ ID NO: 2194994 - RNA, 19 nt, Homo sapiens
  misc_RNA (1)...(19): siRNA sense strand
aaugauagauguugucgaa

SEQ ID NO: 2194995 - RNA, 19 nt, Homo sapiens
  misc_RNA (1)...(19): siRNA sense strand
gguagaagaguauuuggua

SEQ ID NO: 2194996 - RNA, 19 nt, Homo sapiens
  misc_RNA (1)...(19): siRNA sense strand
ccagggaacuaugggaaua

SEQ ID NO: 2194997 - RNA, 19 nt, Homo sapiens
  misc_RNA (1)...(19): siRNA sense strand
aaauaagucucaaggaaga

SEQ ID NO: 2194998 - RNA, 19 nt, Homo sapiens
  misc_RNA (1)...(19): siRNA sense strand
uaucuaggaucauggauug

SEQ ID NO: 2194999 - RNA, 19 nt, Homo sapiens
  misc_RNA (1)...(19): siRNA sense strand
ggccagacaucagaaauga

SEQ ID NO: 2195000 - RNA, 19 nt, Homo sapiens
  misc_RNA (1)...(19): siRNA sense strand
guugugaucugggaacaua

SEQ ID NO: 2195001 - RNA, 19 nt, Homo sapiens
  misc_RNA (1)...(19): siRNA sense strand
guuauaaaccgacaaagaa

SEQ ID NO: 2195002 - RNA, 19 nt, Homo sapiens
  misc_RNA (1)...(19): siRNA sense strand
aagaagaaaugggaaauga

SEQ ID NO: 2195003 - RNA, 19 nt, Homo sapiens
  misc_RNA (1)...(19): siRNA sense strand
uaaaggccauggcaguaaa

SEQ ID NO: 2195004 - RNA, 19 nt, Homo sapiens
  misc_RNA (1)...(19): siRNA sense strand
gaaaagaggcacaagaaaa

SEQ ID NO: 2195005 - RNA, 19 nt, Homo sapiens
  misc_RNA (1)...(19): siRNA sense strand
ucagacaacuggagagaau

SEQ ID NO: 2195006 - RNA, 19 nt, Homo sapiens
  misc_RNA (1)...(19): siRNA sense strand
aaagauacccugagaacaa

SEQ ID NO: 2195007 - RNA, 19 nt, Homo sapiens
  misc_RNA (1)...(19): siRNA sense strand
aaccuaggcucaccauuaa

SEQ ID NO: 2195008 - RNA, 19 nt, Homo sapiens
  misc_RNA (1)...(19): siRNA sense strand
ugagggacuugccacuuua

SEQ ID NO: 2195009 - RNA, 19 nt, Homo sapiens
  misc_RNA (1)...(19): siRNA sense strand
uaaaguauaccauccagaa

SEQ ID NO: 2195010 - RNA, 19 nt, Homo sapiens
  misc_RNA (1)...(19): siRNA sense strand
gaacauguuauuagcauca

SEQ ID NO: 2195011 - RNA, 19 nt, Homo sapiens
  misc_RNA (1)...(19): siRNA sense strand
caucuuaccuauuacaaca

SEQ ID NO: 2195012 - RNA, 19 nt, Homo sapiens
  misc_RNA (1)...(19): siRNA sense strand
aggcgaagcugcuaaguau

SEQ ID NO: 2195013 - RNA, 19 nt, Homo sapiens
  misc_RNA (1)...(19): siRNA sense strand
uagcaagaguccucagaaa

SEQ ID NO: 2195014 - RNA, 19 nt, Homo sapiens
  misc_RNA (1)...(19): siRNA sense strand
ccaagcagauguuaacucu

SEQ ID NO: 2195015 - RNA, 19 nt, Homo sapiens
  misc_RNA (1)...(19): siRNA sense strand
guagaagaguauuugguau

SEQ ID NO: 2195016 - RNA, 19 nt, Homo sapiens
  misc_RNA (1)...(19): siRNA sense strand
gacaauuaauggacuugaa

SEQ ID NO: 2195017 - RNA, 19 nt, Homo sapiens
  misc_RNA (1)...(19): siRNA sense strand
gcgaagcugcuaaguauga

SEQ ID NO: 2195018 - RNA, 19 nt, Homo sapiens
  misc_RNA (1)...(19): siRNA sense strand
ccacaaagaucagaguaag

SEQ ID NO: 2195019 - RNA, 19 nt, Homo sapiens
  misc_RNA (1)...(19): siRNA sense strand
gaagagagacugcauugac

SEQ ID NO: 2195020 - RNA, 19 nt, Homo sapiens
  misc_RNA (1)...(19): siRNA sense strand
gcagcacacguaauaauga

SEQ ID NO: 2195021 - RNA, 19 nt, Homo sapiens
  misc_RNA (1)...(19): siRNA sense strand
ggaugaugaugacuucaga

SEQ ID NO: 2195022 - RNA, 19 nt, Homo sapiens
  misc_RNA (1)...(19): siRNA sense strand
uaucaaugguagaagagua

SEQ ID NO: 2195023 - RNA, 19 nt, Homo sapiens
  misc_RNA (1)...(19): siRNA sense strand
acacagaggaauuugauuu

SEQ ID NO: 2195024 - RNA, 19 nt, Homo sapiens
  misc_RNA (1)...(19): siRNA sense strand
gagagggucaucuaaagaa

SEQ ID NO: 2195025 - RNA, 19 nt, Homo sapiens
  misc_RNA (1)...(19): siRNA sense strand
ggaagaaaauguaugugaa

SEQ ID NO: 2195026 - RNA, 19 nt, Homo sapiens
  misc_RNA (1)...(19): siRNA sense strand
ggaggaggacgacgaagaa

SEQ ID NO: 2195027 - RNA, 19 nt, Homo sapiens
  misc_RNA (1)...(19): siRNA sense strand
ucagagagcacuuuggauu

SEQ ID NO: 2195028 - RNA, 19 nt, Homo sapiens
  misc_RNA (1)...(19): siRNA sense strand
gaaacagccuccuucaaua

SEQ ID NO: 2195029 - RNA, 19 nt, Homo sapiens
  misc_RNA (1)...(19): siRNA sense strand
gaauuuggcuucucaagug

SEQ ID NO: 2195030 - RNA, 19 nt, Homo sapiens
  misc_RNA (1)...(19): siRNA sense strand
gaagguaaaucagcaaaga

SEQ ID NO: 2195031 - RNA, 19 nt, Homo sapiens
  misc_RNA (1)...(19): siRNA sense strand
gcacagagaggaaucauau

SEQ ID NO: 2195032 - RNA, 19 nt, Homo sapiens
  misc_RNA (1)...(19): siRNA sense strand
ggaggaggcuguuagugaa

SEQ ID NO: 2195033 - RNA, 19 nt, Homo sapiens
  misc_RNA (1)...(19): siRNA sense strand
gaagaacacuggaguagcu

SEQ ID NO: 2195034 - RNA, 19 nt, Homo sapiens
  misc_RNA (1)...(19): siRNA sense strand
gaggagaacaugucacuuu

SEQ ID NO: 2195035 - RNA, 19 nt, Homo sapiens
  misc_RNA (1)...(19): siRNA sense strand
caaaccaucuguucacaug

SEQ ID NO: 2195036 - RNA, 19 nt, Homo sapiens
  misc_RNA (1)...(19): siRNA sense strand
gacagcaguuggacagaua

SEQ ID NO: 2195037 - RNA, 19 nt, Homo sapiens
  misc_RNA (1)...(19): siRNA sense strand
gaagacacccgucagaaug

SEQ ID NO: 2195038 - RNA, 19 nt, Homo sapiens
  misc_RNA (1)...(19): siRNA sense strand
cucaggaagugauuuauua

SEQ ID NO: 2195039 - RNA, 19 nt, Homo sapiens
  misc_RNA (1)...(19): siRNA sense strand
gagaaaacaucaagcaauu

SEQ ID NO: 2195040 - RNA, 19 nt, Homo sapiens
  misc_RNA (1)...(19): siRNA sense strand
caacagagacagacaaauc

SEQ ID NO: 2195041 - RNA, 19 nt, Homo sapiens
  misc_RNA (1)...(19): siRNA sense strand
gaaugucugucucccaaga

SEQ ID NO: 2195042 - RNA, 19 nt, Homo sapiens
  misc_RNA (1)...(19): siRNA sense strand
gaaugaaggcguccagcua

SEQ ID NO: 2195043 - RNA, 19 nt, Homo sapiens
  misc_RNA (1)...(19): siRNA sense strand
gaucaucuuucccgccaaa

SEQ ID NO: 2195044 - RNA, 19 nt, Homo sapiens
  misc_RNA (1)...(19): siRNA sense strand
ggagcuaugugaccucaug

SEQ ID NO: 2195045 - RNA, 19 nt, Homo sapiens
  misc_RNA (1)...(19): siRNA sense strand
ugucaaggcucaugcaaga

SEQ ID NO: 2195046 - RNA, 19 nt, Homo sapiens
  misc_RNA (1)...(19): siRNA sense strand
ugaugcagcuucaggauga

SEQ ID NO: 2195047 - RNA, 19 nt, Homo sapiens
  misc_RNA (1)...(19): siRNA sense strand
caagaaagcugugucucau

SEQ ID NO: 2195048 - RNA, 19 nt, Homo sapiens
  misc_RNA (1)...(19): siRNA sense strand
gaaccuguaugagagcaaa

SEQ ID NO: 2195049 - RNA, 19 nt, Homo sapiens
  misc_RNA (1)...(19): siRNA sense strand
agagaggaaucauauagaa

SEQ ID NO: 2195050 - RNA, 19 nt, Homo sapiens
  misc_RNA (1)...(19): siRNA sense strand
ccugagaacuuuccaguca

SEQ ID NO: 2195051 - RNA, 19 nt, Homo sapiens
  misc_RNA (1)...(19): siRNA sense strand
aaacagccuccuucaauaa

SEQ ID NO: 2195052 - RNA, 19 nt, Homo sapiens
  misc_RNA (1)...(19): siRNA sense strand
ggacuccacucuguuaaca

SEQ ID NO: 2195053 - RNA, 19 nt, Homo sapiens
  misc_RNA (1)...(19): siRNA sense strand
caacaagccacucucaaga

SEQ ID NO: 2195054 - RNA, 19 nt, Homo sapiens
  misc_RNA (1)...(19): siRNA sense strand
gagggcagguggccaucua

SEQ ID NO: 2195055 - RNA, 19 nt, Homo sapiens
  misc_RNA (1)...(19): siRNA sense strand
gauccuggcuugcugucaa

SEQ ID NO: 2195056 - RNA, 19 nt, Homo sapiens
  misc_RNA (1)...(19): siRNA sense strand
gagccaaagcccaauguuu

SEQ ID NO: 2195057 - RNA, 19 nt, Homo sapiens
  misc_RNA (1)...(19): siRNA sense strand
gaaagacugacauccauuc

SEQ ID NO: 2195058 - RNA, 19 nt, Homo sapiens
  misc_RNA (1)...(19): siRNA sense strand
ggaagugauuuauuaagac

SEQ ID NO: 2195059 - RNA, 19 nt, Homo sapiens
  misc_RNA (1)...(19): siRNA sense strand
ggaggcuguuagugaauuu

SEQ ID NO: 2195060 - RNA, 19 nt, Homo sapiens
  misc_RNA (1)...(19): siRNA sense strand
gaagguggguuggcuuuac

SEQ ID NO: 2195061 - RNA, 19 nt, Homo sapiens
  misc_RNA (1)...(19): siRNA sense strand
gcagaaugcugagcuaugc

SEQ ID NO: 2195062 - RNA, 19 nt, Homo sapiens
  misc_RNA (1)...(19): siRNA sense strand
agaaacagccuccuucaau

SEQ ID NO: 2195063 - RNA, 19 nt, Homo sapiens
  misc_RNA (1)...(19): siRNA sense strand
gagaucagcagcccuugaa

SEQ ID NO: 2195064 - RNA, 19 nt, Homo sapiens
  misc_RNA (1)...(19): siRNA sense strand
ugacucaggaagugauuua

SEQ ID NO: 2195065 - RNA, 19 nt, Homo sapiens
  misc_RNA (1)...(19): siRNA sense strand
cgccaugccucgaagguaa

SEQ ID NO: 2195066 - RNA, 19 nt, Homo sapiens
  misc_RNA (1)...(19): siRNA sense strand
gagaggaaucauauagaaa

SEQ ID NO: 2195067 - RNA, 19 nt, Homo sapiens
  misc_RNA (1)...(19): siRNA sense strand
ccacaugggcagaaaguug

SEQ ID NO: 2195068 - RNA, 19 nt, Homo sapiens
  misc_RNA (1)...(19): siRNA sense strand
cuaggaagcccaacuuaga

SEQ ID NO: 2195069 - RNA, 19 nt, Homo sapiens
  misc_RNA (1)...(19): siRNA sense strand
gaugaagaacacuggagua

SEQ ID NO: 2195070 - RNA, 19 nt, Homo sapiens
  misc_RNA (1)...(19): siRNA sense strand
ccaagaaagcugugucuca

SEQ ID NO: 2195071 - RNA, 19 nt, Homo sapiens
  misc_RNA (1)...(19): siRNA sense strand
gcuggaagcccauauugug

SEQ ID NO: 2195072 - RNA, 19 nt, Homo sapiens
  misc_RNA (1)...(19): siRNA sense strand
ggaaagacugacauccauu

SEQ ID NO: 2195073 - RNA, 19 nt, Homo sapiens
  misc_RNA (1)...(19): siRNA sense strand
gcgggacuccacucuguua

SEQ ID NO: 2195074 - RNA, 19 nt, Homo sapiens
  misc_RNA (1)...(19): siRNA sense strand
aaacagaucaugcguguac

SEQ ID NO: 2195075 - RNA, 19 nt, Homo sapiens
  misc_RNA (1)...(19): siRNA sense strand
caucuaagccccucacaua

SEQ ID NO: 2195076 - RNA, 19 nt, Homo sapiens
  misc_RNA (1)...(19): siRNA sense strand
gcaaagacagcaguuucaa

SEQ ID NO: 2195077 - RNA, 19 nt, Homo sapiens
  misc_RNA (1)...(19): siRNA sense strand
gagcuuaggagcccaaucu

SEQ ID NO: 2195078 - RNA, 19 nt, Homo sapiens
  misc_RNA (1)...(19): siRNA sense strand
ggaccugcuuucacaacug

SEQ ID NO: 2195079 - RNA, 19 nt, Homo sapiens
  misc_RNA (1)...(19): siRNA sense strand
gugaggaugugcgugguuu

SEQ ID NO: 2195080 - RNA, 19 nt, Homo sapiens
  misc_RNA (1)...(19): siRNA sense strand
uaggaaagccuguguaaac

SEQ ID NO: 2195081 - RNA, 19 nt, Homo sapiens
  misc_RNA (1)...(19): siRNA sense strand
ucaaguuucugccgcuguu

SEQ ID NO: 2195082 - RNA, 19 nt, Homo sapiens
  misc_RNA (1)...(19): siRNA sense strand
ggaagcccuugaggaguga

SEQ ID NO: 2195083 - RNA, 19 nt, Homo sapiens
  misc_RNA (1)...(19): siRNA sense strand
gaauggccacgaagucaga

SEQ ID NO: 2195084 - RNA, 19 nt, Homo sapiens
  misc_RNA (1)...(19): siRNA sense strand
ggaugugcgugguuucaag

SEQ ID NO: 2195085 - RNA, 19 nt, Homo sapiens
  misc_RNA (1)...(19): siRNA sense strand
cagcagagcaggagcuuag

SEQ ID NO: 2195086 - RNA, 19 nt, Homo sapiens
  misc_RNA (1)...(19): siRNA sense strand
gcuggucccuccucagaca

SEQ ID NO: 2195087 - RNA, 19 nt, Homo sapiens
  misc_RNA (1)...(19): siRNA sense strand
ccagagucgucccaacaga

SEQ ID NO: 2195088 - RNA, 19 nt, Homo sapiens
  misc_RNA (1)...(19): siRNA sense strand
aggagaacaugucacuuug

SEQ ID NO: 2195089 - RNA, 19 nt, Homo sapiens
  misc_RNA (1)...(19): siRNA sense strand
cagccaccaucaccacuga

SEQ ID NO: 2195090 - RNA, 19 nt, Homo sapiens
  misc_RNA (1)...(19): siRNA sense strand
cagcaaagacagcaguuuc

SEQ ID NO: 2195091 - RNA, 19 nt, Homo sapiens
  misc_RNA (1)...(19): siRNA sense strand
gcucaggcccaucuucaau

SEQ ID NO: 2195092 - RNA, 19 nt, Homo sapiens
  misc_RNA (1)...(19): siRNA sense strand
gcuacugccaucaaagaaa

SEQ ID NO: 2195093 - RNA, 19 nt, Homo sapiens
  misc_RNA (1)...(19): siRNA sense strand
ccaggaacccaaacuguca

SEQ ID NO: 2195094 - RNA, 19 nt, Homo sapiens
  misc_RNA (1)...(19): siRNA sense strand
gacccagccucaaguuucu

SEQ ID NO: 2195095 - RNA, 19 nt, Homo sapiens
  misc_RNA (1)...(19): siRNA sense strand
uggaggaggcuguuaguga

SEQ ID NO: 2195096 - RNA, 19 nt, Homo sapiens
  misc_RNA (1)...(19): siRNA sense strand
aaacacagcccaggugcuu

SEQ ID NO: 2195097 - RNA, 19 nt, Homo sapiens
  misc_RNA (1)...(19): siRNA sense strand
cagaaaggaaccugaggaa

SEQ ID NO: 2195098 - RNA, 19 nt, Homo sapiens
  misc_RNA (1)...(19): siRNA sense strand
gaggaaacaacuagaaggu

SEQ ID NO: 2195099 - RNA, 19 nt, Homo sapiens
  misc_RNA (1)...(19): siRNA sense strand
caggacgucuuuagugucu

SEQ ID NO: 2195100 - RNA, 19 nt, Homo sapiens
  misc_RNA (1)...(19): siRNA sense strand
gcucaugacagcaguugga

SEQ ID NO: 2195101 - RNA, 19 nt, Homo sapiens
  misc_RNA (1)...(19): siRNA sense strand
gaccucaugucagccagaa

SEQ ID NO: 2195102 - RNA, 19 nt, Homo sapiens
  misc_RNA (1)...(19): siRNA sense strand
guuucauccuugucccuua

SEQ ID NO: 2195103 - RNA, 19 nt, Homo sapiens
  misc_RNA (1)...(19): siRNA sense strand
acagacaaaucagagauca

SEQ ID NO: 2195104 - RNA, 19 nt, Homo sapiens
  misc_RNA (1)...(19): siRNA sense strand
ucaaagaaacagccuccuu

SEQ ID NO: 2195105 - RNA, 19 nt, Homo sapiens
  misc_RNA (1)...(19): siRNA sense strand
cagcuacugccaucaaaga

SEQ ID NO: 2195106 - RNA, 19 nt, Homo sapiens
  misc_RNA (1)...(19): siRNA sense strand
ccaaugaccaccucagucu

SEQ ID NO: 2195107 - RNA, 19 nt, Homo sapiens
  misc_RNA (1)...(19): siRNA sense strand
ccaccaauggcaagucuga

SEQ ID NO: 2195108 - RNA, 19 nt, Homo sapiens
  misc_RNA (1)...(19): siRNA sense strand
guuaacaccaucucacugu

SEQ ID NO: 2195109 - RNA, 19 nt, Homo sapiens
  misc_RNA (1)...(19): siRNA sense strand
gugcaacaaugagcaaugg

SEQ ID NO: 2195110 - RNA, 19 nt, Homo sapiens
  misc_RNA (1)...(19): siRNA sense strand
ugacagcaguuggacagau

SEQ ID NO: 2195111 - RNA, 19 nt, Homo sapiens
  misc_RNA (1)...(19): siRNA sense strand
cagagaggaaucauauaga

SEQ ID NO: 2195112 - RNA, 19 nt, Homo sapiens
  misc_RNA (1)...(19): siRNA sense strand
acagagaggaaucauauag

SEQ ID NO: 2195113 - RNA, 19 nt, Homo sapiens
  misc_RNA (1)...(19): siRNA sense strand
ugagaacuuuccagucagu

SEQ ID NO: 2195114 - RNA, 19 nt, Homo sapiens
  misc_RNA (1)...(19): siRNA sense strand
guaggaaagccuguguaaa

SEQ ID NO: 2195115 - RNA, 19 nt, Homo sapiens
  misc_RNA (1)...(19): siRNA sense strand
cagcagcccuugaaaagug

SEQ ID NO: 2195116 - RNA, 19 nt, Homo sapiens
  misc_RNA (1)...(19): siRNA sense strand
caaaagaacaccugaugga

SEQ ID NO: 2195117 - RNA, 19 nt, Homo sapiens
  misc_RNA (1)...(19): siRNA sense strand
auaagccacuuuggagaaa

SEQ ID NO: 2195118 - RNA, 19 nt, Homo sapiens
  misc_RNA (1)...(19): siRNA sense strand
gagacccagccucaaguuu

SEQ ID NO: 2195119 - RNA, 19 nt, Homo sapiens
  misc_RNA (1)...(19): siRNA sense strand
cagcccaggugcuuuccuu

SEQ ID NO: 2195120 - RNA, 19 nt, Homo sapiens
  misc_RNA (1)...(19): siRNA sense strand
aggaaagccuguguaaaca

SEQ ID NO: 2195121 - RNA, 19 nt, Homo sapiens
  misc_RNA (1)...(19): siRNA sense strand
cuacugccaucaaagaaac

SEQ ID NO: 2195122 - RNA, 19 nt, Homo sapiens
  misc_RNA (1)...(19): siRNA sense strand
agaagacacccgucagaau

SEQ ID NO: 2195123 - RNA, 19 nt, Homo sapiens
  misc_RNA (1)...(19): siRNA sense strand
uaggaagcccaacuuagaa

SEQ ID NO: 2195124 - RNA, 19 nt, Homo sapiens
  misc_RNA (1)...(19): siRNA sense strand
ccuccucaccugcauguaa

SEQ ID NO: 2195125 - RNA, 19 nt, Homo sapiens
  misc_RNA (1)...(19): siRNA sense strand
cuuaggagcccaaucuuca

SEQ ID NO: 2195126 - RNA, 19 nt, Homo sapiens
  misc_RNA (1)...(19): siRNA sense strand
ucaacaagccacucucaag

SEQ ID NO: 2195127 - RNA, 19 nt, Homo sapiens
  misc_RNA (1)...(19): siRNA sense strand
ggagaaaacaucaagcaau

SEQ ID NO: 2195128 - RNA, 19 nt, Homo sapiens
  misc_RNA (1)...(19): siRNA sense strand
ucaacaugcucaucaagua

SEQ ID NO: 2195129 - RNA, 19 nt, Homo sapiens
  misc_RNA (1)...(19): siRNA sense strand
ggacgaggagugcuucuuu

SEQ ID NO: 2195130 - RNA, 19 nt, Homo sapiens
  misc_RNA (1)...(19): siRNA sense strand
gacgaggagugcuucuuug

SEQ ID NO: 2195131 - RNA, 19 nt, Homo sapiens
  misc_RNA (1)...(19): siRNA sense strand
ggacgacuucuucaacaug

SEQ ID NO: 2195132 - RNA, 19 nt, Homo sapiens
  misc_RNA (1)...(19): siRNA sense strand
gugcuucuuugaccuguug

SEQ ID NO: 2195133 - RNA, 19 nt, Homo sapiens
  misc_RNA (1)...(19): siRNA sense strand
gcgaaucacccacagcaau

SEQ ID NO: 2195134 - RNA, 19 nt, Homo sapiens
  misc_RNA (1)...(19): siRNA sense strand
ggacuucuucagccucauu

SEQ ID NO: 2195135 - RNA, 19 nt, Homo sapiens
  misc_RNA (1)...(19): siRNA sense strand
ggaauucuucgaccucauc

SEQ ID NO: 2195136 - RNA, 19 nt, Homo sapiens
  misc_RNA (1)...(19): siRNA sense strand
cgaaucacccacagcaaug

SEQ ID NO: 2195137 - RNA, 19 nt, Homo sapiens
  misc_RNA (1)...(19): siRNA sense strand
gggacgacuucuucaacau

SEQ ID NO: 2195138 - RNA, 19 nt, Homo sapiens
  misc_RNA (1)...(19): siRNA sense strand
ucuuugaccuguugaccaa

SEQ ID NO: 2195139 - RNA, 19 nt, Homo sapiens
  misc_RNA (1)...(19): siRNA sense strand
caacaugcucaucaaguac

SEQ ID NO: 2195140 - RNA, 19 nt, Homo sapiens
  misc_RNA (1)...(19): siRNA sense strand
ccagaccgaggaauucuuc

SEQ ID NO: 2195141 - RNA, 19 nt, Homo sapiens
  misc_RNA (1)...(19): siRNA sense strand
uucagagggugcaggcuaa

SEQ ID NO: 2195142 - RNA, 19 nt, Homo sapiens
  misc_RNA (1)...(19): siRNA sense strand
ucaacaugcucaucaagua

SEQ ID NO: 2195143 - RNA, 19 nt, Homo sapiens
  misc_RNA (1)...(19): siRNA sense strand
ggacgaggagugcuucuuu

SEQ ID NO: 2195144 - RNA, 19 nt, Homo sapiens
  misc_RNA (1)...(19): siRNA sense strand
gacgaggagugcuucuuug

SEQ ID NO: 2195145 - RNA, 19 nt, Homo sapiens
  misc_RNA (1)...(19): siRNA sense strand
ggacgacuucuucaacaug

SEQ ID NO: 2195146 - RNA, 19 nt, Homo sapiens
  misc_RNA (1)...(19): siRNA sense strand
gugcuucuuugaccuguug

SEQ ID NO: 2195147 - RNA, 19 nt, Homo sapiens
  misc_RNA (1)...(19): siRNA sense strand
gcgaaucacccacagcaau

SEQ ID NO: 2195148 - RNA, 19 nt, Homo sapiens
  misc_RNA (1)...(19): siRNA sense strand
ggacuucuucagccucauu

SEQ ID NO: 2195149 - RNA, 19 nt, Homo sapiens
  misc_RNA (1)...(19): siRNA sense strand
ggaauucuucgaccucauc

SEQ ID NO: 2195150 - RNA, 19 nt, Homo sapiens
  misc_RNA (1)...(19): siRNA sense strand
cgaaucacccacagcaaug

SEQ ID NO: 2195151 - RNA, 19 nt, Homo sapiens
  misc_RNA (1)...(19): siRNA sense strand
gggacgacuucuucaacau

SEQ ID NO: 2195152 - RNA, 19 nt, Homo sapiens
  misc_RNA (1)...(19): siRNA sense strand
ucuuugaccuguugaccaa

SEQ ID NO: 2195153 - RNA, 19 nt, Homo sapiens
  misc_RNA (1)...(19): siRNA sense strand
caacaugcucaucaaguac

SEQ ID NO: 2195154 - RNA, 19 nt, Homo sapiens
  misc_RNA (1)...(19): siRNA sense strand
ccagaccgaggaauucuuc

SEQ ID NO: 2195155 - RNA, 19 nt, Homo sapiens
  misc_RNA (1)...(19): siRNA sense strand
uucagagggugcaggcuaa

SEQ ID NO: 2195156 - RNA, 19 nt, Homo sapiens
  misc_RNA (1)...(19): siRNA sense strand
gcagauggcuucccaguua

SEQ ID NO: 2195157 - RNA, 19 nt, Homo sapiens
  misc_RNA (1)...(19): siRNA sense strand
gaacaaagcuaugaaaugu

SEQ ID NO: 2195158 - RNA, 19 nt, Homo sapiens
  misc_RNA (1)...(19): siRNA sense strand
gaaaguacauucaggcaaa

SEQ ID NO: 2195159 - RNA, 19 nt, Homo sapiens
  misc_RNA (1)...(19): siRNA sense strand
aaagugagcugccagauuu

SEQ ID NO: 2195160 - RNA, 19 nt, Homo sapiens
  misc_RNA (1)...(19): siRNA sense strand
aagcaaaccugauugauuu

SEQ ID NO: 2195161 - RNA, 19 nt, Homo sapiens
  misc_RNA (1)...(19): siRNA sense strand
gaagcaaaccugauugauu

SEQ ID NO: 2195162 - RNA, 19 nt, Homo sapiens
  misc_RNA (1)...(19): siRNA sense strand
gaacauguacucuagaaga

SEQ ID NO: 2195163 - RNA, 19 nt, Homo sapiens
  misc_RNA (1)...(19): siRNA sense strand
gcagaauccuccagucuug

SEQ ID NO: 2195164 - RNA, 19 nt, Homo sapiens
  misc_RNA (1)...(19): siRNA sense strand
ucagggagcuguugcugua

SEQ ID NO: 2195165 - RNA, 19 nt, Homo sapiens
  misc_RNA (1)...(19): siRNA sense strand
gcacauucauucagcaaga

SEQ ID NO: 2195166 - RNA, 19 nt, Homo sapiens
  misc_RNA (1)...(19): siRNA sense strand
ugaaauguuugcagaauga

SEQ ID NO: 2195167 - RNA, 19 nt, Homo sapiens
  misc_RNA (1)...(19): siRNA sense strand
cuaaucagccugcuaauuu

SEQ ID NO: 2195168 - RNA, 19 nt, Homo sapiens
  misc_RNA (1)...(19): siRNA sense strand
ggacggaagccuaugagua

SEQ ID NO: 2195169 - RNA, 19 nt, Homo sapiens
  misc_RNA (1)...(19): siRNA sense strand
gguaaaaucucacuuaguu

SEQ ID NO: 2195170 - RNA, 19 nt, Homo sapiens
  misc_RNA (1)...(19): siRNA sense strand
gaauuuaaaugagccagaa

SEQ ID NO: 2195171 - RNA, 19 nt, Homo sapiens
  misc_RNA (1)...(19): siRNA sense strand
ggagcaaguuucaucaaga

SEQ ID NO: 2195172 - RNA, 19 nt, Homo sapiens
  misc_RNA (1)...(19): siRNA sense strand
ccaaccagcucuguccuua

SEQ ID NO: 2195173 - RNA, 19 nt, Homo sapiens
  misc_RNA (1)...(19): siRNA sense strand
caauaacucugauccugaa

SEQ ID NO: 2195174 - RNA, 19 nt, Homo sapiens
  misc_RNA (1)...(19): siRNA sense strand
gcacagaacaaagcuauga

SEQ ID NO: 2195175 - RNA, 19 nt, Homo sapiens
  misc_RNA (1)...(19): siRNA sense strand
guugagaacuuagaauuug

SEQ ID NO: 2195176 - RNA, 19 nt, Homo sapiens
  misc_RNA (1)...(19): siRNA sense strand
gcuaacagccucccaauca

SEQ ID NO: 2195177 - RNA, 19 nt, Homo sapiens
  misc_RNA (1)...(19): siRNA sense strand
gcccuagacuuuaccuuaa

SEQ ID NO: 2195178 - RNA, 19 nt, Homo sapiens
  misc_RNA (1)...(19): siRNA sense strand
uuacggagcccuagacuuu

SEQ ID NO: 2195179 - RNA, 19 nt, Homo sapiens
  misc_RNA (1)...(19): siRNA sense strand
gaagaaaacuacaaagcuu

SEQ ID NO: 2195180 - RNA, 19 nt, Homo sapiens
  misc_RNA (1)...(19): siRNA sense strand
uaagguggaugucauuaau

SEQ ID NO: 2195181 - RNA, 19 nt, Homo sapiens
  misc_RNA (1)...(19): siRNA sense strand
gcggucagcuuaucaaagu

SEQ ID NO: 2195182 - RNA, 19 nt, Homo sapiens
  misc_RNA (1)...(19): siRNA sense strand
ccaaagacgacacccauaa

SEQ ID NO: 2195183 - RNA, 19 nt, Homo sapiens
  misc_RNA (1)...(19): siRNA sense strand
gcccagagcucaggcagaa

SEQ ID NO: 2195184 - RNA, 19 nt, Homo sapiens
  misc_RNA (1)...(19): siRNA sense strand
caagucuucuuuggaauuu

SEQ ID NO: 2195185 - RNA, 19 nt, Homo sapiens
  misc_RNA (1)...(19): siRNA sense strand
cgagugaccaguucagaua

SEQ ID NO: 2195186 - RNA, 19 nt, Homo sapiens
  misc_RNA (1)...(19): siRNA sense strand
aaccagagcucgcuacguu

SEQ ID NO: 2195187 - RNA, 19 nt, Homo sapiens
  misc_RNA (1)...(19): siRNA sense strand
gaaaccuacaggaauauuu

SEQ ID NO: 2195188 - RNA, 19 nt, Homo sapiens
  misc_RNA (1)...(19): siRNA sense strand
gcgcagccucccucuauua

SEQ ID NO: 2195189 - RNA, 19 nt, Homo sapiens
  misc_RNA (1)...(19): siRNA sense strand
gcaccuaccgcagcaauuu

SEQ ID NO: 2195190 - RNA, 19 nt, Homo sapiens
  misc_RNA (1)...(19): siRNA sense strand
ugagaauguugagaacuua

SEQ ID NO: 2195191 - RNA, 19 nt, Homo sapiens
  misc_RNA (1)...(19): siRNA sense strand
guaauaaggcaaaccauuc

SEQ ID NO: 2195192 - RNA, 19 nt, Homo sapiens
  misc_RNA (1)...(19): siRNA sense strand
ccaccagcguuccucauuu

SEQ ID NO: 2195193 - RNA, 19 nt, Homo sapiens
  misc_RNA (1)...(19): siRNA sense strand
cccgaaaccuacaggaaua

SEQ ID NO: 2195194 - RNA, 19 nt, Homo sapiens
  misc_RNA (1)...(19): siRNA sense strand
ccacugugagccagaauua

SEQ ID NO: 2195195 - RNA, 19 nt, Homo sapiens
  misc_RNA (1)...(19): siRNA sense strand
gcagucagagcgauuacua

SEQ ID NO: 2195196 - RNA, 19 nt, Homo sapiens
  misc_RNA (1)...(19): siRNA sense strand
gacaagaacaaaucgauug

SEQ ID NO: 2195197 - RNA, 19 nt, Homo sapiens
  misc_RNA (1)...(19): siRNA sense strand
ugauugauuucacgaauga

SEQ ID NO: 2195198 - RNA, 19 nt, Homo sapiens
  misc_RNA (1)...(19): siRNA sense strand
gcaagucuucuuuggaauu

SEQ ID NO: 2195199 - RNA, 19 nt, Homo sapiens
  misc_RNA (1)...(19): siRNA sense strand
gcaaaccauuccagucauc

SEQ ID NO: 2195200 - RNA, 19 nt, Homo sapiens
  misc_RNA (1)...(19): siRNA sense strand
gugaacauguacucuagaa

SEQ ID NO: 2195201 - RNA, 19 nt, Homo sapiens
  misc_RNA (1)...(19): siRNA sense strand
gaaggaugcuuuggagucu

SEQ ID NO: 2195202 - RNA, 19 nt, Homo sapiens
  misc_RNA (1)...(19): siRNA sense strand
cgccuaaccuugaccguuu

SEQ ID NO: 2195203 - RNA, 19 nt, Homo sapiens
  misc_RNA (1)...(19): siRNA sense strand
gaggugagccacuugcaaa

SEQ ID NO: 2195204 - RNA, 19 nt, Homo sapiens
  misc_RNA (1)...(19): siRNA sense strand
gaaacgaaggaaccuaaga

SEQ ID NO: 2195205 - RNA, 19 nt, Homo sapiens
  misc_RNA (1)...(19): siRNA sense strand
ugaaagagaagccagaaga

SEQ ID NO: 2195206 - RNA, 19 nt, Homo sapiens
  misc_RNA (1)...(19): siRNA sense strand
uaaucagccugcuaauuug

SEQ ID NO: 2195207 - RNA, 19 nt, Homo sapiens
  misc_RNA (1)...(19): siRNA sense strand
caaagugagcugccagauu

SEQ ID NO: 2195208 - RNA, 19 nt, Homo sapiens
  misc_RNA (1)...(19): siRNA sense strand
caggagcucuggcgauguu

SEQ ID NO: 2195209 - RNA, 19 nt, Homo sapiens
  misc_RNA (1)...(19): siRNA sense strand
caaugaagcaaaccugauu

SEQ ID NO: 2195210 - RNA, 19 nt, Homo sapiens
  misc_RNA (1)...(19): siRNA sense strand
cugcaagucuucuuuggaa

SEQ ID NO: 2195211 - RNA, 19 nt, Homo sapiens
  misc_RNA (1)...(19): siRNA sense strand
ccaguacgauuauggagau

SEQ ID NO: 2195212 - RNA, 19 nt, Homo sapiens
  misc_RNA (1)...(19): siRNA sense strand
gguaauaaggcaaaccauu

SEQ ID NO: 2195213 - RNA, 19 nt, Homo sapiens
  misc_RNA (1)...(19): siRNA sense strand
aagcggacuuugacgauuu

SEQ ID NO: 2195214 - RNA, 19 nt, Homo sapiens
  misc_RNA (1)...(19): siRNA sense strand
ccugaaggauacuauaguu

SEQ ID NO: 2195215 - RNA, 19 nt, Homo sapiens
  misc_RNA (1)...(19): siRNA sense strand
aaacucacuuuccgagcua

SEQ ID NO: 2195216 - RNA, 19 nt, Homo sapiens
  misc_RNA (1)...(19): siRNA sense strand
cgagaaacgugacaacaac

SEQ ID NO: 2195217 - RNA, 19 nt, Homo sapiens
  misc_RNA (1)...(19): siRNA sense strand
acaggaauauuucagacaa

SEQ ID NO: 2195218 - RNA, 19 nt, Homo sapiens
  misc_RNA (1)...(19): siRNA sense strand
aagcuuauuugccagauga

SEQ ID NO: 2195219 - RNA, 19 nt, Homo sapiens
  misc_RNA (1)...(19): siRNA sense strand
guuccgagauggagcaguu

SEQ ID NO: 2195220 - RNA, 19 nt, Homo sapiens
  misc_RNA (1)...(19): siRNA sense strand
guaagaaggaugcuuugga

SEQ ID NO: 2195221 - RNA, 19 nt, Homo sapiens
  misc_RNA (1)...(19): siRNA sense strand
ggagcugguuggcacauuc

SEQ ID NO: 2195222 - RNA, 19 nt, Homo sapiens
  misc_RNA (1)...(19): siRNA sense strand
aaagacagaagcuuauuug

SEQ ID NO: 2195223 - RNA, 19 nt, Homo sapiens
  misc_RNA (1)...(19): siRNA sense strand
caacgacccucugcagaca

SEQ ID NO: 2195224 - RNA, 19 nt, Homo sapiens
  misc_RNA (1)...(19): siRNA sense strand
uuaagcaaaucgauucuuc

SEQ ID NO: 2195225 - RNA, 19 nt, Homo sapiens
  misc_RNA (1)...(19): siRNA sense strand
caaugaggcugcuggugau

SEQ ID NO: 2195226 - RNA, 19 nt, Homo sapiens
  misc_RNA (1)...(19): siRNA sense strand
uaacucugauccugaaagu

SEQ ID NO: 2195227 - RNA, 19 nt, Homo sapiens
  misc_RNA (1)...(19): siRNA sense strand
gagcaaguuucaucaagac

SEQ ID NO: 2195228 - RNA, 19 nt, Homo sapiens
  misc_RNA (1)...(19): siRNA sense strand
ucagagcgauuacuaugca

SEQ ID NO: 2195229 - RNA, 19 nt, Homo sapiens
  misc_RNA (1)...(19): siRNA sense strand
gcaguguugcccaaaguaa

SEQ ID NO: 2195230 - RNA, 19 nt, Homo sapiens
  misc_RNA (1)...(19): siRNA sense strand
ccacugagucucugcagaa

SEQ ID NO: 2195231 - RNA, 19 nt, Homo sapiens
  misc_RNA (1)...(19): siRNA sense strand
cccaauuccuucuaacuug

SEQ ID NO: 2195232 - RNA, 19 nt, Homo sapiens
  misc_RNA (1)...(19): siRNA sense strand
ggugaauccugguucuuuc

SEQ ID NO: 2195233 - RNA, 19 nt, Homo sapiens
  misc_RNA (1)...(19): siRNA sense strand
aaacgaaggaaccuaagaa

SEQ ID NO: 2195234 - RNA, 19 nt, Homo sapiens
  misc_RNA (1)...(19): siRNA sense strand
ugacgcagccgcaccugua

SEQ ID NO: 2195235 - RNA, 19 nt, Homo sapiens
  misc_RNA (1)...(19): siRNA sense strand
agguggaugucauuaauuu

SEQ ID NO: 2195236 - RNA, 19 nt, Homo sapiens
  misc_RNA (1)...(19): siRNA sense strand
ucagacaagugcaaauagu

SEQ ID NO: 2195237 - RNA, 19 nt, Homo sapiens
  misc_RNA (1)...(19): siRNA sense strand
cagcagccuugcccaguga

SEQ ID NO: 2195238 - RNA, 19 nt, Homo sapiens
  misc_RNA (1)...(19): siRNA sense strand
agaccaacuucuccugaaa

SEQ ID NO: 2195239 - RNA, 19 nt, Homo sapiens
  misc_RNA (1)...(19): siRNA sense strand
caaguuucaucaagaccaa

SEQ ID NO: 2195240 - RNA, 19 nt, Homo sapiens
  misc_RNA (1)...(19): siRNA sense strand
gaaggauacuauaguucca

SEQ ID NO: 2195241 - RNA, 19 nt, Homo sapiens
  misc_RNA (1)...(19): siRNA sense strand
gcugucaaauccagaaagu

SEQ ID NO: 2195242 - RNA, 19 nt, Homo sapiens
  misc_RNA (1)...(19): siRNA sense strand
cagccucgcuucucagcaa

SEQ ID NO: 2195243 - RNA, 19 nt, Homo sapiens
  misc_RNA (1)...(19): siRNA sense strand
gagccgagguggcauuggu

SEQ ID NO: 2195244 - RNA, 19 nt, Homo sapiens
  misc_RNA (1)...(19): siRNA sense strand
caagcggacuuugacgauu

SEQ ID NO: 2195245 - RNA, 19 nt, Homo sapiens
  misc_RNA (1)...(19): siRNA sense strand
ccaauuccuucuaacuugu

SEQ ID NO: 2195246 - RNA, 19 nt, Homo sapiens
  misc_RNA (1)...(19): siRNA sense strand
gaagcuuauuugccagaug

SEQ ID NO: 2195247 - RNA, 19 nt, Homo sapiens
  misc_RNA (1)...(19): siRNA sense strand
gagcccagacccagggaua

SEQ ID NO: 2195248 - RNA, 19 nt, Homo sapiens
  misc_RNA (1)...(19): siRNA sense strand
ggacaggccaggacucagu

SEQ ID NO: 2195249 - RNA, 19 nt, Homo sapiens
  misc_RNA (1)...(19): siRNA sense strand
ggagcagucagagcgauua

SEQ ID NO: 2195250 - RNA, 19 nt, Homo sapiens
  misc_RNA (1)...(19): siRNA sense strand
gagacgaggugagccacuu

SEQ ID NO: 2195251 - RNA, 19 nt, Homo sapiens
  misc_RNA (1)...(19): siRNA sense strand
gcaccgcccuuggauacug

SEQ ID NO: 2195252 - RNA, 19 nt, Homo sapiens
  misc_RNA (1)...(19): siRNA sense strand
gaaagagaagccagaagag

SEQ ID NO: 2195253 - RNA, 19 nt, Homo sapiens
  misc_RNA (1)...(19): siRNA sense strand
ugacaaagagucugcaagu

SEQ ID NO: 2195254 - RNA, 19 nt, Homo sapiens
  misc_RNA (1)...(19): siRNA sense strand
gcccagaacuaccgcuauc

SEQ ID NO: 2195255 - RNA, 19 nt, Homo sapiens
  misc_RNA (1)...(19): siRNA sense strand
gcccagaacucagcacagu

SEQ ID NO: 2195256 - RNA, 19 nt, Homo sapiens
  misc_RNA (1)...(19): siRNA sense strand
ggaguaaccugaccgugaa

SEQ ID NO: 2195257 - RNA, 19 nt, Homo sapiens
  misc_RNA (1)...(19): siRNA sense strand
gaucgugggcucagaaaua

SEQ ID NO: 2195258 - RNA, 19 nt, Homo sapiens
  misc_RNA (1)...(19): siRNA sense strand
gcagaagauuggaggauuc

SEQ ID NO: 2195259 - RNA, 19 nt, Homo sapiens
  misc_RNA (1)...(19): siRNA sense strand
ccgugaagguugcauauaa

SEQ ID NO: 2195260 - RNA, 19 nt, Homo sapiens
  misc_RNA (1)...(19): siRNA sense strand
gcauauaacagcucaggaa

SEQ ID NO: 2195261 - RNA, 19 nt, Homo sapiens
  misc_RNA (1)...(19): siRNA sense strand
ucaggaagcugugagauag

SEQ ID NO: 2195262 - RNA, 19 nt, Homo sapiens
  misc_RNA (1)...(19): siRNA sense strand
gcucagaaauagacaguac

SEQ ID NO: 2195263 - RNA, 19 nt, Homo sapiens
  misc_RNA (1)...(19): siRNA sense strand
gcugugagauagagaagau

SEQ ID NO: 2195264 - RNA, 19 nt, Homo sapiens
  misc_RNA (1)...(19): siRNA sense strand
gaagaucgugggcucagaa

SEQ ID NO: 2195265 - RNA, 19 nt, Homo sapiens
  misc_RNA (1)...(19): siRNA sense strand
ggcagaagauuggaggauu

SEQ ID NO: 2195266 - RNA, 19 nt, Homo sapiens
  misc_RNA (1)...(19): siRNA sense strand
gagcuggaccggcagaaga

SEQ ID NO: 2195267 - RNA, 19 nt, Homo sapiens
  misc_RNA (1)...(19): siRNA sense strand
gguguggccuccgaucaaa

SEQ ID NO: 2195268 - RNA, 19 nt, Homo sapiens
  misc_RNA (1)...(19): siRNA sense strand
gaagcugugagauagagaa

SEQ ID NO: 2195269 - RNA, 19 nt, Homo sapiens
  misc_RNA (1)...(19): siRNA sense strand
aaauagacaguacgggaaa

SEQ ID NO: 2195270 - RNA, 19 nt, Homo sapiens
  misc_RNA (1)...(19): siRNA sense strand
gaccgugaagguugcauau

SEQ ID NO: 2195271 - RNA, 19 nt, Homo sapiens
  misc_RNA (1)...(19): siRNA sense strand
cgugaagguugcauauaac

SEQ ID NO: 2195272 - RNA, 19 nt, Homo sapiens
  misc_RNA (1)...(19): siRNA sense strand
ggaguaaccugaccgugaa

SEQ ID NO: 2195273 - RNA, 19 nt, Homo sapiens
  misc_RNA (1)...(19): siRNA sense strand
gaucgugggcucagaaaua

SEQ ID NO: 2195274 - RNA, 19 nt, Homo sapiens
  misc_RNA (1)...(19): siRNA sense strand
gcagaagauuggaggauuc

SEQ ID NO: 2195275 - RNA, 19 nt, Homo sapiens
  misc_RNA (1)...(19): siRNA sense strand
ccgugaagguugcauauaa

SEQ ID NO: 2195276 - RNA, 19 nt, Homo sapiens
  misc_RNA (1)...(19): siRNA sense strand
gcauauaacagcucaggaa

SEQ ID NO: 2195277 - RNA, 19 nt, Homo sapiens
  misc_RNA (1)...(19): siRNA sense strand
ucaggaagcugugagauag

SEQ ID NO: 2195278 - RNA, 19 nt, Homo sapiens
  misc_RNA (1)...(19): siRNA sense strand
gcucagaaauagacaguac

SEQ ID NO: 2195279 - RNA, 19 nt, Homo sapiens
  misc_RNA (1)...(19): siRNA sense strand
gcugugagauagagaagau

SEQ ID NO: 2195280 - RNA, 19 nt, Homo sapiens
  misc_RNA (1)...(19): siRNA sense strand
gaagaucgugggcucagaa

SEQ ID NO: 2195281 - RNA, 19 nt, Homo sapiens
  misc_RNA (1)...(19): siRNA sense strand
ggcagaagauuggaggauu

SEQ ID NO: 2195282 - RNA, 19 nt, Homo sapiens
  misc_RNA (1)...(19): siRNA sense strand
gagcuggaccggcagaaga

SEQ ID NO: 2195283 - RNA, 19 nt, Homo sapiens
  misc_RNA (1)...(19): siRNA sense strand
gguguggccuccgaucaaa

SEQ ID NO: 2195284 - RNA, 19 nt, Homo sapiens
  misc_RNA (1)...(19): siRNA sense strand
gaagcugugagauagagaa

SEQ ID NO: 2195285 - RNA, 19 nt, Homo sapiens
  misc_RNA (1)...(19): siRNA sense strand
gaacuuucgcguccucaag

SEQ ID NO: 2195286 - RNA, 19 nt, Homo sapiens
  misc_RNA (1)...(19): siRNA sense strand
aaauagacaguacgggaaa

SEQ ID NO: 2195287 - RNA, 19 nt, Homo sapiens
  misc_RNA (1)...(19): siRNA sense strand
gaccgugaagguugcauau

SEQ ID NO: 2195288 - RNA, 19 nt, Homo sapiens
  misc_RNA (1)...(19): siRNA sense strand
cgugaagguugcauauaac

SEQ ID NO: 2195289 - RNA, 19 nt, Homo sapiens
  misc_RNA (1)...(19): siRNA sense strand
ccaccuggcuuauuauuua

SEQ ID NO: 2195290 - RNA, 19 nt, Homo sapiens
  misc_RNA (1)...(19): siRNA sense strand
ccacauagccaccgacuuu

SEQ ID NO: 2195291 - RNA, 19 nt, Homo sapiens
  misc_RNA (1)...(19): siRNA sense strand
caacagaccauaccacuga

SEQ ID NO: 2195292 - RNA, 19 nt, Homo sapiens
  misc_RNA (1)...(19): siRNA sense strand
ggaaauggcccugcagaga

SEQ ID NO: 2195293 - RNA, 19 nt, Homo sapiens
  misc_RNA (1)...(19): siRNA sense strand
gcagaugggcgaagaggaa

SEQ ID NO: 2195294 - RNA, 19 nt, Homo sapiens
  misc_RNA (1)...(19): siRNA sense strand
cuucagagcugcaucaaag

SEQ ID NO: 2195295 - RNA, 19 nt, Homo sapiens
  misc_RNA (1)...(19): siRNA sense strand
ggaccugucugaugagaac

SEQ ID NO: 2195296 - RNA, 19 nt, Homo sapiens
  misc_RNA (1)...(19): siRNA sense strand
gaacuccaccuggcuuauu

SEQ ID NO: 2195297 - RNA, 19 nt, Homo sapiens
  misc_RNA (1)...(19): siRNA sense strand
gcaccgacuugggcuggua

SEQ ID NO: 2195298 - RNA, 19 nt, Homo sapiens
  misc_RNA (1)...(19): siRNA sense strand
gagcaggaccggacaaucu

SEQ ID NO: 2195299 - RNA, 19 nt, Homo sapiens
  misc_RNA (1)...(19): siRNA sense strand
ccuaauuacugcuccuuug

SEQ ID NO: 2195300 - RNA, 19 nt, Homo sapiens
  misc_RNA (1)...(19): siRNA sense strand
ccacuuugccuucuuugaa

SEQ ID NO: 2195301 - RNA, 19 nt, Homo sapiens
  misc_RNA (1)...(19): siRNA sense strand
ccauggcgcuggacgaugu

SEQ ID NO: 2195302 - RNA, 19 nt, Homo sapiens
  misc_RNA (1)...(19): siRNA sense strand
agaggucuccuguaacuuu

SEQ ID NO: 2195303 - RNA, 19 nt, Homo sapiens
  misc_RNA (1)...(19): siRNA sense strand
ccacgcagaugggcgaaga

SEQ ID NO: 2195304 - RNA, 19 nt, Homo sapiens
  misc_RNA (1)...(19): siRNA sense strand
ggcgcuggcugcagaagaa

SEQ ID NO: 2195305 - RNA, 19 nt, Homo sapiens
  misc_RNA (1)...(19): siRNA sense strand
gcucgcuggucuucuauca

SEQ ID NO: 2195306 - RNA, 19 nt, Homo sapiens
  misc_RNA (1)...(19): siRNA sense strand
gcagugcccuccuauugcu

SEQ ID NO: 2195307 - RNA, 19 nt, Homo sapiens
  misc_RNA (1)...(19): siRNA sense strand
cacuuugccuucuuugaaa

SEQ ID NO: 2195308 - RNA, 19 nt, Homo sapiens
  misc_RNA (1)...(19): siRNA sense strand
gaggucuccuguaacuuug

SEQ ID NO: 2195309 - RNA, 19 nt, Homo sapiens
  misc_RNA (1)...(19): siRNA sense strand
ccuggagggugguguuuga

SEQ ID NO: 2195310 - RNA, 19 nt, Homo sapiens
  misc_RNA (1)...(19): siRNA sense strand
uagaugaccuagaguucug

SEQ ID NO: 2195311 - RNA, 19 nt, Homo sapiens
  misc_RNA (1)...(19): siRNA sense strand
ggaguuccagaucguguuu

SEQ ID NO: 2195312 - RNA, 19 nt, Homo sapiens
  misc_RNA (1)...(19): siRNA sense strand
ccaaggaguuccagaucgu

SEQ ID NO: 2195313 - RNA, 19 nt, Homo sapiens
  misc_RNA (1)...(19): siRNA sense strand
gcacagaggcaggccacuu

SEQ ID NO: 2195314 - RNA, 19 nt, Homo sapiens
  misc_RNA (1)...(19): siRNA sense strand
ggcuggaguuugucgguuu

SEQ ID NO: 2195315 - RNA, 19 nt, Homo sapiens
  misc_RNA (1)...(19): siRNA sense strand
aacuccaccuggcuuauua

SEQ ID NO: 2195316 - RNA, 19 nt, Homo sapiens
  misc_RNA (1)...(19): siRNA sense strand
gaugaggcccagugugguu

SEQ ID NO: 2195317 - RNA, 19 nt, Homo sapiens
  misc_RNA (1)...(19): siRNA sense strand
cuacguggcucuggaugau

SEQ ID NO: 2195318 - RNA, 19 nt, Homo sapiens
  misc_RNA (1)...(19): siRNA sense strand
gcaagcugaggcucuggua

SEQ ID NO: 2195319 - RNA, 19 nt, Homo sapiens
  misc_RNA (1)...(19): siRNA sense strand
gggcaucagucaugaaaau

SEQ ID NO: 2195320 - RNA, 19 nt, Homo sapiens
  misc_RNA (1)...(19): siRNA sense strand
cggaacaacugugugacuu

SEQ ID NO: 2195321 - RNA, 19 nt, Homo sapiens
  misc_RNA (1)...(19): siRNA sense strand
gcggggaccugucugauga

SEQ ID NO: 2195322 - RNA, 19 nt, Homo sapiens
  misc_RNA (1)...(19): siRNA sense strand
uggaugacguggaguaucu

SEQ ID NO: 2195323 - RNA, 19 nt, Homo sapiens
  misc_RNA (1)...(19): siRNA sense strand
cacagaggcaggccacuuu

SEQ ID NO: 2195324 - RNA, 19 nt, Homo sapiens
  misc_RNA (1)...(19): siRNA sense strand
ggaacaacugugugacuuc

SEQ ID NO: 2195325 - RNA, 19 nt, Homo sapiens
  misc_RNA (1)...(19): siRNA sense strand
agaaagcagcgcccaguga

SEQ ID NO: 2195326 - RNA, 19 nt, Homo sapiens
  misc_RNA (1)...(19): siRNA sense strand
gcgcuguggcucuagauga

SEQ ID NO: 2195327 - RNA, 19 nt, Homo sapiens
  misc_RNA (1)...(19): siRNA sense strand
gcuggaguuugucgguuug

SEQ ID NO: 2195328 - RNA, 19 nt, Homo sapiens
  misc_RNA (1)...(19): siRNA sense strand
ucgcuggucuucuaucagu

SEQ ID NO: 2195329 - RNA, 19 nt, Homo sapiens
  misc_RNA (1)...(19): siRNA sense strand
cuaauuacugcuccuuuga

SEQ ID NO: 2195330 - RNA, 19 nt, Homo sapiens
  misc_RNA (1)...(19): siRNA sense strand
caccaccacugccagaaca

SEQ ID NO: 2195331 - RNA, 19 nt, Homo sapiens
  misc_RNA (1)...(19): siRNA sense strand
gcagugcaggcaucuggaa

SEQ ID NO: 2195332 - RNA, 19 nt, Homo sapiens
  misc_RNA (1)...(19): siRNA sense strand
gaacccaccgagggaaaga

SEQ ID NO: 2195333 - RNA, 19 nt, Homo sapiens
  misc_RNA (1)...(19): siRNA sense strand
ucagagcugcaucaaagaa

SEQ ID NO: 2195334 - RNA, 19 nt, Homo sapiens
  misc_RNA (1)...(19): siRNA sense strand
guacccaggccaccucuca

SEQ ID NO: 2195335 - RNA, 19 nt, Homo sapiens
  misc_RNA (1)...(19): siRNA sense strand
ucuggaagguggacaaggu

SEQ ID NO: 2195336 - RNA, 19 nt, Homo sapiens
  misc_RNA (1)...(19): siRNA sense strand
caacugcucgcuggucuuc

SEQ ID NO: 2195337 - RNA, 19 nt, Homo sapiens
  misc_RNA (1)...(19): siRNA sense strand
ugacaccgcuccucuuccu

SEQ ID NO: 2195338 - RNA, 19 nt, Homo sapiens
  misc_RNA (1)...(19): siRNA sense strand
gcugaccagugcccaccaa

SEQ ID NO: 2195339 - RNA, 19 nt, Homo sapiens
  misc_RNA (1)...(19): siRNA sense strand
acugcucgcuggucuucua

SEQ ID NO: 2195340 - RNA, 19 nt, Homo sapiens
  misc_RNA (1)...(19): siRNA sense strand
gacaacauccuuuucaaug

SEQ ID NO: 2195341 - RNA, 19 nt, Homo sapiens
  misc_RNA (1)...(19): siRNA sense strand
uggcaggaguuggcaguga

SEQ ID NO: 2195342 - RNA, 19 nt, Homo sapiens
  misc_RNA (1)...(19): siRNA sense strand
gugaacuccaccuggcuua

SEQ ID NO: 2195343 - RNA, 19 nt, Homo sapiens
  misc_RNA (1)...(19): siRNA sense strand
cagagcugcaucaaagaaa

SEQ ID NO: 2195344 - RNA, 19 nt, Homo sapiens
  misc_RNA (1)...(19): siRNA sense strand
cgacuugggcugguacaug

SEQ ID NO: 2195345 - RNA, 19 nt, Homo sapiens
  misc_RNA (1)...(19): siRNA sense strand
ccacggagugucucagcuu

SEQ ID NO: 2195346 - RNA, 19 nt, Homo sapiens
  misc_RNA (1)...(19): siRNA sense strand
ccgagaccguguugacauc

SEQ ID NO: 2195347 - RNA, 19 nt, Homo sapiens
  misc_RNA (1)...(19): siRNA sense strand
guccugggccucacucaga

SEQ ID NO: 2195348 - RNA, 19 nt, Homo sapiens
  misc_RNA (1)...(19): siRNA sense strand
cacaagcccagacgcacua

SEQ ID NO: 2195349 - RNA, 19 nt, Homo sapiens
  misc_RNA (1)...(19): siRNA sense strand
ccaccgagagagacagaga

SEQ ID NO: 2195350 - RNA, 19 nt, Homo sapiens
  misc_RNA (1)...(19): siRNA sense strand
gaugggcgaagaggaaaug

SEQ ID NO: 2195351 - RNA, 19 nt, Homo sapiens
  misc_RNA (1)...(19): siRNA sense strand
ucugguaccacauggguuu

SEQ ID NO: 2195352 - RNA, 19 nt, Homo sapiens
  misc_RNA (1)...(19): siRNA sense strand
ccgccacacuccgcaaguu

SEQ ID NO: 2195353 - RNA, 19 nt, Homo sapiens
  misc_RNA (1)...(19): siRNA sense strand
ugugcaacuucguguguga

SEQ ID NO: 2195354 - RNA, 19 nt, Homo sapiens
  misc_RNA (1)...(19): siRNA sense strand
acauagccaccgacuuuga

SEQ ID NO: 2195355 - RNA, 19 nt, Homo sapiens
  misc_RNA (1)...(19): siRNA sense strand
cugcuugucugaccuucug

SEQ ID NO: 2195356 - RNA, 19 nt, Homo sapiens
  misc_RNA (1)...(19): siRNA sense strand
gugcaggcaucuggaaggu

SEQ ID NO: 2195357 - RNA, 19 nt, Homo sapiens
  misc_RNA (1)...(19): siRNA sense strand
gagcaucccugacgcuuuc

SEQ ID NO: 2195358 - RNA, 19 nt, Homo sapiens
  misc_RNA (1)...(19): siRNA sense strand
ccucggcacuggccuuuga

SEQ ID NO: 2195359 - RNA, 19 nt, Homo sapiens
  misc_RNA (1)...(19): siRNA sense strand
ccaggagagucgcucauca

SEQ ID NO: 2195360 - RNA, 19 nt, Homo sapiens
  misc_RNA (1)...(19): siRNA sense strand
gcgacuggcagcugcagaa

SEQ ID NO: 2195361 - RNA, 19 nt, Homo sapiens
  misc_RNA (1)...(19): siRNA sense strand
ggcguggacuucgaugaga

SEQ ID NO: 2195362 - RNA, 19 nt, Homo sapiens
  misc_RNA (1)...(19): siRNA sense strand
caggagagucgcucaucaa

SEQ ID NO: 2195363 - RNA, 19 nt, Homo sapiens
  misc_RNA (1)...(19): siRNA sense strand
ggccucagcucuucuuacc

SEQ ID NO: 2195364 - RNA, 19 nt, Homo sapiens
  misc_RNA (1)...(19): siRNA sense strand
gagugcggcugaggacauc

SEQ ID NO: 2195365 - RNA, 19 nt, Homo sapiens
  misc_RNA (1)...(19): siRNA sense strand
acuggcagcugcagaagag

SEQ ID NO: 2195366 - RNA, 19 nt, Homo sapiens
  misc_RNA (1)...(19): siRNA sense strand
ggauaaagauggagaaguu

SEQ ID NO: 2195367 - RNA, 19 nt, Homo sapiens
  misc_RNA (1)...(19): siRNA sense strand
gaacuuugcugccuuggaa

SEQ ID NO: 2195368 - RNA, 19 nt, Homo sapiens
  misc_RNA (1)...(19): siRNA sense strand
ugaagaaggucccguaugu

SEQ ID NO: 2195369 - RNA, 19 nt, Homo sapiens
  misc_RNA (1)...(19): siRNA sense strand
gaagguuuccgucagauuu

SEQ ID NO: 2195370 - RNA, 19 nt, Homo sapiens
  misc_RNA (1)...(19): siRNA sense strand
ccagggaguuugagccuuu

SEQ ID NO: 2195371 - RNA, 19 nt, Homo sapiens
  misc_RNA (1)...(19): siRNA sense strand
uggagaaguuuguguuuga

SEQ ID NO: 2195372 - RNA, 19 nt, Homo sapiens
  misc_RNA (1)...(19): siRNA sense strand
ggagaggguuuagaagugu

SEQ ID NO: 2195373 - RNA, 19 nt, Homo sapiens
  misc_RNA (1)...(19): siRNA sense strand
ccaacguggucauguuuga

SEQ ID NO: 2195374 - RNA, 19 nt, Homo sapiens
  misc_RNA (1)...(19): siRNA sense strand
gagaggguuuagaagugua

SEQ ID NO: 2195375 - RNA, 19 nt, Homo sapiens
  misc_RNA (1)...(19): siRNA sense strand
aaaccgaacgggauaaaga

SEQ ID NO: 2195376 - RNA, 19 nt, Homo sapiens
  misc_RNA (1)...(19): siRNA sense strand
gauggagaaguuuguguuu

SEQ ID NO: 2195377 - RNA, 19 nt, Homo sapiens
  misc_RNA (1)...(19): siRNA sense strand
uaucgcccuuggugucuua

SEQ ID NO: 2195378 - RNA, 19 nt, Homo sapiens
  misc_RNA (1)...(19): siRNA sense strand
caacaucugcaaccacuuc

SEQ ID NO: 2195379 - RNA, 19 nt, Homo sapiens
  misc_RNA (1)...(19): siRNA sense strand
ggagaaguuuguguuugau

SEQ ID NO: 2195380 - RNA, 19 nt, Homo sapiens
  misc_RNA (1)...(19): siRNA sense strand
gaaggucccguauguggau

SEQ ID NO: 2195381 - RNA, 19 nt, Homo sapiens
  misc_RNA (1)...(19): siRNA sense strand
gagcggaaagacaaaguug

SEQ ID NO: 2195382 - RNA, 19 nt, Homo sapiens
  misc_RNA (1)...(19): siRNA sense strand
gauaaagauggagaaguuu

SEQ ID NO: 2195383 - RNA, 19 nt, Homo sapiens
  misc_RNA (1)...(19): siRNA sense strand
guacaaugcaggcaacauc

SEQ ID NO: 2195384 - RNA, 19 nt, Homo sapiens
  misc_RNA (1)...(19): siRNA sense strand
uggagaggguuuagaagug

SEQ ID NO: 2195385 - RNA, 19 nt, Homo sapiens
  misc_RNA (1)...(19): siRNA sense strand
cgaacgggauaaagaugga

SEQ ID NO: 2195386 - RNA, 19 nt, Homo sapiens
  misc_RNA (1)...(19): siRNA sense strand
agaaguuuguguuugaugu

SEQ ID NO: 2195387 - RNA, 19 nt, Homo sapiens
  misc_RNA (1)...(19): siRNA sense strand
gcugggaggaggaagguuu

SEQ ID NO: 2195388 - RNA, 19 nt, Homo sapiens
  misc_RNA (1)...(19): siRNA sense strand
gauguguuccgguuugcua

SEQ ID NO: 2195389 - RNA, 19 nt, Homo sapiens
  misc_RNA (1)...(19): siRNA sense strand
acacguggcugugaagaag

SEQ ID NO: 2195390 - RNA, 19 nt, Homo sapiens
  misc_RNA (1)...(19): siRNA sense strand
gaagaaggucccguaugug

SEQ ID NO: 2195391 - RNA, 19 nt, Homo sapiens
  misc_RNA (1)...(19): siRNA sense strand
ucagggagcacaacuucuu

SEQ ID NO: 2195392 - RNA, 19 nt, Homo sapiens
  misc_RNA (1)...(19): siRNA sense strand
ggagccugcuguacaaugc

SEQ ID NO: 2195393 - RNA, 19 nt, Homo sapiens
  misc_RNA (1)...(19): siRNA sense strand
gcgccaaggugguggaaaa

SEQ ID NO: 2195394 - RNA, 19 nt, Homo sapiens
  misc_RNA (1)...(19): siRNA sense strand
agauuucucugaacaaggu

SEQ ID NO: 2195395 - RNA, 19 nt, Homo sapiens
  misc_RNA (1)...(19): siRNA sense strand
ccgccaacguggucauguu

SEQ ID NO: 2195396 - RNA, 19 nt, Homo sapiens
  misc_RNA (1)...(19): siRNA sense strand
gaaguuuguguuugaugug

SEQ ID NO: 2195397 - RNA, 19 nt, Homo sapiens
  misc_RNA (1)...(19): siRNA sense strand
uaaagauggagaaguuugu

SEQ ID NO: 2195398 - RNA, 19 nt, Homo sapiens
  misc_RNA (1)...(19): siRNA sense strand
ggagcggaaagacaaaguu

SEQ ID NO: 2195399 - RNA, 19 nt, Homo sapiens
  misc_RNA (1)...(19): siRNA sense strand
ggcggacccugucuucauc

SEQ ID NO: 2195400 - RNA, 19 nt, Homo sapiens
  misc_RNA (1)...(19): siRNA sense strand
ccgguuugcuaagaacuuu

SEQ ID NO: 2195401 - RNA, 19 nt, Homo sapiens
  misc_RNA (1)...(19): siRNA sense strand
gacgggagccugcuguaca

SEQ ID NO: 2195402 - RNA, 19 nt, Homo sapiens
  misc_RNA (1)...(19): siRNA sense strand
caucugcaaccacuucuuc

SEQ ID NO: 2195403 - RNA, 19 nt, Homo sapiens
  misc_RNA (1)...(19): siRNA sense strand
gagaaguuuguguuugaug

SEQ ID NO: 2195404 - RNA, 19 nt, Homo sapiens
  misc_RNA (1)...(19): siRNA sense strand
gcuaaaaccgaacgggaua

SEQ ID NO: 2195405 - RNA, 19 nt, Homo sapiens
  misc_RNA (1)...(19): siRNA sense strand
ugccugcugugaccuuuga

SEQ ID NO: 2195406 - RNA, 19 nt, Homo sapiens
  misc_RNA (1)...(19): siRNA sense strand
uggaguuugugcacgugua

SEQ ID NO: 2195407 - RNA, 19 nt, Homo sapiens
  misc_RNA (1)...(19): siRNA sense strand
uuugauguguuccgguuug

SEQ ID NO: 2195408 - RNA, 19 nt, Homo sapiens
  misc_RNA (1)...(19): siRNA sense strand
gagcaccuccugcgcuucu

SEQ ID NO: 2195409 - RNA, 19 nt, Homo sapiens
  misc_RNA (1)...(19): siRNA sense strand
gugaagaaggucccguaug

SEQ ID NO: 2195410 - RNA, 19 nt, Homo sapiens
  misc_RNA (1)...(19): siRNA sense strand
gcuggaggaccacaagauc

SEQ ID NO: 2195411 - RNA, 19 nt, Homo sapiens
  misc_RNA (1)...(19): siRNA sense strand
auaaagauggagaaguuug

SEQ ID NO: 2195412 - RNA, 19 nt, Homo sapiens
  misc_RNA (1)...(19): siRNA sense strand
cgucaugaccagcgaguuc

SEQ ID NO: 2195413 - RNA, 19 nt, Homo sapiens
  misc_RNA (1)...(19): siRNA sense strand
acgggagccugcuguacaa

SEQ ID NO: 2195414 - RNA, 19 nt, Homo sapiens
  misc_RNA (1)...(19): siRNA sense strand
caucggcuucuguguguug

SEQ ID NO: 2195415 - RNA, 19 nt, Homo sapiens
  misc_RNA (1)...(19): siRNA sense strand
guuuguguuugauguguuc

SEQ ID NO: 2195416 - RNA, 19 nt, Homo sapiens
  misc_RNA (1)...(19): siRNA sense strand
gcugccugcugugaccuuu

SEQ ID NO: 2195417 - RNA, 19 nt, Homo sapiens
  misc_RNA (1)...(19): siRNA sense strand
uggaauaccugcaccauuu

SEQ ID NO: 2195418 - RNA, 19 nt, Homo sapiens
  misc_RNA (1)...(19): siRNA sense strand
gcacaucaccuucuugaga

SEQ ID NO: 2195419 - RNA, 19 nt, Homo sapiens
  misc_RNA (1)...(19): siRNA sense strand
gagagcccauggagaagua

SEQ ID NO: 2195420 - RNA, 19 nt, Homo sapiens
  misc_RNA (1)...(19): siRNA sense strand
caaagucaagcaugugaua

SEQ ID NO: 2195421 - RNA, 19 nt, Homo sapiens
  misc_RNA (1)...(19): siRNA sense strand
ccaaugugcuaaugacaga

SEQ ID NO: 2195422 - RNA, 19 nt, Homo sapiens
  misc_RNA (1)...(19): siRNA sense strand
gaaauggaaaccaaaguca

SEQ ID NO: 2195423 - RNA, 19 nt, Homo sapiens
  misc_RNA (1)...(19): siRNA sense strand
guggaaaccuucaggaauc

SEQ ID NO: 2195424 - RNA, 19 nt, Homo sapiens
  misc_RNA (1)...(19): siRNA sense strand
gacaaagccaaauggaaua

SEQ ID NO: 2195425 - RNA, 19 nt, Homo sapiens
  misc_RNA (1)...(19): siRNA sense strand
gcacagaagccaugcaucu

SEQ ID NO: 2195426 - RNA, 19 nt, Homo sapiens
  misc_RNA (1)...(19): siRNA sense strand
aaaccaaagucaagcaugu

SEQ ID NO: 2195427 - RNA, 19 nt, Homo sapiens
  misc_RNA (1)...(19): siRNA sense strand
ugaagacaauggaggagaa

SEQ ID NO: 2195428 - RNA, 19 nt, Homo sapiens
  misc_RNA (1)...(19): siRNA sense strand
uaaagcagguggaaugcau

SEQ ID NO: 2195429 - RNA, 19 nt, Homo sapiens
  misc_RNA (1)...(19): siRNA sense strand
ggaccugaguuccaaugug

SEQ ID NO: 2195430 - RNA, 19 nt, Homo sapiens
  misc_RNA (1)...(19): siRNA sense strand
uaaaggacguggugcacau

SEQ ID NO: 2195431 - RNA, 19 nt, Homo sapiens
  misc_RNA (1)...(19): siRNA sense strand
cagcagcgccuucagcaaa

SEQ ID NO: 2195432 - RNA, 19 nt, Homo sapiens
  misc_RNA (1)...(19): siRNA sense strand
ggaaucuucugcccuugau

SEQ ID NO: 2195433 - RNA, 19 nt, Homo sapiens
  misc_RNA (1)...(19): siRNA sense strand
ucaccgacaugcuguuaga

SEQ ID NO: 2195434 - RNA, 19 nt, Homo sapiens
  misc_RNA (1)...(19): siRNA sense strand
agacaaagccaaauggaau

SEQ ID NO: 2195435 - RNA, 19 nt, Homo sapiens
  misc_RNA (1)...(19): siRNA sense strand
caacguggccagcauuuua

SEQ ID NO: 2195436 - RNA, 19 nt, Homo sapiens
  misc_RNA (1)...(19): siRNA sense strand
aaagccaaauggaauauuc

SEQ ID NO: 2195437 - RNA, 19 nt, Homo sapiens
  misc_RNA (1)...(19): siRNA sense strand
ucaagcaugugauaaagca

SEQ ID NO: 2195438 - RNA, 19 nt, Homo sapiens
  misc_RNA (1)...(19): siRNA sense strand
ggaaauggaaaccaaaguc

SEQ ID NO: 2195439 - RNA, 19 nt, Homo sapiens
  misc_RNA (1)...(19): siRNA sense strand
gaagccagcugcggagucu

SEQ ID NO: 2195440 - RNA, 19 nt, Homo sapiens
  misc_RNA (1)...(19): siRNA sense strand
gaagaccccuuucguaagu

SEQ ID NO: 2195441 - RNA, 19 nt, Homo sapiens
  misc_RNA (1)...(19): siRNA sense strand
gauaagaggaaggcaaaga

SEQ ID NO: 2195442 - RNA, 19 nt, Homo sapiens
  misc_RNA (1)...(19): siRNA sense strand
cuucauggauggcacagaa

SEQ ID NO: 2195443 - RNA, 19 nt, Homo sapiens
  misc_RNA (1)...(19): siRNA sense strand
gagcagcaguuugaacaag

SEQ ID NO: 2195444 - RNA, 19 nt, Homo sapiens
  misc_RNA (1)...(19): siRNA sense strand
uagaggucaugcagaaauu

SEQ ID NO: 2195445 - RNA, 19 nt, Homo sapiens
  misc_RNA (1)...(19): siRNA sense strand
ugauaaagcagguggaaug

SEQ ID NO: 2195446 - RNA, 19 nt, Homo sapiens
  misc_RNA (1)...(19): siRNA sense strand
gcagcaguuugaacaagug

SEQ ID NO: 2195447 - RNA, 19 nt, Homo sapiens
  misc_RNA (1)...(19): siRNA sense strand
gaaaaugccugcagaucag

SEQ ID NO: 2195448 - RNA, 19 nt, Homo sapiens
  misc_RNA (1)...(19): siRNA sense strand
gaauauucgugcggaggaa

SEQ ID NO: 2195449 - RNA, 19 nt, Homo sapiens
  misc_RNA (1)...(19): siRNA sense strand
uaagaggaaggcaaagaaa

SEQ ID NO: 2195450 - RNA, 19 nt, Homo sapiens
  misc_RNA (1)...(19): siRNA sense strand
ccaccuggcuuccuaugag

SEQ ID NO: 2195451 - RNA, 19 nt, Homo sapiens
  misc_RNA (1)...(19): siRNA sense strand
gagcccugcuggugaacaa

SEQ ID NO: 2195452 - RNA, 19 nt, Homo sapiens
  misc_RNA (1)...(19): siRNA sense strand
gaggaggagccacuucuug

SEQ ID NO: 2195453 - RNA, 19 nt, Homo sapiens
  misc_RNA (1)...(19): siRNA sense strand
gcccucaacuucuccuuca

SEQ ID NO: 2195454 - RNA, 19 nt, Homo sapiens
  misc_RNA (1)...(19): siRNA sense strand
ccacaacccaggagucaga

SEQ ID NO: 2195455 - RNA, 19 nt, Homo sapiens
  misc_RNA (1)...(19): siRNA sense strand
acagagcccugcuggugaa

SEQ ID NO: 2195456 - RNA, 19 nt, Homo sapiens
  misc_RNA (1)...(19): siRNA sense strand
ccggagagcccauggagaa

SEQ ID NO: 2195457 - RNA, 19 nt, Homo sapiens
  misc_RNA (1)...(19): siRNA sense strand
ggagucagagucacuguca

SEQ ID NO: 2195458 - RNA, 19 nt, Homo sapiens
  misc_RNA (1)...(19): siRNA sense strand
ggagccacuucuugucaug

SEQ ID NO: 2195459 - RNA, 19 nt, Homo sapiens
  misc_RNA (1)...(19): siRNA sense strand
ggaggaaauggaaaccaaa

SEQ ID NO: 2195460 - RNA, 19 nt, Homo sapiens
  misc_RNA (1)...(19): siRNA sense strand
ggacaucauccacaggaau

SEQ ID NO: 2195461 - RNA, 19 nt, Homo sapiens
  misc_RNA (1)...(19): siRNA sense strand
ggaauaccugcaccauuug

SEQ ID NO: 2195462 - RNA, 19 nt, Homo sapiens
  misc_RNA (1)...(19): siRNA sense strand
cugaguggaugcagaaugu

SEQ ID NO: 2195463 - RNA, 19 nt, Homo sapiens
  misc_RNA (1)...(19): siRNA sense strand
ugacagacaaagccaaaug

SEQ ID NO: 2195464 - RNA, 19 nt, Homo sapiens
  misc_RNA (1)...(19): siRNA sense strand
uggaggaaauggaaaccaa

SEQ ID NO: 2195465 - RNA, 19 nt, Homo sapiens
  misc_RNA (1)...(19): siRNA sense strand
gaggagccacuucuuguca

SEQ ID NO: 2195466 - RNA, 19 nt, Homo sapiens
  misc_RNA (1)...(19): siRNA sense strand
cucaaacccuccaacauca

SEQ ID NO: 2195467 - RNA, 19 nt, Homo sapiens
  misc_RNA (1)...(19): siRNA sense strand
caucaaggagcagcaguuu

SEQ ID NO: 2195468 - RNA, 19 nt, Homo sapiens
  misc_RNA (1)...(19): siRNA sense strand
ucccugggcugcaucauuc

SEQ ID NO: 2195469 - RNA, 19 nt, Homo sapiens
  misc_RNA (1)...(19): siRNA sense strand
ucucaaacccuccaacauc

SEQ ID NO: 2195470 - RNA, 19 nt, Homo sapiens
  misc_RNA (1)...(19): siRNA sense strand
gcuggacgguaucauugug

SEQ ID NO: 2195471 - RNA, 19 nt, Homo sapiens
  misc_RNA (1)...(19): siRNA sense strand
caucaccgacaugcuguua

SEQ ID NO: 2195472 - RNA, 19 nt, Homo sapiens
  misc_RNA (1)...(19): siRNA sense strand
gugcacaucaccuucuuga

SEQ ID NO: 2195473 - RNA, 19 nt, Homo sapiens
  misc_RNA (1)...(19): siRNA sense strand
gaccagcugcuccuucaug

SEQ ID NO: 2195474 - RNA, 19 nt, Homo sapiens
  misc_RNA (1)...(19): siRNA sense strand
gaaaccuucaggaaucuuc

SEQ ID NO: 2195475 - RNA, 19 nt, Homo sapiens
  misc_RNA (1)...(19): siRNA sense strand
cagacaaagccaaauggaa

SEQ ID NO: 2195476 - RNA, 19 nt, Homo sapiens
  misc_RNA (1)...(19): siRNA sense strand
gcaucaaggagcagcaguu

SEQ ID NO: 2195477 - RNA, 19 nt, Homo sapiens
  misc_RNA (1)...(19): siRNA sense strand
ccucaacagcucccucaaa

SEQ ID NO: 2195478 - RNA, 19 nt, Homo sapiens
  misc_RNA (1)...(19): siRNA sense strand
ucacgaccauggagcuaca

SEQ ID NO: 2195479 - RNA, 19 nt, Homo sapiens
  misc_RNA (1)...(19): siRNA sense strand
gcagguggaaugcauggau

SEQ ID NO: 2195480 - RNA, 19 nt, Homo sapiens
  misc_RNA (1)...(19): siRNA sense strand
gaggaagaccccuuucgua

SEQ ID NO: 2195481 - RNA, 19 nt, Homo sapiens
  misc_RNA (1)...(19): siRNA sense strand
aggaggucauugaggauaa

SEQ ID NO: 2195482 - RNA, 19 nt, Homo sapiens
  misc_RNA (1)...(19): siRNA sense strand
ggaggucauugaggauaag

SEQ ID NO: 2195483 - RNA, 19 nt, Homo sapiens
  misc_RNA (1)...(19): siRNA sense strand
ucauugaggauaagaggaa

SEQ ID NO: 2195484 - RNA, 19 nt, Homo sapiens
  misc_RNA (1)...(19): siRNA sense strand
gaguuccaaugugcuaaug

SEQ ID NO: 2195485 - RNA, 19 nt, Homo sapiens
  misc_RNA (1)...(19): siRNA sense strand
ugucagaggagcugcagaa

SEQ ID NO: 2195486 - RNA, 19 nt, Homo sapiens
  misc_RNA (1)...(19): siRNA sense strand
gaggaaauggaaaccaaag

SEQ ID NO: 2195487 - RNA, 19 nt, Homo sapiens
  misc_RNA (1)...(19): siRNA sense strand
gcaguggccucagccucau

SEQ ID NO: 2195488 - RNA, 19 nt, Homo sapiens
  misc_RNA (1)...(19): siRNA sense strand
ggaaaccaaagucaagcau

SEQ ID NO: 2195489 - RNA, 19 nt, Homo sapiens
  misc_RNA (1)...(19): siRNA sense strand
caauggaggagaagcagau

SEQ ID NO: 2195490 - RNA, 19 nt, Homo sapiens
  misc_RNA (1)...(19): siRNA sense strand
caggaggucauugaggaua

SEQ ID NO: 2195491 - RNA, 19 nt, Homo sapiens
  misc_RNA (1)...(19): siRNA sense strand
acccggaggugguggagaa

SEQ ID NO: 2195492 - RNA, 19 nt, Homo sapiens
  misc_RNA (1)...(19): siRNA sense strand
ggagcagcaguuugaacaa

SEQ ID NO: 2195493 - RNA, 19 nt, Homo sapiens
  misc_RNA (1)...(19): siRNA sense strand
ggaggagccacuucuuguc

SEQ ID NO: 2195494 - RNA, 19 nt, Homo sapiens
  misc_RNA (1)...(19): siRNA sense strand
ugaaggccguccugaagac

SEQ ID NO: 2195495 - RNA, 19 nt, Homo sapiens
  misc_RNA (1)...(19): siRNA sense strand
caaagccaaauggaauauu

SEQ ID NO: 2195496 - RNA, 19 nt, Homo sapiens
  misc_RNA (1)...(19): siRNA sense strand
gacaucauccacaggaauc

SEQ ID NO: 2195497 - RNA, 19 nt, Homo sapiens
  misc_RNA (1)...(19): siRNA sense strand
agaaaaucauugacucuga

SEQ ID NO: 2195498 - RNA, 19 nt, Homo sapiens
  misc_RNA (1)...(19): siRNA sense strand
auaagaggaaggcaaagaa

SEQ ID NO: 2195499 - RNA, 19 nt, Homo sapiens
  misc_RNA (1)...(19): siRNA sense strand
ggugguggaggaaauggaa

SEQ ID NO: 2195500 - RNA, 19 nt, Homo sapiens
  misc_RNA (1)...(19): siRNA sense strand
cagcugcuccuucauggau

SEQ ID NO: 2195501 - RNA, 19 nt, Homo sapiens
  misc_RNA (1)...(19): siRNA sense strand
ggagagcccauggagaagu

SEQ ID NO: 2195502 - RNA, 19 nt, Homo sapiens
  misc_RNA (1)...(19): siRNA sense strand
auggagaaguaccagguuu

SEQ ID NO: 2195503 - RNA, 19 nt, Homo sapiens
  misc_RNA (1)...(19): siRNA sense strand
aaagucaagcaugugauaa

SEQ ID NO: 2195504 - RNA, 19 nt, Homo sapiens
  misc_RNA (1)...(19): siRNA sense strand
cagcucagggccaugaaga

SEQ ID NO: 2195505 - RNA, 19 nt, Homo sapiens
  misc_RNA (1)...(19): siRNA sense strand
uuagaggucaugcagaaau

SEQ ID NO: 2195506 - RNA, 19 nt, Homo sapiens
  misc_RNA (1)...(19): siRNA sense strand
gaaccuggugguggaggaa

SEQ ID NO: 2195507 - RNA, 19 nt, Homo sapiens
  misc_RNA (1)...(19): siRNA sense strand
aagucaagcaugugauaaa

SEQ ID NO: 2195508 - RNA, 19 nt, Homo sapiens
  misc_RNA (1)...(19): siRNA sense strand
cucaacagcucccucaaaa

SEQ ID NO: 2195509 - RNA, 19 nt, Homo sapiens
  misc_RNA (1)...(19): siRNA sense strand
agaaguaccagguuuugua

SEQ ID NO: 2195510 - RNA, 19 nt, Homo sapiens
  misc_RNA (1)...(19): siRNA sense strand
ccaugcaucugcggaaguc

SEQ ID NO: 2195511 - RNA, 19 nt, Homo sapiens
  misc_RNA (1)...(19): siRNA sense strand
gcaaagaaaaucauugacu

SEQ ID NO: 2195512 - RNA, 19 nt, Homo sapiens
  misc_RNA (1)...(19): siRNA sense strand
gccucagccucaucaagga

SEQ ID NO: 2195513 - RNA, 19 nt, Homo sapiens
  misc_RNA (1)...(19): siRNA sense strand
ggcaacguggccagcauuu

SEQ ID NO: 2195514 - RNA, 19 nt, Homo sapiens
  misc_RNA (1)...(19): siRNA sense strand
ucccggauguggaaaccuu

SEQ ID NO: 2195515 - RNA, 19 nt, Homo sapiens
  misc_RNA (1)...(19): siRNA sense strand
guuccaaugugcuaaugac

SEQ ID NO: 2195516 - RNA, 19 nt, Homo sapiens
  misc_RNA (1)...(19): siRNA sense strand
agucaagcaugugauaaag

SEQ ID NO: 2195517 - RNA, 19 nt, Homo sapiens
  misc_RNA (1)...(19): siRNA sense strand
gaugccaggucccuaauca

SEQ ID NO: 2195518 - RNA, 19 nt, Homo sapiens
  misc_RNA (1)...(19): siRNA sense strand
gggaggugcuacacaaugu

SEQ ID NO: 2195519 - RNA, 19 nt, Homo sapiens
  misc_RNA (1)...(19): siRNA sense strand
gggaggccauguccaagug

SEQ ID NO: 2195520 - RNA, 19 nt, Homo sapiens
  misc_RNA (1)...(19): siRNA sense strand
ggacucagcccuggaccaa

SEQ ID NO: 2195521 - RNA, 19 nt, Homo sapiens
  misc_RNA (1)...(19): siRNA sense strand
ggagcaaguuggcaaacag

SEQ ID NO: 2195522 - RNA, 19 nt, Homo sapiens
  misc_RNA (1)...(19): siRNA sense strand
gaccaggagcgaaccauga

SEQ ID NO: 2195523 - RNA, 19 nt, Homo sapiens
  misc_RNA (1)...(19): siRNA sense strand
uaagggaggccauguccaa

SEQ ID NO: 2195524 - RNA, 19 nt, Homo sapiens
  misc_RNA (1)...(19): siRNA sense strand
ccaggucccuaaucaugga

SEQ ID NO: 2195525 - RNA, 19 nt, Homo sapiens
  misc_RNA (1)...(19): siRNA sense strand
ccugggaggugcuacacaa

SEQ ID NO: 2195526 - RNA, 19 nt, Homo sapiens
  misc_RNA (1)...(19): siRNA sense strand
gcacgucgacugccuacca

SEQ ID NO: 2195527 - RNA, 19 nt, Homo sapiens
  misc_RNA (1)...(19): siRNA sense strand
gcauggcgguuggcuucuu

SEQ ID NO: 2195528 - RNA, 19 nt, Homo sapiens
  misc_RNA (1)...(19): siRNA sense strand
caugaugccaggucccuaa

SEQ ID NO: 2195529 - RNA, 19 nt, Homo sapiens
  misc_RNA (1)...(19): siRNA sense strand
gcacuuggagcccguggau

SEQ ID NO: 2195530 - RNA, 19 nt, Homo sapiens
  misc_RNA (1)...(19): siRNA sense strand
cgguggacguccuguguga

SEQ ID NO: 2195531 - RNA, 19 nt, Homo sapiens
  misc_RNA (1)...(19): siRNA sense strand
ggacguccugugugaagug

SEQ ID NO: 2195532 - RNA, 19 nt, Homo sapiens
  misc_RNA (1)...(19): siRNA sense strand
acucagcccuggaccaagu

SEQ ID NO: 2195533 - RNA, 19 nt, Homo sapiens
  misc_RNA (1)...(19): siRNA sense strand
acuuggagcccguggauuu

SEQ ID NO: 2195534 - RNA, 19 nt, Homo sapiens
  misc_RNA (1)...(19): siRNA sense strand
gcgaggaguggccaacuuc

SEQ ID NO: 2195535 - RNA, 19 nt, Homo sapiens
  misc_RNA (1)...(19): siRNA sense strand
aggaggcucugucugacuu

SEQ ID NO: 2195536 - RNA, 19 nt, Homo sapiens
  misc_RNA (1)...(19): siRNA sense strand
uccaggaggcucugucuga

SEQ ID NO: 2195537 - RNA, 19 nt, Homo sapiens
  misc_RNA (1)...(19): siRNA sense strand
cauggcgguuggcuucuuc

SEQ ID NO: 2195538 - RNA, 19 nt, Homo sapiens
  misc_RNA (1)...(19): siRNA sense strand
gaacuucucuguaaucuga

SEQ ID NO: 2195539 - RNA, 19 nt, Homo sapiens
  misc_RNA (1)...(19): siRNA sense strand
ggaaguagcccaaguguuu

SEQ ID NO: 2195540 - RNA, 19 nt, Homo sapiens
  misc_RNA (1)...(19): siRNA sense strand
gagaaacagucuucaagua

SEQ ID NO: 2195541 - RNA, 19 nt, Homo sapiens
  misc_RNA (1)...(19): siRNA sense strand
uaacaaggaucauaagaga

SEQ ID NO: 2195542 - RNA, 19 nt, Homo sapiens
  misc_RNA (1)...(19): siRNA sense strand
guacacagcuguuacauac

SEQ ID NO: 2195543 - RNA, 19 nt, Homo sapiens
  misc_RNA (1)...(19): siRNA sense strand
gaagaagacccugcaguua

SEQ ID NO: 2195544 - RNA, 19 nt, Homo sapiens
  misc_RNA (1)...(19): siRNA sense strand
gaucagagccucauuagga

SEQ ID NO: 2195545 - RNA, 19 nt, Homo sapiens
  misc_RNA (1)...(19): siRNA sense strand
gaaacagucuucaaguaug

SEQ ID NO: 2195546 - RNA, 19 nt, Homo sapiens
  misc_RNA (1)...(19): siRNA sense strand
gcuguuacauaccauaaua

SEQ ID NO: 2195547 - RNA, 19 nt, Homo sapiens
  misc_RNA (1)...(19): siRNA sense strand
gaagagcaccagacuuuaa

SEQ ID NO: 2195548 - RNA, 19 nt, Homo sapiens
  misc_RNA (1)...(19): siRNA sense strand
ggacauaagggaguauuua

SEQ ID NO: 2195549 - RNA, 19 nt, Homo sapiens
  misc_RNA (1)...(19): siRNA sense strand
ugaauucucugaacuguga

SEQ ID NO: 2195550 - RNA, 19 nt, Homo sapiens
  misc_RNA (1)...(19): siRNA sense strand
ucacauacuuugagaagaa

SEQ ID NO: 2195551 - RNA, 19 nt, Homo sapiens
  misc_RNA (1)...(19): siRNA sense strand
gcaaggaccugagcaagga

SEQ ID NO: 2195552 - RNA, 19 nt, Homo sapiens
  misc_RNA (1)...(19): siRNA sense strand
gggaagagcaccagacuuu

SEQ ID NO: 2195553 - RNA, 19 nt, Homo sapiens
  misc_RNA (1)...(19): siRNA sense strand
gaauagugcugucuuccuu

SEQ ID NO: 2195554 - RNA, 19 nt, Homo sapiens
  misc_RNA (1)...(19): siRNA sense strand
gcucggcucuggacuguaa

SEQ ID NO: 2195555 - RNA, 19 nt, Homo sapiens
  misc_RNA (1)...(19): siRNA sense strand
caacgcagcucaacaggau

SEQ ID NO: 2195556 - RNA, 19 nt, Homo sapiens
  misc_RNA (1)...(19): siRNA sense strand
gaucucauguacagaauug

SEQ ID NO: 2195557 - RNA, 19 nt, Homo sapiens
  misc_RNA (1)...(19): siRNA sense strand
gaauauuucuuccaaugug

SEQ ID NO: 2195558 - RNA, 19 nt, Homo sapiens
  misc_RNA (1)...(19): siRNA sense strand
uggaggaacuucucuguaa

SEQ ID NO: 2195559 - RNA, 19 nt, Homo sapiens
  misc_RNA (1)...(19): siRNA sense strand
ccgcuaagcucacaguaaa

SEQ ID NO: 2195560 - RNA, 19 nt, Homo sapiens
  misc_RNA (1)...(19): siRNA sense strand
gaagaucgccagcauguuc

SEQ ID NO: 2195561 - RNA, 19 nt, Homo sapiens
  misc_RNA (1)...(19): siRNA sense strand
gaagagcaccugagaagau

SEQ ID NO: 2195562 - RNA, 19 nt, Homo sapiens
  misc_RNA (1)...(19): siRNA sense strand
gagaaagucccauuacaga

SEQ ID NO: 2195563 - RNA, 19 nt, Homo sapiens
  misc_RNA (1)...(19): siRNA sense strand
gcaguuagcaguugccauu

SEQ ID NO: 2195564 - RNA, 19 nt, Homo sapiens
  misc_RNA (1)...(19): siRNA sense strand
gcaccagacuuuaaugaag

SEQ ID NO: 2195565 - RNA, 19 nt, Homo sapiens
  misc_RNA (1)...(19): siRNA sense strand
gaaagucccauuacagaau

SEQ ID NO: 2195566 - RNA, 19 nt, Homo sapiens
  misc_RNA (1)...(19): siRNA sense strand
ggucaucgcuggccagaca

SEQ ID NO: 2195567 - RNA, 19 nt, Homo sapiens
  misc_RNA (1)...(19): siRNA sense strand
ggaaggaaucagcaaagua

SEQ ID NO: 2195568 - RNA, 19 nt, Homo sapiens
  misc_RNA (1)...(19): siRNA sense strand
agaaagagcagacacauug

SEQ ID NO: 2195569 - RNA, 19 nt, Homo sapiens
  misc_RNA (1)...(19): siRNA sense strand
gaaaacaaguggaauagug

SEQ ID NO: 2195570 - RNA, 19 nt, Homo sapiens
  misc_RNA (1)...(19): siRNA sense strand
gcaauucacagccugcuaa

SEQ ID NO: 2195571 - RNA, 19 nt, Homo sapiens
  misc_RNA (1)...(19): siRNA sense strand
gagauguggugaagcugua

SEQ ID NO: 2195572 - RNA, 19 nt, Homo sapiens
  misc_RNA (1)...(19): siRNA sense strand
guacagaauugccaagagu

SEQ ID NO: 2195573 - RNA, 19 nt, Homo sapiens
  misc_RNA (1)...(19): siRNA sense strand
aaacaaaggccgaguuaga

SEQ ID NO: 2195574 - RNA, 19 nt, Homo sapiens
  misc_RNA (1)...(19): siRNA sense strand
uggaaacucuccugggaua

SEQ ID NO: 2195575 - RNA, 19 nt, Homo sapiens
  misc_RNA (1)...(19): siRNA sense strand
gaacaggaguuugucuaca

SEQ ID NO: 2195576 - RNA, 19 nt, Homo sapiens
  misc_RNA (1)...(19): siRNA sense strand
gagcauuaccucaaucuga

SEQ ID NO: 2195577 - RNA, 19 nt, Homo sapiens
  misc_RNA (1)...(19): siRNA sense strand
aaguugagguuaugcuuua

SEQ ID NO: 2195578 - RNA, 19 nt, Homo sapiens
  misc_RNA (1)...(19): siRNA sense strand
ugaaagacagggucacaua

SEQ ID NO: 2195579 - RNA, 19 nt, Homo sapiens
  misc_RNA (1)...(19): siRNA sense strand
gaucauaagagaauguuug

SEQ ID NO: 2195580 - RNA, 19 nt, Homo sapiens
  misc_RNA (1)...(19): siRNA sense strand
ccaauucucuuaaaugaac

SEQ ID NO: 2195581 - RNA, 19 nt, Homo sapiens
  misc_RNA (1)...(19): siRNA sense strand
gauugaaguugccauugaa

SEQ ID NO: 2195582 - RNA, 19 nt, Homo sapiens
  misc_RNA (1)...(19): siRNA sense strand
ccaugucccuggcaucuuu

SEQ ID NO: 2195583 - RNA, 19 nt, Homo sapiens
  misc_RNA (1)...(19): siRNA sense strand
cuaaugagaagcuagauaa

SEQ ID NO: 2195584 - RNA, 19 nt, Homo sapiens
  misc_RNA (1)...(19): siRNA sense strand
gaaggagccggugccauua

SEQ ID NO: 2195585 - RNA, 19 nt, Homo sapiens
  misc_RNA (1)...(19): siRNA sense strand
uuacagaauccucccauua

SEQ ID NO: 2195586 - RNA, 19 nt, Homo sapiens
  misc_RNA (1)...(19): siRNA sense strand
caaagaugcuucagauggu

SEQ ID NO: 2195587 - RNA, 19 nt, Homo sapiens
  misc_RNA (1)...(19): siRNA sense strand
cgauugaaguugccauuga

SEQ ID NO: 2195588 - RNA, 19 nt, Homo sapiens
  misc_RNA (1)...(19): siRNA sense strand
caaguuggauccuaacaag

SEQ ID NO: 2195589 - RNA, 19 nt, Homo sapiens
  misc_RNA (1)...(19): siRNA sense strand
gaaggaaucagcaaaguac

SEQ ID NO: 2195590 - RNA, 19 nt, Homo sapiens
  misc_RNA (1)...(19): siRNA sense strand
agugucagcuuccagaaua

SEQ ID NO: 2195591 - RNA, 19 nt, Homo sapiens
  misc_RNA (1)...(19): siRNA sense strand
gcaagcuguuucuucugua

SEQ ID NO: 2195592 - RNA, 19 nt, Homo sapiens
  misc_RNA (1)...(19): siRNA sense strand
gagaaacacaccaagaaga

SEQ ID NO: 2195593 - RNA, 19 nt, Homo sapiens
  misc_RNA (1)...(19): siRNA sense strand
ggaggaacuucucuguaau

SEQ ID NO: 2195594 - RNA, 19 nt, Homo sapiens
  misc_RNA (1)...(19): siRNA sense strand
gcucuggacuguaaagaca

SEQ ID NO: 2195595 - RNA, 19 nt, Homo sapiens
  misc_RNA (1)...(19): siRNA sense strand
gaaacucuccugggauauu

SEQ ID NO: 2195596 - RNA, 19 nt, Homo sapiens
  misc_RNA (1)...(19): siRNA sense strand
gaacuguacaagccaauau

SEQ ID NO: 2195597 - RNA, 19 nt, Homo sapiens
  misc_RNA (1)...(19): siRNA sense strand
cauaagagaauguuuggaa

SEQ ID NO: 2195598 - RNA, 19 nt, Homo sapiens
  misc_RNA (1)...(19): siRNA sense strand
gcacgggaggcuuauauga

SEQ ID NO: 2195599 - RNA, 19 nt, Homo sapiens
  misc_RNA (1)...(19): siRNA sense strand
ggaagagcaccagacuuua

SEQ ID NO: 2195600 - RNA, 19 nt, Homo sapiens
  misc_RNA (1)...(19): siRNA sense strand
gaaguguacacagcuguua

SEQ ID NO: 2195601 - RNA, 19 nt, Homo sapiens
  misc_RNA (1)...(19): siRNA sense strand
ggaaagcugucagugcaau

SEQ ID NO: 2195602 - RNA, 19 nt, Homo sapiens
  misc_RNA (1)...(19): siRNA sense strand
ggaaauugcagcccuuuua

SEQ ID NO: 2195603 - RNA, 19 nt, Homo sapiens
  misc_RNA (1)...(19): siRNA sense strand
gaugacauaacuacuauug

SEQ ID NO: 2195604 - RNA, 19 nt, Homo sapiens
  misc_RNA (1)...(19): siRNA sense strand
gacauaagggaguauuuaa

SEQ ID NO: 2195605 - RNA, 19 nt, Homo sapiens
  misc_RNA (1)...(19): siRNA sense strand
gaucggggcuuuguguuua

SEQ ID NO: 2195606 - RNA, 19 nt, Homo sapiens
  misc_RNA (1)...(19): siRNA sense strand
uugaagacaugaagaagaa

SEQ ID NO: 2195607 - RNA, 19 nt, Homo sapiens
  misc_RNA (1)...(19): siRNA sense strand
acaaagagccugcaauuac

SEQ ID NO: 2195608 - RNA, 19 nt, Homo sapiens
  misc_RNA (1)...(19): siRNA sense strand
cuacaaagagccugcaauu

SEQ ID NO: 2195609 - RNA, 19 nt, Homo sapiens
  misc_RNA (1)...(19): siRNA sense strand
gaagauccugagaugcuua

SEQ ID NO: 2195610 - RNA, 19 nt, Homo sapiens
  misc_RNA (1)...(19): siRNA sense strand
ccaugcagaugacuccuuu

SEQ ID NO: 2195611 - RNA, 19 nt, Homo sapiens
  misc_RNA (1)...(19): siRNA sense strand
gcagccgaaugucuuacua

SEQ ID NO: 2195612 - RNA, 19 nt, Homo sapiens
  misc_RNA (1)...(19): siRNA sense strand
gagaaccucaggccaauga

SEQ ID NO: 2195613 - RNA, 19 nt, Homo sapiens
  misc_RNA (1)...(19): siRNA sense strand
uggugaagcuguagagaaa

SEQ ID NO: 2195614 - RNA, 19 nt, Homo sapiens
  misc_RNA (1)...(19): siRNA sense strand
acacaguccugaccacuau

SEQ ID NO: 2195615 - RNA, 19 nt, Homo sapiens
  misc_RNA (1)...(19): siRNA sense strand
gcagagaaacacaccaaga

SEQ ID NO: 2195616 - RNA, 19 nt, Homo sapiens
  misc_RNA (1)...(19): siRNA sense strand
cuaccugacucacugcuuu

SEQ ID NO: 2195617 - RNA, 19 nt, Homo sapiens
  misc_RNA (1)...(19): siRNA sense strand
uaagugggcugaaggacau

SEQ ID NO: 2195618 - RNA, 19 nt, Homo sapiens
  misc_RNA (1)...(19): siRNA sense strand
uaacaaggccuacauacag

SEQ ID NO: 2195619 - RNA, 19 nt, Homo sapiens
  misc_RNA (1)...(19): siRNA sense strand
caccagacuuuaaugaaga

SEQ ID NO: 2195620 - RNA, 19 nt, Homo sapiens
  misc_RNA (1)...(19): siRNA sense strand
gaguaaagaugcaaguaac

SEQ ID NO: 2195621 - RNA, 19 nt, Homo sapiens
  misc_RNA (1)...(19): siRNA sense strand
ugagggugcuggugaauuc

SEQ ID NO: 2195622 - RNA, 19 nt, Homo sapiens
  misc_RNA (1)...(19): siRNA sense strand
ggaaucagcaaaguacaaa

SEQ ID NO: 2195623 - RNA, 19 nt, Homo sapiens
  misc_RNA (1)...(19): siRNA sense strand
ugccaauucucuuaaauga

SEQ ID NO: 2195624 - RNA, 19 nt, Homo sapiens
  misc_RNA (1)...(19): siRNA sense strand
gagguuaugcuuuaaggaa

SEQ ID NO: 2195625 - RNA, 19 nt, Homo sapiens
  misc_RNA (1)...(19): siRNA sense strand
uuaccaagcuuccugagau

SEQ ID NO: 2195626 - RNA, 19 nt, Homo sapiens
  misc_RNA (1)...(19): siRNA sense strand
uacagaauccucccauuaa

SEQ ID NO: 2195627 - RNA, 19 nt, Homo sapiens
  misc_RNA (1)...(19): siRNA sense strand
gagggaauaucagcaggaa

SEQ ID NO: 2195628 - RNA, 19 nt, Homo sapiens
  misc_RNA (1)...(19): siRNA sense strand
ggacacagccaugcagaug

SEQ ID NO: 2195629 - RNA, 19 nt, Homo sapiens
  misc_RNA (1)...(19): siRNA sense strand
gcaaugcgaugccggucau

SEQ ID NO: 2195630 - RNA, 19 nt, Homo sapiens
  misc_RNA (1)...(19): siRNA sense strand
acaaccaccuggagaaguu

SEQ ID NO: 2195631 - RNA, 19 nt, Homo sapiens
  misc_RNA (1)...(19): siRNA sense strand
ugaaggacauaagggagua

SEQ ID NO: 2195632 - RNA, 19 nt, Homo sapiens
  misc_RNA (1)...(19): siRNA sense strand
gguuaugcuuuaaggaauu

SEQ ID NO: 2195633 - RNA, 19 nt, Homo sapiens
  misc_RNA (1)...(19): siRNA sense strand
cagagaaacacaccaagaa

SEQ ID NO: 2195634 - RNA, 19 nt, Homo sapiens
  misc_RNA (1)...(19): siRNA sense strand
ggaagauccugagaugcuu

SEQ ID NO: 2195635 - RNA, 19 nt, Homo sapiens
  misc_RNA (1)...(19): siRNA sense strand
gcugaucagagccucauua

SEQ ID NO: 2195636 - RNA, 19 nt, Homo sapiens
  misc_RNA (1)...(19): siRNA sense strand
guacaagccaauauucaga

SEQ ID NO: 2195637 - RNA, 19 nt, Homo sapiens
  misc_RNA (1)...(19): siRNA sense strand
gaaaugugaaacccaguug

SEQ ID NO: 2195638 - RNA, 19 nt, Homo sapiens
  misc_RNA (1)...(19): siRNA sense strand
gcugcuaucucauaaauua

SEQ ID NO: 2195639 - RNA, 19 nt, Homo sapiens
  misc_RNA (1)...(19): siRNA sense strand
gcagagagcauuauguuaa

SEQ ID NO: 2195640 - RNA, 19 nt, Homo sapiens
  misc_RNA (1)...(19): siRNA sense strand
ucaaucagcugacccauuu

SEQ ID NO: 2195641 - RNA, 19 nt, Homo sapiens
  misc_RNA (1)...(19): siRNA sense strand
gcacauuacucuuuacuca

SEQ ID NO: 2195642 - RNA, 19 nt, Homo sapiens
  misc_RNA (1)...(19): siRNA sense strand
gaggaucgcuuguacuuga

SEQ ID NO: 2195643 - RNA, 19 nt, Homo sapiens
  misc_RNA (1)...(19): siRNA sense strand
gagcacagcugauuuguac

SEQ ID NO: 2195644 - RNA, 19 nt, Homo sapiens
  misc_RNA (1)...(19): siRNA sense strand
gcagaaggcuaucaccuau

SEQ ID NO: 2195645 - RNA, 19 nt, Homo sapiens
  misc_RNA (1)...(19): siRNA sense strand
caauaugccuuuacaguau

SEQ ID NO: 2195646 - RNA, 19 nt, Homo sapiens
  misc_RNA (1)...(19): siRNA sense strand
aagaagagcuuagaguaua

SEQ ID NO: 2195647 - RNA, 19 nt, Homo sapiens
  misc_RNA (1)...(19): siRNA sense strand
ggacacagcugccucuuac

SEQ ID NO: 2195648 - RNA, 19 nt, Homo sapiens
  misc_RNA (1)...(19): siRNA sense strand
ggaagucccugcaguaagu

SEQ ID NO: 2195649 - RNA, 19 nt, Homo sapiens
  misc_RNA (1)...(19): siRNA sense strand
gagagcagcuguuaaaguc

SEQ ID NO: 2195650 - RNA, 19 nt, Homo sapiens
  misc_RNA (1)...(19): siRNA sense strand
guuauaggccugauucuua

SEQ ID NO: 2195651 - RNA, 19 nt, Homo sapiens
  misc_RNA (1)...(19): siRNA sense strand
gaacaaugcuagagaacag

SEQ ID NO: 2195652 - RNA, 19 nt, Homo sapiens
  misc_RNA (1)...(19): siRNA sense strand
guaaagggccucauaaauc

SEQ ID NO: 2195653 - RNA, 19 nt, Homo sapiens
  misc_RNA (1)...(19): siRNA sense strand
aaaggaaacuucugccauu

SEQ ID NO: 2195654 - RNA, 19 nt, Homo sapiens
  misc_RNA (1)...(19): siRNA sense strand
ugaagagacuccacaaaga

SEQ ID NO: 2195655 - RNA, 19 nt, Homo sapiens
  misc_RNA (1)...(19): siRNA sense strand
gaauaugcccuguggaauu

SEQ ID NO: 2195656 - RNA, 19 nt, Homo sapiens
  misc_RNA (1)...(19): siRNA sense strand
ggugaugaaugcaguauug

SEQ ID NO: 2195657 - RNA, 19 nt, Homo sapiens
  misc_RNA (1)...(19): siRNA sense strand
ggauuaagcacuuuacuug

SEQ ID NO: 2195658 - RNA, 19 nt, Homo sapiens
  misc_RNA (1)...(19): siRNA sense strand
caucaaaucuggacaaugc

SEQ ID NO: 2195659 - RNA, 19 nt, Homo sapiens
  misc_RNA (1)...(19): siRNA sense strand
acacugaaauugagucuga

SEQ ID NO: 2195660 - RNA, 19 nt, Homo sapiens
  misc_RNA (1)...(19): siRNA sense strand
caacacagcacuagaacaa

SEQ ID NO: 2195661 - RNA, 19 nt, Homo sapiens
  misc_RNA (1)...(19): siRNA sense strand
guaaacccuuguaugagua

SEQ ID NO: 2195662 - RNA, 19 nt, Homo sapiens
  misc_RNA (1)...(19): siRNA sense strand
cagcugggcuuugaacuaa

SEQ ID NO: 2195663 - RNA, 19 nt, Homo sapiens
  misc_RNA (1)...(19): siRNA sense strand
aauaugcccuguggaauua

SEQ ID NO: 2195664 - RNA, 19 nt, Homo sapiens
  misc_RNA (1)...(19): siRNA sense strand
gcugagaacauguauauug

SEQ ID NO: 2195665 - RNA, 19 nt, Homo sapiens
  misc_RNA (1)...(19): siRNA sense strand
uaauaaaggugaugaaugc

SEQ ID NO: 2195666 - RNA, 19 nt, Homo sapiens
  misc_RNA (1)...(19): siRNA sense strand
aaacauuacugcuuagugu

SEQ ID NO: 2195667 - RNA, 19 nt, Homo sapiens
  misc_RNA (1)...(19): siRNA sense strand
gcaacaugcuacccuucua

SEQ ID NO: 2195668 - RNA, 19 nt, Homo sapiens
  misc_RNA (1)...(19): siRNA sense strand
uaucaguucuccuuucaaa

SEQ ID NO: 2195669 - RNA, 19 nt, Homo sapiens
  misc_RNA (1)...(19): siRNA sense strand
caacacacucugagcauaa

SEQ ID NO: 2195670 - RNA, 19 nt, Homo sapiens
  misc_RNA (1)...(19): siRNA sense strand
caacgugucgagcaaauaa

SEQ ID NO: 2195671 - RNA, 19 nt, Homo sapiens
  misc_RNA (1)...(19): siRNA sense strand
cagagagcauuauguuaaa

SEQ ID NO: 2195672 - RNA, 19 nt, Homo sapiens
  misc_RNA (1)...(19): siRNA sense strand
ccucuuaccuuauuaucuu

SEQ ID NO: 2195673 - RNA, 19 nt, Homo sapiens
  misc_RNA (1)...(19): siRNA sense strand
gaagagacuccacaaagau

SEQ ID NO: 2195674 - RNA, 19 nt, Homo sapiens
  misc_RNA (1)...(19): siRNA sense strand
gagaacauguauauugaca

SEQ ID NO: 2195675 - RNA, 19 nt, Homo sapiens
  misc_RNA (1)...(19): siRNA sense strand
gauuugaguucuucaggaa

SEQ ID NO: 2195676 - RNA, 19 nt, Homo sapiens
  misc_RNA (1)...(19): siRNA sense strand
gaucgugacagguggcuua

SEQ ID NO: 2195677 - RNA, 19 nt, Homo sapiens
  misc_RNA (1)...(19): siRNA sense strand
ccauggaguuggccaguaa

SEQ ID NO: 2195678 - RNA, 19 nt, Homo sapiens
  misc_RNA (1)...(19): siRNA sense strand
gugcagggaugaaaguuug

SEQ ID NO: 2195679 - RNA, 19 nt, Homo sapiens
  misc_RNA (1)...(19): siRNA sense strand
gaacaucaaaucuggacaa

SEQ ID NO: 2195680 - RNA, 19 nt, Homo sapiens
  misc_RNA (1)...(19): siRNA sense strand
ucaagaagagcuuagagua

SEQ ID NO: 2195681 - RNA, 19 nt, Homo sapiens
  misc_RNA (1)...(19): siRNA sense strand
ggaugggacuuacgacugu

SEQ ID NO: 2195682 - RNA, 19 nt, Homo sapiens
  misc_RNA (1)...(19): siRNA sense strand
ccagaugccuuccaaccaa

SEQ ID NO: 2195683 - RNA, 19 nt, Homo sapiens
  misc_RNA (1)...(19): siRNA sense strand
uagaagaugugagguuaaa

SEQ ID NO: 2195684 - RNA, 19 nt, Homo sapiens
  misc_RNA (1)...(19): siRNA sense strand
ucaauaugccuuuacagua

SEQ ID NO: 2195685 - RNA, 19 nt, Homo sapiens
  misc_RNA (1)...(19): siRNA sense strand
cagcugauuuguacacuug

SEQ ID NO: 2195686 - RNA, 19 nt, Homo sapiens
  misc_RNA (1)...(19): siRNA sense strand
ucagugagauaacagaaga

SEQ ID NO: 2195687 - RNA, 19 nt, Homo sapiens
  misc_RNA (1)...(19): siRNA sense strand
guaaguaggcaacaugcua

SEQ ID NO: 2195688 - RNA, 19 nt, Homo sapiens
  misc_RNA (1)...(19): siRNA sense strand
gcucuucccuuucuguguu

SEQ ID NO: 2195689 - RNA, 19 nt, Homo sapiens
  misc_RNA (1)...(19): siRNA sense strand
acacuuugcucuaugauuc

SEQ ID NO: 2195690 - RNA, 19 nt, Homo sapiens
  misc_RNA (1)...(19): siRNA sense strand
gauaagcuuggacagaaua

SEQ ID NO: 2195691 - RNA, 19 nt, Homo sapiens
  misc_RNA (1)...(19): siRNA sense strand
agagaauccucaauaauca

SEQ ID NO: 2195692 - RNA, 19 nt, Homo sapiens
  misc_RNA (1)...(19): siRNA sense strand
cuuagagaauccucaauaa

SEQ ID NO: 2195693 - RNA, 19 nt, Homo sapiens
  misc_RNA (1)...(19): siRNA sense strand
ggacaaugguggaugaaaa

SEQ ID NO: 2195694 - RNA, 19 nt, Homo sapiens
  misc_RNA (1)...(19): siRNA sense strand
cuuagaagaugugagguua

SEQ ID NO: 2195695 - RNA, 19 nt, Homo sapiens
  misc_RNA (1)...(19): siRNA sense strand
ugaagaugcuuuaguccuu

SEQ ID NO: 2195696 - RNA, 19 nt, Homo sapiens
  misc_RNA (1)...(19): siRNA sense strand
gacaaugccuuugcucaug

SEQ ID NO: 2195697 - RNA, 19 nt, Homo sapiens
  misc_RNA (1)...(19): siRNA sense strand
ccucaggaguguaguuaaa

SEQ ID NO: 2195698 - RNA, 19 nt, Homo sapiens
  misc_RNA (1)...(19): siRNA sense strand
ggaagaaccuuuucaggau

SEQ ID NO: 2195699 - RNA, 19 nt, Homo sapiens
  misc_RNA (1)...(19): siRNA sense strand
ccacagacuugacugaaag

SEQ ID NO: 2195700 - RNA, 19 nt, Homo sapiens
  misc_RNA (1)...(19): siRNA sense strand
gaaucgaagcaucaguuua

SEQ ID NO: 2195701 - RNA, 19 nt, Homo sapiens
  misc_RNA (1)...(19): siRNA sense strand
caagaagagcuuagaguau

SEQ ID NO: 2195702 - RNA, 19 nt, Homo sapiens
  misc_RNA (1)...(19): siRNA sense strand
agagguagauggagagaug

SEQ ID NO: 2195703 - RNA, 19 nt, Homo sapiens
  misc_RNA (1)...(19): siRNA sense strand
acagcugccucuuaccuua

SEQ ID NO: 2195704 - RNA, 19 nt, Homo sapiens
  misc_RNA (1)...(19): siRNA sense strand
gcuguuaaauugaugagau

SEQ ID NO: 2195705 - RNA, 19 nt, Homo sapiens
  misc_RNA (1)...(19): siRNA sense strand
ggaaacuucugccauucug

SEQ ID NO: 2195706 - RNA, 19 nt, Homo sapiens
  misc_RNA (1)...(19): siRNA sense strand
gagaauggaaucaccuuga

SEQ ID NO: 2195707 - RNA, 19 nt, Homo sapiens
  misc_RNA (1)...(19): siRNA sense strand
gaaggacaguaacccuaau

SEQ ID NO: 2195708 - RNA, 19 nt, Homo sapiens
  misc_RNA (1)...(19): siRNA sense strand
cugagaacauguauauuga

SEQ ID NO: 2195709 - RNA, 19 nt, Homo sapiens
  misc_RNA (1)...(19): siRNA sense strand
uagagcagacuguucaaua

SEQ ID NO: 2195710 - RNA, 19 nt, Homo sapiens
  misc_RNA (1)...(19): siRNA sense strand
uaaagggccucauaaaucc

SEQ ID NO: 2195711 - RNA, 19 nt, Homo sapiens
  misc_RNA (1)...(19): siRNA sense strand
auacggaggccuuucuuua

SEQ ID NO: 2195712 - RNA, 19 nt, Homo sapiens
  misc_RNA (1)...(19): siRNA sense strand
caaugacacuuugcucuau

SEQ ID NO: 2195713 - RNA, 19 nt, Homo sapiens
  misc_RNA (1)...(19): siRNA sense strand
caauaguguuguaauagug

SEQ ID NO: 2195714 - RNA, 19 nt, Homo sapiens
  misc_RNA (1)...(19): siRNA sense strand
gccacagacuugacugaaa

SEQ ID NO: 2195715 - RNA, 19 nt, Homo sapiens
  misc_RNA (1)...(19): siRNA sense strand
gcugggcuuugaacuaauu

SEQ ID NO: 2195716 - RNA, 19 nt, Homo sapiens
  misc_RNA (1)...(19): siRNA sense strand
cacaugauucgauuucuua

SEQ ID NO: 2195717 - RNA, 19 nt, Homo sapiens
  misc_RNA (1)...(19): siRNA sense strand
agagcagacuguucaauau

SEQ ID NO: 2195718 - RNA, 19 nt, Homo sapiens
  misc_RNA (1)...(19): siRNA sense strand
ucaacacacucugagcaua

SEQ ID NO: 2195719 - RNA, 19 nt, Homo sapiens
  misc_RNA (1)...(19): siRNA sense strand
cuagacuggugcaucguua

SEQ ID NO: 2195720 - RNA, 19 nt, Homo sapiens
  misc_RNA (1)...(19): siRNA sense strand
ggaaucgaagcaucaguuu

SEQ ID NO: 2195721 - RNA, 19 nt, Homo sapiens
  misc_RNA (1)...(19): siRNA sense strand
cccgcuagcuguucuguuu

SEQ ID NO: 2195722 - RNA, 19 nt, Homo sapiens
  misc_RNA (1)...(19): siRNA sense strand
agaauggaaucaccuugaa

SEQ ID NO: 2195723 - RNA, 19 nt, Homo sapiens
  misc_RNA (1)...(19): siRNA sense strand
cgacuguucuguguccuaa

SEQ ID NO: 2195724 - RNA, 19 nt, Homo sapiens
  misc_RNA (1)...(19): siRNA sense strand
uagagaauccucaauaauc

SEQ ID NO: 2195725 - RNA, 19 nt, Homo sapiens
  misc_RNA (1)...(19): siRNA sense strand
gaggugcucuucccuuucu

SEQ ID NO: 2195726 - RNA, 19 nt, Homo sapiens
  misc_RNA (1)...(19): siRNA sense strand
ggagagcagcuguuaaagu

SEQ ID NO: 2195727 - RNA, 19 nt, Homo sapiens
  misc_RNA (1)...(19): siRNA sense strand
gauggucuccugacaauag

SEQ ID NO: 2195728 - RNA, 19 nt, Homo sapiens
  misc_RNA (1)...(19): siRNA sense strand
gugcugagaacauguauau

SEQ ID NO: 2195729 - RNA, 19 nt, Homo sapiens
  misc_RNA (1)...(19): siRNA sense strand
uuuagagucucagggauua

SEQ ID NO: 2195730 - RNA, 19 nt, Homo sapiens
  misc_RNA (1)...(19): siRNA sense strand
gaugaaugcaguauugguu

SEQ ID NO: 2195731 - RNA, 19 nt, Homo sapiens
  misc_RNA (1)...(19): siRNA sense strand
ugacaucagugaguacaga

SEQ ID NO: 2195732 - RNA, 19 nt, Homo sapiens
  misc_RNA (1)...(19): siRNA sense strand
caccaaagcacaagcagaa

SEQ ID NO: 2195733 - RNA, 19 nt, Homo sapiens
  misc_RNA (1)...(19): siRNA sense strand
gaauggaaucaccuugaaa

SEQ ID NO: 2195734 - RNA, 19 nt, Homo sapiens
  misc_RNA (1)...(19): siRNA sense strand
cuaauuaguuggcuaugca

SEQ ID NO: 2195735 - RNA, 19 nt, Homo sapiens
  misc_RNA (1)...(19): siRNA sense strand
aaucgaagcaucaguuuau

SEQ ID NO: 2195736 - RNA, 19 nt, Homo sapiens
  misc_RNA (1)...(19): siRNA sense strand
ggaccuuugucgacacaug

SEQ ID NO: 2195737 - RNA, 19 nt, Homo sapiens
  misc_RNA (1)...(19): siRNA sense strand
guacuagcccagucuguug

SEQ ID NO: 2195738 - RNA, 19 nt, Homo sapiens
  misc_RNA (1)...(19): siRNA sense strand
ggaaggaaaugcaguuaaa

SEQ ID NO: 2195739 - RNA, 19 nt, Homo sapiens
  misc_RNA (1)...(19): siRNA sense strand
gaaagaacuuguauuccaa

SEQ ID NO: 2195740 - RNA, 19 nt, Homo sapiens
  misc_RNA (1)...(19): siRNA sense strand
gaaacauggucuucuuuga

SEQ ID NO: 2195741 - RNA, 19 nt, Homo sapiens
  misc_RNA (1)...(19): siRNA sense strand
ggacuuugcucggcguuua

SEQ ID NO: 2195742 - RNA, 19 nt, Homo sapiens
  misc_RNA (1)...(19): siRNA sense strand
gaacagacaccuugggauu

SEQ ID NO: 2195743 - RNA, 19 nt, Homo sapiens
  misc_RNA (1)...(19): siRNA sense strand
ggacagaauucuaacagau

SEQ ID NO: 2195744 - RNA, 19 nt, Homo sapiens
  misc_RNA (1)...(19): siRNA sense strand
gagagcaggugacaacauu

SEQ ID NO: 2195745 - RNA, 19 nt, Homo sapiens
  misc_RNA (1)...(19): siRNA sense strand
caacagccuucauaagauu

SEQ ID NO: 2195746 - RNA, 19 nt, Homo sapiens
  misc_RNA (1)...(19): siRNA sense strand
gacagucucucucauggua

SEQ ID NO: 2195747 - RNA, 19 nt, Homo sapiens
  misc_RNA (1)...(19): siRNA sense strand
gcaacagccuucauaagau

SEQ ID NO: 2195748 - RNA, 19 nt, Homo sapiens
  misc_RNA (1)...(19): siRNA sense strand
gcugucauauuucucuuua

SEQ ID NO: 2195749 - RNA, 19 nt, Homo sapiens
  misc_RNA (1)...(19): siRNA sense strand
ggaauagacuuagcuuuua

SEQ ID NO: 2195750 - RNA, 19 nt, Homo sapiens
  misc_RNA (1)...(19): siRNA sense strand
guauggaacugcaacugua

SEQ ID NO: 2195751 - RNA, 19 nt, Homo sapiens
  misc_RNA (1)...(19): siRNA sense strand
ggacuuggcaucacuuuga

SEQ ID NO: 2195752 - RNA, 19 nt, Homo sapiens
  misc_RNA (1)...(19): siRNA sense strand
gaacacauaaccuccauug

SEQ ID NO: 2195753 - RNA, 19 nt, Homo sapiens
  misc_RNA (1)...(19): siRNA sense strand
gaacuuguauuccaaacag

SEQ ID NO: 2195754 - RNA, 19 nt, Homo sapiens
  misc_RNA (1)...(19): siRNA sense strand
gcauaugacuagaacauuc

SEQ ID NO: 2195755 - RNA, 19 nt, Homo sapiens
  misc_RNA (1)...(19): siRNA sense strand
caaagcaacagccuucaua

SEQ ID NO: 2195756 - RNA, 19 nt, Homo sapiens
  misc_RNA (1)...(19): siRNA sense strand
gaacagauuaaacugauug

SEQ ID NO: 2195757 - RNA, 19 nt, Homo sapiens
  misc_RNA (1)...(19): siRNA sense strand
ggauagaagugcagguuuc

SEQ ID NO: 2195758 - RNA, 19 nt, Homo sapiens
  misc_RNA (1)...(19): siRNA sense strand
gggauuaucuugaacacau

SEQ ID NO: 2195759 - RNA, 19 nt, Homo sapiens
  misc_RNA (1)...(19): siRNA sense strand
acaaagcucugugugcaua

SEQ ID NO: 2195760 - RNA, 19 nt, Homo sapiens
  misc_RNA (1)...(19): siRNA sense strand
gcaguguucaucucucuua

SEQ ID NO: 2195761 - RNA, 19 nt, Homo sapiens
  misc_RNA (1)...(19): siRNA sense strand
guucaucucucuuauugga

SEQ ID NO: 2195762 - RNA, 19 nt, Homo sapiens
  misc_RNA (1)...(19): siRNA sense strand
ucagaagccuugcaucaug

SEQ ID NO: 2195763 - RNA, 19 nt, Homo sapiens
  misc_RNA (1)...(19): siRNA sense strand
aaacgggacucuggaauau

SEQ ID NO: 2195764 - RNA, 19 nt, Homo sapiens
  misc_RNA (1)...(19): siRNA sense strand
gguucaagcuuauguuuca

SEQ ID NO: 2195765 - RNA, 19 nt, Homo sapiens
  misc_RNA (1)...(19): siRNA sense strand
gcaacaggaccaagccaua

SEQ ID NO: 2195766 - RNA, 19 nt, Homo sapiens
  misc_RNA (1)...(19): siRNA sense strand
ggauuaucuugaacacaua

SEQ ID NO: 2195767 - RNA, 19 nt, Homo sapiens
  misc_RNA (1)...(19): siRNA sense strand
caccuacgaucucuuugua

SEQ ID NO: 2195768 - RNA, 19 nt, Homo sapiens
  misc_RNA (1)...(19): siRNA sense strand
ccagugcacuuucugauca

SEQ ID NO: 2195769 - RNA, 19 nt, Homo sapiens
  misc_RNA (1)...(19): siRNA sense strand
caugcuaacuuuaacuuug

SEQ ID NO: 2195770 - RNA, 19 nt, Homo sapiens
  misc_RNA (1)...(19): siRNA sense strand
ggaacagauuaaacugauu

SEQ ID NO: 2195771 - RNA, 19 nt, Homo sapiens
  misc_RNA (1)...(19): siRNA sense strand
uaaacgggacucuggaaua

SEQ ID NO: 2195772 - RNA, 19 nt, Homo sapiens
  misc_RNA (1)...(19): siRNA sense strand
ugacacagcggacagaauu

SEQ ID NO: 2195773 - RNA, 19 nt, Homo sapiens
  misc_RNA (1)...(19): siRNA sense strand
ggccauugcugcccacuau

SEQ ID NO: 2195774 - RNA, 19 nt, Homo sapiens
  misc_RNA (1)...(19): siRNA sense strand
ggaaacauggucuucuuug

SEQ ID NO: 2195775 - RNA, 19 nt, Homo sapiens
  misc_RNA (1)...(19): siRNA sense strand
gguauaaccacuucuaugu

SEQ ID NO: 2195776 - RNA, 19 nt, Homo sapiens
  misc_RNA (1)...(19): siRNA sense strand
uaaacuacauggugguaau

SEQ ID NO: 2195777 - RNA, 19 nt, Homo sapiens
  misc_RNA (1)...(19): siRNA sense strand
guguucaucucucuuauug

SEQ ID NO: 2195778 - RNA, 19 nt, Homo sapiens
  misc_RNA (1)...(19): siRNA sense strand
ccuacgaucucuuuguauu

SEQ ID NO: 2195779 - RNA, 19 nt, Homo sapiens
  misc_RNA (1)...(19): siRNA sense strand
caaugauucucucguccua

SEQ ID NO: 2195780 - RNA, 19 nt, Homo sapiens
  misc_RNA (1)...(19): siRNA sense strand
caagccauauguccuucua

SEQ ID NO: 2195781 - RNA, 19 nt, Homo sapiens
  misc_RNA (1)...(19): siRNA sense strand
gcaagccagucaugguuuc

SEQ ID NO: 2195782 - RNA, 19 nt, Homo sapiens
  misc_RNA (1)...(19): siRNA sense strand
gaguguuucuucagcauau

SEQ ID NO: 2195783 - RNA, 19 nt, Homo sapiens
  misc_RNA (1)...(19): siRNA sense strand
uuacauuccuccuuguuug

SEQ ID NO: 2195784 - RNA, 19 nt, Homo sapiens
  misc_RNA (1)...(19): siRNA sense strand
gaaugccagugcccaguau

SEQ ID NO: 2195785 - RNA, 19 nt, Homo sapiens
  misc_RNA (1)...(19): siRNA sense strand
cauaagauuucaguagaug

SEQ ID NO: 2195786 - RNA, 19 nt, Homo sapiens
  misc_RNA (1)...(19): siRNA sense strand
ccaaacauaagacugguaa

SEQ ID NO: 2195787 - RNA, 19 nt, Homo sapiens
  misc_RNA (1)...(19): siRNA sense strand
gcaucuagcuacaucugau

SEQ ID NO: 2195788 - RNA, 19 nt, Homo sapiens
  misc_RNA (1)...(19): siRNA sense strand
ccacaaagggucaacacuu

SEQ ID NO: 2195789 - RNA, 19 nt, Homo sapiens
  misc_RNA (1)...(19): siRNA sense strand
ggcaguauuugagauguuu

SEQ ID NO: 2195790 - RNA, 19 nt, Homo sapiens
  misc_RNA (1)...(19): siRNA sense strand
gguaauggguguuguuuug

SEQ ID NO: 2195791 - RNA, 19 nt, Homo sapiens
  misc_RNA (1)...(19): siRNA sense strand
gacagaauucuaacagauu

SEQ ID NO: 2195792 - RNA, 19 nt, Homo sapiens
  misc_RNA (1)...(19): siRNA sense strand
uugaucagcugguucacua

SEQ ID NO: 2195793 - RNA, 19 nt, Homo sapiens
  misc_RNA (1)...(19): siRNA sense strand
gcauggcaguucuggauag

SEQ ID NO: 2195794 - RNA, 19 nt, Homo sapiens
  misc_RNA (1)...(19): siRNA sense strand
ccaagaaauccuccucauu

SEQ ID NO: 2195795 - RNA, 19 nt, Homo sapiens
  misc_RNA (1)...(19): siRNA sense strand
ggagaaugcaccucuuugu

SEQ ID NO: 2195796 - RNA, 19 nt, Homo sapiens
  misc_RNA (1)...(19): siRNA sense strand
gcucagugaugcuggaagu

SEQ ID NO: 2195797 - RNA, 19 nt, Homo sapiens
  misc_RNA (1)...(19): siRNA sense strand
uauaaccacuucuaugucu

SEQ ID NO: 2195798 - RNA, 19 nt, Homo sapiens
  misc_RNA (1)...(19): siRNA sense strand
acauuuaucacaccaagua

SEQ ID NO: 2195799 - RNA, 19 nt, Homo sapiens
  misc_RNA (1)...(19): siRNA sense strand
ucacauuccugagaucaau

SEQ ID NO: 2195800 - RNA, 19 nt, Homo sapiens
  misc_RNA (1)...(19): siRNA sense strand
ggauguuuauuccuuaucu

SEQ ID NO: 2195801 - RNA, 19 nt, Homo sapiens
  misc_RNA (1)...(19): siRNA sense strand
cuuguuaccguucucauua

SEQ ID NO: 2195802 - RNA, 19 nt, Homo sapiens
  misc_RNA (1)...(19): siRNA sense strand
guucccagauuggacauuu

SEQ ID NO: 2195803 - RNA, 19 nt, Homo sapiens
  misc_RNA (1)...(19): siRNA sense strand
caacaggaccaagccauau

SEQ ID NO: 2195804 - RNA, 19 nt, Homo sapiens
  misc_RNA (1)...(19): siRNA sense strand
gagaaugcaccucuuugug

SEQ ID NO: 2195805 - RNA, 19 nt, Homo sapiens
  misc_RNA (1)...(19): siRNA sense strand
gaaaucccaccugauguug

SEQ ID NO: 2195806 - RNA, 19 nt, Homo sapiens
  misc_RNA (1)...(19): siRNA sense strand
ggagggaaagaacuuguau

SEQ ID NO: 2195807 - RNA, 19 nt, Homo sapiens
  misc_RNA (1)...(19): siRNA sense strand
ucaguggucucuuggcaau

SEQ ID NO: 2195808 - RNA, 19 nt, Homo sapiens
  misc_RNA (1)...(19): siRNA sense strand
cgacucauauccaaagaac

SEQ ID NO: 2195809 - RNA, 19 nt, Homo sapiens
  misc_RNA (1)...(19): siRNA sense strand
ugaaaucccaccugauguu

SEQ ID NO: 2195810 - RNA, 19 nt, Homo sapiens
  misc_RNA (1)...(19): siRNA sense strand
gggcaguauuugagauguu

SEQ ID NO: 2195811 - RNA, 19 nt, Homo sapiens
  misc_RNA (1)...(19): siRNA sense strand
gcagcauggugcccaagga

SEQ ID NO: 2195812 - RNA, 19 nt, Homo sapiens
  misc_RNA (1)...(19): siRNA sense strand
cagucucucucaugguaua

SEQ ID NO: 2195813 - RNA, 19 nt, Homo sapiens
  misc_RNA (1)...(19): siRNA sense strand
gcaggagccucugguggau

SEQ ID NO: 2195814 - RNA, 19 nt, Homo sapiens
  misc_RNA (1)...(19): siRNA sense strand
uaaacugauugaagugcaa

SEQ ID NO: 2195815 - RNA, 19 nt, Homo sapiens
  misc_RNA (1)...(19): siRNA sense strand
ugauugaagugcaaagcaa

SEQ ID NO: 2195816 - RNA, 19 nt, Homo sapiens
  misc_RNA (1)...(19): siRNA sense strand
acuggaauuucucacauaa

SEQ ID NO: 2195817 - RNA, 19 nt, Homo sapiens
  misc_RNA (1)...(19): siRNA sense strand
caugcugucuuggcuaauu

SEQ ID NO: 2195818 - RNA, 19 nt, Homo sapiens
  misc_RNA (1)...(19): siRNA sense strand
gaagccaaagagaguguuu

SEQ ID NO: 2195819 - RNA, 19 nt, Homo sapiens
  misc_RNA (1)...(19): siRNA sense strand
acauaagacugguaacuac

SEQ ID NO: 2195820 - RNA, 19 nt, Homo sapiens
  misc_RNA (1)...(19): siRNA sense strand
aacauggucuucuuugaug

SEQ ID NO: 2195821 - RNA, 19 nt, Homo sapiens
  misc_RNA (1)...(19): siRNA sense strand
uagcaguucuuaagcaucu

SEQ ID NO: 2195822 - RNA, 19 nt, Homo sapiens
  misc_RNA (1)...(19): siRNA sense strand
uggaacagauuaaacugau

SEQ ID NO: 2195823 - RNA, 19 nt, Homo sapiens
  misc_RNA (1)...(19): siRNA sense strand
ucuggaauauggaucaaug

SEQ ID NO: 2195824 - RNA, 19 nt, Homo sapiens
  misc_RNA (1)...(19): siRNA sense strand
gcaccuacgaucucuuugu

SEQ ID NO: 2195825 - RNA, 19 nt, Homo sapiens
  misc_RNA (1)...(19): siRNA sense strand
gugcauucauuaaccuaga

SEQ ID NO: 2195826 - RNA, 19 nt, Homo sapiens
  misc_RNA (1)...(19): siRNA sense strand
ucaacuggaugcucugaag

SEQ ID NO: 2195827 - RNA, 19 nt, Homo sapiens
  misc_RNA (1)...(19): siRNA sense strand
ucacauaaccccucacauu

SEQ ID NO: 2195828 - RNA, 19 nt, Homo sapiens
  misc_RNA (1)...(19): siRNA sense strand
uacuggaauuucucacaua

SEQ ID NO: 2195829 - RNA, 19 nt, Homo sapiens
  misc_RNA (1)...(19): siRNA sense strand
gagaguguuucuucagcau

SEQ ID NO: 2195830 - RNA, 19 nt, Homo sapiens
  misc_RNA (1)...(19): siRNA sense strand
ccucaucugggcaguauuu

SEQ ID NO: 2195831 - RNA, 19 nt, Homo sapiens
  misc_RNA (1)...(19): siRNA sense strand
guaucugggagaaguauuu

SEQ ID NO: 2195832 - RNA, 19 nt, Homo sapiens
  misc_RNA (1)...(19): siRNA sense strand
uauacauacucuugcgaaa

SEQ ID NO: 2195833 - RNA, 19 nt, Homo sapiens
  misc_RNA (1)...(19): siRNA sense strand
aaacauggucuucuuugau

SEQ ID NO: 2195834 - RNA, 19 nt, Homo sapiens
  misc_RNA (1)...(19): siRNA sense strand
uuaagcaucuagcuacauc

SEQ ID NO: 2195835 - RNA, 19 nt, Homo sapiens
  misc_RNA (1)...(19): siRNA sense strand
uuucguaucuacagggauu

SEQ ID NO: 2195836 - RNA, 19 nt, Homo sapiens
  misc_RNA (1)...(19): siRNA sense strand
gcauucccauugcucacaa

SEQ ID NO: 2195837 - RNA, 19 nt, Homo sapiens
  misc_RNA (1)...(19): siRNA sense strand
gcucaaucauaaacuacau

SEQ ID NO: 2195838 - RNA, 19 nt, Homo sapiens
  misc_RNA (1)...(19): siRNA sense strand
gaaauuaacugccacaaag

SEQ ID NO: 2195839 - RNA, 19 nt, Homo sapiens
  misc_RNA (1)...(19): siRNA sense strand
aaacauaggucaagcaauu

SEQ ID NO: 2195840 - RNA, 19 nt, Homo sapiens
  misc_RNA (1)...(19): siRNA sense strand
ugacagagcugcaucuuga

SEQ ID NO: 2195841 - RNA, 19 nt, Homo sapiens
  misc_RNA (1)...(19): siRNA sense strand
gauaugaaguugucagaaa

SEQ ID NO: 2195842 - RNA, 19 nt, Homo sapiens
  misc_RNA (1)...(19): siRNA sense strand
caaauaaaccucaaacuga

SEQ ID NO: 2195843 - RNA, 19 nt, Homo sapiens
  misc_RNA (1)...(19): siRNA sense strand
gaagacaaccugaucauga

SEQ ID NO: 2195844 - RNA, 19 nt, Homo sapiens
  misc_RNA (1)...(19): siRNA sense strand
guaaaugugcuuucaguua

SEQ ID NO: 2195845 - RNA, 19 nt, Homo sapiens
  misc_RNA (1)...(19): siRNA sense strand
ugacaucucuguugaaaug

SEQ ID NO: 2195846 - RNA, 19 nt, Homo sapiens
  misc_RNA (1)...(19): siRNA sense strand
guaauuaagucuccagcua

SEQ ID NO: 2195847 - RNA, 19 nt, Homo sapiens
  misc_RNA (1)...(19): siRNA sense strand
gcacuaaucuugaugaacu

SEQ ID NO: 2195848 - RNA, 19 nt, Homo sapiens
  misc_RNA (1)...(19): siRNA sense strand
cauaagagauucacaguca

SEQ ID NO: 2195849 - RNA, 19 nt, Homo sapiens
  misc_RNA (1)...(19): siRNA sense strand
ccaaauacauguaaaugga

SEQ ID NO: 2195850 - RNA, 19 nt, Homo sapiens
  misc_RNA (1)...(19): siRNA sense strand
caaacaaacugauuaugug

SEQ ID NO: 2195851 - RNA, 19 nt, Homo sapiens
  misc_RNA (1)...(19): siRNA sense strand
gaagaaagacuaugaugau

SEQ ID NO: 2195852 - RNA, 19 nt, Homo sapiens
  misc_RNA (1)...(19): siRNA sense strand
aaacacaacugcuaagguu

SEQ ID NO: 2195853 - RNA, 19 nt, Homo sapiens
  misc_RNA (1)...(19): siRNA sense strand
ccacagacaacaaauauaa

SEQ ID NO: 2195854 - RNA, 19 nt, Homo sapiens
  misc_RNA (1)...(19): siRNA sense strand
gguaucagcuccaucuauu

SEQ ID NO: 2195855 - RNA, 19 nt, Homo sapiens
  misc_RNA (1)...(19): siRNA sense strand
ggagaaugcuuauguacau

SEQ ID NO: 2195856 - RNA, 19 nt, Homo sapiens
  misc_RNA (1)...(19): siRNA sense strand
caacuacagugccaacaaa

SEQ ID NO: 2195857 - RNA, 19 nt, Homo sapiens
  misc_RNA (1)...(19): siRNA sense strand
caaaauagcucuguaaaga

SEQ ID NO: 2195858 - RNA, 19 nt, Homo sapiens
  misc_RNA (1)...(19): siRNA sense strand
gcagauguacggauuuaua

SEQ ID NO: 2195859 - RNA, 19 nt, Homo sapiens
  misc_RNA (1)...(19): siRNA sense strand
gggaaguuauucuugguua

SEQ ID NO: 2195860 - RNA, 19 nt, Homo sapiens
  misc_RNA (1)...(19): siRNA sense strand
gaaaggagggcuuauggaa

SEQ ID NO: 2195861 - RNA, 19 nt, Homo sapiens
  misc_RNA (1)...(19): siRNA sense strand
aaagugaccuuaacaaauc

SEQ ID NO: 2195862 - RNA, 19 nt, Homo sapiens
  misc_RNA (1)...(19): siRNA sense strand
caaagaguaccucggauua

SEQ ID NO: 2195863 - RNA, 19 nt, Homo sapiens
  misc_RNA (1)...(19): siRNA sense strand
gaagaccuacuuugccuua

SEQ ID NO: 2195864 - RNA, 19 nt, Homo sapiens
  misc_RNA (1)...(19): siRNA sense strand
caauggaacugcaauuaau

SEQ ID NO: 2195865 - RNA, 19 nt, Homo sapiens
  misc_RNA (1)...(19): siRNA sense strand
gcaauggaacugcaauuaa

SEQ ID NO: 2195866 - RNA, 19 nt, Homo sapiens
  misc_RNA (1)...(19): siRNA sense strand
gaacaacuacuacaucuag

SEQ ID NO: 2195867 - RNA, 19 nt, Homo sapiens
  misc_RNA (1)...(19): siRNA sense strand
guaccagaguuucagcuua

SEQ ID NO: 2195868 - RNA, 19 nt, Homo sapiens
  misc_RNA (1)...(19): siRNA sense strand
gaaaagcaguugcaaaaga

SEQ ID NO: 2195869 - RNA, 19 nt, Homo sapiens
  misc_RNA (1)...(19): siRNA sense strand
caucuagucuuucaccuuu

SEQ ID NO: 2195870 - RNA, 19 nt, Homo sapiens
  misc_RNA (1)...(19): siRNA sense strand
ggaauaaagugaccuuaac

SEQ ID NO: 2195871 - RNA, 19 nt, Homo sapiens
  misc_RNA (1)...(19): siRNA sense strand
gaaguuauuucaccuuucu

SEQ ID NO: 2195872 - RNA, 19 nt, Homo sapiens
  misc_RNA (1)...(19): siRNA sense strand
aaccugagauccagaauaa

SEQ ID NO: 2195873 - RNA, 19 nt, Homo sapiens
  misc_RNA (1)...(19): siRNA sense strand
cggugaagcuuccagaaua

SEQ ID NO: 2195874 - RNA, 19 nt, Homo sapiens
  misc_RNA (1)...(19): siRNA sense strand
cuaaaugggucuacaaauc

SEQ ID NO: 2195875 - RNA, 19 nt, Homo sapiens
  misc_RNA (1)...(19): siRNA sense strand
ggagaaaucaguaagucua

SEQ ID NO: 2195876 - RNA, 19 nt, Homo sapiens
  misc_RNA (1)...(19): siRNA sense strand
ggugaagcuuccagaauaa

SEQ ID NO: 2195877 - RNA, 19 nt, Homo sapiens
  misc_RNA (1)...(19): siRNA sense strand
gagauagccugcccucuuc

SEQ ID NO: 2195878 - RNA, 19 nt, Homo sapiens
  misc_RNA (1)...(19): siRNA sense strand
gaaaugauaccucuucaag

SEQ ID NO: 2195879 - RNA, 19 nt, Homo sapiens
  misc_RNA (1)...(19): siRNA sense strand
gaucaaaauucacccaaua

SEQ ID NO: 2195880 - RNA, 19 nt, Homo sapiens
  misc_RNA (1)...(19): siRNA sense strand
aaagugaugugcagauuga

SEQ ID NO: 2195881 - RNA, 19 nt, Homo sapiens
  misc_RNA (1)...(19): siRNA sense strand
gcaagucaguuggugcuaa

SEQ ID NO: 2195882 - RNA, 19 nt, Homo sapiens
  misc_RNA (1)...(19): siRNA sense strand
ccagcuauaccaucaauua

SEQ ID NO: 2195883 - RNA, 19 nt, Homo sapiens
  misc_RNA (1)...(19): siRNA sense strand
gaaauugaagugugacuau

SEQ ID NO: 2195884 - RNA, 19 nt, Homo sapiens
  misc_RNA (1)...(19): siRNA sense strand
guacauacaucaccacaac

SEQ ID NO: 2195885 - RNA, 19 nt, Homo sapiens
  misc_RNA (1)...(19): siRNA sense strand
gaagaucacacuagcauca

SEQ ID NO: 2195886 - RNA, 19 nt, Homo sapiens
  misc_RNA (1)...(19): siRNA sense strand
gaaacacuguggcuauauc

SEQ ID NO: 2195887 - RNA, 19 nt, Homo sapiens
  misc_RNA (1)...(19): siRNA sense strand
gaacugcaauuaauaugac

SEQ ID NO: 2195888 - RNA, 19 nt, Homo sapiens
  misc_RNA (1)...(19): siRNA sense strand
aaacgacaguccaaacaaa

SEQ ID NO: 2195889 - RNA, 19 nt, Homo sapiens
  misc_RNA (1)...(19): siRNA sense strand
ggaaguuacuggcuuugga

SEQ ID NO: 2195890 - RNA, 19 nt, Homo sapiens
  misc_RNA (1)...(19): siRNA sense strand
gggaaguuauuucaccuuu

SEQ ID NO: 2195891 - RNA, 19 nt, Homo sapiens
  misc_RNA (1)...(19): siRNA sense strand
uaaauacuccagcaucuaa

SEQ ID NO: 2195892 - RNA, 19 nt, Homo sapiens
  misc_RNA (1)...(19): siRNA sense strand
gaacucagggaauuaauca

SEQ ID NO: 2195893 - RNA, 19 nt, Homo sapiens
  misc_RNA (1)...(19): siRNA sense strand
gauugaacccaguccauua

SEQ ID NO: 2195894 - RNA, 19 nt, Homo sapiens
  misc_RNA (1)...(19): siRNA sense strand
ucgcaggccuugugaaauu

SEQ ID NO: 2195895 - RNA, 19 nt, Homo sapiens
  misc_RNA (1)...(19): siRNA sense strand
gugcagauguacggauuua

SEQ ID NO: 2195896 - RNA, 19 nt, Homo sapiens
  misc_RNA (1)...(19): siRNA sense strand
guacggauuuauaaacaga

SEQ ID NO: 2195897 - RNA, 19 nt, Homo sapiens
  misc_RNA (1)...(19): siRNA sense strand
ccaaacccauucaggcuuu

SEQ ID NO: 2195898 - RNA, 19 nt, Homo sapiens
  misc_RNA (1)...(19): siRNA sense strand
gaaagggaccaaacccauu

SEQ ID NO: 2195899 - RNA, 19 nt, Homo sapiens
  misc_RNA (1)...(19): siRNA sense strand
agaaugaacucaaagaucu

SEQ ID NO: 2195900 - RNA, 19 nt, Homo sapiens
  misc_RNA (1)...(19): siRNA sense strand
gcuauaccaucaauuaaca

SEQ ID NO: 2195901 - RNA, 19 nt, Homo sapiens
  misc_RNA (1)...(19): siRNA sense strand
cagaacuacuccuacuaua

SEQ ID NO: 2195902 - RNA, 19 nt, Homo sapiens
  misc_RNA (1)...(19): siRNA sense strand
gcauacagagccaucauuu

SEQ ID NO: 2195903 - RNA, 19 nt, Homo sapiens
  misc_RNA (1)...(19): siRNA sense strand
gaaguugucagaaauagau

SEQ ID NO: 2195904 - RNA, 19 nt, Homo sapiens
  misc_RNA (1)...(19): siRNA sense strand
agaccuaccuuacaucgaa

SEQ ID NO: 2195905 - RNA, 19 nt, Homo sapiens
  misc_RNA (1)...(19): siRNA sense strand
acagaaagguacagaacaa

SEQ ID NO: 2195906 - RNA, 19 nt, Homo sapiens
  misc_RNA (1)...(19): siRNA sense strand
cacaagaaacucaaacuaa

SEQ ID NO: 2195907 - RNA, 19 nt, Homo sapiens
  misc_RNA (1)...(19): siRNA sense strand
auacugaccugcuaggaaa

SEQ ID NO: 2195908 - RNA, 19 nt, Homo sapiens
  misc_RNA (1)...(19): siRNA sense strand
gcaccugguacucagauua

SEQ ID NO: 2195909 - RNA, 19 nt, Homo sapiens
  misc_RNA (1)...(19): siRNA sense strand
ggacuucacuccaguucca

SEQ ID NO: 2195910 - RNA, 19 nt, Homo sapiens
  misc_RNA (1)...(19): siRNA sense strand
uaaaugugcuuucaguuac

SEQ ID NO: 2195911 - RNA, 19 nt, Homo sapiens
  misc_RNA (1)...(19): siRNA sense strand
gcauaucagcagcaaauuu

SEQ ID NO: 2195912 - RNA, 19 nt, Homo sapiens
  misc_RNA (1)...(19): siRNA sense strand
ccuguaaccucuguaagua

SEQ ID NO: 2195913 - RNA, 19 nt, Homo sapiens
  misc_RNA (1)...(19): siRNA sense strand
gggaauaaagugaccuuaa

SEQ ID NO: 2195914 - RNA, 19 nt, Homo sapiens
  misc_RNA (1)...(19): siRNA sense strand
ccaaacaaacugauuaugu

SEQ ID NO: 2195915 - RNA, 19 nt, Homo sapiens
  misc_RNA (1)...(19): siRNA sense strand
agaccuacuuugccuuaua

SEQ ID NO: 2195916 - RNA, 19 nt, Homo sapiens
  misc_RNA (1)...(19): siRNA sense strand
ggaacugcaauuaauauga

SEQ ID NO: 2195917 - RNA, 19 nt, Homo sapiens
  misc_RNA (1)...(19): siRNA sense strand
caaggaagaaggcaaaguu

SEQ ID NO: 2195918 - RNA, 19 nt, Homo sapiens
  misc_RNA (1)...(19): siRNA sense strand
caugacaucucuguugaaa

SEQ ID NO: 2195919 - RNA, 19 nt, Homo sapiens
  misc_RNA (1)...(19): siRNA sense strand
ccugauaacugugcugaaa

SEQ ID NO: 2195920 - RNA, 19 nt, Homo sapiens
  misc_RNA (1)...(19): siRNA sense strand
cauucaaucuacaccaaua

SEQ ID NO: 2195921 - RNA, 19 nt, Homo sapiens
  misc_RNA (1)...(19): siRNA sense strand
ggagccgccugaagaaaga

SEQ ID NO: 2195922 - RNA, 19 nt, Homo sapiens
  misc_RNA (1)...(19): siRNA sense strand
gagaaagcgugaaggucuu

SEQ ID NO: 2195923 - RNA, 19 nt, Homo sapiens
  misc_RNA (1)...(19): siRNA sense strand
ggaaguuauucuugguuau

SEQ ID NO: 2195924 - RNA, 19 nt, Homo sapiens
  misc_RNA (1)...(19): siRNA sense strand
gaagaacagcugagagcaa

SEQ ID NO: 2195925 - RNA, 19 nt, Homo sapiens
  misc_RNA (1)...(19): siRNA sense strand
caaauacagcuuucaacaa

SEQ ID NO: 2195926 - RNA, 19 nt, Homo sapiens
  misc_RNA (1)...(19): siRNA sense strand
gcacaaaugagacaacagu

SEQ ID NO: 2195927 - RNA, 19 nt, Homo sapiens
  misc_RNA (1)...(19): siRNA sense strand
gaggaaaacugucauaaag

SEQ ID NO: 2195928 - RNA, 19 nt, Homo sapiens
  misc_RNA (1)...(19): siRNA sense strand
gcagaagaagcuagucaaa

SEQ ID NO: 2195929 - RNA, 19 nt, Homo sapiens
  misc_RNA (1)...(19): siRNA sense strand
gaggcaagcuguaaaagaa

SEQ ID NO: 2195930 - RNA, 19 nt, Homo sapiens
  misc_RNA (1)...(19): siRNA sense strand
uaaacacaguuccacauuc

SEQ ID NO: 2195931 - RNA, 19 nt, Homo sapiens
  misc_RNA (1)...(19): siRNA sense strand
ccaguagugucuccuaaau

SEQ ID NO: 2195932 - RNA, 19 nt, Homo sapiens
  misc_RNA (1)...(19): siRNA sense strand
cggaaacacuguggcuaua

SEQ ID NO: 2195933 - RNA, 19 nt, Homo sapiens
  misc_RNA (1)...(19): siRNA sense strand
caacuaaacagcaacaagu

SEQ ID NO: 2195934 - RNA, 19 nt, Homo sapiens
  misc_RNA (1)...(19): siRNA sense strand
gaaagugaugugcagauug

SEQ ID NO: 2195935 - RNA, 19 nt, Homo sapiens
  misc_RNA (1)...(19): siRNA sense strand
ggaagaaggcaaaguuaag

SEQ ID NO: 2195936 - RNA, 19 nt, Homo sapiens
  misc_RNA (1)...(19): siRNA sense strand
gaaaucaguaagucuauag

SEQ ID NO: 2195937 - RNA, 19 nt, Homo sapiens
  misc_RNA (1)...(19): siRNA sense strand
caucuaagguuucuucacu

SEQ ID NO: 2195938 - RNA, 19 nt, Homo sapiens
  misc_RNA (1)...(19): siRNA sense strand
gaacaacuacuuccauuaa

SEQ ID NO: 2195939 - RNA, 19 nt, Homo sapiens
  misc_RNA (1)...(19): siRNA sense strand
gaugauggcuggcaauuug

SEQ ID NO: 2195940 - RNA, 19 nt, Homo sapiens
  misc_RNA (1)...(19): siRNA sense strand
gaagacacaaucagacuua

SEQ ID NO: 2195941 - RNA, 19 nt, Homo sapiens
  misc_RNA (1)...(19): siRNA sense strand
caagaugcaucaaauguga

SEQ ID NO: 2195942 - RNA, 19 nt, Homo sapiens
  misc_RNA (1)...(19): siRNA sense strand
gaaaguaaccacccaguug

SEQ ID NO: 2195943 - RNA, 19 nt, Homo sapiens
  misc_RNA (1)...(19): siRNA sense strand
gggaaggguuuguggaaua

SEQ ID NO: 2195944 - RNA, 19 nt, Homo sapiens
  misc_RNA (1)...(19): siRNA sense strand
ggagaugguugccuuaaug

SEQ ID NO: 2195945 - RNA, 19 nt, Homo sapiens
  misc_RNA (1)...(19): siRNA sense strand
gaugugcucucagaaauaa

SEQ ID NO: 2195946 - RNA, 19 nt, Homo sapiens
  misc_RNA (1)...(19): siRNA sense strand
ggaugaaugugauguuuau

SEQ ID NO: 2195947 - RNA, 19 nt, Homo sapiens
  misc_RNA (1)...(19): siRNA sense strand
ccaaauaauuccaaucuuc

SEQ ID NO: 2195948 - RNA, 19 nt, Homo sapiens
  misc_RNA (1)...(19): siRNA sense strand
caaaguccauugaaguuau

SEQ ID NO: 2195949 - RNA, 19 nt, Homo sapiens
  misc_RNA (1)...(19): siRNA sense strand
gcaugaagauaaagaggaa

SEQ ID NO: 2195950 - RNA, 19 nt, Homo sapiens
  misc_RNA (1)...(19): siRNA sense strand
gaacugggaggaauacuga

SEQ ID NO: 2195951 - RNA, 19 nt, Homo sapiens
  misc_RNA (1)...(19): siRNA sense strand
ggacagauggcuacagauu

SEQ ID NO: 2195952 - RNA, 19 nt, Homo sapiens
  misc_RNA (1)...(19): siRNA sense strand
gaggaauacugaaagcaaa

SEQ ID NO: 2195953 - RNA, 19 nt, Homo sapiens
  misc_RNA (1)...(19): siRNA sense strand
uacaggaguugcuaaauuu

SEQ ID NO: 2195954 - RNA, 19 nt, Homo sapiens
  misc_RNA (1)...(19): siRNA sense strand
uuacaggaguugcuaaauu

SEQ ID NO: 2195955 - RNA, 19 nt, Homo sapiens
  misc_RNA (1)...(19): siRNA sense strand
gcaaaguccauugaaguua

SEQ ID NO: 2195956 - RNA, 19 nt, Homo sapiens
  misc_RNA (1)...(19): siRNA sense strand
gaagauuuaugguuggaau

SEQ ID NO: 2195957 - RNA, 19 nt, Homo sapiens
  misc_RNA (1)...(19): siRNA sense strand
gaggaugaaugugauguuu

SEQ ID NO: 2195958 - RNA, 19 nt, Homo sapiens
  misc_RNA (1)...(19): siRNA sense strand
gaugguuccuuuacugaaa

SEQ ID NO: 2195959 - RNA, 19 nt, Homo sapiens
  misc_RNA (1)...(19): siRNA sense strand
ggccaaugcuacuaaauau

SEQ ID NO: 2195960 - RNA, 19 nt, Homo sapiens
  misc_RNA (1)...(19): siRNA sense strand
ggaagaacugggaggaaua

SEQ ID NO: 2195961 - RNA, 19 nt, Homo sapiens
  misc_RNA (1)...(19): siRNA sense strand
gaacuguaucucagcaaua

SEQ ID NO: 2195962 - RNA, 19 nt, Homo sapiens
  misc_RNA (1)...(19): siRNA sense strand
uaaguuggcuuuggaacaa

SEQ ID NO: 2195963 - RNA, 19 nt, Homo sapiens
  misc_RNA (1)...(19): siRNA sense strand
uaagacugcuucagcuaaa

SEQ ID NO: 2195964 - RNA, 19 nt, Homo sapiens
  misc_RNA (1)...(19): siRNA sense strand
ggaaggguuuguggaauau

SEQ ID NO: 2195965 - RNA, 19 nt, Homo sapiens
  misc_RNA (1)...(19): siRNA sense strand
gcacugcaguccaacuuca

SEQ ID NO: 2195966 - RNA, 19 nt, Homo sapiens
  misc_RNA (1)...(19): siRNA sense strand
gaauauacagaacaaguug

SEQ ID NO: 2195967 - RNA, 19 nt, Homo sapiens
  misc_RNA (1)...(19): siRNA sense strand
ccaaacgccuagcuaaugu

SEQ ID NO: 2195968 - RNA, 19 nt, Homo sapiens
  misc_RNA (1)...(19): siRNA sense strand
gggaagauuuugaaguuua

SEQ ID NO: 2195969 - RNA, 19 nt, Homo sapiens
  misc_RNA (1)...(19): siRNA sense strand
caacuacuuccauuaauug

SEQ ID NO: 2195970 - RNA, 19 nt, Homo sapiens
  misc_RNA (1)...(19): siRNA sense strand
caaaugugaugcagcuguu

SEQ ID NO: 2195971 - RNA, 19 nt, Homo sapiens
  misc_RNA (1)...(19): siRNA sense strand
aaacuaugaucaacagguu

SEQ ID NO: 2195972 - RNA, 19 nt, Homo sapiens
  misc_RNA (1)...(19): siRNA sense strand
ggaauauacagaacaaguu

SEQ ID NO: 2195973 - RNA, 19 nt, Homo sapiens
  misc_RNA (1)...(19): siRNA sense strand
cagcagaguuuuggaauua

SEQ ID NO: 2195974 - RNA, 19 nt, Homo sapiens
  misc_RNA (1)...(19): siRNA sense strand
guacugaaccagauacaga

SEQ ID NO: 2195975 - RNA, 19 nt, Homo sapiens
  misc_RNA (1)...(19): siRNA sense strand
gcagauacaauagaagaaa

SEQ ID NO: 2195976 - RNA, 19 nt, Homo sapiens
  misc_RNA (1)...(19): siRNA sense strand
uuacuaugcuaaggaguua

SEQ ID NO: 2195977 - RNA, 19 nt, Homo sapiens
  misc_RNA (1)...(19): siRNA sense strand
agacugcccuaaaucauug

SEQ ID NO: 2195978 - RNA, 19 nt, Homo sapiens
  misc_RNA (1)...(19): siRNA sense strand
auacagaugugcucucaga

SEQ ID NO: 2195979 - RNA, 19 nt, Homo sapiens
  misc_RNA (1)...(19): siRNA sense strand
ugaugcagcuguuguugaa

SEQ ID NO: 2195980 - RNA, 19 nt, Homo sapiens
  misc_RNA (1)...(19): siRNA sense strand
ucagaccucuuacaugguu

SEQ ID NO: 2195981 - RNA, 19 nt, Homo sapiens
  misc_RNA (1)...(19): siRNA sense strand
gcaguccaacuucauuuaa

SEQ ID NO: 2195982 - RNA, 19 nt, Homo sapiens
  misc_RNA (1)...(19): siRNA sense strand
cagaugugcucucagaaau

SEQ ID NO: 2195983 - RNA, 19 nt, Homo sapiens
  misc_RNA (1)...(19): siRNA sense strand
ggaguuaagggaaggguuu

SEQ ID NO: 2195984 - RNA, 19 nt, Homo sapiens
  misc_RNA (1)...(19): siRNA sense strand
gcaaucacaugcagcuucu

SEQ ID NO: 2195985 - RNA, 19 nt, Homo sapiens
  misc_RNA (1)...(19): siRNA sense strand
aggaagcuauucagacuuu

SEQ ID NO: 2195986 - RNA, 19 nt, Homo sapiens
  misc_RNA (1)...(19): siRNA sense strand
ggaggaauacugaaagcaa

SEQ ID NO: 2195987 - RNA, 19 nt, Homo sapiens
  misc_RNA (1)...(19): siRNA sense strand
ugacaaccauugcaucagu

SEQ ID NO: 2195988 - RNA, 19 nt, Homo sapiens
  misc_RNA (1)...(19): siRNA sense strand
ggagaugauuaucguucuu

SEQ ID NO: 2195989 - RNA, 19 nt, Homo sapiens
  misc_RNA (1)...(19): siRNA sense strand
gauugugcauauuugauga

SEQ ID NO: 2195990 - RNA, 19 nt, Homo sapiens
  misc_RNA (1)...(19): siRNA sense strand
guacuacacuuggacagau

SEQ ID NO: 2195991 - RNA, 19 nt, Homo sapiens
  misc_RNA (1)...(19): siRNA sense strand
guuaucgagccucuuauua

SEQ ID NO: 2195992 - RNA, 19 nt, Homo sapiens
  misc_RNA (1)...(19): siRNA sense strand
gccuaacuguguaaaugua

SEQ ID NO: 2195993 - RNA, 19 nt, Homo sapiens
  misc_RNA (1)...(19): siRNA sense strand
gauaacaacccugaaguca

SEQ ID NO: 2195994 - RNA, 19 nt, Homo sapiens
  misc_RNA (1)...(19): siRNA sense strand
ccuggaaugugcaagaauu

SEQ ID NO: 2195995 - RNA, 19 nt, Homo sapiens
  misc_RNA (1)...(19): siRNA sense strand
cagcagaguccaugccuuu

SEQ ID NO: 2195996 - RNA, 19 nt, Homo sapiens
  misc_RNA (1)...(19): siRNA sense strand
gaagauaaagaggaagcua

SEQ ID NO: 2195997 - RNA, 19 nt, Homo sapiens
  misc_RNA (1)...(19): siRNA sense strand
uaaccacccaguuguaauu

SEQ ID NO: 2195998 - RNA, 19 nt, Homo sapiens
  misc_RNA (1)...(19): siRNA sense strand
gcaagaugcaucaaaugug

SEQ ID NO: 2195999 - RNA, 19 nt, Homo sapiens
  misc_RNA (1)...(19): siRNA sense strand
gcaagaugaggaugaaugu

SEQ ID NO: 2196000 - RNA, 19 nt, Homo sapiens
  misc_RNA (1)...(19): siRNA sense strand
agaugucucugcaagauga

SEQ ID NO: 2196001 - RNA, 19 nt, Homo sapiens
  misc_RNA (1)...(19): siRNA sense strand
aaacuugaagggcacuuua

SEQ ID NO: 2196002 - RNA, 19 nt, Homo sapiens
  misc_RNA (1)...(19): siRNA sense strand
aaaucuacauuccgucuug

SEQ ID NO: 2196003 - RNA, 19 nt, Homo sapiens
  misc_RNA (1)...(19): siRNA sense strand
gaagcuauucagacuuuga

SEQ ID NO: 2196004 - RNA, 19 nt, Homo sapiens
  misc_RNA (1)...(19): siRNA sense strand
guaaucagcgugugcaauc

SEQ ID NO: 2196005 - RNA, 19 nt, Homo sapiens
  misc_RNA (1)...(19): siRNA sense strand
ucaaggcuauugguacuga

SEQ ID NO: 2196006 - RNA, 19 nt, Homo sapiens
  misc_RNA (1)...(19): siRNA sense strand
gcugaugguuccuuuacug

SEQ ID NO: 2196007 - RNA, 19 nt, Homo sapiens
  misc_RNA (1)...(19): siRNA sense strand
ugaagcugaugguuccuuu

SEQ ID NO: 2196008 - RNA, 19 nt, Homo sapiens
  misc_RNA (1)...(19): siRNA sense strand
gacacaaucagacuuaaau

SEQ ID NO: 2196009 - RNA, 19 nt, Homo sapiens
  misc_RNA (1)...(19): siRNA sense strand
ugaacaacuacuuccauua

SEQ ID NO: 2196010 - RNA, 19 nt, Homo sapiens
  misc_RNA (1)...(19): siRNA sense strand
gcaccuaauuuccaaaaga

SEQ ID NO: 2196011 - RNA, 19 nt, Homo sapiens
  misc_RNA (1)...(19): siRNA sense strand
gaugguugccuuaaugaug

SEQ ID NO: 2196012 - RNA, 19 nt, Homo sapiens
  misc_RNA (1)...(19): siRNA sense strand
gggagaugguugccuuaau

SEQ ID NO: 2196013 - RNA, 19 nt, Homo sapiens
  misc_RNA (1)...(19): siRNA sense strand
gacagauggcuacagauuu

SEQ ID NO: 2196014 - RNA, 19 nt, Homo sapiens
  misc_RNA (1)...(19): siRNA sense strand
gaagcugaugguuccuuua

SEQ ID NO: 2196015 - RNA, 19 nt, Homo sapiens
  misc_RNA (1)...(19): siRNA sense strand
gaugaacacuuggaagaac

SEQ ID NO: 2196016 - RNA, 19 nt, Homo sapiens
  misc_RNA (1)...(19): siRNA sense strand
caguauaauugcagaagga

SEQ ID NO: 2196017 - RNA, 19 nt, Homo sapiens
  misc_RNA (1)...(19): siRNA sense strand
cuacuaaauaugcgagaua

SEQ ID NO: 2196018 - RNA, 19 nt, Homo sapiens
  misc_RNA (1)...(19): siRNA sense strand
caguccaacuucauuuaaa

SEQ ID NO: 2196019 - RNA, 19 nt, Homo sapiens
  misc_RNA (1)...(19): siRNA sense strand
gacaaccauugcaucaguu

SEQ ID NO: 2196020 - RNA, 19 nt, Homo sapiens
  misc_RNA (1)...(19): siRNA sense strand
guuuaagccuaacugugua

SEQ ID NO: 2196021 - RNA, 19 nt, Homo sapiens
  misc_RNA (1)...(19): siRNA sense strand
gaaguuaugggagaugguu

SEQ ID NO: 2196022 - RNA, 19 nt, Homo sapiens
  misc_RNA (1)...(19): siRNA sense strand
gaagacugcccuaaaucau

SEQ ID NO: 2196023 - RNA, 19 nt, Homo sapiens
  misc_RNA (1)...(19): siRNA sense strand
uuaucgagccucuuauuaa

SEQ ID NO: 2196024 - RNA, 19 nt, Homo sapiens
  misc_RNA (1)...(19): siRNA sense strand
ucacuaaagcacauuguug

SEQ ID NO: 2196025 - RNA, 19 nt, Homo sapiens
  misc_RNA (1)...(19): siRNA sense strand
gagaugguugccuuaauga

SEQ ID NO: 2196026 - RNA, 19 nt, Homo sapiens
  misc_RNA (1)...(19): siRNA sense strand
aagccuaacuguguaaaug

SEQ ID NO: 2196027 - RNA, 19 nt, Homo sapiens
  misc_RNA (1)...(19): siRNA sense strand
gagaugauuaucguucuuu

SEQ ID NO: 2196028 - RNA, 19 nt, Homo sapiens
  misc_RNA (1)...(19): siRNA sense strand
uggccaaugcuacuaaaua

SEQ ID NO: 2196029 - RNA, 19 nt, Homo sapiens
  misc_RNA (1)...(19): siRNA sense strand
gccaaacgccuagcuaaug

SEQ ID NO: 2196030 - RNA, 19 nt, Homo sapiens
  misc_RNA (1)...(19): siRNA sense strand
ugaggauccuugugccaaa

SEQ ID NO: 2196031 - RNA, 19 nt, Homo sapiens
  misc_RNA (1)...(19): siRNA sense strand
acagauggcuacagauuuu

SEQ ID NO: 2196032 - RNA, 19 nt, Homo sapiens
  misc_RNA (1)...(19): siRNA sense strand
ccuaaaucauugcuaguuc

SEQ ID NO: 2196033 - RNA, 19 nt, Homo sapiens
  misc_RNA (1)...(19): siRNA sense strand
acagauguggcaauucaua

SEQ ID NO: 2196034 - RNA, 19 nt, Homo sapiens
  misc_RNA (1)...(19): siRNA sense strand
uaauuccaaucuucccaaa

SEQ ID NO: 2196035 - RNA, 19 nt, Homo sapiens
  misc_RNA (1)...(19): siRNA sense strand
cuauucagacuuugaguuu

SEQ ID NO: 2196036 - RNA, 19 nt, Homo sapiens
  misc_RNA (1)...(19): siRNA sense strand
agaggaagcuauucagacu

SEQ ID NO: 2196037 - RNA, 19 nt, Homo sapiens
  misc_RNA (1)...(19): siRNA sense strand
ggauugugcauauuugaug

SEQ ID NO: 2196038 - RNA, 19 nt, Homo sapiens
  misc_RNA (1)...(19): siRNA sense strand
ggaagaggguuaucugguu

SEQ ID NO: 2196039 - RNA, 19 nt, Homo sapiens
  misc_RNA (1)...(19): siRNA sense strand
gaagaggguuaucugguuu

SEQ ID NO: 2196040 - RNA, 19 nt, Homo sapiens
  misc_RNA (1)...(19): siRNA sense strand
ccaaaucccaucagcuuua

SEQ ID NO: 2196041 - RNA, 19 nt, Homo sapiens
  misc_RNA (1)...(19): siRNA sense strand
gaaccuagcaaacucagaa

SEQ ID NO: 2196042 - RNA, 19 nt, Homo sapiens
  misc_RNA (1)...(19): siRNA sense strand
cauuaaggcuggcauauuc

SEQ ID NO: 2196043 - RNA, 19 nt, Homo sapiens
  misc_RNA (1)...(19): siRNA sense strand
caaaguaucgggucaucua

SEQ ID NO: 2196044 - RNA, 19 nt, Homo sapiens
  misc_RNA (1)...(19): siRNA sense strand
guagguaucaguccauuaa

SEQ ID NO: 2196045 - RNA, 19 nt, Homo sapiens
  misc_RNA (1)...(19): siRNA sense strand
aaacacagccuuucagaga

SEQ ID NO: 2196046 - RNA, 19 nt, Homo sapiens
  misc_RNA (1)...(19): siRNA sense strand
ccaacaagccugauaguau

SEQ ID NO: 2196047 - RNA, 19 nt, Homo sapiens
  misc_RNA (1)...(19): siRNA sense strand
aagaagaacugaucuccaa

SEQ ID NO: 2196048 - RNA, 19 nt, Homo sapiens
  misc_RNA (1)...(19): siRNA sense strand
ucagagagcuucaaguuuu

SEQ ID NO: 2196049 - RNA, 19 nt, Homo sapiens
  misc_RNA (1)...(19): siRNA sense strand
cggcguaaauccuagagua

SEQ ID NO: 2196050 - RNA, 19 nt, Homo sapiens
  misc_RNA (1)...(19): siRNA sense strand
gaaagugaaugggucaaag

SEQ ID NO: 2196051 - RNA, 19 nt, Homo sapiens
  misc_RNA (1)...(19): siRNA sense strand
gaucuggaaucaggaaaug

SEQ ID NO: 2196052 - RNA, 19 nt, Homo sapiens
  misc_RNA (1)...(19): siRNA sense strand
guaaagacucaauaacuug

SEQ ID NO: 2196053 - RNA, 19 nt, Homo sapiens
  misc_RNA (1)...(19): siRNA sense strand
aaacuacuucugcuucuua

SEQ ID NO: 2196054 - RNA, 19 nt, Homo sapiens
  misc_RNA (1)...(19): siRNA sense strand
gugaaugggucaaagacuu

SEQ ID NO: 2196055 - RNA, 19 nt, Homo sapiens
  misc_RNA (1)...(19): siRNA sense strand
cuuccuaccuuuccaguaa

SEQ ID NO: 2196056 - RNA, 19 nt, Homo sapiens
  misc_RNA (1)...(19): siRNA sense strand
gaagaacugaucuccaaau

SEQ ID NO: 2196057 - RNA, 19 nt, Homo sapiens
  misc_RNA (1)...(19): siRNA sense strand
gguaauaaaucagcuuucu

SEQ ID NO: 2196058 - RNA, 19 nt, Homo sapiens
  misc_RNA (1)...(19): siRNA sense strand
aguaucgggucaucuauuu

SEQ ID NO: 2196059 - RNA, 19 nt, Homo sapiens
  misc_RNA (1)...(19): siRNA sense strand
uaccuaggaucaucuucua

SEQ ID NO: 2196060 - RNA, 19 nt, Homo sapiens
  misc_RNA (1)...(19): siRNA sense strand
gaucaucuucuaggucuaa

SEQ ID NO: 2196061 - RNA, 19 nt, Homo sapiens
  misc_RNA (1)...(19): siRNA sense strand
gaacacaagccagacaaca

SEQ ID NO: 2196062 - RNA, 19 nt, Homo sapiens
  misc_RNA (1)...(19): siRNA sense strand
ggaacucuagguaauaaau

SEQ ID NO: 2196063 - RNA, 19 nt, Homo sapiens
  misc_RNA (1)...(19): siRNA sense strand
ggaaucaggaaaugaaagu

SEQ ID NO: 2196064 - RNA, 19 nt, Homo sapiens
  misc_RNA (1)...(19): siRNA sense strand
uuucagggaugauuagaga

SEQ ID NO: 2196065 - RNA, 19 nt, Homo sapiens
  misc_RNA (1)...(19): siRNA sense strand
guaccaaccuuaccuuuuc

SEQ ID NO: 2196066 - RNA, 19 nt, Homo sapiens
  misc_RNA (1)...(19): siRNA sense strand
ggaggugauucaagucucu

SEQ ID NO: 2196067 - RNA, 19 nt, Homo sapiens
  misc_RNA (1)...(19): siRNA sense strand
gaguagguaucaguccauu

SEQ ID NO: 2196068 - RNA, 19 nt, Homo sapiens
  misc_RNA (1)...(19): siRNA sense strand
gaauggacaagaagaacug

SEQ ID NO: 2196069 - RNA, 19 nt, Homo sapiens
  misc_RNA (1)...(19): siRNA sense strand
agacuguacuucagaccaa

SEQ ID NO: 2196070 - RNA, 19 nt, Homo sapiens
  misc_RNA (1)...(19): siRNA sense strand
gagaguaaaugugagucau

SEQ ID NO: 2196071 - RNA, 19 nt, Homo sapiens
  misc_RNA (1)...(19): siRNA sense strand
caaacuacuucugcuucuu

SEQ ID NO: 2196072 - RNA, 19 nt, Homo sapiens
  misc_RNA (1)...(19): siRNA sense strand
aaacucagaagaacuggaa

SEQ ID NO: 2196073 - RNA, 19 nt, Homo sapiens
  misc_RNA (1)...(19): siRNA sense strand
gcaaucaggaggugaagag

SEQ ID NO: 2196074 - RNA, 19 nt, Homo sapiens
  misc_RNA (1)...(19): siRNA sense strand
gaacucuagguaauaaauc

SEQ ID NO: 2196075 - RNA, 19 nt, Homo sapiens
  misc_RNA (1)...(19): siRNA sense strand
gcaggaagaggguuaucug

SEQ ID NO: 2196076 - RNA, 19 nt, Homo sapiens
  misc_RNA (1)...(19): siRNA sense strand
gagagucccagguccuuau

SEQ ID NO: 2196077 - RNA, 19 nt, Homo sapiens
  misc_RNA (1)...(19): siRNA sense strand
uagagauucuuccuaccuu

SEQ ID NO: 2196078 - RNA, 19 nt, Homo sapiens
  misc_RNA (1)...(19): siRNA sense strand
ccaagccauugaacagguu

SEQ ID NO: 2196079 - RNA, 19 nt, Homo sapiens
  misc_RNA (1)...(19): siRNA sense strand
caacaggaaccuagcaaac

SEQ ID NO: 2196080 - RNA, 19 nt, Homo sapiens
  misc_RNA (1)...(19): siRNA sense strand
uuggaacucuagguaauaa

SEQ ID NO: 2196081 - RNA, 19 nt, Homo sapiens
  misc_RNA (1)...(19): siRNA sense strand
cagagagcuucaaguuuua

SEQ ID NO: 2196082 - RNA, 19 nt, Homo sapiens
  misc_RNA (1)...(19): siRNA sense strand
cgggucaucuauuucagaa

SEQ ID NO: 2196083 - RNA, 19 nt, Homo sapiens
  misc_RNA (1)...(19): siRNA sense strand
agagauucuuccuaccuuu

SEQ ID NO: 2196084 - RNA, 19 nt, Homo sapiens
  misc_RNA (1)...(19): siRNA sense strand
ucagggaugauuagagauu

SEQ ID NO: 2196085 - RNA, 19 nt, Homo sapiens
  misc_RNA (1)...(19): siRNA sense strand
uuauggaggugauucaagu

SEQ ID NO: 2196086 - RNA, 19 nt, Homo sapiens
  misc_RNA (1)...(19): siRNA sense strand
ccagaauggacaagaagaa

SEQ ID NO: 2196087 - RNA, 19 nt, Homo sapiens
  misc_RNA (1)...(19): siRNA sense strand
aagaacugaucuccaaauc

SEQ ID NO: 2196088 - RNA, 19 nt, Homo sapiens
  misc_RNA (1)...(19): siRNA sense strand
gaccaaaucaggacaaucc

SEQ ID NO: 2196089 - RNA, 19 nt, Homo sapiens
  misc_RNA (1)...(19): siRNA sense strand
ggacaagaagaacugaucu

SEQ ID NO: 2196090 - RNA, 19 nt, Homo sapiens
  misc_RNA (1)...(19): siRNA sense strand
ucaaacuacuucugcuucu

SEQ ID NO: 2196091 - RNA, 19 nt, Homo sapiens
  misc_RNA (1)...(19): siRNA sense strand
caaaucccaucagcuuuac

SEQ ID NO: 2196092 - RNA, 19 nt, Homo sapiens
  misc_RNA (1)...(19): siRNA sense strand
caguaaagacucaauaacu

SEQ ID NO: 2196093 - RNA, 19 nt, Homo sapiens
  misc_RNA (1)...(19): siRNA sense strand
ccauuaaggcuggcauauu

SEQ ID NO: 2196094 - RNA, 19 nt, Homo sapiens
  misc_RNA (1)...(19): siRNA sense strand
uuucagagagcuucaaguu

SEQ ID NO: 2196095 - RNA, 19 nt, Homo sapiens
  misc_RNA (1)...(19): siRNA sense strand
acaggaaccuagcaaacuc

SEQ ID NO: 2196096 - RNA, 19 nt, Homo sapiens
  misc_RNA (1)...(19): siRNA sense strand
cucuugauauccuuacuaa

SEQ ID NO: 2196097 - RNA, 19 nt, Homo sapiens
  misc_RNA (1)...(19): siRNA sense strand
gagauccucuugauauccu

SEQ ID NO: 2196098 - RNA, 19 nt, Homo sapiens
  misc_RNA (1)...(19): siRNA sense strand
ggaugugguccaagccauu

SEQ ID NO: 2196099 - RNA, 19 nt, Homo sapiens
  misc_RNA (1)...(19): siRNA sense strand
gguuuuaaauggcaaagaa

SEQ ID NO: 2196100 - RNA, 19 nt, Homo sapiens
  misc_RNA (1)...(19): siRNA sense strand
aaucaggaaaugaaaguga

SEQ ID NO: 2196101 - RNA, 19 nt, Homo sapiens
  misc_RNA (1)...(19): siRNA sense strand
gcauauucuucugcaggaa

SEQ ID NO: 2196102 - RNA, 19 nt, Homo sapiens
  misc_RNA (1)...(19): siRNA sense strand
ucagcuuucucuccucuuc

SEQ ID NO: 2196103 - RNA, 19 nt, Homo sapiens
  misc_RNA (1)...(19): siRNA sense strand
ugaaugggucaaagacuug

SEQ ID NO: 2196104 - RNA, 19 nt, Homo sapiens
  misc_RNA (1)...(19): siRNA sense strand
aaagugaaugggucaaaga

SEQ ID NO: 2196105 - RNA, 19 nt, Homo sapiens
  misc_RNA (1)...(19): siRNA sense strand
gauccucuugauauccuua

SEQ ID NO: 2196106 - RNA, 19 nt, Homo sapiens
  misc_RNA (1)...(19): siRNA sense strand
gagauucuuccuaccuuuc

SEQ ID NO: 2196107 - RNA, 19 nt, Homo sapiens
  misc_RNA (1)...(19): siRNA sense strand
ggccagcuuuggauuaugc

SEQ ID NO: 2196108 - RNA, 19 nt, Homo sapiens
  misc_RNA (1)...(19): siRNA sense strand
ccuagcaaacucagaagaa

SEQ ID NO: 2196109 - RNA, 19 nt, Homo sapiens
  misc_RNA (1)...(19): siRNA sense strand
caucagcuuuaccuaggau

SEQ ID NO: 2196110 - RNA, 19 nt, Homo sapiens
  misc_RNA (1)...(19): siRNA sense strand
acaguguccucaagaccaa

SEQ ID NO: 2196111 - RNA, 19 nt, Homo sapiens
  misc_RNA (1)...(19): siRNA sense strand
gucauugggaaacaaagua

SEQ ID NO: 2196112 - RNA, 19 nt, Homo sapiens
  misc_RNA (1)...(19): siRNA sense strand
cuacuucugcuucuuaugg

SEQ ID NO: 2196113 - RNA, 19 nt, Homo sapiens
  misc_RNA (1)...(19): siRNA sense strand
uaucgggucaucuauuuca

SEQ ID NO: 2196114 - RNA, 19 nt, Homo sapiens
  misc_RNA (1)...(19): siRNA sense strand
ugaaagugaaugggucaaa

SEQ ID NO: 2196115 - RNA, 19 nt, Homo sapiens
  misc_RNA (1)...(19): siRNA sense strand
ucucuccucuucaaacuac

SEQ ID NO: 2196116 - RNA, 19 nt, Homo sapiens
  misc_RNA (1)...(19): siRNA sense strand
gaugugguccaagccauug

SEQ ID NO: 2196117 - RNA, 19 nt, Homo sapiens
  misc_RNA (1)...(19): siRNA sense strand
gcaagccuuccgacagugu

SEQ ID NO: 2196118 - RNA, 19 nt, Homo sapiens
  misc_RNA (1)...(19): siRNA sense strand
gacuguacuucagaccaaa

SEQ ID NO: 2196119 - RNA, 19 nt, Homo sapiens
  misc_RNA (1)...(19): siRNA sense strand
cagggaugauuagagauuc

SEQ ID NO: 2196120 - RNA, 19 nt, Homo sapiens
  misc_RNA (1)...(19): siRNA sense strand
uaugucacccuaccuaaca

SEQ ID NO: 2196121 - RNA, 19 nt, Homo sapiens
  misc_RNA (1)...(19): siRNA sense strand
cagaagaacuggaaaacac

SEQ ID NO: 2196122 - RNA, 19 nt, Homo sapiens
  misc_RNA (1)...(19): siRNA sense strand
gacaacaggaaccuagcaa

SEQ ID NO: 2196123 - RNA, 19 nt, Homo sapiens
  misc_RNA (1)...(19): siRNA sense strand
gguccaagccauugaacag

SEQ ID NO: 2196124 - RNA, 19 nt, Homo sapiens
  misc_RNA (1)...(19): siRNA sense strand
gaaggcauucuacgguucu

SEQ ID NO: 2196125 - RNA, 19 nt, Homo sapiens
  misc_RNA (1)...(19): siRNA sense strand
uccaguaaagacucaauaa

SEQ ID NO: 2196126 - RNA, 19 nt, Homo sapiens
  misc_RNA (1)...(19): siRNA sense strand
uaacuuguggcagacugua

SEQ ID NO: 2196127 - RNA, 19 nt, Homo sapiens
  misc_RNA (1)...(19): siRNA sense strand
gaaguuuuccagcaagauu

SEQ ID NO: 2196128 - RNA, 19 nt, Homo sapiens
  misc_RNA (1)...(19): siRNA sense strand
ggaucaucuucuaggucua

SEQ ID NO: 2196129 - RNA, 19 nt, Homo sapiens
  misc_RNA (1)...(19): siRNA sense strand
aaagagaguaaaugugagu

SEQ ID NO: 2196130 - RNA, 19 nt, Homo sapiens
  misc_RNA (1)...(19): siRNA sense strand
acaccuggguuaguaccaa

SEQ ID NO: 2196131 - RNA, 19 nt, Homo sapiens
  misc_RNA (1)...(19): siRNA sense strand
gcagagaccgaggcguuag

SEQ ID NO: 2196132 - RNA, 19 nt, Homo sapiens
  misc_RNA (1)...(19): siRNA sense strand
uaaauggcaaagaacacaa

SEQ ID NO: 2196133 - RNA, 19 nt, Homo sapiens
  misc_RNA (1)...(19): siRNA sense strand
ucuggaaucaggaaaugaa

SEQ ID NO: 2196134 - RNA, 19 nt, Homo sapiens
  misc_RNA (1)...(19): siRNA sense strand
ucggccagcuuuggauuau

SEQ ID NO: 2196135 - RNA, 19 nt, Homo sapiens
  misc_RNA (1)...(19): siRNA sense strand
cagaccaaaucaggacaau

SEQ ID NO: 2196136 - RNA, 19 nt, Homo sapiens
  misc_RNA (1)...(19): siRNA sense strand
cuagcaaacucagaagaac

SEQ ID NO: 2196137 - RNA, 19 nt, Homo sapiens
  misc_RNA (1)...(19): siRNA sense strand
guaauaaaucagcuuucuc

SEQ ID NO: 2196138 - RNA, 19 nt, Homo sapiens
  misc_RNA (1)...(19): siRNA sense strand
gaacagcaguggucaugga

SEQ ID NO: 2196139 - RNA, 19 nt, Homo sapiens
  misc_RNA (1)...(19): siRNA sense strand
gaagaagaaacaacuacua

SEQ ID NO: 2196140 - RNA, 19 nt, Homo sapiens
  misc_RNA (1)...(19): siRNA sense strand
ugaggcaucugaguuauaa

SEQ ID NO: 2196141 - RNA, 19 nt, Homo sapiens
  misc_RNA (1)...(19): siRNA sense strand
gagaagaucaggcacaaga

SEQ ID NO: 2196142 - RNA, 19 nt, Homo sapiens
  misc_RNA (1)...(19): siRNA sense strand
cuaaugugcuaccuuuaaa

SEQ ID NO: 2196143 - RNA, 19 nt, Homo sapiens
  misc_RNA (1)...(19): siRNA sense strand
ccacaacugaccugaauuu

SEQ ID NO: 2196144 - RNA, 19 nt, Homo sapiens
  misc_RNA (1)...(19): siRNA sense strand
ccaauuaugcuccugcuaa

SEQ ID NO: 2196145 - RNA, 19 nt, Homo sapiens
  misc_RNA (1)...(19): siRNA sense strand
gcacugagucugaaauauc

SEQ ID NO: 2196146 - RNA, 19 nt, Homo sapiens
  misc_RNA (1)...(19): siRNA sense strand
gauaaugagaugcaugaaa

SEQ ID NO: 2196147 - RNA, 19 nt, Homo sapiens
  misc_RNA (1)...(19): siRNA sense strand
caaugcaacuacauaugaa

SEQ ID NO: 2196148 - RNA, 19 nt, Homo sapiens
  misc_RNA (1)...(19): siRNA sense strand
gcagagagcagcacauuuu

SEQ ID NO: 2196149 - RNA, 19 nt, Homo sapiens
  misc_RNA (1)...(19): siRNA sense strand
gaagaucauacucccaauu

SEQ ID NO: 2196150 - RNA, 19 nt, Homo sapiens
  misc_RNA (1)...(19): siRNA sense strand
gguaccacuucuucagaua

SEQ ID NO: 2196151 - RNA, 19 nt, Homo sapiens
  misc_RNA (1)...(19): siRNA sense strand
aagaucauacucccaauua

SEQ ID NO: 2196152 - RNA, 19 nt, Homo sapiens
  misc_RNA (1)...(19): siRNA sense strand
ucaaugcaacuacauauga

SEQ ID NO: 2196153 - RNA, 19 nt, Homo sapiens
  misc_RNA (1)...(19): siRNA sense strand
caaauggcacugagucuga

SEQ ID NO: 2196154 - RNA, 19 nt, Homo sapiens
  misc_RNA (1)...(19): siRNA sense strand
acaagaacaucagaaucua

SEQ ID NO: 2196155 - RNA, 19 nt, Homo sapiens
  misc_RNA (1)...(19): siRNA sense strand
uagcgaacccucucauaaa

SEQ ID NO: 2196156 - RNA, 19 nt, Homo sapiens
  misc_RNA (1)...(19): siRNA sense strand
caagaacaucagaaucuaa

SEQ ID NO: 2196157 - RNA, 19 nt, Homo sapiens
  misc_RNA (1)...(19): siRNA sense strand
cugggaaucucguugauga

SEQ ID NO: 2196158 - RNA, 19 nt, Homo sapiens
  misc_RNA (1)...(19): siRNA sense strand
ugacggauaucauuuccau

SEQ ID NO: 2196159 - RNA, 19 nt, Homo sapiens
  misc_RNA (1)...(19): siRNA sense strand
cagaagguguuucagauac

SEQ ID NO: 2196160 - RNA, 19 nt, Homo sapiens
  misc_RNA (1)...(19): siRNA sense strand
gcacuuugaagccuacuau

SEQ ID NO: 2196161 - RNA, 19 nt, Homo sapiens
  misc_RNA (1)...(19): siRNA sense strand
ccuaaugugcuaccuuuaa

SEQ ID NO: 2196162 - RNA, 19 nt, Homo sapiens
  misc_RNA (1)...(19): siRNA sense strand
gcacaagaacaucagaauc

SEQ ID NO: 2196163 - RNA, 19 nt, Homo sapiens
  misc_RNA (1)...(19): siRNA sense strand
ucagaagguguuucagaua

SEQ ID NO: 2196164 - RNA, 19 nt, Homo sapiens
  misc_RNA (1)...(19): siRNA sense strand
cuaagauaaugacggauau

SEQ ID NO: 2196165 - RNA, 19 nt, Homo sapiens
  misc_RNA (1)...(19): siRNA sense strand
cuagcgaacccucucauaa

SEQ ID NO: 2196166 - RNA, 19 nt, Homo sapiens
  misc_RNA (1)...(19): siRNA sense strand
ugugcuaccuuuaaaugaa

SEQ ID NO: 2196167 - RNA, 19 nt, Homo sapiens
  misc_RNA (1)...(19): siRNA sense strand
gaagguguuucagauacau

SEQ ID NO: 2196168 - RNA, 19 nt, Homo sapiens
  misc_RNA (1)...(19): siRNA sense strand
ggacaauguuagcuaaagc

SEQ ID NO: 2196169 - RNA, 19 nt, Homo sapiens
  misc_RNA (1)...(19): siRNA sense strand
cagauaaugagaugcauga

SEQ ID NO: 2196170 - RNA, 19 nt, Homo sapiens
  misc_RNA (1)...(19): siRNA sense strand
caacugaccugaauuuugc

SEQ ID NO: 2196171 - RNA, 19 nt, Homo sapiens
  misc_RNA (1)...(19): siRNA sense strand
ucuaagauaaugacggaua

SEQ ID NO: 2196172 - RNA, 19 nt, Homo sapiens
  misc_RNA (1)...(19): siRNA sense strand
caucagaagguguuucaga

SEQ ID NO: 2196173 - RNA, 19 nt, Homo sapiens
  misc_RNA (1)...(19): siRNA sense strand
ugccuaaugugcuaccuuu

SEQ ID NO: 2196174 - RNA, 19 nt, Homo sapiens
  misc_RNA (1)...(19): siRNA sense strand
cacaagaacaucagaaucu

SEQ ID NO: 2196175 - RNA, 19 nt, Homo sapiens
  misc_RNA (1)...(19): siRNA sense strand
gccacgaugucuuacuuuc

SEQ ID NO: 2196176 - RNA, 19 nt, Homo sapiens
  misc_RNA (1)...(19): siRNA sense strand
uccauaggcucagauaaug

SEQ ID NO: 2196177 - RNA, 19 nt, Homo sapiens
  misc_RNA (1)...(19): siRNA sense strand
uuacuuucauccaucagaa

SEQ ID NO: 2196178 - RNA, 19 nt, Homo sapiens
  misc_RNA (1)...(19): siRNA sense strand
gaagccuacuauugaagca

SEQ ID NO: 2196179 - RNA, 19 nt, Homo sapiens
  misc_RNA (1)...(19): siRNA sense strand
gaagaucaggcacaagaac

SEQ ID NO: 2196180 - RNA, 19 nt, Homo sapiens
  misc_RNA (1)...(19): siRNA sense strand
cacgaugucuuacuuucau

SEQ ID NO: 2196181 - RNA, 19 nt, Homo sapiens
  misc_RNA (1)...(19): siRNA sense strand
gcuaaagcuauaaauggaa

SEQ ID NO: 2196182 - RNA, 19 nt, Homo sapiens
  misc_RNA (1)...(19): siRNA sense strand
ggguaccacuucuucagau

SEQ ID NO: 2196183 - RNA, 19 nt, Homo sapiens
  misc_RNA (1)...(19): siRNA sense strand
gaugacccuccuccucuuu

SEQ ID NO: 2196184 - RNA, 19 nt, Homo sapiens
  misc_RNA (1)...(19): siRNA sense strand
cuuugaagccuacuauuga

SEQ ID NO: 2196185 - RNA, 19 nt, Homo sapiens
  misc_RNA (1)...(19): siRNA sense strand
guuaauaagcaggaagaaa

SEQ ID NO: 2196186 - RNA, 19 nt, Homo sapiens
  misc_RNA (1)...(19): siRNA sense strand
ggcacugagucugaaauau

SEQ ID NO: 2196187 - RNA, 19 nt, Homo sapiens
  misc_RNA (1)...(19): siRNA sense strand
uaccacuucuucagauaug

SEQ ID NO: 2196188 - RNA, 19 nt, Homo sapiens
  misc_RNA (1)...(19): siRNA sense strand
guaccacuucuucagauau

SEQ ID NO: 2196189 - RNA, 19 nt, Homo sapiens
  misc_RNA (1)...(19): siRNA sense strand
agccacaacugaccugaau

SEQ ID NO: 2196190 - RNA, 19 nt, Homo sapiens
  misc_RNA (1)...(19): siRNA sense strand
uuugaagccuacuauugaa

SEQ ID NO: 2196191 - RNA, 19 nt, Homo sapiens
  misc_RNA (1)...(19): siRNA sense strand
ucagccagaucuagaggau

SEQ ID NO: 2196192 - RNA, 19 nt, Homo sapiens
  misc_RNA (1)...(19): siRNA sense strand
aauccaccauugaagaaga

SEQ ID NO: 2196193 - RNA, 19 nt, Homo sapiens
  misc_RNA (1)...(19): siRNA sense strand
cacugagucugaaauaucu

SEQ ID NO: 2196194 - RNA, 19 nt, Homo sapiens
  misc_RNA (1)...(19): siRNA sense strand
uggccacgaugucuuacuu

SEQ ID NO: 2196195 - RNA, 19 nt, Homo sapiens
  misc_RNA (1)...(19): siRNA sense strand
gugcuaccuuuaaaugaag

SEQ ID NO: 2196196 - RNA, 19 nt, Homo sapiens
  misc_RNA (1)...(19): siRNA sense strand
uuuggacaauguuagcuaa

SEQ ID NO: 2196197 - RNA, 19 nt, Homo sapiens
  misc_RNA (1)...(19): siRNA sense strand
gaccugaauuuugcucuaa

SEQ ID NO: 2196198 - RNA, 19 nt, Homo sapiens
  misc_RNA (1)...(19): siRNA sense strand
uguuucagauacauccuuu

SEQ ID NO: 2196199 - RNA, 19 nt, Homo sapiens
  misc_RNA (1)...(19): siRNA sense strand
agaagguguuucagauaca

SEQ ID NO: 2196200 - RNA, 19 nt, Homo sapiens
  misc_RNA (1)...(19): siRNA sense strand
aagaagaaacaacuacuag

SEQ ID NO: 2196201 - RNA, 19 nt, Homo sapiens
  misc_RNA (1)...(19): siRNA sense strand
cgauaaaacugucaaugca

SEQ ID NO: 2196202 - RNA, 19 nt, Homo sapiens
  misc_RNA (1)...(19): siRNA sense strand
aaauggcacugagucugaa

SEQ ID NO: 2196203 - RNA, 19 nt, Homo sapiens
  misc_RNA (1)...(19): siRNA sense strand
gauacauccuuuuccaaga

SEQ ID NO: 2196204 - RNA, 19 nt, Homo sapiens
  misc_RNA (1)...(19): siRNA sense strand
ccacgaugucuuacuuuca

SEQ ID NO: 2196205 - RNA, 19 nt, Homo sapiens
  misc_RNA (1)...(19): siRNA sense strand
uggcacugagucugaaaua

SEQ ID NO: 2196206 - RNA, 19 nt, Homo sapiens
  misc_RNA (1)...(19): siRNA sense strand
ccauaggcucagauaauga

SEQ ID NO: 2196207 - RNA, 19 nt, Homo sapiens
  misc_RNA (1)...(19): siRNA sense strand
agaucauacucccaauuau

SEQ ID NO: 2196208 - RNA, 19 nt, Homo sapiens
  misc_RNA (1)...(19): siRNA sense strand
ugaugacccuccuccucuu

SEQ ID NO: 2196209 - RNA, 19 nt, Homo sapiens
  misc_RNA (1)...(19): siRNA sense strand
gaaaaucagccagaucuag

SEQ ID NO: 2196210 - RNA, 19 nt, Homo sapiens
  misc_RNA (1)...(19): siRNA sense strand
gagcuggccacgaugucuu

SEQ ID NO: 2196211 - RNA, 19 nt, Homo sapiens
  misc_RNA (1)...(19): siRNA sense strand
gagccacaacugaccugaa

SEQ ID NO: 2196212 - RNA, 19 nt, Homo sapiens
  misc_RNA (1)...(19): siRNA sense strand
ggcacaagaacaucagaau

SEQ ID NO: 2196213 - RNA, 19 nt, Homo sapiens
  misc_RNA (1)...(19): siRNA sense strand
ugaagaucauacucccaau

SEQ ID NO: 2196214 - RNA, 19 nt, Homo sapiens
  misc_RNA (1)...(19): siRNA sense strand
gagaaaaucagccagaucu

SEQ ID NO: 2196215 - RNA, 19 nt, Homo sapiens
  misc_RNA (1)...(19): siRNA sense strand
cuauugaagcauugccuaa

SEQ ID NO: 2196216 - RNA, 19 nt, Homo sapiens
  misc_RNA (1)...(19): siRNA sense strand
gaaaacgaugagucgguua

SEQ ID NO: 2196217 - RNA, 19 nt, Homo sapiens
  misc_RNA (1)...(19): siRNA sense strand
aaacgugccugcauuuugg

SEQ ID NO: 2196218 - RNA, 19 nt, Homo sapiens
  misc_RNA (1)...(19): siRNA sense strand
ugucaaugcaacuacauau

SEQ ID NO: 2196219 - RNA, 19 nt, Homo sapiens
  misc_RNA (1)...(19): siRNA sense strand
acggauaucauuuccauag

SEQ ID NO: 2196220 - RNA, 19 nt, Homo sapiens
  misc_RNA (1)...(19): siRNA sense strand
agccuacuauugaagcauu

SEQ ID NO: 2196221 - RNA, 19 nt, Homo sapiens
  misc_RNA (1)...(19): siRNA sense strand
aaugugcuaccuuuaaaug

SEQ ID NO: 2196222 - RNA, 19 nt, Homo sapiens
  misc_RNA (1)...(19): siRNA sense strand
ugacccuccuccucuuugu

SEQ ID NO: 2196223 - RNA, 19 nt, Homo sapiens
  misc_RNA (1)...(19): siRNA sense strand
aaauaaugcugggaaucuc

SEQ ID NO: 2196224 - RNA, 19 nt, Homo sapiens
  misc_RNA (1)...(19): siRNA sense strand
uacaaacugaggcaucuga

SEQ ID NO: 2196225 - RNA, 19 nt, Homo sapiens
  misc_RNA (1)...(19): siRNA sense strand
ggacaaauguucucccaaa

SEQ ID NO: 2196226 - RNA, 19 nt, Homo sapiens
  misc_RNA (1)...(19): siRNA sense strand
ggaacacccuggagaauag

SEQ ID NO: 2196227 - RNA, 19 nt, Homo sapiens
  misc_RNA (1)...(19): siRNA sense strand
gcaagaaagugcagacagu

SEQ ID NO: 2196228 - RNA, 19 nt, Homo sapiens
  misc_RNA (1)...(19): siRNA sense strand
gaacuaaagaaaggcauua

SEQ ID NO: 2196229 - RNA, 19 nt, Homo sapiens
  misc_RNA (1)...(19): siRNA sense strand
ggucaaagaacuaaagaaa

SEQ ID NO: 2196230 - RNA, 19 nt, Homo sapiens
  misc_RNA (1)...(19): siRNA sense strand
ucaaagaacuaaagaaagg

SEQ ID NO: 2196231 - RNA, 19 nt, Homo sapiens
  misc_RNA (1)...(19): siRNA sense strand
agaaaggcauuaaguguug

SEQ ID NO: 2196232 - RNA, 19 nt, Homo sapiens
  misc_RNA (1)...(19): siRNA sense strand
caggacaggugacaagaaa

SEQ ID NO: 2196233 - RNA, 19 nt, Homo sapiens
  misc_RNA (1)...(19): siRNA sense strand
guucugaaauccaagugua

SEQ ID NO: 2196234 - RNA, 19 nt, Homo sapiens
  misc_RNA (1)...(19): siRNA sense strand
gaguugagcucuccuuugg

SEQ ID NO: 2196235 - RNA, 19 nt, Homo sapiens
  misc_RNA (1)...(19): siRNA sense strand
gguggaggcucuuccuuug

SEQ ID NO: 2196236 - RNA, 19 nt, Homo sapiens
  misc_RNA (1)...(19): siRNA sense strand
ggacaggugacaagaaaga

SEQ ID NO: 2196237 - RNA, 19 nt, Homo sapiens
  misc_RNA (1)...(19): siRNA sense strand
gaacaucugcguuucuauc

SEQ ID NO: 2196238 - RNA, 19 nt, Homo sapiens
  misc_RNA (1)...(19): siRNA sense strand
gaaaucaugguucugaaau

SEQ ID NO: 2196239 - RNA, 19 nt, Homo sapiens
  misc_RNA (1)...(19): siRNA sense strand
ggaagaugguuucacuauc

SEQ ID NO: 2196240 - RNA, 19 nt, Homo sapiens
  misc_RNA (1)...(19): siRNA sense strand
gaaaggaugccucccaaag

SEQ ID NO: 2196241 - RNA, 19 nt, Homo sapiens
  misc_RNA (1)...(19): siRNA sense strand
gagacagccuggcagagaa

SEQ ID NO: 2196242 - RNA, 19 nt, Homo sapiens
  misc_RNA (1)...(19): siRNA sense strand
gcagagaagccauacuguu

SEQ ID NO: 2196243 - RNA, 19 nt, Homo sapiens
  misc_RNA (1)...(19): siRNA sense strand
ugacccagcuggaugaaau

SEQ ID NO: 2196244 - RNA, 19 nt, Homo sapiens
  misc_RNA (1)...(19): siRNA sense strand
ccacagggcugaguacagu

SEQ ID NO: 2196245 - RNA, 19 nt, Homo sapiens
  misc_RNA (1)...(19): siRNA sense strand
gaaaucggacaucuggaaa

SEQ ID NO: 2196246 - RNA, 19 nt, Homo sapiens
  misc_RNA (1)...(19): siRNA sense strand
ggagaacccagacaacgaa

SEQ ID NO: 2196247 - RNA, 19 nt, Homo sapiens
  misc_RNA (1)...(19): siRNA sense strand
aggaacagcuggaugaaau

SEQ ID NO: 2196248 - RNA, 19 nt, Homo sapiens
  misc_RNA (1)...(19): siRNA sense strand
gacaagaaagaucuaacua

SEQ ID NO: 2196249 - RNA, 19 nt, Homo sapiens
  misc_RNA (1)...(19): siRNA sense strand
cagcuugugucucgaguug

SEQ ID NO: 2196250 - RNA, 19 nt, Homo sapiens
  misc_RNA (1)...(19): siRNA sense strand
gggaggaacaucugcguuu

SEQ ID NO: 2196251 - RNA, 19 nt, Homo sapiens
  misc_RNA (1)...(19): siRNA sense strand
uaaagaaaggcauuaagug

SEQ ID NO: 2196252 - RNA, 19 nt, Homo sapiens
  misc_RNA (1)...(19): siRNA sense strand
ggaggaacaucugcguuuc

SEQ ID NO: 2196253 - RNA, 19 nt, Homo sapiens
  misc_RNA (1)...(19): siRNA sense strand
gguaagcuguccaccaagu

SEQ ID NO: 2196254 - RNA, 19 nt, Homo sapiens
  misc_RNA (1)...(19): siRNA sense strand
gaauaugcuucuggacuca

SEQ ID NO: 2196255 - RNA, 19 nt, Homo sapiens
  misc_RNA (1)...(19): siRNA sense strand
agggucagcucacgaauga

SEQ ID NO: 2196256 - RNA, 19 nt, Homo sapiens
  misc_RNA (1)...(19): siRNA sense strand
aaagaaaggcauuaagugu

SEQ ID NO: 2196257 - RNA, 19 nt, Homo sapiens
  misc_RNA (1)...(19): siRNA sense strand
ccagcuggcuucuaaugau

SEQ ID NO: 2196258 - RNA, 19 nt, Homo sapiens
  misc_RNA (1)...(19): siRNA sense strand
cagagaagccauacuguuc

SEQ ID NO: 2196259 - RNA, 19 nt, Homo sapiens
  misc_RNA (1)...(19): siRNA sense strand
cgaaaucggacaucuggaa

SEQ ID NO: 2196260 - RNA, 19 nt, Homo sapiens
  misc_RNA (1)...(19): siRNA sense strand
agggaacagugccgucuua

SEQ ID NO: 2196261 - RNA, 19 nt, Homo sapiens
  misc_RNA (1)...(19): siRNA sense strand
cagcuggcuucuaaugauu

SEQ ID NO: 2196262 - RNA, 19 nt, Homo sapiens
  misc_RNA (1)...(19): siRNA sense strand
gaagagcagcacucgauca

SEQ ID NO: 2196263 - RNA, 19 nt, Homo sapiens
  misc_RNA (1)...(19): siRNA sense strand
gggaagguccauccucuga

SEQ ID NO: 2196264 - RNA, 19 nt, Homo sapiens
  misc_RNA (1)...(19): siRNA sense strand
ggagaaugagggcaacuug

SEQ ID NO: 2196265 - RNA, 19 nt, Homo sapiens
  misc_RNA (1)...(19): siRNA sense strand
gaacuugaugacagugauu

SEQ ID NO: 2196266 - RNA, 19 nt, Homo sapiens
  misc_RNA (1)...(19): siRNA sense strand
ggaacuugaugacagugau

SEQ ID NO: 2196267 - RNA, 19 nt, Homo sapiens
  misc_RNA (1)...(19): siRNA sense strand
ccaaguguauccagagucu

SEQ ID NO: 2196268 - RNA, 19 nt, Homo sapiens
  misc_RNA (1)...(19): siRNA sense strand
uaauaagccugguggugau

SEQ ID NO: 2196269 - RNA, 19 nt, Homo sapiens
  misc_RNA (1)...(19): siRNA sense strand
gagggaguccuucacaaga

SEQ ID NO: 2196270 - RNA, 19 nt, Homo sapiens
  misc_RNA (1)...(19): siRNA sense strand
cagaagagcagcacucgau

SEQ ID NO: 2196271 - RNA, 19 nt, Homo sapiens
  misc_RNA (1)...(19): siRNA sense strand
ucacaagagugggucauuc

SEQ ID NO: 2196272 - RNA, 19 nt, Homo sapiens
  misc_RNA (1)...(19): siRNA sense strand
cuaaagaaaggcauuaagu

SEQ ID NO: 2196273 - RNA, 19 nt, Homo sapiens
  misc_RNA (1)...(19): siRNA sense strand
aaggaugccucccaaagug

SEQ ID NO: 2196274 - RNA, 19 nt, Homo sapiens
  misc_RNA (1)...(19): siRNA sense strand
guuccacucuuacucugaa

SEQ ID NO: 2196275 - RNA, 19 nt, Homo sapiens
  misc_RNA (1)...(19): siRNA sense strand
gaccaaagagacacaguca

SEQ ID NO: 2196276 - RNA, 19 nt, Homo sapiens
  misc_RNA (1)...(19): siRNA sense strand
gaaggccuagugcguggua

SEQ ID NO: 2196277 - RNA, 19 nt, Homo sapiens
  misc_RNA (1)...(19): siRNA sense strand
ccacagaccccaucaaguu

SEQ ID NO: 2196278 - RNA, 19 nt, Homo sapiens
  misc_RNA (1)...(19): siRNA sense strand
agaagcagguggcagaaag

SEQ ID NO: 2196279 - RNA, 19 nt, Homo sapiens
  misc_RNA (1)...(19): siRNA sense strand
ggagaauagcgaagacuca

SEQ ID NO: 2196280 - RNA, 19 nt, Homo sapiens
  misc_RNA (1)...(19): siRNA sense strand
gaagcagguggcagaaaga

SEQ ID NO: 2196281 - RNA, 19 nt, Homo sapiens
  misc_RNA (1)...(19): siRNA sense strand
agaggaagaugguuucacu

SEQ ID NO: 2196282 - RNA, 19 nt, Homo sapiens
  misc_RNA (1)...(19): siRNA sense strand
cagagggaguccuucacaa

SEQ ID NO: 2196283 - RNA, 19 nt, Homo sapiens
  misc_RNA (1)...(19): siRNA sense strand
ugaaaucaugguucugaaa

SEQ ID NO: 2196284 - RNA, 19 nt, Homo sapiens
  misc_RNA (1)...(19): siRNA sense strand
guucacagguagauuucau

SEQ ID NO: 2196285 - RNA, 19 nt, Homo sapiens
  misc_RNA (1)...(19): siRNA sense strand
gaagagucagcaccauugu

SEQ ID NO: 2196286 - RNA, 19 nt, Homo sapiens
  misc_RNA (1)...(19): siRNA sense strand
ucaguuaccagucgaaauc

SEQ ID NO: 2196287 - RNA, 19 nt, Homo sapiens
  misc_RNA (1)...(19): siRNA sense strand
ccacugaacacacucucaa

SEQ ID NO: 2196288 - RNA, 19 nt, Homo sapiens
  misc_RNA (1)...(19): siRNA sense strand
aggaacaucugcguuucua

SEQ ID NO: 2196289 - RNA, 19 nt, Homo sapiens
  misc_RNA (1)...(19): siRNA sense strand
cagaagagucagcaccauu

SEQ ID NO: 2196290 - RNA, 19 nt, Homo sapiens
  misc_RNA (1)...(19): siRNA sense strand
aagaaaggcauuaaguguu

SEQ ID NO: 2196291 - RNA, 19 nt, Homo sapiens
  misc_RNA (1)...(19): siRNA sense strand
aaaggaacacccuggagaa

SEQ ID NO: 2196292 - RNA, 19 nt, Homo sapiens
  misc_RNA (1)...(19): siRNA sense strand
gcagacagugcagccagua

SEQ ID NO: 2196293 - RNA, 19 nt, Homo sapiens
  misc_RNA (1)...(19): siRNA sense strand
caagagugggucauucaug

SEQ ID NO: 2196294 - RNA, 19 nt, Homo sapiens
  misc_RNA (1)...(19): siRNA sense strand
uggcugagcucggcuucaa

SEQ ID NO: 2196295 - RNA, 19 nt, Homo sapiens
  misc_RNA (1)...(19): siRNA sense strand
agaagagucagcaccauug

SEQ ID NO: 2196296 - RNA, 19 nt, Homo sapiens
  misc_RNA (1)...(19): siRNA sense strand
gaacagcuggaugaaaugg

SEQ ID NO: 2196297 - RNA, 19 nt, Homo sapiens
  misc_RNA (1)...(19): siRNA sense strand
cauccgagcacaccaggaa

SEQ ID NO: 2196298 - RNA, 19 nt, Homo sapiens
  misc_RNA (1)...(19): siRNA sense strand
caggugaccagcacuguga

SEQ ID NO: 2196299 - RNA, 19 nt, Homo sapiens
  misc_RNA (1)...(19): siRNA sense strand
ccaccucuccuccaacaga

SEQ ID NO: 2196300 - RNA, 19 nt, Homo sapiens
  misc_RNA (1)...(19): siRNA sense strand
ggagagggaggaacaucug

SEQ ID NO: 2196301 - RNA, 19 nt, Homo sapiens
  misc_RNA (1)...(19): siRNA sense strand
acaaacaucccgccacauc

SEQ ID NO: 2196302 - RNA, 19 nt, Homo sapiens
  misc_RNA (1)...(19): siRNA sense strand
gagaagcagguggcagaaa

SEQ ID NO: 2196303 - RNA, 19 nt, Homo sapiens
  misc_RNA (1)...(19): siRNA sense strand
cagcugcucucccaagacu

SEQ ID NO: 2196304 - RNA, 19 nt, Homo sapiens
  misc_RNA (1)...(19): siRNA sense strand
gccagugucuucagcaacu

SEQ ID NO: 2196305 - RNA, 19 nt, Homo sapiens
  misc_RNA (1)...(19): siRNA sense strand
aggcacgcaugcugaauau

SEQ ID NO: 2196306 - RNA, 19 nt, Homo sapiens
  misc_RNA (1)...(19): siRNA sense strand
gaggaagaugguuucacua

SEQ ID NO: 2196307 - RNA, 19 nt, Homo sapiens
  misc_RNA (1)...(19): siRNA sense strand
ucacagguagauuucauau

SEQ ID NO: 2196308 - RNA, 19 nt, Homo sapiens
  misc_RNA (1)...(19): siRNA sense strand
caacauuccuuuuacuucu

SEQ ID NO: 2196309 - RNA, 19 nt, Homo sapiens
  misc_RNA (1)...(19): siRNA sense strand
ggaacagcuggaugaaaug

SEQ ID NO: 2196310 - RNA, 19 nt, Homo sapiens
  misc_RNA (1)...(19): siRNA sense strand
uggaggcucuuccuuugau

SEQ ID NO: 2196311 - RNA, 19 nt, Homo sapiens
  misc_RNA (1)...(19): siRNA sense strand
ucagagggccacaaagcaa

SEQ ID NO: 2196312 - RNA, 19 nt, Homo sapiens
  misc_RNA (1)...(19): siRNA sense strand
gggaguccuucacaagagu

SEQ ID NO: 2196313 - RNA, 19 nt, Homo sapiens
  misc_RNA (1)...(19): siRNA sense strand
gagugggucauucaugcua

SEQ ID NO: 2196314 - RNA, 19 nt, Homo sapiens
  misc_RNA (1)...(19): siRNA sense strand
ucaugguucugaaauccaa

SEQ ID NO: 2196315 - RNA, 19 nt, Homo sapiens
  misc_RNA (1)...(19): siRNA sense strand
uaggcacgcaugcugaaua

SEQ ID NO: 2196316 - RNA, 19 nt, Homo sapiens
  misc_RNA (1)...(19): siRNA sense strand
gacaaauguucucccaaaa

SEQ ID NO: 2196317 - RNA, 19 nt, Homo sapiens
  misc_RNA (1)...(19): siRNA sense strand
caaacaucccgccacauca

SEQ ID NO: 2196318 - RNA, 19 nt, Homo sapiens
  misc_RNA (1)...(19): siRNA sense strand
ugauggagcccaaguagag

SEQ ID NO: 2196319 - RNA, 19 nt, Homo sapiens
  misc_RNA (1)...(19): siRNA sense strand
agaggaacuugaugacagu

SEQ ID NO: 2196320 - RNA, 19 nt, Homo sapiens
  misc_RNA (1)...(19): siRNA sense strand
ccuaaggucucugguaaaa

SEQ ID NO: 2196321 - RNA, 19 nt, Homo sapiens
  misc_RNA (1)...(19): siRNA sense strand
aggaacacccuggagaaua

SEQ ID NO: 2196322 - RNA, 19 nt, Homo sapiens
  misc_RNA (1)...(19): siRNA sense strand
aaaucaugguucugaaauc

SEQ ID NO: 2196323 - RNA, 19 nt, Homo sapiens
  misc_RNA (1)...(19): siRNA sense strand
aaaggaugccucccaaagu

SEQ ID NO: 2196324 - RNA, 19 nt, Homo sapiens
  misc_RNA (1)...(19): siRNA sense strand
gagaagccauacuguucac

SEQ ID NO: 2196325 - RNA, 19 nt, Homo sapiens
  misc_RNA (1)...(19): siRNA sense strand
ggacaaauguucucccaaa

SEQ ID NO: 2196326 - RNA, 19 nt, Homo sapiens
  misc_RNA (1)...(19): siRNA sense strand
ggaacacccuggagaauag

SEQ ID NO: 2196327 - RNA, 19 nt, Homo sapiens
  misc_RNA (1)...(19): siRNA sense strand
gcaagaaagugcagacagu

SEQ ID NO: 2196328 - RNA, 19 nt, Homo sapiens
  misc_RNA (1)...(19): siRNA sense strand
gaacuaaagaaaggcauua

SEQ ID NO: 2196329 - RNA, 19 nt, Homo sapiens
  misc_RNA (1)...(19): siRNA sense strand
ggucaaagaacuaaagaaa

SEQ ID NO: 2196330 - RNA, 19 nt, Homo sapiens
  misc_RNA (1)...(19): siRNA sense strand
ucaaagaacuaaagaaagg

SEQ ID NO: 2196331 - RNA, 19 nt, Homo sapiens
  misc_RNA (1)...(19): siRNA sense strand
agaaaggcauuaaguguug

SEQ ID NO: 2196332 - RNA, 19 nt, Homo sapiens
  misc_RNA (1)...(19): siRNA sense strand
caggacaggugacaagaaa

SEQ ID NO: 2196333 - RNA, 19 nt, Homo sapiens
  misc_RNA (1)...(19): siRNA sense strand
gaguugagcucuccuuugg

SEQ ID NO: 2196334 - RNA, 19 nt, Homo sapiens
  misc_RNA (1)...(19): siRNA sense strand
gguggaggcucuuccuuug

SEQ ID NO: 2196335 - RNA, 19 nt, Homo sapiens
  misc_RNA (1)...(19): siRNA sense strand
ggacaggugacaagaaaga

SEQ ID NO: 2196336 - RNA, 19 nt, Homo sapiens
  misc_RNA (1)...(19): siRNA sense strand
gaacaucugcguuucuauc

SEQ ID NO: 2196337 - RNA, 19 nt, Homo sapiens
  misc_RNA (1)...(19): siRNA sense strand
ggaagaugguuucacuauc

SEQ ID NO: 2196338 - RNA, 19 nt, Homo sapiens
  misc_RNA (1)...(19): siRNA sense strand
gaaaggaugccucccaaag

SEQ ID NO: 2196339 - RNA, 19 nt, Homo sapiens
  misc_RNA (1)...(19): siRNA sense strand
gagacagccuggcagagaa

SEQ ID NO: 2196340 - RNA, 19 nt, Homo sapiens
  misc_RNA (1)...(19): siRNA sense strand
gcagagaagccauacuguu

SEQ ID NO: 2196341 - RNA, 19 nt, Homo sapiens
  misc_RNA (1)...(19): siRNA sense strand
ccacagggcugaguacagu

SEQ ID NO: 2196342 - RNA, 19 nt, Homo sapiens
  misc_RNA (1)...(19): siRNA sense strand
gaaaucggacaucuggaaa

SEQ ID NO: 2196343 - RNA, 19 nt, Homo sapiens
  misc_RNA (1)...(19): siRNA sense strand
ggagaacccagacaacgaa

SEQ ID NO: 2196344 - RNA, 19 nt, Homo sapiens
  misc_RNA (1)...(19): siRNA sense strand
gacaagaaagaucuaacua

SEQ ID NO: 2196345 - RNA, 19 nt, Homo sapiens
  misc_RNA (1)...(19): siRNA sense strand
cagcuugugucucgaguug

SEQ ID NO: 2196346 - RNA, 19 nt, Homo sapiens
  misc_RNA (1)...(19): siRNA sense strand
gggaggaacaucugcguuu

SEQ ID NO: 2196347 - RNA, 19 nt, Homo sapiens
  misc_RNA (1)...(19): siRNA sense strand
uaaagaaaggcauuaagug

SEQ ID NO: 2196348 - RNA, 19 nt, Homo sapiens
  misc_RNA (1)...(19): siRNA sense strand
ggaggaacaucugcguuuc

SEQ ID NO: 2196349 - RNA, 19 nt, Homo sapiens
  misc_RNA (1)...(19): siRNA sense strand
gguaagcuguccaccaagu

SEQ ID NO: 2196350 - RNA, 19 nt, Homo sapiens
  misc_RNA (1)...(19): siRNA sense strand
gaauaugcuucuggacuca

SEQ ID NO: 2196351 - RNA, 19 nt, Homo sapiens
  misc_RNA (1)...(19): siRNA sense strand
agggucagcucacgaauga

SEQ ID NO: 2196352 - RNA, 19 nt, Homo sapiens
  misc_RNA (1)...(19): siRNA sense strand
aaagaaaggcauuaagugu

SEQ ID NO: 2196353 - RNA, 19 nt, Homo sapiens
  misc_RNA (1)...(19): siRNA sense strand
cagagaagccauacuguuc

SEQ ID NO: 2196354 - RNA, 19 nt, Homo sapiens
  misc_RNA (1)...(19): siRNA sense strand
cgaaaucggacaucuggaa

SEQ ID NO: 2196355 - RNA, 19 nt, Homo sapiens
  misc_RNA (1)...(19): siRNA sense strand
gaagagcagcacucgauca

SEQ ID NO: 2196356 - RNA, 19 nt, Homo sapiens
  misc_RNA (1)...(19): siRNA sense strand
gggaagguccauccucuga

SEQ ID NO: 2196357 - RNA, 19 nt, Homo sapiens
  misc_RNA (1)...(19): siRNA sense strand
ggagaaugagggcaacuug

SEQ ID NO: 2196358 - RNA, 19 nt, Homo sapiens
  misc_RNA (1)...(19): siRNA sense strand
gaacuugaugacagugauu

SEQ ID NO: 2196359 - RNA, 19 nt, Homo sapiens
  misc_RNA (1)...(19): siRNA sense strand
ggaacuugaugacagugau

SEQ ID NO: 2196360 - RNA, 19 nt, Homo sapiens
  misc_RNA (1)...(19): siRNA sense strand
uaauaagccugguggugau

SEQ ID NO: 2196361 - RNA, 19 nt, Homo sapiens
  misc_RNA (1)...(19): siRNA sense strand
gagggaguccuucacaaga

SEQ ID NO: 2196362 - RNA, 19 nt, Homo sapiens
  misc_RNA (1)...(19): siRNA sense strand
cagaagagcagcacucgau

SEQ ID NO: 2196363 - RNA, 19 nt, Homo sapiens
  misc_RNA (1)...(19): siRNA sense strand
ucacaagagugggucauuc

SEQ ID NO: 2196364 - RNA, 19 nt, Homo sapiens
  misc_RNA (1)...(19): siRNA sense strand
cuaaagaaaggcauuaagu

SEQ ID NO: 2196365 - RNA, 19 nt, Homo sapiens
  misc_RNA (1)...(19): siRNA sense strand
aaggaugccucccaaagug

SEQ ID NO: 2196366 - RNA, 19 nt, Homo sapiens
  misc_RNA (1)...(19): siRNA sense strand
guuccacucuuacucugaa

SEQ ID NO: 2196367 - RNA, 19 nt, Homo sapiens
  misc_RNA (1)...(19): siRNA sense strand
gaccaaagagacacaguca

SEQ ID NO: 2196368 - RNA, 19 nt, Homo sapiens
  misc_RNA (1)...(19): siRNA sense strand
gaaggccuagugcguggua

SEQ ID NO: 2196369 - RNA, 19 nt, Homo sapiens
  misc_RNA (1)...(19): siRNA sense strand
ccacagaccccaucaaguu

SEQ ID NO: 2196370 - RNA, 19 nt, Homo sapiens
  misc_RNA (1)...(19): siRNA sense strand
agaagcagguggcagaaag

SEQ ID NO: 2196371 - RNA, 19 nt, Homo sapiens
  misc_RNA (1)...(19): siRNA sense strand
ggagaauagcgaagacuca

SEQ ID NO: 2196372 - RNA, 19 nt, Homo sapiens
  misc_RNA (1)...(19): siRNA sense strand
gaagcagguggcagaaaga

SEQ ID NO: 2196373 - RNA, 19 nt, Homo sapiens
  misc_RNA (1)...(19): siRNA sense strand
agaggaagaugguuucacu

SEQ ID NO: 2196374 - RNA, 19 nt, Homo sapiens
  misc_RNA (1)...(19): siRNA sense strand
cagagggaguccuucacaa

SEQ ID NO: 2196375 - RNA, 19 nt, Homo sapiens
  misc_RNA (1)...(19): siRNA sense strand
guucacagguagauuucau

SEQ ID NO: 2196376 - RNA, 19 nt, Homo sapiens
  misc_RNA (1)...(19): siRNA sense strand
gaagagucagcaccauugu

SEQ ID NO: 2196377 - RNA, 19 nt, Homo sapiens
  misc_RNA (1)...(19): siRNA sense strand
caugaucgccaacaucuca

SEQ ID NO: 2196378 - RNA, 19 nt, Homo sapiens
  misc_RNA (1)...(19): siRNA sense strand
aggaacaucugcguuucua

SEQ ID NO: 2196379 - RNA, 19 nt, Homo sapiens
  misc_RNA (1)...(19): siRNA sense strand
ccacugaacacacucucaa

SEQ ID NO: 2196380 - RNA, 19 nt, Homo sapiens
  misc_RNA (1)...(19): siRNA sense strand
ucaguuaccagucgaaauc

SEQ ID NO: 2196381 - RNA, 19 nt, Homo sapiens
  misc_RNA (1)...(19): siRNA sense strand
aagaaaggcauuaaguguu

SEQ ID NO: 2196382 - RNA, 19 nt, Homo sapiens
  misc_RNA (1)...(19): siRNA sense strand
aaaggaacacccuggagaa

SEQ ID NO: 2196383 - RNA, 19 nt, Homo sapiens
  misc_RNA (1)...(19): siRNA sense strand
gcagacagugcagccagua

SEQ ID NO: 2196384 - RNA, 19 nt, Homo sapiens
  misc_RNA (1)...(19): siRNA sense strand
cagaagagucagcaccauu

SEQ ID NO: 2196385 - RNA, 19 nt, Homo sapiens
  misc_RNA (1)...(19): siRNA sense strand
caagagugggucauucaug

SEQ ID NO: 2196386 - RNA, 19 nt, Homo sapiens
  misc_RNA (1)...(19): siRNA sense strand
agaagagucagcaccauug

SEQ ID NO: 2196387 - RNA, 19 nt, Homo sapiens
  misc_RNA (1)...(19): siRNA sense strand
caggugaccagcacuguga

SEQ ID NO: 2196388 - RNA, 19 nt, Homo sapiens
  misc_RNA (1)...(19): siRNA sense strand
ccaccucuccuccaacaga

SEQ ID NO: 2196389 - RNA, 19 nt, Homo sapiens
  misc_RNA (1)...(19): siRNA sense strand
ggagagggaggaacaucug

SEQ ID NO: 2196390 - RNA, 19 nt, Homo sapiens
  misc_RNA (1)...(19): siRNA sense strand
acaaacaucccgccacauc

SEQ ID NO: 2196391 - RNA, 19 nt, Homo sapiens
  misc_RNA (1)...(19): siRNA sense strand
gagaagcagguggcagaaa

SEQ ID NO: 2196392 - RNA, 19 nt, Homo sapiens
  misc_RNA (1)...(19): siRNA sense strand
gccagugucuucagcaacu

SEQ ID NO: 2196393 - RNA, 19 nt, Homo sapiens
  misc_RNA (1)...(19): siRNA sense strand
aggcacgcaugcugaauau

SEQ ID NO: 2196394 - RNA, 19 nt, Homo sapiens
  misc_RNA (1)...(19): siRNA sense strand
gaggaagaugguuucacua

SEQ ID NO: 2196395 - RNA, 19 nt, Homo sapiens
  misc_RNA (1)...(19): siRNA sense strand
ucacagguagauuucauau

SEQ ID NO: 2196396 - RNA, 19 nt, Homo sapiens
  misc_RNA (1)...(19): siRNA sense strand
caacauuccuuuuacuucu

SEQ ID NO: 2196397 - RNA, 19 nt, Homo sapiens
  misc_RNA (1)...(19): siRNA sense strand
uggaggcucuuccuuugau

SEQ ID NO: 2196398 - RNA, 19 nt, Homo sapiens
  misc_RNA (1)...(19): siRNA sense strand
ucagagggccacaaagcaa

SEQ ID NO: 2196399 - RNA, 19 nt, Homo sapiens
  misc_RNA (1)...(19): siRNA sense strand
gggaguccuucacaagagu

SEQ ID NO: 2196400 - RNA, 19 nt, Homo sapiens
  misc_RNA (1)...(19): siRNA sense strand
gagugggucauucaugcua

SEQ ID NO: 2196401 - RNA, 19 nt, Homo sapiens
  misc_RNA (1)...(19): siRNA sense strand
uaggcacgcaugcugaaua

SEQ ID NO: 2196402 - RNA, 19 nt, Homo sapiens
  misc_RNA (1)...(19): siRNA sense strand
gacaaauguucucccaaaa

SEQ ID NO: 2196403 - RNA, 19 nt, Homo sapiens
  misc_RNA (1)...(19): siRNA sense strand
caaacaucccgccacauca

SEQ ID NO: 2196404 - RNA, 19 nt, Homo sapiens
  misc_RNA (1)...(19): siRNA sense strand
ccuaaggucucugguaaaa

SEQ ID NO: 2196405 - RNA, 19 nt, Homo sapiens
  misc_RNA (1)...(19): siRNA sense strand
agaggaacuugaugacagu

SEQ ID NO: 2196406 - RNA, 19 nt, Homo sapiens
  misc_RNA (1)...(19): siRNA sense strand
ugauggagcccaaguagag

SEQ ID NO: 2196407 - RNA, 19 nt, Homo sapiens
  misc_RNA (1)...(19): siRNA sense strand
caacagaaguuaaaauacc

SEQ ID NO: 2196408 - RNA, 19 nt, Homo sapiens
  misc_RNA (1)...(19): siRNA sense strand
aaaggaugccucccaaagu

SEQ ID NO: 2196409 - RNA, 19 nt, Homo sapiens
  misc_RNA (1)...(19): siRNA sense strand
gagaagccauacuguucac

SEQ ID NO: 2196410 - RNA, 19 nt, Homo sapiens
  misc_RNA (1)...(19): siRNA sense strand
aggaacacccuggagaaua

SEQ ID NO: 2196411 - RNA, 19 nt, Homo sapiens
  misc_RNA (1)...(19): siRNA sense strand
gagggucagcucacgaaug

SEQ ID NO: 2196412 - RNA, 19 nt, Homo sapiens
  misc_RNA (1)...(19): siRNA sense strand
ggaaacuccucuccaaaac

SEQ ID NO: 2196413 - RNA, 19 nt, Homo sapiens
  misc_RNA (1)...(19): siRNA sense strand
ugguuucacuaucucauug

SEQ ID NO: 2196414 - RNA, 19 nt, Homo sapiens
  misc_RNA (1)...(19): siRNA sense strand
gagaauagcgaagacucau

SEQ ID NO: 2196415 - RNA, 19 nt, Homo sapiens
  misc_RNA (1)...(19): siRNA sense strand
cagagggccacaaagcaaa

SEQ ID NO: 2196416 - RNA, 19 nt, Homo sapiens
  misc_RNA (1)...(19): siRNA sense strand
ugaugacagugauuucagu

SEQ ID NO: 2196417 - RNA, 19 nt, Homo sapiens
  misc_RNA (1)...(19): siRNA sense strand
cgccucuguuccacucuua

SEQ ID NO: 2196418 - RNA, 19 nt, Homo sapiens
  misc_RNA (1)...(19): siRNA sense strand
gcuugugucucgaguugag

SEQ ID NO: 2196419 - RNA, 19 nt, Homo sapiens
  misc_RNA (1)...(19): siRNA sense strand
cucaacaccuugcgcuaug

SEQ ID NO: 2196420 - RNA, 19 nt, Homo sapiens
  misc_RNA (1)...(19): siRNA sense strand
cgaguugagcucuccuuug

SEQ ID NO: 2196421 - RNA, 19 nt, Homo sapiens
  misc_RNA (1)...(19): siRNA sense strand
ccaggacaggugacaagaa

SEQ ID NO: 2196422 - RNA, 19 nt, Homo sapiens
  misc_RNA (1)...(19): siRNA sense strand
aggaagaugguuucacuau

SEQ ID NO: 2196423 - RNA, 19 nt, Homo sapiens
  misc_RNA (1)...(19): siRNA sense strand
agagacagccuggcagaga

SEQ ID NO: 2196424 - RNA, 19 nt, Homo sapiens
  misc_RNA (1)...(19): siRNA sense strand
ugacaagaaagaucuaacu

SEQ ID NO: 2196425 - RNA, 19 nt, Homo sapiens
  misc_RNA (1)...(19): siRNA sense strand
gaacaucuccugcuucuuc

SEQ ID NO: 2196426 - RNA, 19 nt, Homo sapiens
  misc_RNA (1)...(19): siRNA sense strand
gaugagaucgccuacuuua

SEQ ID NO: 2196427 - RNA, 19 nt, Homo sapiens
  misc_RNA (1)...(19): siRNA sense strand
ggaaaucgacgacauguac

SEQ ID NO: 2196428 - RNA, 19 nt, Homo sapiens
  misc_RNA (1)...(19): siRNA sense strand
cgacuucgaugaggucaaa

SEQ ID NO: 2196429 - RNA, 19 nt, Homo sapiens
  misc_RNA (1)...(19): siRNA sense strand
ucaccuccauccacaagua

SEQ ID NO: 2196430 - RNA, 19 nt, Homo sapiens
  misc_RNA (1)...(19): siRNA sense strand
cgagacagcucaccguauc

SEQ ID NO: 2196431 - RNA, 19 nt, Homo sapiens
  misc_RNA (1)...(19): siRNA sense strand
uggaugagaucgccuacuu

SEQ ID NO: 2196432 - RNA, 19 nt, Homo sapiens
  misc_RNA (1)...(19): siRNA sense strand
gcucagacgucaccuccau

SEQ ID NO: 2196433 - RNA, 19 nt, Homo sapiens
  misc_RNA (1)...(19): siRNA sense strand
caacagcagccaccuggaa

SEQ ID NO: 2196434 - RNA, 19 nt, Homo sapiens
  misc_RNA (1)...(19): siRNA sense strand
gcagccaccuggaaaucga

SEQ ID NO: 2196435 - RNA, 19 nt, Homo sapiens
  misc_RNA (1)...(19): siRNA sense strand
uggcaccgcuguugcuuga

SEQ ID NO: 2196436 - RNA, 19 nt, Homo sapiens
  misc_RNA (1)...(19): siRNA sense strand
gcaaguggcgcagcuacaa

SEQ ID NO: 2196437 - RNA, 19 nt, Homo sapiens
  misc_RNA (1)...(19): siRNA sense strand
ggagcgcgacgucuauuug

SEQ ID NO: 2196438 - RNA, 19 nt, Homo sapiens
  misc_RNA (1)...(19): siRNA sense strand
gugcgucgcuacuucaaca

SEQ ID NO: 2196439 - RNA, 19 nt, Homo sapiens
  misc_RNA (1)...(19): siRNA sense strand
ccauucauccuacccgaua

SEQ ID NO: 2196440 - RNA, 19 nt, Homo sapiens
  misc_RNA (1)...(19): siRNA sense strand
gcucacggcccacugguau

SEQ ID NO: 2196441 - RNA, 19 nt, Homo sapiens
  misc_RNA (1)...(19): siRNA sense strand
gagcgcuacuggcuaucuu

SEQ ID NO: 2196442 - RNA, 19 nt, Homo sapiens
  misc_RNA (1)...(19): siRNA sense strand
gcccaagccuuccaaagac

SEQ ID NO: 2196443 - RNA, 19 nt, Homo sapiens
  misc_RNA (1)...(19): siRNA sense strand
cacagaacaucuccugcuu

SEQ ID NO: 2196444 - RNA, 19 nt, Homo sapiens
  misc_RNA (1)...(19): siRNA sense strand
aggacaaggugcugcguuu

SEQ ID NO: 2196445 - RNA, 19 nt, Homo sapiens
  misc_RNA (1)...(19): siRNA sense strand
ggaugagaucgccuacuuu

SEQ ID NO: 2196446 - RNA, 19 nt, Homo sapiens
  misc_RNA (1)...(19): siRNA sense strand
gcaggagcgcgacgucuau

SEQ ID NO: 2196447 - RNA, 19 nt, Homo sapiens
  misc_RNA (1)...(19): siRNA sense strand
gggcuacccauucauccua

SEQ ID NO: 2196448 - RNA, 19 nt, Homo sapiens
  misc_RNA (1)...(19): siRNA sense strand
gacucgcaguuccuuauug

SEQ ID NO: 2196449 - RNA, 19 nt, Homo sapiens
  misc_RNA (1)...(19): siRNA sense strand
cauggugcgucgcuacuuc

SEQ ID NO: 2196450 - RNA, 19 nt, Homo sapiens
  misc_RNA (1)...(19): siRNA sense strand
gaaaucgacgacauguaca

SEQ ID NO: 2196451 - RNA, 19 nt, Homo sapiens
  misc_RNA (1)...(19): siRNA sense strand
agauggcgcugcccuucuu

SEQ ID NO: 2196452 - RNA, 19 nt, Homo sapiens
  misc_RNA (1)...(19): siRNA sense strand
gagaugaggacgcaacacu

SEQ ID NO: 2196453 - RNA, 19 nt, Homo sapiens
  misc_RNA (1)...(19): siRNA sense strand
gcuacuccguggcuuccuu

SEQ ID NO: 2196454 - RNA, 19 nt, Homo sapiens
  misc_RNA (1)...(19): siRNA sense strand
caacgccagcgacauguuc

SEQ ID NO: 2196455 - RNA, 19 nt, Homo sapiens
  misc_RNA (1)...(19): siRNA sense strand
acauguacacaccugcuua

SEQ ID NO: 2196456 - RNA, 19 nt, Homo sapiens
  misc_RNA (1)...(19): siRNA sense strand
gagaucgccuacuuuaccu

SEQ ID NO: 2196457 - RNA, 19 nt, Homo sapiens
  misc_RNA (1)...(19): siRNA sense strand
cgacucgcaguuccuuauu

SEQ ID NO: 2196458 - RNA, 19 nt, Homo sapiens
  misc_RNA (1)...(19): siRNA sense strand
ccacgacacgcccuacaag

SEQ ID NO: 2196459 - RNA, 19 nt, Homo sapiens
  misc_RNA (1)...(19): siRNA sense strand
ggccaucgcgcagaaguuc

SEQ ID NO: 2196460 - RNA, 19 nt, Homo sapiens
  misc_RNA (1)...(19): siRNA sense strand
gccaugcaguucucuaucc

SEQ ID NO: 2196461 - RNA, 19 nt, Homo sapiens
  misc_RNA (1)...(19): siRNA sense strand
cuccguggcuuccuucaag

SEQ ID NO: 2196462 - RNA, 19 nt, Homo sapiens
  misc_RNA (1)...(19): siRNA sense strand
cggagcugcuggaccugaa

SEQ ID NO: 2196463 - RNA, 19 nt, Homo sapiens
  misc_RNA (1)...(19): siRNA sense strand
gagugugcgugggcucaga

SEQ ID NO: 2196464 - RNA, 19 nt, Homo sapiens
  misc_RNA (1)...(19): siRNA sense strand
cauguacacaccugcuuau

SEQ ID NO: 2196465 - RNA, 19 nt, Homo sapiens
  misc_RNA (1)...(19): siRNA sense strand
agcccaagccuuccaaaga

SEQ ID NO: 2196466 - RNA, 19 nt, Homo sapiens
  misc_RNA (1)...(19): siRNA sense strand
acaccuuccugcccgacaa

SEQ ID NO: 2196467 - RNA, 19 nt, Homo sapiens
  misc_RNA (1)...(19): siRNA sense strand
gaagcuggaugaugacaaa

SEQ ID NO: 2196468 - RNA, 19 nt, Homo sapiens
  misc_RNA (1)...(19): siRNA sense strand
ugacaaaccuccagaaauc

SEQ ID NO: 2196469 - RNA, 19 nt, Homo sapiens
  misc_RNA (1)...(19): siRNA sense strand
gaugagaugugugauguuu

SEQ ID NO: 2196470 - RNA, 19 nt, Homo sapiens
  misc_RNA (1)...(19): siRNA sense strand
ggagauggcccacacagaa

SEQ ID NO: 2196471 - RNA, 19 nt, Homo sapiens
  misc_RNA (1)...(19): siRNA sense strand
guaaagucaucccugauug

SEQ ID NO: 2196472 - RNA, 19 nt, Homo sapiens
  misc_RNA (1)...(19): siRNA sense strand
gaacaucgaggccacauag

SEQ ID NO: 2196473 - RNA, 19 nt, Homo sapiens
  misc_RNA (1)...(19): siRNA sense strand
aacaucaacuugcugcuua

SEQ ID NO: 2196474 - RNA, 19 nt, Homo sapiens
  misc_RNA (1)...(19): siRNA sense strand
ucaacuugcugcuuacuga

SEQ ID NO: 2196475 - RNA, 19 nt, Homo sapiens
  misc_RNA (1)...(19): siRNA sense strand
gagcaggaguccagaaggu

SEQ ID NO: 2196476 - RNA, 19 nt, Homo sapiens
  misc_RNA (1)...(19): siRNA sense strand
cccggaagcuggaugauga

SEQ ID NO: 2196477 - RNA, 19 nt, Homo sapiens
  misc_RNA (1)...(19): siRNA sense strand
gaugacaaaccuccagaaa

SEQ ID NO: 2196478 - RNA, 19 nt, Homo sapiens
  misc_RNA (1)...(19): siRNA sense strand
ccagagagccuguugucaa

SEQ ID NO: 2196479 - RNA, 19 nt, Homo sapiens
  misc_RNA (1)...(19): siRNA sense strand
ugagaugugugauguuugu

SEQ ID NO: 2196480 - RNA, 19 nt, Homo sapiens
  misc_RNA (1)...(19): siRNA sense strand
uggaggacuuucugcguua

SEQ ID NO: 2196481 - RNA, 19 nt, Homo sapiens
  misc_RNA (1)...(19): siRNA sense strand
gcaggaguccagaagguaa

SEQ ID NO: 2196482 - RNA, 19 nt, Homo sapiens
  misc_RNA (1)...(19): siRNA sense strand
agaguggccugacuucuug

SEQ ID NO: 2196483 - RNA, 19 nt, Homo sapiens
  misc_RNA (1)...(19): siRNA sense strand
ccacuacugugacaacauc

SEQ ID NO: 2196484 - RNA, 19 nt, Homo sapiens
  misc_RNA (1)...(19): siRNA sense strand
gagauggcccacacagaaa

SEQ ID NO: 2196485 - RNA, 19 nt, Homo sapiens
  misc_RNA (1)...(19): siRNA sense strand
cagcggaggugacggagau

SEQ ID NO: 2196486 - RNA, 19 nt, Homo sapiens
  misc_RNA (1)...(19): siRNA sense strand
gcaccaggguuuuccauga

SEQ ID NO: 2196487 - RNA, 19 nt, Homo sapiens
  misc_RNA (1)...(19): siRNA sense strand
uuacugaggaggaaaugua

SEQ ID NO: 2196488 - RNA, 19 nt, Homo sapiens
  misc_RNA (1)...(19): siRNA sense strand
ggagaaggaagcagaagca

SEQ ID NO: 2196489 - RNA, 19 nt, Homo sapiens
  misc_RNA (1)...(19): siRNA sense strand
uuucagcgguguaaaguca

SEQ ID NO: 2196490 - RNA, 19 nt, Homo sapiens
  misc_RNA (1)...(19): siRNA sense strand
caggacaagucgauucaca

SEQ ID NO: 2196491 - RNA, 19 nt, Homo sapiens
  misc_RNA (1)...(19): siRNA sense strand
ggagcugccacuacuguga

SEQ ID NO: 2196492 - RNA, 19 nt, Homo sapiens
  misc_RNA (1)...(19): siRNA sense strand
gcguggagccugaggaguu

SEQ ID NO: 2196493 - RNA, 19 nt, Homo sapiens
  misc_RNA (1)...(19): siRNA sense strand
gcagcaagagucaggacaa

SEQ ID NO: 2196494 - RNA, 19 nt, Homo sapiens
  misc_RNA (1)...(19): siRNA sense strand
caacaucaacuugcugcuu

SEQ ID NO: 2196495 - RNA, 19 nt, Homo sapiens
  misc_RNA (1)...(19): siRNA sense strand
gcuccuuccugcaguguca

SEQ ID NO: 2196496 - RNA, 19 nt, Homo sapiens
  misc_RNA (1)...(19): siRNA sense strand
gcccagcacucuugguuuu

SEQ ID NO: 2196497 - RNA, 19 nt, Homo sapiens
  misc_RNA (1)...(19): siRNA sense strand
cguggagccugaggaguuu

SEQ ID NO: 2196498 - RNA, 19 nt, Homo sapiens
  misc_RNA (1)...(19): siRNA sense strand
gcaagagucaggacaagac

SEQ ID NO: 2196499 - RNA, 19 nt, Homo sapiens
  misc_RNA (1)...(19): siRNA sense strand
uguaaagucaucccugauu

SEQ ID NO: 2196500 - RNA, 19 nt, Homo sapiens
  misc_RNA (1)...(19): siRNA sense strand
ggaggagaaggaagcagaa

SEQ ID NO: 2196501 - RNA, 19 nt, Homo sapiens
  misc_RNA (1)...(19): siRNA sense strand
ugucaacgaugagaugugu

SEQ ID NO: 2196502 - RNA, 19 nt, Homo sapiens
  misc_RNA (1)...(19): siRNA sense strand
ugagugaggagcaagaaga

SEQ ID NO: 2196503 - RNA, 19 nt, Homo sapiens
  misc_RNA (1)...(19): siRNA sense strand
ucaacgaugagauguguga

SEQ ID NO: 2196504 - RNA, 19 nt, Homo sapiens
  misc_RNA (1)...(19): siRNA sense strand
uagaguggccugacuucuu

SEQ ID NO: 2196505 - RNA, 19 nt, Homo sapiens
  misc_RNA (1)...(19): siRNA sense strand
gacaggacaagucgauuca

SEQ ID NO: 2196506 - RNA, 19 nt, Homo sapiens
  misc_RNA (1)...(19): siRNA sense strand
ugacaggacaagucgauuc

SEQ ID NO: 2196507 - RNA, 19 nt, Homo sapiens
  misc_RNA (1)...(19): siRNA sense strand
acgaugagaugugugaugu

SEQ ID NO: 2196508 - RNA, 19 nt, Homo sapiens
  misc_RNA (1)...(19): siRNA sense strand
ccucggugguccaggaaga

SEQ ID NO: 2196509 - RNA, 19 nt, Homo sapiens
  misc_RNA (1)...(19): siRNA sense strand
cagcaagagucaggacaag

SEQ ID NO: 2196510 - RNA, 19 nt, Homo sapiens
  misc_RNA (1)...(19): siRNA sense strand
gccagcagcagcagcaaga

SEQ ID NO: 2196511 - RNA, 19 nt, Homo sapiens
  misc_RNA (1)...(19): siRNA sense strand
gggcccagcacucuugguu

SEQ ID NO: 2196512 - RNA, 19 nt, Homo sapiens
  misc_RNA (1)...(19): siRNA sense strand
caguggagcaggugcagaa

SEQ ID NO: 2196513 - RNA, 19 nt, Homo sapiens
  misc_RNA (1)...(19): siRNA sense strand
ggaagcuggaugaugacaa

SEQ ID NO: 2196514 - RNA, 19 nt, Homo sapiens
  misc_RNA (1)...(19): siRNA sense strand
ugaggcuucugacagugaa

SEQ ID NO: 2196515 - RNA, 19 nt, Homo sapiens
  misc_RNA (1)...(19): siRNA sense strand
caucgaggccacauagagu

SEQ ID NO: 2196516 - RNA, 19 nt, Homo sapiens
  misc_RNA (1)...(19): siRNA sense strand
ccgcaugggcuacauccaa

SEQ ID NO: 2196517 - RNA, 19 nt, Homo sapiens
  misc_RNA (1)...(19): siRNA sense strand
uggagcaggugcagaaggu

SEQ ID NO: 2196518 - RNA, 19 nt, Homo sapiens
  misc_RNA (1)...(19): siRNA sense strand
ggcugugucugcuuucaag

SEQ ID NO: 2196519 - RNA, 19 nt, Homo sapiens
  misc_RNA (1)...(19): siRNA sense strand
agacccugcugcccacaga

SEQ ID NO: 2196520 - RNA, 19 nt, Homo sapiens
  misc_RNA (1)...(19): siRNA sense strand
uguugaggcuucugacagu

SEQ ID NO: 2196521 - RNA, 19 nt, Homo sapiens
  misc_RNA (1)...(19): siRNA sense strand
ccuggacccugaacaucga

SEQ ID NO: 2196522 - RNA, 19 nt, Homo sapiens
  misc_RNA (1)...(19): siRNA sense strand
gagcccagagagccuguug

SEQ ID NO: 2196523 - RNA, 19 nt, Homo sapiens
  misc_RNA (1)...(19): siRNA sense strand
gcccagagagccuguuguc

SEQ ID NO: 2196524 - RNA, 19 nt, Homo sapiens
  misc_RNA (1)...(19): siRNA sense strand
ggaggacuuucugcguuac

SEQ ID NO: 2196525 - RNA, 19 nt, Homo sapiens
  misc_RNA (1)...(19): siRNA sense strand
ggcuggagcugccacuacu

SEQ ID NO: 2196526 - RNA, 19 nt, Homo sapiens
  misc_RNA (1)...(19): siRNA sense strand
ggacaaguauacacgaaua

SEQ ID NO: 2196527 - RNA, 19 nt, Homo sapiens
  misc_RNA (1)...(19): siRNA sense strand
gaaggaggaucagaagaua

SEQ ID NO: 2196528 - RNA, 19 nt, Homo sapiens
  misc_RNA (1)...(19): siRNA sense strand
ugaccuaucuucccaauca

SEQ ID NO: 2196529 - RNA, 19 nt, Homo sapiens
  misc_RNA (1)...(19): siRNA sense strand
gaaacccuaucuuugaguu

SEQ ID NO: 2196530 - RNA, 19 nt, Homo sapiens
  misc_RNA (1)...(19): siRNA sense strand
gaacugcacggucuauaga

SEQ ID NO: 2196531 - RNA, 19 nt, Homo sapiens
  misc_RNA (1)...(19): siRNA sense strand
caacaaagucagccaauuc

SEQ ID NO: 2196532 - RNA, 19 nt, Homo sapiens
  misc_RNA (1)...(19): siRNA sense strand
gaggaacacaccaagauaa

SEQ ID NO: 2196533 - RNA, 19 nt, Homo sapiens
  misc_RNA (1)...(19): siRNA sense strand
gagagacccucaucguuca

SEQ ID NO: 2196534 - RNA, 19 nt, Homo sapiens
  misc_RNA (1)...(19): siRNA sense strand
gaccgaagaucacaagaag

SEQ ID NO: 2196535 - RNA, 19 nt, Homo sapiens
  misc_RNA (1)...(19): siRNA sense strand
gguaaaagcuguuaacauc

SEQ ID NO: 2196536 - RNA, 19 nt, Homo sapiens
  misc_RNA (1)...(19): siRNA sense strand
ccauugaccugcuucagaa

SEQ ID NO: 2196537 - RNA, 19 nt, Homo sapiens
  misc_RNA (1)...(19): siRNA sense strand
gaacaggagccagugauga

SEQ ID NO: 2196538 - RNA, 19 nt, Homo sapiens
  misc_RNA (1)...(19): siRNA sense strand
gguuuaaucaccucuauaa

SEQ ID NO: 2196539 - RNA, 19 nt, Homo sapiens
  misc_RNA (1)...(19): siRNA sense strand
gaacacaccaagauaaguc

SEQ ID NO: 2196540 - RNA, 19 nt, Homo sapiens
  misc_RNA (1)...(19): siRNA sense strand
gugaagccguuaccacuga

SEQ ID NO: 2196541 - RNA, 19 nt, Homo sapiens
  misc_RNA (1)...(19): siRNA sense strand
gaugagggcacuugcugua

SEQ ID NO: 2196542 - RNA, 19 nt, Homo sapiens
  misc_RNA (1)...(19): siRNA sense strand
cagcccaacuuucaucuau

SEQ ID NO: 2196543 - RNA, 19 nt, Homo sapiens
  misc_RNA (1)...(19): siRNA sense strand
ccagagcucaccagucaua

SEQ ID NO: 2196544 - RNA, 19 nt, Homo sapiens
  misc_RNA (1)...(19): siRNA sense strand
cagaggccauuuccauuga

SEQ ID NO: 2196545 - RNA, 19 nt, Homo sapiens
  misc_RNA (1)...(19): siRNA sense strand
gcaaagcugggaaacaguu

SEQ ID NO: 2196546 - RNA, 19 nt, Homo sapiens
  misc_RNA (1)...(19): siRNA sense strand
ucccagagcucaccaguca

SEQ ID NO: 2196547 - RNA, 19 nt, Homo sapiens
  misc_RNA (1)...(19): siRNA sense strand
gcucaaggccuuuguacug

SEQ ID NO: 2196548 - RNA, 19 nt, Homo sapiens
  misc_RNA (1)...(19): siRNA sense strand
caagcugacucccugcuau

SEQ ID NO: 2196549 - RNA, 19 nt, Homo sapiens
  misc_RNA (1)...(19): siRNA sense strand
gagaagaggaagaggaaga

SEQ ID NO: 2196550 - RNA, 19 nt, Homo sapiens
  misc_RNA (1)...(19): siRNA sense strand
ggaagaagaggagacagaa

SEQ ID NO: 2196551 - RNA, 19 nt, Homo sapiens
  misc_RNA (1)...(19): siRNA sense strand
gaacaagaagcagugaguu

SEQ ID NO: 2196552 - RNA, 19 nt, Homo sapiens
  misc_RNA (1)...(19): siRNA sense strand
ccacugaccugcccugacu

SEQ ID NO: 2196553 - RNA, 19 nt, Homo sapiens
  misc_RNA (1)...(19): siRNA sense strand
cagaagauacugaccuuga

SEQ ID NO: 2196554 - RNA, 19 nt, Homo sapiens
  misc_RNA (1)...(19): siRNA sense strand
ggcacuugcuguagccaua

SEQ ID NO: 2196555 - RNA, 19 nt, Homo sapiens
  misc_RNA (1)...(19): siRNA sense strand
gagccuagaccgaagauca

SEQ ID NO: 2196556 - RNA, 19 nt, Homo sapiens
  misc_RNA (1)...(19): siRNA sense strand
caacagcagcagcgagaaa

SEQ ID NO: 2196557 - RNA, 19 nt, Homo sapiens
  misc_RNA (1)...(19): siRNA sense strand
aguauuaccuauuccagaa

SEQ ID NO: 2196558 - RNA, 19 nt, Homo sapiens
  misc_RNA (1)...(19): siRNA sense strand
auacugaccuugacugagu

SEQ ID NO: 2196559 - RNA, 19 nt, Homo sapiens
  misc_RNA (1)...(19): siRNA sense strand
ccaagaagcccagcaagau

SEQ ID NO: 2196560 - RNA, 19 nt, Homo sapiens
  misc_RNA (1)...(19): siRNA sense strand
aauggaagcucaguucaga

SEQ ID NO: 2196561 - RNA, 19 nt, Homo sapiens
  misc_RNA (1)...(19): siRNA sense strand
ggugggagcacaagaccua

SEQ ID NO: 2196562 - RNA, 19 nt, Homo sapiens
  misc_RNA (1)...(19): siRNA sense strand
uuggugaccuguaugauga

SEQ ID NO: 2196563 - RNA, 19 nt, Homo sapiens
  misc_RNA (1)...(19): siRNA sense strand
gcacuggccagcccaacuu

SEQ ID NO: 2196564 - RNA, 19 nt, Homo sapiens
  misc_RNA (1)...(19): siRNA sense strand
uuaaucaccucuauaacca

SEQ ID NO: 2196565 - RNA, 19 nt, Homo sapiens
  misc_RNA (1)...(19): siRNA sense strand
ggaacugcacggucuauag

SEQ ID NO: 2196566 - RNA, 19 nt, Homo sapiens
  misc_RNA (1)...(19): siRNA sense strand
ggaacaagaagcagugagu

SEQ ID NO: 2196567 - RNA, 19 nt, Homo sapiens
  misc_RNA (1)...(19): siRNA sense strand
ugaggaacacaccaagaua

SEQ ID NO: 2196568 - RNA, 19 nt, Homo sapiens
  misc_RNA (1)...(19): siRNA sense strand
ucagcacccucuacaacaa

SEQ ID NO: 2196569 - RNA, 19 nt, Homo sapiens
  misc_RNA (1)...(19): siRNA sense strand
ccagugaugaccuuggaua

SEQ ID NO: 2196570 - RNA, 19 nt, Homo sapiens
  misc_RNA (1)...(19): siRNA sense strand
acaacaaagucagccaauu

SEQ ID NO: 2196571 - RNA, 19 nt, Homo sapiens
  misc_RNA (1)...(19): siRNA sense strand
gcucagaggccauuuccau

SEQ ID NO: 2196572 - RNA, 19 nt, Homo sapiens
  misc_RNA (1)...(19): siRNA sense strand
ccagccagcccucugagua

SEQ ID NO: 2196573 - RNA, 19 nt, Homo sapiens
  misc_RNA (1)...(19): siRNA sense strand
ccauuugagucuaagaugu

SEQ ID NO: 2196574 - RNA, 19 nt, Homo sapiens
  misc_RNA (1)...(19): siRNA sense strand
gcagaaggaggaucagaag

SEQ ID NO: 2196575 - RNA, 19 nt, Homo sapiens
  misc_RNA (1)...(19): siRNA sense strand
uggaacguauguugaguug

SEQ ID NO: 2196576 - RNA, 19 nt, Homo sapiens
  misc_RNA (1)...(19): siRNA sense strand
ccucaucguucaucacauc

SEQ ID NO: 2196577 - RNA, 19 nt, Homo sapiens
  misc_RNA (1)...(19): siRNA sense strand
ucagaggccauuuccauug

SEQ ID NO: 2196578 - RNA, 19 nt, Homo sapiens
  misc_RNA (1)...(19): siRNA sense strand
auagacagcaccaagagua

SEQ ID NO: 2196579 - RNA, 19 nt, Homo sapiens
  misc_RNA (1)...(19): siRNA sense strand
ucccuggaguucugguuua

SEQ ID NO: 2196580 - RNA, 19 nt, Homo sapiens
  misc_RNA (1)...(19): siRNA sense strand
ugacagcauuggugacagu

SEQ ID NO: 2196581 - RNA, 19 nt, Homo sapiens
  misc_RNA (1)...(19): siRNA sense strand
gaucaagaccuaggacaag

SEQ ID NO: 2196582 - RNA, 19 nt, Homo sapiens
  misc_RNA (1)...(19): siRNA sense strand
ccacuagggccaccugguu

SEQ ID NO: 2196583 - RNA, 19 nt, Homo sapiens
  misc_RNA (1)...(19): siRNA sense strand
gggaauacaggaggaagaa

SEQ ID NO: 2196584 - RNA, 19 nt, Homo sapiens
  misc_RNA (1)...(19): siRNA sense strand
gcccagcacugacucuucu

SEQ ID NO: 2196585 - RNA, 19 nt, Homo sapiens
  misc_RNA (1)...(19): siRNA sense strand
caaccacacugcccaucca

SEQ ID NO: 2196586 - RNA, 19 nt, Homo sapiens
  misc_RNA (1)...(19): siRNA sense strand
ggaguucucacccauccaa

SEQ ID NO: 2196587 - RNA, 19 nt, Homo sapiens
  misc_RNA (1)...(19): siRNA sense strand
ggaacaggagccagugaug

SEQ ID NO: 2196588 - RNA, 19 nt, Homo sapiens
  misc_RNA (1)...(19): siRNA sense strand
ggaauggaagcucaguuca

SEQ ID NO: 2196589 - RNA, 19 nt, Homo sapiens
  misc_RNA (1)...(19): siRNA sense strand
aagaagaggagacagaaga

SEQ ID NO: 2196590 - RNA, 19 nt, Homo sapiens
  misc_RNA (1)...(19): siRNA sense strand
gggugugggugccucagaa

SEQ ID NO: 2196591 - RNA, 19 nt, Homo sapiens
  misc_RNA (1)...(19): siRNA sense strand
caagaagcccagcaagauc

SEQ ID NO: 2196592 - RNA, 19 nt, Homo sapiens
  misc_RNA (1)...(19): siRNA sense strand
gugaugaccuuggauacuc

SEQ ID NO: 2196593 - RNA, 19 nt, Homo sapiens
  misc_RNA (1)...(19): siRNA sense strand
ccagcccgaucaagaccua

SEQ ID NO: 2196594 - RNA, 19 nt, Homo sapiens
  misc_RNA (1)...(19): siRNA sense strand
ucacccagcccgaucaaga

SEQ ID NO: 2196595 - RNA, 19 nt, Homo sapiens
  misc_RNA (1)...(19): siRNA sense strand
ccucacagccugcuuccaa

SEQ ID NO: 2196596 - RNA, 19 nt, Homo sapiens
  misc_RNA (1)...(19): siRNA sense strand
gccaccugguucugaagua

SEQ ID NO: 2196597 - RNA, 19 nt, Homo sapiens
  misc_RNA (1)...(19): siRNA sense strand
ccugcuggcucuuccauca

SEQ ID NO: 2196598 - RNA, 19 nt, Homo sapiens
  misc_RNA (1)...(19): siRNA sense strand
gcucccaggucuacaucga

SEQ ID NO: 2196599 - RNA, 19 nt, Homo sapiens
  misc_RNA (1)...(19): siRNA sense strand
ucaccucuauaaccacgaa

SEQ ID NO: 2196600 - RNA, 19 nt, Homo sapiens
  misc_RNA (1)...(19): siRNA sense strand
agaaggaggaucagaagau

SEQ ID NO: 2196601 - RNA, 19 nt, Homo sapiens
  misc_RNA (1)...(19): siRNA sense strand
gccagcccucugaguauua

SEQ ID NO: 2196602 - RNA, 19 nt, Homo sapiens
  misc_RNA (1)...(19): siRNA sense strand
gaagaagaggagacagaag

SEQ ID NO: 2196603 - RNA, 19 nt, Homo sapiens
  misc_RNA (1)...(19): siRNA sense strand
gcauggccucuacaacaaa

SEQ ID NO: 2196604 - RNA, 19 nt, Homo sapiens
  misc_RNA (1)...(19): siRNA sense strand
ugcauggccucuacaacaa

SEQ ID NO: 2196605 - RNA, 19 nt, Homo sapiens
  misc_RNA (1)...(19): siRNA sense strand
gaagccuccagcugaguuu

SEQ ID NO: 2196606 - RNA, 19 nt, Homo sapiens
  misc_RNA (1)...(19): siRNA sense strand
gcccagugcgcuugaguga

SEQ ID NO: 2196607 - RNA, 19 nt, Homo sapiens
  misc_RNA (1)...(19): siRNA sense strand
gaugacagcauuggugaca

SEQ ID NO: 2196608 - RNA, 19 nt, Homo sapiens
  misc_RNA (1)...(19): siRNA sense strand
acuuucaucuauccucuuu

SEQ ID NO: 2196609 - RNA, 19 nt, Homo sapiens
  misc_RNA (1)...(19): siRNA sense strand
gcagagcucccaggucuac

SEQ ID NO: 2196610 - RNA, 19 nt, Homo sapiens
  misc_RNA (1)...(19): siRNA sense strand
gcaguagcacauccaguca

SEQ ID NO: 2196611 - RNA, 19 nt, Homo sapiens
  misc_RNA (1)...(19): siRNA sense strand
ggaagcucaguucagauga

SEQ ID NO: 2196612 - RNA, 19 nt, Homo sapiens
  misc_RNA (1)...(19): siRNA sense strand
cagcgauaccucuggcuuu

SEQ ID NO: 2196613 - RNA, 19 nt, Homo sapiens
  misc_RNA (1)...(19): siRNA sense strand
aggcaaagcugggaaacag

SEQ ID NO: 2196614 - RNA, 19 nt, Homo sapiens
  misc_RNA (1)...(19): siRNA sense strand
gaauggaagcucaguucag

SEQ ID NO: 2196615 - RNA, 19 nt, Homo sapiens
  misc_RNA (1)...(19): siRNA sense strand
cuggaguucugguuuaauc

SEQ ID NO: 2196616 - RNA, 19 nt, Homo sapiens
  misc_RNA (1)...(19): siRNA sense strand
ggaggaacugcacggucua

SEQ ID NO: 2196617 - RNA, 19 nt, Homo sapiens
  misc_RNA (1)...(19): siRNA sense strand
ggaacacaccaagauaagu

SEQ ID NO: 2196618 - RNA, 19 nt, Homo sapiens
  misc_RNA (1)...(19): siRNA sense strand
ccucuucuccugagcuuga

SEQ ID NO: 2196619 - RNA, 19 nt, Homo sapiens
  misc_RNA (1)...(19): siRNA sense strand
ggcuaugguugcccucaug

SEQ ID NO: 2196620 - RNA, 19 nt, Homo sapiens
  misc_RNA (1)...(19): siRNA sense strand
acaaguccauguuccaacu

SEQ ID NO: 2196621 - RNA, 19 nt, Homo sapiens
  misc_RNA (1)...(19): siRNA sense strand
ccauugaggguuccagguu

SEQ ID NO: 2196622 - RNA, 19 nt, Homo sapiens
  misc_RNA (1)...(19): siRNA sense strand
gaagauacugaccuugacu

SEQ ID NO: 2196623 - RNA, 19 nt, Homo sapiens
  misc_RNA (1)...(19): siRNA sense strand
gaguaccggcuccauggaa

SEQ ID NO: 2196624 - RNA, 19 nt, Homo sapiens
  misc_RNA (1)...(19): siRNA sense strand
gagcucaccagucauacca

SEQ ID NO: 2196625 - RNA, 19 nt, Homo sapiens
  misc_RNA (1)...(19): siRNA sense strand
cugcauggccucuacaaca

SEQ ID NO: 2196626 - RNA, 19 nt, Homo sapiens
  misc_RNA (1)...(19): siRNA sense strand
gaaauaccaucuacgcuaa

SEQ ID NO: 2196627 - RNA, 19 nt, Homo sapiens
  misc_RNA (1)...(19): siRNA sense strand
gcagugcgguguauacaua

SEQ ID NO: 2196628 - RNA, 19 nt, Homo sapiens
  misc_RNA (1)...(19): siRNA sense strand
gcaaaggccucaucacaga

SEQ ID NO: 2196629 - RNA, 19 nt, Homo sapiens
  misc_RNA (1)...(19): siRNA sense strand
gaacugggccuacaaguau

SEQ ID NO: 2196630 - RNA, 19 nt, Homo sapiens
  misc_RNA (1)...(19): siRNA sense strand
agacagagcuggagaagga

SEQ ID NO: 2196631 - RNA, 19 nt, Homo sapiens
  misc_RNA (1)...(19): siRNA sense strand
ccaaagaccugugacauug

SEQ ID NO: 2196632 - RNA, 19 nt, Homo sapiens
  misc_RNA (1)...(19): siRNA sense strand
ggaguaaccucaucugcuu

SEQ ID NO: 2196633 - RNA, 19 nt, Homo sapiens
  misc_RNA (1)...(19): siRNA sense strand
gaaggugccuguggagauu

SEQ ID NO: 2196634 - RNA, 19 nt, Homo sapiens
  misc_RNA (1)...(19): siRNA sense strand
gcaaugguaucuaugacaa

SEQ ID NO: 2196635 - RNA, 19 nt, Homo sapiens
  misc_RNA (1)...(19): siRNA sense strand
gcaacaacauuuaccacaa

SEQ ID NO: 2196636 - RNA, 19 nt, Homo sapiens
  misc_RNA (1)...(19): siRNA sense strand
gagccaagauggaaggaaa

SEQ ID NO: 2196637 - RNA, 19 nt, Homo sapiens
  misc_RNA (1)...(19): siRNA sense strand
ggagggcgguggcuugauu

SEQ ID NO: 2196638 - RNA, 19 nt, Homo sapiens
  misc_RNA (1)...(19): siRNA sense strand
caacaacauuuaccacaau

SEQ ID NO: 2196639 - RNA, 19 nt, Homo sapiens
  misc_RNA (1)...(19): siRNA sense strand
caacagaggccacggcauu

SEQ ID NO: 2196640 - RNA, 19 nt, Homo sapiens
  misc_RNA (1)...(19): siRNA sense strand
gcauagcagugaaugagaa

SEQ ID NO: 2196641 - RNA, 19 nt, Homo sapiens
  misc_RNA (1)...(19): siRNA sense strand
guccgacacuaaaguaaua

SEQ ID NO: 2196642 - RNA, 19 nt, Homo sapiens
  misc_RNA (1)...(19): siRNA sense strand
gauaagaacugggccuaca

SEQ ID NO: 2196643 - RNA, 19 nt, Homo sapiens
  misc_RNA (1)...(19): siRNA sense strand
ccacagggcucaagagaac

SEQ ID NO: 2196644 - RNA, 19 nt, Homo sapiens
  misc_RNA (1)...(19): siRNA sense strand
cgacguacccugaguguug

SEQ ID NO: 2196645 - RNA, 19 nt, Homo sapiens
  misc_RNA (1)...(19): siRNA sense strand
uaaggaggcuggcauuuac

SEQ ID NO: 2196646 - RNA, 19 nt, Homo sapiens
  misc_RNA (1)...(19): siRNA sense strand
ccggaacaaucaaaucuuu

SEQ ID NO: 2196647 - RNA, 19 nt, Homo sapiens
  misc_RNA (1)...(19): siRNA sense strand
caccauagcucuuguugag

SEQ ID NO: 2196648 - RNA, 19 nt, Homo sapiens
  misc_RNA (1)...(19): siRNA sense strand
ucucacccaucauguauaa

SEQ ID NO: 2196649 - RNA, 19 nt, Homo sapiens
  misc_RNA (1)...(19): siRNA sense strand
cauaauagcaagaucauca

SEQ ID NO: 2196650 - RNA, 19 nt, Homo sapiens
  misc_RNA (1)...(19): siRNA sense strand
ggauggcuccagcgaguua

SEQ ID NO: 2196651 - RNA, 19 nt, Homo sapiens
  misc_RNA (1)...(19): siRNA sense strand
cagcugauguacagacuau

SEQ ID NO: 2196652 - RNA, 19 nt, Homo sapiens
  misc_RNA (1)...(19): siRNA sense strand
cgacagcaccaucgucauu

SEQ ID NO: 2196653 - RNA, 19 nt, Homo sapiens
  misc_RNA (1)...(19): siRNA sense strand
ggaaaacugugaauuugug

SEQ ID NO: 2196654 - RNA, 19 nt, Homo sapiens
  misc_RNA (1)...(19): siRNA sense strand
ggccuucgcucuggcauug

SEQ ID NO: 2196655 - RNA, 19 nt, Homo sapiens
  misc_RNA (1)...(19): siRNA sense strand
guauggaguggcaguauuu

SEQ ID NO: 2196656 - RNA, 19 nt, Homo sapiens
  misc_RNA (1)...(19): siRNA sense strand
guacgaagagcaaggugaa

SEQ ID NO: 2196657 - RNA, 19 nt, Homo sapiens
  misc_RNA (1)...(19): siRNA sense strand
aaagaccugugacauuguu

SEQ ID NO: 2196658 - RNA, 19 nt, Homo sapiens
  misc_RNA (1)...(19): siRNA sense strand
gaagagcaaggugaaauca

SEQ ID NO: 2196659 - RNA, 19 nt, Homo sapiens
  misc_RNA (1)...(19): siRNA sense strand
ggaacgacguacccugagu

SEQ ID NO: 2196660 - RNA, 19 nt, Homo sapiens
  misc_RNA (1)...(19): siRNA sense strand
caaccgagaaugcaucaug

SEQ ID NO: 2196661 - RNA, 19 nt, Homo sapiens
  misc_RNA (1)...(19): siRNA sense strand
aaggugaaaucaucuugaa

SEQ ID NO: 2196662 - RNA, 19 nt, Homo sapiens
  misc_RNA (1)...(19): siRNA sense strand
gcaaccacgucagcuacaa

SEQ ID NO: 2196663 - RNA, 19 nt, Homo sapiens
  misc_RNA (1)...(19): siRNA sense strand
gaaaaugucauccgugaga

SEQ ID NO: 2196664 - RNA, 19 nt, Homo sapiens
  misc_RNA (1)...(19): siRNA sense strand
auaaggaggcuggcauuua

SEQ ID NO: 2196665 - RNA, 19 nt, Homo sapiens
  misc_RNA (1)...(19): siRNA sense strand
gaauuugugggcagugaaa

SEQ ID NO: 2196666 - RNA, 19 nt, Homo sapiens
  misc_RNA (1)...(19): siRNA sense strand
caagugaaguucuguaccu

SEQ ID NO: 2196667 - RNA, 19 nt, Homo sapiens
  misc_RNA (1)...(19): siRNA sense strand
cagccuguaugaccgaauu

SEQ ID NO: 2196668 - RNA, 19 nt, Homo sapiens
  misc_RNA (1)...(19): siRNA sense strand
caggucacguccaguuuga

SEQ ID NO: 2196669 - RNA, 19 nt, Homo sapiens
  misc_RNA (1)...(19): siRNA sense strand
gcggugaggaugaagauga

SEQ ID NO: 2196670 - RNA, 19 nt, Homo sapiens
  misc_RNA (1)...(19): siRNA sense strand
agagcaaggugaaaucauc

SEQ ID NO: 2196671 - RNA, 19 nt, Homo sapiens
  misc_RNA (1)...(19): siRNA sense strand
aggcagagguggguaguga

SEQ ID NO: 2196672 - RNA, 19 nt, Homo sapiens
  misc_RNA (1)...(19): siRNA sense strand
agaacugggccuacaagua

SEQ ID NO: 2196673 - RNA, 19 nt, Homo sapiens
  misc_RNA (1)...(19): siRNA sense strand
cuauucagauggugugguu

SEQ ID NO: 2196674 - RNA, 19 nt, Homo sapiens
  misc_RNA (1)...(19): siRNA sense strand
agaaggaaauaccaucuac

SEQ ID NO: 2196675 - RNA, 19 nt, Homo sapiens
  misc_RNA (1)...(19): siRNA sense strand
ggcaaaggccucauagaag

SEQ ID NO: 2196676 - RNA, 19 nt, Homo sapiens
  misc_RNA (1)...(19): siRNA sense strand
gcagagguggguagugaug

SEQ ID NO: 2196677 - RNA, 19 nt, Homo sapiens
  misc_RNA (1)...(19): siRNA sense strand
acaaguuccuggucuucaa

SEQ ID NO: 2196678 - RNA, 19 nt, Homo sapiens
  misc_RNA (1)...(19): siRNA sense strand
caucugcuuuggcuauuca

SEQ ID NO: 2196679 - RNA, 19 nt, Homo sapiens
  misc_RNA (1)...(19): siRNA sense strand
gaacggcaaaggccucauc

SEQ ID NO: 2196680 - RNA, 19 nt, Homo sapiens
  misc_RNA (1)...(19): siRNA sense strand
cagacuauccuaccaagug

SEQ ID NO: 2196681 - RNA, 19 nt, Homo sapiens
  misc_RNA (1)...(19): siRNA sense strand
guacagacuauccuaccaa

SEQ ID NO: 2196682 - RNA, 19 nt, Homo sapiens
  misc_RNA (1)...(19): siRNA sense strand
uuugacaacugcaacuuug

SEQ ID NO: 2196683 - RNA, 19 nt, Homo sapiens
  misc_RNA (1)...(19): siRNA sense strand
gcccagguccgacacuaaa

SEQ ID NO: 2196684 - RNA, 19 nt, Homo sapiens
  misc_RNA (1)...(19): siRNA sense strand
uagcucuuguugagucuaa

SEQ ID NO: 2196685 - RNA, 19 nt, Homo sapiens
  misc_RNA (1)...(19): siRNA sense strand
gaugaggaccagcugaugu

SEQ ID NO: 2196686 - RNA, 19 nt, Homo sapiens
  misc_RNA (1)...(19): siRNA sense strand
caauaaggaggcuggcauu

SEQ ID NO: 2196687 - RNA, 19 nt, Homo sapiens
  misc_RNA (1)...(19): siRNA sense strand
gagcgggaaccacaucuuc

SEQ ID NO: 2196688 - RNA, 19 nt, Homo sapiens
  misc_RNA (1)...(19): siRNA sense strand
ucacccaucauguauaaga

SEQ ID NO: 2196689 - RNA, 19 nt, Homo sapiens
  misc_RNA (1)...(19): siRNA sense strand
uacuagggcuuaucaaguc

SEQ ID NO: 2196690 - RNA, 19 nt, Homo sapiens
  misc_RNA (1)...(19): siRNA sense strand
gugaaaucaucuugaaggu

SEQ ID NO: 2196691 - RNA, 19 nt, Homo sapiens
  misc_RNA (1)...(19): siRNA sense strand
gcgaggcacugcaugucau

SEQ ID NO: 2196692 - RNA, 19 nt, Homo sapiens
  misc_RNA (1)...(19): siRNA sense strand
gagucuaacaguauuaauc

SEQ ID NO: 2196693 - RNA, 19 nt, Homo sapiens
  misc_RNA (1)...(19): siRNA sense strand
aaaguccaacccacucaua

SEQ ID NO: 2196694 - RNA, 19 nt, Homo sapiens
  misc_RNA (1)...(19): siRNA sense strand
cccaaagaccugugacauu

SEQ ID NO: 2196695 - RNA, 19 nt, Homo sapiens
  misc_RNA (1)...(19): siRNA sense strand
caucaggucacguccaguu

SEQ ID NO: 2196696 - RNA, 19 nt, Homo sapiens
  misc_RNA (1)...(19): siRNA sense strand
agcauuaccuugcauccaa

SEQ ID NO: 2196697 - RNA, 19 nt, Homo sapiens
  misc_RNA (1)...(19): siRNA sense strand
ggccugguaugaacugauc

SEQ ID NO: 2196698 - RNA, 19 nt, Homo sapiens
  misc_RNA (1)...(19): siRNA sense strand
uguauggaguggcaguauu

SEQ ID NO: 2196699 - RNA, 19 nt, Homo sapiens
  misc_RNA (1)...(19): siRNA sense strand
gugaauuugugggcaguga

SEQ ID NO: 2196700 - RNA, 19 nt, Homo sapiens
  misc_RNA (1)...(19): siRNA sense strand
acaacaaguuccuggucuu

SEQ ID NO: 2196701 - RNA, 19 nt, Homo sapiens
  misc_RNA (1)...(19): siRNA sense strand
acagcaccaucgucauuga

SEQ ID NO: 2196702 - RNA, 19 nt, Homo sapiens
  misc_RNA (1)...(19): siRNA sense strand
cggcaaaggccucaucaca

SEQ ID NO: 2196703 - RNA, 19 nt, Homo sapiens
  misc_RNA (1)...(19): siRNA sense strand
caucauguauaagacaaca

SEQ ID NO: 2196704 - RNA, 19 nt, Homo sapiens
  misc_RNA (1)...(19): siRNA sense strand
aacaagggcuguggugugu

SEQ ID NO: 2196705 - RNA, 19 nt, Homo sapiens
  misc_RNA (1)...(19): siRNA sense strand
gcucaggaacgacauuuac

SEQ ID NO: 2196706 - RNA, 19 nt, Homo sapiens
  misc_RNA (1)...(19): siRNA sense strand
gugcgguguauacauaaua

SEQ ID NO: 2196707 - RNA, 19 nt, Homo sapiens
  misc_RNA (1)...(19): siRNA sense strand
agacauggaccaagaaugc

SEQ ID NO: 2196708 - RNA, 19 nt, Homo sapiens
  misc_RNA (1)...(19): siRNA sense strand
caacugcaacuuugagaac

SEQ ID NO: 2196709 - RNA, 19 nt, Homo sapiens
  misc_RNA (1)...(19): siRNA sense strand
guucucacccaucauguau

SEQ ID NO: 2196710 - RNA, 19 nt, Homo sapiens
  misc_RNA (1)...(19): siRNA sense strand
caacaaguuccuggucuuc

SEQ ID NO: 2196711 - RNA, 19 nt, Homo sapiens
  misc_RNA (1)...(19): siRNA sense strand
ccugugacauuguuaucga

SEQ ID NO: 2196712 - RNA, 19 nt, Homo sapiens
  misc_RNA (1)...(19): siRNA sense strand
ggagucuuccaucugcuuu

SEQ ID NO: 2196713 - RNA, 19 nt, Homo sapiens
  misc_RNA (1)...(19): siRNA sense strand
caaugcagaggcuggugua

SEQ ID NO: 2196714 - RNA, 19 nt, Homo sapiens
  misc_RNA (1)...(19): siRNA sense strand
agaaccggauccacucguu

SEQ ID NO: 2196715 - RNA, 19 nt, Homo sapiens
  misc_RNA (1)...(19): siRNA sense strand
gcaccaucgucauugaaaa

SEQ ID NO: 2196716 - RNA, 19 nt, Homo sapiens
  misc_RNA (1)...(19): siRNA sense strand
ccagcaaccacgucagcua

SEQ ID NO: 2196717 - RNA, 19 nt, Homo sapiens
  misc_RNA (1)...(19): siRNA sense strand
cuacuagggcuuaucaagu

SEQ ID NO: 2196718 - RNA, 19 nt, Homo sapiens
  misc_RNA (1)...(19): siRNA sense strand
ugguaucuaugacaacaga

SEQ ID NO: 2196719 - RNA, 19 nt, Homo sapiens
  misc_RNA (1)...(19): siRNA sense strand
gcgggaaccacaucuucaa

SEQ ID NO: 2196720 - RNA, 19 nt, Homo sapiens
  misc_RNA (1)...(19): siRNA sense strand
cggcagagccaagauggaa

SEQ ID NO: 2196721 - RNA, 19 nt, Homo sapiens
  misc_RNA (1)...(19): siRNA sense strand
agaaugccuuggacuugga

SEQ ID NO: 2196722 - RNA, 19 nt, Homo sapiens
  misc_RNA (1)...(19): siRNA sense strand
caaaggccucaucacagaa

SEQ ID NO: 2196723 - RNA, 19 nt, Homo sapiens
  misc_RNA (1)...(19): siRNA sense strand
acaacagcaucuccugcaa

SEQ ID NO: 2196724 - RNA, 19 nt, Homo sapiens
  misc_RNA (1)...(19): siRNA sense strand
caguauuaaucacaaugga

SEQ ID NO: 2196725 - RNA, 19 nt, Homo sapiens
  misc_RNA (1)...(19): siRNA sense strand
caaaggccucauagaagga

SEQ ID NO: 2196726 - RNA, 19 nt, Homo sapiens
  misc_RNA (1)...(19): siRNA sense strand
guucgacaauggcagcuuu

SEQ ID NO: 2196727 - RNA, 19 nt, Homo sapiens
  misc_RNA (1)...(19): siRNA sense strand
gagaggaggaagaugaaga

SEQ ID NO: 2196728 - RNA, 19 nt, Homo sapiens
  misc_RNA (1)...(19): siRNA sense strand
gccacaaccucucgcugaa

SEQ ID NO: 2196729 - RNA, 19 nt, Homo sapiens
  misc_RNA (1)...(19): siRNA sense strand
ggaggcggaugcaucucuu

SEQ ID NO: 2196730 - RNA, 19 nt, Homo sapiens
  misc_RNA (1)...(19): siRNA sense strand
caucugcgccuucauuagu

SEQ ID NO: 2196731 - RNA, 19 nt, Homo sapiens
  misc_RNA (1)...(19): siRNA sense strand
gaacagcauccgccacaac

SEQ ID NO: 2196732 - RNA, 19 nt, Homo sapiens
  misc_RNA (1)...(19): siRNA sense strand
ggcaucugcgccuucauua

SEQ ID NO: 2196733 - RNA, 19 nt, Homo sapiens
  misc_RNA (1)...(19): siRNA sense strand
ggaagacgguaaaaucgau

SEQ ID NO: 2196734 - RNA, 19 nt, Homo sapiens
  misc_RNA (1)...(19): siRNA sense strand
gggagaggaggaagaugaa

SEQ ID NO: 2196735 - RNA, 19 nt, Homo sapiens
  misc_RNA (1)...(19): siRNA sense strand
caggacauguucgacaaug

SEQ ID NO: 2196736 - RNA, 19 nt, Homo sapiens
  misc_RNA (1)...(19): siRNA sense strand
gagcgaccccucagaguuu

SEQ ID NO: 2196737 - RNA, 19 nt, Homo sapiens
  misc_RNA (1)...(19): siRNA sense strand
gcaucucuuucagcauuga

SEQ ID NO: 2196738 - RNA, 19 nt, Homo sapiens
  misc_RNA (1)...(19): siRNA sense strand
gcauccuccucgcuaccua

SEQ ID NO: 2196739 - RNA, 19 nt, Homo sapiens
  misc_RNA (1)...(19): siRNA sense strand
cccaggacauguucgacaa

SEQ ID NO: 2196740 - RNA, 19 nt, Homo sapiens
  misc_RNA (1)...(19): siRNA sense strand
ugggagaggaggaagauga

SEQ ID NO: 2196741 - RNA, 19 nt, Homo sapiens
  misc_RNA (1)...(19): siRNA sense strand
cggcaucugcgccuucauu

SEQ ID NO: 2196742 - RNA, 19 nt, Homo sapiens
  misc_RNA (1)...(19): siRNA sense strand
gcggaugcaucucuuucag

SEQ ID NO: 2196743 - RNA, 19 nt, Homo sapiens
  misc_RNA (1)...(19): siRNA sense strand
caccauggccauccugcaa

SEQ ID NO: 2196744 - RNA, 19 nt, Homo sapiens
  misc_RNA (1)...(19): siRNA sense strand
ccauggccauccugcaaag

SEQ ID NO: 2196745 - RNA, 19 nt, Homo sapiens
  misc_RNA (1)...(19): siRNA sense strand
gugcugcagcccucacuug

SEQ ID NO: 2196746 - RNA, 19 nt, Homo sapiens
  misc_RNA (1)...(19): siRNA sense strand
gagaacagcugcauacaaa

SEQ ID NO: 2196747 - RNA, 19 nt, Homo sapiens
  misc_RNA (1)...(19): siRNA sense strand
gaaauugagugcauugaga

SEQ ID NO: 2196748 - RNA, 19 nt, Homo sapiens
  misc_RNA (1)...(19): siRNA sense strand
aaagagaaccuuccauuua

SEQ ID NO: 2196749 - RNA, 19 nt, Homo sapiens
  misc_RNA (1)...(19): siRNA sense strand
caagcaagcagaaguauua

SEQ ID NO: 2196750 - RNA, 19 nt, Homo sapiens
  misc_RNA (1)...(19): siRNA sense strand
gaagaacugcaucauaaua

SEQ ID NO: 2196751 - RNA, 19 nt, Homo sapiens
  misc_RNA (1)...(19): siRNA sense strand
gaaaucaggugagcuguug

SEQ ID NO: 2196752 - RNA, 19 nt, Homo sapiens
  misc_RNA (1)...(19): siRNA sense strand
uggaagaacugcaucauaa

SEQ ID NO: 2196753 - RNA, 19 nt, Homo sapiens
  misc_RNA (1)...(19): siRNA sense strand
gaaagagaaccuuccauuu

SEQ ID NO: 2196754 - RNA, 19 nt, Homo sapiens
  misc_RNA (1)...(19): siRNA sense strand
gaaaggagaacuaaauguu

SEQ ID NO: 2196755 - RNA, 19 nt, Homo sapiens
  misc_RNA (1)...(19): siRNA sense strand
ggaacuagcuaauguccaa

SEQ ID NO: 2196756 - RNA, 19 nt, Homo sapiens
  misc_RNA (1)...(19): siRNA sense strand
caagagaaguuuauugcaa

SEQ ID NO: 2196757 - RNA, 19 nt, Homo sapiens
  misc_RNA (1)...(19): siRNA sense strand
ggaauuaacagaccagaaa

SEQ ID NO: 2196758 - RNA, 19 nt, Homo sapiens
  misc_RNA (1)...(19): siRNA sense strand
gaggagagguggugugaga

SEQ ID NO: 2196759 - RNA, 19 nt, Homo sapiens
  misc_RNA (1)...(19): siRNA sense strand
gcaagcagaaguauuaauu

SEQ ID NO: 2196760 - RNA, 19 nt, Homo sapiens
  misc_RNA (1)...(19): siRNA sense strand
gaaaggagagcucaggaaa

SEQ ID NO: 2196761 - RNA, 19 nt, Homo sapiens
  misc_RNA (1)...(19): siRNA sense strand
ccaaaggguaucugaauua

SEQ ID NO: 2196762 - RNA, 19 nt, Homo sapiens
  misc_RNA (1)...(19): siRNA sense strand
acacggagcucaagaaaca

SEQ ID NO: 2196763 - RNA, 19 nt, Homo sapiens
  misc_RNA (1)...(19): siRNA sense strand
ggagacaaguagaugcuuu

SEQ ID NO: 2196764 - RNA, 19 nt, Homo sapiens
  misc_RNA (1)...(19): siRNA sense strand
gcaaugaggacacuuaaau

SEQ ID NO: 2196765 - RNA, 19 nt, Homo sapiens
  misc_RNA (1)...(19): siRNA sense strand
ugacugaacuagaaauaga

SEQ ID NO: 2196766 - RNA, 19 nt, Homo sapiens
  misc_RNA (1)...(19): siRNA sense strand
ugaaggagcucaaccagau

SEQ ID NO: 2196767 - RNA, 19 nt, Homo sapiens
  misc_RNA (1)...(19): siRNA sense strand
gaaggaagcacuuaagauc

SEQ ID NO: 2196768 - RNA, 19 nt, Homo sapiens
  misc_RNA (1)...(19): siRNA sense strand
gagaagugcaaucacauua

SEQ ID NO: 2196769 - RNA, 19 nt, Homo sapiens
  misc_RNA (1)...(19): siRNA sense strand
gaaacuacagaaagacaua

SEQ ID NO: 2196770 - RNA, 19 nt, Homo sapiens
  misc_RNA (1)...(19): siRNA sense strand
acauagaacuguccagaaa

SEQ ID NO: 2196771 - RNA, 19 nt, Homo sapiens
  misc_RNA (1)...(19): siRNA sense strand
gcagacagagggcacuuua

SEQ ID NO: 2196772 - RNA, 19 nt, Homo sapiens
  misc_RNA (1)...(19): siRNA sense strand
ggaaauggcaacaauugaa

SEQ ID NO: 2196773 - RNA, 19 nt, Homo sapiens
  misc_RNA (1)...(19): siRNA sense strand
gaaagaggcagauucuaug

SEQ ID NO: 2196774 - RNA, 19 nt, Homo sapiens
  misc_RNA (1)...(19): siRNA sense strand
ugaggacacuuaaaucuga

SEQ ID NO: 2196775 - RNA, 19 nt, Homo sapiens
  misc_RNA (1)...(19): siRNA sense strand
ggugaaggaugaaaucaga

SEQ ID NO: 2196776 - RNA, 19 nt, Homo sapiens
  misc_RNA (1)...(19): siRNA sense strand
gaacuagaccaacuaaaca

SEQ ID NO: 2196777 - RNA, 19 nt, Homo sapiens
  misc_RNA (1)...(19): siRNA sense strand
cagcagaucuagaagcuau

SEQ ID NO: 2196778 - RNA, 19 nt, Homo sapiens
  misc_RNA (1)...(19): siRNA sense strand
ucaaccagaugcaguauga

SEQ ID NO: 2196779 - RNA, 19 nt, Homo sapiens
  misc_RNA (1)...(19): siRNA sense strand
gaaagaaagcugagaagca

SEQ ID NO: 2196780 - RNA, 19 nt, Homo sapiens
  misc_RNA (1)...(19): siRNA sense strand
ggacuucauugauggaaau

SEQ ID NO: 2196781 - RNA, 19 nt, Homo sapiens
  misc_RNA (1)...(19): siRNA sense strand
gaaaucagaaccagcuuga

SEQ ID NO: 2196782 - RNA, 19 nt, Homo sapiens
  misc_RNA (1)...(19): siRNA sense strand
ggaaauguugagagucuua

SEQ ID NO: 2196783 - RNA, 19 nt, Homo sapiens
  misc_RNA (1)...(19): siRNA sense strand
gaacugcaucauaauauug

SEQ ID NO: 2196784 - RNA, 19 nt, Homo sapiens
  misc_RNA (1)...(19): siRNA sense strand
aaucugaggugaaggauga

SEQ ID NO: 2196785 - RNA, 19 nt, Homo sapiens
  misc_RNA (1)...(19): siRNA sense strand
uaaagaaucugaggugcuu

SEQ ID NO: 2196786 - RNA, 19 nt, Homo sapiens
  misc_RNA (1)...(19): siRNA sense strand
uaaggcagaugucuaaaca

SEQ ID NO: 2196787 - RNA, 19 nt, Homo sapiens
  misc_RNA (1)...(19): siRNA sense strand
gaagacaaauggaaaucag

SEQ ID NO: 2196788 - RNA, 19 nt, Homo sapiens
  misc_RNA (1)...(19): siRNA sense strand
ccagaaacgucaacagcaa

SEQ ID NO: 2196789 - RNA, 19 nt, Homo sapiens
  misc_RNA (1)...(19): siRNA sense strand
caacagcagcuccaagaaa

SEQ ID NO: 2196790 - RNA, 19 nt, Homo sapiens
  misc_RNA (1)...(19): siRNA sense strand
caaaaggacuucauugaug

SEQ ID NO: 2196791 - RNA, 19 nt, Homo sapiens
  misc_RNA (1)...(19): siRNA sense strand
gaaagcaaauuagaaacca

SEQ ID NO: 2196792 - RNA, 19 nt, Homo sapiens
  misc_RNA (1)...(19): siRNA sense strand
ggauaaacgagaaauagaa

SEQ ID NO: 2196793 - RNA, 19 nt, Homo sapiens
  misc_RNA (1)...(19): siRNA sense strand
guuugaagcuacaacauga

SEQ ID NO: 2196794 - RNA, 19 nt, Homo sapiens
  misc_RNA (1)...(19): siRNA sense strand
gagagaagacaaauggaaa

SEQ ID NO: 2196795 - RNA, 19 nt, Homo sapiens
  misc_RNA (1)...(19): siRNA sense strand
caaacuaguccaacaagaa

SEQ ID NO: 2196796 - RNA, 19 nt, Homo sapiens
  misc_RNA (1)...(19): siRNA sense strand
gaagugcaaucacauuagg

SEQ ID NO: 2196797 - RNA, 19 nt, Homo sapiens
  misc_RNA (1)...(19): siRNA sense strand
caaagaagcgggaagaaag

SEQ ID NO: 2196798 - RNA, 19 nt, Homo sapiens
  misc_RNA (1)...(19): siRNA sense strand
uuggaaagcuugaaagaga

SEQ ID NO: 2196799 - RNA, 19 nt, Homo sapiens
  misc_RNA (1)...(19): siRNA sense strand
gaaccagcuugaagaaucu

SEQ ID NO: 2196800 - RNA, 19 nt, Homo sapiens
  misc_RNA (1)...(19): siRNA sense strand
ggagagaagacaaauggaa

SEQ ID NO: 2196801 - RNA, 19 nt, Homo sapiens
  misc_RNA (1)...(19): siRNA sense strand
gagagaaagugaagaaagc

SEQ ID NO: 2196802 - RNA, 19 nt, Homo sapiens
  misc_RNA (1)...(19): siRNA sense strand
ggaauugaaugucagaaaa

SEQ ID NO: 2196803 - RNA, 19 nt, Homo sapiens
  misc_RNA (1)...(19): siRNA sense strand
gaagcaugguccaggcaaa

SEQ ID NO: 2196804 - RNA, 19 nt, Homo sapiens
  misc_RNA (1)...(19): siRNA sense strand
gagacaaguagaugcuuua

SEQ ID NO: 2196805 - RNA, 19 nt, Homo sapiens
  misc_RNA (1)...(19): siRNA sense strand
ggcaacaauugaacuggua

SEQ ID NO: 2196806 - RNA, 19 nt, Homo sapiens
  misc_RNA (1)...(19): siRNA sense strand
gcuacaagguuugaagcua

SEQ ID NO: 2196807 - RNA, 19 nt, Homo sapiens
  misc_RNA (1)...(19): siRNA sense strand
caaacuaaacggcagcuuu

SEQ ID NO: 2196808 - RNA, 19 nt, Homo sapiens
  misc_RNA (1)...(19): siRNA sense strand
aaaggaagaucuccaagag

SEQ ID NO: 2196809 - RNA, 19 nt, Homo sapiens
  misc_RNA (1)...(19): siRNA sense strand
caacaugaccaaaggguau

SEQ ID NO: 2196810 - RNA, 19 nt, Homo sapiens
  misc_RNA (1)...(19): siRNA sense strand
ugaaagagaaccuuccauu

SEQ ID NO: 2196811 - RNA, 19 nt, Homo sapiens
  misc_RNA (1)...(19): siRNA sense strand
acucagacuuccaauguuu

SEQ ID NO: 2196812 - RNA, 19 nt, Homo sapiens
  misc_RNA (1)...(19): siRNA sense strand
ggaacuagaccaacuaaac

SEQ ID NO: 2196813 - RNA, 19 nt, Homo sapiens
  misc_RNA (1)...(19): siRNA sense strand
caaaggguaucugaauuag

SEQ ID NO: 2196814 - RNA, 19 nt, Homo sapiens
  misc_RNA (1)...(19): siRNA sense strand
gaugcaaugaggacacuua

SEQ ID NO: 2196815 - RNA, 19 nt, Homo sapiens
  misc_RNA (1)...(19): siRNA sense strand
ggagaacagcugcauacaa

SEQ ID NO: 2196816 - RNA, 19 nt, Homo sapiens
  misc_RNA (1)...(19): siRNA sense strand
gaaagaaauggaagaacug

SEQ ID NO: 2196817 - RNA, 19 nt, Homo sapiens
  misc_RNA (1)...(19): siRNA sense strand
gcaaauuagaaaccaguaa

SEQ ID NO: 2196818 - RNA, 19 nt, Homo sapiens
  misc_RNA (1)...(19): siRNA sense strand
aaucguguguugaguguuu

SEQ ID NO: 2196819 - RNA, 19 nt, Homo sapiens
  misc_RNA (1)...(19): siRNA sense strand
ugagagggauaaacgagaa

SEQ ID NO: 2196820 - RNA, 19 nt, Homo sapiens
  misc_RNA (1)...(19): siRNA sense strand
ggagaaagaaauggaagaa

SEQ ID NO: 2196821 - RNA, 19 nt, Homo sapiens
  misc_RNA (1)...(19): siRNA sense strand
aaaccuagaaggagaauug

SEQ ID NO: 2196822 - RNA, 19 nt, Homo sapiens
  misc_RNA (1)...(19): siRNA sense strand
agaaagaaauggaagaacu

SEQ ID NO: 2196823 - RNA, 19 nt, Homo sapiens
  misc_RNA (1)...(19): siRNA sense strand
gaaagagagagaaagugaa

SEQ ID NO: 2196824 - RNA, 19 nt, Homo sapiens
  misc_RNA (1)...(19): siRNA sense strand
ucagaaaggagaacuaaau

SEQ ID NO: 2196825 - RNA, 19 nt, Homo sapiens
  misc_RNA (1)...(19): siRNA sense strand
gggagagacugaaguaacu

SEQ ID NO: 2196826 - RNA, 19 nt, Homo sapiens
  misc_RNA (1)...(19): siRNA sense strand
agacugaaguaacugagaa

SEQ ID NO: 2196827 - RNA, 19 nt, Homo sapiens
  misc_RNA (1)...(19): siRNA sense strand
cagcaccucugcagauuca

SEQ ID NO: 2196828 - RNA, 19 nt, Homo sapiens
  misc_RNA (1)...(19): siRNA sense strand
ggaaagaaacgaaaaccua

SEQ ID NO: 2196829 - RNA, 19 nt, Homo sapiens
  misc_RNA (1)...(19): siRNA sense strand
gaccaaaggguaucugaau

SEQ ID NO: 2196830 - RNA, 19 nt, Homo sapiens
  misc_RNA (1)...(19): siRNA sense strand
gcaaucacauuagggaagu

SEQ ID NO: 2196831 - RNA, 19 nt, Homo sapiens
  misc_RNA (1)...(19): siRNA sense strand
cgagaaauagaacgaauga

SEQ ID NO: 2196832 - RNA, 19 nt, Homo sapiens
  misc_RNA (1)...(19): siRNA sense strand
aagagaaccuuccauuuac

SEQ ID NO: 2196833 - RNA, 19 nt, Homo sapiens
  misc_RNA (1)...(19): siRNA sense strand
agaaccagcuugaagaauc

SEQ ID NO: 2196834 - RNA, 19 nt, Homo sapiens
  misc_RNA (1)...(19): siRNA sense strand
aaacagauggcaaaccaaa

SEQ ID NO: 2196835 - RNA, 19 nt, Homo sapiens
  misc_RNA (1)...(19): siRNA sense strand
ucaagaaacagauggcaaa

SEQ ID NO: 2196836 - RNA, 19 nt, Homo sapiens
  misc_RNA (1)...(19): siRNA sense strand
aaacuaguccaacaagaaa

SEQ ID NO: 2196837 - RNA, 19 nt, Homo sapiens
  misc_RNA (1)...(19): siRNA sense strand
ccaagaccauuugaaccua

SEQ ID NO: 2196838 - RNA, 19 nt, Homo sapiens
  misc_RNA (1)...(19): siRNA sense strand
ggagcaaucaaacuuagaa

SEQ ID NO: 2196839 - RNA, 19 nt, Homo sapiens
  misc_RNA (1)...(19): siRNA sense strand
ucuuaugacugaacuagaa

SEQ ID NO: 2196840 - RNA, 19 nt, Homo sapiens
  misc_RNA (1)...(19): siRNA sense strand
ugucucagcuggagucuuc

SEQ ID NO: 2196841 - RNA, 19 nt, Homo sapiens
  misc_RNA (1)...(19): siRNA sense strand
agaaacagauggcaaacca

SEQ ID NO: 2196842 - RNA, 19 nt, Homo sapiens
  misc_RNA (1)...(19): siRNA sense strand
uuagaaaccaguaaaguga

SEQ ID NO: 2196843 - RNA, 19 nt, Homo sapiens
  misc_RNA (1)...(19): siRNA sense strand
aagcuuagagugugaagua

SEQ ID NO: 2196844 - RNA, 19 nt, Homo sapiens
  misc_RNA (1)...(19): siRNA sense strand
ugaagacugucagaaagaa

SEQ ID NO: 2196845 - RNA, 19 nt, Homo sapiens
  misc_RNA (1)...(19): siRNA sense strand
acucaaacaucaugaagau

SEQ ID NO: 2196846 - RNA, 19 nt, Homo sapiens
  misc_RNA (1)...(19): siRNA sense strand
gagaacagcugcauacaaa

SEQ ID NO: 2196847 - RNA, 19 nt, Homo sapiens
  misc_RNA (1)...(19): siRNA sense strand
gaaauugagugcauugaga

SEQ ID NO: 2196848 - RNA, 19 nt, Homo sapiens
  misc_RNA (1)...(19): siRNA sense strand
aaagagaaccuuccauuua

SEQ ID NO: 2196849 - RNA, 19 nt, Homo sapiens
  misc_RNA (1)...(19): siRNA sense strand
caagcaagcagaaguauua

SEQ ID NO: 2196850 - RNA, 19 nt, Homo sapiens
  misc_RNA (1)...(19): siRNA sense strand
gaagaacugcaucauaaua

SEQ ID NO: 2196851 - RNA, 19 nt, Homo sapiens
  misc_RNA (1)...(19): siRNA sense strand
gaaaucaggugagcuguug

SEQ ID NO: 2196852 - RNA, 19 nt, Homo sapiens
  misc_RNA (1)...(19): siRNA sense strand
uggaagaacugcaucauaa

SEQ ID NO: 2196853 - RNA, 19 nt, Homo sapiens
  misc_RNA (1)...(19): siRNA sense strand
gaaagagaaccuuccauuu

SEQ ID NO: 2196854 - RNA, 19 nt, Homo sapiens
  misc_RNA (1)...(19): siRNA sense strand
gaaaggagaacuaaauguu

SEQ ID NO: 2196855 - RNA, 19 nt, Homo sapiens
  misc_RNA (1)...(19): siRNA sense strand
ggaacuagcuaauguccaa

SEQ ID NO: 2196856 - RNA, 19 nt, Homo sapiens
  misc_RNA (1)...(19): siRNA sense strand
caagagaaguuuauugcaa

SEQ ID NO: 2196857 - RNA, 19 nt, Homo sapiens
  misc_RNA (1)...(19): siRNA sense strand
ggaauuaacagaccagaaa

SEQ ID NO: 2196858 - RNA, 19 nt, Homo sapiens
  misc_RNA (1)...(19): siRNA sense strand
gaggagagguggugugaga

SEQ ID NO: 2196859 - RNA, 19 nt, Homo sapiens
  misc_RNA (1)...(19): siRNA sense strand
gcaagcagaaguauuaauu

SEQ ID NO: 2196860 - RNA, 19 nt, Homo sapiens
  misc_RNA (1)...(19): siRNA sense strand
gaaaggagagcucaggaaa

SEQ ID NO: 2196861 - RNA, 19 nt, Homo sapiens
  misc_RNA (1)...(19): siRNA sense strand
ccaaaggguaucugaauua

SEQ ID NO: 2196862 - RNA, 19 nt, Homo sapiens
  misc_RNA (1)...(19): siRNA sense strand
acacggagcucaagaaaca

SEQ ID NO: 2196863 - RNA, 19 nt, Homo sapiens
  misc_RNA (1)...(19): siRNA sense strand
ggagacaaguagaugcuuu

SEQ ID NO: 2196864 - RNA, 19 nt, Homo sapiens
  misc_RNA (1)...(19): siRNA sense strand
gcaaugaggacacuuaaau

SEQ ID NO: 2196865 - RNA, 19 nt, Homo sapiens
  misc_RNA (1)...(19): siRNA sense strand
ugacugaacuagaaauaga

SEQ ID NO: 2196866 - RNA, 19 nt, Homo sapiens
  misc_RNA (1)...(19): siRNA sense strand
ugaaggagcucaaccagau

SEQ ID NO: 2196867 - RNA, 19 nt, Homo sapiens
  misc_RNA (1)...(19): siRNA sense strand
gaaggaagcacuuaagauc

SEQ ID NO: 2196868 - RNA, 19 nt, Homo sapiens
  misc_RNA (1)...(19): siRNA sense strand
gagaagugcaaucacauua

SEQ ID NO: 2196869 - RNA, 19 nt, Homo sapiens
  misc_RNA (1)...(19): siRNA sense strand
gaaacuacagaaagacaua

SEQ ID NO: 2196870 - RNA, 19 nt, Homo sapiens
  misc_RNA (1)...(19): siRNA sense strand
acauagaacuguccagaaa

SEQ ID NO: 2196871 - RNA, 19 nt, Homo sapiens
  misc_RNA (1)...(19): siRNA sense strand
gcagacagagggcacuuua

SEQ ID NO: 2196872 - RNA, 19 nt, Homo sapiens
  misc_RNA (1)...(19): siRNA sense strand
ggaaauggcaacaauugaa

SEQ ID NO: 2196873 - RNA, 19 nt, Homo sapiens
  misc_RNA (1)...(19): siRNA sense strand
gaaagaggcagauucuaug

SEQ ID NO: 2196874 - RNA, 19 nt, Homo sapiens
  misc_RNA (1)...(19): siRNA sense strand
ugaggacacuuaaaucuga

SEQ ID NO: 2196875 - RNA, 19 nt, Homo sapiens
  misc_RNA (1)...(19): siRNA sense strand
ggugaaggaugaaaucaga

SEQ ID NO: 2196876 - RNA, 19 nt, Homo sapiens
  misc_RNA (1)...(19): siRNA sense strand
gaacuagaccaacuaaaca

SEQ ID NO: 2196877 - RNA, 19 nt, Homo sapiens
  misc_RNA (1)...(19): siRNA sense strand
cagcagaucuagaagcuau

SEQ ID NO: 2196878 - RNA, 19 nt, Homo sapiens
  misc_RNA (1)...(19): siRNA sense strand
ucaaccagaugcaguauga

SEQ ID NO: 2196879 - RNA, 19 nt, Homo sapiens
  misc_RNA (1)...(19): siRNA sense strand
gaaagaaagcugagaagca

SEQ ID NO: 2196880 - RNA, 19 nt, Homo sapiens
  misc_RNA (1)...(19): siRNA sense strand
ggacuucauugauggaaau

SEQ ID NO: 2196881 - RNA, 19 nt, Homo sapiens
  misc_RNA (1)...(19): siRNA sense strand
gaaaucagaaccagcuuga

SEQ ID NO: 2196882 - RNA, 19 nt, Homo sapiens
  misc_RNA (1)...(19): siRNA sense strand
ggaaauguugagagucuua

SEQ ID NO: 2196883 - RNA, 19 nt, Homo sapiens
  misc_RNA (1)...(19): siRNA sense strand
gaacugcaucauaauauug

SEQ ID NO: 2196884 - RNA, 19 nt, Homo sapiens
  misc_RNA (1)...(19): siRNA sense strand
aaucugaggugaaggauga

SEQ ID NO: 2196885 - RNA, 19 nt, Homo sapiens
  misc_RNA (1)...(19): siRNA sense strand
uaaagaaucugaggugcuu

SEQ ID NO: 2196886 - RNA, 19 nt, Homo sapiens
  misc_RNA (1)...(19): siRNA sense strand
uaaggcagaugucuaaaca

SEQ ID NO: 2196887 - RNA, 19 nt, Homo sapiens
  misc_RNA (1)...(19): siRNA sense strand
gaagacaaauggaaaucag

SEQ ID NO: 2196888 - RNA, 19 nt, Homo sapiens
  misc_RNA (1)...(19): siRNA sense strand
ccagaaacgucaacagcaa

SEQ ID NO: 2196889 - RNA, 19 nt, Homo sapiens
  misc_RNA (1)...(19): siRNA sense strand
caacagcagcuccaagaaa

SEQ ID NO: 2196890 - RNA, 19 nt, Homo sapiens
  misc_RNA (1)...(19): siRNA sense strand
caaaaggacuucauugaug

SEQ ID NO: 2196891 - RNA, 19 nt, Homo sapiens
  misc_RNA (1)...(19): siRNA sense strand
gaaagcaaauuagaaacca

SEQ ID NO: 2196892 - RNA, 19 nt, Homo sapiens
  misc_RNA (1)...(19): siRNA sense strand
ggauaaacgagaaauagaa

SEQ ID NO: 2196893 - RNA, 19 nt, Homo sapiens
  misc_RNA (1)...(19): siRNA sense strand
guuugaagcuacaacauga

SEQ ID NO: 2196894 - RNA, 19 nt, Homo sapiens
  misc_RNA (1)...(19): siRNA sense strand
gagagaagacaaauggaaa

SEQ ID NO: 2196895 - RNA, 19 nt, Homo sapiens
  misc_RNA (1)...(19): siRNA sense strand
caaacuaguccaacaagaa

SEQ ID NO: 2196896 - RNA, 19 nt, Homo sapiens
  misc_RNA (1)...(19): siRNA sense strand
gaagugcaaucacauuagg

SEQ ID NO: 2196897 - RNA, 19 nt, Homo sapiens
  misc_RNA (1)...(19): siRNA sense strand
caaagaagcgggaagaaag

SEQ ID NO: 2196898 - RNA, 19 nt, Homo sapiens
  misc_RNA (1)...(19): siRNA sense strand
uuggaaagcuugaaagaga

SEQ ID NO: 2196899 - RNA, 19 nt, Homo sapiens
  misc_RNA (1)...(19): siRNA sense strand
gaaccagcuugaagaaucu

SEQ ID NO: 2196900 - RNA, 19 nt, Homo sapiens
  misc_RNA (1)...(19): siRNA sense strand
ggagagaagacaaauggaa

SEQ ID NO: 2196901 - RNA, 19 nt, Homo sapiens
  misc_RNA (1)...(19): siRNA sense strand
gagagaaagugaagaaagc

SEQ ID NO: 2196902 - RNA, 19 nt, Homo sapiens
  misc_RNA (1)...(19): siRNA sense strand
ggaauugaaugucagaaaa

SEQ ID NO: 2196903 - RNA, 19 nt, Homo sapiens
  misc_RNA (1)...(19): siRNA sense strand
gaagcaugguccaggcaaa

SEQ ID NO: 2196904 - RNA, 19 nt, Homo sapiens
  misc_RNA (1)...(19): siRNA sense strand
gagacaaguagaugcuuua

SEQ ID NO: 2196905 - RNA, 19 nt, Homo sapiens
  misc_RNA (1)...(19): siRNA sense strand
ggcaacaauugaacuggua

SEQ ID NO: 2196906 - RNA, 19 nt, Homo sapiens
  misc_RNA (1)...(19): siRNA sense strand
gcuacaagguuugaagcua

SEQ ID NO: 2196907 - RNA, 19 nt, Homo sapiens
  misc_RNA (1)...(19): siRNA sense strand
caaacuaaacggcagcuuu

SEQ ID NO: 2196908 - RNA, 19 nt, Homo sapiens
  misc_RNA (1)...(19): siRNA sense strand
aaaggaagaucuccaagag

SEQ ID NO: 2196909 - RNA, 19 nt, Homo sapiens
  misc_RNA (1)...(19): siRNA sense strand
caacaugaccaaaggguau

SEQ ID NO: 2196910 - RNA, 19 nt, Homo sapiens
  misc_RNA (1)...(19): siRNA sense strand
ugaaagagaaccuuccauu

SEQ ID NO: 2196911 - RNA, 19 nt, Homo sapiens
  misc_RNA (1)...(19): siRNA sense strand
acucagacuuccaauguuu

SEQ ID NO: 2196912 - RNA, 19 nt, Homo sapiens
  misc_RNA (1)...(19): siRNA sense strand
ggaacuagaccaacuaaac

SEQ ID NO: 2196913 - RNA, 19 nt, Homo sapiens
  misc_RNA (1)...(19): siRNA sense strand
caaaggguaucugaauuag

SEQ ID NO: 2196914 - RNA, 19 nt, Homo sapiens
  misc_RNA (1)...(19): siRNA sense strand
gaugcaaugaggacacuua

SEQ ID NO: 2196915 - RNA, 19 nt, Homo sapiens
  misc_RNA (1)...(19): siRNA sense strand
ggagaacagcugcauacaa

SEQ ID NO: 2196916 - RNA, 19 nt, Homo sapiens
  misc_RNA (1)...(19): siRNA sense strand
gaaagaaauggaagaacug

SEQ ID NO: 2196917 - RNA, 19 nt, Homo sapiens
  misc_RNA (1)...(19): siRNA sense strand
gcaaauuagaaaccaguaa

SEQ ID NO: 2196918 - RNA, 19 nt, Homo sapiens
  misc_RNA (1)...(19): siRNA sense strand
aaucguguguugaguguuu

SEQ ID NO: 2196919 - RNA, 19 nt, Homo sapiens
  misc_RNA (1)...(19): siRNA sense strand
ugagagggauaaacgagaa

SEQ ID NO: 2196920 - RNA, 19 nt, Homo sapiens
  misc_RNA (1)...(19): siRNA sense strand
ggagaaagaaauggaagaa

SEQ ID NO: 2196921 - RNA, 19 nt, Homo sapiens
  misc_RNA (1)...(19): siRNA sense strand
aaaccuagaaggagaauug

SEQ ID NO: 2196922 - RNA, 19 nt, Homo sapiens
  misc_RNA (1)...(19): siRNA sense strand
agaaagaaauggaagaacu

SEQ ID NO: 2196923 - RNA, 19 nt, Homo sapiens
  misc_RNA (1)...(19): siRNA sense strand
gaaagagagagaaagugaa

SEQ ID NO: 2196924 - RNA, 19 nt, Homo sapiens
  misc_RNA (1)...(19): siRNA sense strand
ucagaaaggagaacuaaau

SEQ ID NO: 2196925 - RNA, 19 nt, Homo sapiens
  misc_RNA (1)...(19): siRNA sense strand
gggagagacugaaguaacu

SEQ ID NO: 2196926 - RNA, 19 nt, Homo sapiens
  misc_RNA (1)...(19): siRNA sense strand
agacugaaguaacugagaa

SEQ ID NO: 2196927 - RNA, 19 nt, Homo sapiens
  misc_RNA (1)...(19): siRNA sense strand
cagcaccucugcagauuca

SEQ ID NO: 2196928 - RNA, 19 nt, Homo sapiens
  misc_RNA (1)...(19): siRNA sense strand
ggaaagaaacgaaaaccua

SEQ ID NO: 2196929 - RNA, 19 nt, Homo sapiens
  misc_RNA (1)...(19): siRNA sense strand
gaccaaaggguaucugaau

SEQ ID NO: 2196930 - RNA, 19 nt, Homo sapiens
  misc_RNA (1)...(19): siRNA sense strand
gcaaucacauuagggaagu

SEQ ID NO: 2196931 - RNA, 19 nt, Homo sapiens
  misc_RNA (1)...(19): siRNA sense strand
cgagaaauagaacgaauga

SEQ ID NO: 2196932 - RNA, 19 nt, Homo sapiens
  misc_RNA (1)...(19): siRNA sense strand
aagagaaccuuccauuuac

SEQ ID NO: 2196933 - RNA, 19 nt, Homo sapiens
  misc_RNA (1)...(19): siRNA sense strand
agaaccagcuugaagaauc

SEQ ID NO: 2196934 - RNA, 19 nt, Homo sapiens
  misc_RNA (1)...(19): siRNA sense strand
aaacagauggcaaaccaaa

SEQ ID NO: 2196935 - RNA, 19 nt, Homo sapiens
  misc_RNA (1)...(19): siRNA sense strand
ucaagaaacagauggcaaa

SEQ ID NO: 2196936 - RNA, 19 nt, Homo sapiens
  misc_RNA (1)...(19): siRNA sense strand
aaacuaguccaacaagaaa

SEQ ID NO: 2196937 - RNA, 19 nt, Homo sapiens
  misc_RNA (1)...(19): siRNA sense strand
ccaagaccauuugaaccua

SEQ ID NO: 2196938 - RNA, 19 nt, Homo sapiens
  misc_RNA (1)...(19): siRNA sense strand
ggagcaaucaaacuuagaa

SEQ ID NO: 2196939 - RNA, 19 nt, Homo sapiens
  misc_RNA (1)...(19): siRNA sense strand
ucuuaugacugaacuagaa

SEQ ID NO: 2196940 - RNA, 19 nt, Homo sapiens
  misc_RNA (1)...(19): siRNA sense strand
ugucucagcuggagucuuc

SEQ ID NO: 2196941 - RNA, 19 nt, Homo sapiens
  misc_RNA (1)...(19): siRNA sense strand
agaaacagauggcaaacca

SEQ ID NO: 2196942 - RNA, 19 nt, Homo sapiens
  misc_RNA (1)...(19): siRNA sense strand
uuagaaaccaguaaaguga

SEQ ID NO: 2196943 - RNA, 19 nt, Homo sapiens
  misc_RNA (1)...(19): siRNA sense strand
aagcuuagagugugaagua

SEQ ID NO: 2196944 - RNA, 19 nt, Homo sapiens
  misc_RNA (1)...(19): siRNA sense strand
ugaagacugucagaaagaa

SEQ ID NO: 2196945 - RNA, 19 nt, Homo sapiens
  misc_RNA (1)...(19): siRNA sense strand
acucaaacaucaugaagau

SEQ ID NO: 2196946 - RNA, 19 nt, Homo sapiens
  misc_RNA (1)...(19): siRNA sense strand
cgaaauugcuugaaacaaa

SEQ ID NO: 2196947 - RNA, 19 nt, Homo sapiens
  misc_RNA (1)...(19): siRNA sense strand
gcauuucacuuccucuuua

SEQ ID NO: 2196948 - RNA, 19 nt, Homo sapiens
  misc_RNA (1)...(19): siRNA sense strand
aaagagagcuaguucauug

SEQ ID NO: 2196949 - RNA, 19 nt, Homo sapiens
  misc_RNA (1)...(19): siRNA sense strand
ggugauaccucuauucuug

SEQ ID NO: 2196950 - RNA, 19 nt, Homo sapiens
  misc_RNA (1)...(19): siRNA sense strand
ucugaaaccuugucauuua

SEQ ID NO: 2196951 - RNA, 19 nt, Homo sapiens
  misc_RNA (1)...(19): siRNA sense strand
ccacacaacugccaaagaa

SEQ ID NO: 2196952 - RNA, 19 nt, Homo sapiens
  misc_RNA (1)...(19): siRNA sense strand
gaaaucaccuguuaguucu

SEQ ID NO: 2196953 - RNA, 19 nt, Homo sapiens
  misc_RNA (1)...(19): siRNA sense strand
ccacaugccuuucaacaga

SEQ ID NO: 2196954 - RNA, 19 nt, Homo sapiens
  misc_RNA (1)...(19): siRNA sense strand
acuaagaaaucaccuguua

SEQ ID NO: 2196955 - RNA, 19 nt, Homo sapiens
  misc_RNA (1)...(19): siRNA sense strand
ggaaaauacuucugugaua

SEQ ID NO: 2196956 - RNA, 19 nt, Homo sapiens
  misc_RNA (1)...(19): siRNA sense strand
gcagauacauugccacaca

SEQ ID NO: 2196957 - RNA, 19 nt, Homo sapiens
  misc_RNA (1)...(19): siRNA sense strand
gaaauacugccucugauga

SEQ ID NO: 2196958 - RNA, 19 nt, Homo sapiens
  misc_RNA (1)...(19): siRNA sense strand
caacaggaccucacaagaa

SEQ ID NO: 2196959 - RNA, 19 nt, Homo sapiens
  misc_RNA (1)...(19): siRNA sense strand
acacaacccugaaaucuau

SEQ ID NO: 2196960 - RNA, 19 nt, Homo sapiens
  misc_RNA (1)...(19): siRNA sense strand
aaauuuagcccaagugaua

SEQ ID NO: 2196961 - RNA, 19 nt, Homo sapiens
  misc_RNA (1)...(19): siRNA sense strand
guaaagcaguugaggauag

SEQ ID NO: 2196962 - RNA, 19 nt, Homo sapiens
  misc_RNA (1)...(19): siRNA sense strand
gagagaagguuagaaaaua

SEQ ID NO: 2196963 - RNA, 19 nt, Homo sapiens
  misc_RNA (1)...(19): siRNA sense strand
ugaugaaucugaugacauu

SEQ ID NO: 2196964 - RNA, 19 nt, Homo sapiens
  misc_RNA (1)...(19): siRNA sense strand
aaucaggacucucuuggua

SEQ ID NO: 2196965 - RNA, 19 nt, Homo sapiens
  misc_RNA (1)...(19): siRNA sense strand
gaagaaauuuagcccaagu

SEQ ID NO: 2196966 - RNA, 19 nt, Homo sapiens
  misc_RNA (1)...(19): siRNA sense strand
caacuucucuuuggaaauc

SEQ ID NO: 2196967 - RNA, 19 nt, Homo sapiens
  misc_RNA (1)...(19): siRNA sense strand
gaauauuucuuccaagucu

SEQ ID NO: 2196968 - RNA, 19 nt, Homo sapiens
  misc_RNA (1)...(19): siRNA sense strand
ugaaugagcagaaugauga

SEQ ID NO: 2196969 - RNA, 19 nt, Homo sapiens
  misc_RNA (1)...(19): siRNA sense strand
ggaaggaucugaggauucu

SEQ ID NO: 2196970 - RNA, 19 nt, Homo sapiens
  misc_RNA (1)...(19): siRNA sense strand
gauaacauccuaaauccaa

SEQ ID NO: 2196971 - RNA, 19 nt, Homo sapiens
  misc_RNA (1)...(19): siRNA sense strand
gcaguucuaagacauauaa

SEQ ID NO: 2196972 - RNA, 19 nt, Homo sapiens
  misc_RNA (1)...(19): siRNA sense strand
gcuaguucauugagguuua

SEQ ID NO: 2196973 - RNA, 19 nt, Homo sapiens
  misc_RNA (1)...(19): siRNA sense strand
ugaaauuucuuccaaguca

SEQ ID NO: 2196974 - RNA, 19 nt, Homo sapiens
  misc_RNA (1)...(19): siRNA sense strand
ucgaaacacugaugacaaa

SEQ ID NO: 2196975 - RNA, 19 nt, Homo sapiens
  misc_RNA (1)...(19): siRNA sense strand
cagaccaccuucauaauug

SEQ ID NO: 2196976 - RNA, 19 nt, Homo sapiens
  misc_RNA (1)...(19): siRNA sense strand
ggaaguggcuuauauucac

SEQ ID NO: 2196977 - RNA, 19 nt, Homo sapiens
  misc_RNA (1)...(19): siRNA sense strand
caagagcagucguaugaau

SEQ ID NO: 2196978 - RNA, 19 nt, Homo sapiens
  misc_RNA (1)...(19): siRNA sense strand
aaacaaagcacccgauuca

SEQ ID NO: 2196979 - RNA, 19 nt, Homo sapiens
  misc_RNA (1)...(19): siRNA sense strand
ggcagcacaugacguauuu

SEQ ID NO: 2196980 - RNA, 19 nt, Homo sapiens
  misc_RNA (1)...(19): siRNA sense strand
guaauuggaucgagcaaag

SEQ ID NO: 2196981 - RNA, 19 nt, Homo sapiens
  misc_RNA (1)...(19): siRNA sense strand
ccacuucaguuucucuaaa

SEQ ID NO: 2196982 - RNA, 19 nt, Homo sapiens
  misc_RNA (1)...(19): siRNA sense strand
gaacacaacccugaaaucu

SEQ ID NO: 2196983 - RNA, 19 nt, Homo sapiens
  misc_RNA (1)...(19): siRNA sense strand
ucauugagguuuaagagaa

SEQ ID NO: 2196984 - RNA, 19 nt, Homo sapiens
  misc_RNA (1)...(19): siRNA sense strand
caacaauucuuccuuugag

SEQ ID NO: 2196985 - RNA, 19 nt, Homo sapiens
  misc_RNA (1)...(19): siRNA sense strand
ccacagaccaagaacuaua

SEQ ID NO: 2196986 - RNA, 19 nt, Homo sapiens
  misc_RNA (1)...(19): siRNA sense strand
ucagcugccugcuaacaua

SEQ ID NO: 2196987 - RNA, 19 nt, Homo sapiens
  misc_RNA (1)...(19): siRNA sense strand
cgacaauaguauaagguuu

SEQ ID NO: 2196988 - RNA, 19 nt, Homo sapiens
  misc_RNA (1)...(19): siRNA sense strand
gaacagugagucugaaaca

SEQ ID NO: 2196989 - RNA, 19 nt, Homo sapiens
  misc_RNA (1)...(19): siRNA sense strand
gcagugacuucagugauga

SEQ ID NO: 2196990 - RNA, 19 nt, Homo sapiens
  misc_RNA (1)...(19): siRNA sense strand
gaaagagagcuaguucauu

SEQ ID NO: 2196991 - RNA, 19 nt, Homo sapiens
  misc_RNA (1)...(19): siRNA sense strand
uggcuuauauucacucaaa

SEQ ID NO: 2196992 - RNA, 19 nt, Homo sapiens
  misc_RNA (1)...(19): siRNA sense strand
gaaaaccaaugaaauguuc

SEQ ID NO: 2196993 - RNA, 19 nt, Homo sapiens
  misc_RNA (1)...(19): siRNA sense strand
gcacaugacguauuugagu

SEQ ID NO: 2196994 - RNA, 19 nt, Homo sapiens
  misc_RNA (1)...(19): siRNA sense strand
gcagucguaugaaucaaug

SEQ ID NO: 2196995 - RNA, 19 nt, Homo sapiens
  misc_RNA (1)...(19): siRNA sense strand
gaaaguuguuaaucaagag

SEQ ID NO: 2196996 - RNA, 19 nt, Homo sapiens
  misc_RNA (1)...(19): siRNA sense strand
ccaaguguaugcagcaaau

SEQ ID NO: 2196997 - RNA, 19 nt, Homo sapiens
  misc_RNA (1)...(19): siRNA sense strand
gaaauuucuuccaagucaa

SEQ ID NO: 2196998 - RNA, 19 nt, Homo sapiens
  misc_RNA (1)...(19): siRNA sense strand
aaacagagccacagaccaa

SEQ ID NO: 2196999 - RNA, 19 nt, Homo sapiens
  misc_RNA (1)...(19): siRNA sense strand
ggaaauacugccucugaug

SEQ ID NO: 2197000 - RNA, 19 nt, Homo sapiens
  misc_RNA (1)...(19): siRNA sense strand
uuaguaaacucacagacuu

SEQ ID NO: 2197001 - RNA, 19 nt, Homo sapiens
  misc_RNA (1)...(19): siRNA sense strand
ucaguuaaguuucagaauc

SEQ ID NO: 2197002 - RNA, 19 nt, Homo sapiens
  misc_RNA (1)...(19): siRNA sense strand
uaacucgucuucuguaaac

SEQ ID NO: 2197003 - RNA, 19 nt, Homo sapiens
  misc_RNA (1)...(19): siRNA sense strand
ccagaccaccuucauaauu

SEQ ID NO: 2197004 - RNA, 19 nt, Homo sapiens
  misc_RNA (1)...(19): siRNA sense strand
caugugaucucugcaguga

SEQ ID NO: 2197005 - RNA, 19 nt, Homo sapiens
  misc_RNA (1)...(19): siRNA sense strand
gagcagcccacaugccuuu

SEQ ID NO: 2197006 - RNA, 19 nt, Homo sapiens
  misc_RNA (1)...(19): siRNA sense strand
uaagagacagaacuaguuu

SEQ ID NO: 2197007 - RNA, 19 nt, Homo sapiens
  misc_RNA (1)...(19): siRNA sense strand
caguuaaguuucagaauca

SEQ ID NO: 2197008 - RNA, 19 nt, Homo sapiens
  misc_RNA (1)...(19): siRNA sense strand
gaaaccuugucauuuaaag

SEQ ID NO: 2197009 - RNA, 19 nt, Homo sapiens
  misc_RNA (1)...(19): siRNA sense strand
gaaugucacagaaucagaa

SEQ ID NO: 2197010 - RNA, 19 nt, Homo sapiens
  misc_RNA (1)...(19): siRNA sense strand
aaccaaggcugucagauuc

SEQ ID NO: 2197011 - RNA, 19 nt, Homo sapiens
  misc_RNA (1)...(19): siRNA sense strand
caaauccuguaaaccagaa

SEQ ID NO: 2197012 - RNA, 19 nt, Homo sapiens
  misc_RNA (1)...(19): siRNA sense strand
ugucaggaaugcagaggua

SEQ ID NO: 2197013 - RNA, 19 nt, Homo sapiens
  misc_RNA (1)...(19): siRNA sense strand
ucacagacuuggcaguaau

SEQ ID NO: 2197014 - RNA, 19 nt, Homo sapiens
  misc_RNA (1)...(19): siRNA sense strand
ucugggacaucuugaauga

SEQ ID NO: 2197015 - RNA, 19 nt, Homo sapiens
  misc_RNA (1)...(19): siRNA sense strand
aaaccaaggcugucagauu

SEQ ID NO: 2197016 - RNA, 19 nt, Homo sapiens
  misc_RNA (1)...(19): siRNA sense strand
gaggauagugauggaaaua

SEQ ID NO: 2197017 - RNA, 19 nt, Homo sapiens
  misc_RNA (1)...(19): siRNA sense strand
agaaaucaccuguuaguuc

SEQ ID NO: 2197018 - RNA, 19 nt, Homo sapiens
  misc_RNA (1)...(19): siRNA sense strand
ccaaagaugcugguuguga

SEQ ID NO: 2197019 - RNA, 19 nt, Homo sapiens
  misc_RNA (1)...(19): siRNA sense strand
uuucucagcugccugcuaa

SEQ ID NO: 2197020 - RNA, 19 nt, Homo sapiens
  misc_RNA (1)...(19): siRNA sense strand
gaugaaaacgcaaccaaua

SEQ ID NO: 2197021 - RNA, 19 nt, Homo sapiens
  misc_RNA (1)...(19): siRNA sense strand
uaagaaaucaccuguuagu

SEQ ID NO: 2197022 - RNA, 19 nt, Homo sapiens
  misc_RNA (1)...(19): siRNA sense strand
cugaaaccuugucauuuaa

SEQ ID NO: 2197023 - RNA, 19 nt, Homo sapiens
  misc_RNA (1)...(19): siRNA sense strand
gaccaagaacuauaagaga

SEQ ID NO: 2197024 - RNA, 19 nt, Homo sapiens
  misc_RNA (1)...(19): siRNA sense strand
gaugagagucuuaguaaac

SEQ ID NO: 2197025 - RNA, 19 nt, Homo sapiens
  misc_RNA (1)...(19): siRNA sense strand
gaacaaaacaaaccaagug

SEQ ID NO: 2197026 - RNA, 19 nt, Homo sapiens
  misc_RNA (1)...(19): siRNA sense strand
caaagcacccgauucaagu

SEQ ID NO: 2197027 - RNA, 19 nt, Homo sapiens
  misc_RNA (1)...(19): siRNA sense strand
caggacagcuuaccuuacu

SEQ ID NO: 2197028 - RNA, 19 nt, Homo sapiens
  misc_RNA (1)...(19): siRNA sense strand
gcaaaggaagcaugugauc

SEQ ID NO: 2197029 - RNA, 19 nt, Homo sapiens
  misc_RNA (1)...(19): siRNA sense strand
auacacagaguaccacaua

SEQ ID NO: 2197030 - RNA, 19 nt, Homo sapiens
  misc_RNA (1)...(19): siRNA sense strand
gcacuuuuauuccaagaaa

SEQ ID NO: 2197031 - RNA, 19 nt, Homo sapiens
  misc_RNA (1)...(19): siRNA sense strand
uaagaaagagagcuaguuc

SEQ ID NO: 2197032 - RNA, 19 nt, Homo sapiens
  misc_RNA (1)...(19): siRNA sense strand
cugaugacauugaaauuuc

SEQ ID NO: 2197033 - RNA, 19 nt, Homo sapiens
  misc_RNA (1)...(19): siRNA sense strand
ugaaucugaugacauugaa

SEQ ID NO: 2197034 - RNA, 19 nt, Homo sapiens
  misc_RNA (1)...(19): siRNA sense strand
ggauagugauggaaauacu

SEQ ID NO: 2197035 - RNA, 19 nt, Homo sapiens
  misc_RNA (1)...(19): siRNA sense strand
aaacagagaccaaaagauu

SEQ ID NO: 2197036 - RNA, 19 nt, Homo sapiens
  misc_RNA (1)...(19): siRNA sense strand
aaaccagaauguaauugga

SEQ ID NO: 2197037 - RNA, 19 nt, Homo sapiens
  misc_RNA (1)...(19): siRNA sense strand
ggaaugcagagguacagaa

SEQ ID NO: 2197038 - RNA, 19 nt, Homo sapiens
  misc_RNA (1)...(19): siRNA sense strand
auacacaacugagagauuc

SEQ ID NO: 2197039 - RNA, 19 nt, Homo sapiens
  misc_RNA (1)...(19): siRNA sense strand
gcagaaugaugagagucuu

SEQ ID NO: 2197040 - RNA, 19 nt, Homo sapiens
  misc_RNA (1)...(19): siRNA sense strand
cuucauaauuggagaaaca

SEQ ID NO: 2197041 - RNA, 19 nt, Homo sapiens
  misc_RNA (1)...(19): siRNA sense strand
aaaccagaccaccuucaua

SEQ ID NO: 2197042 - RNA, 19 nt, Homo sapiens
  misc_RNA (1)...(19): siRNA sense strand
ucacuuccucuuuacauuu

SEQ ID NO: 2197043 - RNA, 19 nt, Homo sapiens
  misc_RNA (1)...(19): siRNA sense strand
cuaaacauauaaccaaugc

SEQ ID NO: 2197044 - RNA, 19 nt, Homo sapiens
  misc_RNA (1)...(19): siRNA sense strand
uaaccaaugccacaucaga

SEQ ID NO: 2197045 - RNA, 19 nt, Homo sapiens
  misc_RNA (1)...(19): siRNA sense strand
uauaaccaaugccacauca

SEQ ID NO: 2197046 - RNA, 19 nt, Homo sapiens
  misc_RNA (1)...(19): siRNA sense strand
caaaggagcuagggaaaua

SEQ ID NO: 2197047 - RNA, 19 nt, Homo sapiens
  misc_RNA (1)...(19): siRNA sense strand
ggaagaauguuguguuuau

SEQ ID NO: 2197048 - RNA, 19 nt, Homo sapiens
  misc_RNA (1)...(19): siRNA sense strand
gcaacaggcuacugaauuc

SEQ ID NO: 2197049 - RNA, 19 nt, Homo sapiens
  misc_RNA (1)...(19): siRNA sense strand
guuaaacuuuguaggguua

SEQ ID NO: 2197050 - RNA, 19 nt, Homo sapiens
  misc_RNA (1)...(19): siRNA sense strand
caaauggaguuuauaccaa

SEQ ID NO: 2197051 - RNA, 19 nt, Homo sapiens
  misc_RNA (1)...(19): siRNA sense strand
gaaauucaccauuccacuu

SEQ ID NO: 2197052 - RNA, 19 nt, Homo sapiens
  misc_RNA (1)...(19): siRNA sense strand
uacaaugccugcuucauga

SEQ ID NO: 2197053 - RNA, 19 nt, Homo sapiens
  misc_RNA (1)...(19): siRNA sense strand
gaagaauguuguguuuauc

SEQ ID NO: 2197054 - RNA, 19 nt, Homo sapiens
  misc_RNA (1)...(19): siRNA sense strand
gugcagcuauuacaauuca

SEQ ID NO: 2197055 - RNA, 19 nt, Homo sapiens
  misc_RNA (1)...(19): siRNA sense strand
ccaccauaaugauacuaua

SEQ ID NO: 2197056 - RNA, 19 nt, Homo sapiens
  misc_RNA (1)...(19): siRNA sense strand
gcaaauggaguuuauacca

SEQ ID NO: 2197057 - RNA, 19 nt, Homo sapiens
  misc_RNA (1)...(19): siRNA sense strand
cuacugaauucaaccaaug

SEQ ID NO: 2197058 - RNA, 19 nt, Homo sapiens
  misc_RNA (1)...(19): siRNA sense strand
gggaagcaguauucacuca

SEQ ID NO: 2197059 - RNA, 19 nt, Homo sapiens
  misc_RNA (1)...(19): siRNA sense strand
gaauucaaccaauggaaga

SEQ ID NO: 2197060 - RNA, 19 nt, Homo sapiens
  misc_RNA (1)...(19): siRNA sense strand
ugaccuugcuuuuaacuua

SEQ ID NO: 2197061 - RNA, 19 nt, Homo sapiens
  misc_RNA (1)...(19): siRNA sense strand
cuauauguguccaagcuaa

SEQ ID NO: 2197062 - RNA, 19 nt, Homo sapiens
  misc_RNA (1)...(19): siRNA sense strand
augauuaucccaacucuua

SEQ ID NO: 2197063 - RNA, 19 nt, Homo sapiens
  misc_RNA (1)...(19): siRNA sense strand
aaauucaccauuccacuua

SEQ ID NO: 2197064 - RNA, 19 nt, Homo sapiens
  misc_RNA (1)...(19): siRNA sense strand
gauuaucaagcacaaguaa

SEQ ID NO: 2197065 - RNA, 19 nt, Homo sapiens
  misc_RNA (1)...(19): siRNA sense strand
gaagcaguauucacucaac

SEQ ID NO: 2197066 - RNA, 19 nt, Homo sapiens
  misc_RNA (1)...(19): siRNA sense strand
aaauuaagccuaccgaugu

SEQ ID NO: 2197067 - RNA, 19 nt, Homo sapiens
  misc_RNA (1)...(19): siRNA sense strand
ucaccgugcucaggaaauu

SEQ ID NO: 2197068 - RNA, 19 nt, Homo sapiens
  misc_RNA (1)...(19): siRNA sense strand
ucccaacucuuauuauuag

SEQ ID NO: 2197069 - RNA, 19 nt, Homo sapiens
  misc_RNA (1)...(19): siRNA sense strand
gguuucccgucaccaauuu

SEQ ID NO: 2197070 - RNA, 19 nt, Homo sapiens
  misc_RNA (1)...(19): siRNA sense strand
aaugccugcuucaugauua

SEQ ID NO: 2197071 - RNA, 19 nt, Homo sapiens
  misc_RNA (1)...(19): siRNA sense strand
cuacaaugccugcuucaug

SEQ ID NO: 2197072 - RNA, 19 nt, Homo sapiens
  misc_RNA (1)...(19): siRNA sense strand
ucauucacuucccugauuu

SEQ ID NO: 2197073 - RNA, 19 nt, Homo sapiens
  misc_RNA (1)...(19): siRNA sense strand
cucagugucuuugccauua

SEQ ID NO: 2197074 - RNA, 19 nt, Homo sapiens
  misc_RNA (1)...(19): siRNA sense strand
gcuacugaauucaaccaau

SEQ ID NO: 2197075 - RNA, 19 nt, Homo sapiens
  misc_RNA (1)...(19): siRNA sense strand
ccacgguucugugcagcua

SEQ ID NO: 2197076 - RNA, 19 nt, Homo sapiens
  misc_RNA (1)...(19): siRNA sense strand
gauuaucccaacucuuauu

SEQ ID NO: 2197077 - RNA, 19 nt, Homo sapiens
  misc_RNA (1)...(19): siRNA sense strand
ggauuaucaagcacaagua

SEQ ID NO: 2197078 - RNA, 19 nt, Homo sapiens
  misc_RNA (1)...(19): siRNA sense strand
auggaagaauguuguguuu

SEQ ID NO: 2197079 - RNA, 19 nt, Homo sapiens
  misc_RNA (1)...(19): siRNA sense strand
gcuagggaaauacggagua

SEQ ID NO: 2197080 - RNA, 19 nt, Homo sapiens
  misc_RNA (1)...(19): siRNA sense strand
caccauuccacuuaccuua

SEQ ID NO: 2197081 - RNA, 19 nt, Homo sapiens
  misc_RNA (1)...(19): siRNA sense strand
gcucaggaaauucaccauu

SEQ ID NO: 2197082 - RNA, 19 nt, Homo sapiens
  misc_RNA (1)...(19): siRNA sense strand
gggaaauacggaguacuuu

SEQ ID NO: 2197083 - RNA, 19 nt, Homo sapiens
  misc_RNA (1)...(19): siRNA sense strand
guuuggauuugaagagcua

SEQ ID NO: 2197084 - RNA, 19 nt, Homo sapiens
  misc_RNA (1)...(19): siRNA sense strand
gggcuugagauauuccuuu

SEQ ID NO: 2197085 - RNA, 19 nt, Homo sapiens
  misc_RNA (1)...(19): siRNA sense strand
gaauguuguguuuauccua

SEQ ID NO: 2197086 - RNA, 19 nt, Homo sapiens
  misc_RNA (1)...(19): siRNA sense strand
ggaaauacggaguacuuuu

SEQ ID NO: 2197087 - RNA, 19 nt, Homo sapiens
  misc_RNA (1)...(19): siRNA sense strand
ugccuacauugggauauua

SEQ ID NO: 2197088 - RNA, 19 nt, Homo sapiens
  misc_RNA (1)...(19): siRNA sense strand
ggaagcaguauucacucaa

SEQ ID NO: 2197089 - RNA, 19 nt, Homo sapiens
  misc_RNA (1)...(19): siRNA sense strand
caucauccucagugucuuu

SEQ ID NO: 2197090 - RNA, 19 nt, Homo sapiens
  misc_RNA (1)...(19): siRNA sense strand
ggagccaucaagaauguau

SEQ ID NO: 2197091 - RNA, 19 nt, Homo sapiens
  misc_RNA (1)...(19): siRNA sense strand
gguuggagccaucaagaau

SEQ ID NO: 2197092 - RNA, 19 nt, Homo sapiens
  misc_RNA (1)...(19): siRNA sense strand
ggcagccaccauaaugaua

SEQ ID NO: 2197093 - RNA, 19 nt, Homo sapiens
  misc_RNA (1)...(19): siRNA sense strand
cugugcagcuauuacaauu

SEQ ID NO: 2197094 - RNA, 19 nt, Homo sapiens
  misc_RNA (1)...(19): siRNA sense strand
cucaggaaauucaccauuc

SEQ ID NO: 2197095 - RNA, 19 nt, Homo sapiens
  misc_RNA (1)...(19): siRNA sense strand
cuaaaccugugggugaaga

SEQ ID NO: 2197096 - RNA, 19 nt, Homo sapiens
  misc_RNA (1)...(19): siRNA sense strand
gaccugcuccuuccucauc

SEQ ID NO: 2197097 - RNA, 19 nt, Homo sapiens
  misc_RNA (1)...(19): siRNA sense strand
ggaguacuuuucuacaaug

SEQ ID NO: 2197098 - RNA, 19 nt, Homo sapiens
  misc_RNA (1)...(19): siRNA sense strand
cagugucuuugccauuauu

SEQ ID NO: 2197099 - RNA, 19 nt, Homo sapiens
  misc_RNA (1)...(19): siRNA sense strand
gcaguauucacucaacauc

SEQ ID NO: 2197100 - RNA, 19 nt, Homo sapiens
  misc_RNA (1)...(19): siRNA sense strand
cuggaaaccaucauacuug

SEQ ID NO: 2197101 - RNA, 19 nt, Homo sapiens
  misc_RNA (1)...(19): siRNA sense strand
guuggaaaccacauaagug

SEQ ID NO: 2197102 - RNA, 19 nt, Homo sapiens
  misc_RNA (1)...(19): siRNA sense strand
cagcaaauggaguuuauac

SEQ ID NO: 2197103 - RNA, 19 nt, Homo sapiens
  misc_RNA (1)...(19): siRNA sense strand
aauuaagccuaccgauguu

SEQ ID NO: 2197104 - RNA, 19 nt, Homo sapiens
  misc_RNA (1)...(19): siRNA sense strand
ucagugucuuugccauuau

SEQ ID NO: 2197105 - RNA, 19 nt, Homo sapiens
  misc_RNA (1)...(19): siRNA sense strand
ugcaacaggcuacugaauu

SEQ ID NO: 2197106 - RNA, 19 nt, Homo sapiens
  misc_RNA (1)...(19): siRNA sense strand
aguauucacucaacaucau

SEQ ID NO: 2197107 - RNA, 19 nt, Homo sapiens
  misc_RNA (1)...(19): siRNA sense strand
ccaaaggagcuagggaaau

SEQ ID NO: 2197108 - RNA, 19 nt, Homo sapiens
  misc_RNA (1)...(19): siRNA sense strand
ucaacaucauccucagugu

SEQ ID NO: 2197109 - RNA, 19 nt, Homo sapiens
  misc_RNA (1)...(19): siRNA sense strand
caaugccugcuucaugauu

SEQ ID NO: 2197110 - RNA, 19 nt, Homo sapiens
  misc_RNA (1)...(19): siRNA sense strand
uuggagccaucaagaaugu

SEQ ID NO: 2197111 - RNA, 19 nt, Homo sapiens
  misc_RNA (1)...(19): siRNA sense strand
auccuacaguuucuucuuu

SEQ ID NO: 2197112 - RNA, 19 nt, Homo sapiens
  misc_RNA (1)...(19): siRNA sense strand
gcagccaccauaaugauac

SEQ ID NO: 2197113 - RNA, 19 nt, Homo sapiens
  misc_RNA (1)...(19): siRNA sense strand
ucacuucccugauuuugau

SEQ ID NO: 2197114 - RNA, 19 nt, Homo sapiens
  misc_RNA (1)...(19): siRNA sense strand
guguuuauccuacaguuuc

SEQ ID NO: 2197115 - RNA, 19 nt, Homo sapiens
  misc_RNA (1)...(19): siRNA sense strand
uggaagaauguuguguuua

SEQ ID NO: 2197116 - RNA, 19 nt, Homo sapiens
  misc_RNA (1)...(19): siRNA sense strand
cuacguuggaaaccacaua

SEQ ID NO: 2197117 - RNA, 19 nt, Homo sapiens
  misc_RNA (1)...(19): siRNA sense strand
gcagccaguuaaaaccuaa

SEQ ID NO: 2197118 - RNA, 19 nt, Homo sapiens
  misc_RNA (1)...(19): siRNA sense strand
auuaaucgguggagacuac

SEQ ID NO: 2197119 - RNA, 19 nt, Homo sapiens
  misc_RNA (1)...(19): siRNA sense strand
aagcacaaguaaauuaagc

SEQ ID NO: 2197120 - RNA, 19 nt, Homo sapiens
  misc_RNA (1)...(19): siRNA sense strand
ccauuccacuuaccuuacu

SEQ ID NO: 2197121 - RNA, 19 nt, Homo sapiens
  misc_RNA (1)...(19): siRNA sense strand
gcugaccaccuacgguuuc

SEQ ID NO: 2197122 - RNA, 19 nt, Homo sapiens
  misc_RNA (1)...(19): siRNA sense strand
uguccaagcuaaacaaaau

SEQ ID NO: 2197123 - RNA, 19 nt, Homo sapiens
  misc_RNA (1)...(19): siRNA sense strand
caacaggcuacugaauuca

SEQ ID NO: 2197124 - RNA, 19 nt, Homo sapiens
  misc_RNA (1)...(19): siRNA sense strand
ccuuggaauuggacagaug

SEQ ID NO: 2197125 - RNA, 19 nt, Homo sapiens
  misc_RNA (1)...(19): siRNA sense strand
cuacauugggauauuaauc

SEQ ID NO: 2197126 - RNA, 19 nt, Homo sapiens
  misc_RNA (1)...(19): siRNA sense strand
ucuggaaaccaucauacuu

SEQ ID NO: 2197127 - RNA, 19 nt, Homo sapiens
  misc_RNA (1)...(19): siRNA sense strand
gaaaagaggugaagaaauu

SEQ ID NO: 2197128 - RNA, 19 nt, Homo sapiens
  misc_RNA (1)...(19): siRNA sense strand
aaacagaccuucaguuauc

SEQ ID NO: 2197129 - RNA, 19 nt, Homo sapiens
  misc_RNA (1)...(19): siRNA sense strand
acaaacagaccuucaguua

SEQ ID NO: 2197130 - RNA, 19 nt, Homo sapiens
  misc_RNA (1)...(19): siRNA sense strand
gcaaaugucacccuuauag

SEQ ID NO: 2197131 - RNA, 19 nt, Homo sapiens
  misc_RNA (1)...(19): siRNA sense strand
ggaauagguuggaucacaa

SEQ ID NO: 2197132 - RNA, 19 nt, Homo sapiens
  misc_RNA (1)...(19): siRNA sense strand
caugugaacuuuacaaaca

SEQ ID NO: 2197133 - RNA, 19 nt, Homo sapiens
  misc_RNA (1)...(19): siRNA sense strand
ucacaaaccuaucaacucu

SEQ ID NO: 2197134 - RNA, 19 nt, Homo sapiens
  misc_RNA (1)...(19): siRNA sense strand
gaagcaaaugucacccuua

SEQ ID NO: 2197135 - RNA, 19 nt, Homo sapiens
  misc_RNA (1)...(19): siRNA sense strand
aagcaaaugucacccuuau

SEQ ID NO: 2197136 - RNA, 19 nt, Homo sapiens
  misc_RNA (1)...(19): siRNA sense strand
gaccuucaguuauccaugu

SEQ ID NO: 2197137 - RNA, 19 nt, Homo sapiens
  misc_RNA (1)...(19): siRNA sense strand
caagguggaacccucauuu

SEQ ID NO: 2197138 - RNA, 19 nt, Homo sapiens
  misc_RNA (1)...(19): siRNA sense strand
gacuggauauucucaugaa

SEQ ID NO: 2197139 - RNA, 19 nt, Homo sapiens
  misc_RNA (1)...(19): siRNA sense strand
caaacagaccuucaguuau

SEQ ID NO: 2197140 - RNA, 19 nt, Homo sapiens
  misc_RNA (1)...(19): siRNA sense strand
caagcugacuggauauucu

SEQ ID NO: 2197141 - RNA, 19 nt, Homo sapiens
  misc_RNA (1)...(19): siRNA sense strand
uuugcaagcugacuggaua

SEQ ID NO: 2197142 - RNA, 19 nt, Homo sapiens
  misc_RNA (1)...(19): siRNA sense strand
gaauagguuggaucacaaa

SEQ ID NO: 2197143 - RNA, 19 nt, Homo sapiens
  misc_RNA (1)...(19): siRNA sense strand
gguaacaacauccauuuua

SEQ ID NO: 2197144 - RNA, 19 nt, Homo sapiens
  misc_RNA (1)...(19): siRNA sense strand
ccugagagagaaauuuaua

SEQ ID NO: 2197145 - RNA, 19 nt, Homo sapiens
  misc_RNA (1)...(19): siRNA sense strand
ugacuggcccucucuuuga

SEQ ID NO: 2197146 - RNA, 19 nt, Homo sapiens
  misc_RNA (1)...(19): siRNA sense strand
ucaaaucuacucucaggaa

SEQ ID NO: 2197147 - RNA, 19 nt, Homo sapiens
  misc_RNA (1)...(19): siRNA sense strand
acaaaccuaucaacucugu

SEQ ID NO: 2197148 - RNA, 19 nt, Homo sapiens
  misc_RNA (1)...(19): siRNA sense strand
cauccuaccaucauauuga

SEQ ID NO: 2197149 - RNA, 19 nt, Homo sapiens
  misc_RNA (1)...(19): siRNA sense strand
caaggaauacguagaggau

SEQ ID NO: 2197150 - RNA, 19 nt, Homo sapiens
  misc_RNA (1)...(19): siRNA sense strand
cagguaacaacauccauuu

SEQ ID NO: 2197151 - RNA, 19 nt, Homo sapiens
  misc_RNA (1)...(19): siRNA sense strand
uggauauucucaugaaauc

SEQ ID NO: 2197152 - RNA, 19 nt, Homo sapiens
  misc_RNA (1)...(19): siRNA sense strand
cuaugucgauccugagaga

SEQ ID NO: 2197153 - RNA, 19 nt, Homo sapiens
  misc_RNA (1)...(19): siRNA sense strand
gaucacaaaccuaucaacu

SEQ ID NO: 2197154 - RNA, 19 nt, Homo sapiens
  misc_RNA (1)...(19): siRNA sense strand
uagaggaucuggccaaaau

SEQ ID NO: 2197155 - RNA, 19 nt, Homo sapiens
  misc_RNA (1)...(19): siRNA sense strand
uauagugauuggacaguca

SEQ ID NO: 2197156 - RNA, 19 nt, Homo sapiens
  misc_RNA (1)...(19): siRNA sense strand
gauccugagagagaaauuu

SEQ ID NO: 2197157 - RNA, 19 nt, Homo sapiens
  misc_RNA (1)...(19): siRNA sense strand
ccagguaacaacauccauu

SEQ ID NO: 2197158 - RNA, 19 nt, Homo sapiens
  misc_RNA (1)...(19): siRNA sense strand
gcaagguggaacccucauu

SEQ ID NO: 2197159 - RNA, 19 nt, Homo sapiens
  misc_RNA (1)...(19): siRNA sense strand
caucugcaaggaauacgua

SEQ ID NO: 2197160 - RNA, 19 nt, Homo sapiens
  misc_RNA (1)...(19): siRNA sense strand
aggaauagguuggaucaca

SEQ ID NO: 2197161 - RNA, 19 nt, Homo sapiens
  misc_RNA (1)...(19): siRNA sense strand
auacaccgcgauaggaaua

SEQ ID NO: 2197162 - RNA, 19 nt, Homo sapiens
  misc_RNA (1)...(19): siRNA sense strand
aaaugucacccuuauagug

SEQ ID NO: 2197163 - RNA, 19 nt, Homo sapiens
  misc_RNA (1)...(19): siRNA sense strand
cguagaggaucuggccaaa

SEQ ID NO: 2197164 - RNA, 19 nt, Homo sapiens
  misc_RNA (1)...(19): siRNA sense strand
gcaagcugacuggauauuc

SEQ ID NO: 2197165 - RNA, 19 nt, Homo sapiens
  misc_RNA (1)...(19): siRNA sense strand
ugaaaucuaugucgauccu

SEQ ID NO: 2197166 - RNA, 19 nt, Homo sapiens
  misc_RNA (1)...(19): siRNA sense strand
gacuggcccucucuuugau

SEQ ID NO: 2197167 - RNA, 19 nt, Homo sapiens
  misc_RNA (1)...(19): siRNA sense strand
ugcggcauuuccuguguua

SEQ ID NO: 2197168 - RNA, 19 nt, Homo sapiens
  misc_RNA (1)...(19): siRNA sense strand
uguuacaucugcaaggaau

SEQ ID NO: 2197169 - RNA, 19 nt, Homo sapiens
  misc_RNA (1)...(19): siRNA sense strand
accaucauauugagccuuu

SEQ ID NO: 2197170 - RNA, 19 nt, Homo sapiens
  misc_RNA (1)...(19): siRNA sense strand
cccaggaguuucuuacaag

SEQ ID NO: 2197171 - RNA, 19 nt, Homo sapiens
  misc_RNA (1)...(19): siRNA sense strand
caaaugucacccuuauagu

SEQ ID NO: 2197172 - RNA, 19 nt, Homo sapiens
  misc_RNA (1)...(19): siRNA sense strand
uuacaagaagcaaauguca

SEQ ID NO: 2197173 - RNA, 19 nt, Homo sapiens
  misc_RNA (1)...(19): siRNA sense strand
caacauccauuuuauacac

SEQ ID NO: 2197174 - RNA, 19 nt, Homo sapiens
  misc_RNA (1)...(19): siRNA sense strand
gugacuggcccucucuuug

SEQ ID NO: 2197175 - RNA, 19 nt, Homo sapiens
  misc_RNA (1)...(19): siRNA sense strand
cagucauccuaccaucaua

SEQ ID NO: 2197176 - RNA, 19 nt, Homo sapiens
  misc_RNA (1)...(19): siRNA sense strand
ugacuggauauucucauga

SEQ ID NO: 2197177 - RNA, 19 nt, Homo sapiens
  misc_RNA (1)...(19): siRNA sense strand
aggaauacguagaggaucu

SEQ ID NO: 2197178 - RNA, 19 nt, Homo sapiens
  misc_RNA (1)...(19): siRNA sense strand
cuggcccucucuuugauuu

SEQ ID NO: 2197179 - RNA, 19 nt, Homo sapiens
  misc_RNA (1)...(19): siRNA sense strand
gcaugugaacuuuacaaac

SEQ ID NO: 2197180 - RNA, 19 nt, Homo sapiens
  misc_RNA (1)...(19): siRNA sense strand
gugcggcauuuccuguguu

SEQ ID NO: 2197181 - RNA, 19 nt, Homo sapiens
  misc_RNA (1)...(19): siRNA sense strand
uguguuacaucugcaagga

SEQ ID NO: 2197182 - RNA, 19 nt, Homo sapiens
  misc_RNA (1)...(19): siRNA sense strand
agacccagcucagcaaggu

SEQ ID NO: 2197183 - RNA, 19 nt, Homo sapiens
  misc_RNA (1)...(19): siRNA sense strand
gacagucauccuaccauca

SEQ ID NO: 2197184 - RNA, 19 nt, Homo sapiens
  misc_RNA (1)...(19): siRNA sense strand
ugugaacuuuacaaacaga

SEQ ID NO: 2197185 - RNA, 19 nt, Homo sapiens
  misc_RNA (1)...(19): siRNA sense strand
cagcaugugaacuuuacaa

SEQ ID NO: 2197186 - RNA, 19 nt, Homo sapiens
  misc_RNA (1)...(19): siRNA sense strand
guaggaguucagcauguga

SEQ ID NO: 2197187 - RNA, 19 nt, Homo sapiens
  misc_RNA (1)...(19): siRNA sense strand
ugauuggacagucauccua

SEQ ID NO: 2197188 - RNA, 19 nt, Homo sapiens
  misc_RNA (1)...(19): siRNA sense strand
ggcauuuccuguguuacau

SEQ ID NO: 2197189 - RNA, 19 nt, Homo sapiens
  misc_RNA (1)...(19): siRNA sense strand
uguaggaguucagcaugug

SEQ ID NO: 2197190 - RNA, 19 nt, Homo sapiens
  misc_RNA (1)...(19): siRNA sense strand
gccaaaauccccaggaguu

SEQ ID NO: 2197191 - RNA, 19 nt, Homo sapiens
  misc_RNA (1)...(19): siRNA sense strand
gaagaaauaugcagaaguc

SEQ ID NO: 2197192 - RNA, 19 nt, Homo sapiens
  misc_RNA (1)...(19): siRNA sense strand
ugaaagaacucaacuccua

SEQ ID NO: 2197193 - RNA, 19 nt, Homo sapiens
  misc_RNA (1)...(19): siRNA sense strand
caaaggaagugauggagua

SEQ ID NO: 2197194 - RNA, 19 nt, Homo sapiens
  misc_RNA (1)...(19): siRNA sense strand
guucacaccucuucaagua

SEQ ID NO: 2197195 - RNA, 19 nt, Homo sapiens
  misc_RNA (1)...(19): siRNA sense strand
ggaaggcucucaagaagga

SEQ ID NO: 2197196 - RNA, 19 nt, Homo sapiens
  misc_RNA (1)...(19): siRNA sense strand
gcagcaaagugacaaagaa

SEQ ID NO: 2197197 - RNA, 19 nt, Homo sapiens
  misc_RNA (1)...(19): siRNA sense strand
acaaggagcuagacaccua

SEQ ID NO: 2197198 - RNA, 19 nt, Homo sapiens
  misc_RNA (1)...(19): siRNA sense strand
ucacaccucuucaaguauu

SEQ ID NO: 2197199 - RNA, 19 nt, Homo sapiens
  misc_RNA (1)...(19): siRNA sense strand
gaacaugaaauccagguau

SEQ ID NO: 2197200 - RNA, 19 nt, Homo sapiens
  misc_RNA (1)...(19): siRNA sense strand
ggauacccaugaugaagaa

SEQ ID NO: 2197201 - RNA, 19 nt, Homo sapiens
  misc_RNA (1)...(19): siRNA sense strand
gcucugcccucagccaaua

SEQ ID NO: 2197202 - RNA, 19 nt, Homo sapiens
  misc_RNA (1)...(19): siRNA sense strand
uggaaaaggucaaagauua

SEQ ID NO: 2197203 - RNA, 19 nt, Homo sapiens
  misc_RNA (1)...(19): siRNA sense strand
uguacaggcugauaaauga

SEQ ID NO: 2197204 - RNA, 19 nt, Homo sapiens
  misc_RNA (1)...(19): siRNA sense strand
gaaguguacaggcugauaa

SEQ ID NO: 2197205 - RNA, 19 nt, Homo sapiens
  misc_RNA (1)...(19): siRNA sense strand
caggauaugucuagagaug

SEQ ID NO: 2197206 - RNA, 19 nt, Homo sapiens
  misc_RNA (1)...(19): siRNA sense strand
gauaagcaccagcaccuuu

SEQ ID NO: 2197207 - RNA, 19 nt, Homo sapiens
  misc_RNA (1)...(19): siRNA sense strand
ggaaauccuucgagacucu

SEQ ID NO: 2197208 - RNA, 19 nt, Homo sapiens
  misc_RNA (1)...(19): siRNA sense strand
acaccaaccuugaggacua

SEQ ID NO: 2197209 - RNA, 19 nt, Homo sapiens
  misc_RNA (1)...(19): siRNA sense strand
caccaucgcugcccgagaa

SEQ ID NO: 2197210 - RNA, 19 nt, Homo sapiens
  misc_RNA (1)...(19): siRNA sense strand
ggaacaaacucagcuucug

SEQ ID NO: 2197211 - RNA, 19 nt, Homo sapiens
  misc_RNA (1)...(19): siRNA sense strand
gaaagagccaagagggaaa

SEQ ID NO: 2197212 - RNA, 19 nt, Homo sapiens
  misc_RNA (1)...(19): siRNA sense strand
aaagcguguugaagaaaua

SEQ ID NO: 2197213 - RNA, 19 nt, Homo sapiens
  misc_RNA (1)...(19): siRNA sense strand
ggaagcaggagauuaagga

SEQ ID NO: 2197214 - RNA, 19 nt, Homo sapiens
  misc_RNA (1)...(19): siRNA sense strand
ggaaauggaaccucucauc

SEQ ID NO: 2197215 - RNA, 19 nt, Homo sapiens
  misc_RNA (1)...(19): siRNA sense strand
ucucauggauacuauaguu

SEQ ID NO: 2197216 - RNA, 19 nt, Homo sapiens
  misc_RNA (1)...(19): siRNA sense strand
ggauccgccugcuguauga

SEQ ID NO: 2197217 - RNA, 19 nt, Homo sapiens
  misc_RNA (1)...(19): siRNA sense strand
cgugaaaucuuugaacaga

SEQ ID NO: 2197218 - RNA, 19 nt, Homo sapiens
  misc_RNA (1)...(19): siRNA sense strand
ucaacucccugaacaagga

SEQ ID NO: 2197219 - RNA, 19 nt, Homo sapiens
  misc_RNA (1)...(19): siRNA sense strand
gaaauccagguaugaaugu

SEQ ID NO: 2197220 - RNA, 19 nt, Homo sapiens
  misc_RNA (1)...(19): siRNA sense strand
gcaaagugacaaagaaaca

SEQ ID NO: 2197221 - RNA, 19 nt, Homo sapiens
  misc_RNA (1)...(19): siRNA sense strand
caacugaggcagcaaagug

SEQ ID NO: 2197222 - RNA, 19 nt, Homo sapiens
  misc_RNA (1)...(19): siRNA sense strand
uauaguuccugagaagaua

SEQ ID NO: 2197223 - RNA, 19 nt, Homo sapiens
  misc_RNA (1)...(19): siRNA sense strand
gaagagcaagagaguuuau

SEQ ID NO: 2197224 - RNA, 19 nt, Homo sapiens
  misc_RNA (1)...(19): siRNA sense strand
cacaggauaugucuagaga

SEQ ID NO: 2197225 - RNA, 19 nt, Homo sapiens
  misc_RNA (1)...(19): siRNA sense strand
cgaaggagcuagaggucau

SEQ ID NO: 2197226 - RNA, 19 nt, Homo sapiens
  misc_RNA (1)...(19): siRNA sense strand
ggaagagcaagagaguuua

SEQ ID NO: 2197227 - RNA, 19 nt, Homo sapiens
  misc_RNA (1)...(19): siRNA sense strand
gcacgacuggugagaagaa

SEQ ID NO: 2197228 - RNA, 19 nt, Homo sapiens
  misc_RNA (1)...(19): siRNA sense strand
ggagaaggaggcacaggaa

SEQ ID NO: 2197229 - RNA, 19 nt, Homo sapiens
  misc_RNA (1)...(19): siRNA sense strand
gagcacaggauaugucuag

SEQ ID NO: 2197230 - RNA, 19 nt, Homo sapiens
  misc_RNA (1)...(19): siRNA sense strand
gcagaacacaagaggaaga

SEQ ID NO: 2197231 - RNA, 19 nt, Homo sapiens
  misc_RNA (1)...(19): siRNA sense strand
ugaaccgucucuuccuaaa

SEQ ID NO: 2197232 - RNA, 19 nt, Homo sapiens
  misc_RNA (1)...(19): siRNA sense strand
gcaggauacccaugaugaa

SEQ ID NO: 2197233 - RNA, 19 nt, Homo sapiens
  misc_RNA (1)...(19): siRNA sense strand
gaagaaaugaaccgucucu

SEQ ID NO: 2197234 - RNA, 19 nt, Homo sapiens
  misc_RNA (1)...(19): siRNA sense strand
gcaaccagaagcacaugaa

SEQ ID NO: 2197235 - RNA, 19 nt, Homo sapiens
  misc_RNA (1)...(19): siRNA sense strand
gauacuauaguuccugaga

SEQ ID NO: 2197236 - RNA, 19 nt, Homo sapiens
  misc_RNA (1)...(19): siRNA sense strand
aggaagagcaagagaguuu

SEQ ID NO: 2197237 - RNA, 19 nt, Homo sapiens
  misc_RNA (1)...(19): siRNA sense strand
caaauucaggcaaccagaa

SEQ ID NO: 2197238 - RNA, 19 nt, Homo sapiens
  misc_RNA (1)...(19): siRNA sense strand
ugagucugaugaagaaaug

SEQ ID NO: 2197239 - RNA, 19 nt, Homo sapiens
  misc_RNA (1)...(19): siRNA sense strand
gcacaggaagagcaagaga

SEQ ID NO: 2197240 - RNA, 19 nt, Homo sapiens
  misc_RNA (1)...(19): siRNA sense strand
ugaaaucuuugaacagaac

SEQ ID NO: 2197241 - RNA, 19 nt, Homo sapiens
  misc_RNA (1)...(19): siRNA sense strand
cagcaaagugacaaagaaa

SEQ ID NO: 2197242 - RNA, 19 nt, Homo sapiens
  misc_RNA (1)...(19): siRNA sense strand
ccacguggacugcaugaug

SEQ ID NO: 2197243 - RNA, 19 nt, Homo sapiens
  misc_RNA (1)...(19): siRNA sense strand
aagcaucucugcaccaucu

SEQ ID NO: 2197244 - RNA, 19 nt, Homo sapiens
  misc_RNA (1)...(19): siRNA sense strand
aaugaaccgucucuuccua

SEQ ID NO: 2197245 - RNA, 19 nt, Homo sapiens
  misc_RNA (1)...(19): siRNA sense strand
augcagaagucauagagaa

SEQ ID NO: 2197246 - RNA, 19 nt, Homo sapiens
  misc_RNA (1)...(19): siRNA sense strand
gugaaaucuuugaacagaa

SEQ ID NO: 2197247 - RNA, 19 nt, Homo sapiens
  misc_RNA (1)...(19): siRNA sense strand
ggcaggauacccaugauga

SEQ ID NO: 2197248 - RNA, 19 nt, Homo sapiens
  misc_RNA (1)...(19): siRNA sense strand
gaugggacuugaggaaauc

SEQ ID NO: 2197249 - RNA, 19 nt, Homo sapiens
  misc_RNA (1)...(19): siRNA sense strand
aagcagaacacaagaggaa

SEQ ID NO: 2197250 - RNA, 19 nt, Homo sapiens
  misc_RNA (1)...(19): siRNA sense strand
gagaugggacuugaggaaa

SEQ ID NO: 2197251 - RNA, 19 nt, Homo sapiens
  misc_RNA (1)...(19): siRNA sense strand
aaaggcggcugaagcaucu

SEQ ID NO: 2197252 - RNA, 19 nt, Homo sapiens
  misc_RNA (1)...(19): siRNA sense strand
caaccagaagcacaugaaa

SEQ ID NO: 2197253 - RNA, 19 nt, Homo sapiens
  misc_RNA (1)...(19): siRNA sense strand
ggaagaagacaaggaagag

SEQ ID NO: 2197254 - RNA, 19 nt, Homo sapiens
  misc_RNA (1)...(19): siRNA sense strand
ugaaauccagguaugaaug

SEQ ID NO: 2197255 - RNA, 19 nt, Homo sapiens
  misc_RNA (1)...(19): siRNA sense strand
ugaggaagaagacaaggaa

SEQ ID NO: 2197256 - RNA, 19 nt, Homo sapiens
  misc_RNA (1)...(19): siRNA sense strand
aaacugaggaagagaagga

SEQ ID NO: 2197257 - RNA, 19 nt, Homo sapiens
  misc_RNA (1)...(19): siRNA sense strand
agaaaugaaccgucucuuc

SEQ ID NO: 2197258 - RNA, 19 nt, Homo sapiens
  misc_RNA (1)...(19): siRNA sense strand
ugacaaaggaagugaugga

SEQ ID NO: 2197259 - RNA, 19 nt, Homo sapiens
  misc_RNA (1)...(19): siRNA sense strand
agaugggacuugaggaaau

SEQ ID NO: 2197260 - RNA, 19 nt, Homo sapiens
  misc_RNA (1)...(19): siRNA sense strand
gugaguucauggccaguga

SEQ ID NO: 2197261 - RNA, 19 nt, Homo sapiens
  misc_RNA (1)...(19): siRNA sense strand
cugcagaguuucagugagu

SEQ ID NO: 2197262 - RNA, 19 nt, Homo sapiens
  misc_RNA (1)...(19): siRNA sense strand
ccuggaaggcucucaagaa

SEQ ID NO: 2197263 - RNA, 19 nt, Homo sapiens
  misc_RNA (1)...(19): siRNA sense strand
ccucagccaauacuucuuu

SEQ ID NO: 2197264 - RNA, 19 nt, Homo sapiens
  misc_RNA (1)...(19): siRNA sense strand
cagaacguccugcagcaaa

SEQ ID NO: 2197265 - RNA, 19 nt, Homo sapiens
  misc_RNA (1)...(19): siRNA sense strand
cuggaaggcucucaagaag

SEQ ID NO: 2197266 - RNA, 19 nt, Homo sapiens
  misc_RNA (1)...(19): siRNA sense strand
cagacagaguggcagaguu

SEQ ID NO: 2197267 - RNA, 19 nt, Homo sapiens
  misc_RNA (1)...(19): siRNA sense strand
gaaggaggcacaggaagag

SEQ ID NO: 2197268 - RNA, 19 nt, Homo sapiens
  misc_RNA (1)...(19): siRNA sense strand
gaguuucagugaguucaug

SEQ ID NO: 2197269 - RNA, 19 nt, Homo sapiens
  misc_RNA (1)...(19): siRNA sense strand
aacaugaaauccagguaug

SEQ ID NO: 2197270 - RNA, 19 nt, Homo sapiens
  misc_RNA (1)...(19): siRNA sense strand
ccaccucgauaggcucuug

SEQ ID NO: 2197271 - RNA, 19 nt, Homo sapiens
  misc_RNA (1)...(19): siRNA sense strand
gcacaggauaugucuagag

SEQ ID NO: 2197272 - RNA, 19 nt, Homo sapiens
  misc_RNA (1)...(19): siRNA sense strand
ggcccaaacuccaucuucu

SEQ ID NO: 2197273 - RNA, 19 nt, Homo sapiens
  misc_RNA (1)...(19): siRNA sense strand
ugacugaguggcauucuuc

SEQ ID NO: 2197274 - RNA, 19 nt, Homo sapiens
  misc_RNA (1)...(19): siRNA sense strand
guguacaggcugauaaaug

SEQ ID NO: 2197275 - RNA, 19 nt, Homo sapiens
  misc_RNA (1)...(19): siRNA sense strand
agaaggaggcacaggaaga

SEQ ID NO: 2197276 - RNA, 19 nt, Homo sapiens
  misc_RNA (1)...(19): siRNA sense strand
ggaaaaggucaaagauuau

SEQ ID NO: 2197277 - RNA, 19 nt, Homo sapiens
  misc_RNA (1)...(19): siRNA sense strand
agacagaguggcagaguuc

SEQ ID NO: 2197278 - RNA, 19 nt, Homo sapiens
  misc_RNA (1)...(19): siRNA sense strand
ugcuggagcugugggauaa

SEQ ID NO: 2197279 - RNA, 19 nt, Homo sapiens
  misc_RNA (1)...(19): siRNA sense strand
gagcaagagaguuuaucug

SEQ ID NO: 2197280 - RNA, 19 nt, Homo sapiens
  misc_RNA (1)...(19): siRNA sense strand
caugaaauccagguaugaa

SEQ ID NO: 2197281 - RNA, 19 nt, Homo sapiens
  misc_RNA (1)...(19): siRNA sense strand
gauuaucugaagaacauga

SEQ ID NO: 2197282 - RNA, 19 nt, Homo sapiens
  misc_RNA (1)...(19): siRNA sense strand
auacuauaguuccugagaa

SEQ ID NO: 2197283 - RNA, 19 nt, Homo sapiens
  misc_RNA (1)...(19): siRNA sense strand
gcugaggaauggcccaaac

SEQ ID NO: 2197284 - RNA, 19 nt, Homo sapiens
  misc_RNA (1)...(19): siRNA sense strand
aggagugccugaugcaugu

SEQ ID NO: 2197285 - RNA, 19 nt, Homo sapiens
  misc_RNA (1)...(19): siRNA sense strand
cgaaguguacaggcugaua

SEQ ID NO: 2197286 - RNA, 19 nt, Homo sapiens
  misc_RNA (1)...(19): siRNA sense strand
gaaaacuuccuaccucaug

SEQ ID NO: 2197287 - RNA, 19 nt, Homo sapiens
  misc_RNA (1)...(19): siRNA sense strand
cuagaggucaugcugaaga

SEQ ID NO: 2197288 - RNA, 19 nt, Homo sapiens
  misc_RNA (1)...(19): siRNA sense strand
gaccaacugaggcagcaaa

SEQ ID NO: 2197289 - RNA, 19 nt, Homo sapiens
  misc_RNA (1)...(19): siRNA sense strand
aagcacgacuggugagaag

SEQ ID NO: 2197290 - RNA, 19 nt, Homo sapiens
  misc_RNA (1)...(19): siRNA sense strand
ugaagcaucucugcaccau

SEQ ID NO: 2197291 - RNA, 19 nt, Homo sapiens
  misc_RNA (1)...(19): siRNA sense strand
ugaaguagcucggcaauua

SEQ ID NO: 2197292 - RNA, 19 nt, Homo sapiens
  misc_RNA (1)...(19): siRNA sense strand
gaaagaagauacagaaagu

SEQ ID NO: 2197293 - RNA, 19 nt, Homo sapiens
  misc_RNA (1)...(19): siRNA sense strand
ugaaagcauuggcagauua

SEQ ID NO: 2197294 - RNA, 19 nt, Homo sapiens
  misc_RNA (1)...(19): siRNA sense strand
gaacgaguagcgaauauuu

SEQ ID NO: 2197295 - RNA, 19 nt, Homo sapiens
  misc_RNA (1)...(19): siRNA sense strand
gcaauucguauuugacuua

SEQ ID NO: 2197296 - RNA, 19 nt, Homo sapiens
  misc_RNA (1)...(19): siRNA sense strand
guaaugggaugaugaugaa

SEQ ID NO: 2197297 - RNA, 19 nt, Homo sapiens
  misc_RNA (1)...(19): siRNA sense strand
gcccagagauacaggauaa

SEQ ID NO: 2197298 - RNA, 19 nt, Homo sapiens
  misc_RNA (1)...(19): siRNA sense strand
gcagaaaucaccacucuug

SEQ ID NO: 2197299 - RNA, 19 nt, Homo sapiens
  misc_RNA (1)...(19): siRNA sense strand
gauacaggauaagcaaaua

SEQ ID NO: 2197300 - RNA, 19 nt, Homo sapiens
  misc_RNA (1)...(19): siRNA sense strand
ggaccugacccaacugaua

SEQ ID NO: 2197301 - RNA, 19 nt, Homo sapiens
  misc_RNA (1)...(19): siRNA sense strand
ucaagaaauucgggacuua

SEQ ID NO: 2197302 - RNA, 19 nt, Homo sapiens
  misc_RNA (1)...(19): siRNA sense strand
gagaggaauugacagaaga

SEQ ID NO: 2197303 - RNA, 19 nt, Homo sapiens
  misc_RNA (1)...(19): siRNA sense strand
gaaacuagcacccagugaa

SEQ ID NO: 2197304 - RNA, 19 nt, Homo sapiens
  misc_RNA (1)...(19): siRNA sense strand
ggaucgagaugagcuuuaa

SEQ ID NO: 2197305 - RNA, 19 nt, Homo sapiens
  misc_RNA (1)...(19): siRNA sense strand
ggaauuagagcagaaagaa

SEQ ID NO: 2197306 - RNA, 19 nt, Homo sapiens
  misc_RNA (1)...(19): siRNA sense strand
caacugaaauaacaagucu

SEQ ID NO: 2197307 - RNA, 19 nt, Homo sapiens
  misc_RNA (1)...(19): siRNA sense strand
ggagaggaauugacagaag

SEQ ID NO: 2197308 - RNA, 19 nt, Homo sapiens
  misc_RNA (1)...(19): siRNA sense strand
gaaguagcucggcaauuaa

SEQ ID NO: 2197309 - RNA, 19 nt, Homo sapiens
  misc_RNA (1)...(19): siRNA sense strand
gcaaauacccaacccucaa

SEQ ID NO: 2197310 - RNA, 19 nt, Homo sapiens
  misc_RNA (1)...(19): siRNA sense strand
ggaauugacagaagaagga

SEQ ID NO: 2197311 - RNA, 19 nt, Homo sapiens
  misc_RNA (1)...(19): siRNA sense strand
gaagauacagaaaguuuag

SEQ ID NO: 2197312 - RNA, 19 nt, Homo sapiens
  misc_RNA (1)...(19): siRNA sense strand
caaugcugauguugcuuua

SEQ ID NO: 2197313 - RNA, 19 nt, Homo sapiens
  misc_RNA (1)...(19): siRNA sense strand
gcucggcaauuaauaagug

SEQ ID NO: 2197314 - RNA, 19 nt, Homo sapiens
  misc_RNA (1)...(19): siRNA sense strand
ugggagcuaugacaaauuu

SEQ ID NO: 2197315 - RNA, 19 nt, Homo sapiens
  misc_RNA (1)...(19): siRNA sense strand
gcacagagaauuccaucau

SEQ ID NO: 2197316 - RNA, 19 nt, Homo sapiens
  misc_RNA (1)...(19): siRNA sense strand
gagcccagcccuuuccuaa

SEQ ID NO: 2197317 - RNA, 19 nt, Homo sapiens
  misc_RNA (1)...(19): siRNA sense strand
ggaugaugaugaagagaga

SEQ ID NO: 2197318 - RNA, 19 nt, Homo sapiens
  misc_RNA (1)...(19): siRNA sense strand
auugacagcuuuaggcaua

SEQ ID NO: 2197319 - RNA, 19 nt, Homo sapiens
  misc_RNA (1)...(19): siRNA sense strand
gcgacaacauaaucuacaa

SEQ ID NO: 2197320 - RNA, 19 nt, Homo sapiens
  misc_RNA (1)...(19): siRNA sense strand
uagcagaaaucaccacucu

SEQ ID NO: 2197321 - RNA, 19 nt, Homo sapiens
  misc_RNA (1)...(19): siRNA sense strand
ugagagcuccuuccagaaa

SEQ ID NO: 2197322 - RNA, 19 nt, Homo sapiens
  misc_RNA (1)...(19): siRNA sense strand
guauuugacuuacauucug

SEQ ID NO: 2197323 - RNA, 19 nt, Homo sapiens
  misc_RNA (1)...(19): siRNA sense strand
guagcucggcaauuaauaa

SEQ ID NO: 2197324 - RNA, 19 nt, Homo sapiens
  misc_RNA (1)...(19): siRNA sense strand
caacauaaucuacaaacca

SEQ ID NO: 2197325 - RNA, 19 nt, Homo sapiens
  misc_RNA (1)...(19): siRNA sense strand
caaauacccaacccucaaa

SEQ ID NO: 2197326 - RNA, 19 nt, Homo sapiens
  misc_RNA (1)...(19): siRNA sense strand
gcaagcaguccaccugaga

SEQ ID NO: 2197327 - RNA, 19 nt, Homo sapiens
  misc_RNA (1)...(19): siRNA sense strand
caugaaagaagauacagaa

SEQ ID NO: 2197328 - RNA, 19 nt, Homo sapiens
  misc_RNA (1)...(19): siRNA sense strand
gauuacaucaggcaacaaa

SEQ ID NO: 2197329 - RNA, 19 nt, Homo sapiens
  misc_RNA (1)...(19): siRNA sense strand
agagcaagcccaagaugua

SEQ ID NO: 2197330 - RNA, 19 nt, Homo sapiens
  misc_RNA (1)...(19): siRNA sense strand
gugaaagcauuggcagauu

SEQ ID NO: 2197331 - RNA, 19 nt, Homo sapiens
  misc_RNA (1)...(19): siRNA sense strand
ugacuuacauucuggaaaa

SEQ ID NO: 2197332 - RNA, 19 nt, Homo sapiens
  misc_RNA (1)...(19): siRNA sense strand
ugacauagcccagagauac

SEQ ID NO: 2197333 - RNA, 19 nt, Homo sapiens
  misc_RNA (1)...(19): siRNA sense strand
gaugugacuuacaauugga

SEQ ID NO: 2197334 - RNA, 19 nt, Homo sapiens
  misc_RNA (1)...(19): siRNA sense strand
ggucagcgaucagugaaag

SEQ ID NO: 2197335 - RNA, 19 nt, Homo sapiens
  misc_RNA (1)...(19): siRNA sense strand
ccagcagauuguccuguaa

SEQ ID NO: 2197336 - RNA, 19 nt, Homo sapiens
  misc_RNA (1)...(19): siRNA sense strand
gauaaauguguuccucuug

SEQ ID NO: 2197337 - RNA, 19 nt, Homo sapiens
  misc_RNA (1)...(19): siRNA sense strand
gaucgcagcaaaagaaaua

SEQ ID NO: 2197338 - RNA, 19 nt, Homo sapiens
  misc_RNA (1)...(19): siRNA sense strand
uauaguggcgacaacauaa

SEQ ID NO: 2197339 - RNA, 19 nt, Homo sapiens
  misc_RNA (1)...(19): siRNA sense strand
ggacucggacaacuauaga

SEQ ID NO: 2197340 - RNA, 19 nt, Homo sapiens
  misc_RNA (1)...(19): siRNA sense strand
auaaauguguuccucuugu

SEQ ID NO: 2197341 - RNA, 19 nt, Homo sapiens
  misc_RNA (1)...(19): siRNA sense strand
cacagagaauuccaucaug

SEQ ID NO: 2197342 - RNA, 19 nt, Homo sapiens
  misc_RNA (1)...(19): siRNA sense strand
ccucuuguccgagaaauaa

SEQ ID NO: 2197343 - RNA, 19 nt, Homo sapiens
  misc_RNA (1)...(19): siRNA sense strand
cguaaugggaugaugauga

SEQ ID NO: 2197344 - RNA, 19 nt, Homo sapiens
  misc_RNA (1)...(19): siRNA sense strand
ggagagcaagcccaagaug

SEQ ID NO: 2197345 - RNA, 19 nt, Homo sapiens
  misc_RNA (1)...(19): siRNA sense strand
ugaaagaagauacagaaag

SEQ ID NO: 2197346 - RNA, 19 nt, Homo sapiens
  misc_RNA (1)...(19): siRNA sense strand
agauaaauguguuccucuu

SEQ ID NO: 2197347 - RNA, 19 nt, Homo sapiens
  misc_RNA (1)...(19): siRNA sense strand
ugaugugacuuacaauugg

SEQ ID NO: 2197348 - RNA, 19 nt, Homo sapiens
  misc_RNA (1)...(19): siRNA sense strand
gcaugaugacugugccuuu

SEQ ID NO: 2197349 - RNA, 19 nt, Homo sapiens
  misc_RNA (1)...(19): siRNA sense strand
gcgaauauuuugcaugaug

SEQ ID NO: 2197350 - RNA, 19 nt, Homo sapiens
  misc_RNA (1)...(19): siRNA sense strand
gcugauguugcuuuaguaa

SEQ ID NO: 2197351 - RNA, 19 nt, Homo sapiens
  misc_RNA (1)...(19): siRNA sense strand
uaaauguguuccucuuguc

SEQ ID NO: 2197352 - RNA, 19 nt, Homo sapiens
  misc_RNA (1)...(19): siRNA sense strand
cagauuacaucaggcaaca

SEQ ID NO: 2197353 - RNA, 19 nt, Homo sapiens
  misc_RNA (1)...(19): siRNA sense strand
ucaaauuguuucguaaugg

SEQ ID NO: 2197354 - RNA, 19 nt, Homo sapiens
  misc_RNA (1)...(19): siRNA sense strand
gaagcuuccgaugucauua

SEQ ID NO: 2197355 - RNA, 19 nt, Homo sapiens
  misc_RNA (1)...(19): siRNA sense strand
gagagcaagcccaagaugu

SEQ ID NO: 2197356 - RNA, 19 nt, Homo sapiens
  misc_RNA (1)...(19): siRNA sense strand
guauguguuuggagacuuc

SEQ ID NO: 2197357 - RNA, 19 nt, Homo sapiens
  misc_RNA (1)...(19): siRNA sense strand
caugaugacugugccuuuc

SEQ ID NO: 2197358 - RNA, 19 nt, Homo sapiens
  misc_RNA (1)...(19): siRNA sense strand
uagcgaauauuuugcauga

SEQ ID NO: 2197359 - RNA, 19 nt, Homo sapiens
  misc_RNA (1)...(19): siRNA sense strand
acccaacccucaaauuguu

SEQ ID NO: 2197360 - RNA, 19 nt, Homo sapiens
  misc_RNA (1)...(19): siRNA sense strand
gcugacuggugucguuuca

SEQ ID NO: 2197361 - RNA, 19 nt, Homo sapiens
  misc_RNA (1)...(19): siRNA sense strand
gacauccucuucugcacau

SEQ ID NO: 2197362 - RNA, 19 nt, Homo sapiens
  misc_RNA (1)...(19): siRNA sense strand
gaaagcauuggcagauuac

SEQ ID NO: 2197363 - RNA, 19 nt, Homo sapiens
  misc_RNA (1)...(19): siRNA sense strand
aauuagagcagaaagaaga

SEQ ID NO: 2197364 - RNA, 19 nt, Homo sapiens
  misc_RNA (1)...(19): siRNA sense strand
gugccuuucuuucugcauu

SEQ ID NO: 2197365 - RNA, 19 nt, Homo sapiens
  misc_RNA (1)...(19): siRNA sense strand
uccagcagauuguccugua

SEQ ID NO: 2197366 - RNA, 19 nt, Homo sapiens
  misc_RNA (1)...(19): siRNA sense strand
aaaggacucggacaacuau

SEQ ID NO: 2197367 - RNA, 19 nt, Homo sapiens
  misc_RNA (1)...(19): siRNA sense strand
caggagagcaagcccaaga

SEQ ID NO: 2197368 - RNA, 19 nt, Homo sapiens
  misc_RNA (1)...(19): siRNA sense strand
acucaagcaauucguauuu

SEQ ID NO: 2197369 - RNA, 19 nt, Homo sapiens
  misc_RNA (1)...(19): siRNA sense strand
ugugacaaauuuagacauc

SEQ ID NO: 2197370 - RNA, 19 nt, Homo sapiens
  misc_RNA (1)...(19): siRNA sense strand
guacuugggagcuaugaca

SEQ ID NO: 2197371 - RNA, 19 nt, Homo sapiens
  misc_RNA (1)...(19): siRNA sense strand
gcauucugcuccggauaug

SEQ ID NO: 2197372 - RNA, 19 nt, Homo sapiens
  misc_RNA (1)...(19): siRNA sense strand
cgacaacauaaucuacaaa

SEQ ID NO: 2197373 - RNA, 19 nt, Homo sapiens
  misc_RNA (1)...(19): siRNA sense strand
acccucaaauuguuucgua

SEQ ID NO: 2197374 - RNA, 19 nt, Homo sapiens
  misc_RNA (1)...(19): siRNA sense strand
gggaucgagaugagcuuua

SEQ ID NO: 2197375 - RNA, 19 nt, Homo sapiens
  misc_RNA (1)...(19): siRNA sense strand
uaugcugacuggugucguu

SEQ ID NO: 2197376 - RNA, 19 nt, Homo sapiens
  misc_RNA (1)...(19): siRNA sense strand
aaauuuagacauccucuuc

SEQ ID NO: 2197377 - RNA, 19 nt, Homo sapiens
  misc_RNA (1)...(19): siRNA sense strand
gcaggaauuagagcagaaa

SEQ ID NO: 2197378 - RNA, 19 nt, Homo sapiens
  misc_RNA (1)...(19): siRNA sense strand
gagauacaggauaagcaaa

SEQ ID NO: 2197379 - RNA, 19 nt, Homo sapiens
  misc_RNA (1)...(19): siRNA sense strand
aaacuagcacccagugaau

SEQ ID NO: 2197380 - RNA, 19 nt, Homo sapiens
  misc_RNA (1)...(19): siRNA sense strand
gagcaagcccaagauguag

SEQ ID NO: 2197381 - RNA, 19 nt, Homo sapiens
  misc_RNA (1)...(19): siRNA sense strand
cuuccgaugucauuaagga

SEQ ID NO: 2197382 - RNA, 19 nt, Homo sapiens
  misc_RNA (1)...(19): siRNA sense strand
ggauucaagauaaaugugu

SEQ ID NO: 2197383 - RNA, 19 nt, Homo sapiens
  misc_RNA (1)...(19): siRNA sense strand
auacccaacccucaaauug

SEQ ID NO: 2197384 - RNA, 19 nt, Homo sapiens
  misc_RNA (1)...(19): siRNA sense strand
gagagcuccuuccagaaac

SEQ ID NO: 2197385 - RNA, 19 nt, Homo sapiens
  misc_RNA (1)...(19): siRNA sense strand
ccgaugucauuaaggaaga

SEQ ID NO: 2197386 - RNA, 19 nt, Homo sapiens
  misc_RNA (1)...(19): siRNA sense strand
gaccugacccaacugauac

SEQ ID NO: 2197387 - RNA, 19 nt, Homo sapiens
  misc_RNA (1)...(19): siRNA sense strand
ucauggaccugacccaacu

SEQ ID NO: 2197388 - RNA, 19 nt, Homo sapiens
  misc_RNA (1)...(19): siRNA sense strand
cuggaaaacucaagcaauu

SEQ ID NO: 2197389 - RNA, 19 nt, Homo sapiens
  misc_RNA (1)...(19): siRNA sense strand
guccuguaaucgcuauuga

SEQ ID NO: 2197390 - RNA, 19 nt, Homo sapiens
  misc_RNA (1)...(19): siRNA sense strand
gacugugccuuucuuucug

SEQ ID NO: 2197391 - RNA, 19 nt, Homo sapiens
  misc_RNA (1)...(19): siRNA sense strand
caaaggagauucagagaaa

SEQ ID NO: 2197392 - RNA, 19 nt, Homo sapiens
  misc_RNA (1)...(19): siRNA sense strand
gcauacagcacuucuauaa

SEQ ID NO: 2197393 - RNA, 19 nt, Homo sapiens
  misc_RNA (1)...(19): siRNA sense strand
gcagagaccugugacuauu

SEQ ID NO: 2197394 - RNA, 19 nt, Homo sapiens
  misc_RNA (1)...(19): siRNA sense strand
gcucugaccuucuaccuau

SEQ ID NO: 2197395 - RNA, 19 nt, Homo sapiens
  misc_RNA (1)...(19): siRNA sense strand
gagaaacccugccagagau

SEQ ID NO: 2197396 - RNA, 19 nt, Homo sapiens
  misc_RNA (1)...(19): siRNA sense strand
auacagcacuucuauaaug

SEQ ID NO: 2197397 - RNA, 19 nt, Homo sapiens
  misc_RNA (1)...(19): siRNA sense strand
gaguugguauuaucuguuu

SEQ ID NO: 2197398 - RNA, 19 nt, Homo sapiens
  misc_RNA (1)...(19): siRNA sense strand
gggcugauguagaauuuga

SEQ ID NO: 2197399 - RNA, 19 nt, Homo sapiens
  misc_RNA (1)...(19): siRNA sense strand
ucccagagaugaaacaauu

SEQ ID NO: 2197400 - RNA, 19 nt, Homo sapiens
  misc_RNA (1)...(19): siRNA sense strand
gauaggggcugauguagaa

SEQ ID NO: 2197401 - RNA, 19 nt, Homo sapiens
  misc_RNA (1)...(19): siRNA sense strand
gaaaauggguggugaugau

SEQ ID NO: 2197402 - RNA, 19 nt, Homo sapiens
  misc_RNA (1)...(19): siRNA sense strand
gcaaaggagauucagagaa

SEQ ID NO: 2197403 - RNA, 19 nt, Homo sapiens
  misc_RNA (1)...(19): siRNA sense strand
gccaucagcugccuaucaa

SEQ ID NO: 2197404 - RNA, 19 nt, Homo sapiens
  misc_RNA (1)...(19): siRNA sense strand
uaucaaaccuucucaucuc

SEQ ID NO: 2197405 - RNA, 19 nt, Homo sapiens
  misc_RNA (1)...(19): siRNA sense strand
uaagggaugcuuuagauau

SEQ ID NO: 2197406 - RNA, 19 nt, Homo sapiens
  misc_RNA (1)...(19): siRNA sense strand
cgcgucaccugcagauuua

SEQ ID NO: 2197407 - RNA, 19 nt, Homo sapiens
  misc_RNA (1)...(19): siRNA sense strand
gcauuugaguugguauuau

SEQ ID NO: 2197408 - RNA, 19 nt, Homo sapiens
  misc_RNA (1)...(19): siRNA sense strand
ugccagagaugaagaagga

SEQ ID NO: 2197409 - RNA, 19 nt, Homo sapiens
  misc_RNA (1)...(19): siRNA sense strand
gcaguuggauucucuucag

SEQ ID NO: 2197410 - RNA, 19 nt, Homo sapiens
  misc_RNA (1)...(19): siRNA sense strand
gagcguguugucaguauuu

SEQ ID NO: 2197411 - RNA, 19 nt, Homo sapiens
  misc_RNA (1)...(19): siRNA sense strand
uaaacgcccugugaauguu

SEQ ID NO: 2197412 - RNA, 19 nt, Homo sapiens
  misc_RNA (1)...(19): siRNA sense strand
agagaaacccugccagaga

SEQ ID NO: 2197413 - RNA, 19 nt, Homo sapiens
  misc_RNA (1)...(19): siRNA sense strand
gguagcaguuggauucucu

SEQ ID NO: 2197414 - RNA, 19 nt, Homo sapiens
  misc_RNA (1)...(19): siRNA sense strand
guaaugcagagaccuguga

SEQ ID NO: 2197415 - RNA, 19 nt, Homo sapiens
  misc_RNA (1)...(19): siRNA sense strand
gugacuauuuccucagcua

SEQ ID NO: 2197416 - RNA, 19 nt, Homo sapiens
  misc_RNA (1)...(19): siRNA sense strand
cauuugaguugguauuauc

SEQ ID NO: 2197417 - RNA, 19 nt, Homo sapiens
  misc_RNA (1)...(19): siRNA sense strand
cagagcguguugucaguau

SEQ ID NO: 2197418 - RNA, 19 nt, Homo sapiens
  misc_RNA (1)...(19): siRNA sense strand
aagggaugcuuuagauaug

SEQ ID NO: 2197419 - RNA, 19 nt, Homo sapiens
  misc_RNA (1)...(19): siRNA sense strand
gaucugcauuugaguuggu

SEQ ID NO: 2197420 - RNA, 19 nt, Homo sapiens
  misc_RNA (1)...(19): siRNA sense strand
cagcacuucuauaauguag

SEQ ID NO: 2197421 - RNA, 19 nt, Homo sapiens
  misc_RNA (1)...(19): siRNA sense strand
agagaccugugacuauuuc

SEQ ID NO: 2197422 - RNA, 19 nt, Homo sapiens
  misc_RNA (1)...(19): siRNA sense strand
gaccuucuaccuauugaug

SEQ ID NO: 2197423 - RNA, 19 nt, Homo sapiens
  misc_RNA (1)...(19): siRNA sense strand
uggauucucuucagacaag

SEQ ID NO: 2197424 - RNA, 19 nt, Homo sapiens
  misc_RNA (1)...(19): siRNA sense strand
gauuuaaacgcccugugaa

SEQ ID NO: 2197425 - RNA, 19 nt, Homo sapiens
  misc_RNA (1)...(19): siRNA sense strand
gaauguucccagagaugaa

SEQ ID NO: 2197426 - RNA, 19 nt, Homo sapiens
  misc_RNA (1)...(19): siRNA sense strand
uuaaacgcccugugaaugu

SEQ ID NO: 2197427 - RNA, 19 nt, Homo sapiens
  misc_RNA (1)...(19): siRNA sense strand
gaugauaggggcugaugua

SEQ ID NO: 2197428 - RNA, 19 nt, Homo sapiens
  misc_RNA (1)...(19): siRNA sense strand
ucgcgucaccugcagauuu

SEQ ID NO: 2197429 - RNA, 19 nt, Homo sapiens
  misc_RNA (1)...(19): siRNA sense strand
cagagaccugugacuauuu

SEQ ID NO: 2197430 - RNA, 19 nt, Homo sapiens
  misc_RNA (1)...(19): siRNA sense strand
uacagcacuucuauaaugu

SEQ ID NO: 2197431 - RNA, 19 nt, Homo sapiens
  misc_RNA (1)...(19): siRNA sense strand
ccgcauacagcacuucuau

SEQ ID NO: 2197432 - RNA, 19 nt, Homo sapiens
  misc_RNA (1)...(19): siRNA sense strand
gaaacccugccagagauga

SEQ ID NO: 2197433 - RNA, 19 nt, Homo sapiens
  misc_RNA (1)...(19): siRNA sense strand
ccagagaugaaacaauugu

SEQ ID NO: 2197434 - RNA, 19 nt, Homo sapiens
  misc_RNA (1)...(19): siRNA sense strand
caaaccaggcuguaaugca

SEQ ID NO: 2197435 - RNA, 19 nt, Homo sapiens
  misc_RNA (1)...(19): siRNA sense strand
caaaccuucucaucuccau

SEQ ID NO: 2197436 - RNA, 19 nt, Homo sapiens
  misc_RNA (1)...(19): siRNA sense strand
guuggauucucuucagaca

SEQ ID NO: 2197437 - RNA, 19 nt, Homo sapiens
  misc_RNA (1)...(19): siRNA sense strand
ucacucgacaugauauaga

SEQ ID NO: 2197438 - RNA, 19 nt, Homo sapiens
  misc_RNA (1)...(19): siRNA sense strand
caauuguugaucugcauuu

SEQ ID NO: 2197439 - RNA, 19 nt, Homo sapiens
  misc_RNA (1)...(19): siRNA sense strand
agauuuaaacgcccuguga

SEQ ID NO: 2197440 - RNA, 19 nt, Homo sapiens
  misc_RNA (1)...(19): siRNA sense strand
ggcaaaccaggcuguaaug

SEQ ID NO: 2197441 - RNA, 19 nt, Homo sapiens
  misc_RNA (1)...(19): siRNA sense strand
ccucagcuaccggaugaua

SEQ ID NO: 2197442 - RNA, 19 nt, Homo sapiens
  misc_RNA (1)...(19): siRNA sense strand
ugaauguucccagagauga

SEQ ID NO: 2197443 - RNA, 19 nt, Homo sapiens
  misc_RNA (1)...(19): siRNA sense strand
uuccucagcuaccggauga

SEQ ID NO: 2197444 - RNA, 19 nt, Homo sapiens
  misc_RNA (1)...(19): siRNA sense strand
uuuguuugcuucugauugu

SEQ ID NO: 2197445 - RNA, 19 nt, Homo sapiens
  misc_RNA (1)...(19): siRNA sense strand
aaccuucucaucuccauuu

SEQ ID NO: 2197446 - RNA, 19 nt, Homo sapiens
  misc_RNA (1)...(19): siRNA sense strand
gucaguauuuacaaguaug

SEQ ID NO: 2197447 - RNA, 19 nt, Homo sapiens
  misc_RNA (1)...(19): siRNA sense strand
caauggcaggguccgcaua

SEQ ID NO: 2197448 - RNA, 19 nt, Homo sapiens
  misc_RNA (1)...(19): siRNA sense strand
aaucaaaguggacgacugu

SEQ ID NO: 2197449 - RNA, 19 nt, Homo sapiens
  misc_RNA (1)...(19): siRNA sense strand
ggcaaaggagauucagaga

SEQ ID NO: 2197450 - RNA, 19 nt, Homo sapiens
  misc_RNA (1)...(19): siRNA sense strand
caguuggauucucuucaga

SEQ ID NO: 2197451 - RNA, 19 nt, Homo sapiens
  misc_RNA (1)...(19): siRNA sense strand
cugcguccaugaugacaau

SEQ ID NO: 2197452 - RNA, 19 nt, Homo sapiens
  misc_RNA (1)...(19): siRNA sense strand
uggccugcguccaugauga

SEQ ID NO: 2197453 - RNA, 19 nt, Homo sapiens
  misc_RNA (1)...(19): siRNA sense strand
gugaauguucccagagaug

SEQ ID NO: 2197454 - RNA, 19 nt, Homo sapiens
  misc_RNA (1)...(19): siRNA sense strand
uggcaaaccaggcuguaau

SEQ ID NO: 2197455 - RNA, 19 nt, Homo sapiens
  misc_RNA (1)...(19): siRNA sense strand
cauacagcacuucuauaau

SEQ ID NO: 2197456 - RNA, 19 nt, Homo sapiens
  misc_RNA (1)...(19): siRNA sense strand
gcugagugcagacacagau

SEQ ID NO: 2197457 - RNA, 19 nt, Homo sapiens
  misc_RNA (1)...(19): siRNA sense strand
cugugaauguucccagaga

SEQ ID NO: 2197458 - RNA, 19 nt, Homo sapiens
  misc_RNA (1)...(19): siRNA sense strand
aaaacuaagggaugcuuua

SEQ ID NO: 2197459 - RNA, 19 nt, Homo sapiens
  misc_RNA (1)...(19): siRNA sense strand
ugagcugagugcagacaca

SEQ ID NO: 2197460 - RNA, 19 nt, Homo sapiens
  misc_RNA (1)...(19): siRNA sense strand
gaagugaagucucaucuua

SEQ ID NO: 2197461 - RNA, 19 nt, Homo sapiens
  misc_RNA (1)...(19): siRNA sense strand
gcaaagagaaugucaaaua

SEQ ID NO: 2197462 - RNA, 19 nt, Homo sapiens
  misc_RNA (1)...(19): siRNA sense strand
gaaauacccuguugaauca

SEQ ID NO: 2197463 - RNA, 19 nt, Homo sapiens
  misc_RNA (1)...(19): siRNA sense strand
gcaaaugacugaagaggaa

SEQ ID NO: 2197464 - RNA, 19 nt, Homo sapiens
  misc_RNA (1)...(19): siRNA sense strand
gcagagugcuccuaauuga

SEQ ID NO: 2197465 - RNA, 19 nt, Homo sapiens
  misc_RNA (1)...(19): siRNA sense strand
guacaagagucaaguuaaa

SEQ ID NO: 2197466 - RNA, 19 nt, Homo sapiens
  misc_RNA (1)...(19): siRNA sense strand
aaacguaccuggauccuuu

SEQ ID NO: 2197467 - RNA, 19 nt, Homo sapiens
  misc_RNA (1)...(19): siRNA sense strand
ucaagaagcuuuaucuaug

SEQ ID NO: 2197468 - RNA, 19 nt, Homo sapiens
  misc_RNA (1)...(19): siRNA sense strand
gaauaauccugccaucauu

SEQ ID NO: 2197469 - RNA, 19 nt, Homo sapiens
  misc_RNA (1)...(19): siRNA sense strand
caaauugcaucuuguagaa

SEQ ID NO: 2197470 - RNA, 19 nt, Homo sapiens
  misc_RNA (1)...(19): siRNA sense strand
aaacagagcuuaauugacu

SEQ ID NO: 2197471 - RNA, 19 nt, Homo sapiens
  misc_RNA (1)...(19): siRNA sense strand
ucaccaagcuaaucaauga

SEQ ID NO: 2197472 - RNA, 19 nt, Homo sapiens
  misc_RNA (1)...(19): siRNA sense strand
caagaagcuuuaucuauga

SEQ ID NO: 2197473 - RNA, 19 nt, Homo sapiens
  misc_RNA (1)...(19): siRNA sense strand
aagaagaacucacuugaaa

SEQ ID NO: 2197474 - RNA, 19 nt, Homo sapiens
  misc_RNA (1)...(19): siRNA sense strand
ucccagaaaugguuuauua

SEQ ID NO: 2197475 - RNA, 19 nt, Homo sapiens
  misc_RNA (1)...(19): siRNA sense strand
uagaauaccuuccaguaaa

SEQ ID NO: 2197476 - RNA, 19 nt, Homo sapiens
  misc_RNA (1)...(19): siRNA sense strand
gaacuuagccaagauguug

SEQ ID NO: 2197477 - RNA, 19 nt, Homo sapiens
  misc_RNA (1)...(19): siRNA sense strand
ggaaugcguuggucacuga

SEQ ID NO: 2197478 - RNA, 19 nt, Homo sapiens
  misc_RNA (1)...(19): siRNA sense strand
cagcagaccuggaauugaa

SEQ ID NO: 2197479 - RNA, 19 nt, Homo sapiens
  misc_RNA (1)...(19): siRNA sense strand
gauuauaccugcaggaguu

SEQ ID NO: 2197480 - RNA, 19 nt, Homo sapiens
  misc_RNA (1)...(19): siRNA sense strand
gcaaacagagcuuaauuga

SEQ ID NO: 2197481 - RNA, 19 nt, Homo sapiens
  misc_RNA (1)...(19): siRNA sense strand
acaaguggcugugaaauuu

SEQ ID NO: 2197482 - RNA, 19 nt, Homo sapiens
  misc_RNA (1)...(19): siRNA sense strand
gugauugccucuagugaua

SEQ ID NO: 2197483 - RNA, 19 nt, Homo sapiens
  misc_RNA (1)...(19): siRNA sense strand
gaaaggaggagcuauugaa

SEQ ID NO: 2197484 - RNA, 19 nt, Homo sapiens
  misc_RNA (1)...(19): siRNA sense strand
gcacaggguucuucuucaa

SEQ ID NO: 2197485 - RNA, 19 nt, Homo sapiens
  misc_RNA (1)...(19): siRNA sense strand
ccacuguccuuccauuuaa

SEQ ID NO: 2197486 - RNA, 19 nt, Homo sapiens
  misc_RNA (1)...(19): siRNA sense strand
gaagcuaaguacccacaaa

SEQ ID NO: 2197487 - RNA, 19 nt, Homo sapiens
  misc_RNA (1)...(19): siRNA sense strand
gaucuggcuuuaccaaauu

SEQ ID NO: 2197488 - RNA, 19 nt, Homo sapiens
  misc_RNA (1)...(19): siRNA sense strand
gcuugaaacuuguaaauca

SEQ ID NO: 2197489 - RNA, 19 nt, Homo sapiens
  misc_RNA (1)...(19): siRNA sense strand
ggaauugguuucuacacuu

SEQ ID NO: 2197490 - RNA, 19 nt, Homo sapiens
  misc_RNA (1)...(19): siRNA sense strand
caaagugaaugaugugguu

SEQ ID NO: 2197491 - RNA, 19 nt, Homo sapiens
  misc_RNA (1)...(19): siRNA sense strand
gaucagaagugguguaggu

SEQ ID NO: 2197492 - RNA, 19 nt, Homo sapiens
  misc_RNA (1)...(19): siRNA sense strand
caaagagaaugucaaauac

SEQ ID NO: 2197493 - RNA, 19 nt, Homo sapiens
  misc_RNA (1)...(19): siRNA sense strand
aaagcuggcuaccaaauuu

SEQ ID NO: 2197494 - RNA, 19 nt, Homo sapiens
  misc_RNA (1)...(19): siRNA sense strand
guucggaccucacgggaua

SEQ ID NO: 2197495 - RNA, 19 nt, Homo sapiens
  misc_RNA (1)...(19): siRNA sense strand
caaagaggacccuaaacua

SEQ ID NO: 2197496 - RNA, 19 nt, Homo sapiens
  misc_RNA (1)...(19): siRNA sense strand
gucagggccuuucuacuua

SEQ ID NO: 2197497 - RNA, 19 nt, Homo sapiens
  misc_RNA (1)...(19): siRNA sense strand
caacaggaauugguuucua

SEQ ID NO: 2197498 - RNA, 19 nt, Homo sapiens
  misc_RNA (1)...(19): siRNA sense strand
ggagauauaccacugaaga

SEQ ID NO: 2197499 - RNA, 19 nt, Homo sapiens
  misc_RNA (1)...(19): siRNA sense strand
gugauagaauugcugcuua

SEQ ID NO: 2197500 - RNA, 19 nt, Homo sapiens
  misc_RNA (1)...(19): siRNA sense strand
gaaagaagaaccuaucuac

SEQ ID NO: 2197501 - RNA, 19 nt, Homo sapiens
  misc_RNA (1)...(19): siRNA sense strand
gcaaaagaguuaaacauga

SEQ ID NO: 2197502 - RNA, 19 nt, Homo sapiens
  misc_RNA (1)...(19): siRNA sense strand
acaaagaagugaagucuca

SEQ ID NO: 2197503 - RNA, 19 nt, Homo sapiens
  misc_RNA (1)...(19): siRNA sense strand
gcacagcccugggugaaau

SEQ ID NO: 2197504 - RNA, 19 nt, Homo sapiens
  misc_RNA (1)...(19): siRNA sense strand
uguauaaccuguccagaaa

SEQ ID NO: 2197505 - RNA, 19 nt, Homo sapiens
  misc_RNA (1)...(19): siRNA sense strand
ggugguauauggagaaaga

SEQ ID NO: 2197506 - RNA, 19 nt, Homo sapiens
  misc_RNA (1)...(19): siRNA sense strand
ggaacagugugauucagaa

SEQ ID NO: 2197507 - RNA, 19 nt, Homo sapiens
  misc_RNA (1)...(19): siRNA sense strand
gaauugguuucuacacuug

SEQ ID NO: 2197508 - RNA, 19 nt, Homo sapiens
  misc_RNA (1)...(19): siRNA sense strand
ugaacaagaucaacaggaa

SEQ ID NO: 2197509 - RNA, 19 nt, Homo sapiens
  misc_RNA (1)...(19): siRNA sense strand
gaucauaucccuuccagau

SEQ ID NO: 2197510 - RNA, 19 nt, Homo sapiens
  misc_RNA (1)...(19): siRNA sense strand
gaaggaauguagcaaagag

SEQ ID NO: 2197511 - RNA, 19 nt, Homo sapiens
  misc_RNA (1)...(19): siRNA sense strand
gcaauaccuugauguguca

SEQ ID NO: 2197512 - RNA, 19 nt, Homo sapiens
  misc_RNA (1)...(19): siRNA sense strand
gaacagcuuauaaagacua

SEQ ID NO: 2197513 - RNA, 19 nt, Homo sapiens
  misc_RNA (1)...(19): siRNA sense strand
cccaaguucucaauuauuu

SEQ ID NO: 2197514 - RNA, 19 nt, Homo sapiens
  misc_RNA (1)...(19): siRNA sense strand
gcacaacgcguauuaaggu

SEQ ID NO: 2197515 - RNA, 19 nt, Homo sapiens
  misc_RNA (1)...(19): siRNA sense strand
gaaagcagcguuacugaag

SEQ ID NO: 2197516 - RNA, 19 nt, Homo sapiens
  misc_RNA (1)...(19): siRNA sense strand
ggaagaacgugggcaggaa

SEQ ID NO: 2197517 - RNA, 19 nt, Homo sapiens
  misc_RNA (1)...(19): siRNA sense strand
gagagacagugguauuuca

SEQ ID NO: 2197518 - RNA, 19 nt, Homo sapiens
  misc_RNA (1)...(19): siRNA sense strand
ggaucuggcuuuaccaaau

SEQ ID NO: 2197519 - RNA, 19 nt, Homo sapiens
  misc_RNA (1)...(19): siRNA sense strand
aacaagaccuggagagaaa

SEQ ID NO: 2197520 - RNA, 19 nt, Homo sapiens
  misc_RNA (1)...(19): siRNA sense strand
gagccaaagugaaugaugu

SEQ ID NO: 2197521 - RNA, 19 nt, Homo sapiens
  misc_RNA (1)...(19): siRNA sense strand
gaggaagacccuuagauga

SEQ ID NO: 2197522 - RNA, 19 nt, Homo sapiens
  misc_RNA (1)...(19): siRNA sense strand
cgacaggccaugacaagua

SEQ ID NO: 2197523 - RNA, 19 nt, Homo sapiens
  misc_RNA (1)...(19): siRNA sense strand
ccaagcuaaucaaugaaua

SEQ ID NO: 2197524 - RNA, 19 nt, Homo sapiens
  misc_RNA (1)...(19): siRNA sense strand
caaggaaucuguacgaaaa

SEQ ID NO: 2197525 - RNA, 19 nt, Homo sapiens
  misc_RNA (1)...(19): siRNA sense strand
ggaagacccuuagaugaca

SEQ ID NO: 2197526 - RNA, 19 nt, Homo sapiens
  misc_RNA (1)...(19): siRNA sense strand
guagaauaccuuccaguaa

SEQ ID NO: 2197527 - RNA, 19 nt, Homo sapiens
  misc_RNA (1)...(19): siRNA sense strand
gauaaagagucugaugaau

SEQ ID NO: 2197528 - RNA, 19 nt, Homo sapiens
  misc_RNA (1)...(19): siRNA sense strand
cauuuaaucuugcugagaa

SEQ ID NO: 2197529 - RNA, 19 nt, Homo sapiens
  misc_RNA (1)...(19): siRNA sense strand
caaaucuucuccaaugaug

SEQ ID NO: 2197530 - RNA, 19 nt, Homo sapiens
  misc_RNA (1)...(19): siRNA sense strand
uagaacagcuuauaaagac

SEQ ID NO: 2197531 - RNA, 19 nt, Homo sapiens
  misc_RNA (1)...(19): siRNA sense strand
ggauaaagagucugaugaa

SEQ ID NO: 2197532 - RNA, 19 nt, Homo sapiens
  misc_RNA (1)...(19): siRNA sense strand
gaacauuaucccugcaauu

SEQ ID NO: 2197533 - RNA, 19 nt, Homo sapiens
  misc_RNA (1)...(19): siRNA sense strand
ugaaauacccuguugaauc

SEQ ID NO: 2197534 - RNA, 19 nt, Homo sapiens
  misc_RNA (1)...(19): siRNA sense strand
ggucagggccuuucuacuu

SEQ ID NO: 2197535 - RNA, 19 nt, Homo sapiens
  misc_RNA (1)...(19): siRNA sense strand
gaaagaacgagcaauccaa

SEQ ID NO: 2197536 - RNA, 19 nt, Homo sapiens
  misc_RNA (1)...(19): siRNA sense strand
ggaauaauccugccaucau

SEQ ID NO: 2197537 - RNA, 19 nt, Homo sapiens
  misc_RNA (1)...(19): siRNA sense strand
gagcuuaauugacuggaau

SEQ ID NO: 2197538 - RNA, 19 nt, Homo sapiens
  misc_RNA (1)...(19): siRNA sense strand
ccagucggaugccacauuu

SEQ ID NO: 2197539 - RNA, 19 nt, Homo sapiens
  misc_RNA (1)...(19): siRNA sense strand
gagcaaggucugugugaaa

SEQ ID NO: 2197540 - RNA, 19 nt, Homo sapiens
  misc_RNA (1)...(19): siRNA sense strand
gcuaguuccucgacuuuau

SEQ ID NO: 2197541 - RNA, 19 nt, Homo sapiens
  misc_RNA (1)...(19): siRNA sense strand
gaacugcugguccaucuga

SEQ ID NO: 2197542 - RNA, 19 nt, Homo sapiens
  misc_RNA (1)...(19): siRNA sense strand
gcccugauguauuaaagaa

SEQ ID NO: 2197543 - RNA, 19 nt, Homo sapiens
  misc_RNA (1)...(19): siRNA sense strand
ugauagaauugcugcuuaa

SEQ ID NO: 2197544 - RNA, 19 nt, Homo sapiens
  misc_RNA (1)...(19): siRNA sense strand
caacccagcacaaaugaaa

SEQ ID NO: 2197545 - RNA, 19 nt, Homo sapiens
  misc_RNA (1)...(19): siRNA sense strand
gguguaccuuggagauaua

SEQ ID NO: 2197546 - RNA, 19 nt, Homo sapiens
  misc_RNA (1)...(19): siRNA sense strand
caggaguucucuaacauug

SEQ ID NO: 2197547 - RNA, 19 nt, Homo sapiens
  misc_RNA (1)...(19): siRNA sense strand
cagcacaaaugaaauucuu

SEQ ID NO: 2197548 - RNA, 19 nt, Homo sapiens
  misc_RNA (1)...(19): siRNA sense strand
guucgagcccucagcauua

SEQ ID NO: 2197549 - RNA, 19 nt, Homo sapiens
  misc_RNA (1)...(19): siRNA sense strand
aaauacaacuuccaguaga

SEQ ID NO: 2197550 - RNA, 19 nt, Homo sapiens
  misc_RNA (1)...(19): siRNA sense strand
gcugugaaauuugccagua

SEQ ID NO: 2197551 - RNA, 19 nt, Homo sapiens
  misc_RNA (1)...(19): siRNA sense strand
gaaaugguccacuuccaau

SEQ ID NO: 2197552 - RNA, 19 nt, Homo sapiens
  misc_RNA (1)...(19): siRNA sense strand
gaaauucugcuugaaacuu

SEQ ID NO: 2197553 - RNA, 19 nt, Homo sapiens
  misc_RNA (1)...(19): siRNA sense strand
ugaaagccauugccugugu

SEQ ID NO: 2197554 - RNA, 19 nt, Homo sapiens
  misc_RNA (1)...(19): siRNA sense strand
gacaggccaugacaaguau

SEQ ID NO: 2197555 - RNA, 19 nt, Homo sapiens
  misc_RNA (1)...(19): siRNA sense strand
cagaucugguguauaaauu

SEQ ID NO: 2197556 - RNA, 19 nt, Homo sapiens
  misc_RNA (1)...(19): siRNA sense strand
ggaguucucuaacauuguc

SEQ ID NO: 2197557 - RNA, 19 nt, Homo sapiens
  misc_RNA (1)...(19): siRNA sense strand
gcuccuaauugagucuuua

SEQ ID NO: 2197558 - RNA, 19 nt, Homo sapiens
  misc_RNA (1)...(19): siRNA sense strand
ucauaccucucaucaagaa

SEQ ID NO: 2197559 - RNA, 19 nt, Homo sapiens
  misc_RNA (1)...(19): siRNA sense strand
ugucauaccucucaucaag

SEQ ID NO: 2197560 - RNA, 19 nt, Homo sapiens
  misc_RNA (1)...(19): siRNA sense strand
caaagaaacuucagacuua

SEQ ID NO: 2197561 - RNA, 19 nt, Homo sapiens
  misc_RNA (1)...(19): siRNA sense strand
ggaagaagcuggagccuuu

SEQ ID NO: 2197562 - RNA, 19 nt, Homo sapiens
  misc_RNA (1)...(19): siRNA sense strand
gaagaaaucucggagguau

SEQ ID NO: 2197563 - RNA, 19 nt, Homo sapiens
  misc_RNA (1)...(19): siRNA sense strand
ggauguagcugugaacuuu

SEQ ID NO: 2197564 - RNA, 19 nt, Homo sapiens
  misc_RNA (1)...(19): siRNA sense strand
gagaaacccuucaaaugug

SEQ ID NO: 2197565 - RNA, 19 nt, Homo sapiens
  misc_RNA (1)...(19): siRNA sense strand
caacaucagcgaauucaua

SEQ ID NO: 2197566 - RNA, 19 nt, Homo sapiens
  misc_RNA (1)...(19): siRNA sense strand
gagagaaacccuauaaaug

SEQ ID NO: 2197567 - RNA, 19 nt, Homo sapiens
  misc_RNA (1)...(19): siRNA sense strand
gaagcagccuuaaauaaag

SEQ ID NO: 2197568 - RNA, 19 nt, Homo sapiens
  misc_RNA (1)...(19): siRNA sense strand
agucauagcucaucccuuu

SEQ ID NO: 2197569 - RNA, 19 nt, Homo sapiens
  misc_RNA (1)...(19): siRNA sense strand
gaaauuugacccagauaaa

SEQ ID NO: 2197570 - RNA, 19 nt, Homo sapiens
  misc_RNA (1)...(19): siRNA sense strand
gagagaaacccuucaaaug

SEQ ID NO: 2197571 - RNA, 19 nt, Homo sapiens
  misc_RNA (1)...(19): siRNA sense strand
gauccagucucucaagauu

SEQ ID NO: 2197572 - RNA, 19 nt, Homo sapiens
  misc_RNA (1)...(19): siRNA sense strand
ggaaaauccuucagucaua

SEQ ID NO: 2197573 - RNA, 19 nt, Homo sapiens
  misc_RNA (1)...(19): siRNA sense strand
ggaagaaucccagcaauau

SEQ ID NO: 2197574 - RNA, 19 nt, Homo sapiens
  misc_RNA (1)...(19): siRNA sense strand
gaccagacauucacacgaa

SEQ ID NO: 2197575 - RNA, 19 nt, Homo sapiens
  misc_RNA (1)...(19): siRNA sense strand
ggagagaaacccuauaaau

SEQ ID NO: 2197576 - RNA, 19 nt, Homo sapiens
  misc_RNA (1)...(19): siRNA sense strand
gcucaucccuuuccaaaca

SEQ ID NO: 2197577 - RNA, 19 nt, Homo sapiens
  misc_RNA (1)...(19): siRNA sense strand
gagaaacccuauaaaugug

SEQ ID NO: 2197578 - RNA, 19 nt, Homo sapiens
  misc_RNA (1)...(19): siRNA sense strand
gagcaccaccgaauucaua

SEQ ID NO: 2197579 - RNA, 19 nt, Homo sapiens
  misc_RNA (1)...(19): siRNA sense strand
ggagagaauaugaauguaa

SEQ ID NO: 2197580 - RNA, 19 nt, Homo sapiens
  misc_RNA (1)...(19): siRNA sense strand
gaaagauucaugucaagaa

SEQ ID NO: 2197581 - RNA, 19 nt, Homo sapiens
  misc_RNA (1)...(19): siRNA sense strand
caagaagcagccuuaaaua

SEQ ID NO: 2197582 - RNA, 19 nt, Homo sapiens
  misc_RNA (1)...(19): siRNA sense strand
ucacggaaaucuaaugaug

SEQ ID NO: 2197583 - RNA, 19 nt, Homo sapiens
  misc_RNA (1)...(19): siRNA sense strand
gagaaacccuaugagugua

SEQ ID NO: 2197584 - RNA, 19 nt, Homo sapiens
  misc_RNA (1)...(19): siRNA sense strand
gagcaguuccugaccauuu

SEQ ID NO: 2197585 - RNA, 19 nt, Homo sapiens
  misc_RNA (1)...(19): siRNA sense strand
guucaucucuuauucaaca

SEQ ID NO: 2197586 - RNA, 19 nt, Homo sapiens
  misc_RNA (1)...(19): siRNA sense strand
ggagagaaacccuucaaau

SEQ ID NO: 2197587 - RNA, 19 nt, Homo sapiens
  misc_RNA (1)...(19): siRNA sense strand
gaagaaucccagcaauauu

SEQ ID NO: 2197588 - RNA, 19 nt, Homo sapiens
  misc_RNA (1)...(19): siRNA sense strand
ccuaagugcucaccucauu

SEQ ID NO: 2197589 - RNA, 19 nt, Homo sapiens
  misc_RNA (1)...(19): siRNA sense strand
ucaagaagcagccuuaaau

SEQ ID NO: 2197590 - RNA, 19 nt, Homo sapiens
  misc_RNA (1)...(19): siRNA sense strand
agaagcagccuuaaauaaa

SEQ ID NO: 2197591 - RNA, 19 nt, Homo sapiens
  misc_RNA (1)...(19): siRNA sense strand
gaagcucaauccuuguaga

SEQ ID NO: 2197592 - RNA, 19 nt, Homo sapiens
  misc_RNA (1)...(19): siRNA sense strand
ggaaagcucugagucaacu

SEQ ID NO: 2197593 - RNA, 19 nt, Homo sapiens
  misc_RNA (1)...(19): siRNA sense strand
ggugcaaccuuuagucgaa

SEQ ID NO: 2197594 - RNA, 19 nt, Homo sapiens
  misc_RNA (1)...(19): siRNA sense strand
gagaauucauacuggugua

SEQ ID NO: 2197595 - RNA, 19 nt, Homo sapiens
  misc_RNA (1)...(19): siRNA sense strand
agagaaacccuauaaaugu

SEQ ID NO: 2197596 - RNA, 19 nt, Homo sapiens
  misc_RNA (1)...(19): siRNA sense strand
ucagaaacgucagaagauu

SEQ ID NO: 2197597 - RNA, 19 nt, Homo sapiens
  misc_RNA (1)...(19): siRNA sense strand
uaagaaauuugacccagau

SEQ ID NO: 2197598 - RNA, 19 nt, Homo sapiens
  misc_RNA (1)...(19): siRNA sense strand
ggaaguggugacccuaaua

SEQ ID NO: 2197599 - RNA, 19 nt, Homo sapiens
  misc_RNA (1)...(19): siRNA sense strand
gagagaauaugaauguaac

SEQ ID NO: 2197600 - RNA, 19 nt, Homo sapiens
  misc_RNA (1)...(19): siRNA sense strand
gaguugauuucccagcuaa

SEQ ID NO: 2197601 - RNA, 19 nt, Homo sapiens
  misc_RNA (1)...(19): siRNA sense strand
ggaaggagagaauaugaau

SEQ ID NO: 2197602 - RNA, 19 nt, Homo sapiens
  misc_RNA (1)...(19): siRNA sense strand
gcucaauccuuguagaaca

SEQ ID NO: 2197603 - RNA, 19 nt, Homo sapiens
  misc_RNA (1)...(19): siRNA sense strand
agugacaguucaucucuua

SEQ ID NO: 2197604 - RNA, 19 nt, Homo sapiens
  misc_RNA (1)...(19): siRNA sense strand
agagaaacccuucaaaugu

SEQ ID NO: 2197605 - RNA, 19 nt, Homo sapiens
  misc_RNA (1)...(19): siRNA sense strand
cuauaaauguggcgaaugu

SEQ ID NO: 2197606 - RNA, 19 nt, Homo sapiens
  misc_RNA (1)...(19): siRNA sense strand
ggaacaagaagcuauuuua

SEQ ID NO: 2197607 - RNA, 19 nt, Homo sapiens
  misc_RNA (1)...(19): siRNA sense strand
gagaauucauacuggagaa

SEQ ID NO: 2197608 - RNA, 19 nt, Homo sapiens
  misc_RNA (1)...(19): siRNA sense strand
gugcucaccucauuaaaca

SEQ ID NO: 2197609 - RNA, 19 nt, Homo sapiens
  misc_RNA (1)...(19): siRNA sense strand
gagaucaggauuuggguaa

SEQ ID NO: 2197610 - RNA, 19 nt, Homo sapiens
  misc_RNA (1)...(19): siRNA sense strand
gggagacccuuuagugaca

SEQ ID NO: 2197611 - RNA, 19 nt, Homo sapiens
  misc_RNA (1)...(19): siRNA sense strand
gaacaucagaaacgucaga

SEQ ID NO: 2197612 - RNA, 19 nt, Homo sapiens
  misc_RNA (1)...(19): siRNA sense strand
ucucggagguauaaugaaa

SEQ ID NO: 2197613 - RNA, 19 nt, Homo sapiens
  misc_RNA (1)...(19): siRNA sense strand
ucucaagauucuacuguuu

SEQ ID NO: 2197614 - RNA, 19 nt, Homo sapiens
  misc_RNA (1)...(19): siRNA sense strand
gaauguaacgaaugugaga

SEQ ID NO: 2197615 - RNA, 19 nt, Homo sapiens
  misc_RNA (1)...(19): siRNA sense strand
ggagagaaacccuaugagu

SEQ ID NO: 2197616 - RNA, 19 nt, Homo sapiens
  misc_RNA (1)...(19): siRNA sense strand
aaaaggagcuauauaagga

SEQ ID NO: 2197617 - RNA, 19 nt, Homo sapiens
  misc_RNA (1)...(19): siRNA sense strand
uaacgaaugugagaagaca

SEQ ID NO: 2197618 - RNA, 19 nt, Homo sapiens
  misc_RNA (1)...(19): siRNA sense strand
gacaguucaucucuuauuc

SEQ ID NO: 2197619 - RNA, 19 nt, Homo sapiens
  misc_RNA (1)...(19): siRNA sense strand
uaagugcucaccucauuaa

SEQ ID NO: 2197620 - RNA, 19 nt, Homo sapiens
  misc_RNA (1)...(19): siRNA sense strand
caucauagaacucauagug

SEQ ID NO: 2197621 - RNA, 19 nt, Homo sapiens
  misc_RNA (1)...(19): siRNA sense strand
aagaagcagccuuaaauaa

SEQ ID NO: 2197622 - RNA, 19 nt, Homo sapiens
  misc_RNA (1)...(19): siRNA sense strand
gcuaaaguggguugaauug

SEQ ID NO: 2197623 - RNA, 19 nt, Homo sapiens
  misc_RNA (1)...(19): siRNA sense strand
gcuaagucgucaucagaga

SEQ ID NO: 2197624 - RNA, 19 nt, Homo sapiens
  misc_RNA (1)...(19): siRNA sense strand
ccacaucauagaacucaua

SEQ ID NO: 2197625 - RNA, 19 nt, Homo sapiens
  misc_RNA (1)...(19): siRNA sense strand
gagaaaugucggaaagauu

SEQ ID NO: 2197626 - RNA, 19 nt, Homo sapiens
  misc_RNA (1)...(19): siRNA sense strand
ggagaaaagucacggaaau

SEQ ID NO: 2197627 - RNA, 19 nt, Homo sapiens
  misc_RNA (1)...(19): siRNA sense strand
ggaagaaaucucggaggua

SEQ ID NO: 2197628 - RNA, 19 nt, Homo sapiens
  misc_RNA (1)...(19): siRNA sense strand
ucaaagaaacuucagacuu

SEQ ID NO: 2197629 - RNA, 19 nt, Homo sapiens
  misc_RNA (1)...(19): siRNA sense strand
caggaaagcucugagucaa

SEQ ID NO: 2197630 - RNA, 19 nt, Homo sapiens
  misc_RNA (1)...(19): siRNA sense strand
caccaaacaucggagaauu

SEQ ID NO: 2197631 - RNA, 19 nt, Homo sapiens
  misc_RNA (1)...(19): siRNA sense strand
caucagaaacgucagaaga

SEQ ID NO: 2197632 - RNA, 19 nt, Homo sapiens
  misc_RNA (1)...(19): siRNA sense strand
uuaaacaucugagagucua

SEQ ID NO: 2197633 - RNA, 19 nt, Homo sapiens
  misc_RNA (1)...(19): siRNA sense strand
ccucaggaaccuagaauuu

SEQ ID NO: 2197634 - RNA, 19 nt, Homo sapiens
  misc_RNA (1)...(19): siRNA sense strand
ugacccagaugcuugaaga

SEQ ID NO: 2197635 - RNA, 19 nt, Homo sapiens
  misc_RNA (1)...(19): siRNA sense strand
gaugaaucagcuuuagaua

SEQ ID NO: 2197636 - RNA, 19 nt, Homo sapiens
  misc_RNA (1)...(19): siRNA sense strand
cuucaaaugugaugacugu

SEQ ID NO: 2197637 - RNA, 19 nt, Homo sapiens
  misc_RNA (1)...(19): siRNA sense strand
guaaucagggaaauucaaa

SEQ ID NO: 2197638 - RNA, 19 nt, Homo sapiens
  misc_RNA (1)...(19): siRNA sense strand
ggauuuggguaaagucaca

SEQ ID NO: 2197639 - RNA, 19 nt, Homo sapiens
  misc_RNA (1)...(19): siRNA sense strand
ggaaaugagaguggagaaa

SEQ ID NO: 2197640 - RNA, 19 nt, Homo sapiens
  misc_RNA (1)...(19): siRNA sense strand
ugagaaaugucggaaagau

SEQ ID NO: 2197641 - RNA, 19 nt, Homo sapiens
  misc_RNA (1)...(19): siRNA sense strand
agaaaucucggagguauaa

SEQ ID NO: 2197642 - RNA, 19 nt, Homo sapiens
  misc_RNA (1)...(19): siRNA sense strand
ugaguccugugaaucuaua

SEQ ID NO: 2197643 - RNA, 19 nt, Homo sapiens
  misc_RNA (1)...(19): siRNA sense strand
gaaguggugacccuaauag

SEQ ID NO: 2197644 - RNA, 19 nt, Homo sapiens
  misc_RNA (1)...(19): siRNA sense strand
agaaacccuucaaauguga

SEQ ID NO: 2197645 - RNA, 19 nt, Homo sapiens
  misc_RNA (1)...(19): siRNA sense strand
gcgccucacucaccaaaca

SEQ ID NO: 2197646 - RNA, 19 nt, Homo sapiens
  misc_RNA (1)...(19): siRNA sense strand
ugaaggauguagcugugaa

SEQ ID NO: 2197647 - RNA, 19 nt, Homo sapiens
  misc_RNA (1)...(19): siRNA sense strand
gaucaggauuuggguaaag

SEQ ID NO: 2197648 - RNA, 19 nt, Homo sapiens
  misc_RNA (1)...(19): siRNA sense strand
agagaaacccuaugagugu

SEQ ID NO: 2197649 - RNA, 19 nt, Homo sapiens
  misc_RNA (1)...(19): siRNA sense strand
ggagguauaaugaaagcaa

SEQ ID NO: 2197650 - RNA, 19 nt, Homo sapiens
  misc_RNA (1)...(19): siRNA sense strand
gcacaaaacaaaacucuug

SEQ ID NO: 2197651 - RNA, 19 nt, Homo sapiens
  misc_RNA (1)...(19): siRNA sense strand
aaaggugccucagggauga

SEQ ID NO: 2197652 - RNA, 19 nt, Homo sapiens
  misc_RNA (1)...(19): siRNA sense strand
uagaagauuugacccagau

SEQ ID NO: 2197653 - RNA, 19 nt, Homo sapiens
  misc_RNA (1)...(19): siRNA sense strand
caucagagaauucauacug

SEQ ID NO: 2197654 - RNA, 19 nt, Homo sapiens
  misc_RNA (1)...(19): siRNA sense strand
caucagagaauucauacug

SEQ ID NO: 2197655 - RNA, 19 nt, Homo sapiens
  misc_RNA (1)...(19): siRNA sense strand
caucagagaauucauacug

SEQ ID NO: 2197656 - RNA, 19 nt, Homo sapiens
  misc_RNA (1)...(19): siRNA sense strand
gcucacaccacaucauaga

SEQ ID NO: 2197657 - RNA, 19 nt, Homo sapiens
  misc_RNA (1)...(19): siRNA sense strand
ggaaagauucaugucaaga

SEQ ID NO: 2197658 - RNA, 19 nt, Homo sapiens
  misc_RNA (1)...(19): siRNA sense strand
ugccauggcugcuggaaga

SEQ ID NO: 2197659 - RNA, 19 nt, Homo sapiens
  misc_RNA (1)...(19): siRNA sense strand
gauaaaauggucacuguuu

SEQ ID NO: 2197660 - RNA, 19 nt, Homo sapiens
  misc_RNA (1)...(19): siRNA sense strand
ggagaaaccuuaugagugu

SEQ ID NO: 2197661 - RNA, 19 nt, Homo sapiens
  misc_RNA (1)...(19): siRNA sense strand
gaaagaaaccauaugaaug

SEQ ID NO: 2197662 - RNA, 19 nt, Homo sapiens
  misc_RNA (1)...(19): siRNA sense strand
agagaaaccuuaugaaugu

SEQ ID NO: 2197663 - RNA, 19 nt, Homo sapiens
  misc_RNA (1)...(19): siRNA sense strand
ggagagacccuaucaaugu

SEQ ID NO: 2197664 - RNA, 19 nt, Homo sapiens
  misc_RNA (1)...(19): siRNA sense strand
ggaaagaaaccauaugaau

SEQ ID NO: 2197665 - RNA, 19 nt, Homo sapiens
  misc_RNA (1)...(19): siRNA sense strand
gagagacccuaucaaugua

SEQ ID NO: 2197666 - RNA, 19 nt, Homo sapiens
  misc_RNA (1)...(19): siRNA sense strand
ggagagaagcccuauguuu

SEQ ID NO: 2197667 - RNA, 19 nt, Homo sapiens
  misc_RNA (1)...(19): siRNA sense strand
gcacacaccuaauugaaca

SEQ ID NO: 2197668 - RNA, 19 nt, Homo sapiens
  misc_RNA (1)...(19): siRNA sense strand
guacacaccuuacugaaca

SEQ ID NO: 2197669 - RNA, 19 nt, Homo sapiens
  misc_RNA (1)...(19): siRNA sense strand
gagaaacccuaccagugua

SEQ ID NO: 2197670 - RNA, 19 nt, Homo sapiens
  misc_RNA (1)...(19): siRNA sense strand
agucauaggucaucccuua

SEQ ID NO: 2197671 - RNA, 19 nt, Homo sapiens
  misc_RNA (1)...(19): siRNA sense strand
gaacaucagggaauucauu

SEQ ID NO: 2197672 - RNA, 19 nt, Homo sapiens
  misc_RNA (1)...(19): siRNA sense strand
gagagaagcccuauguuug

SEQ ID NO: 2197673 - RNA, 19 nt, Homo sapiens
  misc_RNA (1)...(19): siRNA sense strand
cauaguacauccuuaauuc

SEQ ID NO: 2197674 - RNA, 19 nt, Homo sapiens
  misc_RNA (1)...(19): siRNA sense strand
gggaaauccuucagcuuaa

SEQ ID NO: 2197675 - RNA, 19 nt, Homo sapiens
  misc_RNA (1)...(19): siRNA sense strand
gagagaaaccuuaugaaug

SEQ ID NO: 2197676 - RNA, 19 nt, Homo sapiens
  misc_RNA (1)...(19): siRNA sense strand
gagaagcccuauguuugua

SEQ ID NO: 2197677 - RNA, 19 nt, Homo sapiens
  misc_RNA (1)...(19): siRNA sense strand
gaacaccagagaacucaua

SEQ ID NO: 2197678 - RNA, 19 nt, Homo sapiens
  misc_RNA (1)...(19): siRNA sense strand
gugaaacccuaucaaugua

SEQ ID NO: 2197679 - RNA, 19 nt, Homo sapiens
  misc_RNA (1)...(19): siRNA sense strand
ggucaucccuuagaaauca

SEQ ID NO: 2197680 - RNA, 19 nt, Homo sapiens
  misc_RNA (1)...(19): siRNA sense strand
agucagagcacuaaucuua

SEQ ID NO: 2197681 - RNA, 19 nt, Homo sapiens
  misc_RNA (1)...(19): siRNA sense strand
uaaguguggugaugucuuu

SEQ ID NO: 2197682 - RNA, 19 nt, Homo sapiens
  misc_RNA (1)...(19): siRNA sense strand
ggagagaaaccuuaugaau

SEQ ID NO: 2197683 - RNA, 19 nt, Homo sapiens
  misc_RNA (1)...(19): siRNA sense strand
gagaaaccauaugaaugua

SEQ ID NO: 2197684 - RNA, 19 nt, Homo sapiens
  misc_RNA (1)...(19): siRNA sense strand
ggagagaaaccauaugaau

SEQ ID NO: 2197685 - RNA, 19 nt, Homo sapiens
  misc_RNA (1)...(19): siRNA sense strand
ucagagcacuaaucuuauu

SEQ ID NO: 2197686 - RNA, 19 nt, Homo sapiens
  misc_RNA (1)...(19): siRNA sense strand
gcucagcucuaacuaaaca

SEQ ID NO: 2197687 - RNA, 19 nt, Homo sapiens
  misc_RNA (1)...(19): siRNA sense strand
gagagaaaccauaugaaug

SEQ ID NO: 2197688 - RNA, 19 nt, Homo sapiens
  misc_RNA (1)...(19): siRNA sense strand
ccauaucucuguacugaau

SEQ ID NO: 2197689 - RNA, 19 nt, Homo sapiens
  misc_RNA (1)...(19): siRNA sense strand
gaaaacacauauuggagaa

SEQ ID NO: 2197690 - RNA, 19 nt, Homo sapiens
  misc_RNA (1)...(19): siRNA sense strand
ggugaugucuuuugucaua

SEQ ID NO: 2197691 - RNA, 19 nt, Homo sapiens
  misc_RNA (1)...(19): siRNA sense strand
gaaacccuaucaauguaau

SEQ ID NO: 2197692 - RNA, 19 nt, Homo sapiens
  misc_RNA (1)...(19): siRNA sense strand
gaagcccuauguuuguaaa

SEQ ID NO: 2197693 - RNA, 19 nt, Homo sapiens
  misc_RNA (1)...(19): siRNA sense strand
gugcacaucuuacugaaca

SEQ ID NO: 2197694 - RNA, 19 nt, Homo sapiens
  misc_RNA (1)...(19): siRNA sense strand
gagaaaccuuaugaaugua

SEQ ID NO: 2197695 - RNA, 19 nt, Homo sapiens
  misc_RNA (1)...(19): siRNA sense strand
ucacuaauccgacaucaga

SEQ ID NO: 2197696 - RNA, 19 nt, Homo sapiens
  misc_RNA (1)...(19): siRNA sense strand
gggaaaggcuacacuuguc

SEQ ID NO: 2197697 - RNA, 19 nt, Homo sapiens
  misc_RNA (1)...(19): siRNA sense strand
ugggaaauccuucagcuua

SEQ ID NO: 2197698 - RNA, 19 nt, Homo sapiens
  misc_RNA (1)...(19): siRNA sense strand
ggagugcacaucuuacuga

SEQ ID NO: 2197699 - RNA, 19 nt, Homo sapiens
  misc_RNA (1)...(19): siRNA sense strand
gaaaccauaugaauguacu

SEQ ID NO: 2197700 - RNA, 19 nt, Homo sapiens
  misc_RNA (1)...(19): siRNA sense strand
ccauaugaauguacugaau

SEQ ID NO: 2197701 - RNA, 19 nt, Homo sapiens
  misc_RNA (1)...(19): siRNA sense strand
gaacucauacuggagagaa

SEQ ID NO: 2197702 - RNA, 19 nt, Homo sapiens
  misc_RNA (1)...(19): siRNA sense strand
ggaaaccuuagcagaguaa

SEQ ID NO: 2197703 - RNA, 19 nt, Homo sapiens
  misc_RNA (1)...(19): siRNA sense strand
agccauaucucugcccuua

SEQ ID NO: 2197704 - RNA, 19 nt, Homo sapiens
  misc_RNA (1)...(19): siRNA sense strand
ggaaauccuucagcuuaag

SEQ ID NO: 2197705 - RNA, 19 nt, Homo sapiens
  misc_RNA (1)...(19): siRNA sense strand
agagaaaccauaugaaugu

SEQ ID NO: 2197706 - RNA, 19 nt, Homo sapiens
  misc_RNA (1)...(19): siRNA sense strand
caucaaagaauacauacug

SEQ ID NO: 2197707 - RNA, 19 nt, Homo sapiens
  misc_RNA (1)...(19): siRNA sense strand
caucaaagaauucauacug

SEQ ID NO: 2197708 - RNA, 19 nt, Homo sapiens
  misc_RNA (1)...(19): siRNA sense strand
uaagcaaugucggaaaguu

SEQ ID NO: 2197709 - RNA, 19 nt, Homo sapiens
  misc_RNA (1)...(19): siRNA sense strand
caucauagaauucauacug

SEQ ID NO: 2197710 - RNA, 19 nt, Homo sapiens
  misc_RNA (1)...(19): siRNA sense strand
gagaaaccuuaugagugua

SEQ ID NO: 2197711 - RNA, 19 nt, Homo sapiens
  misc_RNA (1)...(19): siRNA sense strand
gaacccauaucucuguacu

SEQ ID NO: 2197712 - RNA, 19 nt, Homo sapiens
  misc_RNA (1)...(19): siRNA sense strand
ccuuagaaaucaugagaga

SEQ ID NO: 2197713 - RNA, 19 nt, Homo sapiens
  misc_RNA (1)...(19): siRNA sense strand
gcgaacccauaucucugua

SEQ ID NO: 2197714 - RNA, 19 nt, Homo sapiens
  misc_RNA (1)...(19): siRNA sense strand
cauaggucaucccuuagaa

SEQ ID NO: 2197715 - RNA, 19 nt, Homo sapiens
  misc_RNA (1)...(19): siRNA sense strand
cauaagcgaauacauacaa

SEQ ID NO: 2197716 - RNA, 19 nt, Homo sapiens
  misc_RNA (1)...(19): siRNA sense strand
cgacaucagaggacgcaua

SEQ ID NO: 2197717 - RNA, 19 nt, Homo sapiens
  misc_RNA (1)...(19): siRNA sense strand
gcccuauguuuguaaagaa

SEQ ID NO: 2197718 - RNA, 19 nt, Homo sapiens
  misc_RNA (1)...(19): siRNA sense strand
caggagagaaaccauauga

SEQ ID NO: 2197719 - RNA, 19 nt, Homo sapiens
  misc_RNA (1)...(19): siRNA sense strand
gaauucauacuggaaagaa

SEQ ID NO: 2197720 - RNA, 19 nt, Homo sapiens
  misc_RNA (1)...(19): siRNA sense strand
gaauacauacuggagagaa

SEQ ID NO: 2197721 - RNA, 19 nt, Homo sapiens
  misc_RNA (1)...(19): siRNA sense strand
aaucggagugcacaucuua

SEQ ID NO: 2197722 - RNA, 19 nt, Homo sapiens
  misc_RNA (1)...(19): siRNA sense strand
gcagcacacaccuaauuga

SEQ ID NO: 2197723 - RNA, 19 nt, Homo sapiens
  misc_RNA (1)...(19): siRNA sense strand
caucaaagaguccauacug

SEQ ID NO: 2197724 - RNA, 19 nt, Homo sapiens
  misc_RNA (1)...(19): siRNA sense strand
gggagagacccuaucaaug

SEQ ID NO: 2197725 - RNA, 19 nt, Homo sapiens
  misc_RNA (1)...(19): siRNA sense strand
agagaaacccuaccagugu

SEQ ID NO: 2197726 - RNA, 19 nt, Homo sapiens
  misc_RNA (1)...(19): siRNA sense strand
ugugaaacccuaucaaugu

SEQ ID NO: 2197727 - RNA, 19 nt, Homo sapiens
  misc_RNA (1)...(19): siRNA sense strand
acccauaucucuguacuga

SEQ ID NO: 2197728 - RNA, 19 nt, Homo sapiens
  misc_RNA (1)...(19): siRNA sense strand
acaccuuacugaacaucua

SEQ ID NO: 2197729 - RNA, 19 nt, Homo sapiens
  misc_RNA (1)...(19): siRNA sense strand
gagugcacaucuuacugaa

SEQ ID NO: 2197730 - RNA, 19 nt, Homo sapiens
  misc_RNA (1)...(19): siRNA sense strand
gaaaggcuacacuugucuu

SEQ ID NO: 2197731 - RNA, 19 nt, Homo sapiens
  misc_RNA (1)...(19): siRNA sense strand
aauacauacuggagagaaa

SEQ ID NO: 2197732 - RNA, 19 nt, Homo sapiens
  misc_RNA (1)...(19): siRNA sense strand
ucacuaauucgacaucaga

SEQ ID NO: 2197733 - RNA, 19 nt, Homo sapiens
  misc_RNA (1)...(19): siRNA sense strand
cagcacacaccuaauugaa

SEQ ID NO: 2197734 - RNA, 19 nt, Homo sapiens
  misc_RNA (1)...(19): siRNA sense strand
ccgcagcacacaccuaauu

SEQ ID NO: 2197735 - RNA, 19 nt, Homo sapiens
  misc_RNA (1)...(19): siRNA sense strand
ccauaucucugcccuuacu

SEQ ID NO: 2197736 - RNA, 19 nt, Homo sapiens
  misc_RNA (1)...(19): siRNA sense strand
ugucauaguacauccuuaa

SEQ ID NO: 2197737 - RNA, 19 nt, Homo sapiens
  misc_RNA (1)...(19): siRNA sense strand
uaaugaaugucagaaacug

SEQ ID NO: 2197738 - RNA, 19 nt, Homo sapiens
  misc_RNA (1)...(19): siRNA sense strand
acacaggagagaaaccaua

SEQ ID NO: 2197739 - RNA, 19 nt, Homo sapiens
  misc_RNA (1)...(19): siRNA sense strand
ccacaguacaucacuaauc

SEQ ID NO: 2197740 - RNA, 19 nt, Homo sapiens
  misc_RNA (1)...(19): siRNA sense strand
gcccuuacucaacaucaua

SEQ ID NO: 2197741 - RNA, 19 nt, Homo sapiens
  misc_RNA (1)...(19): siRNA sense strand
ucucugcccuuacucaaca

SEQ ID NO: 2197742 - RNA, 19 nt, Homo sapiens
  misc_RNA (1)...(19): siRNA sense strand
cuaccaguguaaugaaugu

SEQ ID NO: 2197743 - RNA, 19 nt, Homo sapiens
  misc_RNA (1)...(19): siRNA sense strand
agagaagcccuauguuugu

SEQ ID NO: 2197744 - RNA, 19 nt, Homo sapiens
  misc_RNA (1)...(19): siRNA sense strand
ccuuaugaguguaaugaau

SEQ ID NO: 2197745 - RNA, 19 nt, Homo sapiens
  misc_RNA (1)...(19): siRNA sense strand
ugaaacccuaucaauguaa

SEQ ID NO: 2197746 - RNA, 19 nt, Homo sapiens
  misc_RNA (1)...(19): siRNA sense strand
caugagagaauccauacug

SEQ ID NO: 2197747 - RNA, 19 nt, Homo sapiens
  misc_RNA (1)...(19): siRNA sense strand
aaucaugagagaauccaua

SEQ ID NO: 2197748 - RNA, 19 nt, Homo sapiens
  misc_RNA (1)...(19): siRNA sense strand
ugaguguaaugaaugugaa

SEQ ID NO: 2197749 - RNA, 19 nt, Homo sapiens
  misc_RNA (1)...(19): siRNA sense strand
uguaagcaaugucggaaag

SEQ ID NO: 2197750 - RNA, 19 nt, Homo sapiens
  misc_RNA (1)...(19): siRNA sense strand
gaauguacugaauguggaa

SEQ ID NO: 2197751 - RNA, 19 nt, Homo sapiens
  misc_RNA (1)...(19): siRNA sense strand
cuaaucuuauucagcauca

SEQ ID NO: 2197752 - RNA, 19 nt, Homo sapiens
  misc_RNA (1)...(19): siRNA sense strand
uguaaugaaugucagaaac

SEQ ID NO: 2197753 - RNA, 19 nt, Homo sapiens
  misc_RNA (1)...(19): siRNA sense strand
uaauugaacaucagggaau

SEQ ID NO: 2197754 - RNA, 19 nt, Homo sapiens
  misc_RNA (1)...(19): siRNA sense strand
gaaaccuuaugaguguaau

SEQ ID NO: 2197755 - RNA, 19 nt, Homo sapiens
  misc_RNA (1)...(19): siRNA sense strand
cacaguacaucacuaaucc

SEQ ID NO: 2197756 - RNA, 19 nt, Homo sapiens
  misc_RNA (1)...(19): siRNA sense strand
gacccuaucaauguacuaa

SEQ ID NO: 2197757 - RNA, 19 nt, Homo sapiens
  misc_RNA (1)...(19): siRNA sense strand
uguaaugaaugugggaaau

SEQ ID NO: 2197758 - RNA, 19 nt, Homo sapiens
  misc_RNA (1)...(19): siRNA sense strand
guaaugaaugucagaaacu

SEQ ID NO: 2197759 - RNA, 19 nt, Homo sapiens
  misc_RNA (1)...(19): siRNA sense strand
ggaaaggcuacacuugucu

SEQ ID NO: 2197760 - RNA, 19 nt, Homo sapiens
  misc_RNA (1)...(19): siRNA sense strand
gcaagaaguacaaguauua

SEQ ID NO: 2197761 - RNA, 19 nt, Homo sapiens
  misc_RNA (1)...(19): siRNA sense strand
agacagagcugcccgauga

SEQ ID NO: 2197762 - RNA, 19 nt, Homo sapiens
  misc_RNA (1)...(19): siRNA sense strand
gaacaagcgcuucuaauca

SEQ ID NO: 2197763 - RNA, 19 nt, Homo sapiens
  misc_RNA (1)...(19): siRNA sense strand
gagagaaacuggcaauuac

SEQ ID NO: 2197764 - RNA, 19 nt, Homo sapiens
  misc_RNA (1)...(19): siRNA sense strand
gaaguuggcccagaccuua

SEQ ID NO: 2197765 - RNA, 19 nt, Homo sapiens
  misc_RNA (1)...(19): siRNA sense strand
gcaaccacaucaagagcua

SEQ ID NO: 2197766 - RNA, 19 nt, Homo sapiens
  misc_RNA (1)...(19): siRNA sense strand
guaaauaugugugaacaag

SEQ ID NO: 2197767 - RNA, 19 nt, Homo sapiens
  misc_RNA (1)...(19): siRNA sense strand
gcgggaagaaguacaaaua

SEQ ID NO: 2197768 - RNA, 19 nt, Homo sapiens
  misc_RNA (1)...(19): siRNA sense strand
gaccaagcauugagauaug

SEQ ID NO: 2197769 - RNA, 19 nt, Homo sapiens
  misc_RNA (1)...(19): siRNA sense strand
ugacggaggugaaggugaa

SEQ ID NO: 2197770 - RNA, 19 nt, Homo sapiens
  misc_RNA (1)...(19): siRNA sense strand
ccaugcagcugacaaugaa

SEQ ID NO: 2197771 - RNA, 19 nt, Homo sapiens
  misc_RNA (1)...(19): siRNA sense strand
cgacagcggugaccuugug

SEQ ID NO: 2197772 - RNA, 19 nt, Homo sapiens
  misc_RNA (1)...(19): siRNA sense strand
ggcaagaaguacaaguauu

SEQ ID NO: 2197773 - RNA, 19 nt, Homo sapiens
  misc_RNA (1)...(19): siRNA sense strand
agagagaaacuggcaauua

SEQ ID NO: 2197774 - RNA, 19 nt, Homo sapiens
  misc_RNA (1)...(19): siRNA sense strand
ugaaauccaacaugcuuua

SEQ ID NO: 2197775 - RNA, 19 nt, Homo sapiens
  misc_RNA (1)...(19): siRNA sense strand
gcacgcaguggauguguuu

SEQ ID NO: 2197776 - RNA, 19 nt, Homo sapiens
  misc_RNA (1)...(19): siRNA sense strand
agaagcggguguguaaaua

SEQ ID NO: 2197777 - RNA, 19 nt, Homo sapiens
  misc_RNA (1)...(19): siRNA sense strand
gccagaagcggguguguaa

SEQ ID NO: 2197778 - RNA, 19 nt, Homo sapiens
  misc_RNA (1)...(19): siRNA sense strand
gggccaaugaacaauauua

SEQ ID NO: 2197779 - RNA, 19 nt, Homo sapiens
  misc_RNA (1)...(19): siRNA sense strand
guccagaagauaugaauaa

SEQ ID NO: 2197780 - RNA, 19 nt, Homo sapiens
  misc_RNA (1)...(19): siRNA sense strand
gaagagacgaacagcaguu

SEQ ID NO: 2197781 - RNA, 19 nt, Homo sapiens
  misc_RNA (1)...(19): siRNA sense strand
aacaagcgcuucuaaucaa

SEQ ID NO: 2197782 - RNA, 19 nt, Homo sapiens
  misc_RNA (1)...(19): siRNA sense strand
gcaaccagcagacccuuga

SEQ ID NO: 2197783 - RNA, 19 nt, Homo sapiens
  misc_RNA (1)...(19): siRNA sense strand
gaaauccaacaugcuuuaa

SEQ ID NO: 2197784 - RNA, 19 nt, Homo sapiens
  misc_RNA (1)...(19): siRNA sense strand
gaacgaugacggaggugaa

SEQ ID NO: 2197785 - RNA, 19 nt, Homo sapiens
  misc_RNA (1)...(19): siRNA sense strand
gcccagaccuuaguagaca

SEQ ID NO: 2197786 - RNA, 19 nt, Homo sapiens
  misc_RNA (1)...(19): siRNA sense strand
ucaacacgcuggcgcugaa

SEQ ID NO: 2197787 - RNA, 19 nt, Homo sapiens
  misc_RNA (1)...(19): siRNA sense strand
gauaugcaucugggucuua

SEQ ID NO: 2197788 - RNA, 19 nt, Homo sapiens
  misc_RNA (1)...(19): siRNA sense strand
gaagcggguguguaaauau

SEQ ID NO: 2197789 - RNA, 19 nt, Homo sapiens
  misc_RNA (1)...(19): siRNA sense strand
uggaggcgcucaaggagaa

SEQ ID NO: 2197790 - RNA, 19 nt, Homo sapiens
  misc_RNA (1)...(19): siRNA sense strand
ggauccaguuccaguucua

SEQ ID NO: 2197791 - RNA, 19 nt, Homo sapiens
  misc_RNA (1)...(19): siRNA sense strand
ccaggagcauguggccuua

SEQ ID NO: 2197792 - RNA, 19 nt, Homo sapiens
  misc_RNA (1)...(19): siRNA sense strand
gcggcaaacaguacaagua

SEQ ID NO: 2197793 - RNA, 19 nt, Homo sapiens
  misc_RNA (1)...(19): siRNA sense strand
gaaucuguggcaagaagua

SEQ ID NO: 2197794 - RNA, 19 nt, Homo sapiens
  misc_RNA (1)...(19): siRNA sense strand
ugaacaagcgcuucuaauc

SEQ ID NO: 2197795 - RNA, 19 nt, Homo sapiens
  misc_RNA (1)...(19): siRNA sense strand
gagaguagaaggcaaagca

SEQ ID NO: 2197796 - RNA, 19 nt, Homo sapiens
  misc_RNA (1)...(19): siRNA sense strand
cuacagcuguuuccaagag

SEQ ID NO: 2197797 - RNA, 19 nt, Homo sapiens
  misc_RNA (1)...(19): siRNA sense strand
gaggaacagugccaauaac

SEQ ID NO: 2197798 - RNA, 19 nt, Homo sapiens
  misc_RNA (1)...(19): siRNA sense strand
caaggcaaccgcagcagaa

SEQ ID NO: 2197799 - RNA, 19 nt, Homo sapiens
  misc_RNA (1)...(19): siRNA sense strand
gcaucugggucuuacgaau

SEQ ID NO: 2197800 - RNA, 19 nt, Homo sapiens
  misc_RNA (1)...(19): siRNA sense strand
caguguacgugacggauug

SEQ ID NO: 2197801 - RNA, 19 nt, Homo sapiens
  misc_RNA (1)...(19): siRNA sense strand
cagaggaacagugccaaua

SEQ ID NO: 2197802 - RNA, 19 nt, Homo sapiens
  misc_RNA (1)...(19): siRNA sense strand
cagcgaagacccagacgaa

SEQ ID NO: 2197803 - RNA, 19 nt, Homo sapiens
  misc_RNA (1)...(19): siRNA sense strand
gcuaugugcuuggugugaa

SEQ ID NO: 2197804 - RNA, 19 nt, Homo sapiens
  misc_RNA (1)...(19): siRNA sense strand
agaggaacagugccaauaa

SEQ ID NO: 2197805 - RNA, 19 nt, Homo sapiens
  misc_RNA (1)...(19): siRNA sense strand
cagcagacccuugauggaa

SEQ ID NO: 2197806 - RNA, 19 nt, Homo sapiens
  misc_RNA (1)...(19): siRNA sense strand
ugugauaucugcgggaaga

SEQ ID NO: 2197807 - RNA, 19 nt, Homo sapiens
  misc_RNA (1)...(19): siRNA sense strand
agacaguggugcccgcuau

SEQ ID NO: 2197808 - RNA, 19 nt, Homo sapiens
  misc_RNA (1)...(19): siRNA sense strand
caguggauguguuuagugu

SEQ ID NO: 2197809 - RNA, 19 nt, Homo sapiens
  misc_RNA (1)...(19): siRNA sense strand
cagaagcggguguguaaau

SEQ ID NO: 2197810 - RNA, 19 nt, Homo sapiens
  misc_RNA (1)...(19): siRNA sense strand
caguacuggucgugcguua

SEQ ID NO: 2197811 - RNA, 19 nt, Homo sapiens
  misc_RNA (1)...(19): siRNA sense strand
agaacgugcugucggaguu

SEQ ID NO: 2197812 - RNA, 19 nt, Homo sapiens
  misc_RNA (1)...(19): siRNA sense strand
guagaaggcaaagcacaaa

SEQ ID NO: 2197813 - RNA, 19 nt, Homo sapiens
  misc_RNA (1)...(19): siRNA sense strand
ggauguguuuaguguggaa

SEQ ID NO: 2197814 - RNA, 19 nt, Homo sapiens
  misc_RNA (1)...(19): siRNA sense strand
caccugcuguuguagaaga

SEQ ID NO: 2197815 - RNA, 19 nt, Homo sapiens
  misc_RNA (1)...(19): siRNA sense strand
acaagcgcuucuaaucaaa

SEQ ID NO: 2197816 - RNA, 19 nt, Homo sapiens
  misc_RNA (1)...(19): siRNA sense strand
gcacguccgccuucuccaa

SEQ ID NO: 2197817 - RNA, 19 nt, Homo sapiens
  misc_RNA (1)...(19): siRNA sense strand
ugaccaagcauugagauau

SEQ ID NO: 2197818 - RNA, 19 nt, Homo sapiens
  misc_RNA (1)...(19): siRNA sense strand
gaaguacaaguauuacaac

SEQ ID NO: 2197819 - RNA, 19 nt, Homo sapiens
  misc_RNA (1)...(19): siRNA sense strand
guggcaagaaguacaagua

SEQ ID NO: 2197820 - RNA, 19 nt, Homo sapiens
  misc_RNA (1)...(19): siRNA sense strand
aagcggguguguaaauaug

SEQ ID NO: 2197821 - RNA, 19 nt, Homo sapiens
  misc_RNA (1)...(19): siRNA sense strand
gccaccugcuguuguagaa

SEQ ID NO: 2197822 - RNA, 19 nt, Homo sapiens
  misc_RNA (1)...(19): siRNA sense strand
ccgaugugccacccucuua

SEQ ID NO: 2197823 - RNA, 19 nt, Homo sapiens
  misc_RNA (1)...(19): siRNA sense strand
aaagcaacaauuucaggua

SEQ ID NO: 2197824 - RNA, 19 nt, Homo sapiens
  misc_RNA (1)...(19): siRNA sense strand
caaauacuacagcuguuuc

SEQ ID NO: 2197825 - RNA, 19 nt, Homo sapiens
  misc_RNA (1)...(19): siRNA sense strand
gaaauccugggcaacuuca

SEQ ID NO: 2197826 - RNA, 19 nt, Homo sapiens
  misc_RNA (1)...(19): siRNA sense strand
agaagaaggcggucagcaa

SEQ ID NO: 2197827 - RNA, 19 nt, Homo sapiens
  misc_RNA (1)...(19): siRNA sense strand
cggaaucuguggcaagaag

SEQ ID NO: 2197828 - RNA, 19 nt, Homo sapiens
  misc_RNA (1)...(19): siRNA sense strand
agaaggcggucagcaagga

SEQ ID NO: 2197829 - RNA, 19 nt, Homo sapiens
  misc_RNA (1)...(19): siRNA sense strand
ucaaggagaacuucaaggu

SEQ ID NO: 2197830 - RNA, 19 nt, Homo sapiens
  misc_RNA (1)...(19): siRNA sense strand
gagggcaaccacaucaaga

SEQ ID NO: 2197831 - RNA, 19 nt, Homo sapiens
  misc_RNA (1)...(19): siRNA sense strand
gagcagggagcgcuugaag

SEQ ID NO: 2197832 - RNA, 19 nt, Homo sapiens
  misc_RNA (1)...(19): siRNA sense strand
caaggucugugagcucauc

SEQ ID NO: 2197833 - RNA, 19 nt, Homo sapiens
  misc_RNA (1)...(19): siRNA sense strand
cagaaaaucgggccaauga

SEQ ID NO: 2197834 - RNA, 19 nt, Homo sapiens
  misc_RNA (1)...(19): siRNA sense strand
acaaauacuacagcuguuu

SEQ ID NO: 2197835 - RNA, 19 nt, Homo sapiens
  misc_RNA (1)...(19): siRNA sense strand
caucaagagcuaugugcuu

SEQ ID NO: 2197836 - RNA, 19 nt, Homo sapiens
  misc_RNA (1)...(19): siRNA sense strand
gcucaguccagaagauaug

SEQ ID NO: 2197837 - RNA, 19 nt, Homo sapiens
  misc_RNA (1)...(19): siRNA sense strand
ccgcagcucaggaagauga

SEQ ID NO: 2197838 - RNA, 19 nt, Homo sapiens
  misc_RNA (1)...(19): siRNA sense strand
cacuguugcuggugcauga

SEQ ID NO: 2197839 - RNA, 19 nt, Homo sapiens
  misc_RNA (1)...(19): siRNA sense strand
ccacggacgaggugaagga

SEQ ID NO: 2197840 - RNA, 19 nt, Homo sapiens
  misc_RNA (1)...(19): siRNA sense strand
gcagacccuugauggaaaa

SEQ ID NO: 2197841 - RNA, 19 nt, Homo sapiens
  misc_RNA (1)...(19): siRNA sense strand
guguaaauaugugugaaca

SEQ ID NO: 2197842 - RNA, 19 nt, Homo sapiens
  misc_RNA (1)...(19): siRNA sense strand
gaucaucggcaaggucugu

SEQ ID NO: 2197843 - RNA, 19 nt, Homo sapiens
  misc_RNA (1)...(19): siRNA sense strand
uuacgaaugcggaaucugu

SEQ ID NO: 2197844 - RNA, 19 nt, Homo sapiens
  misc_RNA (1)...(19): siRNA sense strand
ccaccacccugcuggaacu

SEQ ID NO: 2197845 - RNA, 19 nt, Homo sapiens
  misc_RNA (1)...(19): siRNA sense strand
ugugaagggugcggacauu

SEQ ID NO: 2197846 - RNA, 19 nt, Homo sapiens
  misc_RNA (1)...(19): siRNA sense strand
gcauguacaaccaggugaa

SEQ ID NO: 2197847 - RNA, 19 nt, Homo sapiens
  misc_RNA (1)...(19): siRNA sense strand
gccaauaacaccacuacca

SEQ ID NO: 2197848 - RNA, 19 nt, Homo sapiens
  misc_RNA (1)...(19): siRNA sense strand
uacaaauacuacagcuguu

SEQ ID NO: 2197849 - RNA, 19 nt, Homo sapiens
  misc_RNA (1)...(19): siRNA sense strand
gcugcucaguccagaagau

SEQ ID NO: 2197850 - RNA, 19 nt, Homo sapiens
  misc_RNA (1)...(19): siRNA sense strand
gcggguguguaaauaugug

SEQ ID NO: 2197851 - RNA, 19 nt, Homo sapiens
  misc_RNA (1)...(19): siRNA sense strand
ucgccaagcucgccuucug

SEQ ID NO: 2197852 - RNA, 19 nt, Homo sapiens
  misc_RNA (1)...(19): siRNA sense strand
ucaucgagcugagcaacga

SEQ ID NO: 2197853 - RNA, 19 nt, Homo sapiens
  misc_RNA (1)...(19): siRNA sense strand
aaagagagaaacuggcaau

SEQ ID NO: 2197854 - RNA, 19 nt, Homo sapiens
  misc_RNA (1)...(19): siRNA sense strand
gaaaaggagcggcagaaca

SEQ ID NO: 2197855 - RNA, 19 nt, Homo sapiens
  misc_RNA (1)...(19): siRNA sense strand
caucugggucuuacgaaug

SEQ ID NO: 2197856 - RNA, 19 nt, Homo sapiens
  misc_RNA (1)...(19): siRNA sense strand
aggugaaggugaagacaga

SEQ ID NO: 2197857 - RNA, 19 nt, Homo sapiens
  misc_RNA (1)...(19): siRNA sense strand
ggucgugcguuacccaaaa

SEQ ID NO: 2197858 - RNA, 19 nt, Homo sapiens
  misc_RNA (1)...(19): siRNA sense strand
ccccugaucucuuccagua

SEQ ID NO: 2197859 - RNA, 19 nt, Homo sapiens
  misc_RNA (1)...(19): siRNA sense strand
agcagacccuugauggaaa

SEQ ID NO: 2197860 - RNA, 19 nt, Homo sapiens
  misc_RNA (1)...(19): siRNA sense strand
gcacaggacuugcccucuu

SEQ ID NO: 2197861 - RNA, 19 nt, Homo sapiens
  misc_RNA (1)...(19): siRNA sense strand
gggcggagcuuucucaaca

SEQ ID NO: 2197862 - RNA, 19 nt, Homo sapiens
  misc_RNA (1)...(19): siRNA sense strand
ccaaguggaucgccaguuc

SEQ ID NO: 2197863 - RNA, 19 nt, Homo sapiens
  misc_RNA (1)...(19): siRNA sense strand
uaaggaccgugacuacauu

SEQ ID NO: 2197864 - RNA, 19 nt, Homo sapiens
  misc_RNA (1)...(19): siRNA sense strand
gaauaaacaagccaggauu

SEQ ID NO: 2197865 - RNA, 19 nt, Homo sapiens
  misc_RNA (1)...(19): siRNA sense strand
caacaaaccgccuggacuu

SEQ ID NO: 2197866 - RNA, 19 nt, Homo sapiens
  misc_RNA (1)...(19): siRNA sense strand
caacagaaggaauaaacaa

SEQ ID NO: 2197867 - RNA, 19 nt, Homo sapiens
  misc_RNA (1)...(19): siRNA sense strand
ggaccagauucuagaagug

SEQ ID NO: 2197868 - RNA, 19 nt, Homo sapiens
  misc_RNA (1)...(19): siRNA sense strand
gccgaggccuucaagacua

SEQ ID NO: 2197869 - RNA, 19 nt, Homo sapiens
  misc_RNA (1)...(19): siRNA sense strand
gauugucacuauucagaga

SEQ ID NO: 2197870 - RNA, 19 nt, Homo sapiens
  misc_RNA (1)...(19): siRNA sense strand
cggcucagcucacaacugu

SEQ ID NO: 2197871 - RNA, 19 nt, Homo sapiens
  misc_RNA (1)...(19): siRNA sense strand
ggaauaaacaagccaggau

SEQ ID NO: 2197872 - RNA, 19 nt, Homo sapiens
  misc_RNA (1)...(19): siRNA sense strand
ucucacaacagaaggaaua

SEQ ID NO: 2197873 - RNA, 19 nt, Homo sapiens
  misc_RNA (1)...(19): siRNA sense strand
ggaacgagaggcccacaga

SEQ ID NO: 2197874 - RNA, 19 nt, Homo sapiens
  misc_RNA (1)...(19): siRNA sense strand
gggaccagauucuagaagu

SEQ ID NO: 2197875 - RNA, 19 nt, Homo sapiens
  misc_RNA (1)...(19): siRNA sense strand
cccacugccugaacgcuua

SEQ ID NO: 2197876 - RNA, 19 nt, Homo sapiens
  misc_RNA (1)...(19): siRNA sense strand
ucaacgcccucccagaugu

SEQ ID NO: 2197877 - RNA, 19 nt, Homo sapiens
  misc_RNA (1)...(19): siRNA sense strand
cuacgugucucugguggaa

SEQ ID NO: 2197878 - RNA, 19 nt, Homo sapiens
  misc_RNA (1)...(19): siRNA sense strand
ccgaggccuucaagacuaa

SEQ ID NO: 2197879 - RNA, 19 nt, Homo sapiens
  misc_RNA (1)...(19): siRNA sense strand
guccguggaugaugucaga

SEQ ID NO: 2197880 - RNA, 19 nt, Homo sapiens
  misc_RNA (1)...(19): siRNA sense strand
ccacuaggccagccaagga

SEQ ID NO: 2197881 - RNA, 19 nt, Homo sapiens
  misc_RNA (1)...(19): siRNA sense strand
gaguacggccuuggcauuu

SEQ ID NO: 2197882 - RNA, 19 nt, Homo sapiens
  misc_RNA (1)...(19): siRNA sense strand
gaggcugucaggcugcuua

SEQ ID NO: 2197883 - RNA, 19 nt, Homo sapiens
  misc_RNA (1)...(19): siRNA sense strand
gaccagauucuagaaguga

SEQ ID NO: 2197884 - RNA, 19 nt, Homo sapiens
  misc_RNA (1)...(19): siRNA sense strand
gcaaggaggggaugagaaa

SEQ ID NO: 2197885 - RNA, 19 nt, Homo sapiens
  misc_RNA (1)...(19): siRNA sense strand
caaggaagcuggggagaga

SEQ ID NO: 2197886 - RNA, 19 nt, Homo sapiens
  misc_RNA (1)...(19): siRNA sense strand
caacacccacgccaaguuc

SEQ ID NO: 2197887 - RNA, 19 nt, Homo sapiens
  misc_RNA (1)...(19): siRNA sense strand
guacggccuuggcauuuac

SEQ ID NO: 2197888 - RNA, 19 nt, Homo sapiens
  misc_RNA (1)...(19): siRNA sense strand
gaacucggcaggguuucuu

SEQ ID NO: 2197889 - RNA, 19 nt, Homo sapiens
  misc_RNA (1)...(19): siRNA sense strand
ugccuaggauugucacuau

SEQ ID NO: 2197890 - RNA, 19 nt, Homo sapiens
  misc_RNA (1)...(19): siRNA sense strand
gaacgagaggcccacagau

SEQ ID NO: 2197891 - RNA, 19 nt, Homo sapiens
  misc_RNA (1)...(19): siRNA sense strand
aauaaacaagccaggauuu

SEQ ID NO: 2197892 - RNA, 19 nt, Homo sapiens
  misc_RNA (1)...(19): siRNA sense strand
aguacggccuuggcauuua

SEQ ID NO: 2197893 - RNA, 19 nt, Homo sapiens
  misc_RNA (1)...(19): siRNA sense strand
gugacuacauugacuuucu

SEQ ID NO: 2197894 - RNA, 19 nt, Homo sapiens
  misc_RNA (1)...(19): siRNA sense strand
caaaccgccuggacuucug

SEQ ID NO: 2197895 - RNA, 19 nt, Homo sapiens
  misc_RNA (1)...(19): siRNA sense strand
ggacagcgggcagacucua

SEQ ID NO: 2197896 - RNA, 19 nt, Homo sapiens
  misc_RNA (1)...(19): siRNA sense strand
uaucaacgcccucccagau

SEQ ID NO: 2197897 - RNA, 19 nt, Homo sapiens
  misc_RNA (1)...(19): siRNA sense strand
ggccuuggcauuuacauca

SEQ ID NO: 2197898 - RNA, 19 nt, Homo sapiens
  misc_RNA (1)...(19): siRNA sense strand
ggcgugagauugaguccau

SEQ ID NO: 2197899 - RNA, 19 nt, Homo sapiens
  misc_RNA (1)...(19): siRNA sense strand
gcggagcuuucucaacauc

SEQ ID NO: 2197900 - RNA, 19 nt, Homo sapiens
  misc_RNA (1)...(19): siRNA sense strand
ggacccaggcucugaagca

SEQ ID NO: 2197901 - RNA, 19 nt, Homo sapiens
  misc_RNA (1)...(19): siRNA sense strand
caccucauccugacaguga

SEQ ID NO: 2197902 - RNA, 19 nt, Homo sapiens
  misc_RNA (1)...(19): siRNA sense strand
gaccgugacuacauugacu

SEQ ID NO: 2197903 - RNA, 19 nt, Homo sapiens
  misc_RNA (1)...(19): siRNA sense strand
ucaggcugcuuaagucauc

SEQ ID NO: 2197904 - RNA, 19 nt, Homo sapiens
  misc_RNA (1)...(19): siRNA sense strand
ugacuacauugacuuucug

SEQ ID NO: 2197905 - RNA, 19 nt, Homo sapiens
  misc_RNA (1)...(19): siRNA sense strand
cgaggacagugguguggau

SEQ ID NO: 2197906 - RNA, 19 nt, Homo sapiens
  misc_RNA (1)...(19): siRNA sense strand
cacaggacuugcccucuuc

SEQ ID NO: 2197907 - RNA, 19 nt, Homo sapiens
  misc_RNA (1)...(19): siRNA sense strand
gcucugaagggcuccaaga

SEQ ID NO: 2197908 - RNA, 19 nt, Homo sapiens
  misc_RNA (1)...(19): siRNA sense strand
gaggugcgccuggugaguu

SEQ ID NO: 2197909 - RNA, 19 nt, Homo sapiens
  misc_RNA (1)...(19): siRNA sense strand
gggagaccauggcgaacuc

SEQ ID NO: 2197910 - RNA, 19 nt, Homo sapiens
  misc_RNA (1)...(19): siRNA sense strand
ccacgugauucuggaagug

SEQ ID NO: 2197911 - RNA, 19 nt, Homo sapiens
  misc_RNA (1)...(19): siRNA sense strand
ggacagugguguggaugcu

SEQ ID NO: 2197912 - RNA, 19 nt, Homo sapiens
  misc_RNA (1)...(19): siRNA sense strand
cagcugcucuucgaccaau

SEQ ID NO: 2197913 - RNA, 19 nt, Homo sapiens
  misc_RNA (1)...(19): siRNA sense strand
gugcugaggcgugagauug

SEQ ID NO: 2197914 - RNA, 19 nt, Homo sapiens
  misc_RNA (1)...(19): siRNA sense strand
cuaggauugucacuauuca

SEQ ID NO: 2197915 - RNA, 19 nt, Homo sapiens
  misc_RNA (1)...(19): siRNA sense strand
gguggaaccaggcucucua

SEQ ID NO: 2197916 - RNA, 19 nt, Homo sapiens
  misc_RNA (1)...(19): siRNA sense strand
gacagcgggcagacucuaa

SEQ ID NO: 2197917 - RNA, 19 nt, Homo sapiens
  misc_RNA (1)...(19): siRNA sense strand
ccuacuccauggucuccua

SEQ ID NO: 2197918 - RNA, 19 nt, Homo sapiens
  misc_RNA (1)...(19): siRNA sense strand
ugaguacggccuuggcauu

SEQ ID NO: 2197919 - RNA, 19 nt, Homo sapiens
  misc_RNA (1)...(19): siRNA sense strand
cuaaggaccgugacuacau

SEQ ID NO: 2197920 - RNA, 19 nt, Homo sapiens
  misc_RNA (1)...(19): siRNA sense strand
ggugcugucuguguacuca

SEQ ID NO: 2197921 - RNA, 19 nt, Homo sapiens
  misc_RNA (1)...(19): siRNA sense strand
gcugucaggcugcuuaagu

SEQ ID NO: 2197922 - RNA, 19 nt, Homo sapiens
  misc_RNA (1)...(19): siRNA sense strand
gugaaugggcggagcuuuc

SEQ ID NO: 2197923 - RNA, 19 nt, Homo sapiens
  misc_RNA (1)...(19): siRNA sense strand
caaguucucacuccucucu

SEQ ID NO: 2197924 - RNA, 19 nt, Homo sapiens
  misc_RNA (1)...(19): siRNA sense strand
ggaaccaggcucucuagcu

SEQ ID NO: 2197925 - RNA, 19 nt, Homo sapiens
  misc_RNA (1)...(19): siRNA sense strand
gccuaggauugucacuauu

SEQ ID NO: 2197926 - RNA, 19 nt, Homo sapiens
  misc_RNA (1)...(19): siRNA sense strand
ccgaccagcugcucuucga

SEQ ID NO: 2197927 - RNA, 19 nt, Homo sapiens
  misc_RNA (1)...(19): siRNA sense strand
cacgagggcuugggcuuca

SEQ ID NO: 2197928 - RNA, 19 nt, Homo sapiens
  misc_RNA (1)...(19): siRNA sense strand
cgagccagacgucaaugaa

SEQ ID NO: 2197929 - RNA, 19 nt, Homo sapiens
  misc_RNA (1)...(19): siRNA sense strand
aaaccagcacuuugucaug

SEQ ID NO: 2197930 - RNA, 19 nt, Homo sapiens
  misc_RNA (1)...(19): siRNA sense strand
ucaacacccacgccaaguu

SEQ ID NO: 2197931 - RNA, 19 nt, Homo sapiens
  misc_RNA (1)...(19): siRNA sense strand
ggcgaacucggcaggguuu

SEQ ID NO: 2197932 - RNA, 19 nt, Homo sapiens
  misc_RNA (1)...(19): siRNA sense strand
uuggcgaucucacaacaga

SEQ ID NO: 2197933 - RNA, 19 nt, Homo sapiens
  misc_RNA (1)...(19): siRNA sense strand
agacuaaggaccgugacua

SEQ ID NO: 2197934 - RNA, 19 nt, Homo sapiens
  misc_RNA (1)...(19): siRNA sense strand
agaagcuggugcugucugu

SEQ ID NO: 2197935 - RNA, 19 nt, Homo sapiens
  misc_RNA (1)...(19): siRNA sense strand
gaucucacaacagaaggaa

SEQ ID NO: 2197936 - RNA, 19 nt, Homo sapiens
  misc_RNA (1)...(19): siRNA sense strand
agccagacgucaaugaagu

SEQ ID NO: 2197937 - RNA, 19 nt, Homo sapiens
  misc_RNA (1)...(19): siRNA sense strand
gcgagccagacgucaauga

SEQ ID NO: 2197938 - RNA, 19 nt, Homo sapiens
  misc_RNA (1)...(19): siRNA sense strand
gaggcuguccagggcaaua

SEQ ID NO: 2197939 - RNA, 19 nt, Homo sapiens
  misc_RNA (1)...(19): siRNA sense strand
gagccagacgucaaugaag

SEQ ID NO: 2197940 - RNA, 19 nt, Homo sapiens
  misc_RNA (1)...(19): siRNA sense strand
aggcaacgaccucccacua

SEQ ID NO: 2197941 - RNA, 19 nt, Homo sapiens
  misc_RNA (1)...(19): siRNA sense strand
ccuaggauugucacuauuc

SEQ ID NO: 2197942 - RNA, 19 nt, Homo sapiens
  misc_RNA (1)...(19): siRNA sense strand
ggcaacgaccucccacuag

SEQ ID NO: 2197943 - RNA, 19 nt, Homo sapiens
  misc_RNA (1)...(19): siRNA sense strand
ucacaacagaaggaauaaa

SEQ ID NO: 2197944 - RNA, 19 nt, Homo sapiens
  misc_RNA (1)...(19): siRNA sense strand
cagauguguccguggauga

SEQ ID NO: 2197945 - RNA, 19 nt, Homo sapiens
  misc_RNA (1)...(19): siRNA sense strand
ucauggcccuguucaagcu

SEQ ID NO: 2197946 - RNA, 19 nt, Homo sapiens
  misc_RNA (1)...(19): siRNA sense strand
cacaacagaaggaauaaac

SEQ ID NO: 2197947 - RNA, 19 nt, Homo sapiens
  misc_RNA (1)...(19): siRNA sense strand
ggcaagagcuccacaaugg

SEQ ID NO: 2197948 - RNA, 19 nt, Homo sapiens
  misc_RNA (1)...(19): siRNA sense strand
cauagaagccuacauccua

SEQ ID NO: 2197949 - RNA, 19 nt, Homo sapiens
  misc_RNA (1)...(19): siRNA sense strand
gaagagcaacugcaaacuu

SEQ ID NO: 2197950 - RNA, 19 nt, Homo sapiens
  misc_RNA (1)...(19): siRNA sense strand
caagugagaagauauauca

SEQ ID NO: 2197951 - RNA, 19 nt, Homo sapiens
  misc_RNA (1)...(19): siRNA sense strand
gaaggaugccagaguguga

SEQ ID NO: 2197952 - RNA, 19 nt, Homo sapiens
  misc_RNA (1)...(19): siRNA sense strand
aagagcaacugcaaacuug

SEQ ID NO: 2197953 - RNA, 19 nt, Homo sapiens
  misc_RNA (1)...(19): siRNA sense strand
gccaauaucuacucuacca

SEQ ID NO: 2197954 - RNA, 19 nt, Homo sapiens
  misc_RNA (1)...(19): siRNA sense strand
gcggugagccugaccuuga

SEQ ID NO: 2197955 - RNA, 19 nt, Homo sapiens
  misc_RNA (1)...(19): siRNA sense strand
ccaguuguguguugucaug

SEQ ID NO: 2197956 - RNA, 19 nt, Homo sapiens
  misc_RNA (1)...(19): siRNA sense strand
gcucauagaagccuacauc

SEQ ID NO: 2197957 - RNA, 19 nt, Homo sapiens
  misc_RNA (1)...(19): siRNA sense strand
gauauaucaucuacaacuc

SEQ ID NO: 2197958 - RNA, 19 nt, Homo sapiens
  misc_RNA (1)...(19): siRNA sense strand
uacaggagcuuggcugaga

SEQ ID NO: 2197959 - RNA, 19 nt, Homo sapiens
  misc_RNA (1)...(19): siRNA sense strand
gggccaauaucuacucuac

SEQ ID NO: 2197960 - RNA, 19 nt, Homo sapiens
  misc_RNA (1)...(19): siRNA sense strand
ucacuguucuccggauuga

SEQ ID NO: 2197961 - RNA, 19 nt, Homo sapiens
  misc_RNA (1)...(19): siRNA sense strand
agccugaccuugacucuug

SEQ ID NO: 2197962 - RNA, 19 nt, Homo sapiens
  misc_RNA (1)...(19): siRNA sense strand
ugauucagcuuugguuugu

SEQ ID NO: 2197963 - RNA, 19 nt, Homo sapiens
  misc_RNA (1)...(19): siRNA sense strand
gaagcagauugagccaguu

SEQ ID NO: 2197964 - RNA, 19 nt, Homo sapiens
  misc_RNA (1)...(19): siRNA sense strand
agaagaaggccaacaccaa

SEQ ID NO: 2197965 - RNA, 19 nt, Homo sapiens
  misc_RNA (1)...(19): siRNA sense strand
gggcaagagcuccacaaug

SEQ ID NO: 2197966 - RNA, 19 nt, Homo sapiens
  misc_RNA (1)...(19): siRNA sense strand
agagugugauucagcuuug

SEQ ID NO: 2197967 - RNA, 19 nt, Homo sapiens
  misc_RNA (1)...(19): siRNA sense strand
ggccagguccucacuguuc

SEQ ID NO: 2197968 - RNA, 19 nt, Homo sapiens
  misc_RNA (1)...(19): siRNA sense strand
cugaucauguucaagaaau

SEQ ID NO: 2197969 - RNA, 19 nt, Homo sapiens
  misc_RNA (1)...(19): siRNA sense strand
ggacacgacacacgaacuc

SEQ ID NO: 2197970 - RNA, 19 nt, Homo sapiens
  misc_RNA (1)...(19): siRNA sense strand
gcaauucuuguccuaacga

SEQ ID NO: 2197971 - RNA, 19 nt, Homo sapiens
  misc_RNA (1)...(19): siRNA sense strand
gugguggugugggccaaua

SEQ ID NO: 2197972 - RNA, 19 nt, Homo sapiens
  misc_RNA (1)...(19): siRNA sense strand
ggccacucaugcagacuga

SEQ ID NO: 2197973 - RNA, 19 nt, Homo sapiens
  misc_RNA (1)...(19): siRNA sense strand
gcagauugagccaguugug

SEQ ID NO: 2197974 - RNA, 19 nt, Homo sapiens
  misc_RNA (1)...(19): siRNA sense strand
ugucugaucauguucaaga

SEQ ID NO: 2197975 - RNA, 19 nt, Homo sapiens
  misc_RNA (1)...(19): siRNA sense strand
ggugacagacacaguggaa

SEQ ID NO: 2197976 - RNA, 19 nt, Homo sapiens
  misc_RNA (1)...(19): siRNA sense strand
gcuuugguuugucuacuuc

SEQ ID NO: 2197977 - RNA, 19 nt, Homo sapiens
  misc_RNA (1)...(19): siRNA sense strand
cagaagagcaacugcaaac

SEQ ID NO: 2197978 - RNA, 19 nt, Homo sapiens
  misc_RNA (1)...(19): siRNA sense strand
cagagugugauucagcuuu

SEQ ID NO: 2197979 - RNA, 19 nt, Homo sapiens
  misc_RNA (1)...(19): siRNA sense strand
ggaggggccugagaacuug

SEQ ID NO: 2197980 - RNA, 19 nt, Homo sapiens
  misc_RNA (1)...(19): siRNA sense strand
ugaaagacaccagaagaag

SEQ ID NO: 2197981 - RNA, 19 nt, Homo sapiens
  misc_RNA (1)...(19): siRNA sense strand
uaacgagaggccacucaug

SEQ ID NO: 2197982 - RNA, 19 nt, Homo sapiens
  misc_RNA (1)...(19): siRNA sense strand
aaugaagacuagccaagag

SEQ ID NO: 2197983 - RNA, 19 nt, Homo sapiens
  misc_RNA (1)...(19): siRNA sense strand
gugauucagcuuugguuug

SEQ ID NO: 2197984 - RNA, 19 nt, Homo sapiens
  misc_RNA (1)...(19): siRNA sense strand
ccagcucccucaggcaaug

SEQ ID NO: 2197985 - RNA, 19 nt, Homo sapiens
  misc_RNA (1)...(19): siRNA sense strand
aaaugaagacuagccaaga

SEQ ID NO: 2197986 - RNA, 19 nt, Homo sapiens
  misc_RNA (1)...(19): siRNA sense strand
uugaaagacaccagaagaa

SEQ ID NO: 2197987 - RNA, 19 nt, Homo sapiens
  misc_RNA (1)...(19): siRNA sense strand
ugaucauguucaagaaaug

SEQ ID NO: 2197988 - RNA, 19 nt, Homo sapiens
  misc_RNA (1)...(19): siRNA sense strand
ggugugggccaauaucuac

SEQ ID NO: 2197989 - RNA, 19 nt, Homo sapiens
  misc_RNA (1)...(19): siRNA sense strand
cuacauccggcuucuagug

SEQ ID NO: 2197990 - RNA, 19 nt, Homo sapiens
  misc_RNA (1)...(19): siRNA sense strand
gauugagccaguugugugu

SEQ ID NO: 2197991 - RNA, 19 nt, Homo sapiens
  misc_RNA (1)...(19): siRNA sense strand
gaugccagagugugauuca

SEQ ID NO: 2197992 - RNA, 19 nt, Homo sapiens
  misc_RNA (1)...(19): siRNA sense strand
cggcaauucuuguccuaac

SEQ ID NO: 2197993 - RNA, 19 nt, Homo sapiens
  misc_RNA (1)...(19): siRNA sense strand
gugcacccaucuccuucga

SEQ ID NO: 2197994 - RNA, 19 nt, Homo sapiens
  misc_RNA (1)...(19): siRNA sense strand
ccucacuguucuccggauu

SEQ ID NO: 2197995 - RNA, 19 nt, Homo sapiens
  misc_RNA (1)...(19): siRNA sense strand
gcuggccuuugcugugguu

SEQ ID NO: 2197996 - RNA, 19 nt, Homo sapiens
  misc_RNA (1)...(19): siRNA sense strand
gggagccgcagaagagcaa

SEQ ID NO: 2197997 - RNA, 19 nt, Homo sapiens
  misc_RNA (1)...(19): siRNA sense strand
ggcaagagcuccacaaugg

SEQ ID NO: 2197998 - RNA, 19 nt, Homo sapiens
  misc_RNA (1)...(19): siRNA sense strand
cauagaagccuacauccua

SEQ ID NO: 2197999 - RNA, 19 nt, Homo sapiens
  misc_RNA (1)...(19): siRNA sense strand
gaagagcaacugcaaacuu

SEQ ID NO: 2198000 - RNA, 19 nt, Homo sapiens
  misc_RNA (1)...(19): siRNA sense strand
caagugagaagauauauca

SEQ ID NO: 2198001 - RNA, 19 nt, Homo sapiens
  misc_RNA (1)...(19): siRNA sense strand
gaaggaugccagaguguga

SEQ ID NO: 2198002 - RNA, 19 nt, Homo sapiens
  misc_RNA (1)...(19): siRNA sense strand
aagagcaacugcaaacuug

SEQ ID NO: 2198003 - RNA, 19 nt, Homo sapiens
  misc_RNA (1)...(19): siRNA sense strand
gccaauaucuacucuacca

SEQ ID NO: 2198004 - RNA, 19 nt, Homo sapiens
  misc_RNA (1)...(19): siRNA sense strand
gcggugagccugaccuuga

SEQ ID NO: 2198005 - RNA, 19 nt, Homo sapiens
  misc_RNA (1)...(19): siRNA sense strand
ccaguuguguguugucaug

SEQ ID NO: 2198006 - RNA, 19 nt, Homo sapiens
  misc_RNA (1)...(19): siRNA sense strand
gcucauagaagccuacauc

SEQ ID NO: 2198007 - RNA, 19 nt, Homo sapiens
  misc_RNA (1)...(19): siRNA sense strand
gauauaucaucuacaacuc

SEQ ID NO: 2198008 - RNA, 19 nt, Homo sapiens
  misc_RNA (1)...(19): siRNA sense strand
uacaggagcuuggcugaga

SEQ ID NO: 2198009 - RNA, 19 nt, Homo sapiens
  misc_RNA (1)...(19): siRNA sense strand
gggccaauaucuacucuac

SEQ ID NO: 2198010 - RNA, 19 nt, Homo sapiens
  misc_RNA (1)...(19): siRNA sense strand
ucacuguucuccggauuga

SEQ ID NO: 2198011 - RNA, 19 nt, Homo sapiens
  misc_RNA (1)...(19): siRNA sense strand
agccugaccuugacucuug

SEQ ID NO: 2198012 - RNA, 19 nt, Homo sapiens
  misc_RNA (1)...(19): siRNA sense strand
ugauucagcuuugguuugu

SEQ ID NO: 2198013 - RNA, 19 nt, Homo sapiens
  misc_RNA (1)...(19): siRNA sense strand
gaagcagauugagccaguu

SEQ ID NO: 2198014 - RNA, 19 nt, Homo sapiens
  misc_RNA (1)...(19): siRNA sense strand
agaagaaggccaacaccaa

SEQ ID NO: 2198015 - RNA, 19 nt, Homo sapiens
  misc_RNA (1)...(19): siRNA sense strand
gggcaagagcuccacaaug

SEQ ID NO: 2198016 - RNA, 19 nt, Homo sapiens
  misc_RNA (1)...(19): siRNA sense strand
agagugugauucagcuuug

SEQ ID NO: 2198017 - RNA, 19 nt, Homo sapiens
  misc_RNA (1)...(19): siRNA sense strand
ggccagguccucacuguuc

SEQ ID NO: 2198018 - RNA, 19 nt, Homo sapiens
  misc_RNA (1)...(19): siRNA sense strand
cugaucauguucaagaaau

SEQ ID NO: 2198019 - RNA, 19 nt, Homo sapiens
  misc_RNA (1)...(19): siRNA sense strand
ggacacgacacacgaacuc

SEQ ID NO: 2198020 - RNA, 19 nt, Homo sapiens
  misc_RNA (1)...(19): siRNA sense strand
gcaauucuuguccuaacga

SEQ ID NO: 2198021 - RNA, 19 nt, Homo sapiens
  misc_RNA (1)...(19): siRNA sense strand
gugguggugugggccaaua

SEQ ID NO: 2198022 - RNA, 19 nt, Homo sapiens
  misc_RNA (1)...(19): siRNA sense strand
ggccacucaugcagacuga

SEQ ID NO: 2198023 - RNA, 19 nt, Homo sapiens
  misc_RNA (1)...(19): siRNA sense strand
gcagauugagccaguugug

SEQ ID NO: 2198024 - RNA, 19 nt, Homo sapiens
  misc_RNA (1)...(19): siRNA sense strand
ugucugaucauguucaaga

SEQ ID NO: 2198025 - RNA, 19 nt, Homo sapiens
  misc_RNA (1)...(19): siRNA sense strand
ggugacagacacaguggaa

SEQ ID NO: 2198026 - RNA, 19 nt, Homo sapiens
  misc_RNA (1)...(19): siRNA sense strand
gcuuugguuugucuacuuc

SEQ ID NO: 2198027 - RNA, 19 nt, Homo sapiens
  misc_RNA (1)...(19): siRNA sense strand
cagaagagcaacugcaaac

SEQ ID NO: 2198028 - RNA, 19 nt, Homo sapiens
  misc_RNA (1)...(19): siRNA sense strand
cagagugugauucagcuuu

SEQ ID NO: 2198029 - RNA, 19 nt, Homo sapiens
  misc_RNA (1)...(19): siRNA sense strand
ggaggggccugagaacuug

SEQ ID NO: 2198030 - RNA, 19 nt, Homo sapiens
  misc_RNA (1)...(19): siRNA sense strand
ugaaagacaccagaagaag

SEQ ID NO: 2198031 - RNA, 19 nt, Homo sapiens
  misc_RNA (1)...(19): siRNA sense strand
uaacgagaggccacucaug

SEQ ID NO: 2198032 - RNA, 19 nt, Homo sapiens
  misc_RNA (1)...(19): siRNA sense strand
aaugaagacuagccaagag

SEQ ID NO: 2198033 - RNA, 19 nt, Homo sapiens
  misc_RNA (1)...(19): siRNA sense strand
gugauucagcuuugguuug

SEQ ID NO: 2198034 - RNA, 19 nt, Homo sapiens
  misc_RNA (1)...(19): siRNA sense strand
ccagcucccucaggcaaug

SEQ ID NO: 2198035 - RNA, 19 nt, Homo sapiens
  misc_RNA (1)...(19): siRNA sense strand
aaaugaagacuagccaaga

SEQ ID NO: 2198036 - RNA, 19 nt, Homo sapiens
  misc_RNA (1)...(19): siRNA sense strand
uugaaagacaccagaagaa

SEQ ID NO: 2198037 - RNA, 19 nt, Homo sapiens
  misc_RNA (1)...(19): siRNA sense strand
ugaucauguucaagaaaug

SEQ ID NO: 2198038 - RNA, 19 nt, Homo sapiens
  misc_RNA (1)...(19): siRNA sense strand
ggugugggccaauaucuac

SEQ ID NO: 2198039 - RNA, 19 nt, Homo sapiens
  misc_RNA (1)...(19): siRNA sense strand
cuacauccggcuucuagug

SEQ ID NO: 2198040 - RNA, 19 nt, Homo sapiens
  misc_RNA (1)...(19): siRNA sense strand
gauugagccaguugugugu

SEQ ID NO: 2198041 - RNA, 19 nt, Homo sapiens
  misc_RNA (1)...(19): siRNA sense strand
gaugccagagugugauuca

SEQ ID NO: 2198042 - RNA, 19 nt, Homo sapiens
  misc_RNA (1)...(19): siRNA sense strand
cggcaauucuuguccuaac

SEQ ID NO: 2198043 - RNA, 19 nt, Homo sapiens
  misc_RNA (1)...(19): siRNA sense strand
gugcacccaucuccuucga

SEQ ID NO: 2198044 - RNA, 19 nt, Homo sapiens
  misc_RNA (1)...(19): siRNA sense strand
ccucacuguucuccggauu

SEQ ID NO: 2198045 - RNA, 19 nt, Homo sapiens
  misc_RNA (1)...(19): siRNA sense strand
gcuggccuuugcugugguu

SEQ ID NO: 2198046 - RNA, 19 nt, Homo sapiens
  misc_RNA (1)...(19): siRNA sense strand
gggagccgcagaagagcaa

SEQ ID NO: 2198047 - RNA, 19 nt, Homo sapiens
  misc_RNA (1)...(19): siRNA sense strand
gcaaggagaucaagaagaa

SEQ ID NO: 2198048 - RNA, 19 nt, Homo sapiens
  misc_RNA (1)...(19): siRNA sense strand
gagcaagccugguuuguug

SEQ ID NO: 2198049 - RNA, 19 nt, Homo sapiens
  misc_RNA (1)...(19): siRNA sense strand
ucaacgcucugaacaguua

SEQ ID NO: 2198050 - RNA, 19 nt, Homo sapiens
  misc_RNA (1)...(19): siRNA sense strand
gcaagaagaaguacuuuga

SEQ ID NO: 2198051 - RNA, 19 nt, Homo sapiens
  misc_RNA (1)...(19): siRNA sense strand
ccaccuggcuagcauauuu

SEQ ID NO: 2198052 - RNA, 19 nt, Homo sapiens
  misc_RNA (1)...(19): siRNA sense strand
ggaaagagcaagccugguu

SEQ ID NO: 2198053 - RNA, 19 nt, Homo sapiens
  misc_RNA (1)...(19): siRNA sense strand
ccaccagccucuccuauga

SEQ ID NO: 2198054 - RNA, 19 nt, Homo sapiens
  misc_RNA (1)...(19): siRNA sense strand
acaaaggacugcugccaaa

SEQ ID NO: 2198055 - RNA, 19 nt, Homo sapiens
  misc_RNA (1)...(19): siRNA sense strand
gaacaacuucaaagacuug

SEQ ID NO: 2198056 - RNA, 19 nt, Homo sapiens
  misc_RNA (1)...(19): siRNA sense strand
ucaaugagcccaugauguu

SEQ ID NO: 2198057 - RNA, 19 nt, Homo sapiens
  misc_RNA (1)...(19): siRNA sense strand
gagaggagcccaagugcaa

SEQ ID NO: 2198058 - RNA, 19 nt, Homo sapiens
  misc_RNA (1)...(19): siRNA sense strand
gaaagagcaagccugguuu

SEQ ID NO: 2198059 - RNA, 19 nt, Homo sapiens
  misc_RNA (1)...(19): siRNA sense strand
ggaagcugcugccugacaa

SEQ ID NO: 2198060 - RNA, 19 nt, Homo sapiens
  misc_RNA (1)...(19): siRNA sense strand
ggaaguguggccuggguua

SEQ ID NO: 2198061 - RNA, 19 nt, Homo sapiens
  misc_RNA (1)...(19): siRNA sense strand
gaagaugcuauucccagua

SEQ ID NO: 2198062 - RNA, 19 nt, Homo sapiens
  misc_RNA (1)...(19): siRNA sense strand
gacuugauguccaaacuga

SEQ ID NO: 2198063 - RNA, 19 nt, Homo sapiens
  misc_RNA (1)...(19): siRNA sense strand
gucagcagcucuaagcaaa

SEQ ID NO: 2198064 - RNA, 19 nt, Homo sapiens
  misc_RNA (1)...(19): siRNA sense strand
guacagagcaagaagaagu

SEQ ID NO: 2198065 - RNA, 19 nt, Homo sapiens
  misc_RNA (1)...(19): siRNA sense strand
uggcgaaggucaagaacaa

SEQ ID NO: 2198066 - RNA, 19 nt, Homo sapiens
  misc_RNA (1)...(19): siRNA sense strand
ggacugcugccaaaugaga

SEQ ID NO: 2198067 - RNA, 19 nt, Homo sapiens
  misc_RNA (1)...(19): siRNA sense strand
ugaagauggugcuguccua

SEQ ID NO: 2198068 - RNA, 19 nt, Homo sapiens
  misc_RNA (1)...(19): siRNA sense strand
cgaagauaauuccaaauac

SEQ ID NO: 2198069 - RNA, 19 nt, Homo sapiens
  misc_RNA (1)...(19): siRNA sense strand
agucaucuaucaccaacua

SEQ ID NO: 2198070 - RNA, 19 nt, Homo sapiens
  misc_RNA (1)...(19): siRNA sense strand
gcaccaaccagcagcaaug

SEQ ID NO: 2198071 - RNA, 19 nt, Homo sapiens
  misc_RNA (1)...(19): siRNA sense strand
ucaagaacaacuucaaaga

SEQ ID NO: 2198072 - RNA, 19 nt, Homo sapiens
  misc_RNA (1)...(19): siRNA sense strand
ccucgugacuuucgaagau

SEQ ID NO: 2198073 - RNA, 19 nt, Homo sapiens
  misc_RNA (1)...(19): siRNA sense strand
aaggacugcugccaaauga

SEQ ID NO: 2198074 - RNA, 19 nt, Homo sapiens
  misc_RNA (1)...(19): siRNA sense strand
ugcggaugcugcaauguua

SEQ ID NO: 2198075 - RNA, 19 nt, Homo sapiens
  misc_RNA (1)...(19): siRNA sense strand
ggucaagaacaacuucaaa

SEQ ID NO: 2198076 - RNA, 19 nt, Homo sapiens
  misc_RNA (1)...(19): siRNA sense strand
caccucaagucaucuauca

SEQ ID NO: 2198077 - RNA, 19 nt, Homo sapiens
  misc_RNA (1)...(19): siRNA sense strand
aagaacaacuucaaagacu

SEQ ID NO: 2198078 - RNA, 19 nt, Homo sapiens
  misc_RNA (1)...(19): siRNA sense strand
ggagaaguaccagguguug

SEQ ID NO: 2198079 - RNA, 19 nt, Homo sapiens
  misc_RNA (1)...(19): siRNA sense strand
gcauugacagccacacauu

SEQ ID NO: 2198080 - RNA, 19 nt, Homo sapiens
  misc_RNA (1)...(19): siRNA sense strand
gaaucgagcucuggaucca

SEQ ID NO: 2198081 - RNA, 19 nt, Homo sapiens
  misc_RNA (1)...(19): siRNA sense strand
gcugcugccugacaaagga

SEQ ID NO: 2198082 - RNA, 19 nt, Homo sapiens
  misc_RNA (1)...(19): siRNA sense strand
ccucaacgcucugaacagu

SEQ ID NO: 2198083 - RNA, 19 nt, Homo sapiens
  misc_RNA (1)...(19): siRNA sense strand
ugacggagggccaguaugu

SEQ ID NO: 2198084 - RNA, 19 nt, Homo sapiens
  misc_RNA (1)...(19): siRNA sense strand
gcucugaacaguuauaaaa

SEQ ID NO: 2198085 - RNA, 19 nt, Homo sapiens
  misc_RNA (1)...(19): siRNA sense strand
guaaccagggcccagagua

SEQ ID NO: 2198086 - RNA, 19 nt, Homo sapiens
  misc_RNA (1)...(19): siRNA sense strand
gcuagcauauuugacuuca

SEQ ID NO: 2198087 - RNA, 19 nt, Homo sapiens
  misc_RNA (1)...(19): siRNA sense strand
gagcaagaagaaguacuuu

SEQ ID NO: 2198088 - RNA, 19 nt, Homo sapiens
  misc_RNA (1)...(19): siRNA sense strand
aauacuggguccuauggaa

SEQ ID NO: 2198089 - RNA, 19 nt, Homo sapiens
  misc_RNA (1)...(19): siRNA sense strand
agaacaacuucaaagacuu

SEQ ID NO: 2198090 - RNA, 19 nt, Homo sapiens
  misc_RNA (1)...(19): siRNA sense strand
gagcccaagugcaacaucu

SEQ ID NO: 2198091 - RNA, 19 nt, Homo sapiens
  misc_RNA (1)...(19): siRNA sense strand
gcaaagcugccucgugacu

SEQ ID NO: 2198092 - RNA, 19 nt, Homo sapiens
  misc_RNA (1)...(19): siRNA sense strand
gaaaaggcgaguuuauaga

SEQ ID NO: 2198093 - RNA, 19 nt, Homo sapiens
  misc_RNA (1)...(19): siRNA sense strand
ucaccuggcccucuauaau

SEQ ID NO: 2198094 - RNA, 19 nt, Homo sapiens
  misc_RNA (1)...(19): siRNA sense strand
caaauacuggguccuaugg

SEQ ID NO: 2198095 - RNA, 19 nt, Homo sapiens
  misc_RNA (1)...(19): siRNA sense strand
caagaacaacuucaaagac

SEQ ID NO: 2198096 - RNA, 19 nt, Homo sapiens
  misc_RNA (1)...(19): siRNA sense strand
ggucagcagcucuaagcaa

SEQ ID NO: 2198097 - RNA, 19 nt, Homo sapiens
  misc_RNA (1)...(19): siRNA sense strand
aagaugcuauucccaguag

SEQ ID NO: 2198098 - RNA, 19 nt, Homo sapiens
  misc_RNA (1)...(19): siRNA sense strand
gagauucuggccuuuguca

SEQ ID NO: 2198099 - RNA, 19 nt, Homo sapiens
  misc_RNA (1)...(19): siRNA sense strand
ggguacagagcaagaagaa

SEQ ID NO: 2198100 - RNA, 19 nt, Homo sapiens
  misc_RNA (1)...(19): siRNA sense strand
gccagaccuucuucucaga

SEQ ID NO: 2198101 - RNA, 19 nt, Homo sapiens
  misc_RNA (1)...(19): siRNA sense strand
aaggcgaguuuauagaaga

SEQ ID NO: 2198102 - RNA, 19 nt, Homo sapiens
  misc_RNA (1)...(19): siRNA sense strand
cagaaaaggcgaguuuaua

SEQ ID NO: 2198103 - RNA, 19 nt, Homo sapiens
  misc_RNA (1)...(19): siRNA sense strand
uuuguugccucacgaauuc

SEQ ID NO: 2198104 - RNA, 19 nt, Homo sapiens
  misc_RNA (1)...(19): siRNA sense strand
ccaaauacuggguccuaug

SEQ ID NO: 2198105 - RNA, 19 nt, Homo sapiens
  misc_RNA (1)...(19): siRNA sense strand
cauuugagagcaucaguga

SEQ ID NO: 2198106 - RNA, 19 nt, Homo sapiens
  misc_RNA (1)...(19): siRNA sense strand
aagaagaaguacuuugacu

SEQ ID NO: 2198107 - RNA, 19 nt, Homo sapiens
  misc_RNA (1)...(19): siRNA sense strand
caaugagcccaugauguuu

SEQ ID NO: 2198108 - RNA, 19 nt, Homo sapiens
  misc_RNA (1)...(19): siRNA sense strand
gcucaggccagaccuucuu

SEQ ID NO: 2198109 - RNA, 19 nt, Homo sapiens
  misc_RNA (1)...(19): siRNA sense strand
ggacucgggacuccuaugg

SEQ ID NO: 2198110 - RNA, 19 nt, Homo sapiens
  misc_RNA (1)...(19): siRNA sense strand
aaaggacugcugccaaaug

SEQ ID NO: 2198111 - RNA, 19 nt, Homo sapiens
  misc_RNA (1)...(19): siRNA sense strand
gcggcaaggagaucaagaa

SEQ ID NO: 2198112 - RNA, 19 nt, Homo sapiens
  misc_RNA (1)...(19): siRNA sense strand
gauguuuggagaccgguuu

SEQ ID NO: 2198113 - RNA, 19 nt, Homo sapiens
  misc_RNA (1)...(19): siRNA sense strand
aaaggcgaguuuauagaag

SEQ ID NO: 2198114 - RNA, 19 nt, Homo sapiens
  misc_RNA (1)...(19): siRNA sense strand
gcagaaaaggcgaguuuau

SEQ ID NO: 2198115 - RNA, 19 nt, Homo sapiens
  misc_RNA (1)...(19): siRNA sense strand
gaagcugcugccugacaaa

SEQ ID NO: 2198116 - RNA, 19 nt, Homo sapiens
  misc_RNA (1)...(19): siRNA sense strand
ucaagaagaagaagugcau

SEQ ID NO: 2198117 - RNA, 19 nt, Homo sapiens
  misc_RNA (1)...(19): siRNA sense strand
caggagaggagcccaagug

SEQ ID NO: 2198118 - RNA, 19 nt, Homo sapiens
  misc_RNA (1)...(19): siRNA sense strand
acagugggcagccgaaaga

SEQ ID NO: 2198119 - RNA, 19 nt, Homo sapiens
  misc_RNA (1)...(19): siRNA sense strand
cagauggccuguacuaccu

SEQ ID NO: 2198120 - RNA, 19 nt, Homo sapiens
  misc_RNA (1)...(19): siRNA sense strand
ggacagugggcagccgaaa

SEQ ID NO: 2198121 - RNA, 19 nt, Homo sapiens
  misc_RNA (1)...(19): siRNA sense strand
cauacagcaugccgguguu

SEQ ID NO: 2198122 - RNA, 19 nt, Homo sapiens
  misc_RNA (1)...(19): siRNA sense strand
gaggagauucuggccuuug

SEQ ID NO: 2198123 - RNA, 19 nt, Homo sapiens
  misc_RNA (1)...(19): siRNA sense strand
ugaggagauucuggccuuu

SEQ ID NO: 2198124 - RNA, 19 nt, Homo sapiens
  misc_RNA (1)...(19): siRNA sense strand
gggagaaguaccagguguu

SEQ ID NO: 2198125 - RNA, 19 nt, Homo sapiens
  misc_RNA (1)...(19): siRNA sense strand
gacagccacacauuugaga

SEQ ID NO: 2198126 - RNA, 19 nt, Homo sapiens
  misc_RNA (1)...(19): siRNA sense strand
cauugacagccacacauuu

SEQ ID NO: 2198127 - RNA, 19 nt, Homo sapiens
  misc_RNA (1)...(19): siRNA sense strand
cagaccuucuucucagaug

SEQ ID NO: 2198128 - RNA, 19 nt, Homo sapiens
  misc_RNA (1)...(19): siRNA sense strand
gaugcuauucccaguagug

SEQ ID NO: 2198129 - RNA, 19 nt, Homo sapiens
  misc_RNA (1)...(19): siRNA sense strand
gggaagcugcugccugaca

SEQ ID NO: 2198130 - RNA, 19 nt, Homo sapiens
  misc_RNA (1)...(19): siRNA sense strand
caccuggcccucuauaauc

SEQ ID NO: 2198131 - RNA, 19 nt, Homo sapiens
  misc_RNA (1)...(19): siRNA sense strand
ucgugacuuucgaagauaa

SEQ ID NO: 2198132 - RNA, 19 nt, Homo sapiens
  misc_RNA (1)...(19): siRNA sense strand
aaagagcaagccugguuug

SEQ ID NO: 2198133 - RNA, 19 nt, Homo sapiens
  misc_RNA (1)...(19): siRNA sense strand
uguacuaccucgggaagau

SEQ ID NO: 2198134 - RNA, 19 nt, Homo sapiens
  misc_RNA (1)...(19): siRNA sense strand
ggcaaggagaucaagaaga

SEQ ID NO: 2198135 - RNA, 19 nt, Homo sapiens
  misc_RNA (1)...(19): siRNA sense strand
uacagagcaagaagaagua

SEQ ID NO: 2198136 - RNA, 19 nt, Homo sapiens
  misc_RNA (1)...(19): siRNA sense strand
aaggagaucaagaagaaga

SEQ ID NO: 2198137 - RNA, 19 nt, Homo sapiens
  misc_RNA (1)...(19): siRNA sense strand
guuuguugccucacgaauu

SEQ ID NO: 2198138 - RNA, 19 nt, Homo sapiens
  misc_RNA (1)...(19): siRNA sense strand
ugucccaccucaagucauc

SEQ ID NO: 2198139 - RNA, 19 nt, Homo sapiens
  misc_RNA (1)...(19): siRNA sense strand
cgaauuccagcagcagaaa

SEQ ID NO: 2198140 - RNA, 19 nt, Homo sapiens
  misc_RNA (1)...(19): siRNA sense strand
uaaccagggcccagaguac

SEQ ID NO: 2198141 - RNA, 19 nt, Homo sapiens
  misc_RNA (1)...(19): siRNA sense strand
ucaagucaucuaucaccaa

SEQ ID NO: 2198142 - RNA, 19 nt, Homo sapiens
  misc_RNA (1)...(19): siRNA sense strand
agagcaagccugguuuguu

SEQ ID NO: 2198143 - RNA, 19 nt, Homo sapiens
  misc_RNA (1)...(19): siRNA sense strand
gagcugcguaagagaggaa

SEQ ID NO: 2198144 - RNA, 19 nt, Homo sapiens
  misc_RNA (1)...(19): siRNA sense strand
cagcagcucuaagcaaagc

SEQ ID NO: 2198145 - RNA, 19 nt, Homo sapiens
  misc_RNA (1)...(19): siRNA sense strand
agagcaagaagaaguacuu

SEQ ID NO: 2198146 - RNA, 19 nt, Homo sapiens
  misc_RNA (1)...(19): siRNA sense strand
caucuaucaccaacuacuu

SEQ ID NO: 2198147 - RNA, 19 nt, Homo sapiens
  misc_RNA (1)...(19): siRNA sense strand
gauggaaucuaccucauua

SEQ ID NO: 2198148 - RNA, 19 nt, Homo sapiens
  misc_RNA (1)...(19): siRNA sense strand
gaaucuaccucauuaaaga

SEQ ID NO: 2198149 - RNA, 19 nt, Homo sapiens
  misc_RNA (1)...(19): siRNA sense strand
gcaaaccucuccuuaucga

SEQ ID NO: 2198150 - RNA, 19 nt, Homo sapiens
  misc_RNA (1)...(19): siRNA sense strand
gcacuuaaccaacuauuca

SEQ ID NO: 2198151 - RNA, 19 nt, Homo sapiens
  misc_RNA (1)...(19): siRNA sense strand
ucaagaaggucuggucuga

SEQ ID NO: 2198152 - RNA, 19 nt, Homo sapiens
  misc_RNA (1)...(19): siRNA sense strand
ggucuggucugacaucauc

SEQ ID NO: 2198153 - RNA, 19 nt, Homo sapiens
  misc_RNA (1)...(19): siRNA sense strand
cugcaaaccucuccuuauc

SEQ ID NO: 2198154 - RNA, 19 nt, Homo sapiens
  misc_RNA (1)...(19): siRNA sense strand
uuaaccaacuauucacuga

SEQ ID NO: 2198155 - RNA, 19 nt, Homo sapiens
  misc_RNA (1)...(19): siRNA sense strand
cagcggugguccaggagua

SEQ ID NO: 2198156 - RNA, 19 nt, Homo sapiens
  misc_RNA (1)...(19): siRNA sense strand
aagaaggucuggucugaca

SEQ ID NO: 2198157 - RNA, 19 nt, Homo sapiens
  misc_RNA (1)...(19): siRNA sense strand
ggaaucuaccucauuaaag

SEQ ID NO: 2198158 - RNA, 19 nt, Homo sapiens
  misc_RNA (1)...(19): siRNA sense strand
cuccagagcucaaagucuu

SEQ ID NO: 2198159 - RNA, 19 nt, Homo sapiens
  misc_RNA (1)...(19): siRNA sense strand
caaagucuucuaccaguca

SEQ ID NO: 2198160 - RNA, 19 nt, Homo sapiens
  misc_RNA (1)...(19): siRNA sense strand
ucaucuccguggugauuaa

SEQ ID NO: 2198161 - RNA, 19 nt, Homo sapiens
  misc_RNA (1)...(19): siRNA sense strand
gauauucgucuguaugucu

SEQ ID NO: 2198162 - RNA, 19 nt, Homo sapiens
  misc_RNA (1)...(19): siRNA sense strand
uggaaucuaccucauuaaa

SEQ ID NO: 2198163 - RNA, 19 nt, Homo sapiens
  misc_RNA (1)...(19): siRNA sense strand
aaaccugcaccgcaucuuu

SEQ ID NO: 2198164 - RNA, 19 nt, Homo sapiens
  misc_RNA (1)...(19): siRNA sense strand
aagacggacucucuagguu

SEQ ID NO: 2198165 - RNA, 19 nt, Homo sapiens
  misc_RNA (1)...(19): siRNA sense strand
gaaggucuggucugacauc

SEQ ID NO: 2198166 - RNA, 19 nt, Homo sapiens
  misc_RNA (1)...(19): siRNA sense strand
ccuuagagauuuauauagc

SEQ ID NO: 2198167 - RNA, 19 nt, Homo sapiens
  misc_RNA (1)...(19): siRNA sense strand
aaccugcaccgcaucuuua

SEQ ID NO: 2198168 - RNA, 19 nt, Homo sapiens
  misc_RNA (1)...(19): siRNA sense strand
agacggacucucuagguuu

SEQ ID NO: 2198169 - RNA, 19 nt, Homo sapiens
  misc_RNA (1)...(19): siRNA sense strand
uaucgacaagcucaaguuu

SEQ ID NO: 2198170 - RNA, 19 nt, Homo sapiens
  misc_RNA (1)...(19): siRNA sense strand
ccacagcggcaacuucauc

SEQ ID NO: 2198171 - RNA, 19 nt, Homo sapiens
  misc_RNA (1)...(19): siRNA sense strand
ccaaagacggacucucuag

SEQ ID NO: 2198172 - RNA, 19 nt, Homo sapiens
  misc_RNA (1)...(19): siRNA sense strand
gacggacucucuagguuuu

SEQ ID NO: 2198173 - RNA, 19 nt, Homo sapiens
  misc_RNA (1)...(19): siRNA sense strand
gccaaagacggacucucua

SEQ ID NO: 2198174 - RNA, 19 nt, Homo sapiens
  misc_RNA (1)...(19): siRNA sense strand
ucagggugauggaaucuac

SEQ ID NO: 2198175 - RNA, 19 nt, Homo sapiens
  misc_RNA (1)...(19): siRNA sense strand
ugauggaaucuaccucauu

SEQ ID NO: 2198176 - RNA, 19 nt, Homo sapiens
  misc_RNA (1)...(19): siRNA sense strand
cuguaugucuuacucaagu

SEQ ID NO: 2198177 - RNA, 19 nt, Homo sapiens
  misc_RNA (1)...(19): siRNA sense strand
aaagacggacucucuaggu

SEQ ID NO: 2198178 - RNA, 19 nt, Homo sapiens
  misc_RNA (1)...(19): siRNA sense strand
uuuaugcacuuaaccaacu

SEQ ID NO: 2198179 - RNA, 19 nt, Homo sapiens
  misc_RNA (1)...(19): siRNA sense strand
gugauggaaucuaccucau

SEQ ID NO: 2198180 - RNA, 19 nt, Homo sapiens
  misc_RNA (1)...(19): siRNA sense strand
ccaggaguacaucugcaaa

SEQ ID NO: 2198181 - RNA, 19 nt, Homo sapiens
  misc_RNA (1)...(19): siRNA sense strand
uuaugcacuuaaccaacua

SEQ ID NO: 2198182 - RNA, 19 nt, Homo sapiens
  misc_RNA (1)...(19): siRNA sense strand
gauggaaucuaccucauua

SEQ ID NO: 2198183 - RNA, 19 nt, Homo sapiens
  misc_RNA (1)...(19): siRNA sense strand
gaaucuaccucauuaaaga

SEQ ID NO: 2198184 - RNA, 19 nt, Homo sapiens
  misc_RNA (1)...(19): siRNA sense strand
gcaaaccucuccuuaucga

SEQ ID NO: 2198185 - RNA, 19 nt, Homo sapiens
  misc_RNA (1)...(19): siRNA sense strand
gcacuuaaccaacuauuca

SEQ ID NO: 2198186 - RNA, 19 nt, Homo sapiens
  misc_RNA (1)...(19): siRNA sense strand
ucaagaaggucuggucuga

SEQ ID NO: 2198187 - RNA, 19 nt, Homo sapiens
  misc_RNA (1)...(19): siRNA sense strand
ucacgacaaugacauauuc

SEQ ID NO: 2198188 - RNA, 19 nt, Homo sapiens
  misc_RNA (1)...(19): siRNA sense strand
ggucuggucugacaucauc

SEQ ID NO: 2198189 - RNA, 19 nt, Homo sapiens
  misc_RNA (1)...(19): siRNA sense strand
gcgcuugccuugugacauc

SEQ ID NO: 2198190 - RNA, 19 nt, Homo sapiens
  misc_RNA (1)...(19): siRNA sense strand
cugcaaaccucuccuuauc

SEQ ID NO: 2198191 - RNA, 19 nt, Homo sapiens
  misc_RNA (1)...(19): siRNA sense strand
uuaaccaacuauucacuga

SEQ ID NO: 2198192 - RNA, 19 nt, Homo sapiens
  misc_RNA (1)...(19): siRNA sense strand
cagcggugguccaggagua

SEQ ID NO: 2198193 - RNA, 19 nt, Homo sapiens
  misc_RNA (1)...(19): siRNA sense strand
ggcauggaguuucauuuca

SEQ ID NO: 2198194 - RNA, 19 nt, Homo sapiens
  misc_RNA (1)...(19): siRNA sense strand
aagaaggucuggucugaca

SEQ ID NO: 2198195 - RNA, 19 nt, Homo sapiens
  misc_RNA (1)...(19): siRNA sense strand
cuacuggcauggaguuuca

SEQ ID NO: 2198196 - RNA, 19 nt, Homo sapiens
  misc_RNA (1)...(19): siRNA sense strand
ggaaucuaccucauuaaag

SEQ ID NO: 2198197 - RNA, 19 nt, Homo sapiens
  misc_RNA (1)...(19): siRNA sense strand
cuccagagcucaaagucuu

SEQ ID NO: 2198198 - RNA, 19 nt, Homo sapiens
  misc_RNA (1)...(19): siRNA sense strand
cauauucuccggucaagug

SEQ ID NO: 2198199 - RNA, 19 nt, Homo sapiens
  misc_RNA (1)...(19): siRNA sense strand
caaagucuucuaccaguca

SEQ ID NO: 2198200 - RNA, 19 nt, Homo sapiens
  misc_RNA (1)...(19): siRNA sense strand
ucaucuccguggugauuaa

SEQ ID NO: 2198201 - RNA, 19 nt, Homo sapiens
  misc_RNA (1)...(19): siRNA sense strand
ccggucaagugaacaaguu

SEQ ID NO: 2198202 - RNA, 19 nt, Homo sapiens
  misc_RNA (1)...(19): siRNA sense strand
gauauucgucuguaugucu

SEQ ID NO: 2198203 - RNA, 19 nt, Homo sapiens
  misc_RNA (1)...(19): siRNA sense strand
gcauggaguuucauuucac

SEQ ID NO: 2198204 - RNA, 19 nt, Homo sapiens
  misc_RNA (1)...(19): siRNA sense strand
aaaccugcaccgcaucuuu

SEQ ID NO: 2198205 - RNA, 19 nt, Homo sapiens
  misc_RNA (1)...(19): siRNA sense strand
uggaaucuaccucauuaaa

SEQ ID NO: 2198206 - RNA, 19 nt, Homo sapiens
  misc_RNA (1)...(19): siRNA sense strand
gaguuucauuucacgacaa

SEQ ID NO: 2198207 - RNA, 19 nt, Homo sapiens
  misc_RNA (1)...(19): siRNA sense strand
gaaggucuggucugacauc

SEQ ID NO: 2198208 - RNA, 19 nt, Homo sapiens
  misc_RNA (1)...(19): siRNA sense strand
aagacggacucucuagguu

SEQ ID NO: 2198209 - RNA, 19 nt, Homo sapiens
  misc_RNA (1)...(19): siRNA sense strand
ccuuagagauuuauauagc

SEQ ID NO: 2198210 - RNA, 19 nt, Homo sapiens
  misc_RNA (1)...(19): siRNA sense strand
aaccugcaccgcaucuuua

SEQ ID NO: 2198211 - RNA, 19 nt, Homo sapiens
  misc_RNA (1)...(19): siRNA sense strand
agacggacucucuagguuu

SEQ ID NO: 2198212 - RNA, 19 nt, Homo sapiens
  misc_RNA (1)...(19): siRNA sense strand
uaucgacaagcucaaguuu

SEQ ID NO: 2198213 - RNA, 19 nt, Homo sapiens
  misc_RNA (1)...(19): siRNA sense strand
ccacagcggcaacuucauc

SEQ ID NO: 2198214 - RNA, 19 nt, Homo sapiens
  misc_RNA (1)...(19): siRNA sense strand
ccaaagacggacucucuag

SEQ ID NO: 2198215 - RNA, 19 nt, Homo sapiens
  misc_RNA (1)...(19): siRNA sense strand
ggaacacccagguccuuca

SEQ ID NO: 2198216 - RNA, 19 nt, Homo sapiens
  misc_RNA (1)...(19): siRNA sense strand
gacggacucucuagguuuu

SEQ ID NO: 2198217 - RNA, 19 nt, Homo sapiens
  misc_RNA (1)...(19): siRNA sense strand
gccaaagacggacucucua

SEQ ID NO: 2198218 - RNA, 19 nt, Homo sapiens
  misc_RNA (1)...(19): siRNA sense strand
ucagggugauggaaucuac

SEQ ID NO: 2198219 - RNA, 19 nt, Homo sapiens
  misc_RNA (1)...(19): siRNA sense strand
gacauauucuccggucaag

SEQ ID NO: 2198220 - RNA, 19 nt, Homo sapiens
  misc_RNA (1)...(19): siRNA sense strand
ugauggaaucuaccucauu

SEQ ID NO: 2198221 - RNA, 19 nt, Homo sapiens
  misc_RNA (1)...(19): siRNA sense strand
cuguaugucuuacucaagu

SEQ ID NO: 2198222 - RNA, 19 nt, Homo sapiens
  misc_RNA (1)...(19): siRNA sense strand
uggcauggaguuucauuuc

SEQ ID NO: 2198223 - RNA, 19 nt, Homo sapiens
  misc_RNA (1)...(19): siRNA sense strand
gugauggaaucuaccucau

SEQ ID NO: 2198224 - RNA, 19 nt, Homo sapiens
  misc_RNA (1)...(19): siRNA sense strand
uuuaugcacuuaaccaacu

SEQ ID NO: 2198225 - RNA, 19 nt, Homo sapiens
  misc_RNA (1)...(19): siRNA sense strand
aaagacggacucucuaggu

SEQ ID NO: 2198226 - RNA, 19 nt, Homo sapiens
  misc_RNA (1)...(19): siRNA sense strand
ccaggaguacaucugcaaa

SEQ ID NO: 2198227 - RNA, 19 nt, Homo sapiens
  misc_RNA (1)...(19): siRNA sense strand
gaacacccagguccuucag

SEQ ID NO: 2198228 - RNA, 19 nt, Homo sapiens
  misc_RNA (1)...(19): siRNA sense strand
uuaugcacuuaaccaacua

SEQ ID NO: 2198229 - RNA, 19 nt, Homo sapiens
  misc_RNA (1)...(19): siRNA sense strand
gaagaucgcuugcaagaaa

SEQ ID NO: 2198230 - RNA, 19 nt, Homo sapiens
  misc_RNA (1)...(19): siRNA sense strand
ucacagagcucuucagaua

SEQ ID NO: 2198231 - RNA, 19 nt, Homo sapiens
  misc_RNA (1)...(19): siRNA sense strand
ucaaauagcugaagcaauu

SEQ ID NO: 2198232 - RNA, 19 nt, Homo sapiens
  misc_RNA (1)...(19): siRNA sense strand
gaauggcucuugacaauuu

SEQ ID NO: 2198233 - RNA, 19 nt, Homo sapiens
  misc_RNA (1)...(19): siRNA sense strand
caggaacgcuuauauguaa

SEQ ID NO: 2198234 - RNA, 19 nt, Homo sapiens
  misc_RNA (1)...(19): siRNA sense strand
gcagaacugugguuuauau

SEQ ID NO: 2198235 - RNA, 19 nt, Homo sapiens
  misc_RNA (1)...(19): siRNA sense strand
gaaaugacucccuacaaua

SEQ ID NO: 2198236 - RNA, 19 nt, Homo sapiens
  misc_RNA (1)...(19): siRNA sense strand
ggaaacagauccaaacaag

SEQ ID NO: 2198237 - RNA, 19 nt, Homo sapiens
  misc_RNA (1)...(19): siRNA sense strand
agaaugugcucuacgauua

SEQ ID NO: 2198238 - RNA, 19 nt, Homo sapiens
  misc_RNA (1)...(19): siRNA sense strand
gaacauauccagagauugu

SEQ ID NO: 2198239 - RNA, 19 nt, Homo sapiens
  misc_RNA (1)...(19): siRNA sense strand
gaagagguguuggucauuu

SEQ ID NO: 2198240 - RNA, 19 nt, Homo sapiens
  misc_RNA (1)...(19): siRNA sense strand
gagcagaacugugguuuau

SEQ ID NO: 2198241 - RNA, 19 nt, Homo sapiens
  misc_RNA (1)...(19): siRNA sense strand
caggagcucugauauagua

SEQ ID NO: 2198242 - RNA, 19 nt, Homo sapiens
  misc_RNA (1)...(19): siRNA sense strand
ucagauagauucaggcaaa

SEQ ID NO: 2198243 - RNA, 19 nt, Homo sapiens
  misc_RNA (1)...(19): siRNA sense strand
gagcagccuuggaaaguuu

SEQ ID NO: 2198244 - RNA, 19 nt, Homo sapiens
  misc_RNA (1)...(19): siRNA sense strand
gcaaagauagcgaugauga

SEQ ID NO: 2198245 - RNA, 19 nt, Homo sapiens
  misc_RNA (1)...(19): siRNA sense strand
gaaggaucaucucaagaaa

SEQ ID NO: 2198246 - RNA, 19 nt, Homo sapiens
  misc_RNA (1)...(19): siRNA sense strand
gaaaggcuauugcaaagag

SEQ ID NO: 2198247 - RNA, 19 nt, Homo sapiens
  misc_RNA (1)...(19): siRNA sense strand
gagaagggcucagauagau

SEQ ID NO: 2198248 - RNA, 19 nt, Homo sapiens
  misc_RNA (1)...(19): siRNA sense strand
ucagaaaucaggacaauaa

SEQ ID NO: 2198249 - RNA, 19 nt, Homo sapiens
  misc_RNA (1)...(19): siRNA sense strand
ggagacugcuuauggagaa

SEQ ID NO: 2198250 - RNA, 19 nt, Homo sapiens
  misc_RNA (1)...(19): siRNA sense strand
uagaauggcucuugacaau

SEQ ID NO: 2198251 - RNA, 19 nt, Homo sapiens
  misc_RNA (1)...(19): siRNA sense strand
aggauaaccuugaugauaa

SEQ ID NO: 2198252 - RNA, 19 nt, Homo sapiens
  misc_RNA (1)...(19): siRNA sense strand
ggagagaagggcucagaua

SEQ ID NO: 2198253 - RNA, 19 nt, Homo sapiens
  misc_RNA (1)...(19): siRNA sense strand
gagauugucuaaaguagug

SEQ ID NO: 2198254 - RNA, 19 nt, Homo sapiens
  misc_RNA (1)...(19): siRNA sense strand
uaauaggacuuguaggaaa

SEQ ID NO: 2198255 - RNA, 19 nt, Homo sapiens
  misc_RNA (1)...(19): siRNA sense strand
gaauccagcugucuucuag

SEQ ID NO: 2198256 - RNA, 19 nt, Homo sapiens
  misc_RNA (1)...(19): siRNA sense strand
gcaccaauaugcuaaugga

SEQ ID NO: 2198257 - RNA, 19 nt, Homo sapiens
  misc_RNA (1)...(19): siRNA sense strand
gaacugugguuuauauaac

SEQ ID NO: 2198258 - RNA, 19 nt, Homo sapiens
  misc_RNA (1)...(19): siRNA sense strand
gauaauaggacuuguagga

SEQ ID NO: 2198259 - RNA, 19 nt, Homo sapiens
  misc_RNA (1)...(19): siRNA sense strand
gcaggaacgcuuauaugua

SEQ ID NO: 2198260 - RNA, 19 nt, Homo sapiens
  misc_RNA (1)...(19): siRNA sense strand
gaaaucaggacaauaagug

SEQ ID NO: 2198261 - RNA, 19 nt, Homo sapiens
  misc_RNA (1)...(19): siRNA sense strand
agaaaugacucccuacaau

SEQ ID NO: 2198262 - RNA, 19 nt, Homo sapiens
  misc_RNA (1)...(19): siRNA sense strand
gaagaucagggaauucauu

SEQ ID NO: 2198263 - RNA, 19 nt, Homo sapiens
  misc_RNA (1)...(19): siRNA sense strand
ggaaacugcuggcuucgau

SEQ ID NO: 2198264 - RNA, 19 nt, Homo sapiens
  misc_RNA (1)...(19): siRNA sense strand
ggagaauucuugagucgau

SEQ ID NO: 2198265 - RNA, 19 nt, Homo sapiens
  misc_RNA (1)...(19): siRNA sense strand
gagaucaacugagagaaga

SEQ ID NO: 2198266 - RNA, 19 nt, Homo sapiens
  misc_RNA (1)...(19): siRNA sense strand
aagaaucgauuaccuauag

SEQ ID NO: 2198267 - RNA, 19 nt, Homo sapiens
  misc_RNA (1)...(19): siRNA sense strand
ccagaacaauauggaauaa

SEQ ID NO: 2198268 - RNA, 19 nt, Homo sapiens
  misc_RNA (1)...(19): siRNA sense strand
ucucaacacucacagauga

SEQ ID NO: 2198269 - RNA, 19 nt, Homo sapiens
  misc_RNA (1)...(19): siRNA sense strand
gcagaagccgcaccaauau

SEQ ID NO: 2198270 - RNA, 19 nt, Homo sapiens
  misc_RNA (1)...(19): siRNA sense strand
ucaaacagaacacauauug

SEQ ID NO: 2198271 - RNA, 19 nt, Homo sapiens
  misc_RNA (1)...(19): siRNA sense strand
gcuuauauguaaacucuga

SEQ ID NO: 2198272 - RNA, 19 nt, Homo sapiens
  misc_RNA (1)...(19): siRNA sense strand
guagagguauugccaagug

SEQ ID NO: 2198273 - RNA, 19 nt, Homo sapiens
  misc_RNA (1)...(19): siRNA sense strand
uaagacagcugaaaaguug

SEQ ID NO: 2198274 - RNA, 19 nt, Homo sapiens
  misc_RNA (1)...(19): siRNA sense strand
caacagagaaucaauuugg

SEQ ID NO: 2198275 - RNA, 19 nt, Homo sapiens
  misc_RNA (1)...(19): siRNA sense strand
caccgcagcugacgauaaa

SEQ ID NO: 2198276 - RNA, 19 nt, Homo sapiens
  misc_RNA (1)...(19): siRNA sense strand
ggauucagcuuucucuuac

SEQ ID NO: 2198277 - RNA, 19 nt, Homo sapiens
  misc_RNA (1)...(19): siRNA sense strand
gaaccggcguccaggaaau

SEQ ID NO: 2198278 - RNA, 19 nt, Homo sapiens
  misc_RNA (1)...(19): siRNA sense strand
gugauaaucuggaaggaau

SEQ ID NO: 2198279 - RNA, 19 nt, Homo sapiens
  misc_RNA (1)...(19): siRNA sense strand
caaccacuccagcaaauaa

SEQ ID NO: 2198280 - RNA, 19 nt, Homo sapiens
  misc_RNA (1)...(19): siRNA sense strand
ggaaaauccucgucuuauu

SEQ ID NO: 2198281 - RNA, 19 nt, Homo sapiens
  misc_RNA (1)...(19): siRNA sense strand
gagaacauguuaggcaguu

SEQ ID NO: 2198282 - RNA, 19 nt, Homo sapiens
  misc_RNA (1)...(19): siRNA sense strand
ucuaauggcucaacuucaa

SEQ ID NO: 2198283 - RNA, 19 nt, Homo sapiens
  misc_RNA (1)...(19): siRNA sense strand
uaaagcuccuauaccauuu

SEQ ID NO: 2198284 - RNA, 19 nt, Homo sapiens
  misc_RNA (1)...(19): siRNA sense strand
uaagguggaucgugucuca

SEQ ID NO: 2198285 - RNA, 19 nt, Homo sapiens
  misc_RNA (1)...(19): siRNA sense strand
gcgaccagguucuucauga

SEQ ID NO: 2198286 - RNA, 19 nt, Homo sapiens
  misc_RNA (1)...(19): siRNA sense strand
gaaacaaugcgcugugugu

SEQ ID NO: 2198287 - RNA, 19 nt, Homo sapiens
  misc_RNA (1)...(19): siRNA sense strand
ggccaaagguucacuaugc

SEQ ID NO: 2198288 - RNA, 19 nt, Homo sapiens
  misc_RNA (1)...(19): siRNA sense strand
uaaccuugaugauaagcua

SEQ ID NO: 2198289 - RNA, 19 nt, Homo sapiens
  misc_RNA (1)...(19): siRNA sense strand
caggauaaccuugaugaua

SEQ ID NO: 2198290 - RNA, 19 nt, Homo sapiens
  misc_RNA (1)...(19): siRNA sense strand
caacacaggauaaccuuga

SEQ ID NO: 2198291 - RNA, 19 nt, Homo sapiens
  misc_RNA (1)...(19): siRNA sense strand
ucaaaucgcuccaauucag

SEQ ID NO: 2198292 - RNA, 19 nt, Homo sapiens
  misc_RNA (1)...(19): siRNA sense strand
agacauggaugaaauaacu

SEQ ID NO: 2198293 - RNA, 19 nt, Homo sapiens
  misc_RNA (1)...(19): siRNA sense strand
cuaaggaaguuugaaauuc

SEQ ID NO: 2198294 - RNA, 19 nt, Homo sapiens
  misc_RNA (1)...(19): siRNA sense strand
ugaaguagcacgauuuaau

SEQ ID NO: 2198295 - RNA, 19 nt, Homo sapiens
  misc_RNA (1)...(19): siRNA sense strand
agauagcgaugaugagaaa

SEQ ID NO: 2198296 - RNA, 19 nt, Homo sapiens
  misc_RNA (1)...(19): siRNA sense strand
gcuaaggaaguuugaaauu

SEQ ID NO: 2198297 - RNA, 19 nt, Homo sapiens
  misc_RNA (1)...(19): siRNA sense strand
gaaaacaaacuccauggua

SEQ ID NO: 2198298 - RNA, 19 nt, Homo sapiens
  misc_RNA (1)...(19): siRNA sense strand
acaaggagaugucccuguu

SEQ ID NO: 2198299 - RNA, 19 nt, Homo sapiens
  misc_RNA (1)...(19): siRNA sense strand
ugaaggaucaucucaagaa

SEQ ID NO: 2198300 - RNA, 19 nt, Homo sapiens
  misc_RNA (1)...(19): siRNA sense strand
gagaaacagcucauucaga

SEQ ID NO: 2198301 - RNA, 19 nt, Homo sapiens
  misc_RNA (1)...(19): siRNA sense strand
gcaguucacagcagcagua

SEQ ID NO: 2198302 - RNA, 19 nt, Homo sapiens
  misc_RNA (1)...(19): siRNA sense strand
gagcaauggcaaacuauga

SEQ ID NO: 2198303 - RNA, 19 nt, Homo sapiens
  misc_RNA (1)...(19): siRNA sense strand
ccuauaccauuuagaaaga

SEQ ID NO: 2198304 - RNA, 19 nt, Homo sapiens
  misc_RNA (1)...(19): siRNA sense strand
cagcugaccucuccuccuu

SEQ ID NO: 2198305 - RNA, 19 nt, Homo sapiens
  misc_RNA (1)...(19): siRNA sense strand
acaaagagcagccuuggaa

SEQ ID NO: 2198306 - RNA, 19 nt, Homo sapiens
  misc_RNA (1)...(19): siRNA sense strand
gaagggcucagauagauuc

SEQ ID NO: 2198307 - RNA, 19 nt, Homo sapiens
  misc_RNA (1)...(19): siRNA sense strand
gauccaaacaagcuaauug

SEQ ID NO: 2198308 - RNA, 19 nt, Homo sapiens
  misc_RNA (1)...(19): siRNA sense strand
gagaaugugcucuacgauu

SEQ ID NO: 2198309 - RNA, 19 nt, Homo sapiens
  misc_RNA (1)...(19): siRNA sense strand
ccagagauugucuaaagua

SEQ ID NO: 2198310 - RNA, 19 nt, Homo sapiens
  misc_RNA (1)...(19): siRNA sense strand
aaacugaggcuugcucuuu

SEQ ID NO: 2198311 - RNA, 19 nt, Homo sapiens
  misc_RNA (1)...(19): siRNA sense strand
aaacuuugguucccauguu

SEQ ID NO: 2198312 - RNA, 19 nt, Homo sapiens
  misc_RNA (1)...(19): siRNA sense strand
guaaagauucugucacuag

SEQ ID NO: 2198313 - RNA, 19 nt, Homo sapiens
  misc_RNA (1)...(19): siRNA sense strand
gaacauguuaggcaguuug

SEQ ID NO: 2198314 - RNA, 19 nt, Homo sapiens
  misc_RNA (1)...(19): siRNA sense strand
gcuaauggaccuacauaug

SEQ ID NO: 2198315 - RNA, 19 nt, Homo sapiens
  misc_RNA (1)...(19): siRNA sense strand
gaggcucaaugcagaugua

SEQ ID NO: 2198316 - RNA, 19 nt, Homo sapiens
  misc_RNA (1)...(19): siRNA sense strand
guagauaggcuggaaguug

SEQ ID NO: 2198317 - RNA, 19 nt, Homo sapiens
  misc_RNA (1)...(19): siRNA sense strand
ccaaacaagcuaauugaga

SEQ ID NO: 2198318 - RNA, 19 nt, Homo sapiens
  misc_RNA (1)...(19): siRNA sense strand
gacagauucucaacacuca

SEQ ID NO: 2198319 - RNA, 19 nt, Homo sapiens
  misc_RNA (1)...(19): siRNA sense strand
cagcauggauugcgaagca

SEQ ID NO: 2198320 - RNA, 19 nt, Homo sapiens
  misc_RNA (1)...(19): siRNA sense strand
ucaagcaaaggcauucuua

SEQ ID NO: 2198321 - RNA, 19 nt, Homo sapiens
  misc_RNA (1)...(19): siRNA sense strand
gaugaaauaacucacgauu

SEQ ID NO: 2198322 - RNA, 19 nt, Homo sapiens
  misc_RNA (1)...(19): siRNA sense strand
uaauggaguugaagcucua

SEQ ID NO: 2198323 - RNA, 19 nt, Homo sapiens
  misc_RNA (1)...(19): siRNA sense strand
ugaaauucgugacaugaug

SEQ ID NO: 2198324 - RNA, 19 nt, Homo sapiens
  misc_RNA (1)...(19): siRNA sense strand
cgauaaaacugcucaggua

SEQ ID NO: 2198325 - RNA, 19 nt, Homo sapiens
  misc_RNA (1)...(19): siRNA sense strand
cuaaagcuccuauaccauu

SEQ ID NO: 2198326 - RNA, 19 nt, Homo sapiens
  misc_RNA (1)...(19): siRNA sense strand
cgaagcaggagcucugaua

SEQ ID NO: 2198327 - RNA, 19 nt, Homo sapiens
  misc_RNA (1)...(19): siRNA sense strand
gauccacugucuucacaug

SEQ ID NO: 2198328 - RNA, 19 nt, Homo sapiens
  misc_RNA (1)...(19): siRNA sense strand
uaucagagacaacaaguga

SEQ ID NO: 2198329 - RNA, 19 nt, Homo sapiens
  misc_RNA (1)...(19): siRNA sense strand
gaaagacggcuuauuuaaa

SEQ ID NO: 2198330 - RNA, 19 nt, Homo sapiens
  misc_RNA (1)...(19): siRNA sense strand
caucaaaucucuagcagaa

SEQ ID NO: 2198331 - RNA, 19 nt, Homo sapiens
  misc_RNA (1)...(19): siRNA sense strand
ggaaagacggcuuauuuaa

SEQ ID NO: 2198332 - RNA, 19 nt, Homo sapiens
  misc_RNA (1)...(19): siRNA sense strand
aagaagaggcugugcauua

SEQ ID NO: 2198333 - RNA, 19 nt, Homo sapiens
  misc_RNA (1)...(19): siRNA sense strand
ucagaagccuugccagaaa

SEQ ID NO: 2198334 - RNA, 19 nt, Homo sapiens
  misc_RNA (1)...(19): siRNA sense strand
aauccaagguuaccagaua

SEQ ID NO: 2198335 - RNA, 19 nt, Homo sapiens
  misc_RNA (1)...(19): siRNA sense strand
agaagaggcugugcauuaa

SEQ ID NO: 2198336 - RNA, 19 nt, Homo sapiens
  misc_RNA (1)...(19): siRNA sense strand
gcacaucucccuaacacuu

SEQ ID NO: 2198337 - RNA, 19 nt, Homo sapiens
  misc_RNA (1)...(19): siRNA sense strand
ucaaaucucuagcagaaau

SEQ ID NO: 2198338 - RNA, 19 nt, Homo sapiens
  misc_RNA (1)...(19): siRNA sense strand
caccaugccugaagucaaa

SEQ ID NO: 2198339 - RNA, 19 nt, Homo sapiens
  misc_RNA (1)...(19): siRNA sense strand
gaacagaccaguccaccau

SEQ ID NO: 2198340 - RNA, 19 nt, Homo sapiens
  misc_RNA (1)...(19): siRNA sense strand
caacggaagcugcgauuug

SEQ ID NO: 2198341 - RNA, 19 nt, Homo sapiens
  misc_RNA (1)...(19): siRNA sense strand
gacaggcuaugacguaguu

SEQ ID NO: 2198342 - RNA, 19 nt, Homo sapiens
  misc_RNA (1)...(19): siRNA sense strand
gggaacguguuaguagaua

SEQ ID NO: 2198343 - RNA, 19 nt, Homo sapiens
  misc_RNA (1)...(19): siRNA sense strand
uggaaagacggcuuauuua

SEQ ID NO: 2198344 - RNA, 19 nt, Homo sapiens
  misc_RNA (1)...(19): siRNA sense strand
gaagaggcugugcauuaaa

SEQ ID NO: 2198345 - RNA, 19 nt, Homo sapiens
  misc_RNA (1)...(19): siRNA sense strand
ugacguaguugcacagaca

SEQ ID NO: 2198346 - RNA, 19 nt, Homo sapiens
  misc_RNA (1)...(19): siRNA sense strand
cuggaaagacggcuuauuu

SEQ ID NO: 2198347 - RNA, 19 nt, Homo sapiens
  misc_RNA (1)...(19): siRNA sense strand
ggaacguguuaguagauau

SEQ ID NO: 2198348 - RNA, 19 nt, Homo sapiens
  misc_RNA (1)...(19): siRNA sense strand
gacagcagaugguguggau

SEQ ID NO: 2198349 - RNA, 19 nt, Homo sapiens
  misc_RNA (1)...(19): siRNA sense strand
uaccagcacuccaauuugu

SEQ ID NO: 2198350 - RNA, 19 nt, Homo sapiens
  misc_RNA (1)...(19): siRNA sense strand
gaacguguuaguagauaug

SEQ ID NO: 2198351 - RNA, 19 nt, Homo sapiens
  misc_RNA (1)...(19): siRNA sense strand
gaaucaccaucaaaucucu

SEQ ID NO: 2198352 - RNA, 19 nt, Homo sapiens
  misc_RNA (1)...(19): siRNA sense strand
ggaagaagaggcugugcau

SEQ ID NO: 2198353 - RNA, 19 nt, Homo sapiens
  misc_RNA (1)...(19): siRNA sense strand
gaaggagcacaccaauaug

SEQ ID NO: 2198354 - RNA, 19 nt, Homo sapiens
  misc_RNA (1)...(19): siRNA sense strand
aagaggcugugcauuaaau

SEQ ID NO: 2198355 - RNA, 19 nt, Homo sapiens
  misc_RNA (1)...(19): siRNA sense strand
caagaucauuuuccaaaga

SEQ ID NO: 2198356 - RNA, 19 nt, Homo sapiens
  misc_RNA (1)...(19): siRNA sense strand
gggaaucaccaucaaaucu

SEQ ID NO: 2198357 - RNA, 19 nt, Homo sapiens
  misc_RNA (1)...(19): siRNA sense strand
gaggcugugcauuaaauuu

SEQ ID NO: 2198358 - RNA, 19 nt, Homo sapiens
  misc_RNA (1)...(19): siRNA sense strand
gggcagaguaccaagaaau

SEQ ID NO: 2198359 - RNA, 19 nt, Homo sapiens
  misc_RNA (1)...(19): siRNA sense strand
gaagaagaggcugugcauu

SEQ ID NO: 2198360 - RNA, 19 nt, Homo sapiens
  misc_RNA (1)...(19): siRNA sense strand
cacaacgccuucccaguca
